United States Patent Application Publication US 2007/0042382 A1 - sequence listing, part 9

SEQ ID NO: 28869 - DNA, 201 bp, Homo sapiens
agtttttgttgttctagccagagagaaccatttgacatctgataggtggctacatggagacacttaacactctgggaggatacagcgtaccagagagactrccattatgactatcatgaggatcacaccaagcatttagagtatgctcctaagccagggtttttatgaaccaaatcaactaaaattgtatagccaaacaag

SEQ ID NO: 28870 - DNA, 201 bp, Homo sapiens
acctggggtcgggagttcaagaccagcctggccaacatggtgaaaccccatctctactaaaaatacaaaaattagctaggtgtggtggtacatgccggtastcccagctatttgggaggctgaggcaggaggatggtttgagcctgggagatggaggttgtagtgagccgagatcacaccattgtattccagcctggacgg

SEQ ID NO: 28871 - DNA, 201 bp, Homo sapiens
tgtagttccagctacttaggaggctaagatgggaggatcacttgagcctagaagttggaggctgcagtgagctgtgatggtgcccctgcattccagcctgsgcaacagagcaagaccctgtctcaaaaaaaagctgaagcaaagaacaaagagtgtattggtcctttcagaattccttttttttgtaaggcagggacaggg

SEQ ID NO: 28872 - DNA, 201 bp, Homo sapiens
taaaattccatctctaccaaaaatacaaaaaaattagctgggtgccaggcacagtgcctcacacctataatcccagcactttgggaggccgaggcaagtgsatcacctggggtcgggagttcaagaccagcctggccaacatggtgaaaccccatctctactaaaaatacaaaaattagctaggtgtggtggtacatgccg

SEQ ID NO: 28873 - DNA, 201 bp, Homo sapiens
ctactaaaattacaaaaaattagccgggcatggtggcaggcgcctgtagtcccagctacttgtgaggctgaggcaggagaatcgcttgaacctgggaggtrgaggttgcagtgagccaagattgagccactgcactccacagcctggccacagagcgagactccgtctcgaaaaaaaaaaaaaggaacaaactatgatgtg

SEQ ID NO: 28874 - DNA, 201 bp, Homo sapiens
catgatggctcacgccaccatgtaatcccagcactttgggaggccatgacaggaggattgcttgaacccaggagttcaagaccagcctgggcaacatggtmaaattccatctctaccaaaaatacaaaaaaattagctgggtgccaggcacagtgcctcacacctataatcccagcactttgggaggccgaggcaagtgga

SEQ ID NO: 28875 - DNA, 201 bp, Homo sapiens
tttcaccacatttggccaggctggtcccgaactcctgaactcaggtgatccatccacctcagcctcccaaagtgctcggattacaggcatgagtcactgcrctcggcctcattttatttctcttctctggacattttccatcttaatactttcatcttgagatttgacacttaggactgcacagggcattttaggtgtgga

SEQ ID NO: 28876 - DNA, 201 bp, Homo sapiens
tgctatgtaaattagatatggatgtctccatccaattaaaatattaaacaagacaagaacaagacttttcaatggagaattcatccaagttgatactgctsacccagtagtaaagcattttttgagtaagatttaaccaccattcttaaatctagactgagtaggacagaaagggaaatccctgtgtttttaaattttaat

SEQ ID NO: 28877 - DNA, 201 bp, Homo sapiens
agagagtctcaccgccaaaccttaaaagacagggcccattgttttaataatatttggactttcctttcctatcttataaatgaattaaaagactggaaaaytattgggtttaacttctttagttaaggcactaaatgtgacagctttcccttaaaattgatgcttgagtcttcagtgagatacaattagctttccctgcac

SEQ ID NO: 28878 - DNA, 201 bp, Homo sapiens
gattttctcttatgcagagtaaatcccctcagcctccttgggtactcccacaggagtttcgctgaacagaagcctactttattccatacttggaattgttyccccccccccacctgaatttgtttgattcctgctaaaattcatttaattgattttctgccttaattccagtcttttgggggattttggaataatgggtca

SEQ ID NO: 28879 - DNA, 201 bp, Homo sapiens
catcttcttatgatggatgtgagtattaatgaaataatgcatataaaagggctttgtaaactgcacagcactgcacagttgtgcgatattttgataagagyagtgctctatatacatttctaatgtattcctcatggttatttatatcctggtaattttgaagccctgtccctgttttgtgtttgggaggtggggagggag

SEQ ID NO: 28880 - DNA, 201 bp, Homo sapiens
tttaccctcttactcacttcttagcccctttattaagccacctcattttaaactgggcaaaacagaatcagccaaagagctttgccaggtttgggacaccmattcatgaccagccagcaagagagacagtgagttcaatctgagaagagtctggtgactcccagaataaaccattccttcctggccagccgtggtggttca

SEQ ID NO: 28881 - DNA, 201 bp, Homo sapiens
taaggacgtgaggcagagagtcatacctcaggagaatgtacagcaccaggtagcattaaaggtccgcagtttaccaaagggtccagatggctgagtctaartagaaacactggagaagccaagagaagtggaaagtccagccttctgaatgcttttaatttggctacatagcaagcatacataggatgagcgtgactttaa

SEQ ID NO: 28882 - DNA, 201 bp, Homo sapiens
agtatttcatgaaaaattgttgggttatctttggtcggagattatttttaaatgttcttaacagcacaaactaaaggctgtgctttttttttgtacttttytattgatatagttgtacgaggctgtactttttattgaatattcttaatattgactagagtttttttaaaaataatacagtacaaaaatattttcatgtaa

SEQ ID NO: 28883 - DNA, 201 bp, Homo sapiens
caggaggctgaggcaggagaatcgcttgaacccaggagggggaggttgcagtgagccgagatcgcaccgctgcattccagcatggcgacagagcaacactscatctcaaaaaagaaaaaaaaaattagccaaatgtggtggcacatgcctgtattcccagctacttgggaggctgtggtgggaggattgcttgatcctggg

SEQ ID NO: 28884 - DNA, 201 bp, Homo sapiens
cctcacctcaggagatccgcccacctctgcctcccaaagtattgggattacaggtgtgagctaccgcgcccagccgttgtatagcttttttaaagaaatayctattgaaggtgccgattttaaaattaggttgtcaggccgggcacctcaggaggctgaggcaggagaatcgcttgaacccaggagggggaggttgcagtg

SEQ ID NO: 28885 - DNA, 201 bp, Homo sapiens
ttactagtagcagtagaatcttttcaaatatgccttaatataggcgctggggcttgcccgtggtgctcttgatatataaggcccggacattctgccagttktttctcgagcagtgacaccaagaagttaacagccaggtgaatgttatgcacaagctcatcgtctgtcatcttcacgtggccaacagccacagccaaacat

SEQ ID NO: 28886 - DNA, 201 bp, Homo sapiens
ttttctgttgttgtggtatttgataaaattccctaaaagcattttttagagggccagctattaaaatctttaacagggaaaaggttgcttttcatagttasagtttatatgtgcatggtttgtgcatacagacatttgtctctttttcttccgtgtcctctcctctcccgcagtgaagttattcgaagtcattgaaactga

SEQ ID NO: 28887 - DNA, 201 bp, Homo sapiens
aacttttcatgtaattatttttattcaagttacatattacacacagtttaaagagtcaagacttgttaaaaaagagtcccctagactcactggtttccttrtctcccaggatggccacttttaatcttttaaagtgattctttagtcttttaaatgattctttcatactttataacatgcttgtagtcttacttgtttttc

SEQ ID NO: 28888 - DNA, 201 bp, Homo sapiens
acacattattaaacaagaatgacaaggaatgcattaaacattaaactaatagtttagaaaagggaacaaaataaatctcaggaataaataataatgtaagragtcagtaaagctaaaggcagaaaataatgaatttgaaaacagtagaaatggtaaatccaaaactttggtgggtgtccccccccctcccaccgacaagga

SEQ ID NO: 28889 - DNA, 201 bp, Homo sapiens
ccacttggggggatatccgtggccttggtctcgccacagtgctgctgttcccccaggacccacacttgggacagggagtggacttaagcctgacggtgccygagaagcgcttgtccttctgggggtcatagttcttcaagctgatctgcaactccaccatcttcaggaacttggggcactttcactggttcccgtgcagga

SEQ ID NO: 28890 - DNA, 201 bp, Homo sapiens
aataataatgtaaggagtcagtaaagctaaaggcagaaaataatgaatttgaaaacagtagaaatggtaaatccaaaactttggtgggtgtcccccccccycccaccgacaaggaagtgagaagagaggcaatgaaatagataagctactaagtgctgccagggggaagggagagaaaacacagaaaaatgagggggaaat

SEQ ID NO: 28891 - DNA, 201 bp, Homo sapiens
ttctgtgtataatctctctctctctctctttttttcttggtttggaggagactttccccttgtctataagtaacttaaatataaaatgttataacaatacrtttattagtttgaagccccaattttctttttttttttttcttttaagtgaaaacaagtttataaaagaagtaaagaaacaggccaggcgctgtggctcac

SEQ ID NO: 28892 - DNA, 201 bp, Homo sapiens; identical to SEQ ID NO: 5968

SEQ ID NO: 28893 - DNA, 201 bp, Homo sapiens
attgtaaagaaaagatttgctacattgcatatgtttttagaagtgctttctgtgtataatctctctctctctctctttttttcttggtttggaggagactytccccttgtctataagtaacttaaatataaaatgttataacaatacgtttattagtttgaagccccaattttctttttttttttttcttttaagtgaaaa

SEQ ID NO: 28894 - DNA, 201 bp, Homo sapiens
ttacttgatattccctggtcatggcaaagcctctctccacttttcttcccttctattgtcacttccattctttttccatagtccatagaaatcatttttaygtgacagtgatgagctgaccagaagctatagaagctatagtacttcctatatcctaatgggttttaaaaacactggctggggcatactcaccctttctga

SEQ ID NO: 28895 - DNA, 201 bp, Homo sapiens
tctcttcagaatctcaaatcttaaaaggttttgtattttctaaacacaaataaaagctggaaagccaatcagtagtaatctgaaagttcacaatgtcagtwgacgtctcatggtattgggaagaaagataagcattgaggctaatatcaccctatgcttgattaagtttttgttttatatgttaaaatcactaaaccgaaa

SEQ ID NO: 28896 - DNA, 201 bp, Homo sapiens
gaccaaaaagtgtgagaatgtttgatgtagagaaactccaagctcattccctggactttggctatagatgctttcttcaggggtgggtcttctgggcctgwgtcctgcaggatgcccagtaggaagcacagcctctttgatcttatgggggtgggctcatttgctgttttggagctcaggtgcaaagccgagttacttgat

SEQ ID NO: 28897 - DNA, 201 bp, Homo sapiens
aaataaagaaaaataaaggttattgaaagtattttacatttcagttacggtgactggtggttgatctctggagaacagtcatcacacagccaaacaaatgkgggcctccagaaatgtatggtcacgcccacagcatcctcagtgccacccggcattcatttctgctgctttcatcagtattctctcccgttaacagcagtg

SEQ ID NO: 28898 - DNA, 201 bp, Homo sapiens
atttatttgatggagtctcattttctcgcccaggctggagttcagtggcaccatcttggctcactataacctccgtttccaggtttcaagtggttctcccrcctcagcctttcaagtagctggtgggattataggcatccgccaccaagctcagctaatttttgtatttttagtagagacggggtttcaccatgttggcca

SEQ ID NO: 28899 - DNA, 201 bp, Homo sapiens
agatggaaatgttctgaatcttgactgatggtgaccacatgaatctgaacatgtaataaaagagtatagaatgagatacacaaacatacaaattagtgcargtaaaactggggaaatctgaacgaggtcagtggattagatcaaggtctgtttctcttcagaatctcaaatcttaaaaggttttgtattttctaaacacaa

SEQ ID NO: 28900 - DNA, 201 bp, Homo sapiens
atctttggaatagtgaccggatgccgtggctcatgcctgtaatcctagcacttcgggaggctgaggtgggcagatcgcttgagcccaggagtttgagaccrgcctgggtaacataaggagacctcatttctacaaaaaattagctggacatggtggcacgtgcctatagttccatctactcgggaggctgaggtgggatga

SEQ ID NO: 28901 - DNA, 201 bp, Homo sapiens
cattttgtgacagcctaatcaaaaattctctcctccttcatccttagttccaaactgcttatcacttccctgttccataggccacttaggattgagttgayatgaggagtaacatttgttctgtaagattatggttattattcgttgaatttttagcaatatttacattctcttgttctcttttatgactcgtgtgtgtgt

SEQ ID NO: 28902 - DNA, 201 bp, Homo sapiens
tcaaaaattctctcctccttcatccttagttccaaactgcttatcacttccctgttccataggccacttaggattgagttgatatgaggagtaacatttgktctgtaagattatggttattattcgttgaatttttagcaatatttacattctcttgttctcttttatgactcgtgtgtgtgtgtgtgtgtttcaacattg

SEQ ID NO: 28903 - DNA, 201 bp, Homo sapiens
tccagcagagaagggtcactaggatacaatgtggcatgcatgagctaaaaacagaagtgatttaactctcagagggaaaatggatcagataacacttcatrgagatgacgacatctggttcatttttgaagagtgaatagaaagatcccagccctccataccaagagaataactcctgcaaacattttctgacctggtgcc

SEQ ID NO: 28904 - DNA, 201 bp, Homo sapiens
ttttcctttttttttttttttttaaatggagatgggggtctcgctatgttgcccaagctggtctcaaactcccaagttcaaactattctctcaccacagcsttctaaagtgctaggattacagacgtgagccaccatgcccagcgctagaactgggcgctgtaccgaactgaatagaactgctagtctgtagttctattca

SEQ ID NO: 28905 - DNA, 201 bp, Homo sapiens
ttgggaggccgaggcgggtggatcacctgaggtcaggagttcaagaccagcctggccaacatggcaaaaccctgtctctactaaaaaaatacaaaaattarctgggtgtggtggcacgtgcctgtaatcccagctacttgggggaggccaaggcacgagaattgctcgaacccgggaggcggaggttgcagtgagccaaga

SEQ ID NO: 28906 - DNA, 201 bp, Homo sapiens
ctgctttaatctgtagttttcctttttttttttttttttaaatggagatgggggtctcgctatgttgcccaagctggtctcaaactcccaagttcaaactrttctctcaccacagccttctaaagtgctaggattacagacgtgagccaccatgcccagcgctagaactgggcgctgtaccgaactgaatagaactgctag

SEQ ID NO: 28907 - DNA, 201 bp, Homo sapiens
ttctgatctcatagcactattcctgatcagagaactccagttgcttcaacacacagtatcagtagtgcagccaccccagatcgaatccgcttcccaagagkcactgccagtcgtagcactttccacggccagccccgggaacggcgaaccgcaacatataatggccctcctgcctctcccagcctgtcccatgaagccaca

SEQ ID NO: 28908 - DNA, 201 bp, Homo sapiens
cctgggcccaagcaatccttccacctcagcctcctgagtagctgggaccagaggtgtgtactaccacatccggctgattttttgtattttctacagagacraagcatccccatgttgctcaggctggtctcgaactcctgggctaaagtgatccttctgcctgggcctcccaaagtgctgggattaaagggatgagccacc

SEQ ID NO: 28909 - DNA, 201 bp, Homo sapiens
gtggcatgatcttggctcactgcaacctccacctcccaggtcccagcagttctcctgcctcagcctcctgagtagctgggattacaggcatgcacaaccayacccggctaatttttgtatttttaatagagacagggtttcaccatattggctaggctggtcttgaacttgggagctcaagcaatccactcaccttggcct

SEQ ID NO: 28910 - DNA, 201 bp, Homo sapiens
tgaaaagagtgaattgtttaaattctttgcaaacccctttaatatctggcttaatagaagttagctgggttcctgtgtctgctctgcattcacactatttmagtatgttgttttggttgaagtgtataaagaaatgtagctacaaaaggaagggagcatattaataccttttcaggtgattgtggatattgttctttgaca

SEQ ID NO: 28911 - DNA, 201 bp, Homo sapiens
atgcctgtaatctcagcacttggggaggctaaggcagaagtgtcacttgaggtcaggagtttgagaccagcctggtcaacatggtgaaaccctgcctctaytaaaaatccaaaaaaattagctgggcgtggtggcgcgcacctgtaatcccagctactcaggaggctgaggcaggaaaatctcttgaacccgggaggcaga

SEQ ID NO: 28912 - DNA, 201 bp, Homo sapiens
cttcatcttccattctttctgttaaaaatgtgtgtgtgggccgggcacggtgactcatgcctgtaatctcagcacttggggaggctaaggcagaagtgtcmcttgaggtcaggagtttgagaccagcctggtcaacatggtgaaaccctgcctctactaaaaatccaaaaaaattagctgggcgtggtggcgcgcacctgt

SEQ ID NO: 28913 - DNA, 201 bp, Homo sapiens
aaaggagcattgttatacaacaccccagggagtgatcacaatgaaattagtgatataattaggaactaagaacttgaggaggaagactgaccctatgaagktgtggggtcagtgaattacagatcctggtaagttccaacagttattagagtactagattgagtgagcaggaaggtagaagaagttagttaaagaatggga

SEQ ID NO: 28914 - DNA, 201 bp, Homo sapiens
agaatctcttagtaagatgaaatacgatgaaatcacagctacatatttgttattggggagaaaatcttcagaggtaagagtaatcagaaagagctgaaatrccctgtatgtaattattagtttatataaactgttttcttagtttttatcttttgaatatttgtaacatttgatacatcattttttagatttacttgcaaa

SEQ ID NO: 28915 - DNA, 201 bp, Homo sapiens
agagtcagcatggcgttgtgctactctccagccacattcagttgcccagctgcaggcatggcatttgcagagattggggttttgtcacattagtatagtgraaggacaaaggagcattgttatacaacaccccagggagtgatcacaatgaaattagtgatataattaggaactaagaacttgaggaggaagactgaccct

SEQ ID NO: 28916 - DNA, 201 bp, Homo sapiens
gaccaccattatctcataggtgattccgacactactttcttatatgttcttctctgtttctagtgcctcttcctcccatgtatgttttctacactgcaccsaaaatggtcttttaaggaaacacaaataagatggtcatttctctgcttgaacaactcttcattggcttcccattgctcttacgatgaaaacccaaacttc

SEQ ID NO: 28917 - DNA, 201 bp, Homo sapiens; identical to SEQ ID NO: 5965

SEQ ID NO: 28918 - DNA, 201 bp, Homo sapiens
tatatttaaaaattagagcattgctaaaagtgaaacatcaatttatgggaaaattaatactcagaagtaggatttctacttacttttatttctctcacctrtaggtgaagtatttgactatttggttgcacatggcaggatgaaggaaaaagaagcaagatctaaatttagacaggtatgaattaatgtgtctttactatg

SEQ ID NO: 28919 - DNA, 201 bp, Homo sapiens
aatgcctgtagttaaagccagcttagttcaaattccacatatttctggctaactttatatctatatttaaaaattagagcattgctaaaagtgaaacatcratttatgggaaaattaatactcagaagtaggatttctacttacttttatttctctcacctataggtgaagtatttgactatttggttgcacatggcagga

SEQ ID NO: 28920 - DNA, 201 bp, Homo sapiens
aaagcaaactgatctgctacgatgaggagatgtattagagatgtgaggaggttaaaataattgccagataagcaggagagtgaatggactagagaaatgtwatagaattgccaggcagccttaaggcttccctgaggttggtgaccaaggatttaaagtgggaagagtcagcatggcgttgtgctactctccagccacatt

SEQ ID NO: 28921 - DNA, 201 bp, Homo sapiens
tctgggcatggtggcgtgcccctgtaatcccagctactcaggaagctgaggcaggcgaattgcttgaacccaggaggcagaggttgtggtgagccgagatygcaccactgcagtccagcctgggcaacaagagcaaaactctgtctcaaaaaataaagaaagaaaataaagtaaagaaataggaggaaagcagagggtgcc

SEQ ID NO: 28922 - DNA, 201 bp, Homo sapiens
tttgaacaaaatcattttactcttgtggggttttttttgcctattgtagatatgacatataaaatgtaaacattatagaaatatagaaattcattatgtaraaagtaagttccttgaaatttgtctcttcaaagacaatcactttcagcagtttggtgtatattcccagagttttttatatagacattaacttttaaaaaa

SEQ ID NO: 28923 - DNA, 201 bp, Homo sapiens
agttctaatgacaatcagaagtttcttttcttatccctctttttcctcagcattattactcaaaggccccaacttttttaagctctttcttctgttactcyaatagctttctccaaatttatcattttaaacatcattgacttccacttcccacttccatatctacatttctttccctagcttttctattgcagtgatata

SEQ ID NO: 28924 - DNA, 201 bp, Homo sapiens
gaagatttgtcccgtgacttaaaaaacagttctataggccgggtgcagtggctcacgcctgtaatcccagcactttgggaggccgaggtgggtggatcacraggtcaggagatcgagaccatcctggataacacggtgaaaccctgtctctactaaaaatacaaaaaattagctgggcatggtggcgggcgcctgtagccc

SEQ ID NO: 28925 - DNA, 201 bp, Homo sapiens
tcctccttccgaggattccaatctgccttccaaggagctgggattacaggcacacaccaccatacccagctaaagtatatttttcattgtaccaaggactyattatgctattttagaaaagtcaccaaggaaccaagtattttaagtgggttaaacttagagcatagcctggacccatttgcagaaaatataaacttgggt

SEQ ID NO: 28926 - DNA, 201 bp, Homo sapiens
tcttgaactcctggcctcagatgattcgtccacctcggcctcccaaagtgctgggatcataggtgtgagccaccgtgcccagcccccatattattattatyaattgaaaaactcaaggcttttcttgatcttgggacattgatgtttaaattagtgctagaattaatctgtacttcatgtttgttattgttaatattataa

SEQ ID NO: 28927 - DNA, 201 bp, Homo sapiens
gtgatgtacctactttattattctaccaaaatggaatagagtgttcattttcgtacatgcttctacactgtagataatttttgtctatctgaaggtctcartctgtttttgctgctgtaacacaataccagggactaggtaatttataaagataagaaatttatttcttacaattgtggaggctgggaagtccaagatcca

SEQ ID NO: 28928 - DNA, 201 bp, Homo sapiens
acggacattcgagcgtatactgagtattcaatatgtgtgaacattaacaaagttattttcatcttaattacgaatctgcaccagtgatgactgactctgcrtctctcctattcagattgtgtctgcagttcaatactgccatcagaaacggatcgtacatcgagacctcaaggtgagtagaagtgcctcactcagtgtatg

SEQ ID NO: 28929 - DNA, 201 bp, Homo sapiens
ctcccgggtttaagcaattcgcctgcctcagcctcctgagtaagtgggattacaggtgtgtgccaccacgcccagctaatttttgtatttttagtagagakgggatttcatcatgttggccaggatggtctcgatctcttgaacccatgaactgcccacctcagcctcctaaagtgctgggattacaggtgtgagccacca

SEQ ID NO: 28930 - DNA, 201 bp, Homo sapiens
ttgccctcacccatgaatttctccagactggaaagttcaaggcataggaaaattgtttttagaaatccacacggacattcgagcgtatactgagtattcawtatgtgtgaacattaacaaagttattttcatcttaattacgaatctgcaccagtgatgactgactctgcgtctctcctattcagattgtgtctgcagttc

SEQ ID NO: 28931 - DNA, 201 bp, Homo sapiens
tacttagatttatgatctttttatatatttttgtcattcataatttctttttgaggcaagttccctggccacccgcagtagctcatgcctgtattcatagygctttgggaggccaaggcaaggaggatcacttgagcccaggagtacaagactgcattgtgctatgattgtaccgctgtactccagccggggcaacagagg

SEQ ID NO: 28932 - DNA, 201 bp, Homo sapiens
atgccttagtactgctgcaacagcaattacgtttcaccatgagtttgggaggggacattcattcaaaccatagcacgtatggacaaaaaaagggtgtagaraaaaccagaagttgctttttcccttttcactacttagatttatgatctttttatatatttttgtcattcataatttctttttgaggcaagttccctggcc

SEQ ID NO: 28933 - DNA, 201 bp, Homo sapiens
catgggattccataaaaatcccgatactccccttatatggcacaatttacattgtattggaattgctcgtttgtctgtctccttctctagtttgtaggctrtctccagtctgtaggggaagatgacagaacttaacacagtgcttggaacctgttaggtacttaataaatatttgctaaatgaatgcaataatactgtttt

SEQ ID NO: 28934 - DNA, 201 bp, Homo sapiens
ctcaatctcttgacctggtgatctgcccgcctcaacctcccaaaatgctgggattgcaggtgtaagccagcgtgcccaacctttgatgtagtttcttgcayttaggtctttgcgcctgcttttccctgtacctgaaatactctttactcttctgtttagggaacatttctgagaagtaatcattgacaaatcccctttccc

SEQ ID NO: 28935 - DNA, 201 bp, Homo sapiens
tatcgtgattgtaaaatagggcaacactacattccataaaatagaataagtgtccctatgagctgagcagaagttggctttagagacaggcaaaggctgaagaaggctgaggcaggcccggcacagtggctcactcctgtaatcccagcacttggggagcctgaggcgagaggatcactcgagctcaggaattcgagatca

SEQ ID NO: 28936 - DNA, 201 bp, Homo sapiens
aatgtcaggttacttcacactacatttttttctgtaaggattaaagcagtaggaactttgttattgtgccaattgaagttttttcttttcttttcttttctttttttttttttttgagacagagtcttgccctgtgacccaggctggagtgcagtggtgtgattttggctcactgcaacctctgcctcccgggttcaagag

SEQ ID NO: 28937 - DNA, 201 bp, Homo sapiens
atgtcaggttacttcacactacatttttttctgtaaggattaaagcagtaggaactttgttattgtgccaattgaagttttttcttttcttttcttttctttttttttttttttgagacagagtcttgccctgtgacccaggctggagtgcagtggtgtgattttggctcactgcaacctctgcctcccgggttcaagaga

SEQ ID NO: 28938 - DNA, 201 bp, Homo sapiens
ttcacaacagtcctgtgaagcagttgttttctttttttttctttgagacagagttttgctcttgttgcccaggctggagtgcaatggcgtgatctcggctmaccgcaacctccacctccctggttcaagtgattcccctgcctcagcctcccgagtagctgggattacaggcacccgccaccacgcccagctaattttttt

SEQ ID NO: 28939 - DNA, 201 bp, Homo sapiens
tctttgagacagagttttgctcttgttgcccaggctggagtgcaatggcgtgatctcggctcaccgcaacctccacctccctggttcaagtgattcccctscctcagcctcccgagtagctgggattacaggcacccgccaccacgcccagctaatttttttgtatttttagtagagacagggtttctccatgttggtcag

SEQ ID NO: 28940 - DNA, 201 bp, Homo sapiens
ttgattaagcccaggagtttacagctgcggtgagctgtgattgcaccactgcactccagccagggtaacagagcaggagcccctcttaaaaaaaaaaaaaraaaagaaaagaaaaatctcattatggttttaatgtaacattttcctaattactgatgaggtcatgcattttttcatatttaggttttttgtttcttctgt

SEQ ID NO: 28941 - DNA, 201 bp, Homo sapiens
cctcccgagtagctgggactacaggtgcctgccatcacgcctggctaattttttttgtatttttagtagagacggggtttcaccgtgttatccaggatggwctcgatctcctgacctcgtgatccacccatcttggcttcccaaagtgctggaattacaggtgtgagcccccacgtccggccttttttgtgtcttctttaa

SEQ ID NO: 28942 - DNA, 201 bp, Homo sapiens
taggtgctgtagaggccatatacctgggacacatagctttcctgctctttaggatttcctgctccttgcaggacaaagcagcctgagctttatgaaactartctgtaactctcaaacttaagcaaacattagaatcacctgaagggctttagaaccgtgatcactgggccctacccctagaccttgattttacccgtagaa

SEQ ID NO: 28943 - DNA, 201 bp, Homo sapiens
gagtggacttaagcctgacggtgcccgagaagcgcttgtccttctgggggtcatagttcttcaagctgatctgcaactccaccatcttcaggaacttgggrcactttcactggttcccgtgcaggacttcctgcaccgcctcatccagggtgtcgtgagagactttgctgcttatgggttctcatgccacgctaaccagaa

SEQ ID NO: 28944 - DNA, 201 bp, Homo sapiens
cccttttcaggatacataacagctgtgtgctaggatattatcgtcataactattccaatgtgtgatgactatgaggtatattattttctcagagttgggcwatacataacatttgaataagccagactaacatctttctaggctatagttctaatgtagagcaataaaaatagaaccaaacaaaatatacaaacatgtgga

SEQ ID NO: 28945 - DNA, 201 bp, Homo sapiens
caggaataaataataatgtaaggagtcagtaaagctaaaggcagaaaataatgaatttgaaaacagtagaaatggtaaatccaaaactttggtgggtgtcyccccccctcccaccgacaaggaagtgagaagagaggcaatgaaatagataagctactaagtgctgccagggggaagggagagaaaacacagaaaaatgag

SEQ ID NO: 28946 - DNA, 201 bp, Homo sapiens
aaatcccacaataattgaatcctcttaatcaagttatgggaaagagcattaaaaataaagaaaaataaaggttattgaaagtattttacatttcagttacrgtgactggtggttgatctctggagaacagtcatcacacagccaaacaaatgggggcctccagaaatgtatggtcacgcccacagcatcctcagtgccacc

SEQ ID NO: 28947 - DNA, 201 bp, Homo sapiens
gactctgcgtctctcctattcagattgtgtctgcagttcaatactgccatcagaaacggatcgtacatcgagacctcaaggtgagtagaagtgcctcactyagtgtatgctctgtctgtttgtgtgcagttctctcagtggtcattacacaaatgaggtatagattagccttattagcattttttaaaatcccacaataat

SEQ ID NO: 28948 - DNA, 201 bp, Homo sapiens
gtagttaaagccagcttagttcaaattccacatatttctggctaactttatatctatatttaaaaattagagcattgctaaaagtgaaacatcaatttatrggaaaattaatactcagaagtaggatttctacttacttttatttctctcacctataggtgaagtatttgactatttggttgcacatggcaggatgaagga

SEQ ID NO: 28949 - DNA, 201 bp, Homo sapiens
gcttttcatagttacagtttatatgtgcatggtttgtgcatacagacatttgtctctttttcttccgtgtcctctcctctcccgcagtgaagttattcgargtcattgaaactgaaaaaacactctacctaatcatggaatatgcaagtggaggtaagaacatttttatatatattgggttttttttctttctccctttta

SEQ ID NO: 28950 - DNA, 201 bp, Homo sapiens
aggttttgtggtttgttgcttgcttgcttgcttgcttcttaatgccatatatcttggcatttatcagtccataattactaaattcttaaaatccataaatrtttattattctttctaggttgcaataaaaataattgacaaaactcagttgaatccaacaagtctacaaaaggtaagattggttcaatgtctagtactttt

SEQ ID NO: 28951 - DNA, 201 bp, Homo sapiens
aactacagactgttgaaaacaatcggcaaggggaattttgcaaaagtaaaattggcaagacatatccttacaggcagagaggtaaataccagttatgcttrtttctgttatgacagttgctctgtttatttccatgtaagagaaagaaaagaatatagatataggccttatttcttttttttaagatggagtctcgctccg

SEQ ID NO: 28952 - DNA, 201 bp, Homo sapiens
tatattcagtcatttaaaaaatgaactctttattttagctggaccagctattccttctgttgtggcgtatccgaaaaggagtcagaccagcactgcagatrgtgacctcaaagaagatggaatttcctcccggaaatcaagtggcagtgctgttggaggaaagggaattgctccagccagtcccatgcttgggaatgcaag

SEQ ID NO: 28953 - DNA, 201 bp, Homo sapiens
caaataaatttaagacaaaaatgcccttttttatagagtaacacagcatctggtggaatgacacgacgaaatacttatgtttgcagtgagagaactacagmtgatagacactcagtgattcagaatggcaaagaaaacaggtaggagattctacctgtttgtaagaaaagttgtttttcccaagagaaatggaagcatgtt

SEQ ID NO: 28954 - DNA, 201 bp, Homo sapiens
taaaacttgaaactatattcagtcatttaaaaaatgaactctttattttagctggaccagctattccttctgttgtggcgtatccgaaaaggagtcagacmagcactgcagatagtgacctcaaagaagatggaatttcctcccggaaatcaagtggcagtgctgttggaggaaagggaattgctccagccagtcccatgc

SEQ ID NO: 28955 - DNA, 201 bp, Homo sapiens
tggattaataaacattagcaatgaatctgttatctaagagaaaaatttaaatttatattacaacagtggaatataatgtttaataacttgtgttggggggattatgtgttttgtttgtttttttttttagctcttcagagaagtaagaataatgaagattttaaatcatcccaatataggtactttctgcttttttaaata

SEQ ID NO: 28956 - DNA, 201 bp, Homo sapiens
tccatgcctgcatgttcatgtgtttttgtctaagtaacatatttctgttttgactcatgtctgtgcctaaaatgtgaataatggaaagttaagcacaagtyatatgaacagtttatctgttctgtcatatttaggaacgtaactacctgcagtttcctataatggcacccagtaactctgaaacaagtgcccatttatgtt

SEQ ID NO: 28957 - DNA, 201 bp, Homo sapiens
tcccttatttttaaccttctgaacactatagtggttagcatttatatcatttattcagccattctaatatttattgagtagcagttttgtaccaactgctrttctaagatataaggaataataaattcctgttactgttttcatgaaacttaaattctagtgtaattaaaatcatgtagaaataaacataaacatgatcac

SEQ ID NO: 28958 - DNA, 201 bp, Homo sapiens
gaagataaaaaagagaaatttcccttatttttaaccttctgaacactatagtggttagcatttatatcatttattcagccattctaatatttattgagtascagttttgtaccaactgctgttctaagatataaggaataataaattcctgttactgttttcatgaaacttaaattctagtgtaattaaaatcatgtagaa

SEQ ID NO: 28959 - DNA, 201 bp, Homo sapiens
aagctaaaggcagaaaataatgaatttgaaaacagtagaaatggtaaatccaaaactttggtgggtgtccccccccctcccaccgacaaggaagtgagaaragaggcaatgaaatagataagctactaagtgctgccagggggaagggagagaaaacacagaaaaatgagggggaaataccagatactgaagaatttaaat

SEQ ID NO: 28960 - DNA, 201 bp, Homo sapiens
gatcactacattttgtgacagcctaatcaaaaattctctcctccttcatccttagttccaaactgcttatcacttccctgttccataggccacttaggatwgagttgatatgaggagtaacatttgttctgtaagattatggttattattcgttgaatttttagcaatatttacattctcttgttctcttttatgactcgt

SEQ ID NO: 28961 - DNA, 201 bp, Homo sapiens
tttttaacaaaaattttggccagtagtataaattcagtgaatatgttttcattgcacagatagtaaaaccacttgatacatacctcatggggatatggacygctttatgcgctgctttttaccacaccttaaatagtgcctggttgtgtgtgtgtgtgtgtgtgtgtgtgtgtgtgtgtgtgtgtgtaactcagtaaatat

SEQ ID NO: 28962 - DNA, 201 bp, Homo sapiens
tgatcactacattttgtgacagcctaatcaaaaattctctcctccttcatccttagttccaaactgcttatcacttccctgttccataggccacttaggawtgagttgatatgaggagtaacatttgttctgtaagattatggttattattcgttgaatttttagcaatatttacattctcttgttctcttttatgactcg

SEQ ID NO: 28963 - DNA, 201 bp, Homo sapiens
gggatccagtttcatggtttttcgtatgtataatcacttgctgcctcacctctcctttctttgctgatctgcatcgtggacagagtctccgtgtctaaacrcacactttgttcttcagaagtggttattctggttcacttaacaattgccatttgaaaagcaattatttttattttattttcatatttttaaattttattt

SEQ ID NO: 28964 - DNA, 201 bp, Homo sapiens
gcactccagcctggggcaacagagtgagactccatctcaaaaaaaaaaaaagaaaaaaaaaaaaagaaaggaatttggaggtatgcagcgtctagctttgratcagcagttcagtaatattggagttggtggtattttaaggtagttttgtcttttctgtcatgtttgagaccctgtagctacaggataatgttttacagt

SEQ ID NO: 28965 - DNA, 201 bp, Homo sapiens
tgccctaaacaaatagggggtttgtttttctccaaaaagaaatttggggtagggtgcggtggctcacacctgtaatcccagcactttgggaggccaaggcrggtggatcacgaggtcaggagatcgagaccacggtgaaacctcgtctctactaaaaatacgaaaaaaattagccgggcacggtggcgggtacctgtagtc

SEQ ID NO: 28966 - DNA, 201 bp, Homo sapiens
tagaagtgctttctgtgtataatctctctctctctctctttttttcttggtttggaggagactttccccttgtctataagtaacttaaatataaaatgttrtaacaatacgtttattagtttgaagccccaattttctttttttttttttcttttaagtgaaaacaagtttataaaagaagtaaagaaacaggccaggcgc

SEQ ID NO: 28967 - DNA, 201 bp, Homo sapiens
atgatatatacattgtataactatttagacttacatggtgcatgatttacattgtaattacatagaggcttatacagtctaataaaaattaatattaactrtttgattgcaaagaggattgttctgcattttattactttttttttttttttgagacagagtttcactcttgttgccaggctggagtgcaatctcgtgacc

SEQ ID NO: 28968 - DNA, 201 bp, Homo sapiens
atctcacttgtatgcaaattgtcaacttcgtaaaaagctctgtgccagtacccacctgttgctctggacttttctatatcagcagcttataatttgttgatttttttttttagttaaatttctaaggtagcaatgtggaatcctgagatgaacgtagactttggagtcaggcaacccacaatgagaatcctggctccagca

SEQ ID NO: 28969 - DNA, 201 bp, Homo sapiens
tatttaattagctttttttttttttaaatttcctgaggcggagtctcacactgttacctgggctggagtgcagtggcacgatctcgctcgctgcaacctcygcctcccgggttcaagcgattctcctgcctcagcctcccaggtagctaggattacaggcagccgccaccacacccagctaatttttaaattttattttat

SEQ ID NO: 28970 - DNA, 201 bp, Homo sapiens
gtcttagatatggattaataaacattagcaatgaatctgttatctaagagaaaaatttaaatttatattacaacagtggaatataatgtttaataacttgtgttggggggattatgtgttttgtttgtttttttttttagctcttcagagaagtaagaataatgaagattttaaatcatcccaatataggtactttctgct

SEQ ID NO: 28971 - DNA, 201 bp, Homo sapiens
tcttagatatggattaataaacattagcaatgaatctgttatctaagagaaaaatttaaatttatattacaacagtggaatataatgtttaataacttgtgttggggggattatgtgttttgtttgtttttttttttagctcttcagagaagtaagaataatgaagattttaaatcatcccaatataggtactttctgctt

SEQ ID NO: 28972 - DNA, 201 bp, Homo sapiens
ttgatcactacattttgtgacagcctaatcaaaaattctctcctccttcatccttagttccaaactgcttatcacttccctgttccataggccacttaggwttgagttgatatgaggagtaacatttgttctgtaagattatggttattattcgttgaatttttagcaatatttacattctcttgttctcttttatgactc

SEQ ID NO: 28973 - DNA, 201 bp, Homo sapiens
cttagatatggattaataaacattagcaatgaatctgttatctaagagaaaaatttaaatttatattacaacagtggaatataatgtttaataacttgtgttggggggattatgtgttttgtttgtttttttttttagctcttcagagaagtaagaataatgaagattttaaatcatcccaatataggtactttctgcttt

SEQ ID NO: 28974 - DNA, 201 bp, Homo sapiens
ttagatatggattaataaacattagcaatgaatctgttatctaagagaaaaatttaaatttatattacaacagtggaatataatgtttaataacttgtgttggggggattatgtgttttgtttgtttttttttttagctcttcagagaagtaagaataatgaagattttaaatcatcccaatataggtactttctgctttt

SEQ ID NO: 28975 - DNA, 201 bp, Homo sapiens
aacgtggtgaaacccccatctctactaaaaatacaaaaattagccgggtgtggtgacgcacgcctgtaatcccagctactcaggaggctgaggcacgagarttgcttgaacgttggaggcagaggttgcagtgagccaagatcgggccactgcactacagcctgggcaacagcacaactctgtctcaaaaaaaaaaaaaaa

SEQ ID NO: 28976 - DNA, 201 bp, Homo sapiens
gctgaggcacgagaattgcttgaacgttggaggcagaggttgcagtgagccaagatcgggccactgcactacagcctgggcaacagcacaactctgtctcaaaaaaaaaaaaaaaaaagcattatgcaatcaagtaataacatgaaaatatttgtgcccattcattatgtaaaatttattctttcagagttagggttaata

SEQ ID NO: 28977 - DNA, 201 bp, Homo sapiens
attaacacctgggtatgggcaactctctaaccgctggtttggtttggagttgactctatgggtatggaaaggttgcaccaggccgggcgcagtggctcacrcctgtaatcctagcactttgggaggctgagactggcggatcacctgaggtcaggagttcgagaccagcctggccaacgtggtgaaaccccatctctacta

SEQ ID NO: 28978 - DNA, 201 bp, Homo sapiens
tgctctgtctgatgcctcttttctctccgtttgtttattcactctccttctctactggcttttcaccagcagcatttacacatgctcaagtctatataccttttttttttttaactaaaaagccatgcctgttcctctttcagatacacgctttttctctcttccctttcatagccatatttctctaaacatttcctagat

SEQ ID NO: 28979 - DNA, 201 bp, Homo sapiens
gctctgtctgatgcctcttttctctccgtttgtttattcactctccttctctactggcttttcaccagcagcatttacacatgctcaagtctatataccttttttttttttaactaaaaagccatgcctgttcctctttcagatacacgctttttctctcttccctttcatagccatatttctctaaacatttcctagatt

SEQ ID NO: 28980 - DNA, 201 bp, Homo sapiens
gaggtatattattttctcagagttgggcaatacataacatttgaataagccagactaacatctttctaggctatagttctaatgtagagcaataaaaataraaccaaacaaaatatacaaacatgtggaacctaaaacacacagaattcttggatcaaagaaaaattgcaaacaaaaattacagtatatctaggaattaat

SEQ ID NO: 28981 - DNA, 201 bp, Homo sapiens
atgatgtatttcactggaaccatacaggttttgattcgcagagttgggagccctgggtagatactgaatcagactaagtttaatcacagaaattattcctrcgtaagtctgatcttatgttttcaagatagcattgtaaaattcagagtatgttaccatccccctttgagacctctgctgtttttaataaatggaagcatt

SEQ ID NO: 28982 - DNA, 201 bp, Homo sapiens
cagtctaaaccaccattactttaaaggtgttcttgtttccttgtttcatatactactaagagaaatgctagcaagccttcatcctgatatcagggatattrattaaaatgtgaaaaaaaaatttagaatcaataagtatggttgaagaaaaaaccacggaacaacttcatagttggattaaaaaaaaatcacaaggaatat

SEQ ID NO: 28983 - DNA, 201 bp, Homo sapiens
aagatctggattgaattcctggtttaaaagttgaactcctgaattataatttagtaattatgagtgtgacatatggttccacaaatctcttaagaggtttrtattgaattcaaatttagaaaaaaaaatctgtcaattatattgacagacttggattttatctgtgttactctacaacagctggtaggcttaatcgtttaa

SEQ ID NO: 28984 - DNA, 201 bp, Homo sapiens
gtaattcatgatgactttcaagtatcaaaatattttagtttaatattttcactaagctgatggaggtattccttatttgtatgaagtaaagatgtttcctsaaaacacttatatctaattttctaaattagtattcttttctattgatttcagaggtggtgattctttattctacattgataagcagttgacagtgctaat

SEQ ID NO: 28985 - DNA, 201 bp, Homo sapiens
aaacacttatatctaattttctaaattagtattcttttctattgatttcagaggtggtgattctttattctacattgataagcagttgacagtgctaatartatattccttgaagtgtcacctttcttccctaaataattaatgttgtgtaaactgccacctaggcgtgcatcagctggttctgttgttttcacctccatt

SEQ ID NO: 28986 - DNA, 201 bp, Homo sapiens
tattcttttctattgatttcagaggtggtgattctttattctacattgataagcagttgacagtgctaataatatattccttgaagtgtcacctttcttcsctaaataattaatgttgtgtaaactgccacctaggcgtgcatcagctggttctgttgttttcacctccattgtatcctgagctcctacttctcaccacca

SEQ ID NO: 28987 - DNA, 201 bp, Homo sapiens
ttttctgtgtattgaagtatgttctatctaacctaacatattaaagaatttgcagagaagtaaacaatcttaagattattctgtaagcacgtttttccctrcaaaattaacaatgatgcagccctgcctccaactccagaaaaaccctggactgaggaggctgtggagaaaccctgttgctctctgaaagcccttcattgt

SEQ ID NO: 28988 - DNA, 201 bp, Homo sapiens
ctattttagaaaagtcaccaaggaaccaagtattttaagtgggttaaacttagagcatagcctggacccatttgcagaaaatataaacttgggtgcaaatkaggcctttgtgagagaattataacagtaacatcagccagaatcacaaacacatgtcaggagtttattgtgtgccaggtgctgttccatgcactctgtatg

SEQ ID NO: 28989 - DNA, 201 bp, Homo sapiens
tcttatgcagagtaaatcccctcagcctccttgggtactcccacaggagtttcgctgaacagaagcctactttattccatacttggaattgtttccccccycccacctgaatttgtttgattcctgctaaaattcatttaattgattttctgccttaattccagtcttttgggggattttggaataatgggtcatttgtat

SEQ ID NO: 28990 - DNA, 201 bp, Homo sapiens
gttttcaggttttgtaacttttttcatctatgttttatataatgcttgttaaattcatttcaagctattttataatttttgttgctaatgtaaatggaacwtttttttcctcaagaaggcaataatcatataacttcttgcatttgggaaacttttgatctctcatttggaatgtcgaaaattaagtttatattgtttttt

SEQ ID NO: 28991 - DNA, 201 bp, Homo sapiens
gggattaccagtgtaagccaccacatccggctaatgccaaatgtttctattcaggaatgtgcatgtgtctcaaatttgttttcaggttttgtaactttttycatctatgttttatataatgcttgttaaattcatttcaagctattttataatttttgttgctaatgtaaatggaacttttttttcctcaagaaggcaata

SEQ ID NO: 28992 - DNA, 201 bp, Homo sapiens
tttgtgtctatttcttttactctacttcatgcttgtgatattcttccatgttgaggttttcatttgtaaccaactgttgtagttgtttgacttggcctccrtttgctatggattgaatcgtatgcctcaaaattcatatgtgtaagccctaacccccagtgtgactgtatttggtgatagggtctttatagaaggttaagt

SEQ ID NO: 28993 - DNA, 201 bp, Homo sapiens
gaggcaggagaattgcttgaatctgggaggtggaggttgcggtgagccaagatcgcgccattgcactccagcctgggcaacaagagtgaaactccgtctcaaaaaaaaaaaaaaaaaaaggatgatttcttacccaaacaaaacacataaactgtattatgcccttcttttagatattatggtgggaatgggatattcaca

SEQ ID NO: 28994 - DNA, 201 bp, Homo sapiens
aggcaggagaattgcttgaatctgggaggtggaggttgcggtgagccaagatcgcgccattgcactccagcctgggcaacaagagtgaaactccgtctcaaaaaaaaaaaaaaaaaaaggatgatttcttacccaaacaaaacacataaactgtattatgcccttcttttagatattatggtgggaatgggatattcacaa

SEQ ID NO: 28995 - DNA, 201 bp, Homo sapiens
ttctttatacatgcagtagatttttgctggataaagcttagttgagtggaaaccttaccatttgcccttctagaacctctgctttaatctgtagttttcctttttttttttttttttaaatggagatgggggtctcgctatgttgcccaagctggtctcaaactcccaagttcaaactattctctcaccacagccttctaa

SEQ ID NO: 28996 - DNA, 201 bp, Homo sapiens
ctgaggcaggagaatggatgaacccgggaggcggagcttgcagtgagccgagatcgagccactgcactccagcctgggcgacagagcgagactccgtctcaaaaaaaaaaaaaaaaaagatgtaaataaaactccagaaatattgaaagaaaccttgggattatttgctttgtaacttggactggtgaaggtgtttctgtc

SEQ ID NO: 28997 - DNA, 201 bp, Homo sapiens
aggcaggagaatcgcttgaacctgggaggtggaggttgcagtgagccaagattgagccactgcactccacagcctggccacagagcgagactccgtctcgaaaaaaaaaaaaaggaacaaactatgatgtgcacaactcagatggatctcaagggaattatactgcgtgaaagtacacaaaaggttacattccatggatgc

SEQ ID NO: 28998 - DNA, 201 bp, Homo sapiens
cagtgacagtgcagacggaagcctacgtgcacacacggggaggtctgactgccagtgccccaaagatgtggtgttcacactgagtcttcaaagagctctartgatgaagagtgttggctgagttcttaccatgtgccaaggaccatgctcagtgctttttcatggattagctacattttaaggtgaaaaaaaagttgggta

SEQ ID NO: 28999 - DNA, 201 bp, Homo sapiens
agctctaatgatgaagagtgttggctgagttcttaccatgtgccaaggaccatgctcagtgctttttcatggattagctacattttaaggtgaaaaaaaarttgggtaattgcctaaaattacactgccaacctgaatccagctcttaatccctatctgtaacaaaatctccccagtaagtagataatatttactaaatta

SEQ ID NO: 29000 - DNA, 201 bp, Homo sapiens
ttgggtaattgcctaaaattacactgccaacctgaatccagctcttaatccctatctgtaacaaaatctccccagtaagtagataatatttactaaattarattgaatccattcagcttcagaaacttttttctgtgtattgaagtatgttctatctaacctaacatattaaagaatttgcagagaagtaaacaatcttaa

SEQ ID NO: 29001 - DNA, 201 bp, Homo sapiens
agtttctggtgttacagattgtagtctacaggactacagaaatgtttcatggtcaggcacagtggctcacacctgtaatcccagcactctgggaggccaargcaggtggatcacttgaggtcaggagttcgagaccagcctggccaacatggtgaaaccccgtctctactaaaaatacgaaaattaaccatgtgtggtggc

SEQ ID NO: 29002 - DNA, 201 bp, Homo sapiens
gactacagaaatgtttcatggtcaggcacagtggctcacacctgtaatcccagcactctgggaggccaaggcaggtggatcacttgaggtcaggagttcgwgaccagcctggccaacatggtgaaaccccgtctctactaaaaatacgaaaattaaccatgtgtggtggcacgcgcctgtagtcccagctaccagggagac

SEQ ID NO: 29003 - DNA, 201 bp, Homo sapiens
ctagttttaaactggtcgtgctgaaggccagcccactttctgctgtaattattctgccttctgatgttattctcgaaaaatggccagattccaggcgtgamtaatggttggtgtaaactaggcatgagaaggtttgattacaccttcaattgtatgattctatcatgatggtataggtttgcagtgagtcttaaaccacat

SEQ ID NO: 29004 - DNA, 201 bp, Homo sapiens
gacgtgggagaatcacttgaacacaagaggtgaaggttgcagtgagccgatatcatgccactgcactgcagcctgggtgacagagtaagactctgtctccaaaaaaaaaaaaaaaaaaaaaaaaaaaaaagcagacaacttgcaacattatcttcatccttgtacactaatttgtttttgtttgatttccaaatattaatg

SEQ ID NO: 29005 - DNA, 201 bp, Homo sapiens
ggagacggagagtgcagtgagctgagatcaagccattgccctccagcctgggcgacagagggatactccgtctcaaaaaaaaaaaaaaaaaaaaaaaggcygggcgcggtggctcacacctgtaatcccagcactctgggaggccgaggcgggcagatcacgaggtcaggagatcgagaccatcctggctaacacggtgaa

SEQ ID NO: 29006 - DNA, 201 bp, Homo sapiens
tgaaagccactttccagcaaccactgaagaaagagtatctcattatttttacttaaagcactacagaaagtggtgttctgattttattaatattttttagrccaggcatggtggcttatgcctgtaatcccagcactttgggcggatcacttgagcccaggagttcaagaccatcctggacaacatggcaaaaccccgcct

SEQ ID NO: 29007 - DNA, 201 bp, Homo sapiens; identical to SEQ ID NO: 5969

SEQ ID NO: 29008 - DNA, 201 bp, Homo sapiens
tttgctgcttatgggttctcatgccacgctaaccagaaaagagggtttagttggttttataaattattaatagtttgggaggaaattgatattttaatgaygccaagtctttctttcttttttttctttcttttttttttttgagacggaatttcgctcttgttgcccaggctagagtgcagtggcgtgatctcagctcac

SEQ ID NO: 29009 - DNA, 201 bp, Homo sapiens
tatggcgtagcattcatgcctgcagcccaccaggcctggggctgcaagagcatgagccctgggtctgtcatctgtcagcatgcatcctctgtttgcagcartgtgccctgtaaatattttcatttcctgtgtgtgcggagacttggaaaaggttgggaagcactggactgtgctaactggaattttaaaagactgttgcca

SEQ ID NO: 29010 - DNA, 201 bp, Homo sapiens
gccaggctggtctcgaactcctgaccttgtgatcctcctgcctcagcctcctaaagtgctgggattacaggcgtgagctaccgcacctggcctgaatcaasatttttttagccacaacttgtgccttacaagttttttattctaaggattagacaagtaaattatttttcaccgtattacattagttcacctactatacca

SEQ ID NO: 29011 - DNA, 201 bp, Homo sapiens
ccctttttcctcagaattttgttttctgtcttatatagcatctgacactccgatttggagagagagaatgctattttgagtcttgcttatttttctgtttrtttaaggctgattggaagttttgtgcatttggatggatcttgaatacaacagtgggacacactgttatttctttgtggtgctcttgataccaatatattt

SEQ ID NO: 29012 - DNA, 201 bp, Homo sapiens
cccgagtagctgggactacaagcacccgccaccacgcccggctaattttttgtatttttagtagagatggggtttcaccgtgttagccaggatggtctcartctcctgacctcatgatctgcccgccttggcctcccaaagtgctgggattacaggcgtgagccaccacgcccggcctatttattttttattgattgagtg

SEQ ID NO: 29013 - DNA, 201 bp, Homo sapiens
ttcttcggcaaattgttccttttccctctcttcacccacccatatatcttatttcttcactaatttaaaatatgagtgagctgtaggatgcctggacctakgttaacttctgaaacaaacatgttaagttccaattttagccttaaatattttcgacatttagccttaaatgttttcttctttatatgagtgttcatacgg

SEQ ID NO: 29014 - DNA, 201 bp, Homo sapiens
cccacctgtaatcccagcattttaggaggctgaggcaggtggatcatgaggtcaggagatcaagaccatcctgaccaacatggtgaaaccctgtctaaaawttagctgggcgtggtggcatgcgcctgtagtcccagctacttgggaagctgaggcaggagaatcacttgaacccaggaggcagaggttgcagtgagccga

SEQ ID NO: 29015 - DNA, 201 bp, Homo sapiens
atcccagcactttgggaggccgaggcaagtggatcacctggggtcgggagttcaagaccagcctggccaacatggtgaaaccccatctctactaaaaatayaaaaattagctaggtgtggtggtacatgccggtagtcccagctatttgggaggctgaggcaggaggatggtttgagcctgggagatggaggttgtagtga

SEQ ID NO: 29016 - DNA, 201 bp, Homo sapiens
aaaaaaaaaaaaaaaaaaaaaaggctgggcgcggtggctcacacctgtaatcccagcactctgggaggccgaggcgggcagatcacgaggtcaggagatcragaccatcctggctaacacggtgaaaccctgtgtctaccaaaaatataaaaaattagccgggcgtggtggcaggtgcctgtagtcccagctactcgggag

SEQ ID NO: 29017 - DNA, 201 bp, Homo sapiens
ctacgaaaaatacaaaaaattagccgggcgtggtggtgggtgcctgtagtcccagctacttgggagactgaggcaggagaatggcgtgaacccaggaggcrgagcttgcagtgagcagagatcacactgcactccagcctgggcgacagagtgagactccgtctcaaaaaaaaaaaaataaataacacttgtgtgcattca

SEQ ID NO: 29018 - DNA, 201 bp, Homo sapiens
tgcagtatttaaattttctcacatttctaatttttaaactgttcaaattagaatccagcttgaattcatacattatagttggctgatatgtcaaatatgctttttttttttttttaattgagatggagtcttgctctgtcgcccaggttggagtgcagtggtgcaatctcggctcactgccaacctctgccgcccgggttc

SEQ ID NO: 29019 - DNA, 201 bp, Homo sapiens
gactgaggcaggagaatggcgtgaacccaggaggcagagcttgcagtgagcagagatcacactgcactccagcctgggcgacagagtgagactccgtctcaaaaaaaaaaaaataaataacacttgtgtgcattcatgtgtacgtgtgtctgtacacatgtacaagaaacaaccgagcatttctttaaaaaccttagtcag

SEQ ID NO: 29020 - DNA, 201 bp, Homo sapiens
ggagtgcagtggtgcaatctcggctcactgccaacctctgccgcccgggttcaagcgattgtcgtgcgcagcctcccgagtagctgggattacaggctccygccaccatgcctggctatttttttttttttttttttttttttttagtagagatggggtttcgccatgttggccaggctgttctcaaactcctgacctcag

SEQ ID NO: 29021 - DNA, 201 bp, Homo sapiens
acaatagttgccatttggtgatcacttaactgtataccagccagcaatactttgtagagtatctcatttaaaatatgtaatatggttttatttaattagctttttttttttttaaatttcctgaggcggagtctcacactgttacctgggctggagtgcagtggcacgatctcgctcgctgcaacctccgcctcccgggtt

SEQ ID NO: 29022 - DNA, 201 bp, Homo sapiens
ctcatgcctgtaatcccaacactttgggaggccaaggcaggcgtatcgtttgagcccaggagttcaagaccagcctgggcaacatgacaaaactctctctrctaaaaatacaaaattagccaggcatggtggagtgcgcctgtattcccagccacttaggaggctgaggtgggagaaccacctgagcccaggaagttgagg

SEQ ID NO: 29023 - DNA, 201 bp, Homo sapiens
atttggtgatcacttaactgtataccagccagcaatactttgtagagtatctcatttaaaatatgtaatatggttttatttaattagcttttttttttttwaaatttcctgaggcggagtctcacactgttacctgggctggagtgcagtggcacgatctcgctcgctgcaacctccgcctcccgggttcaagcgattctc

SEQ ID NO: 29024 - DNA, 201 bp, Homo sapiens
gggaggccaaggcaggcgtatcgtttgagcccaggagttcaagaccagcctgggcaacatgacaaaactctctctactaaaaatacaaaattagccaggcrtggtggagtgcgcctgtattcccagccacttaggaggctgaggtgggagaaccacctgagcccaggaagttgaggctgcattgagccatgatcgtaccac

SEQ ID NO: 29025 - DNA, 201 bp, Homo sapiens
tgccctctaggagatggccagcctttcctgtgctgccactgttgtctcaccttacagtcttcctggctccagatgagtttgagagcttttgcttatctttktaacccatttagtatctaacgtggcattttatacataggaagcttctctcatcagtattggtggatgtgaaccaaattgaatactggcaggttggtgaca

SEQ ID NO: 29026 - DNA, 201 bp, Homo sapiens
ctcatacttgattgatattttggctgcatatagaattctagactgaatgccctttttcctcagaattttgttttctgtcttatatagcatctgacactccratttggagagagagaatgctattttgagtcttgcttatttttctgtttatttaaggctgattggaagttttgtgcatttggatggatcttgaatacaaca

SEQ ID NO: 29027 - DNA, 201 bp, Homo sapiens
tactgttatataacagctagttcctatacctgtaatcttattaattcatttaaaatacatcagtgcgggccgggtgtggtggctcacacttataatcccarcactttggaaggccaaggcgggaggatcacttgaagccacaaatttaagaccagcctggataatatagcgagaccctgtctctacaaaaaaaataaataa

SEQ ID NO: 29028 - DNA, 201 bp, Homo sapiens
catgagtgccttgaaggtttgacaccacacttttctgtttcttttattccctgctaatgcctaccatatagttgactagccgaaagttactgaataaacattttttttttttttttttgagatgaagtctcactctgtcacccagactggagtgcagtggtgcgatctcggctcaccgcaacctccgcctcccaggttcaa

SEQ ID NO: 29029 - DNA, 201 bp, Homo sapiens
gccaggagaatcgcttgaacctgggaggcggaggttgcatctagccaagatcgcgccgctgcactccagcctgggtgatgacagagcgagactccatctcaaaaaaaaaaaaaaaaaaagactagcattgattggccaggcatggtggctcacgcctgtaatcccagcactttgggaggccgaggcaggtggatcacctga

SEQ ID NO: 29030 - DNA, 201 bp, Homo sapiens
aggtacgtaagtaggcctctcagatttcaggttggttctctgcctggtagatacaagggcaaaactattctggaaccatattgatgttaaaaaaatttttwacggacttcctgccggcaaggatttttttaaaagattttttaaatgtgtctaagaaatgttttaatttgtcttctgattatacagtgatttacaattcat

SEQ ID NO: 29031 - DNA, 201 bp, Homo sapiens
gaggcggagcttgcagtgaatcgagatggcgccactgcactccagcctggggcaacagagtgagactccatctcaaaaaaaaaaaaagaaaaaaaaaaaargaaaggaatttggaggtatgcagcgtctagctttggatcagcagttcagtaatattggagttggtggtattttaaggtagttttgtcttttctgtcatgt

SEQ ID NO: 29032 - DNA, 201 bp, Homo sapiens
tgtttgagaccctgtagctacaggataatgttttacagttacagctacatggttgcattcaaggaaggaggaaggaactgtactggcaactctgtccttacccccccaccctccttttttttttgagatgaagtttctgtcactcaggctggagtgcagtggcggaatctcagctcactgcaactgtcgcctcccttgttc

SEQ ID NO: 29033 - DNA, 201 bp, Homo sapiens
aattaggaggtaacttcatatcattacagaaagcttttctaaaatgcctaatcctgtcataattctaattctattttggctaaatttcatttttgtcttgrtgttttccctctaggctgaaaatctattgttagatgccgatatgaacattaaaatagcagatttcggttttagcaatgaatttactgttggcggtaaact

SEQ ID NO: 29034 - DNA, 201 bp, Homo sapiens
ccaggagaatcgcttgaacctgggaggcggaggttgcatctagccaagatcgcgccgctgcactccagcctgggtgatgacagagcgagactccatctcaaaaaaaaaaaaaaaaaaagactagcattgattggccaggcatggtggctcacgcctgtaatcccagcactttgggaggccgaggcaggtggatcacctgag

SEQ ID NO: 29035 - DNA, 201 bp, Homo sapiens
agtgagctatgatcacaccactgtactccagcctgggtgattgagcaagaccttgtctctaaataaataaatatttaaaagtaaaagaaaattaggaaacraaaatatatcttaaagacttttaatcattttcaactaaaatattttggataatactgccttatatttaggcagtatatattaaagattttcacatgcatg

SEQ ID NO: 29036 - DNA, 201 bp, Homo sapiens
cttagaaagtgtatctggccattgcagtggctcatgcctgtaatcccaacactctgggaggccgaggtgggctgatcacttgaggccaggagttcgagacyagactggccaacatggcaaaaccctatctctactgaaaatatagaaattaactgggcatggtggcgcgcgcctgtgattccagctactcaggagactgag

SEQ ID NO: 29037 - DNA, 201 bp, Homo sapiens
cctgtctcaaaaaaaaaaaaaaaaaaaaagttatcaaagaattatataacattttgtgtgtgtgtgtgtgtgtgtgtgtgtgtgtgtgtgtgtgtgtgtgtcaggttgtttattggctccttaggaagaaaaaaatacgtgtatgaaataattgattaacagtacaagaactcataattatttgtttaaatgtttaatgtt

SEQ ID NO: 29038 - DNA, 201 bp, Homo sapiens
acaagaattgcttcaacccgggaggcataggttgcattgagctgagattgcaccactgcactgtgacagagtgagactctgtctttaaaaaaaaaaaaaaagtgtgtccatctgaagaacttttaattacagctaatgtcaatatgtactgctaaaccttttcttacttttttttgatatattaaaagatcacatactcat

SEQ ID NO: 29039 - DNA, 201 bp, Homo sapiens
tgcttatttctgttatgacagttgctctgtttatttccatgtaagagaaagaaaagaatatagatataggccttatttcttttttttaagatggagtctcrctccgtcacccaggctggagtgcagtggcatgatctcagctcactgcaaactctgcctcccgggttcacaccattctcctgcctcagcctcccgagtagc

SEQ ID NO: 29040 - DNA, 201 bp, Homo sapiens
caagaattgcttcaacccgggaggcataggttgcattgagctgagattgcaccactgcactgtgacagagtgagactctgtctttaaaaaaaaaaaaaaagtgtgtccatctgaagaacttttaattacagctaatgtcaatatgtactgctaaaccttttcttacttttttttgatatattaaaagatcacatactcatt

SEQ ID NO: 29041 - DNA, 201 bp, Homo sapiens
tatttctgttatgacagttgctctgtttatttccatgtaagagaaagaaaagaatatagatataggccttatttcttttttttaagatggagtctcgctcygtcacccaggctggagtgcagtggcatgatctcagctcactgcaaactctgcctcccgggttcacaccattctcctgcctcagcctcccgagtagctggc

SEQ ID NO: 29042 - DNA, 201 bp, Homo sapiens
ggcatgagccaccacgcccagcctaattaagctttctcaaaagaacatgaaacatatattaggtgtctgggagttttttgttttgtttttgtttttgtttwttttctgaggcagagtctcactctgtcacccaggctggagtgcagtggtgcaatctcggctcactgcaagctccgccttctgggttcaagccattctcct

SEQ ID NO: 29043 - DNA, 201 bp, Homo sapiens
agctgatgggtcgatgggcgcagcaaaccaccatggcacatgtatacctgtttaacctgcacgttctgcacatgtatcccagaacttaaagtaaaaaaaaaaaaaaaaaaaaaaaaggaaaaactttgaacaaaatcattttactcttgtggggttttttttgcctattgtagatatgacatataaaatgtaaacattata

SEQ ID NO: 29044 - DNA, 201 bp, Homo sapiens
gcaaaccaccatggcacatgtatacctgtttaacctgcacgttctgcacatgtatcccagaacttaaagtaaaaaaaaaaaaaaaaaaaaaaaaggaaaawctttgaacaaaatcattttactcttgtggggttttttttgcctattgtagatatgacatataaaatgtaaacattatagaaatatagaaattcattatgt

SEQ ID NO: 29045 - DNA, 201 bp, Homo sapiens
accgtgttttcatcgtgtgtgagcagggaagggaactttactgcctttgttaggcctatgccgaggattcgtgggatttgctttatcagagactctgaagscaaaaatgcatcatacttcttggccagcttcttgaccagattcttattcttgagtttttttggcacctcagtgtccacttggggggatatccgtggcctt

SEQ ID NO: 29046 - DNA, 201 bp, Homo sapiens
cctgtctctactaaaaatacaaaaaattagctgggcatggtggcgggcgcctgtagccccagctgttcaggaggctaaggcgggagaatggcatgaacccrggagacggagcttgcagtgagctgagactgcatcactgcactgcagcctgggtgacagagtgagactccgtctcgaaaaaacaaacaaacaaacaaaaaa

SEQ ID NO: 29047 - DNA, 201 bp, Homo sapiens
aacccatgaactgcccacctcagcctcctaaagtgctgggattacaggtgtgagccaccacgcccggccaatgactcttatttttcaaaattttcatagcttttttttttttttggtcatttactcttccacatgaattttagaattaagttgccattttctaaaaacagagcatgaaattttgattagattagttttcat

SEQ ID NO: 29048 - DNA, 201 bp, Homo sapiens
acccatgaactgcccacctcagcctcctaaagtgctgggattacaggtgtgagccaccacgcccggccaatgactcttatttttcaaaattttcatagcttttttttttttttggtcatttactcttccacatgaattttagaattaagttgccattttctaaaaacagagcatgaaattttgattagattagttttcatg

SEQ ID NO: 29049 - DNA, 201 bp, Homo sapiens
tttggactcaagcaacctcccacttcagcctccccagtagctgggaccacaagcacacagtaccgcacctggcttattttattttattttattttatttawttattttattttattttatttttggtagagatggagtttcaccatattgcccaggctggtcttgaactcctgagcttaagcagtccgcctgcctcggcct

SEQ ID NO: 29050 - DNA, 201 bp, Homo sapiens
ctggcaacagagtaagaccttgtctcaaaaaaaaaaaaaaaaaaaaaaaaagatactcatgaaaaactatatgttcgttggaagaaagttgttttaatttaacaaacatgttggaataagaattataaacaagatacattaatatgtacactctgaagaccattttaaatcaagcctttaaatagcctagttatggtgtaa

SEQ ID NO: 29051 - DNA, 201 bp, Homo sapiens
tggcaacagagtaagaccttgtctcaaaaaaaaaaaaaaaaaaaaaaaaagatactcatgaaaaactatatgttcgttggaagaaagttgttttaatttaacaaacatgttggaataagaattataaacaagatacattaatatgtacactctgaagaccattttaaatcaagcctttaaatagcctagttatggtgtaag

SEQ ID NO: 29052 - DNA, 201 bp, Homo sapiens
ggcaacagagtaagaccttgtctcaaaaaaaaaaaaaaaaaaaaaaaaagatactcatgaaaaactatatgttcgttggaagaaagttgttttaatttaacaaacatgttggaataagaattataaacaagatacattaatatgtacactctgaagaccattttaaatcaagcctttaaatagcctagttatggtgtaagt

SEQ ID NO: 29053 - DNA, 201 bp, Homo sapiens
gcaacagagtaagaccttgtctcaaaaaaaaaaaaaaaaaaaaaaaaagatactcatgaaaaactatatgttcgttggaagaaagttgttttaatttaacaaacatgttggaataagaattataaacaagatacattaatatgtacactctgaagaccattttaaatcaagcctttaaatagcctagttatggtgtaagtt

SEQ ID NO: 29054 - DNA, 201 bp, Homo sapiens
tgtcacattagtatagtgaaaggacaaaggagcattgttatacaacaccccagggagtgatcacaatgaaattagtgatataattaggaactaagaacttgaggaggaagactgaccctatgaaggtgtggggtcagtgaattacagatcctggtaagttccaacagttattagagtactagattgagtgagcaggaaggt

SEQ ID NO: 29055 - DNA, 201 bp, Homo sapiens
gtcacattagtatagtgaaaggacaaaggagcattgttatacaacaccccagggagtgatcacaatgaaattagtgatataattaggaactaagaacttgaggaggaagactgaccctatgaaggtgtggggtcagtgaattacagatcctggtaagttccaacagttattagagtactagattgagtgagcaggaaggta

SEQ ID NO: 29056 - DNA, 201 bp, Homo sapiens
tcacattagtatagtgaaaggacaaaggagcattgttatacaacaccccagggagtgatcacaatgaaattagtgatataattaggaactaagaacttgaggaggaagactgaccctatgaaggtgtggggtcagtgaattacagatcctggtaagttccaacagttattagagtactagattgagtgagcaggaaggtag

SEQ ID NO: 29057 - DNA, 201 bp, Homo sapiens
ttgatcattttcatctgtttgttgttactgtctttacagcatctagccctggtattatgaatgttgtttcttctgctgactccctgagaatagtaaaggctttttttttttttttttttttttagctcttttataaagtagatttttgttccctgcattgcttctctttttttctggggttctttcttgttaccgctcttt

SEQ ID NO: 29058 - DNA, 201 bp, Homo sapiens
tggctcactgcagctctctacctcctgggcccaagcaatccttccacctcagcctcctgagtagctgggaccagaggtgtgtactaccacatccggctgattttttgtattttctacagagacaaagcatccccatgttgctcaggctggtctcgaactcctgggctaaagtgatccttctgcctgggcctcccaaagtgc

SEQ ID NO: 29059 - DNA, 201 bp, Homo sapiens
caggatggtctttgtctcctgacttcatgatctgcctgccttggcctcccaaagtgctgagactacaggcgtgagccaccacacctggcctatttatttattatttatttatttatttatttatttatttgatggagtctcattttctcgcccaggctggagttcagtggcaccatcttggctcactataacctccgtttc

SEQ ID NO: 29060 - DNA, 201 bp, Homo sapiens
aggatggtctttgtctcctgacttcatgatctgcctgccttggcctcccaaagtgctgagactacaggcgtgagccaccacacctggcctatttatttattatttatttatttatttatttatttatttgatggagtctcattttctcgcccaggctggagttcagtggcaccatcttggctcactataacctccgtttcc

SEQ ID NO: 29061 - DNA, 201 bp, Homo sapiens
ggatggtctttgtctcctgacttcatgatctgcctgccttggcctcccaaagtgctgagactacaggcgtgagccaccacacctggcctatttatttattatttatttatttatttatttatttatttgatggagtctcattttctcgcccaggctggagttcagtggcaccatcttggctcactataacctccgtttcca

SEQ ID NO: 29062 - DNA, 201 bp, Homo sapiens
gatggtctttgtctcctgacttcatgatctgcctgccttggcctcccaaagtgctgagactacaggcgtgagccaccacacctggcctatttatttattatttatttatttatttatttatttatttgatggagtctcattttctcgcccaggctggagttcagtggcaccatcttggctcactataacctccgtttccag

SEQ ID NO: 29063 - DNA, 201 bp, Homo sapiens
gtatttattgagtactccttatgtgccagttagggctataaagatgaataagatgtcttttccccagttgagatatgcataagacagttcgtgtttgcctrtttcagtagtcagtattttcttttgcttattcagtttccactgaaacttatgttttccaaatacaaaattagaattccaactttgcgtttttcaggcgca

SEQ ID NO: 29064 - DNA, 201 bp, Homo sapiens
ctctgtatattcacttggttagcccacagattggtttggacctaattccctttccttctttaactgcccaaagggcttttctatttaaaaaaaaaaaaaaatttttttaaagttttcagattcaatacccacctatttgtatgcttacccatcccagagtcagctaaatttaaagtgtcagtaaattgtaaagaaaagatt

SEQ ID NO: 29065 - DNA, 201 bp, Homo sapiens; identical to SEQ ID NO: 5971

SEQ ID NO: 29066 - DNA, 201 bp, Homo sapiens
ctgagggagtagaaactatgaaaacttgggagatggaggttgcaatgagccgagatcatgtcactgctctccagcctaggcaacagagggagactgtttcaaaaaaaaaaaaaaaaaaaaagaaacaaaagaatggctgctccatagacagagcagcagtatcagctgcttgactgagtctacttatagttatttcttgat

SEQ ID NO: 29067 - DNA, 201 bp, Homo sapiens
attgactatggatttcatcagggtctttgtggggaaatcctgcttatacccacctcaatcttcctccctcccttccttccactggccttatcgtgattgtwaaatagggcaacactacattccataaaatagaataagtgtccctatgagctgagcagaagttggctttagagacaggcaaaggctgaagaaggctgaggc

SEQ ID NO: 29068 - DNA, 201 bp, Homo sapiens
cttatcgtgattgtaaaatagggcaacactacattccataaaatagaataagtgtccctatgagctgagcagaagttggctttagagacaggcaaaggctgaagaaggctgaggcaggcccggcacagtggctcactcctgtaatcccagcacttggggagcctgaggcgagaggatcactcgagctcaggaattcgagat

SEQ ID NO: 29069 - DNA, 201 bp, Homo sapiens
ttatcgtgattgtaaaatagggcaacactacattccataaaatagaataagtgtccctatgagctgagcagaagttggctttagagacaggcaaaggctgaagaaggctgaggcaggcccggcacagtggctcactcctgtaatcccagcacttggggagcctgaggcgagaggatcactcgagctcaggaattcgagatc

SEQ ID NO: 29070 - DNA, 201 bp, Homo sapiens; identical to SEQ ID NO: 6036

SEQ ID NO: 29071 - DNA, 201 bp, Homo sapiens
ggaggccaaggcaggcagatcacttgaggccaggagtttgagaccagcctggccaacatgaggaaaccccatctctactaaaaatataaaaatcagctggrtgtggtggcacacacctgtaatcccagcagcttgggaggctgaggtatgaaaatcacttgaacctagaaggcagaggttacagcgagcccagattgcacc

SEQ ID NO: 29072 - DNA, 201 bp, Homo sapiens
tcaacttctttcctctacttggaagcgtccagccaatggcatggttacttcccagcaatccccacaggaagtacacattcctctgtgcatccagctggggwttttagagagagagtgacctggaaaggaatcctgttgaaatgatttacttacggagttttcattatttaacctgatgacagtaagctctttgtcaatttt

SEQ ID NO: 29073 - DNA, 201 bp, Homo sapiens; identical to SEQ ID NO: 6037

SEQ ID NO: 29074 - DNA, 201 bp, Homo sapiens; identical to SEQ ID NO: 6039

SEQ ID NO: 29075 - DNA, 201 bp, Homo sapiens; identical to SEQ ID NO: 6042

SEQ ID NO: 29076 - DNA, 201 bp, Homo sapiens
aaagaaactctaatttctagtagagggcaatccttttactagaaatcctttgtaatgtggggttggtgaaggcagaatcattggccttgttagtttcccaygcagatgagaatatagtgggagctgagcttcaaacccagctgggtgaatgaaggtaatggaagcagggaggaggcaagagaggacatagaaagaggaagg

SEQ ID NO: 29077 - DNA, 201 bp, Homo sapiens
gatgctttcatgtatgcatctaatttcatcttcatctctatcccagagcttgggatggagacctgcagggtgttcattctgggcaatggtagccagatccrgtaaaacatgtttatcttcaaagtagcttatggagagatgaagagagttctgtagaaagatgtggaagagggcagttggaaagaaactctaatttctagt

SEQ ID NO: 29078 - DNA, 201 bp, Homo sapiens
gagagcaaaaccagctttttttttttttttctagtttggtgtcagagtttctgcaaattaaaaaagagcttaatctttagtaatactcattggattcaaartttaatgagaggctttgtgatggtatactatggtgtacataaatgttgtcgagtggtttttaatctttgtttgcaatactttcaacatcatcaatggcct

SEQ ID NO: 29079 - DNA, 201 bp, Homo sapiens
tatgacgcaaagaggttttctgaacacactatcaagatttaagaaatttcagggggaaattacattactaattcaaagccacatctgttctttattctttytttgtgacttaattttccaaagataaagcaatctgaatgctaacttaacttactttttttgaatggcaatacaactatttggagagcaaaaccagctttt

SEQ ID NO: 29080 - DNA, 201 bp, Homo sapiens
gatgactgaggacgcaggtgattacacctgtaaatttatacacaatgaaaatggagccaattatagtgtgacggcgaccaggtccttcacggtcaagggtragctactgacattaatgagatagaatactacgtgaaagaagtcgaagtgggaacagcggtgcccttctggttgggtttcttgcacttctccctcctccct

SEQ ID NO: 29081 - DNA, 201 bp, Homo sapiens
atgtaataatatatttcatctcaaagcattattgtgaaaataaactaaggtaatgtgtgaaaagtgctcatcatcatcactggtacagagtaaactctgartaaatagtaattatctttattacactgggattacagcattacagcagatgtagtgtatgaataaatggtgaagaagtcattgttagggctactatggggg

SEQ ID NO: 29082 - DNA, 201 bp, Homo sapiens
ttttgtctaacttatttttcagttgagatataggctactcttcccaactcagtcttgaagagtatcaccaactgcctcatgtgtggtgaccttcactgtcrtatgccagtgactcatctggagtaatctcaacaacgagttaccaatacttgctcttgattgataaacagaatggggttttggatcttagcaattctcaca

SEQ ID NO: 29083 - DNA, 201 bp, Homo sapiens
gattgataaacagaatggggttttggatcttagcaattctcacaattctcatgtattccacagcagcaaagtttagtaagtattgccttctaagtataatktaaatttttataaattaaataatttcaagaacatttaccttgttttaagcagtttgcttccagttgttccagttgaattgtaaactgaaaaatatattgc

SEQ ID NO: 29084 - DNA, 201 bp, Homo sapiens
cttctcctcagccaaacccagatgctagctctctcacactcaagcttgtgctgccttcaatgtgtgacaacatactaatctggaatggttttctacttccytctgtcaatgcatgtcctctgacctttcctcaaccaaaataaatgaaacccaacaacaccaaacttcactcttcacttaggaaagttcatgactgactaa

SEQ ID NO: 29085 - DNA, 201 bp, Homo sapiens
gattggtattactcacaaacaaacaaaagtattcccactcaggaaagaaatcgtgtgtttgcctcaggccaacttctgaagtttctaccagctgcagttgytgattctggtatttatacctgtattgtcagaaggtattatgcagaaggctcccatcttctttcaccctgctcccctttcttcagtggttgattgcctgag

SEQ ID NO: 29086 - DNA, 201 bp, Homo sapiens
aggaggaaatgattcaattatttcctctcaagggattactcaatgttgtttttatgtttaaatatttatttgtcaacatcaagaattcttagtacatgatkcaccagcatttttgaacaagtcatagatttggccacaaatcaaatttcaggatgggaggagtgtctcccctttaaaatagaagagagtgagtagtctatg

SEQ ID NO: 29087 - DNA, 201 bp, Homo sapiens
agactaagctacctgggaaataaaaagaggacattggggctgatattctcacaaatgaaaggaacacaaagaacaaaacgggttctatatccacacatacytccacttctctgagtaagtgacttgatgtcagagaatctcacaccagattataacaataagacttttaaatgttcaggatgtttatgtttaaagcattag

SEQ ID NO: 29088 - DNA, 201 bp, Homo sapiens
caattatagtgtgacggcgaccaggtccttcacggtcaagggtgagctactgacattaatgagatagaatactacgtgaaagaagtcgaagtgggaacagyggtgcccttctggttgggtttcttgcacttctccctcctccctttacttcctcctgctccatcttatcttatacattctgaactatgacgcaaagaggtt

SEQ ID NO: 29089 - DNA, 201 bp, Homo sapiens
aagactaagctacctgggaaataaaaagaggacattggggctgatattctcacaaatgaaaggaacacaaagaacaaaacgggttctatatccacacatayttccacttctctgagtaagtgacttgatgtcagagaatctcacaccagattataacaataagacttttaaatgttcaggatgtttatgtttaaagcatta

SEQ ID NO: 29090 - DNA, 201 bp, Homo sapiens
tttgctactccttagttgctttgtgatgactacttgcacatgtgtctgtttgtgagttatttttgtgagcatgctgctaccagcctgtgtggatgtctgtrgtttcacatgatacattttattttctaaagtctactgaattttatggtttttttttcaaaaatagaaactcatattctttccttcttaatttagtttctt

SEQ ID NO: 29091 - DNA, 201 bp, Homo sapiens
gaaatggaatttcttatttcagaattgtcaggctcttcaaggatcaaggtacagggcgcacaagtcatttttggtcattgataatgtgatgactgaggacrcaggtgattacacctgtaaatttatacacaatgaaaatggagccaattatagtgtgacggcgaccaggtccttcacggtcaagggtgagctactgacatt

SEQ ID NO: 29092 - DNA, 201 bp, Homo sapiens
cagtttctacaacagagattaatgggggtgaagtaaagtcaggacttactttcctagagactttggacaattttgaggggcaaagcttcctgagtttgtgmtttttaatatgtgagttaaaattttaagccattgaaaaacatataagcaaatattctaagaagataatatgtattctaagaagaatgaaccagaattcta

SEQ ID NO: 29093 - DNA, 201 bp, Homo sapiens
cctcctccctttacttcctcctgctccatcttatcttatacattctgaactatgacgcaaagaggttttctgaacacactatcaagatttaagaaatttcmgggggaaattacattactaattcaaagccacatctgttctttattctttttttgtgacttaattttccaaagataaagcaatctgaatgctaacttaact

SEQ ID NO: 29094 - DNA, 201 bp, Homo sapiens
accgtggattggtattactcacaaacaaacaaaagtattcccactcaggaaagaaatcgtgtgtttgcctcaggccaacttctgaagtttctaccagctgmagttgctgattctggtatttatacctgtattgtcagaaggtattatgcagaaggctcccatcttctttcaccctgctcccctttcttcagtggttgattg

SEQ ID NO: 29095 - DNA, 201 bp, Homo sapiens
tagaaactcatattctttccttcttaatttagtttctttcaggacattctcatgagactggtgaaatataactgcgaagtagcatgataactgtgaaatarcatgatcattgtgaaagctatatgacccaaaacttccataggaataagtgcaatgcttgcatatctgaaacctgctgttacatctctttgcacttaataa

SEQ ID NO: 29096 - DNA, 201 bp, Homo sapiens
gtttgggtaagcatcaattacttatctaaaatttgtaataagaaaagtcttcataattcatgattgtgtttatctttatgttagtaaatttctatgttggktctattcttccccttatattttaagaaaagaagtaagaaagtaaatgattatttttctgaaagaaaaaattaatgtatttattattattcatagaccttc

SEQ ID NO: 29097 - DNA, 201 bp, Homo sapiens
tgagagtcactgaatgagagcctgactcactgaaattcatataagattaatgtaaccaagttccctgtcttttgacactggtttacagtaagagcaggccrcacatggccagctctggagtgtgttaggacatttacattttacatttcagtgtgatatctgctaagtcaaatgaagaagtcttgaaagataccttctaag

SEQ ID NO: 29098 - DNA, 201 bp, Homo sapiens
ttgtgctttctcctgttgcagtgaggactgggtatttcatgttctttctgagtccacccagagctaattggaatcaccatggtgtctacgctgtataaatrccaaatgggaaaggggatctattgtcccttgagatttttctagtttggatcaaatcagtttctacaacagagattaatgggggtgaagtaaagtcaggac

SEQ ID NO: 29099 - DNA, 201 bp, Homo sapiens
gttgtgctttctcctgttgcagtgaggactgggtatttcatgttctttctgagtccacccagagctaattggaatcaccatggtgtctacgctgtataaaygccaaatgggaaaggggatctattgtcccttgagatttttctagtttggatcaaatcagtttctacaacagagattaatgggggtgaagtaaagtcagga

SEQ ID NO: 29100 - DNA, 201 bp, Homo sapiens
ggattgttttattcacggttgtgctttctcctgttgcagtgaggactgggtatttcatgttctttctgagtccacccagagctaattggaatcaccatggygtctacgctgtataaatgccaaatgggaaaggggatctattgtcccttgagatttttctagtttggatcaaatcagtttctacaacagagattaatgggg

SEQ ID NO: 29101 - DNA, 201 bp, Homo sapiens
actcttcacttaggaaagttcatgactgactaaggtactgtctatagtctcatgcaacttaccttgcatttgccccatcaaaatcctctctgcaccaccaytccatccagtggccctgggtggctgatcatcatggaatccattgcacccttgtcctctgctccaggctgggtttggccaatgggaggcactggcaggagg

SEQ ID NO: 29102 - DNA, 201 bp, Homo sapiens
ccaaacttcactcttcacttaggaaagttcatgactgactaaggtactgtctatagtctcatgcaacttaccttgcatttgccccatcaaaatcctctctkcaccaccattccatccagtggccctgggtggctgatcatcatggaatccattgcacccttgtcctctgctccaggctgggtttggccaatgggaggcact

SEQ ID NO: 29103 - DNA, 201 bp, Homo sapiens
ctcaaccaaaataaatgaaacccaacaacaccaaacttcactcttcacttaggaaagttcatgactgactaaggtactgtctatagtctcatgcaacttaycttgcatttgccccatcaaaatcctctctgcaccaccattccatccagtggccctgggtggctgatcatcatggaatccattgcacccttgtcctctgct

SEQ ID NO: 29104 - DNA, 201 bp, Homo sapiens; identical to SEQ ID NO: 6077

SEQ ID NO: 29105 - DNA, 201 bp, Homo sapiens
ttttcatattacaaatgtactcaagaacctgcagggactcctgttgtttgtgagctcaacaatgtgccacatctggccacaagctcttcacctcttctttytcagtccatccacctaagttctagttacacttctcctcagccaaacccagatgctagctctctcacactcaagcttgtgctgccttcaatgtgtgacaac

SEQ ID NO: 29106 - DNA, 201 bp, Homo sapiens; identical to SEQ ID NO: 6079

SEQ ID NO: 29107 - DNA, 201 bp, Homo sapiens
cattaaataaatgagcatgaagggatggaggattgcagcagtgctccataagcactgcccgtctttcagccttagtggtcacaggagtcagaattccgtayggggaagatttcactgaggatgggccaccctagtggagaactgcgagcaaatctgtggactcatccatttattattttcatgggtcttttgaaatcttct

SEQ ID NO: 29108 - DNA, 201 bp, Homo sapiens; identical to SEQ ID NO: 6081

SEQ ID NO: 29109 - DNA, 201 bp, Homo sapiens
ttttgaacaagtcatagatttggccacaaatcaaatttcaggatgggaggagtgtctcccctttaaaatagaagagagtgagtagtctatgaggagggacytacaaagactggaaactattcttagctccgtcactgactccaagttcatcccctctgtctttcagtttgggtaagcatcaattacttatctaaaatttgt

SEQ ID NO: 29110 - DNA, 201 bp, Homo sapiens
ttataacaataagacttttaaatgttcaggatgtttatgtttaaagcattagactgataagaaatctgatctatttcttgtatgactagatgtagtcactrcagtggaaaccaacatacgaaagagcaggcggcacattttcatcctgacccctcagatcactcacaataaggagtttgcctacgagcaggaggttgccct

SEQ ID NO: 29111 - DNA, 201 bp, Homo sapiens
gaacaaaacgggttctatatccacacatacttccacttctctgagtaagtgacttgatgtcagagaatctcacaccagattataacaataagacttttaartgttcaggatgtttatgtttaaagcattagactgataagaaatctgatctatttcttgtatgactagatgtagtcactgcagtggaaaccaacatacgaa

SEQ ID NO: 29112 - DNA, 201 bp, Homo sapiens
ttcttggctgccgtcctgtggcagcttaatggaacaaaaattacagactttggtgaaccaagaattcaacaagaggaagggcaaaatcaaaggtatttttrtattgaagagaaccatcctcttccccttgcacatggtttgcacctgcaaagtaggcattaaaagtaacaggttgctttcttagtttcagcaatgggctgg

SEQ ID NO: 29113 - DNA, 201 bp, Homo sapiens
catggtttgcacctgcaaagtaggcattaaaagtaacaggttgctttcttagtttcagcaatgggctggcttgtctagacatggttttaagaatagctgaygtgaaggaagaggatttattgctgcagtacgactgtctggccctgaatttgcatggcttgagaaggcacaccgtaagactaagtaggaaaaatccaagta

SEQ ID NO: 29114 - DNA, 201 bp, Homo sapiens
atagctaaaccttacaagactaggaatggtaagtggcaaataccaagtttttctcccaaagaaaaagtcccataataactgttggttacctgtctattaayctttcagtagctaggctgctaagcccagattccattttgcttgctaatctgttatcagtgagttgtgtttttggattttcttaaaggccattttccatcc

SEQ ID NO: 29115 - DNA, 201 bp, Homo sapiens
taaaccttacaagactaggaatggtaagtggcaaataccaagtttttctcccaaagaaaaagtcccataataactgttggttacctgtctattaatctttmagtagctaggctgctaagcccagattccattttgcttgctaatctgttatcagtgagttgtgtttttggattttcttaaaggccattttccatcctgcta

SEQ ID NO: 29116 - DNA, 201 bp, Homo sapiens
gctttcattccttccctagtcctttctggaacagttaaatttataaaatgatttgaataaaagtgatttggataaacttctaggaatactatcaggttgakgtctagctcattctgagctatttggatttacagttgcagggattgatttgtagctgacttagagaaaaacctagctttcctagtgaccaagataactgag

SEQ ID NO: 29117 - DNA, 201 bp, Homo sapiens
gagcaaaaccagctttttttttttttttctagtttggtgtcagagtttctgcaaattaaaaaagagcttaatctttagtaatactcattggattcaaagtytaatgagaggctttgtgatggtatactatggtgtacataaatgttgtcgagtggtttttaatctttgtttgcaatactttcaacatcatcaatggccttg

SEQ ID NO: 29118 - DNA, 201 bp, Homo sapiens
tatatgacccaaaacttccataggaataagtgcaatgcttgcatatctgaaacctgctgttacatctctttgcacttaataaatatgtgttgactgattcrttctcctgggtggtgctgagaaagtaaaaatcatggctgataaaaattctgtttatggttttgtctaacttatttttcagttgagatataggctactctt

SEQ ID NO: 29119 - DNA, 201 bp, Homo sapiens
gaaactcatattctttccttcttaatttagtttctttcaggacattctcatgagactggtgaaatataactgcgaagtagcatgataactgtgaaatagcrtgatcattgtgaaagctatatgacccaaaacttccataggaataagtgcaatgcttgcatatctgaaacctgctgttacatctctttgcacttaataaat

SEQ ID NO: 29120 - DNA, 201 bp, Homo sapiens
tgtaatgaatatatcatcagtttggctttgcatattcaaatgcagcagaatttaatgtggtgcctgcacatgggaagtgttgtggatgtttattgactgacacacagtttgtttagatagataaggctgcttttccattggataactgtgggggatttagctccaaattaattcattaacatttcataagagatcttaaca

SEQ ID NO: 29121 - DNA, 201 bp, Homo sapiens; identical to SEQ ID NO: 6082

SEQ ID NO: 29122 - DNA, 201 bp, Homo sapiens; identical to SEQ ID NO: 6068

SEQ ID NO: 29123 - DNA, 201 bp, Homo sapiens
atttttaaataataaaataaccattatgtatattgatggtttttaagaagaaaagcaatattaagtaaaggctgaatttagattaagttatttcacaatgytaagtgactcttttaattgtctgacttattttaacagtcccacattcaataggactggatatgcgaatgtcaccatatataaaaaacaatcagattgcaa

SEQ ID NO: 29124 - DNA, 201 bp, Homo sapiens; identical to SEQ ID NO: 6070

SEQ ID NO: 29125 - DNA, 201 bp, Homo sapiens
attacaaatgtactcaagaacctgcagggactcctgttgtttgtgagctcaacaatgtgccacatctggccacaagctcttcacctcttctttttcagtcyatccacctaagttctagttacacttctcctcagccaaacccagatgctagctctctcacactcaagcttgtgctgccttcaatgtgtgacaacatactaa

SEQ ID NO: 29126 - DNA, 201 bp, Homo sapiens
aaggtaagaagaaatttggaaggaaatagatgaaaattacacaattaaaatagacacaagtggccgggcacagtggctcatgcctgtaatcctagcacttygggaggccaaggcaggcagatcacttgaggccaggagtttgagaccagcctggccaacatgaggaaaccccatctctactaaaaatataaaaatcagctg

SEQ ID NO: 29127 - DNA, 201 bp, Homo sapiens; identical to SEQ ID NO: 6041

SEQ ID NO: 29128 - DNA, 201 bp, Homo sapiens
attcctacccaattttatatacttttgacagttttatcacaactcctgtgtttgcagtagttatttttcccttcccttcatacatttatgtccagtacctrtggaccctccttgtgaactcttctctaatttctcacagaccaggaagggtttggaatataactggggctcagctatcaagggcctaagcataataaagta

SEQ ID NO: 29129 - DNA, 201 bp, Homo sapiens
accatcatccctactttattcccttggtcccccaccaggataactctgccacttcttaattctgtccataagatttgaaagaggacttaaaaattgatgarttttgttctggtagccataggcactagctgaaataccttaaaagtactcagagagtcttcatgactttctttatgttggtgaaacatttgcaaatttata

SEQ ID NO: 29130 - DNA, 201 bp, Homo sapiens
atctatttcttgtatgactagatgtagtcactgcagtggaaaccaacatacgaaagagcaggcggcacattttcatcctgacccctcagatcactcacaayaaggagtttgcctacgagcaggaggttgccctgcactgtgccctcatccagaacgacgccaaggtgatacttattgagatggaggctctgagcgagctgg

SEQ ID NO: 29131 - DNA, 201 bp, Homo sapiens
ccttatccctgcattggataatgaattgcatttactaccacaggccttaagaccagaactttaaatatttatccagaagcagacacttatccttcaatcgyccctctcccatcattgtcctggtgatgagatcttcacagtaatgttggtggtgtgaattcagagttagaagtcctttgcttcaaggacttagcaaaccat

SEQ ID NO: 29132 - DNA, 201 bp, Homo sapiens
tagatgtagtcactgcagtggaaaccaacatacgaaagagcaggcggcacattttcatcctgacccctcagatcactcacaataaggagtttgcctacgarcaggaggttgccctgcactgtgccctcatccagaacgacgccaaggtgatacttattgagatggaggctctgagcgagctggacatgctgcaggctgagg

SEQ ID NO: 29133 - DNA, 201 bp, Homo sapiens; identical to SEQ ID NO: 6043

SEQ ID NO: 29134 - DNA, 201 bp, Homo sapiens
ttcctagtgaccaagataactgagagcaattgcttacttttggctggaattaagaacaaactagcacagaaaatagtaatctggatgttttccatctcagkgggcctctagtaggtgaaaaggggcttctaaccttcaagttaagccacagaaggctgatgagattgtgtgcctaaaaattaattacttttgttcacaaat

SEQ ID NO: 29135 - DNA, 201 bp, Homo sapiens
cttgtccacttttttgttatttagtctgtgacagtaaaaaggagaaacactttgggatgaagactgttatttcctgatagtgttttgtggcagtggtttgmcgtcaacatctcttgagtctagaatattttggaggatgacatacattcaccaacagccataaaacttggagaggaatgtcttcaaagagtccagtgagaa

SEQ ID NO: 29136 - DNA, 201 bp, Homo sapiens; identical to SEQ ID NO: 6044

SEQ ID NO: 29137 - DNA, 201 bp, Homo sapiens
gttttgtctaacttatttttcagttgagatataggctactcttcccaactcagtcttgaagagtatcaccaactgcctcatgtgtggtgaccttcactgtygtatgccagtgactcatctggagtaatctcaacaacgagttaccaatacttgctcttgattgataaacagaatggggttttggatcttagcaattctcac

SEQ ID NO: 29138 - DNA, 201 bp, Homo sapiens
gcaatctgccttagttggggtttcaagtctggacagaacctggccctgaccaaactttctaatcatatcttccaccaattccccaaactgggttattccayttcctcagaaaacacacttcctctctgcacttaggcttatggtattctctctgcccaggtgggcatttccttttttgcatctccctgaatcctactcatc

SEQ ID NO: 29139 - DNA, 201 bp, Homo sapiens; identical to SEQ ID NO: 6047

SEQ ID NO: 29140 - DNA, 201 bp, Homo sapiens
tttctagtaagccttacccttgcttatggttaagttctttgccctatctctctccactcataggatctcttggaaccatcctataaaactacccccattgrcctatcatttattacttagaaaagctcagtagtggtgtcaataagcttttgtcaagaggctagccggctcactaattagaccttgcaacactggttcttt

SEQ ID NO: 29141 - DNA, 201 bp, Homo sapiens
tgacctatcatttattacttagaaaagctcagtagtggtgtcaataagcttttgtcaagaggctagccggctcactaattagaccttgcaacactggttckttttagcttagcatggctgcttaggaatccctagtctccgcgtcaaagactacaacttcaaagactggattttataaaatcacagaagatgatcggccct

SEQ ID NO: 29142 - DNA, 201 bp, Homo sapiens
ttctctcagtgccttgcaaacagcagctctagtgtatattgagaaaaggaaaaattctgaatggcaaatactagatttcaactttaacctattcctttttattattattattattattattattattattattattattattattgagacaaagtctcgctctgttgcccaggctggagtgcagtggcgcgatctaggctc

SEQ ID NO: 29143 - DNA, 201 bp, Homo sapiens
gggaatttcctaaactactctttaaaatattaattcctattttatgtattgtttttgtgatacataatgatatgaaactaatgccaggagaaatttccatkttgttattctaaagcagacaaaatgggatatgaaagggaaaaatgttaattatagacttcaacattctatgttggacctcgtagttgttctggtcagaag

SEQ ID NO: 29144 - DNA, 201 bp, Homo sapiens
tgaggtgggagaatcgattgagtctaggaggtcgaggctgcagtgagccatgattgtgccactgcactccagcctgggtgacagaacgagaccctgtctcaaaaaaaaaaaaaaaagttgttatactgtatttttttatttgtcttattttttatcattgttttatttatttattttagagacagagtcttgctgtcaccc

SEQ ID NO: 29145 - DNA, 201 bp, Homo sapiens
aaagcagtcaggaggctgctgcaaaatccggacataccatgaggagggcctgtaagagtgaagtggaagggcagatgtggacgatgctctgaagcagagartgatgctcaaagtgtggtccgtggcttgatgctgccccacaagtgttagttacagacctggcacacagtaagggtagatttgagggtaagtctttaaaac

SEQ ID NO: 29146 - DNA, 201 bp, Homo sapiens
ttagtagagatgggttttcaccatgttggccaggatggtcttgatctcctgacctcgtgatctgcccgcctctgcctcccaaagtgctgggattacaggcrtgagccaccgcgcccggctttgtagctcagtttttaatgacagggtttggctttgattctgatgtctgcacaacgctcccagggctgtaagaactgcaga

SEQ ID NO: 29147 - DNA, 201 bp, Homo sapiens
ctgctttctcaccttcttttcatcctctaattcatacctgcaatccttattagaaatcctgtcaacttaatagtaccagaaagtcaggcaaaagactgataaaaaaaaagcctcggtggtcaagaacttaaaattacactactggtgtgcaacgtgctcttatctgtgttactggaggacaccctcaagatacctcactcc

SEQ ID NO: 29148 - DNA, 201 bp, Homo sapiens
atgatgggacagattacttctgaagaccccttatgtcctataaatctcatagttctcaacaagagggaaacgggaacaacaggggcagaaaccaacgagabgctgaggaaaccaaaccaatgagttttggattgtagctaaccgaggagaaccaggtgtgtcaaaggtgatgaaagtcagatgtgtaaaaagcaagaagga

SEQ ID NO: 29149 - DNA, 201 bp, Homo sapiens
ggtggatcacctgaggccaggagttcaagaccagcctggccaacatggtgaaaccccgtctatactaaaaaataaaaaaatttaaaaaaaattgccgggcrtggtggtgggtgcctgtaatcccagctactctggaggctgaggagaatcacttgaacccaggaggtggaggttgcagtgagcctagattgcgccattgca

SEQ ID NO: 29150 - DNA, 201 bp, Homo sapiens
ggctgaggagaatcacttgaacccaggaggtggaggttgcagtgagcctagattgcgccattgcactccagcctgggcaacaggagcaaaactccatctcaaaaaaaaaaaaaaaaaaaaatgaaatggtttggcatgatggtggggtgctgattcctctctctgtccttgagtatttactgccaggaaatcctgaccaac

SEQ ID NO: 29151 - DNA, 201 bp, Homo sapiens
gctgaggagaatcacttgaacccaggaggtggaggttgcagtgagcctagattgcgccattgcactccagcctgggcaacaggagcaaaactccatctcaaaaaaaaaaaaaaaaaaaaatgaaatggtttggcatgatggtggggtgctgattcctctctctgtccttgagtatttactgccaggaaatcctgaccaaca

SEQ ID NO: 29152 - DNA, 201 bp, Homo sapiens
ttacctagcttgcaaagttgtaattccaactgcgtctcactcagctggcagtgtgcacccttggccacacattagaatcacccaagagctattaaaaatcytgaaggtcataccccaggcaagtgaatcagaatctctagggatgggtcccaggcattcgtttgcttttttagtctccccagataattttaatatgtagcc

SEQ ID NO: 29153 - DNA, 201 bp, Homo sapiens
atcagaatctctagggatgggtcccaggcattcgtttgcttttttagtctccccagataattttaatatgtagccaaaattgataatccctgcactagacsaagctccgattcaaatttaaatattaagaggacacatgtataactttgctgaataattttttcctatcggtaggatggtgggaaggaattgctataggcc

SEQ ID NO: 29154 - DNA, 201 bp, Homo sapiens
taagacaatcaaaagtcaaaatagagtttaaacaggggagtgacataacctgatttgcatcatgctggctgtagtatgcagaattgattggagaggcaagratggcagacaggacgccaggtgggaagctatggaaaggtgcatatggaagaagagagtgtctttggattccagttggtaagtggaagagactgaagcatg

SEQ ID NO: 29155 - DNA, 201 bp, Homo sapiens
aaaagtattttttaaaaataaataaaaatagcaatacaataattaaaaatagaaaatgtaaaatacggtataaacaactatttacatagcattacattgtrttagttattatacataatctagagatgatttaaagtatatgggagaatgtgcataggttatgttcaaatactatgctattttagattagggacttgagca

SEQ ID NO: 29156 - DNA, 201 bp, Homo sapiens
tattagagctctgaatactctgcaaataatatgtgagcactggtaccatcaaagcatgtgttgccttaggtggtgtttacagaccttgtcagagttggtastaattccagaatataatcatttcaatagctaaggcttatggttaagacttccaaagtgttcagaatttactaaattgaattatttgaggttttgttactg

SEQ ID NO: 29157 - DNA, 201 bp, Homo sapiens
ttttatctctgttatcctaccatctaggtcaatacattttaacatctttatttgctgtaagtttatttctaattttttattctttattttgtttattcccrtacttaacttttacttacgactacggatttaagtagcatgaactgtcttcagactggcctcctgtgatgagtcacaaggcccatcataatggatccagat

SEQ ID NO: 29158 - DNA, 201 bp, Homo sapiens
ctgaattgatgattcaagaacttttagaatcttagttttatttttgagtagcaaataacattatactgtagatataaaaaatgttgaagattatcccaggragtgctctggaagctgcttttaaaaataaataacttttaaactgccttttctcccttagcatttgcccatttgttctaaaggtagaagaacaactttcag

SEQ ID NO: 29159 - DNA, 201 bp, Homo sapiens
agaaaataaaatccattttctcagaatgatgagaaattttacaccttgaagagaccatctcttttccaaactgagatccacagattcttggagatccacaratatattcttgggctctgagagttttagaattttaaaataatctgtttttatatcaataatctaaaaggtcattagaaagcccacatttcacaatacaag

SEQ ID NO: 29160 - DNA, 201 bp, Homo sapiens
ctgccaaggagacagacaaagtaaatggaatgacctgggttagacaggtttggacgaattttgaaacaaaggacacagttggatgggtgccctgtccttargagcacagacttttttctggatgtcattgagacctagaatgacctttaactatcaccagtacacattcccctttttggtgtgcagtgttgacactgaaac

SEQ ID NO: 29161 - DNA, 201 bp, Homo sapiens
actttccatgattgttttttctcaatttttagaacagtaggaattcttcacctcatctgctatcccaacatattcacaattggaaaatttttgtgctgttmtgttcttttcaaattacaaaagtccttgactaggactgctggcttttacatgcacaggactgcacaacactggtgtttataaagctcattcgttcaatga

SEQ ID NO: 29162 - DNA, 201 bp, Homo sapiens
tttatctactattttaaggcacattttatttttaataaaatttgaaaatatattaatatttaatttatttcaaatatttttcctaagcatactatatatcycatgtctattcttttcacttagtcaatttcccatgtcattacatactctttgttaatagtttttgttaactttttaaataaaagtattacatggtcattt

SEQ ID NO: 29163 - DNA, 201 bp, Homo sapiens
acagaaatgttatgttgctctttatgagacgaaataaagttggatgtcacttataaatggattttgattgatttttttaaagtattgactcactaatcttyaaattggtagaaggaggtcagtagactttgactcataaatttttgtaagcgtaatggcttgttgaataactcctaattgtctttaacaaccttggtttct

SEQ ID NO: 29164 - DNA, 201 bp, Homo sapiens
acacaacatagaaataaatttagttatttagcaatttgttgtatttttggccctgcaagtagtacatgatctgactaaccaattccaaaagccagattttyttctgagtgtgacttttttcttttttttttcttttttttttttcctttttttttttttttttttttttgtgagacagggcctcactctgtcacccagact

SEQ ID NO: 29165 - DNA, 201 bp, Homo sapiens
ttttgacatgaaaaatgaaatgtgaagtatttggaattcaaccctgaatttttttgccggtaactcttgtgtatgttcaactaatttagcaaactgcactrgttcacattttttaggtgaaacaagaaataacagaagttgcacctaaagtagtcaaatttcgtagagacagaaagtggaatggtgcttaccaggggctgc

SEQ ID NO: 29166 - DNA, 201 bp, Homo sapiens
agttcacattttttaggtgaaacaagaaataacagaagttgcacctaaagtagtcaaatttcgtagagacagaaagtggaatggtgcttaccaggggctgsggcactggaaaggaacggggagttagtgtttaatggggacagtttcagttttgcaagatgaaagcatcctggagaatggttacacaacattgtgagtgta

SEQ ID NO: 29167 - DNA, 201 bp, Homo sapiens
tagtttcatttgagatctgagaggatttcatctaaaacggaaaagttattacctgtgaaggagaacaaaggaaaaggaaaaagaaattttaagaaaaaaawatttttttaaacctgtagttactttatgttcaagtgggtattttcaacgctgagttgctgaaatggttttttattgaaagaaggttaaaagtgtatttca

SEQ ID NO: 29168 - DNA, 201 bp, Homo sapiens
gaaataacagaagttgcacctaaagtagtcaaatttcgtagagacagaaagtggaatggtgcttaccaggggctgcggcactggaaaggaacggggagttrgtgtttaatggggacagtttcagttttgcaagatgaaagcatcctggagaatggttacacaacattgtgagtgtacttaatgccattgaatgcacactta

SEQ ID NO: 29169 - DNA, 201 bp, Homo sapiens
ctattaagtttcgtgagcccgtgatttcaacagtacgtaaatttcctttagtacagtcacagaactggtaagtgacaccagctgaaactgagtgcagctcygcggctctacgcttgctgtagaacctttgtgaattcccactgtgcttcaccagtgacaggatgtgctacccaataaatctccatataactgatcttgaaa

SEQ ID NO: 29170 - DNA, 201 bp, Homo sapiens
caagtcttcagcagttatattccacttcattgccagggtgtctggctctaaggggaatctctgcttagaggaccattaatccttaggaacctttttttttwtaaaaaatctaaagatggttcctggacatcatttaccaactggcagtttaaatggcctgtgtaccataaattgtgaggttaaaaaaaatctggtacacag

SEQ ID NO: 29171 - DNA, 201 bp, Homo sapiens
cctcttcgatgtcatcacctccacctgctcccacaaatcttatgggtcagacacaccaggctgctcagtgtcctctcacagtgctgagtttatgactgggrtggattgattttcatactattgttgattcaacattttttatagtatacttcttgagaacagagaccatgttcagggatccctagtgcttaatacaattcc

SEQ ID NO: 29172 - DNA, 201 bp, Homo sapiens
aggattgctgaaaaggaaagagccctaaagcaaactatctacagttttggttagttttcttttcttttcttttctttttttttttttttttttgaggtggrgtcttgctttgttgcccaggtgggagtgtcttcttatattggtcaggctggccttgaactcggggctcaagccgtcctcccacctcagcctcccaaagag

SEQ ID NO: 29173 - DNA, 201 bp, Homo sapiens
gtgtcctctcacagtgctgagtttatgactgggatggattgattttcatactattgttgattcaacattttttatagtatacttcttgagaacagagaccrtgttcagggatccctagtgcttaatacaattcctaccaaatattatgcaagtaataaaattgcagtgtcattgaacattttcagatatgcatttatttct

SEQ ID NO: 29174 - DNA, 201 bp, Homo sapiens
gcaggttttctggcctctagttcagagcattcgtagcatgctagcccctcagtagcatagtactttaggaagctagtctttcccacttgctggtagtaagmcagggagacataatacactaagaaagcttcggtctgagaaaactttccatgattgttttttctcaatttttagaacagtaggaattcttcacctcatctg

SEQ ID NO: 29175 - DNA, 201 bp, Homo sapiens
aggtgatggactgattgatatgcttcagaaatatgttttttcctgcaagtaatgaaaataaacacacgttcttaattattttggtcatttaacaacccatsatttctggaccatgggttaattccaccgattgctcagaagccttcctgagtcatctcaagcacaatcaattcactactgtgtctagacactgcccttaga

SEQ ID NO: 29176 - DNA, 201 bp, Homo sapiens
ctttgctgaattggatcagaaaagtaccctcaaattcccagcatcatttcttcaaggaagtagtgaattggggcaccgtgggttttttgttttgttattgktcttaaaccaccttgcctatgtgcactcaactacaggaacgagaacttgcctgaaaccccaaacgtgtctgcatcaggcattatttttcttgagctcctg

SEQ ID NO: 29177 - DNA, 201 bp, Homo sapiens
tttggacaaattagcaaacccaagttttgctttaacttggattgccttaataaagatgttttggggcttaatggcacagttgctcaactcccccactttaktccgtgatgttcagacccagccagcatttccccatcaggctcttgcaccatgattgacagggacacttttactagtccccttgaagaatgaatagttact

SEQ ID NO: 29178 - DNA, 201 bp, Homo sapiens
ccattaggaaaaaattgcttttctaggtgtgtaaagttttgcatatgattatagcctcttacctgtaaaaactgaatcagagcttagaaccatgcctggtkcacaatagtcattcaacaattattccttgaataaagagacagtattgtgtggtctgtgaaataacaaaagttcaggagcaacagacacttggtgattcta

SEQ ID NO: 29179 - DNA, 201 bp, Homo sapiens
actttgaggggctgaggagggcaaatctcttgagcccagcattcaagagcagcctggaaaatgtagagattctgtctctaccaaaaaaaaaaaaaaaaaaraagaagcaggtggaggaaggaggagctgcagaaaggctccgggagccagtgtctagtaagcagaggcctagcccaggctgagtggtcccagcccaggagg

SEQ ID NO: 29180 - DNA, 201 bp, Homo sapiens
cactctgagaccactctgccatctcacattgttctcttgagccttatctcaatggataaaggtcactagagtttattagacacaggaaaacatcgtttacrgacttcttcattgtgtagggattctgccttcaggcctgttcaccagccaggagaattgtgctttttgatccagggctcttggccagaacagccttctcgc

SEQ ID NO: 29181 - DNA, 201 bp, Homo sapiens
ctataaagtatttgagaataaatctaacaagatctacataaagaaaaaagtaaactgcttaaaagtaatttaagttcaccatttgcaaattgaactaaagaaaaatctaaagaagaactagtgaaaattgcttgcaatcttaccactgaaaagaaacctctgttaaaatgtatcagtattttaaaactgtgttttgtcctt

SEQ ID NO: 29182 - DNA, 201 bp, Homo sapiens
tgaggcaggagaatagcttgatcccgggaggcataggttgtagtgagccgacgtcatgccactgcactccagcctggatgacagagcaagactccatctcaaaaaaaaaaaaaaagaaaagaaaagaaaaggagatttctgagtagaaacacgttagcagaggaaacttcatttggggaacaggattgttttgatgccatg

SEQ ID NO: 29183 - DNA, 201 bp, Homo sapiens; identical to SEQ ID NO: 6138
  misc_feature (1)...(201): n = A,T,C or G, or insertion/deletion polymorphism (see Tables 1-2)

SEQ ID NO: 29184 - DNA, 201 bp, Homo sapiens
gcctcccaaagtgctgggattacaggcatgagccaccgcgcccggctttgtagctcagtttttaatgacagggtttggctttgattctgatgtctgcacarcgctcccagggctgtaagaactgcagaacacactgagaagacaccgtcccagccatggaaagcccttctatgcagtcatttattttcacatgaacacctc

SEQ ID NO: 29185 - DNA, 201 bp, Homo sapiens
ggacaggtggaaggactgcatctgtgtgttgccaaagagtaacagagactggtataggacttgagttcaattcagtcatatccttaagtattgtgccatcrtgtctggattactttgtagtataagtaaatttccaagcatggggaggaaaggagaagctcctttattgagaattcaactgaatatagagaaaactaattt

SEQ ID NO: 29186 - DNA, 201 bp, Homo sapiens
taagccccctgagcctatcaccctcttttaggatccatctcctttctcggcatcaaaataactggccacagcaatattcattcaagcagccttgctttccyctgggaagaacccgacctaggtttagaaaaggtattgaatcccactatttcacctttcaggagaactaccagagttacctcttttttttttttttttttt

SEQ ID NO: 29187 - DNA, 201 bp, Homo sapiens
aagctccgattcaaatttaaatattaagaggacacatgtataactttgctgaataattttttcctatcggtaggatggtgggaaggaattgctataggccrcaccatgatactttgctgaattggatcagaaaagtaccctcaaattcccagcatcatttcttcaaggaagtagtgaattggggcaccgtgggttttttgt

SEQ ID NO: 29188 - DNA, 201 bp, Homo sapiens
aaagaacatgtctagaatgcagtgcaacaaatatcaacaaataggttaactgagaggcaagtactgtttgtggtaagggatggttatgtgattcaagttarttttcattctgtgctaatctctaattttatgctttgaatttactctgagtttaatttttttgagtctcaatttcctctaaaagaatgatccagtactttt

SEQ ID NO: 29189 - DNA, 201 bp, Homo sapiens
ctgccttcagcccagtccaggacaccgtctgtgcctggctgctagtctcttgatggggttttcagcttccatcctaacctcacaacagcctagtctcaacyggtcacccacagagatgatgctcaaatgtgagtcagatccgtcactccacccatagccctgcagtggttccccatttcacttgtaacaaaagtccaagtc

SEQ ID NO: 29190 - DNA, 201 bp, Homo sapiens
gtttttgagaatagtgtaagaatgtattggtcatcctaactttaatgaatgaacttaagccccctgagcctatcaccctcttttaggatccatctcctttytcggcatcaaaataactggccacagcaatattcattcaagcagccttgctttcctctgggaagaacccgacctaggtttagaaaaggtattgaatcccac

SEQ ID NO: 29191 - DNA, 201 bp, Homo sapiens
tctttgtctagtttgttcacccactgatgtattccaaatacctgaatagtattgctcattaatacttgctaaatgaaagaatagaatcctctaacacttayggcttctatcacacaatttagccctgagttcaaactgtctggtattatttcctgttttatgtattccctaagccaaatcatatagtcactgaagaaaaga

SEQ ID NO: 29192 - DNA, 201 bp, Homo sapiens
ttgagggatgagtaggagttggttctcaattatttcacgtttaagtcgacatacttccctccctttgctaaactcgaattctttcactttctcagcaggaktatgcattaacttttaaaaatgaaagttaacggtttaatttttactgatggtctgtgctacttttgtgaaataaaaacatgagcaaagtggtagacagaa

SEQ ID NO: 29193 - DNA, 201 bp, Homo sapiens
cattcccacagctaaatcccgctcctcataggcagtgattttacctctttcacatatttcttctggcatttaccttcctatctctagaataacatacttamattaatggccaggcatagtgactcacgcctgtaatcccaacactttggtaggtcaagatgggcacatcgcttgagcccaggagtttgagatcagcctggg

SEQ ID NO: 29194 - DNA, 201 bp, Homo sapiens
tatctaaatataggctaattcaatttaaaggaatcccaactgagaggtaagattttcttcccctctaacacccaagtctggtctctaaggaggcccctacmaaacaatagttgtattagtcagcgataaaatttatttagggtcaatggaaatgaatttatgaatttgagactcaagggtacatgtcagtttcttcttggg

SEQ ID NO: 29195 - DNA, 201 bp, Homo sapiens
ctatgagaaagctttaacctaaatacaaacacattcttcaaaatatctgaccctcgccgttcaacagtgtcagaggcataaaagacacatctttgctaagraatcactacagattaggaggagaatattgcatgacaattaaatgcaatgtgggatcctggattggatcctagagctgaaaagggacgttagtaggaaaac

SEQ ID NO: 29196 - DNA, 201 bp, Homo sapiens
atcagcctgggcaacatggtgaaacctcatcagtacagaaaatacaaaaattagccagcagtggtggtgcatgcctgtggtcccagctacttgggaggctkaagttggaggatttctcgagcccgggagtttgaggctacagtgagctgtgattgcgttacagcacgacagcctgggccacagagagagaccttgtctcaa

SEQ ID NO: 29197 - DNA, 201 bp, Homo sapiens
aggaaaaatagtaactttacagtggagaatcctgatggacaccaccttaaccacatgatcaaggtcaatatcaaggatagtaagacatagtgagctcataygcccctgatagaatgtcctgaaaaggacagatcatgcctttcgaattcttcccaaacatccttaatctcatttgactatgagaaagctttaacctaaata

SEQ ID NO: 29198 - DNA, 201 bp, Homo sapiens
acatttgtatatctgtacttactatgtaaaaacaaaccaagataatgcttactttattagactattcaagactattccctacgccttttgattaattcagrgttcatgacttttgttagaaacaaattctgttacagatttagttcttcgcattttattctgtgataatttgccatccaggaaatggttccttacatgaga

SEQ ID NO: 29199 - DNA, 201 bp, Homo sapiens
ggtaagataggaaaatgacctagaagttgagaaataactcaaatccttaaaaatgaatctctaattaaagtcttttatattcatgttatttttctacttaagtaataattacattattttagattcttatgatacttttaattaaattgagataaaaattaagatttctttcatggttccctattggccatgcagtcataa

SEQ ID NO: 29200 - DNA, 201 bp, Homo sapiens
tgatcttgatctgcatgaatcagtaaggatgggctggataaacaagttggaaccacagttatgagtaccatgacattaactgaaacaaatgagaagggatkgaaaaatcggcggttaagtgtcttttaaggtcatttccaacaaaactacaaaggacctatgaaaggcttttcaggcacgtactcttgttgcctagctgaa

SEQ ID NO: 29201 - DNA, 201 bp, Homo sapiens
taataatgcctatcagattaaagaagttactttatttttgcatgaaattggttgtatttttgttgcactacttcatcctttgagtattgtgaaaagtctgygcattgactataatagcatttaaagccaagtttgaaggtctaagataatggcacacatccatgtcctttgctcacaagttctgcctaaagactttagcct

SEQ ID NO: 29202 - DNA, 201 bp, Homo sapiens
gagtgggttgggatattttcatcccctccggagctgtgtaaatatgttccaggccaaaagttcccaggagagtgtcattcctggggtctatttagtgccaygggcttgactcaaggaggatcctagtggcttcccgcaagagttggaaaattgtgatcccctggccatttttccacaatactggaagccggaaagtgtagg

SEQ ID NO: 29203 - DNA, 201 bp, Homo sapiens
gtctgcgcattgactataatagcatttaaagccaagtttgaaggtctaagataatggcacacatccatgtcctttgctcacaagttctgcctaaagacttyagcctgcttgaaacactctaaaggttgtgaaattaatggatataccactgatgcaacacaactcagtgtcaccagctagggagttaagacatgttcttgt

SEQ ID NO: 29204 - DNA, 201 bp, Homo sapiens
ttggggcagtgaaactattctgtgtgatcctctaatgaatgcatgatattatgtctttgtcaaaacccatagaacttggctgggcatggtggctcacaccrgtaatcccagcactttgggaggcagaggcaggtagatccattgaggtcaggagttcaagaccagcctggccaacatagtgaaaccccttctctactaaaa

SEQ ID NO: 29205 - DNA, 201 bp, Homo sapiens
ttaaacaataactgctgtaaaaccatggcatcagtgaggtataaagttttgtagaatcccaggctgaagactttttggatgtcgttttctcatttctttayattaaaaagaatataatttctttttaaaattaaaactaaaatgtccaccggcctcatattctttattgaacttaagtgctttgaaaatatttttgcgatt

SEQ ID NO: 29206 - DNA, 201 bp, Homo sapiens
tattattatacatacttaattttatttttgctgaaaatagtatggcaagccagtgcatctctgttagaaatagaaacttagtagccacctcaaaagcaagrtcataattctgtgaatcagctaataggtggtatttagcagttaggtatgggctaccctcgtgcctcatgactaatcacattgcttactcgtcatgcattt

SEQ ID NO: 29207 - DNA, 201 bp, Homo sapiens
actacatgttttcctaaagaatttggaactgattagaaacatcctgattttatttaaaagcaatataatgtatttttacagtttgttttcaagaaggttcaaaaaaaaatttttttttttttttgagatggagtttcgctcttgttgcccaggttggagtgcaatggcgccatcttggctcactgcaacctccgcctccca

SEQ ID NO: 29208 - DNA, 201 bp, Homo sapiens
tttcctaaagaatttggaactgattagaaacatcctgattttatttaaaagcaatataatgtatttttacagtttgttttcaagaaggttcaaaaaaaaatttttttttttttttgagatggagtttcgctcttgttgcccaggttggagtgcaatggcgccatcttggctcactgcaacctccgcctcccaggttcaagt

SEQ ID NO: 29209 - DNA, 201 bp, Homo sapiens
agtgcaatggcgccatcttggctcactgcaacctccgcctcccaggttcaagtgattctcctgcctcagcctcccgagtagctgggattacaggcgcccascaccacacctggctaattttttgcatttttattagagacggggtttcaccatgttggccagtctggtctcgaactcctgacctcaggagatccacctgcc

SEQ ID NO: 29210 - DNA, 201 bp, Homo sapiens
ggtggcttgccctgttgcctttttaggactgttttcatgggataattatcctctcacatgtctccatacacaggtgcaatcaaagtggagcctgcatctcmaccttattattctgagaagactcagctctacaataagcctcatgaagagccttccaactccctcatggcaattgaatgtcgtgtctgtggagataaagct

SEQ ID NO: 29211 - DNA, 201 bp, Homo sapiens
gcaaaggttaaaagtcccattttcagcatatttacatgtagtaacaacttgataacacagcgctgagaatgccaggctcagaggagccaagctgggctccygtccagtcagcctctagctcaccaggaaaccctgagcaggtcactttgcctcattttctttatctgtcaaatgagaactcagatgatctcaaaacagcct

SEQ ID NO: 29212 - DNA, 201 bp, Homo sapiens
aagtagaatcaaagcctagtgctagcccagaataagttattcaataaatgcttgttgagtgaataatcatccgaaatgattataatactgcctaccattcrttgaaagcttcagtatgtgggagaatctgtcctgggcactttatatacacccataatctgtttggatttcttggtaggaagactacatggctgcatacat

SEQ ID NO: 29213 - DNA, 201 bp, Homo sapiens
tagctgggaccacagcacatcaccacacccagctaatttttaaaaaattgttatagagacagggtctcactgtgttgtctaggctggtcttgaactcttargctcaagtaatcctcccaccttggcctcccaaagtgctgggattacaggtgtgagccactgtatctagcctagaatattttttatagtgctcaggagaaa

SEQ ID NO: 29214 - DNA, 201 bp, Homo sapiens
tactagttaactggagaggagaccaaacccaaaatattacaaaacatagatattaaaaatactgtgaacaacaatcagcccgctttctcccacctctcctrtaccagctaaatatttacctccctcatccgtagagggtttttggacaagacaggctggtgcctacatggtgaaagttgtttttctctcttttcttgtaat

SEQ ID NO: 29215 - DNA, 201 bp, Homo sapiens
aacactaaaccacaaatatacaacaaggccattttctcaaacgagagtcagcctttaacggtaagtaaaatcagaatttatactgcatttgtattgaaaartatcccttttaaagaatatgtaaattatacattgtattttattgtaaaatttcctagagagtgatttttgactattataatactttctgctatataattt

SEQ ID NO: 29216 - DNA, 201 bp, Homo sapiens
tttgtgtatgttgtaaggcaagggtttatctctttcatggggatatccagttgacctgcttcgtttattgaaaagatcatcctttgcccactccccagcaktgacatttctgtcataaaccaggtgaccatataggtctgggatttattctggacttactcttctattgcattgtatttttgcaccaattaagattgcctt

SEQ ID NO: 29217 - DNA, 201 bp, Homo sapiens
taggggaagcaattaaatgtgaaactgttatttaaaccggcaagtgtcagaatgttaacccacttcagagcgaaggctctaccagcaacatgtgtgttcastgcagaatgtgctggttacagatgatctttatctgtttgtcaaagcatttgcaagatctctattttatgtcatcccctttccctgaaagcagcagcagta

SEQ ID NO: 29218 - DNA, 201 bp, Homo sapiens
agtctgtgcagtaatagaggtatcgtcattcatgtgacataaaagatggaaaggggcttcattcatgttagtgatggaaataggaaagtaggtgaagtgawtctaatagatgtttcttttatgaaataatttttaaaagattctccagccctgcatgatttatgatgaatcattttgtggtctgttagttacttctagaga

SEQ ID NO: 29219 - DNA, 201 bp, Homo sapiens
ctgttatttaaaccggcaagtgtcagaatgttaacccacttcagagcgaaggctctaccagcaacatgtgtgttcactgcagaatgtgctggttacagatratctttatctgtttgtcaaagcatttgcaagatctctattttatgtcatcccctttccctgaaagcagcagcagtaaacgacattgctcctcaaatcatc

SEQ ID NO: 29220 - DNA, 201 bp, Homo sapiens
ttgagcctttcataagagataaggttgtgaatcctaagaccctaggaccatttacttagatgatctgctctctggttcgtcctctgaaaagtctgcttcgygaggggtgtgctgcatttgccttgcctaagtggtgtggcacacaactgtactgtcaccttaggcttaataaccatgtgtcatctagaatgaagttatatt

SEQ ID NO: 29221 - DNA, 201 bp, Homo sapiens
aaacatccggaaagcagcggggggcagggagggggaaggctgaagggaaaagaaaaaggctgaagggagcaataattgaggaagaaagaataggaaaaatrtagaaaggacccaagaaaatcagagaaatgagaggaaaagaaaggtaagaagaaaatgaggcaagtttacagagcagtaatgaaaatagtaatagctaat

SEQ ID NO: 29222 - DNA, 201 bp, Homo sapiens
attgctataggccacaccatgatactttgctgaattggatcagaaaagtaccctcaaattcccagcatcatttcttcaaggaagtagtgaattggggcacygtgggttttttgttttgttattgttcttaaaccaccttgcctatgtgcactcaactacaggaacgagaacttgcctgaaaccccaaacgtgtctgcatca

SEQ ID NO: 29223 - DNA, 201 bp, Homo sapiens
ccactgtggtcatctggttccctaattgagacacctcctgagaaaatctgtgctagggaaacacccagcccaggtgggcagatctcaagaggaccagaacrtttgaatctgcttcagataaaccctccacttaacagtaccagatctggacgagatggaagctttgtagatttgcccataatccacagtgctctgtaatca

SEQ ID NO: 29224 - DNA, 201 bp, Homo sapiens
agtttcatgtaggtaagactgtgtagaatgtcgggtctcgatgttggcgctattcaagccctgatgataaggcttttggcattagatgctgttttgtcttsatggaaaatacagctattctaggatccttgagcctttcataagagataaggttgtgaatcctaagaccctaggaccatttacttagatgatctgctctct

SEQ ID NO: 29225 - DNA, 201 bp, Homo sapiens
aaggttttctctcatttttcaaatagaagtactaaacaatgccagagaaataaataaacaggcaaaatacgttggctatagtttatattatttcctgctasagttaacaaaatgggaaaacattttatcttcatggtctactacatttatgccatgtgttaagtaataaaatagcttttgtaaattataaattaaaaggta

SEQ ID NO: 29226 - DNA, 201 bp, Homo sapiens
tctcgaactcctgacctcaggagatccacctgcctcggcctcccaaagtgctgggattataggtgtgagccaccgtgcctggcaaagaaggctcaaatttrgtgacttttaggactagagcagtttgatgtctgcaaaaatctagacaccaatttcttgaaggcaggtactgactgaattctattccagcatatagcacaa

SEQ ID NO: 29227 - DNA, 201 bp, Homo sapiens
taaatgaccagatggcagaggtgaaagaacggcaatccttggtgtctactccccccagaatggatcttgtctctgccctactgtgtttcacatctggggaygattccttctaagatacagtgcagttctgaatgggttcagaaggaagaggactggtagcaggagggggtctgggggaaaggttacctaaatctgcctgac

SEQ ID NO: 29228 - DNA, 201 bp, Homo sapiens
cagccattagggaggctgaggcaggagaatggcgtgaacccgggaggcagagattgcagtgagccgagatcgcgccactgcactccagcctgggcgacagwgcaagactccgtctcaaaaaaaaaaaaaaaaaaaatcaaccgctgttaggaaattctttttttttttttgtctctcttaaattcctcttaatctaaataa

SEQ ID NO: 29229 - DNA, 201 bp, Homo sapiens
tgaggcaggagaatggcgtgaacccgggaggcagagattgcagtgagccgagatcgcgccactgcactccagcctgggcgacagtgcaagactccgtctcaaaaaaaaaaaaaaaaaaaatcaaccgctgttaggaaattctttttttttttttgtctctcttaaattcctcttaatctaaataaagacattttattttgt

SEQ ID NO: 29230 - DNA, 201 bp, Homo sapiens
aatagattttcaaatattaaatcctctttgcctttctgagataaatgtaacttgattatggtggttcattattttaatagaggatttaatttgttaattarcattttatttattatttaaaatcaatattgataagtgggactgatatttttctctgttgtcaggttttaatatcagtgttatgacactccagaaaagtta

SEQ ID NO: 29231 - DNA, 201 bp, Homo sapiens
aaggtaagataggaaaatgacctagaagttgagaaataactcaaatccttaaaaatgaatctctaattaaagtcttttatattcatgttatttttctacttaagtaataattacattattttagattcttatgatacttttaattaaattgagataaaaattaagatttctttcatggttccctattggccatgcagtcat

SEQ ID NO: 29232 - DNA, 201 bp, Homo sapiens
aggtaagataggaaaatgacctagaagttgagaaataactcaaatccttaaaaatgaatctctaattaaagtcttttatattcatgttatttttctacttaagtaataattacattattttagattcttatgatacttttaattaaattgagataaaaattaagatttctttcatggttccctattggccatgcagtcata

SEQ ID NO: 29233 - DNA, 201 bp, Homo sapiens
gtaagataggaaaatgacctagaagttgagaaataactcaaatccttaaaaatgaatctctaattaaagtcttttatattcatgttatttttctacttaagtaataattacattattttagattcttatgatacttttaattaaattgagataaaaattaagatttctttcatggttccctattggccatgcagtcataat

SEQ ID NO: 29234 - DNA, 201 bp, Homo sapiens
ttgagtctgtattaaaattttttttttatttttgagacagggtctcactctgttgcccaggctggagtgcagtggtgtgatcatagctcactgcagccttsaactctgggactcaagagttcctcctgcctcagcctcttgagtagctgggactacaggcacatgccaccatgcccagctaatttttctgttttttgtaga

SEQ ID NO: 29235 - DNA, 201 bp, Homo sapiens
gcattacacactgacacattagctctttctaaagaagaacatgtcccattctgaaaagaaaattattgctttgtttttgatattgagtctgtattaaaatwttttttttatttttgagacagggtctcactctgttgcccaggctggagtgcagtggtgtgatcatagctcactgcagccttgaactctgggactcaagag

SEQ ID NO: 29236 - DNA, 201 bp, Homo sapiens
aagtcttcagcagttatattccacttcattgccagggtgtctggctctaaggggaatctctgcttagaggaccattaatccttaggaaccttttttttttwaaaaaatctaaagatggttcctggacatcatttaccaactggcagtttaaatggcctgtgtaccataaattgtgaggttaaaaaaaatctggtacacagg

SEQ ID NO: 29237 - DNA, 201 bp, Homo sapiens
ggcattacacactgacacattagctctttctaaagaagaacatgtcccattctgaaaagaaaattattgctttgtttttgatattgagtctgtattaaaawtttttttttatttttgagacagggtctcactctgttgcccaggctggagtgcagtggtgtgatcatagctcactgcagccttgaactctgggactcaaga

SEQ ID NO: 29238 - DNA, 201 bp, Homo sapiens
ggcttacttggtttgtctgcatgtttccttctgtcatcccccactcctaggacccatatggaacattctctcttaattaactcttttattgaagtataatrtacttagaggaaaaatgtccaaatcattttcacaagtgaacatacttgcgaaattagcacccagacaaaaaaaaaaaaaaacagaacaataccagcactc

SEQ ID NO: 29239 - DNA, 201 bp, Homo sapiens
agcctaccccagcagagaggacccttggccctggccctactccagactcaactgtaacctcagcaaggtgcagggagaggatctcaggtgggcctcctggsaacagtgccttttcaggcactaggctgttgggaatggagagagaagagaaaggccctggcactgtctgggtatttggatggatttctgtggcacaactgt

SEQ ID NO: 29240 - DNA, 201 bp, Homo sapiens
aaaggactgagtgtgcgtggagcagaaaggggaaagagactagtggggagctggtgaccagttggagggtggagggtagggaacaaccctggcagatccaktttgcccttgactagagcttaaagaccaaaggaagcgttcttgtttttaagtaagtcaggtgttctaagtttaatgttaatatgctttttcaattagatg

SEQ ID NO: 29241 - DNA, 201 bp, Homo sapiens
ggtagggaacaaccctggcagatccattttgcccttgactagagcttaaagaccaaaggaagcgttcttgtttttaagtaagtcaggtgttctaagtttartgttaatatgctttttcaattagatgtttgagtatatttccccagttgaattatgtagagggaattacaaatgagaatacatcttacaatttttgaatta

SEQ ID NO: 29242 - DNA, 201 bp, Homo sapiens
ttccctaaaccatcttgccttaacggaggctcagtcagggggacaatgggactgatctgtaaatgatctaacttgtcattgcagaaaatatacttactccrtggccacaaaatttcagcccttcagccaagcttcatccatcacatcataaagaataacttgccaaagaggggtttgaaaatccaaaccagatccctctcc

SEQ ID NO: 29243 - DNA, 201 bp, Homo sapiens
ttcatcaagcaggaggatctgtagtcattaaaccaaggtgccagtctggggcccagccttcaatgaagcatcagtggctttttcattcccatagagcaackgcgaggaagaccccatgctcccaggggcccaattctccaggccaggaccagatcatttgttccttctcagaatctgagatcttttgctgatggttccaaa

SEQ ID NO: 29244 - DNA, 201 bp, Homo sapiens
ccaaggtgccagtctggggcccagccttcaatgaagcatcagtggctttttcattcccatagagcaactgcgaggaagaccccatgctcccaggggcccarttctccaggccaggaccagatcatttgttccttctcagaatctgagatcttttgctgatggttccaaaattgaatgctgaaatctaaaaagaaaattata

SEQ ID NO: 29245 - DNA, 201 bp, Homo sapiens
atcttgagttaaatgaccagatggcagaggtgaaagaacggcaatccttggtgtctactccccccagaatggatcttgtctctgccctactgtgtttcacrtctggggacgattccttctaagatacagtgcagttctgaatgggttcagaaggaagaggactggtagcaggagggggtctgggggaaaggttacctaaat

SEQ ID NO: 29246 - DNA, 201 bp, Homo sapiens
ctggcttctagggatgatgggtagggtgtttataatcgaatgaatataaactaatcttgagttaaatgaccagatggcagaggtgaaagaacggcaatccktggtgtctactccccccagaatggatcttgtctctgccctactgtgtttcacatctggggacgattccttctaagatacagtgcagttctgaatgggttc

SEQ ID NO: 29247 - DNA, 201 bp, Homo sapiens
atgttctcaaatgagaaaattgactgcaagaacatttgtccaaatacatgtttttatatattttatgctactttccagaatattaacagttttacatagcrctgttttggaagtcactcattgttttcatctttctgattaagaaatagggccaaagttgtacattgcactagtagtagacttttaaagatgtctttgtct

SEQ ID NO: 29248 - DNA, 201 bp, Homo sapiens
ggggaagcgaagatccgcgtgcgtccgtcctgaggccgcgcggcacccctgctgaggaggaggtcccgttcgctgtccagagcccaggggcgaccgccgcktggggaccgggggaccgttcagcgaggggcgcgcttgtagctggccaggccctgtgccctgacgcgttgtgctggccctacgcccggcggaggggctggg

SEQ ID NO: 29249 - DNA, 201 bp, Homo sapiens
caggagaatcgcttgaacccaggaggtggaggttgcagtgagccgagattgcaccactgcactccagcctgggggacagagcaagactctgtctcaaaaawaaataaataaataaataaaggcttagtatagaactcttcccagtcttttttctccactttgattttttttttttttctcaatctcttccatgacaattca

SEQ ID NO: 29250 - DNA, 201 bp, Homo sapiens
taagaaaatcatctcttccttgaaagctttaaaaaatcaactataaaactaatagcttttggaggaagtaattctttgataagttttcaattatttccatygttaattatttttctgtatcttaagtcaacttcaccatttatttcatttcagacaagttagtctgagtaaactgcccttggcctgccttattatttactt

SEQ ID NO: 29251 - DNA, 201 bp, Homo sapiens
tgtgttttgcctgttgtgtgtaatgagcggtttcgctgtgggtgctcctttcatttctggctaacacattagagtgtgtttatgtaaattgctgtgatacyggtcagcagtcacagccagaaaacataaaacatgtgggcattacacactgacacattagctctttctaaagaagaacatgtcccattctgaaaagaaaat

SEQ ID NO: 29252 - DNA, 201 bp, Homo sapiens
gcttctttcagcatcactcatcaagttgaaatttatgagtgtcctttgttatcacaaacaaagcaagcaaactgaacaaatgagaatgcttctttagtatytacatagcactttaaaagctctgttttctttacaaaatgtgtgtatggaaaggtaaaatgggaataaatagtattaaattctgttcttagaacctactgt

SEQ ID NO: 29253 - DNA, 201 bp, Homo sapiens
ttcaagaattttgttgcaagccagttgttaaacacagccattataattatgtaaatttgcaaattatgttaaaaacaaggacaataaatactcaaaatgcaaaaaaaaaaaaaaaaacctactgcatagtgtaatagtgctctcacttttctctccttgattctgatgtcaatcactcattgtcacctccactagaggggg

SEQ ID NO: 29254 - DNA, 201 bp, Homo sapiens
atcactcattgtcacctccactagagggggataaaaaggataataggaaatcagaatattttgatttgtagttcaactgttgatcaattatctttgagacttttaacattcatgactaaggaggattaataattaacatgagctgtagaattaaggtttgtatggcatgataagtataaaccagttttgggaccgctataa

SEQ ID NO: 29255 - DNA, 201 bp, Homo sapiens
aggttctgttgagtgacgcagataggaaataacctagctgcatggttgctgtctttcaaaaggccgtactcttaggatccacatacaggcccccatcttcygtgaagccattgtccccagccatcccattttgacgagtttttttgagtccctgtgaaactttggcttttttacatttatctggcagttaactaggtgctg

SEQ ID NO: 29256 - DNA, 201 bp, Homo sapiens
cacttggtgattctagtcacctctattttgttataggataactggttttctctgagttttacaccagaatgccttcttcttttaatacgccttcttacttrgtgcttttctcatgatcattttcccaaacttcctaatggacatagtgtctcattttctgtctgtttttaaacctgatactttggagtttaatccatcaaa

SEQ ID NO: 29257 - DNA, 201 bp, Homo sapiens
tgtctcttaaatagcaaagttttttgacctgatttactaaaaaaaagtttgttgacttggcttaaattttattttcttttctttttttctttttttttttytttgagacagagtcttgctctgtgaccctggctggagtgcagtggtacgattttggctcactgcaacctctgcctcccgggttcaaacaattctcgtgcc

SEQ ID NO: 29258 - DNA, 201 bp, Homo sapiens
tttaaaggaatcccaactgagaggtaagattttcttcccctctaacacccaagtctggtctctaaggaggcccctacaaaacaatagttgtattagtcagygataaaatttatttagggtcaatggaaatgaatttatgaatttgagactcaagggtacatgtcagtttcttcttgggaaaatccaaggtaatattcacag

SEQ ID NO: 29259 - DNA, 201 bp, Homo sapiens
agtagccaggattacaggtgcccaccaccatgcccaaccaatttttatatttttagtagagatgggttttcgccatgttgtccaggctggtctcgaactcytgacctcaagtggtccaccctcctcggcctcccaaagtgttgggattacaggtgtggaagccaccgtgcctggctgacttgggttaaatttttaagttta

SEQ ID NO: 29260 - DNA, 201 bp, Homo sapiens
ctgagaggtaagattttcttcccctctaacacccaagtctggtctctaaggaggcccctacaaaacaatagttgtattagtcagcgataaaatttatttasggtcaatggaaatgaatttatgaatttgagactcaagggtacatgtcagtttcttcttgggaaaatccaaggtaatattcacagagtactcagatgggaa

SEQ ID NO: 29261 - DNA, 201 bp, Homo sapiens
caccacgttctaattacagatttccaataaaagtattaatatgattcctacatcaatgagctaatcattagaagtagaaggcaatgtggggaaaaaaaaamaaaacaagaatggcagcactgacctagtttctagttgccaggaccaaagacgtcgtgacaccactgtcctttctaaatctccttaccttgcttaatctta

SEQ ID NO: 29262 - DNA, 201 bp, Homo sapiens
gcttgagaattgatgctcagtcttatttatattattctatccctagttatgtgatacttaactgtattgctcggtatttagcagcccattatctaatcatwacatcaccctcattctttctgagcttgtttcctttttgtgaaatggggctaccattcaatctcaccgaattttttttttttttttttgagacagaatctt

SEQ ID NO: 29263 - DNA, 201 bp, Homo sapiens
tttgccacaggtaaggagaaggtagatatgagggaggtagagaaatagggaaataccctgagtaggaatgtaccaggtctgtatatgctcaactcccacartcagcaggttgcatgattactgtgtatagtcttaaaatataaggttgatttctaagaatttaccctgcttcttggtgacattgtaggacatctcagtttg

SEQ ID NO: 29264 - DNA, 201 bp, Homo sapiens
atgtgtggatatgacatattgagtcagattatctgaccttctgagaagagttcagattagcaaaaacgtggggtgagaagtccttcgcagtttgccacagrtaaggagaaggtagatatgagggaggtagagaaatagggaaataccctgagtaggaatgtaccaggtctgtatatgctcaactcccacagtcagcaggtt

SEQ ID NO: 29265 - DNA, 201 bp, Homo sapiens
ctcggctgaggggtccggggctgaggcagggtcatggtccggcaggacccggactgacgggtcgcgggcgggcggctcacgggtgaccgggtgaaggggtyttgggctgagggcacccgggctgagggtcgcgtctaccggagcgcgcactaggggcggagggcgcgggcacagagagccgcggccggtgccgactcgagt

SEQ ID NO: 29266 - DNA, 201 bp, Homo sapiens
gggagtgtttgttcagttctagcaaaagcaagaaaatatatgaattaagtgtcatgacatcagagacttaggcagttcaacacttaaaaaattgcaaacakaactaagaaaacctcagaggtttttatgggagtttgtttgctgcacagaaaataaacatcagactaacaacaaggttttgattagttttgcctgttagct

SEQ ID NO: 29267 - DNA, 201 bp, Homo sapiens
cgaaggcaaagaaaggctcatgctggtgcgtgtaggtgggctgagtgtccctgtccgggagtggggagccgtgttatcttccactgccttaatcctacagygtaggctttctcagagtcattgccataccttcaactgttccagtggccaggctgttctcaacttgaaaatcttttgtgggacagtgccatgaattttttt

SEQ ID NO: 29268 - DNA, 201 bp, Homo sapiens
gggggctgaggattgttggagaggacttctcccaccttctctgggccccaaactgcacactggactggcaagccactctgcccactgcagtgtggagctayaaagcccaagtagggacttcactaaaaggatgcagaggcgaaggcaaagaaaggctcatgctggtgcgtgtaggtgggctgagtgtccctgtccgggagt

SEQ ID NO: 29269 - DNA, 201 bp, Homo sapiens
atgggaagttactggtaacagcacacggggtgatggggtgaagaggcttgtgtgcgtgggccccgggggctgaggattgttggagaggacttctcccaccytctctgggccccaaactgcacactggactggcaagccactctgcccactgcagtgtggagctacaaagcccaagtagggacttcactaaaaggatgcaga

SEQ ID NO: 29270 - DNA, 201 bp, Homo sapiens
gcaactgccaaactgcttttcacagctgctataccattctgcattcccactgcaatatatatgggttctaatatctctacattgctacaacaccttttttwaaaaaaaaaaaaaaaaaaaaagctgtcctattaggtgtcaagtgttatctcattgtggttttgatttgcattttcctaatggctgctgatgttaagcatc

SEQ ID NO: 29271 - DNA, 201 bp, Homo sapiens
cagagcaagaccctgtctcaaaaaaaaaaaaaaaaaaaaaaaaaaagggagaaactgatttcaaggagccaagaaaagagacagattcaatagtggaggaygggcaaaatatcaaatgctgcagaggcagagaccgtggtgtgctggagccacattgttaaattttcacaattttattgagccaatcgttatgcatgctat

SEQ ID NO: 29272 - DNA, 201 bp, Homo sapiens
ttgctcggtatttagcagcccattatctaatcataacatcaccctcattctttctgagcttgtttcctttttgtgaaatggggctaccattcaatctcacmgaattttttttttttttttttgagacagaatcttgctctatcacccaggctggagtgcagtggggcaaactcggctcactacaacctctgcctcccaagt

SEQ ID NO: 29273 - DNA, 201 bp, Homo sapiens
tccattcatctactgatggatacttgggttgtttttgccttttgctattgcagataatgcttcagtaaacattggtgttcaagtatctgttttagtccccrcttttagttcttttgggtatatacccaggagtgaaatgctgggtcacatggtaattctgttttgctttttaagcaactgccaaactgcttttcacagctg

SEQ ID NO: 29274 - DNA, 201 bp, Homo sapiens
tcggtatttagcagcccattatctaatcataacatcaccctcattctttctgagcttgtttcctttttgtgaaatggggctaccattcaatctcaccgaattttttttttttttttttgagacagaatcttgctctatcacccaggctggagtgcagtggggcaaactcggctcactacaacctctgcctcccaagttcaa

SEQ ID NO: 29275 - DNA, 201 bp, Homo sapiens
actgctaattcttgattgtagaacaaattttcctatgaaaaccatgttgtgtattttatatctctattagttcgttaaaagtttagcagttttagatgtcsaaccagtaaaaaacaagttgcccattctatcatttttttttattgtggtaaaatatatttaagataaaatttacgattttaaccatcttaagtgtacatt

SEQ ID NO: 29276 - DNA, 201 bp, Homo sapiens
tataaatggattttgattgatttttttaaagtattgactcactaatcttcaaattggtagaaggaggtcagtagactttgactcataaatttttgtaagcrtaatggcttgttgaataactcctaattgtctttaacaaccttggtttctgtcctcttttttccaaatgcagatatagcagatgtcttcagcatctaattt

SEQ ID NO: 29277 - DNA, 201 bp, Homo sapiens
gcgtaggcactcaataaatgtggaatctgaatcttacttaaagctagtttatattttcaagtcttcttacttttactaatgctgctttaagatatattctrtaagttcaaatgtaaagttctagattgggaaagaatttataatgtgtctaataaagattgttagagacaaacttttagactgaaccaatctactattaat

SEQ ID NO: 29278 - DNA, 201 bp, Homo sapiens
tttttttatagaggcagggtctcactctgttgcccaggctggtctccaactcctgggctcaagggatcctcttgccttagccacccaaagtgctgggattrcaggtgtgagccattgcacctagcagcattattttcctttaaatcaaaataatataattgtttaatataattatgtccataaaatatattacttttgaaa

SEQ ID NO: 29279 - DNA, 201 bp, Homo sapiens
ccccggtcaaaaatttttttaatttaaaaaattttccaaaaggggcacagatacattgaacattgaccttcctttgtctgcttttatgggactatccggcttgttgtgatggttgtggtgaaatttacatccaggatacaggattatttgttcttctcaaaggagtgtcccattggcccagcatttctctcatgttgtctc

SEQ ID NO: 29280 - DNA, 201 bp, Homo sapiens
cccggtcaaaaatttttttaatttaaaaaattttccaaaaggggcacagatacattgaacattgaccttcctttgtctgcttttatgggactatccggcttgttgtgatggttgtggtgaaatttacatccaggatacaggattatttgttcttctcaaaggagtgtcccattggcccagcatttctctcatgttgtctct

SEQ ID NO: 29281 - DNA, 201 bp, Homo sapiens
ccggtcaaaaatttttttaatttaaaaaattttccaaaaggggcacagatacattgaacattgaccttcctttgtctgcttttatgggactatccggcttgttgtgatggttgtggtgaaatttacatccaggatacaggattatttgttcttctcaaaggagtgtcccattggcccagcatttctctcatgttgtctctc

SEQ ID NO: 29282 - DNA, 201 bp, Homo sapiens
cactgtagtcatttggacaaattagcaaacccaagttttgctttaacttggattgccttaataaagatgttttggggcttaatggcacagttgctcaactcccccactttattccgtgatgttcagacccagccagcatttccccatcaggctcttgcaccatgattgacagggacacttttactagtccccttgaagaat

SEQ ID NO: 29283 - DNA, 201 bp, Homo sapiens
tacttgtgcaagtagatctaaagccctatatggaatttattgctttagccttgtagcgttaatcacttgtggctagaatagaaggctccgtttaaaaaaaraaaaggctgggtacagtggctcacatctgtaatcccacaactttgggaggccgaggcgggcagatcacgaggtcaggaggtcaagaggtcaagaccatcc

SEQ ID NO: 29284 - DNA, 201 bp, Homo sapiens
gaggtaggagaatggcgtgaacccaggaggcagaggttgcagtgaggctgagattgcgccactgcactccagcctgggcgacagagcgagactccatctcaaaaaaaaaaaaaaaaagaaaagaaacctacattttaaacactttatggatatggaaaaacaaaaaccgcagaactctttattgcacaagagtaagtggca

SEQ ID NO: 29285 - DNA, 201 bp, Homo sapiens
tcgtgatctgcccgcctctgcctcccaaagtgctgggattacaggcatgagccaccgcgcccggctttgtagctcagtttttaatgacagggtttggcttygattctgatgtctgcacaacgctcccagggctgtaagaactgcagaacacactgagaagacaccgtcccagccatggaaagcccttctatgcagtcattt

SEQ ID NO: 29286 - DNA, 201 bp, Homo sapiens
cttaaaatataaggttgatttctaagaatttaccctgcttcttggtgacattgtaggacatctcagtttgccacttagcactgttattctttctggctctrtactaaaggagataatttgggcaagggaatggaaagaggttactttttcatcctgtatgtttaaggaataaattttccttcatatcgagggcagtggaga

SEQ ID NO: 29287 - DNA, 201 bp, Homo sapiens
tcagtccagatcctgtgatctgaaataatttaaattattaaaagttagatatttttaaccttttatactcccactagacaggacataggaaatttagtgaygtaagcatctttaataatccttaaaagtcataagacttggtggctgggacaagaaacaattaggtataaatttcagggaaataccataatggcatgactt

SEQ ID NO: 29288 - DNA, 201 bp, Homo sapiens
tattctcaactttctgtttgggggttcagtgtctccttccacagttttctttgcctcaaataaataaagccaattatgagctctacagtctgagttatagyattcttggttctttgggtaccgccaataacttatatatcacaaataatacatatacagtgttacatagtaagtgctcaataattggaagctagttccatg

SEQ ID NO: 29289 - DNA, 201 bp, Homo sapiens
tgatttgtagttcaactgttgatcaattatctttgagacttttaacattcatgactaaggaggattaataattaacatgagctgtagaattaaggtttgtrtggcatgataagtataaaccagttttgggaccgctataattctaaaaaagcaggtagactagatgattagttgtacacttattactgctaattcttgatt

SEQ ID NO: 29290 - DNA, 201 bp, Homo sapiens
ctccccaactaatcttccttctcctgtatcttattccctagggccacttgcacctttcaaaatggataaattaaattcccctgctccccttctaccaactytaacatcatatccttggtgtatgatgccctacttttcattgttttgcctaaataagagtatgcttgggaattttaggcttagggctgggaaaagatggga

SEQ ID NO: 29291 - DNA, 201 bp, Homo sapiens
gtatatttttatctactaaacacatgatcaaatagggattttttattctgaatttaacattaacagaaatgttatgttgctctttatgagacgaaataaarttggatgtcacttataaatggattttgattgatttttttaaagtattgactcactaatcttcaaattggtagaaggaggtcagtagactttgactcataa

SEQ ID NO: 29292 - DNA, 201 bp, Homo sapiens
actaaactacaattgtttggcaccctctcttctccttatcttgcaaaatcaaattaagcactagtggaaagaaacagttcagagaggaatatgggaaaggraaaaaaaaaaccaaaatgtgatttccaacgagactagagatttgttctttatctacatggtcatgttactcatttgatagcatctatctcaggggtatta

SEQ ID NO: 29293 - DNA, 201 bp, Homo sapiens
ccctttttcgttcctggtgttccctatgttttcttctttccttcttttctgtctctgtttctctccctctgaatttctgcttcctttcctctctttcccarttgctactgtctctgcctttggttgtctctgagtgtaatatggaagtgaagtatatttttatctactaaacacatgatcaaatagggattttttattctg

SEQ ID NO: 29294 - DNA, 201 bp, Homo sapiens
cgtggtgtgcacctgtagtcccagatactcgggaggctgaggcaggagaatcgcttgaacccaggaggtggaggttgcagtgagccgagattgcaccactrcactccagcctgggggacagagcaagactctgtctcaaaaaaaaataaataaataaataaaggcttagtatagaactcttcccagtcttttttctccact

SEQ ID NO: 29295 - DNA, 201 bp, Homo sapiens
aaactctgtgagattgctgtgttctctaggacttaacttcacagctagtctatttttcctttcagaaatgaccatggttgacacagagatgccattctggsccaccaactttgggatcagctccgtggatctctccgtaatggaagaccactcccactcctttgatatcaagcccttcactactgttgacttctccagcat

SEQ ID NO: 29296 - DNA, 201 bp, Homo sapiens
tacagaattgaattaagaaaagaatttccatgagagatatgcatttacaattttgtagatttaatctttgcatagacttttttgttgcagatactgaaaakgaatccataaaaatacatagatccctttactagccacttttaatttacggatgaggaatattcagttcacagactggctagcgctttttagctttcttta

SEQ ID NO: 29297 - DNA, 201 bp, Homo sapiens
attgtctgaataaataccaatatctactagtatttatttccttgctggtaataatgtgttttcattaatttaagatttataggaacatacttgggtgctcygcctgctagaaactgatctgtagcatgagccatttgttgaaagtacttagatatttctgcatttatttatttctgtttcagaccccacaataactatatt

SEQ ID NO: 29298 - DNA, 201 bp, Homo sapiens
atatagtataataccatttaataaagcctcaaaacaagcaaaattaaatagtatattattttgttttacatagtatgtgataaagctgtattttcttccttttttttttttttttttttttttgagacaatgtctcactctgtcacccagactggagtgcagtggtgcaatcataacttggcttactgcagttagacctcc

SEQ ID NO: 29299 - DNA, 201 bp, Homo sapiens
tatagtataataccatttaataaagcctcaaaacaagcaaaattaaatagtatattattttgttttacatagtatgtgataaagctgtattttcttccttttttttttttttttttttttttgagacaatgtctcactctgtcacccagactggagtgcagtggtgcaatcataacttggcttactgcagttagacctcct

SEQ ID NO: 29300 - DNA, 201 bp, Homo sapiens
ttgtgtatcagtagtgtcattctgctttaaatgtaagaaaatcctgaagatgtctgggtctgaaactttaaatggcatatgagaatttagattcatttaattttttttttttttttttttttgctgtttattatgcaaagacgagtattcgtttccttcacttcaaggaacgtccatgagttgtggaaagggtaaaacaaa

SEQ ID NO: 29301 - DNA, 201 bp, Homo sapiens
agtcctttatagtaattgcattttaaaaatatgtcttctttattttttattattatttttttttgagatggagtctcgctctgtcacccagtctggagttmaatggtacaatcttggctcactgcaacctccgcctcccaggttcaagcaattctcctgccttagcctcctgagtagctgggattacaggtgcccgaaacc

SEQ ID NO: 29302 - DNA, 201 bp, Homo sapiens
cccaaagtgctaggattacaggcgtgagctaccacactggccttgtcctctttatttttaataaaattatttagtcattaagaattttggcttgtgggccrggcatggtggctcatgcctataatcccagcactttgggaggccaaggtcagaggaccacttgagctgaggagttcgagaccagcctgggaaacatgacaa

SEQ ID NO: 29303 - DNA, 201 bp, Homo sapiens
ggtagttctctcagtgccttgcaaacagcagctctagtgtatattgagaaaaggaaaaattctgaatggcaaatactagatttcaactttaacctattcctttttattattattattattattattattattattattattattattattgagacaaagtctcgctctgttgcccaggctggagtgcagtggcgcgatcta

SEQ ID NO: 29304 - DNA, 201 bp, Homo sapiens
gtagttctctcagtgccttgcaaacagcagctctagtgtatattgagaaaaggaaaaattctgaatggcaaatactagatttcaactttaacctattcctttttattattattattattattattattattattattattattattattgagacaaagtctcgctctgttgcccaggctggagtgcagtggcgcgatctag

SEQ ID NO: 29305 - DNA, 201 bp, Homo sapiens
caacatagaaataaatttagttatttagcaatttgttgtatttttggccctgcaagtagtacatgatctgactaaccaattccaaaagccagattttcttytgagtgtgacttttttcttttttttttcttttttttttttcctttttttttttttttttttttttgtgagacagggcctcactctgtcacccagactgaa

SEQ ID NO: 29306 - DNA, 201 bp, Homo sapiens
gtctttcctcttctgttctttggccatcgtttaagtttccttacctgttaagtaagaaaggtttatgttaaggatcaagtaagatcaaatatataaagggyttagaaataatttacggcgtatatttatggtattactgtaataattgccttgacttttttatcttttccaaatgaataaatcaaaatagaaagaggttga

SEQ ID NO: 29307 - DNA, 201 bp, Homo sapiens
acgatcttgactcactgaaacctccgcttcctgggttcaagcgattctcctgccttaccctcctgagtagctgggattacaggcatgcaccaccacacccrgctagtttttaaaagtatttttagtagagatggggtttcgccatattagctaggctggtttcgaactcctgacctcaagtgatctgcccgcctcagcctc

SEQ ID NO: 29308 - DNA, 201 bp, Homo sapiens
ctgaccttttagttatactttggaagaaccttaaccatgttgttccagggaaattcactgctttgggagccaggtcactgagttactactgtctttcctcytctgttctttggccatcgtttaagtttccttacctgttaagtaagaaaggtttatgttaaggatcaagtaagatcaaatatataaagggtttagaaataa

SEQ ID NO: 29309 - DNA, 201 bp, Homo sapiens
tgccagagttagaagaccgctgccctaaaggatgaatgagtggagttgatgactgactcctgtagggcagtctttttttttttggagatggagtctcactstgtcacccaggctagagtgcagtggcacgatcttgactcactgaaacctccgcttcctgggttcaagcgattctcctgccttaccctcctgagtagctgg

SEQ ID NO: 29310 - DNA, 201 bp, Homo sapiens
taccatgttaagttgatcctaaaataagaaatctaagggaaaggtcacatcctaataacttgtgcaaatctaaattcccatggagctttgcaatcattttgtaggagtataaaaaatctattattgaacttcttccagatagcgtcgtaaaattgaagtacttttatatacagaagtaaccactaaattataaatacaatt

SEQ ID NO: 29311 - DNA, 201 bp, Homo sapiens
taaaactttaatattattatgatattcaagcgcatgattttgcatttcatagcaatatccacagtaggtgtaagagacaagaaaacttccttcatgccagrgttagaagaccgctgccctaaaggatgaatgagtggagttgatgactgactcctgtagggcagtctttttttttttggagatggagtctcactctgtcac

SEQ ID NO: 29312 - DNA, 201 bp, Homo sapiens
gctagggaaacacccagcccaggtgggcagatctcaagaggaccagaacgtttgaatctgcttcagataaaccctccacttaacagtaccagatctggacragatggaagctttgtagatttgcccataatccacagtgctctgtaatcaattccaggaccgtgtggatggagaccggaaaggtttctttcccaattcttc

SEQ ID NO: 29313 - DNA, 201 bp, Homo sapiens
gatttcagttttgtctgcatcacagagatgtatgtttccctaagtttgctcactataatttgtgattgctatttttcttatctgcgaaggaagtacagcarctcccactggggaaataccatgttaagttgatcctaaaataagaaatctaagggaaaggtcacatcctaataacttgtgcaaatctaaattcccatggag

SEQ ID NO: 29314 - DNA, 201 bp, Homo sapiens
ggggggctggaaaggcgaagtcgctgctttgtgggctcctgcaagtgccaggcgctgaccactcctcctgggagcctaactgaggggggtagaggcagcaraggttaacagaaatctcaggtcccttggtggaaggtgggtgtgtagtcgtggtactttacgcctcggtgtttagggaggagcctaaggtaaggagtcaga

SEQ ID NO: 29315 - DNA, 201 bp, Homo sapiens
tacaagctaagggagaggcaccatcagagagatctggagagcagctggcagaatgttagaggacccagaacagcaggaaccaggacaagaaattttggaartaagagggcggagatggtcaccagaattaaaggctgggagaatactgaagagctcaagtctattgagaacttagaagaggccattagttctggccgagag

SEQ ID NO: 29316 - DNA, 201 bp, Homo sapiens
tctgacaataaggatgttagccactaaccttaattatcaagataattatgtgcatgaaagctgtgtaaaaggcacaaccgtggaacatatacaagtattartaatacatttcatttagttttcaggttataaaatcgttattaataacaagaggctttcatgaagtaggaaaatatgttaaaatgacattttctgaatgtt

SEQ ID NO: 29317 - DNA, 201 bp, Homo sapiens
ctcggtgtttagggaggagcctaaggtaaggagtcagaaacggggagtaaccgagctgcggcttttatataaggtcagtggtaggtaaggaaggggccttwacctctgctggtgaccagaagcctgcatttctgcattctgcttaattccctttccttaggtgagttggctcactctcattgcattttgttggaatgtgtt

SEQ ID NO: 29318 - DNA, 201 bp, Homo sapiens
atgataaacgggacctagtagattaacatcatctcctcagcccaagggctgaccccagtggtgctgctcaagaggaaggaggaggctgggagcggtggctyccgcttgtcatcccagcactttgaggggctgaggagggcaaatctcttgagcccagcattcaagagcagcctggaaaatgtagagattctgtctctacca

SEQ ID NO: 29319 - DNA, 201 bp, Homo sapiens
ttactgtgtatagtcttaaaatataaggttgatttctaagaatttaccctgcttcttggtgacattgtaggacatctcagtttgccacttagcactgttaytctttctggctctatactaaaggagataatttgggcaagggaatggaaagaggttactttttcatcctgtatgtttaaggaataaattttccttcatatc

SEQ ID NO: 29320 - DNA, 201 bp, Homo sapiens
cctctattatgatacctgggtaaagggtgacttcctttctatcataaaacagcctagacagcactaagaaggtggttatgttcttttctgttgttgtgagygcccagatgagattactttgccaaagactcttttcatttctctttctgaaactctgtgagattgctgtgttctctaggacttaacttcacagctagtcta

SEQ ID NO: 29321 - DNA, 201 bp, Homo sapiens
taagtctatttttttctggtggtgtgttattcttctcatagagaactccattttttcattatgacatagcacttatcgtttaaacatcaattgatgttcaracatcagctggtgtaacattgctgcagttgctattgatggataagctgaagtttttaagaaagcaaacccgatgtataaaattgaaaccatatcaaaccc

SEQ ID NO: 29322 - DNA, 201 bp, Homo sapiens
ggattgttttgatgccatgctccctcagctgaccacacagattacatcctggccagaaaaaggccctgcaaagagctctgatcattttggttctgattccrtccttagttcttacccattatctgcttacccttcctccccacctatttaagatacaaagcaaaacaaaccaaaaatacagatgagttgcttggtagagct

SEQ ID NO: 29323 - DNA, 201 bp, Homo sapiens
tctgagtagaaacacgttagcagaggaaacttcatttggggaacaggattgttttgatgccatgctccctcagctgaccacacagattacatcctggccakaaaaaggccctgcaaagagctctgatcattttggttctgattccatccttagttcttacccattatctgcttacccttcctccccacctatttaagatac

SEQ ID NO: 29324 - DNA, 201 bp, Homo sapiens
ttggccagaacagccttctcgctcattaactcagtcaaccaaatgcttcctgtgtttccactggtggttcagaacgtagtctctgccctctgatacctcayggtctaacgggggagaaacaagaaagtcagaacttacaatacaagataataaggaataagagcagagcctttggaaccagacagacttagatccaaatgt

SEQ ID NO: 29325 - DNA, 201 bp, Homo sapiens
ccagggctcttggccagaacagccttctcgctcattaactcagtcaaccaaatgcttcctgtgtttccactggtggttcagaacgtagtctctgccctctratacctcacggtctaacgggggagaaacaagaaagtcagaacttacaatacaagataataaggaataagagcagagcctttggaaccagacagacttaga

SEQ ID NO: 29326 - DNA, 201 bp, Homo sapiens
agataaatacactgttagcccccaactagaagtgtaaaatcattaagacaaaatttgagaatgatacggctcctataatggcaatctttggatgatactgkccaagctgatggaaagtgtaaggactccactttgctttgtaaaaaatacaaaaaaacagccatggaagtgcagtacattttgtatggaacattgtaccac

SEQ ID NO: 29327 - DNA, 201 bp, Homo sapiens
aactaaactacaattgtttggcaccctctcttctccttatcttgcaaaatcaaattaagcactagtggaaagaaacagttcagagaggaatatgggaaagraaaaaaaaaaaccaaaatgtgatttccaacgagactagagatttgttctttatctacatggtcatgttactcatttgatagcatctatctcaggggtatt

SEQ ID NO: 29328 - DNA, 201 bp, Homo sapiens; identical to SEQ ID NO: 6137

SEQ ID NO: 29329 - DNA, 201 bp, Homo sapiens
gcaggctgagtctgaaacgcaggaagtgttttcagatagcacaagtcaacattattttgaaaagggagaaaagtccataaagtttttgagaatagtgtaasaatgtattggtcatcctaactttaatgaatgaacttaagccccctgagcctatcaccctcttttaggatccatctcctttctcggcatcaaaataactgg

SEQ ID NO: 29330 - DNA, 201 bp, Homo sapiens
tgaatctatgaaaagaagaaaagccccgtaagaaatatgctaactgatggtgagggagaaaagggtttagataaaagatatctgaacttgtttggtctcartgattttatgactgaggaattcaattatagatgtactggatggagcaaatcacaattctgtaaattactaataggacacaacgatctttatcattttctg

SEQ ID NO: 29331 - DNA, 201 bp, Homo sapiens
tgtaacaaactctgcttagtaccacagttggagaaaggtttacaataatgcccagtacaaaatgttattcagacttactactcatgcataaaataaaactkgttctcttcttaaacttcgttacatattagataaaacactatcaagttttggcctcatttgttcataatatgtaatttaattcagttgctcagctagttc

SEQ ID NO: 29332 - DNA, 201 bp, Homo sapiens
tttaccaaatgaccactcattaaacctgcccacctatgaacatgaccttataaaatggtgagacatagcagtatctggcactgggcacacagattaccacrgctcaataaaagctgagaaaatgactcagtgattgaacacagcgcattgccatggttgtgtctttaagccattcatgtaattcatgctgtgtattcgact

SEQ ID NO: 29333 - DNA, 201 bp, Homo sapiens
gagataaagttggctactttctctttaaaaggccattacaaacttttacaagcttagaatataatatttgcgtaaaaggagacccagatcctattttaaaygaccaaattattttgatcaaattacttactatagctattttcaatgtctgtattcacaaactgtttactatttcagttctgttttcaagttgacagaaaa

SEQ ID NO: 29334 - DNA, 201 bp, Homo sapiens
acgataggttgctgttaattatatttaccccacagtgctatagatcattagaactattccttgtatctaactgtagttttgtgtctggtaaccaatctctygctatccccagcccttcccagcctctagtagcaactattctactgtccacttttatgagatcaactttttaaacttcgcatatgagtgagaacatgtggt

SEQ ID NO: 29335 - DNA, 201 bp, Homo sapiens
tgccattctcaatttattaggtctttttttgcttttattattatttttaattaacatataattgtacatatttatgtggtacagtgtgacatttcaatacstgcatacaatgtgtaatgatcaaatcagggtaagtagcatatccatcacctcagacacttatcatttttttgtattgggagcattcaaaatctgctcttc

SEQ ID NO: 29336 - DNA, 201 bp, Homo sapiens
caaaatatctgaccctcgccgttcaacagtgtcagaggcataaaagacacatctttgctaaggaatcactacagattaggaggagaatattgcatgacaaytaaatgcaatgtgggatcctggattggatcctagagctgaaaagggacgttagtaggaaaactggtgaaatccaaatagttatagtattgtgccattctc

SEQ ID NO: 29337 - DNA, 201 bp, Homo sapiens
acttgagctgaggagttcgagaccagcctgggaaacatgacaagactccatatctactaaaactacaaaaaattagtcgggcgtgatggcttgtgcctgtrgtttcagctactcgggagtctggagtgggaagatcgctttagcccagggggtggaagttgcagtgagccatgattgcaccactgcactccagtctgggta

SEQ ID NO: 29338 - DNA, 201 bp, Homo sapiens
tgcacctgactactgctattattatcctctttattttagagatgaggaaaataaagtccagagaggttaaacattttgccctaagaccccacagcaagtgkgtagaagacctgggactataatgcaggttttctggcctctagttcagagcattcgtagcatgctagcccctcagtagcatagtactttaggaagctagtc

SEQ ID NO: 29339 - DNA, 201 bp, Homo sapiens
gtagcatgctagcccctcagtagcatagtactttaggaagctagtctttcccacttgctggtagtaagccagggagacataatacactaagaaagcttcgstctgagaaaactttccatgattgttttttctcaatttttagaacagtaggaattcttcacctcatctgctatcccaacatattcacaattggaaaatttt

SEQ ID NO: 29340 - DNA, 201 bp, Homo sapiens
gaaaaggagatttctgagtagaaacacgttagcagaggaaacttcatttggggaacaggattgttttgatgccatgctccctcagctgaccacacagattmcatcctggccagaaaaaggccctgcaaagagctctgatcattttggttctgattccatccttagttcttacccattatctgcttacccttcctccccacc

SEQ ID NO: 29341 - DNA, 201 bp, Homo sapiens
tcggatccacaaaaaaagtagaaataaatgtcagtactgtcggtttcagaaatgccttgcagtggggatgtctcataatggtaagtaaacagtcatcaccwtatactttattattctcattatagctgccagaccagtggacactaaagccattgccaaaaatgtgtacagtttttccaccaaatgccagaatttagaata

SEQ ID NO: 29342 - DNA, 201 bp, Homo sapiens
gtcctctttatttttaataaaattatttagtcattaagaattttggcttgtgggccgggcatggtggctcatgcctataatcccagcactttgggaggccraggtcagaggaccacttgagctgaggagttcgagaccagcctgggaaacatgacaagactccatatctactaaaactacaaaaaattagtcgggcgtgat

SEQ ID NO: 29343 - DNA, 201 bp, Homo sapiens
ctttttttttttttttttttgaggtggggtcttgctttgttgcccaggtgggagtgtcttcttatattggtcaggctggccttgaactcggggctcaagcmgtcctcccacctcagcctcccaaagagctggtattacaggtgtgagccaccagccatggttagttttcatcaactgctttctcaccttcttttcatcctc

SEQ ID NO: 29344 - DNA, 201 bp, Homo sapiens
tgacagaatcgtgtcaagaacctgccttttctgattcccaggccagtatacctttcgctgtaggttgctgcttccatgtgtcataaagacttaaaatttgmttcttttttatccctttgcagggtttcttccggagaacaatcagattgaagcttatctatgacagatgtgatcttaactgtcggatccacaaaaaaagta

SEQ ID NO: 29345 - DNA, 201 bp, Homo sapiens
tcttttcatcctctaattcatacctgcaatccttattagaaatcctgtcaacttaatagtaccagaaagtcaggcaaaagactgataaaaaaaaagcctcrgtggtcaagaacttaaaattacactactggtgtgcaacgtgctcttatctgtgttactggaggacaccctcaagatacctcactccagttgactccttgg

SEQ ID NO: 29346 - DNA, 201 bp, Homo sapiens
ttacccagaacctttggaaaaggaaatgacttgattgaagaggccattctttaaatgtatcttactgctcaatttcaccattgcctattgtagaatgcgcsctgcccgctcagcatttgcctctaggcagaccaggactccttcccctccccaactaatcttccttctcctgtatcttattccctagggccacttgcacct

SEQ ID NO: 29347 - DNA, 201 bp, Homo sapiens
ttcagtatgtgggagaatctgtcctgggcactttatatacacccataatctgtttggatttcttggtaggaagactacatggctgcatacatggtctttcwttacctccattttatagatggagaaaatggaaatttaaagaggttaagcagtttgccgaaggtcacagagctactaatcggtgaggtcaaggttcagacc

SEQ ID NO: 29348 - DNA, 201 bp, Homo sapiens
aagacaggatgtacttgcttgaataggccagtgctttcctggaggaaactccggcttatggagcctctgcttctgcacagcccagtgccttccaccccctsttcatctgctagcatctacattactagttaactggagaggagaccaaacccaaaatattacaaaacatagatattaaaaatactgtgaacaacaatcagc

SEQ ID NO: 29349 - DNA, 201 bp, Homo sapiens
tccaagctactctggaggctgaggcaggaggattgcttaagcccaggaatttgaggctccagtgagctgtgattgtgccactgcactccagcctgggcaayagagtgagatcctgtctcaaaaaaaaaaaagaaaagaaaaagaaaaaagaatctccagattatagttcagatattacgtattaatatccaaagccctcct

SEQ ID NO: 29350 - DNA, 201 bp, Homo sapiens
gctatgtcttttttaaaaaagcaaaaaatagataaacctttgacaaatcagatttttttaatgagagaatgcacaaataaagagctctaagagctgggcayggtgactcatgcctatattcccagcactttgggaggctgaggcaggaggattggttgaggccaggagtttaagaccagcctgggctacgtagcaagaccc

SEQ ID NO: 29351 - DNA, 201 bp, Homo sapiens
caactggtgttcatttgcatgtcaacacccagaattctctgctagttcacctcttcttcagaatgcagaaaggattgaaaaagctggaatggggccgggcrtggtggctcatgcctgtaatcccatcactttgtgaggcagaggtgggtggatcacctgaggccaggagttcaagaccagcctggccaacatggtgaaacc

SEQ ID NO: 29352 - DNA, 201 bp, Homo sapiens
cagtataatcagatatgactagggaaaaaataaaacaactggtgttcatttgcatgtcaacacccagaattctctgctagttcacctcttcttcagaatgyagaaaggattgaaaaagctggaatggggccgggcatggtggctcatgcctgtaatcccatcactttgtgaggcagaggtgggtggatcacctgaggccag

SEQ ID NO: 29353 - DNA, 201 bp, Homo sapiens
ctggtgtttataaagctcattcgttcaatgataaaattggccatagcaaatcaaaaataaatgaagacctctgcgtagctgattggactacagaaaataarccattcatatccaggaagaaaaaattaaaaggattgctgaaaaggaaagagccctaaagcaaactatctacagttttggttagttttcttttcttttctt

SEQ ID NO: 29354 - DNA, 201 bp, Homo sapiens
accaaaattcctaaatgtgcaagtctctgatataaaatggcatagtatttgcatgtaacctacacataccctcctgtatactttagatcatctctagatgrcttataatatctaatacagtataaatactgtataaatagttcctatggccaggtgtcatggctcatgcctgtaatcccatctctttgggaggtggaggca

SEQ ID NO: 29355 - DNA, 201 bp, Homo sapiens
ttcaaaccatctataaattagcagtctaagtggaactttggcaaatgaggttgccaacaagcattttctttatatttagataatttgagctcatggcctcygggcatttggtaagaagtccagtaaagagaagcctaaagaacagaatctttattatgagtagtcgcctttttccactcagcagtttgattccaagcaccc

SEQ ID NO: 29356 - DNA, 201 bp, Homo sapiens
tttaaaaatcaacaatcggccgggtgtggtggctcatgcctgtaatcccagccctttgggaggccaaggcaggcagatcacttgaggccaggagttcaagmccagcctggccaacatggtgaaaccccatctctactaaaaatacaaaaatcagctgggtgtggcagtgcatgccagtaatcccagctacccaggaggctg

SEQ ID NO: 29357 - DNA, 201 bp, Homo sapiens
gcctctgcctcccaaagtgctgggattataggtgtgagccacgcgcccagcctgaagctttttttaaatgaagatttattcaacaaatgtctattgagccmcttatttgtgccacaagctgtttcagataaggaggataaagcaatgaacagacaaattccattcctccttgagtttacaattattgttatctagatttaa

SEQ ID NO: 29358 - DNA, 201 bp, Homo sapiens
ttaagtgatcctcccacctcagcctcccaagtagctgggactacaggtgtgagccactacacccagctaatttttatattttttgtagaaacaggggttcrccgtattgccaggctggtcttgaactcgtaggcccaagcagtcctctggcctctgcctcccaaagtgctgggattataggtgtgagccacgcgcccagcc

SEQ ID NO: 29359 - DNA, 201 bp, Homo sapiens
atagttctgcaaaacttcaaagccatagaaacataagagaataaaactttctacttttgaaacctgtgtctaaagtcaagcttatgactttgggtgtcaayttaagggaaatgatgtagaagacctgagaaaagacccatgttttcatgatctgtggaactaactcagtaaggtcctggaagacaaacgtgtttgaaaaaa

SEQ ID NO: 29360 - DNA, 201 bp, Homo sapiens
ctgcaagcggtgtcttggtgatgggaagttactggtaacagcacacggggtgatggggtgaagaggcttgtgtgcgtgggccccgggggctgaggattgtyggagaggacttctcccaccttctctgggccccaaactgcacactggactggcaagccactctgcccactgcagtgtggagctacaaagcccaagtaggga

SEQ ID NO: 29361 - DNA, 201 bp, Homo sapiens
aaaatcctgctgccaagtcctttatagtaattgcattttaaaaatatgtcttctttattttttattattatttttttttgagatggagtctcgctctgtcrcccagtctggagttaaatggtacaatcttggctcactgcaacctccgcctcccaggttcaagcaattctcctgccttagcctcctgagtagctgggatta

SEQ ID NO: 29362 - DNA, 201 bp, Homo sapiens
caattcctcgccaacctaacagcgtaagtctatttttttctggtggtgtgttattcttctcatagagaactccattttttcattatgacatagcacttatygtttaaacatcaattgatgttcaaacatcagctggtgtaacattgctgcagttgctattgatggataagctgaagtttttaagaaagcaaacccgatgta

SEQ ID NO: 29363 - DNA, 201 bp, Homo sapiens
acaaaaaatttcgaaattagttgggtgtggcggctcatgcctatagtcccagctacttgggaggctaaagcaggaggatcacctgaacccaggagttggargctgcagtgagccatgatcatgccactgcactgggcaacagattaagactctgtcacaaaaaaaaaagcgttaagttaaggagcgtgaataaaaataata

SEQ ID NO: 29364 - DNA, 201 bp, Homo sapiens
caggaggatcacctgaacccaggagttggaggctgcagtgagccatgatcatgccactgcactgggcaacagattaagactctgtcacaaaaaaaaaagcrttaagttaaggagcgtgaataaaaataatacatttcatattctaagacaatatcatctacaactttattccaatataaattactaaaactttaccatata

SEQ ID NO: 29365 - DNA, 201 bp, Homo sapiens
aaaaccataactcttcagatatcatagctctttagatagaaaaatgtaaaagtatttgataaaaattcaacaacattcctgactaaaacaaattaaaattktaaaacccctggaaagccaggagtaaaacatgttctccataatctatagcaaacatcatagttgctgataaaccattagaagcatttccttcaaagttag

SEQ ID NO: 29366 - DNA, 201 bp, Homo sapiens
cccattaggaaaaaattgcttttctaggtgtgtaaagttttgcatatgattatagcctcttacctgtaaaaactgaatcagagcttagaaccatgcctggygcacaatagtcattcaacaattattccttgaataaagagacagtattgtgtggtctgtgaaataacaaaagttcaggagcaacagacacttggtgattct

SEQ ID NO: 29367 - DNA, 201 bp, Homo sapiens
ttgtttttttcttgtaaatttgtttaagttctttgtagattctggatattagccctttgtcagatgggtagattgcaaaaattttctcccattctgtaggytgcctgttcactctgatgatagtttcttttgctgtgcagaaactctttagtttaattagatcccatttgtcaattttggcttttgttgctattgcttttg

SEQ ID NO: 29368 - DNA, 201 bp, Homo sapiens
ggctcaagaattacttaactaaaaaacaccatctcacaaacaatttaaagatggaaagatagaaatagagataggcagacagatggacacatagattaggktttcagattctgttctttctctgtgggagaggtcagcgtgccatgactaccagcctggtctagaacccacagcagccatagttaccaagaccacagcaat

SEQ ID NO: 29369 - DNA, 201 bp, Homo sapiens
tatttctaaggtctgacttcagtctttcaggaaacacctcccaacctccttcgctttcctcctcttggttgtcagattctccacatgaagggtagaacctraggctcaagaattacttaactaaaaaacaccatctcacaaacaatttaaagatggaaagatagaaatagagataggcagacagatggacacatagattag

SEQ ID NO: 29370 - DNA, 201 bp, Homo sapiens
tgagcccagaaggttgcagtgagctacgatcatgccactacactcccacctgcgtgatcgagaaagaccctgtctctaaaaaaaaaaaaaaaattttaaaragagatgggaaaacaacttattggcaatagcacatgttcttgtttgtatgcaacaaacatataaaaagtagaaaaattgaccataagacatagccttact

SEQ ID NO: 29371 - DNA, 201 bp, Homo sapiens
acaaactcctaatgcatgtggcagtacatgtttgctccagctgccctgtccctctaccctgcgtggactccagaaccgcccatgttggagcccacctcctytccccacccctgcccactttccactcacacctcaggcaaaccctgcattttgctgttcctggaaaatggcttatgcttggatacctctgggcctctgttg

SEQ ID NO: 29372 - DNA, 201 bp, Homo sapiens
tgagagtttgaggaggtggtttttatgccgatagttgaagagtgaattggagttaccttaagggggttgtgagaagaaccatgttacagatggaggaaatragatgtgaaggctgtgatgtgggaaacagcttagtttactccctgatttaaatggagaaaaggaatccagtgaggcttcagagagaagcaagaactaggt

SEQ ID NO: 29373 - DNA, 201 bp, Homo sapiens
ggacactcttccctcttggggtgtgtgatgaactcccaggagaggaaagatgggagccagggcaagataggaagctctgcctgagctttccactaggcacrccagccagaccaataaaaagcatctgtcccactctgctaagcctgcttttcttgagcagagggtgagagaggcagtggccatctccacctcagctcctgc

SEQ ID NO: 29374 - DNA, 201 bp, Homo sapiens
atatttaaaaagtaggataaaaaatgtgtgtgaactattgattggaaccttacaaaaatgtatgtatatgaaaaagtctggaagagaatatacaaaagtgrtaatagttatgttacagtagtgagatatggagggctttttgtttgtttttatatttttctctctttcccaaagtttattcagtagtataaaattacttct

SEQ ID NO: 29375 - DNA, 201 bp, Homo sapiens
gtaacttaaatatccaacagtagggagatgtttaaataaattatggtataatcaatagttaaaatattgtacagttataatgacaatttagaaactactcrcaactctgaagaatatttaaaaagtaggataaaaaatgtgtgtgaactattgattggaaccttacaaaaatgtatgtatatgaaaaagtctggaagagaa

SEQ ID NO: 29376 - DNA, 201 bp, Homo sapiens
tggatttgtaaacctcaattccagtttaataatagtagaaaatattcccttcctagtgattgttgataatagttttttttattttaaaattctataatttmaaggattgaagagatttacactcatatatatctgatgtcactaagatttagttcaggttacttagaaagcattgggcaatgttttgtaacttttgggact

SEQ ID NO: 29377 - DNA, 201 bp, Homo sapiens
ttagtgttagaacaaatataatgatcatcatgattaatttttatattgcctcatgcattaaaaacagaattaaaatttacttttgtgtatcagtagtgtcrttctgctttaaatgtaagaaaatcctgaagatgtctgggtctgaaactttaaatggcatatgagaatttagattcatttaattttttttttttttttttt

SEQ ID NO: 29378 - DNA, 201 bp, Homo sapiens
cttgcactgttttgtggtttgggagttgcatattggaggtgggagtggagtgttgagatgaggcaagttgagatgtaatcgctatttaatgggcagatcaragaaaacattggctggtttgatttttattatggttatcccgctccaccatcctggcccagtcatatatattattgttatcaggcatagataggggaagca

SEQ ID NO: 29379 - DNA, 201 bp, Homo sapiens
gtgaggaagaatgaaaacccagcactggttcaaatcactcctagcagaggtagtgaaggcatcactcagtcctggagaaatcttcggagggctcaccagcrtcacaagtaggtagaccagaagaggcaggctggcccattgcaaagccctggaatcagagggacaggagttccaaatccccactctctctcttcctagatg

SEQ ID NO: 29380 - DNA, 201 bp, Homo sapiens
gcttctgagaaatgcaactagaatttcctccggagaagagatggaaacccctgattgagaaatttaaggcctaggaaaggtaaatgacttttcttaagtcwcatggctcaccacagaaccaaagctggaacacacataccctcagctcttcttccagtgctttcaggtatacaagtatttgaacaggattcaaggtttaac

SEQ ID NO: 29381 - DNA, 201 bp, Homo sapiens
tcagttcctctaaaggcaagaatgtattttgaatagagctatcagcagtactgaacaggatggaaatttggtccaactttcctcaacaattgactacatctgctgtatacaactgtagtcatggattgcaaaataatttgctggttcagttccatcagtttcctttttatttcagacctcataaaacataagggcaagctt

SEQ ID NO: 29382 - DNA, 201 bp, Homo sapiens
atccagagttctaaatggacgtttggagaaagtcaaaatgcatgtcaatgaccaaagcaatactaatgcagtgctttttgcaccaaacagggccagatacmtttgaaagaattagcaattaagttttatgaagatgaacacaatagaaatgaataggaatatgatgaacccaaaaaatggagtcagaaaacacgtccagtt

SEQ ID NO: 29383 - DNA, 201 bp, Homo sapiens
aagtacatttcaaggatagtaagccagagaagatatttgaacatctgtaacagacaacagattaatatctagcatattttttaaaaaagtctaaaattcarttttaaggaaaagacagttagaaactgggaagtgaaaagccagggacatacaaatcaagatttaaattcaattttatacatttcagattgtcaaaattaa

SEQ ID NO: 29384 - DNA, 201 bp, Homo sapiens
agctaagtgtagggcttctgaattaagccaggattctcaatagtgtctgaaatagtcataagtcagtaacacccctggctactgaattcctaattcagacyttgtaggagtcccccagtttaaggtcaagaaactagttccaaataatatcagcaagcatgtgagaagctaaccatcttgaatgacattcatcatcaacaa

SEQ ID NO: 29385 - DNA, 201 bp, Homo sapiens; identical to SEQ ID NO: 6131

SEQ ID NO: 29386 - DNA, 201 bp, Homo sapiens
aatccatcttgagttaatttttgtatatggtgtaaggaagggatcaataattctcttatcaaaaaaaccttcctctcctagccatgccaaataactgagcrctctgtgagccatccagctgtcagctagccaagtagcattttcacccactaatattagtctttaaaaagcaagaatcaaaagagaagtcaaggaatatca

SEQ ID NO: 29387 - DNA, 201 bp, Homo sapiens
attgaacagctaaacagaacgaaaaagcatgcacatcttacagatacagagatcatgactttggtagatgagactaacatgtatgaaggtgtaggaagaakgtttatttttcagtccaaggaagcaattcacaatcaactgttagagaagcagcaaatagcgaagaaaaaattaaagaactagaacagaaaaagtcctacc

SEQ ID NO: 29388 - DNA, 201 bp, Homo sapiens
tacaagatatggatttgtaaacctcaattccagtttaataatagtagaaaatattcccttcctagtgattgttgataatagttttttttattttaaaattmtataatttcaaggattgaagagatttacactcatatatatctgatgtcactaagatttagttcaggttacttagaaagcattgggcaatgttttgtaact

SEQ ID NO: 29389 - DNA, 201 bp, Homo sapiens
ggagaatcggttgaacccgggaggcagaggttgcagtgagccgagatcacgctattgcactccagcctgggcaacaagagtgaaactctgtctcgaaatartaataattattattatacatacttaattttatttttgctgaaaatagtatggcaagccagtgcatctctgttagaaatagaaacttagtagccacctcaa

SEQ ID NO: 29390 - DNA, 201 bp, Homo sapiens
cagtgataggaaaagatatatttacccatcattttttttctcttagtcaagacaagtcgcagatcttccttgaaccatttttgacctcaaaacagttattmtgaaacatcaattaaactaagaaatgtaatcacagttcaagttatgagctagtattatcttaatgtaattaaatatctgaatattatcacttcattatat

SEQ ID NO: 29391 - DNA, 201 bp, Homo sapiens
agttgcttgtttccttgctacctgaaaacaaggcctttaaggagtagaaaacagatttggagtttgaaagagggggttaggagagggaaaaataaagttawtgcatgtcccagtttcctcataagccagaaactttgaaacaaaataggaaaataaccatttggaatagcagtgataggaaaagatatatttacccatcat

SEQ ID NO: 29392 - DNA, 201 bp, Homo sapiens
cttcttttctgtctctgtttctctccctctgaatttctgcttcctttcctctctttcccaattgctactgtctctgcctttggttgtctctgagtgtaatmtggaagtgaagtatatttttatctactaaacacatgatcaaatagggattttttattctgaatttaacattaacagaaatgttatgttgctctttatgag

SEQ ID NO: 29393 - DNA, 201 bp, Homo sapiens
tctctgcgctcgaggagcatatagtctagtgaagccgatcaccataaaaacgcatggctgtgataccacatcgtgagtgtaagaacagagctatgtatgcrtggggaacagtggacatgatggccaggtacccttattatgggaaacatagaacccaaagtgtgttcccaaaggaacatgattcaaaataatattttgctg

SEQ ID NO: 29394 - DNA, 201 bp, Homo sapiens
tgggaaaatccaaggtaatattcacagagtactcagatgggaaagttgtcgtgtgctgtcatgtctcatggtagaaatgctacccttagcataataacatrtaaaataactatctctggctgggcacagtggctcatgcctgtaaccccaacactttgggaggctgaggtgggtgaatcacttgaggtcaggagtttgaga

SEQ ID NO: 29395 - DNA, 201 bp, Homo sapiens
ctcagcctctttcactgttaggtcctataaatttttcatttctacctggctttcagagttttcataatggcaacataatcttagtgatagcacgtaatttrctaagccagtttttaggtggcttctggtgtttttattattgtataattatgttttattcttataccattacataccatgaatatctttatgtaaatattt

SEQ ID NO: 29396 - DNA, 201 bp, Homo sapiens
ttgaaggaatatgctatctggggttttctttccattgtatttcaaaatacagtagacaaggacttaatatgtgccagaaattgtactaagtgctgaggatmcaataatgaacaagattcctgcctttgtggagattatatggcaagggaggaaagaaaacattatagattaattcctgtgatcagtgctgtgagataaggt

SEQ ID NO: 29397 - DNA, 201 bp, Homo sapiens
cttggccctcagcctctttcactgttaggtcctataaatttttcatttctacctggctttcagagttttcataatggcaacataatcttagtgatagcacrtaatttactaagccagtttttaggtggcttctggtgtttttattattgtataattatgttttattcttataccattacataccatgaatatctttatgta

SEQ ID NO: 29398 - DNA, 201 bp, Homo sapiens
ttaggctaagtgccctttttatttttaaaattttctgtatttattattactatttttagagatggagtctccctgtgttgcttaggctgggctcacctcakcatctggagttgctgaaactataggcatgtgccactgcacctgacctatttaagaaaataatctagagaagaattgacatgttatttatgaatcattcag

SEQ ID NO: 29399 - DNA, 201 bp, Homo sapiens
ttaaaaaatcaactataaaactaatagcttttggaggaagtaattctttgataagttttcaattatttccattgttaattatttttctgtatcttaagtcracttcaccatttatttcatttcagacaagttagtctgagtaaactgcccttggcctgccttattatttacttaggttctggtaaaaatcccatcccagat

SEQ ID NO: 29400 - DNA, 201 bp, Homo sapiens
gatatggaattaatattccaaaatatgtaagaaactcaacaaactcaattgcaagaaaacaaataacccagttaaaaaatgataaaggaatatccatttcyagaaagaagacatacaagtggccaacagatatatgaaaaggtactcaccatcactaatcatcagggaaatgcaaatcaaaaccacggtgagatatcatct

SEQ ID NO: 29401 - DNA, 201 bp, Homo sapiens
tttggcaccactttgaataatgaactggtgtcaggtaaacagagtccaggtacctattgcagaaagttttccagtctgcaccctcggtggctcacaagttyacatgaagtgaaccaaaagagttttgttgcacttactgtgacaataaatcatgtttagaaaaatgcatgtggcatacatgatattgggcaaatgattcat

SEQ ID NO: 29402 - DNA, 201 bp, Homo sapiens
tccagtcagcctctagctcaccaggaaaccctgagcaggtcactttgcctcattttctttatctgtcaaatgagaactcagatgatctcaaaacagccttktctgctgtagtgtttcaggatgattcttgtctctggatgtcgctgtcatgatgggagaggaattagtaaattcccaggtcagtttacactgcagagtgat

SEQ ID NO: 29403 - DNA, 201 bp, Homo sapiens
atgataactatatgtttaaaaaatgggaaaaaagagatagtcgcaaacttcaacataggttagatcatcatttctcaaaccatattccatcacatattaarctcctcaaatattgcacactgtgcttttttctctcttttgtgtattctcgtgaacattagcctgttagtttaagaagtctcacagtaaacctatttaacc

SEQ ID NO: 29404 - DNA, 201 bp, Homo sapiens
ttcacaatgtagttacttgtaatttggggttaaatcagttgtctgtgcttacattgtagtaactgaaagtgctgcttaaggttgagccaagcagtgtgctmtgattctgtttcctctcctgcttagctatttacttttctggagttaatttttgtcacttagtcattgctcattttgttgtcatttcttgctatgtactca

SEQ ID NO: 29405 - DNA, 201 bp, Homo sapiens
attttccagatgattgcatgataattccttttaagaggactttaacacatgtaagaaatagagttactccctctgttaggagaaatcatggaaagatattrtaattaaaagatagtgaattttagcttaatttttacctttatctaaataacactcgtacacagctacagctttcagtgaagaagagatactcattcccac

SEQ ID NO: 29406 - DNA, 201 bp, Homo sapiens
tgggtgtgatggattacattaatttgttttctaatgttgaaccaaccccacataccttagctaaatctcacttggccatggtgtataattcttttcatacrttatcggattcaatttgctgatattttgttaaagatttctgcatgtctgtccatgagagattggtctatagggtttattttccttgtaatgtctgttttg

SEQ ID NO: 29407 - DNA, 201 bp, Homo sapiens
taagacttctagtatgatgttgaaaagcagtagtgagagaagatatccttgccttattcctaatcttagtgggaaagcttgagtttctcaccattacttaygatgttaactatatgttttgtttgtagatgttcctaagtttaggaagttttcttattttgtcaaattctttttctgcatttattgatatgatcatgtgat

SEQ ID NO: 29408 - DNA, 201 bp, Homo sapiens
attgagtaggaagtacaaagagttcccatatacttcctgtcccccaccacgcacaatctcccccactatcaacatcctgcacccaagtggtacacttgttacagtcaataaacccccactgacacatcattatcactcaaagtccatagtctacattaagattcactcttcgtgttatattctctgggtttgtacaaatgt

SEQ ID NO: 29409 - DNA, 201 bp, Homo sapiens; identical to SEQ ID NO: 6134

SEQ ID NO: 29410 - DNA, 201 bp, Homo sapiens
aaaatacagctattctaggatccttgagcctttcataagagataaggttgtgaatcctaagaccctaggaccatttacttagatgatctgctctctggttygtcctctgaaaagtctgcttcgtgaggggtgtgctgcatttgccttgcctaagtggtgtggcacacaactgtactgtcaccttaggcttaataaccatgt

SEQ ID NO: 29411 - DNA, 201 bp, Homo sapiens
agcagtggtggtgcatgcctgtggtcccagctacttgggaggctgaagttggaggatttctcgagcccgggagtttgaggctacagtgagctgtgattgcrttacagcacgacagcctgggccacagagagagaccttgtctcaaaaataattataataataataacttatactattatttttaaaattgtattcttatcc

SEQ ID NO: 29412 - DNA, 201 bp, Homo sapiens
gtctggtattatttcctgttttatgtattccctaagccaaatcatatagtcactgaagaaaagatccatgttttattctatattccacaaatgccaaacayataataagtataatcaggtcttgttgacttattaataccaagctgatctcctaaggtcagagactggaatatatttagcaaataaatacaaaattttagt

SEQ ID NO: 29413 - DNA, 201 bp, Homo sapiens
tatgagtgaatgttgaattatatcaaatgctttcatagtttgttgtggtggtggttgtttttgagacagggtctcactttgtctccaagctggatcatggygcattgcagcctcaacctcctgggctcaagtgatcctcccacctcagcctcttccagtagctgggaccacagcacatcaccacacccagctaatttttaa

SEQ ID NO: 29414 - DNA, 201 bp, Homo sapiens
gtctgcctaacatggtggctcatgcctgtaatcccagaactttgggaggctgaggtgggtggatcactttgagctcaggagttcgagaccagcctggccarcatagtgaaaccctgtctctactaaaaatacgaaaaattagccaggcatggtggcatgcccctgtaatcccagctacttgggaggctgaggcaggagaat

SEQ ID NO: 29415 - DNA, 201 bp, Homo sapiens
tagaaatctatacttctactagaagtgcatgagtgttctagctcttctacaccatcactggtacttggcattctctgtctttttcacgttagccattctgrtgggtgtgttggtatcatattctaattttaatctccccttttctgatgtctaaaaagttaaacactttaaaaagcgtttgttgtccatttggctatcctt

SEQ ID NO: 29416 - DNA, 201 bp, Homo sapiens
gctatgaacattgtcctgtaggtctcttagtgaaggagcgtatgcatttctggtagctatatgcttcagccaataatagagtatgttgagcttcaggagaygttgccaacagttctgaacaggactctagaaatctatacttctactagaagtgcatgagtgttctagctcttctacaccatcactggtacttggcattct

SEQ ID NO: 29417 - DNA, 201 bp, Homo sapiens
ccccctgggttcacacaatcctcctgcctcagcctcccgagtaactgggattagaggcacccaccaccacgcctggctaattttgtatttttagtagagayggggtttcaccatgttggcagggtggtctcaaactcctgatctcaagtgatccgactgcctgcacttttcaaagtgctggattgcagatgtgagccacta

SEQ ID NO: 29418 - DNA, 201 bp, Homo sapiens
cccaggctgaagtgcagtggcgccgtctcagctcactgcaacctctgccccctgggttcacacaatcctcctgcctcagcctcccgagtaactgggattasaggcacccaccaccacgcctggctaattttgtatttttagtagagacggggtttcaccatgttggcagggtggtctcaaactcctgatctcaagtgatcc

SEQ ID NO: 29419 - DNA, 201 bp, Homo sapiens
accagtgttcaatcagcactgagtttgaggagcaccgggtttgggagtattcatctctcttccctgtcccatagctgcccttcaaactcttgagactgttyccagctctaaaatggaaagggtcgtcttctctctggaacaaaagacaggatgtacttgcttgaataggccagtgctttcctggaggaaactccggcttat

SEQ ID NO: 29420 - DNA, 201 bp, Homo sapiens
aagctccctgacagcagctatccatttaatctgccaattgcagtataaaaattggttattaaatgaaaaacaattgtatacctctcacagaggttgtcatrtattactatttttgtcagcattctcacttataactctgttaggataatcctgggaaaatttctaaaatcttcatagctctttcgttaggtacatattcct

SEQ ID NO: 29421 - DNA, 201 bp, Homo sapiens
aaaagaataaagaattagtctaaggcagtggttcttaaaatgtggtcctgggatcgtgagcatcctctggcagcttgttagaaatgcagtttcttggaccycatcccagacctgtggtgggcctagcaatctgtgttttagggactctgctttatacgctgtttgggaactcttggtccaagatgattcttgcaccccacc

SEQ ID NO: 29422 - DNA, 201 bp, Homo sapiens
gaactcctgggctcaaggaattctcccgcctcgacctcccaaagtgctgggattacaggcgtgagccatcgcagcctgcccctgaattccataatttcacrtgtaattagaattcaagacctttttcttgaatattactcttgtccatattaatttttttctgagtatggctctagctttatcatttttttctgacttaac

SEQ ID NO: 29423 - DNA, 201 bp, Homo sapiens
tttatagagacaggatttcaccatgttgtccaagctggtcttgaactcctgggctcaaggaattctcccgcctcgacctcccaaagtgctgggattacagrcgtgagccatcgcagcctgcccctgaattccataatttcacgtgtaattagaattcaagacctttttcttgaatattactcttgtccatattaatttttt

SEQ ID NO: 29424 - DNA, 201 bp, Homo sapiens; identical to SEQ ID NO: 6136

SEQ ID NO: 29425 - DNA, 201 bp, Homo sapiens
ggtgctgttgagtggaggggctttgaacatggcacacaggaaagggttgcccaccctgtcaccagatgggcttgcactgttttgtggtttgggagttgcayattggaggtgggagtggagtgttgagatgaggcaagttgagatgtaatcgctatttaatgggcagatcaaagaaaacattggctggtttgatttttatta

SEQ ID NO: 29426 - DNA, 201 bp, Homo sapiens
ccacctcagcctcactagtagctgggactacaggcgtaccttaccacacccagcaaatttttgtaatttttatagagacaggatttcaccatgttgtccargctggtcttgaactcctgggctcaaggaattctcccgcctcgacctcccaaagtgctgggattacaggcgtgagccatcgcagcctgcccctgaattcca

SEQ ID NO: 29427 - DNA, 201 bp, Homo sapiens
ccttcaaaacgagtctctcctgagataggagtgagtgattgattgcatgccatttttattgagggatacttaatctgtggttacatatctccaggcaactrtatattcagaaacatttagataactgaccaaagttttcacctttccagaagtttaaagggacccatgtagtaccagggaatataaggaccagtcctttgt

SEQ ID NO: 29428 - DNA, 201 bp, Homo sapiens
attaaaacattatattttgtaccaataatttaacccttgtcttatagggtctctggctactacttcttcataagcactgtttctctgttaaaaatgtgagytcctaaaggcccaagacctatgattgttactcctattgcattttgtaaatgacctttaaataattactccacctcttccaaaacagacagacttaaaaat

SEQ ID NO: 29429 - DNA, 201 bp, Homo sapiens
ttgatcttttgctagatagagacaaaatatcagtgtgaattacagcaaacccctattccatgctgttatgggtgaaactctgggagattctcctattgacscagaaagcgattccttcactgatacactgtctgcaaacatatcacaaggtaaagttccttccagatacggctattggggacgtgggggcatttatgtaag

SEQ ID NO: 29430 - DNA, 201 bp, Homo sapiens
gacaaattagcaaacccaagttttgctttaacttggattgccttaataaagatgttttggggcttaatggcacagttgctcaactcccccactttattccrtgatgttcagacccagccagcatttccccatcaggctcttgcaccatgattgacagggacacttttactagtccccttgaagaatgaatagttactcaat

SEQ ID NO: 29431 - DNA, 201 bp, Homo sapiens
gctacacaaggtcttattcatctctaagttctgtaatttcaaaatgacactttgaaacactctggcaagagatgctttcatttaaaacactaaaacccgtycgttctgtaatttaaaccaagttaaaatatttatgaccttatatgaaatcattgtattaagtcagttatctaagatcttgatgagtagtaagaacatgtc

SEQ ID NO: 29432 - DNA, 201 bp, Homo sapiens
gctcctgctcctttctccctctttctctcccccaggatgaatcataagttaacgaatctgtcatcagttattcatagtactttctctggacacaaacacaygtagggatgtgtgttaataaaaataggaagaaaagtaactttggtcaagagtcaagaaagggtttccaggctcccacaagagccctcccccagcacctcc

SEQ ID NO: 29433 - DNA, 201 bp, Homo sapiens
cgtcatgccactgcactccagcctggatgacagagcaagactccatctcaaaaaaaaaaaaaaagaaaagaaaagaaaaggagatttctgagtagaaacaygttagcagaggaaacttcatttggggaacaggattgttttgatgccatgctccctcagctgaccacacagattacatcctggccagaaaaaggccctgca

SEQ ID NO: 29434 - DNA, 201 bp, Homo sapiens
tctacctagcacctagctttaggcttgccacatattatattggcaatgaatatttgttgaacaaacaaatgcatgaaatgtaatgagtaagacaggttttygctttcaagtaaaacatagtctgggggaagacggaatgtcagaatgtggtgggtgctataggagtaggtgttatcagattctgatgctatggaataataa

SEQ ID NO: 29435 - DNA, 201 bp, Homo sapiens
cattctttctcctgctgaggatgtggtggtgtactcaaagtcacatccatacccttctgtctccaaagtcctaggagagatggccctcttctcaacctctrcattgcacagaaccttacatccctcaacagaaggagtacatagtgcataaggaaagtggtcttttaccactcctcctcactctgtaacattaccaaggac

SEQ ID NO: 29436 - DNA, 201 bp, Homo sapiens
aattagaaaggcgtggtggtgagcacctatcatcccagctactcaggaggctgaggcaggagaatagcttgatcccgggaggcataggttgtagtgagccracgtcatgccactgcactccagcctggatgacagagcaagactccatctcaaaaaaaaaaaaaaagaaaagaaaagaaaaggagatttctgagtagaaac

SEQ ID NO: 29437 - DNA, 201 bp, Homo sapiens
aagaaaatggatgctattatcagttcgttaggtctctaaactccttcttgaatgatacatgtgatatggatgtgctgttctttcattactctcatcatcarcaaaaacaatatgtgtgttttaatgccaaccagggactctgctaggttctagggatgcaatgagatctaaatgcttaaccttttagaagctagcataaat

SEQ ID NO: 29438 - DNA, 201 bp, Homo sapiens
cacttgaggtcaggagtttgagacaagcctggccaacatggtgaaaccctatctctactaaaaatacaaaaattagaaaggcgtggtggtgagcacctatsatcccagctactcaggaggctgaggcaggagaatagcttgatcccgggaggcataggttgtagtgagccgacgtcatgccactgcactccagcctggatg

SEQ ID NO: 29439 - DNA, 201 bp, Homo sapiens
ttcagtccaaggaagcaattcacaatcaactgttagagaagcagcaaatagcgaagaaaaaattaaagaactagaacagaaaaagtcctacctggagcggrgcgttaaggaagctgagaacaacatccgggagatgctgatggcacgaagggcccagtagggagcctctctgggaagctcttcctcctgcccctctcattc

SEQ ID NO: 29440 - DNA, 201 bp, Homo sapiens
aataaggaataagagcagagcctttggaaccagacagacttagatccaaatgtcagctctgcatttactagcaagtggtctatcttggtaagatgcaactyttttctctaagtcttaatttctccctctgtaaagtatgacctcatggggttattgtgaagattaaatggcatatcgtatataaggcccttggcacgatct

SEQ ID NO: 29441 - DNA, 201 bp, Homo sapiens
tgtgttctgatttagaacacatgctcaggatgaggctacaaaaacattctctccccaagtagtgggacttttctcttgtgacttacactcctaattttagmctaatattacatagttggaatttccagaggggttataaagaataagaaaattgctaatttgagtctgtagggagtgggttgggatattttcatcccctcc

SEQ ID NO: 29442 - DNA, 201 bp, Homo sapiens
taaaggactgagtgtgcgtggagcagaaaggggaaagagactagtggggagctggtgaccagttggagggtggagggtagggaacaaccctggcagatccmttttgcccttgactagagcttaaagaccaaaggaagcgttcttgtttttaagtaagtcaggtgttctaagtttaatgttaatatgctttttcaattagat

SEQ ID NO: 29443 - DNA, 201 bp, Homo sapiens
gttgagggagtaaggaagggtaggagttcttggtattcccttatctcttcctttccctccccttatcctgcccagagcatcgcagggtagagccaccagayggattcagggcatggagatggcaggttagtggtagacttggaagggatcgttcttcctatttcagcaccacccttcttcctctacctcccaccctgcatt

SEQ ID NO: 29444 - DNA, 201 bp, Homo sapiens
tgtgaagcctctggcacaatgcctgggacatgttcagcacacaataaatgctaattttcccttttgccctatatgatatgatttgaagcagcgccactcartcctgccagtcacattgctggaaatgccaccaacagtcattcttaagatcgcttattacaatataaatacccctaggggatatcagctaatcgctttatc

SEQ ID NO: 29445 - DNA, 201 bp, Homo sapiens
ttatctctctgagccttaatttccttatcaggaccctgagcaaaccaaataacatgatgtgaagcctctggcacaatgcctgggacatgttcagcacacartaaatgctaattttcccttttgccctatatgatatgatttgaagcagcgccactcaatcctgccagtcacattgctggaaatgccaccaacagtcattct

SEQ ID NO: 29446 - DNA, 201 bp, Homo sapiens
catagttcctgtcccctatctgggctacgattgtgtctgagagtaatagcacttatttattaactggaagaaattttacaggcacctatgttgtttctgcmtagcttctgaggctcctctcttaggccactcctctcaccatgcccccacagctagttggtaaaatggctttgaataatgactcgctttgagttatctaga

SEQ ID NO: 29447 - DNA, 201 bp, Homo sapiens
agaccaaacccaaaatattacaaaacatagatattaaaaatactgtgaacaacaatcagcccgctttctcccacctctcctgtaccagctaaatatttacmtccctcatccgtagagggtttttggacaagacaggctggtgcctacatggtgaaagttgtttttctctcttttcttgtaatattgcaaataaacaaggat

SEQ ID NO: 29448 - DNA, 201 bp, Homo sapiens
tatgaagaaaccctgaactgatgcaaccaccacttgaaaataaagttccaagccaatctgaattgcactaggaaaaggcagccattcttttgggtagggggagaagtgagcttggctggtcattctggttgttagcaattatctggcttccgtgggagcatcatccagaaatttacatcttattgaaacaagaagaaaatg

SEQ ID NO: 29449 - DNA, 201 bp, Homo sapiens
gtcatgtaagatttaaatatttgattataagaattcataatataattttgaaagcctactctgttccagacgctgatttatttaaatcatctctaattctyacaactccgaaaagataagaaaacagagatgtgacaaggcttgaatgcaaacccaggtctgtttgactctttgttcattttgaataaagacaaattactc

SEQ ID NO: 29450 - DNA, 201 bp, Homo sapiens
gctttcaaatacaaagatttaacatatgtaaactgtattgtacttcatttgaaattcagtatctttactaaagagatttcttttatcctatcctacacacrtacagtattatttaatgatgtgcacacagaactctgccagcctgaaacagtaggtctaagacacgtttgttgtttttggctcccctgtgttgatctaaat

SEQ ID NO: 29451 - DNA, 201 bp, Homo sapiens
ggaagtacacatcccctatggtatattcaagcctaaaatgtttaacttgaatccagaaatccttggatatagtgtccagtttataagaaacacaggggatrgagaatcaagctaaatgatacaacaagaaaacaaccagacaaattcagaggttgagacattctatctgataactggcctgacctcttcaattagtcagtg

SEQ ID NO: 29452 - DNA, 201 bp, Homo sapiens
atgtctgggtctgaaactttaaatggcatatgagaatttagattcatttaattttttttttttttttttttttgctgtttattatgcaaagacgagtattsgtttccttcacttcaaggaacgtccatgagttgtggaaagggtaaaacaaattatttttatagttctgcaaaacttcaaagccatagaaacataagagaa

SEQ ID NO: 29453 - DNA, 201 bp, Homo sapiens
gggcattgtggcacgcgcctgtggtctcagctactcaggaggctgaggtaggaggatcgcttgagcctgggagtcagaggttgcggtgagctatgatcgcrctgctgcactccagcctgggtaacagagcaagaccctgtctcaaaaaaagaaaaaaaatttcctactaataaatgtggaaagagtggtggaattagaaaa

SEQ ID NO: 29454 - DNA, 201 bp, Homo sapiens
taagaaaatcctgaagatgtctgggtctgaaactttaaatggcatatgagaatttagattcatttaattttttttttttttttttttttgctgtttattaygcaaagacgagtattcgtttccttcacttcaaggaacgtccatgagttgtggaaagggtaaaacaaattatttttatagttctgcaaaacttcaaagcca

SEQ ID NO: 29455 - DNA, 201 bp, Homo sapiens
tacctcctaatgattccccctccctcaaatactctaacaaagcccctttattcagcatggcatatgtggcatattgcttgtctgactaattcttgctcacrcaagcttcctgaccttactgcataggtctttcaggtacacagttctcaaagtgttgatctgaaagttccgtacaagactggctccccatcactcattaat

SEQ ID NO: 29456 - DNA, 201 bp, Homo sapiens
gtctttcactaacaagaacttaaatgttagaaacctcataccaaattttaatagtgtcccagaaaactacatatagtataataccatttaataaagcctcmaaacaagcaaaattaaatagtatattattttgttttacatagtatgtgataaagctgtattttcttccttttttttttttttttttttttttgagacaat

SEQ ID NO: 29457 - DNA, 201 bp, Homo sapiens
ggtcagaagacacagctgaaaaaatacttttagtggaaccaaagaatggatccagtaactacagtatcgtggattctagctttgactttgtcactgactgyacttgggcaaggcctgggcaagtcacttaacctctttttgctttggtttccccatctgtaaagagggtgttagtttaaatgttctccaggatttcttgca

SEQ ID NO: 29458 - DNA, 201 bp, Homo sapiens
tgcataggttatgttcaaatactatgctattttagattagggacttgagcatcttggatttttgtatccacaacgtcctggaaccaatccttcatgaatamggaaggacaaataaatatatccttctgcctcttcagtcttaaagttagctaaaacatttcacttccccatgccaactctgtgaataccagatcttagatc

SEQ ID NO: 29459 - DNA, 201 bp, Homo sapiens
ctctgcagcaggcaaaagctctttttgttaattcaaaacagtttggaatccatttcagttcttcctaaacctccaagatacgggggaggaaattcactggrttttacaatatatttttcaaggcaaattgccatcgccgtcctaatgacagagaagctgccgatatcactacaacggctgcagatggcaagtcatccagcc

SEQ ID NO: 29460 - DNA, 201 bp, Homo sapiens
gtgattgttttctcctctgcaatttattcgaaagtctatcagttactttggtggtttcagaaagaagtgcttttgttggggatccagttggcctcattctragctggctgtggattcacagaagaacttcacttcagcaaaggctcttagggccccagactaaaagaaagatgagcaagatgtgcgtcatctaagagtggg

SEQ ID NO: 29461 - DNA, 201 bp, Homo sapiens
agtttttcctcctattccagattttccattcagctaagcaggaggctttcatccactaaacaaatttctgatcctacccagtcttaacaagagtgattgtkttctcctctgcaatttattcgaaagtctatcagttactttggtggtttcagaaagaagtgcttttgttggggatccagttggcctcattctgagctggct

SEQ ID NO: 29462 - DNA, 201 bp, Homo sapiens
gccctcaggataaaatagaattaacaaagtcctatttttcctatcaagaagtttacatgcacactcatgtagatagatacatacatacacatatgtgtacrttcatagcagtttgtattcctacccacatatacgaagggaagcatttgaaatgagccattcaaaggtacttagtttctactaggcaaggtctagacaaga

SEQ ID NO: 29463 - DNA, 201 bp, Homo sapiens
ggttttgccatgttgcccaggttggtcatgaactcctggactcaaaagatccacccgcctctgccttccaaagtgctgggattacaggtgtgagccactgygcccagccacaactttcctattcttgatcacattttatctgtactataacctagaaaggtgaaacacagtgtattatccccatttatagctagggatcca

SEQ ID NO: 29464 - DNA, 201 bp, Homo sapiens
gccacttttagtaatttttttctctttttcattacctccctcccaccctgtcttcttactcattctctgtgttgatatatccatttgaatgggataagacmtgaagaaggaaaaattattttaggtgaatatttgcattgtgtaagaaattattctaggaaagaaactgaaaaaatattctgctctcaataatatacaaca

SEQ ID NO: 29465 - DNA, 201 bp, Homo sapiens
ctcaaatctggaaaggatattgaggatattgacatcctgtatccaaaaagtttattcctgaataagtgcgtctgactactttataatgatttccaaggacygaaagtttatgagctctcttagtgacctcttccagtgtctgatcaccccgtcagttcaagtacagaatggtatttttaaattttaattagcttactctct

SEQ ID NO: 29466 - DNA, 201 bp, Homo sapiens
aaaaatacaaaaattagccaggcacatgcctagggtcccagctactccaactgaggtgagaggattgcttgagccagggatgtcaaggctgcagtgagccrcattcatgccattgcactccagcctgcaagaccctatgtcaaaaaaaaaaaaaaaaaaaaaaaaagcaagagcagaagtagaacaggctgctgttccttt

SEQ ID NO: 29467 - DNA, 201 bp, Homo sapiens
cgctcctggggcccggtcacctgaacactacaagtcccagcaagcgccgcgcgggggcggggcttgctgaccgttgtgacgtgtgggcggggcaggcgggwcgggctctcccttgggtgcttagccccgcccccgtcccactctgccctgttgctgtcgcgccgctgctggttgctgtccctggtgagtgcctcaagtgga

SEQ ID NO: 29468 - DNA, 201 bp, Homo sapiens
gtctttgcttttgctacctgtttcagggccatctacacacacccatagtatccactgctggtattctttaaggctggttatgtgtaagcatttctgccatrgccagggagaaacgggattcaaatcaattcatccatttttgctaattgctaatcgtttagaaagaaaagtaagcagaaggccgggcacagtggctcacgc

SEQ ID NO: 29469 - DNA, 201 bp, Homo sapiens
  misc_feature (1)...(201): n = A,T,C or G, or insertion/deletion polymorphism (see Tables 1-2)
ttcctaaagtcatagggcttgttgggatgaaaaatctagaatttaacagttcccagctcaggctattttatctaggctgccttgcttatttaagtcatttngagaaaggggaactaaagtagctataagcctctgttcatgtgagggttgtggtgcctgtggtgaagaagttaaagatattgtcagaaaattctcgtagca

SEQ ID NO: 29470 - DNA, 201 bp, Homo sapiens
ccttgaacccaggaggcggaggttgcagtgagccaagatcatgccattgcactccagcctgggcaacagagcgagactccatctcaaaaaaaaaaaaaaaagaaaagaaaagaaagaaaaattctcacagtgcagtagccccctgaggtgggtagtagtatctcttgggcataagtaagtaacatgaatatccctgagaga

SEQ ID NO: 29471 - DNA, 201 bp, Homo sapiens
cttcctcatatgtagcaaagcgtataggtcacattgcctggtaagagttttctgcaatggagctgtagcttcactgtctagtacagctgctactagccacrtgtggctgttaagcacttgaaatgtggttagtgtgactaagtaactggatttaatttaatttaatttatttatttagagacagagtttcgttctgttgcc

SEQ ID NO: 29472 - DNA, 201 bp, Homo sapiens
tccacaaatactcatttctagactactttgtcagaaaggtaatttcccaagccattgttggagcccatttctcccaggaattttatcactgggaggaaggraagactaaagattactgacctgaaaactcagtagatgccctccctccaggaaaagctggaatacttcctcactgaccaagttcgggttggcatggttatg

SEQ ID NO: 29473 - DNA, 201 bp, Homo sapiens
ctactttgtcagaaaggtaatttcccaagccattgttggagcccatttctcccaggaattttatcactgggaggaagggaagactaaagattactgacctkaaaactcagtagatgccctccctccaggaaaagctggaatacttcctcactgaccaagttcgggttggcatggttatgttctagtttactcatggccctt

SEQ ID NO: 29474 - DNA, 201 bp, Homo sapiens
tgcagtgaatgggaatcagccagtccctcaccatcctaacctatgggaattttctgctagagggacttggaatatagtttatggaatgttcttttgtaggragaggtggaagagattgagcagcacaacaaggagctttgcaaagaaaaccaggagctgaaggacagctgtatcagcctccagaagcagaactcagacatg

SEQ ID NO: 29475 - DNA, 201 bp, Homo sapiens
tcacaatgttggccagattggtctcgaactcctgacctcaggtgatccacctgcctcagcctcccaaagtgttgagattacaggtgtaagccacagtgccyggccttttttctttgctttgctttgcttttttttttttttttttttttttagacggagtttcactcttcttgcccaggctagagtgcagtggcatgatct

SEQ ID NO: 29476 - DNA, 201 bp, Homo sapiens
agctgggattgcaggcatgtgccaccacgcccagctaattttgtatttttagtagagatggggtttctccatcttggtcaagctggtctcgaattcctaamctcaggtgatccacctgcctcagcttcccaaagtgctgggattacaggtgtgagccaccatgcctggctttttttgcttgtttgttttaatagagacagt

SEQ ID NO: 29477 - DNA, 201 bp, Homo sapiens
gtattcctttccaattccgtccagaaaatgaggaagacatcctggttgttaccactcaggtttgtaaaacttctcacctcaatcccttactgccattacgrgtagcaatataggataggatggaatttgagttaataaggctttattgaatatctaacgggtatcattggaaaaaatgtatgtagtactcacacagactca

SEQ ID NO: 29478 - DNA, 201 bp, Homo sapiens
cagagcaagactctgtctcaaaaaaaaaaaaaaaaaaaaaaaaaaaagaactgtagtaaagccctcttaagatgataagggaattttgcttattttctttytcctaagaacttgaaatgctgtctgtgccacttttagtaatttttttctctttttcattacctccctcccaccctgtcttcttactcattctctgtgttg

SEQ ID NO: 29479 - DNA, 201 bp, Homo sapiens
aggaaggtcacttgaagccaggagtttgaaaccagcctgggcaacaaagcaagagcctttcatctctacaaaaaatttaaaaatcagccaggcacggtgtygtgtgcctgtagtcccagctactaaggaggctgaggtgggagggttgcttgagcccatgagttcaaggctgcagtaagctatgatctcaccccgcactcc

SEQ ID NO: 29480 - DNA, 201 bp, Homo sapiens
ttgttcctgttttgttttccttcttttatatcttggttatgttcactatttttgttttaggcccagctgtcaactcaagagaaagaaatggagaagcttgytcagggagatcaagataagacagagcagttagagcagctgaaaaaggaaaatgaccacctctttctcagtttaactgaacaggtagagtcatgagagaaa

SEQ ID NO: 29481 - DNA, 201 bp, Homo sapiens
gagcccacattcctgtgcagcagcaatagctagagctgagtagctgctgtccctatagattctccatctagctgcagtctgcactgttttattgcattcarttccttcgtttgattacatttcttgcctgctctctataggcacattccagtttgtgacctctgatgtagcaaataaattactgttttaaatgatctatag

SEQ ID NO: 29482 - DNA, 201 bp, Homo sapiens
tactctgctgaattcctttgagcaacagatagtaaattagagaatgaagagttggctgtaaagtttcgtcctttgcagctcacctcaaatgctctccccartgttctttcagtgtagtcttaatcagactattcaactcctcatcaccccagacactggtagtatctggcaccaggtaggtactcagtaactctttttatt

SEQ ID NO: 29483 - DNA, 201 bp, Homo sapiens
agctccttgtatccttggacaaatgccttcctgtgttccctcttccttcatgtaacttgagccgagatgcctattctcacactgtaggaaggaatcacacyaacccaaacctaagtgcttcaggcttcgctgagtgagacgtttattcaaaacaaagattattgttttcatggttaggtgggattcaacaaggtttcattt

SEQ ID NO: 29484 - DNA, 201 bp, Homo sapiens; identical to SEQ ID NO: 6164

SEQ ID NO: 29485 - DNA, 201 bp, Homo sapiens
tgaaggacagctgtatcagcctccagaagcagaactcagacatgcaggctgagctccaaaagaagcaggtatggctgctggttataggtgaccttggagcrtggagatcagaattggatggtgcctcttatccagcaccatattctgttttgcctgtgatctcaccttcttataccagtatctttgaacaggcattagttt

SEQ ID NO: 29486 - DNA, 201 bp, Homo sapiens
tcattttgataactccagaagtcagctggatcagtttgttttgggcccaaggctgagccagcctgttgtggaagggagatgaaagcacagttcatccatcagcattttgcttaggatctatacctttgaattatttggtagcataagtagggaggagatctgaaccaggcagctagccaaacaagttctgtccaatgcccc

SEQ ID NO: 29487 - DNA, 201 bp, Homo sapiens
aattaatatattagcaattatcatcattatcaattatgtaggaatgaaaggctaattgactaataatttcctgtaatatattgttgaaaaagagtccccakggcgttgacaggtgcctggaagccccgtttacttagttgatccaaggacatgagtaatcctgatgtctgagggatatccagtcatctgattataattcac

SEQ ID NO: 29488 - DNA, 201 bp, Homo sapiens
tttccccactctgaaaatagctttgttgtttttttctgactgtataacatatatatatatgtatatatatatatgtgtgtgtatatatatatatatatataaagcctgtgtgtgtgtgtgtgtgtgtgtgaaatgaaaatacaattttcatttgtaattttattttgaaataatgaaaatacaatttcaggctgggtgtcg

SEQ ID NO: 29489 - DNA, 201 bp, Homo sapiens
taattgactaataatttcctgtaatatattgttgaaaaagagtccccatggcgttgacaggtgcctggaagccccgtttacttagttgatccaaggacatragtaatcctgatgtctgagggatatccagtcatctgattataattcacatcatatatgcatcatccagtcaaccattgagtacctactgtatctaagata

SEQ ID NO: 29490 - DNA, 201 bp, Homo sapiens
ttttccccactctgaaaatagctttgttgtttttttctgactgtataacatatatatatatgtatatatatatatgtgtgtgtatatatatatatatatataaagcctgtgtgtgtgtgtgtgtgtgtgtgaaatgaaaatacaattttcatttgtaattttattttgaaataatgaaaatacaatttcaggctgggtgtc

SEQ ID NO: 29491 - DNA, 201 bp, Homo sapiens
ggtcagaccacagaaatgttttagaaagtagttaccaacatttaaaaataggaatatttcccataaaaatttgtatttccaacttcctttgggaaatgaarggacctagcaacattgagcccacattcctgtgcagcagcaatagctagagctgagtagctgctgtccctatagattctccatctagctgcagtctgcact

SEQ ID NO: 29492 - DNA, 201 bp, Homo sapiens
attttccccactctgaaaatagctttgttgtttttttctgactgtataacatatatatatatgtatatatatatatgtgtgtgtatatatatatatatatataaagcctgtgtgtgtgtgtgtgtgtgtgtgaaatgaaaatacaattttcatttgtaattttattttgaaataatgaaaatacaatttcaggctgggtgt

SEQ ID NO: 29493 - DNA, 201 bp, Homo sapiens
gatcgcaccactacactccagcctgggcgacagagcaagactctgtctcaaaaaaaaaaaaaaaaaaaaaaaaaaaagaactgtagtaaagccctcttaaratgataagggaattttgcttattttctttttcctaagaacttgaaatgctgtctgtgccacttttagtaatttttttctctttttcattacctccctccc

SEQ ID NO: 29494 - DNA, 201 bp, Homo sapiens
agactctgtctcaaaaaaaaaaaaaaaaaaaaaaaaaaaagaactgtagtaaagccctcttaagatgataagggaattttgcttattttctttttcctaaraacttgaaatgctgtctgtgccacttttagtaatttttttctctttttcattacctccctcccaccctgtcttcttactcattctctgtgttgatatatc

SEQ ID NO: 29495 - DNA, 201 bp, Homo sapiens
tttcagcaatattaggccatttcaattctggggttagacgaagcctggtaagcatcttcaaatgtgcattctcttcattcattcactatttcttgagtgcmtaaccatgtgccagtcattatgctaggcactgaggatacagtggaagacaggatggccacatctgtgccacatatagcttacatttgtactgacctcttt

SEQ ID NO: 29496 - DNA, 201 bp, Homo sapiens
tcctctcacctcagtgcaacctccgcctcctgggctcacctgatcctctcacctcagcctaccaagtagcagagactaaggcgccagccaccacacccagmtaatttttgtattttatgtagagatggggttttgccatgttgcccaggccggtttcgaactcctgagcttaagcagtccacccacctcagcctcccaaag

SEQ ID NO: 29497 - DNA, 201 bp, Homo sapiens
caaggcgggcggatcacttgtggtcaggagttcgagaccagcccggccaacatggtgaaacccgtctctactaaaaatacagaaattagctaggcgtggtrgtgggtgcctgtaatcccagctacttgggaggctgaggcacaagaatcacttgaacctgggagacggaggttgcagtgagccgagatggtgccactgcac

SEQ ID NO: 29498 - DNA, 201 bp, Homo sapiens
tagaagatatacacatacaaagctgaggaagctaattaaggttttgaaatggtagcaagagaggcaagttatgccgcccaggaactagcagttacagcagycaccctgatggctaaccaaggatgacagaaacgtgctccacagagactcctcgatggtaggacaggaaatgggggtgaaaaggacttggggtaacatgtc

SEQ ID NO: 29499 - DNA, 201 bp, Homo sapiens
tggctaacgtggtgaaaccctgtctctactaaaaatacaaaaattagctgggcatagtagtggacttggctcactgcaacctccgtctcctgggctcaacygatcctctcacctcagtgcaacctccgcctcctgggctcacctgatcctctcacctcagcctaccaagtagcagagactaaggcgccagccaccacaccc

SEQ ID NO: 29500 - DNA, 201 bp, Homo sapiens
gcctaaagcaggaagcagtctgctttccttccctcagtgtataatcctatgcttcatactctccttgacttaggcatttaaatgtttccaagacaaattgraacaagaactactcaaatggaggagccaaggacagaaattgcaggtggctagaagttgtttccctgttccaaggcagcaataattcttaggccttcccaa

SEQ ID NO: 29501 - DNA, 201 bp, Homo sapiens
ggaaatatctgccagaacacagttggagaagctagggatggtattttctcattgaatgagatcttttttattcttttcaggtatccaagaaagttcttccsccagcccggtaagtatttgattcatgagaatattcccacaaagcacttgaaaatttcccttcctgctccagttcatgggagaaccatagggagacaggtt

SEQ ID NO: 29502 - DNA, 201 bp, Homo sapiens
gaagttgtgactgagatggctcgaagtgaaacagaaagcaagttgtgtaatctcagtatttgtcaggattttgcttttcctgacttgctttgcacagaatrttccctggatgaaagcccagaaatcaccaacatttcagacaatgctttctgagccttactctgttccacatttcataacaggacccctaccatggaggag

SEQ ID NO: 29503 - DNA, 201 bp, Homo sapiens; identical to SEQ ID NO: 6161

SEQ ID NO: 29504 - DNA, 201 bp, Homo sapiens; identical to SEQ ID NO: 6160

SEQ ID NO: 29505 - DNA, 201 bp, Homo sapiens; identical to SEQ ID NO: 6163

SEQ ID NO: 29506 - DNA, 201 bp, Homo sapiens; identical to SEQ ID NO: 6167

SEQ ID NO: 29507 - DNA, 201 bp, Homo sapiens
acttcttattcgattcatttggcagtcatttgtatactcctctatcctctctattggattgggaccctttttaaggttgtaccaggaaaaaaaaacccacractacaacagtaataactatataactaactataactaacgtctcttaaaccctttatgcagactctgtgctaagtactttgtcattcaacatgcatcaac

SEQ ID NO: 29508 - DNA, 201 bp, Homo sapiens
attataggataaatgggattgaatatagaagatgaaatccagagagatggactttcctaaagtcatagggcttgttgggatgaaaaatctagaatttaacrgttcccagctcaggctattttatctaggctgccttgcttatttaagtcatttagagaaaggggaactaaagtagctataagcctctgttcatgtgagggt

SEQ ID NO: 29509 - DNA, 201 bp, Homo sapiens; identical to SEQ ID NO: 6168

SEQ ID NO: 29510 - DNA, 201 bp, Homo sapiens; identical to SEQ ID NO: 6169

SEQ ID NO: 29511 - DNA, 201 bp, Homo sapiens
tattaggccgggggcatcagcaagactcctgtctcaagagctgagctccccgagtgagcaattcctgtcccttttaagggctaacaactctaagggggtaygcgtgagagggtcgtgatcaattgagcaagcagggggtacatgactgggggctgcatgtgtcggtaattagatcgtcacaaaacaggatagggattttca

SEQ ID NO: 29512 - DNA, 201 bp, Homo sapiens
ttgcttagacttcaaagtaaaaccagtaaatagataggatggggctagaataagtattatggttgtttgggaggtcttgtttttttggttattgtacttayttatttttaaaaattatatgtgtgccagccgggcgcggtggcttacattgaagcaggaagagccacagacaaaactcctcagacaccgagttaacgaagg

SEQ ID NO: 29513 - DNA, 201 bp, Homo sapiens
ccataaaattcctgcttcctgtaccaccgcaggctgcagtggctctgagatgcttacagcaatggggtgtgtattaatgagactctaaaacatgccctagratgttctgatgagtttttggtatagacttttcaaccctgctttgattccttaatatataaaaatggaatttatttttagttctcttcttactgagctcag

SEQ ID NO: 29514 - DNA, 201 bp, Homo sapiens
cctaggaacaagaaagcggcactaactgtggaggagcagttagcacaagaggtggaacgccttaaggcaaaggtagaggccaggaaagcctatttcttagrgaagtacaaagagtgtcaatgacttcacaaacagatcagccaactcggggcggctgcactggtaggtgacagagataagggggcccaggaaagcaagagg

SEQ ID NO: 29515 - DNA, 201 bp, Homo sapiens
acaactttttcctttttctctgctgccaaaccaggagcagaagtggtggtctgtaccagtgctggacccatggtaggcccctaataaatgctgtgcattcmttcattcattcattcattcattcattggttcattcattcatccaaccaacatttattattgattgaagatgatatggcaaaaaataaagtggttgtactt

SEQ ID NO: 29516 - DNA, 201 bp, Homo sapiens
ggttgaggctgcagtgagccatggctgtgccactgtactccagcctgggtgacagagtgagaccctgccccccccgcaaaaaaaataattctctttacatrtcttccctcccctgtccacaaatactcatttctagactactttgtcagaaaggtaatttcccaagccattgttggagcccatttctcccaggaattttat

SEQ ID NO: 29517 - DNA, 201 bp, Homo sapiens
gctacttgggaggttgaggtggagggtcacttgagcctgggaggttgaggctgcagtgagccatggctgtgccactgtactccagcctgggtgacagagtragaccctgccccccccgcaaaaaaaataattctctttacatatcttccctcccctgtccacaaatactcatttctagactactttgtcagaaaggtaatt

SEQ ID NO: 29518 - DNA, 201 bp, Homo sapiens
cattttccccactctgaaaatagctttgttgtttttttctgactgtataacatatatatatatgtatatatatatatgtgtgtgtatatatatatatatatataaagcctgtgtgtgtgtgtgtgtgtgtgtgaaatgaaaatacaattttcatttgtaattttattttgaaataatgaaaatacaatttcaggctgggtg

SEQ ID NO: 29519 - DNA, 201 bp, Homo sapiens
tcattttccccactctgaaaatagctttgttgtttttttctgactgtataacatatatatatatgtatatatatatatgtgtgtgtatatatatatatatwtataaagcctgtgtgtgtgtgtgtgtgtgtgtgaaatgaaaatacaattttcatttgtaattttattttgaaataatgaaaatacaatttcaggctgggt

SEQ ID NO: 29520 - DNA, 201 bp, Homo sapiens
gtttccaagacaaattggaacaagaactactcaaatggaggagccaaggacagaaattgcaggtggctagaagttgtttccctgttccaaggcagcaataattcttaggccttcccaatgatattttggtcacagtgcattaagaaactccaggatgtgaatgaggactccataaaattcctgcttcctgtaccaccgcag

SEQ ID NO: 29521 - DNA, 201 bp, Homo sapiens
tttgctcttcctcccagctctccatcaagaaatgccctatctgcaaagcagatgatatttgtgatcacaccttggagcaacagcagatgcagcccctttgyttcaattgtccaatttgtgacaagatcttcccagctacagagaagcagatctttgaagaccacgtgttctgccactctctctgagtatcccaacctcttg

SEQ ID NO: 29522 - DNA, 201 bp, Homo sapiens
acctcctgagtagctgggattacaggcgcacaccaccgtgccaacttattttttgtattttaatggagacgggttttcaccatgttgcccaggctggtctsaaactactgagctcaggcaatccacccaccttggcctcccaaagtgctaggattacaggcatgagccactgcacccggcctatattttcaatatatacaa

SEQ ID NO: 29523 - DNA, 201 bp, Homo sapiens
tcttcagaaactgacgagagaagacttgcctctccctatgcatcctgcttgctcattagcttagcaggcccttccatggtgtgtgtgtgcatgtgtgtgtyttcccagcaatggtactgaaatctctttttgtgcagaggaaggaccagaagaagctcgagcagacagtggagcaaatgaagcagaatgaaactactgcaa

SEQ ID NO: 29524 - DNA, 201 bp, Homo sapiens
aaaataaaataaaaaattaaaaaaggtttgagccctggcgtgagaatcttgtcataatgaactcattctattatattttcttttttctttttttggagacrgagtctcactctgtcacccaggctggagtgcagtggtgcaatctcggctcactgcaacctccgcctcctgggttcaagcaattctcctgcctcaacctcc

SEQ ID NO: 29525 - DNA, 201 bp, Homo sapiens
tatgtgcaccccaatttttggttgtatcagacattttcccatatgtatttgtcataagtgaaaaataaaataaaaaattaaaaaaggtttgagccctggcktgagaatcttgtcataatgaactcattctattatattttcttttttctttttttggagacggagtctcactctgtcacccaggctggagtgcagtggtgc

SEQ ID NO: 29526 - DNA, 201 bp, Homo sapiens
ggtagctgacctggaatcagtgaatttttcacatagttatctccacctctacagactgaaagaacaaaaccagaagatgtcctcagaaaatgagaagatgrgaatcagagtggatcagcttcaggtaggtaatgccatatgtttgtcaaaggatattttcttagccttaccactgctccaatttggtggcctagaaagatg

SEQ ID NO: 29527 - DNA, 201 bp, Homo sapiens
tttgtcttgcggagggcagcgctgcagtgctgtgtggcagggtgggaggctcctcgggaagaagtgacacccctggcggcggcgagggtcttgaggcggcrgctgccgccccacgggtcgtggcgtcccgtcccctcccgcgggcccaggctgtggtggttccgtaatccctcgcctggatgtcatcgccgttggcttcga

SEQ ID NO: 29528 - DNA, 201 bp, Homo sapiens
gctctgcctacttccttcccaggccaaaggggcactccattcttctcccacgtggccctgagggagcacaggctccacgccgccaggccttcctcatttayagaggaagccgagtagccagactttggaaatgttgataattcaatttaaaaaattcatcttgggatttttgtataggcacaaaagggaagagtggtataa

SEQ ID NO: 29529 - DNA, 201 bp, Homo sapiens
aagttttcctttttttttttttttccattgactcgtttcctcttgagttttgtgtttgttttggcctcttttcaagttggaggctgagccacccctttggrtttgagacagacacaaacaaaatgcaagtggaagctccatgggaaggtggagtgtgttgtccgggggatctcattgcgaggtgactgggtggccaagtaa

SEQ ID NO: 29530 - DNA, 201 bp, Homo sapiens
ccacgtggccctgagggagcacaggctccacgccgccaggccttcctcatttacagaggaagccgagtagccagactttggaaatgttgataattcaattwaaaaaattcatcttgggatttttgtataggcacaaaagggaagagtggtataatgaacctccatgtacccgttacccaggttcaacaattatcaacattt

SEQ ID NO: 29531 - DNA, 201 bp, Homo sapiens
ttccttcattgattcattgtcaaatatttctatgtcaggcatgacactagcttagccagtgaccctgtgaccctgcttaggtgactcagttttccatctayagagggaagaaggaccaaggggtccctcagcccctggcaggccgaggggatgttgagaggatgcaggcataggtgatgtgcgtgggacagtccaagttct

SEQ ID NO: 29532 - DNA, 201 bp, Homo sapiens
tgcagtggtatgatctcggctcactgcaacctctgcctctggggttcaatcaattctcctgcctcagcttcccgagtagctgggattacaggcatgcgccmccacacccggctaatttttgtatttttagtagagacgaggtttcaccatgttggccaggctggtctcgaactcctgacctcaagtgatccacccacctcg

SEQ ID NO: 29533 - DNA, 201 bp, Homo sapiens
gtggtatgatctcggctcactgcaacctctgcctctggggttcaatcaattctcctgcctcagcttcccgagtagctgggattacaggcatgcgcccccamacccggctaatttttgtatttttagtagagacgaggtttcaccatgttggccaggctggtctcgaactcctgacctcaagtgatccacccacctcggtct

SEQ ID NO: 29534 - DNA, 201 bp, Homo sapiens
gacccagcccacctgccccaggatcaaacaggagcccctggtctgcttcttcctcacaccttgcagatccggatctgggcccggcccagtgccattgcggygggccacggcgattatgccctgaacgtgacgggccccatccttaacttctttgctggtcattatgacacaccctacccactcccaaaatcaggtgagtgg

SEQ ID NO: 29535 - DNA, 201 bp, Homo sapiens
ttagcagtcactccttattcctacctggtcccctcagcccctggcaaccactaatatactttctgtctctatggatttattacctattctggatgtttcayaaaatggaatcatatacacacagcctttttgtgtctgtctgccttctttcacttagtgtaatgttttcaagattcatgcatacggtagcagggatcattc

SEQ ID NO: 29536 - DNA, 201 bp, Homo sapiens
atcaaacaggagcccctggtctgcttcttcctcacaccttgcagatccggatctgggcccggcccagtgccattgcggcgggccacggcgattatgccctkaacgtgacgggccccatccttaacttctttgctggtcattatgacacaccctacccactcccaaaatcaggtgagtgggggtccttgaggagggaggcag

SEQ ID NO: 29537 - DNA, 201 bp, Homo sapiens
ttcctacctggtcccctcagcccctggcaaccactaatatactttctgtctctatggatttattacctattctggatgtttcataaaatggaatcatatayacacagcctttttgtgtctgtctgccttctttcacttagtgtaatgttttcaagattcatgcatacggtagcagggatcattcttttttatggctgaata

SEQ ID NO: 29538 - DNA, 201 bp, Homo sapiens
aagcaaccctcccacttcagccttctgagtagcttggattacaggcatgtgccactgtgcccagtcttttgctattttaaaattgggttgtctttttattstaagagttctttatatattctgaatattagacccttaatcagagatagggtttgcaagtatttctcccattctatggactgtcttttcactcacttaata

SEQ ID NO: 29539 - DNA, 201 bp, Homo sapiens
cacgaccttgcgaaaaagcaccggagtcgggaacacgcgcttctcatttttttctttttcctttatttgtttttgagacagagtctcgctctgtcgctcasgctggagtgcagtggcactttctccgctcactgcaacttcctcctcctgggttcaagcgattctcctgcctcagcctcccgagtagctgggactacaggt

SEQ ID NO: 29540 - DNA, 201 bp, Homo sapiens
gtttgttttggcctcttttcaagttggaggctgagccacccctttgggtttgagacagacacaaacaaaatgcaagtggaagctccatgggaaggtggagygtgttgtccgggggatctcattgcgaggtgactgggtggccaagtaactcttcactggggaccctcaaaaattagtccatgggtttgttctctcgagaca

SEQ ID NO: 29541 - DNA, 201 bp, Homo sapiens
actggagggtcccactgatggccacgccctctcgctccacccacaggctgtgaacaaccggtccatccaactccccaccaccgtgcgggacatcatgaacygctggaccctgcagatgggcttcccggtcatcacggtggataccagcacggggaccctttcccaggagcacttcctccttgaccccgattccaatgttac

SEQ ID NO: 29542 - DNA, 201 bp, Homo sapiens
tgtgttgtccgggggatctcattgcgaggtgactgggtggccaagtaactcttcactggggaccctcaaaaattagtccatgggtttgttctctcgagacmaggcagtttttccagagagtaagcctctgtattgtgcaatgaggctggtagtactcccattctaggacacaggagggaagggaactggggtgccaccttt

SEQ ID NO: 29543 - DNA, 201 bp, Homo sapiens
cagaattcaagtgagcagatggggtcactgaggcatggtcaggtgggtggggtagagggcagttactaagggaccatagtaggactggcctcctgtggtcycagccccagccactgtagacagaccctccctccagagccaggagttcaggggcactcggtgccagagctgggcagaagctgggagcctgggcagctgctc

SEQ ID NO: 29544 - DNA, 201 bp, Homo sapiens
taggtacctgagctacaccctgaacccggacttaatccggaagcaggacgccacctctaccatcatcagcattaccaacaacgtcattgggcaaggtctgrtctgggactttgtccagagcaactggaagaagctttttaacgagtgagtctgtggaatgggtgtcagggacagcgagcgccgaggctggggccccggggg

SEQ ID NO: 29545 - DNA, 201 bp, Homo sapiens
actgggtggccaagtaactcttcactggggaccctcaaaaattagtccatgggtttgttctctcgagacaaggcagtttttccagagagtaagcctctgtmttgtgcaatgaggctggtagtactcccattctaggacacaggagggaagggaactggggtgccacctttcagtatggaaactttcacctctgaccctctt

SEQ ID NO: 29546 - DNA, 201 bp, Homo sapiens
tcccactacgatctcgcggtcaagtgggtccccagcgggcctcgcaggggtcggaggggctcccatctggggagggggccccagggtgggcgagggcgacsggagcctggggaggacggacggggagggcggcggagcggagctaagctgcggcgggtggacccggctcggccgcggccactctgtccctggtgggtgggg

SEQ ID NO: 29547 - DNA, 201 bp, Homo sapiens
ctcaaaaattagtccatgggtttgttctctcgagacaaggcagtttttccagagagtaagcctctgtattgtgcaatgaggctggtagtactcccattctrggacacaggagggaagggaactggggtgccacctttcagtatggaaactttcacctctgaccctctttgcaatccagcaaccctcccactgtggtctggt

SEQ ID NO: 29548 - DNA, 201 bp, Homo sapiens
gttcgccaggtgtgctaaccgcgtgtcacccctggggcaggtacagcgaggttaatgccatcagcaccgcctgctccaacggagttccagagtgtgaggaratggtctctggccttttcaagcagtggatggagaaccccaataataacccgtgagtgtctcccctgcgcctcctctgccagtcttcatctgcccccaaca

SEQ ID NO: 29549 - DNA, 201 bp, Homo sapiens
gaaactggggctggagcctgttcctgcccttctgggtcacagggctgctttggggaccaaggaacctcaggcccaaggcacaaagcacatacagcgggggycagagggccagttaggccacagagccttaggcagggtgccggcctggggttgtgtgtcaagaggtgaatcttggctggagttcgccaggtgtgctaaccg

SEQ ID NO: 29550 - DNA, 201 bp, Homo sapiens
ttggccaacatgtattgggctcctgccttgtgctgggcatggaggggcatacgatgccaccaggccttcctttgaggtgcttgggtgcagcagcaggcttytgaacacactggtagcatttttctttttcttttttttttttcttttttgaaacagagtctcgttctgttgtcgtccagactggagtgtagtggcacgatc

SEQ ID NO: 29551 - DNA, 201 bp, Homo sapiens
ttcccaggctgtggctgggctgggtggaggtgctttacttgggcccctctgtttattcccagtgcccataaggtccctgtcactctggcgctgaacaacascctcttcctgattgaagagagacagtacatgccctgggaggccgccctgagcagcctgagctacttcaagctcatgtttgaccgctccgaggtctatggc

SEQ ID NO: 29552 - DNA, 201 bp, Homo sapiens
ccctgtgaccctgcttaggtgactcagttttccatctatagagggaagaaggaccaaggggtccctcagcccctggcaggccgaggggatgttgagaggaygcaggcataggtgatgtgcgtgggacagtccaagttctctcctgagtcacctgaattagcagtagctgagacagcatctggccctcttaggtacctgagc

SEQ ID NO: 29553 - DNA, 201 bp, Homo sapiens; identical to SEQ ID NO: 6199

SEQ ID NO: 29554 - DNA, 201 bp, Homo sapiens
cgtcattgggcaaggtctggtctgggactttgtccagagcaactggaagaagctttttaacgagtgagtctgtggaatgggtgtcagggacagcgagcgcygaggctggggccccggggggtggcctgtgcgggtaagacacgccgggggcactaaccagaagtggacaaaaatcagccaagcctgggggctagggtgggg

SEQ ID NO: 29555 - DNA, 201 bp, Homo sapiens
gaggccctgctgtcatggggcctgcagtccaggactcaagttatcaccacacagatcaaagggaaaaccacgctgagttctggggctttgcagaacaggtytgtggagctaatggagctcataggagcttgacttggtcagggaggtcagggcggcttcgctgcggaagacttgtaggatggaaaggaattaaccaaggca

SEQ ID NO: 29556 - DNA, 201 bp, Homo sapiens
aacctcgtgatccacccacctcggccttccaaagtgctaggattacaggcgtgagccaccacgcccagccgggaatgatttttaatcattctactatttgstgtttaatatgttttctcactaaatctgttcaacaaacctgagaggcaaatactgttatttatttatgaggagagaggttcagaagggtaaagttacctg

SEQ ID NO: 29557 - DNA, 201 bp, Homo sapiens
cataggtgatgtgcgtgggacagtccaagttctctcctgagtcacctgaattagcagtagctgagacagcatctggccctcttaggtacctgagctacacmctgaacccggacttaatccggaagcaggacgccacctctaccatcatcagcattaccaacaacgtcattgggcaaggtctggtctgggactttgtccaga

SEQ ID NO: 29558 - DNA, 201 bp, Homo sapiens
cagacactgtttgcttccagcaggcaccccccgagcccagctccacacaccgttcctggatctcctctccccaggcggagcgtgcccctgcccagtccagygaccttcgcctgttggagccctggttaatttttgcccagtctgcctgttgtggggctcctcccctttggggatataagcccggcctggggctgctccgtt

SEQ ID NO: 29559 - DNA, 201 bp, Homo sapiens
ccccacatgctcttctgccctctgtgtggccccgttcttaggtgattcctttcttcagttattaacaaatggggttggctttctgttgtgatgacaaaggyaaggcaggtgcatgagcaaagatccaagaagacaagaagacaacaacagtgcccctgagtcccgccccacaccccagtccgagtgcacttccctcatgcg

SEQ ID NO: 29560 - DNA, 201 bp, Homo sapiens
gcccagcctcgtccctacccttctcgctcactgctccctcagagcagacaatgagccccaggttgtccctgagctcccagtctcatagttcacagtcaggracactgagtgggagtgggtggggcctacccaaggacccagtggtcggggatggagcatggataacacagcagctcacccggccacgggtgctcagctctc

SEQ ID NO: 29561 - DNA, 201 bp, Homo sapiens
gtggggcaggaatggaaagacaagctggggtatgggccgtcccttttcccatttggaaggaaaacgtggcgtgtgggcgtattctccagaagagaggggartgaggaactcggcagtcagacctgtgttcaagctgtgactcccccacatcctagtggggtctcccagggcgtgtcatttcatctcctctataatcatggc

SEQ ID NO: 29562 - DNA, 201 bp, Homo sapiens
cccgccaccgcgcctggctaatttttttgtatttttagtagagatggggtttcaccatggtctcgatctcctgacctcatgatctgcctgcctcggcctcycaaagtgctgggattacaggcgtgagccacggcgtccagcttttttttttttttgagactgagtctcgctctgtcatgcaggctggagtggtgcagtggt

SEQ ID NO: 29563 - DNA, 201 bp, Homo sapiens
ttttttattttttttttgagatggagtcttgctctgtcacccaggctggagtgcagtggtgcgatctgggctcactgcaagctccgcctcccgggttcacstcattctcctgcctcagcttcctgagtagctgggactacaagtgcccgccaccgcgcctggctaatttttttgtatttttagtagagatggggtttcacc

SEQ ID NO: 29564 - DNA, 201 bp, Homo sapiens
cccggcctccctcacagttcacctctctccctccctgcagttatggtggtggctcgttctccttctccaacctcatccaggcagtgacacgacgattctcmaccgagtatgagctgcagcaggtaagaagtcattccccagacctgggctctgcctacttccttcccaggccaaaggggcactccattcttctcccacgtg

SEQ ID NO: 29565 - DNA, 201 bp, Homo sapiens
ccctggcaggccgaggggatgttgagaggatgcaggcataggtgatgtgcgtgggacagtccaagttctctcctgagtcacctgaattagcagtagctgasacagcatctggccctcttaggtacctgagctacaccctgaacccggacttaatccggaagcaggacgccacctctaccatcatcagcattaccaacaacg

SEQ ID NO: 29566 - DNA, 201 bp, Homo sapiens
gcatttgggttgtttcagtcttctggctgtgatgaatatcatggaccttcacgtgcaaattttgtacaaacatgttttaatttatcttgggtatacacctwggagcggaattgctgggtcatttggttactctgtgtttaactttttgagaaactgacaaaatgttttccaaagcaactgtaccattgtccattcctatta

SEQ ID NO: 29567 - DNA, 201 bp, Homo sapiens
tttggtgagctcctgggtgtgttttattttctgcatatacttctctgtgtttcccaaattccctacaataagtcatggaatttttttttttttttttttttgagatggagtctcgctctgttacccaggctggagtgcagtggcgtgatcacagctcactgtaacctctgcctcccgggtttaagcgattctcctgcctca

SEQ ID NO: 29568 - DNA, 201 bp, Homo sapiens
gacagccagacagaggcttgtccaactccaaagccatcctctactccacagcaccaagctttttgtttttgtttttgtttgtttgtttgtttgtttgtttkttttgagacggagtctcgctctgttgcccaggttggagtacagtggcgcgatctcagctcactgcagcctccacctcccaggttcaagcgattctctgcc

SEQ ID NO: 29569 - DNA, 201 bp, Homo sapiens
tcttccgcctcagccccccaagtagctgggactacaggcgtgcgccaccacgtccagctaattttgtatttttatttatttatttatttatttatttattttttgagacagagtcttacaccgtcccccaggctggagtacagtggcacaatctcggctcactgcaacctctgcctcccgagttcaagcgattctcctgcc

SEQ ID NO: 29570 - DNA, 201 bp, Homo sapiens
ttggggtcttgagatgctgaaggtacctgggggcagcacatgcgtaagagaatgggtccagctccgcggctgaccagccctgcagggtggatggagcctcygttgctcctccctatagtggaagccgggatggctccttgcaagaggtgtctgagtgaggctgtggttgaggtcctggccagcagctgacctcaggctaca

SEQ ID NO: 29571 - DNA, 201 bp, Homo sapiens
ttcttccgcctcagccccccaagtagctgggactacaggcgtgcgccaccacgtccagctaattttgtatttttatttatttatttatttatttatttattttttgagacagagtcttacaccgtcccccaggctggagtacagtggcacaatctcggctcactgcaacctctgcctcccgagttcaagcgattctcctgc

SEQ ID NO: 29572 - DNA, 201 bp, Homo sapiens
gagcagttccgaaatgccacactggtcaatgaggctgacaagctccgggcagccctggcctgcagcaaagagttgtggatcctgaacaggtgagtcttggsgcagggtgggactgcgagagccctctccccacctggagaaccaggcaggcctccacactcctcgccagatccttcacgtgacccccacagacctgttgag

SEQ ID NO: 29573 - DNA, 201 bp, Homo sapiens
ctccctatagtggaagccgggatggctccttgcaagaggtgtctgagtgaggctgtggttgaggtcctggccagcagctgacctcaggctacagcgggctycttgatgggagctgtagagccccttcctggtggtgaggaaactgccctcatggttcccgcctctgcctggaactctggagcctgacattcaaccttctcc

SEQ ID NO: 29574 - DNA, 201 bp, Homo sapiens
attcttccgcctcagccccccaagtagctgggactacaggcgtgcgccaccacgtccagctaattttgtatttttatttatttatttatttatttatttattttttgagacagagtcttacaccgtcccccaggctggagtacagtggcacaatctcggctcactgcaacctctgcctcccgagttcaagcgattctcctg

SEQ ID NO: 29575 - DNA, 201 bp, Homo sapiens
gagcccctggtctgcttcttcctcacaccttgcagatccggatctgggcccggcccagtgccattgcggcgggccacggcgattatgccctgaacgtgacrggccccatccttaacttctttgctggtcattatgacacaccctacccactcccaaaatcaggtgagtgggggtccttgaggagggaggcagtggatggag

SEQ ID NO: 29576 - DNA, 201 bp, Homo sapiens
gattcttccgcctcagccccccaagtagctgggactacaggcgtgcgccaccacgtccagctaattttgtatttttatttatttatttatttatttatttattttttgagacagagtcttacaccgtcccccaggctggagtacagtggcacaatctcggctcactgcaacctctgcctcccgagttcaagcgattctcct

SEQ ID NO: 29577 - DNA, 201 bp, Homo sapiens
aaccaatagtcatgaattgttaatataaattaacacatccaaccatgattttatcgctcagaaggaggctaagaaagtgaattgatttaaagaaaaatacraagtaaataatcacaaaggtggatcacgaaggtggtttgtgcacagcccagaagcccaggaaggaatgtcgggtagagagggtggaacctgtcccgagga

SEQ ID NO: 29578 - DNA, 201 bp, Homo sapiens
accttgcagaaatcattagttctaatagattttttaatggattccttaaaatttttatgtatgcaaacatgtcatacacatagttttacttcttcctttcyggattcctttcatttcattctcttggctgattgcctggctagaacctccaggactgataactcttctaatttgtaggagtattttttttttaaacccatt

SEQ ID NO: 29579 - DNA, 201 bp, Homo sapiens; identical to SEQ ID NO: 6188

SEQ ID NO: 29580 - DNA, 201 bp, Homo sapiens
ggtgttgaaactggggctggagcctgttcctgcccttctgggtcacagggctgctttggggaccaaggaacctcaggcccaaggcacaaagcacatacagsgggggtcagagggccagttaggccacagagccttaggcagggtgccggcctggggttgtgtgtcaagaggtgaatcttggctggagttcgccaggtgtgc

SEQ ID NO: 29581 - DNA, 201 bp, Homo sapiens; identical to SEQ ID NO: 6190

SEQ ID NO: 29582 - DNA, 201 bp, Homo sapiens
aacctgggaggtggagcttgcagtgagccaagatggtgctactgcactccagcctgggcaacagagcaagactccatctcaaaaaaaaagaaaaaaaaaaagttcaattatctgttaatatccattatggtaaatgagagattttggtaaatgaagtttcaaccctcttactgctttccccacattccccatcctcctaat

SEQ ID NO: 29583 - DNA, 201 bp, Homo sapiens
tatttatttatttttgagacagaatcccactctgtcacccaggctggagcgcagtggcccgatcttggctcacttcaacctccacctcccagattcaagckattctcctgcctcagcctcctgagtagctgggattacaggcgcctgccaccatgcctggctaatttttgtatttttagtagcttcggggtttcaccacgt

SEQ ID NO: 29584 - DNA, 201 bp, Homo sapiens
tatttttatttatttatttatttttgagacagaatcccactctgtcacccaggctggagcgcagtggcccgatcttggctcacttcaacctccacctcccrgattcaagcgattctcctgcctcagcctcctgagtagctgggattacaggcgcctgccaccatgcctggctaatttttgtatttttagtagcttcggggt

SEQ ID NO: 29585 - DNA, 201 bp, Homo sapiens
ggaaactttcacctctgaccctctttgcaatccagcaaccctcccactgtggtctggtgaccccactttctgagccccctggttcaatctctctcatggggtggtgaggggtgctgccctctacaaggagggaagtggggacttgggggttgaatgactccttctgtagactttgacttcatcttcctgtttgcagtcctt

SEQ ID NO: 29586 - DNA, 201 bp, Homo sapiens
catctggccctcttaggtacctgagctacaccctgaacccggacttaatccggaagcaggacgccacctctaccatcatcagcattaccaacaacgtcatygggcaaggtctggtctgggactttgtccagagcaactggaagaagctttttaacgagtgagtctgtggaatgggtgtcagggacagcgagcgccgaggct

SEQ ID NO: 29587 - DNA, 201 bp, Homo sapiens
acaaaaatcagccaagcctgggggctagggtggggcaggaatggaaagacaagctggggtatgggccgtcccttttcccatttggaaggaaaacgtggcgkgtgggcgtattctccagaagagaggggagtgaggaactcggcagtcagacctgtgttcaagctgtgactcccccacatcctagtggggtctcccagggcg

SEQ ID NO: 29588 - DNA, 201 bp, Homo sapiens
ctttctgtctctatggatttattacctattctggatgtttcataaaatggaatcatatacacacagcctttttgtgtctgtctgccttctttcacttagtrtaatgttttcaagattcatgcatacggtagcagggatcattcttttttatggctgaataatggtccattacatggatgtaccacattttgttttcagctc

SEQ ID NO: 29589 - DNA, 201 bp, Homo sapiens
cccaggccgcctgcagcctgtaaccagacactgtttgcttccagcaggcaccccccgagcccagctccacacaccgttcctggatctcctctccccaggcrgagcgtgcccctgcccagtccagtgaccttcgcctgttggagccctggttaatttttgcccagtctgcctgttgtggggctcctcccctttggggatata

SEQ ID NO: 29590 - DNA, 201 bp, Homo sapiens
agtagagatgaggtttcaccgtgttagccaggatggtctcgatctgctgacctcgtgatccgtccgcctcagcctcccgaagtgcagggattacaagcatkagccaacacgcccggcccaggaacaatttttaaaccaatagtcatgaattgttaatataaattaacacatccaaccatgattttatcgctcagaaggagg

SEQ ID NO: 29591 - DNA, 201 bp, Homo sapiens; identical to SEQ ID NO: 6210

SEQ ID NO: 29592 - DNA, 201 bp, Homo sapiens
tcccacccgctgtccacacccgcctcggagatcaacacgccggcccagatcagtgagctgtttgacgccatctcctacagcaaggtgcagcccgctcctcrtggggcacggggaaggaggtggggacttggcctggaggggcctcactgaaggcagggtctgggggcacagggtcctggtggctctgcacagccttctgag

SEQ ID NO: 29593 - DNA, 201 bp, Homo sapiens
agccactgtagacagaccctccctccagagccaggagttcaggggcactcggtgccagagctgggcagaagctgggagcctgggcagctgctcctcactgrcagtgaccacaccgccatctctcaccacctctggatctttaattgcagctacgtgtggattgtgcccatcacatccatcagagatggcagacagcagcag

SEQ ID NO: 29594 - DNA, 201 bp, Homo sapiens
ccatctctcaccacctctggatctttaattgcagctacgtgtggattgtgcccatcacatccatcagagatggcagacagcagcaggactactggctgatrgatgtaagaggtaatccagccctgccttatgggcagcagcccccaccccatactcctagctcctggcccatgttctgagggctgtgatgggccattccat

SEQ ID NO: 29595 - DNA, 201 bp, Homo sapiens
atgagggtgggtctccttctgcccctcgcccttgacccgggcctctgcccaccacagagggggagcctggggggctccagctgtgctctcactgtgccccrtctttccacagtcctacctccacacctttgcctaccagaacaccatctacctgaacctgtgggaccacctgcaggaggtcagtagcagccagcccctcca

SEQ ID NO: 29596 - DNA, 201 bp, Homo sapiens
gtgacttcagcaagtctgagtccacaatgagggcccctgctcctcctgctgcccttcccatatgccacgtgctgtgccctgagctcctgtgctccctggaygtccctccctgggtccccacacacccatttcacagatgaagaatgtgacaccttgcccgaagtcacacagtagttcatgacagccagacagaggcttgtc

SEQ ID NO: 29597 - DNA, 201 bp, Homo sapiens
ggtcagtagcagccagcccctccacagccatcctgttggggtcttgagatgctgaaggtacctgggggcagcacatgcgtaagagaatgggtccagctccrcggctgaccagccctgcagggtggatggagcctctgttgctcctccctatagtggaagccgggatggctccttgcaagaggtgtctgagtgaggctgtgg

SEQ ID NO: 29598 - DNA, 201 bp, Homo sapiens
atggccccatgaaggtacggaggtgcatggtagggttcaagaaccagttcgccccagtgcctgaaagtgcactattaggaagttaatagactatggcctaytggactcctggtcagggaaccttcaaaagcaaaacaaaaaaccaaaaaaaaagaaagattgccttgtcaggttctctcctgagagcacgcaggtgaaaga

SEQ ID NO: 29599 - DNA, 201 bp, Homo sapiens
gcacgcaggtgaaagagcgagccggagggacatggaggtgagtgagcaggcactgaggaggtgagtgaggaggctgcgtggggcaaaacaataaaggtcgsggagacttcagcaacgtttgttgatttgaaatatggggaattaacgctttcagaaggcacagaaaaggccaccatgctgagggccagaagacctgtcttt

SEQ ID NO: 29600 - DNA, 201 bp, Homo sapiens
ccaatggcatcgcctccccagaccagattggcctgccagacttcaacgccggcgccatggagaactggggactggtgacctaccgggagaactccctgctrttcgaccccctgtcctcctccagcagcaacaaggagcgggtggtcactgtgattgctcatgagctggcccaccaggtagacccccatctcggggagtgcg

SEQ ID NO: 29601 - DNA, 201 bp, Homo sapiens
agacttcagcaacgtttgttgatttgaaatatggggaattaacgctttcagaaggcacagaaaaggccaccatgctgagggccagaagacctgtcttttgmcagctgtgtggccttgggcaaccctttctcagacccagttaacttctctgtcagatgggcaggcctctacctgcccggccagcccacctgcgctatgaga

SEQ ID NO: 29602 - DNA, 201 bp, Homo sapiens
ttaaatcatgcttgaagagatcttttttcattaaaaaatgttcaattatcaggccgggtgcagtggggctcatgcctgtaatcccagcactttgggaggcygaggcaggcggatcacgaggtcagcagatcgagaccatcctggctaacacggtgaaacctcgtctctactaaaaaaaaaaaaatacaaaaaattagccag

SEQ ID NO: 29603 - DNA, 201 bp, Homo sapiens
tttgcaacctctgtgttcacaaggactttgcccgggagcaaggtggacgtcctgcctatccctggaacagggtgtggtcccatccatggggactctaaagwgggagtggaaagccagaggcctgagagagctcctcctcaaggctgttagggacccagccggactgagaatcttttgtttttctggcagctggagcagttc

SEQ ID NO: 29604 - DNA, 201 bp, Homo sapiens; identical to SEQ ID NO: 6191

SEQ ID NO: 29605 - DNA, 201 bp, Homo sapiens
ggccgggtgcagtggggctcatgcctgtaatcccagcactttgggaggccgaggcaggcggatcacgaggtcagcagatcgagaccatcctggctaacacrgtgaaacctcgtctctactaaaaaaaaaaaaatacaaaaaattagccaggcgtggtggcgggcacctgtagtcccagctactcgggaggctgaggcagga

SEQ ID NO: 29606 - DNA, 201 bp, Homo sapiens
aggccctgacctctgacgtctctgccagcgcctgccccccaacatcagaggctctgtggggctccaggcaggtcaggcatgagtctttgatgagattcatrttttcttttccccagaactacctgaagaagcaggtcacacccctcttcattcacttcagaaataataccaacaactggagggagatcccagaaaacctga

SEQ ID NO: 29607 - DNA, 201 bp, Homo sapiens
cagcagctggggaggccgggtgggggaagctgggtgcatgcggagcaccgtggagtctgggaccccagagcacaggaggggagacgtgcccagcctgccgkcccttcctgcaggtgccctgcgcctgtgcctccatgtctgcctgcaggactccgggctccttttcatgctctattgactgagctagctgggtggtttgca

SEQ ID NO: 29608 - DNA, 201 bp, Homo sapiens
ggttaccagacagacggtggctatgatgattgttattctccaaaggcccttctctaggacccacagcctccagaccccagtagcgttcccctctgctgacsaggcctctaggtttagcttgattggcctccagccctggcccatcagggatccccccagcccactgggccctgggacccagcccacctgccccaggatcaa

SEQ ID NO: 29609 - DNA, 201 bp, Homo sapiens
ctttgaaccctgtggagcccgagactggcccattgcttcacctccagctgctggcaaagcagctgcaaatgcaccgaactgggagggcttccccacccctyaccagggagctggggatgagggacagagcgtcccttggacagacaggaaaaccgaggctcagaggagagaaactcacccgaggtccctgagagcctgctg

SEQ ID NO: 29610 - DNA, 201 bp, Homo sapiens
tccccaaatgactccagaacgcaccccccccccccagcagtgcggtgggcagggacggcccaggtgggctatgtcctggggttttgtgactggatccccaytcctcccccacctcagcccctggactgcaacccaccaggccgtgttcgggggtggtcagagccctggtctcagccagacctgaggtctgatgtggcttca

SEQ ID NO: 29611 - DNA, 201 bp, Homo sapiens
aggactcccctaaagaccctgggctcagactcggcctccatacaccagacgagaggcggcaggtatttgtgttttgcttatgcctgattgaactaatccaygtgtcccttcagttcacacattgcatttatttaagaagccttcctgcaagctcaggggtggcaggggtggcaggggtggcagacgagtgaggccctcagg

SEQ ID NO: 29612 - DNA, 201 bp, Homo sapiens
gccctggccttactgggcctcagttaattcacctgtgaaaggggaggcttggaccagagggcccctcagggtatgtgttttgtggaggggaggtgggcgtrtggggtaggggtgaccaggaggaagtggggacagcctctgtcccacaggaaggctggctagccccagtgggtatgggggagctgggcagggaagagggtg

SEQ ID NO: 29613 - DNA, 201 bp, Homo sapiens
gactgcaacccaccaggccgtgttcgggggtggtcagagccctggtctcagccagacctgaggtctgatgtggcttcatccctgagtctctaaacgccctrgccttactgggcctcagttaattcacctgtgaaaggggaggcttggaccagagggcccctcagggtatgtgttttgtggaggggaggtgggcgtgtgggg

SEQ ID NO: 29614 - DNA, 201 bp, Homo sapiens
ccgtctgcacgggatgcgctggcttcctgccccggatgcacaaggctccctgcgggacactcagggcgaggctctgagcccctcccccgcggcagatgccrtccagatgtggccggcgggtcccgcgggctgcggcgacagggaccccgtcgggggcagcaggagccctggtgcatcccaggccccggggggaaggccggg

SEQ ID NO: 29615 - DNA, 201 bp, Homo sapiens; identical to SEQ ID NO: 6206

SEQ ID NO: 29616 - DNA, 201 bp, Homo sapiens
gtagttaaatcataatatttagtcaaatcagtgttaagcatttgctttattgtgattatctaaatagtattctctgctgagccatgtagagcactatgttkatgtttccttttttgtacacagttacaaatgtatcacacaataggtcaagtttttgtttgtttgtttagagacaaggtctcactctcttgcccaagctgg

SEQ ID NO: 29617 - DNA, 201 bp, Homo sapiens
gatgcatcttttgtagagatgggatctttctgtattggccaggatggtctggaacacctggcttcaagcaatcctccctccttggcctcccaaagtgttaygattataggcgtgagccactgtgcccagcccagttttgagactggactcctcctggagtcctattctgcctgctctcttccagagctgccacacagctcc

SEQ ID NO: 29618 - DNA, 201 bp, Homo sapiens
tcttttgtagagatgggatctttctgtattggccaggatggtctggaacacctggcttcaagcaatcctccctccttggcctcccaaagtgttatgattayaggcgtgagccactgtgcccagcccagttttgagactggactcctcctggagtcctattctgcctgctctcttccagagctgccacacagctcccatgct

SEQ ID NO: 29619 - DNA, 201 bp, Homo sapiens
gaaggtacctgggggcagcacatgcgtaagagaatgggtccagctccgcggctgaccagccctgcagggtggatggagcctctgttgctcctccctatagkggaagccgggatggctccttgcaagaggtgtctgagtgaggctgtggttgaggtcctggccagcagctgacctcaggctacagcgggcttcttgatggga

SEQ ID NO: 29620 - DNA, 201 bp, Homo sapiens
tgctccactgatgtcaggcttgccatgttgctgatgcgatgcccagagccattcttatttccagttatttgaatgtgaccagttttcctcccttctggaawctttgggagcttctctcggtcctggtgggccttggtttgggcctcgtctccatctaccttttccaatcaggactggcattcacatcatctagtattggaa

SEQ ID NO: 29621 - DNA, 201 bp, Homo sapiens
gacggcgcaagtccaggctctgccccgggctgctgagaagggaggagggtgccgcctggcagggcagcaggaaggggtcacgatggtgttgaaatccccaytgtgcctggcagatggccagccctggggagggtagttctggggattctcagtgcccagcctgggcgtggcttgcccagctgacccctccccccacagtgg

SEQ ID NO: 29622 - DNA, 201 bp, Homo sapiens
accatgtgcctcatatgccattacctggatgcagtaaagaagagccacccttgggcagggtgtggtggctcatacctgtaatcccagcactttggaagacygaggtggatggatcacctgaggtcaggagttcgagaccagcctggccaacatggagaaaccccgtctctactaaaaatactaaaaatacaaaaaaaaaaa

SEQ ID NO: 29623 - DNA, 201 bp, Homo sapiens
cccctccccccacagtggttcgggaacctggtgaccatagagtggtggaatgacctgtggctgaacgagggcttcgcctcctacgtggagtacctgggtgstgactatgcggagcccacctggaacttggtaagccagctgcccaggggtctggtgcggggggcatggagggagacctgggccaccgctaccaggccagtc

SEQ ID NO: 29624 - DNA, 201 bp, Homo sapiens
ctcatatgccattacctggatgcagtaaagaagagccacccttgggcagggtgtggtggctcatacctgtaatcccagcactttggaagactgaggtggayggatcacctgaggtcaggagttcgagaccagcctggccaacatggagaaaccccgtctctactaaaaatactaaaaatacaaaaaaaaaaaaaaaatagg

SEQ ID NO: 29625 - DNA, 201 bp, Homo sapiens
ggatggatcacctgaggtcaggagttcgagaccagcctggccaacatggagaaaccccgtctctactaaaaatactaaaaatacaaaaaaaaaaaaaaaawaggcatggtggcacatgcctgtaatcccagctacccgggaggctgaggcaggagaatcacttgaacctggcaggcgaaggttacagtaagcccaaatcgc

SEQ ID NO: 29626 - DNA, 201 bp, Homo sapiens
ctccttctccaacctcatccaggcagtgacacgacgattctccaccgagtatgagctgcagcaggtaagaagtcattccccagacctgggctctgcctacwtccttcccaggccaaaggggcactccattcttctcccacgtggccctgagggagcacaggctccacgccgccaggccttcctcatttacagaggaagccg

SEQ ID NO: 29627 - DNA, 201 bp, Homo sapiens
tctccaccgagtatgagctgcagcaggtaagaagtcattccccagacctgggctctgcctacttccttcccaggccaaaggggcactccattcttctcccrcgtggccctgagggagcacaggctccacgccgccaggccttcctcatttacagaggaagccgagtagccagactttggaaatgttgataattcaatttaa

SEQ ID NO: 29628 - DNA, 201 bp, Homo sapiens; identical to SEQ ID NO: 6192

SEQ ID NO: 29629 - DNA, 201 bp, Homo sapiens
gtgaggaactcggcagtcagacctgtgttcaagctgtgactcccccacatcctagtggggtctcccagggcgtgtcatttcatctcctctataatcatggytccctacccagtaggtgtgaggatgagcctccttagttcccggcctccctcacagttcacctctctccctccctgcagttatggtggtggctcgttctcc

SEQ ID NO: 29630 - DNA, 201 bp, Homo sapiens
ggtctggtctgggactttgtccagagcaactggaagaagctttttaacgagtgagtctgtggaatgggtgtcagggacagcgagcgccgaggctggggccycggggggtggcctgtgcgggtaagacacgccgggggcactaaccagaagtggacaaaaatcagccaagcctgggggctagggtggggcaggaatggaaag

SEQ ID NO: 29631 - DNA, 201 bp, Homo sapiens
actctaagctcttggacatgagtgatgtcacccacagacaaggacatttgtgagctaaatgtgtacagaaggcaggaggaagaaaggcctagagtgcccakaaagtcagaagaggtggtcagagttaagaacacgggcttcttgcccttttaaatctcagctctgtctctcgtgaggtgtgtgaccttgggcaagtcactt

SEQ ID NO: 29632 - DNA, 201 bp, Homo sapiens
tctccaggaagcaccctccttaacatgaggcaagggtgcagggtgctggccgtgcccctcttcctgctccacgggaacacctgggatacctgggacaatgmgggacaggtctgtgcagtgaaggcagcaagcacagggtcccatacctggtgccacccttcactggccaagggcacgccccaccgtcttccgtggtggaag

SEQ ID NO: 29633 - DNA, 201 bp, Homo sapiens
gaaagaggcaattgttgagctttgggtaagaaagaagggaacgatttttttcttttttcttttgagtctcactctgtcacccaggctggagtgcagtggtkcgatctcagctcactgcaatctctgcctcccggattcaagcaattctctgcctcagcctcccaagtagctgggattacagacgcccgccaccacgcccaa

SEQ ID NO: 29634 - DNA, 201 bp, Homo sapiens; identical to SEQ ID NO: 6200

SEQ ID NO: 29635 - DNA, 201 bp, Homo sapiens
aatttctttcaaaaatgttttgtagtttttggcattccagtcttgcacttattttgtcaaatttattcctaaatattttattcttgttgatgctatcgtamatggaattgttttcttaatttcattttcaggtttttcattgctaatgtatgggaatacaattgatatttgtgtattgctcttgtatcctgcaaccttgca

SEQ ID NO: 29636 - DNA, 201 bp, Homo sapiens
cagccccgtcctcagcagaaccctgtcccaccctccccgctgctgttccacacctgacctccctaccccacaccaggatccaccccaacctgcggtccacygtctactgcaacgctatcgcccagggcggggaggaggagtgggacttcgcctgggagcagttccgaaatgccacactggtcaatgaggctgacaagctcc

SEQ ID NO: 29637 - DNA, 201 bp, Homo sapiens
cccagtgcctgaaagtgcactattaggaagttaatagactatggcctactggactcctggtcagggaaccttcaaaagcaaaacaaaaaaccaaaaaaaaagaaagattgccttgtcaggttctctcctgagagcacgcaggtgaaagagcgagccggagggacatggaggtgagtgagcaggcactgaggaggtgagtga

SEQ ID NO: 29638 - DNA, 201 bp, Homo sapiens
ccttaggcagggtgccggcctggggttgtgtgtcaagaggtgaatcttggctggagttcgccaggtgtgctaaccgcgtgtcacccctggggcaggtacarcgaggttaatgccatcagcaccgcctgctccaacggagttccagagtgtgaggagatggtctctggccttttcaagcagtggatggagaaccccaataat

SEQ ID NO: 29639 - DNA, 201 bp, Homo sapiens
cagttatctctttctggaacccctgtaatccagcttatttctcttgctttcatcctctagttttctttttctcttctgttttccagcttgttgactttttrttctgccccctgggaggttccctcagctttgcacaccacctcacctagaaattgttttcatttcttctgtcgtatttttaaatttccaagtgttctttct

SEQ ID NO: 29640 - DNA, 201 bp, Homo sapiens
tctccatctaccttttccaatcaggactggcattcacatcatctagtattggaagattttgtattgcttctttaaactttattcccttcactttttccagktatctctttctggaacccctgtaatccagcttatttctcttgctttcatcctctagttttctttttctcttctgttttccagcttgttgactttttattc

SEQ ID NO: 29641 - DNA, 201 bp, Homo sapiens
agaaagaggcaattgttgagctttgggtaagaaagaagggaacgatttttttcttttttcttttgagtctcactctgtcacccaggctggagtgcagtggkgcgatctcagctcactgcaatctctgcctcccggattcaagcaattctctgcctcagcctcccaagtagctgggattacagacgcccgccaccacgccca

SEQ ID NO: 29642 - DNA, 201 bp, Homo sapiens
aggtctatggccccatgaaggtacggaggtgcatggtagggttcaagaaccagttcgccccagtgcctgaaagtgcactattaggaagttaatagactatkgcctactggactcctggtcagggaaccttcaaaagcaaaacaaaaaaccaaaaaaaaagaaagattgccttgtcaggttctctcctgagagcacgcaggt

SEQ ID NO: 29643 - DNA, 201 bp, Homo sapiens
tccgaggtctatggccccatgaaggtacggaggtgcatggtagggttcaagaaccagttcgccccagtgcctgaaagtgcactattaggaagttaatagamtatggcctactggactcctggtcagggaaccttcaaaagcaaaacaaaaaaccaaaaaaaaagaaagattgccttgtcaggttctctcctgagagcacgc

SEQ ID NO: 29644 - DNA, 201 bp, Homo sapiens
caccctcttcctgattgaagagagacagtacatgccctgggaggccgccctgagcagcctgagctacttcaagctcatgtttgaccgctccgaggtctatkgccccatgaaggtacggaggtgcatggtagggttcaagaaccagttcgccccagtgcctgaaagtgcactattaggaagttaatagactatggcctactg

SEQ ID NO: 29645 - DNA, 201 bp, Homo sapiens; identical to SEQ ID NO: 6268

SEQ ID NO: 29646 - DNA, 201 bp, Homo sapiens
tctctcatggccagaccatggtattccctgctgaccctaaacacttccacagaataccggtgtacaacaatattactctgttgtgagatcccaaatcattscaaaatcatgtcttcatatagacagaaaaggttgctctgtgaaccacaaaaacgaaaaacatgcccctctcctgcttaatataaacatctgccactcttt

SEQ ID NO: 29647 - DNA, 201 bp, Homo sapiens; identical to SEQ ID NO: 6270

SEQ ID NO: 29648 - DNA, 201 bp, Homo sapiens; identical to SEQ ID NO: 6269

SEQ ID NO: 29649 - DNA, 201 bp, Homo sapiens; identical to SEQ ID NO: 6271

SEQ ID NO: 29650 - DNA, 201 bp, Homo sapiens; identical to SEQ ID NO: 6272

SEQ ID NO: 29651 - DNA, 201 bp, Homo sapiens
atgggcaactcacaaaaatcttggtttcctgactaacagaacaaacctggaaaaaacaaaaacaaaacaaaagacatcaaaagcaaaacctctccaaagayaaaaactctgcaatctttttcgtcactcttcaccaggtcataatagagtaacgcctcaagagatttctttttagttttgatagaacaatttatttgaaaa

SEQ ID NO: 29652 - DNA, 201 bp, Homo sapiens
atgaacccctccttaggatccccactgctcatcatagtgcctacctttgttaaagtactagtcacgcagtgtcacaaggaatgtttacttttccaaatccycagctagaggccagggatgggtcatctatttctatatagcctgcacccagattgtaggacagagggcatgctcggtaaatatgtgttcattaactgagat

SEQ ID NO: 29653 - DNA, 201 bp, Homo sapiens; identical to SEQ ID NO: 6274

SEQ ID NO: 29654 - DNA, 201 bp, Homo sapiens; identical to SEQ ID NO: 6276

SEQ ID NO: 29655 - DNA, 201 bp, Homo sapiens; identical to SEQ ID NO: 6275

SEQ ID NO: 29656 - DNA, 201 bp, Homo sapiens
ttactcagaaactgtgacctgtgaggatgcccaaaagacctgccctgcagtgattgcctgtagctctccaggcatcaacggcttcccaggcaaagatgggygtgatggcaccaagggagaaaagggggaaccaggtacgtgttgggctgttctgtctctgcaattctttaccttccagaggaaactgcctggggatatgag

SEQ ID NO: 29657 - DNA, 201 bp, Homo sapiens; identical to SEQ ID NO: 6277

SEQ ID NO: 29658 - DNA, 201 bp, Homo sapiens; identical to SEQ ID NO: 6279

SEQ ID NO: 29659 - DNA, 201 bp, Homo sapiens
ataagtgtgtctgaaaaattatatgggagatatactaaaatattcattgtttgtctgaaattcaaatttaactggacatactatattttatccggcaactstactctagaagactttttcttgagaaataccttgagttgggcttaaggatgagtgagtttcacccactttttcacattttagggctgaccttctctctgg

SEQ ID NO: 29660 - DNA, 201 bp, Homo sapiens
ttatccggcaactctactctagaagactttttcttgagaaataccttgagttgggcttaaggatgagtgagtttcacccactttttcacattttagggctsaccttctctctgggcaaacaagttgggaacaagttcttcctgaccaatggtgaaataatgacctttgaaaaagtgaaggccttgtgtgtcaagttccagg

SEQ ID NO: 29661 - DNA, 201 bp, Homo sapiens
actactggtaaaaacaaatgcagttaattttcactttgcaccctccctgcagcaacctccacgtggcaactttatttcttaagttattgctctcaggtgcmcaccatacagttattgagagcagtgctcagaaaggtcagtcctgggtcaaggtctcctttctcctgagaagggattgggcatcaaactcttgaagagaga

SEQ ID NO: 29662 - DNA, 201 bp, Homo sapiens
ccacgtggcaactttatttcttaagttattgctctcaggtgcacaccatacagttattgagagcagtgctcagaaaggtcagtcctgggtcaaggtctccyttctcctgagaagggattgggcatcaaactcttgaagagagagagcaagaacatagatattaagtcacatttcctttgtcttccaacaggccaagggctc

SEQ ID NO: 29663 - DNA, 201 bp, Homo sapiens
acctgtgaggatgcccaaaagacctgccctgcagtgattgcctgtagctctccaggcatcaacggcttcccaggcaaagatgggcgtgatggcaccaaggragaaaagggggaaccaggtacgtgttgggctgttctgtctctgcaattctttaccttccagaggaaactgcctggggatatgaggagactgatgtcctat

SEQ ID NO: 29664 - DNA, 201 bp, Homo sapiens
gaaactgtgacctgtgaggatgcccaaaagacctgccctgcagtgattgcctgtagctctccaggcatcaacggcttcccaggcaaagatgggcgtgatgrcaccaagggagaaaagggggaaccaggtacgtgttgggctgttctgtctctgcaattctttaccttccagaggaaactgcctggggatatgaggagactg

SEQ ID NO: 29665 - DNA, 201 bp, Homo sapiens
aacagtctaatgtgaggccctggtcctagagggagaaaacaggccatctaagtgtgggcttattatacctatttttacaaaagcatgtaaccatggtatgycatattttacttcataagaaaccaagccaaagcttaatagcttaaaaacatagccgtcaatttaaatcacaagtctgtgggtcggccatgtgatttctct

SEQ ID NO: 29666 - DNA, 201 bp, Homo sapiens
tgaaattcaaatttaactggacatactatattttatccggcaactctactctagaagactttttcttgagaaataccttgagttgggcttaaggatgagtsagtttcacccactttttcacattttagggctgaccttctctctgggcaaacaagttgggaacaagttcttcctgaccaatggtgaaataatgacctttga

SEQ ID NO: 29667 - DNA, 201 bp, Homo sapiens
tcatgtcagacccctattcacttcagtagggatggcaccaggttcaagaggccaaagaagagatggagtcagcaaacaaacataggttttactgggggaayctgtttacagggagatccagcagcagtgggctggacaggagaacaacaactactggtaaaaacaaatgcagttaattttcactttgcaccctccctgcag

SEQ ID NO: 29668 - DNA, 201 bp, Homo sapiens
tcagctctcattctctggcatctcagaattccacacagcagtttgtgactaatagttgtcttgccagcccaggaaagtggcccacaggtcaggccatcccrtgggacacaggatgaatttttcttctctgggtcattgtcatgtcagacccctattcacttcagtagggatggcaccaggttcaagaggccaaagaagaga

SEQ ID NO: 29669 - DNA, 201 bp, Homo sapiens
agtgaaggggcagaaggaagaatggcagtaaggaatgtctgaggagagtctgaaagccacatgtgttctgatttctgtggcaaaagagcaggtctttgctrtcctaactactgagctgcctttcactgcagccaccctgtgttcaaggccatgtcacagataagcatgtctctatcacatgggcagatatgacaccctctg

SEQ ID NO: 29670 - DNA, 201 bp, Homo sapiens
ctccagttaattctgggctgggttggtgactaaggttgaggttgatctgaggttgagaccttcctctttggatcaccagctttcagctcagggcctgccamtgagtaaatgatagttaacaggtcctggaggggaatcagctgcccagatacaaagatgggattcaggtggcagatggacccgaagaggacatggagagaa

SEQ ID NO: 29671 - DNA, 201 bp, Homo sapiens
gggctgttctgtctctgcaattctttaccttccagaggaaactgcctggggatatgaggagactgatgtcctatttgagtatatttttctcaactatactrtaactcaaaacagagattcagctctcattctctggcatctcagaattccacacagcagtttgtgactaatagttgtcttgccagcccaggaaagtggccc

SEQ ID NO: 29672 - DNA, 201 bp, Homo sapiens; identical to SEQ ID NO: 6273

SEQ ID NO: 29673 - DNA, 201 bp, Homo sapiens
atatggattgctaggtaatcagggagtatatgtgtgcatgtgatatgtatgcgtactttgggatacagtaaacagacaaagagggacatttggggttggayggaaatagcgatttttcattctttgggcttttcagtattttttattttccttcaaagtgtaaacatcaatgtaaaataagctttttttttcagtttgaaa

SEQ ID NO: 29674 - DNA, 201 bp, Homo sapiens
ctcaagagatttctttttagttttgatagaacaatttatttgaaaaaaaaatctgtgaagaacctggcatatggattgctaggtaatcagggagtatatgygtgcatgtgatatgtatgcgtactttgggatacagtaaacagacaaagagggacatttggggttggatggaaatagcgatttttcattctttgggctttt

SEQ ID NO: 29675 - DNA, 201 bp, Homo sapiens
tcctgagtatggtggcagcgtcttactcagaaactgtgacctgtgaggatgcccaaaagacctgccctgcagtgattgcctgtagctctccaggcatcaayggcttcccaggcaaagatgggcgtgatggcaccaagggagaaaagggggaaccaggtacgtgttgggctgttctgtctctgcaattctttaccttccaga

SEQ ID NO: 29676 - DNA, 201 bp, Homo sapiens; identical to SEQ ID NO: 6281

SEQ ID NO: 29677 - DNA, 201 bp, Homo sapiens
acagaaagcttcctctttctctgttctattgcaactacaaattctacagtcatgcctaagatcctttagctaacacccttttcaagaaatcatcagactcytggattgacttagaattcattcattcgttaagtgcttaccgagtccccgctctgtggcaagcactgttctatatcaacttctcatgagttcagccaattc

SEQ ID NO: 29678 - DNA, 201 bp, Homo sapiens
ttgtaactcaccgagattctgcactgtcttccagccacccatgtggagcatccgttatgtcccccgaagccaggttttgtgagaggatttaaccatccttktggttgcttctgtgaacctcttccagggtaaggataatttcctgcattgaggtacatggctcagacctaactgtgacttccctgtggaccttctgtgaaa

SEQ ID NO: 29679 - DNA, 201 bp, Homo sapiens
cggggtttcaccatgttgtccaggctggtcttgaactcctgacctcaaatgatccccgtcttggcctcccaaagtgctgtgattacaggcgtgagtcaccrcgcctggcccgattgcatggattttgctgagagggtggttggggtcccacaaaaccctgcccatatgaaggttttaactcaagtgttgactcttccaact

SEQ ID NO: 29680 - DNA, 201 bp, Homo sapiens
ctcccaatatataggtgccctggatcccctggcctgggctcatttccttgtcctctcccacctggtagtcagatgctaagactcacctttcagtggtgccrggtctgacagagaggaattttcagaataagaggcagagtccttccttctgaggggctgaatcccattgctgtcttctttttggtggaatgcacaatataa

SEQ ID NO: 29681 - DNA, 201 bp, Homo sapiens
cccttctgacttttcattacagcatgaacccctctctttgtcgttgccagagggtaacatgggagtagttttgcttgacccttctgacttttcattacagmatgaacccctctctttgtcgttgccagagggtagcatgggagtagttttgcttgacccttctgacttttcattacagcatgaacccctctctttgtcgtt

SEQ ID NO: 29682 - DNA, 201 bp, Homo sapiens; identical to SEQ ID NO: 6293

SEQ ID NO: 29683 - DNA, 201 bp, Homo sapiens
gttggggtcaaattccttttcgtgctccaggtaccgaggagaaggcattgtatatgggacactagaggaggtgtgggactgtgtgaagccagctgttggargcctacgagtgaagtgggatgagaatgtgaccggttttgaaattatccaaagcatcactgacgtaagtctttccaagcatgttatctctagatagtgtct

SEQ ID NO: 29684 - DNA, 201 bp, Homo sapiens
tggaccttctgtgaaaaggggcactttgactacgattcaaaagaagaaaaatgccttatagctctttagattgtgacgatacaaaatactttcacacacakctgcataagcagaacctcctgagagtacctggcatgtgggaaagaattgaggggaggcgttactcttatttttgatgcaggaaattttccctgcagcctc

SEQ ID NO: 29685 - DNA, 201 bp, Homo sapiens
taagcaaatgtcatggtccatttagcaaatgaggaaactgaggtttggggaggttcagtgatgtgtcctgactcaaaggctaggaggttggcagggcaggktctgtgctccgagtcctccctgaataccctccgccaggcaggagcagctttgaggatagcagtccccaccccacatttcactcagtgatcatctctcctc

SEQ ID NO: 29686 - DNA, 201 bp, Homo sapiens
cagtagggtgggagtagggggaactcacgccaagaggcaggagtccctcacagactccagggctgcaggtagtctggtctgtgtgctctatggcaccccartggcagtgacctgaccgtctgaagttgtaactcaccgagattctgcactgtcttccagccacccatgtggagcatccgttatgtcccccgaagccaggtt

SEQ ID NO: 29687 - DNA, 201 bp, Homo sapiens
cctttcagtggtgccgggtctgacagagaggaattttcagaataagaggcagagtccttccttctgaggggctgaatcccattgctgtcttctttttggtggaatgcacaatataatgggtagcatcacgccctcatgccaggtagcaaaggtatcacatggattttttttttttttttttgagacggagtttggctgtca

SEQ ID NO: 29688 - DNA, 201 bp, Homo sapiens
tctaagtgtcagtttcctcacctgtaggagggattaatgattcctatttctaaaggtaagggacaactgagagctttgtccagccaggctcttactaggtsctcaataaatggtacctcttatggtcacatgagacgtgacctcagcatggcactggtctgcagctagacagctgtgggcagcctgtgtcacagccctcgt

SEQ ID NO: 29689 - DNA, 201 bp, Homo sapiens
ctgaggggctgaatcccattgctgtcttctttttggtggaatgcacaatataatgggtagcatcacgccctcatgccaggtagcaaaggtatcacatggattttttttttttttttttgagacggagtttggctgtcacccaggccggagtgcagtggtgcaatcttggctcactgcaacctctgcctcccaggctcaagc

SEQ ID NO: 29690 - DNA, 201 bp, Homo sapiens
gggaaagacacagagatggagacctttaccagcccctctcacctaccccgagacttctctccaggactgttccatcacaggcctggcctgtacttctccaytgtgacctcgagagagcctgggccccactctcttgcaggatgggatgaatgggagaaagcccagcatccttggtttataaaatgagagtgtggactactg

SEQ ID NO: 29691 - DNA, 201 bp, Homo sapiens
tgattctcctgcctcagcctcctaagtagctgggactacaggggcacgccaccatgcccagctaatttttgtatttttggtagagacggagtttcaccatrttggctgggatggtctcgatctcttgacctcatgatccccccacctcgaccccccaaagtgctgggattacaggtgtaagccactgcgcctggccaagac

SEQ ID NO: 29692 - DNA, 201 bp, Homo sapiens
gattttgtggacttggtgctagtcaagagatatgaggatgggaccatcagttccaacggtgagtgatgcccggaggagctgccatgccttcctgcgatatygagctttctcttctgcaccccacagttccttaaggaaagccaagcaaccagaaatcaccagaaactcacactctgagtcccctacctcatctggttgggt

SEQ ID NO: 29693 - DNA, 201 bp, Homo sapiens
attatccaaagcatcactgacgtaagtctttccaagcatgttatctctagatagtgtctgggccaggctatagtaaccccctcccatttcttctggaaggkgtccgtgataccttttgttaagggggtgtgtcctgcaagcacaggctgcccactgcttgcagcattggaggcctgcctcagcccagtttcccggtgggaa

SEQ ID NO: 29694 - DNA, 201 bp, Homo sapiens
ggagcacatgctctcccaccttgtggatctgctggccccatcctgttccatgccccagttgtccttctgtatgacttgaagagtgagattctttttttttktttttttttttttcttttttgaggtggggttttgctcttgtcacccaggctggagtgcaatggtgtaatctcggctcactgcaacctccgcctcccaggt

SEQ ID NO: 29695 - DNA, 201 bp, Homo sapiens
tccaccatgagcttcgtgctgagttccttagtctctctaagtgtcagtttcctcacctgtaggagggattaatgattcctatttctaaaggtaagggacarctgagagctttgtccagccaggctcttactaggtgctcaataaatggtacctcttatggtcacatgagacgtgacctcagcatggcactggtctgcagct

SEQ ID NO: 29696 - DNA, 201 bp, Homo sapiens
caggctcttactaggtgctcaataaatggtacctcttatggtcacatgagacgtgacctcagcatggcactggtctgcagctagacagctgtgggcagccygtgtcacagccctcgtcttacaaactgggtgtatttccatgacacccagttcctgggaagactcgctctggatcttaactgtttatagtgccaccctact

SEQ ID NO: 29697 - DNA, 201 bp, Homo sapiens; identical to SEQ ID NO: 6284

SEQ ID NO: 29698 - DNA, 201 bp, Homo sapiens
ctagtgactttcagccccttctctgcaagtctgtcctaaagagtagtgacagacatggcatggtccaccttctagtccttagatacaatctcaagataacragtttgattgatgcgttggggtcaaattccttttcgtgctccaggtaccgaggagaaggcattgtatatgggacactagaggaggtgtgggactgtgtga

SEQ ID NO: 29699 - DNA, 201 bp, Homo sapiens
tgtgagtttgtgtacacgcatgtgagagtgtatttgtatgtgtgagtgtaaggggcagtagggtgggagtagggggaactcacgccaagaggcaggagtcsctcacagactccagggctgcaggtagtctggtctgtgtgctctatggcaccccaatggcagtgacctgaccgtctgaagttgtaactcaccgagattctg

SEQ ID NO: 29700 - DNA, 201 bp, Homo sapiens; identical to SEQ ID NO: 6285

SEQ ID NO: 29701 - DNA, 201 bp, Homo sapiens
gctcaataaatggtacctcttatggtcacatgagacgtgacctcagcatggcactggtctgcagctagacagctgtgggcagcctgtgtcacagccctcgwcttacaaactgggtgtatttccatgacacccagttcctgggaagactcgctctggatcttaactgtttatagtgccaccctactgtcagccctagtacct

SEQ ID NO: 29702 - DNA, 201 bp, Homo sapiens
ccaatggggattgttttcttctttaaaaaaaagattgggcctgttatgctcacaatgacttcaggtggtaagtatctgttcctttcactcagtgacttgcycaaggtcacctggctgttgaatgctgtttaggactggatgtttctgtgacagtggtaaaagtaaataaattgcatttaaggggtaagcaggtgtttaaaa

SEQ ID NO: 29703 - DNA, 201 bp, Homo sapiens
tccatgacacccagttcctgggaagactcgctctggatcttaactgtttatagtgccaccctactgtcagccctagtacctttcccagaccttgagggatrgggtgggagttgggagaagatgtctggccagcagtcacagctacatgcttctttggtttggcagaccctgtgtgtaagcagaacctccactccctccgct

SEQ ID NO: 29704 - DNA, 201 bp, Homo sapiens
attgcaactacaaattctacagtcatgcctaagatcctttagctaacacccttttcaagaaatcatcagactcttggattgacttagaattcattcattcrttaagtgcttaccgagtccccgctctgtggcaagcactgttctatatcaacttctcatgagttcagccaattctaggtgcaccagccaaggaaacttcat

SEQ ID NO: 29705 - DNA, 201 bp, Homo sapiens
tctcactcacctgttcatgtttccaaagaggatgctgctgagaggtgatgcgggccagaggaagcccattgggaggaggagcagggaggagagagaaggcyctagcagaggcgggatgggcaggggttggtgggtgagggaaaggtggagtgcggatgatgctaggactttgagatggaaggaagtctctgtcccctggag

SEQ ID NO: 29706 - DNA, 201 bp, Homo sapiens
agtcccagaagtgggagcaggagccggagcaagagcggggcctttgaggaacagcacagagggaggtgttgtgttagcaagaggagaggctaggacattcrgcccatgaggtagcaggggccgcagcctgttggggactttcctctgaataaaatgggaagccactggggaggcctgagcaggacatggtctgactttggt

SEQ ID NO: 29707 - DNA, 201 bp, Homo sapiens; identical to SEQ ID NO: 6289

SEQ ID NO: 29708 - DNA, 201 bp, Homo sapiens; identical to SEQ ID NO: 6291

SEQ ID NO: 29709 - DNA, 201 bp, Homo sapiens
gtcatgcctaagatcctttagctaacacccttttcaagaaatcatcagactcttggattgacttagaattcattcattcgttaagtgcttaccgagtcccygctctgtggcaagcactgttctatatcaacttctcatgagttcagccaattctaggtgcaccagccaaggaaacttcatgcctgccctctctgagctcca

SEQ ID NO: 29710 - DNA, 201 bp, Homo sapiens; identical to SEQ ID NO: 6292

SEQ ID NO: 29711 - DNA, 201 bp, Homo sapiens
agcatacctgttccttgtgtggggctgctgcactaggcaacacaggatcctcagcccctggcacccacttccctgaagcctgggccagtagcagctccacrtacctgcatgaccccagttaccctctggtatgagggtcttcacgctttttgcttacatgcttccaacagatttttgagaaattatgcatcatcctcacac

SEQ ID NO: 29712 - DNA, 201 bp, Homo sapiens
gctctaaaattctgtggttctgtgccttttgacagaatggagtttcagtttcctggaggccatctgtggagtttccagggaacctgtaagtgcatgcctcrttcaaagattaccagaggtgccgcacccttcctggtatctttatgggcctgcctcctaaaatattcaaatcaaccctataacctgtgatcacttgtcctc

SEQ ID NO: 29713 - DNA, 201 bp, Homo sapiens
ccagagattttgtggacttggtgctagtcaagagatatgaggatgggaccatcagttccaacggtgagtgatgcccggaggagctgccatgccttcctgcratatcgagctttctcttctgcaccccacagttccttaaggaaagccaagcaaccagaaatcaccagaaactcacactctgagtcccctacctcatctggt

SEQ ID NO: 29714 - DNA, 201 bp, Homo sapiens; identical to SEQ ID NO: 6309

SEQ ID NO: 29715 - DNA, 201 bp, Homo sapiens
ccactaaaaatacaaaaaattagccgggcgtggtggtgggcgcctgtagtcccagctactcgggaggctgaggcaggagaatggcgtgaacccaggaggcrgagcttgcagtgagccgagattgcaccactgcactccagcctgggcgacagaatgagactccgtctcaaaaaaaaaaaaaaaagaaaaaaatctttacag

SEQ ID NO: 29716 - DNA, 201 bp, Homo sapiens
gtgccaccacacccaggtaatttttgtatttttggtagagacgaggtttcaccatgttggccaggctggtcttgaactcctgacctcaggtgatccacccrcctcagcctcccaaagtgctgagattataggtgtgagccaccacacctggcctcaggaagtatttttatttttaaatttatttatttatttgagatggag

SEQ ID NO: 29717 - DNA, 201 bp, Homo sapiens
aatggcgtgaacccaggaggcggagcttgcagtgagccgagattgcaccactgcactccagcctgggcgacagaatgagactccgtctcaaaaaaaaaaaraaaagaaaaaaatctttacagtggattacataacaattccagtgaaatgaaattacttcaaacagttccttgagaatgttggagggatttgacatgtaat

SEQ ID NO: 29718 - DNA, 201 bp, Homo sapiens; identical to SEQ ID NO: 6316

SEQ ID NO: 29719 - DNA, 201 bp, Homo sapiens
cagggactcactctgtcacctgggctgcagtgcagtggtacaccatagctcactgcagcctcgaactcctgagctcaagtgatcctcccacctcatcctcmcaagtaattgggactacaggcgcaccccaccatgcccaccttatttatttatttatttatttatttatttattttcatagagatgagggttccctgtgtt

SEQ ID NO: 29720 - DNA, 201 bp, Homo sapiens
gggctgcagtgcagtggtacaccatagctcactgcagcctcgaactcctgagctcaagtgatcctcccacctcatcctcccaagtaattgggactacaggygcaccccaccatgcccaccttatttatttatttatttatttatttatttattttcatagagatgagggttccctgtgttgtccaggctggtcttgaactc

SEQ ID NO: 29721 - DNA, 201 bp, Homo sapiens
cgcctctactcccagaaggccgcggggggtggaccgcctaagagggcgtgcgctcccgacatgccccgcggcgcgccattaaccgccagatttgaatcgcsggacccgttggcagaggtggcggcggcggcatgggtgccccgacgttgccccctgcctggcagccctttctcaaggaccaccgcatctctacattcaaga

SEQ ID NO: 29722 - DNA, 201 bp, Homo sapiens
accatagctcactgcagcctcgaactcctgagctcaagtgatcctcccacctcatcctcccaagtaattgggactacaggcgcaccccaccatgcccaccttatttatttatttatttatttatttatttattttcatagagatgagggttccctgtgttgtccaggctggtcttgaactcctgagctcaagggatccttt

SEQ ID NO: 29723 - DNA, 201 bp, Homo sapiens
agaccccctatcccatggtttctcaggttgcttttcagcttgaaaattgtattcctttgtagagatcagcgtaaaataattctgtccttatatgtggcttyattttaatttgagacagagtgtcactcagtcgcccaggctggagtgtggtggtgcgatcttggctcactgcgacctccacctcccaggttcaagcgattc

SEQ ID NO: 29724 - DNA, 201 bp, Homo sapiens
atagctcactgcagcctcgaactcctgagctcaagtgatcctcccacctcatcctcccaagtaattgggactacaggcgcaccccaccatgcccaccttatttatttatttatttatttatttatttattttcatagagatgagggttccctgtgttgtccaggctggtcttgaactcctgagctcaagggatccttttgc

SEQ ID NO: 29725 - DNA, 201 bp, Homo sapiens; identical to SEQ ID NO: 6306

SEQ ID NO: 29726 - DNA, 201 bp, Homo sapiens
tagctcactgcagcctcgaactcctgagctcaagtgatcctcccacctcatcctcccaagtaattgggactacaggcgcaccccaccatgcccaccttatttatttatttatttatttatttatttattttcatagagatgagggttccctgtgttgtccaggctggtcttgaactcctgagctcaagggatccttttgcc

SEQ ID NO: 29727 - DNA, 201 bp, Homo sapiens; identical to SEQ ID NO: 6307

SEQ ID NO: 29728 - DNA, 201 bp, Homo sapiens
ggatgtgactgggaagctctggtttcagtgtcatgtgtctattctttatttccaggcaaaggaaaccaacaataagaagaaagaatttgaggaaactgcgragaaagtgcgccgtgccatcgagcagctggctgccatggattgaggcctctggccggagctgcctggtcccagagtggctgcaccacttccagggtttat

SEQ ID NO: 29729 - DNA, 201 bp, Homo sapiens; identical to SEQ ID NO: 6310

SEQ ID NO: 29730 - DNA, 201 bp, Homo sapiens
ccatcatgggcacaggggaggagcagagtggatgtggaggtgtgagctggaaaccaggtcccagagcgctgagaaagacagagggtttttgcccttgcaartagagcaactgaaatctgacaccatccagttccagaaagccctgaagtgctggtggacgctgcggggtgctccgctctagggttacagggatgaagatgc

SEQ ID NO: 29731 - DNA, 201 bp, Homo sapiens; identical to SEQ ID NO: 6337

SEQ ID NO: 29732 - DNA, 201 bp, Homo sapiens
aaggctctggactttcctccaggagtttcaggagaaaggtagggcagtggttaagagcagagctctgcctagactagctggggtgcctagactagctggggtgcccagactagctggggtgcctagactagctgggtactttgagtggctccttcagcctggacctcggtttcctcacctgtatagtagagatatgggagc

SEQ ID NO: 29733 - DNA, 201 bp, Homo sapiens
tcatttgaccaaaatgccttggggtggacgtaagatgcctgatgcctttcatgttcaacagaatacatcagcagaccctgttgttgtgaactcccaggaaygtccaagtgctttttttgagattttttaaaaaacagtttaattgaaatataacctacacagcacaaaaattaccctttgaaagtgtgcacttcacacttt

SEQ ID NO: 29734 - DNA, 201 bp, Homo sapiens
cacgaggtcaggagatcgagaccatcctggctaacatggtgaaaccccgtctttactaaaaatacaaaaaattagctgggcgtggtggcgggcgcctgtartcccagctactcgggaggctgaggcaggagaatggcgtgaacctgggaggtggagcttgcagtgagccgagatcgcgccactgcactccagcctgggcga

SEQ ID NO: 29735 - DNA, 201 bp, Homo sapiens
ggctctggactttcctccaggagtttcaggagaaaggtagggcagtggttaagagcagagctctgcctagactagctggggtgcctagactagctggggtgcccagactagctggggtgcctagactagctgggtactttgagtggctccttcagcctggacctcggtttcctcacctgtatagtagagatatgggagcac

SEQ ID NO: 29736 - DNA, 201 bp, Homo sapiens
actagaaggagaggcgagttgtagacctgggtggcaggagtgttttgtttgttttctttggcagggtcttgctctgttgctcaggctggagtacagtggcrcaatcacagctcactatagcctcgacctcctggactcaagcaatcctcctgcctcagcctcccagtagctgggactacaggcgcatgccaccatgcctgg

SEQ ID NO: 29737 - DNA, 201 bp, Homo sapiens
gctctggactttcctccaggagtttcaggagaaaggtagggcagtggttaagagcagagctctgcctagactagctggggtgcctagactagctggggtgcccagactagctggggtgcctagactagctgggtactttgagtggctccttcagcctggacctcggtttcctcacctgtatagtagagatatgggagcacc

SEQ ID NO: 29738 - DNA, 201 bp, Homo sapiens
gtttaactggacatgaagaggaaggctctggactttcctccaggagtttcaggagaaaggtagggcagtggttaagagcagagctctgcctagactagctggggtgcctagactagctggggtgcccagactagctggggtgcctagactagctgggtactttgagtggctccttcagcctggacctcggtttcctcacct

SEQ ID NO: 29739 - DNA, 201 bp, Homo sapiens
ctctggactttcctccaggagtttcaggagaaaggtagggcagtggttaagagcagagctctgcctagactagctggggtgcctagactagctggggtgcccagactagctggggtgcctagactagctgggtactttgagtggctccttcagcctggacctcggtttcctcacctgtatagtagagatatgggagcaccc

SEQ ID NO: 29740 - DNA, 201 bp, Homo sapiens; identical to SEQ ID NO: 6313

SEQ ID NO: 29741 - DNA, 201 bp, Homo sapiens
aactggacatgaagaggaaggctctggactttcctccaggagtttcaggagaaaggtagggcagtggttaagagcagagctctgcctagactagctggggtgcctagactagctggggtgcccagactagctggggtgcctagactagctgggtactttgagtggctccttcagcctggacctcggtttcctcacctgtat

SEQ ID NO: 29742 - DNA, 201 bp, Homo sapiens
tctggactttcctccaggagtttcaggagaaaggtagggcagtggttaagagcagagctctgcctagactagctggggtgcctagactagctggggtgcccagactagctggggtgcctagactagctgggtactttgagtggctccttcagcctggacctcggtttcctcacctgtatagtagagatatgggagcaccca

SEQ ID NO: 29743 - DNA, 201 bp, Homo sapiens
actagctggggtgcccagactagctggggtgcctagactagctgggtactttgagtggctccttcagcctggacctcggtttcctcacctgtatagtagakatatgggagcacccagcgcaggatcactgtgaacataaatcagttaatggaggaagcaggtagagtggtgctgggtgcataccaagcactccgtcagtgt

SEQ ID NO: 29744 - DNA, 201 bp, Homo sapiens
ctggacatgaagaggaaggctctggactttcctccaggagtttcaggagaaaggtagggcagtggttaagagcagagctctgcctagactagctggggtgcctagactagctggggtgcccagactagctggggtgcctagactagctgggtactttgagtggctccttcagcctggacctcggtttcctcacctgtatag

SEQ ID NO: 29745 - DNA, 201 bp, Homo sapiens; identical to SEQ ID NO: 6340

SEQ ID NO: 29746 - DNA, 201 bp, Homo sapiens; identical to SEQ ID NO: 6341

SEQ ID NO: 29747 - DNA, 201 bp, Homo sapiens; identical to SEQ ID NO: 6342

SEQ ID NO: 29748 - DNA, 201 bp, Homo sapiens
cagaagtagaggcctcagtccctgcaggagacctctcggtctctatctcctgatagtcagacccagccacactggaaagaggggagacattacagcctgcragaaaagtagggagatttaaaaactgcttggcttttattttgaactgttttttttgtttgtttgttttccccaattcagaatacagaatacttttatgga

SEQ ID NO: 29749 - DNA, 201 bp, Homo sapiens
agctcactgcagcctcgaactcctgagctcaagtgatcctcccacctcatcctcccaagtaattgggactacaggcgcaccccaccatgcccaccttatttatttatttatttatttatttatttattttcatagagatgagggttccctgtgttgtccaggctggtcttgaactcctgagctcaagggatccttttgcct

SEQ ID NO: 29750 - DNA, 201 bp, Homo sapiens
aaaattttttgattttttttttttttgagacagagccttgctctgtcgcccaggctggagtgcagtggcacgatctcagctcactacaagctccgcctccygggttcacgccattcttctgcctcagcctcctgagtagctgggactacaggtgcccaccaccacgcctggctaattttttttggtatttttattagagac

SEQ ID NO: 29751 - DNA, 201 bp, Homo sapiens
gtttcatcatgttggccaggctggtctcaaactcctgacctcaagtgatctgcctgcctcggcctcccaaagcgctgagattacaggtgtgatctactgcrccaggcctgggcgtcatatattcttatttgctaagtctggcagccccacacagaataagtactgggggattccatatccttgtagcaaagccctgggtgg

SEQ ID NO: 29752 - DNA, 201 bp, Homo sapiens
ctcaagtgatctgcccgccttggcatcccaaagtgctgggattacaggtgtgaaccaccacacctggcctcaatatagtggcttttaagtgctaaggactragattgtgttttgtcaggaagaggccagttgtgggtgaagcatgctgtgagagagcttgtcacctggttgaggttgtgggagctgcagcgtgggaactgg

SEQ ID NO: 29753 - DNA, 201 bp, Homo sapiens; identical to SEQ ID NO: 6318

SEQ ID NO: 29754 - DNA, 201 bp, Homo sapiens
tggacatgaagaggaaggctctggactttcctccaggagtttcaggagaaaggtagggcagtggttaagagcagagctctgcctagactagctggggtgcctagactagctggggtgcccagactagctggggtgcctagactagctgggtactttgagtggctccttcagcctggacctcggtttcctcacctgtatagt

SEQ ID NO: 29755 - DNA, 201 bp, Homo sapiens
gacatgaagaggaaggctctggactttcctccaggagtttcaggagaaaggtagggcagtggttaagagcagagctctgcctagactagctggggtgcctagactagctggggtgcccagactagctggggtgcctagactagctgggtactttgagtggctccttcagcctggacctcggtttcctcacctgtatagtag

SEQ ID NO: 29756 - DNA, 201 bp, Homo sapiens
catgcccaccttatttatttatttatttatttatttatttattttcatagagatgagggttccctgtgttgtccaggctggtcttgaactcctgagctcamgggatccttttgcctgggcctcccaaagtgctgagattacaggcatgagccaccgtgcccagctaggaatcatttttaaagcccctaggatgtctgtgtg

SEQ ID NO: 29757 - DNA, 201 bp, Homo sapiens
catgaagaggaaggctctggactttcctccaggagtttcaggagaaaggtagggcagtggttaagagcagagctctgcctagactagctggggtgcctagactagctggggtgcccagactagctggggtgcctagactagctgggtactttgagtggctccttcagcctggacctcggtttcctcacctgtatagtagag

SEQ ID NO: 29758 - DNA, 201 bp, Homo sapiens
taattttttttaagttaacctctgtcagcaaacaaatttaacccaataaaggtctttgttttttaatgtagtagaggagttagggtttataaaaaatatgrtagggaagggggtccctggatttgctaatgtgattgtcatttgccccttaggagagagctctgttagcagaatgaaaaaattggaagccagattcaggga

SEQ ID NO: 29759 - DNA, 201 bp, Homo sapiens
tgaagaggaaggctctggactttcctccaggagtttcaggagaaaggtagggcagtggttaagagcagagctctgcctagactagctggggtgcctagactagctggggtgcccagactagctggggtgcctagactagctgggtactttgagtggctccttcagcctggacctcggtttcctcacctgtatagtagagat

SEQ ID NO: 29760 - DNA, 201 bp, Homo sapiens
cctgtaatcccagctactcgggaggctgaggcaggagaatctcttgaacccgggaggcagaggttgcggtgagccaagatcgtgcctttgcacaccagccwaggcaacaagagcgaaagtccgtctcaaaaaaaaagtaattttttttaagttaacctctgtcagcaaacaaatttaacccaataaaggtctttgtttttt

SEQ ID NO: 29761 - DNA, 201 bp, Homo sapiens
gaagaggaaggctctggactttcctccaggagtttcaggagaaaggtagggcagtggttaagagcagagctctgcctagactagctggggtgcctagactagctggggtgcccagactagctggggtgcctagactagctgggtactttgagtggctccttcagcctggacctcggtttcctcacctgtatagtagagata

SEQ ID NO: 29762 - DNA, 201 bp, Homo sapiens
tcatctcttcaaaaaatacacaaaaaattagccaggcatggtggcacgtgcctgtagtctcagctactcaggaggctgaggtgggaggatcactttgagcyttgcaggtcaaagctgcagtaagccatgatcttgccactgcattccagcctggatgacagagcgagaccctgtctctaaaaaaaaaaaaaccaaacggtg

SEQ ID NO: 29763 - DNA, 201 bp, Homo sapiens; identical to SEQ ID NO: 6312

SEQ ID NO: 29764 - DNA, 201 bp, Homo sapiens
aagaggaaggctctggactttcctccaggagtttcaggagaaaggtagggcagtggttaagagcagagctctgcctagactagctggggtgcctagactagctggggtgcccagactagctggggtgcctagactagctgggtactttgagtggctccttcagcctggacctcggtttcctcacctgtatagtagagatat

SEQ ID NO: 29765 - DNA, 201 bp, Homo sapiens
aggccaaggcaggaggattcattgagcccaggagttttgaggcgagcctgggcaatgtggccagacctcatctcttcaaaaaatacacaaaaaattagccrggcatggtggcacgtgcctgtagtctcagctactcaggaggctgaggtgggaggatcactttgagccttgcaggtcaaagctgcagtaagccatgatctt

SEQ ID NO: 29766 - DNA, 201 bp, Homo sapiens
gaggaaggctctggactttcctccaggagtttcaggagaaaggtagggcagtggttaagagcagagctctgcctagactagctggggtgcctagactagctggggtgcccagactagctggggtgcctagactagctgggtactttgagtggctccttcagcctggacctcggtttcctcacctgtatagtagagatatgg

SEQ ID NO: 29767 - DNA, 201 bp, Homo sapiens
aggaaggctctggactttcctccaggagtttcaggagaaaggtagggcagtggttaagagcagagctctgcctagactagctggggtgcctagactagctggggtgcccagactagctggggtgcctagactagctgggtactttgagtggctccttcagcctggacctcggtttcctcacctgtatagtagagatatggg

SEQ ID NO: 29768 - DNA, 201 bp, Homo sapiens
ggaaggctctggactttcctccaggagtttcaggagaaaggtagggcagtggttaagagcagagctctgcctagactagctggggtgcctagactagctggggtgcccagactagctggggtgcctagactagctgggtactttgagtggctccttcagcctggacctcggtttcctcacctgtatagtagagatatggga

SEQ ID NO: 29769 - DNA, 201 bp, Homo sapiens
gaaggctctggactttcctccaggagtttcaggagaaaggtagggcagtggttaagagcagagctctgcctagactagctggggtgcctagactagctggggtgcccagactagctggggtgcctagactagctgggtactttgagtggctccttcagcctggacctcggtttcctcacctgtatagtagagatatgggag

SEQ ID NO: 29770 - DNA, 201 bp, Homo sapiens
tcactccattcgcctgcctcagcctcccaagtagctgggactacaggcgctgggattacaaacccaaacccaaagtgctgggattacaggcgtgagccacygcacccggcctgttttgtctttcaatagcaagagttgtgtttgcttcgcccctacctttagtggaaaaatgtataaaatggagatattgacctccacatt

SEQ ID NO: 29771 - DNA, 201 bp, Homo sapiens
gggcgatgcattgggcgctgattcttgttcctgctgctgcctcggtgcttagcttttgaaacaatgaaataaattagaaccagtgtgaaaatcgatcaggraataaatttaatgtggaaataaactgaacaacttagttcttcataagagtttacttggtaaatacttgtgatgaggacaaaacgaagcactagaaggaga

SEQ ID NO: 29772 - DNA, 201 bp, Homo sapiens
gagactccgtctcaaaaaaaaaaaaaaaagtaggctttcatgatgtgtgagctgaaggcgcagtaggcagaagtagaggcctcagtccctgcaggagaccyctcggtctctatctcctgatagtcagacccagccacactggaaagaggggagacattacagcctgcaagaaaagtagggagatttaaaaactgcttggct

SEQ ID NO: 29773 - DNA, 201 bp, Homo sapiens
gggtgtccccttcctgtccccagacaaggatgaccagctgatctgtgtgaacgagaacggcggctgtgagcagtactgcagtgaccacacgggcaccaagygctcctgtcggtgccacgaggggtactctctgctggcagacggggtgtcctgcacacccacaggtgaccaggcttcatgtcccagtcccagatgacacca

SEQ ID NO: 29774 - DNA, 201 bp, Homo sapiens; identical to SEQ ID NO: 6389

SEQ ID NO: 29775 - DNA, 201 bp, Homo sapiens
cttaattctcccagaatgacgtgtgacgagacgtgggaagtactgccaacttgggaagctctacgagccccggtgtccagaggttttatcagggctcaatsacatagacccagctgaccacccgcatggctgacctcagtctcagcccctccagaggctacgccgatagtgcggcccaaggccccaccatacatcacattg

SEQ ID NO: 29776 - DNA, 201 bp, Homo sapiens
gtggtgcccacagctcacggcgctcccgggtgacggtcccctcggctgtagggcgtcctgaagagcggcctgctcggagctgagcgcacggggttgcctcsccctgggcgtctctggccctcaccagccccgtcttcccatgggcaaaacggcggtcctgtttgtccacaagtaaccgtcggggttacggaggggccagga

SEQ ID NO: 29777 - DNA, 201 bp, Homo sapiens; identical to SEQ ID NO: 6390

SEQ ID NO: 29778 - DNA, 201 bp, Homo sapiens; identical to SEQ ID NO: 6391

SEQ ID NO: 29779 - DNA, 201 bp, Homo sapiens
cactgtttcgacaaaatcaagaactggaggaacctgatcgcggtgctgggtgggtaccactctcccctgtccgaccgcggtgctgggtgggtgccactctyccctgtccgaccgcggtgctgggtgggtgccactctcccctgtccgaccgcggtgctgggtgggtgccactctcccctgtccgaccgcggtgctgggtgg

SEQ ID NO: 29780 - DNA, 201 bp, Homo sapiens
gtggtacgaggccagcttggagaactgtctcagctctctggtcctctcgtcagttgggtctctgattggaaagtcccttggacacttttaccatccccatkggactttcactttcccccaggctcccatcagctgctcggaagagtggtcaccctggaggccactgcccaccagccaggcaccccccaaatgcaaccgcag

SEQ ID NO: 29781 - DNA, 201 bp, Homo sapiens
tctggccgccggagacgcggtgcgggtggagacgagggatttggatttccgcgggcggctgcacggatttccacgcgcggttcacgtgggccccagggggktgcccggcacccggggccgcgccgccttctcctcgccggcatcgacccgcagcctcacgtttacgcggcggcgcccgcagcccccttcggcccggcttcc

SEQ ID NO: 29782 - DNA, 201 bp, Homo sapiens
cgattctttggtgtccccgcctgcatcctcagcctccttccaaaccagaccagttctctaggggcgtcgacgtgtgaaactgattttaaagaaaacaggcrgtggcctttctctcggccccacgtggcccagtagcgctcaccttccgtcccttcttccgcgctcagtaaccaatttaggccgctcctgcagaactcgggc

SEQ ID NO: 29783 - DNA, 201 bp, Homo sapiens
agagtccctgtgtccctgtcccacttccacatcccaccacgcaggaccgcttggtaaacttccccttctctactttccattacaaaggtttgaggggtttgttttttttttaaccatctgaatattaaattatcacaaagtttgaggcccccaacctcccttgggttcagtaattcactagaaggactcatagaatccact

SEQ ID NO: 29784 - DNA, 201 bp, Homo sapiens
tgcagcagccattttcttctctaagcagaagagagcccagcaagctggaggaggctgaagagagaggcttcctgctggtcatctgggtccagaatgcctgsagatctctgctcagccctggtgcccagcagccctggtgtgcatcctgcagggcaggccttcccgccggagtcctggacttgctcagggccactccccttg

SEQ ID NO: 29785 - DNA, 201 bp, Homo sapiens
gcaggggcagcactgcagagatttcatcatggtctcccaggccctcaggctcctctgccttctgcttgggcttcagggctgcctggctgcaggtgcgtccrgggaggttttctccataaacttggtggaagggcagtgggcaaatccaggagccagcccgggcttcccaaaccccgcccttgctccggacacccccatcca

SEQ ID NO: 29786 - DNA, 201 bp, Homo sapiens
gtggcctggccaaccgggctgcagggtgcacaacctggtggggtgtgtaggccgggcattcagggctcagccccagttggaaattggtctaggtgaccttkaaatcccttccagtctgaggtctttgacagggacccaaggttctgattatcagactcagtggccccttgggctcccggccctgggcaattctcagccctc

SEQ ID NO: 29787 - DNA, 201 bp, Homo sapiens
caagaatcacttgaacccgggaggtggaggttgcagtgagattgcaccagtgcactctccagcctggcaacagagcaagactctgtctcaaacaaacaaarcaaaacaaacaaaaagacgtaagatgtggaccgctggagaatgggggtgctgcctgcagtcaaaacggagtgggggtgcccagctcagggccagaatgat

SEQ ID NO: 29788 - DNA, 201 bp, Homo sapiens
ggaccgcttggtaaacttccccttctctactttccattacaaaggtttgaggggtttgttttttttttaaccatctgaatattaaattatcacaaagtttraggcccccaacctcccttgggttcagtaattcactagaaggactcatagaatccactgaagtggatacactcacaggtaccgtttattacagcaaaggat

SEQ ID NO: 29789 - DNA, 201 bp, Homo sapiens; identical to SEQ ID NO: 6393

SEQ ID NO: 29790 - DNA, 201 bp, Homo sapiens; identical to SEQ ID NO: 6392

SEQ ID NO: 29791 - DNA, 201 bp, Homo sapiens; identical to SEQ ID NO: 6394

SEQ ID NO: 29792 - DNA, 201 bp, Homo sapiens
atcaccaccagtcctgcctgcaacccttctcagcttactgacaccagcccactccacagatggggaccagtgtgcctcaagtccatgccagaatgggggcycctgcaaggaccagctccagtcctatatctgcttctgcctccctgccttcgagggccggaactgtgagacgcgtaaggccccactttgggtcccatattt

SEQ ID NO: 29793 - DNA, 201 bp, Homo sapiens
ccaccagtcctgcctgcaacccttctcagcttactgacaccagcccactccacagatggggaccagtgtgcctcaagtccatgccagaatgggggctcctkcaaggaccagctccagtcctatatctgcttctgcctccctgccttcgagggccggaactgtgagacgcgtaaggccccactttgggtcccatatttgcag

SEQ ID NO: 29794 - DNA, 201 bp, Homo sapiens; identical to SEQ ID NO: 6397

SEQ ID NO: 29795 - DNA, 201 bp, Homo sapiens
cccggtgtccagaggttttatcagggctcaatcacatagacccagctgaccacccgcatggctgacctcagtctcagcccctccagaggctacgccgatartgcggcccaaggccccaccatacatcacattgtcagctagaccatccagcatggctcaaggcccaggtaaacaccaacattccctcaggcaagaccttcc

SEQ ID NO: 29796 - DNA, 201 bp, Homo sapiens
tcatgtggacagtccttaattctcccagaatgacgtgtgacgagacgtgggaagtactgccaacttgggaagctctacgagccccggtgtccagaggtttkatcagggctcaatcacatagacccagctgaccacccgcatggctgacctcagtctcagcccctccagaggctacgccgatagtgcggcccaaggccccac

SEQ ID NO: 29797 - DNA, 201 bp, Homo sapiens
caccagggggtgaggtggcaggtggtggaaagggcctgaggggggcttcttccttccaggcgagcacgacctcagcgagcacgacggggatgagcagagcyggcgggtggcgcaggtcatcatccccagcacgtacgtcccgggcaccaccaaccacgacatcgcgctgctccgcctgcaccagcccgtggtcctcactga

SEQ ID NO: 29798 - DNA, 201 bp, Homo sapiens; identical to SEQ ID NO: 6399

SEQ ID NO: 29799 - DNA, 201 bp, Homo sapiens; identical to SEQ ID NO: 6400

SEQ ID NO: 29800 - DNA, 201 bp, Homo sapiens
atatctgcttctgcctccctgccttcgagggccggaactgtgagacgcgtaaggccccactttgggtcccatatttgcagagggccctggggagctggtgraggtggcctggccaaccgggctgcagggtgcacaacctggtggggtgtgtaggccgggcattcagggctcagccccagttggaaattggtctaggtgacc

SEQ ID NO: 29801 - DNA, 201 bp, Homo sapiens
gagaaccctgcgagatgccccatccgagttgtcacgtcgtcctcacggttactctttgaggtgggatctttgcctgatctttgcaaaatcaggagcattgratcaaagctatgtgaagatcctgtgaggtgaacagtgaaatctcacagcgacatttgtattcttgggccgtgcccaagagcacgtctcggctagagaggg

SEQ ID NO: 29802 - DNA, 201 bp, Homo sapiens
aaaactcgtaaaggctcctgggaaaatgggatgtttctccaaaccagcctggaacgaatgggctgcacttccaaaagcagggacaccccacacccactgtstctcaaagaggcggacgtgcccaccctggccacacagcctgggactcagcctgccacctcctcgggcttcctttctggcccaagaccttgattgaagcag

SEQ ID NO: 29803 - DNA, 201 bp, Homo sapiens
gtttgaggggtttgttttttttttaaccatctgaatattaaattatcacaaagtttgaggcccccaacctcccttgggttcagtaattcactagaaggacwcatagaatccactgaagtggatacactcacaggtaccgtttattacagcaaaggatgcaggcttaagtctgcagagggaccaggcacaagcttccccttg

SEQ ID NO: 29804 - DNA, 201 bp, Homo sapiens
ccccagacaaggatgaccagctgatctgtgtgaacgagaacggcggctgtgagcagtactgcagtgaccacacgggcaccaagcgctcctgtcggtgccaygaggggtactctctgctggcagacggggtgtcctgcacacccacaggtgaccaggcttcatgtcccagtcccagatgacaccagtccctgtcccactacg

SEQ ID NO: 29805 - DNA, 201 bp, Homo sapiens
aggcgagcacgacctcagcgagcacgacggggatgagcagagccggcgggtggcgcaggtcatcatccccagcacgtacgtcccgggcaccaccaaccacvacatcgcgctgctccgcctgcaccagcccgtggtcctcactgaccatgtggtgcccctctgcctgcccgaacggacgttctctgagaggacgctggcctt

SEQ ID NO: 29806 - DNA, 201 bp, Homo sapiens; identical to SEQ ID NO: 6404

SEQ ID NO: 29807 - DNA, 201 bp, Homo sapiens; identical to SEQ ID NO: 6403

SEQ ID NO: 29808 - DNA, 201 bp, Homo sapiens
tgtggggggaccctgatcaacaccatctgggtggtctccgcggcccactgtttcgacaaaatcaagaactggaggaacctgatcgcggtgctgggtgggtrccactctcccctgtccgaccgcggtgctgggtgggtgccactcttccctgtccgaccgcggtgctgggtgggtgccactctcccctgtccgaccgcggtg

SEQ ID NO: 29809 - DNA, 201 bp, Homo sapiens
agctggggtcacctgacctttctcctgtcccccccacttgagctcagtggctgggcagcaggggatgcatggccactggccggccaggtgcagctctcagstggggtgttcagaggacgcctgtgtcctcccctcccccatccctctgtcacccttggaggcagagaactttgcccgtcagtcccatggggaatgtcaaca

SEQ ID NO: 29810 - DNA, 201 bp, Homo sapiens; identical to SEQ ID NO: 6405

SEQ ID NO: 29811 - DNA, 201 bp, Homo sapiens; identical to SEQ ID NO: 6407

SEQ ID NO: 29812 - DNA, 201 bp, Homo sapiens; identical to SEQ ID NO: 6406

SEQ ID NO: 29813 - DNA, 201 bp, Homo sapiens; identical to SEQ ID NO: 6408

SEQ ID NO: 29814 - DNA, 201 bp, Homo sapiens
tctgtgtgaacgagaacggcggctgtgagcagtactgcagtgaccacacgggcaccaagcgctcctgtcggtgccacgaggggtactctctgctggcagayggggtgtcctgcacacccacaggtgaccaggcttcatgtcccagtcccagatgacaccagtccctgtcccactacggattatcttactggacaaaagacg

SEQ ID NO: 29815 - DNA, 201 bp, Homo sapiens
caccagtcctgcctgcaacccttctcagcttactgacaccagcccactccacagatggggaccagtgtgcctcaagtccatgccagaatgggggctcctgmaaggaccagctccagtcctatatctgcttctgcctccctgccttcgagggccggaactgtgagacgcgtaaggccccactttgggtcccatatttgcaga

SEQ ID NO: 29816 - DNA, 201 bp, Homo sapiens
ccctgaaaagtgagcagagggcggttttaagacgtaagccctctgtttcctccaaaaccagccctgaccattgtctcctcagccagccacttcttcaaggrcctctcatggccgggccccaccagtcaggcccagccgaggccctgccttccaccacccctgggccctgggagctcctgctcctgggggcctcccatagcc

SEQ ID NO: 29817 - DNA, 201 bp, Homo sapiens
cctgcaacccttctcagcttactgacaccagcccactccacagatggggaccagtgtgcctcaagtccatgccagaatgggggctcctgcaaggaccagcyccagtcctatatctgcttctgcctccctgccttcgagggccggaactgtgagacgcgtaaggccccactttgggtcccatatttgcagagggccctgggg

SEQ ID NO: 29818 - DNA, 201 bp, Homo sapiens
cttctcagcttactgacaccagcccactccacagatggggaccagtgtgcctcaagtccatgccagaatgggggctcctgcaaggaccagctccagtcctrtatctgcttctgcctccctgccttcgagggccggaactgtgagacgcgtaaggccccactttgggtcccatatttgcagagggccctggggagctggtgg

SEQ ID NO: 29819 - DNA, 201 bp, Homo sapiens
cctgtcccagtgaggacagggacacagtactcggccacaccatggggcgcccactgcacctcgtcctgctcagtgcctccctggctggcctcctgctgctyggggaaagtcgtaagtgcccctcgcccttcagacccaaaagcagcgccagggagcagggaggggcggcagttggggaaaccctctcatctctgcagcctg

SEQ ID NO: 29820 - DNA, 201 bp, Homo sapiens
cgtggtgcccacagctcacggcgctcccgggtgacggtcccctcggctgtagggcgtcctgaagagcggcctgctcggagctgagcgcacggggttgcctsgccctgggcgtctctggccctcaccagccccgtcttcccatgggcaaaacggcggtcctgtttgtccacaagtaaccgtcggggttacggaggggccagg

SEQ ID NO: 29821 - DNA, 201 bp, Homo sapiens
acggagcaggtggtgccaagctcaggctctgtcacccacagctcagtgccaccttccaggcagaacaccactgctgacccagggcatggccaccccggggrctggctctcgctgacccccagaagcccctctcagggtgtccccttcctgtccccagacaaggatgaccagctgatctgtgtgaacgagaacggcggctgt

SEQ ID NO: 29822 - DNA, 201 bp, Homo sapiens
gggatttggatttccgcgggcggctgcacggatttccacgcgcggttcacgtgggccccaggggggtgcccggcacccggggccgcgccgccttctcctcsccggcatcgacccgcagcctcacgtttacgcggcggcgcccgcagcccccttcggcccggcttccgcgcgtgcccccgagcgcgccctcgggatcagccc

SEQ ID NO: 29823 - DNA, 201 bp, Homo sapiens
gacacctcacagaggtcacctcacacccacaggacacctcacagaggtcacctcacacggggcacacttcacactcaggtcacctcacacccacaggacamctcacagaggtcacctcacacccacaggacaactcacagaggtcacctcacacaggacacctcacaaaggtcacctcacacccacaggacacctcacact

SEQ ID NO: 29824 - DNA, 201 bp, Homo sapiens
gacacccccatccaccaggagggttttctggcggctcctgttcaatttctttccttctagaaaccagcatccaggcacaggaggggaggcccttcttggtrgcccaggctttggcgggattatttttcaaagaactttaggagtgggtggtgctttcctggcccccatgggcccctgcctgtgaggtcggacaagcgcagg

SEQ ID NO: 29825 - DNA, 201 bp, Homo sapiens
cccgcagcccccttcggcccggcttccgcgcgtgcccccgagcgcgccctcgggatcagcccccggaagcagagaggccaggccgggaaggatgggcgacsggggtggctgacccgggagcacggcagggaggacacccagccaggcccgcgagcagcgccgctcccctcctccaggacgggcgggaacctgcgatgcccc

SEQ ID NO: 29826 - DNA, 201 bp, Homo sapiens
tcaccttccgtcccttcttccgcgctcagtaaccaatttaggccgctcctgcagaactcgggctcctgcccaccggcccacagcgtccacctgaggcctcktcctcccagcaaaggtcgtccctccggaacgcgcctcctgcggcctctccagagcccctcccgcgcgtcctctcagccccgctcgcctcctcccggggcc

SEQ ID NO: 29827 - DNA, 201 bp, Homo sapiens
ctgacccccagaagcccctctcagggtgtccccttcctgtccccagacaaggatgaccagctgatctgtgtgaacgagaacggcggctgtgagcagtactrcagtgaccacacgggcaccaagcgctcctgtcggtgccacgaggggtactctctgctggcagacggggtgtcctgcacacccacaggtgaccaggcttca

SEQ ID NO: 29828 - DNA, 201 bp, Homo sapiens
caaatctctgcatctttctgacttttgttttacacagttgaatatccatgtggaaaaatacctattctagaaaaaagaaatgccagcaaaccccaaggccraattgtggggggcaaggtgtgccccaaaggggagtgtccatggcaggtaaggcttcccctggcttcaggattccaagccctgagggtcttgaagcctttt

SEQ ID NO: 29829 - DNA, 201 bp, Homo sapiens; identical to SEQ ID NO: 6416

SEQ ID NO: 29830 - DNA, 201 bp, Homo sapiens
tgacttccacacctcctgtccccccgcccaggtcctgttgttggtgaatggagctcagttgtgtggggggaccctgatcaacaccatctgggtggtctccrcggcccactgtttcgacaaaatcaagaactggaggaacctgatcgcggtgctgggtgggtaccactctcccctgtccgaccgcggtgctgggtgggtgcc

SEQ ID NO: 29831 - DNA, 201 bp, Homo sapiens; identical to SEQ ID NO: 6417

SEQ ID NO: 29832 - DNA, 201 bp, Homo sapiens; identical to SEQ ID NO: 6418

SEQ ID NO: 29833 - DNA, 201 bp, Homo sapiens; identical to SEQ ID NO: 6419

SEQ ID NO: 29834 - DNA, 201 bp, Homo sapiens
ctctcgctgacccccagaagcccctctcagggtgtccccttcctgtccccagacaaggatgaccagctgatctgtgtgaacgagaacggcggctgtgagcrgtactgcagtgaccacacgggcaccaagcgctcctgtcggtgccacgaggggtactctctgctggcagacggggtgtcctgcacacccacaggtgaccag

SEQ ID NO: 29835 - DNA, 201 bp, Homo sapiens
ccgcgcctcggaccaggacggaggcctggggaaggcggatctggccgccggagacgcggtgcgggtggagacgagggatttggatttccgcgggcggctgyacggatttccacgcgcggttcacgtgggccccaggggggtgcccggcacccggggccgcgccgccttctcctcgccggcatcgacccgcagcctcacgtt

SEQ ID NO: 29836 - DNA, 201 bp, Homo sapiens; identical to SEQ ID NO: 6421

SEQ ID NO: 29837 - DNA, 201 bp, Homo sapiens
gatggggaccagtgtgcctcaagtccatgccagaatgggggctcctgcaaggaccagctccagtcctatatctgcttctgcctccctgccttcgagggccrgaactgtgagacgcgtaaggccccactttgggtcccatatttgcagagggccctggggagctggtggaggtggcctggccaaccgggctgcagggtgcac

SEQ ID NO: 29838 - DNA, 201 bp, Homo sapiens; identical to SEQ ID NO: 6423

SEQ ID NO: 29839 - DNA, 201 bp, Homo sapiens; identical to SEQ ID NO: 6422

SEQ ID NO: 29840 - DNA, 201 bp, Homo sapiens
cgggagatcttcaaggacgcggagaggacggtgagcccagcctcggggcgccccgcgccgcggacactgcaggcggcggtgaaccaggccgcgtggggccrcctgcgtctctttggctgcggctgtgggcggcgaacacgcagcggcgcccgcgcggcgctttctgcgggggtcgctttccgcccggggtgactccgcttt

SEQ ID NO: 29841 - DNA, 201 bp, Homo sapiens
gggcaggtcagccccaagcccaccaggctccaagtcagcacacctagcacctccagctcgcggcacccccatgcttttagtggggcaaggaaggagaaaasaaaacgacactcactgagggtctaccctgtgcagagaaccctgcgagatgccccatccgagttgtcacgtcgtcctcacggttactctttgaggtgggat

SEQ ID NO: 29842 - DNA, 201 bp, Homo sapiens
agatggggaccagtgtgcctcaagtccatgccagaatgggggctcctgcaaggaccagctccagtcctatatctgcttctgcctccctgccttcgagggcyggaactgtgagacgcgtaaggccccactttgggtcccatatttgcagagggccctggggagctggtggaggtggcctggccaaccgggctgcagggtgca

SEQ ID NO: 29843 - DNA, 201 bp, Homo sapiens; identical to SEQ ID NO: 6425

SEQ ID NO: 29844 - DNA, 201 bp, Homo sapiens
gcggtgctgggtgggtgccactctcccctgtccgaccgcggtgctgggtgggtgccactctcccctgtccgaccgcggtgctgggtgggtgccactctccsctgtccgaccgcggtgctgggtgggtaccactctcccctgtctgaccgcagctctcaagtgtctcaggggctgtggctctgggcttcgtgctgtcacttc

SEQ ID NO: 29845 - DNA, 201 bp, Homo sapiens
gcctctcagaggatgggtgtttctgaatctttcctagtggcacgttcatccctcacaaatctctgcatctttctgacttttgttttacacagttgaatatmcatgtggaaaaatacctattctagaaaaaagaaatgccagcaaaccccaaggccgaattgtggggggcaaggtgtgccccaaaggggagtgtccatggca

SEQ ID NO: 29846 - DNA, 201 bp, Homo sapiens
ggacactgcaggcggcggtgaaccaggccgcgtggggccgcctgcgtctctttggctgcggctgtgggcggcgaacacgcagcggcgcccgcgcggcgctytctgcgggggtcgctttccgcccggggtgactccgctttcctgggcgatgccccccacccccaggcacgcgctctccccgtgcggccgcaccgcgcatgc

SEQ ID NO: 29847 - DNA, 201 bp, Homo sapiens
ttgccccagaaggagactgcagcccctgcagacctagaaatggccacagcccatccccatgcaccagggggtgaggtggcaggtggtggaaagggcctgargggggcttcttccttccaggcgagcacgacctcagcgagcacgacggggatgagcagagccggcgggtggcgcaggtcatcatccccagcacgtacgtcc

SEQ ID NO: 29848 - DNA, 201 bp, Homo sapiens
gaggggggcttcttccttccaggcgagcacgacctcagcgagcacgacggggatgagcagagccggcgggtggcgcaggtcatcatccccagcacgtacgwcccgggcaccaccaaccacgacatcgcgctgctccgcctgcaccagcccgtggtcctcactgaccatgtggtgcccctctgcctgcccgaacggacgttc

SEQ ID NO: 29849 - DNA, 201 bp, Homo sapiens; identical to SEQ ID NO: 6428

SEQ ID NO: 29850 - DNA, 201 bp, Homo sapiens
tctcagaggatgggtgtttctgaatctttcctagtggcacgttcatccctcacaaatctctgcatctttctgacttttgttttacacagttgaatatccaygtggaaaaatacctattctagaaaaaagaaatgccagcaaaccccaaggccgaattgtggggggcaaggtgtgccccaaaggggagtgtccatggcaggt

SEQ ID NO: 29851 - DNA, 201 bp, Homo sapiens
tcttccttccaggcgagcacgacctcagcgagcacgacggggatgagcagagccggcgggtggcgcaggtcatcatccccagcacgtacgtcccgggcacyaccaaccacgacatcgcgctgctccgcctgcaccagcccgtggtcctcactgaccatgtggtgcccctctgcctgcccgaacggacgttctctgagagga

SEQ ID NO: 29852 - DNA, 201 bp, Homo sapiens; identical to SEQ ID NO: 6431

SEQ ID NO: 29853 - DNA, 201 bp, Homo sapiens
aggatgggtgtttctgaatctttcctagtggcacgttcatccctcacaaatctctgcatctttctgacttttgttttacacagttgaatatccatgtggaraaatacctattctagaaaaaagaaatgccagcaaaccccaaggccgaattgtggggggcaaggtgtgccccaaaggggagtgtccatggcaggtaaggct

SEQ ID NO: 29854 - DNA, 201 bp, Homo sapiens
ttggtgaatggagctcagttgtgtggggggaccctgatcaacaccatctgggtggtctccgcggcccactgtttcgacaaaatcaagaactggaggaaccygatcgcggtgctgggtgggtaccactctcccctgtccgaccgcggtgctgggtgggtgccactcttccctgtccgaccgcggtgctgggtgggtgccact

SEQ ID NO: 29855 - DNA, 201 bp, Homo sapiens
ggctggagtgcagtggcgcgatctcggctcactgcaagctccgcctcccgggttcacaccactctcctgcctcagcctcccgaggagctgggactacaggygcccgccaccacgcccggctcattttttgtatttttagtagagacggggtttcactgcgttagccgggatggtctcgatctcctgacctcgtgatctccc

SEQ ID NO: 29856 - DNA, 201 bp, Homo sapiens; identical to SEQ ID NO: 6435

SEQ ID NO: 29857 - DNA, 201 bp, Homo sapiens; identical to SEQ ID NO: 6436

SEQ ID NO: 29858 - DNA, 201 bp, Homo sapiens; identical to SEQ ID NO: 6437

SEQ ID NO: 29859 - DNA, 201 bp, Homo sapiens
acaaatctctgcatctttctgacttttgttttacacagttgaatatccatgtggaaaaatacctattctagaaaaaagaaatgccagcaaaccccaaggcygaattgtggggggcaaggtgtgccccaaaggggagtgtccatggcaggtaaggcttcccctggcttcaggattccaagccctgagggtcttgaagccttt

SEQ ID NO: 29860 - DNA, 201 bp, Homo sapiens
agggatttggatttccgcgggcggctgcacggatttccacgcgcggttcacgtgggccccaggggggtgcccggcacccggggccgcgccgccttctcctsgccggcatcgacccgcagcctcacgtttacgcggcggcgcccgcagcccccttcggcccggcttccgcgcgtgcccccgagcgcgccctcgggatcagcc

SEQ ID NO: 29861 - DNA, 201 bp, Homo sapiens
gaccgcttggtaaacttccccttctctactttccattacaaaggtttgaggggtttgttttttttttaaccatctgaatattaaattatcacaaagtttgrggcccccaacctcccttgggttcagtaattcactagaaggactcatagaatccactgaagtggatacactcacaggtaccgtttattacagcaaaggatg

SEQ ID NO: 29862 - DNA, 201 bp, Homo sapiens; identical to SEQ ID NO: 6439

SEQ ID NO: 29863 - DNA, 201 bp, Homo sapiens; identical to SEQ ID NO: 6441

SEQ ID NO: 29864 - DNA, 201 bp, Homo sapiens; identical to SEQ ID NO: 6440

SEQ ID NO: 29865 - DNA, 201 bp, Homo sapiens
gcccgcagcccccttcggcccggcttccgcgcgtgcccccgagcgcgccctcgggatcagcccccggaagcagagaggccaggccgggaaggatgggcgamgggggtggctgacccgggagcacggcagggaggacacccagccaggcccgcgagcagcgccgctcccctcctccaggacgggcgggaacctgcgatgccc

SEQ ID NO: 29866 - DNA, 201 bp, Homo sapiens; identical to SEQ ID NO: 6442

SEQ ID NO: 29867 - DNA, 201 bp, Homo sapiens
gaaatcccttccagtctgaggtctttgacagggacccaaggttctgattatcagactcagtggccccttgggctcccggccctgggcaattctcagccctsgagatggcccagctgagagtccctgtgtccctgtcccacttccacatcccaccacgcaggaccgcttggtaaacttccccttctctactttccattacaa

SEQ ID NO: 29868 - DNA, 201 bp, Homo sapiens; identical to SEQ ID NO: 6443

SEQ ID NO: 29869 - DNA, 201 bp, Homo sapiens; identical to SEQ ID NO: 6444

SEQ ID NO: 29870 - DNA, 201 bp, Homo sapiens; identical to SEQ ID NO: 6445

SEQ ID NO: 29871 - DNA, 201 bp, Homo sapiens; identical to SEQ ID NO: 6446

SEQ ID NO: 29872 - DNA, 201 bp, Homo sapiens
gaatggagctcagttgtgtggggggaccctgatcaacaccatctgggtggtctccgcggcccactgtttcgacaaaatcaagaactggaggaacctgatcrcggtgctgggtgggtaccactctcccctgtccgaccgcggtgctgggtgggtgccactcttccctgtccgaccgcggtgctgggtgggtgccactctccc

SEQ ID NO: 29873 - DNA, 201 bp, Homo sapiens
atggccttatgaccccggccaccttcctgccccaggcggggtcgctaaggcctcaggaggagaaacacgggacatgccgtggaagccggggcctcacagargtgagcagggactgccactggttttgtcctggggcccagtgggggccaacatcacctccttcccctcccatggcaaagagccagcccgcggggtggctac

SEQ ID NO: 29874 - DNA, 201 bp, Homo sapiens
atccctctgtcacccttggaggcagagaactttgcccgtcagtcccatggggaatgtcaacaggcaggggcagcactgcagagatttcatcatggtctccyaggccctcaggctcctctgccttctgcttgggcttcagggctgcctggctgcaggtgcgtccggggaggttttctccataaacttggtggaagggcagtg

SEQ ID NO: 29875 - DNA, 201 bp, Homo sapiens; identical to SEQ ID NO: 6451

SEQ ID NO: 29876 - DNA, 201 bp, Homo sapiens
ctcccccatccctctgtcacccttggaggcagagaactttgcccgtcagtcccatggggaatgtcaacaggcaggggcagcactgcagagatttcatcatsgtctcccaggccctcaggctcctctgccttctgcttgggcttcagggctgcctggctgcaggtgcgtccggggaggttttctccataaacttggtggaag

SEQ ID NO: 29877 - DNA, 201 bp, Homo sapiens
cccagagccaggtctgagcagctttgcctgggagggatctgcaaagaccccaggatttcagaaagaaattgtgcaatgccagaggttccttggcatgcccrggagggcgagtcatcagagaaacaatgacagcaatgtgacttccacacctcctgtccccccgcccaggtcctgttgttggtgaatggagctcagttgtgt

SEQ ID NO: 29878 - DNA, 201 bp, Homo sapiens
ggggcacgcggtgggcgcttcacggaactcgcatttcccagtcttcgtaacccaggaggaagcccacggcgtcctgcaccggcgccggcgcgccaacgcgytcctggaggagctgcggccgggctccctggagagggagtgcaaggaggagcagtgctccttcgaggaggcccgggagatcttcaaggacgcggagaggac

SEQ ID NO: 29879 - DNA, 201 bp, Homo sapiens
caacagccatcccagctggggcgtggactttgctccagcagcctgtcccagtgaggacagggacacagtactcggccacaccatggggcgcccactgcacmtcgtcctgctcagtgcctccctggctggcctcctgctgctcggggaaagtcgtaagtgcccctcgcccttcagacccaaaagcagcgccagggagcaggg

SEQ ID NO: 29880 - DNA, 201 bp, Homo sapiens
tcgcatttcccagtcttcgtaacccaggaggaagcccacggcgtcctgcaccggcgccggcgcgccaacgcgttcctggaggagctgcggccgggctcccwggagagggagtgcaaggaggagcagtgctccttcgaggaggcccgggagatcttcaaggacgcggagaggacggtgagcccagcctcggggcgccccgcg

SEQ ID NO: 29881 - DNA, 201 bp, Homo sapiens
gagctgcctaatgcacagctggacaggtgggggcagcagggctgtccaggacccccgggtctgtccaaaagcagaggcccagacaggacagaagccaggcmagcctggggacagcggaggaagaggaggcccctctggtggggacacgagagacagggaccctagacttgtttgcatcctggacaaagtggacaggcaggg

SEQ ID NO: 29882 - DNA, 201 bp, Homo sapiens; identical to SEQ ID NO: 6454

SEQ ID NO: 29883 - DNA, 201 bp, Homo sapiens
cgtaacccaggaggaagcccacggcgtcctgcaccggcgccggcgcgccaacgcgttcctggaggagctgcggccgggctccctggagagggagtgcaagsaggagcagtgctccttcgaggaggcccgggagatcttcaaggacgcggagaggacggtgagcccagcctcggggcgccccgcgccgcggacactgcaggc

SEQ ID NO: 29884 - DNA, 201 bp, Homo sapiens
agggggtgaggtggcaggtggtggaaagggcctgaggggggcttcttccttccaggcgagcacgacctcagcgagcacgacggggatgagcagagccggcrggtggcgcaggtcatcatccccagcacgtacgtcccgggcaccaccaaccacgacatcgcgctgctccgcctgcaccagcccgtggtcctcactgaccat

SEQ ID NO: 29885 - DNA, 201 bp, Homo sapiens; identical to SEQ ID NO: 6456

SEQ ID NO: 29886 - DNA, 201 bp, Homo sapiens
ggaagcccacggcgtcctgcaccggcgccggcgcgccaacgcgttcctggaggagctgcggccgggctccctggagagggagtgcaaggaggagcagtgcyccttcgaggaggcccgggagatcttcaaggacgcggagaggacggtgagcccagcctcggggcgccccgcgccgcggacactgcaggcggcggtgaacca

SEQ ID NO: 29887 - DNA, 201 bp, Homo sapiens; identical to SEQ ID NO: 6459

SEQ ID NO: 29888 - DNA, 201 bp, Homo sapiens
gagtcatcagagaaacaatgacagcaatgtgacttccacacctcctgtccccccgcccaggtcctgttgttggtgaatggagctcagttgtgtggggggamcctgatcaacaccatctgggtggtctccgcggcccactgtttcgacaaaatcaagaactggaggaacctgatcgcggtgctgggtgggtaccactctccc

SEQ ID NO: 29889 - DNA, 201 bp, Homo sapiens
attcactagaaggactcatagaatccactgaagtggatacactcacaggtaccgtttattacagcaaaggatgcaggcttaagtctgcagagggaccaggsacaagcttccccttgtcctctccctgtggggtcatgtggacagtccttaattctcccagaatgacgtgtgacgagacgtgggaagtactgccaacttggg

SEQ ID NO: 29890 - DNA, 201 bp, Homo sapiens
acctcctgtccccccgcccaggtcctgttgttggtgaatggagctcagttgtgtggggggaccctgatcaacaccatctgggtggtctccgcggcccactrtttcgacaaaatcaagaactggaggaacctgatcgcggtgctgggtgggtaccactctcccctgtccgaccgcggtgctgggtgggtgccactcttccct

SEQ ID NO: 29891 - DNA, 201 bp, Homo sapiens
cccagtcttcgtaacccaggaggaagcccacggcgtcctgcaccggcgccggcgcgccaacgcgttcctggaggagctgcggccgggctccctggagaggragtgcaaggaggagcagtgctccttcgaggaggcccgggagatcttcaaggacgcggagaggacggtgagcccagcctcggggcgccccgcgccgcggac

SEQ ID NO: 29892 - DNA, 201 bp, Homo sapiens
cagggcatattactgttatctctgttatgtgagtttgtgttatacaatatatctaaatggctttcttagaaaatagaacatatctttcttatgtctgtatscatatggccatttcattgcctggcaatcccattcactaactatattctagctagatgatctggatatgtatgtagataatatagatagattctgctgctc

SEQ ID NO: 29893 - DNA, 201 bp, Homo sapiens
acacacacacacacacacacacaccttggtgagctatttttcctagagatataaagatccaaagactaaagaagccaagattctgacaaattaaaactaaygtatgctggcaaaataagaaactctaaaaaattaatgcagaatttagtgaaagaatttacagcattgatattatcaattatctaccaataatattaaatt

SEQ ID NO: 29894 - DNA, 201 bp, Homo sapiens
atctataccaaaatgtgggtcgactctgggagcatcgtaattccctatgataacataggtaagtcatccatctgtaagactgttgactgttaccctcaaaytctctgcttaccccctgctaggctctcagaccaggctcacacctgaccgttattgccctagtaggagtttttgcctgatttcattataaagtcacccctg

SEQ ID NO: 29895 - DNA, 201 bp, Homo sapiens
tgagatatgggtggggacagagagccaaaccatatcactcccaaaacagcaggatgcaaggatacccaaggggggtttttctggggcatctcagcagtacrtgtgtcaacgccactctttcacatctttttttccattattccctccttactccccctcatttatctttttttttcctactcttagtacccttagtcatta

SEQ ID NO: 29896 - DNA, 201 bp, Homo sapiens
gccgtggggcatttgtgttggcttcctctgtcagtttggaatcatgcccctcacaggattcatcctgtcggtggcctttgacatcctcccgctccaggccrtagtggtgctcattataggatgctgccctggaggaactgcctccaatatcttggcctattgggtcgatggcgacatggacctgaggtaagattatctata

SEQ ID NO: 29897 - DNA, 201 bp, Homo sapiens
tatatctgcaatgaccctgttcccacataatgtcacatcctgaggtgcggagtgttaggacttcaacatatgaatttgggggaaagggagacataatcaayccataacagctgcaaacactgaagacaggatcaaaatccttagcccttcatcaatcacattcatcctatttctgaatatgtcattctaaataggcccatt

SEQ ID NO: 29898 - DNA, 201 bp, Homo sapiens; identical to SEQ ID NO: 6692

SEQ ID NO: 29899 - DNA, 201 bp, Homo sapiens; identical to SEQ ID NO: 6695

SEQ ID NO: 29900 - DNA, 201 bp, Homo sapiens
atcactttcttatactgctttaaaaggatgtttgaaaaagaaacaacctatgaaaagttagaagttgttggtgctaaattatatgaaatcagctattggamaaatgagtgttaaataacatggagaaacaaaccacatgtcgcaaaaacagcagtaaatttaacatggtgaaattgaagtatgactcttttatctggccag

SEQ ID NO: 29901 - DNA, 201 bp, Homo sapiens
tagacaggcactttacagagagaacatgggcatatgaggcatacgtaaaacaaacagagcatggggaaagaaaagagcaagatcaccagcccactggagaycaaagttacaacatccacctctacaagcagaagccacacactgtgggtgtaaagaaagacagagtccctttcccagtcaaccccaggtccctgaaaaact

SEQ ID NO: 29902 - DNA, 201 bp, Homo sapiens
aatcaaaaccatagggttttccatccatgaaatggtttcattctcattatatgattactgttgagtgggggcctgaagtcattagccatgcagtcttctcytttagaatgtccttctttatatgtgtgtagagagagagaggtgggatctcactatgttgctaatgctgttcttgaactcctgtgctcaagtgatccttcc

SEQ ID NO: 29903 - DNA, 201 bp, Homo sapiens
ggcatattactgttatctctgttatgtgagtttgtgttatacaatatatctaaatggctttcttagaaaatagaacatatctttcttatgtctgtatgcayatggccatttcattgcctggcaatcccattcactaactatattctagctagatgatctggatatgtatgtagataatatagatagattctgctgctcggg

SEQ ID NO: 29904 - DNA, 201 bp, Homo sapiens
gaattacctgagactggataatttataaagaaaagaagtttagttggctcacagttccacagactgtacaggaagcatggcaggggaggcctcaggaaacktacaatcatggcagaaggggaaggggaagcaggcagcttctacatggctggagcagaggaagagagcaaagaaggaggtgtgcacacttatagacaacca

SEQ ID NO: 29905 - DNA, 201 bp, Homo sapiens
ggaagctggggcgacattttatccccaattacaaataaagaaactacagttcagaaagttcctgatttactgaaggaaacagaataggagtagttgaatcyggaagccaaatcttccaggctgtcattgaaatgggttgtctttttgttctgacaaggataattttcaagtcagaaaatcttcagactaattgcaaatggt

SEQ ID NO: 29906 - DNA, 201 bp, Homo sapiens
atctatacctctaactactgcaatcaccttggagtaatccttccagaagcctatggcattctgaatgtccaactgatttgccacgcatctaaagtatgacyaaggaatcaaacaggagagaataaatgcattcccgtgccttctagcacagctgcttagctattggaattgggggatttatattttgtgtttgtgttttta

SEQ ID NO: 29907 - DNA, 201 bp, Homo sapiens
ctggagccagacatcacaatctaagctaaaacctgactggctaataatttaaaacttttctaaataggtataggcaatagacaacaaaggaaaagaggacrttgcttgtgaaaggacttagaaaagtaataatatttccaaataaggaaggggcataggctgcaagctggaatgtacctgtgagcatgttcagcataaata

SEQ ID NO: 29908 - DNA, 201 bp, Homo sapiens
tcaggtgcaggtgcccaggtgtgagcggctaggtgcagatgctcaggtgtggcagcagggagtgcacttggctcatctgccctggggagggccagctcccracagaagtaggccagaggtcagtcccaggaaatgcttggagcagccagcagggtagggccaagtcatgatacacctaggagtgggaggggaggcctcttt

SEQ ID NO: 29909 - DNA, 201 bp, Homo sapiens
acagctgcaaacactgaagacaggatcaaaatccttagcccttcatcaatcacattcatcctatttctgaatatgtcattctaaataggcccattcattcygaagtcatgcaagtccccagaaagaaaatactgactgcctcttttttgctcaaagtcttctggaccattcggcttacaaggcagatggggctcttccatt

SEQ ID NO: 29910 - DNA, 201 bp, Homo sapiens
gtacccagtgatcaattaggaacctgctgtctcatttcaactggtgctggtttctccagaagctttagaaaagtcatacaaaccctataccttcatatggyttagtctttcacataagaaaacacatgatatccaccttgcaattgctttttttttttaaggaaagccctataaaacaacataggatggcaagtgctattc

SEQ ID NO: 29911 - DNA, 201 bp, Homo sapiens
tataaattcaaggcagtgtatgtattttttatatacatgccttttatagaacttcagattttttcgtgtaagataatattttcttttgctaatttaggctyctatattatttcttaaaattcgttatctgtgaattgttttaaatctcattttgagtggtttgattttgttcttacattcattcaaatagcatcaacttcc

SEQ ID NO: 29912 - DNA, 201 bp, Homo sapiens
acccataatacccttaagaaattactactcttgacaacctcaatgacgacctgttgagagaagggcctttcagagaaatttctcatttctctaagtttccygattctatttggtggaacacaagatacaaaaacatggtaacataaatgatcacagcagagagatgcagggtgcggtggctcccgcctgtaatcccagcac

SEQ ID NO: 29913 - DNA, 201 bp, Homo sapiens
aacttgattaaagaccaagttatggattcaatgtgtaaccatgagtggatgctttttcatctacatagacaggcactttacagagagaacatgggcatatraggcatacgtaaaacaaacagagcatggggaaagaaaagagcaagatcaccagcccactggagaccaaagttacaacatccacctctacaagcagaagcc

SEQ ID NO: 29914 - DNA, 201 bp, Homo sapiens
gccgtagtggtgctcattataggatgctgccctggaggaactgcctccaatatcttggcctattgggtcgatggcgacatggacctgaggtaagattatcyatacctctaactactgcaatcaccttggagtaatccttccagaagcctatggcattctgaatgtccaactgatttgccacgcatctaaagtatgactaag

SEQ ID NO: 29915 - DNA, 201 bp, Homo sapiens
cttttacaattgagggaacttaggcacagaatgattaagtaactttcccaatgtcacttagctggcaaagggtgaaacttgaactccagaagtttagctgkatattctgttctgttgaccacagcactcaagtacataatatttatccaaaaatacacagtgtcaaaattctcataaatacatcacattagaataaaattc

SEQ ID NO: 29916 - DNA, 201 bp, Homo sapiens; identical to SEQ ID NO: 6693

SEQ ID NO: 29917 - DNA, 201 bp, Homo sapiens
agttaaatgtggagactgtaagtggaagaataacagagtctagagctcttagatacatcttgcaatgcctttggtagcacactttccagaaattgagatgkcaaatgacttcagttcaagaaacattttgaaagatgggtaattccaattctttactttcaagaaaactggaagaggatcccatcaagttgttaatccttg

SEQ ID NO: 29918 - DNA, 201 bp, Homo sapiens
tatttaacctctatttttacattctattttttttaataaaaaagctagtttttaaagcctcatgacattgtaatgaggaatataaagtgaaggcacgcaasaaaactaatgtaaatgttaggtcacaaaatgtccagagatatagtttggttttgtttggttttgcttttctctctctctctcttttctttttttcttttc

SEQ ID NO: 29919 - DNA, 201 bp, Homo sapiens
aaaacatgacttgaatctgcaaccaaatgggcttgttgaaaccaccctttcctccactgcctcacacatgtgcagacatgtactcacacatgcatagacaytgcaggtcttgcctcgcagggcagagcctaccctgatgagctgacattaaaaataagctgagaaatgcttgctatcagagaccagcagctccacagaaaa

SEQ ID NO: 29920 - DNA, 201 bp, Homo sapiens
gcctccagtctacagaaaatgtgatctgccatgtgaatcataggttataatctctatgcaaagtaattttgcagtttattattataaaatttacttaactrtctgtgtattgttttctagtttatgtggcatacaagaaatgtcatggaaaaaacaaggcagaaattccagagagcaaagaaaatggaacggagccagagt

SEQ ID NO: 29921 - DNA, 201 bp, Homo sapiens
gaacaatatttcctgtggcgggttactccctggggtttcttctggctagaattgctggtctaccctggtacaggtatggcatttagtaaatcacattgggrattttaatctgtaatatctgttgtattcctttgctagaggtgccataagacagaaccacaaactgagtggcttaaacaacagacacttattgtctcatgg

SEQ ID NO: 29922 - DNA, 201 bp, Homo sapiens; identical to SEQ ID NO: 6700

SEQ ID NO: 29923 - DNA, 201 bp, Homo sapiens
agccaaatcttccaggctgtcattgaaatgggttgtctttttgttctgacaaggataattttcaagtcagaaaatcttcagactaattgcaaatggttgckacatgtcctattgtgttcttaaagcttaaagcatgggacaagcgtcagtatttccagtgggctgattgcagcctcctggcttggagtacatagaaagaca

SEQ ID NO: 29924 - DNA, 201 bp, Homo sapiens
taacacactaagtggcaccgcctgctttcagcccagacagtgtgtggctttagagctcaggctttaaaggcagagaatgtacgctgtgtacagatcccttygaagaggacccggaagactcactccccaaaaatctttctttgacccactgtcctagtactagagatagcatcatttggcattaatgtctccatgtagata

SEQ ID NO: 29925 - DNA, 201 bp, Homo sapiens
gacgatgctacaggttgagacagattcttgcaggactttcttatcatgaatcgaaaataaaaattttctcccattcgggaggttgtttgtctactctgctkatagtttcctttgctgtgcagaagctctttagtttaattagattccaagaaaacaatgaacaaacccattaaaaagtgggcaaatgacatgaacggatgc

SEQ ID NO: 29926 - DNA, 201 bp, Homo sapiens
tcttccctagaacaccacaggtggatgtatcaatctgcccattgcctttcagcgtcagcatgaccacatgctccacactgcttgccctcggaatgatgccrctgtgcctccttatctataccaaaatgtgggtcgactctgggagcatcgtaattccctatgataacataggtaagtcatccatctgtaagactgttgact

SEQ ID NO: 29927 - DNA, 201 bp, Homo sapiens
aatggtttcaaaatagagcactgagtaagcaatccagagtgttacaacagaaaactgctagacgaaacacactgtttctaacactcgactgtgagccacaycttgacccaaaagttgatttaatggcaaagtcatgctccaggagtcaaatttactagtaatgactctgtctcatttcaccctcatcccaaaaaccttatt

SEQ ID NO: 29928 - DNA, 201 bp, Homo sapiens
tctttcttcaggctgcttgttcttctgtttttctctttcctgtgtcacctgttctgctgatcacattgcccttctgtcatctttaggtacatctctggttkctctcgttgttcctgtttccattggaatgtttgttaatcacaaatggccccaaaaagcaaagatcatacttaaagtaagtatcccagttcacaccattaa

SEQ ID NO: 29929 - DNA, 201 bp, Homo sapiens
tgagacactgcgcccagcctagcatgcccttctttattgcagtcacaggaaaaatttctacccattctttaagacactccactgaactatcacctcttggktttactctattctgtcctcagggcatattactgttatctctgttatgtgagtttgtgttatacaatatatctaaatggctttcttagaaaatagaacata

SEQ ID NO: 29930 - DNA, 201 bp, Homo sapiens
aagttttctcagcaaggcaattttactttctgcagaaagagtgctcctcacagatggcacaatggtgacagcacacctgaacaatggagggaagtaattcrtatcccttatgcagcttgtccctgctactgtgtcctgtctccattggctggagccagacatcacaatctaagctaaaacctgactggctaataatttaaa

SEQ ID NO: 29931 - DNA, 201 bp, Homo sapiens
taagctttggggacatgggagcttgcacctattccttaacccagagtgtcactagttaatggtcataggattttgcatccagacacttgaattgaagaaaytttttttttttttgagatggagtctcactctgccacccagcctggagtgcaggggcgtgatctcggctcactgcaaatttcaccccctgggttcaagcaa

SEQ ID NO: 29932 - DNA, 201 bp, Homo sapiens
gaaacataactaatgggtactaggcttaatacctaggcaatgaaataatctgtacaacaaacccccatgacacaagttgacctatataacaaacatgcacrtatacccctaaacttaaaataaaagttaaattaaaaaataaaaataaaacagcatcttccctagaacaccacaggtggatgtatcaatctgcccattgcc

SEQ ID NO: 29933 - DNA, 201 bp, Homo sapiens
gcggtggctcccgcctgtaatcccagcactttggaaggcctaggcgagcggatcacctgagcccaggagtttgagaccagcctggacaacatggtgaaacyccatctctacaaaaaatttaaaaattagcctggcatggtggctcatgcctgtattcccagctactcgggaggctgaggtgcaaagatcacttgagcccag

SEQ ID NO: 29934 - DNA, 201 bp, Homo sapiens; identical to SEQ ID NO: 6686

SEQ ID NO: 29935 - DNA, 201 bp, Homo sapiens
tattacaatgtttgtagcctcttctctctctcctactcttaccattaccattagaccaaaaaaaaaattgtcctccttgacatgccctattcagtatgggyttttgatatacaagattcttcagactccaggagagaaccttaatatcatatataacctcctgacaagagactttagggtgaccctccactaccacctgct

SEQ ID NO: 29936 - DNA, 201 bp, Homo sapiens
cttccatttctgagaaagactgcttctgtgatttagggtgattgagggaatatacaactgaattagaataaactttgtgaatactaattggggatgatctktattacaatgtttgtagcctcttctctctctcctactcttaccattaccattagaccaaaaaaaaaattgtcctccttgacatgccctattcagtatggg

SEQ ID NO: 29937 - DNA, 201 bp, Homo sapiens
gggatgagggtcaaaggaagaacaagagagttcctggtataccaggaataggcatttcccacagaactatcacgaacaaaagacaagatgtgggcaaaatwgtaaatcagtaacaatcaccaggtacactatatgccccaaatacctgggtttttttccccactgaccttggaaaaaaatcccaatgagctgcctcagaaa

SEQ ID NO: 29938 - DNA, 201 bp, Homo sapiens; identical to SEQ ID NO: 6691

SEQ ID NO: 29939 - DNA, 201 bp, Homo sapiens; identical to SEQ ID NO: 6689

SEQ ID NO: 29940 - DNA, 201 bp, Homo sapiens; identical to SEQ ID NO: 6694

SEQ ID NO: 29941 - DNA, 201 bp, Homo sapiens
gggtgaccctccactaccacctgcttttgccttcatgctgcttgactctctggctgctctgtcagcggacgccttccatagagctaaaaaccatagtttaygtgagtggtgaccattatatccctctcaaagaacctgtctgctgagtgaggaattttgattccacaatactcactgtaataatttaataatttaagccat

SEQ ID NO: 29942 - DNA, 201 bp, Homo sapiens
cacaaaaagcatcagggagaagagatggtgacttttcaggtgaatctgcttgtggccaaaacccatagttgagaggacacagaaacatcctatctcctttktgtctgctctctccccagacacaggcaaatatccggtgtcttcatccttcttaatggcctcagcgacaccatgcaaggacttctcatttcctttctttgg

SEQ ID NO: 29943 - DNA, 201 bp, Homo sapiens
tccctgctactgtgtcctgtctccattggctggagccagacatcacaatctaagctaaaacctgactggctaataatttaaaacttttctaaataggtatrggcaatagacaacaaaggaaaagaggacgttgcttgtgaaaggacttagaaaagtaataatatttccaaataaggaaggggcataggctgcaagctggaa

SEQ ID NO: 29944 - DNA, 201 bp, Homo sapiens
gttgcttgtgaaaggacttagaaaagtaataatatttccaaataaggaaggggcataggctgcaagctggaatgtacctgtgagcatgttcagcataaatrtcttggttaaagtacaaggacatagaatgtacttattcctttatatctaacagctacatagaatagggcttaacaaagagttactagcacaaagtaaggg

SEQ ID NO: 29945 - DNA, 201 bp, Homo sapiens
ttcaaagcttttttaaaaaagtaatcttttccaaaccacaagctgcagctgaggaggtttatcctgttggtagcaggaaaaaaaaagcaaaatacactttytttgtaatgatgaggagctctgggtgcaatcataaaataaaactgtttgtcaaacattagaacctgtagtgagacagtggtcaactccatcaaatatagc

SEQ ID NO: 29946 - DNA, 201 bp, Homo sapiens
ccatgtagatagcctactcagccagaccctcttattaaaatgcaaacactctgagcagggatgataccagacactagttcttctgaacacacatttgccarattgccaataacttactcagtgctaagaatttatgtctaccctgccgcttgcatgctttcttttgatttttaagtcagcttccgcttcttgtcccaagct

SEQ ID NO: 29947 - DNA, 201 bp, Homo sapiens
attacaaataaagaaactacagttcagaaagttcctgatttactgaaggaaacagaataggagtagttgaatctggaagccaaatcttccaggctgtcatygaaatgggttgtctttttgttctgacaaggataattttcaagtcagaaaatcttcagactaattgcaaatggttgctacatgtcctattgtgttcttaaa

SEQ ID NO: 29948 - DNA, 201 bp, Homo sapiens
ggaattttaatctgtaatatctgttgtattcctttgctagaggtgccataagacagaaccacaaactgagtggcttaaacaacagacacttattgtctcayggtttcagagactagaagtgaaaatgaaggtgtcactgaattgattctttctaagggctatgatggagggatcccttactggccttcctcgtggcttgca

SEQ ID NO: 29949 - DNA, 201 bp, Homo sapiens
tctcattgctataaagaattacctgagactggataatttataaagaaaagaagtttagttggctcacagttccacagactgtacaggaagcatggcagggraggcctcaggaaacgtacaatcatggcagaaggggaaggggaagcaggcagcttctacatggctggagcagaggaagagagcaaagaaggaggtgtgcac

SEQ ID NO: 29950 - DNA, 201 bp, Homo sapiens
cttgcctcgcagggcagagcctaccctgatgagctgacattaaaaataagctgagaaatgcttgctatcagagaccagcagctccacagaaaagaggaatkctgatcacccatcagccgagtctcttctctccgggggaaagattgaatgaaggcagggagggaatgggaacgttgttctagttcaagtccttctacagag

SEQ ID NO: 29951 - DNA, 201 bp, Homo sapiens; identical to SEQ ID NO: 6687

SEQ ID NO: 29952 - DNA, 201 bp, Homo sapiens
agggctgaatgcctgaagaagcttgtggctgccctgagcaaatgtctcctaaagatttatgctaggtcttcctgaagtgcagtcatccctctcgccatgaktagccatagaactaagaatggtgatttctttctctaagcagcctccagtctacagaaaatgtgatctgccatgtgaatcataggttataatctctatgca

SEQ ID NO: 29953 - DNA, 201 bp, Homo sapiens; identical to SEQ ID NO: 6688

SEQ ID NO: 29954 - DNA, 201 bp, Homo sapiens
gcataggctgcaagctggaatgtacctgtgagcatgttcagcataaatatcttggttaaagtacaaggacatagaatgtacttattcctttatatctaacmgctacatagaatagggcttaacaaagagttactagcacaaagtaagggggcttgaagaaagttagtctttaaaagaaattattatttctaatgtttatta

SEQ ID NO: 29955 - DNA, 201 bp, Homo sapiens
aagtacaaggacatagaatgtacttattcctttatatctaacagctacatagaatagggcttaacaaagagttactagcacaaagtaagggggcttgaagraagttagtctttaaaagaaattattatttctaatgtttattattattattattttcctttaacaacaagggacactttgaagaggaaactttttactttc

SEQ ID NO: 29956 - DNA, 201 bp, Homo sapiens
cttattcctttatatctaacagctacatagaatagggcttaacaaagagttactagcacaaagtaagggggcttgaagaaagttagtctttaaaagaaatkattatttctaatgtttattattattattattttcctttaacaacaagggacactttgaagaggaaactttttactttctacagatattaaccctgctcac

SEQ ID NO: 29957 - DNA, 201 bp, Homo sapiens
aagagttactagcacaaagtaagggggcttgaagaaagttagtctttaaaagaaattattatttctaatgtttattattattattattttcctttaacaasaagggacactttgaagaggaaactttttactttctacagatattaaccctgctcaccatgtttgcccaggcctccaagctcacctttttgctgttggttt

SEQ ID NO: 29958 - DNA, 201 bp, Homo sapiens
tttcattctcattcttctttctacctttctttcctctgatatctactgtgtaaacttgattaaagaccaagttatggattcaatgtgtaaccatgagtggwtgctttttcatctacatagacaggcactttacagagagaacatgggcatatgaggcatacgtaaaacaaacagagcatggggaaagaaaagagcaagatc

SEQ ID NO: 29959 - DNA, 201 bp, Homo sapiens
aacggttgcttttgaaacggggatgcagaacacgcagctatgttccaccatcgttcagctctccttcactcctgaggagctcaatgtcgtattcaccttcycgctcatctacagcattttccagctcgcctttgccgcaatattcttaggatgtaaggaatcatgccaatcccatttcatgataatctttgaaaaatcctg

SEQ ID NO: 29960 - DNA, 201 bp, Homo sapiens; identical to SEQ ID NO: 6697

SEQ ID NO: 29961 - DNA, 201 bp, Homo sapiens
cagcgtcagcatgaccacatgctccacactgcttgccctcggaatgatgccgctgtgcctccttatctataccaaaatgtgggtcgactctgggagcatcrtaattccctatgataacataggtaagtcatccatctgtaagactgttgactgttaccctcaaactctctgcttaccccctgctaggctctcagaccaggc

SEQ ID NO: 29962 - DNA, 201 bp, Homo sapiens
gcatggggaaagaaaagagcaagatcaccagcccactggagaccaaagttacaacatccacctctacaagcagaagccacacactgtgggtgtaaagaaaracagagtccctttcccagtcaaccccaggtccctgaaaaacttcatctggcctcatctggtcaggaaagaaaagcaattctgccatggatttcagcaggt

SEQ ID NO: 29963 - DNA, 201 bp, Homo sapiens
aagaaagacagagtccctttcccagtcaaccccaggtccctgaaaaacttcatctggcctcatctggtcaggaaagaaaagcaattctgccatggatttcrgcaggtggtgctgcttatgtgttatcccgttggcttgggctgcctcaaaaagatgaatactcttagcaggaggggccaaacagattcagcacattaaaat

SEQ ID NO: 29964 - DNA, 201 bp, Homo sapiens; identical to SEQ ID NO: 6699

SEQ ID NO: 29965 - DNA, 201 bp, Homo sapiens
tcaaccccaggtccctgaaaaacttcatctggcctcatctggtcaggaaagaaaagcaattctgccatggatttcagcaggtggtgctgcttatgtgttawcccgttggcttgggctgcctcaaaaagatgaatactcttagcaggaggggccaaacagattcagcacattaaaatataggaccaaaacctaaccacacta

SEQ ID NO: 29966 - DNA, 201 bp, Homo sapiens
acctaatctttcttcaggctgcttgttcttctgtttttctctttcctgtgtcacctgttctgctgatcacattgcccttctgtcatctttaggtacatctytggttgctctcgttgttcctgtttccattggaatgtttgttaatcacaaatggccccaaaaagcaaagatcatacttaaagtaagtatcccagttcacac

SEQ ID NO: 29967 - DNA, 201 bp, Homo sapiens; identical to SEQ ID NO: 6704

SEQ ID NO: 29968 - DNA, 201 bp, Homo sapiens
atctcagggatttaattgatagaagccactagagaggaaaagggcttggactgtctagtgtaattaagctttaaaaccttaattctgagctcctttggggracaagggaaactagaagcagggttataataggaccactctcaaactccatgagttttattggaaaatgagacaggaatgaggctccaataaacagcaata

SEQ ID NO: 29969 - DNA, 201 bp, Homo sapiens
agggcttggactgtctagtgtaattaagctttaaaaccttaattctgagctcctttgggggacaagggaaactagaagcagggttataataggaccactcycaaactccatgagttttattggaaaatgagacaggaatgaggctccaataaacagcaataacaagcacacaaaacaacagccaaacaacagtgtgtttat

SEQ ID NO: 29970 - DNA, 201 bp, Homo sapiens
cttttgggttcaagtgattcttgtgcctcagccttccgagtagctgggattacaggtgccttccaccatgcccagctaattttttttttttttgtattttyagtaaagatggggtttcaccatgttggccaggctggtctcgaactcctgatctcaggtgatccgcctgcctcagcctcccaaagtgctgggattataggc

SEQ ID NO: 29971 - DNA, 201 bp, Homo sapiens
ctcagccttccgagtagctgggattacaggtgccttccaccatgcccagctaattttttttttttttgtatttttagtaaagatggggtttcaccatgttrgccaggctggtctcgaactcctgatctcaggtgatccgcctgcctcagcctcccaaagtgctgggattataggcgtaagcctccgtgcctggcctgagtg

SEQ ID NO: 29972 - DNA, 201 bp, Homo sapiens
caccatgcccagctaattttttttttttttgtatttttagtaaagatggggtttcaccatgttggccaggctggtctcgaactcctgatctcaggtgatcygcctgcctcagcctcccaaagtgctgggattataggcgtaagcctccgtgcctggcctgagtgatattttagtgctctttttgggtggagctgtggtccc

SEQ ID NO: 29973 - DNA, 201 bp, Homo sapiens
ggggtttcaccatgttggccaggctggtctcgaactcctgatctcaggtgatccgcctgcctcagcctcccaaagtgctgggattataggcgtaagcctcygtgcctggcctgagtgatattttagtgctctttttgggtggagctgtggtcccagcctaacttccaggacttcagccggctccaggacacactgtatttc

SEQ ID NO: 29974 - DNA, 201 bp, Homo sapiens
ttctcacttataagtgggagctgaacaatgtgaacacatagacacagggaagggaacaacacacactggggcctactgtgggttggggagaaggagagcaycaggaaaaatagctaatgcatgctgggcttaatacctaggagatggattaataggtgcagcaaatcaccatggcacatgtttacctgtgtaacaaacctg

SEQ ID NO: 29975 - DNA, 201 bp, Homo sapiens
gctgggcttaatacctaggagatggattaataggtgcagcaaatcaccatggcacatgtttacctgtgtaacaaacctgagcattctgcacatgtatcccrgaacttaaaagaaaaaaagaaggtcagtgggaagtcatagatacatcctgtggtttttgaagattagtttgtatcttatagacacacattcactttgaat

SEQ ID NO: 29976 - DNA, 201 bp, Homo sapiens
agggcaacgacagatgatttttaatattctttgtactttgtaaattttctcagtgagtatgtattcttttaaccagcaaacataattaatgttgttataaktctgcttgcatcacatttcctattcctgcagttcttattgtggaaaaattcttaatcaggcaggatgaatagcctcttctccctgattctgtctttgttt

SEQ ID NO: 29977 - DNA, 201 bp, Homo sapiens
ggattccgagttttaattggactagagataattaagattcacttgtgaacaatagaccattgctcttctgacatggaaaatttttggtttttatctcaatwcgtgtgtatgcagaagtgatgtgaaatctgtcattttcttagctaggaaaagtaatttgtggcagaatattttatcttaagaagtatattcctatggctt

SEQ ID NO: 29978 - DNA, 201 bp, Homo sapiens
atggtgatagaagggatcgatggatttctatgaactcatcctaacttgtctctcaaagtctagattttggtccctttactctgccaaatctatgatgccargtattgcatcgagatatgttgacatattttcaaatgtataagcttattagcatttcataaactacacttgcaaataaagatttcaaagaccatggcagtt

SEQ ID NO: 29979 - DNA, 201 bp, Homo sapiens
ccaagtattgcatcgagatatgttgacatattttcaaatgtataagcttattagcatttcataaactacacttgcaaataaagatttcaaagaccatggcrgttttgtcatttccaaagtgattcatgttttagggcaaatccgcagaatgacgtctagattgtctctgatgctctgcattacctcttgttggtggcctgc

SEQ ID NO: 29980 - DNA, 201 bp, Homo sapiens
gaggcagttggaatgccttaaatgtagtgcaattcaggtgctatgcaaagattactgtcctctaggagattatgttgtaaactggtgcacacttcttcacygaaagtccttgaggaagaaagaagctaataataatgaaatgatatatcgaaaggagaaaataacaaaacctgatgatggagtaattcactagtatatgca

SEQ ID NO: 29981 - DNA, 201 bp, Homo sapiens
acatagaaaacagactctttgaactttttatcctctatgttcaactggacttttaaatctgtgtgtataaatagagaattacttccctaggaccaccagaraaacaaaatttactccaagcataattgtgcttgtctctcaatggttaagttaacttttattttgcaaaccaatttgttacttattttgcaaaccagtttc

SEQ ID NO: 29982 - DNA, 201 bp, Homo sapiens
gttaacttttattttgcaaaccaatttgttacttattttgcaaaccagtttcttacttgtcttcttctctcttgaggccgtagtgggccatccgcacagcktgtggcccggtttgattctccttgcactcttctgatgggaggccccaagtgatgactgcttccttatcatctctttgctaatcactcttagtggaaagcc

SEQ ID NO: 29983 - DNA, 201 bp, Homo sapiens
atacatggtcattagtaactctcaggtcaaaaaattttgtttatttccctacttggtttcttatgtgatccttttgcaaactctgcacagatcaaaatatygactatcagtttaaaagaagacttttgttttcctcaaatagaaatatttttttttctctgtagagaatgatctgttttctttccatcaaagactgctctt

SEQ ID NO: 29984 - DNA, 201 bp, Homo sapiens
ggctgcgttggaagttatttctaagaacagaataaccaaagtctgaatcttttccttactcttgactctaattaaagaaaaattaaatcataatatgcgckgttatctctttcttatagccaagctgtctcagtgacaaacccatacccttgtgaagaatggagaagtgtggaggacttccagggaggaaataaaattgaa

SEQ ID NO: 29985 - DNA, 201 bp, Homo sapiens
atgtctcatttaagaagatagtgtctcctctgaatgcaaaccagaacctgcaggcccgtggtaatagccccctttagaagtcttggaggaaatgatgcgtytttgatggccgcaagaccagaatttggcagagtctcaatgaaatcagtctaccacattccctcccacacagcacttagaagtgccttaggttcacaaaaa

SEQ ID NO: 29986 - DNA, 201 bp, Homo sapiens
aatatatttcatggaggtttaattggcactagaattaaattattgtaaaactttctctgaattaagaaatgtcatgctactatgatacagtttgttacttrtgtaacagatgtccagagaagagtaaacttccctaaaacttgaaagcttaagggtagttacccccaaaatggaatcatatcaggagattgcactgaaaag

SEQ ID NO: 29987 - DNA, 201 bp, Homo sapiens
atatatttcatggaggtttaattggcactagaattaaattattgtaaaactttctctgaattaagaaatgtcatgctactatgatacagtttgttacttgwgtaacagatgtccagagaagagtaaacttccctaaaacttgaaagcttaagggtagttacccccaaaatggaatcatatcaggagattgcactgaaaagc

SEQ ID NO: 29988 - DNA, 201 bp, Homo sapiens
cctgaaattgatgtcctccttgtctgctttttagtagtttcaattatctccatggtttactacattttaaaggttgtaaacttttaaagactcattttgtrttcaaggagtttgtttgttcctttgcttttttatagaccaaaggggcacgattccgtcaagggaaagactacgttggagcaatccctgtggatctgaaac

SEQ ID NO: 29989 - DNA, 201 bp, Homo sapiens
ttgtaaacttttaaagactcattttgtgttcaaggagtttgtttgttcctttgcttttttatagaccaaaggggcacgattccgtcaagggaaagactacrttggagcaatccctgtggatctgaaacggcgcttggacagcatcaccagtagccagagctcagccagctctggatttgtggaggagaagtccctcagtga

SEQ ID NO: 29990 - DNA, 201 bp, Homo sapiens
gagtgcaatggtgcgatctcggctcactgaaaccttcgccttttgggttcaagtgattcttgtgcctcagccttccgagtagctgggattacaggtgcctkccaccatgcccagctaattttttttttttttgtatttttagtaaagatggggtttcaccatgttggccaggctggtctcgaactcctgatctcaggtgat

SEQ ID NO: 29991 - DNA, 201 bp, Homo sapiens
tagagttcttgatatgaaactattgtttatccctctgggtacatgacaaaaaacagtgtaagtggcaaatttggaaatgtcctctttatttcccagattayctaggtcagtgttaccttattctacctcctggatttactggttcaatttggctaaaatggaaaaaccagtattgttcctaagggggtatgatgaaggcta

SEQ ID NO: 29992 - DNA, 201 bp, Homo sapiens
tcggctcactgaaaccttcgccttttgggttcaagtgattcttgtgcctcagccttccgagtagctgggattacaggtgccttccaccatgcccagctaattttttttttttttgtatttttagtaaagatggggtttcaccatgttggccaggctggtctcgaactcctgatctcaggtgatccgcctgcctcagcctcc

SEQ ID NO: 29993 - DNA, 201 bp, Homo sapiens
ttcagaggagagtgccatacagatttgaggtgtgggaaggtcagcaatgcctggcttacatgatcacttctccaatgatttaagaattctccttttggccrggtgtgttggctcatgcctgtaattccagcactttgggaggccaaggtgtgtggatcacctgaggtcaggagtttgagaccagcctggccaccatggtga

SEQ ID NO: 29994 - DNA, 201 bp, Homo sapiens
tttccttactcttgactctaattaaagaaaaattaaatcataatatgcgctgttatctctttcttatagccaagctgtctcagtgacaaacccataccctygtgaagaatggagaagtgtggaggacttccagggaggaaataaaattgaagttaataaaaatcaatttgctctaattgaaggaaaaaacaaagtgagttt

SEQ ID NO: 29995 - DNA, 201 bp, Homo sapiens
ttcttttgtgatgggattaccagctagtatcactaatatgaatgttaaaagccattaatctgtttgcagtgtcctgactgacttgtttcatttaactttayccagtgaccagtgtattttcccagaagttaatatatcaacaagttcctttttactaaatttaaactgtttaaaactttgctgataccagaaccatttcaa

SEQ ID NO: 29996 - DNA, 201 bp, Homo sapiens
attcttgaacacttattatccctttccaaaaactttgctttataagaaatttattactataattacttaggcagtaatatttaatagcaatttaatatttrgtgggtaatattactgagcgcatgatctacataaataatggacttcgggccctgccttgatattctggaatgcatctttccccacttgctagcaagaagt

SEQ ID NO: 29997 - DNA, 201 bp, Homo sapiens
ctagtaggcacggcggtgattgccatgttcttctggctacttcttgtcatcatcctacggaccgttaagcgggtaaaaaaataatttcccttctgcccatrcacattggttttcatgattaatgaaaactgactggggttctttgagttgtttcttcccattgttattggctcaatgggcacatttttatttcaatacaat

SEQ ID NO: 29998 - DNA, 201 bp, Homo sapiens
gtagcccacgctgctgccacagcattgcctttaagaattccaagccctgcagctgcaatagctggaatgccacagtttgctaatttccagaataaagagaygagttttacaaagacatctgcatttaaattatccccgtgtatgcttttattaatgtgaattaaatggcttaggagagattcagaaaggaagagttctgtg

SEQ ID NO: 29999 - DNA, 201 bp, Homo sapiens
actttcctactgcctgaactgtctcatggctaccatgccatcctctcagccattgaataatctactgtattcttctacatctgagtaataatgcttttctraaagctgtaattacccttttagacagataggattctaatttataacccgggagcagaccactctgatttctacctacttatctttttgttatattttcaa

SEQ ID NO: 30000 - DNA, 201 bp, Homo sapiens
agatgttgctttaaatgttttctatacacattgagcctctggagtatgggactctgtgtcttacacagttttgtatccttatttagcatctcacctcgtcrgctctttacaaatgtgtactcatttaagtgcttattttcagcattcaggaagaaagaggcatttaatgaaatcagtgttttgcttctctaggtaccagac

SEQ ID NO: 30001 - DNA, 201 bp, Homo sapiens
agaaaagtaggccaaacaaaggctgagatggggacgtgacaagttacaactattccaaaggttgtaaacaccaagcggggagcaaggctggtggcagtgaytcccctggaaaggataaaaggtgtaattttatattaggtaacaatacttcaaattaaggatcaggaagaactatcagttgacagaatgtattcatgcagc

SEQ ID NO: 30002 - DNA, 201 bp, Homo sapiens
acatctattttagactgcagtataaagaataccctagccccttaccaatacccagcccttgggaaaaaacacagtagcaggtgctgtttctctagctttayttgtttaagacacatttcccattagattttccttttaccgaccctcgataacaaggttatttgaaatccccaaggatcccatgctccctttttaaaactc

SEQ ID NO: 30003 - DNA, 201 bp, Homo sapiens
gtccctcagtgatgtagaagaagaggaaggtactggctagtgcttcctgcatgctatggcatgctcttgtcagagcagacagggtgatagggtgttacaargaatttgatcatgggaaaagtccaatactacctcataatttgaaagagacctgaatttctataatagactgcctccattctgtctccccaaaagtgaagt

SEQ ID NO: 30004 - DNA, 201 bp, Homo sapiens
atatgaaactattgtttatccctctgggtacatgacaaaaaacagtgtaagtggcaaatttggaaatgtcctctttatttcccagattatctaggtcagtrttaccttattctacctcctggatttactggttcaatttggctaaaatggaaaaaccagtattgttcctaagggggtatgatgaaggctaatgatactggg

SEQ ID NO: 30005 - DNA, 201 bp, Homo sapiens
ccccttctcatagcattaaaggcctcaggctctttgatgtttctgctaggtagctcttatgttctctctcccaaggggaaggaggagaactgggaccttayagggttttcccaaagagaaaggccctttacacttcttggagattatgacttattattaccatttttttatggccggaattcgccacttagtcagggttcc

SEQ ID NO: 30006 - DNA, 201 bp, Homo sapiens
gttcagaggagagtgccatacagatttgaggtgtgggaaggtcagcaatgcctggcttacatgatcacttctccaatgatttaagaattctccttttggcygggtgtgttggctcatgcctgtaattccagcactttgggaggccaaggtgtgtggatcacctgaggtcaggagtttgagaccagcctggccaccatggtg

SEQ ID NO: 30007 - DNA, 201 bp, Homo sapiens
gccgagtagtaggaagttagctgaagtttggaggatacagagaaaggagaaactgagaagctaaaaggaagagaaagaagtcaagatgaatctcattgtaytattaatgcactagaaaatcaacctgacttgtgataggctgaaattgccttaatagacctttataataacccagcactttgaaatcaggggaagccacat

SEQ ID NO: 30008 - DNA, 201 bp, Homo sapiens
agtgagctgcttaaaatcacatccttgagatgaatccagttcctctgacccctaagtccatgttgtttcctcccatgccaaggagggccctcagagagaawcagtaatgagatgagactacaattccactcctgtgtttacacatttccagttcaagttgagctggccttttagtgtgacagttgttcccacacaccatta

SEQ ID NO: 30009 - DNA, 201 bp, Homo sapiens
tacaattccactcctgtgtttacacatttccagttcaagttgagctggccttttagtgtgacagttgttcccacacaccattattgcctccccctttatcrgaaagccatttgatcatgaactacattccatgtgttttctgtgaccaagtagagtgatgatccgagtcggcagcctcctggctcaccgggtgctttgcat

SEQ ID NO: 30010 - DNA, 201 bp, Homo sapiens
tttctatgccttggtttcctcatctgaagagttgggatagtaatactcacccctagagaggtaccgtggtgaacacatcatgagatgctgcttagacagcwtctggcacagtgtcaggcttgcggcagattatcagtgagggcttcctgaacaagtgaatgcaggaatgattgactacggtaccagtagtgtttgacaact

SEQ ID NO: 30011 - DNA, 201 bp, Homo sapiens
tttttttcagcatcagcataagaaacttgtaaaccgagacctaaaaacccagtctgggagtgagatgaagaaatttttgagcaccttaactatagatggtrtaacccggagtgaccaaggattgtacacctgtgcagcatccagtgggctgatgaccaagaagaacagcacatttgtcagggtccatggtaagctatggtc

SEQ ID NO: 30012 - DNA, 201 bp, Homo sapiens
tggatgtagagatgggtgacaggctggctccccttgaggcataagtctagaagaatagtggaagaaacccactctgtttcccttgacatgaggctacagaragaatttgcatttaactccttttccttagaagctgagaaggtagtgtgaggctgggacttggtctagaagcacatggggaggtggtctaggcttcattta

SEQ ID NO: 30013 - DNA, 201 bp, Homo sapiens
aaacaattccctatcagccttatttacagttcatgacacttcctcttccatgtctcatttaagaagatagtgtctcctctgaatgcaaaccagaacctgcwggcccgtggtaatagccccctttagaagtcttggaggaaatgatgcgtctttgatggccgcaagaccagaatttggcagagtctcaatgaaatcagtcta

SEQ ID NO: 30014 - DNA, 201 bp, Homo sapiens
gaccagctgatttctacactcctgtcccaatgaaaggttgtagccttcttctaaggtgtttttgggttcatcactatattaaacgcttagtgaggaatatragtgaaaacccattttccttcctggacatgctgcctgcagggccactcatggtgattgtggaattctgcaaatttggaaacctgtccacttacctgagga

SEQ ID NO: 30015 - DNA, 201 bp, Homo sapiens
caatataaggggattgggaccagctgatttctacactcctgtcccaatgaaaggttgtagccttcttctaaggtgtttttgggttcatcactatattaaaygcttagtgaggaatatgagtgaaaacccattttccttcctggacatgctgcctgcagggccactcatggtgattgtggaattctgcaaatttggaaacct

SEQ ID NO: 30016 - DNA, 201 bp, Homo sapiens
tagacgaggaaggctttactaagaacttgacatttgagcaatgacctggaaaggggaggggctgagccttacagatatcttggcatgagaatcatttttartttattttacattcatcaacatccatcaaaaagtatttgttaggagtataattagaaacgaggaaggacaggcttcagatgagagcgattaaaagagcta

SEQ ID NO: 30017 - DNA, 201 bp, Homo sapiens
ttcaaaaaatgtttattcggcaagtatcatgtgcagagcaccatgccattgcttgagacacctacattagttttgttggggttgaattgaaagaaaaaatkgtatttctcattatttgaagtaacttttaaactatgtataaacacgagttactaaaattcccttttgcagttttaacatgaagaagttggggaaaacacc

SEQ ID NO: 30018 - DNA, 201 bp, Homo sapiens
gaagaagaggaaggtactggctagtgcttcctgcatgctatggcatgctcttgtcagagcagacagggtgatagggtgttacaaggaatttgatcatgggraaagtccaatactacctcataatttgaaagagacctgaatttctataatagactgcctccattctgtctccccaaaagtgaagtgtggaagccctagact

SEQ ID NO: 30019 - DNA, 201 bp, Homo sapiens
tctttttgtccttccatccagactccaaagaggaagacaaaagttgtcttttcctctcctgtacttcatgtctatcaggcaaaacttctcggaagctttgaaaaaaaaaatagatacataggtgatgaggatgtgcaagattcaggctcagggttttctataagagaaaatcaaatcaaagaatgtctcctccctgtttta

SEQ ID NO: 30020 - DNA, 201 bp, Homo sapiens
gttttagatcaacacagcctgcatttctaggctttgacatgattaccgtctgtcaggattccatgccattgaaaacattttctagttgctgctgagtgacwggggttctcagtccttccaaggaatgtggttttgatgagtaaaaagcagcgtttgatatgtctggcttgactgcacacatgcttcaagttattaaagttt

SEQ ID NO: 30021 - DNA, 201 bp, Homo sapiens
acacatgccccgtaattcccaaattgccacaataggaaaagcacaagtgaaatttaagaacatcccaatttccttgaatatcatgcaagtggccctttggygcctgtcactgtatacaaatttgtcaatctgcgaggccataaacatgttccatcagttggggcctttgcataactcgagagaactgcctttcatctcatt

SEQ ID NO: 30022 - DNA, 201 bp, Homo sapiens
cacgtctctttaccagttataaaagacaataggctcaaagaagaattgagtacaacaaagggcttgctctaaaggctgtttgccaagaggaatacacacarttcttctctcctgaggctttctctgagaaataagactcattgattctggagcttgggccgtgttacctcttttttgcccagttagtttgggtctgatctt

SEQ ID NO: 30023 - DNA, 201 bp, Homo sapiens
gaggcctgcagggaaaaacaatgtggcatgttttaaagttgcattactttaaaaaataaatctgtgcaaagttataggcttatttgctctctcatgttctrttttttcaatttacttgctctagggtataggatttatgatgtggttctgagtccgtctcatggaattgaactatctgttggagaaaagcttgtcttaaat

SEQ ID NO: 30024 - DNA, 201 bp, Homo sapiens
ggaaaatgagaagaattttctctcaaaaattctgtacaattttgctggtgtttttatactattctctgccaacatgcatacacacacacacacacacacaygcacacaaatacacacacacacccacattccaataaccagtacagccacctggcgtatagtagacatacgctcaataaatatgaatgaataaatgaagtt

SEQ ID NO: 30025 - DNA, 201 bp, Homo sapiens
ttaattaatggaaaactcaggaatctttataagtgacttctgaagctgagtttataacttttcatcatatgtcaatctgacttgttggtagaagactttgtttttttttttttgaggcagggttgccctcttgcccaggctgaagtgcagtggtgtgattttggctcactgcaacctccacctcccgggttcaagcaattc

SEQ ID NO: 30026 - DNA, 201 bp, Homo sapiens
ctgctgttgcagggaattagctgcctttgtcccctgtggtttaattaactctttcttcactttgactgactattatgaagcactctgagaatgcttgatgrgatgtgttgggcatagcaatgtgaaatgttatctctctgagatttcaagcatgactccacaccacatcatctctatctctgaggaatggactaggtttcc

SEQ ID NO: 30027 - DNA, 201 bp, Homo sapiens
catgactccacaccacatcatctctatctctgaggaatggactaggtttccagcagcatgttaacattgtatgagtaatgtttgattggccttgaaatctttttttttttttttttttgagacggagttttgctcttgttgcccaggctaaagtgcagtggtgctatctcagctcactgcaacttctgccccccggttcaa

SEQ ID NO: 30028 - DNA, 201 bp, Homo sapiens
aagctatgtaattccctgttgtttttgccattcatgtgagtggcatggcatttaggaaagaggacttggattgatcattgatgctttcattcataaattamaacttctcaggtatctcctgggcttatgtgaagtcagtgcgtctaactacactggagagagaatggtttcacagatgctttaaaccacaagctctgtgtg

SEQ ID NO: 30029 - DNA, 201 bp, Homo sapiens
ttgtggaagaaaccctattatgcacaaaacttgccccaagtttcagctcagagattgcataatcctgaaattgatgtcctccttgtctgctttttagtagwttcaattatctccatggtttactacattttaaaggttgtaaacttttaaagactcattttgtgttcaaggagtttgtttgttcctttgcttttttataga

SEQ ID NO: 30030 - DNA, 201 bp, Homo sapiens
tttttgatgcatgaggtcacaacagatgtgaaagagatcagctgtgccgagacctaatgcacacatgattctctttgcagtgtatccacagggacctggcrgcacgaaatatcctcttatcggagaagaacgtggttaaaatctgtgactttggcttggcccgggatatttataaagatccagattatgtcagaaaaggag

SEQ ID NO: 30031 - DNA, 201 bp, Homo sapiens
gacaaccagacggacagtggtatggttcttgcctcagaagagctgaaaactttggaagacagaaccaaattatctccatcttttgggtaagactcagccayattaaaaagacaaatttcaataggaatttttggaaggaacttaggactttcagtgtaagtgcagaattttccctatggggtctttgttggttggagaaat

SEQ ID NO: 30032 - DNA, 201 bp, Homo sapiens; identical to SEQ ID NO: 6738

SEQ ID NO: 30033 - DNA, 201 bp, Homo sapiens
actgctggcacggggagcccagtcagagacccacgttttcagagttggtggaacatttgggaaatctcttgcaagctaatgctcagcaggtttgtcacctycatccaagaagcacctacaaagagtacttagatgtcaaggactttcctactgcctgaactgtctcatggctaccatgccatcctctcagccattgaataa

SEQ ID NO: 30034 - DNA, 201 bp, Homo sapiens
aggaaatcttggaactgcagctactcagaccctcaaggtctttgacgtttcacttgaaatgaaaaactaaatcaaatgaccatttacagtaagttgaccttttttttttttttattttcttccagaaaaaccttttgttgcttttggaagtggcatggaatctctggtggaagccacggtgggggagcgtgtcagaatccc

SEQ ID NO: 30035 - DNA, 201 bp, Homo sapiens
gactttggagtcaaaaaagaaagaaaggaaaaagggagagaagaaagaaggaagtgagagaagggagaaggaagaaaggggaagagggaaagggagtggaragggagggaggaagagggagagagaatgaaaaactcagatgatggtggcaggaatgcattctctaaagatttacaccttcctttaacatgaggtggttta

SEQ ID NO: 30036 - DNA, 201 bp, Homo sapiens
gagtgaggaaggaggacgaaggcctctacacctgccaggcatgcagtgttcttggctgtgcaaaagtggaggcatttttcataatagaaggtcagtgggakaaaaaaaaatgtggtacatatacaccatggaatgctatgcagccgtaaaaaggaatctgatcatgtcctttgcagctgcatggatggagctggaagccat

SEQ ID NO: 30037 - DNA, 201 bp, Homo sapiens
tgagcaatgttttgcaagctttaaattttccattaacaattctgtaggccaggtgtggtggcttatgcctgtaatccctgcactttgggaggccaaggcaggggggatggctagaggccaggagttcgagactagcctgggcaatgtagtgagaccctgtctctacagaaaataaaagaaaaattagctgggcttggtggt

SEQ ID NO: 30038 - DNA, 201 bp, Homo sapiens
gggagaatcgcttgagcctaggaattggaggctgcaataagctatgattgtgtcatggtactccagcctggaacatagaaagaaaccctgtctctaaaaawaaataaataaataaataaataaataaataaataaataaataaattaaattcaaaaaaagaattctgtagactccattcaagttacgggtgtgtaactgtt

SEQ ID NO: 30039 - DNA, 201 bp, Homo sapiens
acaaaaagtataagtttccaactgttgatactcattcaattgtgtctttccaggtgcccaggaaaagacgaacttggaaatcattattctagtaggcacgrcggtgattgccatgttcttctggctacttcttgtcatcatcctacggaccgttaagcgggtaaaaaaataatttcccttctgcccatgcacattggtttt

SEQ ID NO: 30040 - DNA, 201 bp, Homo sapiens
ggctgcaataagctatgattgtgtcatggtactccagcctggaacatagaaagaaaccctgtctctaaaaataaataaataaataaataaataaataaatmaataaataaataaattaaattcaaaaaaagaattctgtagactccattcaagttacgggtgtgtaactgttgtcctctaggatttttccaagttggtaag

SEQ ID NO: 30041 - DNA, 201 bp, Homo sapiens
ctgctttgcttccctaaggactcctaacttgttttcctaaaacctattcttagaaataggctagaatccagtacatttgcttagacttcaatgtagtacgmtgttgaggtaatctcattttgctaagtgttgacgtggattttttcagcatgattccttttgatgttcagttggttgggacaagatatttccacagcactt

SEQ ID NO: 30042 - DNA, 201 bp, Homo sapiens
gcccttgtgcaaattggaaaaaggatcctcctttgtagctttatgccaggatgcatggtctggcaagcaaagttgggaatggctttcaccttcttgcctgrttaccctcgtgcagggctcagccaacacagttgtacttagtggttctgggtacagggaaaaaggactgtggttatattaaaattgtttcttaatatattg

SEQ ID NO: 30043 - DNA, 201 bp, Homo sapiens
agggctcagccaacacagttgtacttagtggttctgggtacagggaaaaaggactgtggttatattaaaattgtttcttaatatattgtggaatcagatamttatagaccatctagagacatggaaaggaagatagtgaaatacaaaaatagcatgttctccagaattggaatatgtaaaagatgttcatatgtaaaagat

SEQ ID NO: 30044 - DNA, 201 bp, Homo sapiens
gttgtacttagtggttctgggtacagggaaaaaggactgtggttatattaaaattgtttcttaatatattgtggaatcagataattatagaccatctagaracatggaaaggaagatagtgaaatacaaaaatagcatgttctccagaattggaatatgtaaaagatgttcatatgtaaaagataatttgcaaaacaagaa

SEQ ID NO: 30045 - DNA, 201 bp, Homo sapiens
agcggcttatcaagtcttccttccaaccatacttcctcaggcgagtcttgataaatatcctggcctttattaagttatgtttccagtgatattttatttakttgtttttatgtttatttttatttttttgaggtggagtctcatgctgttgcccaggctggagtgcaatggtgcgatctcggctcactgaaaccttcgcct

SEQ ID NO: 30046 - DNA, 201 bp, Homo sapiens
ccacctcccgggttcaagcaattctcatgcctcagcctcctgagtagctgggattacaggcatgcgccaccacacctggctcatttttgtatttttagtasagacagggttttaccatgttgcccagcctggtctcgaactcctggcctcaggtgatccatccgcctcggcctcccaaagtgctgggattataggcatgag

SEQ ID NO: 30047 - DNA, 201 bp, Homo sapiens
cagcatacaaaaagacatacttacaattaaggctaatacaactcttcaaattacttgcaggtaaggattcattctagatctagatttcttgtgttaagtamctgattgtttattgagtggaaataatttccagtagagcagaattataatagagcttgtagtaattgttcataagtggtgaggtttctaagaactgatgta

SEQ ID NO: 30048 - DNA, 201 bp, Homo sapiens
ccctttgccaataggttttgtgcatttcaaagctatctttctccatctgccttttttctcttgtggccaagggagtgtgtaattttgaggtggctcatcasagccttagatgtggaccatgcctgtgaattagtgggaagtgtagcagtccatacaggatcaaacacatagtcttagtgccatcagcctcatgtgccaact

SEQ ID NO: 30049 - DNA, 201 bp, Homo sapiens
agagatacggggctgcggtctccagggagatggcagccatatggagttgggaatggggtgagggtaaaaagcaaaagaattgtcttctctctgccaactcmtttgtttgccatttcttctgcagtggaatggtgcccagcaaaagcagggagtctgtggcatctgaaggctcaaaccagacaagcggctaccagtccggat

SEQ ID NO: 30050 - DNA, 201 bp, Homo sapiens; identical to SEQ ID NO: 6712

SEQ ID NO: 30051 - DNA, 201 bp, Homo sapiens
aactaaatgtggggattgacttcaactgggaatacccttcttcgaaggtaacgctaatgattcaaagccagacctccaaatacttagataataagccccartgaagtttgcttgagagataggggcctctttggccagataaaatgtaagagccttaaacacacacacatacacacccactcacacacacatacacacaca

SEQ ID NO: 30052 - DNA, 201 bp, Homo sapiens
gggtacccgggtgaggggcggggctggccgcacgggagagcccctcctccgctccggccccgccccgcatggccccgcctccgcgctctagagtttcggcwccagctcccaccctgcactgagtcccgggaccccgggagagcggtcagtgtgtggtcgctgcgtttcctctgcctgcgccgggcatcacttgcgcgccgc

SEQ ID NO: 30053 - DNA, 201 bp, Homo sapiens
tcctatttgttcatactctcttatttgcccagcaaggtcaatgccagtttaggcctagggagtcattttttcttagttgatatgacttagaaagcttgggwgcctgcccaacatcaattacttttttaaagctggtattttctaggtcttgatatttattaagaccctagcatagtggacaatttttctttctctcatgct

SEQ ID NO: 30054 - DNA, 201 bp, Homo sapiens
tgggtatttacttatactctctctatttattccgtctcatacttcgtcctatttgttcatactctcttatttgcccagcaaggtcaatgccagtttaggcytagggagtcattttttcttagttgatatgacttagaaagcttgggtgcctgcccaacatcaattacttttttaaagctggtattttctaggtcttgatat

SEQ ID NO: 30055 - DNA, 201 bp, Homo sapiens
aacaaaaaactatgttggtctacaaatatgaatttgaagttattgagagccttgttgaatagatttttgttgtaaacgtgtctctagaatagtatggcatwgtctcagcttcctatgaatgaaggacataccttttcttttttaaaatatttgttacacaggaaagtgtgtctagaatgtgatctgtggcaataaattatg

SEQ ID NO: 30056 - DNA, 201 bp, Homo sapiens
tagtgagcacttactttattagctcatctcatctttgaagctgagattggaactcaagttcctgactacaaagctatgctcttgacctctaggtcacgtgrcatccctagcaagaacttgaaaatttcttctgaatgaacaaaatagaaatcactaagtgtcctaaatttatttaaattatttcacttgccaagatgcact

SEQ ID NO: 30057 - DNA, 201 bp, Homo sapiens
acgtggcatccctagcaagaacttgaaaatttcttctgaatgaacaaaatagaaatcactaagtgtcctaaatttatttaaattatttcacttgccaagawgcacttgtcaaaatacacagagagagatgtgctctggcttatgtttttatagaattacttttgttctccagaatacttcagggaaataggggcagaaata

SEQ ID NO: 30058 - DNA, 201 bp, Homo sapiens
tgaccttttttttttttttattttcttccagaaaaaccttttgttgcttttggaagtggcatggaatctctggtggaagccacggtgggggagcgtgtcaraatccctgcgaagtaccttggttacccacccccagaaataaaatggtaactactggaaataaatgcaaagcatcatttcgtgtgagagcaaatcctttga

SEQ ID NO: 30059 - DNA, 201 bp, Homo sapiens
gagaattttttttcataggtataaaaatggaataccccttgagtccaatcacacaattaaagcggggcatgtactgacgattatggaagtgagtgaaagaracacaggaaattacactgtcatccttaccaatcccatttcaaaggagaagcagagccatgtggtctctctggttgtgtatggtgagtccattcaattttc

SEQ ID NO: 30060 - DNA, 201 bp, Homo sapiens
aagaacagaataaccaaagtctgaatcttttccttactcttgactctaattaaagaaaaattaaatcataatatgcgctgttatctctttcttatagccawgctgtctcagtgacaaacccatacccttgtgaagaatggagaagtgtggaggacttccagggaggaaataaaattgaagttaataaaaatcaatttgctc

SEQ ID NO: 30061 - DNA, 201 bp, Homo sapiens
ttcttagaaatagcctcacagtctggcacttcatattaatacctccctgaaattaatttttcaggggacagagggacttggactggctttggcccaataawcagagtggcagtgagcaaagggtggaggtgactgagtgcagcgatggcctcttctgtaagacactcacaattccaaaagtgatcggaaatgacactggag

SEQ ID NO: 30062 - DNA, 201 bp, Homo sapiens
tttgagatctgtgaaggtagtgctttgtaaacctctgttggccattttcctgggagctaccaagtattggtgaggcctgcagggaaaaacaatgtggcatrttttaaagttgcattactttaaaaaataaatctgtgcaaagttataggcttatttgctctctcatgttctgttttttcaatttacttgctctagggtata

SEQ ID NO: 30063 - DNA, 201 bp, Homo sapiens
ccgctccggccccgccccgcatggccccgcctccgcgctctagagtttcggctccagctcccaccctgcactgagtcccgggaccccgggagagcggtcartgtgtggtcgctgcgtttcctctgcctgcgccgggcatcacttgcgcgccgcagaaagtccgtctggcagcctggatatcctctcctaccggcacccgca

SEQ ID NO: 30064 - DNA, 201 bp, Homo sapiens
tcaccacgtgaggttttaaaaatcctaattcagttggttccatttatttctcctgaaacaaaatatatttgttgtctgcatgaggttaaaagttctggtgyccctgtttttagcattaaataatgtttaccaaagcccagatttaattctgtgtgttactagaagttattgggtaatgttatatgctgtgctttggaagtt

SEQ ID NO: 30065 - DNA, 201 bp, Homo sapiens
gagactggcccaagattacccagcgagtctgtggtcgcctgtgctctagcccagttccttttctaggactctggtttgcgacagggacctcggctggagcrtgtcctgagatgccgacacaccctcaggctcttgggaggctggggtgggaaggcgcctggggttggcaggcaggaggtgcctccgcaggcgagaaaaggc

SEQ ID NO: 30066 - DNA, 201 bp, Homo sapiens
aggaggagagacatagagtattcaaggtttaacaaacctatttgaccagagcaccttttttcccctgagcaaattcattaatctctcactccaaacagttygagaaatgcttctctgttgtaattctttgttcccccttctggtacggcatattaaaacttcaggatattttcccatgacattaaggtgcttccctacgtg

SEQ ID NO: 30067 - DNA, 201 bp, Homo sapiens
agagtattcaaggtttaacaaacctatttgaccagagcaccttttttcccctgagcaaattcattaatctctcactccaaacagttcgagaaatgcttctytgttgtaattctttgttcccccttctggtacggcatattaaaacttcaggatattttcccatgacattaaggtgcttccctacgtgtcctgatactcttc

SEQ ID NO: 30068 - DNA, 201 bp, Homo sapiens
actcaggtgtcataataagagatactttggggtcaagtcatccccagcatccttcaagtcacaccacatagatcacatggattttctgttggcttgtctgscttcaaggttatggcagaattgagaaagagatgtgaagtaggctcctggcctagctgtgcccagaaaatatgtgctcgcagttagctgctttgcttccct

SEQ ID NO: 30069 - DNA, 201 bp, Homo sapiens
agctttcatatcattgagtgttagtgttaatgaagacctaattttaaaattctgttagaattagagattttgctttggatttttaatatattaaacattgygtagagctcatagtggagatgtggtaaatatctgaggaattcgtttacattttcaagtaatgtgtttggccaaataagatattttgggacctgaattgtc

SEQ ID NO: 30070 - DNA, 201 bp, Homo sapiens
ggatcgatggatttctatgaactcatcctaacttgtctctcaaagtctagattttggtccctttactctgccaaatctatgatgccaagtattgcatcgaratatgttgacatattttcaaatgtataagcttattagcatttcataaactacacttgcaaataaagatttcaaagaccatggcagttttgtcatttccaa

SEQ ID NO: 30071 - DNA, 201 bp, Homo sapiens
tttagaaatattaattccatttcttgaatttgtataatcattcatatagccacttagaggtagggtccctatgtaatcatccaaagcaggacatttggagrgtgaagggggagttattaaataattaagccaggacaaaggagtaaactggactatccatgttaaattgggatgtatggtcaccctatctagttgatgtct

SEQ ID NO: 30072 - DNA, 201 bp, Homo sapiens
tccagaattggaatatgtaaaagatgttcatatgtaaaagataatttgcaaaacaagaatggttgtgttagaaaaaaatataatgggttatattttttaawttaaaagctttataaataattgttaattctaatagtaacggaattctggtctggccattttcattttaggaggttagacagtaaagcttctttcttcaat

SEQ ID NO: 30073 - DNA, 201 bp, Homo sapiens
tttagactgtcatcagtttttccattgccttgaaatgtggtggctaaaactggatgccatgccctttgaagggcttggctcgtgtggttagggctttgtgratgagtgattttttgttctatgtagctccttgtgttctgttgttacctctctgaccacagcctgctttctcttcattgtaactgcacttccctgtgggct

SEQ ID NO: 30074 - DNA, 201 bp, Homo sapiens
tgaaatgtggtggctaaaactggatgccatgccctttgaagggcttggctcgtgtggttagggctttgtgaatgagtgattttttgttctatgtagctccktgtgttctgttgttacctctctgaccacagcctgctttctcttcattgtaactgcacttccctgtgggctgcttacccatcttgtttttagttctctcct

SEQ ID NO: 30075 - DNA, 201 bp, Homo sapiens
ttccttcccgtctttgagctggaagggtaacagtgcacaaattaattaatattggttatgggatttgaacatagaagggctttttattgagtagtagcatrtgtacctcttacagttatttctttagaactttctgaagagtccagctcaagcttgccaatgaaaacgaatgacatttaatggagcaaaaacaaaaaacaa

SEQ ID NO: 30076 - DNA, 201 bp, Homo sapiens
ctgatatccagatttccaccctttgcagggtgagaaaggggaaagggtcagagaaagaaaaaaaaaaagtcgaataattcagggaaaaaaatttcttactycctaagacaagaatcacatgtcttagaagacactcacacccacatacagtaccaggatcatctgtccatggttactgaattttctttataatgacttggt

SEQ ID NO: 30077 - DNA, 201 bp, Homo sapiens; identical to SEQ ID NO: 6742

SEQ ID NO: 30078 - DNA, 201 bp, Homo sapiens; identical to SEQ ID NO: 6716

SEQ ID NO: 30079 - DNA, 201 bp, Homo sapiens
gatgccatgccctttgaagggcttggctcgtgtggttagggctttgtgaatgagtgattttttgttctatgtagctccttgtgttctgttgttacctctckgaccacagcctgctttctcttcattgtaactgcacttccctgtgggctgcttacccatcttgtttttagttctctcctttaatataccttccatttcaac

SEQ ID NO: 30080 - DNA, 201 bp, Homo sapiens
acctctctgaccacagcctgctttctcttcattgtaactgcacttccctgtgggctgcttacccatcttgtttttagttctctcctttaatataccttccrtttcaacagctttttgtttctgacacatgatttgtattgttgtcttaaagttctatgttcagatatgaaagccacacaccctatgtagccaagaagtccc

SEQ ID NO: 30081 - DNA, 201 bp, Homo sapiens
gcaagaagtcatgctattgatttttgataactggagaagtagacttctttgtcaagaagaagaggcctttaaattttgcctttcaacccttaccccaggaygaaagatagaagacccttgggtttaacatagtgatcacacacgaaaggcatggagccttcttaggacctgtgtgtttttggtagagactgtgacaagtgg

SEQ ID NO: 30082 - DNA, 201 bp, Homo sapiens
tgcttacccatcttgtttttagttctctcctttaatataccttccatttcaacagctttttgtttctgacacatgatttgtattgttgtcttaaagttctrtgttcagatatgaaagccacacaccctatgtagccaagaagtccctgtgccctttgtttttaatgaaaaggcacttgaagaactgaagccataacaacag

SEQ ID NO: 30083 - DNA, 201 bp, Homo sapiens
ctcattgattctggagcttgggccgtgttacctcttttttgcccagttagtttgggtctgatctttgtttccaaggtaaatctgtgttcactgttggccaytgagacttataaaaagtcttcctatgtttgagaagaaaacctaaaattcttgaaatcgaggaagatttgggggtgaattatggagaaatttctgtggaga

SEQ ID NO: 30084 - DNA, 201 bp, Homo sapiens
tgaactggaattaaattgaactggccttgagaaaatcaccttaattttttgtttattctctttcatttacataaatgtctgagtttacatggtaatttgtrtggcatcctacttataagccttggaaaggattttggagtttatattatgagaatgcatcaatacagtgaaattttaaaaataccttagataatgctattt

SEQ ID NO: 30085 - DNA, 201 bp, Homo sapiens
ggttaatttagcttccaaaggcttgctctgtaagcaagttatgtaatatttcataacatgtggatgaaaggtaggcaatattaagaagtggcaatccctagcactgtttattggtacactgcctgtctttgggtataccattaaattctgcttcctgtctaagcttaaagttctaggagttgggctgtccaagattttggc

SEQ ID NO: 30086 - DNA, 201 bp, Homo sapiens
cctaaatttatttaaattatttcacttgccaagatgcacttgtcaaaatacacagagagagatgtgctctggcttatgtttttatagaattacttttgttytccagaatacttcagggaaataggggcagaaataaggaggtcagttgggaggctaattgcagttatccaagtgagagttgaggggtggcttagacaaggg

SEQ ID NO: 30087 - DNA, 201 bp, Homo sapiens
gtcaaaatacacagagagagatgtgctctggcttatgtttttatagaattacttttgttctccagaatacttcagggaaataggggcagaaataaggaggwcagttgggaggctaattgcagttatccaagtgagagttgaggggtggcttagacaagggtagttgaggtggaggtagtgagaggtgatctgcttctggat

SEQ ID NO: 30088 - DNA, 201 bp, Homo sapiens
tgtgctttccagctgggaaggaaatcaaacttctgctgttgcagggaattagctgcctttgtcccctgtggtttaattaactctttcttcactttgactgrctattatgaagcactctgagaatgcttgatgagatgtgttgggcatagcaatgtgaaatgttatctctctgagatttcaagcatgactccacaccacatc

SEQ ID NO: 30089 - DNA, 201 bp, Homo sapiens
gtgaggattaagtgaatgaattcatgcaaagcacttcaaacaatgcttggcacataataaatgtatttactgtgctatttcagctgttttctgtagccttyccctgatctcctaaacttgagaggacagagagaactatctctgtaatacagatgagaggcacaggatttcaacacttccataaagtcattcagcttgtta

SEQ ID NO: 30090 - DNA, 201 bp, Homo sapiens
gcatgactccacaccacatcatctctatctctgaggaatggactaggtttccagcagcatgttaacattgtatgagtaatgtttgattggccttgaaatctttttttttttttttttttgagacggagttttgctcttgttgcccaggctaaagtgcagtggtgctatctcagctcactgcaacttctgccccccggttca

SEQ ID NO: 30091 - DNA, 201 bp, Homo sapiens
caggaaatcttggaactgcagctactcagaccctcaaggtctttgacgtttcacttgaaatgaaaaactaaatcaaatgaccatttacagtaagttgaccttttttttttttttattttcttccagaaaaaccttttgttgcttttggaagtggcatggaatctctggtggaagccacggtgggggagcgtgtcagaatcc

SEQ ID NO: 30092 - DNA, 201 bp, Homo sapiens
ttttaaattttcattttattgcaaggctgagaggcctacttgaataagcatgagctttgcaaactggggaaacatttagcaatatacagttgacctgtgarcaactcagggattgggggaactcaggggagttcccctaactttccctcctctgcagtcaaaaatccatgtataggccgggcgcggtggctcacgcctgta

SEQ ID NO: 30093 - DNA, 201 bp, Homo sapiens
catgcgccaccacacctggctcatttttgtatttttagtagagacagggttttaccatgttgcccagcctggtctcgaactcctggcctcaggtgatccayccgcctcggcctcccaaagtgctgggattataggcatgagccaccatgcctggccggtagaagactgactgtgtctgttgaagagtttatttaagtttca

SEQ ID NO: 30094 - DNA, 201 bp, Homo sapiens
cctctctgcccaagatttattatgatacattgtcttccaaatcagccaaaccaccgttcctctgcctcctgctgcttcactcatatcatggctgggcctgygtacaaaagtcatctggcgtggtgaagctgaagtgaaacgtaggaccatgtgctctggccatgtttgtttaagaggccgtgtaaatgagctttgtggtgg

SEQ ID NO: 30095 - DNA, 201 bp, Homo sapiens
aagttatactaccatgttcccctctcatggaattgcccacctggtacacagatgtgtaagacccttctccttagattttgtgcaaagcttctagtttgatrttgtagttgatgtatcagagatgtgcaggcacgttccaactctgaaggcttttgaagttgacactgttggcttggttgggagcttttcttttttcctttt

SEQ ID NO: 30096 - DNA, 201 bp, Homo sapiens
ttttataagaattgccaaataaatgtaaggcattattggttgaatgatactaaaatttggcacttccaagagaaatttgaagggattctagggtattattkactagaatcttcatgggagggaagttttcacctggggaggctgtgtctaattagaggaaaaatccataaaggtgaccctgaacctttcttttgtgatggg

SEQ ID NO: 30097 - DNA, 201 bp, Homo sapiens
ataactgagagtgaatgcagttccttcagggcaatatttgtaggcctgaaaactgcatgtcctggacatctaaaatatcctagattttaaaaatatataccatgtagaaacaattcagtaataacatgtaaatatgtcagttggcatgaaaaatgccaaggctaggtagaaaaagtgtttacaaagatagaattcagaatg

SEQ ID NO: 30098 - DNA, 201 bp, Homo sapiens
tggctttgcaacttctagtggtaatttgtaattttatatcctttttttcttttcttaactttggttcccagagcatctcattccccgagggattgaggacwcctgcctccccatcttcagcgaatgccttttactcgctctctccctccactctggtcccctctggcctgccagagtttaaggacagcagcagctccctca

SEQ ID NO: 30099 - DNA, 201 bp, Homo sapiens
tggggaacctcttctgtggggaccctgttctgaggggattatgttctgtggtgatcctgttctgaaggaatcctgttgtgagcaggaggctgttttgaggrgaacctgttatgtggggaacctgttttctgggaacactgttctgagaagaccctgtttggagggggatgccattttgaggggatcctgttctgggggggt

SEQ ID NO: 30100 - DNA, 201 bp, Homo sapiens
tatttagcgcaaaacaggaaagaaacaaagattattgggagcacttcgtgtgttgatacagttgtctgaaccatgggagagcagcagcggtggctccaccktgtgctgcctaccaagccgtggtccaaggcttcgtgtgtcagctcgttaaaaccccaaatggcccttgggaaagctgtgccatgcatcacaccttcacgt

SEQ ID NO: 30101 - DNA, 201 bp, Homo sapiens
agtagagacagggtttcaccttgttggtaaggctggtctcaaactcctgagctcaggtgatccacccgcctcggtctcccaaagtgctgggatgaaagacrtgagccactgcacccggcctccttatggttcttagtgcaatttggagtagaagtttggtgtacagtattttaggaatatgtgagaacccaagatttgaaa

SEQ ID NO: 30102 - DNA, 201 bp, Homo sapiens
tcttaactttggttcccagagcatctcattccccgagggattgaggactcctgcctccccatcttcagcgaatgccttttactcgctctctccctccactstggtcccctctggcctgccagagtttaaggacagcagcagctccctcacagatccccaggtttcctacgtcaagagtccagctgcagagaggcgcagtgg

SEQ ID NO: 30103 - DNA, 201 bp, Homo sapiens
aaccccagcagcgtcaaagcagcacacattatgatgggcctcgtgagtatgccgtttcctcaagttttacctcctgcaacttaaaggcagattttgcagcmactttttggtaaactgtcaactagtggcttgctgttggactgtacttctctgagtgaggtgctgtgaggacccctggaaggacacaagggcagaatagtg

SEQ ID NO: 30104 - DNA, 201 bp, Homo sapiens
ggactgtacttctctgagtgaggtgctgtgaggacccctggaaggacacaagggcagaatagtgaaggccgacgctgacttccagaagcaatgagtgggaracatcttcctgccacaccctgagcaacacagttgtgaagagtaaatagacactagtagcttctagactttttccgaattctcatcacataaaatatctcc

SEQ ID NO: 30105 - DNA, 201 bp, Homo sapiens
cagatgggatgtgggtttgggctgtgctcaccccaacagccttaggccagcacgtgtttggcaggtatttgctgagcctcggtgtgcaccaccctctgccrtcggagctgggagtgccaaagtgaacgtagcagacaggagctctgcctccttgcgcttgttcggcagtggggagctcaacagtggacaaggtatactgcg

SEQ ID NO: 30106 - DNA, 201 bp, Homo sapiens
ctggagtgcagtggcatagtcaaaactcactgcagccttgacctccccgggttcaggtgatcgtcctgcctcagcctctcgagtagctggaactacaggcrtgtaccaccatgctggctaatttgttaaatttttgtagagatggggtctccccacattacccatttgtctcaaactcttggtctctagcaatcctcctgc

SEQ ID NO: 30107 - DNA, 201 bp, Homo sapiens
ggtgacttcatttttctgctagttctactatgaatatatatactgtctatcttttcttaattaagcagatggaaccagaagactttgtatacaacttttaraaaaacccttcctgggctgggtgcagtggtgcacacctgtaatcccagtaccttgggaggctgagatgggcagatcacttgggctcaggagttcaagacc

SEQ ID NO: 30108 - DNA, 201 bp, Homo sapiens
tatcctttttgatcatcaggtggatttatcaaatctgtggatgccaaacctgtggatacagaggactgacagaatacctaggagtagaattgctgggtcayatgggaaatctaggtctaatcattaaaggaactgccagactgttttccaaagtagctgtgccattttgcattcctgccagcaatgttatatgttccaatt

SEQ ID NO: 30109 - DNA, 201 bp, Homo sapiens
aggaacactgtgttgggtgaggtgtagagggtcccctatggccagcttgcctgcttggcaccagcaccttgggcagagatagccctgccagctataggatsgctcagggctgggctgtctctagcagggcacggaaaactgggcccggggtatgttccacgtctgcatcaggaagtgcaccagcaagtctggcgctctgat

SEQ ID NO: 30110 - DNA, 201 bp, Homo sapiens
ggagaggccgtgtgccaggcatggtgctcagcggctttcctgtgctaccttattacactcccataaaacccattcagggtaagagttgtgttgttcttcarttgaggaagccgagcctaagcatacccaccaagtggaaaccaggattcctactccaaagcctctgcccttaggacggtgtgaggaaacctgttccttgtg

SEQ ID NO: 30111 - DNA, 201 bp, Homo sapiens
tccgcccgcagtctcaggcagggcgcatcaggggctgcactggtagctcccaggaggacttacccatgggtcaccgtcatagccaggtgtgtctactcagrggggacgcaatcctgcagcagtccccgtcaatgagaggccaccagcagacagtgcctgttggacccatgaagtccaccactaattatatactctgcttta

SEQ ID NO: 30112 - DNA, 201 bp, Homo sapiens
gccctgtcctgcagccttgagggggtccctgcccaacactatatctggtcaccctcacccccagggcccacgcccctgcttctggagtggggaccacccaygtcacagcacctagggtcaccatgaggataaaccaggtccctacatgtcagagtcctcagagctggactcctcgccatgcccctctgacttccagcgctt

SEQ ID NO: 30113 - DNA, 201 bp, Homo sapiens
agtctaagagtcagaatataaaccaaactctgagcaaaccctggaaagggcctcactgggataaaagttacagtcctctcagattagtaaagcgttagccrtgaaggaaaaagaagacatttcttcagtatctcacacagatcaagagatggttcagaactgtgtcaagaattatagttacttcaaaaataaaccatgaga

SEQ ID NO: 30114 - DNA, 201 bp, Homo sapiens
ttctgagaagaccctgtttggagggggatgccattttgaggggatcctgttctgggggggttctgttctgtggagaccctattctgagggtagtgctgttytgaggggaccctgttctgaggggaccctgttcttagggggatcctgttctgagggggatgctgttccatgggaaccctgttctgaggggaccatgttctg

SEQ ID NO: 30115 - DNA, 201 bp, Homo sapiens
gaacctgttatgtggggaacctgttttctgggaacactgttctgagaagaccctgtttggagggggatgccattttgaggggatcctgttctgggggggtyctgttctgtggagaccctattctgagggtagtgctgttttgaggggaccctgttctgaggggaccctgttcttagggggatcctgttctgagggggatgc

SEQ ID NO: 30116 - DNA, 201 bp, Homo sapiens
ctgtacttctctgagtgaggtgctgtgaggacccctggaaggacacaagggcagaatagtgaaggccgacgctgacttccagaagcaatgagtgggagacrtcttcctgccacaccctgagcaacacagttgtgaagagtaaatagacactagtagcttctagactttttccgaattctcatcacataaaatatctccttg

SEQ ID NO: 30117 - DNA, 201 bp, Homo sapiens
accctattttgtggggcatcttgttcttgtgaggacgctgttctgaagggaacctgttctgtcaggatcctgttctgagaggaccatgttctgtggggacyctgttctgagggaaccctgttctgtgaggattctgctctgcagaggccctattctgagggtagtgctgttttgagggactcttttctgaggggaccttgt

SEQ ID NO: 30118 - DNA, 201 bp, Homo sapiens
ccgtgttagccaggatggtctcgatctcctgacctcgtgatccgcccgcctcagcctcccaaagtgctgggattacaggcgtgagccaccgcgcccagccrgggttgctgttctacggagaccctattttgtggggcatcttgttcttgtgaggacgctgttctgaagggaacctgttctgtcaggatcctgttctgagag

SEQ ID NO: 30119 - DNA, 201 bp, Homo sapiens
atggagaagactggggcccaggttctggccacatctaccatgtgcttgaggtacataggactttggagggattcctgtacctcacaacatgacaggtttttcatcagtaaaatgtatagactggtgcaaaacctctgtgaagctgtttgtgaaagtgctttgaagttgtcaactcaacagaacactgataaccatcagcct

SEQ ID NO: 30120 - DNA, 201 bp, Homo sapiens
ttccactcttgagagaagtttctggagcgagccctaagactgggcaggactcgggtgggctttgtttaacccctgccctgcactcccttactgtgtcccaygcagccagctgcagccttcccatcctcaattcttcatctgtccagtggggaggtggccctggtccactcagtgcatgtgatatggggccggttagtggtg

SEQ ID NO: 30121 - DNA, 201 bp, Homo sapiens
tatacacaaatctgtttgatccagattatcatactgtagtcatctttaatgttcattaaaacaaagggatttgatattaaaaccctttagctctggggagrcagccaagagctctgtccacaaaaccaaatctgggtgtcagaggccaagaccccaggttgggatcagggaccaccccctcacggggcataaggtcagttt

SEQ ID NO: 30122 - DNA, 201 bp, Homo sapiens
cctcagagcaggggacccctcaaaacaggggccccctcagaaaaggattttctcagaacagagtccatctcagaacaggatcctactcaaagcagggtgttccccagagcagagtcccccctaaagcagggtccctccagagcagggtccacccaaaacagggtcctctcagaacagggtcttctcagaatagcatccccc

SEQ ID NO: 30123 - DNA, 201 bp, Homo sapiens
cttcatagtcaaagagattctcgctacagaacgaacatacctcaaggatttagaagttattaccgtggtacgaaagtccttgattactttgattttttttwaaaataaatctctcatctgaacacagagaaatatctcttttttttctttttttctttttttgagatggagcctcactctgtcacccaggctggagtgcgg

SEQ ID NO: 30124 - DNA, 201 bp, Homo sapiens
gcagccttgtacttctgtgcccaagtgatcctcccaactcaggctcccaggagctgggattacaggtgtgaccacctgcttggctaaccttttttttttttaagagacagggtctcactatgttgcccaggctggtctcaaactcctggcctcgagtgatcctcccatatcagcctcccaaagtgctggaattagagtcat

SEQ ID NO: 30125 - DNA, 201 bp, Homo sapiens
tccctggagttactaatcaggcctttgttcttcaagaaatcctcttcacttcccattatatttgccttttaacagcataaaatatttggaaaaattaaatwaaaaatcttgcttttttagggatatattcttttgctacaaatttgggataatttttttttacttttaatgtatgcaatgacacatacaaatgcttgtagt

SEQ ID NO: 30126 - DNA, 201 bp, Homo sapiens
gttctgtggggattctgatctgaagggaccctgttctgtggggcatctcattctgtgaggaccctgttctgtggggaacctgttctgagaggaccctgttytgaagggaatgctattctgaggagaccgtgttctgtagggattttgttctgtgtagacgctgttctgaaggtgatgctgttttgaggggactctgttctg

SEQ ID NO: 30127 - DNA, 201 bp, Homo sapiens
ccagcctgggagagccaggggatgggggcaggagcttagaaatctgcacagagcaatagggttggtagctgccaagacctatgctggcttcactgaagttmttcctcattttcagtgtcatgcaggtatcattgacagaaagtgaattttgtcagtcaattttctttgtcaatgatgatctcttcacctacttcattcttt

SEQ ID NO: 30128 - DNA, 201 bp, Homo sapiens
tgaacatataaatattttcaattgccttctctcattacattctcactaatggtattccaaagtgcctgtttctcagatcctagccaagaccagatattatmaatccgttaaaaaatttcacagccatgctttaagctgtgttttcattggatatttctcctatttcatccaaaactgtgagtgcagttttatgtgactaac

SEQ ID NO: 30129 - DNA, 201 bp, Homo sapiens
atcatactccatcatgcatgtatcacacgtctctccactcatctgatggacactgggttatttccacttcttggctgttacgaatagtgctgctgtggacrttcatgtacaagttttgtgtggacttatgttttcagttttgagtatataccatatacaggttcatatggtaattccatgtttaacattttgaggaactgc

SEQ ID NO: 30130 - DNA, 201 bp, Homo sapiens
cacagctcactgcagccttgtacttctgtgcccaagtgatcctcccaactcaggctcccaggagctgggattacaggtgtgaccacctgcttggctaaccktttttttttttaagagacagggtctcactatgttgcccaggctggtctcaaactcctggcctcgagtgatcctcccatatcagcctcccaaagtgctgga

SEQ ID NO: 30131 - DNA, 201 bp, Homo sapiens
attattactgtgttttagaaaaccaaaataaaatccccattaatgaaaaactcaaggaactggaaaacagtatcatgaattgagcagttttatatgatccrttttttaatgaataataagtttggccttaaaatagacattgtcttttcagatgttagccctggtttgacatcttaagtctctaacctctagcaatgcaca

SEQ ID NO: 30132 - DNA, 201 bp, Homo sapiens
gtaatgattaaaagaacaacctgggatgcagtttaagggtgtgaggccttgcccctggcagcgaatgtcctttgcctttgctgacaagtggggattgcatstaatgagcatgagggttttcttcattattgttcatctactttctcacgttccccttttctttaacatactcacagttgttagggtggactttccttttct

SEQ ID NO: 30133 - DNA, 201 bp, Homo sapiens
tggagcacctgaagtcatgagttcgagaccagcctggccaacatggtgaaaccacatctctactaaaaatacaaaaattagctgggcatggtggcgggcaygtgtagtcccagctactcgggaggctgaggcacgagaatcgcttgaacccaggaggcagagattgcagtgagccgagatcatgccattgcactccagcct

SEQ ID NO: 30134 - DNA, 201 bp, Homo sapiens
caaagggaaaggggaggtttggaaagccccctgggcatgtgcagctgtctcttcacgcgtcttcgtgcattgcatgtgcagattcagggggagtatggaaygtggtagagattccagctgtgctgttagcaagctccttctgtgcaggctccagctggccaccttggttcccaccaatttcacccagatttgttatcttac

SEQ ID NO: 30135 - DNA, 201 bp, Homo sapiens
gtgactttcatttcatggatagatattcaatttttttttaatttcctgatttattatacttttttgaatgtcaaaaaatttgacctttcacttggaatgaygtaaaagctatgcctccggtcttagacctgagtactccagccagtcctcctagaggaccgataaattagtctttgtagtttatgttttttgccatatgct

SEQ ID NO: 30136 - DNA, 201 bp, Homo sapiens
gtgtatatatagtaagggatgtccccaaagcgtgactgcatcccgtgatagcgcgcgaggagtgacgcttagtgagtagagggggctcagccgtgtccttktgtgtggaaccatgaggggaggatgtgttagggcacctatggagtagcaggtgatgcagcatagccactggacatctggtcctggcccctcagtatttcc

SEQ ID NO: 30137 - DNA, 201 bp, Homo sapiens
caggagttcaagactgcagtgagccacaattgtaccactgcaccccagactagacaacagggtaagaatgtctcaaaaagtaaagctcatggtatcccagkttttttcatgggtacatgaaaaccttcttaaactctctggttttttttttttgtttttttttttttgagacagagtctcgctctgtcgcccaggctggag

SEQ ID NO: 30138 - DNA, 201 bp, Homo sapiens
tctagagatctgggtgtgaatccttttgtgcttctgaggtgggtggtgagagacaggtccagctgtccaaggccaggtgtccccaaggggaggagcattcyggccaggtgggtactatctcttgaggggggccagagactgaggcagatgctcccagtcagcccactcaatccccgaagatcatgtaaaggacagagttct

SEQ ID NO: 30139 - DNA, 201 bp, Homo sapiens
cgcgatctcggctcactgcaagctccacctcccgtgttcacaccattcacctgcctcagcctcccgagtagctgggactgcaggtgcccgccaccacgccyggctaatttgtttgtatttttagtagagacggggtttcactgtgtcagccaggatggtcttgatctcctgacctcatgatctgcccgcctcggcctccca

SEQ ID NO: 30140 - DNA, 201 bp, Homo sapiens
aattcttgctgttatgttacaaatgaaaagcaggaaacaaatttgtatctctatgtctttggcatgattgcaactatatcaaaacaaagatacaccaactyacacagacacttcatacaaaaacatttgacaagaatgtcccagaatgtgacaacagctgttccgtgccactgtgatgggacatcagcgaccttctcatgt

SEQ ID NO: 30141 - DNA, 201 bp, Homo sapiens
tggtctcaagctcttgaccttgtgatccacccaccttggcctcccaaagtgctgggattacacgcatgagccaccgtgcccggcctcatgttcctttttgkggctgaatcatactccatcatgcatgtatcacacgtctctccactcatctgatggacactgggttatttccacttcttggctgttacgaatagtgctgct

SEQ ID NO: 30142 - DNA, 201 bp, Homo sapiens
aaagagagaaagcctgtatgttgagatgtgcatcatagtgttgtgtgtaatacaccacaaaatcctgacaactctcatctgtgccagatgacttactaactatgtttttagctgtattcacttagtaggattttttgttaactgctgaaagcatggcttaaaaagagtatgtggtaacatggagaaattcttgctgttatg

SEQ ID NO: 30143 - DNA, 201 bp, Homo sapiens
aaaagagagaaagcctgtatgttgagatgtgcatcatagtgttgtgtgtaatacaccacaaaatcctgacaactctcatctgtgccagatgacttactaactatgtttttagctgtattcacttagtaggattttttgttaactgctgaaagcatggcttaaaaagagtatgtggtaacatggagaaattcttgctgttat

SEQ ID NO: 30144 - DNA, 201 bp, Homo sapiens
tgaggggaatgttattctgggggggacactaccctgagcggatctcgttctaagtggggaatagtgtcatgggggaacatgttctgaggaggatgctgttytgaaggggaccctgttctgtgggggattctgctctgagaaggaccctgttctgaggaggattctgttctgaggggtctctgttctgacgggggtcctgtt

SEQ ID NO: 30145 - DNA, 201 bp, Homo sapiens
aaaaagagagaaagcctgtatgttgagatgtgcatcatagtgttgtgtgtaatacaccacaaaatcctgacaactctcatctgtgccagatgacttactaactatgtttttagctgtattcacttagtaggattttttgttaactgctgaaagcatggcttaaaaagagtatgtggtaacatggagaaattcttgctgtta

SEQ ID NO: 30146 - DNA, 201 bp, Homo sapiens
tgtggatgcatagacatctgagcccagcttcctgcatccccacctggccctcaccacccctcacccccaggcagcgggccagccccgccttcactcccctyccaaccacccccccccccaccaccaccacccgtaccctcctaggggcttccagagcttttacacctggagaaacattccccactcccctttggcctccct

SEQ ID NO: 30147 - DNA, 201 bp, Homo sapiens
catgggcctctggggacgggaccagctctgcccccagagaattcactgggcatatcaagctcaggtggagaaatgacttctttttttagagatggggtccrtctctgttgcccaggctggagtgcagtggtgcagccacagctcactgcagccttgtacttctgtgcccaagtgatcctcccaactcaggctcccaggagc

SEQ ID NO: 30148 - DNA, 201 bp, Homo sapiens
tgcacaccactgcctgtacacctgtactgaggggtctctccacacagacgccctgaaagccatcacagaggtgaccaccacactacagcacattctcatcyggctggagaacctgcagaagctaacggagctgcagcgggacctggtgggcatagagaacctcattgctcctggcagggtgagtgaccttgctctgggaat

SEQ ID NO: 30149 - DNA, 201 bp, Homo sapiens
cggcgtgcggtctccagggctccctgtcacgcccctgtggcctctcagagtagggctaggaggcagatgtggagtgagagccacaagcttagttaccggcyccatccagttaacgcaaatgcatccatatgaccaccttcttcattgtgtggggtggacgtttctgtttgggctggtttttcatcctgcgtttctgtgagg

SEQ ID NO: 30150 - DNA, 201 bp, Homo sapiens
gccctgtggtggacgaggtggtgctaatttgaatacttaggagaaccctcctttcctcctcccattctcgaacctgctcttggtgctaatttgaatactcrggagaaccctcctttcctcctcccattctcgaacctgctcctggtgctaatttgaatacttaggagaaccctcctttcctcctcccattctcgaacctgc

SEQ ID NO: 30151 - DNA, 201 bp, Homo sapiens
ggcaaggctttattccactctgagcttgagtttcccatttggccaacacgagtttctgctgcctccgtggaatgtccatgcctctctagccccacacacgyctgcgggggtgggggcagggctttggacactgcctcctgcttttgagccctgtgaggataggctcctcaccttgcccttttcggaccttggagcagcaca

SEQ ID NO: 30152 - DNA, 201 bp, Homo sapiens
cctgagctcaagtgaacctggccccaagtgatcctccggcctgattctcttgagtagctgggattacaggcgcgagtcattgctccccgctcagcagtggrttttgagaaaagaaaagctttattgccagtcaaccaacaaggagacaggaggccggctcagatctgtctccccattctgtccttaagacagtatatttaa

SEQ ID NO: 30153 - DNA, 201 bp, Homo sapiens
gcttctcctcagcaagaacaatactccgggctctacctcttggttgtatcagggctccagggctcctagcccagagcaggtgctcagtagatggtttgagractgaatttgttggcaccaagacaggacctggtgaccaagggcactgctgagggtagaggagccccattgggaggctccactagaggaccctcattggga

SEQ ID NO: 30154 - DNA, 201 bp, Homo sapiens
tctgttttcagaaaggggtcctgaatagaaagccagcagggcagtggcccatgcctgtaatcccagctccttgggaggccagggcaggagggttgcttcaktccaggaattcgagaccagcctgggcaacatggcaaaatcttgtctctacaaaaaatacaaaaattagccgagcatgatggtggcgcacgggtagtctca

SEQ ID NO: 30155 - DNA, 201 bp, Homo sapiens
cattgtatacacatagagatatttttagtttctcttctgtatagcttagcttatatatatttttacatagtatagtaaattttttttttttttttttttttgagatggagtcttgctctgtcgtccaggctggagtgcagtagtgtgatctcggctcactgcaagctccacctcctgggttcacgccattctcttgcctca

SEQ ID NO: 30156 - DNA, 201 bp, Homo sapiens
gcacgtgtgctggtaccggaacaccagcgtgtccagggcagaccacagtgcagctgtcgaggtacgaccgcatgagcaccacctcagtgcatctggaatgytcccagctgtctctgcacttggctgctgaggaggggacctcaggagggtaccagcaggcaggcttggccccagaggactgcctcttactctccccttggt

SEQ ID NO: 30157 - DNA, 201 bp, Homo sapiens
aactgagagtgaatgcagttccttcagggcaatatttgtaggcctgaaaactgcatgtcctggacatctaaaatatcctagattttaaaaatatataccatgtagaaacaattcagtaataacatgtaaatatgtcagttggcatgaaaaatgccaaggctaggtagaaaaagtgtttacaaagatagaattcagaatgtt

SEQ ID NO: 30158 - DNA, 201 bp, Homo sapiens
tggtgagtgtgggtgcggccctgcatctcaaggatcagcgtgcgtggctgggaggcaggggcggctttgccagacctgaagacttccttcactgggaagcrcaggagtccaccccattagggcctggaccacagtggtcagcattggccctggccttccttcccgtctcctctggctgctggcagagggcaggtcccaggc

SEQ ID NO: 30159 - DNA, 201 bp, Homo sapiens
taactgagagtgaatgcagttccttcagggcaatatttgtaggcctgaaaactgcatgtcctggacatctaaaatatcctagattttaaaaatatataccatgtagaaacaattcagtaataacatgtaaatatgtcagttggcatgaaaaatgccaaggctaggtagaaaaagtgtttacaaagatagaattcagaatgt

SEQ ID NO: 30160 - DNA, 201 bp, Homo sapiens
aaaaaaaaatcaatcaaggctttcttccgagttactgctcacagccctcttacccctttctcttgtgagtgggttgtaatgtccacccagaggggatttaracacggaagggaaggcaagcgtgggcaccatggctttagaaccataaggaagacatttccctctacagattctgtctttccacttgtaacagttaatgag

SEQ ID NO: 30161 - DNA, 201 bp, Homo sapiens
aataactgagagtgaatgcagttccttcagggcaatatttgtaggcctgaaaactgcatgtcctggacatctaaaatatcctagattttaaaaatatataccatgtagaaacaattcagtaataacatgtaaatatgtcagttggcatgaaaaatgccaaggctaggtagaaaaagtgtttacaaagatagaattcagaat

SEQ ID NO: 30162 - DNA, 201 bp, Homo sapiens
ataccatgtagaaacaattcagtaataacatgtaaatatgtcagttggcatgaaaaatgccaaggctaggtagaaaaagtgtttacaaagatagaattcaraatgttgatagttgtgtgattgtgggtgacttcatttttctgctagttctactatgaatatatatactgtctatcttttcttaattaagcagatggaacc

SEQ ID NO: 30163 - DNA, 201 bp, Homo sapiens
gaataactgagagtgaatgcagttccttcagggcaatatttgtaggcctgaaaactgcatgtcctggacatctaaaatatcctagattttaaaaatatataccatgtagaaacaattcagtaataacatgtaaatatgtcagttggcatgaaaaatgccaaggctaggtagaaaaagtgtttacaaagatagaattcagaa

SEQ ID NO: 30164 - DNA, 201 bp, Homo sapiens
gttggcaaggatgtaatttaagcattccctatttcatgagaaaggggttatgtgccagatacaaatgtaatctgtctgtctcttgcatttcagggcaccaycaaaatcaacactttcaactggtccaaggtccgtaaactaagcttcaagaggaaaagatttcttatcaaacttcatccagaggttcatgtaagtattatt

SEQ ID NO: 30165 - DNA, 201 bp, Homo sapiens
aaaagtagcccaggaccagatggattcacagctgaattcaaccagaggtacaaagaagagctggtacaatttctctctctctctttttttttttttttttttgagacagagtttcattcttgttgcccaggctggagtgcaatgtcactgcaatggcagcatctcaaacattaaaaggaaattatttccaaactaattctt

SEQ ID NO: 30166 - DNA, 201 bp, Homo sapiens
tctcttactcttcccaagtgggtaaggtaagcagccccatcgagcagccccatcatttcactttgcatccctgcggactgtcggtgaggccagcctggccygtgtcctggcattccatgcttttcctctcaggaatcactcagcgtgctggtcactctggtctccattggtctgtgagttttttgtacacattagtgaaat

SEQ ID NO: 30167 - DNA, 201 bp, Homo sapiens
ccctggataaagtgaccttatagatagctacagaactgtccccccaaaaacaacagaatataaattcttctcatcaccacatggcactttgtctaaaactsatcacataatcggaagcaaaacactcctcagcaaatgcataagaactgaaatcataacaaacagtctcttacaccacagcacaatcaaattagaactcaa

SEQ ID NO: 30168 - DNA, 201 bp, Homo sapiens
ggaaagtgctaggcacctgtctctcttactcttcccaagtgggtaaggtaagcagccccatcgagcagccccatcatttcactttgcatccctgcggactrtcggtgaggccagcctggcccgtgtcctggcattccatgcttttcctctcaggaatcactcagcgtgctggtcactctggtctccattggtctgtgagtt

SEQ ID NO: 30169 - DNA, 201 bp, Homo sapiens
ttcagaagtgacaaagaccaaatgtggcccagtatgtgaggcaaggcggaagtaggaatttcatgctgttttaaggttgcttagtgtactttaactgaagrtgtaataaaagcaaattctaataaatttgttgttaataatttcctatagtgatgttacctaggttttctatagcaatgaatgtttccttgtgttttcaat

SEQ ID NO: 30170 - DNA, 201 bp, Homo sapiens
ttcaggtggatggaacagcacatgcaggtgccattaggtgacccccatctggcacgtttggggattagcaagagaccatgtggtgggagtggagcagagargcatctaggagggcttctgctcacatggagggaaatggaactccacccaggacgtgatgacttggtccagaaccaggtcaggacaagaggggagcctttg

SEQ ID NO: 30171 - DNA, 201 bp, Homo sapiens
agatgctgttctcaggggaccctgttctgtggggattctgttatgtgggggatgccattctgagggggatcctgttcagacggggatgctgttttgaggcraccctgttctgagggagattcttttctgtggggaccctgttctgaggggaccctgttttatggtgttctgtggggattctgatctgaagggaccctgttc

SEQ ID NO: 30172 - DNA, 201 bp, Homo sapiens
cggctaatattttttttttttgtatttttagtagagacggggtttcatcatgttggccaggctggttttgaactcctgaccttaagtgatccgcctccccscctcggcctcccaaagttttgggattacaggtgccagccaccatgcctggcctatttttttttttttgagtcaggatctcactctgtcacccagactgga

SEQ ID NO: 30173 - DNA, 201 bp, Homo sapiens
tcctgttatgaaggaatcctgcttggattccttgagatgctgttctcaggggaccctgttctgtggggattctgttatgtgggggatgccattctgagggrgatcctgttcagacggggatgctgttttgaggcaaccctgttctgagggagattcttttctgtggggaccctgttctgaggggaccctgttttatggtgt

SEQ ID NO: 30174 - DNA, 201 bp, Homo sapiens
ggagaccctattcagagggggaccctgttctgggtgctcactaccctgagggaactcttatgtgaggggaatgttattctgggggggacactaccctgagsggatctcgttctaagtggggaatagtgtcatgggggaacatgttctgaggaggatgctgttttgaaggggaccctgttctgtgggggattctgctctgag

SEQ ID NO: 30175 - DNA, 201 bp, Homo sapiens
ctcgagcatcctgtttctttctatagaacaacattcagagttaggacattgcctttggactccatgccacggtgactgtggctaggaagttgtcctccctstaccagactctcccccagggcccaaggccaacagtttgtggggcattaacatgtaacatccctgtccctcagctgtgtggggaaggctggggcctcccag

SEQ ID NO: 30176 - DNA, 201 bp, Homo sapiens
gatctcactctgtcacccagactggagtgcagtggcatagtcaaaactcactgcagccttgacctccccgggttcaggtgatcgtcctgcctcagcctctygagtagctggaactacaggcgtgtaccaccatgctggctaatttgttaaatttttgtagagatggggtctccccacattacccatttgtctcaaactctt

SEQ ID NO: 30177 - DNA, 201 bp, Homo sapiens
cagaccccatttgttttaaagtatacttttaaaaattacacctttattatagaaaaaaataattgaaagtataagacagaaatcactcatcactggccagktgctgtggctcacgcctgtaatgccagcactttaggaggtcaagatggtaggatcgcttgaagctgagagtttgagacctgcctggggaacatggcgaag

SEQ ID NO: 30178 - DNA, 201 bp, Homo sapiens
attgccttacccacacatttggcaccctggttggaacctcatgtgcagaatctcattctccctccagcccacttggcctcatttttgtggtcacagaaacrttctcagtccagaagtgggcactgcagtgtcctttgggctcttggcttggagtttgtccattgtcacttctgccacattttattaatcaaagcaagctac

SEQ ID NO: 30179 - DNA, 201 bp, Homo sapiens
tactttttagcaggtttactgcctggccccacatgcaacaataggaacccaaccccagcagaccctgggctccacaatttcatctccatcatccacagagktatgacagcctcagttctaagcacagatatttaaaattataatataggaggatccaagatggctgattagaagcaactgaggttcacaccactcacgaag

SEQ ID NO: 30180 - DNA, 201 bp, Homo sapiens
tctgccgtcggagctgggagtgccaaagtgaacgtagcagacaggagctctgcctccttgcgcttgttcggcagtggggagctcaacagtggacaaggtayactgcgaagtgcttagtgcccaggagagaaataaagcacggagggagcaggagacatggagctgcgctcagatggagatccacatcccacactcccacag

SEQ ID NO: 30181 - DNA, 201 bp, Homo sapiens
cagctctttatgtcccaataatgagacatccttcaagatgcatcattacatggagaaaagattgaaaactctgtatagtagctactgcttgtggggaaaaragagaaaattatatgtgcactatattccacactattaaatgaactggtgacattaatggccccagggaagagtggccaagctggcaggctttggaacagt

SEQ ID NO: 30182 - DNA, 201 bp, Homo sapiens
cagtatcatatagcaattttaacgtcttcccatgcttcccaaagcaggcattgctgtccttcttgtacagtttgttttatcaggattcaacctttaagagsgggggtagagtcaaaattttcctgacataaaaatttatcttattataaccatttttgtttttatagcatacttgttaaatagagacattatttaatagat

SEQ ID NO: 30183 - DNA, 201 bp, Homo sapiens
tgggccctcagggtgtactctctggggagctgctggccccttagcattgtttgatttttgaccttgatacaatagataggcttgtgttgtgttttttttttaaatttaaagatattaagacaattcactaaaatttattctaaggggatatttatacttttatacttttttaggtatggtattttatcagcttatagttga

SEQ ID NO: 30184 - DNA, 201 bp, Homo sapiens
ttttgatttctctaagacttgacactggtgggtttttctggatggaagtgatagagacctagagaaggagtgctagctaaggggaaaaggattgaagaacrgtatgggaaagggctctgggctctggcccaggtggctgggagctttagtcaccaaaggggagcactcagctggtgaaagtgagtcaggaggacttagcct

SEQ ID NO: 30185 - DNA, 201 bp, Homo sapiens
ctgcctgtggaagaacaaagaactggaccctcagggtagttctgtgtgtgtgtgtgtgtgtgtgtgtgtgtgtgtgtgtgtgtgtgtctgggtgtgttctgtgtatacatgtgtggctgtgtggtcgtgtgtgcatgtatatgtgttcctatgcatgcattgtgtgtgtttctgtgtgtggctcatatgttcatgtgtgtt

SEQ ID NO: 30186 - DNA, 201 bp, Homo sapiens
gtgtacttgcacatgttcttgtgcctgtgtctctgcatgtgtgtgtccttacatgtgcacatgtatccgctaaaaaccctagaaagccggtacgagaaggrtgagccatgtggtctgcttcatacgggaatacagttgaactcttgccgaataagcccggaagcaggaagctctgctctacgttgtaggccttcactgtgt

SEQ ID NO: 30187 - DNA, 201 bp, Homo sapiens
tttgtgaccttcctccttgaaggtatggctgcagatgtgtaattatatgtgggtagatggtatgcctgaaaaggctaatttctttctttttttttttttttcgagacagagtttcgctcttgttgcctaacatggagtgcagtggcatgatctcagctcactgcaacctctgcatccgggttcaggcgattctcctgcctc

SEQ ID NO: 30188 - DNA, 201 bp, Homo sapiens
accatagatcttaatagtgtattaaatgcctgacatttaccaaaaaaaaagtctcttttgagggaatcacttttaaatagagatagatagatagatagatwgatagatagatagatagatagatagatagatagatacctgaaaatgatggataacaaagtgtcccctcattcaggatcctgggtctcaagttctaggact

SEQ ID NO: 30189 - DNA, 201 bp, Homo sapiens
tctgttgaatccaggaggcagaggttgcagtgagccgagattggcatttcagtccagcctgggcaacaagagcgaaactctgtctcaaaaaaaaaaaaaaagaaaatattaacaattgtttcatctggacagtaaggttatggaaggtttttctttgtattttttgtatttgttcacatatcaattatattatgaagaata

SEQ ID NO: 30190 - DNA, 201 bp, Homo sapiens
aaaacaaaaacataaactggggaaaaaatgtctctctctctctctttatatatatatatatgtatgtgtgggtatatatatgtctgtgtgtatatatatakagagagagagagagagcacgcgcatgtttttgtgtgtggaggggtgggcaatctcgttctgtcacccagcctggagtgcagtggtgtgatctcagctcag

SEQ ID NO: 30191 - DNA, 201 bp, Homo sapiens
tcaccttgttggtaaggctggtctcaaactcctgagctcaggtgatccacccgcctcggtctcccaaagtgctgggatgaaagacgtgagccactgcacccggcctccttatggttcttagtgcaatttggagtagaagtttggtgtacagtattttaggaatatgtgagaacccaagatttgaaaatgtgccaaaatgag

SEQ ID NO: 30192 - DNA, 201 bp, Homo sapiens
aatgtttccttgtgttttcaatgtatcttgtgaaaaattccagaggaaagctctgctatcatgagcactgatatttcatcttaagaatcctaataactagrattcctagcagcaggcaagatctttccagggctcctgatttgtcaatgtgaaaataaggactccctcccctccatctcccatgtcccactggagggttaa

SEQ ID NO: 30193 - DNA, 201 bp, Homo sapiens
aaaaggagttagaaaataaaaagtagatttgccaagctaccatggggtttgaagcttaagagatggccatgcctgtgtcagcccagacacattttgggttwtgggagatttagagcctttgggccagtcagaagaaaagctttgcctacgcctttaaaaggcacttgagtagtagggcttttggtacacactgggttcacg

SEQ ID NO: 30194 - DNA, 201 bp, Homo sapiens
cactgtggactcatttttgaaccttcagaatttgagccttgtgaatgtatcactgtattacattttcacaaaaccttcacaggaataaaacactgcatctmtgaaatgagcaggataccatgatagaaacaaatggagaacataaaaacatttgcaaattaaaatacaggctgccccagtccatccccaccccatgtctcc

SEQ ID NO: 30195 - DNA, 201 bp, Homo sapiens
tggcaattacggacagctcttacgagcatttttgtgtaatcctcaaacccacatcatggcatgcactgttttactccattgtacatacggtcagaccatgygtgcagagctccatctcggacatgacggtgtggggcatcttgtgtgtgtaagtcggtgcttctcatccatttgcctgacctgaccttgaggaggcctcca

SEQ ID NO: 30196 - DNA, 201 bp, Homo sapiens
gggatctcttgtgtttgcaggggagtgccttttgtgtgcccgacagcatggcagtcatgagatatacagatgcgtttctacagatgagaatgtgtgcagtrtagcgggagcatagctcatacgctgtgagctgaaagaaggccgagggcaggctcaaggaggctcgtgggaggacctaggcggacaaagccagggaggaag

SEQ ID NO: 30197 - DNA, 201 bp, Homo sapiens
agttgaaaaagggtacagctaagagaatttcatattctctgtgccacctgaagtgcacactcaagctcccacaacagccgtcagaatcaggagcagtggtsgacagtccgggaatctggccgtgtgtggtgcctctcctgtgagccagagctggagctactaggatggagaaggtgcagtccttgccctttaaacttgcca

SEQ ID NO: 30198 - DNA, 201 bp, Homo sapiens
ttctgctggcacttcacttctgggggcatttttcagtcatatcggcctcacgtaaggaagctaattctacattattgttcctttttaggtatagaaagtartcatgaatctccagagagctgatggtagaattacagtgatctctgttctttgagagagtgcattctacttttttaccttaccaagtgttacatgtatatt

SEQ ID NO: 30199 - DNA, 201 bp, Homo sapiens
tgcactactctaggcagtgcaggggctcaggtaggacggggaaccctgacctccccattgactcacaggggcagccaggtagttgaaaaagggtacagctragagaatttcatattctctgtgccacctgaagtgcacactcaagctcccacaacagccgtcagaatcaggagcagtggtggacagtccgggaatctggcc

SEQ ID NO: 30200 - DNA, 201 bp, Homo sapiens
gcagactgcagggatgcgcttgggtgcccagacccctgtgggagttagcacccttgagcctgggcagactctcttgcccagaatgcaagagaagcacctgyacctcagagtaaagctgctggacaacaccatggaaatatttgacattgaggtaagaagcatgatttttggaggcatatttccttatatcttctaacagtc

SEQ ID NO: 30201 - DNA, 201 bp, Homo sapiens
tctggggatgaagctgcccctggtgaagccccccaagtcctttcctgcatgtcgagcaaaggcccattgggttacatgctgcagctagaagaccaatcaaygccatctctcaaggttcctcatgcttctttttttagagggaattcatccaaaatgtaattcggttttcattataccattaatacttgtacgctgcagaaa

SEQ ID NO: 30202 - DNA, 201 bp, Homo sapiens
gtggctcatacctgtaatctgaatactttgggaggctgaggtgggaggatcgcttgagcccaggagttcaagaccagactgagcaacacagggaaaccccrtttctatgaattaaaaaaaaaaaaaaaaaaaaagaattgctgggtgtggtggcgcacacctgtggtcccagctactcaggagactgagatgggaggatcg

SEQ ID NO: 30203 - DNA, 201 bp, Homo sapiens
ctgtctcagaaaaaaaggaattaatgcgagcactgccacctgcctggggcagccttagggcagggctggcgggggcgacctgtgctgctgcagtgcaagaytcagagtgccgtggcccagcacccggtagcttgtccaaatggctctggctcaacattggtggcacctactttctcaccacccagcagatgctgtgccagg

SEQ ID NO: 30204 - DNA, 201 bp, Homo sapiens
ttcagtgtggatagactccccagtgcttatactctggaagtgcccacaaggattgctgcattcagactgatctgttcaacccgttagcgtgaggtagcagtgttgccttgtcccccactctgtgggctcacgggggagctggtgcctgtcagtgccatgtcgctcctggcatagaggttgggctggaagcctgtctgctgg

SEQ ID NO: 30205 - DNA, 201 bp, Homo sapiens
aacttacgggaagactaacatctggacaatgttttgcctgcccttgcttatgttgattcagatttttgatgtccagtgagaggcttggttggtgtatcagsctctgcacagggaagctgtccattctgtggagttgttggtaactggctggtcctggggacagagaactggccctcgttcctgactgttaagggaaggatg

SEQ ID NO: 30206 - DNA, 201 bp, Homo sapiens
tgttggtaactggctggtcctggggacagagaactggccctcgttcctgactgttaagggaaggatgatggctcttggcttgaaaagatcatctttatcaygttaacacagtttccttctgtttctaagaggtattatcagaaataacaccttggattttggcaaaggcattttcagcatgtagagaatggatttcccttt

SEQ ID NO: 30207 - DNA, 201 bp, Homo sapiens
catctttatcatgttaacacagtttccttctgtttctaagaggtattatcagaaataacaccttggattttggcaaaggcattttcagcatgtagagaatkgatttccctttttctctttgacttctgataggatgaatgttatcaatcagctttctaatgccgaacgatccttgcattccccaaacaaccttacttgatc

SEQ ID NO: 30208 - DNA, 201 bp, Homo sapiens
gatttccctttttctctttgacttctgataggatgaatgttatcaatcagctttctaatgccgaacgatccttgcattccccaaacaaccttacttgatcrtgggacaattccttgttacatgcttttagattagatttggtaatattttattttgcaattatttcatctaactacttaaaattaaaattaatccacagtg

SEQ ID NO: 30209 - DNA, 201 bp, Homo sapiens
tttcatctaactacttaaaattaaaattaatccacagtgggttttctttgaatctagctctgttaggttttggtctttggttcataaatgaattgtccaaytcccttttggataatcaaaatgctcaacattttttcctttgcttgattttcagctaatagtgctggaccccccggtgagtatttgggtgccctctggccc

SEQ ID NO: 30210 - DNA, 201 bp, Homo sapiens
cccgtgggcatttgtacgtgccaccgttgtgcaggtagcagaggaatgggcattccctgtggcaacccagcccctggaacccgtgtccctatgctgtcttscaggatgactacccactggccagcctcccgctgctgggctacagcgtgagcatccccagggaggccgatggcatacacaaagactatgttttcaagctcc

SEQ ID NO: 30211 - DNA, 201 bp, Homo sapiens
gtgatccatctgcctcagcctcccaaagtgctgggattataggcatgagccaccgcacccggccccaggtttttaacccttcttttgtcctgcttgtcccrtatcctgggttgttcttgggacagtgtctgagcacaagatggctcactggtctgatggccgccctctcctccaggtggatggaggtgatccagggggcca

SEQ ID NO: 30212 - DNA, 201 bp, Homo sapiens
aggagcagcaatgactggcccagaccccacccccagagctgctgcccaggggcgccgggaaggggtccctgtgtgtggaccaggacttggcgcatctgccrgcggcatggcggttggaccctaagtccgttgggcggtggagggcccagcatctgtcctgccctgtctctttgctaaggactcgagtcagcacaggggcag

SEQ ID NO: 30213 - DNA, 201 bp, Homo sapiens
caaatggagaacataaaaacatttgcaaattaaaatacaggctgccccagtccatccccaccccatgtctcctacctggtctgcacgccaggcaggggtcrtcagcctctttgtcctgcagagttgtgctggcacatgctctgctactttttagcaggtttactgcctggccccacatgcaacaataggaacccaacccca

SEQ ID NO: 30214 - DNA, 201 bp, Homo sapiens
gaagcacgtgctgccactgaggccacccgtcaagcttttgcacttgcacccagttgctgggctgtgcggggaggggcaaagagctgcccaccctccagccyaccctcgccagctggtgccctcctccccagtgtctcccacttgatgcactgtttgtcccctttttaatagagatttgtgaggatcggccacagtcgaaag

SEQ ID NO: 30215 - DNA, 201 bp, Homo sapiens
acaggccagtctccccctggactcctacatctcctcacctaaaggccccactcttgcgcctccacaggagtttaccagctacttccaaagacatgacgagrtcctaacagaactggaaaaggctaccaaacgctgtaagaagttggaggcagtgtacaaggagtttgagctgcagaaggtctgctacttgcctctcaacac

SEQ ID NO: 30216 - DNA, 201 bp, Homo sapiens
gccatgtaacccttgtagaagttcaatgggggctgggcatagtggctcaagcctatagtcccagcactttgggaggccacggcagaaggatcacttgaggscaggagattgagactagcctgggcaacatactgataccttgtctctaccaaaaaaaaaaaaaaaaaaaaaaaaattcctggcatggtggcacacacctgt

SEQ ID NO: 30217 - DNA, 201 bp, Homo sapiens
cgcctggcactgtgtgaggctggcggttgaatggtcaggagagtagtagcggctctaagccagcctcacagccctttctcatttctcgctccatccccctycccgttcatttccaggcctttccacgaagagtcctcagccttctccctccagccggaagagccccctgagtctgagccctgcatttcaggtgcctttggg

SEQ ID NO: 30218 - DNA, 201 bp, Homo sapiens
taaggtcagtggggctcaggacgttacaagagccacatccacccccagcaggacctttgatgtctcggtggatcttgcgttcggagtgcagataatccagscccttcagaatctcccgcaggatcgtggcaatgtatgtctcctccaggggacctggtttaagctggagaggaaggtgcgacagcagggcctcagctcctg

SEQ ID NO: 30219 - DNA, 201 bp, Homo sapiens
caccactagccacttgcccctcacaggccccggcctctctaaggtcagtggggctcaggacgttacaagagccacatccacccccagcaggacctttgatrtctcggtggatcttgcgttcggagtgcagataatccaggcccttcagaatctcccgcaggatcgtggcaatgtatgtctcctccaggggacctggtttaa

SEQ ID NO: 30220 - DNA, 201 bp, Homo sapiens
tgactctgcagcgccctggccagcatcagagcacagggcactcagttcccaccaggaaatgctcacttaatcatgaaccagggccaatcttgcatttcagyatcacagatgtagagaacatcatttcaggaacaaatacccctgcagaccccctgttctaggaccggggccctgccctggcacccacaaccctgtcacagc

SEQ ID NO: 30221 - DNA, 201 bp, Homo sapiens
gtgttcctgtgtacattgtatactgtggttatgtgtacttgcacatgttcttgtgcctgtgtctctgcatgtgtgtgtccttacatgtgcacatgtatccrctaaaaaccctagaaagccggtacgagaagggtgagccatgtggtctgcttcatacgggaatacagttgaactcttgccgaataagcccggaagcaggaa

SEQ ID NO: 30222 - DNA, 201 bp, Homo sapiens
tgaggataggctcctcaccttgcccttttcggaccttggagcagcacagagctgcagccactgatgtcaggcgcctctgggaaggtggtggtgcctccccrgggctctaaagcacctgctgcccagtgggcagggtgctcagtgagcacctgaggccagggtgggaggcacctggcagtaagcccttcctggagctcagca

SEQ ID NO: 30223 - DNA, 201 bp, Homo sapiens
cacaacagacctcagagccctcttctccacagctggaaggtgcagtgcttttcagggttctgctggcacttcacttctgggggcatttttcagtcatatcrgcctcacgtaaggaagctaattctacattattgttcctttttaggtatagaaagtagtcatgaatctccagagagctgatggtagaattacagtgatctc

SEQ ID NO: 30224 - DNA, 201 bp, Homo sapiens
tgcttttcagggttctgctggcacttcacttctgggggcatttttcagtcatatcggcctcacgtaaggaagctaattctacattattgttcctttttagrtatagaaagtagtcatgaatctccagagagctgatggtagaattacagtgatctctgttctttgagagagtgcattctacttttttaccttaccaagtgt

SEQ ID NO: 30225 - DNA, 201 bp, Homo sapiens
tccaggcaaagcaccagcctgggaagggagggagaaggaagcagagaggagagggaggttccagcatggcttgggcagtttgggttcaagggctggaggtrgaagtgccaactgatactggagaggctgtagtggcaattacggacagctcttacgagcatttttgtgtaatcctcaaacccacatcatggcatgcactgt

SEQ ID NO: 30226 - DNA, 201 bp, Homo sapiens
accctaaggcccccgtagacattagccttttcttcagcaacccttttgcacagacaagtggagaaagagtcccactgggactctggggggacagtcatccwttgcactggggttgggggtgaggggatgcctggaactgtcccagtgccaaaggcaccatgtcatttttttttttaaaggtgtcaaagggccactgcctca

SEQ ID NO: 30227 - DNA, 201 bp, Homo sapiens
tatttgaacagcaattcttttttccaaaagaataacaggattatgtttttactcagggataaatctcttcagaagttgaaggtgaaaaccccatgacgatrttaccttgagcagaagaaagcaaacattaccaacttcaggctccctgagcgtgggagggtcccatgtcccagggacgcacacttacagctctctgcttct

SEQ ID NO: 30228 - DNA, 201 bp, Homo sapiens
tgtcagttccttcttggccacaagacttggaccgtttctcccacccacaggtggaagaaagtgataacgagtggtctgttccacactgtttcaccatctaygcggctcagaaaacaatcgtggtggcagccaggtaagggtcttccatgtctccatcctgagcagccctggatggaggggtggggacttcctcgccatgag

SEQ ID NO: 30229 - DNA, 201 bp, Homo sapiens
aatggctcttcttacaactatgggaatgaagatcaggccaagttcctctatgtggtgtccaagaaacttcacaacaccccatacagtatggccagtgaacycagaaagaaggccaagattttgcaagaacaaggttcaaggatgtgagggacacagtattgacagctgaaaaaatgatttactctttcccaagatgcaatg

SEQ ID NO: 30230 - DNA, 201 bp, Homo sapiens
ctctgtcagcacctggcaggacaaggcctgctccccgcaagcttagagtcagcctctgcagcagcatcttcctcaggctgtgccacctgtgtgacatccaygccagccctctgtcccatgtaggcacatgcctgggatgggaagagaaattcctcattttagcatgatccagttcatcaactttgtcctttgtggttagtg

SEQ ID NO: 30231 - DNA, 201 bp, Homo sapiens
ttatttctccttttatcatggtggtcaagaccctgggatatacagttggccctccatatccgcaggaaaataaacgataaaaaacaatacaggctgggcgyggtggctcacacctgtaatcccagaactttgggaggccaaggctggtagatcacctgaggtcacaagttcgagaccagcctggccaacatggtgaaaccc

SEQ ID NO: 30232 - DNA, 201 bp, Homo sapiens
tgtcttgctgtggagacatgtctatgttacattcagagaacatttggaattgatctctgtcttattttgaactctcttctagatacttgtttgccttgcarcttaagagagacctgctggaagagcgtttgacctgtgctgacaccacagcggcccttctcacgtcccatctcctgcagtgtgagtatctccccgccagcg

SEQ ID NO: 30233 - DNA, 201 bp, Homo sapiens
gactgctgtggctctctgatggcgtatgtgtctctatgtgcctcgcccctggaggagtggagctgctccgggactcgagcatcctgtttctttctatagarcaacattcagagttaggacattgcctttggactccatgccacggtgactgtggctaggaagttgtcctccctctaccagactctcccccagggcccaagg

SEQ ID NO: 30234 - DNA, 201 bp, Homo sapiens
cctccaaccctcacaccttacctccacaccggaccttcagaatgtgtccaggatctcacccctcacccctccgcgccccccaagccagtgctgtctcgccrggtggtgctgaggtccaccgggagcctctctgccctcctggtctgctctcatcctggggcccaagtgtgtcacagcacattcaggtagaccccaaagggt

SEQ ID NO: 30235 - DNA, 201 bp, Homo sapiens
aaaagggagtacatttgttggggctggcagaagccagccttgcaattttatttatccttcattttgatgagagtttccaagggtgctggatgttaagtgtrtgttgttgatccattctatcatgcacctgctctgcctactgctgtgggggaacctgttctgagggggacccttttctgaggggactcagttacgagggga

SEQ ID NO: 30236 - DNA, 201 bp, Homo sapiens
tttataagcacacacacactcatggacctgtgtctgctaaccagctatgccactggcagtgatatataaaaaatgattttatcacaaaaccaataataaayttcaaccctgtttacatatggtgatatttgaacagcaattcttttttccaaaagaataacaggattatgtttttactcagggataaatctcttcagaagt

SEQ ID NO: 30237 - DNA, 201 bp, Homo sapiens
tctggagaggctcttgggcgggagaccccgtgtcgatgttggagacagtggaggagccacctggggcgagggggcggttctctgctgttgtggcacggggmggggggcacatgggccacagacaggggtgaggctttatgacaaagttgaggcagtgtcccctatgggtctctttttatcagagatgataggaataagggc

SEQ ID NO: 30238 - DNA, 201 bp, Homo sapiens
cctgcagaggcgaatccttacccagcaacactgagagcagcacctgctgagtatttggccgcactgggagcagcacctgctgggcatttcttgttggttgwttctgaccctcatggtcattgttgttattgatgctcaaactgccctgtctctagtccatggttcccttctagggaaacctggactcagcctgtggtctct

SEQ ID NO: 30239 - DNA, 201 bp, Homo sapiens
atccccctcaggctctcagaacaggattccctcagaataaagttccctcaaaacagagtccttctcagagcagcagccccctcagaacagggtctcccttkaagcatcattcccattagaacaaggttccccagaacagcatcaccctcagaacagggtctcctcagaactctatcttcctcaaacaggatcctactctgg

SEQ ID NO: 30240 - DNA, 201 bp, Homo sapiens
tgacctctgacctgtcccacaggctgcccggtctgctctgagtgaggctgcggcctactgtgtcccccagcctccagcccctcctctgctctgcgttatgycttgtacagccctctgtgcttcttgcctgtcttctcctggtaggacaccctcacaggggcagggggcagtgtccaggcgcctattcggagctgacacctg

SEQ ID NO: 30241 - DNA, 201 bp, Homo sapiens
tccacaccggaccttcagaatgtgtccaggatctcacccctcacccctccgcgccccccaagccagtgctgtctcgccgggtggtgctgaggtccaccggsagcctctctgccctcctggtctgctctcatcctggggcccaagtgtgtcacagcacattcaggtagaccccaaagggtccagaaggcccacgtggcctgc

SEQ ID NO: 30242 - DNA, 201 bp, Homo sapiens
ccacatgccacctcagctacttgctcacttgcaaacccagctcctgatactcctcccaaacctccagtcatggcagctggtctttcccttggcttaggccraaaactgcggcagtcacccctcctgcctccaaccctcacaccttacctccacaccggaccttcagaatgtgtccaggatctcacccctcacccctccgcg

SEQ ID NO: 30243 - DNA, 201 bp, Homo sapiens
ctgggattacaggtgtgaccacctgcttggctaaccttttttttttttaagagacagggtctcactatgttgcccaggctggtctcaaactcctggcctcragtgatcctcccatatcagcctcccaaagtgctggaattagagtcatgagccaccacatccagccaagaaaagactttgtaaagagattttactgaattt

SEQ ID NO: 30244 - DNA, 201 bp, Homo sapiens
cagtgtcaatttttttaatggtttgtcatttatactgtcatagcacttcagaagctacacttgcacctcattatattaaaggtcatgtgaactgggcacartggctcacacccttaatcccaactactcaagaggctaaggctggaggattgcttgaagccaggagtttgagaccagcctggacaacatagtgagacctat

SEQ ID NO: 30245 - DNA, 201 bp, Homo sapiens
cgaggcctgcaagtgagggctagttctgggccctggcagcaagactgtttccaaaaaagatgtctttttattttattttggaaacctaatgacaatctctytagttcactgtttctttggtacaaaaaaaaaaatggctaccaagcagtctgttattaagactaaattttaatttgtaactttttatattacaaaaatcag

SEQ ID NO: 30246 - DNA, 201 bp, Homo sapiens
cctttctcatttctcgctccatccccctccccgttcatttccaggcctttccacgaagagtcctcagccttctccctccagccggaagagccccctgagtytgagccctgcatttcaggtgcctttgggcccagctgaacagggctcatccccactcctgagccctgtcctcagtgatgctggcggagccgggatggactg

SEQ ID NO: 30247 - DNA, 201 bp, Homo sapiens
aagagagaaagcctgtatgttgagatgtgcatcatagtgttgtgtgtaatacaccacaaaatcctgacaactctcatctgtgccagatgacttactaactrtgtttttagctgtattcacttagtaggattttttgttaactgctgaaagcatggcttaaaaagagtatgtggtaacatggagaaattcttgctgttatgt

SEQ ID NO: 30248 - DNA, 201 bp, Homo sapiens
aggtatcttctctcttctggctgttggatgggtttgtggatggttggttactgaacactgactttattgtgcacagggaaagggaactcactttacttggygcctggaatgtcactctaggtttttaacatgcttctgttggacttaagtactgataaagctgctgttcatagcagtccagaggtaaaaccaaggcctcag

SEQ ID NO: 30249 - DNA, 201 bp, Homo sapiens
ctcccatttctactcatggtggtggaggcaagttttctgggccctggaaaggaagggctgagcaatgcttccagcatttccaaaaaacagcaatgctttgttttttttttttttggagatggcgtctccctctgtcactcaggctggagtgcagtgatacaatcttggctcactataacctgcacctccagggttcaagcg

SEQ ID NO: 30250 - DNA, 201 bp, Homo sapiens
ggaagttcttccccatgccaatattatattggcaccttttaatggtttcagttttctcatttaattaatctccctagaatttgtttttttacttttttggtttttttttttttttttttagatggagtcttgctctgtgtcccaggctggagtgcccaggcacgatctcggctcactgcaaactccgcctcctgggttcac

SEQ ID NO: 30251 - DNA, 201 bp, Homo sapiens
cgggaccctgagacactgcctcagacccttagactggaaaggccctgcccactctctccagccccaaagtctccatggccctgtgagctgggtccaaacaaggaagaggatgccacgccgcgccttcccagagtgaagcgagcccatgtagtgccaaatgcagccacacccacgagtgagcactggacctcaccccacgtc

SEQ ID NO: 30252 - DNA, 201 bp, Homo sapiens
gggaccctgagacactgcctcagacccttagactggaaaggccctgcccactctctccagccccaaagtctccatggccctgtgagctgggtccaaacaaggaagaggatgccacgccgcgccttcccagagtgaagcgagcccatgtagtgccaaatgcagccacacccacgagtgagcactggacctcaccccacgtcc

SEQ ID NO: 30253 - DNA, 201 bp, Homo sapiens
ggaccctgagacactgcctcagacccttagactggaaaggccctgcccactctctccagccccaaagtctccatggccctgtgagctgggtccaaacaaggaagaggatgccacgccgcgccttcccagagtgaagcgagcccatgtagtgccaaatgcagccacacccacgagtgagcactggacctcaccccacgtcca

SEQ ID NO: 30254 - DNA, 201 bp, Homo sapiens
atgtggtttttttttttttcattttagtgttttcttcactcatggtgaagaatgggggagatagaaggaacatacagagtcctgcagactgcagggatgcrcttgggtgcccagacccctgtgggagttagcacccttgagcctgggcagactctcttgcccagaatgcaagagaagcacctgcacctcagagtaaagctg

SEQ ID NO: 30255 - DNA, 201 bp, Homo sapiens
tttatgtcatgtttagaattgtgtgtgatagaggctgtacatacacattttacaggaagcgcctggcactgtgtgaggctggcggttgaatggtcaggagwgtagtagcggctctaagccagcctcacagccctttctcatttctcgctccatccccctccccgttcatttccaggcctttccacgaagagtcctcagcct

SEQ ID NO: 30256 - DNA, 201 bp, Homo sapiens
tctgtggattgctctctgaaattgggtagatgaaccatcaaccctcattttcattttatgtcatgtttagaattgtgtgtgatagaggctgtacatacacrttttacaggaagcgcctggcactgtgtgaggctggcggttgaatggtcaggagagtagtagcggctctaagccagcctcacagccctttctcatttctcg

SEQ ID NO: 30257 - DNA, 201 bp, Homo sapiens
aatgaaatatatttcatcatctttagaattgggctgcaaatttggcacctatttattcgaaaacaaacatggttttaagaaggggaaaattattactgtgktttagaaaaccaaaataaaatccccattaatgaaaaactcaaggaactggaaaacagtatcatgaattgagcagttttatatgatccgttttttaatgaa

SEQ ID NO: 30258 - DNA, 201 bp, Homo sapiens
cttcagaagtgacaaagaccaaatgtggcccagtatgtgaggcaaggcggaagtaggaatttcatgctgttttaaggttgcttagtgtactttaactgaakgtgtaataaaagcaaattctaataaatttgttgttaataatttcctatagtgatgttacctaggttttctatagcaatgaatgtttccttgtgttttcaa

SEQ ID NO: 30259 - DNA, 201 bp, Homo sapiens
cctgtcctcagtgatgctggcggagccgggatggactgcgaggagcccagacacaaggtgggcccctcgaggctgagaagctagcagagggttgcagggtrggcctgttttcactgttccttcgggtggtgctggtggggaccctggggcggggcagggaagggctctgcactcacagccgccttaccagcctcctgagca

SEQ ID NO: 30260 - DNA, 201 bp, Homo sapiens
acaggcatgcacaaccacacccggcaaatttttgtatttttagtagagatggggtttcaccatgctggccaggcttctctcaaactcctgacctcatgtgmttcacctgcttgagcttcccaaagtgctgggattacaggcgtaagcccggccaacatctgcttttaaccatgcattctgatatgcattatcagtgtcaaa

SEQ ID NO: 30261 - DNA, 201 bp, Homo sapiens
gtgactacttcgggatggagtttcaaaatactcagtcctactgggtaagtgcttatgacgtgcccaggcgtggagcctttgggcctgctgtgatgacagcygcaagatctttcatcattgccacatcatcagcattaaatgtttttgctattaaaatatattcttgttagctgtagagaatatgtctgcctttaatccaag

SEQ ID NO: 30262 - DNA, 201 bp, Homo sapiens
attttgtgtaagagccactcatgacatcctcttccagtagagaagccagaaataattttcggctaactcatcaggttcacatttacttggatcccttggayagttccacattttccttttcttctggaattaacaattcatttggccgggcgcggtggctcacgcctgtaatcccagctctcagggaggcaagaggcggga

SEQ ID NO: 30263 - DNA, 201 bp, Homo sapiens
gctgaatgcacagtaagagatgaaccaatacctggaccccttgccattaaccatttttctatctcccgcttgtattctttgagccagattttgtgtaagakccactcatgacatcctcttccagtagagaagccagaaataattttcggctaactcatcaggttcacatttacttggatcccttggatagttccacatttt

SEQ ID NO: 30264 - DNA, 201 bp, Homo sapiens
cgagaccatcctggctaacatggtgaaaccccgtctctactaaaaatacaaaaaattagccaggcatggtggtgggagcctgtagtcccagctactcgggrggctgaggcaggagaatggcatgaacctgggaggcggagcttgcagtgagccgagatcgtgtcactgcactccagcctgggtgaaagagcgagactctgt

SEQ ID NO: 30265 - DNA, 201 bp, Homo sapiens
acacaaggtgggcccctcgaggctgagaagctagcagagggttgcagggtgggcctgttttcactgttccttcgggtggtgctggtggggaccctggggcsgggcagggaagggctctgcactcacagccgccttaccagcctcctgagcagagaggaggtactgggccgccttccctagcaaaaccttcctgagactttc

SEQ ID NO: 30266 - DNA, 201 bp, Homo sapiens
agtttgttttcgggaccttgcctccattgttccaatagaaagattaataagtcagagcatgcttctcaaagttttggacacaatgtattagaacaaaaacrtagaggctgtggagcaccttcacttattcaagaggagaccgtacacctggcagatagcagatctggacaaatggcccaaagcacaacttgctgttatagg

SEQ ID NO: 30267 - DNA, 201 bp, Homo sapiens
ggaaggccagtggggaaaggtgccttgcttcttcttggtcttagctctgtcagtgcttcctgctctcgcctggtgtggcctgcacggcagagctgggtgtyggggaggacgtgccgtgcaggcccccaccacaccccacggggcgggccttgtgtccttgcacttttaccgtgcacagaacagatgctgttggcttaaaat

SEQ ID NO: 30268 - DNA, 201 bp, Homo sapiens
tgacgttgctcttttccaccttaacaagacagtttacagtggttaaatagcaaaactccaggagcaattcagcctgaggccatagtgccctgcagcagcaytgggctctgcttttgtttctgctttgtgctttgtggctcttcttcaagccagtgttgggtagtgcacagcctgagaggtgtggcctgataaaccctgaaa

SEQ ID NO: 30269 - DNA, 201 bp, Homo sapiens
actacaggcacacatcactgcgcccagctaatttttaaaaaatttttgtggagacaggttctcttcatgttgcccaggatggtcttgaattcctgggctcmagcagtcctcctgtctcagcctcccaaagtgccagaattgcaggcatgagcctgggtgctagagcgaggccctgtctcaaaaaaaaaaaaaaaaaaaaat

SEQ ID NO: 30270 - DNA, 201 bp, Homo sapiens
tccccttcattactgttgcctgacgacggtccttgctgatgctgtgaactaacaaagttgtctttttgtttttaagggaacccaccctggcgtctggacakcaggttaggtttgggtggttttgagctagcactgctgtggggcaggggtggccgctccctggtgaagctaatgctgtggaagctggaatgttccttccta

SEQ ID NO: 30271 - DNA, 201 bp, Homo sapiens
ttttccttttctcatcagtgttggctggatgccagcaggggttttgtggctaaccacatcaggcagtttcccatttttgtagctttgttatacctaaaccrcagtctcatcattttgcttatgcagctagaagtttcagtctgtatagttgttattcattctgtccctggtaatttagacctgccttcttgatgctttagg

SEQ ID NO: 30272 - DNA, 201 bp, Homo sapiens
gctgggtccaaacaaggaagaggatgccacgccgcgccttcccagagtgaagcgagcccatgtagtgccaaatgcagccacacccacgagtgagcactggrcctcaccccacgtccagcttcttggtgggggtgctctccccgaccctatggcacggccgccctcacctctgcactcgctccaccaggtgcaccatcagct

SEQ ID NO: 30273 - DNA, 201 bp, Homo sapiens
gggcagatctcctgaggtcaagagttcgagaccagcttggccaacatggtgaaaccccaggtttaataaaatacaaaaattagtgaggcatggtaggcgcstataatcccagctactcgggaggctgagaccggagaattgcttgaacctgggaggtggaggttgcagtgagccgagatggcacattgcactccagcctga

SEQ ID NO: 30274 - DNA, 201 bp, Homo sapiens
cctcagaatatttcaggaaacaagtaattcaattttcttaaaaaacaaaacattctggatgacacaagtacttatgagcagacacagtacctgatccaacrccacaaggcaaatctatggccatcatgggccccgggaggacagcggccaggacactcctctgggggctgccctgttgcctctccccacctcatgggagga

SEQ ID NO: 30275 - DNA, 201 bp, Homo sapiens
ttggcaccagcaccttgggcagagatagccctgccagctataggatcgctcagggctgggctgtctctagcagggcacggaaaactgggcccggggtatgktccacgtctgcatcaggaagtgcaccagcaagtctggcgctctgatgcaggcacacttagaatgcgcactgtttgctcattttaatgacttttgtatggg

SEQ ID NO: 30276 - DNA, 201 bp, Homo sapiens
gcttttctccttattcaggccctttgcatatctgaagaaagctcttgcgggggctccccaagtcccctcgcacccaggctaaatatgtccaacttgtctgkgcccctccttttgggagcactccagtcactggcccttgtaaaattttgcacctctgatagactacggtaatcctgaaaaggtctcctcaatgctgaatat

SEQ ID NO: 30277 - DNA, 201 bp, Homo sapiens
ctctatctcactgcatgggcccggtctgccattgtgggtcaccaggttcctcagcctggtgcccccacacccttccccaagcctgctgtcttactccaccsagagctcttgtcttttttgctgtctccccataattcaccccagccacaatcggctgggcaggggctcaggagctaccccagcacccccgtgagggggctg

SEQ ID NO: 30278 - DNA, 201 bp, Homo sapiens
taacagacagaagcgcagcagtgaacctgaggtcaggacaggactgtttgggaggttcttcttttcttactgtcactccaaaaataaaccttggatttgtktgctggggagaaatgagtatagataacatttaaaacgttttcctaaaccttagtattcatatggtagctgatggttcctctccccttcattactgttgcc

SEQ ID NO: 30279 - DNA, 201 bp, Homo sapiens
tgggtgcctaaatcctgatttcaagaaactgctcaaaagcatttctgtatgaggtctataagttgactgatttagatggtaaaaaccatgtggcctttatrttcttcaaatatgtcagttcagattatatttctttcctaatcctaataactatcaccctttatttagtttactttaatagtttgttttcgggaccttgcc

SEQ ID NO: 30280 - DNA, 201 bp, Homo sapiens
tcctgtgggcagtgatgccgggtagggaggtgagctgaatgcacagtaagagatgaaccaatacctggaccccttgccattaaccatttttctatctcccrcttgtattctttgagccagattttgtgtaagagccactcatgacatcctcttccagtagagaagccagaaataattttcggctaactcatcaggttcaca

SEQ ID NO: 30281 - DNA, 201 bp, Homo sapiens
tgggcgtgatggcgggcacctgtagtcccagctactcaggaggctgaggcaggagaatggcatgaatccaggaggcggagcttgtagtgagccgagatcgmgccactgcactccagcctgggtgacagtgcgagactccatctcaaaaaaaaaaaaaaaaagacatgtgactgatacaagtgacactgaaaatagaactga

SEQ ID NO: 30282 - DNA, 201 bp, Homo sapiens
gggacctctgttttttatttgaattcttgttttccattctcctgcccctttcaagttagatacctcttagctacattttcttgtgaggttttcttcatggwtacagtacatgcttgctgctttaaaaacaggcgctgagaaggggagggcttggtttctcacagctcgtcctctgttttgcagaaggcacagcaagaccca

SEQ ID NO: 30283 - DNA, 201 bp, Homo sapiens
ctaagtcattggacaaattccttacaaaaacaccatggagatttcagttgaaattgcattaaatttttgtgttaacttacgggaagactaacatctggacratgttttgcctgcccttgcttatgttgattcagatttttgatgtccagtgagaggcttggttggtgtatcaggctctgcacagggaagctgtccattctg

SEQ ID NO: 30284 - DNA, 201 bp, Homo sapiens
tggaatgaagagaattccatatgaaaggtaagctctggcctttatgatgtaaagtgtgtgcttttaaaattaaaatttaaatatatatatggagagagagygaaaagagagactgagtcttgctccgtcacctaagctggaatacagtggcatgatcacggctcactgcagcttcagactcctgggctcaagcaatcctcc

SEQ ID NO: 30285 - DNA, 201 bp, Homo sapiens
aaattagctgggcgtgttagcgggcacctgtaatcccagctactcgggaggctgaggcatgagaatcgcttaaacccatgaggcagagatcacgccactgyactccaccctgggcaatagagcgagactcagtctcaaaaaataaaatatatgtgtgtatatttatgagagaggatgggtaaatcttttcttttgtctttt

SEQ ID NO: 30286 - DNA, 201 bp, Homo sapiens
gcaggcattgctgtccttcttgtacagtttgttttatcaggattcaacctttaagagggggggtagagtcaaaattttcctgacataaaaatttatcttaytataaccatttttgtttttatagcatacttgttaaatagagacattatttaatagattggatttcttctgttaactcttctttagatttggcttgaacct

SEQ ID NO: 30287 - DNA, 201 bp, Homo sapiens
cctgactctactccctgccctgcctggccactatcactgccccttccagaccaccctccttgcaggagtgaacttcaaaaaatgtatattaacattgattktaaaattttgcaataaaaccttatcaaagaaattaaaattagccaggcacagtgggtcatgcctgtaatcccagcactttgggaggcaaggtggactaat

SEQ ID NO: 30288 - DNA, 201 bp, Homo sapiens
tttcccacatttggcccaagggagactcttcaagctgcctcttgtgtccttctcacatgtcctttcattttatgaacacttctttgctttcttacagaatragacatgccaggcttgttttgtactttgcctgcttcactgtggagtcagccatttccccacagagcccagccgttttagtgaagactggtatttagagac

SEQ ID NO: 30289 - DNA, 201 bp, Homo sapiens
atgataaaacaacacaggagcttatagccggttttgagagaaacataacctacctgatgtagctgaaaaacacaacacgagaacctcacattgcaatcacragtatcaatagcagaataggccaagcagaggaaagaatctcagagcattgaagactatctttctgaaataggcagacaagaatagagagaaaagaatgaa

SEQ ID NO: 30290 - DNA, 201 bp, Homo sapiens
caaagttgaggcagtgtcccctatgggtctctttttatcagagatgataggaataagggcacaaactgagagtctgcagggagaaagtgaccgagcagagragctcactgctggcaggcacagggcaaccaggggcagggatgctgtggcctcagggtggcctccactctcctagcccaggggagtctgcctacagctacg

SEQ ID NO: 30291 - DNA, 201 bp, Homo sapiens
ctggaggagtggagctgctccgggactcgagcatcctgtttctttctatagaacaacattcagagttaggacattgcctttggactccatgccacggtgastgtggctaggaagttgtcctccctctaccagactctcccccagggcccaaggccaacagtttgtggggcattaacatgtaacatccctgtccctcagctg

SEQ ID NO: 30292 - DNA, 201 bp, Homo sapiens
aaagttagtattatggagaagagatatgtaatgattaaaagaacaacctgggatgcagtttaagggtgtgaggccttgcccctggcagcgaatgtcctttrcctttgctgacaagtggggattgcatctaatgagcatgagggttttcttcattattgttcatctactttctcacgttccccttttctttaacatactcac

SEQ ID NO: 30293 - DNA, 201 bp, Homo sapiens
ggagggtgcactaaggaccgctttgggttctggagaggctcttgggcgggagacccagtgtagaaacatctgggtgctaagggagggtgcactagggaccrctttgggttctggagaggctcttgggcgggagaccccgtgtcgatgttggagacagtggaggagccacctggggcgagggggcggttctctgctgttgtg

SEQ ID NO: 30294 - DNA, 201 bp, Homo sapiens
tgtggagaatgtcaaggcaggtcaggtgatgtataggatcattatcgtgccatcaggtccaaaatgtgtcctgagcttccagcagctgccagtccctaccsaggtgcagcacagtgtccatgtggcagtcaggctcccagccctgcaactgtgtggactcagcatttgagggcagggtggcactggtgctctttgagtgga

SEQ ID NO: 30295 - DNA, 201 bp, Homo sapiens
gcagaggttgaagtgagccgagatcgtgctactgcactccaacctgggcgacagagactttgtctcaaaaaatgtatttgtggctgggcgcggtggctcaygcctgtaatcccagcactttgggaggccaaggcgggcagatcacaaggtcaggagatcgagaccatcctggctaacatggtgaaaccccgtctctactaa

SEQ ID NO: 30296 - DNA, 201 bp, Homo sapiens
ccctgggtgacaaagtgagaccctgtatcaaaaaaaaaaacagaaaacaacaacaacatgaaccaaaaaacccataaaagccccattcaaaggtcagcaayctcaaagatcaaagtttgataaacccacagagatgagaaaatcaacacaaaaatgctgaacactcaaaaagtcagagtgcctcttctcctccaaatgacc

SEQ ID NO: 30297 - DNA, 201 bp, Homo sapiens
acaccactgcactccaccctgggcaacagagcgagactgtctcaaaaaacaaacacctgtaatcccagcactgtgggaggctgaaacaagcagatcacctraggtcagaagttcaagaccagcctggccaagtggtgaaaccccatctctactaaaaatacaaaaaaaaaaaaaaaaaaaattaaccacgcacagcggtag

SEQ ID NO: 30298 - DNA, 201 bp, Homo sapiens
ttgcagtgagctgagatcacaccactgcactccaccctgggcaacagagcgagactgtctcaaaaaacaaacacctgtaatcccagcactgtgggaggctraaacaagcagatcacctaaggtcagaagttcaagaccagcctggccaagtggtgaaaccccatctctactaaaaatacaaaaaaaaaaaaaaaaaaaatt

SEQ ID NO: 30299 - DNA, 201 bp, Homo sapiens
gtaaaagcaagggattagaaacttcagtttgaagatagcagactgaatatatgtatttatttttattccctcaaaaccctgaacacaatgacagttgaagraattttttaaacatttaaatccgtaagaacaaagaatgggaaaacagcccacgaaagatgaggatagcagcaatgtttggaagctgggaaatgaaacagg

SEQ ID NO: 30300 - DNA, 201 bp, Homo sapiens
gctgctcttctccaacatcgatcccatctatgagttccacagaggcttcctgcgcgaggtggagcagaggctggcactctggtaacaccccttcagccccsacacgggagactcccacaccaactcatcatcaccgctcttaggaacttcccagcttcagaaactaattcagaagagccattttttcactggagcatattt

SEQ ID NO: 30301 - DNA, 201 bp, Homo sapiens
gcactccagtcactggcccttgtaaaattttgcacctctgatagactacggtaatcctgaaaaggtctcctcaatgctgaatattgtgggaattgtcactrttgcagtctgggagcccattgcctgcatgagctgctgtttctttgtgggctcttttaacctgtgactatcaaaaagagcttggtctgattcaggcctccc

SEQ ID NO: 30302 - DNA, 201 bp, Homo sapiens
tgacaccacagcggcccttctcacgtcccatctcctgcagtgtgagtatctccccgccagcggggagcattcactgaccatggcacagatatacccgcackcagaactacaattagttgctgatgtatttgcctagttagtgagcctgaccatagaatgaggtgtttcaacttcagtgttttttataagctacagattaac

SEQ ID NO: 30303 - DNA, 201 bp, Homo sapiens
tgtgtcctgctcaggcttaggctgtcagttccttcttggccacaagacttggaccgtttctcccacccacaggtggaagaaagtgataacgagtggtctgwtccacactgtttcaccatctacgcggctcagaaaacaatcgtggtggcagccaggtaagggtcttccatgtctccatcctgagcagccctggatggaggg

SEQ ID NO: 30304 - DNA, 201 bp, Homo sapiens
gagggtgcactagggaccgctttgggttctggagaggctcttgggcgggagaccccgtgtcgatgttggagacagtggaggagccacctggggcgaggggrcggttctctgctgttgtggcacggggcggggggcacatgggccacagacaggggtgaggctttatgacaaagttgaggcagtgtcccctatgggtctctt

SEQ ID NO: 30305 - DNA, 201 bp, Homo sapiens
acggtccctggaacccacaggctccatgtgtcaggctggatcttccagcctcccccactcttccttccttccttcccaccttcctcatttctccctcccgycctccctcctttgctcctttcttctctccctgcttggtcaagcttctactttgacaattgagtaactgggaggaaagatctgggtgctaagggagggtgc

SEQ ID NO: 30306 - DNA, 201 bp, Homo sapiens
cttcagtatctcacacagatcaagagatggttcagaactgtgtcaagaattatagttacttcaaaaataaaccatgagaagtgtaagaggaggttctggcrccttgccgagcccccagcgatgggaatagaaaaacagaaatacccacattgctcctggactagaggtgggaccacagctagcacagaactaatgtttctg

SEQ ID NO: 30307 - DNA, 201 bp, Homo sapiens
aacggtccctggaacccacaggctccatgtgtcaggctggatcttccagcctcccccactcttccttccttccttcccaccttcctcatttctccctcccktcctccctcctttgctcctttcttctctccctgcttggtcaagcttctactttgacaattgagtaactgggaggaaagatctgggtgctaagggagggtg

SEQ ID NO: 30308 - DNA, 201 bp, Homo sapiens
caagacagaaagttaactttctgaaaatattcaggacctgaactcagccctggataaagtgaccttatagatagctacagaactgtccccccaaaaacaamagaatataaattcttctcatcaccacatggcactttgtctaaaactgatcacataatcggaagcaaaacactcctcagcaaatgcataagaactgaaatc

SEQ ID NO: 30309 - DNA, 201 bp, Homo sapiens
catattcagtctaagagtcagaatataaaccaaactctgagcaaaccctggaaagggcctcactgggataaaagttacagtcctctcagattagtaaagcrttagccatgaaggaaaaagaagacatttcttcagtatctcacacagatcaagagatggttcagaactgtgtcaagaattatagttacttcaaaaataaac

SEQ ID NO: 30310 - DNA, 201 bp, Homo sapiens
gcggccacggcctcatcggcatccagcacgccgtggcctctggtctggctgccaggccttaggctcagtcaggagtctgctctgcctcccaggtgggatcrctggttgctatcagcctcacagagctcctgacaaaggtggcttctgcatcatcactacttctgagtgccgtttcaaggccaggcctctttccgacacagg

SEQ ID NO: 30311 - DNA, 201 bp, Homo sapiens
ggctcttgagccatgcatcaaactcaggctctccacacttcccatgtggcctgggcaggctgcgccccctctctgaggcaggaggtcttgaggatgaacarggaatctatgtcagctgctcagccctgggccttgcatgaagtagatgctgtgcaaattcaaataataatttgttattattagtcaaaatctctaaagtca

SEQ ID NO: 30312 - DNA, 201 bp, Homo sapiens
gcatttcctttgaacatcatgttggcactaaaattttttgaattttggagcatttcagatttcagattattatattataataataatatattatattatatgggattatattatatgggatgctcaacccatactatattttacttgactgcctctgaattgccactacccttcagttcttctcatccctcccctgaaact

SEQ ID NO: 30313 - DNA, 201 bp, Homo sapiens
agcatttcctttgaacatcatgttggcactaaaattttttgaattttggagcatttcagatttcagattattatattataataataatatattatattatatgggattatattatatgggatgctcaacccatactatattttacttgactgcctctgaattgccactacccttcagttcttctcatccctcccctgaaac

SEQ ID NO: 30314 - DNA, 201 bp, Homo sapiens
gagcatttcctttgaacatcatgttggcactaaaattttttgaattttggagcatttcagatttcagattattatattataataataatatattatattatatgggattatattatatgggatgctcaacccatactatattttacttgactgcctctgaattgccactacccttcagttcttctcatccctcccctgaaa

SEQ ID NO: 30315 - DNA, 201 bp, Homo sapiens
tgagcatttcctttgaacatcatgttggcactaaaattttttgaattttggagcatttcagatttcagattattatattataataataatatattatattatatgggattatattatatgggatgctcaacccatactatattttacttgactgcctctgaattgccactacccttcagttcttctcatccctcccctgaa

SEQ ID NO: 30316 - DNA, 201 bp, Homo sapiens
atgagcatttcctttgaacatcatgttggcactaaaattttttgaattttggagcatttcagatttcagattattatattataataataatatattatattatatgggattatattatatgggatgctcaacccatactatattttacttgactgcctctgaattgccactacccttcagttcttctcatccctcccctga

SEQ ID NO: 30317 - DNA, 201 bp, Homo sapiens
tcccatctcctgcagtgtgagtatctccccgccagcggggagcattcactgaccatggcacagatatacccgcactcagaactacaattagttgctgatgkatttgcctagttagtgagcctgaccatagaatgaggtgtttcaacttcagtgttttttataagctacagattaacttctgtaaagtggaactccttgagg

SEQ ID NO: 30318 - DNA, 201 bp, Homo sapiens
ctgacggctcgccctcccttgagggctggggccctacacaaggaagagcagagccactgagccttgcccttctccctgcagcactcggctggagaaagagmagtggatgctggacctgaactccgcgatccaagcagccaagagtggcggtgacacggcccctgcactgccaggccgcactgtgtgcactcgtccccccag

SEQ ID NO: 30319 - DNA, 201 bp, Homo sapiens
tctcctatttcatccaaaactgtgagtgcagttttatgtgactaacagaagtaatgtgaatttgtgaccttcctccttgaaggtatggctgcagatgtgtrattatatgtgggtagatggtatgcctgaaaaggctaatttctttctttttttttttttttcgagacagagtttcgctcttgttgcctaacatggagtgca

SEQ ID NO: 30320 - DNA, 201 bp, Homo sapiens
aacccatcattaggcaaatacgaagtaagtccttggtttgactctttaaaatctgtttgtttaagatgtgttgtcctggaatgtttaaaaggcatgttcarctgttcattctcaccaccgtgtatggttagcaagaagtaatcaccaatagcggacaaacttggaagtcattttgctgtttagttttagtaattttaactc

SEQ ID NO: 30321 - DNA, 201 bp, Homo sapiens
aaaacgagtttccttattcatttagcaaacggtccctggaacccacaggctccatgtgtcaggctggatcttccagcctcccccactcttccttccttccytcccaccttcctcatttctccctcccgtcctccctcctttgctcctttcttctctccctgcttggtcaagcttctactttgacaattgagtaactgggag

SEQ ID NO: 30322 - DNA, 201 bp, Homo sapiens
ctcaaattgctggtattataggcgtgagccaccgcacctggtgtaaatatcgaaattatttgataaaatatttaccaaaactagaaatggtttctatagcytaaagttacaaagaaataggactgaaaacacactaaatgtaaaatggaaggaattttttagctttatttattttgttgccagtttctgagcacaaatgct

SEQ ID NO: 30323 - DNA, 201 bp, Homo sapiens
tagccatgagtcaccgcacccggccaggagtggccctttctaatttacagccctattaccccaccctagccatggcctgtttgcaaccccagcagcgtcawagcagcacacattatgatgggcctcgtgagtatgccgtttcctcaagttttacctcctgcaacttaaaggcagattttgcagcaactttttggtaaactg

SEQ ID NO: 30324 - DNA, 201 bp, Homo sapiens
cccagacacaaggtgggcccctcgaggctgagaagctagcagagggttgcagggtgggcctgttttcactgttccttcgggtggtgctggtggggaccctrgggcggggcagggaagggctctgcactcacagccgccttaccagcctcctgagcagagaggaggtactgggccgccttccctagcaaaaccttcctgaga

SEQ ID NO: 30325 - DNA, 201 bp, Homo sapiens
tacaatggatttgcaaggttttatttcttacacagtgagaatctggtgactaaacctcaagggccataatgtcctttggaacaatgagatttgcctccccyagtttgcacatattgtttattaattgtgaagatgatatatgcctattggttaaaaattgagatgttatagaagtgaagaagtaagaatgctcttgcccca

SEQ ID NO: 30326 - DNA, 201 bp, Homo sapiens
tagccagtgctggggtctctgagggtgatgctgctacctgtggctggaaggaacggccactcccagggccaagcaattgccagcagctcacagggacctcrgcgtgcggtctccagggctccctgtcacgcccctgtggcctctcagagtagggctaggaggcagatgtggagtgagagccacaagcttagttaccggccc

SEQ ID NO: 30327 - DNA, 201 bp, Homo sapiens
atagaaaaggatttttttattataaaatacacaatgaaatatatttcatcatctttagaattgggctgcaaatttggcacctatttattcgaaaacaaacrtggttttaagaaggggaaaattattactgtgttttagaaaaccaaaataaaatccccattaatgaaaaactcaaggaactggaaaacagtatcatgaatt

SEQ ID NO: 30328 - DNA, 201 bp, Homo sapiens
tgtcagagcaagttcaacacagatttgcccttttgttctttagaaattgtatgtacaatgtcaggtcacttcgtagctcacctttccattttaaagaggcrttccttgtactttcattccgtatgctgctttgttacaatggatttgcaaggttttatttcttacacagtgagaatctggtgactaaacctcaagggccat

SEQ ID NO: 30329 - DNA, 201 bp, Homo sapiens
ctggaccccccggtgagtatttgggtgccctctggcccatggctcaccccctggggtgcagctgccatggcgcagggataccagtgtcctccttggcctcktgtagagtctgtgtgcacttggacagcactgggcttccaagccccacctagcattgccagcagtcaccttgtgtcctgctcaggcttaggctgtcagttc

SEQ ID NO: 30330 - DNA, 201 bp, Homo sapiens
acaaatgcttgtagtttatttaaaaattagttacttacttttaacctatctcagcggaaataggagattacgatgaaacgctggaccgagagcacctcaamgtgaacgagtatttgcctggccagcagcactgccttgagaagatactagaattccatcagaagcacgtgtaagtcatcacaattgtctgtcaacacattg

SEQ ID NO: 30331 - DNA, 201 bp, Homo sapiens
ctctggctgcactactctaggcagtgcaggggctcaggtaggacggggaaccctgacctccccattgactcacaggggcagccaggtagttgaaaaagggkacagctaagagaatttcatattctctgtgccacctgaagtgcacactcaagctcccacaacagccgtcagaatcaggagcagtggtggacagtccgggaa

SEQ ID NO: 30332 - DNA, 201 bp, Homo sapiens
gacagagttcttggtactacacatagtctgtaaaagcagcctgcgcttcactggcaggaagcggccacggcctcatcggcatccagcacgccgtggcctckggtctggctgccaggccttaggctcagtcaggagtctgctctgcctcccaggtgggatcgctggttgctatcagcctcacagagctcctgacaaaggtgg

SEQ ID NO: 30333 - DNA, 201 bp, Homo sapiens
gtttgtatgctccttgtgagaatctaacaaatgcctgatgatctgaggtggaacagtttcatccccaaaccattcctaccacctctggtctgtggaaaaaytgtcttccatgaaacccatccctggtaccaaaaatgttggggaccgctgctataaggagtcgagtaggatgtacctctaattagaactgccttttagaat

SEQ ID NO: 30334 - DNA, 201 bp, Homo sapiens
ctatggactagtaccagtccagtccatagcctgttaggaaccaggccacacggcaggaggtgagtggcgggcaagtgaagcttctctgtatttacagccaytccccattgcttgcattaccacctgagctcctcctcctgtcagatcagcagcaacattagattctcatgggagcacaaaccctattgtgaactgcacatg

SEQ ID NO: 30335 - DNA, 201 bp, Homo sapiens
caatgagtgggagacatcttcctgccacaccctgagcaacacagttgtgaagagtaaatagacactagtagcttctagactttttccgaattctcatcacrtaaaatatctccttgtgaaattctggcttattgaggacaaagaagattctggaacacaaaccccaaacagcgcatcttcggaaacatgcctgttttcaac

SEQ ID NO: 30336 - DNA, 201 bp, Homo sapiens
gataatttttcatatgtatacacttatgtatccccacccagagaatggagtagaacaggctccctgtgcctgtctcagttatgacccccaaaagtagccastgttttgatctttagcattataaattagttttgccagatcttcaggttcatttaagtatgtatatatttatcaggtacatgaatacaatatgtactatgt

SEQ ID NO: 30337 - DNA, 201 bp, Homo sapiens
gttctgaggggattatgttctgtggtgatcctgttctgaaggaatcctgttgtgagcaggaggctgttttgaggggaacctgttatgtggggaacctgttwtctgggaacactgttctgagaagaccctgtttggagggggatgccattttgaggggatcctgttctgggggggttctgttctgtggagaccctattctga

SEQ ID NO: 30338 - DNA, 201 bp, Homo sapiens
ggtcttactttttgtagaccttattaagaagctgttttgcacgcttgaggacctgtcccgaatgaaccctactccctactcaggaggggcatgagccctcrctgtgtgtgatgttttctggtgatgctcacactgttctgtgtgggcagacagcgagcagcagtattggacttggagaggccgtgtgccaggcatggtgct

SEQ ID NO: 30339 - DNA, 201 bp, Homo sapiens
cttctgtggggaccctgttctgaggggattatgttctgtggtgatcctgttctgaaggaatcctgttgtgagcaggaggctgttttgaggggaacctgttwtgtggggaacctgttttctgggaacactgttctgagaagaccctgtttggagggggatgccattttgaggggatcctgttctgggggggttctgttctgt

SEQ ID NO: 30340 - DNA, 201 bp, Homo sapiens
aatgctattctgaggagaccgtgttctgtagggattttgttctgtgtagacgctgttctgaaggtgatgctgttttgaggggactctgttctgaggggacyctgttctgaggatgctgctgctctgaggagaccctattctgtgtggattctgttctgaggggacccttttatgtgggagatgctgttctgaagggactca

SEQ ID NO: 30341 - DNA, 201 bp, Homo sapiens
tggtgaagttcactaaggtgccataggaaccggctggcagggaggaaactgcccaccagtgggaccggaatgccagtgaaactcataggatggtgtgagcygctggctctcctgcacacagctagcaagaaagccaaaagcccagaaatggggagagaaggcccttcttgttgtatctccccagagccctctactggcaaa

SEQ ID NO: 30342 - DNA, 201 bp, Homo sapiens
ttcagacctcagccatctctgaagcgcagtgagagcccagtcgatgaaacattctcagctgacactatggcaggctcctttccctccatgaccccactctscaaatgtgggacacaggaatgcttgtcaagaagggccttcttggaaaatggcctttggtgtgcaaatgttaccagcctcttggtcttcctgagaacttga

SEQ ID NO: 30343 - DNA, 201 bp, Homo sapiens
tttaattttaattttttcccatttttattaatttttatacaaaggcaatagttgtacataggatcttatttttttagattatgttttctttggtataccakgtttactcattcttcggtgactaatttctctgcttttcaggtaggtctctgtagttcaagagtttggtttaaatgtctaaccattcttagtgtctgtgta

SEQ ID NO: 30344 - DNA, 201 bp, Homo sapiens
agttgtgaagagtaaatagacactagtagcttctagactttttccgaattctcatcacataaaatatctccttgtgaaattctggcttattgaggacaaaraagattctggaacacaaaccccaaacagcgcatcttcggaaacatgcctgttttcaacataagaagtaatccacgcttcaggggctagcacaaagccaca

SEQ ID NO: 30345 - DNA, 201 bp, Homo sapiens
ttcaagcttttctgttagtcactggtttctttaactgtttgggatatggtttcaataacactttttcctctaataagtgtccttttattgtctcacttgtrcctttttggcctaaattcaaccttatattcaaccatgtaaccaaggtccccttgcttttttgtttgtttggaatatacttgggatacccatgtccttctt

SEQ ID NO: 30346 - DNA, 201 bp, Homo sapiens
tggaaagcactcttcagagccatgttcccacacttgttttctcactgtggagtacatctgtgttggtgacttcagctaaacctgttccccagggataaatrcaacagcccatacaaaatcaggcatgaggacacagtccaacaacttcgtgtataaataaagttacacattcatcgccagttgcttgttttaaaaataaaa

SEQ ID NO: 30347 - DNA, 201 bp, Homo sapiens
cttttattgctgttaattttcctcagtaaagaaattgatgctgctttttaaatcattcaagtcaagtagtttataaaataatagtattttgttgtatattrtatgttttctaccttagaaaattttttaatatatttcttaaattataaaatttatacatccaacaaaaaattcagtcaatataaatgagtaggatgggca

SEQ ID NO: 30348 - DNA, 201 bp, Homo sapiens
ccatgaatagatataaataaggatgctttctgattagcaagaaatagaatggatcatacaatgttgacgattctctttcttttcattctaaaagaaaatgyttcatgtttgttaaaaaggagaaggacaaaattatagaaaacattttcaaacattttaaggaaaacatgacataaccacaccatgtttaaaatgtttctc

SEQ ID NO: 30349 - DNA, 201 bp, Homo sapiens
actcttttattgctgttaattttcctcagtaaagaaattgatgctgctttttaaatcattcaagtcaagtagtttataaaataatagtattttgttgtatmttgtatgttttctaccttagaaaattttttaatatatttcttaaattataaaatttatacatccaacaaaaaattcagtcaatataaatgagtaggatgg

SEQ ID NO: 30350 - DNA, 201 bp, Homo sapiens
accccacagcccccacaagtgcactggggaatggggtgcaacccccagagcaacctgctgcctatggatgtttctgtcctggaggccttggctctaaaacrtacaaaagattgggccaaggtgacctgttagaagtttttaacataggcagcctttgtaatttttgatgtttattaaagggataaaagagtaaactctgac

SEQ ID NO: 30351 - DNA, 201 bp, Homo sapiens
gtgtgcaccaccctctgccgtcggagctgggagtgccaaagtgaacgtagcagacaggagctctgcctccttgcgcttgttcggcagtggggagctcaacrgtggacaaggtatactgcgaagtgcttagtgcccaggagagaaataaagcacggagggagcaggagacatggagctgcgctcagatggagatccacatcc

SEQ ID NO: 30352 - DNA, 201 bp, Homo sapiens
aggagtttgagctgcagaaggtctgctacttgcctctcaacacgttcctgctgaagcccatccagcggctgctgcactaccgcctgctgctgcgccgcctrtgcggacattacagccccgggcaccatgactacgctgactgccatggtgagtgtgggtgcggccctgcatctcaaggatcagcgtgcgtggctgggaggc

SEQ ID NO: 30353 - DNA, 201 bp, Homo sapiens
gtgtggttattccctctgtccagtaactgtgccagcacaaccgcttagttccactcttgagagaagtttctggagcgagccctaagactgggcaggactcrggtgggctttgtttaacccctgccctgcactcccttactgtgtcccacgcagccagctgcagccttcccatcctcaattcttcatctgtccagtggggag

SEQ ID NO: 30354 - DNA, 201 bp, Homo sapiens
tgtttggcaggtatttgctgagcctcggtgtgcaccaccctctgccgtcggagctgggagtgccaaagtgaacgtagcagacaggagctctgcctccttgygcttgttcggcagtggggagctcaacagtggacaaggtatactgcgaagtgcttagtgcccaggagagaaataaagcacggagggagcaggagacatgga

SEQ ID NO: 30355 - DNA, 201 bp, Homo sapiens
agtagacttttggataggcaggggcagcactgggggaagtgagatttctcttcaataggagcaacggtacaggtgttcacatgtggacaacagtgcaggtygtgcattgactgttcaggggtctcactcttgcttaacgtgcctggaacagttctccctccctctcaggctgctcatgagttcaccacgtgaccgcccaag

SEQ ID NO: 30356 - DNA, 201 bp, Homo sapiens
gaggacagtgtccccatttccatcaggacaggactcccccagaacagtgttcacctcagagcaggattctcccccagaacattgtcctcctcaatgggtcygcccagaacagcatcctcttcagaacagggcctccctcagatcagggttccccacagaacagagtcttcctcagaacatcattctcaggacagagtcccc

SEQ ID NO: 30357 - DNA, 201 bp, Homo sapiens
tcctcaccgcatccctcaataagggctctccaagaataggatgcccctgaaaacagcatacccctcacaacagggtcccccagaacatggtctccctccartcagaactacccccagaacagactccaccttaaaacattgtttgccttagatcagggcccttaccagccccagaacattgttctcttcagaacctttttc

SEQ ID NO: 30358 - DNA, 201 bp, Homo sapiens
tattaacagttctctctcaatctattgatctcctcagttacatccagaaccttaaagccgcacagttgtcatcctccgcccgcagtctcaggcagggcgcmtcaggggctgcactggtagctcccaggaggacttacccatgggtcaccgtcatagccaggtgtgtctactcagaggggacgcaatcctgcagcagtcccc

SEQ ID NO: 30359 - DNA, 201 bp, Homo sapiens
gaggtgttctctttttccttctctgggtcttgtctttgaaaggcagaggcaaacaggtagttgggggttcagggtttctcagcatcagcctccacccttcycttactcatcccctggggtgcagggctgggtgtgctccttggggtgggggccctgacagctggacccatgcagcatccctcttcgtgcccccccttcacg

SEQ ID NO: 30360 - DNA, 201 bp, Homo sapiens
gggggccagtgggacctgagagtcgcagggggtgcccgctggtccctctgggccaggctgaccatcatggtgctctcctgcacagagacatcgggaaacgkctcgaggtgcggaagaccgtgaccgcgtgcctgggcgagcccaaccacatcactcggctggagcacgctcaggcgcggctcaccctgtcctataatcgcc

SEQ ID NO: 30361 - DNA, 201 bp, Homo sapiens
acctgtccttgggtacccagagagtgggggctgcctgggcctccatgctgtcatctataccccttgccccccttctggcagacaaggaccgtgacaaggcyaaggacaagtatgtgcgcagcctgtggaagctctttgctcaccacaaccgctatgtgctgggcgtgcgggctgcgcagctacaccaccagcaccaccacc

SEQ ID NO: 30362 - DNA, 201 bp, Homo sapiens
cttgtaatttaaacaggcccagcattgctggttctatttaatggacatgagataatgttagaggttttaaagtgattaaacgtgcagactatgcaaaccasgcccagtctccagtgtggtaccgttgctcctgcatcgcagctgaggatagggggccagttaggcctacacagtggcctgcctgcctggatgtgggcccaa

SEQ ID NO: 30363 - DNA, 201 bp, Homo sapiens
tgtttagctgacacacacttgccctctctcccacgccggcagtgtgcgaggaaggcttctccctgcaccagaagagctgtgtccagcactgccctccaggsttcgccccccaagtcctcgatacgcactatagcaccgagaatgacgtggagaccatccgggccagcgtctgcgccccctgccacgcctcatgtgccacat

SEQ ID NO: 30364 - DNA, 201 bp, Homo sapiens
gctccccaacccctgccccttgatttccccaggtctcccttgggacaggaagcccctgcctgggggtaggaggatggggacaaaaccactaggatctgtayccgagaagcagtctctgttcgggatatttacttggaaattttattcaaatggaagctggcgcctgagcctctccttagggaattccgtgaggtggggagg

SEQ ID NO: 30365 - DNA, 201 bp, Homo sapiens
cttctgtcacatgcccaagtcctgctaactgctgtgtaaaactggtaaggtgggatccagaggaccttgggcccctagggccccaggtcaggagacctggsctccagggccagttgagagtgataaagagaacaatacctgcccacaggacttgttgcaatgagataaaggcagaagtcaccagttgtggtcaaatgggat

SEQ ID NO: 30366 - DNA, 201 bp, Homo sapiens; identical to SEQ ID NO: 6777

SEQ ID NO: 30367 - DNA, 201 bp, Homo sapiens
agtgggtgggggccagcggcaaccctgtccctaccagcactctctgtagggcagcccttagggcagctggagagctgctcccaaaaaagactgatccccakcctctcccttccttctttgcagtaagaacctcacatggcgggacatgcaacacctggtggtacagacctcgaagccagcccacctcaatgccaacgactg

SEQ ID NO: 30368 - DNA, 201 bp, Homo sapiens
ggaaccaaccacccaaagcaccatggggctgtggttccgaggcctgccctggaagtcctgtggagtctgcccgcagggatgtgcaggagctgtattgtagwtgtctcctgccatcagctgtcaggttattttggtccaaactgaaaatactccaggaattgtgtgtggagtacccccagcctgcagggtgggactgcagca

SEQ ID NO: 30369 - DNA, 201 bp, Homo sapiens
tagtagagacgaggttgcaccatgttggccaggctggcctcgaactcctgacctcaggtgatccacccgcctcagcctcccaaagtgctggatgacagaaktgagccaccatgcctggcccttctgttacatttcttatattcttgcatggagaaaggattgggggggattgtgagggcatccatctgtccatctatgtgg

SEQ ID NO: 30370 - DNA, 201 bp, Homo sapiens; identical to SEQ ID NO: 6768

SEQ ID NO: 30371 - DNA, 201 bp, Homo sapiens
aagtgctaagggcatccagggccctgctgctgctcagggagcttggcactgatatgggatacccccagcagcactgctgggacctcccctagcttcccccmcttcctccagggccttggcttctggctagtcaggggcactatgtggggacagttatgtggccccgggcagagagaggtcccgccgtctgtttgctgaagg

SEQ ID NO: 30372 - DNA, 201 bp, Homo sapiens
tccccagcctcctcgtcccatgcctccgtctccagctgctgccttgcctccagggatggccccttttctgtccccagaacagcactatgggcttctcttcygagctgtgcagcccccagggccacggggtcctgcagcaaatgcaggaggccgagcttcgtctactggagggcatgagaaagtggatggcccagcgggtca

SEQ ID NO: 30373 - DNA, 201 bp, Homo sapiens
tcttgtctttgaaaggcagaggcaaacaggtagttgggggttcagggtttctcagcatcagcctccacccttcccttactcatcccctggggtgcagggcygggtgtgctccttggggtgggggccctgacagctggacccatgcagcatccctcttcgtgcccccccttcacggccaggggtgcgcatgctggatggcga

SEQ ID NO: 30374 - DNA, 201 bp, Homo sapiens; identical to SEQ ID NO: 6780

SEQ ID NO: 30375 - DNA, 201 bp, Homo sapiens; identical to SEQ ID NO: 6779

SEQ ID NO: 30376 - DNA, 201 bp, Homo sapiens
ggagagaacaccaatggaattttgttgtgcacccttctatgcacgtctgaatgttgtgtagacattctgcttacaactaggtgtgggtgctgctgccgaargctttatttgctgtgcctgaggtggaccagagatttcagagaagactcccagagcaccccaaggagacaacaggagtgcttggagtcaggatgactgggt

SEQ ID NO: 30377 - DNA, 201 bp, Homo sapiens
gcgacctggccatccacctggtcagccccatgggcacccgctccaccctgctggcagccaggtgcttgctctgtccctgcccgccctgcccagcgccgcckcctctcacagcccgcgtgcttgcctttgctcgctcacacggcccagggggcactgagtgctactcagtggggcactcttggcattttgggagggacaatt

SEQ ID NO: 30378 - DNA, 201 bp, Homo sapiens
accctctagttgaacccccttattcctttggaaaatgaggcccaggaggggctcgtcattagcatgtccacggcaagttagcaaggcagcagctgggaccyggggttcttggccctggctccccataccatctgtggtgcccagggcctgtatgcagagggagggtaggcaggtggctcctctagccccctccacccatca

SEQ ID NO: 30379 - DNA, 201 bp, Homo sapiens
tgggtactcaggggatgatgggtgtcggatgtgcggatccctcgtgctcctcaggccacatctgccgggccctgttcaccccatttgttctactcatgctmcgtgcttggccctggcaggcacggcacacggtgtgcgggggaagtggctgcggtggccaacaacggtgtctgtggtgtaggtgtggcctacaacgcccgc

SEQ ID NO: 30380 - DNA, 201 bp, Homo sapiens
ttcaggagggcccttcagtggaatttttcccgcccacttcccatctggccaatgcctgccactttcccactgtggatcctttgatcacgtggctgttccayggagggttcccaaagggtcaaagactgaaagagctggacccctgtggagtgagggtttcctagcaggagtctcctgaaatcctcacgacccactgtgagt

SEQ ID NO: 30381 - DNA, 201 bp, Homo sapiens
gggccccgaggatgacggcaagacagtggatgggccagcccgcctcgccgaggaggccttcttccgtggggttagccaggtgaggtggggatctgtccagyccctgcgggcaggttgggtgctgtcttccgtacctatcttgtgttttttggtttgttttatttattctcatgtttaactttacacaaagcatgtttattg

SEQ ID NO: 30382 - DNA, 201 bp, Homo sapiens
ttggaggtgagtgtgggcctgggccaccctgtcttcaggagggcccttcagtggaatttttcccgcccacttcccatctggccaatgcctgccactttccsactgtggatcctttgatcacgtggctgttccatggagggttcccaaagggtcaaagactgaaagagctggacccctgtggagtgagggtttcctagcagg

SEQ ID NO: 30383 - DNA, 201 bp, Homo sapiens
gcaggccccggtctctgcctcccttctcctttcttccactaaggaacagggctgagcctgggtgagatgtgccttgcctaaaaggctgaggcttttcccayagtcctggcccacctggggctctgagggagggctcggtcagagtggagatggccacaggcccagtggagtgtgggagatgggggctgggtactcagggga

SEQ ID NO: 30384 - DNA, 201 bp, Homo sapiens
cgttctgtcgcacagactgggaatgcagtggcgcgatcttggctcactgcaacctccacctcctgggctcaagcaattcttgtgcctcagcctcccaagtygctggcactacaagcacccgccaccacacttggctcatgtttgtatttttagtagagacgaggttgcaccatgttggccaggctggcctcgaactcctga

SEQ ID NO: 30385 - DNA, 201 bp, Homo sapiens
cttttggccactaggacggggaggtagcaatggaggtgaggcgcggtcaggtcctggaaggtgaagccagtgggatttccctatggattggaagtggggcrtgaaatagaggagtcaggggtcactctggggatttggcctggagcagctggaagatggagtggctgttaacttatgtagggaaggctgtgggaagaagag

SEQ ID NO: 30386 - DNA, 201 bp, Homo sapiens
gtgagctggggtgccttccttttggtatccggcagagtggccttggctatggaagtgctaagggcatccagggccctgctgctgctcagggagcttggcaytgatatgggatacccccagcagcactgctgggacctcccctagcttcccccccttcctccagggccttggcttctggctagtcaggggcactatgtgggg

SEQ ID NO: 30387 - DNA, 201 bp, Homo sapiens
gtggccctggcctggtgctaggactgcgcgcctcccctcagtacccgcggacaccctgggcttccctgggcccagcatctgcctggggcctcgccctgggytccccctcctgacccccaccttgcgccccttcccggtgttcccggggcgctgccgggccctggggcctgcggggcgcgggcggctcttggctgggccatt

SEQ ID NO: 30388 - DNA, 201 bp, Homo sapiens
ctgacctcaggtgatccacccgcctcagcctcccaaagtgctggatgacagaagtgagccaccatgcctggcccttctgttacatttcttatattcttgcrtggagaaaggattgggggggattgtgagggcatccatctgtccatctatgtggctggccttgggggctagatttcttctggggaggactaatttttttac

SEQ ID NO: 30389 - DNA, 201 bp, Homo sapiens
ctccacccccgcaccccctcaggacatggcccctaaaagcaccatcccatttagggtcacccattttcttcctaggagctgtggggctttgcgaataactycctatggctgaatctgctttgctgaactaggaaaccctagtgagttgtatagatgccattcatttaagaaccttgaaaagccaacatcttattcccatgt

SEQ ID NO: 30390 - DNA, 201 bp, Homo sapiens; identical to SEQ ID NO: 6772

SEQ ID NO: 30391 - DNA, 201 bp, Homo sapiens
gctgccttgcctccagggatggccccttttctgtccccagaacagcactatgggcttctcttctgagctgtgcagcccccagggccacggggtcctgcagmaaatgcaggaggccgagcttcgtctactggagggcatgagaaagtggatggcccagcgggtcaagagtgacagggagtatgcaggactgcttcaccacat

SEQ ID NO: 30392 - DNA, 201 bp, Homo sapiens
gaggctggccctctttctttggggggactgttcagttgcgcctgaagcctgctttctttccgagtgctgcaaggtaattaaatagttggttaatcactttyaacgccaaacagctgcggctccatctacagtgtgctggaatctgggctagacccagatgaacccagcctcgatttgggggctccagcaggactcacagca

SEQ ID NO: 30393 - DNA, 201 bp, Homo sapiens
aaaaggctgaggcttttcccacagtcctggcccacctggggctctgagggagggctcggtcagagtggagatggccacaggcccagtggagtgtgggagaygggggctgggtactcaggggatgatgggtgtcggatgtgcggatccctcgtgctcctcaggccacatctgccgggccctgttcaccccatttgttctact

SEQ ID NO: 30394 - DNA, 201 bp, Homo sapiens
gtgcctgtgtacctttctagaatcccccagttgagcacgtctggctcactgagaaacagccaagccagcaggcacttctggccccatggggttggtctgcktgggggaagggtgtgtggcccatgtgctgtgggttagatgtccctggcttggggtcccgcagaggcctcagggctgtgtgcactcccctccccaggccac

SEQ ID NO: 30395 - DNA, 201 bp, Homo sapiens; identical to SEQ ID NO: 6773

SEQ ID NO: 30396 - DNA, 201 bp, Homo sapiens
agggtcggcactcttcaccctcccgagccctgcccgtctcggccccatgcccccaccagtcagccccgggccacaggcagtgagcaggcacctgggagccraggccctgtgaccaggccaaggagacgggcgctccagggtcccagccacctgtcccccccatggagctgaggccctggttgctatgggtggtagcagcaa

SEQ ID NO: 30397 - DNA, 201 bp, Homo sapiens
tccacccccgcaccccctcaggacatggcccctaaaagcaccatcccatttagggtcacccattttcttcctaggagctgtggggctttgcgaataactcsctatggctgaatctgctttgctgaactaggaaaccctagtgagttgtatagatgccattcatttaagaaccttgaaaagccaacatcttattcccatgta

SEQ ID NO: 30398 - DNA, 201 bp, Homo sapiens
cctgctgggcagtctctccttggcccatcctaataagcaagcctgggggtggccctcccagagtcctctacattcccatggagtccagacagccagtggckgcctttcaggagcagggatggtacaggaggaggttttacgggggcaaagggattcttcaagatgctcctagcctcacaaaaccaatcatgtctcataagt

SEQ ID NO: 30399 - DNA, 201 bp, Homo sapiens
cattttctggaagccatccccacccctcaccatggctggggttgttggatagagggaggctggccctctttctttggggggactgttcagttgcgcctgamgcctgctttctttccgagtgctgcaaggtaattaaatagttggttaatcacttttaacgccaaacagctgcggctccatctacagtgtgctggaatctgg

SEQ ID NO: 30400 - DNA, 201 bp, Homo sapiens
cccgaatcgtacctgatcccattcactaaatattatctccattttatagaggggtaaattgaggaagtccctgagaaattaacttgtctaaggtgtcccarcaaaaaatagtgccccagggatttgaaccggtttgctgattgatttttcaccagttgccttaagaattatcatgatttaacctctctgggcctcagtttc

SEQ ID NO: 30401 - DNA, 201 bp, Homo sapiens
acctggggctctgagggagggctcggtcagagtggagatggccacaggcccagtggagtgtgggagatgggggctgggtactcaggggatgatgggtgtcrgatgtgcggatccctcgtgctcctcaggccacatctgccgggccctgttcaccccatttgttctactcatgctacgtgcttggccctggcaggcacggca

SEQ ID NO: 30402 - DNA, 201 bp, Homo sapiens
catgcaacacctggtggtacagacctcgaagccagcccacctcaatgccaacgactgggccaccaatggtgtgggccggaaaggtgagggcaggctggccyggcaggctggatgtggagttaggtagaaggcactctgtgcctgacagctgaccctaccttccctgtccccacagtgagccactcatatggctacgggctt

SEQ ID NO: 30403 - DNA, 201 bp, Homo sapiens
aggcaaggcagaacacaaggagctggagctggcggaaggaagtcattaagtcagccagtggctgggatgcagcaaagccaggcagaaggtaagtgcagacycaccccaataaatgaggaaaatgagaagggctggctggccatgttaggatccagttccagtgcgaccagatatgtcaccaccacatcacttttagctcct

SEQ ID NO: 30404 - DNA, 201 bp, Homo sapiens
cacagggcacggcattgtggtctccattctggacgatggcatcgagaagaaccacccggacttggcaggcaattatgtgaggaagtcggggagggaggccrtgatccctgctgaggtgtgtctagaggctgtcttgttctatcagtgaggtcagccttctcctgatggtggccaaatccttcttaggatcctggggccagt

SEQ ID NO: 30405 - DNA, 201 bp, Homo sapiens; identical to SEQ ID NO: 6769

SEQ ID NO: 30406 - DNA, 201 bp, Homo sapiens; identical to SEQ ID NO: 6771

SEQ ID NO: 30407 - DNA, 201 bp, Homo sapiens
gtggtagcagcaacaggaaccttggtcctgctagcagctgatgctcagggccagaaggtcttcaccaacacgtgggctgtgcgcatccctggaggcccagyggtggccaacagtgtggcacggaagcatgggttcctcaacctgggccaggtaggtgttcccccacaggacactgccagggggtgggaccagagaagacag

SEQ ID NO: 30408 - DNA, 201 bp, Homo sapiens; identical to SEQ ID NO: 6796

SEQ ID NO: 30409 - DNA, 201 bp, Homo sapiens
tgggaggggagggaggcgcgcctggagcggggacaggtgaggccgcgcgaacgttccagcctggcgcggctgcgggatccgggcgcgctgggaaagcgagsaggaccccgcgcgggaatcagggagcatcgcaggctgccgggcagcccctcgcggaagtgcgggctggggcgggctggggcgggctggggcaggccgggg

SEQ ID NO: 30410 - DNA, 201 bp, Homo sapiens
ggcagccaggctcaagaattcctgactacaccagtgattctccaaatacggtgcccaggccagagcctcagcaccacccgagagtgggcacagtctcaggmcccaccccagactgacaggcagcagctcttggtggggcccggcaatgtgtgcttttttttgagacggagtctcgctctgtcgcccaggctggagtgcagt

SEQ ID NO: 30411 - DNA, 201 bp, Homo sapiens
tgacaattggtccagccttggaatgcctgcccatcccagcatgctccccgtgagccacaatgccagcccacctaccagctccaggtaatgtatgtccaggrcctggtgcaaagcatcctgggagctctgcctgtgacttcacgctgtttccattcccataggtccttagtccttattctccttggtccctgtgggtggttg

SEQ ID NO: 30412 - DNA, 201 bp, Homo sapiens
cctcacatataaaaggaaggtggtaaaaaaataacccagcctcggcctgtctcctacagggttgttggggtcagtaggtagagcttaaagagatcgtttcsgaaccttttccaacaaaagctagtaaatgaaggaaatgagtttattggcttttctatggatacaggctcgaagtctttaatatatgtgctaggtaactgg

SEQ ID NO: 30413 - DNA, 201 bp, Homo sapiens
caaaggcaatgcacttcattttctagaataccaaaatatgcctgcgatcttaattcttgtctagaaaacagttccttcataataagaattcaattgcccgyggttagaaacagagcaacaatgcgtaaacaagcgaagctttcaggggctccaagagcatcgccccagaagcctgcacccgatcagatgacccgcacactg

SEQ ID NO: 30414 - DNA, 201 bp, Homo sapiens
atacaggctcgaagtctttaatatatgtgctaggtaactggtaaacaatgatgactattttgttaccaacttgcaagttatgcagagggaaaaaggcttayaaattaagcaggctggtaaatgtcttacatttcttcataggatgaatataaaaacctaaaataccaaagctagaagtcaaccctcactttctagggagga

SEQ ID NO: 30415 - DNA, 201 bp, Homo sapiens; identical to SEQ ID NO: 6800

SEQ ID NO: 30416 - DNA, 201 bp, Homo sapiens
tcagcctcccaagtagctgggattacaggcatgtgccaccatgcccagccaattttttgtatttagtagagacggggtttcaccatgttagtcaggctggmcttgaactcctgacatcagctgatccacctgccttggcctcccaaagtactgggattacaggcatcacccactgcggctggcctggtatgagtctttcgt

SEQ ID NO: 30417 - DNA, 201 bp, Homo sapiens
agctagaagtcaaccctcactttctagggaggaaggagggccagagatattaaatgattggaccagctcacagcagagtgagcctggaattaagtgatctygacctcaaaggcaatgcacttcattttctagaataccaaaatatgcctgcgatcttaattcttgtctagaaaacagttccttcataataagaattcaatt

SEQ ID NO: 30418 - DNA, 201 bp, Homo sapiens; identical to SEQ ID NO: 6801

SEQ ID NO: 30419 - DNA, 201 bp, Homo sapiens
atcttgacctcaaaggcaatgcacttcattttctagaataccaaaatatgcctgcgatcttaattcttgtctagaaaacagttccttcataataagaattcaattgcccgtggttagaaacagagcaacaatgcgtaaacaagcgaagctttcaggggctccaagagcatcgccccagaagcctgcacccgatcagatgac

SEQ ID NO: 30420 - DNA, 201 bp, Homo sapiens
tggaggaaagctcacctgccttggggaatagtagatctcaaagcaatccagaggattctcaggaggaaacagcttaggttgcctgaggccaggctcctggktttactcaggtacacacaggattggaagccttgggttacctgtggtagtgagtgtggggctgatggcctcagatgtcttgtgaggcagactgtgtcctaa

SEQ ID NO: 30421 - DNA, 201 bp, Homo sapiens
caggcctttcagtgccaccaatcctgtatctgtctccctcagatcatgctgaactccttgcataagtatgagcctcgaatccacatagtgagagttggggrtccacagcgcatgatcaccagccactgcttccctgagacccagttcatagcggtgactgcttatcagaacgaggaggtgagaaggacagaggcggatcgc

SEQ ID NO: 30422 - DNA, 201 bp, Homo sapiens
cacgcctggcgaacggggagcgggagcactcccctttgaaggactggagcttttggggaacttccgttgtctagccctaaactctcctgggggtggaaaakatatcagccttgatggcaaagtcgcatttaaatttaaacatgcgccacagtacttactgcgtggagtcggaacaaacttgtaaagtcgtgcttttctaaa

SEQ ID NO: 30423 - DNA, 201 bp, Homo sapiens; identical to SEQ ID NO: 6808

SEQ ID NO: 30424 - DNA, 201 bp, Homo sapiens
gcccaggccctgctcactggtgtctttctgttgcagtcagtaccccagcctgtggtctgtgagcaacggcgccgtcaccccgggctcccaggcagcagccrtgtccaacgggctgggggcccagttcttccggggctcccccgcgcactacacacccctcacccatccggtctcggcgccctcttcctcgggatccccact

SEQ ID NO: 30425 - DNA, 201 bp, Homo sapiens
tgtttttccatccttagctggcctgcagcccctgcccaggccctgctcactggtgtctttctgttgcagtcagtaccccagcctgtggtctgtgagcaacrgcgccgtcaccccgggctcccaggcagcagccgtgtccaacgggctgggggcccagttcttccggggctcccccgcgcactacacacccctcacccatcc

SEQ ID NO: 30426 - DNA, 201 bp, Homo sapiens
cttggaagggggagcttctgcctccttcccccttcctgggctcccgttttaggaggaatgttactgtttaaagagaccccactgaactatttcctgctcaktgtcacctctccttcgctctcctcgcgtaagttctcaccgaaaggtaataaaacaaccgctgccgacaccgcttggcgctgggccgggcggggaaagcgc

SEQ ID NO: 30427 - DNA, 201 bp, Homo sapiens
accactttgggaaaggcattctgcaggagtctagaatctaaaaaaatggagacggttttctggaacacatacccaagcccagttttttagtagctcaagaraagatcttcaatttatgtctccgccactgccgctgctggcggaacaaccacggacacccagatcagaggcttgcatccttgcacaggcctcagagctgct

SEQ ID NO: 30428 - DNA, 201 bp, Homo sapiens; identical to SEQ ID NO: 6795

SEQ ID NO: 30429 - DNA, 201 bp, Homo sapiens
atgcgaggctcttggccctgtgatgttgaagctgtgttgcccatctaacctctgctctaatcggggctgtggatactctcctgggtgcttttgttttgccrtgaggcagctgccaccatgcctggggtggatcattgagacctagctgggtgtttggactctcctgtattaggtaggcaacaggagaatctagctcattac

SEQ ID NO: 30430 - DNA, 201 bp, Homo sapiens
cgtcatcgggactagacttgctgagagctgggaagtggagatggagaagacaagggtgtttctgggtgtgcctgggatgtaagattgcctttttgccatgygaggctcttggccctgtgatgttgaagctgtgttgcccatctaacctctgctctaatcggggctgtggatactctcctgggtgcttttgttttgccgtga

SEQ ID NO: 30431 - DNA, 201 bp, Homo sapiens; identical to SEQ ID NO: 6797

SEQ ID NO: 30432 - DNA, 201 bp, Homo sapiens
gacaagaaattgtagttttagaggaaggaaggggagtcttggaagaactttctgattctcctggggagaatggggggagcttaaaccaggagagtgagcastaaaagggtctacccccagctaggaaggcacctcccgtctctgtgggtggcaggaggagaaggggagggcacccttgtctaagcaccaccccacctctct

SEQ ID NO: 30433 - DNA, 201 bp, Homo sapiens
ccgtgttttccaggaggatgtttccggtgctgaaggtgaacgtgtctggcctggaccccaacgccatgtactccttcctgctggacttcgtggcggcggayaaccaccgctggaagtacgtgaacggggaatgggtgccggggggcaagccggagccgcaggcgcccagctgcgtctacatccaccccgactcgcccaact

SEQ ID NO: 30434 - DNA, 201 bp, Homo sapiens
tgggagtcaccctcggacgttccccagggggctcctctgtgccccgaaataactgaggcctctgtgcccagcttctgcctccggcctacctggtcagtgtsggggtcctcctgcgcccgccccgtgttttccaggaggatgtttccggtgctgaaggtgaacgtgtctggcctggaccccaacgccatgtactccttcctg

SEQ ID NO: 30435 - DNA, 201 bp, Homo sapiens
gggagcttgggagtcaccctcggacgttccccagggggctcctctgtgccccgaaataactgaggcctctgtgcccagcttctgcctccggcctacctggkcagtgtcggggtcctcctgcgcccgccccgtgttttccaggaggatgtttccggtgctgaaggtgaacgtgtctggcctggaccccaacgccatgtactc

SEQ ID NO: 30436 - DNA, 201 bp, Homo sapiens
cagaaaactgagctacaacagagaaataaaatctgcattggaggcagtaaaaaccaaaagtgacatggagggaaattgacagagtggtgtggaaaaaacawttcacaagccatttaatatatgcagaaagatctaagagctgaaacaacacagggggaggaggcgggagactaggcaaggatcctcagatttggaagtaca

SEQ ID NO: 30437 - DNA, 201 bp, Homo sapiens
caggtcctctcctcccctccctcccgaggccgtggagatggtgaggaggccacctggacctggcagggctcggggaagggggagcttgggagtcaccctckgacgttccccagggggctcctctgtgccccgaaataactgaggcctctgtgcccagcttctgcctccggcctacctggtcagtgtcggggtcctcctgcg

SEQ ID NO: 30438 - DNA, 201 bp, Homo sapiens
ccattctcctgcctcagcctcccaaggagctgggactacaggtgcctgccaccaggcctggctaatttttttgtatttttagtagagacggggtttcaccrtgttagccaggatggtctcgatcttctgacctcgtgatccacccgcctcggcctcccaaagtgctgggattacaggcgtgagccaccacgcctggccagt

SEQ ID NO: 30439 - DNA, 201 bp, Homo sapiens
cacacgcctggcacactcgatgcgcgcgctgacctcggcaacaagtcctgtttttataagagagcgaggaggacacttctcagaaggggttgttttgcttktgcttatttccgtccatttccctctctgcgcgcggaccttccttttccagatggtgagagccgcggggacacccgacgccggggcaggctgatccacgat

SEQ ID NO: 30440 - DNA, 201 bp, Homo sapiens
aaagaacattctttagtcggggattgttcctggaagaccccaggttaggcaagttgcaaacaagctcagtcttttaaaaatgaccatagccttcctgaaarccttagtactttattccaccaggtgaaaggattttgtgatgagcattcattgcttttaatggtgtgtagcatctcacatcccttttccaaacaagctgtg

SEQ ID NO: 30441 - DNA, 201 bp, Homo sapiens
tcagggtctgttccagtgctggcccctttgcgggcatcagtaacactaatagtgtgggaataagaggaaaacgttgtcgactgagcttgggcagctgaagmgtacaactggggaacgtggccccactgtgggggctgtggggagactgagtcacatgcccctcccctgggaccttaagctctgaggttggggggaagacca

SEQ ID NO: 30442 - DNA, 201 bp, Homo sapiens
aacctcttccagaaatgccctcacagacacctagaaatactctcttaccaattctctgggcattttttaggccagtcaacttgacacataaacgtaaccaytgtaaaaccccaatctgttttctagcatactattatattttagaaagtcttgtgtattactaaacaggaaaattatggtgctgtataatatagatactca

SEQ ID NO: 30443 - DNA, 201 bp, Homo sapiens
ccggagacagccagcaacctgggtactcccaatgtacggtttgttgcactctgtcatgtcattctgcgtcatcgggactagacttgctgagagctgggaartggagatggagaagacaagggtgtttctgggtgtgcctgggatgtaagattgcctttttgccatgcgaggctcttggccctgtgatgttgaagctgtgtt

SEQ ID NO: 30444 - DNA, 201 bp, Homo sapiens
gctctgctctctggagtgatggagggagagtccctggcctgggctctgctctctggagtgatggagggacagtccctggcctgggctctgctctctggagwgatggagggagcactaatgcaggttactcagcactgtcttttctcacagcaggggggtggcttcttcctggaaccagcaccctgtgtccacctgcaaatc

SEQ ID NO: 30445 - DNA, 201 bp, Homo sapiens
gaggagaggctggtcttcgtcgtgagaatcactgcggtggtgggggtggggtgtcctagataaaaacatgtgtacttaagcccatcctcagtaacttttgrttgagactatctgaaaagttttattctgaatgagagtgcaaaactactggtctgagtctttcttttctgttttgtgtgtttgtttgacggagtttcactc

SEQ ID NO: 30446 - DNA, 201 bp, Homo sapiens
aacaagctcaacggagggggccaggtaggtgtgaggagcccgccaggtctgggaccagcgaggagggggccgcgctgcgccttctgcacgggggttgtggraagggacgctgcttgaacgggaggcgacgtctgccctggagaaactgccacagccttctctaataaggcctttagcgctgtttatactaagctgataaca

SEQ ID NO: 30447 - DNA, 201 bp, Homo sapiens
cgctgacctcggcaacaagtcctgtttttataagagagcgaggaggacacttctcagaaggggttgttttgcttttgcttatttccgtccatttccctctstgcgcgcggaccttccttttccagatggtgagagccgcggggacacccgacgccggggcaggctgatccacgatcctgggtgtgcgtaacgccgcctggg

SEQ ID NO: 30448 - DNA, 201 bp, Homo sapiens
accacgcacacgcctggcacactcgatgcgcgcgctgacctcggcaacaagtcctgtttttataagagagcgaggaggacacttctcagaaggggttgttktgcttttgcttatttccgtccatttccctctctgcgcgcggaccttccttttccagatggtgagagccgcggggacacccgacgccggggcaggctgatc

SEQ ID NO: 30449 - DNA, 201 bp, Homo sapiens; identical to SEQ ID NO: 6804

SEQ ID NO: 30450 - DNA, 201 bp, Homo sapiens
actagatacaagctactgcataggtgcctgtaaatctatgcctaagcccaaccccaaagtactgcaaattcgacattagttggataccttgttggtgttgrcgttgaccgaaaactagaacttccaggtctctatttcctaagcagccccagactgtgttttcagccatttctgatttatacacatggaacattgttagta

SEQ ID NO: 30451 - DNA, 201 bp, Homo sapiens
agattctggaggagcggggagacgcgctaacccgcactgagaggaaggcttcctgccctttcaaataatattccggaacttgaaatggaagcacaggagakaactgtttaaattaagtccccattcaaacattttccccttgaattctccatacaagtgtttaaaactagaaacaacttctcaatgctcaaaatgaaaaga

SEQ ID NO: 30452 - DNA, 201 bp, Homo sapiens
acctatgtactgaacaggacaaagtgcagggaattgtgtctgtactggagttactctaaggaatgtctgctgcttagtgtttgaggagaggctggtcttcrtcgtgagaatcactgcggtggtgggggtggggtgtcctagataaaaacatgtgtacttaagcccatcctcagtaacttttgattgagactatctgaaaag

SEQ ID NO: 30453 - DNA, 201 bp, Homo sapiens
cgagctgtggctgcgcttcaaggagctcaccaatgagatgatcgtgaccaagaacggcaggtgggtgcgcgtccggagcccgcgcgcgccgcgctctccakcgcctgggcagcctgggggacctggcaagttcccggaggtcgaaccctttttctcctggaggagggctttgtgtttgttcccgctctggttaactccctc

SEQ ID NO: 30454 - DNA, 201 bp, Homo sapiens; identical to SEQ ID NO: 6807

SEQ ID NO: 30455 - DNA, 201 bp, Homo sapiens
cccgcccggctgggtctgatatggccgctctcggccaatgggaggctgcccggcacttcaaagcgtgcgcggcccaatccgccgagcaccccagcgctgcsgccgcggctctatttatggggagggcactgaatttcggtccccagagacctacactagtagagccttggggagttcaagtggaataacttctccccaccc

SEQ ID NO: 30456 - DNA, 201 bp, Homo sapiens; identical to SEQ ID NO: 6814

SEQ ID NO: 30457 - DNA, 201 bp, Homo sapiens
tcaagatgaatatgggctgtccaccctattcaagctaaagtactgtacataaaataaatggataaaaagttatcatttgtcaatgaaaagtgtggttaccrtagcactttgaacaaaatggcatttataaatatctttcccgctgctttttctcaaaagcaaaacacaactgcaatggcgctggattgggacaatttctcc

SEQ ID NO: 30458 - DNA, 201 bp, Homo sapiens; identical to SEQ ID NO: 6794

SEQ ID NO: 30459 - DNA, 201 bp, Homo sapiens
gccaggccttggaagggggagcttctgcctccttcccccttcctgggctcccgttttaggaggaatgttactgtttaaagagaccccactgaactatttcstgctcattgtcacctctccttcgctctcctcgcgtaagttctcaccgaaaggtaataaaacaaccgctgccgacaccgcttggcgctgggccgggcgggg

SEQ ID NO: 30460 - DNA, 201 bp, Homo sapiens; identical to SEQ ID NO: 6798

SEQ ID NO: 30461 - DNA, 201 bp, Homo sapiens
aataagaattcaattgcccgtggttagaaacagagcaacaatgcgtaaacaagcgaagctttcaggggctccaagagcatcgccccagaagcctgcacccratcagatgacccgcacactgcaagctgttgacagaggccccacccgagggtctcagtgtggctctaattgggcatcttagaacctgaagctttcatttgt

SEQ ID NO: 30462 - DNA, 201 bp, Homo sapiens
ataagtagtctcaggcaaagtgtaatgtgacacagctaggtaaaggcggaactgggaatggcttcctagtctgactgccaggtgcttttcttgctgctggrcaccatgctagcacacctatgtactgaacaggacaaagtgcagggaattgtgtctgtactggagttactctaaggaatgtctgctgcttagtgtttgagg

SEQ ID NO: 30463 - DNA, 201 bp, Homo sapiens
gggctctgctctctggagagatggagggagcactaatgcaggttactcagcactgtcttttctcacagcaggggggtggcttcttcctggaaccagcaccstgtgtccacctgcaaatcctcatcctcagtttggaggtgccctctccctcccctccacgcacagctgtgacaggtacccaaccctgaggagccaccggtc

SEQ ID NO: 30464 - DNA, 201 bp, Homo sapiens
taagttctcaccgaaaggtaataaaacaaccgctgccgacaccgcttggcgctgggccgggcggggaaagcgccccgagtcccactagtccggaccacccsgccagccccgaccttctcccaccttccgtgaaagcaatgacacagcagaaaccacgcacacgcctggcacactcgatgcgcgcgctgacctcggcaacaa

SEQ ID NO: 30465 - DNA, 201 bp, Homo sapiens; identical to SEQ ID NO: 6803

SEQ ID NO: 30466 - DNA, 201 bp, Homo sapiens
ttttgttttcagtgttacgtagcttcagttattggtggtatttcactgtactttgttgttcttggaagacaccatctataattgcactttgttaccttccycccttagcctattctgacaactcacctgcatgtttatccatgctgcaatcccatgacaattggtccagccttggaatgcctgcccatcccagcatgctcc

SEQ ID NO: 30467 - DNA, 201 bp, Homo sapiens
gctccccgtgagccacaatgccagcccacctaccagctccaggtaatgtatgtccaggacctggtgcaaagcatcctgggagctctgcctgtgacttcacsctgtttccattcccataggtccttagtccttattctccttggtccctgtgggtggttgggtctttatttagaattctttattagccagctatgcccaggg

SEQ ID NO: 30468 - DNA, 201 bp, Homo sapiens
ctttcatgagctctgaatatgtgaataatcttttcagtcatcttcctgatgattttgtttcttattaatagatacgacaataacttctatacatcacagawtgtgcttgtgagtcctttaataatttggagaaaatgacctgtttgaaagaagaaaactgtcatattacacagtcactccgaatgggatttctggtgtgtt

SEQ ID NO: 30469 - DNA, 201 bp, Homo sapiens
ccagcccacctaccagctccaggtaatgtatgtccaggacctggtgcaaagcatcctgggagctctgcctgtgacttcacgctgtttccattcccataggyccttagtccttattctccttggtccctgtgggtggttgggtctttatttagaattctttattagccagctatgcccagggattgcaggtgacatgactgc

SEQ ID NO: 30470 - DNA, 201 bp, Homo sapiens
taagcccatcctcagtaacttttgattgagactatctgaaaagttttattctgaatgagagtgcaaaactactggtctgagtctttcttttctgttttgtktgtttgtttgacggagtttcactcttgttgcccagactggagtgcaatggtgcaatcccagctcactgcaacatctgcctcccgggttcaagcgattctc

SEQ ID NO: 30471 - DNA, 201 bp, Homo sapiens
acttgaactcctgacatcagctgatccacctgccttggcctcccaaagtactgggattacaggcatcacccactgcggctggcctggtatgagtctttcgyagtgaaacttaacagcgctctttcatgagctctgaatatgtgaataatcttttcagtcatcttcctgatgattttgtttcttattaatagatacgacaat

SEQ ID NO: 30472 - DNA, 201 bp, Homo sapiens
attacaggcatgtgccaccatgcccagccaattttttgtatttagtagagacggggtttcaccatgttagtcaggctggacttgaactcctgacatcagcygatccacctgccttggcctcccaaagtactgggattacaggcatcacccactgcggctggcctggtatgagtctttcgtagtgaaacttaacagcgctct

SEQ ID NO: 30473 - DNA, 201 bp, Homo sapiens
gtagctaatctcttgtgttgttaaactataactgtttcatatttttcttttgacaaagtagccaaagacaatcagcagaaagcattttctgcaaaataaaygcaatatgcaaaatgtgattcgtccagttattagtgaagcccctccttttgtgagtatttactgtttattgtagctggtggtaaagaccttatccccaaa

SEQ ID NO: 30474 - DNA, 201 bp, Homo sapiens
tttctcacagcaggggggtggcttcttcctggaaccagcaccctgtgtccacctgcaaatcctcatcctcagtttggaggtgccctctccctcccctccaygcacagctgtgacaggtacccaaccctgaggagccaccggtcctcaccctaccccagcccctatgctcatcggaacaattctccaagtgagtcctcagcc

SEQ ID NO: 30475 - DNA, 201 bp, Homo sapiens
agcatatgtagctaatctcttgtgttgttaaactataactgtttcatatttttcttttgacaaagtagccaaagacaatcagcagaaagcattttctgcamaataaacgcaatatgcaaaatgtgattcgtccagttattagtgaagcccctccttttgtgagtatttactgtttattgtagctggtggtaaagaccttat

SEQ ID NO: 30476 - DNA, 201 bp, Homo sapiens
ccctgctcactggtgtctttctgttgcagtcagtaccccagcctgtggtctgtgagcaacggcgccgtcaccccgggctcccaggcagcagccgtgtccarcgggctgggggcccagttcttccggggctcccccgcgcactacacacccctcacccatccggtctcggcgccctcttcctcgggatccccactgtacgaa

SEQ ID NO: 30477 - DNA, 201 bp, Homo sapiens; identical to SEQ ID NO: 6817

SEQ ID NO: 30478 - DNA, 201 bp, Homo sapiens
ctgttcttgttgctacttttacaaaattatccattgacatctttcaaacttaggagagaaagcactcatattcccaaatcaaatggaacattgaattattycatttcccagggcttaaaagcaacgcagtgaaatgttctgagctttgtggtagaatcataaatgtgcttatctcaaagcccaaatgcaaaagaggcaagt

SEQ ID NO: 30479 - DNA, 201 bp, Homo sapiens
aataatattttgtatattacacattaacaatatggcagaattgggtgtggcagaaatatgtacatgatactattggctatgactaattctagataactgtrctgtaaaacaacagaacacctagccattacccttggccttcccatcatcatgagccacagaaaattagatcaaatataatggtcaactgctactatatta

SEQ ID NO: 30480 - DNA, 201 bp, Homo sapiens
ataattcatctgaagcaagaaagtttatttttcacagtagtctctaggcttatattttaattgagaatacatgttgtaatgaccatactaaaagtcctgayctcctcactatattataaagtatcacactcaggggtaagtgaggtctccatccacaccgccccttcttgcttaagggtagaaaagacctctgcagtcgtg

SEQ ID NO: 30481 - DNA, 201 bp, Homo sapiens
ataaaattttggaaagctcaaaacgttttccaactaagtgctagacagtccttaaagtgttctcaagtaaaataaaaataaaacagtttatcattcatacratactgcaagtttggaaaaacttaggaaaaatataaaataggtacaaagggtggtgcgtatattaatttgtttttaattttaaatgcaataaataaggca

SEQ ID NO: 30482 - DNA, 201 bp, Homo sapiens
tttcatatgaattagatgaaaacatgattatttaaaatacacttacaaatagtgataaggtttggataatatttttccaaaggaattgactataaccttaraagcttcaatctcaaaacaaaagagagtaggagtcttttaaaatcacatttaaatagggttgctggactcagcaaagaaaaatacaaaatgtccagttaa

SEQ ID NO: 30483 - DNA, 201 bp, Homo sapiens
gattaaaaataataatttttagtaaacgtatgttccaatgagcatcctgtattttatcaagcaaccctataattaaatagcaaattgttcctttaatgaawtaacttggttaggtttattgtgaatgtgagggattaatattaagatgtcacaaaaaacatctttttttcggctggcaagatggccgaataggaacagctc

SEQ ID NO: 30484 - DNA, 201 bp, Homo sapiens
tataatcatggacagcacaaacttccagaaaacagagatgctgggctaaattagagccgactctgatataagtacttcagatatgataggaatcggatgayacaaattttgtccccaaatatgtagcactcttagcaatcacaggaagaaagataccttgtgtttcagcacctcagtacagctggaaccagaagtaaagtg

SEQ ID NO: 30485 - DNA, 201 bp, Homo sapiens
ttgaaatgttttaaagtgggatattctctccgagcccatcaggaaagaggtggaagctatcctgaagctttgtagcaatctagtgattctctttgcaaggyatgtaacaatggctttgggtggggaatgtgtcctctgctatctacagctcaagctccacagagatgcaacttacggccatctttaagagacacagtgcag

SEQ ID NO: 30486 - DNA, 201 bp, Homo sapiens
agtctgcgtgttgctaacatggccttctccaacgacctgttcaacaagagctctctggagtaccgagctctggagcaacaattcacacagctggtgagtgrgcactgctcacaattcccaattctttgtctcttctttctttgttgttattttataatataattattggctgtcttgagcaattagtgttagtagaaacaa

SEQ ID NO: 30487 - DNA, 201 bp, Homo sapiens
aaacatttaaaaatgcctggggaagaacctcttactcttatgcaagttcctccaccagggagaaaagtttaattactgtccgatggagctgaaccctttgkccagggaagcagaaggctgctgtggtgatgcatagctgggaacaagccagccagctgtgtgggacccttggaccatacgtcccagccccagcagggaggg

SEQ ID NO: 30488 - DNA, 201 bp, Homo sapiens
ttctctttttcatgtttccattgtgcatgatgaaatgaagaccaaagaaagaaaaagatgggtaatttggactttaagttttgaaatatagtacattcccrtctcccccaaatttatatactgattttgcacaaataatttttacatataatgtcttggataagcccattactttttgatggtttcttatttaaatggaag

SEQ ID NO: 30489 - DNA, 201 bp, Homo sapiens
agtataacacatacagggaagcaccaaatttgggtccttaagagaaagaatgaagaatttaggacagagtatgagtcatattttttcaagaacatatttaygtgatcttaaaaagatgagttcagaaggcacctaatatctgtaaattccagaatgacagaaaaagcatattgaattttgacctcgttctaatttaaactc

SEQ ID NO: 30490 - DNA, 201 bp, Homo sapiens
atacatgttgtaatgaccatactaaaagtcctgacctcctcactatattataaagtatcacactcaggggtaagtgaggtctccatccacaccgccccttyttgcttaagggtagaaaagacctctgcagtcgtggggaaggaacttgtggtaccaagccttagaaaaacacaaagcaatttgctgaaagaaaagaaccct

SEQ ID NO: 30491 - DNA, 201 bp, Homo sapiens
gttccaatgagcatcctgtattttatcaagcaaccctataattaaatagcaaattgttcctttaatgaattaacttggttaggtttattgtgaatgtgagrgattaatattaagatgtcacaaaaaacatctttttttcggctggcaagatggccgaataggaacagctctggtctgaagctcgcagcaagatcaatgcag

SEQ ID NO: 30492 - DNA, 201 bp, Homo sapiens
ccccaagcgctatgtaaaagtgatgttcacacattgagaagagaactgtcagactaccagggcctcattaagacttcctgggctctaggccctttgccttmatgactattagtaaagaatattaaaattataccttaacttcgtgagcacaaaaatgaatataatccagtacgggttgcattaattttttcttctgatttt

SEQ ID NO: 30493 - DNA, 201 bp, Homo sapiens
agtgagagccagagatgctaacctatgttcccaagaccacagacaatttctagaagccaggctttccccgctagggcactgtcctgaggcttcttcactgrtagaacagatgagcaggtccactctctctgaaggtacaaacatctcacaaccttctcaggacttggtggaagctgtgaggtccctgtgtaacatctcaga

SEQ ID NO: 30494 - DNA, 201 bp, Homo sapiens
cacaagtccgggcttagcccagctgcagggcctcctcccagctcccccagtgtcagaattctccctccacccgctgatcctgggacaattggccaccaccstagtgccaatccatccagaacacctctgtttggcagataataataatggctgaaagctgagacaattcttcaacctcacatccagggcaagatgtgtgtg

SEQ ID NO: 30495 - DNA, 201 bp, Homo sapiens
aagcagtgataacaatgtagttaagagcagaagctgtaaggcttgcacagaacttcattctgcacagaacagctctgccacttactaattttgttacgttkgcaaattgttcaatctcaaatattactcccttttatggttttcttgcctataaaataaaaataataatagccaagtctgccttgaagagctaaagttttt

SEQ ID NO: 30496 - DNA, 201 bp, Homo sapiens
cccctcccatttggacaaaacccacagaagactcctttgtctttcttttaaatttgttatgaaatagcatattaggctgtctagccggggtgcttatactytgtctttggtatgcaatttaagccccactttgaggaagcactacatgactactatataatcacacctcacaagcagatttgaatctcttccccactgcac

SEQ ID NO: 30497 - DNA, 201 bp, Homo sapiens
tcatttatatttatgatctctttcacattttattactctcgttatctttgttttttctaattttctttggttttattttgttttcttacaccactcttttragatggatgcataggtcattaatacttagcttttcctttttctaaaataaacattttgatgatatcattttaccattaggaactgctttagtttcattcc

SEQ ID NO: 30498 - DNA, 201 bp, Homo sapiens
ctgggattacaggggtgcgccactgtgtctggctaattttttttatatttttagtagagatgggttttcaccatgttggccaggctagtctcgaactccckgccttaagtgatccacccacctcagcctcccaaagtgctgggatttcaggcgtgagccactgtgcccggcccaaacctaatttttaaactataaacgaag

SEQ ID NO: 30499 - DNA, 201 bp, Homo sapiens
ccccatatttgaaaacctctagaattatttaaaaagccaaacattgtaaacagatatgaatgttaatcttggatcatacttactagctaaaatgggcttcygttttctcaccgatgaaaatgatgtcggcaatatccatatggatttgagaggtgctgtgaatattattgaagacacatgttgaaagtgcctggcactgtg

SEQ ID NO: 30500 - DNA, 201 bp, Homo sapiens
cttggatcatacttactagctaaaatgggcttccgttttctcaccgatgaaaatgatgtcggcaatatccatatggatttgagaggtgctgtgaatattaytgaagacacatgttgaaagtgcctggcactgtgccaaacacataatggcctttgataagtgtgagctccctgtttatgtaaataactgccctttccactg

SEQ ID NO: 30501 - DNA, 201 bp, Homo sapiens
aagctggaggttcagggtcatgatccccagggtcactccagggacagggcctgaaatgcaacgacatgtctcttctgaatacagccagaatctactgggaygctagtagactaggcccggacctctggccaggctggacctggatcttcccaccaactgctaacgagcagccactgacactgttcagcttgccgaggtcaa

SEQ ID NO: 30502 - DNA, 201 bp, Homo sapiens
gccaaccgcggtggctcatgcctgtaatcctagcactttgggaggctgaggcgggtggatcaggaattcgataccagcctggccaacatggcaaaatcccrtctctactaaaaatacaaaaattagctgggtgtggtggtgggcgcctgtaatcccagctactcgggaggctgaggcaggagaaccgcttgaacccggggg

SEQ ID NO: 30503 - DNA, 201 bp, Homo sapiens
cccccactgtacagctgcagaaattgtgtttcagagaagaataagtaatttgtcttttgctggtcaaactattaccaaacgctgcagatggaattcaaagycagatttgtgtgccatcttcaactctaccctataacttctttacaaaaaggaatcttataagcccttctaactgggttatagaggctgtttatttagaaa

SEQ ID NO: 30504 - DNA, 201 bp, Homo sapiens
tggaaaaggcataatttgtaagaccttcgacatctctgaaaaagtggtatatgtcactcatcacaataatgacaataatagttactattaactaatgtcartaatagttactattgacacaaattttaatcttaataaatatgcaaggtagatattatttccccccactgtacagctgcagaaattgtgtttcagagaaga

SEQ ID NO: 30505 - DNA, 201 bp, Homo sapiens
acatccaggatgcatttacaaaaatgtggctcaacgagcttgttttccctggaaaaggcataatttgtaagaccttcgacatctctgaaaaagtggtatawgtcactcatcacaataatgacaataatagttactattaactaatgtcaataatagttactattgacacaaattttaatcttaataaatatgcaaggtaga

SEQ ID NO: 30506 - DNA, 201 bp, Homo sapiens
cagaagcatgtagggcttttatgccagttagttgtgcaggctgaagatttcaaaaatgcaaaaccacatgtaacttattctctccttgaattcctaagaarcctcctcaaaaatggacagccctcaaggccggtaaatggtaaacactgaaattaattacagtctgacatccaggatgcatttacaaaaatgtggctcaac

SEQ ID NO: 30507 - DNA, 201 bp, Homo sapiens
gtctttcatttaggctgctgtgaaaattcttcagaagcatgtagggcttttatgccagttagttgtgcaggctgaagatttcaaaaatgcaaaaccacatrtaacttattctctccttgaattcctaagaagcctcctcaaaaatggacagccctcaaggccggtaaatggtaaacactgaaattaattacagtctgacat

SEQ ID NO: 30508 - DNA, 201 bp, Homo sapiens
gcctggctaatttttgtatttttagtggagacggggtttcaccatgttggccaggctggtctcaaactcatggcctcaagtgatccacctgccttggcctycaaaagtgctgggattacaggcatgagccaccacatctggcccagaatagtatttgctgtctgtgccccaattttattgtatttacaggcaatgcccaga

SEQ ID NO: 30509 - DNA, 201 bp, Homo sapiens
tgaagagttaatgggtgcagcacaccaacatggcacatgtatacatatgtaacaaacctgcacgttgtgcacatgtaccctaaaacttaaagtataatttwaaaaaaaagaaaagaaaagaaaaaggaagttgagagccttgtggaagaagtttgtcttaagtttagtgaaggctgggagcggtggctcacgcctgtaatc

SEQ ID NO: 30510 - DNA, 201 bp, Homo sapiens
aggcttgagggtctgagattttagcaagaatatttcagtcacagatcatgtcatcaattatctctgatgtcaagaacacagtgtaagtggaatggaactayaacattagaccccaaagaccagctttgcctaccacagaaccccaggaccacaaaaaaaaggatgcttacggaaaacactggagtcaaacataaccatttt

SEQ ID NO: 30511 - DNA, 201 bp, Homo sapiens
aggcagtaggccccaaaggaggcagtagtataaggagtggcagactagaacctggcatctcacactgccactaccaccagacctaccacccctggggcctragaggtgactcctctaaccctttccccttcattacaacctctctccaaggcacaggtcaaagcttcagggcaaaggcacaaagttcagcctcaccagctc

SEQ ID NO: 30512 - DNA, 201 bp, Homo sapiens
ataccctatttattgctgcaacaaaatttttagctctgaatttttattctcagctctttattcttgattaggttgcctctttcattcttgtttccctggawgaaacaaaccattgtttttctccccacagcaatgacagtccattatctttatggctgcccctaggtaatatgaaattttactattcatcagcatgggttt

SEQ ID NO: 30513 - DNA, 201 bp, Homo sapiens
catagtttagaggtagtggtccgcaacactgaagggtaagaaggtcctcccacctcacgtccagtgtccccccagcctccagaaacaccagccctacccaytcctgcctcccctaacccttatcaaagaatcaccctcaaaatgtaaaaaccataattgtcataaaggagatactgagcacatgtcaaagtcctatttaat

SEQ ID NO: 30514 - DNA, 201 bp, Homo sapiens
ccttctggggcagaaacaacagtggtctgatgacaagaggcctgttctggttctgccatcagcccttgaggactccggtcagttgcttctctactgagagytcaatgtgctcagctctataaggataaggaagggcaaacaggggccactggccttccagagctaaatatctgagattctcttgatttctaatccacttcc

SEQ ID NO: 30515 - DNA, 201 bp, Homo sapiens
ttttggattttctttttttcactttctattctttggggaatacttggacataatgaaattgtacttcctccacagacacttcttggtctccacctgctatrgcctctacctccctgtcagaagctccacctttctttatggcatcaagcatcttctctctgactgatcaaggcaccacagatacaatggccactgaccaga

SEQ ID NO: 30516 - DNA, 201 bp, Homo sapiens
ttggtgcactgcactcttttcctttaggagcagcactccctgagggctggaacaagaggaatactgcagctctcttggagtcacccagccctatgtggctrctgcaattttagcagatgctggggaatgcctgtgaggaattggcaatgtggaaacacaagggctgagatttcctgggcagaactcagtcattcaatggat

SEQ ID NO: 30517 - DNA, 201 bp, Homo sapiens
tttccctgacaggcaagtacccaaaatagagtgtgtgtgtgtgtgcttttgaatttaaaaagatcatataatggagtgaaactaagctattctacctgtargattttatgtcagccactaagagctgtgtagattattctgacagacaattcctgcatataatgtactgaagataaatcagtacataaaacaaaaataaat

SEQ ID NO: 30518 - DNA, 201 bp, Homo sapiens
gctggtgagtgggcactgctcacaattcccaattctttgtctcttctttctttgttgttattttataatataattattggctgtcttgagcaattagtgtwagtagaaacaaaccgccaagccagctgttgctgaagacattcaactagaattttgagatgaattcagatccaactggggaagtgagttctgtgatagaca

SEQ ID NO: 30519 - DNA, 201 bp, Homo sapiens
ataagagtggaagcagtgtgagttgctctacaaattactgttataaattctctcgttttgactctaattctaattgccttcacctgccgtattagcaaagmgggccaatatattagcaaagtggtccaatagctcccccttggggctctgcccttccctggaacttctcacacattccacgaagggatggccgtgagacca

SEQ ID NO: 30520 - DNA, 201 bp, Homo sapiens
tgctttagagccagaactcagtccccattccacgctgcttgcacaggaactctgagtgtggggctcaggaatctgttttaacaaggcctccagacgattckgatgcacactaaaggttgtaaataattacatttggagctaaactaatatcacttgtgtctgtaaattcatttttcaaagatacagaatgtggttcttttc

SEQ ID NO: 30521 - DNA, 201 bp, Homo sapiens
aaggcctccagacgattctgatgcacactaaaggttgtaaataattacatttggagctaaactaatatcacttgtgtctgtaaattcatttttcaaagatrcagaatgtggttcttttccctccagtctgatatcacaactgtgcaacccactccaaaatgaggtaatagcaaatgtatttggtctcttgcctttgactgc

SEQ ID NO: 30522 - DNA, 201 bp, Homo sapiens
agttactattaatgttgataagcccaagaaacaagatactatgtttttgctttcttttgtaggttgccagatcactctgaaaatcaagcatacaaaactartgttaaaaagttccaaaatcaacaaaataacaaggtaaaatcatactttctaagttggttgcaattactaaacttgacttttgaaggaaattaaaaacat

SEQ ID NO: 30523 - DNA, 201 bp, Homo sapiens
agggccataaaatgacaataggacacaggatctgatattgacaaaatgtccaactaaatcccgaagtaccagatagaattatggatcacatttcaaataawtaaaaggaagtgataattttcacagtaggaagtaaacttgaagaactacatcttagttcaaggccagaacaagtatcaatgctgattattcctggctatg

SEQ ID NO: 30524 - DNA, 201 bp, Homo sapiens
acagacacttcttggtctccacctgctatggcctctacctccctgtcagaagctccacctttctttatggcatcaagcatcttctctctgactgatcaagkcaccacagatacaatggccactgaccagacaatgctagtaccagggctcaccatccccaccagtgattattctgcaatcagccaactggctctgggaatt

SEQ ID NO: 30525 - DNA, 201 bp, Homo sapiens
tgaaaattccagaaataaacaattcattaagaaggtcaatagtagcctaacatatgtcacaacttctataccatttaccttacttcgtctcatcacatagrcattatattgagagagagagaccacattcacataacttttcttgtagtgtattgttacaattgttctatttcattattagttattgttgtaaatcctttg

SEQ ID NO: 30526 - DNA, 201 bp, Homo sapiens
aggcacctaatatctgtaaattccagaatgacagaaaaagcatattgaattttgacctcgttctaatttaaactcctccattctcatttttgtgtctttartttttaaaattttcacagatgttgccaacgtctcacttgggcctttccctctcactcctgatgacaccctcctcaatgaaattctcgataatacactcaa

SEQ ID NO: 30527 - DNA, 201 bp, Homo sapiens
aactagtgacagctccaggccctgtgtaccattggttctatgaaaacattttgaatagttgagtgacattatatgatttgtgctgctactacctttttctytcataagtaatgaacatatttaagttaaattcagaaagtaagcaccatgtgtattacagctgttcctcatctgtacttagaagttctgaatattcaaatg

SEQ ID NO: 30528 - DNA, 201 bp, Homo sapiens
tccatttctatcttttctttattcaatgatatgactatttccaaaacctattggcttaaaggttgttttcctagtgtttaatctataatttaaaatagtayaattatatttttttcttaattcataatttatttaattaaactgttctaatattattttactccaatacgctttttagaactacctaaagtagggaaaata

SEQ ID NO: 30529 - DNA, 201 bp, Homo sapiens
tatcttttctttattcaatgatatgactatttccaaaacctattggcttaaaggttgttttcctagtgtttaatctataatttaaaatagtacaattatatttttttcttaattcataatttatttaattaaactgttctaatattattttactccaatacgctttttagaactacctaaagtagggaaaatataaggaag

SEQ ID NO: 30530 - DNA, 201 bp, Homo sapiens
cacaactgtgcaacccactccaaaatgaggtaatagcaaatgtatttggtctcttgcctttgactgctgccagttccattgcttagctattcatacatgcrttaaaatctgccccatttcttacagctgatcaagcagatccctgcaagttcctggcctgcggcgaatttgcccaatgtgtaaagaacgaacggactgagg

SEQ ID NO: 30531 - DNA, 201 bp, Homo sapiens
atggtttatttctttcaaagctatcaggcccctctgatttgtataactccagagaaaggaaatactgaaaagtgaaagttataaaagatgaaacccttaawatctaccaaagcagactcatttttctttatttcaagatgctgctcggtagtattttctgtgaaatcagatggattagagaaaaataaaagttgatagaaa

SEQ ID NO: 30532 - DNA, 201 bp, Homo sapiens
catacatggaatcaacctaagtctggaataaagcagagaaactaatttgctcctttccaaggtcaatgtgaactgagaaaagggcccactataccttggaragctcagtaataagaatcaactttggctctgtaattgactagtgaaataacaaacgatagactctaaatgattgtgtcatctgaaaaaccaccaagaata

SEQ ID NO: 30533 - DNA, 201 bp, Homo sapiens
tattgtcctactgctatatcttacattgctatttcatagaccttcctaaaggaggctatttgtagaagaaaggataattcatccttcttcctgattggcayggcatgacttataagatcacaaaaaatagtggtcaataccagcaacttttttgacaaaaagcactttttcaaaaagacctaggtgggcacagtggctcag

SEQ ID NO: 30534 - DNA, 201 bp, Homo sapiens
cagaattaattatacaaattggatttcatttacatgattatcagtgaataaatgttaacttcttgacatggttatttattgctgcattacaaccatccctraagttagtggcctaaaacaataatcatttattttgccaataaatctgtaattttggcagggatcagcagggacagcttttctctgctccatgttgtgtca

SEQ ID NO: 30535 - DNA, 201 bp, Homo sapiens
gaaatagaaactttgtaagcagcctatgtctagaagccaactttggtactggaaggaaaaaaataataagctcttcagtgatatgacaaggagatgatgtrgcctatgtcttcagggatgccagtcaacattgtggtcacatggccatcagccttcaacctagagtgaaaatggtactttgaccaaagggctggctttcac

SEQ ID NO: 30536 - DNA, 201 bp, Homo sapiens
tcactcactaggaccttgcttttgtcttggaaaaggagggaaagacaaatctttttttattttaacttttaggtccaggggtaaatttgcaggttcattayataggaaaacagtgtcatggaggtttgttgtatagattatttcatcacccagctattaagtctagtatcctatagttattttttctgatcctctccctcc

SEQ ID NO: 30537 - DNA, 201 bp, Homo sapiens
ctgtcttccttcctccctcagggagctgacagcttacttagggacccatccaccagcacaagaaggtcaacgtgaggagccaagttgaggcaagggataamccaggtgtgcggctgtagggagcagcttctcaatgtagatgccacttaagtagtgtcttagaaagagggtgggaagctgtgagtgcactgccagggctgt

SEQ ID NO: 30538 - DNA, 201 bp, Homo sapiens
ctcattaaaagatcaattaccttgaaggttctggtcaggttgctgctggtaaatgacctgagcttctgttgatctggaattttcttcttaaaacagaaagstaagagaaatccagacatggaataagtggggaggaaggaataacatataggcataagagtctccagattggtctcgtctcaccctattcctccccacggt

SEQ ID NO: 30539 - DNA, 201 bp, Homo sapiens
ctcctcaaatttaaaagagatagtattaacagtgtttatattgtcatattgaggaatctatggataatctatggacatctctaagaacaatgtctatccayaacacaagagctcaatatacagtagtagttgcagtgtgtttcatgactcagcaatatgtagcatgtatagtcaaaataatataaaatcaaatattcaaaa

SEQ ID NO: 30540 - DNA, 201 bp, Homo sapiens
tttcctggtgcgttggctcacgcttgtaatcccagcactttgggaggctgaggtgggcggatctcttgaggtcagaagttcaagaccagcctggccaacayggtgaaaccccacctatactaaaaatataaaaattagccaggcatggtgatgggtgcctataatcccaggtactcgggaggctgaggcaggaaaatcact

SEQ ID NO: 30541 - DNA, 201 bp, Homo sapiens
atttcggccaggcatggtggctcatgcctgtaatcccagcaccttgggagaccaacataggaggatcacttgagcccaggagctcaagatcagcctaggcragactgggagaccccatcttcacaaaaaatttaaaaattacctgggcatggtggtccatgcctgtagtcccagctacttgagaggctgaggagggaggat

SEQ ID NO: 30542 - DNA, 201 bp, Homo sapiens
aagttcaagaccagcctggccaacacggtgaaaccccacctatactaaaaatataaaaattagccaggcatggtgatgggtgcctataatcccaggtactygggaggctgaggcaggaaaatcacttgaactcaacaggggtggaaattgcggtaagctgagatcatgccactgcactccagcctgggtaacagggaaaga

SEQ ID NO: 30543 - DNA, 201 bp, Homo sapiens
gaatcacatttattgatttgtatatgctgaaccgtctttgcatccctggaataaagctcatctgattatggttattgtctttttcttgtgctgttggattmgatttgttactattttgttgaggatttttgcatctatgttaatcagggatattggtctttagttttctttttttgttgcgtccttgcctggctttggtat

SEQ ID NO: 30544 - DNA, 201 bp, Homo sapiens
cttgcagctagaaagtagcagaaccaatatttaaaccccatcccgtacaaagagctccggatcacccaaaagctgagctaccttcatcactgtgattcctmttatgttcagggaatgaaactgcttttaatattgtcacaaaaaatatgtatataattagaaggtaaatcagtctgctgggggaaaaaatttgtaatgcag

SEQ ID NO: 30545 - DNA, 201 bp, Homo sapiens
tgtctggtagaaatcagctgtaaatctacctggtcctgggctcttatttcttaggagatttttttattactgattcaacctcactattcattattgttctrttcaggatttctatttcttcctggttcaaccttgagaagttgtatgtctccaggaatctatccatttcctctcggttttcaagtttgtgagggtagagat

SEQ ID NO: 30546 - DNA, 201 bp, Homo sapiens
aaatgttatattttcttgttaaattgatcccgttatcattatataatgacctgctttgtctctttttactgctgttgatttagtgtctgttttattttgtrtaactatagctactccttcccacttttggtttctgtttacatagaattttttttctacccctttagcttcagtctatgagtgttttaccaagttttttat

SEQ ID NO: 30547 - DNA, 201 bp, Homo sapiens
atttagccaatggccattaaaaaaaaaaaaaaagaaaaaaaaatggttgccccatggctctccactaaaatgtctgtggtgcagaacctcctccctcagcyctgttctatgcaacaggaacactgccactccatgacagaaggggagacaccttacctttcctgcaagctccagcctggtaggcacatagccagcagggat

SEQ ID NO: 30548 - DNA, 201 bp, Homo sapiens
agcactactttttctaggtatgtgtatttaatttttacataattgcagttctaccacacacaaattttatatcagcctttttgtagttttattatgtcatrtaaatgttctacattgccatctaattttgacaagcatcattttattggctgcataatgtttctttcagtaaatgtgtcaagatttgctttatctaaatat

SEQ ID NO: 30549 - DNA, 201 bp, Homo sapiens
gtctctagtgaggatggggcagaggcatagacaaaagattctaatcccagctcaagctgtagcatcatcacaggggggttctctgtggttggttttgtgtyacagaaacagagtagtcaaggtatctaatatttgtgttataccaaaaaaaaaaaaaaaaaaaagatggaggttgtttgttcagccaagagaacctaaagt

SEQ ID NO: 30550 - DNA, 201 bp, Homo sapiens
gctttagagatcttactaaaagaaaaggggggtaaggaaaggaagagtgataccagcaagtgaaatgtctcgattatctgataaaggagttcttattgagygtttacactgtgtcttacactgttttagctgctgcccatgttataactcatttaatatcacagaaaccctgtaagggaggtattattattccccatttta

SEQ ID NO: 30551 - DNA, 201 bp, Homo sapiens
ggaagcatgttagtagatctataaaatagtgattcccaaacctgcctgcatgttgaaattacccaaggattttcaaaatttgctgatgcccgtattctacrcagagattatgatttatgggtctagtgtgtcgctgggtgagccaattaatctataaatttcctcccttcctggagattctttcctaagaatgtacctctg

SEQ ID NO: 30552 - DNA, 201 bp, Homo sapiens
aactaccatttgaaatgtaaaaggagaaagctggacatagctactaaactgaattcatacatgtgtccaaaggagtgcaaaatgtgttcatcagtttggtractaaatggtcttttttcatgcacaagcaggtggtagcatggaaaaatgagccaggcttgaggtcaggaaggccaggatttcaaccctgcaattcccatt

SEQ ID NO: 30553 - DNA, 201 bp, Homo sapiens
tcattactgtgacaggaatacatatggtatcatttctagcttttctcactccttcctgtgtctcatttgatgagtctttggtacccacttcttaccaaggrtagttctaggagaatccaaaggtttcagttcagtccaagtcaactgcggagaacgaaggcagggaaaagaacccacagacagttctgttaccctggcaca

SEQ ID NO: 30554 - DNA, 201 bp, Homo sapiens
ctattctttccactctatagagccctgtggtaaaactacaagtaaaaaacacaagccccaggatactaggctgataagaatgtactgtgattataagtacmaatgccattggagatttgcaatgactggtatatttaataagattattattgttttagttagaggtctctacattctacaagttttgagtggactatctta

SEQ ID NO: 30555 - DNA, 201 bp, Homo sapiens
tccctcacctcccttatatcatgtaagtccattctctggctttgccccatatgccactagtgcacgttgatttccccaggggtcccatgtagattctctgmacatctttagatgggaaaccgttccatcacaggtgaattccaggggcactgtaggccacagattcaagcaaactctttatgttccaggacaccacagagt

SEQ ID NO: 30556 - DNA, 201 bp, Homo sapiens
tacacttcccatctatttcctttattcaagacctacacatatgaaatagtgaacaatgtaagatgttatgtataaaatataaatactactttaactttacrtagactaaacagaggtacataattattttagttcagaagaggagaaaaacagtgagaagcagagatatcaaagaaagcactcatggagctttgcttgggt

SEQ ID NO: 30557 - DNA, 201 bp, Homo sapiens
caatttatcagtttcaataaagtactaaactgcataatcatttgagatagttcccatttagtgctgacatcttctggatgtagttatccattttagctgcmcttgaattgcagcaatttcactctatctttttacactaactcttacccattttcttgttttcctctgccccagggacattctctagatgaagggatgact

SEQ ID NO: 30558 - DNA, 201 bp, Homo sapiens
agctctttttatttcactgaaatctgtaacaaacagactttgtcactgtggcctgtcatccttggactcaagtgatcctaagttcctgatctctcacctcrtctctagtgaggatggggcagaggcatagacaaaagattctaatcccagctcaagctgtagcatcatcacaggggggttctctgtggttggttttgtgtt

SEQ ID NO: 30559 - DNA, 201 bp, Homo sapiens
tcattgttaataaatacagttactcttttgttgtgaaattttatgaggaatataaacaatgcttttgctaaattggcagaattgctatcattaaaatatcsctgatgtaattttccttaactcaaaacttctacagtctgtgttttcattgcaaaaatgaatatctggactccttgcttggcgtttactaaaatatcagct

SEQ ID NO: 30560 - DNA, 201 bp, Homo sapiens
tcttttttggttccatatgaatattagtattgttttttctaattctgtgaaaaatagcattgatattttgataggattgcattgaattcggggattgtttyaagaagtatggccatttcctggtgcgttggctcacgcttgtaatcccagcactttgggaggctgaggtgggcggatctcttgaggtcagaagttcaagac

SEQ ID NO: 30561 - DNA, 201 bp, Homo sapiens
ggcaggaaaatcacttgaactcaacaggggtggaaattgcggtaagctgagatcatgccactgcactccagcctgggtaacagggaaagactctgtctccaaaaaaaaaaaaaaaaaaaaaagtatggacattttaaaaatattgattcttccaagccattaccatcaaatgattttccatttgtttgtgtcacctctgag

SEQ ID NO: 30562 - DNA, 201 bp, Homo sapiens
ttgaaataagggaattggtaggatgacaaagctggtttaaagagaatatgaaaaattggaattttaggtagccagaggacaagagagaatgatgaaatgakattggtaaatgtaaaacagaaactacaatcattgcatcatcaattttctctacactaatttctaattttatagagttgtaaaacgtctggaccataatcc

SEQ ID NO: 30563 - DNA, 201 bp, Homo sapiens
gggtggaaattgcggtaagctgagatcatgccactgcactccagcctgggtaacagggaaagactctgtctccaaaaaaaaaaaaaaaaaaaaaagtatgsacattttaaaaatattgattcttccaagccattaccatcaaatgattttccatttgtttgtgtcacctctgagttctttcagcagtgttctgtaactctc

SEQ ID NO: 30564 - DNA, 201 bp, Homo sapiens
atgtctgtggtgcagaacctcctccctcagctctgttctatgcaacaggaacactgccactccatgacagaaggggagacaccttacctttcctgcaagcyccagcctggtaggcacatagccagcagggatgcagtaattcccaatagccctagaatggctgtcctccattctacccctagaatggctgtcctttattct

SEQ ID NO: 30565 - DNA, 201 bp, Homo sapiens
atttcttaccctttcacccttccctgaccaccttcgtagtagacatagtttagaggtagtggtccgcaacactgaagggtaagaaggtcctcccacctcasgtccagtgtccccccagcctccagaaacaccagccctacccattcctgcctcccctaacccttatcaaagaatcaccctcaaaatgtaaaaaccataatt

SEQ ID NO: 30566 - DNA, 201 bp, Homo sapiens
attcctgtgcctcagcactgaggctgcctgactgctggggtggaccatactcttccccatagggctgaacacaacacccacatctcctctagaagcagtgyagttactctcagtccataagcgggaagctcttgagcaccagaaagcacacactctgggttcctttgtgcaaaggggtgctcccttggtgcactgcactct

SEQ ID NO: 30567 - DNA, 201 bp, Homo sapiens
ctcggcctcctaaagtgctgggattacaggcgtgagccaccccaagtcttctttctaaggagaactggcatccattgtctccagttagccatactaggggraaaaaaaaaaaaaacctaacttgctactcatttagggctttttatttcataagtatcttagatgtgttagatctgtgaatatatgttaatcttcaattat

SEQ ID NO: 30568 - DNA, 201 bp, Homo sapiens
tacataaaggtgagatagctttgatttcaaaatattcattaaataaaattgttttagcacaaaaaaagacagttgaagagctcaaagaacaattacttcawaaagacaccaaggctcctttctttgaggttcataatggaaataccagttgcatctgatatgtgcatcactgcttttatgttcttacttttccatttcacc

SEQ ID NO: 30569 - DNA, 201 bp, Homo sapiens
atgaggttgattggcacagccctggtaatgagaattcatatatggaaatgctgctgtcaagctctgaactagcagcagaatgtgccgctgtaattatttayggagaatattctccctctattgctcctctcttccagccatagggaatgtaagaagaatatgaaagagctaaggaacagcaatgctgcctcgaagcatatg

SEQ ID NO: 30570 - DNA, 201 bp, Homo sapiens
cccaggaaaagagttaaggaaaactaaaccaaaagaaattttgtggagaaaagtcagaacctcaaaattagtgaaaagtttctgcttcagaaatattttarctacatgaagaaaataacacatgtagaactaatttgtctgtcttaagcttcctgctgcatttataaacaagtaaatgatacatttaattaagttgaacta

SEQ ID NO: 30571 - DNA, 201 bp, Homo sapiens
gaaatagtgctctctatagagagctcatctgctgtctttggtcatgtggttatgaatgagcttcttaggaaaatacctcagtagagacagatgaaaaaagrtagacattaattgcctacctttttaaccaggtgtctgattgcctggtttcctatgggatgctaaataacatcactatttaaacaaaccatgcttcccaag

SEQ ID NO: 30572 - DNA, 201 bp, Homo sapiens
cactcttttgagatggatgcataggtcattaatacttagcttttcctttttctaaaataaacattttgatgatatcattttaccattaggaactgctttartttcattccacaagttttattacatagtaattttatcatttcagaaaaatactctctaataacgataattatttcttctttgacatatgggttattttga

SEQ ID NO: 30573 - DNA, 201 bp, Homo sapiens
ccacatcatcattccatggcactgagaacctacccccaacttcctggctagttaccattacagacagtggctgtgcccagaatacagatttagtaaatttrtattacccagaaatctatctctttcccattactgtaaccacaagagttactttattagataagcttaatgactctggatatgcaggcttgagggtctgag

SEQ ID NO: 30574 - DNA, 201 bp, Homo sapiens
cctgacctcaaataatccactcacctcggcctcctaaagtgctgggattacaggcgtgagccaccccaagtcttctttctaaggagaactggcatccattstctccagttagccatactaggggaaaaaaaaaaaaaaacctaacttgctactcatttagggctttttatttcataagtatcttagatgtgttagatctgt

SEQ ID NO: 30575 - DNA, 201 bp, Homo sapiens
tggaggtttgttgtatagattatttcatcacccagctattaagtctagtatcctatagttattttttctgatcctctccctccaaccaccctccactctcygataggccccagcatgtgttgttcccctctgtgtatccatgtgttctcatcatatagtttccacttataacacgtagtatttggttttctgttcctgcat

SEQ ID NO: 30576 - DNA, 201 bp, Homo sapiens
ataggccccagcatgtgttgttcccctctgtgtatccatgtgttctcatcatatagtttccacttataacacgtagtatttggttttctgttcctgcattrctttgctaaggataatggcctccagcttcacccatgtccctgcaaaggacatgaattcattcctttttatggctgtatagtagtccatggtatataagta

SEQ ID NO: 30577 - DNA, 201 bp, Homo sapiens
tatagatagatagatagatagatatacacattttttttttaagatagagtctcgctctgtcacccaggcacgatctcagctcactgcaacctccgcctccygggtcaagcaattctcctacctcagcctcctgagtagctgggattacagacatgtgccaccatgcctggctaatttttgcacttttagtagagacagagt

SEQ ID NO: 30578 - DNA, 201 bp, Homo sapiens
ctgcctaagtggagagttggtcttaagtaggagcacagacaaatcatcaaatagtcacaggaggcaaagcatagactatgatcacagacgcagccagtgakcagtgagcagatgctgtgctggatgcttgggaagttctcttctggctcctcttgttttcagtaaaatgtgaagcaaactcatcagctaagagaaagaatc

SEQ ID NO: 30579 - DNA, 201 bp, Homo sapiens
atgcttatagggaggcttccaacattttttgctctcttaatcccctaaaacaatttttagctatataatcccctcgcatgcttttccattgacatctagtkttttgtcaagtttaaattaataaataggatgtaatttttggtcaatatttaccatcaaattcttttaacagatacgtgagcaaattcttcttaacagtag

SEQ ID NO: 30580 - DNA, 201 bp, Homo sapiens
tagtagagacgagctttctccatgttgaggctggtcttgaactcctgacctcaggtgatccgcccacctcagcctcccaaagtgctgggattacaggcatyagccaccacgcctggccctcgccacatctttctatcttcatcctctattactctcaaccttgctctggccacagtgacatcctccctgctccttcagtgc

SEQ ID NO: 30581 - DNA, 201 bp, Homo sapiens
ggggctgctgatttggggaaaagcagtcagagcttcctcagaggcctatttaaggattcccagcagaaggggccattgtccgaggctctggttgcatgackgtttggagtctgatggccctttttgccagcatgttgggcttctgggttcctttcccctgagcccaatcctaagacaaccagtttaaggcttgggaaatta

SEQ ID NO: 30582 - DNA, 201 bp, Homo sapiens
gtggggagggcttccaggctataggtaaatttaaacattttctggttgacaattggttcagtttgtctaaagacctgggatcaatagaaaggaaatgttcmggttaagataaaaggttgtgtagaccaaggttcttttgaagtttcatagtggctgcccttagagacaatagatgacaagtgttccctattcagaccttta

SEQ ID NO: 30583 - DNA, 201 bp, Homo sapiens
tttgccaaccgcggtggctcatgcctgtaatcctagcactttgggaggctgaggcgggtggatcaggaattcgataccagcctggccaacatggcaaaatyccgtctctactaaaaatacaaaaattagctgggtgtggtggtgggcgcctgtaatcccagctactcgggaggctgaggcaggagaaccgcttgaacccgg

SEQ ID NO: 30584 - DNA, 201 bp, Homo sapiens
actttgatcatactattaaaaattacattattgcatgtcaaatccatattacaattacttcatttgtcccaaaattttcttctccagagaaggcaattacraattttaaggccaccaggaaaccaggaagtgacatgaatgggctcttttccaaatgcatactcacactttcctcatataagggctgattataaactgaaa

SEQ ID NO: 30585 - DNA, 201 bp, Homo sapiens
ttcaagcaacttcagacattatgctctagaaagaagattctttcagggcccttatggaaggttttgagtagttctgtgtcctgtggtaggagaaagaacakcagggaaaggagcagaactaggaagatgcacacaacaaaaatagtacctcttatttgactgctcaacctcagtccccgcagccatatgacagggactgcc

SEQ ID NO: 30586 - DNA, 201 bp, Homo sapiens
catttgatgagtctttggtacccacttcttaccaaggatagttctaggagaatccaaaggtttcagttcagtccaagtcaactgcggagaacgaaggcagrgaaaagaacccacagacagttctgttaccctggcacaatcaaaacatattctctcatgtagtcaattggtcaggtctcagcgagaaacagatggcacatt

SEQ ID NO: 30587 - DNA, 201 bp, Homo sapiens
tctccagagaaggcaattacgaattttaaggccaccaggaaaccaggaagtgacatgaatgggctcttttccaaatgcatactcacactttcctcatatargggctgattataaactgaaagcaattagtgattatgtttttcaaaatgaagacagaaagtaacaaggtatgattgggactgagctctttagtttttatat

SEQ ID NO: 30588 - DNA, 201 bp, Homo sapiens
cctctttgacattggaaaaaacttcagcaattcccaggagcacctggatcttctccagcaggtgagcctaaacaccacatggttatttggaacactgcacraacagttcccaggctccagcccctaggccttttgaattggtttccacaacgtaagggttaattgaagaagtgcttggaggtatctgattaggccaataga

SEQ ID NO: 30589 - DNA, 201 bp, Homo sapiens
tcttcttctggctactaatggggcttctggcatctcccacccacatacctcactttgggcttcagatggacctgagttcatctactttgggttggaccatwtcatttgtggccttgcctttggacagaactccaacctggaaagtgaccacaatagctatatactctacatttggcagctggacttagaaacaatggactg

SEQ ID NO: 30590 - DNA, 201 bp, Homo sapiens
cacctagccattacccttggccttcccatcatcatgagccacagaaaattagatcaaatataatggtcaactgctactatattatactaacacagacacartgctttgggacctacttgcttatagtaacaaacctttcagtgagttttagaagatattactaccactgttgcaggacttttccttagttcagctaaaatt

SEQ ID NO: 30591 - DNA, 201 bp, Homo sapiens
aaaacagggtctacagtggacctcccgcaaactccagcagacctgcagcagaggggcctgactgttaaaaggaaaactaacaaacagaaatgaatagcatyaacaacaacaaaaaggacgtccacacaaaaaccccatctgaatgtcaccaacatcgaagaccaaaggtagataaatccacaaagatgaggaaaaaccagt

SEQ ID NO: 30592 - DNA, 201 bp, Homo sapiens
ggatatttgcgtgtaagccatcatggtgactgacgggtgagctgattaaaatgtccctagtacaaccaaccagtgcaaccagcagatcgtgctgtctctcrggaccctggatccggagtgaagataattacttcagattcctagaaaacaaggactcaaattccaatttacacagctcttggctctattgctggtgtggac

SEQ ID NO: 30593 - DNA, 201 bp, Homo sapiens
tgaaatgctggtgaaagagcaaaatgaagacatctatcattgtgcttcttgccaactcttatcacccgcaggagcagagatcacatcataagaacacagawtcaaatgcatttcccatgacacaaaaaaagtcaaatcaaatcctttcaatttatcatcccagatctgtttgtggatattttagtcaactcagacttccat

SEQ ID NO: 30594 - DNA, 201 bp, Homo sapiens
aaaagacataatagagtctgttaaatactggaatcaggatgtcagcagaaagaaatcttatgaagtaatgaggagagagcaattaattctacagaggtgamgggatatcatagcaggcatatacagacagtgatattgagctgggtcttggtgtatgatggtggtgggcccaggaagagaaagggggtgagggactattcc

SEQ ID NO: 30595 - DNA, 201 bp, Homo sapiens
aaatgtggctcaacgagcttgttttccctggaaaaggcataatttgtaagaccttcgacatctctgaaaaagtggtatatgtcactcatcacaataatgayaataatagttactattaactaatgtcaataatagttactattgacacaaattttaatcttaataaatatgcaaggtagatattatttccccccactgtac

SEQ ID NO: 30596 - DNA, 201 bp, Homo sapiens
gccaatcctttactattggtgtatgctctcatttcatgaaattacacaaaaggtattttgcttcattgtggcttcattaacagagaacatacctgagatasctgcctaatggtaggcacattaactgtacagcccctatactttgttcatctgtgctagtctcaagtcagtgtcattcaaaggtcccagacagactttctt

SEQ ID NO: 30597 - DNA, 201 bp, Homo sapiens
tggactgtctctgtggagagactgtcaaatatgctgtgtagaagagctatcctcatggcttaagaatagaaagctaagtcattttgccagcaagcaattayagtaagcccagtgaatgccccaaaccatattatgtatttattaaatgtggtacaggatcatggtgaaatctctctatagtaccaacagtaaaaataaatg

SEQ ID NO: 30598 - DNA, 201 bp, Homo sapiens
caaggttgagaggcgggacgggaaggggggtgtagcggagggcacgatcttgagttggagaaaaaggagtgagaccttctgaggtctggcagagagggaargcctattttcaggcctgacaaacatgagtgcacttgggaccagaaacaagaggcttgaaaaagaggcagtcttggaccaacagggacctatgatctccat

SEQ ID NO: 30599 - DNA, 201 bp, Homo sapiens
aaattagctgggcatggtgaagggcacctgtaggcccagctactcaagaggctgaggcaggagaatcgcttgaacctgggaggcggaggttacagtgagtygagatggcgccactgcactccagcctagggaataagagcgagactccatctcaaaaaaaaaaggaagaaacaaatattggtatggcctacccatgaataa

SEQ ID NO: 30600 - DNA, 201 bp, Homo sapiens
aacaaaaccatatatatatatatatatatatatatatatatatatatgctctccaagtgttagaatgaatgaatcaatcaatcaatcatgaagctctttcrccactgaagtataattccacattgacaacaagagtgaaggttttgttctcagttatgtccgggatgaataggtcaaatagatatcaaaatgatcaaaatc

SEQ ID NO: 30601 - DNA, 201 bp, Homo sapiens
tgtcactgtggcctgtcatccttggactcaagtgatcctaagttcctgatctctcacctcgtctctagtgaggatggggcagaggcatagacaaaagattytaatcccagctcaagctgtagcatcatcacaggggggttctctgtggttggttttgtgttacagaaacagagtagtcaaggtatctaatatttgtgttat

SEQ ID NO: 30602 - DNA, 201 bp, Homo sapiens
ccttcacctgccgtattagcaaagagggccaatatattagcaaagtggtccaatagctcccccttggggctctgcccttccctggaacttctcacacattscacgaagggatggccgtgagaccagtcagaggactgtatagcattatctgtacgcattttcccctaaatttcttggaagaatggctttactgttgcctgt

SEQ ID NO: 30603 - DNA, 201 bp, Homo sapiens
gtaaggcagggttttattgggtggaaaggaagaaaagggggaagcagggacactcacctaactagactgcttgccacccacagcttgaatcccaggttccrcaccaaacgaggatgggccaggctcctcctcgctgcaaatgtcatgaacttccagaggctctaccccagtggacaggctggatggagtttttccagggac

SEQ ID NO: 30604 - DNA, 201 bp, Homo sapiens
gttcgctgcaccagacgacagaaataggactgatgtgaaagttatcagaaagtaattttcaacccaaaggaaggaatttgttaagtggagatactcaaaartggaacatggtacatcctagaggaaagaaacaaccatttgtagaacatttgtcttgggtcttctccagcaggagatatttaaaactgggtgaccttataa

SEQ ID NO: 30605 - DNA, 201 bp, Homo sapiens
tggtgcgtatattaatttgtttttaattttaaatgcaataaataaggcaaaaattaataaaatccattaaatatttttaaaagactccaaaaatatttgaragaaaaccagttctaaggaaatagacaagatagattgactctagcctatgaagtaggtgtctggaggccaagggaaagccagggctgaaagtatacattt

SEQ ID NO: 30606 - DNA, 201 bp, Homo sapiens
ttgagagccttccctagtaaaatgggattataaatctctataagccccatgtttggagtctcaagaggccatagtaagaggtcccaactgttcatcggtawttttttttttaatggtagaatggataaaaggaaagagatggagtagaagaggaagaattgagatctgactacactgttaacactctctgccactctctct

SEQ ID NO: 30607 - DNA, 201 bp, Homo sapiens
acccagatcagtttagacctgatcaaaacactttgcggacagtaattatgttaacaatcatttagattaacatatctttttaaataaaagttcaaactaawttgcgttcatttatggttggaaacctaaggcagagagtgccaagtaatatttctgaaatcatttgaggtgagagggttagaaccaaagttgggatgtgac

SEQ ID NO: 30608 - DNA, 201 bp, Homo sapiens
tatcctacctctttttgagttatagtaagttacacgtttctacaaatttatgcatttcatatcaaacttcaaatttatggataaaacattattcattatawcgtcttgttaacttttttatgtttatagaacattttgtagaaagtctgtagaaagcataatgttcttctttctcaattctgatattagttaattttgtct

SEQ ID NO: 30609 - DNA, 201 bp, Homo sapiens
agccagcctgcttggtccaaatctatagaataaaactgagcaccctaaaaatccaccctaataactattcttatcacataaacatgcaagatgcacccttygcaactgtccttcaatatatcattcagattaatgaccttttttctatgcctctggtttcctaatgatttgttgtactactccttaaggattggttattcc

SEQ ID NO: 30610 - DNA, 201 bp, Homo sapiens
cctgagagcccaagtccaagagtccaaaagctgaagaacttggagtctgatgtttaagggcagaaagcacccagcacaggagacagatgaaggctagaagmctcagcaagtcagcttctcccaccttcttctgcctgctttatcctagccacgctggcagtttttggatggtgcccacccagattgagtgtgggtctgcct

SEQ ID NO: 30611 - DNA, 201 bp, Homo sapiens
ctaacaatactaattgcgaataactgtctgcaggccaggacttccaattacagactgccatgcctggcctccagggtatgtgctccctggggttcttcctrcatcatcaaatgacttaggatatgacctttgacagagaagctgatgttctgtgatcagatttcaggcattggccggcaactgtgggaagactggggtggg

SEQ ID NO: 30612 - DNA, 201 bp, Homo sapiens
ctgatctccctgacagatttccttgcttctaacctcttctcctcaacttgcacaactgctgttagatttatgtctgaaatattccttttattacattgagycttgttcaatggctttcaaaagattcctacatcttcctcttgccattctgaatatccactcccaaccttttccagcccacctccgtgtctgtgtgcagga

SEQ ID NO: 30613 - DNA, 201 bp, Homo sapiens
cctttaaccctaggccaaagtttacatttccatgccttcttataaccttttactataaaaacacattttactattcttacaccccttacatgtaaatctartttcagtagtttcaattacatggtataatgttaactcctaacaatttttaactttaaggtaaaacctggtaagttactttaattgtgtgctgactgcagc

SEQ ID NO: 30614 - DNA, 201 bp, Homo sapiens
ctccctcacctcccttatatcatgtaagtccattctctggctttgccccatatgccactagtgcacgttgatttccccaggggtcccatgtagattctctrcacatctttagatgggaaaccgttccatcacaggtgaattccaggggcactgtaggccacagattcaagcaaactctttatgttccaggacaccacagag

SEQ ID NO: 30615 - DNA, 201 bp, Homo sapiens
ttttttttttttttgaggcagagtttcactcttgttgcccaggctggagtgcaatggtgcaatcttggctcaccacaacttctgcctcctgggttcaagcrattctcctgcctcagcctcccgagtagctgggattacaggtgtgcaccaccaggcccggctaattttgtatttttagtagaaacggggtttctccatatc

SEQ ID NO: 30616 - DNA, 201 bp, Homo sapiens
ccaaaccacagcccctccccctggcccctggtaatcaccagtttactatctacttgtatgagtttgacttttgtagattccacatataagtgagatcatgyagtatttgtctttctatgcctggcttattcactgaacaggttcattcatgttgtcaaaaataacagaattttcttcttttttaagcattctgttatgtat

SEQ ID NO: 30617 - DNA, 201 bp, Homo sapiens
cccgctaattttttgtatttttagtagagatgggttttcgccatgttggccaggctagtctcgaactcctgacctcagatgatctgcccacctcggcctcmcaaagtgctgggattacaagcatgagccatcatgcccggccttgtttgttttaatgtatcagaaaaatttttctcctgtcataggtttgaggacttttcc

SEQ ID NO: 30618 - DNA, 201 bp, Homo sapiens
tctggctggcatctggaaggtgcctctctgggatggagcttccaaaggaagaaataggcagcaatctttgctgttctggtgatacccaggaaaacagggtytacagtggacctcccgcaaactccagcagacctgcagcagaggggcctgactgttaaaaggaaaactaacaaacagaaatgaatagcattaacaacaaca

SEQ ID NO: 30619 - DNA, 201 bp, Homo sapiens
tttgaattcagaaaatatagagaacaccacaaagatactcctcgagaaaagcaaccccaagacacataatcatcagattcaccaaagttgaaatgaagggraaaatgttaagggcagccagagagaaaggttgggttatgcacaaagggaagcccatcagattaacagcaggtctctgcagaaagctacaagccagaagag

SEQ ID NO: 30620 - DNA, 201 bp, Homo sapiens
aactggtaacagccgctgcaaaaacataccaaattgtaaagaccatagacactacgaagaaactccatcaacaaacgggcaaaataaccagctaacatcawaatgacaggatcaaattcacacataccaatattaaccttaaatgtaaacaggctaaatgccccaattaaaagacacagactgacaaattggataaagatt

SEQ ID NO: 30621 - DNA, 201 bp, Homo sapiens
ttttcctgtatcaaaaagcaatgaacaagcacacctcttgttgcacaatctgagagctttaattttaagtttaatcagaacaaaacttttgctgtgtttargagttttttttaatgtagcccacagccaagctaatttacattctgctagaagtcaaaagcactttctcagtgctctgcaacaacctcggggcttcctacc

SEQ ID NO: 30622 - DNA, 201 bp, Homo sapiens
tagcatcatcctgatatcaaaacctggcagagacacaacaaaaaaaaatttcaggccaatatccctgatgaacattgatgcaaaaatcctcaataaaatcyggacaaactgaatccagcagcacatcaaaaagctcatccaccacgatcaagtcagctccatccctgggatgcaaggctggttcaacatacgcaaatcaat

SEQ ID NO: 30623 - DNA, 201 bp, Homo sapiens
agcaggcaaggaatagaggggggcacagggaatagtcactgactctgtgggctccttcatgcacagctggggattctggtttagatatttcaccaaaggcraaggctgggttcacccatgtaatcaggaagtgggcactggactgatgatcaggacattgaccatcttctacatgcttaatccaaaacagcattcatccac

SEQ ID NO: 30624 - DNA, 201 bp, Homo sapiens
aaaagggggaagcagggacactcacctaactagactgcttgccacccacagcttgaatcccaggttccgcaccaaacgaggatgggccaggctcctcctcrctgcaaatgtcatgaacttccagaggctctaccccagtggacaggctggatggagtttttccagggaccccctccccacttggctgtctcattccccact

SEQ ID NO: 30625 - DNA, 201 bp, Homo sapiens
cgagaggatttgagtccccatttcactcaccacttctcgagccccacgttgggcgccaaaaaatgttgcaggacttatccttagttcagctaaagacaagktccttgtctgtcccacagccatgacaatttaggcttgcagatggtttgaagggtgagtaaagcagggttttattgggtgaaaaggaagaaaaggggaaaa

SEQ ID NO: 30626 - DNA, 201 bp, Homo sapiens
aatcaaacacctcctaaatgccagtaagacactgcctcttccccggaaaactacttcagaactgaaaaggaaccaggggtctttgccagttaggatcagarggctaatttcttcagccaattgattaagctagcaggacttggaaagcattgaagaagtcatagcacaatcccctgtcttccttcctccctcagggagctg

SEQ ID NO: 30627 - DNA, 201 bp, Homo sapiens
ttgctttccagaggtagttcaaccctgagcctgcaccaactcaaatacttttgaagaaattaacatgtaaagccaggagaagcagtgaatctgaatgaaarctgttgaatgttgaatgactacacatggtaactacaagggagatactttgcaaaagccactgaatgttacactaagcacttcggtgaacttatagttcat

SEQ ID NO: 30628 - DNA, 201 bp, Homo sapiens
tcacttggaaagtcttcaaggacagccaggggacctgcactccagtttggagactgctggtctgcaaaaccctacacaatctgtgttcaccttgccacatytttctttttttttttttttttttttttttgagacggagttttgctcttgttgcccaggctggagtgcaatggcgcgatctcggctcaccgcaacctccgc

SEQ ID NO: 30629 - DNA, 201 bp, Homo sapiens
gtgcagaaatcacacagtaagagaggaagcagaggagagggtgatgccaggctctttttaacaacccagtgctggtgggagctcacagagtaagaactcayccctccctcccagggaggacattaatctactcatatcatgagggatctgcccctacgacacaaacacctcccattaggcccacacttccagcattggaga

SEQ ID NO: 30630 - DNA, 201 bp, Homo sapiens
ccatatgacagggactgcctgcagaaatctctgcataactgatgatgcatcctcaggctacatagcacccaggaaaatgaacttctgtatacatctgtctrcatcagttatgatgcctgccagtctgagtttgggctcaactgggagcagctaggctcaacgaagaacacaattagttcaagacttaaattggaatgaaat

SEQ ID NO: 30631 - DNA, 201 bp, Homo sapiens
taaccattgcatcattgtatctgacattacaaatagtgttttaattaagatatttaaacataaatctttgtcaaatcactaatttctcaaaatagattactaagtcaaacactatggattttaaggcttttaataaattttgccaaattttttttccagaaattttgttacaatttaaatatcccactggcagaaaagaca

SEQ ID NO: 30632 - DNA, 201 bp, Homo sapiens
gccagtctgagtttgggctcaactgggagcagctaggctcaacgaagaacacaattagttcaagacttaaattggaatgaaataaaagcaagtcttaatckgagaccaaaagcgacacactcaaggttgtgcctaacttgtaaacagaagagattgtcacataatatcttccccgatgtttcacacacagatattgtccat

SEQ ID NO: 30633 - DNA, 201 bp, Homo sapiens
cttggaatataccctccaccaaggataaaaagggaccactgtgtttacatttatctttcttcaaaaattagtaggttttgccaaccgcggtggctcatgcytgtaatcctagcactttgggaggctgaggcgggtggatcaggaattcgataccagcctggccaacatggcaaaatcccgtctctactaaaaatacaaaaa

SEQ ID NO: 30634 - DNA, 201 bp, Homo sapiens
tgaggcaggagaatcgctcaaacccaggaggcggaggttgcagtgagccaagatcacgtcactgcactccatcctgggcaacatagtgagactccgtcccaaaaaaaaaaaaaaaaacagctagatctttctttcacatttaagtgtgccttagagaaggttaaagatggatagggtcctagttctttctactccatgttg

SEQ ID NO: 30635 - DNA, 201 bp, Homo sapiens
cccttagagacaatagatgacaagtgttccctattcagacctttaaaatgtgctagactctcagttattctcttcaggatttggagggcctgaaagaaaaygatctagctatgttaatagagattctttacagatgcaaatttttacccacaaaggatgactttgcatggccatttcaaaatatggcaaagagacatgttt

SEQ ID NO: 30636 - DNA, 201 bp, Homo sapiens
catcatccatctgaccttaaatatgtaaaaggcaggaaaatgagattgtgtatgtgtgtgtgtgtgtgtgtgtgtgtgtgtgtgtgtgtgtagaggtgggktctcctaatgttgctcaggctgttcccaaactcctgggctcaagcaatcctcctgcctcagcctcccaaaatgtggggattatagacatgaaccaccatg

SEQ ID NO: 30637 - DNA, 201 bp, Homo sapiens
aaactattgcaaggacaaaaaaccaaacaccacatattctcactcataggtgggaattgaacagtgagaacacatggacacaggaaggggaacatcacacrccggggcctgttgtggggtgggggggagcagggagggatagcattaggagatatacctaatgttaaatgaagagttaatgggtgcagcacaccaacatgg

SEQ ID NO: 30638 - DNA, 201 bp, Homo sapiens
ctaggattatgaaacccttttttttttaatttactttaattttattttatttcccgtttttcttttttttaattttattattattatactttaagttttarggtacatgtgcacaacatgcaggtttgttacatatgtatacatgtgccatgctggtgtgctgcacccattaactcatcatttagcattaggtatatctcc

SEQ ID NO: 30639 - DNA, 201 bp, Homo sapiens
gtggtgggatggggaacaaggaacttgttactcaacttcctttaaacaaataaataaatacaggcctggcacagtggctcacgcctgtaatcccagcactytgggaagccgaggtgggtgatcacctgaggtcaggagttcgagaccatcctggccaacatggtgaaaccctgtctctactaaaaatacaaaaattaactg

SEQ ID NO: 30640 - DNA, 201 bp, Homo sapiens
aaggagaccaagattcagagagattaagcaataaactcaggatcttgcagctagaaagtagcagaaccaatatttaaaccccatcccgtacaaagagctcyggatcacccaaaagctgagctaccttcatcactgtgattcctattatgttcagggaatgaaactgcttttaatattgtcacaaaaaatatgtatataatt

SEQ ID NO: 30641 - DNA, 201 bp, Homo sapiens
atttttaaattactttcttcctatccttttgtaaaaacaatgccataaggattataaggtcctttttccccagttgtttagctctgccaaatcctggaaayggactacgtttcagataaaggaactgtctaattagaacatgactctaggtgattcttaaggggtaacacaggagctgtattccttccttcttctgggaat

SEQ ID NO: 30642 - DNA, 201 bp, Homo sapiens
ttaggcccacacttccagcattggagatcagatttttaatatgagattcagaggggaccactaaccatgcagggcacacagcagtacgagctaccattggrgggtgaggctgctgaagaggaggagatagcgaccccaaagcacgtggtagtcaggtgcacaaacacagattcacaaacaccaccctcactcacacctcct

SEQ ID NO: 30643 - DNA, 201 bp, Homo sapiens
ataagcagaaggtggaaaaattgaagagaaaataattcataggaacttgaagacatagaagtgtatattgtatgtgggaaggaacaggggtcagtttagtrtcagtaaaggacaagatattggccaaggggataatgatggcagaaagtgaatggtaaggtacctgggggtggggtgcagattctggagggtcttaaatgc

SEQ ID NO: 30644 - DNA, 201 bp, Homo sapiens
cacctcagcattaatccaactctattcaccatttttttcaaagtgataatgcattttacaactaatcacagcttataaaaatatcctactctcatattttytaagattgactcatctgtagagaaaggatttgttgattttgtttatgtattcaggtggtcctcaacattttaaatgtttgctaaaattgccaaagtaaat

SEQ ID NO: 30645 - DNA, 201 bp, Homo sapiens
tgggctcaactgggagcagctaggctcaacgaagaacacaattagttcaagacttaaattggaatgaaataaaagcaagtcttaatctgagaccaaaagcracacactcaaggttgtgcctaacttgtaaacagaagagattgtcacataatatcttccccgatgtttcacacacagatattgtccatgaaagtcaccaac

SEQ ID NO: 30646 - DNA, 201 bp, Homo sapiens
aatttggagagtttttttaaaagaaaaaataatcattttccattttcagctgttcccctaactcatcaaaagtgttcaggtttttcagttaggcaagaacwgacccagcagaaccaaagagtattttacaaatttctttctctctgcagatgcaaaagatatttaagaaacttccaggattcaaaaaaatccatgtgttag

SEQ ID NO: 30647 - DNA, 201 bp, Homo sapiens
agtagctgtagcttggtgtttgctataccagagggcagaaataggactgatatatggaagttatcagaaagtaattttcaacttaaagtaaaggtggttatttttttttttctgaaatcactttgcccttctctttgtaactttgaattttattcagaaacagttgttgatggcagccaattcatcatcaagtaggttaca

SEQ ID NO: 30648 - DNA, 201 bp, Homo sapiens
ttaaattactttcttcctatccttttgtaaaaacaatgccataaggattataaggtcctttttccccagttgtttagctctgccaaatcctggaaacggastacgtttcagataaaggaactgtctaattagaacatgactctaggtgattcttaaggggtaacacaggagctgtattccttccttcttctgggaatcaga

SEQ ID NO: 30649 - DNA, 201 bp, Homo sapiens
tcccagctcaagctgtagcatcatcacaggggggttctctgtggttggttttgtgttacagaaacagagtagtcaaggtatctaatatttgtgttataccaaaaaaaaaaaaaaaaaaaagatggaggttgtttgttcagccaagagaacctaaagtaggaaaaatatgaggaagtgtttatggaagtagttgtagcttgg

SEQ ID NO: 30650 - DNA, 201 bp, Homo sapiens
aattgtgtgctgactgcagccgaggtttgcctttttagttaagggtgtaattaatttcatatgtccccaggccttacctattgtgaagccaacaagacagrcagttctcaaaacccaaaaagcagtttataacctcaaaacacttagcaaaccttgcatctgacctgcatagtttagttcacctatttacattttaatgac

SEQ ID NO: 30651 - DNA, 201 bp, Homo sapiens
acactgcacgaacagttcccaggctccagcccctaggccttttgaattggtttccacaacgtaagggttaattgaagaagtgcttggaggtatctgattargccaatagaaattttattcttgcaaaataatatggtacagtcaggttgaagtgtaggttaagggagaagggaatgaaaattgactttaactcttcggttg

SEQ ID NO: 30652 - DNA, 201 bp, Homo sapiens
tgttggattaagaataaagacaaagaccaatcttaactgcttcctgctgacaggggctgctgatttggggaaaagcagtcagagcttcctcagaggcctatttaaggattcccagcagaaggggccattgtccgaggctctggttgcatgacggtttggagtctgatggccctttttgccagcatgttgggcttctgggtt

SEQ ID NO: 30653 - DNA, 201 bp, Homo sapiens
tctttgacagacgttacacacagtacacacacagagaggcagaagaaaacctagtcactgaatggggctatttaagagacagatttagaaaaacatgcagrtattgaaccagaaagggctcattccataaggcaaagtcttgccactggagttacaagccatgccctcaggatgtataacaaaatggaggcttgatttaac

SEQ ID NO: 30654 - DNA, 201 bp, Homo sapiens
ccatttcttacagctgatcaagcagatccctgcaagttcctggcctgcggcgaatttgcccaatgtgtaaagaacgaacggactgaggaagcggagtgtcrctgcaaaccaggatatgacagccaggggagcctggacggtctggaaccaggcctctgtggccctggcacaaaggaatgcgaggtcctccagggaaaggga

SEQ ID NO: 30655 - DNA, 201 bp, Homo sapiens
ttgttttcaaaaaagaaagaaaagaaattatcttttactttaaacctttccaagaagacaaaacaaaattttctcacctgactaacccgtaagtctgccartttcaaatgactttgaaataaaagccagtggaagaactgagtagctcagcttcccaaattacagatcctcggtgatggtatagattgccagtttagtggc

SEQ ID NO: 30656 - DNA, 201 bp, Homo sapiens
ttgcatttttcctcaatgagaatatattcaaatattacttctgtagtttaaaaataggtcaatctagttttaaagtatgcttttcctataacttttaggtytactcagtataagaaatttaaatgtatgttctctactgtcatcaagttctctttcaccacctcttccttcttttctattgtactaatagaaaagatgaaa

SEQ ID NO: 30657 - DNA, 201 bp, Homo sapiens
catagtagattcaagtcaacaacaaaatagtttgcctaaatttaaatgaaaattttgaaatatgggtatagcccttctcatatacatacaaacatcctttytcaacatctgtcttgcaaaattcattcttcaggatgctactttgagtccagaacttcctcctgttgaaccccagcttgagacagtggacggagcagagca

SEQ ID NO: 30658 - DNA, 201 bp, Homo sapiens
gtcattttaaatgcccatgaccaaactctaagtttagtagtaagtagcttatttagcagtgtgttatgtatctaaaggcaggacattgcttaatgggtgtracttgacacaatgggaaaatctcttcaaaaccacccccctcaaaaatatcactccctccaccccactatcaaaacactgaaatttcacctccagatttgc

SEQ ID NO: 30659 - DNA, 201 bp, Homo sapiens
gcctgtcaagtacaataattgaggggcaagggagttgccatcctcaagagccaggtaataatgatagtcttcctcattgatctccacatatttaattggtyccattgattatttacttatggaaagattgaaagtgtctgggaatgcagattgtactaaaatatactttatatataaaccatctcttttctggtcttttgg

SEQ ID NO: 30660 - DNA, 201 bp, Homo sapiens
ttgattctatgtctttgttataacacaacccaatttttaaatgggcaaaggacccaagtagttaattttccaaataagacataaaaatggccaacagctawgaaaaggtgctctaatcatcacgggaatgtgaatcaaaaccacaatgagctattacctcacacttgttaggatggcaattatcaaagacaacagataagt

SEQ ID NO: 30661 - DNA, 201 bp, Homo sapiens
aacacattaacggaaaatgtgcagatgattttcaatcattttcttcctcttttttaaatctagcaatatgacagctattttgctcctagtttttcagtgcrattggctgatccaaattttctccttttggtgggatatttgcgtgtaagccatcatggtgactgacgggtgagctgattaaaatgtccctagtacaaccaa

SEQ ID NO: 30662 - DNA, 201 bp, Homo sapiens
aaatgtccctagtacaaccaaccagtgcaaccagcagatcgtgctgtctctcaggaccctggatccggagtgaagataattacttcagattcctagaaaasaaggactcaaattccaatttacacagctcttggctctattgctggtgtggacttttcagttacagaaggcttgggctgatacacaacagtgcccatcctc

SEQ ID NO: 30663 - DNA, 201 bp, Homo sapiens
tgcagacatttctgggagtgccaggtttcttcagttactccacagtgatgacagctttatttacagaacagggagtgaagggagcgaagatagctcagatyggaaggaagggaaagccaggctgagccggttcacttaaagccaggctgtctaaaaatgcccgtcaaatctatttgcttccacttttggtgtcttgttttt

SEQ ID NO: 30664 - DNA, 201 bp, Homo sapiens
tcttacctctttttagtcagtggttagtgagcacatcctaggagatgctagcctttgctagttctcaggtctttgacagggtcagttttttgcttccatcmttttttgttagctcacatccatacaaaggaaaagactggtaagtatctaatatggtttatatggttttgctgtatccccacccaaatctcatattgaatt

SEQ ID NO: 30665 - DNA, 201 bp, Homo sapiens
ccttctggaattgttatgcacttctgctcaaagtgacgggtcacatcatccatctgaccttaaatatgtaaaaggcaggaaaatgagattgtgtatgtgtrtgtgtgtgtgtgtgtgtgtgtgtgtgtgtgtgtagaggtggggtctcctaatgttgctcaggctgttcccaaactcctgggctcaagcaatcctcctgcc

SEQ ID NO: 30666 - DNA, 201 bp, Homo sapiens
ggattataaatcatgctgctataaagacacatgcacacatatgtttatcgtggcactattcacaatagcaaagacttgcaaccaatccaaatgtccatcartgatagactggattaagaaaatgtggcacgtatacaccatggaatactatgcagccataaaaaaggatgagtttggccaggtgcggtggctcacgcctgt

SEQ ID NO: 30667 - DNA, 201 bp, Homo sapiens
ttagcactgataggtctttagtccacctcgagttctttatgaaatgaaatgaggtttaaataaataaaatgtatgcttgttttttgggggtttttttttgttttttttttttttgaggcagagtttcactcttgttgcccaggctggagtgcaatggtgcaatcttggctcaccacaacttctgcctcctgggttcaagcg

SEQ ID NO: 30668 - DNA, 201 bp, Homo sapiens
attgtctgttttgttacaaaaccaccaccctcaccaccacccctatcaacaaatgtcaatatccaaattcacagaagcgatcagtggagttttagtttacygtcactttctgtatattgtgtgttagatagtcacaccttctggtgaagtgtcatatccacacattgaatacaccaggctctataagcacatcacaaatac

SEQ ID NO: 30669 - DNA, 201 bp, Homo sapiens
aaaggtcatgtttaataaactaattaatgaggaaccaagtaagatattacaaccagttcaaaggagaattcaaacacacaatcagcaaaaagaaatgaggraataaatatacaagtagatacaaagctggtcagtatccacaaggaaataatcaattacattccacctgatgaaaatcctttgcatttctatgaacaagaa

SEQ ID NO: 30670 - DNA, 201 bp, Homo sapiens
gaaagtgagagaagagtttctggaagaatgttcttgaaaggtgaaaaaggatgggacctgctgcctaagtggagagttggtcttaagtaggagcacagacmaatcatcaaatagtcacaggaggcaaagcatagactatgatcacagacgcagccagtgagcagtgagcagatgctgtgctggatgcttgggaagttctct

SEQ ID NO: 30671 - DNA, 201 bp, Homo sapiens
gaaggtgaggcacatagggatagaaggggaaggatcgcacagtaggatgagtaaagctttgcgattgatgaatatgctcactatcttgattgtggtaatgrtttgacaggtgtatggcatcaaaattcttggatcgtataccataaatatgtcccatttgtttatcacaatgatacctcaacaaaacaattatttaaaaat

SEQ ID NO: 30672 - DNA, 201 bp, Homo sapiens
aaccttttcaatagtattggaataaataattcagatgctatccagaattgaactttgatcatactattaaaaattacattattgcatgtcaaatccatatyacaattacttcatttgtcccaaaattttcttctccagagaaggcaattacgaattttaaggccaccaggaaaccaggaagtgacatgaatgggctctttt

SEQ ID NO: 30673 - DNA, 201 bp, Homo sapiens
ggattacattgctgaaaagattaaatgagaatgcatgtaaattgtttagtacagaccactcacccagtaaacaggtggtggtttttcttgcaagctgtccyatggtgaattggatcaatccctcaaagcttactgatagcaacaattcaaaacataatctgtcaagaaaacaccagttccacggttttgcctcagataaat

SEQ ID NO: 30674 - DNA, 201 bp, Homo sapiens
acaactagtgacagctccaggccctgtgtaccattggttctatgaaaacattttgaatagttgagtgacattatatgatttgtgctgctactacctttttmtttcataagtaatgaacatatttaagttaaattcagaaagtaagcaccatgtgtattacagctgttcctcatctgtacttagaagttctgaatattcaaa

SEQ ID NO: 30675 - DNA, 201 bp, Homo sapiens
ggaaggagtgcttgagacagggagtttaaggctgcagtgagccgtgatcatgccactgcactccagcctgggtgacaaagtaagaacctgtctcaaaaaacaaaatggcaaagaaatcttttaaaaattggtacaattgcagaagtcttggtgaaagatgcattcaatgtacctgtctcttgagatgaatccagtttttaa

SEQ ID NO: 30676 - DNA, 201 bp, Homo sapiens
tttgcacaaataatttttacatataatgtcttggataagcccattactttttgatggtttcttatttaaatggaagtaattgaacaattgtccagtagttaaaaaaaaaaaaattctcttatcaaagtcactatgtgggatacaggtaaatatttccttggtcagctgaacaggattttatcatactcaaggtatagttag

SEQ ID NO: 30677 - DNA, 201 bp, Homo sapiens
aggaacggtgcattccagccagatactacgcttttcccatggtcttcacaacccacagaccaggagatttcctcaggtgcctacaccaccagggccctggstttcaagcacaaaactgggcagccgtttgagcagacactgagctagctgcaagagtttgtttttcataccaaagtgttgcctggaacgccagcgagaggg

SEQ ID NO: 30678 - DNA, 201 bp, Homo sapiens
tttattatgtcatataaatgttctacattgccatctaattttgacaagcatcattttattggctgcataatgtttctttcagtaaatgtgtcaagatttgmtttatctaaatattcaacaaaagaaaactaattgttactaattattttgttatggcaaataacattgcaataaagagctttgcacataagcctcagtatt

SEQ ID NO: 30679 - DNA, 201 bp, Homo sapiens
agaagagctacatagttaattcccccatataaacagctcaaatttgacctgtgacacctaatatcaagtcttattcaaaaaggtattatttagaggaggarcatataaacatgtaaaaagacgttttgtactgacttcattttaatatgggaaaacaaaattaataagagaattgaaatttgtatttctactttaaacttg

SEQ ID NO: 30680 - DNA, 201 bp, Homo sapiens
ttcagtatatattcactataaaatttctaagacaactcatctctcatctcttttctcacaacccctctgtcccatcttcttcaaaagctaatataagttcytctctctggttaaatatccccagaatatttcatttcacagtcatttaaatgttccatgaaacttccaatttgcctaacaaaatggaatacttctaaagaa

SEQ ID NO: 30681 - DNA, 201 bp, Homo sapiens
tcctctctgggcagggcatcactgaaagaaaggcagcagccccagtcagaggcttatagatcaaactcatatctccctgggacagagcacctgggggaagsgggggctgtggatgcagcttcagcagacttaaacgtttctgcctgccggctctgaagagagcagcagatctcccagtacagcacttgagctctgataagg

SEQ ID NO: 30682 - DNA, 201 bp, Homo sapiens
gaagaccaaaggtagataaatccacaaagatgaggaaaaaccagtgcaaaaaaggctgaaaattccaaaaatcagaatgcctattctcttccaaaggatcrcaacttgtcatcaccaagaaaacaaaactggacggagaatgagtttgacaaattgacataagaaggcttcagaaggtggataataacaaactcctccaag

SEQ ID NO: 30683 - DNA, 201 bp, Homo sapiens
caagatgcctacaacagtaagaagttcctagagttgatctagctcttcatgtgcctgtttttgttctttagcaaaacaggaaaagagaatggataaaccaycctttaaataatattagtgctgtatttttgtgactctggttaagagtcagtgactttgttctattctttattctcacttcttcctaggtactgagggggg

SEQ ID NO: 30684 - DNA, 201 bp, Homo sapiens
ttgtcaattatgccttaataaagctggaaaataaattgttgctggacatgatgggtcatgtctcccaacactttgggaggctgtggcagaaggatcatttragcccaggagtttgagaccagcctgggtaacatcgagagacccccatttctacataaaaaaaaaatttttttaattgctgggtgtggtggtgcatgcaca

SEQ ID NO: 30685 - DNA, 201 bp, Homo sapiens
gttgaaaactctgtcaaacccaagtttgaaactgagctctgggcttgctctgtgtcctggaagcccatatgaattcagagcaatgagaaacccctgctggyttccagaccaacaggcaagaaggatgacctcttggcccttagtgatggagaccaagtccagatcctcagaaccatgcctccgttcttagccacctgcttc

SEQ ID NO: 30686 - DNA, 201 bp, Homo sapiens
acttgaagacatagaagtgtatattgtatgtgggaaggaacaggggtcagtttagtgtcagtaaaggacaagatattggccaaggggataatgatggcagraagtgaatggtaaggtacctgggggtggggtgcagattctggagggtcttaaatgccattctaaacagttggatcttgttcaatgggtccagcaatgaac

SEQ ID NO: 30687 - DNA, 201 bp, Homo sapiens
gcaactgtccttcaatatatcattcagattaatgaccttttttctatgcctctggtttcctaatgatttgttgtactactccttaaggattggttattccrcatatttcaacctggactgttttattgtcccaaccacaaaagaaaaaggaaagatacattcaaatcttgtgattttttacccatagaaattgctggatca

SEQ ID NO: 30688 - DNA, 201 bp, Homo sapiens
accatgaagtcacttcagataatttagagttcctgcttagaaaagactctccaagtctgcccatccataaaccactctgagaaaatggaaaataataacayttcaaagtttgttgttagcactgataggtctttagtccacctcgagttctttatgaaatgaaatgaggtttaaataaataaaatgtatgcttgttttttg

SEQ ID NO: 30689 - DNA, 201 bp, Homo sapiens
ttaatttgttgaaagcaaagaatcataaatcacctagactgccaaaatgtgtgttgtccctcaactcagttcactccctttctcaaactcagtattgttaytgcaaattgctccttggtgtgataacctagaggcaccgtgccacaataagaatagggatggatgaatggggaaaggattgtgatcaaaagggaagtacta

SEQ ID NO: 30690 - DNA, 201 bp, Homo sapiens
catacatgcgttaaaatctgccccatttcttacagctgatcaagcagatccctgcaagttcctggcctgcggcgaatttgcccaatgtgtaaagaacgaayggactgaggaagcggagtgtcgctgcaaaccaggatatgacagccaggggagcctggacggtctggaaccaggcctctgtggccctggcacaaaggaatg

SEQ ID NO: 30691 - DNA, 201 bp, Homo sapiens
taatttactgttttaagggggtgacattttctagtgcaaggatagagtcagaaggctgggattaaccaaaatgtgtagataaaacaacagaataacaaaawcaatccaagtattttataatatttccaatcttttcttataaaaatatacaggtaatttatcaaatgtattttaaggttgaaatctttacagtaataattt

SEQ ID NO: 30692 - DNA, 201 bp, Homo sapiens
acactccttagcaaatgcaaaagaacagaaatcataacaaacagcctctcagaccacaatgcaatcaacttagaactcaggattaagaaactcactcaacrgctgggcacagtggctcatgcctgtaatcccagcactttgggaagccgaggcgagtggatcacgaggtcaggagttcaagaccagtcaggccaagatggt

SEQ ID NO: 30693 - DNA, 201 bp, Homo sapiens
tatgtgggatacaggtaaatatttccttggtcagctgaacaggattttatcatactcaaggtatagttagaaaaacataaaaacactatctgtgctgcaarcataatttatttcttaaatgccatttgtaatgggcagttgtctatctgaaagcacacacatacatggaatcaacctaagtctggaataaagcagagaaac

SEQ ID NO: 30694 - DNA, 201 bp, Homo sapiens
acggctgggcacagtggctcatgcctgtaatcccagcactttgggaagccgaggcgagtggatcacgaggtcaggagttcaagaccagtcaggccaagatrgtgaaaccccatctctactaaaaatacaaaaatttgccaggcatggtgtccagctcctgtaatctcagctactcaggaggctgaggcaggagaattgctt

SEQ ID NO: 30695 - DNA, 201 bp, Homo sapiens
aggaaccattgatatagtccatattattcaaccttctggggcagaaagtagcagggaggggaggggagagtggatctagagaagtcaacaagatcatcagkcacacttaggatcctcagagggcagtcctcagtaggttcagtaaatggcaaagtagatggacactggaaatgccattttagtacaacatggcatgaaact

SEQ ID NO: 30696 - DNA, 201 bp, Homo sapiens
actataaacacctctacgcaagtaaagtagaaaatctagacaaaatggataaattcctggacacatacaccctcccaagactaaaccaggaagaagttgawtccttgaatagaccaataacaagttctgaaattgaggcagtaattaataacctaccaacaagaaaagcccaggactggatggattcacaaccaaattcta

SEQ ID NO: 30697 - DNA, 201 bp, Homo sapiens
taataaaacaaacaaattttcatgaactgaaaagaataattaaagcagaacatattatttgactttcagaaatatatataaacatgatcatactttataawtttgtttttatgacttaaagatttacctatgtatttatttatgggggtttgataaatacaaattaatgtctttaaaagtaaataataaattcagtaataa

SEQ ID NO: 30698 - DNA, 201 bp, Homo sapiens
ctaccaacaagaaaagcccaggactggatggattcacaaccaaattctaccagaggtacaaagaggaactggtaccattccttctgaaactattccaaacmatagaaaaagagggcatcctccctaattcattttatgaggctagcatcatcctgatatcaaaacctggcagagacacaacaaaaaaaaatttcaggccaa

SEQ ID NO: 30699 - DNA, 201 bp, Homo sapiens
catccaccacgatcaagtcagctccatccctgggatgcaaggctggttcaacatacgcaaatcaataaacgtatcccatcacataaacagaaccaatgacwaaagctacatgattatcccaatagatgcagaaaatgccttcaataaaattcaacagcccttcatgctaaaaactttcaataaattaggtgttaatggaac

SEQ ID NO: 30700 - DNA, 201 bp, Homo sapiens
acaagaacagaaaaccaaacaccgcatgttctcactcataagtaggagatgaacaatgagaacacatggacacagggaggggaacatcacacactggggcytgtcatggggtgggggattaggggaggaatagcattagcagaaatacctattgtagatgactggttgatgggtgcagcaaaccaccatggcacagttata

SEQ ID NO: 30701 - DNA, 201 bp, Homo sapiens
aaattgtcagagcgtaataatgtaactgtggcaaaggttttttactgtattttattattattattattattttgagacagagtctcactctgtcacccagrctggaatgcagtggcatgatctcggctcactgctatctctgcctcccaagttcaagagattcttgggcctcagccacctgagtagctggaattacaggcg

SEQ ID NO: 30702 - DNA, 201 bp, Homo sapiens
aattgacaagctattcaattagattactcaattttggaaaagcataatttaaatttcaagtggtaaaaataccaaaacatcattattgtaaccaaaaaaatccaattgcataaaatgcagacttgcattattggaaagtgaataaaatttctgggtcaaaactgcacacctagttgtctgggagttctatacggggatgag

SEQ ID NO: 30703 - DNA, 201 bp, Homo sapiens
actactgggcctgaataaaatgggtacagggatccactctttgtctccctaggttgggacatagtgctgcctgccctttctgttccaatttctcttctttaaaaaaaaaaaaatgactattgaaatgatctacgcaaatgctatgtattttcttaagttaagcttaattttggattttctttttttcactttctattcttt

SEQ ID NO: 30704 - DNA, 201 bp, Homo sapiens
atataagttaaattattacacaaattaaaatccacatgaaacccaatttctcaagtgaacatttgctttaaagtaagactttatctgggctatctccccaccccacaccatttataatgaggtgagtagatattgggagagtctcagggaacagagtccctgtgaacctgttacagaaaaggggtcctagtccagacccca

SEQ ID NO: 30705 - DNA, 201 bp, Homo sapiens
ggtgcccacccagattgagtgtgggtctgcctttcccagcccactgactcaaatgttaatctcctttggcaacaccctcacagatacacccaggaacgatrctttgcatccttcaatccagtcaagttgacaatgttaactatcacacctgtatattattaatatcctactgtcttccatgtgtttgcacacgccattttc

SEQ ID NO: 30706 - DNA, 201 bp, Homo sapiens
accctcacagatacacccaggaacgatgctttgcatccttcaatccagtcaagttgacaatgttaactatcacacctgtatattattaatatcctactgtyttccatgtgtttgcacacgccattttcctttcctgatatacctttaaacctcatgtttaagtcttttcagaaaaatgtttcataaagtttaatttacagt

SEQ ID NO: 30707 - DNA, 201 bp, Homo sapiens
aagtttgttgttagcactgataggtctttagtccacctcgagttctttatgaaatgaaatgaggtttaaataaataaaatgtatgcttgttttttgggggkttttttttgttttttttttttttgaggcagagtttcactcttgttgcccaggctggagtgcaatggtgcaatcttggctcaccacaacttctgcctcctg

SEQ ID NO: 30708 - DNA, 201 bp, Homo sapiens
aaacacaagccccaggatactaggctgataagaatgtactgtgattataagtacaaatgccattggagatttgcaatgactggtatatttaataagattaytattgttttagttagaggtctctacattctacaagttttgagtggactatcttaactgtattttcctcataaacactgtgcaattagtatgccattttac

SEQ ID NO: 30709 - DNA, 201 bp, Homo sapiens
ccaaacaccacatattctcactcataggtgggaattgaacagtgagaacacatggacacaggaaggggaacatcacacaccggggcctgttgtggggtggsggggagcagggagggatagcattaggagatatacctaatgttaaatgaagagttaatgggtgcagcacaccaacatggcacatgtatacatatgtaacaa

SEQ ID NO: 30710 - DNA, 201 bp, Homo sapiens
tctcccagcccaaaaatgtacacttcctaactcaatcaggaaggcttggcaaagatgttatttaaattgctccactttaggatgaaagggtaaaagtaagrcttgaaagagttttaagaacaactcagccgaactgagtttaggcaacagtggtcaatatttttgcctgttctttcttaccagggagcaaggttttcctaa

SEQ ID NO: 30711 - DNA, 201 bp, Homo sapiens
tgcaactgtccttcaatatatcattcagattaatgaccttttttctatgcctctggtttcctaatgatttgttgtactactccttaaggattggttattcygcatatttcaacctggactgttttattgtcccaaccacaaaagaaaaaggaaagatacattcaaatcttgtgattttttacccatagaaattgctggatc

SEQ ID NO: 30712 - DNA, 201 bp, Homo sapiens
ttcatcatttaccatgatgaacacatgtcaaaattgtaaataaggataggctgttgtttgttttattgcactattttgtgacaggagcagtcatttccaawctgcccatggttcctggcctgtgaggctctttcatccctcttcaggtgggtttataagggttgacatgggcaccaacagatcaggcaatgtgagacttca

SEQ ID NO: 30713 - DNA, 201 bp, Homo sapiens
acagttactcttttgttgtgaaattttatgaggaatataaacaatgcttttgctaaattggcagaattgctatcattaaaatatccctgatgtaattttcyttaactcaaaacttctacagtctgtgttttcattgcaaaaatgaatatctggactccttgcttggcgtttactaaaatatcagcttctggactctcccta

SEQ ID NO: 30714 - DNA, 201 bp, Homo sapiens
agcactccacaaactgggagactttacttttcccaaatggctcaaaagtcacctttatagtgaggtcttcctcaaccactctattttaaactgcagttttrcacacacacacacacgcacacacacacacacacgcacataatattccctattttcttgctttcctttttctccatagcatatagtaagtactcaataaat

SEQ ID NO: 30715 - DNA, 201 bp, Homo sapiens
agttaatgaataggataataaatacagttacctatgtcctgcttatttttctcttttctcacaccttccttctaagatgttattttaaaagcagcttgagrgaaaagagtattatgtatcatttaaagttgtatttttttaattaaaaaatacttattttaaaaaagtagaaaagaaatagccttaagaactgaacctttg

SEQ ID NO: 30716 - DNA, 201 bp, Homo sapiens
aaaaggttcactgccaccagcatttccaacagaaaagcagtccattgaactaacctttctgcagaggaggacatccacagcatccttccttcagctctagttcccagtcctacagccagcaccggcagcccttttctaatggaactggtcaaggaggctgaaagcaaaacagcaccaactgctgctcacccagaacaacaa

SEQ ID NO: 30717 - DNA, 201 bp, Homo sapiens
tataagttaaattattacacaaattaaaatccacatgaaacccaatttctcaagtgaacatttgctttaaagtaagactttatctgggctatctccccaccccacaccatttataatgaggtgagtagatattgggagagtctcagggaacagagtccctgtgaacctgttacagaaaaggggtcctagtccagaccccaa

SEQ ID NO: 30718 - DNA, 201 bp, Homo sapiens
ggggctaggtgctgacagtctgccttaattcaagaattgattttgcattatttagaggaatagctgtgctgtctaaccttcagtcaatgctctataagtaraaattatatctcatatttgagcttgtgatttgtattgagcaagaagagttatatttgctgacctggacctagagtgcaaatattccacattgacaagagc

SEQ ID NO: 30719 - DNA, 201 bp, Homo sapiens
aggaaccaaaggtaagttacttaaatgtttacttttaaattgcttatctataaaatctaccgatagaagtgaatatttagaaccaacaaggctaccaattkatctcacgggctagtatatagtaggccttgaataaatattgcttgattgattgaataattaactatcagaaatgattttcacttgatttaatatttacta

SEQ ID NO: 30720 - DNA, 201 bp, Homo sapiens
ataagttaaattattacacaaattaaaatccacatgaaacccaatttctcaagtgaacatttgctttaaagtaagactttatctgggctatctccccaccccacaccatttataatgaggtgagtagatattgggagagtctcagggaacagagtccctgtgaacctgttacagaaaaggggtcctagtccagaccccaag

SEQ ID NO: 30721 - DNA, 201 bp, Homo sapiens
gaagcagagatatcaaagaaagcactcatggagctttgcttgggttgagaagggtataaaggactttcgtgaagagaaaggagatgaccctccaagtatamtaagtttcataagcaaagctgcagagactggagtgagtttcagggaagaatgctgagaaataagtaggggaaggatatatatcaagcagggccttaaaag

SEQ ID NO: 30722 - DNA, 201 bp, Homo sapiens
aagttaaattattacacaaattaaaatccacatgaaacccaatttctcaagtgaacatttgctttaaagtaagactttatctgggctatctccccaccccacaccatttataatgaggtgagtagatattgggagagtctcagggaacagagtccctgtgaacctgttacagaaaaggggtcctagtccagaccccaagag

SEQ ID NO: 30723 - DNA, 201 bp, Homo sapiens
gttaaattattacacaaattaaaatccacatgaaacccaatttctcaagtgaacatttgctttaaagtaagactttatctgggctatctccccaccccacaccatttataatgaggtgagtagatattgggagagtctcagggaacagagtccctgtgaacctgttacagaaaaggggtcctagtccagaccccaagagag

SEQ ID NO: 30724 - DNA, 201 bp, Homo sapiens
actcccagcagagtcacatttatgctgagctacctaagaatacctccagcctactcagtgaactatggcatacatgcccaattcttatttttagtggtggaaaagtaggggaaagccagtgcctgctggacaacctgggaaattacttgcttgctttccagaggtagttcaaccctgagcctgcaccaactcaaatacttt

SEQ ID NO: 30725 - DNA, 201 bp, Homo sapiens
gatttgggtacctgttcactcatacatgcagtgaacatttatggattatctgccatgagtcagacactatgatagccacaaggaccaaaagatgaatcgaccccatctctgcccccaaggagctaaataactaatgagaaaaatggaagcatatacaaaaagacataatagagtctgttaaatactggaatcaggatgtca

SEQ ID NO: 30726 - DNA, 201 bp, Homo sapiens
tgaagtaggtgtctggaggccaagggaaagccagggctgaaagtatacatttgggaaacttcaactgaagccagagaacagattttttaaaatggccaggrgcaatgtgtaggatgggaggaagagctgtgaatggaactctgaataaccccaacagttaatggggaaatagaaaaattacagtaaagggagccaagaaat

SEQ ID NO: 30727 - DNA, 201 bp, Homo sapiens
ggacagcgcaaaagcaggagatgatatgataaatgttagggagataaggcactcagcacacagccagtaggacatgcggcaagagcaggacaaggttgagrggcgggacgggaaggggggtgtagcggagggcacgatcttgagttggagaaaaaggagtgagaccttctgaggtctggcagagagggaaagcctattttc

SEQ ID NO: 30728 - DNA, 201 bp, Homo sapiens
gaatcacttgaacccaggaggtggaggttgcagtgagccaagatcacgccattgcactccagcctgggcgacagagcaagactccatctcaaaaaaaaaaraaagaaagaaagaaaggttgaggggtgggaagaaagggccaatgaacaggctggattaaagtgaataagaagagggttgcatgcggcttttgtgaacagg

SEQ ID NO: 30729 - DNA, 201 bp, Homo sapiens
tgagataccatctcacaccagttagaatgacgatcattaaaaagtcagaaaacaacagatgctgcagaggatgtggagaaataggaacacttttacactaytggtgggagtgtaaatcagttcaaccattgtggaagacagtttggcgattcctcaaggatctagaatcagaaataccatttttcccagcaatcccattac

SEQ ID NO: 30730 - DNA, 201 bp, Homo sapiens
agctttgtccagcctggagccagataatggaatagtaggattgaaatagtccataaaacaacataagcaatagatacagagtatttatgaggatgacaaarggatttgttttaagtcactaaagcattctcttagatgagaaatttattaatttttttcatgtattgattgaaatataaatactttttagcagaattctgc

SEQ ID NO: 30731 - DNA, 201 bp, Homo sapiens
caaggccctctcctgaggtcctactttaattgatgacattctgaaactcctcaggattcttttttttttttttttaagacggaatcttactgtctgccagrctggagtgcagtggcacaatctcagttcactgcaagctcctccttctgggttcatgccattctcatgcctcagcctcctgagtagctgggattgcaggtg

SEQ ID NO: 30732 - DNA, 201 bp, Homo sapiens
gttctgtcctcatcaggggacagtaacttgaaaagggaagtaccacgatttgtttaaaatttcattttactcacacaaaaaccttgtgagggaagtaacaraatgtgggactgggtcagagtcaaaattgtggtggggtggggacaggggcaaataaaaaggaggtgtgggtcacacctaggaggtcggcgcttgcatctc

SEQ ID NO: 30733 - DNA, 201 bp, Homo sapiens
gggattgcaggtgcctgccaccacgcccggctagttctttgtattttttagtagagacgaggtttcaccgtgttggccaggatggtcttgatctcctgacyttgtgatccgcccgcctcagcctcccaaagtgctgggattacaggcatgagacaccgcacctggccaaggattctaatattcactcaggacaaagaatct

SEQ ID NO: 30734 - DNA, 201 bp, Homo sapiens
attctcttagatgagaaatttattaatttttttcatgtattgattgaaatataaatactttttagcagaattctgcaattggcttctattttttttcttcyctaatgactcagccaatctgtttaaagttatgatctctgatctggtcccacctggaaaatgctggctacctgtgtgtattccctagccagacagttctgc

SEQ ID NO: 30735 - DNA, 201 bp, Homo sapiens
cctaactgccagtttcctgctgtttccactacaccacatttgtgttggccgggaaatatttactgcgtagagagacatgctgatgtttaagttgttgtttrttttaataggtcatttcaaattggctgcatccaaatagatgtcccatttacatagacacaggtcagtctgctcctgggctcagtttggaacatattttta

SEQ ID NO: 30736 - DNA, 201 bp, Homo sapiens
ctactatggttggatgggaaaatggtgactcattcacagactatctgccactcctgctctatgagatgggtcagcctgagaatctaaataggcttaagagrgcatggagtacatttctagtaggttataaagttaagaatattttgaggccatcttcaacatttcaaagaagatgtcataaatggcaagcacatcctctta

SEQ ID NO: 30737 - DNA, 201 bp, Homo sapiens; identical to SEQ ID NO: 6824

SEQ ID NO: 30738 - DNA, 201 bp, Homo sapiens
actcaagataatatgtaaatgtaatatttttaaaaattaaagtaccaaagtaccaaaaaaaacccatggtacatggttcatcatttaccatgatgaacacrtgtcaaaattgtaaataaggataggctgttgtttgttttattgcactattttgtgacaggagcagtcatttccaatctgcccatggttcctggcctgtga

SEQ ID NO: 30739 - DNA, 201 bp, Homo sapiens
aagtggaaattctacacagggagcatttatttatttgtatttccagtacatcaatttttagagaaagcattagatatacacttttaatgaaatgaggaaaaattaattgacagtttgactagatgaattttcataagtaaaaagaaaacacccaactaataagcctgtgatttaaaggtgagatgctacttggtacaaatt

SEQ ID NO: 30740 - DNA, 201 bp, Homo sapiens
aactgtggcaaaggttttttactgtattttattattattattattattttgagacagagtctcactctgtcacccaggctggaatgcagtggcatgatctyggctcactgctatctctgcctcccaagttcaagagattcttgggcctcagccacctgagtagctggaattacaggcgtgtactactacacccagctaatt

SEQ ID NO: 30741 - DNA, 201 bp, Homo sapiens
ctgtgctagtctcaagtcagtgtcattcaaaggtcccagacagactttcttgttcaactgtgtctaagaggatgtccttaaagttgaaactatgtaaattraagatacttcacgtacaaatgaacaatctgtggcagcacacctgaaaccatttattagattatatatttgctttagtaataaaaaacacttgctgccttg

SEQ ID NO: 30742 - DNA, 201 bp, Homo sapiens
agtggaaattctacacagggagcatttatttatttgtatttccagtacatcaatttttagagaaagcattagatatacacttttaatgaaatgaggaaaaattaattgacagtttgactagatgaattttcataagtaaaaagaaaacacccaactaataagcctgtgatttaaaggtgagatgctacttggtacaaatta

SEQ ID NO: 30743 - DNA, 201 bp, Homo sapiens
caagtcagtgtcattcaaaggtcccagacagactttcttgttcaactgtgtctaagaggatgtccttaaagttgaaactatgtaaattgaagatacttcaygtacaaatgaacaatctgtggcagcacacctgaaaccatttattagattatatatttgctttagtaataaaaaacacttgctgccttgtggcccctttag

SEQ ID NO: 30744 - DNA, 201 bp, Homo sapiens
gtggaaattctacacagggagcatttatttatttgtatttccagtacatcaatttttagagaaagcattagatatacacttttaatgaaatgaggaaaaattaattgacagtttgactagatgaattttcataagtaaaaagaaaacacccaactaataagcctgtgatttaaaggtgagatgctacttggtacaaattag

SEQ ID NO: 30745 - DNA, 201 bp, Homo sapiens
ttctaacatctgttttcataactgatctcagaatagctggtcagatccttcagctctgtgctagaaatggaggaacctatcttagggtttctatttttcayttaaaaaaaaaaggtgtaacgtcttgaactcaaagaactggagttgtttattgatagtgtcattttaaatgcccatgaccaaactctaagtttagtagta

SEQ ID NO: 30746 - DNA, 201 bp, Homo sapiens
tggaaattctacacagggagcatttatttatttgtatttccagtacatcaatttttagagaaagcattagatatacacttttaatgaaatgaggaaaaattaattgacagtttgactagatgaattttcataagtaaaaagaaaacacccaactaataagcctgtgatttaaaggtgagatgctacttggtacaaattagg

SEQ ID NO: 30747 - DNA, 201 bp, Homo sapiens
aaaaaaagctcatcatcactggtcattagagaaatgcaaatcaaaaccacaatgagataccatctcacaccagttagaatgacgatcattaaaaagtcagraaacaacagatgctgcagaggatgtggagaaataggaacacttttacactattggtgggagtgtaaatcagttcaaccattgtggaagacagtttggcga

SEQ ID NO: 30748 - DNA, 201 bp, Homo sapiens
ttatatgttcaccaatacctttatactcccagtatcattttgcaaattgacaagctattcaattagattactcaattttggaaaagcataatttaaatttyaagtggtaaaaataccaaaacatcattattgtaaccaaaaaaatccaattgcataaaatgcagacttgcattattggaaagtgaataaaatttctgggtc

SEQ ID NO: 30749 - DNA, 201 bp, Homo sapiens
tctcttagttctgatcccaggcatctgccccttccctggcattctcaaagcctccaaatctcccaaccaggacaaataggaaccgaaaatgctgccttagrtggtgggatggggaacaaggaacttgttactcaacttcctttaaacaaataaataaatacaggcctggcacagtggctcacgcctgtaatcccagcactt

SEQ ID NO: 30750 - DNA, 201 bp, Homo sapiens
aaaagcagtacagagaatcattttactttataattttattctaaaatacaacaaaactccttagaattatgtcagcataactccttgatgtatttttgtcyttaaattccaaatgtgaaagtcataaatattaggcttaaagctgctgacatttgaatcaatactaacagcacacaaagaaaacattttaaaattatcagt

SEQ ID NO: 30751 - DNA, 201 bp, Homo sapiens
atacggggatgagggatctaaatctgttccaatgccagctgcagtttggcaccaattggtgacttagtcagtttgtactacttggttcccaagtgtatcgkgtctgactaggcagtaattccagaaattctagttaactggtgctcttttagtctcatatatcaagaactactgggcctgaataaaatgggtacagggatc

SEQ ID NO: 30752 - DNA, 201 bp, Homo sapiens
ggaacgatgctttgcatccttcaatccagtcaagttgacaatgttaactatcacacctgtatattattaatatcctactgtcttccatgtgtttgcacacrccattttcctttcctgatatacctttaaacctcatgtttaagtcttttcagaaaaatgtttcataaagtttaatttacagtaaatcaggatggattatct

SEQ ID NO: 30753 - DNA, 201 bp, Homo sapiens
tgcccacctcggcctcccaaagtgctgggattacaagcatgagccatcatgcccggccttgtttgttttaatgtatcagaaaaatttttctcctgtcatakgtttgaggacttttcctaattcacttgttatgttgttgtcttattgaaggacacaaattacataaatgtaggctttcttttgtctttcttctacatttta

SEQ ID NO: 30754 - DNA, 201 bp, Homo sapiens
tggggcataacatggacttgagggattcaaatacattggaaaattgacgctccttagactaatggaatgaaatgaacatttttgagcaccatgtgccaggyaccctgctagatgctgggcaatagatgagaggaagtggggaaggaagaaagggagggagggagggagggagggaaagatgcttaatttcttcaggaagaa

SEQ ID NO: 30755 - DNA, 201 bp, Homo sapiens
caagtgattctcttgcctcagcctcccaagtagctgggattacaggcatgcaccaccacaccccgctaattttttgtatttttagtagagatgggttttcrccatgttggccaggctagtctcgaactcctgacctcagatgatctgcccacctcggcctcccaaagtgctgggattacaagcatgagccatcatgcccgg

SEQ ID NO: 30756 - DNA, 201 bp, Homo sapiens
cttcgttcatttgggcttagttcatgaggtataactaaatacctcatactgggtgattatacacaagtttatttctcacagttctgaagtcatgggagtasaaaatcaaggagctgacattgtgtctgatgaggtgtctgttgaggacccacgcctcacagacggcacctttttactttgtcctcctgtgttggaagagac

SEQ ID NO: 30757 - DNA, 201 bp, Homo sapiens
agatgatccacctgcctcagcctcccatagtgctggggttacaggcatgagccactgcatcaggcttatttattattattattcacttagttttctttgtrcttattactaattcttctcaaactttccattgcaattgtaatataccacctctttctctctggacagctactctctaggacttttggaccgctgtcttct

SEQ ID NO: 30758 - DNA, 201 bp, Homo sapiens
cattactgtgaaacatggcagctaaaggcaataatatatataactctactggagctgccatagacggaaaaataacatatcattaaatgagaaagcaaatygcagcataaaagatcccgtacatgtaataaattaataacaatactgtaagtatattaggttcaaccatatggcactgccattttgtcagtcacaaatcat

SEQ ID NO: 30759 - DNA, 201 bp, Homo sapiens
agttaaattattacacaaattaaaatccacatgaaacccaatttctcaagtgaacatttgctttaaagtaagactttatctgggctatctccccaccccayaccatttataatgaggtgagtagatattgggagagtctcagggaacagagtccctgtgaacctgttacagaaaaggggtcctagtccagaccccaagaga

SEQ ID NO: 30760 - DNA, 201 bp, Homo sapiens
aagaatagttgtacctgtgcaccaagatatgcttacaaaaatgttcacagcattactgctttgagtcatgaaacaattgtatagcccatcaatagggaaayggttagagtacagtacattactgtgaaacatggcagctaaaggcaataatatatataactctactggagctgccatagacggaaaaataacatatcatta

SEQ ID NO: 30761 - DNA, 201 bp, Homo sapiens; identical to SEQ ID NO: 6818

SEQ ID NO: 30762 - DNA, 201 bp, Homo sapiens
cactatcatcagggaaatccaaaaacaattaggagatatcatttgaatttggcaaaaggagattgatgatactcagtgtgggaatatggaggaaagctagwtccatcaagcattgctggtggatgtacaaattggaaaagccttttttcaaaagaaatttgtcattatctataaaattttaaatttgactcaggtactcta

SEQ ID NO: 30763 - DNA, 201 bp, Homo sapiens
tatattaaaaattttacaaacaatatgatctcaattttgaaacatataggtacataaatgtccttaatttagcccagctcattataatgtcattaacatarcattagcattgtggttttagccacccccccacctatgggtttcacttaagcactcatgagtaataacccagatggagtccttctggtcaaccccaggcat

SEQ ID NO: 30764 - DNA, 201 bp, Homo sapiens
ggcttgaaatcagtcatgaaagagtattaacacacagaaagcagcagatgagacaaatctcacccatctcccagagctggttattaatatttaccagcaaygctctgacttcatttgattttaatatatcagctttcttttgattagtgttcttctattataacttttttccattcttctcattttaacctctgtgtcttt

SEQ ID NO: 30765 - DNA, 201 bp, Homo sapiens
gagggcaggttttgaacagaactcttaaactgaaggtacttctctggaataaatagcttcaagagatggacccactttgtttattaccaacagggctaaayatttaccttagacctatatgccaatactaaccacatacacattttcattcattgccaaagaataccaagaactggcatgccgtataaataattaaaattt

SEQ ID NO: 30766 - DNA, 201 bp, Homo sapiens
gtctaacctagtccagggaacatgcaatctttgcaacttcatactgcagtgactgtgtgtgtggtctctgattgtccatcgaacacaagaattaaaatccsaacaacctagtgaggggcagagaggagtgggattgaaaatccactgttgaaatatccaggtagataatccactcccaaataacggagtgctgcctgcgcc

SEQ ID NO: 30767 - DNA, 201 bp, Homo sapiens
ttgcatctcatttgtattagttcgttctcatgctgctatgaagaaataccagagactgggtaatttataaaggaaagaggtttaattgattcacagttctrcatggctggggaggcctcaggaaacttacaatcatggcggaaggggaagcaaacacatccttctccactggcggcaggagagagaagtgctgagtaaagg

SEQ ID NO: 30768 - DNA, 201 bp, Homo sapiens
tgccattcagagcaaaccaaatctgcagcactggagacccgcacacccgactggaagcttagggcagggcaaaggcacaagacagcatcatagcactctgkagcccaggaagaacccatcttcttgcaaacactccagattaagcgtaaaaagactagaaaaatcaactgtcttcatgcactggtataggagagcagggta

SEQ ID NO: 30769 - DNA, 201 bp, Homo sapiens
taatggataccaggatcttccaaagggaaaatctcttcctgctgctgatgcgtgtagattagtcataaagccagaggggaaacagaaaaccactgttgctrccttttctcatttttatagatttgcactgtttcgcccagctcactatttcctgcagagcagaaatgatgccttccttgcccacttggacattctgacatt

SEQ ID NO: 30770 - DNA, 201 bp, Homo sapiens
ggcttttagatcttagcacttagcagactctcagaagtgtttgctagaggacgttttctggggaatgtccacctgcactgatgaaaacaactcagtaacarctccactttgagaggagcagagcaggagccttccttaggtgtgcgtaaggggataccggctttaaagacgccaggctgagttgctgtgtcaggattgatt

SEQ ID NO: 30771 - DNA, 201 bp, Homo sapiens
aaatctcttcctgctgctgatgcgtgtagattagtcataaagccagaggggaaacagaaaaccactgttgctaccttttctcatttttatagatttgcacygtttcgcccagctcactatttcctgcagagcagaaatgatgccttccttgcccacttggacattctgacattttgcagggttctaatactaatcttggtc

SEQ ID NO: 30772 - DNA, 201 bp, Homo sapiens
ccggagatgcttggcggaaagcccagtggaatcagtgccctcccagtgcagtgtgaggacgggggacagcagtgtctcccccatttcaggttctgaagccyggcttgtgggccttgcaattcaccgagttaaggagcagagaaggaaaggggggttgtttctgttttttggagttttgctgggagcaaggttggaggaaat

SEQ ID NO: 30773 - DNA, 201 bp, Homo sapiens
tctatgtccttggctgttaagttccccgagagcaaaccccagcttctcgcttgcttcaggctctgcatgtgtgagtgtgacccttgggtactctcggggcrttttcagccatgcgattctggggacttcagaggactctgttcctttctgactcgtgttccggcgtctgtggattgctcccaacaggaggaggagtattgt

SEQ ID NO: 30774 - DNA, 201 bp, Homo sapiens
cgccttggggaagtcgagcacaggcagacaggatcccagtggagggctcctcacaggagaaaggctggggtgggggaggggttcacatagcccctgccccsccaaccccgccctgagggcctccccagccccaccatgagatgttccttggcctgagggcacctcccatcactgtctcgctcgctaggctctggtccacca

SEQ ID NO: 30775 - DNA, 201 bp, Homo sapiens
tgccacctgcaggctgtgattcctaaccctgtcctgcccccctctctgtgcagcacacggcggcgggagacgaaggcggtggccaatcactggtgtcaccrggcagctgtctagaggacttccgcgccacaccattcatcgaatgcaatggaggccgcggcacctgccactactacgccaacaagtacagcttctggctga

SEQ ID NO: 30776 - DNA, 201 bp, Homo sapiens
aggaggtgctgggaatgcagaggaaacggcagactccggagatgcttggcggaaagcccagtggaatcagtgccctcccagtgcagtgtgaggacgggggrcagcagtgtctcccccatttcaggttctgaagcctggcttgtgggccttgcaattcaccgagttaaggagcagagaaggaaaggggggttgtttctgttt

SEQ ID NO: 30777 - DNA, 201 bp, Homo sapiens
tgcctgatctcagctcactgcagcctccgcctcctgggttcaagcagttccctgcctcagcctccctggtagctgagattataggtgcacgccaccacacmcggctaatttttgtatttttagtagagatggggtttcaccatcttggccaggctggtgttgacgtcctgacctcgtgagccaccgcgcccagccaaggac

SEQ ID NO: 30778 - DNA, 201 bp, Homo sapiens
gaaacaaatttctattaaataccatttattgttctcaatattatcacaaaattttatcctccatacctggattaacctgcttggctcctaaacgactgtgktttagaggaagccaccttgacttttaattcagtgcttctcaaaaggcaccgagcccgtggatccctggggcctctgtggacacgaaggcaatgattcagc

SEQ ID NO: 30779 - DNA, 201 bp, Homo sapiens
ggacccccgggctaaaaggtaattgtgtgactgtgaccagggatcccttggcggggaggttgggtctaatcaactctgacctgagacagctctgctgggcrcctctgtgggccgtggggctggcctcacacttctgcagattggaggccttgggactctcctgacctaggagacagcagcctcaggacagctggttaatgc

SEQ ID NO: 30780 - DNA, 201 bp, Homo sapiens
tgtgggctgtttaggcttgatcctgctggggatccaccaaggaaggatcctcagacggtccagccatggcttggaaagggaagtgttctccatcagctgckgtctcgactggtcaggggttgcctgagggtgctaattccctcacactcccaggtgcaccacacaccagcatggctgagtgggctcctgccagatgccagg

SEQ ID NO: 30781 - DNA, 201 bp, Homo sapiens
tttttctctcaaccttaacctcagtgcaggaaacaaatttctattaaataccatttattgttctcaatattatcacaaaattttatcctccatacctggaktaacctgcttggctcctaaacgactgtgttttagaggaagccaccttgacttttaattcagtgcttctcaaaaggcaccgagcccgtggatccctggggc

SEQ ID NO: 30782 - DNA, 201 bp, Homo sapiens
aagagctagacgcgattttccaggctgcgatttgagagtccctgcaggcagcttctctctaaagtatctttttctctcaaccttaacctcagtgcaggaarcaaatttctattaaataccatttattgttctcaatattatcacaaaattttatcctccatacctggattaacctgcttggctcctaaacgactgtgtttt

SEQ ID NO: 30783 - DNA, 201 bp, Homo sapiens
tggtaatttatacattagccgagacgcttttcctactacactgccagaagttaacttctaatagagttcatacattttgttctctctcatgttttttctcygtcacctattcttcacaccttttaaatttaagaagcatgtatgtatacatctgtgcgtgtgtgtatatgtatccttggcagcagtcctcattcctttggt

SEQ ID NO: 30784 - DNA, 201 bp, Homo sapiens
aatgtccaagacaaacgaatgcagttgacaagggaagtatttgatcaaaatgcaacataattcagaaatgctgggctgccagcgggaagcatctaggaacstttcctttgccctgtgtcccgatggaggacgtgccaagcccacacgttgccatgcctgcccattgctgtgacccctggtgactacagctgccaccgccca

SEQ ID NO: 30785 - DNA, 201 bp, Homo sapiens
tcagcatcgcatacacattctctcctgttagggacacagagctatgaactttcaagacagatattctaagcaaccctaaaacttaaagtataataataataaaaaaaataaaaaataaaccacgaaatttagaacataacttcatgtacaatttccctcatgcttaaatgtgtcacagggagaccttcatgttgcctgtgc

SEQ ID NO: 30786 - DNA, 201 bp, Homo sapiens
tgtgtgtgaggaactctcctagattctaaagtaatgttgcaaagcactaaataaatcaagaatctgtggaattttctagaagggaaactcccaattacttkcaacattgcatttaattaaagcaactccacacattcccatattcttggaaatagcgtcaaccaagatatgtcaaaagctagcacagctcacgtttgaaaa

SEQ ID NO: 30787 - DNA, 201 bp, Homo sapiens
acacgtccacagaacttttgttcacacgcctctggctgtgcctggtgtcctgcactgaattctatgattgtgtgtatggaaaccacactgaagtgggaatrcctgagaccatttgggagttttttggttagtttttgtttgtttgtttttattgttgtttttggtttttaatatctgtactggtagagtggcagggcgctt

SEQ ID NO: 30788 - DNA, 201 bp, Homo sapiens
cgctgatccatgccctaggttttctcagaaaacagataggaaaattcaacaaaaaatagcaggtgctcattttatcccagcttaaaaaggatgcgatctcygaatcatggctgtctagcagtaaaagtggctctagtattcagaaaaagtgcgtggggtgagaactgcacatataccaatggcaaagctagtaggatcctc

SEQ ID NO: 30789 - DNA, 201 bp, Homo sapiens
atttcagatgtagacaaagaaagtatactttttgttgattttttaacttaaaaagagaactctgggaaatttataaagcaaaaagttcattatttaacatwttcagcaatagaggaaaaacagttggtcaggacacttggccaaggaaacttaaaggatctgagcccacagcatggaaggaaccgcagccccgcagagctg

SEQ ID NO: 30790 - DNA, 201 bp, Homo sapiens
ctcatggcctttattctgtgccttatgcaaaggtcacctgcagcagacctttcttccgtggcagattttagctgaccaaagagttcaaagtgaatttcagrtgtagacaaagaaagtatactttttgttgattttttaacttaaaaagagaactctgggaaatttataaagcaaaaagttcattatttaacatattcagca

SEQ ID NO: 30791 - DNA, 201 bp, Homo sapiens
tgtatgcataagaatggtaggaatatgtcttttgtattgttctatagttgacattttttcatggttgcttaataatagcaggaagaacaatgctctaacaytattttaggcattctattgttgcttgagctgactctagcccaagaactcaaaataccaaacctccttgtgagacattttaatgaggttaatccttcttca

SEQ ID NO: 30792 - DNA, 201 bp, Homo sapiens
ctaaactacatttccagtagaacatggtccatacttatatgggaatgaaatctcacttagtttgaactctaggtcattcagtcccagaggtggtgactaayggtcaggagatgacagtattgctggacaagcatcaccacactgaggggaaagttcacgtttctaatcctgagaaataatctgttaagaagcatcacacag

SEQ ID NO: 30793 - DNA, 201 bp, Homo sapiens
aggatctgatcaaatccacagcatcttatcattcaaaatgtgcttttaaattatgttttgcttggatcagtattgaagctatttcagtgttatggtacatytaacagctgattttggaaggaggtaagccaaaatgttattgatggcatgaaaagtgagacaaattttaaaattaggcagattcagtttttaagtgatttt

SEQ ID NO: 30794 - DNA, 201 bp, Homo sapiens
ggcatctgcatagcagtgtactgttacacgatgccagaggtcttttcagtgaggttattaggaggggatttctaaggatccccaagactctgtgatttcaygaattcacagcacaggcattgagacctttttatttcccagcgtccctagtgaaggaaacaccttgagtctctttctatactttgccaagtaaaatgaaaa

SEQ ID NO: 30795 - DNA, 201 bp, Homo sapiens
gctagggctgcacgctctcctgcttgggagtagaaagggggagggtgggagagcgaagaccgagctcctcggccaaggagcacccacaggggcctaacggsaggctctccttctttccgggtcgtgggggggacggccctccggtcacccctgcatgcgggccgcgcaccgcgctgtccccgcgtctcgcggaccgagacc

SEQ ID NO: 30796 - DNA, 201 bp, Homo sapiens
gcaagcgtcggcctttcacgggaactgggaacttaaaatgtagcctgaggcaccgttttcgttgctttgggcaaagctgcagccgtagaggccaggaaagwgtgtcagtcactaggcagtgagacgccaggcttagggcgaaaaaagttttcctggaactcgggagctggtggggagtctctgtcacggactgagggtttt

SEQ ID NO: 30797 - DNA, 201 bp, Homo sapiens
tggagttatacatcagagacaaaaattaaaagcaaatatctttcttgcagggaagccgaggcctggatggctatcaagggcctgatggaccccggggaccyaaggtgagcccgtttctcatgtctttgccacttatggtgtctcgcccaccctggctggccttactcccctcttgatggtgtcctgtggaggcatcccctg

SEQ ID NO: 30798 - DNA, 201 bp, Homo sapiens
tccacccggcaggctcccaccccggtgccccgcgtccacccggcaggctcccaccccggtgccccgcgtccacccggcaggctcccaccccagtgccccgygtccacccggcaggctcccaccccagtgccccgtgtccacccggcaggctcccaccccggtgccccgcgtccacccggcaggctcccaccccagtgcccc

SEQ ID NO: 30799 - DNA, 201 bp, Homo sapiens
aaatgtagcctgaggcaccgttttcgttgctttgggcaaagctgcagccgtagaggccaggaaagagtgtcagtcactaggcagtgagacgccaggcttarggcgaaaaaagttttcctggaactcgggagctggtggggagtctctgtcacggactgagggttttttgtgtttttaaatgggagtctctgggtaaagggg

SEQ ID NO: 30800 - DNA, 201 bp, Homo sapiens
attctggaagccatatagagtcagcattatatgcatgcttactcagtgaaaatcctaaagcatgcaagtgtctccataaagagcaatctccttgaacaatracagtgttgacacctgctgttccccaggtctgtatcgtgagatggaaatacaccagcatcttcccccactaggggaagatgataaaatgcaggttaagaa

SEQ ID NO: 30801 - DNA, 201 bp, Homo sapiens
tccacgccggccgtgcacagccctgccgataccgtgggtgcagctggcgactgcactgcgaggctttgtccattttatacgttttgtttaaagagtaggakccacttttactgagctttatgtaaccatggctaaaatgaagaggtttggtaggtgaattcggtgcaggactcaaatgtttagacaggagctgaaagcaga

SEQ ID NO: 30802 - DNA, 201 bp, Homo sapiens
ggagtctcgtggggactcccagaggaagtcagggaagctgtcgctgcagtcacagggcctgggaccttgcaaagggatcagaacaaacacagagaggacaygggtgaagtcaaaagcccaaacacacaaaagcaaagcagaaacagctgtccgtagacagccggcagattctgagaactggagctgacccgagtccctctc

SEQ ID NO: 30803 - DNA, 201 bp, Homo sapiens
caaactgttatgtaccaaggagtatcctggggatcagttcaaatgcagattcaggagttctggggccaggcctgagactctgcatttatagcaagcccccrggtgacgccgacacagacctcccttggagcagtaagggcctggtggagtcagccagctccccagatctgagtgcaccccggccagccctgacactggtcc

SEQ ID NO: 30804 - DNA, 201 bp, Homo sapiens
accaggtagagtgctgagctggggcctggagcccctcggggctgcccgggcaaggccagggcctgctggcattgcgtcctcttgtgttctctttgtggatygccggccgtgccaggcgtggtcagtttccagccataacgcttctttggtggcttgcaggttttcgtggggctccagggaaagctgggccccaaggaagag

SEQ ID NO: 30805 - DNA, 201 bp, Homo sapiens
agaagcctccctggtgagaaacgcagtagcactcggagcaagagagtggaacaaccttgtgtgtttactggggcctctctgtttcccttccaggtgccccygggactgtgggagcccccgggattgcaggaatcccccagaagattgccgtccaaccagggacagtgggtccccaggggaggcgaggcccccctggggcac

SEQ ID NO: 30806 - DNA, 201 bp, Homo sapiens
tgcctccgacccaattgtgaggactgagccagagggagtgcatgtcagcctcagcctccagcagcacagcccctttctctacaagcctcagatataggggraaaaaaacaaaaacagagtcaaaagtaggtcttcattaataaaagactgggatctcccagaattaatcatcttgctcatcttttccagttctggaaatct

SEQ ID NO: 30807 - DNA, 201 bp, Homo sapiens
agccaggaggtcacaacgcttgtggagtaaggagctcgggtttttgtttggggctttgttttgttttcttaagtatctgcaggacaatgtttggaagagtygtatgccccataaaaggaagaaaatggtgctcttggattgtaatcagtgacttgtggttggcagttatgcctctgccttcagtactgcaggcctgtgcct

SEQ ID NO: 30808 - DNA, 201 bp, Homo sapiens
ccagggaaagctgggccccaaggaagaggtggtgtgtctgctgttcccggcttccggggagatgaaggacccataggccaccaggggccgattggccaagmaggtgagtgacagtggggaaggaccttcccaggtcctagtgctctggatctgactcacagactgtggtctgcaggaaggggacacacgagagcccagaaa

SEQ ID NO: 30809 - DNA, 201 bp, Homo sapiens
tgtcccctgaagacgcaagctgaaaaaatgtctggctgctcttcgccgccctcccaggttctctcccacagccaagaacgactggctgctgccctgagccrggaggtcacaacgcttgtggagtaaggagctcgggtttttgtttggggctttgttttgttttcttaagtatctgcaggacaatgtttggaagagtcgtat

SEQ ID NO: 30810 - DNA, 201 bp, Homo sapiens
tgctggcattgcgtcctcttgtgttctctttgtggatcgccggccgtgccaggcgtggtcagtttccagccataacgcttctttggtggcttgcaggtttycgtggggctccagggaaagctgggccccaaggaagaggtggtgtgtctgctgttcccggcttccggggagatgaaggacccataggccaccaggggccga

SEQ ID NO: 30811 - DNA, 201 bp, Homo sapiens
agggatggtttatctggaagattaggggagaaacgtgcaaggcagccaaggcaatccagccatctctgcagctgggaaaaggagtgattgttttcctgagytgctagcctggatttgcagaaggaaagaatgccttgtttctgtcccctgaagacgcaagctgaaaaaatgtctggctgctcttcgccgccctcccaggtt

SEQ ID NO: 30812 - DNA, 201 bp, Homo sapiens
gtaggtacctcccacccggcccccgttgcctgctcagggctggcccggaagtggccaagatcaaagggccacagcgagactcccaaaccctccacggctgrtaagttcccctgacggaagggtccatctacattcctcgagtgcagaaagattaaaacggcctttgaagcagaagccttacaaagcccttaaacctcagga

SEQ ID NO: 30813 - DNA, 201 bp, Homo sapiens
ggaagcgaatatcaaaatgaagttggacaagtaggtttttataggctccataaaacaaaatgcatcttagaagaggcctgggaggtgggataacaatagcsgccgctggaggagggctcctgcgcgctgcccagggctgggctttctttctgatccttacgacgacctggcctagtaggcctcatttcatctgtaaaggac

SEQ ID NO: 30814 - DNA, 201 bp, Homo sapiens
agggtgggaaacagatagttgtggcacacactgttcaaagtttccacaagatcctggaagtctgctcccctgtagtgtgctttgcaaaaagaagactctcrtgggcttctgttggcaatgtagactcatccagtctcctgtggatggccacttcattacttctaacccacctttccccccagagctgacatatgtgaaaat

SEQ ID NO: 30815 - DNA, 201 bp, Homo sapiens
ctcatcttgaattgtagctcccataattcccacatgttttgaaagggacccagtgggaggtaactgaatcatgagggcggtttcccccatactattcttgyggtagagtaagtctcatgagatctgatggtttaataaggggaaaccccttttgcttggttatcactctctcttgtctgccaccatgtaagacgtgccttt

SEQ ID NO: 30816 - DNA, 201 bp, Homo sapiens
tttgtttgttcgttcctttgtttatcaagcacagcagatgtggcccgcatctaacctgttgtgagcaccaccaccatctgcatgttggaagtgcctgcacratgccctaaggattctgttccagaggcttcccttagatgagaccacagagcagccgtctgcctggggagcagacccatggccgcattccagaaagagtgt

SEQ ID NO: 30817 - DNA, 201 bp, Homo sapiens
ggctgaatagcgcatgcccttaggttggacagtaaaatcggccttcttgacattcagaaaggctgacccagctttggaactctgcttggtttgtttgttcrttcctttgtttatcaagcacagcagatgtggcccgcatctaacctgttgtgagcaccaccaccatctgcatgttggaagtgcctgcacgatgccctaagg

SEQ ID NO: 30818 - DNA, 201 bp, Homo sapiens
aaacccaacagggcaaagaacattcgattttaagtcttgagagtcatctctgactccatatccgccttctggacacactggggtggggattggttccttgwgtctcggggcagccccgcctcccatggcttcactgggcacagccttcattgcagctctccaggctgggcaaactggtcactccactgttctgggtgctgg

SEQ ID NO: 30819 - DNA, 201 bp, Homo sapiens
ccatccaccttagctcagccttttaccaaagtttaagccacatgtgtccataataataatcggaaatcaacgcatttttaataagcatttagaaccaatgwtcagaaacagaaagtgacactaatgctttgtggagagtttacccgaagatttttttctctttgaaatgaagtcaaaagcacattcctccccacctgttac

SEQ ID NO: 30820 - DNA, 201 bp, Homo sapiens
acaaagctctttatcttttgacgtgtgggactgagccttccaggatcatgtcatgcctgagagcacgttcgacccttagcatggcaaaagcagccttcacrtgcacaaggaggatggggagaagaggcatcgtaactgactgtatgaaaacgtctgcgtccccacaaagatggactttcttacaccatccaccttagctca

SEQ ID NO: 30821 - DNA, 201 bp, Homo sapiens
ctgagccatccggcgctgggctggctgtgtctgccaccctaggccattagtccggccatttggtttataaacacagaaacgtggaccatcattaccacgcrtctctaatgatgccttcacttgttcaactgaaaatgtgtcagggaagagacgctacccccacccaagaattatttttgctgttacctttgaacattttgg

SEQ ID NO: 30822 - DNA, 201 bp, Homo sapiens
gctctgtgaggacagacatttcagcccatcttgttcactgctgtattcccaatgcctggaacaggacaggcacagagttggagctcagcaaacgcctgackgagtgacgacgtgcagaaacatatcagacaggcattgtgaagggtagggttttttaaatacagacgctctggtgtttacctcttgaactcagcaggtcac

SEQ ID NO: 30823 - DNA, 201 bp, Homo sapiens
aggggaggtctcttcgcctgaatgcatgagaaagcatactggacatgaagccccagtcctggctgggggtcagaagagatgggccggagcagcactgcccraacggatgcacgtttgactcagccgatttggatcaggcaggtctggggctcctgggactctgcattcctaatgctcccaggtgatggtggtgctgctgcc

SEQ ID NO: 30824 - DNA, 201 bp, Homo sapiens
gcactgcgaggctttgtccattttatacgttttgtttaaagagtaggagccacttttactgagctttatgtaaccatggctaaaatgaagaggtttggtasgtgaattcggtgcaggactcaaatgtttagacaggagctgaaagcagagggagctttcgagatgtccgctgtccctcctctccttactgtggccgatgga

SEQ ID NO: 30825 - DNA, 201 bp, Homo sapiens
acctgggctcccggtggcttcctcctgagtgacgggagctctgtactgctgagccatccggcgctgggctggctgtgtctgccaccctaggccattagtcyggccatttggtttataaacacagaaacgtggaccatcattaccacgcgtctctaatgatgccttcacttgttcaactgaaaatgtgtcagggaagagacg

SEQ ID NO: 30826 - DNA, 201 bp, Homo sapiens
cagcccatcttgttcactgctgtattcccaatgcctggaacaggacaggcacagagttggagctcagcaaacgcctgactgagtgacgacgtgcagaaacwtatcagacaggcattgtgaagggtagggttttttaaatacagacgctctggtgtttacctcttgaactcagcaggtcacctggtctccctgtcctctaag

SEQ ID NO: 30827 - DNA, 201 bp, Homo sapiens
aaagaggaggtaagaacagggttatttgagagatagaaaacctaccccaaatctccataataatttttctgcagtagttttccttttactcatctcagatktccaggctgttggaaagaggggacgaatcctaatttttctggcttattaacgtcaacagtgatgaagtcctggagccaggagagcagccggccgtggctg

SEQ ID NO: 30828 - DNA, 201 bp, Homo sapiens
caccgagcttcccagggcctgaaaggtggccgggagggcactcctgagtttcagtctttgagtctcctggggtgtgggtgctttcttcttggtcttgaccktggactaacagtggagcgggcactgattcctaggaaggaggctctccccctccttcctcctctgcttctcccactgtgaggatcaggggcagcaagtgaa

SEQ ID NO: 30829 - DNA, 201 bp, Homo sapiens
ctgtttaccagccctcccgggctcctttgttatctgtgacctgggctcccggtggcttcctcctgagtgacgggagctctgtactgctgagccatccggcrctgggctggctgtgtctgccaccctaggccattagtccggccatttggtttataaacacagaaacgtggaccatcattaccacgcgtctctaatgatgcc

SEQ ID NO: 30830 - DNA, 201 bp, Homo sapiens
aaaatatgccaataaaatcgtgtgatagtgccaggccattgcaaaggacagagaaagtcatatattacagttcccaattatttgagaatcatcctaaaagwggaggtaagaacagggttatttgagagatagaaaacctaccccaaatctccataataatttttctgcagtagttttccttttactcatctcagatgtcca

SEQ ID NO: 30831 - DNA, 201 bp, Homo sapiens
tgccccgcgtccacccggcaggctcccaccccggtgccccgcgtccacccggcaggctcccaccccggtgccccgcgtccacccggcaggctcccaccccrgtgccccgtgtccacccggcaggctcccaccccagtgccccgtgtccacccggcaggctcccaccccggtgccccgcgtccacccggcaggctcccaccc

SEQ ID NO: 30832 - DNA, 201 bp, Homo sapiens
gactcaaatgtttagacaggagctgaaagcagagggagctttcgagatgtccgctgtccctcctctccttactgtggccgatggagtagccctgccctgtrgcagccggggcccaggtggattcctcctgggaacgacccctccctcctcagcgcgcactgtgccagagcagtacacaggtacaaagggcaaacgtgttca

SEQ ID NO: 30833 - DNA, 201 bp, Homo sapiens
agggttggccagtggggagactgctgggccagttctttatctagaaattgctctggaatggaaagacgtgttcagttgagcacaggatcagagaaccgccrctgggaaataggcgcctctgtttaccagccctcccgggctcctttgttatctgtgacctgggctcccggtggcttcctcctgagtgacgggagctctgta

SEQ ID NO: 30834 - DNA, 201 bp, Homo sapiens
ttatactggtcttaaaatatgccaataaaatcgtgtgatagtgccaggccattgcaaaggacagagaaagtcatatattacagttcccaattatttgagartcatcctaaaagaggaggtaagaacagggttatttgagagatagaaaacctaccccaaatctccataataatttttctgcagtagttttccttttactca

SEQ ID NO: 30835 - DNA, 201 bp, Homo sapiens
gaaaccttcaaatgcaggcaactcatatttcgacggggcaccctccagtgctccgagatggaaattgcctgcatttcagtgccctgttctgtggctccagygccctgctgtatgcccactgtgaaggctgcttgtcacctgtgctgcccagctcaacccggcccctttggtcgctgtcctgcctgcctgacggctgacgac

SEQ ID NO: 30836 - DNA, 201 bp, Homo sapiens
gaccctgtgaattctaatgcacaggtctgtactgcatgtaagacttggctcagatttatgaaccagaagcaatgcatgcacgcgcacgcacgcacactcaragaagggggcgatccctagaaaataccacatcgggctgtgtgtgctttggttgtgctgccacctgcacccctttgtcccttagagccacttttataattt

SEQ ID NO: 30837 - DNA, 201 bp, Homo sapiens
agaatggaccctcggtggatgagaatcactgcagtccataaagtgtaactgatgaaaagccagctagcaccctgactcccggaacacctgagggcgtgcarcaggtggtcgctgacccgagcttctcagaaacagcgaagggtccaggaaagggggagtgggagtcaggccatcgcttgagagagatatggaggcagctga

SEQ ID NO: 30838 - DNA, 201 bp, Homo sapiens
aagtgtgacagattcaagtatatgtctttaagttgccaaatgaacactgtgtgtattttgctttttggtaaatacaaattactcttctgaaaatttggaarcactgtgacagttttctaatgaaattagacggagaatgagttttaccattaaggactcaaggctttccacggcccctttaactgagaatggaccttgatt

SEQ ID NO: 30839 - DNA, 201 bp, Homo sapiens
agaggtggccctgccaatagcacactgtgtgtggaaaacacccagacattgagctgcctgaggagaaatggaaggtggcccacttggccggtcattgctcrttaaaatgtataggtgtgcagatatgaaaacacggggcttgttgccgatgactcaggggagggcaccgaacgtcatgcctcctggttatgtcttgccgcc

SEQ ID NO: 30840 - DNA, 201 bp, Homo sapiens
tatgtgttgttaagagacatgtagtttgttacgttcaacaaggggctggtcttctacttactcacttcttggtaaccactggctttaatggctgttccttrtgaaataatgtttcaattttcaactgtattgattaaagatttttcttaattgtggcaaggactctttcctgcgtaggtcagttcaggaaaaagggctgcc

SEQ ID NO: 30841 - DNA, 201 bp, Homo sapiens
cagcctcccaagtagctgggattacaggcgcacgccaccacgcccagctaattttgtatttttagtagagacagggtttcaccatgttggccaggctggtyttgaactcctgacctcaggcagtccacccacctcggcctcccaaagtgctgggattctaggcctgagccaccacccccggcctagctatattaatactgc

SEQ ID NO: 30842 - DNA, 201 bp, Homo sapiens
ggtgcgtgcagtgaaatacgatatgacgaggccaacttttcatctgtttaaaggacaagaccaagtgtgacagattcaagtatatgtctttaagttgccaratgaacactgtgtgtattttgctttttggtaaatacaaattactcttctgaaaatttggaaacactgtgacagttttctaatgaaattagacggagaatg

SEQ ID NO: 30843 - DNA, 201 bp, Homo sapiens
ggcttgaaagcactcactgtagccgctctgagcattgtcacctatctccagaggctggcagcagcctgagggatcaaatatgcagccggctgggtggtcayctgaggacctctggccgggacctggggccacaatagacgtgggttcacgtaggcatcagtgcggggcccctgcctgccaccctgccgcttagtttccagg

SEQ ID NO: 30844 - DNA, 201 bp, Homo sapiens
gttgaacaaaataaaccagaaacagaaaagtacacgattcagtttcattgatgtgaagttcaagaactgacaaggctgttagatggggtatcgggagcacrgctgctttaggtggggttgtcatagagtgctgacagtgttctgtgtctttcagtgacacacgagttcagatgcattgagctgtgcgtttaagatgagtgg

SEQ ID NO: 30845 - DNA, 201 bp, Homo sapiens
gtttccaggctgtcctcggggctccagccccaggaaattcgcctgaccttcctgttggctgccaccgccttccctgccctccaggccggcagctgcggtgrcaagtcctttccgcaggctttggtacagggaggagaggtgttcatgccgcacgaggcccagagctttctgtaaggatcgggaaggacaattctttcctgc

SEQ ID NO: 30846 - DNA, 201 bp, Homo sapiens
aatgagaattcttggtaaaatccaacaacctaacttcatttccaaactttatgttgaacaaaataaaccagaaacagaaaagtacacgattcagtttcatygatgtgaagttcaagaactgacaaggctgttagatggggtatcgggagcacggctgctttaggtggggttgtcatagagtgctgacagtgttctgtgtct

SEQ ID NO: 30847 - DNA, 201 bp, Homo sapiens
tcttcctccatgggtggcttgtaggacttggccacgataaataatagcagagatttgtcagcagcatcccagaaggagaggtgggtaggaagggtaaaccraaaagcgcaggagaggaaacaggctctgtacgaccaggcggctatgtttacaaccagagagagagaggtgaagaggaaaaggttctagaatagaaaaaag

SEQ ID NO: 30848 - DNA, 201 bp, Homo sapiens
ccccggtgccccgcgtccacccggcaggctcccaccccggtgccccgcgtccacccggcaggctcccaccccagtgccccgtgtccacccggcaggctccyaccccagtgccccgtgtccacccggcaggctcccaccccggtgccccgcgtccacccggcaggctcccaccccagtgccccgtgtccacccggcaggctc

SEQ ID NO: 30849 - DNA, 201 bp, Homo sapiens
tcctgggacagaaaagctgcactagtggaaaaactggtgagattctagcggaggctgcagttcaatgtgataatgttgatttctgtaccaatgttgatttsttagttttcacagaaatgtgccatagttttataaaatgtcaatatgacatcatgatgtctgggtgaagggtatacagggactctctgtactatctctgca

SEQ ID NO: 30850 - DNA, 201 bp, Homo sapiens
gatgtctgggtgaagggtatacagggactctctgtactatctctgcaactcttctgcaaatctcaattgcttcagaattttaaaatgctcccaggagtcarcagccagtcacatttggtgtgcatgggtcagatggacaagtgcatggagaaggctgaaagcagccagtctcgaatgagcagatgtgggcagcaagaggga

SEQ ID NO: 30851 - DNA, 201 bp, Homo sapiens
tgtaaacgtccttatagacttggcttcagaattgagacgattttgctaaactgcacattgtttggtaataaaaagctagagtgctgtccagatactcgccmtaaagagccagtcttgtgatctcgttcgaactatagagcaacctgcatataaagtcgttcagccaagagcatgggcagaatgaagccctgctgagcattt

SEQ ID NO: 30852 - DNA, 201 bp, Homo sapiens
ctgttggcaatgtagactcatccagtctcctgtggatggccacttcattacttctaacccacctttccccccagagctgacatatgtgaaaatgaagactrcaaaaatttgcctctatgtatcttcttggagttttttgatttttaacttttttagtctcggctattttgaactattttctccactgctctaatacattga

SEQ ID NO: 30853 - DNA, 201 bp, Homo sapiens
aaagacaaagaattgtatagatttttttttttgccttgaaaagataactttttagctttcaaaaggatgataactttttaacaataggtaatgttgatctygtttgtcacttggcgtaggtttttcagtattcctctgtggagggaatttgggttagatgctaggcacaatccaatcgtcagctatctgtaaattcccttc

SEQ ID NO: 30854 - DNA, 201 bp, Homo sapiens
ccatgctcctgctgagttcggctggatggcagtgaccgtgcttgctttgagggcgagggtcacacccaggtgtggcctgtgtccccaggtgcctagacacdgcctgaacacagaggcgtttgataaaaaatgtacaatatgacgcacagtcagtgcctctctttggggctgaatagcgcatgcccttaggttggacagtaa

SEQ ID NO: 30855 - DNA, 201 bp, Homo sapiens
gtctagaaagtcaggtcatggtggggccggcaccgcccatggagctggacttgggtgctggccccatgctcctgctgagttcggctggatggcagtgaccrtgcttgctttgagggcgagggtcacacccaggtgtggcctgtgtccccaggtgcctagacacagcctgaacacagaggcgtttgataaaaaatgtacaat

SEQ ID NO: 30856 - DNA, 201 bp, Homo sapiens
ttatcatagtcattatttcccatccccacctccccacaactttgtaaaggggaaagaattgtattaatagttggtattgaatttggcaatttgttgctatkcttcaaaatctggacctgagacttgttcaatctgtccatcggcattttgctgtgatcacagccaggtgccgtagtcaagccctctggaaatgtctactgc

SEQ ID NO: 30857 - DNA, 201 bp, Homo sapiens
ctgagatgggaagaggaccgctcacgaaccgtggtcctgctcccacaccccaataatgtacaacttttcatatcgggacacagccactgcctctgcgagtstgaactcgttgccatatttctgtgtgcttttattctgggccttgggcagtcccatctgttttgttgtatagttatgattataaataataagagctcttac

SEQ ID NO: 30858 - DNA, 201 bp, Homo sapiens
tagttcttaccgaacggccagcctggctgtgaattagtgtccatgcagctgcctctgcagcacgtcctggtgcctggggctgcctcctgcagggggcccaygtgtatttcaccagccccctcttgctgaaggcgcattcgcgaggatgcctcatgtccgtattgacactcatggtttgctgttcagtaaaaacaaacgcac

SEQ ID NO: 30859 - DNA, 201 bp, Homo sapiens
gtgtcccctggctacgacctactgcacctgagatgggaagaggaccgctcacgaaccgtggtcctgctcccacaccccaataatgtacaacttttcatatygggacacagccactgcctctgcgagtctgaactcgttgccatatttctgtgtgcttttattctgggccttgggcagtcccatctgttttgttgtatagtt

SEQ ID NO: 30860 - DNA, 201 bp, Homo sapiens
tctccaaacattttctaacttacctaagatgggttatgattgaggtgtcccctggctacgacctactgcacctgagatgggaagaggaccgctcacgaacygtggtcctgctcccacaccccaataatgtacaacttttcatatcgggacacagccactgcctctgcgagtctgaactcgttgccatatttctgtgtgctt

SEQ ID NO: 30861 - DNA, 201 bp, Homo sapiens
acctgggtaggtacctcccacccggcccccgttgcctgctcagggctggcccggaagtggccaagatcaaagggccacagcgagactcccaaaccctccayggctggtaagttcccctgacggaagggtccatctacattcctcgagtgcagaaagattaaaacggcctttgaagcagaagccttacaaagcccttaaacc

SEQ ID NO: 30862 - DNA, 201 bp, Homo sapiens
gagctgtttgctgtgacattcagaggcagctttgctatctgtgaggtgtgttctggtacctacaggctccgtgagcactgtctttcctcactgatctcttytttaattctcttcatgggggcgatttcttgtagcactttttcttctccaaacattttctaacttacctaagatgggttatgattgaggtgtcccctggct

SEQ ID NO: 30863 - DNA, 201 bp, Homo sapiens
tatctgctaattaggggccccaaggaccaaaagggcagaaaggtgagccttatgcactgcctaaagaggagcgcgacagatatcgggtacgtttgcaagasatgggaggggtaatgaagggacccagtgtaaattctcaactaacaaagttaattgccaagtgaactttgcatgtaagaatgaatgtactgaaggcatgcc

SEQ ID NO: 30864 - DNA, 201 bp, Homo sapiens
ctctgcaataaaaggtaagtaaatctaaagatggttaaaagctatcactcttaaaattatttcttctccattagggtgaacctggagagcctggattggtyggtttccaggtaagtttatttttattggacgatattccaaacaaaagtttaagagcttcagaactccaagtaccagtttacctctcttaaaaacattctc

SEQ ID NO: 30865 - DNA, 201 bp, Homo sapiens
aaaacccaacagggcaaagaacattcgattttaagtcttgagagtcatctctgactccatatccgccttctggacacactggggtggggattggttccttkagtctcggggcagccccgcctcccatggcttcactgggcacagccttcattgcagctctccaggctgggcaaactggtcactccactgttctgggtgctg

SEQ ID NO: 30866 - DNA, 201 bp, Homo sapiens
acttcgtccaagccaggtcctctgagctgtttgctgtgacattcagaggcagctttgctatctgtgaggtgtgttctggtacctacaggctccgtgagcastgtctttcctcactgatctcttctttaattctcttcatgggggcgatttcttgtagcactttttcttctccaaacattttctaacttacctaagatgggt

SEQ ID NO: 30867 - DNA, 201 bp, Homo sapiens
tagtgaccacctgaaggccactggcccggttactcagaaatgtacctctttgaatgctgcctgcctcgaggtgtacctctcatcatcacagaaggaccacygcttactctttgttaatgaaatctgagatgcttccaccttcctattcttggaaaacattaggagtcccacacctcttgcagccctgatgtcctgggaccc

SEQ ID NO: 30868 - DNA, 201 bp, Homo sapiens
ttttcagcctcagccaccagggtctccagacaaggagaaatacgcccaaagctgctcccaggggctaggagctcggagctcccagtgtgggtctctgagcrgcgcggggtgggcgctcccggccctccagcccccaactccctcgcgcacccgggactggtgaaggcgcccagctgccgagcatacccgcgacgcgggttc

SEQ ID NO: 30869 - DNA, 201 bp, Homo sapiens
acgttttattgtcatccaatttatcaattttttatggttagtgttttcccaagctcattcattaattctaaattttacaatagattctgttgtgttttctrtatgtaaaatcatgtgatctgcaaataatgatggttttacatccttttagtcattatacttttttcttttttcaaccttattatactgtctagaatatat

SEQ ID NO: 30870 - DNA, 201 bp, Homo sapiens
ggatccgcggcttacacggcttgccaggcaccaagggctttccaggatccccaggtactctgtgccgtcccagccccgagtcccacgcagaggtgtcgagsgtggggactctgtgctgagtctgccctccagacttcagggaatggagggtctcagagagcagggtgggcttcctgaagtgctatgcgatcggccgtgagg

SEQ ID NO: 30871 - DNA, 201 bp, Homo sapiens
tgttacttcaatacttggggtattcgattttttaatgcaaatgttttcaaagatacactaattttgaaataatgtaagacaccactgcaatcactcttacrttcccggtagacctctgagagcagcaaccaccctccaccaccccactaacatcatcttgaatcaacgctttaagaaaaaacatacttgctgcagtggttc

SEQ ID NO: 30872 - DNA, 201 bp, Homo sapiens
tggagttcgtgtcactacatgcagttgccgtggggacaaaatgagagaaaccatatttaaaacttgtaacaacgcatcatctcaaaagatagaagcagttmaacgatactgttcattatcctgtttcttaggaagtagtacctctacatggtctggtggtgggagcagggcggggggcaggggacatgacattaccactcc

SEQ ID NO: 30873 - DNA, 201 bp, Homo sapiens
gacaaaatgagagaaaccatatttaaaacttgtaacaacgcatcatctcaaaagatagaagcagttcaacgatactgttcattatcctgtttcttaggaartagtacctctacatggtctggtggtgggagcagggcggggggcaggggacatgacattaccactcctgtccacagcgtctcctggcttctgagaagtact

SEQ ID NO: 30874 - DNA, 201 bp, Homo sapiens
agtcacaaacgttaaactttagcaaccccctaatgattggaaaagatgggcaaatccttgctttaagagcagctgtatcgtatggagaagaagtcatctcygctgggaaaactcgcgaacagatgcaggctaaagcgaaagatcaactctccacaccattacattttgaagggctttgaagttatttttagaaaaactcaa

SEQ ID NO: 30875 - DNA, 201 bp, Homo sapiens
cccctgcacactcggcacgaagctgcccgagcaggagacgccatacacggaagtcaggccttctgtcccttgcacgtgggacttcagtgtgacgcccagcaaagccctctccttattttaaggaacttcgtaagacgacatgcagagtgaaagctttcctagaaattcctaatgcctacatgataaaaagtcctattttct

SEQ ID NO: 30876 - DNA, 201 bp, Homo sapiens
ttgtattagaaatatgcatatgtcctcgcttatgagtgggagctgaacaatgtgaacacatggacacagggagggaaacaacacacccggggcctgtgggygggtcggggggagggagagcatcaggacaaatagcaaatacgtgctgggcttaacacctaggtgatgggttgatactttattgtattaagttccagggta

SEQ ID NO: 30877 - DNA, 201 bp, Homo sapiens
cctgcagccaggggcccctagtccctgccgccccagcccgcaccagctcgtgcccttctccgtccccagagacgcccgtgccctccacctggctttcttcrtgcttttcatctctgggcgccctgtgtgtccatagctggcgcagggttgttctctgatgcctgagtaacctcggtttcccatcttaagatttgcagcact

SEQ ID NO: 30878 - DNA, 201 bp, Homo sapiens
acaaatttagcctgagtccctctagtcattgcagacacttggctgtgttgcctttccccacccccagacatttcagaaaacctgacttgctttatattcawgtttaaaatctaaaaggtcatgtttcctaagaaagcaaacaagaggcaatcagctcttttaaacatgacaaggccattgataaaatcacgttgcgggtgt

SEQ ID NO: 30879 - DNA, 201 bp, Homo sapiens
gtaaaggctaagatgactgcactcaggagaggcccttaaaggatgaccaagaaatacatgagaatgggcaaagggacaatttcacctgcagaaccaagagwcctgcagacacaacccccaaccggccctctccaagtctggcttgaaactccgggccactggggtaaatgctgctgcagctatgtaaaggggaaaaggagg

SEQ ID NO: 30880 - DNA, 201 bp, Homo sapiens
ggcgcaaaaggtgaggcttctgacctgcagccaggggcccctagtccctgccgccccagcccgcaccagctcgtgcccttctccgtccccagagacgcccrtgccctccacctggctttcttcgtgcttttcatctctgggcgccctgtgtgtccatagctggcgcagggttgttctctgatgcctgagtaacctcggttt

SEQ ID NO: 30881 - DNA, 201 bp, Homo sapiens
aaaatcttcctaatgcagcctgttttcaacaacgaatctgttcagagaaggtagagaaagcataggttatgtctaaatatttccctggagtgtgttactayttcagagtattagcctgcagctccaggggcctcctctgcataccttttgaccagcattgctaaaaagtaacagaaatggcttgtttgggtttcaccttct

SEQ ID NO: 30882 - DNA, 201 bp, Homo sapiens
acattttgaaggctttggcatgacccccaataccagctgttacaaccaacccagcctgggcactgttgcacagtctaggaggagcaagtagacaaagatakggatccactgattctatgaaaacttgcagctgattgaggggaggtgtcagtccatgggaagtccataccacaggggttgggagctacattccccagagtt

SEQ ID NO: 30883 - DNA, 201 bp, Homo sapiens
ctggtagaattaaattctacagtgtacataaggtacttaaccacagtgtctggcatagaataaacacccaaaaggtgcaattcctgcactttcctctctaycctcgtgcacctaaacctcagcctcctctgtctgtctccctagtggcagctgccagccttctgctcccctgagtcacggcgtcttggcaagtactgccca

SEQ ID NO: 30884 - DNA, 201 bp, Homo sapiens
agaaattccccctacaaaagttcagaatcactgctctgatgtggagaggagaaatggttttatgaaagtgcagggtgtgggttggaaaggcaggtggctcygtcagggaaacttggggtagatgggctggagcagaggagcggggaggggaggctcggctgcatgcccaccacacaggccaaggcaggtggcagaggtggc

SEQ ID NO: 30885 - DNA, 201 bp, Homo sapiens
gaaatattcaattagcgactcagagtcacaacccagatacctctgcctgtctccagcagacaccgctcccaccccagccctgtggttgctaacctgggctmgcctgtccccagcacacacacacccctcctgctccaactctaaggtgctaacccaggctggcctgtccccagcacacacactcttacatctgctccctcc

SEQ ID NO: 30886 - DNA, 201 bp, Homo sapiens
cactccagcctgcgtgacagagtgagactctgtctcaaaaagaaaagaaaagaaaatgcgggttaaaactgtgactcggtgcattcactgtttatctgttkatggcattgtcgttagtccctgctgccaaccccagcccgaagaggcttctctgtggtgtgggaagcaggtgtcgctcccctgattctgccatcagcccac

SEQ ID NO: 30887 - DNA, 201 bp, Homo sapiens
tctcctaagtttacacagcttcagaccggcaacactcatggacccaaggcatggctaaaccattctaaaaacccacataccccaaggcggactttctacaygtccactggtgagactgagaaggggcgctgctgtgggaaccgcagccgacagctcttgaaagagttcaatagggggtcaccacgtgacccagaaatgcca

SEQ ID NO: 30888 - DNA, 201 bp, Homo sapiens
ccggctggggaagagagcctgatttgagggggctgggggtttagataagaagattgagccaaaggttgggagcagtgaatgctggagctaaggagttggarccccgaggcagagggggcctttgggagtttttaacagagaaatgcattaagaagggattttagggacccagcaggcagcccttggacggcttggagtcgg

SEQ ID NO: 30889 - DNA, 201 bp, Homo sapiens
gttggaaaacaaagaaattcagcttgaagtagtcagcttgtgttgttttaggagaggaattcattctgtgggtgtcagtgaagcattaaaatccccccaasagctccagagaaatagttccctgctgtggcccacaccccagctaattctgttttcgtcattagttaaggcagttgtcctgggtgaagtcttagcacttgt

SEQ ID NO: 30890 - DNA, 201 bp, Homo sapiens
tcctcatctttagttaggtttcggtcagagattcaaatgcaagagggatgtaaaccagggatgaagtgatagtggcagcaacacaagttcgttctcctgtygcaatgatagacaggacggctcccacacacagcaccttcttctagagcacttttcctcctcttctctccttttgtcctcttgagtttgaacattgatggt

SEQ ID NO: 30891 - DNA, 201 bp, Homo sapiens
cccatcggggagccgggggccccatcccagatgcacagtggcctccaagggcgaccccaatcccttccgggggatttggtaggaagcagcggtgccctatrgtgctagccatgcgtaccttctcccatggccttccagcactcctttagaatgtgtctgtcacaacactgtgactacccacggtagccagtgcgatctggc

SEQ ID NO: 30892 - DNA, 201 bp, Homo sapiens
catctttagttaggtttcggtcagagattcaaatgcaagagggatgtaaaccagggatgaagtgatagtggcagcaacacaagttcgttctcctgtcgcartgatagacaggacggctcccacacacagcaccttcttctagagcacttttcctcctcttctctccttttgtcctcttgagtttgaacattgatggtggta

SEQ ID NO: 30893 - DNA, 201 bp, Homo sapiens
actcagttttagggctggggggccgaatggcggggcaagcagaagaaacataaccaacagaacgacatggcgaaggttgtaggttccaaaaagggcgacarggacaagggctcgagctgaggaatgccttctgaggaccccatagccaaatttttgctgtttccagcctctttttgactcttctcttagaacgtcaccatg

SEQ ID NO: 30894 - DNA, 201 bp, Homo sapiens
cacttttcctcctcttctctccttttgtcctcttgagtttgaacattgatggtggtacatgatgttcctaaaaagacaagcacaggcagatagagagaaaygttgggcccacggaaatatgaattcatccagatttctactgtgttaacttttaatagaggaatccccttctatgtttgtaccatgtgttgccatccttaa

SEQ ID NO: 30895 - DNA, 201 bp, Homo sapiens
cagcctcctgagtagctgggactacaggcatccgccaccacacctggctaattttttgtatttttagtagagacgaggtttcaccgtgttagccaggatgrtctcgatctcctgacctcgtgattcgcccgcctcggcctcccaaagtgctgggattgggacttgatgattttcatggtcaatacaacagaggggtgtcgt

SEQ ID NO: 30896 - DNA, 201 bp, Homo sapiens
aagaggacaattttttttttcagatgtagtcttgttctgttgcccaggttggagtgcctgatctcagctcactgcagcctccgcctcctgggttcaagcakttccctgcctcagcctccctggtagctgagattataggtgcacgccaccacacccggctaatttttgtatttttagtagagatggggtttcaccatcttg

SEQ ID NO: 30897 - DNA, 201 bp, Homo sapiens
tcctgggttcaagcagttccctgcctcagcctccctggtagctgagattataggtgcacgccaccacacccggctaatttttgtatttttagtagagatgsggtttcaccatcttggccaggctggtgttgacgtcctgacctcgtgagccaccgcgcccagccaaggacaatttactctagccacagatatggccatggt

SEQ ID NO: 30898 - DNA, 201 bp, Homo sapiens
aaatagcaaatacgtgctgggcttaacacctaggtgatgggttgatactttattgtattaagttccagggtactaataaaataaaataaatgcataacatygaaattaccttttgagtcatattggcgtgtctgattcagtggcattaagttctttcacgttgttgtgcaaccttcaccaccaatccatctccagaacttt

SEQ ID NO: 30899 - DNA, 201 bp, Homo sapiens
agccaccatgtccagctaatttttacattcttagtagagacagggtttcaccatgttggccaggctggtcttgaactcctaacttcaagtgatccaccgcytaggcctcccaaagtgctaggcttacaggcgtgagccaccacacccagcccaatttccacatctttctaaatgtaatgatgccaagatttaaataagact

SEQ ID NO: 30900 - DNA, 201 bp, Homo sapiens
ctcagcatgcatccaggcggtacccacagtgccccctgtggcctggcagctgcagctgagagcctggagactatgcttctggaaggttgcgattgacaagytcgctcaagtaagcagtggctgagtgcttagggcaacaagttgtgtttagcgactgcattttttcatgtagctaagagtttcccacagtctatgggtccc

SEQ ID NO: 30901 - DNA, 201 bp, Homo sapiens
gactgcattttttcatgtagctaagagtttcccacagtctatgggtccctggacttgggtcaaatagtccttagcctcaccagatttcttaaattcaacamtataaatcaaagtaaaagaaaccagagagaaactgagcaaaaatagctgccaagagaagagggaacgagtgctcggggcgggttggaggcagataacgag

SEQ ID NO: 30902 - DNA, 201 bp, Homo sapiens; identical to SEQ ID NO: 6857

SEQ ID NO: 30903 - DNA, 201 bp, Homo sapiens; identical to SEQ ID NO: 6859

SEQ ID NO: 30904 - DNA, 201 bp, Homo sapiens
tgtttagacaagtattaaatttaatttgcacttcctaatcacgaacgagctgaatattggaaagagatggcgtaaagatgaagtcacccgtcaaacaagtrtttgtgcgtcaaggttcacagcagcactactcacaagcaccgagtgctgaaagcaacccgagtgtccatcaacagaggaattaagaagcaaaatgcagtc

SEQ ID NO: 30905 - DNA, 201 bp, Homo sapiens
ctgtgtcatttccatcacctgcacgacctggtccctgggaagctgagacacaggccatgtcatttacttgctgtaatagcagatattcaaactgcaggggrctcagaaatgtgcagtatgaacggctttcttcttcctcactgtattgtgtttagacaagtattaaatttaatttgcacttcctaatcacgaacgagctga

SEQ ID NO: 30906 - DNA, 201 bp, Homo sapiens
ggcatcacacccccttccaacatctctggggcacctggtgacaaaggggcgccagggatatttggcctgaaaggtaagcaggacttatacatctgtgcttygacatctctaggggcaggagctggcaatggcccgcttaatgtagggggagaacagacgttcatttccacgctgtgcccagactccggtcaaagaggcagg

SEQ ID NO: 30907 - DNA, 201 bp, Homo sapiens
tgctttagaaatatttaccctcagaaatccagagggaatggaaatgacaccgggctatttgttccaagcagcttttacaaaccaaacatacagcagtggcsaggcgtcaagaagaggcatgggacatgtcactccccaggccccttctggcctagtgagtctgttaaaaagattctatgaagacagtgttccagttcaatg

SEQ ID NO: 30908 - DNA, 201 bp, Homo sapiens
ataacgatgagtgacacccccgcaggttttccgggactccgtgggatccgcggcttacacggcttgccaggcaccaagggctttccaggatccccaggtaytctgtgccgtcccagccccgagtcccacgcagaggtgtcgagggtggggactctgtgctgagtctgccctccagacttcagggaatggagggtctcagag

SEQ ID NO: 30909 - DNA, 201 bp, Homo sapiens
aactttagcaaccccctaatgattggaaaagatgggcaaatccttgctttaagagcagctgtatcgtatggagaagaagtcatctccgctgggaaaactcrcgaacagatgcaggctaaagcgaaagatcaactctccacaccattacattttgaagggctttgaagttatttttagaaaaactcaaaaatctaaatcaaa

SEQ ID NO: 30910 - DNA, 201 bp, Homo sapiens
aaaggaatgaaagggcattggggagaaaggtgaagaaaatttattgaacacctatcacatttttccctcactagctacttaactcacacatccgcacaggrgcccaaggttaaaccacttgtctagatcaccaaggagagcaaagataaaatcttgttcctcccgtaagccctcagagcctgtgatgtcagacaccttgtt

SEQ ID NO: 30911 - DNA, 201 bp, Homo sapiens
agacactaaagtgcacaagcttcaccacgacttaggaggcctgagattaggctgcccgaggtgagtactgatgtggcattgacaggacccctctgggacaygtggagggcagaggagaacccactgtctctaaaactctgacttcggtccagaccaggttaccctgagggagatttcccagctccccttggtttgagggga

SEQ ID NO: 30912 - DNA, 201 bp, Homo sapiens
gttttatggaagactggaattttaaaacattgcgtgcatcctaggcaatacatttgtgacttaaagaaacattttgaatgagacctccttttttgtttatracataaaacacgtggggactatacgtgcgtattctccccgcggaattcagtcagacagtgaacaaattgtttgctttgtaaacgtccttatagacttggc

SEQ ID NO: 30913 - DNA, 201 bp, Homo sapiens
tgccttgcagaagagaaggagggaatgagtgagtggagggcagtgccagagaactcatgcgtttccatgagatctttagtcccaccgtcgaggagacatcygcagagcagaaggagacagtcagggcaaaataaaggaagtcacatttgccaagacaagagctgcaagccagtgatctcggggctacctgaatggtaggct

SEQ ID NO: 30914 - DNA, 201 bp, Homo sapiens
gaaggagacagtcagggcaaaataaaggaagtcacatttgccaagacaagagctgcaagccagtgatctcggggctacctgaatggtaggctcaaacaggyacttgggtttaccacatggccctgaacaaataaggaaataatgttcacatcagtcagaatcttgagaaatggacagaaatgaagaatctgcacaacccaa

SEQ ID NO: 30915 - DNA, 201 bp, Homo sapiens
atggagtgcagtggtgcgatcttggctcactgcaagctccgcctcccgggttcacgccattctcccgcctcagcctcctgagtagctgggactacaggcayccgccaccacacctggctaattttttgtatttttagtagagacgaggtttcaccgtgttagccaggatggtctcgatctcctgacctcgtgattcgcccg

SEQ ID NO: 30916 - DNA, 201 bp, Homo sapiens
gatggagtgcagtggtgcgatcttggctcactgcaagctccgcctcccgggttcacgccattctcccgcctcagcctcctgagtagctgggactacaggcrtccgccaccacacctggctaattttttgtatttttagtagagacgaggtttcaccgtgttagccaggatggtctcgatctcctgacctcgtgattcgccc

SEQ ID NO: 30917 - DNA, 201 bp, Homo sapiens
aatgtttaaggttcatcccctccccaccttggggagttcctttggcagcatcttctgaagggtacttctcctagcccaggggcagaaagatccagtctttyggggcagctgcggaagaaaggagagcagtcctgtagctcatgaagacattacgaagcacaaagaactgcacagggacagagagtctttagggtctcgagc

SEQ ID NO: 30918 - DNA, 201 bp, Homo sapiens
caggcttagtggctcacacctgtaatcccagctgcacaggaggctgagacggaaggatgacttgagcccaggaaatcaaggcaacattgagctatgattgygcttctgcactccagccagggtgacagactgcgatcctgtctcaaagaaataaataaataaataaacaaaaagaacagctaagcaaaccgcctatgatac

SEQ ID NO: 30919 - DNA, 201 bp, Homo sapiens
ggatggagtgcagtggtgcgatcttggctcactgcaagctccgcctcccgggttcacgccattctcccgcctcagcctcctgagtagctgggactacaggyatccgccaccacacctggctaattttttgtatttttagtagagacgaggtttcaccgtgttagccaggatggtctcgatctcctgacctcgtgattcgcc

SEQ ID NO: 30920 - DNA, 201 bp, Homo sapiens
gacatacacaaatgacgcagccgccctgcttgtgagcaccgatctgcaccacagctatgtccgccctctgccatcccactggccaggtggccatcactccrtgactttcatttgttccccacccaacacctccccctagacaccaaaagcccctccaaggagcaactgctcggtgacataaacagtgcatcaaaatgggag

SEQ ID NO: 30921 - DNA, 201 bp, Homo sapiens
aggggcagagaggagtgggattgaaaatccactgttgaaatatccaggtagataatccactcccaaataacggagtgctgcctgcgcctgtccgtacccartgggtgctctcctctgctggccccaggagtaggcgtctgctgtgacttagagcagattttatgcacagaccttcttccaggcagagaaaaaactaccgag

SEQ ID NO: 30922 - DNA, 201 bp, Homo sapiens
attatttatttatcgaacattcgccttctgaagtttagcaagaactgattcagcattgttggaaggcttccttcacctgataaaaagcaagaccttttgatttttaaactgtgcacgtgcttgtgtggaggtgtggaccccacacacatcagctcatggcctttattctgtgccttatgcaaaggtcacctgcagcagacc

SEQ ID NO: 30923 - DNA, 201 bp, Homo sapiens
atcacacagaacatcgggactgttgcgcccttaggttgaacatcttgcaaatgttcccagtgaagactaattgaaccctgcccctcccctgacctccactsagatagctgatttaagcctcaatgcagaagtgtctgtccgtccctgatagatggtatctttcggaattttgtgttgcagcccgtagggattgttccaaac

SEQ ID NO: 30924 - DNA, 201 bp, Homo sapiens
aataccagaagcacccacctagctaagtaccgacctagacagccattagtgatttacaaaaacatgaagggtggccatctatattaggggtggagaaggasagggggcaagggaaggtggtttctggcaattggtccactgacacacccccagctgctgtgtgggacagaagtcacgtgagtcagatagcaacacccaggc

SEQ ID NO: 30925 - DNA, 201 bp, Homo sapiens
tgtgagcagaggtaaaggctccttgtgttgtcttctgagaactgagcttgtatcttccgcgttccattagacctgcccccggtctaattccatccatggatttcaacaccgtcactcatacagcaacccccaaaatggtgacaactctgcatgtctcaggtggtcagggagaaccagaggccagcacgctcagcacacacc

SEQ ID NO: 30926 - DNA, 201 bp, Homo sapiens
agccacacagttgacttcctcataaccacacaccctgagagaggcggccacatctcccacagacgtctcatgaacaggcagaactgaccccgggaacacayactttcttttaatgacatcgttccatgcccttggaattctgagcaaccttctaggacccccacttatcaggattcttttccaactgggctctagaaactg

SEQ ID NO: 30927 - DNA, 201 bp, Homo sapiens
atattaggggtggagaaggacagggggcaagggaaggtggtttctggcaattggtccactgacacacccccagctgctgtgtgggacagaagtcacgtgastcagatagcaacacccaggctctcatcttgttccatctcatctgtgcctgggcatgtgtacctgtgcacagggggaccaccttctgcaaggtagctgggg

SEQ ID NO: 30928 - DNA, 201 bp, Homo sapiens
acagggtcctgggcaggttcctgcagcctctgctggagtcccacttgtcacctagaacctgtggcacattggaaccctcttgttgctagaaagttcctccstggaatacagcctgcctcccagggagttctcaccgggctgttcctgagccacacagttgacttcctcataaccacacaccctgagagaggcggccacatc

SEQ ID NO: 30929 - DNA, 201 bp, Homo sapiens
ctgcaaggtagctggggtgcgtgttagttctcagaatagtgccagctgtgtgtccacttcatgatgacatcaagaagatgggctttgggatcctgcccacrcccagctccggggcgctgctgatgtatctgggcaaccccagccaggatcctgggctgcctctatcaccctcacaacctgggggccaggagccagcaatga

SEQ ID NO: 30930 - DNA, 201 bp, Homo sapiens
ggcccatagaggggggtcacagaacacagctgctagcattttgtatgaccatgcattgttaacgtttgattcacacagcatgatgttcaggccctgtactygaccacaaaaaagatttaagatttccatccccaaggacagagatttatctcatttattttccacttaatacctcagcaaaatgcttgtccctgagtaagt

SEQ ID NO: 30931 - DNA, 201 bp, Homo sapiens
caggattttaaacactgaaaatcattctgtaagcctggaggtgctgtttcaggctgatattccccccagcctcatcatttcccggtttcatgagatccacrttaagtcagatgccaagcatgaccatgcccatttatcctcgtggagcctgatgtggtttgtggtttatttggttatttaggtgccaaaggcctccgagga

SEQ ID NO: 30932 - DNA, 201 bp, Homo sapiens
acatttatttaggatgcccttgaagtactgttaaacaaaggaagctgaattggctggctttgctgcccggcatatagaagaaggatttgtgctgggtggtrcaactgtgacctgcacttcctcttccatataccttgccctgctaataccatgttggaattatttccttaatttctaaagctgcatgtgcggaaatggctt

SEQ ID NO: 30933 - DNA, 201 bp, Homo sapiens
atattggatattatcattcttatggttccagtccgtaaacaggattttaaacactgaaaatcattctgtaagcctggaggtgctgtttcaggctgatattmcccccagcctcatcatttcccggtttcatgagatccacattaagtcagatgccaagcatgaccatgcccatttatcctcgtggagcctgatgtggtttgt

SEQ ID NO: 30934 - DNA, 201 bp, Homo sapiens
attggaattgccctacacagttgctgccttggaaattcagacttgaaatgagaaattaatggaggattgaattgatgtttctttcatgagcctgtgattgytgtaaaaagaggtgtgtcaaatgcttggtgagacccatgcaggattctttaaagaacactgaggcaaaccagaccttatagggaaaaacaggcctcacgg

SEQ ID NO: 30935 - DNA, 201 bp, Homo sapiens
cacttctggagcccacacactgggccaagcaggattcaagtgtttgaaaagagtcacctcatagtcctcgtggcgtcctcatgaggcaggcgatccttctycccactttacaggtgaggaaactgaggcacagaaagttgtccacggtcacacagatagaatggtagggccaaaatttatagccaagcatctgaccccacc

SEQ ID NO: 30936 - DNA, 201 bp, Homo sapiens
agagatttgaggaggctgcagggtgggaggaaactcatcatttttattaaggagttgacaagaataggatcgcggcttgtctttgatttgcgttaagcagkaaaatgaagggataggctggagggctgagagcagggtggcagcaggtgcgtgcagtcggtatgcctctgctggagggagtggccaggccacagacatggg

SEQ ID NO: 30937 - DNA, 201 bp, Homo sapiens
atcagaaaacacttctggagcccacacactgggccaagcaggattcaagtgtttgaaaagagtcacctcatagtcctcgtggcgtcctcatgaggcaggcratccttctccccactttacaggtgaggaaactgaggcacagaaagttgtccacggtcacacagatagaatggtagggccaaaatttatagccaagcatct

SEQ ID NO: 30938 - DNA, 201 bp, Homo sapiens
tcaagatgagatttcagtggggacacaaaacctaaccgtatcaccagctaacattagtgttagtgtattttatgtgtggcccaagacaattcttcttccartgtggcccagagaaggcaaaaaattggacactcctgctttcgatgttgtgaaatgcctaataggaatatttcattctctcacaagagtgaatataggaga

SEQ ID NO: 30939 - DNA, 201 bp, Homo sapiens
ggagtggccaggccacagacatgggacaccacatagcagtcctcacactcctcctctgaggtcctcagggaggcatttgtgtctcgagactgtttcagagrcccatgtcttctcaggagatgccaaggctcaggtcagagacttgttgagtttttaagagactgtctgaagcacacaccctgccctaataagtcaatattt

SEQ ID NO: 30940 - DNA, 201 bp, Homo sapiens
ctgtgtgtgggggggagggctgtactagctcacctgtgtgggggctgagggctgcactaggtcacctgtatagggcggagggcagcactggctcacctgtrgaatgaaggttgtactagcttacctgtcaggggagaggaggcctgcgctgagactcggctgatcagaaaggggagaaaagagggtcactctgattgccat

SEQ ID NO: 30941 - DNA, 201 bp, Homo sapiens
tttgaaaagttgggtgctaacgctgaaaataatttcttctgttttcatcctaaggggaacgaggcccacctgggagcccaggacttcaggggttcccaggyatcacacccccttccaacatctctggggcacctggtgacaaaggggcgccagggatatttggcctgaaaggtaagcaggacttatacatctgtgcttcga

SEQ ID NO: 30942 - DNA, 201 bp, Homo sapiens
acactataaatcaaagtaaaagaaaccagagagaaactgagcaaaaatagctgccaagagaagagggaacgagtgctcggggcgggttggaggcagataaygagaaggcaagaaaattctttgtctttggctcctgctgtcagctcagaggggtcatcttgagatgaaaaagaaaagtccccagccttggggaaggaaagg

SEQ ID NO: 30943 - DNA, 201 bp, Homo sapiens
agatttgaaaagttgggtgctaacgctgaaaataatttcttctgttttcatcctaaggggaacgaggcccacctgggagcccaggacttcaggggttcccwggcatcacacccccttccaacatctctggggcacctggtgacaaaggggcgccagggatatttggcctgaaaggtaagcaggacttatacatctgtgctt

SEQ ID NO: 30944 - DNA, 201 bp, Homo sapiens
atatgggtgggatggcgagtggaggaggggccagaaattcgtaattgcttctctctttgtcagctgcataattaactcaattctaccacaatttattaaamgtcccacttcaagagaatggttaaatctcgctggaaagaaagagccacattatgctctgaagctccaagtttcagaaaatattctttttgtgaatatata

SEQ ID NO: 30945 - DNA, 201 bp, Homo sapiens
accccgccctgagggcctccccagccccaccatgagatgttccttggcctgagggcacctcccatcactgtctcgctcgctaggctctggtccaccacagrtgatggtgtggagggaaaatagtagatttgaaaagttgggtgctaacgctgaaaataatttcttctgttttcatcctaaggggaacgaggcccacctggg

SEQ ID NO: 30946 - DNA, 201 bp, Homo sapiens
atcacatcattagagagttaaggaaccaaactctgacccgagatctggagccaacacttaactttccctgaggggcatcctttaaaatctgggtatgatgwtgcaccttgaaactcagttgttcaaaattattctttctttctcaacctttaacttccacatcaactctttctctccctaaacaaaatcactaaaccaaag

SEQ ID NO: 30947 - DNA, 201 bp, Homo sapiens
tgtgcaggaggcaccgctgagcaggccagcctctctcagggcgacttctaaggcccatacgagagcaaaggcaggtctgctgtggcttacggtggtctgcrccaacatagcagcacagggtatactggcgccccaggcaactgggaatcaagccagatgcacaaatctgcccagggcttcacctcccagaaggatgaatga

SEQ ID NO: 30948 - DNA, 201 bp, Homo sapiens
ctgagaattggagagaagcatgggggtgaatgagaagtgcctcttcggttgagcctctgtctctcatatagaagccgacggtttgtaagggatccctttgsttgcgttgaatatgcagaaacccctatgaacatcctaggttagagaaggagagcggacagtgggctggcttcccacgctgttgctgctgctgctttctgt

SEQ ID NO: 30949 - DNA, 201 bp, Homo sapiens
tgtggggtctaagaccacctgcatccccagcttgagggacagttctaatctctcctccaactggcactgcggcccttccggccctcggcccctcccagagyggctgcccctcctgccaggacctcaccacacagcgcccaaggtgtcctgtgtgctcagacttaatgctgtgttcacccccaggctttccagggctgactg

SEQ ID NO: 30950 - DNA, 201 bp, Homo sapiens
tattgaatttgtatgtggggtctaagaccacctgcatccccagcttgagggacagttctaatctctcctccaactggcactgcggcccttccggccctcgrcccctcccagagcggctgcccctcctgccaggacctcaccacacagcgcccaaggtgtcctgtgtgctcagacttaatgctgtgttcacccccaggcttt

SEQ ID NO: 30951 - DNA, 201 bp, Homo sapiens
aactctgcaataaaaggtaagtaaatctaaagatggttaaaagctatcactcttaaaattatttcttctccattagggtgaacctggagagcctggattgktcggtttccaggtaagtttatttttattggacgatattccaaacaaaagtttaagagcttcagaactccaagtaccagtttacctctcttaaaaacattc

SEQ ID NO: 30952 - DNA, 201 bp, Homo sapiens
tgtggcttcaaaggaccagtcacttctctgcctgaactcttgccctttgctacatcattcatgttcccagttggcccctcacacctgctcttcagcatccygggttctcagcagttcctacctggggccctgcctgccatccctccactgtcattcagcctgctttaaatgtctcaggatgactaatgtcactgggatgtg

SEQ ID NO: 30953 - DNA, 201 bp, Homo sapiens
cccctatgaacatcctaggttagagaaggagagcggacagtgggctggcttcccacgctgttgctgctgctgctttctgtgtttactcagcacccgggaaygccaagaggctcatctctccaggcactgcctcagggtcctctccagacgtctatttggataatagggcgacaattaaaactacacgctattttctctctg

SEQ ID NO: 30954 - DNA, 201 bp, Homo sapiens
tggacgatattccaaacaaaagtttaagagcttcagaactccaagtaccagtttacctctcttaaaaacattctcccgctgcctatccatagggacctccyggccgccctgggcatgtgggacagatgggtccagttggagctccagggagaccagtaagtacctggacacaggtgcccactctgggaccatcgtccggtc

SEQ ID NO: 30955 - DNA, 201 bp, Homo sapiens
tgctccagacactacttgaaaagggaaggtttctgggactcctggcaccgcggcctctcctctgcccaaatttcaagatttatttttactcgttgaacgamaaagagaatgagccctgtactctgtcatgctccaaactgctgccccatttttagaccacagagcaagatgaatgctgttggaaggaatgtgtttatgaga

SEQ ID NO: 30956 - DNA, 201 bp, Homo sapiens
tacttgtccctgctgatagacagtcactcaactagtaagacagaagaaaccccgacagtgtacttcttacccaagcccaggtgaagcagaactttgcttcraaatcttttccctgcttagaacgataccttatgccttcacttatttaatctttcattcattcatttgttcacttttgaggtgtcttttccttggattcat

SEQ ID NO: 30957 - DNA, 201 bp, Homo sapiens
gcggtcaacattgtcaatttcctccaatcacacccaaccctggaagctcactcgtgcctgctgccagcttaggagctttcctcagtgctgatggcatggasagaaacaaccacctgggctggggggagacctgagaattggagagaagcatgggggtgaatgagaagtgcctcttcggttgagcctctgtctctcatatag

SEQ ID NO: 30958 - DNA, 201 bp, Homo sapiens
agccctcaagcgcagtctgcatttccccagccgcagccaggcagctgccggcaccttgggaggcactgggagcacgctggtgacttctcttggccagtagrtgtgggcgtggctcggtgctccagacactacttgaaaagggaaggtttctgggactcctggcaccgcggcctctcctctgcccaaatttcaagatttatt

SEQ ID NO: 30959 - DNA, 201 bp, Homo sapiens
ctatccatagggacctcccggccgccctgggcatgtgggacagatgggtccagttggagctccagggagaccagtaagtacctggacacaggtgcccactytgggaccatcgtccggtcatcccttccagatgccacttcttcaatggttgactccagatgagagctttaagaacaactatgatgcttataggcgtagcag

SEQ ID NO: 30960 - DNA, 201 bp, Homo sapiens
gggataacaggcgtgactggagtccaaggccctcctggacttaaaggacaaacaggtaaaatctcccgcagccacacagccttcctcaggcaggccctccrgagaccccagaacaaaggcggtcaacattgtcaatttcctccaatcacacccaaccctggaagctcactcgtgcctgctgccagcttaggagctttcctc

SEQ ID NO: 30961 - DNA, 201 bp, Homo sapiens
taccaggtacgcaagttattttccttgtcttcatcttcaacaacagccctgagcctttgtctaggagcccgacttgccaaacagatcaaattcagtaacawccagaaagcacttgatagtgaatgaggtcttcaagtccaatgtgcaagaaagaccgtcgtttttaattaagttaaatctgaagataaaatcaggaagtct

SEQ ID NO: 30962 - DNA, 201 bp, Homo sapiens
agaagtagtttagccagtctaaaaggatttccattcatcgaatcataaatagagaaaaaaacaatcccttctatccattactaaacctctccattccaaaygtcttcaaacaaagcaattatggtggacaagtatttgaggacagttttttctcataaacagctgcatagtgctatagcatccttgttgattagccaatta

SEQ ID NO: 30963 - DNA, 201 bp, Homo sapiens
cctgctcctctaccgtagccagatttctttaggaaaaaaatgattctttaaaaatctaaaatactgtaaatcctattgggaaataacagttattaaacctmttcatcaggagccaccagatatcaacttaggctgtgcatctttctgccaggtgggtccttatgaccctattagtgactgtctcgcacaactggagatacc

SEQ ID NO: 30964 - DNA, 201 bp, Homo sapiens
tcacacccacggactctatctcacgcccaccggctctatgtcacacccaccggctctatctcacacccacggggctctcacgcccagcactctggcgtccyctttccttgacatccgcctgctcctctaccgtagccagatttctttaggaaaaaaatgattctttaaaaatctaaaatactgtaaatcctattgggaaat

SEQ ID NO: 30965 - DNA, 201 bp, Homo sapiens
cagctgccttccctccatccgcagatgggacttgatgattttcttttttcttttttttttttttctcttttgagatggaatctcactctgtcgcccaggctggatggagtgcagtggtgcgatcttggctcactgcaagctccgcctcccgggttcacgccattctcccgcctcagcctcctgagtagctgggactacagg

SEQ ID NO: 30966 - DNA, 201 bp, Homo sapiens
agctgccttccctccatccgcagatgggacttgatgattttcttttttcttttttttttttttctcttttgagatggaatctcactctgtcgcccaggctggatggagtgcagtggtgcgatcttggctcactgcaagctccgcctcccgggttcacgccattctcccgcctcagcctcctgagtagctgggactacaggc

SEQ ID NO: 30967 - DNA, 201 bp, Homo sapiens
gctgccttccctccatccgcagatgggacttgatgattttcttttttcttttttttttttttctcttttgagatggaatctcactctgtcgcccaggctggatggagtgcagtggtgcgatcttggctcactgcaagctccgcctcccgggttcacgccattctcccgcctcagcctcctgagtagctgggactacaggca

SEQ ID NO: 30968 - DNA, 201 bp, Homo sapiens
ctgccttccctccatccgcagatgggacttgatgattttcttttttcttttttttttttttctcttttgagatggaatctcactctgtcgcccaggctggatggagtgcagtggtgcgatcttggctcactgcaagctccgcctcccgggttcacgccattctcccgcctcagcctcctgagtagctgggactacaggcat

SEQ ID NO: 30969 - DNA, 201 bp, Homo sapiens
tcccaacactttgggaggccaaggcaagaggattgattgagccgaggggttcaaaaccatcctgggctacatagggagaccccatctctacaaaaaaaaawaataataattaactgggcatggtgctgtgcacctgtaatcccaactacatgggaagctgaggtgggaggattgcttgagcccaggaattgtagattgcag

SEQ ID NO: 30970 - DNA, 201 bp, Homo sapiens
agggtgggtttgatcacacacatccccttcccaagaggcgccaggaacggggataaaaaagtgtggcagatgggttttgtgacatggctgaggaacctcakcccttcaattatcagaaaacacttctggagcccacacactgggccaagcaggattcaagtgtttgaaaagagtcacctcatagtcctcgtggcgtcctca

SEQ ID NO: 30971 - DNA, 201 bp, Homo sapiens
tgccccaagctctttgacataagggtacttctggtagaatttttttaaaacttaattacttcctgcaggcttcagaatgtttgagcatgaaaacaaatggmagcaggcttactttcgatgtcttattaaggtctttaccatgatcaatgttacctttatgacaagcttcatatgccttgttaggcagaatgttttggatgg

SEQ ID NO: 30972 - DNA, 201 bp, Homo sapiens
ccggggaagcatgtcacttgggtaactcagtgtcacaagcaccagacacagccagagctgttctcacttgtttcttctggaactaagtccccacctatgcwagatgaatagtgcagacaggtgttctagatgcttcctgctgcacaaatcatgccctcactgcttcccgtgataaactgtagagagcgacaccagtgtagt

SEQ ID NO: 30973 - DNA, 201 bp, Homo sapiens
aagcatcaacattccaagtaactacttcagtttcagttccgctcaccagtgctacaggagcaccgtgcagcgggtcctgcttccattcgactggctgtgcrggacggccacaaacacacgcaggtgcaccctgcgcttctgagcagaactctcggaatgaagtaatgcagacgtccacaaatgagatgtgatttcactgag

SEQ ID NO: 30974 - DNA, 201 bp, Homo sapiens
gtactagctcacctgtgtgggggctgagggctgcactaggtcacctgtatagggcggagggcagcactggctcacctgtggaatgaaggttgtactagctyacctgtcaggggagaggaggcctgcgctgagactcggctgatcagaaaggggagaaaagagggtcactctgattgccatcatctcaaaacgtttaatact

SEQ ID NO: 30975 - DNA, 201 bp, Homo sapiens
tctgataaattagagatggtttcgtctcctctttctaggggaaacatatctttagtaactgagcaaatgctgtccacagtgttattttataattttgaaayaactccacagagttattttataattttgaaataactccacagagttattttaaaaagtgttcgttgagacctagtctcctttgaggaatacatgccacac

SEQ ID NO: 30976 - DNA, 201 bp, Homo sapiens
tgcgtgtccagtgttggcggtgcaggcctggctggccaccactgccgtcccgcctgcgctgcgattctgctgccctgcactccagggtctccgtgggcctrtgagcatcggggaacacagagccagggcttccactcaagcaggaggagggctggaccctgagaggtggctctatgcctgtgtccatcagcctgagaaaag

SEQ ID NO: 30977 - DNA, 201 bp, Homo sapiens
ggaagggcagcgctcagaagcacgcccagactgtctccagccctgctgccccctgctgaggccatctcgcctgctcagcccccaagttcccccacagtccrtgtccctgggttatgaatgtcacctggtgtctgtcagatccccaccccattgttcttgtcaatgagcaggagtggggtggacctgccatcgctgcgaatc

SEQ ID NO: 30978 - DNA, 201 bp, Homo sapiens
tatatgtgcacctttaagtccatcttgcatgtgtgaaggtgtggggagtagtattttgttttatgacacagcctccttgcctttattccctggactcatgyatctaccctaggacacatgcttgtctacaccttcgtttggcaaatgccaggttgtcaaggcaactggaaactcttccctgaattgccctgatgttgttgg

SEQ ID NO: 30979 - DNA, 201 bp, Homo sapiens
ggctgctcttgcagtgatcaagtgtctgccgcctggattctttcctggcatgtcagatttgcagcttccgagaaagtgctactgtcttgcatgacaaagtratatttggctcaaagaaaacactgccaaactgagcagccagtaaattctatgacagcattcaccataattcccaaatgtaaaccagatagtaaagtgtcg

SEQ ID NO: 30980 - DNA, 201 bp, Homo sapiens
aaggccgcctgcgtgtccagtgttggcggtgcaggcctggctggccaccactgccgtcccgcctgcgctgcgattctgctgccctgcactccagggtctcygtgggcctgtgagcatcggggaacacagagccagggcttccactcaagcaggaggagggctggaccctgagaggtggctctatgcctgtgtccatcagcc

SEQ ID NO: 30981 - DNA, 201 bp, Homo sapiens
ccacagtccatgtccctgggttatgaatgtcacctggtgtctgtcagatccccaccccattgttcttgtcaatgagcaggagtggggtggacctgccatcgctgcgaatcctttacagcctgcagcgctgcctgccaactcttcacaaccattagcacccactaacaatccatttcccctggagctcttcactctaaagat

SEQ ID NO: 30982 - DNA, 201 bp, Homo sapiens
tatttcagtatataatggcatctgcatagcagtgtactgttacacgatgccagaggtcttttcagtgaggttattaggaggggatttctaaggatccccargactctgtgatttcatgaattcacagcacaggcattgagacctttttatttcccagcgtccctagtgaaggaaacaccttgagtctctttctatactttg

SEQ ID NO: 30983 - DNA, 201 bp, Homo sapiens
tccccagacaccaccactgacagccccttgggtctcacatcacactcatgccaacatacacacaaagacgtgtagcttcacatgcatgtaacggagcaacraaagaaatgtgtctgtgctgctctgcccagtgccccttagagaatgttccaagtcggcaggtacacatctgcctcgttctttaaagctgcagagaatggc

SEQ ID NO: 30984 - DNA, 201 bp, Homo sapiens
ctcagcccatgtgagaaagagtctgggtgcccttcacagagcccatgcctaaggccgcctgcgtgtccagtgttggcggtgcaggcctggctggccaccaytgccgtcccgcctgcgctgcgattctgctgccctgcactccagggtctccgtgggcctgtgagcatcggggaacacagagccagggcttccactcaagca

SEQ ID NO: 30985 - DNA, 201 bp, Homo sapiens
tcacctggtgtctgtcagatccccaccccattgttcttgtcaatgagcaggagtggggtggacctgccatcgctgcgaatcctttacagcctgcagcgctscctgccaactcttcacaaccattagcacccactaacaatccatttcccctggagctcttcactctaaagatagaagaccaaaaaatagaagtgtcctcat

SEQ ID NO: 30986 - DNA, 201 bp, Homo sapiens
gggttgtacaaaagacagaggcaaacgatacccgccccccaccccggggcctggactgtgggatccactgtgcacgcgcagcactcatgtggcctgaaatmtggctgtacctgtacctctgggtgctgcgtgatgcttgacactgtcatttcacctgggccgaggcccgtgctgccaagggaccacacagccagtcactgg

SEQ ID NO: 30987 - DNA, 201 bp, Homo sapiens
tacactgccagaagttaacttctaatagagttcatacattttgttctctctcatgttttttctccgtcacctattcttcacaccttttaaatttaagaagyatgtatgtatacatctgtgcgtgtgtgtatatgtatccttggcagcagtcctcattcctttggtgattactaaacatttgaggactggtaaactgtgagg

SEQ ID NO: 30988 - DNA, 201 bp, Homo sapiens
taaacaaggctagagtgttttgtctctagcacctgggaggacctgggcttctatctgctggcccaggccatctctcagcccatgtgagaaagagtctgggygcccttcacagagcccatgcctaaggccgcctgcgtgtccagtgttggcggtgcaggcctggctggccaccactgccgtcccgcctgcgctgcgattctg

SEQ ID NO: 30989 - DNA, 201 bp, Homo sapiens
accaattatccagcttgagagttttcaactgaactgaagttttattaatgttcatcataatcgtgtcacgtccaattttagtacttggtatgaattagagraaaaaggagaaaacgatggcccgttgggtcagcatgcattgtcatgatacccagcattgattgacagcttacggtggtcccggggcgatgggagcacttt

SEQ ID NO: 30990 - DNA, 201 bp, Homo sapiens
aggtgctcaatcttccgagtcaagtttcccaccttttctacaacccaggccagggtgggatccggggctgggaatggccaacccgcaggggcagttgtgtsctgcaggaatccaaggtaccctcagaaatgacggggacaaaggacccgccaattgctgtttctttcaccattttagacgaagagaaatgggaaaaacgta

SEQ ID NO: 30991 - DNA, 201 bp, Homo sapiens
tggtcgtgtccagcatctcagcacaaactggtcttgcgcctacagggagcccactgtcatttgccactatagaaaaaggagtctggtagctgacacttagytggggccaggctagaagagaaaattcagccatggctgcaggggaacgcccccaggggcagagatggaagcctcgtgtttaggactggaaaggggttgcac

SEQ ID NO: 30992 - DNA, 201 bp, Homo sapiens
gcctaatacttaatggctttattcagacctaatttgaacatatcacaagtatatttcaacagaactttcttcttcacagaacttttctggaaaaaaaagtwtactgtcaaaatgtttctcttattagcaatcaaaacccagtttggaaaagtgagtggtttgctctgaaaaacaacaaacagggcttgtgggaattcaaca

SEQ ID NO: 30993 - DNA, 201 bp, Homo sapiens
ctttcctctggtcctgcatcccccaccccagacatggtcgtgtccagcatctcagcacaaactggtcttgcgcctacagggagcccactgtcatttgccaytatagaaaaaggagtctggtagctgacacttagttggggccaggctagaagagaaaattcagccatggctgcaggggaacgcccccaggggcagagatgg

SEQ ID NO: 30994 - DNA, 201 bp, Homo sapiens
aacatatcacaagtatatttcaacagaactttcttcttcacagaacttttctggaaaaaaaagtatactgtcaaaatgtttctcttattagcaatcaaaayccagtttggaaaagtgagtggtttgctctgaaaaacaacaaacagggcttgtgggaattcaacagaagaataacccacggcttgtaagaatattaaaacc

SEQ ID NO: 30995 - DNA, 201 bp, Homo sapiens
gatttcattacacaatgaaattaaacttttatttacatcagaaccaagatgaattaaatcattaagttactctgatcccagaatggtagccggtttgcacrgctcgtgcttttgcccttggggatccccaaggccgtgggactcagtgtttaggattgcttgggctcatcttttctcctttctgtccccaggttgcatagg

SEQ ID NO: 30996 - DNA, 201 bp, Homo sapiens
gcttcatttcacagcttcactaaatgaaacctaatggtagacatgcctttgactagacataaagtaagcattctttctagagaaaataaatagaaagagargtttctttctatttccttatcagcttcacctctttcttagaaatgattgctcgtctggacagcatttgtcatgagtttgttttcactttaaagcatgaag

SEQ ID NO: 30997 - DNA, 201 bp, Homo sapiens
agcatccacactgacttgcagggtagcagccagattaactcggtttgcacccaggctactgccctgcaggagggaatcaattgtttgccagcacagtgccwgtttttatttgactagactggcttagtttgcattttatacgaatattttgatttcattacacaatgaaattaaacttttatttacatcagaaccaagatg

SEQ ID NO: 30998 - DNA, 201 bp, Homo sapiens
aagtctcctttcccagttgaggaaactgaggccctccatggtccagaggtgcgcctgcggcctcatgagacagaaccaggccctttcctccgggtccctcrcctcaggagattctctgagatggagaaagattctggaattacagccaaatcaggaggccttttaagattgatttaggaagagctaagagaaaatactaaa

SEQ ID NO: 30999 - DNA, 201 bp, Homo sapiens
taaagtggggagggaagaacagtcattaatcaccttcatcacgttttcacctgaagcaaatggagttctcctactcagttccacctccacctgctagttcmcctttcctcggctgtttctgttttatgtggttcaatttttcaataaactacatcatcttctactctatatatcatcaatttcattatcaagaaacatatc

SEQ ID NO: 31000 - DNA, 201 bp, Homo sapiens
gagccaatttcagacctgcaagtgctgttaggtattttaaaacaaattattcttgttaggaatataacaaaatagaagttgcaaaactcacaaagtcccartggaaagtcctgttcttagccgtcttttttgcatgtaacaggtgacatcggggacactataaatttaccaggaagaccaggcctgaagggggagcggggc

SEQ ID NO: 31001 - DNA, 201 bp, Homo sapiens
agcatgtgagccaatttcagacctgcaagtgctgttaggtattttaaaacaaattattcttgttaggaatataacaaaatagaagttgcaaaactcacaamgtcccagtggaaagtcctgttcttagccgtcttttttgcatgtaacaggtgacatcggggacactataaatttaccaggaagaccaggcctgaaggggga

SEQ ID NO: 31002 - DNA, 201 bp, Homo sapiens
agcaggccagggcctgcctgtgtgtctgtctggcccaccttggtgtacagaattcttcaggggtcttcctcccctcactcccaaaatctgcagctgagagkatcttctagccagtctgtgtgtgctattcaggtcactttaaaaaagaaagatgccagccaggtgcagtggctcttgcctataatcccagcactttgggag

SEQ ID NO: 31003 - DNA, 201 bp, Homo sapiens
cctaatgcatagtaactataagtcacttgtttatacagctttaatgtgttaactgttaaaatttaaatattaatattttaaataagtctctatttgtataygtgctgactcatcggattctcacactcacttagagataagatggttttctatgcacacactcacattagaagaatgtagggattttttccatcaatattc

SEQ ID NO: 31004 - DNA, 201 bp, Homo sapiens
acaatggccctagagggctcattgcaagtagggaagagcagaaaaaggcacttgctgaggcttgtgtagctctctggccactcccaccactgcacaatgasctggaaggtggattggccactgcgagagctcctgactcgctcattccccacatatgttagtaatcagataaataggccttaacttacacaaggagcgatt

SEQ ID NO: 31005 - DNA, 201 bp, Homo sapiens
tggaagctgcttcatatgaggcagagcctccgtgtcccacctcacgcactctccggctcctgtaaaggggagatcatggagccgggggcatttgggccccrtttgtagtcttgcctggccctgacccatcagcacctgcctagttccgcaggcacggagaagactgcaccttctgctcttaggtggctgcaccagggcttc

SEQ ID NO: 31006 - DNA, 201 bp, Homo sapiens
cagcatttgaacgatacttaggaagcaaacccttcgaaccactgggaagaatgttcccagtctgacctagacagtccttagacaaggaattcggtcccgcrgtgtatttccttctccacaatgtgatcatggtggagagctccacattggtgtcggtggacacagtcatgaatggaagctgcttcatatgaggcagagcct

SEQ ID NO: 31007 - DNA, 201 bp, Homo sapiens
aaataattgaagcaaatgccctctgcatgaaaagtcgcattaaaacccaccccagtgggcacttcctgaatgcagtattccctgcagacagcatttgaacsatacttaggaagcaaacccttcgaaccactgggaagaatgttcccagtctgacctagacagtccttagacaaggaattcggtcccgcggtgtatttcctt

SEQ ID NO: 31008 - DNA, 201 bp, Homo sapiens
ccgcacatccctgcagctgctcctgggtgtgcccaccccacccccactgggatttgagctcccctcaactaatgggctttccatggggaatcaggagggtrggaattgtgattccattaaaatcatttgactcaggaaaagcttttcgaaataatccccaaggaccaactctttacagaaactcctcccccgccttcatat

SEQ ID NO: 31009 - DNA, 201 bp, Homo sapiens
gagtcgaggccaggccgagtgcagcctcaggtgttctcctgagactgacgcatcctgcttgccttggtgaggccaggttattaagcagatagataattcawtgtgtgcctagaagacatatcctaaaagttatctttcttgctgagatatggaactagacctgtcttcactcagtgatcgttgatctttagaatggccagt

SEQ ID NO: 31010 - DNA, 201 bp, Homo sapiens
tgcctctcacgctgtaatgtgcctgcaagcagcctgggccccttggtaaagcacagatgctagttctgcaggcccaggagggcctgaagttctgcagttgyctcaagctccccagtgacatggtagctgctggcccaggggccctacttgtaattcaaggcccccgaggaccttcctgaaacccccttggagagtcgaggc

SEQ ID NO: 31011 - DNA, 201 bp, Homo sapiens
atattagttttggaaactttacttttttataaaaatcatcgtttttacattacatatttgtttcatgttgcaaattatcggaaggaatgcctctcacgctrtaatgtgcctgcaagcagcctgggccccttggtaaagcacagatgctagttctgcaggcccaggagggcctgaagttctgcagttgcctcaagctcccca

SEQ ID NO: 31012 - DNA, 201 bp, Homo sapiens
cactatcacgagaacagcatgaggatagccacccccgtgattcaattacttcccaccaggtccctcctacgacatgtagggactttgggaactacaagtcaagatgagatttgggtggggacacagccaaaccgtatcacagctcactgaagctagagtctgcaacctcacctatttctgcagctgacattcgagcatcag

SEQ ID NO: 31013 - DNA, 201 bp, Homo sapiens
tggggcttgggtcctgtgtcctgggtcctgcatcctggggcggatttggcaggcaggaccactgccttgtgggggaaatcaacccaggtggctgaggctcragttatgagtgaccgttgacaaaaatgtcctgggagacggcagggagggcctctgtccagcttctggactggagcccagagcaggtttgatccacgtgga

SEQ ID NO: 31014 - DNA, 201 bp, Homo sapiens
ctgctgtgccacccacccactcggaggtcccacagcctttctagggcttcctgttccccctgtcaaatggggatggcgacactgacctcctggagctgacraggaggttgcaggcgactgtgaaacactcagtaccatgtcgggcacgcagaatatctgggaactaaaatagaaaccccaaacggggagatcttaactttc

SEQ ID NO: 31015 - DNA, 201 bp, Homo sapiens
gtccagggagtgaaatggggctgcttcttccatctgcaggggccagaacccagggacatgctcttagactacagtctgcagagaccatatactcacgatcragggccagcaccacctggggtccaatctcagctcccactcattcactctgaggccttggtcaactgacatgacaaactgtcaattagtttctacaatgca

SEQ ID NO: 31016 - DNA, 201 bp, Homo sapiens
aagtcaaataattcattttgaaatcgcaggctatctccattgctggcagatgcttccagacaaaagaaaagcatccacactgacttgcagggtagcagccrgattaactcggtttgcacccaggctactgccctgcaggagggaatcaattgtttgccagcacagtgccagtttttatttgactagactggcttagtttgc

SEQ ID NO: 31017 - DNA, 201 bp, Homo sapiens
gggaagcatctaggaacgtttcctttgccctgtgtcccgatggaggacgtgccaagcccacacgttgccatgcctgcccattgctgtgacccctggtgacyacagctgccaccgcccatgcccccaggctcctgtcccctctgacacagcttccggttggctggagggcttgcgctggacgccccaccgcctggcagcctg

SEQ ID NO: 31018 - DNA, 201 bp, Homo sapiens
gaaagtaaacaaagtcacaaaggagaagtcaaataattcattttgaaatcgcaggctatctccattgctggcagatgcttccagacaaaagaaaagcatcsacactgacttgcagggtagcagccagattaactcggtttgcacccaggctactgccctgcaggagggaatcaattgtttgccagcacagtgccagttttt

SEQ ID NO: 31019 - DNA, 201 bp, Homo sapiens
atgctgggctgccagcgggaagcatctaggaacgtttcctttgccctgtgtcccgatggaggacgtgccaagcccacacgttgccatgcctgcccattgcygtgacccctggtgactacagctgccaccgcccatgcccccaggctcctgtcccctctgacacagcttccggttggctggagggcttgcgctggacgcccc

SEQ ID NO: 31020 - DNA, 201 bp, Homo sapiens
cacaataccccagctggagtgtcactgctcccagccacaccaaccagaagtgcccacagccttgatttaattttgcaaggtggctgattgctgtggttcaytctgaaagtaaacaaagtcacaaaggagaagtcaaataattcattttgaaatcgcaggctatctccattgctggcagatgcttccagacaaaagaaaagc

SEQ ID NO: 31021 - DNA, 201 bp, Homo sapiens
gcaagccacgtttgatttccatggcacaacatagtggcctggtgagcactatacattgcatgaataacaacctggtagagacggagagacatttaaccaawcccctcttgtcagaaatcctttttcactggaaagcaccagtgcattccaactcagctccacaggcacgtgtgctgccaggagggtccaggcagaggaggc

SEQ ID NO: 31022 - DNA, 201 bp, Homo sapiens
tgactcttgtttatttttttaatgtttgctcaaacttatggggatagtgccatgttctgcgtatccacgctaggatgtggcctttttgagccatggaagaygctgtcagaacagggtccggaaaaaacaaataggacactcgttattttcttgttgatttgattagccatatgtaccatttacaatactcttgggggacaa

SEQ ID NO: 31023 - DNA, 201 bp, Homo sapiens
agaaaggttattaagttgattggaacacagcaaagtaggtggtttgttagaaactcggaggacagaactagggttccttattatctgagaaagctggataratgtccaagacaaacgaatgcagttgacaagggaagtatttgatcaaaatgcaacataattcagaaatgctgggctgccagcgggaagcatctaggaacg

SEQ ID NO: 31024 - DNA, 201 bp, Homo sapiens
ctcttgcagtatgcgtgggataagaaatattaataatatgtgcaagccacgtttgatttccatggcacaacatagtggcctggtgagcactatacattgcrtgaataacaacctggtagagacggagagacatttaaccaaacccctcttgtcagaaatcctttttcactggaaagcaccagtgcattccaactcagctcc

SEQ ID NO: 31025 - DNA, 201 bp, Homo sapiens
cagagcattcatttgggttttgaaaataatttaaatcctaaagtatttctgttttaactctaggaaagatatgattgggtcaataggaaattaaaggtctyacccttgttgctgaatatagggttggtgttcagaataacccccatcagccataagaacaattagaccttgcccacaaaagtcaatgttcagtcatccaaa

SEQ ID NO: 31026 - DNA, 201 bp, Homo sapiens
agaactctcatttggtctgctggttaagctcttgcagtatgcgtgggataagaaatattaataatatgtgcaagccacgtttgatttccatggcacaacakagtggcctggtgagcactatacattgcatgaataacaacctggtagagacggagagacatttaaccaaacccctcttgtcagaaatcctttttcactgga

SEQ ID NO: 31027 - DNA, 201 bp, Homo sapiens
ctggatccatagctcagaattccgggaaatgggaaaggaaacagggaagtcgaggcgatctttaacattagtatatattttaagaaataaactgaattttyacacagggtgatggcatcaagggccctccaggggacccaggctatccaggaatacctggaacgaagggtactccaggagaaatgggccccccaggactgg

SEQ ID NO: 31028 - DNA, 201 bp, Homo sapiens
agaacaatgctctaacattattttaggcattctattgttgcttgagctgactctagcccaagaactcaaaataccaaacctccttgtgagacattttaatraggttaatccttcttcaatttggggaacaattattataacaaatatcatagaattcatcaaaaccactgttgtcatttagccacttcttgatgttcttcc

SEQ ID NO: 31029 - DNA, 201 bp, Homo sapiens
acacagtctgtcactggctcctgtgacctggctgaccatggcactaggttcctgttcatctctgttgtctttctgttctggatccatagctcagaattccrggaaatgggaaaggaaacagggaagtcgaggcgatctttaacattagtatatattttaagaaataaactgaattttcacacagggtgatggcatcaaggg

SEQ ID NO: 31030 - DNA, 201 bp, Homo sapiens
cttgtccaaattagcttcctttcctttaacaacgtagcatctcttaaaataacagccattttaccgatgctaaattataacaacaaaatcatgtgtttctytctccacccacagtagaacacaaaagcctgtgccttcgctgttctggagatgaaggcccaggctgatgcaggggagctggcgggtgggaagagagaaatg

SEQ ID NO: 31031 - DNA, 201 bp, Homo sapiens
gggctgccagcgggaagcatctaggaacgtttcctttgccctgtgtcccgatggaggacgtgccaagcccacacgttgccatgcctgcccattgctgtgamccctggtgactacagctgccaccgcccatgcccccaggctcctgtcccctctgacacagcttccggttggctggagggcttgcgctggacgccccaccgc

SEQ ID NO: 31032 - DNA, 201 bp, Homo sapiens
tactagcctttacattattgttaccttggaacatgctactaatttcatcttgccagggtagtctaaaaattgctcagaaatgctaactgaccatcctcaaratcaacgaatatttctaaattttggccggtggaattatttttctagagcctaaaaagtagtcctttccaccttttgggacattttacgtatttgaaatgt

SEQ ID NO: 31033 - DNA, 201 bp, Homo sapiens
tcacccttgttgctgaatatagggttggtgttcagaataacccccatcagccataagaacaattagaccttgcccacaaaagtcaatgttcagtcatccamattaccatagctgcaccgaatgttaatggactctttttgttgttttttctttttacaatatatctgctaattaggggccccaaggaccaaaagggcagaa

SEQ ID NO: 31034 - DNA, 201 bp, Homo sapiens
cccaccgcctggcagcctggagcaggatgagatgggccccaggccaagagcagcagaaataggaccaggcggccgggctgaggaggcagcagccaagcccygagcccaggcgtgagcctcagatctccccttgctgcggcaaacatcaacagccctcctcacccctgaccaagtcacttcctggtgactttgacgaccagc

SEQ ID NO: 31035 - DNA, 201 bp, Homo sapiens
gaggacagtgcccgtgatgtgcacaaatttgtcatcttgctttttctatgcacgaatcttagaggtcagcgttgtcagtcctcccacacgtggctactacrttcgtgaaattattaaatccttactatgatactgggcctagctttgcttcttaggtaaaaaaggaagacaaaaagtttggataaagcccagagaatcacg

SEQ ID NO: 31036 - DNA, 201 bp, Homo sapiens
tgtggtgctgtgtgctcagtgacaccagccccaggcccaggaccctggagccacccccaactccaactactccgatggacacaggagaggcttctccggcrcccttggtctctctccaaggcttccctgcttgggggagacgtgcagccccatggctcagggaccaggccttcacctgtgttctcctgcgtggtctggagc

SEQ ID NO: 31037 - DNA, 201 bp, Homo sapiens
aaccactttacctattttctttcccacagaggacaaaaataaatgtgtggaactgagcctaggtcctgtgaaaccttttattctccagatgcatagcattmccttggtgacacaatccagttttgtgaaatatatgaaaatattggaacttttcaaaaattgtctaaatttggggggatgtgccatgagaatgtttaaaat

SEQ ID NO: 31038 - DNA, 201 bp, Homo sapiens
acaagccatcactctgggtccctgtcatttaaatagggattcaggcttcaggttgtcagtatttataggcttgattggagggaagtaagccgtatgagcaytttttaaatgaatttttatttctcatttccacttagtgatggatgcacatttttccactaataaacatttgaacttttttcagtttttaagaacatcgta

SEQ ID NO: 31039 - DNA, 201 bp, Homo sapiens
cggggagtgcgtgtataacggggacagatttcagtttaggatgagaaagttctggagctggtcggcggtgaaggtgaatatattgaatgccactgagcagygcacctaaaaatgattaaaatggtaacttttatgttctacgtattttacgacaattttttaaaaacatagacaaagtcattccatgccacaaacttgcca

SEQ ID NO: 31040 - DNA, 201 bp, Homo sapiens
ggtctcccaggagaaaaaggtaacagtgcccatggccatgggccagcagccctggccacagtgagaggagccccctccccacagactttcgtgtccctaaygtcttgtttgtgttgcagggcccaggggtgaacaaggcttcatggggaacactggacccaccggggcggtgggcgacagaggccccaagggacccaaggg

SEQ ID NO: 31041 - DNA, 201 bp, Homo sapiens
ccctctccattcccaatcctgtaatctctcctgacttctgaggcgcacacggctctttccttgtccaaattagcttcctttcctttaacaacgtagcatcycttaaaataacagccattttaccgatgctaaattataacaacaaaatcatgtgtttctctctccacccacagtagaacacaaaagcctgtgccttcgctg

SEQ ID NO: 31042 - DNA, 201 bp, Homo sapiens
ttataagcagctgcctcattgtcatgagaacacccagcctcgtcccgtggctcagcagatgagcgggagcttatgcgcatggctgttccaccagcacgtgrggacagcaccgagccgtgccgtggtgtgtgcgcagatcacaccagcatcactgctgccagcctccccaccccatccctgcacctcccaccagctcccccc

SEQ ID NO: 31043 - DNA, 201 bp, Homo sapiens
gggccccgtgggtgggcctggccctgctttctacgccaatgttatgccagctccatgttctcccaaataccgttgatgtgaattattttaaaggcaaaacygtgctctttattttaaaaaacactgataatcacactgcggtaggtcattcttttgccacatccctatagaccactgggtttggcaaaactcaggcagaag

SEQ ID NO: 31044 - DNA, 201 bp, Homo sapiens
gttcacagcagcattcttcaaaataggcagaaggtgaaactatccaaatgtgcgtcacctgatgaatggatcagctaaatctatacagcatctataccacrgaatagccctgaccttcacgtgggagcaaggtgctgagccataccacactgtggatgaacctggaacatgttatgccatggggattgagacccacacaga

SEQ ID NO: 31045 - DNA, 201 bp, Homo sapiens
cctggccctgctttctacgccaatgttatgccagctccatgttctcccaaataccgttgatgtgaattattttaaaggcaaaaccgtgctctttattttaraaaacactgataatcacactgcggtaggtcattcttttgccacatccctatagaccactgggtttggcaaaactcaggcagaagtggagacctttctaga

SEQ ID NO: 31046 - DNA, 201 bp, Homo sapiens
ccaagagacttgaaagcacgtgtccacacaaacacacatacaccaatgttcacagcagcattcttcaaaataggcagaaggtgaaactatccaaatgtgcrtcacctgatgaatggatcagctaaatctatacagcatctataccacagaatagccctgaccttcacgtgggagcaaggtgctgagccataccacactgtg

SEQ ID NO: 31047 - DNA, 201 bp, Homo sapiens
aaccaaaggaaactcttgagaaccaaaatgattccatcgctaagaaccaaatatgtcatgaaacatattccaccatgattataccgtggtaaacatgaagagggggcggtgaaaagcaggggacaggtgagttccaagagaagggagtaccaccaggcacaggaggacacagctttccaggtggaaggacataacacggtg

SEQ ID NO: 31048 - DNA, 201 bp, Homo sapiens
tattttaaaaaacactgataatcacactgcggtaggtcattcttttgccacatccctatagaccactgggtttggcaaaactcaggcagaagtggagaccyttctagacatcattgtcagccttgctacttgaaggtacaccccatagggtcggaggtgctgtccccactgccccacgttgtccctgagatttaacccctc

SEQ ID NO: 31049 - DNA, 201 bp, Homo sapiens
gtgaggagcaatttcatcatgaagctggcaagacactctgaggcctccccaggtgtcccgttcttgccttttatctcctaagtttacacagcttcagaccrgcaacactcatggacccaaggcatggctaaaccattctaaaaacccacataccccaaggcggactttctacacgtccactggtgagactgagaaggggcg

SEQ ID NO: 31050 - DNA, 201 bp, Homo sapiens
actgataatcacactgcggtaggtcattcttttgccacatccctatagaccactgggtttggcaaaactcaggcagaagtggagacctttctagacatcaytgtcagccttgctacttgaaggtacaccccatagggtcggaggtgctgtccccactgccccacgttgtccctgagatttaacccctccactgctgggggt

SEQ ID NO: 31051 - DNA, 201 bp, Homo sapiens
agtctgagcctcagttttcccatctaagaaatgggggtcatagtgcccatcagaacaggcagtgtccataaagcaccaagtgtgccacccagctctccccrctgcctgatacccctctccccgccacgctaagaggaatgcggaacaaggaggccctcctctccctcctctgcaggtgacgctggggaatgcagatgtaca

SEQ ID NO: 31052 - DNA, 201 bp, Homo sapiens
actcagcacaacctagaaggtcccacaaaaagctattctttggggcttatttgcaacgcaggggaacccatgaattatgcaaatcgaggtccaaggaggcrttgttggcttgtccaccttcactcagttttagggctggggggccgaatggcggggcaagcagaagaaacataaccaacagaacgacatggcgaaggttgt

SEQ ID NO: 31053 - DNA, 201 bp, Homo sapiens
caggagaggccaacacccttccaggccctgtgggagtcccaggacagaaaggagaccaaggagctccaggtgaggccacacattccaagccaacattgccrtcccagtaaccagaacccacccagaggtggggccatggagtgtctatggggtgggagaggctgtgcagaagtgcaggaaagagctggtttttctggggag

SEQ ID NO: 31054 - DNA, 201 bp, Homo sapiens
agtgaacacttgagtcacttagtctgagcctcagttttcccatctaagaaatgggggtcatagtgcccatcagaacaggcagtgtccataaagcaccaagygtgccacccagctctccccgctgcctgatacccctctccccgccacgctaagaggaatgcggaacaaggaggccctcctctccctcctctgcaggtgacg

SEQ ID NO: 31055 - DNA, 201 bp, Homo sapiens
aggccagccccagggtcccgctccggccacactttggaaactcaccccaacatggtggttttccactttccttctaaggagcttttcttactgaacactcratgccgtaaaagcagaagagaaatttcccctgtgtgtgtttgtccaccctgtttgatttgctcctcttcctgacaggtctgcctggtgatagaggggacc

SEQ ID NO: 31056 - DNA, 201 bp, Homo sapiens
ggggagccaacccctgccgccagcatggtgctgccttgctgcccaactccctgggttcagctgtggcaaaacagaggaagagaggtcaggcatgtcttccstgctcacctatgacctttcatgaccttggcctctgaggccagggctcttgccctccctgacggctccctggagccggctcctccccttggcccgcaggcc

SEQ ID NO: 31057 - DNA, 201 bp, Homo sapiens
ctgtccttccattgctggagacacactgttctgtccctccgttgctggagacacactgttctgtccctccgttgctggagacacacagttctgtccttccrttgctggagacacactgttctgtccttccgttgctggagacacacagttctgtccttccgttgctggagacacacagttctgtccttccattgctggaga

SEQ ID NO: 31058 - DNA, 201 bp, Homo sapiens
ggcttcctgaagtgctatgcgatcggccgtgaggggcgggtccgggccctgtggtcctgtacgctgctaagatgtgatccctaagaatcggtttctcaagscagttgctgggttgaatggactcatcaggcttttagacggagagagaaatagagtccttgctttttcagcagcaccgttgggagggtgggatgcacctgc

SEQ ID NO: 31059 - DNA, 201 bp, Homo sapiens
gtgccctgggggagccaacccctgccgccagcatggtgctgccttgctgcccaactccctgggttcagctgtggcaaaacagaggaagagaggtcaggcaygtcttccctgctcacctatgacctttcatgaccttggcctctgaggccagggctcttgccctccctgacggctccctggagccggctcctccccttggcc

SEQ ID NO: 31060 - DNA, 201 bp, Homo sapiens
cacatgggttggtctttccattactagagacatatgagtctgtctttctgttgctggagacaccttgacctctccttccggtgctggcgacattggtctgwctttctgcggtcctgtgtcgcatctccatgccaggtgcagtgttactgctgccttcctttccagcgtgctcctctgcctttgtcttgatgggcctgtggg

SEQ ID NO: 31061 - DNA, 201 bp, Homo sapiens
atcgctaagaaccaaatatgtcatgaaacatattccaccatgattataccgtggtaaacatgaagagggggcggtgaaaagcaggggacaggtgagttccmagagaagggagtaccaccaggcacaggaggacacagctttccaggtggaaggacataacacggtgccagagagaacgtggtccacacatgaggtgggttc

SEQ ID NO: 31062 - DNA, 201 bp, Homo sapiens
gccaattccccatgaagctagaaccagacatccacaggagaggaagtcaggaccaaggaggccagcaaccctggcttttgctggggtgcagggatgtctcsaggcttgcagatcacatctcactctccaggatctgctgcctgccctctcccctcaccagcagctggaaactccagaatcccctagcctcagagctccaca

SEQ ID NO: 31063 - DNA, 201 bp, Homo sapiens
tacatttcttcaattgtattcaaccacattccaagtagaaaaagcctcaccaccaacttggcacattacccatgaaaacataaccgggtcctcccagaatkttttcaactcttccagacggttactagattcacagtgcgatcccgtcgtcagtccatcatctcaattctgatgaatctgaagcaacaagagaattcattt

SEQ ID NO: 31064 - DNA, 201 bp, Homo sapiens
aagtaattttcagctccatggtaattatttcctcgagcctccttagggtgaagttaaccatgggggtgtctgtccctccactggtgggcacgctctgtggsgtcaggaccaatttatgattttgatcccatcagcctctagcctagtactgaatacacagtaaatgcttagagactgaagctcaattattttcactgagcc

SEQ ID NO: 31065 - DNA, 201 bp, Homo sapiens
tcagttctagaatttcttcctcttggcatcataaacactggctaatcatcttctgaggtttgggaagggagcatggagatggcggaggggcgtggcttccrctcaggcgccaccgggttctgccctccgtcccctctgtcactgcctgtcctcagagctccagctctccctcgcggtcgcttaccacgtgacatgacacat

SEQ ID NO: 31066 - DNA, 201 bp, Homo sapiens
tggagatggcggaggggcgtggcttccactcaggcgccaccgggttctgccctccgtcccctctgtcactgcctgtcctcagagctccagctctccctcgyggtcgcttaccacgtgacatgacacatgcagtcctggatgggtgacagcccgggaaggctggcgggtctcctaggaccgtgccctgcactgcgcctgagt

SEQ ID NO: 31067 - DNA, 201 bp, Homo sapiens
catgcagtcctggatgggtgacagcccgggaaggctggcgggtctcctaggaccgtgccctgcactgcgcctgagttgagcatcgccaggcggtctggacrccatcggggctgagaacacagagtcctggagcagaggatgacacgtgggccctgttggctggaggggccgcccctgggttgctccttacgccccctctgc

SEQ ID NO: 31068 - DNA, 201 bp, Homo sapiens
tgagacaagcctcacctctctaaatatttatcctgctgtttgttttgtcctacttggaagcacgcatgaatggaatcctttcccctgggatggataatggmtaccaggatcttccaaagggaaaatctcttcctgctgctgatgcgtgtagattagtcataaagccagaggggaaacagaaaaccactgttgctacctttt

SEQ ID NO: 31069 - DNA, 201 bp, Homo sapiens
aggtccctcctacgacatgtagggactttgggaactacaagtcaagatgagatttgggtggggacacagccaaaccgtatcacagctcactgaagctagartctgcaacctcacctatttctgcagctgacattcgagcatcagttcctgatttggccttgagtcatgcaacatgggccttcacggaacccctgttagtga

SEQ ID NO: 31070 - DNA, 201 bp, Homo sapiens
tacaagtcaagatgagatttgggtggggacacagccaaaccgtatcacagctcactgaagctagagtctgcaacctcacctatttctgcagctgacattcragcatcagttcctgatttggccttgagtcatgcaacatgggccttcacggaacccctgttagtgagactcttttatgtcagtacttaggacgatccatgg

SEQ ID NO: 31071 - DNA, 201 bp, Homo sapiens
caggatcctctctggcatgggtcacatgttgtaaagagcagggaggaaaccaaggctgtgcctcggatgttgtcacaggaccttggggaatggagagcttmatattcaaacggcaggcgctgagtcacggctcaggcccgttagtgtctggctcatctctagaaagcacagttgtctgggaagctccaaaagaagcctccc

SEQ ID NO: 31072 - DNA, 201 bp, Homo sapiens
ttcctgatttggccttgagtcatgcaacatgggccttcacggaacccctgttagtgagactcttttatgtcagtacttaggacgatccatgggggctactragaaatcatagcggtttccgtctagattccagcaaactgactcatgtttgctaagtgttctcattaacagtcctcatcactgcagttaagttaattatgt

SEQ ID NO: 31073 - DNA, 201 bp, Homo sapiens
tctggcatgggtcacatgttgtaaagagcagggaggaaaccaaggctgtgcctcggatgttgtcacaggaccttggggaatggagagcttaatattcaaayggcaggcgctgagtcacggctcaggcccgttagtgtctggctcatctctagaaagcacagttgtctgggaagctccaaaagaagcctccctggtgagaaa

SEQ ID NO: 31074 - DNA, 201 bp, Homo sapiens
gtgagactcttttatgtcagtacttaggacgatccatgggggctactgagaaatcatagcggtttccgtctagattccagcaaactgactcatgtttgctragtgttctcattaacagtcctcatcactgcagttaagttaattatgttttcgtgggaatctgccagtctgcggattgcactggatcatctaactcaggag

SEQ ID NO: 31075 - DNA, 201 bp, Homo sapiens
ggaagacttggccaggagatgtggagaggagatcccgcacagggaggggcggaggaaactgagatgggatttcgacagggtgcacacagtggcccatagargggggtcacagaacacagctgctagcattttgtatgaccatgcattgttaacgtttgattcacacagcatgatgttcaggccctgtacttgaccacaaaa

SEQ ID NO: 31076 - DNA, 201 bp, Homo sapiens
agtgtctggctcatctctagaaagcacagttgtctgggaagctccaaaagaagcctccctggtgagaaacgcagtagcactcggagcaagagagtggaacraccttgtgtgtttactggggcctctctgtttcccttccaggtgcccccgggactgtgggagcccccgggattgcaggaatcccccagaagattgccgtcc

SEQ ID NO: 31077 - DNA, 201 bp, Homo sapiens
tagattccagcaaactgactcatgtttgctaagtgttctcattaacagtcctcatcactgcagttaagttaattatgttttcgtgggaatctgccagtctkcggattgcactggatcatctaactcaggagtctgccattatttactgacactcaccatctgtttcgggtactttgtgacaatagctagaagcagttcaat

SEQ ID NO: 31078 - DNA, 201 bp, Homo sapiens
tttatcaaaactctccgtgacctcctgtggccctccttgcattccatcccagggacctggacggtgtccccggcttccaagccaccgtgcggcatgctgayttttgcaagccatgcccccaccctcgacctgcatgaacgtcacagtgggcccatgagctgatgacttcagagcaggtcctggaggccagggcagacactg

SEQ ID NO: 31079 - DNA, 201 bp, Homo sapiens
gactctgcccctagctcgaggccgtcctctgtgaggctctgtgggccctggtgtggtgcaggctgtgctcctgctcacctctcccctcccagaacatgggsagcacttcctgggacttaccacgtcttggccgttttggcgtatgtaggatgtgcagtgcattcagcaccccgctgtggatgggcatgacctgagagcagg

SEQ ID NO: 31080 - DNA, 201 bp, Homo sapiens
agccccttctccaggtcagcctctcgtccaggcaattctcttaagatacatgagctgctatgagtaccaaagccagaggtttgtccactgagagaagcacmttggaaagggtgcgtgtgcctggactgtgtgcacttatgcacgtgtgtgcataggggtgtgtacacaagcatgcactgtgtgtgtgtgtgtgtacatgcg

SEQ ID NO: 31081 - DNA, 201 bp, Homo sapiens
ctcccttggagcagtaagggcctggtggagtcagccagctccccagatctgagtgcaccccggccagccctgacactggtcccatctgagcccctgtcctstctcctctccactggagttcgtgtcactacatgcagttgccgtggggacaaaatgagagaaaccatatttaaaacttgtaacaacgcatcatctcaaaag

SEQ ID NO: 31082 - DNA, 201 bp, Homo sapiens
gtcctactgagactcggtagagtgacgtggtttgcccgggtctcccttcccgttgatgaggaggcgaacttggaacaggtggtctttgcacctgacccttyccagtcacctcagggactctgcccctagctcgaggccgtcctctgtgaggctctgtgggccctggtgtggtgcaggctgtgctcctgctcacctctcccc

SEQ ID NO: 31083 - DNA, 201 bp, Homo sapiens
agttacccagaagttctactcctagatgaagatcattgaaaacataggtacagacaaaaatgtggacacaaatctcatggcagcatcctttatagcagccrtaattggaaacagcctgaaaatgcatcgactgatgaatggatgagtaaaatatggcagagctgtgcaagggcacattcagtgctgaggaaggatggggct

SEQ ID NO: 31084 - DNA, 201 bp, Homo sapiens
tatttgagtaatgtgggttcaagtctggatttgttgccttttcagactgcagcttccaaaaccagcccggatggcccatgtgcgcaccagccatgacttcrgagagggaaaacaatgggcagcccccgcgccccgtcctcacgatagtcaaaatggagtctgtcttgtagatatcactgaagtataaggccaagactgatt

SEQ ID NO: 31085 - DNA, 201 bp, Homo sapiens
agggcacacctgcagagcctgcccccagcagcagcttgtgtgtcttgcagacacacaccctcctcctgccacgagatggcactcttcttctccagtgcgayggcgcgctctttgctggtgtgaagagcaccgtgtttcttgcaccgtcatcatcagggatgcccccgccgggatcattgagccctgcaggagctagtgggg

SEQ ID NO: 31086 - DNA, 201 bp, Homo sapiens
aatgcatcgactgatgaatggatgagtaaaatatggcagagctgtgcaagggcacattcagtgctgaggaaggatggggctctcagacatggcgcgtgggygagccttgagaacactatgccacgtgtcgtctgactgcatgtatatgagatgtccccagtaagcaagtttacagaaatgaaaagtggattcgcagtttcc

SEQ ID NO: 31087 - DNA, 201 bp, Homo sapiens
tttgcccattggagctctggccctattatttaacagtgaggaggacagatagctgcagggcacacctgcagagcctgcccccagcagcagcttgtgtgtcytgcagacacacaccctcctcctgccacgagatggcactcttcttctccagtgcgatggcgcgctctttgctggtgtgaagagcaccgtgtttcttgcacc

SEQ ID NO: 31088 - DNA, 201 bp, Homo sapiens
cctaaagctgaagggttaggggagaattagggcatggctgccagcggctccagggtttcattttctgggataaagtgttctcaagttagacggtgctgctygctcacagctctgtgagtacactaaagttatgtaattgttctgtttactggagcgagttgtagggtatataaattatacatcaataagctgttttggaaa

SEQ ID NO: 31089 - DNA, 201 bp, Homo sapiens
ttgttcatatctttagtattgagttttgagagttctttatatgttccggaagaagttgtttatcagatatgtgttttgcaaatatgtctcccagtctgtcycctgcctttttatttttaactgtatcttttgacaatcaaactttttaaatctagctaactttttcttttataggttgtaatctttgtgtcttatctaaga

SEQ ID NO: 31090 - DNA, 201 bp, Homo sapiens
agctatggtaaacgtgcagtgagcaaactacatgggacggtatccatgtcctcattctcatagacatttatcctcacctggcagttctctgacttgcaaamtcccgtgctcttttccaagcagatagctgggttctttaaagttggagttttctcaccttcctgtgtgtaacggcctcatcccctgctcctctcaggttcc

SEQ ID NO: 31091 - DNA, 201 bp, Homo sapiens
ttgtgtctggcttccttcacatagcagaatgcctttgagattcagcctcaactgctgcacacatcgggcattttgttcatttttattgccgaatagcaatyccaggagtgagctaatttaataaaaccaggatgaacattctcatacaggtctcggtgtggatataggccttcgtttctcttaggtatatacctaggagtg

SEQ ID NO: 31092 - DNA, 201 bp, Homo sapiens
gcacgggccataatttgaaaatcctcattagtgtgtttcctgcattgtgtgtttaatgtgtgtctccacgtctaagctgtaagctccatgagagtccatcrgtttcatttccagttgtatacacacagcacctcgcacacagcctggcacagcataggcacgggataagtgtttgatgagcgaatgaatgaatgagctatg

SEQ ID NO: 31093 - DNA, 201 bp, Homo sapiens
acagtcacatggcacaatgggaacacaccatctcagccatgagtcatgccatgctcttgggtgtgaagatgacctaagaataccaggaaaatattggcacrtgccattggcacatgaaaattagtaacctgcgcctgtgagtgaggtcgtaagtatagacaattagctcttttaattgccaatcatcgtgtgatcctggta

SEQ ID NO: 31094 - DNA, 201 bp, Homo sapiens
tcagaaaggactcagctgactacccccaaaacatttcactgggcctctccctgctgcttttcccctgttccccagcacgggccataatttgaaaatcctcrttagtgtgtttcctgcattgtgtgtttaatgtgtgtctccacgtctaagctgtaagctccatgagagtccatcggtttcatttccagttgtatacacaca

SEQ ID NO: 31095 - DNA, 201 bp, Homo sapiens
cctcagaaaggactcagctgactacccccaaaacatttcactgggcctctccctgctgcttttcccctgttccccagcacgggccataatttgaaaatcckcattagtgtgtttcctgcattgtgtgtttaatgtgtgtctccacgtctaagctgtaagctccatgagagtccatcggtttcatttccagttgtatacaca

SEQ ID NO: 31096 - DNA, 201 bp, Homo sapiens
tgccctttaatggcttcctactgccctcggggtaaaagccaagtccggtttcttcccctccctttgtgcaaatctgcccttcactcaccactctgcgggcrctggccttctgcctatttcagggccttttagaaaccctgtcctcactctggagcattccctcccgctccccacttcaggggctcctttttattctttggg

SEQ ID NO: 31097 - DNA, 201 bp, Homo sapiens
attatacatcaataagctgttttggaaaaccttaattactcttcagacttacagcttttacaaattttcagcaaaataaaaattgcaatctagggtgctcattttttttaagatttttactcacacttgtgctttcaaatagtcttcctgttagcagagatttcaggctatttcaggcaaaaaaaaaaaatgacattttaa

SEQ ID NO: 31098 - DNA, 201 bp, Homo sapiens
ggattggactgcctggtggcaaaggagatgatggctggccgggagctccgggcttaccaggtaaggtcacgtaaaacacgtggtcacccagacccagagtygtgggctgtgcaggaggcaccgctgagcaggccagcctctctcagggcgacttctaaggcccatacgagagcaaaggcaggtctgctgtggcttacggtg

SEQ ID NO: 31099 - DNA, 201 bp, Homo sapiens
tcagattgacaatggtgacatctctgaagtgtgtgtggttaaatttctctctacctgcgacactgcacgtctcatcacacagagggagagcttggagacakagaacaaagctcacaaaagtccacaactgaccggacacgcagctgacctggtcaccggtcaccctttgtccccagcagtgcggggtgcggccgcctctcc

SEQ ID NO: 31100 - DNA, 201 bp, Homo sapiens
tccaaggccctcctggacttaaaggacaaacaggtaaaatctcccgcagccacacagccttcctcaggcaggccctccggagaccccagaacaaaggcggycaacattgtcaatttcctccaatcacacccaaccctggaagctcactcgtgcctgctgccagcttaggagctttcctcagtgctgatggcatggagagaa

SEQ ID NO: 31101 - DNA, 201 bp, Homo sapiens
aggaaggagcacggttggatgcctctctccattcctgaaggagcagcagtgtggttctgcacatcctagagccggggttccagggaacccacaggggcgcrgtgtctgtttgttccaagcagcatgtctgtggttgcaggtctgaagggattctttggagagaagggaacagaaggtgacatcggcttccctgggataaca

SEQ ID NO: 31102 - DNA, 201 bp, Homo sapiens
gctgtgttctgcctcctcggtgcaggttacatcaggcgttctgcccccgggaagcatgttgctggctcatggtgccttcacattcctgcctgtgcgccccrcctccacaatgagtttctaaagaacaacggggcaaaggccgccaaggataagggccaaaaatagatctaggaacagggccaaggaggcagcctagcaccg

SEQ ID NO: 31103 - DNA, 201 bp, Homo sapiens
tcagggaagagacgctacccccacccaagaattatttttgctgttacctttgaacattttggtttttgttaaactctgggcccagaaaggctttggagtgsagcctcccctgcatccatcaccagaagacggtatttcggagctgtggtcccacaatggaagggtggggccagctgtacccatcatccctgggggtgtcct

SEQ ID NO: 31104 - DNA, 201 bp, Homo sapiens
ctcctgggcctggctggggctggcaggtgcgtcttctagccacactgcactgtgatctcatgacccctccttccacagggctggcgggctcctgcctggcrcggttcagcaccatgcccttcctgtactgcaaccctggtgatgtctgctactatgccagccggaacgacaagtcctactggctctctaccactgcgccgc

SEQ ID NO: 31105 - DNA, 201 bp, Homo sapiens
catgattacacagtatccagaaaggtcaggcatcccctgttccattagcatcaggtttcaaatgactgtcacgagataagcagacattatcctctgcacaygtaactctctgcttacataaatggctgacagccccagcaagcctggaacttgacatccccaaaaggcatgggttgagacggctcctgggtcaggacagat

SEQ ID NO: 31106 - DNA, 201 bp, Homo sapiens
tcttacttggccaatgtggtgtgtgtttgtattatcgtagcggaaccaactcaatataatgctaacttaaagaatttttttttctctcatatatatagacygcttttcagtctaaatgcaaaatagatataactcttggtcctgtccctgggctgtgccacagatcctgagcagtcaccctggaagacaggcggcctgctt

SEQ ID NO: 31107 - DNA, 201 bp, Homo sapiens
ccagttctggaggctgggatcagcatgccagcgtggtcgggttctggggggggccgcgtcctggctgctcgctgtgtcctcacgagggagagcacccgctytcccctgtcacttcttataagggcagtaaccccatcttggggccccaccctcatgacctggcctaaccctaatcacctcccaaaggcccctgctccaaat

SEQ ID NO: 31108 - DNA, 201 bp, Homo sapiens
tgcatcacagccagttcaaaccccctccccatgcccactgccccacttttggctcgtaaccttttttcttacttggccaatgtggtgtgtgtttgtattaycgtagcggaaccaactcaatataatgctaacttaaagaatttttttttctctcatatatatagaccgcttttcagtctaaatgcaaaatagatataactc

SEQ ID NO: 31109 - DNA, 201 bp, Homo sapiens
aatttcaaatggctatcactgtctataatctgtaagactcttgctagggaatgaggcttgtgtttgcgtattaagcaagacaaaggttgtttttgtatcayaatgtatgagaaggaaatattcttttatccaaaataaaatgaatccatactctaggtaagaactttggagccgtgtttctctttagtttctgtatggtag

SEQ ID NO: 31110 - DNA, 201 bp, Homo sapiens
aagtacaatggctgttgctgagggttggggggagagggacacggggagtgcgtgtataacggggacagatttcagtttaggatgagaaagttctggagctkgtcggcggtgaaggtgaatatattgaatgccactgagcagcgcacctaaaaatgattaaaatggtaacttttatgttctacgtattttacgacaattttt

SEQ ID NO: 31111 - DNA, 201 bp, Homo sapiens
tgttgcaaacatctaagaggcacactgctattctataggacttatttaaaatgactaatatattagagaaaaggagagcagcagggggcagaggaaggctstcaccctcagagagccactgtgtgcctttaggactaaatttgcaaagcatccagtgcttccattgtaaggagcgcccacaatctctttgtcctgaatgaa

SEQ ID NO: 31112 - DNA, 201 bp, Homo sapiens
gcctgtaaccccagcactttgggaggctgaggcaggaggatgacttgagcccgggagtttgaggctgcagtgagctatgactgtgccactgcagtccagcygggcaacagcaaaaccctgactcaaaagatatgtattccatatatataaattccctgtccttttgtgggtcatcagcatgatgctggggcgttcacactc

SEQ ID NO: 31113 - DNA, 201 bp, Homo sapiens
ttcacaaatgagacatgagccagcagtgcttggcggtggcgagcagccgggactgtgatgtgggacccacagcatgtgggaccctcagggcttggggaacrgtattgctgcatgcagagcaccactgggtccaggtgctgtgggtgagaggctcatctctctgggctgccccctcacctgtctacgtgagaattagacaca

SEQ ID NO: 31114 - DNA, 201 bp, Homo sapiens
cttcacaaatgagacatgagccagcagtgcttggcggtggcgagcagccgggactgtgatgtgggacccacagcatgtgggaccctcagggcttggggaayagtattgctgcatgcagagcaccactgggtccaggtgctgtgggtgagaggctcatctctctgggctgccccctcacctgtctacgtgagaattagacac

SEQ ID NO: 31115 - DNA, 201 bp, Homo sapiens
gatgtgtacgtgcaggtcacaggggatatgattgcttagcttgggctcagaggcctgacagtgtgaacccttagtagcaggccagggcctgcctgtgtgtstgtctggcccaccttggtgtacagaattcttcaggggtcttcctcccctcactcccaaaatctgcagctgagaggatcttctagccagtctgtgtgtgct

SEQ ID NO: 31116 - DNA, 201 bp, Homo sapiens
ctgctataagaacatacccaagactgggtaacttattaaaggaaagaggtttaattgactcacagttctgcagggcttgggaggcctcgggaaatttacartcatggcagaaggggaagcaaacatgtccttcttcgtggcatcaggaaggagaagtaaggagtgaagaggggaaaagccccttataaaactatcagatct

SEQ ID NO: 31117 - DNA, 201 bp, Homo sapiens
gacaggtctctcagaggcccccttacctttgcttcacaaatgagacatgagccagcagtgcttggcggtggcgagcagccgggactgtgatgtgggacccwcagcatgtgggaccctcagggcttggggaacagtattgctgcatgcagagcaccactgggtccaggtgctgtgggtgagaggctcatctctctgggctgc

SEQ ID NO: 31118 - DNA, 201 bp, Homo sapiens
tgagttgagaatgacctgtctcaggcagcagggaaacatgcagtcccgcccggagcttgctgtcagaaaaggctgttctttcagcttcagcattcagagarttatgctttaaagaccaagcttgtccaacccacgggccacatgcggcccaggacggcttcaaatacagcccaacaaaattcataagctttttaaaaacat

SEQ ID NO: 31119 - DNA, 201 bp, Homo sapiens
agctgacacagtggcttgggggcaaggcagacaggtctctcagaggcccccttacctttgcttcacaaatgagacatgagccagcagtgcttggcggtggygagcagccgggactgtgatgtgggacccacagcatgtgggaccctcagggcttggggaacagtattgctgcatgcagagcaccactgggtccaggtgctg

SEQ ID NO: 31120 - DNA, 201 bp, Homo sapiens
ctcagcccgtgcacagccaaagctacaactgaacaggtgagagtagctggtgacaaaaagagatggctgcattatctgcaaaaataagtgacagccgtccmccaaggcccagacaaatgcccatgaaagtcaataaagccggcaggcacaggagtgtggacccacctgccacccagtagtgcatccctgagtcagcaaaga

SEQ ID NO: 31121 - DNA, 201 bp, Homo sapiens
tccagggtgagggctcacccttgactggcagcctctctcctctgttactccagcacgtttaagccaccttgataatctgccttctcagcccgtgcacagcmaaagctacaactgaacaggtgagagtagctggtgacaaaaagagatggctgcattatctgcaaaaataagtgacagccgtcccccaaggcccagacaaat

SEQ ID NO: 31122 - DNA, 201 bp, Homo sapiens
ggtgatacattccacaaacctaatccagggtgagggctcacccttgactggcagcctctctcctctgttactccagcacgtttaagccaccttgataatckgccttctcagcccgtgcacagccaaagctacaactgaacaggtgagagtagctggtgacaaaaagagatggctgcattatctgcaaaaataagtgacagc

SEQ ID NO: 31123 - DNA, 201 bp, Homo sapiens
gctgacattgctgcctctgtgtcggggtgatacattccacaaacctaatccagggtgagggctcacccttgactggcagcctctctcctctgttactccakcacgtttaagccaccttgataatctgccttctcagcccgtgcacagccaaagctacaactgaacaggtgagagtagctggtgacaaaaagagatggctgc

SEQ ID NO: 31124 - DNA, 201 bp, Homo sapiens
cagccctttgttaactggagagacgacagacaataaacccggcgtggtgaaacccggcccacacgtcccgcccgccccagagccaatgctagggccatcargtggccctggtagccagtggttccaggaccagcatcagacactcggtgttactgtggacagtagctttgtacaagttcctagcgaggtgatttccaaaat

SEQ ID NO: 31125 - DNA, 201 bp, Homo sapiens
tggctgaccatggcactaggttcctgttcatctctgttgtctttctgttctggatccatagctcagaattccgggaaatgggaaaggaaacagggaagtcraggcgatctttaacattagtatatattttaagaaataaactgaattttcacacagggtgatggcatcaagggccctccaggggacccaggctatccagga

SEQ ID NO: 31126 - DNA, 201 bp, Homo sapiens
gaatttggttatattcaattttctgataaattagagatggtttcgtctcctctttctaggggaaacatatctttagtaactgagcaaatgctgtccacagwgttattttataattttgaaataactccacagagttattttataattttgaaataactccacagagttattttaaaaagtgttcgttgagacctagtctcc

SEQ ID NO: 31127 - DNA, 201 bp, Homo sapiens
gagccacttttactgagctttatgtaaccatggctaaaatgaagaggtttggtaggtgaattcggtgcaggactcaaatgtttagacaggagctgaaagcrgagggagctttcgagatgtccgctgtccctcctctccttactgtggccgatggagtagccctgccctgtggcagccggggcccaggtggattcctcctgg

SEQ ID NO: 31128 - DNA, 201 bp, Homo sapiens
gacatgggtgaagtcaaaagcccaaacacacaaaagcaaagcagaaacagctgtccgtagacagccggcagattctgagaactggagctgacccgagtccytctcccccagcatgtcatctctgccaagccaaatgcatcagaaacctccatgcatcctacactgtgtcctaaatatacagtcaatggctttcccagagct

SEQ ID NO: 31129 - DNA, 201 bp, Homo sapiens
catcctacactgtgtcctaaatatacagtcaatggctttcccagagctttccaccagatgttatctgggtcctggggtaaagaaaaccatttacacatttytttgtatttgtacagggaccacctggaccccctggaccaaaaggacagcaagtaagttggttttggggggtgaggatgagggaagggggtacttaggtgt

SEQ ID NO: 31130 - DNA, 201 bp, Homo sapiens
gaaactggcccaaccgctaggcactcagttagactggagagtgcagtgcactgtgccagcgtgggaaggggagtgccagggcagtgggggacaaaaaaacscaaaggctatggcggggtggctcgcagagcctgcagagctgacacagtggcttgggggcaaggcagacaggtctctcagaggcccccttacctttgcttc

SEQ ID NO: 31131 - DNA, 201 bp, Homo sapiens
tgcgtgtgccatggccctgaggttccagagaaactggcccaaccgctaggcactcagttagactggagagtgcagtgcactgtgccagcgtgggaaggggwgtgccagggcagtgggggacaaaaaaacccaaaggctatggcggggtggctcgcagagcctgcagagctgacacagtggcttgggggcaaggcagacagg

SEQ ID NO: 31132 - DNA, 201 bp, Homo sapiens
cggatgatgttttccggtagatgaaggtgactgaaggaattgaatggagggtggaggggactaaaggagagggtgaagtcctccacagcatgacccactgmtgctcggcatcagaaattgggaagtcattataatggtcagaaacgtggtctaaaaatagaagattccatgtgggaagaacatgaatttcggagccaggca

SEQ ID NO: 31133 - DNA, 201 bp, Homo sapiens
gtgacaaatgagggagctgccctctctcccactgagatgagtcattgtaacccaaaacaatctcaaaatctttgacatcactgccgcttgcaaatctgtgyctccagccaagggccggtggatgctactgcctgccacctcgtgttcaccaccagaactgcacgtcactccgaatctgctgacctcataccctggcataga

SEQ ID NO: 31134 - DNA, 201 bp, Homo sapiens
aacagatgtgagctgacattgctgcctctgtgtcggggtgatacattccacaaacctaatccagggtgagggctcacccttgactggcagcctctctcctstgttactccagcacgtttaagccaccttgataatctgccttctcagcccgtgcacagccaaagctacaactgaacaggtgagagtagctggtgacaaaaa

SEQ ID NO: 31135 - DNA, 201 bp, Homo sapiens
aaagtgctccgaacagtgaacagtctagagtaaaaatgtcagctgctgttctagcttagtcccaaccaggggtcaaagctaataacctgaaacactctctygtggaccctctgcaatgggctgggcctaacaggtccgccaatacacaaatttggaacactttcctttaagcaagtcaaagggaagggaattgtccaacca

SEQ ID NO: 31136 - DNA, 201 bp, Homo sapiens
gaagagaacggagaatcatcaggtgttgttgcccagtgttgatcacaactatcaagccattatttgaggggcaaggagaggggtgtttttaatgttgaaamaggataatgaactataccaatggcttctacccatcggagttattgacggggccatgaagcccgctagtgccccagtgggcccctctggacacgaacacaa

SEQ ID NO: 31137 - DNA, 201 bp, Homo sapiens
agaacagggcgccagctgagtcacttctctggaatggacgttaatgtcacttggtttcctctcacccaggacccgggcttcatgtctggacaaatgagccrtgcattatctttccaccagactaaagaaagatcagtttcttgtggtttgttgttctttttttaattgcggatgtgtgttcagcattcgcccaaataatca

SEQ ID NO: 31138 - DNA, 201 bp, Homo sapiens
aattggagagaagcatgggggtgaatgagaagtgcctcttcggttgagcctctgtctctcatatagaagccgacggtttgtaagggatccctttgcttgcrttgaatatgcagaaacccctatgaacatcctaggttagagaaggagagcggacagtgggctggcttcccacgctgttgctgctgctgctttctgtgttta

SEQ ID NO: 31139 - DNA, 201 bp, Homo sapiens
cctcgcacatatgacagtaactccccaactaggttagatggtgccacgatgggtaactggcatgcttccacctgtgggttgggaagagaacggagaatcaycaggtgttgttgcccagtgttgatcacaactatcaagccattatttgaggggcaaggagaggggtgtttttaatgttgaaaaaggataatgaactatacc

SEQ ID NO: 31140 - DNA, 201 bp, Homo sapiens
cctgcggtgctgtggagtgggcggcagggatcagtagacttcaagggtcaggattagacaaggagccaaaagaaaccgactattaaaatgtacaagagccrcactgcgaagccctgtcttacttttttttcttttttggacagagtctcgctctgtctcacccaggctggagtgcagtggcgcaatctcagctcactgcag

SEQ ID NO: 31141 - DNA, 201 bp, Homo sapiens
cagaaacccctatgaacatcctaggttagagaaggagagcggacagtgggctggcttcccacgctgttgctgctgctgctttctgtgtttactcagcaccsgggaacgccaagaggctcatctctccaggcactgcctcagggtcctctccagacgtctatttggataatagggcgacaattaaaactacacgctattttc

SEQ ID NO: 31142 - DNA, 201 bp, Homo sapiens
gcatccagcagacagggatgagaagagcctaatagggttaaagctggggctgaggggcagagtggggtgcagggaagtgaggcctcctcgctcccaggccwccagcagaattggcaaccacattagttccttctttattcgagctttggactcacctacttcctcacccggttttcactaatcctgttcccctgctggaga

SEQ ID NO: 31143 - DNA, 201 bp, Homo sapiens
ccacccccaactccaactactccgatggacacaggagaggcttctccggcgcccttggtctctctccaaggcttccctgcttgggggagacgtgcagcccyatggctcagggaccaggccttcacctgtgttctcctgcgtggtctggagcccccagaaaatgacagcactctattcccttccaggcagccgaggggaccc

SEQ ID NO: 31144 - DNA, 201 bp, Homo sapiens
gtaagaagagagactcaggtgtgtttcttgtgtaagccacagtgctggaaaagtaggatggctcctggggatcaccaaccccactccaatctcagccatcrtttctagccatgcaattgggtgtatcccttagtatctttgatccctccttgtctgtaaaaaatggaaatgaaaatactcataggttttatgtggagttta

SEQ ID NO: 31145 - DNA, 201 bp, Homo sapiens
tttcatggtggccttgagagaacaaaacttgaattttcagggatcagagctctaaaattgagcacatcagtgacaccaggcctgagagcccatggccgaaycacagcgtagacctgggcccggcagcctggcttcccatccgggccaccgttcactcagcctttgttcagcggatgtctgttgagcacttgacatgggcca

SEQ ID NO: 31146 - DNA, 201 bp, Homo sapiens
tgcggagcgcagccccctgcacactcggcacgaagctgcccgagcaggagacgccatacacggaagtcaggccttctgtcccttgcacgtgggacttcagygtgacgcccagcaaagccctctccttattttaaggaacttcgtaagacgacatgcagagtgaaagctttcctagaaattcctaatgcctacatgataaaa

SEQ ID NO: 31147 - DNA, 201 bp, Homo sapiens
gcctctggctgcggagcgcagccccctgcacactcggcacgaagctgcccgagcaggagacgccatacacggaagtcaggccttctgtcccttgcacgtgsgacttcagtgtgacgcccagcaaagccctctccttattttaaggaacttcgtaagacgacatgcagagtgaaagctttcctagaaattcctaatgcctac

SEQ ID NO: 31148 - DNA, 201 bp, Homo sapiens
acccccagacatttcagaaaacctgacttgctttatattcaagtttaaaatctaaaaggtcatgtttcctaagaaagcaaacaagaggcaatcagctcttytaaacatgacaaggccattgataaaatcacgttgcgggtgtgtcttctctgtttaggatgtggatctgtgaaactcactatctaaaatgcagttgggtac

SEQ ID NO: 31149 - DNA, 201 bp, Homo sapiens
cacactgtgtgccaggcgatgctccaagttgtcctagttgtacttttcagtgtgtttacccctctgggtgaccctgtgaggtggagatggacttggctgcktttactgagggagagatggaagcgcagggcgttgagttccttgcccagggttgcctttaagtggaggagccaggttcaggcccagggcctctggctgcgg

SEQ ID NO: 31150 - DNA, 201 bp, Homo sapiens
ccctccctatccactcctttgtatccacttatttgtacttaaacactcttcccctgcatctgaaatgctttaatcctaagcacagtgttgacactgaatgytctgcagaaagacacaccatgatactgcagatggactttccgctctgcagtgccagcttgtagattcattctgtccatgaaagttggccaagctaccagg

SEQ ID NO: 31151 - DNA, 201 bp, Homo sapiens
acctagaaataaaagtaatcttgctattcttccaaacaagtgagaaggtctgtggctttcaattttgtgtctttttatggaatcaacaatggctaacaggwgtgtaggtcacactgtgtgccaggcgatgctccaagttgtcctagttgtacttttcagtgtgtttacccctctgggtgaccctgtgaggtggagatggac

SEQ ID NO: 31152 - DNA, 201 bp, Homo sapiens
actgcaggtgcctgccaccatgcccggttacattatgtattttttgtagaggcagggtttcactatgtttcccaagctggtctcagacttctgggctcaartgatcctcccaccttggcctcccgaagtgctgggattacaggcatgagccaccatacccagcagagattttttttaatgaagagaaaaaactctaactta

SEQ ID NO: 31153 - DNA, 201 bp, Homo sapiens
tacttaggtgtttgtgggtttgtttgttttttaccataaaacttcttggttggcaactatttattgtttatattatgatgaaaacagttttggaggttttwaagacttaatgttaaactccaaggatagatccatggtgcctctggacattaaaaaagtaaacaggtggaatgatttgttgtttgcaaattaattaccaca

SEQ ID NO: 31154 - DNA, 201 bp, Homo sapiens
atgcccggttacattatgtattttttgtagaggcagggtttcactatgtttcccaagctggtctcagacttctgggctcaagtgatcctcccaccttggcytcccgaagtgctgggattacaggcatgagccaccatacccagcagagattttttttaatgaagagaaaaaactctaacttaagaaaccttaatgcgtcta

SEQ ID NO: 31155 - DNA, 201 bp, Homo sapiens
gtttctcatgtctttgccacttatggtgtctcgcccaccctggctggccttactcccctcttgatggtgtcctgtggaggcatcccctgccctaaaaagtwcaagatccccaaatacacggcctctgacactggacagacgaggtggatggtgacctacgagccacgtgtgctccctgccagggagaagggtgccacctgc

SEQ ID NO: 31156 - DNA, 201 bp, Homo sapiens
cactctgaggccttggtcaactgacatgacaaactgtcaattagtttctacaatgcaaagcaagaatattatgcaaatatagttgctcagtaaagttgccrataaataggccttgggtttctttttctaagaaaaataattttatttctctctgattattggctttttaaaacttacagaaattatttatcttttcagggc

SEQ ID NO: 31157 - DNA, 201 bp, Homo sapiens
acagtctgcagagaccatatactcacgatcgagggccagcaccacctggggtccaatctcagctcccactcattcactctgaggccttggtcaactgacaygacaaactgtcaattagtttctacaatgcaaagcaagaatattatgcaaatatagttgctcagtaaagttgccgataaataggccttgggtttctttttc

SEQ ID NO: 31158 - DNA, 201 bp, Homo sapiens
agactacagtctgcagagaccatatactcacgatcgagggccagcaccacctggggtccaatctcagctcccactcattcactctgaggccttggtcaacygacatgacaaactgtcaattagtttctacaatgcaaagcaagaatattatgcaaatatagttgctcagtaaagttgccgataaataggccttgggtttct

SEQ ID NO: 31159 - DNA, 201 bp, Homo sapiens
ctgtgagtgtctagaaaaggcaaactacatggagggagaaacatgagggttggaccgaggtttggagaagggagcatttgataacaaaggggcaacacccmgaatgttgggtgatatggagctttgctgtctcttgctgatagtggtggttacacaactctgttatttgttgtgtctgttaatgacacaccaaataacaca

SEQ ID NO: 31160 - DNA, 201 bp, Homo sapiens
gcactctgggggaatctcagatgcattgtgctaagtgaaaggagccaggctcaagactccacactgcgtggttctatttctgtgagtgtctagaaaaggcraactacatggagggagaaacatgagggttggaccgaggtttggagaagggagcatttgataacaaaggggcaacaccccgaatgttgggtgatatggagc

SEQ ID NO: 31161 - DNA, 201 bp, Homo sapiens
cccatgtgtatttcaccagccccctcttgctgaaggcgcattcgcgaggatgcctcatgtccgtattgacactcatggtttgctgttcagtaaaaacaaaygcacagaagagggctatgccctgaccccgtgccacctgcaggctgtgattcctaaccctgtcctgcccccctctctgtgcagcacacggcggcgggagac

SEQ ID NO: 31162 - DNA, 201 bp, Homo sapiens
gtcgtgtaagttgagcgtgtggcttagctgcttcctatttgtggggctttagcaggattgtatgggtgacagtatcaggtgacagtttcagagccaacaamacacatctgagttatcttgagggtttctcccacccagaaccccctgtgctgtcccacacatgaaataacaatgagtgacacccccacaggtgaaataacg

SEQ ID NO: 31163 - DNA, 201 bp, Homo sapiens
tcaccatggttcaaggtgtgaatgggggacaggaagtggctttggaatgtgtccaggttctttttgaatagagaaaaatttcctccatgaccatgcttccygaaaagagaatgaacccacactctgggatgtgaggccaggagagttggcttcaccgtcggctggccgtccccaagtcctgccccttctcccgctcctgtc

SEQ ID NO: 31164 - DNA, 201 bp, Homo sapiens
gaagtatcccacctcatgagtttggaggggaagagagcagcaaaactccaatgttgagcagaacaggaatcaggaaggggccagaggagtgaggggaaacscaggcgggtccgtggccaccagaagagcccattccaggagggagggggcagctgtgctggggccacaagggtccccagggcggggaggggccctcacagc

SEQ ID NO: 31165 - DNA, 201 bp, Homo sapiens
acactaacaccagttccttgacagatactgagaaaaaaatgaagtcatatatgtctggggagactcagtcaaactaacagttggggggtactcataattcycttcagattataataaatgacaataataataatagattttgtttctacaaagcaaatttccccggtgctgtgaaagtcattcttgcaagtagccccgtct

SEQ ID NO: 31166 - DNA, 201 bp, Homo sapiens
gtgaatgaagtatcccacctcatgagtttggaggggaagagagcagcaaaactccaatgttgagcagaacaggaatcaggaaggggccagaggagtgaggrgaaacgcaggcgggtccgtggccaccagaagagcccattccaggagggagggggcagctgtgctggggccacaagggtccccagggcggggaggggccct

SEQ ID NO: 31167 - DNA, 201 bp, Homo sapiens
gggactgcaggtgcctgccaccatgcccggttacattatgtattttttgtagaggcagggtttcactatgtttcccaagctggtctcagacttctgggctsaagtgatcctcccaccttggcctcccgaagtgctgggattacaggcatgagccaccatacccagcagagattttttttaatgaagagaaaaaactctaac

SEQ ID NO: 31168 - DNA, 201 bp, Homo sapiens
aaacattttgaatgagacctccttttttgtttataacataaaacacgtggggactatacgtgcgtattctccccgcggaattcagtcagacagtgaacaarttgtttgctttgtaaacgtccttatagacttggcttcagaattgagacgattttgctaaactgcacattgtttggtaataaaaagctagagtgctgtcca

SEQ ID NO: 31169 - DNA, 201 bp, Homo sapiens
cacaggccttgccataacaagcactctgggtagtgaatgtgcgaataaatgcattaaacctcctagcagagccacgctgacccatacttgggtaggaaatrcccagaaacttgtcttcccaccccatagcctccctgctcaccagccaaggtgggctcaagtctaaatggcagtgagaaacattcctagatagaaaccagg

SEQ ID NO: 31170 - DNA, 201 bp, Homo sapiens
agcacacctgctcctgggtgtcaagataacctcgaaagtaatcagagaatggacctttcttatacctgtggcatctggcattctgaattttgagagctgamccatgcatgttctttaaaagagggaatacattgctagatttttagagagctttactcttctgtccagatacctcatgatatgactcaatgataaactttt

SEQ ID NO: 31171 - DNA, 201 bp, Homo sapiens
aaacaaatgcagtccagaattgtaaacaacctacatggcttttatgcataaattctaaatgattgctaatgaaaggaggatataaaaaacttacattaggwttactctattttgtggttattatactgtaaataggtatacatatggtaagtaatatgcaaacattaaaactgcagtattttggccaggttgtatttgtat

SEQ ID NO: 31172 - DNA, 201 bp, Homo sapiens
cttcacaaacctcacacatatacacagatgtgtgtgcccgtgtcctgcagaggcaggttctgtatcaccacacacgcacacgcacagggagagagactccrttcccaggctgcacgagtagggccatgccttgcagaagagaaggagggaatgagtgagtggagggcagtgccagagaactcatgcgtttccatgagatct

SEQ ID NO: 31173 - DNA, 201 bp, Homo sapiens
ggttggaggaaatgaggtaagaagttcaacttgaagcctgctgagtttaaagtatctctagaccctctagacagaggcgtccaggaaggaggtaggagccrtccacctctgagcgttcactgaagccgtttggtgtgaatgaagtatcccacctcatgagtttggaggggaagagagcagcaaaactccaatgttgagcag

SEQ ID NO: 31174 - DNA, 201 bp, Homo sapiens
tagtccctgaggacttctgcccaaggactttccttactccagttatttccacccttgaaaaacataaaatcaaccttgtacttctaaaattgcataatcasaacttcctatgaatcatatatatgacctcactgaattcaaatgagtgataagttattagatttgggggagggccggggagaaaggaggttgcagtttcaa

SEQ ID NO: 31175 - DNA, 201 bp, Homo sapiens
aatcaatttatgatgattgtgtgaggattgattcagtactttcagctcatgtcatgaaccctgattgatttttacccattaccatcctcaaattaataagygtttcttatttttcatattcttcacagggtgaaaaaggcagtgagggggaaccaggaataagagtaagtcgagtaatgagcatgccccctcccctgtggc

SEQ ID NO: 31176 - DNA, 201 bp, Homo sapiens
aaaggatccagtctcttaaccgcagaactctgatactacaaattaagttaacataaatatcacctgccataagtaatcagttaacaaatgtagagtttgarggacctggatcattttagctgattagaagttatatataagaagcgatatgcagtaaaatcttagaggagtggtctcatatagcagtgaatctaatttgat

SEQ ID NO: 31177 - DNA, 201 bp, Homo sapiens
tgtgtgtaggtttcctctgcaaagcttgaagtggcagacatgacctcagattgagttcttttatggaactctcactgtctttagtcttttatactaaatcrcatctcatttgcaggctggcagggtttctttgcagaggcgcctctttcaagaggcacatgcgttctatttagcctaacaggtgctccctcggccactgca

SEQ ID NO: 31178 - DNA, 201 bp, Homo sapiens
gggaaccaggaataagagtaagtcgagtaatgagcatgccccctcccctgtggctcctgggctgtcggcgctctgccaggcatgacggggtgcaccatgcsctcggggcccgcacaccgccagtctctcatccccttgtccatagcagaacagtattagcatgcatttttacactgtattttaagaagtcagttctagaat

SEQ ID NO: 31179 - DNA, 201 bp, Homo sapiens
gaagcaaatggagttctcctactcagttccacctccacctgctagttcccctttcctcggctgtttctgttttatgtggttcaatttttcaataaactacrtcatcttctactctatatatcatcaatttcattatcaagaaacatatctattactttaagtgattcttatagtagatgttgaaagatatttacacatgca

SEQ ID NO: 31180 - DNA, 201 bp, Homo sapiens
cgcgtcgtgttgtgggaagtcccccctcaataggaccattgtcctctatgaggactgtccaggacttcagggatgttgcatttgcacaggctgcagtgtcratgacttggactcaccagatgcagcctcagtgttccctgtggctgtgtgtaggtttcctctgcaaagcttgaagtggcagacatgacctcagattgagtt

SEQ ID NO: 31181 - DNA, 201 bp, Homo sapiens
cacagagttattttataattttgaaataactccacagagttattttaaaaagtgttcgttgagacctagtctcctttgaggaatacatgccacaccaacaygcgtcgtgttgtgggaagtcccccctcaataggaccattgtcctctatgaggactgtccaggacttcagggatgttgcatttgcacaggctgcagtgtcg

SEQ ID NO: 31182 - DNA, 201 bp, Homo sapiens
gcccctggtttccaagggaggatgtggcttgtgtgagtaattcctgggcttgcagggaggggagaccattaggtggaagaccaggtgggtgctgctggtcyagctgagaggggaacgcacccgtggggaacctgggtgggggcacatctggagaggacttctgagccgggtggagctcaaagaggtgaaggtggtgcgcgg

SEQ ID NO: 31183 - DNA, 201 bp, Homo sapiens
gtggaagaccaggtgggtgctgctggtccagctgagaggggaacgcacccgtggggaacctgggtgggggcacatctggagaggacttctgagccgggtgragctcaaagaggtgaaggtggtgcgcgggatgctgccttatgacaaatgctgccttacgacacagatggcgctccacgggggtcctgcggccgcatcatc

SEQ ID NO: 31184 - DNA, 201 bp, Homo sapiens
gtggccggccctgccctacggcggtaagcgactttctgcctggtccccgtgggtcacgcgcgcatggacccttcggtgtaactctcggggactgacaagcygggcccgcacgttcacgtctctcttcctccctttcccatgcaggtggctgctgctggggacagtgaccgtggggttcctcgcccagagcgtcttggcggt

SEQ ID NO: 31185 - DNA, 201 bp, Homo sapiens
tccgtggggctgatgccgtgcatctgcgtgggaccccaggcgtcgtggggctgatgccgtgcgtctgcgtgggaccccaggcgtccgtggggctgatgccvtgcgtctgcgtgggaccccaggcgtccgtggggctgatgccctgcgtctgcgtgggaccccaggcgtccgtggggctgatgccctgcgtctgcgtgggac

SEQ ID NO: 31186 - DNA, 201 bp, Homo sapiens
tccgtggggctgatgccctgcgtctgcgtgggaccccaggcgtccgtggggctgatgccgtgcatctgcgtgggaccccaggcgtcgtggggctgatgccstgcgtctgcgtgggaccccaggcgtccgtggggctgatgccctgcgtctgcgtgggaccccaggcgtccgtggggctgatgccctgcgtctgcgtgggac

SEQ ID NO: 31187 - DNA, 201 bp, Homo sapiens
gttgaaatagctgctctgccagcctgacggtccacgctcgggtttcttctttggaaatatgtgtactgtcaaaaactccaaaaggctattctcacatcctrtttttctcttttctttctctagggagaagccggagacccagggccccctggactacctgcctactcccctcacccttccctagcaaaaggtgtgtgaaca

SEQ ID NO: 31188 - DNA, 201 bp, Homo sapiens
caaagcaaatttccccggtgctgtgaaagtcattcttgcaagtagccccgtctgtgaaagacctggtcaaggtggctgaaatcagggtcatacgaggcgcygttgctgtttcactccatagggttattggcttagtcacggcacacatgccacatggttggatttcatactttaaatgcaccactcggagaagtccggcac

SEQ ID NO: 31189 - DNA, 201 bp, Homo sapiens
gaccctacccattacccagttctaaagctaattttacatttttaagtatttgttaccccagcatcccacttttaataccagtttctgtctcagtccattcrtagtccatgctataacaaaaataccttaagagtaggtgatttatgtacaacagaatgttattgctcatagttctgcaggctgggaagttgaagagcaagt

SEQ ID NO: 31190 - DNA, 201 bp, Homo sapiens
caaattctttgctgctttgtgacaaggatggccttccctttagtttcaataacatgcttctcatttctgtctgagacctcatcagaatggcctttcctgtmcacatttctaccaacattctgatcatgaccacttagggaatctctaagatggttgaggctttctctacagcccccctcttcttatgagccctcgtcagaa

SEQ ID NO: 31191 - DNA, 201 bp, Homo sapiens
tttacactttactataggcagtcaagaaaagtcatgccacaccttcactttgcttagatatttcttctgccaaatatcctattttatggctcagaagtctrccttccacaaaacacaagtagatgagcatgattcagccaaattctttgctgctttgtgacaaggatggccttccctttagtttcaataacatgcttctca

SEQ ID NO: 31192 - DNA, 201 bp, Homo sapiens
tacaatctcgatgttctctgctgaacatgttttctactcttctactacctggacagtctaagaattttctaaatctttcagttctgctctctgtttcttgmtaaattccatctttaatttgtttctctctgtttacactttactataggcagtcaagaaaagtcatgccacaccttcactttgcttagatatttcttctgc

SEQ ID NO: 31193 - DNA, 201 bp, Homo sapiens
tcttaccacaggaaaaagaaactaacaactttcatagcactttctggcttattttataaactactgtagcacacatttttccctgaatggggatataaagmctcattatttccaaaagccaatggcagaataaggtttccatcctgagcccttccagggtataataacagcaactggatgatcctcaaaaggatcatcaga

SEQ ID NO: 31194 - DNA, 201 bp, Homo sapiens
tcaccttacggagtgaggagcccctctcccacaacactgcccttgtggggcctctgttgttggccctgctcctgtgtcaggtctgtgcctggtcacagaasttctccagggcatcccttggaagctgggtggaggtggccacattctcacagctcttgcactctgtgtgcctgcagagttggcaccacgtggaggtcacga

SEQ ID NO: 31195 - DNA, 201 bp, Homo sapiens
ggcgtctctgtggtgcccatgccctgtgtctggggggaccctgggcatccttgatgctggtgcctcacaactgggtgggatgccgggcacccatggtgccratgccctgcgtctgcgtggaaccccaggcgtccgtggggctgatgccctgcgtctgcgtgggaccccaggcgtccgtggggctgatgccgtgcgtctgcg

SEQ ID NO: 31196 - DNA, 201 bp, Homo sapiens
acagcaactggatgatcctcaaaaggatcatcagactttcccacagaaggcctccctttaaccctgtcctccccaagaagctgagatagcatagtgcaggaaggcttggcagcttcttggaacttctttattttaaattcagctattttcatcctaaattttaatgtccttgtcttttcatttaattttgaaatctattat

SEQ ID NO: 31197 - DNA, 201 bp, Homo sapiens
cgtggggctgatgccctgcgtctgcgtgggaccccaggcgtccgtggggctgatgccctgcgtctgcgtgggaccccaggcgtccgtggggctcatgcccygcatctgtggttgtctctctaggcttcctgtttgggctgaaaggagcaaaaggaagagcaggcttccctgggcttcccggctcccctggagcccgcggac

SEQ ID NO: 31198 - DNA, 201 bp, Homo sapiens
aggggtgaggatctggggtcagtccaccagcacagcctcagtcaggggtgaggatctggggtcagtccaccagcacagcctcagtcaggggtgaggatctrgggtcagtccaccagcacagcctcagtcaggggtgaggatctggggtcagtccaccagcataatcctcccaggagcccagcagtagagttgaccatgccc

SEQ ID NO: 31199 - DNA, 201 bp, Homo sapiens
gggaccccaggcgtccgtggggctgatgccctgcgtctgcgtgggaccccaggcgtccgtggggctgatgccctgcgtctgcgtgggaccccaggcgtccrtggggctcatgccctgcatctgtggttgtctctctaggcttcctgtttgggctgaaaggagcaaaaggaagagcaggcttccctgggcttcccggctccc

SEQ ID NO: 31200 - DNA, 201 bp, Homo sapiens
tctgcaatgggctgggcctaacaggtccgccaatacacaaatttggaacactttcctttaagcaagtcaaagggaagggaattgtccaaccaatcagtgaytgagtttgttccaccaccctgtagaaaggaaaatggaattcgatgtgctctttcgacatctttggaactctgcagtcaggactttccccatgggaggtga

SEQ ID NO: 31201 - DNA, 201 bp, Homo sapiens
tgcgtgggaccccaggcgtccgtggggctgatgccctgcgtctgcgtgggaccccaggcgtccgtggggctgatgccctgcgtctgcgtgggaccccaggygtccgtggggctcatgccctgcatctgtggttgtctctctaggcttcctgtttgggctgaaaggagcaaaaggaagagcaggcttccctgggcttcccgg

SEQ ID NO: 31202 - DNA, 201 bp, Homo sapiens
gcgtgggaccccaggcgtccgtggggctgatgccctgcgtctgcgtgggaccccaggcgtccgtggggctgatgccctgcgtctgcgtgggaccccaggcrtccgtggggctgatgccctgcgtctgcgtgggaccccaggcgtccgtggggctcatgccctgcatctgtggttgtctctctaggcttcctgtttgggctg

SEQ ID NO: 31203 - DNA, 201 bp, Homo sapiens
accaaagccgtatgtcgaggagtagcaaggaacgaggccagaaaaatttgacagatccgtaccacaaagggaatgcacagccaagccaaaaagagggggarccccagtgagatagtaggtggccatggcagatcctgaaccagcaagtctatgaccataacttagggaattgagggcaattagcctctcacagcctgagga

SEQ ID NO: 31204 - DNA, 201 bp, Homo sapiens
atagagatttcctgcccacgtacacatattctggttacacaggaaggctcatgagttgactactttggccagccttctattttgtaagtattggcagagaratacttaagaaaaaaaatgatttcataagtaaacttataattaagagaatgaagaagaagatgtagctcttggggcttccattgcctcctaacagaaaac

SEQ ID NO: 31205 - DNA, 201 bp, Homo sapiens
taaccactggctttaatggctgttccttgtgaaataatgtttcaattttcaactgtattgattaaagatttttcttaattgtggcaaggactctttcctgygtaggtcagttcaggaaaaagggctgccgccgggagccctttggcttgttttgtttcggaagcagctaggatgggcagtgaagagccttggtgattactt

SEQ ID NO: 31206 - DNA, 201 bp, Homo sapiens
gtttatatagagaaccaaaaaaacagaaaaattactatgatgactattaattacatcattttccaaaagggggaaaaatattgtaatcaatgaaacctgartatacttttataattgataagattaaaaaagttgtaattccacttcagtaactaaaagagttattcagaagataaagcatttataatgatggacctagat

SEQ ID NO: 31207 - DNA, 201 bp, Homo sapiens
aaataatgtttcaattttcaactgtattgattaaagatttttcttaattgtggcaaggactctttcctgcgtaggtcagttcaggaaaaagggctgccgcygggagccctttggcttgttttgtttcggaagcagctaggatgggcagtgaagagccttggtgattacttattgggcacttcctgtgtgccaatttgtctg

SEQ ID NO: 31208 - DNA, 201 bp, Homo sapiens
tcccataggtattcaaacacgtattcaaaattaagacagcagaaagtctaaatgtttaaaatatgcttcattaacttctgattccttgaatctatccccayttattaatgtttatatagagaaccaaaaaaacagaaaaattactatgatgactattaattacatcattttccaaaagggggaaaaatattgtaatcaatg

SEQ ID NO: 31209 - DNA, 201 bp, Homo sapiens
cactccgggtatttcagacaaacttctcctcgcgtcacagaccacatttgattccatccaaaacacaatctgtgatatcacctccaccacccaaccagccstcccagcaggtcagtctcagaaatataactctgcattttacatttgactcttgtcatcaaaagacaagcaattgaatgtgctttagagtgattctcttaa

SEQ ID NO: 31210 - DNA, 201 bp, Homo sapiens
aaatgcagtaagaaaagtagcctcccataggtattcaaacacgtattcaaaattaagacagcagaaagtctaaatgtttaaaatatgcttcattaacttctgattccttgaatctatccccatttattaatgtttatatagagaaccaaaaaaacagaaaaattactatgatgactattaattacatcattttccaaaagg

SEQ ID NO: 31211 - DNA, 201 bp, Homo sapiens
  misc_feature (1)...(201): n = A,T,C or G, or insertion/deletion polymorphism (see Tables 1-2)
gtccagggagcccgggcctgccgggtatgccaggccgcagcgtcagcatcggctacctcctggtgaagcacagccagacggaccaggagcccatgtgcccngtgggcatgaacaaactctggagtggatacagcctgctgtacttcgagggccaggagaaggcgcacaaccaggacctgggtaggtacctcccacccggcc

SEQ ID NO: 31212 - DNA, 201 bp, Homo sapiens
cttgctctctgcagtgtagcagtctcagcacttccttacacccccttctatgaaactatgccatcacttttcttcaagataaactgttttatttactgcartatttctttacttgagaagttaacatgtccattaaactgtgctattatttgtattaggattgctaccaattttattaaggccctagttacaaagttgcat

SEQ ID NO: 31213 - DNA, 201 bp, Homo sapiens
attcgcccaaataatcattccaaaccggggagtcttgggggagtgcaggatgtccagatagcaccagccctttgttaactggagagacgacagacaataamcccggcgtggtgaaacccggcccacacgtcccgcccgccccagagccaatgctagggccatcaggtggccctggtagccagtggttccaggaccagcatc

SEQ ID NO: 31214 - DNA, 201 bp, Homo sapiens
cattccttctccctgaaagagttgatggttagatttcataacacagaagctagtaaagcaaatgcagtaagaaaagtagcctcccataggtattcaaacaygtattcaaaattaagacagcagaaagtctaaatgtttaaaatatgcttcattaacttctgattccttgaatctatccccatttattaatgtttatataga

SEQ ID NO: 31215 - DNA, 201 bp, Homo sapiens
ggcatccgccaccacacctggctaattttttgtatttttagtagagacgaggtttcaccgtgttagccaggatggtctcgatctcctgacctcgtgattcrcccgcctcggcctcccaaagtgctgggattgggacttgatgattttcatggtcaatacaacagaggggtgtcgttcctctttgaagcgtttcccaaccga

SEQ ID NO: 31216 - DNA, 201 bp, Homo sapiens
accttcaaatgcaggcaactcatatttcgacggggcaccctccagtgctccgagatggaaattgcctgcatttcagtgccctgttctgtggctccagcgcyctgctgtatgcccactgtgaaggctgcttgtcacctgtgctgcccagctcaacccggcccctttggtcgctgtcctgcctgcctgacggctgacgacggc

SEQ ID NO: 31217 - DNA, 201 bp, Homo sapiens
tatgtgataaaagtgaaaaagttggtcttcagatacctactacagaaaaaaaagtgaaaaagttcttaagcagatgagaaatttaaataagattttaagtrttttctgaacattaattcacctcttgacttttgaaactttggtcagacggaaatgttcattccttctccctgaaagagttgatggttagatttcataaca

SEQ ID NO: 31218 - DNA, 201 bp, Homo sapiens
gtatgcccactgtgaaggctgcttgtcacctgtgctgcccagctcaacccggcccctttggtcgctgtcctgcctgcctgacggctgacgacggccccacrcccatgtctacaccctgggtgtttgctgtgtaggttccaggcttctagaccagatgactcaagatgaggcacatgtgagtctccacccagcacctaataa

SEQ ID NO: 31219 - DNA, 201 bp, Homo sapiens
cgggacgccgggagcggagctggccgggaactcaccttcgcagcggcccggctgtgctcctcgtggagcagaagggcggcgggcagcagcagcagccagasgctgagccggggccccatggtggcgcgcccgaggcggcgagggacggctgcccggcgtgcgggggccgcggcggacagctagctctcggaaggccggact

SEQ ID NO: 31220 - DNA, 201 bp, Homo sapiens
gaactttaacaaagtttttatgctgactgcttctgcaacctcactaactagccagcctagataggaaactcccttcttaattcattcataaagtacctttygatatatagacccaatctctaataaaccttttggagatcaatttgcatatgtgataaaagtgaaaaagttggtcttcagatacctactacagaaaaaaaa

SEQ ID NO: 31221 - DNA, 201 bp, Homo sapiens
gacaaggcatttccaaggcagcgttggcttagactatgttggctgggcttcaactctcattcatgtgtcaggagctctaggccggggagccaggcattggwgaccctttagctgggaaggctcggggggctgagttacatcaccaaaccctcacagcagccctgtgcaagggtgccatcatcctccctttgtgcagaagat

SEQ ID NO: 31222 - DNA, 201 bp, Homo sapiens
tgtgtagtaatcagacaaattctccaaaacatacagccagctggattcctgaactttaacaaagtttttatgctgactgcttctgcaacctcactaactasccagcctagataggaaactcccttcttaattcattcataaagtaccttttgatatatagacccaatctctaataaaccttttggagatcaatttgcatat

SEQ ID NO: 31223 - DNA, 201 bp, Homo sapiens
tgccccgcgtccacccggcaggctcccaccccagtgccccgtgtccacccggcaggctcccaccccagtgccccgtgtccacccggcaggctcccaccccrgtgccccgcgtccacccggcaggctcccaccccagtgccccgtgtccacccggcaggctcccaccccggtgccccgcgtccacccagcaggctcccaccc

SEQ ID NO: 31224 - DNA, 201 bp, Homo sapiens
gtggcttcaaaggaccagtcacttctctgcctgaactcttgccctttgctacatcattcatgttcccagttggcccctcacacctgctcttcagcatcccrggttctcagcagttcctacctggggccctgcctgccatccctccactgtcattcagcctgctttaaatgtctcaggatgactaatgtcactgggatgtgt

SEQ ID NO: 31225 - DNA, 201 bp, Homo sapiens
tgtattagcgtgctgcatttgttacaactgataccagtgttggccttccattattcttttaaatgtgaatctgactctggggatttgtgtgactgaatctygcagattgagaacgatttttaacaaccagccatgcttgtaaaaacatgtggaagtttctctgactctgaaataagagggacaagatggttcccatgcagg

SEQ ID NO: 31226 - DNA, 201 bp, Homo sapiens; identical to SEQ ID NO: 6864

SEQ ID NO: 31227 - DNA, 201 bp, Homo sapiens
acaaattcaaaacaagtaaaaaagatctgatggaattagcagacacatgtcaaattatccacagcttcttgctggagacacatggaaagatagggtgcagmacgtctccggggacccagagctggagaactcctagcagcctccattttctacaaagccacgggtcctccacagggttggccctagtgcccagaggtcaac

SEQ ID NO: 31228 - DNA, 201 bp, Homo sapiens; identical to SEQ ID NO: 6865

SEQ ID NO: 31229 - DNA, 201 bp, Homo sapiens
ggtaagaacatctgggagggacgggatgaggacagcctggcctttccaagtccctcaccttacagaaggtgaaatccatcccccactcacgtgtttggacrtgaaaatgagcctgcatgtctctcccagcctcctgtccccttggcggtggcactgagagggaggcgcatggagccagtggtgctgtctgagcactcggcc

SEQ ID NO: 31230 - DNA, 201 bp, Homo sapiens
cccgcggaccaaaggggtggaaaggtaagaacatctgggagggacgggatgaggacagcctggcctttccaagtccctcaccttacagaaggtgaaatccrtcccccactcacgtgtttggacatgaaaatgagcctgcatgtctctcccagcctcctgtccccttggcggtggcactgagagggaggcgcatggagccag

SEQ ID NO: 31231 - DNA, 201 bp, Homo sapiens
caagtgtcggccgcattcaccacccgtcccctgcagtctcacacctgcccgaggaggcagcccagcagtcgggggccccgagctggggaggaacgcaggcrgctgcagccccgagggagccctgcgcttgtttctaagaataggtggcttccgggatctggagttcggtttttctaaatacacctcagcccggagactcgg

SEQ ID NO: 31232 - DNA, 201 bp, Homo sapiens
tctaagaaatgggggtcatagtgcccatcagaacaggcagtgtccataaagcaccaagtgtgccacccagctctccccgctgcctgatacccctctccccrccacgctaagaggaatgcggaacaaggaggccctcctctccctcctctgcaggtgacgctggggaatgcagatgtacagaaggcgacgaagctatcaaag

SEQ ID NO: 31233 - DNA, 201 bp, Homo sapiens
aatcaaaccacgaagacagttttctttctgggtgaaatattttgcttccccctgttctagttcagttagctgaattgagttctgggaagttctgttccacrtagaaaaagtcaaaataggcctggcttgtttggccaggggctctttgtggaaatcatgttgcaaacatctaagaggcacactgctattctataggactta

SEQ ID NO: 31234 - DNA, 201 bp, Homo sapiens
ctggcgggtcctccactccagtgctgtgtgtgcccttgctatccaccaccaccgcccgcgtagcctgctaggatggcacccgttgttccttccctctccakcctgtcgtccacacggcagactcacatggcagaccgcgtagcctccctccttgatgccctttaatggcttcctactgccctcggggtaaaagccaagtcc

SEQ ID NO: 31235 - DNA, 201 bp, Homo sapiens
ctcaagggctcagctccaaggcattgtaacagaggtctgtagagagctctgtccatagcaaggtgctggtatagtcaccatccctggtcctactgagactyggtagagtgacgtggtttgcccgggtctcccttcccgttgatgaggaggcgaacttggaacaggtggtctttgcacctgaccctttccagtcacctcagg

SEQ ID NO: 31236 - DNA, 201 bp, Homo sapiens
cacgctaagaggaatgcggaacaaggaggccctcctctccctcctctgcaggtgacgctggggaatgcagatgtacagaaggcgacgaagctatcaaaggwcttccgggactgccaggacccaagggcttcgcaggcatcaacggggagccggggaggaaaggggacagaggagaccccggccaacacggcctccctgggt

SEQ ID NO: 31237 - DNA, 201 bp, Homo sapiens
tgtaatacattgatatgtaatatattaatatgcaattataataataatagcattgttattatttctccactttggcccacaaacctgaattcagccacttctatgtagagagtactcagataaaaaagaaaagtgagatgcttacgctctagaagaccatgatgtgggacagagacggaagcatgggatcttctactgatt

SEQ ID NO: 31238 - DNA, 201 bp, Homo sapiens
gagcactaaaccaacctgtgcataggacaggctgctcattctgctcattctatttctaatgagcagaaatcagactttttaggaaacggtgaattaagttrgaagccaagctccaaatgaacatttaaaagtcaacaatcaaagaaatattcctcctggtgtaacagactaagaaccctcccccgccaaaaaaagtagact

SEQ ID NO: 31239 - DNA, 201 bp, Homo sapiens
ctcattctatttctaatgagcagaaatcagactttttaggaaacggtgaattaagttggaagccaagctccaaatgaacatttaaaagtcaacaatcaaakaaatattcctcctggtgtaacagactaagaaccctcccccgccaaaaaaagtagactattctaaaatgggtggtggaaccctatttttccaaggtaaatc

SEQ ID NO: 31240 - DNA, 201 bp, Homo sapiens
tgtggtcaagaataattgttggccatttcctgctctggaaaccatctggtctgctgtggtgccctctatcctccctcctctttaactataaattaagtcckaaaagaaagaagtagaagaactgagacaatttaggaccaagaaagtaaagttaagaaataattgtattaagtctgtaagtttagaaagggctgatagcca

SEQ ID NO: 31241 - DNA, 201 bp, Homo sapiens
ggccatttcctgctctggaaaccatctggtctgctgtggtgccctctatcctccctcctctttaactataaattaagtcctaaaagaaagaagtagaagarctgagacaatttaggaccaagaaagtaaagttaagaaataattgtattaagtctgtaagtttagaaagggctgatagccatggggcaggtggttgatttt

SEQ ID NO: 31242 - DNA, 201 bp, Homo sapiens
taataattcctgaacagcttcttgctgtgagtatgaaagttctctggtaattgtgattggagtgcccagccatgtgtgcgtgaacgccacacggggctccyctgtaggggggaatggatgggatgcacccattatcaggtgatttggacagttgcccacgtgagttgggagcctgttccaccatcaaatgtgagcccttac

SEQ ID NO: 31243 - DNA, 201 bp, Homo sapiens
aggcagaatgttttggatggtaaaaatcctgactcccaaagcatcaacattccaagtaactacttcagtttcagttccgctcaccagtgctacaggagcascgtgcagcgggtcctgcttccattcgactggctgtgcgggacggccacaaacacacgcaggtgcaccctgcgcttctgagcagaactctcggaatgaagt

SEQ ID NO: 31244 - DNA, 201 bp, Homo sapiens
tccacccggcaggctcccaccccagtgccccgtgtccacccggcaggctcccaccccagtgccccgtgtccacccggcaggctcccaccccggtgccccgygtccacccggcaggctcccaccccagtgccccgtgtccacccggcaggctcccaccccggtgccccgcgtccacccagcaggctcccaccccagtgcccc

SEQ ID NO: 31245 - DNA, 201 bp, Homo sapiens
tgccccgtgtccacccggcaggctcccaccccagtgccccgtgtccacccggcaggctcccaccccggtgccccgcgtccacccggcaggctcccaccccrgtgccccgtgtccacccggcaggctcccaccccggtgccccgcgtccacccagcaggctcccaccccagtgccccgtgtccacccggcaggctcccaccc

SEQ ID NO: 31246 - DNA, 201 bp, Homo sapiens
tgaaacctttgcagttggagccagagggactccacacaccttctagcccagcgctgggagtctgtgggtgggaccccgagtggtgatgtgttgcactcaaygccatgccatgggtgaggagcagaacctggtccacactcactctggtaaactgacaccccattaaaccatgttttaaaacttgtgtattgggaacttcac

SEQ ID NO: 31247 - DNA, 201 bp, Homo sapiens
tgccccgtgtccacccggcaggctcccaccccggtgccccgcgtccacccggcaggctcccaccccagtgccccgtgtccacccggcaggctcccaccccrgtgccccgcgtccacccagcaggctcccaccccagtgccccgtgtccacccggcaggctcccaccccggtgccccgcgtccacccggcaggctcccaccc

SEQ ID NO: 31248 - DNA, 201 bp, Homo sapiens
atgatttaattgaaatcacagagcagtgatcagcagcagcgaagatgaccctcacagctggggagcccatgcttgatgtggtcagcattgcctccctgcakgagggcccggctcagggagtccttctcagacccctctgtcttccctatggtctattaatctccccatgcaagggaagatgatggacatcaaatcgactgt

SEQ ID NO: 31249 - DNA, 201 bp, Homo sapiens
tccacccggcaggctcccaccccggtgccccgcgtccacccggcaggctcccaccccagtgccccgtgtccacccggcaggctcccaccccggtgccccgygtccacccagcaggctcccaccccagtgccccgtgtccacccggcaggctcccaccccggtgccccgcgtccacccggcaggctcccaccccagtgcccc

SEQ ID NO: 31250 - DNA, 201 bp, Homo sapiens
gtttataaaggcaagacacttctcccaacccatgcaggacgtcctcacagatcagcttcttcaaggagacctagcccagcccgtgaatgagtggtggcagygctggcagcatgagaacaggagttgaaacctgctctcaccccggccaaagatcacatcgcttccctttcctataaagtagtgcatcatgtggaggacatt

SEQ ID NO: 31251 - DNA, 201 bp, Homo sapiens
caggctcccaccccggtgccccgcgtccacccggcaggctcccaccccagtgccccgtgtccacccggcaggctcccaccccggtgccccgcgtccacccrgcaggctcccaccccagtgccccgtgtccacccggcaggctcccaccccggtgccccgcgtccacccggcaggctcccaccccagtgccccgtgtccacc

SEQ ID NO: 31252 - DNA, 201 bp, Homo sapiens
ctctgtcatgctccaaactgctgccccatttttagaccacagagcaagatgaatgctgttggaaggaatgtgtttatgagagagacagtttttaatccatmagagagcaatacttgcgactttaaatatggcatatggtgaaaaagtgtccctgtgatgagtcagcaaaaaaaattatttcacccctcacatatacgaggg

SEQ ID NO: 31253 - DNA, 201 bp, Homo sapiens
tgccccgcgtccacccggcaggctcccaccccagtgccccgtgtccacccggcaggctcccaccccggtgccccgcgtccacccagcaggctcccaccccrgtgccccgtgtccacccggcaggctcccaccccggtgccccgcgtccacccggcaggctcccaccccagtgccccgtgtccacccggcaggctcccaccc

SEQ ID NO: 31254 - DNA, 201 bp, Homo sapiens
taaatgaggaaacattatccagaaaactcacttaaatggagcgactgaggccgggcacggtggctcatacctgtaatcccattactttgggaggccgaggygggtgaattacgaggtcaggagttcaagaccagcctggccaacatggtgaaaccccgtctctactaaaaatacaaaaagttagctggccgtggtggcggg

SEQ ID NO: 31255 - DNA, 201 bp, Homo sapiens
tccacccggcaggctcccaccccagtgccccgtgtccacccggcaggctcccaccccggtgccccgcgtccacccagcaggctcccaccccagtgccccgygtccacccggcaggctcccaccccggtgccccgcgtccacccggcaggctcccaccccagtgccccgtgtccacccggcaggctcccaccccggtgcccc

SEQ ID NO: 31256 - DNA, 201 bp, Homo sapiens
taatacattgatatgtaatatattaatatgcaattataataataatagcattgttattatttctccactttggcccacaaacctgaattcagccacttctrtgtagagagtactcagataaaaaagaaaagtgagatgcttacgctctagaagaccatgatgtgggacagagacggaagcatgggatcttctactgattgt

SEQ ID NO: 31257 - DNA, 201 bp, Homo sapiens
tttaaaaaacactgataatcacactgcggtaggtcattcttttgccacatccctatagaccactgggtttggcaaaactcaggcagaagtggagacctttytagacatcattgtcagccttgctacttgaaggtacaccccatagggtcggaggtgctgtccccactgccccacgttgtccctgagatttaacccctccac

SEQ ID NO: 31258 - DNA, 201 bp, Homo sapiens
aaactcaggcagaagtggagacctttctagacatcattgtcagccttgctacttgaaggtacaccccatagggtcggaggtgctgtccccactgccccacsttgtccctgagatttaacccctccactgctgggggtgagctgtactcttctgactgccccctcctgtgtaacgactacaaaataaaacttggttctgaat

SEQ ID NO: 31259 - DNA, 201 bp, Homo sapiens
gagtcaccattctcagctaacttacgtatttttagtagagacagggtttcaccatgttggccaggctggtttcaaactcctgatctcaggtgatccgcctrcctcagcctcccaaagtgctgggattacaggcatgagccaccacgccctgccatcatccactttttctcccagtaacatgtcttctttagctgacattgc

SEQ ID NO: 31260 - DNA, 201 bp, Homo sapiens
gctacttgaaggtacaccccatagggtcggaggtgctgtccccactgccccacgttgtccctgagatttaacccctccactgctgggggtgagctgtactyttctgactgccccctcctgtgtaacgactacaaaataaaacttggttctgaatatttttaaaccccgagttgttgaccgccttaatctcgtgtccataga

SEQ ID NO: 31261 - DNA, 201 bp, Homo sapiens
tgcaagccatgcccccaccctcgacctgcatgaacgtcacagtgggcccatgagctgatgacttcagagcaggtcctggaggccagggcagacactgcccmgtgccattgggccttggcatatgaggccactgcctctggctagtgatgagggaaagacgaccttccatgatgacgttcacacactgatcataatgtcatt

SEQ ID NO: 31262 - DNA, 201 bp, Homo sapiens
ccccacacacacagacacacacatgtacatatagacacacttgcaccacactcacacatacacacagatgcacacacacacgcacatacacatagatgcamatacacagagacacacacttgcacccacacacacacagaaacacatgtacacacacataaacacacatgctcatgcgtgtacacacacacacacttagcc

SEQ ID NO: 31263 - DNA, 201 bp, Homo sapiens
cagtgccattgggccttggcatatgaggccactgcctctggctagtgatgagggaaagacgaccttccatgatgacgttcacacactgatcataatgtcaytcaggacacacactcttctctcaaaatatgggaataatttgaatccgtcatcttccttcgcatgagttgcatctcatttgtattagttcgttctcatgct

SEQ ID NO: 31264 - DNA, 201 bp, Homo sapiens
cgaccttccatgatgacgttcacacactgatcataatgtcattcaggacacacactcttctctcaaaatatgggaataatttgaatccgtcatcttccttygcatgagttgcatctcatttgtattagttcgttctcatgctgctatgaagaaataccagagactgggtaatttataaaggaaagaggtttaattgattca

SEQ ID NO: 31265 - DNA, 201 bp, Homo sapiens
agccggggaggaaaggggacagaggagaccccggccaacacggcctccctgggttcccagggctcaaggtgaggagcaatttcatcatgaagctggcaagrcactctgaggcctccccaggtgtcccgttcttgccttttatctcctaagtttacacagcttcagaccggcaacactcatggacccaaggcatggctaaac

SEQ ID NO: 31266 - DNA, 201 bp, Homo sapiens
cgggatgaaaggtgacgatggcagcccaggccgcgatgggctcgatggattccccggcctcccaggccctcccgtgagtagccacaaactgcggcagctcygtcctctcttcttcatccttcaggttctccaaacaccccagaagcaaacagtattgacatgagcactaaaccaacctgtgcataggacaggctgctcatt

SEQ ID NO: 31267 - DNA, 201 bp, Homo sapiens
gacgccggcttacctggaccaccaggcttcctgggccctcctggccccgcagggaccccaggacaaataggtatgaaggaatcctcccttttacctttcayagtcctgagacattccacgctttcctttgtcagtgtagacgtttcccagtagagtcagatgaggatgctgttttgcctcatctgttctcgcacgtacaag

SEQ ID NO: 31268 - DNA, 201 bp, Homo sapiens
ctcattaggcttttgttctatctgagcagagttttctgctttcttggctaaaataagatgcatgcagctttaattgtatctccctttattcaaggtcttcrctggcaaccttaagtatcaaggatttgctgctcaaatcatttgtaaataaaactcagatgtaaggaaatacagacaagggaggacaaaagttttgtccaa

SEQ ID NO: 31269 - DNA, 201 bp, Homo sapiens
ccacactcacacatacacacagatgcacacacacacgcacatacacatagatgcaaatacacagagacacacacttgcacccacacacacacagaaacacatgtacacacacataaacacacatgctcatgcgtgtacacacacacacacttagccggaggacgctcctggtttctttcttcatgggagcagccaaggcag

SEQ ID NO: 31270 - DNA, 201 bp, Homo sapiens
cacactcacacatacacacagatgcacacacacacgcacatacacatagatgcaaatacacagagacacacacttgcacccacacacacacagaaacacatgtacacacacataaacacacatgctcatgcgtgtacacacacacacacttagccggaggacgctcctggtttctttcttcatgggagcagccaaggcaga

SEQ ID NO: 31271 - DNA, 201 bp, Homo sapiens
aatacacagagacacacacttgcacccacacacacacagaaacacatgtacacacacataaacacacatgctcatgcgtgtacacacacacacacttagcyggaggacgctcctggtttctttcttcatgggagcagccaaggcagaaaaagactatacctgcctctggggagcatcaaacagacctgtttctttagggtc

SEQ ID NO: 31272 - DNA, 201 bp, Homo sapiens
gagacacacacttgcacccacacacacacagaaacacatgtacacacacataaacacacatgctcatgcgtgtacacacacacacacttagccggaggacrctcctggtttctttcttcatgggagcagccaaggcagaaaaagactatacctgcctctggggagcatcaaacagacctgtttctttagggtcccttctgc

SEQ ID NO: 31273 - DNA, 201 bp, Homo sapiens
cacacagaaacacatgtacacacacataaacacacatgctcatgcgtgtacacacacacacacttagccggaggacgctcctggtttctttcttcatgggrgcagccaaggcagaaaaagactatacctgcctctggggagcatcaaacagacctgtttctttagggtcccttctgcagagaggctggacagaggcgggag

SEQ ID NO: 31274 - DNA, 201 bp, Homo sapiens
gccttgctacttgaaggtacaccccatagggtcggaggtgctgtccccactgccccacgttgtccctgagatttaacccctccactgctgggggtgagctrtactcttctgactgccccctcctgtgtaacgactacaaaataaaacttggttctgaatatttttaaaccccgagttgttgaccgccttaatctcgtgtcc

SEQ ID NO: 31275 - DNA, 201 bp, Homo sapiens
tcctggtttctttcttcatgggagcagccaaggcagaaaaagactatacctgcctctggggagcatcaaacagacctgtttctttagggtcccttctgcakagaggctggacagaggcgggagggtgactgagtagcctcatgaactctgaaaagtaaaggctaagatgactgcactcaggagaggcccttaaaggatgac

SEQ ID NO: 31276 - DNA, 201 bp, Homo sapiens
cctgcagaaccaagagtcctgcagacacaacccccaaccggccctctccaagtctggcttgaaactccgggccactggggtaaatgctgctgcagctatgyaaaggggaaaaggaggggcaaacacggctttatgtttggctgttggaaaattctgctagtcctaatttagagaaagacttactgaaacgctatgggcaaa

SEQ ID NO: 31277 - DNA, 201 bp, Homo sapiens
catctcccagctgcttcagacagtgactttcagcacccctggcagagacgctgctggaatgcgcatgaagatgcgtctgcagccatcctgactgggtaggrgcgcccaggaagactcacaagccctggagagcacatcagcctttaaaccacccaagaagagcacgttggcaaggacggcctggatgggttgcttcagtgg

SEQ ID NO: 31278 - DNA, 201 bp, Homo sapiens
gctgcagctatgtaaaggggaaaaggaggggcaaacacggctttatgtttggctgttggaaaattctgctagtcctaatttagagaaagacttactgaaaygctatgggcaaaagagaccttcccaaaattatcttagacgtacaggaaacccagtgggcactacagagagacaggggattccattttccctggaccaatg

SEQ ID NO: 31279 - DNA, 201 bp, Homo sapiens
gtcctaatttagagaaagacttactgaaacgctatgggcaaaagagaccttcccaaaattatcttagacgtacaggaaacccagtgggcactacagagagrcaggggattccattttccctggaccaatgccagcttccttacgctgggtcttctctcaccgccccgtgtttgtgctgctgtttttcatggaagtccccat

SEQ ID NO: 31280 - DNA, 201 bp, Homo sapiens
ctcccttcttaattcattcataaagtaccttttgatatatagacccaatctctaataaaccttttggagatcaatttgcatatgtgataaaagtgaaaaarttggtcttcagatacctactacagaaaaaaaagtgaaaaagttcttaagcagatgagaaatttaaataagattttaagtattttctgaacattaattcac

SEQ ID NO: 31281 - DNA, 201 bp, Homo sapiens
agctagagtctgcaacctcacctatttctgcagctgacattcgagcatcagttcctgatttggccttgagtcatgcaacatgggccttcacggaacccctkttagtgagactcttttatgtcagtacttaggacgatccatgggggctactgagaaatcatagcggtttccgtctagattccagcaaactgactcatgttt

SEQ ID NO: 31282 - DNA, 201 bp, Homo sapiens
atgttggtgcgagtattcaactctttacactgtagttacatttctaaaactgggttaaaatagttcttaccttatgcacgtgcccagaggagcaagaagamattggctgtagagagtttagcaatcttagcattgcggtgcttgatcaacactagttcacatctacctggctttaggttgttgttttttaggtcttcatcc

SEQ ID NO: 31283 - DNA, 201 bp, Homo sapiens
gagaagggaacagaaggtgacatcggcttccctgggataacaggcgtgactggagtccaaggccctcctggacttaaaggacaaacaggtaaaatctcccrcagccacacagccttcctcaggcaggccctccggagaccccagaacaaaggcggtcaacattgtcaatttcctccaatcacacccaaccctggaagctca

SEQ ID NO: 31284 - DNA, 201 bp, Homo sapiens
tttatgctgactgcttctgcaacctcactaactagccagcctagataggaaactcccttcttaattcattcataaagtaccttttgatatatagacccaayctctaataaaccttttggagatcaatttgcatatgtgataaaagtgaaaaagttggtcttcagatacctactacagaaaaaaaagtgaaaaagttcttaa

SEQ ID NO: 31285 - DNA, 201 bp, Homo sapiens
gagtccaaggccctcctggacttaaaggacaaacaggtaaaatctcccgcagccacacagccttcctcaggcaggccctccggagaccccagaacaaaggyggtcaacattgtcaatttcctccaatcacacccaaccctggaagctcactcgtgcctgctgccagcttaggagctttcctcagtgctgatggcatggaga

SEQ ID NO: 31286 - DNA, 201 bp, Homo sapiens
tgagggtttctcccacccagaaccccctgtgctgtcccacacatgaaataacaatgagtgacacccccacaggtgaaataacgatgagtgacacccccatrggtgaaataacgatgagtgacacccccgcaggtgaaataaataacgatgagtgacacccccgcaggtgaaataaataacgatgagtgacacccccgcagg

SEQ ID NO: 31287 - DNA, 201 bp, Homo sapiens
tttacctttcacagtcctgagacattccacgctttcctttgtcagtgtagacgtttcccagtagagtcagatgaggatgctgttttgcctcatctgttctygcacgtacaagggatgacccaactgtgaggtttctgagcccccaccagcctcccctcagcagctgaaacatgcagcctctcctgtaggactacagtgaca

SEQ ID NO: 31288 - DNA, 201 bp, Homo sapiens
cagcaacatatacgacacaccttcacacacgtgcacgccccagacgagccagtaactcttatctgtttcaaaattgcctcactctgtccttatgtcttccycccagattgtgacacagatgtgaaaagggccgttggaggtgacagacaggaggccatccagccaggtactctgggaagtgcaggtggctttaggacacta

SEQ ID NO: 31289 - DNA, 201 bp, Homo sapiens
tgacagacaggaggccatccagccaggtactctgggaagtgcaggtggctttaggacactagagaactctcatttggtctgctggttaagctcttgcagtrtgcgtgggataagaaatattaataatatgtgcaagccacgtttgatttccatggcacaacatagtggcctggtgagcactatacattgcatgaataacaa

SEQ ID NO: 31290 - DNA, 201 bp, Homo sapiens
agcagggaggaaaccaaggctgtgcctcggatgttgtcacaggaccttggggaatggagagcttaatattcaaacggcaggcgctgagtcacggctcaggsccgttagtgtctggctcatctctagaaagcacagttgtctgggaagctccaaaagaagcctccctggtgagaaacgcagtagcactcggagcaagagagt

SEQ ID NO: 31291 - DNA, 201 bp, Homo sapiens
gggtcacatgttgtaaagagcagggaggaaaccaaggctgtgcctcggatgttgtcacaggaccttggggaatggagagcttaatattcaaacggcaggcrctgagtcacggctcaggcccgttagtgtctggctcatctctagaaagcacagttgtctgggaagctccaaaagaagcctccctggtgagaaacgcagtag

SEQ ID NO: 31292 - DNA, 201 bp, Homo sapiens
ttactctttgtgtatcattgcctttcttttttaatgtgtgttatttctggaaggcaggcaagcttttttcttgtttgtaaagatctcttctcctgttgccragagagataacctgaaaagacagaaaattgccaacttaaactgtagatatcattccattgatttatttacagagctttaaatcttattttgtggccacta

SEQ ID NO: 31293 - DNA, 201 bp, Homo sapiens
tccttctcagacccctctgtcttccctatggtctattaatctccccatgcaagggaagatgatggacatcaaatcgactgtaggctgtgctcctctgtgcrctctcacgagcactaacacctcccagcatgattctccaggactgcggctccaagaggaaagctggccccagaagcaggctgctgttcagggcctccttgc

SEQ ID NO: 31294 - DNA, 201 bp, Homo sapiens
tggacagttgcccacgtgagttgggagcctgttccaccatcaaatgtgagcccttacgtcatgaacagggaggctggggcaggctgggggtgggtggtgaytgaggaactgatcagtttctgaaacgcatgtcactttttatggtgctgaaatatactgcccttctgtcgccacatgcagaagaggataaaatgcccaatt

SEQ ID NO: 31295 - DNA, 201 bp, Homo sapiens
atagttcttaccttatgcacgtgcccagaggagcaagaagaaattggctgtagagagtttagcaatcttagcattgcggtgcttgatcaacactagttcayatctacctggctttaggttgttgttttttaggtcttcatcctcaatacctaaagaacttgaagccacagagagtgaagttcaagttaactagagttattg

SEQ ID NO: 31296 - DNA, 201 bp, Homo sapiens
aatgggatgacaccgatagatatttcaaataactggaaagtttagttccctctgaacaaagtctaactctgaggccatctgcttctttttatatcaaaacagagcagcgtctcaaagaaaataagtgtatttaaaaggaaagatcataggtagatagaattcatccgttttaaaagttgcctttttctcctttttatagca

SEQ ID NO: 31297 - DNA, 201 bp, Homo sapiens
actctgaggccatctgcttctttttatatcaaaacagagcagcgtctcaaagaaaataagtgtatttaaaaggaaagatcataggtagatagaattcatcygttttaaaagttgcctttttctcctttttatagcacctttcaaaaacatctcttctttcaacacttctagctcatcagtgagagagaacaaaaggctaca

SEQ ID NO: 31298 - DNA, 201 bp, Homo sapiens
tacctctttgaatgctgcctgcctcgaggtgtacctctcatcatcacagaaggaccaccgcttactctttgttaatgaaatctgagatgcttccaccttcmtattcttggaaaacattaggagtcccacacctcttgcagccctgatgtcctgggacccagtgtccatcccacatccagcctacttcgtccaagccaggtc

SEQ ID NO: 31299 - DNA, 201 bp, Homo sapiens
agagagagagagaaagagagagagaggagagaggcacagttactgagccatgtggccaactattaaaactaggagaaaagacacagaaaatgttgtgtgtgggggggggtgggggtaaaatgctccccctgaagagcactgaggctctagggagcccgttaaacccagataattctactagagcaggagggagctggcctg

SEQ ID NO: 31300 - DNA, 201 bp, Homo sapiens
aaggggataccggctttaaagacgccaggctgagttgctgtgtcaggattgattctttacttctccatctggaggtgtttctgctttatcagtttctcctygtttccagctctgtctcgctgccagagggccgacgtttcctggcttttgttgtactgtggcacacagtctgttttgaaaggacaggagcataataaaagc

SEQ ID NO: 31301 - DNA, 201 bp, Homo sapiens
agaggcccccctggattcagaggtgagtgccccatcggggagccgggggccccatcccagatgcacagtggcctccaagggcgaccccaatcccttccggrggatttggtaggaagcagcggtgccctatggtgctagccatgcgtaccttctcccatggccttccagcactcctttagaatgtgtctgtcacaacactgt

SEQ ID NO: 31302 - DNA, 201 bp, Homo sapiens
gggtgcgtggatgtgaaggcctggggcgtgaccgcgcaccactgtagatccatcaacactgggtcttaggcggccctaaacttacgttttcaatatttttmtttcttcagtaataaattaaccttagtttactataacttttttactttataaactgttaaactttttaaactttttgactgtttttgcaataacacttag

SEQ ID NO: 31303 - DNA, 201 bp, Homo sapiens
agccccctccccacagactttcgtgtccctaacgtcttgtttgtgttgcagggcccaggggtgaacaaggcttcatggggaacactggacccaccggggcrgtgggcgacagaggccccaagggacccaagggagacccaggattccctggtaagtgaccgtctggtatcttcagagctagtggctcagcccagcctctcc

SEQ ID NO: 31304 - DNA, 201 bp, Homo sapiens
gtggtctgcaggaaggggacacacgagagcccagaaaagccagaaatgaggcgctgccccaccctcctgctcctaatctgggcgtagcagctacactcctrtgcccagcagaacacctggccccgagtcctgggacagcctccctccttttcctgggacacctgcggtgctgtggagtgggcggcagggatcagtagactt

SEQ ID NO: 31305 - DNA, 201 bp, Homo sapiens
aaggcatcttctattgtgtattgccgtcataaaccctacccttccatgtagatagccaggattttaaaataaaactaaatcttccccaaggagagaattgygatgccctggcagcatgggcacttttgtgtgggtgtttccgtggctagaggggttctgaaatttttgtatttgtagtagagatggggtttcaccatgttg

SEQ ID NO: 31306 - DNA, 201 bp, Homo sapiens
aaaccttgagtattgtcgttagcatactggatagttaaataagtgagctaacttcagagttacaactgacttcgctaacagccttctaagatggttcatgyctgtctttagggtgacaaaggtgccccagggagagcaggcctgtatggcgagattggcgcgactggtgatttcggtgagtgttgcccgtccagtgaaaac

SEQ ID NO: 31307 - DNA, 201 bp, Homo sapiens
cccagacgagccagtaactcttatctgtttcaaaattgcctcactctgtccttatgtcttccccccagattgtgacacagatgtgaaaagggccgttggargtgacagacaggaggccatccagccaggtactctgggaagtgcaggtggctttaggacactagagaactctcatttggtctgctggttaagctcttgcag

SEQ ID NO: 31308 - DNA, 201 bp, Homo sapiens
cccacaggtaatgcacggagggaacctggagtgcacccagccttcctcccacatcttcacactgctgtgtctcccccgcccatctttcctctggtcctgcwtcccccaccccagacatggtcgtgtccagcatctcagcacaaactggtcttgcgcctacagggagcccactgtcatttgccactatagaaaaaggagtct

SEQ ID NO: 31309 - DNA, 201 bp, Homo sapiens
agctcgtgcttttgcccttggggatccccaaggccgtgggactcagtgtttaggattgcttgggctcatcttttctcctttctgtccccaggttgcatagsagggcccaagggattgccaggcctgccaggacccccaggccccacaggtaatgcacggagggaacctggagtgcacccagccttcctcccacatcttcac

SEQ ID NO: 31310 - DNA, 201 bp, Homo sapiens
tagggtggtgattatggcattgtaaaagtcttatgaaaatgagatgtatgtcaagagaaccttactatcaaaatcagttttgtgcattgcacccatgcttmgcatctgtcagcaaaagcaggctttctcaggtttggtgaaaggaatattgccgtggcctttgaggactgatgagtttccactaatttagagcaaaattaa

SEQ ID NO: 31311 - DNA, 201 bp, Homo sapiens
tacacgggctcaggataatcaatatcactgtctttcacctccacatcttgtcccaccagaaggtcttcggggcaataacacgcatggagccgtcatccccyctgggaacaatgcctgcttctggattcttcctgaagcacctgcctgaggctattttacagttaacatatgtacacatataaataggagtacactccaaaa

SEQ ID NO: 31312 - DNA, 201 bp, Homo sapiens
ttttctacgtttttattcgatgtttttttctattaaaaaaatttttttttactttttaaacttttttgttaaaaacaaagaaacaaacagacatgggagcytgggcctacacgggctcaggataatcaatatcactgtctttcacctccacatcttgtcccaccagaaggtcttcggggcaataacacgcatggagccgtc

SEQ ID NO: 31313 - DNA, 201 bp, Homo sapiens
ctctgatgaaacactcaatggggtcacccacttgcctgaataggtcctgaggaaagcctcttcccggcattcctcctccttactgagcataagtgtgtccygtagggcgaaggggaaagaaagtggacttcctctgccgacacccctcaaatgaagtcgcaagtgatatcggtggtgcagatgagggtttggcatcccgcc

SEQ ID NO: 31314 - DNA, 201 bp, Homo sapiens
tgtactagcttacctgtcaggggagaggaggcctgcgctgagactcggctgatcagaaaggggagaaaagagggtcactctgattgccatcatctcaaaaygtttaatactgtcacgatttgaaaggaagagctaaggtacttgtccagtagcccaatctccaagtccatctttgatctgaatgttgagatcaaggatgag

SEQ ID NO: 31315 - DNA, 201 bp, Homo sapiens
cctggaggccagggcagacactgcccagtgccattgggccttggcatatgaggccactgcctctggctagtgatgagggaaagacgaccttccatgatgaygttcacacactgatcataatgtcattcaggacacacactcttctctcaaaatatgggaataatttgaatccgtcatcttccttcgcatgagttgcatctc

SEQ ID NO: 31316 - DNA, 201 bp, Homo sapiens
cctcgtggagcctgatgtggtttgtggtttatttggttatttaggtgccaaaggcctccgaggaatcccaggcttcgcaggagctgatggaggaccagggyccaggggcttgccaggagacgcaggtcgtgaagggttcccaggacccccaggtgagttgagatcagacccccattcagcccctgggttccagcgggaacc

SEQ ID NO: 31317 - DNA, 201 bp, Homo sapiens
acccttctctctgaacctgccctttctccacgcaatggccttggctctccaagagtcaccctggccccattgcagcccctgctgctggggcatcctccccrgttcattgactccttccttctcttacaccagtgccttacatgcagttgctgatagaaaatacatatttgagcgttgaaggaatgtaaaactccattgcta

SEQ ID NO: 31318 - DNA, 201 bp, Homo sapiens
tgcttttagcatactgctcatttcaaccctgcttagagaagtggcagatcttataccctcaggcagctgggatatgccagccacagagggcaagatccataatctttaacagattttactgtacacgttcacagccccaaccggccataccattgcaacctaaaagaaagagaggattgaataagcagtccagaaaattca

SEQ ID NO: 31319 - DNA, 201 bp, Homo sapiens
gtaattaatctctacaaatggtagaatagttacattagtgccataatttgttatatttaagctatttttctaattcacaatcaactaaggccaaagaaaaggggggggggggtttgagctcaataatagcattaggatgtttaatgtgaaatccaagaagactaaaataatacaattaggccaggcgcggtggctcgcacc

SEQ ID NO: 31320 - DNA, 201 bp, Homo sapiens
taattaatctctacaaatggtagaatagttacattagtgccataatttgttatatttaagctatttttctaattcacaatcaactaaggccaaagaaaaggggggggggggtttgagctcaataatagcattaggatgtttaatgtgaaatccaagaagactaaaataatacaattaggccaggcgcggtggctcgcacct

SEQ ID NO: 31321 - DNA, 201 bp, Homo sapiens
aattaatctctacaaatggtagaatagttacattagtgccataatttgttatatttaagctatttttctaattcacaatcaactaaggccaaagaaaaggggggggggggtttgagctcaataatagcattaggatgtttaatgtgaaatccaagaagactaaaataatacaattaggccaggcgcggtggctcgcacctg

SEQ ID NO: 31322 - DNA, 201 bp, Homo sapiens
gcatcacacccccttccaacatctctggggcacctggtgacaaaggggcgccagggatatttggcctgaaaggtaagcaggacttatacatctgtgcttcracatctctaggggcaggagctggcaatggcccgcttaatgtagggggagaacagacgttcatttccacgctgtgcccagactccggtcaaagaggcagga

SEQ ID NO: 31323 - DNA, 201 bp, Homo sapiens
attaatctctacaaatggtagaatagttacattagtgccataatttgttatatttaagctatttttctaattcacaatcaactaaggccaaagaaaaggggggggggggtttgagctcaataatagcattaggatgtttaatgtgaaatccaagaagactaaaataatacaattaggccaggcgcggtggctcgcacctgt

SEQ ID NO: 31324 - DNA, 201 bp, Homo sapiens
gcgtcaaggttcacagcagcactactcacaagcaccgagtgctgaaagcaacccgagtgtccatcaacagaggaattaagaagcaaaatgcagtcagtatmcacccagtacaagaggagtccgtcttttttgtttggttgttttcttgttttttgttttttgagacagccttgctctgttgcccaggctggagtgcagtgg

SEQ ID NO: 31325 - DNA, 201 bp, Homo sapiens
agatgaattaaatcattaagttactctgatcccagaatggtagccggtttgcacagctcgtgcttttgcccttggggatccccaaggccgtgggactcagygtttaggattgcttgggctcatcttttctcctttctgtccccaggttgcataggagggcccaagggattgccaggcctgccaggacccccaggccccaca

SEQ ID NO: 31326 - DNA, 201 bp, Homo sapiens
tcagcccctgggttccagcgggaacctgtgtgtgattcataagcatccagctctattatcttccactttgtagaagctgttttaacaaatacttgacaacwtttgcatttgtccttgggagattagaaattcttgatttttcataactgatattgtactgggtttttgcagaagctatctacagatcttgcaggaaaaagg

SEQ ID NO: 31327 - DNA, 201 bp, Homo sapiens
cacaccctgccctaataagtcaatatttctgttcctcctggagacctcacattccaaagtgtggtacttcgggctcttgtaaatgttggaattcctaagastctctctggaggacaggtaagatgtcagtgggaacacacatacacacatgcacgtgcgtgtgtgcacgcacggctggcatgtccatggaaactgccttgg

SEQ ID NO: 31328 - DNA, 201 bp, Homo sapiens
ctattatcttccactttgtagaagctgttttaacaaatacttgacaacttttgcatttgtccttgggagattagaaattcttgatttttcataactgataytgtactgggtttttgcagaagctatctacagatcttgcaggaaaaaggagacaggtgtttcggaatggctgtcctccgcaacacctgtctcccaggtatg

SEQ ID NO: 31329 - DNA, 201 bp, Homo sapiens
atggttttacatccttttagtcattatacttttttcttttttcaaccttattatactgtctagaatatattagcaatgttaagtcaagaaaggcttattarccaagtatacattaagtagacttcaccaaaaagctttgaaatgcatattgaaacctacataagggctatttgcagaacccaagctcacatttaaaaccgc

SEQ ID NO: 31330 - DNA, 201 bp, Homo sapiens
gttttaacaaatacttgacaacttttgcatttgtccttgggagattagaaattcttgatttttcataactgatattgtactgggtttttgcagaagctatytacagatcttgcaggaaaaaggagacaggtgtttcggaatggctgtcctccgcaacacctgtctcccaggtatgtcctcagtgttaataatgattaatat

SEQ ID NO: 31331 - DNA, 201 bp, Homo sapiens
aggaagccctggatttaaaggaattgatggaatgcctgggacccccgggctaaaaggtaattgtgtgactgtgaccagggatcccttggcggggaggttgrgtctaatcaactctgacctgagacagctctgctgggcacctctgtgggccgtggggctggcctcacacttctgcagattggaggccttgggactctcctg

SEQ ID NO: 31332 - DNA, 201 bp, Homo sapiens
cagaggtcaacagagagaagttgcttagaagatggtgtccccggaaatccctattttaggttcagaatcttctcacttgagttacattgccgaaatgttasggagacgtgagactgaaatgtcccatgcattttattcatgtctaacccagcacttttctcttttcctctgaaggagatagaggctcacctgggatggatg

SEQ ID NO: 31333 - DNA, 201 bp, Homo sapiens
acagcacagtaagttgaatcaagtcctgctcatgtgtgaagaagaaactcttccttctttacattaatgccatagaagaagtcaaaaaaggacaattagcragcagtgggcttctgggaaaaaaaagaaagaaaaacattgaagatccaaacacataaaaatttatagccccatacaatgaaatataacaaaataataaaa

SEQ ID NO: 31334 - DNA, 201 bp, Homo sapiens
gacctactcaccttccagagtccccacctcttaatgccaacacactggggatcagatttctactcatgaattttggagggacacagacattcagaccatarcagttactgctcaaaacaaagaagtaaaagctagcaaataatataagtatgatgtatttagatttattttagtattgctcattgcctttttaaggtaaac

SEQ ID NO: 31335 - DNA, 201 bp, Homo sapiens
tggggccccagggcccccccggagaaccaggtagagtgctgagctggggcctggagcccctcggggctgcccgggcaaggccagggcctgctggcattgcrtcctcttgtgttctctttgtggatcgccggccgtgccaggcgtggtcagtttccagccataacgcttctttggtggcttgcaggttttcgtggggctcca

SEQ ID NO: 31336 - DNA, 201 bp, Homo sapiens
tacttctaaaactctgtcctagaatcacatcactctcttttaccaaccagattattgcattgcattggctcactagtaatgtatttctaccaaaaaaaagaaaaaaaaaacaagggttttttttacttttgacaagttttttgttttgttttgttttgttttgttttttgagacaaagtctcactctgtctcccaggctgg

SEQ ID NO: 31337 - DNA, 201 bp, Homo sapiens
cagacagggaattggctcatggaggggaaaggaggcaggagtgggtggacaaggccggaaccacatttgcaccctgaggagctgggagattccgctcaccyctctctctctctgtaagaatgctacatcccactcagggggtttccaattgtccttactctagttggcaggaacttaaaacataactgaagcatgaacaac

SEQ ID NO: 31338 - DNA, 201 bp, Homo sapiens
tttccttctaaggagcttttcttactgaacactcgatgccgtaaaagcagaagagaaatttcccctgtgtgtgtttgtccaccctgtttgatttgctcctyttcctgacaggtctgcctggtgatagaggggaccctggggacacaggcgctcctggccctgtgggcatgaaaggtctctctggtgacagaggagatgctg

SEQ ID NO: 31339 - DNA, 201 bp, Homo sapiens
cgggattcccaggattcataggaagccgggtgagtgggcgtcttttactccccttgttctgtgagctcctctcccctttgcttgtgaatggacatgctttrgtctggaatttgctagggtgagagtgtcagtggcaggttcagggcagcctcaggcttggtggggtccacacagccctggaaggagctgctgcacttggac

SEQ ID NO: 31340 - DNA, 201 bp, Homo sapiens
agacattaaaggagagaaaggagatgaagggcctatggggctgaaaggatacctgggcgcaaaaggtgaggcttctgacctgcagccaggggcccctagtycctgccgccccagcccgcaccagctcgtgcccttctccgtccccagagacgcccgtgccctccacctggctttcttcgtgcttttcatctctgggcgccc

SEQ ID NO: 31341 - DNA, 201 bp, Homo sapiens
tcttgacctcaagcaatcctcccacctcggcttcccaaagtgctgagacgacaggtgtaagccacctttcccagcctttattcggtcttaaaaagaaggarctcttatcacctgctaccacctagatgacccttgagggcattctgctgagtgaaagaagccagtcacaaaaggtcggattctgtgattccacacatacga

SEQ ID NO: 31342 - DNA, 201 bp, Homo sapiens
ctgagcagcgcacctaaaaatgattaaaatggtaacttttatgttctacgtattttacgacaattttttaaaaacatagacaaagtcattccatgccacaracttgccagagactgtcgcctgaatgggtgacggtgcacctgactgcccccaggggccttggggtcctgtttaaaccctcctttcttgtccctaatgcca

SEQ ID NO: 31343 - DNA, 201 bp, Homo sapiens
ttttaaaaacatagacaaagtcattccatgccacaaacttgccagagactgtcgcctgaatgggtgacggtgcacctgactgcccccaggggccttggggycctgtttaaaccctcctttcttgtccctaatgccaacaggttatcggggcccaccagggccaccaggttctgctgctcttcctggaagcaaaggtgacac

SEQ ID NO: 31344 - DNA, 201 bp, Homo sapiens
aatgcaaaatatgcttcaactgcaagacagagtgccaaactatttcaatttaatagcatggtttttttttttcttgagcttcaatgcaaagggaagccagrcatctggccagtgagcagtctatgagctgagctgtgcttttcttcagggcaggcagaggttggccagtggccttcttggcactcccagaaactcagcttc

SEQ ID NO: 31345 - DNA, 201 bp, Homo sapiens
aaaaaaaaaaaaaaaaaaagattcacagcacgtaggacagcaaaatgcatccaggctgcaaaattgaaaactggagggcgggtgctgcgtcctcaccagaktgttacacaccagggtcttcctgcaggtatccaaggaatgccaggcatcccagggctgtcaggaatccctgggctgcctgggaggcccggccacatcaaa

SEQ ID NO: 31346 - DNA, 201 bp, Homo sapiens
ccgtctcaaaaaaaaaaaaaaaaaaaaaaaagattcacagcacgtaggacagcaaaatgcatccaggctgcaaaattgaaaactggagggcgggtgctgcrtcctcaccagagtgttacacaccagggtcttcctgcaggtatccaaggaatgccaggcatcccagggctgtcaggaatccctgggctgcctgggaggccc

SEQ ID NO: 31347 - DNA, 201 bp, Homo sapiens
tacggtctagctgattaacgtcaggttaatccagatcctttattctgtattccagttactcccagctcccaggcagtgatggctttaccggcccaggaggkccccgggccctgctcattggatctttttggtgggatacaccccacagaacacagaaaacattcccttttccgtatccatacataggagtgccgagcctgc

SEQ ID NO: 31348 - DNA, 201 bp, Homo sapiens
cagtatgcgtgggataagaaatattaataatatgtgcaagccacgtttgatttccatggcacaacatagtggcctggtgagcactatacattgcatgaatracaacctggtagagacggagagacatttaaccaaacccctcttgtcagaaatcctttttcactggaaagcaccagtgcattccaactcagctccacaggc

SEQ ID NO: 31349 - DNA, 201 bp, Homo sapiens
gcctcccctcagcagctgaaacatgcagcctctcctgtaggactacagtgacagaggccttgcccggaagttcagagatggctttcccgttccctgcccayttcaaagccttcctgcccccaccagcaacatatacgacacaccttcacacacgtgcacgccccagacgagccagtaactcttatctgtttcaaaattgcc

SEQ ID NO: 31350 - DNA, 201 bp, Homo sapiens
cgctttcctttgtcagtgtagacgtttcccagtagagtcagatgaggatgctgttttgcctcatctgttctcgcacgtacaagggatgacccaactgtgargtttctgagcccccaccagcctcccctcagcagctgaaacatgcagcctctcctgtaggactacagtgacagaggccttgcccggaagttcagagatggc

SEQ ID NO: 31351 - DNA, 201 bp, Homo sapiens
cagttgccaagcttgtttcattgtatcacttcacagttccataagaacagcaaggccaggtgcagtggctcacgcctgtaatcccagcactttgggaagcrgaggagagagaatcacttgaacccaggagttcaagaccagcctgggcaacagagcaagagcccatctctactaaaaatttaaaaactattagcagccagg

SEQ ID NO: 31352 - DNA, 201 bp, Homo sapiens
ataaatgtttgctatctttaaaggccttgaaacatagcgttgttttcagagtgtcatgatgatcagtttaccagtctgtcacctgaaaggcatctgggaaygcagcaacggggaagacttggccaggagatgtggagaggagatcccgcacagggaggggcggaggaaactgagatgggatttcgacagggtgcacacagt

SEQ ID NO: 31353 - DNA, 201 bp, Homo sapiens
tttggaaactcaccccaacatggtggttttccactttccttctaaggagcttttcttactgaacactcgatgccgtaaaagcagaagagaaatttcccctrtgtgtgtttgtccaccctgtttgatttgctcctcttcctgacaggtctgcctggtgatagaggggaccctggggacacaggcgctcctggccctgtgggc

SEQ ID NO: 31354 - DNA, 201 bp, Homo sapiens
tgcagtgggaaagccatgctggctggcaccccgccagcacagcctcaaccaacctccagatacagacctctccagaaaggccagccccagggtcccgctcyggccacactttggaaactcaccccaacatggtggttttccactttccttctaaggagcttttcttactgaacactcgatgccgtaaaagcagaagagaaa

SEQ ID NO: 31355 - DNA, 201 bp, Homo sapiens
ttgtctttacttttgagtcttcagctccacctagcgtgagagaaagtccgggtccaaaccacaggaccacaacaacacacacaaagtgaagcccgtctcarttcagtctaaacaacatgactttcagcacacctgctcctgggtgtcaagataacctcgaaagtaatcagagaatggacctttcttatacctgtggcatct

SEQ ID NO: 31356 - DNA, 201 bp, Homo sapiens
gccacagcataggtgtgtgatgctcgtggcccagagtgaagctcagatttgacaaattccagggcaccctctgagctggccagtctgtggctgtgctcacrgctcccactgagtgtccagctgccagctcctgtcatgccaggtacttgaggattcctagcttagcttatgacgtggcctctaaacaggacctcattttta

SEQ ID NO: 31357 - DNA, 201 bp, Homo sapiens
aataagtgagctaacttcagagttacaactgacttcgctaacagccttctaagatggttcatgtctgtctttagggtgacaaaggtgccccagggagagcmggcctgtatggcgagattggcgcgactggtgatttcggtgagtgttgcccgtccagtgaaaacagggagtccacaattcagagctctctgagcatgtgag

SEQ ID NO: 31358 - DNA, 201 bp, Homo sapiens
actgtcttcttgtggagctctcaaactctgttccatggaaccccttaagaggtgcaggggttcccaaaccagaacatgtatttcacctaataaggagacayaaacagcctgagacatcggctcatcctctgtacctgttgtatatattaaggatctagggaaggtctcattgggaaaaaagaaaaagaaagaaattccccc

SEQ ID NO: 31359 - DNA, 201 bp, Homo sapiens
gagaggagccccctccccacagactttcgtgtccctaacgtcttgtttgtgttgcagggcccaggggtgaacaaggcttcatggggaacactggacccacyggggcggtgggcgacagaggccccaagggacccaagggagacccaggattccctggtaagtgaccgtctggtatcttcagagctagtggctcagcccagc

SEQ ID NO: 31360 - DNA, 201 bp, Homo sapiens
tgacatcggggacactataaatttaccaggaagaccaggcctgaagggggagcggggcaccactggaataccaggtacgcaagttattttccttgtcttcrtcttcaacaacagccctgagcctttgtctaggagcccgacttgccaaacagatcaaattcagtaacaaccagaaagcacttgatagtgaatgaggtcttc

SEQ ID NO: 31361 - DNA, 201 bp, Homo sapiens
aatgaggcatggtccctacctccaagggcctcgcggtctcacgtgaaatgtgggtacagagatgtagtatggcagtgccctgcagtgtgccatggggaagragccccggccgcctcctccagttgtgaggaggggaagatgcccccagagagcccatgcttgagtcacatcctctagtgaccctgagagcctcaggcagcg

SEQ ID NO: 31362 - DNA, 201 bp, Homo sapiens
gtgacatcggggacactataaatttaccaggaagaccaggcctgaagggggagcggggcaccactggaataccaggtacgcaagttattttccttgtcttyatcttcaacaacagccctgagcctttgtctaggagcccgacttgccaaacagatcaaattcagtaacaaccagaaagcacttgatagtgaatgaggtctt

SEQ ID NO: 31363 - DNA, 201 bp, Homo sapiens
ccctcctctccttactgtggccgatggagtagccctgccctgtggcagccggggcccaggtggattcctcctgggaacgacccctccctcctcagcgcgcrctgtgccagagcagtacacaggtacaaagggcaaacgtgttcatgatttcatttgaatcctgttgtttttacatcgttctgccctgatgtaaaacaaacc

SEQ ID NO: 31364 - DNA, 201 bp, Homo sapiens
tgctgttaggtattttaaaacaaattattcttgttaggaatataacaaaatagaagttgcaaaactcacaaagtcccagtggaaagtcctgttcttagccrtcttttttgcatgtaacaggtgacatcggggacactataaatttaccaggaagaccaggcctgaagggggagcggggcaccactggaataccaggtacgc

SEQ ID NO: 31365 - DNA, 201 bp, Homo sapiens
aaaattgcaatctagggtgctcattttttttaagatttttactcacacttgtgctttcaaatagtcttcctgttagcagagatttcaggctatttcaggcaaaaaaaaaaaatgacattttaagattaagtaattttcagctccatggtaattatttcctcgagcctccttagggtgaagttaaccatgggggtgtctgtc

SEQ ID NO: 31366 - DNA, 201 bp, Homo sapiens
ttataggcttgattggagggaagtaagccgtatgagcactttttaaatgaatttttatttctcatttccacttagtgatggatgcacatttttccactaayaaacatttgaacttttttcagtttttaagaacatcgtaggtggcatatttcacaatcttggcaaggcagacgtttttggagtaaatcgaaactggaggcc

SEQ ID NO: 31367 - DNA, 201 bp, Homo sapiens; identical to SEQ ID NO: 6850

SEQ ID NO: 31368 - DNA, 201 bp, Homo sapiens
agaacatgtatttcacctaataaggagacataaacagcctgagacatcggctcatcctctgtacctgttgtatatattaaggatctagggaaggtctcatygggaaaaaagaaaaagaaagaaattccccctacaaaagttcagaatcactgctctgatgtggagaggagaaatggttttatgaaagtgcagggtgtgggt

SEQ ID NO: 31369 - DNA, 201 bp, Homo sapiens
ttccccctacaaaagttcagaatcactgctctgatgtggagaggagaaatggttttatgaaagtgcagggtgtgggttggaaaggcaggtggctccgtcarggaaacttggggtagatgggctggagcagaggagcggggaggggaggctcggctgcatgcccaccacacaggccaaggcaggtggcagaggtggcccaga

SEQ ID NO: 31370 - DNA, 201 bp, Homo sapiens
tacaaaagttcagaatcactgctctgatgtggagaggagaaatggttttatgaaagtgcagggtgtgggttggaaaggcaggtggctccgtcagggaaacytggggtagatgggctggagcagaggagcggggaggggaggctcggctgcatgcccaccacacaggccaaggcaggtggcagaggtggcccagaaggcagg

SEQ ID NO: 31371 - DNA, 201 bp, Homo sapiens
gcagctcttgattcaaatcattcacaaccacaaagccaagtttctaagaccaagggcagtaggaggaatggaggcaatattccaaacaccgactcaaaacmaccaacaaaagaatgtgctatctagtatttactctcacaatgtttgcctttctctgattcctaatgagttcaagcacttttgtatagatctactggccat

SEQ ID NO: 31372 - DNA, 201 bp, Homo sapiens
ctaaagcgaaagatcaactctccacaccattacattttgaagggctttgaagttatttttagaaaaactcaaaaatctaaatcaaaaatcagattttttcttttttttttttcctactgcttccttttcctttttcttcttctcttgtcccttctcctttttggttgtttctattgctatttttacatgttcctttaggtg

SEQ ID NO: 31373 - DNA, 201 bp, Homo sapiens
gtccagtgaaaacagggagtccacaattcagagctctctgagcatgtgagccaatttcagacctgcaagtgctgttaggtattttaaaacaaattattctygttaggaatataacaaaatagaagttgcaaaactcacaaagtcccagtggaaagtcctgttcttagccgtcttttttgcatgtaacaggtgacatcgggg

SEQ ID NO: 31374 - DNA, 201 bp, Homo sapiens
caaacagatcaaattcagtaacaaccagaaagcacttgatagtgaatgaggtcttcaagtccaatgtgcaagaaagaccgtcgtttttaattaagttaaayctgaagataaaatcaggaagtctttctctctctctgtctctctctttgatactgaaaaaagccagaatggaccctcggtggatgagaatcactgcagtcc

SEQ ID NO: 31375 - DNA, 201 bp, Homo sapiens
tctgaagggattctttggagagaagggaacagaaggtgacatcggcttccctgggataacaggcgtgactggagtccaaggccctcctggacttaaaggamaaacaggtaaaatctcccgcagccacacagccttcctcaggcaggccctccggagaccccagaacaaaggcggtcaacattgtcaatttcctccaatcac

SEQ ID NO: 31376 - DNA, 201 bp, Homo sapiens
ggggctgatgccctgcgtctgcgtgggaccccaggcgtccgtggggctgatgccctgcgtctgcgtgggaccccaggcgtccgtggggctcatgccctgcmtctgtggttgtctctctaggcttcctgtttgggctgaaaggagcaaaaggaagagcaggcttccctgggcttcccggctcccctggagcccgcggaccaa

SEQ ID NO: 31377 - DNA, 201 bp, Homo sapiens
attgttgtaaaaagaggtgtgtcaaatgcttggtgagacccatgcaggattctttaaagaacactgaggcaaaccagaccttatagggaaaaacaggcctsacggagactgaagttaaaatatggaccagggccagtgtttcttcatgaagggggtgagcagagatttgaggaggctgcagggtgggaggaaactcatcat

SEQ ID NO: 31378 - DNA, 201 bp, Homo sapiens
atagacaagggcaggaaggaaattcccagtggtagtcattaccgctgggtgatggtgtgccttacctgattttatcctttatacttctttgtgttttcctrattctctagagtccagaaaagcatgaattgctctttttacagaatgagtgtgtggagggagatgctgtctgtgatgaacagtccagagttggcccccaca

SEQ ID NO: 31379 - DNA, 201 bp, Homo sapiens
ggacagccgcagggagggttgacaatagtgatgtcaattgtaagcctcatttgcaatttttcaaccttctgtccatcacctgtgctgaccactgtccacasatatcaggatcagagtctgaccagctgtgcctcgcctggtgctgaggctccatctaagcatgatcgggcagcgccttggggaagtcgagcacaggcagac

SEQ ID NO: 31380 - DNA, 201 bp, Homo sapiens
ccctaagaatcggtttctcaagccagttgctgggttgaatggactcatcaggcttttagacggagagagaaatagagtccttgctttttcagcagcaccgytgggagggtgggatgcacctgcgcccctcaggtgtctggagtgttcactctgcccattgcctgtctgtgatctttcattttgttggcataaggaagccag

SEQ ID NO: 31381 - DNA, 201 bp, Homo sapiens
caggcctgtatgggcctccaggactgcatggattcccaggagctcctggccaagaggggcccttggggctgccaggaatcccaggccgtgaaggtaagacyccagccctcccataaacgagtggggtcctcactggtcctgccaagagaatgagcactgtcttcttgtggagctctcaaactctgttccatggaacccctt

SEQ ID NO: 31382 - DNA, 201 bp, Homo sapiens
ctcatcaggcttttagacggagagagaaatagagtccttgctttttcagcagcaccgttgggagggtgggatgcacctgcgcccctcaggtgtctggagtrttcactctgcccattgcctgtctgtgatctttcattttgttggcataaggaagccagcggtttccacctgcccctgggcagttctgatgctggagacagt

SEQ ID NO: 31383 - DNA, 201 bp, Homo sapiens
tcagcagcaccgttgggagggtgggatgcacctgcgcccctcaggtgtctggagtgttcactctgcccattgcctgtctgtgatctttcattttgttggcmtaaggaagccagcggtttccacctgcccctgggcagttctgatgctggagacagtgatagcgcttgggcacccacaggctgggagccaaaaacaaccaaa

SEQ ID NO: 31384 - DNA, 201 bp, Homo sapiens
ccaggctgatgcaggggagctggcgggtgggaagagagaaatgctcaagcatgtacatgtgccttccagaaccggcttccgtggcattgcttagactgctrcacagtctgtcactggctcctgtgacctggctgaccatggcactaggttcctgttcatctctgttgtctttctgttctggatccatagctcagaattccg

SEQ ID NO: 31385 - DNA, 201 bp, Homo sapiens
tagaggtttgcattctaggagaatggcagcagccagacacctcccaggaacccgatgtaagccctgtatcgatggcagcttcctgcgaagccactgtgagygtgtgaaaaatccccaccgtaggaacaaaagtttttgtatctaaaacactgttggggtgaataactcttagaggtttggaaccagaaataaagaaaaaga

SEQ ID NO: 31386 - DNA, 201 bp, Homo sapiens
tgccaatagcacactgtgtgtggaaaacacccagacattgagctgcctgaggagaaatggaaggtggcccacttggccggtcattgctcattaaaatgtawaggtgtgcagatatgaaaacacggggcttgttgccgatgactcaggggagggcaccgaacgtcatgcctcctggttatgtcttgccgccgtgttgaacca

SEQ ID NO: 31387 - DNA, 201 bp, Homo sapiens
tccacagggagtgcctggcaacattggtgctcccggacccaaaggagcaaaaggagattccagaacaatcacaaccaaaggtgagttcctctctggccacrcggcccctggggcactgagccttcctgtgggcacctgcctgggcagcttcacatgcaaatccctttctaggtgagcggggacagcccggcgtcccaggtg

SEQ ID NO: 31388 - DNA, 201 bp, Homo sapiens
tagaaagatcaaaacacccctgtccctttcctctctgtgtccagcctagaggtttgcattctaggagaatggcagcagccagacacctcccaggaacccgmtgtaagccctgtatcgatggcagcttcctgcgaagccactgtgagtgtgtgaaaaatccccaccgtaggaacaaaagtttttgtatctaaaacactgttg

SEQ ID NO: 31389 - DNA, 201 bp, Homo sapiens
tctgacctgccctggcttggctgtgcctgggtttgggacagttcggtgtgtgttaaagaagcagagctttaactgcgttgagggtgtgttttccctcctgyctgctcttcttacctgcagtccaaacacgtgtgcctcggttgtttctaaagcttccccgtggactgcatgactgaaaatggactaaatgatgattatgtt

SEQ ID NO: 31390 - DNA, 201 bp, Homo sapiens
agtaggcagccttgggagtgacatcacggtttcctcttttaaggcgattctgaggcttccttctccccaggcccctcccgcccagctgctgcagctgctcrgagccacctcggcctccacctctgcggagctctgacctgccctggcttggctgtgcctgggtttgggacagttcggtgtgtgttaaagaagcagagcttt

SEQ ID NO: 31391 - DNA, 201 bp, Homo sapiens
agggtgggatgcacctgcgcccctcaggtgtctggagtgttcactctgcccattgcctgtctgtgatctttcattttgttggcataaggaagccagcggtytccacctgcccctgggcagttctgatgctggagacagtgatagcgcttgggcacccacaggctgggagccaaaaacaaccaaaatgggtttcctcccagt

SEQ ID NO: 31392 - DNA, 201 bp, Homo sapiens
aaccgaaggttggatgaattctatagttaggttggtctctctctaatgaagattaaagttctggcatgtcttagctctgcatggcaataattacttttaaraaaatgcacttagggtggtgattatggcattgtaaaagtcttatgaaaatgagatgtatgtcaagagaaccttactatcaaaatcagttttgtgcattgc

SEQ ID NO: 31393 - DNA, 201 bp, Homo sapiens
tagcgcttgggcacccacaggctgggagccaaaaacaaccaaaatgggtttcctcccagttctggaggctgggatcagcatgccagcgtggtcgggttctggggggggccgcgtcctggctgctcgctgtgtcctcacgagggagagcacccgctctcccctgtcacttcttataagggcagtaaccccatcttggggccc

SEQ ID NO: 31394 - DNA, 201 bp, Homo sapiens
gtggattcctcctgggaacgacccctccctcctcagcgcgcactgtgccagagcagtacacaggtacaaagggcaaacgtgttcatgatttcatttgaatyctgttgtttttacatcgttctgccctgatgtaaaacaaaccaggattttaaaggcagtgagtgatgaggagctactcccacttggggaagagctgctaac

SEQ ID NO: 31395 - DNA, 201 bp, Homo sapiens
ggtgtgcccgggatgaaaggtgacgatggcagcccaggccgcgatgggctcgatggattccccggcctcccaggccctcccgtgagtagccacaaactgcrgcagctccgtcctctcttcttcatccttcaggttctccaaacaccccagaagcaaacagtattgacatgagcactaaaccaacctgtgcataggacaggc

SEQ ID NO: 31396 - DNA, 201 bp, Homo sapiens
tcccaattactttcaacattgcatttaattaaagcaactccacacattcccatattcttggaaatagcgtcaaccaagatatgtcaaaagctagcacagcwcacgtttgaaaacacaacgctgatgggtaccctgctcatcgtggaaagagctagacgcgattttccaggctgcgatttgagagtccctgcaggcagcttc

SEQ ID NO: 31397 - DNA, 201 bp, Homo sapiens
ttttttttttgagacagagtctcactctgttgccaggctggagtgcagtggcacgatcttggctcactgcaagctccgcctcctgggttcacgccattctyctgcctcaacctcccgagtagctggggctacaggagcccaccaccacgcctggctcatttttgtatttttagtagaggcaaggtttcaccatgttggcca

SEQ ID NO: 31398 - DNA, 201 bp, Homo sapiens
gtccatatagttctacctcatataactgaaattcttaataaagaatagtacccaggggtgggacaaatgttttatatactaaataaggagacagagatagaaagtgtccaacttaacctcagctctgtgttgcatggaataggctgctgatagttatctgtgtaatatactgtacaaatactagcctttacattattgtta

SEQ ID NO: 31399 - DNA, 201 bp, Homo sapiens
aaggaaagaaagagatgaaaataacttttcctgtcgggactttttgactgaggatggaagttgataaggacgatgattagcacagaggaaaacccttggcrtgtacctggtcctcccagctgctctttatagatgcaccacacttccttagtgggcaggaaatcctggggagaagctccatcctgatgaccaaagcgtggc

SEQ ID NO: 31400 - DNA, 201 bp, Homo sapiens
ctcacatgcaaaatacattcattccattctaatagcccccaaaagtcttaactctttccaaaatcaacctaaaaagtctaaagtccacagtctcatctaartatcatctaaatcaagtgagagtccaggtatgattgatcctgaggcacatttctctcccagtatgagcctatgaaatcaaataaattgtgtgcttccaaa

SEQ ID NO: 31401 - DNA, 201 bp, Homo sapiens
atttctctcccagtatgagcctatgaaatcaaataaattgtgtgcttccaaaatacaatggtgggacaggcataagacagacatttctattctaaaagggrgaaacaggaaagactaaaggagtaagtgatgccaggtgagtccaaaacccaacagggcaaagaacattcgattttaagtcttgagagtcatctctgactc

SEQ ID NO: 31402 - DNA, 201 bp, Homo sapiens
gggcctctgttgttggccctgctcctgtgtcaggtctgtgcctggtcacagaacttctccagggcatcccttggaagctgggtggaggtggccacattctcacagctcttgcactctgtgtgcctgcagagttggcaccacgtggaggtcacgaaggcttcctgcttgtgtcctccagagagaccatctgagctacacctg

SEQ ID NO: 31403 - DNA, 201 bp, Homo sapiens
tggtttttaatatctgtactggtagagtggcagggcgcttgaagtgtgggagtgggtcaataagcccatccctccatccatatacccaacgtgtattgatygattgggtctggtctgtgtgtgaggaactctcctagattctaaagtaatgttgcaaagcactaaataaatcaagaatctgtggaattttctagaagggaa

SEQ ID NO: 31404 - DNA, 201 bp, Homo sapiens
ttgttgtttttggtttttaatatctgtactggtagagtggcagggcgcttgaagtgtgggagtgggtcaataagcccatccctccatccatatacccaacrtgtattgatcgattgggtctggtctgtgtgtgaggaactctcctagattctaaagtaatgttgcaaagcactaaataaatcaagaatctgtggaattttc

SEQ ID NO: 31405 - DNA, 201 bp, Homo sapiens
ttgtttttattgttgtttttggtttttaatatctgtactggtagagtggcagggcgcttgaagtgtgggagtgggtcaataagcccatccctccatccatrtacccaacgtgtattgatcgattgggtctggtctgtgtgtgaggaactctcctagattctaaagtaatgttgcaaagcactaaataaatcaagaatctgt

SEQ ID NO: 31406 - DNA, 201 bp, Homo sapiens
tgttcgccaggctgcccaccaaggttctgagaaagcttgctcttccctcatcatgctttccacctttccttccccttgggttcccagcgtcaatcctgtgytttgcaagcgtcggcctttcacgggaactgggaacttaaaatgtagcctgaggcaccgttttcgttgctttgggcaaagctgcagccgtagaggccagga

SEQ ID NO: 31407 - DNA, 201 bp, Homo sapiens
ggcctctgttgttggccctgctcctgtgtcaggtctgtgcctggtcacagaacttctccagggcatcccttggaagctgggtggaggtggccacattctcacagctcttgcactctgtgtgcctgcagagttggcaccacgtggaggtcacgaaggcttcctgcttgtgtcctccagagagaccatctgagctacacctgg

SEQ ID NO: 31408 - DNA, 201 bp, Homo sapiens
gcctctgttgttggccctgctcctgtgtcaggtctgtgcctggtcacagaacttctccagggcatcccttggaagctgggtggaggtggccacattctcacagctcttgcactctgtgtgcctgcagagttggcaccacgtggaggtcacgaaggcttcctgcttgtgtcctccagagagaccatctgagctacacctgga

SEQ ID NO: 31409 - DNA, 201 bp, Homo sapiens
cacctgagggcgtgcagcaggtggtcgctgacccgagcttctcagaaacagcgaagggtccaggaaagggggagtgggagtcaggccatcgcttgagagaratatggaggcagctgaccagcccgagcgagttgtgggggcctggggcggcacagtgcctcccttcccttctgcacatcactgaggttccactcctaaatt

SEQ ID NO: 31410 - DNA, 201 bp, Homo sapiens
atgtctaggtcctgggggttaagacttcagcatcattggaggacgattgaagtcataatcctctttctcctcctcagagcctcacgcctgaattctattcrcagcttatttgcctcattccataacccatgtcttctctagttttaacgtgggtcatgtctgtaataacactcttgagtgcagtggtacaatcaaagctca

SEQ ID NO: 31411 - DNA, 201 bp, Homo sapiens
cctctgttgttggccctgctcctgtgtcaggtctgtgcctggtcacagaacttctccagggcatcccttggaagctgggtggaggtggccacattctcacagctcttgcactctgtgtgcctgcagagttggcaccacgtggaggtcacgaaggcttcctgcttgtgtcctccagagagaccatctgagctacacctggac

SEQ ID NO: 31412 - DNA, 201 bp, Homo sapiens
tcctcgcctaggtagaaacacagtggcaatagcttctattgtagaatgttctccaaagacactaaagtgcacaagcttcaccacgacttaggaggcctgarattaggctgcccgaggtgagtactgatgtggcattgacaggacccctctgggacacgtggagggcagaggagaacccactgtctctaaaactctgacttc

SEQ ID NO: 31413 - DNA, 201 bp, Homo sapiens
ataatacaatagttagttccagccataggagagatagaacttcccctcccctcctttctcatttttaaaacatttttattgtggtaaatttatttttaatktttttaatgtaacattttaaaatttttcttgtattagaaatatgcatatgtcctcgcttatgagtgggagctgaacaatgtgaacacatggacacaggga

SEQ ID NO: 31414 - DNA, 201 bp, Homo sapiens
aatctgtttaagaaaaaaatcttcttaaggaacttctgggacacttacttgtgggcaaaaatcaaacgttcttgataaatattacgaatttgtttaattcrtcctgaagagcctctgtcggaggaccatgagttccttgctcagttgttggattgtttaaaaatcagttaaacattgtttctgttttcaaaattttccaat

SEQ ID NO: 31415 - DNA, 201 bp, Homo sapiens
ggaactcgggagctggtggggagtctctgtcacggactgagggttttttgtgtttttaaatgggagtctctgggtaaaggggcggggcgaggaggcgaacragacaaccttagtattgtttgaattgaagcattgcgagggaacaatggcagaaaaaccgcgttttctcccaagtcctgttccggccctggaagagctgct

SEQ ID NO: 31416 - DNA, 201 bp, Homo sapiens
cctctcctcctgagacgctgtcttctcccctccactcccgggaaatcccactggcccccgacatctctcccctgaagtccctgcccctccctgcactcccygccggatgaactcgtcctccacatgaaagtacatgcagtgtgtgctggtcactcgctcgtttcctctctggccctgttctgtgtgctgagctactaacag

SEQ ID NO: 31417 - DNA, 201 bp, Homo sapiens
catctttggtgtctgcgctgctgccgctacacctttgtgaacaccaaatgcgcaggaagcgtatcgggagcagcacggctgcactcagttgttgccttctrtttcgtggatgaaaactgctattgatttctcttttaacaagtgctgttgggaagaaccagtgttctggaggctgttttcgcccatgtcatgagaacaggg

SEQ ID NO: 31418 - DNA, 201 bp, Homo sapiens
cacctttgcactccagcctggggaacaagagcaaaactccatctcaatttaaaaaaaggaaaaaaaaatccactttaaagaacggtgatcaaaggctaacrttgccattattcctgtaactaaattccattttgataaagtcacagcatatgccatcttgcttttcaagtcttgcttagtaaatccgtggtttactagcat

SEQ ID NO: 31419 - DNA, 201 bp, Homo sapiens
gcagtgagccaagaccgcacctttgcactccagcctggggaacaagagcaaaactccatctcaatttaaaaaaaggaaaaaaaaatccactttaaagaackgtgatcaaaggctaacgttgccattattcctgtaactaaattccattttgataaagtcacagcatatgccatcttgcttttcaagtcttgcttagtaaat

SEQ ID NO: 31420 - DNA, 201 bp, Homo sapiens
ctgaggccatgtcagggctgactgcaccgaaaaaggaagtgacctgatgagatcattttatccagtggcacccacaaaagacacaggacagctgccttccytccatccgcagatgggacttgatgattttcttttttcttttttttttttttctcttttgagatggaatctcactctgtcgcccaggctggatggagtgca

SEQ ID NO: 31421 - DNA, 201 bp, Homo sapiens
ggttgcagtgagccaagaccgcacctttgcactccagcctggggaacaagagcaaaactccatctcaatttaaaaaaaggaaaaaaaaatccactttaaaraacggtgatcaaaggctaacgttgccattattcctgtaactaaattccattttgataaagtcacagcatatgccatcttgcttttcaagtcttgcttagt

SEQ ID NO: 31422 - DNA, 201 bp, Homo sapiens
aaaagcatacaaatattccactttaacggccaggcatggtggctcacacctgtaatcccagcgctttgggaaagccgaggggggccgatcacctgaggtcrggagttcgagaccagcctgaccaacatggtgaaaccccatctctaccaaaaatacaaaattagccaagtgcggtggtgcatgcctgtaatcccagttact

SEQ ID NO: 31423 - DNA, 201 bp, Homo sapiens
tccatacataggagtgccgagcctgccgtgtacttgatcttgtcccacagaatcacctgccagtctcatcgttgcaggcttctctcctgcatgcacagcgrgggtggtggtgacctcagaagcctttccttctgagcactgcgtgactgtcagctgtgggagttcattctgaggccatgtcagggctgactgcaccgaaaa

SEQ ID NO: 31424 - DNA, 201 bp, Homo sapiens
accggggaggcagagcttgtagtgagccgagattgcgccactgcactccagcctgggcgacagagcgagactccgtctcaaaaaaaaaaaaaaaaaaaaaraagattcacagcacgtaggacagcaaaatgcatccaggctgcaaaattgaaaactggagggcgggtgctgcgtcctcaccagagtgttacacaccagggt

SEQ ID NO: 31425 - DNA, 201 bp, Homo sapiens
ttcatatgaagatagtgtattctcacagtccctagcacacggctggccttcccagggggatgggcacatttggagcagatcagaaggtctgggccccttgrtgtgtttcagtcgcgtccgtgtgaaaagaccaccaaacaggctttgtgtgagcaatcaagctgttaatttcacctgggtgcaggcaggctgagtctgaaa

SEQ ID NO: 31426 - DNA, 201 bp, Homo sapiens
ggccagaaaccagctcaccatggttcaaggtgtgaatgggggacaggaagtggctttggaatgtgtccaggttctttttgaatagagaaaaatttcctccwtgaccatgcttcctgaaaagagaatgaacccacactctgggatgtgaggccaggagagttggcttcaccgtcggctggccgtccccaagtcctgcccctt

SEQ ID NO: 31427 - DNA, 201 bp, Homo sapiens
ttcttttgtggtggaatgtcatcagttaaggcagaaaccggccatctggatgtgtacgtgcaggtcacaggggatatgattgcttagcttgggctcagagscctgacagtgtgaacccttagtagcaggccagggcctgcctgtgtgtctgtctggcccaccttggtgtacagaattcttcaggggtcttcctcccctcac

SEQ ID NO: 31428 - DNA, 201 bp, Homo sapiens
cctgtaatcccagctgcacaggaggctgagacggaaggatgacttgagcccaggaaatcaaggcaacattgagctatgattgtgcttctgcactccagccwgggtgacagactgcgatcctgtctcaaagaaataaataaataaataaacaaaaagaacagctaagcaaaccgcctatgatacacactaaaaaacacgagt

SEQ ID NO: 31429 - DNA, 201 bp, Homo sapiens
tttacctcttgaactcagcaggtcacctggtctccctgtcctctaagcctaggtgtcaagaattcacctccctgcttcgaagcgagccctctgtcagtttrataatggctttgcatgtcttcatccaatgctgatcaaaacgcaggacagaacagggccatgggcagtgcctccaggagcccctgagatgtctgtctgggg

SEQ ID NO: 31430 - DNA, 201 bp, Homo sapiens
tgaggcagaagaatggcgtgaacccgggaggcggagcttgcagtgagccgagatcgcgccactgcactccagcctgggcaacagagcgagactccgtcttaaaaaaaaaaaaaaattaacacatttaagaggaaaaaaagacccataatcctaaagctgcttttagaatgtgctgtttgtagacatttcatataaccaaat

SEQ ID NO: 31431 - DNA, 201 bp, Homo sapiens
ggactgaggatttaggtcaatccactagcacaacctccactcagggctgaggatctaggtcagtccaccagcacagcctcagtcaggggtgaggatctggrgtcagtccagcagcacagcctcagtcaggggtgaggatctggggtcagtccagcagcacagcctcagtcaggggtgaggatctggggtcagtccaccagc

SEQ ID NO: 31432 - DNA, 201 bp, Homo sapiens
tccagcagcacagcctcagtcaggggtgaggatctggggtcagtccagcagcacagcctcagtcaggggtgaggatctggggtcagtccaccagcacagcytcagtcaggggtgaggatctggggtcagtccaccagcacagcctcagtcaggggtgaggatctggggtcagtccaccagcacagcctcagtcaggggtga

SEQ ID NO: 31433 - DNA, 201 bp, Homo sapiens
tctctcaaaatatgggaataatttgaatccgtcatcttccttcgcatgagttgcatctcatttgtattagttcgttctcatgctgctatgaagaaataccrgagactgggtaatttataaaggaaagaggtttaattgattcacagttctgcatggctggggaggcctcaggaaacttacaatcatggcggaaggggaagc

SEQ ID NO: 31434 - DNA, 201 bp, Homo sapiens
caggcgtcgtggggctgatgccgtgcgtctgcgtgggaccccaggcgtccgtggggctgatgccctgcgtctgcgtgggaccccaggcgtccgtggggctsatgccctgcgtctgcgtgggaccccaggcgtccgtggggctgatgccctgcgtctgcgtgggaccccaggcgtccgtggggctcatgccctgcatctgtg

SEQ ID NO: 31435 - DNA, 201 bp, Homo sapiens
ttctcacttgagttacattgccgaaatgttacggagacgtgagactgaaatgtcccatgcattttattcatgtctaacccagcacttttctcttttcctcygaaggagatagaggctcacctgggatggatggtttccaaggcatgcctggactcaaagggagacccgggtttccagggagcaaaggcgaggctggatttt

SEQ ID NO: 31436 - DNA, 201 bp, Homo sapiens
tgttaacagcagaggtcaacagagagaagttgcttagaagatggtgtccccggaaatccctattttaggttcagaatcttctcacttgagttacattgccraaatgttacggagacgtgagactgaaatgtcccatgcattttattcatgtctaacccagcacttttctcttttcctctgaaggagatagaggctcacctg

SEQ ID NO: 31437 - DNA, 201 bp, Homo sapiens
aataggggtttagaaggagctgagaaaagaggagatgagggtacactgtagggaagaagtgatattcacaactgacagcaaggaacaaaaaagttaaacasaggccgggcgcggtggctcacgcctgtaatcctagcactttgggaggctgaggcaggcggatcacgaggtcaggagatcgagaccgtcttggctaacacg

SEQ ID NO: 31438 - DNA, 201 bp, Homo sapiens
gtcgtgggggggacggccctccggtcacccctgcatgcgggccgcgcaccgcgctgtccccgcgtctcgcggaccgagaccggcggtgaggatgggctgcytccctcatcctgcgctaaactcgctttgtctgtcgcctctaggctaagtgggactgaccggggcccagagtggacgaaccgccagcatggggagagacca

SEQ ID NO: 31439 - DNA, 201 bp, Homo sapiens
ggaaggctgaggcaagctctgtggtccagtttccctgcaaataggggtttagaaggagctgagaaaagaggagatgagggtacactgtagggaagaagtgwtattcacaactgacagcaaggaacaaaaaagttaaacagaggccgggcgcggtggctcacgcctgtaatcctagcactttgggaggctgaggcaggcgga

SEQ ID NO: 31440 - DNA, 201 bp, Homo sapiens
gaaggttctgctactcctctacaataccagacttataaaaatcaatatattgcaatcattcatatactcagcgaacatgctgacacctactgcgtgaaggrttctgtgatatgggcagggggtgcagacttgtatcaggcagctactctctcagaattcactgcctggcagggggaggccaggaggctgtccccagctaag

SEQ ID NO: 31441 - DNA, 201 bp, Homo sapiens
caatcagtggttattttgtgtcagcccttttctttttttttttttttttttttttttttctgagacagtctcgctctgtcacccaggtttgagtgcagtgscacgatctcagctcactgcaacctctacctcccgggttcaagcgattctcgtgcctcagcctcctgagtagctgggattacaggcgcatgccaccacacc

SEQ ID NO: 31442 - DNA, 201 bp, Homo sapiens
aatacaacaaggaggagccgccaaggctcacaggagggtccccatatggacccaccattgctgagtgtgtgtaagaagaagagcaggaccagggaggtggrtctgagaaacagtactgattaagaaggagtccaggaaggaatccctgaaaagaaaatgaagaccaagtggatagagagacaggaaaggagccacagacag

SEQ ID NO: 31443 - DNA, 201 bp, Homo sapiens
caggcgtccgtggggctgatgccgtgcatctgcgtgggaccccaggcgtcgtggggctgatgccgtgcgtctgcgtgggaccccaggcgtccgtggggctsatgccctgcgtctgcgtgggaccccaggcgtccgtggggctgatgccctgcgtctgcgtgggaccccaggcgtccgtggggctgatgccctgcgtctgcg

SEQ ID NO: 31444 - DNA, 201 bp, Homo sapiens
caggcgtccgtggggctgatgccctgcgtctgcgtgggaccccaggcgtccgtggggctgatgccgtgcatctgcgtgggaccccaggcgtcgtggggctsatgccgtgcgtctgcgtgggaccccaggcgtccgtggggctgatgccctgcgtctgcgtgggaccccaggcgtccgtggggctgatgccctgcgtctgcg

SEQ ID NO: 31445 - DNA, 201 bp, Homo sapiens
gggcccaggggcttgccaggagacgcaggtcgtgaagggttcccaggacccccaggtgagttgagatcagacccccattcagcccctgggttccagcgggracctgtgtgtgattcataagcatccagctctattatcttccactttgtagaagctgttttaacaaatacttgacaacttttgcatttgtccttgggagat

SEQ ID NO: 31446 - DNA, 201 bp, Homo sapiens
tataaaggaaagaggtttaattgattcacagttctgcatggctggggaggcctcaggaaacttacaatcatggcggaaggggaagcaaacacatccttctycactggcggcaggagagagaagtgctgagtaaagggtggggggaggccccttataaaactatcagatctcctgggaactcactatcacgagaacagcatg

SEQ ID NO: 31447 - DNA, 201 bp, Homo sapiens
tgtgccttcgctgttctggagatgaaggcccaggctgatgcaggggagctggcgggtgggaagagagaaatgctcaagcatgtacatgtgccttccagaamcggcttccgtggcattgcttagactgctacacagtctgtcactggctcctgtgacctggctgaccatggcactaggttcctgttcatctctgttgtcttt

SEQ ID NO: 31448 - DNA, 201 bp, Homo sapiens
tggctggggaggcctcaggaaacttacaatcatggcggaaggggaagcaaacacatccttctccactggcggcaggagagagaagtgctgagtaaagggtsgggggaggccccttataaaactatcagatctcctgggaactcactatcacgagaacagcatgaggatagccacccccgtgattcaattacttcccaccag

SEQ ID NO: 31449 - DNA, 201 bp, Homo sapiens
aatgtcacctggtgtctgtcagatccccaccccattgttcttgtcaatgagcaggagtggggtggacctgccatcgctgcgaatcctttacagcctgcagygctgcctgccaactcttcacaaccattagcacccactaacaatccatttcccctggagctcttcactctaaagatagaagaccaaaaaatagaagtgtcc

SEQ ID NO: 31450 - DNA, 201 bp, Homo sapiens
actatcacgagaacagcatgaggatagccacccccgtgattcaattacttcccaccaggtccctcctacgacatgtagggactttgggaactacaagtcaagatgagatttgggtggggacacagccaaaccgtatcacagctcactgaagctagagtctgcaacctcacctatttctgcagctgacattcgagcatcagt

SEQ ID NO: 31451 - DNA, 201 bp, Homo sapiens
ctatcacgagaacagcatgaggatagccacccccgtgattcaattacttcccaccaggtccctcctacgacatgtagggactttgggaactacaagtcaagatgagatttgggtggggacacagccaaaccgtatcacagctcactgaagctagagtctgcaacctcacctatttctgcagctgacattcgagcatcagtt

SEQ ID NO: 31452 - DNA, 201 bp, Homo sapiens
tatcacgagaacagcatgaggatagccacccccgtgattcaattacttcccaccaggtccctcctacgacatgtagggactttgggaactacaagtcaagatgagatttgggtggggacacagccaaaccgtatcacagctcactgaagctagagtctgcaacctcacctatttctgcagctgacattcgagcatcagttc

SEQ ID NO: 31453 - DNA, 201 bp, Homo sapiens
atcacgagaacagcatgaggatagccacccccgtgattcaattacttcccaccaggtccctcctacgacatgtagggactttgggaactacaagtcaagatgagatttgggtggggacacagccaaaccgtatcacagctcactgaagctagagtctgcaacctcacctatttctgcagctgacattcgagcatcagttcc

SEQ ID NO: 31454 - DNA, 201 bp, Homo sapiens
ttataactgtcataactccagctatatggattggatgcccagcatgttaaatatttcataaattatatatatatatatatatatatatatatatatatatacacacacacacacacacacacacaacataaaatataaattacatagtgattgctaatctttcaaaacaacaggaaaaaaaatccggattctaggaaagga

SEQ ID NO: 31455 - DNA, 201 bp, Homo sapiens
agtgagcagacacatctgtgtactggagatgtgccccctccagatgtgccctgactgccgtctaggaggcaggacctaaaccaagacagctgtgtgcctcrtctgcactttaaatactctttgatcccttctgtgtggtgacaagcatatggtaccactagggctgctggcatctcagcataataagagctgactttggag

SEQ ID NO: 31456 - DNA, 201 bp, Homo sapiens
ggtttgtccactgagagaagcacattggaaagggtgcgtgtgcctggactgtgtgcacttatgcacgtgtgtgcataggggtgtgtacacaagcatgcactgtgtgtgtgtgtgtgtacatgcgtgcatttgtgtgtgtgcatgagtgtacaccatgtgtgtgcatgtgtgcatgtatgcatgtgtgtgtgcgcagcaaac

SEQ ID NO: 31457 - DNA, 201 bp, Homo sapiens
gtttgtccactgagagaagcacattggaaagggtgcgtgtgcctggactgtgtgcacttatgcacgtgtgtgcataggggtgtgtacacaagcatgcactgtgtgtgtgtgtgtgtacatgcgtgcatttgtgtgtgtgcatgagtgtacaccatgtgtgtgcatgtgtgcatgtatgcatgtgtgtgtgcgcagcaaact

SEQ ID NO: 31458 - DNA, 201 bp, Homo sapiens
ggctcagacacatttaccttaatgggctgctgggcacgtttaattcaacgactgtgcggtggtaaggatggtagataaggacattgttctctgaagggctsgttctagaccagcttgcccagactgctgtgaaggtgatccaggggcccagagcagacagagagatgacgcccagagagacgggcgggctccgtcacccag

SEQ ID NO: 31459 - DNA, 201 bp, Homo sapiens
ttatattttttgagttagtcatgctaaatataatgtctctgcagctgtaaaacctggagctgaagagaatgagtgtctgggaagctgggggccagcccacrggctcctctcctagacagacagagcatgcaggatgcccagtgccagcttcccctacctgctacctgcagtattgcatacaataagggcaggtggagttga

SEQ ID NO: 31460 - DNA, 201 bp, Homo sapiens
tttgcttttatattttttgagttagtcatgctaaatataatgtctctgcagctgtaaaacctggagctgaagagaatgagtgtctgggaagctgggggccrgcccacaggctcctctcctagacagacagagcatgcaggatgcccagtgccagcttcccctacctgctacctgcagtattgcatacaataagggcaggtg

SEQ ID NO: 31461 - DNA, 201 bp, Homo sapiens
gggcactgttgcacagtctaggaggagcaagtagacaaagatagggatccactgattctatgaaaacttgcagctgattgaggggaggtgtcagtccatgrgaagtccataccacaggggttgggagctacattccccagagttcaagggcctgttgctgccccactgccttagattcctatgactggacatcagaggccc

SEQ ID NO: 31462 - DNA, 201 bp, Homo sapiens
cataagattctgacagagaatcaactcaactagctcttttaagcatcacttttaatgtaccacattttttaagtgactcttgtttatttttttaatgtttrctcaaacttatggggatagtgccatgttctgcgtatccacgctaggatgtggcctttttgagccatggaagacgctgtcagaacagggtccggaaaaaac

SEQ ID NO: 31463 - DNA, 201 bp, Homo sapiens
caaaatcacatcattagagagttaaggaaccaaactctgacccgagatctggagccaacacttaactttccctgaggggcatcctttaaaatctgggtatratgttgcaccttgaaactcagttgttcaaaattattctttctttctcaacctttaacttccacatcaactctttctctccctaaacaaaatcactaaacc

SEQ ID NO: 31464 - DNA, 201 bp, Homo sapiens
tagatatcattccattgatttatttacagagctttaaatcttattttgtggccactacagtgaagcaaatattattttaaaagcttcatatgaaataatcrttagtagcttgttccattttaaaaattgcaggtgtttcctatgcctttgggcaggttttgttgtttgtcttttgtttgtgtgtctaaatttcccattgtc

SEQ ID NO: 31465 - DNA, 201 bp, Homo sapiens
tgggtggacaaggccggaaccacatttgcaccctgaggagctgggagattccgctcacctctctctctctctgtaagaatgctacatcccactcagggggyttccaattgtccttactctagttggcaggaacttaaaacataactgaagcatgaacaactgggtattttgatgaatgattgacaacatcccattgtcttc

SEQ ID NO: 31466 - DNA, 201 bp, Homo sapiens
gatctgctgcccctacggacactgatggcttccttcatcgatgcagactggggagaagtgggcgaggtgtaggccccaagcagtcccaggctgagagcccrgcacaggactggaaatactcatcagggttcacaggctgtctggtcttaaggaagtgacagcataagcaggagcatgtcagtaaattcacagcaagaccct

SEQ ID NO: 31467 - DNA, 201 bp, Homo sapiens
tgttttgattcctgttaaattgtggaaaggtgcagctacagttgctgatgtggagatggagaaattgaaggtgttcttctgcccttgattttcctctctcyctctctcctacttgtctaatactgatctaattcagacatagacagtccatgaagatggctattgaccaaagaggagatttctaaatgctaattcctacta

SEQ ID NO: 31468 - DNA, 201 bp, Homo sapiens
ttaaggaagtgacagcataagcaggagcatgtcagtaaattcacagcaagaccctgcatgcaattctatttgcaaatggaccctctcactcttgcatgacyggctccaatagaagcaaaactcaggtccatcctagagcacatcccaggagaagtttctctatgggggatgagcttcaaaagtaattgtaatttaattaga

SEQ ID NO: 31469 - DNA, 201 bp, Homo sapiens
caatcccacccttcccgcctcagcttacaaatacgcactaactcagatacctcaatgatactcaggtgactccagccagcctcaccccaaagctccccatygcacagatgagccttctctcccatcatccacccaccagccccctgtccagccccactttcttcaattcattgatcgcagcacagcatagggaagaacatg

SEQ ID NO: 31470 - DNA, 201 bp, Homo sapiens
gaatcaacaatggctaacaggtgtgtaggtcacactgtgtgccaggcgatgctccaagttgtcctagttgtacttttcagtgtgtttacccctctgggtgrccctgtgaggtggagatggacttggctgcgtttactgagggagagatggaagcgcagggcgttgagttccttgcccagggttgcctttaagtggaggagc

SEQ ID NO: 31471 - DNA, 201 bp, Homo sapiens
gagagatgaccagggagtgatacccatctgctcatcttcaaggattgcgtaggagttgagctgtagaggtttcactgcagaaagccagtattgtcaagaakcatcctgagaacatgtaattaatctctacaaatggtagaatagttacattagtgccataatttgttatatttaagctatttttctaattcacaatcaact

SEQ ID NO: 31472 - DNA, 201 bp, Homo sapiens
tcaaaggttgactaaccagcagattccctcagggaaaagaggcagtaaatgtatctttttcaaggtaacattgcatgaacttgtcaaaagacaaaaaggakagaggggtttgtattaaaagaaatgattccaaggtacctagaaataaaagtaatcttgctattcttccaaacaagtgagaaggtctgtggctttcaattt

SEQ ID NO: 31473 - DNA, 201 bp, Homo sapiens
ttaacattttgcttaattgaaatcatgctcttagtctgaaataggaattgccgcgtccactctctctacgtttggaggctgctgtgccacccacccactcrgaggtcccacagcctttctagggcttcctgttccccctgtcaaatggggatggcgacactgacctcctggagctgacgaggaggttgcaggcgactgtga

SEQ ID NO: 31474 - DNA, 201 bp, Homo sapiens
atattcctggaattcacactgcaaaggcgggtgctttcaaaattcactttttcccacaagcggattcagaaatgcggaggttgcctgccgccttttctacyggacaacattcccgagttattggtgagctggaatgtgactgacttgcattccagggtttcttaaagtcaaaggttgactaaccagcagattccctcaggg

SEQ ID NO: 31475 - DNA, 201 bp, Homo sapiens
cttttaacaagtgctgttgggaagaaccagtgttctggaggctgttttcgcccatgtcatgagaacagggcgccagctgagtcacttctctggaatggackttaatgtcacttggtttcctctcacccaggacccgggcttcatgtctggacaaatgagccatgcattatctttccaccagactaaagaaagatcagtttc

SEQ ID NO: 31476 - DNA, 201 bp, Homo sapiens
caccccaaaaaatcatcttaactacttcccgtgatgcctggggcctaacatctcaaggaattgccagttaggaacagtaatgaatttggaggtgagatctycccacacccctccatgctactgcctcaatgacattaacactgtaccctgggctgcgtttttaaattcccatttcacttcaactgtgtggattgctgagaa

SEQ ID NO: 31477 - DNA, 201 bp, Homo sapiens
tccctgcttgggggagacgtgcagccccatggctcagggaccaggccttcacctgtgttctcctgcgtggtctggagcccccagaaaatgacagcactctrttcccttccaggcagccgaggggaccctgggcccccaggaccacctcctgtcatcctgccaggaatgaaagacattaaaggagagaaaggagatgaaggg

SEQ ID NO: 31478 - DNA, 201 bp, Homo sapiens
tgagttgactgtatgaaataatccccctggtcactgctgcttgtttggttggctaaaaaataataataatcccactggatagatatgtagtttatgggcartaaagcgacagtcctgataagaaacattttatcccccagaagacagccggcagacactaacaaaccgcaggcctcaacatagtgaggggagcgtagagct

SEQ ID NO: 31479 - DNA, 201 bp, Homo sapiens
gttggtctctctctaatgaagattaaagttctggcatgtcttagctctgcatggcaataattacttttaaaaaaatgcacttagggtggtgattatggcaytgtaaaagtcttatgaaaatgagatgtatgtcaagagaaccttactatcaaaatcagttttgtgcattgcacccatgcttcgcatctgtcagcaaaagca

SEQ ID NO: 31480 - DNA, 201 bp, Homo sapiens
ccgtgttttctattaaattgttgtctttgtgaggcattattacagttcttccctcttaaagtctgttttgaataaagaaaccgaaggttggatgaattctrtagttaggttggtctctctctaatgaagattaaagttctggcatgtcttagctctgcatggcaataattacttttaaaaaaatgcacttagggtggtgat

SEQ ID NO: 31481 - DNA, 201 bp, Homo sapiens
gccctgtatcgatggcagcttcctgcgaagccactgtgagtgtgtgaaaaatccccaccgtaggaacaaaagtttttgtatctaaaacactgttggggtgrataactcttagaggtttggaaccagaaataaagaaaaagaacaaaataaaatggaagtaattaatgttgggtaaataatatctttggcctaacaagttct

SEQ ID NO: 31482 - DNA, 201 bp, Homo sapiens
tcaaaatgtccttaggaagctggtcaacctgaggccctgagctgcctgcacttctgagccctctggcatctcacccaaatgagttcattgtggtgtagacmactgaagcgctcaaggtgtcagaggtctgactcacctgggaagcacaaagcaggccttccaaaggccatatgtccccactgattagaaagatcaaaacac

SEQ ID NO: 31483 - DNA, 201 bp, Homo sapiens
tttgctgggagcaaggttggaggaaatgaggtaagaagttcaacttgaagcctgctgagtttaaagtatctctagaccctctagacagaggcgtccaggarggaggtaggagccatccacctctgagcgttcactgaagccgtttggtgtgaatgaagtatcccacctcatgagtttggaggggaagagagcagcaaaact

SEQ ID NO: 31484 - DNA, 201 bp, Homo sapiens
catgcagtgggtaccccaggaaggaggaaatggggtcccttcatctctgctttattttgtccatcattaaatcagaaggacatggttagtgtccttcatcytcgaagggtgaagatggctgcatacattgtctgttactatcattgacattagggtaaacatataataaatgtatttttaaatgaaacagtcatttcaaaa

SEQ ID NO: 31485 - DNA, 201 bp, Homo sapiens
aagaggaatgcggaacaaggaggccctcctctccctcctctgcaggtgacgctggggaatgcagatgtacagaaggcgacgaagctatcaaaggtcttccrggactgccaggacccaagggcttcgcaggcatcaacggggagccggggaggaaaggggacagaggagaccccggccaacacggcctccctgggttcccag

SEQ ID NO: 31486 - DNA, 201 bp, Homo sapiens
ataaagagaaaactactagattgttttgcaaagttttgaaattactgttgttgttttcttctggagacagtaaaataatagccaaggggagaaaatggcasaaatgatcaaaccaagcaaccgtatgcacattttcctccctgaggggcctttgaatttgccacctaaatgctgcatgcagtgggtaccccaggaaggagg

SEQ ID NO: 31487 - DNA, 201 bp, Homo sapiens
cctaagtgactcactgctcttgatttcattggtggctccggaggacggtaatttttattttggttacccctgaaaggagaaggcggcatctaattctaggragacttcacaggtgtctccagtcctgttgatgtggccagagagtgaatttcaaaggacgtgcgagcagccggcgtccacccggcaggctcccaccccggt

SEQ ID NO: 31488 - DNA, 201 bp, Homo sapiens
agacactttacgtgctttggctctggagcctggaagagaatgttgtgtggaatggatctctcaggtgatcaacataccatgagtaagttagaggtcagcartgagggctggcctgtgcaggtgtgctaagacctgtgagggtgagccggggtctccgctgtgatgctggggatgagaaagcccttccagataagctccaga

SEQ ID NO: 31489 - DNA, 201 bp, Homo sapiens
agatgtacagaaggcgacgaagctatcaaaggtcttccgggactgccaggacccaagggcttcgcaggcatcaacggggagccggggaggaaaggggacaraggagaccccggccaacacggcctccctgggttcccagggctcaaggtgaggagcaatttcatcatgaagctggcaagacactctgaggcctccccaggt

SEQ ID NO: 31490 - DNA, 201 bp, Homo sapiens
caggaagaatgtctgaagctatgctaccttcatatagaaacagcgtccacagtcagtcttcccagttgggtttatctcagcggtcctttagaggtggtctrcacaagactctaaatgttcctgcctgtgagcggtcttctactagactacttcaataataaagagaaaactactagattgttttgcaaagttttgaaatta

SEQ ID NO: 31491 - DNA, 201 bp, Homo sapiens
tgaatctgtcttccctcatgcagcaggaagaatgtctgaagctatgctaccttcatatagaaacagcgtccacagtcagtcttcccagttgggtttatctsagcggtcctttagaggtggtctacacaagactctaaatgttcctgcctgtgagcggtcttctactagactacttcaataataaagagaaaactactagat

SEQ ID NO: 31492 - DNA, 201 bp, Homo sapiens
accatagtagttaccagacatgagatgctttctaaaagctactttgaatagaaatgttttctctgaatctgtcttccctcatgcagcaggaagaatgtctraagctatgctaccttcatatagaaacagcgtccacagtcagtcttcccagttgggtttatctcagcggtcctttagaggtggtctacacaagactctaaa

SEQ ID NO: 31493 - DNA, 201 bp, Homo sapiens
tctaagcctaggtgtcaagaattcacctccctgcttcgaagcgagccctctgtcagtttgataatggctttgcatgtcttcatccaatgctgatcaaaacrcaggacagaacagggccatgggcagtgcctccaggagcccctgagatgtctgtctggggaggcgtggagccgtgaatggggatattttgaaatccatgct

SEQ ID NO: 31494 - DNA, 201 bp, Homo sapiens
atatttgagcgttgaaggaatgtaaaactccattgctaaaacgaagctagggcctttcttaggatggaggacatgaaagaaaatgccacttccaaagctcmacactccatcagattgacaagttagctgggatcagataataatagccatttcatgtcttgattaaaaacctcacacagactccacagaactgttgataaa

SEQ ID NO: 31495 - DNA, 201 bp, Homo sapiens
gcctgactgagtgacgacgtgcagaaacatatcagacaggcattgtgaagggtagggttttttaaatacagacgctctggtgtttacctcttgaactcagyaggtcacctggtctccctgtcctctaagcctaggtgtcaagaattcacctccctgcttcgaagcgagccctctgtcagtttgataatggctttgcatgtc

SEQ ID NO: 31496 - DNA, 201 bp, Homo sapiens
aaatgtttcgagaacctcctcctgataatcgtgcgtatatatctttgcggatcattggcccatgttatagtcagctctgtgaggacagacatttcagcccrtcttgttcactgctgtattcccaatgcctggaacaggacaggcacagagttggagctcagcaaacgcctgactgagtgacgacgtgcagaaacatatcag

SEQ ID NO: 31497 - DNA, 201 bp, Homo sapiens
cgcatgtcgtcactaatgctcatcttgttattaaggctcggcttccaaattggcgagatcatatggaaatctgatcctagtcctgcaactagagcacttgkctctgaaccttgtagaatgcgcatccttctaggttaaaaaaaaaatgtttcgagaacctcctcctgataatcgtgcgtatatatctttgcggatcattgg

SEQ ID NO: 31498 - DNA, 201 bp, Homo sapiens
aaaaatctggagcagaacatgtggagagctgttttctcaagctgaagtgcaagggccccttatgtctttatttgaaaggccactagagtgccagctctgcaaacagatcgagaagctgccaacaaacagggattcctctggctcaccagagagtttgactgagcctgttggatctctcatctgacggcaccagttcaacca

SEQ ID NO: 31499 - DNA, 201 bp, Homo sapiens
aagcaaagaaatgtgcaaataaaagttctacttttttattttatttcttaatatcattcaggttacggagaactatatgtaggatttgttgtgtgggggtwttgaggtttgtttgttttgtgttgttttgttttgagacagagtcttgttcgcccaggctggagtgcagtggtgcgatcttagctcactgcaacctctgcc

SEQ ID NO: 31500 - DNA, 201 bp, Homo sapiens
acagtgaggggtgcatgggtacatgggtgctgccttggaagctggctagtgcaggctcagagggaggaagtaggttaaaaatcagctaaggaaggagcacrgttggatgcctctctccattcctgaaggagcagcagtgtggttctgcacatcctagagccggggttccagggaacccacaggggcgcggtgtctgtttgt

SEQ ID NO: 31501 - DNA, 201 bp, Homo sapiens
cggccctcggcccctcccagagcggctgcccctcctgccaggacctcaccacacagcgcccaaggtgtcctgtgtgctcagacttaatgctgtgttcaccsccaggctttccagggctgactgggcctccagggtcgcagggagagctggggcggattggactgcctggtggcaaaggagatgatggctggccgggagctc

SEQ ID NO: 31502 - DNA, 201 bp, Homo sapiens
aagaggaaaaggttctagaatagaaaaaagattttgctaaaataataaaaatcaaagaactgtgtttaattgtgtttctggggagagggaaagaaaatggrtgtgtagtttaaataatagagaaactcaagggaaaaactgagtgccatggagatttaacttttcaaccctgtgttgataatataatgaagagatcaccat

SEQ ID NO: 31503 - DNA, 201 bp, Homo sapiens
ggcaagtcctttccgcaggctttggtacagggaggagaggtgttcatgccgcacgaggcccagagctttctgtaaggatcgggaaggacaattctttcctrcatttcctggagctgaagcgctattgctcaaaacatggccctctgagaagaagggaaaagcacggggttcctcctctgctcgtggataaacaagcatatc

SEQ ID NO: 31504 - DNA, 201 bp, Homo sapiens
ctcggggctccagccccaggaaattcgcctgaccttcctgttggctgccaccgccttccctgccctccaggccggcagctgcggtggcaagtcctttccgmaggctttggtacagggaggagaggtgttcatgccgcacgaggcccagagctttctgtaaggatcgggaaggacaattctttcctgcatttcctggagctg

SEQ ID NO: 31505 - DNA, 201 bp, Homo sapiens
acaaaatggcttcgtgtaaggcagtgtgacacaggggtcccatcccagacttgaggcaggtgacggggtgcagttctcagtctggtgggcagctgaggggytgccgcctggggcggacattcgccaagcctctgcgtcctagttctcctctcccccaaaacggaggtgttactcatcccacccacctcatagatgggggtg

SEQ ID NO: 31506 - DNA, 201 bp, Homo sapiens
atcctccccggttcattgactccttccttctcttacaccagtgccttacatgcagttgctgatagaaaatacatatttgagcgttgaaggaatgtaaaackccattgctaaaacgaagctagggcctttcttaggatggaggacatgaaagaaaatgccacttccaaagctccacactccatcagattgacaagttagctg

SEQ ID NO: 31507 - DNA, 201 bp, Homo sapiens
tcttgaccttggactaacagtggagcgggcactgattcctaggaaggaggctctccccctccttcctcctctgcttctcccactgtgaggatcaggggcarcaagtgaaggagagaagcaagacccttcccaaagggaggaaaggaagccgaaatcccacggggcagcctgggctctagactcagtgtgaacccaggtgat

SEQ ID NO: 31508 - DNA, 201 bp, Homo sapiens
tctcctgagggcttcacaccttgctcaaatgggccttccagagctttgcacacccctccccctacccttctctctgaacctgccctttctccacgcaatgsccttggctctccaagagtcaccctggccccattgcagcccctgctgctggggcatcctccccggttcattgactccttccttctcttacaccagtgcctt

SEQ ID NO: 31509 - DNA, 201 bp, Homo sapiens
attgattaaagatttttcttaattgtggcaaggactctttcctgcgtaggtcagttcaggaaaaagggctgccgccgggagccctttggcttgttttgttycggaagcagctaggatgggcagtgaagagccttggtgattacttattgggcacttcctgtgtgccaatttgtctgtactaatgcttctaatcctcacaag

SEQ ID NO: 31510 - DNA, 201 bp, Homo sapiens
ctccatgttggccaggatggtctcgaactcctgacctcaggtgattcacctgcctcggcctcccaaagtgctgggattacaggtgtgagccactgttcccrgcctggcattttctttaattagaactagatgtctcattgaatggcgcaccaaagtatgaacctcgagactttgtcacaaagggctctgtgaccttgggta

SEQ ID NO: 31511 - DNA, 201 bp, Homo sapiens
tctctctaaggagagcagcggtcttgccaaaggcatcttctattgtgtattgccgtcataaaccctacccttccatgtagatagccaggattttaaaatamaactaaatcttccccaaggagagaattgcgatgccctggcagcatgggcacttttgtgtgggtgtttccgtggctagaggggttctgaaatttttgtatt

SEQ ID NO: 31512 - DNA, 201 bp, Homo sapiens
ggcagaatgaccatgtcttctgtgtatagtacaccatcacagtgcacatggaaatgacatgctggtgtatagttcctatttctccctcatatttcagaggyggaagcccctcccagaagtttcctctgagttccccaaagctggattcagtgttcctatagcccttcgattcccctgattgtgacatttaccagcctgact

SEQ ID NO: 31513 - DNA, 201 bp, Homo sapiens
gttcattatttcagtaacttagccaggttcctgttctcccccaaacatctgatttttgaccataaactctgatcagataggttgtttcaaattttttaatkacatcaaccttcacagggcacctcctatgtcctaaggcacttgggtattccagaaactggtaaatatgaagactggttggataactccgtgttgggaatt

SEQ ID NO: 31514 - DNA, 201 bp, Homo sapiens
cgtcccatctcagctcctatctgtggtcagcacccaggcctccctacaggtcttctcagccacgacagccttctcccaaggaacctgggcctctgcgaagyggcctcctgattccccacaactcccctggaacacaaagctcgtcttctccaaggtccagctaaaccctgcttcagaatatgcttaaacagccaacctttt

SEQ ID NO: 31515 - DNA, 201 bp, Homo sapiens
ccctagcacctttcactgcagccctcccaggctcaagcagttctcctgccttaggccctcaagtagctggaactataggcatgcaccaccacacctggctratttttgtatttttttttttttgtggagatgggattttgccatattgcccagtctggtcttgaactcctaagctcaggcagtctgcccacctcagcctcc

SEQ ID NO: 31516 - DNA, 201 bp, Homo sapiens
ttgccgagggccagaccctgagctgctggaggccttgagaatggcatctcacgtccccacggagagaattgtgatgcccggacatcacgggcgcttccatstgggtgtttccgtggccagagggattctgaaatgtgtagggacaaggacccattccagggaagccaagtgtcggccgcattcaccacccgtcccctgcag

SEQ ID NO: 31517 - DNA, 201 bp, Homo sapiens
catattggaataattataaatgataagttcgattcattgatactgcatgttctcagatttacccctccactgaataccaggcaatcatcagcaccaaacarggtgcccgcccctagcacctttcactgcagccctcccaggctcaagcagttctcctgccttaggccctcaagtagctggaactataggcatgcaccacca

SEQ ID NO: 31518 - DNA, 201 bp, Homo sapiens
tgcttttggcttaattatcgcttcaggaagatcagtggaaaagatgtattcagagtccaaggtcatgtctgttcctcaagggaagtctgtgtggatgacartgccctgtggaactcttttgaaaagccccatatgactcttctctttcatataccagccaaatggcccaaacctctctgtgcctcagtttcctcaccataa

SEQ ID NO: 31519 - DNA, 201 bp, Homo sapiens
aagtctggggacttagacaaattctttttccagcataatcatcttctgtgtccgtactcctcttcccatatgtcagcctagaagagtgaggctctccgggrtgcagggaagaacataggcagcgtgagaagagagtttcccctcgttatgcaagagttatggttccctagttaactctctaaccacctcttcagttgtttt

SEQ ID NO: 31520 - DNA, 201 bp, Homo sapiens
aaggcccctcgttcattgagtttattactaacaagtcacattttcatgacttctgttcagatgcttttgttctgaaataatcacagtggtctctaaaaacktaatgactaagagtgtgtgttggtgaggaggtggagaaatgggaaccttcacaggctgccagcaggagtgtaaaacgctgcggccagtgtgccaaacagt

SEQ ID NO: 31521 - DNA, 201 bp, Homo sapiens
ggcttaattatcgcttcaggaagatcagtggaaaagatgtattcagagtccaaggtcatgtctgttcctcaagggaagtctgtgtggatgacagtgccctrtggaactcttttgaaaagccccatatgactcttctctttcatataccagccaaatggcccaaacctctctgtgcctcagtttcctcaccataaaatgggt

SEQ ID NO: 31522 - DNA, 201 bp, Homo sapiens
agggagagaattgcttcacccagacagaaccacccagtcccatagataattccagcaagccacagagttgaggcctgaagaggcaaggcaggagctgtgtmccggctgcttggcactgcccacttcccctccctgggcagagctgggaggagctgagccaggagccagcccatgtcctgtagttcacgtacgagcacactg

SEQ ID NO: 31523 - DNA, 201 bp, Homo sapiens
gactattgtgaattaagtgagaattcagaggcatagcatccaagtgttatatttggacttttttggctcctggttctagcaaagcaaccttaaaaagacayttttgagacccaagtcagggaaaattgagcacagactgggttaatacatgactttaataaactgttgttcattttgtgagatataataatgctattgcag

SEQ ID NO: 31524 - DNA, 201 bp, Homo sapiens
gttctttcccacagcttcccctggggtggctcccgtctctcttccctgtggtgctactgtaacagccctggaaatgcctggctgcagactcgccacacccyagcacttggctagctcagccttttatgggcatggtaccccagttcatctgtgcgtcaccatggtgacagccaacatcggaagttgtacgtcactggataa

SEQ ID NO: 31525 - DNA, 201 bp, Homo sapiens
aaagacatttttgagacccaagtcagggaaaattgagcacagactgggttaatacatgactttaataaactgttgttcattttgtgagatataataatgcyattgcagtccctttttggagttatacatcagagacaaaaattaaaagcaaatatctttcttgcagggaagccgaggcctggatggctatcaagggcctga

SEQ ID NO: 31526 - DNA, 201 bp, Homo sapiens
gacaccaggcctgagagcccatggccgaatcacagcgtagacctgggcccggcagcctggcttcccatccgggccaccgttcactcagcctttgttcagcrgatgtctgttgagcacttgacatgggccagacacgctgttgtgatggtaacaatggtgagccctgaccctgggcagggctctcttctccacaccttctcc

SEQ ID NO: 31527 - DNA, 201 bp, Homo sapiens
tgacatgggccagacacgctgttgtgatggtaacaatggtgagccctgaccctgggcagggctctcttctccacaccttctccctcagctgcagaatgaasgtagtagctaccttgcagttttcttgagtgctgtatagacagtgtgtataacatagcacagcgtggctccccatagattccgtttcctagaattccattt

SEQ ID NO: 31528 - DNA, 201 bp, Homo sapiens
aggcaggctgagtctgaaaagagagtcagcgaagggagataggggtggggccgttttataggatttgggtaggtaaaggaaaaaggggggttgttctctgrcgggcaggagtgggggtcacaaggtgctcagtaggggagcttttgagccaggatgagtcaggagaaggaatttcacaagataatgtcatcagttaaggca

SEQ ID NO: 31529 - DNA, 201 bp, Homo sapiens
ttagaaagatcaaaacacccctgtccctttcctctctgtgtccagcctagaggtttgcattctaggagaatggcagcagccagacacctcccaggaacccratgtaagccctgtatcgatggcagcttcctgcgaagccactgtgagtgtgtgaaaaatccccaccgtaggaacaaaagtttttgtatctaaaacactgtt

SEQ ID NO: 31530 - DNA, 201 bp, Homo sapiens
cgggcttaccaggtaaggtcacgtaaaacacgtggtcacccagacccagagtcgtgggctgtgcaggaggcaccgctgagcaggccagcctctctcagggygacttctaaggcccatacgagagcaaaggcaggtctgctgtggcttacggtggtctgcaccaacatagcagcacagggtatactggcgccccaggcaact

SEQ ID NO: 31531 - DNA, 201 bp, Homo sapiens
aatttattttatcccatcagtgttagtgaggcactgaccacccatcccgtggagtaactgataagctccctggcctagagaccccatcagatcctctgtgygcctggggcactggcacaggccttgccataacaagcactctgggtagtgaatgtgcgaataaatgcattaaacctcctagcagagccacgctgacccata

SEQ ID NO: 31532 - DNA, 201 bp, Homo sapiens
tcacccggaaccctgttaaaatccaggacaggagagggcccaagtgccctgcctgattgctaatgagcccccaggtgactctcacgctgccgacccccccratctctctcagatgccccagatgctctctgaggtcccttccaagtccaacatcttatgaagcctttgggaaaataatcagttaccaatggcaaaaagcag

SEQ ID NO: 31533 - DNA, 201 bp, Homo sapiens
attatttcactgtcaaaaatcacaactgaggaggcttcctgcccctttgatcaaagctcccatctctccacctgctgcattcatcattagttgcacttctyaaaacagttatttttgtttcggttaagcattcctctgcctgctgtggggactttatggtttagaaattgctggttgaagatcatttatcagcacttaaca

SEQ ID NO: 31534 - DNA, 201 bp, Homo sapiens
ttcttcaaagttctcattttgttttagaagaactttcagcttcattgctttctaagtagcttgatatcattagaaactgataatgctcagcacagtcagckcaagataagttaaccagcttacatccacctatatgtttaggggttctcttggtctaaaacgtcttgaaaaccaaatttctgtgaatcagttactgtctta

SEQ ID NO: 31535 - DNA, 201 bp, Homo sapiens
aatcctgaagtcagtttctaccgtagccatttcccatccctacctgccaggaagaacgaccctctgctggagcttggcctccagggctgaggtgcgatgcygctgcctcctctcctgtgtcccctccacaaaatcaaatgggcacagttcgtgatagggaacctctttataaatactgtcttcctatttcctgacctgtga

SEQ ID NO: 31536 - DNA, 201 bp, Homo sapiens
gtctaaaacgtcttgaaaaccaaatttctgtgaatcagttactgtcttagtccacttgggctattataacaaaaataccttaggctggataatttataaaygacagaaatttatttctcactgttctagaagctggtaagtccaagatcaaagtactagtagatttggtgtctgatgagatccaggattcatagatggtgc

SEQ ID NO: 31537 - DNA, 201 bp, Homo sapiens
aagaaagtaaaaagatgtaaaatgggactcctgtgtagggcatttaccatgaacggagcttgcgggacttggaagttgctctgtctgcgttggggagtgcrgggtgcgtggatgtgaaggcctggggcgtgaccgcgcaccactgtagatccatcaacactgggtcttaggcggccctaaacttacgttttcaatattttt

SEQ ID NO: 31538 - DNA, 201 bp, Homo sapiens
gacacgtgtggctgggcagtttcatcattgcttgaacatactggagagtactcacacaaacctagatggccgggcctactacacacccggctgtgtgataragcctgttgctactaggctacaaacctgtacgtaggcagttgcgacacagtactatttgtatatctaaatacagaaaaggtacagtaaaaagaaagtaaa

SEQ ID NO: 31539 - DNA, 201 bp, Homo sapiens
ttttataggatttgggtaggtaaaggaaaaaggggggttgttctctggcgggcaggagtgggggtcacaaggtgctcagtaggggagcttttgagccaggmtgagtcaggagaaggaatttcacaagataatgtcatcagttaaggcaggaacaggccattttcacttcttttgtggtggaatgtcatcagttaaggcaga

SEQ ID NO: 31540 - DNA, 201 bp, Homo sapiens
taggatttgggtaggtaaaggaaaaaggggggttgttctctggcgggcaggagtgggggtcacaaggtgctcagtaggggagcttttgagccaggatgagycaggagaaggaatttcacaagataatgtcatcagttaaggcaggaacaggccattttcacttcttttgtggtggaatgtcatcagttaaggcagaaaccg

SEQ ID NO: 31541 - DNA, 201 bp, Homo sapiens
gcgacaagcgtcaggctcacgaagagagggggaaatgcctgaatataaggaggtccagggagctagtgttaaaaactagaagaaaacagatgcccttagtrtctgaccactgggcaggacaggatattccaaacttaaaatgaagagaagaaatcacacatgtgcacacacacccacacacacaccatatgaagtttgaat

SEQ ID NO: 31542 - DNA, 201 bp, Homo sapiens
ccagaagacggtatttcggagctgtggtcccacaatggaagggtggggccagctgtacccatcatccctgggggtgtcctgttttccctaagacagtgagkggtgcatgggtacatgggtgctgccttggaagctggctagtgcaggctcagagggaggaagtaggttaaaaatcagctaaggaaggagcacggttggatg

SEQ ID NO: 31543 - DNA, 201 bp, Homo sapiens
cagactatcctgggaggctgcatggtgctgccagagccctagtcagggtgaggatccaggacagtccaccagcacagcctcagccagcggtgaggatctarggtcagtccaccagcacagcctcagtcagagttgaggatctagggtcagtccacgagcacagcctcagtcaaggatgaggatctagggtcagtccaccag

SEQ ID NO: 31544 - DNA, 201 bp, Homo sapiens
caccacatagcagtcctcacactcctcctctgaggtcctcagggaggcatttgtgtctcgagactgtttcagagacccatgtcttctcaggagatgccaasgctcaggtcagagacttgttgagtttttaagagactgtctgaagcacacaccctgccctaataagtcaatatttctgttcctcctggagacctcacattc

SEQ ID NO: 31545 - DNA, 201 bp, Homo sapiens
tccaggacagtccaccagcacagcctcagccagcggtgaggatctagggtcagtccaccagcacagcctcagtcagagttgaggatctagggtcagtccaygagcacagcctcagtcaaggatgaggatctagggtcagtccaccagcacagcctcagtcagagttgaggatctagggtcagtccaccagcacagcctcag

SEQ ID NO: 31546 - DNA, 201 bp, Homo sapiens
ccaggacagtccaccagcacagcctcagccagcggtgaggatctagggtcagtccaccagcacagcctcagtcagagttgaggatctagggtcagtccacsagcacagcctcagtcaaggatgaggatctagggtcagtccaccagcacagcctcagtcagagttgaggatctagggtcagtccaccagcacagcctcagc

SEQ ID NO: 31547 - DNA, 201 bp, Homo sapiens
cgaagatgcagatatttccagttaagtgggttacagggaggcagtttactcaactatagaaatgggaaataggcagacatacacaaatgacgcagccgccstgcttgtgagcaccgatctgcaccacagctatgtccgccctctgccatcccactggccaggtggccatcactccatgactttcatttgttccccacccaa

SEQ ID NO: 31548 - DNA, 201 bp, Homo sapiens
cagcacagcctcagccagcggtgaggatctagggtcagtccaccagcacagcctcagtcagagttgaggatctagggtcagtccacgagcacagcctcagycaaggatgaggatctagggtcagtccaccagcacagcctcagtcagagttgaggatctagggtcagtccaccagcacagcctcagccagcggtgaggatc

SEQ ID NO: 31549 - DNA, 201 bp, Homo sapiens
ctctgagcgttcactgaagccgtttggtgtgaatgaagtatcccacctcatgagtttggaggggaagagagcagcaaaactccaatgttgagcagaacagraatcaggaaggggccagaggagtgaggggaaacgcaggcgggtccgtggccaccagaagagcccattccaggagggagggggcagctgtgctggggccac

SEQ ID NO: 31550 - DNA, 201 bp, Homo sapiens
cacagcctcagccagcggtgaggatctagggtcagtccaccagcacagcctcagtcagagttgaggatctagggtcagtccacgagcacagcctcagtcarggatgaggatctagggtcagtccaccagcacagcctcagtcagagttgaggatctagggtcagtccaccagcacagcctcagccagcggtgaggatctaa

SEQ ID NO: 31551 - DNA, 201 bp, Homo sapiens
gacagaggcgtccaggaaggaggtaggagccatccacctctgagcgttcactgaagccgtttggtgtgaatgaagtatcccacctcatgagtttggagggraagagagcagcaaaactccaatgttgagcagaacaggaatcaggaaggggccagaggagtgaggggaaacgcaggcgggtccgtggccaccagaagagcc

SEQ ID NO: 31552 - DNA, 201 bp, Homo sapiens
agcctcagtcagagttgaggatctagggtcagtccacgagcacagcctcagtcaaggatgaggatctagggtcagtccaccagcacagcctcagtcagagktgaggatctagggtcagtccaccagcacagcctcagccagcggtgaggatctaaggtcagtccaccagcacagcctcagtcaaggatgaggatctagggt

SEQ ID NO: 31553 - DNA, 201 bp, Homo sapiens
aggatgaggatctagggtcagtccaccagcacagcctcagtcagagttgaggatctagggtcagtccaccagcacagcctcagccagcggtgaggatctarggtcagtccaccagcacagcctcagtcaaggatgaggatctagggtcagtccatcagcacagcctcagccagggatgaggatctaaggtcagtccaccag

SEQ ID NO: 31554 - DNA, 201 bp, Homo sapiens
catcacagctcactgcaacctcaaactcctgggttcaagcgatcctcccacctcagcctcccaagtagctgggactgcaggtgcctgccaccatgcccggttacattatgtattttttgtagaggcagggtttcactatgtttcccaagctggtctcagacttctgggctcaagtgatcctcccaccttggcctcccgaag

SEQ ID NO: 31555 - DNA, 201 bp, Homo sapiens
tcacctgaaaccaggcccacccatgctctgagatcatctctagcccaggacaaggcatttccaaggcagcgttggcttagactatgttggctgggcttcamctctcattcatgtgtcaggagctctaggccggggagccaggcattggtgaccctttagctgggaaggctcggggggctgagttacatcaccaaaccctca

SEQ ID NO: 31556 - DNA, 201 bp, Homo sapiens
tgaatcagttactgtcttagtccacttgggctattataacaaaaataccttaggctggataatttataaacgacagaaatttatttctcactgttctagargctggtaagtccaagatcaaagtactagtagatttggtgtctgatgagatccaggattcatagatggtgccctgctgctgtgtcctcacgcagcagaaag

SEQ ID NO: 31557 - DNA, 201 bp, Homo sapiens
tgggcccccaggggtacaatgggccaccaggattacaaggattcccgggactgcagggacgtaaaggagacaagggtgaaaggggagcccccggagtaacrggacccaagggcgacgtggtacgcaccgctggtgtattcccctggcctcatgagggtggcgggtatctcagccttggttaattgcatttgctttcttcat

SEQ ID NO: 31558 - DNA, 201 bp, Homo sapiens
tctgccagcttctttaattcctctgcctttcttgaaggagcagataagtccaatggggtctggcctccaggttggtgtgtgatgagatagttggcaaggtrggactgcctgcaggtcctcagtaaatgttcattcatttgctgagggaagtaatgattcatccccctaggcaaactccttccatgatttggaatttaggtc

SEQ ID NO: 31559 - DNA, 201 bp, Homo sapiens
gttccaaatacacagcctgagctcctccctccttctctgagtctctcagttccatgaggacaggcatcgacgcagtcataactgctggcactcactggcaytccagaaaagcccatggggcttattcattgtacgtgggggagcgcccctgtccttcaggcatttcaccatcttgagctggtgactagttcaagaccattc

SEQ ID NO: 31560 - DNA, 201 bp, Homo sapiens
cactcagccagatggcctacctgtcctcacctgaaaccaggcccacccatgctctgagatcatctctagcccaggacaaggcatttccaaggcagcgttgscttagactatgttggctgggcttcaactctcattcatgtgtcaggagctctaggccggggagccaggcattggtgaccctttagctgggaaggctcgggg

SEQ ID NO: 31561 - DNA, 201 bp, Homo sapiens
ccacccagcacctaataaaaccacccaacaaatgagggctcagctcctcccggggtgaaggccagggtgctctgttgactaaggggaggccatgaaagaayggggaagactggctctggacagagcctcatcccctgcgcttatcgtggctcactgccaagtgcgaacacctgggtccacgcctccgcatgccgggcccgt

SEQ ID NO: 31562 - DNA, 201 bp, Homo sapiens
ggatctcttgaggtcaggacgagtatgagaccagcctggccaacatggtgaaacctcgtctctactaataatacaaaacttagctgggcatggtggcgggygcctgtaatcccagctactccggagactgaggcaggagaattgcttgaacccaagagccagaggttgcggtgagccaagatcgcgccaccgcactccagc

SEQ ID NO: 31563 - DNA, 201 bp, Homo sapiens
tctgagctctttagttaggcatgattctctactagagggaatgtcaggagagtgatgctggattgctaaatataaggtcctctgttttcctccctggaggrggagaaaggagcaattctctagacatgccaatataacatttccttttatttttaagtagtgtatttctttttcttttcttttctttcttttttttttttt

SEQ ID NO: 31564 - DNA, 201 bp, Homo sapiens
tgtatttctaatacagaaaatagagggaaatggaaaatacagaaaacggaagaaatagaagtgccccattattgcactgcccagattttaacaaataaaartaatagcaagaaaatccaagccatacagagaatggtaccaaatgaaaaataattgttccttcatttctcccttcccatgcccccagcagggaggagttac

SEQ ID NO: 31565 - DNA, 201 bp, Homo sapiens
atagaagtgccccattattgcactgcccagattttaacaaataaaaataatagcaagaaaatccaagccatacagagaatggtaccaaatgaaaaataatkgttccttcatttctcccttcccatgcccccagcagggaggagttactattaagtttcttatgtgcacattttaaatttgtatgtttccccctcttactta

SEQ ID NO: 31566 - DNA, 201 bp, Homo sapiens
gattgattaaaaaaaaaaatttcgcagctgggcgcaggtggctcacgcctgtaatcctagcactttgggaggccgagacaggtggatcacctgaggtcagragttcaacacaagcctggccaacatggagaaaccctgtctaccaaaaatacaaaaattagccggacatgatggtgggtgcctgtaatcccacctacttgg

SEQ ID NO: 31567 - DNA, 201 bp, Homo sapiens
gacatgccaatataacatttccttttatttttaagtagtgtatttctttttcttttcttttctttcttttttttttttttttttgaggaagaatctcactstgtcacccaggctggagtccgttggtgccatctcggctcactgcaacctccacctccccagttcaagtgattcttcttcctcagcctcccgagtagctgg

SEQ ID NO: 31568 - DNA, 201 bp, Homo sapiens
caaggggaggcaccggggagtgaccgttgtccggagccaccacggtgttttggtgagtgcaggagcgagaggagggagggccttagggaggctggtgctasccctcgtggttgaccctggtgttgagaccagttctgactgccatgctgttcccgaggctgagtctagcgtctccctggtgccaaccccagggctgactgt

SEQ ID NO: 31569 - DNA, 201 bp, Homo sapiens
gtgttttggtgagtgcaggagcgagaggagggagggccttagggaggctggtgctagccctcgtggttgaccctggtgttgagaccagttctgactgccaygctgttcccgaggctgagtctagcgtctccctggtgccaaccccagggctgactgtagctctgaccaccctgataccagggctgacctaggtattccctg

SEQ ID NO: 31570 - DNA, 201 bp, Homo sapiens
ggtagaaagaggatttgggtacaattctctcaattctttggactactagactccaggcatttaattagccttttatttatttatttatttattttgagacrgagtttcactcttgttgcccaggctggagtgcaatagtgtgctcatggctcactgcaacctctgcctcccgggctcaagcaattctcctgcctcagcctc

SEQ ID NO: 31571 - DNA, 201 bp, Homo sapiens
ccccagggctgactgtagctctgaccaccctgataccagggctgacctaggtattccctgtgacccagcacactcctgcaggtgtcggcctcggccttgaygccaacactgactcctacacccggtgaggggtgggccagctcttcctgtgccccctgcctggttgagccactgagttctggaatgggggtgagaatgtgg

SEQ ID NO: 31572 - DNA, 201 bp, Homo sapiens
taggcttgggcgagctcgcagcttccagcgctttggggtcacggtcaggctgggccggtccttgggcactcggccgccgggacacctccgccgccgcctcwccgggctgccggggaagtcggggtcgtcgggatcgtcaggatcgtcggactgcgaggggtcgccgatgctggcgtcgctgctgccgctgctgttgaagaa

SEQ ID NO: 31573 - DNA, 201 bp, Homo sapiens
gaggatttgggtacaattctctcaattctttggactactagactccaggcatttaattagccttttatttatttatttatttattttgagacagagtttcrctcttgttgcccaggctggagtgcaatagtgtgctcatggctcactgcaacctctgcctcccgggctcaagcaattctcctgcctcagcctcctgaatag

SEQ ID NO: 31574 - DNA, 201 bp, Homo sapiens
cccccttctctgggtctttcgggaggattgtgaaccctcccaattctaatacaggtcagagaataaagtctctcctggagctcggtcatccttctggcaawgctctcttcttcatttactctcccctgcttagagacagcatcttcacctcaagccacggctccaggagaaaggcatccaaggtcatggtggtgctcaccg

SEQ ID NO: 31575 - DNA, 201 bp, Homo sapiens
ggttgcagtgagccaagatcatgccattgcactccagcctgggcgacagagtgagactccatctcaaaaaaaagaaaaaaaaaaaaaagaaagaaagaaakaaaccctgagaacaggacaggttagagctgggtgaaggcaagatgtgagcttcaagtcagtgaccagttaaaaagattgttaaacatttaaatacaaaat

SEQ ID NO: 31576 - DNA, 201 bp, Homo sapiens
cttttggccctttttaaagcggtgggaatggaggagagaggtttccgttgcctcctgatgtttgctcttccggcttgatctagttctctccagcctgtctrttccccttggcacaatgcggcccttgggaacactggcctcctgatgctctctccggacggcctcttgaagccctctctcttgacaagagtcctggcctgt

SEQ ID NO: 31577 - DNA, 201 bp, Homo sapiens
atttatttatttatttattttgagacagagtttcactcttgttgcccaggctggagtgcaatagtgtgctcatggctcactgcaacctctgcctcccgggytcaagcaattctcctgcctcagcctcctgaatagctgggattacaagtgcctgcaccacacctggctaattttttttttctttttttgagatggagtctc

SEQ ID NO: 31578 - DNA, 201 bp, Homo sapiens
tgcacagcctggggtggggagaagccagggttgtcgatgggggcttttctgtaagcagcttatccagaccctgttctatttgcaaatgctcctcttctctycatgctctgtcatcccagagagggctcatttccccatggtggtcacagcttactggccaaatagtggtgggagagccacaggaaacacaccaaggagggt

SEQ ID NO: 31579 - DNA, 201 bp, Homo sapiens
agaagtggcagtggtatagatgctgcagacctctgacacatcagtcacaattttcttcttgtggaaactgaaggaagccctggttttggtccaaaagcagrcattctgtaaaggagtcaggtcctgggtggggaacgaatcttttcccagcttttggccctttttaaagcggtgggaatggaggagagaggtttccgttgc

SEQ ID NO: 31580 - DNA, 201 bp, Homo sapiens
cccagagagggctcatttccccatggtggtcacagcttactggccaaatagtggtgggagagccacaggaaacacaccaaggagggttcctggaggaccgyggtgccaagctgagtcctgccagacaaatgggagtagctggcctagggcacaggggaggcagagaggggccctgcaggcagagggaacagcatgtgcaga

SEQ ID NO: 31581 - DNA, 201 bp, Homo sapiens
catttcaacaaatatttcagtttccatttggaaacaaaattcttgtttgaaaagctgactggaaacctgtgagaatgggagttccaccctcctgtggggayggaggttgaaacagcaccagaggcttcaagaccagtctcctctcatttcggggcagtaagatacatttagcttacttaaacagactgtgctggcagagca

SEQ ID NO: 31582 - DNA, 201 bp, Homo sapiens
tgtcacccaggctggagtatagtggcgtgatctcagccctctgcaaactccccctaccgggttcaagcaattctctgtctcagcctcccgagtagctgggrttacaggcacctgccaccacacccggctactttttgtatttttagtagagacggggtttcaccatcttggccaggctggtcttgaactcctgacctcagg

SEQ ID NO: 31583 - DNA, 201 bp, Homo sapiens
gattcctgtaaaagagcgattttattttaattaattaatttatttatttattttgagacggagtcttgctctgtcgcccagtctggagtgcagcggtgcartctcggctcactgcaacaaaagggtggccatattgatgacaggaggtcgcttttttctgtgtgctcaaacatccagttgttcccctgaatacagaccagg

SEQ ID NO: 31584 - DNA, 201 bp, Homo sapiens
ggtcttgctatgttgaccaggctagatatgaactcttgggctcaagcgatcctcctgcctcagcctcccgagtagctgggactacaggcgcacgccactgygcccggctagtttacttctttcagaacatttgttatcagcaaatttaaacatttcaacaaatatttcagtttccatttggaaacaaaattcttgtttgaa

SEQ ID NO: 31585 - DNA, 201 bp, Homo sapiens
actcaggtatttaaaggcagttctttatcagtcacacctctttccacagtgactacagagtctcaagtataaaaaccagagttctagaaacagagtgaagrcaagttaaccatgggaaaagattaggagtaaattcccgaagtcctgttcagaaggactctcaatcactcagctcttaaagcaacctgtcagttttcctcc

SEQ ID NO: 31586 - DNA, 201 bp, Homo sapiens
gcaggcggatcacctgaggtcaggagttcgagaccagcctgaccaacgtggagaaaccccgtccctaataaaaatacaaaattagccaggcatggtggcgygtgcctgtaatcccagctactcaggaggctgagacgggagaattgcttgaacctgggaggtggaggttgcagtgagccgagatcgtgccattgcactcca

SEQ ID NO: 31587 - DNA, 201 bp, Homo sapiens
agcacacggtgtgttcacagccacaccacccttgccccaggttacgctgtggccgtgctgcacaagacctgcagcctctcctacgtcgcgggggctccacrgtacaaacatcatggggccgtgtttgagctccagaaggagggcagagaggccagcttcctgccagtgctggagggagagcaggtacctgctggggaaagc

SEQ ID NO: 31588 - DNA, 201 bp, Homo sapiens
ggtgctcaggctggatggcggctgggcggggcagcggcatcgctctccgcacccactttcttacccaagggtgatcgttgatgataatatctctaatatcyctttttttgtggttgttgtttttgagatggagttttgctctcgttgcccaggctgcaatgcaatggcaggatcttggctcaccgcaacctctgcctccgg

SEQ ID NO: 31589 - DNA, 201 bp, Homo sapiens
tgtaatcccagctactcaggaggctgagacgggagaattgcttgaacctgggaggtggaggttgcagtgagccgagatcgtgccattgcactccagcctgrgcaacaagaacgaaactccgtctcaaaaaaataaaaataagaaaaatattagctgggcatggtggtaaacacctgtagtcccagctactcgggaggctga

SEQ ID NO: 31590 - DNA, 201 bp, Homo sapiens
ccctgcccatggaactagaggggggcgggctctgactcctgaacttccaggtaggaggaccccagctttcccctggtgctcactgtatggccttgggaagktccctggccagtgagcgtgcatcctgggtggcaacggagtgggcacccaccagcccagcgagcgtgcatcctgggtggcaacggagtgggcacccaccgg

SEQ ID NO: 31591 - DNA, 201 bp, Homo sapiens
cagcctgggcaacaagaacgaaactccgtctcaaaaaaataaaaataagaaaaatattagctgggcatggtggtaaacacctgtagtcccagctactcggsaggctgaggtgggaggatcacttgaacccaggaagtggaggctgcggtgagccgtgatcattgcaccacagcaccacgctctagcctcggtgaatgtcct

SEQ ID NO: 31592 - DNA, 201 bp, Homo sapiens
tctactaaaaatacaaaaaaaattagctgggcgcgatggcgggtgcctgtagtcccagctactcgggaggctgaggcaggagaatggcgtgaacccgggargcggagcttgcagtgagccgagattgcgccactacactccagcctgggccacagagcaagagtctgtctcaaaagaaaaaacaagaaagaaaactttgct

SEQ ID NO: 31593 - DNA, 201 bp, Homo sapiens
agtgggtggatcacttgaggtcaggagttcgagaccagcctggctaacatggtgaaaccctgtttctattaaaaatacaaaaaattagccgggcgtggtgktgggcacctataatcccagctacttgggagactgaggcaggagaattgcttgaacccgggaggtggaggttgcagtgagccgagatcgcgccacttcact

SEQ ID NO: 31594 - DNA, 201 bp, Homo sapiens
cgagattgcgccactacactccagcctgggccacagagcaagagtctgtctcaaaagaaaaaacaagaaagaaaactttgctgtttgaagtagttacgtcrgtaattatgaacccctatccctcttgcctggagagtgtaagtcattttgaccaagagaagagtctgtttccacctgaggtagagagcttcagatacagtg

SEQ ID NO: 31595 - DNA, 201 bp, Homo sapiens
atctgaactccacccttccctggagtcctttaataaccgccttttccattgttcagtgatacacacaatagtgtagtttttggatgggtgcagtggcccawgcctgtaatcccagcactttgggaggccgaggcgggcggatcacctgaggtcaggagttcgagaccagcctggccaacatggcaaaaccccgtctctact

SEQ ID NO: 31596 - DNA, 201 bp, Homo sapiens
ctccagcctcctcctggtccaaccaacagatggttaataactagataaatccccgccagtccagctccatgcctcccgaggcaccatattctgctgcagtrccaccctccctatgtgcggccctttcttcaccagggttctgagagagaagtgagtctaatgccctaagacactgagaaagtaaaaattagcttagactgg

SEQ ID NO: 31597 - DNA, 201 bp, Homo sapiens
tcaggagttcgagaccagcctggccaacatggcaaaaccccgtctctactaaaaatacaaaaattagccaggtgtggtgatgtacacctgtaatcccagckactcgggaggctgaggcacgagaatcacttgaacccggaggtggagattggagtgagctgagattgcgccactgcactccagcctgggcaacagagcagg

SEQ ID NO: 31598 - DNA, 201 bp, Homo sapiens
ggaagtttaacgtcaggtttcagttctgtggcgagcacactctaagcagttgtgaggattttgccccacttcctgcagttatttcacctctttttcttttktgtgtgtgtgtgtgtgtgtttgtttgagacggagtcttgctctatcaccaggctggagtgcagtggtgcgatctcggctcactgcaacctccgcctccca

SEQ ID NO: 31599 - DNA, 201 bp, Homo sapiens
tctgttttttttggagatgaagtcttgctcttgtcgcccaggctggagtgcaatggcgcagtctcggctcactgcaccctccgcctcccaggttcaagcarttctcccaccatagcctcccgaagctgggactacaggcacacgctgccacgcctggctaattttttgtgtttttagtaaagacagggtttcaccatgttg

SEQ ID NO: 31600 - DNA, 201 bp, Homo sapiens
tgagacaggagaatcgcttgaacccgggacacagaagttgtagtgagccaagattgcaccactgcactccagcctgggcgacagagcaagaccccatctcaaaaaaaaaaaagaaattaataaaaataaattgctgacttaagtataattcaactctaaacatttcagcatacatatcaacaaaatgtgtttgtgcttctt

SEQ ID NO: 31601 - DNA, 201 bp, Homo sapiens
caccgtggctcacgcctgtaatctcaacacttagggaggctgaagctggaggatttcttgaggccaggagttcaagaccaccctgggcaacatagtgagacccccccaactcaaaaaaaaccaaaaactgtctgggcatggtggtgcctgcctgtagtctcagctacttgggaggctgaggcaggaggaccacttgggccc

SEQ ID NO: 31602 - DNA, 201 bp, Homo sapiens
ctgaggcgggcggatctcttgaggtcaggacgagtatgagaccagcctggccaacatggtgaaacctcgtctctactaataatacaaaacttagctgggcrtggtggcgggcgcctgtaatcccagctactccggagactgaggcaggagaattgcttgaacccaagagccagaggttgcggtgagccaagatcgcgccac

SEQ ID NO: 31603 - DNA, 201 bp, Homo sapiens
taatacaaaacttagctgggcatggtggcgggcgcctgtaatcccagctactccggagactgaggcaggagaattgcttgaacccaagagccagaggttgmggtgagccaagatcgcgccaccgcactccagcttgggcgacagagtgagactccatctcaaaaaaataaaaataaaaaataaagtcatagcaaaagttac

SEQ ID NO: 31604 - DNA, 201 bp, Homo sapiens
aaactgttacatagtaagtaaatgggtgagtgtgtcttcccgtgagagtgcgatgtcaaatgtcattccttatatcgtgtttactcagtgtatttagagaygaaaaagtcactaaaccaaaaaaaggagtgttgccaagaagttgtatagcttttcaagagtgtttatggcaaaagtcgttaattgaacagtaattgaaca

SEQ ID NO: 31605 - DNA, 201 bp, Homo sapiens
atctcagtcaggataagctcacagatgtggccatcggggcccccctggaaggttttggggcagatgatggtgccagcttcggcagtgtgtatatctacaayggacactgggacggcctctccgccagcccctcgcaggtgacccatggggccctctccttcctctcctctggggctctgacctctctcagatatgatgacc

SEQ ID NO: 31606 - DNA, 201 bp, Homo sapiens
gcaggtctcgggggttgggaatgcccagtgaaagaaagaagtcccccaggctagggggagcttccagaccagggcctcacctcagccccttcaggttgggrggaggttccagaccagggcttcacctcggccccttcaggttcgggggaggttgtggcggtacctgtctccttccctggcctataccccctccttccaccc

SEQ ID NO: 31607 - DNA, 201 bp, Homo sapiens
ccccaggctagggggagcttccagaccagggcctcacctcagccccttcaggttggggggaggttccagaccagggcttcacctcggccccttcaggttcrggggaggttgtggcggtacctgtctccttccctggcctataccccctccttccacccacctgcctcgggtccctgcttcctctctttctgtccctcgctc

SEQ ID NO: 31608 - DNA, 201 bp, Homo sapiens
atccccaagccccacatcaagcctccttgtaccccaatcccctgtggtccaccccgtccctggccctggctgcttctcagaaggccctgctctttccccaygcctcactctttcccttactctcccctgtcaagtcccacctgccctacgaggctccatccaaatgccacttcctctgggaaagcttgctccctctttcct

SEQ ID NO: 31609 - DNA, 201 bp, Homo sapiens
tccaccccgtccctggccctggctgcttctcagaaggccctgctctttccccatgcctcactctttcccttactctcccctgtcaagtcccacctgccctwcgaggctccatccaaatgccacttcctctgggaaagcttgctccctctttcctggttctagactcggggctccctggggctggatggtgcctgcgatgct

SEQ ID NO: 31610 - DNA, 201 bp, Homo sapiens
aactggaatgtggggtggggggaggcacttctgctgcctggggggtcccattttagcctttaactgtcccatggaagcctctgggcaagccaagccatgartcctttcgggggccccctgtgatgagacagcacggtcaggtgagcccctggaggctgctaagattaagccggaggccagggtggtcctgcctagtgatct

SEQ ID NO: 31611 - DNA, 201 bp, Homo sapiens
tgctgcccaggctggagcccaggctggatcttggctcaccataacttctgcctcccaggttcaagcagttctcctgcctcagcctcccgagtagctgggawtacaggcgcctgccaccacgcctggctaatttttgtatttttagtagagacagggtctcaccatattggtcaggctggtctcctgccctcaggtgatcga

SEQ ID NO: 31612 - DNA, 201 bp, Homo sapiens
ccaggctggagcccaggctggatcttggctcaccataacttctgcctcccaggttcaagcagttctcctgcctcagcctcccgagtagctgggattacagrcgcctgccaccacgcctggctaatttttgtatttttagtagagacagggtctcaccatattggtcaggctggtctcctgccctcaggtgatcgacctgcc

SEQ ID NO: 31613 - DNA, 201 bp, Homo sapiens
caggctggagcccaggctggatcttggctcaccataacttctgcctcccaggttcaagcagttctcctgcctcagcctcccgagtagctgggattacaggygcctgccaccacgcctggctaatttttgtatttttagtagagacagggtctcaccatattggtcaggctggtctcctgccctcaggtgatcgacctgcct

SEQ ID NO: 31614 - DNA, 201 bp, Homo sapiens
caggctggatcttggctcaccataacttctgcctcccaggttcaagcagttctcctgcctcagcctcccgagtagctgggattacaggcgcctgccaccasgcctggctaatttttgtatttttagtagagacagggtctcaccatattggtcaggctggtctcctgccctcaggtgatcgacctgcctcggcctcccaaa

SEQ ID NO: 31615 - DNA, 201 bp, Homo sapiens
gcatctgaggtgggctctgaaggacggggaggtccttggcaagtacaggctgggggtgagcagaggggccttctgtgcaggggggataggagggaccaagccctggggtgtgaagagtctggtttgtaggaagatggaggcgaagtgtgagtgggagcaggagattgtctcctctggtgttgctttcccttccagccccgc

SEQ ID NO: 31616 - DNA, 201 bp, Homo sapiens
tctactaaaaatacaaaaatgagccaggcatggtggtgcgcacctgtaattccagctacttgggaggctgaggcaggagaattgcttgaacccaggaggcrgaggttgcagtgagctgagatcacaccactgcactccagcctggaagacagagagagacaccgtctcaaaaaaaaaaaaaaggccaggcgcagtggctca

SEQ ID NO: 31617 - DNA, 201 bp, Homo sapiens
gaggttgcagtgagctgagatcacaccactgcactccagcctggaagacagagagagacaccgtctcaaaaaaaaaaaaaaggccaggcgcagtggctcahgcctgtaatcccagcactttaggaggccaaggtgggcagatcatgaggtcaggagatcgagaccatcctggctaacacagtgaaactccgtctctactaa

SEQ ID NO: 31618 - DNA, 201 bp, Homo sapiens
agagacaccgtctcaaaaaaaaaaaaaaggccaggcgcagtggctcacgcctgtaatcccagcactttaggaggccaaggtgggcagatcatgaggtcagragatcgagaccatcctggctaacacagtgaaactccgtctctactaaaaacacaaaaaattagctgggcatggtggcgggtgcctgtagtcccagctact

SEQ ID NO: 31619 - DNA, 201 bp, Homo sapiens
atcacactactgcactccagcctggacaacagagcaagacactacctaaaaaacaaacaaaccccacaaaataacaggaggctattaccatcaacaaggcmggacgatgatggaaggagcatctggagaagagttgctttctagaaataatttggagagtcgggcacggtggctcatgcttgtaattccagcactttggga

SEQ ID NO: 31620 - DNA, 201 bp, Homo sapiens
gtctccactaaacaaaatacaaaaaattagccaggtgtggtggcgggcgcctgtagtcccagctacgggggaggctgaggcaggagaatggtgtgaacccrggaggcggagcttgcagtgagccaagatcgcgccgctgcactccagcctgggtgacagcgagactctgtctcaaaggaaaaaaaaaaagaaaaaagaaaa

SEQ ID NO: 31621 - DNA, 201 bp, Homo sapiens
tgtctctccctagctgagctggttctgttctgtacagtaagagaggcggccccgggatctccacggtgcttccagctgtgccgtcctggggtttttctcckcagagtccctctttccctctccattctctttgttgtctctcttcctccttattttcttcttcaatctcgatccccttcccgagccctccttccctaaaga

SEQ ID NO: 31622 - DNA, 201 bp, Homo sapiens
tcactctgaggaggtgtttgagactgaaatgctccagatttgattatccagttgctcacgggcatcgcccctagaagagataatagcatctttgcataacrtgtccatgtccaaaatagatcttttggtgcaaaaaaccaaccctctgtcccaacccgttccttagctaccctcaggagggagatatactccagttacagt

SEQ ID NO: 31623 - DNA, 201 bp, Homo sapiens
actttaggaggccaaggtgggcagatcatgaggtcaggagatcgagaccatcctggctaacacagtgaaactccgtctctactaaaaacacaaaaaattakctgggcatggtggcgggtgcctgtagtcccagctactcgggaggctgaggcaggagaatggcgtgaacccgggaggcggagcttgcagtgagccgagatt

SEQ ID NO: 31624 - DNA, 201 bp, Homo sapiens
catgaggtcaggagatcgagaccatcctggctaacacagtgaaactccgtctctactaaaaacacaaaaaattagctgggcatggtggcgggtgcctgtartcccagctactcgggaggctgaggcaggagaatggcgtgaacccgggaggcggagcttgcagtgagccgagattgcgccactgcactccagcctgggcga

SEQ ID NO: 31625 - DNA, 201 bp, Homo sapiens
ggtcaggagatcgagaccatcctggctaacacagtgaaactccgtctctactaaaaacacaaaaaattagctgggcatggtggcgggtgcctgtagtcccmgctactcgggaggctgaggcaggagaatggcgtgaacccgggaggcggagcttgcagtgagccgagattgcgccactgcactccagcctgggcgacagag

SEQ ID NO: 31626 - DNA, 201 bp, Homo sapiens
tgaggcaggagaatggcgtgaacccgggaggcggagcttgcagtgagccgagattgcgccactgcactccagcctgggcgacagagcgagactccgtctcaaaaaaaaaaaaaaaatatatatatatatatatatatatttagtttccagcacacagtagtgctcaaggcctgttggcctttcttgttattagggagatga

SEQ ID NO: 31627 - DNA, 201 bp, Homo sapiens
cgtgaacccgggaggcggagcttgcagtgagccgagattgcgccactgcactccagcctgggcgacagagcgagactccgtctcaaaaaaaaaaaaaaaawatatatatatatatatatatatttagtttccagcacacagtagtgctcaaggcctgttggcctttcttgttattagggagatgaagggtgagggagagag

SEQ ID NO: 31628 - DNA, 201 bp, Homo sapiens
aacccgggaggcggagcttgcagtgagccgagattgcgccactgcactccagcctgggcgacagagcgagactccgtctcaaaaaaaaaaaaaaaatatawatatatatatatatatatttagtttccagcacacagtagtgctcaaggcctgttggcctttcttgttattagggagatgaagggtgagggagagagatgg

SEQ ID NO: 31629 - DNA, 201 bp, Homo sapiens
tctagctttttgctttactgtcatcagctttgatcaatacacgggttgttgccaagtcctcgtattttgctccttaaaataacatgtaggattttttcctygtttgcttcacctgatttattgggcgatctctttgtcttgtctagatcactgtcgtcttcctgaaagatgagaagtaccattctttgcctatcatcatta

SEQ ID NO: 31630 - DNA, 201 bp, Homo sapiens
gcgagtccagtctgaggaaacaagctgagccaggcctggcagacctgggcaccagctggctctcagggaaagcccagcaaatacagcgaactaccccaccacacacacacacacacacacacacacacacacacacacggatgcacacacacacacacggatgcacacacatggatgcacacacacacggatgcacacaca

SEQ ID NO: 31631 - DNA, 201 bp, Homo sapiens
gtccagtctgaggaaacaagctgagccaggcctggcagacctgggcaccagctggctctcagggaaagcccagcaaatacagcgaactaccccaccacacacacacacacacacacacacacacacacacacacggatgcacacacacacacacggatgcacacacatggatgcacacacacacggatgcacacacacagg

SEQ ID NO: 31632 - DNA, 201 bp, Homo sapiens
cgtcctggggtttttctcctcagagtccctctttccctctccattctctttgttgtctctcttcctccttattttcttcttcaatctcgatccccttcccragccctccttccctaaagaaggctgactcagtcctgggaatgtgctgctccgggtttggggcgggagcactcagagaccctggtcaggtgtcagaagacg

SEQ ID NO: 31633 - DNA, 201 bp, Homo sapiens
gtctttgtcccccaagctggagttcagtggcacagttaagggctcactgcagcctcctactcctaggctcaggtgatcctcccatcttagtctcctgagtractgggactgttactcaggtgcatgccaccacacccagctaattttttaattttaattttgtggagatgaggtctccctatattgcccaggctggtctca

SEQ ID NO: 31634 - DNA, 201 bp, Homo sapiens
gcgtgatctcggctcactgcaacctctgcctcccaagttcaagcaattctcctgcctcagcctcccgagtagctgggattacaggcatgtatcaccatgcycggctaatttttgtacttttagtagagacggggtttcactatgttggccaggctggtcttgaacacctgacctcaggtgatctaccctcctcggcctccc

SEQ ID NO: 31635 - DNA, 201 bp, Homo sapiens
cttggcctcccgaagtggtggggttacaggcataagcacctgaccttgcttttttctcccaacaagtcaaactattccctaaataggttcgtgcctctgcmtacgcgtaggctgcttttcttgtcaggaatgccctccatgactgctcacttcactcactgtcttccctgaaagcggtctagagactcctgagtcctctgt

SEQ ID NO: 31636 - DNA, 201 bp, Homo sapiens
gtcttagaatgccccccaggccgggcgcggtggctcatgcctgtaatcccagcactttgggaggcagaggtaggcggatcatgaggtcaggagtttgagasaagcctggtcaacatggtaaaaccccgtctctactaaaaatacaaaaattagctgggcatggtggtgggcgcctgtaatcacagctactgggcaggctga

SEQ ID NO: 31637 - DNA, 201 bp, Homo sapiens
gcgcggtggctcatgcctgtaatcccagcactttgggaggcagaggtaggcggatcatgaggtcaggagtttgagacaagcctggtcaacatggtaaaacyccgtctctactaaaaatacaaaaattagctgggcatggtggtgggcgcctgtaatcacagctactgggcaggctgaggcaggagaatcgctcaaactcgg

SEQ ID NO: 31638 - DNA, 201 bp, Homo sapiens
attgtgattctgttggccagctggctggagttgccgtatatggggaagaacgcagttccccaagtcctggtcagccctttcatagacatttgcaggaccarttgaagactttcaaatgctctggaatccaggctaacaagcaggcacagctgtttccagcagggaattaattacagccaagaaccaacctcccagccagct

SEQ ID NO: 31639 - DNA, 201 bp, Homo sapiens
cacagtgctcccacgaggccccgctgggtgttctgggcggggtgtcgggacccctgcatctagccccacttcttcagctcctggtatcagtgtgggcaaakcatgccccatgggcctcggtttcctaaattgggaatcgtggtacttattgtactgtgagaatgtgagttgaaattgcccggagtgctgggggagacagag

SEQ ID NO: 31640 - DNA, 201 bp, Homo sapiens
taggcagtttgctgacgtcctgttttttccccagagtgactgaccaggaggcacagggctcaacgtgacgtgggccccggggccggagcccagactccctrctgggcatcctttatctcagttctggattcgtgggggagcagcgggaacagtacggccttcttccctgcctaggggtcttgatctggaacctttgagagt

SEQ ID NO: 31641 - DNA, 201 bp, Homo sapiens
tttgctgacgtcctgttttttccccagagtgactgaccaggaggcacagggctcaacgtgacgtgggccccggggccggagcccagactccctgctgggcrtcctttatctcagttctggattcgtgggggagcagcgggaacagtacggccttcttccctgcctaggggtcttgatctggaacctttgagagtctatgta

SEQ ID NO: 31642 - DNA, 201 bp, Homo sapiens
tactaggatttgcagggtgactgggaattagcatgagaaggaacgggaaggggatggcaggcacagagaacagcttgatcagaagcctggaggccggctgwgtaaggtcaggaaactgagaaaatcacgtgtggctaaagctgacagtgatgaaaagtaagctgggagagtgtggtggtgcctcgtcacccaggcactgag

SEQ ID NO: 31643 - DNA, 201 bp, Homo sapiens
gggaaggggatggcaggcacagagaacagcttgatcagaagcctggaggccggctgagtaaggtcaggaaactgagaaaatcacgtgtggctaaagctgasagtgatgaaaagtaagctgggagagtgtggtggtgcctcgtcacccaggcactgagggtttggaggaactagagggtctgaagccgggaggggtggtgag

SEQ ID NO: 31644 - DNA, 201 bp, Homo sapiens
taatcccagctactcgggaggctgaggcaggagaatagcatgaacccaggagacggagcttgcagtgagctgagatcgcaccactgcactccacgctgggygacagagcgagactccgtctcagaaaaaaaaaaaagactcagaaaaaggcagccatttctccatgcccacgtgtgtgcgtgtgtgcgggggcttctgaga

SEQ ID NO: 31645 - DNA, 201 bp, Homo sapiens
taggcaggagaatcgcttgaacccaggaggcggaggttgcaatgagccgagatcgtgccattgcactccagcctgggcgacaatagcaagactccatctcaaaaaaaaaaaaaaaaaaaaaggatgaagaggaagccaggagacaggctgaggacagagcacttcaatcaggcaaggggaggattttgtacacatgtgcac

SEQ ID NO: 31646 - DNA, 201 bp, Homo sapiens
accccatctctactaaaaatacaaaaaattagctgggcatggtgatgggcacctgttttcccagctactcaggaggctgaggcaggagaatcgcttgaacrcgggaggcggaggttgcagtgagacgaaagttgtgccactgcattccagcctgggcgacagagtgagactctgtctaaaaaaaaaagaaaaaagaaaaag

SEQ ID NO: 31647 - DNA, 201 bp, Homo sapiens
gtttaacgtcaggtttcagttctgtggcgagcacactctaagcagttgtgaggattttgccccacttcctgcagttatttcacctctttttcttttgtgtgtgtgtgtgtgtgtgtttgtttgagacggagtcttgctctatcaccaggctggagtgcagtggtgcgatctcggctcactgcaacctccgcctcccaggtt

SEQ ID NO: 31648 - DNA, 201 bp, Homo sapiens
acttcctgcagttatttcacctctttttcttttgtgtgtgtgtgtgtgtgtgtttgtttgagacggagtcttgctctatcaccaggctggagtgcagtggygcgatctcggctcactgcaacctccgcctcccaggttcaagcgagtctcctgcctcagcctcccaagcagctaggactacaggcatgcgccaccacgccc

SEQ ID NO: 31649 - DNA, 201 bp, Homo sapiens
tcctgcagttatttcacctctttttcttttgtgtgtgtgtgtgtgtgtgtttgtttgagacggagtcttgctctatcaccaggctggagtgcagtggtgcratctcggctcactgcaacctccgcctcccaggttcaagcgagtctcctgcctcagcctcccaagcagctaggactacaggcatgcgccaccacgcccagc

SEQ ID NO: 31650 - DNA, 201 bp, Homo sapiens
gtgtgtgtttgtttgagacggagtcttgctctatcaccaggctggagtgcagtggtgcgatctcggctcactgcaacctccgcctcccaggttcaagcgaktctcctgcctcagcctcccaagcagctaggactacaggcatgcgccaccacgcccagctaatttttgtatttttagtagagatagggtttcactgtgttg

SEQ ID NO: 31651 - DNA, 201 bp, Homo sapiens
tgcgatctcggctcactgcaacctccgcctcccaggttcaagcgagtctcctgcctcagcctcccaagcagctaggactacaggcatgcgccaccacgccyagctaatttttgtatttttagtagagatagggtttcactgtgttggctgggctggtcttgaactcctgacctcaggtgatccacccatgtcggcctccca

SEQ ID NO: 31652 - DNA, 201 bp, Homo sapiens
ctcggctcactgcaacctccgcctcccaggttcaagcgagtctcctgcctcagcctcccaagcagctaggactacaggcatgcgccaccacgcccagctamtttttgtatttttagtagagatagggtttcactgtgttggctgggctggtcttgaactcctgacctcaggtgatccacccatgtcggcctcccaaaatgc

SEQ ID NO: 31653 - DNA, 201 bp, Homo sapiens
ccctggcctcgtggccacttttttctcctccttcaactgcacacccccatttagacaaatgagtaaaacagtatctgtctgaaaagagaaaactctgagtwataaagagtgattttatatatatttctttggtacctccctattctcaaggcccagaacttaatactgttatgttcggttacctgtgagttcaatagggcc

SEQ ID NO: 31654 - DNA, 201 bp, Homo sapiens
gagaggcccactcctagggatgctaagattgactagtgggctcaggtggtgtcagcctaattgtaaagttagtctatcagactctcatttagaagctttacctgttgatgatcctggcctgaattaattattgtatttcattagggctcacaaaatagtttggttctattattcttcctacatttattagtaataatttat

SEQ ID NO: 31655 - DNA, 201 bp, Homo sapiens
tctaccaaaaatacaaaattgatctgggtgtggtggcacatgcctgcaatcccagctacaggggaggttgaggcaggagaatcgcttgaacctgggaggckgaggttgcagtgagccgagattgcaccactgcactccagcctgggtgacagagcgagactccatctcaaaaaacaaaaaacaaaaaaaaagaaggaaaga

SEQ ID NO: 31656 - DNA, 201 bp, Homo sapiens
gaatgctgggatgcatcacaggtatgctggaagatgtatagaattttacttctgttattctggtaactcagagtcctgttcagtcagtttccacgtcaggwtgctgtcctggttttaaagagaatgaacgcagccgaagttgaatcgaggcagtgatttcactcagtgcgttgggtctttccactcacctggccctccaga

SEQ ID NO: 31657 - DNA, 201 bp, Homo sapiens
tagatttgtccccggtcatcttaggctatttgggctaggacagtatccattatatgaatgaagcaatctcctaggccgggcaccgtggctcacggctgtamtcccatcactttgggaggctgaagtgggtggatcacttgaggtcaggagttcgagaccagcctggctaacatggtgaaaccctgtttctattaaaaatac

SEQ ID NO: 31658 - DNA, 201 bp, Homo sapiens
tgacaggcagaaaaattagtgaatgtttgctgaattgctgtgaggaaaccacgtttttgttttgttttgtttggctctttaagagaatgtcatctgctctkttaacagcctccctctccaaacattcagtgtgatgaccctcagccggttgcttctgtcctgatcatgaactgcaggattggtcaccccgtcctcaagagg

SEQ ID NO: 31659 - DNA, 201 bp, Homo sapiens
attcagtgtgatgaccctcagccggttgcttctgtcctgatcatgaactgcaggattggtcaccccgtcctcaagaggtcatctgtgagtcggtttggacygattcgctcttctcaccaccctgcagttggcgtcttctgcatcttggtctcatctcaatctctcggttccagctttgcgcttcgcttgactgcagtgtgt

SEQ ID NO: 31660 - DNA, 201 bp, Homo sapiens
tcacacacaaagtaaaactgtggtacagcctggtggaatgagccctggagttctggttctcgttcactcagctttggaatagcttgggatagctatgttayctgcaagacctctgtgttggggggtaaggtggggaacgctgctgggaagagttctcaaagggaggtgattctgcccaccagaggctgtgcctgttttgat

SEQ ID NO: 31661 - DNA, 201 bp, Homo sapiens
tgagacggtccctaggcctcagattaggcaacgctgttaatattctgatgacactgaggtctcacgcctgagctctaagatgtgtgtccagctgacatgtyagcatctctgctttgttatcctatatgcacctcttgtcatgtccccgattgaacgcatcttcttccacccttgggtcttcctcccatgttacctccctca

SEQ ID NO: 31662 - DNA, 201 bp, Homo sapiens
ttgtttgaaatacttagagtgtttaaggggcttagcaaatacatagaggaggagtgccaagaggacggagcaccacttgttctgttcatgacaggccggtytgaacattctgataggagggatccagagagagaagtggcagtggtatagatgctgcagacctctgacacatcagtcacaattttcttcttgtggaaactg

SEQ ID NO: 31663 - DNA, 201 bp, Homo sapiens
tcccttcccatgcccccagcagggaggagttactattaagtttcttatgtgcacattttaaatttgtatgtttccccctcttacttactgatacttttatytctatagcatggattccccaaaattcctttctttaaatccaatatcctaagcaaagtgttaagtagttcctgacaataagcccctgacttacagtgactc

SEQ ID NO: 31664 - DNA, 201 bp, Homo sapiens
acattttaaatttgtatgtttccccctcttacttactgatacttttatttctatagcatggattccccaaaattcctttctttaaatccaatatcctaagyaaagtgttaagtagttcctgacaataagcccctgacttacagtgactctatgagtataaacaaactgtatccaaatgcatttcagccacaagaaagggaa

SEQ ID NO: 31665 - DNA, 201 bp, Homo sapiens
ctggggcgatggcctggcttctttggtccttgtactctgccgtgtgggggacgcattccttcatggccagcacaaagttgccacatctccaaatgctgtaytttcacatggcaggatacaaaacaggaagcaagaagtcagtagcaaaaggatgttggatttttcttcatgtgccttcccttttcagggatgaaacagttt

SEQ ID NO: 31666 - DNA, 201 bp, Homo sapiens
tacaaaattgatctgggtgtggtggcacatgcctgcaatcccagctacaggggaggttgaggcaggagaatcgcttgaacctgggaggcagaggttgcagygagccgagattgcaccactgcactccagcctgggtgacagagcgagactccatctcaaaaaacaaaaaacaaaaaaaaagaaggaaagagagagagggaa

SEQ ID NO: 31667 - DNA, 201 bp, Homo sapiens
attgatctgggtgtggtggcacatgcctgcaatcccagctacaggggaggttgaggcaggagaatcgcttgaacctgggaggcagaggttgcagtgagccragattgcaccactgcactccagcctgggtgacagagcgagactccatctcaaaaaacaaaaaacaaaaaaaaagaaggaaagagagagagggaagggagg

SEQ ID NO: 31668 - DNA, 201 bp, Homo sapiens
gtggtggcacatgcctgcaatcccagctacaggggaggttgaggcaggagaatcgcttgaacctgggaggcagaggttgcagtgagccgagattgcaccaytgcactccagcctgggtgacagagcgagactccatctcaaaaaacaaaaaacaaaaaaaaagaaggaaagagagagagggaagggagggagggagggagg

SEQ ID NO: 31669 - DNA, 201 bp, Homo sapiens
ggcacatgcctgcaatcccagctacaggggaggttgaggcaggagaatcgcttgaacctgggaggcagaggttgcagtgagccgagattgcaccactgcaytccagcctgggtgacagagcgagactccatctcaaaaaacaaaaaacaaaaaaaaagaaggaaagagagagagggaagggagggagggagggagggggga

SEQ ID NO: 31670 - DNA, 201 bp, Homo sapiens
catcagattaaagaaattcacagccgggcatggtggctcatgcctgtaatcccagcactttgggaggctgaggtgggcggatcacctgaggtcaggagttyaagaccagcctggccaacatggggaaaccctgtctctaataaaaatacaaaacttagccgggtgtggtggcacatgcctgtaatcccagctacttgggag

SEQ ID NO: 31671 - DNA, 201 bp, Homo sapiens
tttgggaggctgaggtgggcggatcacctgaggtcaggagttcaagaccagcctggccaacatggggaaaccctgtctctaataaaaatacaaaacttagscgggtgtggtggcacatgcctgtaatcccagctacttgggaggctgaggcaggagaatcgcttgaaccagggaggcggaggttgtagtgagccgagatca

SEQ ID NO: 31672 - DNA, 201 bp, Homo sapiens
gtcaccaggctggagtgcagtggcgcaatcttggctgactgcaacctccgcctcccgggttcaagtgatcctcctgcctcagcctcccgagtagctgggaytacaggtgtgcgccaccacgcccagctaatttttgcatttttagtagagatggagtttcaccatgttggccaggatagtctcaatctcttgacctcgtga

SEQ ID NO: 31673 - DNA, 201 bp, Homo sapiens
aaggaatttgttcatttcacccagattgtcaagtttactggcataaggttggatataacatcctcttacttttttttttttttttttttgagatggagtcyctctctgtcacccaggctggagtgcagtggcgcgatctcggctcactgcaagctccgcctcccgggttcacgccattctcctgcctcagcctcccgagta

SEQ ID NO: 31674 - DNA, 201 bp, Homo sapiens
cgcgatctcggctcactgcaagctccgcctcccgggttcacgccattctcctgcctcagcctcccgagtagctgggactacaggcgcccgccaccacgccyggctaattttttgtattttcagtagagacggggtttcaccgtgttagccaggacggtctcgatctcctggcctcgtgatccgcccgcctcggcctcccaa

SEQ ID NO: 31675 - DNA, 201 bp, Homo sapiens
atggcacgatctcggctcactgcaacctccacctccctggttcaagtgattctcctgtctcagcctcccaagtggttgggattacaggtggctgtcagcaygcctgcctgatttttgtgtttttagtagagatggggcttcaccatgttggccagggtggttttgaactcctgacctcaagtgatccgcctgcctcggcct

SEQ ID NO: 31676 - DNA, 201 bp, Homo sapiens
tatttatttattttttgagacgagtctcgctctgtcgcccaggctggagtgctgtggcgtgatctcggctcactgcaacctctgcctccaggttcaagcarttctctgcctcagcctcccgagtagctgggattacaggcgcccgccaccacgcccagctaatttttgtagttttagtagagatggggtttcaccatcttg

SEQ ID NO: 31677 - DNA, 201 bp, Homo sapiens
agtcactaaaccaaaaaaaggagtgttgccaagaagttgtatagcttttcaagagtgtttatggcaaaagtcgttaattgaacagtaattgaacaggtaartctgtaaactggacttcaccttgcttttttcccatgtaaatgtagattagagatgggagcagtggctcacacctgtaatcccagcacgttgaacggctga

SEQ ID NO: 31678 - DNA, 201 bp, Homo sapiens
aaatccagatggacaaaaggttcgaacataagaaattaaagaagagaccgggccttggctcacgcctgtaatcccagcactttgggaggctgaggcgggcrgatcacctgaggtcaggagttcaagaccatcctggccaacgtggtgaaaccccgtctctactaaaatacaatattagccgggcatgatggcgggtgcctg

SEQ ID NO: 31679 - DNA, 201 bp, Homo sapiens
catgggggctcacacccgtaatcccagcactttgggaggctgaggccggcagatcacttgaggtcaggagttcgagaccagcctggccaacatggtgaaamcccatctctactaaagataccaaaaaaaaaaaaatttagctgggcatggtggcaggtgcctgtaattccagctactcaggaggctgaggcaggagaatca

SEQ ID NO: 31680 - DNA, 201 bp, Homo sapiens
aaaaaggagtgttgccaagaagttgtatagcttttcaagagtgtttatggcaaaagtcgttaattgaacagtaattgaacaggtaagtctgtaaactggamttcaccttgcttttttcccatgtaaatgtagattagagatgggagcagtggctcacacctgtaatcccagcacgttgaacggctgaatcacctgaggtca

SEQ ID NO: 31681 - DNA, 201 bp, Homo sapiens
tgtatagcttttcaagagtgtttatggcaaaagtcgttaattgaacagtaattgaacaggtaagtctgtaaactggacttcaccttgcttttttcccatgyaaatgtagattagagatgggagcagtggctcacacctgtaatcccagcacgttgaacggctgaatcacctgaggtcaggagttcgagaccagcctggcca

SEQ ID NO: 31682 - DNA, 201 bp, Homo sapiens
ttcattgtagtgttttgtatttttccttttaattcagtcaatttttgcttttatattttgaaatgatgttattggataaatacagatttaaaattgtcacrtcttcttagtgaatcaaaaacaacatatttgtgtgcatatatctccttcccttccttatacagaagctagtgtcgtttatacacttgtccttcatgtagt

SEQ ID NO: 31683 - DNA, 201 bp, Homo sapiens
gactacagccttgactgtctgtctctgatggggctcagttagagccagaggttagagagtggcagctcctccaggaaaggagtcttgctcggtgggtcagrgccccaggcttgttgggaagggcggctgaggcttcgtgttgccagttctgtcagccagggcctttggactccagggctctgccattctgttcctcctcca

SEQ ID NO: 31684 - DNA, 201 bp, Homo sapiens
gtagtgttttgtatttttccttttaattcagtcaatttttgcttttatattttgaaatgatgttattggataaatacagatttaaaattgtcacgtcttcytagtgaatcaaaaacaacatatttgtgtgcatatatctccttcccttccttatacagaagctagtgtcgtttatacacttgtccttcatgtagtgatttt

SEQ ID NO: 31685 - DNA, 201 bp, Homo sapiens
ttgcttttttcccatgtaaatgtagattagagatgggagcagtggctcacacctgtaatcccagcacgttgaacggctgaatcacctgaggtcaggagttygagaccagcctggccaacacggtgaaaacctatctctactaaaaatacaaaaattagctgggggtggtggtgtgtacctgtaatcccggctacttgggag

SEQ ID NO: 31686 - DNA, 201 bp, Homo sapiens
ggcggatcatctgaagtcgggagttcgagaccagcttaaccaaaatggagaaactccgtctctactgaaaatacaaaaattggccgggtgcagtggctcaygcctgtaatcccagcactttgggaggccgaggtgggcggatcagctgaggtcaggagttcgaaactagcctgaccaacatggagaaaccccatctctact

SEQ ID NO: 31687 - DNA, 201 bp, Homo sapiens
ggcggatcagctgaggtcaggagttcgaaactagcctgaccaacatggagaaaccccatctctactaaaaatacaaaattaggccaggcgcggtggctcaygcctgtaatcccagcactttgggaggccgaggtgggcggatcacgaggtcaggagatcgagaccaacctggcttaacacggtgaaaccccctctctacta

SEQ ID NO: 31688 - DNA, 201 bp, Homo sapiens
cacgaggtcaggagatcgagaccaacctggcttaacacggtgaaaccccctctctactaaaaatacaaaaaattagccgggcaggcgcctgtagtcacagstactcaggaggctgaggcaggagaatggtgtgaacctgggaggcaaagcttgcagtgagctgagatctcgcctctgcgctccagcctgggtgacagagtg

SEQ ID NO: 31689 - DNA, 201 bp, Homo sapiens
tgactccatttccaaaaaaaaaaaaaaaacaaataaacaaacaaacaaaaaaaccaaaaattagccgggcatggtggcacatgcctgtaatcccagctacwcgggaggctgaggcaggagaatcgcttgaacctgggaggcagaggttgcggtgagccgagatcgtgccactgcactccagcctgggcaacaagagcgaaa

SEQ ID NO: 31690 - DNA, 201 bp, Homo sapiens
aaaaaaaaaaaacaaataaacaaacaaacaaaaaaaccaaaaattagccgggcatggtggcacatgcctgtaatcccagctactcgggaggctgaggcagragaatcgcttgaacctgggaggcagaggttgcggtgagccgagatcgtgccactgcactccagcctgggcaacaagagcgaaactccatcttaaaaaaat

SEQ ID NO: 31691 - DNA, 201 bp, Homo sapiens
aacaaataaacaaacaaacaaaaaaaccaaaaattagccgggcatggtggcacatgcctgtaatcccagctactcgggaggctgaggcaggagaatcgctrgaacctgggaggcagaggttgcggtgagccgagatcgtgccactgcactccagcctgggcaacaagagcgaaactccatcttaaaaaaataataataatt

SEQ ID NO: 31692 - DNA, 201 bp, Homo sapiens
aggttttggggcagatgatggtgccagcttcggcagtgtgtatatctacaatggacactgggacggcctctccgccagcccctcgcaggtgacccatgggrccctctccttcctctcctctggggctctgacctctctcagatatgatgacccaagccccaagtcggcttcagtcctaagtgctgggcaggtctcgggggt

SEQ ID NO: 31693 - DNA, 201 bp, Homo sapiens
cttacgatgctctgtgtccgaagtgttaaaaagatttcagactttccgcacggaaaggaattgtgttcactagacctcgcttttccagcatgtggaagaakggcattcagtgagctgtgtcatcgcttcagataaagaaaatgtcaccgtggctgcagagatctcctgggatcactctgaggaggtgtttgagactgaaat

SEQ ID NO: 31694 - DNA, 201 bp, Homo sapiens
cacccccatttagacaaatgagtaaaacagtatctgtctgaaaagagaaaactctgagtaataaagagtgattttatatatatttctttggtacctccctrttctcaaggcccagaacttaatactgttatgttcggttacctgtgagttcaatagggcctggaaggtcaaccctaggccagcatttataacttacttgga

SEQ ID NO: 31695 - DNA, 201 bp, Homo sapiens
ggtcaccagccccagaaccaagaggacaccagggcccctccatcgatgttcccttgtccaggatgaaatcctttgccatcctgtaggtaagtcagccccamctccagggaatgctccccaggaccccctttctagcaaaatccccctcatctaaactcaaaccattccaaccccagccctgcctcatccagcccgttcacc

SEQ ID NO: 31696 - DNA, 201 bp, Homo sapiens
tgaggcaggagtatcgtttgagcccaggaatttgaagcttcagtgagctatgattgagccactccattccggcccgggtaacagagtgagaccttgtctcaaaaaaaaaaaaaaaaaaaaaaaaaaaggaaaaatctcttacgttaaataaaatgaataagctgggtgtggtggctcatgcctgtaatctcagcactgtgg

SEQ ID NO: 31697 - DNA, 201 bp, Homo sapiens
aaaaaaggaaaaatctcttacgttaaataaaatgaataagctgggtgtggtggctcatgcctgtaatctcagcactgtgggaggctaaggtgggtggattrcttgagcccaggagtttgagaccagcctgggcaacatggtaaaaccccatctctacaaaaaatacaaaaattagcccagtgtggtggggtgcacctgtgg

SEQ ID NO: 31698 - DNA, 201 bp, Homo sapiens
gccgggcatggtggcacatgcctgtaatcccagctactcgggaggctgaggcaggagaatcgcttgaacctgggaggcagaggttgcggtgagccgagatsgtgccactgcactccagcctgggcaacaagagcgaaactccatcttaaaaaaataataataattttggaacaagatgatgatatactcttaaaacaagga

SEQ ID NO: 31699 - DNA, 201 bp, Homo sapiens
agaacttaatactgttatgttcggttacctgtgagttcaatagggcctggaaggtcaaccctaggccagcatttataacttacttggaagaggccttaacrgtaaggccttaaaacagatgtgactgttgttcccctgttgaaatcttttccttgccttcccgtcttaatgtgcaaactcttctactgctatttaagatcc

SEQ ID NO: 31700 - DNA, 201 bp, Homo sapiens
aggagaatcgcttgaacctgggaggcagaggttgcggtgagccgagatcgtgccactgcactccagcctgggcaacaagagcgaaactccatcttaaaaaaataataataattttggaacaagatgatgatatactcttaaaacaaggatgaaaatgtcttcacagtcagtccaggcaacactgggggagataaaccttct

SEQ ID NO: 31701 - DNA, 201 bp, Homo sapiens
ggagaatcgcttgaacctgggaggcagaggttgcggtgagccgagatcgtgccactgcactccagcctgggcaacaagagcgaaactccatcttaaaaaaataataataattttggaacaagatgatgatatactcttaaaacaaggatgaaaatgtcttcacagtcagtccaggcaacactgggggagataaaccttctc

SEQ ID NO: 31702 - DNA, 201 bp, Homo sapiens
atatcaggccgggcgcggtggctcacgcgtgtaatcccagcactttgggaggccaaggcgggcggatcacctgaggagttcaataccagcctgggcaatayggtgaaaccccacctctactaaaaatacaaaaattatccaggtgtggtggtgcgtgcctataatcccagctactcaggaggccgaggcaggagaatcgct

SEQ ID NO: 31703 - DNA, 201 bp, Homo sapiens
gagaatcgcttgaacctgggaggcagaggttgcggtgagccgagatcgtgccactgcactccagcctgggcaacaagagcgaaactccatcttaaaaaaataataataattttggaacaagatgatgatatactcttaaaacaaggatgaaaatgtcttcacagtcagtccaggcaacactgggggagataaaccttctcc

SEQ ID NO: 31704 - DNA, 201 bp, Homo sapiens
tcttggctcaccataacttctgcctcccaggttcaagcagttctcctgcctcagcctcccgagtagctgggattacaggcgcctgccaccacgcctggctratttttgtatttttagtagagacagggtctcaccatattggtcaggctggtctcctgccctcaggtgatcgacctgcctcggcctcccaaagtgttggga

SEQ ID NO: 31705 - DNA, 201 bp, Homo sapiens
aatgtgtagggtaccagcaaggaacacgtttttggacagattttaatattttatatttcattttattttattttattttttgagacagagtcttgctctgytgcccaggctggagcccaggctggatcttggctcaccataacttctgcctcccaggttcaagcagttctcctgcctcagcctcccgagtagctgggatta

SEQ ID NO: 31706 - DNA, 201 bp, Homo sapiens
tggactctccaggagagattcagagtaagttaggagaagggagtagtaagtatgagaagcagaggaatataggggctatttaggcaacagccagaatgccrgttttctgaaacagatggctatctttggcctgtaactggacttttccttcctttgtttcagtgtggcttttttaaaagaaaatatcaacaactgaacttg

SEQ ID NO: 31707 - DNA, 201 bp, Homo sapiens
acgtatatctatctacccatccagcaagccatcttatattttgatgcattttaaagtaaattgcacgctggatgtggtggctcacacctgtaatcccagcrctttgggaggccaaggcaggtggatcacttgaggtcaggagttcgaaaccagctcggtcaacattgtgaaaccctgtctctactaaaaatacaaaaaatt

SEQ ID NO: 31708 - DNA, 201 bp, Homo sapiens
atctctgtgctgtgggaaatctctgaagtggcttcttcacctgtaaaaggggaatgaggccgcctgccttgcttactccatatttgtatttgaggcttaamtgaaataacggggccaggcgcggtggctcatgcctgtaatcccagcactttgggagaccgaggtgggtggatcatttgaggtcaggagttcgagaccagc

SEQ ID NO: 31709 - DNA, 201 bp, Homo sapiens
tatctatctacccatccagcaagccatcttatattttgatgcattttaaagtaaattgcacgctggatgtggtggctcacacctgtaatcccagcactttsggaggccaaggcaggtggatcacttgaggtcaggagttcgaaaccagctcggtcaacattgtgaaaccctgtctctactaaaaatacaaaaaattagccg

SEQ ID NO: 31710 - DNA, 201 bp, Homo sapiens
gaaagtgccggtctgtgggtccttgctggtgtgtgtgcttctgtccccgcctcctggcctcctggctgaggggaagctgagtgggccacggcccatgtgtygcactcgcctcggctcccacacagccgcctctgctccagcaaggatgtggctcttccacactctgctctgcatagccagtaagtcctctcacccgctgct

SEQ ID NO: 31711 - DNA, 201 bp, Homo sapiens
tcccagctatgtgggaggctgagacaggagaatcgcttgaacccgggacacagaagttgtagtgagccaagattgcaccactgcactccagcctgggcgasagagcaagaccccatctcaaaaaaaaaaaagaaattaataaaaataaattgctgacttaagtataattcaactctaaacatttcagcatacatatcaaca

SEQ ID NO: 31712 - DNA, 201 bp, Homo sapiens
caccttggtaattcaaacacctatcaagatatagaatattttcatcattccagaaagttccttctagtcccttcccagttagtcccatcctctcaagcatttttttttttttactataggttagttttgctggttctagaacctcatataaatggagttatacaatatgatttttattgccttagcttaacaaatctgctg

SEQ ID NO: 31713 - DNA, 201 bp, Homo sapiens
cagcagtgcttacagtggctaagctggctctgaaagtagggggtgatggggacgagagctttccagtacacagccctaggtgaactgcctgctcacctccrtgaagcagagtgaagttgtgggtagtatggagggcgtgtcagacaaaaagtttttttgtttgtttgtttttgagatggagtttcattctgtcacccaggc

SEQ ID NO: 31714 - DNA, 201 bp, Homo sapiens
aggggccacaaggaacctcaggcaggctgggggccttctgtctgcggctggctcatccccacctcatcgggaaggtctggtcttcattcccaggcctccgygaggcacttctcaacttcacgctggatgtggatgtggggaagcagaggagacggctgcagtgttcagacgtaagaagctgtctgggctgcctgagggagt

SEQ ID NO: 31715 - DNA, 201 bp, Homo sapiens
ggacttcaccttgcttttttcccatgtaaatgtagattagagatgggagcagtggctcacacctgtaatcccagcacgttgaacggctgaatcacctgagrtcaggagttcgagaccagcctggccaacacggtgaaaacctatctctactaaaaatacaaaaattagctgggggtggtggtgtgtacctgtaatcccggc

SEQ ID NO: 31716 - DNA, 201 bp, Homo sapiens
cctcaggtgatctgcccgccttgacctcccaaagtgctgggattacaggcatgagccaccatgtccggctaagtagtgtatttctaatacagaaaatagarggaaatggaaaatacagaaaacggaagaaatagaagtgccccattattgcactgcccagattttaacaaataaaaataatagcaagaaaatccaagccat

SEQ ID NO: 31717 - DNA, 201 bp, Homo sapiens
tgcccagctcgtcgccgtccctgggctggccgcacacgctgaggtccgggctgaggcggccggagtcgcggctggggaagggcggaagtcggagcgggccrcagggtgtgctgcacttctgcgggggccgagctcgcagccccaggcgtcttggggtcacggttaggcttgggcgagctcgcagcttccagcgctttgggg

SEQ ID NO: 31718 - DNA, 201 bp, Homo sapiens
gagactgaaatgctccagatttgattatccagttgctcacgggcatcgcccctagaagagataatagcatctttgcataacatgtccatgtccaaaatagrtcttttggtgcaaaaaaccaaccctctgtcccaacccgttccttagctaccctcaggagggagatatactccagttacagtacaaggaactcgagggatt

SEQ ID NO: 31719 - DNA, 201 bp, Homo sapiens
tgaggcaggagaattgcttgaccccgggagacagtggttgcagtgaaccgagatcgtgccactgcactccagcctgagtgacagagaaagactccgtctcaaaaaaaaaaaaaaaaaccacaaaccttcaatatatatttcctaaaaacaaaggcattgtcttaacatagtacaataatcaaaatcaggaaattcacattg

SEQ ID NO: 31720 - DNA, 201 bp, Homo sapiens
ggtttggtggaccatcctggtgtccttggctcctcctgtcgcttcctcctgggagcaggggagagatgctcggtccagggagacttctgggaggtggaggycgctcgggacggctgaggctgcaaccagacaggcggaggtgccgatcgagatgacactgtcccttggcgttggggacccggggcagggcgaggccagaga

SEQ ID NO: 31721 - DNA, 201 bp, Homo sapiens
ccaattcctaggctggtggcctccaagggtgaggggtgcctcagtctgagagatggggagcagtggctggactttacagacctgacctgtaccagctccayccactctttcttataagtggggaaactgaggctcagagagtggtagtgatgggaatggctcacacagcacacaaagcctgaccaggttctagctctcttt

SEQ ID NO: 31722 - DNA, 201 bp, Homo sapiens
cgggctctggagaaggaggaggaggaagacaaggaggaggaggaagacgaggaggaggaggaagctggtgagaagaggcagatctgggttgctctgagtcyatcagagccaattcctaggctggtggcctccaagggtgaggggtgcctcagtctgagagatggggagcagtggctggactttacagacctgacctgtacc

SEQ ID NO: 31723 - DNA, 201 bp, Homo sapiens
tggctcaggaagcattgatcccccagactttcagagagccaaagacttcatctccaacatgatgaggaacttctatgaaaagtgttttgaggtgggcttcyctaagagctggttaacacttatctattgctgagaatcaccctacctcagaacaacaatcaccacatttgctcacaattctatgggtcacatacttgggct

SEQ ID NO: 31724 - DNA, 201 bp, Homo sapiens
atacagacacagatactaggaaacagtctgtttcccgaggacaccctgtggctgacaagtatcactgcactgagaaattttattctctaaaatcacagatsagaaaactttgggccgggaacggtggctcacacctgtaatcccagcactttgggaggccgagacgggcggatcacgaggtcaggagatcgagaccatcct

SEQ ID NO: 31725 - DNA, 201 bp, Homo sapiens
gagtgttgggtggcagctgatgctgaagttttcaatggggtggtcacggagggtgacactttggcacacactggaggaggtaggggaacgagctatgtggwtgggtgtctaagggaagagcagctgcaggtaccctgggttggaagcctgcctggtgggtggggggcagggtgaggagctagtggctgcagtggagtgggg

SEQ ID NO: 31726 - DNA, 201 bp, Homo sapiens
cctcagccttctgagtagctgggattacaggaacgtgccaccgcgcccagctaatttttgcgtttttcgtagagacagggtttcatcatgttggccaggcyggtctcgaactcctgacctcaagtgatccagccgcctcggcctcccaaagtgctgggattacaggcatgagccactggcgcgcggccagcataatgattt

SEQ ID NO: 31727 - DNA, 201 bp, Homo sapiens
aggcgaggaggcgggcgcctgtagtcccagctactcaggaggctgaggcaggagaatggcgtgaacccgggaggcggagcttgcagtgaaccgagatggcrccactgcactccagcctgggcgacagagcgagactccgtctcaaaaaaaaaaaaaaaagacaattttaaaataaagcatattaaggctcttttgttcctt

SEQ ID NO: 31728 - DNA, 201 bp, Homo sapiens
actggagagaaccaggcacgatcagagggttgggactttcagccccacacccctcttctgggagagaagggctgaaggtttagttgatcaccagcggccartgattcaatgagtcatgcctatgtaatgaggcctccataaaactcaaaaggacagggtttggggagcttctgggtagcagaacatgtggaagtttctgga

SEQ ID NO: 31729 - DNA, 201 bp, Homo sapiens
gaggctgaggcaggagaatggcgtgaacccgggaggcggagcttgcagtgaaccgagatggcgccactgcactccagcctgggcgacagagcgagactccrtctcaaaaaaaaaaaaaaaagacaattttaaaataaagcatattaaggctcttttgttccttatggaagtaacacatgttcaatatagaacatttggaaa

SEQ ID NO: 31730 - DNA, 201 bp, Homo sapiens
accaggcacgatcagagggttgggactttcagccccacacccctcttctgggagagaagggctgaaggtttagttgatcaccagcggccagtgattcaatsagtcatgcctatgtaatgaggcctccataaaactcaaaaggacagggtttggggagcttctgggtagcagaacatgtggaagtttctggagggtggcccc

SEQ ID NO: 31731 - DNA, 201 bp, Homo sapiens
ctactaaaaatacaaaaattatctgggcgtggtggtacacgcgcgtagtcccagctactcgggaggctgaggcaggagaattgcttgaacctgggaggtgsaggttgcagtgagccaagatcgtgccattgcactacagcctgggcgacagagcaagactccgtctcaaaaaaaaaaaaaaaaaaaaagggcttagcacaa

SEQ ID NO: 31732 - DNA, 201 bp, Homo sapiens
aatacaaaaattatctgggcgtggtggtacacgcgcgtagtcccagctactcgggaggctgaggcaggagaattgcttgaacctgggaggtggaggttgcrgtgagccaagatcgtgccattgcactacagcctgggcgacagagcaagactccgtctcaaaaaaaaaaaaaaaaaaaaagggcttagcacaatttctggc

SEQ ID NO: 31733 - DNA, 201 bp, Homo sapiens
agctactcgggaggctgaggcaggagaattgcttgaacctgggaggtggaggttgcagtgagccaagatcgtgccattgcactacagcctgggcgacagarcaagactccgtctcaaaaaaaaaaaaaaaaaaaaagggcttagcacaatttctggccacattaatgctcaataaacattactttacattttttaaatatc

SEQ ID NO: 31734 - DNA, 201 bp, Homo sapiens
aggcagaggttgcagtgagccgagatcacaccactccactccagcctcagtgatagagtgagactcagtctcaaaaaataaataaataaataaaaaatgarttacctaagtgagaaattgttttttgtatccagtaactgtcttagtgtgctgtatcagtgtttagttatagtattaaacagtactcaggaatgcataaat

SEQ ID NO: 31735 - DNA, 201 bp, Homo sapiens
tctgacacttccactccccgatcccagctctagagaaattctcagacacatataaaaatgtttgtgtgccgggcgcagtggctcacacctgtaatcccagmactttgggaggccgaggccggtggatcacctgaggtcaggaattcgagacctaggctggccaacctggcgaaaccccgtctccactaaagatacaaaaaa

SEQ ID NO: 31736 - DNA, 201 bp, Homo sapiens
aagtgctgggattacaggcatgagccaccatgtccggctaagtagtgtatttctaatacagaaaatagagggaaatggaaaatacagaaaacggaagaaayagaagtgccccattattgcactgcccagattttaacaaataaaaataatagcaagaaaatccaagccatacagagaatggtaccaaatgaaaaataattg

SEQ ID NO: 31737 - DNA, 201 bp, Homo sapiens
tttctttacctattatttatttattggagacagagtcttgctctgtcacccaggctggagtgcagtggtgtaatctcagctcactgcaacctccgcctccygggttcaagtgattctcctgcctcagcctcctgagtagctgggattacaggcgcccgccaccacgcccagctaattttttgtatttttagtagaaacagg

SEQ ID NO: 31738 - DNA, 201 bp, Homo sapiens
ttttcctactagatgatgagcttgatgtaggaagctgtacttgatctccttctgtcttcagcatcataggctatactgagtatttttgcataaataagatkagatccagtacagccgaaattatcatgctttgcaaaataagttaaaaaggttcaactgctcgggagagcagggttcagaggaaggtggagtcagttctga

SEQ ID NO: 31739 - DNA, 201 bp, Homo sapiens
tagaaacagggtttcgccacgttggccaggatggtcttgaactcctgacctcaaatgatctgcccacttcggcctcccaaagtgctgggattacaggcatkagccaccgcacctggccccaaaatgacttctagtgctgtgttgttttaaagccagatctggtcaaggtttatgtattacgtattgctgttatgtctctgt

SEQ ID NO: 31740 - DNA, 201 bp, Homo sapiens
caagtgatcaagtttaatgttttacagtgatccaggtgacatttgtgaggtctcaactgaagaagtagcaatgggggtggaaaagaaagggacagatacargaaataatttaaaaaaaaagaattgtgagtgtggtggctcacatctgtcatcccaacactttgggaggctgaggcgggaggattgcttgaggccaggagt

SEQ ID NO: 31741 - DNA, 201 bp, Homo sapiens
tttccctcattcctttccccatcttctagttactaaaagatgtaactgaactgcagatccttggtgaaatatctttcaacaaatctctatatgagggactkaatgcagagaaccacagaactaaggtaattcctggctggcttctgagtagtgcccaaggaaaattgtgcctaacctttgagcacctccacagacattctg

SEQ ID NO: 31742 - DNA, 201 bp, Homo sapiens
tgggcaggcagagaagtcttgttggctctctggccccacctaagtcctgggaacttcctctggccacaacttggaagggccatacctgggtctcaggaagsacatctcctgaactttctagctgagccctgccagaagagagattagactcccgaaattgggagagcctttggaaaacaaaacctgaggatgacttctaat

SEQ ID NO: 31743 - DNA, 201 bp, Homo sapiens
tccttctgtcttcagcatcataggctatactgagtatttttgcataaataagattagatccagtacagccgaaattatcatgctttgcaaaataagttaawaaggttcaactgctcgggagagcagggttcagaggaaggtggagtcagttctgattgagggatgagcaccagaggtcttgaaggattggactctccagga

SEQ ID NO: 31744 - DNA, 201 bp, Homo sapiens
tccatgacttctactgccctctgcagaaagaccttggacttggttcactgttaaccaccaagcccctcgtcccctccccaccatcccctatgacaaccccyggagctcactgtctgtctcaggacagcccagttctcctgggtaacgtggatggtgagaatgttgaggctgtccctggaatctgccgtctccctggactgg

SEQ ID NO: 31745 - DNA, 201 bp, Homo sapiens
tttgcccagagtatgggtagaacagggagcagggaaaggaggagaaaggaaggaaggagacaggtaatggagggccccagaggccagatggaggggctcasctctctccctgggcctggggaatccacgcagcgctgactcgctgacccaggctgtctgtgcaggtgggagaagaatttaagagtgctaggactgcgaggg

SEQ ID NO: 31746 - DNA, 201 bp, Homo sapiens
gaaaggaggagaaaggaaggaaggagacaggtaatggagggccccagaggccagatggaggggctcagctctctccctgggcctggggaatccacgcagcrctgactcgctgacccaggctgtctgtgcaggtgggagaagaatttaagagtgctaggactgcgagggaactgaacctgatcgcctcagacccggatgaga

SEQ ID NO: 31747 - DNA, 201 bp, Homo sapiens
gggacaccgaggctgcgcattaggctgcacttgaggtttccggatgggggcgggacctggtcagtcacatgggccgaggggcgggtcctggttagggaccstgaggctgagtactacagcctcctgggtaggtacaaggcctgtcaggtacaccaggcacagcagccacccaggggagggcggggcctctccattaataat

SEQ ID NO: 31748 - DNA, 201 bp, Homo sapiens
agagaggccaggtgggagcacacggtgtgttcacagccacaccacccttgccccaggttacgctgtggccgtgctgcacaagacctgcagcctctcctacrtcgcgggggctccacggtacaaacatcatggggccgtgtttgagctccagaaggagggcagagaggccagcttcctgccagtgctggagggagagcaggt

SEQ ID NO: 31749 - DNA, 201 bp, Homo sapiens
agtcatgcctatgtaatgaggcctccataaaactcaaaaggacagggtttggggagcttctgggtagcagaacatgtggaagtttctggagggtggccccygagagggcatggaagctttgcccctcacccccactttgcccctcacccccactttgccttatgcatctcctcatctgtatcctttgtaatatcttttttt

SEQ ID NO: 31750 - DNA, 201 bp, Homo sapiens
ccaggctggagtgtggtggcatgctctcggctcactgcaaccactgggttcaagcgattctcctgcctcagcctccctagtagctgagattacaggcgccygccaccacgcccatctgagttttgtatttttagtagagacggggtttcaccaatgttggccaggctggtctcgaactcctgacctcgtgatccgcccgcc

SEQ ID NO: 31751 - DNA, 201 bp, Homo sapiens
tgcctcagcctccctagtagctgagattacaggcgcctgccaccacgcccatctgagttttgtatttttagtagagacggggtttcaccaatgttggccargctggtctcgaactcctgacctcgtgatccgcccgcctcggcctctcaaagtgctgggattacaggcgtgagccaaggcacctggcctgtaatatccttt

SEQ ID NO: 31752 - DNA, 201 bp, Homo sapiens
cacgcccatctgagttttgtatttttagtagagacggggtttcaccaatgttggccaggctggtctcgaactcctgacctcgtgatccgcccgcctcggcytctcaaagtgctgggattacaggcgtgagccaaggcacctggcctgtaatatcctttataataaaccagtaaatgtcggtaagtgcttctctgagttctc

SEQ ID NO: 31753 - DNA, 201 bp, Homo sapiens
ttattatgcttttgttgctactgtgtgaaaataccgttttttccccctgactgtttagagtttgcacttagaacagttggtggttttgaatgtttatcttmtctggccattttactgaactgtggttttgtttttttggagacggagtctcactctgtcgcccacgctggagtgcagtggtgtgatctctgctcactgcaa

SEQ ID NO: 31754 - DNA, 201 bp, Homo sapiens
ggccgtgctgcacaagacctgcagcctctcctacgtcgcgggggctccacggtacaaacatcatggggccgtgtttgagctccagaaggagggcagagagkccagcttcctgccagtgctggagggagagcaggtacctgctggggaaagcctccaccccttatgaccgatggggaatctggaggcccccaagggaaagga

SEQ ID NO: 31755 - DNA, 201 bp, Homo sapiens
ccgtctccactaaaaatataaaaattagccgggtgtggtggtgggcgcttgtaatcccagctacttaggagaggcaggagaatcgcttgaacccgggaggyggaggttacagtgagccaagaccgcagcattgcactccagcctgggcaacaagaatgaaactctgtctctccaaaaaaaaaaaaaaaaagaagagaaaaa

SEQ ID NO: 31756 - DNA, 201 bp, Homo sapiens
ctgggcatgggggctcacacccgtaatcccagcactttgggaggctgaggccggcagatcacttgaggtcaggagttcgagaccagcctggccaacatggkgaaaacccatctctactaaagataccaaaaaaaaaaaaatttagctgggcatggtggcaggtgcctgtaattccagctactcaggaggctgaggcaggag

SEQ ID NO: 31757 - DNA, 201 bp, Homo sapiens
caacatggtgaaaacccatctctactaaagataccaaaaaaaaaaaaatttagctgggcatggtggcaggtgcctgtaattccagctactcaggaggctgyggcaggagaatcacttgaacccaggaggcagaggttgcagtgagccaagatcatgccattgcactccagcctgggcgacagagtgagactccatctcaaa

SEQ ID NO: 31758 - DNA, 201 bp, Homo sapiens
ttaaaaaaatagagacaggggtcttgctatgttgaccaggctagatatgaactcttgggctcaagcgatcctcctgcctcagcctcccgagtagctgggaytacaggcgcacgccactgcgcccggctagtttacttctttcagaacatttgttatcagcaaatttaaacatttcaacaaatatttcagtttccatttgga

SEQ ID NO: 31759 - DNA, 201 bp, Homo sapiens
gctgaagtgttttaaagccttggtactcagaatgtggtctgaagacctgcagtgtgggtgtcccttagaatcttgttggaaatgtagtcttgggcccttasatccttcctagagtgtcacaccaagaaggacatgcctgagaggcccactcctagggatgctaagattgactagtgggctcaggtggtgtcagcctaattg

SEQ ID NO: 31760 - DNA, 201 bp, Homo sapiens
ctgcttttctgtggtgaccccctcactggcacccctgcctccagcctcctcctggtccaaccaacagatggttaataactagataaatccccgccagtccrgctccatgcctcccgaggcaccatattctgctgcagtaccaccctccctatgtgcggccctttcttcaccagggttctgagagagaagtgagtctaatgc

SEQ ID NO: 31761 - DNA, 201 bp, Homo sapiens
aataaatttgaatttgttggactgtagatttgtccccggtcatcttaggctatttgggctaggacagtatccattatatgaatgaagcaatctcctaggcygggcaccgtggctcacggctgtaatcccatcactttgggaggctgaagtgggtggatcacttgaggtcaggagttcgagaccagcctggctaacatggtg

SEQ ID NO: 31762 - DNA, 201 bp, Homo sapiens
aacctgcagttgaagaggatgcaaaaggtgactgtgacggtggctgtggaaacaggtccctcacgcccctccctcgctgcatgcctgcttttctgtggtgrccccctcactggcacccctgcctccagcctcctcctggtccaaccaacagatggttaataactagataaatccccgccagtccagctccatgcctcccga

SEQ ID NO: 31763 - DNA, 201 bp, Homo sapiens
gtgggtagtatggagggcgtgtcagacaaaaagtttttttgtttgtttgtttttgagatggagtttcattctgtcacccaggctggagtgcagtggcacartctcagctcactgcaacctccgcctcccgggttcaagtgattctccttcctcagcctcctgagtagctgggattacaggcgtgcagcactacacccggct

SEQ ID NO: 31764 - DNA, 201 bp, Homo sapiens
ctgtaaaagagcgattttattttaattaattaatttatttatttattttgagacggagtcttgctctgtcgcccagtctggagtgcagcggtgcaatctckgctcactgcaacaaaagggtggccatattgatgacaggaggtcgcttttttctgtgtgctcaaacatccagttgttcccctgaatacagaccaggcaaca

SEQ ID NO: 31765 - DNA, 201 bp, Homo sapiens
atggtggtaaacacctgtagtcccagctactcgggaggctgaggtgggaggatcacttgaacccaggaagtggaggctgcggtgagccgtgatcattgcaycacagcaccacgctctagcctcggtgaatgtcctattgtattgcgttgaggtttttacagatgaaataaactgtaacatttttatctgtaccctgtgcag

SEQ ID NO: 31766 - DNA, 201 bp, Homo sapiens
agggcgtgtcagacaaaaagtttttttgtttgtttgtttttgagatggagtttcattctgtcacccaggctggagtgcagtggcacagtctcagctcactrcaacctccgcctcccgggttcaagtgattctccttcctcagcctcctgagtagctgggattacaggcgtgcagcactacacccggctaatttttaaaata

SEQ ID NO: 31767 - DNA, 201 bp, Homo sapiens
atctgtgtgatggggatgtgtgtgactggcaaagtgagagtgctcgctgatgccgatttttaacatagtgagaaagacagtctctcctattttgccccccwccccaggccactttgaaggcctgactgggaaggtgccggggccaagagagaggccaggtgggagcacacggtgtgttcacagccacaccacccttgcccc

SEQ ID NO: 31768 - DNA, 201 bp, Homo sapiens
aaacataagaaaatttgccaggtgtgatggcacgcatctgtggtcccagttacttgggagactgaggtgggaggatcgcttgagcctgggaggtcaaggcygcagtgaaccgtgatcatgccactgtacttcaacttaggtgacagaaggagactctgtcttaaaaaaaaaattacatgagtaaattaaaaaccaaataag

SEQ ID NO: 31769 - DNA, 201 bp, Homo sapiens
agcactttgggaggccatacttcctagatctgcacatctcatctttggacatttcagatggaaaacagttttctcggtattgctaatatgtttttctgtcdatctcagctactgagagtggttctgcactctgggtccctgtgatacctcagcattctggaggaccctttcacacatccccaggaccctcttttccaggac

SEQ ID NO: 31770 - DNA, 201 bp, Homo sapiens
tcagacaaaaagtttttttgtttgtttgtttttgagatggagtttcattctgtcacccaggctggagtgcagtggcacagtctcagctcactgcaacctcygcctcccgggttcaagtgattctccttcctcagcctcctgagtagctgggattacaggcgtgcagcactacacccggctaatttttaaaatatttttggt

SEQ ID NO: 31771 - DNA, 201 bp, Homo sapiens
catgtctgattgctaggcagtttcctccgctgtggggcctgggctgctcctccactcttctgttactctcagtgagcaaattgatatgtaacgacccaaaytgggtggtccaggaagcacgcgggcaggggtgtagccttgctgaggggtgcaggagcggggctcctggtgagctgagttcctcccgggctgtagatgggg

SEQ ID NO: 31772 - DNA, 201 bp, Homo sapiens
acaaatgtagtggcttacaacaacacaggtttattattattattattattattattattattattttgcactctttcacccaggctggagtgcagtggtgmgatctcagctcactgcaacttccacctcccaggttcaagtgattctcctgcctcagcctcccgagtagctgggattacaggctttcaccactatgcccag

SEQ ID NO: 31773 - DNA, 201 bp, Homo sapiens
aaatctctgaagtggcttcttcacctgtaaaaggggaatgaggccgcctgccttgcttactccatatttgtatttgaggcttaactgaaataacggggccrggcgcggtggctcatgcctgtaatcccagcactttgggagaccgaggtgggtggatcatttgaggtcaggagttcgagaccagcctggccaacatggtga

SEQ ID NO: 31774 - DNA, 201 bp, Homo sapiens
tattattattattattattattattattttgcactctttcacccaggctggagtgcagtggtgagatctcagctcactgcaacttccacctcccaggttcragtgattctcctgcctcagcctcccgagtagctgggattacaggctttcaccactatgcccagctaatgtttgtatttttagtagagacggggtttcacc

SEQ ID NO: 31775 - DNA, 201 bp, Homo sapiens
ggaggctgagaagcccttttaaaatcagtattcttctaagtgtggtcttctagagacaattctgaactccaattgcttatctctgaaagccttttatttatttatttattttttgagacgagtctcgctctgtcgcccaggctggagtgctgtggcgtgatctcggctcactgcaacctctgcctccaggttcaagcagtt

SEQ ID NO: 31776 - DNA, 201 bp, Homo sapiens
ggctttcaccactatgcccagctaatgtttgtatttttagtagagacggggtttcaccctgttggccaggctggtcttgaactcctgacctcaggtgatcygcctgcctcggcctcccaaagtgctgggatgacaggtgtgagacactgagcccagctgcaagtttattatcttgtagttttggaggtcagaagtctgaaa

SEQ ID NO: 31777 - DNA, 201 bp, Homo sapiens
gctgagaagcccttttaaaatcagtattcttctaagtgtggtcttctagagacaattctgaactccaattgcttatctctgaaagccttttatttatttatttattttttgagacgagtctcgctctgtcgcccaggctggagtgctgtggcgtgatctcggctcactgcaacctctgcctccaggttcaagcagttctct

SEQ ID NO: 31778 - DNA, 201 bp, Homo sapiens
agacggtatctcatttctgccccaccttcctgtgctctttagtctgtcccaacccactgtagccacatcatgacctttttttttttttttttttttttgaracagagtctcgctctgtcacccaggctggagttcagtggcgtgatctcggctcactgcaacctctgcctcctgggttcacaccattctcctgcctcaggc

SEQ ID NO: 31779 - DNA, 201 bp, Homo sapiens
taaaatcagtattcttctaagtgtggtcttctagagacaattctgaactccaattgcttatctctgaaagccttttatttatttatttattttttgagacgagtctcgctctgtcgcccaggctggagtgctgtggcgtgatctcggctcactgcaacctctgcctccaggttcaagcagttctctgcctcagcctcccga

SEQ ID NO: 31780 - DNA, 201 bp, Homo sapiens
ccacatcatgacctttttttttttttttttttttttgagacagagtctcgctctgtcacccaggctggagttcagtggcgtgatctcggctcactgcaacmtctgcctcctgggttcacaccattctcctgcctcaggctcccgagtagctgggactacaggcacccgccaccacgcccggctaattttttgtatttttag

SEQ ID NO: 31781 - DNA, 201 bp, Homo sapiens
ggaggtaggggaacgagctatgtggatgggtgtctaagggaagagcagctgcaggtaccctgggttggaagcctgcctggtgggtggggggcagggtgagragctagtggctgcagtggagtggggcggggtgtaatgagggaaggggaggaagggggaagaggccatggggcttcttaagccctcagaagggcttttgct

SEQ ID NO: 31782 - DNA, 201 bp, Homo sapiens
ctgcagcaaagcaccatggcacacgttcacctatgtaacaaacctgcacatctgcacatgtaccctggaacttaaaaaaatagccaggcgcagtggctcaygcctgtaatcccagcactttgggaggccaaggcaggcagatcacttgaggtcaggagttcgagaccagcctggccaacatggtgaaaccccatctctact

SEQ ID NO: 31783 - DNA, 201 bp, Homo sapiens
ggagttcagtggcgtgatctcggctcactgcaacctctgcctcctgggttcacaccattctcctgcctcaggctcccgagtagctgggactacaggcaccygccaccacgcccggctaattttttgtatttttagtagagacggggtttcaccatgttagccaggatggtctcgatctcctgacctcgtgatctgcctgcc

SEQ ID NO: 31784 - DNA, 201 bp, Homo sapiens
gggggagaagatggtaagtaggtaaattccatgttgatgagatgaacgttgaagacacagggaaggtgggaaggagtgttgggtggcagctgatgctgaagttttcaatggggtggtcacggagggtgacactttggcacacactggaggaggtaggggaacgagctatgtggatgggtgtctaagggaagagcagctgca

SEQ ID NO: 31785 - DNA, 201 bp, Homo sapiens
actgggtatggtggctcacgcctgtaattccagctactcaggaggctgaggcatgagaattgcttgaacccggggggcggaggttgcagtgagctgagacrgcaacactgcactcctgcctgggcaacagagcgaagccctttttaagaagcacttgctatgtacaaagcaggtgtgctatgaactaacactcttattcct

SEQ ID NO: 31786 - DNA, 201 bp, Homo sapiens
cgtgatctcggctcactgcaacctctgcctcctgggttcacaccattctcctgcctcaggctcccgagtagctgggactacaggcacccgccaccacgccyggctaattttttgtatttttagtagagacggggtttcaccatgttagccaggatggtctcgatctcctgacctcgtgatctgcctgcctcggcctcccaa

SEQ ID NO: 31787 - DNA, 201 bp, Homo sapiens
ggctaacacagtgaaaccccgtctctactaaaaatacaaaaaaaaaaaaaaaattagctgggcgtggtggcgggcagctgtagtcccagctactcgggagkctgaggcaggagaatggcgtgaacccgggaggcggagcttgcagtgagcggagattgcgccactgcactccagcctgggcgacagagcgagactccgtct

SEQ ID NO: 31788 - DNA, 201 bp, Homo sapiens
tctcggctcactgcaacctctgcctcctgggttcacaccattctcctgcctcaggctcccgagtagctgggactacaggcacccgccaccacgcccggctwattttttgtatttttagtagagacggggtttcaccatgttagccaggatggtctcgatctcctgacctcgtgatctgcctgcctcggcctcccaaagtgc

SEQ ID NO: 31789 - DNA, 201 bp, Homo sapiens
gggttcacaccattctcctgcctcaggctcccgagtagctgggactacaggcacccgccaccacgcccggctaattttttgtatttttagtagagacgggvtttcaccatgttagccaggatggtctcgatctcctgacctcgtgatctgcctgcctcggcctcccaaagtgctgggattacaggcgtgagccaccgcgcc

SEQ ID NO: 31790 - DNA, 201 bp, Homo sapiens
tatgaggatcatgcaagcgaatatatacaaagtatttagcacagtgctcagcgatggctgtgattgcagagttttttgttttttgttttttttctgaggcrgagtcttcctcttttgcccaggctggagtgcagtggtgtaatcttggttcactgcaacctccgcctcccaggttcaagcaattcttctgcctcagcctcc

SEQ ID NO: 31791 - DNA, 201 bp, Homo sapiens
acgtaggcgtcatctttgatgcctcttttccttcctctccaccacatcaacaagtcttagttggctctgcctccagaccagtgcaggcactgtcttcactycctggacactgctgccacagcctttcctgcttccagcccctgcgctccattctccacacagcagcagccctatcccttcactctgctgcctgaaactcct

SEQ ID NO: 31792 - DNA, 201 bp, Homo sapiens
tctgtgaccacccagtctcagtagccctcggtccttattaccgtatttttgttgttgttgttgagatggagtcttgctctgtcacccaggctggagtgccrtggcaggatgtcggctcactgcaacctccgcctcccaggtttaagcaattctcctgcctcagcctcccaagtaggtgggattacaggcgcccgccaccac

SEQ ID NO: 31793 - DNA, 201 bp, Homo sapiens
catcttattagtgagatctgaatctcatgtcagtcactggcaaaggagaatagctgtgtcatgatcacctgagaccaacgatgattcctgaataaaatccraaaggagagaggggcccctgggcaggccagcatccgtgtttgctgcaaacagtagtacccggtgccttgcttctcccttaacctctacttgggcatcttt

SEQ ID NO: 31794 - DNA, 201 bp, Homo sapiens
gctgagaatcaccctacctcagaacaacaatcaccacatttgctcacaattctatgggtcacatacttgggctgggctcagctggatgattcttctgtccrtcttgcctggagttaccctggagctgcaggcgtctggttgcttgactggggctggatggcctaagatgacctcacttacttgtctggaccatgtgtcttt

SEQ ID NO: 31795 - DNA, 201 bp, Homo sapiens
attagaaaatgaaccagcccaacgatacagaattcaaatattccacctcaccccaactgcgctacgaccactttatattttgacattcagcttttattccttttttttttttttttaaactgagacgaagtctcactctgtcgcccaggctggagtgcagtggtgccatctcggctcactgcaacctctgccgcccaggtt

SEQ ID NO: 31796 - DNA, 201 bp, Homo sapiens
ttgactgtctgtctctgatggggctcagttagagccagaggttagagagtggcagctcctccaggaaaggagtcttgctcggtgggtcagggccccaggcwtgttgggaagggcggctgaggcttcgtgttgccagttctgtcagccagggcctttggactccagggctctgccattctgttcctcctccagccagcctcc

SEQ ID NO: 31797 - DNA, 201 bp, Homo sapiens
ctggcttatttggaagatgcttaggacttctgactcaccacttttattgtttatttcttcttatgatgacatcaaagtagaaagtattcttgcaaggtgcrgtggctcatatttggaaatcccagcactttgggaggccaaggtgggtgaattgcttgagcccaggtggttgaggctgcagtgagccatcatggtgctgct

SEQ ID NO: 31798 - DNA, 201 bp, Homo sapiens
ttagaaaatgaaccagcccaacgatacagaattcaaatattccacctcaccccaactgcgctacgaccactttatattttgacattcagcttttattccttttttttttttttttaaactgagacgaagtctcactctgtcgcccaggctggagtgcagtggtgccatctcggctcactgcaacctctgccgcccaggttc

SEQ ID NO: 31799 - DNA, 201 bp, Homo sapiens
cggctcccacacagccgcctctgctccagcaaggatgtggctcttccacactctgctctgcatagccagtaagtcctctcacccgctgcttcgaggggctsctgtgccctcagctccagccaggtgtctgcagactacagccttgactgtctgtctctgatggggctcagttagagccagaggttagagagtggcagctcc

SEQ ID NO: 31800 - DNA, 201 bp, Homo sapiens
ccagctacttgggagactgaggcaggagaaccttgaacctaagaggcagaggttgcagagagccaagatcgagccactgcactccagcctgggcgacagarcgagactccatctcaaaaaaaaaaaaaaaaaagagagagaaagaacttgataaacccaggtgtggctgtgactcttcccttctgtctgagccagttcttt

SEQ ID NO: 31801 - DNA, 201 bp, Homo sapiens
tagaaaatgaaccagcccaacgatacagaattcaaatattccacctcaccccaactgcgctacgaccactttatattttgacattcagcttttattccttttttttttttttttaaactgagacgaagtctcactctgtcgcccaggctggagtgcagtggtgccatctcggctcactgcaacctctgccgcccaggttca

SEQ ID NO: 31802 - DNA, 201 bp, Homo sapiens
gagcctgggctgatcgggactctctgtctggttacagctgccctatgagaaggcctgcaagaataagctgttttgtgtcgcagaattacagttggccaccrccgtctctcagtgagttggacatagccgtcagtttcctcgattaaccttctcccgaacgcttgcctgggcaattccttcattaggacaccctgcacatcc

SEQ ID NO: 31803 - DNA, 201 bp, Homo sapiens
ggcagccacccccaaacctccagttcttttatttatttatttatttatgagacgaagtcacactctgtcccccaggctggagtgcagtggcgtgatctccrctcactgcaacctctgcctcccaggttcaagcaattctcctgcctcagcctcctgagtagctgggactacaggcacacgccaccatgcccggctaatttt

SEQ ID NO: 31804 - DNA, 201 bp, Homo sapiens
caggttcaagcgattctcctgcctcagcctcccgagtagttgagactacaggtggacaccaccaggcccagctaatttttaaaaaatttttaatagagacrgggatttcaccatgttggccaggctggtcttgaactcctggcctcaggtgatccgcctgcctcggcctcccaaagtgctgggatgataggcatgaaccac

SEQ ID NO: 31805 - DNA, 201 bp, Homo sapiens
tgcaacctctgcctcccaggttcaagcaattctcctgcctcagcctcctgagtagctgggactacaggcacacgccaccatgcccggctaatttttgtatytttagtagacacggggtttcaccatattgatcaggctggtctcaaagtcctgaccccagatgatccacctgcctcagcctcccaaagtgctgggattaca

SEQ ID NO: 31806 - DNA, 201 bp, Homo sapiens
tcaagaaccacgtaatggcacggaagatggagatgctgtcattgctgacgtttttcttggtaataactcaggaatgccagtgttcttggcatgcgttatcmgacctcacctgataataactaggaccgagggcctgaatgtcagttggcatcaaaaaagtgaacaactaaaaggaagaataaaaagatagaaacgaccatc

SEQ ID NO: 31807 - DNA, 201 bp, Homo sapiens
tacaggtggacaccaccaggcccagctaatttttaaaaaatttttaatagagacagggatttcaccatgttggccaggctggtcttgaactcctggcctcrggtgatccgcctgcctcggcctcccaaagtgctgggatgataggcatgaaccactgcacccggcctcattcctggtaaaggtctggtgccctctgtccta

SEQ ID NO: 31808 - DNA, 201 bp, Homo sapiens
tggaggttacagtgagctgacattgcaccactggactccagcctgggcaacagagcaagactgtttaaaaaaaaaaaatcctgccaggcacggtggctcaygcctgtaatcccaacactttgggaggctgaggtgggccgatcatgggtcaggagatcgagaccatcctagctaacacggtgaaatcccgtctctactaaa

SEQ ID NO: 31809 - DNA, 201 bp, Homo sapiens
tgaaccactgcacccggcctcattcctggtaaaggtctggtgccctctgtcctaatgtattcagttgaaagcagtcgagttcattcaaaaagagaaggccrggtgcggtggctcacgcctgtcatcccagcactttgggaggctgaggtgggtggatcacctgaggtcaggagttcaagaccagcctggctaacatggcga

SEQ ID NO: 31810 - DNA, 201 bp, Homo sapiens
cctctgtcctaatgtattcagttgaaagcagtcgagttcattcaaaaagagaaggccgggtgcggtggctcacgcctgtcatcccagcactttgggaggcygaggtgggtggatcacctgaggtcaggagttcaagaccagcctggctaacatggcgaaaccccgtctctactgaaaatatgaaaattagccaggtgtggt

SEQ ID NO: 31811 - DNA, 201 bp, Homo sapiens
ttaggcaggagaatcacttaaacccaggaggcagaggttgcagtgagctgagatcgcaccactgcactccagcctgggcaacagagcaagactccacctcaaaaaaaaaaaaaaaaaaaaagggatgagtgtagtggctcatgcctgtcatcccaacactttcgcaggctgaggtggaggatcacttgagcctgggaggtt

SEQ ID NO: 31812 - DNA, 201 bp, Homo sapiens
ccaggttctagctctctttttgaagggggagacaaaagcttctctcttggggccaggtgaggtggctcatgcctgtaatcccagcattttgggaggctgargtgggcggatcacttgaggtcaggagttcaagaccagcctggccaacatggtgaaaccccaactctactagaaaattcaaaaattagccaggcatggtgg

SEQ ID NO: 31813 - DNA, 201 bp, Homo sapiens
taggcaggagaatcacttaaacccaggaggcagaggttgcagtgagctgagatcgcaccactgcactccagcctgggcaacagagcaagactccacctcaaaaaaaaaaaaaaaaaaaaagggatgagtgtagtggctcatgcctgtcatcccaacactttcgcaggctgaggtggaggatcacttgagcctgggaggttg

SEQ ID NO: 31814 - DNA, 201 bp, Homo sapiens
gaggcaggagaatggtgtgaacctgggaggcaaagcttgcagtgagctgagatctcgcctctgcgctccagcctgggtgacagagtgtgactccatttccaaaaaaaaaaaaaaaacaaataaacaaacaaacaaaaaaaccaaaaattagccgggcatggtggcacatgcctgtaatcccagctactcgggaggctgagg

SEQ ID NO: 31815 - DNA, 201 bp, Homo sapiens
gagagcagagtgctcagtggacaggctggctgggttcaaatctcagctctggttttttttttttgtttttttttttgagatggagtcttgctctgtcaccsaggctggagtgcagtggcacgatctcagctcactgcaagctccgcctcccaggttcacaccattctcctgcctcagcctcccgagtagctgggactacag

SEQ ID NO: 31816 - DNA, 201 bp, Homo sapiens
acacctgtaatcccagcactttgggaggccgaggcgggtggatcacaaggtcagcagatcgagaccatcctggctaacacggtgaaaccccgtctctactraaaatacaaaaaattctccgggcgtggtggcgggcgcctgtagtcccagctacttgggaggctgaggcaggagaatggtgtgagcccgggaggcggagct

SEQ ID NO: 31817 - DNA, 201 bp, Homo sapiens
agtggacaggctggctgggttcaaatctcagctctggttttttttttttgtttttttttttgagatggagtcttgctctgtcacccaggctggagtgcagkggcacgatctcagctcactgcaagctccgcctcccaggttcacaccattctcctgcctcagcctcccgagtagctgggactacaggcggccaccaccacg

SEQ ID NO: 31818 - DNA, 201 bp, Homo sapiens
tcacctgaggtcaggagttcaagaccagcctggccaacatggtgaaaccccgtctctactcaaaatacaaagttagctgggtgtggtggcaggtgcctgtratcccagctactcgggaggctgaggcagggagaattgcttgaactcgggaggcagaggttgcagtgagctgagatcgtgctattgcactccagcctgggt

SEQ ID NO: 31819 - DNA, 201 bp, Homo sapiens
acggcagatgcagtgggacgcaggcccacagtggagcaaggcagggttgaggcatcacgtgaaaggaatcagggcagaaccatgtgtgagcgtgctcaggygaggatggagcctttctgactctgagctcttccatgtgtgtttttaaagaaaatctcctggatccagatgcacgtgtggacactggagactgctacagca

SEQ ID NO: 31820 - DNA, 201 bp, Homo sapiens
atccgggaggcagagatggcagtgagccgagatcgcgccattgcactccagcctggatgacagagcgagactccatctgaaaacaaacaaacaaacaaccraaaaaacagatgactagccatgaggaaggaacctccaaggcctggaccttgacgatatttggctaggcatcccccactcctgcccgggctgttctgccta

SEQ ID NO: 31821 - DNA, 201 bp, Homo sapiens
catttcagggccaaaatatatcctaaacccattcacttctctccatttccactgccgttgtaattcaagctaccctttcttgccagggctgttgcaataascttcggcctgcctttcttgcctctgcttttcccacattctttacaaataattcccacgtaacagctatccgtcttctaagagcagacattagattgtgcc

SEQ ID NO: 31822 - DNA, 201 bp, Homo sapiens
gctgaattgctgtgaggaaaccacgtttttgttttgttttgtttggctctttaagagaatgtcatctgctcttttaacagcctccctctccaaacattcastgtgatgaccctcagccggttgcttctgtcctgatcatgaactgcaggattggtcaccccgtcctcaagaggtcatctgtgagtcggtttggaccgattc

SEQ ID NO: 31823 - DNA, 201 bp, Homo sapiens
gaggtgggaagtgcttctttggggagagctaggggcggcttcttggaggaggggggctcgggtactggtacagcttggtttagtaggaggatcagaggctstgggtcagatacacctgcgtctagtctttctctctcacacacacataaagatccctgggcagtctcacttttctcagctgtaaaacggggttcatgacac

SEQ ID NO: 31824 - DNA, 201 bp, Homo sapiens
ggtggatcacaaggtcagcagatcgagaccatcctggctaacacggtgaaaccccgtctctactaaaaatacaaaaaattctccgggcgtggtggcgggcrcctgtagtcccagctacttgggaggctgaggcaggagaatggtgtgagcccgggaggcggagcttgcagtgagccgagatcctgccactgcactccagcc

SEQ ID NO: 31825 - DNA, 201 bp, Homo sapiens
tggtctgtggggtccacggaaccccagcctcacgcctcactgggcctctccctgctccattgcccagggggagggtggacttaaagacaattttagtggcygggcacggtggctcacgcctgtaatcccagcactttgggaggccgaggcgggcggatcacgaggtcaggagattgagaccatcctggctaacacggtgaa

SEQ ID NO: 31826 - DNA, 201 bp, Homo sapiens
tgaggcaggagaatggtgtgagcccgggaggcggagcttgcagtgagccgagatcctgccactgcactccagcctgggagacagagtgagactccatctcaaaaaaaaaaaaaagcaaaaattaaaaccttgtcagtagacagagacattttccctttgaaaattgataaattctgcttctctgtgtgagtgatgtaacat

SEQ ID NO: 31827 - DNA, 201 bp, Homo sapiens
gattggtcaccccgtcctcaagaggtcatctgtgagtcggtttggaccgattcgctcttctcaccaccctgcagttggcgtcttctgcatcttggtctcayctcaatctctcggttccagctttgcgcttcgcttgactgcagtgtgtccccagcagtgcttacagtggctaagctggctctgaaagtagggggtgatggg

SEQ ID NO: 31828 - DNA, 201 bp, Homo sapiens
agaattgcttgaacccgggaggcggaggttgcagtgagctgagatcgcaccactgcactctagcctgggtgacagagcaagactctgtctcaataaaattwaaaaaaaaaaaaagagggtttataaatataaacgtttgttttcacatgtagtttatttatttaaaaaaatagagacaggggtcttgctatgttgaccagg

SEQ ID NO: 31829 - DNA, 201 bp, Homo sapiens
caatctctcggttccagctttgcgcttcgcttgactgcagtgtgtccccagcagtgcttacagtggctaagctggctctgaaagtagggggtgatggggaygagagctttccagtacacagccctaggtgaactgcctgctcacctccgtgaagcagagtgaagttgtgggtagtatggagggcgtgtcagacaaaaagtt

SEQ ID NO: 31830 - DNA, 201 bp, Homo sapiens
tctactcaaaatacaaagttagctgggtgtggtggcaggtgcctgtaatcccagctactcgggaggctgaggcagggagaattgcttgaactcgggaggcrgaggttgcagtgagctgagatcgtgctattgcactccagcctgggtgacagagcgagactccatctatctcaataataataataataaaaataaataaat

SEQ ID NO: 31831 - DNA, 201 bp, Homo sapiens
agactttgtacttgctgttcctttgcttgacactgctcttcctctaggtcctgacgtaggtggtttcttcttaaatttagctcaggtgttcttttcttttytttttttttttttttagatggagtcttgctctgtcacccgggctggagtgcagtggcacgatctctactcactgcaacctccgcctcccgggttcaagtg

SEQ ID NO: 31832 - DNA, 201 bp, Homo sapiens
gacgcatgtcctgtcaattgcagaccatccataatgtacgtgaacacaggccaggggctttctcaccacaaagaattcctcttccatgtaagtacttattwttgtaaagctgtagatggcaaagcaataccagctttgatttcctactctgattttaatttgcaggtacatggggagaacctctttggagcagaataccag

SEQ ID NO: 31833 - DNA, 201 bp, Homo sapiens
ctgggtgtggtggcaggtgcctgtaatcccagctactcgggaggctgaggcagggagaattgcttgaactcgggaggcagaggttgcagtgagctgagatsgtgctattgcactccagcctgggtgacagagcgagactccatctatctcaataataataataataaaaataaataaataaaatgagaataataatagtac

SEQ ID NO: 31834 - DNA, 201 bp, Homo sapiens
cctctaggtcctgacgtaggtggtttcttcttaaatttagctcaggtgttcttttcttttttttttttttttttttagatggagtcttgctctgtcaccckggctggagtgcagtggcacgatctctactcactgcaacctccgcctcccgggttcaagtgattctcctgcctcagcctcccgagtagctgggattacagg

SEQ ID NO: 31835 - DNA, 201 bp, Homo sapiens
tgtggtggcaggtgcctgtaatcccagctactcgggaggctgaggcagggagaattgcttgaactcgggaggcagaggttgcagtgagctgagatcgtgcyattgcactccagcctgggtgacagagcgagactccatctatctcaataataataataataaaaataaataaataaaatgagaataataatagtactcaca

SEQ ID NO: 31836 - DNA, 201 bp, Homo sapiens
ccagggttcagtggcagcttcaccgtggatttgccgcatagcctgagcaaggtgctcgggcctgagcttcagtttcccttctctgcagtcagcgtggggawctacctacttcacaggattgtcgcaaagactatttgagataatgcatgtaaagggcttagcacaggttctgccgggcgcggtggctcacgcctgtaatcc

SEQ ID NO: 31837 - DNA, 201 bp, Homo sapiens
ctctaggtcctgacgtaggtggtttcttcttaaatttagctcaggtgttcttttcttttttttttttttttttttagatggagtcttgctctgtcacccgsgctggagtgcagtggcacgatctctactcactgcaacctccgcctcccgggttcaagtgattctcctgcctcagcctcccgagtagctgggattacaggc

SEQ ID NO: 31838 - DNA, 201 bp, Homo sapiens
cgagacagaagaatcactcgaacccaggaggcagaggttgcagtgagccaagatcgcgccactgcactccaggatgggtgacagagcgaggctccatctcaaaaaaaaaaaaaaaaaaattagccaggcgtggtggcgcatgacctctattcccagctacttgggaagctaaggcaccaggtcacttgaccttgggaggca

SEQ ID NO: 31839 - DNA, 201 bp, Homo sapiens
caaggtgctcgggcctgagcttcagtttcccttctctgcagtcagcgtggggaactacctacttcacaggattgtcgcaaagactatttgagataatgcaygtaaagggcttagcacaggttctgccgggcgcggtggctcacgcctgtaatcccagcactttgggaggccgaggcgggcggatcatttgaggtcaggagt

SEQ ID NO: 31840 - DNA, 201 bp, Homo sapiens
tggagtgcagtggcacgatctctactcactgcaacctccgcctcccgggttcaagtgattctcctgcctcagcctcccgagtagctgggattacaggcgcyggcgaccacgcccagctaatttttgtatttttagtagagagggggtttcaccatgttggccaggctggtctcgaactcctgacctcaggtgatcgcccgc

SEQ ID NO: 31841 - DNA, 201 bp, Homo sapiens
gggaggcacaagttgcagtgagctgatattgagccatggcactccagcctgagcaacagagtgagacactgtctcaaaaaaaaaaaaaaaaaaaaaaaaarggcaacaatatccccaggcctccttgcgtcccagaatctccatgaagctctgatgaactgagctggtgctggagaaacaaggatggctggggcatagtcc

SEQ ID NO: 31842 - DNA, 201 bp, Homo sapiens
gtggtcaagggtttccttcacacccagcacacaggagcaagtgagcccagggttcaaacaggcactggggcagagccaggtgaggagccagggttcctggstgggcagggcgggagctttgcttgaataggatgggtgggcagtggtggctcccgaagcagcctcataggccctgggacttgggccttgaccctgacagcc

SEQ ID NO: 31843 - DNA, 201 bp, Homo sapiens
ctgcctcagcctcccgagtagctgggattacaggcgccggcgaccacgcccagctaatttttgtatttttagtagagagggggtttcaccatgttggccargctggtctcgaactcctgacctcaggtgatcgcccgcctcagcctcccaaagtgctgggattacaggcgtgagccaccgcacccgacctaggtgttcttt

SEQ ID NO: 31844 - DNA, 201 bp, Homo sapiens
caggacacctaggattcagggactcctgcctcccatccagggctctgccctacctgtggtgattcctgtaaaagagcgattttattttaattaattaattwatttatttattttgagacggagtcttgctctgtcgcccagtctggagtgcagcggtgcaatctcggctcactgcaacaaaagggtggccatattgatgac

SEQ ID NO: 31845 - DNA, 201 bp, Homo sapiens
tatatttgacattccaagactgaatatatattttacaatataacaaataaaaatatatttggtctcaaaataaacatttggtcccattatctggcatacaygcctaaaatctctggaatctccaaagtaataaatgtctttttctttgttaatgagttgacgggggaccggcagcccccagatagcttcaaaatgggggct

SEQ ID NO: 31846 - DNA, 201 bp, Homo sapiens
ccgcctcagcctcccaaagtgctgggattacaggcgtgagccaccgcacccgacctaggtgttcttttcttttcttttctttctttcaagacggagtttcrctcttgttgtgcaatggcacgatctcggctcactgcaacctccgcctcccgggttcaagcgattctcctgcctcagcctcccaagtagctgggattacag

SEQ ID NO: 31847 - DNA, 201 bp, Homo sapiens
gttttgctctcgttgcccaggctgcaatgcaatggcaggatcttggctcaccgcaacctctgcctccggggttcaagcaattctcctgcctcagcctaccsagtagctgggattacaggcatgggccacacacccggctaattttgtatttttggtagagacagggtttctccatgttggtcaggctggtcttgaactccc

SEQ ID NO: 31848 - DNA, 201 bp, Homo sapiens
ggcctggggcgatggcctggcttctttggtccttgtactctgccgtgtgggggacgcattccttcatggccagcacaaagttgccacatctccaaatgctrtattttcacatggcaggatacaaaacaggaagcaagaagtcagtagcaaaaggatgttggatttttcttcatgtgccttcccttttcagggatgaaacag

SEQ ID NO: 31849 - DNA, 201 bp, Homo sapiens
ccaccatacccggctaattttgtatttttagtagagatggggtttctccatgttggtgaggctggtcttgaactcctgacctcaggtgatccgccctcctyggcctcccaaagtgctgggattacaggcgtgagccaccacgcccggctaattttgtatttttagtagagatggggtttcatcgtgttggtcaggctggtc

SEQ ID NO: 31850 - DNA, 201 bp, Homo sapiens
gctcaccgcaacctctgcctccggggttcaagcaattctcctgcctcagcctaccaagtagctgggattacaggcatgggccacacacccggctaattttrtatttttggtagagacagggtttctccatgttggtcaggctggtcttgaactcccgacctcaggtgatccacccacctcggcctcccaaagtgttgggat

SEQ ID NO: 31851 - DNA, 201 bp, Homo sapiens
ctaattttgtatttttggtagagacagggtttctccatgttggtcaggctggtcttgaactcccgacctcaggtgatccacccacctcggcctcccaaagygttgggattacaggcgtaagccacctcgcccagcatttttttttttttttccgagactgagtctcactctgttgtccaggctggagtgcaatggtgcaat

SEQ ID NO: 31852 - DNA, 201 bp, Homo sapiens
attgcagagttttttgttttttgttttttttctgaggcggagtcttcctcttttgcccaggctggagtgcagtggtgtaatcttggttcactgcaacctcygcctcccaggttcaagcaattcttctgcctcagcctcctgaggagctgggattacaggtgtctgccaccacgcccggctaatttttgtatttttagtaga

SEQ ID NO: 31853 - DNA, 201 bp, Homo sapiens
attgcactccagcctgggcaacaagaatgaaactctgtctctccaaaaaaaaaaaaaaaaagaagagaaaaatgcacacctcataagcatgcagcgcagtraacatccgcagagtgaagcactgtgtaagcagcatgcagatcaagggcacgtgagctgcggcgcctaggccccctctaagccccgcactcccttccagac

SEQ ID NO: 31854 - DNA, 201 bp, Homo sapiens
gaggcacaagttgcagtgagctgatattgagccatggcactccagcctgagcaacagagtgagacactgtctcaaaaaaaaaaaaaaaaaaaaaaaaaagscaacaatatccccaggcctccttgcgtcccagaatctccatgaagctctgatgaactgagctggtgctggagaaacaaggatggctggggcatagtccct

SEQ ID NO: 31855 - DNA, 201 bp, Homo sapiens
tgcctgggcaacagagcgaagccctttttaagaagcacttgctatgtacaaagcaggtgtgctatgaactaacactcttattcctagttccaatgaaagayggtctttggccaacgagacccacacccttcaattcaggcatggcttcgttgcagttctgtccaagtgagtactcccaagaggccagcagcggtgtgactc

SEQ ID NO: 31856 - DNA, 201 bp, Homo sapiens
ctggtggtcaggatgaatgtggacactgtccttctgagaggagcctgcttagaacccaggctctgatattgatctctagggtgctaacatttgggtcacaraaaccccactgtggtcatcaaaggaggtgtattgccaactagtcgtgctacaaaagggaattaatatgacgctgtggagggaagaaggcagctgtgggac

SEQ ID NO: 31857 - DNA, 201 bp, Homo sapiens
agtctcactctgtcgcccaggctggagtgcagtggtgccatctcggctcactgcaacctctgccgcccaggttcaagcgattctcctgcctcagcctcccragtagttgagactacaggtggacaccaccaggcccagctaatttttaaaaaatttttaatagagacagggatttcaccatgttggccaggctggtcttga

SEQ ID NO: 31858 - DNA, 201 bp, Homo sapiens
gcctgtcatcccagcactttgggaggctgaggtgggtggatcacctgaggtcaggagttcaagaccagcctggctaacatggcgaaaccccgtctctactraaaatatgaaaattagccaggtgtggtggcaggcgcctgtaatctcagctacttgggggcttaggcaggagaatcacttaaacccaggaggcagaggttg

SEQ ID NO: 31859 - DNA, 201 bp, Homo sapiens
gggcttaggcaggagaatcacttaaacccaggaggcagaggttgcagtgagctgagatcgcaccactgcactccagcctgggcaacagagcaagactccasctcaaaaaaaaaaaaaaaaaaaaagggatgagtgtagtggctcatgcctgtcatcccaacactttcgcaggctgaggtggaggatcacttgagcctggga

SEQ ID NO: 31860 - DNA, 201 bp, Homo sapiens
ctgagccatgattgttccactgtgctctagcctgggcaacagagtgagaccctgtctccaaaaaagggagaaagactcctcaagggctgacgcatgtcctstcaattgcagaccatccataatgtacgtgaacacaggccaggggctttctcaccacaaagaattcctcttccatgtaagtacttattattgtaaagctgt

SEQ ID NO: 31861 - DNA, 201 bp, Homo sapiens
ttaaataaaatgaataagctgggtgtggtggctcatgcctgtaatctcagcactgtgggaggctaaggtgggtggattgcttgagcccaggagtttgagascagcctgggcaacatggtaaaaccccatctctacaaaaaatacaaaaattagcccagtgtggtggggtgcacctgtggtctcagctactcaggagactga

SEQ ID NO: 31862 - DNA, 201 bp, Homo sapiens
agttagagccagaggttagagagtggcagctcctccaggaaaggagtcttgctcggtgggtcagggccccaggcttgttgggaagggcggctgaggcttcrtgttgccagttctgtcagccagggcctttggactccagggctctgccattctgttcctcctccagccagcctccccccgccaccgaggccctctccccat

SEQ ID NO: 31863 - DNA, 201 bp, Homo sapiens
tgggcaacatggtaaaaccccatctctacaaaaaatacaaaaattagcccagtgtggtggggtgcacctgtggtctcagctactcaggagactgaggtggraggatcacttgagcctggaaggttgaggctatagtgacccatgatcatgccattgcactccagcatgggtgacagagcgagatcctgtctcaaaaataag

SEQ ID NO: 31864 - DNA, 201 bp, Homo sapiens
gcagaataccagttgcaaatttgcgtcccaaccaaattacgaggtctccaggttgtagcagtgaagaagctgacgaggactcaggtatttaaaggcagttmtttatcagtcacacctctttccacagtgactacagagtctcaagtataaaaaccagagttctagaaacagagtgaagacaagttaaccatgggaaaagat

SEQ ID NO: 31865 - DNA, 201 bp, Homo sapiens
agagcgagatcctgtctcaaaaataagtcagtcagtcaagaactgactttggatggcacaagggaaaagaagttgaagaaaaggccaggcgcggcagctcrcgcctgtaatcccagcactttgggaggccgaggtgggtagatcatctgaggtcaggagttcgagacaagcctggccaacatggcaaaaccccatctctac

SEQ ID NO: 31866 - DNA, 201 bp, Homo sapiens
ttcaggtaagcgcggccgtcccgagaggccaggggagggcggagggcctgaagcgggtaacgagaggccaggagactgtttttcctgggttacccctgcckgccagtgccgggggctgccaggccctccctagcttcgtccctgggtctcaattgctcccgctggagcttcgcttgggccgaggtgagcgctgaaattgct

SEQ ID NO: 31867 - DNA, 201 bp, Homo sapiens
ccacgcccggctaatttttgtatttttagtagagacagggtttcaccatgttggccaggctggtcttgaactcctgacctcgtgatccacccatcttggcytcccaaagtgctgggattacaggcatgagccactatgcctggccaagaattgcagagtttttgtgccccatccctcagtgaatgatcaagtcccgtggct

SEQ ID NO: 31868 - DNA, 201 bp, Homo sapiens
aaaagaagttgaagaaaaggccaggcgcggcagctcacgcctgtaatcccagcactttgggaggccgaggtgggtagatcatctgaggtcaggagttcgaracaagcctggccaacatggcaaaaccccatctctactaaaaatacaaaaattagcctggcatggtggcacatgcccataattccagctactcgggaggct

SEQ ID NO: 31869 - DNA, 201 bp, Homo sapiens
ggcgcctatagtcccagcgactcgggaggctgaggcaggagaatggtgaacccgggaggcggagcttgcagtgagcggagatcgcgccactgcactccagyctgggcgacagagcgagactccgtctccaaaaaaaaaaaaagaaaaacagagcttttatctccccccacccttcattcccccaaatctatcctgccctca

SEQ ID NO: 31870 - DNA, 201 bp, Homo sapiens
gccaatataacatttccttttatttttaagtagtgtatttctttttcttttcttttctttcttttttttttttttttttgaggaagaatctcactgtgtcvcccaggctggagtccgttggtgccatctcggctcactgcaacctccacctccccagttcaagtgattcttcttcctcagcctcccgagtagctgggatta

SEQ ID NO: 31871 - DNA, 201 bp, Homo sapiens
gtgtttgagactgaaatgctccagatttgattatccagttgctcacgggcatcgcccctagaagagataatagcatctttgcataacatgtccatgtccawaatagatcttttggtgcaaaaaaccaaccctctgtcccaacccgttccttagctaccctcaggagggagatatactccagttacagtacaaggaactcga

SEQ ID NO: 31872 - DNA, 201 bp, Homo sapiens
tatagtcccagcgactcgggaggctgaggcaggagaatggtgaacccgggaggcggagcttgcagtgagcggagatcgcgccactgcactccagcctgggygacagagcgagactccgtctccaaaaaaaaaaaaagaaaaacagagcttttatctccccccacccttcattcccccaaatctatcctgccctcaggcttt

SEQ ID NO: 31873 - DNA, 201 bp, Homo sapiens
gagaatggtgaacccgggaggcggagcttgcagtgagcggagatcgcgccactgcactccagcctgggcgacagagcgagactccgtctccaaaaaaaaaraaagaaaaacagagcttttatctccccccacccttcattcccccaaatctatcctgccctcaggctttctgtctcagcaaatggcatcatcatccaccca

SEQ ID NO: 31874 - DNA, 201 bp, Homo sapiens
gccaggctggtctcaaactcctgaccttgtgatcctcccgcctcggcctcccaaagttctgggattacaggcatgaaccaccactcccagcctcttttttwaaaataaacaccagggtctttgtcccccaagctggagttcagtggcacagttaagggctcactgcagcctcctactcctaggctcaggtgatcctcccat

SEQ ID NO: 31875 - DNA, 201 bp, Homo sapiens
tgctctgtcacccaggctggagtgccgtggcaggatgtcggctcactgcaacctccgcctcccaggtttaagcaattctcctgcctcagcctcccaagtargtgggattacaggcgcccgccaccacacccagctaatttttgagttttttagtagagacgatgtttcaccaagttggccaggctggtctcgaacccctga

SEQ ID NO: 31876 - DNA, 201 bp, Homo sapiens
gtgaaacaccgtctctactaaaaatacaaaaaattagccgggcaggtgcctgtaatcccagctactcgggaggctgaggcaggagaatagcatgaacccaggagacggagcttgcagtgagctgagatcgcaccactgcactccacgctgggcgacagagcgagactccgtctcagaaaaaaaaaaaagactcagaaaaag

SEQ ID NO: 31877 - DNA, 201 bp, Homo sapiens
gaataaaatccgaaaggagagaggggcccctgggcaggccagcatccgtgtttgctgcaaacagtagtacccggtgccttgcttctcccttaacctctacytgggcatctttggggcacttttgggaatctgtgggtttagaagaagataaagggaggtggctttgagaaatagggacatttcttctactcacatctggcc

SEQ ID NO: 31878 - DNA, 201 bp, Homo sapiens
acctctacttgggcatctttggggcacttttgggaatctgtgggtttagaagaagataaagggaggtggctttgagaaatagggacatttcttctactcamatctggcctgtttcccgagtcaccttgggacttcctttcacttcccaaacccagggtcttgagtccccctccttctcctgtagaatattccagccctctt

SEQ ID NO: 31879 - DNA, 201 bp, Homo sapiens
ctttggggcacttttgggaatctgtgggtttagaagaagataaagggaggtggctttgagaaatagggacatttcttctactcacatctggcctgtttccygagtcaccttgggacttcctttcacttcccaaacccagggtcttgagtccccctccttctcctgtagaatattccagccctctttctgttcttcctccct

SEQ ID NO: 31880 - DNA, 201 bp, Homo sapiens
agcactttgggaggccgaggtgggcagatcacgaggtcaggagatcgagaccatcctggctaacacggtgaaaccccgtctctactaaaaatacaaaaatyagccaggtgtggtgacagatgcctgtagtcccagcactttgggaggccgaggcgggtggatcacaaggtcaggagatcgagaccatcctggctaacatgg

SEQ ID NO: 31881 - DNA, 201 bp, Homo sapiens
tttggggcacttttgggaatctgtgggtttagaagaagataaagggaggtggctttgagaaatagggacatttcttctactcacatctggcctgtttcccsagtcaccttgggacttcctttcacttcccaaacccagggtcttgagtccccctccttctcctgtagaatattccagccctctttctgttcttcctccctc

SEQ ID NO: 31882 - DNA, 201 bp, Homo sapiens
ggggatcacttgaggtcaggagttcgagaccagccgggccaacacggtgaaaccctgtctccactaaaaacacaaaaattagccgggcgtggtggcgggtrcctgtaatcccagctactcgggaggctgaggcaggagaatcgctggaatccaggggagggaggttgcagtgagccgaaatcatgccactgtactccagcc

SEQ ID NO: 31883 - DNA, 201 bp, Homo sapiens
tccctaaataggttcgtgcctctgcgtacgcgtaggctgcttttcttgtcaggaatgccctccatgactgctcacttcactcactgtcttccctgaaagcrgtctagagactcctgagtcctctgtgctggcttctgtgtgtttgctgtgagctcccttctagaaacccttccaaatggcagtcatcacactgtattgtaa

SEQ ID NO: 31884 - DNA, 201 bp, Homo sapiens
actgaggcaggagaaccttgaacctaagaggcagaggttgcagagagccaagatcgagccactgcactccagcctgggcgacagaacgagactccatctcaaaaaaaaaaaaaaaaaagagagagaaagaacttgataaacccaggtgtggctgtgactcttcccttctgtctgagccagttctttacccctttgtgactg

SEQ ID NO: 31885 - DNA, 201 bp, Homo sapiens
ctgaggcaggagaaccttgaacctaagaggcagaggttgcagagagccaagatcgagccactgcactccagcctgggcgacagaacgagactccatctcaaaaaaaaaaaaaaaaaagagagagaaagaacttgataaacccaggtgtggctgtgactcttcccttctgtctgagccagttctttacccctttgtgactgg

SEQ ID NO: 31886 - DNA, 201 bp, Homo sapiens
ggagactgtttttcctgggttacccctgccggccagtgccgggggctgccaggccctccctagcttcgtccctgggtctcaattgctcccgctggagcttygcttgggccgaggtgagcgctgaaattgctcacaccctctattctgggaccttacgatgctctgtgtccgaagtgttaaaaagatttcagactttccgca

SEQ ID NO: 31887 - DNA, 201 bp, Homo sapiens
tacttgggaggctgaggcaggagaatggtgtgagcccgggaggcggagcttgcagtgagccgagatcctgccactgcactccagcctgggagacagagtgmgactccatctcaaaaaaaaaaaaaagcaaaaattaaaaccttgtcagtagacagagacattttccctttgaaaattgataaattctgcttctctgtgtga

SEQ ID NO: 31888 - DNA, 201 bp, Homo sapiens
actccatctcaaaaaaaaaaaaaagcaaaaattaaaaccttgtcagtagacagagacattttccctttgaaaattgataaattctgcttctctgtgtgagygatgtaacatgtgacatttcttacactgccccctataagttgcttactagcttcccttcttctcccctgagactcttttttggtctctgctttgcctcag

SEQ ID NO: 31889 - DNA, 201 bp, Homo sapiens
aacctccaaggcctggaccttgacgatatttggctaggcatcccccactcctgcccgggctgttctgcctatatccgaaaggactaaggaagcttctcttygcgtaggtgtctgctccctgaatgctcaaagtcgtgagctgtgtgttgctgctgaattcgcatgatgtaaatgtcatgggcacccctaacattccgtgaa

SEQ ID NO: 31890 - DNA, 201 bp, Homo sapiens
aattgataaattctgcttctctgtgtgagtgatgtaacatgtgacatttcttacactgccccctataagttgcttactagcttcccttcttctcccctgaractcttttttggtctctgctttgcctcagcctctttgctttcagttgtctcatctgtagtctggttcccaaagctagccttgatacctgaagcaacaggc

SEQ ID NO: 31891 - DNA, 201 bp, Homo sapiens
ctctttgctttcagttgtctcatctgtagtctggttcccaaagctagccttgatacctgaagcaacaggctctgctcagtatgaagctgaagcctgggcattttttttttgctcagactacataagtgttaaggctcaaaaaacggaaaggaatttacagaaaggactctgctgacaattagaaagagggcttataggtca

SEQ ID NO: 31892 - DNA, 201 bp, Homo sapiens
ttcggcctgcctttcttgcctctgcttttcccacattctttacaaataattcccacgtaacagctatccgtcttctaagagcagacattagattgtgccaytcccctgcttattaaaaataacaaacaaacaaaactgatgcttgagcacacttagactaaaatccatacttttttcatggccagagcaaggcagtacttg

SEQ ID NO: 31893 - DNA, 201 bp, Homo sapiens
cagaagttcaacacaagcctggccaacatggagaaaccctgtctaccaaaaatacaaaaattagccggacatgatggtgggtgcctgtaatcccacctacytgggaggctgaggcacgagaatcgcttgaatctgggaggcagaggttgcagtgagccgagatcacaccactccactccagcctcagtgatagagtgagac

SEQ ID NO: 31894 - DNA, 201 bp, Homo sapiens
atgaactgcaggattggtcaccccgtcctcaagaggtcatctgtgagtcggtttggaccgattcgctcttctcaccaccctgcagttggcgtcttctgcaycttggtctcatctcaatctctcggttccagctttgcgcttcgcttgactgcagtgtgtccccagcagtgcttacagtggctaagctggctctgaaagtag

SEQ ID NO: 31895 - DNA, 201 bp, Homo sapiens
cagctactcgggaggctaaggcaggagaatcgcttgaacctgacggggtggaggttgcagtgagccgagatcgcaccacttcactccagcctgggcgaaaragcgaaactccatctcaaaaaaaaaaaaaaggaagttgaagaataactgcagatgtcttgtttgggtaactttatgtagtgttgtgtacgttagggccat

SEQ ID NO: 31896 - DNA, 201 bp, Homo sapiens
cgaaactccatctcaaaaaaaaaaaaaaggaagttgaagaataactgcagatgtcttgtttgggtaactttatgtagtgttgtgtacgttagggccattamctaagcccaggaatacctttaaagggaaaggtggtgaaggctgttcaaacacagtgagttcatgtctaaaatatgttttgtttccctcattcctttcccc

SEQ ID NO: 31897 - DNA, 201 bp, Homo sapiens
atctggtccttcaatagcaatgatttttatggctacgggtgtgtgatcagcaattgtttgaaacacttcgccaaacaccccttccccaatcttctcacagmgttgcagtttttctgtgggaaggcaatggctaaaggggacaggacccttctgactgcattccccataaaccttttcagcatcagatgcctttttgtttga

SEQ ID NO: 31898 - DNA, 201 bp, Homo sapiens
agagtgtttaaggggcttagcaaatacatagaggaggagtgccaagaggacggagcaccacttgttctgttcatgacaggccggtttgaacattctgatargagggatccagagagagaagtggcagtggtatagatgctgcagacctctgacacatcagtcacaattttcttcttgtggaaactgaaggaagccctggtt

SEQ ID NO: 31899 - DNA, 201 bp, Homo sapiens
tgaacctaagaggcagaggttgcagagagccaagatcgagccactgcactccagcctgggcgacagaacgagactccatctcaaaaaaaaaaaaaaaaaagagagagaaagaacttgataaacccaggtgtggctgtgactcttcccttctgtctgagccagttctttacccctttgtgactgggataagaaccatagcag

SEQ ID NO: 31900 - DNA, 201 bp, Homo sapiens
aacctaagaggcagaggttgcagagagccaagatcgagccactgcactccagcctgggcgacagaacgagactccatctcaaaaaaaaaaaaaaaaaagagagagaaagaacttgataaacccaggtgtggctgtgactcttcccttctgtctgagccagttctttacccctttgtgactgggataagaaccatagcagct

SEQ ID NO: 31901 - DNA, 201 bp, Homo sapiens
aggcgtggtagcacacacctgtcatcccagctactcgggcggctgaggtaggagaatcgcttgaacccgggaggcggaggttgcagtgagccgagatcacrccactgcactccagcctgggcaacagagcaagactccatctcaaaaaaaaaaaaaaagaaaaaaagaaaaagaaaaaaaaagcattattgttgtcatctt

SEQ ID NO: 31902 - DNA, 201 bp, Homo sapiens
gggcggctgaggtaggagaatcgcttgaacccgggaggcggaggttgcagtgagccgagatcacgccactgcactccagcctgggcaacagagcaagactycatctcaaaaaaaaaaaaaaagaaaaaaagaaaaagaaaaaaaaagcattattgttgtcatcttctcccccacatccaactctaaccctgccttccgtgg

SEQ ID NO: 31903 - DNA, 201 bp, Homo sapiens
cggctgaggtaggagaatcgcttgaacccgggaggcggaggttgcagtgagccgagatcacgccactgcactccagcctgggcaacagagcaagactccawctcaaaaaaaaaaaaaaagaaaaaaagaaaaagaaaaaaaaagcattattgttgtcatcttctcccccacatccaactctaaccctgccttccgtggtga

SEQ ID NO: 31904 - DNA, 201 bp, Homo sapiens
gtttcagtcagcgttttctgtaactgtctcctgcctagttccctcccaccaatacccagcgaccccacgcctcagctccaggtcccaccgacattcacagyccctctctcagaagcctaaaggccagggtgcaggagagagtttggagcccgtgtcgcagagggctctgagtccaccaggggctgggggagggcccagcgg

SEQ ID NO: 31905 - DNA, 201 bp, Homo sapiens
ttattcaaattttgccagttgtcctattaatgtcctttatagcaaaagaaaaaaaaggttctggtccaggatcattcatagcgttctacagttatttatcyttagtctcctttaatctggaagggtttctcactcagtctttccttgtcttttaatgacattaacatttttgaagggtacaggccagtccttttgtagaat

SEQ ID NO: 31906 - DNA, 201 bp, Homo sapiens
cacgccactgcactccagcctgggagacagagtgagactccatctcaaaaagcaaacaaacaacgaaaaacatactaaagcaataaataaaggcaggagayggacaagggttgctgggctgtacccagctcagggtgtaacagggcccctgtggctgcgagctgatggccagtcctctgtcagagctggtgggtcaatggt

SEQ ID NO: 31907 - DNA, 201 bp, Homo sapiens
gcaaaagaaaaaaaaggttctggtccaggatcattcatagcgttctacagttatttatctttagtctcctttaatctggaagggtttctcactcagtcttyccttgtcttttaatgacattaacatttttgaagggtacaggccagtccttttgtagaatgttcctcaatttgtctgatatttcttcataattagattcag

SEQ ID NO: 31908 - DNA, 201 bp, Homo sapiens
tctagaagctgcctgcattccttggctcacggcctcctcctcctcaagcctgcagcatagtaagctttgcatctttctctgacactttggaagaccaaggygggagtgcttgagcccaggatcagcttgggcaacacagtgagacttcatctctatagacaaattaacaaaattagctgggcaaggtaactcgctcctgta

SEQ ID NO: 31909 - DNA, 201 bp, Homo sapiens
ttcctcaatttgtctgatatttcttcataattagattcaggttatacatttttgttttgtttttgagacagagtttcgcccttgttgcccaggctggagtrcaatggcgtgatctcggctcactgcaacctctgcctcccaagttcaagcaattctcctgcctcagcctcccgagtagctgggattacaggcatgtatcac

SEQ ID NO: 31910 - DNA, 201 bp, Homo sapiens
tagtttttaaccatacattgtcccaaaagtgtctgtgcattgtgcaaaaagtaaacttaggaaacatttggtattaaataaatttacacttttctttgcartagtgcctttaatctggaaatacagtattacttaggatttgcagtacattttgcctgatagggcaagttttcattcttatttttaaaaaatgatagattg

SEQ ID NO: 31911 - DNA, 201 bp, Homo sapiens
tcgcccttgttgcccaggctggagtacaatggcgtgatctcggctcactgcaacctctgcctcccaagttcaagcaattctcctgcctcagcctcccgagyagctgggattacaggcatgtatcaccatgctcggctaatttttgtacttttagtagagacggggtttcactatgttggccaggctggtcttgaacacctg

SEQ ID NO: 31912 - DNA, 201 bp, Homo sapiens
gctgaggtgggtggatcacctgaggtcaggatatcaagaccagcctggccaacatggtgaaaccctgtctctactaaaaatacaaaaattggccgggtgtrgtggctcacacctgtaatcccagcaatttgggaggccgaagtgagtggatcacctgaggtcaggagttcaagaccagcctggccaacatggtgaaaaccc

SEQ ID NO: 31913 - DNA, 201 bp, Homo sapiens
gggctgggtggaagagatcaggctatgtggctatattaaaaatacaacaaaaggccgggcgcgggggctcacgcctgtaatcccagcactttgggaggccsaggctggcggatcatgaggtcaggagatcgagaccatcctggctaacacagtgaaaccccgtctctactaaaaatacaaaaaaaaaaaaaaaattagctg

SEQ ID NO: 31914 - DNA, 201 bp, Homo sapiens
ctgcagatccttggtgaaatatctttcaacaaatctctatatgagggactgaatgcagagaaccacagaactaaggtaattcctggctggcttctgagtastgcccaaggaaaattgtgcctaacctttgagcacctccacagacattctgttgccctcttcctgttttcagccttaacacttctgatcttggctctgcca

SEQ ID NO: 31915 - DNA, 201 bp, Homo sapiens
cctacttgggaggctgaggcacgagaatcgcttgaatctgggaggcagaggttgcagtgagccgagatcacaccactccactccagcctcagtgatagagygagactcagtctcaaaaaataaataaataaataaaaaatgaattacctaagtgagaaattgttttttgtatccagtaactgtcttagtgtgctgtatcag

SEQ ID NO: 31916 - DNA, 201 bp, Homo sapiens
tgaatctgggaggcagaggttgcagtgagccgagatcacaccactccactccagcctcagtgatagagtgagactcagtctcaaaaaataaataaataaawaaaaaatgaattacctaagtgagaaattgttttttgtatccagtaactgtcttagtgtgctgtatcagtgtttagttatagtattaaacagtactcagga

SEQ ID NO: 31917 - DNA, 201 bp, Homo sapiens
tagactagatactggaactcttggaattctttttgcaaaagtatgactagaagtcagactgatgcctgtgatttgtggactgaatgctttgtgtgttaccstgtgttttcattcttgttgacccttgcctggacatggcttcagaggtgatctatctgtgagctctgagctctttagttaggcatgattctctactagagg

SEQ ID NO: 31918 - DNA, 201 bp, Homo sapiens
cttcatctctatagacaaattaacaaaattagctgggcaaggtaactcgctcctgtaggcccagcaacttgtgaggctgaggtaggaggattgctgagccsgggaggtcaaggctgcagtgagctgtgatcacactactgcactccagcctggacaacagagcaagacactacctaaaaaacaaacaaaccccacaaaata

SEQ ID NO: 31919 - DNA, 201 bp, Homo sapiens
ggaagagatcaggctatgtggctatattaaaaatacaacaaaaggccgggcgcgggggctcacgcctgtaatcccagcactttgggaggccgaggctggcrgatcatgaggtcaggagatcgagaccatcctggctaacacagtgaaaccccgtctctactaaaaatacaaaaaaaaaaaaaaaattagctgggcgtggtg

SEQ ID NO: 31920 - DNA, 201 bp, Homo sapiens
ccccacaaaataacaggaggctattaccatcaacaaggcaggacgatgatggaaggagcatctggagaagagttgctttctagaaataatttggagagtcrggcacggtggctcatgcttgtaattccagcactttgggaggctgaggtgggtggatcacctgaggtcaggatatcaagaccagcctggccaacatggtga

SEQ ID NO: 31921 - DNA, 201 bp, Homo sapiens
aatcccagcactttgggaggccgaggctggcggatcatgaggtcaggagatcgagaccatcctggctaacacagtgaaaccccgtctctactaaaaatacaaaaaaaaaaaaaaaattagctgggcgtggtggcgggcagctgtagtcccagctactcgggagtctgaggcaggagaatggcgtgaacccgggaggcggag

SEQ ID NO: 31922 - DNA, 201 bp, Homo sapiens
aatctgttttcttgcctttttaggcttctagaagctgcttgcattccttggctgacgggctcctcctcctccttaggcctgcagcatagcaagcttcacawctttctccgactctgattctcctgcctccctcctagaaggacttttgtgattacactggggctttacagcccagccaggacagccctgggggcttctggg

SEQ ID NO: 31923 - DNA, 201 bp, Homo sapiens
cttcagcatcataggctatactgagtatttttgcataaataagattagatccagtacagccgaaattatcatgctttgcaaaataagttaaaaaggttcarctgctcgggagagcagggttcagaggaaggtggagtcagttctgattgagggatgagcaccagaggtcttgaaggattggactctccaggagagattcag

SEQ ID NO: 31924 - DNA, 201 bp, Homo sapiens
ttgggaggccgaggctggcggatcatgaggtcaggagatcgagaccatcctggctaacacagtgaaaccccgtctctactaaaaatacaaaaaaaaaaaaraaattagctgggcgtggtggcgggcagctgtagtcccagctactcgggagtctgaggcaggagaatggcgtgaacccgggaggcggagcttgcagtgagc

SEQ ID NO: 31925 - DNA, 201 bp, Homo sapiens
ccttttgccataaaaggcaacatattcacaggttctggggattaggacgtggccttctttggggggccattattctgcctacgatagcagatggagaggtrggaatttcagccgttataggtgtattgaagccatgggcttggaagggatcactagggagagtgtgccggcaaggaagacagtgacccagcccccagatcc

SEQ ID NO: 31926 - DNA, 201 bp, Homo sapiens
gaaagcggtctagagactcctgagtcctctgtgctggcttctgtgtgtttgctgtgagctcccttctagaaacccttccaaatggcagtcatcacactgtrttgtaattatctctttttcctactagatgatgagcttgatgtaggaagctgtacttgatctccttctgtcttcagcatcataggctatactgagtatttt

SEQ ID NO: 31927 - DNA, 201 bp, Homo sapiens
gggcgtggtggcgggcagctgtagtcccagctactcgggagtctgaggcaggagaatggcgtgaacccgggaggcggagcttgcagtgagcggagattgcrccactgcactccagcctgggcgacagagcgagactccgtctcaaaaaaaaaaaaaaaaaaaaaaaatacaacaaaaaaccctgcatgaaactgttgaccc

SEQ ID NO: 31928 - DNA, 201 bp, Homo sapiens
tactctgattttaatttgcaggtacatggggagaacctctttggagcagaataccagttgcaaatttgcgtcccaaccaaattacgaggtctccaggttgyagcagtgaagaagctgacgaggactcaggtatttaaaggcagttctttatcagtcacacctctttccacagtgactacagagtctcaagtataaaaacca

SEQ ID NO: 31929 - DNA, 201 bp, Homo sapiens
ggtgcatgccaccacacccagctaattttttaattttaattttgtggagatgaggtctccctatattgcccaggctggtctcaaactccggggctcgagcsatcttctcatcttggcctcccgaagtggtggggttacaggcataagcacctgaccttgcttttttctcccaacaagtcaaactattccctaaataggttc

SEQ ID NO: 31930 - DNA, 201 bp, Homo sapiens
atgaaccaccactcccagcctcttttttaaaaataaacaccagggtctttgtcccccaagctggagttcagtggcacagttaagggctcactgcagcctcstactcctaggctcaggtgatcctcccatcttagtctcctgagtaactgggactgttactcaggtgcatgccaccacacccagctaattttttaattttaa

SEQ ID NO: 31931 - DNA, 201 bp, Homo sapiens
gagagagcgccacgctttgacttctgcaaatggcatcccccttccgcaggaagtagaaagttccctttcaagccctgggctgtcattccccctctaggccrtgggaacagacctgcagacagctgccgaggtggccaccgggagagaagtgcgaagtgcagaggctctccagccgaggagctggctgccttccttcataat

SEQ ID NO: 31932 - DNA, 201 bp, Homo sapiens
ctgacacagtcctagcaacagaaatgatacctacagcgtattgcgtgcccaccctgtgcccggcagtcctctgagtcattctgttttcatcctcaaaaccrcgccatttataagagaggaagctacagttcagagaatgtaggtcttttggttgccagtatgacaaagttcacacttttagtgttggtggctgattcgaaa

SEQ ID NO: 31933 - DNA, 201 bp, Homo sapiens
cgcctcggcctcccaaagttctgggattacaggcatgaaccaccactcccagcctcttttttaaaaataaacaccagggtctttgtcccccaagctggagytcagtggcacagttaagggctcactgcagcctcctactcctaggctcaggtgatcctcccatcttagtctcctgagtaactgggactgttactcaggtgc

SEQ ID NO: 31934 - DNA, 201 bp, Homo sapiens
cctccatggggccttttgaaatgtggctttcagaattagtcgattatgtgtaggcaagggaaatagttagcttacagagacgactagccaggccgggcgcrgtggctcacacctgtaatcccaacactttggaaggccaaggtgggtggatgacctgaggtcaggagtttgagaccaacctggtcaacatggcgaaaccct

SEQ ID NO: 31935 - DNA, 201 bp, Homo sapiens
tatcctgaggctgacagtggggaggacgaggaaggagctaccatttctgcccctgaggctgggggcagtaagattccccaggatgggtctgtgaggctggsgggttccttggtccacacagccagtcccacggtatcttgcacattccttggcacttacatacccaccaggcagtgcttctccacccacctgcccgaccaa

SEQ ID NO: 31936 - DNA, 201 bp, Homo sapiens
ttttagtagagacggggtttcaccatattggccaggctggtctcaaactcctgaccttgtgatcctcccgcctcggcctcccaaagttctgggattacagkcatgaaccaccactcccagcctcttttttaaaaataaacaccagggtctttgtcccccaagctggagttcagtggcacagttaagggctcactgcagcct

SEQ ID NO: 31937 - DNA, 201 bp, Homo sapiens
tagtcataattatattataatggcaccagaattttaccattacttgaactaggaacagattcagtatatggaatcaagggaaactttcattttattaattwattaatttatttatttatttgagatagagtcttgctctttctcccaggctggagtgcagtagcatgatctcggctcactgcaacctccgcctcccaggtt

SEQ ID NO: 31938 - DNA, 201 bp, Homo sapiens
tttgaaatgtggctttcagaattagtcgattatgtgtaggcaagggaaatagttagcttacagagacgactagccaggccgggcgcggtggctcacacctrtaatcccaacactttggaaggccaaggtgggtggatgacctgaggtcaggagtttgagaccaacctggtcaacatggcgaaaccctttctctaataaaaa

SEQ ID NO: 31939 - DNA, 201 bp, Homo sapiens
gctggggggttccttggtccacacagccagtcccacggtatcttgcacattccttggcacttacatacccaccaggcagtgcttctccacccacctgcccraccaaacccactgaggaaaagcagcaggcatccgctgttgctggacgcccatcaccacgctcacaaggctgggcacagagcagacgtcaatgggcacgtg

SEQ ID NO: 31940 - DNA, 201 bp, Homo sapiens
accatgcctggctaattgttttgtatttttagtagagacggggtttcaccatattggccaggctggtctcaaactcctgaccttgtgatcctcccgcctcrgcctcccaaagttctgggattacaggcatgaaccaccactcccagcctcttttttaaaaataaacaccagggtctttgtcccccaagctggagttcagtg

SEQ ID NO: 31941 - DNA, 201 bp, Homo sapiens
cataattatattataatggcaccagaattttaccattacttgaactaggaacagattcagtatatggaatcaagggaaactttcattttattaattaattwatttatttatttatttgagatagagtcttgctctttctcccaggctggagtgcagtagcatgatctcggctcactgcaacctccgcctcccaggttcaat

SEQ ID NO: 31942 - DNA, 201 bp, Homo sapiens
agacgactagccaggccgggcgcggtggctcacacctgtaatcccaacactttggaaggccaaggtgggtggatgacctgaggtcaggagtttgagaccarcctggtcaacatggcgaaaccctttctctaataaaaatacaaagttagccaggcgtggtggcacatgcctgtaatcccagctacttgggaggctgaggca

SEQ ID NO: 31943 - DNA, 201 bp, Homo sapiens
accctttctctaataaaaatacaaagttagccaggcgtggtggcacatgcctgtaatcccagctacttgggaggctgaggcaggagaatcgcttgaatcckggaggcagagatggcagtgagccgagatcgcgccattgcactccagcctggatgacagagcgagactccatctgaaaacaaacaaacaaacaaccgaaaa

SEQ ID NO: 31944 - DNA, 201 bp, Homo sapiens
aggcacggggctcagggacatagagcagtgtagcggcgtgacagcctcacagtcctgtgttgagaccggattccgtgggaccctctttcaagctgtcagarcatctttaacagaaggtcataatctcctgacagacctagcccttctagataaggggccagaatagtttcttacgaagtatttgggtgattggatagtttt

SEQ ID NO: 31945 - DNA, 201 bp, Homo sapiens
tgtaatcccagcactttgggaggcagaggtaggcggatcatgaggtcaggagtttgagacaagcctggtcaacatggtaaaaccccgtctctactaaaaawacaaaaattagctgggcatggtggtgggcgcctgtaatcacagctactgggcaggctgaggcaggagaatcgctcaaactcgggaggcggagggtgcagt

SEQ ID NO: 31946 - DNA, 201 bp, Homo sapiens
tgggtctcaggaaggacatctcctgaactttctagctgagccctgccagaagagagattagactcccgaaattgggagagcctttggaaaacaaaacctgmggatgacttctaatagctgagctctgcaagtagtacacatggatataatttgcatttattatgtcccttaggtaatacacactttttagtctggtgaggg

SEQ ID NO: 31947 - DNA, 201 bp, Homo sapiens
ctcaatctgatctcaggagagataaagacacaggagtgagaactgccagttccaaggtttccgtgatgttccgggaagccaggagaagtgacatagtggaragccggcatgctgggagcctagtgacttggatcttaatcctgtctcacactgatggctgtatggcctccacatacttctgtgcccagggtcagagttccc

SEQ ID NO: 31948 - DNA, 201 bp, Homo sapiens; identical to SEQ ID NO: 6887

SEQ ID NO: 31949 - DNA, 201 bp, Homo sapiens; identical to SEQ ID NO: 6919

SEQ ID NO: 31950 - DNA, 201 bp, Homo sapiens
ctgtccttctggttctgtgcacccacacccctccccttcgggatcacgctgcctgctgcacccccctccctccctgtaccccctggccaactcccagctgraagatgagctggtgtcactgcaaaagaaactcaagggcaccgaagatgaactggacaaatactctgaggctctcaaagatgcccaggagaagctggagct

SEQ ID NO: 31951 - DNA, 201 bp, Homo sapiens
ttttgtagcatgaaaggcttgagatgtatatccaggtgtgctttgtaaatgagaactccagagacgacatttaggatctgacaaaaagaaattttcagtgraaatcaagcttcctggaaaggggatttggggggaagcactgatttcgctaaaacatttaaattctaaactacctggctttggaaaaagagccaaaaacca

SEQ ID NO: 31952 - DNA, 201 bp, Homo sapiens
ccaggcgtggtggcgggcgcctgtagtcccagctactagggaggctgaggcaggagattggcatgaacccgggaggtggagcttgcagtgagctgagatcrcgccactgcactccacgctgggggacagagcgagactaagtctcaaaaaacaaaaaaagcaagcagataaattctaaatcagtgttgagtggtgacaagt

SEQ ID NO: 31953 - DNA, 201 bp, Homo sapiens
ctgaatactgtcaacaattgtaacacaaatcaccaggcgataggaattttttagttctattgtaatcttatgaggctactctcatatatgcagcccctcaytgaccaaaacatcattatgcagtgcatgaccatattgagagtattcgttttttatttactaaaaaatagtcaaaacttgaggaggaagagacagatgtca

SEQ ID NO: 31954 - DNA, 201 bp, Homo sapiens; identical to SEQ ID NO: 6901

SEQ ID NO: 31955 - DNA, 201 bp, Homo sapiens
caaatagtcagatgctcgtgtgttctgagcccacctccactgtaatctggctgtagctgaattattactcagattcagctttgtggtagtaaaggaaagcrtggttcgtatagaccagcacagccttgtgtggtctaaaaggcattttcccttaagctcaactgttggaagtaaggatttgccatattgcatagaagtact

SEQ ID NO: 31956 - DNA, 201 bp, Homo sapiens
tgtaaaacacttttacatttttctactattattactaaaaacatttttctactactttacaaatcctattctggaagtgggctctacctagcttagaagaytgtcattcaggagtagtatccctgatggtcttgtttcgaattttgtgttgtctttccacctaagtcaaaagtgaggctgaaggggatcgaagactccatt

SEQ ID NO: 31957 - DNA, 201 bp, Homo sapiens; identical to SEQ ID NO: 6902

SEQ ID NO: 31958 - DNA, 201 bp, Homo sapiens
actgtataaatcaatgtgtaaatgtgtccgagaactccagagttgatgagggcttgtaatgcacttaaaggtagctcaccacaagacagtcttcctatctraaatcagcattgcagtcccagccatttcctgaagctaccaccctcactttctccccaactctgaaatgcttttcactctctacctaggctgaagccgacg

SEQ ID NO: 31959 - DNA, 201 bp, Homo sapiens
ggtcctggctttaacctcaaagcccctctgcctgtcctgctctgaaacctctggggcagtaggcattgacttctgggctagggagtaaatgttccgtgtcmttatgtgagcttcctattacccattagcattgttttatgaagttttcaattttatatcctgcctcatttcaaaaagattgtgataatcactttagcagat

SEQ ID NO: 31960 - DNA, 201 bp, Homo sapiens
cagatgatttgcattgcagcaactgttctcccagtcctggttaggatctgtgcctgaggccttttgtggggagttggggtgggggccggagaacatctcartctgatctcaggagagataaagacacaggagtgagaactgccagttccaaggtttccgtgatgttccgggaagccaggagaagtgacatagtggagagcc

SEQ ID NO: 31961 - DNA, 201 bp, Homo sapiens
acacttcaggcccccagtgagtgaggtggccgtgatgacgctcttgtttaacaggcaagtaaagccagggtgttgaactctacggaagtgggccgggcgcrgtggctcacgcctgtaatcccagcactttgagaggccaaggcaggtggataaggaggtcaggagattgagaccatcctggctaacacggtgaaaccccgt

SEQ ID NO: 31962 - DNA, 201 bp, Homo sapiens
aggggttactggattgtgttgggccttcatgtggtgtgtattttagaaccactgaattttaaactatttaagttcctttgtaaggatcctatgataaagtrgcttgaaggaaagagttgagtgaaactcttgagtccgatttctggctgtactgctattgtcttacatggctgagcctgggtaagtcttgtctcagttcac

SEQ ID NO: 31963 - DNA, 201 bp, Homo sapiens
taattttaatcctgctaggggatcccaggctttatcaggaagccaatcagtagcactgcgaagaaggaccaaaactcctctcccccagccacaaagaccckgacaaaagatctttggccggaagggagagttgggccctgtgtcttgtgaaaggaggctctcatgctgtcatggtgcaagtcatttcttcccagagtgacc

SEQ ID NO: 31964 - DNA, 201 bp, Homo sapiens
ttttttccacctttagctctggaaattgttgtttcctggtttggaaaataaaagtagctctgtgctctattttggtctaccacttacactaagcctcacargccacagcagtgcagtgtgcatttgggaagttcagctctaaatcttgggttttcttgcttgtctttcttttcagaggcatgaaagtcattgagagtcgag

SEQ ID NO: 31965 - DNA, 201 bp, Homo sapiens
agggccaggccatagctacagctgctctggtgggccaaaccaaaagcatcactgagtttgggcacttgaagtttcagacagctgggagtctccatagaacyggaagggaaaacacttccaaggatatgagcatgtcttgtccctgcctttgggccacccatgcacaccagctccacagcagctgaagcagagcagatccag

SEQ ID NO: 31966 - DNA, 201 bp, Homo sapiens
acttcctaattaaattgggaatgatgtggtgattgtggtcttgtttttagaagaacccatcttcttccaagtatgaattcaaagtaaggatttaggggttwttttaagtcatatattatcttaacaaaatactttatatcctgaaggaggagggaaaaattatacttaagcatttcttccctaaggcacttaggttttatt

SEQ ID NO: 31967 - DNA, 201 bp, Homo sapiens
ttccaagtatgaattcaaagtaaggatttaggggtttttttaagtcatatattatcttaacaaaatactttatatcctgaaggaggagggaaaaattatayttaagcatttcttccctaaggcacttaggttttattttagtaataaccactctatctcacagatatcctaaatgttgagctttgaagcttgtgaaggatt

SEQ ID NO: 31968 - DNA, 201 bp, Homo sapiens
tccctgtaccccctggccaactcccagctggaagatgagctggtgtcactgcaaaagaaactcaagggcaccgaagatgaactggacaaatactctgaggytctcaaagatgcccaggagaagctggagctggcagagaaaaaggccaccgatgtaagtgcacgctcacactgcttccctcacctcttgcctgcgtggcca

SEQ ID NO: 31969 - DNA, 201 bp, Homo sapiens; identical to SEQ ID NO: 6966

SEQ ID NO: 31970 - DNA, 201 bp, Homo sapiens; identical to SEQ ID NO: 6897

SEQ ID NO: 31971 - DNA, 201 bp, Homo sapiens
atagtcattgttttttcactttctgctaatataaaggccaattagattaagtctgtctatacaaaccattttcttttcagaatccgtttattttgtaaacrctgaactagagcagtgaactagaatgagtgaccttgagcactgtccttttgggaaattaagctaaactcaagtaaaactagaaggccatgccgtttgttg

SEQ ID NO: 31972 - DNA, 201 bp, Homo sapiens
taaaggccaattagattaagtctgtctatacaaaccattttcttttcagaatccgtttattttgtaaacgctgaactagagcagtgaactagaatgagtgrccttgagcactgtccttttgggaaattaagctaaactcaagtaaaactagaaggccatgccgtttgttgtacaggaacttctcaaaaaatatcaaaattt

SEQ ID NO: 31973 - DNA, 201 bp, Homo sapiens
gagctgaaggttctcagattcctttgattaaagactatgaccacagtttctaactacatttgcatttccaactctgtattgtggatccataagctgagaamgttgcttttattaaaattaggttggttttactcatcttactgagcccatactctgtgcagagaactgtgagttctctggatgtgagcagcttacagttca

SEQ ID NO: 31974 - DNA, 201 bp, Homo sapiens
actcagccacttgtgggaattgctgatctggacaatgcctagggatccttctagctaaaaaattgagaccctattttttggatttacagggcctcctcagraaggggcagccactctcaggtctgctgtgtgtgccctaccattcctcccactatatcacaaactggcacctagaaactggtctccatgcccagtcgttgc

SEQ ID NO: 31975 - DNA, 201 bp, Homo sapiens
tcttgcttgtctttcttttcagaggcatgaaagtcattgagagtcgagcccaaaaagatgaagaaaaaatggaaattcaggagatccaactgaaagaggcmaagcacattgctgaagatgccgaccgcaaatatgaagaggtcagatcctggggcccaaagccttgtggacacccagcagtggccttcaggaagccaggga

SEQ ID NO: 31976 - DNA, 201 bp, Homo sapiens
ggttttgttcatttagcattagtgaaacacctactatgtccaaagcactgtcctaagccctaaggttacaaagaagaagatgatcttgttcctgcccttayagaactcaccatctaatgagggagacagacatgtaaaggagaaatgtcagggatacaagttggccctttcactcctactgaccacagagcaattgtgcat

SEQ ID NO: 31977 - DNA, 201 bp, Homo sapiens
ctctctctggttcttccactaaatacaaatttgattttgtcagttatctcaccaacttgtctcacgttagtgtctcttgtattcttccactgcagtaaggmggtagatgcacagatcagccatcaaattgatggagttcttaggtttactttgttttcctggcagcccccacctttttagtacatgtctcatcctactgct

SEQ ID NO: 31978 - DNA, 201 bp, Homo sapiens; identical to SEQ ID NO: 20822

SEQ ID NO: 31979 - DNA, 201 bp, Homo sapiens
aaagaaagctgtgaattaaagtattttagtcatagtatggtggaattttagaatctggacaatgtctctcccttgagtttataaagacttccatgatttcmtgcttttcttttcttaaggctccttgggcctgcttctgactatgattccttcctcattcttttttaaattcagaataagagaagtgtacccttctctgag

SEQ ID NO: 31980 - DNA, 201 bp, Homo sapiens
gcagccaaaaaaggagccaaattatcgcacttcaaagttgttggatttggtcaccctgccttctgctgttgcgaggttggggggcagtgttcctggaaaamctaaacattttaatacctgatgatttggctactttaaggcagcccttcgtctctaggactcagttttcattttttcccatccctctcctttttctctcct

SEQ ID NO: 31981 - DNA, 201 bp, Homo sapiens
ttaaagatttagacaccacatacaactggtaaaggacgttttcttgagagttttaactatatgtaaacattgtataatgatatggaataaaatgcacattktaggacattttctaaatttggtggtcctgtcatttgtatgttcttaatttgtgaacttttgaacgtgtgactgacctgccttcccccacaaataggttct

SEQ ID NO: 31982 - DNA, 201 bp, Homo sapiens
ttggcactcccagagtggctgttaactggaatgtatactctcgatttccgctttcatatgtaggcaaggcagaggcactacaatgccttgttcatgtctgytctccctcattatacaaatatgcttcataaattatgggctttggcacacacaggaggttgtgtttatctgttatccatgggagtgccccttaatgtcatc

SEQ ID NO: 31983 - DNA, 201 bp, Homo sapiens
ccaaggtgtgtggatccttcaaaatgttggaatgaggctactttgcttgacatgattgattccagatcttgtgacccactagggttatgtttgcttttttycattatttaaagaaaaaggcaggatgaatcttcctttctgagtagtatccagcaaacaaggagacagggagttgtggccagaaggttcttaattagtaac

SEQ ID NO: 31984 - DNA, 201 bp, Homo sapiens
gggcggggggcttgaatgaagaggaagtgggcgggctggtaggcatgtttgatgggttaaagtggtatcagtggtagaagtctgaggtctcctcaccctgmtaagaaagagtatgtgtgaccctatgcaggagagccttgtattggctcctggcctagtgattgatgttagacacaaaagataaattttatgaagggcaca

SEQ ID NO: 31985 - DNA, 201 bp, Homo sapiens
gctggccacagaaacttcaagacctgaaatggtcctcttcagaggaaagctcaactagagaaagtttcagataaaatacaagcaggaataaggaaattaayaggcaaaagataattctcagtatttgctttataggacgagtcagcaaaagtcctgtggatatccctgaacttggctgggtggtaaactaattccgactcc

SEQ ID NO: 31986 - DNA, 201 bp, Homo sapiens; identical to SEQ ID NO: 6886

SEQ ID NO: 31987 - DNA, 201 bp, Homo sapiens; identical to SEQ ID NO: 6888

SEQ ID NO: 31988 - DNA, 201 bp, Homo sapiens
actgaagtacaaagccatcagcgaggagctggaccacgctctcaacgatatgacttccatgtaaacgttcatccactctgcctgcttacaccctgccctcwtgctaatgtaataaactcaccaccatgccttccttgctccctaatctccatctttgcactcttgtgttcaccctttttgtcataacctagaatagtcatt

SEQ ID NO: 31989 - DNA, 201 bp, Homo sapiens; identical to SEQ ID NO: 6889

SEQ ID NO: 31990 - DNA, 201 bp, Homo sapiens
gaagctaccaccctcactttctccccaactctgaaatgcttttcactctctacctaggctgaagccgacgtagcttctctgaacagacgcatccagctggytgaggaagagttggatcgtgcccaggagcgtctggcaacagctttgcagaagctggaggaagctgagaaggcagcagatgagagtgagaggtgagaatgc

SEQ ID NO: 31991 - DNA, 201 bp, Homo sapiens
aggcttgagatgtatatccaggtgtgctttgtaaatgagaactccagagacgacatttaggatctgacaaaaagaaattttcagtgaaaatcaagcttcctggaaaggggatttggggggaagcactgatttcgctaaaacatttaaattctaaactacctggctttggaaaaagagccaaaaaccatatatgactctgag

SEQ ID NO: 31992 - DNA, 201 bp, Homo sapiens
ggtttcccggcggcctgtgtctccgaggcggtagacagacattgacagcttgacagcgccgcgttctgctggaagagctaaactatagtgcaaaacccttmacccgtcccttttttcagcagtcctcctccccttttctctcatacagatagataatgctttgttaccaagtcttggaaaaagttggcgaaatgtcaacag

SEQ ID NO: 31993 - DNA, 201 bp, Homo sapiens
catttagaacaggaggtctaaccactgtgctctacacgcgggtggttttcacttcgtgaagttttggggaatgggggtagtgcttgggttataatcttgcrgttgggatcaggccctttagggcatattccggctccagacccgccgctcagcttctctggctcctgggcatgggaatctggactcgggagcggagcgctc

SEQ ID NO: 31994 - DNA, 201 bp, Homo sapiens
cctcctgcttccccccccgcaggccccggtccctcgtccccacgcctccagggcgcacctggcgcacctgggccagctggcggcgggctctggggaggggmccggcctgttctcctgagcctttgttttccatctcgctgatccaaagtaaacgctcccaggggaaacgggtggtgttgagaaggttctggaaggagcatt

SEQ ID NO: 31995 - DNA, 201 bp, Homo sapiens
ggggaatgggggtagtgcttgggttataatcttgcggttgggatcaggccctttagggcatattccggctccagacccgccgctcagcttctctggctccygggcatgggaatctggactcgggagcggagcgctcccgcggccagcaggagtcgctattgcccttagcagccagctccgttaccccgggtcaccaccgcg

SEQ ID NO: 31996 - DNA, 201 bp, Homo sapiens
cgagcatgcgcagtgcccccagccagtcccgggatccacggcgcgcgcccctcccagccgcgcgcgcccgcctgcggtttgtctgcgcagccctggaggcygcgacttccggactgctcctggccgcagggggcgccgccgtcgcacagagaggcctgggcggggcggaccggcgctgggcagccaggacagccgcggcag

SEQ ID NO: 31997 - DNA, 201 bp, Homo sapiens
caaatatgcttcataaattatgggctttggcacacacaggaggttgtgtttatctgttatccatgggagtgccccttaatgtcatcagtgttttttttttycccccctttccttaccatataagggcagaagtttagcttggctgtggtcacttggccttacacagcaagttgggtgaaaccttcttcgtataactacagt

SEQ ID NO: 31998 - DNA, 201 bp, Homo sapiens
gagaatcgcttgaacccgggaggtggaggttgcagtgagccgaggtcatgccactgcactccagcctgggagacagagctagactccatctcaaagaaaaaagaagaagaagaagaaagctaactcagtacactaagagtgatttacatgcctgcaaataatttgtgtctggggtcttgaccctccccaaatgccttgtta

SEQ ID NO: 31999 - DNA, 201 bp, Homo sapiens
agaatcgcttgaacccgggaggtggaggttgcagtgagccgaggtcatgccactgcactccagcctgggagacagagctagactccatctcaaagaaaaaagaagaagaagaagaaagctaactcagtacactaagagtgatttacatgcctgcaaataatttgtgtctggggtcttgaccctccccaaatgccttgttat

SEQ ID NO: 32000 - DNA, 201 bp, Homo sapiens
gcttcccacaggaaaggcaagaaatctcattatctttttaatagtaaagcatattggcttttccggtttcatactgccaagattcagacagattcctgacrtggtacctttcgtcatcattaatgttagatgcctgatagtttcatcagtactcaaagtgagagagttcattcacagtgaacagagagaaatgtgtctctt

SEQ ID NO: 32001 - DNA, 201 bp, Homo sapiens; identical to SEQ ID NO: 6912

SEQ ID NO: 32002 - DNA, 201 bp, Homo sapiens
atcacgctgcctgctgcacccccctccctccctgtaccccctggccaactcccagctggaagatgagctggtgtcactgcaaaagaaactcaagggcaccraagatgaactggacaaatactctgaggctctcaaagatgcccaggagaagctggagctggcagagaaaaaggccaccgatgtaagtgcacgctcacactg

SEQ ID NO: 32003 - DNA, 201 bp, Homo sapiens; identical to SEQ ID NO: 6916

SEQ ID NO: 32004 - DNA, 201 bp, Homo sapiens
atgggtggttttgagaagcagagttcctttgtgtccagaaaacggttctaattttaatcctgctaggggatcccaggctttatcaggaagccaatcagtarcactgcgaagaaggaccaaaactcctctcccccagccacaaagacccggacaaaagatctttggccggaagggagagttgggccctgtgtcttgtgaaag

SEQ ID NO: 32005 - DNA, 201 bp, Homo sapiens; identical to SEQ ID NO: 6918

SEQ ID NO: 32006 - DNA, 201 bp, Homo sapiens
ccctataattgagagatttgttatcctattaccctcacccttcaatacacacacacaccagaaacaacagtcatctgccagtaattcctagctgggtccakttaccagctgtgcactgataatgatttactttgtaggcactacagttgtaaatgctcttcctctgatttatttcacatttgccctgctccctgcctccat

SEQ ID NO: 32007 - DNA, 201 bp, Homo sapiens
ttcaatacacacacacaccagaaacaacagtcatctgccagtaattcctagctgggtccagttaccagctgtgcactgataatgatttactttgtaggcastacagttgtaaatgctcttcctctgatttatttcacatttgccctgctccctgcctccatcaaccaattactacatttttgtcaagataaaagtgtattt

SEQ ID NO: 32008 - DNA, 201 bp, Homo sapiens; identical to SEQ ID NO: 6905

SEQ ID NO: 32009 - DNA, 201 bp, Homo sapiens
tttcccatccctctcctttttctctcctccttcctttggcttgtctcccaccctttctgcctctgatcgaaaacattagcaaatgtgccgagcttgaagargaattgaaaactgtgacgaacaacttgaagtcactggaggctcaggctgagaaggtaggccaggaggatggtgtgggggaaaggcatcttttaagagctg

SEQ ID NO: 32010 - DNA, 201 bp, Homo sapiens; identical to SEQ ID NO: 6907

SEQ ID NO: 32011 - DNA, 201 bp, Homo sapiens; identical to SEQ ID NO: 6898

SEQ ID NO: 32012 - DNA, 201 bp, Homo sapiens; identical to SEQ ID NO: 6900

SEQ ID NO: 32013 - DNA, 201 bp, Homo sapiens
gggggtgggggtgatcggagggaagacacggatggattggtaggggccctttgggtaggaagatctcatgtgcaaggctggaatgaacatgaggtgctgtytccttcctttctggtgactcggctgtgtggggagctggggatagagacctgtcacccagagggttctttccccaaagcataaacagtcgtctttctgtga

SEQ ID NO: 32014 - DNA, 201 bp, Homo sapiens
gaatcgcttgaacccgggaggtggaggttgcagtgagccgaggtcatgccactgcactccagcctgggagacagagctagactccatctcaaagaaaaaagaagaagaagaagaaagctaactcagtacactaagagtgatttacatgcctgcaaataatttgtgtctggggtcttgaccctccccaaatgccttgttatt

SEQ ID NO: 32015 - DNA, 201 bp, Homo sapiens
ggtggtggcaaaggggattgtttatttatagtacagattcctgccctccccctttgacctcctgaatcagaatctctagggacacggcctggaagtttgatttttttttttttttttttgtttttgagacaagagtcttgctctgtcgcccaggctggagtgcagtggcatgatctcggctcactgcagtctctgcctccc

SEQ ID NO: 32016 - DNA, 201 bp, Homo sapiens
gtttatttatagtacagattcctgccctccccctttgacctcctgaatcagaatctctagggacacggcctggaagtttgatttttttttttttttttttgtttttgagacaagagtcttgctctgtcgcccaggctggagtgcagtggcatgatctcggctcactgcagtctctgcctcccgggttcaagcaattctcct

SEQ ID NO: 32017 - DNA, 201 bp, Homo sapiens
ctgaaagttttttttttaatgctcatctctgagttgattctgacactcagccacttgtgggaattgctgatctggacaatgcctagggatccttctagctaaaaaattgagaccctattttttggatttacagggcctcctcagaaaggggcagccactctcaggtctgctgtgtgtgccctaccattcctcccactatat

SEQ ID NO: 32018 - DNA, 201 bp, Homo sapiens
aatagaattttactggaaaatgaaaatatagaaaagtgaagaaatcttacctgacccaaaagtatatccttaatatatacatccttccagtaatagtaataaaaaaaaaaaagcctaatggtttttaaaagacacttccctataattgagagatttgttatcctattaccctcacccttcaatacacacacacaccagaaa

SEQ ID NO: 32019 - DNA, 201 bp, Homo sapiens
atagaattttactggaaaatgaaaatatagaaaagtgaagaaatcttacctgacccaaaagtatatccttaatatatacatccttccagtaatagtaataaaaaaaaaaaagcctaatggtttttaaaagacacttccctataattgagagatttgttatcctattaccctcacccttcaatacacacacacaccagaaac

SEQ ID NO: 32020 - DNA, 201 bp, Homo sapiens
gcgcgcgcccctcccagccgcgcgcgcccgcctgcggtttgtctgcgcagccctggaggctgcgacttccggactgctcctggccgcagggggcgccgccrtcgcacagagaggcctgggcggggcggaccggcgctgggcagccaggacagccgcggcagccgggtccgcagggcagcagccggcctctcccactgcagc

SEQ ID NO: 32021 - DNA, 201 bp, Homo sapiens
cccagcacttcgggaggctgaggcgggcggatcatgaggtcaggagattgagaccattctggctaacacggtgaaaccccatctctactaaaaaaaatacaaaaaaaattagccaggcgtggtggcgggcgcctgtagtcccagctactagggaggctgaggcaggagattggcatgaacccgggaggtggagcttgcagt

SEQ ID NO: 32022 - DNA, 201 bp, Homo sapiens
acggtgaaaccccatctctactaaaaaaaatacaaaaaaaattagccaggcgtggtggcgggcgcctgtagtcccagctactagggaggctgaggcaggasattggcatgaacccgggaggtggagcttgcagtgagctgagatcacgccactgcactccacgctgggggacagagcgagactaagtctcaaaaaacaaaa

SEQ ID NO: 32023 - DNA, 201 bp, Homo sapiens
aaattagccaggcgtggtggcgggcgcctgtagtcccagctactagggaggctgaggcaggagattggcatgaacccgggaggtggagcttgcagtgagcygagatcacgccactgcactccacgctgggggacagagcgagactaagtctcaaaaaacaaaaaaagcaagcagataaattctaaatcagtgttgagtggt

SEQ ID NO: 32024 - DNA, 201 bp, Homo sapiens
gctttttttcattatttaaagaaaaaggcaggatgaatcttcctttctgagtagtatccagcaaacaaggagacagggagttgtggccagaaggttcttamttagtaacatgattaaatcatgggaaataaccaatttacaaaaattcccagcactttccctctttacacttggtaagtatttccgggataggaaaaccga

SEQ ID NO: 32025 - DNA, 201 bp, Homo sapiens
tggtcatgtgtctatgggcttgtaccggcagaggcaacagcaggtccttaagactccccaggtgccatgatgaaaagaaccttagaaaatattgaaataakctcaaaacttaaaaaaaaaaataccagaaataaaagctagtaaaggtgagaggtgtggggcttttggaacatagagcataataaatcagaataaaaagta

SEQ ID NO: 32026 - DNA, 201 bp, Homo sapiens
tgaagccaactggattttaaatgagtttgttttcatggaaccggtcagggccttttcattttaaagttccaatgatccaagtcaggaatattcaaaggtcrccttggagtttatgtactgtgctaactgccatttctcacagaggtgactgaaactgacaagtagtttctgatccattttataggtgatgtgcttcatttt

SEQ ID NO: 32027 - DNA, 201 bp, Homo sapiens
ctaggggtaggtctgttagcttttcaagatcatgaagtatttttaggtccaagttgtcaccagcattcaaagccaccgtgcatcctccagctgttcccagygcataccgggctcttgcttgtcatagcttggatgtcccctggatcatcagatacagactgactcctgcacttgttttcccccgtaagcagatcacgtgtc

SEQ ID NO: 32028 - DNA, 201 bp, Homo sapiens
ctgacagacccgggggctgcaggcacattttccctaggggtaggtctgttagcttttcaagatcatgaagtatttttaggtccaagttgtcaccagcattsaaagccaccgtgcatcctccagctgttcccagtgcataccgggctcttgcttgtcatagcttggatgtcccctggatcatcagatacagactgactcctg

SEQ ID NO: 32029 - DNA, 201 bp, Homo sapiens
ccattctgagtcaaagcagaagcctctgatctcctctctgctggcactcctaatagagagttgcttctctctggtctaccagaaagaggatcatattgttygtagacaaaacccttagggcctgatgggatctgatctctacccccatgcccttctgttacacaaagcttgcaagacccatggtgtgtgtgttgtgtcttc

SEQ ID NO: 32030 - DNA, 201 bp, Homo sapiens
gaggagtgaagcgagtccgaactaataggcatgtgtatttggaggcaacaaggaagagagaaccattctgactgggagctccctggaggaggtagcggacrtttgactggggtttggcatattcaaaaaatgtggatgagcaaagaggacagagcagcagatattccaagcgagaaaacataacgagcatagcatcctccc

SEQ ID NO: 32031 - DNA, 201 bp, Homo sapiens
tgcactcttgtgttcaccctttttgtcataacctagaatagtcattgttttttcactttctgctaatataaaggccaattagattaagtctgtctatacaraccattttcttttcagaatccgtttattttgtaaacgctgaactagagcagtgaactagaatgagtgaccttgagcactgtccttttgggaaattaagct

SEQ ID NO: 32032 - DNA, 201 bp, Homo sapiens
accgtgcatcctccagctgttcccagtgcataccgggctcttgcttgtcatagcttggatgtcccctggatcatcagatacagactgactcctgcacttgttttcccccgtaagcagatcacgtgtcagtgtgtaaaatgtatatcacgctggtcttcatgtaggtgttgcaagtttcgttcattttatacacatccatta

SEQ ID NO: 32033 - DNA, 201 bp, Homo sapiens
tggaacccccaagcatatgtcacgtgcaaaacaccgtgggaagcagtgggggtgtggtaaagagatgggctggaaaggctctttgtcctcaataagctggscatctgatggggagatagaggagtgaagcgagtccgaactaataggcatgtgtatttggaggcaacaaggaagagagaaccattctgactgggagctccc

SEQ ID NO: 32034 - DNA, 201 bp, Homo sapiens; identical to SEQ ID NO: 7065

SEQ ID NO: 32035 - DNA, 201 bp, Homo sapiens
gaagtctgcgagcttccgggaagtaagtgaaacctgtaattgaaatggctggatcccaaacaagtaatgaagtcactttcaaagcagttctctacaattcwacagttcataaaagcagagttggaattccacaccagctccctagggctggccttgcgtaacagctgcccttcctgtaccctctggggcttcctcctcttc

SEQ ID NO: 32036 - DNA, 201 bp, Homo sapiens
aaccctgatttaagggtcaatttccttggaagagaggaaaaccagccaagctgtcgtaggaaatcttcttcttttacgtgagggtggagttgcaccacttmttttcagagagtactaggcaggacttacgatgtatgactcaaagagcagaaaaagacctcacaaaccctaacacctctccttctagcccagaaattcacc

SEQ ID NO: 32037 - DNA, 201 bp, Homo sapiens
tcaataagctgtttggtgagaagtctgcgagcttccgggaagtaagtgaaacctgtaattgaaatggctggatcccaaacaagtaatgaagtcactttcaragcagttctctacaattcaacagttcataaaagcagagttggaattccacaccagctccctagggctggccttgcgtaacagctgcccttcctgtaccct

SEQ ID NO: 32038 - DNA, 201 bp, Homo sapiens
ggctttttaattatacatgcccagactccaacgttggctctaccacttatttcaaagggctgtaaatattgagacatggcacggttcctggcccatagtamgaactaaacaagtgttttagaattatggttgtcattaccattgttgtccatcttactaaataatgggtataaagttgaacaagctaataacatcagagta

SEQ ID NO: 32039 - DNA, 201 bp, Homo sapiens
catcaggtcattgccacagaaagaggtggtaactccaaggtgttgccatcacaatggtaaactgacatggtacactgcttccatcctgtccctggtccccrttttagctagccctcaatttggcctggtgtctaaaacctgcctccagagtcaggtcccacctcctacttcaaaaccacattgacctattaatttgttaag

SEQ ID NO: 32040 - DNA, 201 bp, Homo sapiens
aatgaatacattgaagatgaaactgatgcaaggcaggcaagctccaaagtggggcttagccttcaagggttcttggcttcacccaggaaagtattcaaggrtgagctggaggtagggtagaagaaaacagctttattgaagtggcagtattacagctccatgattcctcctgcagagaagggctaccccaggcactgtgct

SEQ ID NO: 32041 - DNA, 201 bp, Homo sapiens
agcatctcgtccaccatggccatggtctacatgggctccaggggcagcaccgaagaccagatggccaaggtgagtttgagctgaagctccacatttgggcygagtagttcctgaatggaattggagaactgctcttgttttatgctaaagacattttaactcaggaggtcagcaatcatcacaggtaatgaagcactgatc

SEQ ID NO: 32042 - DNA, 201 bp, Homo sapiens
tctcgtccaccatggccatggtctacatgggctccaggggcagcaccgaagaccagatggccaaggtgagtttgagctgaagctccacatttgggccgagkagttcctgaatggaattggagaactgctcttgttttatgctaaagacattttaactcaggaggtcagcaatcatcacaggtaatgaagcactgatcctta

SEQ ID NO: 32043 - DNA, 201 bp, Homo sapiens
tcctcctgggtacttccagcccctccccagttcggggaaggcactgtcataagaaggtttcctgagggatgatcagtatcagcattgtttggtatatttayatattttgataattatcgggtatgttgcaagctatgatgaaagcaaaacatacagctggaaagacgatcattggtcaggaccaaaaaacacacacacctt

SEQ ID NO: 32044 - DNA, 201 bp, Homo sapiens
caaatttttgagccatccaatgtaatctagtatctatgatgaagcaagagaaaaaaaaaagtgactttttgtttttacttcctaataagccttctagtagrattacaggtttactacttttttcttttgacttcctctttctagcatttcttgcactacaacttgcttaagctcttacacttcatagtgaagctatgcacc

SEQ ID NO: 32045 - DNA, 201 bp, Homo sapiens
tctttagagttaaatatttttactatcaaagttactatgtggattgttacaaagaatccggtatgaattgttacaaagaatcacgtatttaggtatgggaraagtctaaatttatgtttgtggctctgatctcttatttacatttctcacatggggatcgagaaatattttatttgtgttattaatactcagtttgtttcc

SEQ ID NO: 32046 - DNA, 201 bp, Homo sapiens
gagtaactaaacaactcaggcaaacccttaactgtctctttctgtctttttattgagacttctgacaaaaataagcctgaaagaaagagtatacatgcttktgaaactgaatcaaagggtggagctaagaacagggaggtgctaaaattttttttttttttttaatttcttcagttgaaagtttctcaactcttcagccac

SEQ ID NO: 32047 - DNA, 201 bp, Homo sapiens
aatacaacaaaaattccttagagactttgaagtttaggaaactgagaaggggcctttcttctaggctgttggtcacctggttaaatccaatccatagacasagcaaaattggaaagaaattaaaattcaccttattagttttaatgtaccacatccttatcgaaatgattttctcaaagattcctctaatgtaccaaaaat

SEQ ID NO: 32048 - DNA, 201 bp, Homo sapiens
tgtacaataaatctatttaattatgaagacaattttaagaggaagaggaacaaatttttgagccatccaatgtaatctagtatctatgatgaagcaagagaaaaaaaaaagtgactttttgtttttacttcctaataagccttctagtagaattacaggtttactacttttttcttttgacttcctctttctagcatttct

SEQ ID NO: 32049 - DNA, 201 bp, Homo sapiens
gtgacctcatcctcccccaaaatttcttaaaccatgcctttacaaacaagtatttctattctaatgatgtcttcctgagtaaaatgttgaatcactcaaargacacagatcaaaagacagagggagaaaaaaaaatgccatgtgggaggggcaaagctgtataaaaccagtcattaccatgtctgaactgtaacaactctc

SEQ ID NO: 32050 - DNA, 201 bp, Homo sapiens
cgatgtgtccactggcttggagctggtaagacattcagatatttaagtttctggggctatacctacctttcgtgagatgagatgaatatatactccttacaaatggtgtggtaatttctcatggaaatatatgaaacagttgatagtaaatatggcatgcctctacatttcattcaaagccttaactatgtcatacgtgtt

SEQ ID NO: 32051 - DNA, 201 bp, Homo sapiens
ttttattgagacttctgacaaaaataagcctgaaagaaagagtatacatgcttgtgaaactgaatcaaagggtggagctaagaacagggaggtgctaaaattttttttttttttttaatttcttcagttgaaagtttctcaactcttcagccacaatctcttactacaggagcaaattgccaattctgctccagtgggaga

SEQ ID NO: 32052 - DNA, 201 bp, Homo sapiens
aaacagttttattaactataactattaatgaacacaatcttattaactatagtcattatactgtacattagatccccagaacttatccatcttataaatayaacaaaaattccttagagactttgaagtttaggaaactgagaaggggcctttcttctaggctgttggtcacctggttaaatccaatccatagacagagca

SEQ ID NO: 32053 - DNA, 201 bp, Homo sapiens
gggcctttcttctaggctgttggtcacctggttaaatccaatccatagacagagcaaaattggaaagaaattaaaattcaccttattagttttaatgtacyacatccttatcgaaatgattttctcaaagattcctctaatgtaccaaaaataaagtatgtattaatatagcatttcatgattgtattcaaaaactattac

SEQ ID NO: 32054 - DNA, 201 bp, Homo sapiens
cctcatgctgttttctataagggaaatttaggttggctgatacttttatattacacagaaagagtattgagtatctatggttgttccccatgtataagggmagggaaaagatctaggaccattttagagccacctgatagccatctgttttaaaagttcagtaaatccgtgggcaagtgtaaccgttttctctaattctga

SEQ ID NO: 32055 - DNA, 201 bp, Homo sapiens
caagcagctattttggcagattgttttaccagcttttgtaagaattggagagaattgtctgtttcatcatgctatgatcaaatactagttttatcatatayatcacaacattactataccccaatactaaccaaaaattttaatagcttgggaaatatattgaatgtatatattaaatgaatacattgaagatgaaactga

SEQ ID NO: 32056 - DNA, 201 bp, Homo sapiens
tcagttattttgccaaaatgccaagcagctattttggcagattgttttaccagcttttgtaagaattggagagaattgtctgtttcatcatgctatgatcraatactagttttatcatatacatcacaacattactataccccaatactaaccaaaaattttaatagcttgggaaatatattgaatgtatatattaaatga

SEQ ID NO: 32057 - DNA, 201 bp, Homo sapiens
aaacaagtaatgaagtcactttcaaagcagttctctacaattcaacagttcataaaagcagagttggaattccacaccagctccctagggctggccttgcrtaacagctgcccttcctgtaccctctggggcttcctcctcttcccattgcaaatgtcccaatctcagagtcataaatcaggaaaacaaatgcaactgttt

SEQ ID NO: 32058 - DNA, 201 bp, Homo sapiens
acagagggagaaaaaaaaatgccatgtgggaggggcaaagctgtataaaaccagtcattaccatgtctgaactgtaacaactctcagaggagcattgcccrtcagacagcaactcagagaataaccagagaacaaccaggtatttcaatgatttccatgccatgtctatgggaaatagggtttcatgttttctcttccctc

SEQ ID NO: 32059 - DNA, 201 bp, Homo sapiens
ggaaggaagcgaatataccctcccccattcacagaaagaaaactaagactcagagtcattaagaaaaacatgtcctaagatgatacccataacgagagacragccaggacagaatccagacttcatgagttttaggccaagcctatttacttctaaattctctcatgcctctctgtcattggtgaggtatgtgtaatttat

SEQ ID NO: 32060 - DNA, 201 bp, Homo sapiens
aattgattgagaaatggcagaaggctgggcccaatgattgcatgagaaatcactgaccttcaggtaactttccttctatctatctaatctatcatctatcrttgatctctctcatctatcttacctatcatacatctatcaatcctatctatctatatattttatgaatcatctatttatcatctatcttctctgtcatct

SEQ ID NO: 32061 - DNA, 201 bp, Homo sapiens
tcacaggctcctgcctccctctgtatattttacaatgaataaattatttaattgaatcatttattcattgtaatttagtttattaagtcatttattcattraattcattcattcattaagttctattaagttcattcacttagtcaacaaatatttatccaccacacaccatattccagaaactatatgtggagataaaga

SEQ ID NO: 32062 - DNA, 201 bp, Homo sapiens
tatattttacaatgaataaattatttaattgaatcatttattcattgtaatttagtttattaagtcatttattcattgaattcattcattcattaagttcwattaagttcattcacttagtcaacaaatatttatccaccacacaccatattccagaaactatatgtggagataaagataaaaatggtaaatcctgccacc

SEQ ID NO: 32063 - DNA, 201 bp, Homo sapiens
atatataaagaattccttctttcttttcaaggcacaagctgcagataaaatccattcatccttccgctctctcagctctgcaatcaatgcatccacagggrattatttactggaaagtgtcaataagctgtttggtgagaagtctgcgagcttccgggaagtaagtgaaacctgtaattgaaatggctggatcccaaacaa

SEQ ID NO: 32064 - DNA, 201 bp, Homo sapiens
ttacaatgaataaattatttaattgaatcatttattcattgtaatttagtttattaagtcatttattcattgaattcattcattcattaagttctattaasttcattcacttagtcaacaaatatttatccaccacacaccatattccagaaactatatgtggagataaagataaaaatggtaaatcctgccaccatagag

SEQ ID NO: 32065 - DNA, 201 bp, Homo sapiens
ttgtacatgttcaagatgtacagtgtgatgacttgctatacctatacattgtgaaatgattacagtcaaattaatgagcacatccatcactacaattaccyaccatttgtatgtatgtgtgtatgtatagtgaggacacttaaaaaatatattcttcacaaatttcaagtaaacagttttattaactataactattaatga

SEQ ID NO: 32066 - DNA, 201 bp, Homo sapiens
ctgaatgacagaacactggatttttgttcagatagcctatcaacttggcatctgtgttgcggttgtcacttggtaacaagataagtacttcgacagaggtrttacactccctaacaaagctgacttcatgtgcagactttctcacactcatagctggcccagggccacttcttaaaataggtgaggtttgttttctttgcc

SEQ ID NO: 32067 - DNA, 201 bp, Homo sapiens
aatggtaaatcctgccaccatagagcctatagaggagggattcagtcatgttggcaattgctatagagtagtagtcagtgctttcattgagaagtacaggygctatgtgggagtacacaggaaaggcatctgactggatttaaaaatgattaaattgtaattgggaagacaggctggagctggccaggtggagggtgcatg

SEQ ID NO: 32068 - DNA, 201 bp, Homo sapiens
ttaatgaagtgggagccaatgcagttacccccatgactccagagaactttaccagctgtgggttcatgcagcagatccagaagggtagttatcctgatgcvattttgcaggtatctgacttactggtccaaatttcttttgtggtttatttttgcaatcttcctgtcttaaagccacagtgtcagactgggaaggaagcga

SEQ ID NO: 32069 - DNA, 201 bp, Homo sapiens
ccatgttttccactgcatagtttgccccataaaataggtatctagagaagctatatgaactttgtaagatcattactaaggcaacatttcctccctgccarctttactgaggtataatggacaaataaaaattgtacatgttcaagatgtacagtgtgatgacttgctatacctatacattgtgaaatgattacagtcaaa

SEQ ID NO: 32070 - DNA, 201 bp, Homo sapiens
tggtaaatcctgccaccatagagcctatagaggagggattcagtcatgttggcaattgctatagagtagtagtcagtgctttcattgagaagtacaggtgytatgtgggagtacacaggaaaggcatctgactggatttaaaaatgattaaattgtaattgggaagacaggctggagctggccaggtggagggtgcatgcc

SEQ ID NO: 32071 - DNA, 201 bp, Homo sapiens
gggtagttatcctgatgcgattttgcaggtatctgacttactggtccaaatttcttttgtggtttatttttgcaatcttcctgtcttaaagccacagtgtyagactgggaaggaagcgaatataccctcccccattcacagaaagaaaactaagactcagagtcattaagaaaaacatgtcctaagatgatacccataacg

SEQ ID NO: 32072 - DNA, 201 bp, Homo sapiens
aaggatttccagaggagagagggtagggactgacaattgattgagaaatggcagaaggctgggcccaatgattgcatgagaaatcactgaccttcaggtawctttccttctatctatctaatctatcatctatcattgatctctctcatctatcttacctatcatacatctatcaatcctatctatctatatattttatga

SEQ ID NO: 32073 - DNA, 201 bp, Homo sapiens
tgacagtgaaaatccttcattcttctgaatttccaggtagagttgtaggccttaagtaaacaattgctgaataataacatataaatgtatttctaagaaayagagatgattatgaattcagaattgtgtaagtatttcattcatttatgatctgttaggattgaaaatgtcctaagagagctcctatccatcttaccaatt

SEQ ID NO: 32074 - DNA, 201 bp, Homo sapiens
ataaggtttaattttgaatctcagaagccaacaaatacctttgtagcattaaccaaaacaaaatgtacattcagattgtgatgccaattttattgaacagrttagattatatatgttctctactagctactgttttgacactaaatttgatggaaacaactagatacattaaaatattttcatttaagcaattgaatgtaa

SEQ ID NO: 32075 - DNA, 201 bp, Homo sapiens
tcagactgggaaggaagcgaatataccctcccccattcacagaaagaaaactaagactcagagtcattaagaaaaacatgtcctaagatgatacccataaygagagacgagccaggacagaatccagacttcatgagttttaggccaagcctatttacttctaaattctctcatgcctctctgtcattggtgaggtatgtg

SEQ ID NO: 32076 - DNA, 201 bp, Homo sapiens
ctcaactgtagctgttgaaggcatatgggagttgaatagcctgcaaggctggagacagttatgagtgaccacatcttatattttaataatataatattctyatttttcaaagttagtgttttgtacccattatctcattcagttttaagacagatatcattttacagatgagagccctggtggtgtcagagaagcccccac

SEQ ID NO: 32077 - DNA, 201 bp, Homo sapiens
aacagctttattgaagtggcagtattacagctccatgattcctcctgcagagaagggctaccccaggcactgtgctgagaggcacagctcagggcagtttkggggtcatatttatacctacttttaattacatgtagattaaggggcagtttacgcagaaatttctagggaacggggaataacttttgggtcatcaggtca

SEQ ID NO: 32078 - DNA, 201 bp, Homo sapiens
tgcaactgttttccagagacactatcccccaagtcaaacctctttccttttattctgtctctataatgcaaggagtacaagagggtggatagagttggggwgtaagcgtggacaaaggggtctgcactctttcccccttcagcacctgccttccatagccaacctccactcccaccctaccccaggtctcctaatttcaat

SEQ ID NO: 32079 - DNA, 201 bp, Homo sapiens
gtttggtatgtattttatgtagcctttgtcattttcttgctttaaaggaatatattcgactctgtcagaaatattactcctcagaaccccaggcagtagayttcctagaatgtgcagaagaagctagaaaaaagattaattcctgggtcaagactcaaaccaaaggtaaatccaagaaaatattttatttacttctttcca

SEQ ID NO: 32080 - DNA, 201 bp, Homo sapiens
cagacagggaatctgtccctacacagaatgcagcctgtcctactgttgctgacctcacccaaaatgttaccttatgtttcagagctgtttttttcttcctstctttgcttctagattgaaacaatggaggatctttgtgtggcaaacacactctttgccctcaatttattcaagcatctggcaaaagcaagccccacccag

SEQ ID NO: 32081 - DNA, 201 bp, Homo sapiens
ggattttcatttaactcttatgtttaagacattgtttcaagaaatagtttggtgtcttgctttattaattaccacaatggaaaatgcacataaactaagtkctatgggatttcaaaaaatatatatttatttgtttatctgaaaataattgatttccttttagttcttcattttcattgtggatttgtgaaatactgttct

SEQ ID NO: 32082 - DNA, 201 bp, Homo sapiens
aaggctgtggtatgtgtggtgcatatagggaaggggttctgggataggggctgggtgaaactccaaaccttcaaacaatgagtcaaagtcactttagaagyaggaaagcagaaagaagattgaccgtcttaccagatgcaacaaggtatgtatgcaggtggcatatatttcaatatgtgtatatcttcctgtgtggcagtg

SEQ ID NO: 32083 - DNA, 201 bp, Homo sapiens
tcaaagcagttctctacaattcaacagttcataaaagcagagttggaattccacaccagctccctagggctggccttgcgtaacagctgcccttcctgtaycctctggggcttcctcctcttcccattgcaaatgtcccaatctcagagtcataaatcaggaaaacaaatgcaactgttttccagagacactatcccccaa

SEQ ID NO: 32084 - DNA, 201 bp, Homo sapiens
atgttcttgttgcttccagatgaaattgccgatgtgtccactggcttggagctggtaagacattcagatatttaagtttctggggctatacctacctttcgtgagatgagatgaatatatactccttacaaatggtgtggtaatttctcatggaaatatatgaaacagttgatagtaaatatggcatgcctctacatttca

SEQ ID NO: 32085 - DNA, 201 bp, Homo sapiens
tgttcttgttgcttccagatgaaattgccgatgtgtccactggcttggagctggtaagacattcagatatttaagtttctggggctatacctacctttcgtgagatgagatgaatatatactccttacaaatggtgtggtaatttctcatggaaatatatgaaacagttgatagtaaatatggcatgcctctacatttcat

SEQ ID NO: 32086 - DNA, 201 bp, Homo sapiens
gttcttgttgcttccagatgaaattgccgatgtgtccactggcttggagctggtaagacattcagatatttaagtttctggggctatacctacctttcgtgagatgagatgaatatatactccttacaaatggtgtggtaatttctcatggaaatatatgaaacagttgatagtaaatatggcatgcctctacatttcatt

SEQ ID NO: 32087 - DNA, 201 bp, Homo sapiens
catctcgtccaccatggccatggtctacatgggctccaggggcagcaccgaagaccagatggccaaggtgagtttgagctgaagctccacatttgggccgmgtagttcctgaatggaattggagaactgctcttgttttatgctaaagacattttaactcaggaggtcagcaatcatcacaggtaatgaagcactgatcct

SEQ ID NO: 32088 - DNA, 201 bp, Homo sapiens
ttcttgttgcttccagatgaaattgccgatgtgtccactggcttggagctggtaagacattcagatatttaagtttctggggctatacctacctttcgtgagatgagatgaatatatactccttacaaatggtgtggtaatttctcatggaaatatatgaaacagttgatagtaaatatggcatgcctctacatttcattc

SEQ ID NO: 32089 - DNA, 201 bp, Homo sapiens
acggttcctggcccatagtaagaactaaacaagtgttttagaattatggttgtcattaccattgttgtccatcttactaaataatgggtataaagttgaayaagctaataacatcagagtacccactgtaaggatgtacaaataatttattttgttgatttaaaaaaatcacatttatcctacactaaagtagaaccaatc

SEQ ID NO: 32090 - DNA, 201 bp, Homo sapiens
tagaaaaaagattaattcctgggtcaagactcaaaccaaaggtaaatccaagaaaatattttatttacttctttccagttagaaaactctgatctatcttkttccatccatgaacttagttagccctcacccctttacaatttgtccaactgcagttactttggtggatgtgaatttattcctgattagctcagtggtgtt

SEQ ID NO: 32091 - DNA, 201 bp, Homo sapiens
aacccatgttttccactgcatagtttgccccataaaataggtatctagagaagctatatgaactttgtaagatcattactaaggcaacatttcctccctgycagctttactgaggtataatggacaaataaaaattgtacatgttcaagatgtacagtgtgatgacttgctatacctatacattgtgaaatgattacagtc

SEQ ID NO: 32092 - DNA, 201 bp, Homo sapiens
cttgttgcttccagatgaaattgccgatgtgtccactggcttggagctggtaagacattcagatatttaagtttctggggctatacctacctttcgtgagatgagatgaatatatactccttacaaatggtgtggtaatttctcatggaaatatatgaaacagttgatagtaaatatggcatgcctctacatttcattcaa

SEQ ID NO: 32093 - DNA, 201 bp, Homo sapiens
acattttaactcaggaggtcagcaatcatcacaggtaatgaagcactgatccttacaacacaaattccttagattcaaatctataagacagccaagccccmgaatccctcaactgtagctgttgaaggcatatgggagttgaatagcctgcaaggctggagacagttatgagtgaccacatcttatattttaataatataa

SEQ ID NO: 32094 - DNA, 201 bp, Homo sapiens
ctgggcactctgaagctccttctacccattgcccagggaattatgggctagaggaggtggacaggatcctgatcatgtggagattccgccaggtgttctgyggtacctggcagtccatcaggagggctctgtcccctgccctaggacaggctgctgctgtgaccaagccctgtgtctgacatggtgcttacaaacttcagt

SEQ ID NO: 32095 - DNA, 201 bp, Homo sapiens
ttcttgctttaaaggaatatattcgactctgtcagaaatattactcctcagaaccccaggcagtagacttcctagaatgtgcagaagaagctagaaaaaarattaattcctgggtcaagactcaaaccaaaggtaaatccaagaaaatattttatttacttctttccagttagaaaactctgatctatctttttccatcca

SEQ ID NO: 32096 - DNA, 201 bp, Homo sapiens
aaaaaaaaaaaaacataccagggtggtgctcactatacccacaggatgcatggatagtgttgtagctgcagaagatcatgcctgtgaggtcacggtagcaraatgagacctggcattattatggccagccctgaaaaccaaggtagatgggatgcacaacatcattgtgagggatttctgcaaggccactgcctgccttcc

SEQ ID NO: 32097 - DNA, 201 bp, Homo sapiens
aatatattcgactctgtcagaaatattactcctcagaaccccaggcagtagacttcctagaatgtgcagaagaagctagaaaaaagattaattcctgggtsaagactcaaaccaaaggtaaatccaagaaaatattttatttacttctttccagttagaaaactctgatctatctttttccatccatgaacttagttagcc

SEQ ID NO: 32098 - DNA, 201 bp, Homo sapiens
ctttccagttagaaaactctgatctatctttttccatccatgaacttagttagccctcacccctttacaatttgtccaactgcagttactttggtggatgygaatttattcctgattagctcagtggtgttttaactgagaagaaataattgaggcctactaatagaagacatatgtttagtacttaaatatttgattttg

SEQ ID NO: 32099 - DNA, 201 bp, Homo sapiens
ttcttcattttttcttggattttgcaagcttttgggaaatttgtttcaattttaattttgctttaaataaacctaaaaaactttagcttgaagattaacawctctgcaatttgaagaatttagtttgatggctactcagaagattcagtaagtaatttcacagttcttgattatgaaacctaaatatatgttatgttttct

SEQ ID NO: 32100 - DNA, 201 bp, Homo sapiens
ctctgcaatttgaagaatttagtttgatggctactcagaagattcagtaagtaatttcacagttcttgattatgaaacctaaatatatgttatgttttctrtaggcaaaatcccaaacttgttacctgaaggttctgtagatggggataccaggatggtcctggtgaatgctgtctacttcaaaggaaagtggaaaactcc

SEQ ID NO: 32101 - DNA, 201 bp, Homo sapiens
caaagggtggagctaagaacagggaggtgctaaaattttttttttttttttaatttcttcagttgaaagtttctcaactcttcagccacaatctcttactrcaggagcaaattgccaattctgctccagtgggagaaaacaaggtattgtaaatatttctttggttaatgattttatttatgtttttcttcttggttgaag

SEQ ID NO: 32102 - DNA, 201 bp, Homo sapiens
ataatgttaagagagtatcacaaagggaaaaaaaaaaaaacataccagggtggtgctcactatacccacaggatgcatggatagtgttgtagctgcagaaratcatgcctgtgaggtcacggtagcagaatgagacctggcattattatggccagccctgaaaaccaaggtagatgggatgcacaacatcattgtgaggga

SEQ ID NO: 32103 - DNA, 201 bp, Homo sapiens
attatttcttcattttttcttggattttgcaagcttttgggaaatttgtttcaattttaattttgctttaaataaacctaaaaaactttagcttgaagatkaacaactctgcaatttgaagaatttagtttgatggctactcagaagattcagtaagtaatttcacagttcttgattatgaaacctaaatatatgttatgt

SEQ ID NO: 32104 - DNA, 201 bp, Homo sapiens; identical to SEQ ID NO: 7074

SEQ ID NO: 32105 - DNA, 201 bp, Homo sapiens
ctaataatgttaagagagtatcacaaagggaaaaaaaaaaaaacataccagggtggtgctcactatacccacaggatgcatggatagtgttgtagctgcaraagatcatgcctgtgaggtcacggtagcagaatgagacctggcattattatggccagccctgaaaaccaaggtagatgggatgcacaacatcattgtgag

SEQ ID NO: 32106 - DNA, 201 bp, Homo sapiens
caaattccttagattcaaatctataagacagccaagcccccgaatccctcaactgtagctgttgaaggcatatgggagttgaatagcctgcaaggctggavacagttatgagtgaccacatcttatattttaataatataatattcttatttttcaaagttagtgttttgtacccattatctcattcagttttaagacaga

SEQ ID NO: 32107 - DNA, 201 bp, Homo sapiens
gagttaatcttgtgactttctttaaaatactggcatttttttttcaagaccatttattggttggatataatttagataatttggggaagaggttttaaatyatttcataataacaatttgttttccaaaatggccaggatataaattaatctaaaacacctcatgctgttttctataagggaaatttaggttggctgatac

SEQ ID NO: 32108 - DNA, 201 bp, Homo sapiens
atataaattaatctaaaacacctcatgctgttttctataagggaaatttaggttggctgatacttttatattacacagaaagagtattgagtatctatggytgttccccatgtataagggaagggaaaagatctaggaccattttagagccacctgatagccatctgttttaaaagttcagtaaatccgtgggcaagtgta

SEQ ID NO: 32109 - DNA, 201 bp, Homo sapiens
tttttgggtaggtccagtatgtcacacttatcctatgcccccacaaaaatttgcacagttttttgctgacagtgaaaatccttcattcttctgaatttccrggtagagttgtaggccttaagtaaacaattgctgaataataacatataaatgtatttctaagaaacagagatgattatgaattcagaattgtgtaagtat

SEQ ID NO: 32110 - DNA, 201 bp, Homo sapiens
cactaaagtagaaccaatcctcctttatgtctaattgtaaatctcttgatatcttataatcgacttccatattttaccttttaataatattaggctcagcrcacacctgtacagatgatgtacttgcgtgaaaagctaaacattggatacatagaagacctaaaggctcagattctagaactcccatatgctggagatgtt

SEQ ID NO: 32111 - DNA, 201 bp, Homo sapiens
tggagagaattgtctgtttcatcatgctatgatcaaatactagttttatcatatacatcacaacattactataccccaatactaaccaaaaattttaatarcttgggaaatatattgaatgtatatattaaatgaatacattgaagatgaaactgatgcaaggcaggcaagctccaaagtggggcttagccttcaagggtt

SEQ ID NO: 32112 - DNA, 201 bp, Homo sapiens
ataatgggtataaagttgaacaagctaataacatcagagtacccactgtaaggatgtacaaataatttattttgttgatttaaaaaaatcacatttatccwacactaaagtagaaccaatcctcctttatgtctaattgtaaatctcttgatatcttataatcgacttccatattttaccttttaataatattaggctcag

SEQ ID NO: 32113 - DNA, 201 bp, Homo sapiens
aaaaattccttagagactttgaagtttaggaaactgagaaggggcctttcttctaggctgttggtcacctggttaaatccaatccatagacagagcaaaaytggaaagaaattaaaattcaccttattagttttaatgtaccacatccttatcgaaatgattttctcaaagattcctctaatgtaccaaaaataaagtatg

SEQ ID NO: 32114 - DNA, 201 bp, Homo sapiens; identical to SEQ ID NO: 7066

SEQ ID NO: 32115 - DNA, 201 bp, Homo sapiens; identical to SEQ ID NO: 7067

SEQ ID NO: 32116 - DNA, 201 bp, Homo sapiens; identical to SEQ ID NO: 7069

SEQ ID NO: 32117 - DNA, 201 bp, Homo sapiens; identical to SEQ ID NO: 7071

SEQ ID NO: 32118 - DNA, 201 bp, Homo sapiens
atcttacctatcatacatctatcaatcctatctatctatatattttatgaatcatctatttatcatctatcttctctgtcatctgtctatcttatctattwatcaatcagctatctcggggagtaacacctttcctcagtactccatttccttaaatgtcagctatccagttaaattataaaaactgagtatagactgctc

SEQ ID NO: 32119 - DNA, 201 bp, Homo sapiens
cttgggagcaaatggccctagttagaaacactgataatgcctaggttatatcctgtgtttattagacataggtttgataatgcttatttaagcacccccccgcacttttttttttttgagacggagtttcgcccttgttgcccaggctggagtgtaatggtgtgatctcagctcaccgcaacctccgcttcccaggttcaa

SEQ ID NO: 32120 - DNA, 201 bp, Homo sapiens
ctctgtctcaggttcaagcaattctcctgcctcaacctcctgagtagctgggattacaggcgtgcaccaccatgcccagctaatttttgtatttttagtasagagggggggtttcaccatattgtccaggctggtctcaaactcctgacctcaagtaatgcgcccccccccccggcctcccaaagtgctgggattacaggt

SEQ ID NO: 32121 - DNA, 201 bp, Homo sapiens
cgatgtgcgtactccgtccctcgtgcttggattggctcccggggtagagccatcgcgtggcctgcctctcccattggttggcgtagggaggtgttctcctscggggcccctgattggccggctccgggaggcgccatcggtaatgcctgcggcaggggcggaactgctaggtggtctgagcccggctttgggctggggtcg

SEQ ID NO: 32122 - DNA, 201 bp, Homo sapiens
ggatcttttagatcacacccttaaccttttggatggaatggatgtcactaaggcaaaaatgtgtgagaatgtcactgtattaacctaagaacaaaccaaastagcagttaccagtatcatgcagcatatatttatgttgacaaagaatggtttaactttagcctttccacccaagtttagacctcttttctatgaatcttt

SEQ ID NO: 32123 - DNA, 201 bp, Homo sapiens
acctttagcacggatagtttcctggtcccaagtgggtgtggagccttccattatgggaataggaccaattccagccataaagcaagctgtgagtataaccytattcccttttatgaaatttgtcttcctgttagccttaagtgagcttattcatgtagttagctctagtctttccctaccagaagagtaaccaagagcatt

SEQ ID NO: 32124 - DNA, 201 bp, Homo sapiens
tgagccccctgccttaacctcccaagtagctgggggactacaggcatgagccaccacacccaactcaatatttatgtacaaaattattcttaaaacagttkaaggaaacatgtcatttctctgtatttgatcattgacttaacctatactgaaagaattaatttggtttcttgacatcccaactagacatacaaatgaaga

SEQ ID NO: 32125 - DNA, 201 bp, Homo sapiens
atatgggtattacaggtaaggcagacatggctgaaactgtattagctttaaaaaggttaaaaagaccatatactaatctgcttcttaggtgctttcgtccktatggccagagactgtcttaaggatttttatatctcttctttgattaactgaagtgaagtaagtattctcttctttgtgaactcttgattatcagagaat

SEQ ID NO: 32126 - DNA, 201 bp, Homo sapiens
ggtgctacagccccaccctctcctctcccgatgtgcgtactccgtccctcgtgcttggattggctcccggggtagagccatcgcgtggcctgcctctcccrttggttggcgtagggaggtgttctcctccggggcccctgattggccggctccgggaggcgccatcggtaatgcctgcggcaggggcggaactgctaggtg

SEQ ID NO: 32127 - DNA, 201 bp, Homo sapiens
tttggggtcactcgctattttctaatacagaatgctcccgtcaagctcccttattgataactgatatctcttatgtcctgccagcagtgcacgattggctytgagactgcctgatccactcactcgtaaccagccaagtactatgacccaaactatagcagaatttggcacaaacaggtccctggtagctactttcctcag

SEQ ID NO: 32128 - DNA, 201 bp, Homo sapiens
aaatttctccagttacatgaaaaatggctctataaatgtgttggtagcacaaagcattaagagaatataaatgtttttgagctgttttctgtcaatattcyaatgtaaaaagacctttgataggatcagggataataaaagtattttatgtgacagccagcacaagacatacctccagaagctttggcaatgcgtttaagg

SEQ ID NO: 32129 - DNA, 201 bp, Homo sapiens
gtgcagtggcaccatcatagctcactgcagcctcaaaactcctaggctcaaatattcctcctgccttagcctcccattacctcgaactacaggtgcaccamgccttcttcatttcgtagagacaaggtctatgtcgcccaggctggttttgaactcctgagttcaattgatcctcttgccttaggctccccaagtgttgag

SEQ ID NO: 32130 - DNA, 201 bp, Homo sapiens; identical to SEQ ID NO: 7089

SEQ ID NO: 32131 - DNA, 201 bp, Homo sapiens
tgaaagggtagcatgctgatacattaagaggaaaaagacaagtttaagattttaaactgtgtccacagaagaataaacaatctaaatcttttctcccccgytaggtcaatattgaaggaggggctatagccttgggccaccctcttggagcatctggctgtcgaattcttgtgaccctgttacacacactggagagaatgg

SEQ ID NO: 32132 - DNA, 201 bp, Homo sapiens
ggcgtagggaggtgttctcctccggggcccctgattggccggctccgggaggcgccatcggtaatgcctgcggcaggggcggaactgctaggtggtctgagcccggctttgggctggggtcgggctgtcacacaatggctagaagtcgtgacttcgtctccttcgtgccgcatggttttcaacgcccttgacccgccggtt

SEQ ID NO: 32133 - DNA, 201 bp, Homo sapiens
aggtggtaaagaagccacagatatgtaactgaggttaataagcatggtagaaattaagtcactcatattttacaggaataaatgatggtgctgcagctgtygttcttatgaagaagtcagaagctgataaacgtgggcttacacctttagcacggatagtttcctggtcccaagtgggtgtggagccttccattatgggaa

SEQ ID NO: 32134 - DNA, 201 bp, Homo sapiens
ttgagatttcaggtgtgagccactacccccagccactgagagcatttggatcacatgctttctaggggaactgattctgttacattagccttaggtacacrtaacagatgctactggttcaaaattttaagacaatttagaatttctaagggatcttttagatcacacccttaaccttttggatggaatggatgtcactaa

SEQ ID NO: 32135 - DNA, 201 bp, Homo sapiens
ccaagacgtcaagtcggggaactccaacattggggtgtccagaaacactggggtttcaggcgctctgtaaatgcgtccgaggtccgcggttctgcccgcargcccagaccccggcctcacttccgccccgcgccccgcgccccggcctcacttccgccccgcgccccgcgccccgcgccccgcgcgcctccgcccgcccct

SEQ ID NO: 32136 - DNA, 201 bp, Homo sapiens; identical to SEQ ID NO: 7094

SEQ ID NO: 32137 - DNA, 201 bp, Homo sapiens
aataagcatggtagaaattaagtcactcatattttacaggaataaatgatggtgctgcagctgtcgttcttatgaagaagtcagaagctgataaacgtggrcttacacctttagcacggatagtttcctggtcccaagtgggtgtggagccttccattatgggaataggaccaattccagccataaagcaagctgtgagta

SEQ ID NO: 32138 - DNA, 201 bp, Homo sapiens
tttcctgtcagagatctcccctccccaactgctgtaatcctttttttttctttttgagacggagcctcactctgtcgcccaggctggagtgcagtggtgcratcttggctcactgcaatctccgcctcccaggttcaagcaattctcctgtctcagcctcctgagtggctgggactacaggcgcacaccaccacaccggct

SEQ ID NO: 32139 - DNA, 201 bp, Homo sapiens
aggtcatctttggacatgtcttggcagcaggtaagtctcagtgattccaggagaagtcaggcttattagaaacagcccataaacacacacacacacacacwctctcacacactcacacactctctcactcactcaagttcttgcctccttgcttttgctcagagttccctctgttatgattcctcctgttggcccccttct

SEQ ID NO: 32140 - DNA, 201 bp, Homo sapiens
tcctgggctcaagtgagccccctgccttaacctcccaagtagctgggggactacaggcatgagccaccacacccaactcaatatttatgtacaaaattatycttaaaacagtttaaggaaacatgtcatttctctgtatttgatcattgacttaacctatactgaaagaattaatttggtttcttgacatcccaactagac

SEQ ID NO: 32141 - DNA, 201 bp, Homo sapiens
caggccaagccgcgaggagccgcgggatccctggaaccctgcggctcccgcgttccctgacctggtgctacagccccaccctctcctctcccgatgtgcgyactccgtccctcgtgcttggattggctcccggggtagagccatcgcgtggcctgcctctcccattggttggcgtagggaggtgttctcctccggggcccc

SEQ ID NO: 32142 - DNA, 201 bp, Homo sapiens
catcgcgtggcctgcctctcccattggttggcgtagggaggtgttctcctccggggcccctgattggccggctccgggaggcgccatcggtaatgcctgcrgcaggggcggaactgctaggtggtctgagcccggctttgggctggggtcgggctgtcacacaatggctagaagtcgtgacttcgtctccttcgtgccgca

SEQ ID NO: 32143 - DNA, 201 bp, Homo sapiens
caggacaaggttgcagttctgtcccagaacaggacagagaatgcacagaaagctggccattttgacaaagagattgtaccagttttggtgtcaactagaaraggtgagtatatcatagtggtttaaacatcaacctatttataggtaagagtaacatctaaaagagtaatacataggaatctttagaaattatatcttagt

SEQ ID NO: 32144 - DNA, 201 bp, Homo sapiens
cagacaaaagcaaactagagagattgatagttgtacaatgcatgcttctttattggctcaaataaaggagctagaaggacattactgaaatataggtgaartttgaatgtggaccaaggattagataatagtgtttgattcatgttaaatttcctgatttttgttttgttttgtgagacagggtcacccaggctggagtgc

SEQ ID NO: 32145 - DNA, 201 bp, Homo sapiens
gccagggttgacagaatagttgctaataagagagttacaaaggatctgtgaatattgctctttcatgattttaatatccttggactcagtagcatttgtgrtaaaagtgctatattacaagtttagaatttagttaggcagcacacggtaactccttttatcctaagatggaactgtcattttagaaatgaacaaattcag

SEQ ID NO: 32146 - DNA, 201 bp, Homo sapiens
caaaactctgtctcaaaaaattaaattaaattaaattaaattaaaaaataggccaggtgtggtggctcatgcctgtaatcccagcactttgggaggtcaaygcaggcagatcacctgaggtcgggagtttgagacccacatgaccaacatggagaaactccatctctactaaaaatacaaaattagccaggctggtggcgc

SEQ ID NO: 32147 - DNA, 201 bp, Homo sapiens
tctcaggttcaagcaattctcctgcctcaacctcctgagtagctgggattacaggcgtgcaccaccatgcccagctaatttttgtatttttagtagagagrgggggtttcaccatattgtccaggctggtctcaaactcctgacctcaagtaatgcgcccccccccccggcctcccaaagtgctgggattacaggtgtgag

SEQ ID NO: 32148 - DNA, 201 bp, Homo sapiens
tcacatttctaaagggtggatcttttggggtcactcgctattttctaatacagaatgctcccgtcaagctcccttattgataactgatatctcttatgtcmtgccagcagtgcacgattggctttgagactgcctgatccactcactcgtaaccagccaagtactatgacccaaactatagcagaatttggcacaaacagg

SEQ ID NO: 32149 - DNA, 201 bp, Homo sapiens
gtttaaacatcaacctatttataggtaagagtaacatctaaaagagtaatacataggaatctttagaaattatatcttagttatgtttttcaggttgcaartatatgtcctggatacatgaatgtggggagggggtatgctgggtttacaggacacggtaacatgggacctatgtcagcactcaagcactcttggttccag

SEQ ID NO: 32150 - DNA, 201 bp, Homo sapiens
tacataggaatctttagaaattatatcttagttatgtttttcaggttgcaaatatatgtcctggatacatgaatgtggggagggggtatgctgggtttacrggacacggtaacatgggacctatgtcagcactcaagcactcttggttccagagcgtccatgaccactgtgcacacacagcaggtttcatgagaagctgga

SEQ ID NO: 32151 - DNA, 201 bp, Homo sapiens; identical to SEQ ID NO: 7093

SEQ ID NO: 32152 - DNA, 201 bp, Homo sapiens
tgtgatggtcttacagatgcatttcacaactgtcatatgggtattacaggtaaggcagacatggctgaaactgtattagctttaaaaaggttaaaaagacmatatactaatctgcttcttaggtgctttcgtccttatggccagagactgtcttaaggatttttatatctcttctttgattaactgaagtgaagtaagtat

SEQ ID NO: 32153 - DNA, 201 bp, Homo sapiens
attcatgttaaatttcctgatttttgttttgttttgtgagacagggtcacccaggctggagtgcagaggcacaatcatggctcactgcagccttgaactcytaggctcaagtgatccttctgcctcagcctcccaagcagctaggactactagctacatggcacacacaccatgcccggctaaatttatttttaatggaga

SEQ ID NO: 32154 - DNA, 201 bp, Homo sapiens
gaaagtaatgagttataacttattcaataaaatgaaaatgtatgagtccatcctgatataaataactgaataaatgggagaaaaggaaaaggttttctttrtggtaaaatgccaattaatatcttaccaatagaaggaatgttggagttagaaagtcatgaatgaatgctaaaactagtgggtgaaaatatgatggggaag

SEQ ID NO: 32155 - DNA, 201 bp, Homo sapiens
gcctaaattttgaacaatttcagcgtgcaaataagtaatgatagtaatgggttataactgcccaagtattgaaaaatttcagcatcaaagtaagtaatgaragtaatgagttataacttattcaataaaatgaaaatgtatgagtccatcctgatataaataactgaataaatgggagaaaaggaaaaggttttctttatg

SEQ ID NO: 32156 - DNA, 201 bp, Homo sapiens
aaaaaaatggcattttaataaaataagtctacataaagttcccttaagtcctgcctacacaggatatttagatatactatacagaaacaatgtctagtccmtgcagaagagatgaaaatggttacttcatctcaatttacagtggcccaatgttattttatcccatgcgtataactgctcgtatcactgtgagactacaag

SEQ ID NO: 32157 - DNA, 201 bp, Homo sapiens
tgggagtatggttccaacaatacaggtaagttccctgccctcttagggctcagttctgagcttggaaaataggtgccacatcatgccccttgcaaatgggrcatatcactccccagaggaatatagctgagtcctgagagtgcccccatcttctgattctttgggtttgaacactcgtaattaattaattaattattatta

SEQ ID NO: 32158 - DNA, 201 bp, Homo sapiens
ttacagcttgtactttactttaatgtgtaatactcaactcaaggtacaagacaattgcatttaacattgttataaataaaaggaacatcagatcaatcatwaagggctccagagtgaacagcatcttcataacttccatgtttatcatctttactttctggatgtaatttaataagatcatcaattcgaagaatggtgatt

SEQ ID NO: 32159 - DNA, 201 bp, Homo sapiens
tcattaagggctccagagtgaacagcatcttcataacttccatgtttatcatctttactttctggatgtaatttaataagatcatcaattcgaagaatggkgattgcagcttctgttgcaaatttcaaactcttaactttaactatggttggttcaaacacccctgcttgtttgttgtctcgaggtttaccattgctcaaa

SEQ ID NO: 32160 - DNA, 201 bp, Homo sapiens
tttacagcttgtactttactttaatgtgtaatactcaactcaaggtacaagacaattgcatttaacattgttataaataaaaggaacatcagatcaatcawtaagggctccagagtgaacagcatcttcataacttccatgtttatcatctttactttctggatgtaatttaataagatcatcaattcgaagaatggtgat

SEQ ID NO: 32161 - DNA, 201 bp, Homo sapiens; identical to SEQ ID NO: 7098

SEQ ID NO: 32162 - DNA, 201 bp, Homo sapiens
ttttcagtctcaagtaaccttacccgtttttagtttccagcctaatcccagattgataacattgtgatgaatataatctctaagtttttatcagcgacttmtttgctagttcttccccacaaactctccaaggaagggtggtaggtttgagtatatctgaaactgggaatagagtaaccactttataaacatttaccattg

SEQ ID NO: 32163 - DNA, 201 bp, Homo sapiens
ggatttaaaaataaaagcaaaaaatgtaaagcttctagaagtatatataagagaatagcttttacagggtgcagtggcaggtgcctatagtcccagctacyagggaggctgtggtgggaggatcacttgaggccagcagtttgaggttgtatagtatactatggttgattttgcctgttagtagctgctgcactccagcct

SEQ ID NO: 32164 - DNA, 201 bp, Homo sapiens
tacagccccaccctctcctctcccgatgtgcgtactccgtccctcgtgcttggattggctcccggggtagagccatcgcgtggcctgcctctcccattggktggcgtagggaggtgttctcctccggggcccctgattggccggctccgggaggcgccatcggtaatgcctgcggcaggggcggaactgctaggtggtctg

SEQ ID NO: 32165 - DNA, 201 bp, Homo sapiens
aagtaaccctgagagcttaccagtgaatttcacaatccaattttaagatagtatcttctaggtgttggccatgtgggtaatagttaaagaaatactagttactaggactgagttcattacttcccaaggtaaaaaaaaaaaaaaaaaaaaaaagacattggcttacttggcataaaaggaacgaggtaagataggcaggga

SEQ ID NO: 32166 - DNA, 201 bp, Homo sapiens
gcaccgcactgggcctgtctttttaatatgtatatgatcctgcatatgttttcagtctcaagtaaccttacccgtttttagtttccagcctaatcccagaytgataacattgtgatgaatataatctctaagtttttatcagcgacttatttgctagttcttccccacaaactctccaaggaagggtggtaggtttgagta

SEQ ID NO: 32167 - DNA, 201 bp, Homo sapiens
caggagcgccgagggccggacttgtgtaggagaggggcgtatgtggaggaagccggtcaggccaagccgcgaggagccgcgggatccctggaaccctgcgsctcccgcgttccctgacctggtgctacagccccaccctctcctctcccgatgtgcgtactccgtccctcgtgcttggattggctcccggggtagagccat

SEQ ID NO: 32168 - DNA, 201 bp, Homo sapiens; identical to SEQ ID NO: 7099

SEQ ID NO: 32169 - DNA, 201 bp, Homo sapiens; identical to SEQ ID NO: 7119

SEQ ID NO: 32170 - DNA, 201 bp, Homo sapiens
tgaagactatatctatatatctatatatatatatacacacacacacacacacacacaccccatctatatctatctatctctgtctgtctgtctgtctgtcygtctatctatctatctatctatctatctatctatctgtctatctaatcttttttacagacagggtcttgctctgtcatctaggctccagtgcagtggcac

SEQ ID NO: 32171 - DNA, 201 bp, Homo sapiens
ttttgtttgtttgtttggttttttttttgaggcggagttttgctctagttgcccaggctagttagtgttcagtggcactgtgtcggctcactgcaacctcygcctccccggttcaatggattctcctgcctcagcatcacgagcacctgggattacaggcacctgccgccacgcccggctaatgtttttgtatttttagta

SEQ ID NO: 32172 - DNA, 201 bp, Homo sapiens
cccaggaggcagaggttgcagtgagctgagattgcaccactgcactccagcctgggcgacagagcaagactccgactcaaagactcaaaaaaaaaaaaaaatggtatttgctgtctcactaaaatacctcctgttcaatttgtccaccaccccctgccatccgtgaagggtttcacagtgaaagccagaaagcctgctaga

SEQ ID NO: 32173 - DNA, 201 bp, Homo sapiens
ctgaggtgggcagatcacaaggtcaggagatcgagaccatcctggccaacacggtgaaaccccgtctttactaaaatacaaaaattagccgggcatggctkgcatgcgcctgtaatcccagctactagggaggctgaggcaggagaatgggataaaatagtcatattacatttaaccatgagtgccattttttttctgtca

SEQ ID NO: 32174 - DNA, 201 bp, Homo sapiens
ggctgaggtgggcagatcacaaggtcaggagatcgagaccatcctggccaacacggtgaaaccccgtctttactaaaatacaaaaattagccgggcatggytggcatgcgcctgtaatcccagctactagggaggctgaggcaggagaatgggataaaatagtcatattacatttaaccatgagtgccattttttttctgt

SEQ ID NO: 32175 - DNA, 201 bp, Homo sapiens; identical to SEQ ID NO: 7123

SEQ ID NO: 32176 - DNA, 201 bp, Homo sapiens
gcgatctcggcttattgcaacctccgcctcccaggttcaagcaattctcctgcctcagcctccccagtagctgggattacaggtgttcaccaccacacccrgctaacttttttttttttttttgagatggagtctccccctgccacccaggctggagtgcaatggtgcgatctcaacccactgcaacctctgcctctcagg

SEQ ID NO: 32177 - DNA, 201 bp, Homo sapiens
ttttgttagcatttttatcttgtaaaacagtcttacaacactttttttttgagacagggtcttgctttgtcacccaggctggaatgcagtggcctgatcarcactcactgcagccttgacctcccagactcaggtgatcctcccaccttagcctcccgggactacagacgcccaccaccacacccaactaatttttttttt

SEQ ID NO: 32178 - DNA, 201 bp, Homo sapiens
ccagccaatagggatgtgcggctgccgtcctgtcgaccaatcgcggggaggggagggcgttagccagcttggcgctggctcccggaatatggagccctggrcgcgggggcggcgtgtcaggtggttgcggagctggtaaggtgaggggaaggcaaggtcaggggtcacggcattccgctcgctggcagggaggggcgcggg

SEQ ID NO: 32179 - DNA, 201 bp, Homo sapiens
gcatgatctcggctcactgcaacctccacttcccaggttcaagcgtttctcctgcctcagcctcccaatagctgggattacaggcacccacaaccacgccyggctaatttttgtatttttagtagagacggggttttgtcatgttggccaggctggtctcgacctcctgacctcaagtgatccacccaccttggcttccca

SEQ ID NO: 32180 - DNA, 201 bp, Homo sapiens
cgttggctcatgcctataatcccagcactatgggaggctgaggcgggcggatcacgaggtcagcagatcgagaccatcctggctaacacggtgaaaccctktctctactaaaaatacaaaaaattggctgggcgtggtggcgggcacctgtaatcccagctactcgggaggctgaggcaggagaatcacttgaacccagga

SEQ ID NO: 32181 - DNA, 201 bp, Homo sapiens
gcggactggagctccccagtccaggggctgtgtgggtctggccaacgcaagcagcaactaggcagcatgcagctcccgccgggtgccccaggggccgccgsgtgccccaggggccgccgcatccagactccgcgtgggcggagcctaggtccctggtctgcgggccacgcatcccggccgctgcagggactccagccaata

SEQ ID NO: 32182 - DNA, 201 bp, Homo sapiens
ttggcattgtgttccatgatagaggtgtcagatcaggaggccaggtttgtcccccaaaaggaaacacactgctgtaaacttctggttaggaggaagtttakaggaagctcacacagagttgggaagaacaaagacgaagctatagtcactggaagtaagactttagtgaccctgacttgtgagcattcagggagatttgga

SEQ ID NO: 32183 - DNA, 201 bp, Homo sapiens
ggcacagggcaaggtctttcgtggcctcttcgtcggcgccgcagggggccgggctgctctccggggcctcccgccgccccgcttcaacaaaagactcattrtaacctaaccgacttcagggagcgccttctgtgtgaatagcctgcatacgcggctcagtaattgtgggtagattggttttaaggctgtttgtgtagctct

SEQ ID NO: 32184 - DNA, 201 bp, Homo sapiens
tgtcagatcaggaggccaggtttgtcccccaaaaggaaacacactgctgtaaacttctggttaggaggaagtttagaggaagctcacacagagttgggaaraacaaagacgaagctatagtcactggaagtaagactttagtgaccctgacttgtgagcattcagggagatttggaagctggttaagcctcaagagtgctg

SEQ ID NO: 32185 - DNA, 201 bp, Homo sapiens
ttatatggaaggagagtttgcaaggggagataggcttctaaaaacttgctggcctcaattttagtgactgttggtgaaaaatggagaagctatgtttacaytgacttctggaacccgaagccccaccagttcgcatgatttcttggctttgtaaatctttgagcatgttgtttgcctctttcttcttttgttccacgtact

SEQ ID NO: 32186 - DNA, 201 bp, Homo sapiens
ttgggaagaacaaagacgaagctatagtcactggaagtaagactttagtgaccctgacttgtgagcattcagggagatttggaagctggttaagcctcaaragtgctgatgggagaaggtgaagagttgtatttaatgggtaccagccccttctaattctgatgtctctggttgatgtgtgatatttttgtttaaaagata

SEQ ID NO: 32187 - DNA, 201 bp, Homo sapiens
caggtgtgagcaactgcactgggtctataatacttaatacaatgtaattgctatgtaaataattgttctgtattgtttagggaataataccaagaaaaaartggtgtatatgttcagtacaggcacaagcaaccgttttttcccccaaatctttttgatctgcagttgtttgaaaccacaaatgtggaacccagggttaca

SEQ ID NO: 32188 - DNA, 201 bp, Homo sapiens
ggctctgtagtttgagtaaaacattctgggaaaaaaggtaggggcatttgaatgagcggaatataatgaattagaagatgcagaccatgtctcacttactkgctgccatttattctttatttttatatttttgagacagggtctcgctctcttgcccaggctggagtgcagtggttcagtcttggttcactgcaacctcca

SEQ ID NO: 32189 - DNA, 201 bp, Homo sapiens
gctatagtcactggaagtaagactttagtgaccctgacttgtgagcattcagggagatttggaagctggttaagcctcaagagtgctgatgggagaaggtraagagttgtatttaatgggtaccagccccttctaattctgatgtctctggttgatgtgtgatatttttgtttaaaagataagtactccttgacagcctgg

SEQ ID NO: 32190 - DNA, 201 bp, Homo sapiens
tcatccagcctggagcgtagtggtgcaatcatggttcgctgcagctttgacttcctgggctcaagggatcctcccaccttagcctcctgagtagttgggaytacaggagtgtggccatcacacatggctaattcttaaattttttgtagagacaatgtctcactatgtcgcccaggctggtctcaaatttctgggctgcct

SEQ ID NO: 32191 - DNA, 201 bp, Homo sapiens
gacaaggtctggctctgtaacccaggttggagtgcagtggcatgatcacagctcactgcagggttgacctcccaggctcaagtgattctcctgccacagcstccctagtagctgggagtacaagtgcatgccaccacccctaatttttaaaaatttttttgtggagatggagtcttactaggttgcccaggttgtcttgag

SEQ ID NO: 32192 - DNA, 201 bp, Homo sapiens
tttgttttggtctcatctctactaagctgatagctgttaaaactcctaggaaatgaaagaagaaagctacaagttaattattaaaactttaccaggtttcraagagcagaaagaggcttgttaaaggctggagaatcttgtagtatatattgtcttaatttttctttgcttttaggaaaagaaacttggaggacaatattt

SEQ ID NO: 32193 - DNA, 201 bp, Homo sapiens
aatatccatcattaggaaaaatgggttgaatgtaatctaatgaaaattcttcatatttgccagagaaaagctacttaagtgtgaggacaaaacatattttytgaggcaagaagtaggtataggctggtttaataggggatttttttttttttttttggaaaaaagtaatttttttttttttttaatggagactgggtttct

SEQ ID NO: 32194 - DNA, 201 bp, Homo sapiens
ttctaattctgatgtctctggttgatgtgtgatatttttgtttaaaagataagtactccttgacagcctggccacatttctcccaactgttatcgtttttsacacccaggcagctggtttcattatcagctgtactcttcctccttacatcttcctcccccctcctcttcttgcttcctaacattttctccactttctctt

SEQ ID NO: 32195 - DNA, 201 bp, Homo sapiens
caggagtaaaggagcccaaacaggcttttactgtcagtattatgtaatagtttgctgggagattttagaaacctttataaataggtatatgcacaccttasgactgaaatcaggtcgtttttataggtcagtggtccttccagccactgagagtaactgagagctcagtagtcatttagtctctgttccctatttggggaa

SEQ ID NO: 32196 - DNA, 201 bp, Homo sapiens
gaaaacgaattatttcaaacccaaactatttatttatttatttatttgtttatgacagacagggtcttgctctgtagcccaggctggggtgccctgatcayggctcactgcagccacaacctcccaggctcaagcagtctgcccacctcagtctcccaagtagcacgcactaccacacccagctaatttttgtatattttt

SEQ ID NO: 32197 - DNA, 201 bp, Homo sapiens
cagtggtaagcagtgggtgccttgagggaacacggagaagccacttaagccaaattagggagtcaggaatgctttcctgagaggggatttttaatattttrcatttaggtggcactaagacaaactagtagtaagttaggctgaaggcaataaatacctgccaattagacagctgtagacttctgattatctattgcagaa

SEQ ID NO: 32198 - DNA, 201 bp, Homo sapiens
cgcgatctcggctcaccgcacctccgcctcccgggttcaagcgattctcttgcctcagcctcccgagtagctgggattacaggcatgcgccaccacgcccrgctaattttgtatttttagtaaagacggggtttctccatgttggtcaggctggtctcaaactcccgatctcaggtgattcgcccgcctgggccctccaaa

SEQ ID NO: 32199 - DNA, 201 bp, Homo sapiens
cttcctacctctgtctcttgaatagttgggaccacaggtgtgcaccatgatacccagctatttttaaaattttttgtagagacagggttttgccatgttgmcaaggctgggcttgaactcctgggctcaagtaatcctcccacctctgcctcccaaagttcagggattataggtgtgaactaccatgggtgacctgacaaa

SEQ ID NO: 32200 - DNA, 201 bp, Homo sapiens
caagtgattctcctgcctcagcctcccgagtagctgggattacaggtgcctgccaccatgcctggctaatttttgtatttttagtagagacggggtttcaycatgttggccaggctggtctcgaactcctgaccttgtgatctgcccacctcggccttccaaagtgctgggattacagacgtgagccactgcgcctggcct

SEQ ID NO: 32201 - DNA, 201 bp, Homo sapiens
gcgggccacgcatcccggccgctgcagggactccagccaatagggatgtgcggctgccgtcctgtcgaccaatcgcggggaggggagggcgttagccagcktggcgctggctcccggaatatggagccctgggcgcgggggcggcgtgtcaggtggttgcggagctggtaaggtgaggggaaggcaaggtcaggggtcacg

SEQ ID NO: 32202 - DNA, 201 bp, Homo sapiens
tgtgggtgtagaaggattatagaggaagatcctagataacattgctgctagtctctgcccacatcacagcatatgtccagtgttttccctccagcctaccycttatagatgattgtgtatgatatgtaggagagctcttatttggtccttgcttctgaaacaaaagttgctgttgaattgctttgggttctaggttgaagt

SEQ ID NO: 32203 - DNA, 201 bp, Homo sapiens
atcctagttattcaggtagcattatgtactgcccttgggtaccaagcctagctgagtgctggggggatattgagaggaagacagaggcatggttgtggtckgcagtaaatgtatatgaaatccttggcatctaaaaggattttagaaatggttggttttttaaacctgttgaatgggaactatgaactttacttacatatg

SEQ ID NO: 32204 - DNA, 201 bp, Homo sapiens
gcctggaagagcaggggcataggtatcagggatggttgaggtggggttcactgacattcagaaatgaacagacccaggctgggcacagtggctcatgcctmtaatcccagtactttgggaggctgaggcgggaggattgcttgaatccaggagttagagaccaatctgggcaacatagtaagactccatctctacaaaaaa

SEQ ID NO: 32205 - DNA, 201 bp, Homo sapiens
tcctcattatcttaggtagttgcagaagaaaagattttggccaggtgtggtggcctgtaatcccagcactttgggtggctgaggtgggaagattgcttgtwcttgggagattgaggtttcagtgagctgtgatcatgccactgcattccagcctgggtgacagagcaagatcctatctcaaaaaatataaaaataaggaag

SEQ ID NO: 32206 - DNA, 201 bp, Homo sapiens
ctccctagtagctagtactataggtatgcaccaccacaccgaggtaatttttgtagagataaggttttgttgtgttgtcaggctgctcttgaactcctggsctcaagcaatgcgcctgccttggtctcctaaagtgctgggattataggcgtgagccaccgcacccagccctttctttagaaattaattatgtatcataca

SEQ ID NO: 32207 - DNA, 201 bp, Homo sapiens
caggcgggcgccgtgatgcctggctaattttttttttttttagacggagttttcgctcttgtttccaaggctggagtgcaatggcgcgatctcggctcacygcacctccgcctcccgggttcaagcgattctcttgcctcagcctcccgagtagctgggattacaggcatgcgccaccacgcccggctaattttgtatttt

SEQ ID NO: 32208 - DNA, 201 bp, Homo sapiens
gtagcgagaatctcagaactaatttgtgcattttcttttttctccaggagaaattctgtatgaaaaccaacctgctccaggaagccaagccccccccccccttttttttggtccccgagtttgtttttacttcgcactttatttggatttttctctttgcagttcacgctcctttcctcatttcttggtctctcttactaa

SEQ ID NO: 32209 - DNA, 201 bp, Homo sapiens
ctggagttcagtggcacgatctcagctcacctcctgggctcaagtgatccttccacctcagcctccctagtagctagtactataggtatgcaccaccacascgaggtaatttttgtagagataaggttttgttgtgttgtcaggctgctcttgaactcctgggctcaagcaatgcgcctgccttggtctcctaaagtgctg

SEQ ID NO: 32210 - DNA, 201 bp, Homo sapiens
tactgtagcgagaatctcagaactaatttgtgcattttcttttttctccaggagaaattctgtatgaaaaccaacctgctccaggaagccaagcccccccsccccttttttttggtccccgagtttgtttttacttcgcactttatttggatttttctctttgcagttcacgctcctttcctcatttcttggtctctctta

SEQ ID NO: 32211 - DNA, 201 bp, Homo sapiens
aatctgataacattagtttgttacaattatatgtaaaacaaaagtaaaaaggctttgccgggaacgtcggggctgtgctgtgattggaatccaagtgagtmctgctactctgagtggtcaaatatttaaatcccatttaggtgaggtgctattgtcattgactgaaagaggggttgaatttagtcagtattattgggggct

SEQ ID NO: 32212 - DNA, 201 bp, Homo sapiens
ctaccctttctagaagattgaaccatgagcttaaattacatattttagaccaaagagaattacagatttctgtccttaaaaactcataaaataggctgggygtggtggctcatgcctgtaatcccagcactttgggaagtggggtgggcggatcatgaggtcaggactttgagaccagcgtggccaacatggtcaaaccgt

SEQ ID NO: 32213 - DNA, 201 bp, Homo sapiens
ctagattctttggtcccaagttgaccatctgacaacagaacagccatggatagtgttaattaaggagggggttgcagggttattcttgggtgttaacttasaggagttctgcttttgttcatcctggtttatattaattgcagcttgaactttcccaatattaaaacagttaatgaattatatgaaatatactggatattt

SEQ ID NO: 32214 - DNA, 201 bp, Homo sapiens
atctcatctctgacctagaattcctctgtggggtggcgttctcatcaccattgcagatacttttgtatttctcttcttggacaaatatggtaaggagagcrggaatgggagggtcaaaggagctgctctctgtcatgtggcagatggggaagtctaccttctctgagctcactgctgccttttttcctttaggcttgcgga

SEQ ID NO: 32215 - DNA, 201 bp, Homo sapiens
accacacccagctaatttttgtatattttttgtagggatggggttttgccctgttgcccaggctggcattgaactctgctcgcctcggccttccaaaatgmtaggattacaggcttgagccaccgcactcggcccaaacttttgttttaaccgtagattaaaaaaaaaaaagttgaagttgtatatattaatactcagtat

SEQ ID NO: 32216 - DNA, 201 bp, Homo sapiens
tatatattaatactcagtatttcaaactttcttaggggcagttttctgttttgtgttttttgttttttttttgagatggggtcttgcttggttgcccaggmtggagtgcagtggcatgatctcggctcactgcaacctccacttcccaggttcaagcgtttctcctgcctcagcctcccaatagctgggattacaggcacc

SEQ ID NO: 32217 - DNA, 201 bp, Homo sapiens
atttggttttgaagtcttgccagcaaaatcttgactaagacttttctttttttgttaaatatctgtcagtcatattctgaaaactgtaattattttcaagrttacctaattcagtagaaaaattactcttttcatagtaaggattcagtcatacagagtaacaaactgctggttctgaacttgttagtttgttcttcctaa

SEQ ID NO: 32218 - DNA, 201 bp, Homo sapiens
tgtcaccaagctttgttgtttagcagcacaaggaacataacacactgaagcatttgtttcatactctgattagtgctagaatatgcattaggcagaagttrccaactggtagattttggtccctgtgcagaatttttaaaagtaagtttgaatgcttttggcaagtgtagagaatggacagggccctctatggtcctatcc

SEQ ID NO: 32219 - DNA, 201 bp, Homo sapiens
gaccaacatggtgaaaccctgtctctactaaaaacaaaaatacaaaaattagctggatgtggtggtgggcacctgtaatctcagctactcaggaggctgaracacgagaatcgcttgaacctggaaggcagaggttgcagtgagccgagattgggccactgcactccagcctgggcgacagaataagactctgtctttaaa

SEQ ID NO: 32220 - DNA, 201 bp, Homo sapiens
atgagatagtatattggtgtacttggcattttctttttttttttttctgagatggagtcgagctttgtcacccaggctggagtgcagtgctatgatctcgkctcactgccacctctgcctcccaggttcaagcaattctcctgcctcagcctcccgagtagctgggattacaggtgcccaccaccatgcctggataatttt

SEQ ID NO: 32221 - DNA, 201 bp, Homo sapiens
taaagtgatactttactatgtcagtgaaatttcagtttgattttagtcaaccagattatatcctttgtatctactgatattaacacatcatattaacacaycatttcttaaaaaaacatttcttctgtttggcaatcataattaactctggttatcagcctattttgtaattattgtctttgtcgtcacttttcttgaatt

SEQ ID NO: 32222 - DNA, 201 bp, Homo sapiens
gtctttgtcgtcacttttcttgaattgttttctagtcattaaacagatatgaaggcattgccaaagagctttaatatccagtaacaagatccagaaaccamactttaaccagtgatcagttttccgtgctgcattgtaactcagctcattctggcattcaagttttaggcaaaaaaagaggaaacttctaacatttagctt

SEQ ID NO: 32223 - DNA, 201 bp, Homo sapiens
ccactgagagtaactgagagctcagtagtcatttagtctctgttccctatttggggaatgtacagttcaacgaaagggcatgaagttcttttttctccccycatatgaagttcttaattgctcagtgaactaggatgtaggtgagtgttggatctctcacttttcgtctggtcaacttttgtcccctaaatctctcagctg

SEQ ID NO: 32224 - DNA, 201 bp, Homo sapiens
aaattaagaacaatttttccattcattttgaactgcctctaattcccatcctgtttccttttctgtctgtggccaagttggattattccatcagtgactgwgctgatttcttttacagaggctggcggattgcaggaggaatcttggtccttatcatctgttccatcaatatgtactttgtagtggtttatgtccgggacc

SEQ ID NO: 32225 - DNA, 201 bp, Homo sapiens
gggacctagggcatgtggcattatatgtggtggctgctgtggtcagcgtggcttatctgggctttgtgttctacttggtaagtctagcctggaagagcagrggcataggtatcagggatggttgaggtggggttcactgacattcagaaatgaacagacccaggctgggcacagtggctcatgcctataatcccagtactt

SEQ ID NO: 32226 - DNA, 201 bp, Homo sapiens; identical to SEQ ID NO: 7126

SEQ ID NO: 32227 - DNA, 201 bp, Homo sapiens
aagaactcagccactcaggtatccaccatggtgctgggtcctgaacagaagatgtcagatggtaatttaccgctttgtgttattgtctaattttatttgtmattaggtttatgttggtaacagaaatttatcatatttttcctcttgtcatcatctgtcatcatctattctaacaactccattcaaaagtcaccatctggt

SEQ ID NO: 32228 - DNA, 201 bp, Homo sapiens
gagaatagggcatgcagtgtgatttagagattcggggtgggacacatgtggcacacagccccactcagctccatcacttactagctgtccaaggaaataaktaaatagtgatagtctccccttgactctcattctagagtcattttttaaaaatcatggttataaaactatagctacatgaaaaaggtatgtaaaatttat

SEQ ID NO: 32229 - DNA, 201 bp, Homo sapiens
tctgtagatgtctattaggtccacttggtgcagagctgagttcaatttctggatatccttgttaaccttctgtctcattgatctgtctaatgttgacagtsgggtgttaaagtctcccattattattgtgtgggagtctaagtctctttgtaggtctctaaggacctgctttatgaatctgggtgctcctatattgggtgc

SEQ ID NO: 32230 - DNA, 201 bp, Homo sapiens
cacttttctcctttccagaatcatattctaagaactcagccactcaggtatccaccatggtgctgggtcctgaacagaagatgtcagatggtaatttaccrctttgtgttattgtctaattttatttgtaattaggtttatgttggtaacagaaatttatcatatttttcctcttgtcatcatctgtcatcatctattcta

SEQ ID NO: 32231 - DNA, 201 bp, Homo sapiens
tgagaaatatagcaagacaccttgtctctacaaaaaaaaataaattagctgggcatggtggtgtgcgtctgtaatcctggcaactcaggaggctgaggagrgaggattgcttgagcccaggaattcgaggcttcagtgagctatgattgcaccactatactccagcctgagcaatagagggagaccttgtctctaaaatgt

SEQ ID NO: 32232 - DNA, 201 bp, Homo sapiens
tggagtctcactcgtcgcccaagttggagtgtaatggcatgatctcggctcactgcaacctccacctcccgggttcaagtgattctcctgactcagcctcscgagtagctaggattacaggctctggccaccatactcggctaattttttgtatttttagtagagatggcgtttcaccatgttggccaggcaggtcttgaa

SEQ ID NO: 32233 - DNA, 201 bp, Homo sapiens; identical to SEQ ID NO: 7124

SEQ ID NO: 32234 - DNA, 201 bp, Homo sapiens; identical to SEQ ID NO: 7136

SEQ ID NO: 32235 - DNA, 201 bp, Homo sapiens
ggacccacaggtcatctttctccctcttggtacatgccatttcatgtttttgttttttaaatgaaaggcttttctctgctccagtgccaaaggataatagrgctcaggattgaaaccattgggaatttgatttctaattcacacagtagtaaaatacaaaagcattctgcttgtttgttcttatcctgatttgaagcaccc

SEQ ID NO: 32236 - DNA, 201 bp, Homo sapiens
ctatgttggtcagggtggtcttgaactcctgacctcaggtggtccacccgtctcggcctcccaaaatgctgggattacaggcatgagccactgtgcccggmcctgaaaacagatttttaaccagagacctgcttcatatcttttttacaattctgagttgagccaagattagctgaaatttggtttctggcagtaatgctt

SEQ ID NO: 32237 - DNA, 201 bp, Homo sapiens
caggtggtccacccgtctcggcctcccaaaatgctgggattacaggcatgagccactgtgcccggccctgaaaacagatttttaaccagagacctgcttcrtatcttttttacaattctgagttgagccaagattagctgaaatttggtttctggcagtaatgcttgcaagggcaatgttattcccagacccaggataaaa

SEQ ID NO: 32238 - DNA, 201 bp, Homo sapiens
tgagccaagattagctgaaatttggtttctggcagtaatgcttgcaagggcaatgttattcccagacccaggataaaaacctctggagtgttttggctacycatgatgcttcctggtgtttcagatgtgtatggagcagtaaaatacagggcgagtaccttacgctctgtatttgattggagcttcttgagtgctttgact

SEQ ID NO: 32239 - DNA, 201 bp, Homo sapiens
ggaatgcattgacgtgatctcagttcactgtaacctctacctccccggtttaatcgattctcctccttcagcctcctgaatagctgggattacaggcaccmcatttttagtggagatggggtttcaccatgttggccaggctggtctcaaactcttgacctcaagtgatctacctgcctcagcctcccaaagtgctgggat

SEQ ID NO: 32240 - DNA, 201 bp, Homo sapiens
ttagctgaaatttggtttctggcagtaatgcttgcaagggcaatgttattcccagacccaggataaaaacctctggagtgttttggctactcatgatgctycctggtgtttcagatgtgtatggagcagtaaaatacagggcgagtaccttacgctctgtatttgattggagcttcttgagtgctttgactattccttcct

SEQ ID NO: 32241 - DNA, 201 bp, Homo sapiens
gccaaggcgggaatgcattgacgtgatctcagttcactgtaacctctacctccccggtttaatcgattctcctccttcagcctcctgaatagctgggattmcaggcaccacatttttagtggagatggggtttcaccatgttggccaggctggtctcaaactcttgacctcaagtgatctacctgcctcagcctcccaaag

SEQ ID NO: 32242 - DNA, 201 bp, Homo sapiens
ctgtatttgattggagcttcttgagtgctttgactattccttcctaaatctgagcttctttggaatttctgttccttttctataaatttcttcattaattyaaagctgcttaattaagatgatatgagtcagctccctatggaaagaaagctcttatttgtttaaattagaggttgtaaggatttattgcaaacacagaga

SEQ ID NO: 32243 - DNA, 201 bp, Homo sapiens
cctatttataccaagtagcatgagattagtactagagtgagatttggaatattagtccacatatcacaaactgcttgcctacatgtatagattttttttttcacccaccttcctaaccaggaatttgtttccttaaatttgttgttgttgttgttgttgtttgttgttatttttttgagaagagtcttgccctgtcgccaa

SEQ ID NO: 32244 - DNA, 201 bp, Homo sapiens
gaagttgcagtgagccaagatcatgccatggtactccactctgggtaacagaatgagacctcctctcaaaaacgaaaaccaaaacaaaacaggccgggcgyggtggctcacacctgtaatcccagcactttgggaggccgagatgggcagatcacctgaggttaggagttcaagaccagcttggttaacatggtgaaaccc

SEQ ID NO: 32245 - DNA, 201 bp, Homo sapiens
tggacagggccctctatggtcctatcccagcaatagccaagagttactagttaataagttcactcatttgcattagctctctgcccctggaagtattttascctatttccaggccatttagtctcatttctcaatgtctcagaacaatataacaaacatctccaatgaaagtggtctatcaactaagtcatctaagtgaca

SEQ ID NO: 32246 - DNA, 201 bp, Homo sapiens
caagtgtagagaatggacagggccctctatggtcctatcccagcaatagccaagagttactagttaataagttcactcatttgcattagctctctgccccyggaagtattttagcctatttccaggccatttagtctcatttctcaatgtctcagaacaatataacaaacatctccaatgaaagtggtctatcaactaagt

SEQ ID NO: 32247 - DNA, 201 bp, Homo sapiens
tggtgaaaccctgtctttactaaagatacaaaagttagctgggcgtagtggtgggtgcctgtaatcccagctactcgggagactgaggcaggagaatcacytgaacctaggaggcagaggctgcagtgagccaagatcgcgccactgcactccggcctgagtgacagagtgagactctgtctcaaaaccaaacaaacaaac

SEQ ID NO: 32248 - DNA, 201 bp, Homo sapiens
tatttaagatggaggtttaggagcttggagaagagaaaggactaggcagagaaacgaaggagcatccagtaaagtttagactgaaagcttctggaatgagrtccggacttgagcctagcttctggcacagtgcccagcacagcacttggtgttggtggtgcatagcaaagaagggagaaatgccacagggaactgctgttt

SEQ ID NO: 32249 - DNA, 201 bp, Homo sapiens
aggggttagggataaggaatagtagaatttataccatttttgctgcagagaatggctacagatggaggctggaaacctgctgttaatctctagaacacttscccacaccagtgtgccacacattagatactttattaagaaaatcacttcagtaaatgttgaaaaattatttcctagatctcttctttttttcttcccaat

SEQ ID NO: 32250 - DNA, 201 bp, Homo sapiens
aagatggaggtttaggagcttggagaagagaaaggactaggcagagaaacgaaggagcatccagtaaagtttagactgaaagcttctggaatgaggtccgracttgagcctagcttctggcacagtgcccagcacagcacttggtgttggtggtgcatagcaaagaagggagaaatgccacagggaactgctgttttggat

SEQ ID NO: 32251 - DNA, 201 bp, Homo sapiens
aggaaaaccaagtaactgaatgtgtccttgacaggaattgtttttaaaaattcactatagaagttagggggatcctttcagaatgcaaattggatatgaasatgccagtttgtcctcagtcagcctaaggctaatgagcttgttgaagacccattattattattatttttgagacagagtttttctctatcgcccaagcta

SEQ ID NO: 32252 - DNA, 201 bp, Homo sapiens
tgggcacagctggatgttcaaggaagggagcaggtttgcatttgagaagtgctgtgtgagcagtcatggctcttcaaagagcctggtgagtgatgaccatrttttgtctttcagggttggcaatgtttgattgcactgggcatgtccttcctggactgtgggcatacggtaagcatctctaaaggcctgctgacagaagaa

SEQ ID NO: 32253 - DNA, 201 bp, Homo sapiens
agaagtgtggaagtaggaaaaccattgtgagttaaaactgatctagagaattgagtgactgggggagggggagggagataacttttttagtgtaggctaarttttttacttcctgaatttttaaccatgtgaatgtattacttattctaaaatgtacattaaaaataaactattcaaaataaattgagctagagtcaggtt

SEQ ID NO: 32254 - DNA, 201 bp, Homo sapiens; identical to SEQ ID NO: 7121

SEQ ID NO: 32255 - DNA, 201 bp, Homo sapiens; identical to SEQ ID NO: 7130

SEQ ID NO: 32256 - DNA, 201 bp, Homo sapiens
ttattctgcttttctctaagctgactattttctacctgtagcttatttcactgtttcacttttacattctatatgtgctgccaatgaaaaattagtatttraagagaaaccaaactcatttagcttaaagaccaaggagcattttggcagacctgatataaatggaaatattgacaccatttattaaaaacaaaggcagag

SEQ ID NO: 32257 - DNA, 201 bp, Homo sapiens
tctaagctgactattttctacctgtagcttatttcactgtttcacttttacattctatatgtgctgccaatgaaaaattagtatttgaagagaaaccaaamtcatttagcttaaagaccaaggagcattttggcagacctgatataaatggaaatattgacaccatttattaaaaacaaaggcagagctcaggcacagtga

SEQ ID NO: 32258 - DNA, 201 bp, Homo sapiens
ttttgctgcagcttcagagtttagcctgaactgtggcaggattttgtaacttgcacattttttgagaagtctgatggaggtataatgtccacggtcgattmtttgagtaagtcctaccaaatataggaggtggggaggacatttcgctagacaggcctagttcttttcttttaaaagctaggattttaggttaccaggagc

SEQ ID NO: 32259 - DNA, 201 bp, Homo sapiens
tgagcttgttgaagacccattattattattatttttgagacagagtttttctctatcgcccaagctagggtatagtggcatgatcttagctcactgcaacytctgcctcctgggttcaagtgattcgcctgccttagcctcctgagtagttgggactacagccatgtgctaaccatgcctggctaatttttgtatttttag

SEQ ID NO: 32260 - DNA, 201 bp, Homo sapiens
tgccatcactttgaaaaagtaattttttttctttttagtacaaactatatgtggcaagatctttggatttgctaataattatttttcagtttcccctcccrccgggggctacactgtcctctgcagcttcttctggacattttgggcctttcttaccgttgcctaaggcaagaatgaacactatgtctggaagatattttt

SEQ ID NO: 32261 - DNA, 201 bp, Homo sapiens
tacaagcgtgagccaccctacccagccccaagaaagtgttcttagtaaagtgtttttactggagtctctcagttcttttatgctggttacattgtgatccyccaacagtagaatatatagtgtgtagcatttcaccaatttatttgatatttccctgtacttctattgccattttccagaatagtgtgtaaaggaatataa

SEQ ID NO: 32262 - DNA, 201 bp, Homo sapiens
actttgaaaaagtaattttttttctttttagtacaaactatatgtggcaagatctttggatttgctaataattatttttcagtttcccctcccaccggggsctacactgtcctctgcagcttcttctggacattttgggcctttcttaccgttgcctaaggcaagaatgaacactatgtctggaagatatttttaacttag

SEQ ID NO: 32263 - DNA, 201 bp, Homo sapiens
gtgattctcctgactcagcctcccgagtagctaggattacaggctctggccaccatactcggctaattttttgtatttttagtagagatggcgtttcaccwtgttggccaggcaggtcttgaactcctgacctcaagtgatctacccgccttggcctctcaaagtgctgggattacaggcgtgagccactgcgcctggccc

SEQ ID NO: 32264 - DNA, 201 bp, Homo sapiens
ccctgtacttctattgccattttccagaatagtgtgtaaaggaatataatttggggaaagtggtgtagacctcttttttttttttttttttaatatttaaratggaggtttaggagcttggagaagagaaaggactaggcagagaaacgaaggagcatccagtaaagtttagactgaaagcttctggaatgaggtccggac

SEQ ID NO: 32265 - DNA, 201 bp, Homo sapiens
ttgctatgttgtctaggctggtctcaaactcctgggctcaggcagtcctcccaccacagcttctcaaagtgctgggacgacaggcatgagccactgcaccragcctagcttctctttcttcatacacgttaatagttattttgtaataataattatatatatatatatttgtttgtttgtttgttttgtttttttttttga

SEQ ID NO: 32266 - DNA, 201 bp, Homo sapiens
tgacaggaacctattctggccagtttgtcatggaggtacgtgctggtataggatagagggagataacacaacccttttgttacttcttcttcttcttcttytttttttttttttgagatggagtctcactcgtcgcccaagttggagtgtaatggcatgatctcggctcactgcaacctccacctcccgggttcaagtgat

SEQ ID NO: 32267 - DNA, 201 bp, Homo sapiens
taggagcttggagaagagaaaggactaggcagagaaacgaaggagcatccagtaaagtttagactgaaagcttctggaatgaggtccggacttgagcctakcttctggcacagtgcccagcacagcacttggtgttggtggtgcatagcaaagaagggagaaatgccacagggaactgctgttttggatattgtctgagca

SEQ ID NO: 32268 - DNA, 201 bp, Homo sapiens
agaaaggactaggcagagaaacgaaggagcatccagtaaagtttagactgaaagcttctggaatgaggtccggacttgagcctagcttctggcacagtgcscagcacagcacttggtgttggtggtgcatagcaaagaagggagaaatgccacagggaactgctgttttggatattgtctgagcagattattgccacaatc

SEQ ID NO: 32269 - DNA, 201 bp, Homo sapiens
ttttttttaatatttaagatggaggtttaggagcttggagaagagaaaggactaggcagagaaacgaaggagcatccagtaaagtttagactgaaagcttytggaatgaggtccggacttgagcctagcttctggcacagtgcccagcacagcacttggtgttggtggtgcatagcaaagaagggagaaatgccacaggga

SEQ ID NO: 32270 - DNA, 201 bp, Homo sapiens
ttcttttccatcaggcaccaagtccggagtttgcgtggctctgatgtctgctcgtggatcactgattgaccaggctgaagccagagggtcctttagatccsgagggataatagagcaggcagcatttccacccacgttctgagactcctcataattgcctcagtgctgcacgtacctatatggaaaatacaagtgcactgt

SEQ ID NO: 32271 - DNA, 201 bp, Homo sapiens
cttcagagcctctcctcttgtcatcatttaaagtaccccagcgtttgtacattattaccatgcacactgtaactcagtaaagatttttgatgacctgtgggtgtagaaggattatagaggaagatcctagataacattgctgctagtctctgcccacatcacagcatatgtccagtgttttccctccagcctacctcttat

SEQ ID NO: 32272 - DNA, 201 bp, Homo sapiens
tagagatgtggtttcaccatgttggccaggctggtctcgaactcctgagctcaagcaatccacccgccttggcctcccaaagtgctgggattacaggcgtkagctactgcacccagctgggactaaagttcttcataaaaggttggaagtgcatcaagtctcttgtgtttaaatttcaaaagctcgagtggccttatggag

SEQ ID NO: 32273 - DNA, 201 bp, Homo sapiens
ttagtagagatgtggtttcaccatgttggccaggctggtctcgaactcctgagctcaagcaatccacccgccttggcctcccaaagtgctgggattacagscgtgagctactgcacccagctgggactaaagttcttcataaaaggttggaagtgcatcaagtctcttgtgtttaaatttcaaaagctcgagtggccttat

SEQ ID NO: 32274 - DNA, 201 bp, Homo sapiens
tttctacagggggatattgcacatatgtaagtgggctggatggctctcccagctgtgcgtttcatgtgtccccacttttaaagctaccgcttaaatgtgayatctcttgcaaaagcaaaaattatatggaaggagagtttgcaaggggagataggcttctaaaaacttgctggcctcaattttagtgactgttggtgaaaa

SEQ ID NO: 32275 - DNA, 201 bp, Homo sapiens
gtttcctgttgcagacagtcatctgctcctatgttttcttccagggattcctgaacctaaagtggtcacgctttgcccgagtggttctgactcgctctatygccatcatccccactctgcttgttgctgtcttccaagatgtagagcatctaacagggatgaatgactttctgaatgttctacagagcttacaggtgagga

SEQ ID NO: 32276 - DNA, 201 bp, Homo sapiens
tttaagcacataatacactctcacatccttttctccaccctgcatgttggatagtagcctcaggggctacatgcagatacttcattggcagtggctcttaygtgtaaagtactttccatttggtcttatttttatccacatagtttccttgaacaaaggagaaactacatataggagaaactgaggctcagaaaggtacaa

SEQ ID NO: 32277 - DNA, 201 bp, Homo sapiens
agcaagatcctatctcaaaaaatataaaaataaggaagaaggcattgtaagggataaaggatgctaactgttccctggtactatgttactcccgtttcacrttcctgtaaaggctaatcattgttatgttggtatgtagtatgttacagtgaaacccagccagagccaggtactcaagggcatgttcgtaccatcctgttc

SEQ ID NO: 32278 - DNA, 201 bp, Homo sapiens
ggatgtaggtgagtgttggatctctcacttttcgtctggtcaacttttgtcccctaaatctctcagctgactccaaactcctgaaatgtcacaaggaaacktgttctaactggtcaaaaagtgactgctgttgttatctttctagtctagacaggtaaaccggaacaataagcaggaagttcgagaagccaataagtactt

SEQ ID NO: 32279 - DNA, 201 bp, Homo sapiens
gagtctcactctattgcccaggctggagtgcagtggcgtgatctctactcactgcaaacctctccctcccgggttcaagtgattctcgtgcctcagcctcytgagtacctgggattataggcgtgcaccaccatgcctggctaatttttctatttttagtagagatgtggtttcaccatgttggccaggctggtctcgaac

SEQ ID NO: 32280 - DNA, 201 bp, Homo sapiens
ttttgtatttttcgtagagacggggtttcactatgtttgccaggctggtcttgaactcctgacctcaggtgatccacccgccttgacctgctaaagtgctrggattacaggcgtgagccaccatgcctggccttttttttttttttttttttttttttttgagacagagtctcacactattgcctatgctggagttcagtg

SEQ ID NO: 32281 - DNA, 201 bp, Homo sapiens
cacgtagctgggattacgggtgcccgccaccgtgcctggttaatttttgtatttttcgtagagacggggtttcactatgtttgccaggctggtcttgaacycctgacctcaggtgatccacccgccttgacctgctaaagtgctaggattacaggcgtgagccaccatgcctggccttttttttttttttttttttttttt

SEQ ID NO: 32282 - DNA, 201 bp, Homo sapiens
agggttgttggtatgaaattagttaataaacaacaaagtacttagaactcttgatgtggaggagtttttgttgttgttaccttctttccccttaacacttstaaagaattctaaccttattacttattctttgctcagagtctcatgacttatcaccagtgaacccgccggcctatactttccattgacatcattaacttt

SEQ ID NO: 32283 - DNA, 201 bp, Homo sapiens
gatggagtctccctctttcgcccaggctggagtgcagtggtgcgatctctgctcactgcaacttccacccccaggttcaagcgattctcctgcctcagccycccacgtagctgggattacgggtgcccgccaccgtgcctggttaatttttgtatttttcgtagagacggggtttcactatgtttgccaggctggtcttga

SEQ ID NO: 32284 - DNA, 201 bp, Homo sapiens
agcgattctcctgcctcagcctcttgatgcctggcgaattttttttgtatttttagtagtgacggggtttcaccatgttggccaggctggtctggaactcytgacctcaagtgatccacctgtatcggccttccgaagtgctggggtggtgtgagccaccgcgccctgccagatctttcttgtttgactttcattgctaag

SEQ ID NO: 32285 - DNA, 201 bp, Homo sapiens
caagtcccttagcagctttttcttttttcttttcttttttttttttgagatggagtctccctctttcgcccaggctggagtgcagtggtgcgatctctgcycactgcaacttccacccccaggttcaagcgattctcctgcctcagcctcccacgtagctgggattacgggtgcccgccaccgtgcctggttaatttttgt

SEQ ID NO: 32286 - DNA, 201 bp, Homo sapiens
tgtgagccaccgcgcctggcccgaaattgtggttttgtaagttaaataggatgtctccaattttgagattattactagggcatgcaaagtatggtttggtrtctgtaggggattggttccaggacctcactcacatgcataccaaaatcctgggatgatgcttaagtccctataaaatggtgtagtatttgcatttaactt

SEQ ID NO: 32287 - DNA, 201 bp, Homo sapiens
aatgcgcctgccttggtctcctaaagtgctgggattataggcgtgagccaccgcacccagccctttctttagaaattaattatgtatcatacacatctgtwtcatatatctaagatgtgttgtaaactatccggatactcagtcttgaattctctggcccctaatagtaagccccttatgttgcttggtcctatgatgatt

SEQ ID NO: 32288 - DNA, 201 bp, Homo sapiens
cctggttgtatatttttgagccttgtggaattactaataaccacaagtcccttagcagctttttcttttttcttttcttttttttttttgagatggagtcyccctctttcgcccaggctggagtgcagtggtgcgatctctgctcactgcaacttccacccccaggttcaagcgattctcctgcctcagcctcccacgtag

SEQ ID NO: 32289 - DNA, 201 bp, Homo sapiens
actgcaacctccgcctcccaggttcaagcaattcttgtgcctcagtctcctgagtagctgggattacaggcacctgccaccatgtccagctaatttttgtrtttttagtagagacgggatttcaccatgttggccaggctggtctctaactcctgacctcaggtctaggaatgcccgcctcagcctcccaaagtgctggta

SEQ ID NO: 32290 - DNA, 201 bp, Homo sapiens
ttataaactgagtgtgtttgtgtggcttttggttgaagacattctaatattacccacttgagtagaggggattagagttttgaggcctttttctaaaatgwatacttaccacaggggcttttcactgtttaccatgaagtacacataatcagtcttcaacctgactttttttttctgtgtatcattttatatcaaattcat

SEQ ID NO: 32291 - DNA, 201 bp, Homo sapiens
ggaatgagccactgtgcctggtccaccccaaccttttttttttttttttgagatggagtctcgctttgttgtccaggctggagtgcagtggcgcaatctcrgctcactgcaaccttcgcctcccgggttcaagcaattctcctgcctcagccccctgagtagctgggattacaggcatgtgccaccatgcccagctaattt

SEQ ID NO: 32292 - DNA, 201 bp, Homo sapiens
ttgcagtaatattctcagaactgattgacgcataaggaaggactgtttgcctcatatcaaatagcccaagactaattgatgtacttgagttttttgattcytcagtgtgccaagttcctcttttcctggaagagctatgcatagttccagatctgatttgtggtttccaatttattgtgggttaagacaatctgataacat

SEQ ID NO: 32293 - DNA, 201 bp, Homo sapiens
ttgcccaggctggtcttgaactcctgggcttaagcaatctgcctgccttggcctcccgaagtgttaggattacaggcatgagccactacagccagccagtyttacaacttttgttagagaatgggataaaataggctgggcatggtggctcacgcctgtaatcccagcactttgggaggctgaggtgggcagatcacaagg

SEQ ID NO: 32294 - DNA, 201 bp, Homo sapiens
caagtagcacgcactaccacacccagctaatttttgtatattttttgtagggatggggttttgccctgttgcccaggctggcattgaactctgctcgcctyggccttccaaaatgctaggattacaggcttgagccaccgcactcggcccaaacttttgttttaaccgtagattaaaaaaaaaaaagttgaagttgtatat

SEQ ID NO: 32295 - DNA, 201 bp, Homo sapiens
gacctcgtgatctgcccgccttggcctcccaaagtgctgggattacaggcgtgagctactgcgcctggctctgccctttttttttttttttttttttttttgagaccaagtctcgctttgtcacccaggctcgggtacagtggtgtgatcttggcttactataacctcaacctcccaggttcaagcgattctcctgtctca

SEQ ID NO: 32296 - DNA, 201 bp, Homo sapiens
taaaaaattttttaagaagtctagaattatataaaaatggcaatatagttgttgtaggaagctaggattatagatatattcttctctattttccaaatctyctttagcattgcttatattaatgaaaaacagccaaaataacaacagatccatttccctgttctatacaggtttctttgaaaagacacaggggttagggat

SEQ ID NO: 32297 - DNA, 201 bp, Homo sapiens
aatactcagtatttcaaactttcttaggggcagttttctgttttgtgttttttgttttttttttgagatggggtcttgcttggttgcccaggctggagtgmagtggcatgatctcggctcactgcaacctccacttcccaggttcaagcgtttctcctgcctcagcctcccaatagctgggattacaggcacccacaacca

SEQ ID NO: 32298 - DNA, 201 bp, Homo sapiens
actctacatttgggcagtggggatcctggctgcaggacagagctccaccatgacaggaacctattctggccagtttgtcatggaggtacgtgctggtatakgatagagggagataacacaacccttttgttacttcttcttcttcttcttttttttttttttttgagatggagtctcactcgtcgcccaagttggagtgta

SEQ ID NO: 32299 - DNA, 201 bp, Homo sapiens
aaaatacaaaagcattctgcttgtttgttcttatcctgatttgaagcacccatccttaggcagagtgtgtcacaagaatagtcagagtgctaattttgctraggacatttggtaccatctcagtccttaactatttcagctcctacctgttattttgcatatcagaagccattcatgtatgtatctgtaagccatttcttt

SEQ ID NO: 32300 - DNA, 201 bp, Homo sapiens
atctcttattttaaaaaagtgattaataaccttcctcattaaaatacatagggttcagaaaataattagctctgtttgagctgctagaatatttcagaaasttttgttgactgtcagtcatccaaatggcaggagcccaccttcatgaagagcacctggtacaacaaggtgttgtgttaataatacagtaatggtttagta

SEQ ID NO: 32301 - DNA, 201 bp, Homo sapiens
tcttttttttttttttttttaatatttaagatggaggtttaggagcttggagaagagaaaggactaggcagagaaacgaaggagcatccagtaaagtttaractgaaagcttctggaatgaggtccggacttgagcctagcttctggcacagtgcccagcacagcacttggtgttggtggtgcatagcaaagaagggagaa

SEQ ID NO: 32302 - DNA, 201 bp, Homo sapiens
taagatggaggtttaggagcttggagaagagaaaggactaggcagagaaacgaaggagcatccagtaaagtttagactgaaagcttctggaatgaggtccrgacttgagcctagcttctggcacagtgcccagcacagcacttggtgttggtggtgcatagcaaagaagggagaaatgccacagggaactgctgttttgga

SEQ ID NO: 32303 - DNA, 201 bp, Homo sapiens
tctattgcagaagctttatcagagagttcaactgaacatccctaaaatgtttgttgagaagctgagtgaatctatatgaccttgacattttttataaggcwaataatacatgtatctggtaaaacttctttttatgtgcaaaaggtatacagtgtatattcagtgagaggttttcccttcacatgacctcatttgggctct

SEQ ID NO: 32304 - DNA, 201 bp, Homo sapiens
ctgcaggacagagctccaccatgacaggaacctattctggccagtttgtcatggaggtacgtgctggtataggatagagggagataacacaacccttttgytacttcttcttcttcttcttttttttttttttttgagatggagtctcactcgtcgcccaagttggagtgtaatggcatgatctcggctcactgcaacctc

SEQ ID NO: 32305 - DNA, 201 bp, Homo sapiens
taatcccagcactatgggaggctgaggcgggcggatcacgaggtcagcagatcgagaccatcctggctaacacggtgaaaccctgtctctactaaaaatayaaaaaattggctgggcgtggtggcgggcacctgtaatcccagctactcgggaggctgaggcaggagaatcacttgaacccaggaggcagaggttgcagtg

SEQ ID NO: 32306 - DNA, 201 bp, Homo sapiens
cagatcgagaccatcctggctaacacggtgaaaccctgtctctactaaaaatacaaaaaattggctgggcgtggtggcgggcacctgtaatcccagctacycgggaggctgaggcaggagaatcacttgaacccaggaggcagaggttgcagtgagctgagattgcaccactgcactccagcctgggcgacagagcaagac

SEQ ID NO: 32307 - DNA, 201 bp, Homo sapiens
acctccgcctcatgggttcaagtgatgctcctgcttcagcctcccgagtagctgtgactaaaggcacacgccacaatgcccggctaatttttgtatttttrgtagagacagggtttcgccatgttggccaggctgttcgcaaatgcctgacctcaagtgatccgcccgtctcagcctcccaaagtgctgggattacaagca

SEQ ID NO: 32308 - DNA, 201 bp, Homo sapiens
tatatgaaactgatagaacttttgtattttttttttaaatattgttttgatatatcagatatttgttttgtctggatcacaagtgagaaagaaaagagaayaatgctctttttcacaatgaactggtcaaattgactatcttgtaaagtgatactttactatgtcagtgaaatttcagtttgattttagtcaaccagatta

SEQ ID NO: 32309 - DNA, 201 bp, Homo sapiens
tatttgtttaaattagaggttgtaaggatttattgcaaacacagagattagagctttgtgattcaaaatagccatttgatggctgaagcaaactaggctcygtgtatttctggcagggtatcccttttctcccagaccttctgcttcccaatatttaagattgactgcaaaatgcagaactcagggaaacgctgatatcag

SEQ ID NO: 32310 - DNA, 201 bp, Homo sapiens
tatcccttttctcccagaccttctgcttcccaatatttaagattgactgcaaaatgcagaactcagggaaacgctgatatcagtctgagatgagccctgcyatcacgagggtgccagtaccccgtgaccggcggcactttactgcaagccttagtcagagtacaaagggttcctgcttggtggttttgctgcagcttcaga

SEQ ID NO: 32311 - DNA, 201 bp, Homo sapiens
actgcaccaagcctagcttctctttcttcatacacgttaatagttattttgtaataataattatatatatatatatttgtttgtttgtttgttttgttttkttttttgagacagaatctcactctgttgcccaggctggagttcagagttcagtggtgtgatctcagctcactacagcctctgcttcttgcagtgaggcga

SEQ ID NO: 32312 - DNA, 201 bp, Homo sapiens
caggctcaagcgattctcccatctcagcctcccaagtagctgggaccacaggcgagcacgaccacacccagctaattaaaattttttttttttttttttttgtggagatgaggtattgctatgttgtctaggctggtctcaaactcctgggctcaggcagtcctcccaccacagcttctcaaagtgctgggacgacaggca

SEQ ID NO: 32313 - DNA, 201 bp, Homo sapiens
cccaccttcctaaccaggaatttgtttccttaaatttgttgttgttgttgttgttgtttgttgttatttttttgagaagagtcttgccctgtcgccaaggygggaatgcattgacgtgatctcagttcactgtaacctctacctccccggtttaatcgattctcctccttcagcctcctgaatagctgggattacaggcac

SEQ ID NO: 32314 - DNA, 201 bp, Homo sapiens
actttaagtttatgaaaaaaaacattgcttacttcagctgcatgctggccaaatttagttgaagtgcagttggtataagtttagttgtttagttttggaayaagagagttcaagacttcccctcccaccccccacaagacaaggtctggctctgtaacccaggttggagtgcagtggcatgatcacagctcactgcagggt

SEQ ID NO: 32315 - DNA, 201 bp, Homo sapiens; identical to SEQ ID NO: 7147

SEQ ID NO: 32316 - DNA, 201 bp, Homo sapiens
aaatttagttgaagtgcagttggtataagtttagttgtttagttttggaataagagagttcaagacttcccctcccaccccccacaagacaaggtctggcwctgtaacccaggttggagtgcagtggcatgatcacagctcactgcagggttgacctcccaggctcaagtgattctcctgccacagcctccctagtagctg

SEQ ID NO: 32317 - DNA, 201 bp, Homo sapiens
tgacaagaccttgtctccaagtaaaaaaaataaaataaaattagttgggtgtggtggtgcacacctgtggtcccagctactttggaggctgaagtgggagkattgcttaagcccaggagttcaagaccagcctgggcaacatggcaaaaccctgtctctacaaaaataaaaataaataaaaaaagaaattggttgaaagag

SEQ ID NO: 32318 - DNA, 201 bp, Homo sapiens
aggcagaagttgcagtgagccaagatcatgccatggtactccactctgggtaacagaatgagacctcctctcaaaaacgaaaaccaaaacaaaacaggccrggcgcggtggctcacacctgtaatcccagcactttgggaggccgagatgggcagatcacctgaggttaggagttcaagaccagcttggttaacatggtga

SEQ ID NO: 32319 - DNA, 201 bp, Homo sapiens
gcatggtggtatgcacctgtagtcccagctactcgggaggctgaggtggaaggatcacttgagcctaggaggcagaagttgcagtgagccaagatcatgcyatggtactccactctgggtaacagaatgagacctcctctcaaaaacgaaaaccaaaacaaaacaggccgggcgcggtggctcacacctgtaatcccagca

SEQ ID NO: 32320 - DNA, 201 bp, Homo sapiens
tatctatatatctatatatatatatacacacacacacacacacacacaccccatctatatctatctatctctgtctgtctgtctgtctgtctgtctatctrtctatctatctatctatctatctatctgtctatctaatcttttttacagacagggtcttgctctgtcatctaggctccagtgcagtggcacaaccatagc

SEQ ID NO: 32321 - DNA, 201 bp, Homo sapiens
atatctatatatctatatatatatatacacacacacacacacacacacaccccatctatatctatctatctctgtctgtctgtctgtctgtctgtctatcyatctatctatctatctatctatctatctgtctatctaatcttttttacagacagggtcttgctctgtcatctaggctccagtgcagtggcacaaccatag

SEQ ID NO: 32322 - DNA, 201 bp, Homo sapiens
actatatctatatatctatatatatatatacacacacacacacacacacacaccccatctatatctatctatctctgtctgtctgtctgtctgtctgtctrtctatctatctatctatctatctatctatctgtctatctaatcttttttacagacagggtcttgctctgtcatctaggctccagtgcagtggcacaacca

SEQ ID NO: 32323 - DNA, 201 bp, Homo sapiens
aggaaacacactgctgtaaacttctggttaggaggaagtttagaggaagctcacacagagttgggaagaacaaagacgaagctatagtcactggaagtaaractttagtgaccctgacttgtgagcattcagggagatttggaagctggttaagcctcaagagtgctgatgggagaaggtgaagagttgtatttaatgggt

SEQ ID NO: 32324 - DNA, 201 bp, Homo sapiens
ggaagccaagccccccccccccttttttttggtccccgagtttgtttttacttcgcactttatttggatttttctctttgcagttcacgctcctttcctcwtttcttggtctctcttactaatgaaattttctcctagctgtttttacgtgaataaagaagctcaattacctttaatgctgtaagcagtgcgaggggtcgg

SEQ ID NO: 32325 - DNA, 201 bp, Homo sapiens
ctggatccaggaaatattgaatccgatttgcagtctggagcagtggctggatttaaggtgaacatctagtcctacccctgtccttttaagcacataatacmctctcacatccttttctccaccctgcatgttggatagtagcctcaggggctacatgcagatacttcattggcagtggctcttatgtgtaaagtactttcc

SEQ ID NO: 32326 - DNA, 201 bp, Homo sapiens
cacccatgccataggaatctgtgtgtctggcggtatgtgctggcctcattctatagtgagacagtcaaggacttgggggtcagtggccctgaagacagacrgtaccaacggaaatactgtagctcctcctgctgccaggccatgttttccccctctttcaaaatctaacttgagactcgcatttcctagaaggttttctta

SEQ ID NO: 32327 - DNA, 201 bp, Homo sapiens
tgttaaccattgttatgttattatgtaatctacaaagtacgtttagttacacttcatgaaatactttcagtttttcaaagacaccactaatacatgggaawtcaaaccctgaaaattaatttcactttagcagtaaagtcacatgccagatggaaaggatagtatttcatgaacaaagatcttacttttgagatttggtct

SEQ ID NO: 32328 - DNA, 201 bp, Homo sapiens
ttcttaaagtgtattcaaactgttccctaattccagctggccttctccccaattcctctggatttcagaggtttcactgcattcctaaatgggaaacctcygggggaaatcagtatctcaacaacctttggccatggggagaaatccagaaatagagcaataaggttaagcagttttccaaactattagaccttttcatca

SEQ ID NO: 32329 - DNA, 201 bp, Homo sapiens
ctggagcgcagtgacgtgatctcggctcactgcaaccttcacctcccgggttcaagagattctcctgtctcagcctcccgagtagctgggactacaggtaygtgccaccacacctggctaatttttgtatttttagtagagacaagagttacaccatattggccaggatcttttgctttctatagcttcaaaatgttctta

SEQ ID NO: 32330 - DNA, 201 bp, Homo sapiens; identical to SEQ ID NO: 7149

SEQ ID NO: 32331 - DNA, 201 bp, Homo sapiens
aaatactgcctcttcctaaaatgcatcatgccacagccaattttggaaaacacaaatatgaggtgagtgtattttgaaaactatgtgaatataatagatcyttaattcatatttgtggattttatgggaaatacttgttttctaaggcatctgtcttgcaaaaagtcagtttctgctatgaaggatgttaaaggggatatg

SEQ ID NO: 32332 - DNA, 201 bp, Homo sapiens
ccactcctcttatttgctcacacggggtattttaggcagggatttgaggagcagcttcagttgttttcccgagcaaagtctaaagtttacagtaaataaawtgtttgaccatgccttcattgcacctgtttctccaaaaccccttgactggagtgctgttgcctcccccactggaaaccgcaggtaactacttgtaattac

SEQ ID NO: 32333 - DNA, 201 bp, Homo sapiens; identical to SEQ ID NO: 7151

SEQ ID NO: 32334 - DNA, 201 bp, Homo sapiens; identical to SEQ ID NO: 7152

SEQ ID NO: 32335 - DNA, 201 bp, Homo sapiens; identical to SEQ ID NO: 7153

SEQ ID NO: 32336 - DNA, 201 bp, Homo sapiens; identical to SEQ ID NO: 7154

SEQ ID NO: 32337 - DNA, 201 bp, Homo sapiens; identical to SEQ ID NO: 7155

SEQ ID NO: 32338 - DNA, 201 bp, Homo sapiens; identical to SEQ ID NO: 7156

SEQ ID NO: 32339 - DNA, 201 bp, Homo sapiens
tgcagagtcaggacgagaacccaggtctctgtgattccaggatccatggagcctagcacccaggcaaaccaggaagcagcacgaggtagcttagaatctgygccagaacaagtgtaagaactggaaatgcaatactttgttgagagaagacggagactgctgtgggttgaggcagggaggaatgttcccttccaagcatgt

SEQ ID NO: 32340 - DNA, 201 bp, Homo sapiens; identical to SEQ ID NO: 7157

SEQ ID NO: 32341 - DNA, 201 bp, Homo sapiens; identical to SEQ ID NO: 7158

SEQ ID NO: 32342 - DNA, 201 bp, Homo sapiens
ttaaaaataaatgcattgagttttaaaaatgagtcaataattttaaaaatcataaaagttttaaaagtgagtcaataatttagaaaactgtagaacacctrctgttcagaatagcataaatcacaaagatgaaatgtgaatagctgaaatatggaggataaaaaaacataatcaagttgttgtgtaggatattggcaattt

SEQ ID NO: 32343 - DNA, 201 bp, Homo sapiens
gaataaaagaggcctaccatgatggtaaaagggactctagaaccaagggaacaaggaatgtttaacctgaagaggttttgtttgctaaggagaactttaarggattctcccaaaagctaggacagagaagagacttgttttcagtggcctcaagggggcagacttaagatccatgggtagaagtgagaagatggatttcag

SEQ ID NO: 32344 - DNA, 201 bp, Homo sapiens; identical to SEQ ID NO: 7160

SEQ ID NO: 32345 - DNA, 201 bp, Homo sapiens; identical to SEQ ID NO: 7159

SEQ ID NO: 32346 - DNA, 201 bp, Homo sapiens
tattggtgtgagggcatgctctggcaccatggaagcttactcctattcagacattcattaggtaaatccagatatgaggttttattcctgtttgacaggcwgggaacgacaaatcagtgtcttaagggattgacaaaatatgtaattagatgctatcaatcaccataaaagagcctgctttttcttacatcagataaaggt

SEQ ID NO: 32347 - DNA, 201 bp, Homo sapiens; identical to SEQ ID NO: 7162

SEQ ID NO: 32348 - DNA, 201 bp, Homo sapiens; identical to SEQ ID NO: 7161

SEQ ID NO: 32349 - DNA, 201 bp, Homo sapiens; identical to SEQ ID NO: 7163

SEQ ID NO: 32350 - DNA, 201 bp, Homo sapiens; identical to SEQ ID NO: 7164

SEQ ID NO: 32351 - DNA, 201 bp, Homo sapiens; identical to SEQ ID NO: 7165

SEQ ID NO: 32352 - DNA, 201 bp, Homo sapiens
tttctaaatgcgtaagagaacaaacttcctaagcactttcaagaacttgagaaattctggtgttttgtgaataataggaggcagggtgaggtgaaaagagsccccctccaacctcccacccaccaccccactctctctctctctgaagttgggtgaggcggttttcttcagccgacttccgtttactcatctgtaatttga

SEQ ID NO: 32353 - DNA, 201 bp, Homo sapiens; identical to SEQ ID NO: 7170

SEQ ID NO: 32354 - DNA, 201 bp, Homo sapiens; identical to SEQ ID NO: 7171

SEQ ID NO: 32355 - DNA, 201 bp, Homo sapiens
ggctgaggcaggaggcaggagaatcacttgaacccgggaggtgaaggttgcagtgagccgagatcatgccattgcactctagcctgggcgacagagcgggaaaaaaaaaaaggcaaaagggctactttgtgttaacagcatctatcagtcaattatactctagtacgaattgcccaccaacccctaagtggttgtaggggg

SEQ ID NO: 32356 - DNA, 201 bp, Homo sapiens; identical to SEQ ID NO: 7172

SEQ ID NO: 32357 - DNA, 201 bp, Homo sapiens; identical to SEQ ID NO: 7173

SEQ ID NO: 32358 - DNA, 201 bp, Homo sapiens
tgggtaacagagccaaaccctgtctctaaaacaaacaaaaacagaaacaaaaagtacactacttactgtcctgcttctcaccattccagcctggtagtccttttttttttttttgagacagggtcttgctcagttgctcaggctggagtgcagaagcgtaatcacagctcactgcagccttgatctccaaaaagactacca

SEQ ID NO: 32359 - DNA, 201 bp, Homo sapiens
caacctgaatgactgcaggttccccttaacgtattcagtgagtgcccactttatgccaggccccggacacagctgtaaaaagacacacaaggaccaccccmctttgcggagcctggttgagtgaaggggacaaatgagtaaatcctaagaaagtagttgattgcagtaagatttgtgctggggattcaacccatcagttca

SEQ ID NO: 32360 - DNA, 201 bp, Homo sapiens
tccacccccaggacagcccccatgtctattttctttttctttaaagatgttcttatttgggggccaggcgtggtggctcatgcctgtaatcccagcacttygggaggccgaggcaggcggatcacctgagatcaggagttcgagaccagactggccaacatgacagggtgagaccccatctttacaacaaatacaaaaatt

SEQ ID NO: 32361 - DNA, 201 bp, Homo sapiens; identical to SEQ ID NO: 7177

SEQ ID NO: 32362 - DNA, 201 bp, Homo sapiens; identical to SEQ ID NO: 7178

SEQ ID NO: 32363 - DNA, 201 bp, Homo sapiens
ggggtgcagggcactggatgaggtctgggctgtggtgggacccaggagggggcaggcagaggggcacactcttagcccgccctaaacccatctgtgccgtrtgactccggcaaacctctcacccttgctaagcctagcaactaggttaaggcaccctcaaaccccagtctccccagtctccctaacacttgtaccagcctg

SEQ ID NO: 32364 - DNA, 201 bp, Homo sapiens
agcctggcatgcagtaggtgcttcataaatacacactgtggacagtagaattatgatgggagcgagcgtgtgaactgggttgctaatgtggagcgtgaagrgggaggcccagggttactcggccaatgggttccgggcagcaagcacgtgggggaagcctcagctgaccacttcctggccagtttatgcaggaactcgcac

SEQ ID NO: 32365 - DNA, 201 bp, Homo sapiens; identical to SEQ ID NO: 7168

SEQ ID NO: 32366 - DNA, 201 bp, Homo sapiens
aaagtaaaaataaatcttataaagtagctgtggactgggcacagtggctcacacctgtaatcccagcactttgggagaccaaggtgggcagatcacctgargtcaggagtttgagaccagcctggccaacaaggtgaaaccccatctctactaaaaatacaaaaattagccaggcatggtggtacacatctgtaatcccag

SEQ ID NO: 32367 - DNA, 201 bp, Homo sapiens; identical to SEQ ID NO: 7166

SEQ ID NO: 32368 - DNA, 201 bp, Homo sapiens
tgaagcaggagaattgcttgaacccgggaggcggagattgtagtgagttgagatcgcacaactgcactccagcctgggcaacagagcgagactccaatccaaaaaaaagaaaaaaatcccctaggacagggctgtggctgagaccctgagggctggaggcttggctggccttgcacagcagcgggtgcatgctggggtggg

SEQ ID NO: 32369 - DNA, 201 bp, Homo sapiens
cagcctctcgagtagctgggattacaggcatgtaatcccaccaccaagcccagctaattttgtatatttagtagagacagggtttctccatgttggtcagrctagtctagaactcttgacgtcagatgatccacgtgcctcggcctcccaaagtgctgggattacaggcgagagccaccgtgcccggcgcagaattctttt

SEQ ID NO: 32370 - DNA, 201 bp, Homo sapiens
ggggccttgctgtgtgaccccctagtgagtccttgtgtctcttacccacgcatgcctgtcacatgcagacacccacacacacccagtatctgccggacagrgcagcccttcctctccgcagccaggaagctggacataggcacaagggctgacgcctggggccaggaatcctgcctgagcattaggagaaggtctggaacc

SEQ ID NO: 32371 - DNA, 201 bp, Homo sapiens
gcagtatagcgagaatccatctctaccaaaaatgtttaaaaaaaattagccagacatgatggtgtgtgcctgtagtctcagttattcaggaggctgaggcrggaggagcacttgaatccaggagattgaggctgcactgagccatgagtgccccactgcactccagcctgggtaacagcaagaccataataaataaataaa

SEQ ID NO: 32372 - DNA, 201 bp, Homo sapiens
aactcttgacgtcagatgatccacgtgcctcggcctcccaaagtgctgggattacaggcgagagccaccgtgcccggcgcagaattcttttttttagagaygaggtattgccatcttgcccagacttgtctcgaactcctgggctcaaacaatccacccacctcggcctcccaaagtgctgagattactgacataagccac

SEQ ID NO: 32373 - DNA, 201 bp, Homo sapiens
gagtaactgcaataacacccagtttatcaagtgcctcctatgtgtctggccctgtgctttacccctcatttgaccacctctccagtgagagtctcagtccyttttttcctggtgaggaaacaggcatggcagagaggcatgacacatcaaggttgcccttcctggctccatctagcccgttctcctctgcttcctttgttt

SEQ ID NO: 32374 - DNA, 201 bp, Homo sapiens
tgcaacctccaccgccccgattcaagccattcttctgcctcagcctcccgagtagctgggatcacaggcgccagccaccatgcccagctaatttttggtakttttagtagaagcgggcgtttcaccatattggccacatatcggccaggctggtcttgaactcctgacctcaagtgatccacctgcatcggcctcccaaag

SEQ ID NO: 32375 - DNA, 201 bp, Homo sapiens
catgttggtcaggctggtcttgagctcctgacctcaggggatccacctgcctcagcctcccaaagtgctaggattacaggcgtgagccaccgcgcccagcsaagacagttattttaaagtatttgtctagtgagtctgatgtgtgggcttccttagggatggtttctgtctgttaattttgttccttaaaatgcgccacac

SEQ ID NO: 32376 - DNA, 201 bp, Homo sapiens
cggtaggcctgtgggtgaccagcttccctatctgtcttcccacagtgcggctgggatccggcggccacctgcacctgcgtatctctcgggccgcccttccygaggggctccccgaggcctcccgccttcaccgggctctgttccggctgtccccgacggcgtcaaggtcgtgggacgtgacacgaccgctgcggcgtcagc

SEQ ID NO: 32377 - DNA, 201 bp, Homo sapiens
cctcttccccctctaggagctgagggagctgaggagcggcatgagggacagggagggggcggcagagcttcctggggcctcaaggacaatcctttcctgtmcccattcttcagatggggaaactgaggccatggaggagttaggacgccctgagtcacccagcagggactgaaggggttctgggtggaggttaggacatct

SEQ ID NO: 32378 - DNA, 201 bp, Homo sapiens; identical to SEQ ID NO: 7176

SEQ ID NO: 32379 - DNA, 201 bp, Homo sapiens; identical to SEQ ID NO: 7167

SEQ ID NO: 32380 - DNA, 201 bp, Homo sapiens; identical to SEQ ID NO: 7169

SEQ ID NO: 32381 - DNA, 201 bp, Homo sapiens
gtgtgtttgacaaaggcgttgataactgagagctggtagtggaggggggagattttgggagattggggccctgccaggtggacggactggcctgacctccrgcccctgtgctctgtttacttccatcccagctccacctctggggacccatggaagctgtcggtgaggaacacaggatccgacctgctgagctcatctctg

SEQ ID NO: 32382 - DNA, 201 bp, Homo sapiens
gacaaaggcgttgataactgagagctggtagtggaggggggagattttgggagattggggccctgccaggtggacggactggcctgacctccggcccctgygctctgtttacttccatcccagctccacctctggggacccatggaagctgtcggtgaggaacacaggatccgacctgctgagctcatctctggccacctg

SEQ ID NO: 32383 - DNA, 201 bp, Homo sapiens
taaaaattcaaaaattagctgggcatggtggtgcatgcctgtaatcccagctactcgggaggctaaggcaggagaatcgtttgaacccaggaggtggagaytgcagtgagtcgagatggcgccattgcactccagcctgggcaacaagagtaaatctccatctcacaaaaaaaaaaaaaaaaaaaaagcaaggcacagtgg

SEQ ID NO: 32384 - DNA, 201 bp, Homo sapiens
agagcaccagttagacaaggagagccaggaggagctgggccccaacctcatccaaaagcacaggtgagctctgagacctccacccccaggacagcccccaygtctattttctttttctttaaagatgttcttatttgggggccaggcgtggtggctcatgcctgtaatcccagcactttgggaggccgaggcaggcggatc

SEQ ID NO: 32385 - DNA, 201 bp, Homo sapiens
ctctccagtgagagtctcagtcctttttttcctggtgaggaaacaggcatggcagagaggcatgacacatcaaggttgcccttcctggctccatctagccygttctcctctgcttcctttgtttttcaccatctttagcctttgaccccaaccaaaaagagaagagaggaaatcccatgggcatagacagccacctcttaa

SEQ ID NO: 32386 - DNA, 201 bp, Homo sapiens
cctgtgactccactgggggccttgctgtgtgaccccctagtgagtccttgtgtctcttacccacgcatgcctgtcacatgcagacacccacacacacccastatctgccggacagggcagcccttcctctccgcagccaggaagctggacataggcacaagggctgacgcctggggccaggaatcctgcctgagcattagg

SEQ ID NO: 32387 - DNA, 201 bp, Homo sapiens
ttgtctggaatttttcacatagtaacaatgtctttttttcctccaaaaagactcccaggctggaatggtgtcctcatatcgaggaagaggatactgaggcycagaaatgtgccctagctttactaggagcgcccccacctaaagatcctccccctaaatacacccccagaccccgcccagctgtggtcattggagtgttta

SEQ ID NO: 32388 - DNA, 201 bp, Homo sapiens
agtagagacagggtttcatcatgttggtcaggctggtctcgaactcctgacctcaggtgatccgcccgccttggcctcccaaagtgctgggattacaggcrtgagccactgcacctggccaggggctagagttttaatttttaaggattttggagtgggctgaagtgtggaggtcattgcttggtgaaagagtgcaggagg

SEQ ID NO: 32389 - DNA, 201 bp, Homo sapiens
agtgtcctatttatcattgcatctttgggatccacaaaatgcctgtatatatgaggcacttgcttgtgagcctgaattgaattggacaatttaattttttwaaaaagcaatgtttgtaaacaataaagaattaaaaccaaaatacatttaaatgtcaaccaactgaaatagatctatagatctaactcatttcacttgatc

SEQ ID NO: 32390 - DNA, 201 bp, Homo sapiens
aataaaatagaacaaaacaaaactgtgcatcagttctgatgtaaatttgaagtaatttttcatctatgtctgagaaacctgttacctcagacagggttagyagacatatgtgttttattctgattattaagaaagttgtaagcaccacctcaaaggctataaatgtgtggtttaagagtatacatctaaatataattttgt

SEQ ID NO: 32391 - DNA, 201 bp, Homo sapiens
tccatttacactggcaattacaaaaatattatttatcagtccctaattgcgtgccactctgatcttatctttcatttaaatttgagaatagtgggtgctargtaagttttctaaccaatccagaaagacaaagtgtgtgaggggggtggggattgttgatatgcaagaacttcattagctatgtataacctgagagcactg

SEQ ID NO: 32392 - DNA, 201 bp, Homo sapiens
ccctgtccatttacactggcaattacaaaaatattatttatcagtccctaattgcgtgccactctgatcttatctttcatttaaatttgagaatagtgggygctaggtaagttttctaaccaatccagaaagacaaagtgtgtgaggggggtggggattgttgatatgcaagaacttcattagctatgtataacctgagag

SEQ ID NO: 32393 - DNA, 201 bp, Homo sapiens
tatgctttccaaccatccgtcactggagaggaaaagagaaggaggactgccttgagaagttaacatctgctgcccagattatcactccctttaccttaagrcatgagtgtgtctcagctttaaagtgtgagcaacccactagcctgcagcaggccttgggtgtatggtgccacatttggccaaactcacctggaagaacca

SEQ ID NO: 32394 - DNA, 201 bp, Homo sapiens
ctcgggaggctgagacagaagaatcacttgaacccgggaggcggaggttgcagtgagctgagaccgcaccattgcactccagcctggtgacagagtgagamtctgtctcaaaaaaaaaaaaaaaaaagatatacctgtttcaagttcagggatgatctcgaaacaattgctaaccaactgctctgtgttgcctttctgtgg

SEQ ID NO: 32395 - DNA, 201 bp, Homo sapiens
agctactcgggaggctgagacagaagaatcacttgaacccgggaggcggaggttgcagtgagctgagaccgcaccattgcactccagcctggtgacagagygagactctgtctcaaaaaaaaaaaaaaaaaagatatacctgtttcaagttcagggatgatctcgaaacaattgctaaccaactgctctgtgttgcctttc

SEQ ID NO: 32396 - DNA, 201 bp, Homo sapiens
aaattagccaggcgtggtggcgggcacctgtaatcccagctactcgggaggctgagacagaagaatcacttgaacccgggaggcggaggttgcagtgagcygagaccgcaccattgcactccagcctggtgacagagtgagactctgtctcaaaaaaaaaaaaaaaaaagatatacctgtttcaagttcagggatgatctc

SEQ ID NO: 32397 - DNA, 201 bp, Homo sapiens
atttttgctaatgccttttctctattttctattttcaggcaagaaatccaagagaaggtaagttttattagtggcgaggagtttccacatctgctgattcrttctctacttccttaagttacttcctgctctagctagacacattaaccccatagtagtttatttacctggggtcctcatccaaatgaccagataaggtga

SEQ ID NO: 32398 - DNA, 201 bp, Homo sapiens
tcatgagctcagcagttcaagaccagcctggccaacatggtgaaaccctgtctctactaaaaatacaaaaattagccaggcgtggtggcgggcacctgtaktcccagctactcgggaggctgagacagaagaatcacttgaacccgggaggcggaggttgcagtgagctgagaccgcaccattgcactccagcctggtgac

SEQ ID NO: 32399 - DNA, 201 bp, Homo sapiens
aggcgggcggatcatgagctcagcagttcaagaccagcctggccaacatggtgaaaccctgtctctactaaaaatacaaaaattagccaggcgtggtggcrggcacctgtaatcccagctactcgggaggctgagacagaagaatcacttgaacccgggaggcggaggttgcagtgagctgagaccgcaccattgcactcc

SEQ ID NO: 32400 - DNA, 201 bp, Homo sapiens
gaaataattgcatgcagaaatgattgaggtcaggtcatcatttaaccttctcactcattaaaaacaagtaatttcaagagtttcaaggtatgccactaagyttcctataagtgttacagaatattagtattggtaatttcattccaaaagcaaataaatgcctatgactatatgcttagtgtattttatacgtaaaaattt

SEQ ID NO: 32401 - DNA, 201 bp, Homo sapiens; identical to SEQ ID NO: 7198

SEQ ID NO: 32402 - DNA, 201 bp, Homo sapiens
gaggcgggcggatcatgagctcagcagttcaagaccagcctggccaacatggtgaaaccctgtctctactaaaaatacaaaaattagccaggcgtggtggygggcacctgtaatcccagctactcgggaggctgagacagaagaatcacttgaacccgggaggcggaggttgcagtgagctgagaccgcaccattgcactc

SEQ ID NO: 32403 - DNA, 201 bp, Homo sapiens
cgtggagatctatatcaagagaaacaaagatgcaggcaaatggaacgatgacgcctgccacaaactaaaggcagccctctgttacacaggtagggagtgasaagacggctatgctgcctcagactcaggaagggccacggttaagagaatactcagatttaccccatggaaaggtggggggatgagaacagcttctggttc

SEQ ID NO: 32404 - DNA, 201 bp, Homo sapiens
cgaggcgggcggatcatgagctcagcagttcaagaccagcctggccaacatggtgaaaccctgtctctactaaaaatacaaaaattagccaggcgtggtgrcgggcacctgtaatcccagctactcgggaggctgagacagaagaatcacttgaacccgggaggcggaggttgcagtgagctgagaccgcaccattgcact

SEQ ID NO: 32405 - DNA, 201 bp, Homo sapiens
ggaggccgaggcgggcggatcatgagctcagcagttcaagaccagcctggccaacatggtgaaaccctgtctctactaaaaatacaaaaattagccaggcrtggtggcgggcacctgtaatcccagctactcgggaggctgagacagaagaatcacttgaacccgggaggcggaggttgcagtgagctgagaccgcaccat

SEQ ID NO: 32406 - DNA, 201 bp, Homo sapiens
cctgacatttctatcttcttatattaataagaaaaataaaacgaaatagtggtaaagtgttggggcagtgaaaatttttgggggtggtgtggagagataaygggcgatgtttctcagggctgcttcgagcaggattaggggtggcgtgagaacctagagtgggagagattaagctgaaggaagattttgtggtaaggggtg

SEQ ID NO: 32407 - DNA, 201 bp, Homo sapiens
tctgtaaaatcttctacaattccaaaacagccagcattttccaagtgatgttttaataatgaaccatagttaatttggtctcttataaattggactctacygttttagcaaatttggactttttaatctttgatttctataaagaaagggattgccaagaaataattgcatgcagaaatgattgaggtcaggtcatcattt

SEQ ID NO: 32408 - DNA, 201 bp, Homo sapiens
gctcacatcacctcagttttcacattgtgaagtagagagtgtggtgctgcgtgcttccttcttggtctaaccttatataattttatataaaaattgcactrtctttggtgtatgaatatttctgtaaaatcttctacaattccaaaacagccagcattttccaagtgatgttttaataatgaaccatagttaatttggtct

SEQ ID NO: 32409 - DNA, 201 bp, Homo sapiens
taccaaatatttagcacctcattttctattttttattcatagttcagtgtacattaatgtcatttctacaattacaatacgagcttattaagggacggggstttatcattttttggtccttctcccattgttgtgacaaattttatatctgattcttgaagactctccagcaatagctttgaacttggtttttcatttcct

SEQ ID NO: 32410 - DNA, 201 bp, Homo sapiens
gggaggccgaggcgggcggatcatgagctcagcagttcaagaccagcctggccaacatggtgaaaccctgtctctactaaaaatacaaaaattagccaggygtggtggcgggcacctgtaatcccagctactcgggaggctgagacagaagaatcacttgaacccgggaggcggaggttgcagtgagctgagaccgcacca

SEQ ID NO: 32411 - DNA, 201 bp, Homo sapiens
ccaaactcacctggaagaaccattcaaggctgtaacattcatggacattgggcagcttttaagatatacctgttttggccaggtgtggtggctcatgcctrtaatcccagcactttgggaggccgaggcgggcggatcatgagctcagcagttcaagaccagcctggccaacatggtgaaaccctgtctctactaaaaata

SEQ ID NO: 32412 - DNA, 201 bp, Homo sapiens
tttggccaaactcacctggaagaaccattcaaggctgtaacattcatggacattgggcagcttttaagatatacctgttttggccaggtgtggtggctcaygcctgtaatcccagcactttgggaggccgaggcgggcggatcatgagctcagcagttcaagaccagcctggccaacatggtgaaaccctgtctctactaa

SEQ ID NO: 32413 - DNA, 201 bp, Homo sapiens
tgagacagagcctcactctgtcaccaggctagagtgcagtggtgcaatttcagctcactgcaacctccgccttctgggttcaagctattctcccacctcakcctcccaagtagctgggactacaggagcgtgccaccatgcccagctaattttttgtatttttagtagacacggggtttcactgtgttagccagagtggtc

SEQ ID NO: 32414 - DNA, 201 bp, Homo sapiens
atttttttaaaattatactttaagttctagggtacatgtgcacaacatacaggtttgtcacacatgtatacatgtgccatgttggtgtgctgcacccattmactcgtcatttacattaagtatattttaaggtgtgcaggaaatttgtgactttgtcatttcagttgctcaaaaaggtatttctttttattaaaaaaagaa

SEQ ID NO: 32415 - DNA, 201 bp, Homo sapiens
atggaacgatgacgcctgccacaaactaaaggcagccctctgttacacaggtagggagtgacaagacggctatgctgcctcagactcaggaagggccacgsttaagagaatactcagatttaccccatggaaaggtggggggatgagaacagcttctggttcattctaaaatacatctagccctctatataatcttgcatc

SEQ ID NO: 32416 - DNA, 201 bp, Homo sapiens
aagatttcataagtcagcatgaagtttcgattcacttctcaacaagtctttttgagtaccacaagaagcacagtgttgggataaaagctgtcagggttacmataaggaattagcatggtagattcccgctctcaagaagctcacgatctaatgagcttgttagattaattagaactctaaggtctggaagaaactatgcca

SEQ ID NO: 32417 - DNA, 201 bp, Homo sapiens; identical to SEQ ID NO: 7196

SEQ ID NO: 32418 - DNA, 201 bp, Homo sapiens
acaagtagttgagaatggtgaataggagtatgactagacagaagattgtagggatgacaagtttttggggcacagttcaagttgggctggtgtctggaatragactggggcctaataaaaaggagcgtccatacagaatcttaaatgggctgtaccttgtagcatttcgaggacaggcccgaattctgagaatggcaagtg

SEQ ID NO: 32419 - DNA, 201 bp, Homo sapiens; identical to SEQ ID NO: 7197

SEQ ID NO: 32420 - DNA, 201 bp, Homo sapiens
catttacaagtagttgagaatggtgaataggagtatgactagacagaagattgtagggatgacaagtttttggggcacagttcaagttgggctggtgtctygaatgagactggggcctaataaaaaggagcgtccatacagaatcttaaatgggctgtaccttgtagcatttcgaggacaggcccgaattctgagaatggc

SEQ ID NO: 32421 - DNA, 201 bp, Homo sapiens
attaattcagatttgattccccctgctcaagtgcacttggtcatcagcaggctgaattttagaagaaaagatttcaaatagtagtctttaatactttaaakgattaaaacagtaatgcaacactgtctacgtgctaggacctgaactaaatacttggaaatattttattttatcaacccaatgaggatgatacaattatta

SEQ ID NO: 32422 - DNA, 201 bp, Homo sapiens
gttcctttttcttcaaaatgaaactctctcagtaggaacagattcttactcatctattgctgttaggttcatcatccctaaaaaaaatatttatgtgaagytaaccagaatctgaaattaattcagatttgattccccctgctcaagtgcacttggtcatcagcaggctgaattttagaagaaaagatttcaaatagtagt

SEQ ID NO: 32423 - DNA, 201 bp, Homo sapiens
gttcctcttaactcttccccatactgtttctttccctattgaagtgattcagtgtgagcctttggaggccccagagctgggtaccatggactgtactcacyctttgggaaacttcagcttcagctcacagtgtgccttcagctgctctgaaggaacaaacttaactgggattgaagaaaccacctgtggaccatttggaaa

SEQ ID NO: 32424 - DNA, 201 bp, Homo sapiens
gaatttttggtgtgtaagatttgtccctgtgcacaaaagctatacccctaaatcaagttacatcaaaatgatagatctacgtaggaagtacagaggaagarctagacaatcagtgcctttgataataaggcaggggaggagaagctgacagctggggccagttggaaacttaggctcacatcacctcagttttcacattgt

SEQ ID NO: 32425 - DNA, 201 bp, Homo sapiens; identical to SEQ ID NO: 7195

SEQ ID NO: 32426 - DNA, 201 bp, Homo sapiens
tattaggcttttagctcttctctgtgtttcagagttccagtcattgaacaagtccatggagctaaatacaacgatgaccattcttgccaacatttttaggkgcattttcaggaactctatgaaccacaaatctgggcattgagattctgtaggcattagactagcaaggctggtccagtctttgcctatgctgtagactca

SEQ ID NO: 32427 - DNA, 201 bp, Homo sapiens
ctagccactctgagaaatgggaagttttgatcagaaagctctgctttcacaatattgttacctttccgtaaagatttcataagtcagcatgaagtttcgaytcacttctcaacaagtctttttgagtaccacaagaagcacagtgttgggataaaagctgtcagggttaccataaggaattagcatggtagattcccgctc

SEQ ID NO: 32428 - DNA, 201 bp, Homo sapiens
atcattggcttttatttttcctgaagttgtattaggcttttagctcttctctgtgtttcagagttccagtcattgaacaagtccatggagctaaatacaaygatgaccattcttgccaacatttttaggtgcattttcaggaactctatgaaccacaaatctgggcattgagattctgtaggcattagactagcaaggctg

SEQ ID NO: 32429 - DNA, 201 bp, Homo sapiens
tttcctttgactggtgaattatccagttcagatcattggcttttatttttcctgaagttgtattaggcttttagctcttctctgtgtttcagagttccagwcattgaacaagtccatggagctaaatacaacgatgaccattcttgccaacatttttaggtgcattttcaggaactctatgaaccacaaatctgggcattg

SEQ ID NO: 32430 - DNA, 201 bp, Homo sapiens; identical to SEQ ID NO: 7194

SEQ ID NO: 32431 - DNA, 201 bp, Homo sapiens
tagtatggagactttccctcctttcttttaggaaaggaataaggaacagttccagaaacatgtgtccttgtgcatgggctcatctagacacattttgtgcwccaggcattatcattttctgattagtcactaccattggccctgtttggtaaataaggaaaccagggcaatgatgttttaggccaaatctcaaaaatacca

SEQ ID NO: 32432 - DNA, 201 bp, Homo sapiens
gcttatgaagaatagataggatttaggtatatggagaaaagcaggaaaggaaggcagtctgtaggaaggaaattgtgtaagcagtggtatggtagtgagamtatgaaagcatttttcaggggccactgagcagaactttcttgagcccatggcttattgaggagttgtggagttgaagttggaaaggaaggctggccccaa

SEQ ID NO: 32433 - DNA, 201 bp, Homo sapiens
acatgtaaatcagcccaggacacaccttcattaaaacaggttggctgattttcgcttttcatctgataaacttttaaaaatgtctattaccttcaaggcarcttgctaggctgataacaactaagtgagatattctaatggttctttgctcttatgtaattctttaatacttttttttttttgagacagagcctcactctg

SEQ ID NO: 32434 - DNA, 201 bp, Homo sapiens
atctcatctcatatagtttccaaatacaaaaattcttctgattccttgagtccattcttccttgaagtctctagagcaaggtagcaataatggcttaaatytgacagatgaggaataagacatgaaagttgtactgtttactaaatggcatggcagggtctaaaatgtgaaaactttgatttccaagtcttaaatttacct

SEQ ID NO: 32435 - DNA, 201 bp, Homo sapiens; identical to SEQ ID NO: 7201

SEQ ID NO: 32436 - DNA, 201 bp, Homo sapiens
gtgaaatctaagctcttcaagccccagagtaatgcttgatatataatagatactctttaaatcaatgaaaaaagataacattttctcttagttcccatgtytctccctaatctcatctcatatagtttccaaatacaaaaattcttctgattccttgagtccattcttccttgaagtctctagagcaaggtagcaataatg

SEQ ID NO: 32437 - DNA, 201 bp, Homo sapiens
gttgcatgagctgcctccgtgccactgcactccggactgggcaacagagtgagactccatctcaaaaataaataaataaataaattaaattaaattaaatwaaaataaacataaatttaaaaaatcaatctacactgtccttcagactcattagatctggagacaaagaccgtatgcaccacaaaaatttctccaagtggg

SEQ ID NO: 32438 - DNA, 201 bp, Homo sapiens
atttctacctaccattttgtcctacagggtgaaatctaagctcttcaagccccagagtaatgcttgatatataatagatactctttaaatcaatgaaaaaagataacattttctcttagttcccatgtttctccctaatctcatctcatatagtttccaaatacaaaaattcttctgattccttgagtccattcttccttg

SEQ ID NO: 32439 - DNA, 201 bp, Homo sapiens
ttgccagccctggtcatgcagtggccatggagaatgtgtagaaatcatcaataattacacctgcaactgtgatgtggggtactatgggccccagtgtcagyttggtaagtctctttcctttctttgcttcttcttaggtaaagtcacaggaatcattatagcttatcatgaagctggttggaacaaaatgatactagccac

SEQ ID NO: 32440 - DNA, 201 bp, Homo sapiens
gcttgaacccaggaggccgtggttgcatgagctgcctccgtgccactgcactccggactgggcaacagagtgagactccatctcaaaaataaataaataawtaaattaaattaaattaaattaaaataaacataaatttaaaaaatcaatctacactgtccttcagactcattagatctggagacaaagaccgtatgcacc

SEQ ID NO: 32441 - DNA, 201 bp, Homo sapiens
ggctcacgcctgtaatcccagcactttcggaggccgtggcaggtggatcatgaggtcaggagtttgagattagcttggccaatgtggtgaaaccccatctytactaaaaatacaaaaattagctgggtgtgctggcacgtgcctgtattcccagctactcaggaagttgaggcggaagaatcgcttgaacccaggaggccg

SEQ ID NO: 32442 - DNA, 201 bp, Homo sapiens
agaaggtctaggttctacttcaaatctgcaaacaactattctgtgatcctgagatggtcacatacactcttaggctctgtttcctcatctctaagtgtctrgctcagcctggagtagtgctaggttctttttagctgtaacattatgtaagtctgcataggtcacactgatgtcttgcagatttcctggcacatcatggaa

SEQ ID NO: 32443 - DNA, 201 bp, Homo sapiens
cttattatgcttctcccataggtacatatgtgttggccttcaagaaatgattccaggattaaaaagtatacgtaaattgtatagttatatgatattacackgtaattagttgtaaatcattaacagctacaaagaaaaagaaatatgaatgtctaaaatatgttggttaaatttcacctgaaataattttgagaaaaaaat

SEQ ID NO: 32444 - DNA, 201 bp, Homo sapiens
aaagtcataaatctctatgtgtgtgtttaggtgtgtgtgtgtgtctatgtgtgtgtgtatatgtatatatatacacagagagagagagagagagagagagaatttataggctttttgggttctaatagttagaaaaagggcacaggtaactatttagagcatggtagccaatgaagtgactagagccttcacccctattct

SEQ ID NO: 32445 - DNA, 201 bp, Homo sapiens
aaaagtcataaatctctatgtgtgtgtttaggtgtgtgtgtgtgtctatgtgtgtgtgtatatgtatatatatacacagagagagagagagagagagagagaatttataggctttttgggttctaatagttagaaaaagggcacaggtaactatttagagcatggtagccaatgaagtgactagagccttcacccctattc

SEQ ID NO: 32446 - DNA, 201 bp, Homo sapiens
aaaaagtcataaatctctatgtgtgtgtttaggtgtgtgtgtgtgtctatgtgtgtgtgtatatgtatatatatacacagagagagagagagagagagagagaatttataggctttttgggttctaatagttagaaaaagggcacaggtaactatttagagcatggtagccaatgaagtgactagagccttcacccctatt

SEQ ID NO: 32447 - DNA, 201 bp, Homo sapiens
ttggctttaaggattctcactacagataatgctgaagataataatatgaagactagctaatgtttacttagaatttctgatgagtcaggctttgttctaasgtccttgacttatgctaattgaattacatttagtttccatatcaatttgataaagataacacaatttcattattcctcttatatagatgaagaaactgaa

SEQ ID NO: 32448 - DNA, 201 bp, Homo sapiens
taaaaagtcataaatctctatgtgtgtgtttaggtgtgtgtgtgtgtctatgtgtgtgtgtatatgtatatatatacacagagagagagagagagagagagagaatttataggctttttgggttctaatagttagaaaaagggcacaggtaactatttagagcatggtagccaatgaagtgactagagccttcacccctat

SEQ ID NO: 32449 - DNA, 201 bp, Homo sapiens
gcatgcagaaatgattgaggtcaggtcatcatttaaccttctcactcattaaaaacaagtaatttcaagagtttcaaggtatgccactaagtttcctatargtgttacagaatattagtattggtaatttcattccaaaagcaaataaatgcctatgactatatgcttagtgtattttatacgtaaaaattttagcatatg

SEQ ID NO: 32450 - DNA, 201 bp, Homo sapiens
tcagtgggaaccctgcctctgtctccgtgatgtgaccctggccagttgttactctctctgaacttcagatttatttatgaaatggggatcccattatcttrgtcacatgattgtgctccacattttatgaaataactcctcctatgctttactcagagtaccaagttcatgaaattgtcagagtcccaggaacacagaatt

SEQ ID NO: 32451 - DNA, 201 bp, Homo sapiens
tggtggatatcacattcaaactctttttgtagttgaactaattaagtaagttttctataggccttgagcaagtgacagagttagttacaataatcataaakctttatcaaatattaattccatgttgtatactgttatgaatggtttacatgtcttaaatcatgaaatatgcctttaagtctgtgggagaagggtctatga

SEQ ID NO: 32452 - DNA, 201 bp, Homo sapiens
tatgaaagcatttttcaggggccactgagcagaactttcttgagcccatggcttattgaggagttgtggagttgaagttggaaaggaaggctggccccaaraacataagtcttgaatgcttcaccagatggtctagaaaggcctagcaaagaagaattatttgcccagctctcatttattgaccaaggctgtattaattca

SEQ ID NO: 32453 - DNA, 201 bp, Homo sapiens
gtccttgaggcacaggaggagagactggctggaagaatattagcaaaaagctaattaccatgctaagcaaattgctatattaagtttaatggttcactgawtttttataatcagtcaattaatagttgtttattgaacatttttgtgttggaaactgctaagctttcttgagacagcaagaggagtcagcctggtccctga

SEQ ID NO: 32454 - DNA, 201 bp, Homo sapiens
tgaaactgaacacatgcccccttagttcctttttcttcaaaatgaaactctctcagtaggaacagattcttactcatctattgctgttaggttcatcatckctaaaaaaaatatttatgtgaagctaaccagaatctgaaattaattcagatttgattccccctgctcaagtgcacttggtcatcagcaggctgaatttta

SEQ ID NO: 32455 - DNA, 201 bp, Homo sapiens
gctcaaaaaggtatttctttttattaaaaaaagaaatacttttctttcctggtgtctggctatctaattttttttttttttaggtatttgaggcattgacycattatgatcaagagtgaggctataacattaaatataagcatcaatagttaattaagcagcaacaatactttaaaaaatatacatagtaaatattaaata

SEQ ID NO: 32456 - DNA, 201 bp, Homo sapiens
agtggctcccagtaagaccatggccaaatacatcctgaagtagaatatctggaaaatttgagatttggcaaaagccaacaccacaatccctccaaattttstaagtgtgattccactgaacacctaaaagaagagatactgtgttagaaaccacttttaccaacctgtaattgaacaaaaacacttccttacaaggatttc

SEQ ID NO: 32457 - DNA, 201 bp, Homo sapiens
acctggccaagttgtagctgatggtctgtccgaaaatgctggttcactctccactggccaactgtctgtctgcactgcactgccagttgcctcttgcctgsgccattgcgctaacatctccacttactgttccacctgcttcctgtttctttgccgtttccagaccttccactttgccacgcaagctatctttgtaaaaca

SEQ ID NO: 32458 - DNA, 201 bp, Homo sapiens
tttctggtgaccatggtcctcctgggctgtgagctctggtctgcagtcatcatgtgtgccaccatcgccatggtcttggtcaacatgtttggagttatgtrgctctggggcatcagtctgaacgctgtatccttggtcaacctggtgatggtgagtcctcatacagtctcagtttgtccctagctcctgtttcacttgggg

SEQ ID NO: 32459 - DNA, 201 bp, Homo sapiens
agtgcagctgcctctcaccctttacctcgtgcctgggtcgctaacacagtgtcatgtatcacaccccccacaagatttaaagatagaagagcctttggtgycttttgttctgtctcagatatatagcccagtcccctgtagtgccccagctatttgggaggcagcctccctctgaggagttgaggcagtataggtctgcag

SEQ ID NO: 32460 - DNA, 201 bp, Homo sapiens
atatttctggtgaccatggtcctcctgggctgtgagctctggtctgcagtcatcatgtgtgccaccatcgccatggtcttggtcaacatgtttggagttaygtggctctggggcatcagtctgaacgctgtatccttggtcaacctggtgatggtgagtcctcatacagtctcagtttgtccctagctcctgtttcacttg

SEQ ID NO: 32461 - DNA, 201 bp, Homo sapiens
ttctgcagttaacatcctccttggccatggcaccagggtcggagccacgtacttcatgacctaccacaccgtgctgcagacctctgctgactttattgacrctctgaagaaagcccgacttatagccagtaatgtcaccgaaaccatgggcattaacggcagtgcctaccgagtatttccttacaggtaaagcctgccctt

SEQ ID NO: 32462 - DNA, 201 bp, Homo sapiens
ccagccatcccattactgggtatatacccaaaggattataaatcatgctgctataaagacacatgcacacgtatgtttatagcggcactattcacaatagyaaagacttggaaccaacctaaatgtccaacaacgatagactggattaagaaaatgtggcacatacacaccatggaatactctgcagccataaaaaatgat

SEQ ID NO: 32463 - DNA, 201 bp, Homo sapiens
caaaatggtagaatttatgtgtatccttaacccagtttccccgatgatacaacttacataactcatagtacatctagaactagaaataccatttgacccakccatcccattactgggtatatacccaaaggattataaatcatgctgctataaagacacatgcacacgtatgtttatagcggcactattcacaatagcaaa

SEQ ID NO: 32464 - DNA, 201 bp, Homo sapiens
tcaggtaactagttcatagtttctcccagtaagagaggtaactggtacatttatcctgctgtggctaatttagggggtgctgggagtgggaatggaggagsaaatgaattgccttcaggcattgctgtcataattgaaagaataagcagttaaaaagggggtgggaggcagcttttctagagctctgctatagtattagct

SEQ ID NO: 32465 - DNA, 201 bp, Homo sapiens
attactgataatagccaaactgtggaaacaactcagatatttatcacctgatatatggataaacaaaacatatgtccttgcaatgaaatgttgttcggccrtaaaaagaaatgaagtattgatacatgccacaatatgcatgaaccttgagaacattatgctaaatgaaagaagccggtcatgaaagaccacatattatat

SEQ ID NO: 32466 - DNA, 201 bp, Homo sapiens
tgcagtgagctgagatcacaccattggactccagcctgagggacagagactccatctccaaaaaaaaaaaaaaaaaaaaaactcttactactcaatgatarataaataacccaatttaaaatggcaaaagatctgaatagagtagacatttctctaaggaagatatacaaatgaccaacaagcacatgagagatgctcaat

SEQ ID NO: 32467 - DNA, 201 bp, Homo sapiens
aagaacacccactgtaacactattgtgattgtgaaaaattgaagacctcaagaacgagaagacaagacacagactgggagaaagtatttgcaaaagacatrttagtaaggactgttattcaaaatatacaaataactcctaaaactcaataagaaagcaaacagcccaattgaaaaatggacaaaacaacctgaacagata

SEQ ID NO: 32468 - DNA, 201 bp, Homo sapiens
tgggctgtgagctctggtctgcagtcatcatgtgtgccaccatcgccatggtcttggtcaacatgtttggagttatgtggctctggggcatcagtctgaaygctgtatccttggtcaacctggtgatggtgagtcctcatacagtctcagtttgtccctagctcctgtttcacttgggggaattggctgtcttagattcca

SEQ ID NO: 32469 - DNA, 201 bp, Homo sapiens; identical to SEQ ID NO: 7230

SEQ ID NO: 32470 - DNA, 201 bp, Homo sapiens
tcggtgagtcttgtagacagccagcaaggttttctgcaagggatgtttcccaaaggagtctgaccacttggcagtggtgacaggatgaacacgcagtgttygggagtgagagcgagctttaatgaggcctcccctctcccctccagtgtgttttatgtcttctacgaacagtacctgaccatcattgacgacactatcttc

SEQ ID NO: 32471 - DNA, 201 bp, Homo sapiens
ttgaagatgaactaaatcgtgaaagtgacagtgatgtcttcaccgttgtaattagctatgccatcatgtttctatatatttccctagccttggggcacatsaaaagctgtcgcaggcttctggtaagccggggggggggtggtgtatgttctagaggttaacagcagtgcacagtgtaacgtcatatttttgcctctttat

SEQ ID NO: 32472 - DNA, 201 bp, Homo sapiens
gacctggactctcttgacacccaggattctttcctcaggggacatgctgcctatagttctgcagttaacatcctccttggccatggcaccagggtcggagycacgtacttcatgacctaccacaccgtgctgcagacctctgctgactttattgacgctctgaagaaagcccgacttatagccagtaatgtcaccgaaacc

SEQ ID NO: 32473 - DNA, 201 bp, Homo sapiens
ctattcttctaacagtcctccctgcatgtctccgccagtggttgaccctgcctgcgttcgctgcaggcctctgactccggaaggcaaacagaggcctcagkggggagacttcatgagattcctgcccatgttcctttcggataaccctaaccccaagtgtggcaaagggtaagtgctgctgccattgcagataagcatcca

SEQ ID NO: 32474 - DNA, 201 bp, Homo sapiens
tacaaaaaatctggagacctattcttctaacagtcctccctgcatgtctccgccagtggttgaccctgcctgcgttcgctgcaggcctctgactccggaargcaaacagaggcctcaggggggagacttcatgagattcctgcccatgttcctttcggataaccctaaccccaagtgtggcaaagggtaagtgctgctgcc

SEQ ID NO: 32475 - DNA, 201 bp, Homo sapiens
tgtgaagggcatcagctctccagtcaaattgaactgcttgctagcaaaatcctgcccatcttccagggccccatttcacatgctacattatctacgacatycttgtcctgttcccctaactagaatgccttccctctgaagttctgaatctttatttaaactgctgcaacagcatttgctgcctcattaaaagaccttggt

SEQ ID NO: 32476 - DNA, 201 bp, Homo sapiens
ttcgtttcctcagtggggttgcagcagtgggtgaggtggtgtgccagtgccgaggacacggctgcgaccaaggcagacatggtccttgcctttgtggcccyaccatctagtcagggtggcacagcagaaccaagtaattaatcatagctggggaggcgcgaaagcagcaggacaagagtgggaatagcagggcagggttga

SEQ ID NO: 32477 - DNA, 201 bp, Homo sapiens
gacttcctccctgtggagcaggtcagtaaccctgtctgtcctctctagtacccgaataggcttcgccccctcgtcctggatcgacgattatttcgactggrtgaagccacagtcgtcttgctgtcgagtggacaatatcactgaccagttctgcaatgcttcaggtaccttctcctttaccaaatctttcctgttttgctg

SEQ ID NO: 32478 - DNA, 201 bp, Homo sapiens
aaaaatcggctagacatcttttgctgtgtcagaggtgctgaagatggaacaagcgtccaggcctcagagagctgtttgtttcgcttcttcaaaaactcctrttctccacttctgctaaaggactggatgagaccaattgtggtatgcgcttatctgtggtttttctctttcctctcactgaaacagattatcacatgcctt

SEQ ID NO: 32479 - DNA, 201 bp, Homo sapiens
agagcccttctctccccgacaggagcattgtccgtgatgccagccgtgcacaccttctctctctttgcgggattggcagtcttcattgactttcttctgcmgattacctgtttcgtgagtctcttggggttagacattaaacgtcaagaggtaagttggtgccaggattatagtctatttaatttgagtctagaatctaga

SEQ ID NO: 32480 - DNA, 201 bp, Homo sapiens
gatgtccatcctgtttttataacctactgaacctgttttgtgagctgacatgtagccctcgacagagtcagtttttgaatgttacagctactgaagattaygttgatcctgttacaaaccagacgaaaacaaatgtgaaagagttacaatactacgtcggacagagttttgccaatggtaagtaaacttttaattattcct

SEQ ID NO: 32481 - DNA, 201 bp, Homo sapiens
agaaatggcgttgttattgagaaattttaatgtcgcataatttttttttttttttttaagagagatgaacgtcttcaaggggaaaccctggatcagcagcygggcagggtcctaggagaagtggctcccagtatgttcctgtcatccttttctgagactgtagcatttttcttaggtaattatgctttcaatcctaccagt

SEQ ID NO: 32482 - DNA, 201 bp, Homo sapiens
atcatgcagtccttcctctccccccatgctttgctttgcacatcattcttgtccctccctctggtgaagggttgtgatagagtcaggtcctcagtagagcyggcctcggggagctgttaaaaattttgttctgctgtagctggctggttttgtcaaacttagttttttatctgttctgttggctatgaccctgagcagtga

SEQ ID NO: 32483 - DNA, 201 bp, Homo sapiens
tgtaactaattggtgattgtgtctgtcgcctctctcaggtggattcgaaggtctcactaggcatcgcgggcatcttgatcgtgctgagctcggtggcttgstccttgggtgtcttcagctacattgggttgcccttgaccctcattgtgattgaagtcatcccgttcctggtgctggctgttggagtggacaacatcttca

SEQ ID NO: 32484 - DNA, 201 bp, Homo sapiens
taagtaagtagtaaaaaaaagaaaaaaagtccgtctatacactgtaaagtgctgtgtaaatgttcataattactatcactgtcttcttcatagttgatggrgggaaggctggatacataaaaaaatggtaatacagtaagaagtgctcagataagaataaagataaaatgttatggagagtccatttttgagctgagctat

SEQ ID NO: 32485 - DNA, 201 bp, Homo sapiens
agacagactcttgctctgtcaccgaggctggagtacagtggcatgatctcagcttactgcaacctcctcccgggttcaagcgattctcctgcctcagcctscccagtagctgggactgcaggcacatgccaccacacctagctaagttttatatttttagtagaggtggggtttcaccatgttggccaggctggtctcaaa

SEQ ID NO: 32486 - DNA, 201 bp, Homo sapiens
aatctgaccatttccttcactgctgaacgaagtattgaagatgaactaaatcgtgaaagtgacagtgatgtcttcaccgttgtaattagctatgccatcakgtttctatatatttccctagccttggggcacatcaaaagctgtcgcaggcttctggtaagccggggggggggtggtgtatgttctagaggttaacagcag

SEQ ID NO: 32487 - DNA, 201 bp, Homo sapiens
tagtttaactaaaaatataacattttgcttaccttttaggtttattaattttgtgaaaaactacaagaatcccaatctgaccatttccttcactgctgaaygaagtattgaagatgaactaaatcgtgaaagtgacagtgatgtcttcaccgttgtaattagctatgccatcatgtttctatatatttccctagccttggg

SEQ ID NO: 32488 - DNA, 201 bp, Homo sapiens
cctttcagtaatgtccttctattgtgccacccttttaagatgagaactcttacctatgtaactgagtaagacagggagaaatattaatccgtgagtggctrccagtaagaccatggccaaatacatcctgaagtagaatatctggaaaatttgagatttggcaaaagccaacaccacaatccctccaaattttgtaagtgt

SEQ ID NO: 32489 - DNA, 201 bp, Homo sapiens
atccgcccacctcggcctcccaaagtgctgggattacaggcatgagccactgcacctggcctagaaggggcttttttttaacctttcctgaactgttcctrtcgttgaaagaagcttccctatccagtcattttcttagtaattaaactctagagcatgttgtgaaatatccatatgatctaacctttaaaaatagaaact

SEQ ID NO: 32490 - DNA, 201 bp, Homo sapiens
aggttttaaaattttcttttgagattgcctcggtgtttttccttaaagttagcacattctttgctttctacttcagcctcaaggacaggaagttcattctygctctttacattggggtgttgatgtttgtggttttgttgttttgttcttcatgttactcatgatgtattgatattaattaacctaaatacatatggaaat

SEQ ID NO: 32491 - DNA, 201 bp, Homo sapiens
catctgcaccagagacactgccgggtccgagtgagggcaggaggctgcacgagggagcctccctgggagtgagcgataggttcgctatgggaggtgggttygaaaggtgcctgagattttcatttgaaactctgttgaagaggaattggcaatagaggaggaaatacaaatagaggaaagattggtttcgtcttaagcact

SEQ ID NO: 32492 - DNA, 201 bp, Homo sapiens
taatagatcaggaatgggtttagcctgctggcctgacccctgattcagtcaccacactgtgaacattccatagggaaaaaactgcagacagtgtatactgrcacccactttcatagttttgttttagttttgtggctcctaaatgtctaagactaactagtaatatgaccttgggtgagtcacataaaaaaccagaagcta

SEQ ID NO: 32493 - DNA, 201 bp, Homo sapiens
agcaattatgtgccgtagagaaaatgtggctattctgtttccctagagttttttaaaatttatttttaaaatttatttattttagagacaggttcttgctstgttgcccaggcgtgggggcagtgtcgccatcatagctcactgcagcctggaactcctggcctcaagcagtccttccaccttggcctcccaaagcactgg

SEQ ID NO: 32494 - DNA, 201 bp, Homo sapiens
caactttttggtttatcttaaagtttatttcacataatccagttttttcttatttgtccagtccatcacctaagaatgcaaactcataacatgtgttgccsgagcagacctagaaatgtttacaagtcctctctgaaacacagaattgtacattcaactctaggtttaatacagccctgtaaagtaaaaaggaggaccttt

SEQ ID NO: 32495 - DNA, 201 bp, Homo sapiens
aagaagccagacagcctgggaaggagattcttaaagctgttaaaatgtatctaaaaaaaaagcaaaagcaaatgtggaacagtagataaaatgtttttccygtgagcttttatcagtccatataaacaagagttttaagttttttattttgaaatagtttcagattcacagaaagttgcaaagaaacttttatttttcctc

SEQ ID NO: 32496 - DNA, 201 bp, Homo sapiens
atgttctagaggttaacagcagtgcacagtgtaacgtcatatttttgcctctttattcttattccattatgtttaaaactgccataaattcccccatgttktaattgtatgtaacgtttctgttgcctacatctattttcttcattccaactttttggtttatcttaaagtttatttcacataatccagttttttcttatt

SEQ ID NO: 32497 - DNA, 201 bp, Homo sapiens
ctgttaaaatgtatctaaaaaaaaagcaaaagcaaatgtggaacagtagataaaatgtttttcccgtgagcttttatcagtccatataaacaagagttttmagttttttattttgaaatagtttcagattcacagaaagttgcaaagaaacttttatttttcctcttaataatgaggaaatagaagccaagagaggtgaag

SEQ ID NO: 32498 - DNA, 201 bp, Homo sapiens
cttattccattatgtttaaaactgccataaattcccccatgttttaattgtatgtaacgtttctgttgcctacatctattttcttcattccaactttttgktttatcttaaagtttatttcacataatccagttttttcttatttgtccagtccatcacctaagaatgcaaactcataacatgtgttgcccgagcagacct

SEQ ID NO: 32499 - DNA, 201 bp, Homo sapiens
ggacaggaagttcattcttgctctttacattggggtgttgatgtttgtggttttgttgttttgttcttcatgttactcatgatgtattgatattaattaamctaaatacatatggaaatattctttcattacttagagcttatatagttcctggtgcagatgtgcaaaaatagtgctttagtaattgctaagtcactatct

SEQ ID NO: 32500 - DNA, 201 bp, Homo sapiens
cacacttaaggaaacaccatctggggacacagggagaaggtgctgtctacaagccaggaagagagccctcaccaggaaccaaataagctccccatgctgawcttgaactctctaacctctagaactgtaacagataaattcctattgtttaagtcacaccagtctttggtattttgtgcaatggcctcagacgtcactaaa

SEQ ID NO: 32501 - DNA, 201 bp, Homo sapiens
tgcatagagtatctgagaaaatgaggcatgcagtcgatgtttggtatttttgtttcatttatttattttactgccatgcctcgagaacaatagatgttcaktaagtatttgaatatgttagttaatgctttaggatttcctaaaggcagtggaatagaattctcactgagttcagagcttttctgataataatgtgtgctt

SEQ ID NO: 32502 - DNA, 201 bp, Homo sapiens
ttcattaaactgtgaaagtgacatgtggctgaagcttttagataaggggaaagattatccctcactagtaaggaaagtaatcgatagagaagaaagtaatrcccctcactgtcagtattttaaaatgttttacaaaaaatctggagacctattcttctaacagtcctccctgcatgtctccgccagtggttgaccctgcct

SEQ ID NO: 32503 - DNA, 201 bp, Homo sapiens
cctgctccaggtgtgatcccaggtgcaatccagctcaacaagcacactgagcctcaggagctcttgggatcagaacccaggactcgatcccactccgtgcygccttctcacccacccctcttccaccaagtgggtggaaatagcacttgctttgaaataagtaacgaatgatctttgtgaaaaggaacctaaacagcagtg

SEQ ID NO: 32504 - DNA, 201 bp, Homo sapiens
acaaaataaataaaatcacagattgcatttaggtacttccatacattgctggctgcaatttctttggagggcaatttgacaacaatcaaaacttaaatacscatttcctttgatccaacaatataaaagtatttccaacagttctatttgcgcatgattgcaaagatttacatccaagaatgggccaggagtggtggctca

SEQ ID NO: 32505 - DNA, 201 bp, Homo sapiens
tctgtcctctctagtacccgaataggcttcgccccctcgtcctggatcgacgattatttcgactgggtgaagccacagtcgtcttgctgtcgagtggacartatcactgaccagttctgcaatgcttcaggtaccttctcctttaccaaatctttcctgttttgctgaaaaattttcaaattatcatttaaaaatcatttg

SEQ ID NO: 32506 - DNA, 201 bp, Homo sapiens
tctgggtggtcagtggccatgagaggtcaagtgagttgctttcggtgagtcttgtagacagccagcaaggttttctgcaagggatgtttcccaaaggagtytgaccacttggcagtggtgacaggatgaacacgcagtgttcgggagtgagagcgagctttaatgaggcctcccctctcccctccagtgtgttttatgtct

SEQ ID NO: 32507 - DNA, 201 bp, Homo sapiens
ctaacctttaaaaatagaaactctttagctgtgtaactactaaattctgggtagaagccaaaacaatcagcacttctcatttctgaacttagataatccarttgtactccctcagctcattgtgagttttgacaagttctgcatccatgaacaccagatgtaatacaatagggaatttcaaaggaaggattacacacctag

SEQ ID NO: 32508 - DNA, 201 bp, Homo sapiens
agcgggtataacctttgtttccctctgtcccctcagaaaaatcggctagacatcttttgctgtgtcagaggtgctgaagatggaacaagcgtccaggcctsagagagctgtttgtttcgcttcttcaaaaactcctattctccacttctgctaaaggactggatgagaccaattgtggtatgcgcttatctgtggtttttc

SEQ ID NO: 32509 - DNA, 201 bp, Homo sapiens
ctgtcccctttcctctccctccagcttttcctggactttttcacctgagggtcctgcagtaatggcaggtggcctgcccagaaccatgcccttacctgctkcttctccccattttgtttaaaggcagtgacagctaccagttactcaggcttgaggctttatccctgaattctgcctcgccctcgccttcctcatggggtt

SEQ ID NO: 32510 - DNA, 201 bp, Homo sapiens
tcagttagtttaactaaaaatataacattttgcttaccttttaggtttattaattttgtgaaaaactacaagaatcccaatctgaccatttccttcactgytgaacgaagtattgaagatgaactaaatcgtgaaagtgacagtgatgtcttcaccgttgtaattagctatgccatcatgtttctatatatttccctagcc

SEQ ID NO: 32511 - DNA, 201 bp, Homo sapiens
tcatttgtggagaacaaacatacagttaaaaaaacaaaactgggccgagagttattcatgcctgtaatcccagcaatttgggaggcagaggcgagcacatyacttgagctaggagtttgagaccagcctgagcaacatggagaaaccccgtctctgcaaaaaatacaaaaattagctgggcatggtggtgcatgcttgtag

SEQ ID NO: 32512 - DNA, 201 bp, Homo sapiens; identical to SEQ ID NO: 7255

SEQ ID NO: 32513 - DNA, 201 bp, Homo sapiens; identical to SEQ ID NO: 7256

SEQ ID NO: 32514 - DNA, 201 bp, Homo sapiens
ttcaccatgttggccaggttggtctcgatctcttgacctcgtgatcccgcccaccttggcctcccaaagtgctgggtttacaggcgtgagccaccgcgccyagcccagtagtgtgtttttaaaggacctaaaagttttaaataaaatgagggccacaaggtgaaattatcctttattaattgttctcttaacatcttctta

SEQ ID NO: 32515 - DNA, 201 bp, Homo sapiens
ttccttttattggagaatggtatgtagaaacgaagatctgggcactaggtatgctcattgctgctggaaagagtagcatgtttttgtttgtttgtttgtttttttgagatggagtcttgctctgtcaccaggctggaatgcagtggcgcgatctcagctcactgcaaccaccgcctccctggttcaagcagttctcctgcc

SEQ ID NO: 32516 - DNA, 201 bp, Homo sapiens
atgttgatagttgaaaatggcatccttgagtagccactgaatccttctccacatgacactctaagcagcagctcccaaatccacaggcactcgcttacaaratgtttgccgttgttttcaaaggcagtctttctcttctgtgcacacaactcattggggaagcagccttgttaatgaccagaagctcttgactcaccacat

SEQ ID NO: 32517 - DNA, 201 bp, Homo sapiens
ccatgctgatcttgaactctctaacctctagaactgtaacagataaattcctattgtttaagtcacaccagtctttggtattttgtgcaatggcctcagaygtcactaaatgacattgattacattctattaccccaaaaccctagttctatcttcattttctgttattgaactttaggcttcaggttaggaactaggcaa

SEQ ID NO: 32518 - DNA, 201 bp, Homo sapiens
gttccttttattggagaatggtatgtagaaacgaagatctgggcactaggtatgctcattgctgctggaaagagtagcatgtttttgtttgtttgtttgtttttttgagatggagtcttgctctgtcaccaggctggaatgcagtggcgcgatctcagctcactgcaaccaccgcctccctggttcaagcagttctcctgc

SEQ ID NO: 32519 - DNA, 201 bp, Homo sapiens
ggttccttttattggagaatggtatgtagaaacgaagatctgggcactaggtatgctcattgctgctggaaagagtagcatgtttttgtttgtttgtttgtttttttgagatggagtcttgctctgtcaccaggctggaatgcagtggcgcgatctcagctcactgcaaccaccgcctccctggttcaagcagttctcctg

SEQ ID NO: 32520 - DNA, 201 bp, Homo sapiens
tggttccttttattggagaatggtatgtagaaacgaagatctgggcactaggtatgctcattgctgctggaaagagtagcatgtttttgtttgtttgtttgtttttttgagatggagtcttgctctgtcaccaggctggaatgcagtggcgcgatctcagctcactgcaaccaccgcctccctggttcaagcagttctcct

SEQ ID NO: 32521 - DNA, 201 bp, Homo sapiens
agtcctccctgcatgtctccgccagtggttgaccctgcctgcgttcgctgcaggcctctgactccggaaggcaaacagaggcctcaggggggagacttcakgagattcctgcccatgttcctttcggataaccctaaccccaagtgtggcaaagggtaagtgctgctgccattgcagataagcatccactgcaactttaat

SEQ ID NO: 32522 - DNA, 201 bp, Homo sapiens
atattagtatgcatggcagtcagcattttcttaataaataaagatctcatctcagcctggccaaaatgtgaaaccctgtctctactgaaaatacaaaaaawattagccacacgtggtggtgtgtgcctgtagtcccagctactcgggagactgaggcaggagaatcacttgaatcctggaggtggagtttgcagtgagcca

SEQ ID NO: 32523 - DNA, 201 bp, Homo sapiens
gataaatacatatatcaaacgcatggctcaaaaatgacaacgcgtcttctttatctgccttcacgtagaacttaaaacagaccctggtccccacctcgggrtttcctcgcgcccacgggctgcgctgcgcagctgggccagcaggtggcgaggctcccgcactttttttcccgggcctggccgcaccgccaccgcccaccc

SEQ ID NO: 32524 - DNA, 201 bp, Homo sapiens
tttactaagcagtctctgtcttatgattcatttgttgttccagatagcaatatttgtgggtgttctgtcattcagcatcgcagtcctgaacaaagtagatrttggattggatcagtctctttcgatgccagatgtaagatgacttccttttttttttttttttaacttctttagctgatgatgaatacatttttcaaaaca

SEQ ID NO: 32525 - DNA, 201 bp, Homo sapiens
actacacttcttccaaggggcagaacatggtgtgcggcggcatgggctgcaacaatgattccctggtgcagcagatatttaacgcggcgcagctggacaaytagtcagtaccaccttgtcttgtacttcagaagcagcggaggaggctctcagccaggcagtcagctcaggcctgaaatgtctcactgaaaatagactttc

SEQ ID NO: 32526 - DNA, 201 bp, Homo sapiens
gatcacgccactgcactccagcctgggctacagagcaagactctgtctcaaaataaaaaaaaaaagaagccagtctgggagagaacaagctaaacctttgstgttcccttatctgggggccttcttcatccctgaaatgtacagctgggtctgacctctgagtccagggtcaggtgattttgcttagcctcaagtgctcag

SEQ ID NO: 32527 - DNA, 201 bp, Homo sapiens
gctacagataatttagtcttgggtcaactttctcctctccctctacaagggaaatgttcaaaagtgtttagactttggtgatgcagcatgattgggaaagyagagggcacagaaagatgccaggctttgtggtctccaggcaagctcaggaatgtgacaaagcataccgaaaagaaaagcgggctgggagcagtggctcac

SEQ ID NO: 32528 - DNA, 201 bp, Homo sapiens
tggacctccgcttgacatacagatactgcaccaggtaacctgctgtttgaagaaataagtcactctagatgaccttgtggtttgctggcttttacatgttkactactgctagatggggatttggggctgaatgtcatggtatatcttgaaaatcttagcgtataatggcaaagctgcctttaagttaggtttcaagaaagt

SEQ ID NO: 32529 - DNA, 201 bp, Homo sapiens
gcctttcttccggacggagcagctcatcatccgggcccctctcactgacaaacacatttaccagccatacccttcgggagctgatgtaccctttggacctycgcttgacatacagatactgcaccaggtaacctgctgtttgaagaaataagtcactctagatgaccttgtggtttgctggcttttacatgttgactactg

SEQ ID NO: 32530 - DNA, 201 bp, Homo sapiens
agacagggagaaatattaatccgtgagtggctcccagtaagaccatggccaaatacatcctgaagtagaatatctggaaaatttgagatttggcaaaagcsaacaccacaatccctccaaattttgtaagtgtgattccactgaacacctaaaagaagagatactgtgttagaaaccacttttaccaacctgtaattgaac

SEQ ID NO: 32531 - DNA, 201 bp, Homo sapiens
cagtgggcttttctttgagtttaagtataatacaaaattttggatgtttttaattgagatttgtactcaacacaattcctttctgtagattttccagtccrtgggatggagcccatgaacaatgccaccaaaggctgtgacgagtctgtggatgaggtcacagcaccatgtagctgccaagactgctctattgtctgtggc

SEQ ID NO: 32532 - DNA, 201 bp, Homo sapiens
tatgtgtgagatcatgcagaatataatttacttttcctttagatgtccatcctgtttttataacctactgaacctgttttgtgagctgacatgtagccctygacagagtcagtttttgaatgttacagctactgaagattatgttgatcctgttacaaaccagacgaaaacaaatgtgaaagagttacaatactacgtcgg

SEQ ID NO: 32533 - DNA, 201 bp, Homo sapiens
tttaattgagatttgtactcaacacaattcctttctgtagattttccagtccatgggatggagcccatgaacaatgccaccaaaggctgtgacgagtctgkggatgaggtcacagcaccatgtagctgccaagactgctctattgtctgtggccccaagccccagcccccacctcctcctgctccctggacgatccttggc

SEQ ID NO: 32534 - DNA, 201 bp, Homo sapiens
atccatcagtcagtacctgcatgcgggtccgcctgtgtactttgtcctggaggaagggcacgactacacttcttccaaggggcagaacatggtgtgcggcrgcatgggctgcaacaatgattccctggtgcagcagatatttaacgcggcgcagctggacaactagtcagtaccaccttgtcttgtacttcagaagcagcg

SEQ ID NO: 32535 - DNA, 201 bp, Homo sapiens
ccagctttatcttacatattccctgtccctgccctgcaaggagctctggttccttttattggagaatggtatgtagaaacgaagatctgggcactaggtaygctcattgctgctggaaagagtagcatgtttttgtttgtttgtttgtttttttgagatggagtcttgctctgtcaccaggctggaatgcagtggcgcgat

SEQ ID NO: 32536 - DNA, 201 bp, Homo sapiens
tcagagtgttcacactctctcctattcttttatctttctttcaggactcctacatggtggattatttcaaatccatcagtcagtacctgcatgcgggtccrcctgtgtactttgtcctggaggaagggcacgactacacttcttccaaggggcagaacatggtgtgcggcggcatgggctgcaacaatgattccctggtgc

SEQ ID NO: 32537 - DNA, 201 bp, Homo sapiens
atattttgttcctcctgaaactcaaccactgattttagcattcattgttgggtcttgtctgcaacagttataactaaggtgtttgcctgatagtgattttyttctctttccctctcttcctctgcatttactaactggacttctgtacagaaagctatcccttctccctcatttatttactcagttatttacatcatggac

SEQ ID NO: 32538 - DNA, 201 bp, Homo sapiens
aatatcttgggggaagatgctttgagactatactaatattttgttcctcctgaaactcaaccactgattttagcattcattgttgggtcttgtctgcaacmgttataactaaggtgtttgcctgatagtgatttttttctctttccctctcttcctctgcatttactaactggacttctgtacagaaagctatcccttctc

SEQ ID NO: 32539 - DNA, 201 bp, Homo sapiens
agcaccctggggccctggggggaagactggtggtgttaggaatcatgagtccagctggaggcatctcagccaggaacctcctggcaccctcttattctccrtgatcctcgccttgcttagttactatcagagtgttcacactctctcctattcttttatctttctttcaggactcctacatggtggattatttcaaatcca

SEQ ID NO: 32540 - DNA, 201 bp, Homo sapiens
tacttagaaaattgcaccccgccccaggagctctccgaccagtgccttttgcctcctatgtggttatcaggtacttttaatcattaaagatgagagcactrgagaaggtattcatggaaaatagaacagtgtatccgtactctcagatatgagccctgcttcagataggggagcactgaggtccaagaaaagaagttgtga

SEQ ID NO: 32541 - DNA, 201 bp, Homo sapiens
gcaaaatatcgcaaggacaaaaaaccaaacaccgcatgttctcactcataggtgggaattgaacaatgagaacacatggacacaggaaggggaacgtcacrcaccggggactgttgtggggtgggggcctgggggagggatagcattaggagatatacctaatgctaaatgacgagttaatgggtacaacacatcaacatg

SEQ ID NO: 32542 - DNA, 201 bp, Homo sapiens
aaaagaatgcctcaggatagaattccctttcagtaatgtccttctattgtgccacccttttaagatgagaactcttacctatgtaactgagtaagacaggyagaaatattaatccgtgagtggctcccagtaagaccatggccaaatacatcctgaagtagaatatctggaaaatttgagatttggcaaaagccaacacca

SEQ ID NO: 32543 - DNA, 201 bp, Homo sapiens
accatgcctgcatgcctgactaatttttgtatttttagtagagacggggtttcaccgtgttggccaggctgatctccaactcctgacctcaggtgatctgmccgccttggcctcccagagtgctgggattacaggagtaagccaccgtgcccagccggccactcattctttagaaagtcagagtcaaggccaggctcagtg

SEQ ID NO: 32544 - DNA, 201 bp, Homo sapiens
agctgccaagactgctctattgtctgtggccccaagccccagcccccacctcctcctgctccctggacgatccttggcttggacgccatgtatgtcatcakgtggatcacctacatggcgtttttgcttgtgttttttggagcattttttgcagtgtggtgctacaggtaagcagttttgtttgtcatccagggcaaaaag

SEQ ID NO: 32545 - DNA, 201 bp, Homo sapiens
ccagccaactagctccctttctcctgcagaaataagaaaaagtctctctctctcatagggccatcagtaaataaagccaaaagttgtgccactgaagagcratacaaaggaacagagcgcgaacggcttctaaatttctagccctctcgcagggcatcctgactgaactgtgtctaagggtcggtcggtttaccactggac

SEQ ID NO: 32546 - DNA, 201 bp, Homo sapiens
gactcaccacattacaaggagccagaataagctggaacaaagtcagcacttctgtgtttctttcacatagagaatcatcaaatagacccactagtggggckgtctgccccatgtctgaagtgtagtaagagcaaagtgactctgtccactataggggaggctggactggaatcactcagtccaaagaagaccatccacggg

SEQ ID NO: 32547 - DNA, 201 bp, Homo sapiens
ttctgtagattttccagtccatgggatggagcccatgaacaatgccaccaaaggctgtgacgagtctgtggatgaggtcacagcaccatgtagctgccaasactgctctattgtctgtggccccaagccccagcccccacctcctcctgctccctggacgatccttggcttggacgccatgtatgtcatcatgtggatcac

SEQ ID NO: 32548 - DNA, 201 bp, Homo sapiens
agtgattgttctaccttagcctcctgagtagctaggactacaggcatgcactaccatgtctagctaattttatttatgtttttctttatttttttttttttgagacagactcttgctctgtcaccgaggctggagtacagtggcatgatctcagcttactgcaacctcctcccgggttcaagcgattctcctgcctcagcc

SEQ ID NO: 32549 - DNA, 201 bp, Homo sapiens
agcaaagtgcttgctgcctttcttcatctcgagactgtccttgatccttttacttctatggccacttcaccttgcacaaaaatgacccacggttgaaagarcaatactgatttgcttcatttatagctttgtcactaaattgaagcactgaagtagaagattaagaaaatgaggggctttttatcatctccgggggataga

SEQ ID NO: 32550 - DNA, 201 bp, Homo sapiens
ttgtctcctttttcctttgggtttcctcttctagcaatgtacaatgcctgccgggatgtggaggccccctcaagtaatgacaaggccctgggactcctgtrtgggaaggacgctgacgcctgtaatgccaccaactggattgaatacatgttcaataaggacaatggacaggcaccttttaccatcactcctgtgttttca

SEQ ID NO: 32551 - DNA, 201 bp, Homo sapiens
cgacctcctgagctcaagcaatctctcaactcagcgtcccaagtagctgggactacaggcacatgccacaacccctggctaattttttaaaaatttgtttggggagatggggcttcaccatgttgcctagcctggtctcaaactcctaggctcaagcaatccaccctcctcagccttcctaagtactgggagtacaggcat

SEQ ID NO: 32552 - DNA, 201 bp, Homo sapiens
acctgccttggcttcccaaagtgctgggattataggcgtgagccaccacttccagccaggatgacttttttttttttttttttttttttttggtcttctcwgctgtgtctctagaagatgaccttttgagaagcaaacctgaatgttgattcaagcccaaatttcctgggctcaggtgttaattttttaagtctttggaac

SEQ ID NO: 32553 - DNA, 201 bp, Homo sapiens
ggccatggcaccagggtcggagccacgtacttcatgacctaccacaccgtgctgcagacctctgctgactttattgacgctctgaagaaagcccgacttayagccagtaatgtcaccgaaaccatgggcattaacggcagtgcctaccgagtatttccttacaggtaaagcctgccctttttcaatggggtttacccagca

SEQ ID NO: 32554 - DNA, 201 bp, Homo sapiens
tcgacctcctgagctcaagcaatctctcaactcagcgtcccaagtagctgggactacaggcacatgccacaacccctggctaattttttaaaaatttgtttggggagatggggcttcaccatgttgcctagcctggtctcaaactcctaggctcaagcaatccaccctcctcagccttcctaagtactgggagtacaggca

SEQ ID NO: 32555 - DNA, 201 bp, Homo sapiens
ctggtcaggtattttgtagcatgtccttccatttggctttatctggtattttctcatgatgagattgaaataaggtgttttgacaagtacatcacagaagycatgttatgtctttctcggtgcatcatgtcagggatccctgatgttgatgcgtctctttcctggtgatgttaaccttgatcacttgctcaaggtgatgtc

SEQ ID NO: 32556 - DNA, 201 bp, Homo sapiens
tgctcaatactatgagtcatcagggaaatacaaatcaaaaccacaatgagataccacttcacacccaccaggatggctagaatcaaagtcacataacaagmagtgttgacaaggctgtggaaaataggaacctttattaaaaagaaatccaaaaaccaaaaacagctgggcacagtggctcatgcctataatccagcactt

SEQ ID NO: 32557 - DNA, 201 bp, Homo sapiens
accacttacaaccataatttggtacaatcgtttcaaaactacttgaaaaacaactttgcagtacgtagtaagttgaagctaaccctcctcccagaaatttsacttatagatgcctgccttagagaaactctaaatgcatataaacctggagacccatataagaacacccactgtaacactattgtgattgtgaaaaattga

SEQ ID NO: 32558 - DNA, 201 bp, Homo sapiens
ctcgacctcctgagctcaagcaatctctcaactcagcgtcccaagtagctgggactacaggcacatgccacaacccctggctaattttttaaaaatttgtttggggagatggggcttcaccatgttgcctagcctggtctcaaactcctaggctcaagcaatccaccctcctcagccttcctaagtactgggagtacaggc

SEQ ID NO: 32559 - DNA, 201 bp, Homo sapiens
gagcgcgcggaagaggcacttgcccacatgggcagctccgtgagtaccctgagcagggccacgccggcagagtcgcaccacaaagtaatcctcctcagtgrctgaagagtctggatcctgtacttacaaagcagcttctaaggattgcaagctttcaggcaattcatgaattagctgccacatcgtggacagaacggacgt

SEQ ID NO: 32560 - DNA, 201 bp, Homo sapiens
tcagcctgggaagtggaggttgcagtgagctgagatcacaccattggactccagcctgagggacagagactccatctccaaaaaaaaaaaaaaaaaaaaaactcttactactcaatgataaataaataacccaatttaaaatggcaaaagatctgaatagagtagacatttctctaaggaagatatacaaatgaccaacaa

SEQ ID NO: 32561 - DNA, 201 bp, Homo sapiens
tgtgtgtgtgtaagtatttttttattttttggaagagacgggcctcactgtgttggtgaggctggtcttgaactcctggccttaagtgatcctcctgcctyggcctgccaaagtgttgggactgtaggtgtgagccaccacacctggcctatagtgcattattatttttatttagtttttaaattatgccatagccagttg

SEQ ID NO: 32562 - DNA, 201 bp, Homo sapiens; identical to SEQ ID NO: 7288

SEQ ID NO: 32563 - DNA, 201 bp, Homo sapiens
cctcgacctcctgagctcaagcaatctctcaactcagcgtcccaagtagctgggactacaggcacatgccacaacccctggctaattttttaaaaatttgtttggggagatggggcttcaccatgttgcctagcctggtctcaaactcctaggctcaagcaatccaccctcctcagccttcctaagtactgggagtacagg

SEQ ID NO: 32564 - DNA, 201 bp, Homo sapiens
tgagatagcaactaatgctttccctgttccgactttcaggaacggcttggctcttaacctccaccttcccttcctctcccgttcttccaggagaggcgtcytgctgtgaccctgtcagcgcagcatttgagggctgcttgaggcggctgttcacacgctgggggtctttctgcgtccgaaaccctggctgtgtcattttct

SEQ ID NO: 32565 - DNA, 201 bp, Homo sapiens
accgcgaaggtctgcagcttcactcctgagccagcgagatcacgaacccaccagaaggaagaaactccgaaaacatctgaacatcagaagggacagattcyagacgcgccaccttaagagctgtaacgctcaccgccagggtccgcggcttcattcttgaagtcagtgagaccaagaacccaccaattccggacacaatgt

SEQ ID NO: 32566 - DNA, 201 bp, Homo sapiens
aggtcagtaaccctgtctgtcctctctagtacccgaataggcttcgccccctcgtcctggatcgacgattatttcgactgggtgaagccacagtcgtcttrctgtcgagtggacaatatcactgaccagttctgcaatgcttcaggtaccttctcctttaccaaatctttcctgttttgctgaaaaattttcaaattatca

SEQ ID NO: 32567 - DNA, 201 bp, Homo sapiens
ctgcttttatgagctgtaacactcaccgcgaagatctgcagcttcactcctgagcccagcgagaccacgagcccactgggaggaacgaacaactccagacrcgctgccttaagagctgtaacactcaccgcgaaggtctgcagcttcactcctgagccagcgagatcacgaacccaccagaaggaagaaactccgaaaaca

SEQ ID NO: 32568 - DNA, 201 bp, Homo sapiens
ctttgctgagcagataggtagctgagggcaggggtctcatatgtgtccccaggtgggcttgattcctgccatgagatagcaactaatgctttccctgttcygactttcaggaacggcttggctcttaacctccaccttcccttcctctcccgttcttccaggagaggcgtcctgctgtgaccctgtcagcgcagcatttga

SEQ ID NO: 32569 - DNA, 201 bp, Homo sapiens
aggattgtaaatacaccaatcggcactctgtatctagctcaaggtttgtaaacacaccaatcagcaccctgtgtttagctcaaggtttgtgagtgcaccartcgacactctgtatctagctgctctggtggggccttggagaacctgtgtgtggaaactctgtatctaactaatctgatggggacgtggagaacctttgta

SEQ ID NO: 32570 - DNA, 201 bp, Homo sapiens
cttgtgaataaatagtaaatgtgtagccttttaaaataattctataataactttgcaaatacaggatgtgtcttacccttttgtacttcaaaaggattacrtgaatgaatgtgtcttagttcactgaggaatgttgaccttactctaactgttgcctactcccgtgtctgtgctctttcacctgaaaggaactctgtccag

SEQ ID NO: 32571 - DNA, 201 bp, Homo sapiens
aaatacaccaatcggcagtctatctagctcaaggtttgtaaacacaccaatcagcaccctgtgtttagctcaaggtttgtgagtgctccaatcgacactctgtatctagctgctctggtgaggacgtggagaacctttatgtctagctcaaggtttgtaaacacaccaatcagcaccctgtgtttagctcaaggtttgtga

SEQ ID NO: 32572 - DNA, 201 bp, Homo sapiens
tgatggcagtgatcagctgcggccagccaggtttttcttcatctggactgtgcctctcactttcaaatttttggaacatttgctttggcaacaaaactttyaaaaaaccaactctctctggtgcaggtgttctgttggaggatttgagagaagctttaaaattttatcttattactgtcccttgcttaggtcacaagagga

SEQ ID NO: 32573 - DNA, 201 bp, Homo sapiens
actcgttaaaccaaatcaggatgagagtgcctccggggaattgtgtccttgtgcacattaacgcccctcacataggtgtggcgtcaataggaagtggtgartcaggggagagggggttccgtggactagaaaaaactctccttcgacttctatttagttctcagaaggggataggtgatgttgatccaataatggactaag

SEQ ID NO: 32574 - DNA, 201 bp, Homo sapiens
cctgccaaagtgttgggactgtaggtgtgagccaccacacctggcctatagtgcattattatttttatttagtttttaaattatgccatagccagttgttytgaatagtgcagtactacaaaacagagtcaaggtctcatgctgtcacccaggctggaatacagtgatgcaatcatggctcactgcagcctcaacctccta

SEQ ID NO: 32575 - DNA, 201 bp, Homo sapiens
taaatacaccaatcggcagtctatctagctcaaggtttgtaaacacaccaatcagcaccctgtgtttagctcaaggtttgtgagtgctccaatcgacactctgtatctagctgctctggtgaggacgtggagaacctttatgtctagctcaaggtttgtaaacacaccaatcagcaccctgtgtttagctcaaggtttgtg

SEQ ID NO: 32576 - DNA, 201 bp, Homo sapiens
aaacaattttgcatcataattacttagaaaatacccgggagggggtgggggaggaggaccctttgtcatactccatgtaactcaccatcgcataactctgstcggcatccaggtactttttatactcatggttgagtttatcaaaaacagtggctatcacgggcagcgatgctctgtctgactcacttaacactggaaagg

SEQ ID NO: 32577 - DNA, 201 bp, Homo sapiens
acataaggtttctcatcctgttctaactccagcgattgcctctcaggattggtatctggccttagcttctcagaggagggcttttctttatcactttaccytgtggttttgtaggagcgtcgaggttgccctggaattttcttaataaaaacatagaagccccgggctctgaccagtcaaggccatacttgaaggaggaga

SEQ ID NO: 32578 - DNA, 201 bp, Homo sapiens
attgtgtttaccttagggaaggggctactgtcagggaggggtaattggggagcttcaactgaatctatagagtgtgtgtgtgtgtgtaagtatttttttawtttttggaagagacgggcctcactgtgttggtgaggctggtcttgaactcctggccttaagtgatcctcctgcctcggcctgccaaagtgttgggactgt

SEQ ID NO: 32579 - DNA, 201 bp, Homo sapiens
ggattgtgtttaccttagggaaggggctactgtcagggaggggtaattggggagcttcaactgaatctatagagtgtgtgtgtgtgtgtaagtatttttttattttttggaagagacgggcctcactgtgttggtgaggctggtcttgaactcctggccttaagtgatcctcctgcctcggcctgccaaagtgttgggact

SEQ ID NO: 32580 - DNA, 201 bp, Homo sapiens
ggctgtctggcattctgactgagcccctctgggcacagctgcagaacacgaataactagtcttatgaggttactttatgagatgctctcctgattgtgggkctagcaggaggagcaccctggggccctggggggaagactggtggtgttaggaatcatgagtccagctggaggcatctcagccaggaacctcctggcaccc

SEQ ID NO: 32581 - DNA, 201 bp, Homo sapiens
aggattgtgtttaccttagggaaggggctactgtcagggaggggtaattggggagcttcaactgaatctatagagtgtgtgtgtgtgtgtaagtatttttttattttttggaagagacgggcctcactgtgttggtgaggctggtcttgaactcctggccttaagtgatcctcctgcctcggcctgccaaagtgttgggac

SEQ ID NO: 32582 - DNA, 201 bp, Homo sapiens
tgcgggtggggtgaccttaacgggttccagcaatttctcctggtcaacacaaacgtgccacagaaaaccaggcttttggctgtgtgtagagagggccccaraaagttcctggtacagtaagattggtgtgatggaggccttgtaagtccaatgggatgcttggcctcctctagcacccagggtgccctgggtaattagcac

SEQ ID NO: 32583 - DNA, 201 bp, Homo sapiens
tggtgaaatccccctcatcctcggagctctgggtctgtacagtctcttcctcttggctataattttgccttttagtgtttgctccctcctctgtgcctgcrtagcgccatgcaccatgtgccattgatggcactgggctgtatttgcctgcctcttgcccagtgattctgagctcccaaaggtgagtgctgagctgtatta

SEQ ID NO: 32584 - DNA, 201 bp, Homo sapiens
caggattgtgtttaccttagggaaggggctactgtcagggaggggtaattggggagcttcaactgaatctatagagtgtgtgtgtgtgtgtaagtatttttttattttttggaagagacgggcctcactgtgttggtgaggctggtcttgaactcctggccttaagtgatcctcctgcctcggcctgccaaagtgttggga

SEQ ID NO: 32585 - DNA, 201 bp, Homo sapiens
tcaagaccagccggggcaacatggtgaaacaccgtcttaaaaacattttgtttttcttttcattgttgaggttgaggctgctgtgagctgtgatcacgccrgtgtactccagcctgggcaacagagcaagaccctgtgtcaaaacaaaaaagagagagaaataaataatagcaattatgtgccgtagagaaaatgtggcta

SEQ ID NO: 32586 - DNA, 201 bp, Homo sapiens
ttttttagagatgggatcttgctatgttgtccaggctggactcaaactcctgggttatagccatccttctgcctcagcttcctgagtacttgagattaggygtgccaccatacccggcatacaggacttgccaaaccaccatcttgctctcattccctctcactgttctctctccctccctttttcctcccacagttgtaa

SEQ ID NO: 32587 - DNA, 201 bp, Homo sapiens
tcaggattgtgtttaccttagggaaggggctactgtcagggaggggtaattggggagcttcaactgaatctatagagtgtgtgtgtgtgtgtaagtatttttttattttttggaagagacgggcctcactgtgttggtgaggctggtcttgaactcctggccttaagtgatcctcctgcctcggcctgccaaagtgttggg

SEQ ID NO: 32588 - DNA, 201 bp, Homo sapiens
tggtgtgggctgtctggcattctgactgagcccctctgggcacagctgcagaacacgaataactagtcttatgaggttactttatgagatgctctcctgaytgtggggctagcaggaggagcaccctggggccctggggggaagactggtggtgttaggaatcatgagtccagctggaggcatctcagccaggaacctcct

SEQ ID NO: 32589 - DNA, 201 bp, Homo sapiens
tgagctgtgatcacgccagtgtactccagcctgggcaacagagcaagaccctgtgtcaaaacaaaaaagagagagaaataaataatagcaattatgtgccktagagaaaatgtggctattctgtttccctagagttttttaaaatttatttttaaaatttatttattttagagacaggttcttgctctgttgcccaggcgt

SEQ ID NO: 32590 - DNA, 201 bp, Homo sapiens
aaaaatgatgggggacagaggtgcgtgagccttgtgtttcctcaaagcggacgtggttcccaccagtgtggaagcggtacagggagtggcaggctcctggyggcagggacctgaattggtttgtagttatgcttgtgcgcgtcctcataaccccagtctcgccctagcgctgtcccctttcctctccctccagcttttcct

SEQ ID NO: 32591 - DNA, 201 bp, Homo sapiens
agaacatggtgtgcggcggcatgggctgcaacaatgattccctggtgcagcagatatttaacgcggcgcagctggacaactagtcagtaccaccttgtctygtacttcagaagcagcggaggaggctctcagccaggcagtcagctcaggcctgaaatgtctcactgaaaatagactttcttggaaaagttgtttttatgc

SEQ ID NO: 32592 - DNA, 201 bp, Homo sapiens
cagctctccagtcaaattgaactgcttgctagcaaaatcctgcccatcttccagggccccatttcacatgctacattatctacgacattcttgtcctgttsccctaactagaatgccttccctctgaagttctgaatctttatttaaactgctgcaacagcatttgctgcctcattaaaagaccttggtgtgggtcttgac

SEQ ID NO: 32593 - DNA, 201 bp, Homo sapiens
  misc_feature (1)...(201): n = A,T,C or G, or insertion/deletion polymorphism (see Tables 1-2)
actctaatcacatgaagtctcctcgttttcagcaacttccttgttttgagcattctcagtccagaagaggcggaaagctgcggcccaccttcttttccacnaaggctgacaggacatgggtgtacacatctgactggtccagcaccgcctgggtccgcaccggcctcttgaggagcgggctgcttcggctctgccctgctt

SEQ ID NO: 32594 - DNA, 201 bp, Homo sapiens
ctgtcccccaggctgaagtgtagtggtttgattgtggctcactgaagtgttgaccctgggctcaagctatccttccacctcagcctcccacgtagctgggrctgcaggtgcatgccaccatgcccaactaatttttaaattttttgtagacacaaggtcttgctgtgttgcccaaggtggtcttgaattcctgggctggag

SEQ ID NO: 32595 - DNA, 201 bp, Homo sapiens
agtgttcacactctctcctattcttttatctttctttcaggactcctacatggtggattatttcaaatccatcagtcagtacctgcatgcgggtccgcctrtgtactttgtcctggaggaagggcacgactacacttcttccaaggggcagaacatggtgtgcggcggcatgggctgcaacaatgattccctggtgcagca

SEQ ID NO: 32596 - DNA, 201 bp, Homo sapiens
tgtggaactgtacctgttggtacggctcctttttaggtggcagtgtgctgaagcaggaaaataacagacaagttaaacatgagacagctggcagtctttcycatttaaaatgcaggggagcccgggccagaacccagcgtgtgatgtgcggttggtgcctggagagtcgtcttggttcaactctacaccctggcttagcct

SEQ ID NO: 32597 - DNA, 201 bp, Homo sapiens
ggtggaccagtgttcccgtggcttgtgttgggaggctatgatggtaagtaagagaagctttgacttttccttttagataaagtcatctcggttttgtcatyagcatcaagtggtaattatgaagatttcataaattgggcagttttgttaatttcttacctcttgaatcccagaatagtatctcctttggctttgggtttg

SEQ ID NO: 32598 - DNA, 201 bp, Homo sapiens
taaatacccatttcctttgatccaacaatataaaagtatttccaacagttctatttgcgcatgattgcaaagatttacatccaagaatgggccaggagtgstggctcacgcctgtaatcccagcactttaggaggctgaggcaggcagattgcttgagcccagcagttcaagaccaatctgggcaacatggtgaaaccccg

SEQ ID NO: 32599 - DNA, 201 bp, Homo sapiens
cttctttcaggttcttgacttacaaatagccatcgaaaacattactgcctcttatgacaatgagactgtgacacttcaagacatctgcttggcccctcttycaccgtataacacgaactgcaccattttgagtgtgttaaattacttccagaacagccattccgtgctggaccacaagaaaggggacgacttctttgtgta

SEQ ID NO: 32600 - DNA, 201 bp, Homo sapiens
ctcaacacaattcctttctgtagattttccagtccatgggatggagcccatgaacaatgccaccaaaggctgtgacgagtctgtggatgaggtcacagcaycatgtagctgccaagactgctctattgtctgtggccccaagccccagcccccacctcctcctgctccctggacgatccttggcttggacgccatgtatgt

SEQ ID NO: 32601 - DNA, 201 bp, Homo sapiens
ctgctcctgctcctccgctcctcctgcgcggggtgctgaaacagcccggggaagtagagccgcctccggggagcccaaccagccgaacgccgccggcgtcmgcagccttgcgcggccacagcatgaccgctcgcggcctggcccttggcctcctcctgctgctactgtgtccagcgcaggtgagcggtcgccggccaccgg

SEQ ID NO: 32602 - DNA, 201 bp, Homo sapiens
cttgtctcctttttcctttgggtttcctcttctagcaatgtacaatgcctgccgggatgtggaggccccctcaagtaatgacaaggccctgggactcctgkgtgggaaggacgctgacgcctgtaatgccaccaactggattgaatacatgttcaataaggacaatggacaggcaccttttaccatcactcctgtgttttc

SEQ ID NO: 32603 - DNA, 201 bp, Homo sapiens
ggatcacctacatggcgtttttgcttgtgttttttggagcattttttgcagtgtggtgctacaggtaagcagttttgtttgtcatccagggcaaaaagagsaaaattgcccactggcactttgagctttcatttgtcagagcttggttacttaggacaagaaacaaatacctccatgaataccattgcatggattattgtg

SEQ ID NO: 32604 - DNA, 201 bp, Homo sapiens
ctggactctcttgacacccaggattctttcctcaggggacatgctgcctatagttctgcagttaacatcctccttggccatggcaccagggtcggagccaygtacttcatgacctaccacaccgtgctgcagacctctgctgactttattgacgctctgaagaaagcccgacttatagccagtaatgtcaccgaaaccatg

SEQ ID NO: 32605 - DNA, 201 bp, Homo sapiens
gatacagagaagctccagagggcccaggcctgggaaaaagagtgagtcactcatgggtgtgagcagactgtccttgcattgtgggaagctagacacttgcrgcaagcacttaaacttcattttctaaattaaccaatggcagatctgagttacgtagttttgttcacttggtactaatgatgctaagaagaaactgtaaac

SEQ ID NO: 32606 - DNA, 201 bp, Homo sapiens
cgggctttcaccatgttggccaggctagtctcgaactcttgacctcaggtgatctgccagcctcagcctcccaaagtgctggaattacaggcataagccaytgagcccagccctaaacttactttaattcagcatgtatggaaccttagctgtaatctgatagtctccagtgtggaagaccctaatgcagtggctgggcat

SEQ ID NO: 32607 - DNA, 201 bp, Homo sapiens
tttaccttagggaaggggctactgtcagggaggggtaattggggagcttcaactgaatctatagagtgtgtgtgtgtgtgtaagtatttttttattttttkgaagagacgggcctcactgtgttggtgaggctggtcttgaactcctggccttaagtgatcctcctgcctcggcctgccaaagtgttgggactgtaggtgt

SEQ ID NO: 32608 - DNA, 201 bp, Homo sapiens
agtatgcctaagatgaaaatggtatttcagattcattaaactgtgaaagtgacatgtggctgaagcttttagataaggggaaagattatccctcactagtraggaaagtaatcgatagagaagaaagtaatgcccctcactgtcagtattttaaaatgttttacaaaaaatctggagacctattcttctaacagtcctccc

SEQ ID NO: 32609 - DNA, 201 bp, Homo sapiens
tgaggctggtcttgaactcctggccttaagtgatcctcctgcctcggcctgccaaagtgttgggactgtaggtgtgagccaccacacctggcctatagtgsattattatttttatttagtttttaaattatgccatagccagttgttctgaatagtgcagtactacaaaacagagtcaaggtctcatgctgtcacccaggc

SEQ ID NO: 32610 - DNA, 201 bp, Homo sapiens
accacgaccatgccattattattacattattattagctaaaccagagatcttaatcagatttcaccagctttttctctaatgcccttccctgtttcaaggycccatattacatttttgtgttttatgagtcccctctaatctgtgacagaaagttcctcagtctttccttttctggccttaacactcttgatgatactggt

SEQ ID NO: 32611 - DNA, 201 bp, Homo sapiens
ccaaaggtttggagtcgctgaggacgtggtactgcaggaactgatgcagcatataaaagaggttgtgctggacaagggttttgataacaagttcatgtagrtaatgctgaggacaaaagtaaaaagtgaaagaacacttccaaatcattcagctacaacagactagaggctccccaaggactggctattctaaccaacaca

SEQ ID NO: 32612 - DNA, 201 bp, Homo sapiens
tagcattcattgttgggtcttgtctgcaacagttataactaaggtgtttgcctgatagtgatttttttctctttccctctcttcctctgcatttactaacyggacttctgtacagaaagctatcccttctccctcatttatttactcagttatttacatcatggacttttaattctgtgggttgtatccaacactgtcatt

SEQ ID NO: 32613 - DNA, 201 bp, Homo sapiens
cagggcagggttgaacctcacccttcagaggctcctgtgtcggcatctcctctgtggggtgggaatagcgctcattgagggcagccaacaaaggtggcttygctgagcagataggtagctgagggcaggggtctcatatgtgtccccaggtgggcttgattcctgccatgagatagcaactaatgctttccctgttccgac

SEQ ID NO: 32614 - DNA, 201 bp, Homo sapiens
ttgatgaacacataacatgtgctatcgtgccagctagagattagtgctatgaggagaaaaataaggctggacagagtggggggtgcattgcttaagcgtgragatgtgcacaaagggagaggaaaggacagctgggcacatcacagggatgagagttcccggcagaaccagcagcaagtgcagagccctggcaggaagctc

SEQ ID NO: 32615 - DNA, 201 bp, Homo sapiens
tggccctattatgtgtgagatcatgcagaatataatttacttttcctttagatgtccatcctgtttttataacctactgaacctgttttgtgagctgacaygtagccctcgacagagtcagtttttgaatgttacagctactgaagattatgttgatcctgttacaaaccagacgaaaacaaatgtgaaagagttacaata

SEQ ID NO: 32616 - DNA, 201 bp, Homo sapiens
cttcttttccacgaaggctgacaggacatgggtgtacacatctgactggtccagcaccgcctgggtccgcaccggcctcttgaggagcgggctgcttcggytctgccctgcttccaccgcctgaaagaaaaaaaccacaaactatgatcttcggcatcttagaggaagggtgctgtttacagttcatccacaaggactgaa

SEQ ID NO: 32617 - DNA, 201 bp, Homo sapiens
ggtttctaggtgatggcagtgatcagctgcggccagccaggtttttcttcatctggactgtgcctctcactttcaaatttttggaacatttgctttggcarcaaaacttttaaaaaaccaactctctctggtgcaggtgttctgttggaggatttgagagaagctttaaaattttatcttattactgtcccttgcttaggt

SEQ ID NO: 32618 - DNA, 201 bp, Homo sapiens
actaaagacttcctccctgtggagcaggtcagtaaccctgtctgtcctctctagtacccgaataggcttcgccccctcgtcctggatcgacgattatttcractgggtgaagccacagtcgtcttgctgtcgagtggacaatatcactgaccagttctgcaatgcttcaggtaccttctcctttaccaaatctttcctgtt

SEQ ID NO: 32619 - DNA, 201 bp, Homo sapiens
ggggcttcaccatgttgcctagcctggtctcaaactcctaggctcaagcaatccaccctcctcagccttcctaagtactgggagtacaggcatgagccacrgtacctgtcctcacttgctgctttcatcataattattaaaggtttcaactttccctggaattactaatagaaatagtaagtagcactctggttgaattga

SEQ ID NO: 32620 - DNA, 201 bp, Homo sapiens
ttggccatggtcttactgggagccactcacggattaatatttctccctgtcttactcagttacataggtaagagttctcatcttaaaagggtggcacaatrgaaggacattactgaaagggaattctatcctgaggcattcttttcaagtatttgaactcatactaatggtcatttgataatgataaatgatactgagtaa

SEQ ID NO: 32621 - DNA, 201 bp, Homo sapiens
agatcctctgtaattattccttaaatgttattgcagggtggaggtggagatgagactaacaggcttaagtcttatcccggactctcaaactctaacctgtrgcatacagtgcagagaaagaacaccgtaactccaaaggcttaatttttcaggggctgactttatacctctcataaagtttcccaatagcaggttgctatt

SEQ ID NO: 32622 - DNA, 201 bp, Homo sapiens
aaaacacaaaaattagccaggcatggtggcgtgcacctgtttaatcccagctactcaggaggctggggcaggagaatcacttgaacctgggagaaatcctygtaaggaagtgtttttgttcaattacaggttggtaaaagtggtttctaacacagtatctcttcttttaggtgttcagtggaatcacacttacaaaatttg

SEQ ID NO: 32623 - DNA, 201 bp, Homo sapiens
tgggctagtctgcctgtaatttgttattctttagagattgcacaagcctgtagcctgatgacagcaggatgttcactttttacttagaaaattgcaccccrccccaggagctctccgaccagtgccttttgcctcctatgtggttatcaggtacttttaatcattaaagatgagagcactcgagaaggtattcatggaaaa

SEQ ID NO: 32624 - DNA, 201 bp, Homo sapiens
tcccgggccgagccagactccataagtcccgcgcctggcccccggggattgcaggggctgaggagaagggcaacacggggaccttgaagcggggtcgcggsggcgccccagcccgggccagggagtcccggcagcggcacctcccagaaagggcggagccgacgacgccttcttccttcctgaccggcgcgcgcagcctgc

SEQ ID NO: 32625 - DNA, 201 bp, Homo sapiens
ctgacaggacatgggtgtacacatctgactggtccagcaccgcctgggtccgcaccggcctcttgaggagcgggctgcttcggctctgccctgcttccacygcctgaaagaaaaaaaccacaaactatgatcttcggcatcttagaggaagggtgctgtttacagttcatccacaaggactgaattcttcgatgtggaccc

SEQ ID NO: 32626 - DNA, 201 bp, Homo sapiens; identical to SEQ ID NO: 7258

SEQ ID NO: 32627 - DNA, 201 bp, Homo sapiens
gaatgctagggacctggcctagggacatttgttcagccagttgagcaaccacagtggctatttcttcagcatgggaacagagaaattattcctttttgccyttaaggacactgctcagccgactacttctcaagagctaaggactctcacttctggttctaaagaactttgaccttgagttctgtttgtttgttactggag

SEQ ID NO: 32628 - DNA, 201 bp, Homo sapiens
aggttttctgcaagggatgtttcccaaaggagtctgaccacttggcagtggtgacaggatgaacacgcagtgttcgggagtgagagcgagctttaatgagrcctcccctctcccctccagtgtgttttatgtcttctacgaacagtacctgaccatcattgacgacactatcttcaacctcggtgtgtccctgggcgcgat

SEQ ID NO: 32629 - DNA, 201 bp, Homo sapiens
ttattttgcatttgtctgtccattactcttcccagactggccccctccttcaggagcccccttggtgggcaccccatgctctaggacaggacatcttttcyttgaattattattattttttttttagagatgggatcttgctatgttgtccaggctggactcaaactcctgggttatagccatccttctgcctcagcttcc

SEQ ID NO: 32630 - DNA, 201 bp, Homo sapiens
aaccctccactcctaaaagggatgcagtattctaagcatggcagattacctacagcggaagcctggatcagtcatctctgatctcgggtgcccctttctgscctttgacctccagctctgtgaagggcatcagctctccagtcaaattgaactgcttgctagcaaaatcctgcccatcttccagggccccatttcacatgc

SEQ ID NO: 32631 - DNA, 201 bp, Homo sapiens
tttgacctccagctctgtgaagggcatcagctctccagtcaaattgaactgcttgctagcaaaatcctgcccatcttccagggccccatttcacatgctamattatctacgacattcttgtcctgttcccctaactagaatgccttccctctgaagttctgaatctttatttaaactgctgcaacagcatttgctgcctca

SEQ ID NO: 32632 - DNA, 201 bp, Homo sapiens
ggagatgactgtcaccctagttaacctgtctttccagaacaagggtaaaacaaaatgaatgtgtaagcatctccttgaagattagggaaagaagatcctgsgaagtttctagcaagcagagactggtaaatgagaatcgacagtacaggacccattccagctattttcttaggtgtaatacactgatactatccttatgta

SEQ ID NO: 32633 - DNA, 201 bp, Homo sapiens
aagatacaaaattttaaaatgtaatgtgcagaatagtattttactgtttgtgtggttaagagggaaaggggaagaatctgtgtgtttgcttgtgtgtgtgyggagtggctctggaaagattcgcagatggtcacagtatggggaggagaactaagacaatgaaacagatgttggagaaggagagaattttcgataaacact

SEQ ID NO: 32634 - DNA, 201 bp, Homo sapiens
gattcattttgcccaaaggtgccactaaaaaggcaaaaggtcaacacgtgtcccgctgctgtagaaggtggtctcagtcgtcctgtagacccgacgtgggyggagactcagtgcacgtgagagtgatgttcactggtccagtcccctgccgcctgtgttccgagtgttttcctgataatgtggctggctcagctttccctt

SEQ ID NO: 32635 - DNA, 201 bp, Homo sapiens
atagggtcttgcttttttgcccaggctggcctcaaactcctggcctcaggagatcttcccacagtgctgggattacaggtgtgagtcactgcacctggccragtccattatttttttaatgttgaggcaaatgttgtgaaatggtatgactgatagttaactgggtaatgaggaaatgagaattgtattattctccatgtg

SEQ ID NO: 32636 - DNA, 201 bp, Homo sapiens
tgaaaggaactctgtccaggattcttctttggcaatgtcagtctctgttgtgatgttcggcagcttcagacactaaaagacaacctgcagctgcctctacrgtttctgtccaggtaggttctgctggggaaacagaacaactgggctgtagatacttgtgaactggtaatgctcagctttccatttattctttgtttacat

SEQ ID NO: 32637 - DNA, 201 bp, Homo sapiens
caggcttctggtaagccggggggggggtggtgtatgttctagaggttaacagcagtgcacagtgtaacgtcatatttttgcctctttattcttattccatyatgtttaaaactgccataaattcccccatgttttaattgtatgtaacgtttctgttgcctacatctattttcttcattccaactttttggtttatcttaa

SEQ ID NO: 32638 - DNA, 201 bp, Homo sapiens
tgtgggaaggacgctgacgcctgtaatgccaccaactggattgaatacatgttcaataaggacaatggacaggcaccttttaccatcactcctgtgttttmaggtaggtataaagattccaagtttggtgtgtttatgatattgttttaaagccaaggaactggctgggcacagtggctcaccagtgcttggggagactga

SEQ ID NO: 32639 - DNA, 201 bp, Homo sapiens
tgcaccattttgagtgtgttaaattacttccagaacagccattccgtgctggaccacaagaaaggggacgacttctttgtgtatgccgattaccacacgcrctttctgtactgcgtacggtaagtggcaagagacaatcattggtagacaccattcttgggtctgacttagggtacatgggcaaaagcttgttttatgagc

SEQ ID NO: 32640 - DNA, 201 bp, Homo sapiens
cggctatactagtatacctgatggtgcctctgaccatggaaatgtgatttcctggcctagttctgggctagtctgcctgtaatttgttattctttagagaytgcacaagcctgtagcctgatgacagcaggatgttcactttttacttagaaaattgcaccccgccccaggagctctccgaccagtgccttttgcctccta

SEQ ID NO: 32641 - DNA, 201 bp, Homo sapiens
gttaaattacttccagaacagccattccgtgctggaccacaagaaaggggacgacttctttgtgtatgccgattaccacacgcactttctgtactgcgtayggtaagtggcaagagacaatcattggtagacaccattcttgggtctgacttagggtacatgggcaaaagcttgttttatgagcataacccagaggtgagc

SEQ ID NO: 32642 - DNA, 201 bp, Homo sapiens
atcacgccactgcactccagcctgggctacagagcaagactctgtctcaaaataaaaaaaaaaagaagccagtctgggagagaacaagctaaacctttggygttcccttatctgggggccttcttcatccctgaaatgtacagctgggtctgacctctgagtccagggtcaggtgattttgcttagcctcaagtgctcaga

SEQ ID NO: 32643 - DNA, 201 bp, Homo sapiens
tgctccttgggtgtcttcagctacattgggttgcccttgaccctcattgtgattgaagtcatcccgttcctggtgctggctgttggagtggacaacatctycattctggtgcaggcctaccaggtatacttccatattctcacagggctcagcatctgttcaagtttcagggactgtgaatggctcctgggctccgcattc

SEQ ID NO: 32644 - DNA, 201 bp, Homo sapiens
cggggttacatgaccagtaagtggcagggctgaggttgttcccagggcccttgccctttcctgcttcctattacacaacaggactgagtaaaccctgtacmtttgattatacatgaaaccaggtggagaaacagcagctatgtaccaaagaacccagagcaatcgagaaaagcccatctggccaggcgaagtggctcacac

SEQ ID NO: 32645 - DNA, 201 bp, Homo sapiens
ccctcttattctccatgatcctcgccttgcttagttactatcagagtgttcacactctctcctattcttttatctttctttcaggactcctacatggtggwttatttcaaatccatcagtcagtacctgcatgcgggtccgcctgtgtactttgtcctggaggaagggcacgactacacttcttccaaggggcagaacatg

SEQ ID NO: 32646 - DNA, 201 bp, Homo sapiens
gtagccaccgttcctggggagcctccagggtgccagcgtcatgccaggcactccctgacattattccatttctcatcacgcagcctatgagtaggtggtgktatacccatttacagaagaggagactggggctcagaggtggtcattttgctcggggttacatgaccagtaagtggcagggctgaggttgttcccagggcc

SEQ ID NO: 32647 - DNA, 201 bp, Homo sapiens
gaagggcacgactacacttcttccaaggggcagaacatggtgtgcggcggcatgggctgcaacaatgattccctggtgcagcagatatttaacgcggcgcmgctggacaactagtcagtaccaccttgtcttgtacttcagaagcagcggaggaggctctcagccaggcagtcagctcaggcctgaaatgtctcactgaaa

SEQ ID NO: 32648 - DNA, 201 bp, Homo sapiens
ccctgggcatgagaatgaacgcagattcctgtgcacattccaagcggggctgagggagaggacggcctgctggtaatccaggcctgaaggaacttggcctrttcacttgtactgatggcagctggggcgtgatcttagctttagtaacattatcccacattaaggttgcgattcttttagcctcgtcatgctccttgccag

SEQ ID NO: 32649 - DNA, 201 bp, Homo sapiens
cccccatccagccaggcagccagttacccacggaagccagatatatggcccaaaaatagtgatgatgaccggaagtctctggccttgatttggaagctttkggaggtggaagatgagtatccccatgtatgttaggtaaaccctgaacttaggtttttcataagaacatacatctgaccagagtcatatcagtgaatcatt

SEQ ID NO: 32650 - DNA, 201 bp, Homo sapiens
ttcgactgggtgaagccacagtcgtcttgctgtcgagtggacaatatcactgaccagttctgcaatgcttcaggtaccttctcctttaccaaatctttccygttttgctgaaaaattttcaaattatcatttaaaaatcatttgcatcgtgcctcagtttatacctatttgtatatcaaagctgggtctccctgtgtcatc

SEQ ID NO: 32651 - DNA, 201 bp, Homo sapiens
tggcttgctccttgggtgtcttcagctacattgggttgcccttgaccctcattgtgattgaagtcatcccgttcctggtgctggctgttggagtggacaayatcttcattctggtgcaggcctaccaggtatacttccatattctcacagggctcagcatctgttcaagtttcagggactgtgaatggctcctgggctccg

SEQ ID NO: 32652 - DNA, 201 bp, Homo sapiens
gagtgcagtggcatgatctcagctcgctgcagcctctgccttccaggttcaagtgattctcgtgcctcagcctcccaagtagctgggattacaggcacctkccaccacgcctggctaatttttgtatttttagtagagacgggctttcaccatgttggccaggctagtctcgaactcttgacctcaggtgatctgccagcc

SEQ ID NO: 32653 - DNA, 201 bp, Homo sapiens
catattatatgattggatttatgtgaactgtctgaaatagtcagataaatagagacagttcagtggttgcttagggcttagggaagtagggaggtagttgwgcatagctagaatacaggatttcttttgaggtgatgaaaatgttataaaattgactatggtgatagttgcatatatctatgaatatgctaaactccatta

SEQ ID NO: 32654 - DNA, 201 bp, Homo sapiens
ttgggtttgggtttcattccagatttaaaagaagtggattgggttagccatttttaggtcacacatgcctttgagaagctgtcgaaggctaagtacctttycccagaataatgcaattgcaaacctctgcattgttgttcagcttgaaggtcatgggcctccgaagttcatttatagaccctctagggagctcatggacct

SEQ ID NO: 32655 - DNA, 201 bp, Homo sapiens
cccagcactttgggaggcccagacgagaggctcacttgaggccgggagttcaagaccagcctaggcaatgtttgcatgtctctaaaaaaaagaaaaaagaraatttaaaaagaaaaaaaagcgtacaattcagtagctttactatattcacgtgtatgtgcagccatcaccacagtcaattttaggaacattttcattact

SEQ ID NO: 32656 - DNA, 201 bp, Homo sapiens
atagcgccaccacacctggctaatttttttttatttttttattttttgtagagacggggttttgccatattgcccaggctggtctggacctcctgagctcwggcagtccacccaccagggcctcccaaattactgggattaaaggtgtgcataaccacccctggcccaaagacaaatatcttaaaagcaaatagagacaag

SEQ ID NO: 32657 - DNA, 201 bp, Homo sapiens
tggagcaggtcagtaaccctgtctgtcctctctagtacccgaataggcttcgccccctcgtcctggatcgacgattatttcgactgggtgaagccacagtygtcttgctgtcgagtggacaatatcactgaccagttctgcaatgcttcaggtaccttctcctttaccaaatctttcctgttttgctgaaaaattttcaaa

SEQ ID NO: 32658 - DNA, 201 bp, Homo sapiens
gatcttgctatgttgtccaggctggactcaaactcctgggttatagccatccttctgcctcagcttcctgagtacttgagattaggcgtgccaccataccyggcatacaggacttgccaaaccaccatcttgctctcattccctctcactgttctctctccctccctttttcctcccacagttgtaattgtgtgagacacc

SEQ ID NO: 32659 - DNA, 201 bp, Homo sapiens
acagggagaaatattaatccgtgagtggctcccagtaagaccatggccaaatacatcctgaagtagaatatctggaaaatttgagatttggcaaaagccakcaccacaatccctccaaattttgtaagtgtgattccactgaacacctaaaagaagagatactgtgttagaaaccacttttaccaacctgtaattgaacaa

SEQ ID NO: 32660 - DNA, 201 bp, Homo sapiens
accatggccaaatacatcctgaagtagaatatctggaaaatttgagatttggcaaaagccaacaccacaatccctccaaattttgtaagtgtgattccacrgaacacctaaaagaagagatactgtgttagaaaccacttttaccaacctgtaattgaacaaaaacacttccttacaaggatttctcccaggttcaagtga

SEQ ID NO: 32661 - DNA, 201 bp, Homo sapiens
gatagaattccctttcagtaatgtccttctattgtgccacccttttaagatgagaactcttacctatgtaactgagtaagacagggagaaatattaatccytgagtggctcccagtaagaccatggccaaatacatcctgaagtagaatatctggaaaatttgagatttggcaaaagccaacaccacaatccctccaaatt

SEQ ID NO: 32662 - DNA, 201 bp, Homo sapiens
tcaacaggaagagagccatcctaaaggaagtgctttatttcagagctgtggcatctccgtggagttctgcagccacataaccagagcgttcacggtgagcrtgaaaggcagccgcgtggagcgcgcggaagaggcacttgcccacatgggcagctccgtgagtaccctgagcagggccacgccggcagagtcgcaccacaa

SEQ ID NO: 32663 - DNA, 201 bp, Homo sapiens
gtcttcaaggggaaaccctggatcagcagctgggcagggtcctaggagaagtggctcccagtatgttcctgtcatccttttctgagactgtagcatttttyttaggtaattatgctttcaatcctaccagtcctgtagtctgctgagcctggagaaagaaggagctggctacctgaacatgtccctttgtgttgcttcctt

SEQ ID NO: 32664 - DNA, 201 bp, Homo sapiens
tgggaagtttctagcaagcagagactggtaaatgagaatcgacagtacaggacccattccagctattttcttaggtgtaatacactgatactatccttatrtaatgtgttgtgtgtatgtgtaagaaaataaaatccaaaaagataacagtattaggggttttttttgttttttttttttgtttttttgtgatggagtctt

SEQ ID NO: 32665 - DNA, 201 bp, Homo sapiens
cctcggcctcccaaagtgctgggattacaggcgtgagcttccatgcccagctggaagcttacatcttaatggagggagacggttgatgaacacataacatrtgctatcgtgccagctagagattagtgctatgaggagaaaaataaggctggacagagtggggggtgcattgcttaagcgtggagatgtgcacaaagggag

SEQ ID NO: 32666 - DNA, 201 bp, Homo sapiens
aacgtagaaaaggaagttaggttttaagaaaaagtactgaaactaaagacttcctccctgtggagcaggtcagtaaccctgtctgtcctctctagtacccraataggcttcgccccctcgtcctggatcgacgattatttcgactgggtgaagccacagtcgtcttgctgtcgagtggacaatatcactgaccagttctgc

SEQ ID NO: 32667 - DNA, 201 bp, Homo sapiens
cactgtcagtattttaaaatgttttacaaaaaatctggagacctattcttctaacagtcctccctgcatgtctccgccagtggttgaccctgcctgcgttygctgcaggcctctgactccggaaggcaaacagaggcctcaggggggagacttcatgagattcctgcccatgttcctttcggataaccctaaccccaagtg

SEQ ID NO: 32668 - DNA, 201 bp, Homo sapiens
ccacttggcagtggtgacaggatgaacacgcagtgttcgggagtgagagcgagctttaatgaggcctcccctctcccctccagtgtgttttatgtcttctrcgaacagtacctgaccatcattgacgacactatcttcaacctcggtgtgtccctgggcgcgatatttctggtgaccatggtcctcctgggctgtgagctc

SEQ ID NO: 32669 - DNA, 201 bp, Homo sapiens
tctgcagtcatcatgtgtgccaccatcgccatggtcttggtcaacatgtttggagttatgtggctctggggcatcagtctgaacgctgtatccttggtcarcctggtgatggtgagtcctcatacagtctcagtttgtccctagctcctgtttcacttgggggaattggctgtcttagattccatgtaaaccctaaagatg

SEQ ID NO: 32670 - DNA, 201 bp, Homo sapiens
tggggcccaggaggaagatctatatatttttgagagtccatttatcctttgagaaaataatacccaaagcttactgagcactgttctaagttctttacatrttttaactcatttaatcccctaattatcctataaaagaagtagtattattacaatatcactttacagatgcagaacctgaagctcacagaggtgaagtgg

SEQ ID NO: 32671 - DNA, 201 bp, Homo sapiens
taagagatcagtacaacaacccttcctcaggttttgagggcaaccgtattggtgatggaagtgataggaacacagctatagatacttttttttttttagayggagtctcactctgtcacccaggctggagtgtagtggcgcaatctcggctcactgcaacctccacctcccgagttcaagcgattctcctgcctcagcctt

SEQ ID NO: 32672 - DNA, 201 bp, Homo sapiens
aggcccctggagagaccaattcaatagatttggagtggaactctgaaatttgaaatcttgtgattttaacaagcaccccccaagtagtttttaggatcaartaagtttgagagagtttagatgagcttgattgctgctgtaactctttatagaataaaccagatcctgggtcctttctctcactttaaccttgctgtggaa

SEQ ID NO: 32673 - DNA, 201 bp, Homo sapiens
aggtaggaagatcgcttgaacccaggaggtcatggctgcaatgagccatgactgagccactgcactccagcctgggtgagagagagagaaaccctgtctcaaaaaaaaaaaaagaaaagaaaagaaaagaaagaaaagaaaatagcttttctatatttctcatgaatggcctggttgtttctactcattctcaaccccaca

SEQ ID NO: 32674 - DNA, 201 bp, Homo sapiens
tggaggggagattttccagaacacctaagtaatcatgatacatttattttgttgtgggcttattgtcaaagagtgcctttaaattatataaaagttaggcmgtggtaggctaattccttatccctaggtggaacatctttaaaagataatcttagagttacagcctcacaaaaattgttgtgttgccctgattagaaagaa

SEQ ID NO: 32675 - DNA, 201 bp, Homo sapiens
tatgtatttcttgttatagctcatatcacaggtaaatatatttaaactgatgttatttaattatcgaataggaaataattcacctgccataaaattcaaarggtatataaaaatacatagtgaaaagtcttgcttcaaaccttgtccccagtgacccagtcctcttccatggaggcaaactgagtttccagtttcttgtct

SEQ ID NO: 32676 - DNA, 201 bp, Homo sapiens
tatctggttttctgagaagctataagtttaaaagcttaaagcactgtgtgagtgctggggaaccaattacccctgacgtgactgaaaaatggagaaacaasacgggcctggatatctacgaaggatatggacagactgaaacggtacctgacctcactgaaaagacatagctggattccatttagtcagatgaataaaaac

SEQ ID NO: 32677 - DNA, 201 bp, Homo sapiens
aaaataaaaatcaaaaattgaaaaattcattaactagaaatagcataacaagtatgctaatataaatgcaaatgttaatatactcatgttttgataaatayggatatatgagtaattattgttataactatattttatacatatgcatgtatttatatgttatcactacattccatgagagtatagcattcattttgagcc

SEQ ID NO: 32678 - DNA, 201 bp, Homo sapiens
aggatatggacagactgaaacggtacctgacctcactgaaaagacatagctggattccatttagtcagatgaataaaaaccaaagtgtccacagtctcctyatgattatttgagggataggagttgagtggttagaaaatgtttaaaaaaacaatgcttgcaagaacctaattgcaaaaaagctctgttaacagatagttg

SEQ ID NO: 32679 - DNA, 201 bp, Homo sapiens
ccagaagtcacacagctaatagctgctagagttgggattcaatcccaagcagtctggctccaatatctgcactcttaaccacaacacaacactggtcctckcaggcaagggaggtcaagaccttctgagcaggtcaactaggcccgaagaggcttcagtttacagtggctgcagcactttccctctctgctcccaagcctg

SEQ ID NO: 32680 - DNA, 201 bp, Homo sapiens
gttgggattcaatcccaagcagtctggctccaatatctgcactcttaaccacaacacaacactggtcctctcaggcaagggaggtcaagaccttctgagcrggtcaactaggcccgaagaggcttcagtttacagtggctgcagcactttccctctctgctcccaagcctgcctggccatttccagcctctctgtatccac

SEQ ID NO: 32681 - DNA, 201 bp, Homo sapiens
cactactaccacctgatgcctagggggaattccagttccccatcagcaagctttatatagggttaaaattgttctcagatcaaccgagcttcaaagctggrtgtagccaaaggaacttaacactaatttggacactcctcaacttatgatagggttatgtcccaaaataataagtcatcataagttgaaaacatcctaagt

SEQ ID NO: 32682 - DNA, 201 bp, Homo sapiens
aaataaaaataaacattagctgagcataatgacatgtgcttgtagccccagatacttgggaagctgaggtgtgaggactgtttgagaccagaagtttgacsctgcagtgagctatgagctatgattgcaccactgcactccagcctgggtgacaaagtgagaccttgtctcacacacacaaaattttttttaagtcttcat

SEQ ID NO: 32683 - DNA, 201 bp, Homo sapiens
ttagtgccttatgtcctggggcagcctctcttgatgtgctggactccctgttacctggggtgtagagtgctgtgtgtaggctcgggtgccagtggcctggytctatcactggatccacctggtgttggaatgctgcagccctctacgggaacgtgtggggatgtcagcaaggccccagggatgtggagatgcaggggcaat

SEQ ID NO: 32684 - DNA, 201 bp, Homo sapiens
tttctgtaccatgtattcaagctccttatctcaaatcctaggtatagggcttcaagcacagggcacagggcagagttagaaggtatccaatctcaggggaygaaataggtcctgaagtttaaggcaggccaggcacagtggctcacacctgtaatcctagcactttgggaggctgaggtgggtggatcacctgaggtcagg

SEQ ID NO: 32685 - DNA, 201 bp, Homo sapiens; identical to SEQ ID NO: 7299

SEQ ID NO: 32686 - DNA, 201 bp, Homo sapiens
ccaaactgaactgatgacatatgggtaagaatcagaatctttgagattaaaatgaaaccctgaacctattttgtttggtcctttggcttactggactcacrgtaaatacttaatatcaagacaactttcctaacaatacccttttccctattttggctgttacccaaaacccattccaaagactattctaattcttccacc

SEQ ID NO: 32687 - DNA, 201 bp, Homo sapiens
agattgtagatgtaaatggcaatgttctacctcctggacaagaaggagatattggcattcaagttctacccaaccgaccatttggcctttttactcattasgtagtaagtgacttactaaataatctcattttctatttatttctcaagtgcttggtaacaatccctgtttgccacaaaacatacctaggataggtacttg

SEQ ID NO: 32688 - DNA, 201 bp, Homo sapiens
atataattggctttatgtaaagataaaaatttccaggctaattttcttccccttgatgccaacaggtagaatttattcaagagctgccaaagactatcagwgggaagacaaaaagaaatgaactgaggaagaaagaatggaagacaatttaaagttgtttcattaattaccatatctataaaacaaacatagtatctgtca

SEQ ID NO: 32689 - DNA, 201 bp, Homo sapiens
cggggaggttacagtgagccaagatcgtgccactgtgctccagcctggctaacagaacaagactccgcctcaaaaaaataaaaataaaaataaaaaagtttaaggtaaaaataggagatgtgcatgttacagtggagggtggatctccccccaggactgattcccctaactgatctttgatgccagaagataccctgttaa

SEQ ID NO: 32690 - DNA, 201 bp, Homo sapiens
ggggaggttacagtgagccaagatcgtgccactgtgctccagcctggctaacagaacaagactccgcctcaaaaaaataaaaataaaaataaaaaagtttaaggtaaaaataggagatgtgcatgttacagtggagggtggatctccccccaggactgattcccctaactgatctttgatgccagaagataccctgttaag

SEQ ID NO: 32691 - DNA, 201 bp, Homo sapiens
gggaggttacagtgagccaagatcgtgccactgtgctccagcctggctaacagaacaagactccgcctcaaaaaaataaaaataaaaataaaaaagtttaaggtaaaaataggagatgtgcatgttacagtggagggtggatctccccccaggactgattcccctaactgatctttgatgccagaagataccctgttaagt

SEQ ID NO: 32692 - DNA, 201 bp, Homo sapiens
ggaggttacagtgagccaagatcgtgccactgtgctccagcctggctaacagaacaagactccgcctcaaaaaaataaaaataaaaataaaaaagtttaaggtaaaaataggagatgtgcatgttacagtggagggtggatctccccccaggactgattcccctaactgatctttgatgccagaagataccctgttaagtc

SEQ ID NO: 32693 - DNA, 201 bp, Homo sapiens
aaacagcttcaactctacgaggcaatttctatatcactggggacagaggatatatggataaagatgggtatttctggtttgttgcaagagcagatgatgtyatattatcctctgggtaactttcttttccatatgtgcatatgtctgtgttaactgatcatcagtgttctagagtgaacctgccactcacctgtatgtatt

SEQ ID NO: 32694 - DNA, 201 bp, Homo sapiens
ttatcttactttttcttcttcttaactaggtgctaatctgtggaaattttaagggaatgaaaattaaacctggctcaatgggaaaaccttctcctgctttygatgttaaggtttgcacatccccttccaggagaatgtttaacaacccaatctgtacactacctacctaccgcttacccccatataaactttctttgttat

SEQ ID NO: 32695 - DNA, 201 bp, Homo sapiens
ttggctatcccattcccttgctgacagcaacactggtatcaggttaaaagaaaaaatgcttaatgttaatggatgcaattataaaagtgaatttcactgaygttgaagcctagcatggggtgtttccatgggttacttggaactcttgccaggtactggttatgccttagaattgggctggcagcaaagtccttctctaga

SEQ ID NO: 32696 - DNA, 201 bp, Homo sapiens
gccatattctttaccagtggaacaagtggatatccgaaaatgactgcacacacccacagcagttttggtttaggattatctgtaaatggaaggtatacttycacaaaagtgcagcttgaagtgtcaaaactgcaaagatgatgacttatgtactggtcttttatatttattttcctatgtacatcagggctactctttgtt

SEQ ID NO: 32697 - DNA, 201 bp, Homo sapiens
ctgtttgccacaaaacatacctaggataggtacttgaccctttcttgagagattggttgtcctgaatagtaatccaaaagacaagaaattgaagaaatacycaaattcttgctgaagaaaagcatgctggtcccctgaggccagatcactgttccaggtccacgaaggcaagaggaagggaccctagaaagaggacagcct

SEQ ID NO: 32698 - DNA, 201 bp, Homo sapiens
gagaggaattaaaaagcgactaaaacattttatattgaagttcataagaaataatccttaatcttcacttctctccatttttcctcctaaatctaacttayctggttttctgagaagctataagtttaaaagcttaaagcactgtgtgagtgctggggaaccaattacccctgacgtgactgaaaaatggagaaacaagac

SEQ ID NO: 32699 - DNA, 201 bp, Homo sapiens
tacaatcttcaaaagcaaactgcattatcaccaatgatgttttagccccagcagtagacgctgttgcatccaaatgtgaaaatctgcactccaagctgatygtatcagagaactccagagaggggtgggggaacctcaaggagttgatgaagtgagtagccacacttgttgtaaaacagcttcccaaaaggaaaggcaaca

SEQ ID NO: 32700 - DNA, 201 bp, Homo sapiens
gactggtttttctttcctcaggctggaaagaaaccttcaaatccagccttctggtggatcaacagaaatggagaagagatgcgatggagttttgaggaacygggatctctgtccagaaaatttgccaatatactttcagaagcctgttccctacaaagaggagatcgggtaattctgattctgcccagggtcccagagtgg

SEQ ID NO: 32701 - DNA, 201 bp, Homo sapiens
tggattcaccataacaacaaaatgctatttgttttgcaggataatccttcaaaaacagcttcaactctacgaggcaatttctatatcactggggacagagsatatatggataaagatgggtatttctggtttgttgcaagagcagatgatgtcatattatcctctgggtaactttcttttccatatgtgcatatgtctgtg

SEQ ID NO: 32702 - DNA, 201 bp, Homo sapiens
gatgataatagtacccacttcacagggtttctctgaggatttaataagaaagtgtctataaaacactgagcactgtgtttggaacacagagtgtacgcagmaaatggtactatcatgatgattatcaatactaataacaaaacttagccactttggggtatggctaccttcaggacagaaacaaatatatgtcctttttgc

SEQ ID NO: 32703 - DNA, 201 bp, Homo sapiens
ttctaggttgacttaaaaaaaaaaaaggagaagagtgaaaagtaattccaagagtcagaaatggtagaaaaggaggcacagataaatctttggggaaaatrtaaaggatgcaagaattctcacttattggaaagaaaaatgatcaggctaaatgggaaatgatttgggccaaaagaaatgacatggcttccaacgtctaga

SEQ ID NO: 32704 - DNA, 201 bp, Homo sapiens
tgacttaaaaaaaaaaaaggagaagagtgaaaagtaattccaagagtcagaaatggtagaaaaggaggcacagataaatctttggggaaaatgtaaaggakgcaagaattctcacttattggaaagaaaaatgatcaggctaaatgggaaatgatttgggccaaaagaaatgacatggcttccaacgtctagaaataagga

SEQ ID NO: 32705 - DNA, 201 bp, Homo sapiens
ttctttatccattcatctcttgatagacatttaggttgattccatatcttggctattatgtacagtgctgcaataaacatggcagtgcagatatctcttcratagactgatttcctttcctttgaaaaaatacccagtggtgagactgctaaatcatatggtagttttatttttagttttttgagaggcccttatattgtt

SEQ ID NO: 32706 - DNA, 201 bp, Homo sapiens
gtgtttcagagttcccttttctccacatcctctcaagcatttgttatcttttgtctttttgacaatagccattctaactggggtaagatcatatctcatcrtggttttgatttgaattatcctgatgattaatgatgttgagcattttttcatatacttgctgccaattagtatgtcttttgagaaatgtctattcagatt

SEQ ID NO: 32707 - DNA, 201 bp, Homo sapiens
tctttgaatgcaaatatgatgaggctgagaggaaaacagtactttgcctgcatccccagtcatttttaactcttttccacgggccgttattatggggcttyttgttccttagctaagggcatctgcagtaacattctggcatctggggatgtgttccaaccaggtgaatatcagattcctacaacttcaaagcccaacctt

SEQ ID NO: 32708 - DNA, 201 bp, Homo sapiens
gaggttacagtgagccaagatcgtgccactgtgctccagcctggctaacagaacaagactccgcctcaaaaaaataaaaataaaaataaaaaagtttaaggtaaaaataggagatgtgcatgttacagtggagggtggatctccccccaggactgattcccctaactgatctttgatgccagaagataccctgttaagtcc

SEQ ID NO: 32709 - DNA, 201 bp, Homo sapiens
tttcccaggttctggctagatttgacaccctcagatgtgatgtggaatacctcagatacgggctgggcaaagtctgcatggagtagtgttttttctccgtrgatccagggagcatgtgtattcacacaccatttaccccgttttgagccgacttctatcttgcaagtaagccaaagcacaaagaggtcaatatttagaaat

SEQ ID NO: 32710 - DNA, 201 bp, Homo sapiens
acaaaacttagccactttggggtatggctaccttcaggacagaaacaaatatatgtcctttttgcttgtcttttagatgaactggtctctgtgcaaatccygagtgctaaagcttccaacaagactgatgctagctcgtgtcaccaggaagatgctacgtcatgccaagtgttttcagcgcctagcaatttttggttctgt

SEQ ID NO: 32711 - DNA, 201 bp, Homo sapiens
gggagggatgtttagggagctgtggggaggctaaagcccccttggctgtagggacaaagagcttgcatttcagatgagaccttaaatactttcagaagccyatctgaccaggggtggtactgtctttcttagaagagttttccttaccaatgtttctgtggctcagtataaaaatctggagtcaccctgggaaagttatct

SEQ ID NO: 32712 - DNA, 201 bp, Homo sapiens
gtctataagcttcatgggagcaagaccagccgtgtcttgttcacagctatattttcagcatttagtacaggtctggcatataccaagtgttcaataaatayacgggtaatgaataaatgcgttgtccaatttaaatatgtgtgtctgtttgtgtatacttccttgtctgtaaaatgaaaatactaataaataactgcaaaa

SEQ ID NO: 32713 - DNA, 201 bp, Homo sapiens
gatggagaggcctggtccttcccaaagtgaaaggatgagccagtgtcaagagtccaggaatgccagacatgtgttccccaatcttcttgcctactgtgtcrcctgggaagagtaaaacctattgtgaagtgaatgctttccatccctgtcttaagggtctgggacttaagggtggtggggcccaggaggaagatctatata

SEQ ID NO: 32714 - DNA, 201 bp, Homo sapiens
cagcctccagaacaaagaattatttgacccgaaatgtcaatagttccatggttagttgagagaccctgtattacataaatgtagaattctaggttgacttaaaaaaaaaaaaggagaagagtgaaaagtaattccaagagtcagaaatggtagaaaaggaggcacagataaatctttggggaaaatgtaaaggatgcaaga

SEQ ID NO: 32715 - DNA, 201 bp, Homo sapiens
ccagaacaaagaattatttgacccgaaatgtcaatagttccatggttagttgagagaccctgtattacataaatgtagaattctaggttgacttaaaaaaraaaaaggagaagagtgaaaagtaattccaagagtcagaaatggtagaaaaggaggcacagataaatctttggggaaaatgtaaaggatgcaagaattctc

SEQ ID NO: 32716 - DNA, 201 bp, Homo sapiens
tgcagtggcacgatctcagctcactgcaacctccgcctcccgggttcaagcgattctcctgcctcagcctcccaagtagctgggactacaaggtgcacgcyatcatgcccagctaatgtttgtattttttatagagacggggtttccccatgttggccaggatggtctcgatttcttgacttcgtgatccgcccgccttgg

SEQ ID NO: 32717 - DNA, 201 bp, Homo sapiens
ggacactcttaatcattatacttcatcttacagtgtaatatataaccagcaggaatagaaccacagaaaagatgaatgcctccacacttccttttggaaakaaatcataaagcaatcatgtacattttaagaggcactcagctgatgtggtgaagtgtacagttctggagtcaggctacagggttcaatccctgcactgtc

SEQ ID NO: 32718 - DNA, 201 bp, Homo sapiens
gtcaacccactgggacctctgaaggacctcctcaaagctgttcccagctaaagcaagaggtcctggcctttatatacccacattgatcagtaattggatgrggttgtccctaggagtcaagacctttaacaaagccactgtcttcagtcaaggcaatctctagagagtgctcccagcacctgtcactgaaggatcacagtc

SEQ ID NO: 32719 - DNA, 201 bp, Homo sapiens
taggaacacagctatagatacttttttttttttagacggagtctcactctgtcacccaggctggagtgtagtggcgcaatctcggctcactgcaacctccrcctcccgagttcaagcgattctcctgcctcagccttccaagtagttgggattacaggcacatgccactatgcccacctaatctttttgtatttttagcag

SEQ ID NO: 32720 - DNA, 201 bp, Homo sapiens
ggcacatgccactatgcccacctaatctttttgtatttttagcagatatggggtttcgtcatgttagccaggatggtctcaatctcctgacttcatgatcygcccgtctcagcctcccaaagtgctgggattacaggcgtgagccactgcgcccggcctatagatagtatttttaattaattaagataattatgaaatcat

SEQ ID NO: 32721 - DNA, 201 bp, Homo sapiens
aaagggacagagaataaatacttaaggcttgcaggccgtatagtcagtctcatcacaactactcaactctgccactgtagtgtgaaagcaaccacaggtamtacctcaatgaatgggcaataacattttatttacagaaacaagaggcaagtcagattttgccagtaggctgtagtgtgttggcccatcagtacccatggc

SEQ ID NO: 32722 - DNA, 201 bp, Homo sapiens
tcttgctcctccggattgtcagactgctcctccctcttctttagactgccacgaggaaaaagcagatgtgagaactcaaggttcagggctgctcttctaasaaacaagtctgccataatctccatctgtgttggaatctgttaactagtgagtacctcatctcccctcctgtgtaagatttcctgaactggcacatctgtt

SEQ ID NO: 32723 - DNA, 201 bp, Homo sapiens
cataggttatatgcaaataccatacaattttatataagggacttaagcattcctggaaccaatcctgcagacactgagggatgattctacaagaaaaggtmagaatgtatttacattaacataaacaatgtttaaattgtgctgcgtcaaccaaagacatttaagcacttatttaagttgtagtaagaccaagagtttgct

SEQ ID NO: 32724 - DNA, 201 bp, Homo sapiens
gacactctccaagtaccccatcacagtcttctgttcagcaccaactgtataccgaatgcttgtacagaatgatataaccaggtaagaaatgttagtaaatwggcatctagtggggagaggggagaagaggaagctataaaataaaagatctttctgcctgaaacatagctccaagccagtagacacaggatttagcaatct

SEQ ID NO: 32725 - DNA, 201 bp, Homo sapiens
ccaagcttctgttcctggcttagtctttcttgtgaccaacccctatacgggagccccattgagagtcgcctcatgagaacaaaagacaattctattacccwggaaattccatggaatttagaagctctgtatcagaaactagagtcaaaggcaaaatattagaacaaaagatactcctagcacacccatcacttgggaaat

SEQ ID NO: 32726 - DNA, 201 bp, Homo sapiens
tttcatgttaagccaaaagggtcatagactctgaaatcccttgaaaggcaaaagcagataagtgaaagcaagataaatagatatcttcctggtaaactgamtaactcactctgagaaatacagaatgtatagatggtatctacactactctaacataatgaagaataacatttcttctaaacactgtttcttttctgcccc

SEQ ID NO: 32727 - DNA, 201 bp, Homo sapiens
aacaggttagtaatgtttgctttccgatcatatttattactaagctggaggggagattttccagaacacctaagtaatcatgatacatttattttgttgtrggcttattgtcaaagagtgcctttaaattatataaaagttaggccgtggtaggctaattccttatccctaggtggaacatctttaaaagataatcttaga

SEQ ID NO: 32728 - DNA, 201 bp, Homo sapiens
tttttgttgccatgataggggcagaggcagttgctactggcatctaacaggtaaaagccagggattctgctaaatatcccataatgcacagggcagcctcyagaacaaagaattatttgacccgaaatgtcaatagttccatggttagttgagagaccctgtattacataaatgtagaattctaggttgacttaaaaaaaa

SEQ ID NO: 32729 - DNA, 201 bp, Homo sapiens
ggtacccccacctgctccccattaatttgagcccagtggttttctagagcagctatctttgaatgcaaatatgatgaggctgagaggaaaacagtactttkcctgcatccccagtcatttttaactcttttccacgggccgttattatggggcttcttgttccttagctaagggcatctgcagtaacattctggcatctgg

SEQ ID NO: 32730 - DNA, 201 bp, Homo sapiens
agaggcagttgctactggcatctaacaggtaaaagccagggattctgctaaatatcccataatgcacagggcagcctccagaacaaagaattatttgaccygaaatgtcaatagttccatggttagttgagagaccctgtattacataaatgtagaattctaggttgacttaaaaaaaaaaaaggagaagagtgaaaagta

SEQ ID NO: 32731 - DNA, 201 bp, Homo sapiens
gtacccccacctgctccccattaatttgagcccagtggttttctagagcagctatctttgaatgcaaatatgatgaggctgagaggaaaacagtactttgyctgcatccccagtcatttttaactcttttccacgggccgttattatggggcttcttgttccttagctaagggcatctgcagtaacattctggcatctggg

SEQ ID NO: 32732 - DNA, 201 bp, Homo sapiens
atccttatccctaaaatatttgcctaggggagtctcagagcctactctggctcaggatctgcccaattttattaaatttattataaaatttaaaaaatttwaaaaattaaaattaaaataaaaaataaaacatttgccttgatcaatgacttgaagcatttacactatattttcttcggttgttttatagttttgagtctt

SEQ ID NO: 32733 - DNA, 201 bp, Homo sapiens
ttgcctaggggagtctcagagcctactctggctcaggatctgcccaattttattaaatttattataaaatttaaaaaattttaaaaattaaaattaaaataaaaaataaaacatttgccttgatcaatgacttgaagcatttacactatattttcttcggttgttttatagttttgagtcttacatttaagtctataatcc

SEQ ID NO: 32734 - DNA, 201 bp, Homo sapiens
cggaccatgtactgaagaggatatcctttcctcagtgtatgttcttggcacctttgttgaaaatctgttgaatgtaaatgtgtgggtttagttctgggttmtctattctgtttcattggtctatgcatctgtttttatgccaataccatgctgttttggttactatagctctgtagtatgatttgaagttaggaagtgtgg

SEQ ID NO: 32735 - DNA, 201 bp, Homo sapiens
gtttttatgccaataccatgctgttttggttactatagctctgtagtatgatttgaagttaggaagtgtggtgtctctactaaaaatacaaaaattagccrggcatggtggtgcatgcctgtaatcccagctactagggaggctaagggaggagaatcactttaatctgggaggtggaggttgcagtgaactgagatcaca

SEQ ID NO: 32736 - DNA, 201 bp, Homo sapiens
agcatagctattcctgcacacttttggtttctatttgtttgaaatattattttccatctcttcattttctgtgtctttttttttttttttttttttgagayagcgtctcactctgtcaccaggctggagtgcagtggcacgatctcagctcactgcaacctccgcctcccgggttcaagcgattctcctgcctcagcctcc

SEQ ID NO: 32737 - DNA, 201 bp, Homo sapiens
aaagagttctactcatatcaaaatgaggcagtggccatagaaaatatcaagagaggcctggctagcctatttcagacacagttaagctctggaaccaccartgaggtacttaccaatattaataaggattcagcatctcaataaaatttgtaaggatttctacttatacaatttcagtagaagagttactactaaggtaat

SEQ ID NO: 32738 - DNA, 201 bp, Homo sapiens
aataatgattgaacactttataatatatatttgaaaatctgttttaaaaattctatgtgtgcattacttatggcttgattctagtcaattgaaatggtctwaataaatttggaattgagaaacaattgtgatcagttgattattaggcattacatatttgtgtttatgaaaattacagatagtgtgttgacatacataaaa

SEQ ID NO: 32739 - DNA, 201 bp, Homo sapiens
atttttgcttcatttgtgttctgttcccctctccccaccaggtcaaagagttctactcatatcaaaatgaggcagtggccatagaaaatatcaagagaggyctggctagcctatttcagacacagttaagctctggaaccaccaatgaggtacttaccaatattaataaggattcagcatctcaataaaatttgtaaggat

SEQ ID NO: 32740 - DNA, 201 bp, Homo sapiens
gatagatatcaaagataaaattactaatctttgtttgctgggattctttttattatttttattgtttggccacttaatggaatttagtctcctcttattcytaaaataaatataaaggaaggtgtggagaaaggcatcttcttcctaaggaaaaaacaatatgaatgatgcctacctatttcaagaggaaactggcccctc

SEQ ID NO: 32741 - DNA, 201 bp, Homo sapiens
gtccaagaacttttttatttgctattattttaaaccttagttattttttgtttcaagtacagttacaggtagagaacatgctgacatgttcaaacagaatkttcatcatttctcttccctgggccatccttgttttcatgaggctcccagcctatatcagtgctctctcccaatgctgtgcccatcatgcaagagccttca

SEQ ID NO: 32742 - DNA, 201 bp, Homo sapiens
agatatcactgtgcaccactgtaccatggaggggcttgttacaaatatagattccctatattcatcccagagattctgattcagtagatcggggaggaccygaacgtctttttttttgagatggagtctcactctgtggcccaggctggagtgcaatggcgcaatctcggctcactgcaacctctgcctcccaggttcaag

SEQ ID NO: 32743 - DNA, 201 bp, Homo sapiens
gcaatctcggctcactgcaacctctgcctcccaggttcaagcgattctcctgcctcagcctcccaagtagctgggattacaggcgtgtgccaccatgcccrgcttgtatttttagtagagacagggtttcaccatgttggccaggctggtcttgaactcctgacctcagatgatccacccgccttggcctcccaaagtgct

SEQ ID NO: 32744 - DNA, 201 bp, Homo sapiens
tttctggttttggctttgtgttgattaaattaaccacgtggctgctgagtcagacctttattttgtattgtttccgggcattgatttgctctctaaatcascatggctcttgtacacacactgaactgccacaagaaatgtgacaccttgaaagtccttctgaaatttgttgtatatttctttacttgtttgttctccagt

SEQ ID NO: 32745 - DNA, 201 bp, Homo sapiens
tatttttggaaaataagattttctagctgtcttggttaataagtaacacgtggttgtattgacgatatcattttcagaaagctgggctaaattcaaaagarctgacattgcatatcttattcatcatccaggcaatttttcttccctgtatactgttgaaataatattttgaaaatgcaaacttaaattttcaaatctttt

SEQ ID NO: 32746 - DNA, 201 bp, Homo sapiens
gaagagagagtaaacctagtctgtgttcttcctgaggaaggaaccaagtactcccctgaataacagtgtttggtcagttaaaatggtttagatttatgtgytgagaagggaggccaaattagttggtctctggggacttttccaattgtaatatatggtgattcccttatttgcttctcaagaacctaaagataatagatt

SEQ ID NO: 32747 - DNA, 201 bp, Homo sapiens
cttattcatcatccaggcaatttttcttccctgtatactgttgaaataatattttgaaaatgcaaacttaaattttcaaatcttttaatataattgttgcyccagaaagacttcataatgagctttcagttacctctggagatatcacagtttgaaagacatggctatatacaacttgaataaattactatcttgtttgcc

SEQ ID NO: 32748 - DNA, 201 bp, Homo sapiens
aaaattaactgggcttagtggcgtgagtgtgtggtcccaactactcagaaggctgaggtgggaggatcacttgagcctggagatgaaggttgcagtgagcygagatcgcatgactgcactccagcctgggtgacagagtgagaccctgtctcaaaaaaaaaaaaaaaaaaaaagtaaagaaagaagaagaaactttctctg

SEQ ID NO: 32749 - DNA, 201 bp, Homo sapiens
tttctttgaaggttcgacagattatgtgacttcactacccaaaattctatggcagcgtcccatctcactcaaactccccaaatcttcctgccacccatagrtacctcctttaccttgtctccttcactgtgtcttttacttatttatttccagcctctttggtctccctgctcttcctccattacacctgcaggagccctc

SEQ ID NO: 32750 - DNA, 201 bp, Homo sapiens
taagtcacatctagaattcagggaggatagagggcttaatgaagttagggggaagcatatggtgtcaagaatgtggacaacggctgaaccttgaaagttcwgtcacataatagttatttgtccacaggtgacatactttactggcctcagtgttctgattattgctgcaaggactgaaaaaggataccaggatctttgcct

SEQ ID NO: 32751 - DNA, 201 bp, Homo sapiens
ccaatattaataaggattcagcatctcaataaaatttgtaaggatttctacttatacaatttcagtagaagagttactactaaggtaatgctcagaaaagrtgacttgtgtagtgaagtcgcatttgcctatgaaacaattgccatttatcccaatgttttgttaattaattacaaggtagagaggattagaaatatttat

SEQ ID NO: 32752 - DNA, 201 bp, Homo sapiens
ccagctggcaccaccctggctcttggaaaggcatgaggaaaatttggcttcctcttttttccactgaggattttttttttccaaatttgacttgggaaacwgtcattacaatgaatgtgcagctttttttttcctcatatgttgcagcaaaattgtccgtcgagttctgaaggaaatggtcgctcacaattatgaccgttt

SEQ ID NO: 32753 - DNA, 201 bp, Homo sapiens
agttatgagtggggtatgagcctgcagtgtatgttttgcagctctcggagctctggcggtccaccaggaaatacctgcagcctgacaacctttccaaggcygaggctgtcagaaacttcctggccttcattcagcacctcaggactgcgaagaaagaagagatccttcaaatactaaagatggaaaataaggaagtattgt

SEQ ID NO: 32754 - DNA, 201 bp, Homo sapiens
aaattatatagtttctgtgtcccctcagtctcttcatctataaaatgagactaataatagtgcctacctcattagatttttgtgaggattaaataagttamtacatgtaacatgcagatgatggatttttgaccaccatttcctctgggcaagtacgtgctgtcatatgtagaggagacagtgaacagattgttactgtgt

SEQ ID NO: 32755 - DNA, 201 bp, Homo sapiens
taagttccccaacctttgtgtggggttgtctgtcagaaacatttctggattgttggttttttgaagtaagaaagaccccttttaaaccaactgccccaccwccaaaacaattattttcttgtactacattttcatcgaaaagttatgccacagtgcagtaatttaatggtcacttgaccagaaatacaatagcagattttc

SEQ ID NO: 32756 - DNA, 201 bp, Homo sapiens
gttcaaaggttctattggtagcagtgacatcagagaaactgttatgatcatcactgggacacttgtcagaaagttgtgtcagaatgaaggctgcaaactcwaagtaagtgcaaatccaatctcatgtattacatcattctacaccattgtccatttgatactcaccatgctgcctactattggcactcctaattctcttta

SEQ ID NO: 32757 - DNA, 201 bp, Homo sapiens
aaaattaaaataaaatggggaggggtctttttgagaaagtcttaatcattttttcatttgttcaaattaaaaaaaaaatcacttcttgagaaaactcaaaycaatagaaactctgtgaatggtagagatttttaagtattccttcccctaaacattgatatccatgattatgcctttttttatagacctcagctggtggat

SEQ ID NO: 32758 - DNA, 201 bp, Homo sapiens
gtcaagaacatcctgctgtctattggggagcttccccaagaaatgaataaatacatgctcgccattgttcaagacatcctacgttttgaaatgcctgcaakgtataatacattgcacatgtctctctgtgtattcaagcttatttgtgtgttcatggggtaccgatgtagctaataataatgatgtggtcattatgcaggg

SEQ ID NO: 32759 - DNA, 201 bp, Homo sapiens
actaaaagccaatatagaggtccagggtggtctagctattgatatttcaggtgcaatggagtttagcttgtggtatcgtgagtctaaaacccgagtgaaawataggtaagtgtttatgcattatacatttatgaattacatataagactatatacagagaacttccgaaatatgttttgggaattaatcttctgacttttc

SEQ ID NO: 32760 - DNA, 201 bp, Homo sapiens
cagagaggagagaagagcatcttcaaaggaaaaagcccatctaaaataatgggaaaggaaaacttggaagctctgcaaagacctacgctccttcatctaayccatggaaaggtaaaggggcgtttagattccacaactttttctccaacttcatatttttcttcccttcagtagatattattttgaggtaatcacattgta

SEQ ID NO: 32761 - DNA, 201 bp, Homo sapiens
ttgaaaatgcaaacttaaattttcaaatcttttaatataattgttgctccagaaagacttcataatgagctttcagttacctctggagatatcacagtttkaaagacatggctatatacaacttgaataaattactatcttgtttgccaaaagaatggcaattagtatcttgttcactcaaaagaatgattataatatagc

SEQ ID NO: 32762 - DNA, 201 bp, Homo sapiens
agtatcttgttcactcaaaagaatgattataatatagcatttccctttggtattatgcaggcagaaattagagctgaagacaaccgaagcaggcccaagaytgatgtctggaaagcaggctgcagccataatcaaagcagttgattcaaagtacacggccattcccattgtggggcaggtcttccagagccagtgtaaagg

SEQ ID NO: 32763 - DNA, 201 bp, Homo sapiens
aactcaagggcagcctttaataagtcacatctagaattcagggaggatagagggcttaatgaagttagggggaagcatatggtgtcaagaatgtggacaamggctgaaccttgaaagttctgtcacataatagttatttgtccacaggtgacatactttactggcctcagtgttctgattattgctgcaaggactgaaaaa

SEQ ID NO: 32764 - DNA, 201 bp, Homo sapiens
aaacacatgatcttgaaaatcccttttcttaaagcattttgtaagactagtgttaacatggaaaacactttgagaaacatcactataattaagaaaccatrgactccagagtcagaaaaacctaggtttcaatcccagcaatgccatttaccatttaccagctatatgaccttgaacaaatgactaggtatatctgcgtct

SEQ ID NO: 32765 - DNA, 201 bp, Homo sapiens
agataagacaacatgtatttcctttatgccctatgtggaatttgataggtgtcataaaaagaaggcctcctgaccgaaatatttttcctgaccagaaagcyagtatttgaacccgctatagagtccccaattacaatgcagaagacatagagataagagggaatcccagtcttcatccccttcaaggtttttcctgactct

SEQ ID NO: 32766 - DNA, 201 bp, Homo sapiens
tgaatgtaagagatgtaccactgagggcattgttgatacaaggggtgattgtgcgtgtgtagggttaaaaggtgtgtgggaactctctgtactttccactyaattttgctgtgaacctaaactgctctttaaaaagtctattaattaaaaaaaagagagatgggaagattctgaggtacttcattgtaaggaaacattact

SEQ ID NO: 32767 - DNA, 201 bp, Homo sapiens
agaatatataaggagattgaaataaaaatttacagatgattggattgacttgtaaagtttactttattgttttaatacattaatggataatagcctacgtktgaattttgcctccgttaccttcttgctatgtgctcttgggcagttacttaatagccttaagccacaatttcatactagtaaaatgaggcacctggaaca

SEQ ID NO: 32768 - DNA, 201 bp, Homo sapiens
aattctaaatgcacttgaagggcaaatgaaagagattctgacttttttggctaatattactttctgttttggttttatctaacaacagttatcaaaaaatrttactatacatactctgaagagcactatcctacaaaaggaattaagtcaacaatataaatgggacatgccccaatgcccagtgttgccagatctctgcaa

SEQ ID NO: 32769 - DNA, 201 bp, Homo sapiens
tagggaatgcagaaaaacatttaaagaaatattgtgcaatctccccagtttggcacaattttcctttaagtgtatgcactattaaacaataaaaccatgamgaatcaaagaattttgccatgcctgaaatgtgtctactagtcaacttaagccacctcaaagctggacacccttgccttgctgtcattttgataccaaact

SEQ ID NO: 32770 - DNA, 201 bp, Homo sapiens
acaatgcctgaggatttgaatcggggtgtaaaaccatgaggagtaatctagatctgggtcagcaaacttgttctgtaaagggtagaaagtaaatattttaygctttgcaggccacatggtttctgttgcagccactcaattctgttactgtagagtgaagacagccatcagcaatacattaacaaatgagtatggctgtgt

SEQ ID NO: 32771 - DNA, 201 bp, Homo sapiens
tttttcaatgggtgtctgaacaaaattgtttctgtcaatacaaatgtagaaaggacaaagagcagtgcgtcttgtatcccttaatcctcaagtcacacatkaaaaaaacagttctcaaattatatcagaattttacattgcacaattccagttttaatgaaagaatcgtctaaaggcagcataagtactgaaaaagtagtc

SEQ ID NO: 32772 - DNA, 201 bp, Homo sapiens
agagtccacttctcagtgactcctagctgggcactggatgcagttgaggattgctggtcaatatgattcttcttgctgtgctttttctctgcttcatttcstcatattcagcttctgttaaaggtaagtttgtgttgccttttgctaaactttaatttccatctttggagttggaggcagatacgtgcgtgtgtgtgtgtt

SEQ ID NO: 32773 - DNA, 201 bp, Homo sapiens; identical to SEQ ID NO: 7325

SEQ ID NO: 32774 - DNA, 201 bp, Homo sapiens
atggagcaagtgagtgagaaaagaagccaaatctctctgcagccatgtatttctagttgaacgcatttagcttctccatttctttgtttgcttttatgagrccctgtgaaggagatcctgggtgtacttgctgccttcgtcttatggctctagcatttcagggacccggaaagaggagacagtggggtagagaacagacta

SEQ ID NO: 32775 - DNA, 201 bp, Homo sapiens
gactttctatatctagtagggtaatacatttccttccaacctttagtggggtgaagttcatttgtcttctaatctaagaaaatacgttaactcctgacaayctctgacactcaacagaaacacaactgtactttggaattaatcatccatctttatttcatagtctccttatttatcaatgcaaatggaagtatagcaaat

SEQ ID NO: 32776 - DNA, 201 bp, Homo sapiens
ctgaggtgggaggatcacttgagcctggagatgaaggttgcagtgagccgagatcgcatgactgcactccagcctgggtgacagagtgagaccctgtctcaaaaaaaaaaaaaaaaaaaaagtaaagaaagaagaagaaactttctctgcctttctctgcttgttaactggtgtagtcccagagccttaaaaagtacttac

SEQ ID NO: 32777 - DNA, 201 bp, Homo sapiens
gtgtagatcattgtaacatttttaatccaacaaagaaaattttccttttattgcatgaatcagttatgatatacattcagagaaatgacttaccacccagmatttccttatctgtaatctcttgtcagaagagcaaaccattggcttcatgctctgtgtgtaactatagggagatgctctttccttcagtattactggtgt

SEQ ID NO: 32778 - DNA, 201 bp, Homo sapiens
aacttcaagtacattcagtaacttggctggagaggtatagggtgacttaactgtgtgtgtaattctgttattgttgctgttgttgtacaggcaatttgagwaaaagtacgaaaggctgtccacaggcagaggttatgtctctcagaaaagaaaagaaagcgtattagcaggatgtgaattcccgctccatcaagagaactc

SEQ ID NO: 32779 - DNA, 201 bp, Homo sapiens
tgctgatttgctccaacctcatacagtttcacacataaggacaatcatctatgtttcatgaaagttctatctactttaacattattttgaagtgattggtkgtggtatgaattaacagtttaaatttaaatcctaaaattcagtgtgaattttttataatagcataaaaattcaaagatgtccatacaagaaaaattaaaa

SEQ ID NO: 32780 - DNA, 201 bp, Homo sapiens
aattaaaacaaaacagtagaaacccagggaaagatgaattttctttaaatgagtagaagaataattgataaggccaaaaaaagtcagtttctgggataccaaaaaaaaatctaatgactagttcatttgattctggagatagttatcatattctaatccagaaacaatttatccaggaaagaaaggcctatgatttaccat

SEQ ID NO: 32781 - DNA, 201 bp, Homo sapiens
attgttgctgttgttgtacaggcaatttgagaaaaagtacgaaaggctgtccacaggcagaggttatgtctctcagaaaagaaaagaaagcgtattagcakgatgtgaattcccgctccatcaagagaactcagagatgtgcaaagtggtgtttgcccctcagccggatagtacttccagcggatggttttgaaactgacc

SEQ ID NO: 32782 - DNA, 201 bp, Homo sapiens
cctaggagaacaccctttgtaaatgtggatgttcacagttatgagtggggtatgagcctgcagtgtatgttttgcagctctcggagctctggcggtccacmaggaaatacctgcagcctgacaacctttccaaggctgaggctgtcagaaacttcctggccttcattcagcacctcaggactgcgaagaaagaagagatcc

SEQ ID NO: 32783 - DNA, 201 bp, Homo sapiens
ctatagcctttcagaacttactaggataaaagctacagtcctgtgacagtctgaatggcagctagacaagtgcacaaccagtactatgccacatgtttctkttttatgtttgtcttttgcttatgttttgacctcccggcatcctaattccttattttcactgaatttgtacttgaaaaaatgtaaacctacagaaaagtt

SEQ ID NO: 32784 - DNA, 201 bp, Homo sapiens
atttttctggaaatctttatagtggaatgaagtatttatttattgatgaaaggcattattaaaaggtaaatttctcatcaaattataagggattacaaacrtaatgtaacaaagcaagtcatcaaagcatgattggatgaattcaggaaaggagacaaattatgagactgaaatgatccaactgagattagtaatattgat

SEQ ID NO: 32785 - DNA, 201 bp, Homo sapiens
tactgtccctatgaaaaatactattgagttcatgttgaacttgactattaactcagtgtcatttcaaatgtcaaacagcagggtattaggcttagttaaabttgccttcgttttctagttggatgtaggcaattcctggaacttgtatacagttggcgtctctgtaaccgctggttcctcatcaaattcaaccaacctcag

SEQ ID NO: 32786 - DNA, 201 bp, Homo sapiens
tgatgaaaggcattattaaaaggtaaatttctcatcaaattataagggattacaaacataatgtaacaaagcaagtcatcaaagcatgattggatgaattyaggaaaggagacaaattatgagactgaaatgatccaactgagattagtaatattgatttgttatgagattatcgatatctggctaaagtacaaggttaaa

SEQ ID NO: 32787 - DNA, 201 bp, Homo sapiens
cagtggagaatggatgatcctgagcaactctaacatgctccaaagaaacaagaaagcagcagcataggacaaacagtaactcctttgtagataaacaagayagaaaatgaagaggggtagagtgatagtccacatttggaaataagatattggagccagaaaaataactttaaacctcatttgcagtcctctagttctgac

SEQ ID NO: 32788 - DNA, 201 bp, Homo sapiens
agacaaattatgagactgaaatgatccaactgagattagtaatattgatttgttatgagattatcgatatctggctaaagtacaaggttaaagattttaaragggtatgacaagtctaaagtagagtttttttaaagcctttagaaattattttaaaactatgacatggaaaagccttttatatattaaaataatgattga

SEQ ID NO: 32789 - DNA, 201 bp, Homo sapiens
ctatttcagacacagttaagctctggaaccaccaatgaggtacttaccaatattaataaggattcagcatctcaataaaatttgtaaggatttctacttayacaatttcagtagaagagttactactaaggtaatgctcagaaaaggtgacttgtgtagtgaagtcgcatttgcctatgaaacaattgccatttatcccaa

SEQ ID NO: 32790 - DNA, 201 bp, Homo sapiens
ctttccttctattgggagccttttgttaatacttctccactcttccccatatcatccattctccccaaccccatgtatgtgtgtgtgtgtgtgtgtgtgtrtgtgtgtgtctgtgtgtttgtgtgtgcttgtagcctaatttcagaggttatgaatcctgtggatgaattagatcttaaaaccctttatttttaaaaaatt

SEQ ID NO: 32791 - DNA, 201 bp, Homo sapiens
gcaacaggatgagttgtcaaaatgtcagcatctgagctataagaaacacttatgggaccaagaggatcaaagaggtcacattagctacaaagttctaatawctttttcctctagttcataggaaagaatctaaataaatatgcactctgggccaaacaaggacataaacctatgctctctctctctttttttttccttttt

SEQ ID NO: 32792 - DNA, 201 bp, Homo sapiens
tttacctgttttttttttcatatgtcatttaatgttctaatgtaattttctaatgctgtatgagatggaaattatttaggaaggtggctaataaaactaawcttttcttatgctctgcactattaatttctctcccatagatattaaacattatgagccatctaagatttttgataattatttcttaattattatagaaaa

SEQ ID NO: 32793 - DNA, 201 bp, Homo sapiens
agttcataatctttatggaaaatgtacccattcagaatctgataaaagtgatgaggcccctttttactcatacataaaattttataaccctcacccctcctttttttttttttttttttgttcattgaccccatgaatccaatccataaatttccagggttaagaattccctgtaccacaggttaaaaatccctgaaaagg

SEQ ID NO: 32794 - DNA, 201 bp, Homo sapiens
aaattgtgccaatatttcttacataaacgtttaaaaataatattttatttttattcacagatatatttcttagcctcctctcacccccaagtatttaattmtagaatatattttccttttctggttgtttctatgaagagattgattccccataataaaacccttcataatagaatatgatgctctaaagagtcaatctgt

SEQ ID NO: 32795 - DNA, 201 bp, Homo sapiens
aagacaaaattgtgcccatcttggagctcatattccaagcacttggccctcttggtattggtcccctttctcctttactatagatatgttataatttcatwtattagatgattaataagtgcctttaattggaggcaaagagaaaatgttgatgttaacagaaacaagaaagtttaggacacaacagaatagagctaccac

SEQ ID NO: 32796 - DNA, 201 bp, Homo sapiens
ctttactatagatatgttataatttcatatattagatgattaataagtgcctttaattggaggcaaagagaaaatgttgatgttaacagaaacaagaaagkttaggacacaacagaatagagctaccactgtctcctcacttggctctctcaggcacgagggcttaggtgatatttatcctgaaggcaggagctgaactat

SEQ ID NO: 32797 - DNA, 201 bp, Homo sapiens
gaatgtataagttaatggtggcttctgtcatattttgcccatgatttccttatctgtaagaggctgtatggtttatagtcactcagagaaagtttcgaatwtgaacttgaaacctaagtaatttgatccattgaacttgacaaatgtccatttgtcttttcaaaggtgcacatattcacaaaactgaaattgtgccaatat

SEQ ID NO: 32798 - DNA, 201 bp, Homo sapiens
aatgagtatggctgtgttccaataaaattttatgtacaagaatagccagtgggccagacttgcctgctggccatagtttgccaatccctgatctagattawcttgtacagtttttctattcactaagctagggcagctaaggcaaggcatattctatgagaaagattgccccctagctattaaacatagcccagtgtctgt

SEQ ID NO: 32799 - DNA, 201 bp, Homo sapiens
gttctggcattctaaggagaagtaacctgaacatctttcagtacattgggaaggctggtcttcacggtagccaggtaactcacttctcatggattttgctyaataaagtatgcaagaaatcaggctgaggtaaaataaaacatatatgctgtgggtaatgctatagaatgtataagttaatggtggcttctgtcatatttt

SEQ ID NO: 32800 - DNA, 201 bp, Homo sapiens
tggatgaacaagattataattttcaaattaggaagagagaaaaagatgcaaagaaaggaatatttctgaggtgaggcacaccatagctttcatttggaaayaatcatgtttggagtacacatacagaactctcatattttggtcccatagttcacaggcataggtgaaaatgtgggcatgactattgtgttttcttcagga

SEQ ID NO: 32801 - DNA, 201 bp, Homo sapiens
aaatttttgattcatcttgagctatggatgaaggaactgagagcaatcaaacagtagcacatttaatgtgaagtgtgacccacagtgttaccaaaaggaamcacagaatgaaaaatgacactggtcatcaaaaggttcacaatataacttagggcttcccacataatcagtcatctttcacctctttccaaagtactttct

SEQ ID NO: 32802 - DNA, 201 bp, Homo sapiens
aatctagatgtgcactaagtttgaacatcttatgaacaggtgaagaagaccttaaacagaatataccaccaaaaccgtaaagttcatgaaaagactgtgcrcactgctgcagctgctatcattttaaataacaatccatcctacatggacgtcaagaacatcctgctgtctattggggagcttccccaagaaatgaataaa

SEQ ID NO: 32803 - DNA, 201 bp, Homo sapiens
ctgatgaagacagatataggaagttttttttaacagctttctttctgttactccagatgaaggatgtaaatgttgaaaatgtgaatcagcagagaggagasaagagcatcttcaaaggaaaaagcccatctaaaataatgggaaaggaaaacttggaagctctgcaaagacctacgctccttcatctaatccatggaaagg

SEQ ID NO: 32804 - DNA, 201 bp, Homo sapiens
ttaactggataattaccagatttccatttctggttttggctttgtgttgattaaattaaccacgtggctgctgagtcagacctttattttgtattgtttcygggcattgatttgctctctaaatcagcatggctcttgtacacacactgaactgccacaagaaatgtgacaccttgaaagtccttctgaaatttgttgtat

SEQ ID NO: 32805 - DNA, 201 bp, Homo sapiens
cagtttttttctttgaatgcccctcagtacttctgcatttataggatggtagactggtttggtttagctctcaaaagtgaaaacatttaaagtttcctcaytgggtgaaaaaaattaaaaagagtgagagactgaaaactgcagcccacctacgtttaatcattaatagtgagcccttcagtgaacttaggtcctgatttt

SEQ ID NO: 32806 - DNA, 201 bp, Homo sapiens
aagtgtttctgttgatataaaaagaaatgagaagaaaatcacccattcatggagtagcctttgacactcatatcctttctcagattgctttggaacagaarcttcaagtacattcagtaacttggctggagaggtatagggtgacttaactgtgtgtgtaattctgttattgttgctgttgttgtacaggcaatttgagaa

SEQ ID NO: 32807 - DNA, 201 bp, Homo sapiens
agtttgtgtccatcacattagttataatgcctcaaacaaccccttcatcccatgcagccatattttgtcctatatcaaatgtctctttaagtatccttagrgctatctcctaatgtgtcctgagcatggcactgagaatctcatgcttccatcaaagagtgtccttcagactgaaagtagcttcatgccgcaaccgtactt

SEQ ID NO: 32808 - DNA, 201 bp, Homo sapiens
ttcccaggcaatgctgatgctgttgttcacagaaacacactttgagaaccattgttcctttcaaagtgtagcaatgattgaaggaaaacatccttcttaaytggcacttcatcactctggtattttaattgactaattaatttagcaaatcaacagagtctacttccggtgcttaaaattaggacagcatgtttccaagcc

SEQ ID NO: 32809 - DNA, 201 bp, Homo sapiens
tgaatataggacatcagaaggtactctaagtgattcagggattaaaacgacctctgacctatttttacactgatcataacagcagcaggggttttaatttrcgcagcaaaaattaatattcctgtcaaaacataagggcataaaactctcatttaattgtgaaagcagtttctcacagtttgatttaaagtccacaattca

SEQ ID NO: 32810 - DNA, 201 bp, Homo sapiens
tactttctagacagaagtttttccaaatgaaatggaattgaattctttgcaaagagaaatcaacaacagcaacaacaacaaaaagtaatttggattttttwaaaaagtacacagtatccttaagaatctacccttatccatattgtaaccaatctgtcttccatttccacttgttcatttgaaaaaaatatcttttaaacc

SEQ ID NO: 32811 - DNA, 201 bp, Homo sapiens
aatataggacatcagaaggtactctaagtgattcagggattaaaacgacctctgacctatttttacactgatcataacagcagcaggggttttaatttgcrcagcaaaaattaatattcctgtcaaaacataagggcataaaactctcatttaattgtgaaagcagtttctcacagtttgatttaaagtccacaattcaat

SEQ ID NO: 32812 - DNA, 201 bp, Homo sapiens
aaaaaaacaccaaacaataaaatatagcaaaacgacagtatatattcatacaatttttaaaatacagcataacagcaacatagcatttacactgtattagrtattataagtaatctagagatgatttaaagtgtatgggaggatgggtgtaggttacatgcaaatactatgcctttttatataagggacttgagcaccctt

SEQ ID NO: 32813 - DNA, 201 bp, Homo sapiens
ttgaaattatttatcctcttcatcattatccagggcacattccccagccaatgcaatctgtttatccagttatctagagcatcattaaaggacccaccatwtttttcctcctaggacctactgtacatgccccactgtaagaatgattttttgtaacacaatattttttcaaatatcttggcaatcaagggcttacgcctc

SEQ ID NO: 32814 - DNA, 201 bp, Homo sapiens
agatttggagtgtcagatctctttctcccaggattaatacaggtaagaatctgaccttgcctgacacttatttaaatctgataaatgatgcatttttgctycatttgtgttctgttcccctctccccaccaggtcaaagagttctactcatatcaaaatgaggcagtggccatagaaaatatcaagagaggcctggctagc

SEQ ID NO: 32815 - DNA, 201 bp, Homo sapiens
tctaagcacatccaggtcacctctgaatcccttaagtgtttccttccagtcactggcatcatacgttcagaccctgtaaagttacagctgttagtccaatwccattaaatataatatgaacaagttttttctttttttctcaaatgtttagggtgactgtggtaataaccactgacatcacagtggactcctcttttgtga

SEQ ID NO: 32816 - DNA, 201 bp, Homo sapiens
cattcaggtaagatgcagcgttcaggtcatgttccaggaccatccccagtgcaccaggaacttgcattcagtttagaacattcagtttcagaattaaaacraaacagtagaaacccagggaaagatgaattttctttaaatgagtagaagaataattgataaggccaaaaaaagtcagtttctgggataccaaaaaaaaat

SEQ ID NO: 32817 - DNA, 201 bp, Homo sapiens
tatcagctcaggatagctgtatataacaaaaacaaaaagcaatttagagtggcttaactaaatagtttcacttttatagtgtaacaaacatttggaagtasgtggtccagggttaatatggaaatcttaagatatcatcagaatccaagctgccttccttcagctcagccattcttacttgtgacttttgacctcatgctt

SEQ ID NO: 32818 - DNA, 201 bp, Homo sapiens
tgcggcaggagaatggcgtgaacccgggaggcggagcttgcagtgagccgagatcccgccactgcactccagcctgggcgacagagcgagactccgtctcaaaaaaaaaaaaaaaaaaaaaaaaatttaaatatacacatacactagacaatggcataattgggaaatggcataaatgagaaaatgtggtttagaatatta

SEQ ID NO: 32819 - DNA, 201 bp, Homo sapiens
atttgagttaatcccagtggattttaattaatcccacaggattttaagaatttctaatcatgttcagctagttgaagttacacacacacacacacacacacacacaccacacacacacagaatctagatacagcattaacaatcaactcccttgccacagaattacccatttatccaaagtttcaattattaccaggccat

SEQ ID NO: 32820 - DNA, 201 bp, Homo sapiens
tgagttaatcccagtggattttaattaatcccacaggattttaagaatttctaatcatgttcagctagttgaagttacacacacacacacacacacacacacaccacacacacacagaatctagatacagcattaacaatcaactcccttgccacagaattacccatttatccaaagtttcaattattaccaggccatttg

SEQ ID NO: 32821 - DNA, 201 bp, Homo sapiens
gttaatcccagtggattttaattaatcccacaggattttaagaatttctaatcatgttcagctagttgaagttacacacacacacacacacacacacacaccacacacacacagaatctagatacagcattaacaatcaactcccttgccacagaattacccatttatccaaagtttcaattattaccaggccatttgtct

SEQ ID NO: 32822 - DNA, 201 bp, Homo sapiens
tagcagtcatataaaagaaaaagagatgtgttcatttttctagttctggggaagcaataaaaactaatagaaaggattaaaaaaacttttttcattgtgtytcacagtttatatctatcattcagcctgccaggagggaaaaaaggctctaacaccattttctaagggatccagaggtcaagatcaaaacttgatccattg

SEQ ID NO: 32823 - DNA, 201 bp, Homo sapiens
aaggggaaaatagtatcgaagtaagataatgctaaaatttttattttctttgctattctttgttatattattatacttgatttgtaaatagatctgtgtttgtgtgtgtgtgtgtgtgcgcgtgtagtcatgcattgcttaacaatgggaataagttctgagaaaagcattgttaggcaatttcatcactgtgcaaacatc

SEQ ID NO: 32824 - DNA, 201 bp, Homo sapiens
aggggaaaatagtatcgaagtaagataatgctaaaatttttattttctttgctattctttgttatattattatacttgatttgtaaatagatctgtgtttgtgtgtgtgtgtgtgtgcgcgtgtagtcatgcattgcttaacaatgggaataagttctgagaaaagcattgttaggcaatttcatcactgtgcaaacatca

SEQ ID NO: 32825 - DNA, 201 bp, Homo sapiens
tgtcatttcaaatgtcaaacagcagggtattaggcttagttaaatttgccttcgttttctagttggatgtaggcaattcctggaacttgtatacagttggygtctctgtaaccgctggttcctcatcaaattcaaccaacctcagatcaaaaatatttggaaaaaaaacaccaaacaataaaatatagcaaaacgacagta

SEQ ID NO: 32826 - DNA, 201 bp, Homo sapiens
ataatgcctcaaacaaccccttcatcccatgcagccatattttgtcctatatcaaatgtctctttaagtatccttagagctatctcctaatgtgtcctgarcatggcactgagaatctcatgcttccatcaaagagtgtccttcagactgaaagtagcttcatgccgcaaccgtacttttttaatacacctggttgtaaac

SEQ ID NO: 32827 - DNA, 201 bp, Homo sapiens
atcctgctgtctattggggagcttccccaagaaatgaataaatacatgctcgccattgttcaagacatcctacgttttgaaatgcctgcaaggtataatayattgcacatgtctctctgtgtattcaagcttatttgtgtgttcatggggtaccgatgtagctaataataatgatgtggtcattatgcagggttacgttgc

SEQ ID NO: 32828 - DNA, 201 bp, Homo sapiens
tttatttctcaggctatgcctaatgtgcataaggaagtatgtggtctgaagttcactacagtcatggaagaaagagatggagaaagccaccagctcttaayggcctcagcctagaagtgatcctcatagattctatccatggcgtattagccagaactagtcacgtggcccccaccaaatcacaaaggaatctgggaaatg

SEQ ID NO: 32829 - DNA, 201 bp, Homo sapiens
cattgattatataaaagtaaacgagtcagttgtattttcagagaataaaagattgtgctttatagttaaactattaagctgtcactaacttacattaagtkatatctagaatgaacctccacaaatgcattttaaaaaccccaaccttctaatggttgaaatgcagtgaccaccaacccacccacatgattaattggtttg

SEQ ID NO: 32830 - DNA, 201 bp, Homo sapiens
aaacattacttcatataactacctttccccagagccccatgccatgtagtatccttaaaattctatattagttaggtaacaccaggttatgctgcaataamaaatgtccctcaaaatctcagcaatgtgttaaaagtttatttctgagccaggcatggtggctcacgcctgtaatcccaacactttggaaggccgaggcgg

SEQ ID NO: 32831 - DNA, 201 bp, Homo sapiens
atacttctccactcttccccatatcatccattctccccaaccccatgtatgtgtgtgtgtgtgtgtgtgtgtatgtgtgtgtctgtgtgtttgtgtgtgcytgtagcctaatttcagaggttatgaatcctgtggatgaattagatcttaaaaccctttatttttaaaaaatttttcagcctagactctgtcatacaaaga

SEQ ID NO: 32832 - DNA, 201 bp, Homo sapiens; identical to SEQ ID NO: 7319

SEQ ID NO: 32833 - DNA, 201 bp, Homo sapiens; identical to SEQ ID NO: 7320

SEQ ID NO: 32834 - DNA, 201 bp, Homo sapiens
atttaccaaattgtgagttcccactgctatctctaattctaattctaattcaacactacagggttattttttccctcatttcatcattctattttccttcycccactgtgacaactgtggttttcgagaacaccaatatattgattcacctgctcaattctaaaacatacacaatatatttttggaattgccatactgata

SEQ ID NO: 32835 - DNA, 201 bp, Homo sapiens
gcccaagattgatgtctggaaagcaggctgcagccataatcaaagcagttgattcaaagtacacggccattcccattgtggggcaggtcttccagagccastgtaaaggatgtccttctgtaagtgcagacaaatatgggaataatcatgacatcagactctgttttcattttgtctccagtgaaagcatcaactcattca

SEQ ID NO: 32836 - DNA, 201 bp, Homo sapiens
gcttgggtattaacttattaagttctggcagaaattaaatttattatttttatattagggaagcatgacttcttatatttttcaatttccataattatttkagtagctgatttacttcagctatttgtgtattaaatatcttggcaaaagataaaacccacatatcaaaagatctattcagcagtatttaatgagcatcta

SEQ ID NO: 32837 - DNA, 201 bp, Homo sapiens
tgcaaacttaaattttcaaatcttttaatataattgttgctccagaaagacttcataatgagctttcagttacctctggagatatcacagtttgaaagacrtggctatatacaacttgaataaattactatcttgtttgccaaaagaatggcaattagtatcttgttcactcaaaagaatgattataatatagcatttccc

SEQ ID NO: 32838 - DNA, 201 bp, Homo sapiens
caaatgcattttaaaaaccccaaccttctaatggttgaaatgcagtgaccaccaacccacccacatgattaattggtttggttccacatttgccttgggcsagagctcttagaatgtttctctgtccgcattctctgcttaaatccagctgggcttgcctgttactcaaaaggagagtgctcccaaggtggggcttctgga

SEQ ID NO: 32839 - DNA, 201 bp, Homo sapiens
ggggaaaatagtatcgaagtaagataatgctaaaatttttattttctttgctattctttgttatattattatacttgatttgtaaatagatctgtgtttgtgtgtgtgtgtgtgtgcgcgtgtagtcatgcattgcttaacaatgggaataagttctgagaaaagcattgttaggcaatttcatcactgtgcaaacatcat

SEQ ID NO: 32840 - DNA, 201 bp, Homo sapiens
aaaagaaaaagagatgtgttcatttttctagttctggggaagcaataaaaactaatagaaaggattaaaaaaacttttttcattgtgtttcacagtttatrtctatcattcagcctgccaggagggaaaaaaggctctaacaccattttctaagggatccagaggtcaagatcaaaacttgatccattgcagtgggtcagt

SEQ ID NO: 32841 - DNA, 201 bp, Homo sapiens
gggaaaatagtatcgaagtaagataatgctaaaatttttattttctttgctattctttgttatattattatacttgatttgtaaatagatctgtgtttgtgtgtgtgtgtgtgtgcgcgtgtagtcatgcattgcttaacaatgggaataagttctgagaaaagcattgttaggcaatttcatcactgtgcaaacatcata

SEQ ID NO: 32842 - DNA, 201 bp, Homo sapiens
taataacacatagtttaaaacacattgtataggtgtacaaaaaatattttttctttaaatctttataagcttttttctatttttaaattttttatttttatttttttcttttaaaaatttctggttaaaaattaagacataagcatatatattagcctcggcctacacaaggtcaggatcatcaatatcactgtcttcctc

SEQ ID NO: 32843 - DNA, 201 bp, Homo sapiens
cagtaattgcttattagtttctgaaattgagttagaggaaaaaggaaacattttaaaacacaaaatcatcattttcaaacattgtttcttcttttacctgttttttttttcatatgtcatttaatgttctaatgtaattttctaatgctgtatgagatggaaattatttaggaaggtggctaataaaactaaacttttctt

SEQ ID NO: 32844 - DNA, 201 bp, Homo sapiens
tgtttgagtgagagagaggggcgttcaaggagaaaattaaaataaaatggggaggggtctttttgagaaagtcttaatcattttttcatttgttcaaattaaaaaaaaaatcacttcttgagaaaactcaaaccaatagaaactctgtgaatggtagagatttttaagtattccttcccctaaacattgatatccatgatt

SEQ ID NO: 32845 - DNA, 201 bp, Homo sapiens
ttgttaatacttctccactcttccccatatcatccattctccccaaccccatgtatgtgtgtgtgtgtgtgtgtgtgtatgtgtgtgtctgtgtgtttgtktgtgcttgtagcctaatttcagaggttatgaatcctgtggatgaattagatcttaaaaccctttatttttaaaaaatttttcagcctagactctgtcata

SEQ ID NO: 32846 - DNA, 201 bp, Homo sapiens
taagaaaccatggactccagagtcagaaaaacctaggtttcaatcccagcaatgccatttaccatttaccagctatatgaccttgaacaaatgactaggtrtatctgcgtctgtttcctagcatgtacaggggaatattaatattaaactgacagagatgttcagtggattaaatgaggtggtagtattagtaacagctaa

SEQ ID NO: 32847 - DNA, 201 bp, Homo sapiens
ggggctagccctaatcctgatgctaccacgccagctggcaccaccctggctcttggaaaggcatgaggaaaatttggcttcctcttttttccactgaggattttttttttccaaatttgacttgggaaacagtcattacaatgaatgtgcagctttttttttcctcatatgttgcagcaaaattgtccgtcgagttctgaa

SEQ ID NO: 32848 - DNA, 201 bp, Homo sapiens
ctatggcctattagagacctcaattttcaagccacttctcactagaattcaaatggcccacaaggaatcccaagcattatgcccttgcctttctttttagrtagatatctctggaaattgtaaagtgacctaccaggctcatcaagacaaagtgatcaaaattaaggccttggattcatgcaaaatagcgaggtctggatt

SEQ ID NO: 32849 - DNA, 201 bp, Homo sapiens
ttttttgttcattgaccccatgaatccaatccataaatttccagggttaagaattccctgtaccacaggttaaaaatccctgaaaaggggattaactcttyaattcaaagctagatagcaaatgtgtaagtgtctcaaaagcaaaattctgagtttgcaatctagaaacataaaaatactttaccaagtatgtgtttattt

SEQ ID NO: 32850 - DNA, 201 bp, Homo sapiens
tatgcctttttttatagacctcagctggtggatgctgtcacctctgctcagacctcagactcattagaagccattttggactttttggatttcaaaagtgmcagcagcattatcctccaggagaggtttctctatgcctgtggatttgcttctcatcccaatgaagaactcctgagagccctcattgtaagtcaaatagaa

SEQ ID NO: 32851 - DNA, 201 bp, Homo sapiens
cgagagatgctgttaattagaactatttattaggttgttgcaaaagtaattgtggtttttgccattacttttgtgacaacctaatattatttttaaaaccrcaatagaataacttagtgtgtgtgagaattacctttatctaaatgctactctaaaaaacatagatataagaaatgaataattcagaccttagcaacagca

SEQ ID NO: 32852 - DNA, 201 bp, Homo sapiens
attcatattgatatgctctctgccttcagaaatgacccagtaaatctttagctaagtgcagctggaatttcacttggaatatcttcttaagattacatagytaaaaggcacttgaaaaagagaaaaaaaaggatccattgcttattaaaagtaatgaataatttaaaaactggcagcaagttattactatagagttagaga

SEQ ID NO: 32853 - DNA, 201 bp, Homo sapiens
gctgaatttctaaaaaacttttttcctccatcataaattaaccttagcttactgtaatatttttacgttaaaaactttttaatttttgttaacttttgaastactctgtaataacacatagtttaaaacacattgtataggtgtacaaaaaatattttttctttaaatctttataagcttttttctatttttaaatttttt

SEQ ID NO: 32854 - DNA, 201 bp, Homo sapiens
caattttcaagccacttctcactagaattcaaatggcccacaaggaatcccaagcattatgcccttgcctttctttttaggtagatatctctggaaattgyaaagtgacctaccaggctcatcaagacaaagtgatcaaaattaaggccttggattcatgcaaaatagcgaggtctggatttacgaccccaaatcaggtat

SEQ ID NO: 32855 - DNA, 201 bp, Homo sapiens
ttgtctttgtatcttatcatcctgggggagaaaaaaagtcccctatggcctattagagacctcaattttcaagccacttctcactagaattcaaatggccyacaaggaatcccaagcattatgcccttgcctttctttttaggtagatatctctggaaattgtaaagtgacctaccaggctcatcaagacaaagtgatcaa

SEQ ID NO: 32856 - DNA, 201 bp, Homo sapiens
cgctcacaattatgaccgtttctccaggagtggatcttcttctgcctacactggctacatagaacgtatgtacaccaaaaagaggttctccttccataccycacaacttagcattgctggaactgctattaaattacagttattgtgtgtcatcaggtagtccccgttcggcatctacttacagcctagacattctctact

SEQ ID NO: 32857 - DNA, 201 bp, Homo sapiens
tttttagctgttgcaaatatttaagtttttggccccttgagaagttctagctgcagctcagaagcttcaccattatttacagagcaggcagggagcttgcrtcatgaacattatattgattttatccaggtggttattgaagcccaaggactggaagccttaatcgcagccacccctgacgagggggaggagaaccttgac

SEQ ID NO: 32858 - DNA, 201 bp, Homo sapiens
attgggagccttttgttaatacttctccactcttccccatatcatccattctccccaaccccatgtatgtgtgtgtgtgtgtgtgtgtgtatgtgtgtgtstgtgtgtttgtgtgtgcttgtagcctaatttcagaggttatgaatcctgtggatgaattagatcttaaaaccctttatttttaaaaaatttttcagccta

SEQ ID NO: 32859 - DNA, 201 bp, Homo sapiens
aggccaagatccacatcacaggcctctgctggactgggtggatgaacaagattataattttcaaattaggaagagagaaaaagatgcaaagaaaggaatayttctgaggtgaggcacaccatagctttcatttggaaacaatcatgtttggagtacacatacagaactctcatattttggtcccatagttcacaggcatag

SEQ ID NO: 32860 - DNA, 201 bp, Homo sapiens
aaacaaaacagtagaaacccagggaaagatgaattttctttaaatgagtagaagaataattgataaggccaaaaaaagtcagtttctgggataccaaaaaraaatctaatgactagttcatttgattctggagatagttatcatattctaatccagaaacaatttatccaggaaagaaaggcctatgatttaccataggag

SEQ ID NO: 32861 - DNA, 201 bp, Homo sapiens
ccttttgttaatacttctccactcttccccatatcatccattctccccaaccccatgtatgtgtgtgtgtgtgtgtgtgtgtatgtgtgtgtctgtgtgtktgtgtgtgcttgtagcctaatttcagaggttatgaatcctgtggatgaattagatcttaaaaccctttatttttaaaaaatttttcagcctagactctgt

SEQ ID NO: 32862 - DNA, 201 bp, Homo sapiens
agagatactctgatgaagacagatataggaagttttttttaacagctttctttctgttactccagatgaaggatgtaaatgttgaaaatgtgaatcagcasagaggagagaagagcatcttcaaaggaaaaagcccatctaaaataatgggaaaggaaaacttggaagctctgcaaagacctacgctccttcatctaatcc

SEQ ID NO: 32863 - DNA, 201 bp, Homo sapiens
ttttgttaatacttctccactcttccccatatcatccattctccccaaccccatgtatgtgtgtgtgtgtgtgtgtgtgtatgtgtgtgtctgtgtgtttrtgtgtgcttgtagcctaatttcagaggttatgaatcctgtggatgaattagatcttaaaaccctttatttttaaaaaatttttcagcctagactctgtca

SEQ ID NO: 32864 - DNA, 201 bp, Homo sapiens
tgcctgacacttatttaaatctgataaatgatgcatttttgcttcatttgtgttctgttcccctctccccaccaggtcaaagagttctactcatatcaaartgaggcagtggccatagaaaatatcaagagaggcctggctagcctatttcagacacagttaagctctggaaccaccaatgaggtacttaccaatattaat

SEQ ID NO: 32865 - DNA, 201 bp, Homo sapiens
tggtacttatcatgagcttctcctgttttcccattttataaactagaacattgggtgacctcatgttttcaaatatacttataaaaaatttaaggccgggygtggtggctcacgcctgtaatcccagcactttgggaggccgaggcgggcggatcacgaggtcaggagatcgagaccatcccggctaaaacggtgaaaccc

SEQ ID NO: 32866 - DNA, 201 bp, Homo sapiens
catcccggctaaaacggtgaaaccccgtctctactaaaaatacaaaaaattagccgggcgtagtggcgggcgcctgtagtcccagctacttgggaggctgmggcaggagaatggcgtgaacccgggaggcggagcttgcagtgagccgagatcccgccactgcactccagcctgggcgacagagcgagactccgtctcaaa

SEQ ID NO: 32867 - DNA, 201 bp, Homo sapiens
gtgtgggatggtgaatctgtaacccctactctctgtgctctgtccctgcaggggacaaggaccacatgtgcagtgtcaaaagtcgcctgtggaagctgctrtccccagccaggctggccaggcgggcccaccggagcaaatggctggagagttacctgctgcacctggaggagatgggtgtgtcagaggagatgcaggcac

SEQ ID NO: 32868 - DNA, 201 bp, Homo sapiens
agacggggcctctcctcactctgtgcaggtccacacgatgggaccagatctccagcccacatccctttttccttgtgtcactctcatgtgaggtcatgtcttttttttttttcttttctttttttaagacacagagtctcactctgttgcctaggctggagtgcagtggtgtgatcatagctcactgcagcttcaaactcc

SEQ ID NO: 32869 - DNA, 201 bp, Homo sapiens
ctgcaggggacaaggaccacatgtgcagtgtcaaaagtcgcctgtggaagctgctatccccagccaggctggccaggcgggcccaccggagcaaatggctrgagagttacctgctgcacctggaggagatgggtgtgtcagaggagatgcaggcacgggccctggtgctgcagctgtgggccacacaggtgggtgtgaatg

SEQ ID NO: 32870 - DNA, 201 bp, Homo sapiens
ttgatagacatttgagtagtcccccatttggagctgttaggaagaggttgttgtgaacattcttgtacgtatctttcagtgcacacgtgcatttcttttarctgttggcctgttttttgttttgtttttgtttttgtttttttgagacagagtcttgccctgttgcccaggctggaatgcagcggcacaatctcggctcgc

SEQ ID NO: 32871 - DNA, 201 bp, Homo sapiens
tccccagccaggctggccaggcgggcccaccggagcaaatggctggagagttacctgctgcacctggaggagatgggtgtgtcagaggagatgcaggcacrggccctggtgctgcagctgtgggccacacaggtgggtgtgaatgtgcaagtgggtgtgtgcaggtgtgcatgtgtggttgcgatatgaacgcatgtgtgt

SEQ ID NO: 32872 - DNA, 201 bp, Homo sapiens
ctttcctgggactcagtggtagcaccctctctaaaccttgccacagtccccactactccctattgcctctccagcatgcagctattctagttaccactgtrcttcctctgctgttttttcctgtgttgagaaataattctgtgaatttgtgtctatttcaaaaaccagaaaacaaaaactagggcaaggccacgtgctttt

SEQ ID NO: 32873 - DNA, 201 bp, Homo sapiens
atgaaccagttattccaaggctacttgggcagcacgacacgtggagacttcaggagaagtggccttagcccaggggctcacaaaaagatgaggcacaaggmaaggccctgcacctccttagactcacagagctcaaatttgcaagtctcctctttgactagagaagccgggatgggctggggagaggagggaatggttggg

SEQ ID NO: 32874 - DNA, 201 bp, Homo sapiens
gagcatggcagccgttttgtgacgatgtggacaagagactctcacagaaatcaaacaaggaccctgagatagctaggctgttgctgagacaggtcctggcwtcacctacttctggattttgtgttaaatgagaccaataaatgtcataccttttttatactttactaagaagccacagtggacaagagcttgggttctgag

SEQ ID NO: 32875 - DNA, 201 bp, Homo sapiens
ctgtttcccactgggttggctccagtctcaggctggcagtagctgttggcagctcaaggctgacttcctcctggctctgtgagactctgaatctcttacartgttcccaccaagagtcccaagactgtgtctcattggctttctttgggtcatgtgtccatcctgaaccaatcacagggctcagagggatgctctgattgg

SEQ ID NO: 32876 - DNA, 201 bp, Homo sapiens
tgaaggaagtgaggggtgaaccatgtaaatatatagaatgaagtttcccaggcagggagcagcaagtgcaaaggccctgaggcaggactaagggtgacacrgtggggaggcagagctgccggaccacacaggtccctgtaggccatggggagggctttggcttttactgtgagtgagacaggtgcctgctgtagggctctg

SEQ ID NO: 32877 - DNA, 201 bp, Homo sapiens
gcccaggaaggcctcactgaaaggtgacatctgagcagagactgaaggaagtgaggggtgaaccatgtaaatatatagaatgaagtttcccaggcagggarcagcaagtgcaaaggccctgaggcaggactaagggtgacacggtggggaggcagagctgccggaccacacaggtccctgtaggccatggggagggctttg

SEQ ID NO: 32878 - DNA, 201 bp, Homo sapiens
gctgggcaggagctggggacaagatgtcctctgaggttgagtcgttgacagcgtccagaattcaggcaggtgggaaaacttttcaagggccttttgggagyggagccaagagggtacttggcctaggagtttctggcacaggctctgtgacctcccagcctgagtttgaatcctgattttgacacttcctggcaagtcagt

SEQ ID NO: 32879 - DNA, 201 bp, Homo sapiens
gcaacatagtgagattccacctcttaaaaaaaatcctttgagtacttaccgtagacctcaaagattctgtgttgtgtcgattaccatttggggggtcaggrggacagggggcagagagtcaaggaaacatatacaaggtgattttagatgatgatatgtagagtatgaaacagggctgtgaatagagagactttcgggtct

SEQ ID NO: 32880 - DNA, 201 bp, Homo sapiens
atttcgaacatttgctttcttcccacgaccacatttcaggagggggctttatgcagactccccctttaactacacagctttgctcatctgcagggccccakgttgagccaccaagctcagttttccagaatcttctcttcctcactcccatatgcactgaattccttgaatctctacagtatatgatgtttcactggaaat

SEQ ID NO: 32881 - DNA, 201 bp, Homo sapiens
agtgactgatagaatttgaagatacaaagcatatagggaactttttgcttcccaaactacatcaagaatgattatatttggaagcaaatctttagatatcrcaccagttagctattgttgcataacaaacatccataacaactcatcagcggcatacacccatcagcatttatttaactcacgggtctgtgggtctggctc

SEQ ID NO: 32882 - DNA, 201 bp, Homo sapiens
gaggcaggagaatcacttgaacctgggaggcggaggttgcagtgagctgagatcgcgccattgcactccagcctgggcaataagagcaaaactccatctcaaaaaaaaaaaaaaaattgtctaacttcttcttgggattgcagcccagcaagtctcagcctcattttacccagctcctattcaacatggagtcactctggt

SEQ ID NO: 32883 - DNA, 201 bp, Homo sapiens
tggccttgaagtaggtattttgggccacagggcagttttggccatgtcctgaggctggagatagacactggtcatgcctgggtgtttggcagcagtgggarcccaggcctactggcccctctgtcttggcccgagctgtgtccctggcagagacgagtcagctctgccctcataatggcataacaggggcccttctccttg

SEQ ID NO: 32884 - DNA, 201 bp, Homo sapiens
gaaaaaatctttttctcaaaaaacaagaacctaggagagaaaaaagaaagcataaaggcatacacacacacacacacacacacacacacacacacacacamacacatacacatgcatacacacacatacacacgcatacacacacacataaacacacacacatacataaacactgctgacaaaaagagttaaactctgtaa

SEQ ID NO: 32885 - DNA, 201 bp, Homo sapiens
ctggagatagacactggtcatgcctgggtgtttggcagcagtgggaacccaggcctactggcccctctgtcttggcccgagctgtgtccctggcagagacragtcagctctgccctcataatggcataacaggggcccttctccttgcaggggaatatgggtcccgctgccttctggctcctgctcttccttctcaagaat

SEQ ID NO: 32886 - DNA, 201 bp, Homo sapiens
caggcacgggccctggtgctgcagctgtgggccacacaggtgggtgtgaatgtgcaagtgggtgtgtgcaggtgtgcatgtgtggttgcgatatgaacgcrtgtgtgtgtgcatgtctgtgcacctgtgcaggtgtgcacatgactatgcctgtgtgtgcatgtgtatgtaggtgtgcatttgtgagtgtgtgctgatgtg

SEQ ID NO: 32887 - DNA, 201 bp, Homo sapiens
actgcgtcatcatggacccccaaagccctccccaacatggactcctgtcttccagggtccatcagtgtgtcctccgacctagggtctccctaagcctcctrtcttcacacacctggcatctccatactccagcctcagctaggggtcaagtgacagaaaacctaacttcaattgactaaggtgaaaaggtactttgagaca

SEQ ID NO: 32888 - DNA, 201 bp, Homo sapiens
agatggtctgtgcttctttgggaggctgtggcaggaggactgctcgaggccaggagtttgagatcagcctgggaaacatagggagacctccatctctaccaaaaaaaaaaaaaaaacctagctgggtagcacatgcctgtggccccagctccttgggaggctaaggcagaaggatcacttgagcctaggaggtcgaggctg

SEQ ID NO: 32889 - DNA, 201 bp, Homo sapiens
gatggtctgtgcttctttgggaggctgtggcaggaggactgctcgaggccaggagtttgagatcagcctgggaaacatagggagacctccatctctaccaaaaaaaaaaaaaaaacctagctgggtagcacatgcctgtggccccagctccttgggaggctaaggcagaaggatcacttgagcctaggaggtcgaggctgc

SEQ ID NO: 32890 - DNA, 201 bp, Homo sapiens
aatcccaactactcaggaggctgaggcaggagaatctcttgaacccaggaggtggagattgcagtgagccaagattgcgccgttgcactccagcctgggcracagagtgagactctgtctccagaaaaaaaaaaaaaaaaaaaaaagaaagaaagaaagaaaaaactgcagggattgagggaaaagggggactggggccaa

SEQ ID NO: 32891 - DNA, 201 bp, Homo sapiens
cggtggtgtgggagcctcgcaccaggctcgacttccatgcctatgccatcttcctcatggagaggatttttgatgtgcagcttccacattacagccccagwgatgaaaaggccaggatgaaactgtgagtggctggagatggcacctgtgggagggccagggtgggcgactcatttctactcatgtggcccaagttattct

SEQ ID NO: 32892 - DNA, 201 bp, Homo sapiens
tttgtttcctgcctcaggactcttctccacagagagctccaggcactcacagaagccatgtataccaacctccatgcagtgctgttgggcgatgctacagmagcaggcagtggctggcacgagatgggtctcctcgacttctcctacagcttcctgctcaggtgaggctgtgcagcccccaccctcctgctggggcccggc

SEQ ID NO: 32893 - DNA, 201 bp, Homo sapiens
acccaggaggtggagattgcagtgagccaagattgcgccgttgcactccagcctgggcgacagagtgagactctgtctccagaaaaaaaaaaaaaaaaaaraaagaaagaaagaaagaaaaaactgcagggattgagggaaaagggggactggggccaacactcaaaaacctcatcagtgacataataaaaaaaaaagaga

SEQ ID NO: 32894 - DNA, 201 bp, Homo sapiens
agaagccatgtataccaacctccatgcagtgctgttgggcgatgctacagaagcaggcagtggctggcacgagatgggtctcctcgacttctcctacagcytcctgctcaggtgaggctgtgcagcccccaccctcctgctggggcccggcactttgacctgtgtcagccatgagcagtggccaagggaaccgtgaggact

SEQ ID NO: 32895 - DNA, 201 bp, Homo sapiens
ctacttgggaggctgaggtgggaggatcacttgagcctggtgagacagaggttacagtgagccaagatcacgccactgcactccagcctgggtgacagagyaagactccatctcaaaacaaaaacaaaaacaaaaaaccaatacatttttttagccctcacatggctgtttcagtagttagccatttccctctgacagatg

SEQ ID NO: 32896 - DNA, 201 bp, Homo sapiens
ttttcatacctcctcagtctcccagatgttttaaaaattactcttacataaaaattactcttacatacatagacatgagcttgtagctaatacagagccaygtaagagagagttagtttacattcgtgtctgaaaattccggaaaccttgggaactttttgatttttaaacaatatggtagttgagttttcaaacaataag

SEQ ID NO: 32897 - DNA, 201 bp, Homo sapiens; identical to SEQ ID NO: 7353

SEQ ID NO: 32898 - DNA, 201 bp, Homo sapiens; identical to SEQ ID NO: 7354

SEQ ID NO: 32899 - DNA, 201 bp, Homo sapiens
ggacccctgaccctctgtctgccgcccccagagccggctacctgactctttacggaattgaggcgctgccacgcacccatgaaagccaggcccaggaccgygtccactcagctgatgtcttccacacctttcgccagctcgaccggctgctccccaaactggcccgtggctccctgtcagtgggtaagcaccatgggggcc

SEQ ID NO: 32900 - DNA, 201 bp, Homo sapiens; identical to SEQ ID NO: 7357

SEQ ID NO: 32901 - DNA, 201 bp, Homo sapiens; identical to SEQ ID NO: 7359

SEQ ID NO: 32902 - DNA, 201 bp, Homo sapiens
gtgggcaggaaaccggctgtgtgggcaggagccggggatggaaaggtcagggcccaccgccctgcccgccagggcctggcagtacctaaaaaaaagtgagrgtgtccgtgggtggggctagagcccacagtccccaaaacagagcctccttcgcccccgctggctgcaggctgagtcaccctggaatgtgaccacggcctg

SEQ ID NO: 32903 - DNA, 201 bp, Homo sapiens
gaatctctgtgtgtgtgtgtgttcctttttgtgttttaaggtttgagttgctttaaaagtttttacaagtagttcgtgctgattataaaaaattcaagccrtatagaataatttacagggaagaataaaagagcgctccactttctccccagcctcagcccaccacttccctctacagaggcaaccaccatcactagcttg

SEQ ID NO: 32904 - DNA, 201 bp, Homo sapiens; identical to SEQ ID NO: 7363

SEQ ID NO: 32905 - DNA, 201 bp, Homo sapiens
gcatgtgggtatatttatgatatgtgtgtgcatatgtgtagactcggcgtgtctcagctcttttaatgctcacaatcgctctaggaggctaggactttacmtattccatttgacagatgagaaaactgagacctggagagcctgagtcatttgcccagaggcctgtgttggggtcaggacagggctggtcccagagtctgc

SEQ ID NO: 32906 - DNA, 201 bp, Homo sapiens; identical to SEQ ID NO: 7366

SEQ ID NO: 32907 - DNA, 201 bp, Homo sapiens
gctgggattacaggcacgcaccaccacgcctggttattttttgtatttttagtagagacagtgtttcgccatgttggccaggctggtcttaaactcctgayctcaggagatctgcctgcctcggcctcccaaagtgttgggattacaggcatgagccaccacgccctgcctagcctgtacttctataacttagatatatca

SEQ ID NO: 32908 - DNA, 201 bp, Homo sapiens
tctttcaggttaaattttattttattttttttgagacggagtcttgctttgtcgccctggctggagtgcaatggagcaatctcagctcactgcaacctccycctcctgggttcaagcgattctcctgcctcagcctcccgagtaactgggactacaggcatgcaccacgaccatgcctggctaatttttgtattttcagta

SEQ ID NO: 32909 - DNA, 201 bp, Homo sapiens
aggagagaaaaaagaaagcataaaggcatacacacacacacacacacacacacacacacacacacacaaacacatacacatgcatacacacacatacacaygcatacacacacacataaacacacacacatacataaacactgctgacaaaaagagttaaactctgtaaaatatttgaggagatttattctgagccaaata

SEQ ID NO: 32910 - DNA, 201 bp, Homo sapiens
ggctgattccgtgtgcaggggccgtaggaaccactgggcggcgccattccctgggccatgtgcccccaacttccctgatgagcagaatcctctcaggcccytcttcataacgtaggtccctcagccccatccaggtccataggaatccaggtctccaggggagagcttggaaaactgcatgtctgacaagtgtcctgagaa

SEQ ID NO: 32911 - DNA, 201 bp, Homo sapiens
ttatttaataatatagcgtttattaggactgtgtcagtcatctctgtgctttagatgttaataacgcatttgatctgtatataaccctctgtggtgggtamttttattatcccaatttacaggcaagaaaactgagatgctgagatgtgaggtgacttgttcaaggtcaggcactctgctacagcactgggcctcttaact

SEQ ID NO: 32912 - DNA, 201 bp, Homo sapiens
tgatggccctactctctccccagccttctgatatctccctagctcccaccttccctcacaacttctcttggggtcagacctggataccctcatgttcaaasgtctctgagggaccacagagaccacatgtcatcgtgtgtcctttttcaccttgctatgtgactgtgtgggcgaggcaggcaccctctctgagcctcttca

SEQ ID NO: 32913 - DNA, 201 bp, Homo sapiens
ccatgcagatagcgtgctgagtgagagcctcaggcttacagctgcccccttcatcacccgcgaggttgtggtggacctggccatgcccatggcagacgggmgagaattcaacctgcgacgtggtgaccgcctcctcctcttccccttcctgagcccccagagagacccagaaatctacacagacccagaggtaaatggcag

SEQ ID NO: 32914 - DNA, 201 bp, Homo sapiens
ctagaacatgaggggatgttcattcacactgagtgctttgtgatagctcagccattttccttatttcagattgttataatgtcagtttctcaacacttttsccttgccccagactttgagaagaagtaaactttcacaattgctaacagattgggtgtttactgtgtgtcagaccctaaactacatgctcatctatccatc

SEQ ID NO: 32915 - DNA, 201 bp, Homo sapiens
gctaatacagagccacgtaagagagagttagtttacattcgtgtctgaaaattccggaaaccttgggaactttttgatttttaaacaatatggtagttgarttttcaaacaataagctcactgtatttttcttcaacctccagacatcttttcagctgaaatttacaactgtgtagtcaatcatttgccttaaaacaagaa

SEQ ID NO: 32916 - DNA, 201 bp, Homo sapiens; identical to SEQ ID NO: 7369

SEQ ID NO: 32917 - DNA, 201 bp, Homo sapiens
ctgtgcagtgtaaccaaaggaaattggcattttctttttaaaaaatattttaatttcttttattttacattacaaaagtaatatatatcatagaatataargaaatacagagaaatatatacttaaatgtaaaaaatatgtatttcccttcttctccagttctacagagttctctgaccaaggtttggagtgtgccttgcg

SEQ ID NO: 32918 - DNA, 201 bp, Homo sapiens; identical to SEQ ID NO: 7370

SEQ ID NO: 32919 - DNA, 201 bp, Homo sapiens
cagatcctacacaaggagcagagaggccttagacttagatgcaagatacccctttcttggcttctaatcatatcctcagtcatggctcagtgtagactccrtatcatggaggctcagtataggggagcttccagcttctgccacactcttccagacggggcctctcctcactctgtgcaggtccacacgatgggaccagat

SEQ ID NO: 32920 - DNA, 201 bp, Homo sapiens
aaattggcattttctttttaaaaaatattttaatttcttttattttacattacaaaagtaatatatatcatagaatataaagaaatacagagaaatatatrcttaaatgtaaaaaatatgtatttcccttcttctccagttctacagagttctctgaccaaggtttggagtgtgccttgcgaattgttttcatggctttac

SEQ ID NO: 32921 - DNA, 201 bp, Homo sapiens; identical to SEQ ID NO: 7371

SEQ ID NO: 32922 - DNA, 201 bp, Homo sapiens
tgaggctcagagaggtgaagtgacttgctcaaagtctactgctagtaagtggcaggactgggatttgaacccaggtccactgacttcacagcgcattctcyttcatctaagataccaaggctgataagaccctgtgtccgcccctgcagagttcacacagtccaatggcgatcttcagtgatctgtctccaggaggaatac

SEQ ID NO: 32923 - DNA, 201 bp, Homo sapiens
tcagctgaccgtagctacccgtctgcagctgctgccgcatgttcagaacttcatgttaggaactggccgaacttcactgttcccacttggttattttaatrcctgtggggccgagagcctcataaattatctcccttgaaccccaggagctttggccaccaggatcacaaacagattggaccaggggttatgacatctgcc

SEQ ID NO: 32924 - DNA, 201 bp, Homo sapiens; identical to SEQ ID NO: 7372

SEQ ID NO: 32925 - DNA, 201 bp, Homo sapiens; identical to SEQ ID NO: 7374

SEQ ID NO: 32926 - DNA, 201 bp, Homo sapiens; identical to SEQ ID NO: 7375

SEQ ID NO: 32927 - DNA, 201 bp, Homo sapiens
tgcctggccagccctgggtgtgggatggtgaatctgtaacccctactctctgtgctctgtccctgcaggggacaaggaccacatgtgcagtgtcaaaagtygcctgtggaagctgctatccccagccaggctggccaggcgggcccaccggagcaaatggctggagagttacctgctgcacctggaggagatgggtgtgtc

SEQ ID NO: 32928 - DNA, 201 bp, Homo sapiens; identical to SEQ ID NO: 7378

SEQ ID NO: 32929 - DNA, 201 bp, Homo sapiens; identical to SEQ ID NO: 7380

SEQ ID NO: 32930 - DNA, 201 bp, Homo sapiens
actgaggcaggagaatggcatgaagccgggagatggaggttgcagtgagctgagatcctgccactgcactccagcctgggcgacagagcgactccatctcaaaaaaaaaaaaaaaaaagggcaaacaagtgaaacaagtgggtgaccctgatgccgtctgaatggtgatccagtttgggttaaaataagcaaggctctcca

SEQ ID NO: 32931 - DNA, 201 bp, Homo sapiens
catacatttttcttggtgtgagcttgttctgggaatggggtcagaaaaggaccttcttcctatttcaggtatttaaatacaaccgattcctgaaccctgayggatcagagaagaaagacttttacaaggatgggaaacggctgaagaattacaacatgccctggggggcggggcacaatcactgcctggggaggagttatg

SEQ ID NO: 32932 - DNA, 201 bp, Homo sapiens; identical to SEQ ID NO: 7382

SEQ ID NO: 32933 - DNA, 201 bp, Homo sapiens; identical to SEQ ID NO: 7383

SEQ ID NO: 32934 - DNA, 201 bp, Homo sapiens; identical to SEQ ID NO: 7341

SEQ ID NO: 32935 - DNA, 201 bp, Homo sapiens; identical to SEQ ID NO: 7342

SEQ ID NO: 32936 - DNA, 201 bp, Homo sapiens
acccagccaaggatttagctgtgcctgcagatacctgtatgaattgagtgaattcaaaaagtgacattctttgctttccacaggtcaggaccctgtaaacracagggtatatgaagccagtttttccaaggtgcttttattagctctatagttcagccttattttctcaaagtagtctgaaaatatgtcattccagttaaa

SEQ ID NO: 32937 - DNA, 201 bp, Homo sapiens
ggaaaaaaaaaagaagggaaaacattgaaaacattcttttggagacttggagccaggagaatttttagaattcagtccaaattgtggaaaataataaaaayggaaaaacattagacaagtctagactctaataacaggtgtactatagttaattttgaaacatgacttttctctctccaattccccaattttattaaagac

SEQ ID NO: 32938 - DNA, 201 bp, Homo sapiens
gtaagcagataaacaaaaaagaaagaacgaacctggaaaactgatagaggccatattactctcaagtccgtatatcagtaggcaggtatgaaaatgatttstgcatataaagagattgcttttattttcttccaaagtttaagttcagtttatagggctttaagaaaagcacagcttaacttttagtgatttcacatcagg

SEQ ID NO: 32939 - DNA, 201 bp, Homo sapiens
gaatggttgggagaggcacttcctaggccctcaaatttcatctttggttctgctcccatccttcccagccttggccctcaaatctggccatttgctcctgyccacgagctgtcccaccctttgggttatactgggggcagccaggtagagggaaaaagggagcaggagacaggggcagagggaggtagagagggaggggga

SEQ ID NO: 32940 - DNA, 201 bp, Homo sapiens
gatcgagaccatcctggccaatatggtgagaccctgtctctactaaaaaatacaaaaattagctgggcgtggtggtgcacgcctgtagtctcagctactcrggaggctgaggcaggagaattgcttgaacccgggaggtggaagttgcagtgagccgagatcacgccactgcactccagcctggcgacagagcgagactct

SEQ ID NO: 32941 - DNA, 201 bp, Homo sapiens
atttgcaagtctcctctttgactagagaagccgggatgggctggggagaggagggaatggttgggagaggcacttcctaggccctcaaatttcatctttgsttctgctcccatccttcccagccttggccctcaaatctggccatttgctcctgtccacgagctgtcccaccctttgggttatactgggggcagccaggta

SEQ ID NO: 32942 - DNA, 201 bp, Homo sapiens
ttaacaacataataaaatgaaaccaattataacgatatactgtaatgaaaacaaaataagggttacctgaacacaagtactaccataccatgacagttgamgtgataactgagacagtggctcccaagtgactaatgggcaggtgtggtctacagtgtggatacaccggacagagggatgattcaccccccaggcaagatg

SEQ ID NO: 32943 - DNA, 201 bp, Homo sapiens
ggggattccatacacaaaaatctagatttccaacttcttctgaaaaatgggaagatctagcaatactttcctgggactcagtggtagcaccctctctaaaycttgccacagtccccactactccctattgcctctccagcatgcagctattctagttaccactgtacttcctctgctgttttttcctgtgttgagaaataa

SEQ ID NO: 32944 - DNA, 201 bp, Homo sapiens
tcagctcactacaatctccgcctcccgggttcaagctattcttgtgcctcagcctcctgagtagctgggattacaggtacacaccaccatgcctggctaattttttttttttttttttgtattttagtagagacagggtttcaccatgttgcccatgctggttctctaactcctgagcccaggaaatctgcccaccttggc

SEQ ID NO: 32945 - DNA, 201 bp, Homo sapiens
gctcggccccgccagacaaagggggcggctcccgcccgggctgcagcccaagggtctcggagcccgcggccggcccggcccgagtcccgctccagtatccygggcaaggcgagaccctcggaggtgggagtcccggggccccgcacgtgggtgagggggccaggccgtgctccccctgccaagaaggtgcaaggtgggaag

SEQ ID NO: 32946 - DNA, 201 bp, Homo sapiens; identical to SEQ ID NO: 7343

SEQ ID NO: 32947 - DNA, 201 bp, Homo sapiens; identical to SEQ ID NO: 7344

SEQ ID NO: 32948 - DNA, 201 bp, Homo sapiens; identical to SEQ ID NO: 7345

SEQ ID NO: 32949 - DNA, 201 bp, Homo sapiens; identical to SEQ ID NO: 7346

SEQ ID NO: 32950 - DNA, 201 bp, Homo sapiens
tgaggaactgctaaactctttttcacagcaactgcagtattttacattcccaccagcaatgcataagggttccaatttctccacgtcctcaccatcacttrtttcctatgttttaaatagtagccatcctcatggttgtgaatggtatcacactgtggtttttacatgcattttctaatgactaatggtgttgagcattgt

SEQ ID NO: 32951 - DNA, 201 bp, Homo sapiens
gaatataaaaagataattcttaatgtcatgtagttcccagttcaaattcaaatttctgcaattacagcaagaattttcgagccccattcggtgaacatgarggtggtgagctgagagttaggagtatggcttgtgggccccttgaaactaattgatttgccttgtgagtatcagaagcattcttcctgcttcccaggcctc

SEQ ID NO: 32952 - DNA, 201 bp, Homo sapiens
atttttgttttaaactttatatttgtgcatataaatagcattaccgtggagctttaaaacaatgtatattaaggctcatgtatggttcatgaaaatatttwaaaaaaaaaaaaagaagtagaaaagaaaacaatatctaaatagtgtcattcttcagtgcccggctttatccccttaccagtctgcccttgggaactctct

SEQ ID NO: 32953 - DNA, 201 bp, Homo sapiens
atctgccctgtcctcctgtccagcccctgtgcaatcataagctgggttaccttctgagcctgtttcctcaactgtaaaatgagggttctgattataactayaccccaggagtgtcaggataaatgaattggatctttctaagttcttaacccactgtctggctcattgtaggcatttgaaaaatgttaattattaccataa

SEQ ID NO: 32954 - DNA, 201 bp, Homo sapiens
ggctggaggatccagaggagtcgccgtattaatcagcacaggctcagctctgcacctgccgagtctcagtggcttttaccaacagaggtgtagttccactyacacggtatcagctgtgggattggagggcttccccactctgtgcacagactcgggccaggctctttccctctttcggctccaccgtctcaatgtgaagcc

SEQ ID NO: 32955 - DNA, 201 bp, Homo sapiens
cccaggagtgtcaggataaatgaattggatctttctaagttcttaacccactgtctggctcattgtaggcatttgaaaaatgttaattattaccataattrttaatatcattattgtgcatgcattgtgctaagtgagtgggcacgttacataaacctttagcctcagtttcctcaagaaaatggagtcaattatgaacat

SEQ ID NO: 32956 - DNA, 201 bp, Homo sapiens
ttccatcacccttatcatacagctgaggtttaaaaagatgaagtgactttcccaaggtcatacaaaaattatactccacatctaggcccctccaaaattcrtgcttatcccagtaagacaccactacttctgggagtgagcaactccgtctttacctttagaatttaatttaaaacttttaaattaggaaacatttcaact

SEQ ID NO: 32957 - DNA, 201 bp, Homo sapiens
tccttggcacagcccaatgcagtcagtagcattattgcttccattttacagatgaggaaatagaggcatggagaagctaagtcacacagccagcaagaagygtggctgggatttgaagccaggaagtatggtgctaaagtttgggctcatcgtgaccatgccctcctgcctcttatgcaaaaatcactgcttctgggtcca

SEQ ID NO: 32958 - DNA, 201 bp, Homo sapiens
aatcaatttagatgtttctttttccaaggttaaggacatgcccagtagagaggtctgtgcctttctccaaagacgactttgagggtttcaatacttaaagsgggggaaaggtgggctgtaagagaaagagggaaggtatggtaatccccatgtcacaagagaaaaggaacgggtagggcgatagtcaatgatgtatttctc

SEQ ID NO: 32959 - DNA, 201 bp, Homo sapiens; identical to SEQ ID NO: 7347

SEQ ID NO: 32960 - DNA, 201 bp, Homo sapiens; identical to SEQ ID NO: 7350

SEQ ID NO: 32961 - DNA, 201 bp, Homo sapiens
agtgggccaggccgccagccccgccagccccgccagccccgccagccccgcgatggcttgggccgcgctcctcggcctcctggccgcactgttgctgctgytgctactgagccgccgccgcacgcggtgagtgtcctgctccgctcggccccgccagacaaagggggcggctcccgcccgggctgcagcccaagggtctcg

SEQ ID NO: 32962 - DNA, 201 bp, Homo sapiens
ctccttccttcctcttgtctttctctggtatgaccctttaaaggtgtggtcacatcacttactggctcctgctgcaaaccctccagtggatccctgccacrcgtggcataggagccggactcccaccttggccttggccctcgtggtccacaaagtcatctccagcatcatcgcctacgtctcgtccccacattctccact

SEQ ID NO: 32963 - DNA, 201 bp, Homo sapiens
tcttgggtctgttgggtaagcatgatttaacgtgttcccttgatcgtaaacatcctgcgcttaagaatgcctagcttcctggcccagcatggtggttcacrcctctaatcccagcacttggtgaagcggaggcaggtggatcacctgagatcaggagttcgagaccagcctgaccaacatgatgaaatcctgtctctacta

SEQ ID NO: 32964 - DNA, 201 bp, Homo sapiens; identical to SEQ ID NO: 7355

SEQ ID NO: 32965 - DNA, 201 bp, Homo sapiens
caaagaggagagaaagctgaaaatagcaagatgcaataaaagttgaacttttgagttaaaaaaattaaaatctcatgtaatgttattaacagtaaaataayaccttaagaaaattttgttctaaccaattctttagtgtattagtgcatttttaatatcaaaacccaatctctagaaagactattataaataatttccttt

SEQ ID NO: 32966 - DNA, 201 bp, Homo sapiens; identical to SEQ ID NO: 7358

SEQ ID NO: 32967 - DNA, 201 bp, Homo sapiens; identical to SEQ ID NO: 7360

SEQ ID NO: 32968 - DNA, 201 bp, Homo sapiens; identical to SEQ ID NO: 7361

SEQ ID NO: 32969 - DNA, 201 bp, Homo sapiens; identical to SEQ ID NO: 7362

SEQ ID NO: 32970 - DNA, 201 bp, Homo sapiens
cactgggtgtatgaatgaagctcttgtgagtagctgtggccacacatgagtgtcccaggaggacccctgaccctctgtctgccgcccccagagccggctayctgactctttacggaattgaggcgctgccacgcacccatgaaagccaggcccaggaccgcgtccactcagctgatgtcttccacacctttcgccagctcg

SEQ ID NO: 32971 - DNA, 201 bp, Homo sapiens; identical to SEQ ID NO: 7365

SEQ ID NO: 32972 - DNA, 201 bp, Homo sapiens
ttttttcactgccgactgttcagtgcccagaatggtctttggcgcacagtaggattagtagttgctcactgggtgtatgaatgaagctcttgtgagtagckgtggccacacatgagtgtcccaggaggacccctgaccctctgtctgccgcccccagagccggctacctgactctttacggaattgaggcgctgccacgca

SEQ ID NO: 32973 - DNA, 201 bp, Homo sapiens
tttggcgcacagtaggattagtagttgctcactgggtgtatgaatgaagctcttgtgagtagctgtggccacacatgagtgtcccaggaggacccctgacmctctgtctgccgcccccagagccggctacctgactctttacggaattgaggcgctgccacgcacccatgaaagccaggcccaggaccgcgtccactcagc

SEQ ID NO: 32974 - DNA, 201 bp, Homo sapiens
accatttggggggtcaggaggacagggggcagagagtcaaggaaacatatacaaggtgattttagatgatgatatgtagagtatgaaacagggctgtgaatagagagactttcgggtctgctctagctggggtggtcagggaggcctccctgagatatttgagatgagccctggatgataagaaagctagattcagagact

SEQ ID NO: 32975 - DNA, 201 bp, Homo sapiens
aaatcataaaaattaaaagaaacacaatctgtgacccccatccctcaggtctcccttcttctgccaggctacatcctcagagggtctccccctgggggatractacaatggcctccagtagctctaggcaatttagcaatcccatggaggagggcttcccttcccctaaattctagcacagctcccaagactgatactcac

SEQ ID NO: 32976 - DNA, 201 bp, Homo sapiens
ccaccccgccccaaagcgggctggggtgggcggagtgggaggggcgcggcgggtgggggcggggaactttacctgggagtgggccaggccgccagccccgycagccccgccagccccgccagccccgcgatggcttgggccgcgctcctcggcctcctggccgcactgttgctgctgctgctactgagccgccgccgcacg

SEQ ID NO: 32977 - DNA, 201 bp, Homo sapiens
caggtgatcctctcatcttagcctcctgagtaggtgggactacaggtgtgtgccaccatgcccagttaattttaaaaattttgtagagatggcatcttgcyatgttgtccaggatggtctcaaactcagctcaagcaatcctcccaccgcagcctcccaaagtgctggaattaccggtgtgaaccaccacgcctggctttg

SEQ ID NO: 32978 - DNA, 201 bp, Homo sapiens
ggactacaggtgtgtgccaccatgcccagttaattttaaaaattttgtagagatggcatcttgctatgttgtccaggatggtctcaaactcagctcaagcratcctcccaccgcagcctcccaaagtgctggaattaccggtgtgaaccaccacgcctggctttgcaagaatttttaattcacaggaagaatgaattctca

SEQ ID NO: 32979 - DNA, 201 bp, Homo sapiens
taccttgatttgacagtcattaacattatttaaaaaatattagacataggctgggcacggtggctcacacctataattccagcactttgggaggctgaggygggccgatcaagaggtcaggagatcgagaccatcctggctaacacgatgaaaccccgtctctactaaaaatacagaaaattagccaggcgtggtggcagg

SEQ ID NO: 32980 - DNA, 201 bp, Homo sapiens
agctcaaattccagggtggcaaattcaggatctcttatggttgtgtgtgcacacacacacacacacacacacactcacactcacatctgtgcagttgggtaaaaggcggtcttggtcacctccctaacttgccacagctttttcctgcaggcagagatagccaagcgcccatgtgttccactcctgcttggtaattaatga

SEQ ID NO: 32981 - DNA, 201 bp, Homo sapiens
ctgcagccagacctgtctggattagaaacccaagtcctctatgttggaccctctggcatgtgacttagccctctgcacctcagtttcctcctctgtaaaatgggcctggcagtaataattgcttcctcataaggttagggggaggattcattgagtcactgggataaagtcctcagtgtggtgtctcccacaccatcagcg

SEQ ID NO: 32982 - DNA, 201 bp, Homo sapiens
tgcagccagacctgtctggattagaaacccaagtcctctatgttggaccctctggcatgtgacttagccctctgcacctcagtttcctcctctgtaaaatgggcctggcagtaataattgcttcctcataaggttagggggaggattcattgagtcactgggataaagtcctcagtgtggtgtctcccacaccatcagcgt

SEQ ID NO: 32983 - DNA, 201 bp, Homo sapiens
aggagttgtacaacaaaataaaacttagctctcaaattgtagctctcttagatctcaaattttcagagattcgggattctctgcagcagggagctcccagmcctactggtttgaccaatgaagacagataccaagctgttaccaaacaccaacaggagatttgtcaaaggccagggccacctacatggagtcccttcatgg

SEQ ID NO: 32984 - DNA, 201 bp, Homo sapiens
aagtccacggctgagcataaattcaaagggcaggggaaatacgctctggctcttgaataggaggaacagcaaattcacatggtaaggagcgtggattctgsgattggggaagaattggggccaacaatgtgatcattctcagatgtgaacagtcttaactgatataccctgttcctattactgacactgttttgctgatta

SEQ ID NO: 32985 - DNA, 201 bp, Homo sapiens
acaaaagattgttacctaacaatcttccataagaatctatattattatctttaaagcaaaacttattcttaaactaagaaggcttttgttcataaaatatygggacagcaggatgtttcctgggtctgttaagtcctggatctgttaagtcttgggtctgttgggtaagcatgatttaacgtgttcccttgatcgtaaaca

SEQ ID NO: 32986 - DNA, 201 bp, Homo sapiens; identical to SEQ ID NO: 7373

SEQ ID NO: 32987 - DNA, 201 bp, Homo sapiens
cagtcgactgggaagaaaaaatctttttctcaaaaaacaagaacctaggagagaaaaaagaaagcataaaggcatacacacacacacacacacacacacayacacacacacacaaacacatacacatgcatacacacacatacacacgcatacacacacacataaacacacacacatacataaacactgctgacaaaaaga

SEQ ID NO: 32988 - DNA, 201 bp, Homo sapiens
ggcttttgttcataaaatatcgggacagcaggatgtttcctgggtctgttaagtcctggatctgttaagtcttgggtctgttgggtaagcatgatttaacrtgttcccttgatcgtaaacatcctgcgcttaagaatgcctagcttcctggcccagcatggtggttcacgcctctaatcccagcacttggtgaagcggagg

SEQ ID NO: 32989 - DNA, 201 bp, Homo sapiens
acagtgacactcctcactctatccctggcaacttcccacagatactggttgggggcaggtatgtcaccgttctcctggacccacactcctacgacgcggtkgtgtgggagcctcgcaccaggctcgacttccatgcctatgccatcttcctcatggagaggatttttgatgtgcagcttccacattacagccccagtgatg

SEQ ID NO: 32990 - DNA, 201 bp, Homo sapiens; identical to SEQ ID NO: 7379

SEQ ID NO: 32991 - DNA, 201 bp, Homo sapiens
ttgcattaagtggtatgtgctctttacttgtttaaatgcaatggatcagttgcattaagtggtatgtgcattgagtggtaggctggcaaatggtaagggcrctgagtggaatgctggcaaatgtttaacagccggctctccagaaggcaaaagccctgatttggagctttttgctgatttcaatggtgtgaatacttccag

SEQ ID NO: 32992 - DNA, 201 bp, Homo sapiens
cttccactgcacaaaatttactcatgtctatgagtaaaaatcacttacattgctcttcattacctacaacttacacagtagtaaaattgctcgcagacccsaaaacacgcagagacctcatagaatcacataacctggaagggtctcctaggcaatgcctagttttccattgacaacacccattaatcattctggttcatt

SEQ ID NO: 32993 - DNA, 201 bp, Homo sapiens
cagacatgagccactgtgcctggtgattttgaattttgctttagaaatccttttctacaaacatctctagtgtctgaagaaagtcactttgtgtgtgtgtrtacaaacgtatgttcccatctagttatttcagttttaaacaattttctaaatttaactgtcatttctaaactccatataaaggcatggaaaattaaataa

SEQ ID NO: 32994 - DNA, 201 bp, Homo sapiens
gggaatggcaggatcaagtgaaccctctcggtttcagcctgggcttcttcagaacctgccaccctctccctgactcccccgcttctcctcagagaacagcyatcagaaaaccttgttcttccattgttgctgaggaaggcttgaatctgagctattacactttatgtttcttaataaactccagctggggagaaattaaac

SEQ ID NO: 32995 - DNA, 201 bp, Homo sapiens
caataaaccaaggctaaaacaaaacattatgaaggtagtatgaaatgaaatgaaaatcaatgactactttgccaagggtaagtaaatcactttctagaggrgctgatgctgaaagcctgcagaggttggaaactttttctgggtacgaagcctaaggaggaggccagtgggaatggcaggatcaagtgaaccctctcggtt

SEQ ID NO: 32996 - DNA, 201 bp, Homo sapiens
atgctgccacctttcattgcattgagatgattaagcaactaattatttttctctctgtgtgtgtgtggtttattactttcttgattttaattgatatagakcttctgaattagttggttctggccaaatgcaacaatttatagttgggtacagatgctaagcacttattactaagcaactatggcttcacccgtgtgccag

SEQ ID NO: 32997 - DNA, 201 bp, Homo sapiens
gtggttagaggaaggcaaaagtttcaagccaccagcagcaacattagaagaaatggggaacactctctaattgtggacagttccaattttgtccgtctccrgggagaactaatactgttacgatttctcctgatgcatgtgaaatcagttgctacagcaatgaccagtgtttcttggaacttgctgacagcaacaggcctc

SEQ ID NO: 32998 - DNA, 201 bp, Homo sapiens
ttccagatcacacagctagtaattagaagatctaggtctcgaagccagttttgcccacatttttctccccgccacatgcctcagtcagcccattagcgcartgaggacagagatgatctttcctccttcttgtgcttatctgtgcctaggaaatccatgcaactccatgtcagttttcaggtaggtgaaacatgctcatat

SEQ ID NO: 32999 - DNA, 201 bp, Homo sapiens
ggtacagcccaacaggtgaggagagtctgggttccccacccaggctttgctggcatgggtggaggtggggattctgtggtttttggctggtgttgagcatktattattgaaaagttttctattttgctaggctgcttcattcctgaagagatgagcttttttcggatattttttttttgtctgtgctctttggcatttcca

SEQ ID NO: 33000 - DNA, 201 bp, Homo sapiens
ccaactggattccttctctgcatgagtcatattcatcattcatccagccatttattatattccttctagcccagggttttgcaattctgactatatatccrgatcacctggggagctttttaaaaatataaatgtcaggccccactccccagagattctgatcattggcctagggcgggctccaggcagctatttttaaag

SEQ ID NO: 33001 - DNA, 201 bp, Homo sapiens
ggctccattatgggtaggcagtagtaaaaatccagtcactctactaagcattctcttaccccaccccagtggggtacagcccaacaggtgaggagagtctrggttccccacccaggctttgctggcatgggtggaggtggggattctgtggtttttggctggtgttgagcatttattattgaaaagttttctattttgcta

SEQ ID NO: 33002 - DNA, 201 bp, Homo sapiens
ccaggattgatacattgcagtctcattgcaacccctcatctctgacatcactccctgtggggtccattttatgtgttgactttactggttgtggggtaccyaggcattcggtcacacattgttgtgtgtctgtgaggatgtttctggacaagattaacgttcagattggtagtgtgagtaaagttggttaccttccctaat

SEQ ID NO: 33003 - DNA, 201 bp, Homo sapiens
aggggtggctccattatgggtaggcagtagtaaaaatccagtcactctactaagcattctcttaccccaccccagtggggtacagcccaacaggtgaggasagtctgggttccccacccaggctttgctggcatgggtggaggtggggattctgtggtttttggctggtgttgagcatttattattgaaaagttttctatt

SEQ ID NO: 33004 - DNA, 201 bp, Homo sapiens
cattgcaacccctcatctctgacatcactccctgtggggtccattttatgtgttgactttactggttgtggggtacctaggcattcggtcacacattgttrtgtgtctgtgaggatgtttctggacaagattaacgttcagattggtagtgtgagtaaagttggttaccttccctaatgcgggtgggtttcattctgtcaa

SEQ ID NO: 33005 - DNA, 201 bp, Homo sapiens
gtgggaagggatagaaattccagctctccgtgtggttcttttgatagcgcagtaggggtggctccattatgggtaggcagtagtaaaaatccagtcactcyactaagcattctcttaccccaccccagtggggtacagcccaacaggtgaggagagtctgggttccccacccaggctttgctggcatgggtggaggtgggg

SEQ ID NO: 33006 - DNA, 201 bp, Homo sapiens
acaagattaacgttcagattggtagtgtgagtaaagttggttaccttccctaatgcgggtgggtttcattctgtcaactgatgacctgaataaaacaaaarggctgattcttctctgaataaaagggaactcttcctgcctgactgccttcaaagctgggacattatttttctttcttttttattttctcctgccttcaga

SEQ ID NO: 33007 - DNA, 201 bp, Homo sapiens
aggtttctactggatctccattgatacctgagtggtatcatcattattattgctaattattaagcattattggtgggaagggatagaaattccagctctcygtgtggttcttttgatagcgcagtaggggtggctccattatgggtaggcagtagtaaaaatccagtcactctactaagcattctcttaccccaccccagt

SEQ ID NO: 33008 - DNA, 201 bp, Homo sapiens
gttttttatgtcagccattctgatagatgtctagtggtatgtcattatgcctttgatttacattaccctaatggctagtgatgttgaatatctttctatgkgtttatttgccatccatctgtcttcttcagtcaaatgtctcttcatgtcttctgcccatattcaaatgagatcatttgtatttttgtcgttcagttaatt

SEQ ID NO: 33009 - DNA, 201 bp, Homo sapiens
aatgcgggtgggtttcattctgtcaactgatgacctgaataaaacaaaaaggctgattcttctctgaataaaagggaactcttcctgcctgactgccttcraagctgggacattatttttctttcttttttattttctcctgccttcagactcaaatggaaacattggctcttcttgggttttgagccttggctttcagac

SEQ ID NO: 33010 - DNA, 201 bp, Homo sapiens
tctgaggtttttcatattttatatccctagagacaaaatcaaagaaaatttctttaaaatggggtttagatggacatctctctgaggttccacctcaacastgacacagggcagatgtggctcagcctcaggaagctgaaattctcacccctgtgtttccctcagccagcggaggcctttcgactgtgcccatctagcaga

SEQ ID NO: 33011 - DNA, 201 bp, Homo sapiens
tatgtactgtatcatagtttatttagctattcactgtctaaggacatctgaattatttccaggttgggggcattatgaataaaactgctgtaaacattcaygtacagatgcttttttaaattttttatagagatggggtctcattatgttgcctaggctggtcttgagctcctggcctcaaacagttctcctgccttggcc

SEQ ID NO: 33012 - DNA, 201 bp, Homo sapiens
ccatcaggttatatgtactgtatcatagtttatttagctattcactgtctaaggacatctgaattatttccaggttgggggcattatgaataaaactgctrtaaacattcacgtacagatgcttttttaaattttttatagagatggggtctcattatgttgcctaggctggtcttgagctcctggcctcaaacagttctc

SEQ ID NO: 33013 - DNA, 201 bp, Homo sapiens
gtatcaatggaatcatagagtatataaccattcatgattggtgttccccaaccccactgagcataattgtctagagattcattaagactgttgcatgtatyagtacttcattcctttttattggtgagtagtattccatcaggttatatgtactgtatcatagtttatttagctattcactgtctaaggacatctgaatta

SEQ ID NO: 33014 - DNA, 201 bp, Homo sapiens
ttctcgaccgaaccatcatgcatgaagatttgcaagcccctgtgggagcagaccactttactctaaatcacttgtcagaagcaccgagaggccactacttrgtggaacaatagaaacagtttttatattttgggctttgactggaataaattgtgatcacactgaagttaggtctttctctctactctttgttccttttac

SEQ ID NO: 33015 - DNA, 201 bp, Homo sapiens
gcaacatctcctaagaaaccaatggtctagttgccacaggagtctcagagaaaaaactggcagtagtactcaaatagccttcagactatctgaggtttctygggacttaccagtcctgcctcagatgaagccccaggcatccttggtttgggggtagaaaactaaagggcagcctttctaaagtaacaactttccaagcgc

SEQ ID NO: 33016 - DNA, 201 bp, Homo sapiens
tcttatttctctcttttagtactgtcatctgcattataacggactgtgatgggatcacatgagcaaattttcagctctcaaaggcaaaggacactcctttytaattgcatcaccttctcatcagattgaaaaaaaaaaagcactgaaaaccaattactgaaaaaaaattgacagctagtgttttttaccatccgtcattac

SEQ ID NO: 33017 - DNA, 201 bp, Homo sapiens
cttcagcgggaggtcaggccagcaccccgtgtctgtcgcccttctgtgcttcacagttgccaccaaagcaagttcatggtttctcagcatggaatgtggcrtgtctgtgggtctacctatatgttcctttctctaaatttcaaaaatattttcacccttattggatgtaaagagtcttttttcattttataccatcagatt

SEQ ID NO: 33018 - DNA, 201 bp, Homo sapiens; identical to SEQ ID NO: 7393

SEQ ID NO: 33019 - DNA, 201 bp, Homo sapiens
attttgggatataaaggtaagcatgctttcttttttttcttccaaataacaagtgttccttcattaatttaagcatgagaaaactcatatttgcaaatacraagtatttcattcatacaactcagatgcaaaataacaacatgataaacttcatctctgtatcttaaacttacagctatgagatctgaaaggggggacata

SEQ ID NO: 33020 - DNA, 201 bp, Homo sapiens
cttaaaggacatctggtaaatgccattaggtagcactttactctcccaaagattttattttgtagattaaatcacatctcccctagatacattctgacatataaagtttcttcctccattctgacacccctctttgttctggtaaccagtatcagcattttactaattttctgtggtatttccatcctttcttccatgtat

SEQ ID NO: 33021 - DNA, 201 bp, Homo sapiens
agatacgaaagacaagacacttttatctgtgactccgagatgtcgctggctctgactgtgtaactgatagcatctgtccactgagatccgaagggtcaggyggggagagaacagagccgagcccccgctgtgcagtctcagcgaactcccagcccccacaggaatccccacactcatgtttacgacacatgctgccacctt

SEQ ID NO: 33022 - DNA, 201 bp, Homo sapiens
gccaagagattggaagagtttaccaagaggatgccaaactctctttgggaagctgctcaagataaacacttggatgcctctacttcttgttgctgggcttmtacggggcaggctgcctgtctcccctctgctgggactcttcctggaagcctggcttcatcttctaatttggacaaggtgttgatttgaagccatctatct

SEQ ID NO: 33023 - DNA, 201 bp, Homo sapiens
cacaaaggcactgatacagacaggctttagagaaagacaaactttgtggtaccacttgggtatttgaaagcagcacaattattttttttcagtcacagggrgacaacattttcccattgaactttttggatacgtattttcacacacactgttcccaaaagtcagattctctcctccatcccacccctaacccaaattaca

SEQ ID NO: 33024 - DNA, 201 bp, Homo sapiens
acctcaacactgacacagggcagatgtggctcagcctcaggaagctgaaattctcacccctgtgtttccctcagccagcggaggcctttcgactgtgcccrtctagcagaagcagctgtgagatcagggaacacaggaccttgctaacagaccccaggcttgctgagtggtccagttgcaggaagagcagcctagggagtg

SEQ ID NO: 33025 - DNA, 201 bp, Homo sapiens
tttagttttgagacagagtcttgctctgtcattcaggctagagtgcagtggtgcaatcgtagctcactgtaaccttgaattcctgggctcaagcaatcctyctgcctcagcctctcaagtagctgggcctacgggtatgtgccactatgtccagctaatttttaaattttttgtagagacagtgtcttactatcttgcccc

SEQ ID NO: 33026 - DNA, 201 bp, Homo sapiens
atcacaaccagaatattgacactgacaaagtcaagatacaaaaaatgcctgttatcacaaagattccacatattttcttcccctttcctccacctacttcytcatcactggcaaccactaatatgttctccatttctatagttttgtcatttcaagaatgttgtatcaatggaatcatagagtatataaccattcatgatt

SEQ ID NO: 33027 - DNA, 201 bp, Homo sapiens
cctgggctcaagcaatcctcctgcctcagcctctcaagtagctgggcctacgggtatgtgccactatgtccagctaatttttaaattttttgtagagacartgtcttactatcttgccccagctggtcttgaactcctgggcttaagcaatcctctagcctcagcctcccaaaatgctgagattacaggcgtgagccactg

SEQ ID NO: 33028 - DNA, 201 bp, Homo sapiens
ctttaccaatttgcaagtcacccctgaagcttcccatttgaaaattaaattttattttggaaatcattgtaaattcacatgcagttgcaagaaataatatrgagttcctatgtaccccttacccagttcctcccagtggtaacatcttacaaaactgtagtacagtatcacaaccagaatattgacactgacaaagtcaag

SEQ ID NO: 33029 - DNA, 201 bp, Homo sapiens
gtcacttctttgctcctctgacaaaagcgtcaatgaggggagactttgaagggttaattaagtgagcattttcaagctttaatcaggctttgagggtcagygtttcttggcctcagtatgcagagctaattgggacgtaactatagttacaatttggcagagttcattttctgggacatgaggcaccagtatatttttatt

SEQ ID NO: 33030 - DNA, 201 bp, Homo sapiens
ttttgcttactctctttaccaatttgcaagtcacccctgaagcttcccatttgaaaattaaattttattttggaaatcattgtaaattcacatgcagttgyaagaaataatatggagttcctatgtaccccttacccagttcctcccagtggtaacatcttacaaaactgtagtacagtatcacaaccagaatattgacac

SEQ ID NO: 33031 - DNA, 201 bp, Homo sapiens
gcctctcagtgcccctgcctcatgccttgccatcaccgttccctccttccaaacccagcctccaaagagataaacacatggaactttaaattcatggctcyagttaaattattgagctgtttcttgccaagaggtttagagaaactaatgtctaaaagcatagaggactactgaggcttctgaaaaatcacagcacggata

SEQ ID NO: 33032 - DNA, 201 bp, Homo sapiens
cctcccgggttcaagtgattctcctgcctcagcctcccaagtagctaggattacaggcatgtgccaccatgctcagctaattttgtatttttagtagagtygaggtttcaccatgttggtcaggctggtctcaaactcctgacctcaggtacctcaggtgatccacccgcctcggcctcccaaagtgctaggattacaggt

SEQ ID NO: 33033 - DNA, 201 bp, Homo sapiens
gggaaagggtcattcttagtcctgcatatcaaagtgatgtgacgtttactacctatccataatgtgttggacaccatggacaataaagaggagagacgtgrccttttgcctctgggaatttcacatgtaataaaaaatagatttttcaaacagcggtgtatttgcataaaagaaaaatatcagccaacctacaaactgcct

SEQ ID NO: 33034 - DNA, 201 bp, Homo sapiens
gaatattccaagtgaaatattaggaaataactcctgcaatccttccttgctttgcaggtgattgcacagttttaaaaggtgcttgaaatctcttggccacmctcacaaatgtattactggaccttaatcagcagttctagagaagcagcacctgtttgctgtggtctgcaggctgggtgtctgagaacaagcctgtttggg

SEQ ID NO: 33035 - DNA, 201 bp, Homo sapiens
ttcattaatctgtttacatttatcatatgaaatttttcttggtatttctcatgctaatgaaaaacatattggacaaaaaacataaacccaccagttaccawcagaggaaaatcactttagctgtgccccttcttaagaagatggcccattgggagctgtgactccctcatcttttctggttagttttcaagtattagaatc

SEQ ID NO: 33036 - DNA, 201 bp, Homo sapiens
aaataatgttagtaaactgcaaagcttcctgcaaatgtttgccattgccttggctctccagtgtatgtaatgctggtgacataaataatagcttcattccrtgtttgcactgatgcattttgaatgtaacctttgaaaattaggatcctcttgtctttgggacagtagttttattaggtgcagagaagcatttgaatattc

SEQ ID NO: 33037 - DNA, 201 bp, Homo sapiens
gaggaaaacagggctggacacggtaggaagttctgcaggctttggggttggggataaggccatcttgttcagttctcaagggccagggacttaggaataamagagtgagcagctccttgcatacttataattccttactttgtaaaaaactgtatttttttcctgttatattgtaagttgaatgaggacagagatggtgtc

SEQ ID NO: 33038 - DNA, 201 bp, Homo sapiens
tcacaatgatacaaggaaaaggcagcagtaactgaggatagaaaatctaggtaggagccctcgttctgcggtttgctagttcctgacttcgagttgtctgktcactttagtgagggggtagttgccttatctgtaaaatggaaacggcattaattcccacatcacacagaactgttgctgcaatcaaatgaaataatgtta

SEQ ID NO: 33039 - DNA, 201 bp, Homo sapiens
aacaagagaatcaaactcagaagtctgcaaaggttctggcagaaatccagactgcattcttattcccaaggcctgaagatgccctgtaatctctaatattygaaataacctttctaacatgtcgttctcattctgtgaaacgggaaaatataaaagtaaaattattgctgacatgtaagatctcaaaccttcaacctaaga

SEQ ID NO: 33040 - DNA, 201 bp, Homo sapiens; identical to SEQ ID NO: 7387

SEQ ID NO: 33041 - DNA, 201 bp, Homo sapiens
actgagctctccaaggcagagccttggtttctgcctctgtgtccccacatcctgatgcaggcctgacacagagtaggtccaacatacttgttgagccagtrcattgacgagtgacttattgaccagctgaggccaggtcagcagaaacctcagtgcctgagatgacaacatcagaagtcctcttgaaaagccagtttggta

SEQ ID NO: 33042 - DNA, 201 bp, Homo sapiens
atgaaaaatgctataccaagatgagatgtgattatgttatggctctcggcttagcttggggttcatttttctttaagaagaggaggctgtggaacaagagrtggggtggtgagttcttaaactcaccaggtcattattactgcaagctgtaaatcacatagagatgtctttaactcagtaacagttatttatggtactact

SEQ ID NO: 33043 - DNA, 201 bp, Homo sapiens
aaaattcatgatacacccaaatttttccctaatgtatcaattaggttggaatgaatttggatacagcagaactgattgcagtcttacccccttagtttttrtataaagaaattgagacccagtcagactaaatgaagttttgtagccaggttagtggctgagctgaggatggattcctagacatcggttccttttctagcg

SEQ ID NO: 33044 - DNA, 201 bp, Homo sapiens
ccaccagataccctaaatcatcactcttaagtgcaaagttctacagatccctaaagcaggggcacagtgtggccagactctttgctaaagcatggaaaaagtggcctttactccagttcccaataaattccttatttgcatctgagacctcctcagcctggccttcactgtccacatcactatcagcattttggtcacaac

SEQ ID NO: 33045 - DNA, 201 bp, Homo sapiens
ttagtgagagcttaccatatgccaggcactgtgctgtactccccgtttcatctcaattaattcttactatagcgctataagaaagtatcccattttatcartgaggaaactgaggcttaaggagattgtataaattgcccaaagttataggcccgtagatggtagaagtttgaaaccacatttgctttcagaacccaagct

SEQ ID NO: 33046 - DNA, 201 bp, Homo sapiens
aattggcagaacacagtaacttaaaaaataaatctgaaagtcagtcctggagagcccatctttgggtcctggctttgattggaaagagttatggttttgtyggggtaatagcagctgatctttcgtcctcccacagaatcctgccagagccaacacttggaagcacacagctaatgagaggatttcttccaaggttcttaa

SEQ ID NO: 33047 - DNA, 201 bp, Homo sapiens
agtgcttcctaagcacccagctggtggtgtccttctgatccaggccctgtctttcttgggccgctcatcagcttttgtctctttggatggcaagtgctccmagctcaggctctgaatagacaaaggattaaaagctttggaaataaaaaataggtcttcaaagctgccagcaatggccaaggattccctccagtgcagcag

SEQ ID NO: 33048 - DNA, 201 bp, Homo sapiens
agcagtaagtcacagcacacgggctgaaattcaggcaaagcaggaaacagagcacggatagtctgcgaaaggaaggagacaaactggagctgttgggagarggcggagggccacggaacttctagtgtcaggaggaaaagattgaaggaagcacgtaactgctctgaaggtcctggaagtctctaactggggttggtctat

SEQ ID NO: 33049 - DNA, 201 bp, Homo sapiens
ctgggtcgcacagggcctgtaaattgcacagtaatggctgggtccacagcaggaataaacatgtgctttgaattttccaaatgagtcagacgcacgctgcragataaatgctgatagcaagcagatgtgacatgtgcttttcaagaggatggatggggggaattggggattggcatcttctacactctttgagtcaatgga

SEQ ID NO: 33050 - DNA, 201 bp, Homo sapiens
agtaagtcacagcacacgggctgaaattcaggcaaagcaggaaacagagcacggatagtctgcgaaaggaaggagacaaactggagctgttgggagaaggyggagggccacggaacttctagtgtcaggaggaaaagattgaaggaagcacgtaactgctctgaaggtcctggaagtctctaactggggttggtctatgta

SEQ ID NO: 33051 - DNA, 201 bp, Homo sapiens
cacagcacacgggctgaaattcaggcaaagcaggaaacagagcacggatagtctgcgaaaggaaggagacaaactggagctgttgggagaaggcggagggycacggaacttctagtgtcaggaggaaaagattgaaggaagcacgtaactgctctgaaggtcctggaagtctctaactggggttggtctatgtaaccattt

SEQ ID NO: 33052 - DNA, 201 bp, Homo sapiens
tccccagttctgttgagtgtttcagtcacctccagcagccagtgtgggatcagttcttcactagatccctggctgctctttactgttttcagcttgttttwtctttttgatgaaacaatccccaaaatgaatttttttgggggggtgtcaacacttgtaaaatgtcaggtttgcattgttatctgttagattttttggttt

SEQ ID NO: 33053 - DNA, 201 bp, Homo sapiens
caggcaaagcaggaaacagagcacggatagtctgcgaaaggaaggagacaaactggagctgttgggagaaggcggagggccacggaacttctagtgtcagraggaaaagattgaaggaagcacgtaactgctctgaaggtcctggaagtctctaactggggttggtctatgtaaccattttttaaaaattttttatttgtt

SEQ ID NO: 33054 - DNA, 201 bp, Homo sapiens
tgctgcaacatgggtgaaccttaaaactcttatgctgagtgaaagaagccaggcacaaaaggccacatattatgattccatttatatgaagtgttcagaayaggcaaatctgtagggacaaaaagtagattaggctgggcgcagtgactcatgcctgtaatccctacactttgggaggctgaggcaggcagatcacttgag

SEQ ID NO: 33055 - DNA, 201 bp, Homo sapiens
ctctaactggggttggtctatgtaaccattttttaaaaattttttatttgttttttgttttttgagacaaggtctcaatctgtcgcccaggctggagtgcrgtggtgcgatctcagctcactgcaacctccacctcccgggttcaagtgattctcctgcctcagcctccctagtagctgggactacaggcaactgccactg

SEQ ID NO: 33056 - DNA, 201 bp, Homo sapiens
tctctacaaaaaataaaaaattagccgggtgtggttgtgcacacctgtaatcccagctactcaggaagctgaggcaaaggaatcacttgagcccaggtggygaaggttgcagtgagccaagattgcaccactgcaatccagcctgagtgacaggagtaaaaccttgtctcaaaaaaaaaaaaaaaaaaagtggattagtgg

SEQ ID NO: 33057 - DNA, 201 bp, Homo sapiens
aaggtagtatgaaatgaaatgaaaatcaatgactactttgccaagggtaagtaaatcactttctagaggagctgatgctgaaagcctgcagaggttggaarctttttctgggtacgaagcctaaggaggaggccagtgggaatggcaggatcaagtgaaccctctcggtttcagcctgggcttcttcagaacctgccaccc

SEQ ID NO: 33058 - DNA, 201 bp, Homo sapiens
cccatcagaatttcataatttggcataattggggctcaaacaaatgaggccttgtgttgcaaatataggcaacatctgcaagttaccaggagcaaagttgygaaatggtagctgtaacctaggagagatggataatgatttttccaggatgctctgaaatccacactaaatggaatctgctggtgcatactttatgccaca

SEQ ID NO: 33059 - DNA, 201 bp, Homo sapiens
ctgccctggtcagatctgattactttattatatgttcaccccagagtgccaaacttcatgtgggaaaaccattttcaacaggaagaaatgaactgtgaatrtcctaagaagagggcaacaagtcatatttgaccttcgtttaaaaataatacgtaaggaaaaatttcttaataaatagacatagcttaaaacatgaaacgt

SEQ ID NO: 33060 - DNA, 201 bp, Homo sapiens
accccagagtgccaaacttcatgtgggaaaaccattttcaacaggaagaaatgaactgtgaatatcctaagaagagggcaacaagtcatatttgaccttcrtttaaaaataatacgtaaggaaaaatttcttaataaatagacatagcttaaaacatgaaacgtaaaaaaccaagcatgtagtagtttcctagatctggaa

SEQ ID NO: 33061 - DNA, 201 bp, Homo sapiens
cctgagataatgcccatctatgttgtataacccaggagagacactgcagacccaaaaaggaaagaagagaggatgcacatagcagactgttgggggaggtwggtgactgggtcatccttcagctaatgtgtgaatattacttaattctagagagttggccctgggcttctcacgtgcctttttgttgcaggtcaatgttca

SEQ ID NO: 33062 - DNA, 201 bp, Homo sapiens
aagataatatggaaatatcacgtcaatcccatttgtttgcagatacatcttttttaaaataaaagttgttttcacattggggttagttttcttgttttcgygcctatattttaacctattttaaccttttctctcccctccctacctcacccccacctccaaaaaattaaactctttctccataaacaaagctgagagtgt

SEQ ID NO: 33063 - DNA, 201 bp, Homo sapiens
aaataaaagaggtttaattggctcatggttgtaccggctgtacaggaagcatggcaccgacaacactcggctcctggagaggcctcagggagcttttacgrtcatggcagaaggtgaagggagagtaggcacgtcatatggtgaaagcaggagcaagatagagagtggggaggagactccacacacttttaaatgaccaga

SEQ ID NO: 33064 - DNA, 201 bp, Homo sapiens
taccggctgtacaggaagcatggcaccgacaacactcggctcctggagaggcctcagggagcttttacgatcatggcagaaggtgaagggagagtaggcaygtcatatggtgaaagcaggagcaagatagagagtggggaggagactccacacacttttaaatgaccagatctcatgagaactcactatcaagaagaccaa

SEQ ID NO: 33065 - DNA, 201 bp, Homo sapiens
tcatgagaactcactatcaagaagaccaagaagaacaataacaccaagtcattcagagatccacccccatgatccaaacacctcctaccaggccccacctycaccactggggactacatttcaacatgagatttgggtggggacaaatatcctaactatatcagcacgttcctttattctttgctttctccttcccatgct

SEQ ID NO: 33066 - DNA, 201 bp, Homo sapiens
tgggaggctgaggcacaaaaactgcttgaacctgggaggcggaggttacagtgagctgagctcgcgccactgcactccagactgggtgacagagcaatacwccatctcaaaaataaataaaataataaataaataaatagagaagccaaacaggagaagtgaaggaattcatgatgttgctaatagttggtgcgtgtgtgt

SEQ ID NO: 33067 - DNA, 201 bp, Homo sapiens
ccctcaggtggaaacagcatggaatgttctaggaatagaactaagccagctgtagctacaatagagtggcggggagatggaggagatgacgtcaagaaatrgggctagaatatgttgagaccagggggcccatggggagggctttggagtctatggaaagccttcagagggctcaactagagaacggatatgtttcataac

SEQ ID NO: 33068 - DNA, 201 bp, Homo sapiens
gcaggagtaaaatcagaagcatctgtgatcgtcaagtatgattttgtcaacatgtgtctttcattgaaaataaaactcaaaattctgagtataggaagccstttctagccagtccaaatggctcaacatttatttgttcagctatttattgagtatctgtcatatgccagactctgttttaggctctggaaatagttgtag

SEQ ID NO: 33069 - DNA, 201 bp, Homo sapiens
accacattatagcatcacaatgcctttcatttctatttatctcccagtgtaactttccgcttagccacaatgcggccatggagcgggaagcagtgatcttyagccttgtttctctctggccttcttgaaggatgctgtgggtttgtgctaataaaggtggctctactggtgaggggatgggaatgtttctggcaggagtaa

SEQ ID NO: 33070 - DNA, 201 bp, Homo sapiens
attgagcttccttcagatttgacctttggtttctttcagccatgaggaaatggatgtatcaatttttccagatttggagattttgaacaataactccaatstgaaaataccaaaagtcagctaaatatccctcaagtacatactatgttttagatactgtgggaaaatcagaaaggtatgtgtttttaagagcttacaaag

SEQ ID NO: 33071 - DNA, 201 bp, Homo sapiens
attcagagatccacccccatgatccaaacacctcctaccaggccccacctccaccactggggactacatttcaacatgagatttgggtggggacaaatatsctaactatatcagcacgttcctttattctttgctttctccttcccatgctaacagaacccttctccttaggctccagccacatggtagatttcctccgat

SEQ ID NO: 33072 - DNA, 201 bp, Homo sapiens
gtgaaaccccgtctctactaaaaaatacaaaaaattagccaggcatggtggcgggcacctgtagtcccagctactcaggaggttgaggcaggagaatggcrtgaacccgggaggcggagcttacagtgagctgagattgtgccactgcactccagcctgggtgacagagtgaaactctgtctcaaaaaaaaaaaaaaaaag

SEQ ID NO: 33073 - DNA, 201 bp, Homo sapiens
cccacttgagccggtttgcacttcttactttgggatccttaatacgctggccatacatagctcttagtctttggttctgaagtctagtccttaagaactgagtattgaaaagtcctctcagtaggattagcattcttctgaggctaagactacagccaggaagttgaaaaccccttttgaagggcacggtgacttaaccct

SEQ ID NO: 33074 - DNA, 201 bp, Homo sapiens
tgcacatgtatcccagaacttaaagtaaaacactggctaacatggtgaaaccccgtctctactaaaaaatacaaaaaattagccaggcatggtggcgggcmcctgtagtcccagctactcaggaggttgaggcaggagaatggcatgaacccgggaggcggagcttacagtgagctgagattgtgccactgcactccagcc

SEQ ID NO: 33075 - DNA, 201 bp, Homo sapiens
aagtctttgaatatactaaaaaccattgaattgtatactttaaatgggcatattgtacggtgtggggattataccttgataaactgttgtgtttaaaaacrtaacagataaccgtcagatctgccccatcagaatttcataatttggcataattggggctcaaacaaatgaggccttgtgttgcaaatataggcaacatct

SEQ ID NO: 33076 - DNA, 201 bp, Homo sapiens
catgtaggtcctgaaatatgttgccagttctgtctcactgaggactcagccgtagccagaggctaagtcctttgtatcatgatcctgtcccacttgagccrgtttgcacttcttactttgggatccttaatacgctggccatacatagctcttagtctttggttctgaagtctagtccttaagaactgagtattgaaaagt

SEQ ID NO: 33077 - DNA, 201 bp, Homo sapiens
ggtatgagaacaaatggcaagacatccctcttccacgttgacttgccttcaggtgaatctgaggctgcccagtgacctggcaaaattggctatggagataktgtagacattttagatttgaaaagataacttttctcttacttttacccaattaggaccatttcctcaactctgcacttaggttacctaatggaggtacag

SEQ ID NO: 33078 - DNA, 201 bp, Homo sapiens
catgcatgtaatcccggctgctaaagaggccaaggagggaggatagcttgagtccaggagttcgagaccagcctggacaacacagggagacctctcccagmccccagtccccatctctacagaaaataaaaaaattagcctggaatggtggagcatgtccgtggtcccagctacttgaaaggctgaggtgggaagatcact

SEQ ID NO: 33079 - DNA, 201 bp, Homo sapiens
atttccatttcatgcttaattttctgatggtttttgctatcttcattttaccttaaagaagataaataaataacccaaccaaccaggaatacatttggggmaaaaggaagatgcccagggttatatattggagttcttccaattccagagcagcagaagaaagcctcttccaatcctttgtttgtgccataggtatgagaa

SEQ ID NO: 33080 - DNA, 201 bp, Homo sapiens
tgaaaggctgaggtgggaagatcacttgagcctgggaggtcaaggctgcaatgaaccatgatcgtgccactgcactcagcctgggtgacagagcaagaccytgtctcaaaaagaagttatctgagtacctcctgtgcaaaatgagaagttcacgaggtgcagtggtggaccagaaatgaaactggggaaaatggcttcacg

SEQ ID NO: 33081 - DNA, 201 bp, Homo sapiens
gaacttatataaatttccaattctgcaaacttactgtaactgttggaaaactacctatatcctgccagtaagatacgccgtctcctcaatcgtaagcactmaacagtcaaggatccagcttttgttggcagtcactttgaaaaatgcgcaatgaaggaggcttgttttcattctactccgcttggtatagagtgctgcaaa

SEQ ID NO: 33082 - DNA, 201 bp, Homo sapiens
tagaagcagcagtatgtgtagagagcaatgggcagaaatacacagaactcaacagctgaaccttccttactgagggggctaagtctgagcttggtgctacrcatcagcatgggttttctcccttgggcctcccaacagctccactgggccaggcttcgctgtttacccaaggtcatgccagtcaagtcccagaggcaggct

SEQ ID NO: 33083 - DNA, 201 bp, Homo sapiens
agggagggggagcattaggacaaatacctaatgcatgcagggcctaaaacctagatgatgggttgatgggtgcagcaaaccaccatggcacatgtataccyatgtaacaaacctgtacattctgcacatgtatcccagaacttaaagtaaaacactggctaacatggtgaaaccccgtctctactaaaaaatacaaaaaat

SEQ ID NO: 33084 - DNA, 201 bp, Homo sapiens
tttacagagatagggtcttgctatgttgcccaggctggtcttgaacttctgggctcaagtaatcctcctgcttcggcctcccaaagtgctgggattacagrtatgagacactgcgcctggcccaaagatgatttttatagtaaaaagttaaatatcataacaatctggcagttcctcaaaattgagtataaaattttcata

SEQ ID NO: 33085 - DNA, 201 bp, Homo sapiens
catttttttagagcacacctgggcttcattgtccagtatccagagattatccagattagaatttttcaggaccctttccatctcctagatccccccggccrctgtcttcttgcggtctccttcctctctagtgacaccagcagacctgcactggagatacaaatggagatgaaagggttaaccatttatactaagagaaag

SEQ ID NO: 33086 - DNA, 201 bp, Homo sapiens
tgggctgctcatatattatgaaaagccttagtagagaaaaattacatttcaagttaatttgtttttatataacagagtctgggtctaagctttccttcacmacatacccattgagggttttaggaagtcaacatgtttacactgtatcttaagtcaagggtcctgtttttatacagggtttgccaaaccaagtttactaca

SEQ ID NO: 33087 - DNA, 201 bp, Homo sapiens
agtcaagggtcctgtttttatacagggtttgccaaaccaagtttactacagtggtgttctgccagcacaaagattacaggatcagactttagcgaacgctygtttgccagagtcatgttttatctattcaaccccaaccaccctgattcattttggaaagtctactctgtttatcccacgatgatgacaaagtggttaaaa

SEQ ID NO: 33088 - DNA, 201 bp, Homo sapiens
gtaacctatgtatgtagcctataaatttctaaaaagtctatttctttggaactatgtgtgctatgagatgacagatcaaagctttaaatcctgttttcccragtctagtttattagtttgtcagagaaatattaggaatttttttacacaatttgtagctcagtttgttaaatgaactgatagatgcgacaaagcttcgaa

SEQ ID NO: 33089 - DNA, 201 bp, Homo sapiens
ccgacattagagctatgatagaaaggagactatggaaacagacttgaaaaaaaaaatccattttaagtggagagtcatgggacaggtcacagtgggcaggkgaaagaattttagagaaatgaaaatgctgtgcaggtggtcaccctgaagctaatttaacttgggtcatctgtgatctgttccagctgtgaacatgtgcct

SEQ ID NO: 33090 - DNA, 201 bp, Homo sapiens
aagcaccgtgtctggaaacagacaatgggagatctgacttctaccgatcgtagggaatagtgaagtatttcaagataggaatgagtcatacctttatacartttttgccatctgctctctattaacatgggctattagtaaaacatatttggtttatatcaccaggcaaggagattgcattcatcttgtttttctatcaaa

SEQ ID NO: 33091 - DNA, 201 bp, Homo sapiens
tagagaaatgaaaatgctgtgcaggtggtcaccctgaagctaatttaacttgggtcatctgtgatctgttccagctgtgaacatgtgcctggtggcccagygtcccagatgttctttctcggtctttatgttgtatagcccataaaattaaaacgggattggagtttaattctaggccttcacagtcctatcatcagtgtt

SEQ ID NO: 33092 - DNA, 201 bp, Homo sapiens
ctgtcccaaagcaagattcgctccctctgcattctgatgaaccagcctagtgagtttggttcatggtagcaaagatcacaagcgcgcagggagatgccgcrttatgcattactctgcaaaacagctgctcctttctctgaataagagcatgtactgatttttaaactgcattttcattccaggataaatgacatgcttcaa

SEQ ID NO: 33093 - DNA, 201 bp, Homo sapiens
tttctgtgaagacaagtcttcacatcttgttttcataaacactagagaggaacaggtatgcctgccacatacttggttggggaaaactataatttaaggayagtttacatctggaaattgcaggcttgttggggattcagagatatcacgaattcctagtcacgtaaacatgggaggcaacattacagagatttgggtttc

SEQ ID NO: 33094 - DNA, 201 bp, Homo sapiens; identical to SEQ ID NO: 7418

SEQ ID NO: 33095 - DNA, 201 bp, Homo sapiens
gtcaaagtcaggaaagttgttgtgataacaggcaaggctgaaaggatgcatattccaagctgagcaaatgttgtgagcatggcctcgaggtggggcacttytgggaatggcaagtggtttggttcaatggaaggatatgtggctagccaggatgagaaatggagcaggaaaaagtggtttaggctaaaatcagaggggtgc

SEQ ID NO: 33096 - DNA, 201 bp, Homo sapiens
caagtggtttggttcaatggaaggatatgtggctagccaggatgagaaatggagcaggaaaaagtggtttaggctaaaatcagaggggtgcattgggaatratgttttcattaaaagctatttgaaggagtctgtaaggaaaaaaagagccactgtatgttcagctggggagagtgagcttcaaatatgtgcttttgggaa

SEQ ID NO: 33097 - DNA, 201 bp, Homo sapiens
tactaagagaaagctggaagtccttgcaaaaactatgtcatgggattttctatacactcccaataaatacagcctcttcagtcactatcccccacccgccyccaccaccctttaacaagcgttgtctgaggatcaagccaaaaactgggggctgttagaagctgggctagtcccaagcaaactgtgaagcagatgaaaata

SEQ ID NO: 33098 - DNA, 201 bp, Homo sapiens
aaaaaaaaaaaattttttttttttttttttacagagatagggtcttgctatgttgcccaggctggtcttgaacttctgggctcaagtaatcctcctgcttyggcctcccaaagtgctgggattacagatatgagacactgcgcctggcccaaagatgatttttatagtaaaaagttaaatatcataacaatctggcagttc

SEQ ID NO: 33099 - DNA, 201 bp, Homo sapiens
ctggtttgacaaggaaggattccagctatcagggagtggctgggcaggggcacagagctgcgcgctacacagtgatgagaacccttccaaaaagcctctcktctggcctgctttcctggcccttgccacacacacaaggtctgtggtgctggtggtgcccattccagtagtctgaagttcattccatcaatagcatcttac

SEQ ID NO: 33100 - DNA, 201 bp, Homo sapiens
ggtgaatttccagaagtggcaggctgctcccctctccctctacctccttgagaaacagaggaagttcatgctgccacaggggaagtggaagggatgtccarttgcctctgaggaagtcatatcctgctcaagaagcaagatctcttcccatgcgggaaggtgccactgacacagtatctcttagatggcataatcatagat

SEQ ID NO: 33101 - DNA, 201 bp, Homo sapiens
attttcttgtggcatttacacctctttcagttacctgctaatgcctaaaaaaccatcccgaaaccctgtagcttagaacagcagctggttttttgctcacrattctgcaattcagcctggactggacacgtggctgccctcaggagcctggagaatcactgggggtggccggaatggctgagggctccctggctggtctca

SEQ ID NO: 33102 - DNA, 201 bp, Homo sapiens
atgtgaaaatgtttgcaattaccaggctctgagactgcagggatttggagaaaaagcacatcagttttgttttgtgaccaggactttttgagttgttgcasaaatgctgtttgtttgcagaaactcaggagccctgtacttcttactcattacctgctgccactctcccaaacacaccggtgttgggatcctccccttccc

SEQ ID NO: 33103 - DNA, 201 bp, Homo sapiens
acaagcaacagggaatgtggaagatctgtaaagggatgaaaaacccaactcactcgtttgtactgtggcttttctcaaagaaaaataaaagcaccgtgtckggaaacagacaatgggagatctgacttctaccgatcgtagggaatagtgaagtatttcaagataggaatgagtcatacctttatacactttttgccatct

SEQ ID NO: 33104 - DNA, 201 bp, Homo sapiens
ttttaacaagaaacattgggtgatgggtgacattttccccacttctttctttccgtaagaggaatctacattttaagtctcaaatgtaaacgtgctctggytccaatttgtcggctgactctaatcgcctcggaacttatataaactctaggtgagtaatttccccaagtacagtaccctcttggaatgcatgagctgtga

SEQ ID NO: 33105 - DNA, 201 bp, Homo sapiens
aacattgggtgatgggtgacattttccccacttctttctttccgtaagaggaatctacattttaagtctcaaatgtaaacgtgctctggctccaatttgtyggctgactctaatcgcctcggaacttatataaactctaggtgagtaatttccccaagtacagtaccctcttggaatgcatgagctgtgaactcagattaa

SEQ ID NO: 33106 - DNA, 201 bp, Homo sapiens
aaagaaaccaaaggagccgttgcctctgctatcatttttcttctttttttttcggagacggagtctcactttgtggcccaggctggagtgcagtgacacartctcggctcactgcaacctccccctcccaggttcaagcaattctcctgcctcatcctcccgagtagctgggactacaggcacacaccggcatgcctggct

SEQ ID NO: 33107 - DNA, 201 bp, Homo sapiens
gaatgatccttagcccattgaactggtttaatggaacatacagcaacaacagaaagctaagtcccagacagtagtttctgctttggaagagtgtaactcamgtttgtcatcctgcctctttttcagaaatagctcgaaggaggagaggtatggcccatctttttgcttttatagcaaatcaacatttgggcagcacgatgg

SEQ ID NO: 33108 - DNA, 201 bp, Homo sapiens
ttcttaggcttattcctatgtcccagcctatctgtgcttatccatttggtaaggtttatgatggatttgttctcctgagttcaacaaaatgtttttattcmttctgcaaagttggtaattagtccatgacaaaccattgagcccctagaatcaaagacacctggaatcacagttacacaggaccttaaaggtcatggagtc

SEQ ID NO: 33109 - DNA, 201 bp, Homo sapiens
tccttcctaacaatcatcacactgtgcaaaattatgccatgaaagccacagacttacaggaaaggtggagtaacgggcacaatactccaaaacttcctcartgacacatgtgaaaaaagagacaagaacctaataaaactgtcagcacagtttaatgcatgttaactggctaagaaatacataaatacaaaataaatatgg

SEQ ID NO: 33110 - DNA, 201 bp, Homo sapiens
tggctgtttttgaaaagaattctgaaagtgattgaccgctaccaaagatgaagattgtagtttttctcctgatatgattatattcttgatatattcttgckgtaggggacaaaaagtgatcaatagctttatgcttagtaaaatcagagaggacaggacttgcaatttaatggttttacctttatgtttactacatattag

SEQ ID NO: 33111 - DNA, 201 bp, Homo sapiens
aaatgtaggattctcatcaaggtctttgccattccaaagctctttctgctctagaaactcgtgtccccatttaggcctaagcagggtgggagctccccaargacagagaagcaaaggaagaacaaacatctgcagttcacactagatagtccagtcatgggttttttaaggaagcaaaatgatcttttgaaaggaaactca

SEQ ID NO: 33112 - DNA, 201 bp, Homo sapiens
gagtcgttcatgtctgcctcctgcctcatcagcctacaagcagaaaacaagcaacagggaatgtggaagatctgtaaagggatgaaaaacccaactcactygtttgtactgtggcttttctcaaagaaaaataaaagcaccgtgtctggaaacagacaatgggagatctgacttctaccgatcgtagggaatagtgaagta

SEQ ID NO: 33113 - DNA, 201 bp, Homo sapiens
ttcctaacaatcatcacactgtgcaaaattatgccatgaaagccacagacttacaggaaaggtggagtaacgggcacaatactccaaaacttcctcaatgrcacatgtgaaaaaagagacaagaacctaataaaactgtcagcacagtttaatgcatgttaactggctaagaaatacataaatacaaaataaatatggcac

SEQ ID NO: 33114 - DNA, 201 bp, Homo sapiens
cacttgggtatttgaaagcagcacaattattttttttcagtcacagggggacaacattttcccattgaactttttggatacgtattttcacacacactgtkcccaaaagtcagattctctcctccatcccacccctaacccaaattacaatttaatttgactgctggctgtttttgaaaagaattctgaaagtgattgacc

SEQ ID NO: 33115 - DNA, 201 bp, Homo sapiens
tgtcagcacagtttaatgcatgttaactggctaagaaatacataaatacaaaataaatatggcactttaccttgaaaggtttgcttggggaggtgagcgcyggaagggttgcagcttgtgagattttgtgaaggggtgcaaggaaggttgtccaaaatcagatagacagttataatatcagatgtggatgggtgtggctcg

SEQ ID NO: 33116 - DNA, 201 bp, Homo sapiens
tttggatttaacttctgatatggtttggctctgtgtccccacccaaatctcatcttgaattataatccccataatccccacatgtcaagggtgggaccagstggaggtaattgaatcatgggggcggtttccccatgctgttcttgtgataatgagtgcatctcacgagatctggtggttttataagcatctggcatttcc

SEQ ID NO: 33117 - DNA, 201 bp, Homo sapiens
cgggagtgtccaccatgctctgtttcctctttcgctgtattttataaattcctgctatttgctgatgataatattgttttagtacttaaatattttaacgwaggtctcagagctagatccttaatgtagataccagaacttaatatttggaatccaataaatgtttgttagttaatgaatgaattaattaatgaaggtggt

SEQ ID NO: 33118 - DNA, 201 bp, Homo sapiens
tccctttgccacaaagaaaatgcagtgcttctggcgaaccacatctttgtgcagtcatagacatgtttatgtaactcagaagaacttatataaatttccarttctgcaaacttactgtaactgttggaaaactacctatatcctgccagtaagatacgccgtctcctcaatcgtaagcactaaacagtcaaggatccagct

SEQ ID NO: 33119 - DNA, 201 bp, Homo sapiens
ttaaacttaattttcaaaaaaagacaactttcagtcacctaattacatgcaatgcagcttcttttcagaagtaataccttatttaaagtaattcttttatratgaactcccaaagacctgtacctaaacatagcagctgaatataatttctaattaatgacttttttaaggcataatagcagatggttgagccatccatgg

SEQ ID NO: 33120 - DNA, 201 bp, Homo sapiens; identical to SEQ ID NO: 7400

SEQ ID NO: 33121 - DNA, 201 bp, Homo sapiens
aacaaggactttttctgttttaatcactgccatattcccagtgcatagaacaaggcaaggcctgtggtaaacactgaatcaatattgggtagaaaaagctsttttttttttttttgagacggagtttcactctttttgcccaggctgaagtgcagtgacaggatctcagctcacgcaacctccacctcttgggttcaagtg

SEQ ID NO: 33122 - DNA, 201 bp, Homo sapiens; identical to SEQ ID NO: 7385

SEQ ID NO: 33123 - DNA, 201 bp, Homo sapiens
ggtaaaaaggagagttggatatgaagaatctcagactgcagtgcagctctgagaaagtctcagccaggtacatgggtgcccgggagcagagattgcctgtyagaagggccccatgagggcagaagtgacctggctctcgtgtccctgccatgatcagtcattggctgtaagcagactccgcccggactgtgtggcctcggc

SEQ ID NO: 33124 - DNA, 201 bp, Homo sapiens
taatttgttcagggaattccaaaggagtctattttcttttcttctgttgttttccttcttcttcttctttttttttttttttttgtcacagggcctcactstgtcacccaggctggagtgcagtggtgccatcactgcagccttgacttctgggcttaggcgattctctcacctcagcctcccaagtagctgggaccacaa

SEQ ID NO: 33125 - DNA, 201 bp, Homo sapiens
gaaagtgtattagagttttttattttctatttataattgcaaacacctagaaagggtgtattctgataaattgaaagtctttttcttttccttactgactrcttgggtggatataggtacacccacagctgaggagagctgaagattttggagttcctgaagtactaaaggagagaagagataggggaggggaggaaaaca

SEQ ID NO: 33126 - DNA, 201 bp, Homo sapiens
atataagttccagaaggcagagatagatttttgtctgttgtgttcaccagtataactactgcctgctacttacaccttgaagaaatgaataaacaggatgkagcaagaatggaatgtggtgatgtgggcagaattctggggtcgaaggaactccagctggaaggtagaaaacccgagccctaaagccagcctggctgtgta

SEQ ID NO: 33127 - DNA, 201 bp, Homo sapiens
gaggagtggagttccttgggcctcagtttcttcactggtgagatgcatattagccaagatgacagccagcgcccctcccggcctcaagattctgagtgccracatggtcagagggtgcgggagcaactggagaatcactgtggattcctgaaccacgaggtcaaggaggtattggtaagaaaaaaatgttttttgccagtg

SEQ ID NO: 33128 - DNA, 201 bp, Homo sapiens
ggcactggggaccaaattgtcagcctattctgaacttccatggaatactcaaggagttaaccagagcgattttggcttcactgggcccccacacttttttktataacaaagactcggacactggaaaatacattcaaaacatgagccaagagtggagttcagcgggagatagttcaagagggaaaagcagcggaaaggcat

SEQ ID NO: 33129 - DNA, 201 bp, Homo sapiens
agattacttgtattttctgccataggttataatacattacaaccagtggcatgccggtaaactagttgtttgcggccagggaatgggggccatcctaattygcggtgtttgccaatttctatggtgtaaatactccctgcagggctgatttcaagctaccaacagtttcacaaccagctctcaaagttcttacaaatttaa

SEQ ID NO: 33130 - DNA, 201 bp, Homo sapiens
cctaagtagctgaggttacaggcgtgtaccaccacaaccggctaatttttgtatttttagtagagatggggtttcaccatgttggccaggctggtcttgawctcctgagctcaaatgatccacccaccccagcctcccaaagtgttggaattacgggcgtgagccaccatgcccggtctgaagtctttttttttaagctat

SEQ ID NO: 33131 - DNA, 201 bp, Homo sapiens
tgagcctgtaaaatcaaaagcaagctagttacttcctagatacaatgagggttacaggtattgggtaaatatagcctttccaaatgggagaaattggccaraacagaggggttacaggccccatgcaagttcaaagtcagcagggcagtcaaattttaaagctccacaattatctcctttgactccaggtcgcacatcccg

SEQ ID NO: 33132 - DNA, 201 bp, Homo sapiens
cagtggcattactttccctatcatatgcaatcaagaaaatactaccaaaaaatacttcttggcaaatcattgtttggaaacaccactcaggcatctacttragaactgacaaactacagaatcagttgtcactaacaaaaagcagattttcagggccttgtggtggaactcataacagaaagtggcagacactcttgactt

SEQ ID NO: 33133 - DNA, 201 bp, Homo sapiens
actgtggtacaaagatggataaaacaaaattcccacttgatcattttatttgccaacatcaatacttattaattcatcttgtttcaatttcttggaaaacmaaagttataaaaaaaaaatctttatggaagtaaaaattttctcctaaagatgtccatgctggcagtgaggcctcatcaaaggcttcccaaacagattcat

SEQ ID NO: 33134 - DNA, 201 bp, Homo sapiens
tgtttggaaacaccactcaggcatctacttgagaactgacaaactacagaatcagttgtcactaacaaaaagcagattttcagggccttgtggtggaactyataacagaaagtggcagacactcttgactttgcaacctttctatgccgattttgtgtatagaattgagctgggttttccttgccaatggaatccttttct

SEQ ID NO: 33135 - DNA, 201 bp, Homo sapiens
tgaactcctggactcaggtgattctcccacctcagcctcctgagtagctaggaatacaggcgtatatcaccatgcctggttaattaaaaaaaaattttttyttttttagagacagggtcttgctacattgcccaggctggtcttaaattcctggcctctggggtggtggctcacacctgtaatgccagcactttgggaggc

SEQ ID NO: 33136 - DNA, 201 bp, Homo sapiens
acgtgggagagagaagtcttgaggagtgatcatatagagacagaatctgtgatcctaaggtctggaagacgacagtttagatgaagaggtccaaaataacraggggcttttgaacaggtggtctgtccagtagtgggagaagctaccccatcagggggtcctcagctcctaggtcttgagctgccaccgattcacagaagc

SEQ ID NO: 33137 - DNA, 201 bp, Homo sapiens
aagtaaattgtacccctgggttttgtgacaagtaagttatttttccaaaaagatggcttttctttcctatatttgatttcagttacactgttttcgttcartctgtttcctttgttccataatgaaatgatctcttgttttgaaactgaaaaataaaatatgagcagatatgtatactaatgcatcattttccaaatctta

SEQ ID NO: 33138 - DNA, 201 bp, Homo sapiens
agttgtgaactggagtgattctttttctctctcacgttctccctggggccctttgtgttcagtctacactgtgggcttgcgggggaggtggtgcccaggamgcaagtctttcgagtgagacagtcctgattcacatactggttttgtcttttactagctaagcctcattttgtgtatctgtgaaatgggtatgacaagtat

SEQ ID NO: 33139 - DNA, 201 bp, Homo sapiens
tgagaggcatgggagaggcaggaaattctgtcttggccctggctctgcttccaccattgaagcttctggaaggtgcagaagggttagacacaggcattgcrgtgtgcatagggcacctgctgcaccagatgtgcaaagaaagctgcgctggggccccttgatgtggacctggctttagtagagttttagggtagacaaaaa

SEQ ID NO: 33140 - DNA, 201 bp, Homo sapiens
cttaaattttaaagttaagggtcagttttggaattaagtcctgccaagaaaactattatgtgccaaataatatctgaagatcaatcctgactgaaaaaaamcacaaataccctttattaaaaactgtcacataaataggaatttactgagcatttttgaaatactttaaactacatagaattgtagaaattaagttataaa

SEQ ID NO: 33141 - DNA, 201 bp, Homo sapiens
aaaaatcatttcacctgtttccttttaccttttaatattgctactagaaaaaattgaaattacacatgtggcttgcattatatttctattggacaatgctrttatagatgattttcaaggcatgttttttgaagtactggaaaaataaaattaatcagtctaaacatcctttgggtaaactcagccgattattagcaatta

SEQ ID NO: 33142 - DNA, 201 bp, Homo sapiens
acacatgggaacttactacttcttcctgagaggagccaggagaatctcacacagtcatgcgtgggtagaacatgtgatgaatacaataaattagatccgtkggctcataattgatatataaagcatgttctcattttttgaagtcttttttttttttttttttgagacagagtctcgctctgttgcccaggctggagtgca

SEQ ID NO: 33143 - DNA, 201 bp, Homo sapiens
ggtggccattagaagctaaaaatgcaagggcattaatggattcttccttcagagcctcaggagggagagctgtatactccccatatttatatttcagctgrctgaaggtgattttaggccgctggcccccagaactgtaagaggagaaatctgtattgtttaagccagcacgttcgtggtaaccttttacagcagccgcag

SEQ ID NO: 33144 - DNA, 201 bp, Homo sapiens
gaaggagtcacattaggaacagaggaagtgcatcccaagcagcaggagcagccagggtggagacccctgccgcctcttccagaaagcctggtgcgatccaygagcagaaggaaagctgctgtgacaagcaggggcgatgaagcaggtcgcatcctgccccaccctctgcttctgtgccccttgccaggattaacatcgtgt

SEQ ID NO: 33145 - DNA, 201 bp, Homo sapiens
tgcaaaagttcagctgtgggagccaagaaaatatgagcttaagacagaataaatcttaaacactttctgtcatttaatatgttaaggttgcttcttccccrcagacagatggctgtcagaaacagggatcaagttatgaccactgcaggacttagaggtcttaaatcttaaccaagtccttattcatgtaggagtgtggca

SEQ ID NO: 33146 - DNA, 201 bp, Homo sapiens
cctcagttcccctcaaaaccaccagccctaggcaaacattaattgctttctgactctagactttgctaatgtaaacatttcatataaattgaatcacacartgtgtgtgtgttttttttgtgactggcctcttttacttagcataatgtttttgagatttatctgtattgtagtatgcatcagtgcttcattttttattgc

SEQ ID NO: 33147 - DNA, 201 bp, Homo sapiens
gagttagagttaggttaggatatatacacacagacacacccagacatgcacacactcagacacatgcacacacactgggtttgttgcttattttagtgcartgcattctccagtaacttcctgagacaagtgtgtgtgggatgtacatttttggggattctgctggtctgcaaaggtctttatgttaccccctcattgaac

SEQ ID NO: 33148 - DNA, 201 bp, Homo sapiens
tttggagtgaaacagttgaatggaaggccgatctaattacccccctacaaaatatcctgaacctcagatactttgttacgctgcattgagttcattcaccrggagaatacataataactgtgttccagaaatgccaagactggaaaaaggaaaccatgcggggagccaggtttacatttgtaaagctataaaaccagggca

SEQ ID NO: 33149 - DNA, 201 bp, Homo sapiens
agtattaattttccattaagctgtcatatttctgttttattatttataattgggccaccaagttctaactagccttcatttattctttaaacaaatatttrgtattaactttctgtgtgcaaggccctctagaaatgccaaataaaatgaataaaatatagcttctgtgctcatggagcttgcagtctggtagacaagaca

SEQ ID NO: 33150 - DNA, 201 bp, Homo sapiens
ggaggctgaggcaggcagatcactcgagaccaggagtttgaggccagcctgaccaacatggcaaaactccatctctactaaacatacagaaattaggcagrcataatggcgcaggcctgtaatcccagctactctgaggctgaggtgggaggattgcttgaacctgggaggcagaggttgcagtgagctgagatggttcca

SEQ ID NO: 33151 - DNA, 201 bp, Homo sapiens
agactgagaggcagacatgagcttattgctattacaaggtggagccagtcttcaaacccaggtctttgaatttcaaagcccacacattaccattaattctrtcagcctctggtgttaggaaagaagtcttccagatatcacagcaacatcaaggggacattccaaatatttagcaacccaggtgacacactgtggaagcca

SEQ ID NO: 33152 - DNA, 201 bp, Homo sapiens
cgtgcctgacctgaaatctcttaagtgtgacatttcagtgtgggaggtgagaggaaacaaaattcagagtcttcttgaattgtgtctcttaaactcaaaaygttggtccaacatttgtaaataattatagtatattgctttggcataattgtttagataatctaaacaacgttaatggatttcaaaacaaaaagacgtatc

SEQ ID NO: 33153 - DNA, 201 bp, Homo sapiens
gtcccggccggcctcccccacctgagccttgctgaggtgaggagtcctcggcctcaaggtgctgtgagtattcagagcccacaccaacccctgcttgtccwtgtttgtgcccaggaccctggaattccctacccaatgtgcccagaagcaaaggggcagccaagaggcacttgtgtgttgtagggattgggggtgatgtag

SEQ ID NO: 33154 - DNA, 201 bp, Homo sapiens
ggcataatgtatgtgaaagtaccctgaaaattgtcattcactatacagttcctggtaggagattatttgtgtgaaatttcctgttacccctgagaaattaragaaagaaaaacaatcctgtgttacatgggcctctttgtgggataatggggatgagcagtattcgcttttcttcccaattagatggtccacatacctttt

SEQ ID NO: 33155 - DNA, 201 bp, Homo sapiens
ccatgggtgagtgaggcccagccctaaggacagcagcacccccacagctttggtggacagcacaggcatgccagctggggtacaacagagaggaagcttayagggaagttataggcttggttatggggagagaattaatacatcaatctccttcagttctttatcccacaataccttaacacggtgcttgtcatataagcc

SEQ ID NO: 33156 - DNA, 201 bp, Homo sapiens
agtagctgggactgagtacaggtgcgtgccaccatggccaactaatttttgtatgttttgtagagacagggttttgctatgttgctcaggctcgtctcgarctcctagcctcaagtgatctgcccgcctcagcctccaaagtgctgggattacaggcatgagccaccgtgcctgacctgaaatctcttaagtgtgacattt

SEQ ID NO: 33157 - DNA, 201 bp, Homo sapiens
ctttggtggacagcacaggcatgccagctggggtacaacagagaggaagcttacagggaagttataggcttggttatggggagagaattaatacatcaatstccttcagttctttatcccacaataccttaacacggtgcttgtcatataagcctttaataaatatttaccaaattaaggacaagaggaaataagtaagag

SEQ ID NO: 33158 - DNA, 201 bp, Homo sapiens
ataagtcccatcctgaggtgctgggggttaggacttcagcataagaatttggaggaggacataatttagcccataacagtctacagtagtatgataaacaratggtctttccctgctgtatatactttgtatgctaggtttttttaatttggagattttataagaagaaaaattattcataactatcattcacagtggatt

SEQ ID NO: 33159 - DNA, 201 bp, Homo sapiens
ggggttaggacttcagcataagaatttggaggaggacataatttagcccataacagtctacagtagtatgataaacagatggtctttccctgctgtatatrctttgtatgctaggtttttttaatttggagattttataagaagaaaaattattcataactatcattcacagtggatttcatgttgacacctttttctttt

SEQ ID NO: 33160 - DNA, 201 bp, Homo sapiens
acagatggtctttccctgctgtatatactttgtatgctaggtttttttaatttggagattttataagaagaaaaattattcataactatcattcacagtgkatttcatgttgacacctttttcttttatgctttaggtccaccgggccccaggggtccaagaggtgacagaggatcccagggaccccctggcccaactggc

SEQ ID NO: 33161 - DNA, 201 bp, Homo sapiens; identical to SEQ ID NO: 7398

SEQ ID NO: 33162 - DNA, 201 bp, Homo sapiens
ttaaatggagaatagacgaggctgcagccattaacacgacagattaccacatcaagcattaataggacagattagtaagtaaagcaggaacagagcatggrcttgatgtgtgtttgtggaggtagccaatcactgaatcagagaaaaagatgctgttctcttggttgtaggcaagttcttccattcagaaagaattaaagc

SEQ ID NO: 33163 - DNA, 201 bp, Homo sapiens
ctgaggaggcagagcccacgcatgctaatgctagtgtccactcattagaccctctatatgccaggcaccgtgagaggcatttgctcccttgaacctcacarcaaccctagaacataggtattattattaccctcatttgacggctaggaaaactgaggcccggcaaggtttatgcagactgagaccaaaactgcagcccat

SEQ ID NO: 33164 - DNA, 201 bp, Homo sapiens
ctcagggatagaaggagtgagttgtgctccacgtggggaagtattagtattggttgcattccagctgccgtcactgctatcatcataaaaaatgcagggayaattcccaaagtgaagtttgtaattgtagtaatgaaacagtttttctatttgttatagtagtggtagaaaattgataaatatgtgtaagtatatttagat

SEQ ID NO: 33165 - DNA, 201 bp, Homo sapiens
tctcataaaatacaattatgtttagtgatcccaggtgttgaatccaatcatttctgtgtgctgggcgaggagtgtgggctctgaaaccaagagagcctggkgacctcaggcaagtcacttaaccccctggggccccagtttctttatcaatgtgatgagggacaacaatggcatctacttgatgttgttttaaggattaaa

SEQ ID NO: 33166 - DNA, 201 bp, Homo sapiens
agaaaagaaatgcatttttcagcatgggggttttaaaatgaaatacacttattggacttggatatattaaacatgactcctttatgcttcctgaatgatgkgatatcatacctcagtatcacgtgaggtattattcactagcctgtgacgttggatgttttacatttggtgtgaaaaactcacttgtctctggctctgtgg

SEQ ID NO: 33167 - DNA, 201 bp, Homo sapiens
aggctccctcctagctatgccctaataatgcattcaagtcctacatctttgtgaagtcctactgtgtgctgtcacgctccactagatactgagtgagcaasgtagacaaggcgctatcatccggacttagaactgtaatgacctagcatcaaaggtctgaaggattgatgtgttcttcagtcagccagtggaggagacgct

SEQ ID NO: 33168 - DNA, 201 bp, Homo sapiens
caacatgtaatgaaaccctgtctctactaaaaaatacaaaaattagctgggcctggtggcgcatgcctgtagtcccagctacttgggaagctgaggcaggrgaatagcttgaacccgggaggtggaggttgcaatgagccgagatcgtgccactgcacttcagcgcaggtgacagaagcaagactctctcaaacacacaca

SEQ ID NO: 33169 - DNA, 201 bp, Homo sapiens
agattttccccgggttcctgattacatcaaatagttgttaactccccgtgcttcagaaagccaacatgatagaaagcaacgacaagccttgtaaattcttrgaataaacgtgttaatctaaaacattcttggccaggtgcagtggctcatgcctgtaatcccagcactttgggaggctgaggcaggcggatcaccatatag

SEQ ID NO: 33170 - DNA, 201 bp, Homo sapiens
aaatgggtgggtggtaggaggaagtgggaccaatggacattcactgggttgtctgagtgatttagaggaagagcctcactttaacatccgttgtaaacttrtaagaggaaaaaagtcaaagccccccaaacagcacaaaacaaagcaagtagcaagaaaaaagcagaaagcaaaagcaggctacacattctgacaaccatc

SEQ ID NO: 33171 - DNA, 201 bp, Homo sapiens
tcattagaccctctatatgccaggcaccgtgagaggcatttgctcccttgaacctcacagcaaccctagaacataggtattattattaccctcatttgacrgctaggaaaactgaggcccggcaaggtttatgcagactgagaccaaaactgcagcccatctagcaacaatgcagcgctttctttgataccacaccaattc

SEQ ID NO: 33172 - DNA, 201 bp, Homo sapiens
attagaccctctatatgccaggcaccgtgagaggcatttgctcccttgaacctcacagcaaccctagaacataggtattattattaccctcatttgacggmtaggaaaactgaggcccggcaaggtttatgcagactgagaccaaaactgcagcccatctagcaacaatgcagcgctttctttgataccacaccaattcca

SEQ ID NO: 33173 - DNA, 201 bp, Homo sapiens
gctaggaaaactgaggcccggcaaggtttatgcagactgagaccaaaactgcagcccatctagcaacaatgcagcgctttctttgataccacaccaattcyagtggcctcctcccttctccctaagttatctccagcagacacaatcctgtaaacagatgtttcctgtagtaactgactggaatgagcacacggcagacag

SEQ ID NO: 33174 - DNA, 201 bp, Homo sapiens
gacagtgaccaagcacctgggctttagaatacacagaccagggcccaagcccagctcagctacttctcatgtttgttcagtgggttgttataaaagcttgragacacactgcgtgcaacacactgcacgtggggcccagcccagaggaagtgcccaagaatatcatgactattcctatgattaggacatgggagaaatggg

SEQ ID NO: 33175 - DNA, 201 bp, Homo sapiens
gggggctccttctgacaattcatccagacaggtaattaaatgagcttaaccaaggggtctccatttagtcctctgggccagggatggagaattgtccattkgctggtcttctaacatttggtgccagaggtttctatattctttaatcatcactcattgcctctaccccactaaatcatgcccggaagcttcagggagttg

SEQ ID NO: 33176 - DNA, 201 bp, Homo sapiens
tttcacagcccagtaatggccaactgctcagcacctgtgtgccctgctgtcaggcaggtgggacccacagtcctctgggcctaaactgctgaagcctgcamcacaaggcgggcacggcattccaacacctcttcaggctcaacagcctttagaggctacactgagtcctctttttcatgctcttcctggttttcaagtgtc

SEQ ID NO: 33177 - DNA, 201 bp, Homo sapiens
aaaactaatgcccattcttatttctctcttttagtactgtcatctgcattataacggactgtgatgggatcacatgagcaaattttcagctctcaaaggcmaaggacactcctttctaattgcatcaccttctcatcagattgaaaaaaaaaaagcactgaaaaccaattactgaaaaaaaattgacagctagtgtttttt

SEQ ID NO: 33178 - DNA, 201 bp, Homo sapiens
cattcaacagacagttactgagcacctttgatgtgtcaggcattggtccaagtgctagggaccttaagacacataggaactcacagctgggtcagttgagsgggaaaaacacagatatctaaacaagggattataattgatggtgacaagtaactcagatttgtcttttgtatgctttgtttggccatttgggatttgagt

SEQ ID NO: 33179 - DNA, 201 bp, Homo sapiens
gacttgttagaggcaagatattgaaatgtacaaggtccctctgggttctcacaagatcatgtgtgcgtgtgtgtgtgtgtgtgtgtgtgtatcatgtcctyataatgaatagatattcacacacatatatacactcatgcccagaagtcagcattccagtacacattagaaagttattcatctaactgtcccaaagcaaga

SEQ ID NO: 33180 - DNA, 201 bp, Homo sapiens
caagattgaaccttcaaggggtgagtctggaagcacacctgatttattcgtggaaacgtaatcaagaactgttatccatggcaaggtgctgttctgagcarcagcatccaagttaagaagccccatgtgaactcatcctaaagaaaacttgtttttaagaatctctctcccaaaaaagggagtgaaatgtaggagtcattt

SEQ ID NO: 33181 - DNA, 201 bp, Homo sapiens
tgtgtgttggagcctggagtggagaaggtgccaaggtgggcgtggggaggccctttggaaggttagtgcagcagctcagatgggctatgatggcctctacrtgggggatgcagtggagatggagagacagagaagtttgagatgtatttctaaggtagaagcagggcttggtgaggatgtagagttgagggagagggagga

SEQ ID NO: 33182 - DNA, 201 bp, Homo sapiens
gctaattttttttgtttttttagagatggggtctcactatgttgtccaggccaatcttgaactcttgtcctcaaacgatcctccaaccttggcctcccaamgtattaggattacaggcgtaagccactgtacccagctccagtaaatattgttttgaacaaatgagtgagaagcgtatttacagagaaagcttcttgggct

SEQ ID NO: 33183 - DNA, 201 bp, Homo sapiens
gagctaggattacaggcatcaacatcacacccagctaattttttttgtttttttagagatggggtctcactatgttgtccaggccaatcttgaactcttgwcctcaaacgatcctccaaccttggcctcccaaagtattaggattacaggcgtaagccactgtacccagctccagtaaatattgttttgaacaaatgagtg

SEQ ID NO: 33184 - DNA, 201 bp, Homo sapiens
aaaggagatttcaacattcccctctcaattactgatggaaaaattgatagggatatagtagacacaatcaactgacttgacttaattgatatttgtgggaygttttacccaacatctgcaaatacatattcttttcaggtgcatgtggtacattcaccaagatgaactatattctgggccataaaatacgtctcaataaat

SEQ ID NO: 33185 - DNA, 201 bp, Homo sapiens
agaggaaggggtaccccctggcataatctggcacttgagactttgcctgatgagccaaggaaagtgcccaacacagcagggacacactttaggagactcawaacagttgcaggaatcaccatctaaaacagtagctgtagaaggttggagctggggatgggatgggagacagagactgttttttaaaaaagacaaaattct

SEQ ID NO: 33186 - DNA, 201 bp, Homo sapiens
gattggtggtcaggctctcactgttctgttgtcacttcttgcccgactcccaacagtttcttccttaatgacctcgtgtcctagacgctcctcccaaaccrgggctcctggtaccagttgcatatttcccctggggaaattgtggttgacagttgatacgctgtcaaataaggctttcctttcttcttttcatggagtgaa

SEQ ID NO: 33187 - DNA, 201 bp, Homo sapiens
gctagtgtccactcattagaccctctatatgccaggcaccgtgagaggcatttgctcccttgaacctcacagcaaccctagaacataggtattattattaycctcatttgacggctaggaaaactgaggcccggcaaggtttatgcagactgagaccaaaactgcagcccatctagcaacaatgcagcgctttctttgata

SEQ ID NO: 33188 - DNA, 201 bp, Homo sapiens
gcccccacctctttccgtctgtgcaagtgaagagaacttgtatgaagtccctttcctttgtcctgcagaaaaggttggggatgaggtatgagaatctgttytgatataaactcgtaaaagaagtttggaaggcagcatccttccatgtgctgcgcacgccatcggccacagctgttactaaactgctgccatgtgaagcca

SEQ ID NO: 33189 - DNA, 201 bp, Homo sapiens
gggctggcatctgcaagattcaaaataatctgatgctttccggaaaattcctgttgactcgcacttgatgaaccccagtgctcactgtccagttcagccayatagacatttgccgcattaggaattgggagctgaagctgactgactgtgccgaaggcagatgatagtgtagagatagatgttcacagtatctctacatcc

SEQ ID NO: 33190 - DNA, 201 bp, Homo sapiens
cagtggagaagggagaagtgggtaccctcattcaggaggagagttggagatagaatcaagggcatccctttccttgccctgacaacagggaccccagcttwaggaggtcccggccggcctcccccacctgagccttgctgaggtgaggagtcctcggcctcaaggtgctgtgagtattcagagcccacaccaacccctgct

SEQ ID NO: 33191 - DNA, 201 bp, Homo sapiens
tgtgttccttgactgtggactgtgttaagaaaaagggaagtaacatctgactctgttcagtatgccaagaccacctctggaagataatgtttactttgagkagcccctttcaaaagagacattcccagaccagcatgctcagaaaagcaacatcagaatgataggggctagaaaccacgtactgtgaggaagggttgagga

SEQ ID NO: 33192 - DNA, 201 bp, Homo sapiens
tgtcactaacaaaaagcagattttcagggccttgtggtggaactcataacagaaagtggcagacactcttgactttgcaacctttctatgccgattttgtrtatagaattgagctgggttttccttgccaatggaatccttttctaggtaaatgagtcccacctgccaagaatgttagggaagctgatgagtgacaacatt

SEQ ID NO: 33193 - DNA, 201 bp, Homo sapiens
ggagaaacacaaattatcagcaaaaaaaaaaattaagacaataaggctaaagattatttcttaaaacacttgaatttcccaatatgccatcttcattattkggatttcctaaagttcaacacagaacataagtaaaacagaaatagttgagaaaaaagtttattttaattttgcagttactccacatacactagaattttt

SEQ ID NO: 33194 - DNA, 201 bp, Homo sapiens
atgaccagacggtagaagcttgagggaaaacagtgagcttctccagggacaattccaggatccaaggagccagttcactttgggtcacacaaacacatggkaacttactacttcttcctgagaggagccaggagaatctcacacagtcatgcgtgggtagaacatgtgatgaatacaataaattagatccgttggctcata

SEQ ID NO: 33195 - DNA, 201 bp, Homo sapiens
cgcagtgcacacatttcattatgaccagacggtagaagcttgagggaaaacagtgagcttctccagggacaattccaggatccaaggagccagttcacttkgggtcacacaaacacatgggaacttactacttcttcctgagaggagccaggagaatctcacacagtcatgcgtgggtagaacatgtgatgaatacaataa

SEQ ID NO: 33196 - DNA, 201 bp, Homo sapiens
caaggtgcacctcggcaaagggttcccacaggaagtgacaagcagagtcttgaagagcaaataggacttagctcagtaaaaaaaaaaaacagggaagaacwttctaggtagagagaacacatggaaaggctcgtgtgagagagtgtttgtcgcagtgcacacatttcattatgaccagacggtagaagcttgagggaaaac

SEQ ID NO: 33197 - DNA, 201 bp, Homo sapiens
gatgatggttactaatagtcacctgtactttaaggtggattatttaatcaggttactttcttcctgtaaaatcaaactgaaatcagtgaattatttttaaragatttgtatttcagagagatgaaaggttcaaggaactttggatcttagcacctgagactgggaaataaaaatttcaagtgatggggcagaaactcagaa

SEQ ID NO: 33198 - DNA, 201 bp, Homo sapiens
gatcccaggagaaacttcctgtaagtagaggtccccagtgtgatgggagcgtctagaacctgagctttggagagcccaagagtgtgtcacccccagccttrgtgctgagcacaccccactgggcttccccaaccaagttctgtgaacctgctaactctcaataggaataaggaatgagttcttttcatttgcctgagtctt

SEQ ID NO: 33199 - DNA, 201 bp, Homo sapiens
acctggatcgttcaggtgcacttctcctctcccctcctcagcccacccacgtgtgttctcagttgtctgggtaagtcagcaagctcagctggggaaaagayagttgctctgaattaccagagatctgtgtctgttcaaacacaggattaaattcagtagcagttaaaatgatccttttgctttcttaacatgagaagcaaa

SEQ ID NO: 33200 - DNA, 201 bp, Homo sapiens
aaaaataaatctgaaagtcagtcctggagagcccatctttgggtcctggctttgattggaaagagttatggttttgttggggtaatagcagctgatctttygtcctcccacagaatcctgccagagccaacacttggaagcacacagctaatgagaggatttcttccaaggttcttaaccaaatgctctttgatagtggtg

SEQ ID NO: 33201 - DNA, 201 bp, Homo sapiens
gtgaaatccttttaaaacagtttgcaggttttgtggttactgttaaagagcaaatagacgagggataaaaggctctctcctctgcgtctcggcctcacctsatttttcatgctgagacctggttgagaaagagagtgctggaacagacagaaggcaatagtgacatggaacagaagccaaaggcttaggggacacacagat

SEQ ID NO: 33202 - DNA, 201 bp, Homo sapiens
gcattcaagtcctacatctttgtgaagtcctactgtgtgctgtcacgctccactagatactgagtgagcaacgtagacaaggcgctatcatccggacttakaactgtaatgacctagcatcaaaggtctgaaggattgatgtgttcttcagtcagccagtggaggagacgctctaaactggagctgttgcaaagataaagc

SEQ ID NO: 33203 - DNA, 201 bp, Homo sapiens
ccaggaatattaagccttatctgattaagagaaagacaggtaacctatttaggatagatgtagtacttcggatggggaaatttgctgggaagtcaatcacmagtagaactggagatctttatcaacggcaaaaacgtgcatttccccccgatatttactcccttccttcacaagatctggagattagcacctgctgaaatc

SEQ ID NO: 33204 - DNA, 201 bp, Homo sapiens
ggaatcacggtggcagattgagaggggcagtgctggaggctgtcagctggctaggcatcccttattgctgaatagcttactgagggcgtacctccgtggcygcctagtgagtctctttctgtaaaagcagttcagtgtgggagtccctgagagagagtttgctgcagaagcttcattacagtgacctatgaagcaactgac

SEQ ID NO: 33205 - DNA, 201 bp, Homo sapiens
atatataaagcatgttctcattttttgaagtcttttttttttttttttttgagacagagtctcgctctgttgcccaggctggagtgcaatggcgtgatctyggctcactgcaacctccacttcccaggttcaagcaattctcctggttccacctcccaggttcaagcaattctcctgcctcagcctcctaagtagctgagg

SEQ ID NO: 33206 - DNA, 201 bp, Homo sapiens
tttgtggtttttggaaggctggggcagctgtaatggaagacaccaatcacagtgggcttgccagtttagccacagccaggaatattaagccttatctgatkaagagaaagacaggtaacctatttaggatagatgtagtacttcggatggggaaatttgctgggaagtcaatcacaagtagaactggagatctttatcaac

SEQ ID NO: 33207 - DNA, 201 bp, Homo sapiens
attagcaaagtatctaagctctggaaactgtgtctccctgtaatgttgtcaagtatatgtggagaggtgaattttacagaaggagaaactgggattatccyatcccgctttttacagtggctcataaagagcaatgtactagattctcagcacacacaggttatggattgctgtttttcctggagtgcctgtatggtggat

SEQ ID NO: 33208 - DNA, 201 bp, Homo sapiens
tagatccgttggctcataattgatatataaagcatgttctcattttttgaagtcttttttttttttttttttgagacagagtctcgctctgttgcccaggytggagtgcaatggcgtgatctcggctcactgcaacctccacttcccaggttcaagcaattctcctggttccacctcccaggttcaagcaattctcctgcc

SEQ ID NO: 33209 - DNA, 201 bp, Homo sapiens
aggaaaaaaaatccaggaaatttctagcctgtcttaatgagccaaagtagattatgtgaatctcctgatctgtaagacacatagaatatgttttgacctarcccagcatctgagggcagagagtgccagctcctttgtggtttttggaaggctggggcagctgtaatggaagacaccaatcacagtgggcttgccagttta

SEQ ID NO: 33210 - DNA, 201 bp, Homo sapiens
aaagtatctaagctctggaaactgtgtctccctgtaatgttgtcaagtatatgtggagaggtgaattttacagaaggagaaactgggattatcctatcccrctttttacagtggctcataaagagcaatgtactagattctcagcacacacaggttatggattgctgtttttcctggagtgcctgtatggtggatctgttt

SEQ ID NO: 33211 - DNA, 201 bp, Homo sapiens
tcttctcaatgatttttttaaaggaaaaaaaatccaggaaatttctagcctgtcttaatgagccaaagtagattatgtgaatctcctgatctgtaagacasatagaatatgttttgacctaacccagcatctgagggcagagagtgccagctcctttgtggtttttggaaggctggggcagctgtaatggaagacaccaat

SEQ ID NO: 33212 - DNA, 201 bp, Homo sapiens
cctactgatgacatgatatttttaaagatctgtgtttcaaatccagtgtccggttttatccagtaaggatatgacatcaaggaatcacaacattaaacaartttgtctctaaataagtattcggacagatgtatgtataagtatgtttttaaaccatatgatgtcatgtctatttcatcagtagtattaattttccattaa

SEQ ID NO: 33213 - DNA, 201 bp, Homo sapiens
ttagctcttcttctcaatgatttttttaaaggaaaaaaaatccaggaaatttctagcctgtcttaatgagccaaagtagattatgtgaatctcctgatctrtaagacacatagaatatgttttgacctaacccagcatctgagggcagagagtgccagctcctttgtggtttttggaaggctggggcagctgtaatggaag

SEQ ID NO: 33214 - DNA, 201 bp, Homo sapiens
cataataaatatatattcattgactacctacaaagtgccacacactgagctaagaggaagagatggaattgaatgtaaattttcctgccctaaaggatatwatagtagataagtcatgacagcacagtgcagtgagtcccataatagagaaaggactacttgccaggggaattctgcaaggtgcacctcggcaaagggttc

SEQ ID NO: 33215 - DNA, 201 bp, Homo sapiens
taaacttttggccactttgtggaactcttaaaagaacctttccagccgggcgcagtggctcatgcctgtaatcccagcactttgggaggccgaggcaggcrgatgacttgaggtcaggagttcgagaccagcctggccaacgtggcaaaaccccatctctactaaaaataagaaaattagccgggtgtagtggcacatgcc

SEQ ID NO: 33216 - DNA, 201 bp, Homo sapiens
tttaggagtatgtgtacctatgaagcaaccctaaggtacagattattagaactgcatctctctgtctatgtagtaattttaaaaataataattactcagcraaatgtcatactcactgccaatgctcaggcttccctgggttggttgggaaacacgtgtttgcttgccctgtagctcagccggcagattgctacttattta

SEQ ID NO: 33217 - DNA, 201 bp, Homo sapiens
gagactggcaggcaggacctgctgatggattggctgtggggagtgagtgaaagagaggaacaggatgtttcctaagtctctagcatgagcagtgaggtggwtggtgatacagactggggagctgcagaaaaagaggcccatgtagacacgttaacaggatgatgtctattataatagaatgaggtttccgactcatggaaa

SEQ ID NO: 33218 - DNA, 201 bp, Homo sapiens
gtgactttttagcaagttactgaacatctgtgagcctcaatctcttcatctacaaaacagcagttggaaggattaactgcagtgatggtgtagtgcatccrgcaaagagcaggcactcgataaatagaggctattattattatcattcaaataaagatcgagttggtgtgcagtggaatcaacttgtaggtgtggctgagt

SEQ ID NO: 33219 - DNA, 201 bp, Homo sapiens
gtcagggccagacagtccaagttcaagccttgatcctaccatttttaatacaattgtgaatgttcagtaagtgcttgctactgtgccaggggtcatgctawgtcttctgcatggctccatacccaggtgtgaatcatagcctcttagagcttctgatttcttatctgcaaaatggcagtaataatgctacttgtcaaggtg

SEQ ID NO: 33220 - DNA, 201 bp, Homo sapiens
gtgtgtttactgtcaaaatagttctcatagtatagtaaggcatttgtaaaaattattcttagtcccaatatttgaacctaaatgcaaaaagataaattttraaatgacatctttgcttactgttattaaaatttgacttctcttacaggtattcaggaaggaacacaatgtaccaaatgtaaaaataactgggcactgaag

SEQ ID NO: 33221 - DNA, 201 bp, Homo sapiens
gaagtgccccagctctttggaatgtgaaccagtgacagctgtccgggcttggatctgcacgaataccacatgcaccagatgcctggcggccacagggctarctcacggggaaggatgggagggaaagatgagtgtgctggagtcaggacctgtggcttctgatcctgcttcccctctctgggcctctcttttcccatcaat

SEQ ID NO: 33222 - DNA, 201 bp, Homo sapiens
gctattggcgccaggttctttggcacgctggatctcttaatggtgaggggcagcactgcttcacttcctgaactgaaatctctcctctgcagcactctgtrtatcagtccccagcccttccttccctgcccacccccaccccgccatgggaacaaagtccccaggctctggaaagtaatgctaagaaaacaaacactacaa

SEQ ID NO: 33223 - DNA, 201 bp, Homo sapiens
aattgtcagcctattctgaacttccatggaatactcaaggagttaaccagagcgattttggcttcactgggcccccacacttttttgtataacaaagactyggacactggaaaatacattcaaaacatgagccaagagtggagttcagcgggagatagttcaagagggaaaagcagcggaaaggcatgcacccttcaggtc

SEQ ID NO: 33224 - DNA, 201 bp, Homo sapiens
catcaggaattcactctctgtattagatcatttattctcatatgccgctcgctgcctttgaaatacctccaattctagcaatggtttacagacatgcacawgagccaagtggcttaaagcaacaccctaggacttaggtgtttggaagccccttatcccctggagtcatttgtggaacagggcctgcatgcaagaggaggc

SEQ ID NO: 33225 - DNA, 201 bp, Homo sapiens
gaggacatcgaggtgtactgtctcccaagctctgtttgccgcttttctcaatggctttaaatcatcaggaattcactctctgtattagatcatttattctyatatgccgctcgctgcctttgaaatacctccaattctagcaatggtttacagacatgcacaagagccaagtggcttaaagcaacaccctaggacttaggt

SEQ ID NO: 33226 - DNA, 201 bp, Homo sapiens
acattaaacaaatttgtctctaaataagtattcggacagatgtatgtataagtatgtttttaaaccatatgatgtcatgtctatttcatcagtagtattarttttccattaagctgtcatatttctgttttattatttataattgggccaccaagttctaactagccttcatttattctttaaacaaatatttagtattaa

SEQ ID NO: 33227 - DNA, 201 bp, Homo sapiens
gtgtttttgaggacatcgaggtgtactgtctcccaagctctgtttgccgcttttctcaatggctttaaatcatcaggaattcactctctgtattagatcayttattctcatatgccgctcgctgcctttgaaatacctccaattctagcaatggtttacagacatgcacaagagccaagtggcttaaagcaacaccctagg

SEQ ID NO: 33228 - DNA, 201 bp, Homo sapiens
tataattgggccaccaagttctaactagccttcatttattctttaaacaaatatttagtattaactttctgtgtgcaaggccctctagaaatgccaaataraatgaataaaatatagcttctgtgctcatggagcttgcagtctggtagacaagacaagacttatgcgtaaacaactggaatccaaagtagagagtagaac

SEQ ID NO: 33229 - DNA, 201 bp, Homo sapiens
catgcccaaacatatgcctgtgggtgattttcaggggcgaggtcatagtttccatgtggcttgttctttgaatggcttgaatggcttgattgcaattgcargtcatactttcaacactggctggtgtgttactgtatgtgcaaacgtgaaaaaatgtatgtatttcaaaacagagtttaaaaggatcttttaattccctaa

SEQ ID NO: 33230 - DNA, 201 bp, Homo sapiens
attctatatttccaaaattgtggccccttgggttaacaaaatatatttgtttaggaaattagttttattactatatttattttgtgtcctaaaaaatgttmtttcatatgaccatggctttacattaaatggtttccctcttcattgggatatacagtatttcagctggatgtctgtatgatgattgtggtgaaagaaaag

SEQ ID NO: 33231 - DNA, 201 bp, Homo sapiens
agtgcacctaggaatagccactgcactccagcctgggcaacataatgagactccatagctaaataaatacataaaataaacaagaaagggagatggaggcrtgggggaggaggattgcatttttcaaaagaatggtcagggaaggcctctctgagaagatgatgtttttaagtaaaaacccgaaaaaagggagaaagccat

SEQ ID NO: 33232 - DNA, 201 bp, Homo sapiens
gccgcccggctcgcctcctctcccccacacccatgaggtgacccagcacaccctgctcagctgtgacatggcattcactcctctacctcctggttgtcggyagacttactgcttctccttagactgagctctccaaggcagagccttggtttctgcctctgtgtccccacatcctgatgcaggcctgacacagagtaggtc

SEQ ID NO: 33233 - DNA, 201 bp, Homo sapiens
aaacaaaatcaaaattataacatatattgctgtagttcttagtatagaccctgtgccgttcaggtgttttacaggcattaattcatttaatctcctcaacractttatgaggcagatactgttctaaccatcttctagcctctggggagacaatgggcagttcaaccaacaaagatctctgcctgcatggaactcacattc

SEQ ID NO: 33234 - DNA, 201 bp, Homo sapiens
tcaccagaaaatagtaaaggacactgaatttcagtgttcatagtgagactattttcagctttctcagagacagcatctgtaaataatcaggcagaagcctyttataaaacaacataggaaaaacctcaaaggctattctaaggctgcaccatttaaacaagatttttaacccatggggacgccaagatcaacatggagctt

SEQ ID NO: 33235 - DNA, 201 bp, Homo sapiens
aaacagaatgccacacgccatgttagatccatgcagtgtaaaggtctgtaaggaaacggtccctggattctggagccattattccccacttcccacccccyggggtggaccagccttctcaggttttgaggttgttccagaaagaatggatttctgcctctcttctatcccaggacttccaaagcagagcaaggggaaatt

SEQ ID NO: 33236 - DNA, 201 bp, Homo sapiens
cttagcagtagagacaggttttgttttcagatgtgtagccctgtacaagttaaagctgtgtggctttgttcactgcctttattagggtttccatgggaaargccaggcagggcagggtaaacaggttaggaacggctagtttgaataatttccgataggtctaaactatagatgtggtccctagttgcttggtacctggcc

SEQ ID NO: 33237 - DNA, 201 bp, Homo sapiens
ccgcagattgcaggggatacgcctgtaactggcatatcccagcgcacactgttagatctagccagggaatgcaagcttgctgggggttccagtcctaattmctacgggttctttatgagtttcaggcggcagcctgaccaatgggcatcagacccctcgggctcacacgtgccgggagcatcatgctgctggtttctcttc

SEQ ID NO: 33238 - DNA, 201 bp, Homo sapiens
gatagtttccttgaattccttaatataggtagaagtaaactgaagaccatggtaaggactttttaaagaaatatcaccatttgggatattttatctcttaraatgaagaaaagatcctttattttaggcaaatacttggtgtttatgtggctcttaaacttacaaagtatctccatacccattatctactttgctccacat

SEQ ID NO: 33239 - DNA, 201 bp, Homo sapiens
attggttctgtttaagaggaataagctgataataagtgtggtacatggccagatgcggtggctcacacttgtaatcccagcactttgggaggctgaggcargcggatcacttgaggtcaggagtttgagaccagcttgaccaacatggtgaaatcctgtctctccaaaaaaaaatacaaaatttagctaggcgtggtggta

SEQ ID NO: 33240 - DNA, 201 bp, Homo sapiens
gaggaataagctgataataagtgtggtacatggccagatgcggtggctcacacttgtaatcccagcactttgggaggctgaggcaggcggatcacttgagrtcaggagtttgagaccagcttgaccaacatggtgaaatcctgtctctccaaaaaaaaatacaaaatttagctaggcgtggtggtatgtgcctgtaatacc

SEQ ID NO: 33241 - DNA, 201 bp, Homo sapiens
taacaaccagtgataccataccattttgttctaagagtaatgacaaatgtacaagagctgggaatggaccctggtctaaacacgatagagcaaccaatggrtactcatatgtagacagcgccagtgggccagcatggaagagaagtctaacttcagcctagtccctgtccacagtccttcaggctggctcctaaaaatgtc

SEQ ID NO: 33242 - DNA, 201 bp, Homo sapiens
gatgacagccagcgcccctcccggcctcaagattctgagtgccaacatggtcagagggtgcgggagcaactggagaatcactgtggattcctgaaccacgrggtcaaggaggtattggtaagaaaaaaatgttttttgccagtgtattccagataatttttttttagagggaggctaagaggctagaggtaaataaatttt

SEQ ID NO: 33243 - DNA, 201 bp, Homo sapiens
agatgacagccagcgcccctcccggcctcaagattctgagtgccaacatggtcagagggtgcgggagcaactggagaatcactgtggattcctgaaccacraggtcaaggaggtattggtaagaaaaaaatgttttttgccagtgtattccagataatttttttttagagggaggctaagaggctagaggtaaataaattt

SEQ ID NO: 33244 - DNA, 201 bp, Homo sapiens
aagtgttgctttcctctgaactcttgtatttttttctgccttgtaggtcgggttttaatccctgcatgattttgagaggtaaacagaatatcttccagatsggggttgctcttcataatcctttcctcggtggtgattcctccatctgaatccaaatgtgtcctccatagctgcctgtcctaggctgattcaccagggctc

SEQ ID NO: 33245 - DNA, 201 bp, Homo sapiens
tgttgttaagtcctcacccaaagccgcttcttctttaagcccgtttaaccagtttacaactgtaattaggagctgtttggccatcggggaaataaaattcrtttctttgggcatgaaatacaatgaagtgattataccataaaaatttcatatcatatgaaattatatatgtattttctgcatctctgatctccattattc

SEQ ID NO: 33246 - DNA, 201 bp, Homo sapiens
ctgttttaaagaataataagcaatgaactcacagtgtgttctaaaccgcatgcagtgtactgggagtttatgtaaacaaatatatgctgcaaattaaaaayaaaatgtatgagtgaatccctagtgggtgattctggtactaattccaaattccatattcaccggggaagtggggaacaccttcagcaaagtgcggattgg

SEQ ID NO: 33247 - DNA, 201 bp, Homo sapiens
tcccacatcacacagaactgttgctgcaatcaaatgaaataatgttagtaaactgcaaagcttcctgcaaatgtttgccattgccttggctctccagtgtrtgtaatgctggtgacataaataatagcttcattccgtgtttgcactgatgcattttgaatgtaacctttgaaaattaggatcctcttgtctttgggacag

SEQ ID NO: 33248 - DNA, 201 bp, Homo sapiens
gaatgactgatcccatgccctggaatgtaagccatgcacagtttatggtacataattatatacaataaactataaaggacatacagtggattttgatatcrggttccagttcctcctcactgaggaattagtacaaacccttcatctgtgtggctaaggaaatagttctggtcctgcccgaatccgtttccatgtgtccac

SEQ ID NO: 33249 - DNA, 201 bp, Homo sapiens
ccatttaaagaaaaatgcttgaggaaacagctgtataaatcaagaaacaataccaagcagatgacgaaactgatctcttcttgagaacgtaagcatgttarctcattcgtgactcaaagtcatgtaataatagttgacatataccacttttcacatacattatcgcttccagtcttcacgcacatctattgttcctgcttg

SEQ ID NO: 33250 - DNA, 201 bp, Homo sapiens
acaggactgacactgggaggaaggtgaagggcaagggaacagtggaactcggtgctcctggtggggtttctttgaaatgtccaaaaccatttgcatcaagktaaggggagagtttcatttatgtggttttacaaatcctaattgagttggtatttctgaatttatttatttatttatttttgagacggagtttagctcttg

SEQ ID NO: 33251 - DNA, 201 bp, Homo sapiens
acgtctgcattactttctgggaaaacatatgactttaaaataggaatgcagtggcaccaagctcatctctcctgcgttggttccctggcagagcggcccgygtgcagccccgtcgcccctcctccgtgctcctgttccccatctacacgattccatgtttctgcgatgagaccatggtcctgtgttctttcccggggggga

SEQ ID NO: 33252 - DNA, 201 bp, Homo sapiens
tatataactgaaaaggtttaaaaatgataagaaatatcccaatggaagctgttttttaaataatgttattactgtcagtaacaaaattatgatgacacagrtccaacaccttttaaaagagaggaggtaaaaaggagagttggatatgaagaatctcagactgcagtgcagctctgagaaagtctcagccaggtacatggg

SEQ ID NO: 33253 - DNA, 201 bp, Homo sapiens
gcagtgagccgagatcgtgccactgcactccagcctgggcaacagagcaaaactccatctcaaaaaagaaaaaaaaaaaaaaagaaatccaaattctcagktcccttctcagacctcctgaattagaaacagtgtgttttaatgactgcttcaagtgactctcatgcaccccaaagtttgagaagcactgctctaagtcat

SEQ ID NO: 33254 - DNA, 201 bp, Homo sapiens
gatggagaattgtccattggctggtcttctaacatttggtgccagaggtttctatattctttaatcatcactcattgcctctaccccactaaatcatgccyggaagcttcagggagttgtaagattcttaaaatcaattcctatgccatggagcaaaggagctggatcaggcatgacataaataagtacgaagtgctggct

SEQ ID NO: 33255 - DNA, 201 bp, Homo sapiens
gaaatctgatttagcccccactgccaacttaggggtaaaagtaacaaaaacaccctttctcagttttgttagactgtaaaggaaggaatagggtacccatrcctctttattctaaaagcaagtatctgccatttttacaagcatcagaattgcaagttgtgccagaaattggagtcattttatgtctataattttgacttt

SEQ ID NO: 33256 - DNA, 201 bp, Homo sapiens
agcaagtatctgccatttttacaagcatcagaattgcaagttgtgccagaaattggagtcattttatgtctataattttgacttttgacttgaaaaaactrtgcagttgaatcaaaagtgatcccattgttgcaaaacaaattcagtaagcagctgagtaatcaaaatgaatctcctgtgatactttaaaataatctacaa

SEQ ID NO: 33257 - DNA, 201 bp, Homo sapiens
agaataaacttttggccactttgtggaactcttaaaagaacctttccagccgggcgcagtggctcatgcctgtaatcccagcactttgggaggccgaggcrggcagatgacttgaggtcaggagttcgagaccagcctggccaacgtggcaaaaccccatctctactaaaaataagaaaattagccgggtgtagtggcaca

SEQ ID NO: 33258 - DNA, 201 bp, Homo sapiens
gtatctgccatttttacaagcatcagaattgcaagttgtgccagaaattggagtcattttatgtctataattttgacttttgacttgaaaaaactatgcarttgaatcaaaagtgatcccattgttgcaaaacaaattcagtaagcagctgagtaatcaaaatgaatctcctgtgatactttaaaataatctacaagtatt

SEQ ID NO: 33259 - DNA, 201 bp, Homo sapiens
ccaggtacttcagtgccaatttgctgaagcccaaatagaacctgcagcacgcattactcttttgctcatcaagctttcctgttggtccttcccccaaatartcacctcagaatggagttttgtgtcttttgaagccagatgattaaagttctaggatatttattttggaccttaaggcatagtagcttttaccactgcctc

SEQ ID NO: 33260 - DNA, 201 bp, Homo sapiens
gggaatgtcattgactaaggttgatgttcaaaagtaggggtggtggcctcagaggacaaacctgcctgcaaacaaagtctgaatggatgatagaagccacrgataagagggaaagaacttggaggacatactgtacaaatcagaaggacaggaaatctccttgtctttctatagatacacagaactaaggaaggatccagg

SEQ ID NO: 33261 - DNA, 201 bp, Homo sapiens
ggactccgtcttaaaaaaaaaaaaaagaagaacaactcagccatgtgttgttctgtgagttctgagatctctagccaggcttcctttactccacctttcasagtcttcttatgtttgtttcctatctgatgtcaggattttagttatacttggcaggagaagtggggaaaagtgtgtccacttcatcttctacaagtggaa

SEQ ID NO: 33262 - DNA, 201 bp, Homo sapiens
ttatcttgctgcttttaaaatgttttctttgtcctttgtttttggaagtttaattaggatgtgtcttgatgtgtatttttttggctttatcctgtttggarttcactcatcatctgaatatgtaggttcatttctcttgccaaatttgggaagtgttcagccattttttcttctattacttttctatctgctcctcctttc

SEQ ID NO: 33263 - DNA, 201 bp, Homo sapiens
tgatggtgcagagaagctcttgaggagggtggtaaggagttaggcctaacttgcatctagagactggaatttatatctgggatggagttagctttgtaacratttaggcgctacctcatccctaggcctaggagaagagatatcacaatgatacaaggaaaaggcagcagtaactgaggatagaaaatctaggtaggagcc

SEQ ID NO: 33264 - DNA, 201 bp, Homo sapiens
tagagttttcacaacttagcagtagagacaggttttgttttcagatgtgtagccctgtacaagttaaagctgtgtggctttgttcactgcctttattaggstttccatgggaaaggccaggcagggcagggtaaacaggttaggaacggctagtttgaataatttccgataggtctaaactatagatgtggtccctagttg

SEQ ID NO: 33265 - DNA, 201 bp, Homo sapiens
tgcacaaaatttactcatgtctatgagtaaaaatcacttacattgctcttcattacctacaacttacacagtagtaaaattgctcgcagaccccaaaacaygcagagacctcatagaatcacataacctggaagggtctcctaggcaatgcctagttttccattgacaacacccattaatcattctggttcatttcaacaa

SEQ ID NO: 33266 - DNA, 201 bp, Homo sapiens
agcgggagtgtccaccatgctctgtttcctctttcgctgtattttataaattcctgctatttgctgatgataatattgttttagtacttaaatattttaaygtaggtctcagagctagatccttaatgtagataccagaacttaatatttggaatccaataaatgtttgttagttaatgaatgaattaattaatgaaggtg

SEQ ID NO: 33267 - DNA, 201 bp, Homo sapiens
cgcctcagcctccaaagtgctgggattacaggcatgagccaccgtgcctgacctgaaatctcttaagtgtgacatttcagtgtgggaggtgagaggaaacmaaattcagagtcttcttgaattgtgtctcttaaactcaaaacgttggtccaacatttgtaaataattatagtatattgctttggcataattgtttagata

SEQ ID NO: 33268 - DNA, 201 bp, Homo sapiens
aatcattggttccagcttataggagactgagaggcagacatgagcttattgctattacaaggtggagccagtcttcaaacccaggtctttgaatttcaaascccacacattaccattaattctatcagcctctggtgttaggaaagaagtcttccagatatcacagcaacatcaaggggacattccaaatatttagcaacc

SEQ ID NO: 33269 - DNA, 201 bp, Homo sapiens
attctgaaaaacagcagtttcctacccaggccaccttcatttcattttccattccccagaggtaacctcttgataactttttttaccattttcttgtggcwtttacacctctttcagttacctgctaatgcctaaaaaaccatcccgaaaccctgtagcttagaacagcagctggttttttgctcacaattctgcaattca

SEQ ID NO: 33270 - DNA, 201 bp, Homo sapiens
cccgaaaccctgtagcttagaacagcagctggttttttgctcacaattctgcaattcagcctggactggacacgtggctgccctcaggagcctggagaatyactgggggtggccggaatggctgagggctccctggctggtctcacgttttccctgctctcatcctccagtgattctctctctccaggtggcctctagttc

SEQ ID NO: 33271 - DNA, 201 bp, Homo sapiens
gatacacaaatacttaacattgtgttacagttgcttacagtattcagtacagtagcatgctgtataggtttgtagcctcgtagcaatagcctagctgtgtrgtaggctatacatctaggtttgtgtaagtacactctgtgatgtttgcatgatgatgaaatcacttaaccatgcatttctcagaacatctccctatcatta

SEQ ID NO: 33272 - DNA, 201 bp, Homo sapiens
ctagagtctgacacaggttggagtcctgactgcaacattgtatagagtgtcagttcagctctcaccaagatgcccccttgcagtccttttatggattagaratgctgtgtgtaagggatctagctcagaacctggcacactgtaggcagtaagtgaacatcaataagctgtagatgatgatgatcatgatgaaaaatagcc

SEQ ID NO: 33273 - DNA, 201 bp, Homo sapiens
tgttctctggtcaaggaatataggtggccattagaagctaaaaatgcaagggcattaatggattcttccttcagagcctcaggagggagagctgtatactycccatatttatatttcagctgactgaaggtgattttaggccgctggcccccagaactgtaagaggagaaatctgtattgtttaagccagcacgttcgtgg

SEQ ID NO: 33274 - DNA, 201 bp, Homo sapiens
atactatagtattattaactacagttaccatgctatacattattagatcctccgaacttattcatcttatcactgaaagtttgtacccctttaaccagcayctccccattccccatcccatgtcgcaactactgttctactttctgtttctgtaaggtgttttttttttaaagattccacatatggtgataccatacaata

SEQ ID NO: 33275 - DNA, 201 bp, Homo sapiens
cccatgagggcagaagtgacctggctctcgtgtccctgccatgatcagtcattggctgtaagcagactccgcccggactgtgtggcctcggcaggaatcayggtggcagattgagaggggcagtgctggaggctgtcagctggctaggcatcccttattgctgaatagcttactgagggcgtacctccgtggccgcctagt

SEQ ID NO: 33276 - DNA, 201 bp, Homo sapiens
gaaccaaaagagtgtggtgttatggaagccgagagagttttaaaaaagaaagtccttgtgttttcatcagtaactttgttgtgtatcagtgttttcccttyatgtaacttaaatgtccactaatgcaagtgaaggcaatctatgcctaatttcttcactaaatattctactaataaatgatttactgacaaaatgaaatta

SEQ ID NO: 33277 - DNA, 201 bp, Homo sapiens
gtccttttcgaaattagttatgtacaaagggaatgggctgtctctggttggcttggactaattatttggggaggaatggttggtgaggaattaagcacttyagccactattattacttgtaacaataatatctataatatataatgtaatatcattatatttcaaatgtaatactaagttatacaaaattattaaaaagca

SEQ ID NO: 33278 - DNA, 201 bp, Homo sapiens
ttccctgtcatctcattgaccaacgttgagtcacaagtccttttcgaaattagttatgtacaaagggaatgggctgtctctggttggcttggactaattayttggggaggaatggttggtgaggaattaagcacttcagccactattattacttgtaacaataatatctataatatataatgtaatatcattatatttcaa

SEQ ID NO: 33279 - DNA, 201 bp, Homo sapiens
tgtccacttcccatgatgatctcttcctgccccttcctgcccagaaggtagggcaagataagtctctgccccagtcactagacaggcatgttgatgatggycttgggaactgtggcttggcggtggtccttaggggaagggaacttgtctgtgttggtcaccactataacctttagaacaatgcctagctcaagtgctaag

SEQ ID NO: 33280 - DNA, 201 bp, Homo sapiens
tttcagcacctctactgtgtccacttcccatgatgatctcttcctgccccttcctgcccagaaggtagggcaagataagtctctgccccagtcactagacrggcatgttgatgatggccttgggaactgtggcttggcggtggtccttaggggaagggaacttgtctgtgttggtcaccactataacctttagaacaatgc

SEQ ID NO: 33281 - DNA, 201 bp, Homo sapiens
ggggaggtgaacttttcacagagccactggctaccaagagtgtagtcagaagctgaaaggcctctaaggccggggccctggagccacccactcccacttcygccacattccatgggacagagcaggtcatggggcctgcccagattccaggggaaggaagtggacttgcgcatggagggctggaaggaattgctggtggtc

SEQ ID NO: 33282 - DNA, 201 bp, Homo sapiens
tatgagggttctgatttctccctatctttgccaacacttgttgtctatctttttggttatagccaactgcttcttaaacttatgttccaacagtcctcctrttttagcctcacctttattcccaaattcctaaacctgttcaggattctgcaatatcaatcattgcctcttagctttcccggctgctagcacaggcttcag

SEQ ID NO: 33283 - DNA, 201 bp, Homo sapiens
gaatttggatgtgtttaggttaggatttagatctggatactacatatagacctgcttttaattccctctttccttcttgtattatttaagtccatggacasttagaatcaatatataaacatctccaagaagcacaaaaagaagcagcatgtggaacgtgaggtcaaagctgtcagctcacatttcccctccccagaaaag

SEQ ID NO: 33284 - DNA, 201 bp, Homo sapiens
ataaacatctccaagaagcacaaaaagaagcagcatgtggaacgtgaggtcaaagctgtcagctcacatttcccctccccagaaaagcccggagattttgsagttcctcagtacatgtcttcagttggcttcaatgtcagtttgcttcttgttctttatataattgttgacttctttgaagttcattatagacatcactaa

SEQ ID NO: 33285 - DNA, 201 bp, Homo sapiens
tgtccccaagaactatactaaagcaaatttttgattatactccctctaaggtattaaagtatctccaagggatgataacccaactttgtaagcaaaaacgytgggataccaggaggatgcattgtgaatcaaaggccagaacactggccctccctgttacacctcaacgcttctagtccgaggcagtcgctgagcactaag

SEQ ID NO: 33286 - DNA, 201 bp, Homo sapiens
tcgccagtttatagacgaggaaattaaggcttagaaggtttgagtaacttgctgaggtttacacaagtaaaaagtagctcagtggaatccgagcccaggcygtctggtgccaaacctgatgccattaactccaaggatagtcaccgaaagtgtgtgcccctccctacggtacccggtcaccccagagagagcctagaaggt

SEQ ID NO: 33287 - DNA, 201 bp, Homo sapiens
tggcccctgccaaatctcatgtcctcacgtttcaaaacaaatcatgccttcccaacagtcccacaaagttttaactcatttcagcattaaccctaaagtcygcagtccaaagtcccatctgagacaaggcaagtcccttccgcctatgagcctgtaaaatcaaaagcaagctagttacttcctagatacaatgagggttac

SEQ ID NO: 33288 - DNA, 201 bp, Homo sapiens
tccagcattgcaatcctaacatttccagctttataccagatcctattgttaaacaaagacacacaccccccagtgcatgtaaactgttcattagcacttgygggcagggaaaatagtttccttttgctgcacagaagaaaacgtcgacagattttttttgttcttttttttaatgaatgtatttatcccttttgtatttat

SEQ ID NO: 33289 - DNA, 201 bp, Homo sapiens
cgtatcagccactttgcagaaaacatgttcttggacagttgagcttggtacatcctctgccccgggctttttatcattagtcaacagagcttccatagcasgagtcatctcttaagttcaatgtgtcatgtttcttccagaatatttcctgaacaggaaaatcctactccattatcctttccaacaggcaaccttctaaag

SEQ ID NO: 33290 - DNA, 201 bp, Homo sapiens
ttagaatacaatgagcttccatcaagagaatttgctgaagaagccagagaatcgctcagtcacccagacagggtctgtgcagtggtcgtgactgtgaggcrtatcagccactttgcagaaaacatgttcttggacagttgagcttggtacatcctctgccccgggctttttatcattagtcaacagagcttccatagcagg

SEQ ID NO: 33291 - DNA, 201 bp, Homo sapiens
aagaaagaaagaaaagaatattcaatgaaagaaacacaataaggcattcctctgaaggagaaatcgaaaggaaaggagtaaaaacttttatttatcagagytggcaaaggcaacttcatactgttttgctcaaaattgttcttttcttctttcatgtcacttacatagccacaagttagaatacaatgagcttccatcaag

SEQ ID NO: 33292 - DNA, 201 bp, Homo sapiens
taagattctagtgacccaatgttgtaagaggcagaaagataaaacccagttctcccttcacacattccccctttgaagtctagagaaactctctccgttamaaaagaaagaaagaaaagaatattcaatgaaagaaacacaataaggcattcctctgaaggagaaatcgaaaggaaaggagtaaaaacttttatttatcag

SEQ ID NO: 33293 - DNA, 201 bp, Homo sapiens
ctttcttttttttctgtttgtttgttaaggtacagatatttcctccctttttatccatggaaagcccttcctggctctggcgtgttgtgcgtgtgctggtycatttgcccacagcaccttttctctgctctccagctaaagtgcctccctcccacccttcatgtctcatgtagacacatggcagctcccgaaagctgaatt

SEQ ID NO: 33294 - DNA, 201 bp, Homo sapiens
ggctacacattctgacaaccatcctcttttaaattgtccttttttctaaatgttaaataaaagaaaaaggcctgagacatctgttctgaaaaatagtcacrcaccacccctgctttgtttttcagcaatggataaaaaaacagatggtagggagagagagccactggatcggcctcacagactcagagcgtgaaaatgaat

SEQ ID NO: 33295 - DNA, 201 bp, Homo sapiens
tttggtcaaactatttttggaagtaactggggcataaattatccgtattgccattcaacagacagttactgagcacctttgatgtgtcaggcattggtccragtgctagggaccttaagacacataggaactcacagctgggtcagttgagggggaaaaacacagatatctaaacaagggattataattgatggtgacaag

SEQ ID NO: 33296 - DNA, 201 bp, Homo sapiens
tgaggcaggagaatcacttgaacccaggaggtggaggttgcagtgagccgagatcgcgccactgcacttcagcctgagcaacagagcgatattccatctcaaaaaaaaaaaaaaagtgttcctcctggacagtagccactggggcctacttgtggatgaagggtgagaggaggatgggaattgaaaaactacgtgtcgggt

SEQ ID NO: 33297 - DNA, 201 bp, Homo sapiens
aaaaaaaaaaaaaagtgttcctcctggacagtagccactggggcctacttgtggatgaagggtgagaggaggatgggaattgaaaaactacgtgtcgggtkctatgctcactacgtgggtgatgaaagaatctgtccaccaaacccccacaacccacaatttacccatgtagcagacatgcacatgtacccccggaaccta

SEQ ID NO: 33298 - DNA, 201 bp, Homo sapiens
catttactgaaggtattaagactgcagataatatttctgctgaataagaagcagtgtggactaatgggaagagacacaacatattcttctccagtttctcrtagtttcgatgctttcttgaaagtgcctgtgaggcaaagatgcatgaagacatgttctgctttttgctgtttttttgtgtttttttggtaacatagaaag

SEQ ID NO: 33299 - DNA, 201 bp, Homo sapiens
aaaaaaaaaaagtgttcctcctggacagtagccactggggcctacttgtggatgaagggtgagaggaggatgggaattgaaaaactacgtgtcgggtgctrtgctcactacgtgggtgatgaaagaatctgtccaccaaacccccacaacccacaatttacccatgtagcagacatgcacatgtacccccggaacctaaaa

SEQ ID NO: 33300 - DNA, 201 bp, Homo sapiens
cagtactgtgtaatcacatttactgctaaaagagagatgagagtggtttggcaaatatataacatgttgtaatttttacctgtgctaggaaataaagtctrggacatttatgcattcagaattatacaaaaagagtcaaagaagaggctttttttctcctttcttttttttctgtttgtttgttaaggtacagatatttcc

SEQ ID NO: 33301 - DNA, 201 bp, Homo sapiens
ggaaaataatgtgcatcattgagtgtgttggctgattagtttggacaatggaaatctggaaaactaccaggtcgttctatccatttgtgatgagttagacygtgatctaacccagagcatcttaagtttttagatgaagcagcaaacagagtaagtgattaaggaaggctattaaatcatgattagcgctgggcagaggtg

SEQ ID NO: 33302 - DNA, 201 bp, Homo sapiens
aacaacagcgaaactccatctcaaaaaagaaaagagatatagcaccaatgttagttcttttccgtagacatccatacacagctaatccaggtggccaagcrttcaattccacgtgtatctattgagcatctactataggccagatcctgtgatacataatagagggagatggtctgtgctgcttatcagctcataagccaa

SEQ ID NO: 33303 - DNA, 201 bp, Homo sapiens
atagctggtcccaggaaatcatatctgtatctctctgttccttgcttcttcctagccacattacacagcactagcagttagaatggcaaaacctgtcaaamatcctcagtacagtcgggacttttagtcccatctctaaggccatatacgtggaaaataatgtgcatcattgagtgtgttggctgattagtttggacaatg

SEQ ID NO: 33304 - DNA, 201 bp, Homo sapiens
aacccaggaggcagaggttgtggggagccgagatcgcaccattgcactccagcctgggaaacaacagcgaaactccatctcaaaaaagaaaagagatatascaccaatgttagttcttttccgtagacatccatacacagctaatccaggtggccaagcgttcaattccacgtgtatctattgagcatctactataggcca

SEQ ID NO: 33305 - DNA, 201 bp, Homo sapiens
taagaatctctctcccaaaaaagggagtgaaatgtaggagtcattttcagtaagattaagttactatttctttctaaagcaatcaaccttctacaactcamccagacaatcataaccagttatttgtaattgtaggttcttgtaaatgtatatcaaaagtctttcactttctcttcctggctcttggacttgttagaggca

SEQ ID NO: 33306 - DNA, 201 bp, Homo sapiens
gcccgactcccaacagtttcttccttaatgacctcgtgtcctagacgctcctcccaaaccggggctcctggtaccagttgcatatttcccctggggaaatygtggttgacagttgatacgctgtcaaataaggctttcctttcttcttttcatggagtgaattttttttcatttctaagaaaaaaatcatgaaactcataa

SEQ ID NO: 33307 - DNA, 201 bp, Homo sapiens
agttggctcttacaagccagtaggaaccaacttcagcacgccactgaaacaaacatcaagggaccaatcaataggatttttttgttgtatttgaattgctrtaggcctaacagtgtctgaaataagtaaatttgaatgtttaaatattttgtcatacagagatttttattgaaattatcatcgtaattatcataatggaat

SEQ ID NO: 33308 - DNA, 201 bp, Homo sapiens
agggctgatttcaagctaccaacagtttcacaaccagctctcaaagttcttacaaatttaacagttggctcttacaagccagtaggaaccaacttcagcaygccactgaaacaaacatcaagggaccaatcaataggatttttttgttgtatttgaattgctgtaggcctaacagtgtctgaaataagtaaatttgaatgt

SEQ ID NO: 33309 - DNA, 201 bp, Homo sapiens
cccagggttgctgaagacaaggaggagtcaacaggagctgtgggcagaggtcagtgacatgggtctaggtagaagtgagttcatccctaagtcttctaaastctcccatttatggagcagataacactagaaagaatgcatttaggccagtccttgccattagcgtaaactctctttaccactggaagagggtcctgctta

SEQ ID NO: 33310 - DNA, 201 bp, Homo sapiens
ggggccatcctaattcgcggtgtttgccaatttctatggtgtaaatactccctgcagggctgatttcaagctaccaacagtttcacaaccagctctcaaarttcttacaaatttaacagttggctcttacaagccagtaggaaccaacttcagcacgccactgaaacaaacatcaagggaccaatcaataggatttttttg

SEQ ID NO: 33311 - DNA, 201 bp, Homo sapiens
tcctctttgaactgcttatttagaaaattcaggttttcaaggctcccagaaccgtgggcctggggaccgtggggtagaggtgtcactgacagcacaaaccycgggctgcttggagctctggtattgttcatattcaggcatctctggagcttgtgacagctttaccagccgcgtgggtatcctggcatttcagaaacccga

SEQ ID NO: 33312 - DNA, 201 bp, Homo sapiens
ccctgaaagctaaatttaagtcattgttatatgctgtttctctcatcattttgcattaaacacagctgaagaactcttttcactgaagaagggcactatgygtaaaattacaaaccaaaggagagaaacttcaactgtggcttaatcctcatgacttacccatcaaaagttattgagcacagttatagatcagtcctttat

SEQ ID NO: 33313 - DNA, 201 bp, Homo sapiens
tttgttaagcaccgggagttttgttggaaaacacatttgaaacttctcttgggtaggaaactgggctgggcacttctcaggcctacagtttggtttgccaragcacaaacagcacagtgatttaaagtcttccatcctctttgaactgcttatttagaaaattcaggttttcaaggctcccagaaccgtgggcctggggac

SEQ ID NO: 33314 - DNA, 201 bp, Homo sapiens
gtccttcagcgggaggtcaggccagcaccccgtgtctgtcgcccttctgtgcttcacagttgccaccaaagcaagttcatggtttctcagcatggaatgtrgcgtgtctgtgggtctacctatatgttcctttctctaaatttcaaaaatattttcacccttattggatgtaaagagtcttttttcattttataccatcag

SEQ ID NO: 33315 - DNA, 201 bp, Homo sapiens
aggttgacgggacaggggacagtgcaatgtgggtcaggcaggggcctcagttcctcccattgccaaccactccctcatgctacacttccccaaacaagacrgcatgactggagatcctggagagcatccattaacaggctcagaagcagaccatggacaattggcaagaaacagtggttaaatacaccctcctctgtggac

SEQ ID NO: 33316 - DNA, 201 bp, Homo sapiens
tttcttccacaccttttctctctagcacctttccctttctgtacatgcagatctcatcccagaggatgaagggcagatggataaagcaggatggattaacrttggcttatgtggggctggcatctgcaagattcaaaataatctgatgctttccggaaaattcctgttgactcgcacttgatgaaccccagtgctcactgt

SEQ ID NO: 33317 - DNA, 201 bp, Homo sapiens
caagtgttttcttccacaccttttctctctagcacctttccctttctgtacatgcagatctcatcccagaggatgaagggcagatggataaagcaggatgrattaacgttggcttatgtggggctggcatctgcaagattcaaaataatctgatgctttccggaaaattcctgttgactcgcacttgatgaaccccagtgc

SEQ ID NO: 33318 - DNA, 201 bp, Homo sapiens
caagtggaaagggaggccaggcagtgccatctgatattgattaaatgctgatagagtcagcagtgagaaatgcacacggtgaggaagtgccccagctcttyggaatgtgaaccagtgacagctgtccgggcttggatctgcacgaataccacatgcaccagatgcctggcggccacagggctagctcacggggaaggatgg

SEQ ID NO: 33319 - DNA, 201 bp, Homo sapiens
ctgatggattggctgtggggagtgagtgaaagagaggaacaggatgtttcctaagtctctagcatgagcagtgaggtggatggtgatacagactggggagytgcagaaaaagaggcccatgtagacacgttaacaggatgatgtctattataatagaatgaggtttccgactcatggaaaagcatatgtgataaagaaaat

SEQ ID NO: 33320 - DNA, 201 bp, Homo sapiens
ttctctttggtaacatgatctttatggcaacaccactgagctatagacacttgtgatcatgaaaatagcccagaagtgtcccacactcacccacagtgccrgcctccacctaccaaggaaggggatggatctgcaatgtatccattttaacacacaagcccaccttcagtgatatacatggcaaaaaaatatgagagtgaa

SEQ ID NO: 33321 - DNA, 201 bp, Homo sapiens
gagtttccagggatttaggagtatgtgtacctatgaagcaaccctaaggtacagattattagaactgcatctctctgtctatgtagtaattttaaaaatartaattactcagcgaaatgtcatactcactgccaatgctcaggcttccctgggttggttgggaaacacgtgtttgcttgccctgtagctcagccggcagat

SEQ ID NO: 33322 - DNA, 201 bp, Homo sapiens
tccccagtgagcaaggattcctctccttggaattgaaagcatttgtggacagttcatctaataaaggatttcttataaaaaccacaaagagaaaataatgrcgttcttttgagacactatatattctggcagacactgcatactctgagtgggaccgttacatctggcttttgcctacgacaattcttttttagtaggcag

SEQ ID NO: 33323 - DNA, 201 bp, Homo sapiens
gattctgagtgccaacatggtcagagggtgcgggagcaactggagaatcactgtggattcctgaaccacgaggtcaaggaggtattggtaagaaaaaaatrttttttgccagtgtattccagataatttttttttagagggaggctaagaggctagaggtaaataaattttttaatcgccatctgataaaccctcctgtca

SEQ ID NO: 33324 - DNA, 201 bp, Homo sapiens
gacaactgtaagagatgtgatggttgagctccccagtgagcaaggattcctctccttggaattgaaagcatttgtggacagttcatctaataaaggatttyttataaaaaccacaaagagaaaataatggcgttcttttgagacactatatattctggcagacactgcatactctgagtgggaccgttacatctggctttt

SEQ ID NO: 33325 - DNA, 201 bp, Homo sapiens
cagatataaaacctttgcaggaatcaccacagtgcctgcatcagaactcacgtacttgatcgattctgccctggatatccaagtaatgttactgctgtgcygatgactgctgtgcagatgttagtttcataccgcagtttgtttcccctcactctcttgaacctgttctttattaggaacagaaagagtttgtgtcctctc

SEQ ID NO: 33326 - DNA, 201 bp, Homo sapiens
aacgtagtgtccctgaatggggggaggtgggataggcgggtggggtcgtagtgtctggttcacagtgttggtactgcacaaaggcacctgagggaagaatragagcagaagtccagctccactctgcagaccaagtgtgcagatataaaacctttgcaggaatcaccacagtgcctgcatcagaactcacgtacttgatcg

SEQ ID NO: 33327 - DNA, 201 bp, Homo sapiens
gggattggaggattttcccaacagcttgtttctgtgcttggccagaggaaatggagaaggatagaggagaaaagagtgtgtgtgagtgagtgtgtgtgtgygtttctgtgtgtgtgtggagagagagagagagagagagagagtatgaaaatgaatgaatctacttcctgttgcttaaaaaaagtcctggctggactttga

SEQ ID NO: 33328 - DNA, 201 bp, Homo sapiens
ggaggattttcccaacagcttgtttctgtgcttggccagaggaaatggagaaggatagaggagaaaagagtgtgtgtgagtgagtgtgtgtgtgtgtttckgtgtgtgtgtggagagagagagagagagagagagagtatgaaaatgaatgaatctacttcctgttgcttaaaaaaagtcctggctggactttgattagaa

SEQ ID NO: 33329 - DNA, 201 bp, Homo sapiens
ccaacagcttgtttctgtgcttggccagaggaaatggagaaggatagaggagaaaagagtgtgtgtgagtgagtgtgtgtgtgtgtttctgtgtgtgtgtggagagagagagagagagagagagagtatgaaaatgaatgaatctacttcctgttgcttaaaaaaagtcctggctggactttgattagaattaacaacccc

SEQ ID NO: 33330 - DNA, 201 bp, Homo sapiens
aacagcttgtttctgtgcttggccagaggaaatggagaaggatagaggagaaaagagtgtgtgtgagtgagtgtgtgtgtgtgtttctgtgtgtgtgtggwgagagagagagagagagagagagtatgaaaatgaatgaatctacttcctgttgcttaaaaaaagtcctggctggactttgattagaattaacaaccccca

SEQ ID NO: 33331 - DNA, 201 bp, Homo sapiens
agaggaggtgtggctctaggttggttagtttgcataacaaaggcatgctcctttctgggcccttggctatctttgagaattagctagccctggagggaggwggagtctctccccagcctgaaagggtttttttaaggatgttaaaacatcatcataatatacaaaaaataagaaatatacacaaacaaatgagtttaacat

SEQ ID NO: 33332 - DNA, 201 bp, Homo sapiens
ttctatgggccaggtagtagaggaggtgtggctctaggttggttagtttgcataacaaaggcatgctcctttctgggcccttggctatctttgagaattasctagccctggagggaggaggagtctctccccagcctgaaagggtttttttaaggatgttaaaacatcatcataatatacaaaaaataagaaatatacaca

SEQ ID NO: 33333 - DNA, 201 bp, Homo sapiens
gggatgaaaaacccaactcactcgtttgtactgtggcttttctcaaagaaaaataaaagcaccgtgtctggaaacagacaatgggagatctgacttctacygatcgtagggaatagtgaagtatttcaagataggaatgagtcatacctttatacactttttgccatctgctctctattaacatgggctattagtaaaaca

SEQ ID NO: 33334 - DNA, 201 bp, Homo sapiens; identical to SEQ ID NO: 7386

SEQ ID NO: 33335 - DNA, 201 bp, Homo sapiens
taaaaaaattgctgcacagtgggctgggctcggtggctcatgcatagtaatctcagcactttgggaggccgaggtgggcggaccatgaggtcaggagatcragaccatcctggttaacatggcgaaaccccgtctctactaaaaatacaaaaaattagccgagcatggtggcgggcgcctgtagtcccagctactcggaag

SEQ ID NO: 33336 - DNA, 201 bp, Homo sapiens
gcctgagacatctgttctgaaaaatagtcacgcaccacccctgctttgtttttcagcaatggataaaaaaacagatggtagggagagagagccactggatyggcctcacagactcagagcgtgaaaatgaatggaagtggctggatgggacatctccagactacaagtaagtactcagaagcttccagattggtggtcagg

SEQ ID NO: 33337 - DNA, 201 bp, Homo sapiens
attgctgcacagtgggctgggctcggtggctcatgcatagtaatctcagcactttgggaggccgaggtgggcggaccatgaggtcaggagatcaagaccakcctggttaacatggcgaaaccccgtctctactaaaaatacaaaaaattagccgagcatggtggcgggcgcctgtagtcccagctactcggaaggctgagg

SEQ ID NO: 33338 - DNA, 201 bp, Homo sapiens
tgaggtcaggagatcaagaccatcctggttaacatggcgaaaccccgtctctactaaaaatacaaaaaattagccgagcatggtggcgggcgcctgtagtyccagctactcggaaggctgaggcaggagaatgacttgaacctgggaggcggagcttgcagtgagccgagatcgcagagcttgcagtgaacctagatcgtg

SEQ ID NO: 33339 - DNA, 201 bp, Homo sapiens
attctgctactgcatttgattttttttttttttttttgagacggagtctcactctgtcgcccaggctggagtgcaatggtgcgatctcggctcactgcaasctccgcctaccgggtttaagcgattctcctgcctcagcctcccgagcagctgggactacaggcacatgacaccacaaccagataatttttgtatttttag

SEQ ID NO: 33340 - DNA, 201 bp, Homo sapiens
ggaggcggagcttgcagtgagccgagatcgcagagcttgcagtgaacctagatcgtgccactatgctccagcctgggcgacagagcaagactccatctccaaaaaaaaaaaaaaattgctgcacagtattctatatcatggccgtgtgtgtgtgtgtgtgtctgtgtgtgtgtgtaatggacatttatttttttatatccc

SEQ ID NO: 33341 - DNA, 201 bp, Homo sapiens
ggtagaaatgaaagaaggtgcagcttacatctgtctgcctactagccaattccgtaaactgttttgcggggaagatactgaaactataggccaaaacggacctttgtgttcccttccccatgcattaatttttcctagatcccaagtattggagagagctagcaattggctgaactgacaatttctcagttgcataaaaag

SEQ ID NO: 33342 - DNA, 201 bp, Homo sapiens
actcatgctgtgaagtaggtgatttaagccactgactttctaaattaaaggcacaaaaaggcagacatgtaattcttttaattacacattcatatttctcytacattcctctgagtcgttcatgtctgcctcctgcctcatcagcctacaagcagaaaacaagcaacagggaatgtggaagatctgtaaagggatgaaaaa

SEQ ID NO: 33343 - DNA, 201 bp, Homo sapiens
gccataaagatcatgtgttggaaaacaggactggagacatccagggatctatataaagcatagacaacagtcttagcgatcatggggcagcaatgtgggcmccctaccttcagcagatatggtagcggtctgcgttctttctgtaacaaaactcctcactacgtggagaacccctcaatcccaagtcagctgtacacctgg

SEQ ID NO: 33344 - DNA, 201 bp, Homo sapiens
agagatcacagatctgcttacttgtttaacatgccccaataatgagttcttggcatttgtaaatccagtcattattttcctgatgagaggtgagctttttaaaaaaaaaatccttcagcaacttgctttattttacttgaaactatgtatatcatagggatatatctccatgctactgcatatgaatttattgttttatct

SEQ ID NO: 33345 - DNA, 201 bp, Homo sapiens
ctaaactgcgtattttctacccttaaaggtgccccaagttagatacctgtctggcaaattacgtagtcctaatcataggtgttcttaagggtttatgtctygactgaaaagggacaaatcacctggcaaggagaccactacctaaccctggtgactcttaccttacagggctggacagacatgacagtgtgaaaggccttt

SEQ ID NO: 33346 - DNA, 201 bp, Homo sapiens
atatacaataaactataaaggacatacagtggattttgatatcgggttccagttcctcctcactgaggaattagtacaaacccttcatctgtgtggctaasgaaatagttctggtcctgcccgaatccgtttccatgtgtccacatggccctttttccccaccatgtacttctgacgggagaggtctgctccttacattag

SEQ ID NO: 33347 - DNA, 201 bp, Homo sapiens
gagtatgatttttatagtagactttgcagggtatttggctcttctcttctcttttctctctcttaattatgtttggaagattataagctgctacaagcaartctcttcttagccttttttttttttttttttgaggcagggtctcactttgtcgcccaggctggggtgcagtggtgcattcttggctcactgcagtctcaa

SEQ ID NO: 33348 - DNA, 201 bp, Homo sapiens
ttgaattactaaatgttctattttgtgtgaatcatattatcctgtgtcagttaaacaacactcttttgggcgggcatggtggctcatgttgtaatcccagyactttgggaggccgaggcaggtggatcgcttgagctcaggagtttgagaccagccggggcaatatggtgaaaccccatttctacaaaaaatacaaaaatt

SEQ ID NO: 33349 - DNA, 201 bp, Homo sapiens
aagaaaaaagcagaaagcaaaagcaggctacacattctgacaaccatcctcttttaaattgtccttttttctaaatgttaaataaaagaaaaaggcctgaracatctgttctgaaaaatagtcacgcaccacccctgctttgtttttcagcaatggataaaaaaacagatggtagggagagagagccactggatcggcctc

SEQ ID NO: 33350 - DNA, 201 bp, Homo sapiens
tgctactgcatttgattttttttttttttttttgagacggagtctcactctgtcgcccaggctggagtgcaatggtgcgatctcggctcactgcaagctcygcctaccgggtttaagcgattctcctgcctcagcctcccgagcagctgggactacaggcacatgacaccacaaccagataatttttgtatttttagtgga

SEQ ID NO: 33351 - DNA, 201 bp, Homo sapiens
gttctattttgtgtgaatcatattatcctgtgtcagttaaacaacactcttttgggcgggcatggtggctcatgttgtaatcccagcactttgggaggccraggcaggtggatcgcttgagctcaggagtttgagaccagccggggcaatatggtgaaaccccatttctacaaaaaatacaaaaattagctgggcctggtg

SEQ ID NO: 33352 - DNA, 201 bp, Homo sapiens
gatgacacgttagtgggtgcagcgcaccagcatggcacatgtatacatatgtaactaacctgcacaatgtgcacatgtaccctaaaacttaaagtataataaaaaaaaaaaacattattccaaaaaaaaataaaaataaaaataaaaataaaaataaaaaaaaataaaaaaaaaaagatctgtatcacctccggggaagga

SEQ ID NO: 33353 - DNA, 201 bp, Homo sapiens
actgactttgtttcattgattggtcgcaatgggttctcttctgttatttttggaatctgatccggtatgataatagacgtccaaagttaggatgatggagragcaagagatacatggttcagcctgtgaaaatcacgggtggagttaagggtttccagtgagcaactgtgggcagctgggaacatttgttgtttgtatttg

SEQ ID NO: 33354 - DNA, 201 bp, Homo sapiens
atgacacgttagtgggtgcagcgcaccagcatggcacatgtatacatatgtaactaacctgcacaatgtgcacatgtaccctaaaacttaaagtataataaaaaaaaaaaacattattccaaaaaaaaataaaaataaaaataaaaataaaaataaaaaaaaataaaaaaaaaaagatctgtatcacctccggggaaggaa

SEQ ID NO: 33355 - DNA, 201 bp, Homo sapiens
aaaatttttaaattttaaaaaagaaaacctctcataataattttgtgttgattatatgttgagataatagtgtttggtgtctattgggttaaataaaatatattattaaaaatcatttcacctgtttccttttaccttttaatattgctactagaaaaaattgaaattacacatgtggcttgcattatatttctattggac

SEQ ID NO: 33356 - DNA, 201 bp, Homo sapiens
aatgtgcacatgtaccctaaaacttaaagtataataaaaaaaaaaaacattattccaaaaaaaaataaaaataaaaataaaaataaaaataaaaaaaaataaaaaaaaaaagatctgtatcacctccggggaaggaaaggaacgatgcttcatgtccaagcttggtggtgccagtgatcctgaacttctcaagtaattagt

SEQ ID NO: 33357 - DNA, 201 bp, Homo sapiens
aaatttttaaattttaaaaaagaaaacctctcataataattttgtgttgattatatgttgagataatagtgtttggtgtctattgggttaaataaaatatattattaaaaatcatttcacctgtttccttttaccttttaatattgctactagaaaaaattgaaattacacatgtggcttgcattatatttctattggaca

SEQ ID NO: 33358 - DNA, 201 bp, Homo sapiens
cattctcctgcctcagcctcagaagtagctgggactacaggcgcccgccaccacgcccggctaatttttttgtattttttagtggagacggggtttcaccrtgttagccaggctggtctcgatctcctgacctcatgatccgcccaccttggcctcccaaagttctgggattacaggcctgagccaccgcgcccggccttg

SEQ ID NO: 33359 - DNA, 201 bp, Homo sapiens
tcagcctcagaagtagctgggactacaggcgcccgccaccacgcccggctaatttttttgtattttttagtggagacggggtttcaccatgttagccaggmtggtctcgatctcctgacctcatgatccgcccaccttggcctcccaaagttctgggattacaggcctgagccaccgcgcccggccttgttttgtttttga

SEQ ID NO: 33360 - DNA, 201 bp, Homo sapiens
ctacaggcgcccgccaccacgcccggctaatttttttgtattttttagtggagacggggtttcaccatgttagccaggctggtctcgatctcctgacctcrtgatccgcccaccttggcctcccaaagttctgggattacaggcctgagccaccgcgcccggccttgttttgtttttgacagtctctgtctatcacccagg

SEQ ID NO: 33361 - DNA, 201 bp, Homo sapiens
gacagtctctgtctatcacccaggctggagagtactggtgggatttcggctcactgcaacctctgcctcccaggatcgagcgattcttctgcctcagccasccaagtagctgggactacaggcgtgtgccactatgctcagctaattttttgtgtttttagtagagataaggttttaccatattggccaggctggtctcaa

SEQ ID NO: 33362 - DNA, 201 bp, Homo sapiens
gctggagagtactggtgggatttcggctcactgcaacctctgcctcccaggatcgagcgattcttctgcctcagccacccaagtagctgggactacaggcrtgtgccactatgctcagctaattttttgtgtttttagtagagataaggttttaccatattggccaggctggtctcaaactcctgacctcaagtgatccac

SEQ ID NO: 33363 - DNA, 201 bp, Homo sapiens
tgccggcctccacctaccaaggaaggggatggatctgcaatgtatccattttaacacacaagcccaccttcagtgatatacatggcaaaaaaatatgagaktgaaggagactctttttttttctgcaaaaagatcggaaaaacagactggattgagactggaccacagcacttgggagggctctttatggagaaccacagc

SEQ ID NO: 33364 - DNA, 201 bp, Homo sapiens
atatagtaatggaaacatggactccaagccagatctagttcatatggaagcaaaacattagccccagtgatagagttgtcatgaaaatactgtgtgctgcmtttatctttctggattgttatcagtcattattactttgtatttttgaaaaatacctgcaattttaaacattgtgtatcttcttttgtttcttgcattttc

SEQ ID NO: 33365 - DNA, 201 bp, Homo sapiens
aagaactgtcagaaggaagagtggccaagagaggttttgcagaggaagaatgggccagatgtgactgcttatgcaatatagtaatggaaacatggactccragccagatctagttcatatggaagcaaaacattagccccagtgatagagttgtcatgaaaatactgtgtgctgcctttatctttctggattgttatcagt

SEQ ID NO: 33366 - DNA, 201 bp, Homo sapiens
atgtggctgacatactatgcccattagtcacagattctgacttaaattctctccagagacaactttcatacacatggaagatgaaaggggaaaggtgaacrgttattaaggatacctgactgccagaaatgccgtctgagtcttttaccatccaaatttctgttgtcatcagaaataagagtgtaaagttccaggaaattc

SEQ ID NO: 33367 - DNA, 201 bp, Homo sapiens
gccacagaactgcattctgcttttagtcctaaggaaagccttgagtactgtatgtgaagaattccagtgacctggaaaaacaaatggagaaaggcgataargattatctcctttcttatcactcagttatttctctgcctggttgatacatcctttttatttatttaacttaaaatgacttaaaaggaaacgcaaggggaa

SEQ ID NO: 33368 - DNA, 201 bp, Homo sapiens
aatttttaaattttaaaaaagaaaacctctcataataattttgtgttgattatatgttgagataatagtgtttggtgtctattgggttaaataaaatatattattaaaaatcatttcacctgtttccttttaccttttaatattgctactagaaaaaattgaaattacacatgtggcttgcattatatttctattggacaa

SEQ ID NO: 33369 - DNA, 201 bp, Homo sapiens
aacactgcatgttctcactcataagtgggagttgaacaatgagaacacatggacacagggaggggaatgtcacacacccaggcctgtcaggggaggggggrgcaaagggagggggagcattaggacaaatacctaatgcatgcagggcctaaaacctagatgatgggttgatgggtgcagcaaaccaccatggcacatgta

SEQ ID NO: 33370 - DNA, 201 bp, Homo sapiens
ggggaatgtcacacacccaggcctgtcaggggaggggggggcaaagggagggggagcattaggacaaatacctaatgcatgcagggcctaaaacctagatratgggttgatgggtgcagcaaaccaccatggcacatgtatacctatgtaacaaacctgtacattctgcacatgtatcccagaacttaaagtaaaacactg

SEQ ID NO: 33371 - DNA, 201 bp, Homo sapiens
gaacccgggaggcggagcttacagtgagctgagattgtgccactgcactccagcctgggtgacagagtgaaactctgtctcaaaaaaaaaaaaaaaaagcrtaaaataaaacaaaacaaaaataaataaagtatgctgtgctgtttttaccacattatagcatcacaatgcctttcatttctatttatctcccagtgtaac

SEQ ID NO: 33372 - DNA, 201 bp, Homo sapiens
cagaagatggacttggcagtgtgtaataaaagatgactctggtttcctgctggtttttaggatgatgtcttttggttacattctttcaacttgtaaaataktaacttccaattcccatgggggaggacccctgagtggtgctatttcagtgggacagaatcacagcattctttcccacctccttagctgccctgtgctcca

SEQ ID NO: 33373 - DNA, 201 bp, Homo sapiens
aatggtcttttcttttctaccacatggccaggctgcaaattttccaaacttttacactctgcttcccttttaaatataagtttcaatttcaggtcatttctttttttttttgagatggagtctcgctttgttgtccaggctggagtgcagtggcgtgatctcgactcactgcaacctccgcctcccaggttccagcaattc

SEQ ID NO: 33374 - DNA, 201 bp, Homo sapiens
aaacttttacactctgcttcccttttaaatataagtttcaatttcaggtcatttctttttttttttgagatggagtctcgctttgttgtccaggctggagkgcagtggcgtgatctcgactcactgcaacctccgcctcccaggttccagcaattctcctgcctcaacctcctgagtagctgggactacagccacctgcca

SEQ ID NO: 33375 - DNA, 201 bp, Homo sapiens
tcaatcattgcctcttagctttcccggctgctagcacaggcttcagtttcatgagtgtacgggtcagtcaccatcatggtgtggaacccctgagtcccacrgacctgtgtcttcctcttgatctggccactcataagctgtgagaccttgggtcaaattaatgtaatttctctgacccttggttttctcatctgtaaaaca

SEQ ID NO: 33376 - DNA, 201 bp, Homo sapiens
taagctctaatttcaggtcatttaggtggaaacgtccagcagtcagtaagatgtgaatctgaagttcataggaggggaaatggtcataacatatgtgagartgaaaaccatgagaatggatgtgatcactgacagggagcaggcaggaggcaggagcaggagtcaaggacagagccctggggcatgcctacttgaaagagg

SEQ ID NO: 33377 - DNA, 201 bp, Homo sapiens
tacaagagaagaaatgatggtgtctttgagtttaaccacctgagggattgggatagaaatagtagttgagttgagtacaataagaaaagttgggtggaagytggagatctggtttggcagggctagaactgaagtcagttttagacataagagacggtgctgagacatacaggtggctataaggaagtaagacagaaagga

SEQ ID NO: 33378 - DNA, 201 bp, Homo sapiens
ctggactgcatagcaggaggtgagcagtgggcgagtgagtgaagcatcatctgtatttacatccatttcccatcacttgcatgaccacctgagctccgccwcctgtcagatcagtggcagcattagattctcaaagaagcgcgaatcctgttgtgaactgtgcatgtgagggatctaggttgtgcgctccttataagaatc

SEQ ID NO: 33379 - DNA, 201 bp, Homo sapiens
aatagtgctaaaactttggaaggtcctcaacctcctgggctcgagcaattctcccacctcagcctcccaggtgtgtgctcccatgcctggctacttaaacaaaaaaaaaaaattttttttttttttttttacagagatagggtcttgctatgttgcccaggctggtcttgaacttctgggctcaagtaatcctcctgcttc

SEQ ID NO: 33380 - DNA, 201 bp, Homo sapiens
tttcatggaagataatttttccatggatggacagggggcgggagatggtttcaggatgaaactgctccacctgagatcatcaggcattagtcagattctcrtaaggagcatgcaacctagatccctcgcatgtgcagttcacaatagggttcacgctcctaagagaatctaatgctgccactgatctgacaggagacagag

SEQ ID NO: 33381 - DNA, 201 bp, Homo sapiens
aaaggaatcacttgagcccaggtggtgaaggttgcagtgagccaagattgcaccactgcaatccagcctgagtgacaggagtaaaaccttgtctcaaaaaaaaaaaaaaaaaaagtggattagtggttttctgggggctggcagaggtatgggatttatttttggtgtgatgaaaatattctaaaattggaaaattggtta

SEQ ID NO: 33382 - DNA, 201 bp, Homo sapiens
acatggcacatgtatacgtatgtaacaaacctgcacgttgtgcacatgtaccctaaaacttaaagtataataaaaatacaaaaattagccgggcgtggtarcaggctcctgtaatcccagctactcgggaggctgaagcaggagaatcacttgaacctgggaggcggaggttgcagtcagctaagatcattccattgtact

SEQ ID NO: 33383 - DNA, 201 bp, Homo sapiens
gagaatcacttgaacctgggaggcggaggttgcagtcagctaagatcattccattgtactccaacctgggcaacaagagtgaaactccgtctaataaaaawttaaataaataaatgacataataaatatatattcattgactacctacaaagtgccacacactgagctaagaggaagagatggaattgaatgtaaattttc

SEQ ID NO: 33384 - DNA, 201 bp, Homo sapiens
tgaagcttttatttagtgtggctgtattagtccgtttccacgctgctgataaagacatacccgagactgggaagaacaagaggtttaactggaattacagttccacatggctggggaggcctcagaatcatggtgggaggcaaaaggcacttcttacacggcagcagcaagagaaagtgagaaagatgaaaaagtggaaac

SEQ ID NO: 33385 - DNA, 201 bp, Homo sapiens
gggactctgtgtgggggctccgacaccacatttcccttccacactgccctagcagaggttcttcatgcacatcccacccgtgcagcaaacctctccctggrtatccaagagttcccatacatcctctgaaatccaggcggaggttcccaaacctcaattattgatttctgtgcactcacaggctcaacaacacatgaaagc

SEQ ID NO: 33386 - DNA, 201 bp, Homo sapiens
ccaacatggagaaaccccatctctacttaaaaatataaaattaaccgggcgtggtggcacatgcccgtaatcccagctacttgggaggctgaggcaggggratcacttgaacctgggagttggaggttgtggtgagctgagatctcaccattgcactctagcctgggcaacaagagtgaaactccgtctcaagaaaaaaaa

SEQ ID NO: 33387 - DNA, 201 bp, Homo sapiens
acaggtggggttaaggatgatttgagtctaaaagtgcttactgctggatttctagtgcccagccttagagatgaatcagaccccaggatgctgacatctakctagctttcactcattttctcagtccacatttctggggtgtctatgctatgccaatcacgctgctaagcacttggataaattatcagctttcattgttac

SEQ ID NO: 33388 - DNA, 201 bp, Homo sapiens
cattcaccgggagaatacataataactgtgttccagaaatgccaagactggaaaaaggaaaccatgcggggagccaggtttacatttgtaaagctataaawccagggcaaatattaccgatactgtgcttagggacatatcaagataaaaggacacctttcttcagtttttacagcccaaaatacgttaagataaattttc

SEQ ID NO: 33389 - DNA, 201 bp, Homo sapiens; identical to SEQ ID NO: 7408

SEQ ID NO: 33390 - DNA, 201 bp, Homo sapiens
tcatctgtgatctgttccagctgtgaacatgtgcctggtggcccagtgtcccagatgttctttctcggtctttatgttgtatagcccataaaattaaaacrggattggagtttaattctaggccttcacagtcctatcatcagtgttcagtggagctattttctgaaaatgtagggtcctggtaagagaggccttggttgg

SEQ ID NO: 33391 - DNA, 201 bp, Homo sapiens; identical to SEQ ID NO: 7411

SEQ ID NO: 33392 - DNA, 201 bp, Homo sapiens
gaggaatataccattgtgaaagtttgaacaaggaacaatgggatgaagttgatttctcagagcaaggaaacttgcctcatctacctgggaagatcttgcckcatcttcttctacttttagaggaaggcagagagagaagtttgagtgagatcttgaaagtttcccaggtagatgaggcatgttaagggcagccacttcctc

SEQ ID NO: 33393 - DNA, 201 bp, Homo sapiens
tttggaggaggacataatttagcccataacagtctacagtagtatgataaacagatggtctttccctgctgtatatactttgtatgctaggtttttttaakttggagattttataagaagaaaaattattcataactatcattcacagtggatttcatgttgacacctttttcttttatgctttaggtccaccgggcccca

SEQ ID NO: 33394 - DNA, 201 bp, Homo sapiens
gggtcactcatgtcacctcgttttaactcgatgacctctgtaaaggccgtgtctcttaataagtcccatcctgaggtgctgggggttaggacttcagcatragaatttggaggaggacataatttagcccataacagtctacagtagtatgataaacagatggtctttccctgctgtatatactttgtatgctaggttttt

SEQ ID NO: 33395 - DNA, 201 bp, Homo sapiens
gccatatacacagtacacagtacacggactgggaggcttaaacaacagacatttctttccttacggttctggaggccgcaagtccaagatcaaggtgtcarcagtgttgtttcctccgaggcctccctccttggtttgcaggagtccatcttctccctgtgccctcaagcgatctttcctctatgtgtctgtgacctaatc

SEQ ID NO: 33396 - DNA, 201 bp, Homo sapiens
gtaaatgtatatcaaaagtctttcactttctcttcctggctcttggacttgttagaggcaagatattgaaatgtacaaggtccctctgggttctcacaagwtcatgtgtgcgtgtgtgtgtgtgtgtgtgtgtgtatcatgtcctcataatgaatagatattcacacacatatatacactcatgcccagaagtcagcattc

SEQ ID NO: 33397 - DNA, 201 bp, Homo sapiens
tggaaatgacagagagtttactgacagcagagcaattggttaaagtttcaatagggattgacatttcagctgaaacttgaaaggtgcacatgaaggttgaygggacaggggacagtgcaatgtgggtcaggcaggggcctcagttcctcccattgccaaccactccctcatgctacacttccccaaacaagacagcatgac

SEQ ID NO: 33398 - DNA, 201 bp, Homo sapiens
gtcagggcgaggaaaagagggttgtggcaatgtggtgggagaagggatgatggaaggagaacacgcacagcaaagagacaagaagttcagctgtagacacrcaggttagaggtgctggcggaacctgagaaaatggacccttcactagcgggtgcaaataaggacccagagcccagggttgctgaagacaaggaggagtca

SEQ ID NO: 33399 - DNA, 201 bp, Homo sapiens; identical to SEQ ID NO: 7394

SEQ ID NO: 33400 - DNA, 201 bp, Homo sapiens
attagagaagaagagaaaacttccatctgaagtggcctgggaggatgccaggaattttgcagaaggacatgggcagaggaaattgtcggagaagagatgtktggaaaatacagaggaggatggaataaacacaggcgagactaggttgggaggagccttcatgccagactgatcaggtggggctgcatattcttgagcaag

SEQ ID NO: 33401 - DNA, 201 bp, Homo sapiens
aactcataacagaaagtggcagacactcttgactttgcaacctttctatgccgattttgtgtatagaattgagctgggttttccttgccaatggaatcctyttctaggtaaatgagtcccacctgccaagaatgttagggaagctgatgagtgacaacattttgtaaattatcacagtgtgccttgccttcatctatggaa

SEQ ID NO: 33402 - DNA, 201 bp, Homo sapiens
aggtgtgaggaaggacacttctatttgtgcactgcagctgctgctcctgctgctggttcccatgagaacagttgccaacttttccagactaagtaggacayttcttaatgggacatctgggcctccactgtcgacattgtacttgttgattttaacaacagatgaactttccccaacttcccatgtatctgtgtccagcct

SEQ ID NO: 33403 - DNA, 201 bp, Homo sapiens
tctggtattgttcatattcaggcatctctggagcttgtgacagctttaccagccgcgtgggtatcctggcatttcagaaacccgagccagtgagccacccstacttggccttgacattgagttaaaatttcagtcagtttgaaagcaaacctcaaatgtccttccacgtaggacatcacatgtgtttccacatgcggcgtt

SEQ ID NO: 33404 - DNA, 201 bp, Homo sapiens
cctgagaaagcacagtgtgtattggaatgagatgggtgtcagggccagacagtccaagttcaagccttgatcctaccatttttaatacaattgtgaatgtycagtaagtgcttgctactgtgccaggggtcatgctatgtcttctgcatggctccatacccaggtgtgaatcatagcctcttagagcttctgatttcttat

SEQ ID NO: 33405 - DNA, 201 bp, Homo sapiens
ccatctgatattgattaaatgctgatagagtcagcagtgagaaatgcacacggtgaggaagtgccccagctctttggaatgtgaaccagtgacagctgtcygggcttggatctgcacgaataccacatgcaccagatgcctggcggccacagggctagctcacggggaaggatgggagggaaagatgagtgtgctggagtc

SEQ ID NO: 33406 - DNA, 201 bp, Homo sapiens
ccccagtgagcaaggattcctctccttggaattgaaagcatttgtggacagttcatctaataaaggatttcttataaaaaccacaaagagaaaataatggygttcttttgagacactatatattctggcagacactgcatactctgagtgggaccgttacatctggcttttgcctacgacaattcttttttagtaggcagg

SEQ ID NO: 33407 - DNA, 201 bp, Homo sapiens
gggccacgacaccaggcctttgtccagttttaataacaagtatgtggctagtgacagggatggtcgtcattccgtctggggccactctcccctcacaggcktcgtgggccaatactctattaaaataggtccctcccagttccctccttgttttgccaacttttcctcatttggatcatttcaagtcgattgactcatttc

SEQ ID NO: 33408 - DNA, 201 bp, Homo sapiens
actcctcaaacatccccagcattaaggaatacaacatcggatacaggctcaggaatcccacccataaccttctcagtccccactgacagtcatcagaagckgtgtgtgtgtgtgtgtgtgtgtgtgtgtgtgtgtgtgtgtgtgtgtgtgtagagagagagagtctcactctgtcacccaggctagagtgtagtagcatga

SEQ ID NO: 33409 - DNA, 201 bp, Homo sapiens
ggaatcccacccataaccttctcagtccccactgacagtcatcagaagctgtgtgtgtgtgtgtgtgtgtgtgtgtgtgtgtgtgtgtgtgtgtgtgtgtagagagagagagtctcactctgtcacccaggctagagtgtagtagcatgatcacggctcactgcagcctcaagctcccaggctgaggtgattctcccacct

SEQ ID NO: 33410 - DNA, 201 bp, Homo sapiens
gaatcccacccataaccttctcagtccccactgacagtcatcagaagctgtgtgtgtgtgtgtgtgtgtgtgtgtgtgtgtgtgtgtgtgtgtgtgtgtagagagagagagtctcactctgtcacccaggctagagtgtagtagcatgatcacggctcactgcagcctcaagctcccaggctgaggtgattctcccacctc

SEQ ID NO: 33411 - DNA, 201 bp, Homo sapiens
gacgtacagtccgtatagcactttatttttttattattatttatttatttattttttgagacagagtctcgctctgtcgcccaggctggagtgcagtggcrcaatctcggctcactgcaagctccgcctcccgggttcacgccattctcctgcctcagcctccccagcagctgggactacaggcacacgccgccacgcccg

SEQ ID NO: 33412 - DNA, 201 bp, Homo sapiens
gctggagtgcagtggcgcaatctcggctcactgcaagctccgcctcccgggttcacgccattctcctgcctcagcctccccagcagctgggactacaggcrcacgccgccacgcccgactaatttttgtatttttagtagagacagggtttcactgtgttagccaggatggtctccatctcctggccttgtgatccgccca

SEQ ID NO: 33413 - DNA, 201 bp, Homo sapiens
tgcagtggcgcaatctcggctcactgcaagctccgcctcccgggttcacgccattctcctgcctcagcctccccagcagctgggactacaggcacacgccrccacgcccgactaatttttgtatttttagtagagacagggtttcactgtgttagccaggatggtctccatctcctggccttgtgatccgcccacctcggc

SEQ ID NO: 33414 - DNA, 201 bp, Homo sapiens
gggaaatttgaagctgtttgctatcaagggtgcagcatgaacctcccttcttgtttccactgtgacatcttcaatgatgtttctgtggcccacagtgcctragtgtgagtggattctgctgcagaggtggcacagtggtggaaaggatagagctggccaagggcacggatgtctgggtaccactgatgctgatattcatgt

SEQ ID NO: 33415 - DNA, 201 bp, Homo sapiens
aggcacacgccgccacgcccgactaatttttgtatttttagtagagacagggtttcactgtgttagccaggatggtctccatctcctggccttgtgatccrcccacctcggcctcccaaagtgctgggattacaggcgtgagccaccacgcccggcctgcatagccctttaaaactaagccccgctgtagggagcctattt

SEQ ID NO: 33416 - DNA, 201 bp, Homo sapiens
gctgtatatactttgtatgctaggtttttttaatttggagattttataagaagaaaaattattcataactatcattcacagtggatttcatgttgacacctttttcttttatgctttaggtccaccgggccccaggggtccaagaggtgacagaggatcccagggaccccctggcccaactggcaacaagggacagaaagg

SEQ ID NO: 33417 - DNA, 201 bp, Homo sapiens
acacgccgccacgcccgactaatttttgtatttttagtagagacagggtttcactgtgttagccaggatggtctccatctcctggccttgtgatccgcccrcctcggcctcccaaagtgctgggattacaggcgtgagccaccacgcccggcctgcatagccctttaaaactaagccccgctgtagggagcctatttatat

SEQ ID NO: 33418 - DNA, 201 bp, Homo sapiens; identical to SEQ ID NO: 7403

SEQ ID NO: 33419 - DNA, 201 bp, Homo sapiens
caagagagcctggtgacctcaggcaagtcacttaaccccctggggccccagtttctttatcaatgtgatgagggacaacaatggcatctacttgatgttgttttaaggattaaatagttgtttagaatggtggctagtatgtaataggaactcaagttgttttagtaattgtaatattgtattataacctgctgcttcctc

SEQ ID NO: 33420 - DNA, 201 bp, Homo sapiens
aatcccggcactttgggaggctgaggtgtgcggatcacttgaagtctggagttcgagaccagcctggccaacatggtgaaacctcgtctctactaaaaaamcaaaaaaaacaaaaattagccggatatggtggcgcatgcgggtgatgccagctactcgggaggctgaggcagaagaattgcttaaacccaggaggcggag

SEQ ID NO: 33421 - DNA, 201 bp, Homo sapiens
tgtgctgatttatgtatacaatgtgaaatggttaccataaatattaacacatttatcccttcacatagttacctgtgtatgtgtgtgtgtgtgtgtgtgtatgtgtgtgtgtgtgtgttgagaacatttcagacctacttctttagcaaatttcaagtatatactatagtattattaactacagttaccatgctatacatt

SEQ ID NO: 33422 - DNA, 201 bp, Homo sapiens
ttgattatcacatctccatactctggctttgcctctgacgggtgtgaaaattgcaaggaactgtaacaaatgaagcagaatttataaaaaaaataaaattaaaaaaaaaacaaccctctgagtaacctttagtttgctggggacggagaggccagaccctgcagggctccaccaggcacaggagcatcaccgcattggaag

SEQ ID NO: 33423 - DNA, 201 bp, Homo sapiens
acatctgcaaatacatattcttttcaggtgcatgtggtacattcaccaagatgaactatattctgggccataaaatacgtctcaataaatttaaaaaaaarccaaaactatcaggccaggcatggtggctcacgcctgtaatcccaacactttggggggccaaggcaggtggatcacctgaggccaagagttcgagaccat

SEQ ID NO: 33424 - DNA, 201 bp, Homo sapiens
tccgtttcaaaaaaataaaaaaaagagatttgagctgttcatttggaggccccttgggaagaggaaagctgtccttgggccatggattttgagaaaaaacyacgatcctctgcaaagttgtgaactggagtgattctttttctctctcacgttctccctggggccctttgtgttcagtctacactgtgggcttgcggggga

SEQ ID NO: 33425 - DNA, 201 bp, Homo sapiens
acaaggtccctctgggttctcacaagatcatgtgtgcgtgtgtgtgtgtgtgtgtgtgtgtatcatgtcctcataatgaatagatattcacacacatatahacactcatgcccagaagtcagcattccagtacacattagaaagttattcatctaactgtcccaaagcaagattcgctccctctgcattctgatgaaccag

SEQ ID NO: 33426 - DNA, 201 bp, Homo sapiens; identical to SEQ ID NO: 7389

SEQ ID NO: 33427 - DNA, 201 bp, Homo sapiens; identical to SEQ ID NO: 7390

SEQ ID NO: 33428 - DNA, 201 bp, Homo sapiens; identical to SEQ ID NO: 7391

SEQ ID NO: 33429 - DNA, 201 bp, Homo sapiens
ctgcgcactgtcccagccatgctcacatgtcgggttgatgaatgaactcctcccttattcatctgacctttgcatcaccaccttcctgactgggcaacttyggctttctcgaccgaaccatcatgcatgaagatttgcaagcccctgtgggagcagaccactttactctaaatcacttgtcagaagcaccgagaggccact

SEQ ID NO: 33430 - DNA, 201 bp, Homo sapiens
gcaactgtcttttgtaaaacacacgtaatgtactggtgtttttaatctcaaatgtctggacatgaggttactactagtgatatcatgattcaaaacagagracagacctgtattttggcagcatactcaggtaacataatttagcttgactaaagaccttaagacagataaattcctgcattctactccacggggaagaaa

SEQ ID NO: 33431 - DNA, 201 bp, Homo sapiens
cttctcacgtgcctttttgttgcaggtcaatgttcaggttgtcaggaaagctatattgaaggcataacatacttagcaactgtcttttgtaaaacacacgraatgtactggtgtttttaatctcaaatgtctggacatgaggttactactagtgatatcatgattcaaaacagagaacagacctgtattttggcagcatac

SEQ ID NO: 33432 - DNA, 201 bp, Homo sapiens
catgatttctcactgcagctatagccagaggaaaatttttcctgttctgagactggagcaatgttggggctgaaatttcattttagtgatacacgtgctamattgccatcaaacattttatcatctcatgtttggatgattttccagttatctattgcatgaaacaaggcattttaaaactgagtgtcttaaagcaattga

SEQ ID NO: 33433 - DNA, 201 bp, Homo sapiens
tgttggtactgcacaaaggcacctgagggaagaatgagagcagaagtccagctccactctgcagaccaagtgtgcagatataaaacctttgcaggaatcascacagtgcctgcatcagaactcacgtacttgatcgattctgccctggatatccaagtaatgttactgctgtgccgatgactgctgtgcagatgttagttt

SEQ ID NO: 33434 - DNA, 201 bp, Homo sapiens
tgccatgatttctcactgcagctatagccagaggaaaatttttcctgttctgagactggagcaatgttggggctgaaatttcattttagtgatacacgtgytaaattgccatcaaacattttatcatctcatgtttggatgattttccagttatctattgcatgaaacaaggcattttaaaactgagtgtcttaaagcaat

SEQ ID NO: 33435 - DNA, 201 bp, Homo sapiens
taacctctaccttgagggaaagataatccagaaccccctttgctttacctagaaaattttttatcgctttttagaattttagactctttatgtttctgctrtatttatacagaaggcatttaatctacatatattttgttgatttataaaacccagtgaggcttttttcctttttggtgtccttggaaataccgaggcatc

SEQ ID NO: 33436 - DNA, 201 bp, Homo sapiens
aatatgtatttttcatgtaccatataattccgtattaactaatatatgtatagaaaattaatgaacagtcaggattctatataagacagtcttgacacatyagtgaaaagagatgactcctgctagcaggtggctggaccagatgaacactgcagtgacctgcagcttttattttattttatttatttttttgagacagag

SEQ ID NO: 33437 - DNA, 201 bp, Homo sapiens
aaaatttgacttctcttacaggtattcaggaaggaacacaatgtaccaaatgtaaaaataactgggcactgaagttttctatcatattattatacattttstgtgccttgctaacaatcacagtagccattttgggatataaaggtaagcatgctttcttttttttcttccaaataacaagtgttccttcattaatttaag

SEQ ID NO: 33438 - DNA, 201 bp, Homo sapiens
ttaagcatgagaaaactcatatttgcaaatacgaagtatttcattcatacaactcagatgcaaaataacaacatgataaacttcatctctgtatcttaaayttacagctatgagatctgaaaggggggacatagtaattccttttgactcatttcagcaataatcagcgtcctctctgagagttataaagttttttttccc

SEQ ID NO: 33439 - DNA, 201 bp, Homo sapiens
tcttccagaaagcctggtgcgatccacgagcagaaggaaagctgctgtgacaagcaggggcgatgaagcaggtcgcatcctgccccaccctctgcttctgkgccccttgccaggattaacatcgtgtctcttcttctctcacagacgacttcgcagaggaggaggaggtgcaatccttcggttacaagcggtttggtgagt

SEQ ID NO: 33440 - DNA, 201 bp, Homo sapiens
gtgctgatttatgtatacaatgtgaaatggttaccataaatattaacacatttatcccttcacatagttacctgtgtatgtgtgtgtgtgtgtgtgtgtatgtgtgtgtgtgtgtgttgagaacatttcagacctacttctttagcaaatttcaagtatatactatagtattattaactacagttaccatgctatacatta

SEQ ID NO: 33441 - DNA, 201 bp, Homo sapiens
atcctaattaaacacagaggagatctgtgtaatatctacaccaaatctacctttataacataaaactccaaatctaaattccagaaagccacccctgtttcccccccccctttttttttttgagatggagtctcgctgttgtcacctgggctggagtgcaatggcatgatctctgctcactgcaacctccacctcccagat

SEQ ID NO: 33442 - DNA, 201 bp, Homo sapiens
aacacagaggagatctgtgtaatatctacaccaaatctacctttataacataaaactccaaatctaaattccagaaagccacccctgtttccccccccccyttttttttttgagatggagtctcgctgttgtcacctgggctggagtgcaatggcatgatctctgctcactgcaacctccacctcccagattccaggaaat

SEQ ID NO: 33443 - DNA, 201 bp, Homo sapiens
gagcccaggagttcaagaccagcccgggcaatataacaagacctcgtctctaccaaaggaaaaaaaaaaaaaattagctgagtgtggtggcacttacctatagtcagtcccagctacttgagaggctgaggtgggaggattgcttgagcccaggaggtcaaggctgtggtgagccttgatcataccactgcactccagcct

SEQ ID NO: 33444 - DNA, 201 bp, Homo sapiens
agcccaggagttcaagaccagcccgggcaatataacaagacctcgtctctaccaaaggaaaaaaaaaaaaaattagctgagtgtggtggcacttacctatagtcagtcccagctacttgagaggctgaggtgggaggattgcttgagcccaggaggtcaaggctgtggtgagccttgatcataccactgcactccagcctg

SEQ ID NO: 33445 - DNA, 201 bp, Homo sapiens
gcccaggagttcaagaccagcccgggcaatataacaagacctcgtctctaccaaaggaaaaaaaaaaaaaattagctgagtgtggtggcacttacctatagtcagtcccagctacttgagaggctgaggtgggaggattgcttgagcccaggaggtcaaggctgtggtgagccttgatcataccactgcactccagcctgg

SEQ ID NO: 33446 - DNA, 201 bp, Homo sapiens
ccaggagttcaagaccagcccgggcaatataacaagacctcgtctctaccaaaggaaaaaaaaaaaaaattagctgagtgtggtggcacttacctatagtcagtcccagctacttgagaggctgaggtgggaggattgcttgagcccaggaggtcaaggctgtggtgagccttgatcataccactgcactccagcctgggc

SEQ ID NO: 33447 - DNA, 201 bp, Homo sapiens
ggaagagcgaagaaggctgaggaggcagagcccacgcatgctaatgctagtgtccactcattagaccctctatatgccaggcaccgtgagaggcatttgcycccttgaacctcacagcaaccctagaacataggtattattattaccctcatttgacggctaggaaaactgaggcccggcaaggtttatgcagactgagac

SEQ ID NO: 33448 - DNA, 201 bp, Homo sapiens
ggaaaaatataattttccaaaatagaggtaattaatatgcaaagttatctagatatggagtatgcagttctccaaaggatttatttgttctttcttctaatttttttttttttgaaacagaatctctctctgacacccaggctggagtacagtggcatgatctcagctcactgcaacctctgcctcccaggttcaagtgat

SEQ ID NO: 33449 - DNA, 201 bp, Homo sapiens
caaatttttagtttcaggttttgtgacttcataatctctggggaattttccttcttaatgtttaggaaaaaatcactccctactgctttttaaagaattawaagtctcacttgtgtgttaagaatgtgcacttaggcctgttaaaaaattatgattacccccaaaatggtgggcttgtatgaccttttacatttttaaagt

SEQ ID NO: 33450 - DNA, 201 bp, Homo sapiens
ttagcctagtgtggtggcatgcgcctgtagtcccagctactcaggaggctgaggcaggagaattgcttgaacccaggaggcataggttgcagtgagccaarattgtgccaatgcacaacagtgcaacagagcaacagagcaagactccatctcaaaaattagaaagaatagaatagaatagaatagaatagaatagaatag

SEQ ID NO: 33451 - DNA, 201 bp, Homo sapiens
cacatgttgcagaaggtgcaggaatttagacttgtcaggaaaacaagagaatcaaactcagaagtctgcaaaggttctggcagaaatccagactgcattcttattcccaaggcctgaagatgccctgtaatctctaatatttgaaataacctttctaacatgtcgttctcattctgtgaaacgggaaaatataaaagtaaa

SEQ ID NO: 33452 - DNA, 201 bp, Homo sapiens
ttgttttatctactgcacagaatttcagaccatgatgccccgtgatttatacaataatttccctttggatggacattaaaagtttccattttttccttcaygacaagtaatgttttagtgaatattctcattcatatacctttgtactgttggaatatttcagaagaatttatttctataactgaaattgacatatcaaag

SEQ ID NO: 33453 - DNA, 201 bp, Homo sapiens
atccagtcattattttcctgatgagaggtgagctttttaaaaaaaaaatccttcagcaacttgctttattttacttgaaactatgtatatcatagggatakatctccatgctactgcatatgaatttattgttttatctactgcacagaatttcagaccatgatgccccgtgatttatacaataatttccctttggatgga

SEQ ID NO: 33454 - DNA, 201 bp, Homo sapiens
aagagatcacagatctgcttacttgtttaacatgccccaataatgagttcttggcatttgtaaatccagtcattattttcctgatgagaggtgagcttttwaaaaaaaaaatccttcagcaacttgctttattttacttgaaactatgtatatcatagggatatatctccatgctactgcatatgaatttattgttttatc

SEQ ID NO: 33455 - DNA, 201 bp, Homo sapiens
ctagtaaaaatactgttccaactccgccatgggtgtgttgcagatgactatagcagggcaggtcctagtaatgcttctgtctcccccatggttgcagtaastcttttttttaagtctgtaagagatcacagatctgcttacttgtttaacatgccccaataatgagttcttggcatttgtaaatccagtcattattttcct

SEQ ID NO: 33456 - DNA, 201 bp, Homo sapiens
ttggtgactgggtcatccttcagctaatgtgtgaatattacttaattctagagagttggccctgggcttctcacgtgcctttttgttgcaggtcaatgttsaggttgtcaggaaagctatattgaaggcataacatacttagcaactgtcttttgtaaaacacacgtaatgtactggtgtttttaatctcaaatgtctgga

SEQ ID NO: 33457 - DNA, 201 bp, Homo sapiens
gtatacctggtatgtgctagtaaaaatactgttccaactccgccatgggtgtgttgcagatgactatagcagggcaggtcctagtaatgcttctgtctccyccatggttgcagtaagtcttttttttaagtctgtaagagatcacagatctgcttacttgtttaacatgccccaataatgagttcttggcatttgtaaatc

SEQ ID NO: 33458 - DNA, 201 bp, Homo sapiens
ttttagatatgacgtcattcatttccatctcattatctgtacatctcaatacactttggtttgctaccatgtagcctggataacattcttattcttccacyttccctaagttcctgttatatgagtacagggcagtgctgtacctgagcttgctagtatggtagtcacaggctgcatgtggctactgagtactcaaaaatg

SEQ ID NO: 33459 - DNA, 201 bp, Homo sapiens
aatgtttttcactggtaatcagatcatctggccatctgcaatgcctgtttgacccacagtatacctggtatgtgctagtaaaaatactgttccaactccgycatgggtgtgttgcagatgactatagcagggcaggtcctagtaatgcttctgtctcccccatggttgcagtaagtcttttttttaagtctgtaagagatc

SEQ ID NO: 33460 - DNA, 201 bp, Homo sapiens
atatcataacaatctggcagttcctcaaaattgagtataaaattttcatatgacccagcagtttcactcttaggggtgtgtgtttgtgtgtgtgtatgtaygtatgtacatatgcacacgtgcacacacacacacatatatatatacaccaaggagaaattaaaacatatccacataaaaacttgtacatcaatgttcata

SEQ ID NO: 33461 - DNA, 201 bp, Homo sapiens
atcaacagcgatcattatatagccaccatttagtgagagcttaccatatgccaggcactgtgctgtactccccgtttcatctcaattaattcttactatarcgctataagaaagtatcccattttatcagtgaggaaactgaggcttaaggagattgtataaattgcccaaagttataggcccgtagatggtagaagtttg

SEQ ID NO: 33462 - DNA, 201 bp, Homo sapiens
ctcacagacgacttcgcagaggaggaggaggtgcaatccttcggttacaagcggtttggtgagtcctaacaaagctgtgttccttctcagtggtcaacctrggatgcagccacgaaccctcagagaccattggcaggccactggcaggcccttcatgcacatgggtgtttgtggctctgaggtccaattttggttggaaag

SEQ ID NO: 33463 - DNA, 201 bp, Homo sapiens; identical to SEQ ID NO: 7396

SEQ ID NO: 33464 - DNA, 201 bp, Homo sapiens
tctaggtttgtgtaagtacactctgtgatgtttgcatgatgatgaaatcacttaaccatgcatttctcagaacatctccctatcattaagtgatgaatgaktgtgtgtgtgtgtgtgtgtgtgtctgggtgcatgtgtgtgtatatatgtaaagttaatgaatgattgctaattactgcagttctttaaacctggtatact

SEQ ID NO: 33465 - DNA, 201 bp, Homo sapiens
aatgtgtgtagatgacaagaggggcaacttttacaaatttaagtcaattttatagccatctgttgtaggggatacaaatattagtctatgacaggtaaacwattatagttcagtaagccacaataacagcatcttgtacaaaatgatgtgatggtgcagagaagctcttgaggagggtggtaaggagttaggcctaacttg

SEQ ID NO: 33466 - DNA, 201 bp, Homo sapiens
acaatacattctaaaagcttgaagaagaagggtgagcttactgaagaacacacagtatattggcttgcttgggctgccatatacacagtacacagtacacrgactgggaggcttaaacaacagacatttctttccttacggttctggaggccgcaagtccaagatcaaggtgtcagcagtgttgtttcctccgaggcctcc

SEQ ID NO: 33467 - DNA, 201 bp, Homo sapiens
ggcctcaaacagttctcctgccttggcctccgaaagtgctgggatcgtagcactgtgcctgaccagtatgtacatatttttgtgtaaacataaatcatccttctctagaataagtgcctagaagtgaaattgctgagtcatatagccattgtatgttccattgttttagaaactgccaaactattttccagagtgactgta

SEQ ID NO: 33468 - DNA, 201 bp, Homo sapiens
cctcagaccaatgggagagggaggccaaggagcaggagggataaaggaacttagggtagatctgccatccatcctccattgctccagcacttctatccttctaactttagaggctttctgcttctgtagaaaaagtaaggccaggcacagtggctcacacctgtaatcccagcacttggagagtccgatgggggaggatcg

SEQ ID NO: 33469 - DNA, 201 bp, Homo sapiens
cacttgtaatcccagcactttgggaggctgaggcaggcggatcacttgaggtcaggagtttgagaccagcttgaccaacatggtgaaatcctgtctctccaaaaaaaaatacaaaatttagctaggcgtggtggtatgtgcctgtaataccagctactcaggagtctgaggcatgagaatcacttgaaccccagaggtgga

SEQ ID NO: 33470 - DNA, 201 bp, Homo sapiens
actgccctccagcctgggcagcagagcaagactatctcaaaaaaataaaaaataaaaattaaaaattaaataagtatggtacacaatcatttctgaattargcagttcaatcctattttagtgtgaaatacattattatggcaaaattatttcctaaggagctctatctatacacattaatgaatttagacctacttcctc

SEQ ID NO: 33471 - DNA, 201 bp, Homo sapiens
ttgtccaaagatacagggccatacaggctgtctcctcgggtgacccgaggacaccctgtggccagtgcggtaatgagtcattgtttataggaagcaccctscgctgcagatgttcttccagaccctccacatgaggcaggcttgtcctctcaggcagcagccacaagcttctgtgcatgaatctgcttcttagacaagatt

SEQ ID NO: 33472 - DNA, 201 bp, Homo sapiens
attaaaaattaaataagtatggtacacaatcatttctgaattaggcagttcaatcctattttagtgtgaaatacattattatggcaaaattatttcctaargagctctatctatacacattaatgaatttagacctacttcctctgtctgaaatttgacttaaagaaataaccttaaatctttttcctcccatgcttttat

SEQ ID NO: 33473 - DNA, 201 bp, Homo sapiens
actgtgcccatctagcagaagcagctgtgagatcagggaacacaggaccttgctaacagaccccaggcttgctgagtggtccagttgcaggaagagcagcytagggagtgaagctgcctactgcaaactcacattgtcccgtcatcgctcctgaggtctggggtcagtcctctcagggtgctggccagatgccaaagctga

SEQ ID NO: 33474 - DNA, 201 bp, Homo sapiens
gaagcagctgtgagatcagggaacacaggaccttgctaacagaccccaggcttgctgagtggtccagttgcaggaagagcagcctagggagtgaagctgcytactgcaaactcacattgtcccgtcatcgctcctgaggtctggggtcagtcctctcagggtgctggccagatgccaaagctgagcttaggacctggagcc

SEQ ID NO: 33475 - DNA, 201 bp, Homo sapiens
aagctgcctactgcaaactcacattgtcccgtcatcgctcctgaggtctggggtcagtcctctcagggtgctggccagatgccaaagctgagcttaggacytggagcccagcaccgagtgaggaggtaattacacaacgacacaagagaaagacacaccaaagtggggagcagaccagtcctggagagcactgaggaccag

SEQ ID NO: 33476 - DNA, 201 bp, Homo sapiens
gaggcaggagaatagcttgaacccgggaggtggaggttgcaatgagccgagatcgtgccactgcacttcagcgcaggtgacagaagcaagactctctcaaacacacacacacacacacacacacacacacacacacacaccccattctttagccaaattgaaaatcagtggacaccatagaagttaaagaagttcatttgc

SEQ ID NO: 33477 - DNA, 201 bp, Homo sapiens
agtccatagagtaaagtgaaagcatgtttattaggaaagtaaaggaataaaataatggctactttatacacaaggcagccccgggagctgctggttgcccttttttttttttttttttttgagacggagtctcgctctgtcgtccaggccggactgcggactgcagtggcgcaatctcggctcactgcaagctccgcttcc

SEQ ID NO: 33478 - DNA, 201 bp, Homo sapiens
aggcaggagaatagcttgaacccgggaggtggaggttgcaatgagccgagatcgtgccactgcacttcagcgcaggtgacagaagcaagactctctcaaacacacacacacacacacacacacacacacacacacacaccccattctttagccaaattgaaaatcagtggacaccatagaagttaaagaagttcatttgca

SEQ ID NO: 33479 - DNA, 201 bp, Homo sapiens
catctccatactctggctttgcctctgacgggtgtgaaaattgcaaggaactgtaacaaatgaagcagaatttataaaaaaaataaaattaaaaaaaaaamaaccctctgagtaacctttagtttgctggggacggagaggccagaccctgcagggctccaccaggcacaggagcatcaccgcattggaagcaccttctga

SEQ ID NO: 33480 - DNA, 201 bp, Homo sapiens
tcatccatgttgtggcatgtagcagtacctcattttttaaaaatccggaataatattccgtgacatggacggaccacattttacttatccattttcatcarttggtaggcatttgggtagtttctactttgtggctattataaataatgctgctgtgaacttttgtgtgggcttgtgtttttaattctcttgggtatatac

SEQ ID NO: 33481 - DNA, 201 bp, Homo sapiens
ggcaggagaatagcttgaacccgggaggtggaggttgcaatgagccgagatcgtgccactgcacttcagcgcaggtgacagaagcaagactctctcaaacacacacacacacacacacacacacacacacacacacaccccattctttagccaaattgaaaatcagtggacaccatagaagttaaagaagttcatttgcaa

SEQ ID NO: 33482 - DNA, 201 bp, Homo sapiens
gtaagaccacatatctgtgaagctaattatattcttgattctgggcatgaaaagcagaaagaaaaagggattttttttccatctgtatctgatttatacarggactccctaacttaacacaggaagggtgaattattaggcagattttgataatttaaagacacagtttgccctagaaataatgtttttcactggtaatca

SEQ ID NO: 33483 - DNA, 201 bp, Homo sapiens
gcaggagaatagcttgaacccgggaggtggaggttgcaatgagccgagatcgtgccactgcacttcagcgcaggtgacagaagcaagactctctcaaacacacacacacacacacacacacacacacacacacacaccccattctttagccaaattgaaaatcagtggacaccatagaagttaaagaagttcatttgcaaa

SEQ ID NO: 33484 - DNA, 201 bp, Homo sapiens
agtacaggcagtcctggaaaacgacagagtcccgttgggggaattgccttgtaaaatggacagcatggaggtgcaggccagaatgcatgctctttgcctgyagatgacaccccaaaaaatcattgcatttttaaaggattctgaatgatcacaacacacaaaaaaagaaatgataaatgtctgaggtgatgctcaatacta

SEQ ID NO: 33485 - DNA, 201 bp, Homo sapiens
acaagaatgaacttcccagtcctggactccagattagacagacttgcccacacagtacaggcagtcctggaaaacgacagagtcccgttgggggaattgcsttgtaaaatggacagcatggaggtgcaggccagaatgcatgctctttgcctgtagatgacaccccaaaaaatcattgcatttttaaaggattctgaatga

SEQ ID NO: 33486 - DNA, 201 bp, Homo sapiens
atgagaggatatgggttgggtatgccacaagaatgaacttcccagtcctggactccagattagacagacttgcccacacagtacaggcagtcctggaaaaygacagagtcccgttgggggaattgccttgtaaaatggacagcatggaggtgcaggccagaatgcatgctctttgcctgtagatgacaccccaaaaaatca

SEQ ID NO: 33487 - DNA, 201 bp, Homo sapiens
aggaggtgtggctctaggttggttagtttgcataacaaaggcatgctcctttctgggcccttggctatctttgagaattagctagccctggagggaggagkagtctctccccagcctgaaagggtttttttaaggatgttaaaacatcatcataatatacaaaaaataagaaatatacacaaacaaatgagtttaacattc

SEQ ID NO: 33488 - DNA, 201 bp, Homo sapiens
atgatgagacatacggggagttgggcacatacatctccctcctgagacctcactccctcctcacctccatctcattgcatattaacagcaccaaatcactractcatactgaataggctactcactcaaactcttactcatgctactactaagccattactctcgtcttatgttctggcaattttaatttaaaaaattaaa

SEQ ID NO: 33489 - DNA, 201 bp, Homo sapiens
accatgtaaacagcaggggtctcctccagagttctgccttcttaaatcagcagatatccttctagagagctgccacagcaaggccatttactgtgattgcsttttattgctgtattttaagttgttctcatgaactgtatggtgatatggaaagaacttctaggcatttcagtcttcttaggcttattcctatgtcccagc

SEQ ID NO: 33490 - DNA, 201 bp, Homo sapiens
agaagtggatgctatttttttaacctgatctttcttataatgcccaaaaggacaacactacgtattttcatatgactgtcaagggacagagtcagttccarctatttgacctagataaacagattaccattcacttcatctgaaagtacagggataattaacttggacaaccatgtaaacagcaggggtctcctccagagt

SEQ ID NO: 33491 - DNA, 201 bp, Homo sapiens
agccactaaaatctcttttctttctgtctttaaaaaaatttccatttttggccaggcacggtggctcatgcctgtaatcccagcactttgggaggccaagrtgggtggatcacgaggtcaggagttcgagaccagcctaaccaacatggtgaaaccccatttctactaaaaatacaaaaattagcttggtgtggtggtgtg

SEQ ID NO: 33492 - DNA, 201 bp, Homo sapiens
aaatcagatcaaccttaaaggacatctggtaaatgccattaggtagcactttactctcccaaagattttattttgtagattaaatcacatctcccctagayacattctgacatataaagtttcttcctccattctgacacccctctttgttctggtaaccagtatcagcattttactaattttctgtggtatttccatcct

SEQ ID NO: 33493 - DNA, 201 bp, Homo sapiens
acttgtctgaccacaaatttaccagggtggagtttcccaaccctagtaagcctgagggtactgcaggagaccagggcacatctcagtccttatctcaacckcatcatacagacattcccagagcagctgtttatagacctccccccaggaatgcattcctttcccagggtattaatattaatattccttgctaggaaaaga

SEQ ID NO: 33494 - DNA, 201 bp, Homo sapiens
caagctagttacttcctagatacaatgagggttacaggtattgggtaaatatagcctttccaaatgggagaaattggccaaaacagaggggttacaggccycatgcaagttcaaagtcagcagggcagtcaaattttaaagctccacaattatctcctttgactccaggtcgcacatcccggtcatgctgacgcaagaggt

SEQ ID NO: 33495 - DNA, 201 bp, Homo sapiens
gtccatagagtaaagtgaaagcatgtttattaggaaagtaaaggaataaaataatggctactttatacacaaggcagccccgggagctgctggttgcccttttttttttttttttttttgagacggagtctcgctctgtcgtccaggccggactgcggactgcagtggcgcaatctcggctcactgcaagctccgcttccc

SEQ ID NO: 33496 - DNA, 201 bp, Homo sapiens
aaaggaataaaataatggctactttatacacaaggcagccccgggagctgctggttgcccttttttttttttttttttttgagacggagtctcgctctgtygtccaggccggactgcggactgcagtggcgcaatctcggctcactgcaagctccgcttcccgggttcacgccattctcctgcctcagcctcccgagtagc

SEQ ID NO: 33497 - DNA, 201 bp, Homo sapiens
tcgagaccagcctggccaacatagagaaaccccatctctactaaaaatacaaaaattgacgagttaatgggtgcagcacacgaacatggcacatgtatacrtatgtaacaaacctgcacgttgtgcacatgtaccctaaaacttaaagtataataaaaatacaaaaattagccgggcgtggtagcaggctcctgtaatccc

SEQ ID NO: 33498 - DNA, 201 bp, Homo sapiens
ccccgggagctgctggttgcccttttttttttttttttttttgagacggagtctcgctctgtcgtccaggccggactgcggactgcagtggcgcaatctcrgctcactgcaagctccgcttcccgggttcacgccattctcctgcctcagcctcccgagtagctgggactacaggcgcccgccaccgcgcctggctaattt

SEQ ID NO: 33499 - DNA, 201 bp, Homo sapiens
agtggcgcaatctcggctcactgcaagctccgcttcccgggttcacgccattctcctgcctcagcctcccgagtagctgggactacaggcgcccgccaccrcgcctggctaattttttgtatttttagtagagacggggtttcaccttgttagccaggatggtctcgatctcctgacctcatgatccacccgcctcggcct

SEQ ID NO: 33500 - DNA, 201 bp, Homo sapiens
ggcttaggtctgctcttttattttttgtcattgttacctgttttttatagctctgttttcatttttttgcctgccagtgggttatctgaacaatttttagrattttgttttgatatatctatagtggtttctagtgagtccctttgcatgacttttttagtggttgctttaggtgctggattatgtgtctacataacttat

SEQ ID NO: 33501 - DNA, 201 bp, Homo sapiens
acccttcgtcccactttaaattcatgtgtgactccatcctgtcttttgaatattttgctttattcagtaacacaagttcatgacttggtaaaaaaagccgyggcttacaacatcataagctagttccccataaattgctgccacactgataatacctttaaacataggaaacagcattttggaattctgtgttttcaagta

SEQ ID NO: 33502 - DNA, 201 bp, Homo sapiens
cactggccctccctgttacacctcaacgcttctagtccgaggcagtcgctgagcactaaggacaagtccttggtgacaattagaaggatcttttctgatgataataattatactttcacaggcaactgagaagccttggctgtaacattcttgcaattggccttttgaaatcctggtctgtttcccttggaatacgggttg

SEQ ID NO: 33503 - DNA, 201 bp, Homo sapiens
actggccctccctgttacacctcaacgcttctagtccgaggcagtcgctgagcactaaggacaagtccttggtgacaattagaaggatcttttctgatgataataattatactttcacaggcaactgagaagccttggctgtaacattcttgcaattggccttttgaaatcctggtctgtttcccttggaatacgggttga

SEQ ID NO: 33504 - DNA, 201 bp, Homo sapiens
ctggccctccctgttacacctcaacgcttctagtccgaggcagtcgctgagcactaaggacaagtccttggtgacaattagaaggatcttttctgatgataataattatactttcacaggcaactgagaagccttggctgtaacattcttgcaattggccttttgaaatcctggtctgtttcccttggaatacgggttgaa

SEQ ID NO: 33505 - DNA, 201 bp, Homo sapiens
catccctacccctactctggtccatggaaaaattggggaagaagatggggaccgctggtctataccatctaggactgtgtaagtacactctaggacagtgrtcccctacctttttggaaccagggaccagtttcatggaagataatttttccatggatggacagggggcgggagatggtttcaggatgaaactgctccacc

SEQ ID NO: 33506 - DNA, 201 bp, Homo sapiens
agtccacagacagtactttgagtagcaaggtcttgtagcattatcattctagggttccaagatggcagtgaccacgttttagtcttccagtcacccctgcmtgcccatgtatggttacaacatgacttgtacagttggtgctcaacaatgttcaatacattggatttaggtagtaaagaataagtagttcaaagggacata

SEQ ID NO: 33507 - DNA, 201 bp, Homo sapiens
aggaggccagtgggaatggcaggatcaagtgaaccctctcggtttcagcctgggcttcttcagaacctgccaccctctccctgactcccccgcttctcctsagagaacagccatcagaaaaccttgttcttccattgttgctgaggaaggcttgaatctgagctattacactttatgtttcttaataaactccagctgggg

SEQ ID NO: 33508 - DNA, 201 bp, Homo sapiens
agaaataacaaataattaaggccacagcgctcagggacccaagtttattggcaataaaaggtagctgtgctgacaacgctaccaattaatctgccaaaagygagctcagtggtgttgccataaagatcatgtgttggaaaacaggactggagacatccagggatctatataaagcatagacaacagtcttagcgatcatgg

SEQ ID NO: 33509 - DNA, 201 bp, Homo sapiens
cttaaaattacacactgggttatacagtgattacactcatcaaaatgattttttgcctaactttaaattctctcaacaaagatcccaaattttcctagcgyacatatttatttttaagagttatgaaaatacacagccgtatatggttgtatctgaatccatgttgccgtgagagactgagcagttctcaagtattaagtg

SEQ ID NO: 33510 - DNA, 201 bp, Homo sapiens
tccccacccaaatctcatcttgaattgtagctcccataattcccacatgttgtaggagggacccagtgggagataattggatcatgggggcggtttccccratactgttctcatggaaatgaataagtctcatgaaatctgatggttttataaggggaaacccctttttgcttggttctcattctctctttgcctgccacc

SEQ ID NO: 33511 - DNA, 201 bp, Homo sapiens
aaacaaaagttataaaaaaaaaatctttatggaagtaaaaattttctcctaaagatgtccatgctggcagtgaggcctcatcaaaggcttcccaaacagaktcatagagtatatgtagaatcagaagctcccactttgtgctgaaaatgataggaagtagggtgtcagggatccacatataaattctgcaggtgtgagtaa

SEQ ID NO: 33512 - DNA, 201 bp, Homo sapiens
ccccatgggcacacagctgcccacagctgctgcctggttacttcctgacagacatgggtttgctgctatgggaacgatgtctgtcccacaggcaaggagtrtccctgtgcccgtgtgcttgctgctaaacagtgacaaggacattaggaaaacagggccttcttaactcttgaggatgacagtgcatgcaccaaagaaacc

SEQ ID NO: 33513 - DNA, 201 bp, Homo sapiens
aaccaaccaggaatacatttggggaaaaaggaagatgcccagggttatatattggagttcttccaattccagagcagcagaagaaagcctcttccaatccyttgtttgtgccataggtatgagaacaaatggcaagacatccctcttccacgttgacttgccttcaggtgaatctgaggctgcccagtgacctggcaaaat

SEQ ID NO: 33514 - DNA, 201 bp, Homo sapiens
ttttttatatcccctacttttcaaaaattattttctaattctgcctgaaataacttcctttgcaaaattactttagctgaatgctatcaattataaatccmattgtatcaacaagctcatcttttccattgttaatattattcactgaattgtgaataatgtaactgggctgctttccttcccacacctgatgtagacact

SEQ ID NO: 33515 - DNA, 201 bp, Homo sapiens
agaaaagacctgccctcatggcagatgagaagacaggtaacaaactaatcgaaaaccgtcattcaaatagtgataaatgctagggagaggacaaggacaarggagcaatagagaggagtggctattctgttttatttatttttttggagacagagtctcacttttatctcccaggctggagtgcaatgacgtgatctcggc

SEQ ID NO: 33516 - DNA, 201 bp, Homo sapiens
gtctgctggaatatattatgataagtgctacactggtggtgtggatgaaaggccacacgggcacagataggagctatgagttccgccaggatttcacttakctaaaagacaggcaaagggtattccaggcagaggaacatgcgtaggcagacgcagggcaacatgaaagtgcatggcagattcaaggaatgttgcaggtcg

SEQ ID NO: 33517 - DNA, 201 bp, Homo sapiens
tgacgtgatctcggctcactgcaacctccaccacctgggttcaagtgattctcctgcctcagcctcccaagtagtgggaattacaggcgcctgccaccacrtccagctaatttttgtatttttagtagagatggagtttcaccatgttggccaggctggtcttgaactcctgacctcaggtgattcacctgccttggcctc

SEQ ID NO: 33518 - DNA, 201 bp, Homo sapiens
gggaaacattgtaggaaaaaaagcatcccattattcctgtctccaaaagcaagattggagattggggtcttctctaagacagacgccaccacctgcacccrggacctccagcaaccacctccacaaagcctatgtaaacagtgtaatgtgttttgatattaaccttgtaacaaacatcttaagtttccttcatgttggtgc

SEQ ID NO: 33519 - DNA, 201 bp, Homo sapiens
attacatcacccaatggatatttttggattcttaaacgagaaacccactgttctagcactagaagaacaagggaggctgtgatagcatcattcccacttcmagccccctctggggttagaaaatggatcaaataattggttgctgatcttaaatttcctcagcattcatgtgtgtttacacccacactgaccccagtacca

SEQ ID NO: 33520 - DNA, 201 bp, Homo sapiens
gcaactggatcaacagatgttaggctttcccagagtgtttggcagaaccagtcccagatgccaagcttgaagatacaacatctctttgcaacctctaattsctatcactgtactcattaatcacttgctcaaacctttaactgagtccattaggacttcaataccaggtgttttttttgttttgttttgttttgtttttac

SEQ ID NO: 33521 - DNA, 201 bp, Homo sapiens
acaattcaagtttttttccaacacggtgtatgtgagtgatcattgatgccaatgaaatttattcactcaacaatatctattctgcttaacactagatcacrcatagttgggcatttaaagatatgtgacgctattctttttctcgagcaagttaccatctaggtatgagaaaaggcttcatctttaaaaaatagagaagag

SEQ ID NO: 33522 - DNA, 201 bp, Homo sapiens
gttgtctttttttattaagtgcagctaaacttgacttataaatctttaaattattgaaattaaaatgacaaatacttcaggttttagtatgtttaaaattrataaatattaagagttggcagaaatatagagtatattaaaatttggaatgaattttagctccatgatatggttctactttatatttgaggctaagctgtc

SEQ ID NO: 33523 - DNA, 201 bp, Homo sapiens
ttaatgaaggtggtgaatggacataatcaagtccaggttcactatggatccagttccagacctaagagtgtagacaaaaagatggagaagatgtgatggcrtatttaaagttaatgacagcagtgatctttccatgttctattcaagccttcttgggttggattttagtaaaatgatttagagtgtggggggctttgtgac

SEQ ID NO: 33524 - DNA, 201 bp, Homo sapiens
gtacacaataaatggaatgcatttgaatcatcccgaaaccatccctacccctactctggtccatggaaaaattggggaagaagatggggaccgctggtctrtaccatctaggactgtgtaagtacactctaggacagtggtcccctacctttttggaaccagggaccagtttcatggaagataatttttccatggatggac

SEQ ID NO: 33525 - DNA, 201 bp, Homo sapiens
gtaagcaaaaacgttgggataccaggaggatgcattgtgaatcaaaggccagaacactggccctccctgttacacctcaacgcttctagtccgaggcagtygctgagcactaaggacaagtccttggtgacaattagaaggatcttttctgatgataataattatactttcacaggcaactgagaagccttggctgtaaca

SEQ ID NO: 33526 - DNA, 201 bp, Homo sapiens
tcatgggaagaacagtaggcttgggagtcaagtggcgcttctgcggacaactcattatggagccttggccaagtcagtattttcgaaagggcctcagcttyttcttttataaagtgaagatattggactcagtggtcctcccgttgaaacaataataatcccattagttttactatgcagtttcaaagaaaagcagacacc

SEQ ID NO: 33527 - DNA, 201 bp, Homo sapiens
gaaaaagaaataacaaataattaaggccacagcgctcagggacccaagtttattggcaataaaaggtagctgtgctgacaacgctaccaattaatctgccmaaagcgagctcagtggtgttgccataaagatcatgtgttggaaaacaggactggagacatccagggatctatataaagcatagacaacagtcttagcgat

SEQ ID NO: 33528 - DNA, 201 bp, Homo sapiens
aatgtggctgtaatgatgcccatactacacattaagaaaccagggctcggggggattagtgctaataagtggagtgtccagatagaaacttgagcctaagstaagcagggacttcattcctgttgaatttcattatattgggtttgctccagagttccagcctttcaaagtcgttttcaatcctgttttttcaggtcatgt

SEQ ID NO: 33529 - DNA, 201 bp, Homo sapiens
actccccatatttatatttcagctgactgaaggtgattttaggccgctggcccccagaactgtaagaggagaaatctgtattgtttaagccagcacgttcrtggtaaccttttacagcagccgcaggaaactcatacacaccctctgcctcccaggctgctgcacctggtgctcttctttgctttgaccttgcttctcttt

SEQ ID NO: 33530 - DNA, 201 bp, Homo sapiens
ctttttcctttaggaattcatgaactagtgggaaagagagtgacatgtataactctaatttccttaattttcaacaactactgttcagtgcctatcatgcrtcataaatgtgttagttgttgagggtacaatgtgatgagtttcctgtctttaaatggctttccatatggaggagtccgaaccagaactggatataaggca

SEQ ID NO: 33531 - DNA, 201 bp, Homo sapiens
cttttcggtttaaaaaagtgactactttttagatagtaggctggatttataaatttagcttagcccatttatactcaaattcttagcagttttgcctataycaataaattcttagagatttttattcactggaagtttaaatttactgtataagtgaaagggaaagactatttttcaaaatgtactactaataattaggaa

SEQ ID NO: 33532 - DNA, 201 bp, Homo sapiens
gctccacatgctgatccaatgagagagatattaataacactattttcaaatagagaagcagaggtacagagaggttaagcaaatcacttaagggtcacacrgctaactgtagaactggtgcccaagcccagaactttaaactctgaatcctgccatttctcactgtgttcttcacccctccctcaccctggcttcttgggc

SEQ ID NO: 33533 - DNA, 201 bp, Homo sapiens
taattaatgagggaatcaataagatgttacagccaattcacaggagaattcaaagagcaggtccatatagaagcggtcaggaatgctgaagtgaatttacstagtagatgcaaaactggcttcttccatagaaagggagggaaagcaactgcgcttccactgcacaaaatttactcatgtctatgagtaaaaatcacttac

SEQ ID NO: 33534 - DNA, 201 bp, Homo sapiens
tgagaaatcacccaggtcagctctgcccatcaagcatgagatgtagagcacacctatcaacgtggacttgatgacctcagattctaaatgcttctttaccygtcttgaaatgaggatttctctccctacggcccacataggacgctcacctcgcttgctgggagtcacctttgttggcattgctggcgtagctgaatttgg

SEQ ID NO: 33535 - DNA, 201 bp, Homo sapiens
aataaatagtgatggcctcagagagaagggagagaaaatgatcccttcccttcctgactgtgggatcttgagcaagttatcgaatccttcggaacctctgkcttttcatctctaaaatggctacaagagtgcttgccttatgattgttgaaagaaataaatgcacgtaaagcccttagtaagggcttagactgagtgctta

SEQ ID NO: 33536 - DNA, 201 bp, Homo sapiens
agaaagggagggaaagcaactgcgcttccactgcacaaaatttactcatgtctatgagtaaaaatcacttacattgctcttcattacctacaacttacacrgtagtaaaattgctcgcagaccccaaaacacgcagagacctcatagaatcacataacctggaagggtctcctaggcaatgcctagttttccattgacaac

SEQ ID NO: 33537 - DNA, 201 bp, Homo sapiens
tttgcaagtcacccctgaagcttcccatttgaaaattaaattttattttggaaatcattgtaaattcacatgcagttgcaagaaataatatggagttcctrtgtaccccttacccagttcctcccagtggtaacatcttacaaaactgtagtacagtatcacaaccagaatattgacactgacaaagtcaagatacaaaaa

SEQ ID NO: 33538 - DNA, 201 bp, Homo sapiens
aaaaggccatcagaaactccaaaaggtccagtgctcgcaggggttgagttagtacactctctcaagagcctgtcccctgtgctgagtatgcctggcctccyaaaaatgggatgagagggtctgttgtgccagaattaaaactacaaggcaccaactctcttgccttcctcataacactctcaactaaatgtgcagtttgga

SEQ ID NO: 33539 - DNA, 201 bp, Homo sapiens
ataagaaatatacacaaacaaatgagtttaacattcgaatctttctcagtcacctctcttggagttgcaaaatcatttgccaaatctgttctcatttacayagtccttaagttactgtccagtcaggcgtttaacctctaccttgagggaaagataatccagaaccccctttgctttacctagaaaattttttatcgcttt

SEQ ID NO: 33540 - DNA, 201 bp, Homo sapiens
tacctacaacttacacagtagtaaaattgctcgcagaccccaaaacacgcagagacctcatagaatcacataacctggaagggtctcctaggcaatgcctrgttttccattgacaacacccattaatcattctggttcatttcaacaattttctcaattacatcctacacagtgtgtattattgctcgtttcttaattaca

SEQ ID NO: 33541 - DNA, 201 bp, Homo sapiens
attcagtggagaaaaccctaaattggatgaatttttacttttcaacccataatatggcttctgtaggccctgatgaaatcagtacatgttattggagaagycactgagtaggttagtaggttgtgtaagtcctggctagtagattcggtgttgttagagaagccacttggagtcagattggatggtggagaggagctgatg

SEQ ID NO: 33542 - DNA, 201 bp, Homo sapiens
agagttctcgtcacttttcaaggtttctggaaagaaaaggcctatgagctcttgccaaggcggctgcattcagttgtcagttgtgcaggttttgctttgcrgaaaggcttccagaagggctggtccatctggaggggacacgtttttctaactcacacaaagacatctatgttgactggccttggccagggccttgtggta

SEQ ID NO: 33543 - DNA, 201 bp, Homo sapiens
tggaaataattgaggggaaatatgaatacttataattctgatacacattcaccaaatgccttccatatgccatgaactgtggtacaaagatggataaaacmaaattcccacttgatcattttatttgccaacatcaatacttattaattcatcttgtttcaatttcttggaaaacaaaagttataaaaaaaaaatctttat

SEQ ID NO: 33544 - DNA, 201 bp, Homo sapiens
catttgggtagtttctactttgtggctattataaataatgctgctgtgaacttttgtgtgggcttgtgtttttaattctcttgggtatatacctaggagcrgaattgctgaggcacatgataactctgtgtttaatctttggaggaactgcctgagtgtatcccaaagtggttccaccacttcattattaagtatcctcat

SEQ ID NO: 33545 - DNA, 201 bp, Homo sapiens
agtgaggctgacctgtctgaatccgacctctgatactttccatgtgatcttggacaagtcacttaacatcctgtgcctctgttttcttagctgtaagtcartatatttaagattcactgcacagggttgctgtgaggattagatgaggtgatgtgggaaaatatttgggaaaatgaaaaatgctataccaagatgagatgt

SEQ ID NO: 33546 - DNA, 201 bp, Homo sapiens
cccagggcctgacacttaggaggaggtcaataaatatttgctaaatgaatacattagtgaatgacacggtaggaaacagcagagtgtggcctgctcttggrgctggtttgacaaggaaggattccagctatcagggagtggctgggcaggggcacagagctgcgcgctacacagtgatgagaacccttccaaaaagcctct

SEQ ID NO: 33547 - DNA, 201 bp, Homo sapiens
gtcttttactagctaagcctcattttgtgtatctgtgaaatgggtatgacaagtatatagtgtgtattctttggaggattgatattttattattgatattmtatatattgatattataaaaccataatatatatgggggccaggtatacagtaggtctgcactaaattgtggctattattaaactgctgactgctcccacc

SEQ ID NO: 33548 - DNA, 201 bp, Homo sapiens
atgcccctcatatctccactcgggttttacatacgtcccaatgaggaaagctgtctgatttacagtgtcacttataaatccattccttacctgtgtgccasacattgtgcatgctaactcttccaagtggtcattcattcaaaagtagacttttctgatgggcagtgcttaactccaaagaagacacagcaaatgaccttc

SEQ ID NO: 33549 - DNA, 201 bp, Homo sapiens
gctgggttttgatcagaacacattcacatggaagacaaagtctaccttccactccacccttgccttctcatgctgttatgagattggtgtttccatgtggrtaagtcacaaagaagaaaaaagttccttcactgatctagttgtagtttcactagggatacagaatgcatcttcacaaaatgaagaaggaaagtttacttt

SEQ ID NO: 33550 - DNA, 201 bp, Homo sapiens
aggtcatgccatgatttaagtctttggtgtaatttataacagggctttcattccacatagaaaaatgatcagggatgttggttctataattgttttctctstctaaaagatgctgttctggaaactcggtttagtggcagctatgaatgctcatctgtagcacctcccttttccctcccatttggaaggagcaagagactg

SEQ ID NO: 33551 - DNA, 201 bp, Homo sapiens
ggtttccagtaagctgcaagagcatttaacccaaatgggtttgtgaccttcctaagcggaggtgtgggaaggctctagtgaagtgtggtgaacagatcgtyggtaacgcagaagtcatcctgctgttccggcactggaggcagagcccggccaactgagtatttctccagaggatgtttctgggcggcctttccctccttg

SEQ ID NO: 33552 - DNA, 201 bp, Homo sapiens
cctcaaacgatcctccaaccttggcctcccaaagtattaggattacaggcgtaagccactgtacccagctccagtaaatattgttttgaacaaatgagtgrgaagcgtatttacagagaaagcttcttgggctggctggctgtgggtccagttgtgtcttatttctaaaaactaagaagtttatataaacaaaaaatcaaa

SEQ ID NO: 33553 - DNA, 201 bp, Homo sapiens
gacgtggtctgatttcataccctgcctgggttgtgcttgatacacttaagtattgtgtcagttaaagtgtgctgtgctgagcactatttacaatagcaaaraactatttacaacccaaatgcccatgaatgggcaaagaaaatgtgcaaatgggcaaagaaaacgtgacacatatacaccacagaatactatgcagccgta

SEQ ID NO: 33554 - DNA, 201 bp, Homo sapiens
aaacgatcctccaaccttggcctcccaaagtattaggattacaggcgtaagccactgtacccagctccagtaaatattgttttgaacaaatgagtgagaarcgtatttacagagaaagcttcttgggctggctggctgtgggtccagttgtgtcttatttctaaaaactaagaagtttatataaacaaaaaatcaaagtag

SEQ ID NO: 33555 - DNA, 201 bp, Homo sapiens
tagaattgtggaatcacacaagcctggaaggagttctgaaggttagtgccttaaagtatatcacgttttctgctgtcttaaagtggaggcccttgttggamccacatgtcaactcctccagaagccctatgtccctttcaggccctctcaggtccgccaagtttcagatcatcatgtagcgtggccagtgtgttcagcctt

SEQ ID NO: 33556 - DNA, 201 bp, Homo sapiens
gtggcctttactccagttcccaataaattccttatttgcatctgagacctcctcagcctggccttcactgtccacatcactatcagcattttggtcacaaygatttaacaagtctataggaagttccaaattgtccttcatcttgctgtcttcttctgagccctccacactcctccaacctctgcccattacccagttcca

SEQ ID NO: 33557 - DNA, 201 bp, Homo sapiens
atttatttcccagttacctgtttcattaaaagcatcacacgtggctctagaatcctttattattatgcttagcagaaagggaaagagaggcagcaccaccygcatggcctgggccctccctctggagcctgcattctccctttctgcactggggcgggggcgctagactgactttgtttcattgattggtcgcaatgggtt

SEQ ID NO: 33558 - DNA, 201 bp, Homo sapiens
tttgccattccaaagctctttctgctctagaaactcgtgtccccatttaggcctaagcagggtgggagctccccaaggacagagaagcaaaggaagaacaracatctgcagttcacactagatagtccagtcatgggttttttaaggaagcaaaatgatcttttgaaaggaaactcatgcagtctgtccgcttcttgccaa

SEQ ID NO: 33559 - DNA, 201 bp, Homo sapiens
tgctaacagaccccaggcttgctgagtggtccagttgcaggaagagcagcctagggagtgaagctgcctactgcaaactcacattgtcccgtcatcgctcytgaggtctggggtcagtcctctcagggtgctggccagatgccaaagctgagcttaggacctggagcccagcaccgagtgaggaggtaattacacaacgac

SEQ ID NO: 33560 - DNA, 201 bp, Homo sapiens
gtagcagtcaggacgaccagaggtcactctcatcgccatcttggttttggtggattttggccggctccttcactgcaacctgttttatcagcaaggtcttyatgacctgtattttgtgctgacctcctatcttatcctgtgatttagaatgccttaaccatctgggaatgcagcccagtaggtttcagcctcattttaccc

SEQ ID NO: 33561 - DNA, 201 bp, Homo sapiens
gggtcctgatccagaccccaagacagggttcttggatctcgcacaagaaagaattcagggcgagtcctcagtgtaaagtgaaagcaagtttattaagaaastaaaggaatgaaagaatggctactgcatagagtagccctgagggctgctggttgcccatttttatggttatttcttgatgatatgctcaacaaggggtgg

SEQ ID NO: 33562 - DNA, 201 bp, Homo sapiens
tgttaaaggaaaggggtcctgatccagaccccaagacagggttcttggatctcgcacaagaaagaattcagggcgagtcctcagtgtaaagtgaaagcaartttattaagaaactaaaggaatgaaagaatggctactgcatagagtagccctgagggctgctggttgcccatttttatggttatttcttgatgatatgct

SEQ ID NO: 33563 - DNA, 201 bp, Homo sapiens
gtacaaacgtatgttcccatctagttatttcagttttaaacaattttctaaatttaactgtcatttctaaactccatataaaggcatggaaaattaaatargcctacatgttcccatttattttatatgccataattcattgcatgccttctgactttttgtttaatggtttttcatttttatttccagtttcattgcttt

SEQ ID NO: 33564 - DNA, 201 bp, Homo sapiens
gttgcggcgtgtctgggaagtgagcaggagtagaaacagatggatcttccacgggctcaaagtcaagaagattgacttctatgcagtagtcctctggatamagcttagtaaacatataatcacaccatcatctggggctctgtataccctagtaaatgagtgcttctaattttataagcactgtcattaccacagttctac

SEQ ID NO: 33565 - DNA, 201 bp, Homo sapiens
agatcacatgactgactaccaatgggggcagaggtgttaaaggaaaggggtcctgatccagaccccaagacagggttcttggatctcgcacaagaaagaawtcagggcgagtcctcagtgtaaagtgaaagcaagtttattaagaaactaaaggaatgaaagaatggctactgcatagagtagccctgagggctgctggtt

SEQ ID NO: 33566 - DNA, 201 bp, Homo sapiens
agccaatccctacatcagctcttttcattttgtggatgaggaacctgaggatctaaatggttaactgacttgtcccagatcacatgactgactaccaatgrgggcagaggtgttaaaggaaaggggtcctgatccagaccccaagacagggttcttggatctcgcacaagaaagaattcagggcgagtcctcagtgtaaag

SEQ ID NO: 33567 - DNA, 201 bp, Homo sapiens
gtagtaaaattgctcgcagaccccaaaacacgcagagacctcatagaatcacataacctggaagggtctcctaggcaatgcctagttttccattgacaacacccattaatcattctggttcatttcaacaattttctcaattacatcctacacagtgtgtattattgctcgtttcttaattacatcctaggaatgttttga

SEQ ID NO: 33568 - DNA, 201 bp, Homo sapiens
gataatagtgtttggtgtctattgggttaaataaaatatattattaaaaatcatttcacctgtttccttttaccttttaatattgctactagaaaaaattkaaattacacatgtggcttgcattatatttctattggacaatgctattatagatgattttcaaggcatgttttttgaagtactggaaaaataaaattaatc

SEQ ID NO: 33569 - DNA, 201 bp, Homo sapiens
atgtggctacttgaaattgagatatgcagcaagtctcaactccaccctgaagttggaagacaagatgaaagaaaaaaaaatctcttagccgggtacagtgkctcacatctgtaatcctagtactttagtaggccaaggcaggagaattgctcaagttcaggaattcaagaccagtgtgggcaacatagtgaaatcccatct

SEQ ID NO: 33570 - DNA, 201 bp, Homo sapiens
tattgttttgaacaaatgagtgagaagcgtatttacagagaaagcttcttgggctggctggctgtgggtccagttgtgtcttatttctaaaaactaagaartttatataaacaaaaaatcaaagtaggaatttaaagagagcattagtataatttttaataacttacacgttttatctcatgggtttcataatgtgtatga

SEQ ID NO: 33571 - DNA, 201 bp, Homo sapiens
tttgaagatggggggaaggtttaacacatttgtccagaagcactcttctgctggaatatgggactacatgtggatcccctcttcctgagtcatcatgacamttcctgtgtcacagcgttaaatgtccccttggcagaatgttctaggtacacccttgaattactaaatgttctattttgtgtgaatcatattatcctgtgt

SEQ ID NO: 33572 - DNA, 201 bp, Homo sapiens
taaactattaacagtagttacctctggggggtaaaattggaaaaggtaaaggaaactcacatttttaccttatatattgctccttgtttgaatttttcttytaatgagtatgcatttgtgtatcttgagttcttagcatatggcctggcacttaataaacattttattcaatgtttaacaaataggggaatcagtcaattg

SEQ ID NO: 33573 - DNA, 201 bp, Homo sapiens
caggcggaggttcccaaacctcaattattgatttctgtgcactcacaggctcaacaacacatgaaagctgccaaggcttgagacttgcaccctctgaagcyacggccccagctccacattggcccctttcagccatggctggagtggctgggaagcagggcaccaagtccctaggctgcacacagcatggggaccctgggc

SEQ ID NO: 33574 - DNA, 201 bp, Homo sapiens
ttccactttccctaagttcctgttatatgagtacagggcagtgctgtacctgagcttgctagtatggtagtcacaggctgcatgtggctactgagtactcraaaatgtggctacttgaaattgagatatgcagcaagtctcaactccaccctgaagttggaagacaagatgaaagaaaaaaaaatctcttagccgggtaca

SEQ ID NO: 33575 - DNA, 201 bp, Homo sapiens
acctctggggggtaaaattggaaaaggtaaaggaaactcacatttttaccttatatattgctccttgtttgaatttttcttctaatgagtatgcatttgtrtatcttgagttcttagcatatggcctggcacttaataaacattttattcaatgtttaacaaataggggaatcagtcaattgagtggcacaaaaattatac

SEQ ID NO: 33576 - DNA, 201 bp, Homo sapiens
attttcccactctaggcattagaatcttgtctttcctaatgacctactgtttacccagttcatatatttataatgacacctgcaagggttttctttctttmtttttttccaaacccagagactttgaagacaacaaaaggataacttgggtgattgaaaacacacccaatggtaagaactctatacaatttgtgttcatgt

SEQ ID NO: 33577 - DNA, 201 bp, Homo sapiens
ttaccttacagggctggacagacatgacagtgtgaaaggcctttgtactctcagccatgtggcttgctggaccatctgaaggcctactgagactgtcctgsgaaggggacagcaatccagtgactcacccagcagtaatttgcctgggttgactggataggcctgtcctgtagattggtatccaaagattaatatgatggg

SEQ ID NO: 33578 - DNA, 201 bp, Homo sapiens
taccatcagtggtcaatcactggaatcactgaagtatttcaactgagtgaaggaagtgccactcagcttcagtctgggtggcagagtcctttcaaatgtgrcttcagcaccgactttctgtgcattactcatgctgtgaagtaggtgatttaagccactgactttctaaattaaaggcacaaaaaggcagacatgtaattc

SEQ ID NO: 33579 - DNA, 201 bp, Homo sapiens
caggcagtcagaccttatggttgtcttgccttgttccctaaaaatcgctgttattctgttctttttcaaggtgcactgatttcatattgttcaaacatacrtgttttacaatcaatttgtacagttaacacaattatcacagtggtcttgaggtgacgtacatcctcagcttatgaagataacaggattaagagattaaag

SEQ ID NO: 33580 - DNA, 201 bp, Homo sapiens
gtctgggtggcagagtcctttcaaatgtggcttcagcaccgactttctgtgcattactcatgctgtgaagtaggtgatttaagccactgactttctaaatyaaaggcacaaaaaggcagacatgtaattcttttaattacacattcatatttctcctacattcctctgagtcgttcatgtctgcctcctgcctcatcagcc

SEQ ID NO: 33581 - DNA, 201 bp, Homo sapiens
ttcagactgtacagcagacacaactctcctctgcgccacaatccagggtctcagccggcatgccaggcagggatgagagttggaattgctgggggcggccyggcactgtctcctcctaggccctctccaagtaaccagcttgggctccctccagcatggcagcctcagggcagtcagacatcttgcaagggctccaagaac

SEQ ID NO: 33582 - DNA, 201 bp, Homo sapiens
tgatccacccgcctcggcctcccaaagtgctgggattacaggcgtgagccactgcgcccggcctggttgcccatttttatggttattttttgatgatatgstaaacaaggggtggattattcatgtctcccctttttagaccctatagagtaacttcctgatgttgccatggcatctgtaaactgtcgtggcactggtggg

SEQ ID NO: 33583 - DNA, 201 bp, Homo sapiens
ataacccactctgactgctgaagtgcggaagcagggagatctgtaggaggttgtgcctctagactaaatcagaggtgatggtgtctttgattagaacactrgtcctggagatgctgagaagtgataagatttgggatgtatgttagaggcagagctgaccaggcttgctgatgtggctatcagggaaagagtgagattaag

SEQ ID NO: 33584 - DNA, 201 bp, Homo sapiens
cccactctgactgctgaagtgcggaagcagggagatctgtaggaggttgtgcctctagactaaatcagaggtgatggtgtctttgattagaacactggtcstggagatgctgagaagtgataagatttgggatgtatgttagaggcagagctgaccaggcttgctgatgtggctatcagggaaagagtgagattaagggtg

SEQ ID NO: 33585 - DNA, 201 bp, Homo sapiens
ttcagctatttattgagtatctgtcatatgccagactctgttttaggctctggaaatagttgtagaatgagacagaaaagacctgccctcatggcagatgrgaagacaggtaacaaactaatcgaaaaccgtcattcaaatagtgataaatgctagggagaggacaaggacaagggagcaatagagaggagtggctattct

SEQ ID NO: 33586 - DNA, 201 bp, Homo sapiens
gcccagggactggatgagaccacagaagaagagagtatagacagggaagataagggctgaggactgagccctggggcattatttaagttgagaagaggagrgagaacttagcatttagcgctgacaaatccaaatcctatgtgtctggttccctcactcccaaccacacagctctgtgttctgtctctgtctctgtgtctc

SEQ ID NO: 33587 - DNA, 201 bp, Homo sapiens
tagcctcatggtgtgtgggaagtaaaaagtccctcaggtggaaacagcatggaatgttctaggaatagaactaagccagctgtagctacaatagagtggcrgggagatggaggagatgacgtcaagaaatagggctagaatatgttgagaccagggggcccatggggagggctttggagtctatggaaagccttcagaggg

SEQ ID NO: 33588 - DNA, 201 bp, Homo sapiens
ggctgaggactgagccctggggcattatttaagttgagaagaggagggagaacttagcatttagcgctgacaaatccaaatcctatgtgtctggttccctyactcccaaccacacagctctgtgttctgtctctgtctctgtgtctctctctctatctctgcatgtgggtagctgagggtggggatgctggtcaggggaaa

SEQ ID NO: 33589 - DNA, 201 bp, Homo sapiens
cttagcatttagcgctgacaaatccaaatcctatgtgtctggttccctcactcccaaccacacagctctgtgttctgtctctgtctctgtgtctctctctstatctctgcatgtgggtagctgagggtggggatgctggtcaggggaaactggctgataattttcctcttcctcctccttcctcatccttctcattttcca

SEQ ID NO: 33590 - DNA, 201 bp, Homo sapiens
aattaattcttactatagcgctataagaaagtatcccattttatcagtgaggaaactgaggcttaaggagattgtataaattgcccaaagttataggcccrtagatggtagaagtttgaaaccacatttgctttcagaacccaagctcttaatctaaatcatatattgagcacaaggtgcacaattcaagtttttttccaa

SEQ ID NO: 33591 - DNA, 201 bp, Homo sapiens
cttaaaccagccagcctcccaccacgtgctttgtcctaccacctgagggctgacgtggtctgatttcataccctgcctgggttgtgcttgatacacttaastattgtgtcagttaaagtgtgctgtgctgagcactatttacaatagcaaaaaactatttacaacccaaatgcccatgaatgggcaaagaaaatgtgcaaa

SEQ ID NO: 33592 - DNA, 201 bp, Homo sapiens
gacacatatacaccacagaatactatgcagccgtaaaaaagaatgagatcatgtctttgcagggacatggacgaagctggaagccatcattctcagcaaamtaacacaggaacagaaaaccaaacactgcatgttctcactcataagtgggagttgaacaatgagaacacatggacacagggaggggaatgtcacacaccc

SEQ ID NO: 33593 - DNA, 201 bp, Homo sapiens
aaactacagggctcctttgatgtcagtgtcaagggcatcagcatttcggtcaacctcctgttgggcagcgagtcctccgggaggcccacagttactgcctscagctgcagcagtgacatcgctgacgtggaggtggacatgtcgggagacttggggtaggtctccatcggggcactgccagctggactcctggttgcagct

SEQ ID NO: 33594 - DNA, 201 bp, Homo sapiens
taaaatcaatcgaaagcaacttccagctttatctgactccctcaggcctctcctggcagacttgtatattttcttctcttgatgtaatctcctaattctgytcccagttagccaggctctaccccaacatgaacctggaactccagggatcagtgccctctgctccgctcctgaacttcagccctgggaatctgtctgtgg

SEQ ID NO: 33595 - DNA, 201 bp, Homo sapiens
gtaacccaggctgtggagaagcgacagtcttgcacatccccctgtctccccaatcttctttagaccttcagctccagcgggagcaccctaaaacttcttcrtgtctctttgctgcagataccgcctgactctaatatccgactgaccaccaagtccttccgacccttcgtcccacgggtaaggagtcccttagttccccat

SEQ ID NO: 33596 - DNA, 201 bp, Homo sapiens
ataaatatttgtaaatcagtgatcactgagcacatgtgtggaataatgtgactgcagtgatcagcacggggccagaccagagctggggaactcactcagtyattctcttcccatgtttttcagatttgcgaaatgatccagaaatcagtgtcctccgatctacagccttatctccaaactctgccaggtaggacaccccat

SEQ ID NO: 33597 - DNA, 201 bp, Homo sapiens
tgactcccagctatttcctttccacagcggcccaggaggggctattggctctgcagagtgagctgctcaggatcacgctgcctgacttcaccggggacttraggatcccccacgtcggccgtgggcgctatgagttccacaggtggggctctcccttctgctgcggctctgaagtggctggagctggctgtcagggggaat

SEQ ID NO: 33598 - DNA, 201 bp, Homo sapiens
agccttggctacttaagggacctgggcccaatccacagctgggacagtcctggcccactgcactgggaatctaggatgggggccttggccagagccctgcygtccatactgctggcattgctgcttacgtccaccccagaggctctgggtgccaaccccggcttggtcgccaggatcaccgacaagggactgcagtatggt

SEQ ID NO: 33599 - DNA, 201 bp, Homo sapiens
ttttcctaggacttcctgttcttgggtgccaatgtccaatacatgagagtttgaggacaagaaagatgaagcttggaggtcacagctggatctgcttgttscatttccagctgtgcagcacgtctcagagattcttgaagaatgaagacatttctgctctcagctccgggggtgaggtgtgcctggcctctgcctccaccc

SEQ ID NO: 33600 - DNA, 201 bp, Homo sapiens
acaaaacaaaaaaagaaagcattgctgtccttcaacccagcaactccacctctaggaatgttttcctgaaaagaatagccaagggtgctcacaggaggtgktcattataatggcaaaaccctggagacaacttgatgcccaatagagtttaatccatcgcaggacccatacataacgaaatacaacacagccgtgaaatag

SEQ ID NO: 33601 - DNA, 201 bp, Homo sapiens
caggtgggagccaccgtagggtttagagcaggggaggaggcaggcagatcaagctgactcccagctatttcctttccacagcggcccaggaggggctattrgctctgcagagtgagctgctcaggatcacgctgcctgacttcaccggggacttgaggatcccccacgtcggccgtgggcgctatgagttccacaggtggg

SEQ ID NO: 33602 - DNA, 201 bp, Homo sapiens
agactccagaggtttctctttaaaacctctgcatctctcagcttgaccaagagtgagaaggccgggatgagactcccactgaaggctggggtgctgctccyttcaaagcctaaataacagaggccacgccccatatcttgtgggaccacagcttgtccaatcttttattggtgttatctaagaatcccaaggaatgctggc

SEQ ID NO: 33603 - DNA, 201 bp, Homo sapiens
gggcatggtggcacatgcctgtagttccagctacatgggaggctgaggcaggagaattgcttgagcccaggaggcagaggttgcagtgagctgtgatctcrctacttcactgcagcctgggcaacagagtgagactgcatctcaaaaaaaaaaaaaaaaatatatatatatatatatatatatatttatatgtgaatgagg

SEQ ID NO: 33604 - DNA, 201 bp, Homo sapiens
ccgctgtagcctgggaggcggaggttgcggtgagccaagatcacgccactgcactccagtctgggcaagagagtgagaccctatctcaaaataattaattmattagttaattaaataaaataaattagccaccacacctggctaatttttaaaattatttattataaataaataaatctcattaatattttttatattgat

SEQ ID NO: 33605 - DNA, 201 bp, Homo sapiens
ctgatgatttctggaggtttattaaaaaatattttagtgaatgaggccgggcaaggtggctcatgcctgtaatcctcgcactttgggaagccaaggtgggyggatcacctgaggtcacgagttcaagaccagcctggtcaacatggcaaaacctcatctctactaaaaatacaaaaattagctgggcatggtggcacatgc

SEQ ID NO: 33606 - DNA, 201 bp, Homo sapiens
aacatggtgaaaccccatctctactaaaaatacaaaaattagctgggcgtagtggcgcatgcctgtaatctcagctacttaggaggatgagacaggagaaycgctgtagcctgggaggcggaggttgcggtgagccaagatcacgccactgcactccagtctgggcaagagagtgagaccctatctcaaaataattaattc

SEQ ID NO: 33607 - DNA, 201 bp, Homo sapiens
tgctgcggctctgaagtggctggagctggctgtcagggggaattggagagtgaggaagagagagcctcaggattgggctgtggggggacctctccggggcrgacagtgggatagttccctgaagagctcagaaggaaattctgggaaggaattgagctcctccactcagtcacgcagcaaatattaaggaagacctactgg

SEQ ID NO: 33608 - DNA, 201 bp, Homo sapiens
gaagtcagcctggtgggcaagtgaagctctgtctagctggggaactcagggacagcggagaacacgcctctgagttactccagccccacgctgtcaccccrtcctcctgcttgccattggccaagggctgcttccaggggctctggctctcaggcactttgaacagttctctgacctcagaggcacttggatggaaggggt

SEQ ID NO: 33609 - DNA, 201 bp, Homo sapiens
ctgtagtcccagctacttgggaggccaaggtgggaggatcgcttgagcccaggaggtcaaggcagcggtgggctgaaattgtgccactgcactccagcctrggccacagagtgagatcctatctcaaaaagaaatgaaataaaataaaacatgaggtccatgcatattgttgcatgcacctgtagtgtagctggtttattc

SEQ ID NO: 33610 - DNA, 201 bp, Homo sapiens
tcacagttctggaggctgagggccaaggtcaaggttttggcaggcctggtttcttctgaggccactctctttggcttgcagatggctgccctttggcaatktcctcacgtggtctttcctctgtgctcaagaaatcccatttctgaggccatgcacgttggctcacccctgtaatcccagcactttgggaggctgaggcgg

SEQ ID NO: 33611 - DNA, 201 bp, Homo sapiens
aacccacaggggagtggggaagtgaggaagggaagggaagggaaggaagtcagcctggtgggcaagtgaagctctgtctagctggggaactcagggacagyggagaacacgcctctgagttactccagccccacgctgtcaccccgtcctcctgcttgccattggccaagggctgcttccaggggctctggctctcaggca

SEQ ID NO: 33612 - DNA, 201 bp, Homo sapiens
caggatggtcttgatctcctgacctcgtgatccgcccgctcggcctcccaaagtgctgggattgcaggcgtgagagctcacgcctgtaatcccaacatttwgggaggccgaggcgggtggattacctgaggtcaggagttcgagaccagcccagtcaacatggtgaaaccccgtctctactaaaaatacaaaaattagcca

SEQ ID NO: 33613 - DNA, 201 bp, Homo sapiens
tttaaatgtagtagcccaacggttagagctgaagtttgtacttgggggagtcagggaaggcttccaggagaaggtggcatttgagccaagtcttcaaaagwttactagacttgagcagctgatgctttaaaagagcgtgaactgctttttgagggatgggcagtgaagaaacgacaatcagactcgtagcacattgtaccc

SEQ ID NO: 33614 - DNA, 201 bp, Homo sapiens
agaaggctttctttgttcaactttaaaatatgaggtcagggctgggcgcggtggctcacgcctttattttttgttttctttttttttttttttttttttgkgagacggagtctcgctctgttgcccaggctggagtgcagtggcgcaatctcggctcactgcaagcttcgcctcgcgatttcacgccattctcctgtctca

SEQ ID NO: 33615 - DNA, 201 bp, Homo sapiens
aaagagagttggacttggaaaacagggctctcctgggggctgtatgaccgtgggcaagtcacttctctctgagcttagtgacctgcctgtgacatgggatygttgaagttggcctcatctccctccagggctctaatgagggttgggggctgggacagctctttggagcacgggaaacctccttataagcgggacagaggg

SEQ ID NO: 33616 - DNA, 201 bp, Homo sapiens
tactgcatttcctgttcatatctttttttttcttttgagttgttctttctttccttgttaatttatattggcttgttctttgtatattagggaaataagcycatatattaaggaaattggctctttagatgtctcatactgcaattttttttttactttacatatggcattttttttgtccactgaagttttaattttcta

SEQ ID NO: 33617 - DNA, 201 bp, Homo sapiens
gaccctatctcaaaataattaattcattagttaattaaataaaataaattagccaccacacctggctaatttttaaaattatttattataaataaataaawctcattaatattttttatattgattacatgttgaaatcatactatgtattactaaaattaatttcagctctttctttttatctttttaatgtatcttctg

SEQ ID NO: 33618 - DNA, 201 bp, Homo sapiens
ctggttcaagtgattctcctgcctcagcctcccgagtagctgggattacaggcacatgctaccacgcccagctaatttttgtatttttagtagagacaggrtttcactatgttggccaggatggtctcgatgatccacccgcctcggcctcccaaagtgctgggattacaggcgtgagccactgcgcccgacccctttcca

SEQ ID NO: 33619 - DNA, 201 bp, Homo sapiens
ttatcctcacagcccccttcttgctttgcagtttcaatggcatgccaatgaggaaagtttagtttagtttagtttagtttagtttagtttagtttagtttwgttttgttttgttttgttttgtttgagacagagtctgactctgtcgcccaggctagagtgcggtagtgcgatctcggctcactgcaatctctgcctcccg

SEQ ID NO: 33620 - DNA, 201 bp, Homo sapiens
gcctctctttcaatgggatgataatagctacgttttatggagcactcaccatgtgctgggccttgtgctaggatgttcgtttaggcctcacagtgactcgraggtggggactattgttatccccattttatggataaggaagttgaggttcagggagatggaagggctggcctgagatcacaaagtcaggacacaaaccga

SEQ ID NO: 33621 - DNA, 201 bp, Homo sapiens
ctgcttggcatatagtgggggttagaagttgtgtttcatgattttggtagagaagcttattttgtttttattaaattttttaaattatgtaggtagttcargaaaaacattctcactgtaaataaaaccgatactaaagataaggctaaggacatgtcaaatgttgatgttcttcctttagaggaaagactgtcgggtgtg

SEQ ID NO: 33622 - DNA, 201 bp, Homo sapiens
ctactttgccttgcccatcatgcagaaaaggccaatcagagcgggtcttagggagtgtagatgggcctagggcatatagaggggctggccaggacttcctrtgggttaatgtagcaaagcttctggtgagcttttcattaaaagacataacactgcctttaatggtggagtttcaggcagtgttccagccagcgtcccttc

SEQ ID NO: 33623 - DNA, 201 bp, Homo sapiens
tgatgtttaaggtgagggtcctggggccgggctgcgtgggtgaggctttccctcagggtcagccattctttgggccacctgtccccccaacttcagatctrtcctcatcctcccagtggttcccgctttgtcaagggccgggtgatatggagtggtggggagtgtttccagagctaggattctcccacggctgtcttacac

SEQ ID NO: 33624 - DNA, 201 bp, Homo sapiens
ctcctgctcccgccctacctttggccctgtgccttctcaagcccatcctttctcgcttctggggacccccgcattgcttaaacttgcataaagcccacacyttttaatcttctctgattcattacagggtaaaagtggaactgaaagaatccaaagttggactattcaatgtaagttgtttttattgatgacatgattaga

SEQ ID NO: 33625 - DNA, 201 bp, Homo sapiens
caagagtgagaaggccgggatgagactcccactgaaggctggggtgctgctcctttcaaagcctaaataacagaggccacgccccatatcttgtgggaccrcagcttgtccaatcttttattggtgttatctaagaatcccaaggaatgctggcatagtccataaaatgtaccctaatgaacagcagctaacaattacagg

SEQ ID NO: 33626 - DNA, 201 bp, Homo sapiens
cccttgccactttttcttgtaacaccccattatctttcttctcagcgtttactacaaagatactttgtagctgtctgcaggtgtatttgtttaatgcatgwatctctcactatgtgagtctgggctattgtggggagaaaggtatactggtgtttgtctatttgtctattttgaccttggaagactacatttcccaagctt

SEQ ID NO: 33627 - DNA, 201 bp, Homo sapiens
cgaagtctgtgtgaccgcaaacctcaccctcgcagaccctctgagtgggagccacacatcagctgccccccggggagagcgggcaggatgctgaagtcccmtgtgctctccttgggtgaatgcaggacaggcatctcctccctgccagggtaacccaggctgtggagaagcgacagtcttgcacatccccctgtctcccca

SEQ ID NO: 33628 - DNA, 201 bp, Homo sapiens
catgatttcatgattcatggtgaaaaggagagacagtcttcctcacacccccaaaacaactgtttccaatgtggctttgtataagggagactgaattttayagtggatctcacctttaatggttctccagtttatctaatatttctgggtttcaaaaagttgtttcttgaagcacttcataaaagttgaggcctcatgaat

SEQ ID NO: 33629 - DNA, 201 bp, Homo sapiens
gctgttgaacctcttccacaaccagattgagtccaagttccagaaagtactggagagcagggtaagaaggtccaagcctctggcctcccccgagcttggcragggctgaatggaagacctcactgaccaatggccctggaccaggccatgggggctggtttagacgtacttgggcccaaagcccagggaggacaaatcatt

SEQ ID NO: 33630 - DNA, 201 bp, Homo sapiens
ctaattctgccctgtcctcattcacagttacaacagagattgacagtttcgccgacattgattatagcttagtggaagcccctcgggcaacagcccagatrctggaggtgatgtttaaggtgagggtcctggggccgggctgcgtgggtgaggctttccctcagggtcagccattctttgggccacctgtccccccaactt

SEQ ID NO: 33631 - DNA, 201 bp, Homo sapiens
ggcactgggaagccagacacaccgaatcaggctggatgtgctgggacacagcagggcgccgggaaggggtggagagggctccctttgtggactggcctgascagggaccagggcctggctttcccaggcacccggccatccccaagttcagtggcagactgtgcttctctccccaggtggctgttgaacctcttccacaac

SEQ ID NO: 33632 - DNA, 201 bp, Homo sapiens
catccaagggaatccatgtagtgtctttcttgaagaagcaattctttgcctcagggccgggctagtagggggattctgaagaaagtcacagggaatgtgartcagccagagcccttgcccctcctccagcagctgaaagtgtcatctggcccctaattctgccctgtcctcattcacagttacaacagagattgacagttt

SEQ ID NO: 33633 - DNA, 201 bp, Homo sapiens
agggcctgagtctcagcatctccgactcctccatccgggtccagggcaggtggaaggtgcgcaagtcattcttgtaagttggctctgctcccaggccctgragctcttggccttggccttcgccccatccttcttaggtccaaggtgttcctagcttatcagaaaggccacgtgatggacagatggagtccaagcccggag

SEQ ID NO: 33634 - DNA, 201 bp, Homo sapiens
caggcatctcctccctgccagggtaacccaggctgtggagaagcgacagtcttgcacatccccctgtctccccaatcttctttagaccttcagctccagcrggagcaccctaaaacttcttcatgtctctttgctgcagataccgcctgactctaatatccgactgaccaccaagtccttccgacccttcgtcccacgggt

SEQ ID NO: 33635 - DNA, 201 bp, Homo sapiens
gatcagagagctaaggaggtgagggaagatcagagggagaccttgagtctgcttttttagttcagcatatcaatgtgccatatattggcgtattgttttcygagccccaacagtgttatatctcgatggggtagtacaggacaacacagctggccctagagtcccatagcaggttctgacgccctgaaatctgactgtaaa

SEQ ID NO: 33636 - DNA, 201 bp, Homo sapiens
cccttcagcctgaacatccacagctgtgagctgcttcactctgcgctgaggcctgtccctggccagggcctgagtctcagcatctccgactcctccatccrggtccagggcaggtggaaggtgcgcaagtcattcttgtaagttggctctgctcccaggccctggagctcttggccttggccttcgccccatccttcttag

SEQ ID NO: 33637 - DNA, 201 bp, Homo sapiens
gtatgtgtgtgtgtgtgtgtgcttgtctggaaactgcttaggccctaggctgagcatacacccccaccattgttaactcatccaagggaatccatgtagtstctttcttgaagaagcaattctttgcctcagggccgggctagtagggggattctgaagaaagtcacagggaatgtgagtcagccagagcccttgcccctc

SEQ ID NO: 33638 - DNA, 201 bp, Homo sapiens
atttccttggtacctggctcatgacaagcacttataaatatttgtaaatcagtgatcactgagcacatgtgtggaataatgtgactgcagtgatcagcacsgggccagaccagagctggggaactcactcagtcattctcttcccatgtttttcagatttgcgaaatgatccagaaatcagtgtcctccgatctacagcct

SEQ ID NO: 33639 - DNA, 201 bp, Homo sapiens
ggcatgaagaaagtaacgtgcttagcatggtcataagatcgatgcctggggcacagcaggtgcttacctggagcagatcctgctggtctagtccccactgkggagaggggaggcgcaaggtccctggtgaggctgggtccaggcccagggctgacacctccttccatgtctctcccttcagcctgaacatccacagctgtg

SEQ ID NO: 33640 - DNA, 201 bp, Homo sapiens
catgaggtcaaaagtttgagaccagcctggccaacatggtgaaaccccatctctactaaaaatacaaaaattagctgggcatggtggtgcgcacctgtaaycccagctacttaggaggctgaggcaggagaatggcttgaacacgggaggcagaggttgcagtgagctgagatcatgccactgcactccagcctgggcgac

SEQ ID NO: 33641 - DNA, 201 bp, Homo sapiens
tagagtttgcagagaacattttcggtaaaaatctgtctctaattattatttattcaccaatctctttcaatgttgtgcttcaacctctagataagttggcygaaggcttcccccttcctctgctgaagcgtgttcagctctacgaccttgggctgcagatccataaggtcggtgggttcaggggggctctgaggatgtgtg

SEQ ID NO: 33642 - DNA, 201 bp, Homo sapiens
gttatcctcacagcccccttcttgctttgcagtttcaatggcatgccaatgaggaaagtttagtttagtttagtttagtttagtttagtttagtttagttttgttttgttttgttttgttttgtttgagacagagtctgactctgtcgcccaggctagagtgcggtagtgcgatctcggctcactgcaatctctgcctccc

SEQ ID NO: 33643 - DNA, 201 bp, Homo sapiens
ctgtgcctccccttcccgctcccaggaacccatccagcctcaggaactgcccccagccatcgagccttggctacttaagggacctgggcccaatccacagytgggacagtcctggcccactgcactgggaatctaggatgggggccttggccagagccctgccgtccatactgctggcattgctgcttacgtccaccccag

SEQ ID NO: 33644 - DNA, 201 bp, Homo sapiens
ttttttaggccaggagcggtggttcatgcctgtaaccccagcactttgggaggccaaggcgggcagatcatgaggtcaaaagtttgagaccagcctggccracatggtgaaaccccatctctactaaaaatacaaaaattagctgggcatggtggtgcgcacctgtaatcccagctacttaggaggctgaggcaggagaat

SEQ ID NO: 33645 - DNA, 201 bp, Homo sapiens; identical to SEQ ID NO: 7470

SEQ ID NO: 33646 - DNA, 201 bp, Homo sapiens
gtctctttgctgcagataccgcctgactctaatatccgactgaccaccaagtccttccgacccttcgtcccacgggtaaggagtcccttagttccccatgwgtgcagaccgagcctactagactccagaggtttctctttaaaacctctgcatctctcagcttgaccaagagtgagaaggccgggatgagactcccactga

SEQ ID NO: 33647 - DNA, 201 bp, Homo sapiens
tgttatcctcacagcccccttcttgctttgcagtttcaatggcatgccaatgaggaaagtttagtttagtttagtttagtttagtttagtttagtttagttttgttttgttttgttttgttttgtttgagacagagtctgactctgtcgcccaggctagagtgcggtagtgcgatctcggctcactgcaatctctgcctcc

SEQ ID NO: 33648 - DNA, 201 bp, Homo sapiens
agcgggagcaccctaaaacttcttcatgtctctttgctgcagataccgcctgactctaatatccgactgaccaccaagtccttccgacccttcgtcccacrggtaaggagtcccttagttccccatgagtgcagaccgagcctactagactccagaggtttctctttaaaacctctgcatctctcagcttgaccaagagtg

SEQ ID NO: 33649 - DNA, 201 bp, Homo sapiens
tatagagtttgcagagaacattttcggtaaaaatctgtctctaattattatttattcaccaatctctttcaatgttgtgcttcaacctctagataagttgrccgaaggcttcccccttcctctgctgaagcgtgttcagctctacgaccttgggctgcagatccataaggtcggtgggttcaggggggctctgaggatgtg

SEQ ID NO: 33650 - DNA, 201 bp, Homo sapiens
ttgttatcctcacagcccccttcttgctttgcagtttcaatggcatgccaatgaggaaagtttagtttagtttagtttagtttagtttagtttagtttagttttgttttgttttgttttgttttgtttgagacagagtctgactctgtcgcccaggctagagtgcggtagtgcgatctcggctcactgcaatctctgcctc

SEQ ID NO: 33651 - DNA, 201 bp, Homo sapiens
cttgttatcctcacagcccccttcttgctttgcagtttcaatggcatgccaatgaggaaagtttagtttagtttagtttagtttagtttagtttagtttagttttgttttgttttgttttgttttgtttgagacagagtctgactctgtcgcccaggctagagtgcggtagtgcgatctcggctcactgcaatctctgcct

SEQ ID NO: 33652 - DNA, 201 bp, Homo sapiens
tgcttgttatcctcacagcccccttcttgctttgcagtttcaatggcatgccaatgaggaaagtttagtttagtttagtttagtttagtttagtttagttdagttttgttttgttttgttttgttttgtttgagacagagtctgactctgtcgcccaggctagagtgcggtagtgcgatctcggctcactgcaatctctgc

SEQ ID NO: 33653 - DNA, 201 bp, Homo sapiens
cgcaggcactgggaagccagacacaccgaatcaggctggatgtgctgggacacagcagggcgccgggaaggggtggagagggctccctttgtggactggcmtgaccagggaccagggcctggctttcccaggcacccggccatccccaagttcagtggcagactgtgcttctctccccaggtggctgttgaacctcttcca

SEQ ID NO: 33654 - DNA, 201 bp, Homo sapiens
tgtcaagggcatcagcatttcggtcaacctcctgttgggcagcgagtcctccgggaggcccacagttactgcctccagctgcagcagtgacatcgctgacrtggaggtggacatgtcgggagacttggggtaggtctccatcggggcactgccagctggactcctggttgcagctcccggccaatccagcgctcagcctgg

SEQ ID NO: 33655 - DNA, 201 bp, Homo sapiens
aggagccatctacaagtggagtctctggatccagggtgcacacattaagctcggagggggagaccctggcaaattatctgagatgttctctgatgccttakctcctaagcccctatgcggttatttgctgacatcacctttaccagaggtccaggtcggcaacccggtactgggacttggaacattcatccattcagggtt

SEQ ID NO: 33656 - DNA, 201 bp, Homo sapiens
tggccctggaccaggccatgggggctggtttagacgtacttgggcccaaagcccagggaggacaaatcatttgcccaggtcatggagctgttgtggggcaygctggggacaaagctccaagtccgttcggttgggcagaaaatggtcaactgcttgaccaagggttaaacagcaggggctaaacagagactccagcccctc

SEQ ID NO: 33657 - DNA, 201 bp, Homo sapiens
tgtggactggcctgaccagggaccagggcctggctttcccaggcacccggccatccccaagttcagtggcagactgtgcttctctccccaggtggctgttkaacctcttccacaaccagattgagtccaagttccagaaagtactggagagcagggtaagaaggtccaagcctctggcctcccccgagcttggcgagggct

SEQ ID NO: 33658 - DNA, 201 bp, Homo sapiens
agaaaatggtcaactgcttgaccaagggttaaacagcaggggctaaacagagactccagcccctccctctgctccaccttgctcagtgccccacactgccytgcattccaccaaggtccgaaaggaaaccattcctcaggcgcctgcaagagaccaggcaggaaagctcagcgagggcgtgggccaggtgggaactgggcg

SEQ ID NO: 33659 - DNA, 201 bp, Homo sapiens
cacaaagtcaggacacaaaccgaagtctgtgtgaccgcaaacctcaccctcgcagaccctctgagtgggagccacacatcagctgccccccggggagagcrggcaggatgctgaagtcccatgtgctctccttgggtgaatgcaggacaggcatctcctccctgccagggtaacccaggctgtggagaagcgacagtcttg

SEQ ID NO: 33660 - DNA, 201 bp, Homo sapiens
tgcctgaccttcctggttattggctcagcattaagctccaggtgtggctggagaggtgaagcctggactcatggtgtgtgtgtatgtgtgtgtgtgtgtgygcttgtctggaaactgcttaggccctaggctgagcatacacccccaccattgttaactcatccaagggaatccatgtagtgtctttcttgaagaagcaat

SEQ ID NO: 33661 - DNA, 201 bp, Homo sapiens
atgatgcttcagtgagctgccccacaccacgcgtatatcttggcaggaagagctacgggataaaggcttagaagttaaattactgggccaaagagtatgtrtgttagaacgaggagagatctcactgatttgtgtttcagaaagcttgtgccaatgtgcactctcccagccacagtgtctgggacttctgtttactcgtac

SEQ ID NO: 33662 - DNA, 201 bp, Homo sapiens
cacgtaaagctctgagctctctgcttggcatatagtgggggttagaagttgtgtttcatgattttggtagagaagcttattttgtttttattaaatttttwaaattatgtaggtagttcaggaaaaacattctcactgtaaataaaaccgatactaaagataaggctaaggacatgtcaaatgttgatgttcttcctttag

SEQ ID NO: 33663 - DNA, 201 bp, Homo sapiens
ccaggagattgaggctgcagtgagccatgattgcaccactgcactccagctgggcgacagacagagactccatctctaaaacaataataataatttattawtgttgttactagggctgaatcttgacctgagataactagaaatgatcctttttagagctttccaagggtaggtactctataccttctcttagtagtctgt

SEQ ID NO: 33664 - DNA, 201 bp, Homo sapiens
gataatctctgggtggcctcaccaactctttactagcttctcaacaattccatcacttgtataaccaattccccgtattaaattccctctgcgttaaacaytgagagtcagttttccttttttgatggactctgtctaatagggaagggatgttgggtcctttgggggccttgctccctggatggagaactctgctctctt

SEQ ID NO: 33665 - DNA, 201 bp, Homo sapiens
ccaatgggaggtactgtcaggagaatgatggcggggaggaaggatgaagccagagtactatttcctctttctttaccacggcagaggctctggctgtgacwatgtctcctcatggtgacttccataattccacctccactctttgttcctctagtcctggggtggatacagcctcctgtctctggataatctctgggtggc

SEQ ID NO: 33666 - DNA, 201 bp, Homo sapiens
tgcactttgatttccacccaggtcaaccaatgggaggtactgtcaggagaatgatggcggggaggaaggatgaagccagagtactatttcctctttctttrccacggcagaggctctggctgtgactatgtctcctcatggtgacttccataattccacctccactctttgttcctctagtcctggggtggatacagcctc

SEQ ID NO: 33667 - DNA, 201 bp, Homo sapiens
agccatccacatgtccttcagaagtggcacctctgctggtgcaggtggcatttgacacagccctatgccaccaccacatcccatccctaccatgaggggcytgagggaagctcaagaccagctcgttttgaaaatactgcgggccgggtgcagtggctcacgcctgtaatcccagcactttgggaggctggggcgggcaga

SEQ ID NO: 33668 - DNA, 201 bp, Homo sapiens
gtatttggaggtcagaactgagccttctattttccccacaaatggtggcagacccctggtctaggaactaaccatggcttctcttacctcctccagcaaamtacagggctcctttgatgtcagtgtcaagggcatcagcatttcggtcaacctcctgttgggcagcgagtcctccgggaggcccacagttactgcctccag

SEQ ID NO: 33669 - DNA, 201 bp, Homo sapiens
tgttgaacctcttccacaaccagattgagtccaagttccagaaagtactggagagcagggtaagaaggtccaagcctctggcctcccccgagcttggcgarggctgaatggaagacctcactgaccaatggccctggaccaggccatgggggctggtttagacgtacttgggcccaaagcccagggaggacaaatcatttg

SEQ ID NO: 33670 - DNA, 201 bp, Homo sapiens
taggacaccccatccatcccgggacacttttatttctgttaatttctataagagcatatatatatcttataaaatagtaaatggggcaaaaatatagaaartaaaaattaagggccaggcgcagcggctcacacctgtaatctcagcagtctgggaggccgaggcgggtggatcacctgaggtcaggagttcgagaccagc

SEQ ID NO: 33671 - DNA, 201 bp, Homo sapiens
actaaccatggcttctcttacctcctccagcaaactacagggctcctttgatgtcagtgtcaagggcatcagcatttcggtcaacctcctgttgggcagcragtcctccgggaggcccacagttactgcctccagctgcagcagtgacatcgctgacgtggaggtggacatgtcgggagacttggggtaggtctccatcgg

SEQ ID NO: 33672 - DNA, 201 bp, Homo sapiens
cagctttatctgactccctcaggcctctcctggcagacttgtatattttcttctcttgatgtaatctcctaattctgctcccagttagccaggctctaccycaacatgaacctggaactccagggatcagtgccctctgctccgctcctgaacttcagccctgggaatctgtctgtggacccctatatggagatagatgcc

SEQ ID NO: 33673 - DNA, 201 bp, Homo sapiens
cctcctccagcaaactacagggctcctttgatgtcagtgtcaagggcatcagcatttcggtcaacctcctgttgggcagcgagtcctccgggaggcccacrgttactgcctccagctgcagcagtgacatcgctgacgtggaggtggacatgtcgggagacttggggtaggtctccatcggggcactgccagctggactcc

SEQ ID NO: 33674 - DNA, 201 bp, Homo sapiens
aaaaaggaagagtcttgccccaaattaaactctgtacctatctctagtacacagaaaattaagagcacttttgaaatggtggaatctagggctggtcgtgktggctcacacctataatcctagcactctgggaggccaaagtgggggggtagcttgaggccaggagttcaagaccaacctggacaacatagcaaaaccctg

SEQ ID NO: 33675 - DNA, 201 bp, Homo sapiens
ccaggcatggtggctcatgcctgtaatcccagcattgtgggtggccaaggtgggtggattgcttgagtccaggagttcaagaccagcctgggcaacatgaygaaaccccatctctacaaaaaatacaaaaattagccaagcgtagcggcacatagctgtagtcccagccactggggaggctgaggtgggaagatcacctga

SEQ ID NO: 33676 - DNA, 201 bp, Homo sapiens
aagtcccatgtgctctccttgggtgaatgcaggacaggcatctcctccctgccagggtaacccaggctgtggagaagcgacagtcttgcacatccccctgyctccccaatcttctttagaccttcagctccagcgggagcaccctaaaacttcttcatgtctctttgctgcagataccgcctgactctaatatccgactga

SEQ ID NO: 33677 - DNA, 201 bp, Homo sapiens
aactttccaaaatttttctattcacttgcataccaaatgttcatctcaaaagagttttatcttataaaatagtagcatgatgtaatactagtttgcttttyccaagcgttttgctatgttggcacacacagaaccaccatgtggccctgtggcgatgtaaatatatctctcctgttctcttccaggcagagctgttggaag

SEQ ID NO: 33678 - DNA, 201 bp, Homo sapiens
aatatactgaatatagagtttgcagagaacattttcggtaaaaatctgtctctaattattatttattcaccaatctctttcaatgttgtgcttcaacctcyagataagttggccgaaggcttcccccttcctctgctgaagcgtgttcagctctacgaccttgggctgcagatccataaggtcggtgggttcaggggggct

SEQ ID NO: 33679 - DNA, 201 bp, Homo sapiens
accctccttgctgcagtcatgagccttcctgaggaacacaacaaaatggtctactttgccatctcggattatgtcttcaacacggccagcctggtttatcrtgaggaaggatatctgaacttctccatcacagatgacatggtgaggatggtggcaaacaggtctctcaaatgaacacataacctaccgctccttccttct

SEQ ID NO: 33680 - DNA, 201 bp, Homo sapiens
tgtgcttcctccagacagcaccatgcctgatagcttaggctcccaagtcagcctccctgggtttaaatcccctttctgacacttcctgtgtgacctagaayaagttacttggccactctgtgcctcagtttccttatctgtaaaatggaaagaataatcacacctacctcatagtcttggaaatcactaaatgggaatata

SEQ ID NO: 33681 - DNA, 201 bp, Homo sapiens
gaaatctttcatcgtaaccaccgttctccagttaccctccttgctgcagtcatgagccttcctgaggaacacaacaaaatggtctactttgccatctcggrttatgtcttcaacacggccagcctggtttatcatgaggaaggatatctgaacttctccatcacagatgacatggtgaggatggtggcaaacaggtctctc

SEQ ID NO: 33682 - DNA, 201 bp, Homo sapiens
ctctaccccaacatgaacctggaactccagggatcagtgccctctgctccgctcctgaacttcagccctgggaatctgtctgtggacccctatatggagayagatgcctttgtgctcctgcccagctccagcaaggagcctgtcttccggctcagtgtggtaaggttcagagcctttgcaaatgctgtttccttttcccca

SEQ ID NO: 33683 - DNA, 201 bp, Homo sapiens
agggctctcctgggggctgtatgaccgtgggcaagtcacttctctctgagcttagtgacctgcctgtgacatgggatcgttgaagttggcctcatctcccyccagggctctaatgagggttgggggctgggacagctctttggagcacgggaaacctccttataagcgggacagagggacacatggaagtgccccacatcc

SEQ ID NO: 33684 - DNA, 201 bp, Homo sapiens
taatggtggagtttcaggcagtgttccagccagcgtcccttcatcggactgtgtaggggaatacctagcccctgccccacgataggctttgaaaagtccarttggaccctatttccctctccagggtgaaatctttcatcgtaaccaccgttctccagttaccctccttgctgcagtcatgagccttcctgaggaacacaa

SEQ ID NO: 33685 - DNA, 201 bp, Homo sapiens
gaaccaccatgtggccctgtggcgatgtaaatatatctctcctgttctcttccaggcagagctgttggaagcgctcctcaactattacatccttaacaccytctaccccaagttcaatggtaagaatcactgtggatttttccaagtcaaaagtgaacactgctgtctggaggaaagagagttggacttggaaaacagggc

SEQ ID NO: 33686 - DNA, 201 bp, Homo sapiens
ggcccacagttactgcctccagctgcagcagtgacatcgctgacgtggaggtggacatgtcgggagacttggggtaggtctccatcggggcactgccagcyggactcctggttgcagctcccggccaatccagcgctcagcctggcctccgataattgcaatgatccaggtggcttgcacaggcacttgaagatcattctc

SEQ ID NO: 33687 - DNA, 201 bp, Homo sapiens
ctgggtccaggcccagggctgacacctccttccatgtctctcccttcagcctgaacatccacagctgtgagctgcttcactctgcgctgaggcctgtcccyggccagggcctgagtctcagcatctccgactcctccatccgggtccagggcaggtggaaggtgcgcaagtcattcttgtaagttggctctgctcccaggc

SEQ ID NO: 33688 - DNA, 201 bp, Homo sapiens
tttgccatgtcccgctagtggccatgagcagccctgtccctgggtctatctcttcaggcttatgatcctatttaatcctcatgacaaccgctaaaggtagmcaaggttgcccttgtttttcagatgaggagtctctagaaaagtcgtgtggcctgctaagctaactgttcagagcctgggctctggagtcacctggcggtg

SEQ ID NO: 33689 - DNA, 201 bp, Homo sapiens
cccaaatctgctgaatgtgatcatgcgattgggtgccgcaggcactgggaagccagacacaccgaatcaggctggatgtgctgggacacagcagggcgccrggaaggggtggagagggctccctttgtggactggcctgaccagggaccagggcctggctttcccaggcacccggccatccccaagttcagtggcagactg

SEQ ID NO: 33690 - DNA, 201 bp, Homo sapiens
gctgcagcagtgacatcgctgacgtggaggtggacatgtcgggagacttggggtaggtctccatcggggcactgccagctggactcctggttgcagctccyggccaatccagcgctcagcctggcctccgataattgcaatgatccaggtggcttgcacaggcacttgaagatcattctctggggaaccctgttgagatga

SEQ ID NO: 33691 - DNA, 201 bp, Homo sapiens
gtgatcagcacggggccagaccagagctggggaactcactcagtcattctcttcccatgtttttcagatttgcgaaatgatccagaaatcagtgtcctccratctacagccttatctccaaactctgccaggtaggacaccccatccatcccgggacacttttatttctgttaatttctataagagcatatatatatctta

SEQ ID NO: 33692 - DNA, 201 bp, Homo sapiens
tgtgactgcagtgatcagcacggggccagaccagagctggggaactcactcagtcattctcttcccatgtttttcagatttgcgaaatgatccagaaatcrgtgtcctccgatctacagccttatctccaaactctgccaggtaggacaccccatccatcccgggacacttttatttctgttaatttctataagagcatat

SEQ ID NO: 33693 - DNA, 201 bp, Homo sapiens
tataaatatttgtaaatcagtgatcactgagcacatgtgtggaataatgtgactgcagtgatcagcacggggccagaccagagctggggaactcactcagkcattctcttcccatgtttttcagatttgcgaaatgatccagaaatcagtgtcctccgatctacagccttatctccaaactctgccaggtaggacacccca

SEQ ID NO: 33694 - DNA, 201 bp, Homo sapiens; identical to SEQ ID NO: 7465

SEQ ID NO: 33695 - DNA, 201 bp, Homo sapiens
gcttgttatcctcacagcccccttcttgctttgcagtttcaatggcatgccaatgaggaaagtttagtttagtttagtttagtttagtttagtttagtttwgttttgttttgttttgttttgttttgtttgagacagagtctgactctgtcgcccaggctagagtgcggtagtgcgatctcggctcactgcaatctctgcc

SEQ ID NO: 33696 - DNA, 201 bp, Homo sapiens
ccacatgggggcccacatagttttattgtttgtatttccttggtacctggctcatgacaagcacttataaatatttgtaaatcagtgatcactgagcacaygtgtggaataatgtgactgcagtgatcagcacggggccagaccagagctggggaactcactcagtcattctcttcccatgtttttcagatttgcgaaatg

SEQ ID NO: 33697 - DNA, 201 bp, Homo sapiens
gtgccccctcctcaggctatgtcagtgactccctagctcaggtgtccagccctgggacagactgaaaagtccaactggaccctagtggagtccacatgggkgcccacatagttttattgtttgtatttccttggtacctggctcatgacaagcacttataaatatttgtaaatcagtgatcactgagcacatgtgtggaat

SEQ ID NO: 33698 - DNA, 201 bp, Homo sapiens
atttaatcttgcttttagaggggtttttttgtttttcgtttttttggttttttggttttttttgcacctcacctttccagagtatttatcttaggttttcrtagaaagaacccttatagctggggccgggcatggtggctcatgcctgtaatcccagcactttgggaggccgatgggggtggaccatttgaggtcagaagt

SEQ ID NO: 33699 - DNA, 201 bp, Homo sapiens
aggcgtaagccaccacacccagccagtcccattggatcttaacctcgaccttggaaggaggtgccattttccacatggacagaggaggctgaggggtggaktagctttcccagtgtcaccttgctggtgagaggctgaatcaggattggagcttcctagaatgtggagcagcttgtaccaaagcccttctagggctaggtg

SEQ ID NO: 33700 - DNA, 201 bp, Homo sapiens
tcccttcagcctgaacatccacagctgtgagctgcttcactctgcgctgaggcctgtccctggccagggcctgagtctcagcatctccgactcctccatcygggtccagggcaggtggaaggtgcgcaagtcattcttgtaagttggctctgctcccaggccctggagctcttggccttggccttcgccccatccttctta

SEQ ID NO: 33701 - DNA, 201 bp, Homo sapiens
aagtttgagaccagcctggccaacatggtgaaaccccatctctactaaaaatacaaaaattagctgggcatggtggtgcgcacctgtaatcccagctactyaggaggctgaggcaggagaatggcttgaacacgggaggcagaggttgcagtgagctgagatcatgccactgcactccagcctgggcgacagagcaagact

SEQ ID NO: 33702 - DNA, 201 bp, Homo sapiens
agctcccggccaatccagcgctcagcctggcctccgataattgcaatgatccaggtggcttgcacaggcacttgaagatcattctctggggaaccctgttragatgaacagacttaagccaggaatattggtgcatcattttcattaaaaaaataaactttcattcacctgacaaggggacccttgtcaggtgaatgaaat

SEQ ID NO: 33703 - DNA, 201 bp, Homo sapiens
ccctatgccaccaccacatcccatccctaccatgaggggcctgagggaagctcaagaccagctcgttttgaaaatactgcgggccgggtgcagtggctcaygcctgtaatcccagcactttgggaggctggggcgggcagatcacgaggtcaggagtttgagaccagcctggccaacatggtgaaaccccatctctattaa

SEQ ID NO: 33704 - DNA, 201 bp, Homo sapiens
tctcaaaggctgcataacattgggtgcccacagcttattcaacctgtcgctgctagcggacatgtaggctgcttcctttttttttttttttttttttttttgctactgcctatgatgcttcagtgagctgccccacaccacgcgtatatcttggcaggaagagctacgggataaaggcttagaagttaaattactgggcca

SEQ ID NO: 33705 - DNA, 201 bp, Homo sapiens
agttagccaggctctaccccaacatgaacctggaactccagggatcagtgccctctgctccgctcctgaacttcagccctgggaatctgtctgtggacccstatatggagatagatgcctttgtgctcctgcccagctccagcaaggagcctgtcttccggctcagtgtggtaaggttcagagcctttgcaaatgctgttt

SEQ ID NO: 33706 - DNA, 201 bp, Homo sapiens
tttcattaaaagacataacactgcctttaatggtggagtttcaggcagtgttccagccagcgtcccttcatcggactgtgtaggggaatacctagcccctsccccacgataggctttgaaaagtccaattggaccctatttccctctccagggtgaaatctttcatcgtaaccaccgttctccagttaccctccttgctgc

SEQ ID NO: 33707 - DNA, 201 bp, Homo sapiens
agcaaagcttctggtgagcttttcattaaaagacataacactgcctttaatggtggagtttcaggcagtgttccagccagcgtcccttcatcggactgtgkaggggaatacctagcccctgccccacgataggctttgaaaagtccaattggaccctatttccctctccagggtgaaatctttcatcgtaaccaccgttct

SEQ ID NO: 33708 - DNA, 201 bp, Homo sapiens
gtagcaaagcttctggtgagcttttcattaaaagacataacactgcctttaatggtggagtttcaggcagtgttccagccagcgtcccttcatcggactgygtaggggaatacctagcccctgccccacgataggctttgaaaagtccaattggaccctatttccctctccagggtgaaatctttcatcgtaaccaccgtt

SEQ ID NO: 33709 - DNA, 201 bp, Homo sapiens
aattggcccaattcttctgccccactggtcctgcccccacaaatctcaaattgttaaagaattcactaagactgttacttcttaatgtatgaattttagamgccagctatatgaacttcctgaaatgataaagagtgagctttttgacactatctcatctgccctgtgacagtcttcccgatgtcattgtatcactgcttt

SEQ ID NO: 33710 - DNA, 201 bp, Homo sapiens
tcctgatcgaccttctctacctgcagggtcccccagcgatgcaccccatgcccaccaccccctgcaccctcacctgatgcaggaacatatgggaaccaacrtcatcgttgccaacacaatgcccactcacctcagcaacggacagatgtgtgagtggccccgacccaggggacaggcaggtgggcaaactctgggatttta

SEQ ID NO: 33711 - DNA, 201 bp, Homo sapiens
gctccttgttcattagaggcccagcagacacctcaacatgtgtggcactggctggagtagcccagcaagcctggaccataaacccatggctctgcttcacsggaagcagtgcgatgacaccaggaagccacttttcctctctaagcctcagtgtcctcatctgtggaatagaggtgctcggctgacctcagaggggagatg

SEQ ID NO: 33712 - DNA, 201 bp, Homo sapiens
ggaggtagaggttgcattaagctgagatcatgccactgccactccagcttgggcagcagaacaagactctatctcaaaaaaaacaaaacaaaacaaaaaaacaaaaaacaaacaaaaaatcttcttctggggttctctaatggggataacattaatcatctcctaagatgactatagtagaggtgcattggtgggtcaggg

SEQ ID NO: 33713 - DNA, 201 bp, Homo sapiens
gggaggtagaggttgcattaagctgagatcatgccactgccactccagcttgggcagcagaacaagactctatctcaaaaaaaacaaaacaaaacaaaaaaacaaaaaacaaacaaaaaatcttcttctggggttctctaatggggataacattaatcatctcctaagatgactatagtagaggtgcattggtgggtcagg

SEQ ID NO: 33714 - DNA, 201 bp, Homo sapiens
cgcccccatcactttttccaagcccaggaactgtgtgctcctgaggcagaggccaagcccctgaactgggagtcccaaagacaagaccacctccagctctkgaaccagaaagatctgggctcaaatccggcatagatccttccaacctgtgtgaatgtggcaaggcaatttcctctctgagcctcagtttcctcacctata

SEQ ID NO: 33715 - DNA, 201 bp, Homo sapiens
tgggaggtagaggttgcattaagctgagatcatgccactgccactccagcttgggcagcagaacaagactctatctcaaaaaaaacaaaacaaaacaaaaaaacaaaaaacaaacaaaaaatcttcttctggggttctctaatggggataacattaatcatctcctaagatgactatagtagaggtgcattggtgggtcag

SEQ ID NO: 33716 - DNA, 201 bp, Homo sapiens
gccaaaagaaagtctcggtggaagtctcactggccaggagagttgggacaagtttttatttctttttcttgatgaccttaggagaatttgaggactgaaaycctaaaatagtccctgagaaccagaaagtgtgagctggaaaggtaggatttcaagaccagctgagtctataagaggtcatcaaatctacctgctccccac

SEQ ID NO: 33717 - DNA, 201 bp, Homo sapiens
tcacttgaacctgggaggtagaggttgcattaagctgagatcatgccactgccactccagcttgggcagcagaacaagactctatctcaaaaaaaacaaaacaaaacaaaaaaacaaaaaacaaacaaaaaatcttcttctggggttctctaatggggataacattaatcatctcctaagatgactatagtagaggtgcat

SEQ ID NO: 33718 - DNA, 201 bp, Homo sapiens
ctcacttgaacctgggaggtagaggttgcattaagctgagatcatgccactgccactccagcttgggcagcagaacaagactctatctcaaaaaaaacaaaacaaaacaaaaaaacaaaaaacaaacaaaaaatcttcttctggggttctctaatggggataacattaatcatctcctaagatgactatagtagaggtgca

SEQ ID NO: 33719 - DNA, 201 bp, Homo sapiens
tttctgcctgtgtctaggaaatcataattcatgctggcgtaccctggttgttgaggtccctgaatccttgtgcccacactgctgaagactccttgtgtgayacaagtcaggggacatctgggtcttgactccccagatgctccagctggaccctgctgccctcccttgcccaccctcttccattgtagatgccaaggggct

SEQ ID NO: 33720 - DNA, 201 bp, Homo sapiens
actcacttgaacctgggaggtagaggttgcattaagctgagatcatgccactgccactccagcttgggcagcagaacaagactctatctcaaaaaaaacaaaacaaaacaaaaaaacaaaaaacaaacaaaaaatcttcttctggggttctctaatggggataacattaatcatctcctaagatgactatagtagaggtgc

SEQ ID NO: 33721 - DNA, 201 bp, Homo sapiens
gactcacttgaacctgggaggtagaggttgcattaagctgagatcatgccactgccactccagcttgggcagcagaacaagactctatctcaaaaaaaacaaaacaaaacaaaaaaacaaaaaacaaacaaaaaatcttcttctggggttctctaatggggataacattaatcatctcctaagatgactatagtagaggtg

SEQ ID NO: 33722 - DNA, 201 bp, Homo sapiens
tcattttccaaacggctgtctgagataaataatattgtaatctccaaggacagaagaaaaaactaaggttcaagattaaaaaaaaaacacaaacaaacaaaaaatgtcatctgactcgagacttgacacaatccagctgttgctggccctctgctctaggccacagatatggctggacagagaaaggagaactccagtgac

SEQ ID NO: 33723 - DNA, 201 bp, Homo sapiens
ttcattttccaaacggctgtctgagataaataatattgtaatctccaaggacagaagaaaaaactaaggttcaagattaaaaaaaaaacacaaacaaacaaaaaatgtcatctgactcgagacttgacacaatccagctgttgctggccctctgctctaggccacagatatggctggacagagaaaggagaactccagtga

SEQ ID NO: 33724 - DNA, 201 bp, Homo sapiens
acccctctgagggggatattttgcccatggtcttccctgctgcatctccaccacccacaacgatgcacgcagaaggtgctgaataaatgttgactgtttcratggacgatttccatcctttattcactcagttattcatccagcctatttatatcaagtgggtcctgggaatacaatggtagatgggacacagtccagtgg

SEQ ID NO: 33725 - DNA, 201 bp, Homo sapiens
ggcacggagagggaaaatgacttgcccaaagccagtgagtcagcaaactgaagcaggtcaagaatccagagggaaccctgaagttccctgagcagaaaacratcggttaaaatctcattgccacttctgccttgaactccaaatcctccttcctgagctccaggcatggggtcccctccatcccctcacccagagcttgtc

SEQ ID NO: 33726 - DNA, 201 bp, Homo sapiens
tttcattttccaaacggctgtctgagataaataatattgtaatctccaaggacagaagaaaaaactaaggttcaagattaaaaaaaaaacacaaacaaacaaaaaatgtcatctgactcgagacttgacacaatccagctgttgctggccctctgctctaggccacagatatggctggacagagaaaggagaactccagtg

SEQ ID NO: 33727 - DNA, 201 bp, Homo sapiens
ttctacacttcatcctctctttgggatttctgagtccagacacagtgaggaccccgacagcccccctcctcacctcttgtcctgggaaggccaggcctgcrtggcagagatgtaaccagactccaaagctttctgggccgggcttcatggaaggccgtatcggtgcaggggcataaacacaagctctggagccaggtagag

SEQ ID NO: 33728 - DNA, 201 bp, Homo sapiens
gatgctaggattacaggtgtgagcccctgtgcctggcctgaaactttcaaggtctcaagacactgtacatttaaagtaccccaatgttttccttttccacytcccgttctttctccttatctaacatgaagaacattgtattaaatctgatttttaaggagtttttgtctgttatgtgttaagggtttgtttggtacccca

SEQ ID NO: 33729 - DNA, 201 bp, Homo sapiens
tgagcaagtccctttcaccctctgaggctccgtgaggggccccaggtctgggccccaagtctatggttcagtctgtggccagctgccactcccctgacggsctcagtgtttccgtccactaaatgggtgggttagccaaggcatcttttccagtcttgaagctttgtgggtgcctgatttgattaagccacagtggccttt

SEQ ID NO: 33730 - DNA, 201 bp, Homo sapiens
aaacacaatgccactcatggtctgtgatgaagtagaaagtgctcgttgttaagacaaagctcacccaccaccgctgcgtggacttgagcaagtccctttcrccctctgaggctccgtgaggggccccaggtctgggccccaagtctatggttcagtctgtggccagctgccactcccctgacggcctcagtgtttccgtcc

SEQ ID NO: 33731 - DNA, 201 bp, Homo sapiens
tccagtcctcactgcctcacagtggctctgcttggcgcttggcacagtgacgtgatggtgagctcccccttggtgcccagctccagcgattcagcccagcwcggccccttcgtgaaccccttgggcctaggttcagagagacggcaagggatgttgtatccctggagatggtggttggagacataaccgcatttctcggtg

SEQ ID NO: 33732 - DNA, 201 bp, Homo sapiens
tgccactcccctgacggcctcagtgtttccgtccactaaatgggtgggttagccaaggcatcttttccagtcttgaagctttgtgggtgcctgatttgatyaagccacagtggcctttgccgagtgcagagggtggtatgattggcattttaggagctcaaggaagagaaagggaggggacctacctggtatctgccgttg

SEQ ID NO: 33733 - DNA, 201 bp, Homo sapiens
aaaacttctccaatgggaaaccaaggccagggagggaaatgaccttgcccaaggacacacagtggctggaaccagagctggggcaggacacccagcagctyacatgaagccctagggcaaataagaaaaaggcaccccactctgggcaggcagagctccatgggcacttcgcttggcaagtggaacaagggctgggtttcc

SEQ ID NO: 33734 - DNA, 201 bp, Homo sapiens
gggtgggttagccaaggcatcttttccagtcttgaagctttgtgggtgcctgatttgattaagccacagtggcctttgccgagtgcagagggtggtatgaktggcattttaggagctcaaggaagagaaagggaggggacctacctggtatctgccgttggtatcagcaagtgtcagatcccagctccaggaagagggctg

SEQ ID NO: 33735 - DNA, 201 bp, Homo sapiens
ctcggcctcccaagatgctaggattacaggtgtgagcccctgtgcctggcctgaaactttcaaggtctcaagacactgtacatttaaagtaccccaatgtyttccttttccacttcccgttctttctccttatctaacatgaagaacattgtattaaatctgatttttaaggagtttttgtctgttatgtgttaagggttt

SEQ ID NO: 33736 - DNA, 201 bp, Homo sapiens
ggctgtggcatggtgtggttgatcttggttgatcgtagaccttatttaattgaatctaagatgtcatctatggaaaaatgcattgttatttttgttgccartgaaattctgacatgacattgatcacattccccgttaagcaatgtggaactgtgcctcagagtggaagaggccatgtattcctggattgtgtggggagta

SEQ ID NO: 33737 - DNA, 201 bp, Homo sapiens
agggccaatttccagcaaaagtcgatcccggctattcctcccaggcccttccagtcctcactgcctcacagtggctctgcttggcgcttggcacagtgacrtgatggtgagctcccccttggtgcccagctccagcgattcagcccagcacggccccttcgtgaaccccttgggcctaggttcagagagacggcaagggat

SEQ ID NO: 33738 - DNA, 201 bp, Homo sapiens
tcaacctttctcccaagacagaggtctgagcaacgctggagggaggaggtggaggaacacagtgggaatgaccacaatgcccagaaatggttccagcctcsctgccttaccgcagaccaggctgagccgtctggcagggatttcaggggcacttgagtgaggtggtgggggaaggcttgggagctctgagcagggcacagt

SEQ ID NO: 33739 - DNA, 201 bp, Homo sapiens
atggcgagtgagcgtgggttagtcgatgctagtgtttgtttacatgcctgggttacctggaagatcatgacacatgcagtcacttggttgttttgagaacrggccagagtgacaaagtgttcagttgccactgtggtcaagccataggaaatgagggtattcctagctgtgcctgtcttctaggccccaccacccctcctc

SEQ ID NO: 33740 - DNA, 201 bp, Homo sapiens
ccaggccccacttggtgcttgatttatgccatctcatttccttctcaaaccaccctttgaagttgattgtacattttacagaaaaggaaactgaggctcgkagaggagaatcatttacccaaggtcccagttagtagacggtaggtgcctgaatgtaaatccaggtctctgcctgctccgggagggggtgggggtgaggga

SEQ ID NO: 33741 - DNA, 201 bp, Homo sapiens
ccttctcaaaccaccctttgaagttgattgtacattttacagaaaaggaaactgaggctcggagaggagaatcatttacccaaggtcccagttagtagacrgtaggtgcctgaatgtaaatccaggtctctgcctgctccgggagggggtgggggtgagggaaacaggagaatgtgatgggaaaatccgagatggagccag

SEQ ID NO: 33742 - DNA, 201 bp, Homo sapiens
agtgcaatggcagtatctcggctcactgcaacctccacctcctgggtgtgagtgattctcctgcctcagcctcccaagtagctgggattacaggcatgtgycaccacacctggctaattttgtatttttagtagagacagggtttcaccatattggccaggctggtctggaacccctgacctcaggtgatccgcctcggcc

SEQ ID NO: 33743 - DNA, 201 bp, Homo sapiens
gtttcattttccaaacggctgtctgagataaataatattgtaatctccaaggacagaagaaaaaactaaggttcaagattaaaaaaaaaacacaaacaaacaaaaaatgtcatctgactcgagacttgacacaatccagctgttgctggccctctgctctaggccacagatatggctggacagagaaaggagaactccagt

SEQ ID NO: 33744 - DNA, 201 bp, Homo sapiens
aactcttttggatctttgattattcttcaaggggcatagctttctttctttctttctttctttttttttttttgagacgaactctcgctctgctgccgggmtagagtgcggtggcgagatctcggctcactgcaccctccgcctcccaggttcaagcaattctcctgcctcagcctcccaagtagctgggactacaggtgc

SEQ ID NO: 33745 - DNA, 201 bp, Homo sapiens
ggccaggctggtctggaacccctgacctcaggtgatccgcctcggcctcccaaagtgctgggattataggcatgagccactgcgcccggcccctggccctytcttgagctgctgcaaagccagcaaaccccttactaggctcctggaagggggatgagagccccagaccattcagccttagctcagccttgaaaatagctg

SEQ ID NO: 33746 - DNA, 201 bp, Homo sapiens
aatttcggagatgccacctatgaagctcctgcccagagcacccctgggcctccaaagagatgttacccatctggggaagaggagctgggctgggccacctyctcagcttcggagacagactctggtgcattcgcttacccgtttcgcacctttgcataagacactgacaatgcatgtgagtctgtgaaagcttctgagaag

SEQ ID NO: 33747 - DNA, 201 bp, Homo sapiens
gccttggaaacgattcccccagtcattctgggaacatgttgtaagcactgactgggaccaggcaccaggcagggtctagaaggctgtggtgagggaagacrcctttctcctccaacccaacctcatcctccttcttcagggacttgggtgggtacttgggtgaggatccctgaaggccttcaacccgagaaaacaaaccca

SEQ ID NO: 33748 - DNA, 201 bp, Homo sapiens
cgcctccagctgggcctgaccctccatgtcctgccctcaaaaaactgggtggagaaataattgtttctttaaaggatatgagttagaatcaccccctgttraattttccctcctagatccccttcttaaatgtccaacatgggtcaaaagaaaatgacctccttgccttccttctttcctagttgcatctttcttttcttg

SEQ ID NO: 33749 - DNA, 201 bp, Homo sapiens
tcattaattcacccacccattcactcattaattcacccacccatttgctcacttactcagtaatttaccctcattcgttcattcactcactcattcatgcrttcactcaactcactcattaattctccctgtctctaattcactcactcctaattcacccactcatcaattcccccacacactcactcattaattggtgct

SEQ ID NO: 33750 - DNA, 201 bp, Homo sapiens
ctccgggagggggtgggggtgagggaaacaggagaatgtgatgggaaaatccgagatggagccagcctgggccagaaacactgggagctgtgggagacggmgaggggcagggtgggatcacagggagcaggagcggggaattggaggtgaatctggccctcccaaacttccagtccattctgctcccaggggaaccgggaa

SEQ ID NO: 33751 - DNA, 201 bp, Homo sapiens
tcaacccaaggtgacttcccatcctccctccctcccaacccttccaggcaatgactacattgtccctcggcactgcccggagctggcggagatgagccggrtgtccatacgcatccttgacgagctggtgctgcccttccaggagctgcagatcgatgacaatgagtatgcctacctcaaagccatcatcttctttgaccc

SEQ ID NO: 33752 - DNA, 201 bp, Homo sapiens
atcctgatcgaccttctctacctgcagggtcccccagcgatgcaccccatgcccaccaccccctgcaccctcacctgatgcaggaacatatgggaaccaaygtcatcgttgccaacacaatgcccactcacctcagcaacggacagatgtgtgagtggccccgacccaggggacaggcaggtgggcaaactctgggatttt

SEQ ID NO: 33753 - DNA, 201 bp, Homo sapiens
catttcacagttcaggcaggtagaggcagaggggagcattaagctgacttgcccagcgtcactgagttggctacgggcagccttcccaagggtacagatgrcaaacactgttccttctctctttcaggtggccctgctcagagcccatgctggcgagcacctgctgctcggagccaccaagagatccatggtgttcaagga

SEQ ID NO: 33754 - DNA, 201 bp, Homo sapiens
cagcccccttgcgagttaggaggccggctcccaccccagaaggtggccaggttttcatgccttcctagagaaagctggggctcgtggcctccaccacaggragacgcagaccctcagaaacaagtctgtgaagtcacaaccagccccagtttacagatgtgaaactgaagctccaaaaagtcaggaggtcactgagtgggg

SEQ ID NO: 33755 - DNA, 201 bp, Homo sapiens
cagtcacagacacccccaccccctactccatccctgttctccctcctcacctctctgtgcctcctcacagccgtccagaatgagcgggaccggatcagcaytcgaaggtcaagctatgaggacagcagcctgccctccatcaatgcgctcctgcaggcggaggtcctgtcccgacaggtaccggggtgatcctgccaccca

SEQ ID NO: 33756 - DNA, 201 bp, Homo sapiens
gccaggttttcatgccttcctagagaaagctggggctcgtggcctccaccacaggaagacgcagaccctcagaaacaagtctgtgaagtcacaaccagccscagtttacagatgtgaaactgaagctccaaaaagtcaggaggtcactgagtggggaggtgatggagtgggaacagcccccagatctggctgaggccgaag

SEQ ID NO: 33757 - DNA, 201 bp, Homo sapiens
tgagtggggaggtgatggagtgggaacagcccccagatctggctgaggccgaagccctggagagatccccgcaaggctcccttagatgcctgacattctgytcttcctgaagcctcactcccttctctcctggcgcagacacgtccccatcagaaggcaccaacctcaacgcgcccaacagcctgggtgtcagcgccctgt

SEQ ID NO: 33758 - DNA, 201 bp, Homo sapiens
aaccgagtattaactctgagccataaccaggagcctgctatgggttctgagcttttataggatgtggtggaaatagcagggctctggtactccagaggtcraggttcccaactcagctctaacaccaaccagcagagcgacccaggaccacatgttgcctctctgagcctcagttttcccatgtttagcaggacaggactg

SEQ ID NO: 33759 - DNA, 201 bp, Homo sapiens
ggatggacaaatgatgtgatgagtgggttgatgaaaagatggatgaatggatggataagaaggggtgggctgaggtagcctggaatagcagcatcttcaartgctctaaacaggacaagtgaagagataggggatgtcaacaatcttccatcagggcaatactgtatatctgtttttaagtgccaggtgagcctaattttt

SEQ ID NO: 33760 - DNA, 201 bp, Homo sapiens
cggtttgaaaggaaggcagagagggcactgggaggaggcagtgggagggcggagggcgggggccttcggggtgggcgcccagggtagggcaggtggccgcsgcgtggaggcagggagaatgcgactctccaaaaccctcgtcgacatggacatggccgactacagtgctgcactggacccagcctacaccaccctggaatt

SEQ ID NO: 33761 - DNA, 201 bp, Homo sapiens
ctatgggttctgagcttttataggatgtggtggaaatagcagggctctggtactccagaggtcaaggttcccaactcagctctaacaccaaccagcagagygacccaggaccacatgttgcctctctgagcctcagttttcccatgtttagcaggacaggactgggctcttagagagttcatagcacctttccagctcctg

SEQ ID NO: 33762 - DNA, 201 bp, Homo sapiens
ttcccagttggtgtgcttcttgggcctggatacaattgcagaaagagattggggcttagagagagacagaaatttgcctgaagtcacagagcaagttagcracagaactgggattcaaatccaggtcttccgcttcgcgatgtgaaggccactggagtgactgatgaaagacttgcacagtgcccagtgcgcaggaggcgc

SEQ ID NO: 33763 - DNA, 201 bp, Homo sapiens
ccagatgggagcaggcagtggagcctggggccccggtgggcgtaggctccagatccctcagtgcctggaacagagcagcagtgggagggagggagacagcrcctggccttgctgatgctgaggttagtctggagtacatgcagctcctgctgatggacaaaaccatcaaggcagttggagcccccagatcctcttgttcag

SEQ ID NO: 33764 - DNA, 201 bp, Homo sapiens
aactgagccccagagagaggctgcgattgccaccggcacacagagtggcaggttccagacaggaagccgggtctggtgcagcttcaacctccctcctttcygaatcagccaagcctcattccacagtgaggcctcttggactccaagggctatcccatccactgtcgggatggtggaaggatcatcttctatctcaggcca

SEQ ID NO: 33765 - DNA, 201 bp, Homo sapiens
ccctgagaaccagaaagtgtgagctggaaaggtaggatttcaagaccagctgagtctataagaggtcatcaaatctacctgctccccactttacagaagargacactgaggctagagaggtgatgtgacgggtcaggggtggagtcaggtctagaactcaggctccccagagctgagcagacaccaagctccctggagtga

SEQ ID NO: 33766 - DNA, 201 bp, Homo sapiens
cgtgggtatcacgtgatctccaaagtcttcacattctagaaaatgggaacaagaccccagacccatcctggacaaaggaggagaagaccagagcacaacakttattaaggtcttgccaggcttcctgctaccagcaggtatcagtcactgggctgtgctttttccacacttcagtaggttgggttcatttcattttcatga

SEQ ID NO: 33767 - DNA, 201 bp, Homo sapiens
ccggtcccagggacaaatgccccagttcccttagtattcattcgtgggtatcacgtgatctccaaagtcttcacattctagaaaatgggaacaagaccccrgacccatcctggacaaaggaggagaagaccagagcacaacatttattaaggtcttgccaggcttcctgctaccagcaggtatcagtcactgggctgtgct

SEQ ID NO: 33768 - DNA, 201 bp, Homo sapiens
ggcagcctttgaggactcgtgattcgctccctgagttgggcacatttcaggcccatgattttgaaaaacattgaaattggcttgtggacatccgccccccsacccccactgcatggtactggagccacgacagagtccaggcccccctttttacagatgggtacactgaggctcagagcagggtgtaacttacccagagct

SEQ ID NO: 33769 - DNA, 201 bp, Homo sapiens
cacctctctgcttccagccagccctgggaggagggggagaacggcatggcaaggcgtttgcagagccgtcttgttcaccaatgtctttcaagacattgccygggtccacagagagcccaccattcattcccatgctggctggagcccctgaatacccgaggtgaccttctgtccttggacaagtcacttccccctctgatc

SEQ ID NO: 33770 - DNA, 201 bp, Homo sapiens
agaagaaatgctcaataagcatttgttggatgagtgaaatgatgggcttaaaacagcgctacaatgatgatcatcaatgtcagccagatcccactctcttsccttccttcctctctgccctcctcactgcgttgtctttggtccttgtatttgccccattataacccaaactggctgtcccagcttcagctgtcatgtctg

SEQ ID NO: 33771 - DNA, 201 bp, Homo sapiens
acggcgacattcgggcgaagaagattgccagcatcgcagatgtgtgtgagtccatgaaggagcagctgctggttctcgttgagtgggccaagtacatcccrgctttctgcgagctccccctggacgaccaggtgaggatgggcgtggatggtgggcagtagtgggcagtgggcggggcagccagggggctgctggcccacc

SEQ ID NO: 33772 - DNA, 201 bp, Homo sapiens
tttaacctagatctatctgacccacaaggtctgtggtttattcccctaaagagaggtcaggggaagagaggctaagaagcttatctactctctcatttaaycttcacgacaaacgacaagttagaccccttgtacagaaggagtaaccaaggcttcgaaataaaaacttgccttgtgcagacagctggccctgggcttgga

SEQ ID NO: 33773 - DNA, 201 bp, Homo sapiens
gacagctggccctgggcttggaatataaatagtcactggtatacaggcaccagagaccaatacccacaggctaacacccactcagtccacagaaagaagcytaatattttttataagcatagaaataaaaaccaaaccaatactgtgacatttgctctgtgacttcctgtatttattatgtgctcatatgaaagcacctaa

SEQ ID NO: 33774 - DNA, 201 bp, Homo sapiens
tctctcctggcgcagacacgtccccatcagaaggcaccaacctcaacgcgcccaacagcctgggtgtcagcgccctgtgtgccatctgcggggaccgggcyacgggcaaacactacggtgcctcgagctgtgacggctgcaagggcttcttccggaggagcgtgcggaagaaccacatgtactcctgcaggtgaggagcct

SEQ ID NO: 33775 - DNA, 201 bp, Homo sapiens
cagatctggctgaggccgaagccctggagagatccccgcaaggctcccttagatgcctgacattctgttcttcctgaagcctcactcccttctctcctggygcagacacgtccccatcagaaggcaccaacctcaacgcgcccaacagcctgggtgtcagcgccctgtgtgccatctgcggggaccgggccacgggcaaac

SEQ ID NO: 33776 - DNA, 201 bp, Homo sapiens
agcatatctggaggggtggacagttctccacagggaggtaggggaaaagaggaggcccggaaacccctcctggagggaagagccccatcggtcccaggccmgcctcagaggagagggggcaggcagctggctgaggtcagcctgccaccctgcttccttctgtgtcttggagccactcagccagtatgaggctgcagctcc

SEQ ID NO: 33777 - DNA, 201 bp, Homo sapiens
gtcatatcctcacagggcccatgggacacagagccaggtgcattcccctgacttgggtcttccaatggctctcaggcacctctctgcttccagccagccckgggaggagggggagaacggcatggcaaggcgtttgcagagccgtcttgttcaccaatgtctttcaagacattgcccgggtccacagagagcccaccattc

SEQ ID NO: 33778 - DNA, 201 bp, Homo sapiens
gactgggcatctgtctttaattttaaaaaatctttttaaaaaatagacatagggtctcactatgttgcccaggctggtctcaaactcctgggttcaagtaracctcccatctcagcctcccaaagtgctaggattataggtgtaagccaccatgttcggccaacatctgtatattttaaaggtttcagatgattctatttc

SEQ ID NO: 33779 - DNA, 201 bp, Homo sapiens
gttccccatagtgaggaagtcaaggagaacaggtgaacaggagacagctggaagcaagacttctcaatttacaccttttatgttttgattctgaaccatgygaatgtagcaccaattcaaaactaaatgtaaagatgttcacaaattaagtaaaatattaaataataataataacacatacctcaataatatgaccggtgt

SEQ ID NO: 33780 - DNA, 201 bp, Homo sapiens
aggaccccgacagcccccctcctcacctcttgtcctgggaaggccaggcctgcatggcagagatgtaaccagactccaaagctttctgggccgggcttcayggaaggccgtatcggtgcaggggcataaacacaagctctggagccaggtagagatagttctaacaccattgccttggctcactgggaaaatgatgtttct

SEQ ID NO: 33781 - DNA, 201 bp, Homo sapiens
ctcttcctctttgccaaacatggctggacataatttaattcccacaacaacctctgaggctgtcattcttgtggttctgtttcacaaatgaggaaacaagrccggtcatggtggatcacgcctgtaatctcagcactttgggaggctgaggcaggtggatcacctgaggtcaagagtttgagaccagcctggccaacgtgg

SEQ ID NO: 33782 - DNA, 201 bp, Homo sapiens
ctgagaggggccagcaggagctccctcaaggatgaagaggttgtgcactgtgcgggaccccatagcagcaggaggaggatgtcggactggggccagggctycccccaggacccaccaggtatggtcctgactccacatctgcctggaaggaaggatgggatggtaggagagagacacagaaccaagggggaggattccaga

SEQ ID NO: 33783 - DNA, 201 bp, Homo sapiens
ctggctcccagccccacagaagacattggctgacccgaggggtggggctgcgggttcgcgaaggtttgtgaaggcccagatccaagttgcaaaactgtggmgtctatcaagtgagacttagcagccccactccctcaggtgcgccccttgccctcctcagagtccttctctcaagtttagcagcctccaccgtgcccttta

SEQ ID NO: 33784 - DNA, 201 bp, Homo sapiens
cctgtatcctctgtagtgctcaacacgaggctggactggcagaattgttctgcaaaatgggaaggatcactgatgctgagtcagaggcagcagcctcccgsaatttgaaggggcgggggacctagttcaaggcctggcatgcaggaggtgctcaataaacatgtgtggcctgaatgaactaatgaataagcatgattcagt

SEQ ID NO: 33785 - DNA, 201 bp, Homo sapiens
cacgaggttaagagtttgagatcagcctgaccaacatgatgaaactctgtctctactaaaaatacaaaaaaaattagccgggcatggtaattagccgggcrtggtggcatgcacctgtaatcctagctactcaggaggctgaggcaggagaattgcttcaacccgggaggcagaggttgcagtgagccgagatcatgccac

SEQ ID NO: 33786 - DNA, 201 bp, Homo sapiens
atttgcacgagcaatcttctatttcatagatttaccatgtttttaagtgactacaagaaaagtttaaattatgtctgtggctcacattctatttctattgrccagcactggccgggtccctcagattctatagcagtgtacgtgtgcttgctgctaactcattctgcctccattttccattcttgcgtagaccaatcccag

SEQ ID NO: 33787 - DNA, 201 bp, Homo sapiens; identical to SEQ ID NO: 7496

SEQ ID NO: 33788 - DNA, 201 bp, Homo sapiens
cagagtgtgtagggggaagccggtaaaaggtgcgatccgagaggagaggaagggccctggggacttgtgaggttggaaggcactggttttgagcagcaggsgacatgacttgaacggatccctctgtctctgagaggaacacagactgcaggcgcaaggcagaagcagagcccaggaggaggctgatctaatccaggagag

SEQ ID NO: 33789 - DNA, 201 bp, Homo sapiens
ggaccactgccctgccctgggctgctccccgcccccatcactttttccaagcccaggaactgtgtgctcctgaggcagaggccaagcccctgaactgggaktcccaaagacaagaccacctccagctctggaaccagaaagatctgggctcaaatccggcatagatccttccaacctgtgtgaatgtggcaaggcaatttc

SEQ ID NO: 33790 - DNA, 201 bp, Homo sapiens
gacttgaacggatccctctgtctctgagaggaacacagactgcaggcgcaaggcagaagcagagcccaggaggaggctgatctaatccaggagagacagcrggcctgggagcagggagggagcagcaggtctgtttgtcaggatcacgacagcactggggtgtgaggggaagccaaggaaggtggccaggcttgatgccag

SEQ ID NO: 33791 - DNA, 201 bp, Homo sapiens
ccgggcctcttcatttactcccacaaaggctggaattttgagcagcccctgtctgtctgtttgtccttccagccacccctgagaccccacagccctcacckccaggtggctcagggtctgagccctataagctcctgccgggagccgtcgccacaatcgtcaagcccctctctgccatcccccagccgaccatcaccaagc

SEQ ID NO: 33792 - DNA, 201 bp, Homo sapiens
ccgcccccatcactttttccaagcccaggaactgtgtgctcctgaggcagaggccaagcccctgaactgggagtcccaaagacaagaccacctccagctcyggaaccagaaagatctgggctcaaatccggcatagatccttccaacctgtgtgaatgtggcaaggcaatttcctctctgagcctcagtttcctcacctat

SEQ ID NO: 33793 - DNA, 201 bp, Homo sapiens
cgggtagggaaactgagccccagagagaggctgcgattgccaccggcacacagagtggcaggttccagacaggaagccgggtctggtgcagcttcaacctycctcctttctgaatcagccaagcctcattccacagtgaggcctcttggactccaagggctatcccatccactgtcgggatggtggaaggatcatcttcta

SEQ ID NO: 33794 - DNA, 201 bp, Homo sapiens
cctcttggactccaagggctatcccatccactgtcgggatggtggaaggatcatcttctatctcaggccaggactgacccagatgggagcaggcagtggarcctggggccccggtgggcgtaggctccagatccctcagtgcctggaacagagcagcagtgggagggagggagacagcgcctggccttgctgatgctgagg

SEQ ID NO: 33795 - DNA, 201 bp, Homo sapiens
agatcccctcctcaatgctcaagaccaattttaaacccatagccgagtcttcactgtcttgcgcgcccctgctgatgggtggatcactcttatagcctctscattgtgttgggggcagttgtgatatgtggaaagttcttccaccagctgagttagaggccatctcccctcattccacatgctgatgtgggcctgttctct

SEQ ID NO: 33796 - DNA, 201 bp, Homo sapiens
cactacagaggagctcacctcctccacctccattctccccagccaggccctggagcagctgacgggaggggcctcagatattacagaagggacactgagtscggtttcacatggcccagtttgcagcaagggcaggaatcgaacctggcgccctggggcactttctaattcatcctactgcctgcatcccacaggccaagc

SEQ ID NO: 33797 - DNA, 201 bp, Homo sapiens
atgatgattttttgccctgcttctcctctaaggctgacagactccttggggctctaaagctgacagaggagggggcagggggcaggtaacaggtgaaggcmcagagggagcccttctccctcatccctgcctcctccctccctccgtttttaccctgagcttccttcagagctggagggcacccactatccagccccctcc

SEQ ID NO: 33798 - DNA, 201 bp, Homo sapiens
gtttttaccctgagcttccttcagagctggagggcacccactatccagccccctccccacatctgattccagggagggggctctgtgcaggggacagagartgcgggagggcccggacatctccagcattttcttccctgtatctctcgaagatcacctcccccgtctccgggatcaacggcgacattcgggcgaagaaga

SEQ ID NO: 33799 - DNA, 201 bp, Homo sapiens
tttatctctctgatcctcagtctcctcatctgtaaaataaggataagaatagacttgacttccacttcaacgagaagtgaaacgagatatcctaccactgygctttgcacataaaggctctataaatgtcagctgtcatcataaagagccaaaagtggcatttggagtaaatctgatttgtttttaagagatagggttttg

SEQ ID NO: 33800 - DNA, 201 bp, Homo sapiens
ttacagatgggtacactgaggctcagagcagggtgtaacttacccagagctgcatagcttgtctttgatggccaaggttagagctcagtctctcacagctscttcctgcttcctcggctctcagaactgagaagtgaaaaccaaagttggcctgaggggactctctctgggcctttttttctctatctctgcctcggtctc

SEQ ID NO: 33801 - DNA, 201 bp, Homo sapiens
ataagacactgacaatgcatgtgagtctgtgaaagcttctgagaagtctcgtccaggcagttgtttgactttgcagaggccgaggcttctcaaactccttyggcaagattctcctggaacacctattaatactgcacattgggacactgtgaaaacgctggtttggcttgtccccagcctcatacaggggctggacccggg

SEQ ID NO: 33802 - DNA, 201 bp, Homo sapiens
attttgggaaattgacatagggttagcaaacctcccccacccccatataaaaatattaatacttttttttttttctgagatggagtctggctctgtcgccraggctgcagtgcagtagtgcaatctcggctcactgcaacatttgcctcctaggttgaaacgattctcctccttcagcctcccgagtagctgagattacag

SEQ ID NO: 33803 - DNA, 201 bp, Homo sapiens
gagcttccttatatgcaccttgttcctttcaactcacttttgttctcttggttttttggggtcctcttaacaccctcatgaagtctatagatgggaatggyacaccctagtttactaacccaggaataggtacccaacaggcactgccaatattggatgggctggttgattggccacgcctgaggaagatggcgtcccaag

SEQ ID NO: 33804 - DNA, 201 bp, Homo sapiens
aaggggtggggtggaggcaggcggggggggggggaggcggggggggcggtggagcgggggagatcccctccccaaccctggcaggtttaaaaaaaaaaaaagggaagaagtgaaaagacttttgcagacctccagagatgatgcataaggttggctggggtggagatggaaagatggaaaatctagattctgtttggaggg

SEQ ID NO: 33805 - DNA, 201 bp, Homo sapiens
cctgtctcactctcctgagtagctgggactacaggcacatgacaccacatctggcttatttttgtatttttagtagacggggtttcaccatgttggccacrtgaaactggtctcaaactcctggcttcaactgatctgcctgcctcagccccacaagtgctgagattacaggcgtgagccacttcacccagccagtgggca

SEQ ID NO: 33806 - DNA, 201 bp, Homo sapiens
tttcattcttttgcatgtggatatacagtttcccaaacatgaatttggttttgatagtactttgttaattaagacttttgcacctggtagacgctctttgdcctctaacccactggaatcctctcaccatccttccctgacagttgaccatttagcttgggcttaatacttccaatgacggaatactcactacttaataaa

SEQ ID NO: 33807 - DNA, 201 bp, Homo sapiens; identical to SEQ ID NO: 7514

SEQ ID NO: 33808 - DNA, 201 bp, Homo sapiens
acaaaggctggaattttgagcagcccctgtctgtctgtttgtccttccagccacccctgagaccccacagccctcaccgccaggtggctcagggtctgagycctataagctcctgccgggagccgtcgccacaatcgtcaagcccctctctgccatcccccagccgaccatcaccaagcaggaagttatctagcaagccgc

SEQ ID NO: 33809 - DNA, 201 bp, Homo sapiens
caagtaagctgggactacaggtgtgcagcatgcctggctaatttttaaatttttctgtagagacaaagtttcactatgttgcccaggctggtcttaaactyctgagctcaagcaatcctcctgcctctgcctcacaaagtggtgagattacagacttgagccactacacctggcctctttgtccatttttaaagtttttgg

SEQ ID NO: 33810 - DNA, 201 bp, Homo sapiens
tactattccatagtgtatatgtaccacattttcattatccattccactgctgatgggcacttaggttgattccatgtctttctactgttttgttttgtttragatggagtctcactctgtcacccaggctggagtgcagtggcgcaatctcagctcactgcaacctctgcctcccaggttcaagccattctcctgtctcag

SEQ ID NO: 33811 - DNA, 201 bp, Homo sapiens
cccatataatcttactctcattccaataaaccatttcccctctccccccaccatcccacccagggatcatagcacacaaaagtccttttgtctccagagayagtaaaatctcctccctcagaccttgccctgcagctggggcccactccctgcctggctggagagcttttcctttgaagacccgggatggaaaacaggccc

SEQ ID NO: 33812 - DNA, 201 bp, Homo sapiens
ctgataacgcccgcctaaccttgaggagccctatccgcagctgctgacagcagccctttcattccgcccgccggccactcggcgccctgatgggtgggtgygggtgctggcaggaggctgccgtgggaggggtgtgggcgggtggggtggacggcccggtcagggaagccgtgctctgagctggccccgtccacatggtgg

SEQ ID NO: 33813 - DNA, 201 bp, Homo sapiens
aaggacacagcagttcaaggacagagtcagcgcgaggtctctcagctctgagcacatgttctttccccttccaggtttctagttttatgggtagtagtttyatgatgcccatttcacagttcaggcaggtagaggcagaggggagcattaagctgacttgcccagcgtcactgagttggctacgggcagccttcccaaggg

SEQ ID NO: 33814 - DNA, 201 bp, Homo sapiens
gatggctctcagtgggctggctatgtccttctgtgagcttgctgggcccctacctatgactccagtcttagaagtcttgccttgtaccccctgcagagaakggtttcatcaagctgattctctgccaggggccagtgctcatacatttgctctgagaaggaccagccctgagacctaacatccacatccaagttcttgtaa

SEQ ID NO: 33815 - DNA, 201 bp, Homo sapiens
gggttctgtacactgagttcacagcctcatctcatgttaacgacagccaggagaggccgttttcatttaacagatgaggcaagtcaagatttgaagagacratatggccgggcgcagtggctcacacctgtaatcccagcactttgggaggctgaggcgggcggatcacctgaggtcaggggttcaagatgagcctggcta

SEQ ID NO: 33816 - DNA, 201 bp, Homo sapiens
gtgagggagactagtcaggagtggccctgtcctcaggcttgcattggagggctccaggactcagttttcaactgggtaccccactcagatgcaaggaaatrtggatgcaagtcaccaaattcccagcattgaagtcagagcacgatcagggttatccctggaattacctgtgcatccttttttcttttgacagagtcttgc

SEQ ID NO: 33817 - DNA, 201 bp, Homo sapiens
ttacctgtgcatccttttttcttttgacagagtcttgctctgtcactcaggctggagtgcaatgatgtgatctcggctcacttcagcctccacccgccacrttcaagcaattctcctgcctcaccctccagagttgctgggaccacaggcgtgcaccaccacacccagctaatttttgtatttttagtagagacagggttt

SEQ ID NO: 33818 - DNA, 201 bp, Homo sapiens
cttcctcttttctttcatatttgcttcttttcctcaaaaaaatttatcaaaataatatctagaaccggatgtggtggctcacatctgtaatcccagcactwtgggaggcagaggcaggaggatcacttcaggccaggagttcgaggccagcctggccaacataacaagacctcgtctctatagaaactaaaaaaaattagc

SEQ ID NO: 33819 - DNA, 201 bp, Homo sapiens
cctgtaatcccagctactcaggaggctgaggcaggagaatcgcttgaacctgggaggcgggggttgcagtgagccaagatcatgccattgcactccagcckgggcaacaagagcaaaacttcatctcaaaaaaatacatatatgtgtatatatatataatatatattatatatatataatatatagtgatatatatagtat

SEQ ID NO: 33820 - DNA, 201 bp, Homo sapiens
ggaattattattatctccattttacagataaggaaactgaggcatgattaacttgctcaaggtcacacaaccggaaaatggcagagcttggatttgaactkcagaccacctgtcaatcccaatttctctctctcaagcccacattcttacctaccacctgctatcccacacttaccagagggtgagatttctagttctagt

SEQ ID NO: 33821 - DNA, 201 bp, Homo sapiens
agcctgtatcctctgtagtgctcaacacgaggctggactggcagaattgttctgcaaaatgggaaggatcactgatgctgagtcagaggcagcagcctccmgcaatttgaaggggcgggggacctagttcaaggcctggcatgcaggaggtgctcaataaacatgtgtggcctgaatgaactaatgaataagcatgattca

SEQ ID NO: 33822 - DNA, 201 bp, Homo sapiens
tagaaatgtgggtgaatgttctttctgccacttcctttgtccatgaaagaggaaataaatgcattacctccatgaaggttgagattaaatattgtatgacygcttaagttcctttccaggctaaggatctagaatttattcactgatttttttttcattcattcatccagccatctaacaaaaaatatacatatagttatc

SEQ ID NO: 33823 - DNA, 201 bp, Homo sapiens
tgttctttctgccacttcctttgtccatgaaagaggaaataaatgcattacctccatgaaggttgagattaaatattgtatgaccgcttaagttcctttcyaggctaaggatctagaatttattcactgatttttttttcattcattcatccagccatctaacaaaaaatatacatatagttatcaataaatatatattta

SEQ ID NO: 33824 - DNA, 201 bp, Homo sapiens
aaggcagatgtggtaacaattgtatgaagaggaatacaagtgtctagggcttgggggccacacactaaacctggcatcagaaggcccagatctgggacccrgctcatttgttttctagcactaggttgtttttcatccttgtataacaccatggcccaggtactactctaagcactttataaaaattaactcctggccggg

SEQ ID NO: 33825 - DNA, 201 bp, Homo sapiens; identical to SEQ ID NO: 7513

SEQ ID NO: 33826 - DNA, 201 bp, Homo sapiens
ccaatatcaggctatggctgttcccacccttcattcttaaaatatggcccctctccagcccttcccctatctcccctcccacatcaccttcccatcctacrtcaattcagtcttcagcccctatgattcacaaacctggttgcacataggaaactttttaaaacaattttggggctccactccagacccagtgaatcagtc

SEQ ID NO: 33827 - DNA, 201 bp, Homo sapiens
gaatcagtctcctggggtgagttccaagagtctgtaattttttgagctccttgtgtgacttagggtatgcagttcagttgaggtatggaaaccattgcctwactttctcccatttagtaaacagaggaactaaatatccagagtgcatcttgcctcaacccagaagcctcccgtattcattaattcattgttcatttgttc

SEQ ID NO: 33828 - DNA, 201 bp, Homo sapiens
agttccagaccagcctagtcaacatggtgaaaccctgtctctactaagcatacaaaaattagctggacgtggtgccaggcgcctgtaatcccagctactcrggaggctgaggcaggagaatcacttgaacgcaggtggtggaggttgcagtgagccgaggttgtaccactgcactccaacctgggcaacagagggaaactt

SEQ ID NO: 33829 - DNA, 201 bp, Homo sapiens
gaggctgaggcgggcagataacttgagattaggagttcgagaccagcctggccaacatggcaaaaccccgtctctactaaaaatacaaaaactagccgggyatgatggcacacgcctgtaattccagctacttgggaggctgaggcatgagactcacttgaacctgggaggtagaggttgcattaagctgagatcatgcca

SEQ ID NO: 33830 - DNA, 201 bp, Homo sapiens
tgccttccctccactagtcagcaccaggaaatgttttcgataacgttgcaacggaggccttgttcatgctgccgccatcggggacaagcgcggggggcggsgggtggaggccagaggagactatttcagtcctaaattgtgcttaataaacccatatcaaaaccataaacccttggctgccataaattcctctacccttgg

SEQ ID NO: 33831 - DNA, 201 bp, Homo sapiens
tccaggtttctagttttatgggtagtagttttatgatgcccatttcacagttcaggcaggtagaggcagaggggagcattaagctgacttgcccagcgtcrctgagttggctacgggcagccttcccaagggtacagatggcaaacactgttccttctctctttcaggtggccctgctcagagcccatgctggcgagcacc

SEQ ID NO: 33832 - DNA, 201 bp, Homo sapiens
atgtcataatagcatccaaggagtttaccaccttctaccacctactagctgtgtgaccttgagtgaatgactcaattctcttttttttttttttttgagayggagtcttgctctgctgcccaggctggagtgcaatggtatgatcctggctcactgcaacctctgcctcctgggttcaaacaattctcctgcctcagcctc

SEQ ID NO: 33833 - DNA, 201 bp, Homo sapiens
aagaccagcctgggcaatatggcaaaaacccacctctacaaaaaacacaaaaattagctgggcctggtggtacacgcctgtagtcccacctactcgggagrctgaggcaagaggattgcttgagcccaagaggtgaaggttgctgtgagccgagattacaacaccacactccagcctgggtgacacagcgtaatcctagtg

SEQ ID NO: 33834 - DNA, 201 bp, Homo sapiens
ccacctactcgggaggctgaggcaagaggattgcttgagcccaagaggtgaaggttgctgtgagccgagattacaacaccacactccagcctgggtgacasagcgtaatcctagtgctttgggaggtcaaggcagaaaaattgccaccacacctggacttaaaaaatatttttactgaagtataacattcaaaacagaaaa

SEQ ID NO: 33835 - DNA, 201 bp, Homo sapiens
agatggaggacgtgtaggaggtgaagatggagattgggcagaaaccaaatcataaacatatggctttgtcagccttttcagaaatttggattttattctcwttgcaactattgtaaggagagtgaaaaccagactaagtatttttattctttgagacaaagtctccctcaatcatccaggctggagtgcagtggcacaatc

SEQ ID NO: 33836 - DNA, 201 bp, Homo sapiens
ccccttgcgagttaggaggccggctcccaccccagaaggtggccaggttttcatgccttcctagagaaagctggggctcgtggcctccaccacaggaagaygcagaccctcagaaacaagtctgtgaagtcacaaccagccccagtttacagatgtgaaactgaagctccaaaaagtcaggaggtcactgagtggggaggt

SEQ ID NO: 33837 - DNA, 201 bp, Homo sapiens
attctaggaaccacatttactgatcatcaagctactggctgccgtttattgagctcttatcatatgccaggcacaatactaagtctttgtgtgtatttacycatccccttgagcccattgttgtttttcccattccatggggcctctcctgaagcctcagtagatgagcccgtcttccagtctggtgctgtttttgggaca

SEQ ID NO: 33838 - DNA, 201 bp, Homo sapiens
gtgaaacatgggaagtgctatacaacagtacctggcacgtgataattgttaattatcaacaattgttatttatcactgaaatagatgtactgtagagatckcttgcaagcgttgaaattccatcatcgtcatattactcaccataggctattattaaaccatatcccatgtggtatttttactccctgacatatgtttgaa

SEQ ID NO: 33839 - DNA, 201 bp, Homo sapiens
ctcccaaacccagttttcaatggggttaagcctgtctcatccacttcaacttccattttgtggactgggaaagattatgaatgggaacctgatgcatgtgygaacagttggaggcaagaaaaagattgagaactacagtctaaggttccaacatttctgtggttgtattagtcagtgattccattatcccaaaagcctaag

SEQ ID NO: 33840 - DNA, 201 bp, Homo sapiens
ggtttggggtggaaaaacatctctgacagaagcaacaacgtgagcagaagcatagagatagaaaaacacaggggacacatagatgctataagtaggtcagytggctgcagcagagatgtgggggatgaggctgaaaggtgaggcgggaccaaatggttgaaggacttgcactccaaggagctttgagagccattgattaca

SEQ ID NO: 33841 - DNA, 201 bp, Homo sapiens
ttagtttctattactcatctcctaaatatccaagaaatggtattttttgagccagctggtccggggtttcatcaactgctgctccttctcccaggaaagamtatccctgtcacccatcccattgccgctggggacagccaggcctgggccttggtttgggagaagcagtccaagtctgcatatcaaataaatgatggagga

SEQ ID NO: 33842 - DNA, 201 bp, Homo sapiens
ggtttcaccatattggccaggctggtctggaacccctgacctcaggtgatccgcctcggcctcccaaagtgctgggattataggcatgagccactgcgccyggcccctggccctttcttgagctgctgcaaagccagcaaaccccttactaggctcctggaagggggatgagagccccagaccattcagccttagctcagc

SEQ ID NO: 33843 - DNA, 201 bp, Homo sapiens
gatggaggagatgggtggtaggaccttccagacctcataaaacttaggctttatgatctgggactcacagaaggttgagcaataaaagaccttagggattmtctggtttaattaattctctcattttatagaggaagaaattaagtcaaggtggggcagggtgggaggggagaactttcccgggcctcttcatttactccc

SEQ ID NO: 33844 - DNA, 201 bp, Homo sapiens
aggacagagtcagcgcgaggtctctcagctctgagcacatgttctttccccttccaggtttctagttttatgggtagtagttttatgatgcccatttcacrgttcaggcaggtagaggcagaggggagcattaagctgacttgcccagcgtcactgagttggctacgggcagccttcccaagggtacagatggcaaacact

SEQ ID NO: 33845 - DNA, 201 bp, Homo sapiens
gtgtttgttccctggtcccttctttttttttttttttagatggaatttcgctcttgttgcccaggctggagtgcaatggcagtatctcggctcactgcaamctccacctcctgggtgtgagtgattctcctgcctcagcctcccaagtagctgggattacaggcatgtgccaccacacctggctaattttgtatttttagt

SEQ ID NO: 33846 - DNA, 201 bp, Homo sapiens
ctgtgccttccctccactagtcagcaccaggaaatgttttcgataacgttgcaacggaggccttgttcatgctgccgccatcggggacaagcgcggggggcggggggtggaggccagaggagactatttcagtcctaaattgtgcttaataaacccatatcaaaaccataaacccttggctgccataaattcctctaccct

SEQ ID NO: 33847 - DNA, 201 bp, Homo sapiens
tcctccaccaaggttcaagacagaaccttttgctgggtcacctcaatctgccagcaatggaagatgagtagctgtggggacatttcataaaagcaagtggkttttttgttttgttttgttttgttttttgtttttttttctagaacaaggctgtgcacagtggctcacctctgtaatcccagcactttgggaggctgaggc

SEQ ID NO: 33848 - DNA, 201 bp, Homo sapiens
ccttccaggcaatgactacattgtccctcggcactgcccggagctggcggagatgagccgggtgtccatacgcatccttgacgagctggtgctgcccttcyaggagctgcagatcgatgacaatgagtatgcctacctcaaagccatcatcttctttgacccaggtacagtgcacacctcctaagccatccctgactctct

SEQ ID NO: 33849 - DNA, 201 bp, Homo sapiens
agaaaaccagggcaattccagaatccaagagaagagcgtgtttgaaggacagagtgtttaatggtgttaaactctacagagaaacagaaagaagcggggargaaaggagaggtgaagagaggaggggaagagagaggaaagggtccattggattgacagctggaggctcttggcaattgtgttgaaagcagcatcagagag

SEQ ID NO: 33850 - DNA, 201 bp, Homo sapiens
ttaaattttttaaattttttaaatttggaaacagaccagtcaaactgctgccttttatggttagagaaaatgaggcccagaagaaattgaagcagggaaarcgaagttgcccaagtttacaggcgagttagtggcagcatcagcagtagtgcccaggactcctggcacccagcccaagatcctctttccacctgcctctac

SEQ ID NO: 33851 - DNA, 201 bp, Homo sapiens
taacattcaaaacagaaaaaggcacaaatcatcaatgtatcgctttatgaaatttcacattttaacaaaagaatgaaataaaataaaatagaaaatatcayagagcatttcatgtagtaagagtaagatatgtatgtttttgaaacttttgttttatttatgtatatttatggatttgtgcttgatgttgtgataatagca

SEQ ID NO: 33852 - DNA, 201 bp, Homo sapiens
accttccaggctcaagagatcctcctaccccagcctttcaagtagctgggactacaggtgcgtgccaccacacccagctaattcttcattcttattttttrtagagacaaggtctcactatgttgcccaggctggtcttgaactcctagccttaagcaatccttccgacttggcctctcaaagtgctgggattacaggtgt

SEQ ID NO: 33853 - DNA, 201 bp, Homo sapiens
gagaaaatgaggcccagaagaaattgaagcagggaaagcgaagttgcccaagtttacaggcgagttagtggcagcatcagcagtagtgcccaggactcctrgcacccagcccaagatcctctttccacctgcctctacggcccccctcacatttgtgtagatgcagtagcttttgcctgtgggatgggagggatgggagat

SEQ ID NO: 33854 - DNA, 201 bp, Homo sapiens
gaataaacaacaagacactgggtctgggggtggtagtgaggggtgacctcagagatccattgtggaccctcttttcttttttcctttttttttttttttttgagacgagatctctctctgccacccaggctggagtgcagtggcgcaatcatagttcactgtagcctcaaccttccaggctcaagagatcctcctacccca

SEQ ID NO: 33855 - DNA, 201 bp, Homo sapiens
ggactcctggcacccagcccaagatcctctttccacctgcctctacggcccccctcacatttgtgtagatgcagtagcttttgcctgtgggatgggagggwtgggagatgtgtccagaccctcctaggaggccacatgagtgtgactgttctcggcccaagtctttctcgttcctcagagaatttgcggggcccctgggca

SEQ ID NO: 33856 - DNA, 201 bp, Homo sapiens
agaataaacaacaagacactgggtctgggggtggtagtgaggggtgacctcagagatccattgtggaccctcttttcttttttcctttttttttttttttttgagacgagatctctctctgccacccaggctggagtgcagtggcgcaatcatagttcactgtagcctcaaccttccaggctcaagagatcctcctacccc

SEQ ID NO: 33857 - DNA, 201 bp, Homo sapiens
acttaggaggctggggcaggagaatctcttgaacccaggaggtggagattgccgtgagccaagatcgccactgcactccagcctgggcgacagagcaagaycctgtcaaaaaaataaattaaagaaaatcccaactttcacctcctttaaaaaaagtgaaggtctagcaacactgatacctatgagacaacagtctcctgg

SEQ ID NO: 33858 - DNA, 201 bp, Homo sapiens
aaacttcatctcaaaaaaatacatatatgtgtatatatatataatatatattatatatatataatatatagtgatatatatagtatatagtgatatattaygtataatatatattatatatagtgatatatattttatatatatatagtgatatatattatatatagagagagtgatgaagtggaagatgagccccatgta

SEQ ID NO: 33859 - DNA, 201 bp, Homo sapiens
ttcacctcctttaaaaaaagtgaaggtctagcaacactgatacctatgagacaacagtctcctggagccactttagattctcatgcttcctctaatttgcygtagtccccactattccttagtgtccccatacggaaacttattaatgaacataaatcaccatgtttgctgtattgtttttcttagaggaacgtgtgaact

SEQ ID NO: 33860 - DNA, 201 bp, Homo sapiens
ctgaggcaggagaattgcttgaacccaagaggaggcggttgcagtgagctgagatcatgccactgcactccagactgggcaagacagcgagactctctcamaaaaaataaaaaagtaacgagttcattttcgaatctcttcatttcctgctcctctaaactcaacctttcccagctctgcgactagtcccagaccttccct

SEQ ID NO: 33861 - DNA, 201 bp, Homo sapiens
ctctcttgatgtcaacgtgtacccaatgtttagcttccttttacaagtgagaacatgcagtatttgtttttttgtttctgtgttgattcacttaggatgakgtcctccagctccattcctggtgtggcaaaggacacgactttgttcccttttttatttttttgacactgtccttgaacttggttgaggttttgttccctt

SEQ ID NO: 33862 - DNA, 201 bp, Homo sapiens
gctgaggcaggagaattgcttgaacccaagaggaggcggttgcagtgagctgagatcatgccactgcactccagactgggcaagacagcgagactctctcwaaaaaaataaaaaagtaacgagttcattttcgaatctcttcatttcctgctcctctaaactcaacctttcccagctctgcgactagtcccagaccttccc

SEQ ID NO: 33863 - DNA, 201 bp, Homo sapiens
atcatcaagctactggctgccgtttattgagctcttatcatatgccaggcacaatactaagtctttgtgtgtatttacccatccccttgagcccattgttstttttcccattccatggggcctctcctgaagcctcagtagatgagcccgtcttccagtctggtgctgtttttgggacaaataggagattgaccccaggcc

SEQ ID NO: 33864 - DNA, 201 bp, Homo sapiens
cagagggagcccttctccctcatccctgcctcctccctccctccgtttttaccctgagcttccttcagagctggagggcacccactatccagccccctccscacatctgattccagggagggggctctgtgcaggggacagagagtgcgggagggcccggacatctccagcattttcttccctgtatctctcgaagatcac

SEQ ID NO: 33865 - DNA, 201 bp, Homo sapiens
ctattttacagagggagaaattgaagccctgagaagagacgatgtaaataaagttatcggaatagtgactgagctagttcctaaccccaggtctcctgacrtcaaatctagcctctcttgtcctccacaacagttgctccctctcccctttccctacaggcaatagcactccccagtcatctcagcttcagaggtcagatc

SEQ ID NO: 33866 - DNA, 201 bp, Homo sapiens
cgtgttgatcttgcttatgtatgtaagtgtgtatgtgtgtgtacttgtgtctgtggatgtttgtacatgtgtgctgtgtgtgcgggtcatagagcacatgygtttgtgcatgcggacctgttggagtgccctgttcttcctgcatctttatcctgtatgggcgttttgtcgtgtgcccatatttgtacctgctgtgtatat

SEQ ID NO: 33867 - DNA, 201 bp, Homo sapiens
ggagatgggtggtaggaccttccagacctcataaaacttaggctttatgatctgggactcacagaaggttgagcaataaaagaccttagggattatctggyttaattaattctctcattttatagaggaagaaattaagtcaaggtggggcagggtgggaggggagaactttcccgggcctcttcatttactcccacaaag

SEQ ID NO: 33868 - DNA, 201 bp, Homo sapiens
aaagaccttagggattatctggtttaattaattctctcattttatagaggaagaaattaagtcaaggtggggcagggtgggaggggagaactttcccgggsctcttcatttactcccacaaaggctggaattttgagcagcccctgtctgtctgtttgtccttccagccacccctgagaccccacagccctcaccgccagg

SEQ ID NO: 33869 - DNA, 201 bp, Homo sapiens; identical to SEQ ID NO: 7495

SEQ ID NO: 33870 - DNA, 201 bp, Homo sapiens
gagtatgcagggagctgggcttccagaaaatgaacacagcagttctgcagaggacgggaggctggaagctgggaggtcaggtggggtggatgatataatgygggtgagagtaatgaggcttggggctggagaggacaagatgggtaaaccctcacatcagagtgacatccaggaggaataagctcccagggcctgtctcaa

SEQ ID NO: 33871 - DNA, 201 bp, Homo sapiens
gactatttcagtcctaaattgtgcttaataaacccatatcaaaaccataaacccttggctgccataaattcctctacccttggatcctccacctcatcagscctttgccctggttaatctcaaatctcagcgcaggcagccggagctttaggtttggtttctacttcagttgctaaacagcatcagctcaggtggcagaca

SEQ ID NO: 33872 - DNA, 201 bp, Homo sapiens
ttcttgggtgagaattccattagttgacattgtccattaagtaaaagtggtcattgaagtaaggctgcacagttgggtaaggctatccattagacaattakatgagactacccattgggtcaggatgtctgctgggctagaccatcctctgaaacctccaaagtataaacttgtcattgggcaaagctcttcaaaggataa

SEQ ID NO: 33873 - DNA, 201 bp, Homo sapiens
gtccagaatgagcgggaccggatcagcactcgaaggtcaagctatgaggacagcagcctgccctccatcaatgcgctcctgcaggcggaggtcctgtcccracaggtaccggggtgatcctgccacccacccagggatcccccacactacagaggagctcacctcctccacctccattctccccagccaggccctggagca

SEQ ID NO: 33874 - DNA, 201 bp, Homo sapiens
tgtgatagggactgggcatctgtctttaattttaaaaaatctttttaaaaaatagacatagggtctcactatgttgcccaggctggtctcaaactcctggrttcaagtaaacctcccatctcagcctcccaaagtgctaggattataggtgtaagccaccatgttcggccaacatctgtatattttaaaggtttcagatga

SEQ ID NO: 33875 - DNA, 201 bp, Homo sapiens
cgtccagaatgagcgggaccggatcagcactcgaaggtcaagctatgaggacagcagcctgccctccatcaatgcgctcctgcaggcggaggtcctgtccygacaggtaccggggtgatcctgccacccacccagggatcccccacactacagaggagctcacctcctccacctccattctccccagccaggccctggagc

SEQ ID NO: 33876 - DNA, 201 bp, Homo sapiens
cctcacacagggtttggtgatcaggtgattgagaggcctccttgaggagttttcaaagtgcggtctgagggcacctggtatcagaagtgcccagaagctcrttaaacacttgggccaggtgctccatggctcctgcctttaatcccagcactttgggaggctgatttgcttgaggctggggttcaagacaagcctggacaa

SEQ ID NO: 33877 - DNA, 201 bp, Homo sapiens
tcaactctctcccccaggctggagtgcagtggtacaatctcagctcactgcaacctccgcctcctgggttcaagtgattctcctgcctcagcctcccaagwggctgggatattacaggcacatgccatcatgcccagctaatttttgcattttaagtagagacaggatatcaccatgttggctagggtggtcttgaactcc

SEQ ID NO: 33878 - DNA, 201 bp, Homo sapiens
gagtttatctctccttcacgcagttgtccagggtccccaactccttcctccctagatggaagatgggctttttttttttgagacataaatatatatatatrtgtgtgtgtgtgtgtgtgtgtgtgtatacatatatgtgtgtgtgtgtgtatatacatatatatatatatatatatatttttttttttttttttttttttg

SEQ ID NO: 33879 - DNA, 201 bp, Homo sapiens
cagtgagccaagatcgcaccactgcactccagcctggtaacagagcaacactccgtctcaaaaaaaaaaaaaaaattaactccttggccagacatggtggygcacacttaaatcccagcactttgggaggctgaggcaagaggctcacttaaggttaggagttcaagaccagcctgagctacaaagtgagaaaataaataa

SEQ ID NO: 33880 - DNA, 201 bp, Homo sapiens
cgcttgaacccaggaggcggaggttgcagtgagccaagatcgcaccactgcactccagcctggtaacagagcaacactccgtctcaaaaaaaaaaaaaaaattaactccttggccagacatggtggcgcacacttaaatcccagcactttgggaggctgaggcaagaggctcacttaaggttaggagttcaagaccagcct

SEQ ID NO: 33881 - DNA, 201 bp, Homo sapiens
tcgcttgaacccaggaggcggaggttgcagtgagccaagatcgcaccactgcactccagcctggtaacagagcaacactccgtctcaaaaaaaaaaaaaaaattaactccttggccagacatggtggcgcacacttaaatcccagcactttgggaggctgaggcaagaggctcacttaaggttaggagttcaagaccagcc

SEQ ID NO: 33882 - DNA, 201 bp, Homo sapiens
gaccatcctggccaacatggtgaaatgccgtctttactaaaattacaaaaattagctgggtgtggcacatggctgtagtcccagctactcaggaggctgasacaggagaatcgcttgaacccaggaggcggaggttgcagtgagccaagatcgcaccactgcactccagcctggtaacagagcaacactccgtctcaaaaa

SEQ ID NO: 33883 - DNA, 201 bp, Homo sapiens
cttccaggctcaagagatcctcctaccccagcctttcaagtagctgggactacaggtgcgtgccaccacacccagctaattcttcattcttattttttatrgagacaaggtctcactatgttgcccaggctggtcttgaactcctagccttaagcaatccttccgacttggcctctcaaagtgctgggattacaggtgtga

SEQ ID NO: 33884 - DNA, 201 bp, Homo sapiens; identical to SEQ ID NO: 7482

SEQ ID NO: 33885 - DNA, 201 bp, Homo sapiens
gagggtctccacagttcaaaaatatttggaaaatcagaagaccacaccagtgtgtttcaaactgcaatcttaacccaggaataggtcatgcaatttttttyttattttttttttctagatggagtcttgctctgtcacccaggctggagtgcagcggcacgatcttggctcactgcaacctccgcctcctgggttcaagca

SEQ ID NO: 33886 - DNA, 201 bp, Homo sapiens
ctggagtgcagtggcgcaatcatagttcactgtagcctcaaccttccaggctcaagagatcctcctaccccagcctttcaagtagctgggactacaggtgygtgccaccacacccagctaattcttcattcttattttttatagagacaaggtctcactatgttgcccaggctggtcttgaactcctagccttaagcaatc

SEQ ID NO: 33887 - DNA, 201 bp, Homo sapiens
agtagctgggattacaggcatgtgccaccacacctggctaattttgtatttttagtagagacagggtttcaccatattggccaggctggtctggaaccccygacctcaggtgatccgcctcggcctcccaaagtgctgggattataggcatgagccactgcgcccggcccctggccctttcttgagctgctgcaaagccag

SEQ ID NO: 33888 - DNA, 201 bp, Homo sapiens
tgtgtgttcatttgtctctgtgtgtgagttctgggtctattttcctttgtattcattgagtgggtctgtgtttgtgtcttaggagttgcccgtgttgatcytgcttatgtatgtaagtgtgtatgtgtgtgtacttgtgtctgtggatgtttgtacatgtgtgctgtgtgtgcgggtcatagagcacatgcgtttgtgcat

SEQ ID NO: 33889 - DNA, 201 bp, Homo sapiens
aggcatgtgccaccacacctggctaattttgtatttttagtagagacagggtttcaccatattggccaggctggtctggaacccctgacctcaggtgatcygcctcggcctcccaaagtgctgggattataggcatgagccactgcgcccggcccctggccctttcttgagctgctgcaaagccagcaaaccccttactag

SEQ ID NO: 33890 - DNA, 201 bp, Homo sapiens
ccagaccattcagccttagctcagccttgaaaatagctgcttgcttcctggcccagggaaacggacatgctgcccggaggataggagagttggctgatggmgagtgagcgtgggttagtcgatgctagtgtttgtttacatgcctgggttacctggaagatcatgacacatgcagtcacttggttgttttgagaacgggcc

SEQ ID NO: 33891 - DNA, 201 bp, Homo sapiens
ctatccagccccctccccacatctgattccagggagggggctctgtgcaggggacagagagtgcgggagggcccggacatctccagcattttcttccctgkatctctcgaagatcacctcccccgtctccgggatcaacggcgacattcgggcgaagaagattgccagcatcgcagatgtgtgtgagtccatgaaggagca

SEQ ID NO: 33892 - DNA, 201 bp, Homo sapiens
tggttgttgaggtccctgaatccttgtgcccacactgctgaagactccttgtgtgacacaagtcaggggacatctgggtcttgactccccagatgctccasctggaccctgctgccctcccttgcccaccctcttccattgtagatgccaaggggctgagcgatccagggaagatcaagcggctgcgttcccaggtgcagg

SEQ ID NO: 33893 - DNA, 201 bp, Homo sapiens
taggggaacggggatagttcggtaaactgaattgagaagcggatccgagggaggttgaaagctgtcaagcccgtgtagctctcccgctaggaggcggcacrcgggggaataggggcgctggagtttccccagctctacctcatctttctccacagccatggagccagagagggaagggaccgagagacaccccaggaaggt

SEQ ID NO: 33894 - DNA, 201 bp, Homo sapiens
ttccacagcaaggttaaagtgagagaaaggacccaggatctggtttattctataaagagttacagcagcaatcaagctcatctaaactctctcaaacttayttgatcctaaaaactacttggggggtgcttgttaaaatcacaagatttcaaatttcagagttccactccaaatctattgaattggtctctccaggggcct

SEQ ID NO: 33895 - DNA, 201 bp, Homo sapiens; identical to SEQ ID NO: 7543

SEQ ID NO: 33896 - DNA, 201 bp, Homo sapiens
atttaaaaacaacacacaaaaaataagcacattctaaatctaatagaactaaaaattatgaaaagtgtttaatacatagtctttaaaatagtaatcttctyttaaatatatctttttttattggttagcttttctataggagaaaaccaaaaggactaagtggtgccttgcaggaagtaggaatagaattctcaggacgag

SEQ ID NO: 33897 - DNA, 201 bp, Homo sapiens
agacaagaaactggaaactcagtttgcctccatggaagaggactgggtcactggggacaaggtttgaagcaagacttttcactatgtatttttatataccytttgaattttatggcaggtgaattatttcctattcgataattaaataacatcagtttaaatatatttacctgtgatatgagctataacaagaaatacata

SEQ ID NO: 33898 - DNA, 201 bp, Homo sapiens
ggctcaaaatgaatgctatactctcatggaatgtagtgataacatataaatacatgcatatgtataaaatatagttataacaataattactcatatatccrtatttatcaaaacatgagtatattaacatttgcatttatattagcatacttgttatgctatttctagttaatgaatttttcaatttttgatttttatttt

SEQ ID NO: 33899 - DNA, 201 bp, Homo sapiens
gtttttattcatctgactaaatggaatccagctatgtcttttcagtgaggtcaggtaccgtttcagtctgtccatatccttcgtagatatccaggcccgtsttgtttctccatttttcagtcacgtcaggggtaattggttccccagcactcacacagtgctttaagcttttaaacttatagcttctcagaaaaccagata

SEQ ID NO: 33900 - DNA, 201 bp, Homo sapiens
agaaaaccaaaaggactaagtggtgccttgcaggaagtaggaatagaattctcaggacgagaacattctggttagtatacattaaaaattatgtaagccayttgacttttaaaaaatacttcatatgaatttcattttttggtaatgtcattagtaagggatatcttcagcctaaaaaaaaaaaactcctaatctaaacaa

SEQ ID NO: 33901 - DNA, 201 bp, Homo sapiens; identical to SEQ ID NO: 7545

SEQ ID NO: 33902 - DNA, 201 bp, Homo sapiens
caactatctgttaacagagcttttttgcaattaggttcttgcaagcattgtttttttaaacattttctaaccactcaactcctatccctcaaataatcatraggagactgtggacactttggtttttattcatctgactaaatggaatccagctatgtcttttcagtgaggtcaggtaccgtttcagtctgtccatatcct

SEQ ID NO: 33903 - DNA, 201 bp, Homo sapiens
caggcttgggagcagagagggaaagtgctgcagccactgtaaactgaagcctcttcgggcctagttgacctgctcagaaggtcttgacctcccttgcctgmgaggaccagtgttgtgttgtggttaagagtgcagatattggagccagactgcttgggattgaatcccaactctagcagctattagctgtgtgacttctgg

SEQ ID NO: 33904 - DNA, 201 bp, Homo sapiens
gtggatacagagaggctggaaatggccaggcaggcttgggagcagagagggaaagtgctgcagccactgtaaactgaagcctcttcgggcctagttgaccygctcagaaggtcttgacctcccttgcctgagaggaccagtgttgtgttgtggttaagagtgcagatattggagccagactgcttgggattgaatcccaac

SEQ ID NO: 33905 - DNA, 201 bp, Homo sapiens
aaggttgggctttgaagttgtaggaatctgatattcacctggttggaacacatccccagatgccagaatgttactgcagatgcccttagctaaggaacaaraagccccataataacggcccgtggaaaagagttaaaaatgactggggatgcaggcaaagtactgttttcctctcagcctcatcatatttgcattcaaaga

SEQ ID NO: 33906 - DNA, 201 bp, Homo sapiens
acttaggatgttttcaacttatgatgacttattattttgggacataaccctatcataagttgaggagtgtccaaattagtgttaagttcctttggctacayccagctttgaagctcggttgatctgagaacaattttaaccctatataaagcttgctgatggggaactggaattccccctaggcatcaggtggtagtagtg

SEQ ID NO: 33907 - DNA, 201 bp, Homo sapiens
atgaagacttaaaaaaaattttgtgtgtgtgagacaaggtctcactttgtcacccaggctggagtgcagtggtgcaatcatagctcatagctcactgcagsgtcaaacttctggtctcaaacagtcctcacacctcagcttcccaagtatctggggctacaagcacatgtcattatgctcagctaatgtttatttttattt

SEQ ID NO: 33908 - DNA, 201 bp, Homo sapiens
ggacttaacagggtatcttctggcatcaaagatcagttaggggaatcagtcctggggggagatccaccctccactgtaacatgcacatctcctatttttaccttaaacttttttatttttatttttatttttttgaggcggagtcttgttctgttagccaggctggagcacagtggcacgatcttggctcactgtaacctc

SEQ ID NO: 33909 - DNA, 201 bp, Homo sapiens
ggaatagaattctcaggacgagaacattctggttagtatacattaaaaattatgtaagccatttgacttttaaaaaatacttcatatgaatttcattttttggtaatgtcattagtaagggatatcttcagcctaaaaaaaaaaaactcctaatctaaacaattcacattgtttctaagactttcaaattaccactttcat

SEQ ID NO: 33910 - DNA, 201 bp, Homo sapiens
cctgacctcaggtgatccacccacctcagcctcccaaagtgctaggattacaggtgtgagccactgtgcctggcctgccttaaacttcaggacctatttcrtcccctgagattggataccttctaactctgccctgtgccctgtgcttgaagccctatacctaggatttgagataaggagcttgaatacatggtacagaaa

SEQ ID NO: 33911 - DNA, 201 bp, Homo sapiens
attgcccctgcatctccacatccctggggccttgctgacatccccacacgttcccgtagagggctgcagcattccaacaccaggtggatccagtgatagarccaggccactggcacccgagcctacacacagcactctacaccccaggtaacagggagtccagcacatcaagagaggctgccccaggacataaggcactaa

SEQ ID NO: 33912 - DNA, 201 bp, Homo sapiens
gcagtggctcacacatgtaatccccagcactatgggaggctgaggcaggtgaatctcctgatcccaggagttggagaccctgtctctctttaaaaaaaaamaaacgaaaaaaaaacaaaaaaaagcagtggctcatgcctgtaatcccagaacttgcagaggccaaggtggacagatcgcttaagtccaggagttcaagac

SEQ ID NO: 33913 - DNA, 201 bp, Homo sapiens
atttctaaatattgacctctttgtgctttggcttacttgcaagatagaagtcggctcaaaacggggtaaatggtgtgtgaatacacatgctccctggatcyacggagaaaaaacactactccatgcagactttgcccagcccgtatctgaggtattccacatcacatctgagggtgtcaaatctagccagaacctgggaaa

SEQ ID NO: 33914 - DNA, 201 bp, Homo sapiens
ggtggaagaattagaatagtctttggaatgggttttgggtaacagccaaaatagggaaaagggtattgttaggaaagttgtcttgatattaagtatttacygtgagtccagtaagccaaaggaccaaacaaaataggttcagggtttcattttaatctcaaagattctgattcttacccatatgtcatcagttcagtttgg

SEQ ID NO: 33915 - DNA, 201 bp, Homo sapiens
tgacagatactatgtttgttttatagatatggtaattaatgaaacaactttaaattgtcttccattctttcttcctcagttcatttctttttgtcttcccwctgatagtctttggcagctcttgaataaattctacctgttggcatcaaggggaagaaaattagcctggaaatttttatctttacataaagccaattatat

SEQ ID NO: 33916 - DNA, 201 bp, Homo sapiens
caagtacctatcctaggtatgttttgtggcaaacagggattgttaccaagcacttgagaaataaatagaaaatgagattatttagtaagtcacttactacstaatgagtaaaaaggccaaatggtcggttgggtagaacttgaatgccaatatctccttcttgtccaggaggtagaacattgccatttacatctacaatct

SEQ ID NO: 33917 - DNA, 201 bp, Homo sapiens; identical to SEQ ID NO: 7541

SEQ ID NO: 33918 - DNA, 201 bp, Homo sapiens
ttaacagggtatcttctggcatcaaagatcagttaggggaatcagtcctggggggagatccaccctccactgtaacatgcacatctcctatttttaccttaaacttttttatttttatttttatttttttgaggcggagtcttgttctgttagccaggctggagcacagtggcacgatcttggctcactgtaacctccccg

SEQ ID NO: 33919 - DNA, 201 bp, Homo sapiens
cttaacagggtatcttctggcatcaaagatcagttaggggaatcagtcctggggggagatccaccctccactgtaacatgcacatctcctatttttaccttaaacttttttatttttatttttatttttttgaggcggagtcttgttctgttagccaggctggagcacagtggcacgatcttggctcactgtaacctcccc

SEQ ID NO: 33920 - DNA, 201 bp, Homo sapiens
acttaacagggtatcttctggcatcaaagatcagttaggggaatcagtcctggggggagatccaccctccactgtaacatgcacatctcctatttttaccttaaacttttttatttttatttttatttttttgaggcggagtcttgttctgttagccaggctggagcacagtggcacgatcttggctcactgtaacctccc

SEQ ID NO: 33921 - DNA, 201 bp, Homo sapiens
gacttaacagggtatcttctggcatcaaagatcagttaggggaatcagtcctggggggagatccaccctccactgtaacatgcacatctcctatttttaccttaaacttttttatttttatttttatttttttgaggcggagtcttgttctgttagccaggctggagcacagtggcacgatcttggctcactgtaacctcc

SEQ ID NO: 33922 - DNA, 201 bp, Homo sapiens; identical to SEQ ID NO: 7546

SEQ ID NO: 33923 - DNA, 201 bp, Homo sapiens; identical to SEQ ID NO: 7547

SEQ ID NO: 33924 - DNA, 201 bp, Homo sapiens
accagtttatcatgattaaaattagtagatggtcataaaactaaaactgtgttccaatttctacacaagtggtgtttttctttttaagttatttctttagyactaaggaaatagtactagtaccactaaattcagtgtttgatatctgtatcctcagggttggacgattctcggaatactgcccttcttgcttggaaaatg

SEQ ID NO: 33925 - DNA, 201 bp, Homo sapiens
agggatatcttcagcctaaaaaaaaaaaactcctaatctaaacaattcacattgtttctaagactttcaaattaccactttcataaactattgtaagatamactgccatctagtggctttctagttgctaagaagaatgaaaagaatgagccaaatcaaatggagattaaacaagtgctcaaataatagaatggactagtg

SEQ ID NO: 33926 - DNA, 201 bp, Homo sapiens
agcaaactcttggtcttactacaacttaaataagtgcttaaatgtctttggttgacgcagcacaatttaaacattgtttatgttaatgtaaatacattctkaccttttcttgtagaatcatccctcagtgtctgcaggattggttccaggaatgcttaagtcccttatataaaattgtatggtatttgcatataacctatg

SEQ ID NO: 33927 - DNA, 201 bp, Homo sapiens; identical to SEQ ID NO: 7548

SEQ ID NO: 33928 - DNA, 201 bp, Homo sapiens
agattgctaaatcctgtgtctactggcttggagctatgtttcaggcagaaagatcttttattttatagcttcctcttctcccctctccccactagatgccwatttactaacatttcttacctggttatatcattctgtacaagcattcggtatacagttggtgctgaacagaagactgtgatggggtacttggagagtgtc

SEQ ID NO: 33929 - DNA, 201 bp, Homo sapiens
gacctaatgtttgattggaccagtataagcatgccagggcaaatatttaggctaaattgtgggagctaagaacataaagtacattgatttctttattatakctagcagatatttaagaatgttagcacaggtctttgaataaattttgctctaagagaagttactatttattcctaattagacggggaaggaagtctttga

SEQ ID NO: 33930 - DNA, 201 bp, Homo sapiens
atttcccaagtgatgggtgtgctaggagtatcttttgttctaatattttgcctttgactctagtttctgatacagagcttctaaattccatggaatttccwgggtaatagaattgtcttttgttctcatgaggcgactctcaatggggctcccgtataggggttggtcacaagaaagactaagccaggaacagaagcttgg

SEQ ID NO: 33931 - DNA, 201 bp, Homo sapiens
aatacatacaggtgagtggcaggttcactctagaacactgatgatcagttaacacagacatatgcacatatggaaaagaaagttacccagaggataatatracatcatctgctcttgcaacaaaccagaaatacccatctttatccatatatcctctgtccccagtgatatagaaattgcctcgtagagttgaagctgttt

SEQ ID NO: 33932 - DNA, 201 bp, Homo sapiens
ataacaaagaaagtttatatgggggtaagcggtaggtaggtagtgtacagattgggttgttaaacattctcctggaaggggatgtgcaaaccttaacatcraaagcaggagaaggttttcccattgagccaggtttaattttcattcccttaaaatttccacagattagcacctagttaagaagaagaaaaagtaagataa

SEQ ID NO: 33933 - DNA, 201 bp, Homo sapiens
ataagtaaaaaatgctggcatcattgactttgttctattttaatgtacctaatgcagactgggacttgggggtttgcctggagtatgagtgtaaaagaaarcagctgttaaaacctgtgtttttaaattcttggattgatctcagagcaacttacaaggtaatggtaaaaaatgggggcatgtttacttttttctatggaa

SEQ ID NO: 33934 - DNA, 201 bp, Homo sapiens
ggggcagaaaagaaacagtgtttagaagaaatgttattcttcattatgttagagtagtgtagataccatctatacattctgtatttctcagagtgagttaktcagtttaccaggaagatatctatttatcttgctttcacttatctgcttttgcctttcaagggatttcagagtctatgacccttttggcttaacatgaaa

SEQ ID NO: 33935 - DNA, 201 bp, Homo sapiens
aacaaagagtagccctgatgtacataggaaaataaatataaaagaccagtacataagtcatcatctttgcagttttgacacttcaagctgcacttttgtgraagtataccttccatttacagataatcctaaaccaaaactgctgtgggtgtgtgcagtcattttcggatatccacttgttccactggtaaagaatatggc

SEQ ID NO: 33936 - DNA, 201 bp, Homo sapiens
aggctgtcctctttctagggtcccttcctcttgccttcgtggacctggaacagtgatctggcctcaggggaccagcatgcttttcttcagcaagaatttgrgtatttcttcaatttcttgtcttttggattactattcaggacaaccaatctctcaagaaagggtcaagtacctatcctaggtatgttttgtggcaaacag

SEQ ID NO: 33937 - DNA, 201 bp, Homo sapiens
gtcttgtttctccatttttcagtcacgtcaggggtaattggttccccagcactcacacagtgctttaagcttttaaacttatagcttctcagaaaaccagrtaagttagatttaggaggaaaaatggagagaagtgaagattaaggattatttcttatgaacttcaatataaaatgttttagtcgctttttaattcctctc

SEQ ID NO: 33938 - DNA, 201 bp, Homo sapiens
ccagatgccagaatgttactgcagatgcccttagctaaggaacaagaagccccataataacggcccgtggaaaagagttaaaaatgactggggatgcaggmaaagtactgttttcctctcagcctcatcatatttgcattcaaagatagctgctctagaaaaccactgggctcaaattaatggggagcaggtgggggtacc

SEQ ID NO: 33939 - DNA, 201 bp, Homo sapiens
tgttgcctttccttttgggaagctgttttacaacaagtgtggctactcacttcatcaactccttgaggttcccccacccctctctggagttctctgatacratcagcttggagtgcagattttcacatttggatgcaacagcgtctactgctggggctaaaacatcattggtgataatgcagtttgcttttgaagattgta

SEQ ID NO: 33940 - DNA, 201 bp, Homo sapiens
cccagatgccagaatgttactgcagatgcccttagctaaggaacaagaagccccataataacggcccgtggaaaagagttaaaaatgactggggatgcagrcaaagtactgttttcctctcagcctcatcatatttgcattcaaagatagctgctctagaaaaccactgggctcaaattaatggggagcaggtgggggtac

SEQ ID NO: 33941 - DNA, 201 bp, Homo sapiens
cacagacatatgcacatatggaaaagaaagttacccagaggataatatgacatcatctgctcttgcaacaaaccagaaatacccatctttatccatatatsctctgtccccagtgatatagaaattgcctcgtagagttgaagctgtttttgaaggattatcctgcaaaacaaatagcattttgttgttatggtgaatcca

SEQ ID NO: 33942 - DNA, 201 bp, Homo sapiens
ccactctgggaccctgggcagaatcagaattacccgatctcctctttgtagggaacaggcttctgaaagtatattggcaaattttctggacagagatcccrgttcctcaaaactccatcgcatctcttctccatttctgttgatccaccagaaggctggatttgaaggtttctttccagcctgaggaaagaaaaaccagtc

SEQ ID NO: 33943 - DNA, 201 bp, Homo sapiens; identical to SEQ ID NO: 7544

SEQ ID NO: 33944 - DNA, 201 bp, Homo sapiens
gtgcatcgttggacgcctcccctgggtcaagctccccatttacatcttggtgcagttgctgtctgctttctgtgcttcgggagccacctatgttctctacyatggtgacagagggaacagagggagctgtgccttgagagcacctgtgggtgggcaggggtgcctcagaatggttttggatgaatgagcaaagagggaaat

SEQ ID NO: 33945 - DNA, 201 bp, Homo sapiens
ggcaacttcttcaccatgtttctggctggctctctggccgttacgatagccatctacgtgggtggtaacgtctcaggtgaggagggtggggtctggtcatyagagcacgtgggatgtgcatgccagtttgtctgtctggtgatggtggaaacgcaaatccttctgtgactcgtggacattatccccttgaacagtgcccca

SEQ ID NO: 33946 - DNA, 201 bp, Homo sapiens
tcttcctccactttccccatttcttttcccttccctccttctgcttttctccttcccttgcttgtcttctgtgctcattcatctccttggctgctcccctrgccttcccaacctttctccctgttggtctcctgggctccctgttcctcatctctcctcttctcagcagctcctcacccaaggagctgtggcccaggctgt

SEQ ID NO: 33947 - DNA, 201 bp, Homo sapiens
tgcctgtcaacctctttgagcagttccaggaagttgccaacacttacttcctgttcctcctcattctgcaggtaggtgacccatagtagattttttgcagytccccaaactgaataaagccaaggaagaggaaagggaatgaaggcatcagatggggcctcagaggcatacttctctttctttttttcagttgatccccca

SEQ ID NO: 33948 - DNA, 201 bp, Homo sapiens
gggaagggttatcctcagcttcctgacctcattcgtctgtcacttcttgcagggtctcccatgggattgctgggatcttgctgggtgagatggcagtgtgygcaaaaaagcgccccccaggtaagacaggcaaggaggggagatcccgggaaccatcaagagtgggtgttgttatggctcagggagcaaaaggaaaaggga

SEQ ID NO: 33949 - DNA, 201 bp, Homo sapiens
acatggtgaaaccccgtttccactaaaaacacaaatattagccaggcgtggtagcaggtgcctgtaaaatcagctattcgggatgctgaggcaggagaatygcgtgaacccaggggcagaggttgcagtgaacagacatcacaccactgctctccagcctgggcaacagagtgaaactccatctcaaaaaaaaagaaaaaa

SEQ ID NO: 33950 - DNA, 201 bp, Homo sapiens; identical to SEQ ID NO: 7553

SEQ ID NO: 33951 - DNA, 201 bp, Homo sapiens
aggctgcggctcctgcagtcggggagcgggcgggggcggaaccctgggcgtgctcggcgtgtccggggccactcagcgcacgctggcatccgccggggggmatggggggcggcggcggcggcgcagctgagctcgcggtgtccccgagcgccggcggccgggaggatggcctgggctgcgggtggggcgcgcgcccgacgg

SEQ ID NO: 33952 - DNA, 201 bp, Homo sapiens
gccctgccatgggtttgtaccctcaaatgcctatgagttgggtaaattcttttcttttttcccacattctttccctttcttcttcctccactttccccatytcttttcccttccctccttctgcttttctccttcccttgcttgtcttctgtgctcattcatctccttggctgctcccctggccttcccaacctttctccc

SEQ ID NO: 33953 - DNA, 201 bp, Homo sapiens
atctctccatcctgcttcctcacactaatgcttggctcacctagacagaaatcaatggcagggcacgaagggcagctgctatcctcttgtatcccccaccygaagtcctctgggggctcatctccactcaggacctctcctgtttgtaccccagatacacactgcatcggtgtgcttgggtggagccttgagacatagtgt

SEQ ID NO: 33954 - DNA, 201 bp, Homo sapiens
agccagatgacatggaatatttggatgagagagggcagatggagcacctggcagctgacagggaaccctctgcctctgttgactccaaggttctgggcacygggatgctgattgtggggctcttggccatcctggacagacggaacaagggagtccctgcgggtctggagcctgtggtggtggggatgctgatcctggccc

SEQ ID NO: 33955 - DNA, 201 bp, Homo sapiens
tgacagtgtgcctatgcagacagagggagcagtgaatagcaatagggtgtttccaccatggtcttcactcaggccccggctgaaatcatgggccacctccrgatacgcagcctcctggcccggcagtgcctggcagagtttctgggtgtgtttgtactcatggtaggtaggatcactgcgggaaggaaagaagggggttgg

SEQ ID NO: 33956 - DNA, 201 bp, Homo sapiens
gcatcgttggacgcctcccctgggtcaagctccccatttacatcttggtgcagttgctgtctgctttctgtgcttcgggagccacctatgttctctaccayggtgacagagggaacagagggagctgtgccttgagagcacctgtgggtgggcaggggtgcctcagaatggttttggatgaatgagcaaagagggaaatcc

SEQ ID NO: 33957 - DNA, 201 bp, Homo sapiens
tgtatgcatccaccgcatgcacactgtgaactaggtagtgccaccattatacattaagatactcatatctcacctgagctatactttcctttagttcactwgagtttcgatttctctttttttttttttaagcatagtttctcacacttggcttagctataagaatctctcaacaatatttgctctgaatataaaaaccca

SEQ ID NO: 33958 - DNA, 201 bp, Homo sapiens
aaccggttatttcaacagagaatgataataataataataattattattattttgagacggagtttcactcttgttgcccaggctggagtgcagtggtgcartctcaccgcaacctctgcttcccgggttcaagcaattctcctgcctcagcctcccggagtagctgggattacaggcatgtgccgcaatgcctggctaatt

SEQ ID NO: 33959 - DNA, 201 bp, Homo sapiens
tggttggaatgttattatattctatggacagttgtgtctgttgggttctaatcaaaatatcaaaccggttatttcaacagagaatgataataataataatwattattattattttgagacggagtttcactcttgttgcccaggctggagtgcagtggtgcagtctcaccgcaacctctgcttcccgggttcaagcaattc

SEQ ID NO: 33960 - DNA, 201 bp, Homo sapiens
atttggcatttgggttaaaacagcaacatggaacaaataatttttagatgttggaaattcctggttttttttgttttgttttgttttgtttttttgagacrgcgtctttgtcacctgggctggagtacagtggcatgatctcagctcactgcagtctcgatgtcctgggttcaagcagtcttcccacctcagccccacaag

SEQ ID NO: 33961 - DNA, 201 bp, Homo sapiens
cctaggttgctgagaatattagttcactttatataaagttacattagaaaccttctcctactcccatattgctgtgccgcatcccacacaatatatattatcctgacagtcatctttacagatgtgtcttaaattagttaacaccagtaatttgtacttaaatatcagaaatgccaacatgaccatatctctgtatttgga

SEQ ID NO: 33962 - DNA, 201 bp, Homo sapiens
gttgtctgtgtgtcttattttctctttactaacgtatcagggtggagagtaggacagtcacacgacttagacatactcctttatcaatacttttggaaaayagctgtgctgtcagctttttgagggggggatttgttttggtcagtcagttttatcataaatttggcatttgggttaaaacagcaacatggaacaaataat

SEQ ID NO: 33963 - DNA, 201 bp, Homo sapiens
aacccagaaggtggaggttgcagtgagccaagatggcaccattgcactccagcctggacaacaagagtgaaactccgtctcaaaaaaaaaaaaaaaaaaaacattgcagtgatttcagcaggtcttatagaacagttttaggggagaatgaaaagtaaataagatttcagaagagcacatttttgaggaatattaggagta

SEQ ID NO: 33964 - DNA, 201 bp, Homo sapiens
aagaagaaaaagttttgggaacatttcttttttttttttttttttcgagatgggatctcgccatgttgcccaggctggtctggaactcctgggctcaagcratttgcccacctcggcctcccgaagttctgggactacaggtgtgtgaaccaccatgcccagccagttttgggaacatttgttttagaagaacttgttagg

SEQ ID NO: 33965 - DNA, 201 bp, Homo sapiens
agtgtgtgctggtagcactgcgcttctcaagtgcttttaaagtaccctggctctgggctgcagtcagagtactgttctctttgtggttgagaaagctgacagcgtaaaggcatgtcactgggggactttcaacttttttccttagccaagagattgggcaggagagagaaacttacagagtgctaggggaagaacttagca

SEQ ID NO: 33966 - DNA, 201 bp, Homo sapiens
tgtttgacttgaaagaattaactgctcttaggagttgatactgttccttttaatttataccccctttaactttttaactttttttaactttttttttttttaaattaatttagttagttaaaatagagacagagtcttgctgtgttgcctaggctgttctctaactcatggcctcaagagacccctcatgtcatggactcc

SEQ ID NO: 33967 - DNA, 201 bp, Homo sapiens
gaagctccatgagctttcccaattcaaacttgggcttcttcagcatttttacttttctaacgaagacatcatggagaggatagattggcaagccttttctrtgtcttttccaatgctgtctggaatcaatttattgaccacttctttcaaggcatttgtctgcacctctcgggtcatgatttccatcatcttcttccggat

SEQ ID NO: 33968 - DNA, 201 bp, Homo sapiens
aggttattagaattgattttcttagttgtgaaactgtcttgttccacagctcttggataagcacaagaatacagagagcatggtggagcttctggacttgkatcagttggaggatgaagcctacagcagccttgcagaagctacaaccgaactctatcagtatttactacagccattccgagacatgagagaacttgccat

SEQ ID NO: 33969 - DNA, 201 bp, Homo sapiens
tgcaaaaagcgtgtttgtattctttgtatttgtagctataaacacattttgaaggtaaagatattaatccaacagcaaggtacaaattactttctttcttttttttatttttttattttatttttattttttttcacaaatagcactttttatttgccactatttgaagtctgaactttaaacagattcttggactggtgg

SEQ ID NO: 33970 - DNA, 201 bp, Homo sapiens
gtgcaaaaagcgtgtttgtattctttgtatttgtagctataaacacattttgaaggtaaagatattaatccaacagcaaggtacaaattactttctttcttttttttatttttttattttatttttattttttttcacaaatagcactttttatttgccactatttgaagtctgaactttaaacagattcttggactggtg

SEQ ID NO: 33971 - DNA, 201 bp, Homo sapiens
agtgcaaaaagcgtgtttgtattctttgtatttgtagctataaacacattttgaaggtaaagatattaatccaacagcaaggtacaaattactttctttcttttttttatttttttattttatttttattttttttcacaaatagcactttttatttgccactatttgaagtctgaactttaaacagattcttggactggt

SEQ ID NO: 33972 - DNA, 201 bp, Homo sapiens
ttagaattgattttcttagttgtgaaactgtcttgttccacagctcttggataagcacaagaatacagagagcatggtggagcttctggacttgtatcagwtggaggatgaagcctacagcagccttgcagaagctacaaccgaactctatcagtatttactacagccattccgagacatgagagaacttgccatgctacg

SEQ ID NO: 33973 - DNA, 201 bp, Homo sapiens
aagtgcaaaaagcgtgtttgtattctttgtatttgtagctataaacacattttgaaggtaaagatattaatccaacagcaaggtacaaattactttctttcttttttttatttttttattttatttttattttttttcacaaatagcactttttatttgccactatttgaagtctgaactttaaacagattcttggactgg

SEQ ID NO: 33974 - DNA, 201 bp, Homo sapiens
agcagtcaatgcttttcattccctcttgcttctgtgttttagggttccgaggtcctggcatgatagggagagttcaaagcaagtatttataggttattagrattgattttcttagttgtgaaactgtcttgttccacagctcttggataagcacaagaatacagagagcatggtggagcttctggacttgtatcagttgga

SEQ ID NO: 33975 - DNA, 201 bp, Homo sapiens
tcctgggctcaagcgatttgcccacctcggcctcccgaagttctgggactacaggtgtgtgaaccaccatgcccagccagttttgggaacatttgttttaraagaacttgttaggaaagttttaagtttttaatgacagaactttaaatacatgaaattttttattagtgtgtgacaaagtatattacaaaaaattttttt

SEQ ID NO: 33976 - DNA, 201 bp, Homo sapiens
aagaacccaggaccttctatcacgttgtccatcaacagaacagttaccttgccatccagagccctggctttcacataattatgtgcctttgctatttcccygtgacagtggtaattgaaacccactgctgtgtcagccctggttgtgagcttcatttcacgttccaatctgcaccaaccaggtaaacattgcaggctgggc

SEQ ID NO: 33977 - DNA, 201 bp, Homo sapiens
gtgtgctttctttccctggcagaggattttaacaattccccatctatttataattccttgataatttctctgaacatacataatctaatagaatatgaatrcatactagtcttgaagattagctacttatttttgtctttctcctacaagcatgtagctaaattatgattaactaaggttatattcccctctttcagtttt

SEQ ID NO: 33978 - DNA, 201 bp, Homo sapiens
acctgatgctccccttgatgtcttaggcatgctcactcatgacttttttttttgtttttttggtattctaattctttttgttttgttttgtttttttttgkttgtttgtttgtttgtttttagtagagatggggtcttgctatggtacccacgctggtctcccaactcctggtcacaagcaatcctccctgtctgtctggg

SEQ ID NO: 33979 - DNA, 201 bp, Homo sapiens
attgcaggctgggcgcggtggctcatgcctgtaatcccagcactttgggaggctgaggtgggtggatcacctgaggtcaggagttcgagaccagccaacayggtgaaaccctgtctctactaaaaatacaaaaaattagccaggcatggtggcacgcacctgtaatcccagctactcgggaggctgaggcaggagaatcgc

SEQ ID NO: 33980 - DNA, 201 bp, Homo sapiens
tgcatttaaccacataagttcaccaaagattgaatacatgagaaaatacttatggactaggtatgtttcttttgttaagacatttaaaaaattgttttctrtagggatagagtgtgggggggtgatttctagcatttattgagcacttactgtttgccagatactgctaaacactttgcatacattcactctatgaggtgt

SEQ ID NO: 33981 - DNA, 201 bp, Homo sapiens
aagtaatgtgttcaagttagcacaaagttgtaaatacattgggaggattcctattttctccctttcctgcactttccttcctcctctagtcatgtctcctytttaatgttttggagactgtgtactcttagacttcattaccagaaattttgggcaggctgagcgtggtgcctcacacccgtagtctcaacattttgggat

SEQ ID NO: 33982 - DNA, 201 bp, Homo sapiens
gagagaacttgccatgctacgaagacagcagatcaaggtatttttttattaatcctaactagtagcctgcctgtttcatagttctcagcctgaaaggccaygcgttatccacaagaggaactttaaaaaaaaaaaaaaaaagaaggtacctggtcctatttctgcaaagtttcttgtttggtagaatagggttgtagcctg

SEQ ID NO: 33983 - DNA, 201 bp, Homo sapiens
ggccagtgcctgacatgattttgaaggaggtgacaggtagaaattgaagaaatttattggaaatgttccagatttggatggttttcattctactagatagyagaaaattttttgggctgggtccagtggctcacgcctgtaatcttagcactttgggaggccgaggcgggtggctgtcttgagccaaggagttcaagacca

SEQ ID NO: 33984 - DNA, 201 bp, Homo sapiens
agtggggagaaagatagtagtggaaactataggtatgaaaaggaatagaagaattttgtgcctttggggaggtgatactgccagcaggtaaatggagtccmtgtatgcatatataaattactgtcttctgtattagttcttttcatttgttatttttatgtatttacttgccttttgagatggagtctcactctgtcaccc

SEQ ID NO: 33985 - DNA, 201 bp, Homo sapiens
tcagatctttttcccagatctattttttgggggcaacaggagtaaaaattagtaaatcgattatctttcttttccttttttttttttttttttttttttttgagatggagtcttactctacccaggctgaagtgcagtggtgccatctctgctcactgcaacctctacctcctggctttgagccattctcctgcctcagcc

SEQ ID NO: 33986 - DNA, 201 bp, Homo sapiens
tgccattcttctgcctcagcctcccgagtagctgggactacaggtgcccgccaccatgcctggctaatttttgtatttttagtagagatggggtttcaccwtgttaaccaggatggtctccatctcctgacctcgtgatctgcccgccttgacctccctaagtgctgggattacaggagtgaaccaccacacccagcactt

SEQ ID NO: 33987 - DNA, 201 bp, Homo sapiens
ttttgctgttctgtaacagaaaaaagagatgaagtggtatactatgacacttacgaaagcatggaggccatgctggagaaggaagagatggcagcatctgygtacttacagagagaagagctgcagaaacttcagcagaaagcacgccagctggaagcaagacgtggacgggtttctgccaagaaatcctacctcagaaat

SEQ ID NO: 33988 - DNA, 201 bp, Homo sapiens
aattgtttgtaagctattattaggtactttcggattttctgtataactttaagggtgaaataaccaataagccaacataacatttttgagatggaatctcrctctgtcactcaggctggagtgcggtggcacaatctcggctcactgcaacttccgcctcccgggttcaagcaattctcctgcctcagcctcctgagtagc

SEQ ID NO: 33989 - DNA, 201 bp, Homo sapiens
ataacagaagaaaaatatcattcaagattggttctgattcttttggaaaatgacagtttaagcacttggttcctcagttggataacattagatccaaagtkcattggttcagtggtgtgaagaaaggaagcacaattggcaggttatcactttccagtcgttccaatagatgatggttaacatgaattttacatgtgcaat

SEQ ID NO: 33990 - DNA, 201 bp, Homo sapiens
taatgctttcctggaaactttgaaagttaataacaccggacatgtgagagtatttttaaagtttctgaaagctaattttataagtgttttaactgcagaaygttatttctgaggacagattgaagacattagaatctaagatactctcaaattatgttttagaaatgtcggccgggcacggtggctcacgcctgtaatcct

SEQ ID NO: 33991 - DNA, 201 bp, Homo sapiens
tatagtgctctgagaattgccctcttaaacacattggaacagccaatagtgatgttctctttacctctagaaacactaatggtgactctgctaaaggcctygactacaggatccctgataatgtgattcctggctccctttttatttaaggaggcccagcgatgttttttacaagccctgattctgaccttaaagaatttt

SEQ ID NO: 33992 - DNA, 201 bp, Homo sapiens
aatgagattagaaccttgttctttccaaaccctagcccatattctttaccactactcttttttgctgttctgtaacagaaaaaagagatgaagtggtataytatgacacttacgaaagcatggaggccatgctggagaaggaagagatggcagcatctgcgtacttacagagagaagagctgcagaaacttcagcagaaag

SEQ ID NO: 33993 - DNA, 201 bp, Homo sapiens
ctgagccagggaggtcatggctgcagtgagctgtgatcataccactgcactccagtctgggcaacagagtgagaccctgtctcaaaaacaaacaaacaaamaaaaggtcttaccatggtaaaatatatataagagttctaccagtaagtactgaaaaaaatgtatttctctcttcattctgtcataaaatggatatatagt

SEQ ID NO: 33994 - DNA, 201 bp, Homo sapiens
ttatattggttgttgatttgattgcttttgttcgtttgtttttttgagacagagtcccactctgttgcccaggctggagtacagtggcactatctcggctmactgcaacctctgcctcccaggttcaagcgattctcctgcctcagcctcccaagtagctgggattacaggcatgcatcaccacgaccggctaatttttgt

SEQ ID NO: 33995 - DNA, 201 bp, Homo sapiens
aatgagattttattatatagcttttagatgattcaactctatagggaaaattaaaagtttgtttagataactgccaaaaataagctgtgatactaaaccakatgattcatggataatgcttgaaaaatatttttctaactgctggttatattggttgttgatttgattgcttttgttcgtttgtttttttgagacagagtc

SEQ ID NO: 33996 - DNA, 201 bp, Homo sapiens
aaggaaagaacactggggaacatttgaaagtgtgtgcagaagaacgggatcaaagagaaagggtaatcgaagttggaagaagcaggagagctcgaagtcayagaagtgaagatgatgattccacacaacaggatggtcagtaggctcaggtgctccagaaaggtaaaggaagaaagaaatgactccatgacatccaatatt

SEQ ID NO: 33997 - DNA, 201 bp, Homo sapiens
ttttatttaaggaggcccagcgatgttttttacaagccctgattctgaccttaaagaattttatagattgttatttctttatttaactttgattacatttyagaatgtttgattcttgatatttggaatgactcattttgtggaaatgtgattcttcctgtgtcttaaaaaatgttttgcactctagtccagatgttaact

SEQ ID NO: 33998 - DNA, 201 bp, Homo sapiens
gatttccatctaaagcaattgtcttctgctgttccagtcacatattctcacctcactctatagtcagcagatcccagaacctagccagtctgtgaccatgragcaaagcaaaaccccagatatgtggcattaaccagcttttaccattcttgtaaatatctgagaatagccccgtcattttcatatatctctgtgaaaaga

SEQ ID NO: 33999 - DNA, 201 bp, Homo sapiens
gccttctggagatttctgttttttaagcacattctccttccatccacatatttacatccttgtaatggccagttaagctagggcttgctgtaagttggaaraacactgggttgacagagatctactgtgagctgtattgggactgctttgagaaccatctttcaatgcactgaaaagtcatctgaaaaaatagcttcttcc

SEQ ID NO: 34000 - DNA, 201 bp, Homo sapiens
gccattcctttggcttcttttatctgcctttttccgtacagccaaatagaaagccatagaaatagtagggttaggaaccagttatctaaagtacactttcyccttggtggtttccttcattcctggcaaaaattttcccactccagcaccgagaactgaccaaccaagcaaacctcacagaagaccatccttcactttatg

SEQ ID NO: 34001 - DNA, 201 bp, Homo sapiens
aatgaagcaatggtattttttatccgatatagtgtaatttaaaagttttcctacaaagtgagtttatattgttgcctaaactatgttatgtaagcaaaggktttggaaaggcgggagggagtctagattcggcgagagtgtgcgtttgtgtgtgtgaatgtatgaaaagtttccccattgggttattcttaagatgtgttt

SEQ ID NO: 34002 - DNA, 201 bp, Homo sapiens
ggactcctgtgcctggcttttactgttgttttaatttgcaaatctttaatgcagatatatagataaatagatacatatacagagagcgaaagagcgcatcwgtccaaatgcctacttgcccctctatatatctctagtaaggtgtctgttcagatcttttgctcttttgttttttggagtcttattctgtcaccaaggctg

SEQ ID NO: 34003 - DNA, 201 bp, Homo sapiens
aatttgtattttcaatgcagatgcagagtttgcggggtggtacagaagcgatagcacgattggatcagttagaagctgattattatgacctgcaacttcarttgtatgaagtacagtttgaaatcttgaagtgtgaagagttactattgacagcgcaactagaaagcatcaaaagacttatatcaggtatggcgtgcattt

SEQ ID NO: 34004 - DNA, 201 bp, Homo sapiens
gctctgggctgcagtcagagtactgttctctttgtggttgagaaagctgacagcgtaaaggcatgtcactgggggactttcaacttttttccttagccaaragattgggcaggagagagaaacttacagagtgctaggggaagaacttagcagagcatcatgaacgtagcagaaaatggtcacttagttgggtagaaccag

SEQ ID NO: 34005 - DNA, 201 bp, Homo sapiens
gttactattgacagcgcaactagaaagcatcaaaagacttatatcaggtatggcgtgcatttaaccacataagttcaccaaagattgaatacatgagaaartacttatggactaggtatgtttcttttgttaagacatttaaaaaattgttttctgtagggatagagtgtgggggggtgatttctagcatttattgagcac

SEQ ID NO: 34006 - DNA, 201 bp, Homo sapiens
tgcataagtataacataaacattaaaaccttatttttaccatgtttgcctacttccaccatataatatgacttgattattactgttttatacatatatatrtatatatttttaaagtctagattccatgcctacaagtttctttctgagaggaattacttaataggtttatgctatctgattagtattaatttttaatact

SEQ ID NO: 34007 - DNA, 201 bp, Homo sapiens
ttgacagcgcaactagaaagcatcaaaagacttatatcaggtatggcgtgcatttaaccacataagttcaccaaagattgaatacatgagaaaatacttayggactaggtatgtttcttttgttaagacatttaaaaaattgttttctgtagggatagagtgtgggggggtgatttctagcatttattgagcacttactgt

SEQ ID NO: 34008 - DNA, 201 bp, Homo sapiens
tagaaattttttaatttgtattttcaatgcagatgcagagtttgcggggtggtacagaagcgatagcacgattggatcagttagaagctgattattatgayctgcaacttcagttgtatgaagtacagtttgaaatcttgaagtgtgaagagttactattgacagcgcaactagaaagcatcaaaagacttatatcaggta

SEQ ID NO: 34009 - DNA, 201 bp, Homo sapiens
atagtgctctgagaattgccctcttaaacacattggaacagccaatagtgatgttctctttacctctagaaacactaatggtgactctgctaaaggcctcractacaggatccctgataatgtgattcctggctccctttttatttaaggaggcccagcgatgttttttacaagccctgattctgaccttaaagaatttta

SEQ ID NO: 34010 - DNA, 201 bp, Homo sapiens
caccggacatgtgagagtatttttaaagtttctgaaagctaattttataagtgttttaactgcagaacgttatttctgaggacagattgaagacattagartctaagatactctcaaattatgttttagaaatgtcggccgggcacggtggctcacgcctgtaatcctagcactttgggaggccgaggcaggtggatcaca

SEQ ID NO: 34011 - DNA, 201 bp, Homo sapiens
aatcctcctgcctcagcctcccaaagtgcagggattataggcatgagccaccacacttggctttattttccagtttcctgttgtctccctgccacccttaygtccctgctcatactttcttgttagagtttatgatacaatcacccaatgcaaatgcaacagtaattctcattagaaattatattgtttagggaaagctgg

SEQ ID NO: 34012 - DNA, 201 bp, Homo sapiens
ccagtatgcagtttctaaggaaactttgcagatgatgagagctaaagagatatgcttggaacagcggaaacatgcactaaaggaagaggtaacaaaaatcwtcagaaatataaaatcagaaaaagttacagtttgtcattttaatctttgcacaagacatttttttgattcgataggcagtgattttatgccatcttcatg

SEQ ID NO: 34013 - DNA, 201 bp, Homo sapiens
tagtataagaggaatgataagggcctctgggaaacctagattcctcttgagtttaaaaaattagttaaatcacaactgactatccagctcaagcatcagcwtgttatttattccacatacatcagcctgtggtggtaatacatcaaatgaccattggcagaattagaggtggaggggagcagcatatttgagaaatgcttc

SEQ ID NO: 34014 - DNA, 201 bp, Homo sapiens
atttataggttattagaattgattttcttagttgtgaaactgtcttgttccacagctcttggataagcacaagaatacagagagcatggtggagcttctgracttgtatcagttggaggatgaagcctacagcagccttgcagaagctacaaccgaactctatcagtatttactacagccattccgagacatgagagaact

SEQ ID NO: 34015 - DNA, 201 bp, Homo sapiens
acttactgtttgccagatactgctaaacactttgcatacattcactctatgaggtgtattaaataataatcaccacttacaaagaagcttaagagataatsgctttgcctgaggttgcagagccagtaatgagattagaaccttgttctttccaaaccctagcccatattctttaccactactcttttttgctgttctgta

SEQ ID NO: 34016 - DNA, 201 bp, Homo sapiens
tccttcactgcttgtctgcctctgatgaggttttggttatctttagaccacagcccttggcaaatccacgtctggactcttggtctagatagaactcaccraaccaaaaaattgagggtgaggtcactgcttgtaagagaatacctacttcctttctcagtttgatttttgatattgagtgtgtgctggtagcactgcgct

SEQ ID NO: 34017 - DNA, 201 bp, Homo sapiens
actgactatccagaatctgtacacattcttttacataattatatcatgatttgtattgggtattaatattagcaaattggttgaccctacttgtcagcctrtattgtccactagcatcacttaactgctacatttttcctgggaagtagaatgtaggtgaagaggaacagaaaacatattttgaaaatttgtgtcttttct

SEQ ID NO: 34018 - DNA, 201 bp, Homo sapiens
gtttagcagacataatctctatagcacagcactgactatccagaatctgtacacattcttttacataattatatcatgatttgtattgggtattaatattrgcaaattggttgaccctacttgtcagcctatattgtccactagcatcacttaactgctacatttttcctgggaagtagaatgtaggtgaagaggaacaga

SEQ ID NO: 34019 - DNA, 201 bp, Homo sapiens
ataaatatgcataagtataacataaacattaaaaccttatttttaccatgtttgcctacttccaccatataatatgacttgattattactgttttatacayatatatatatatatttttaaagtctagattccatgcctacaagtttctttctgagaggaattacttaataggtttatgctatctgattagtattaatttt

SEQ ID NO: 34020 - DNA, 201 bp, Homo sapiens
atataaagatcactcataatcccagcaattagagaaaaccactattagcaaattaaggcacatcctatcagtcttttcatagatacatatatttaaatatrtataatttaaatatgaatagtaaataattgtgtttctactaacatactgaggaaaaaaccataaaacctcacagaattaatgctttcctggaaactttga

SEQ ID NO: 34021 - DNA, 201 bp, Homo sapiens
ctgcctcagcctcccatgtagctgggattacaggcacatgccaccacacctggctaatttttgtatttttagtagatggggtttcaccatgttggccaggstggtctcaaactgctgcccttgagttatctgcccgcctcgccttcccaaagtgctgggattacaggtgtgagccaccactcctggccaagaaattgattc

SEQ ID NO: 34022 - DNA, 201 bp, Homo sapiens
tggcttttactgttgttttaatttgcaaatctttaatgcagatatatagataaatagatacatatacagagagcgaaagagcgcatctgtccaaatgcctmcttgcccctctatatatctctagtaaggtgtctgttcagatcttttgctcttttgttttttggagtcttattctgtcaccaaggctggagtgcagtggcg

SEQ ID NO: 34023 - DNA, 201 bp, Homo sapiens
cttataactgcatgttaacattagttcagtttatataatgagcagtttttaggcaaaattgattggagaatacagagttcctataccctcaacccgcacaygtagcctcccctaccgtcaacatctcctatactcctgtccccacacttgatagcctttccactgtcaacatcccccagagtggaatatttgttaaaatca

SEQ ID NO: 34024 - DNA, 201 bp, Homo sapiens
tgaagatgatagtaataatatcttggcacaaataaggaaaggggtaaaattgaagaaggtacagaaggatgttttgagagaatccttcacacttctacccratacagaccctctaacacggagcatccatgaagctcttagaagaattaaagaagcatccccagagtcagaggacgaagaggaggctttaccttgcacaga

SEQ ID NO: 34025 - DNA, 201 bp, Homo sapiens
ttgaaagagtggagataggtggtccccggctgtgctggtgaagtcaatgctttgtgattaaacatttcaagaagagtaacaaaaataacaattttctttgktttttatcttctttaattctcccagtagtcaaatgaaatccagagagctcagaaaattagaatcattttcatacttcatttggtggcaaaaccagacctg

SEQ ID NO: 34026 - DNA, 201 bp, Homo sapiens
gttgagctaagttaaattttaagatggccaatttttcctttgagtatttaaactactttcagggcttctttcttcttgcccagggaagcactgctctcagrtataaaaaagacaccccattgtggcacccaccttccctgcactgctccattatctggaattagttctcttttcaccctggattctgtttctcttagttct

SEQ ID NO: 34027 - DNA, 201 bp, Homo sapiens
tttaaactactttcagggcttctttcttcttgcccagggaagcactgctctcaggtataaaaaagacaccccattgtggcacccaccttccctgcactgcyccattatctggaattagttctcttttcaccctggattctgtttctcttagttctgtggctgtcagctgaggacaggaaaactcagtctggaaatttcaga

SEQ ID NO: 34028 - DNA, 201 bp, Homo sapiens
aacttcccattttattcctactggaacacactggtctcccccatctcccaccacctctgtacccgctacagtcactgtctatccttttttactattgacarttataaatattcatacccattttgtgggctgccctcattggcttgaaaacactgagtacatatttattaaagtagcacattttagttgctagagaagaac

SEQ ID NO: 34029 - DNA, 201 bp, Homo sapiens
ttttgattcgataggcagtgattttatgccatcttcatgagatgaaaacacttagaataggtcctgtgacttaagttgtcattagaagagttagacgtagygtatttcacagcatcacagtgtgatggttggcagcactgcactgttgatcagaggggccagcatcagaatttcttagttgctgtaaagtttttaatactg

SEQ ID NO: 34030 - DNA, 201 bp, Homo sapiens
gaaaaaaagaaaaaagttataagcagtttatcatgacagcaggatttgtttctctttgtgtggtcagtgaaatctttttcaaatgcttcagtattaagttkttatttgtcttaatttctctttaaaaaattattaatagctgtgtatgatcgaatgcgagctgatcagaagaaatttggtaaagcatcatgggcagcggct

SEQ ID NO: 34031 - DNA, 201 bp, Homo sapiens
gcctaaagtgacacagctggctgagccaggattcacactcgaatctgctgaccccaaactttgaataacactctctccattgagttttaagatacctttcmaagttctccctcattcttatgtccaacattattgaaaagattaagcctttggagcccactacttctcagtgggattaactgcagagtaaactaaaaggtt

SEQ ID NO: 34032 - DNA, 201 bp, Homo sapiens
tgtgactgtttttcttgaatgcctgaaactttttggaattatgtgattttatttttcacagtaagacctatacccaccggcgcctgaagttcctctcctcsaagttccaggtccatcagatgcttaacgagatggacgagttaaaggagctgaaaaacaacccccaccgagatttttataactgcaggaaggtaaacattt

SEQ ID NO: 34033 - DNA, 201 bp, Homo sapiens
ggttggttaggagtatagattctggacccagagtggtgatacttgaatcctggcaatacttaaatcaaggtaacacaaccatttagctgtgttaccttggrttaagttatatcaccccattgtgccttagtttcatcatctctaaaacaaggttaaaaacaatacctaacttattgagttgttatgaggattacattagct

SEQ ID NO: 34034 - DNA, 201 bp, Homo sapiens
aatacatctctgctcttttttcctgattcagggacgccagaccttccagcgttttgataagttcaatgacaaatataatcctgtaggagcaagtgagctaygggacctctacttgaagacagacaattacattaatggggaatattttgccactatcatcaaggtgaggcggaaccaatcacatctatggtatctggcatg

SEQ ID NO: 34035 - DNA, 201 bp, Homo sapiens
acggaagactgttaatttgtccattccactaagtgaaacatcttccaccaaactgtcccacattgatgaatacatttcctcatctccaacctaccagaccrtgcctgattttcagagagtgcagattactggtgactatgcctctggggtgagttggtccttgccactcagacttagcaaccaggaagccattcagcttga

SEQ ID NO: 34036 - DNA, 201 bp, Homo sapiens
cctcattcttatgtccaacattattgaaaagattaagcctttggagcccactacttctcagtgggattaactgcagagtaaactaaaaggtttgttccaayaattatttcctatgaatgataaaggtcctgatagttttgaaattgtgactgtttttcttgaatgcctgaaactttttggaattatgtgattttatttttc

SEQ ID NO: 34037 - DNA, 201 bp, Homo sapiens
gcaggaaggtaaacattttagttgctcaggggtaattcctgggcaaaaacaattcaattatttattgagaagcacaagaaaagagtgtgtttctgattaayctaagatttctacaggttcagtggattttagtaaaaacagataatagattatgtccaatgggttagggttaagtgccatttctatcgttttccccataga

SEQ ID NO: 34038 - DNA, 201 bp, Homo sapiens
catcttggcttaccacgctgcctgaaagcaccacagacaattttgaagtttgctcattgtcacctgtcccaaattccattcttggagcccaatgccctccmccactaccagaccccagttctgcttgactatttcctagctctctctgtccagacagctctggtaataatacatctctgctcttttttcctgattcaggga

SEQ ID NO: 34039 - DNA, 201 bp, Homo sapiens
tcagaataaaattgtatagagaaacatctatctatcacaatgaaacgcctgatgaagacaaaattaactcttacttttaaatttcgaacccagaaaaaagygtttccaaggacggaagactgttaatttgtccattccactaagtgaaacatcttccaccaaactgtcccacattgatgaatacatttcctcatctccaac

SEQ ID NO: 34040 - DNA, 201 bp, Homo sapiens
  misc_feature (1)...(201): n = A,T,C or G, or insertion/deletion polymorphism (see Tables 1-2)
tgtcttcctcaagcatgtaagcatgacccttcaggccttcatactgctgctcatgaaccagccttcctacctggtcatgactaattcttggtgcttatctntttatgtttggtctgtgcctttggacctgaaagtttgtgtgaggactgggaccctgaagttggactgaacccattgcatggctcacttttcctaacagat

SEQ ID NO: 34041 - DNA, 201 bp, Homo sapiens
agtgtttagtgagacctaaacaacaacaactagtactacaagacctaaacaacaactagtactacttctactgatagtgagactaagtatttactaaatgmttactatgttcaaacactgtattaagcccttcatgcacattgttccttttattgcttacacttttcactgtgaggtggttattttcataattccagtttt

SEQ ID NO: 34042 - DNA, 201 bp, Homo sapiens
ctcctgagtagctgggactacatgcgtatgccaccatgcttggctaatttttgaaaaaaaaaaaaattttgtggaggtgaggttctcactatgttgcccaaggctccaaagtcttgaactcctggcctcaagcaatcctcccacctcagcctctcaaagtgctgggattacaggtgtgagtcaccatgccaggcccactcc

SEQ ID NO: 34043 - DNA, 201 bp, Homo sapiens
gtggtttcaccatgttggccaggctggtctcaaacttctgacctcaggtgatccgcccacctcagcctcccaaagttctgggattagaggcatgagaaatygcacccagcctatctacttatcttttgaaatataagtttcactctttcctttctataatcaccaccattccctgaaatttgttttgtttgtttgtttgta

SEQ ID NO: 34044 - DNA, 201 bp, Homo sapiens
ggtctcgaactcctgacctcaagtgatccacccacctcagcctcccaaagtgctatgattacaggcgtgagccaccgtgcccagccttaaaaacctatttkagataaaactataactttggttgtatattcccctcaatctcaaattagacttgtccttttgctgactgatagtaggtctgcctctgaattcctttgggag

SEQ ID NO: 34045 - DNA, 201 bp, Homo sapiens
cagaggaacttgtgggaatccctggcttggacttctctcttggctttgcaggaggtaggtgcggacctggtggaggccaagtaccagcatgctgagccccrcctgtccatctatggccgcagtcctgatgagtggagcaaactctcctcctggttcgtctgcaatcgcatccactgccccaacatgacatggatgatccag

SEQ ID NO: 34046 - DNA, 201 bp, Homo sapiens
ctggactgttgtttcccgtccagaatttgaaagtcaaataaaggtatttcattattttttcaggcaggatgcatattatttattaattcactcctcttttwtcctcatttaatataactgcaggagcccctaatggaagaatatgctattgctgcacaagtcttcaagctgagcacctgtgatatgtgcgaagtggcaagg

SEQ ID NO: 34047 - DNA, 201 bp, Homo sapiens
aaatgtctgtttgaccaatgctacacattacatcattcaatttaatctggtgctttatttgtcttaaggcatttccacatacattatctcacttagtgtcrcaacagccttgccagcgaggttgggtaggtattagtattcccactttacagattaagaaatggaaatagaggaagatgtaggaggtgttaagtgcagagc

SEQ ID NO: 34048 - DNA, 201 bp, Homo sapiens
aaaagaaaacctcatgcagtgcttttacttacttatttatttatttatttatttatttatttatttatttatttattttgagatggatggtcacccaggakggagtgcagaggtgtgagctctgctcatcgcaacctttgcctcccggattcaactaattatcttgcctcagcctcccgagtagctgagatgacaggtgca

SEQ ID NO: 34049 - DNA, 201 bp, Homo sapiens
tacagtacttgtttttcttagcccaaattcccatcgccatgtcaccactaagtaacaatagcctatttctagagtatgccaaaaatccttttttggatttycttcagaaagggctaatgatctcactgtctacagatgacccaatgcaattccactttaccaaggtatagtatggacttgggcaatacaagcatattttgc

SEQ ID NO: 34050 - DNA, 201 bp, Homo sapiens
gacctgactgttgattctctggatgttcatgctgtaggttgaaacggcaatgtcagtttcactctaatactcagaaccccacatgtctttctcctacaagycctcccttctcagaggtctcttaaccatcttggcttaccacgctgcctgaaagcaccacagacaattttgaagtttgctcattgtcacctgtcccaaatt

SEQ ID NO: 34051 - DNA, 201 bp, Homo sapiens
atgcttggatcctgtttctgatacccaaccacattttaatttttactttttgtcctcagaataaaattgtatagagaaacatctatctatcacaatgaaaygcctgatgaagacaaaattaactcttacttttaaatttcgaacccagaaaaaagcgtttccaaggacggaagactgttaatttgtccattccactaagtg

SEQ ID NO: 34052 - DNA, 201 bp, Homo sapiens
tacaaattgctacattaaacactgtattctcagacttcaaagggcattaactaccattatgtatatctccatcttacccatgagagggcagtagaatacawacatgtgaattcatttattaatctataaatttggtttcatacgtgatacttggaattcaacctgccttattttgccaaataatcttcctgaatgcagggg

SEQ ID NO: 34053 - DNA, 201 bp, Homo sapiens
tagctgtgttaccttgggttaagttatatcaccccattgtgccttagtttcatcatctctaaaacaaggttaaaaacaatacctaacttattgagttgttwtgaggattacattagctaatatttctggtcacttagaagagtgcttggaatatattaaatgctatatcagagtttgttaaattgcagatcagaggtattc

SEQ ID NO: 34054 - DNA, 201 bp, Homo sapiens
agctaatgagatgttgtagtatttcacattttggttatttttatgtggtcgttcatcctatgtgctaatatattactctgtgtttgattgaaaaagtcttyactcctcctgtgaagaagggagaggaccccttccgaacagacaaccttcctgaaaacctgggctatcacctcaaaatgaaggacggtgtagtttacgtct

SEQ ID NO: 34055 - DNA, 201 bp, Homo sapiens
cctgtggggaatgtttctgtcttctactgttgctccaaatagctagctatttgccattgtcattattgctaccagctcttttctggaaataccaggaaaartattagaggtaataattattcagacagaaaacactgaggatctggagaacacagtggaacttaacagaaaggcagatacttgatggccatcaccatccta

SEQ ID NO: 34056 - DNA, 201 bp, Homo sapiens
ataatgcaaaaataaaggttagcttaattccagataattacaacttaagtaccggattccaagctaatgagatgttgtagtatttcacattttggttattwttatgtggtcgttcatcctatgtgctaatatattactctgtgtttgattgaaaaagtctttactcctcctgtgaagaagggagaggaccccttccgaaca

SEQ ID NO: 34057 - DNA, 201 bp, Homo sapiens
ttatctaacttgggtgtttatatgttttctggctacctgtctttgtgttctgtgtgacctactgcaatgcaagagtttcatcctgtctctttaaccaaaamaagtaattttttgactgggataatacttcctaataggcagagaggcagtaggttggttaggagtatagattctggacccagagtggtgatacttgaatcc

SEQ ID NO: 34058 - DNA, 201 bp, Homo sapiens
ctagtttgtattcctttttcaacatctttaaatatttttttacttttctttttcagagtcccgtgctacagtacttgtttttcttagcccaaattcccatygccatgtcaccactaagtaacaatagcctatttctagagtatgccaaaaatccttttttggatttccttcagaaagggctaatgatctcactgtctacag

SEQ ID NO: 34059 - DNA, 201 bp, Homo sapiens
ggttctgataatgaacattcagtgatttcaagttataactacttgggcatgcctggcccaaccaggagttgggaatgggggcaggggaaatttccagcagstctaataaagctttcctctagaatctctcaagttttacccagaaataaaattctctttaaaatcatctaaacgactaacttctcacagaatgatgttgtg

SEQ ID NO: 34060 - DNA, 201 bp, Homo sapiens
ccatgtcaccactaagtaacaatagcctatttctagagtatgccaaaaatccttttttggatttccttcagaaagggctaatgatctcactgtctacagaygacccaatgcaattccactttaccaaggtatagtatggacttgggcaatacaagcatattttgctggactgttgtttcccgtccagaatttgaaagtcaa

SEQ ID NO: 34061 - DNA, 201 bp, Homo sapiens
aaagctttcctctagaatctctcaagttttacccagaaataaaattctctttaaaatcatctaaacgactaacttctcacagaatgatgttgtgatccatygtagctgaagaaagccgtgcatgggtttgagagatttgtgaccccttattcatcccaaaatatttccctcactgaccgagtggtttgaattctcacaatt

SEQ ID NO: 34062 - DNA, 201 bp, Homo sapiens
gatgcaatgcgcaactttgctgaaaaagtgtttgcctctgaagtcaaagatgaaggaggtcgtcaggagatttccccctttgatgtggatgagatctgtcygatttctcatcatgagatgcaagcacacatattccatctggagactctgtccacctccacagaagccaggaggtaagtggtgtaaggggagtgcttagta

SEQ ID NO: 34063 - DNA, 201 bp, Homo sapiens
gacccaagcagacctaggatagtgagaagggttgcagatagcataaaccaaccaaagaaaacagatccagagaaagagagagggaagagaaaaaagaaggmaccagagaaaagaaggaagatgagagagaggttagaaaatcctaacgaggctattgtttttttgacgacctgaactctccaatttcattacagatggtta

SEQ ID NO: 34064 - DNA, 201 bp, Homo sapiens
tactatcaaatattaattttgaaatccttatacttaaggattaataactcactattaatgatataattattattgaagcgtaacttaggagaaataaagayaagacaaactaaatgtctatattatagaggatgggaaaaccactgttatgtgttaccaaactggagacatgtttaatatgattttaatattaaaaggaat

SEQ ID NO: 34065 - DNA, 201 bp, Homo sapiens
cagaataaaattgtatagagaaacatctatctatcacaatgaaacgcctgatgaagacaaaattaactcttacttttaaatttcgaacccagaaaaaagcrtttccaaggacggaagactgttaatttgtccattccactaagtgaaacatcttccaccaaactgtcccacattgatgaatacatttcctcatctccaacc

SEQ ID NO: 34066 - DNA, 201 bp, Homo sapiens
taacactctctccattgagttttaagatacctttccaagttctccctcattcttatgtccaacattattgaaaagattaagcctttggagcccactacttytcagtgggattaactgcagagtaaactaaaaggtttgttccaataattatttcctatgaatgataaaggtcctgatagttttgaaattgtgactgttttt

SEQ ID NO: 34067 - DNA, 201 bp, Homo sapiens
atggcttttctggattctagtgtgtgtataaacatatatatatatataattatatataattttttaaaagaaaacctcatgcagtgcttttacttacttayttatttatttatttatttatttatttatttatttatttattttgagatggatggtcacccaggatggagtgcagaggtgtgagctctgctcatcgcaacc

SEQ ID NO: 34068 - DNA, 201 bp, Homo sapiens
gcttaacgagatggacgagttaaaggagctgaaaaacaacccccaccgagatttttataactgcaggaaggtaaacattttagttgctcaggggtaattcstgggcaaaaacaattcaattatttattgagaagcacaagaaaagagtgtgtttctgattaatctaagatttctacaggttcagtggattttagtaaaaac

SEQ ID NO: 34069 - DNA, 201 bp, Homo sapiens
gtttcaccatattggtcaggctggtctcaaactcctgacctcaggtgatctgcctgccttggcctcccaaagtgctgggattacaggcacgagccactgcrcctggccaatatattatttttatagctattttatactattatgtcacctttaaaaaataatgcaaaaataaaggttagcttaattccagataattacaac

SEQ ID NO: 34070 - DNA, 201 bp, Homo sapiens
catggcttttctggattctagtgtgtgtataaacatatatatatatataattatatataattttttaaaagaaaacctcatgcagtgcttttacttacttatttatttatttatttatttatttatttatttatttatttattttgagatggatggtcacccaggatggagtgcagaggtgtgagctctgctcatcgcaac

SEQ ID NO: 34071 - DNA, 201 bp, Homo sapiens
acggagcggacccgagtgatacccgggagactagcttggccacaggagacaacgttgaggtacagacaggtaagagtcggggtgattcggcgcggggtttyaagccgcaggggcttcggactctcggggctgtcggcatcacccttctgggcgtcgggtgcggggctgtggcgccgcggcgtagtcctcggacggtgcgag

SEQ ID NO: 34072 - DNA, 201 bp, Homo sapiens
tttcacagtaagacctatacccaccggcgcctgaagttcctctcctccaagttccaggtccatcagatgcttaacgagatggacgagttaaaggagctgawaaacaacccccaccgagatttttataactgcaggaaggtaaacattttagttgctcaggggtaattcctgggcaaaaacaattcaattatttattgagaa

SEQ ID NO: 34073 - DNA, 201 bp, Homo sapiens
tcatggcttttctggattctagtgtgtgtataaacatatatatatatataattatatataattttttaaaagaaaacctcatgcagtgcttttacttacttatttatttatttatttatttatttatttatttatttatttattttgagatggatggtcacccaggatggagtgcagaggtgtgagctctgctcatcgcaa

SEQ ID NO: 34074 - DNA, 201 bp, Homo sapiens
ttgctgtaacaaaccaggttttaaaaactggctgacctgactgttattgttggggaagttatgaatcaattcctgtcatctccaatgtacatttcatcatrtactaagtcatatcatgtattatctcattcatagtccaaagctaaccccacacaccaaatgtctgtttgaccaatgctacacattacatcattcaattta

SEQ ID NO: 34075 - DNA, 201 bp, Homo sapiens
ctcatggcttttctggattctagtgtgtgtataaacatatatatatatataattatatataattttttaaaagaaaacctcatgcagtgcttttacttacttatttatttatttatttatttatttatttatttatttatttattttgagatggatggtcacccaggatggagtgcagaggtgtgagctctgctcatcgca

SEQ ID NO: 34076 - DNA, 201 bp, Homo sapiens
ttaatcagtcttattgagcatctattctgtgctaggcattgtgtgctgagaacatgaaggtgaataagacccagctctcattcttgaggacctgatagackagtggcctattaggtggcaatgagctacgcatgccattggaagcagggaagcagacccccagacctagcatctgtgccagacgcttttggccaaggacag

SEQ ID NO: 34077 - DNA, 201 bp, Homo sapiens
tttttttttggcaggttacagttgaagattttgaaattgtttgcaaaggtctgtatcgggcactatgcatacgtgagaaatacatgcagaagtcgtttcakaggttccctaaaaccccttccaaatacttgcggaacattgatggtgaggcttgggtagcaaatgagagcttctatccaggtaacaattctcttacataat

SEQ ID NO: 34078 - DNA, 201 bp, Homo sapiens
gctcatggcttttctggattctagtgtgtgtataaacatatatatatatataattatatataattttttaaaagaaaacctcatgcagtgcttttacttacttatttatttatttatttatttatttatttatttatttatttattttgagatggatggtcacccaggatggagtgcagaggtgtgagctctgctcatcgc

SEQ ID NO: 34079 - DNA, 201 bp, Homo sapiens
actgcaggaaggtaaacattttagttgctcaggggtaattcctgggcaaaaacaattcaattatttattgagaagcacaagaaaagagtgtgtttctgatkaatctaagatttctacaggttcagtggattttagtaaaaacagataatagattatgtccaatgggttagggttaagtgccatttctatcgttttccccat

SEQ ID NO: 34080 - DNA, 201 bp, Homo sapiens
agtccaagcgttagagccagacgctaagctggagcctcccatcccagggccttccagccaaacatggactccaggccccagattcctggcagctgctctgrcagagtccctcttcccagtctcctggtggcttcgtccctccccatgccctgctgcctgcagagtctggcagcttcaagggagtggggtgctttgaagcat

SEQ ID NO: 34081 - DNA, 201 bp, Homo sapiens
attttttaattttttaatttttttgagacagagtctcactctgtcgccagtctggagtgcagtggcacgatctcggctcattgcaattgtcacctcctggkttcaagcgattcctctgcctcagcctcctgagtagctgggactacaggcgctgcaccaccacgcccggctaatttttggatttttagtagagatggggtt

SEQ ID NO: 34082 - DNA, 201 bp, Homo sapiens
cgcccctgagtgttcagtgggtggttactcggcatcctgttgggcttccggtgtggtggctgggagccagagagaggagggcatgagagctcacagagtcwcaggaggtgggacttggaggtcatctaggccaacttcctcatagggcagaccaaggctcacaaagggaaagagacttacctgaggctatacagcaggtta

SEQ ID NO: 34083 - DNA, 201 bp, Homo sapiens
catcttccttcgcccctgagtgttcagtgggtggttactcggcatcctgttgggcttccggtgtggtggctgggagccagagagaggagggcatgagagcwcacagagtctcaggaggtgggacttggaggtcatctaggccaacttcctcatagggcagaccaaggctcacaaagggaaagagacttacctgaggctata

SEQ ID NO: 34084 - DNA, 201 bp, Homo sapiens
cctcagcctcctgagtagctgggactacaggcgctgcaccaccacgcccggctaatttttggatttttagtagagatggggtttcaccatgttggccaggrtcgtctcgatctcctgacctcaagtgatccacccgcctcggcctcccaaagtgctgggattacaggcatgagccaccgtgcctggcctaatttttttgta

SEQ ID NO: 34085 - DNA, 201 bp, Homo sapiens
tctggagtgcagtggcacgatctcggctcattgcaattgtcacctcctgggttcaagcgattcctctgcctcagcctcctgagtagctgggactacaggcrctgcaccaccacgcccggctaatttttggatttttagtagagatggggtttcaccatgttggccagggtcgtctcgatctcctgacctcaagtgatccac

SEQ ID NO: 34086 - DNA, 201 bp, Homo sapiens
caagcgtgcaccaccatacccggctaagtttttattttttaattttttaatttttttgagacagagtctcactctgtcgccagtctggagtgcagtggcaygatctcggctcattgcaattgtcacctcctgggttcaagcgattcctctgcctcagcctcctgagtagctgggactacaggcgctgcaccaccacgcccg

SEQ ID NO: 34087 - DNA, 201 bp, Homo sapiens
tctcctgacctcgtgatccgcccacctcggcctccgaaagtgctgggattactacaggtgtgagccaccgcgcccggccacagccgactaattttttgtakttttagtagagacggggtttcaccatgttggccagcctggtctcgaactcctgacctcaggtgatctgcccacctcgtcctcccaaagtgctgggattac

SEQ ID NO: 34088 - DNA, 201 bp, Homo sapiens
tttttaccccaccttttttgtctggtctttctagcattaaccccctagacacacctaagggctgatgccggggggaacctgtcttgattgctctgggccamatcgagggcaccttcctgatacttttgttatctgccactggggacccggttgttgaagggggacttaagattttctcgaaggaggggtcactgtgagggc

SEQ ID NO: 34089 - DNA, 201 bp, Homo sapiens
acctcccactatgctcagctaatttttgtatttttagtagagacggggtttcgccatgttggccaggttggtctcaaactcctgaccttaggtgatccacmcacctcagcctcccaaagtgccaggattacaggcgtgagccaccacacctggccccacgggtgtcttgggggcactgtgcagccccctggctccctgtgc

SEQ ID NO: 34090 - DNA, 201 bp, Homo sapiens
tgcagtctactaaagtgagtcactctgaaccaagcacagaattcaaaggaagctggctctaacttggagccccagctctgtctctcctgcgctgtgagacytgaaagcaactcacttccacagctttctttgtaaaatggggttaatattattagcccacctctcagagctgttgcaaaggctcagtgggacagtatgagg

SEQ ID NO: 34091 - DNA, 201 bp, Homo sapiens
ttccctggaggggaggttggatttagatgacaaaggaagatggagaggggctgtctgacccttgatttcctgactgggctgggttaggaaaggggtcaccyagcttggcaaggggctggggacatacctagtaggttctgtcagaagccccactgtgtccctgtcaccagggctggggccgatccctgccttggaagaaaa

SEQ ID NO: 34092 - DNA, 201 bp, Homo sapiens
agcctggatttgaaccaggagacagacactggcaccccacaccttcggccacacctgctaaagccagggacctacagaagtcacatgacctgtctgagccygcacagctcttgactgccctgacccactcgtgcgtctccagaggatctgtttggatgcaaggtggttaggaccccaccttgagttggggagcaggggctc

SEQ ID NO: 34093 - DNA, 201 bp, Homo sapiens
tccagtagcagactcatgggcgccaccaagtggaagcacctggagcggcctctgccatccagtggggaagccaggccccgagacggaggtgggggcagcaygtgccctccacagccaccgctttcccgcctcagcagcccaggcctcctggcccagccctgcctggacagtgctctcccctcacccgggaagctggaatcc

SEQ ID NO: 34094 - DNA, 201 bp, Homo sapiens
aatggagcagtcacatgcctgcccctaaggagctgcactctaggggaggaagctggagaccaaacaggcaaagccacccaccagaaggatcgctccgagasaagaaaggagacaaaacagggcgatgtggtggagagtggctgtgaggggagggggccgctctagaggagcggccaggaaaggaggtgatgtctgagctgg

SEQ ID NO: 34095 - DNA, 201 bp, Homo sapiens
tcctcatcttcagggttgtgagcacccaaggaggccctgcctcattgtggggacagaagagaatggagcagtcacatgcctgcccctaaggagctgcactstaggggaggaagctggagaccaaacaggcaaagccacccaccagaaggatcgctccgagagaagaaaggagacaaaacagggcgatgtggtggagagtgg

SEQ ID NO: 34096 - DNA, 201 bp, Homo sapiens
tgatgacacacacagagggggcatgaacaccaactcctggcggggccccctcatcctgtccactcctgccccacctgcccgatttcctttaaaaaaaaaaagggaatcttggccaagcatggtggctcacgcctgtaatcccagcatttggggaggctgaagtgggcagatcacacgtcaagagattgagaccatcctggc

SEQ ID NO: 34097 - DNA, 201 bp, Homo sapiens
gaaatgcactttgcaaagctgaaaagtacgcataaatgcagggattcccgccttgctagaagcggagagtcctttggaaatctgctgggttagacctctckggggttcttggttgggacagtgctgggcctgagtccctaactgaacacctcatatccgagagagccccctttccctgcctagggttataggagagggctc

SEQ ID NO: 34098 - DNA, 201 bp, Homo sapiens
tcagggacgaggcactgtggggttaggagagaatttgtcaagtggcatggttggtttttggtctgtctaggcccctccccctctctgtaagctggaagcgrtacttgtgaggctgaggctctaggtgggtgtggggagccattggggtagtgaatggaaggccctgggcgaagggccccaggcagctgttgaaatgtcact

SEQ ID NO: 34099 - DNA, 201 bp, Homo sapiens
tctctggaggcagcgtaatggagtcagtgggtttggcaaggggaagattcgcattatggctccctcagtctccaggcaggtgactcagggctggggggagktcctttctcctctctgacccttggtcatctcatttgtaaagcggaggtgatgattctcatctcagggacgaggcactgtggggttaggagagaatttgtc

SEQ ID NO: 34100 - DNA, 201 bp, Homo sapiens
ctgcgcaggatgtccctctggtgtggttcacgcaggcttgggctgctggatgccaggcagttcatgttctagcttactcggtatttacaatggcccttttrcggatgaagaaactgagacctgagggtgaaaacaacatgtccgaggtcacatgagccaggaaacctgtgagtgggctcaggtctgtcttaattgcctgat

SEQ ID NO: 34101 - DNA, 201 bp, Homo sapiens
gttttttaaataaaggactctatggaatgaaaaaaaatctgtttgcaaaccactgttcagatccagcaactacttccccattttacagatgaaaaatggayagcaaagctcattttttccccataaatgacaataatattcaggcattgttctaagtcttgttactcgttttatcttcacaagcctatgagggagacactg

SEQ ID NO: 34102 - DNA, 201 bp, Homo sapiens
tgtattttgggttgctgtgtttagttttttaaataaaggactctatggaatgaaaaaaaatctgtttgcaaaccactgttcagatccagcaactacttccycattttacagatgaaaaatggacagcaaagctcattttttccccataaatgacaataatattcaggcattgttctaagtcttgttactcgttttatcttc

SEQ ID NO: 34103 - DNA, 201 bp, Homo sapiens
cattattgtcctccaaacccaagagcagcaaacacttatggagcacttgctgtgtaccaggcactatacaaagcaccttatattttcattgtactcctagraaacaggctcagtagctggatgttgagcaatcagctagtgatgctggagtggagacttgaacctatgtagtctggcttcagagtctatgctcttaagaag

SEQ ID NO: 34104 - DNA, 201 bp, Homo sapiens
agtcaccgagtcagggcctgatatgcagtaagtgccaaataagtatttgccattattaacggattttcctaatttgatcctcacacccagttctgagataygagctgttatcatcaccgtttcaccaatgagaaagtcgaggctcagacaggtagactccccgggtcacagagccagaaagttgttggcaggattaaaaag

SEQ ID NO: 34105 - DNA, 201 bp, Homo sapiens
cagcccttagacttggccctgccttggactttccaactgtgcttgtagctcagattattctaccagctagagagcctacaccaccccctccaaagcctccragacttttctcaaacctgctgcctccattgtcttctgtggctaccaaagggcctctctaggcttgagctacaagtacactgtgtgcacctgtcctgtttg

SEQ ID NO: 34106 - DNA, 201 bp, Homo sapiens
gattagacccagagctgtgggacctcaaagcctgtattctttctctactcactctactgtcagattcagcagggagaggccctgggtcggcactgctggcrgggagagcagccgagaagtgtggttcgcctgcctcctttccccagcggctgctccacagagttctcagcccaggccagccaagccccagcccaggtccag

SEQ ID NO: 34107 - DNA, 201 bp, Homo sapiens
tggaggggcaggccctgctttgcatgtgttttgtccccacttcgagaaagagatcgcggtggctctgatttaagttcaagaacattggggtcacaccccgrgcctggatttgaaccaggagacagacactggcaccccacaccttcggccacacctgctaaagccagggacctacagaagtcacatgacctgtctgagcct

SEQ ID NO: 34108 - DNA, 201 bp, Homo sapiens
tagatggatgcttttagccaggggacattgtgaggggaagattcctccacccagtctggcctgtggtgtctgtctcctccctgagaccacagcttctccartagcagactcatgggcgccaccaagtggaagcacctggagcggcctctgccatccagtggggaagccaggccccgagacggaggtgggggcagcacgtgc

SEQ ID NO: 34109 - DNA, 201 bp, Homo sapiens
taggctagtgagtggcagagctgagacttgcttgatgcctggtcttgtgccctttcctctgtcccacaccacctccttcaggtacaagggacagacattakctccctttccgcagtgcctgcaagaacctgcagggggcgcagagcctgagggcctgaaggaaggagagacacggatgtccgccgtgcgctgtgcactgta

SEQ ID NO: 34110 - DNA, 201 bp, Homo sapiens
tgctggacttaccctgggctgcagtccattgtcggcccctgggttgaatcaagatagtacttgcagctagatggatgcttttagccaggggacattgtgasgggaagattcctccacccagtctggcctgtggtgtctgtctcctccctgagaccacagcttctccagtagcagactcatgggcgccaccaagtggaagca

SEQ ID NO: 34111 - DNA, 201 bp, Homo sapiens; identical to SEQ ID NO: 7603

SEQ ID NO: 34112 - DNA, 201 bp, Homo sapiens; identical to SEQ ID NO: 7604

SEQ ID NO: 34113 - DNA, 201 bp, Homo sapiens
cctgggaggcagaggttgcagtgagccaagatggcaccactgcactccagcctgggcgacagagcgagactccgtctcaaaaaaaaaaaaaaaaaaagaawgcaaatctgatgattctgaaggccagcctctgggaatgtctggacacatagtacgtgtttacttaccttcctgctatgcttcctttccagaaacatgctg

SEQ ID NO: 34114 - DNA, 201 bp, Homo sapiens
cagctgagggctggcacatacagaggactcagtcggtgtcacctgctgttattgtcatgactgttacgatgatgacacaggatgccagactggacctcatsagggcagagattgtacgtttctaaaaattgtggtatagtataatttacttaagtaatgtatgcatatcttgtacagctcacgttttacaaatgcacacac

SEQ ID NO: 34115 - DNA, 201 bp, Homo sapiens; identical to SEQ ID NO: 7605

SEQ ID NO: 34116 - DNA, 201 bp, Homo sapiens
agctgggatataggcacgcaccaccacgcccatctaatttttgtatttttagtagagacagggtttcaccatgtttgtcaggccggtctcgaactcctggyctcaagtgatccaccgccaccttggcctcttaaagtgctgggattacaggtatgagccaccacacccaaccttgttttgctttttgagacaggatctcac

SEQ ID NO: 34117 - DNA, 201 bp, Homo sapiens
taccaccaagtcagccagctgtgggtctgggaggcccctgaggactaagcagccagggcaaggagcactggtcgtggagccagttctgggttcaagtcccrgttctggagtaagtcacagaacctccttgagcctcacttgacttggctctgattagctactacctgcattattgggttgttgggaagataaaacaagatg

SEQ ID NO: 34118 - DNA, 201 bp, Homo sapiens
tctactaaaaatacaaaaattagccagggatggtggcgcacaactgtagtcccagctactcaggtggctgtgatggtgcacaccggctactcgagaggttraggcaggagaatcacttgaacctgggaggcagaggttgcagtgagccaagatggcaccactgcactccagcctgggcgacagagcgagactccgtctcaa

SEQ ID NO: 34119 - DNA, 201 bp, Homo sapiens
cagccttccaaagtgctggggttacaggcatgaacactgcacttggcccaaaggcaaggattttgtctgttttgtttcctgctatatctgtcgagaacagygctaacacgtagtaggcacacgattttaaagagggtaagaggaaaatgaatgagtgaatggatgtgagcccctggcagagtatccggcctgcagtcaggg

SEQ ID NO: 34120 - DNA, 201 bp, Homo sapiens
cagggcttggcaccagaaggctttgtgctctgagtctggcctgacaaagacacaggaaggggctcgggcttcatccgcctgaagagcctgcctgttctcayctctgcaggggaagctaccaccaagtcagccagctgtgggtctgggaggcccctgaggactaagcagccagggcaaggagcactggtcgtggagccagtt

SEQ ID NO: 34121 - DNA, 201 bp, Homo sapiens
ctgtaatcccagctactccagaggctgagcacaagaattccttgaacccaggaggcaaaggttgcagtgagctgagattgcgccactgcactccagcctgrgtggcagagtgagactgtctcaaaaaaaaaaaaaaaagaaagaaaacaaagcaagccccactgagcctcgggccacgctggagcttttcccgatttctct

SEQ ID NO: 34122 - DNA, 201 bp, Homo sapiens
ttgcgccactgcactccagcctgagtggcagagtgagactgtctcaaaaaaaaaaaaaaaagaaagaaaacaaagcaagccccactgagcctcgggccacrctggagcttttcccgatttctctccttcatcctctcccgcctctgactggccaccacatccacgtccctcggcactcacagggacctcgtctccccatgg

SEQ ID NO: 34123 - DNA, 201 bp, Homo sapiens
ctttccatcttcgagcttgtctgctcatgacattgtctccctcaagaacacctgtctatatccagcctgagcatggtatttccgaagctgctcctcggaayatgagtactctagatcttaaagcccgctccatcaaaaaggaatgctgtggtccaataaggcaataaggctgggagaggctgtgtcttctcccctctctgg

SEQ ID NO: 34124 - DNA, 201 bp, Homo sapiens
agagggatgagggagggcagagggggcagaaggggaaggaaggactcatttcctcagcagctctttcacagaagcttcgagtccattacacacatgagctrttccttccagcactggagaggagggggcgaggggcgaggactggctgcctccaggtgccacatctgagcaggcagtgtggggaggagagggcagggaggc

SEQ ID NO: 34125 - DNA, 201 bp, Homo sapiens
agagtgggcagggcctggtgattgattggagtggggcaggggatcagcccgtcgctttgacaaatgagaaaacagagcccagaaaggttgcatgagccacyggagtcacacagtccaagcgttagagccagacgctaagctggagcctcccatcccagggccttccagccaaacatggactccaggccccagattcctggc

SEQ ID NO: 34126 - DNA, 201 bp, Homo sapiens
gtgatttaacctctctgtgccacagttttttatctgcaaaaagaaacagactgggtgcggtggctcacacctataatcctagcactttgggaggctgaggygggcagatcacctgatgtcaggagttcgagaccagactggccaacatggcgaaaccttgtgtctactaaaaatacaaaaattaccgggggtagtggtggg

SEQ ID NO: 34127 - DNA, 201 bp, Homo sapiens
cctggcagggagggagcctgctgtgaggaaacggcatggaatttggagtcagaagatccaagtttgaattgtttcttctaatcacaccttaggcagattgyctcactggggcaggggctcaatctcccatctgtagaaaggggtaacagatccctgccttgcttatccaagggccgcctaagattagacgaggggatccct

SEQ ID NO: 34128 - DNA, 201 bp, Homo sapiens
gagtactgttattagccccactttgcacaggggaccaccaatagtattacttcttccccggaaacgtaaaacacagaacagcacctggtccttagaagcaycacgcgactgttcagtgttattattttcctcccagtttgtattctgggaaaccccaggccaggtgggctctacctgccgttaaatgcccctgccaggagc

SEQ ID NO: 34129 - DNA, 201 bp, Homo sapiens
ttgaactcatgccaggacttctggctcccactctggcgttctgtgcattcctcagggcagggggttgggaaaagggtctgtggtcatttctggagcctgaraaggggcatggcaggaaggggccagcagacacatccagatcctctctggcccttatcttacttgtaagtcaccgagtcagggcctgatatgcagtaagtg

SEQ ID NO: 34130 - DNA, 201 bp, Homo sapiens
ccccagtggcctggggcacgcctctcacagacagccctcttcttgggcaggtgggcaggggtggggatgacagtctgactcaggagagtgggacctgggcrggcttttacgagaggcagcaggacatcctggttacaggcacaggtttaaatcccagcctctttcaaactaccagctttgtagccttgggcaaatttcgta

SEQ ID NO: 34131 - DNA, 201 bp, Homo sapiens
attccatctcaaaaaaaaaagaaaagaaaaagagagctctgaacaagcgcctttagggtcacagagaaagtgcaacctgctggaggctgagagttacaggkctggaaggcgcctctgtgaggagaggaagccccaggcgcgagcgctcattttcagtcatcttaaaatagagcagaccaggctgggtgcggtagctcatgc

SEQ ID NO: 34132 - DNA, 201 bp, Homo sapiens
tggctcatggcgcttctatgttggatgtcgtagttctgcatagatctttgaagatgtcgttcaaggccttaacctgtgggtctcaaactcaaacgtaagcmgggaccaaggatgggaccgggctgattttgcagaggcatcttcagttgtgtcttctttcccagtcgtcagtatgttcagcactacaaaggaatcagtttc

SEQ ID NO: 34133 - DNA, 201 bp, Homo sapiens
gtaatcagaatcctaacaaaacaataattagaaacttgaggagtacctcagcatggctggaggctgccgtggggaaagcaccagctgggaaatgctagctrtggacaccaagaccctgcagataagacagggagctctggccaggtggggtggctcaaagtgctgttaatcccagccctttgggaggccgaggcaggcaga

SEQ ID NO: 34134 - DNA, 201 bp, Homo sapiens
gcagctgcagcctcagcactgtcatcattgcccctacatctgtaacccaggccacactactgctcaggttgaacccagggtcattccagctgctcgtaccygttctccgtgagccgggacattcctgtgccacaggcattaccttggcagtgcctctctttaggaggcagcacttgaattccccatgtgccttttcatgga

SEQ ID NO: 34135 - DNA, 201 bp, Homo sapiens
ttggacttgttacttaacctctctgtgtctcttattccacatctttcacgtggggttgctgttatggttaattagaaaacacacgtaaagtgcttagcacrgaacctagaatgaagtcattgctcaagatgtggcttttgctggtgccatgtcgttggtgttaccgtttagcagctgcagcctcagcactgtcatcattgc

SEQ ID NO: 34136 - DNA, 201 bp, Homo sapiens
tcagtcactgtgaggaggggttctcccaaatcacaggtaagctgactgtggcaccagagaggttaagtcccattcttaaggtcctacagccggtacccagrttgactgactccagaaccagcactctttcctgacgctgcctgtgtagacagagggagtggattcatagagccctagaatcctagaatatggggaaaatag

SEQ ID NO: 34137 - DNA, 201 bp, Homo sapiens
gtttttgaactttcaataattgattggaggctccatgttgacttctgcagcttttctgtcttcctgttgtttgagttgcagccacttggttttcattaccrtgtagtattccatcccatgatgtggctctcctgtggtttatccaggctcctatagatgggcatttaggctgtttctcattcacaaccacagcacatgctg

SEQ ID NO: 34138 - DNA, 201 bp, Homo sapiens
ccggatgccaggccctttgcagacacgaccttgtttaattctcagaagagtcccgggagctaacagtgggcgataggattcccacttcacagagaagactrggatcgcatggcagcaaagcacagggctggctcgaagcccaagtctgtctgacctattctggtgggtagcaaaatatctcagacatattaaaagcatcag

SEQ ID NO: 34139 - DNA, 201 bp, Homo sapiens
ccgagattgcgcccctgcgctccagcctagtgacagagcgagactctgtctcaaaaaaaaaaaaaataaatataaaaaaaggaaaccttaggtgggcatcyggcctcatcaccctctcatcttccagatgtccttcctctccagaaagggacactgggctctgttcttgcagccaccacctgttgctaggggcctactagg

SEQ ID NO: 34140 - DNA, 201 bp, Homo sapiens
gcttgatgcctggtcttgtgccctttcctctgtcccacaccacctccttcaggtacaagggacagacattagctccctttccgcagtgcctgcaagaaccwgcagggggcgcagagcctgagggcctgaaggaaggagagacacggatgtccgccgtgcgctgtgcactgtaccatgctctttagagccactgcttcctta

SEQ ID NO: 34141 - DNA, 201 bp, Homo sapiens
ccattcagctgggtggtgagaagccagggtctcacctctctggacctcagtttcctcacttgtaaaaagaaaaataacaaggtggctcgcgtgtttttgcrtgggattatgagggtttaatgagctaaggatgtctgtgcttctgggaagtgtgagccatggctgtgtcacccttgtccctgaccccgctgatgtgggggc

SEQ ID NO: 34142 - DNA, 201 bp, Homo sapiens
aaccgtcacagcagccagcgaggggacctcgtccatgccgtctgataccttcaaggtgcaccttggaggggcaggccctgctttgcatgtgttttgtcccmacttcgagaaagagatcgcggtggctctgatttaagttcaagaacattggggtcacaccccgagcctggatttgaaccaggagacagacactggcacccc

SEQ ID NO: 34143 - DNA, 201 bp, Homo sapiens
cgccactgcagtccagcctgggtgacagagcgagactccatctcaaaaaataaaataaaataaaattgtatctactaagaaagtaaaaatttagccaggtrtggtggcaaaattttaatagtcctagctacttgggaggctgaggtgggaggctcacttgagcccatgagtttgaggctacagtgaactatgattatgatt

SEQ ID NO: 34144 - DNA, 201 bp, Homo sapiens
gtctactaaaaataaaaaaattacccgggcatggtggcgggtgcctgtaatcccagctactcaggaggctgaggcaggaaaatcgtttgaatctgggaggyggaggttgcagtgagctgagattgcgccactgcagtccagcctgggtgacagagcgagactccatctcaaaaaataaaataaaataaaattgtatctact

SEQ ID NO: 34145 - DNA, 201 bp, Homo sapiens
tactattttggagcagaatgcagaattggcatgaatttttgagattcaaaaggaaatgagacttaagcttttttcacagcttttagctgtgtcctcagtcmtgccagggcacaggttgactctcctctgccatgtgggtgctttgggaaagtgtaagcagccttgtttttggaaatgaccccaacccctgagccctgggac

SEQ ID NO: 34146 - DNA, 201 bp, Homo sapiens
cagggagggccctgccacaccctgcacttcctctcattgtgcctcccttcctgtttagctagactgttaggctggagggatttttcctccctttcaggacstgaatggagctatttctccttgcatctctgccaacatctcccaggatccacctctgatccactggtgggctcgggcatcaacagctttgggttccaatcc

SEQ ID NO: 34147 - DNA, 201 bp, Homo sapiens
tttgctatatctctaagcccaggaagtgagggtcacatacctgagcaagagtgagaggccctcctctcaaagcatcatctctacctttgtgtctttccctmcagggccttaaactttggtggcataggtgtcgtcgtgggccatgagctgactcatgcttttgatgatcaaggtacgaattccagctgggcacgatggctc

SEQ ID NO: 34148 - DNA, 201 bp, Homo sapiens
ataaatagagctggtcaatggcgaccattgctaacgctttcgcaatgactgaagaggacagttaggtctgtagagcatctagcacagcgcatggtgcccartaggcacagctgaccacacagactgtgcccagcctccctctggcttcaggggccttgctggagactcaggccatgaccacacccttatccacacagagcc

SEQ ID NO: 34149 - DNA, 201 bp, Homo sapiens
acccattttgtttgctggtgaggaatcatgagctatgtttgtagcacttggcacaggataaggtttgattaaatggtcatggtggtggttgtgattccagrtaaacattttgcgattctctgaatccagacacttggttgcgtcacttggaaactggagccaagggtggggactctaacctcatgtcctcctggtcctctg

SEQ ID NO: 34150 - DNA, 201 bp, Homo sapiens
cagtggggtattgggagcatctcatggaatcaagagccctacctcagggaaacgcccctctgacaatgttataacacagtcagagctggggagtggggagrgttaaggctgctgtctcagtttgaatcccaggtctgctattggatgattgtgtggtccttgggcaaagcaattgacccattcccagccttggtctactca

SEQ ID NO: 34151 - DNA, 201 bp, Homo sapiens
ggagtccaggacctggggcctgccctttccttgggcccctgagggcagagtggctgggatgccccaggcctgtcttggtgggctgacaagcctaggaatgkctccctcctcccaacagggcccctttggacttcctggggggaggtgtaaacaggggagcaagtttctagagagcattcaggaaatcggctaggtggggat

SEQ ID NO: 34152 - DNA, 201 bp, Homo sapiens
ctgagtcttacagatcttccaaatggttatacttccaatatacaatagcaaaaaaatccacatttgttaatatcactgctgacctcttgagaaaaaccttycattattattggtaaggtgtcaaacttgtggtggccaatataagtttttcaaaattttaattttagcctgaaacttcaacatttttttaaatctcatatt

SEQ ID NO: 34153 - DNA, 201 bp, Homo sapiens
aaaacaatggttcactgagtcttacagatcttccaaatggttatacttccaatatacaatagcaaaaaaatccacatttgttaatatcactgctgacctchtgagaaaaaccttccattattattggtaaggtgtcaaacttgtggtggccaatataagtttttcaaaattttaattttagcctgaaacttcaacattttt

SEQ ID NO: 34154 - DNA, 201 bp, Homo sapiens
gattgactccacttcttcttttctagtacactgcagttccagacctctactttgaaaatgccatgcggtttttcaacttctcatggagggtcactgccgaycagctcaggaaagcccccaacagagatcagtgagttcccccaggccctgccggcaaggtgccagctccccacctgtgggcaagccttgggacgaactggc

SEQ ID NO: 34155 - DNA, 201 bp, Homo sapiens
gaacaccatctgtttagattcagcactttgcatcaaacagtgagggtcagctccacttcctgtggtaggtctgcggctgccagtcctggagacgtgggttkcctcactgttctctctcctctctccttgccttcatgccccgacttcctgggtttcttctggagctaacgctaatacctactcttaggaatgttgtgaaga

SEQ ID NO: 34156 - DNA, 201 bp, Homo sapiens
tgggaggctgaggcacgagaatcacttaaaccaggaggtggaggttgcagtgagccaagatcgtgccattgcactccagcctggatgatagatcaagattmccgtctcaaaaaaaaaagaaagaaagaaatgcttagtagtctgccatactggacagcgcaggcatagagcacagaacatccatcatcgcaggaggttcta

SEQ ID NO: 34157 - DNA, 201 bp, Homo sapiens
agaggtggggaaggaaagcagaaaaacacagccttggcatggctggaccaagacaggcctgggcccagctctcagctctccgccctcccacatagctgggygaccttgttccgttcactccctcagtttcctctttaactagggacatgatgcctgcatctgatgacttgtaatgagttaaatgagatcctgaatgtgtgc

SEQ ID NO: 34158 - DNA, 201 bp, Homo sapiens
accccaggcaggagctcagctggcctgtagcttgcagaaggaccatttgggaaagctggtgggcccttcattcttggtacccgccctaagagcctcactgygactctgtccaccctgggtgagagccctccagagtaggcccccagccgtgagagccccccacccactgaggcttggcatcaggtcgccctcggtctgaac

SEQ ID NO: 34159 - DNA, 201 bp, Homo sapiens
ttgaacctgagaggcggagattgcaggagctgagattgcgccactgtactccagcctgggcagcagagtaagactccatctcaaaaaaaagaaaaagaaaaagcagggcacggtggctcacgcctgtaatcccagtactttgggaggctgagacgggtggatcacttgaggtcaggagttcgagaccagcctggtgaccat

SEQ ID NO: 34160 - DNA, 201 bp, Homo sapiens
cggcactggccaacatcaccatcccacaggagaagcgccgtgatgaggagctcatctaccacaaagtgacggcagccgagctgcaggtaacttgagcgccrgctgctagggaggctgggatggcctccaggtttcagacagggccctggactgggggcttttatactcatttcatctagtccttgaaactatgtgacaaag

SEQ ID NO: 34161 - DNA, 201 bp, Homo sapiens
tctcgtccagtggatagtgggggggcagccactgacagtttggggtatgggccctgcaggtgctgaccggatatctgaactacatggtccagctggggaarctgctgggcggcggggacgaggaggccatccggccccagatgcagcagatcttggactttgagacggcactggccaacatcaccatcccacaggagaagc

SEQ ID NO: 34162 - DNA, 201 bp, Homo sapiens
cgagatcattctcaatgctgtgtctcccacgggtgtcttcttcttttttttttgagacaaagtctctctctgccgcccaggctagagtgccatggcgcacratctgggctcactgcaacctcctcctcctgggttcaagtgattctcctgcctcagcctcctgagtagctgggattataggcacctcccactatgctcagc

SEQ ID NO: 34163 - DNA, 201 bp, Homo sapiens
ccctctcatgcctgcttctcttgccaggtggaccagtctggcctgggcttgccctcgagagactattacctgaacaaaactgaaaacgagaaggtaagcgygcctctcccctcccagcctgcctcccagcacggtccttcctgctccgtgtccacacccacacctgtgcaggtctttgaagctaggggagcccaggggtgt

SEQ ID NO: 34164 - DNA, 201 bp, Homo sapiens
cctcatctcctcgaacctgagcccctattttccttaagatttggatctctctttggggttcaggccccccttttttctcactaggttctaggacctgcttyctgcttaggcaccttcttctccctggaccccttcttcacccttagaccctggacctgggtctgatccctctctggggactggaggctctgctgtcttaga

SEQ ID NO: 34165 - DNA, 201 bp, Homo sapiens; identical to SEQ ID NO: 7629

SEQ ID NO: 34166 - DNA, 201 bp, Homo sapiens
atgctggggagatggtagcagacaagaccaccatagccttcgtcccacagggcctgtggtttggtcggcgaggcggatattatttaactaagagaaagtgragctgagaaagtctaccgtggagacctaattcagatcttggaacacgggtggggggtggtcagaaaagatgcattctaagaatggaaagacagccccagg

SEQ ID NO: 34167 - DNA, 201 bp, Homo sapiens
ccttgggcaagtgcctcaacctctcagagctacagttaccttataaatcaaatggattgcaataacacctgtcctaggtatgccaagatgtggccatgggygccaatagtagcaagcagaatttgaccctcccctcctgcttggcaggcacttgaccagcactgtcttcttgaatccccattctagctctgaaggttaggt

SEQ ID NO: 34168 - DNA, 201 bp, Homo sapiens
gccccactggtgagatctttgcaggctgctggccttgcgtagatgggcactgcatacaggtgaaactttgggtgctgatgggtttccgtgggccccaagartgatgtcaactcctgggcacagctgaacccacatcctggtttccccctccttagcgtctgctctttgtaactcttcttggaatgggtttgaatccatctc

SEQ ID NO: 34169 - DNA, 201 bp, Homo sapiens
gacagaggtgggggcagcatggagccggcatttatggaggccctagtatgtaccaggccatttagacacgaggtcttatcatgtctctagaaaagccctgygtagtccactttatgattatgattatgattatgattatgattattattattttgagacggagtctcgctctgtctcccaggctggaaagcagtgatgcga

SEQ ID NO: 34170 - DNA, 201 bp, Homo sapiens
ctggggtgggagaggggcttgccctgggtgggacggcggtcttctagtttctgagcctgggttatttccagaggccccactggtgagatctttgcaggctrctggccttgcgtagatgggcactgcatacaggtgaaactttgggtgctgatgggtttccgtgggccccaagagtgatgtcaactcctgggcacagctgaa

SEQ ID NO: 34171 - DNA, 201 bp, Homo sapiens
gtctcaggagaggctgaggagagttggacagggatggagcctggctttcctgcccagttcacagaggggagggcacagctgctggcttggagggctcccargaaggccaggagcagaaagtctgagaagcagattgggggcagcagagggagtctggcccttggtgccgggggtgccctggtggacagaggtgggggcagc

SEQ ID NO: 34172 - DNA, 201 bp, Homo sapiens
tttgttttttagctgatcggctatcgttggtgtattttatgtgtgacccaagacaatatttcttacattgtggcccagggaagtcaaaagatgggacgctsctgccgagtgtaaacagaagatctggagtggggtggggacacctgtggactcaagacagcctgggtggcgagtggtgtgtgggggctggcactagaagcc

SEQ ID NO: 34173 - DNA, 201 bp, Homo sapiens
catctcactgagaagccgccttgccacttctttctgagcccctgtttcttcatctgtaaaaggggcatataatgctgacttcagaagttgttccagctccygacatgagccaggtggggcagcagtgagggagcttcaggcagaggaggagggagacaagaccagaccaaagggtggccggggacgcagctctgtttcatt

SEQ ID NO: 34174 - DNA, 201 bp, Homo sapiens
aagtgctggggttacaggcatgaacactgcacttggcccaaaggcaaggattttgtctgttttgtttcctgctatatctgtcgagaacagtgctaacacgyagtaggcacacgattttaaagagggtaagaggaaaatgaatgagtgaatggatgtgagcccctggcagagtatccggcctgcagtcagggctattgtgta

SEQ ID NO: 34175 - DNA, 201 bp, Homo sapiens
ctagtcacaagggccacgtctctgtgtttagtgtcagctaatgaagaaattgaatccagtacacaaaattggattttgcagttttgcaaccagtctcaacmcccctctattgtgtaacgtgtttctttagagaaggaaacccacaacaaaacatgtgtgctttcctcctggcgacctctgatacctccattgaagacatgg

SEQ ID NO: 34176 - DNA, 201 bp, Homo sapiens
gaaagagtggggagcagaaacaagccatcaggtaccaggttggtggtcctggagccagtttatggttcatctagtcacaagggccacgtctctgtgtttartgtcagctaatgaagaaattgaatccagtacacaaaattggattttgcagttttgcaaccagtctcaacccccctctattgtgtaacgtgtttctttaga

SEQ ID NO: 34177 - DNA, 201 bp, Homo sapiens
aagctggagcctcccatcccagggccttccagccaaacatggactccaggccccagattcctggcagctgctctggcagagtccctcttcccagtctcctrgtggcttcgtccctccccatgccctgctgcctgcagagtctggcagcttcaagggagtggggtgctttgaagcatctacagggagggcagtgctgtgacc

SEQ ID NO: 34178 - DNA, 201 bp, Homo sapiens
ctcagagaggcggtaccttgcccaaagcttgtggtggcagagctgggattagaaagcagaccctcagcagccgaggcctgtgttcctcctaatacccaacrtggttgcttttgcagacttccacacagagattcttttttttttttttttttttttcgagatggaggttcgctcttgttgctcaggctggagtacagtgga

SEQ ID NO: 34179 - DNA, 201 bp, Homo sapiens
tcatgataggctagtgagtggcagagctgagacttgcttgatgcctggtcttgtgccctttcctctgtcccacaccacctccttcaggtacaagggacagrcattagctccctttccgcagtgcctgcaagaacctgcagggggcgcagagcctgagggcctgaaggaaggagagacacggatgtccgccgtgcgctgtgc

SEQ ID NO: 34180 - DNA, 201 bp, Homo sapiens
ctgggagaggctgcattctgaaaagtcagtcaatttatccatcaacaacagaacctagatccgacaaatactgattgttttaaaaaactttaagatattcmaaggcaggtacaatagaagatacccaaaaggggacagatcttcttaaagggacacgaatcttaagagacaggaaatgattctaaatggacaattaacaat

SEQ ID NO: 34181 - DNA, 201 bp, Homo sapiens
atctccccatgctgtgacctcatctcacggatcccctccacagtcccatgaaggaggctgggcaggtgcgacagggatgcaaagaagagactcagccgagrccagcggccattggaagcagatcggtgccctgactcacggcccagccctttccattgcacccaggaattggccaccctgccctggagaggcctcctgatc

SEQ ID NO: 34182 - DNA, 201 bp, Homo sapiens
tggtttttcctcagattagagctccacgttgtcttgtttgcagctgtatccttagttaatgtttgttggattcccgtctgcccactgggctcctcccccartgtgaaatcatgacacctgtgctgtaccataaagctgcccaccttaaccctcccacagctgggaccatggctgtctccctctgctgctgtcccctgctcc

SEQ ID NO: 34183 - DNA, 201 bp, Homo sapiens
gcactttgggatgccaaggtgggctgatcacctgaggtcaggagtttgaaaccagcctggccaatgtggtgaaaccccgtctttactaaaaatacaaaaaytagctgggcttggtggcatgcgcctgtaatcccagctactctgggaggctgaggcacgagaatcacttaaaccaggaggtggaggttgcagtgagccaag

SEQ ID NO: 34184 - DNA, 201 bp, Homo sapiens
tccccaccctttctgctcccggcttgtctcgtgggccccaggcagcaggccccatcctcacctgcagaacttgttcttgctgtaagcctaggtgagccaascactcacttctgtaaccaaatatgtgtcccggattagggctttgttcccttggctgtggaaaccctgggaactcctggctggatagcgctgctctttttc

SEQ ID NO: 34185 - DNA, 201 bp, Homo sapiens
cctcacttgggctcttgtcccctggagcctgcaggatagtaggtgctccctgagtgaggaggaaaaagaagaggtgggagagtgtgccgtgggttgtcccygtgggctcctggaaccagggggaggaagaggaaccgtaccttctaccagggctcctgccccagccagcattggcagtggggatactgatgacacacacag

SEQ ID NO: 34186 - DNA, 201 bp, Homo sapiens
gaatgctgtggtccaataaggcaataaggctgggagaggctgtgtcttctcccctctctggaagaatcacggtgcctattattaccatattaaaggctctraaaagtaccacagcagagacttttccaactttcccgaagctcatcctaagcttattggagcatggagccctgtgtgtggaaggccagtcctgtcttgcag

SEQ ID NO: 34187 - DNA, 201 bp, Homo sapiens
gaatggctcaacgggacactatttgtgaagtcccagcacagagcctggcattcaggaaatggcagggggtgggagtgagggtatcagtggcctcttggtcyggtgactaaaataactttactgggtcggaaagctctccctgaacttccagaacaaagcatgggccccacatggtgctacctcccagcaagaaaggggttg

SEQ ID NO: 34188 - DNA, 201 bp, Homo sapiens
gagcaagatagtaccagaacaggcacaaacctcctggacttttggaggggtaacctggcagacagttgggggaaggagacccaacccatcatcccccatcygcagctgtggcaccttgagaatgttccttcactttccaagctggggctgagttgaggctaccgctgagggttgggaatgctctttactatacagcagttg

SEQ ID NO: 34189 - DNA, 201 bp, Homo sapiens
ggctggagtgctgtggtatgatctcagctcactgcaacctccatccccagggttcaagcgattcttgtgcctcagcctcccgagtagctggggttacaggkgcctaccaccacacccggctaatttttgtatttttaatagagatggagtttcaccgtgttggccagggtggtctcgaactcctgacctcaggggatccac

SEQ ID NO: 34190 - DNA, 201 bp, Homo sapiens
agcccaagagttggctcagtcctcgctgccaggcccttagcatttgtggcacagttgcagggctttggaaggagcactgggccgggagtataaaagcctgkcttctagtcctgactgtgtccctgactcagcatgtccagggggcctcagttagttcatctgtagattgggggggttggtcagacagggctcatggagacc

SEQ ID NO: 34191 - DNA, 201 bp, Homo sapiens
gtagctctgcagaggagacaggaacccgagaagtagctgaagcagaagccagccgcagtccccttgccacatagaggcgggcttctcccagccatggtgtyccctctgcctcccctcccccgaccctcctgccttccgcgtggagggtggtggtcctgtagtgtcagcaccagcaccatgggcttggaccccctccctgga

SEQ ID NO: 34192 - DNA, 201 bp, Homo sapiens
aggcacctcctctcttctgtcctgcccagatctctgcctgacaaggatgctcaaggcggggccaacctctcaagggggcagggcctccctctcaagggggyagggcctctttcctgtgcctggccacctttcatagaggcttatctgtcccttcccattttctgtctggagcccagtgccctaggagcagtggccctgcgt

SEQ ID NO: 34193 - DNA, 201 bp, Homo sapiens
attagagtccccctcgtcctgacatcctgtgtggtcggcctcggccagacacagaccatgtgtccagctttgggcttctcagccgagggagggtaggcgcrggagggagggaaaggctgagggcaaggcatccaaatggacacgtagttgggaaaactaaaaagaacatgggtaagaagaagagtggcccttcctttcttt

SEQ ID NO: 34194 - DNA, 201 bp, Homo sapiens; identical to SEQ ID NO: 7590

SEQ ID NO: 34195 - DNA, 201 bp, Homo sapiens
ccaggttgctgggttctgccttcccttccgacctgactctgaaaacctggcttcacctggctccccaccctttctgctcccggcttgtctcgtgggccccrggcagcaggccccatcctcacctgcagaacttgttcttgctgtaagcctaggtgagccaagcactcacttctgtaaccaaatatgtgtcccggattaggg

SEQ ID NO: 34196 - DNA, 201 bp, Homo sapiens
ggcagagaatggcaggatgtgggctcctgcttcgagccctggaatgcatcctacacgtcctctctcccatccccatgcaaacctacctctggcaggaaggrgactgagggagaaggtagctgggaacaagccccatttctaaccagaggcacttccaagggcaccaccagaccttggccacaagaagcatactgccctgca

SEQ ID NO: 34197 - DNA, 201 bp, Homo sapiens
agctgggtgttccttctgggaagcgatgaaagttggaaagtacttgtaaatattagcctttgattcttgctaagatgtgaggagtgccctcccctacaacrgatcatattttaagctgttaccagtcatttaaagtcaggcatctgggtggggtagcagacaaggctcaggcagagacaagaggacacaaggacttgagaa

SEQ ID NO: 34198 - DNA, 201 bp, Homo sapiens
cctgtagtcccagcttcttgggaggctgaggcatgagaatcacttgaacctgggaggcagaggttgcagtgaaccaagatcacgccactgcactccagccygggcaacatagcaagattctgtcttgctgtgatcatcccagatcatcccttcagtcggcattcatctggtagccttctgctggcactcagagctaccagg

SEQ ID NO: 34199 - DNA, 201 bp, Homo sapiens
gggtcacaggccaagtttgagagccccctaggggccagcaggggaagggccgcaatcctccctgcctaggtgtccctgagcctctctggcctcctctcccygcagcctgctcaacaactacatgatctggaacctggtgcggaaaacaagctccttccttgaccagcgctttcaggacgccgatgagaagttcatggaagt

SEQ ID NO: 34200 - DNA, 201 bp, Homo sapiens
aatcccaactttgagactaaagtagaccgtaatttaccaaccttcttaaacatgtggagccttttttatcccagaggcacaattgaatttatgttttgatrtaatcacattcacacaattcattatccaaaatataaaccgtgaaccgggaaaagtctctttcccattctcatcccagccacccagggagcggctggattc

SEQ ID NO: 34201 - DNA, 201 bp, Homo sapiens
caggacaccccgctatgtacaagaaggtgggcttttaccttcagaacatggcataggctctgttgccagtttatctgaagtattttaacttagcttgaatktttttatttaaatttccttgcctacccattgaagtatttgtgattatttgaatataaatatgatgttttaaattcctccatatggccaggtacagcggcc

SEQ ID NO: 34202 - DNA, 201 bp, Homo sapiens
aggcgtgcgccaccacgctcggttaattttgtatttttagtagagatggggtttctccatgtgggtcaggttggtctcaaactcccgacctcaggtgatcsacccgccttggcctgccaaagcgctggcattataggcataagccaccgcgcccggtgaggccagttctgtccggcagcacagcctggatgctgtctcgcc

SEQ ID NO: 34203 - DNA, 201 bp, Homo sapiens
acctgagcccaggaggtggaggctgcagtgagttgtgatggccccactgcacttcagcctgggaatcagagcaagactccatctcaaaaaaaatttttttwaaatcccaactttgagactaaagtagaccgtaatttaccaaccttcttaaacatgtggagccttttttatcccagaggcacaattgaatttatgttttga

SEQ ID NO: 34204 - DNA, 201 bp, Homo sapiens
atccagcctgagcatggtatttccgaagctgctcctcggaacatgagtactctagatcttaaagcccgctccatcaaaaaggaatgctgtggtccaataargcaataaggctgggagaggctgtgtcttctcccctctctggaagaatcacggtgcctattattaccatattaaaggctctgaaaagtaccacagcagaga

SEQ ID NO: 34205 - DNA, 201 bp, Homo sapiens
gccggaacagcaagtttggcacatgtagggggtgaacgctggtgtggccgggcagaggcagtggagggtggagggaaggctagggagaggtgggcctggargggcaagccatggacagccttgtctgtggggcaggggtcagcatttcgttctaatagtggtgggaagccactggaggaccccacgttgaggggcgactgg

SEQ ID NO: 34206 - DNA, 201 bp, Homo sapiens
tcccagctacttgggaggctgaggcaagaggatcgcttgagcccaggaggtcaaggctgcatgagctatggtcgaggctgcatgggctatggtcaaggccrcgctccagcttgggcaacagagtgagaccttgtctctttaaaaacaaaacaggccgggtgaagtggctcatgcctgtaatcccagcactttgggaggctg

SEQ ID NO: 34207 - DNA, 201 bp, Homo sapiens
ttcctggtgcagacagtaggtgtctgtggatgttttctgcctgcctcgtgttccctggacagccctgcctcttagcttggctccaggaaagcattgcagcrgggttggtggctgcatgcgctggggactatgctagtcccctcctctctggacaggtcccatgtgccaaaccagggaagaccagggagattttttaaaatc

SEQ ID NO: 34208 - DNA, 201 bp, Homo sapiens
tggagtgcagtggcctgatcttggctcactgcaacctccgcctcccaggttacagctattctcctgcctcagccttctgagtagctgggattacaggcatrtgccaccacgcctggctaatttttgtatttttggtagaaacagggtttcaccatgttggccaggctggtcttgaactcctgacctcaagtgatccacttg

SEQ ID NO: 34209 - DNA, 201 bp, Homo sapiens
tgtggtatgatctcagctcactgcaacctccatccccagggttcaagcgattcttgtgcctcagcctcccgagtagctggggttacaggtgcctaccaccrcacccggctaatttttgtatttttaatagagatggagtttcaccgtgttggccagggtggtctcgaactcctgacctcaggggatccacccacctcagcc

SEQ ID NO: 34210 - DNA, 201 bp, Homo sapiens
cctgtcctgctccgcgcaacccagtggcctctcccctcccttccacctggtgaacaacttcagctttcagaaccagctcaaatggaacgccctctggagayccctcttctccccacccctccgaagggagtgacttttctctgtgttccatagccacgtgcgttgttcatagcactgtcgtgtcttgtggtcatttctttg

SEQ ID NO: 34211 - DNA, 201 bp, Homo sapiens
agggagggaaaggctgagggcaaggcatccaaatggacacgtagttgggaaaactaaaaagaacatgggtaagaagaagagtggcccttcctttctttcttgcctagaaggaatttttgtagctaaggcataatttacatacaataaaaatgcagtgtacattaagtattcagttcagtgagtttttggtttggtttggtt

SEQ ID NO: 34212 - DNA, 201 bp, Homo sapiens
cccagtgtcagcagcttctcactcaggccaaagaaacttgactccattcttgactctcctttctctcatgttccaaatacttctcgcccccttctctgccrccatcctggccaagcgcccacctttgctcacctggtcccctgcagcagcctcccgcctggcagcctcacttgggctcttgtcccctggagcctgcaggat

SEQ ID NO: 34213 - DNA, 201 bp, Homo sapiens
caggctgcggttccccagtgtcagcagcttctcactcaggccaaagaaacttgactccattcttgactctcctttctctcatgttccaaatacttctcgcmcccttctctgccgccatcctggccaagcgcccacctttgctcacctggtcccctgcagcagcctcccgcctggcagcctcacttgggctcttgtcccctg

SEQ ID NO: 34214 - DNA, 201 bp, Homo sapiens
gctgcctctggggcccctaccccaattcttttcccccagcccagccctggggcccatacgacctaagccagtctcaccatgtgatctttgccccagtgctycaggttgcagatgtcagagatgttgcagaggaagcaacatcctcacccactttccttccctccagtgagatctggaagccctgcacagtggggtattggg

SEQ ID NO: 34215 - DNA, 201 bp, Homo sapiens
agtggattccagatggaggtcctggtcccagcacgcagcagtcctggtagctctgcagaggagacaggaacccgagaagtagctgaagcagaagccagcckcagtccccttgccacatagaggcgggcttctcccagccatggtgtcccctctgcctcccctcccccgaccctcctgccttccgcgtggagggtggtggtc

SEQ ID NO: 34216 - DNA, 201 bp, Homo sapiens
agtagcagactcatgggcgccaccaagtggaagcacctggagcggcctctgccatccagtggggaagccaggccccgagacggaggtgggggcagcacgtrccctccacagccaccgctttcccgcctcagcagcccaggcctcctggcccagccctgcctggacagtgctctcccctcacccgggaagctggaatcctcc

SEQ ID NO: 34217 - DNA, 201 bp, Homo sapiens
aagagaccagccagccatggggaagagtgtggggcaggagctggagacaggtgggagcgcagaccccgtcacccagggtggcatttctcagcctgcagttrtcattacgcctccatgaaatgttaatgccacaggtactctggatgtctgttgctattcttagtctgtatacacagagtaaaaagcgtgagatgctttgtc

SEQ ID NO: 34218 - DNA, 201 bp, Homo sapiens
gccagtaagtagagggactggaatttgcacctcaatctaactgcaaggcctgtactcgtgtttttaagccatcaggaagaataccaggttatgaaggccaygcccctttctggtgagtctcacctctgtgctggtaatcaggacacccaggaattgcaagtcggcggtagcaagcataaggttgcattgatttcagtgctt

SEQ ID NO: 34219 - DNA, 201 bp, Homo sapiens
tacattccagcagggaagacagacagtaaacaaataaatgactaaatacatgataggattgtaaagagaagggctcaaaaacatcaagtagggcatggggscagagagggaagaggcgattgtagctgcagcgatcaggaagggatgggctttctcagaagggatgtctgagcagatgcttgagttaaggagagaagagac

SEQ ID NO: 34220 - DNA, 201 bp, Homo sapiens
tgcaaaggtggttgggagttgactagccttgtaggcagtctgtgtctctctaagtgactaggatttgtggtgtgctgagaagggtacacagattctaccckcagttctcctgtggcaggtaggaggcacagacagacagagaagcatttcctggtttgtttttccactgtttgccccgagcacatgaactgtgctttgcat

SEQ ID NO: 34221 - DNA, 201 bp, Homo sapiens
cctttaaaggcccagtaacttggtccagggaggtgatgtttgagttgggtcttgaaggatgggtaggagtttgccagccaggcaaagctagtagtagcagrgccaaaatttaaacctgaacagtctggctccagactctgtgttctttcctgcagcatgcttggccctgctgccctacaaggcctagccttgggaggtgag

SEQ ID NO: 34222 - DNA, 201 bp, Homo sapiens
cccagaaaggaaaggacctgagtcagggggaggaagaaggattagcctaggaagcatttaatggggagagaaaggaaactcagaaggctgaaaaagttggmattcaaactgaagcaacatttgctgagtacgtttcctgtgccaggcatggcagtgtctgtgccttccaggagctcccaggcctgtgggagagatagataa

SEQ ID NO: 34223 - DNA, 201 bp, Homo sapiens
agacagggtttgctatgttgcctaggctggtctcaaacttcgggctcaagcgatcgtcctgcctcggacccccaaagtttgggatgacaggcgtgaaccaycacccctggctgaatccaacttgtgcttcctccataactgacttctacccagctggtcgtagtccttatgatcagccagtctcatggactctgagtgcct

SEQ ID NO: 34224 - DNA, 201 bp, Homo sapiens
atgggaataaggatagtgccaagcttagagagttgtttaaataagcgacgagattcttgtaaagtgccaggatcagtgcctgcagtacactaagtgcctartaaatgtcacctgatttattactaggcagggttctgatggagcagagcccctgccttttcacctctgcgttcccagtgtctggcagggatgggactggaa

SEQ ID NO: 34225 - DNA, 201 bp, Homo sapiens
agatgtgggttgtagtcccagctctgtcacttagtcccagctgggtgacctttggtgagtgaccatctctgagcctcggttttctcctctatgaaatggghtgatggtagcacctttctcatagtggtgttgtgaaaagtggttgataatttatgacaggttgtaaagctcacaggacggtgcacggagttggcccttggg

SEQ ID NO: 34226 - DNA, 201 bp, Homo sapiens
actgtgagacttggggcaaggcacctaacccctttgagctccactttcttcctctgtaaaatgagagcctagcagtacccattttgtttgctggtgaggawtcatgagctatgtttgtagcacttggcacaggataaggtttgattaaatggtcatggtggtggttgtgattccagataaacattttgcgattctctgaat

SEQ ID NO: 34227 - DNA, 201 bp, Homo sapiens
aagattacaggtgtgagccacctcaccaggctctgaaaaaattttaaatgactcctgttgatcttgtggtatgtgtgtgtgcatatgtagagagaaagcawgggggagggcaggagagaggagggaaagagagatcggttttctaatatgtggtctttttttcccattatcataactaaatgtctagtctccttttccctt

SEQ ID NO: 34228 - DNA, 201 bp, Homo sapiens
ggagctgggtgttccttctgggaagcgatgaaagttggaaagtacttgtaaatattagcctttgattcttgctaagatgtgaggagtgccctcccctacawcggatcatattttaagctgttaccagtcatttaaagtcaggcatctgggtggggtagcagacaaggctcaggcagagacaagaggacacaaggacttgag

SEQ ID NO: 34229 - DNA, 201 bp, Homo sapiens
aaaagggatcgagactgaacacactagatcagattctaaggttgtgatccaatgaaagttctaacaacagcttatcagaggattagttattcagtgtaggygggaatcatccttagcctcacggtgatcgggcttgcacgataagccctctggtcagagttctctttgcacttcactaggccttgggcacctctagttcac

SEQ ID NO: 34230 - DNA, 201 bp, Homo sapiens
catgtgacctgggatggctttgaatgcggctcaccacagattcataaactttcttaaaacattctgagatttatgcatgaacctttgttttttagctgatyggctatcgttggtgtattttatgtgtgacccaagacaatatttcttacattgtggcccagggaagtcaaaagatgggacgctgctgccgagtgtaaacag

SEQ ID NO: 34231 - DNA, 201 bp, Homo sapiens
ccaaaaaaatagggaaaaaaatttatcgtatttaacttatttttttcctaactccccaaacttacttgttaaaatttttttaatgagatggggtctcactrtgttgcccaggctggtctcaaactcctggtctcaggcaatcctcccaccttggcctctcaaaatgctaagattacaggtgtgagccacctcaccaggctc

SEQ ID NO: 34232 - DNA, 201 bp, Homo sapiens
ttgagcatcaaggaataataaagagtcaatgaatatttatggaggagaaggttgattaagagaaacacctgggttctgggtaccttttagccacaggaagsattttagacagctgagtagaagtcttgtgttataagcggaaatcatttctctgtaggggtctagtgaccgtccagttccaaatctgtgtggtcagggcca

SEQ ID NO: 34233 - DNA, 201 bp, Homo sapiens
gagtatcaggtgacccctgagccacctgggaaagcagtgaccaccccagatattaacagtaacctcattacccaggagcaggtgctggtgctggccacatytgagcaaacatcaggccagtcaaagcaaatctggccgggcgcagtagcttacgcctgtaatcccagcactttgggaggccgagatggacagatcacctga

SEQ ID NO: 34234 - DNA, 201 bp, Homo sapiens
aaatggtgatacaaatatcacctgtggccgggcatgaacgcccgtaattgcgggacttttgggagacagaggcaggaggatcccttgagtccctgcgtttsagaccagcctgggcaacatggcgagacggtgtctctacaaaaaataaaaaattagccagacatggtgtcgcgtgcctgtcacccagctccttgagaggga

SEQ ID NO: 34235 - DNA, 201 bp, Homo sapiens
cagtggcctggggcacgcctctcacagacagccctcttcttgggcaggtgggcaggggtggggatgacagtctgactcaggagagtgggacctgggcgggsttttacgagaggcagcaggacatcctggttacaggcacaggtttaaatcccagcctctttcaaactaccagctttgtagccttgggcaaatttcgtaacc

SEQ ID NO: 34236 - DNA, 201 bp, Homo sapiens
gagggagggaaaggctgagggcaaggcatccaaatggacacgtagttgggaaaactaaaaagaacatgggtaagaagaagagtggcccttcctttctttcttgcctagaaggaatttttgtagctaaggcataatttacatacaataaaaatgcagtgtacattaagtattcagttcagtgagtttttggtttggtttggt

SEQ ID NO: 34237 - DNA, 201 bp, Homo sapiens
tcaacaccatcttctaccccgtggagatcaatgaatccgagcctattgtggtctatgacaaggaataccttgagcagatctccactctcatcaacaccacygacagatggtaagaggacccccagtggcctggggcacgcctctcacagacagccctcttcttgggcaggtgggcaggggtggggatgacagtctgactca

SEQ ID NO: 34238 - DNA, 201 bp, Homo sapiens
ggagggagggaaaggctgagggcaaggcatccaaatggacacgtagttgggaaaactaaaaagaacatgggtaagaagaagagtggcccttcctttctttcttgcctagaaggaatttttgtagctaaggcataatttacatacaataaaaatgcagtgtacattaagtattcagttcagtgagtttttggtttggtttgg

SEQ ID NO: 34239 - DNA, 201 bp, Homo sapiens
ccaagctctttcctttgcttcctgtagaagcccgtcctagagccctgggctgtgaggaggagcagccccacagggtcacactgtccttttcccttgcagaycttggcacccgccatcaactggttgccttttctcaacaccatcttctaccccgtggagatcaatgaatccgagcctattgtggtctatgacaaggaatac

SEQ ID NO: 34240 - DNA, 201 bp, Homo sapiens
aggcaggaaggggagggggctctgagacacggcatcagagaaggagccctgggggacttgcagcattcgctcaggccccagctcgcccctcagtacccagwctcaagcccctcccatgcacaaaggctgttcaccgtctcattcagaggttgggggtactagccctgtttcacaaatgaggaggttgaggctcagcaaggg

SEQ ID NO: 34241 - DNA, 201 bp, Homo sapiens
caaatggatacattttccactttccttgcaggaaaaggcaaagaggttatgcaaggatttggggcatttttgtgggtacccagcttggcttgtgtggtgtygccacaacttccccaaagtgaacatgaagtagccagtgcttgcttttctgagtcaaggacccattcatctccatttatgaggcagagtattctattaatt

SEQ ID NO: 34242 - DNA, 201 bp, Homo sapiens
tcccagcactttgggaggctgaggcaggcgggtcacttgaggtcaggagttcaaggccagcctggccaagatggcaaaaccccatctctactaaaaatacraaaattaagtgggcatggtggtgggtgcctgttgtaatcccagctactcgggaagctgaaacaggagaatcacttgaaccctggaggcagaggttacagt

SEQ ID NO: 34243 - DNA, 201 bp, Homo sapiens
cccaggccctgccggcaaggtgccagctccccacctgtgggcaagccttgggacgaactggccttcattgcaccctcactgtgcacccgatcagctatcamgagagccgtctgaagagtggatgcccttgttatcccacttttcagatgaagaaaccaagggcaaaagaagtatggcccagctaggagctgggatgggctt

SEQ ID NO: 34244 - DNA, 201 bp, Homo sapiens
gccagattcctgctaggtgccctgctgtttctgcaaactgtgataatctccagaaacagtgaatgatgggctctggctcagtccaactaagcctgctgcargagatggggaactttaagaagctgtggctcatagcccaggtactggggagttttaaaactgctcctagcaagggaaaccctgggcaggcaggaaggggag

SEQ ID NO: 34245 - DNA, 201 bp, Homo sapiens
gggagggagggaaaggctgagggcaaggcatccaaatggacacgtagttgggaaaactaaaaagaacatgggtaagaagaagagtggcccttcctttctttcttgcctagaaggaatttttgtagctaaggcataatttacatacaataaaaatgcagtgtacattaagtattcagttcagtgagtttttggtttggtttg

SEQ ID NO: 34246 - DNA, 201 bp, Homo sapiens
gggagaatcttggggccacttggtgaactggcacacaactcttcccaaaggcgagcttaggatgaatggacgcttagttgccaggcccactccactcagawacgcctcttagaagcgggaataatcctcccagcgcagggagacaccattgatggagttcctcctccagggtcacataggcccaggggacccaaactcaca

SEQ ID NO: 34247 - DNA, 201 bp, Homo sapiens
acatcctgcaacggtgtcattccatctcgtgccccagggtgaaggccaagagaagagctgaccctgcagccccaagccctgcattccggtctccagcctgsagattaatctcttaaccatgacagcccttggcttcctgtcttggaagatgcacaccaccgagggcacactgtgattgactccacttcttcttttctagta

SEQ ID NO: 34248 - DNA, 201 bp, Homo sapiens
ccccagtgtgcctgagtgaggggaaaggagagagggaaggccctgtggatccttttagaggacacgaggtgctgtcctggcccagttccagtcccaactakcgaggagcctgtgccagattcctgctaggtgccctgctgtttctgcaaactgtgataatctccagaaacagtgaatgatgggctctggctcagtccaact

SEQ ID NO: 34249 - DNA, 201 bp, Homo sapiens
gtgcccatggttgtgggaatggaagcatttgctagaggtgggtggcactgacctgtccccagccgttagggagggagctgcactccgggctcaggtggggwgtggggtctcctggttttatccacacccccatccccactccatctcactgagaagccgccttgccacttctttctgagcccctgtttcttcatctgtaaa

SEQ ID NO: 34250 - DNA, 201 bp, Homo sapiens
cacgcctgtagtgctaacactttgagaggccgagacaggtggatcacctgagcccagcctggaaaacagcaagatcctgtctctgttttttttttttttttaatatatttatgtgtttattttaagaaaaaagaaagcagcaagcttgaatgaaaatcccagatctgatatttacaactttgaggcactttcagctactca

SEQ ID NO: 34251 - DNA, 201 bp, Homo sapiens
gtatttgggagaatcttggggccacttggtgaactggcacacaactcttcccaaaggcgagcttaggatgaatggacgcttagttgccaggcccactccaytcagatacgcctcttagaagcgggaataatcctcccagcgcagggagacaccattgatggagttcctcctccagggtcacataggcccaggggacccaaa

SEQ ID NO: 34252 - DNA, 201 bp, Homo sapiens
caaagtgctggggttacaggcgtgagccaccgcgcccggcctcagcatctgttaagtgggggtttatggctacctccctcacagagggtgtcatcagtatwtaccaacaggctatagactggtcttacattacagatcaattttactttattgattgatttttccatgtgaaggccatatgtggagcctctctcacctcct

SEQ ID NO: 34253 - DNA, 201 bp, Homo sapiens
agtgccaccacactggtgtccccatcccctatgccagcagtggcactgccattttggtcacaggcctggggccctggagtgtgacacatgtggggggcctsgcacagccccaacctgtgcctcagcctgcgccttgcactggccaggtgagaagggctggttgctctcctgcccccaaagaacccactggtgtttccatgg

SEQ ID NO: 34254 - DNA, 201 bp, Homo sapiens
tcacgcctgtagtgctaacactttgagaggccgagacaggtggatcacctgagcccagcctggaaaacagcaagatcctgtctctgttttttttttttttttaatatatttatgtgtttattttaagaaaaaagaaagcagcaagcttgaatgaaaatcccagatctgatatttacaactttgaggcactttcagctactc

SEQ ID NO: 34255 - DNA, 201 bp, Homo sapiens
cttgtctgtctgccccctttcctgtgcctctcctctccatcgctgggttttcttgtccttttccccagctaggtggttagatcaacttccaacccctcagkgccaaacagtgccaccacactggtgtccccatcccctatgccagcagtggcactgccattttggtcacaggcctggggccctggagtgtgacacatgtgg

SEQ ID NO: 34256 - DNA, 201 bp, Homo sapiens
ctcacgcctgtagtgctaacactttgagaggccgagacaggtggatcacctgagcccagcctggaaaacagcaagatcctgtctctgttttttttttttttttaatatatttatgtgtttattttaagaaaaaagaaagcagcaagcttgaatgaaaatcccagatctgatatttacaactttgaggcactttcagctact

SEQ ID NO: 34257 - DNA, 201 bp, Homo sapiens
aaagtgctggggttacaggcatgaacactgcacttggcccaaaggcaaggattttgtctgttttgtttcctgctatatctgtcgagaacagtgctaacacrtagtaggcacacgattttaaagagggtaagaggaaaatgaatgagtgaatggatgtgagcccctggcagagtatccggcctgcagtcagggctattgtgt

SEQ ID NO: 34258 - DNA, 201 bp, Homo sapiens
aatttttaaaaaattttttgaaaactaccaaaaaaatagggaaaaaaatttatcgtatttaacttatttttttcctaactccccaaacttacttgttaaawtttttttaatgagatggggtctcactatgttgcccaggctggtctcaaactcctggtctcaggcaatcctcccaccttggcctctcaaaatgctaagatt

SEQ ID NO: 34259 - DNA, 201 bp, Homo sapiens
caggcgccccgggcccgggcatgcgcgctgccgctgccgcgccccccgcccctacctaccccgcctcttcccctcccttcccctccctcgtcccggcatcsgggaggggccgcgcctccccgcagctggagctccgcgctgagaagccttccggagcccaccagtctcccctcacctgcccccgccatccctagagcctcc

SEQ ID NO: 34260 - DNA, 201 bp, Homo sapiens
ggactgaggaagcttctggaactcggggcccctagaaggaagtacccaggcagtgtggagctctgttgtgtggccctaggctgccaaaagatcttcatagyacaaggaggccgcagaagtgctgctgtctccaaaatgtgtccccagcatagtgccaggagccacactgttgggtgttggcttcttctttgcctccatgaa

SEQ ID NO: 34261 - DNA, 201 bp, Homo sapiens
atagagtgcctagcatatactgggactcagtaaatgttggctattatttttagttaatacttacgattttctttcttttcttttcttttttttttttttttgagatggagtctcactctgtcacccaggctggagtgcagtggcgcgatctcaactcactgcaacctctgcttcccaggtttaaatgattctcctgcctca

SEQ ID NO: 34262 - DNA, 201 bp, Homo sapiens
tgtctcccttcactacctcattgctccccttagcccctcccacagtctaacatgctgcatatttgatttgtcttatttattctgtctcctactagcatatragtttcatgaaggcaaggcttattttattttattttattttatttttagttttttgggacggggtgccactccgttacccaagctggagtgcagtggcac

SEQ ID NO: 34263 - DNA, 201 bp, Homo sapiens
catatgaggtgatttaatagagtgcctagcatatactgggactcagtaaatgttggctattatttttagttaatacttacgattttctttcttttcttttyttttttttttttttttgagatggagtctcactctgtcacccaggctggagtgcagtggcgcgatctcaactcactgcaacctctgcttcccaggtttaaa

SEQ ID NO: 34264 - DNA, 201 bp, Homo sapiens
ggcttaaggccaggctgggttcagcgtctccaagacaaaggggtcagccaacaggcgtcggaagggagccagagctgatgggcacgggaacaagccggagrtgcccaggccactctgacctgctgaggcgagggcttccctctaggcggagaggggagaagggacatttagagtgccagtgtggattgtgtcagccgatcc

SEQ ID NO: 34265 - DNA, 201 bp, Homo sapiens
ccagctacttgggaggctgaggcaagaggatcgcttgagcccaggaggtcaaggctgcatgagctatggtcgaggctgcatgggctatggtcaaggccgcrctccagcttgggcaacagagtgagaccttgtctctttaaaaacaaaacaggccgggtgaagtggctcatgcctgtaatcccagcactttgggaggctgag

SEQ ID NO: 34266 - DNA, 201 bp, Homo sapiens; identical to SEQ ID NO: 7595

SEQ ID NO: 34267 - DNA, 201 bp, Homo sapiens
tccacagagttctcagcccaggccagccaagccccagcccaggtccagtgaacacaggagctggggtcacccccatgtcatactgactaggggcttccccrgaagacatatcctggggtcctctccctcaaggctcagtcctcggaactagtctggaaatggcccctcacctgtgggcttgatacctgggactttgataca

SEQ ID NO: 34268 - DNA, 201 bp, Homo sapiens
actagctgcttatctctgccacctccgcctccatttgtccctggcttcctggggcccagagccatctctgccagagcagggaggccgattaagtgacccgygggctccttctgcctgactcagctcagctccagccctctctggggagaatgagtcattttttcaaccctgaaatgtttctcttcatgtgggaaaggggcg

SEQ ID NO: 34269 - DNA, 201 bp, Homo sapiens; identical to SEQ ID NO: 7596

SEQ ID NO: 34270 - DNA, 201 bp, Homo sapiens
tgagcaaaagggatcgagactgaacacactagatcagattctaaggttgtgatccaatgaaagttctaacaacagcttatcagaggattagttattcagtrtaggcgggaatcatccttagcctcacggtgatcgggcttgcacgataagccctctggtcagagttctctttgcacttcactaggccttgggcacctctag

SEQ ID NO: 34271 - DNA, 201 bp, Homo sapiens
aaagatgcatggagggaaagagtggggagcagaaacaagccatcaggtaccaggttggtggtcctggagccagtttatggttcatctagtcacaagggccmcgtctctgtgtttagtgtcagctaatgaagaaattgaatccagtacacaaaattggattttgcagttttgcaaccagtctcaacccccctctattgtgta

SEQ ID NO: 34272 - DNA, 201 bp, Homo sapiens
tcatttcctcctggaggcagccctgtgaagtgtggttacttttggccccttttccatattaggaaactgaggcactgagatagagtgacttgctaatccartgcggaagttggaattcacccacaggctactgggctcaagcccaggctccacctccctttgtaatccaagtacgctccagagcgcattacacccccagga

SEQ ID NO: 34273 - DNA, 201 bp, Homo sapiens; identical to SEQ ID NO: 7598

SEQ ID NO: 34274 - DNA, 201 bp, Homo sapiens
ggcacactgcctgggggcctggccaggctgaagtgactgtcaggtcgggttagctccttggaaggctggtgtgaccaactcaggggtgtcgcctgcctctyacccagggaggaggattttgccacctctgcttggataggcttgtgaagtgggcctcaggaaggctcactggttctaaatcttcaaaaaatgggattttag

SEQ ID NO: 34275 - DNA, 201 bp, Homo sapiens
aacccctgcccaccccagtctgtttctttatctgcctccctgctgggctgtgtatttccagcatggccctgagttggtgctcagctgttagcacatgacayggtgtcactgaacacgttaccccaccttcaggagacccttcctgtcttgtgggtgtgggttttgcaggaagcatctcttggaacagaggagaaccccaag

SEQ ID NO: 34276 - DNA, 201 bp, Homo sapiens
gccgaagccgcgagctcgcccgctggagctgagcgcgccgcctgggccaggcagccgagccgtccgagcagctgggctgggagcagggaacccggagctgsgaatcgggagccgggcgcggggagctgcgcgaagccggggcggagcacgcgagctatggtgagtgctgcgcgcggaggtctggtccggtccagcccagcc

SEQ ID NO: 34277 - DNA, 201 bp, Homo sapiens
gggaggtctccagggaggacacccctaggccaggctgacctttgttaagggagtgggacagggtcaggaaagggcagggatgaaggaaataagttccccarctgcgtcatgacctgaaacccaatttcacagctgctcccactctgctgccctccccaagctgtgccctggaaatgtccttgggccctcaggaacgctgat

SEQ ID NO: 34278 - DNA, 201 bp, Homo sapiens
atggaaagtgcttagcacagtctggccaagaattttctatttatttttaggttgtattctcaggacccactgacttctggccaaactcttcaattactcakaaaacagtattaaattttttttaaaaagcttatttctccagcaccttccatgagccctgcaggcaacgtgcttagcgcctacctctcattatcccatttg

SEQ ID NO: 34279 - DNA, 201 bp, Homo sapiens
cgggccacatcttaagcatgtctgtctggcagatatttcccacaaccctgctgcacaccactgggtgctgaggatggggtgggggagggtgcagtaaggcygcccttagtgagctcaagtccacggaggaaagtgggacaaaacggccctgatactatcagagaatgaccagcccagggctggcaggttgcttctgaggag

SEQ ID NO: 34280 - DNA, 201 bp, Homo sapiens
gagtagctgctgccctgcccccttgcgttcctaaatgcccccttagaaaagggccgaggcagggctgggtccagatggggtgctagaggcagcatggttgycaaaacacacagggatgatgtggtgtggggcttgggtatgggtcaggcatgaggaagcctcttcttcttcttaatttggctcctgggtcagctggaggcc

SEQ ID NO: 34281 - DNA, 201 bp, Homo sapiens
tggtctccctttcctgacctcgtgatctgcccgcctcggcctcccaaagtgctggggttacaggcgtgagccaccgcgcccggcctcagcatctgttaagygggggtttatggctacctccctcacagagggtgtcatcagtatttaccaacaggctatagactggtcttacattacagatcaattttactttattgattg

SEQ ID NO: 34282 - DNA, 201 bp, Homo sapiens
ggggcattcctcccacagagagagattaaatgagatgccacacactgggcaccggcatacaataagggttcagctaatgggagtggtcattttattgttamaatcttgatgacaaatagtattcattatgtagctgtcatctgcagccggaggtgagccaaccgcaattcaaatccattacagtgactggcctgtgagcag

SEQ ID NO: 34283 - DNA, 201 bp, Homo sapiens
gggagaggaacattcttcccctggagtggagctgggcagagtatcaggtgacccctgagccacctgggaaagcagtgaccaccccagatattaacagtaayctcattacccaggagcaggtgctggtgctggccacatctgagcaaacatcaggccagtcaaagcaaatctggccgggcgcagtagcttacgcctgtaatc

SEQ ID NO: 34284 - DNA, 201 bp, Homo sapiens
tggccacgctgcgctggggtggggaggggactcaggggcctagaaaagagcagggccttcatctgagcattcttccatccctcctgggtaaggcacacagstattcattcattccacaaagataggttgtacttaagaaataattgcttgattagttaactataatggtttgtaggtgttttaccaaatgtgcctggctca

SEQ ID NO: 34285 - DNA, 201 bp, Homo sapiens
gtaaacacttaagaagtgcgaaggggtggatccaagttagaaataagaatggggaattagccaaagccagggcctctcagtcccctgtgccccaacatctrttcttctgatggcagatggttcacctagttgagcagcctctgggggctctgctcagcatcccacccactgactcggtcgctcaccccatgagagagatta

SEQ ID NO: 34286 - DNA, 201 bp, Homo sapiens
agggtttcaccatgttgtccaggctggtcttgaactcctgacctcaggtgatccactggcctcggccttccaaagggtaccacaattttttttaagttgcrcaactttgtaatcagaatcctaacaaaacaataattagaaacttgaggagtacctcagcatggctggaggctgccgtggggaaagcaccagctgggaaat

SEQ ID NO: 34287 - DNA, 201 bp, Homo sapiens
tgcctcagccccctaccgtggccatgatgccaactgtctgtgccaggaatagcggagaaggcacaggagccctgagcacatcagcccagcatggccaccargttccccccaggcatcctatcaccactgcttctgctctcttcttccaagcagaggaagaaaggcttttcctgcctcccagctgcacagctgccaaggtgg

SEQ ID NO: 34288 - DNA, 201 bp, Homo sapiens
ggaggggctcccgcagagtgtcatctccctccttccttaccttgtgaccagccgaatttgacctgttgtccgttccttctactttcaggaagaacactagktccctgccctttaccctcctccagctgacaggtgtatatgggtccgtcttgggaccttgcgcttcatgtgcttcctggctagtgggggacaccagctaga

SEQ ID NO: 34289 - DNA, 201 bp, Homo sapiens
agattaagtgactgtactccagcctgggtgacagagtgagattctgtctcaaaaaaaaaaaaaaaaaaagaaaaagaaaaaagaaagttctgccaggagcyagccaggagctgaaagactaaagggagctacagtaggagatcaagggggtcagggggtcaccggggaaggcatgccgaggggacagagcccagtgggcct

SEQ ID NO: 34290 - DNA, 201 bp, Homo sapiens
gtgtcagggagttctctgaaattttctgaaactcattcacgaactctggcttaaaggcctctgagctagaaaggggaactgaaaggggacacctacctttwtaccccaccttttttgtctggtctttctagcattaaccccctagacacacctaagggctgatgccggggggaacctgtcttgattgctctgggccaaatc

SEQ ID NO: 34291 - DNA, 201 bp, Homo sapiens
tttcaccctcttagtcaggatggtctccctttcctgacctcgtgatctgcccgcctcggcctcccaaagtgctggggttacaggcgtgagccaccgcgccyggcctcagcatctgttaagtgggggtttatggctacctccctcacagagggtgtcatcagtatttaccaacaggctatagactggtcttacattacagat

SEQ ID NO: 34292 - DNA, 201 bp, Homo sapiens
cttaataaatgcatggtgtggattctgtcattacttttcccttttctgagccagatcaaggtccggaggctcctaagtggcagaggagccagccgcagatkggctcactgtacaacagggcgttagatctgtgatgctctctgtcacccattggagaagcccaacgtccaagggctcagcctctgccaaaggctgccctct

SEQ ID NO: 34293 - DNA, 201 bp, Homo sapiens
ctgtgtaacacaaatactaattacaactgactccatgagctgcttcctggttgagcacaattactgggcagctcagtcatcaccattataccatatcattyaatgagacgggttaactttgtcttaagttgtacgtgattagatcagcacattgtcagagagcgcttggtctcttcagattgggacttccccagcctggtc

SEQ ID NO: 34294 - DNA, 201 bp, Homo sapiens
ccacagtggctagttaactatgtgacctcaggaaagtcaccttaccccatctgcaaattcagcatctctttttttttttgagactgagtctcgctctgtcrcccaggctggagtgcagtggcgcgatccccgctcactgcaagctctgcctcccgggttcatgccattctcctgcctcagcctcccgcgtagctgggacta

SEQ ID NO: 34295 - DNA, 201 bp, Homo sapiens
gagctgcaggtaacttgagcgccggctgctagggaggctgggatggcctccaggtttcagacagggccctggactgggggcttttatactcatttcatctrgtccttgaaactatgtgacaaaggaaggatggttgttatgcccagtccacagatggaaaaactgatgctcagaaaggtcaagttacctgctgaagggcac

SEQ ID NO: 34296 - DNA, 201 bp, Homo sapiens
gggttgctgtgtttagttttttaaataaaggactctatggaatgaaaaaaaatctgtttgcaaaccactgttcagatccagcaactacttccccattttayagatgaaaaatggacagcaaagctcattttttccccataaatgacaataatattcaggcattgttctaagtcttgttactcgttttatcttcacaagcct

SEQ ID NO: 34297 - DNA, 201 bp, Homo sapiens
aggaggctgcagggtagggttggaagagcctagatgaagattttcatcctggttggccccttacacaaccccttctattccttgatccttcgttttcttcrttcgtcaaaagtagtttatgatcagggacagagcagagggctgggagagccaaggtgaccagagtcttggccctttaagacttcatcgtccagtggcagg

SEQ ID NO: 34298 - DNA, 201 bp, Homo sapiens
cgtggagcaggaggtgggaaccacaatttattgagcattaactttgagctaagctgtgtgctgagcaatgaatgcattgactcaattcatacctcagtcarctccaaggaagtgggtcctattgtgtccccatttaataggtgaggaggctgaggcttggtgaggtgaggtgactcggccaaggccacacaactcctgact

SEQ ID NO: 34299 - DNA, 201 bp, Homo sapiens
agtgaacctgggttttagacctccacagtggctagttaactatgtgacctcaggaaagtcaccttaccccatctgcaaattcagcatctctttttttttttgagactgagtctcgctctgtcgcccaggctggagtgcagtggcgcgatccccgctcactgcaagctctgcctcccgggttcatgccattctcctgcctca

SEQ ID NO: 34300 - DNA, 201 bp, Homo sapiens
gcatgtacttgaccaagcgcccacagagtgcctgatgctggggagatggtagcagacaagaccaccatagccttcgtcccacagggcctgtggtttggtcrgcgaggcggatattatttaactaagagaaagtggagctgagaaagtctaccgtggagacctaattcagatcttggaacacgggtggggggtggtcagaaa

SEQ ID NO: 34301 - DNA, 201 bp, Homo sapiens
ctggtttggctgcaggtccaccctgattggctggggctagacaaggggagttggccttggcattgtgggcaggtgaggggacaagcacagaggcatcagaktccaggagggaatagtggggcgcagagggcagagtggaaacaataagtagtttagagtcagacagacctggtgtccagtcctgccctgtcactttctggc

SEQ ID NO: 34302 - DNA, 201 bp, Homo sapiens
gacaagtcaaagaaagcccccttcccacagccgggagctccgttgtggaaatcactgcgctaggggaagctggcagcaagtttggaaacaaggtggctggygaaagtgccaccggcagcttcggagagcagccggggcaccccttgagcctctgggtggcgtcgggacagtaggcaggactccctgtgtgttgatgctctg

SEQ ID NO: 34303 - DNA, 201 bp, Homo sapiens
tcatgttggccaggctggtcttgaactcctggactcaggtgattctcctgtcttggcctcccaaagtgctgggatttacaggcatgagccaccgtgcccggcgcagttgttaactgtttaccagcacgccactgccttcaggacctgccctcctcacaaattcacctgtcctttgaggtccttgttccccagcagctgagt

SEQ ID NO: 34304 - DNA, 201 bp, Homo sapiens
aaagcccaaggcaggcagggcctggctctggttccccttggcccagactatgagcccagcacccaagttgctcaggctggcctggtcgatgttgccgggcwctcacttcctctgtctgtcctgtccaggccgatgccatctacaacatgataggataccccaacttcatcatggatcccaaggagctggacaaagtgttta

SEQ ID NO: 34305 - DNA, 201 bp, Homo sapiens
tgagtctgggaagcagctattgttggctgagaacgtggggcggcagaaggatgggggctgagaggaggcaggaaacatgctcataggtccaggcccagccycctggtccccacaccccactgggtccaggtgaggccattttaggacaagtcaaagaaagcccccttcccacagccgggagctccgttgtggaaatcactg

SEQ ID NO: 34306 - DNA, 201 bp, Homo sapiens
atcatgttggccaggctggtcttgaactcctggactcaggtgattctcctgtcttggcctcccaaagtgctgggatttacaggcatgagccaccgtgcccsgcgcagttgttaactgtttaccagcacgccactgccttcaggacctgccctcctcacaaattcacctgtcctttgaggtccttgttccccagcagctgag

SEQ ID NO: 34307 - DNA, 201 bp, Homo sapiens
ctggaacctggtgcggaaaacaagctccttccttgaccagcgctttcaggacgccgatgagaagttcatggaagtcatgtacgggaccaagaaggtgagcytgctactgcgtatgcctgaatatgggctgagcgcctactttatgccaaggtgtctatgggagcacaggaagggacctcagccagctgggggtgggtagaa

SEQ ID NO: 34308 - DNA, 201 bp, Homo sapiens
gatgtcaccccagttggcacctaagacctctgagatgctgctcagttaaatggattcttagctctgcaggcctcgccccacctccctacgctgctccaaascatccccctcctgaaaccagaaatataacccccctattatgaacctcatctcctcgaacctgagcccctattttccttaagatttggatctctctttggg

SEQ ID NO: 34309 - DNA, 201 bp, Homo sapiens
tgggatgtgtggtacccctgcttaaccttcaggaacacccctgagacctgtagggattactgtccccacttacagatgtggaaactgaggctctgagaggkgcaaccactggccttcggtcaccgagctaaaaatccgagagcgacacgtcaaaccctgtctgtctcaaacctcttcccagtggactcttcttaagaggct

SEQ ID NO: 34310 - DNA, 201 bp, Homo sapiens
catcatgttggccaggctggtcttgaactcctggactcaggtgattctcctgtcttggcctcccaaagtgctgggatttacaggcatgagccaccgtgcccggcgcagttgttaactgtttaccagcacgccactgccttcaggacctgccctcctcacaaattcacctgtcctttgaggtccttgttccccagcagctga

SEQ ID NO: 34311 - DNA, 201 bp, Homo sapiens
cattggggtgggtctccatgctggggcttcatagcttccagacacagagcagctaggcaacaagcatttattgagcacctgtggtatacaagtgactgcastcaacactgaagcgtttcctatggtagaagacccaggcttttcccttgaagagcttacattgcacgtgcttagggagcagtaacccaccaagcccccgca

SEQ ID NO: 34312 - DNA, 201 bp, Homo sapiens
cggtgcgctgtcagatggcgccaagcccaagctctttcctttgcttcctgtagaagcccgtcctagagccctgggctgtgaggaggagcagccccacaggrtcacactgtccttttcccttgcagaccttggcacccgccatcaactggttgccttttctcaacaccatcttctaccccgtggagatcaatgaatccgagc

SEQ ID NO: 34313 - DNA, 201 bp, Homo sapiens
cattcttagcccaagtggctcttcccagctcacctagctggcagggatgcactggagccccctggcccccaagtccgctgcgcacatctcttaccagctcygcaggtattttaccatcagccacggtgggaagagttacccagaaactgagagccagttgttaactgttttgtttttgtttttgttttgagacagagcttc

SEQ ID NO: 34314 - DNA, 201 bp, Homo sapiens
cccgccaccacgcccggctaatttttttgtatttttagtagagaccgggtttcaccgtgttagccaggatggtctcgatctcctgtcttcgtgagttgccygcctcggcctcccagagtgttgggattacaggcgtgagccaccgcgcccggcctgtggttcttaactttaagtcacagagtcctttgagaacagatcaaa

SEQ ID NO: 34315 - DNA, 201 bp, Homo sapiens
tgcccaggccagtggtagtggtgagggagaggcagacagagaaactgagtagagtgggcagggcctggtgattgattggagtggggcaggggatcagcccrtcgctttgacaaatgagaaaacagagcccagaaaggttgcatgagccaccggagtcacacagtccaagcgttagagccagacgctaagctggagcctccc

SEQ ID NO: 34316 - DNA, 201 bp, Homo sapiens
gaattacaggcaggcaccaccacgcccggctaatttttgtatttttagtagagtcggggtttcaccatgttggtcaggctggtctcgaactcctgacctcrtaatccacccgcctcggcgtcccaaagtgctgggattacaggcatgagccaccgcacctggcctgtggttctttttttttttttaatttgagacagagtc

SEQ ID NO: 34317 - DNA, 201 bp, Homo sapiens; identical to SEQ ID NO: 7599

SEQ ID NO: 34318 - DNA, 201 bp, Homo sapiens
cgaaaggcaagttccccacagattgagaacttcccaagtcactggactgtgcacagcacatgtgccctgtcattagagagatgcacggaagggcccaaagyaccagtgaagggattcctggatctggtgaatgagaagacgaggtgatcacccagggcccttctggttctagggttctagaggtttcttaaacttaagatg

SEQ ID NO: 34319 - DNA, 201 bp, Homo sapiens
caagtccacactttcatgtctacggtgagagaggaaccatgagcaaatgtttacaattttttgtgcttctgctcaatttttttctctccaattgactgggkaagcctcctgccatagtcaaagggcttcattcatttgttcattcactcactcaccaaacaagtctgtctggcacaacacgaggcatgggggccgtggtca

SEQ ID NO: 34320 - DNA, 201 bp, Homo sapiens
gaggcgggatctgcccgtgcagcaggagtgggccttggagactgatgggcccaggttcaaacctggcatcctcactttttgcattgtcaccttggacagcrtgtcacctctctaagctttattctcctgtctctaatatggagctcctggggcagtattttgcccagtagttagaaacgctcaatcagatcctgtttcaga

SEQ ID NO: 34321 - DNA, 201 bp, Homo sapiens
tccgtgtccacacccacacctgtgcaggtctttgaagctaggggagcccaggggtgtcagtgacctgatgggtgaaacaggcagaccctggcaggggaggracacccctaggctggctgtgtcactcaggcatcatggacacaaggggcaagagacaggtatcatttgtcctggttctagagagaggcagaggcagcaata

SEQ ID NO: 34322 - DNA, 201 bp, Homo sapiens
tttcttattttgtgggtgacaggtttgttctagacaggcagaggagtgccatggcagagcgccttggagacagcccggcctaagctcagatcctggcctcrccgctggtcgggtggcctgggacagttcttacatcatctgcaatgtggagacgggggcattcctcccacagagagagattaaatgagatgccacacactg

SEQ ID NO: 34323 - DNA, 201 bp, Homo sapiens
acgagaaggtaagcgtgcctctcccctcccagcctgcctcccagcacggtccttcctgctccgtgtccacacccacacctgtgcaggtctttgaagctagrggagcccaggggtgtcagtgacctgatgggtgaaacaggcagaccctggcaggggagggacacccctaggctggctgtgtcactcaggcatcatggacac

SEQ ID NO: 34324 - DNA, 201 bp, Homo sapiens
gtggggcaccctgggccagcagctgctccgtgccgagtgtgtttccccatcagtcaaacggcttgtaagccccgagggtcattgaatggctcaacgggacrctatttgtgaagtcccagcacagagcctggcattcaggaaatggcagggggtgggagtgagggtatcagtggcctcttggtccggtgactaaaataactt

SEQ ID NO: 34325 - DNA, 201 bp, Homo sapiens
ctggcctgggcttgccctcgagagactattacctgaacaaaactgaaaacgagaaggtaagcgtgcctctcccctcccagcctgcctcccagcacggtccytcctgctccgtgtccacacccacacctgtgcaggtctttgaagctaggggagcccaggggtgtcagtgacctgatgggtgaaacaggcagaccctggcag

SEQ ID NO: 34326 - DNA, 201 bp, Homo sapiens
ctgagggaggtgataggaaatgaccagttctcgtatgtgctgatgggatacatcacgctcgggccccagagagtggctggaagaggccccgctacagagcrgtagaggctggtgtgccaagctcacctggcacagcttccccaacccagacagcagctagcaagaccccaacaatcctccccagagaggaggcagagctga

SEQ ID NO: 34327 - DNA, 201 bp, Homo sapiens
gcacagatctatcagctctgggaggggaggctgttttcccctttttagagaaagaacggaaaaaggctggaggtcccagagctggttcctcctggggatgstgatccaggtctgctcattcttagctcattcttagcccaagtggctcttcccagctcacctagctggcagggatgcactggagccccctggcccccaagt

SEQ ID NO: 34328 - DNA, 201 bp, Homo sapiens
cgatgaagaccaatcctttcctttgctcttgaggctcagagaggtcaggcgactgctccagggtcacagagcaagtcagcggcagaaccagaattcacatstgggtctccccgccacctcatcacctccctgcctgctctccctccccacagctcgggggctggaacatcacaggtccctgggccaaggacaacttccagg

SEQ ID NO: 34329 - DNA, 201 bp, Homo sapiens
cctatttgaattggttggtttgtgacccacagtactccttggctgcaggtgtggaaaatggagctcactggtgtgccccagagggtgtgagtcacaagtgraatgtcctagtcagttaaaacagccgtctccatggagatggagctaggcacatgtgtttaagataggagttcactaaagcagccaggatggaaaatgtga

SEQ ID NO: 34330 - DNA, 201 bp, Homo sapiens
aggtggcatctggaccagggcactgaggtgagggagaagggaacagaatctccgggtgtctggggtaaggtctgagaagccactgcaggagggagatgctscttgctggagttggcaagggcggtggaaaacggccccaggagttggctgtaagcctggtgaacgtgcctagcccctccaaggaggaagcaaaaagtaaat

SEQ ID NO: 34331 - DNA, 201 bp, Homo sapiens
gccaggacttctggctcccactctggcgttctgtgcattcctcagggcagggggttgggaaaagggtctgtggtcatttctggagcctgaaaaggggcatrgcaggaaggggccagcagacacatccagatcctctctggcccttatcttacttgtaagtcaccgagtcagggcctgatatgcagtaagtgccaaataagt

SEQ ID NO: 34332 - DNA, 201 bp, Homo sapiens
gctagtccccagcagagtctgaactcagagctgtgaatcagacactcttccattacttctgggggcctgaggaccttccccttcctttctaggaccctcaygccaaaggctgtttgggcctgagccccattttctaccccatttctccagctgagatgaagctcagaagcattcttctcttctctcccagtttcaaaccta

SEQ ID NO: 34333 - DNA, 201 bp, Homo sapiens
tgggttcaagtgattctcctgcctcagcctcctgagtagctgggattataggcacctcccactatgctcagctaatttttgtatttttagtagagacgggktttcgccatgttggccaggttggtctcaaactcctgaccttaggtgatccacacacctcagcctcccaaagtgccaggattacaggcgtgagccaccaca

SEQ ID NO: 34334 - DNA, 201 bp, Homo sapiens
ttgttcatagcactgtcgtgtcttgtggtcatttctttgagtttctgctgggtgccaggcacagggctgggctctgaattttataggcataaataagaccygctttctgtcccaaggagctcacggtctaatggtggacacaggtatgcagagcggtgagggcctttgggaatgaacatcttaggagagccttcatcaaaa

SEQ ID NO: 34335 - DNA, 201 bp, Homo sapiens
gacatccccagcgtccaggaggccccatatggctggatgtggagaaggatggatgctgggaagacaaacccaggccagctgcttgctcagggcccagccarccctctttgttcctagcagcccttggggcaggccctgtatcagtctgccctgatggggggtccattccactcagaacagagggttctctctggggatcga

SEQ ID NO: 34336 - DNA, 201 bp, Homo sapiens
tatctgaaaaccaagaccggcctctgtcccatgcaccaggcaggggtgttcgtaccacacgttatccacaggggaagaacactgtcctgctggtgggcacrtgcggtcaacccggggacacgtctgtgaacccaactggcagagggagagaaacgtggtcgattctttttctttgcagtcagcaaaatttcgggagcgcct

SEQ ID NO: 34337 - DNA, 201 bp, Homo sapiens
tcacttgaacccaggaggtggaggttgcagtgagccgagattgcgcccctgcgctccagcctagtgacagagcgagactctgtctcaaaaaaaaaaaaaawaaatataaaaaaaggaaaccttaggtgggcatccggcctcatcaccctctcatcttccagatgtccttcctctccagaaagggacactgggctctgttct

SEQ ID NO: 34338 - DNA, 201 bp, Homo sapiens
atcacttgaacccaggaggtggaggttgcagtgagccgagattgcgcccctgcgctccagcctagtgacagagcgagactctgtctcaaaaaaaaaaaaaataaatataaaaaaaggaaaccttaggtgggcatccggcctcatcaccctctcatcttccagatgtccttcctctccagaaagggacactgggctctgttc

SEQ ID NO: 34339 - DNA, 201 bp, Homo sapiens
cacttgaacccaggagacggaggttgcagtgagccaagttcgtgccactgcactccagcctgggcgacagagcgagactcagtgtcaaaaaaaaaaagggsggggggaattggtatattccagtgcctatttggactaaaaggagttcaagacaatgcactctacagactccccagaccagggctccccttgggtgtctca

SEQ ID NO: 34340 - DNA, 201 bp, Homo sapiens
tggtcttggacagttgcacagatctctaactataagcaggttgctatgggagtttatgtcagaggagccatccctggcagagagcaggagcagggaagacrtccctgaggaagaaggatttgagaagagatctgaaagatgtgttaagtgttaaccaggcaaataaatggagagaaaaagagtctaggctgtgagaacagc

SEQ ID NO: 34341 - DNA, 201 bp, Homo sapiens
atcacttgaacccaggagacggaggttgcagtgagccaagttcgtgccactgcactccagcctgggcgacagagcgagactcagtgtcaaaaaaaaaaagsggggggggaattggtatattccagtgcctatttggactaaaaggagttcaagacaatgcactctacagactccccagaccagggctccccttgggtgtct

SEQ ID NO: 34342 - DNA, 201 bp, Homo sapiens
caggagaatcacttgaacccaggagacggaggttgcagtgagccaagttcgtgccactgcactccagcctgggcgacagagcgagactcagtgtcaaaaamaaaaaggggggggggaattggtatattccagtgcctatttggactaaaaggagttcaagacaatgcactctacagactccccagaccagggctccccttg

SEQ ID NO: 34343 - DNA, 201 bp, Homo sapiens
ctcccaggttcaagcgattcttctgcctcaacctcctgagtagctgggatcacaggcgcccgccaccatgcctggctaattttttgtattcttagtagagrcatggtttcaccatgttggccaggctggtctggaactcctgacctcaggtgatccacccacctcggcctcccaaagtgctgggattacaggcgtgagcca

SEQ ID NO: 34344 - DNA, 201 bp, Homo sapiens
ggaaactgaggcactgagatagagtgacttgctaatccaatgcggaagttggaattcacccacaggctactgggctcaagcccaggctccacctccctttrtaatccaagtacgctccagagcgcattacacccccaggagagctgcccttccagatccagctgcccatcgtgttccttgatcggtgcctttgtcccactt

SEQ ID NO: 34345 - DNA, 201 bp, Homo sapiens
tagccgggcgtgatggaggatgcctgtaatcccagctactcgggaggctgaggcaggagaatcacttgaacccaggagacggaggttgcagtgagccaagwtcgtgccactgcactccagcctgggcgacagagcgagactcagtgtcaaaaaaaaaaaggggggggggaattggtatattccagtgcctatttggactaa

SEQ ID NO: 34346 - DNA, 201 bp, Homo sapiens
gctggagtacagtggagtgacctcaactcactgcaacctccatctcccaggttcaagcgattcttctgcctcaacctcctgagtagctgggatcacaggcrcccgccaccatgcctggctaattttttgtattcttagtagagacatggtttcaccatgttggccaggctggtctggaactcctgacctcaggtgatccac

SEQ ID NO: 34347 - DNA, 201 bp, Homo sapiens
ttctgaaccccctcctggtcagtgtggaccctggccagcacgtctgcacagctcttggctcagagcagcgggagctggccagactccggcagccagtgttrccctgagactgcccctcggagctccaaagatatgtcttcaccagaaaccaggggggagtccccacgggccagctcctgatgatcagacccaaaacatttc

SEQ ID NO: 34348 - DNA, 201 bp, Homo sapiens
gttttgtttgaaaccaagtctcgatctgtcgcccaggctggagtacagtggcgctatctcggctcactgcaacctccgccatctgggttcaagcgattctygtgcctcagcctgccgagtagctgggactacaagcacccgccaccacacccggataacttttgtatttttagtagagacagggtttcaccaggttggcca

SEQ ID NO: 34349 - DNA, 201 bp, Homo sapiens
acctttagatcaattggataaggaaactgaggctcagagaggcggtaccttgcccaaagcttgtggtggcagagctgggattagaaagcagaccctcagcrgccgaggcctgtgttcctcctaatacccaacgtggttgcttttgcagacttccacacagagattcttttttttttttttttttttttcgagatggaggtt

SEQ ID NO: 34350 - DNA, 201 bp, Homo sapiens
aacaccaaggctccgaaaagagggactgccccaaagccacccagtgggcaagtggggccgcattgcaaactccactgtctgttgttccagaaaactccacrgccagcgtgagcgaggcagagagaaaggcgcaagtatactaccgtgcgtgcatgaacgagaccaggatcgaggagctcagggccaaacctctaatggagt

SEQ ID NO: 34351 - DNA, 201 bp, Homo sapiens
tttttcttattcagaaaaaggtctgtgcctgatttcactttgttttgttttgtttgaaaccaagtctcgatctgtcgcccaggctggagtacagtggcgckatctcggctcactgcaacctccgccatctgggttcaagcgattcttgtgcctcagcctgccgagtagctgggactacaagcacccgccaccacacccgga

SEQ ID NO: 34352 - DNA, 201 bp, Homo sapiens
aacactatcctgggcattttatttggtcacttcagccatcagaacatcgcctggtagggggaatggatgcaaagggaggtgggagtctagagagagattcscagcagtcatgatgaacagccagcatgtccattccacctttagatcaattggataaggaaactgaggctcagagaggcggtaccttgcccaaagcttgtg

SEQ ID NO: 34353 - DNA, 201 bp, Homo sapiens
cttccaccacgatggtgaggcctccccagccacgtggaactggaagtccattaaacctctttcttttgtaaattgcccagtcttgggtatgtctgtatcarcagtgggaaaacagactaatacactggataatttgtaaacaacagaaatttatttctcactgttctggacgctgtgaagtccaagatcaaggcacgggct

SEQ ID NO: 34354 - DNA, 201 bp, Homo sapiens
ggcagagggagagaaacgtggtcgattctttttctttgcagtcagcaaaatttcgggagcgccttcagcttgccaggctctgtccaggggccctcacataytcacggtgacggcattcctcactgccactccgacaggcagatgtcagagctcctttgcagctgagaacaccaaggctccgaaaagagggactgccccaaa

SEQ ID NO: 34355 - DNA, 201 bp, Homo sapiens
atcgccgacaacgggggtctcaaggcggcctatcgggtgagagccccgctccccacacgcgcacggtcccagtgctggctccttccagatgcctgtccgtrgaggatcatcacggacaaccagggcaggcgcagcagccgtgcgagcttccgtttcctcttctgcgaaattgggggtggcgaggaccaatcgcgatgccga

SEQ ID NO: 34356 - DNA, 201 bp, Homo sapiens
gctgggactacaaacctgagcccccatgcccggccaggagcagcttttaatgcctagttgcctatatacaagcccctaggactttccaggttgtcctagaygccgtgagggtgaggtggcaccagctggtagatcacctttggcctgggataccccagacattggggctgagtgacagctcatctctgaggttgatccatt

SEQ ID NO: 34357 - DNA, 201 bp, Homo sapiens
ggcttgcagagagatagatttgaaattaatgagtgtgacagtcttaacacagtgcctggatagtagttattaattacagtacaagggagggttttctactrgggatacatacaaatcactacagatacatacagatggggcagcatgggacacagaggaagacttcatagaggagatgacatttcatctgggttttggagg

SEQ ID NO: 34358 - DNA, 201 bp, Homo sapiens
agaggaggaaaaaatgttccagatagagacaacagcagctacaaaggtcttgggggaagaagaaacttgtagaaactgaggagttgtgtgaggaggttggkgggggagggggcgctggcagcacaagatgagggcccagagtgggcaggggccatggggcctggtgaagggtttggatttcattccaggacagtggagggt

SEQ ID NO: 34359 - DNA, 201 bp, Homo sapiens
atggtcttggacagttgcacagatctctaactataagcaggttgctatgggagtttatgtcagaggagccatccctggcagagagcaggagcagggaagaygtccctgaggaagaaggatttgagaagagatctgaaagatgtgttaagtgttaaccaggcaaataaatggagagaaaaagagtctaggctgtgagaacag

SEQ ID NO: 34360 - DNA, 201 bp, Homo sapiens
gggacagggatgttttctcttgtgtcccacagcttacacagggcctagcatagagtaagcatctagtatctggtcagagggtggatggatacagttctgcyaggaaagtctttgtgaaggagctggggtttgagggatctttgaaggaggcaaaggaaggggcttcagggccagagagaaatgaacatgaaatgagggaat

SEQ ID NO: 34361 - DNA, 201 bp, Homo sapiens
tgtacagcctgtgttcagcatcagctcaggggtgagcggatagggaccttcaaggaagggggtgtggaagtttaagacccagaaaggaaaggacctgagtyagggggaggaagaaggattagcctaggaagcatttaatggggagagaaaggaaactcagaaggctgaaaaagttggaattcaaactgaagcaacatttgc

SEQ ID NO: 34362 - DNA, 201 bp, Homo sapiens
gctgtagaagtggtagtcacctctccagcccagccctgtagcatacaccattggggtgggtctccatgctggggcttcatagcttccagacacagagcagstaggcaacaagcatttattgagcacctgtggtatacaagtgactgcactcaacactgaagcgtttcctatggtagaagacccaggcttttcccttgaaga

SEQ ID NO: 34363 - DNA, 201 bp, Homo sapiens
cagcctgggcgacagagcgagactcagtgtcaaaaaaaaaaaggggggggggaattggtatattccagtgcctatttggactaaaaggagttcaagacaaygcactctacagactccccagaccagggctccccttgggtgtctcatagaggcctcaaacttcgagtgtctggagctgagctttaggcagtagctgtgtgc

SEQ ID NO: 34364 - DNA, 201 bp, Homo sapiens
cgtgatatagagccttctggccaatttcaggaattggggctgggtgcggtggctgacgcctgtaatcccagcactttgggaggccgagacaggcagaccayctgaggtcaggagtttgagaacagcctggccaacacagtgaaaccctgtctctactaaaaatacaaaaattagccgggcgtgatggaggatgcctgtaat

SEQ ID NO: 34365 - DNA, 201 bp, Homo sapiens
ctcacaatgcctgtgaggtgagtactgttattagccccactttgcacaggggaccaccaatagtattacttcttccccggaaacgtaaaacacagaacagyacctggtccttagaagcaccacgcgactgttcagtgttattattttcctcccagtttgtattctgggaaaccccaggccaggtgggctctacctgccgtt

SEQ ID NO: 34366 - DNA, 201 bp, Homo sapiens
ctatctcggctcactgcaacctccgccatctgggttcaagcgattcttgtgcctcagcctgccgagtagctgggactacaagcacccgccaccacacccgrataacttttgtatttttagtagagacagggtttcaccaggttggccaggctggtctcaaactcctgacctcaagtgatccacccaccttggcctcccaaa

SEQ ID NO: 34367 - DNA, 201 bp, Homo sapiens
ttcccagacacccctatcccagcagcatgtgggggattcccagacacccctatcccagcagcgcgtgggggattcccagacacccctatcccagcagcatrcgggggattcccagacacccctatcataccccacagctctgcctgcctgggcgttcatttcctccctgaggagtgatgtggagagggcattccaatgaaa

SEQ ID NO: 34368 - DNA, 201 bp, Homo sapiens
tgctgccttcctgtttggggaatggttacgtggattgattgattcttagtctgtttgtgctattgtaacaaaataccacagactggatgatatggtttggstgtgtccccacccaaatctcatcctgaattgtagctccctcaattcccacattttgtggcaaggacccagtgggaggtcattgaatcacgggggcggctc

SEQ ID NO: 34369 - DNA, 201 bp, Homo sapiens
cctcattttccttgtctctgaaatgggatggtgatatccgcctcaggggaccagggtgaggttgtgacagcagcacagggcctgctgtagatgctgtgagyggtggcagtggtggaattatttttgttctgcagagcaaggcgtctcctttatcagcaccccttccccccagcacaggatggggctcctgaggcctgtgac

SEQ ID NO: 34370 - DNA, 201 bp, Homo sapiens
gttagataccatctggcactcttttcctgctctgaggccaggaggctgagggtgatgttgtttgtgcattataatttggtttgttccagccgatttctcakcctgaggggcccccgcagtgcctcagccccctaccgtggccatgatgccaactgtctgtgccaggaatagcggagaaggcacaggagccctgagcacatc

SEQ ID NO: 34371 - DNA, 201 bp, Homo sapiens
ggaatggtcaggacaagatgcacacacagccatgcctatgcccatctcagaggaagcagttcactttctcaggaaggcttagaagtccagcatgctacccrctagctctgccttgataggccagtttcttcacgcacctgggcctcattttccttgtctctgaaatgggatggtgatatccgcctcaggggaccagggtga

SEQ ID NO: 34372 - DNA, 201 bp, Homo sapiens
cctctcccctcccttccacctggtgaacaacttcagctttcagaaccagctcaaatggaacgccctctggagacccctcttctccccacccctccgaaggkagtgacttttctctgtgttccatagccacgtgcgttgttcatagcactgtcgtgtcttgtggtcatttctttgagtttctgctgggtgccaggcacaggg

SEQ ID NO: 34373 - DNA, 201 bp, Homo sapiens
gcttcacctccggttttctgagccaacctgcaggaaaggacagggaagcagaaaaggcttaggctccagtcctggccacagccacttttgcgacctaggaygagttacccaacctcttacttgtaaatggagtgtgataacagccactgtggaatggtcaggacaagatgcacacacagccatgcctatgcccatctcaga

SEQ ID NO: 34374 - DNA, 201 bp, Homo sapiens
tgtgtcttccttcagactagccccaagctggtcccgtccccctttcagggccatcaccctgacgtcagcaagaccggggctcgatgctctgatcagtgaargccatggtgctatttatggtgaggatcggggggcagggagctctcggggtgaggctgggaaagctgatgaaagactggccaggaagtgactcatgtcctt

SEQ ID NO: 34375 - DNA, 201 bp, Homo sapiens
tgtgacaattcaagcaacacagattccataaagaaaaaactagcagtctgccttccagtctccctgggagatagacatacaatattccaatagcgttaaaygtgtccatgtcggtgatgtggcaattaatcatgtcaccctgtgacatcgctcgtatttttattttgacatattttcctaatacctgctgtctaattgagt

SEQ ID NO: 34376 - DNA, 201 bp, Homo sapiens
tactccacattgagttcatccttcagcccgaagctcaaacgaagcttccccggggccttgcttggcttccctggtctcctcccgccctccccttcaaggcstctgggatgttctcacagcgttcaccccgtgcgtaatcagatgctcccgcgagtccttggctgccgtttgcctcactcaccacgctgcatgcctcacgtg

SEQ ID NO: 34377 - DNA, 201 bp, Homo sapiens
aagcgtgcaccaccatacccggctaagtttttattttttaattttttaatttttttgagacagagtctcactctgtcgccagtctggagtgcagtggcacratctcggctcattgcaattgtcacctcctgggttcaagcgattcctctgcctcagcctcctgagtagctgggactacaggcgctgcaccaccacgcccgg

SEQ ID NO: 34378 - DNA, 201 bp, Homo sapiens
tgtgaggtacttattattgttattcctgttttgtaggtgggaaaactgagggacagagaggtaatgtatctctcctctcagtcagtaattggcagagctaragtggaacctgggcagttttggctacagagtctatgcttttttttttcttttttttagcgaagtctcactctgcctgtcaccctggctggaatgcaatgg

SEQ ID NO: 34379 - DNA, 201 bp, Homo sapiens
atacctgcttctgagggaagggtgagaagcttaaaagagatggtataaaagaactgacaaatcccgtacaccagccgggtgaatcccttacaccacccacrtgccccggggagatgttctgtgaactgaacttctttttcaaaagtcttttcctctggcaatcgacacctggtaacgtagtgtaaccaagtgtcctgttct

SEQ ID NO: 34380 - DNA, 201 bp, Homo sapiens
ctcctgggagtggtgatgtttgatgtttccttgtgggagtgacatagtagtaacttctgtctgcattagggctttattcagtaatcctccattctttcctkcccgcggtgttttactagtcttagcagtaataataatagcgtttcttgagtgtttgctgtgtgccaggtacagcactaaatattttatgttataaattta

SEQ ID NO: 34381 - DNA, 201 bp, Homo sapiens
ctcactctactgtcagattcagcagggagaggccctgggtcggcactgctggcagggagagcagccgagaagtgtggttcgcctgcctcctttccccagcrgctgctccacagagttctcagcccaggccagccaagccccagcccaggtccagtgaacacaggagctggggtcacccccatgtcatactgactaggggct

SEQ ID NO: 34382 - DNA, 201 bp, Homo sapiens
atgagtgtgttttagatgacatgtaaagattgaacagatcccagccaattaccagcaccaaaagtagtaactgatggggacttcggccacaaagggcagcrtctctaaggagctgaggcttagagacaatgtgaaagtagctgtggagggtgtggctcagtcccaggcctcagaatttcacatgtggggcttcccttttcc

SEQ ID NO: 34383 - DNA, 201 bp, Homo sapiens
cctttccgcagtgcctgcaagaacctgcagggggcgcagagcctgagggcctgaaggaaggagagacacggatgtccgccgtgcgctgtgcactgtaccakgctctttagagccactgcttccttaatcctcacaaccccagacttcggaattgttgttcccattttatagatgcagcaactgaggctcccagaggttaag

SEQ ID NO: 34384 - DNA, 201 bp, Homo sapiens
attctcatagtaaactcatggagtaggctgcatttgcacattttacagatgagactcatgaatatgaaggaaatgtatttcctaggaaatggtgaggctgrgattagacccagagctgtgggacctcaaagcctgtattctttctctactcactctactgtcagattcagcagggagaggccctgggtcggcactgctggc

SEQ ID NO: 34385 - DNA, 201 bp, Homo sapiens
acagatgagtactgaggcacagagaggctgagtcacttgctcagggtcacagagttgggaagttcagactggggatctgaaatgaggtttagatccagagmttttacccactacattatagcatctgtgaaatataagtgtttagctaccagataatatgagtgtgttttagatgacatgtaaagattgaacagatcccag

SEQ ID NO: 34386 - DNA, 201 bp, Homo sapiens
caaataggggtgggggaggcggaggcactaagtgcaggtcccgggtgaaaaactgggcagctccccccaccttctgcatcagatccctaccacgcaccacyaatacctgtttgttcagtgtgacctagtggttaagaccaagggccatgggatcaacttgagcttgaaccctggatctgccattgaattgtcaccaaggac

SEQ ID NO: 34387 - DNA, 201 bp, Homo sapiens
gcagcaactgaggctcccagaggttaagtgactttgtcaaggatataccaccagtccaaaatggtgaggggctcactctctggggagcagttagcatttabaggggatggggcaggacagtggacaggccctctagcttcccagtgaggcccagaatgggctcttgtgcattgtgtgggttctggtctgactggttctggg

SEQ ID NO: 34388 - DNA, 201 bp, Homo sapiens
tgagtttcctggcagccaaagaaaaaagagatacaagctgattcctgttattaaaaagtaaagaagcagtttacactttcaggaacttcatagtaaatttwaaaataagctaatcacatggaaatttctctggtgaaaaatactgggaaatataatggataatgtaataataataaatgtcaagtggcatatctttagaaa

SEQ ID NO: 34389 - DNA, 201 bp, Homo sapiens
tcatcttcagggttgtgagcacccaaggaggccctgcctcattgtggggacagaagagaatggagcagtcacatgcctgcccctaaggagctgcactctasgggaggaagctggagaccaaacaggcaaagccacccaccagaaggatcgctccgagagaagaaaggagacaaaacagggcgatgtggtggagagtggctg

SEQ ID NO: 34390 - DNA, 201 bp, Homo sapiens
gtcagattcagcagggagaggccctgggtcggcactgctggcagggagagcagccgagaagtgtggttcgcctgcctcctttccccagcggctgctccacwgagttctcagcccaggccagccaagccccagcccaggtccagtgaacacaggagctggggtcacccccatgtcatactgactaggggcttccccggaaga

SEQ ID NO: 34391 - DNA, 201 bp, Homo sapiens
ccctctccaggccccagcagttatatctgtccctatttcccacatcccagatgggtggcccgtagcctctaaaggaagttagcctacagagccaggccccrggtaggaggcacaaaaaaaggaggtgaggccctgagataaccaggaagatctgggtttgggctccagctctggcaagctgcttcctttctctgagcctca

SEQ ID NO: 34392 - DNA, 201 bp, Homo sapiens
caattcgcctggccctttatacatcacctgtgaccctcccattaaccctgcagatactgaacttcatttgcctcatctgtcaaacaggaattagttttgtyttgccttttacagaagagggtatcaggctcagagatgctaagtgatctgctcaaggtcacatagccagtaaatgacgagcctgagattcacatccggatc

SEQ ID NO: 34393 - DNA, 201 bp, Homo sapiens
accgcacccagcctactgaggagtttagagtcaggggagtgacacggtcggatttgcattctgagatggtcacaggctgctttgtggtgattgagtagaargagtgaggccgaaggctgggaaaccagtgaggaggcacctgaagtggccctgggagaaaggtggtgctgcaggcaccatccagtcctcctctagcccaaa

SEQ ID NO: 34394 - DNA, 201 bp, Homo sapiens
cggggagccggtgaacgggcggcacaccctgggggagaacatcgccgacaacgggggtctcaaggcggcctatcgggtgagagccccgctccccacacgcrcacggtcccagtgctggctccttccagatgcctgtccgtagaggatcatcacggacaaccagggcaggcgcagcagccgtgcgagcttccgtttcctctt

SEQ ID NO: 34395 - DNA, 201 bp, Homo sapiens
tgcttgagcccaggaggcggaggttggagtgagctgagtttgcactactacactccagctagggcaacagagcaagactctgtctcaaaaaaaaaaaagtyattcagggcagtctttccgttgcaaagccttttcacatgtgtgatgcaattttgtccttaggacccctgatgagtgcagtgttaccatccctctcttaga

SEQ ID NO: 34396 - DNA, 201 bp, Homo sapiens
ctggacttttggaggggtaacctggcagacagttgggggaaggagacccaacccatcatcccccatctgcagctgtggcaccttgagaatgttccttcacwttccaagctggggctgagttgaggctaccgctgagggttgggaatgctctttactatacagcagttgagttgagaacagggcccagggttttggtttgaa

SEQ ID NO: 34397 - DNA, 201 bp, Homo sapiens
tggtttctgactaagacctaatacccgctgggtctccccactctgagaatgcactgcctgctagaatgccatgcagttttgggccgcacttgggcctcacrtgctttcctgcagctccacatcaggggagcctagtgagcctggcctggaaggggcggtctggcctcaaggtggccatgtcacctctctgagcctcagtct

SEQ ID NO: 34398 - DNA, 201 bp, Homo sapiens
acctttttcagatgaaatagcacatttctctggggagggcccccggccaagcaggaggagccccgtctctgaagccagcgacccgggtttgagttcttackccactcacgaccttgggctagtggcttaatctctttcagtggtgatggcctcactgtgaaatggatgttagagaaagtggatgtcatacatattatatgc

SEQ ID NO: 34399 - DNA, 201 bp, Homo sapiens
aggggaaaggagagagggaaggccctgtggatccttttagaggacacgaggtgctgtcctggcccagttccagtcccaactagcgaggagcctgtgccagmttcctgctaggtgccctgctgtttctgcaaactgtgataatctccagaaacagtgaatgatgggctctggctcagtccaactaagcctgctgcaggagat

SEQ ID NO: 34400 - DNA, 201 bp, Homo sapiens
aagcttccggaaggagtgcttatgccaagtaaagggtaaagaggagtcctagccactcagccaatttatagcaaaaagtagttgccagtagtgatgatagrtgctccccttgaacaactcatgatcctcacaatgcctgtgaggtgagtactgttattagccccactttgcacaggggaccaccaatagtattacttcttc

SEQ ID NO: 34401 - DNA, 201 bp, Homo sapiens
caagtgtgtgagcaccccctgctggtgagaatgatgcacatcaccacctgggtccaagaggcctcctggtaaaaataatttttctgttatcttcgagcaarggagtttccaggtctcagatgtttgggcagggcaggcagtagggaaaatcaaagaaaggttcaaggagggccaggtgcggtgactcatgcatgcaatccc

SEQ ID NO: 34402 - DNA, 201 bp, Homo sapiens
ccctccggcactcggcgccgaagccgcgagctcgcccgctggagctgagcgcgccgcctgggccaggcagccgagccgtccgagcagctgggctgggagcmgggaacccggagctgggaatcgggagccgggcgcggggagctgcgcgaagccggggcggagcacgcgagctatggtgagtgctgcgcgcggaggtctggt

SEQ ID NO: 34403 - DNA, 201 bp, Homo sapiens
acccctgcccaccccagtctgtttctttatctgcctccctgctgggctgtgtatttccagcatggccctgagttggtgctcagctgttagcacatgacacrgtgtcactgaacacgttaccccaccttcaggagacccttcctgtcttgtgggtgtgggttttgcaggaagcatctcttggaacagaggagaaccccaagc

SEQ ID NO: 34404 - DNA, 201 bp, Homo sapiens
ttcttgagggtccagagagaatagcttgctggttccttctttccagagcatcagctggcattgcagagggatcagcagaatggccaccaccgatcttgccrtttcttgacatcacccaggaatgcgtggccaggccttgcttctctgctgaggaggggctcccgcagagtgtcatctccctccttccttaccttgtgacca

SEQ ID NO: 34405 - DNA, 201 bp, Homo sapiens
ccagtggatagtgggggggcagccactgacagtttggggtatgggccctgcaggtgctgaccggatatctgaactacatggtccagctggggaagctgctkggcggcggggacgaggaggccatccggccccagatgcagcagatcttggactttgagacggcactggccaacatcaccatcccacaggagaagcgccgtg

SEQ ID NO: 34406 - DNA, 201 bp, Homo sapiens
ctctgcctcccctcccccgaccctcctgccttccgcgtggagggtggtggtcctgtagtgtcagcaccagcaccatgggcttggaccccctccctggacasaggcaggtgtcctagggctgggggtgcagcccgagggaatggagaccacactcatggctcaggtctgccggggccggcagggggttggggaagaagaggg

SEQ ID NO: 34407 - DNA, 201 bp, Homo sapiens
cccgagatcattctcaatgctgtgtctcccacgggtgtcttcttcttttttttttgagacaaagtctctctctgccgcccaggctagagtgccatggcgcycgatctgggctcactgcaacctcctcctcctgggttcaagtgattctcctgcctcagcctcctgagtagctgggattataggcacctcccactatgctca

SEQ ID NO: 34408 - DNA, 201 bp, Homo sapiens
ggccacctatttgctggtctggaagacgaatgaaagtttatcatgttgtagggaggagaccgtgatactttcgtctgtcatttagccaggacgtgttgaayacttactctaagccaaaccccatgtgagggaggaaagaattgactgaataaacagtgttatgggagcttccaccaggccataaacgtctgcactggtcct

SEQ ID NO: 34409 - DNA, 201 bp, Homo sapiens
tgggctctgttcttgcagccaccacctgttgctaggggcctactaggtccctatccagggctggttctggggctgcagggaccactaagacatggaatggyggaggggcagcccaggcacagcccctgcttctactccacattgagttcatccttcagcccgaagctcaaacgaagcttccccggggccttgcttggcttc

SEQ ID NO: 34410 - DNA, 201 bp, Homo sapiens
cagggagtcagtgctgttcttaagggcctcggatggaccgtctccccctgttttctcccagtgcaagccgtgggccgagggttctgaggaggctttttatrtctcctgcctccggttgtactcaaaccaccctgcagcaggcacagagaggtgaaggaggttgcccagggtcacagagcaagatagtaccagaacaggcac

SEQ ID NO: 34411 - DNA, 201 bp, Homo sapiens
aggagccatgagaggcatagaaagcactgggcaagtgggggcagaaatagcaggagcctggctgggtagagcccaggcccggggggtggcaggggagagckggagatgaggatagagaaatcagccagcccaggcccagggccacggcaggctgctgctgcccaggggccaacagctggggcattcctgccccctggtgat

SEQ ID NO: 34412 - DNA, 201 bp, Homo sapiens
aggcatgggggcgaacgtagatttttccctgtgctcagcagccctccctcccaaacccacagagtggagcccagcctgttgtctctttaccacccgtaccygccctttccagaggccactctcacgaactgaaatgctcccactgccccttacacagctcccttgcctccctcctgttctagaatttccagatgggactgc

SEQ ID NO: 34413 - DNA, 201 bp, Homo sapiens
cccctctgctgctgacgtcctcacatcaatgactgtagtgatcatgtttaaaacttgctttttatgaaatacttaatatgtgccagccactgtgcttggcrctttacacagactctagtggtgtctcactagatgctcataacccccggcaaggaagccactgccaccctcaccatgcagagggaggaaattgaggctccg

SEQ ID NO: 34414 - DNA, 201 bp, Homo sapiens
aagggagtgccatttcagctgagactcaaaaggttggccattttctgacagcacagcagagagtgaggtttaccaggtggaggaaacagcatgagcagagrtctggaggtagagaagtggaaaatgtctccaggggaagggcagctgctttccatgtgggtgggagcaagctcgttcatggttccaagctaagagtgagcc

SEQ ID NO: 34415 - DNA, 201 bp, Homo sapiens
ttttcctaatttgatcctcacacccagttctgagatacgagctgttatcatcaccgtttcaccaatgagaaagtcgaggctcagacaggtagactccccgrgtcacagagccagaaagttgttggcaggattaaaaagagtgatgtgtgtagggcgcttagcaccaccctggtgcacagcaaggggcttggtgtggggcct

SEQ ID NO: 34416 - DNA, 201 bp, Homo sapiens
gaaggttttttttctctagggctctcagctaccacaaggtaagcctggccgaattctctgggtgtgaaggatgtctaatctcagagatgagagtgaaggtracacacaaggggaagatgaggcatggaagatgaggcaggggagagaaatctagcagcagcatctgaactcctggatcgtctcctgcctgatgatcctccc

SEQ ID NO: 34417 - DNA, 201 bp, Homo sapiens
ggccaatcagagttcttccctgggactttctaattcagcccagggagagagaaggttttttttctctagggctctcagctaccacaaggtaagcctggccraattctctgggtgtgaaggatgtctaatctcagagatgagagtgaaggtaacacacaaggggaagatgaggcatggaagatgaggcaggggagagaaatc

SEQ ID NO: 34418 - DNA, 201 bp, Homo sapiens
gttctcattccaacaacacttgtcactcgtggggcaccctgggccagcagctgctccgtgccgagtgtgtttccccatcagtcaaacggcttgtaagcccygagggtcattgaatggctcaacgggacactatttgtgaagtcccagcacagagcctggcattcaggaaatggcagggggtgggagtgagggtatcagtgg

SEQ ID NO: 34419 - DNA, 201 bp, Homo sapiens
atatctgaactacatggtccagctggggaagctgctgggcggcggggacgaggaggccatccggccccagatgcagcagatcttggactttgagacggcaytggccaacatcaccatcccacaggagaagcgccgtgatgaggagctcatctaccacaaagtgacggcagccgagctgcaggtaacttgagcgccggctgc

SEQ ID NO: 34420 - DNA, 201 bp, Homo sapiens
tagtaggcagagctgggatttgaatacaggcggtatagacccatgtccaccacactccagcctgctgcatcctcctacctctcagtgacaggacagcacaygggacacgtgctgtgtcagctggggatgctgcttgctctttttatttatttatttaagagacagggtcttgctttgtcactaaggccagagagaagtggc

SEQ ID NO: 34421 - DNA, 201 bp, Homo sapiens
atcatggacacaaggggcaagagacaggtatcatttgtcctggttctagagagaggcagaggcagcaataacagctaccacaattcgcctggccctttatrcatcacctgtgaccctcccattaaccctgcagatactgaacttcatttgcctcatctgtcaaacaggaattagttttgtcttgccttttacagaagaggg

SEQ ID NO: 34422 - DNA, 201 bp, Homo sapiens
gctaggggagcccaggggtgtcagtgacctgatgggtgaaacaggcagaccctggcaggggagggacacccctaggctggctgtgtcactcaggcatcatkgacacaaggggcaagagacaggtatcatttgtcctggttctagagagaggcagaggcagcaataacagctaccacaattcgcctggccctttatacatca

SEQ ID NO: 34423 - DNA, 201 bp, Homo sapiens
tcccgtccctgagtgggcttctcagtgactgtagccagcagtcctgcttctccaagggcctgagctgggcctctgctgccatgtgccagccattcccaggkcaggaggccgtgcagtggatacacgcattgcaacacgaattccctctcatgcctgcttctcttgccaggtggaccagtctggcctgggcttgccctcgag

SEQ ID NO: 34424 - DNA, 201 bp, Homo sapiens
gactgaatcctaatgtcatcatctgagctcctcttggagccatgcctaaagctagctctgcccctgtactttgtagttacacaggctctgtgtaactcaaytggctctggccaattcaggttggttttctgcgtttgagccctgatgctccgatggggcagaccctgtgcccagaggcttgagtatttggaaggggcaact

SEQ ID NO: 34425 - DNA, 201 bp, Homo sapiens
ccaacaggcgtcggaagggagccagagctgatgggcacgggaacaagccggaggtgcccaggccactctgacctgctgaggcgagggcttccctctaggcrgagaggggagaagggacatttagagtgccagtgtggattgtgtcagccgatccggcaagatagttattaccatctgcttgtgtgaccttgggcaagccat

SEQ ID NO: 34426 - DNA, 201 bp, Homo sapiens
cacgttgtcttgtttgcagctgtatccttagttaatgtttgttggattcccgtctgcccactgggctcctcccccagtgtgaaatcatgacacctgtgctrtaccataaagctgcccaccttaaccctcccacagctgggaccatggctgtctccctctgctgctgtcccctgctccatcctgggaccctaaatgctggga

SEQ ID NO: 34427 - DNA, 201 bp, Homo sapiens
acaaaagagaaagagggcaaaaaggttgctggggccagaaagtactaggctgaggaagtccacggtggattgttgaccggcggtgcatgcatggggtggcrgctgatgtcaggcctccctggctcctgtcattttaatttcctctaaacattggttcctgtgctgtcattcctgaggcaggggtgattcgggactgatcaa

SEQ ID NO: 34428 - DNA, 201 bp, Homo sapiens
ggtctgctcattcttagctcattcttagcccaagtggctcttcccagctcacctagctggcagggatgcactggagccccctggcccccaagtccgctgckcacatctcttaccagctccgcaggtattttaccatcagccacggtgggaagagttacccagaaactgagagccagttgttaactgttttgtttttgtttt

SEQ ID NO: 34429 - DNA, 201 bp, Homo sapiens
tctaatttaaatgggaaaacagtacccaactgggggatgggtctgcggactagagataacatatgtcccatagctggtgcctcgtaggacttcttcaactytagctctgggtactgttgttgctagaatgtggggtaattacacacataggctgacattgtctgctatctctagttccaataaaataacaataatgccctc

SEQ ID NO: 34430 - DNA, 201 bp, Homo sapiens
gaggaggagctcaggctgtatcactaccgagccaggaatttgggggcccgggagggggtttgggaatgtggctgcgtgagtgtcccaggaagggcctagcyagcgcccccttcccagaactcccacgccattctgcaggctcccataatgcctgagtatcgggtagaaattgggttcaaatttgatcccatctttttacca

SEQ ID NO: 34431 - DNA, 201 bp, Homo sapiens
gaaggggtgtcccgggagggggacctgtgtgacagaggagcagaggtgtgagtgcacaggacaggctcctggaaaggccagaatggggctggtctggcacytggctatgaaagggtcaggaaacaaaagagaaagagggcaaaaaggttgctggggccagaaagtactaggctgaggaagtccacggtggattgttgaccg

SEQ ID NO: 34432 - DNA, 201 bp, Homo sapiens
tgagatagaccaagacccgggaagtgggcagcgtgggtgatataaaggtctcgcacttgagtccacatcctgtcccagcaacttactggctgtgtgacctyggacaagtcacttattccctcagcctgtgtcttctctaatttaaatgggaaaacagtacccaactgggggatgggtctgcggactagagataacatatgt

SEQ ID NO: 34433 - DNA, 201 bp, Homo sapiens
ggactacaaacctgagcccccatgcccggccaggagcagcttttaatgcctagttgcctatatacaagcccctaggactttccaggttgtcctagacgccrtgagggtgaggtggcaccagctggtagatcacctttggcctgggataccccagacattggggctgagtgacagctcatctctgaggttgatccattgggg

SEQ ID NO: 34434 - DNA, 201 bp, Homo sapiens
cgaatgaaagtttatcatgttgtagggaggagaccgtgatactttcgtctgtcatttagccaggacgtgttgaacacttactctaagccaaaccccatgtragggaggaaagaattgactgaataaacagtgttatgggagcttccaccaggccataaacgtctgcactggtcctcagactttttggcacgtccttggaga

SEQ ID NO: 34435 - DNA, 201 bp, Homo sapiens
tcacagcagccagcgaggggacctcgtccatgccgtctgataccttcaaggtgcaccttggaggggcaggccctgctttgcatgtgttttgtccccacttygagaaagagatcgcggtggctctgatttaagttcaagaacattggggtcacaccccgagcctggatttgaaccaggagacagacactggcaccccacacc

SEQ ID NO: 34436 - DNA, 201 bp, Homo sapiens
cagttccacttgagaaagtcctgcccaggccaagcatggtgactcatgactgtaatcccatcactttaggaggctgaggccggaggatcgcttgagcccargagttagaacagcccgggcaatacaatgagaccttgtctctacaaaaaaaatgtttaaaattagctaggcatggtgctacccacctgtggtcccagctac

SEQ ID NO: 34437 - DNA, 201 bp, Homo sapiens
ttgtgcagagctgggaagaatcgtttaaccgtcacagcagccagcgaggggacctcgtccatgccgtctgataccttcaaggtgcaccttggaggggcagrccctgctttgcatgtgttttgtccccacttcgagaaagagatcgcggtggctctgatttaagttcaagaacattggggtcacaccccgagcctggatttg

SEQ ID NO: 34438 - DNA, 201 bp, Homo sapiens
gctgaacaaaggccaagactggaaaatctggatgagggcagaagcaaatgggaggggtggtgaggaagacaagaagaagcaagcagaaagaggtggcctgygcaggatgtccctctggtgtggttcacgcaggcttgggctgctggatgccaggcagttcatgttctagcttactcggtatttacaatggcccttttacgg

SEQ ID NO: 34439 - DNA, 201 bp, Homo sapiens
gttgtgcagagctgggaagaatcgtttaaccgtcacagcagccagcgaggggacctcgtccatgccgtctgataccttcaaggtgcaccttggaggggcargccctgctttgcatgtgttttgtccccacttcgagaaagagatcgcggtggctctgatttaagttcaagaacattggggtcacaccccgagcctggattt

SEQ ID NO: 34440 - DNA, 201 bp, Homo sapiens
tgagttgtgcagagctgggaagaatcgtttaaccgtcacagcagccagcgaggggacctcgtccatgccgtctgataccttcaaggtgcaccttggagggrcaggccctgctttgcatgtgttttgtccccacttcgagaaagagatcgcggtggctctgatttaagttcaagaacattggggtcacaccccgagcctgga

SEQ ID NO: 34441 - DNA, 201 bp, Homo sapiens
atcacttgagttgtgcagagctgggaagaatcgtttaaccgtcacagcagccagcgaggggacctcgtccatgccgtctgataccttcaaggtgcaccttkgaggggcaggccctgctttgcatgtgttttgtccccacttcgagaaagagatcgcggtggctctgatttaagttcaagaacattggggtcacaccccgag

SEQ ID NO: 34442 - DNA, 201 bp, Homo sapiens
caacctgcggcccgtgggccgcatgtgacctgggatggctttgaatgcggctcaccacagattcataaactttcttaaaacattctgagatttatgcatgmacctttgttttttagctgatcggctatcgttggtgtattttatgtgtgacccaagacaatatttcttacattgtggcccagggaagtcaaaagatgggac

SEQ ID NO: 34443 - DNA, 201 bp, Homo sapiens
tggctcaacgggacactatttgtgaagtcccagcacagagcctggcattcaggaaatggcagggggtgggagtgagggtatcagtggcctcttggtccggwgactaaaataactttactgggtcggaaagctctccctgaacttccagaacaaagcatgggccccacatggtgctacctcccagcaagaaaggggttggga

SEQ ID NO: 34444 - DNA, 201 bp, Homo sapiens
cttaaaggcctctgagctagaaaggggaactgaaaggggacacctacctttttaccccaccttttttgtctggtctttctagcattaaccccctagacacrcctaagggctgatgccggggggaacctgtcttgattgctctgggccaaatcgagggcaccttcctgatacttttgttatctgccactggggacccggttg

SEQ ID NO: 34445 - DNA, 201 bp, Homo sapiens
caggtgaaactttgggtgctgatgggtttccgtgggccccaagagtgatgtcaactcctgggcacagctgaacccacatcctggtttccccctccttagcrtctgctctttgtaactcttcttggaatgggtttgaatccatctctccctgtcagagcatgccccagacagaggctcagcctgcccaggggagctccagca

SEQ ID NO: 34446 - DNA, 201 bp, Homo sapiens
ggtcccagtgctggctccttccagatgcctgtccgtagaggatcatcacggacaaccagggcaggcgcagcagccgtgcgagcttccgtttcctcttctgygaaattgggggtggcgaggaccaatcgcgatgccgaccgtggaggctcccccaccacagggcttggcaccagaaggctttgtgctctgagtctggcctga

SEQ ID NO: 34447 - DNA, 201 bp, Homo sapiens
ccccacacgcgcacggtcccagtgctggctccttccagatgcctgtccgtagaggatcatcacggacaaccagggcaggcgcagcagccgtgcgagcttcygtttcctcttctgcgaaattgggggtggcgaggaccaatcgcgatgccgaccgtggaggctcccccaccacagggcttggcaccagaaggctttgtgctc

SEQ ID NO: 34448 - DNA, 201 bp, Homo sapiens
caaactcccgacctcaggtgatccacctgcctcggccttccaaagtgctgggattgcaggcatgagccactgtgcccagccttttttttttttttttttttgaggcagggtcttgctctgttgcccaggctggagtgcagtggcgtgatcatggctcactgcagccttgaattcctgggctcaagcgatcctctcacattg

SEQ ID NO: 34449 - DNA, 201 bp, Homo sapiens
ctcttatcccccaggattgagtgcaatggctcgatcttggctcactgtaacctccatctcccgggttcaaacgattcttctgcctctgcctcccaagtagytgtgattaagtcggcctcccaaagtgctgggattacaggcgtgagccacggcacctggcgtagcctttgggtttttgaggattccctgaggtcactcact

SEQ ID NO: 34450 - DNA, 201 bp, Homo sapiens
aaaaaagaaaggtgagatattaaattcttagttatagttttctcatttttttcccaccttgcacagggctctcttctcttctcttttttttttttttttttgagacagagtcttgcttgttgtccaggctgtagtgcagtggcacaatctcagctcactgcaacctccacctcctgggttcaagcaattctcccacctcag

SEQ ID NO: 34451 - DNA, 201 bp, Homo sapiens
gtggacacaggtatgcagagcggtgagggcctttgggaatgaacatcttaggagagccttcatcaaaaagatgtccccgtagaggccttgaggttgagtakgattttaacagggtcccatgcagaagctccttggggacagggatgttttctcttgtgtcccacagcttacacagggcctagcatagagtaagcatctagt

SEQ ID NO: 34452 - DNA, 201 bp, Homo sapiens
gcgcagcagccgtgcgagcttccgtttcctcttctgcgaaattgggggtggcgaggaccaatcgcgatgccgaccgtggaggctcccccaccacagggctkggcaccagaaggctttgtgctctgagtctggcctgacaaagacacaggaaggggctcgggcttcatccgcctgaagagcctgcctgttctcacctctgca

SEQ ID NO: 34453 - DNA, 201 bp, Homo sapiens
tagcgcctacctctcattatcccatttgatcgtagcagtcctctgtggggttggccctgtcaccatccccattttataaatgagaagtccggtgacctgtytgagcccatacagctgttgacggctggagcctggagatagtcgtgggcggggttagtgtctcaccaggtatcagctggacgcagcaaacctcaaacagaa

SEQ ID NO: 34454 - DNA, 201 bp, Homo sapiens
agccccttggagctctaagtgctgggattataagcatgagccaccacgcctggccaaacagcctctgtgttctaagtacccaaagttcaattaagatcttyaggaaatatatggattctctcgagtttttacagatatttctgattaaattctaatgtgaatttggctgccttccttgtaaaatgggcttggctcgttcac

SEQ ID NO: 34455 - DNA, 201 bp, Homo sapiens
taaaaagcttatttctccagcaccttccatgagccctgcaggcaacgtgcttagcgcctacctctcattatcccatttgatcgtagcagtcctctgtgggkttggccctgtcaccatccccattttataaatgagaagtccggtgacctgtttgagcccatacagctgttgacggctggagcctggagatagtcgtgggcg

SEQ ID NO: 34456 - DNA, 201 bp, Homo sapiens
acagggacagaggccacctatttgctggtctggaagacgaatgaaagtttatcatgttgtagggaggagaccgtgatactttcgtctgtcatttagccagracgtgttgaacacttactctaagccaaaccccatgtgagggaggaaagaattgactgaataaacagtgttatgggagcttccaccaggccataaacgtct

SEQ ID NO: 34457 - DNA, 201 bp, Homo sapiens
tctgtccagggctatgggctggcttttccagcacagggacagaggccacctatttgctggtctggaagacgaatgaaagtttatcatgttgtagggaggaraccgtgatactttcgtctgtcatttagccaggacgtgttgaacacttactctaagccaaaccccatgtgagggaggaaagaattgactgaataaacagtg

SEQ ID NO: 34458 - DNA, 201 bp, Homo sapiens
ccttgggcaaatttcgtaacctttcttaagttcattctcctccttcataaaatggtgatacaaatatcacctgtggccgggcatgaacgcccgtaattgcrggacttttgggagacagaggcaggaggatcccttgagtccctgcgtttgagaccagcctgggcaacatggcgagacggtgtctctacaaaaaataaaaaa

SEQ ID NO: 34459 - DNA, 201 bp, Homo sapiens
ttccttgaacccaggaggcaaaggttgcagtgagctgagattgcgccactgcactccagcctgagtggcagagtgagactgtctcaaaaaaaaaaaaaaaagaaagaaaacaaagcaagccccactgagcctcgggccacgctggagcttttcccgatttctctccttcatcctctcccgcctctgactggccaccacatc

SEQ ID NO: 34460 - DNA, 201 bp, Homo sapiens
gcacagtctggccaagaattttctatttatttttaggttgtattctcaggacccactgacttctggccaaactcttcaattactcataaaacagtattaawttttttttaaaaagcttatttctccagcaccttccatgagccctgcaggcaacgtgcttagcgcctacctctcattatcccatttgatcgtagcagtcct

SEQ ID NO: 34461 - DNA, 201 bp, Homo sapiens
ttggtctaggtgaagcatcacccttgagtttcagtttcctcatctgcaagatgagatgataacacttacctccaaagggtgagataacccaagtgagagtsctttgcttcagtactgcttagttttcttttccaagcttgagcccacgctgggaagttctacctaacatctaacctatttgccccaggggttgtctctgga

SEQ ID NO: 34462 - DNA, 201 bp, Homo sapiens
tgcaaatgaaggatgatggcataccatatctcctggggttgctgcgaggcgttgataatacatggaaagtgcttagcacagtctggccaagaattttctayttatttttaggttgtattctcaggacccactgacttctggccaaactcttcaattactcataaaacagtattaaattttttttaaaaagcttatttctcc

SEQ ID NO: 34463 - DNA, 201 bp, Homo sapiens
ttgatttacaagggtggagtttccagagctgggcactgttgcaccttcatctggctgtcatcacttcctctgtgcagctggggcaccggggactgaggackgggcagtccacagggagctgtggttccaccccttcactcttggtttctgccaggccctcctcttgaacactagacccagattcaacccagatttctcctc

SEQ ID NO: 34464 - DNA, 201 bp, Homo sapiens
tgagtgactcaacctctctgagcctcagttccctgtctatgcaaatgaaggatgatggcataccatatctcctggggttgctgcgaggcgttgataatacmtggaaagtgcttagcacagtctggccaagaattttctatttatttttaggttgtattctcaggacccactgacttctggccaaactcttcaattactcat

SEQ ID NO: 34465 - DNA, 201 bp, Homo sapiens
cccaggactccatggcctagaggaggctggggacctcaggaaccctccgcagaatgaaggaagggtggggaagaaagacacagagatgaggctgcggcccytataggagcttgggtgagtgtggaagataagagcacaggctctggaacagacacgtgcgtccttcagggagctgtgtgaccccctgtgagtgactcaacc

SEQ ID NO: 34466 - DNA, 201 bp, Homo sapiens
gagccaggtggggcagcagtgagggagcttcaggcagaggaggagggagacaagaccagaccaaagggtggccggggacgcagctctgtttcattcggacytgggaatcacaccaactggccccttccaagcggtcttagatcctgaggaagcattcttccctctctcagcctcagtttctccttctctaaaatgaaaata

SEQ ID NO: 34467 - DNA, 201 bp, Homo sapiens
tcctgcatgtgtgttgcttgcaggtggagcatgaccccgcccatggtgaacgcctactactcgcccaccaagaatgagattgtgtttccggccgggatccwgcaggcaccattctacacacgctcctcacccaagtaggctgcctctggggcccctaccccaattcttttcccccagcccagccctggggcccatacgacc

SEQ ID NO: 34468 - DNA, 201 bp, Homo sapiens
tgtgcacttgggcctggggtcaaggagagtctgcatttttaatgcccttattcccgatccccaagcagcgctccaggcaggctgtccccacctgcctcccrccctgtgctgagacctcctgcatgtgtgttgcttgcaggtggagcatgaccccgcccatggtgaacgcctactactcgcccaccaagaatgagattgtgt

SEQ ID NO: 34469 - DNA, 201 bp, Homo sapiens
tcctgcaacggtgtcattccatctcgtgccccagggtgaaggccaagagaagagctgaccctgcagccccaagccctgcattccggtctccagcctgcagwttaatctcttaaccatgacagcccttggcttcctgtcttggaagatgcacaccaccgagggcacactgtgattgactccacttcttcttttctagtacac

SEQ ID NO: 34470 - DNA, 201 bp, Homo sapiens
ctgttatcatcaccgtttcaccaatgagaaagtcgaggctcagacaggtagactccccgggtcacagagccagaaagttgttggcaggattaaaaagagtgatgtgtgtagggcgcttagcaccaccctggtgcacagcaaggggcttggtgtggggcctgggccagaagagggggaggtggcaggactgttcaaagaggg

SEQ ID NO: 34471 - DNA, 201 bp, Homo sapiens
gctgttatcatcaccgtttcaccaatgagaaagtcgaggctcagacaggtagactccccgggtcacagagccagaaagttgttggcaggattaaaaagagtgatgtgtgtagggcgcttagcaccaccctggtgcacagcaaggggcttggtgtggggcctgggccagaagagggggaggtggcaggactgttcaaagagg

SEQ ID NO: 34472 - DNA, 201 bp, Homo sapiens
ctccactgctacacttcactgtgattactgctgtggatggtgcaattacatgtctgtttctctcactggatgttctgggcatttcagttgagacccaggartacaggctcactgttgattcatctctagcttcgaaagacctagcacagtcaggatgcagggcaactgctcacagaacgctggatgcgtaaatgaatgaaa

SEQ ID NO: 34473 - DNA, 201 bp, Homo sapiens
ctgaagaatttggaatgctgctggaaggaaggagcaacatagagttatttccacagagcccctccccgccctccaggttcccaaacaaactgcccaggaamagatggtccgctttagaatgactctgtgtgcccagacgcatccagggccactctgggtcagcacctgggcaagggttgcagtcagttgctcctcctcttc

SEQ ID NO: 34474 - DNA, 201 bp, Homo sapiens
cttgaggtcaagagttcgagaccagcctggccaacatggcaaaaccccctatctattaaaaatacaaaaaattagccaggtatgatggcgcatgcctcctrgtcccagctactcggaaggctgaggcaggagcattgcttgagcctaggagtcggaggttgcagcgagctgagatggtgcccctgtactccagcctgaggg

SEQ ID NO: 34475 - DNA, 201 bp, Homo sapiens
gtggtggctcacgcctgtaatcccagcactttgggagggcaagacaggtggatcacctgaacccaggagtttgagaccagccatggtcaacatggcaaaamcctgtctctactaaaaatacaaaaattaaccgggtgtggtggcgcacacctgtagtcccagctactcaggagtgagtagctgaggcacgagaattgcttg

SEQ ID NO: 34476 - DNA, 201 bp, Homo sapiens
cacatgtggctcatggcgcttctatgttggatgtcgtagttctgcatagatctttgaagatgtcgttcaaggccttaacctgtgggtctcaaactcaaacrtaagcagggaccaaggatgggaccgggctgattttgcagaggcatcttcagttgtgtcttctttcccagtcgtcagtatgttcagcactacaaaggaatc

SEQ ID NO: 34477 - DNA, 201 bp, Homo sapiens
ggatgggaccccctgtaaagccgaagagtcccacagtggttcccagcccctgctgtgcccagagctggagtccccttacaacccgcccccccatctctccyttccaaggcctcttctcacccagctagggtcttctttgcttaggcaccgccagttgcctcactagagtcagaagtggtggaattatggcttagttctata

SEQ ID NO: 34478 - DNA, 201 bp, Homo sapiens
agaccaggggacactcaggggccctgcacccagcgatccggtctccccagcatctcccggtgatgggtcctcagaggaggggcttgctgaggccgagtgcygactgcgataggcaggagtaccagggagaaagggaactggggaggggcgtttcatggggctctctaaagccccagaagagaaatccatttgatccaggct

SEQ ID NO: 34479 - DNA, 201 bp, Homo sapiens
aaagtcacacaacagtcacacacaaagaccacagtgtcaccacacacacaatgtttttatctcgatgtctcttgcaaactgggttacacacaaagttgtascaaatcacagccatgtccctcttttgtgtgggcacgtacaacacacgcaaactacaccacaaaaacccaggattttttcacaacttgtttacaacaggga

SEQ ID NO: 34480 - DNA, 201 bp, Homo sapiens
gagttcaagaccagcctggccaacatggcaaaaccctgtctctactaaaaatacaaaaattagctaggcatggtggcgtgcgcctgtagtcccaactactygggaggctgaggcaggagaatcgcttgaaactgggaggcagaggttgcagtgagccgagatcgcgccactgcactccagcctgggcaacagagtgagact

SEQ ID NO: 34481 - DNA, 201 bp, Homo sapiens
caactgaattgttagctcttggattaaaggactctgcctttttatgcccaataccccagtaccctacacacacacacacacacacacacacacacacacamgcacacacgcacgggcacacactttcacgcaggtgcacacatgcacacacacgcactccatactcagcagagaacctggaaggtagtcattatcttgctg

SEQ ID NO: 34482 - DNA, 201 bp, Homo sapiens
aacctgggaggcagaggttgcagtgagccaagatggcaccactgcactccagcctgggcgacagagcgagactccgtctcaaaaaaaaaaaaaaaaaaagaaagcaaatctgatgattctgaaggccagcctctgggaatgtctggacacatagtacgtgtttacttaccttcctgctatgcttcctttccagaaacatgc

SEQ ID NO: 34483 - DNA, 201 bp, Homo sapiens
gaacctgggaggcagaggttgcagtgagccaagatggcaccactgcactccagcctgggcgacagagcgagactccgtctcaaaaaaaaaaaaaaaaaaagaaagcaaatctgatgattctgaaggccagcctctgggaatgtctggacacatagtacgtgtttacttaccttcctgctatgcttcctttccagaaacatg

SEQ ID NO: 34484 - DNA, 201 bp, Homo sapiens
aggccgagatggacagatcacctgaggtcaagatgttcgagaccagcctgaccaacatggtgaaaccccgtctctactaaaaatacaaaaattagccaggsatggtggcgcacaactgtagtcccagctactcaggtggctgtgatggtgcacaccggctactcgagaggttgaggcaggagaatcacttgaacctgggag

SEQ ID NO: 34485 - DNA, 201 bp, Homo sapiens
aggtgatcctcccacttcagccttttaaactgttgggactacaggcatgagccgccgtgcccggccccttttctcagttttggaacccagttttttttttyccacagaaagtgcttgtgttcctccatctctggtgcagcaattcccagtcatttcctgcccagtaaatacctaaccatggccacgtggcttctcagtacc

SEQ ID NO: 34486 - DNA, 201 bp, Homo sapiens
tttgggaggctgaggcgggtggatcacgatgttaggagttcgagatcagcctgaccaacatggtgaaaccctgtctctactaaaaatacaaaaattagccrggcgtggtagcacatgcctgtaatctcagctactcaggagactgaggcaggagaatcgcttgaacccgggaggcagaggttgcagtgagccgagatcgtg

SEQ ID NO: 34487 - DNA, 201 bp, Homo sapiens
agcatggagccggcatttatggaggccctagtatgtaccaggccatttagacacgaggtcttatcatgtctctagaaaagccctgcgtagtccactttatkattatgattatgattatgattatgattattattattttgagacggagtctcgctctgtctcccaggctggaaagcagtgatgcgatctcggctcactgca

SEQ ID NO: 34488 - DNA, 201 bp, Homo sapiens
ggcccctgaccctgtctctcaaggggctctcttgtctctgtgtcttccttcagactagccccaagctggtcccgtccccctttcagggccatcaccctgasgtcagcaagaccggggctcgatgctctgatcagtgaaagccatggtgctatttatggtgaggatcggggggcagggagctctcggggtgaggctgggaaa

SEQ ID NO: 34489 - DNA, 201 bp, Homo sapiens
aagaattttctatttatttttaggttgtattctcaggacccactgacttctggccaaactcttcaattactcataaaacagtattaaattttttttaaaaagcttatttctccagcaccttccatgagccctgcaggcaacgtgcttagcgcctacctctcattatcccatttgatcgtagcagtcctctgtggggttggc

SEQ ID NO: 34490 - DNA, 201 bp, Homo sapiens
gagctttaaggaaaatgaagtgagacccctccccttaggcctggggagccatagggctggcttctctgtgggtgcgtggacgtggggttgggagctgggartctattttttgtattatgttttgagctactgtagttttggcgtggcactattgtaatggaaataaaatacttgtacggagggccatgtgtctgggtgtct

SEQ ID NO: 34491 - DNA, 201 bp, Homo sapiens
cgattctcccacctaagcctcccaagtagctgggactacaggcgcataccaccacgtcctgctaattaaaaatatataatatataaatatatatatatatwttttctttttgtagagatggggtccgtgttgcccaggctggcctagaattagactcaagtgatctcctgcctcagcctcccaaagtgctgggattacagg

SEQ ID NO: 34492 - DNA, 201 bp, Homo sapiens
gcttgaacccaggaggcagaggttacagtgagccaagattaagtgactgtactccagcctgggtgacagagtgagattctgtctcaaaaaaaaaaaaaaaraaagaaaaagaaaaaagaaagttctgccaggagctagccaggagctgaaagactaaagggagctacagtaggagatcaagggggtcagggggtcaccggg

SEQ ID NO: 34493 - DNA, 201 bp, Homo sapiens
cctatgtagtctggcttcagagtctatgctcttaagaagaaaaaaaagtctaccagaagggagcaaaaatagtaattcagggctgggcacggtggctcacrcctgtaatccaagcactttgggaggccaaggcgggcagatcacttgaggtcaggagtttgagaccagcctggccaacatggcaaaacctcatctctatga

SEQ ID NO: 34494 - DNA, 201 bp, Homo sapiens
gcgcccgccaccacacctggctaattttttgtattttttagtagagacagggtttcactgtattggccaggatggtctcgatctgctgacctcgtgatccrcctgcctcagcctcccagagtgctgggattacaggcgtgagccactgcgcccggcccttttttttttttaaggaaaatggaaactattcatttttttgaa

SEQ ID NO: 34495 - DNA, 201 bp, Homo sapiens
cctgtccagaggaggtggccactcctcagccccagccaccacgtggagaatgtggtcccagcattggcgtatcttttttttttttttttttttttttttttgagagggagtctcgctctgttgcccaggctggagtgccgtggcgcgatctcggctcactgcaagctccgcctcccgggttcacgccattctcctgcctca

SEQ ID NO: 34496 - DNA, 201 bp, Homo sapiens
aagccagcgctcactgcataccaggcactactccaaacactttctgggtaactaactgcatcctcccaacaacttggtgggacgggtactgtgattcaccmctttacaggtgagaagacagaggcacagagaggttaagtaactcactcaaggtcacagttggtaaatgacagagccagggtttgaacgccagcagtctgg

SEQ ID NO: 34497 - DNA, 201 bp, Homo sapiens
cctcaagtgatctgcccgcctcagcctcccaaagtgctgggattacaggtgtgagccactgtatccggccaattttttaaatttaaaaaaatttttttttragacaggatttcactctttcaggctggagtgcagtggcacaatcactgctcactgcaacctcaacctcctagggctcaagcaatcctcccacctcagcct

SEQ ID NO: 34498 - DNA, 201 bp, Homo sapiens
ttcttgtgcctcagcctccccagtagctggaattagaggcatgcactgccatgcccggctaatttttatatttctaatagagatggggtttcaccatttgkccaggctggtcttgaactcctgacctcaagtgatctgcccgcctcagcctcccaaagtgctgggattacaggtgtgagccactgtatccggccaattttt

SEQ ID NO: 34499 - DNA, 201 bp, Homo sapiens
ctgggagaggctgtgtcttctcccctctctggaagaatcacggtgcctattattaccatattaaaggctctgaaaagtaccacagcagagacttttccaaytttcccgaagctcatcctaagcttattggagcatggagccctgtgtgtggaaggccagtcctgtcttgcagggtgttcacgttaggagcgtggtttggaa

SEQ ID NO: 34500 - DNA, 201 bp, Homo sapiens
cacagctctttgcagtctcgaactcccaggctcaggtgatcctcccatctcagccttccaaagtgctggggttacaggcatgaacactgcacttggcccamaggcaaggattttgtctgttttgtttcctgctatatctgtcgagaacagtgctaacacgtagtaggcacacgattttaaagagggtaagaggaaaatgaa

SEQ ID NO: 34501 - DNA, 201 bp, Homo sapiens
tcaccaattatgcatcagacactttctgtgtgccaggcattgcttggggctggggattatgtaggaataagacagtcttttcttgtggaagttacattccrgcagggaagacagacagtaaacaaataaatgactaaatacatgataggattgtaaagagaagggctcaaaaacatcaagtagggcatggggccagagagg

SEQ ID NO: 34502 - DNA, 201 bp, Homo sapiens
cttgaaacccgggtggtggaggttgcagtgagccgagattgcaccattgcactccagcctgggcaatggagtgaaactatgtctcaaaaaaaaaaaaaaaagaaagaaaattgcccccatctcccattttctgtctcccttcactacctcattgctccccttagcccctcccacagtctaacatgctgcatatttgatttg

SEQ ID NO: 34503 - DNA, 201 bp, Homo sapiens
agactaaagtagaccgtaatttaccaaccttcttaaacatgtggagccttttttatcccagaggcacaattgaatttatgttttgatataatcacattcayacaattcattatccaaaatataaaccgtgaaccgggaaaagtctctttcccattctcatcccagccacccagggagcggctggattcatgcctggctgct

SEQ ID NO: 34504 - DNA, 201 bp, Homo sapiens
gcaggctccaggtggcagtgagtcagccataaagctcgttcaggaaagtccagaggaatttttcttctgcatcaggttcaacttgagcagtgctgggtgaygcccagtgacacactcggttggggaaggagaggctggcacactccactagctgcttatctctgccacctccgcctccatttgtccctggcttcctggggc

SEQ ID NO: 34505 - DNA, 201 bp, Homo sapiens
ggccctcaggaccctgccctccccaggctttgacggagtccacagaggtggggtttaggggccagagccactgtgcaaacacagccccttgctggggagcsggggtgtttccagggacccgagctgatgccctgtcatgaagagaaaggagacgcaggggccaaaggctggggagaccctctctgtgctcagtggggtctc

SEQ ID NO: 34506 - DNA, 201 bp, Homo sapiens
cagcaagtttggaaacaaggtggctggcgaaagtgccaccggcagcttcggagagcagccggggcaccccttgagcctctgggtggcgtcgggacagtagrcaggactccctgtgtgttgatgctctgctgccgccccttctcgttgcttctcgtacctgtttcatgtctgctccgtggagcaggaggtgggaaccacaat

SEQ ID NO: 34507 - DNA, 201 bp, Homo sapiens
cagaggtggggtttaggggccagagccactgtgcaaacacagccccttgctggggagcgggggtgtttccagggacccgagctgatgccctgtcatgaagwgaaaggagacgcaggggccaaaggctggggagaccctctctgtgctcagtggggtctccccagcagcggggagctgcttccccatccaggctccgtaact

SEQ ID NO: 34508 - DNA, 201 bp, Homo sapiens
caggtgaggctttattttcctctataccaaaagactccatttgtgccctcaaagtaagaaaaggcaaaaatgtgtaacaagcagggtggaggtctcccggytctcgaaggggtgtcagcagggagctaagatgatccaacttgacttgagtggggagggcaagagtggcatcagaaaatggtggtggctttgcccaggcca

SEQ ID NO: 34509 - DNA, 201 bp, Homo sapiens
gttaactatgtgacctcaggaaagtcaccttaccccatctgcaaattcagcatctctttttttttttgagactgagtctcgctctgtcgcccaggctggagtgcagtggcgcgatccccgctcactgcaagctctgcctcccgggttcatgccattctcctgcctcagcctcccgcgtagctgggactacaggcgtccacc

SEQ ID NO: 34510 - DNA, 201 bp, Homo sapiens
aatctcactctgtcgctcaggctggagtgcagtggcatgatctcagttcactgcaacctccgcctcctgggttcaagcaattcttgtgcctcagcctcccmagtagctggaattagaggcatgcactgccatgcccggctaatttttatatttctaatagagatggggtttcaccatttggccaggctggtcttgaactcc

SEQ ID NO: 34511 - DNA, 201 bp, Homo sapiens
ctcaagcgatcctcccgccttagcctcctgagtagctaggacgataggtatgtgccaccacaccagactaattaaaaaaaaaattttttttttttttttttgagacagaatctcactctgtcgctcaggctggagtgcagtggcatgatctcagttcactgcaacctccgcctcctgggttcaagcaattcttgtgcctca

SEQ ID NO: 34512 - DNA, 201 bp, Homo sapiens
ctccctgagctcaagcgatcctcctgcctcagcctcctgagtggctaggatgataggtgtgtgccaccacaccaggctaattttttaaatttttaaaattatttttttgagacaggattttactctgtctttcaggctggagtgcagggatgcaatcacagctcactgcagcctcagcctcctggggctcaagcaatcctc

SEQ ID NO: 34513 - DNA, 201 bp, Homo sapiens
gtatgtaccaggccatttagacacgaggtcttatcatgtctctagaaaagccctgcgtagtccactttatgattatgattatgattatgattatgattatkattattttgagacggagtctcgctctgtctcccaggctggaaagcagtgatgcgatctcggctcactgcaacctccacttcccgggttcaagcgattgtc

SEQ ID NO: 34514 - DNA, 201 bp, Homo sapiens
gaggcagaggttgcagtgagccgagattgcgccattacactccagcctgggcaacagagcgagactccatctcaatcaatcaatcaatcaatcaatcaatcctgtgtgacaggactgcagaaagaatggagaaagataataagtgcatgacaagcctggtgcctggcccaacacaccgtaggtgctcattccatattgatt

SEQ ID NO: 34515 - DNA, 201 bp, Homo sapiens
gggaggcagaggttgcagtgagccgagattgcgccattacactccagcctgggcaacagagcgagactccatctcaatcaatcaatcaatcaatcaatcaatcctgtgtgacaggactgcagaaagaatggagaaagataataagtgcatgacaagcctggtgcctggcccaacacaccgtaggtgctcattccatattga

SEQ ID NO: 34516 - DNA, 201 bp, Homo sapiens
cgggaggcagaggttgcagtgagccgagattgcgccattacactccagcctgggcaacagagcgagactccatctcaatcaatcaatcaatcaatcaatcaatcctgtgtgacaggactgcagaaagaatggagaaagataataagtgcatgacaagcctggtgcctggcccaacacaccgtaggtgctcattccatattg

SEQ ID NO: 34517 - DNA, 201 bp, Homo sapiens
acctcctgagtagctgggatcacaggcgcccgccaccatgcctggctaattttttgtattcttagtagagacatggtttcaccatgttggccaggctggtstggaactcctgacctcaggtgatccacccacctcggcctcccaaagtgctgggattacaggcgtgagccactgcacctggcctacacacagattcttggg

SEQ ID NO: 34518 - DNA, 201 bp, Homo sapiens
ttgttgctcaggctggagtacagtggagtgacctcaactcactgcaacctccatctcccaggttcaagcgattcttctgcctcaacctcctgagtagctgrgatcacaggcgcccgccaccatgcctggctaattttttgtattcttagtagagacatggtttcaccatgttggccaggctggtctggaactcctgacctc

SEQ ID NO: 34519 - DNA, 201 bp, Homo sapiens
cgaggcctgtgttcctcctaatacccaacgtggttgcttttgcagacttccacacagagattcttttttttttttttttttttttcgagatggaggttcgytcttgttgctcaggctggagtacagtggagtgacctcaactcactgcaacctccatctcccaggttcaagcgattcttctgcctcaacctcctgagtagc

SEQ ID NO: 34520 - DNA, 201 bp, Homo sapiens
taaaattttccttcctgtggttcgatgtgtgaaaacaataggtattcttttccttctctaagtatggagttatatcgtaatactcaacaggctctttcaayctacatggaaattctttccctgccccataaagattctggtgccttccccgagtttgggagtggagcatgcaactgtgattaagatgatttgatttagaga

SEQ ID NO: 34521 - DNA, 201 bp, Homo sapiens
tctgtctgttccagaacctttgttctttccactccaaggttgagggagcagcttgttctcattggatctgagcctggtgctcagccccctgctcccccacycccacctgcatcatgtattcctctccctagttctcatccccgcccagctctgctctgggcctgggaccactctggaccaagactgcagctagggcagctc

SEQ ID NO: 34522 - DNA, 201 bp, Homo sapiens
tcacagaggggagggcacagctgctggcttggagggctcccaggaaggccaggagcagaaagtctgagaagcagattgggggcagcagagggagtctggcycttggtgccgggggtgccctggtggacagaggtgggggcagcatggagccggcatttatggaggccctagtatgtaccaggccatttagacacgaggtct

SEQ ID NO: 34523 - DNA, 201 bp, Homo sapiens
ctctccctagttctcatccccgcccagctctgctctgggcctgggaccactctggaccaagactgcagctagggcagctcctgtcctcctgagccaatgcrgtcatcattcccccactgtcagctggaatcagccctcctctccccagccaggcgtttcctcccgggctccctccatccccccaggcaagcatgacacatg

SEQ ID NO: 34524 - DNA, 201 bp, Homo sapiens
tcttcctgtacagcctgtgttcagcatcagctcaggggtgagcggatagggaccttcaaggaagggggtgtggaagtttaagacccagaaaggaaaggacytgagtcagggggaggaagaaggattagcctaggaagcatttaatggggagagaaaggaaactcagaaggctgaaaaagttggaattcaaactgaagcaac

SEQ ID NO: 34525 - DNA, 201 bp, Homo sapiens
cctggtgctcagccccctgctcccccactcccacctgcatcatgtattcctctccctagttctcatccccgcccagctctgctctgggcctgggaccactytggaccaagactgcagctagggcagctcctgtcctcctgagccaatgcagtcatcattcccccactgtcagctggaatcagccctcctctccccagccag

SEQ ID NO: 34526 - DNA, 201 bp, Homo sapiens
ttttgtagagacagggtttgctatgttgcctaggctggtctcaaacttcgggctcaagcgatcgtcctgcctcggacccccaaagtttgggatgacaggcrtgaaccaccacccctggctgaatccaacttgtgcttcctccataactgacttctacccagctggtcgtagtccttatgatcagccagtctcatggactct

SEQ ID NO: 34527 - DNA, 201 bp, Homo sapiens
gagggggtttgggaatgtggctgcgtgagtgtcccaggaagggcctagccagcgcccccttcccagaactcccacgccattctgcaggctcccataatgcytgagtatcgggtagaaattgggttcaaatttgatcccatctttttaccagctgtgcaaccttggacttgttacttaacctctctgtgtctcttattccac

SEQ ID NO: 34528 - DNA, 201 bp, Homo sapiens
aagcgattcctctgcctcagcctcctgagtagctgggactacaggcgctgcaccaccacgcccggctaatttttggatttttagtagagatggggtttcaycatgttggccagggtcgtctcgatctcctgacctcaagtgatccacccgcctcggcctcccaaagtgctgggattacaggcatgagccaccgtgcctggc

SEQ ID NO: 34529 - DNA, 201 bp, Homo sapiens
ccagaggttaagtgactttgtcaaggatataccaccagtccaaaatggtgaggggctcactctctggggagcagttagcatttagaggggatggggcaggrcagtggacaggccctctagcttcccagtgaggcccagaatgggctcttgtgcattgtgtgggttctggtctgactggttctggggctggttctcactggg

SEQ ID NO: 34530 - DNA, 201 bp, Homo sapiens
agttgaccctggtgtcgtagactcaagttcctctggaagcggtgagtgctgagtctggcaggaggggtgtgggagggatgggggatgtgggggccaccccrgcccataatggcaagccagcatcagcactggagggagatgggggctgcgggcaatggatgacacgtgcagatcacgccatctgcgtgtcacttggaaact

SEQ ID NO: 34531 - DNA, 201 bp, Homo sapiens
ggccagaacacgtgggcaaggggccaggaggaggcctccggtcccctcttttctcagctccctccagccaggacacagctgggctcactgtggagctgtckgcagcagaaggacctgctgcctgatactctcccctcttaatgagaggggtcttgggaagcagaacaacaggccactgataccagatggcctgagcttaag

SEQ ID NO: 34532 - DNA, 201 bp, Homo sapiens
caaaaccagcctggccaacatggcataaccctgcctccacaaaaaatataaaatttagccgggcgtggtggcgggcgcctgtaatcccagctactcgggargctcaggcaggagaatcgcttgaacccaggaggcggaggttacagtgagccgagaccacaccactgcactccagcctgggcgacagaggaagactcagtc

SEQ ID NO: 34533 - DNA, 201 bp, Homo sapiens
cagcatcacttgacgctggccagaacacgtgggcaaggggccaggaggaggcctccggtcccctcttttctcagctccctccagccaggacacagctgggytcactgtggagctgtcggcagcagaaggacctgctgcctgatactctcccctcttaatgagaggggtcttgggaagcagaacaacaggccactgatacca

SEQ ID NO: 34534 - DNA, 201 bp, Homo sapiens
gtaacttctaccccttccctgcccagacacggattctcgtgacgcacgcactccacatcctgccccaggctgattggatcatagtgctggcaaatggggcyatcgcagagatgggttcctaccaggagcttctgcagaggaagggggccctcgtgtgtcttctggatcaagccagacagccaggagatagaggagaaggag

SEQ ID NO: 34535 - DNA, 201 bp, Homo sapiens
tgtcttcaagtgggccgaggccagcttgctggagttgtctgaatgctgcagtagggcaggactggttcctccccatagctgtaaaccaccatgccaggccyggccacttatgctttgacaggctggctatgcacagggcttgggtctgtatgcacagcatcacttgacgctggccagaacacgtgggcaaggggccaggag

SEQ ID NO: 34536 - DNA, 201 bp, Homo sapiens
atcccagcactttgggaggccgaggcaggcagatcacctgaggtcaggagttcaaaaccagcctggccaacatggcataaccctgcctccacaaaaaatayaaaatttagccgggcgtggtggcgggcgcctgtaatcccagctactcgggaggctcaggcaggagaatcgcttgaacccaggaggcggaggttacagtga

SEQ ID NO: 34537 - DNA, 201 bp, Homo sapiens
gccatggcatttgtaaactgtcatggcactggtggagtgtagcagtgaggatgacgggaggtcactctcgtagccatcttggttttggtgggatttggccrccttctttactgcaacctgttttatcaggaaggtctttgtgacctgtatcttgtgccgacctcctatctcatcctgtgacttacaataccctaaccgtct

SEQ ID NO: 34538 - DNA, 201 bp, Homo sapiens
ggactcacgggcacggctcaccagctctatcctcaggaactcgaagaccatcaagttccatggctgggagggagcctttctggacagagtcctgggcatcygaggccaggagctgggcgccttgcggacctccggcctcctcttctctgtgtcgctggtgtccttccaagtgtctacatttctggtgacgtcactctagtc

SEQ ID NO: 34539 - DNA, 201 bp, Homo sapiens
atgatatgctaaacaaggggtggattattcatgcctttccttcttagaccatatagggtaacttcctgatgttgccatggcatttgtaaactgtcatggcrctggtggagtgtagcagtgaggatgacgggaggtcactctcgtagccatcttggttttggtgggatttggccgccttctttactgcaacctgttttatca

SEQ ID NO: 34540 - DNA, 201 bp, Homo sapiens
ggaactcctgggctcaagtgatcctctggcctctgcctcccaaagtgctggggttacaggtgtgagccactgtgcccagccaagaaactgaagtcttaaasagttaagagacttgtttgtgttttcatatctagcctgggacacaacctgggactcaaatctaggccaatctgagtctgaagcttacactgtttctcatct

SEQ ID NO: 34541 - DNA, 201 bp, Homo sapiens
ccacgcaggagagaaggtgagtggttctctcacaatgtcttcttcatggagtttaggccaaaggactccagggacaaggccctaaaccctgggcaccagcyacctccacagtgtccccacctcaggtcccctagctttcagacccattaccccctaaaatgaactcctcaccttccccaaacctgcttccatctggtgact

SEQ ID NO: 34542 - DNA, 201 bp, Homo sapiens
ttctatcaccttcacagagaggcctttcctgaccaccttatctaccaccacagccaccctactattgttagtgcaccctacacctgcacctgctttttctytttttcttttttttttttctgagacggagtctcgctctgttgcccaggctggagtgcagtggcacaatcttggctcactgtaacctccacctcctgagtt

SEQ ID NO: 34543 - DNA, 201 bp, Homo sapiens
ggtactccccacatccccaaactgggcttgagggacagacagaggcagagactgtcggacccctgctagtgggacctttgaagaccctgtgtccaaaccamcatggtgtgtggagtccctccaccaaggagggacacgcagctctacaagagccagactcagctaaggtgaacttgcaaccttgggcaagagtctttcctt

SEQ ID NO: 34544 - DNA, 201 bp, Homo sapiens
catgattgacagcaccccaacccagccctttcccacaggaaaccagaagtagaaaacatggtagtcagataaaaaccatggctagggctaggcatggtggytcacacatctaatcacagcactttgggaggctgaggtgggcagatcacttgaggtcaggagttcgagaccagcctggtcaacatggtgaaactccgtcta

SEQ ID NO: 34545 - DNA, 201 bp, Homo sapiens
cacagggctactgccaaacaagttgccacaaacttgggagcccagcacaattgaaatttgttctgtcgcagttctgaggcctgaagtctaaaatcaaggtktcagcagtgttaactctttgtggaggtttttttggtttttttgtttgtttgtttgtttgttttttctgagacggagtcttgctctgtcaaccaggctgga

SEQ ID NO: 34546 - DNA, 201 bp, Homo sapiens
ggagcactcggacgaggctatctgggcagccctggagacggtgcagctcaaagccttggtggccagcctgcccggccagctgcagtacaagtgtgctgacygaggcgaggacctgaggtatggtcgtcccaccatggctgggacctgcaggtgggagaggaggggatggccatgccctccccaagggccttcaggaaatgc

SEQ ID NO: 34547 - DNA, 201 bp, Homo sapiens
tccaaaagttctagtgaagtcccaggtctccctgtcattggcctgacttgggttatgtgttcatccctgaaccaactgcagtggtttggattggccatggrtgaaatttgccccaccccagaggagaagttagccccaccccaggcatacagattagcactgggaggaaggatgtgcatttctctcacagggctactgcca

SEQ ID NO: 34548 - DNA, 201 bp, Homo sapiens
aaacgcacgtcccagctaattgtcccaatcgttcccagcgtgggccagaaacagctcctgtgtctggcacgtgcccttctccggaagacccagatcctcaycctggacgaggctactgctgccgtggaccctggcacggagctgcagatgcaggccatgctcgggagctggtttgcacagtgcactgtgctgctcattgcc

SEQ ID NO: 34549 - DNA, 201 bp, Homo sapiens
aggtactccccacatccccaaactgggcttgagggacagacagaggcagagactgtcggacccctgctagtgggacctttgaagaccctgtgtccaaaccmccatggtgtgtggagtccctccaccaaggagggacacgcagctctacaagagccagactcagctaaggtgaacttgcaaccttgggcaagagtctttcct

SEQ ID NO: 34550 - DNA, 201 bp, Homo sapiens
cctagatttctggcttcaggtatggctggatgtaggggtccaaacaagaaatcgctttatttccctcctctgtgacagcttcctgtccagcttagctgctscccctggcagtaagatgatattccacagctccagcttggctacctccaacaaccaagtaccacttttccaaaagttctagtgaagtcccaggtctccctg

SEQ ID NO: 34551 - DNA, 201 bp, Homo sapiens
gctcagttatcactgattgaagaaatgaatgagtgagtgaatgcctgaaggatgttcctggaagaactcagagtggggtgttgagagaggttgctggagaygtggcaggagccagatcaggggaaatggatggtcagagcggttaaggccacatagtcagtgggtgtcaaagtgggtatctgggccgtgttgcgtgacagg

SEQ ID NO: 34552 - DNA, 201 bp, Homo sapiens
agcaaggctgttgggggaaacagaggtaacttgactttgtacagtgttaaatgctgtttttccaacctcaagttcatagtaggtgctcagttatcactgaytgaagaaatgaatgagtgagtgaatgcctgaaggatgttcctggaagaactcagagtggggtgttgagagaggttgctggagacgtggcaggagccagat

SEQ ID NO: 34553 - DNA, 201 bp, Homo sapiens
aaagagagttaaatcacttgcccaaggtcacaagattagaacttgagtatgtccagctccagagtctatgcttgcagttgctatggagacagcccaagaargactttgatgcctagcaagctacaccgtgctagctagggtttctaataatccaaaaaaacagtgtgctggatacatggcaaggttctggaagtaaagttg

SEQ ID NO: 34554 - DNA, 201 bp, Homo sapiens
aactccatctcaataataacaacgacaacagcagtaataataataatagaagtgcacaatcaacgtaatgtgcttgaatcgtcctgaaaccatcccccggrccatccccctgcccccaggtccatggaaaaatcgtcttctacaaaactggtccctggtgccaaaaaggctggggaccactgccctacaggtatccaaata

SEQ ID NO: 34555 - DNA, 201 bp, Homo sapiens
gaataagttaaagtaatcaatagtgcacaagggaaattatagttaatgatcatttacttgtatatttcaagatagctagaagagaaggatggttgtgttcscaatacaaaagataaatatttgaggtgatgactatctcagttaccctgatttgatcattacatattgtctacagcaggggtccccaacccccgggccatg

SEQ ID NO: 34556 - DNA, 201 bp, Homo sapiens
tgcgtgcccacattgtgttgctgtgcatgctagcatgcttgtatgagtgtgcaaatgtgcatgcatgtgtgcacgctttgtgtgcatgtgtacatgcacaratgtgcacaggatagttcctcaaatagctagacaaggactgggaaaaagaacagccccacaggtcctcttggagactcccagagcaggaaagctcagctc

SEQ ID NO: 34557 - DNA, 201 bp, Homo sapiens
  misc_feature (1)...(201): n = A,T,C or G, or insertion/deletion polymorphism (see Tables 1-2)
gtgcccggcctgggagaagaaccttctaggcggtgggaatggcatcagcaaaggtcctggggcaggagagtgcctggacctgggtttctcaacctcagcanggttgatattttgggctgaaactcctttgttgggggctgtcgtgtgcattgtgggatgtttagctgaccccagtctctacccactagatgccagcagcac

SEQ ID NO: 34558 - DNA, 201 bp, Homo sapiens
acagaggttaactaagcaaagaatgatccgcacatcgggcagtccctgaaccagaatacgtccagagaggctctggtacagccacggggtcaaagattaayagacagaaaaaggaaggtgaaggacagaaaacagaagtgaggtacagaaacagccggattggttacagctcagcgtttgctttattggaacatggtttga

SEQ ID NO: 34559 - DNA, 201 bp, Homo sapiens
aggatcataattaacagtagcactcctgccccagaggggctgaggcattaaacaagcccatatgtagaaagcacttaaaagggtgccgggcacacaactgyaccctgtaggtatttgtaatattatcattagttacttttccataaaggataagacagtagatgctttttacactggaggccacaccatctctcctgcaaa

SEQ ID NO: 34560 - DNA, 201 bp, Homo sapiens
ccaggctggccaagacgatgccaagggagggctggctgagaggagccccaaggttcagccctatcagctgtgctcacttctgtgcctcctgtatcagtccraggtcatgatcatctatagtctccaactctatcgcttggtctttgtggccaaaaatctcagacagccctgaaactccctaagaagagaaggaatatgccc

SEQ ID NO: 34561 - DNA, 201 bp, Homo sapiens
gttccagggcagcacagtggtccgggcattccgaacccaggccccctttgtggctcagaacaatgctcgcgtagatgaaagccagaggatcagtttcccgygactggtggctgacaggtaggaagagccagggcagagaagaccttgcaattcatccatatccttagagggtgagacctgaggtcatattgtatggtagcg

SEQ ID NO: 34562 - DNA, 201 bp, Homo sapiens
tgtctccaacgtgaggatcataattaacagtagcactcctgccccagaggggctgaggcattaaacaagcccatatgtagaaagcacttaaaagggtgccrggcacacaactgcaccctgtaggtatttgtaatattatcattagttacttttccataaaggataagacagtagatgctttttacactggaggccacacca

SEQ ID NO: 34563 - DNA, 201 bp, Homo sapiens
ccaggtgaggctggtggagggggtgggcaaagatgggaggcatggtgggacccggctctgacccaccgcccctccccgccaggaccccatcctgttccctsgctctctgcggatgaacctcgacctgctgcaggagcactcggacgaggctatctgggcagccctggagacggtgcagctcaaagccttggtggccagcct

SEQ ID NO: 34564 - DNA, 201 bp, Homo sapiens
tccctcgtccaggtgaggtgggtgcaagggctggagccatcctgggagagtgcgtgggctacacctggctccagcttccctacccctgccatttgcagagragagggaagacagagtgggagggagagggatggtgtggagctggaaaagaggcgggtaggggcaagaacagaggcgggcagagagtacagcaaatacatc

SEQ ID NO: 34565 - DNA, 201 bp, Homo sapiens
ggctacacctggctccagcttccctacccctgccatttgcagaggagagggaagacagagtgggagggagagggatggtgtggagctggaaaagaggcggrtaggggcaagaacagaggcgggcagagagtacagcaaatacatctggaaggggtcagcctttggagggcaatgtgcagacctttccacacacacctcaga

SEQ ID NO: 34566 - DNA, 201 bp, Homo sapiens
tgacctcaggtgatccacccgccttggcctcccaaagtgctgtgattacaggcatgagccactgtgcccggcccctcgtggaggctctgatggagaatacrccccaggcttctctcctggtttctggtggtcgccggcagtcgctggcattccttggcttgtagatacaccctcccatctgtgtcaccatcttcatatctc

SEQ ID NO: 34567 - DNA, 201 bp, Homo sapiens
gtgatcctcccaccttggcctcccaaagttctgggattacagggcatgagcccctgtgccccacggcacagttaaatattaagggccagagcctttcacgygtaatgtttttatcctgccgtaatttcttcctctccaattatctggaagccaaaaaggcattgcaaggtctcaaaggctattatatgaagctagattctt

SEQ ID NO: 34568 - DNA, 201 bp, Homo sapiens
cgtaatttcttcctctccaattatctggaagccaaaaaggcattgcaaggtctcaaaggctattatatgaagctagattctttcaattgctgggaccagcraccaactaaaattagcttaaccaaaagaatagaatttaatggcttatatttccttgggggcatgggcccagttgtcatcaggacacagtgactctctcca

SEQ ID NO: 34569 - DNA, 201 bp, Homo sapiens
gaggtgtccttcctaggggagatggtacctgagggtaggtgagagttagccagaaaagagcattccagacacaaggaactgcttgagcaaggctgttgggkgaaacagaggtaacttgactttgtacagtgttaaatgctgtttttccaacctcaagttcatagtaggtgctcagttatcactgattgaagaaatgaatga

SEQ ID NO: 34570 - DNA, 201 bp, Homo sapiens
agaaatagaactaccggggcgcagtggctcacgcctgtaatcccagcactttgggaggctgaggtaggtggatcacctgagagtttcaaacaagtcggacsaacatggtgaaaccccatctctactttaaaaatacaaaagccaggcatggtggcgcatgactgtaattccagctacttgggaggctgaggcaggaaaact

SEQ ID NO: 34571 - DNA, 201 bp, Homo sapiens
aagcacttagcatccagtcctaacccaagtttatctcacctcccccttccacttgagtccaatttcctctttgtattggtcagcttttgctgtgacaatgytatgtaacaaacaacccccagatcccagcagcttacaacagcaggtgtttcttccttatggatctgtgatttaactactacagctttgccttggatgatt

SEQ ID NO: 34572 - DNA, 201 bp, Homo sapiens
agaatcgcttgaacccgggaggcagaggtttcagtgagccaagattgtgccactgcactccagcctgggtgacagagtaagactccgtctcaaaaaaaacmaaaaaaaacctaaggtgttctggatttataaacccctctgaccctgagggtgtccgaagggcttgtggtaggcaataatttccagcactagagaggcagc

SEQ ID NO: 34573 - DNA, 201 bp, Homo sapiens
gagaatcgcttgaacccgggaggcagaggtttcagtgagccaagattgtgccactgcactccagcctgggtgacagagtaagactccgtctcaaaaaaaamaaaaaaaaacctaaggtgttctggatttataaacccctctgaccctgagggtgtccgaagggcttgtggtaggcaataatttccagcactagagaggcag

SEQ ID NO: 34574 - DNA, 201 bp, Homo sapiens
gataaaggataagagatggatggatgaatggatggatgggattgggtggaagaaaggataagaacagcagcatagcactaatgtaacagtaacataacagygttgagtttactgggaggatcaaatgagatcctgcaaagaaatgatttaatagagtgcctggtccattgcaaacactcaatacatgtctgctgctcttat

SEQ ID NO: 34575 - DNA, 201 bp, Homo sapiens
aggcagcaggcaggatttggtctctgggccacagtttgcctccccctggattatgtagccatgggacacagacagaacaagaaccctgcggggtcacccasaagccagtgagtagcagggcaatttgttcagtgggagagatttcttcctgcagcctctgcccctgggggggcgggggatggtgcctgggggcctctccga

SEQ ID NO: 34576 - DNA, 201 bp, Homo sapiens
taaccagcctcatgtttttagggagaagatgcatggggctcctgctgcctcccacctgagaggtggtgtaggtttccagcctgggactggagggtgggttwggctgggctggggctctgccggggaggttctcaggatacatctctacctcctgaaggtggggacctgcacagcatagaccagtatctcctgcagacgggg

SEQ ID NO: 34577 - DNA, 201 bp, Homo sapiens
tgggattggagatggatggatggatgcatggatggatggatgggtgggatggggtggataaaggataagagatggatggatgaatggatggatgggattgrgtggaagaaaggataagaacagcagcatagcactaatgtaacagtaacataacagcgttgagtttactgggaggatcaaatgagatcctgcaaagaaatg

SEQ ID NO: 34578 - DNA, 201 bp, Homo sapiens
cgtgttccaataaaactttatttataagaaaaggcagcaggcaggatttggtctctgggccacagtttgcctccccctggattatgtagccatgggacacrgacagaacaagaaccctgcggggtcacccagaagccagtgagtagcagggcaatttgttcagtgggagagatttcttcctgcagcctctgcccctggggg

SEQ ID NO: 34579 - DNA, 201 bp, Homo sapiens
tggtggcgcatgcttgtaatcccagcttcttgggaggatgaggcgggaggattgcttgagcccgggaggcagaggttgcagcgagctgagattgcaccacygcactccagcctgggtgacagagagagactccatctcaaaaaacaaacaacaaaacccatggctaccactgtccccgacaattgtcctaggtcttctcta

SEQ ID NO: 34580 - DNA, 201 bp, Homo sapiens
cctgggggcctctccgatgcagaggccggccaggtcaggggtctcctgtaaatggcctcttgtgccctgcagctgccgggaaggattgcatcacgatacamagtgccaccttcgcctggtcccaggaaagccctccctgcctccacaggtacagaacgacacccgtagtaaccagcctcatgtttttagggagaagatgca

SEQ ID NO: 34581 - DNA, 201 bp, Homo sapiens
caggcatgagacactgtgccggccacagtgaaattaataacacccccttcactctgggaaggctgggatttgatgataatttatttcagaaattcactaaytttttccataaatgaccagattgtgcatattttaggcctgtgggccacacagtctctgtcacaactgctcaaagcatgaaatagagaaatgaatggatgt

SEQ ID NO: 34582 - DNA, 201 bp, Homo sapiens
ctgtcgcagttctgaggcctgaagtctaaaatcaaggtgtcagcagtgttaactctttgtggaggtttttttggtttttttgtttgtttgtttgtttgttttttctgagacggagtcttgctctgtcaaccaggctggagtgcagtagcacgatctcggcttatggctcactgcaacctctgcctcctgggttccagtgtt

SEQ ID NO: 34583 - DNA, 201 bp, Homo sapiens
atggtgcctgggggcctctccgatgcagaggccggccaggtcaggggtctcctgtaaatggcctcttgtgccctgcagctgccgggaaggattgcatcacsatacaaagtgccaccttcgcctggtcccaggaaagccctccctgcctccacaggtacagaacgacacccgtagtaaccagcctcatgtttttagggagaa

SEQ ID NO: 34584 - DNA, 201 bp, Homo sapiens
caccaccatcaaggtcaccactcgggttgcatcgtttcccatgaactagaaagctttgtcctcacgcctcctatgcacagagcttggtagacaggaagctkttgccacacatcttgagacaccgacacccaaaacctgagttctttgctcttcttgctgggtgacctgcggcttcggttttcctaggcccgggtgtccttt

SEQ ID NO: 34585 - DNA, 201 bp, Homo sapiens
ctgcgggcaatggatgacacgtgcagatcacgccatctgcgtgtcacttggaaactggcaccgtgctgctcttctttctgctagccattcagcgaccactsactgagcgcccactttgtaccatcctgggtgtacaacagggaacactctaacacagtggtccccaagctttttggcaccagggactggttttgtggaaga

SEQ ID NO: 34586 - DNA, 201 bp, Homo sapiens
ttcactcagtgcttctcaaagtgtgaccccaggaccagcagtagtatcacctggggactagttagcaaagtacattcttaggccccagcccaggactactkcctcagatactatgtgggtcggcccatgaatctaggttttaattaaccctccaagtaattctgatgtacacaaatgtttaggaaccactggcttacctct

SEQ ID NO: 34587 - DNA, 201 bp, Homo sapiens
ttccctacccctgccatttgcagaggagagggaagacagagtgggagggagagggatggtgtggagctggaaaagaggcgggtaggggcaagaacagaggygggcagagagtacagcaaatacatctggaaggggtcagcctttggagggcaatgtgcagacctttccacacacacctcagaacatgcatacttgtccatc

SEQ ID NO: 34588 - DNA, 201 bp, Homo sapiens
cattgctgggacccctgtgtgtacaaagctggtgtgatgaccagtccttgtgcccagagaagcatctccctgcagatgagagtaaccactcaccctgctgycgcttccctttgcaggtggcttgcggccaatgtggagctcctggggaatggcctggtgtttgcagctgccacgtgtgctgtgctgagcaaagcccacctc

SEQ ID NO: 34589 - DNA, 201 bp, Homo sapiens
aatgaggcagaaggactcacgggcacggctcaccagctctatcctcaggaactcgaagaccatcaagttccatggctgggagggagcctttctggacagartcctgggcatccgaggccaggagctgggcgccttgcggacctccggcctcctcttctctgtgtcgctggtgtccttccaagtgtctacatttctggtgac

SEQ ID NO: 34590 - DNA, 201 bp, Homo sapiens
gagtgagggtcagaggtgctgagaggcagacaggtttgggacgcagtttggtgagatgaatgggatttgctgaagggtggctgtcagggtgcagggaagarttctcaactgtccctgtcttcatctctctttttccctccgatcccaggaggagcaaatgaggcagaaggactcacgggcacggctcaccagctctatcct

SEQ ID NO: 34591 - DNA, 201 bp, Homo sapiens
cctcagcctcccaagttgctggaattacaggcgtgagccactatgcctggctaatttttgttaactattaacagtatgtaatgtcagttcatgacatctaygaaaaaaatatatatatacactcataagcatttgttatggaggaggcattattctaagagctttatatgtttttgttcgttttggtttgttgttgttgct

SEQ ID NO: 34592 - DNA, 201 bp, Homo sapiens
tgcccacgtggggctgcacacactgcgctccaggatcagcatcatcccccaggtgaggctggtggagggggtgggcaaagatgggaggcatggtgggaccyggctctgacccaccgcccctccccgccaggaccccatcctgttccctggctctctgcggatgaacctcgacctgctgcaggagcactcggacgaggctat

SEQ ID NO: 34593 - DNA, 201 bp, Homo sapiens
gctcctctgactcagtttcccctcctgctccaggctccctggaggctgcccacatgtgcagctcagcccccctggcctcagggcgggcagatcgagttccrggactttgggctaagataccgacctgagctcccgctggctgtgcagggcgtgtccttcaagatccacgcaggagagaaggtgagtggttctctcacaatg

SEQ ID NO: 34594 - DNA, 201 bp, Homo sapiens
agtttgagaccagcctggccaacatggtgaaatcccgtgtctactaaaaatacaaaaattagccgagcatggtgacaggcacctgcagtcccagctactarggaggctgaggcaggagaattgcttgaacctgggaggtggaggttgcagtgagctgagatcgcaccactgcactccagcctgggcaatagagcaagactt

SEQ ID NO: 34595 - DNA, 201 bp, Homo sapiens
tggatgatggatggatggatggcaggatggggtggaaaaaaggataagggatggatggacggacagacagatggatgggatggggtagaaaaaaggatgasagatgatggagaggtgtaaatagaaggatgaggaaagatggaggaactaaaggaagggtggggagaaagatgggagagagatatcaggataagggaaaga

SEQ ID NO: 34596 - DNA, 201 bp, Homo sapiens
atcctccgcctcaacctcccaaagtgttgggatcacaggcatgagccaccaggcccggcctggtctcaaactcctgggctcaggcaatcctccgcctcaamctcccaaagtgttgggatcacaggcatgagccaccacgcccggcctggcttcatctttaaaggacagttgcctcgttttcatgttgattcgtcctcattc

SEQ ID NO: 34597 - DNA, 201 bp, Homo sapiens
ccaggctacagtcgaacttgcgtaggcctcccaaagtgctgggattacaggtgtgagcagccacgccgggcccatctcacccatttttcagtgtatagttwctgtagtgttaggtacattcacactgttacacaacagaactacaactctgtacccatgaaaccctaactctccttgtcccctcccccagcgcccagccac

SEQ ID NO: 34598 - DNA, 201 bp, Homo sapiens
tccctgagaaggaccgtaccacttcagaagcccagacagaggttcctctggatgaccctgacagggcaggatggccagcaggaaaggacagcatccaatayggcagggtaaccaccagcttcacccacccctccccacccactgtgccacctccaggggcccaagtcctcccaccaaatgtagcacttggcagtgatactc

SEQ ID NO: 34599 - DNA, 201 bp, Homo sapiens
ctgagggttaggcacatacaccccaccattgggagagatactgactttgtcttcatttcctctaaatgacaggtccatcaagtcagtccctgagaaggacygtaccacttcagaagcccagacagaggttcctctggatgaccctgacagggcaggatggccagcaggaaaggacagcatccaatacggcagggtaaccac

SEQ ID NO: 34600 - DNA, 201 bp, Homo sapiens
agaacaacagggctaccaagatcaaaaactctgctgtcccccgatgcctggaacctagaggcattaggttctcccctaggttctagtgatgcctagagccrtggggctgcgcactcatcaccattagcaatgcgctgtgtctttagagagagccttatgtagcttatgactgcggagaggacatgtgttagcaggactggg

SEQ ID NO: 34601 - DNA, 201 bp, Homo sapiens
aaaccattatggatagagaacctgctgaagtccccccatggtgccctgctgagggataatttaccaaaattggtccagttagccaagatgattaggccccyataaggccagttcatggaatgaacaatatgccttccaattgatggatgtcttcaagtgggccgaggccagcttgctggagttgtctgaatgctgcagtag

SEQ ID NO: 34602 - DNA, 201 bp, Homo sapiens
tatgtggttagctcatgccagctgagacgcttggagtcagccagctactcgtctgtctgctcccacatggctgagacgttccagggcagcacagtggtccvggcattccgaacccaggccccctttgtggctcagaacaatgctcgcgtagatgaaagccagaggatcagtttcccgcgactggtggctgacaggtaggaa

SEQ ID NO: 34603 - DNA, 201 bp, Homo sapiens
gtatgtggttagctcatgccagctgagacgcttggagtcagccagctactcgtctgtctgctcccacatggctgagacgttccagggcagcacagtggtcygggcattccgaacccaggccccctttgtggctcagaacaatgctcgcgtagatgaaagccagaggatcagtttcccgcgactggtggctgacaggtagga

SEQ ID NO: 34604 - DNA, 201 bp, Homo sapiens
cctcagtgctggcctcgtgggcttctctgtctctgctgccctccaggtactccccacatccccaaactgggcttgagggacagacagaggcagagactgtyggacccctgctagtgggacctttgaagaccctgtgtccaaaccaccatggtgtgtggagtccctccaccaaggagggacacgcagctctacaagagccag

SEQ ID NO: 34605 - DNA, 201 bp, Homo sapiens
tctgtcgcagttctgaggcctgaagtctaaaatcaaggtgtcagcagtgttaactctttgtggaggtttttttggtttttttgtttgtttgtttgtttgttttttctgagacggagtcttgctctgtcaaccaggctggagtgcagtagcacgatctcggcttatggctcactgcaacctctgcctcctgggttccagtgt

SEQ ID NO: 34606 - DNA, 201 bp, Homo sapiens
tctgaggaggtgacttaggaggaagtgaggttaacagcaggaagaaaaggcctgggagttgaaggttcatccctggtgtgttagaggaacagcaagaagaygggtgtggctggagagggtgggtgaaggcaggggtgctgggagacaaggttggggatgggatggcagggctagagctgctaatggctcatagggaggagc

SEQ ID NO: 34607 - DNA, 201 bp, Homo sapiens
ttctgtcgcagttctgaggcctgaagtctaaaatcaaggtgtcagcagtgttaactctttgtggaggtttttttggtttttttgtttgtttgtttgtttgttttttctgagacggagtcttgctctgtcaaccaggctggagtgcagtagcacgatctcggcttatggctcactgcaacctctgcctcctgggttccagtg

SEQ ID NO: 34608 - DNA, 201 bp, Homo sapiens
tgcaaacactcaatacatgtctgctgctcttattagccctatttcccagattggaaaaccaagactcaagggggtagaatgatctgttcaaggtcacgggmacagcaaaggcagtattggtcttcccactgcacagtcatgtcctttcacaaagacaaagagaaatgtctgctcccactatagaaaaagagattattttat

SEQ ID NO: 34609 - DNA, 201 bp, Homo sapiens
gttctgtcgcagttctgaggcctgaagtctaaaatcaaggtgtcagcagtgttaactctttgtggaggtttttttggtttttttgtttgtttgtttgtttgttttttctgagacggagtcttgctctgtcaaccaggctggagtgcagtagcacgatctcggcttatggctcactgcaacctctgcctcctgggttccagt

SEQ ID NO: 34610 - DNA, 201 bp, Homo sapiens; identical to SEQ ID NO: 7790

SEQ ID NO: 34611 - DNA, 201 bp, Homo sapiens
agcccccgcacccggccctatggatctcattgtgatttccccagttttgcttgcacgtgggtgtgcgcatgtttgcctctgtgcagtcgtatcccctgttyagtctctcgcatccatcacgatggttgacagttgagatactgaacaaccccctcaccacgaggcgctctcgtgttgcccttttgcaaccacacccaccct

SEQ ID NO: 34612 - DNA, 201 bp, Homo sapiens
ttcctgagtagctggaagctgggattacaagtgtgcagcctggttaatttttgtatttttagtagagatggggtttcaccatgttggccaagctggtctcraactcctgacctcaaatgatctgcccgcctcggcctcccagagtgttgggattacaggtgtgagcccccgcacccggccctatggatctcattgtgattt

SEQ ID NO: 34613 - DNA, 201 bp, Homo sapiens
tcctgacacccatcaatccatggatctcaattatttatttatttatttatttgtttattttattttgagacagagtcttgctctgttgcccgggctggagkgcagtgctgccgtctcggctcactgcaacccccatctccgaggttcaagcagttctcctacctcagcttcctgagtagctggaagctgggattacaagtg

SEQ ID NO: 34614 - DNA, 201 bp, Homo sapiens
tgttggccaggccaggctggtcttgaacccccgacctcatgtaataagcccgcctcagcctcccaaagtgctaggattataggcatgagccaccgcgcctrgccgccttatttatttatttatttatttatttatttatttatttatatttattgagacagtgtctcactctgtcacccaggctggagtgcagtggcacga

SEQ ID NO: 34615 - DNA, 201 bp, Homo sapiens
gtgtaatggcgcaatctcagctcactgcaacctccacctcctggcttcaaacgattctcttgccttagcctctcgagtagctgggactacaggtgcctgccaccacacgtggctaatttttgtatttttagtagagacggggtttcactacgttggtccaggctggtctcaaactcctgagctcaggtgacacacccgcct

SEQ ID NO: 34616 - DNA, 201 bp, Homo sapiens
agtagagacagggtttcaccatgttggccaggccaggctggtcttgaacccccgacctcatgtaataagcccgcctcagcctcccaaagtgctaggattayaggcatgagccaccgcgcctagccgccttatttatttatttatttatttatttatttatttatttatatttattgagacagtgtctcactctgtcaccca

SEQ ID NO: 34617 - DNA, 201 bp, Homo sapiens
gtagcttagggtgccagagaaaggggtcccatgaggctggcaggcagtgagtgggggcgagataagaagcttggaatttctttctttctttctttctttcytttttttttttttttttttttttgagacagagtttcgctcttgtcgcccagagaagagtgtaatggcgcaatctcagctcactgcaacctccacctcctg

SEQ ID NO: 34618 - DNA, 201 bp, Homo sapiens
agtagcttagggtgccagagaaaggggtcccatgaggctggcaggcagtgagtgggggcgagataagaagcttggaatttctttctttctttctttctttyttttttttttttttttttttttttgagacagagtttcgctcttgtcgcccagagaagagtgtaatggcgcaatctcagctcactgcaacctccacctcct

SEQ ID NO: 34619 - DNA, 201 bp, Homo sapiens
atgaaatagagaccactgagaaaccataccatggttggtatggacaggatgctctgagaagtgacatttgagcttccccaaagaatgtgtgaaggaatcartcatacaaagggcaggagaaagagcgctccaggcagagagagcagcaggtgcaatggctccgaggtgggaagtagcttagggtgccagagaaaggggtcc

SEQ ID NO: 34620 - DNA, 201 bp, Homo sapiens
agatggggaggggagagctgagtgcgagcccacgggtctggctttgttcttgtcgtctgtgagctgcccatcactcagacctgcaccccctccccctatcstctcaatggacagtggctccgtccctccaatgttcaggccacaggccctgggtcagttcaatgcctttttctctcacatcccatctgtcagcagatttgc

SEQ ID NO: 34621 - DNA, 201 bp, Homo sapiens
cagtgagtagcagggcaatttgttcagtgggagagatttcttcctgcagcctctgcccctgggggggcgggggatggtgcctgggggcctctccgatgcaraggccggccaggtcaggggtctcctgtaaatggcctcttgtgccctgcagctgccgggaaggattgcatcacgatacaaagtgccaccttcgcctggtcc

SEQ ID NO: 34622 - DNA, 201 bp, Homo sapiens
ttctgatcatgtaaaaggatgctgtttcatggaagggcttactgtgcaagacagccatgctggggccccaggggtcagttcccacctgggtcaggggctcmctgggctcacaacctggaatctcaactcctccaccctccacgaagggtgctactccatgccaagggcttattctgtgacaagcctacacacttttttttt

SEQ ID NO: 34623 - DNA, 201 bp, Homo sapiens
ctgggtcaggggctcactgggctcacaacctggaatctcaactcctccaccctccacgaagggtgctactccatgccaagggcttattctgtgacaagccyacacactttttttttttttttttttttttttgagacagagtcttgctctgtcgcccaggctggagtgcagtggcgcgatcttggctcacttgcaagctct

SEQ ID NO: 34624 - DNA, 201 bp, Homo sapiens
cccaagtctgaccaccttcggggtctgcagctgtgttacagaaaaggggtcctgatccagatcccaaaagagggttcttggatctcgtgcaagaaagaatycagggcgagtccataaagtgaaagcaagtgtttgtttgtttgttttttgagacggagtctcactctgccacccaggctggagtgcagtggtgcgatcgtg

SEQ ID NO: 34625 - DNA, 201 bp, Homo sapiens
cataaacaggccaggcacggtggatcacgcctggaatcccacccaggtgttgtacacatctgtatttaaggcccacgtgacaccagccttgaatgtcttargaagactgtagatttgattcttgaagcagcagtgagtcattgtaggtttgtttgcaacggcatgactgaagtgaaagctgtgctttcgctgttgggggaa

SEQ ID NO: 34626 - DNA, 201 bp, Homo sapiens
ctcgtagccatcttggttttggtgggatttggccgccttctttactgcaacctgttttatcaggaaggtctttgtgacctgtatcttgtgccgacctcctrtctcatcctgtgacttacaataccctaaccgtctgggaatgcagcccagtaggtctcagcctcattttacccagtccctattcaagatggagttgctctg

SEQ ID NO: 34627 - DNA, 201 bp, Homo sapiens
ctgcccaaggacatgcgcccagcacacgcttccaacccagctgtgagggccagggagccgcatggaaagcaggacttctatggagaaaacctcagcgcagrcacactgggctctcacagctgccgagagcctgggctggtgtccagagagcctctctgtctccctctcccccacagggttctggtcatggacaaggggcag

SEQ ID NO: 34628 - DNA, 201 bp, Homo sapiens
attcaagatggagttgctctggttcacgtgcctctgagagctgggctcctcgggatctcctgacatcctgccccttctatccccagctcctggggccctcygccctcactgccatcgctgtcttcctgagcctcctccctctgaatttcttcatctccaagaaaaggaaccaccatcaggtttggcttttgggaaagggac

SEQ ID NO: 34629 - DNA, 201 bp, Homo sapiens
agggccagggagccgcatggaaagcaggacttctatggagaaaacctcagcgcagacacactgggctctcacagctgccgagagcctgggctggtgtccaragagcctctctgtctccctctcccccacagggttctggtcatggacaaggggcaggtggcagagagcggcagcccggcccagctgctggcccagaagggc

SEQ ID NO: 34630 - DNA, 201 bp, Homo sapiens
ccagtccctattcaagatggagttgctctggttcacgtgcctctgagagctgggctcctcgggatctcctgacatcctgccccttctatccccagctcctrgggccctccgccctcactgccatcgctgtcttcctgagcctcctccctctgaatttcttcatctccaagaaaaggaaccaccatcaggtttggcttttgg

SEQ ID NO: 34631 - DNA, 201 bp, Homo sapiens
gcacgtgggtgtgcgcatgtttgcctctgtgcagtcgtatcccctgttcagtctctcgcatccatcacgatggttgacagttgagatactgaacaaccccstcaccacgaggcgctctcgtgttgcccttttgcaaccacacccacccttctcctgcctcgcccaccctgtccccaacccctggttcttctccttttaata

SEQ ID NO: 34632 - DNA, 201 bp, Homo sapiens
cttgcacgtgggtgtgcgcatgtttgcctctgtgcagtcgtatcccctgttcagtctctcgcatccatcacgatggttgacagttgagatactgaacaacmccctcaccacgaggcgctctcgtgttgcccttttgcaaccacacccacccttctcctgcctcgcccaccctgtccccaacccctggttcttctcctttta

SEQ ID NO: 34633 - DNA, 201 bp, Homo sapiens; identical to SEQ ID NO: 7857

SEQ ID NO: 34634 - DNA, 201 bp, Homo sapiens
agctcaagcagtcctcctgtctcagcctctcaaagtgctgggattacaggcatgagccacctcgtctagccaatactgctaattctaatagtcacaacgtyaccagtttttcactgggcaccttcatactctgtggttcctaatgcaagccaatgacatcattcaggcatgagccaccatgcccggctggctgatactacc

SEQ ID NO: 34635 - DNA, 201 bp, Homo sapiens
ggctggaccgcagtgatgtaatcatagctcactgcagcctcgacctcctgggctcaagcaatcctcctacctcagtctctcaagtagctgggactacaggygtgtgccaccatgcccagctaatgtttgtattttcagtagagatgggttttgccatgttgcccaggttggtctggaactcctgggctcaagtgatcctct

SEQ ID NO: 34636 - DNA, 201 bp, Homo sapiens
aaagaaactgaattcttttaaaatttattttattttgattttgagaaagtggctcgctcactcacccaggctggaccgcagtgatgtaatcatagctcackgcagcctcgacctcctgggctcaagcaatcctcctacctcagtctctcaagtagctgggactacaggcgtgtgccaccatgcccagctaatgtttgtatt

SEQ ID NO: 34637 - DNA, 201 bp, Homo sapiens
gtttgagtccaattaggttacagttcactatgtacggggaaaacctttaggccaaacttaaaatatgtaaggaggcagctttgggctaacctcaatttaayagaaggtaggtagacatgtatatgtagatatacaggtatgtagatgaatggataaatggatggatggatagatagataatattcctatttttacagctga

SEQ ID NO: 34638 - DNA, 201 bp, Homo sapiens
gtttcttttcttttcttctttcttttcttctctttctttctttcctttcttgacagagtcttgctctgtcacccaggatggagtgctgtggtccaatctcrcctcactgcaagctccacctcccaggtttaagtgattctcttgccttagcctccaaagtagctgagactacaggtgtgcgccacctcacctagctaattt

SEQ ID NO: 34639 - DNA, 201 bp, Homo sapiens
gatggtgagtcattatatattacaatgcaataataatacaagtaggccgggcgcagtggctcacgcctgtaatcccagcactttgggaggccaaggtgggyggatcacctgagggcaggagttcgagaccagcctggccaccatggtgaaaccccatctctactaaaaatacagaaactagccaggcgtggtagtgggtgc

SEQ ID NO: 34640 - DNA, 201 bp, Homo sapiens
aggcgggctgaaccctaaccaaggtcatgtctcccctcttgcgtgtccagaataaacctcacggtgccccagggctgtctgctggctgttgtcggtccagygggggcagggaagtcctccctgctgtccgccctccttggggagctgtcaaaggtggaggggttcgtgagcatcgaggtgaggccacccccagcctgtctg

SEQ ID NO: 34641 - DNA, 201 bp, Homo sapiens
tagcgagggaaggctttgcattcaagccgagatcataaggaaggagtgtctgggagaagagctgttcttttttttttttttttttttttttttttgaaacrgagtcttgctctatcacgcgggctggagtgcaatggcatgatctcggctcactgcaacctccaccttccggattcaagcaattctcctgcctcagcctcc

SEQ ID NO: 34642 - DNA, 201 bp, Homo sapiens
ctcttcttgctgggtgacctgcggcttcggttttcctaggcccgggtgtcctttgaccgtctggtcaccttcctctgcctggaagaagttgaccctggtgycgtagactcaagttcctctggaagcggtgagtgctgagtctggcaggaggggtgtgggagggatgggggatgtgggggccaccccggcccataatggcaa

SEQ ID NO: 34643 - DNA, 201 bp, Homo sapiens
cagtgaaataataataataattagtagtagtagcagtagtatttttgagacagtcttactccgtcatccaggctggagtgcagtggtgcaatcttggttcwctgcaacctccgcctcctgggttcaagcaattctcctgccttagcctctcaagtagctgtgattacaggcgcccaccaccacgcctggctaatttttgta

SEQ ID NO: 34644 - DNA, 201 bp, Homo sapiens
catctccaagaaaaggaaccaccatcaggtttggcttttgggaaagggacggaccaggcaggaagtagggaggaagccacaggtcctggtgtgggagatgsggaggggagagctgagtgcgagcccacgggtctggctttgttcttgtcgtctgtgagctgcccatcactcagacctgcaccccctccccctatcctctca

SEQ ID NO: 34645 - DNA, 201 bp, Homo sapiens
aagcccgcctcagcctcccaaagtgctaggattataggcatgagccaccgcgcctagccgccttatttatttatttatttatttatttatttatttatttatatttattgagacagtgtctcactctgtcacccaggctggagtgcagtggcacgatctcagctcactgcatgctcaaactcctggactcaagtgatgctt

SEQ ID NO: 34646 - DNA, 201 bp, Homo sapiens
accttagtctctgtgatattccctgatcccccacagcacactctggccccagggcctttgcactgctgttccctctgctggaaagctctccccaggagtcyccagggctcatccctcacttctatcaccttcacagagaggcctttcctgaccaccttatctaccaccacagccaccctactattgttagtgcaccctaca

SEQ ID NO: 34647 - DNA, 201 bp, Homo sapiens
gggcttgtcaagagaatgggtccaaataacctgtgcagaaatctcagaaagtcacagcaacttaaaaatcatttattctaccccccacttccacattttcyagatatagaaaccaaagctgagagggggaagataaccatcccaaaatcaccacgttggtgggggagcagggttgccagagaaaacacaggacattcagtg

SEQ ID NO: 34648 - DNA, 201 bp, Homo sapiens
agagggggaagataaccatcccaaaatcaccacgttggtgggggagcagggttgccagagaaaacacaggacattcagtgaagtgtgagtttcagacaaamggaagaatttctcagtgtatgtcccaaatatttcacgagacttagactaaaaccttattcactctttatcttcaaatgtaactgggcattctgtatgatg

SEQ ID NO: 34649 - DNA, 201 bp, Homo sapiens
aatctgacaacccttgcgagggatgaaatgaagattaggaaaataattaaacgcaataagagaaaatgccaaatgagaacaactctattcccattttgcakacaagagaattgcacctaagggagatgacttgccccaaggccacactcaaaactctcagggtcaggatttgaaccaggtcccctgattccataggtctca

SEQ ID NO: 34650 - DNA, 201 bp, Homo sapiens
tatacagaaaggcagctgtgtacctgctggatgaccccctggcggccctggatgcccacgttggccagcatgtcttcaaccaggtcattgggcctggtggrctactccagggaacagtaagtttgggaacatgtgtcagacagtacagggcaaaggcagaggaagcacttagcatccagtcctaacccaagtttatctcac

SEQ ID NO: 34651 - DNA, 201 bp, Homo sapiens
agagaatgtgtgcttcgggcaggagctggacccaccctggctggagagagtactagaagcctgtgccctgcagccagatgtggacagcttccctgagggartccacacttcaattggggagcaggtgagagtttgggggtctttttgggacagggagacattgcagttgggagtcatttgggtccccgactcatcatgggc

SEQ ID NO: 34652 - DNA, 201 bp, Homo sapiens
tgtgagcccccgcacccggccctatggatctcattgtgatttccccagttttgcttgcacgtgggtgtgcgcatgtttgcctctgtgcagtcgtatccccwgttcagtctctcgcatccatcacgatggttgacagttgagatactgaacaaccccctcaccacgaggcgctctcgtgttgcccttttgcaaccacaccca

SEQ ID NO: 34653 - DNA, 201 bp, Homo sapiens
accccatgtgtggggatgcctgaacacaggcacctcactcctgcactgcttcagggacctgtttctgggcacacccacacatcaccatgtgccgacaaacrcacgtcccagctaattgtcccaatcgttcccagcgtgggccagaaacagctcctgtgtctggcacgtgcccttctccggaagacccagatcctcatcctg

SEQ ID NO: 34654 - DNA, 201 bp, Homo sapiens
catcaccatgtgccgacaaacgcacgtcccagctaattgtcccaatcgttcccagcgtgggccagaaacagctcctgtgtctggcacgtgcccttctccgraagacccagatcctcatcctggacgaggctactgctgccgtggaccctggcacggagctgcagatgcaggccatgctcgggagctggtttgcacagtgca

SEQ ID NO: 34655 - DNA, 201 bp, Homo sapiens
acagcaaaggcagtattggtcttcccactgcacagtcatgtcctttcacaaagacaaagagaaatgtctgctcccactatagaaaaagagattattttatmataaacagtggctaataataacaataaaatagactaaaagtagccaccaccatctgtttttagcattgacatagtccatgccctctcttgttgaattccc

SEQ ID NO: 34656 - DNA, 201 bp, Homo sapiens
tagctcatgccagctgagacgcttggagtcagccagctactcgtctgtctgctcccacatggctgagacgttccagggcagcacagtggtccgggcattcygaacccaggccccctttgtggctcagaacaatgctcgcgtagatgaaagccagaggatcagtttcccgcgactggtggctgacaggtaggaagagccagg

SEQ ID NO: 34657 - DNA, 201 bp, Homo sapiens
aaccctctggtcagagcaggcctttcctcccaaccccgggcaggtgggcatcgttggcaggaccggggcagggaagtcctccctggccagtgggctgctgyggctccaggaggcagctgagggtgggatctggatcgacggggtccccattgcccacgtggggctgcacacactgcgctccaggatcagcatcatccccca

SEQ ID NO: 34658 - DNA, 201 bp, Homo sapiens
aataagcccgcctcagcctcccaaagtgctaggattataggcatgagccaccgcgcctagccgccttatttatttatttatttatttatttatttatttatttatatttattgagacagtgtctcactctgtcacccaggctggagtgcagtggcacgatctcagctcactgcatgctcaaactcctggactcaagtgatg

SEQ ID NO: 34659 - DNA, 201 bp, Homo sapiens
taataagcccgcctcagcctcccaaagtgctaggattataggcatgagccaccgcgcctagccgccttatttatttatttatttatttatttatttatttwtttatatttattgagacagtgtctcactctgtcacccaggctggagtgcagtggcacgatctcagctcactgcatgctcaaactcctggactcaagtgat

SEQ ID NO: 34660 - DNA, 201 bp, Homo sapiens
tctacctcgcagattcaagtgattctcctgccccagcctgccaagtagctgggaccacaggcatgcacaaccatgcccagctaatttttttttttttttttgtatttttagtagagatgagatttcaccatgttggccaggcaggtcttgaaccgctgacctcaggtgatctgcccaccttggcctcccaaagtgctgatt

SEQ ID NO: 34661 - DNA, 201 bp, Homo sapiens
ctgccctccaggtactccccacatccccaaactgggcttgagggacagacagaggcagagactgtcggacccctgctagtgggacctttgaagaccctgtrtccaaaccaccatggtgtgtggagtccctccaccaaggagggacacgcagctctacaagagccagactcagctaaggtgaacttgcaaccttgggcaaga

SEQ ID NO: 34662 - DNA, 201 bp, Homo sapiens
atacaagcaatcatgtcagttcccttttttatacaaagcgattttgtttctcttcctttgctatctctagtcctttcagcatggtgaaaacaagaaacggyggcatacctgagccatctccatgttttttattttttatttttatttatttatttatttgagatggagtctcactctgtcacccaggctggagtgcagtgg

SEQ ID NO: 34663 - DNA, 201 bp, Homo sapiens
ttgggaggccgaggcaggcagatcacctgaggtcaggagttcaaaaccagcctggccaacatggcataaccctgcctccacaaaaaatataaaatttagccgggcgtggtggcgggcgcctgtaatcccagctactcgggaggctcaggcaggagaatcgcttgaacccaggaggcggaggttacagtgagccgagaccac

SEQ ID NO: 34664 - DNA, 201 bp, Homo sapiens
tacaggtatgtagatgaatggataaatggatggatggatagatagataatattcctatttttacagctgaggaaactgaggcacagaggttaagtcagccyactcatccacagataaaacattcaaagagtctttagcatctgaattgtgcataatttatattctgccagttggactgacaaatctgatggtatacagtag

SEQ ID NO: 34665 - DNA, 201 bp, Homo sapiens
cccctggcctcagggcgggcagatcgagttccgggactttgggctaagataccgacctgagctcccgctggctgtgcagggcgtgtccttcaagatccacrcaggagagaaggtgagtggttctctcacaatgtcttcttcatggagtttaggccaaaggactccagggacaaggccctaaaccctgggcaccagctacct

SEQ ID NO: 34666 - DNA, 201 bp, Homo sapiens
gggcttctttttgctctgcatgctctggttctactgaaggaagagagggacctgttggttgtatccaaatcccaatcccctgggcccaggtcctcagactrtcccattcctgcctcccctctttactcccctgggtctggcctcccagaaaaggttgggaaaccaggggggctgttgcaagccctcaagtggccttgccaa

SEQ ID NO: 34667 - DNA, 201 bp, Homo sapiens
cccatccatccttctcagagcctgtatgtggttagctcatgccagctgagacgcttggagtcagccagctactcgtctgtctgctcccacatggctgagaygttccagggcagcacagtggtccgggcattccgaacccaggccccctttgtggctcagaacaatgctcgcgtagatgaaagccagaggatcagtttcccg

SEQ ID NO: 34668 - DNA, 201 bp, Homo sapiens
acccctcccactgggggctctctctgcctccctctccctcatgtgtgctacaggtgaaggccacagtgcacctggcctacctgcgtgccgtgggcaccccyctctgcctctacgcactcttcctcttcctctgccagcaagtggcctccttctgccggggctactggctgagcctgtgggcggacgaccctgcagtaggtg

SEQ ID NO: 34669 - DNA, 201 bp, Homo sapiens
ctgtggcctacgtgccccaggaggcctgggtgcagaacacctctgtggtagagaatgtgtgcttcgggcaggagctggacccaccctggctggagagagtwctagaagcctgtgccctgcagccagatgtggacagcttccctgagggaatccacacttcaattggggagcaggtgagagtttgggggtctttttgggaca

SEQ ID NO: 34670 - DNA, 201 bp, Homo sapiens
ccggtccctgctgatgtacgcctttggactcctggaggtcagcctggtggtggcagtggctaccccactggccactgtggccatcctgccactgtttctcmtctacgctgggtttcaggtacggagaggtcagggaggcttccgggaccggctgaggtcaactcagccagtcccctgtctctggggaagactccatatatg

SEQ ID NO: 34671 - DNA, 201 bp, Homo sapiens
ggtgctgtggcctacgtgccccaggaggcctgggtgcagaacacctctgtggtagagaatgtgtgcttcgggcaggagctggacccaccctggctggagaragtactagaagcctgtgccctgcagccagatgtggacagcttccctgagggaatccacacttcaattggggagcaggtgagagtttgggggtctttttgg

SEQ ID NO: 34672 - DNA, 201 bp, Homo sapiens
ccagcctgtctgctaggatgtccccatcctgaaagtcccacttcctcgctgccttcccaccctccccatcccagccaagttcactttcactcattctctcyacctctcacccaccactgagagcccagctcccactgctcctcaaaacctatcccacctctgtccccatcatcctcctgtgaccaaagtaagttgtgtttt

SEQ ID NO: 34673 - DNA, 201 bp, Homo sapiens
ttctgcctgactttaaagtgccaagtgaccctgcccacacggtcctctggtcacactgagtgtcctctgagtcatgctattccctgtgcctgggttttagstgcccccgccacccccctaccccccagcccccaccccccacccccatctcaagcccctcccctccctcttctccagctccatccccccatcctctgcctg

SEQ ID NO: 34674 - DNA, 201 bp, Homo sapiens
gctgtctgctggctgttgtcggtccagtgggggcagggaagtcctccctgctgtccgccctccttggggagctgtcaaaggtggaggggttcgtgagcatygaggtgaggccacccccagcctgtctgctaggatgtccccatcctgaaagtcccacttcctcgctgccttcccaccctccccatcccagccaagttcact

SEQ ID NO: 34675 - DNA, 201 bp, Homo sapiens
cctcctgagtagctgggattacaggcacctgccaccacacccggctaatttttgtatttttagtagagacagggtttcaccatgttggccaggctgctatsaaacttctgacctcaatcacccccctcggcctcccaaagtgctgggactacaggcatgacccaccatgcccagccatcctgtgacctttatcagcatgaa

SEQ ID NO: 34676 - DNA, 201 bp, Homo sapiens
caccaaggggtgctcaggactcctttaccccacccctccctgggtcaccctgtccccctggaacagtgtgcaaaacgtctggggtccaggcaaagatctgygtccttaagatgaggctggagggaacgggaaggacagggcacatccctccttttctggaagcttcagaacctctcccagtccctccccactagcggaagg

SEQ ID NO: 34677 - DNA, 201 bp, Homo sapiens
atttgctttcagttactggccacacctgggggatagtggtggggaggtgtccttcctaggggagatggtacctgagggtaggtgagagttagccagaaaaragcattccagacacaaggaactgcttgagcaaggctgttgggggaaacagaggtaacttgactttgtacagtgttaaatgctgtttttccaacctcaagt

SEQ ID NO: 34678 - DNA, 201 bp, Homo sapiens
agctccagagtctatgcttgcagttgctatggagacagcccaagaaggactttgatgcctagcaagctacaccgtgctagctagggtttctaataatccaraaaaacagtgtgctggatacatggcaaggttctggaagtaaagttgccaagccaagctcactcacaatgactgaaaagtagcaactaacagcacatcaca

SEQ ID NO: 34679 - DNA, 201 bp, Homo sapiens
ggtcagaggtgctgagaggcagacaggtttgggacgcagtttggtgagatgaatgggatttgctgaagggtggctgtcagggtgcagggaagaattctcarctgtccctgtcttcatctctctttttccctccgatcccaggaggagcaaatgaggcagaaggactcacgggcacggctcaccagctctatcctcaggaac

SEQ ID NO: 34680 - DNA, 201 bp, Homo sapiens
ggaggctcaggcaggagaatcgcttgaacccaggaggcggaggttacagtgagccgagaccacaccactgcactccagcctgggcgacagaggaagactcrgtctcaaaaagtaaaaccttctccaggcagctgcccctctgatgatgcccccgccccatggtgaagcacaagagaccctgaattcttctgcctgacttta

SEQ ID NO: 34681 - DNA, 201 bp, Homo sapiens
cccggcctccccactttacttctctccttctgcccacccgccaggtcctggctctgtccagcggctccagaaaggccagtgcggtgggtgatgtggtcaakctggtgtccgtagacgtgcagcggctgaccgagagcgtcctctacctcaacgggctgtggctgcctctcgtctggatcgtggtctgcttcgtctatctct

SEQ ID NO: 34682 - DNA, 201 bp, Homo sapiens
cgggcatcagaggcttcctccgtggggcacattatcccaggggcactcctgcagaagtccaggtacaggatgatggtggttggaccaggagtgagggtcaraggtgctgagaggcagacaggtttgggacgcagtttggtgagatgaatgggatttgctgaagggtggctgtcagggtgcagggaagaattctcaactgtc

SEQ ID NO: 34683 - DNA, 201 bp, Homo sapiens
gactcacgggcacggctcaccagctctatcctcaggaactcgaagaccatcaagttccatggctgggagggagcctttctggacagagtcctgggcatccraggccaggagctgggcgccttgcggacctccggcctcctcttctctgtgtcgctggtgtccttccaagtgtctacatttctggtgacgtcactctagtct

SEQ ID NO: 34684 - DNA, 201 bp, Homo sapiens
actgttgccccacgtgtcccccccaccccccaggtcgcactggtggtgtttgctgtccacactctggtggccgagaatgctatgaatgcagagaaagcctytgtgactctcacagttctcaacatcctcaacaaggcccaggctttcctgcccttctccatccactccctcgtccaggtgaggtgggtgcaagggctggag

SEQ ID NO: 34685 - DNA, 201 bp, Homo sapiens
tcatgtctcccctcttgcgtgtccagaataaacctcacggtgccccagggctgtctgctggctgttgtcggtccagtgggggcagggaagtcctccctgcygtccgccctccttggggagctgtcaaaggtggaggggttcgtgagcatcgaggtgaggccacccccagcctgtctgctaggatgtccccatcctgaaagt

SEQ ID NO: 34686 - DNA, 201 bp, Homo sapiens
ccagtttcaccctgtagatgctgactcaggccactgttccttttgtggccacagggcatgaatctctccggaggccagaagcagcggctgagcctggcccrggctgtatacagaaaggcagctgtgtacctgctggatgaccccctggcggccctggatgcccacgttggccagcatgtcttcaaccaggtcattgggcct

SEQ ID NO: 34687 - DNA, 201 bp, Homo sapiens
agtagcagggcaatttgttcagtgggagagatttcttcctgcagcctctgcccctgggggggcgggggatggtgcctgggggcctctccgatgcagaggcyggccaggtcaggggtctcctgtaaatggcctcttgtgccctgcagctgccgggaaggattgcatcacgatacaaagtgccaccttcgcctggtcccagga

SEQ ID NO: 34688 - DNA, 201 bp, Homo sapiens
agaagccagtgagtagcagggcaatttgttcagtgggagagatttcttcctgcagcctctgcccctgggggggcgggggatggtgcctgggggcctctccratgcagaggccggccaggtcaggggtctcctgtaaatggcctcttgtgccctgcagctgccgggaaggattgcatcacgatacaaagtgccaccttcgcc

SEQ ID NO: 34689 - DNA, 201 bp, Homo sapiens
tggggtttcaccatgttggccaagctggtctcgaactcctgacctcaaatgatctgcccgcctcggcctcccagagtgttgggattacaggtgtgagcccycgcacccggccctatggatctcattgtgatttccccagttttgcttgcacgtgggtgtgcgcatgtttgcctctgtgcagtcgtatcccctgttcagtct

SEQ ID NO: 34690 - DNA, 201 bp, Homo sapiens
tcactgatttgtaggatcgcagaggtgggagatcaccaccatcaaggtcaccactcgggttgcatcgtttcccatgaactagaaagctttgtcctcacgcytcctatgcacagagcttggtagacaggaagctgttgccacacatcttgagacaccgacacccaaaacctgagttctttgctcttcttgctgggtgacctg

SEQ ID NO: 34691 - DNA, 201 bp, Homo sapiens
ctggaagcggtgagtgctgagtctggcaggaggggtgtgggagggatgggggatgtgggggccaccccggcccataatggcaagccagcatcagcactggrgggagatgggggctgcgggcaatggatgacacgtgcagatcacgccatctgcgtgtcacttggaaactggcaccgtgctgctcttctttctgctagccat

SEQ ID NO: 34692 - DNA, 201 bp, Homo sapiens
gttcctctggaagcggtgagtgctgagtctggcaggaggggtgtgggagggatgggggatgtgggggccaccccggcccataatggcaagccagcatcagyactggagggagatgggggctgcgggcaatggatgacacgtgcagatcacgccatctgcgtgtcacttggaaactggcaccgtgctgctcttctttctgct

SEQ ID NO: 34693 - DNA, 201 bp, Homo sapiens
tcacaagattagaacttgagtatgtccagctccagagtctatgcttgcagttgctatggagacagcccaagaaggactttgatgcctagcaagctacaccrtgctagctagggtttctaataatccaaaaaaacagtgtgctggatacatggcaaggttctggaagtaaagttgccaagccaagctcactcacaatgactg

SEQ ID NO: 34694 - DNA, 201 bp, Homo sapiens
cacagacagaacaagaaccctgcggggtcacccagaagccagtgagtagcagggcaatttgttcagtgggagagatttcttcctgcagcctctgcccctgkgggggcgggggatggtgcctgggggcctctccgatgcagaggccggccaggtcaggggtctcctgtaaatggcctcttgtgccctgcagctgccgggaag

SEQ ID NO: 34695 - DNA, 201 bp, Homo sapiens
aggtggaggttgcagtgagctgagatcgcaccactgcactccagcctgggcaatagagcaagactttatctcaaaaataaataaataaataaataaataawgcattgttcatcacactgtattacatttactcaattgcactgtttcctagaccggatgatgggcacactggagcaaggactctttaatttctatacttcc

SEQ ID NO: 34696 - DNA, 201 bp, Homo sapiens
caaaacagcaacatgatataatgtgttagcaatataacagtaacattacagtaacagaacaaggaagaattaattagttgatgaatagggtagaagaaatkgtgagagatggacagatgaatggatggaatgggatggaagaatgagagatggagggatgggattggagatggatggatggatgcatggatggatggatgg

SEQ ID NO: 34697 - DNA, 201 bp, Homo sapiens
gcgactggtggctgacaggtaggaagagccagggcagagaagaccttgcaattcatccatatccttagagggtgagacctgaggtcatattgtatggtagmgaggtcacccagagagtcagggacatagttgaggctagatcccacaggcagtctatcagttctcaccgtgggcagatggaacatgaccgagagattctca

SEQ ID NO: 34698 - DNA, 201 bp, Homo sapiens; identical to SEQ ID NO: 7776

SEQ ID NO: 34699 - DNA, 201 bp, Homo sapiens
cctgtagatgctgactcaggccactgttccttttgtggccacagggcatgaatctctccggaggccagaagcagcggctgagcctggcccgggctgtatamagaaaggcagctgtgtacctgctggatgaccccctggcggccctggatgcccacgttggccagcatgtcttcaaccaggtcattgggcctggtgggctac

SEQ ID NO: 34700 - DNA, 201 bp, Homo sapiens; identical to SEQ ID NO: 7778

SEQ ID NO: 34701 - DNA, 201 bp, Homo sapiens
atgtctgtggcttctcctcttccctctcccatccatccttctcagagcctgtatgtggttagctcatgccagctgagacgcttggagtcagccagctactsgtctgtctgctcccacatggctgagacgttccagggcagcacagtggtccgggcattccgaacccaggccccctttgtggctcagaacaatgctcgcgta

SEQ ID NO: 34702 - DNA, 201 bp, Homo sapiens
agacagatctcgggtacagcagaaagatctccccaataaatgcccacaaaccctctggtcagagcaggcctttcctcccaaccccgggcaggtgggcatckttggcaggaccggggcagggaagtcctccctggccagtgggctgctgcggctccaggaggcagctgagggtgggatctggatcgacggggtccccattgc

SEQ ID NO: 34703 - DNA, 201 bp, Homo sapiens
cgggtacagcagaaagatctccccaataaatgcccacaaaccctctggtcagagcaggcctttcctcccaaccccgggcaggtgggcatcgttggcaggaycggggcagggaagtcctccctggccagtgggctgctgcggctccaggaggcagctgagggtgggatctggatcgacggggtccccattgcccacgtgggg

SEQ ID NO: 34704 - DNA, 201 bp, Homo sapiens
ttgtatggtagcgaggtcacccagagagtcagggacatagttgaggctagatcccacaggcagtctatcagttctcaccgtgggcagatggaacatgaccragagattctcaacagcaggtgggcggggggtacaggaagaagcttctgttgccaggcaactggatcaacctcttttgccttggtgataaagcagccatat

SEQ ID NO: 34705 - DNA, 201 bp, Homo sapiens
ggtacagcagaaagatctccccaataaatgcccacaaaccctctggtcagagcaggcctttcctcccaaccccgggcaggtgggcatcgttggcaggaccrgggcagggaagtcctccctggccagtgggctgctgcggctccaggaggcagctgagggtgggatctggatcgacggggtccccattgcccacgtggggct

SEQ ID NO: 34706 - DNA, 201 bp, Homo sapiens
accctctggtcagagcaggcctttcctcccaaccccgggcaggtgggcatcgttggcaggaccggggcagggaagtcctccctggccagtgggctgctgcrgctccaggaggcagctgagggtgggatctggatcgacggggtccccattgcccacgtggggctgcacacactgcgctccaggatcagcatcatcccccag

SEQ ID NO: 34707 - DNA, 201 bp, Homo sapiens
ctttcctcccaaccccgggcaggtgggcatcgttggcaggaccggggcagggaagtcctccctggccagtgggctgctgcggctccaggaggcagctgagrgtgggatctggatcgacggggtccccattgcccacgtggggctgcacacactgcgctccaggatcagcatcatcccccaggtgaggctggtggagggggt

SEQ ID NO: 34708 - DNA, 201 bp, Homo sapiens
ttgagcccaggagctcgaggccaacctgggcaacatagtgagaccccaactccacaaaaaatgtaaaaggtaaaaaaaaaaaaagacgtagctcaggcatyaaccacctccaggtagccttcctgatggtgtcatacccaggtgggctcaggctgcctctgttctccgggcatcagaggcttcctccgtggggcacattat

SEQ ID NO: 34709 - DNA, 201 bp, Homo sapiens
ggctccaggaggcagctgagggtgggatctggatcgacggggtccccattgcccacgtggggctgcacacactgcgctccaggatcagcatcatcccccasgtgaggctggtggagggggtgggcaaagatgggaggcatggtgggacccggctctgacccaccgcccctccccgccaggaccccatcctgttccctggct

SEQ ID NO: 34710 - DNA, 201 bp, Homo sapiens
ggtgggcaaagatgggaggcatggtgggacccggctctgacccaccgcccctccccgccaggaccccatcctgttccctggctctctgcggatgaacctcracctgctgcaggagcactcggacgaggctatctgggcagccctggagacggtgcagctcaaagccttggtggccagcctgcccggccagctgcagtacaa

SEQ ID NO: 34711 - DNA, 201 bp, Homo sapiens
cagctcaaagtcctgagagccaaggcccctaccgcccacatcctctagctgttggctaatttatttcatcgtcttttaggtaattctccagaattccatckctttcctctttttcacctcccagttactcctgcactcagttcttcgtctttcctcctccactgtgtagaaactgttcttgctcacaccgccagtgaccga

SEQ ID NO: 34712 - DNA, 201 bp, Homo sapiens
cttgctcacaccgccagtgaccgactttcgctcagccttgtggatattttccagcccttatcttccctgcttctctgttgcatccttgtgacactggaatstttcccttttttcccttgaaaccgcccactcccaggacagcacagtcttcctgattctcatctctctcactctgtttcttctctgcctccttcggttacc

SEQ ID NO: 34713 - DNA, 201 bp, Homo sapiens
attagccaggcgtggtggcgcatgcctgtaaaatcgcagttgctcgggaggctgaggcacaagaatcatttgaacccaggaggcagaggttgcagtgagcygagatcacgccactgcactccagcctgggtgatagagcaagagtctgtctcaaataataattataattattattttatgcgtaatttccattccagcccc

SEQ ID NO: 34714 - DNA, 201 bp, Homo sapiens; identical to SEQ ID NO: 7865

SEQ ID NO: 34715 - DNA, 201 bp, Homo sapiens
cttgttcgtcgcccagactagagaacagtggcacaatctctgctcactgcaacctccgcctcctgggttcaagcgattctcctgcctcagcctcccgagtrgctgggattatagacaacgcaccaccacactcggctaatttttttttgcatttttggtagagacggggtttcaccatgttgtccaggctggtcttgaact

SEQ ID NO: 34716 - DNA, 201 bp, Homo sapiens
tctcccattgttgtgggcacaaacaacagaagtcattgagattcctttttttttgctttttgagatagctgggtctcactctgttgcccaggttggagtgyagtgatgcaatcacggctcactgcagcttcaacctcccaggctcaaatggtgttcccatctcagcctcctaactgggactacaggcgacgccaccatgcc

SEQ ID NO: 34717 - DNA, 201 bp, Homo sapiens
tgaggcagcagggagttgcccaggccggagtgcagtggtgccttcacagcccactgcagcttcgacctctcaggctcgaatggtcctcccacctcagcctygcgagtagctaggactacaggcaagagccaccatgccctgctagtttttattttttgtagaggccaggtctcactctgtgagccgggctggtgactctct

SEQ ID NO: 34718 - DNA, 201 bp, Homo sapiens
tacagtcatagctcactgcagcctctaactcctgggctcaggcagtcctcccagtttagcctcccgagtagctgtgactccaggtggatgtgtgctactgygtctagccttctcagaagtcttaagtcattcactcagtgtctgtgttgtccttcaggagaagtttgaagtgcagcactctgaaggctaccggcagatctc

SEQ ID NO: 34719 - DNA, 201 bp, Homo sapiens
taggggtggtggtggtggtggtggttgagacagggtctctgttgcccaggctggagtgcaatgatgcaattatagctcattgcagcctcgaagtcctgggytggagcgttcttcctggctcagcctccctagtagctgggaccacaggtgtgtaccaccacgcccagcttatttttaaattcttgtatagatgaggtttta

SEQ ID NO: 34720 - DNA, 201 bp, Homo sapiens
taccacacccggctaatttttgtatttttagtagagatgggatttcaccatgttggccaatctggtctcatactcctgacctgaggtgatctgcctgcctyggtctccgaaagtgctgggattacgggcttgagccaccatacccagccagagatgatgaattcttttatgttcttgatttatttggttttcttaggtggt

SEQ ID NO: 34721 - DNA, 201 bp, Homo sapiens
caggctgaagtggtatgatcatggcttactgcagcctcgacttactggattaatgtgattcttacacctcagcctcccaaagtgctgggattacaggcatragtcactgctcccgggcatattttcatttagtgttctaaatacactgctatgttggaattgttttttcaataataaaagcattagtgtgtcactgtcata

SEQ ID NO: 34722 - DNA, 201 bp, Homo sapiens
aatcccagcactttgggaggctgagggcagcggatcaattgagctctggaggttgaggccgcagtgagccgtgttcccagccactgcactccagcctgggygatgaagcgagaccttgtctcagaaaaaaaaggggcagctttcagattcaggaattctgcaaggtgtgtgactaccatctctctgggccccaagccgtag

SEQ ID NO: 34723 - DNA, 201 bp, Homo sapiens
tttttttcttttttttttttttttttttttttttttgagccagaggtctcactctcgcccaggctgaagtggtatgatcatggcttactgcagcctcgacytactggattaatgtgattcttacacctcagcctcccaaagtgctgggattacaggcatgagtcactgctcccgggcatattttcatttagtgttctaaat

SEQ ID NO: 34724 - DNA, 201 bp, Homo sapiens
ttggactgcagctcctgcacctgcgcctccagcttcttcttcttatgttccacctcctgcttggcctggcccaggacccgcagctccccggccaggtctgygttctctttctccagcgtctgcttattcttgtctaggttcgccttggcctggcgaaggaagcagaggggagggataacagggaggctgtggccgggagaa

SEQ ID NO: 34725 - DNA, 201 bp, Homo sapiens
tgatatgtgtgaaggaggcccatgttgccgtgtggatgaggcttggagaggtttacgtggcttgctttggctgtggacaccttgggtagaatgatttgtckgaagaatgatggaggctataggaatctcaaccctgttgagagtaggcaagattcaaggtgctcagggggcagaggcactcaggacataattaaaacagtt

SEQ ID NO: 34726 - DNA, 201 bp, Homo sapiens
cctctttggcttccaaggcctcttcaagggcccgagccagggacagggccttggtttccttctccctggcttctgcctcagctctgtccctctcatccgcrtatttggaagagatgtttttctcctcggctaacaactacaacacaagacccagaggtgacttctaggcatatccggggtcagcgtcactgaattgtaaat

SEQ ID NO: 34727 - DNA, 201 bp, Homo sapiens
tgggattacaggtgcccaccaccacacctggctaatttttgtattttaagtagagatgtggttttgccatgttgaccaggctggtctcgaactcctgaccstcaagtgagcctcctgcctcggcctcccaaagcacggagattacaggtgtgagccaccacacctggccaaatccttgtgcttcgaaaccactagacctgc

SEQ ID NO: 34728 - DNA, 201 bp, Homo sapiens
tttccaggttggacacgagttgccgctggttgtccaaatcaacaaccaggtcgtccagctcctgctgaagcctgttcttggtcttttccagtttatcatamgcggccgccttctcctcgtactgctgggtgaggttctcgatctccttctggaacctcttcttcccctcttccagagcttccacggtgctggcaaagtcct

SEQ ID NO: 34729 - DNA, 201 bp, Homo sapiens
aaactctaattaatatgcaatgttgaggtgtggaaggggaaatgtactgacatctgtaatttgctctgaaatgtacccaagagataaggcatgatagatasaattagtctttataaataaatatgtgggccgggcatagtggctcatacctataatcccagcactttgggaggccaaggcaggcagatcatgtgaggccag

SEQ ID NO: 34730 - DNA, 201 bp, Homo sapiens
cacaccaaccatgagagtggtgataggaatgaaaaaggccacccgacctccctctgctggcctccccggcagcacgcacctgtctctgcagttgcctcctyttctcctcattctgctcgtcccgggcttggagatccctttcgaactggcccttgagcgcctgcatgttgacttccagccgcagtttggcgtcctccgtgg

SEQ ID NO: 34731 - DNA, 201 bp, Homo sapiens
gctacatgaaaggctgaagcaggagaatcgcttgaacccagtggtggaggttgcggggagctgagatcacaccactgcactccagcctgggtgacagagcyagatcctgtctcaaaataagtatctgataaagttcatataatacagtgtcaatgactgaatccaggtggtggccttaaaggtgttcaccgtacaattctg

SEQ ID NO: 34732 - DNA, 201 bp, Homo sapiens
ttggaattttacagaatgaaatcttagggaagagtggtattaaaagtatagaaactgaattacttggaatactactcaataggtattcagtaaatacattyagtgaataaataagcacctcattccttcttcaggctagaaactaaggcatcaccatgtgtgcaggtgaccctcatggtgctggtacccagaaaagtcaca

SEQ ID NO: 34733 - DNA, 201 bp, Homo sapiens
gagacagccaccaaatcctgaatggttccagaaaaaccccagctgaacccacaccaatggcaggtgcaggcttgcttcctggagcccgctctgctgacttyggtggcctgaggggaactgtgccctccctccacccatgccccaagctcctagtgtcacccacctgcagtttgcgtagctgcttgatggcttcctccctcc

SEQ ID NO: 34734 - DNA, 201 bp, Homo sapiens
atggctccccacagagtggagaggggatgcaggcacaggccagagccacgcgtcatactctgcagagctgattccccaacccagcgtccatggccagagtrggggacaccccacgccctctacctgatcaaatttcctctgcttcttttccaggttggacacgagttgccgctggttgtccaaatcaacaaccaggtcgtc

SEQ ID NO: 34735 - DNA, 201 bp, Homo sapiens
gcatcttccagctctctttgaaagtccttcatctgagcctgcatgagtcaacagggaggacaagctcagatgtccttactcccccaagttctgctgcccarttcagctttgcacacccaccccttggattttctgcagttgaccacaaagaagttcccattgcacgagcatggctctcagttccaggtggctggtggtgcg

SEQ ID NO: 34736 - DNA, 201 bp, Homo sapiens; identical to SEQ ID NO: 7864

SEQ ID NO: 34737 - DNA, 201 bp, Homo sapiens
gttcctccttctcgaggtccgcttgtttgcgagccctctcagcggcggcgaggtcctaggtgggagggaggaaggctgttgtctgccagggaaaggccaakccccaccaagagtccaccctgacaactcagccacccttgaaagtacatgttcttcctctgagctcaggggaggccccgtgaatacatagaggagggaagc

SEQ ID NO: 34738 - DNA, 201 bp, Homo sapiens
tccatgttgccctgctcctcctccagctcctcctccagctgggcgatccgggcctccaggcggcgcttctcgtcctggagtgcgttcctgggggaagggcrgccatggtgggggcctctaccctcccccgccttaaaagatgccccctccttggagtcatgcctcaggggtattgccctcatcatctaatgggtgaaactg

SEQ ID NO: 34739 - DNA, 201 bp, Homo sapiens
gcagcctgggcactggtgtaagggccctggatctctactctcaggccccaccaccctcttgtccctcaatccagggcctgcacacaggaagccgccacgcrtgtgttgactggtgcaggatcctgctgcaggagagacagtaggcagcgtgactgtggtgtccaggcggccctcacctgctgtgtggctttgcggacccgg

SEQ ID NO: 34740 - DNA, 201 bp, Homo sapiens
ctctccttcatcctgtaaaactccactcaagagcttcttccaggccgggcgtggtggcgcacgcctgtaatcccagcacttttggaagcagaggcaggtaratcacttgagctcaggagttcgagacctgcctggccaacatggtgaaaccccgtctctattaaaaatacaaaaattagccgggcagtggtggcacgtgcc

SEQ ID NO: 34741 - DNA, 201 bp, Homo sapiens
gtttaatagttatatttagaacgtttgacagtcttctccaagaacaagagtttctcagcaccatcagctgtttgattgctctcatggtccttcttctataygtccctcaaacgaaactactcacttttaactgaggacaggcactttgtataagaataaccttgaaaagtgtgcaggacctaattggaagtaactaaaaat

SEQ ID NO: 34742 - DNA, 201 bp, Homo sapiens
ttatttatttatttattttgacacagagtctcggtctgtcactcaagctggagtgcagtggcgccatctcggctcactgcaagctccacctcctgagttcrcaccattctcctgcctcagcctcctgagtagctgggactacaggcacccgccaccacacccagctaatttttcgtattttagtagagacggggtttcacc

SEQ ID NO: 34743 - DNA, 201 bp, Homo sapiens
acacacggcacaaataagatgcagatattcaagttgaagtcaacaaatcattgccagtcttaaggcatgagtgattgaatttaatcagctgaaattggttkcgggggtgggtggagaaggtttttcaaagcaagacgatctgcttttcaatatgtcaggcttggtcatttgagaagccacaggattctggtctgctgtggt

SEQ ID NO: 34744 - DNA, 201 bp, Homo sapiens
tcggatgaggtagaagcccagttcaccattatagaatcaataaagttctaggtcaccaaagttttatgtatttatgttttgagacaaggtctctctctgtygcccctgctggagtgcagtggcacgatcacttcagcctccccagtagctgggactacagtcatgtgccaccatgactcactaatttgtgtattctttgta

SEQ ID NO: 34745 - DNA, 201 bp, Homo sapiens
ctgcaaactgggttcggaactccacacccgcatacctggcctcctgctcgacctgctcctccagctgtgcaatcttggcctccagcgccgcgatggtggayttgaacttggacttgacggccccctccatctcgtggagcttgctccggagctccttgttctgccgctcgagctgctgccgggcactctcattcttctggg

SEQ ID NO: 34746 - DNA, 201 bp, Homo sapiens
tccctgacttcactatgactcctgctgtccatcacccccctgcaaactgggttcggaactccacacccgcatacctggcctcctgctcgacctgctcctcyagctgtgcaatcttggcctccagcgccgcgatggtggacttgaacttggacttgacggccccctccatctcgtggagcttgctccggagctccttgttct

SEQ ID NO: 34747 - DNA, 201 bp, Homo sapiens
agggtcgggtccaatggaggtgttggcctcggttggtgccagagggttcagcatagaaatggaaaaaaaatagaagtgtacagaggtgcacggaggtaggrtgatgaggcagtgggagcttgtgcacgtttcatgatcatttctgcttttgagttaagtaggaagtaaggtccccagctgagagagaatggggaggagcga

SEQ ID NO: 34748 - DNA, 201 bp, Homo sapiens
ttgcaaaggagtgtcctgtctcagcctcacgagtagctgggattacaggcatctgccaccacgcctagctgatttttgtgtttttagtagagatgaagttycaccatgttggccaggctggtctcgaactcctgacctcaggtgatcagcccacctcagcctcccaaagtgctgggattacaggcgtgagccaccgcgctt

SEQ ID NO: 34749 - DNA, 201 bp, Homo sapiens
gcccacgttgcttagagcacactgaggtcaaagtgagatttaaagctgccagaagctagttattagtttgtttcatggccacaagtagctattaatatctyacaaaagtatcctaagagcctcagtagggaaatggtaagcatgggtggccctgcacacatatctctctgcttggagaagcaactcagagaacattccatg

SEQ ID NO: 34750 - DNA, 201 bp, Homo sapiens
cctggattcaagtgatccccttgtctcagcctcccgagtagctgggattacaggcatgccccacgtgcttggctaatttttgtatttttagtacagatggkgttgcactatgttggtcaggcttgtctccaactcctgatgtcaatgatcttcctgccttggcctcccaaggtgctgggatttgggattacaggcatgaac

SEQ ID NO: 34751 - DNA, 201 bp, Homo sapiens
ctggagtgcaggggtgcgatcttggctcactgcaacctctacgtcctggattcaagtgatccccttgtctcagcctcccgagtagctgggattacaggcakgccccacgtgcttggctaatttttgtatttttagtacagatggtgttgcactatgttggtcaggcttgtctccaactcctgatgtcaatgatcttcctgc

SEQ ID NO: 34752 - DNA, 201 bp, Homo sapiens
ccaattctttagtcaaaaggaacaactcggctgggcatggtggctcacacctgtaatctcagcactttgggaggctgaggcgggcggatcatgaggtcagsagatcgagaccatcctggctaacatggtgaaaccgtgtctctactaaaaatacaaaaaattagccgggcgtgctggcgggtgcctgtagtcccagctact

SEQ ID NO: 34753 - DNA, 201 bp, Homo sapiens
cctctctgcgctggttctctcttgagtttatcacctcgacttcacaggaagggctggtcacgtgaggggagactttgggtaggaggaagagagtgggcagragaaggaaaaatcagatctgcctgctgccagccttcaccgttcagaagaaacacttaactcttttcagcaaccgcaacaaataattatgttgggctctgg

SEQ ID NO: 34754 - DNA, 201 bp, Homo sapiens
gttttgaagattaattagatcccagctactcctaaagcctcttgttacccgaccaccccagcctccatcacctcgttggtatacaacccgttttttttttkttttttttgtttttgtttttgagacagagtctcactctcgcccaggttggagtgcagtggtgcgattttggctcactgcaacctccgcttcccgggttca

SEQ ID NO: 34755 - DNA, 201 bp, Homo sapiens
cgcacctcctaaagcatctcagattcatttctttcctgaggattaagtttttaaaccttcctggccaagataacagtgttttaagaggctcttttcttttwttattattattattattattactcttttctttttttgagatggagtcttgctctgtcacccaggctggagtgcagtggcaggatctctgctcactggaac

SEQ ID NO: 34756 - DNA, 201 bp, Homo sapiens
agtagagacaaagttgcacgatgttggccaggctggtctcaaacccctgacctcaagtgatccacctgcctcagcctcccaaagtgctaggattacaggcrtgagccaccgtgcctggcctctcaaactgatttttagaataaccctgagtcacttgtaaactaaatcatatttactaaataataatgtatcttaaaagtt

SEQ ID NO: 34757 - DNA, 201 bp, Homo sapiens
acaaggcaggaggatcgcttgagcccaggaatttgagaccagcctaggcaacatagtaagaccccatctcttaaaaaaaaaattagcttggcgtagtggcstatacctgtagtcccagctagtcaggaggctgaggcaggaggatcagtgccgcctaggagttcaaagatgcagtgagctatgattgtgtcactgcactcc

SEQ ID NO: 34758 - DNA, 201 bp, Homo sapiens
agagaacagtggcacaatctctgctcactgcaacctccgcctcctgggttcaagcgattctcctgcctcagcctcccgagtggctgggattatagacaacrcaccaccacactcggctaatttttttttgcatttttggtagagacggggtttcaccatgttgtccaggctggtcttgaactcctgacctcaggtgatcca

SEQ ID NO: 34759 - DNA, 201 bp, Homo sapiens
ccagaaggttaagggacttggcccactctgtggcatctaggaagtttggggctgggacttgtgcccaggtgtgtctgacccttcgcacctcctggatccgyggtgctggagggatgctgcggtttgtcctcttggataactctgcttttctcttcgccagcgccacgatcatgtctctcgaagactttgagcagcgcttga

SEQ ID NO: 34760 - DNA, 201 bp, Homo sapiens
gctgtgaatgtctgagactgggtttgttatctctccttaacccacccacctacccaagagttttacttgttttttttttttttttgagtctcgctctgtcrcccaggctggagtgcagtggcgccatctcggctcactgcaagctccgcctcccgggttcaagccattctcctgcctcagcctcctgactagctgggacta

SEQ ID NO: 34761 - DNA, 201 bp, Homo sapiens
ggctcaccgcaacctctgcctcctgtgctcaggtgatcctcccatctcagcctcctgagtagctgggaacacaggcatgtgccaccacagctggctgatatttttctatttttagtagagacggagtttctccatgttacccaggctggtctcaaactcccaggctcaagcgatctgcctaccttggcctgtcaaagtgct

SEQ ID NO: 34762 - DNA, 201 bp, Homo sapiens
agcgattcacctgccttggcctcccaaagtgctgggattataggtgtgagtcccgtgcccagccaagcttgagtttcatttgggttgtgctttcaccaaaygattgcagcaatgcaagagggggaaccggatgttgaggatgcgcgacgggggttactagacagctggtttggagctgggtcagaggctgatggcattaat

SEQ ID NO: 34763 - DNA, 201 bp, Homo sapiens
ctgcaacttccacctcccaggttcaagtgattctaccgcctcagtctcctgagtagctgggagtatgggtgcccgccaccacgcccagctaatttttgtatttttttttagtagagacggagtttcaccatattggccaggctggtctcgaactcctgccctcatgatctgcctgcctcagcctcccagtgtgctgggatt

SEQ ID NO: 34764 - DNA, 201 bp, Homo sapiens
tcaccatgttggccatgctggtctcgaactcctgacctcaagtgatccacccacctcggcctcccaaagagctgggattacaggtgtgagccactgcaccyggctcagttttttaaatggaaaggaaaatgtctgtcctttagagctacttttaagaacctcctataaatcccatgattgcatactggttcagggaagtaa

SEQ ID NO: 34765 - DNA, 201 bp, Homo sapiens
gactccagaccccaggcccatgctcatctctggaagggcctgtggggcagacgtgatctttgaactctttgtgcctctagtgggtggtgctttttgttttkttttttttttttttttgagatggagtttcactcttgttgcccaggctggagggcagtggcgcgatcttggctcactgcaacctccacctcccaggttcaa

SEQ ID NO: 34766 - DNA, 201 bp, Homo sapiens
tggctaaattttttgtatttttagtagaaacggggtttcaccgtgttagctaggatggtcttgatctcctgacctcaggatccgcctgcctcagcctcccaaagtgctgggaatacaggcgtgagccactgtgcccagcctgttttttttttgagatggagtcttgctctgttgcccaggctggagtgcagtggcacaatc

SEQ ID NO: 34767 - DNA, 201 bp, Homo sapiens
gtacaggtgcgtgtcaccgtgctcggctaattttttgtattttttctagagacaggttttgccatgttgccgagtttggtctcaaactctgagcttcaagygatcctcacccttcatcctcccaaagtgctgcgacgacaggtgtgggctaccatgcctggccaagaaggtcatttttatcatttgattctacagctgcta

SEQ ID NO: 34768 - DNA, 201 bp, Homo sapiens
agccctttgagaggctgaggagggagaattgcttgagaccaggagttcaaggccagcctgggcaacatagcgagactctgtctctacaaaaaaataaaaayaaaaaattcattggacatggtagtgcacacctgtagtctaagctactcaagaggctgaggcaggagcattgcttgagcccaggaggttgaggctgcagtg

SEQ ID NO: 34769 - DNA, 201 bp, Homo sapiens
ctgtatctcctcacccccattcgccttagaggtgagttttcaagatttgaattggaagaaggtgaaatggacaagggcagccttgagaaggacacagaggrgctccctggttaaaaggcgagacagcaccccctgctggtgtgaatgttcatggactgagttttccccactgcagggactgctgcatctgttttgctgatc

SEQ ID NO: 34770 - DNA, 201 bp, Homo sapiens
ggctggtgattttgggttttttttttttttgcttgttttttttaagtgtcgtggtctcactctgtggcctgggcgggagtgcagcggcgtgatcatagctyactgcagcctcaacctcctggtctcaggcagtcttcttgcctcaccctcccaagtagctaggactacaggtgcatgccaccacgcctggctgttttcaca

SEQ ID NO: 34771 - DNA, 201 bp, Homo sapiens
cagtgtctgcacaatccattgatagaactggaggatgtgtctgtgtttcctgttgggtttttctcatctcttacatcatacaaacttcaatttttaccttsaatacaggggtagtaggggtggtggtggtggtggtggttgagacagggtctctgttgcccaggctggagtgcaatgatgcaattatagctcattgcagcc

SEQ ID NO: 34772 - DNA, 201 bp, Homo sapiens
ctttatactccacgcattcaataactttggggttgtattgtaggcagtgtgagtggtgtttcccacgtggtgtttcccacagactattagttgttttttgtttttgtttttgttttaagacagtcttgctctgtcgcccaggctggagtgcagtggtgcgatctctgctcactgcaacttccacctcccagattcaagtga

SEQ ID NO: 34773 - DNA, 201 bp, Homo sapiens
ccaaagtgctgggattccaggtgtgagccactgtacccagccaccatctgacgttttgtggaaagtgtttgctgactcattggacaagaccttgtgttttmactcaaaaaatcaaggaaatcctgtatttttcttaagatactggttttgatgagtcaagatgttcttcccagtcatgttcgagggcagggggcagtggcc

SEQ ID NO: 34774 - DNA, 201 bp, Homo sapiens
ggctaggctggcctccaactcctggcctcaagtgattttcccatctcagcctcccaaagtgctgggattccaggtgtgagccactgtacccagccaccatytgacgttttgtggaaagtgtttgctgactcattggacaagaccttgtgttttaactcaaaaaatcaaggaaatcctgtatttttcttaagatactggttt

SEQ ID NO: 34775 - DNA, 201 bp, Homo sapiens
gaaaaaatctttttgaaaatttctattcaagccaggtttttagaaatgtatccgggatgtgtttgtgcgtcattcaaggcatattagcatctggtcacaakatggagtcctttgtttccatgtttcctgtctcccaaatctgtctgatcccatggagttggtggtatacggcatcgtttgtgttgaacagagcctttgcag

SEQ ID NO: 34776 - DNA, 201 bp, Homo sapiens
aatgaagtaaccagggtgaccatcaagtaaaattaaagcacaagatcattgtaggaggcttccttgtcaaagacgtgaacgtgggatttccaacgcaccayggtgtgtccactcatcactgcatgttaggaactgctgtctctttgggacacgagttaaaagaacacactaatttctggagtgtgcctgcagcttcacggc

SEQ ID NO: 34777 - DNA, 201 bp, Homo sapiens
cttgtccaggctggagtgtagtggtgcaatttcggctcaccgcagcctccgcctcctaggttcaagcgattctcttatctcagcttcccaagtagctgggrctacaggagtgtgccactacacccactaattttgtatttttagtgagaaacggggtttcaccatgttggccatgctggtcttgaactcccggcctcaagt

SEQ ID NO: 34778 - DNA, 201 bp, Homo sapiens
cttgccctgtcttgtccaggctggagtgtagtggtgcaatttcggctcaccgcagcctccgcctcctaggttcaagcgattctcttatctcagcttcccargtagctgggactacaggagtgtgccactacacccactaattttgtatttttagtgagaaacggggtttcaccatgttggccatgctggtcttgaactccc

SEQ ID NO: 34779 - DNA, 201 bp, Homo sapiens
gctggagtgcagtggcatgatcttggctcactgcaacctctgcctcctgagttccagcagtccttgagcctcagtattgagtagctgggactacatgcacytgcacactgccacgcctggctaatttttgtatttttagcagagatgggattttgccatgtgacccaggctggtcttgaactcctggcctcaaacgatcca

SEQ ID NO: 34780 - DNA, 201 bp, Homo sapiens
taaaaataggccaaaaatagcttgaactgggaggcagaggttgcagtgagctgagatagtgctactgcactccagcctgggcaacagagcaagactctgcycaaaagagaactaagttgataccctggggcggtctagtggcaagcaggtttcgaggtgagggatcagcagaggagaggaagagggacaaccccacaggtc

SEQ ID NO: 34781 - DNA, 201 bp, Homo sapiens
gcatgctatccctgcagaggctgggaaaagtcatatgtactgctgggaaggcaggttaatgtcaggaggaccatggagatgctaagagcagctcacacttyaggtgcttgccctaggccaggaaccagcagggcactttgctgtgtttacgttcagttctcacaacatacctgcactgtaggcatcacagagcttgcttct

SEQ ID NO: 34782 - DNA, 201 bp, Homo sapiens
agctcacactttaggtgcttgccctaggccaggaaccagcagggcactttgctgtgtttacgttcagttctcacaacatacctgcactgtaggcatcacasagcttgcttcttacaagccagaactgatgctggaagaggttccctgacttcactatgactcctgctgtccatcacccccctgcaaactgggttcggaact

SEQ ID NO: 34783 - DNA, 201 bp, Homo sapiens
acagtgggtcaagagatgaggtctatttgtcatcctgatcttggtttcaatgaaagctttgcacaaagatatccaagcctccagattttgcaagaatctcrtggaaatgtgcaagggtttaaaaattggggtgggcagaggggcgcattgggcagaaaagaaatggatactgagacaacacacagctgcgaagctgaaggc

SEQ ID NO: 34784 - DNA, 201 bp, Homo sapiens
actgtgcctggccctttgtatatttttactactaatcttttctcctgcattgaaaataattttttccgtggtaatcttttgtttgttgactttgtctattstatcattttccatacaaatatttccttttttctcttttgaaaaaaaattttttatacatgtatttttcatttttaggtcatcagttacatctttttttaa

SEQ ID NO: 34785 - DNA, 201 bp, Homo sapiens
ctctgggccccggtgctagccagtttgtcacagctgttatgtcagcttaatttggtttgctctgtctgaaggttggggaagcgcctggaatttgggaagcygccttcacacatgtcttcatcgccgctgccgtcagcccagggggtagtcaagatgttgctttaggaaaaccacggaagctgaaggtcttggtgttggtgc

SEQ ID NO: 34786 - DNA, 201 bp, Homo sapiens
cagtctgctgggttttgctttgttctgggttgttgttgggttttttttgtttgtttgttttggtttttggttttcttgccgtggtgcaaaactgtagaaavttgcttattcactggccttggttccattgaagtctgcgtctcgagtgtccgtttcctcctcagaaccatctgcattttcaataactctacgtcctccaga

SEQ ID NO: 34787 - DNA, 201 bp, Homo sapiens
agaggtggtagggtaagaaatgtgtagaaaactatgcaggggcctgatcacattggatcttgcacatctttttccaaacctcaggaggagtcattctgctkttgttgttactggttcctcacttccgcactttattgtatgctgacaaccttccataccatgggactgagactgccctcaatagtatcaccaatgtctttt

SEQ ID NO: 34788 - DNA, 201 bp, Homo sapiens
ttttctttaggtggatagcccagttgtgccagcactgttaaacactgcctttttttttttttttttttttttttttttttttgagactgggcctcgctccrttgcccagagtagagtgccatggtgcaattacagctcactggagccttgacctcctggggcaagtgattctcccacctcagcctcctgagtgtctgggac

SEQ ID NO: 34789 - DNA, 201 bp, Homo sapiens
cagttgtgccagcactgttaaacactgcctttttttttttttttttttttttttttttttttgagactgggcctcgctccattgcccagagtagagtgccrtggtgcaattacagctcactggagccttgacctcctggggcaagtgattctcccacctcagcctcctgagtgtctgggactataggcatgtgccactata

SEQ ID NO: 34790 - DNA, 201 bp, Homo sapiens
ttaacgcacagacatgactataggttggtgagttacatgctcttccctttgcacacccaggcctggacgactccaccggggggacccccctcacacctgcrgcccggatatcagccctcaacattgtgggagacctactgcggaaagtcggggtaagaccacactttcctggcgtttggtgccttcctgcctgtctttcag

SEQ ID NO: 34791 - DNA, 201 bp, Homo sapiens
cagcctctgcctcctggattcaagcgattctcatgcctcagcctcccgagtagctgggattacaggcaggcacctgttaccatgcccagctaattttgtakttttagtagaaacaagattttgccatgttggccaggctggtcttgaactcctgacctcaactgatcgaactgcctcggcctctgaaagcactgggattac

SEQ ID NO: 34792 - DNA, 201 bp, Homo sapiens
tacttgagaggcttatgcaggaaaattgtttgaatccgggaggcggaggttgcagtgagctgagatcgcaccgctgggtgacaaagtgagacttggtctcaaaaaaaaaaaaaaaaaaatcttgaaagcctagggcaaagaatttggcctttcagcttttatgttaattacagggagggatccttttgtgcttaagtaaaa

SEQ ID NO: 34793 - DNA, 201 bp, Homo sapiens
aaattcctgacctcaagcaatcctcccatctcgacctctcagagtgctgggattataggcttgagccagtgcaactggcctttttttttttttttcttttytttttttttttttttttttttttgagccagaggtctcactctcgcccaggctgaagtggtatgatcatggcttactgcagcctcgacttactggattaat

SEQ ID NO: 34794 - DNA, 201 bp, Homo sapiens
ttaaaaaattttttgtaattaaaaaagaattttttttttttttttaagccaagcatgattgtgcatagtcctagctattcaggaggctgaggtggaaggabtggttgaggctgcagtgagccgtgatctttttccaggcagctcccaaacattttaaaaaatttttcgtaattaaaaaaaattttttgcattaaaaatttt

SEQ ID NO: 34795 - DNA, 201 bp, Homo sapiens
aaaaaattttttgtaattaaaaaagaattttttttttttttttaagccaagcatgattgtgcatagtcctagctattcaggaggctgaggtggaaggattrgttgaggctgcagtgagccgtgatctttttccaggcagctcccaaacattttaaaaaatttttcgtaattaaaaaaaattttttgcattaaaaatttttt

SEQ ID NO: 34796 - DNA, 201 bp, Homo sapiens
gtcctgattggtcttttttttttttttcttttttgagacagagtcatgctcttgccctgtcttgtccaggctggagtgtagtggtgcaatttcggctcacygcagcctccgcctcctaggttcaagcgattctcttatctcagcttcccaagtagctgggactacaggagtgtgccactacacccactaattttgtatttt

SEQ ID NO: 34797 - DNA, 201 bp, Homo sapiens
gattggttgagcctgggaggttgaggctgcagtgagctgtgatctcaccagtgcactccagcctgggtgacacagcgtctaaaaaagtaaaaaacaaaacaaaaaaaaaaactgagatgggatcttactttgtggcccaggctggtctcaaactcctgatgtcaagccatcctcctgccttggcctcccagagtgctggga

SEQ ID NO: 34798 - DNA, 201 bp, Homo sapiens
aactgccttctcttttggccgggtgctcatacctgtaatcccagtgctttgggaggccaaggtgggagattacttgagctcaggagtctgacaccagcccrggcaacatggtgaaaccccctgccccgacttggcctctacaagaatgcaaaaattagccaggcctgatggtgtacactggtggtcccagctactcaggag

SEQ ID NO: 34799 - DNA, 201 bp, Homo sapiens
ctttttttttttttggagacagggtctcactctgtcacccaggctagactgcggtggtgtgatctcggctcactgcaacctccgcctcctgggctccagcratccttccacctcagcctaccaagtagctgggactacacatgcaggccaccacacccagctaatttttgtttgcatttttcatagagacagggtctcact

SEQ ID NO: 34800 - DNA, 201 bp, Homo sapiens
ccaccttgacctcccaagtgctgggggttacaagcgttagcaatcatgcctggcctttttttttttttggagacagggtctcactctgtcacccaggctaractgcggtggtgtgatctcggctcactgcaacctccgcctcctgggctccagcgatccttccacctcagcctaccaagtagctgggactacacatgcagg

SEQ ID NO: 34801 - DNA, 201 bp, Homo sapiens
ctctgagactgtagtctgcttctcattgagatttctagaggtgagttttcagattaattttccaggcgatcttcccaccttgacctcccaagtgctggggsttacaagcgttagcaatcatgcctggcctttttttttttttggagacagggtctcactctgtcacccaggctagactgcggtggtgtgatctcggctcac

SEQ ID NO: 34802 - DNA, 201 bp, Homo sapiens
acgcctggctaatttttgtatttttagcagagatgggattttgccatgtgacccaggctggtcttgaactcctggcctcaaacgatccacctgtcttagcytctcaaagtgttgggattacaggtgtgtgccagtgcacctggcctctgaggtggattttagctccagccagtaggacacccctgtctctccttaatgctg

SEQ ID NO: 34803 - DNA, 201 bp, Homo sapiens
cactgcactccagcctgggcgacagagctagactctgtctcaaaaacaaaacaaaacaaaaaacaacaaaaaaacaaaaaaagcacagatgttttttcttwtatttatttttggaaacagggtcttgctctgttacccaggctggagggcagtggtgccaccatagtgcattgcagcctgaaacttctgggagcaagtgat

SEQ ID NO: 34804 - DNA, 201 bp, Homo sapiens
gtctgggtggggccctggcatgtctgtgtggttttctttttctcattaaactcccaatgtacattttgatgagctgcttcatggaagagtcaaaactgtgkgtgcccagggctaggtatgatggacggtgaaaggggaagtgctggttgccttctttgggaagacaaacctaatgccatgaagcagttggggacgtgaagc

SEQ ID NO: 34805 - DNA, 201 bp, Homo sapiens
agcccttttttttctttttaaatctgtagaacctttgagaaactggcactaacttctagcccagactatgttcctgaaaccagccacccgatgggacagtrcagatctgatctctaacagtgtcattaattttcttgcctaaagaaaatcagggccaggctcagtggctcacacttgtaatcccagcactttgggaggctg

SEQ ID NO: 34806 - DNA, 201 bp, Homo sapiens
ctgagtagctgggattacaggcgtgtgccaccatgcccagctaattttttgtatttttagtcgagacggggtttcactgtgttaggatggtcttgatctcrtgacattgtgatccacccacctcggcctctcaaagtgctgggattacaggcgtgagccactgcaaccagcccttttttttctttttaaatctgtagaacc

SEQ ID NO: 34807 - DNA, 201 bp, Homo sapiens
atcctgagctttcttccatattagtacttacagttcttaacaactgcatcgttttccattcagtcctctgttgacattgaggtttccagttttccacattmgtgaatgatggtgtgcatctttgaacatgggtccttgcctgcctaagtatttttgtaggttgatcattgtaaacttggaaagcacaaagacagaagccag

SEQ ID NO: 34808 - DNA, 201 bp, Homo sapiens
cttcttacaagccagaactgatgctggaagaggttccctgacttcactatgactcctgctgtccatcacccccctgcaaactgggttcggaactccacacscgcatacctggcctcctgctcgacctgctcctccagctgtgcaatcttggcctccagcgccgcgatggtggacttgaacttggacttgacggccccctcc

SEQ ID NO: 34809 - DNA, 201 bp, Homo sapiens
tcagggaggggtagggaacctgcaggcatctggcatttagcctcactgtacaatcctcattttatttatttttgagacagggttttcactccatcactcargctggggtgtagtggcgcaatcttggctcactgcaacctccaccccaccctgggttcaagcgattctcctgcctcagcttccagagtagcagggattaca

SEQ ID NO: 34810 - DNA, 201 bp, Homo sapiens
caatcttggcctccagcgccgcgatggtggacttgaacttggacttgacggccccctccatctcgtggagcttgctccggagctccttgttctgccgctcragctgctgccgggcactctcattcttctgggccgtgctgcgctctgtggccagctcgttgctgagctgctcggcctggggaggagagtgaaggccatgag

SEQ ID NO: 34811 - DNA, 201 bp, Homo sapiens
tcttctgggccgtgctgcgctctgtggccagctcgttgctgagctgctcggcctggggaggagagtgaaggccatgaggcggactcagggaagcccaagasagcgcactgagaccatgcctcttcctgccttgtttggcctctgcacgagtcccttgatcccgggcaccctgtcctctccttcatcctgtaaaactccact

SEQ ID NO: 34812 - DNA, 201 bp, Homo sapiens
gcggcacgatctcagctcactgcaacttccacctcccaggttcaagtgattctaccgcctcagtctcctgagtagctgggagtatgggtgcccgccaccasgcccagctaatttttgtatttttttttagtagagacggagtttcaccatattggccaggctggtctcgaactcctgccctcatgatctgcctgcctcagc

SEQ ID NO: 34813 - DNA, 201 bp, Homo sapiens
atccgggcctccaggcggcgcttctcgtcctggagtgcgttcctgggggaagggcggccatggtgggggcctctaccctcccccgccttaaaagatgcccmctccttggagtcatgcctcaggggtattgccctcatcatctaatgggtgaaactgaggcttggagaagattagaagactcatctgtagttacacagccag

SEQ ID NO: 34814 - DNA, 201 bp, Homo sapiens
tagaggagggaagcgtgtgtctttctagacaggtggaccccagaggaggacgaaatgaaatctgggaatgcacagactggagctgccaaggggtgctaccrtgacacccgcatctgaggctctcctagcaaggcgaggctttacctcttgtagctgcatgaggtctgcttccaagctcttggctttcttctcattctcttt

SEQ ID NO: 34815 - DNA, 201 bp, Homo sapiens
ggcaggcgaaacatggacgagaaaaaccacccagagccacttacgttcttgcccacgtcatccttggagctgaccaggtcttccatttcggctttgagcaytttgttggtccgctcgagttcctctttggcttccaaggcctcttcaagggcccgagccagggacagggccttggtttccttctccctggcttctgcctca

SEQ ID NO: 34816 - DNA, 201 bp, Homo sapiens
tcacccacctgcagtttgcgtagctgcttgatggcttcctccctccccttgatggcagagtcggcctgaagctccaggtctttcaggtccccttccagctkcttctttgctgcagctgccagggcacgttgctttcgctcgtcttccagttccgtctcatactcgtgaagctgggcgaggaatagagatgtgtgctgcccc

SEQ ID NO: 34817 - DNA, 201 bp, Homo sapiens
cagcctgggaggttgaggctgagtgagctgagattccaacactgcactccatcctgggtgacagcacgacgttgtctcagaagagaaaaaaactgccaccytttttttttttttttttttttttggtttgtttcttggggtttaagtgaattttgacactttgggagaccgagatgggtggatcacctgaagtcaggaatt

SEQ ID NO: 34818 - DNA, 201 bp, Homo sapiens
tggattattttattaaattgagatgaggtcttgatattgttgcccaggctggtctggaactcctgagctcaagcagttctcctaccttggcctcccaaagygctggcattacaggcgtgggccaccacacctggccttcaaggtggatttaaaaaagaaatttaagagtctctctcacccaggctggagtgcagtggcatg

SEQ ID NO: 34819 - DNA, 201 bp, Homo sapiens
agcctggaactcctggctcacatgatcctcctgccttagccttccaagaggttgggagtacaggtgtgcactatcctgcctggcttactaacaacaacaamaaaaaaacaccttttttttatagagacgggggtctctctcggctaggctggcctccaactcctggcctcaagtgattttcccatctcagcctcccaaagt

SEQ ID NO: 34820 - DNA, 201 bp, Homo sapiens
tcttttctttttttgagatggagtcttgctctgtcacccaggctggagtgcagtggcaggatctctgctcactggaacctccacctcccgggttcaagagwttcttctgtttcagcctcctgagtagatgggattacaggcatgtgccaccatgcccagctaatttttgtatttttagcagagatggggttttaccatgtt

SEQ ID NO: 34821 - DNA, 201 bp, Homo sapiens
tctcgaactcctggcttcaagtgatctacccgctgtggcctcccaaagtatcaggattacaggcatgagccacagcaccctgccaggcttgggtgttcaargaagagaaagaaggcagtgtggctgggacataagtgaatgagaggtggtagggtaagaaatgtgtagaaaactatgcaggggcctgatcacattggatct

SEQ ID NO: 34822 - DNA, 201 bp, Homo sapiens
acactcagagctctgactcgaagccctgctctgaaccctatgtatgtctctttccttttaccgtttttcctctaggaaatttgggaaattagggtgatatstgtgttttttccttaactcgaaaaattaaggagcacttggaaactgccttctcttttggccgggtgctcatacctgtaatcccagtgctttgggaggcca

SEQ ID NO: 34823 - DNA, 201 bp, Homo sapiens
attaacactctaccccctttttatttttttgagatggggtcttgttctgtcgcccaggctgggaggctggaatgcagtgatcttggctcactgcagcctcygcttctcaggcttaagtgatttttcctgcttcatccttctgagtagctgggactacaggcacgcaccgccgtgcccgtttgatttttgtttttgtttttt

SEQ ID NO: 34824 - DNA, 201 bp, Homo sapiens
aggcatggtggctcacgcccgtaatcccagcacttttggaggccaaggcgggcagatcatttgaggtcaagagttcgagaccagcctggacaacgtgatgraactctgtctctactaaaaatacaaaaattagccgggtgtggtggcacatggctataatcccagctactcaagaggccaaggcaggagaatcgcttgaac

SEQ ID NO: 34825 - DNA, 201 bp, Homo sapiens
ctaacttttgtattttaggtggagacacagtcttgccatgtcgcccaggctggtatcaaattcctggactcaagtgatccgcccacctcggctgatcccawagtgctgggattacaggtgtgagccaccgcgcctggtcaaaaatcctcttgttgaatataaaacctcccaaatttgaaatgtcactgaccaaatacaaaa

SEQ ID NO: 34826 - DNA, 201 bp, Homo sapiens
tattgcatcttggtgtgtcatggacatgtcaagctgtgaatgtctgagactgggtttgttatctctccttaacccacccacctacccaagagttttacttkttttttttttttttttgagtctcgctctgtcacccaggctggagtgcagtggcgccatctcggctcactgcaagctccgcctcccgggttcaagccattc

SEQ ID NO: 34827 - DNA, 201 bp, Homo sapiens
gcaacctcttcatcgtgggctcaagtgattctcccacctcatcctccggagtagctgggactaaaggcacctggctaacttttgtattttaggtggagacrcagtcttgccatgtcgcccaggctggtatcaaattcctggactcaagtgatccgcccacctcggctgatcccaaagtgctgggattacaggtgtgagcca

SEQ ID NO: 34828 - DNA, 201 bp, Homo sapiens
gccaccatgcccagctaattttttgtatttttagtcgagacggggtttcactgtgttaggatggtcttgatctcgtgacattgtgatccacccacctcggsctctcaaagtgctgggattacaggcgtgagccactgcaaccagcccttttttttctttttaaatctgtagaacctttgagaaactggcactaacttctag

SEQ ID NO: 34829 - DNA, 201 bp, Homo sapiens
ctggagtgtagtgacgtgatcttggctcactgcaacctcttcatcgtgggctcaagtgattctcccacctcatcctccggagtagctgggactaaaggcayctggctaacttttgtattttaggtggagacacagtcttgccatgtcgcccaggctggtatcaaattcctggactcaagtgatccgcccacctcggctgat

SEQ ID NO: 34830 - DNA, 201 bp, Homo sapiens
gatttctagaggtgagttttcagattaattttccaggcgatcttcccaccttgacctcccaagtgctgggggttacaagcgttagcaatcatgcctggcctttttttttttttggagacagggtctcactctgtcacccaggctagactgcggtggtgtgatctcggctcactgcaacctccgcctcctgggctccagcga

SEQ ID NO: 34831 - DNA, 201 bp, Homo sapiens
acccaattgcctaaggtagagccccagaagatgtcctcacctcctttttctctctcccctgccccgaaaagtcataattcatcaagttctggtaagtttgscttctaaatatttttggagtccatttctgttccctccatcttcattcctactttctttttttttagacaaggtctcactctcttgcccaggctggagtgc

SEQ ID NO: 34832 - DNA, 201 bp, Homo sapiens
ctcccatctcggcctcccagaatgctgggatttcaagcatgagccatcgttcccatgccccattgtgttgcactaacccaagcggaggtcctgattggtcttttttttttttttcttttttgagacagagtcatgctcttgccctgtcttgtccaggctggagtgtagtggtgcaatttcggctcaccgcagcctccgcct

SEQ ID NO: 34833 - DNA, 201 bp, Homo sapiens
tcaataataaaagcattagtgtgtcactgtcatagctttttaaaaatctgaaaccattttgttagtcaagagaaacatcctgtagagttccaagtctgctrggcaaggtcctgtgggtttccctttatttggggtttctacctggagtgtttcaccccagtaggtcttttttctgactggtatctactgttgaacctctct

SEQ ID NO: 34834 - DNA, 201 bp, Homo sapiens
gctgggtgcagtggtgcgtgcctataattccagctactccagatgttgaggcaggagagttgcttggacccgggaggtggagggtgcagtgagccaagatygcgctactgtactccagcctgggcaacagagtgagactccgtctccaaaaaaaaaaaaaaaggtgtcataaacctctgagactgtagcctgcttcttagc

SEQ ID NO: 34835 - DNA, 201 bp, Homo sapiens
gaggcaggagagttgcttggacccgggaggtggagggtgcagtgagccaagattgcgctactgtactccagcctgggcaacagagtgagactccgtctccaaaaaaaaaaaaaaaggtgtcataaacctctgagactgtagcctgcttcttagcttctcattgagattcctagaggtgcgttcgagttttcagagtaattt

SEQ ID NO: 34836 - DNA, 201 bp, Homo sapiens
ctggctcacatgatcctcctgccttagccttccaagaggttgggagtacaggtgtgcactatcctgcctggcttactaacaacaacaaaaaaaaaacaccttttttttatagagacgggggtctctctcggctaggctggcctccaactcctggcctcaagtgattttcccatctcagcctcccaaagtgctgggattcca

SEQ ID NO: 34837 - DNA, 201 bp, Homo sapiens
ctcgggagggaggctgaggcaggagaatgacatgaacccaggaggcggagcttgcagtgagccgagatgtggccactgcactccagcctaggcgacagggygagactccgtctcaaaaaaaaaaaaaaaaaaaaatcaaggcccagagattcatgatcactgagaagaggaattcgcaaatgacccttttgttgacagagg

SEQ ID NO: 34838 - DNA, 201 bp, Homo sapiens
atcgagaccagcctggccaacatggtgaaaccccgtcactactaaaaatacaaaaattagctgggtgtggtgccgcatgcctgtagtcccagctactcggragactgaggcaggagaatcgcttgaacctggaaagcagaggttgcagtgagacgagattgcagcactgcattgcagcctgggtgatagagcgagactctg

SEQ ID NO: 34839 - DNA, 201 bp, Homo sapiens; identical to SEQ ID NO: 7866

SEQ ID NO: 34840 - DNA, 201 bp, Homo sapiens; identical to SEQ ID NO: 7867

SEQ ID NO: 34841 - DNA, 201 bp, Homo sapiens
actctgtttcaaaaaaaaataaagaaaacgaagtttccacaccaaccatgagagtggtgataggaatgaaaaaggccacccgacctccctctgctggcctmcccggcagcacgcacctgtctctgcagttgcctcctcttctcctcattctgctcgtcccgggcttggagatccctttcgaactggcccttgagcgcctgc

SEQ ID NO: 34842 - DNA, 201 bp, Homo sapiens; identical to SEQ ID NO: 7868

SEQ ID NO: 34843 - DNA, 201 bp, Homo sapiens
aaaaaaataaagaaaacgaagtttccacaccaaccatgagagtggtgataggaatgaaaaaggccacccgacctccctctgctggcctccccggcagcacrcacctgtctctgcagttgcctcctcttctcctcattctgctcgtcccgggcttggagatccctttcgaactggcccttgagcgcctgcatgttgacttcc

SEQ ID NO: 34844 - DNA, 201 bp, Homo sapiens; identical to SEQ ID NO: 7870

SEQ ID NO: 34845 - DNA, 201 bp, Homo sapiens
ctcttccagctgcgtcttcatctcctccatctgggtctccagggcccgcttggacttctccagctcatggacctgccggcagagcgggcagccccattctrtgaggctcaacttcatgaagacgattgagaaacccaccgtgagcggcacctcaggagatcagggaggtggctttggcctcccacaggatgcatggccggg

SEQ ID NO: 34846 - DNA, 201 bp, Homo sapiens
tggtaagacagaatagtccttgcctataacttgagagataaaagtgtatttctgtccaggcactggagtccaaactcgcttcctgccggaacctcgtgtaygatcagtccccaaaccgaacaggtggcccagcctctgggcggagcagcaagaacagagatggcggggagagacggccaagcagcaccagcgtgcctttgg

SEQ ID NO: 34847 - DNA, 201 bp, Homo sapiens
ccatttattagtgaaagtgtttttaagcacagtcagggtgtaaacagtgcagcattcctgctcccctccgtgggagcagcgtctccttttcaattcatgtractacagaaggcacttggtgaactgtgcgtgtctgaggtgtggaaaccaggagagggggaaagaattctcaaaggcctgacgtgagaagttggaaaggtt

SEQ ID NO: 34848 - DNA, 201 bp, Homo sapiens
cggaagacaggtcttattttaggacatcaaagaagagagcagacttttgctccccacgcaagggttggataagaagccataaggatgaacacaactcagtraccaattctttagtcaaaaggaacaactcggctgggcatggtggctcacacctgtaatctcagcactttgggaggctgaggcgggcggatcatgaggtca

SEQ ID NO: 34849 - DNA, 201 bp, Homo sapiens
ccagatagtggaactgtcatattcattcagtgcagtgtcttcactggacaagggaggacagcactgctgagtgccctaaccacgtaagagtggcttttggyatgaaaggaagaaaaatccaagctacacacacagcctctgccatctcgtcaagatgcagtgataagggcgcacactgttgggtgtcatgtcacatgtgct

SEQ ID NO: 34850 - DNA, 201 bp, Homo sapiens
ctgcaggtgtgcaccaccatgcctggctaatttttatatttttaatagagatggggtttcaccatgttggccaggctggtcttgaactcctgaccccaggygatctgcctgcctcggcctcccaaagtgctgggattataggggtgggtcactgttgctggcccaattaattatttataacgtcgatttgctttctaatgt

SEQ ID NO: 34851 - DNA, 201 bp, Homo sapiens; identical to SEQ ID NO: 7869

SEQ ID NO: 34852 - DNA, 201 bp, Homo sapiens
gcctcccaggttcagcgattcccctgcttcagcctcctgagtagctgggactgcaggtgtgcaccaccatgcctggctaatttttatatttttaatagagrtggggtttcaccatgttggccaggctggtcttgaactcctgaccccaggcgatctgcctgcctcggcctcccaaagtgctgggattataggggtgggtca

SEQ ID NO: 34853 - DNA, 201 bp, Homo sapiens; identical to SEQ ID NO: 7871

SEQ ID NO: 34854 - DNA, 201 bp, Homo sapiens
tagggctttggcttattgctgagtgctgtgtgggcagcatcttatttaatcctcatgacagcctcgtgcaccccatgagctatgatgagtcccattctgcrggtaaagagcccatgccccagaaggttaagggacttggcccactctgtggcatctaggaagtttggggctgggacttgtgcccaggtgtgtctgaccctt

SEQ ID NO: 34855 - DNA, 201 bp, Homo sapiens
atcttatttaatcctcatgacagcctcgtgcaccccatgagctatgatgagtcccattctgcaggtaaagagcccatgccccagaaggttaagggacttgkcccactctgtggcatctaggaagtttggggctgggacttgtgcccaggtgtgtctgacccttcgcacctcctggatccgcggtgctggagggatgctgcg

SEQ ID NO: 34856 - DNA, 201 bp, Homo sapiens
tcctaggcgtgatcatagtgcacagccgccttaaactcctgggcttaagcgatcatcctggctcagcctcccaagtagatgggactataggtgtgcttcaycaggccaggcttttttttttttggcggaaacaggggtctcgctatgttgcccaggctggtcttgaactcctggactcaagtgatgcacctctgcctccca

SEQ ID NO: 34857 - DNA, 201 bp, Homo sapiens
tttttttgagatggagtttcgctcttcttgcccaggctgtagtgcaatggcatgatctcggctcaccacaagctccacctcctgggttcaatcgattctcytgcctcagcctcccgagtagctaggattacaggcatgcaccaccatgcccagctaattttgtatttttagtagagacggggtttctccatgttggtcagg

SEQ ID NO: 34858 - DNA, 201 bp, Homo sapiens
tagtgcaatggcatgatctcggctcaccacaagctccacctcctgggttcaatcgattctcttgcctcagcctcccgagtagctaggattacaggcatgcrccaccatgcccagctaattttgtatttttagtagagacggggtttctccatgttggtcaggcagctctcgaactcccaacctcaggtgatccacttgcct

SEQ ID NO: 34859 - DNA, 201 bp, Homo sapiens
gcccactctgtggcatctaggaagtttggggctgggacttgtgcccaggtgtgtctgacccttcgcacctcctggatccgcggtgctggagggatgctgcsgtttgtcctcttggataactctgcttttctcttcgccagcgccacgatcatgtctctcgaagactttgagcagcgcttgaatcaggccatcgaaagaaat

SEQ ID NO: 34860 - DNA, 201 bp, Homo sapiens
gcctcatgcctgtaatctcagtaactcaggaggctgaggcgggaggatctcttgagcccaagagtttgagattgcagtgagctgtgattgtaccactgcasttcggcctgagagacacagcaaaaacctgtgtcttaaaaaatcatgttgttatatgtgtttattaggttattattattttgagatggagtctcactttgt

SEQ ID NO: 34861 - DNA, 201 bp, Homo sapiens
aggcgtccaacacaggcatggcatgcttggctggaagaaggaaccctgcaatgagggactccagaccccaggcccatgctcatctctggaagggcctgtgsggcagacgtgatctttgaactctttgtgcctctagtgggtggtgctttttgttttgttttttttttttttttgagatggagtttcactcttgttgcccag

SEQ ID NO: 34862 - DNA, 201 bp, Homo sapiens
tttctggccaggcatggtggttcatacttgtaatcccagccctttgagaggctgaggagggagaattgcttgagaccaggagttcaaggccagcctgggcracatagcgagactctgtctctacaaaaaaataaaaataaaaaattcattggacatggtagtgcacacctgtagtctaagctactcaagaggctgaggcag

SEQ ID NO: 34863 - DNA, 201 bp, Homo sapiens
gctgcagtgagctatgattgtaccattgcactccatcctgggtgacagagcaaaagttaaaaaataaaaaacctgagtagtggttgtttagaacacacatygttgagtttcccccaatccccatatccgtgacacggagaccttagtgtcatctgcctctccctgtacttggcccacttcacccatttgttaacagctgaa

SEQ ID NO: 34864 - DNA, 201 bp, Homo sapiens
gagacgggggtttcaccgtgttggccaggctgttctcaaactcctgacctcaagtgatctgcccgccttggcctcccaagtagctggaactacagccgtgyaccactatgccgggctaatttttgtattttggtttcgccatgttgccccaggctggtgattttttttttttttttaagcgttggcctgggctagagtgca

SEQ ID NO: 34865 - DNA, 201 bp, Homo sapiens
ggctccatcctctttctcctcttccttcctccccatactcctctcctagatgaccctcgtttcttttctctctctctcctattcctccatcctgccacccscttctctgcgaccccagacccctcgattgcagcgttgcccctgccctcacacccactgtcccgcccctgcaggcctctttccaaaaacccaccctgctcc

SEQ ID NO: 34866 - DNA, 201 bp, Homo sapiens
attttattttctaggaagtaaggtacgtgtctccaaagtgtactggaccgaaaatgtgactgagcacagagaagtggccatccgctgcagcctggagagtrtaggcagctcagccactctgtactctgtgatgtggtactggaacagagaaaactctggaagtaaattgctggtgcacttgcaacatgatggcttgctgga

SEQ ID NO: 34867 - DNA, 201 bp, Homo sapiens; identical to SEQ ID NO: 7896

SEQ ID NO: 34868 - DNA, 201 bp, Homo sapiens
gccaggcatggtggcccatgcctgtaatcccaactgctcgggaggctgaggcaggataatcgcttgaacccgggaggcagaggttgcggtgagccgagatygtgccactgcactctagcctgggcgacagagcgagactccgtctcaaaaaataaataaaataaaaataaataaataaataaataaataaatgtgtttgta

SEQ ID NO: 34869 - DNA, 201 bp, Homo sapiens
aaaaacaatataggtgagttcacatatttatgcagagataagtttctgctttatgcatctcagccttctctggaacatatctgcaggcttttgtaaacctrgtatgtgggaatttcacctgaaggggaacttcagggtacacagctgataatcctatcaatagggtcatcttctaaaactaaaaatagttctttgtatagg

SEQ ID NO: 34870 - DNA, 201 bp, Homo sapiens
gcagtctttatttcgttcacaactcctagtccatgatgccactgaggaagagacaggagtgtatcagtgtgaagtagaagtttatgacagaaattccctakacaacaaccgccccccgagggcttctgccatctctcacccactgaggatagccgtcactttaccaggtaagtgtgacttgaaattaatccctgttttaaa

SEQ ID NO: 34871 - DNA, 201 bp, Homo sapiens
cctacttacaagctaagctcagcattggccagagagaagtaacagttcagaaaggaccactgtttagagctgaaggttacccagtcagcattggctgcaaygtaactggccaccagggaccttctgagcagcatttccagtggtctgtttacctgccgacaaacccgacccaggaagtccagatcattagcaccaaggatg

SEQ ID NO: 34872 - DNA, 201 bp, Homo sapiens
gataacttttttactcccaaatttgagtgattagtaaagagctacataatgtaaccagttttgcttttcacaagacatctctatttctcagtgggctgaamaccacacttttgcttcctctttactttgcagtgagagcacagcatttgtcactcaacctctgaatgttagtgacactattgggacgaaaaaggactgtgc

SEQ ID NO: 34873 - DNA, 201 bp, Homo sapiens; identical to SEQ ID NO: 7903

SEQ ID NO: 34874 - DNA, 201 bp, Homo sapiens; identical to SEQ ID NO: 7906

SEQ ID NO: 34875 - DNA, 201 bp, Homo sapiens
accaccctatgaggcaagtagttgagtctccattttaaaaatgaggactctgaacttcagacatgctagatgcgctgcctaagcccacccagctggtgagmgtggggctggcattcaaagggaggcctgtctctctccaaagcccactcagcacagacagctgggcctcaaagtagctccagtttccaacatgaagccttg

SEQ ID NO: 34876 - DNA, 201 bp, Homo sapiens
aatccctgtaatgtaccttctgggctcctccacctggctgttccttcctggtagtcagggaggcagtgtggggtgataaaaaatcccaggggctggaatcwgaccagcctaggctcaaatcacagctctactaccaataccagctatgaaatcatacgctggttacttgctgtgagcctcagctttctataaaatgaagat

SEQ ID NO: 34877 - DNA, 201 bp, Homo sapiens
tttgctaagaatgaggggtactggtggaatacatggcttgagggagctgctaaaagttgtgaatgaccactttgggaagtagaggaggagtgaatcaaggrtaagtaaaagcagcaggcagagggccctgcagaagctgtgtagttttcaatggcagggtccagcaggcaagcagttgggctaaagaaggaaagaggctgg

SEQ ID NO: 34878 - DNA, 201 bp, Homo sapiens
gtctgtctgtctgacggctgttttctcttgggcagctgttctatggagtgattatgtggaagtaaaaatatgacctaaagtcataggaacagtatctaccwacacatgactgcaagaccgagtagtccaccaaaggaggggaggtcacttaaggcaatccaatctgaggttttggggagctgaggtaggagcaatatccct

SEQ ID NO: 34879 - DNA, 201 bp, Homo sapiens
aaagtgctatattttaatctggtaaatatattagaaattctgtttcatttttctgtctagagtcaagtttacaagttagtctgatgagccgtcagccgcargtgatgttaaccaacacctttgacctgtcctgtgtcgtgagggccggttactctgacctcaaggtgccactcactgtgacgtggcagttccagccagcta

SEQ ID NO: 34880 - DNA, 201 bp, Homo sapiens
aaacggaaaatccaaccaggctatactaccactaaaaatcttcatagcttccctcttctttgaggtattaataaaagccaagctcttaggcttggcacacraagcccactaagatctgcccatcctacctgtatagatccttctttcacaacaacctcaaacttcattccaacaagatagtacagcctgtgtgttactatt

SEQ ID NO: 34881 - DNA, 201 bp, Homo sapiens
tgaacccacgcatgggggtaagggaaggaggccagacgactagggtggggagtgctccacccactcagcagcagctgtctaagtagcagattggagaaacrctgcctatttgttgtggctgctgggaacagtcttagaaaaggatcaactttgcaaaattgaggtcacagttcaggacagactgtactgggaatcaatttc

SEQ ID NO: 34882 - DNA, 201 bp, Homo sapiens
ccatctcagaataatgtttaaaatgcataaaataaaatgcatagaattacagaggaaatcagtcacattgaaatacaggtatcaaaatattttaaataaawtataatgcagtaatttatttgcttcttatttatgcattacataacaaaatctacaggtaggtcttttaaccaccaaacttcaaagtaatgatgagtataa

SEQ ID NO: 34883 - DNA, 201 bp, Homo sapiens
ttctctcttatagtttgcattctcttaggaagagtgatggagagacgttggagtcatttagatctgacagtcactggatagcagaacagctttggatgagmcacttaatctgctgaagccttagttacctgatctgtaaattgttaatgtgcaatttaaatatggtgacatatataacatgccgagtacctgacacaccaa

SEQ ID NO: 34884 - DNA, 201 bp, Homo sapiens
ccaccttccagctggagatcaccttcactgccatcacagacagtggcacatatgagtgcagagtatctgagaagtctcggaaccaggccagagatctgagstggactcagaagatttcagttactgtaaagtctctgggtaagtgtcaaaggaagtccttttctgcacctgtatatcactcaattcattctgcagtggaac

SEQ ID NO: 34885 - DNA, 201 bp, Homo sapiens
cattcagaaaaccatgtgtactgtcctttctgggtgatttaaggaagagtcatgagcgttttttactctaaggattttgttttttttgggtttacctaccrctatagaattgaactcccacataaaatgtgatccctgtgacatccttacagagggtgtcatctctctctggtactgaaaggacagaggctgtgggctctc

SEQ ID NO: 34886 - DNA, 201 bp, Homo sapiens
gcagagtagcagatttatttccacctcctgtgtagtggccccatctcgccatcattaccccaccattctagcaactgtaatacctggtgctgtggactctmacctcacaattctctgcctcccatgagtagaaaaggaagccagggcctcctaagtaatcatttcagtctttgctgaatgtcacccaggtctgaggacagg

SEQ ID NO: 34887 - DNA, 201 bp, Homo sapiens
tgatggacatatgggttgtctcttgtttgaagctttaatgagcagtgtagctgtgcatattctttcacacatagcttggtgcacacatttctctaagacgrcattactgaaaagtgtcttaaactgccactgtagtataacttgttggtaagtaataatttacatttttctaaggtggtctaacttgtattcctagattct

SEQ ID NO: 34888 - DNA, 201 bp, Homo sapiens
catttttctgtctagagtcaagtttacaagttagtctgatgagccgtcagccgcaggtgatgttaaccaacacctttgacctgtcctgtgtcgtgagggcyggttactctgacctcaaggtgccactcactgtgacgtggcagttccagccagctagctctcacatattccaccagcttattcgaatcacccacaatggca

SEQ ID NO: 34889 - DNA, 201 bp, Homo sapiens
tcactaattctaatccagatatgggtgagaggcagatggtgggaaatggtgactgtgggatgcagagcaaacactggcctcccaggagaggtgatttaacrgcacaggcactaacagttgctagctgttggccacttcagcatggtaaggggcacaccttgccatcctttgatggcagattgcactaagctgggcagcctc

SEQ ID NO: 34890 - DNA, 201 bp, Homo sapiens
aggctggagaaaatggactgggccaccttccagctggagatcaccttcactgccatcacagacagtggcacatatgagtgcagagtatctgagaagtctcrgaaccaggccagagatctgagctggactcagaagatttcagttactgtaaagtctctgggtaagtgtcaaaggaagtccttttctgcacctgtatatcac

SEQ ID NO: 34891 - DNA, 201 bp, Homo sapiens
ggagctgaggtaggagcaatatccctttgattggtttgcttctcaacctggcagcctggtctgtgcagctacccagggtattgtatctccagatctctatmataacaagctgtgtcattccagtggggctctactgtaatttggcagagaaagagtaatacgaagcatatttctcccactgtgaacagaaactgtacaact

SEQ ID NO: 34892 - DNA, 201 bp, Homo sapiens; identical to SEQ ID NO: 7900

SEQ ID NO: 34893 - DNA, 201 bp, Homo sapiens
taatagaagagtagatacaactgacagtccaacatcagaaagaaagaaagaaagaaagaaagaaagaaagaaagaaagaaagaaagaaagaaagaaagaargaaagaaagaaaagaaagaaaagaaagaaagaaagaaagaaagaaagaaagaaagaaagaaagaaagaaagaaagaaagagtagatacggttgacagtcc

SEQ ID NO: 34894 - DNA, 201 bp, Homo sapiens
cttgggcaagttacctaggaatcagagggagcattcactgagtgcttattggttctacgcactgttaggtgttcctttgtgtcttacctcatccacctctygcatccccccttggaacaagatagcatcattaccctacatctcttgaaggttcaggtccctgggctgcaaggagataagaggctccctcacacagcctct

SEQ ID NO: 34895 - DNA, 201 bp, Homo sapiens
tagctcaaacacctcttccccttttgaatccagcacagagatagcacagaggagatgtaagcagacagggagggtctcctgggaaagcagacatttaaccwacttgagcaatcagcttgttttacagcttcctgccttgctgcctgtttcttcccaagccccgtgtggaatgtggtgacctagtcacctggaaccagctcc

SEQ ID NO: 34896 - DNA, 201 bp, Homo sapiens
tttcaccgtgttagccaggatggtctcgatctcctgacttcatgatccacccgcctcggcctcccaaagtgctgggattacaggcgtgagccaccacgccyggcagaagactcttagaaagtgtgatgaccccctgcccctattttttagaaacctgtattttaattcaaagggaaagagagcagaagtgagcctgggcag

SEQ ID NO: 34897 - DNA, 201 bp, Homo sapiens
tcttgtcatccaggtaagggagcatatttttacaaacaacaaagctgaaatgaagacttttttttttttttttttgagatgaagtctcgctctgtcgcccrggctggagtgcagtggtgtgacctgggctcactgcaagctccgcctcccgggttcacgccatcctcctgcctcagcctcccaagtagctgggactacagg

SEQ ID NO: 34898 - DNA, 201 bp, Homo sapiens
ttctctaatttactgccattttattttctaggaagtaaggtacgtgtctccaaagtgtactggaccgaaaatgtgactgagcacagagaagtggccatccrctgcagcctggagagtgtaggcagctcagccactctgtactctgtgatgtggtactggaacagagaaaactctggaagtaaattgctggtgcacttgcaa

SEQ ID NO: 34899 - DNA, 201 bp, Homo sapiens
ctggggtttggggcagcagtaggtcaagtctggttcctcaaggtctcctattctcagtagcaaaaagcagccggtgggggtggggtgtaatggcttaaagmtttcaacagctgtccccactgggcctacagtcccctcatctttgtttcaaaagccgctcaggccctgttgtagccagaattggaaatcaatcagtgccac

SEQ ID NO: 34900 - DNA, 201 bp, Homo sapiens
tggctgggatgattggggaactaaaccaagctgcatttggtgtgaccaggactatggctgaagaattaaaagaaaagaatacagcattcagcacaaagagsttgcttaataaacattgattgagttgaattgtgctcatgtctctaggtacatatgatagtgtgaggttaagagtcagacctagggcctgcaggggaagtt

SEQ ID NO: 34901 - DNA, 201 bp, Homo sapiens
tgatatgtacttgaaaaaacccagagagaatatatttatagtaagatgcttaagcttatggccccagtgcatagccatttgagttgatctctgccagtcaygccttctacctgaaaaatacctttgaaatctccacactatttctttcacttttctcagaaagtagtatgtcttagactgtttggcgtgttgtagcaaaag

SEQ ID NO: 34902 - DNA, 201 bp, Homo sapiens
tcctaattaatgaaatttcactgtattttagaacatttcttatttacctaaaacagttttgttcttctataatctgtaactcacagcaagaagtgtggtcrtgtctaccaagaacaagcagcaagttgtgtgggaaggagagacactcgcctttctctgtaaggctggtggagctgaaagtcccctgtctgtgagctggtg

SEQ ID NO: 34903 - DNA, 201 bp, Homo sapiens
ttgaaaaaacccagagagaatatatttatagtaagatgcttaagcttatggccccagtgcatagccatttgagttgatctctgccagtcatgccttctacstgaaaaatacctttgaaatctccacactatttctttcacttttctcagaaagtagtatgtcttagactgtttggcgtgttgtagcaaaagtaccataaac

SEQ ID NO: 34904 - DNA, 201 bp, Homo sapiens
aattgactagtacaaataagttggagatgaattactctcttgtttctcccttcgttgcagagcccacgcttccttccaggatctgctcctcggccccttthctctatttcctgttcatctgtcccttcgtcctgctcctccttctgctcatctccctcctctgcttatactggaaggccaggaagttgtcaacactgcgtt

SEQ ID NO: 34905 - DNA, 201 bp, Homo sapiens
cacagacgttgagactataacacagcaccctccctgtcatccctctactaggacattacttcattcatcctccttgctggcttcacccattctccatcccwccccttcctaccgctcctcacctagctactctttctagctgccatcctaatcttcatttttccttctccatgaaactcctggaagtaggttccacttcct

SEQ ID NO: 34906 - DNA, 201 bp, Homo sapiens
tccatggctccattcacttgcatcattgcagtctatgcttccttctagccacgggccttcaaatgtactcagataagaccgggggagaataactgtagtcragcagggtcattggaagaggggtcagataggatgtggagcagagggatggtaaagaattcaaaacctaactttatcattgctcaccatttcaaaaaacaa

SEQ ID NO: 34907 - DNA, 201 bp, Homo sapiens
tccttatcccatcccctaaagagagaaattccctagtaatctctccttagtcctcttccttctgttccccaatacttcccaacacttgtatgtaactgacstaatctacatctaacagttcagaactctccctagttacaaacagacatttacaggagccaacaagaaacaatggggacagccatggatttggcatttgca

SEQ ID NO: 34908 - DNA, 201 bp, Homo sapiens
catgagtagaaaaggaagccagggcctcctaagtaatcatttcagtctttgctgaatgtcacccaggtctgaggacagggggactagagatgtaagggagwgagagcctgtggaggaagatggccaagcctggggtccctgtgggagagatatctgtaggctccagccctgttctctgtctgttctcttgggagaaggttt

SEQ ID NO: 34909 - DNA, 201 bp, Homo sapiens
tgttcgttttcacactaaacatttggtctgactttctagaattaaggaaaaacaatataggtgagttcacatatttatgcagagataagtttctgctttaygcatctcagccttctctggaacatatctgcaggcttttgtaaacctggtatgtgggaatttcacctgaaggggaacttcagggtacacagctgataatcc

SEQ ID NO: 34910 - DNA, 201 bp, Homo sapiens
ttctccatcccaccccttcctaccgctcctcacctagctactctttctagctgccatcctaatcttcatttttccttctccatgaaactcctggaagtagrttccacttcctgcagtcacttcttaccctgaaaactgctgcttccactctattgaaatcccttttacaaagatcttcatggacatcctcctcatcgagct

SEQ ID NO: 34911 - DNA, 201 bp, Homo sapiens
agccctcatgacctaattgcttcctaaatgccccatctcctaataccatcaccttggaaattaggtttctgcgtgtgagttttaggaagacacagacgttragactataacacagcaccctccctgtcatccctctactaggacattacttcattcatcctccttgctggcttcacccattctccatcccaccccttccta

SEQ ID NO: 34912 - DNA, 201 bp, Homo sapiens
taccactatagaattgaactcccacataaaatgtgatccctgtgacatccttacagagggtgtcatctctctctggtactgaaaggacagaggctgtgggmtctctaaatacctgccttgcttttgtttcccagtgaaagattttcaagtcaacattacagctgacagcttgtttgctgaagggaaacccttagaactggt

SEQ ID NO: 34913 - DNA, 201 bp, Homo sapiens
aaattcattaatacactagtattaggtagtgggtatttatgaggtatgttttaatttttgttctaatcttttgttggctctaaaaaattggctagaaagtwtgatttaattttgtatttttgtcatctgagaagcataactaagagggagcacattcagttctggctctgcccacggattctttatgggataaggtctact

SEQ ID NO: 34914 - DNA, 201 bp, Homo sapiens; identical to SEQ ID NO: 7902

SEQ ID NO: 34915 - DNA, 201 bp, Homo sapiens
tgggggctttttaattgggctaaccagggtgtgaatgaatcctggttctgtcctcaactatgtctgcggccttgggcaagttacctaggaatcagagggarcattcactgagtgcttattggttctacgcactgttaggtgttcctttgtgtcttacctcatccacctctcgcatccccccttggaacaagatagcatcat

SEQ ID NO: 34916 - DNA, 201 bp, Homo sapiens
tgtctggaggagcagggttgacagtgccaccgttccctcatacgcctgcagggctggggtttggggcagcagtaggtcaagtctggttcctcaaggtctcctattctcagtagcaaaaagcagccggtgggggtggggtgtaatggcttaaagctttcaacagctgtccccactgggcctacagtcccctcatctttgttt

SEQ ID NO: 34917 - DNA, 201 bp, Homo sapiens
aagaaaagaaagaaaaaaagagagagagaaagagaaagagagaaagggaaaggggagaagggaagataaggaagtggattcttgaaggagctgtgtgtctytaccacactgaagtatttggagatgccaagctacttacctgtgcttcccagtacctccagcaaggcctagcacatggcattcaacaaatgcttaatgaaa

SEQ ID NO: 34918 - DNA, 201 bp, Homo sapiens
ctaattttgtatttttagtagagacagggtttcaccatgttggccaggctggtcttaaactcctgccctcaagtgatctgcccaccttggcctcccaaagwgctaggattacaggcatgagccacctcgcctggtcatttcctgcctttttgctaatgatttcagccctttatgtgtgcatcactaaataatacagtgtgg

SEQ ID NO: 34919 - DNA, 201 bp, Homo sapiens
agatcacaatataaatatgtataaagtatccagtacagtgcttggcacattgtcagtgctcagcaaatgtaatctccttttccccttatgcctccaaaccygctgcacatacatatacacacaggtacacacatacctacatgtgtacatctatgtgacaaaataatgacacttgtttaataaataactatatcaggttct

SEQ ID NO: 34920 - DNA, 201 bp, Homo sapiens
atacagtctgtgatgaaaagcgtatcttctctgaggcagatgggatccttcatagcatacatattgttaatctttgtgagatccttgtaaaacaggtatayggtttttaaaagataaacctggaaagaaaacattaaaaattgagtggccttcgtattcttcagaaaacctttgtcatgacaaactgagggttttgagggt

SEQ ID NO: 34921 - DNA, 201 bp, Homo sapiens
aagtaggggtgtggtcttggtgccagacaccaggaagcacaaagggaaaatcatcaataaaggtaacaatcctaagagaccagctagctttagtgacactscttaggagggacagaatgctgttgagaacatatgggaacatctaagaagtagggataggtgcatcccagcgcagcagggcttccagaggggaagtcgaag

SEQ ID NO: 34922 - DNA, 201 bp, Homo sapiens
ttaaaaaagtagagtgggtgatgtcagcaagatgctagaagaagatttgggaacaaggattgtcactcatctttctgacaaagcagaaaagctgctggggycaaagattagttggctccatatctatacaatgttcccacagttaagtgactgcaaagacacacacagttttaatcactcatgtacaacttccttttgttt

SEQ ID NO: 34923 - DNA, 201 bp, Homo sapiens
aactgataatagagcataggagttaaaagtgagatactacctaggcaaagttctgctgtgtcatgtatcttctctcttatagtttgcattctcttaggaakagtgatggagagacgttggagtcatttagatctgacagtcactggatagcagaacagctttggatgagccacttaatctgctgaagccttagttacctga

SEQ ID NO: 34924 - DNA, 201 bp, Homo sapiens
ggccatactggttgttaaaacattgaaataccttccatgctggctaattgctgctctctacccattccccattttcccctaagttcccaccacccagcaactaaagggtaccacgtggcacagcagggggcctctaggacctggctagaggggagaagaaatgttttggattagtcactgtccaggccttaccagttagta

SEQ ID NO: 34925 - DNA, 201 bp, Homo sapiens; identical to SEQ ID NO: 7912

SEQ ID NO: 34926 - DNA, 201 bp, Homo sapiens
acaaaaccaaaaaaacctccacagaatagaaaggaagtgctgctgcctcgtcagatgctaatgttggctagtcttgcaacagacctggctaggagctacaratagttccaaccaaccagctagaaaaatcatggcaccaagggcagagccctagactttgcgtctccagcaactacttctctgggaactgcccgatggcag

SEQ ID NO: 34927 - DNA, 201 bp, Homo sapiens
ggaacttcagggtacacagctgataatcctatcaatagggtcatcttctaaaactaaaaatagttctttgtataggctggagtctacactgggcttactaygtagacacagaaaaagttattagcaaatttattaaggatcctgtttagcattctgttttgaaagtcaaacgttacttgaagtattagcaacattttatca

SEQ ID NO: 34928 - DNA, 201 bp, Homo sapiens; identical to SEQ ID NO: 7913

SEQ ID NO: 34929 - DNA, 201 bp, Homo sapiens
agagcctgttccaggagctctcttcccccagtgctctgtcctgtgctcctcatgatttcaggggcccactgctatttggccccattatttttacatatacytgcctataacaataaatcccaggagtgtttgtaattgactagtacaaataagttggagatgaattactctcttgtttctcccttcgttgcagagcccacg

SEQ ID NO: 34930 - DNA, 201 bp, Homo sapiens
aatcttttgcctgagggtggtgcaagaggaaacagcccaatttgacttgtcacaaactagtcaagtcctaattaatgaaatttcactgtattttagaacayttcttatttacctaaaacagttttgttcttctataatctgtaactcacagcaagaagtgtggtcgtgtctaccaagaacaagcagcaagttgtgtgggaa

SEQ ID NO: 34931 - DNA, 201 bp, Homo sapiens; identical to SEQ ID NO: 7904

SEQ ID NO: 34932 - DNA, 201 bp, Homo sapiens
aggcccactggacaagcactgggccagtcacattattatcattcctttgtttccagttattccagataccctctctgccaccatgagttctcagactctcrgtaaggaggaaggtgagccattagccctcacctgtgaggcatccaaagccacagcccaacatactcacctctctgtcacctggtacctaacacaggatgg

SEQ ID NO: 34933 - DNA, 201 bp, Homo sapiens
ccttacaaatatagaggggaattgaaataaattatttaaataacgatctattgatcaattacattggttagcaaatttacactttgtcccaattttttttyagtaaatataaggactgaacaatcctgatagaaaatggtgccatatgagattaatgtcatgggtaaatgagttctcggatttagcagttagctttgtctg

SEQ ID NO: 34934 - DNA, 201 bp, Homo sapiens
tccttcaagcttctagctcaaacacctcttccccttttgaatccagcacagagatagcacagaggagatgtaagcagacagggagggtctcctgggaaagyagacatttaaccaacttgagcaatcagcttgttttacagcttcctgccttgctgcctgtttcttcccaagccccgtgtggaatgtggtgacctagtcacc

SEQ ID NO: 34935 - DNA, 201 bp, Homo sapiens
gaacaacagaggcagggctggggtgaagtgctaggtagggagatgatctgggaaggttccccagagtctggggctcatgaaaaggaagaaacatattttargaacatgaaagagtatgcaagatgataataagatgtaaaatttcatgttatattcggggaactcctggtcattgagaatggcaggaactgcagtctctat

SEQ ID NO: 34936 - DNA, 201 bp, Homo sapiens
ctgaggaagccactcagctcacctttactttatgaaggttgggtgaccttaaacatgtttgaataatcagtgccttttgtgaagaaaaacagacatatctrcaactaatataaggattcactaggctgggtttaaattcaaagtccagaaagattaattgcccaaaaaaaattttttttaatgttttaaatttttaaaaac

SEQ ID NO: 34937 - DNA, 201 bp, Homo sapiens
aggtaattgatagtgggcagactccatcctctgcattttgctgtgatgtggtgagacgccggtccaaatggttctgaatgtctgcatgcacggaactgagraagccactcagctcacctttactttatgaaggttgggtgaccttaaacatgtttgaataatcagtgccttttgtgaagaaaaacagacatatctgcaact

SEQ ID NO: 34938 - DNA, 201 bp, Homo sapiens; identical to SEQ ID NO: 7908

SEQ ID NO: 34939 - DNA, 201 bp, Homo sapiens
agcctgggtgacagagcaagaccgtgtcaaaaaaaaaaaaattattactagaaatgtgtgtggttggctgactagttggttgggcattggttggtttcccrgttttagactgaacatacatatatgaaatatatgcacttgactgcatcaggtgaccacttaccttttctgtgcttttgcccttttttgtagttccctcct

SEQ ID NO: 34940 - DNA, 201 bp, Homo sapiens
gtctggaggagcagggttgacagtgccaccgttccctcatacgcctgcagggctggggtttggggcagcagtaggtcaagtctggttcctcaaggtctcctattctcagtagcaaaaagcagccggtgggggtggggtgtaatggcttaaagctttcaacagctgtccccactgggcctacagtcccctcatctttgtttc

SEQ ID NO: 34941 - DNA, 201 bp, Homo sapiens
cccaaagtgctaggattacaggcatgagccacctcgcctggtcatttcctgcctttttgctaatgatttcagccctttatgtgtgcatcactaaataatayagtgtggtttcacctgtttttaaactttataaacagtacgatcattctgtatatagtcacaaggattcagaagtgtttttgtatcttgctttgaacatag

SEQ ID NO: 34942 - DNA, 201 bp, Homo sapiens
tcattcactactctgcacaaatgctcacagccagtgcttataatacctggactccatggctccattcacttgcatcattgcagtctatgcttccttctagycacgggccttcaaatgtactcagataagaccgggggagaataactgtagtcaagcagggtcattggaagaggggtcagataggatgtggagcagagggat

SEQ ID NO: 34943 - DNA, 201 bp, Homo sapiens
tctggaggagcagggttgacagtgccaccgttccctcatacgcctgcagggctggggtttggggcagcagtaggtcaagtctggttcctcaaggtctcctattctcagtagcaaaaagcagccggtgggggtggggtgtaatggcttaaagctttcaacagctgtccccactgggcctacagtcccctcatctttgtttca

SEQ ID NO: 34944 - DNA, 201 bp, Homo sapiens
agctaggattacaggcaccttgccaccatgcctggctaattttgtatttttagtagagacagggtttcaccatgttggccaggctggtcttaaactcctgscctcaagtgatctgcccaccttggcctcccaaagtgctaggattacaggcatgagccacctcgcctggtcatttcctgcctttttgctaatgatttcagc

SEQ ID NO: 34945 - DNA, 201 bp, Homo sapiens
taacttatccaatgtcaataacagcacattgaagattgaggatttgaactcagctctctttgaaacacagtaggtgctcattcactactctgcacaaatgstcacagccagtgcttataatacctggactccatggctccattcacttgcatcattgcagtctatgcttccttctagccacgggccttcaaatgtactcag

SEQ ID NO: 34946 - DNA, 201 bp, Homo sapiens
ctggaggagcagggttgacagtgccaccgttccctcatacgcctgcagggctggggtttggggcagcagtaggtcaagtctggttcctcaaggtctcctattctcagtagcaaaaagcagccggtgggggtggggtgtaatggcttaaagctttcaacagctgtccccactgggcctacagtcccctcatctttgtttcaa

SEQ ID NO: 34947 - DNA, 201 bp, Homo sapiens
tggaggagcagggttgacagtgccaccgttccctcatacgcctgcagggctggggtttggggcagcagtaggtcaagtctggttcctcaaggtctcctattctcagtagcaaaaagcagccggtgggggtggggtgtaatggcttaaagctttcaacagctgtccccactgggcctacagtcccctcatctttgtttcaaa

SEQ ID NO: 34948 - DNA, 201 bp, Homo sapiens
ggtgtccttgttgcactggctcattggagacatctccaaagatagataaattttcctttcatgttctccaatatgccatttactaggaatgaagatgcacygatttggccttgagtggcaggccaggaagtgtgttggtgttcgttttcacactaaacatttggtctgactttctagaattaaggaaaaacaatataggtg

SEQ ID NO: 34949 - DNA, 201 bp, Homo sapiens
tttagaaagttcccacattaaaatgaattggaggtcgggcacagtggctcgtgcctgtaatcccagcactttaggaggccaaggcgggcgggtcacctgaygttgggagtttgagaccagcctgaccaacatggagaaaccctgtgtgtactaaaaatcctaaaaattagccgggcatggtggcccatgcctgtaatccca

SEQ ID NO: 34950 - DNA, 201 bp, Homo sapiens
caacagctgtccccactgggcctacagtcccctcatctttgtttcaaaagccgctcaggccctgttgtagccagaattggaaatcaatcagtgccacctamagacttgagaaaacacatctatttattatctatgtgaccaaccgagttgctttaacactcgttaatttgcatttccaaggagagcaatttagttttaatt

SEQ ID NO: 34951 - DNA, 201 bp, Homo sapiens
atccaatctgaggttttggggagctgaggtaggagcaatatccctttgattggtttgcttctcaacctggcagcctggtctgtgcagctacccagggtatygtatctccagatctctataataacaagctgtgtcattccagtggggctctactgtaatttggcagagaaagagtaatacgaagcatatttctcccactgt

SEQ ID NO: 34952 - DNA, 201 bp, Homo sapiens
agcctgagctccgccctagctttgccagcatcttggagcgtctgcagtactgcactcaggtgtgcccccgacctaatctaacatcctggtcttgtgggtcwggagggagggccagaaaactctatgcccccctgctccctgactcttccattacaggacccggatgtgctgaattcactcctgccaatggagctggggccc

SEQ ID NO: 34953 - DNA, 201 bp, Homo sapiens
agggcatcttcacatccaagacagattcctggtgataacacccttcccctccccttccccactgttcccctcccctgaggctaatcctgtcctttccagcmacctcatgtgaggggaggctacacctgacgggcctcacttggttcccccacttgtgatgcaggtcttttggggtgctgctctgggagatcttctcactgg

SEQ ID NO: 34954 - DNA, 201 bp, Homo sapiens
agtcctggctcaggggacccccatcccaactccctccccaaggaacagcccttccacacagcttttaaggaaatagatcaggaagagcaagaacttctagrttctggcagtgattttttttgcctactctgtagggatattgccgcccggaactgcctgctgagctgcgctggacccagccgagtggccaagattggggac

SEQ ID NO: 34955 - DNA, 201 bp, Homo sapiens
gagtagcaatgaggttcagccttgcagtcacaaaggcaccactaaaaggcacaagtaatggcaggtaatgaggccttacttggagcagtttagagtacttmccacgtgtggtgacgcatgccacacactcaccaccaccaccactgccacaaatgaagtgcacactccactgctcctgtcctcaggaacctggaagccccc

SEQ ID NO: 34956 - DNA, 201 bp, Homo sapiens; identical to SEQ ID NO: 7935

SEQ ID NO: 34957 - DNA, 201 bp, Homo sapiens
agtccctgagcccactcctgcactgcactgaagagccacctgcactgtgaataaccttgcatagcacaggattcttgcatagcatagggtcatttgaaaartgggctgtcatcatgccattgcactccagcctgggcgacaagagcaaaactctgtcttaaaaaaaaggaaagtgggctgccagtcgtgctggatggcaat

SEQ ID NO: 34958 - DNA, 201 bp, Homo sapiens
ctgaggtagcaagtcaggggacacagagggcctctccagctttgtggagcctaaaacatggtttccgtctccctcctggtaacgggatatgtcccccaccycactcagcaagtttcgccatcagaacattgtgcggtgtgtggggctcagcctcagggccacccctcgcctcattctgctggaactgatgtctggagggga

SEQ ID NO: 34959 - DNA, 201 bp, Homo sapiens
cacggcggaggtagggtggacagtgacctgctagttggaggtttcaccctcagggtaacgaagtccacgtgcgcaccgacttgcgtcttggactattccgsggggaggtccaccttgagtgcccttcaaggtggcagtagtcgccaccgagttagcccttacccggaacctcttacaccgagcggaaggcccccaaccagg

SEQ ID NO: 34960 - DNA, 201 bp, Homo sapiens
ggccgcctgcccactcccttccaacgtgtcttcctgcagagccctgggccatggtgcctttggggaggtgtatgagggactggtaattggccttcctgggractccagtcccctgcaggtagctatcaaggtgagaggagtgggacttctggctgggggtaggagagcggaacaccctgaagggaaggacaatgactagag

SEQ ID NO: 34961 - DNA, 201 bp, Homo sapiens
cctcgcctcattctgctggaactgatgtctggaggggacatgaagagtttcctgaggcacagtcggccacacctggtgagacccttgtcttagccccccccaggcccctctaaagaccctgtccatgtgtctgagacctacatggactgatgccccctctgcctgacccagggccagccatcacctctggtcatgcgggac

SEQ ID NO: 34962 - DNA, 201 bp, Homo sapiens
aaacagggtctcgccacgcccccgacccaccggaagcagctggggctggatgagtcattaattcattcattcactctgggaaggtttatttgtgcgcctgwgtggcgggtgctgatacaggcgcagtgaaggtgattccagcgtctccagtgagctgtcaagagcctggacttagcatctgaagcccccggtttgcgctcc

SEQ ID NO: 34963 - DNA, 201 bp, Homo sapiens
cctggccaacatggtgaaaccctgtgtctactaaaaacacaaaaaatagctgggcgttgtggcgcttgcctgtagtcccagctactcgggagactgaggcrggagaatcacttgaacccgagaggcagaggttgcagtgagccgagatcgcgctattgcactccagcctgcatgacagagtgagacttcgtttaaaaaaga

SEQ ID NO: 34964 - DNA, 201 bp, Homo sapiens
catatgattttgcaggtggtggggaaactctcagggcagttgtggcctgtgctacatcacccattgaccagaggtgccagtactagtgctcaagatcaatygatcgatcggtctacctacctatcatctattgaccttcagtgctactaaaaacactcggatcttctaacgtctggtccagtctttcaccccatcacagtg

SEQ ID NO: 34965 - DNA, 201 bp, Homo sapiens
ttctcccaacacctttcaggcgccattctctgctctagcccggggtcccaggagacttttctgcggtcctcgcccctgccgctggcaagtcccagcccccrggacccgaaagtcagcgccccgcctagtatcttggagccagcctccccgctgaattctccgggtgagctttagacgcctccttcctctttcgctcaccat

SEQ ID NO: 34966 - DNA, 201 bp, Homo sapiens
ggttgcagtgagccgagatcgcgctattgcactccagcctgcatgacagagtgagacttcgtttaaaaaagaaaaaaaatcatgactcttggagcccaggrattgcctcccgcccagggcgtctgcagggaccagggaagtcctcatcatgcactcccaccttgactctggcccgcatctgccctcttttttgccctggct

SEQ ID NO: 34967 - DNA, 201 bp, Homo sapiens; identical to SEQ ID NO: 7955

SEQ ID NO: 34968 - DNA, 201 bp, Homo sapiens; identical to SEQ ID NO: 7946

SEQ ID NO: 34969 - DNA, 201 bp, Homo sapiens
tttgtttttgtttttttggtgtgccccttatctcttctagcctccagctaatcttgagagcatcccatcctctggacctctcctcttaccacccgcaactyggcagccctgtgtcctctctgaagtacacaggttggctcatgtcaactgtgtctgccgcctccccacagaggcacttgccttttagcacagttacacatg

SEQ ID NO: 34970 - DNA, 201 bp, Homo sapiens
gcttcctggaacacgccgctggccccacaggtgcgcgctggcgagctggaaccgttgctggtggcggccggaggcggcggtcgggcctacctgaggccgcrggaccgaggccggactcaggcctcccccgagaaactggagaaccgctcggaggcgcccgggagcggcgggagaggcggggcggcaggtgagggcgcgggc

SEQ ID NO: 34971 - DNA, 201 bp, Homo sapiens; identical to SEQ ID NO: 7939

SEQ ID NO: 34972 - DNA, 201 bp, Homo sapiens; identical to SEQ ID NO: 7950

SEQ ID NO: 34973 - DNA, 201 bp, Homo sapiens
cacatgatctacattctcacagaaagggactgtgaggacatgggacaggaggggctcaggcaggcaggaggcatcccagccagcctcagcgaggccttcargctccagctgattaccccctcctcacctccttcactcccacttgtgaacagacagcatttgcatcatgatgctggagaagagagggccacactgggattt

SEQ ID NO: 34974 - DNA, 201 bp, Homo sapiens
tcatacatacacacatgatctacattctcacagaaagggactgtgaggacatgggacaggaggggctcaggcaggcaggaggcatcccagccagcctcagmgaggccttcaggctccagctgattaccccctcctcacctccttcactcccacttgtgaacagacagcatttgcatcatgatgctggagaagagagggcca

SEQ ID NO: 34975 - DNA, 201 bp, Homo sapiens
tcctctggcgtcctggggtctgaggtgggcgtggccagaccagctttaggtccggggagtgtctcgccagcggcagcacacccctgtaagtggtggccagrgctgccgtggcaaaatgagctgtcaactttaggttgacaggggtgtggccgcgaccgcaagggcttttgttgccgggtggacccaacagggatgggctgc

SEQ ID NO: 34976 - DNA, 201 bp, Homo sapiens
gtcaaaacaatgcaaaatggcagttaaataggaggaataccttccagaatctactgtactacatggtgactgtagttaatgacgatgtattcttgaaaatygctaagagaggcggggcgcggtggctcacgcctgtaatctcaacactttgggcggcggaggcgggtggatcttgaggtcaggagtttgaggccagcctgg

SEQ ID NO: 34977 - DNA, 201 bp, Homo sapiens
ggtcactgcaacctccgcctcccgggttcaagtgattctgcagcctcagtcgctggagtagctgggattgcaggcgtgcgccaccacacccggctaatttkgtatttttagtagaggcggggttggccaggctggtcttgaacttctgacctccggtgatccgctcaccacggcctcccaaagtgcaatgattataggcgt

SEQ ID NO: 34978 - DNA, 201 bp, Homo sapiens
gagccgagattgcgccattgcactccagccagggcgacagagtgagactctgtctcaataaaaaaagaatatgatctggcgcctgtaatctcagcactttsggaggccaaggcaggtggatcacctgaggtcaggggttcgagaccagcctggccaacatggtgaaaccctgtgtctactaaaaacacaaaaaatagctgg

SEQ ID NO: 34979 - DNA, 201 bp, Homo sapiens
gaatcacttgaacctgggaggcggaggttgtggtgagccgagattgcgccattgcactccagccagggcgacagagtgagactctgtctcaataaaaaaaraatatgatctggcgcctgtaatctcagcactttgggaggccaaggcaggtggatcacctgaggtcaggggttcgagaccagcctggccaacatggtgaaa

SEQ ID NO: 34980 - DNA, 201 bp, Homo sapiens
gtaagggagagggaggccctgagaagctccagaaggggaagtaacttgctcaatgtcacctctccgtcccagttcttagaatatgatctctcagctgggcrtggtggctcacacctgtaatcccagaactttgggaggtcgaggcaggcaggtcacctgaggtcgggagttcgagaccagcctgaccaacatggagaaacc

SEQ ID NO: 34981 - DNA, 201 bp, Homo sapiens
gacagagtctcgctctgtcacccaggctggagtgcagtggtgcgatcttgggtcactgcaacctccgcctcccgggttcaagtgattctgcagcctcagtcgctggagtagctgggattgcaggcgtgcgccaccacacccggctaattttgtatttttagtagaggcggggttggccaggctggtcttgaacttctgacc

SEQ ID NO: 34982 - DNA, 201 bp, Homo sapiens
agtcccccagcttctctcaccacccttgtaagcttggtgctgctctttgctctaaagtcctgggctagaattaaccatgtggctggaaaaggcatgtatttatttatttatttatttatttatttatttatttatttttatttttgagacagagtctcgctctgtcacccaggctggagtgcagtggtgcgatcttgggtc

SEQ ID NO: 34983 - DNA, 201 bp, Homo sapiens
aagtcccccagcttctctcaccacccttgtaagcttggtgctgctctttgctctaaagtcctgggctagaattaaccatgtggctggaaaaggcatgtatttatttatttatttatttatttatttatttatttatttttatttttgagacagagtctcgctctgtcacccaggctggagtgcagtggtgcgatcttgggt

SEQ ID NO: 34984 - DNA, 201 bp, Homo sapiens
acgaagtccacgtgcgcaccgacttgcgtcttggactattccgcggggaggtccaccttgagtgcccttcaaggtggcagtagtcgccaccgagttagccsttacccggaacctcttacaccgagcggaaggcccccaaccagggcggcgccaaggggtgcttgagcctccccacatttccacgaaccctcctgaaataag

SEQ ID NO: 34985 - DNA, 201 bp, Homo sapiens
agaagtcccccagcttctctcaccacccttgtaagcttggtgctgctctttgctctaaagtcctgggctagaattaaccatgtggctggaaaaggcatgtatttatttatttatttatttatttatttatttatttatttttatttttgagacagagtctcgctctgtcacccaggctggagtgcagtggtgcgatcttgg

SEQ ID NO: 34986 - DNA, 201 bp, Homo sapiens
acagaagtcccccagcttctctcaccacccttgtaagcttggtgctgctctttgctctaaagtcctgggctagaattaaccatgtggctggaaaaggcatgtatttatttatttatttatttatttatttatttatttatttttatttttgagacagagtctcgctctgtcacccaggctggagtgcagtggtgcgatctt

SEQ ID NO: 34987 - DNA, 201 bp, Homo sapiens
tgaaaccctgtctgtactaaaaatacaaaaattagccgggcgtggtggcgggagcctgtaatcccagctactctggaggctgaggcaggagaattgcttgwacctgggaggcggaggttgcagtgagccgagatcactccattgcacttcagcctgggcgacgagggaaattctgtctcaaagattaaaaaaaaaacaatg

SEQ ID NO: 34988 - DNA, 201 bp, Homo sapiens
atatagggtcagctgggcatatggcaggggcaggggaggtaaagggggtactagactctctaggactcttctccaggccgcctgcccactcccttccaacrtgtcttcctgcagagccctgggccatggtgcctttggggaggtgtatgagggactggtaattggccttcctggggactccagtcccctgcaggtagctat

SEQ ID NO: 34989 - DNA, 201 bp, Homo sapiens
gccagttattaccgcaggggggaccgggccttgctcccagtcaagtggatgcccccagaggccttcctggagggcatcttcacatccaagacagattcctrgtgataacacccttcccctccccttccccactgttcccctcccctgaggctaatcctgtcctttccagccacctcatgtgaggggaggctacacctgacg

SEQ ID NO: 34990 - DNA, 201 bp, Homo sapiens
gggcccagccacttccagcttttgatcttggggccagaggccgccttacacacaccccaggtgtccatggggagcactggattgctctcccattatgagcrtccttcatctgggcagaccccccaccctgcagatgcttctaataaaaagctcttctcatcctccagcgatctgtggatgccagggaccggaactgaggaa

SEQ ID NO: 34991 - DNA, 201 bp, Homo sapiens; identical to SEQ ID NO: 7954

SEQ ID NO: 34992 - DNA, 201 bp, Homo sapiens
aagacacaaaactacctgaagggagtggctcccacatttgtagggtaccttacagagcaatttcccttcatatgattttgcaggtggtggggaaactctcmgggcagttgtggcctgtgctacatcacccattgaccagaggtgccagtactagtgctcaagatcaatcgatcgatcggtctacctacctatcatctattg

SEQ ID NO: 34993 - DNA, 201 bp, Homo sapiens
ggaggtccaccttgagtgcccttcaaggtggcagtagtcgccaccgagttagcccttacccggaacctcttacaccgagcggaaggcccccaaccagggcrgcgccaaggggtgcttgagcctccccacatttccacgaaccctcctgaaataagtgtaatatctgatttttcggtgtgcaaacctacccttcccatcccg

SEQ ID NO: 34994 - DNA, 201 bp, Homo sapiens
gcctagtatcttggagccagcctccccgctgaattctccgggtgagctttagacgcctccttcctctttcgctcaccataccagacccctctggcccagcyaggggctcgacgacccttgcctcgctccttgctctcaggcaccgaggggtcttggctgttttctacctgcggggccagcggccggcatgggcccacacag

SEQ ID NO: 34995 - DNA, 201 bp, Homo sapiens
ttcagcactggagttttaagtcatagctctaggattaaataaagcgacagccctgtatttagtgtgttcttatttattcagtaaagcctcactgtgatgayaaatattgtatttgttttagagtgttctcttttttccccaattaatactttgtatctctgtagtgtggagaaaccaaagtgccaagatatttgaaaagct

SEQ ID NO: 34996 - DNA, 201 bp, Homo sapiens
tgttggagaggcagctaccacgtgcacccagatggccacttgtttaatatgttaccatttcccattattttcgcaggatagatagccaaagtggagccctragagatttcttcatttttcctgtcataaagaattggtaattcagtagtcataggagtttgtaataaataactcacattgatttctctgttctgaaataat

SEQ ID NO: 34997 - DNA, 201 bp, Homo sapiens; identical to SEQ ID NO: 7994

SEQ ID NO: 34998 - DNA, 201 bp, Homo sapiens
tccagatacgtcttaattatagaaggccatcccaactccccagggatgtaggttgagctaatattttcttcagaattcagttgcttgcatcttactatacrtagtctggtagacagcctctggccttaataatttgagccaggaaaatcttaacagctggtatttgcattcagagaacattaaaaaatcttaacaaagcat

SEQ ID NO: 34999 - DNA, 201 bp, Homo sapiens
tctgacacctgccccaacaagcaatgttggaaaattatttacatagtggcgcaaactcccttactgctttggatataaatccaggcaggaggaggtagctytaaggcaagagatctaggacttctagcccctgaactttcagccgaatacatcttttccaaaggagtgaattcaggcccttgtatcactggcagcaggacg

SEQ ID NO: 35000 - DNA, 201 bp, Homo sapiens
gtaagcatagaagctaaggatacattctcagacaaaaatgagagtgcaaatactctctgttgtccaattagggcagatccatccatcctcacattcagctragcagaagagaggattgacactcttttctagttaaataatccagatacgtcttaattatagaaggccatcccaactccccagggatgtaggttgagctaa

SEQ ID NO: 35001 - DNA, 201 bp, Homo sapiens
aaaggggttagtgataatgtccatctccagaagctgtcagatttcctttgtcaaactctatgatttgggctgaagtaggtgttggagaggcagctaccacrtgcacccagatggccacttgtttaatatgttaccatttcccattattttcgcaggatagatagccaaagtggagccctgagagatttcttcatttttcct

SEQ ID NO: 35002 - DNA, 201 bp, Homo sapiens
aagctaaggatacattctcagacaaaaatgagagtgcaaatactctctgttgtccaattagggcagatccatccatcctcacattcagctaagcagaagaraggattgacactcttttctagttaaataatccagatacgtcttaattatagaaggccatcccaactccccagggatgtaggttgagctaatattttcttc

SEQ ID NO: 35003 - DNA, 201 bp, Homo sapiens; identical to SEQ ID NO: 7996

SEQ ID NO: 35004 - DNA, 201 bp, Homo sapiens; identical to SEQ ID NO: 7997

SEQ ID NO: 35005 - DNA, 201 bp, Homo sapiens
agttttgatctgaggtatgggggtggggtctaagactgcatgaacagtctcaaaaaaaaaaaaaaaagactgtatgaacagaacagtggagcatccttcatggtgtgtgtgtgtgtgtgtgtgtgtgtgtgtggtgtgtaactggagaaggggtcagtctgtttctcaatcttaaattctatacgtaagtgaggggataga

SEQ ID NO: 35006 - DNA, 201 bp, Homo sapiens
gctaaggatacattctcagacaaaaatgagagtgcaaatactctctgttgtccaattagggcagatccatccatcctcacattcagctaagcagaagagargattgacactcttttctagttaaataatccagatacgtcttaattatagaaggccatcccaactccccagggatgtaggttgagctaatattttcttcag

SEQ ID NO: 35007 - DNA, 201 bp, Homo sapiens
gttttgatctgaggtatgggggtggggtctaagactgcatgaacagtctcaaaaaaaaaaaaaaaagactgtatgaacagaacagtggagcatccttcatggtgtgtgtgtgtgtgtgtgtgtgtgtgtgtggtgtgtaactggagaaggggtcagtctgtttctcaatcttaaattctatacgtaagtgaggggatagat

SEQ ID NO: 35008 - DNA, 201 bp, Homo sapiens
ttttgatctgaggtatgggggtggggtctaagactgcatgaacagtctcaaaaaaaaaaaaaaaagactgtatgaacagaacagtggagcatccttcatggtgtgtgtgtgtgtgtgtgtgtgtgtgtgtggtgtgtaactggagaaggggtcagtctgtttctcaatcttaaattctatacgtaagtgaggggatagatc

SEQ ID NO: 35009 - DNA, 201 bp, Homo sapiens
aaaatgagagtgcaaatactctctgttgtccaattagggcagatccatccatcctcacattcagctaagcagaagagaggattgacactcttttctagttraataatccagatacgtcttaattatagaaggccatcccaactccccagggatgtaggttgagctaatattttcttcagaattcagttgcttgcatcttac

SEQ ID NO: 35010 - DNA, 201 bp, Homo sapiens
tgatctgaggtatgggggtggggtctaagactgcatgaacagtctcaaaaaaaaaaaaaaaagactgtatgaacagaacagtggagcatccttcatggtgtgtgtgtgtgtgtgtgtgtgtgtgtgtggtgtgtaactggagaaggggtcagtctgtttctcaatcttaaattctatacgtaagtgaggggatagatctgt

SEQ ID NO: 35011 - DNA, 201 bp, Homo sapiens
aggacgtgaccatggagaagctgttgtgtttcttggtcttgaccagcctctctcatgcttttggccagacaggtaagggccaccccaggctatgggagagwtttgatctgaggtatgggggtggggtctaagactgcatgaacagtctcaaaaaaaaaaaaaaaagactgtatgaacagaacagtggagcatccttcatgg

SEQ ID NO: 35012 - DNA, 201 bp, Homo sapiens; identical to SEQ ID NO: 8000

SEQ ID NO: 35013 - DNA, 201 bp, Homo sapiens; identical to SEQ ID NO: 7990

SEQ ID NO: 35014 - DNA, 201 bp, Homo sapiens; identical to SEQ ID NO: 7991

SEQ ID NO: 35015 - DNA, 201 bp, Homo sapiens; identical to SEQ ID NO: 7992

SEQ ID NO: 35016 - DNA, 201 bp, Homo sapiens
gatagatctgtgtgatctgagaaacctctcacatttgcttgtttttctggctcacagacatgtcgaggaaggcttttgtgtttcccaaagagtcggatacktcctatgtatccctcaaagcaccgttaacgaagcctctcaaagccttcactgtgtgcctccacttctacacggaactgtcctcgacccgtgggtacagta

SEQ ID NO: 35017 - DNA, 201 bp, Homo sapiens; identical to SEQ ID NO: 7998

SEQ ID NO: 35018 - DNA, 201 bp, Homo sapiens
attggtaattcagtagtcataggagtttgtaataaataactcacattgatttctctgttctgaaataattttgcttcccctcttcccgaagctctgacacytgccccaacaagcaatgttggaaaattatttacatagtggcgcaaactcccttactgctttggatataaatccaggcaggaggaggtagctctaaggcaa

SEQ ID NO: 35019 - DNA, 201 bp, Homo sapiens
gttgagctaatattttcttcagaattcagttgcttgcatcttactatacatagtctggtagacagcctctggccttaataatttgagccaggaaaatcttmacagctggtatttgcattcagagaacattaaaaaatcttaacaaagcattcgtaggatgtttagatttaagcaatttagcctactggtgggtacatcaat

SEQ ID NO: 35020 - DNA, 201 bp, Homo sapiens; identical to SEQ ID NO: 7999

SEQ ID NO: 35021 - DNA, 201 bp, Homo sapiens
ataaagaattggtaattcagtagtcataggagtttgtaataaataactcacattgatttctctgttctgaaataattttgcttcccctcttcccgaagctstgacacctgccccaacaagcaatgttggaaaattatttacatagtggcgcaaactcccttactgctttggatataaatccaggcaggaggaggtagctct

SEQ ID NO: 35022 - DNA, 201 bp, Homo sapiens
gcagcagttgaagcttctcatttgctaagaattaggtttagaatgttagaagggtgaacaacaagtctttgaagccattatttatgaatattgacttctckaattgacttttgataaccatttgtaagcatagaagctaaggatacattctcagacaaaaatgagagtgcaaatactctctgttgtccaattagggcagat

SEQ ID NO: 35023 - DNA, 201 bp, Homo sapiens
ttgtctaaaagtaatggagaaagtacgggatatgaatattaggctctcagagatttaaagacagcagaaagcagcagagaggaaaaatgagagttttgttytgtgattcttaaagcccaaactgagaatgatcattatataagaattaatttcttcttgtaggaagacactactgttggcccgacagcttaaagaccgagc

SEQ ID NO: 35024 - DNA, 201 bp, Homo sapiens
aactggaacagtgaaattcttgctaagcaaaaacctcttattgccaaaccttctgcaaagctactctttgtcaacagactgaaggggaaaaaatacaaaaygaattcctccactaaagttctccaagatgccagtaattctattgaccaccgaattccaaattctcagagggtacgtttaaactaagtttttgagtattgt

SEQ ID NO: 35025 - DNA, 201 bp, Homo sapiens
tttgtggggaaaaaataccagcaaggttccccattgtgtaaataaaaggctgaggccgggtacggtggctcacgcctgtaatcccagcactttgggaggcygaggtgggcggatcacgaggtcaggagttcaacaccagcctgaccaacgtggtgaaaccccgtctgtactaaaaatacaatagttagcccagtgtggtgg

SEQ ID NO: 35026 - DNA, 201 bp, Homo sapiens
tcactgcaacctctgcctctcaggttcaagcagtgctcctgcctcagcctcctgagtagctgggactacaggcgtgtgccaccatgcccagctaacttttmtatttttagtagagatggggttttgccatgttggccaggctggtctcgaactcctgacctcgggtgatccacccgcctcggcctcccaaagtgctgggat

SEQ ID NO: 35027 - DNA, 201 bp, Homo sapiens
ttactgcaccctctgcctactgggctcaagctatcctcccacctcagcctcccgagtagctgggactactacaggtgcatgccaccacagccagctaattttttttttttttttttttggtggagatggggttttgccatgttgcccaggctggtctcgaactcctgggctcaagcgatccacccccccttagcctcccaa

SEQ ID NO: 35028 - DNA, 201 bp, Homo sapiens
gcctcccaaataaaatatatcactgtgtactatgtgaaggagtatatattttgattttaaatataaaaatttcctatatttaaagccaagggatatagagragtcttaattattaaatggtgtatctgtgttaaatactgaaaggttctattataaaatggatagtggctatttgactaaagaagcatgaatataaagtaa

SEQ ID NO: 35029 - DNA, 201 bp, Homo sapiens
aacttaaaaatctgtactgtctgtaataggactataccaaacaaatctctggctttatcagtgctctaagaccagcattctgtatattgattggattgtcrtataattgggggtaatgatttgaactctttatgttaggccataggctggtataagttattcttctgctatagtaaatccttatgaaatgttttatccatc

SEQ ID NO: 35030 - DNA, 201 bp, Homo sapiens
aataagcaggctagaactcagaactttatatatattccaagtcgttggttagaaatatttttagaactcttctttagattttttttttttttttttttttwaatacggagttttgctcttgtcgcccaggctggagtgcaatggcacaatcttggtgcactgcaacctcggcctccccggttcaagcgattctcctgcctc

SEQ ID NO: 35031 - DNA, 201 bp, Homo sapiens
ctgaggcaggagaatcgcttgaacccaggaggtggaggttgcagtgagctgagatcacgccactgcgctccagcctggcgacagagcaagactgcatctcaaaaaaaaaaaaaaaaaagttttcctaactacataagtgtgggaattgtggtgaacttagagataatgtccagtgtgaagggggcaactgctacccaactc

SEQ ID NO: 35032 - DNA, 201 bp, Homo sapiens
gatcctggctactgatggaagaacgtagagtggcaagggtgttagtatgaaaaccagctagaaagattgtatggtgatgcaggcaaaaaatattggtgatrtggactagagtggtaacagtgagaagtagttagcatagggctacattattagctattatatcagttatatattatggttagttggcaggacctcttaata

SEQ ID NO: 35033 - DNA, 201 bp, Homo sapiens
aaagaaataaaagggataagattaggatcacatttttaaatttcatcagtatgtgattctatatgagatcattttcctaagcttgagaaattctcagtctaaaaaaaactactgacaaatattttgaattttaaagtcagtgataaatctacctttactttttccaatttttttctttaaactcaggaaaagaaattagtg

SEQ ID NO: 35034 - DNA, 201 bp, Homo sapiens
ggaagaaagtacctaaagaataggacaggaagactaagccctgagcatttcaaaatctactggttagatggaggaagatgagctggcaaagaagcaacagscagagagttggaaggataccccaagggtgggctggggaggggtggggtgtggtgtggtggaaatcaagtaaagagtgtatcttaagcagtgctcaactgt

SEQ ID NO: 35035 - DNA, 201 bp, Homo sapiens
tacaggtggggaaatggaggcaagagaggttaggtaaatttcccagggttacctgtgtagtaagtggtagagatgggagttaagcttagtcactctggctycagaatccgtcttatgtgatagttatgtcttaatgtgatgttaacacacctcaataattgataaaaatcagtcaggagtcagacatcagtaataaagttg

SEQ ID NO: 35036 - DNA, 201 bp, Homo sapiens
gcaggttttatgttttaaatttcatgaactattataaaatgttttagtaatttttaatttaatgaaataatttaaataaggcttgccctatataggtatcmctttaaaatttgcctgtaaaaaaaaagtcagaaaaagtatagtgcaaaaagaatgagtaccgtatgctgccatctgtttaagaaaaatacatgcatatat

SEQ ID NO: 35037 - DNA, 201 bp, Homo sapiens
ttccactgtactcaataaatgttattttgttatttgtaggctgtcatgtatttaaaccagatctagacctttataaattggtttcgcctattgagaatttmgtatggtattagtaaaaacagtaccgttttattttttaaaattactatgttttatatattaatttttatgtttaaaaattctacatacatccaaaaattc

SEQ ID NO: 35038 - DNA, 201 bp, Homo sapiens
ctgaaagatggaggttgcagtgagccaggatcacaccactgcagtcctgcctggatgacagagcgagaatccgtctcaaaaaaaaaaaaaaaaaaattcaktctgggctatttcttaacagatttaacagcctaagacagaggcaggcaaactttttctgtaaaaggccagatagaaaatattttaggctttgccgcccat

SEQ ID NO: 35039 - DNA, 201 bp, Homo sapiens; identical to SEQ ID NO: 8033

SEQ ID NO: 35040 - DNA, 201 bp, Homo sapiens; identical to SEQ ID NO: 8034

SEQ ID NO: 35041 - DNA, 201 bp, Homo sapiens
cttacaagaaaagaactgccatacagcttcaacaacaacttcttccactccccctaaaatgatgctaaaaagtaagtcatctctgtttctcccccgatttwaatagttctctttgatattcttgtggcttatttctgagaattgaattcccatcataagagatataataaatgagcctgaattcaggtatatctgaaatgc

SEQ ID NO: 35042 - DNA, 201 bp, Homo sapiens
ctaatgcaatattttgcaaactatgtgtctgacccattcatgagttataaaatgagtcttatgagttgcagttagcattaaaaatacacatacaggggccrggcgccatggctcacgcctgtaattccagcactttgggaggccaaggcgagcggatcatgaggtcaggagatcgagaccatcctggctaacgtggtgaaa

SEQ ID NO: 35043 - DNA, 201 bp, Homo sapiens
gctgggcgtggtggcgggcacctgtagtcccagctactcgggaggctgaggcagaagaatggcgtgaacctggggggcggagcttgcagtgagccgagatsgcgccactgcactccagccgacagagagagactccgtctcaaaacacacgtgcgcgcacacacacacagccgacagccagactccatctcaaaacacaaa

SEQ ID NO: 35044 - DNA, 201 bp, Homo sapiens
cagggagaccgccatctctccaaaaaatttttttaattagccatgcatggtagcatgagcctgtgatcccagctactcgggaagctgaggtgggaggatcrcttgagcccaggaagtcgaagctgcagtaagccatgatcatgctgttgcactccagcctgggcaatagagaaaaaccaaaaaactacacacgtatgtgta

SEQ ID NO: 35045 - DNA, 201 bp, Homo sapiens
caagtaatcccaacactttgggagttgaggtgggcagatcacttgaggtcaggagttcgagaccagcctggccaacatggtgaaaccctgtctctactttaaaaaaaaaaaagggtgggggggacacggggcggggggcaaaagtgatgaacagtacacaaatagcccataaatatatgagaagatatttaacttcatctc

SEQ ID NO: 35046 - DNA, 201 bp, Homo sapiens
tgaaagaccaaatcaatccaaagcattctttatccctttagttcctgctagatagcttttattctatacataggacctcttttcaaataactgcatgttckctttgaataacgttttagaattggtgaaggaagagcatgttggagcttaggaaatgcatacacagcactaggaaatcatgatcaagcaatgcattttgct

SEQ ID NO: 35047 - DNA, 201 bp, Homo sapiens
ggcaacttggatgaatctcacaaacataaggtttctcaaagatggttgcagaatacatacagtatgataccatttataaatgtttcaaaaccaatatagctctaaaaccaatatagtttcaaaagcaatatagcacatgctgtattgctaagaaatacatacatttgtaatgaaaatgcataaaagcgcagggaagacaag

SEQ ID NO: 35048 - DNA, 201 bp, Homo sapiens
ggcggaggttgcagtgagccgagatcgtgccactgcactccagcctggcaacagagtgagactccgtctcaaaaaaatttaaaaaaagcaacaaatgtatacacacacacacacacatatatatatatatatatatatatatatatatatatatatatatatatataaatgagttctcactatgttgtccaggctcaagca

SEQ ID NO: 35049 - DNA, 201 bp, Homo sapiens
gcggaggttgcagtgagccgagatcgtgccactgcactccagcctggcaacagagtgagactccgtctcaaaaaaatttaaaaaaagcaacaaatgtatacacacacacacacacatatatatatatatatatatatatatatatatatatatatatatatatataaatgagttctcactatgttgtccaggctcaagcaa

SEQ ID NO: 35050 - DNA, 201 bp, Homo sapiens
gactccgtctcaaaaaaatttaaaaaaagcaacaaatgtatacacacacacacacacatatatatatatatatatatatatatatatatatatatatatatatatataaatgagttctcactatgttgtccaggctcaagcaatcctcaaattcctgggctcaagcaatccttgtgcctcagcctcctgagtagctgggat

SEQ ID NO: 35051 - DNA, 201 bp, Homo sapiens
ctccgtctcaaaaaaatttaaaaaaagcaacaaatgtatacacacacacacacacatatatatatatatatatatatatatatatatatatatatatatatatataaatgagttctcactatgttgtccaggctcaagcaatcctcaaattcctgggctcaagcaatccttgtgcctcagcctcctgagtagctgggatta

SEQ ID NO: 35052 - DNA, 201 bp, Homo sapiens
ccgtctcaaaaaaatttaaaaaaagcaacaaatgtatacacacacacacacacatatatatatatatatatatatatatatatatatatatatatatatatataaatgagttctcactatgttgtccaggctcaagcaatcctcaaattcctgggctcaagcaatccttgtgcctcagcctcctgagtagctgggattaca

SEQ ID NO: 35053 - DNA, 201 bp, Homo sapiens
ggcgtttttttatacataaccatggatgtagtgggaaacaatgttgtttggtaaaaataatgtacttgatcaatgtaaaaaagtatataaaatagtcttaytaaaaatctaggtttttttttcctccatgaaaatctgtttttttaggccaaagtcagtataaaagaaactctacttcttgggctgggcatggtggctcat

SEQ ID NO: 35054 - DNA, 201 bp, Homo sapiens
caaactttgtgtattattttgtgtatacaatagttcttacagcctgtaaacattcaacattattccatttaaacattgtttttaacagctgtctaccctgytctgattttcctaaaagcttcacactatataggctgggcacaatggctcatgcctgtaatcccagcactttgggaggccgacaagggcgggtcacttgag

SEQ ID NO: 35055 - DNA, 201 bp, Homo sapiens
actattggagaccagctgggggaagcgaaagctagtggtaatctgggaaacaccttaaaagttcttgggaattttgacgaagccatagtttgttgtcagcracacctagatatttccagagagcttaatgacaaggtaataccgcagcattagatggtaggcctaatattttcattcaaagggctttgcattttaatacta

SEQ ID NO: 35056 - DNA, 201 bp, Homo sapiens
ctacatacatccaaaaattccagttgtaacagatttttaagtaactcacgtctagagtaaaactttggctccttctctgaccattcatattttatttttayagagttttggtaaaccttgctttcttattcgtaggttcttaaaaaccagcattttaatgttttgataatgagaatccacagtatgcatttggtacaagtc

SEQ ID NO: 35057 - DNA, 201 bp, Homo sapiens
gtctcaaaaaaatttaaaaaaagcaacaaatgtatacacacacacacacacatatatatatatatatatatatatatatatatatatatatatatatatataaatgagttctcactatgttgtccaggctcaagcaatcctcaaattcctgggctcaagcaatccttgtgcctcagcctcctgagtagctgggattacaag

SEQ ID NO: 35058 - DNA, 201 bp, Homo sapiens
ctcccgggttcaagcgattctcctgcctcagcctcccgagtagctgcgattacaggtgcacaccaccatgcccggctaatttttgtattttcagtagagayggggtttcaccacgttggccaggctggtgtcaaactcctgaactcaaatgatttgcctgccttggcctcccaaagtgctgggattacaggtgtgaggcac

SEQ ID NO: 35059 - DNA, 201 bp, Homo sapiens
aagaaggtacttcatattatcaaatccatttatctgccgggtgcagtggctcatgcctgtaatcccagcactttgggaggcaaaggtgggtagatctcctsaatttaggagtttgaaatcagcctagccaatgtggtaaaaccctgtctctaccaaaaatacaaaaaataacctgggtgtggtggcacacacctgtggtcc

SEQ ID NO: 35060 - DNA, 201 bp, Homo sapiens
ggggtgggaggactgcttgagcctgggaggcagaggttgcagtgagctgagattgcgccactgcactccaacctgggtgacagagtgagaccccatctcaraaaaaataaaataaaattggctgggcgcagtggctcatacctgtaatcccagcacttcgggaggccaaggcaggcggatcacttgaagtcaggagttcaa

SEQ ID NO: 35061 - DNA, 201 bp, Homo sapiens
ctgcactccaacctgggtgacagagtgagaccccatctcaaaaaaaataaaataaaattggctgggcgcagtggctcatacctgtaatcccagcacttcgkgaggccaaggcaggcggatcacttgaagtcaggagttcaagaccaacctggccaacatagcgaaaccccgtatctactaaaaatacaaaaattagctggg

SEQ ID NO: 35062 - DNA, 201 bp, Homo sapiens
tcacccctttccaaaaatatctgctaccccagcacattgggaggccaaagcagacaggtcacctgaggtcaggagtttgagaccagcttggccaacacggygaaaccctgactgtataaaaaatacaaaaattagccaggtgtggtggcacgcacctgtagtcccagctactcaggaggctgaggcaggagaattgcttga

SEQ ID NO: 35063 - DNA, 201 bp, Homo sapiens
atatctgctaccccagcacattgggaggccaaagcagacaggtcacctgaggtcaggagtttgagaccagcttggccaacacggcgaaaccctgactgtayaaaaaatacaaaaattagccaggtgtggtggcacgcacctgtagtcccagctactcaggaggctgaggcaggagaattgcttgaacctgggaggcagagg

SEQ ID NO: 35064 - DNA, 201 bp, Homo sapiens
acagtcaggagcccttatggctaaagtagagtaagcacggagggagaagaggtgaccagagaggtagtggatgtgggggaaggggagaccaaggaggcttycaggccattgtaatactggctttcccctcaagtgagataggaagtcactggaagacttctgagataggtgacaggtaattactaactataaaagctggaa

SEQ ID NO: 35065 - DNA, 201 bp, Homo sapiens
aaatgaagactgtagaatgaacagcaggtacaaaggctctcaagttcaaggaacagtcaggagcccttatggctaaagtagagtaagcacggagggagaaraggtgaccagagaggtagtggatgtgggggaaggggagaccaaggaggcttccaggccattgtaatactggctttcccctcaagtgagataggaagtcac

SEQ ID NO: 35066 - DNA, 201 bp, Homo sapiens
aacagtcaggagcccttatggctaaagtagagtaagcacggagggagaagaggtgaccagagaggtagtggatgtgggggaaggggagaccaaggaggctyccaggccattgtaatactggctttcccctcaagtgagataggaagtcactggaagacttctgagataggtgacaggtaattactaactataaaagctgga

SEQ ID NO: 35067 - DNA, 201 bp, Homo sapiens
aattgccctggcagtcttcagttttctctaagtaaacaaagtaaaaggaacaataaggatgcaggcgtagtaatagctgtggaaaagatgaaactacagcyacagtgacctgtgggcagcctgcgtagagataagctgaggtgtcagtcagactgatcctggtaacgatactccatggctgcatgaagatgctggaggcat

SEQ ID NO: 35068 - DNA, 201 bp, Homo sapiens
attttttcaggatcttcaaatctaagtataaaaaaaagaccttagaaatcactatggtaggaaaatacacttgttttctttcttagctcttacaaagagakaagtgtacctaaattccactgcagaatgtttagaactgaatgtagagcctgaagtacaggcctgtatcaccagtgtttgcataattcagtatctgtagtg

SEQ ID NO: 35069 - DNA, 201 bp, Homo sapiens
ggacacctgatgtctgtgaagtctgctaaggacaggtacaaaatttatgcattgctttttaaaaagtttaaaatgaggaatgcttttgataatcagaaagrctaatgtaaagtgctgactgatgtcctgtctgcagttaaggaagacacccaactctcttcttcctcatcatggtattctctatgtatagatctctaaaaa

SEQ ID NO: 35070 - DNA, 201 bp, Homo sapiens
tggggatgtggacccctattctttcaaaaagtcattcaggtgatttggatgggcaaatagaactatttctctaatggccaatgttttttaagagtcataayctggaattaattacattaagtgctcagctaaaaaaaaaaaaaaagttctaaattacaacctggattacattatgtttcatgtatactataaggtatgatg

SEQ ID NO: 35071 - DNA, 201 bp, Homo sapiens
aagtacgggatatgaatattaggctctcagagatttaaagacagcagaaagcagcagagaggaaaaatgagagttttgttttgtgattcttaaagcccaawctgagaatgatcattatataagaattaatttcttcttgtaggaagacactactgttggcccgacagcttaaagaccgagctgtagaagcacagtcttgtt

SEQ ID NO: 35072 - DNA, 201 bp, Homo sapiens
gggcggggggcaaaagtgatgaacagtacacaaatagcccataaatatatgagaagatatttaacttcatctcatcagcaaacatcacagtggagtactgktagaaacttatgaggtaaacaaaaattactaccagtattcaaatgatgcagggtaatggaaactcttgtgtggtattgatgggatagaaattggtatacc

SEQ ID NO: 35073 - DNA, 201 bp, Homo sapiens
aatgatgcagggtaatggaaactcttgtgtggtattgatgggatagaaattggtataccctgaagtacaatccagcaacattctggtgaagttaaagatgygccaactggatgatccagctgtttcactcctgttgtgctcccagttatatactgctgatacccaccaaactagaagaaatgcttgttcatgtacactgag

SEQ ID NO: 35074 - DNA, 201 bp, Homo sapiens
gtgctgaatgtgggtgggctggcagggtcaaattacagtttaaattagggtggtctgaaaaagtgatatggttaggcatggtggctcacacctgtaatccyataactttgggaggccaaggtgagaagactgcttgaggccaggagtttgagaccagcctgggtaacagcaagaccccatatccacaaaaaataaaaaata

SEQ ID NO: 35075 - DNA, 201 bp, Homo sapiens
attggtataccctgaagtacaatccagcaacattctggtgaagttaaagatgcgccaactggatgatccagctgtttcactcctgttgtgctcccagttayatactgctgatacccaccaaactagaagaaatgcttgttcatgtacactgagagacgtttccaagaatatctgtagtgtgcttatcatagcaaaaaaatt

SEQ ID NO: 35076 - DNA, 201 bp, Homo sapiens
tgattgatatataaatgaagactgtagaatgaacagcaggtacaaaggctctcaagttcaaggaacagtcaggagcccttatggctaaagtagagtaagcmcggagggagaagaggtgaccagagaggtagtggatgtgggggaaggggagaccaaggaggcttccaggccattgtaatactggctttcccctcaagtgag

SEQ ID NO: 35077 - DNA, 201 bp, Homo sapiens
tacaactgcgttttcttgttgtgactgagagatttaacatagcttggtgctttctttcccacagtatgtcttttaatctctctcataaacttctagggatycagattagatgatcaaagatgtgctccaccacctgctaccacaaagggtccgacagtaccagatgaagactttttcagccttattttacggtcccaggga

SEQ ID NO: 35078 - DNA, 201 bp, Homo sapiens
gatcaggaagatcaaaaggacaagcttttttccccaactacatagcaacattattgccaagataaatgaaatttatgatcaagaggagagttgtttttctrgctgcattcttgaaaagcatttttttttaacaagtactttgtattgaagatacatcttccctaggctttttcttgcaggagaggggtgcacagtaaaagg

SEQ ID NO: 35079 - DNA, 201 bp, Homo sapiens
ctacatctaattaaaattgtttgtttcagcgtctccttattgcaaaagaatttggagataaagcagctgaaagaagagcatatagcaaccttggaaatgcrtatatatttcttggtgaatttgaaactgcctcggaatactacaagttagtctaatatttctgtagataaatgtaaaatgaatactcagtcccattaattc

SEQ ID NO: 35080 - DNA, 201 bp, Homo sapiens
gttgtggaaaatgtgactgtgagccaggtgtggtggtgcatgcctgtaatctcagctacttgggaggctgaagtgggaggatcgcttgaggtcaggagttkgagactatagtgtgcaatgatcgcgtttgtgaatagccactgcactccagcatgggcaacatagttagaccctatgtctaaaaaatatataaaaataaaa

SEQ ID NO: 35081 - DNA, 201 bp, Homo sapiens
attattgaacaccgattatgtttcagctgctattctaggcatcgaggacacacttgatttttaaaggatcttacattttaggagagacgtgtgtgtgtgtrtatatatatagagagagagtatatgtgtgttgtattaggtaattatgcttgctatgaagaactttaaaggaggataaaggggtagtgggtaagcaaaggt

SEQ ID NO: 35082 - DNA, 201 bp, Homo sapiens
taatcccagcactttgggaggccaaggtgggaggattgcttgagcccaggagttcaagactagactgggcagcatagtgagaccccatctctataaaaaawtttttttaaattaatggcacacacctgtagtcccagctacacaggaggctgaggtgggaggatcacttgagcctaggagttcaaggctgcagtgagccat

SEQ ID NO: 35083 - DNA, 201 bp, Homo sapiens
gggaggccaaggcgggtggatcacttgaggtcaagagttcgagaccagcctggccaacatggtgaaacccccatctctactaaaaatacaaaaattagccrggtgtggtgacgcatgcctatagtctcagctactgggaggctgaggctgaagaatcacttgaacctgaaagatggaggttgcagtgagccaggatcacac

SEQ ID NO: 35084 - DNA, 201 bp, Homo sapiens
ttgctctcctcacaaatatttttttgaagtttgtattttttcaggatcttcaaatctaagtataaaaaaaagaccttagaaatcactatggtaggaaaatrcacttgttttctttcttagctcttacaaagagataagtgtacctaaattccactgcagaatgtttagaactgaatgtagagcctgaagtacaggcctgta

SEQ ID NO: 35085 - DNA, 201 bp, Homo sapiens
tcacttgaggtcaagagttcgagaccagcctggccaacatggtgaaacccccatctctactaaaaatacaaaaattagccaggtgtggtgacgcatgcctrtagtctcagctactgggaggctgaggctgaagaatcacttgaacctgaaagatggaggttgcagtgagccaggatcacaccactgcagtcctgcctggat

SEQ ID NO: 35086 - DNA, 201 bp, Homo sapiens
aaaatgatcataacaatcagtttatttaatttatttagaaataaaaataccgtgggtttactgataatcagtatcagggaaatctcgaatccagctacccyataatctggtaaaaggatcaaagtacattacaaagaaggtacttcatattatcaaatccatttatctgccgggtgcagtggctcatgcctgtaatcccag

SEQ ID NO: 35087 - DNA, 201 bp, Homo sapiens
aagaaactctacttcttgggctgggcatggtggctcattcctgtaatcccagcacattgggaggctgaggcaggaggatcgcttgaggctaggagttcaaraccaacctgggcaacatagacccccgtgtctatgaaaaataaatcagcagccaggcgcagtggctcacacctgtaatcccagcactttgggaggccgaag

SEQ ID NO: 35088 - DNA, 201 bp, Homo sapiens
aggcaggagaatcacttgaacccctgggaggcagagattgcagtgagctgagaccaagccactggactccagcctgagtgacagagcaagactctgtctcaaaaaaaaaaaaaacagcaagcatgctggcacacacctgtagtcccaactgcttaagaggctgaggcaggaggaccacttgagcccaggaggtggaggctg

SEQ ID NO: 35089 - DNA, 201 bp, Homo sapiens
aatggtctcttctgttccataatactgctgtaaaacaaacttttctaagttctaatataaaaacaaaaaacaaaacccatgtggttaggtcaagaacctargacacataaacaaacagaaaacagatgaaaactcacaaaaattaaatatgaaagaaagatgtcagctagaaccttagttgtcattaagctttgtcttcct

SEQ ID NO: 35090 - DNA, 201 bp, Homo sapiens
ggcaggagaatcacttgaacccctgggaggcagagattgcagtgagctgagaccaagccactggactccagcctgagtgacagagcaagactctgtctcaaaaaaaaaaaaaacagcaagcatgctggcacacacctgtagtcccaactgcttaagaggctgaggcaggaggaccacttgagcccaggaggtggaggctgc

SEQ ID NO: 35091 - DNA, 201 bp, Homo sapiens
cttgaacccctgggaggcagagattgcagtgagctgagaccaagccactggactccagcctgagtgacagagcaagactctgtctcaaaaaaaaaaaaaayagcaagcatgctggcacacacctgtagtcccaactgcttaagaggctgaggcaggaggaccacttgagcccaggaggtggaggctgcactgagctatgat

SEQ ID NO: 35092 - DNA, 201 bp, Homo sapiens
ccattaaagcacttttgggttagaggtgttcctagagacttagcagaagtaagaccaaatagtttctgggggaaaggcatccttgattccaggtcataagsgtttcacaacaaaaaaattaccaaatatgtaaagaaacaagccaagatagtaaggaaaaaaataacaaaattaggtcatcaagttcttcagatgttagaa

SEQ ID NO: 35093 - DNA, 201 bp, Homo sapiens
ctttacctagtgtttataaagtaggaagttaagtgaatcatagattagaatttaatactcttatggaaataattttttaacatcttaattgacaatggcgkttttttatacataaccatggatgtagtgggaaacaatgttgtttggtaaaaataatgtacttgatcaatgtaaaaaagtatataaaatagtcttactaaa

SEQ ID NO: 35094 - DNA, 201 bp, Homo sapiens
cacgatcctcttgcctcagccctccaagtagctgggactacaggcgtgtaccaccatgcctggctagttttatttttagtacatagccttgaacaactgarcttaagcgatcatcctccctcaaccttccaaagtgctaggactgtaggcatgagccactgcacctggcctaaaattacattgttacaggcacgtaagtaa

SEQ ID NO: 35095 - DNA, 201 bp, Homo sapiens
tgtggctgaataataaatttgattatatatcattctcttggcataagaaccccagaaagcattttgaggtacagatcacagttatgtttgtattggctttsatgtaggaagacaggaaagtaaggccgggcatggggaagtggaaggagagtactaaaatatgcccctactctacccgcatctctacatggagaagtagca

SEQ ID NO: 35096 - DNA, 201 bp, Homo sapiens
atcctctgtatatcattgtatgaagggctagtctgtgatagaggattagtctggttccatatgcccttgacccaagatcaatgactaggtcccaaactcarttacctcttcagaagtcttcctggtgaaaccccgtatctactaaaaatacaaaaattagccgggtgtggtggcgcacgcttgtaatcccagctactcagg

SEQ ID NO: 35097 - DNA, 201 bp, Homo sapiens
gttttgttttgtgattcttaaagcccaaactgagaatgatcattatataagaattaatttcttcttgtaggaagacactactgttggcccgacagcttaargaccgagctgtagaagcacagtcttgttacagtcttggaaatacatatactttacttcaagactatgaaaaggccattgattatcatctgaagcacttag

SEQ ID NO: 35098 - DNA, 201 bp, Homo sapiens
tgttaattctaattgtcagtaaaaatgtgaatgttgaagttgaaatgtgaatgttgaagttggcacctttgtagtaatcagaattcttgcagagaagagaragagagtgaagagtatactttacaaagctcgaaggagacttgaggctgtcgtttgtgctggtgttcctctagccacaggggctgctgaccggatcctgtc

SEQ ID NO: 35099 - DNA, 201 bp, Homo sapiens
catttatacagcaactactatgcacaagatgctattctaagcactttatacatattaatttaatcctcacaaaaatccttcgagatatttcccccattttwtataagaagagactggtatacagagagattgagtgactttgcccttagcttagtaattggcaaagttgggatttaaacccagtctagctccaagatctat

SEQ ID NO: 35100 - DNA, 201 bp, Homo sapiens
caacttggatgaatctcacaaacataaggtttctcaaagatggttgcagaatacatacagtatgataccatttataaatgtttcaaaaccaatatagctcyaaaaccaatatagtttcaaaagcaatatagcacatgctgtattgctaagaaatacatacatttgtaatgaaaatgcataaaagcgcagggaagacaaggg

SEQ ID NO: 35101 - DNA, 201 bp, Homo sapiens
agatgaataaataatatattgattatatatgtgtaattattgacgttgaaagatggatacattgggtttgttacactagttcctctggttttgtgtttctwtggaaaatgtcatttatacttcttactgtgaataataagcattttaatactttaatattgtaaaagttagattcttgcatgtaagttgtgaaggaataca

SEQ ID NO: 35102 - DNA, 201 bp, Homo sapiens
agccaggcatgatggcacatgactgtaatcccagctgctcaggagactgaggcacgagaatcacttgaacccaggaggcagaggttgcagttagccaagaytgtactgctgcactccagcctgagtgacagtgagagactgtgtctcaaaaaaaaagtgaagatgagcaagcagtagccattggctaagtcatttgaattc

SEQ ID NO: 35103 - DNA, 201 bp, Homo sapiens
gtttacttgttttctgactggcagtaagtctgtcatctaatgagatcttaaaatagaaaggggtaacctagaaaagagtaacagcatagtagtggggatgytattttgattcttttcacgcaattgaaggcctacagccttttccttctgttataaggaataaactgctctacagattgttatttttgaaactgtgtggat

SEQ ID NO: 35104 - DNA, 201 bp, Homo sapiens
aggctagaaatactttatataccagtttgaactgtttgaatcatttactatgcaaatgtattacttttaattaatagaagatcaggaagatcaaaaggacragcttttttccccaactacatagcaacattattgccaagataaatgaaatttatgatcaagaggagagttgtttttctggctgcattcttgaaaagcatt

SEQ ID NO: 35105 - DNA, 201 bp, Homo sapiens
tgcctgtaatcccagcactttgggaggctgaggcaggcagatcacttgaaccccagagtttgagaccagcctgggcaacatggcaaaaacctgtctatacaaaaaaaaaaaaaaaagatagaaaaattagctgggcctggtgtcacatgccatgcctgtagtcccagctacctgggaggctgaggcaggagtatcgtttga

SEQ ID NO: 35106 - DNA, 201 bp, Homo sapiens
agaggtgaccagagaggtagtggatgtgggggaaggggagaccaaggaggcttccaggccattgtaatactggctttcccctcaagtgagataggaagtcmctggaagacttctgagataggtgacaggtaattactaactataaaagctggaaggaccatcttaagttgttttttttttttttttttttttttgagacga

SEQ ID NO: 35107 - DNA, 201 bp, Homo sapiens
tgaatagaatctttactgtggagaagaaatgtattacagtccggttttctcactattgtaggattctttggcctcgtcataattcctgtcttcttcccagrgaagaaattaaagtttgttgggcctctcttatgtgcaaagcaatgtcgttggtgttgtgagatgacaagaaaatgcttcctattcagtagttgtttctgg

SEQ ID NO: 35108 - DNA, 201 bp, Homo sapiens
tactggctttcccctcaagtgagataggaagtcactggaagacttctgagataggtgacaggtaattactaactataaaagctggaaggaccatcttaagktgttttttttttttttttttttttttgagacgacgtctcactctgtcacccaggctggagtgcaatggcacgatctcggctcactgcaacctccgccccc

SEQ ID NO: 35109 - DNA, 201 bp, Homo sapiens
ctggctttcccctcaagtgagataggaagtcactggaagacttctgagataggtgacaggtaattactaactataaaagctggaaggaccatcttaagttkttttttttttttttttttttttttgagacgacgtctcactctgtcacccaggctggagtgcaatggcacgatctcggctcactgcaacctccgccccctg

SEQ ID NO: 35110 - DNA, 201 bp, Homo sapiens
agaggtatgaaactaaaaaaaatgctgtctgtgctattgtaatttacaaattagaggttgggggagggaaccctatttctctagattgatcatgtggctgrataataaatttgattatatatcattctcttggcataagaaccccagaaagcattttgaggtacagatcacagttatgtttgtattggctttcatgtagga

SEQ ID NO: 35111 - DNA, 201 bp, Homo sapiens
gctatcctgacctctctgagcaggctcagagaaattcgaataggcaaattacctcttgctacaaataactgcttactgttttatcaggaatgtatataaayttcagttatagaggcagctgccctgaacaagagtagccgcttaaattatattacgggaagttaaaaatactgtgatgcagctgtaatgttatgtttaaat

SEQ ID NO: 35112 - DNA, 201 bp, Homo sapiens
agtgctcatcttatttcacataggataaagtctacatttgttagtattgaatacaaaggcctcttccctcctctatagctacccctgcccttcagttcatmatcagttgaatactaaaaactttttggattgcatattaaccagtatgaaacatctctcacctccaaatgcttattcattcttaaggagccaacacaaata

SEQ ID NO: 35113 - DNA, 201 bp, Homo sapiens
aatatgatacatactgttcttttttgtttatagcagaaaatattacataaaagtattaaatttcaaacatattttaaaaattacagttctcaaatctcatstattcccacccctatttagaagctccatgatgacagttaagccctgtgctatcttctgtattgattgacatgacagcagtctgcagagttagcttgtgat

SEQ ID NO: 35114 - DNA, 201 bp, Homo sapiens
cgttaaaaacgtctctcagtcactcctgttttccttatcccagttaaagggataccatttactctgtccctaagccaggaaccccggtgtcatgcaagatwccctctttcactaaccacatcaaatccactgtgtccctcagatctgctctcaccctcacccctttccaaaaatatctgctaccccagcacattgggaggc

SEQ ID NO: 35115 - DNA, 201 bp, Homo sapiens
tttttgcccctaggaaaaagtcttttgttggtaattaacacatttgactgtagcttatgtatgtatcattcccaaatctcaaattcaacacgttaaaaacrtctctcagtcactcctgttttccttatcccagttaaagggataccatttactctgtccctaagccaggaaccccggtgtcatgcaagataccctctttca

SEQ ID NO: 35116 - DNA, 201 bp, Homo sapiens
tactttatataccagtttgaactgtttgaatcatttactatgcaaatgtattacttttaattaatagaagatcaggaagatcaaaaggacaagcttttttycccaactacatagcaacattattgccaagataaatgaaatttatgatcaagaggagagttgtttttctggctgcattcttgaaaagcatttttttttaac

SEQ ID NO: 35117 - DNA, 201 bp, Homo sapiens
tttaaatttcatgaactattataaaatgttttagtaatttttaatttaatgaaataatttaaataaggcttgccctatataggtatcactttaaaatttgyctgtaaaaaaaaagtcagaaaaagtatagtgcaaaaagaatgagtaccgtatgctgccatctgtttaagaaaaatacatgcatatatttcctttgtagat

SEQ ID NO: 35118 - DNA, 201 bp, Homo sapiens
acatcaaagcattttagaggggaatgtatattctatttttgtgtagctggtatagaaaattattattcttggaagaatacatatttgtacaggttttctcrtttcatatgggtttgtgtatcagattttagaactgaataatgtaatgatgctgaacttgtactcttaagggctccctggtttatttgaattaattttttt

SEQ ID NO: 35119 - DNA, 201 bp, Homo sapiens
gcaacttggatgaatctcacaaacataaggtttctcaaagatggttgcagaatacatacagtatgataccatttataaatgtttcaaaaccaatatagctytaaaaccaatatagtttcaaaagcaatatagcacatgctgtattgctaagaaatacatacatttgtaatgaaaatgcataaaagcgcagggaagacaagg

SEQ ID NO: 35120 - DNA, 201 bp, Homo sapiens
agaggtagtggatgtgggggaaggggagaccaaggaggcttccaggccattgtaatactggctttcccctcaagtgagataggaagtcactggaagacttytgagataggtgacaggtaattactaactataaaagctggaaggaccatcttaagttgttttttttttttttttttttttttgagacgacgtctcactctg

SEQ ID NO: 35121 - DNA, 201 bp, Homo sapiens
gtcggtacttagccacctgatgactaatgacaacaaagaggctgatgaagatttctttgacatccttgtaaaatgtcaagtatgtctgtatatttttttcrttctgcatacagctcagataccactgaaaacattggtagtgttataattctcattcaggaagggcttattttgtattagagagttattattgtccatcat

SEQ ID NO: 35122 - DNA, 201 bp, Homo sapiens
attaatcaaagcagtgcagtactggcataaaagacagacatatagaccaatggaatagaatacagatcccagaaataaacccttgcatgtgtggtcaaatratatgcaacaggggtgccaagaccattcagtgggggaaaagacagttttatcaacaaatggttctgggtaaactagagagccacatacaaaaagaatgaa

SEQ ID NO: 35123 - DNA, 201 bp, Homo sapiens
atacagatcccagaaataaacccttgcatgtgtggtcaaataatatgcaacaggggtgccaagaccattcagtgggggaaaagacagttttatcaacaaayggttctgggtaaactagagagccacatacaaaaagaatgaagttggacccttacctaataccatatgcaaaactcaaagtgggccaaagacctaagcatc

SEQ ID NO: 35124 - DNA, 201 bp, Homo sapiens
cagaagaatggcgtgaacctggggggcggagcttgcagtgagccgagatcgcgccactgcactccagccgacagagagagactccgtctcaaaacacacgygcgcgcacacacacacagccgacagccagactccatctcaaaacacaaacacacacacgccggggcagtggctcatgcctgtaatcccagctcttgggag

SEQ ID NO: 35125 - DNA, 201 bp, Homo sapiens
taattttttttaaacaaaggtgtacgccccaagttgggacgccggcatagtatggaaaatatggaacttatgaagttaacaccagaaaaggtgggtggcargttttatgttttaaatttcatgaactattataaaatgttttagtaatttttaatttaatgaaataatttaaataaggcttgccctatataggtatcactt

SEQ ID NO: 35126 - DNA, 201 bp, Homo sapiens
ctaattgtcagtaaaaatgtgaatgttgaagttgaaatgtgaatgttgaagttggcacctttgtagtaatcagaattcttgcagagaagagaaagagagtraagagtatactttacaaagctcgaaggagacttgaggctgtcgtttgtgctggtgttcctctagccacaggggctgctgaccggatcctgtccacgtggt

SEQ ID NO: 35127 - DNA, 201 bp, Homo sapiens
aagtaaatgaagaaggtcactttacggtggtacttaccagtgattaacagttcaattcaccaggaagatgaatgcattaaatgtgtctgggcttaataggygtttataacaaggcctcaacgtacataaagcaaaattgaccaaagaaataggaaaatctacaatcataacgggaaattttaatacatatctcttagtaat

SEQ ID NO: 35128 - DNA, 201 bp, Homo sapiens
gattccaggtcataagggtttcacaacaaaaaaattaccaaatatgtaaagaaacaagccaagatagtaaggaaaaaaataacaaaattaggtcatcaagwtcttcagatgttagaattatcagatatagaaaataaaatgactgtggttgaacgtttacagaagtaacaaggaaatgaaaacaagagaataacaaaaatg

SEQ ID NO: 35129 - DNA, 201 bp, Homo sapiens
cctcagtcctcaccatggttgaaaggccctatgtaatctgaacctatctcttcagcctcttttcctgccactccacctcttgctcactctggctgtatgargacaggtgttttttggtctcttttgttcattgccatctccccagtgtgaggagaaaggatttgtaagaaaacttgtctatttctggtgttggctcaaggt

SEQ ID NO: 35130 - DNA, 201 bp, Homo sapiens
cccttgacccaagatcaatgactaggtcccaaactcaattacctcttcagaagtcttcctggtgaaaccccgtatctactaaaaatacaaaaattagccgkgtgtggtggcgcacgcttgtaatcccagctactcaggaggctgaggcaggagaatcgcttgaacccaggaggtggaggttgcagtgagctgagatcacgc

SEQ ID NO: 35131 - DNA, 201 bp, Homo sapiens
acatttatagactaatagaagtaaaagaaaaaaaatttaatggagaaaaagaaggaaatagtaagaggtctttcataagtaattatttgattggttctgtrtggagagccaatataaaaatttttttcccttgtccgtaatactaaggatattacaaatatatatgataaacctgacctctgttttcaaaatgtaaacttt

SEQ ID NO: 35132 - DNA, 201 bp, Homo sapiens
ataatatttcttagaaattcattggtttcagtttttgacaaataaagacaaccagttcaggtacttcatctagcaaaataatcctttaataaaaatcacaytttgactgggcacagtggctcacgcctgtaatcccagcactttgagaggctgaggcaggcggatctcctgaggtcaggagttggagaccagcctggccaa

SEQ ID NO: 35133 - DNA, 201 bp, Homo sapiens
ttttggttgccctggtccccaggatgtaggagaatttccagaagaagtgagagatgctctgcaggcagccgtggatttttatgagtgagtaggggctgatrtgggcagtcatgtaggcccatctaagccgtggatctgctgtacgttctttattcagtagtaagtttttaagtttggcaaagattttaaagttatgaacta

SEQ ID NO: 35134 - DNA, 201 bp, Homo sapiens
acagttttatcaacaaatggttctgggtaaactagagagccacatacaaaaagaatgaagttggacccttacctaataccatatgcaaaactcaaagtggrccaaagacctaagcatcagaactaaaactataaaactcaagaggagcatgtggtggcttatacctgtaatcccagcactttgggaggccaaggtgggagg

SEQ ID NO: 35135 - DNA, 201 bp, Homo sapiens
cagttttatcaacaaatggttctgggtaaactagagagccacatacaaaaagaatgaagttggacccttacctaataccatatgcaaaactcaaagtgggycaaagacctaagcatcagaactaaaactataaaactcaagaggagcatgtggtggcttatacctgtaatcccagcactttgggaggccaaggtgggagga

SEQ ID NO: 35136 - DNA, 201 bp, Homo sapiens
gtaatccattgtatagtggcgtgtaattttttttacccagtactctattggtggacatttaattcatttgtggtttttttgctgctgtgaatatcctttcrtatgtatcttcttaaatttgtgtaagtataccttaagatcaattcttagcactgaaaatgcttgagatataatttttaacataatttagaatgcttaaat

SEQ ID NO: 35137 - DNA, 201 bp, Homo sapiens
catgtgaaaatcaatcagtgtaacacataatataaacagaataaagggaaaaaacacatacaggaaaaaaatgacaattcaaaactctttcatgataaaamcttaaaaattagcaacagtaggaaactaccagaacataataaaagccatatatgaaacatgtaccgctgacatcatactcaatggtgacagactgaaagc

SEQ ID NO: 35138 - DNA, 201 bp, Homo sapiens
tgggctcaagctatcctcccacctcagcctcccgagtagctgggactactacaggtgcatgccaccacagccagctaattttttttttttttttttttggkggagatggggttttgccatgttgcccaggctggtctcgaactcctgggctcaagcgatccacccccccttagcctcccaagtgctgggattacaggtatg

SEQ ID NO: 35139 - DNA, 201 bp, Homo sapiens
ggctatctgcactatgattattaatattctgcaagttctggtaattgcactaaacgataaaataaatgcaaacttaaatattatcatcatttaataaggtrattagggaatatgtttttgtttttgtttttgttttgaaatggagtatcactctgtcacccaggctggagtgcagtggtgtgcaatctcagctcactgcaa

SEQ ID NO: 35140 - DNA, 201 bp, Homo sapiens
caaggctatctgcactatgattattaatattctgcaagttctggtaattgcactaaacgataaaataaatgcaaacttaaatattatcatcatttaataargtgattagggaatatgtttttgtttttgtttttgttttgaaatggagtatcactctgtcacccaggctggagtgcagtggtgtgcaatctcagctcactg

SEQ ID NO: 35141 - DNA, 201 bp, Homo sapiens
gaaggaatgggtattaaataaagtcggaataggtgggtactttgtaaacatgataaccaatagccagtttaatatttagtgttaaatattaatgacatctytaatgcaattaggaacaaaacaaggctatctgcactatgattattaatattctgcaagttctggtaattgcactaaacgataaaataaatgcaaacttaa

SEQ ID NO: 35142 - DNA, 201 bp, Homo sapiens
aggaaaatttgataagcatgagagaagaccattcttttcatgttcgttacaggtaagactattgctgtcttaatggatgacttttaatccttattttaaartgtttttaactctgatgaccatttcaagtttcagttgaaaatactcaaatataccagccatagtattgtctgtagacaatattttctttttgttgtaagt

SEQ ID NO: 35143 - DNA, 201 bp, Homo sapiens
ccaggactttatgattgtatatctaccaatttatctcatatatgtatatgtatatccttctttgtctttctcaactgttatctcagaggttatagtttatrtctgatatgctgtagctctctctaatgtatcggtatggattcatttttatttaaatattctcagtctttatcactgaagattttacctttattcctctct

SEQ ID NO: 35144 - DNA, 201 bp, Homo sapiens
ggatacaaagcagtagtttggtaaacctatgttagtaattgaatttggttccagaaagatttctgatcatttacaaatcaactgtaccatcaaagaataayggtatgccagaaagcattatgccacaggatctgaaagcaattccaaaagtctttcaaaaatatttgaaaagacaggcaacattagaataagtaggtagcc

SEQ ID NO: 35145 - DNA, 201 bp, Homo sapiens
cctcctgcggtgcccctgccttggggaggggccgtgaccacccgtctgtcgcccgaggcggccgccgctgcaccttcaccgcgtacccgggacccgcccgyccgcgggaggtgagcgcttccgcgacgcgggttctgaggcgtttgaggggctctcggagggaggtgacagggaggggtgcgtgtgcgtgcgtgtggggct

SEQ ID NO: 35146 - DNA, 201 bp, Homo sapiens
ctagggatccagattagatgatcaaagatgtgctccaccacctgctaccacaaagggtccgacagtaccagatgaagactttttcagccttattttacggycccagggaaagagaatggatgaacagagagttcttttacaaagagatcaaaacagagacactgactttgggctaaaggactttttgcaaaataatgcttt

SEQ ID NO: 35147 - DNA, 201 bp, Homo sapiens
aggtgatttatgctataaagtacaaaattacattttaactgtttaatgtaatgtgaagtcttagtaatcaaacatatctaaaaagttcccacccaaatccrttgtagcaagctccaaactctttcaaatccagggtccagtgctgggttataattatataaatgttattatacctcaccaaactccacagtactcccacag

SEQ ID NO: 35148 - DNA, 201 bp, Homo sapiens
ctgaaaacattggtagtgttataattctcattcaggaagggcttattttgtattagagagttattattgtccatcattcagtaaaaaattattgaacaccrattatgtttcagctgctattctaggcatcgaggacacacttgatttttaaaggatcttacattttaggagagacgtgtgtgtgtgtgtatatatatagag

SEQ ID NO: 35149 - DNA, 201 bp, Homo sapiens
aggccacagagtgagaccctgtctctaaagggaaaaaaaaggaaagcctcatggcattgggtttggcagtgatttcttggttataaaaccaaaagagtgarcagggaacaacaacaacaacgtagacaaattggacttcataattaaaaacttgtgcatcaaaggacattatcaacagtaaaaaggcaacccaacataaaa

SEQ ID NO: 35150 - DNA, 201 bp, Homo sapiens
tttgagcccaagaggtcacctaagctgcagtgagctgtgattgcgccactgcactccagcctgggcaacagagcaagacctcttctcaaaaaaagagatcrggggccggccaggcatggtggctcacacaagtaatcccaacactttgggagttgaggtgggcagatcacttgaggtcaggagttcgagaccagcctggcc

SEQ ID NO: 35151 - DNA, 201 bp, Homo sapiens
tagcgctatttacagccagttgggcaatgcttatttctatttgcatgattatgccaaagcattagaatatcaccatcatgatttaacccttgcaaggtaaytaatttaagcttttaaatattcttccttctgaaattagctattactttaaaaaatatttctattcaattaacaaaaactaacttaatacatttaatgagt

SEQ ID NO: 35152 - DNA, 201 bp, Homo sapiens
atgagaatccacagtatgcatttggtacaagtcttgaaaatagtgcaatatactaaaaaggatatttttaaagagatctaaaattcttcctctctcccccratagtaaataagtgagtacgtcaggttaatattatgggaaaccagaagagagctggggatttgggggtgtttattcacctgccttccatttataattttg

SEQ ID NO: 35153 - DNA, 201 bp, Homo sapiens
tcgtctcaaaaaaaaaaaaaaaaaaaaaaaacaacttaagatggtccttccagcttttatagttagtaattacctgtcacctatctcagaagtcttccagkgacttcctatctcacttgaggggaaagccagtattacaatggcctggaagcctccttggtctccccttcccccacatccactacctctctggtcacctct

SEQ ID NO: 35154 - DNA, 201 bp, Homo sapiens
tcatgaaggaaattccagcgctgcttcatcttccagtgctgataattatggcattagccatcctggttagtattaatatattagcactgtcgggccaggcrcggtggctcacgcctgtaatcccagcactttgggaggcctaggcgggcggatcacgaggtcaggagatcgagaccatcctggctaacacagtgaaaccct

SEQ ID NO: 35155 - DNA, 201 bp, Homo sapiens
ggtctcgctttgttgcccaggctggtcttgaagtcctggcttcaagctatcctcccaccttggcctgtcaaagcactaggattataggtgtgagctacctygcccaggctattattcttatacatatgaaatactgcaaactaatatttagttccaaattggcttttgtcttaaaatggttcaccaagtagtaataaaatt

SEQ ID NO: 35156 - DNA, 201 bp, Homo sapiens
tattaagaggtcctgccaactaaccataatatataactgatataatagctaataatgtagccctatgctaactacttctcactgttaccactctagtccayatcaccaatattttttgcctgcatcaccatacaatctttctagctggttttcatactaacacccttgccactctacgttcttccatcagtagccaggatc

SEQ ID NO: 35157 - DNA, 201 bp, Homo sapiens
gggggcggaggttgcagtgagccgagatcgtgccattgcactccagcctgggtgacagagtgagacgtcgtctcaaaaaaaaaaaaaaaaaaaaaaaacamcttaagatggtccttccagcttttatagttagtaattacctgtcacctatctcagaagtcttccagtgacttcctatctcacttgaggggaaagccagta

SEQ ID NO: 35158 - DNA, 201 bp, Homo sapiens
tactaggtcacttataccgtattgatgaacaagccacaaaattgtagaaatgattttgtgcttttgagtccagttctttttagctgtcttaagtgtttttkgtggctgatttctgcttctctctgttttaaggtacttctttgtctgctctgcatcgtggttttagtggctactgagctgtggacatatgtacgttggtac

SEQ ID NO: 35159 - DNA, 201 bp, Homo sapiens
acagttgagcactgcttaagatacactctttacttgatttccaccacaccacaccccacccctccccagcccacccttggggtatccttccaactctctgsctgttgcttctttgccagctcatcttcctccatctaaccagtagattttgaaatgctcagggcttagtcttcctgtcctattctttaggtactttcttcc

SEQ ID NO: 35160 - DNA, 201 bp, Homo sapiens
cagggggcggaggttgcagtgagccgagatcgtgccattgcactccagcctgggtgacagagtgagacgtcgtctcaaaaaaaaaaaaaaaaaaaaaaaamaacttaagatggtccttccagcttttatagttagtaattacctgtcacctatctcagaagtcttccagtgacttcctatctcacttgaggggaaagccag

SEQ ID NO: 35161 - DNA, 201 bp, Homo sapiens
ctatctatatatatttatatttatatatctgtctatatttatatatttattatatataatatatatttatatattatatatttatatttatatatatatatgcactgtcagtatttagcaagatttatattaaatcttagtattaatattagtaatactggttagtattaaatattagcactgtcaatatttagcaagatt

SEQ ID NO: 35162 - DNA, 201 bp, Homo sapiens
agagaaaagaaattccttttctcttttttgttgtattagggtccccagctgactgaatggtgctggcccctacagagggtggatcttccacactcagtcarctgactcacaaaccagtcttccctggaaaccccttcagacacatcagaaggaatgctttgcagttctctaggttttccttagtccagtcaagttgacact

SEQ ID NO: 35163 - DNA, 201 bp, Homo sapiens
tctatctatatatatttatatttatatatctgtctatatttatatatttattatatataatatatatttatatattatatatttatatttatatatatatatgcactgtcagtatttagcaagatttatattaaatcttagtattaatattagtaatactggttagtattaaatattagcactgtcaatatttagcaagat

SEQ ID NO: 35164 - DNA, 201 bp, Homo sapiens
gaggcggagcttgcagtgagccgagatcgcaccactgtactccagcctgggcgacagagcaagattccgtctcaaaaaaaaaaaaaaattatacatatatrtatatttatatatctatctatatatatttatatttatatatctgtctatatttatatatttattatatataatatatatttatatattatatatttatat

SEQ ID NO: 35165 - DNA, 201 bp, Homo sapiens
ccgggcgtggtggcgggcgcctgtagtcccagctactcgggaggctgaggcaggagaacggggtgaacctgggaggcggagcttgcagtgagccgagatcrcaccactgtactccagcctgggcgacagagcaagattccgtctcaaaaaaaaaaaaaaattatacatatatgtatatttatatatctatctatatatatt

SEQ ID NO: 35166 - DNA, 201 bp, Homo sapiens
tttagctactatactcccaaaccttcagccttaaccacctgttaatctactttctgtcttaatagatttgcctattctggacatttcatatatatgtactyatataatgtgtggtctttcatatctggtttctttcacataatgtagcattttcaaggttcatatgtgttgtagcatggtgtcagtatttcatcccttttt

SEQ ID NO: 35167 - DNA, 201 bp, Homo sapiens
tggctaacacagtgaaaccctgtctctactaaaaaaaatacaaaaaattagccgggcgtggtggcgggcgcctgtagtcccagctactcgggaggctgagrcaggagaacggggtgaacctgggaggcggagcttgcagtgagccgagatcgcaccactgtactccagcctgggcgacagagcaagattccgtctcaaaaa

SEQ ID NO: 35168 - DNA, 201 bp, Homo sapiens
taatctactttctgtcttaatagatttgcctattctggacatttcatatatatgtacttatataatgtgtggtctttcatatctggtttctttcacataaygtagcattttcaaggttcatatgtgttgtagcatggtgtcagtatttcatccctttttatggctgaataatattccattgcatggctataccagttttat

SEQ ID NO: 35169 - DNA, 201 bp, Homo sapiens
ttctttttagctgtcttaagtgtttttggtggctgatttctgcttctctctgttttaaggtacttctttgtctgctctgcatcgtggttttagtggctacygagctgtggacatatgtacgttggtacactcagttgagacgtgttttaatcatcagctttctgttcagtttgggatggaattggatgtatttatataagg

SEQ ID NO: 35170 - DNA, 201 bp, Homo sapiens
atgaaggaaattccagcgctgcttcatcttccagtgctgataattatggcattagccatcctggttagtattaatatattagcactgtcgggccaggcgcrgtggctcacgcctgtaatcccagcactttgggaggcctaggcgggcggatcacgaggtcaggagatcgagaccatcctggctaacacagtgaaaccctgt

SEQ ID NO: 35171 - DNA, 201 bp, Homo sapiens
gggggtcccactctgtcacccaggttggggtgcagtggtgtgatcttggctcactgcaacctctgcctcccaggctcaagcgatccacctgcctcagcctyccaaggggctgggatcactggcttgcgctaccacgcctggctaattttttggttatttttttcattacctagcctggtcttgaactcctgagctcaagtg

SEQ ID NO: 35172 - DNA, 201 bp, Homo sapiens
ttaccttatatgatgggcatgaatctagaaacatgaataattatcagactagaaccttctaatttaaatatctaggcttcagcctgccattgttatagttyaatcgaaatgtgtctagctgattaaaatgtctactgaaagatttattaagttttattggccactctggccttgtattaatctaaagaggtctctaatgaa

SEQ ID NO: 35173 - DNA, 201 bp, Homo sapiens
atatggatggagggttttacaattttaacacatttattcacaatgaaagaagactctaatccattgagagcaatcttgccttggatgtgggttggaggcaktgattagaggtggcccacgctggagaggaattaaatggacacttcttagctgacagttttttgattccttgaccagttagtgggtaaaaaagttcagtcc

SEQ ID NO: 35174 - DNA, 201 bp, Homo sapiens
atgggcggcaaagcctaaaatattttctatctggccttttacagaaaaagtttgcctgcctctgtcttaggctgttaaatctgttaagaaatagcccagamtgaatttttttttttttttttttgagacggattctcgctctgtcatccaggcaggactgcagtggtgtgatcctggctcactgcaacctccatctttcag

SEQ ID NO: 35175 - DNA, 201 bp, Homo sapiens
aaattctaatctatgattcacttaacttcctactttataaacactaggtaaagtaatctcacaagctgccaaagaacacatcccaagcagtaatcacagaygatgaagcaccttacaggacccctccaccctcaaacgcgcatgtccagagaagtattaatgccttaatagactactgaaggttaactatttacatcattc

SEQ ID NO: 35176 - DNA, 201 bp, Homo sapiens
gtcaattaagatgttaaaaaattatttccataagagtattaaattctaatctatgattcacttaacttcctactttataaacactaggtaaagtaatctcrcaagctgccaaagaacacatcccaagcagtaatcacagacgatgaagcaccttacaggacccctccaccctcaaacgcgcatgtccagagaagtattaat

SEQ ID NO: 35177 - DNA, 201 bp, Homo sapiens
ttatgatgctgagattatccttaaaagagaaactttgttagaaatacagaagtttctcaatggagaagactggaaaccaggtgccttggatgatgcactargtgatattttaattaattttaagtttcatgattttgaaacatggaagtggcgattcgaagattcctttggagtggatccatataatgtgttaatggtaag

SEQ ID NO: 35178 - DNA, 201 bp, Homo sapiens
cagagtgagacgtcgtctcaaaaaaaaaaaaaaaaaaaaaaaacaacttaagatggtccttccagcttttatagttagtaattacctgtcacctatctcaraagtcttccagtgacttcctatctcacttgaggggaaagccagtattacaatggcctggaagcctccttggtctccccttcccccacatccactacctct

SEQ ID NO: 35179 - DNA, 201 bp, Homo sapiens
tggaactgctggttattactgtagaaagtaacatagttgccaatagtacgactttgtggatgtcacagtcaaaactcaactgcctggctggcacagtggcwcacctgtaatcccagcactttgggaagacaaggcggcgggcagggggatcctttgagctcaggagttcgggactagcctgggcaacatagcaagaccctg

SEQ ID NO: 35180 - DNA, 201 bp, Homo sapiens
atgatggacaataataactctctaatacaaaataagcccttcctgaatgagaattataacactaccaatgttttcagtggtatctgagctgtatgcagaaygaaaaaaatatacagacatacttgacattttacaaggatgtcaaagaaatcttcatcagcctctttgttgtcattagtcatcaggtggctaagtaccgac

SEQ ID NO: 35181 - DNA, 201 bp, Homo sapiens
ttcattctttttgtatgtggctctctagtttacccagaaccatttgttgataaaactgtcttttcccccactgaatggtcttggcacccctgttgcatatyatttgaccacacatgcaagggtttatttctgggatctgtattctattccattggtctatatgtctgtcttttatgccagtactgcactgctttgattaat

SEQ ID NO: 35182 - DNA, 201 bp, Homo sapiens
gatgcttaggtctttggcccactttgagttttgcatatggtattaggtaagggtccaacttcattctttttgtatgtggctctctagtttacccagaaccrtttgttgataaaactgtcttttcccccactgaatggtcttggcacccctgttgcatattatttgaccacacatgcaagggtttatttctgggatctgtat

SEQ ID NO: 35183 - DNA, 201 bp, Homo sapiens
aaattttatatttttatattatgttaaatcgctctatattcttgtctctgctgataaatttgtatttctagtgtttccgtgtaccgtatgatttttatatrtcaaatttttctttggatactctaaccttggtttcttattagttattctagccttggtttttctagtagtaccttgtattttcctgtaataacattgaca

SEQ ID NO: 35184 - DNA, 201 bp, Homo sapiens
atatgtcaaatttttctttggatactctaaccttggtttcttattagttattctagccttggtttttctagtagtaccttgtattttcctgtaataacatwgacatctctgtgttgtaagtatttctttaccagactgcagacttcttggtgcaaggaatacgttttattgatcttaattctctgtcacctgtcacagggc

SEQ ID NO: 35185 - DNA, 201 bp, Homo sapiens
tacagggtggaacagaacctagataaggaaacagatggaaccaaaaatacttaagatggaaatgctggaaaatatttagtttctgatttttttttttttttgagacagagtcttgctctgtcacccaggctggagtgcagtggcgcaatctccgctcactgcaagctccgcctcccaggtttacaccattctcctgcctca

SEQ ID NO: 35186 - DNA, 201 bp, Homo sapiens
taataacattgacatctctgtgttgtaagtatttctttaccagactgcagacttcttggtgcaaggaatacgttttattgatcttaattctctgtcacctrtcacagggctgaggcatagtaaactctcaacaaatgtagcaaatgaagaaatgtgtctattaccagcttatacgaataagagttactcttaagaaggatt

SEQ ID NO: 35187 - DNA, 201 bp, Homo sapiens
ggagttggaggatgcactgagctgtgattgtatcactgtactccagcctgggcaatagagcaagaccctgtctctaaaaataataataataataataatawcccaaaacccaatttatttaaaaaaataattctatttcattatatatattaaaaattgttttagccttatacaggatgctgtgttctttgctcctttgtg

SEQ ID NO: 35188 - DNA, 201 bp, Homo sapiens
aggaatacgttttattgatcttaattctctgtcacctgtcacagggctgaggcatagtaaactctcaacaaatgtagcaaatgaagaaatgtgtctattaycagcttatacgaataagagttactcttaagaaggattattataatttagtgtgtaatagctattcattccttcatttatccaatcctcttaaaaaaatgt

SEQ ID NO: 35189 - DNA, 201 bp, Homo sapiens
tgtcatgtttatccactgatgtgcatttcagcgctcaactcatggtccacactccgttaaaaaatgcaagttgatgatcacaaagttattctaatgtttgraaaatacccactaccctcagcgacttgcctgctgggttggtggtggcagagctaagttcgtaggaagtctgctcccgtgtagaattgtgtgctgaagggt

SEQ ID NO: 35190 - DNA, 201 bp, Homo sapiens
accacgtggacaggatccggtcagcagcccctgtggctagaggaacaccagcacaaacgacagcctcaagtctccttcgagctttgtaaagtatactcttyactctctttctcttctctgcaagaattctgattactacaaaggtgccaacttcaacattcacatttcaacttcaacattcacatttttactgacaattag

SEQ ID NO: 35191 - DNA, 201 bp, Homo sapiens
attctcctgcctcagcctcccaagtagctgggatttacaggtgtgtgccaccacgcctggctaatttttgttgttgttgttgttttattagagactgggtytcaccatgttagccaggatggtcttgatctcctgacctcattatctgcctgcctcggcctcccaaagtcctgggagttagtcgtaagcttttttcctcag

SEQ ID NO: 35192 - DNA, 201 bp, Homo sapiens
atccactgatgtgcatttcagcgctcaactcatggtccacactccgttaaaaaatgcaagttgatgatcacaaagttattctaatgtttgaaaaatacccrctaccctcagcgacttgcctgctgggttggtggtggcagagctaagttcgtaggaagtctgctcccgtgtagaattgtgtgctgaagggttgccatgtgg

SEQ ID NO: 35193 - DNA, 201 bp, Homo sapiens
ccccacccaggttcaagcgattctcctgcctcagcctcccaagtagctgggatttacaggtgtgtgccaccacgcctggctaatttttgttgttgttgttkttttattagagactgggtttcaccatgttagccaggatggtcttgatctcctgacctcattatctgcctgcctcggcctcccaaagtcctgggagttagt

SEQ ID NO: 35194 - DNA, 201 bp, Homo sapiens
atacaaaagtttggctgcacagcaaaaatgcagaaatacctttttacagaatttttttattccattgtttgtgactggtttaaacattctaagaaacatgrttggcaaaatggagtcttgaattctttttttttttttcctaagttgtttctttaaggtttagaaaataaactggttttacaaaccttgcctgagagcaaa

SEQ ID NO: 35195 - DNA, 201 bp, Homo sapiens
acgatctcggctcactgcagcctccgtcccccacccaggttcaagcgattctcctgcctcagcctcccaagtagctgggatttacaggtgtgtgccaccaygcctggctaatttttgttgttgttgttgttttattagagactgggtttcaccatgttagccaggatggtcttgatctcctgacctcattatctgcctgcc

SEQ ID NO: 35196 - DNA, 201 bp, Homo sapiens
tattgttaaaatttccttttttttttgagacagagtctcgctctgttgtccaggccggagtaccgtcgtgcaatcttggctcactacaacctctgcctccygggttccagcaattctccctgactcagcctcccgagtagctggattacaggcacctgccaccatgcctggctaatttttgtatttttagtagagatgggg

SEQ ID NO: 35197 - DNA, 201 bp, Homo sapiens
agacatgcttaactatgatgctgcttcaggaacaatgagaaaatctcaggtattaaaaaaaattcgtgcatgtgtgtgagaccttatcagtcccatgatgsaaacagtctagctctgttgttttgcacagagctatgagggtcatggatccatgattagcaattatgcagaatattttcttgacactgttaatctaaaatt

SEQ ID NO: 35198 - DNA, 201 bp, Homo sapiens
ctgggtatggtggcacatgcctataatcccagctacttgggagggtgaggcaggagaatttttgaacccaggaggcagaggttgcagtgagccaagatcgygccattgcactccagcctgggcgacaagagcgaaactccgtcacacacacacacacacacacacacacacacacacgcaaagacagtgcccagtatacag

SEQ ID NO: 35199 - DNA, 201 bp, Homo sapiens
gtgatccgcttgccttggcctcccaaagtgctgggattacaggtgtgagccaccgcacctggccaaaatttctatttttaagaagtcactgttttcacttkgggaagtgaaaacttcccagacttaatgcattaatttagttttaattcacttaccaaagtgaaaacatcaagaaaacataaatttaataacttataacat

SEQ ID NO: 35200 - DNA, 201 bp, Homo sapiens
tatttttagtagagacggggtttcactgtgttagccgggatggtctcgatctcctgaccttgtgatccgcctgcctcagcctcccaaagtgctgggattasaggtgtgagccaccatgcctggccaagtgtaatggctgtaaataacacttttattactgctggtgatgttgtggttttatggggtgtgatggggctcagc

SEQ ID NO: 35201 - DNA, 201 bp, Homo sapiens
gctctgtcacccaggctggagtgcagtggcgcaatctccgctcactgcaagctccgcctcccaggtttacaccattctcctgcctcagcctcctgagtagytgggactacaggcacccgccaccatgcccggctaattttttgtattttcagtagagacagggtttcaccgtgttagccaggatggtcttgatctcctgac

SEQ ID NO: 35202 - DNA, 201 bp, Homo sapiens
ttaaaagcctcaagtggcttcttgttacacatagagtaaaaaccacactctttactgtggtctaccactccctccccgcctccccgcctccccgcctcccwgcctcccagctcattcccaagacccagctgttctggcctcctttctgttccttgactgcttcagcttcttctccactcagggcttctatacttgctgtgt

SEQ ID NO: 35203 - DNA, 201 bp, Homo sapiens
aaaaggaaaaggtgtgtattagataggcttcagtcaagcgtaaggtataggacagttgtccatgtgttcagtgttagtgaatgaacaatatgtattttaartaaggtgtccttaaacaggaatgtacagaaacacacataaaacaaggttatatattgatcaattgataaaaatgttatgacaggtttgcacgaaccaaac

SEQ ID NO: 35204 - DNA, 201 bp, Homo sapiens
actcaagagtgtggtctgcggcatcaccaggagcttgttagaagtggagatctcagacctacctcagatttactgaatcagaatcgtttttttttttttttaacaaactcttcagcaggtttagatgtagctttgtttggaggaagtgtgagattcgttttaggatttctcaaggagttccagccttcaatcagtgaccat

SEQ ID NO: 35205 - DNA, 201 bp, Homo sapiens
gctgggattacaggcatgcgccaccacgccctgctacttttgtatttttagtagagacagggtttctccatggtggtcaggctgggctggagctcccaacytcaggtgatgcgcccgccttggcctcccaaggtgctgggattacaagcgtgagccaccgtgcccggcctttagctactattatacatattataatttaaa

SEQ ID NO: 35206 - DNA, 201 bp, Homo sapiens
tgcccaggactcagtcttttgtcctcataataaatcttctggtgatcttacccagatcatctcttttaaaccccgtctacattctgatcgttctcaaatgyagtcccactgctctccttagcttcatcctgcatatttataatctctacttggacatcagtggacacttcagatttactatatccaaacaaaactcttgat

SEQ ID NO: 35207 - DNA, 201 bp, Homo sapiens
gttcgggactagcctgggcaacatagcaagaccctgtctctataaaaaagaaaaaaaaatctcaactgcttgacaggctttttattcacttccctttgtakaatgcctcctgtagtaccttttttcccctccaaatctccgtttcccccatcctaacctcctcacagtgttagaaatgcaaattactcttaatttctctgt

SEQ ID NO: 35208 - DNA, 201 bp, Homo sapiens
ttaccctcctgtcttccatcatttctgcattgctaatctctatccctggagaaatctatggaactgctggttattactgtagaaagtaacatagttgccartagtacgactttgtggatgtcacagtcaaaactcaactgcctggctggcacagtggctcacctgtaatcccagcactttgggaagacaaggcggcgggca

SEQ ID NO: 35209 - DNA, 201 bp, Homo sapiens
atgagccaccatgcccagcccaagaagtagagtttcttttatactgactttggcctaaaaaaacagattttcatggaggaaaaaaaaacctagatttttartaagactattttatatacttttttacattgatcaagtacattatttttaccaaacaacattgtttcccactacatccatggttatgtataaaaaaacgcc

SEQ ID NO: 35210 - DNA, 201 bp, Homo sapiens
gtaaattttatttgtagagaaggggtctccctgtgttgtccaggcttgtctctgactcctgggctcaaaggatcttcccatcttggcctcccaaagtgctrggattacaagcgtgagccattgcgcctggctccaaatctgatttgagtgtaaaaagttagacacaccataagctgtaggtttattactgggtggtgaaaa

SEQ ID NO: 35211 - DNA, 201 bp, Homo sapiens
ctcaagtgacccgcccttgtcggcctcccaaagtgctgggattacaggcatgagccattgtgcccagcctatatagtgtgaagcttttaggaaaatcagaycagggtagacagctgttaaaaacaatgtttaaatggaataatgttgaatgtttacaggctgtaagaactattgtatacacaaaataatacacaaagtttg

SEQ ID NO: 35212 - DNA, 201 bp, Homo sapiens
cggcggctgcctgtccgccgcggttgcgcgcgttccggggaggtgcttggcccagagagcggcctacggagaaggcacagcgagggcaaagcgagacctgrgcgcacgttgaattctgttggctttggttatctctgaaaactttaagcataatttgaataaatgctgtcagcagaatagctcggatttagttgtagttaa

SEQ ID NO: 35213 - DNA, 201 bp, Homo sapiens
attgattatagacctgatggtggagcaggtgatgccgatttccattataggggccaaatgggccccactgagcaaggcccttatgccaaaacgtatgaggrtagaagagagattttgagagagagagatgttgacttgagatttcagactggcaacaagagccctgaagtgctccgggcatttgatgtaccagacgcagag

SEQ ID NO: 35214 - DNA, 201 bp, Homo sapiens
cctgggaggcagaggttgcagtgagccgagattgcgccattgcactctagcctgggcaaaaagagtgaaactctgtctcaaaaaaacaaaaaacccaaaaataggggggagattcgttaaaatacctgtttttaaattgactttattgagctataaatcacatactatataatccacccatttaaagtgtccagttccacc

SEQ ID NO: 35215 - DNA, 201 bp, Homo sapiens
cctcccaccttggcctcccaaagtgctgggattacaggtataagccaccacatgctcctcttgagttttatagttttagttctgatgcttaggtctttggyccactttgagttttgcatatggtattaggtaagggtccaacttcattctttttgtatgtggctctctagtttacccagaaccatttgttgataaaactgt

SEQ ID NO: 35216 - DNA, 201 bp, Homo sapiens
tttaggtttaaaaccagtgactttttatgctcatctaaagtcacagggaaggaatagaagttgtatatatgttggctctgatattatctgtcttccttcakaagactgtgtgaaggatcctatgctcgcttttgttcatctcgttctttgcacagggtctggcatattctcaatagaagtttattaaacaagtgaatgaat

SEQ ID NO: 35217 - DNA, 201 bp, Homo sapiens
tcctcccaccttggcctcccaaagtgctgggattacaggtataagccaccacatgctcctcttgagttttatagttttagttctgatgcttaggtctttgrcccactttgagttttgcatatggtattaggtaagggtccaacttcattctttttgtatgtggctctctagtttacccagaaccatttgttgataaaactg

SEQ ID NO: 35218 - DNA, 201 bp, Homo sapiens
ttttatgctcatctaaagtcacagggaaggaatagaagttgtatatatgttggctctgatattatctgtcttccttcataagactgtgtgaaggatcctakgctcgcttttgttcatctcgttctttgcacagggtctggcatattctcaatagaagtttattaaacaagtgaatgaatgtatatatgaattaatatccat

SEQ ID NO: 35219 - DNA, 201 bp, Homo sapiens
gctttcagtctgtcaccattgagtatgatgtcagcggtacatgtttcatatatggcttttattatgttctggtagtttcctactgttgctaatttttaagkttttatcatgaaagagttttgaattgtcatttttttcctgtatgtgttttttccctttattctgtttatattatgtgttacactgattgattttcacatg

SEQ ID NO: 35220 - DNA, 201 bp, Homo sapiens
tttttaattaaaaatttataacagtctggtttggatgaatggtaaagacactctttgaatgaaggtcttttggatgtgtaggcctaaccttcataggtaayggcctctcctggttcccttttggtgttgggcagctagcttttgcacagcatcaggctgaagtcgccaagatggagccattaaacaatgtgtgtgccaaaa

SEQ ID NO: 35221 - DNA, 201 bp, Homo sapiens
tctttgcagtcttaaaaattgaagcccacaaacagctcttacttaaggtgattatatttattgatacttacatattaggagttaaaacaaatttaaaacayacgagtactgtacacgcaagcatgcatcccctgagtctgagtgaggctgtcactctagcatctggaatgctccgttgtatattcaggaggggacagtgaa

SEQ ID NO: 35222 - DNA, 201 bp, Homo sapiens
atatggagccaaggttgagagctattgtgctaatggaagagacagaccgataaatggctaatttcattgcttccaatgccagaagaatatacagggcacayggggaacaggagtatttaatttagcctagagtgatttttattgtacaactagaccgtaagctgtttatgggcagggcccagggctttgtcatcttggggt

SEQ ID NO: 35223 - DNA, 201 bp, Homo sapiens
tacatattaggagttaaaacaaatttaaaacatacgagtactgtacacgcaagcatgcatcccctgagtctgagtgaggctgtcactctagcatctggaaygctccgttgtatattcaggaggggacagtgaaaaagacaaataataatgtctttgtattatgaaaagttttgatctcatagatctcctgaaagtctcagg

SEQ ID NO: 35224 - DNA, 201 bp, Homo sapiens
agaatcacttggggagcttaaaaagatcgaagtgcctgggtcctaatcccagagattctgatttaatggttttgggatatggccaaaacattgggagtttyagaagctcctcgggtgattctaatatggagccaaggttgagagctattgtgctaatggaagagacagaccgataaatggctaatttcattgcttccaatg

SEQ ID NO: 35225 - DNA, 201 bp, Homo sapiens
ggcgggcggatcacttgaggtcaggagttcaagaccagcctggccaacatgatgaaaccccgtctctactaaaaatacaaaaattagctgggcgtggtagsgggcacctttaatcccagctactcgggaagctgaggcaggagaatcgcttgaacccgggaggtggtggttgcagtgagccgagattgtgccaccgcacac

SEQ ID NO: 35226 - DNA, 201 bp, Homo sapiens
attgagtcctcaggaaaatgtatttcttttccttacagagtttctgctatggtgctggaaaatcagttcatgtgctgagacatataggcggtcctgagagmgaacctccccaggcacttcggccacgggatagaagacggcaggaggaaattgattatagacctgatggtggagcaggtgatgccgatttccattataggg

SEQ ID NO: 35227 - DNA, 201 bp, Homo sapiens
ttaaacaatgtgtgtgccaaaaagatggactggactggaagtatctggggtaaggtgtttgtgcacttgtccttattttgaatagaaattctgagaatgaragaacatagaacaaagagaatgataaaataacaggaggctttccatgactgaatctttaatatcagaagaacatgcaagaagcattttaggtttaaaacc

SEQ ID NO: 35228 - DNA, 201 bp, Homo sapiens
gttaattttctaaaacttcaaatctgtgaattaacacagttaacaacaacaacaaaaacggacacaaaacaacctccaaattggattttttttttttttttgagacggagtcttgctgtgtcacccaggctggagtgcggtggtgctatctccgctcacggcaacctccgccttccgggttccagcgattctcctgcctca

SEQ ID NO: 35229 - DNA, 201 bp, Homo sapiens
aatttaaaaatcagcattacagggagtctacttaaaacttaagataatttaaaactcattggtgggtggtcagggagggtcaaaaccaaagtaatgtcttrtttgggaatgaaatgcaacattaaaagaaatgatcagtgttttgtctgtttctctaaacagaatggtttagaagttcatggacctataaggatgacccat

SEQ ID NO: 35230 - DNA, 201 bp, Homo sapiens
ttccagcttttatagttagtaattacctgtcacctatctcagaagtcttccagtgacttcctatctcacttgaggggaaagccagtattacaatggcctgraagcctccttggtctccccttcccccacatccactacctctctggtcacctcttctccctccgtgcttactctactttagccataagggctcctgactgt

SEQ ID NO: 35231 - DNA, 201 bp, Homo sapiens
atagctcggatttagttgtagttaattttctaaaacttcaaatctgtgaattaacacagttaacaacaacaacaaaaacggacacaaaacaacctccaaawtggattttttttttttttttgagacggagtcttgctgtgtcacccaggctggagtgcggtggtgctatctccgctcacggcaacctccgccttccgggtt

SEQ ID NO: 35232 - DNA, 201 bp, Homo sapiens
gatctgtgctccttatttgttgcctacttgccctttgcaaagagaacatggggaagcaggccagctctgcactgtaatgtattatagctgataaatgcaarcttgatcaaaacaactagctccttaccttgattccgatgacagcactaggctagaaacttaacccttatattatactttgactctaactaatgttgaatt

SEQ ID NO: 35233 - DNA, 201 bp, Homo sapiens
gtgacttcctatctcacttgaggggaaagccagtattacaatggcctggaagcctccttggtctccccttcccccacatccactacctctctggtcacctyttctccctccgtgcttactctactttagccataagggctcctgactgttccttgaacttgagagcctttgtacctgctgttcattctacagtcttcattt

SEQ ID NO: 35234 - DNA, 201 bp, Homo sapiens
ctacttgggagggtgaggcaggagaatttttgaacccaggaggcagaggttgcagtgagccaagatcgtgccattgcactccagcctgggcgacaagagcraaactccgtcacacacacacacacacacacacacacacacacacgcaaagacagtgcccagtatacagtaggtatttggtaaatgttgaacaaatgaatg

SEQ ID NO: 35235 - DNA, 201 bp, Homo sapiens
agaagaaataaaattagatttaacttttatgtaaaatacaatttaacagtagtttgttagagcagatggtaattcatatgaaccttcatgggaagccagcrtatgagcatgacagaaatttctatctttgaagagatcagagagaaggcatcactgaaggcccggagctctagggaaggtacagtagagccctaaaggatt

SEQ ID NO: 35236 - DNA, 201 bp, Homo sapiens
tccagcttttatagttagtaattacctgtcacctatctcagaagtcttccagtgacttcctatctcacttgaggggaaagccagtattacaatggcctggragcctccttggtctccccttcccccacatccactacctctctggtcacctcttctccctccgtgcttactctactttagccataagggctcctgactgtt

SEQ ID NO: 35237 - DNA, 201 bp, Homo sapiens
atgcctccagcatcttcatgcagccatggagtatcgttaccaggatcagtctgactgacacctcagcttatctctacgcaggctgcccacaggtcactgtrgctgtagtttcatcttttccacagctattactacgcctgcatccttattgttccttttactttgtttacttagagaaaactgaagactgccagggcaatt

SEQ ID NO: 35238 - DNA, 201 bp, Homo sapiens
tttttagagatctatacatagagaataccatgatgaggaagaagagagttgggtgtcttccttaactgcagacaggacatcagtcagcactttacattagyctttctgattatcaaaagcattcctcattttaaactttttaaaaagcaatgcataaattttgtacctgtccttagcagacttcacagacatcaggtgtcc

SEQ ID NO: 35239 - DNA, 201 bp, Homo sapiens
catcataccttatagtatacatgaaacataatgtaatccaggttgtaatttagaactttttttttttttttagctgagcacttaatgtaattaattccagyttatgactcttaaaaaacattggccattagagaaatagttctatttgcccatccaaatcacctgaatgactttttgaaagaataggggtccacatcccca

SEQ ID NO: 35240 - DNA, 201 bp, Homo sapiens
ataaagaaataaaatgtttctatactctgttttaggcaaaatatggtatttcaggggaaaaggatgtcagtcctgacttgtcatgtgctgatgaaatatcrgaatgttatcacaaacttgattctttaacttataaggttagtttttttattgataaattttatatttttatattatgttaaatcgctctatattcttgtc

SEQ ID NO: 35241 - DNA, 201 bp, Homo sapiens
atgggatgagggcaagggcaacgtcattaagtttcctttttaaaatactttccaaactccaccataattacgttaagaacctgtactaggtcacttatacygtattgatgaacaagccacaaaattgtagaaatgattttgtgcttttgagtccagttctttttagctgtcttaagtgtttttggtggctgatttctgctt

SEQ ID NO: 35242 - DNA, 201 bp, Homo sapiens
tattttttattttttgtggatatggggtcttgctgttacccaggctggtctcaaactcctggcctcaagcagtcttctcaccttggcctcccaaagttatrggattacaggtgtgagccaccatgcctaaccatatcactttttcagaccaccctaatttaaactgtaatttgaccctgccagcccacccacattcagcac

SEQ ID NO: 35243 - DNA, 201 bp, Homo sapiens
ctcacttgaggggaaagccagtattacaatggcctggaagcctccttggtctccccttcccccacatccactacctctctggtcacctcttctccctccgkgcttactctactttagccataagggctcctgactgttccttgaacttgagagcctttgtacctgctgttcattctacagtcttcatttatatatcaatca

SEQ ID NO: 35244 - DNA, 201 bp, Homo sapiens
atgtttatccactgatgtgcatttcagcgctcaactcatggtccacactccgttaaaaaatgcaagttgatgatcacaaagttattctaatgtttgaaaartacccactaccctcagcgacttgcctgctgggttggtggtggcagagctaagttcgtaggaagtctgctcccgtgtagaattgtgtgctgaagggttgcc

SEQ ID NO: 35245 - DNA, 201 bp, Homo sapiens
tccctgggaccgtaaaataaggctgaaaaagtcttcatctggtactgtcggaccctttgtggtagcaggtggtggagcacatctttgatcatctaatctgratccctagaagtttatgagagagattaaaagacatactgtgggaaagaaagcaccaagctatgttaaatctctcagtcacaacaagaaaacgcagttgta

SEQ ID NO: 35246 - DNA, 201 bp, Homo sapiens
aaagcattattttgcaaaaagtcctttagcccaaagtcagtgtctctgttttgatctctttgtaaaagaactctctgttcatccattctctttccctgggrccgtaaaataaggctgaaaaagtcttcatctggtactgtcggaccctttgtggtagcaggtggtggagcacatctttgatcatctaatctggatccctag

SEQ ID NO: 35247 - DNA, 201 bp, Homo sapiens
ctgtgggagtactgtggagtttggtgaggtataataacatttatataattataacccagcactggaccctggatttgaaagagtttggagcttgctacaayggatttgggtgggaactttttagatatgtttgattactaagacttcacattacattaaacagttaaaatgtaattttgtactttatagcataaatcacct

SEQ ID NO: 35248 - DNA, 201 bp, Homo sapiens
aagaccctatcctctcagagaagcccctgagagccattagtacttttgccctggagaggcagtttaggtagagccagtctgggttctaccacttactagcytggtggtcttaggcaagttactttgtgtgatctgtaaaatgaagatgagtgaagataagagtactacttccagtagttttgtgaggattaaattaatgta

SEQ ID NO: 35249 - DNA, 201 bp, Homo sapiens
ttttatgttgggttgcctttttactgttgataatgtcctttgatgcacaagtttttaattatgaagtccaatttgtctacgttgttgttgttgttccctgytcactcttttggttttataaccaagaaatcactgccaaacccaatgccatgaggctttccttttttttccctttagagacagggtctcactctgtggcct

SEQ ID NO: 35250 - DNA, 201 bp, Homo sapiens
ctctatatatatacacacacacacacgtctctcctaaaatgtaagatcctttaaaaatcaagtgtgtcctcgatgcctagaatagcagctgaaacataatyggtgttcaataattttttactgaatgatggacaataataactctctaatacaaaataagcccttcctgaatgagaattataacactaccaatgttttcag

SEQ ID NO: 35251 - DNA, 201 bp, Homo sapiens
cagaaagggatgtggaagaacatgggtatgctgagaaagagtttggggatccaggagcagacattaagaagaaatattactcgtcatccctccatggtctrttcagtgttttttgttatcgattttttagctattacccaagtaaagcagttgtcgcataaaacaaaaagaactcagatgtgccaagggaaattctcttcc

SEQ ID NO: 35252 - DNA, 201 bp, Homo sapiens
gttttttggcttgtgattacaggattatgtggttgacgggtatttttttgttaggtgacattagttctatagtcatagtttagtctctgaaactgaaattwtcagcagagtcttcaccatctgtttttgtttcatgtgctccctcaggaaagttatgctctttgacttttgctgcttttgtcttcaaatagtagtgtttga

SEQ ID NO: 35253 - DNA, 201 bp, Homo sapiens
tttttgttaggtgacattagttctatagtcatagtttagtctctgaaactgaaattatcagcagagtcttcaccatctgtttttgtttcatgtgctccctmaggaaagttatgctctttgacttttgctgcttttgtcttcaaatagtagtgtttgaaaaactagtacagaaattttcaaagtttctgttctcaggacctc

SEQ ID NO: 35254 - DNA, 201 bp, Homo sapiens
acctttgcttacccactacccctttatcctcctttaaagttcttcatagcaagcataattacctaatacaacacacatatactctctctctatatatatayacacacacacacgtctctcctaaaatgtaagatcctttaaaaatcaagtgtgtcctcgatgcctagaatagcagctgaaacataatcggtgttcaataat

SEQ ID NO: 35255 - DNA, 201 bp, Homo sapiens
atggctcactgcagccttgaactcctaggctcaagtgatcctcccacctcagcctcctgtgtagctgggactacaggtgtgtgccattaatttaaaaaaawttttttatagagatggggtctcactatgctgcccagtctagtcttgaactcctgggctcaagcaatcctcccaccttggcctcccaaagtgctgggatta

SEQ ID NO: 35256 - DNA, 201 bp, Homo sapiens
gtgtgatcctggctcactgcaacctccatctttcaggttcaagtgattcttcagcctcagcctcccagtagctgagactataggcatgcgtcaccacaccyggctaatttttgtatttttagtagagatgggggtttcaccatgttggccaggctggtctcgaactcttgacctcaagtgatccacccgccttggcctccc

SEQ ID NO: 35257 - DNA, 201 bp, Homo sapiens
atccaggcaggactgcagtggtgtgatcctggctcactgcaacctccatctttcaggttcaagtgattcttcagcctcagcctcccagtagctgagactayaggcatgcgtcaccacacctggctaatttttgtatttttagtagagatgggggtttcaccatgttggccaggctggtctcgaactcttgacctcaagtga

SEQ ID NO: 35258 - DNA, 201 bp, Homo sapiens
cttcggcctcccaaagtgctgggattacaggtgtgagccactgcgcctggctgctgatttatttttcatagacacgggggtctatgttgcccaggttggtyttgaactcctagcctcaagcgatcctcctgcctcagcctcccaatgtgctgggattacaggaatgagccaccatgcccagcccaagaagtagagtttctt

SEQ ID NO: 35259 - DNA, 201 bp, Homo sapiens
aggaagacaaagcttaatgacaactaaggttctagctgacatctttctttcatatttaatttttgtgagttttcatctgttttctgtttgtttatgtgtcrtaggttcttgacctaaccacatgggttttgttttttgtttttatattagaacttagaaaagtttgttttacagcagtattatggaacagaagagaccatt

SEQ ID NO: 35260 - DNA, 201 bp, Homo sapiens
cagcctccacctcctgggctcaagtggtcctcctgcctcagcctcttaagcagttgggactacaggtgtgtgccagcatgcttgctgttttttttttttttgagacagagtcttgctctgtcactcaggctggagtccagtggcttggtctcagctcactgcaatctctgcctcccaggggttcaagtgattctcctgcct

SEQ ID NO: 35261 - DNA, 201 bp, Homo sapiens
gcagcctccacctcctgggctcaagtggtcctcctgcctcagcctcttaagcagttgggactacaggtgtgtgccagcatgcttgctgttttttttttttttgagacagagtcttgctctgtcactcaggctggagtccagtggcttggtctcagctcactgcaatctctgcctcccaggggttcaagtgattctcctgcc

SEQ ID NO: 35262 - DNA, 201 bp, Homo sapiens
atcatagctcagtgcagcctccacctcctgggctcaagtggtcctcctgcctcagcctcttaagcagttgggactacaggtgtgtgccagcatgcttgctyttttttttttttttgagacagagtcttgctctgtcactcaggctggagtccagtggcttggtctcagctcactgcaatctctgcctcccaggggttcaag

SEQ ID NO: 35263 - DNA, 201 bp, Homo sapiens
tttcaccatgttggccaggctggtctcgaactcctgacctcaggtgatccgcccgcctcggcctcccaaagtgctgggaatacaggcatgagccaccatgyccggcccagtctcttctttagtttactttcatgttgaatttcacacattttagatattagataagttgtgttaagtttaaaactaggaaaataagctatt

SEQ ID NO: 35264 - DNA, 201 bp, Homo sapiens
tttagtaagactattttatatacttttttacattgatcaagtacattatttttaccaaacaacattgtttcccactacatccatggttatgtataaaaaamcgccattgtcaattaagatgttaaaaaattatttccataagagtattaaattctaatctatgattcacttaacttcctactttataaacactaggtaaag

SEQ ID NO: 35265 - DNA, 201 bp, Homo sapiens
ttacttacgtgcctgtaacaatgtaattttaggccaggtgcagtggctcatgcctacagtcctagcactttggaaggttgagggaggatgatcgcttaagytcagttgttcaaggctatgtactaaaaataaaactagccaggcatggtggtacacgcctgtagtcccagctacttggagggctgaggcaagaggatcgtg

SEQ ID NO: 35266 - DNA, 201 bp, Homo sapiens
tgtgcataattgaaaacttaggaactgtttacttctggaattttccatttaatattttcagactgcagttgactgtgggtaactgaaacctcagaaagcawaaccgtagatggggttaccactgtagagttactgtgttaccttgatccaaaacctttacctgaatgattcctttaaccattcccggtaggctttctctgt

SEQ ID NO: 35267 - DNA, 201 bp, Homo sapiens
gacaggatccggtcagcagcccctgtggctagaggaacaccagcacaaacgacagcctcaagtctccttcgagctttgtaaagtatactcttcactctctytctcttctctgcaagaattctgattactacaaaggtgccaacttcaacattcacatttcaacttcaacattcacatttttactgacaattagaattaaca

SEQ ID NO: 35268 - DNA, 201 bp, Homo sapiens
tgttgcctacttgccctttgcaaagagaacatggggaagcaggccagctctgcactgtaatgtattatagctgataaatgcaaacttgatcaaaacaactrgctccttaccttgattccgatgacagcactaggctagaaacttaacccttatattatactttgactctaactaatgttgaattgattttatggttacaga

SEQ ID NO: 35269 - DNA, 201 bp, Homo sapiens
gcacttgcagttacattcaccacatttgtaacggagccattgaagcatattggaaaaggaactggggaatttattaaagcactcatgaaggaaattccagygctgcttcatcttccagtgctgataattatggcattagccatcctggttagtattaatatattagcactgtcgggccaggcgcggtggctcacgcctgta

SEQ ID NO: 35270 - DNA, 201 bp, Homo sapiens
tgctaaagtttaatttatcagttaggcacagtaagagattaacagcaataactaataaaatagaaaaattataacaatacacaataataacagttatgtastgtggctggaattttttcacttgaggtgcgacagcaaaactagcatgaatttctttctcctcctgtacaatttcatggatacaagttttgttcttaacat

SEQ ID NO: 35271 - DNA, 201 bp, Homo sapiens
aagcatacgaaataagttgcagcctcccgacttataccctggtacttctagtctaaaacaggatttgactctactaatccaggttagtcttgcctttcccrttactcatgtgctttcgttgaaaccaaagactttttcttttgtgcccatttctactcactgcctggccgtctgcacgacgatctgtgtttcctggtagtt

SEQ ID NO: 35272 - DNA, 201 bp, Homo sapiens
ggagctagtactgctagctactcaggaggctgaggtgggagaactgtttgagcccaggagttcaaggttacagtgagctttaactcactggattgcaccaytgcactccagtctgggtgacagagcaagactctgtaacttaaaaaaaaaagaaaaaagctggccgggcacgatggctcaagcctgtaatcccagcacttt

SEQ ID NO: 35273 - DNA, 201 bp, Homo sapiens
ccccatcactttcagctgtgttcacttgtcctccaatcattgatacctctctctaccttttccaaaatacagattctacaacttggagggacggaggtggkcgtggccctgatgagctggagggcccggactccaaacttcatcatggtcatgatccccggggtgggctacagccttcaggcccaccccagttccctccct

SEQ ID NO: 35274 - DNA, 201 bp, Homo sapiens
cctcagttctggtaagctggaggggttatgggtgggaatatctccatccccagagaaggtcaagtgctggagggagcgggtggagaacctggcctaggggrcctgctgctgggtgcgtttctgcagggagcaagggtagaagaattgggaggtggagtagagaggaaaagttagggtcagtggcagagccaggcagatgct

SEQ ID NO: 35275 - DNA, 201 bp, Homo sapiens
aaacagaaaaatagtaaaagagagtctgcatcataataaagtgttcttttcccacctagttctggttttcctgagatacttatttccattctttctgtctktctcttcaggagcgagactcctccagtacctcccccaccaccctatctggccagttatccaggctttcctgagaatggagcccctgggcccccaatctct

SEQ ID NO: 35276 - DNA, 201 bp, Homo sapiens
ttatttccattctttctgtctgtctcttcaggagcgagactcctccagtacctcccccaccaccctatctggccagttatccaggctttcctgagaatggrgcccctgggcccccaatctctcgctttcctctggaggaaccagggccccgtccactcccctggcccccaggcagtgatgaagtggccaagatacaaactc

SEQ ID NO: 35277 - DNA, 201 bp, Homo sapiens
tatttccattctttctgtctgtctcttcaggagcgagactcctccagtacctcccccaccaccctatctggccagttatccaggctttcctgagaatggarcccctgggcccccaatctctcgctttcctctggaggaaccagggccccgtccactcccctggcccccaggcagtgatgaagtggccaagatacaaactcc

SEQ ID NO: 35278 - DNA, 201 bp, Homo sapiens
tcttccgcacccagcgcgtcgacctttaccagcaggtgaaggagaaacccttgtggccccaactctaaattcgagttgccacctgatttcctgtccttccrtctcatcgctgacctctcactgtgactcactctttaacacatgcctgtcccctaggcctccccaccagatgccctgcgctggatacctaagccttgggag

SEQ ID NO: 35279 - DNA, 201 bp, Homo sapiens
gaatggactgagagacctgtcgtccggcttgcttagggagctggaggtatcgagtaaagaaacactggtgatggacatttttaatgaggataggaaaacgragatggctctggccttggccctctgttttctggcccatggttacagggtgctaaggtggctccataatgctttttctcagttcttcatatggtaaaacag

SEQ ID NO: 35280 - DNA, 201 bp, Homo sapiens
gcccccaccccgctgagggagttcctcttgccccctacccccggggcttgtatatagattataaatatataagggggaaaggggtgggcggggaggggttstggggctggggcctcacttcccctcctcccccttcccctggtcccctgtccctggggctgtttgttaaaaaagagtaataaaaggatttaaaaaaaaaaa

SEQ ID NO: 35281 - DNA, 201 bp, Homo sapiens
taccacaacctccacctcctgggtttaagcgattatcctgcctcagcctcctgagtagctgggattacaggcatgcgccaccacacccggctaattttgtrtttttagtagagacagggtttctccattttggtcaagctggtcttgaactcctgacctcaggtgatccgcctgcctcggcctgccaaagtgctgggattg

SEQ ID NO: 35282 - DNA, 201 bp, Homo sapiens
atggcaagccagccactcacctgcaagaagtcagtcatgccttggagaaaggcagggacaccaggcatcgccacagtgatggtgggagaagccacaccagrccctccagcccctggccctgcaggccctagcaggttccccagaagctgagagaactgaagatcagccatggagggttgaggggtgggtggaggctgggca

SEQ ID NO: 35283 - DNA, 201 bp, Homo sapiens
gaaaaagtttcctcattaaacgaggggaggggagactgaataacaagagctcccaccatctctacatagtttgattccaggcatgacggggaaacctggayagagagagaggcttagggaagaggaaaaccaaccttgcgtctcttggcaggcataccactgaggtaggcatcactcagagggggctgcggtttcaccttc

SEQ ID NO: 35284 - DNA, 201 bp, Homo sapiens
agaaaaccagagctgctacaggaggtaagggatgggtttgagattgtgcttcactgcactcttactcgtgaaaattcttctgggttatgttttctctgttytctttcctgtttctttcactgtgtttttactccagaattctcagtattagtctcccatgtgtctcccttgttgtccccacaccctgtgtcaccccactct

SEQ ID NO: 35285 - DNA, 201 bp, Homo sapiens
tactctgtctcaaaaaaaaaaaaaaacaaacatcaaaactggcttgtacaatttagcgtgctgagtagaacacaacagtgttccaaggaagtattaatttwaaaaagttcacacaagattaagggacacactacctaatggagacaatgtagagagaaagcagccagaaaaatccgacttttatttcttaaatactgtgaa

SEQ ID NO: 35286 - DNA, 201 bp, Homo sapiens
caggtgaaggagaaacccttgtggccccaactctaaattcgagttgccacctgatttcctgtccttccgtctcatcgctgacctctcactgtgactcactstttaacacatgcctgtcccctaggcctccccaccagatgccctgcgctggatacctaagccttgggagcggacagggccgccacctcgagaagggccctc

SEQ ID NO: 35287 - DNA, 201 bp, Homo sapiens
tcgtgtcgagccactcccactctagaatcctgcttttatcccagcatctttgctttctatgttgctcagtcgccctatgtctgctttttcatttttcctgktcctcgtctcctttctcccccaaccccgtttttcttcttgggcctctgcccccttacttcgttgtctacatcctttttttttttgccattcctgtttcca

SEQ ID NO: 35288 - DNA, 201 bp, Homo sapiens
cccaaatttcttgttacagatgcttctacccatggtagactcacagctgcctgtggtgaactttggctccctgccgccagcaccacctcctgccccacctyccctttctctgttacctgtgggccctgctctgcagccccccagcctggctgtgcggcccccacctgctcctgctactcgggtgctgccttcacctgccag

SEQ ID NO: 35289 - DNA, 201 bp, Homo sapiens
tcctaagacggcctgggcagaaacctctcggcctccagagacagagccgggacctcctgccccaaagcctcccctacccccacctcaccggggccccgccrggaactggggcccccctggggactacccagtgagtgtctccaataagggattgagagggtcagctgtgggaaattggtgtcagctgagtaattgaagcgg

SEQ ID NO: 35290 - DNA, 201 bp, Homo sapiens
ggtctcaaagaagaccaggataatgagtttgtcaccacccagagagatcaaccccaaagcctgggtcgttgcatcctgcaagtagcgacagttgatttgtygtaaaagagatgatagaaagcatagtaactgattcccctggccctgctgggtcttgccaattgacaggatcgtgggggtcctccctgcaagcccccagca

SEQ ID NO: 35291 - DNA, 201 bp, Homo sapiens
tactgttgttctaatggtttcatagaaagttaatgccaccaccataggctcatgagaggccatgaagtgctttaatgggtcttaaatgggaggggcttcartagaatagatgttgaatagaatattttagtcttaagggagctagagatgagacgtgagattcctggggtgttcatggagtgtctattgttggactagatc

SEQ ID NO: 35292 - DNA, 201 bp, Homo sapiens
cagacagtgggggctcaagctcagagccatttgaccgtcatgcacctgctatgttacgggaacggggcactccaccggtggatccaaagttggcctgggtrggagatgtcttcaccgccacacccgctgaaccccgcccacttacctcacctctgcgccaggctgcggatgaggatgacaaggggatgaggtgagtcttgg

SEQ ID NO: 35293 - DNA, 201 bp, Homo sapiens; identical to SEQ ID NO: 8146

SEQ ID NO: 35294 - DNA, 201 bp, Homo sapiens; identical to SEQ ID NO: 8147

SEQ ID NO: 35295 - DNA, 201 bp, Homo sapiens; identical to SEQ ID NO: 8148

SEQ ID NO: 35296 - DNA, 201 bp, Homo sapiens
caggcattgtggctcacgcctgtaatcccagcacttagggaggccgaggtgggcagatcaactgagttcaggagttcgagaccaccatggctaacgtggtraaaccccatttctactaaaaatacaaaaaagtagccggcgtggtggcgctcgcctgtagtcccagctactcgggagactgaggcaggagaaacgcttgaa

SEQ ID NO: 35297 - DNA, 201 bp, Homo sapiens; identical to SEQ ID NO: 8120

SEQ ID NO: 35298 - DNA, 201 bp, Homo sapiens
acggagcttctcaagtcagcggccaggcatggaacggcagaatcggcgccctggcccagggggcaaggctggcagcagtggcagcagcagtggaggaggcrgtgggggtcctggaggaaggaccgggccaggacgaggcgacaagaggagctggccctctcccaagaaccgaaggtgggtaggaacaaacaaatttattgt

SEQ ID NO: 35299 - DNA, 201 bp, Homo sapiens; identical to SEQ ID NO: 8124

SEQ ID NO: 35300 - DNA, 201 bp, Homo sapiens
agccagagagccaaggatttgagtaaacggagcttctcaagtcagcggccaggcatggaacggcagaatcggcgccctggcccagggggcaaggctggcarcagtggcagcagcagtggaggaggcggtgggggtcctggaggaaggaccgggccaggacgaggcgacaagaggagctggccctctcccaagaaccgaagg

SEQ ID NO: 35301 - DNA, 201 bp, Homo sapiens; identical to SEQ ID NO: 8125

SEQ ID NO: 35302 - DNA, 201 bp, Homo sapiens
atggagtggctcatgcctgtaatcccagcattttgggaggctgaggcaagaagattgcttgagcccagcagttcgagactagcctcggcaactggatgccrtctctgccaaaacaaacagaaaaatagtaaaagagagtctgcatcataataaagtgttcttttcccacctagttctggttttcctgagatacttatttcc

SEQ ID NO: 35303 - DNA, 201 bp, Homo sapiens; identical to SEQ ID NO: 8128

SEQ ID NO: 35304 - DNA, 201 bp, Homo sapiens; identical to SEQ ID NO: 8126

SEQ ID NO: 35305 - DNA, 201 bp, Homo sapiens
atgcataggaacccttagaaggactcaaaaacacctggactttaatagggaagagaataggttgtaagcagaagttgggaaacataacttgtgggaaaaartaacgatttagtggatactggagctaatgctctgttttctccagtcgtcctccagaggagcgtcccccggggcttcccctgcctcccccacctcccagca

SEQ ID NO: 35306 - DNA, 201 bp, Homo sapiens
tatgtattcattgctggttctttgctttccagtctgtgcatctgtatgcataggaacccttagaaggactcaaaaacacctggactttaatagggaagagrataggttgtaagcagaagttgggaaacataacttgtgggaaaaagtaacgatttagtggatactggagctaatgctctgttttctccagtcgtcctccag

SEQ ID NO: 35307 - DNA, 201 bp, Homo sapiens
gttttctatggcagtgctgggccttccagttctcaggtaggccccgcttcccattgcatgaccccttcagtgaataataatttttttctgcctggtatgtrtttataatcaagcctttctacgttgcagagttgtgagataccactttgtcacatcatttttctccctactttttgcttctatgggtgggatggtgatctt

SEQ ID NO: 35308 - DNA, 201 bp, Homo sapiens
ctatgggtgggatggtgatcttttttcttgaccacagatactaaagctgtttcaaccgtgctcctctcctgcagatctctgggggagccatggactctcarttacatccaaacagtggaggcttccgccctgggacaccctcactgcacccttacaggtaagactcgatgcctgtggatcacagaagtacttggagatgtg

SEQ ID NO: 35309 - DNA, 201 bp, Homo sapiens
ctagaagctagtggacttaaggcattgctaggactctggcttcctaacagcttttctccccacaatttattttcagatcacagcccctatacctacccccsggcccagcccctccctcagcactgctctctggggtagctctcaagggccagtttctggatttctccacaatgcaagctacagagctggggaagttgccgg

SEQ ID NO: 35310 - DNA, 201 bp, Homo sapiens
cctttccctcccccaatgcactttactgtgtgcccaatccaggagctgccccgggagcagcctctgccccctggccccattggcacagaacgatcacagcrtacagaccgaggcacagagcctggccccattcggccatcccatcgacctggtcccccagtccagtttggcactagtgacaaggtctgtgtgggctggatc

SEQ ID NO: 35311 - DNA, 201 bp, Homo sapiens
gacccccactttgaggagccggggccaatggtgagaggggtgggtgggactcctcgggactctgccggggttagtccctttccccctaaacgtcgggagcrgcctcccagaaaaccagagctgctacaggaggtaagggatgggtttgagattgtgcttcactgcactcttactcgtgaaaattcttctgggttatgtttt

SEQ ID NO: 35312 - DNA, 201 bp, Homo sapiens
actggaaagcggttggtagggtgttagagtcaagaacacccacctatgtattcattgctggttctttgctttccagtctgtgcatctgtatgcataggaayccttagaaggactcaaaaacacctggactttaatagggaagagaataggttgtaagcagaagttgggaaacataacttgtgggaaaaagtaacgatttag

SEQ ID NO: 35313 - DNA, 201 bp, Homo sapiens
gacctctcactgtgactcactctttaacacatgcctgtcccctaggcctccccaccagatgccctgcgctggatacctaagccttgggagcggacagggcygccacctcgagaagggccctcccgacgggcagaggagcctgggtcccgaggggacaaggagcctgggttgcccccaccccgctgagggagttcctcttgc

SEQ ID NO: 35314 - DNA, 201 bp, Homo sapiens
cgcgtctactgccttcccacggtgttccagcagaacggcacaactaacccacagccaaacacacacacacacacacacacacacacacacacacacacacmcaccaccccgcggctccgcccccgacttccccacggaccgtcacttccggtctcccccaaacctgccaccgacggccacttccgtttccccgatagtatt

SEQ ID NO: 35315 - DNA, 201 bp, Homo sapiens
ggctaaggcaactggaaagcggttggtagggtgttagagtcaagaacacccacctatgtattcattgctggttctttgctttccagtctgtgcatctgtaygcataggaacccttagaaggactcaaaaacacctggactttaatagggaagagaataggttgtaagcagaagttgggaaacataacttgtgggaaaaagt

SEQ ID NO: 35316 - DNA, 201 bp, Homo sapiens
ttacacaactccagcaaccgggccccaaatccactatctgtgggcaaaatacaaggagggaatgctggcacgtggcagccctgcacatgcaacaggccccmcttgcccccgcctggccagcccctgacctgtgcaatgcagcacatgcgcagcaatgctattaaactgctcttggagaaattccaggtttgtccggatgat

SEQ ID NO: 35317 - DNA, 201 bp, Homo sapiens
ttatttcttaaatactgtgaaggaagaggggggaaacggtcccctgatgaggaagggccatagagcaaagagctaaggatcatcagcaaaggcccgctggscattggggaagcgctggggactgtagttggggtcttcctgcagtcgtttttgtatatcagaccggagctaaagagaaaaagtaagcaggttggagaaacg

SEQ ID NO: 35318 - DNA, 201 bp, Homo sapiens
gcttggtctgtctccccacctctaccagcatctgctgagctatgagccaaaccagggatttacagggtagggagggtgggataggcagcggcattagatcrgaggaatgagatggacagacctgggctgtgggctaggagggcagtcagctggcctagggtagcccgggctggtgtcagggtaaggagaggaagggaggga

SEQ ID NO: 35319 - DNA, 201 bp, Homo sapiens
aagccaacaggccccccagccaagaaagctatctctgagttgccctgatttgaagggaaaagggatgatgggattgaaggggcttctaatgacccagatayggaaacagaagacaaaattgtaagccagagtcaacaaattaaataaattaccccctcctccagatcaagtcagcttagtttttatttgggtgattttttt

SEQ ID NO: 35320 - DNA, 201 bp, Homo sapiens
gatgccgcctttcgtgagtcttggtgtcttgtcttggaacgattacactggaagctggagagctaggaatcaggacttagtctttgacctatgagatagargggagggtgggaggatgattgatagcaggcttaaggagctagaagggtatatgactgtccctctgagcagctactgttggacccttttacagatgtatcc

SEQ ID NO: 35321 - DNA, 201 bp, Homo sapiens
aaagttgccattgcccggcgtatgccacctccagccaaccttccaagcctgaaagccgagaacaaaggcaatgaccccaatgtctcactagtgccaaaagwcggaacaggatgggcaagcaaacaggagcagtccgaccccaagaggtagacagaggcttgggggacctagagtgatgggtattttaacttgaacttcagg

SEQ ID NO: 35322 - DNA, 201 bp, Homo sapiens
caagaggtagacagaggcttgggggacctagagtgatgggtattttaacttgaacttcagggagcattggggcttggtttagtccagccacgtctgagccrgagacgaagaggtccctttcttacctattgcaggttccttgttaaatgactaaggaatggtactaaactttagctttttgtcttggagagagagcatgaa

SEQ ID NO: 35323 - DNA, 201 bp, Homo sapiens
ctagagtgatgggtattttaacttgaacttcagggagcattggggcttggtttagtccagccacgtctgagccagagacgaagaggtccctttcttacctrttgcaggttccttgttaaatgactaaggaatggtactaaactttagctttttgtcttggagagagagcatgaaaaaatagacaacagcctacaaaggatg

SEQ ID NO: 35324 - DNA, 201 bp, Homo sapiens
ccccgcgcacccggccaggtgagtctgggtgaaccgtgcgctgacgcccttttccggcgcgggagaggtggtggcggtggcggtggcggcggcggcggcgktggtgggccggggggaggagaagctgccattagccgccgccattttgtcctcctgctgccgggcctgcttgcccctccccctccggtacctctactccgg

SEQ ID NO: 35325 - DNA, 201 bp, Homo sapiens
ttcgtgtcgagccactcccactctagaatcctgcttttatcccagcatctttgctttctatgttgctcagtcgccctatgtctgctttttcatttttcctkttcctcgtctcctttctcccccaaccccgtttttcttcttgggcctctgcccccttacttcgttgtctacatcctttttttttttgccattcctgtttcc

SEQ ID NO: 35326 - DNA, 201 bp, Homo sapiens
ccctcctggtgtgcatccctctggtaagggggcatgggaggagtgagaaacaggaaagtcccctcagtcttaggcattggatattagggtcttactgtgaytctggtacgataggttttgcccatcatagtgatgagggaagggcatatgcttggcactgctgagatagctctgttgcaaaaatgggcttagttaagaaat

SEQ ID NO: 35327 - DNA, 201 bp, Homo sapiens
cctctcccaagaaccgaaggtgggtaggaacaaacaaatttattgtggtttaaaaattggaggagggggaaaaagcctgagggaaagataagtttgggtgkagtggagattgtggcctgaggggccatgggctctagaatgtcagtaggatttccatgtctggctaaggcaactggaaagcggttggtagggtgttagagt

SEQ ID NO: 35328 - DNA, 201 bp, Homo sapiens
gggccaggacgaggcgacaagaggagctggccctctcccaagaaccgaaggtgggtaggaacaaacaaatttattgtggtttaaaaattggaggagggggraaaagcctgagggaaagataagtttgggtggagtggagattgtggcctgaggggccatgggctctagaatgtcagtaggatttccatgtctggctaaggc

SEQ ID NO: 35329 - DNA, 201 bp, Homo sapiens
gagaaacgcttgaacccaggaggtggaggttgtagtgagccgagattgtgccatcgcactccagcttaggcaacgagcgaaactccgtctcaaaaatgaatgaatgaatagcacaactccatctcaaaaatgaatgaatgaatgaaagaagcagtggtccttcatttgccaggatttatttggggtgggttgattctcttg

SEQ ID NO: 35330 - DNA, 201 bp, Homo sapiens
tacaaaaaagtagccggcgtggtggcgctcgcctgtagtcccagctactcgggagactgaggcaggagaaacgcttgaacccaggaggtggaggttgtagwgagccgagattgtgccatcgcactccagcttaggcaacgagcgaaactccgtctcaaaaatgaatgaatgaatagcacaactccatctcaaaaatgaatg

SEQ ID NO: 35331 - DNA, 201 bp, Homo sapiens
tgcaaaaatgggcttagttaagaaataagcagtggttggccaggcattgtggctcacgcctgtaatcccagcacttagggaggccgaggtgggcagatcarctgagttcaggagttcgagaccaccatggctaacgtggtgaaaccccatttctactaaaaatacaaaaaagtagccggcgtggtggcgctcgcctgtagt

SEQ ID NO: 35332 - DNA, 201 bp, Homo sapiens
gaaagtcccctcagtcttaggcattggatattagggtcttactgtgactctggtacgataggttttgcccatcatagtgatgagggaagggcatatgcttrgcactgctgagatagctctgttgcaaaaatgggcttagttaagaaataagcagtggttggccaggcattgtggctcacgcctgtaatcccagcacttagg

SEQ ID NO: 35333 - DNA, 201 bp, Homo sapiens
aactgtttgagcccaggagttcaaggttacagtgagctttaactcactggattgcaccactgcactccagtctgggtgacagagcaagactctgtaacttaaaaaaaaaagaaaaaagctggccgggcacgatggctcaagcctgtaatcccagcactttgggaggccaaggtgggtggatcacaaggtcaagagttcgag

SEQ ID NO: 35334 - DNA, 201 bp, Homo sapiens
ttgcactccagcctgggtgacagagcaagactctgtctcaaaaaaaaatcctgtctcacaagaaatacataaataaaaatgaaaactatttcctataggcyaagactgaagaaagtactgttgttctaatggtttcatagaaagttaatgccaccaccataggctcatgagaggccatgaagtgctttaatgggtcttaaa

SEQ ID NO: 35335 - DNA, 201 bp, Homo sapiens
gaggcgggcagaacatgaggtcaggagttcaagatcagcctggccaacatagtgaaacccgtctctactaaaaatacaaaaattagccaagtgtggtggcwtgtgcttgtagtcccagctgcttgggaggctgaggtagtagaatcgctttaacccgggaggcagagatttctgtgagccaagaccatgccattgcactcc

SEQ ID NO: 35336 - DNA, 201 bp, Homo sapiens
accaggataatgagtttgtcaccacccagagagatcaaccccaaagcctgggtcgttgcatcctgcaagtagcgacagttgatttgttgtaaaagagatgrtagaaagcatagtaactgattcccctggccctgctgggtcttgccaattgacaggatcgtgggggtcctccctgcaagcccccagcacctgaagatgagg

SEQ ID NO: 35337 - DNA, 201 bp, Homo sapiens
ttgagagctctatgctagtgtgcacctggaatatgctcccaactcaaaatacaggttttttatttatatataaagtgctttcgcacaaaaaatacaaacarcaggctgggcgcggtggcccacgcctgtaattccagcactttgggaggccaaggcgggtggatcacaaggtcaggagttcgagaccagcctggccaatat

SEQ ID NO: 35338 - DNA, 201 bp, Homo sapiens
agtgtgcacctggaatatgctcccaactcaaaatacaggttttttatttatatataaagtgctttcgcacaaaaaatacaaacatcaggctgggcgcggtygcccacgcctgtaattccagcactttgggaggccaaggcgggtggatcacaaggtcaggagttcgagaccagcctggccaatatggtgaaaccctgtctc

SEQ ID NO: 35339 - DNA, 201 bp, Homo sapiens
gaaaagttagggtcagtggcagagccaggcagatgctgaccctttttctctttcccagacccccactttgaggagccggggccaatggtgagaggggtggrtgggactcctcgggactctgccggggttagtccctttccccctaaacgtcgggagcggcctcccagaaaaccagagctgctacaggaggtaagggatggg

SEQ ID NO: 35340 - DNA, 201 bp, Homo sapiens
ccccctaaacgtcgggagcggcctcccagaaaaccagagctgctacaggaggtaagggatgggtttgagattgtgcttcactgcactcttactcgtgaaawttcttctgggttatgttttctctgttttctttcctgtttctttcactgtgtttttactccagaattctcagtattagtctcccatgtgtctcccttgttg

SEQ ID NO: 35341 - DNA, 201 bp, Homo sapiens
tggactgagagacctgtcgtccggcttgcttagggagctggaggtatcgagtaaagaaacactggtgatggacatttttaatgaggataggaaaacgaagrtggctctggccttggccctctgttttctggcccatggttacagggtgctaaggtggctccataatgctttttctcagttcttcatatggtaaaacagtat

SEQ ID NO: 35342 - DNA, 201 bp, Homo sapiens
  misc_feature (1)...(201): n = A,T,C or G, or insertion/deletion polymorphism (see Tables 1-2)
cacagcaaccctgctggcatccaacaggctctggcccagcttagtagccgtcaagggagtgtaactgcaccagggggtcatccaaggcacaagcctgggcntccccaagcccctcagggcccctctcctaggcccccaacccgatacgagccccagagggtcaacagcggcctcagttctggtaagctggaggggttatgg

SEQ ID NO: 35343 - DNA, 201 bp, Homo sapiens
ggcacagaagtgagtgagggtgggagggtgtgtctgagctgggacttttttgagcactggtcataccccccacctgctctgggttgagtctggagctgttytctcacttggctgtcccctttctgcagtttgtatgtgtgcatcagtcaggtattggggtgctttctaccctgacttaactagctccttctccactcctct

SEQ ID NO: 35344 - DNA, 201 bp, Homo sapiens
ggccaggagtgagctccgggttctgggctggggcacgctcctccacttcttctgcctccatgggctcccggggaggtgcttcactttcaactggttctgaygtttgagagctcaaggctactggctccggggtcacagccggtggctgcgggggcggctgactgtgctgcggttggggccctcctcgacactgaaggtagg

SEQ ID NO: 35345 - DNA, 201 bp, Homo sapiens
attattacttgtagggaattactctttgtagacaggcacaaagggcagagtgtttatactaggaggatgctggatttttacttagatttccttgacaaagktgtctgggggaaaggagggaacatggcatttgagctatgagggagctaagtagatcatggttgcttaagaagagtgggcagtttacatagactggaggaa

SEQ ID NO: 35346 - DNA, 201 bp, Homo sapiens
attggcacagaacgatcacagcgtacagaccgaggcacagagcctggccccattcggccatcccatcgacctggtcccccagtccagtttggcactagtgrcaaggtctgtgtgggctggatctgggtatcctgagttgggtggagagaagggaaggactaaaggtgggacatagaggacacatgtctgtcacgggacaat

SEQ ID NO: 35347 - DNA, 201 bp, Homo sapiens
cgggatagtaaggtctgtatatccctgatcatgtgctgagccatcaccagccgtacccggggctcactctacaatgagagaaggtttatcagggtaggttrcagatgaagccatgagttctaccacctactaaatcaggtcccagccatctctcagccaggtccaccccacctcccagcctccttctcccagatccccttc

SEQ ID NO: 35348 - DNA, 201 bp, Homo sapiens
agggcaagtccttagagatccagaaacccgctggtgagagtcctgcaaagatgcttctgatggttgaaagctaggcatgcatggggcatacgttttagagytctttaaagggaagtggctgtagtagaaataccaaaagactagaggagatttcccaactttacactgggtcctttaaagggggtgtgggctctgggtgaa

SEQ ID NO: 35349 - DNA, 201 bp, Homo sapiens
agagaagggaaggactaaaggtgggacatagaggacacatgtctgtcacgggacaatgtctcctgccttcttgtgatcacaggactcagacttacgcctartggtaggagacagcttgaaagcagagaaggagctaacagcatcagtcactgaggtaagtgggagtaagagtttggtggaaaggcccaagatttctgggga

SEQ ID NO: 35350 - DNA, 201 bp, Homo sapiens
ccctgatgaggaagggccatagagcaaagagctaaggatcatcagcaaaggcccgctgggcattggggaagcgctggggactgtagttggggtcttcctgyagtcgtttttgtatatcagaccggagctaaagagaaaaagtaagcaggttggagaaacgctggccaagtccctatgatcccagcaagcacacaaggccat

SEQ ID NO: 35351 - DNA, 201 bp, Homo sapiens
tcagcaaaggcccgctgggcattggggaagcgctggggactgtagttggggtcttcctgcagtcgtttttgtatatcagaccggagctaaagagaaaaagyaagcaggttggagaaacgctggccaagtccctatgatcccagcaagcacacaaggccatccctcagaagctaacatttccccccccaagcacactgtcaa

SEQ ID NO: 35352 - DNA, 201 bp, Homo sapiens
gtgctttgggagtgttaggtgagaggatcgcttgaagccaggagttcaagaccagcctgggcaacacagcaagaccccccacctctacaaaaaaaaaaaawttttttagttgggtgtggactgtgcatctgtggtcccagctactctggaggttgtggtgggaggatcagttgagcccaggagttggaggtcacagtgagc

SEQ ID NO: 35353 - DNA, 201 bp, Homo sapiens
aatgtctcctgccttcttgtgatcacaggactcagacttacgcctagtggtaggagacagcttgaaagcagagaaggagctaacagcatcagtcactgagrtaagtgggagtaagagtttggtggaaaggcccaagatttctggggaagattgctgggagtgaccagggcgtccaggatgccagacatccctctccacgag

SEQ ID NO: 35354 - DNA, 201 bp, Homo sapiens
ggcattggggaagcgctggggactgtagttggggtcttcctgcagtcgtttttgtatatcagaccggagctaaagagaaaaagtaagcaggttggagaaasgctggccaagtccctatgatcccagcaagcacacaaggccatccctcagaagctaacatttccccccccaagcacactgtcaaatagcccggggtggcac

SEQ ID NO: 35355 - DNA, 201 bp, Homo sapiens
cagttgagcccaggagttggaggtcacagtgagctatgatcgtgccactgaactccatcctgggcaacagagcgagacttttaaaaggaaaaaaaaaaaaragtaggggaggatggatggggaataccaagtccttgcaaagtggtgagaggagtaagaatgacaagacttcattggtggatctagacttcggagggaagg

SEQ ID NO: 35356 - DNA, 201 bp, Homo sapiens
tctggcttcctaacagcttttctccccacaatttattttcagatcacagcccctatacctaccccccggcccagcccctccctcagcactgctctctgggktagctctcaagggccagtttctggatttctccacaatgcaagctacagagctggggaagttgccggctggaggagttctctaccctccaccttccttcct

SEQ ID NO: 35357 - DNA, 201 bp, Homo sapiens
acatgaggtcaggagttcaagatcagcctggccaacatagtgaaacccgtctctactaaaaatacaaaaattagccaagtgtggtggcatgtgcttgtagycccagctgcttgggaggctgaggtagtagaatcgctttaacccgggaggcagagatttctgtgagccaagaccatgccattgcactccagcctgggtgac

SEQ ID NO: 35358 - DNA, 201 bp, Homo sapiens
caacatagtgaaacccgtctctactaaaaatacaaaaattagccaagtgtggtggcatgtgcttgtagtcccagctgcttgggaggctgaggtagtagaaycgctttaacccgggaggcagagatttctgtgagccaagaccatgccattgcactccagcctgggtgacagagcaagactctgtctcaaaaaaaaatcctg

SEQ ID NO: 35359 - DNA, 201 bp, Homo sapiens
acatagtgaaacccgtctctactaaaaatacaaaaattagccaagtgtggtggcatgtgcttgtagtcccagctgcttgggaggctgaggtagtagaatcsctttaacccgggaggcagagatttctgtgagccaagaccatgccattgcactccagcctgggtgacagagcaagactctgtctcaaaaaaaaatcctgtc

SEQ ID NO: 35360 - DNA, 201 bp, Homo sapiens
aatactcatatttcccctcaggggcccatgaagaggttgactacactgaaaagctcaagttcagcgatgaggaagatgggcgagactctgatgaggagggwgctgagggccagtgagttagggccatcaggggagaagaggagggggtcttggtttgtattttggtaatatactcttagaggagtatattagttgcagctg

SEQ ID NO: 35361 - DNA, 201 bp, Homo sapiens
tctcgcatgtggttatacaacatgccatatttcattttcttttttgtgtacagccgttttccccgtgtggcgggcccccgaggctcagggccaccaatgcrcttagtagagcctgtgggtcgtccctctattctcaaagaggataatctcaaagagtttgatcagttggatcaggagaatgatgatggttgggcaggtaag

SEQ ID NO: 35362 - DNA, 201 bp, Homo sapiens
acacgccaacacacccagctaattttttgtgtgtttttagtagagatggggtttcacatgttggccaggatggtctcgatctcttgacctcgtgatccgcycgcctcagcctcccagagtgctgggattacaggcgtgagccaccgcgcccagccagagtcttccacttttatagcatgtcctcaggaaatgtcttctgtc

SEQ ID NO: 35363 - DNA, 201 bp, Homo sapiens
gaaggcgggaaacctgatggtctggtacctgtcagagccttccactttttttttttttgagacggagtctcattctgtcacccaggctggagtgcagtggygcaatctcggctcactgcaacctctgcctcctgggttcaagcgattttcctgcctcagcctccagagtagcgggactacaggcacacgccaacacaccca

SEQ ID NO: 35364 - DNA, 201 bp, Homo sapiens
cttcctctgtatttccctctgcattaagttctatccatgtggaggacagaacaaaatcagcctcactcacaaaacatcagaaaacgttctactggaatacraacaaagggatcaataaaaagaaaatctgaggccaggtgcggtggctcatgcctgtaataccagcactttgggaggccgaggagggcacatcacctgagg

SEQ ID NO: 35365 - DNA, 201 bp, Homo sapiens
ttcatggaggcacatgagcaagtttaagtctcagtcttatatgatggagtgtagtggtgccagaactgacctccttggggaataagcagttattctgtagsggggtgagtttgaaggcgggaaacctgatggtctggtacctgtcagagccttccactttttttttttttgagacggagtctcattctgtcacccaggctg

SEQ ID NO: 35366 - DNA, 201 bp, Homo sapiens
ccttgttaaatgactaaggaatggtactaaactttagctttttgtcttggagagagagcatgaaaaaatagacaacagcctacaaaggatgacaaaattawtttgtccttatatttgtaaatggtagcaatgggcatgatttcagtcctgagtctccaccagttggagaagtcagggaggcatctcaggtgtgaataacct

SEQ ID NO: 35367 - DNA, 201 bp, Homo sapiens
ctaccagatgtcagatcactgcttcaaggtgcttaaaggtgcagggtggtaaggctggggataaatgaagtagaaggcagttgttttggtttattggactrtcagtgatagtgttctatcatttgtatatctgaaggagggaaggttttgtctggaatcttaggttgtagtctaataccatttcttggcagagtactgtag

SEQ ID NO: 35368 - DNA, 201 bp, Homo sapiens
taaagggggtgtgggctctgggtgaacaccagttatcctcctacaaaggcgtgtctgtggttccctgtctttggacacgtaagaattggaggaaaataaakgtggatttgggaaactttgaggccagcttgcttcttgcaggctcatgatcaaccaatctcacataaaagtattgaatgttacatatctcagccttcttga

SEQ ID NO: 35369 - DNA, 201 bp, Homo sapiens
gctgatcctgctcttctcgccagcaactattctcaccttgaatgttcatgtgcatcatgaccacgggttccacactctggtgggaaatccggatgaccctygggtggctggtggctggcgggggagctggacctggcgggggagccccctcagctgaggactcgacattggtagaagacggagccacggatgaggcctgcc

SEQ ID NO: 35370 - DNA, 201 bp, Homo sapiens
tgctggatttttacttagatttccttgacaaaggtgtctgggggaaaggagggaacatggcatttgagctatgagggagctaagtagatcatggttgcttragaagagtgggcagtttacatagactggaggaaaagacaccagagggcctcatatctgagtccctaatgataatgcaatggagtttttaagtttctgtta

SEQ ID NO: 35371 - DNA, 201 bp, Homo sapiens
cctcctctttatgcaaataacctccgcatgctccgcgcgcccggcccttttttttttttttttaaactaaagacagccctggaagtagagggttagggtakaaagtgccccgccctttatgcaaattaaggggcgtgtctaggcgcggagggaggtgggaggtgggagggggtgctcccgggggcggcggttgcccggatg

SEQ ID NO: 35372 - DNA, 201 bp, Homo sapiens
ctccacattatctggcccctcaacctccccctctctagagtacctgaggctcaggggaagctctttctgctccctgaacttccattggctcctcaggaagyggctgtgaaattaaagaacaccatacttcctctcagatctctccagttctctcaagtaccctgaccccatcgcccaacaggtcccttacctgggggggat

SEQ ID NO: 35373 - DNA, 201 bp, Homo sapiens
tagaactgcccgaagaatgcctacgctgcgtggtgcggacgaaacgcttcccggggcctttggattggtctgtctagccacctcatttgcatgacgtaatwtaataactggaaggccccgcccctctggtgcatttccccgctccaaccacctcctcaaactcacggcaaagggatgcgagagctggaactcttaccaggc

SEQ ID NO: 35374 - DNA, 201 bp, Homo sapiens
ccacacctggctgaacctgcaccaaggactgagagacaagataacacaaagatcccaaaatcaagaatcataagactgggagtggaggaggcagctgcctygaccagacccaggagaggaaaggaatagagaagggttactcacaaaactctcccgcacatactcttctagccccgtgatcaatgtgtgggttgccatctg

SEQ ID NO: 35375 - DNA, 201 bp, Homo sapiens
aaaatacaaaaattagccaagtgtggtggcatgtgcttgtagtcccagctgcttgggaggctgaggtagtagaatcgctttaacccgggaggcagagattyctgtgagccaagaccatgccattgcactccagcctgggtgacagagcaagactctgtctcaaaaaaaaatcctgtctcacaagaaatacataaataaaaa

SEQ ID NO: 35376 - DNA, 201 bp, Homo sapiens; identical to SEQ ID NO: 8140

SEQ ID NO: 35377 - DNA, 201 bp, Homo sapiens
gcacttagggaggccgaggtgggcagatcaactgagttcaggagttcgagaccaccatggctaacgtggtgaaaccccatttctactaaaaatacaaaaaagtagccggcgtggtggcgctcgcctgtagtcccagctactcgggagactgaggcaggagaaacgcttgaacccaggaggtggaggttgtagtgagccgag

SEQ ID NO: 35378 - DNA, 201 bp, Homo sapiens
cacttagggaggccgaggtgggcagatcaactgagttcaggagttcgagaccaccatggctaacgtggtgaaaccccatttctactaaaaatacaaaaaagtagccggcgtggtggcgctcgcctgtagtcccagctactcgggagactgaggcaggagaaacgcttgaacccaggaggtggaggttgtagtgagccgaga

SEQ ID NO: 35379 - DNA, 201 bp, Homo sapiens
acttagggaggccgaggtgggcagatcaactgagttcaggagttcgagaccaccatggctaacgtggtgaaaccccatttctactaaaaatacaaaaaagtagccggcgtggtggcgctcgcctgtagtcccagctactcgggagactgaggcaggagaaacgcttgaacccaggaggtggaggttgtagtgagccgagat

SEQ ID NO: 35380 - DNA, 201 bp, Homo sapiens
aaacggagcttctcaagtcagcggccaggcatggaacggcagaatcggcgccctggcccagggggcaaggctggcagcagtggcagcagcagtggaggagscggtgggggtcctggaggaaggaccgggccaggacgaggcgacaagaggagctggccctctcccaagaaccgaaggtgggtaggaacaaacaaatttatt

SEQ ID NO: 35381 - DNA, 201 bp, Homo sapiens
acctcattttcttcatctttaaaatgaaaggttcagagtcaatgaattcccagggccccttcccctaacatgtcactaggggctcttacccagtggttatrtaatggcaagaaggtaccactgcctggctgggccgggggacaggaagatgaggtgaatggcaagccagccactcacctgcaagaagtcagtcatgccttg

SEQ ID NO: 35382 - DNA, 201 bp, Homo sapiens
tggctgcataagaagctgccccacaaggccgctcaccatctgggccaacgaggcattggtacccagaccggcgccctgctggatagagagcaagggagaayttcagacctgcccttccatgcaccaccacaggagtctctccctagactgttacgcactagaactccccgacccttgctcaccagtgtcccagagactggg

SEQ ID NO: 35383 - DNA, 201 bp, Homo sapiens
cactggtgatggacatttttaatgaggataggaaaacgaagatggctctggccttggccctctgttttctggcccatggttacagggtgctaaggtggctycataatgctttttctcagttcttcatatggtaaaacagtatttcatctggaggcgattttttccaggagccaatacaggagcaagtttaggaaaagatgg

SEQ ID NO: 35384 - DNA, 201 bp, Homo sapiens
ccacatgaggcattttcgaccctctctccgtcttgttctccagttgcccctcgccatggcctgcagagtctcgggaaagttgccattgcccggcgtatgcsacctccagccaaccttccaagcctgaaagccgagaacaaaggcaatgaccccaatgtctcactagtgccaaaagacggaacaggatgggcaagcaaacag

SEQ ID NO: 35385 - DNA, 201 bp, Homo sapiens
tcccaactttacactgggtcctttaaagggggtgtgggctctgggtgaacaccagttatcctcctacaaaggcgtgtctgtggttccctgtctttggacaygtaagaattggaggaaaataaatgtggatttgggaaactttgaggccagcttgcttcttgcaggctcatgatcaaccaatctcacataaaagtattgaat

SEQ ID NO: 35386 - DNA, 201 bp, Homo sapiens
tgactaaggaatggtactaaactttagctttttgtcttggagagagagcatgaaaaaatagacaacagcctacaaaggatgacaaaattaatttgtccttrtatttgtaaatggtagcaatgggcatgatttcagtcctgagtctccaccagttggagaagtcagggaggcatctcaggtgtgaataaccttcccattctg

SEQ ID NO: 35387 - DNA, 201 bp, Homo sapiens
tagaaggcagttgttttggtttattggactatcagtgatagtgttctatcatttgtatatctgaaggagggaaggttttgtctggaatcttaggttgtagyctaataccatttcttggcagagtactgtagctcacgcctataatcccaacacttagggaggcttggggtggaggatcgcttgagcctagggagtttgaga

SEQ ID NO: 35388 - DNA, 201 bp, Homo sapiens
ccttttgaggatgtggctggcacagaagtgagtgagggtgggagggtgtgtctgagctgggacttttttgagcactggtcataccccccacctgctctggkttgagtctggagctgttctctcacttggctgtcccctttctgcagtttgtatgtgtgcatcagtcaggtattggggtgctttctaccctgacttaactag

SEQ ID NO: 35389 - DNA, 201 bp, Homo sapiens
ccaatgcactttactgtgtgcccaatccaggagctgccccgggagcagcctctgccccctggccccattggcacagaacgatcacagcgtacagaccgagscacagagcctggccccattcggccatcccatcgacctggtcccccagtccagtttggcactagtgacaaggtctgtgtgggctggatctgggtatcctga

SEQ ID NO: 35390 - DNA, 201 bp, Homo sapiens
gggttgatatatttctccctgtttcccgacaggtacgccaggatctgccatccccttcggatttttattctactcctctgcagcctggtggccaaagtggmtttctcccttcaggggctcctgcccagcaggtatattgtatcttcacacttccccttcatttgatttctctgtccagttgctggctttgattttccctgg

SEQ ID NO: 35391 - DNA, 201 bp, Homo sapiens
gccattgcactccagcctgggtgacagagcaagactctgtctcaaaaaaaaatcctgtctcacaagaaatacataaataaaaatgaaaactatttcctatrggccaagactgaagaaagtactgttgttctaatggtttcatagaaagttaatgccaccaccataggctcatgagaggccatgaagtgctttaatgggtct

SEQ ID NO: 35392 - DNA, 201 bp, Homo sapiens
gcctcagttctggtaagctggaggggttatgggtgggaatatctccatccccagagaaggtcaagtgctggagggagcgggtggagaacctggcctagggrccctgctgctgggtgcgtttctgcagggagcaagggtagaagaattgggaggtggagtagagaggaaaagttagggtcagtggcagagccaggcagatgc

SEQ ID NO: 35393 - DNA, 201 bp, Homo sapiens
tttgtccagttgtctccattgtcacgccaatttcccctagtccaagttttttctttgctgattcctttgtccatgtgtgctttgagcctctctcatcttgyctttcctcctttcctaggagcagctcctgaagcagcagcagcagcaccagtggcagcagcatcaacagggctctgcccctcctaccccagtgcccccatc

SEQ ID NO: 35394 - DNA, 201 bp, Homo sapiens
tggggagttacattctgatcttcactgcttaaagcagaagtatggtaggtatttaacagagtcaggcagcacaacttacctacctcttcctctgaacaggytgtcagaaagcagtgacactaattactatactttctttttctaaacctcattttcttcatctttaaaatgaaaggttcagagtcaatgaattcccagggc

SEQ ID NO: 35395 - DNA, 201 bp, Homo sapiens
gtgtgcatccctctggtaagggggcatgggaggagtgagaaacaggaaagtcccctcagtcttaggcattggatattagggtcttactgtgactctggtaygataggttttgcccatcatagtgatgagggaagggcatatgcttggcactgctgagatagctctgttgcaaaaatgggcttagttaagaaataagcagtg

SEQ ID NO: 35396 - DNA, 201 bp, Homo sapiens
ttctggtaagctggaggggttatgggtgggaatatctccatccccagagaaggtcaagtgctggagggagcgggtggagaacctggcctaggggccctgcygctgggtgcgtttctgcagggagcaagggtagaagaattgggaggtggagtagagaggaaaagttagggtcagtggcagagccaggcagatgctgaccct

SEQ ID NO: 35397 - DNA, 201 bp, Homo sapiens
ccaaagaatcctgggggacaagggcagatgttagcaatggcctttaccacctggcctgcccacccacaaccagatcatcaacctcatcccaccttggcaayacccctaaaccaaggccatctacattcctctggctgccccttcctggagcaagccaaagcatcctttttgctcaccaagggccccatcagctccaggctc

SEQ ID NO: 35398 - DNA, 201 bp, Homo sapiens; identical to SEQ ID NO: 8138

SEQ ID NO: 35399 - DNA, 201 bp, Homo sapiens
gattctcttgtagggaatctgagtggataaccttgttatataagagcaggcaaggcccggacctactgggaacaagagatggaagagctgacttgaccgcraggggagatgctttttgggctggagggcttgtgacatgaataggattatttttctttttctttggtttcttcaggcctagttccccgagagcgttcagac

SEQ ID NO: 35400 - DNA, 201 bp, Homo sapiens
taccccccacctgctctgggttgagtctggagctgttctctcacttggctgtcccctttctgcagtttgtatgtgtgcatcagtcaggtattggggtgctytctaccctgacttaactagctccttctccactcctctcagatgagtcagtctgacagtggggtggacctgagtggggattctcaggtgtcatcaggtccc

SEQ ID NO: 35401 - DNA, 201 bp, Homo sapiens
gaaaaagtaagcaggttggagaaacgctggccaagtccctatgatcccagcaagcacacaaggccatccctcagaagctaacatttccccccccaagcacrctgtcaaatagcccggggtggcactgtcaagccttcccagatgccaaaggggaaaacaaatggtagcaccaggctgaccagttcatcgctgaagggatcc

SEQ ID NO: 35402 - DNA, 201 bp, Homo sapiens
tctactaaaaatacaaaaaagtagccggcgtggtggcgctcgcctgtagtcccagctactcgggagactgaggcaggagaaacgcttgaacccaggaggtkgaggttgtagtgagccgagattgtgccatcgcactccagcttaggcaacgagcgaaactccgtctcaaaaatgaatgaatgaatagcacaactccatctc

SEQ ID NO: 35403 - DNA, 201 bp, Homo sapiens
ggccaggacgaggcgacaagaggagctggccctctcccaagaaccgaaggtgggtaggaacaaacaaatttattgtggtttaaaaattggaggagggggaraaagcctgagggaaagataagtttgggtggagtggagattgtggcctgaggggccatgggctctagaatgtcagtaggatttccatgtctggctaaggca

SEQ ID NO: 35404 - DNA, 201 bp, Homo sapiens
ctggggactgtagttggggtcttcctgcagtcgtttttgtatatcagaccggagctaaagagaaaaagtaagcaggttggagaaacgctggccaagtcccyatgatcccagcaagcacacaaggccatccctcagaagctaacatttccccccccaagcacactgtcaaatagcccggggtggcactgtcaagccttccca

SEQ ID NO: 35405 - DNA, 201 bp, Homo sapiens
tctgccatccccttcggatttttattctactcctctgcagcctggtggccaaagtggctttctcccttcaggggctcctgcccagcaggtatattgtatcktcacacttccccttcatttgatttctctgtccagttgctggctttgattttccctggttttctgacattcctccctgcccccaacatgcacacccaaatt

SEQ ID NO: 35406 - DNA, 201 bp, Homo sapiens
cagctcatgatttttttcccctcagctgcatccagtggaactaaagccgttccaggattatcaaaaactgagcagcaaccttgggggacctggatcatcayggactcccccaactggaaggtgaaacggaatagggatgtggactttccaagtgcttccttactttggaaccagggtctggatcctaggcttgccttagac

SEQ ID NO: 35407 - DNA, 201 bp, Homo sapiens
acaggctgtcagaaagcagtgacactaattactatactttctttttctaaacctcattttcttcatctttaaaatgaaaggttcagagtcaatgaattccyagggccccttcccctaacatgtcactaggggctcttacccagtggttatgtaatggcaagaaggtaccactgcctggctgggccgggggacaggaagatg

SEQ ID NO: 35408 - DNA, 201 bp, Homo sapiens
tttccaagtgcttccttactttggaaccagggtctggatcctaggcttgccttagacgcccttcttcccttaggtccttctctggcctcaattcccgtctsaaggccacgccttccacctacagtggagtcttccgcacccagcgcgtcgacctttaccagcaggtgaaggagaaacccttgtggccccaactctaaattc

SEQ ID NO: 35409 - DNA, 201 bp, Homo sapiens
gactgcccgcgtctactgccttcccacggtgttccagcagaacggcacaactaacccacagccaaacacacacacacacacacacacacacacacacacacacacacccaccaccccgcggctccgcccccgacttccccacggaccgtcacttccggtctcccccaaacctgccaccgacggccacttccgtttccccga

SEQ ID NO: 35410 - DNA, 201 bp, Homo sapiens
actgcccgcgtctactgccttcccacggtgttccagcagaacggcacaactaacccacagccaaacacacacacacacacacacacacacacacacacacacacacccaccaccccgcggctccgcccccgacttccccacggaccgtcacttccggtctcccccaaacctgccaccgacggccacttccgtttccccgat

SEQ ID NO: 35411 - DNA, 201 bp, Homo sapiens
ccccccaggtccccaagctttacttttgtggggcacgacgagaaagtccgcagccccaaacagtgagtttctgagggcgagtcgggccggggccggcctakgtgggagggagccgagcaccccgaggagccgccaccgctgtcgcccgggggaccgtactacgcctgcgtgcgtcgcactacggatgcgtggacacttaag

SEQ ID NO: 35412 - DNA, 201 bp, Homo sapiens
cttccacctacagtggagtcttccgcacccagcgcgtcgacctttaccagcaggtgaaggagaaacccttgtggccccaactctaaattcgagttgccacytgatttcctgtccttccgtctcatcgctgacctctcactgtgactcactctttaacacatgcctgtcccctaggcctccccaccagatgccctgcgctgg

SEQ ID NO: 35413 - DNA, 201 bp, Homo sapiens
cgaacccggcgccatccgccgccatcctcccccgccccaccgccatcccgtcccggggagcccctaggcccgggtcccggatccccgcgcacccggccagktgagtctgggtgaaccgtgcgctgacgcccttttccggcgcgggagaggtggtggcggtggcggtggcggcggcggcggcggtggtgggccggggggagg

SEQ ID NO: 35414 - DNA, 201 bp, Homo sapiens
cgccatcctcccccgccccaccgccatcccgtcccggggagcccctaggcccgggtcccggatccccgcgcacccggccaggtgagtctgggtgaaccgtkcgctgacgcccttttccggcgcgggagaggtggtggcggtggcggtggcggcggcggcggcggtggtgggccggggggaggagaagctgccattagccgc

SEQ ID NO: 35415 - DNA, 201 bp, Homo sapiens
ccatcctcccccgccccaccgccatcccgtcccggggagcccctaggcccgggtcccggatccccgcgcacccggccaggtgagtctgggtgaaccgtgcsctgacgcccttttccggcgcgggagaggtggtggcggtggcggtggcggcggcggcggcggtggtgggccggggggaggagaagctgccattagccgccg

SEQ ID NO: 35416 - DNA, 201 bp, Homo sapiens
gaaaaccctccagtcagcgcttatcccttctgctctctcccctcacccagagaaatacatggagtttgaccttaatggaaatggcgatattggtgagaaaygggtgatttgcgggggcagggtggtgtgcaggcctaagaagacagaggtctctcctacatgctccattcctcatgatttgggagggggcccacctaccac

SEQ ID NO: 35417 - DNA, 201 bp, Homo sapiens
atccgcccaccttggcctcccaaagtgctgggattacaggcgtgagccactgcacctggccctgttgcaatgtttttccagggagggaaagagttatctgyatttcagcctgttctgttttgggagtactggggctgaggagaaagggcagggccatcaaagggctcacattgttattgtagtccgtggtggcagcagcac

SEQ ID NO: 35418 - DNA, 201 bp, Homo sapiens
cagctggcctagggtagcccgggctggtgtcagggtaaggagaggaagggagggatgagggctgattaatttttttcaccccacaggaggaaaagctttcrgactgctgaaggcccagcaggaagagaggctggatgagatcaacaaggtagaaggaagaactaagggggcagagccagggggatggggcgtggatgggga

SEQ ID NO: 35419 - DNA, 201 bp, Homo sapiens
cctgagtctccaccagttggagaagtcagggaggcatctcaggtgtgaataaccttcccattctgtcccctcagttccgatgcctcaaccgctcagccgcyggaatcgcagccactgccggcttcacagacgcctgcctccaaccagccgaaacgacccccagcagcccccgaggtacctggagaactggaggggtgggga

SEQ ID NO: 35420 - DNA, 201 bp, Homo sapiens
tcaggggcacaaggggtacgatacgaggacagtgcttacagcaaagattatcaccttctctgtaagggaggacaaaatcacttacaggtttagagagaaaytgttttgttgcaatgtgtgtttttttgttttgttttgttttttgagacagtctcgctctgtcacccaggctagagtgcagtagtgcaatctcggctcact

SEQ ID NO: 35421 - DNA, 201 bp, Homo sapiens
gtgcatgaactcagggggcagggagggcagctggatgagggtggagcctggggggcgggtctgatgtaaccttgaacctggaccccttcaacccacccacwcagcccttccctttctctacccagagctcagcctgccctgatgccctcactcttacccagggtttggccatgaccagggggtcccagggggccagtggga

SEQ ID NO: 35422 - DNA, 201 bp, Homo sapiens
cagaccggcgccctgctggatagagagcaagggagaacttcagacctgcccttccatgcaccaccacaggagtctctccctagactgttacgcactagaamtccccgacccttgctcaccagtgtcccagagactgggggccctccaggatgggaaggccgagcctgtggaggagtgggccgggcaatcaccacccgggtt

SEQ ID NO: 35423 - DNA, 201 bp, Homo sapiens
tggggaagaatgaaaactcacccacaaggactggctgcataagaagctgccccacaaggccgctcaccatctgggccaacgaggcattggtacccagaccrgcgccctgctggatagagagcaagggagaacttcagacctgcccttccatgcaccaccacaggagtctctccctagactgttacgcactagaactccccg

SEQ ID NO: 35424 - DNA, 201 bp, Homo sapiens
gaaacggaatagggatgtggactttccaagtgcttccttactttggaaccagggtctggatcctaggcttgccttagacgcccttcttcccttaggtcctyctctggcctcaattcccgtctcaaggccacgccttccacctacagtggagtcttccgcacccagcgcgtcgacctttaccagcaggtgaaggagaaaccc

SEQ ID NO: 35425 - DNA, 201 bp, Homo sapiens
cactgcactccagtctgggtgacagagcaagactctgtaacttaaaaaaaaaagaaaaaagctggccgggcacgatggctcaagcctgtaatcccagcacyttgggaggccaaggtgggtggatcacaaggtcaagagttcgagaccatcctggccaacatggtgaaacccccttctctactaaaaacataaaaaattagc

SEQ ID NO: 35426 - DNA, 201 bp, Homo sapiens
caaggccacgccttccacctacagtggagtcttccgcacccagcgcgtcgacctttaccagcaggtgaaggagaaacccttgtggccccaactctaaattygagttgccacctgatttcctgtccttccgtctcatcgctgacctctcactgtgactcactctttaacacatgcctgtcccctaggcctccccaccagatg

SEQ ID NO: 35427 - DNA, 201 bp, Homo sapiens
ggcttttggtgtcaggcagtcactggctgtgggctgccccccaagagcaaggggtgggcctaacctgtggtgtgagtagtggaaggcggttctctggccarcgggctgcttgctgctgttagcagttggagaatggatgcctctgcccggtaaagggcacctggggccgcgcccgcagcattcactaactcgtaactctcc

SEQ ID NO: 35428 - DNA, 201 bp, Homo sapiens
tttcagttgagggaagtcaggatctgagccaagctgagcccctgcatagcctctatcccgggagccccatatcaatgctgccggcttggtaacatcatccsccttttagagacgaggaaatgagatttgaggtcctacttaaggccacttggctggaatacagcaaagccaggtgcaagccccttctctgcacgcagcccg

SEQ ID NO: 35429 - DNA, 201 bp, Homo sapiens
tatttaggatgaattcctagaaatcaaatagctgggttaaaaggtagaaagaaatgttggtaaccctcacctcacctaattgccattcaaaataataccarcagctccagtgtctcgagcctgtcctatgtgcaggtttagctctgagtgctttacggacatcaactcccctcatcttttttgagatagggtatcactctg

SEQ ID NO: 35430 - DNA, 201 bp, Homo sapiens
atcaagacaaagggaggcagtgacatggcctggcacacagctggcggggggcacttccagattcaaacccagcctggctccagggtgctcacccttatccygcacgctgtcctccttagagatcacactgtttcaccctcccaggagcagggactatggatgcatctcatagcccctagatttcatgtagcttgctggcag

SEQ ID NO: 35431 - DNA, 201 bp, Homo sapiens
ccgcctcatctacgacgggccccgggacatgccacctcagccctacaagatctacgaggtctgctccaatggccctgctcccacaggtatcaggcctagcyctctgtgggccacctgggaggctgtgcaatgtcctggcccccagccatgagctcttgggtgcaggcaggccaagggcccctctagcaggcagtggtccag

SEQ ID NO: 35432 - DNA, 201 bp, Homo sapiens; identical to SEQ ID NO: 8283

SEQ ID NO: 35433 - DNA, 201 bp, Homo sapiens
ccctgagctgggtgtgggtttgcaaggagacatgtgacccagaccaaccctgggagcagcagggcgcctgctgtctggccactcttactaggactgctgtrgcacttcctcccctagtgggtccctggtgcccatgaattgcagctcctgggtggtggtgggggcactgtctcctgggactccagcatggccctggggtga

SEQ ID NO: 35434 - DNA, 201 bp, Homo sapiens
agacctgttctgacaccgaacttccaaagtcatgggccttgattggggtggtctgaattagacctagcccttttctgggcagaagggagcttctgggagtwtggatgctgttcgggttagagctcgtgtggacctagctgcaggcaaaagccttgaggctgagtcccttctgtggcatggtggacagactctcgctcatca

SEQ ID NO: 35435 - DNA, 201 bp, Homo sapiens
cagacctgttctgacaccgaacttccaaagtcatgggccttgattggggtggtctgaattagacctagcccttttctgggcagaagggagcttctgggagkttggatgctgttcgggttagagctcgtgtggacctagctgcaggcaaaagccttgaggctgagtcccttctgtggcatggtggacagactctcgctcatc

SEQ ID NO: 35436 - DNA, 201 bp, Homo sapiens
gaccgacacattcacttctgatgggctgtgctgtgtaatgacccagtcctttctgtcttccacccaggggtctcaagtgaagggccaagggcatgggtaargggaggagagggacagaaggggactcaggactgtggagagtttccggttctgggctggagagggagttgggcaggtgaaggggaggaggcagggtccctc

SEQ ID NO: 35437 - DNA, 201 bp, Homo sapiens
ggaaatacaccgaaggcgtggatgaagccgatccggccaagtggaaggccaacctgcgctgtgcccttaacaagagccgggacttccgcctcatctacgaygggccccgggacatgccacctcagccctacaagatctacgaggtctgctccaatggccctgctcccacaggtatcaggcctagccctctgtgggccacct

SEQ ID NO: 35438 - DNA, 201 bp, Homo sapiens
ctagactgggccccgcgccccccaggcactgcgggcggcgggatgaagactggagtagggcggggtccgcgtccagctgcgcctggaaagcgagctcgggkgggtgcctacagcagggtgcgcccggccggcctgggacttccaaagcgcctcccacgccccgatcggtttggggtgctggcgcccggggagcccagtgac

SEQ ID NO: 35439 - DNA, 201 bp, Homo sapiens
ctgtacaggtacatctcccctatcccaaagtcggccttggcttgaaaactggggaatcctggggctaggcccttgccccaggctggaggctcagggctccmtgagcagtgtgaacttggcggccagagaccatcaaggctcagagccggagaatgcggtctattactcacccctgatggctgtcctcatgcacagctggat

SEQ ID NO: 35440 - DNA, 201 bp, Homo sapiens
agggaagcactgggaaatcacccctttttatctaaaggccctactttggggtttttcccctgtaccctggtcttcccctaccctgaccctgggaggaagcygaaagaagcttctttctgggcaccttttgccccagagcctcagcctgtctggaccaggtgggcagcagggcccagggtgtgggcagctgacccggagggg

SEQ ID NO: 35441 - DNA, 201 bp, Homo sapiens
cggggaggtctttcccaatcctggtggctgtgccctccacctcgccctgtgttgggggcagctttggggaaggcagaagctgcataggagctacaggcagyctctcaggggatcttgcttctcctccgacattgactcctttactgccctgcttttctctccctgctgtgcagactcccagccccctgaggattactcttt

SEQ ID NO: 35442 - DNA, 201 bp, Homo sapiens
gtgtagaggtgtccatgtaacagtgctggctgaatgggggacttccaggtcacaccccaaaaagctctgagccggtgttagtaagaaatggggaggaaggyccagctgtggcgccctgggcattaatcctaaaaaaaaagatactacttctatgtgccagaaacttcaaagcaagtgaacacttcaagtacgagaaccaga

SEQ ID NO: 35443 - DNA, 201 bp, Homo sapiens
cccacctgggaggggaagtcaaggcagactttccagagaaggcgatgctgaaaatttcagaaacagaaattttgaagagcaagagttaccaagcgaagaayattccatgagaaggaacaggaggtgtgtgaaggtggaggttctggggtgaggttctttatggaatcgaaaacggttcagaaccacaggtcgacggtcaag

SEQ ID NO: 35444 - DNA, 201 bp, Homo sapiens
cgcgggaggggtggagcaggggcggaggactgggctgggcctgggctcctcgagggcccagaatggggataagtgaccagaaccagagagggctcggctgyatcgatgtaggaaactgtagcccctcaggaggccctctggcaagacctccccttcctgcccccacccccagtagttatggggcctggggtgctggggctg

SEQ ID NO: 35445 - DNA, 201 bp, Homo sapiens
ctcacctcagcctcctgagtagctgggaccacaggcacccaccactatgcccagctaattttttgtaaagacaggagtctcgttatgttgcctaggctggwctccaactcctgggctcaagcagtcctcccaccttggcctcccaaaatgttgggattacaggtgcgagccactgtgcccagccaacatcaaccccttgag

SEQ ID NO: 35446 - DNA, 201 bp, Homo sapiens
gagtctcgctctgtagcccaggctggagtgcagtggcacgatctcagctcactgcaacctctgcctcctgggttcaagcaattctcctgcctcagcctccygagtagctgggattacaggcatgagccaccacgcctggcctagggcacatcttttctaacctgcaccctagagcatcgtggggactgagggtccccagaa

SEQ ID NO: 35447 - DNA, 201 bp, Homo sapiens
agctcctcgaggctggccacccgcccagctaccatgctgctgctgatgccgggcccggactaaggggatgcagacgtagacacagggtacacctttttcctttttttttttttttaagacagagtctcgctctgtagcccaggctggagtgcagtggcacgatctcagctcactgcaacctctgcctcctgggttcaagca

SEQ ID NO: 35448 - DNA, 201 bp, Homo sapiens
atttttaatataagattcagatacatcatcaatctttcaattgtttaaattttctaattttttttagagacagggcctcacactgttgaccagattccaattttttttttttttttttttttttttttgagacagggtctcactctgtcacccaggctggagtgcagtggcttgatctcagctcactgcagcctcgacctc

SEQ ID NO: 35449 - DNA, 201 bp, Homo sapiens; identical to SEQ ID NO: 8286

SEQ ID NO: 35450 - DNA, 201 bp, Homo sapiens
aagctcatgggctcaagtgatcctcccacctcagcctcctgagtagctggtatcacaggcgcaagccactgtgctctctccaataatcttaatgctaggaygtacctcgcataatagtttttgcttacattttagtttttttgcacatgtgtgtatatggaatgcaaaattggaatcaagtgaatatcttgatttatagcc

SEQ ID NO: 35451 - DNA, 201 bp, Homo sapiens; identical to SEQ ID NO: 8282

SEQ ID NO: 35452 - DNA, 201 bp, Homo sapiens
ccctggaggccctgggcctggcccgaggctcagcccggatctgcagttgccaggtcagtgcggggcccggagtggattcgcggggcggggcggggcactgyccgcgcccggagctcagcagcagctgcccaggggcgggggcggcaagacgcggaagtgcccggcaggttggcggaccggcgggaggcgcagcctgggcag

SEQ ID NO: 35453 - DNA, 201 bp, Homo sapiens
atgtatttctcatttgtttttagagatagggtctttgtgttgcccaggctggagtgccatggtgcaaccttgaactcctgggctcagatgatcctcccacktagctgggactacgggtgcacaccaccacacctggctttttttttttgagacctggtctcaatatattgcccaggctggtctcaaactcctggcctcaag

SEQ ID NO: 35454 - DNA, 201 bp, Homo sapiens
cccggccgccgcgctctcctctctgcgtccgcgcccggcgcgccccgagggtggcgggagcggtgccggctactgcccccaagtctaggcctagactgggscccgcgccccccaggcactgcgggcggcgggatgaagactggagtagggcggggtccgcgtccagctgcgcctggaaagcgagctcgggggggtgcctac

SEQ ID NO: 35455 - DNA, 201 bp, Homo sapiens; identical to SEQ ID NO: 8285

SEQ ID NO: 35456 - DNA, 201 bp, Homo sapiens
agggtcttgcctgagctaaactgaggctaggggagttgcctcatagttctcgcctgttatttccccagccccaggtcagtggaataacctgtcctcctttytctcccatctcttccctcccttgctggtggtgtcccttcagctgcagaggatgttgccaagcctgagcctcacaggtggggccgggaggtggtggttggg

SEQ ID NO: 35457 - DNA, 201 bp, Homo sapiens
gcaggcagacctgttctgacaccgaacttccaaagtcatgggccttgattggggtggtctgaattagacctagcccttttctgggcagaagggagcttctrggagtttggatgctgttcgggttagagctcgtgtggacctagctgcaggcaaaagccttgaggctgagtcccttctgtggcatggtggacagactctcgc

SEQ ID NO: 35458 - DNA, 201 bp, Homo sapiens
tgcggggaacagctctgggtgggaggttggaaatttggtctgggggacccactcggctccctccctcagcccacagtgagtctggtttctgagttgtccckgtctagccactttcgtttcccctggggccgggtggaggctggggcagaaagcggaactgagcccgcgtgttctgaggccagggcagggctggagcgttct

SEQ ID NO: 35459 - DNA, 201 bp, Homo sapiens
tccggttctgggctggagagggagttgggcaggtgaaggggaggaggcagggtccctctggcctgactccagggaggcagtgaagctgtggcctgggaggyggggctcgtgcccctgggtaggtagcagttagagctgtggcttctgtttcctgtagccttcctaacaggctccggcaggcgttagggccttcctaagtgc

SEQ ID NO: 35460 - DNA, 201 bp, Homo sapiens
gcagtaatgactgcacattctcttcctctattttcaaggttcttgggtacttaaacagaaacgcccttgatactaaaaatttaataaaagaaataaaagcratcgctagtattccaacagaaagatactttttcaatgtgtctgatgaagcagctctactagaaaaggctgggacattaggagaacaaattttcagcattg

SEQ ID NO: 35461 - DNA, 201 bp, Homo sapiens
gcttcctggggctcgctggagggattgggcggaactagggagcgagctccgtgtgttccctcggattccacgtggactcgggctcccagccaccaggacckgcttggaaagagatacttcttcgttcccttcctgctatcccaggccttgcgtccccattaggcgcgtctcgccctgtctgttaagcaccctccaaagtca

SEQ ID NO: 35462 - DNA, 201 bp, Homo sapiens
tattccagtttttatcattgatgaaacaaccatctgccaaagcacctagttgaaaggtactagctcatgagctttgatttgcaaaatgtgatggtcttaamattatccccctctctccctccaatagccaagaacaggaatttgtatcatcacaaggctttagggttagtattttagcttttgattttaaattcaagaaaa

SEQ ID NO: 35463 - DNA, 201 bp, Homo sapiens
ttattaacttgctgtgccccatatgatgggaaagcaaacagtgcttctctagaagagttctaagggaacttaatatggtaaaaagaaccagcaattttgarcaaaagggcaggggtgcagatatataggttttgctttcacttagacccttgaagtcagtttctttaaatgaaaacataaatagttatacacttgacctca

SEQ ID NO: 35464 - DNA, 201 bp, Homo sapiens
tggtaatgtgtgaatatctgtttctggaataaagttcatttacaaaggtgactgggacttacacacacaccttcctagtatctagttgtctaagacatttrcatccatctaactccatctaaagaaggatctggggaatgctaagtggcacaagtggcaactatttattaacttgctgtgccccatatgatgggaaagcaa

SEQ ID NO: 35465 - DNA, 201 bp, Homo sapiens
atcccagcactttgggaggctgaggtgggaggatcacttgagcctaagagttagagaccacctgggcaacacagtgagacctcatctctattaaaaacctraaaatcagctggatatggaggtgcatgcctgcagtcccagctactcaggaagccgagctgggaggttggcttgagcccaggagtttgaggctgcagtgac

SEQ ID NO: 35466 - DNA, 201 bp, Homo sapiens
acgtaaaatttcatagagaaatataacagcctccctcatcttcctgtctgattaatttaagaatgccacaattttcttggaatagcctcttggtgatgtcmtagcctcttcttatgagggtgagttgtcaggaactaggatttcaccgaggccttagggtgtgaatgaggaggagagtctgctggaaatgtttctaataaa

SEQ ID NO: 35467 - DNA, 201 bp, Homo sapiens
ttcaactctaacgttaaggctgactgaattaaagtgtgctagagtgttctatcttagtttgagaataattttataagatgaacgaggagagaacttattamtgaactattaactttcaaaataatctgcattttcctttttccctaagtgttcatgctattctgtctgctaatacttcaggttaaaaccttcatcctttgg

SEQ ID NO: 35468 - DNA, 201 bp, Homo sapiens
tctttttctaagagcagacagaaaagagttgaaaaaataaggaggtaggaaaaacgtgaggtggaattggaatacaacactgtcttttcagctcggggaastctatttctatctctcagaaacatccacctcctgggcccctgattctaatttgagtcaggaggtgagagagatagtgaaaggaggcgaaaaaaaaaagaa

SEQ ID NO: 35469 - DNA, 201 bp, Homo sapiens
gaatgggagatgtgtataaatgtcctgttgacctatccactgccacatgtgaaaaactaaatttgcaaagtaagtttaaatttacttgcaaggcatgtgakttgtcttagactcaactgaaaaataacatcagaacaatcattgttctgtcttaaagaaatacagacagcttttttttgcccttatgtctttagtaatatg

SEQ ID NO: 35470 - DNA, 201 bp, Homo sapiens
taataatgtttaatcctggagagattatcaggaagcaaagaagctcatacactgttgataggatgataaattgttatgacttttgggggacaatgtatgawtatctatctattagaatcataaatagttttacctttttacactgtgttatgtaagttctaaaattcttgaatttgtttacagtaagcatatatattttta

SEQ ID NO: 35471 - DNA, 201 bp, Homo sapiens
tctctgcttcttgatgattttcaatcctgtctactaaataaagggttatggaaatgttgcttgatttacttttccagagggaatattgtgttcaaaatagrctagaatgtactcatagggaaaatgtacagcagtaatgactgcacattctcttcctctattttcaaggttcttgggtacttaaacagaaacgcccttgat

SEQ ID NO: 35472 - DNA, 201 bp, Homo sapiens
attcaggagcactagaaactttgcatcacatctaacacaaaaggatctctggtcacctttactcacttcttttaactttattttgctcagatagtcaatgktaatcactctgttgctccttcccttttaggttactctgtggctgcaatttctactggagaaagcactcactttgttgctggtgctcctcgggcaaattat

SEQ ID NO: 35473 - DNA, 201 bp, Homo sapiens
gctcacccttccaatgaatgcctttcttatgtaattccataaataagaagcatatttactttatgctaatatttatggtcacaatctattatataagtcarcaacatcaaatttcatttagaattgcaatgaaagggctaaaaatacaattcttaaagaaatcatagatacagtgttttcttaaatgtttaacagagagaa

SEQ ID NO: 35474 - DNA, 201 bp, Homo sapiens
gttttaggaggccaaggagggtggatcacttgaagtcaggagttccagaccagcctggccaacatgatgaaatgccatctctattaaaaaagtgcaaaagrtagctgggcatagtggtacatgtctataatcccagctattcaggaggctgaggcaggagaattacttgaacccaggaagtggaggttacagtgagccaag

SEQ ID NO: 35475 - DNA, 201 bp, Homo sapiens
tgattattcacaacaaagatattctacataattgagagctgactgtgctctaaattgtaaacacatttggaatcattttcttgttttaatgttgctatgcyctaataaactgactctgtctccccctgtatgtttgtgtgtgtgtatgtttaggagccctctgatgttgtcaactctttggatttgcgtgtggacatcagt

SEQ ID NO: 35476 - DNA, 201 bp, Homo sapiens
aagtcactcatcaatctgtgtctcagtgattccatctgtaaaatgaagtgtaaaatggggataagatcatccccggtggccaggcacagtggctcacaccwgtaatcccagtgttttaggaggccaaggagggtggatcacttgaagtcaggagttccagaccagcctggccaacatgatgaaatgccatctctattaaaa

SEQ ID NO: 35477 - DNA, 201 bp, Homo sapiens
atgctagttctagaacccacctcatctgctaagatcattttcccaatctgggccctctgccaggacttcctgcagctaagaggaaggacactagcctaagsgttaagaacctgggcttccgcacttggttttcactagccatgggaacatgagcaagtcactcatcaatctgtgtctcagtgattccatctgtaaaatgaa

SEQ ID NO: 35478 - DNA, 201 bp, Homo sapiens; identical to SEQ ID NO: 8344

SEQ ID NO: 35479 - DNA, 201 bp, Homo sapiens
ttccttttcttcttccattcaattttattttttactcataacttagtccagtgtttgattctataaagacattagaaatccaactgtaatatattcttacrcttttattttaactttaaatacttactgttaaaaattttataaatacttattatgctattgctgtacaattaagccatcctcagcactattaatacaggt

SEQ ID NO: 35480 - DNA, 201 bp, Homo sapiens
ctgcagttttcacagaggtggtcatgatgttatgacccctcctgtgctgcaaggttatcaaatcctgaattcttagaaaaggtggtaggaggtgacagggrgagtgtccagggagtgcttagttgagagaaaaaaaccaaacagtcttctcaggaagaaaatagctagttgttgcagctttgctaccagaggctctgataa

SEQ ID NO: 35481 - DNA, 201 bp, Homo sapiens
actcctgaatttgttgatcttttttatgggtttttgtacctcaatttcattcagttcttctctgattttggttatatgttgctttctgctagctttggagytggtttgttcttgttgttctagctcccattggtgtgatattaggttgttaatttgagatctttctaactttttcatgtgtatgtttagcactatcaactt

SEQ ID NO: 35482 - DNA, 201 bp, Homo sapiens
gagttaccaaagtggtctggttttccactattttctattgccttgtgttaagagtttaagatagcataatactgtcagagatgtatttgcatgtatctttyagggaatttcaagtgcttccacatccttcttgttaagtgccacacaactgcacagatgcttacttttctcttctttctgattaaattagaagagctgcag

SEQ ID NO: 35483 - DNA, 201 bp, Homo sapiens
ggtcctgggctttttctggttggtaagctttttattactcattcaatttcaaaatgcattattggtttatccagtttcagtttctttgtggttcaatattmagaggttgtatgtttccaggaatttatctatttcttctaggttttctaatttgtgtgcatagaggtgttcataatggactctaagggtttttagtatttc

SEQ ID NO: 35484 - DNA, 201 bp, Homo sapiens
actattctgccactagagtcttaaggtttactctttaaccttcttcaagtttttacttaaatattaccttctcagtgaggccttccctgaccattccgatraagattatactgctctccaccccacactcctaactccagcctgcttatttttctcccaaagcactgatcactaccactatatggtttacttacttattac

SEQ ID NO: 35485 - DNA, 201 bp, Homo sapiens
tttttttctttttctttttgtttttttttttttttttttttcttgatgaagtccagctctgttgtccaggctggagtgcagtgatgcaatcttggctcacygcaacttccaactcccgggttcaagcgattctcctgcctcagattcctgagtagctggtaatacaggtgtgtaccaccatgctgggctaatttttgtagt

SEQ ID NO: 35486 - DNA, 201 bp, Homo sapiens
ctctttccaaaataatcatgtctttgtcttttatgatatagccttttaaatattagccaattatcatcctttatatctctttcaaagataaaagtctcttrccattaggttgtcctggcagtgccatttaacatgccaacttcatttattcacagagtttgcttatatcttatttaattaaattaattaattaattaatta

SEQ ID NO: 35487 - DNA, 201 bp, Homo sapiens
agtgtgactcagaaatgttaagtaattaacctaagattacagagctgataattaataaagataggggaagctaatgcaaaatgagacaaaatgttccaaaygtacatatttttgtaagtatccaagaaggagagtgacaggatgtagttggcatttataaataatatttaaattttattttaacataaactttatgaagta

SEQ ID NO: 35488 - DNA, 201 bp, Homo sapiens
agcatcagcaggaattgttgtcttttctcttgggctggccaagttgtctttcaaggcctggcagaggtcctgcctcctcttcaaagctttttctaagcacrctatctcaccttcatctcttctgccccaattatctcaccatgctcaatgcatagcttgcaatttaacacttgattcaaagctaccttctttcattaactg

SEQ ID NO: 35489 - DNA, 201 bp, Homo sapiens
agcaaaaatattttccggtccttcaagtgaacagtttggctatgcagtgcagcagtttataaatccaaaaggcaactggtaagaatattctcttctttatkatttcagtaaaaatacaaaataaatttcatatttgacttcaattgctttttcaaattggtgcctgactgtactataaatgggtggccctcaaatatcctt

SEQ ID NO: 35490 - DNA, 201 bp, Homo sapiens
gtaatatggggcacaatcatatccaaatttccaaaacagtttggagacttgacttaacaagatgcgtggaaaatgtgctatctcctggaccatttacctayagaccatggactggtttccatcaacatttagaataattttgatgattacttgcagaatcaaggctatccttgaatccgaggctatccatatttctttctc

SEQ ID NO: 35491 - DNA, 201 bp, Homo sapiens
atgaaagaaaacatgaaaagcaatatataacttttacccagtgttttaaatgttctaaataatacagagaaatgagtaaaagtctgaattatgtctcatcwgatggggaaggatgaggaaatcattgtgggcaagcatcagcaggaattgttgtcttttctcttgggctggccaagttgtctttcaaggcctggcagaggt

SEQ ID NO: 35492 - DNA, 201 bp, Homo sapiens
tactaaaggttcaagggtagacagctaaatgagtgacatttccatgtaatatgctgatacaagtaaaaagtcactcaatttgatcatcattacatcatcakcagcagcagcctaaaaaaacagccctgaggaatcacggagttcctctgaagaattgaggcatgaattagaaaagagtgttgtgaaaatcaagggaaagaa

SEQ ID NO: 35493 - DNA, 201 bp, Homo sapiens
aataataatgtttaatcctggagagattatcaggaagcaaagaagctcatacactgttgataggatgataaattgttatgacttttgggggacaatgtatkaatatctatctattagaatcataaatagttttacctttttacactgtgttatgtaagttctaaaattcttgaatttgtttacagtaagcatatatatttt

SEQ ID NO: 35494 - DNA, 201 bp, Homo sapiens
agtaaggaaaagacaaagaaaaataatatacctggtacctaatttaaatcagaactaataaagaaaaaaacatcagagcattctatgtcttgaatactttragaaggcagctgggaaagttaaatctttgattttaggatatttataagatatcacatgatatttaaatgaatttatgtgaagtaaatgaaatgagaagac

SEQ ID NO: 35495 - DNA, 201 bp, Homo sapiens
tacatagacagtagtgtcttctcaccatccctcccaatctgaggatttagatgtttagaacttgctttttgataaattatgctatttatttggctatccartgttgaatattcaaaataatgttgatgtgtagactttttaggatattcagcaaaaccactgctactgaatgttttgaagaaaagggaacaaaaagaaccc

SEQ ID NO: 35496 - DNA, 201 bp, Homo sapiens
cattctatttttactaatggatattattattctgatgactgtgctgccagtaagtgaattagatattgcttgtgatatgtgttaacatcagtgcataaatsaatattgcaatggatctttatggtttatgatattccaaggtctttacaataaggttgctttaatctttttgttttttgattttaaagttgcaaaaattta

SEQ ID NO: 35497 - DNA, 201 bp, Homo sapiens
ctttttgttttttgattttaaagttgcaaaaatttaaaaaaagaacatactgatatttagagattacagaatgtgcctcaaaatttttaatctataactcyagataaagtaaaaaatgaaaggtaaaaagcaagagaatttgagagattaattagcagtccaggtagcaagcagagaggcagaaagagagagaggaggaga

SEQ ID NO: 35498 - DNA, 201 bp, Homo sapiens
gattacagaatgtgcctcaaaatttttaatctataactccagataaagtaaaaaatgaaaggtaaaaagcaagagaatttgagagattaattagcagtccrggtagcaagcagagaggcagaaagagagagaggaggagaaagaaaaaaagaaaaaacccaaagtttcctttacatacttagaaggtcaaaatcataagat

SEQ ID NO: 35499 - DNA, 201 bp, Homo sapiens
atatggtagtaaatcaagcacagagttgccccgagcacatcatttatatacaggtaaggcctcaggaacatcccttttgactttatttcttcctaaagacragagagtggtaaaagtcaaaaatggaagcttatgagttagaaaatgctcacccttccaatgaatgcctttcttatgtaattccataaataagaagcatat

SEQ ID NO: 35500 - DNA, 201 bp, Homo sapiens
attacacagcaattttctcagtattctaagtaagtctaaagagtttagttttttaatgagtgaaattttaaaatactggcctttttatttaacagtaatgrcttttcccccctcctttttacttttaacagagaacaaccctttattgtcagcaaccaaaacaaaaggttaacattttcagtaacgctgaaaaataaaagg

SEQ ID NO: 35501 - DNA, 201 bp, Homo sapiens
tttcctgccattaaatgatctgcccaggtctaattaatgggggaaaatgaggtcgttttatgtacagtcacgtgtcctttccagaattaggtattttaaargtgaaagcagtttggcatcatctctccacgctaatatgttagatgattgataacatattcaaatagcatttattgagctctccacaatggggtgaagata

SEQ ID NO: 35502 - DNA, 201 bp, Homo sapiens
acagattatgctgaactgccactcaaatgactatatcatgttggctatgccatgatctatataggacaggttcagtaaaagtatcaagtatttttcctgtygttgaggaattaataaacatgaaataatgaaagaaaacatgaaaagcaatatataacttttacccagtgttttaaatgttctaaataatacagagaaatg

SEQ ID NO: 35503 - DNA, 201 bp, Homo sapiens
tgtgattggctctgtaatctgagtttacttagtgtattccttaaatcatcacaacaataccaagaagacagccctcccttttgacaacttactgggaattwagctagctttctaaggtcacacagcgtccatggattgagctgtcattaaaactcagtcctttctggactcagaggctgtcctgaatgattacatcccctt

SEQ ID NO: 35504 - DNA, 201 bp, Homo sapiens
actcagagtgggtgacattgcgcaagaaagacatttagccttcatgagtttcagtttccttatttgtaatttgttaataatagcttggttttgctgttccrcaggattgttgtggcactcaaatgagtcaggatgattctgacataggcagacataagcattaagaaacagtaagatgcgagttggaataaacattataat

SEQ ID NO: 35505 - DNA, 201 bp, Homo sapiens
tatttggtgtaagctttcgtgagatttactggaatactttggcctggttactgtcaacacgtgtctgacaaggtcacctttgttaaatatgttgagtttgygatgctattattgcctttccaggcattcacatgaggacaaagaaggaagatttatactctgggtgataataggctcctggcaaagcccaagtcagttgaa

SEQ ID NO: 35506 - DNA, 201 bp, Homo sapiens
ccatgtctaaatgtacttttgatttttattttattggttaagtagaaattatttttaatgtaatgacagcccattaataaatgtctcctctgttgaaggtrgggttaattcagtatgccaataatccaagagttgtgtttaacttgaacacatataaaaccaaagaagaaatgattgtagcaacatcccagacatcccaat

SEQ ID NO: 35507 - DNA, 201 bp, Homo sapiens
tcatattaacttcatattttgatagcaagtctttatttaattttatctgccacagaaaatatgcttattcagcagcttctggtgggcgacgaagtgctacraaagtaatggtagttgtaactgacggtgaatcacatgatggttcaatgttgaaagctgtgattgatcaatgcaaccatgacaatatactgaggtttggca

SEQ ID NO: 35508 - DNA, 201 bp, Homo sapiens
gaatagagagagaaaaaacatagaatcatggagaaaatatcacaagttatcatacagatatgaacaagtttatacaagacttattacaaacatagagttcyatggaattgaagtgttattatgtgaccatttgagttactgagatgaaagacatttataaccattgcacttttaagtctataggcataaatgtagggatcc

SEQ ID NO: 35509 - DNA, 201 bp, Homo sapiens
ccaccatgcccggccaggatataacattttaatcttcctttagtttcctgtctttcccttctaacccatgagttacattttaaaattcaatatgtattttwatgtccatttggaccaataattaatttcttttgtttattccttgctggtaaaacaattattgaattctgaaatttgtataaataagtcactaagcatagt

SEQ ID NO: 35510 - DNA, 201 bp, Homo sapiens
aaaatgattcaatgatttattgaaccacaaaggataaaagaagtaattcatataaataagcaaactcattaattttttatcttgagcaaaatatataaatyagttacccacggtcacctgtgacctaaaaatattaaatggaaaatttcaaaagtaaataagtcataagtttaaaattgtgtatcgttccgagtagtgtga

SEQ ID NO: 35511 - DNA, 201 bp, Homo sapiens
aattgttgagtaatctggtgttatctgaggcatggagcagtctctcatgtcagtgctcactttcatttagttacaaaaagagtaaaaagacatcactaatyagtgaaatagaatgccttatttaacaagtgcttttggaacaattaattgattaatatttacatatccaaatacactgtcaagtgaattgaaagttaatat

SEQ ID NO: 35512 - DNA, 201 bp, Homo sapiens
tcctccctcatccactctcaatgccttccctgcaaagacctgttcagagtgtgtgccagccttcccaatgtcctggtttctcggtcggagaggtttcttcsggctgcctctagtcagccatcttggctcccgtcttggtatagtttttgagtaacacaaagaggattatagaaagcatataaaatatttgtagaaattaca

SEQ ID NO: 35513 - DNA, 201 bp, Homo sapiens
ttctgtcttaaagaaatacagacagcttttttttgcccttatgtctttagtaatatggggcacaatcatatccaaatttccaaaacagtttggagacttgwcttaacaagatgcgtggaaaatgtgctatctcctggaccatttacctatagaccatggactggtttccatcaacatttagaataattttgatgattactt

SEQ ID NO: 35514 - DNA, 201 bp, Homo sapiens
agggtggcagcaacctgctggcggtgcatggtagcagtacagcaggggcagggcaccagtggggatgaggttgccagtattcctgtgtgcattcatgccarcatagcaggctgcccacacatcagctgggggtatggtaggatgagcatgcactggcaggggaggagagacaaggtcttctggcatgtgtgggccagcaaa

SEQ ID NO: 35515 - DNA, 201 bp, Homo sapiens
ggtttccaacccaccgctatgttgctggtcatcctttctttccctcttgtcattgttcctgcctccctcaaagtcctattcagcttcctccttagtggccytgcctctttattactgatgccctgaaagttttatctgcacctcagtttatcaaggatttttctacacaaagatagtttctctctaaaatataagtataaa

SEQ ID NO: 35516 - DNA, 201 bp, Homo sapiens
acagaagctttttagtttaattaggtctcacttgtcaattttgttttgttataactgcttttggcatctttatcatgaaatccttgccagagccaatgttyggaatggtatttccttgattattttccaggttttatactttcaggttttgcatttaagtccttaaatctatcttgagttgatttttgtgtatggtgtaag

SEQ ID NO: 35517 - DNA, 201 bp, Homo sapiens; identical to SEQ ID NO: 8328

SEQ ID NO: 35518 - DNA, 201 bp, Homo sapiens
tcacacatctggtcagtggccacatcctgtcatttctatttctgcatttcccattttatctgtcttctttttctgtgtgtgtatttcagttgctacttccrtcaactggtgacaatcccaaatgtctcaaaagcagattccccacaagagaagatatgattggtttggttcatcattactgtctctattcagggacaataa

SEQ ID NO: 35519 - DNA, 201 bp, Homo sapiens
caaaaatcagccaggagtggtggcacacacctgtaatcccagctactcgggaggctgaggcaggagaatcactgggacccaggaggcaaaagttgcatgcrctgagccgagatcgtgccactgcactccagcctaagcgacagagtgagactctgtctcaaaaaaaaaaaaaaaaaaaaagaaaaaaaagtcttagacagc

SEQ ID NO: 35520 - DNA, 201 bp, Homo sapiens
aaaaggacaaagaagttgagatgaaaaatggctttcctggagttagaaactgcaacggcccggttttcagcagggaaggtgggagtagcatttttccctgraaggagcctggggccctggcgagctttgttctccaggacaatggccactgtccattgaggaaggacttgcctggctttcatcatgtttcaaaactttggt

SEQ ID NO: 35521 - DNA, 201 bp, Homo sapiens
ccagtcaataggtcagctgccattaggtgaagcgccctttctggacacagcaaactggactaaaaggacaaagaagttgagatgaaaaatggctttcctgragttagaaactgcaacggcccggttttcagcagggaaggtgggagtagcatttttccctggaaggagcctggggccctggcgagctttgttctccaggac

SEQ ID NO: 35522 - DNA, 201 bp, Homo sapiens
atcctgtcatttctatttctgcatttcccattttatctgtcttctttttctgtgtgtgtatttcagttgctacttccgtcaactggtgacaatcccaaatstctcaaaagcagattccccacaagagaagatatgattggtttggttcatcattactgtctctattcagggacaataaaggttttttgggccaggccatct

SEQ ID NO: 35523 - DNA, 201 bp, Homo sapiens
  misc_feature (1)...(201): n = A,T,C or G, or insertion/deletion polymorphism (see Tables 1-2)
cagtgatgtattcaggagcactagaaactttgcatcacatctaacacaaaaggatctctggtcacctttactcacttcttttaactttattttgctcaganagtcaatgttaatcactctgttgctccttcccttttaggttactctgtggctgcaatttctactggagaaagcactcactttgttgctggtgctcctcgg

SEQ ID NO: 35524 - DNA, 201 bp, Homo sapiens
caagagttgtgtttaacttgaacacatataaaaccaaagaagaaatgattgtagcaacatcccagacatcccaatatggtggggacctcacaaacacattyggagcaattcaatatgcaaggtaagttttggtgctaataggccaatgttttcataatgtaaaacattatatttatgtaataaatatgaaaaagtaaggaa

SEQ ID NO: 35525 - DNA, 201 bp, Homo sapiens
accatatggaattcagaagcaggaaggacagagaacaaaagttggccaagcaagtctgtctgggtccttttgttgatctggtcttatgaagcaaagaaacmagagaggcaaaaccatgggcatgattttctaaactacatgaggtgcaaaaaatgcaaaacatagttgttggccttaaggagtgtaaaatagagtcagtga

SEQ ID NO: 35526 - DNA, 201 bp, Homo sapiens
gacacagagttgagaggatcccaccaggcagagttctgggaacatgagaggcagccatatctcctttctctgtccaggattacctctaagtatccaagacrttgttgaaagacaagtatatttgtagtttatagtgagatcctagtgctggtaagaccagggacactggacatttctaaatcctgcctggaccttctcatg

SEQ ID NO: 35527 - DNA, 201 bp, Homo sapiens
aagattagtaagataatgaattatgcatatatagtatttagcttggtgccgggcctccaaataagtacttaaaaagcagtagttattttttctgggtaaaygttgataagtaataattattaggtcaagcaagttttcttaaaaatggcctttgagaattatacgacacacttatattcatgaattgtaaatatgtgctat

SEQ ID NO: 35528 - DNA, 201 bp, Homo sapiens
aatgggttgagccatttggaaatgttgagataccttaaagaatgtattttgcatgtggcatgaatgtgaattttggggggccaggtgacagagtatagtgrctcccaaaaagatatgtccatgtcttaatcactggaaccagtaattggaaaaggggtctttacagatgtggtggttaaggatcttgagatgaaaacatcc

SEQ ID NO: 35529 - DNA, 201 bp, Homo sapiens
acagagggacgttaactacttaaagtccccgttgcttcatcattgacttcattatcattttggagcactctacagaatctgctccctgaaatgcagaggckcaatggaagagcaagcctttttcttccggcctttcagtgcctaaaacaatagacatatgaaataccatgcacttgcaatgctgcctagaaagtaggacat

SEQ ID NO: 35530 - DNA, 201 bp, Homo sapiens
aaatagtgatgaggttatccaggaaagatttcctgtggagagctcttttgtttagtggcatgaatcctgcattacctacataagaaacctgcaaatttttwaaaaaatgttatctcagcagaagcattgccatctttgactgaaggtgatagagaggcagaggccagaggagctgttgagagcccagaggcctatggttga

SEQ ID NO: 35531 - DNA, 201 bp, Homo sapiens
ttgctgtataattgaactgctaaatgataaaatgaactccatcataatttcctgccattaaatgatctgcccaggtctaattaatgggggaaaatgaggtygttttatgtacagtcacgtgtcctttccagaattaggtattttaaaagtgaaagcagtttggcatcatctctccacgctaatatgttagatgattgataa

SEQ ID NO: 35532 - DNA, 201 bp, Homo sapiens
cagatcctctcaaccatctcagcaacaatcaaaatagtgatgaggttatccaggaaagatttcctgtggagagctcttttgtttagtggcatgaatcctgmattacctacataagaaacctgcaaatttttaaaaaaatgttatctcagcagaagcattgccatctttgactgaaggtgatagagaggcagaggccagagg

SEQ ID NO: 35533 - DNA, 201 bp, Homo sapiens
tgggtgataataggctcctggcaaagcccaagtcagttgaagactcactgcatctaatagagaactggaaatgtatagattaatgaagcaacctatgactytctgtgccagacttttcaccattgccgtactcttctctttcacaccctatgcctacgtttaacatgatgttcccggtgcctgggatgaactttgccttcc

SEQ ID NO: 35534 - DNA, 201 bp, Homo sapiens
agcttggtggacctgctgctttatagcaagcagtcagcaagccttctctttgacctgggggaagagattatctcacccctcaatattattcatcataaacrcaatgctaagaaatggcccaggtaaatagtagtcagggccttgcattcttgatatacccattgtattaagttgaatggtagtctcccccaaatatgtctc

SEQ ID NO: 35535 - DNA, 201 bp, Homo sapiens
ggccaaggcgggcggatcacttgaggtcaggagttcgagaccagtctggctaacatggtgaaaccccatctctaccaaaaccataaaaaattagcagggcrtggtggcaggcacctgtaatcccagctccttgggaggctgaggcaggagaatcacttgaacctgggaggcagatgttgcagtgagctgagatcataccac

SEQ ID NO: 35536 - DNA, 201 bp, Homo sapiens
atgaattctcttgttctctttagagaataggacttaataaaattgctgtcatgtgaagaggtgatatagagcagagccccaaactaggaaaaaacgagttrcataagtgtgtcaggcaatcagttggatttccaggaagtacactacagtaagagctgccaatagtgagcatcaaagaagttggaagaaaggtatgcacag

SEQ ID NO: 35537 - DNA, 201 bp, Homo sapiens
ggactagagccataaaccaaacattgcagaacttaaatctttacacagtgtgtggtcatttccaaaaggcctacaacttctaagtttagttgctttgtttkttttttttttttttttttttttttggagggggaggagaggactttctacttgcattactgtcctttcaacatgaagacaatgctattggaaaatgagatt

SEQ ID NO: 35538 - DNA, 201 bp, Homo sapiens
tatgagcaccttgtgtgagaataaaagtaaagcacttcagggctgggctcggtggctcatgcctgtaattccagcactttgggaggccaaggcgggcggaycacttgaggtcaggagttcgagaccagtctggctaacatggtgaaaccccatctctaccaaaaccataaaaaattagcagggcgtggtggcaggcacctg

SEQ ID NO: 35539 - DNA, 201 bp, Homo sapiens
tctattttacagatgggaaaggaatggcttatacaaaacaaggaacttgctcaaggtcacagtactattcaaacctcagaggccaagctcttaggcactgygatatactactggctttgctcagtaaatggacctttcagcttaaaaaatgctgtacatcacaaactaacacagaaacagaaaaccaaacacagcatgttc

SEQ ID NO: 35540 - DNA, 201 bp, Homo sapiens
aagccataggcaaacaattccctaccttgttgggtcattgggaagatcgaaggggattataagtgaaaaagtatttttcatattgtaaaagcatatggaayattatttaaaaaaaaatcagtacacttggtatgcatccatttttatcatcattcatttatttaagggaccttcttaagggacttttatggagtgcctatt

SEQ ID NO: 35541 - DNA, 201 bp, Homo sapiens
tttgtaagtgtatctgaatttgctaaaatattcctttagttgataaatttgttttcacttctttgacagagtttgtttgcttttaaaatgtttttcctttytcataacatgtctaactaggatagctctgttgacaagtaacaagatgaatgaaagtattaggacagtacagatatcattttttccccaaacccttttctg

SEQ ID NO: 35542 - DNA, 201 bp, Homo sapiens; identical to SEQ ID NO: 8349

SEQ ID NO: 35543 - DNA, 201 bp, Homo sapiens
ccttctgccagccctgtatgagcactccatcatctgttgcctggatgattgcagttgtcttctaagtactttacatgactcacctgtgcttcaatacaatsattcccaacagtgtggccttcaaaattcttctacaatatgtcagatcacatcatgctgtactcaaaaccctccaatggcattctcatttccctcagctgg

SEQ ID NO: 35544 - DNA, 201 bp, Homo sapiens
tagtgtcattttattattttttttgctatggttcaagtgagctatcaccttaactctttttaaaagtgaagtcccagaccgagtgcagtggctcatgcctrtaatcccagcactttgggaggctgaggtcaggagttcaagaccagcttggccaacatggtgaaaccctgtctctactaaaaatacaaaaaaattagccag

SEQ ID NO: 35545 - DNA, 201 bp, Homo sapiens; identical to SEQ ID NO: 8350

SEQ ID NO: 35546 - DNA, 201 bp, Homo sapiens
ttcagctccatagactgttgggacagttaatgattttcaaatatattttacttcctttgagagacttgtctgttctgttgcccaaataggtaacagaaacyttgcaattctgtcagcaaagattcctgcattattatcttgttctgaaaaggtgactgaaattcttccatttattaaagtgtctagagacagtttttgcta

SEQ ID NO: 35547 - DNA, 201 bp, Homo sapiens
aaaaagttatggccccatgaactatgggcctcctcactccatgcctgagagtgaagctcacagcactggagccccactcttgtccaagggaaaatgattcyacgcaacagagcacacttctctgcctctggtttaggagcctcagtgaaagcctacaccctctcttcagacactggggcctggaaaatcagaaatagagcc

SEQ ID NO: 35548 - DNA, 201 bp, Homo sapiens
agagccctgagcattttcctcccagtgcttgtgttaggagttgaaagccagtttaagagtctgcccccaaggccagcttggcagttggcctcagtccactsctctggcttggtcaaaaagttatggccccatgaactatgggcctcctcactccatgcctgagagtgaagctcacagcactggagccccactcttgtccaa

SEQ ID NO: 35549 - DNA, 201 bp, Homo sapiens
gaaacatgactgaatgatggtattactaaagagaattgcaatgttcgataactcaagaatggatacagtggttgatgccctaggtcagtggaagacaggargtggagagatttatttagtatattatatgactcgtctaatttccttttaacattcacccactattgctttgagccagattctatcatagggcattctttg

SEQ ID NO: 35550 - DNA, 201 bp, Homo sapiens
ccaaggtatgatcgaaatttcaaaaaaattgcaacctcaggcataaatgcgttttaagaggtgagacacagagacctgaagtgtgactataaagtaatggstgactttcatttggactcagtcttaccacctcgtagttgcccttcatcaacacggggttactggtgaatttccttgcatcatgtacatcctgttgcagta

SEQ ID NO: 35551 - DNA, 201 bp, Homo sapiens
ctcaatattattcatcataaacacaatgctaagaaatggcccaggtaaatagtagtcagggccttgcattcttgatatacccattgtattaagttgaatgktagtctcccccaaatatgtctctattctaatccccaacacctatgagtattaccttatctggaaagagggtttctgtagattgccttgaggagactgatg

SEQ ID NO: 35552 - DNA, 201 bp, Homo sapiens
gtttcctttattctttccactcttccttatgtcacacatctggtcagtggccacatcctgtcatttctatttctgcatttcccattttatctgtcttcttyttctgtgtgtgtatttcagttgctacttccgtcaactggtgacaatcccaaatgtctcaaaagcagattccccacaagagaagatatgattggtttggtt

SEQ ID NO: 35553 - DNA, 201 bp, Homo sapiens
cttcactaaacagagccctctcttctttactgctcttctcctgtagggattctatccactgtcatggcatcagcagcagcactgttgggttatctcattgytatgttgtcagccctacactctctcccaaaactcacactggcatctagctgatgatgaatatttttatttggagtgttggctcacttaccaaattcaatc

SEQ ID NO: 35554 - DNA, 201 bp, Homo sapiens
ttcttttatcctatattactgtttactaatttttgtttcaacagtgtgtattctggagttaaaacattcattgagttcttaatgatggttattatatttckcagtttatgagtttctatttggttcttttctaaatttctttgctaagatgtttaagtttagcttgtccccttcacaacttttgtaaagttagtgctggtt

SEQ ID NO: 35555 - DNA, 201 bp, Homo sapiens
catgagctcctgccttttttcatgtcctctctctctttctggaatactctttagccccagcctccattctgtgcatcgtttaaatcttaatttcactgagrttcatgcaccctaggaaccctgccaatcttctaattcaatttaggtatcactcctcacttggacccttccatagcaatgttacattctatttcaataacc

SEQ ID NO: 35556 - DNA, 201 bp, Homo sapiens
aaaccatcctggatttcataacctcttctaaaccatattctgaatgctggtgcataaaaatagatatttcaaaataattgacttagtgttctatggtggargaggggaaggaaaaacttagccttggaaattggggcacttttatgtaatctttattattttttcagtataaaaatttaataaatagccctaatgagaaaa

SEQ ID NO: 35557 - DNA, 201 bp, Homo sapiens
gcagaccctgggctatgaaatagagaggatattaactaatcagggaaaggtgtgaagttgatccaggtatgcaaagagggaaagaaagcagaggtatggawaaaggtacctcccatcctccagagtggctgcttagattgatgagcccatgtatacattttggtttcaaacatcttttcacactaatgcagttatgattaa

SEQ ID NO: 35558 - DNA, 201 bp, Homo sapiens
attcttccatttattaaagtgtctagagacagtttttgctacagaagccatatataactcctgaccactgaaaggctttctgtataaaaatgaagttaatktttaaacagagcaatggaaataaaagagtgttcaaaaaatggaaataaaacacagcaatggaaataaaagaatcactgtattgtcagtgcaagagattac

SEQ ID NO: 35559 - DNA, 201 bp, Homo sapiens
cattgcacaagagaaactgagggaaggggaggagctttgatgactatacaaaggatattatcagagagaaaggagaggaagagagttaggtgtccagcacyagtaacagctctggcagaaaggagcccctgcttagaagctgcaggttatcatgggaaggtaggcaaagcagaccctgggctatgaaatagagaggatatt

SEQ ID NO: 35560 - DNA, 201 bp, Homo sapiens
gtatacattttggtttcaaacatcttttcacactaatgcagttatgattaataagctgtttttagggcatgtaatatataacactccaattccagtggcakaattaatatcagtgcgttagtcagatttcctaaaaaccaaacaagttcttttagaaatatagatttatgtttctccagttaagccttcaattccccttat

SEQ ID NO: 35561 - DNA, 201 bp, Homo sapiens
gccatgaagaacctcagagatcctggagtacagtttctaccttttaaaatggatgtaagtgatactagaaaagcaagcaacataactagcaataggactcrtctcctagttcctggggcagatgtttaggttcttgaatagaatactgacgcaatgaaaacagaaggtccttatgcccacaatgtggtattcaagttgttc

SEQ ID NO: 35562 - DNA, 201 bp, Homo sapiens
ttgggttttagttttagtttaggagaccagttgtgagatgatggtggtaaaaactcagatagtggcagtagggaaagagactggaggatttattggaaagkcattaaagaagaagagtgaacaggatttgatgattgatttactatggaggtggagagagagggagaagataaggctgatgcttaggtttctgacatggac

SEQ ID NO: 35563 - DNA, 201 bp, Homo sapiens
gaattttcattcctaagagagatatttgttaaagaaaatattgtcaagtttatatgtgaaatttggaacaactacagccatcttgcaactgcgatgtcaaytagcttaaggataaagctagtatattggagttagccttatggaaagaaatggactttgatgttgtctttgaacttctgaattattggaatttaagactat

SEQ ID NO: 35564 - DNA, 201 bp, Homo sapiens
ccttgagcaggggagtgacatgatcagatgaggagagtgggttggatggaggccaggtggaaagcaccaagatcatttaagaaagaatatgtttgggtttyagttttagtttaggagaccagttgtgagatgatggtggtaaaaactcagatagtggcagtagggaaagagactggaggatttattggaaaggcattaaag

SEQ ID NO: 35565 - DNA, 201 bp, Homo sapiens
acaggcatccaataatgaacactgaaggagctcaataccctattattatattttagccacaccaaagtgaaaacccctggcttataaatccattcattcamctaacaagtactgattgtctactatgttaacatactagtcaatataacagtaatcttgggaagacttctactatcaattctaaagtaatacttttgtact

SEQ ID NO: 35566 - DNA, 201 bp, Homo sapiens
catttccctatgtgagcatctagaataggtcaagcactgtccatgttcccttagagtatctcagttaatcttcacaataacaattaattcttacaactggrtggaagcagaaagaatatgagctcttatttcaaaaatacccaacttttacttctgactagccatgtgaacttaggtgaattattttacatcacttattct

SEQ ID NO: 35567 - DNA, 201 bp, Homo sapiens
tgtgatgagaccctgtacttacttccaccatgcttcctacttatagatcactgtcttctctatgtcctctgagttgtttaaagaagcaccttaaccctcarcatgatcaatctgaactttgtggcttccgactagttaaactgcatgagaacatagtctggctctatatctagattctgcttgacagcttgggtcagtttt

SEQ ID NO: 35568 - DNA, 201 bp, Homo sapiens
gcctccccactttcctaagattaaaattccagtgttacctaccccttaccaccttgtgggatgatcaccaagacaggtagatttcaacatcaagagttagyggctgtgagcggctgtgtcagttaaattccttccgaagtggatgatgactactccctgtcttcatgtgctgacagccctggagatattaaaaggtagaag

SEQ ID NO: 35569 - DNA, 201 bp, Homo sapiens
tgctcagcttgggatattagtaaaagatttagcacagcataaaacaagagaaaccatgaaagatcaccgctctgattggcaagtgaaagaaatggaaggtkggtggagttctttttttccagttgttcagtgaccaatcatttaccagcagaacatacagaagagtggctccctacaggggagaatcctagcactgcaaat

SEQ ID NO: 35570 - DNA, 201 bp, Homo sapiens
cagaatactaaaacctctggatcatccatcttaaaggtggtctctacactaatggtggaaacagatttgaccaacctcattcagacccaaaccattcaaaytggtttgcaactaaagaaggataggaagaacgaataatacaggcatccaataatgaacactgaaggagctcaataccctattattatattttagccacac

SEQ ID NO: 35571 - DNA, 201 bp, Homo sapiens; identical to SEQ ID NO: 8324

SEQ ID NO: 35572 - DNA, 201 bp, Homo sapiens
tttcgcctggtaatactcaaccctggctgttcattttaatccctctgttcgctcttttaaataacagtgcccagacctaacccaggcaattaaatcagaakctctaggggtaagattcttacaccagagtttttctttaaccacccccactccatccacaccatggttctaacacgcaacctgggctgagaagcgctgctc

SEQ ID NO: 35573 - DNA, 201 bp, Homo sapiens
tcaccttcaaatcttattttaacacttacattcaaatttgctttccagaaaccttttcacaggtgcttaagaagaaaatgtactcatagtttagtcctatrtttatcacctttcagtgctcatttctaagtgcttaataccatgaaaatggtaaatgggcagtctgaggatgaaaaagagagaacataagaggcctagata

SEQ ID NO: 35574 - DNA, 201 bp, Homo sapiens
tactaggtcctgagccactgtttgacttaaatttatggactggggtttaggattcagtatttacaatggctcatatatttctgatgtatggtctggtttgsaagtgattgcttaaatatcatcactgcctccccactttcctaagattaaaattccagtgttacctaccccttaccaccttgtgggatgatcaccaagaca

SEQ ID NO: 35575 - DNA, 201 bp, Homo sapiens
cgtaaattgtccagtgggaataaatggaaaggatatgcacagtgttctcagacccctaccctcactgctcatcccctaatcccccacgcaaagaagctacyctggttggaatcccacctcagagccccagaaatgagtgaggagaggggaggtccccagtttcattctagtctgagtggtcctatgagggtttctctgatc

SEQ ID NO: 35576 - DNA, 201 bp, Homo sapiens
aatagataagtcttttttcaaatgtggtgtttgatgtttttgattaaatgtgttttgcctctttccacaaaaactgtaaaaataaatgcatgtttgtacamaaagttgcagaattcatttgatttatgagaaacaaaaattaaattgtagtcaacagttagtagtttttctcatatccaagtataacaaacagaaaagttt

SEQ ID NO: 35577 - DNA, 201 bp, Homo sapiens
ttattttactatagaagcttaattatttattctccctgcctctacccctcctgccttttgctatgacaaacctcacatacctacaaaaggtttgccttatyagtatgtctttgaccccctggcatcagaaacacctggaatgctaatttaaattgctgtgttctggatcacatcctagacattacttcagaatctctagaa

SEQ ID NO: 35578 - DNA, 201 bp, Homo sapiens
tatttcttacttgaggacgaagcgctgtgtttcttcccggggggacttggaataaaccaagcgccacttaaatacttggcagaggggaattcttccttccyttctgccttcctcttattgttgtaacattgtctattcgacgaatgtaaacttaggctaggaaaagttcttttcacttctggatcctagatgccgcaatga

SEQ ID NO: 35579 - DNA, 201 bp, Homo sapiens
agccagattcaacatttccaaaactgaatttaatacgtgtcctccagaattttctcctctattggctaccattgtttaatggcagtattattatcacacaracatgaaagccaggaatttgtccccatgttttcaacctcacagccactctccaaattctcttggctctcctcccatccatgcaactcctgccacccagtc

SEQ ID NO: 35580 - DNA, 201 bp, Homo sapiens
acaactttgatactgtataactgtacagttatattgtaaaaaaaatgatgggtagaaatagcgataatagtattatttctgaagcaggatccccctgagtrtagatatttactattataaatatattgatcaacacttaagtaacaaatggaaaagtgtcagatctctttaaaatgcaaatgcagaccatattaatttaga

SEQ ID NO: 35581 - DNA, 201 bp, Homo sapiens
tgaacttggctgggcatggtgtctcacgcctgtaatcctagcactttgggaggccgaggtgggtagatagcctgagctcaggagttcaagaccaacctggrcaacatggtgaaaccccatctctactaaaatacaaaaaattatccaggtgtggtggtgtgcacctgtattcccagctacttgggaggctgaggcaggaga

SEQ ID NO: 35582 - DNA, 201 bp, Homo sapiens
cgtcatctccttcacaggctctttccttgttggtgtttgcagagtttcatcctgaatcctcctcttcattctgcagattgtctctgggcccattccctgcrcaggtccctatctccagccagcctccccttctgagttccagatcagtatttccatcagccaccaaatttctccagctagacagtctgtaagtaagccaga

SEQ ID NO: 35583 - DNA, 201 bp, Homo sapiens
aaaaaatcctacacaataacttagtgtatttcttagcaacaactttgatactgtataactgtacagttatattgtaaaaaaaatgatgggtagaaatagcrataatagtattatttctgaagcaggatccccctgagtatagatatttactattataaatatattgatcaacacttaagtaacaaatggaaaagtgtcaga

SEQ ID NO: 35584 - DNA, 201 bp, Homo sapiens
acagcaattttctcagtattctaagtaagtctaaagagtttagttttttaatgagtgaaattttaaaatactggcctttttatttaacagtaatggctttwcccccctcctttttacttttaacagagaacaaccctttattgtcagcaaccaaaacaaaaggttaacattttcagtaacgctgaaaaataaaagggaaag

SEQ ID NO: 35585 - DNA, 201 bp, Homo sapiens
cgagagtcttgattattcacaacaaagatattctacataattgagagctgactgtgctctaaattgtaaacacatttggaatcattttcttgttttaatgytgctatgctctaataaactgactctgtctccccctgtatgtttgtgtgtgtgtatgtttaggagccctctgatgttgtcaactctttggatttgcgtgtg

SEQ ID NO: 35586 - DNA, 201 bp, Homo sapiens
aagagaggctaaaagcagaattaggatggaagaaaagaagcgagagtcttgattattcacaacaaagatattctacataattgagagctgactgtgctctwaattgtaaacacatttggaatcattttcttgttttaatgttgctatgctctaataaactgactctgtctccccctgtatgtttgtgtgtgtgtatgttta

SEQ ID NO: 35587 - DNA, 201 bp, Homo sapiens
gaaatgtatattctgggttcttaccatcagaaatctaggtttgaaggcccaaggaatatgcagatctaaggagcaacccaaatatttctgatgtaaatggrtggtacagagagatcttacttcaagaaatgctaagtgtaaacactagaaaaacataaagttgacggttagatgaattaaaatcagttgagttgtttagtt

SEQ ID NO: 35588 - DNA, 201 bp, Homo sapiens
aaatatatatacagaaggctcatgaaataattttagtttctttgatattttaacccttcccaatactgacatgaaaaaaaatggaagcaaatatgcttccrtattaattgaatgctgctgagtaacctgctgcagtttctaaagatcaaactgatacctgggctctttctgtgcaatcttctgtggttctaagtgtcaggt

SEQ ID NO: 35589 - DNA, 201 bp, Homo sapiens
aatggaatgatggatagctttgtatttctctttaagtaatttcctaatgtttctttctatagtgaaagccaagaagaaaacaaggctgataatttggtcarcctcaaaattcctctcctgtatgatgctgaaattcacttaacaaggtaggtgaagcagtgggtaacctgctatcactgacaccaactctagatcagaaga

SEQ ID NO: 35590 - DNA, 201 bp, Homo sapiens
atgttagggtttcatttgtatagacatagtgcttttttgacaagaactgatgagcttaactaagaatccctgcttcaaattcttactagacccaagtctcytttggtttcttagtagaagagaggctaaaagcagaattaggatggaagaaaagaagcgagagtcttgattattcacaacaaagatattctacataattga

SEQ ID NO: 35591 - DNA, 201 bp, Homo sapiens
atccatacaagccctccttagcacatatgctaatttaccaacataacatcttgctatcatgatttgataggcatcacaaaataactagctgcatacttagsggaagttttcaatatctaaatgttttctttaaattattaataaaaatgggattttctccatgcaattcattccaaaaggtacacatactatggaaagttc

SEQ ID NO: 35592 - DNA, 201 bp, Homo sapiens
ccaaggggcagagccacacttcctatgatagttccttgctataaggtgctattttgttctctacatttactccatagtaagcttttgtttgagaaaaaaaatgccagtttggtgcgtagtagatacgcagaggctgagaaaggaacagatgacacaataacacaatggtaacagaatgtataatgcttccctctcaacttg

SEQ ID NO: 35593 - DNA, 201 bp, Homo sapiens
aaataagggttttagttatagacacttaagtttccttacactggagatgcccgagaatggttcactagtcatggaagatttgtttagatcttccttccacrtctctagaaggttctgctgcagaaagttgtaatctctatgacataaccaagggccctcctgcttccatcctttgagtttctcttacctccatttctctta

SEQ ID NO: 35594 - DNA, 201 bp, Homo sapiens
gccttgcgtccccattaggcgcgtctcgccctgtctgttaagcaccctccaaagtcatctcagtgagtgctttgttttaggtacacacacgcacgcacacrcacacacacacacacacacacacagacacgcacgcactcaagcatggacagtgtggggatccgcgggtgtcctggagaccgcgagtcctgcagcccaact

SEQ ID NO: 35595 - DNA, 201 bp, Homo sapiens
tgttcaaggaggagacaactttcagatggaaatgtcacaagtgggattcagtgcagattactcttctcaaaatgtgcgtatatcagatagcttcaagccaygttgtcatttggcataacacttccagacacagtagccttatacataaaatgggaagacagccatctagggatcagcccttctgattcctagtcacggtca

SEQ ID NO: 35596 - DNA, 201 bp, Homo sapiens; identical to SEQ ID NO: 8346

SEQ ID NO: 35597 - DNA, 201 bp, Homo sapiens; identical to SEQ ID NO: 8347

SEQ ID NO: 35598 - DNA, 201 bp, Homo sapiens
aaagaactgccagggaaacttttgggaaatgtatattctgggttcttaccatcagaaatctaggtttgaaggcccaaggaatatgcagatctaaggagcamcccaaatatttctgatgtaaatggatggtacagagagatcttacttcaagaaatgctaagtgtaaacactagaaaaacataaagttgacggttagatgaa

SEQ ID NO: 35599 - DNA, 201 bp, Homo sapiens
attctttaatattttatctatctttgttggcattgttaagtcactggagcaagaaaaattgtacaacatatatgatagatttttttcaaggtaacatgtakaattcatgttttgggaagtatatacaacctttaaaatattgaaaataataaagtaagatagaataaccccaaataaggcaataaggcagctgatgctgtg

SEQ ID NO: 35600 - DNA, 201 bp, Homo sapiens
gggatgctataagaacaggacagacacaattctgatctttgtgtgccttatattatattggaggagacaaataaaaagaaagaagtagataagataaagtrttccagatagtaataaaggaatttttaaaaaagcaaatgaaactaaaataggaaataaaatttcagcaataggagtatcaggtggttgaaggggtgacta

SEQ ID NO: 35601 - DNA, 201 bp, Homo sapiens
tcttgtgaagtcatgaaatatttccatacttgatcataaaattgaagaaaaaaactgtgttttacaaggaaacgtcttttcctttgcacagaattatttartgtttttaataatggagatattaacaatctcattttctacttcctgtaccactataattatgtcactatttggtaatttttacagaaagcctaaattaag

SEQ ID NO: 35602 - DNA, 201 bp, Homo sapiens
tgtccagaagacatctcatggccatttgatctttcctaaacaagcctttgaccaaattctgcaggacagaaatcacagttcatatttaggtaaggcatggyaataattggctcagcaaacttaagttcccttgctttaaaccagctctttgttgaatctcagggtgagttcagcaaaatccttgaactgtcatctaattat

SEQ ID NO: 35603 - DNA, 201 bp, Homo sapiens
cgaaaaaaaaaagaaagagatcctgggaattatttaaggaacagtaggaaatcccaggatttgatcggcaggtcagaggaccaagaacagcttgttttctrtctagaatcaaaggaactgactttttctggatcatcaatccttagagatgctcatagaagttatggatctttccctcagaaaaaatgtaaatgaatctat

SEQ ID NO: 35604 - DNA, 201 bp, Homo sapiens
gcatgagaacatagtctggctctatatctagattctgcttgacagcttgggtcagtttttcccttatcctgagacttggcagcagtagccagacactcccrtaactcttcttgagctatcagtgtgatgaggctgctgcattctgcacagatgtggtgcacttgctctgagacatttgagtcccaaagcttagcctgagct

SEQ ID NO: 35605 - DNA, 201 bp, Homo sapiens
gtattattcctgcaggaattttctttgaatcaattaactactggaaatgtttgttaaaaacacgtactcttgtcatcaccgtcatggtcgaattctgaatkgtcatagtatctttttctaagagcagacagaaaagagttgaaaaaataaggaggtaggaaaaacgtgaggtggaattggaatacaacactgtcttttcag

SEQ ID NO: 35606 - DNA, 201 bp, Homo sapiens
ttctgactcctttgtaaagttcataagggtttaccattggcaaatatatgcctttgaaagggaaatttgaagatggctctgtacctgtcctgtactacagrttattacaaaggtttgtctgtataacatatcatactaaataaagtccaaaataacacagccaatgggaaggcttgttctctagcacaaatatattaagac

SEQ ID NO: 35607 - DNA, 201 bp, Homo sapiens
ataaaatgggaagacagccatctagggatcagcccttctgattcctagtcacggtcatttagtttctttgtgctgctgatttacctctaaaatttgaaggwtaataatgtcttcccttccctgtttcacagggatcttatatgggggaaaactgatagtataccagaaagtctttgagtaccccagggcacagactgtata

SEQ ID NO: 35608 - DNA, 201 bp, Homo sapiens
aaattctgtaggcattttttaggatcttaattagatttctcttttgcacttgtctcctttttcatgtatcaattttaaagttatttaatctaatgtttctmgtgtcatttaatcatgatttaatcaggagtttttggcattcaaggactcctgaaaaggagagaattgggattgcattaatggagatattaaggattggag

SEQ ID NO: 35609 - DNA, 201 bp, Homo sapiens
tcaaaaaccttagaatcatacatgaaatttacagtgtatcataaagagaatgtgacactcagaaaggatctgatgtggatagtgtaattcaaatttggccraaaaatgcagaatattttctatgtttctatagtctacattatagaatacaaaaaagattttaggaaataaaatgatatgctcagttttataataaactga

SEQ ID NO: 35610 - DNA, 201 bp, Homo sapiens
aaaatctttcaactctaacgttaaggctgactgaattaaagtgtgctagagtgttctatcttagtttgagaataattttataagatgaacgaggagagaayttattaatgaactattaactttcaaaataatctgcattttcctttttccctaagtgttcatgctattctgtctgctaatacttcaggttaaaaccttcat

SEQ ID NO: 35611 - DNA, 201 bp, Homo sapiens
actcatccctcctagaatgtaattgcctgtctctctctctctgtctgtctctcatctctttctttaaaacattgaagataatctgaaattatttcagtaawtgttgccatgttttcattcacctcatttcattcaatgcctacagttgcagtttattgttttaagcactgcgggtaattaaaactaaatgagacacagttt

SEQ ID NO: 35612 - DNA, 201 bp, Homo sapiens
tatccaatgctagaagggtcaatcccaagcaaaattataaagtagagaacttttacttttgcaacaaaaaggaaagcttgaggtaacctacctttgctggytcccaccctaaaccacctctctggtctcatcctcagccccttaatgggacttaggccgccctctgataaagtaactttgctcccctatggcttagcagtt

SEQ ID NO: 35613 - DNA, 201 bp, Homo sapiens
ttatctcattgctatgttgtcagccctacactctctcccaaaactcacactggcatctagctgatgatgaatatttttatttggagtgttggctcacttaycaaattcaatctgtcccacactggccttattcttttccctaccactcctcatgaacttgccattttgattcatgccactgtctcttgcctagtcagtcga

SEQ ID NO: 35614 - DNA, 201 bp, Homo sapiens
actgacacctgctcccaacagtctcagcactcctcctcccgcaaggcttgccactgggcacagagcacctgccaccttctccatcacttctgctttccccraaggcattactgactcattggttttgagttgacaattattagtatcttagaaaagagtagagatgatttctgagctccataatggagaggtagaaggttt

SEQ ID NO: 35615 - DNA, 201 bp, Homo sapiens
acaatattatatggcatttgctatttacctggcattgttcttagtgttttgtatctatagacccatttaatctttacaacaatcttaaaagatagaatgtrtggttatcctcattttacagatgaatcacctgaggcccaggtaaatgagagacaaaaagtgaacctgcatgcattctcctccttggtgttctctggaagg

SEQ ID NO: 35616 - DNA, 201 bp, Homo sapiens
ggattgcattaatggagatattaaggattggagcaggtataatgtgagcaagaagacaagtgccattcagcgttagtgactgcagttaattgggaagtggscaaagttaaaaactggtagtcagtgaacctcatttgtgtttgcttagcatatggagtaattttgaactgaattttcacacaacatttgccctctcgactc

SEQ ID NO: 35617 - DNA, 201 bp, Homo sapiens
aaggtctttacaataaggttgctttaatctttttgttttttgattttaaagttgcaaaaatttaaaaaaagaacatactgatatttagagattacagaatktgcctcaaaatttttaatctataactccagataaagtaaaaaatgaaaggtaaaaagcaagagaatttgagagattaattagcagtccaggtagcaagca

SEQ ID NO: 35618 - DNA, 201 bp, Homo sapiens
gagactctgtctcaaaaaaaaaaaaaaaaaaaaagaaaaaaaagtcttagacagcataattcaactttacactagttttatctgaaccattggcacgcttycttaaaaatcctatgttttataactgtattattctaaaaatgtaatcaattttcaacgtcattctatttttactaatggatattattattctgatgactg

SEQ ID NO: 35619 - DNA, 201 bp, Homo sapiens
ccactgcactccagcctaagcgacagagtgagactctgtctcaaaaaaaaaaaaaaaaaaaaagaaaaaaaagtcttagacagcataattcaactttacaytagttttatctgaaccattggcacgctttcttaaaaatcctatgttttataactgtattattctaaaaatgtaatcaattttcaacgtcattctattttt

SEQ ID NO: 35620 - DNA, 201 bp, Homo sapiens
agttcctctgaagaattgaggcatgaattagaaaagagtgttgtgaaaatcaagggaaagaagagtttcaaaaatagtgattaagacttggaaacaagggmagtggtgtttcttgcatatctctgtagacctaatatctagaataatttatggcacataatagggctcaataaacatattttcagtgaagtagaaggaata

SEQ ID NO: 35621 - DNA, 201 bp, Homo sapiens
aatacagacagcttttttttgcccttatgtctttagtaatatggggcacaatcatatccaaatttccaaaacagtttggagacttgacttaacaagatgcrtggaaaatgtgctatctcctggaccatttacctatagaccatggactggtttccatcaacatttagaataattttgatgattacttgcagaatcaaggct

SEQ ID NO: 35622 - DNA, 201 bp, Homo sapiens
tcccaaacatcttgttcagaaattctttcaaataagatgctctccagtggcattttctctgaaagccagaaactccctgccccatatgcacatatagcatsttctttccagtgttgttgaagcccataatagaggaaattcagcacaataaatagacctcaattgactacgctgattaggagcacattggtttttgttgta

SEQ ID NO: 35623 - DNA, 201 bp, Homo sapiens
gtggttgaatataaaatgacatgttttgttttatacattatttacgctcttgttgttaaaagactttttcctttctgagtttcactgcatttttttttttkgggggacagggtcttactttgttgcccaggctgaagtacagtggcacaatcacagttcactgcagccttgaactcctgggctcaaatgatcctcctgtct

SEQ ID NO: 35624 - DNA, 201 bp, Homo sapiens
ggcgggcggatcacttgaggtcaggagttcgagaccagtctggctaacatggtgaaaccccatctctaccaaaaccataaaaaattagcagggcgtggtgrcaggcacctgtaatcccagctccttgggaggctgaggcaggagaatcacttgaacctgggaggcagatgttgcagtgagctgagatcataccactgcagt

SEQ ID NO: 35625 - DNA, 201 bp, Homo sapiens
ttctggcttgtagtatttctgcttataaggttcgttgttagcctgatggggttccctttataggtgacctagcccttctttctggctgcctttaacatttkttctctattttcgactttggagaatccgatgactatgtgttttggggatgatcatcttgtctggtatcctgcaggggttctctgcatttcccgaatttaa

SEQ ID NO: 35626 - DNA, 201 bp, Homo sapiens; identical to SEQ ID NO: 8334

SEQ ID NO: 35627 - DNA, 201 bp, Homo sapiens; identical to SEQ ID NO: 8336

SEQ ID NO: 35628 - DNA, 201 bp, Homo sapiens; identical to SEQ ID NO: 8338

SEQ ID NO: 35629 - DNA, 201 bp, Homo sapiens; identical to SEQ ID NO: 8340

SEQ ID NO: 35630 - DNA, 201 bp, Homo sapiens; identical to SEQ ID NO: 8343

SEQ ID NO: 35631 - DNA, 201 bp, Homo sapiens; identical to SEQ ID NO: 8345

SEQ ID NO: 35632 - DNA, 201 bp, Homo sapiens
tgtagtgcaaggcaacttaacatttcaagtaatttcattacaaagtgattgatcagggctccaaattgatgatagagttgctgccatttgtagggagaagscttgttgaacgctagcaggtgcgttacttcactctccagatgtgtgtggcatgcttacctctacttgttaaccctgcaggatattgtatgcctgtgagaa

SEQ ID NO: 35633 - DNA, 201 bp, Homo sapiens
actaagaaaacacccttgagatgtcaaggtatgtcaagtgacatacaaggattgtgtcaagtcctacatatcttcctccttcatgaaaagtcaaatgtttwtcctcaccttgcttccagcaatttaagcagcaaagtggatgtttctcagaccacttaggagatccagtctgaaatatggatctcatttcctgtatttgaa

SEQ ID NO: 35634 - DNA, 201 bp, Homo sapiens
gttattttgatattttcctatcagggaaaaattttatttattgttcagctactgaaaaataactccaattgtggtttctactattagatttaagttaacayagatgaaatatagtagattatgagataacaattatttgttctaatcgtatgctgtaattactgtatttaacatggattttgaaaatttcccaagtgagaa

SEQ ID NO: 35635 - DNA, 201 bp, Homo sapiens
taaatgagtcaacatatgaaaatgcttagggcatagaaagcactcagcaaaggctagttgttgttcttggtttaaatttggtttcattctttagagctgtsctgaacaatacgtagccacgagccacatgtgactactgagcacttgaaatgctacttttccatattgagatgtgctctaagtgtaaaatctacactgaag

SEQ ID NO: 35636 - DNA, 201 bp, Homo sapiens
ctgagactgccaaggtcttcagtgtaagtgcagcttacacttcctggatttagactggcaaataaagttccacagtcactgcaatagtgtctgaaggatgkttaggatgcagcctgaaaattcttaattttctaaatgaactacaattacatatgcataaagttcactaacacttaagttccatgacagcagggatttttg

SEQ ID NO: 35637 - DNA, 201 bp, Homo sapiens
tttgttctgtatttttgctaagtatcctctcataaagacagttagcataaagccactaagataagatatctgctctctaaatgagtcaacatatgaaaatkcttagggcatagaaagcactcagcaaaggctagttgttgttcttggtttaaatttggtttcattctttagagctgtgctgaacaatacgtagccacgagc

SEQ ID NO: 35638 - DNA, 201 bp, Homo sapiens
gtaaacaccaatctcatcctgtattctagatatatgcactttgttacacataaagatagcttgtaatgtatttgttctgtatttttgctaagtatcctctyataaagacagttagcataaagccactaagataagatatctgctctctaaatgagtcaacatatgaaaatgcttagggcatagaaagcactcagcaaaggc

SEQ ID NO: 35639 - DNA, 201 bp, Homo sapiens
caatcttctgtggttctaagtgtcaggtgagtgcttctgcaagaaaacccatattctctaggtgaagttctgaaggaaatgaaactaaccgaaggaaggaygtaaacaccaatctcatcctgtattctagatatatgcactttgttacacataaagatagcttgtaatgtatttgttctgtatttttgctaagtatcctct

SEQ ID NO: 35640 - DNA, 201 bp, Homo sapiens
ggataaagacaccattacagacgtgctcttggtaggtgcaccaatgtacatgagtgacctaaagaaagaggaaggaagagtctacctgtttactatcaaaraggtaaaaaaaaaaaaataaactaatagtttaatttgctttagtactggtaatttaacttgcatttggaaagaaaaatttattattattgaatgataatt

SEQ ID NO: 35641 - DNA, 201 bp, Homo sapiens
ctctttctgtgcaatcttctgtggttctaagtgtcaggtgagtgcttctgcaagaaaacccatattctctaggtgaagttctgaaggaaatgaaactaacygaaggaaggatgtaaacaccaatctcatcctgtattctagatatatgcactttgttacacataaagatagcttgtaatgtatttgttctgtatttttgct

SEQ ID NO: 35642 - DNA, 201 bp, Homo sapiens
agcagtctgctttaatccttttgtatctaccgtacctcaacatggggcatatgttgtttaaatgataattataaaatatatatacagaaggctcatgaaakaattttagtttctttgatattttaacccttcccaatactgacatgaaaaaaaatggaagcaaatatgcttccgtattaattgaatgctgctgagtaacct

SEQ ID NO: 35643 - DNA, 201 bp, Homo sapiens
gtatgaaggtttagaagcaacagagactctaatttgaaggagaagctaaattcgatatgactgaaatgtgatttcaggaagacacatagaaaaagccaggkttagagaagaaagagtcagattctttcctttttacactttaagatatgtccagcatgcaaaaatcagagttaatgctgtgtaatactactatgaaatgaa

SEQ ID NO: 35644 - DNA, 201 bp, Homo sapiens
ttgctgttgttttttttaactcatttgttcaacaagtggttattcattgctacaggcacagaattcctagccctcatgtacctttcctctctagtgagggmtttagtcagtaggaaggcagctatggggcaatatgattttttttaatgggatgtggaaaggtcagaggctatgtaggtacttagggttacctcgagttaa

SEQ ID NO: 35645 - DNA, 201 bp, Homo sapiens
agtgtcaaacatatgatatatggacacactgtaaaaaacaaatagccgcaaatcatgaagcaggatattatcgccagatgtcagctagagtctctctctcygcctcttaaaattgagataagatttattcaaatccctattccattcttataagaaaatgcagtgccctctcaagatttccgtgaactcccaggagatgtg

SEQ ID NO: 35646 - DNA, 201 bp, Homo sapiens
cacatatgccctgacacacaagacattgtttttaatgtcaagcaagacttccatttgtatatgtttctctacaagctacaaatggaacattaaatatgtcytcagaattaatatggagttacaatagattgtgtttaaagaagctagtttcatgtttctattttaaaccagaggttctcatattaacttcatattttgata

SEQ ID NO: 35647 - DNA, 201 bp, Homo sapiens
attaattgttgaaaatgaacagatcttttaataccgtgtcaaacgcagtaaaaatttgtataagattatattagaggagaaagaacactgacccagtttcrtggttgagaaacattgctttcttgtgaagtcatgaaatatttccatacttgatcataaaattgaagaaaaaaactgtgttttacaaggaaacgtcttttc

SEQ ID NO: 35648 - DNA, 201 bp, Homo sapiens
agtggccaaagttaaaaactggtagtcagtgaacctcatttgtgtttgcttagcatatggagtaattttgaactgaattttcacacaacatttgccctctygactctcttttacaaattagggaatctggcaacacaacctatttcatacccgtgggcaggcagaaaacatagtggtctgtacataggcatgggttcttca

SEQ ID NO: 35649 - DNA, 201 bp, Homo sapiens
ttagaagaaaagaattctaaggaatactgggataaatacatgcacacatatacacacatatgccctgacacacaagacattgtttttaatgtcaagcaagrcttccatttgtatatgtttctctacaagctacaaatggaacattaaatatgtcctcagaattaatatggagttacaatagattgtgtttaaagaagctag

SEQ ID NO: 35650 - DNA, 201 bp, Homo sapiens
tacacttgacctcacagagtgtttataaggatcaaaggagataatgcacataaaaaatgctttatgagctataaagcagtttacaaatgttgctattccastttttatcattgatgaaacaaccatctgccaaagcacctagttgaaaggtactagctcatgagctttgatttgcaaaatgtgatggtcttaaaattatcc

SEQ ID NO: 35651 - DNA, 201 bp, Homo sapiens
tgttctaatagtcatccatattaaaatattatatggcagtattaaaaactacaaatattactcttgggaatcaaatcatacactgtagcacatcatctttyttggcaatagtactgctgttgtacactgatggcctctaacagagaagaaatcattccattgaaagaaaagtaactatcaagaacaaagttggaagtgatg

SEQ ID NO: 35652 - DNA, 201 bp, Homo sapiens
ctaactccatctaaagaaggatctggggaatgctaagtggcacaagtggcaactatttattaacttgctgtgccccatatgatgggaaagcaaacagtgcytctctagaagagttctaagggaacttaatatggtaaaaagaaccagcaattttgagcaaaagggcaggggtgcagatatataggttttgctttcacttag

SEQ ID NO: 35653 - DNA, 201 bp, Homo sapiens
tattgagtactctttccttgccaaacatgtaatacccataattactctaggagctttgcaaaattattaccccctttacaaatgagaggagtgtgactcaraaatgttaagtaattaacctaagattacagagctgataattaataaagataggggaagctaatgcaaaatgagacaaaatgttccaaacgtacatatttt

SEQ ID NO: 35654 - DNA, 201 bp, Homo sapiens
acacaggtcctgccatggggaccttatctccttgttgcagcaggaggctccaaccatccccactcaccctggaacttcagattctgaatctccactctctrgagctcttttcagtgattaaatgggctgttgttggcttatcaaataagaaccgtaatgtatggccaagtgcagtggctcacgcttgtaatcccagcactt

SEQ ID NO: 35655 - DNA, 201 bp, Homo sapiens
tctagttcccataatactaatgcaagtgaacccagagaaatgaggtaatttgaaagttgtatttgggaagaagcgctgtagctcctattctgccagagttmatgcccactggtggacacaggtcctgccatggggaccttatctccttgttgcagcaggaggctccaaccatccccactcaccctggaacttcagattctg

SEQ ID NO: 35656 - DNA, 201 bp, Homo sapiens
acaatgtggtattcaagttgttcccagagagtgaaagctgagttgcagccaccagaccttgaagggccttgtaagtcatgatatagagcaggggttttatmctgagaacagtagaaaggtcttgaagggccttgagcaggggagtgacatgatcagatgaggagagtgggttggatggaggccaggtggaaagcaccaaga

SEQ ID NO: 35657 - DNA, 201 bp, Homo sapiens
gataacacaaaatcactaggctatccacactgataattgtatttgtttgtagtggaatgaatgagaacaattgcaatctacaagctagctagaaatgattytgagcattatttgctattatggactttggggaacattattctattttattaaaaagtatctctactcatcctgtgtaaattattttatcttctaaataag

SEQ ID NO: 35658 - DNA, 201 bp, Homo sapiens
taaaaggtaaattatggtaaattattagctcataagaagaaaaaatctttcaactctaacgttaaggctgactgaattaaagtgtgctagagtgttctatmttagtttgagaataattttataagatgaacgaggagagaacttattaatgaactattaactttcaaaataatctgcattttcctttttccctaagtgttc

SEQ ID NO: 35659 - DNA, 201 bp, Homo sapiens
taacattttcagtaacgctgaaaaataaaagggaaagtgcatacaacactggaattgttgttgatttttcagaaaacttgttttttgcatcattctccctrccggtatgtgatgagaccctgtacttacttccaccatgcttcctacttatagatcactgtcttctctatgtcctctgagttgtttaaagaagcaccttaa

SEQ ID NO: 35660 - DNA, 201 bp, Homo sapiens
acacaacttctctggagcagaaagtatgccatccttatcaaactggaatgttatgagcaccttgtgtgagaataaaagtaaagcacttcagggctgggctyggtggctcatgcctgtaattccagcactttgggaggccaaggcgggcggatcacttgaggtcaggagttcgagaccagtctggctaacatggtgaaaccc

SEQ ID NO: 35661 - DNA, 201 bp, Homo sapiens
ctaaatataggccattagcagaaggcaaatgtaattttgaaatgaaggccatcacgtattttctccagtatgttcacaggtcaaggatagtccttccaccmaggttctagaccacatcttttcttactatccctgaaaccctgccccagcactcatccctcttcagtgcacgtcttcaaattctctccctaatgtaacttc

SEQ ID NO: 35662 - DNA, 201 bp, Homo sapiens
cagtgttgttgaagcccataatagaggaaattcagcacaataaatagacctcaattgactacgctgattaggagcacattggtttttgttgtattcaattytaattatttattacacagttaccatcctttgatgagatgttactcttcatctgtgattgcttatagttgttcgcgagcttctgtccattggtaattagaa

SEQ ID NO: 35663 - DNA, 201 bp, Homo sapiens
gtccatttggaccaataattaatttcttttgtttattccttgctggtaaaacaattattgaattctgaaatttgtataaataagtcactaagcatagttcyagcatttatgataatattttatagttatttatcatattccagtttagcttgcccttttgcctacagaaaaggtcttttcaataattttatatagttcttt

SEQ ID NO: 35664 - DNA, 201 bp, Homo sapiens
acatgcacacacacacaactttgttttctttattcccttactgcttattctgaagctgtcattttggtatctttttcctctgcttactttgactttctttrtaatctttctatctaagtcctgacttcactcctttccctcagacaactcactgaaggctctagtctgagtattcttaaatcacactctgttatttttaaa

SEQ ID NO: 35665 - DNA, 201 bp, Homo sapiens
aaaccagtcttccttcatatggtcctccaaataaaatattatgcagacatttaaaaaaagaatgagaccttcatgtatatacatgtgctgatatggaaagrtctccatcaaagtaaaaaacaactgtttagaatatgccctcatttgatgcaaaggcataagaatgatacagtggactctggggactcaggggggaaatgg

SEQ ID NO: 35666 - DNA, 201 bp, Homo sapiens
ccaataattttactgctaagattttatcccatttgaaaaagtatgccaagatatatacacagggatatttattacagccttacttgtaaaactcaaaatgkcctaagcatccaataatggggaaccggttaaataaaccagtcttccttcatatggtcctccaaataaaatattatgcagacatttaaaaaaagaatgaga

SEQ ID NO: 35667 - DNA, 201 bp, Homo sapiens
ctactttatgtaaggctgtgtgttaggctcaaggtggaatcagagaaaacttaaaacatggctgagagaggttggagtttatttggaaaaaaatccaaacwtggggaaaggaaattgtctcagccctgaagcatacttaaccaatttcagccccttgtcatcttcctttctagcagaagtccatttattgagttaccatcc

SEQ ID NO: 35668 - DNA, 201 bp, Homo sapiens
aattatgaagaaaaaagggagagaaggaaaagctgagattttccaaatgagctatctgattaaaggattaaacaatgatttcatttaatttagagttaatytgatcttaataggcttagagttctaaacctaacctgaccttggtgtttaaacaccctgtgccaagtggcaactacttcctttaaagggaaaaaaaaacct

SEQ ID NO: 35669 - DNA, 201 bp, Homo sapiens
aaggtttgtctgtataacatatcatactaaataaagtccaaaataacacagccaatgggaaggcttgttctctagcacaaatatattaagacaattctacratatgtcaatatatgttcatatatatttcatcatttttaataaatctaaacaacttatttcaatgttttgcctaccctgcattcttatgttttaaaggtg

SEQ ID NO: 35670 - DNA, 201 bp, Homo sapiens
cttctaaataagactatgttgtacagtacagtttgtcttcttttctatattaaagtgtgagtccagtaatttagcttccttttgtgaagattagtgaaacytagccattttgatcacactgtatggaaaataagtaccaattgcatcttacagtgttagtgacacaggcaagcacatatacagaaccagaacaaacttccc

SEQ ID NO: 35671 - DNA, 201 bp, Homo sapiens
aacacactttcttctgtatttcactgtcttcctctcagccactgagagacggcaagtctaccagatggtggcttaccctccagcaatcttatgaaaaagaragaatctattgagttgttaagaagcactaagtcataataaatggacattagaggcaattgcaatgggcttttggagatgttcctggcctgaagattgaat

SEQ ID NO: 35672 - DNA, 201 bp, Homo sapiens
tatgtatctccttatttcctctgtttctaaatgagttaccctcataatgtgactaattttatttaagtctcctatatagaattcacagtcttcctcttttrtgtcttcctaccacagtgcatctgattcctctctagaagtggtttaactcaatctcttttcttacagcctaaatttgaccttcctgtaagttctaaccta

SEQ ID NO: 35673 - DNA, 201 bp, Homo sapiens
tgccctgacacacaagacattgtttttaatgtcaagcaagacttccatttgtatatgtttctctacaagctacaaatggaacattaaatatgtcctcagarttaatatggagttacaatagattgtgtttaaagaagctagtttcatgtttctattttaaaccagaggttctcatattaacttcatattttgatagcaagt

SEQ ID NO: 35674 - DNA, 201 bp, Homo sapiens
ccctgtgggcattttccaggacattccgctaaataaaactacatatagcactggtttccagaaagcaccactcttaaagccccttataagttttcatatgyatctccttatttcctctgtttctaaatgagttaccctcataatgtgactaattttatttaagtctcctatatagaattcacagtcttcctcttttgtgtc

SEQ ID NO: 35675 - DNA, 201 bp, Homo sapiens
aattctgtaggcattttttaggatcttaattagatttctcttttgcacttgtctcctttttcatgtatcaattttaaagttatttaatctaatgtttcttytgtcatttaatcatgatttaatcaggagtttttggcattcaaggactcctgaaaaggagagaattgggattgcattaatggagatattaaggattggagc

SEQ ID NO: 35676 - DNA, 201 bp, Homo sapiens
agctagtttcatgtttctattttaaaccagaggttctcatattaacttcatattttgatagcaagtctttatttaattttatctgccacagaaaatatgcytattcagcagcttctggtgggcgacgaagtgctacgaaagtaatggtagttgtaactgacggtgaatcacatgatggttcaatgttgaaagctgtgattg

SEQ ID NO: 35677 - DNA, 201 bp, Homo sapiens
acacctataaccctgagatatatgtgattgaagataacactgttacggtgagcatatcacacccttccctgtgagcctcagggtctgtgatggcattccayttctaaaagcctgggatagtcactcttcttacctacatgtatgtagaagtatcttactaaaactttaaagatctgatgtttattatgttgagattttggc

SEQ ID NO: 35678 - DNA, 201 bp, Homo sapiens
ttctggatgggtcttcagaaccatttgctcttgtcacattccaccaggaaataaatacataaatcataagcatgccagcttctctgcatttgctgctgctwcgataaaacatattccttattcttatgttccagtcaacgttccagacagtacagctaacggcagctgcagaaatcaacacctataaccctgagatatatg

SEQ ID NO: 35679 - DNA, 201 bp, Homo sapiens
ttatttcctctgtttctaaatgagttaccctcataatgtgactaattttatttaagtctcctatatagaattcacagtcttcctcttttgtgtcttcctaycacagtgcatctgattcctctctagaagtggtttaactcaatctcttttcttacagcctaaatttgaccttcctgtaagttctaacctaccacatttctt

SEQ ID NO: 35680 - DNA, 201 bp, Homo sapiens
ttccctaaatgctttccagctatctttattgaaatttgcttctctgctttcctgttcactattataacatgttgttatatgtttctcccattgaaattgcwtttcagtaccaagagtatctcaatacccacagaagctttggaaatttccctgtgggcattttccaggacattccgctaaataaaactacatatagcactg

SEQ ID NO: 35681 - DNA, 201 bp, Homo sapiens
ccatttggaccaataattaatttcttttgtttattccttgctggtaaaacaattattgaattctgaaatttgtataaataagtcactaagcatagttccascatttatgataatattttatagttatttatcatattccagtttagcttgcccttttgcctacagaaaaggtcttttcaataattttatatagttctttat

SEQ ID NO: 35682 - DNA, 201 bp, Homo sapiens
tgccaaagaatttaactattaaatttatgatagcagtatttccaaataaaacctaaaaaatgaaatgactctttttacctgtcttccttcttcccagagaygggcagccttcacgggtgaattctttccatcacaaattcattttatgtttaccagcagaaagcaggtaccatttagagctcaccaagcaccttgtgttgt

SEQ ID NO: 35683 - DNA, 201 bp, Homo sapiens
ccccatctctactaaaatacaaaaaattatccaggtgtggtggtgtgcacctgtattcccagctacttgggaggctgaggcaggagaattgctagaacccrggaggcagaggttgcagtgagccaagatcgctccactgcactccagcctggatgacagagtgagactctgtctcaaaaaaaaaaaaaaaaaaaaaaaaaa

SEQ ID NO: 35684 - DNA, 201 bp, Homo sapiens
ggtgggtagatagcctgagctcaggagttcaagaccaacctgggcaacatggtgaaaccccatctctactaaaatacaaaaaattatccaggtgtggtggygtgcacctgtattcccagctacttgggaggctgaggcaggagaattgctagaacccgggaggcagaggttgcagtgagccaagatcgctccactgcactc

SEQ ID NO: 35685 - DNA, 201 bp, Homo sapiens
ttgctgctgctacgataaaacatattccttattcttatgttccagtcaacgttccagacagtacagctaacggcagctgcagaaatcaacacctataaccytgagatatatgtgattgaagataacactgttacggtgagcatatcacacccttccctgtgagcctcagggtctgtgatggcattccacttctaaaagcct

SEQ ID NO: 35686 - DNA, 201 bp, Homo sapiens
tatctcctgaggctatctatacagacaggaaatggatggggtaaagagtgtgcacttggtacattttgagatatagtcccacaatcccttgaaggagggcrggagagttagaactactaatagctcatgagattgcctgtttccctaggtgtgtcccagcactgagttttatctagctttaaaattttagcatttattttt

SEQ ID NO: 35687 - DNA, 201 bp, Homo sapiens
ttactcttagaaatagtagtgcaataaacaggcttggggtactttgttccacatattgctgattatctcctgaggctatctatacagacaggaaatggatrgggtaaagagtgtgcacttggtacattttgagatatagtcccacaatcccttgaaggagggcgggagagttagaactactaatagctcatgagattgcct

SEQ ID NO: 35688 - DNA, 201 bp, Homo sapiens
taatatcaagactgtctgataatgcttttttaatactttccagttctgccaacattcctgtcatgcatccttaataacaatgctctcccagaaccgggatrgggggcggtgaggtggggttggtgggggagtacgtttctgagctagttaaagtcactgaggagggcccatacctcaatgtgtgttgagttacaattagaa

SEQ ID NO: 35689 - DNA, 201 bp, Homo sapiens
tgaatcaaatagtatttatccttgggatgcagtaaagaattttttggaaaaatttgtacaaggcctggatataggccccacaaagacacaggtatggctarcagaaatgcataactaacttatggctttctttctgaaaaaaatattgttagctatgaagtcttaatttttgtatttgccaaatccccattttaaatgcat

SEQ ID NO: 35690 - DNA, 201 bp, Homo sapiens
aattaacaaagaccacagaatcttaaacatacgagtttaagtttattatgcttattacaatcagtgggaaatgtgaaattataactatacaggactctctkgattcttatctcaatttctctattttctcagatccactgacctttcttttcactctattttttattttatttttattatactttaagttctgggatacat

SEQ ID NO: 35691 - DNA, 201 bp, Homo sapiens; identical to SEQ ID NO: 8332

SEQ ID NO: 35692 - DNA, 201 bp, Homo sapiens; identical to SEQ ID NO: 8333

SEQ ID NO: 35693 - DNA, 201 bp, Homo sapiens; identical to SEQ ID NO: 8335

SEQ ID NO: 35694 - DNA, 201 bp, Homo sapiens; identical to SEQ ID NO: 8337

SEQ ID NO: 35695 - DNA, 201 bp, Homo sapiens; identical to SEQ ID NO: 8339

SEQ ID NO: 35696 - DNA, 201 bp, Homo sapiens; identical to SEQ ID NO: 8342

SEQ ID NO: 35697 - DNA, 201 bp, Homo sapiens
aaggaaaagctgagattttccaaatgagctatctgattaaaggattaaacaatgatttcatttaatttagagttaatgtgatcttaataggcttagagttytaaacctaacctgaccttggtgtttaaacaccctgtgccaagtggcaactacttcctttaaagggaaaaaaaaacctgaagaaaactaaaaaaaaaaaaa

SEQ ID NO: 35698 - DNA, 201 bp, Homo sapiens
tgaacctgcgaggcagaggttgcaatgagctgagattgtgccactgcactccagcctgtataacagagagagactctgtctcaaaaaaaaaaaaaaaaaaagtaaagagaaagtacttttaatggcaaagactgcaattacttttgcaccagcttaatattactcagttgtgtctatgaaaaattttttaatctaaacaat

SEQ ID NO: 35699 - DNA, 201 bp, Homo sapiens
catgagccaccatgcccggccaggatataacattttaatcttcctttagtttcctgtctttcccttctaacccatgagttacattttaaaattcaatatgyatttttatgtccatttggaccaataattaatttcttttgtttattccttgctggtaaaacaattattgaattctgaaatttgtataaataagtcactaag

SEQ ID NO: 35700 - DNA, 201 bp, Homo sapiens
gcatgagccaccatgcccggccaggatataacattttaatcttcctttagtttcctgtctttcccttctaacccatgagttacattttaaaattcaatatrtatttttatgtccatttggaccaataattaatttcttttgtttattccttgctggtaaaacaattattgaattctgaaatttgtataaataagtcactaa

SEQ ID NO: 35701 - DNA, 201 bp, Homo sapiens
taatttgcaccaagttatccatgagctcaatttgtctgaatctctgatgaatattaacaaattatgacagattgccccatttcctactgttttaatctaargtcttctcatttcatttacttcatataaattcatttaaacatcatgtaatatcttataaacatcctaaaatcaaagatttaactttcccgactgccttct

SEQ ID NO: 35702 - DNA, 201 bp, Homo sapiens
ttctatagtctacattatagaatacaaaaaagattttaggaaataaaatgatatgctcagttttataataaactgaaactcatatgtttaagattctgtgrcctttgttaatttgcaccaagttatccatgagctcaatttgtctgaatctctgatgaatattaacaaattatgacagattgccccatttcctactgtttt

SEQ ID NO: 35703 - DNA, 201 bp, Homo sapiens
gttgccccgagcacatcatttatatacaggtaaggcctcaggaacatcccttttgactttatttcttcctaaagacgagagagtggtaaaagtcaaaaatrgaagcttatgagttagaaaatgctcacccttccaatgaatgcctttcttatgtaattccataaataagaagcatatttactttatgctaatatttatggt

SEQ ID NO: 35704 - DNA, 201 bp, Homo sapiens
cggcttcctggggctcgctggagggattgggcggaactagggagcgagctccgtgtgttccctcggattccacgtggactcgggctcccagccaccaggamctgcttggaaagagatacttcttcgttcccttcctgctatcccaggccttgcgtccccattaggcgcgtctcgccctgtctgttaagcaccctccaaagt

SEQ ID NO: 35705 - DNA, 201 bp, Homo sapiens
tatttaacagtaatggcttttcccccctcctttttacttttaacagagaacaaccctttattgtcagcaaccaaaacaaaaggttaacattttcagtaacrctgaaaaataaaagggaaagtgcatacaacactggaattgttgttgatttttcagaaaacttgttttttgcatcattctccctgccggtatgtgatgaga

SEQ ID NO: 35706 - DNA, 201 bp, Homo sapiens; identical to SEQ ID NO: 8316

SEQ ID NO: 35707 - DNA, 201 bp, Homo sapiens; identical to SEQ ID NO: 8317

SEQ ID NO: 35708 - DNA, 201 bp, Homo sapiens; identical to SEQ ID NO: 8318

SEQ ID NO: 35709 - DNA, 201 bp, Homo sapiens
aaaaagcaactctattccctccctctacttccttgaaacttacagttctgccactagataagcatgaccctcttcatcccccaaccctgtggtcccacctyaaacctcatcctttctggctcctctgaacatttgataatgatgaacatacgctgctattcctaaccaagttgccatgacaccacaaacttctcgaactcc

SEQ ID NO: 35710 - DNA, 201 bp, Homo sapiens
gctaaacacactccggttgttaaacaaattaatgagaacaacaagcttgccttcccttaaacctattctctctctttgtcttgtgcattccttctttttascaccataattctttttgaaaaaagcaactctattccctccctctacttccttgaaacttacagttctgccactagataagcatgaccctcttcatccccc

SEQ ID NO: 35711 - DNA, 201 bp, Homo sapiens; identical to SEQ ID NO: 8320

SEQ ID NO: 35712 - DNA, 201 bp, Homo sapiens
catgtccctgcaaaccagataccttcacaaaaatgctaaacacactccggttgttaaacaaattaatgagaacaacaagcttgccttcccttaaacctatyctctctctttgtcttgtgcattccttctttttaccaccataattctttttgaaaaaagcaactctattccctccctctacttccttgaaacttacagttc

SEQ ID NO: 35713 - DNA, 201 bp, Homo sapiens
acgctgaaaaatgtagctttatgcaatgcagctgagctctctggatataaatttccttctagcaggtggtagatatcaggtcatcagtctgcacacctccyttcagagcctcagggattcccagaggtgcatcagaggacgtgggcagccaagggggtcagaggcaccttacaaaataagccacgggtggtaacattctta

SEQ ID NO: 35714 - DNA, 201 bp, Homo sapiens
gtgatttgctgcacccatcaacccatatctacattaggtacttctcctaatgctatccctctcctagtcccccaccccttgacaggccccagtgtgtgatkttcccctccctgtgtcctcattgttcaatgtgctctcattgttcagctcccacttatgagtgagaacatgcagtgtttggttttctgttcctatgtaagt

SEQ ID NO: 35715 - DNA, 201 bp, Homo sapiens
catgccatggtgatttgctgcacccatcaacccatatctacattaggtacttctcctaatgctatccctctcctagtcccccaccccttgacaggccccastgtgtgatgttcccctccctgtgtcctcattgttcaatgtgctctcattgttcagctcccacttatgagtgagaacatgcagtgtttggttttctgttcc

SEQ ID NO: 35716 - DNA, 201 bp, Homo sapiens
gtgcaggttcattacatagtatacacatgccatggtgatttgctgcacccatcaacccatatctacattaggtacttctcctaatgctatccctctcctartcccccaccccttgacaggccccagtgtgtgatgttcccctccctgtgtcctcattgttcaatgtgctctcattgttcagctcccacttatgagtgagaa

SEQ ID NO: 35717 - DNA, 201 bp, Homo sapiens
aaatcaagacattagtgactagttgaagaagtatgtttattcatttggggaacaaacattcattgagcatcaactctgtgtcaggctctattttaggaacygtgagtgaaagaagttaatgagacatgttaacttggaagtccttaagatttcccagaagagagacagatatgtcttaaacgtagtctagtacaaggacta

SEQ ID NO: 35718 - DNA, 201 bp, Homo sapiens
gccattttctggttcagctgttgtgtactataatttcgtgtcaaacctgctcttttagaaaatcttgggatccgatggagcctttaggagccatctccagkactttgggaggtccttggatggctatggagatttaaatggggattccatcaccgatgtgtctattggtgcctttggacaagtggttcaactctggtgagt

SEQ ID NO: 35719 - DNA, 201 bp, Homo sapiens
tgtaataaatatgaaaaagtaaggaaaagacaaagaaaaataatatacctggtacctaatttaaatcagaactaataaagaaaaaaacatcagagcattcwatgtcttgaatactttgagaaggcagctgggaaagttaaatctttgattttaggatatttataagatatcacatgatatttaaatgaatttatgtgaagt

SEQ ID NO: 35720 - DNA, 201 bp, Homo sapiens
gggttcaagcgattcttttgcctcagcctcccgagtggctggtattacaggctcctgccaccacacccagctaatttttgtatttttagtagaaacaggakttcaccatgttggccaggctggccttgaactcctgacctcaggtgatccacctgcctcagcctcccaaagtgctgggattacaggcatgagccaccatgc

SEQ ID NO: 35721 - DNA, 201 bp, Homo sapiens
tctgggcttaaagtaggaatgtagttctggcacttacaattggcatattttaatttcaacttcttaatgctgttttccattgcttttaaaacaaaaaaaawttttgaatacttcatgagttctttttcaaagtgattttaaaaaaagcttaggaatggggatatagaaaccaataattagtatctgttatttggtaaacta

SEQ ID NO: 35722 - DNA, 201 bp, Homo sapiens
tagagaaaggggtccaggaatattatatttctcactatcttcccagtgcctagctcactgctcccttggcaaaacacagcagatggaactcagaaatccastcctcaccgcttccacctccttacatactgacctgtatttcagagagcctcttattgccattcagagatccctcactgccactcctgttctggaaagccc

SEQ ID NO: 35723 - DNA, 201 bp, Homo sapiens
gggacccaggaggcaaaagttgcatgcactgagccgagatcgtgccactgcactccagcctaagcgacagagtgagactctgtctcaaaaaaaaaaaaaaraaaaaagaaaaaaaagtcttagacagcataattcaactttacactagttttatctgaaccattggcacgctttcttaaaaatcctatgttttataactgt

SEQ ID NO: 35724 - DNA, 201 bp, Homo sapiens
tttcttacagcctaaatttgaccttcctgtaagttctaacctaccacatttctttaaatcttttttcttctttttcacacagaagtcctggggctctgtcrtgggattactaccatcttcctctcgtattggactttgaaattctcagttattttttattctttcctccctctcaagtcttacatccctagagaaaggggt

SEQ ID NO: 35725 - DNA, 201 bp, Homo sapiens
cacatcatttatatacaggtaaggcctcaggaacatcccttttgactttatttcttcctaaagacgagagagtggtaaaagtcaaaaatggaagcttatgmgttagaaaatgctcacccttccaatgaatgcctttcttatgtaattccataaataagaagcatatttactttatgctaatatttatggtcacaatctatt

SEQ ID NO: 35726 - DNA, 201 bp, Homo sapiens
aagtgggtgcgtagatctgaaataatctgtatagaaattggttggcttacagagttttagtcctgaatataacatattttggtttgtaggccaagagaaayaagggttttagttatagacacttaagtttccttacactggagatgcccgagaatggttcactagtcatggaagatttgtttagatcttccttccacatct

SEQ ID NO: 35727 - DNA, 201 bp, Homo sapiens
aacttactgggaatttagctagctttctaaggtcacacagcgtccatggattgagctgtcattaaaactcagtcctttctggactcagaggctgtcctgartgattacatccccttcatgtttttgactccctggattaataatgcatggatattatttagttgtgatggcaggcatgtaaccactgctttgtaggtaagc

SEQ ID NO: 35728 - DNA, 201 bp, Homo sapiens
gactgcaattacttttgcaccagcttaatattactcagttgtgtctatgaaaaattttttaatctaaacaataatttggataaatttttgaataaggtatstaacctaaataataacttcacatgttcctaagtatctgttaatttatttgaatgcctggcccacttaaaaatctgatccacaaaatgctatagtcatggg

SEQ ID NO: 35729 - DNA, 201 bp, Homo sapiens
gaactgcttcctgtagtaatgttacctgctggttgaaagacgttcacatgaaaggagaatactttgttaatgtgactaccagaatttggaacgggactttygcatcagtaagtatcagttttatttgttagatttatcaatagcaaggaaacataagtctgcactgacaagttcttcccctttgacaaaataagtattctg

SEQ ID NO: 35730 - DNA, 201 bp, Homo sapiens
tatcatctcagttttcaccttaccttataccctttgttgagtgtcctttggtatcaagaacgtcatacatattctgctaaatacattaatgttcaattaargttaatgccaactttgaacactaccttggaagtgttgttatttccataacctgctagaacactttcttagtaatttcttcttcccagaatatgcaagctc

SEQ ID NO: 35731 - DNA, 201 bp, Homo sapiens
gaatgccttatttaacaagtgcttttggaacaattaattgattaatatttacatatccaaatacactgtcaagtgaattgaaagttaatataaaaaaactrgaaaaaaatggaaattttctgaaggatggaaaaatttctgagtttagagctaatagaaaaaataatataggaaattgttgaaaggatttgactatataaa

SEQ ID NO: 35732 - DNA, 201 bp, Homo sapiens
gcagaggttgcagtgagccaagatcgctccactgcactccagcctggatgacagagtgagactctgtctcaaaaaaaaaaaaaaaaaaaaaaaaaaaaaaaaagaaaggtgaacttttacaacagtcaccctgggaaataagggaaggaatccaattaagaataagtgacagaggcaatgatagcttggcagagatgagaa

SEQ ID NO: 35733 - DNA, 201 bp, Homo sapiens
ggcagaggttgcagtgagccaagatcgctccactgcactccagcctggatgacagagtgagactctgtctcaaaaaaaaaaaaaaaaaaaaaaaaaaaaaaaaagaaaggtgaacttttacaacagtcaccctgggaaataagggaaggaatccaattaagaataagtgacagaggcaatgatagcttggcagagatgaga

SEQ ID NO: 35734 - DNA, 201 bp, Homo sapiens
tcccaggccttgcgtccccattaggcgcgtctcgccctgtctgttaagcaccctccaaagtcatctcagtgagtgctttgttttaggtacacacacgcacrcacacacacacacacacacacacacacacagacacgcacgcactcaagcatggacagtgtggggatccgcgggtgtcctggagaccgcgagtcctgcagc

SEQ ID NO: 35735 - DNA, 201 bp, Homo sapiens
aggcagaggttgcagtgagccaagatcgctccactgcactccagcctggatgacagagtgagactctgtctcaaaaaaaaaaaaaaaaaaaaaaaaaaaaaaaaagaaaggtgaacttttacaacagtcaccctgggaaataagggaaggaatccaattaagaataagtgacagaggcaatgatagcttggcagagatgag

SEQ ID NO: 35736 - DNA, 201 bp, Homo sapiens
aatgacaaccccccaagaggcggaggttgcagtgagccaagatcacgtcactgcactccagccggggcaacagtgagactccaactcaaaaaaaaaaaaaatctatagtaggaaggacactttaaatatctcctgatttgcttcttcgttccttcactctggatacaagtttgtgtgtgcacctacaaacacatgaataca

SEQ ID NO: 35737 - DNA, 201 bp, Homo sapiens
cagcccaacttcccctggctcagacaggtgccgcgcctgccagagaccagggaaatccggaatccattgctgatggcggcctgcagctccccagcgcggtscttgctggctttgcagaagcctgcgagccccaaaatgcttatttttcaacccaaggatgtgaataatgcctctatttcttacttgaggacgaagcgctgt

SEQ ID NO: 35738 - DNA, 201 bp, Homo sapiens
caatgacaaccccccaagaggcggaggttgcagtgagccaagatcacgtcactgcactccagccggggcaacagtgagactccaactcaaaaaaaaaaaaaatctatagtaggaaggacactttaaatatctcctgatttgcttcttcgttccttcactctggatacaagtttgtgtgtgcacctacaaacacatgaatac

SEQ ID NO: 35739 - DNA, 201 bp, Homo sapiens
accattaggttgtcctggcagtgccatttaacatgccaacttcatttattcacagagtttgcttatatcttatttaattaaattaattaattaattaattwatttgagacagagtctcagtctgtcaccaaggctggaatgcagtggctcaattttggctcactgcaacctctgcctcctgggttcaagtgattctcatgc

SEQ ID NO: 35740 - DNA, 201 bp, Homo sapiens
aaacttttactacattgggttattctacctatggctttgcccagtgctggtcttttgaccttagagttctatttctgacacaagcattaaaggtatgggayataacttttttttttttttttaagaccaagtcttgctcttgtcacctaggctggagtgcaatggcacgatttaggctcactgcaacctctgcctcctggg

SEQ ID NO: 35741 - DNA, 201 bp, Homo sapiens
cttaaagccccttataagttttcatatgtatctccttatttcctctgtttctaaatgagttaccctcataatgtgactaattttatttaagtctcctataragaattcacagtcttcctcttttgtgtcttcctaccacagtgcatctgattcctctctagaagtggtttaactcaatctcttttcttacagcctaaattt

SEQ ID NO: 35742 - DNA, 201 bp, Homo sapiens
aaagatacaccagggctcaatcatgaaggacctttgaatttacagtgaggacattggattttattctcagttcaatggcaagacataagttaataatatayatctatgcatatatagtaacacatatatgcctatatatgtgaattgctgtataattgaactgctaaatgataaaatgaactccatcataatttcctgcca

SEQ ID NO: 35743 - DNA, 201 bp, Homo sapiens
cactctaacagatcatattttgtgtaacttactcacctagaggataaatccaccagtgttatggggagaaaatagataacaaagaatttaggagtgtgtcwgtagtgaatgtacaaggagtgaaagttgacctccatttccagaagttcagcagtgaagggggagctgggaaaaacaattctatgggatagcagtgtgaga

SEQ ID NO: 35744 - DNA, 201 bp, Homo sapiens
gtatgtcttggtgtctttaaaattttcatataatttaaaacttggttatatcattttctataacttagagagctgtaacatcagtttccatagcataatakatgtcatgtgttcacaattaatgagtggtacagataacatgttgaattcagaggatggagagatatcattgtgatacattgaagtgtctagcctcctgag

SEQ ID NO: 35745 - DNA, 201 bp, Homo sapiens
gtcctagatgtccgacaaataccagctgctcagtaagttttactttaaagcttgttgtaaaatgtagaaataaaagacatactagattactttattcaaaygaatgtttatagagtttttctacaaaagaaacattcataactcataaatacctttaaaaactaaatttcaatgtctaccatccacataggagtaaaacaa

SEQ ID NO: 35746 - DNA, 201 bp, Homo sapiens
gtgaggacggactttgcatttctgatctagtcctagatgtccgacaaataccagctgctcagtaagttttactttaaagcttgttgtaaaatgtagaaatwaaagacatactagattactttattcaaacgaatgtttatagagtttttctacaaaagaaacattcataactcataaatacctttaaaaactaaatttcaa

SEQ ID NO: 35747 - DNA, 201 bp, Homo sapiens
cctttccacaaagactgtggtgaggacggactttgcatttctgatctagtcctagatgtccgacaaataccagctgctcagtaagttttactttaaagctygttgtaaaatgtagaaataaaagacatactagattactttattcaaacgaatgtttatagagtttttctacaaaagaaacattcataactcataaatacc

SEQ ID NO: 35748 - DNA, 201 bp, Homo sapiens
cttggaagtgttgttatttccataacctgctagaacactttcttagtaatttcttcttcccagaatatgcaagctctgtatttttgggtgagtattggaayagtgtgtgtttgtgtttgtgtttgtaggcatgtgtgtacatacgtgcctgcttgtgtttgaaaacttgatttaaaattactgacagtaatacaattttta

SEQ ID NO: 35749 - DNA, 201 bp, Homo sapiens
gcaagtctttatttaattttatctgccacagaaaatatgcttattcagcagcttctggtgggcgacgaagtgctacgaaagtaatggtagttgtaactgayggtgaatcacatgatggttcaatgttgaaagctgtgattgatcaatgcaaccatgacaatatactgaggtttggcatagcagtaagtggcttttcttttc

SEQ ID NO: 35750 - DNA, 201 bp, Homo sapiens
atccaagagttgtgtttaacttgaacacatataaaaccaaagaagaaatgattgtagcaacatcccagacatcccaatatggtggggacctcacaaacacmttcggagcaattcaatatgcaaggtaagttttggtgctaataggccaatgttttcataatgtaaaacattatatttatgtaataaatatgaaaaagtaag

SEQ ID NO: 35751 - DNA, 201 bp, Homo sapiens
aaagttaagattgcatgctctaaaaacataagtgattaactgttggatgcccaaaagcactctttgtttcctttccaagttgatgactcttcgtatatttyctaaaaaacaaaatcataacaggtattaaaaatagaccattctactatacgaatataaaatatatttgaataaatcagacaaatgaatatcacatctatt

SEQ ID NO: 35752 - DNA, 201 bp, Homo sapiens
ttagatgtttagaacttgctttttgataaattatgctatttatttggctatccaatgttgaatattcaaaataatgttgatgtgtagactttttaggataktcagcaaaaccactgctactgaatgttttgaagaaaagggaacaaaaagaaccctgattctttgcccttggaaagtgtgctgagtatttgttgataacag

SEQ ID NO: 35753 - DNA, 201 bp, Homo sapiens
ggtcaaatcatagctgaacaaatataaactgttcacattgaaatttaaatgtgtttttcactgtttgtgatcaggtttatctttaagaaactatacttaayactttgtgtctaataaaaaaaatgtgtttctaggttactggttggttcaccctggagtggctttcctgagaaccgaatgggagatgtgtataaatgtcct

SEQ ID NO: 35754 - DNA, 201 bp, Homo sapiens
gccttccgggctcaagtgattaacctgcctcagcctcccgagtagctgggactacaggtatgtgccaccatgtccggctaattttttttttttttttttgkatttttagtagagacggggtttcactatgttggccaggctggtctcaaacttctgacctcaggtgatccacccaccttggcctcccaaagtggtgggatt

SEQ ID NO: 35755 - DNA, 201 bp, Homo sapiens
ggaggttgcagtgagcggagatcgtgccattgctctccagcctgggtaacagagcgagactccagtctcaaaataaataaataaataaataaataaataaacgtcaaataaataaataaaacattttgttttttaaatgaaaataaagggtactttaaaaaaataattttaaaataagttgaattatttaaaaatgattca

SEQ ID NO: 35756 - DNA, 201 bp, Homo sapiens
cggaggttgcagtgagcggagatcgtgccattgctctccagcctgggtaacagagcgagactccagtctcaaaataaataaataaataaataaataaataaacgtcaaataaataaataaaacattttgttttttaaatgaaaataaagggtactttaaaaaaataattttaaaataagttgaattatttaaaaatgattc

SEQ ID NO: 35757 - DNA, 201 bp, Homo sapiens
gcggaggttgcagtgagcggagatcgtgccattgctctccagcctgggtaacagagcgagactccagtctcaaaataaataaataaataaataaataaataaacgtcaaataaataaataaaacattttgttttttaaatgaaaataaagggtactttaaaaaaataattttaaaataagttgaattatttaaaaatgatt

SEQ ID NO: 35758 - DNA, 201 bp, Homo sapiens
ggcggaggttgcagtgagcggagatcgtgccattgctctccagcctgggtaacagagcgagactccagtctcaaaataaataaataaataaataaataaataaacgtcaaataaataaataaaacattttgttttttaaatgaaaataaagggtactttaaaaaaataattttaaaataagttgaattatttaaaaatgat

SEQ ID NO: 35759 - DNA, 201 bp, Homo sapiens
cgatgactatgtgttttggggatgatcatcttgtctggtatcctgcaggggttctctgcatttcccgaatttaaatgttggcgtctgcaatgaggttgggraaattttcacggatgatatcctcaaatatgttttccaagttgctttctttctttccctttctttcagggataccaatgaatcataaatttggtctcttta

SEQ ID NO: 35760 - DNA, 201 bp, Homo sapiens
taacatttgttctctattttcgactttggagaatccgatgactatgtgttttggggatgatcatcttgtctggtatcctgcaggggttctctgcatttccygaatttaaatgttggcgtctgcaatgaggttggggaaattttcacggatgatatcctcaaatatgttttccaagttgctttctttctttccctttctttc

SEQ ID NO: 35761 - DNA, 201 bp, Homo sapiens
gcccttctttctggctgcctttaacatttgttctctattttcgactttggagaatccgatgactatgtgttttggggatgatcatcttgtctggtatcctrcaggggttctctgcatttcccgaatttaaatgttggcgtctgcaatgaggttggggaaattttcacggatgatatcctcaaatatgttttccaagttgct

SEQ ID NO: 35762 - DNA, 201 bp, Homo sapiens
agcaaactggactaaaaggacaaagaagttgagatgaaaaatggctttcctggagttagaaactgcaacggcccggttttcagcagggaaggtgggagtascatttttccctggaaggagcctggggccctggcgagctttgttctccaggacaatggccactgtccattgaggaaggacttgcctggctttcatcatgtt

SEQ ID NO: 35763 - DNA, 201 bp, Homo sapiens
tttggtgttgtctgaacatgccttgttcctacctgccattgagaacagtgtagcctaggccccacagtatggatgtaccctcccaggacagctgtgcttcrtgtccagtctgcagccccttcatatatcacacagccacacaccccttcacataagtgtggcctgactccctgtgtctggtttctaatccatgctagttct

SEQ ID NO: 35764 - DNA, 201 bp, Homo sapiens
atggttcttattactttgaggtatgtttcttcagtgcctaatttgttgagggtatttaacttgaaaggatgttgaattttatcgaaaggtttttctgcatytattcagatgatcatgtggtttttgtttttagttctgtttatgtgatgaatcacatttattgattggcatttgttgcaccaacttgcatccgagggataa

SEQ ID NO: 35765 - DNA, 201 bp, Homo sapiens
tcttcactagctccttttcctattttttcttcactaaacagagccctctcttctttactgctcttctcctgtagggattctatccactgtcatggcatcarcagcagcactgttgggttatctcattgctatgttgtcagccctacactctctcccaaaactcacactggcatctagctgatgatgaatatttttatttgg

SEQ ID NO: 35766 - DNA, 201 bp, Homo sapiens
aaagagggaaagaaagcagaggtatggaaaaaggtacctcccatcctccagagtggctgcttagattgatgagcccatgtatacattttggtttcaaacarcttttcacactaatgcagttatgattaataagctgtttttagggcatgtaatatataacactccaattccagtggcagaattaatatcagtgcgttagtc

SEQ ID NO: 35767 - DNA, 201 bp, Homo sapiens
tgccctggaggtactagaattccttatcagtttcatacaatttcagggcttgattttttataggttacccagacaattcattcaagggctgctttacttayggttcacatgtcatgtaaggagcagtggttttgagcataaactctattcctgggatttatcagataccccacttttgacaggtcttggatttcacttttc

SEQ ID NO: 35768 - DNA, 201 bp, Homo sapiens
tgtttttccatttgtttgtatcatctaggatttatttcagaagtgttttatcagtctctgtagagatctttcacttccctggttatctgtactcctaggtrttttattctttttgtggcttttgtgaatgggattattttcttgttttggccctcagcttggacgttattggtgtataggaatgctactgatttttgtatg

SEQ ID NO: 35769 - DNA, 201 bp, Homo sapiens
ctatgtattcttctgtaatttgctttttcaacccaagagcaaatgtatggatcttttttcctttttcgtagattcctttccacaaagactgtggtgaggayggactttgcatttctgatctagtcctagatgtccgacaaataccagctgctcagtaagttttactttaaagcttgttgtaaaatgtagaaataaaagaca

SEQ ID NO: 35770 - DNA, 201 bp, Homo sapiens
tcttgaattgtgtgtttattaatgcttttctttattattttgttaaacatttatatattcctagaacattgtttggttttgtactttatgtaaatagaatmatattctatgtattcttctgtaatttgctttttcaacccaagagcaaatgtatggatcttttttcctttttcgtagattcctttccacaaagactgtggt

SEQ ID NO: 35771 - DNA, 201 bp, Homo sapiens
aatccttttgctgttagctctggttgcaattttatggaaggtaagaaaagctttatattttaaaatacagggctcctgaaggccagccttgaatttgcttrcaaaacatcaacttcaggttttatatggtaccttctctatcacaaggagaaaagaaatgcaaatttgtttataatttcttactcatgtcattaaaaacaa

SEQ ID NO: 35772 - DNA, 201 bp, Homo sapiens
taacggcagctgcagaaatcaacacctataaccctgagatatatgtgattgaagataacactgttacggtgagcatatcacacccttccctgtgagcctcrgggtctgtgatggcattccacttctaaaagcctgggatagtcactcttcttacctacatgtatgtagaagtatcttactaaaactttaaagatctgatgt

SEQ ID NO: 35773 - DNA, 201 bp, Homo sapiens
gtacctaactggggtgcaaacagacaaggtaaagattaaaaaattgcctaaaaatgtgtactttcaagatgtaaataacccatgagattagggtgatcatrtctgacattttacagatgggaaacagatggtaactcctatgcagcctgggtgccaactgactagcagttaatttcatattagaaaaaatattgttacaag

SEQ ID NO: 35774 - DNA, 201 bp, Homo sapiens
ggagtagtgttttagagtccccttttaaaaaaatattgatttttaattttccaaattctcctcatactatttattgatgtggcattttaactgatagaaarttagattttttcaaaatagattaaaacaatattcaatattggttagtattctaaaattttaattttatagtataaaacatttttgaccaataaattcaac

SEQ ID NO: 35775 - DNA, 201 bp, Homo sapiens
aaggggtccattatcaatcttctgcctgtgactagccagttatcccaacaccatttagtaaatgggcagtcctttccctatttctttctttttttttttttgtcaactttgtcgaagatcagatggttgtcagtgtaaaactttatttctggggctctctattctgtgccattcatctatgtgtccatttttgtaccagta

SEQ ID NO: 35776 - DNA, 201 bp, Homo sapiens
agcatttattgctttctattatttttatttttaaacaataccattgttgggctacctttggtgggcatttaggttgactccatgtctttgctattgtgaayagcactgcaatgaacataggcatgcatgtgtctttatggtaaaacaatttatagtcctttgggtgtatacctaataatgggattgctgggtcaaatgata

SEQ ID NO: 35777 - DNA, 201 bp, Homo sapiens
cgtctcgccctgtctgttaagcaccctccaaagtcatctcagtgagtgctttgttttaggtacacacacgcacgcacacacacacacacacacacacacasacagacacgcacgcactcaagcatggacagtgtggggatccgcgggtgtcctggagaccgcgagtcctgcagcccaacttcccctggctcagacaggtgc

SEQ ID NO: 35778 - DNA, 201 bp, Homo sapiens
attaggcgcgtctcgccctgtctgttaagcaccctccaaagtcatctcagtgagtgctttgttttaggtacacacacgcacgcacacacacacacacacasacacacacacagacacgcacgcactcaagcatggacagtgtggggatccgcgggtgtcctggagaccgcgagtcctgcagcccaacttcccctggctcag

SEQ ID NO: 35779 - DNA, 201 bp, Homo sapiens
attcatctatgtgtccatttttgtaccagtaccatgttgttttcattactgtagccttgtagtatagtttgaagttggataatatgatgcctctaactttsttctctttgcttagattgtttttgctatttaggctctttttgattccatatgaattagaattagttttttctaattctgtgaagaatgtcattaatagtt

SEQ ID NO: 35780 - DNA, 201 bp, Homo sapiens
agcactatcaactttcctcttaacattgcttttgctgtgtcccagagattctcatgttgtatctttgctttcattagtttcaaagaatttcttgacttctrccttaatttcgttgtttacccaaaagtcattcaggagcaggatgtttactttagatgcaattatttggttttgagcaatcttctcagtattgatttctat

SEQ ID NO: 35781 - DNA, 201 bp, Homo sapiens
tttgcctcttcactagctccttttcctattttttcttcactaaacagagccctctcttctttactgctcttctcctgtagggattctatccactgtcatgscatcagcagcagcactgttgggttatctcattgctatgttgtcagccctacactctctcccaaaactcacactggcatctagctgatgatgaatattttt

SEQ ID NO: 35782 - DNA, 201 bp, Homo sapiens
tttgctgagaatgatggtttccagctccatccatgtccctgcaaaccagataccttcacaaaaatgctaaacacactccggttgttaaacaaattaatgaraacaacaagcttgccttcccttaaacctattctctctctttgtcttgtgcattccttctttttaccaccataattctttttgaaaaaagcaactctattc

SEQ ID NO: 35783 - DNA, 201 bp, Homo sapiens
tcccacttatgagtgagaacatgcagtgtttggttttctgttcctatgtaagtttgctgagaatgatggtttccagctccatccatgtccctgcaaaccarataccttcacaaaaatgctaaacacactccggttgttaaacaaattaatgagaacaacaagcttgccttcccttaaacctattctctctctttgtcttgt

SEQ ID NO: 35784 - DNA, 201 bp, Homo sapiens
acaggagtccacagacatattggtccctaggaaaaccttgagtgactcgttaggcttattaaaccaatgagagtagcccagaaaggcagagaaagatcccygtagccacacatcacaggcacactccacattgcaggccctctgagtagctgcaaacattctcaaaatgttgaaacagaactctcaaaggtcctgagagtt

SEQ ID NO: 35785 - DNA, 201 bp, Homo sapiens
atgtgataattaaacaatagtgatttaaacatcttatttacataattgattattgctgacttgtttcacttttattttatttttcatcaatgtgtgtttamatgtggtatcagtttctactggtgaattgaacatcggcactatatatgttatggtgaaaatgatataaatctgattatttcctaaaagataaagcacaac

SEQ ID NO: 35786 - DNA, 201 bp, Homo sapiens
gtttattctgccagataccctaaatcatctctctcaagttcaaagttccacagatctctaaggcagggcaatatgccaccagtctctttgcatagcaggartgacctttactccagtttcaaacaagttcctcacctcatcttcatctgtgaccaccccatcctggacttcattgtccatatcactgtgagtattttggtc

SEQ ID NO: 35787 - DNA, 201 bp, Homo sapiens
cttccaatctagaaaataaaagcagatatattcttatagttatacactttggtaatttaaaaaatattcaaatatgtttaataccttttgaaaggttgaaytattttcagttatattttctaatgttattgcttgttctttggcttgtaaactttatatgtagccactttttaaatgaagaaaacaattatttccttgtac

SEQ ID NO: 35788 - DNA, 201 bp, Homo sapiens
taaatcatctctctcaagttcaaagttccacagatctctaaggcagggcaatatgccaccagtctctttgcatagcaggagtgacctttactccagtttcmaacaagttcctcacctcatcttcatctgtgaccaccccatcctggacttcattgtccatatcactgtgagtattttggtcaaagccattcaacaagcctc

SEQ ID NO: 35789 - DNA, 201 bp, Homo sapiens
aaaatagtttcatgtcttttcctcaatattacatttaaatttattaaaatcaacaaaatatttgatgagattgtctacttattttaaattcgtcttgaaayatatttgtaactgttatcagttgatttgctactcaaaatgaacactaggtggaaccacttcttttttttctattcagacacctcctgtgtgaatccgccc

SEQ ID NO: 35790 - DNA, 201 bp, Homo sapiens
attgttgagtttaaaaaatgtaagaaccttatttgaatggtatatctaaatattcatcataattatatttaatataaaatagaataaaatgttttaataawcatttctgaaaaactatgatctggaataatcatttcccttgtaattatcataaaatgtaatttacttttttgcttaggagtataaccaaaatgtattatg

SEQ ID NO: 35791 - DNA, 201 bp, Homo sapiens
ctctaaggcagggcaatatgccaccagtctctttgcatagcaggagtgacctttactccagtttcaaacaagttcctcacctcatcttcatctgtgaccamcccatcctggacttcattgtccatatcactgtgagtattttggtcaaagccattcaacaagcctctaggaagtgccaaactttcccacatcttgtcttct

SEQ ID NO: 35792 - DNA, 201 bp, Homo sapiens
aaatttttccacatctccaatttggatcctttgattaaccattcttcctccttttaacttgggtaattttcaaaatgtgtttttaattctttgcttattcrctaagaaaatgcctatttgagtttatttttaagaggctaaaatgtataagcaggatgattgcaaacaaaaatctggtatcacataatctatttatgctga

SEQ ID NO: 35793 - DNA, 201 bp, Homo sapiens
tttcagaaacagattgtctcagtttacctagctttgaaaatgccatacccatgggagagaagaaggatgtgtataaggcgggtgagcaagtgacttacacwtgtgcaacatattacaaaatggatggagccagtaatgtaacatgcattaatagcagatggacaggaaggccaacatgcagaggtactttggtgaattttc

SEQ ID NO: 35794 - DNA, 201 bp, Homo sapiens
gtattctgtaacttgacaattgagtggcttttgacattgttgagtttaaaaaatgtaagaaccttatttgaatggtatatctaaatattcatcataattawatttaatataaaatagaataaaatgttttaataaacatttctgaaaaactatgatctggaataatcatttcccttgtaattatcataaaatgtaatttac

SEQ ID NO: 35795 - DNA, 201 bp, Homo sapiens
taggctttttaaaaaaatttttccacatctccaatttggatcctttgattaaccattcttcctccttttaacttgggtaattttcaaaatgtgtttttaawtctttgcttattcgctaagaaaatgcctatttgagtttatttttaagaggctaaaatgtataagcaggatgattgcaaacaaaaatctggtatcacataa

SEQ ID NO: 35796 - DNA, 201 bp, Homo sapiens
tagtttcatgtcttttcctcaatattacatttaaatttattaaaatcaacaaaatatttgatgagattgtctacttattttaaattcgtcttgaaatatawttgtaactgttatcagttgatttgctactcaaaatgaacactaggtggaaccacttcttttttttctattcagacacctcctgtgtgaatccgcccacag

SEQ ID NO: 35797 - DNA, 201 bp, Homo sapiens
tgagtaaatatccatctggtgagagagtacgttatcaatgtaggagcccttatgaaatgtttggggatgaagaagtgatgtgtttaaatggaaactggacrgaaccacctcaatgcaaaggtagagtattatatttcttttaacattttgggggagtatagcagggttaaaatatgttgatttaaacaaaatgaagtcatt

SEQ ID NO: 35798 - DNA, 201 bp, Homo sapiens
attgttcagcataatatccttaatcattggcaattaaattatctgaggttatttttattattataggctttttaaaaaaatttttccacatctccaatttrgatcctttgattaaccattcttcctccttttaacttgggtaattttcaaaatgtgtttttaattctttgcttattcgctaagaaaatgcctatttgagtt

SEQ ID NO: 35799 - DNA, 201 bp, Homo sapiens
ttcctcaatattacatttaaatttattaaaatcaacaaaatatttgatgagattgtctacttattttaaattcgtcttgaaatatatttgtaactgttatyagttgatttgctactcaaaatgaacactaggtggaaccacttcttttttttctattcagacacctcctgtgtgaatccgcccacagtacaaaatgcttat

SEQ ID NO: 35800 - DNA, 201 bp, Homo sapiens
ctattcagacacctcctgtgtgaatccgcccacagtacaaaatgcttatatagtgtcgagacagatgagtaaatatccatctggtgagagagtacgttatsaatgtaggagcccttatgaaatgtttggggatgaagaagtgatgtgtttaaatggaaactggacggaaccacctcaatgcaaaggtagagtattatattt

SEQ ID NO: 35801 - DNA, 201 bp, Homo sapiens
cttttaacattttgggggagtatagcagggttaaaatatgttgatttaaacaaaatgaagtcatttttattaatagatttttcaaatgcaaataaaatgaytgatggtgcttaaaattcaattcttcctgtgaacagaacacaagtaatagggtatattattttccagaaagattcgaccaaattgagagttggaacctga

SEQ ID NO: 35802 - DNA, 201 bp, Homo sapiens
tgatttgctactcaaaatgaacactaggtggaaccacttcttttttttctattcagacacctcctgtgtgaatccgcccacagtacaaaatgcttatatastgtcgagacagatgagtaaatatccatctggtgagagagtacgttatcaatgtaggagcccttatgaaatgtttggggatgaagaagtgatgtgtttaaa

SEQ ID NO: 35803 - DNA, 201 bp, Homo sapiens
atgaagtcatttttattaatagatttttcaaatgcaaataaaatgactgatggtgcttaaaattcaattcttcctgtgaacagaacacaagtaatagggtrtattattttccagaaagattcgaccaaattgagagttggaacctgaaaaacaatactttttaagcattacaacacttagttccttctcaggaatacgtgt

SEQ ID NO: 35804 - DNA, 201 bp, Homo sapiens
tacaaaagattttaacaaattacaaacttgacctactgacataggtagaattttgactataatgggccataaagaaagactcatcaaattttaaaacagtrtaattatttagaatatgaaattaaaaaagaaatcaatttaaaagataactagaaagccaaagttcccagaaatttacactttagaaaagttttaaaaata

SEQ ID NO: 35805 - DNA, 201 bp, Homo sapiens
atcagttgatttgctactcaaaatgaacactaggtggaaccacttcttttttttctattcagacacctcctgtgtgaatccgcccacagtacaaaatgctyatatagtgtcgagacagatgagtaaatatccatctggtgagagagtacgttatcaatgtaggagcccttatgaaatgtttggggatgaagaagtgatgtg

SEQ ID NO: 35806 - DNA, 201 bp, Homo sapiens
ttttattaatagatttttcaaatgcaaataaaatgactgatggtgcttaaaattcaattcttcctgtgaacagaacacaagtaatagggtatattattttycagaaagattcgaccaaattgagagttggaacctgaaaaacaatactttttaagcattacaacacttagttccttctcaggaatacgtgtaataaaagat

SEQ ID NO: 35807 - DNA, 201 bp, Homo sapiens
tttattaatagatttttcaaatgcaaataaaatgactgatggtgcttaaaattcaattcttcctgtgaacagaacacaagtaatagggtatattattttcsagaaagattcgaccaaattgagagttggaacctgaaaaacaatactttttaagcattacaacacttagttccttctcaggaatacgtgtaataaaagata

SEQ ID NO: 35808 - DNA, 201 bp, Homo sapiens
tcttcctgtgaacagaacacaagtaatagggtatattattttccagaaagattcgaccaaattgagagttggaacctgaaaaacaatactttttaagcatyacaacacttagttccttctcaggaatacgtgtaataaaagatacattatgtgcatttgacagccataagtgatgtgcattctaagatatggaataggcag

SEQ ID NO: 35809 - DNA, 201 bp, Homo sapiens
tgtgactgactgtatttataaaaagaagtccgagcacatagtcctgggtcattctaatataaagagatgaaataagggaaaccaaaaaaggaaattgtatyttactcacctttatgttttaaaattaatgtttttctgtattttttttttcactattttacttagactctacctatgtttattattgaagtgagtttttgt

SEQ ID NO: 35810 - DNA, 201 bp, Homo sapiens
aacagaaacagtaacttccactctttcaagttaagttctacataatttgaggaatcatcattttggcctttcaagataaataaatctgttactgttcctcrtcttctttgaactccacatgtccatttactttgaagcacacaataagaatgacatttcaaattcttggagccaaaggctatgaaaattattttggcagat

SEQ ID NO: 35811 - DNA, 201 bp, Homo sapiens
aaattaatgtttttctgtattttttttttcactattttacttagactctacctatgtttattattgaagtgagtttttgtagacagcatatagttgggtcwtgtttacatatccattcatcctttcatggcctgttaactggtgcacttggaccatttacacttaaaataattattgatatataggacttaaatctctgtc

SEQ ID NO: 35812 - DNA, 201 bp, Homo sapiens
caataccactctgtgttggtcagtagtgtataatttgttttacataattctttcaaatgaggttaatattctcttgtgcttcgtgtaaacaagagagaagytctttctctgtgtctattactttatcctgacaaaataaattaggacctaggcacattaatcaatcaccactctttcagttttttgaacaaaatacagcca

SEQ ID NO: 35813 - DNA, 201 bp, Homo sapiens
ttataattgcctagataattacaattgctacccttatagacattacttcataattgccttggtcaatacaattgttagacttatagattttctagacattmtatgccatgctaacatagtctcatgccactcattatgtggacattctaaaatttagaaatggtcactcttgttttaaaacttctaattatacctctcctg

SEQ ID NO: 35814 - DNA, 201 bp, Homo sapiens
aatggataagtaaatctttgatgggcctcaaatatcttttgaggaaaaatatcagataagtaactttaatgaaattagacaaaacatatgtcttcttgacwactacaatagttactttgagcataacaggaatgtttgttattataattattttatataaaaaggtgagataccttcctgtctattccctgccttactgaa

SEQ ID NO: 35815 - DNA, 201 bp, Homo sapiens
gttctgctcaagaccaggaaaagtcgacatcctggggaccacttaaaacacagtgaaagaggccatgcaaagcatgactggtgacccattcctctgttcakcttgaaggacttagaccctggattcaccacagccatataaaacccgccccgccagattcttgtcctatcaagaaatgtagagaggccacttcaacttcag

SEQ ID NO: 35816 - DNA, 201 bp, Homo sapiens
caagggtagcaggaaattttaaatacttgcttgtatttttagatacattttcaagataaacaaaatcattccgctgcaagaccaagagaatgtctgaggtwatgagagccttggtagagaagattaccctcaggtttaggtggcctgtctccatccagtgtgaccatagtgcaatttctgtagcctaggacaccatatatt

SEQ ID NO: 35817 - DNA, 201 bp, Homo sapiens
ggcacagaaggcagaacttagagtcctaatcagggcatcccaactaggtaaagactcctgagtcaccgattactctgattccaggtatgtttttattgttrtccatgctcatggggccgtttggaaagaaagcgggctcttaacctttgatgattaaaaaagaaaaacaattaagcatgctaaagaaatcttagcctgact

SEQ ID NO: 35818 - DNA, 201 bp, Homo sapiens
tcactttgggttaacctagcactgtacacaccccatactgtgtatgctatttgttggaacagaagtggagctactgacttacctctagaagactgaatagrtatcaggtcatcctcctggataatcctagtgttactttgagagctgtttctgctttaaatcctgctaaataaacctatacatgattgcatataaattact

SEQ ID NO: 35819 - DNA, 201 bp, Homo sapiens
aaactttcgtttacactggcttccagaagggaaaaataaaggtctatcagtgttctagcgaaggatgaagaagaaatttaaaacatcaacgcttgtacctkacaaaaaatagtttcatgtcttttcctcaatattacatttaaatttattaaaatcaacaaaatatttgatgagattgtctacttattttaaattcgtctt

SEQ ID NO: 35820 - DNA, 201 bp, Homo sapiens
cacttttgaaaacagtgatacaagccatttagtccatccctaaagactcgatggttctgggactatatccatgttaagcagtctttttcacataattaacygaaacaatgggtaccctttgtaagattttttaaaattaggcaaaagaaagaagtcaggagaaggcaaaccaggactttaatgtaggaatgctcaaagatt

SEQ ID NO: 35821 - DNA, 201 bp, Homo sapiens
tttggatcctttgattaaccattcttcctccttttaacttgggtaattttcaaaatgtgtttttaattctttgcttattcgctaagaaaatgcctatttgwgtttatttttaagaggctaaaatgtataagcaggatgattgcaaacaaaaatctggtatcacataatctatttatgctgactttttgcattttataaatt

SEQ ID NO: 35822 - DNA, 201 bp, Homo sapiens
ataattattgatatataggacttaaatctctgtcgtttatttgtttctgcctgtttcctctgggtttcagtcctatttccctattcctccattccctgtarggaaattattaaggagattaatttcgattcatatgtattgttttccattctatctctttgtatagcttttctcctccttttaaaaagttgttgctctagc

SEQ ID NO: 35823 - DNA, 201 bp, Homo sapiens
ttgtcatagttttctatgtttagcatgtattcattcggaaagacatttcttaatcctggtctaccataagcagcaatatttgttaatgttttatgtgttcyttcagtacggagaaaagaacttaaatatattactttcagtttaaagggttaaaatttcttccaggactcatttctttcaccagaaatcacaaaactgttg

SEQ ID NO: 35824 - DNA, 201 bp, Homo sapiens
gccaagggtagcaggaaattttaaatacttgcttgtatttttagatacattttcaagataaacaaaatcattccgctgcaagaccaagagaatgtctgagsttatgagagccttggtagagaagattaccctcaggtttaggtggcctgtctccatccagtgtgaccatagtgcaatttctgtagcctaggacaccatata

SEQ ID NO: 35825 - DNA, 201 bp, Homo sapiens
cgtatgcctaaaaataaaaagatggaactgagtatttgatgattaatcttagctcaatagttctcaaagtgtggtcgctaaaccggtagcatcatcatctycttggagattgtttgaaatgaaaataaaattccgtaagctcattctagacatccagaatcaaaagtctcaaagtaaaaccctgaaactgttttaccaaca

SEQ ID NO: 35826 - DNA, 201 bp, Homo sapiens
tactcacagattattgaacaaccattctgctgaatgcttgcctaccaaatatttctgtcagaaagtaaagtttagaaatttttctctttagggctgggtgyggtggctcacacctgtaatcccagcactttgggaggctgaggcgggcagatcacgaggtcaggagattgaggaccatcctggctaacacggtgaaacccc

SEQ ID NO: 35827 - DNA, 201 bp, Homo sapiens
tattgaacaaccattctgctgaatgcttgcctaccaaatatttctgtcagaaagtaaagtttagaaatttttctctttagggctgggtgcggtggctcacrcctgtaatcccagcactttgggaggctgaggcgggcagatcacgaggtcaggagattgaggaccatcctggctaacacggtgaaaccccgtctctactaa

SEQ ID NO: 35828 - DNA, 201 bp, Homo sapiens
tctgctgaatgcttgcctaccaaatatttctgtcagaaagtaaagtttagaaatttttctctttagggctgggtgcggtggctcacacctgtaatcccagmactttgggaggctgaggcgggcagatcacgaggtcaggagattgaggaccatcctggctaacacggtgaaaccccgtctctactaaaaatacaaaataat

SEQ ID NO: 35829 - DNA, 201 bp, Homo sapiens
ttgcctaccaaatatttctgtcagaaagtaaagtttagaaatttttctctttagggctgggtgcggtggctcacacctgtaatcccagcactttgggaggmtgaggcgggcagatcacgaggtcaggagattgaggaccatcctggctaacacggtgaaaccccgtctctactaaaaatacaaaataataataataaccgg

SEQ ID NO: 35830 - DNA, 201 bp, Homo sapiens
tgcctaccaaatatttctgtcagaaagtaaagtttagaaatttttctctttagggctgggtgcggtggctcacacctgtaatcccagcactttgggaggcygaggcgggcagatcacgaggtcaggagattgaggaccatcctggctaacacggtgaaaccccgtctctactaaaaatacaaaataataataataaccggc

SEQ ID NO: 35831 - DNA, 201 bp, Homo sapiens
accaaatatttctgtcagaaagtaaagtttagaaatttttctctttagggctgggtgcggtggctcacacctgtaatcccagcactttgggaggctgaggygggcagatcacgaggtcaggagattgaggaccatcctggctaacacggtgaaaccccgtctctactaaaaatacaaaataataataataaccggcatggt

SEQ ID NO: 35832 - DNA, 201 bp, Homo sapiens
tcccagcactttgggaggctgaggcgggcagatcacgaggtcaggagattgaggaccatcctggctaacacggtgaaaccccgtctctactaaaaatacaraataataataataaccggcatggtgacgggcacctgtagtcccagctagtcgggagtctgaggcaggaaaatggcgggaacccgggaggcggaggttgca

SEQ ID NO: 35833 - DNA, 201 bp, Homo sapiens
gctgaggcgggcagatcacgaggtcaggagattgaggaccatcctggctaacacggtgaaaccccgtctctactaaaaatacaaaataataataataaccrgcatggtgacgggcacctgtagtcccagctagtcgggagtctgaggcaggaaaatggcgggaacccgggaggcggaggttgcagtgagccgagttcgcgc

SEQ ID NO: 35834 - DNA, 201 bp, Homo sapiens
tattctcttcccttttagaaacatgttccaaatcaagtatagatattgagaatgggtttatttctgaatctcagtatacatatgccttaaaagaaaaagcraaatatcaatgcaaactaggatatgtaacagcagatggtgaaacatcaggatcaattacatgtgggaaagatggatggtcagctcaacccacgtgcatta

SEQ ID NO: 35835 - DNA, 201 bp, Homo sapiens
taactaggaatttgctagtatagtacaggcctccaaacattaaacgaagaaataccagcttagtattcttttcaaatattcttctctcagccatgtaacaraaaactgcatgtggattgacagacatctgagtatatttcaagtgtcctaggaggtctcttctttgtggaaaggtttccacagaattgttattatggagca

SEQ ID NO: 35836 - DNA, 201 bp, Homo sapiens
aggaatgagatgaaataccctatgtataatgttttatgttgctttggaaaagtacaacaatgtagaaaaaggtaaaatcatgataaagtaagaaattaaaractgtttggactgatttacaagaaaaagatgatgctatgatggttcagttaaaggaacctatgactcacccccctccactttatgggggagctgcagcag

SEQ ID NO: 35837 - DNA, 201 bp, Homo sapiens
aaccttaatacccactggatttcggagaacagtggccactgcatggttctcatgcttacagtacgatcctgtagctagatttgttttgtaagaaggaagargaatgagatgaaataccctatgtataatgttttatgttgctttggaaaagtacaacaatgtagaaaaaggtaaaatcatgataaagtaagaaattaaaga

SEQ ID NO: 35838 - DNA, 201 bp, Homo sapiens
attatagctgtagtaattaaaacatttgacattataagccaaattagttcattttcacatcatcttgtgtgaactttaagcatcctctgatgtatattctyagacttctcatctctgttcttagggcacagctgcctctactcatcaatctccacattattcaatcttctgtcagtttatcaacaatctgcctataagtac

SEQ ID NO: 35839 - DNA, 201 bp, Homo sapiens
tacttaatattaaaacaggcatataaaattaaatttatgagttagtgaaacctgaattcattcttttttttttaggccttccttgtaaatctccacctgakatttctcatggtgttgtagctcacatgtcagacagttatcagtatggagaagaagttacgtacaaatgttttgaaggttttggaattgatgggcctgcaa

SEQ ID NO: 35840 - DNA, 201 bp, Homo sapiens
ttgggagacatgttttttaatcctggagatttagagtgcagaaacgttatttcaggtcccagaagactttatagatcagagattgatggattccattacartcagagaaaggagaatagtggtctaaaatcctaaattgtatgtttgaatttcagtgtgataaataagaattcccctttgctcccccaaacccccatattt

SEQ ID NO: 35841 - DNA, 201 bp, Homo sapiens
ataatacacccctaattctcatacattaaacatcgaacctcattttcacatcgattaccattctaagtttattcaaatcaatatgatgtttctacatagtyggtttggatagtgttttgagaaataattcctgaaccatcatataacattctacttgaaaacctgaaagtctatgaagatttgcatactacttaatgtttt

SEQ ID NO: 35842 - DNA, 201 bp, Homo sapiens
aaaccctagaagaaaacctaggcaataccattcaggacataggcatgggcaaggacttcatgtctaaaataccaaaagcaatggcaacacaagccaaaacygacaaatgggatctaattaaactaaagagcttctgcacagcaaaagaaactaccatcagagtgaacaggcaacctacagaatgggagaaaatttttgcaa

SEQ ID NO: 35843 - DNA, 201 bp, Homo sapiens
tctaaaatcctaaattgtatgtttgaatttcagtgtgataaataagaattcccctttgctcccccaaacccccatattttcagagatagtagtatgtgtakttatctatatggtgtgatttaaattgtgcgatggcccaattggcttcaatatctcatctcctcctaaaatactttacgtgttgatattaatattactata

SEQ ID NO: 35844 - DNA, 201 bp, Homo sapiens
ccctaattctcatacattaaacatcgaacctcattttcacatcgattaccattctaagtttattcaaatcaatatgatgtttctacatagttggtttggayagtgttttgagaaataattcctgaaccatcatataacattctacttgaaaacctgaaagtctatgaagatttgcatactacttaatgttttatgtttact

SEQ ID NO: 35845 - DNA, 201 bp, Homo sapiens
tggagttctccacctcagtgtgaaggttaggccaatatgaatactcaatttctgtttatagtagaattcataaaaataatctcttgttatcaaagtgaggrgaataattgagattactgcatatataaaataatttatatattataccattaaaatactttttgcatgattgaatctattctatttatgttaattttattt

SEQ ID NO: 35846 - DNA, 201 bp, Homo sapiens
ttataaaaattcatggcaagcacccagacatgatggctcacacctgtaatcccagcactttaggaggcaaaggagggcagattacttgaggtcaggagctygagaccaggctggccaacatggtgaaaccctgtctctactagaaatacaaaagttgcccaggcatggtggcacatgcctgtaatcccagttacttgggag

SEQ ID NO: 35847 - DNA, 201 bp, Homo sapiens
taaatgtagaattaggctatactgggtcacaatgttcttcaaatttatttgccatgtcacaaaatgttaaataatctctttcttaattgtttactatcagmaaatactttaaattaaataataatgattgtggtacacattaaaatcaatgggatacagctgaaacagagatgtatttagcattataacatgcatcagaaa

SEQ ID NO: 35848 - DNA, 201 bp, Homo sapiens
atacaaaataataataataaccggcatggtgacgggcacctgtagtcccagctagtcgggagtctgaggcaggaaaatggcgggaacccgggaggcggagsttgcagtgagccgagttcgcgccactgcactccagcctgggtgacaaagcgagactccgtctcaataaaaacaacaaaaaaagtaatttttctctttata

SEQ ID NO: 35849 - DNA, 201 bp, Homo sapiens
agttttttaattgctcagcacatagtctaccttgctaacggttctatttacaaataaaaatatgcatacacactaaatgtagaattaggctatactgggtyacaatgttcttcaaatttatttgccatgtcacaaaatgttaaataatctctttcttaattgtttactatcagcaaatactttaaattaaataataatgat

SEQ ID NO: 35850 - DNA, 201 bp, Homo sapiens
gcatactacttaatgttttatgtttactgttttttattttcagatccgtgtgtaatatcccgagaaattatggaaaattataacatagcattaaggtggasagccaaacagaagctttattcgagaacaggtgaatcagttgaatttgtgtgtaaacggggatatcgtctttcatcacgttctcacacattgcgaacaaca

SEQ ID NO: 35851 - DNA, 201 bp, Homo sapiens
ccagctagtcgggagtctgaggcaggaaaatggcgggaacccgggaggcggaggttgcagtgagccgagttcgcgccactgcactccagcctgggtgacaragcgagactccgtctcaataaaaacaacaaaaaaagtaatttttctctttatatttatattttattttaaagcatttagttgacaaataaaaatatattt

SEQ ID NO: 35852 - DNA, 201 bp, Homo sapiens
cgccactgcactccagcctgggtgacaaagcgagactccgtctcaataaaaacaacaaaaaaagtaatttttctctttatatttatattttattttaaagmatttagttgacaaataaaaatatattttgatgtttgacaatatgttgttttgatatatttatgctacaaagattaccacaaattaattagcacattcttc

SEQ ID NO: 35853 - DNA, 201 bp, Homo sapiens
gcgagactccgtctcaataaaaacaacaaaaaaagtaatttttctctttatatttatattttattttaaagcatttagttgacaaataaaaatatattttsatgtttgacaatatgttgttttgatatatttatgctacaaagattaccacaaattaattagcacattcttcatcacctatgcttagcattgggtgtaggt

SEQ ID NO: 35854 - DNA, 201 bp, Homo sapiens
ataaaaacaacaaaaaaagtaatttttctctttatatttatattttattttaaagcatttagttgacaaataaaaatatattttgatgtttgacaatatgytgttttgatatatttatgctacaaagattaccacaaattaattagcacattcttcatcacctatgcttagcattgggtgtaggtgggtgtgtgagtatgt

SEQ ID NO: 35855 - DNA, 201 bp, Homo sapiens
ttctctttatatttatattttattttaaagcatttagttgacaaataaaaatatattttgatgtttgacaatatgttgttttgatatatttatgctacaawgattaccacaaattaattagcacattcttcatcacctatgcttagcattgggtgtaggtgggtgtgtgagtatgtgtgtgtgtgtttgtggtgaggacac

SEQ ID NO: 35856 - DNA, 201 bp, Homo sapiens
atctctatgtttgattccaagttcttattcatattatagctgaaagtttgtactctttgaccaatatcttaatcaaaagcagcaatgataagttctaaaaygcagggatcctaaaatgacaactgatgtaatgaatcattgataatacacccctaattctcatacattaaacatcgaacctcattttcacatcgattacca

SEQ ID NO: 35857 - DNA, 201 bp, Homo sapiens; identical to SEQ ID NO: 8426

SEQ ID NO: 35858 - DNA, 201 bp, Homo sapiens
caaattgagagttggaacctgaaaaacaatactttttaagcattacaacacttagttccttctcaggaatacgtgtaataaaagatacattatgtgcattwgacagccataagtgatgtgcattctaagatatggaataggcagttgaagagagatcatagactgtgatataaatgtgggcatcttcagtatatggattat

SEQ ID NO: 35859 - DNA, 201 bp, Homo sapiens
cttctgagccgtccaactccctaggaagttccaaacattttaacattctcctgtcttcttctgacccctccaaatggttctaacccctgcctgttatccakttccaaagctgcttccacatttttggttatctttacagcagcaccctactctctgcagtaccaatttactgtattagtctgttatcatgctgctataaag

SEQ ID NO: 35860 - DNA, 201 bp, Homo sapiens
taaagtctcaagctctttcttttatctgttttattttaatttgaagaattcctttagttaatctttaggcataggtctactggagacaaattcccttggtwtccctttctctgagaatgtctgtattgatccccttacttgtaaaagatcgtgtcactggatatcaaatttggagttgacagttctttgaacacttgaaaa

SEQ ID NO: 35861 - DNA, 201 bp, Homo sapiens
ttttaatttgaagaattcctttagttaatctttaggcataggtctactggagacaaattcccttggtatccctttctctgagaatgtctgtattgatcccyttacttgtaaaagatcgtgtcactggatatcaaatttggagttgacagttctttgaacacttgaaaaccgtgccacatggttatagatgaaaaactcagc

SEQ ID NO: 35862 - DNA, 201 bp, Homo sapiens
caaatatcatactaaatatgtgttcatttttataagaaatagacaaactgttttcctgagcgatcatacattgtaccttcacatactcagtgtatgtgagwtccagttgtttcgcaaccttgccagcctttgagataatgtgtttttttttccattaaattatccattctaatatgtgtgtgatggtattgcattccctag

SEQ ID NO: 35863 - DNA, 201 bp, Homo sapiens
aattataagagctattttttaaaaacccatagcaaatatcatactaaatatgtgttcatttttataagaaatagacaaactgttttcctgagcgatcatayattgtaccttcacatactcagtgtatgtgagatccagttgtttcgcaaccttgccagcctttgagataatgtgtttttttttccattaaattatccattc

SEQ ID NO: 35864 - DNA, 201 bp, Homo sapiens
gtttattgtttaatttcaaaatatttgtttttttctagataagtgatttttgctggtttctaatttaattctcttgtgaaagaatactgggaaaatttcartattttgaaacactcagttttttaattgctcagcacatagtctaccttgctaacggttctatttacaaataaaaatatgcatacacactaaatgtagaat

SEQ ID NO: 35865 - DNA, 201 bp, Homo sapiens
gcctttaaattttctccatttgctctgtattttttagttttattatgttttactgattttagctttgctaattttctcccttctctgtgtttctttgtccrttttctcttcttcactgattttactgttttcttccttctgatgacttcagttttaatttcacttttctcaatcttagggtgaaaaatgaaaacatggtca

SEQ ID NO: 35866 - DNA, 201 bp, Homo sapiens
gacattctaaaatttagaaatggtcactcttgttttaaaacttctaattatacctctcctgttactacagtgcctagacaggcatagcaacactgtagttmaactgtttcaaggtattgccactggaagaaacttaccagaatgatggatctgtcagtaactcccccaaactattcaaaataagcattttctgttagtcat

SEQ ID NO: 35867 - DNA, 201 bp, Homo sapiens
actgatgtataggaatgcttgtgatttttgcatattgattttgcatcctgagactttcctgaagttacttatcagcttaaggagtttctgggttgagacartggggttttctaaatataccatcatgtcatctgcaaaaagagacaatttgacttcctctcttcctatttgaatactccttatttctttctcttgcctgat

SEQ ID NO: 35868 - DNA, 201 bp, Homo sapiens
ctcccccaaaagctaggatgatagatgcttagttcactcttatctttcctctctgagggagaagcagtcaaaatatattggtctctgtttactttaggggrttgcaggaggctttgaactggtttcttgatttctcataaagggaattgtttccagtatcgtcattgaatcagtgtgcctgtggggggaagggagagtggt

SEQ ID NO: 35869 - DNA, 201 bp, Homo sapiens
agtttgaaatcaggtagcgtgatgcctcagctttgtgctttttgattaggattgtcttggctagatgggacctttttttggtttcatatgaaatttaaagyagttttcttagttctgtgaagaaagataatgatagctagatgggaatagcattgtatgtatcaactactttgggcaatatggccattttcatgatattga

SEQ ID NO: 35870 - DNA, 201 bp, Homo sapiens
ctggaagtgcttacacacccatataaaacgccatttcttttttcagtggtctagatagactctggatatattttgtgccctctactcccagaactaagagytttagaatacagtccctgaatgaaagttgtaaaagttagggcactcaagtttgtgtggacaaacttgttctaagagtgattaatgtacctggatgtatca

SEQ ID NO: 35871 - DNA, 201 bp, Homo sapiens
aattttggcctttgttgccattgcttttggtgttttagtcatgaagtctttgcccatgcctatgtcctgaataacctactgcctaggtttttttctatggkttttatggttttaggtcttacatttaagcctttaatacatcatgagttaatttttatattaggtgtaagggaagggtccagtttcagttttctgcatatg

SEQ ID NO: 35872 - DNA, 201 bp, Homo sapiens
ttccttcttctccttcatctagtctgctgatgaatacctctttaaaacttttccgttcagttatagtattctcaaatttgtgatttttgtttggtattttwaaaatactttctacctctttgttgaagtagttaatttgtttttgcattgctctcttggtctcagtgagtatctttatgaccattattttgaattccttct

SEQ ID NO: 35873 - DNA, 201 bp, Homo sapiens
ttatttttttgaatatattttctgtatcgttgtgtttctttctgtttttaacatggtgataatgcatacgttattccacatggtagtattccatctggatyttaagctatcttcacttttatttatttatgtgtttattttggttctcagatttggtgattttcagtaatttgacttcaagttcactaattccttcttctc

SEQ ID NO: 35874 - DNA, 201 bp, Homo sapiens
aatgatcggcattctaactggcgtgaattggtttctcattgtggttttgatttgcatttctctaatgaccagtgacaataagcttgttttcatgtatttgytgactgcataaatgtcttcttttgagaagtgtctgttcatatccttcacctactttttgatggggttgtttgtttctttcttataaatttgtttaagttc

SEQ ID NO: 35875 - DNA, 201 bp, Homo sapiens
cttatggcctgcaaggtttctgttgagtaatccactgatagtcttgtggaaattccattttatgtaaccattcacttttcattggcttttttcaatacttsgtctataacttttgataatttgattgtgttatgtcttaaagtgactatctttcattaaacttatttgatttcctttgagatttctgggtgtgggtttcta

SEQ ID NO: 35876 - DNA, 201 bp, Homo sapiens
tccttatgctctctcagctttttttcaatctcagaaagcctttatcactcctttgtttttaagacagaatagtggaatctagaattattccttggcagttrttttctttcagaattttgagtatatcattccacttccttatggcctgcaaggtttctgttgagtaatccactgatagtcttgtggaaattccattttatg

SEQ ID NO: 35877 - DNA, 201 bp, Homo sapiens
aaggatttatagtggtaatttgttaattgtgttctggttgtttttaaaattctttgtttctttcttgcttgctttattcatggtttgatgactttctgtasccatatgcttaggattttttcttttaatcttttgtgtatctattagatgttttgcttttggctatccttaggcttgcatagcataccttataaaaggcta

SEQ ID NO: 35878 - DNA, 201 bp, Homo sapiens
gtaaactagttcaaccattgtggaagtcattgtctagatcctcagggatctataactagaaataccatttgacctagccatcccattactgggtatatacvcaaaggattataaatcatgctgctataaagacacatgtacacgtatgtttattgcggcactattcacaatagcaaagacttggaaccaacccaaatgtcc

SEQ ID NO: 35879 - DNA, 201 bp, Homo sapiens
ctgacttgttatctgtggctctgaccctagtagtccctggaccacaacaagggccgtcatcagacactccatctatggtagaaccacctgggcccccaaargccaataaaaacggacatcccattgcaggtcccaaccagtgtgcttactgcaacaggggggacactgagtggaaaatttctcatgccctacaaagcctga

SEQ ID NO: 35880 - DNA, 201 bp, Homo sapiens
ccttacttgtaaaagatcgtgtcactggatatcaaatttggagttgacagttctttgaacacttgaaaaccgtgccacatggttatagatgaaaaactcascatcatttgaattgttgatcccctcgaggaaaagcatagtttttgtctagttgctttcaaggtatttttttctttttttaaagtagttttattttaatgt

SEQ ID NO: 35881 - DNA, 201 bp, Homo sapiens
ttactgatattgagtttttatttcatatttcttggtcattttcatgtcttcttttgcaaaatatctcttcatatcctttgtccactttttcatgggattattatttttttttcttgttgtgttgtttcagttctttgcagattctggatattagccctttttcagattcatagtttgcaaatattttcttccattctgagg

SEQ ID NO: 35882 - DNA, 201 bp, Homo sapiens
tatatcatgtatcacggtctgttaatccattcatgtgttgaagggcatttgcattgtttttggcatttgtgaatcatgctgttaagaaaaatattcatctrcagtttttatataaacacaaatttattcctcatggatacatatctaagactgggtttgttagataaatggtgtgtgtgtgtgtgtgtgtgtgtgtgtgtg

SEQ ID NO: 35883 - DNA, 201 bp, Homo sapiens
atattggagtgtatcctttatgaatgcaaactggctgtagtttcctttaaaatagtcatttaaataaaaaatttgccagataaatcacagaatatcaattyctcttgacttgtaaaacttgaattactagtgccatctgaatgattcttctgaagatagacagagtagtctctacttacctgtgagagaaaaaagctgcac

SEQ ID NO: 35884 - DNA, 201 bp, Homo sapiens; identical to SEQ ID NO: 8411

SEQ ID NO: 35885 - DNA, 201 bp, Homo sapiens
ggtaaactcaacatttccctaacaatttttatagtacctttctcaaacagtatattttttattgtatattttgtacattgtgtgtgtatacacacacacartaactattactctgagtattctgcactattagtaaacaattttttaaccagcattgcagtaaccctctattgaattttatttatttattttattttgaga

SEQ ID NO: 35886 - DNA, 201 bp, Homo sapiens
tatgtttagagtccttaaagaagcaaataatatatatatgcagtgaagtgtacatgttctacagttttttcttgaagttttatagttttagccattctatrtagatttattaaaatgatcgtatagttatcgtcctttctgttaatgggatgcatcacctttactaatttgcctatgttaaacgacctttacatttcttgg

SEQ ID NO: 35887 - DNA, 201 bp, Homo sapiens
tagtcaatcttttttcatgatgaatgtttcttgtttctatttaaaggaatacttcaaaaacatagagccactatactattctttattctaaaaagttatawgttaccttttcttttcatattttaaaaatattttgtgttgattttattcatgataatggctgtatttcatgtttaaatgaaatatggtaaactcaacatt

SEQ ID NO: 35888 - DNA, 201 bp, Homo sapiens
acacatacagtttcacttgaatagtgtaggttttattccagtcttctcatattttatatctgtattttgctatccaattgtgggtttccttgcctcactarcttcaatatttttaccaatgtctgccagtctaggatatacagaaagcattgacaaccaatacaaaaactaatctgctatcaacatttcaatatgtttaga

SEQ ID NO: 35889 - DNA, 201 bp, Homo sapiens
atttcttttaccactaactgggtttagaatatatattcacagtttaattggtatttaatgcttctaatctttggaaatgcagtttgattttctttatttayctttttgagagttttggtattattagttggaatcatcttaacaattctgaatataaaatctcttttaattatacgtaatgcaaatgtattctctttgtgg

SEQ ID NO: 35890 - DNA, 201 bp, Homo sapiens
agtgataatttttcagtttgttccatatcagccaaaataagttaatgtgctgcagggttggtgggccacaggccctctacatcagtggtatagctgagtgrcatgaggtagtcagggactgagtcaggacgtaaatctcattgacggacttcacactgtaaatctcatgtcttgatcagcaagaaggcaaggtgattcact

SEQ ID NO: 35891 - DNA, 201 bp, Homo sapiens
ttgcatttcttttaccactaactgggtttagaatatatattcacagtttaattggtatttaatgcttctaatctttggaaatgcagtttgattttctttayttacctttttgagagttttggtattattagttggaatcatcttaacaattctgaatataaaatctcttttaattatacgtaatgcaaatgtattctcttt

SEQ ID NO: 35892 - DNA, 201 bp, Homo sapiens
gaaatagacaaaaatgcagtaatagtaggggacttcaataacccacattcaacaatggatagacagtctatacagaaatcaataaaaacattggacttgarctctatattagaccaaatggacctatcagacctatatagaacattccatttgacaacagtagaataaacattcttctcaagcacacaaggtataatctcc

SEQ ID NO: 35893 - DNA, 201 bp, Homo sapiens
aaatattaaaaaattatcatatgattaaatatgagtactaattactgagaaattataacagttttatataaaatataaatattattgttattgtatggtaytcctttttaggcactgagaagcaaagaaacaaagttgacaaaatacctacttactactctcccataggattcttttctctcttaaagcttccaaaagtga

SEQ ID NO: 35894 - DNA, 201 bp, Homo sapiens
atgatacccaataattcatatattcaagcagtgatatgacatttttacagtaaagctatttgactttctctagtatatgtaagtacaaatgggtattctgrgatcttgtgcatattctactctagaaggtttcctacagtatttattccaacatacatttatatcaacagttacttctttttttacatgttaatgattggt

SEQ ID NO: 35895 - DNA, 201 bp, Homo sapiens
ggaatgttaaggaaaaaacgaaagaagaatatggacacagtgaagtggtggaatattattgcaatcctagatttctaatgaagggacctaataaaattcartgtgttgatggagagtggacaactttaccagtgtgtattggtaatgtataaaatattaatatttaaacttgtcaaaacttttgtattttgtatctaaaac

SEQ ID NO: 35896 - DNA, 201 bp, Homo sapiens
tttactcctttttattcatacgtaaaattttggattaatttgtgaaaatgtaattataagctgagaccggtggctctcttcttaaaagcaccatattaaawcctggaaaactaacggttgtgtccagttcataaaatgtttgtggcaagaaattagacgcaatttttcagactttatttctgttcatcactcttaaatctc

SEQ ID NO: 35897 - DNA, 201 bp, Homo sapiens
caggctcctcttgttagaaaagaaaatgatttgggggctgcctttcattaaaaggaaaaaccttatcaaggactgctgtaccctcattatctgcctaaacrattttttctcaactcctatatcaatattaatatgtacattggaatcaatcatttgactcaaaataattatacaattatagtttaaaatagaaagtaaata

SEQ ID NO: 35898 - DNA, 201 bp, Homo sapiens
aaaccatactagtggctgacaatggagggatttctttgttaattttcattttgcttgaaatgtcaacatccattctggacattttatatagtgtgggctgyaacttaagtttcaccgggtgtgtctaaacaatatttaagcagcttatattcaattcagttgcttgtattgattagtcaaactttatgttgatcaaatgct

SEQ ID NO: 35899 - DNA, 201 bp, Homo sapiens
gggtgactgccacatccaagcaggtgacagggaatatttgtgcggctctggtgttatggggacagagggctgaggttcctgggtaggaaacagtccccacrtgagtgcactgcaggcatgaaacctaccactgcagctcaggcccaaggggaaggcagatgaccctattcaactagtagtttggtgtaatgccctcaagaa

SEQ ID NO: 35900 - DNA, 201 bp, Homo sapiens
aaaggaaacacttgtacattatgggtgggaatgtagattgttacagccattgtagaaaactatatggaggttcctcaaaatattaaacatagaactatcgyatgactcagcaattccacttctgggtgtataaacaaagaaaacaaaatcagtatgtctaagaaatatctgcactctcatgttttttgcaggattgttcac

SEQ ID NO: 35901 - DNA, 201 bp, Homo sapiens
aaatcatacttccagaaatgtttcagtggtttcttctcatccagatgaactatcccttcttatttttaagtccagtttccaacagacaggatttttttttyccctttgagaatatgactacgatgtatgttgtatagggctatttggtttaggttctgggttctttcagtggtaaagactctgtttgagtacattggttag

SEQ ID NO: 35902 - DNA, 201 bp, Homo sapiens
ctgacccagacaacaccctccatatttcccacatggggcttgagatcctgatgatggtgagaaatcagcttctggactttctagtagacatggtgccatcyatttggtgttaaatatctggtggtctaaactttcctcagaaataatgaaggtgactgaaatctcagaaaaaatgctgatgagatcattcctccaaatttt

SEQ ID NO: 35903 - DNA, 201 bp, Homo sapiens
atgtagattgttacagccattgtagaaaactatatggaggttcctcaaaatattaaacatagaactatcgcatgactcagcaattccacttctgggtgtawaaacaaagaaaacaaaatcagtatgtctaagaaatatctgcactctcatgttttttgcaggattgttcacaatagctatgatatggaaacaacttatgtt

SEQ ID NO: 35904 - DNA, 201 bp, Homo sapiens
agaacaatgtcaatattacctattgtaaaagacatctttttctgtttctttgtgtaaatatttctgtcttttcttactaaatttatgggaatgtttctaaygtttcatacctacatactgtttgctccagttttacatagataccatttgtcatataagggagatttgttttatttctaatctttaaaatcaagaatcaat

SEQ ID NO: 35905 - DNA, 201 bp, Homo sapiens
acctgtcttgccaggacaaaaacatggaactgaggattattggtttgtacaggatttgagggctactaggcaaattttcaaagccatttatctggtgatamctgatgcttatacattattcatgactttaaccagtgagttgtactggtgttcagtcttgaatctgaaggatgccttcatctgtattcccctgagtccaga

SEQ ID NO: 35906 - DNA, 201 bp, Homo sapiens
tgtaacatacgcccacttgggcttcggaaatcgcagacacccacccctagatgctgctgtgaggccagagcccgaaagcgctcactccggttcccgcacckgtgcatctgtgtgctccccctccccgtaaggggtttgagctgcagggcgacctaactggcaagccgcacacctgttgcatgtccttcaaggggaatcagg

SEQ ID NO: 35907 - DNA, 201 bp, Homo sapiens
gtggctcacacctgtaatcccaacactttgggaggcccaggtgggtggatcaccatgtcaggagttcgagaccagcctgaccaaaatggtgaaaccccatstctactaaaaatacaaaaattagccaggcgtggtggcgcgtgcctgtaatctcagctactcaggaggctgaggcaggagaattgcttgaatcagggaggc

SEQ ID NO: 35908 - DNA, 201 bp, Homo sapiens
cttgattttgtttagtattattcttacttttttgagacagggaatcactttgtcacccaggctgcagcgtactggtgcaatcatggctcactgcagcctcracctcctgggctcaagcagtcctcccacctaagcatcccaagtagcagggattacagccaccttgctcaggtaattttttttttttttttttttttgaga

SEQ ID NO: 35909 - DNA, 201 bp, Homo sapiens
tgattttgtttagtattattcttacttttttgagacagggaatcactttgtcacccaggctgcagcgtactggtgcaatcatggctcactgcagcctcgayctcctgggctcaagcagtcctcccacctaagcatcccaagtagcagggattacagccaccttgctcaggtaattttttttttttttttttttttgagatg

SEQ ID NO: 35910 - DNA, 201 bp, Homo sapiens
agtgcagtgtcgctatctcggctcactgcaagctccgcctcccgggttcacgccattctcctgcctcagcctcccgagtagctgggactacaggcacccaycaccaagcccggctatttttttgtatttgtagtagagacggagtttcaccgtgttagtgttagtcaggatggtctggatctcctgacctcgtgatctggt

SEQ ID NO: 35911 - DNA, 201 bp, Homo sapiens
ctagataatctacaaataatcccatgaaaagagcaaattttctgaaaaatatataaacctgttaatataataaacaagatagcactcaaatgtatttgtcraaattaatatataataactcagtaaaatgtaattatattgtaccttacttaaatatattttatgacatcaaaattatttttctctccaattaaaattaga

SEQ ID NO: 35912 - DNA, 201 bp, Homo sapiens
gataaatagggaaaaaaatctatcaattataagatatatggattgtaggccaagaaactatactgaaagaagtatcattcactagtctttattagagaaakacatttaagatatacaattattcagtttataatccacataataaatgtagaaactacatgaaaatttctctaatcaaatacaaaagaaaataaatcacag

SEQ ID NO: 35913 - DNA, 201 bp, Homo sapiens
gtgcagtacaaattcacaattggaatgatacagaggatgataataaggaatctgcattagggcagttcagcattcaaagagactcttatgtgctaagctgwatctaataagatgaaatttaacaatgttgactctaagatcctggacttgggtcaaataaattacagtatgaatatattagcagcagttataaaaattagt

SEQ ID NO: 35914 - DNA, 201 bp, Homo sapiens
gaggagttaaaacgtaatagggtatataaatattacaacataaacatacaaaaaataaaaacacagtatcagttataacatgctcacttgcatgcactcayttgcaaacatagaaacatgatacttttgccctgatttaatgtttatagaaaaaacattgccaggaaattcaaaactatagataaatgtgtgtgtgtgtgt

SEQ ID NO: 35915 - DNA, 201 bp, Homo sapiens
gagacagagagcaaaggggaaagtgctacacacttttaaacaaccaggtctcatgagaactcactcactatcatgaaaacagcaagggggagatccacctstatgatccaatcacctccctcaacattgggaattacaattcaacatgagatgtgtgtggggacacagagccaaaccatatcaattatctactcacacact

SEQ ID NO: 35916 - DNA, 201 bp, Homo sapiens
tgataaggtaagaaagagggaaggaataaacaatggtttaaaatacaggggaaaatgaaagaattaaagctaacctgaatttgaaagcaacactttaccaytgaagactaaactaaagacttaaatcagtatagatacagataatgttgaggagtgctggaaagaagtataggaaactcactactgctggtctcaattgtt

SEQ ID NO: 35917 - DNA, 201 bp, Homo sapiens
atggcaacaaaatagaggtcagaaactaggtagtagtgagttaaagaataaatgtgagacgggaaagtggagacagcaattataaaatggtattttaaggrttttggttttgaaggggaggagaaatgtagtacattagctaaacttgaacaaagggttgagtgaagggactgaaaattggaaaagcttccatatcaattt

SEQ ID NO: 35918 - DNA, 201 bp, Homo sapiens
tatttatttcaagaaggctaatttatcctgaaactaaataaaatcagaagcataattttaatcagaattttaactttcttcagataaatcatttattaagyggtcaagtcaaaacagaacttttgtttggttgactgatttacctgatggaaacaacatttctgttttcatataattatgtcctggtcacagtcctttaat

SEQ ID NO: 35919 - DNA, 201 bp, Homo sapiens
tcagatccgtgtgtaatatcccgagaaattatggaaaattataacatagcattaaggtggacagccaaacagaagctttattcgagaacaggtgaatcagytgaatttgtgtgtaaacggggatatcgtctttcatcacgttctcacacattgcgaacaacatgttgggatgggaaactggagtatccaacttgtgcaaaa

SEQ ID NO: 35920 - DNA, 201 bp, Homo sapiens
gaatcattgataatacacccctaattctcatacattaaacatcgaacctcattttcacatcgattaccattctaagtttattcaaatcaatatgatgtttytacatagttggtttggatagtgttttgagaaataattcctgaaccatcatataacattctacttgaaaacctgaaagtctatgaagatttgcatactact

SEQ ID NO: 35921 - DNA, 201 bp, Homo sapiens
aaagcagcaatgataagttctaaaacgcagggatcctaaaatgacaactgatgtaatgaatcattgataatacacccctaattctcatacattaaacatcraacctcattttcacatcgattaccattctaagtttattcaaatcaatatgatgtttctacatagttggtttggatagtgttttgagaaataattcctgaa

SEQ ID NO: 35922 - DNA, 201 bp, Homo sapiens
aaaagcagcaatgataagttctaaaacgcagggatcctaaaatgacaactgatgtaatgaatcattgataatacacccctaattctcatacattaaacatmgaacctcattttcacatcgattaccattctaagtttattcaaatcaatatgatgtttctacatagttggtttggatagtgttttgagaaataattcctga

SEQ ID NO: 35923 - DNA, 201 bp, Homo sapiens
ggccttggcctcccaaagtgctgggattacaggcatgagccaccgcgcccggcctgctcaggtaatttttaaaattttttgtagagacagggtttcaccaygttgcccaggctggtcttgaactcctggggtctattgatcctcttgacttggcatgtcaaagtgctgggattataagcatgacccactgcatccagacta

SEQ ID NO: 35924 - DNA, 201 bp, Homo sapiens
tactgagcaagtgtgttctattcaaccagacatgaccaaaattccctttaaaaacctggacttaaaaatattcactgaggaaagcagctttatgcaccacsgacaacagaaggctgagtatgctattgtaaccctgtgacagatcctagatgcagagacactccctctgggttcatcggcacagaaggcagaacttagagt

SEQ ID NO: 35925 - DNA, 201 bp, Homo sapiens
tgtatttatagtggcaaattctctcaaattttattaatcagcccgggcacggtggctcactcctgcaatcccagcattttgggaggctaaggtgagtggaytgcttgagcccaggagtttgagaccagcctgggcaaaacggcaaaacctcgtctctacaaaaaatacaaaaattagctgagagaggtagtttgtgactgt

SEQ ID NO: 35926 - DNA, 201 bp, Homo sapiens
caaattctctcaaattttattaatcagcccgggcacggtggctcactcctgcaatcccagcattttgggaggctaaggtgagtggattgcttgagcccagragtttgagaccagcctgggcaaaacggcaaaacctcgtctctacaaaaaatacaaaaattagctgagagaggtagtttgtgactgtagtcacagctactt

SEQ ID NO: 35927 - DNA, 201 bp, Homo sapiens
atgtgtatatgttctgtttgcaaattgctttatgcattaagccttccttttttgatatttattcatactttttaataaatatatttataaaataaatatarttatagatagatggcactaagataatagtaagttaaaatgacatatcatcatatatagcagataattaaaaaattataaaagaatgaaacatatatgtat

SEQ ID NO: 35928 - DNA, 201 bp, Homo sapiens
catgtgccacaacagttggctaattttgtatttttagtagagacggggtttcgacatgtttgtcgggctagtctcgaactcctgacctcaggtgatccacycatctcagcctcccaaagtgctgggaatataggcgtgagccaccgcacccggccccagtggattttaattgcaagcctgccagagtgagtttcaatttga

SEQ ID NO: 35929 - DNA, 201 bp, Homo sapiens
gtttgttttgggtcaacttagttctttcaaggcttatttttaagcttttaaaaagcttaaaaaaccccagagatagtttgttcagaatattaagctgcttytgatgtctctactacgtgacctagatgttcaaacgagtctttctactctgattgattccatttaaatgtctccctgtgttgtgtgtgtgctctgggaatc

SEQ ID NO: 35930 - DNA, 201 bp, Homo sapiens
gggaggccgaggtgggcggatcacttttgggaggccgaggtcaggagattgagaccatcctggctaacacggtgaaacaccgtttctactaaaaatacaaraaaaaaaaacccaaaaaatagccgggcatggtggcgggcacctgtagttccagctactcagatggctgaggcaggagaatggcgtgaacccaggagtgga

SEQ ID NO: 35931 - DNA, 201 bp, Homo sapiens
gatggctgaggcaggagaatggcgtgaacccaggagtggaggttgtggtgagctgagattgggcactccagcatgggggacagagcgagactccgtctcaaaaaaaaaaaaaaaaaaaaagggttgcttaacttcaaaaattttgtgaattttccacttattttctgttagcaatgtctagtggtcagggagtatacttag

SEQ ID NO: 35932 - DNA, 201 bp, Homo sapiens
tttacaagctcatatgtggaagggacttgccttgtctcagatgagactttggacatggactttagggttaatgctgtagtgagttaagacttggggggacwgttgggaaggcatgattatgttttgaaatgtgaggacatgagatttgggaaaggcaaggggcagaataatatggttaggctctgtgtccctacccaaatc

SEQ ID NO: 35933 - DNA, 201 bp, Homo sapiens
ttctagtctcaaagattaaaccctcttgggtttttaaagtcaagaatctggttggtttcttctatctcaaaagactaatacacacacacacacacacacayacacacacacacacacagagtatatacatatacacatatatatacataaatataaatatgtgtatatatatatactatatatgtgtgtacatatattaga

SEQ ID NO: 35934 - DNA, 201 bp, Homo sapiens
tgaaaatgtatttaattatctcaagctttatatttcttaattatttaaaaatactagtttgttactacaaaaatacaagctagcattgaaagtagtaattytcattgtccactcccatagaaaagaatcaggaataaacattccatttgcttgtttcttagaggaaagtatctctagcaaacaggtatatcaaatgcttct

SEQ ID NO: 35935 - DNA, 201 bp, Homo sapiens
ataaatatgtgtatatatatatactatatatgtgtgtacatatattagacttttgagatagaagaagccaacacatatatattatgtatgtgagcatatgwtatatatataataaaagccatttatatatatgtttgcttttctgctgttttgactctgttcttatatatatataatcttaaatgctcatatataaatgaa

SEQ ID NO: 35936 - DNA, 201 bp, Homo sapiens
aaatacagaaattctgacaggttcctggtctgaccaaacatatccagaaggcacccaggctatctataaatgccgccctggatatagatctcttggaaatrtaataatggtatgcaggaagggagaatgggttgctcttaatccattaaggaaatgtcagagtaagtacttaatacatttgtgaaatttatgaaaactagg

SEQ ID NO: 35937 - DNA, 201 bp, Homo sapiens
aggagagagagagagagagagagaaatttagatagacctgtgactgtctaggcatttttaaaagcaacaattacctaaatatactgtacatttaaatagayactttatgcacttattttgtttttattgtttgtagattgcaatgaacttcctccaagaagaaatacagaaattctgacaggttcctggtctgaccaaaca

SEQ ID NO: 35938 - DNA, 201 bp, Homo sapiens
tagtgagtgagttcttatgagatttaatggtttaagcatctggcatttccccaacttgcacttctctctcctgctaccatatgaagaagatcctctcttcytcttcaccttccactatgattgtaagtttcctgaagcctccccaaccatgtgaaagtatgaatcagtttaaacttctttttttatgaactacccagtctc

SEQ ID NO: 35939 - DNA, 201 bp, Homo sapiens
ttgatgtttgacaatatgttgttttgatatatttatgctacaaagattaccacaaattaattagcacattcttcatcacctatgcttagcattgggtgtargtgggtgtgtgagtatgtgtgtgtgtgtttgtggtgaggacacttaaaatctgctttcttaccaattttcaaataaacaatacaatattattagctctaa

SEQ ID NO: 35940 - DNA, 201 bp, Homo sapiens
aaaaattgtcagtagtgcaatggaaccagatcgggaataccattttggacaagcagtacggtttgtatgtaactcaggctacaagattgaaggagatgaakaaatgcattgttcagacgatggtttttggagtaaagagaaaccaaagtgtgtgggtaagatacacttactgttttagtatttttagctttttaaatgtaa

SEQ ID NO: 35941 - DNA, 201 bp, Homo sapiens
aggcggaggttgcagtgagccgagttcgcgccactgcactccagcctgggtgacaaagcgagactccgtctcaataaaaacaacaaaaaaagtaatttttmtctttatatttatattttattttaaagcatttagttgacaaataaaaatatattttgatgtttgacaatatgttgttttgatatatttatgctacaaaga

SEQ ID NO: 35942 - DNA, 201 bp, Homo sapiens
ataatcttaaatgctcatatataaatgaaacagcagaaaagtgaacatatatataagagcttttattatatataaataatatatatatgtatacagctttwctgctgttttgacatctgctcttaaatatcatccagagtgactttcaaatatggcatgttttgatgagaatactagttgtgtatttgagtcagatccatt

SEQ ID NO: 35943 - DNA, 201 bp, Homo sapiens
ttgagatggagtctggctctgtcacctaggctgcagtgcagtggcgcaattttgagatggagtctccctctatcgcctggctggagtgcagtggcgctatytcggctcactgcaacctctgcctccctggttcaagcaattctcctgcctcaacttcccgagtagctgggactataggcacgtgccaccacgcccggctaa

SEQ ID NO: 35944 - DNA, 201 bp, Homo sapiens
tggcgctatttcggctcactgcaacctctgcctccctggttcaagcaattctcctgcctcaacttcccgagtagctgggactataggcacgtgccaccacrcccggctaatttttgtatttttagtagagatggggtttcaccaatgctgggcaggctggtctcgaactcctggcctcgtgatccacccacctcagcctcc

SEQ ID NO: 35945 - DNA, 201 bp, Homo sapiens
ttagtagagatggggtttcaccaatgctgggcaggctggtctcgaactcctggcctcgtgatccacccacctcagcctcccaaagtgctgggattacaggygtgagccaccgtgcccagccaatacatcatcattttcaaaaaggggtggtcatcctccaaaattaaaaaagcaagcatatagtttaagttcaattatgaa

SEQ ID NO: 35946 - DNA, 201 bp, Homo sapiens
ttatatacagtgctgtgtttgcgtttgccttatttgaacttgtattttgatttgctctcacaacaaatcaagtgatgaaatgatgttttttagattctacrggaaaatgtgggccccctccacctattgacaatggggacattacttcattcccgttgtcagtatatgctccagcttcatcagttgagtaccaatgccaga

SEQ ID NO: 35947 - DNA, 201 bp, Homo sapiens
caaaaccactcagtaatatgtgtgtgtgtgtgtgtgtgtgtgtatacgtatatatgtatatatatatatatatatatatatatatatatatatagagagakagagagagagagagagagagagagagagagagagagagagagatggagtcttgctctgtcgtcggccaggctggagtgcagtggcatgatcttggctcac

SEQ ID NO: 35948 - DNA, 201 bp, Homo sapiens
actgctaatctgagaatagaggaagccacaataccatgtattagtgtgttctcacactactagaaagaactacctgagactggataatttatgaagaaaakaggttaaattgactcacagttccacagcctgtacaggaagcatggctgggaggccttaggaaacttacaatcatggtggaaggtgaaggggaggcaagca

SEQ ID NO: 35949 - DNA, 201 bp, Homo sapiens
agcaaacaggtatatcaaatgcttctaaaaataatttaagtaatttcctccaatcttatcctgaggatgattttatacatacacatatttttcacaataawcttttaaaattccattagaaaacattacatgtattttcttcagttgtgaagtgtttaccagtgacagcaccagagaatggaaaaattgtcagtagtgcaa

SEQ ID NO: 35950 - DNA, 201 bp, Homo sapiens
ttttctatctctacaatcaaatttcttttctttctatctataagtacatagacaagaagtactacacttaaactatatattccatgaaagaaaaatatgayacaaatgattgattaatgacttcaactttaattcctggcataattccaatccctaagagaggaagctattatcagtatgaaacatttcagtgtgcataag

SEQ ID NO: 35951 - DNA, 201 bp, Homo sapiens
tttctatctataagtacatagacaagaagtactacacttaaactatatattccatgaaagaaaaatatgatacaaatgattgattaatgacttcaactttmattcctggcataattccaatccctaagagaggaagctattatcagtatgaaacatttcagtgtgcataagaattatgaggaaaatatttaatgattttat

SEQ ID NO: 35952 - DNA, 201 bp, Homo sapiens
cctaatttatttatttacttatttatatttttcgagatggagtctcactctgtaacccatgctggagtgcaaagacacaatctcaattcactgcaacctcygcctcctgggttcaagcgattctcctgcctctgctttctaagtagctggaattacaggggcgcaccaccaggcccggctaattttttttgtatttttagt

SEQ ID NO: 35953 - DNA, 201 bp, Homo sapiens
tggcacaactgctggcattcaccttgcaagcttccagcttgcttgtctatgtttgcagttcgattttacaggctcctcttgttagaaaagaaaatgatttsggggctgcctttcattaaaaggaaaaaccttatcaaggactgctgtaccctcattatctgcctaaacgattttttctcaactcctatatcaatattaata

SEQ ID NO: 35954 - DNA, 201 bp, Homo sapiens
gatgaatctggggagaactgatatgtaatagtattaaatttttcaatccatgaatattatatatcctttgatttagtaagatcatacagtcttaccctagttttttttattttaagcatacagatcctgtattttactagatttataactaaatattttgtatttcatccatcaacgaaaaattcaatttgtttaatagac

SEQ ID NO: 35955 - DNA, 201 bp, Homo sapiens
aatcatgacctttcacccaaatctttttgcttcatcagtctcttttttgtctcatcattcagtgtcagatgatcccattacttttatttttttcttcacasattaattgaggctaataatatgccttgattagatatgcaatttctcctgatatcaaacaactcaatcaacgtttatgcctcttggtttgattttggagct

SEQ ID NO: 35956 - DNA, 201 bp, Homo sapiens
gtgctctgggaatcctttacctttttgttctctggtagtgttcttcatctgataggtatcctttgtccattcttggggagttttgctctactctccagagkgtcaatattcagccaaataatctagggagttgctgtggaaatttgtagagccctttcactccatagtttcttcttttctcactctgtttcctgcagattc

SEQ ID NO: 35957 - DNA, 201 bp, Homo sapiens
atgaggacgtaacacacatattttgaaagggtactactatgcacaccatagcacagcatagggataaacaaatatgttccatgtaaatggaaaccaaaagmaagcaggggggctatactaacattaactaaaattgaattttaagtcaaatctgtaaaaagaaacaaggaaggtcattatacaaaggagtcaattcacaaa

SEQ ID NO: 35958 - DNA, 201 bp, Homo sapiens
ctttctctttcccttcctttctttttcttctttctttctttctctttcccttcctttctttttctttctttctttctttctttctttctttctttctttcyttctttctttctttctttctttctctttccttctttctttcttccttccctccctcccttccctccctccctctgtcaccctccctccctccctccctcc

SEQ ID NO: 35959 - DNA, 201 bp, Homo sapiens
aagcagacatcaattttttttccttttcacattaattactcagatattagtctgtctttccattcaggcttttcctactctaaagcattctgtgttacagraacaagttagggagctttatgtgtattctggtttaaactgattttgctttagctgagacctttatgactgttaatatatatctgttttatatgattagac

SEQ ID NO: 35960 - DNA, 201 bp, Homo sapiens
tcccttcctttctttttcttctttctttctttctctttcccttcctttctttttctttctttctttctttctttctttctttctttctttctttctttctytctttctttctttctctttccttctttctttcttccttccctccctcccttccctccctccctctgtcaccctccctccctccctccctccctcccttcc

SEQ ID NO: 35961 - DNA, 201 bp, Homo sapiens
aatcatgctgttaagaaaaatattcatctgcagtttttatataaacacaaatttattcctcatggatacatatctaagactgggtttgttagataaatggtgtgtgtgtgtgtgtgtgtgtgtgtgtgtgtgtgtgttttattattattatactttaagttctgggatatatgtgcagaacgtgcaggtttgttacataag

SEQ ID NO: 35962 - DNA, 201 bp, Homo sapiens
gtaatctcaaaatggcttatataagtagttgtgaatcagactgtcttcttgtgttgcaatcaggatcatggcccaggctacagtgatcagaaggcttggcygggaaggaggatctgcttctaacattactgacacacatggctgttgtcaggaggcctcaggtccttaccacataggcctttccatgagttgataaatggc

SEQ ID NO: 35963 - DNA, 201 bp, Homo sapiens
gatatccaggaaaactttcgtttacactggcttccagaagggaaaaataaaggtctatcagtgttctagcgaaggatgaagaagaaatttaaaacatcaamgcttgtaccttacaaaaaatagtttcatgtcttttcctcaatattacatttaaatttattaaaatcaacaaaatatttgatgagattgtctacttatttt

SEQ ID NO: 35964 - DNA, 201 bp, Homo sapiens
aagggaaaaataaaggtctatcagtgttctagcgaaggatgaagaagaaatttaaaacatcaacgcttgtaccttacaaaaaatagtttcatgtcttttcytcaatattacatttaaatttattaaaatcaacaaaatatttgatgagattgtctacttattttaaattcgtcttgaaatatatttgtaactgttatcagt

SEQ ID NO: 35965 - DNA, 201 bp, Homo sapiens
atcatgctgttaagaaaaatattcatctgcagtttttatataaacacaaatttattcctcatggatacatatctaagactgggtttgttagataaatggtgtgtgtgtgtgtgtgtgtgtgtgtgtgtgtgtgtgttttattattattatactttaagttctgggatatatgtgcagaacgtgcaggtttgttacataagt

SEQ ID NO: 35966 - DNA, 201 bp, Homo sapiens
tgtgtgtgtgtgtgtgtgtgtgtgtgtgtgtgttttattattattatactttaagttctgggatatatgtgcagaacgtgcaggtttgttacataagtatrcgtgtgccatggtggtttgctgcacccatcaacccgtcatctaggttgtaagccttgcatgaattagctctttgtcctgatgctctctctcccctttccc

SEQ ID NO: 35967 - DNA, 201 bp, Homo sapiens
tgatggtttccagcttcgtccatgtccctgcaaaggacacgaactcattcaatttatggctgcatagtattccatggtgtatatgtgccacattttctttwtccagtctatcattgatgggcatttgggttggttccaaatctttgctactgcaaatggtgctgtgataaacatatgtgtgcatgtgcctttatagtagaa

SEQ ID NO: 35968 - DNA, 201 bp, Homo sapiens
ctgcatagtattccatggtgtatatgtgccacattttctttatccagtctatcattgatgggcatttgggttggttccaaatctttgctactgcaaatggkgctgtgataaacatatgtgtgcatgtgcctttatagtagaatgatttatattcctttgggtatatacccagtaatgggattgctgggtcaaatggtatct

SEQ ID NO: 35969 - DNA, 201 bp, Homo sapiens
tttgtttctttcttataaatttgtttaagttccttgtagattcttgatattagacctctgtcagatggatagattgcaaaaattttctcccattctgtagrttgcctattcactctgatgatagtttcttttgctgtgcagaagctctttagtttaattagatcccatttgtcaattttggcctttgttgccattgctttt

SEQ ID NO: 35970 - DNA, 201 bp, Homo sapiens
agttccttgtagattcttgatattagacctctgtcagatggatagattgcaaaaattttctcccattctgtagattgcctattcactctgatgatagtttsttttgctgtgcagaagctctttagtttaattagatcccatttgtcaattttggcctttgttgccattgcttttggtgttttagtcatgaagtctttgccc

SEQ ID NO: 35971 - DNA, 201 bp, Homo sapiens
gttccttgtagattcttgatattagacctctgtcagatggatagattgcaaaaattttctcccattctgtagattgcctattcactctgatgatagtttcytttgctgtgcagaagctctttagtttaattagatcccatttgtcaattttggcctttgttgccattgcttttggtgttttagtcatgaagtctttgccca

SEQ ID NO: 35972 - DNA, 201 bp, Homo sapiens
attgcttgtttttgtcaggtttgttgaagatcaaatggttgtagatgtgtggtgttatttctgaggcctctgttctgctccattggcctatatatctgttytggtacaagtaccatgttgttttggttactgtagtcttgtagtatagtttgaaatcaggtagcgtgatgcctcagctttgtgctttttgattaggattgt

SEQ ID NO: 35973 - DNA, 201 bp, Homo sapiens
tttgaatactccttatttctttctcttgcctgattgtctggtccaaaactcccaatactatgtccatcctagacagatcaacgagacagaaaattaacaargatattcccaatttgaactcaactctggaccaactggacctaatagacatctacagaactctccaccagaagtcaagtgttcttcttggcactacatagc

SEQ ID NO: 35974 - DNA, 201 bp, Homo sapiens
agacacaatgtaccagaatatctgggacacagttaaagcagtctttagaggaaaatttatcgcactaaatgcccacatcagaaagtgggaaagatctaaamttgacaccctaacacctcaattaaaagaaatagagcttgatggggatggcattgaatctataaattacctttggcagcatgccatccccatcaagctacc

SEQ ID NO: 35975 - DNA, 201 bp, Homo sapiens
ttacatttcttggattaaacccatttgatcatagtgaatgatctttttaatgtgctgtaggatttgttttcctagtatagtgttgaggggttttgtacctwtgttcatcaggggattttgcctgtagttttctttttgcgttgtgtccttgtctggttttggttccagagtaatgttgggccactagaatgagttagaaaa

SEQ ID NO: 35976 - DNA, 201 bp, Homo sapiens
gtcttggattttctttgatgggaaacattttattactgacttaatctgttgcctcatgattactctgttcagattttctatttcctctgaattaatcgtcktaggctgtgtgtctagaaatttatccatttcttctaggttatccaatttgttggcatataattgctaataacggtctctcattatactttgtattttttt

SEQ ID NO: 35977 - DNA, 201 bp, Homo sapiens
cgtaggctgtgtgtctagaaatttatccatttcttctaggttatccaatttgttggcatataattgctaataacggtctctcattatactttgtatttttktgatatcagttgtaatatcacccttttcatctccgatcttgtgtttctttaagccgtatctctcttttttagttattctggttaaagctttgtcaatttt

SEQ ID NO: 35978 - DNA, 201 bp, Homo sapiens
cttgtattttgatttgctctcacaacaaatcaagtgatgaaatgatgttttttagattctacaggaaaatgtgggccccctccacctattgacaatggggrcattacttcattcccgttgtcagtatatgctccagcttcatcagttgagtaccaatgccagaacttgtatcaacttgagggtaacaagcgaataacatgt

SEQ ID NO: 35979 - DNA, 201 bp, Homo sapiens
ttttatgtttactgttttttattttcagatccgtgtgtaatatcccgagaaattatggaaaattataacatagcattaaggtggacagccaaacagaagckttattcgagaacaggtgaatcagttgaatttgtgtgtaaacggggatatcgtctttcatcacgttctcacacattgcgaacaacatgttgggatgggaaa

SEQ ID NO: 35980 - DNA, 201 bp, Homo sapiens; identical to SEQ ID NO: 8439

SEQ ID NO: 35981 - DNA, 201 bp, Homo sapiens
ccaatggaacagaacagagccttcagaaataatgctacatatccacaaccatctgatctttgacaaacctgagaaaaacaagaaatgggaaaaggattccytatttaataaatggtgctgggaaaacaggctagccatatgtagaaagctgaaactggatcccttcgttacaccttatactaaaattaattcaagatggat

SEQ ID NO: 35982 - DNA, 201 bp, Homo sapiens
aaatggaaattgaactttctctttccttttctgcactgctccaatttggcatagcgcctggagtttttacatagcattttaagaccatctatttgctttaygatctatggagactggtatttttctaatatctgctgtgacagttaagagttttaagaggagtccttttggaggtaactgtaaaggttgtagcacttgatg

SEQ ID NO: 35983 - DNA, 201 bp, Homo sapiens; identical to SEQ ID NO: 8441

SEQ ID NO: 35984 - DNA, 201 bp, Homo sapiens
taaaaccataaaaaccctagaagaaaacctaggcaataccattcaggacataggcatgggcaaggacttcatgtctaaaataccaaaagcaatggcaacasaagccaaaactgacaaatgggatctaattaaactaaagagcttctgcacagcaaaagaaactaccatcagagtgaacaggcaacctacagaatgggagaa

SEQ ID NO: 35985 - DNA, 201 bp, Homo sapiens
gagattccttttctaattgtgtggtgcagtgaacaaggctggggtccatgctccattgtgttgcaacttttcttacttgttcaatgtgaatgttgtctttrttgcctgttaagtaggagtccctttactggtctttcattttctttcaggaggagttcatttatgaatagatgtttttttaggacattcttgggtggaaga

SEQ ID NO: 35986 - DNA, 201 bp, Homo sapiens
tgacaaagggctaatatccagaatctacaatgaactcaaacaaatttacaagaaaaaaacaaacaaccccatcaaaaagtgggtgaaggatatgaacagayacttctcaaaagaagacatttatgcagccaaaagacacatgaaaaaatgctcagcatcactggtcattagagaaatgcaaatcaaaaccacaatgagata

SEQ ID NO: 35987 - DNA, 201 bp, Homo sapiens; identical to SEQ ID NO: 8442

SEQ ID NO: 35988 - DNA, 201 bp, Homo sapiens
tcaaacaaatttacaagaaaaaaacaaacaaccccatcaaaaagtgggtgaaggatatgaacagacacttctcaaaagaagacatttatgcagccaaaagrcacatgaaaaaatgctcagcatcactggtcattagagaaatgcaaatcaaaaccacaatgagataccatctcacaccagttagaatggcgatcattaaaa

SEQ ID NO: 35989 - DNA, 201 bp, Homo sapiens; identical to SEQ ID NO: 8443

SEQ ID NO: 35990 - DNA, 201 bp, Homo sapiens
aaagacacatgtacacgtatgtttattgcggcactattcacaatagcaaagacttggaaccaacccaaatgtccaacaatgatagactggattaagaaaaygtggcacatatacaccatagaatactatgcagccataaaaaagaagagttcatgtcctttgtagggacatggatgaagctggaaaccatcattctcagca

SEQ ID NO: 35991 - DNA, 201 bp, Homo sapiens; identical to SEQ ID NO: 8404

SEQ ID NO: 35992 - DNA, 201 bp, Homo sapiens
aagacacatgtacacgtatgtttattgcggcactattcacaatagcaaagacttggaaccaacccaaatgtccaacaatgatagactggattaagaaaatktggcacatatacaccatagaatactatgcagccataaaaaagaagagttcatgtcctttgtagggacatggatgaagctggaaaccatcattctcagcaa

SEQ ID NO: 35993 - DNA, 201 bp, Homo sapiens
caaaaaaccaagcatcgcatgctctcactcataggtgggaattgaacaatgagtacacatggacacaggaaggggaacatcacacaccggggcctgttgtsgggtggggggaggggggagggatagcattaggagatatacctaatgttaaatgaagagttaatgggtgcagcacaccaccatggcacatgtatacatatg

SEQ ID NO: 35994 - DNA, 201 bp, Homo sapiens
aaaaaaccaagcatcgcatgctctcactcataggtgggaattgaacaatgagtacacatggacacaggaaggggaacatcacacaccggggcctgttgtgkggtggggggaggggggagggatagcattaggagatatacctaatgttaaatgaagagttaatgggtgcagcacaccaccatggcacatgtatacatatgt

SEQ ID NO: 35995 - DNA, 201 bp, Homo sapiens
aaaaaccaagcatcgcatgctctcactcataggtgggaattgaacaatgagtacacatggacacaggaaggggaacatcacacaccggggcctgttgtggrgtggggggaggggggagggatagcattaggagatatacctaatgttaaatgaagagttaatgggtgcagcacaccaccatggcacatgtatacatatgta

SEQ ID NO: 35996 - DNA, 201 bp, Homo sapiens
aagcatcgcatgctctcactcataggtgggaattgaacaatgagtacacatggacacaggaaggggaacatcacacaccggggcctgttgtggggtggggsgaggggggagggatagcattaggagatatacctaatgttaaatgaagagttaatgggtgcagcacaccaccatggcacatgtatacatatgtaactaacc

SEQ ID NO: 35997 - DNA, 201 bp, Homo sapiens
acagttattgatctttctatttattctattttaatcatataaattatttttcatcaaaaattctaattttaatatttttattttttattttttattataamattaattatatttttaatattttttagtggcacaaatacaattatgcccacctccacctcagattcccaattctcacaatatgacaaccacactgaatta

SEQ ID NO: 35998 - DNA, 201 bp, Homo sapiens
gggaatagcattgtatgtatcaactactttgggcaatatggccattttcatgatattgattcttcctatccatgaggatggaatatttttctatttatttkggccctctcttatttccctgagcagtggtttgtagttctccttgaagagttccttcgcatcccttgtaagttgtatttctacgtattttattttctttgt

SEQ ID NO: 35999 - DNA, 201 bp, Homo sapiens
aagatttgcggaacaaatacatatttttcctatttcagaaacagattgtctcagtttacctagctttgaaaatgccatacccatgggagagaagaaggatktgtataaggcgggtgagcaagtgacttacacttgtgcaacatattacaaaatggatggagccagtaatgtaacatgcattaatagcagatggacaggaag

SEQ ID NO: 36000 - DNA, 201 bp, Homo sapiens
ttttaatagatttagaagaatttaatgtaattaagacaaaatggctaatatattttctcaagttataagaaaaatgttgtacagtattcattgattctatrtatcgctattttagaatccattacatgtattgtatgtaacctatttttaaagatttgcggaacaaatacatatttttcctatttcagaaacagattgtct

SEQ ID NO: 36001 - DNA, 201 bp, Homo sapiens
gacacaaagcctaaccatatcaggtggcaagtatggacaaaaataatgtgaacaaaaaaatgtgtaatctcaattgctacggctaccaatatttcttcagkcttctaatatcatttctatcttgtatttttaatagatttagaagaatttaatgtaattaagacaaaatggctaatatattttctcaagttataagaaaaa

SEQ ID NO: 36002 - DNA, 201 bp, Homo sapiens
ttaaaatactttttgcatgattgaatctattctatttatgttaattttatttgttcatgatagagtcactttgtattctggcattaaaaaataatatctartgaaattaaacctatctgtattattctcatgctgccataaagaactgcccaatactggataatttatacatacaaaaaaaggtttaattggctcactgtt

SEQ ID NO: 36003 - DNA, 201 bp, Homo sapiens
aaccctttgattttcattcttcatttagaaaaaattccatgttcacaaccacctcagatagaacacggaaccattaattcatccaggtcttcacaagaaakttatgcacatgggactaaattgagttatacttgtgagggtggtttcaggatatctgaagaaaatgaaacaacatgctacatgggaaaatggagttctcca

SEQ ID NO: 36004 - DNA, 201 bp, Homo sapiens
aaagctagcagaagacaagaaataactaagatcagagcagacctggagatagagacatgaaaacccttcaaaaaatcaatgcacccaggagctggtttttwgaaaagattaacaaagtacactactagccatactaataaagaagaaaggacagaagaatcaaatagacacaataaaaatgataaagagggtatcaccact

SEQ ID NO: 36005 - DNA, 201 bp, Homo sapiens
aaagatggaagatggcagtcaataccactctgtgttggtcagtagtgtataatttgttttacataattctttcaaatgaggttaatattctcttgtgcttygtgtaaacaagagagaagttctttctctgtgtctattactttatcctgacaaaataaattaggacctaggcacattaatcaatcaccactctttcagttt

SEQ ID NO: 36006 - DNA, 201 bp, Homo sapiens
gagctcgagaccaggctggccaacatggtgaaaccctgtctctactagaaatacaaaagttgcccaggcatggtggcacatgcctgtaatcccagttactygggaggctgaggctggagaatcacttgaacctgggaggcagaggttgcagtgagccaagatcgtgccactgcactccatcctgggagacagattgagatt

SEQ ID NO: 36007 - DNA, 201 bp, Homo sapiens
tcctaccaaacatttaaagaatcaacactaatccttctcaaattctgtcaaaaatttaagagtgaactctcagttttattatatgaggtcaaaaatcatamtgacaccaaagccacacatggacactacaaaaaacaattataggtcaatattcttcatgaatatagaggcaaaaatgctcaacaaaatacttccaaagtg

SEQ ID NO: 36008 - DNA, 201 bp, Homo sapiens
catacaaaaacatcataattaatatgtgataatttatgaaacagttattgatctttctatttattctattttaatcatataaattatttttcatcaaaaaktctaattttaatatttttattttttattttttattataaaattaattatatttttaatattttttagtggcacaaatacaattatgcccacctccacctc

SEQ ID NO: 36009 - DNA, 201 bp, Homo sapiens
catggtgaaaccctgtctctactagaaatacaaaagttgcccaggcatggtggcacatgcctgtaatcccagttacttgggaggctgaggctggagaatcrcttgaacctgggaggcagaggttgcagtgagccaagatcgtgccactgcactccatcctgggagacagattgagattccgtctcaaaaaaaaaaaaaaag

SEQ ID NO: 36010 - DNA, 201 bp, Homo sapiens
ctgatacatttgattatagatatcaatttttatttaatgcatgtaattaagagtgtgtaattccattaaaacattctaaaggctcaaaataattaaaatcmatattacataaattatgcaaatttattaaacaaagaatatatgaaaaaactacaagaaagtctatgagaatacaagccaaaagttctattgtttaatgta

SEQ ID NO: 36011 - DNA, 201 bp, Homo sapiens
cttggtttattctctgttctccacttccaacctacttaattagaaaaataatatgcctatttattgagaagatctaaagtttatggaaggaacaggattgaaaaaaaaaaaaaaacatccaaagcatatgaagaatctattctcctctgtatttgccacacagaaccctacctgagcaggcacccccaatttgctcaatat

SEQ ID NO: 36012 - DNA, 201 bp, Homo sapiens
aaatcactagtgattatatttaatgcttatattggtcaagtgtcagtaccaaattgattattaactacatataattctacttctggctaatcagattccaytggcagaaaatttgtgagtgttttaatccaatcctgatacatttgattatagatatcaatttttatttaatgcatgtaattaagagtgtgtaattccatt

SEQ ID NO: 36013 - DNA, 201 bp, Homo sapiens
ttggtttattctctgttctccacttccaacctacttaattagaaaaataatatgcctatttattgagaagatctaaagtttatggaaggaacaggattgaaaaaaaaaaaaaaacatccaaagcatatgaagaatctattctcctctgtatttgccacacagaaccctacctgagcaggcacccccaatttgctcaatatt

SEQ ID NO: 36014 - DNA, 201 bp, Homo sapiens
tagtacgattacataaagctttaggtgaagtagagcatacactatgataggagaaaggaaaatcaagggattatagaatgctcccagatgcttctaaactyccccgtcagtcaaacaggacatgcttcattttcatattatgaaaaaatgagatatttctgatgtatcgcagtttaacaggagcttagctgtgagtttaca

SEQ ID NO: 36015 - DNA, 201 bp, Homo sapiens
tggtttattctctgttctccacttccaacctacttaattagaaaaataatatgcctatttattgagaagatctaaagtttatggaaggaacaggattgaaaaaaaaaaaaaaacatccaaagcatatgaagaatctattctcctctgtatttgccacacagaaccctacctgagcaggcacccccaatttgctcaatattt

SEQ ID NO: 36016 - DNA, 201 bp, Homo sapiens
gttctccacttccaacctacttaattagaaaaataatatgcctatttattgagaagatctaaagtttatggaaggaacaggattgaaaaaaaaaaaaaaacatccaaagcatatgaagaatctattctcctctgtatttgccacacagaaccctacctgagcaggcacccccaatttgctcaatattttgttgacttcaga

SEQ ID NO: 36017 - DNA, 201 bp, Homo sapiens
gctactgaaatccagatgggcaacagagcaagatcatcttgctcaaaaacaaaacacacacacacacacaaacatacacacacagacacacaaagacacamacatcagctggtctaaagagcccagcaaaaagctgactcaggaaataatgcaggttccacatcctggtgacttcatcccccttaccctgaccaattgaca

SEQ ID NO: 36018 - DNA, 201 bp, Homo sapiens
agtcccagctactcgggaggctgaggcagaagaacggcgtgaatcggggaggcagagcttgcaagtgagccaagatcatgccactgcactccagcctgggygacagagcaagactctgtcaaaaaaaaaaaaaaaaaaaaaaaagacagagtttttctatacatccttgaatgtcctatccctttgttggggaaagtcttc

SEQ ID NO: 36019 - DNA, 201 bp, Homo sapiens
actgtggtggcacgattgtggctcactgcaacctctggctcactgaaacctccacctcacgagctaaagcaattttcctgtctcagcctcccgagtagctrggattacaggcgtgtgccaccacagccagctaatttttatatttttagtagagacagggtttcaccatgtttgcctggctcgtcttaaactcctgacatg

SEQ ID NO: 36020 - DNA, 201 bp, Homo sapiens
cctgtaatctcagcactttgggaggccgaggtgggcggatcacttttgggaggccgaggtcaggagattgagaccatcctggctaacacggtgaaacaccrtttctactaaaaatacaaaaaaaaaaaacccaaaaaatagccgggcatggtggcgggcacctgtagttccagctactcagatggctgaggcaggagaatg

SEQ ID NO: 36021 - DNA, 201 bp, Homo sapiens
actctcaactgacaatggaattaagttgaaggaagtgaatatttttgttaacaacaggcccagtatgactcaacggtgatgatggtcctggaaaattaccaaaaaaaaaaaaaaaaacctctcaactttcattatggagggatgttacacagagccaaagagttcatctcaactgtgctctttgcccaccaaaaaatatat

SEQ ID NO: 36022 - DNA, 201 bp, Homo sapiens
ttccttagcacatatttgttttcacaatgagagatccatctgtttttcccaaatgtattactgcatttctattcttgcttctcttgaacactaattgattmacacacacacacacacacacacacacccctcaaagactctacatttataaaacatttttcttttataatttttttccatttctcagtcacaagtacaagt

SEQ ID NO: 36023 - DNA, 201 bp, Homo sapiens
taattgaagatacataaactgaactttaatgggtatatgaaaatatgatagagaagaatgaagtgacagaaaaaaagaaaaaaggaatacatttaggactyatttgaagttagtgtcaacatcaaacactgaagacatatttttacataaaatagtaaaattttaaaatagtaaagctttaaaacttgtatattaagtcac

SEQ ID NO: 36024 - DNA, 201 bp, Homo sapiens
tttttatgcactagaatcttgtgatatcccagtatttatgaatgccagaactaaaaatgacttcacatggtttaagctgaatgacacattggactatgaaygccatgatggttatgaaagcaatactggaagcaccactggttccatagtgtgtggttacaatggttggtctgatttacccatatgttatggtaagtactg

SEQ ID NO: 36025 - DNA, 201 bp, Homo sapiens
tttttaggccttccttgtaaatctccacctgagatttctcatggtgttgtagctcacatgtcagacagttatcagtatggagaagaagttacgtacaaatrttttgaaggttttggaattgatgggcctgcaattgcaaaatgcttaggagaaaaatggtctcaccctccatcatgcataagtatggtgcattgaatttta

SEQ ID NO: 36026 - DNA, 201 bp, Homo sapiens
gtataaacttaggagctgaatggacacagtggaagtatggtattgagaagaggaaatatataatgaataattaaaactttataaaattttatgtttgactaaatatacaacttatgagaaaggaatggtggtagtatagagaagaagtagaaaaatggcaggagatgagatgtgacaagtatgcagggcccaaaaattaaa

SEQ ID NO: 36027 - DNA, 201 bp, Homo sapiens
aatacttttgataaatatgaaatactttatcataagcgaaaaaagaaaactcgacattatcaataacctttaatgaagttttgttcatccaaacgtctccmtgaattgataacaaaatgtcagacacttaaaatcattgccatgatttcctatagtacgattacataaagctttaggtgaagtagagcatacactatgata

SEQ ID NO: 36028 - DNA, 201 bp, Homo sapiens
aagcaaaatacttttgataaatatgaaatactttatcataagcgaaaaaagaaaactcgacattatcaataacctttaatgaagttttgttcatccaaacrtctccctgaattgataacaaaatgtcagacacttaaaatcattgccatgatttcctatagtacgattacataaagctttaggtgaagtagagcatacact

SEQ ID NO: 36029 - DNA, 201 bp, Homo sapiens
aaaaacagaaataagcaaaatacttttgataaatatgaaatactttatcataagcgaaaaaagaaaactcgacattatcaataacctttaatgaagttttrttcatccaaacgtctccctgaattgataacaaaatgtcagacacttaaaatcattgccatgatttcctatagtacgattacataaagctttaggtgaagt

SEQ ID NO: 36030 - DNA, 201 bp, Homo sapiens
gagaaacctgtactttaggatgctcccccaaaagctaggatgatagatgcttagttcactcttatctttcctctctgagggagaagcagtcaaaatatatyggtctctgtttactttaggggattgcaggaggctttgaactggtttcttgatttctcataaagggaattgtttccagtatcgtcattgaatcagtgtgcc

SEQ ID NO: 36031 - DNA, 201 bp, Homo sapiens
ttttaaaaatactttctacctctttgttgaagtagttaatttgtttttgcattgctctcttggtctcagtgagtatctttatgaccattattttgaattcyttcttgagtaaaacacctatatccacttccctcaggtcaatttctggagactcatcttgttcttttgtttggagttatgatatcttgtttctttattttc

SEQ ID NO: 36032 - DNA, 201 bp, Homo sapiens
tacccaagaaagtagctataatacactaccatggacatcagtggatggacaatttggtagcaagaaaaaaaaaatcactaggcagagcaggccactaaagrggtgaacagagaaaaaaatgcccaaagccttcctaatgccattaatccctgaaataaacttcagcctaaaatccctacctaatggaagaagatgtaaaga

SEQ ID NO: 36033 - DNA, 201 bp, Homo sapiens
ttcattggcttttttcaatacttggtctataacttttgataatttgattgtgttatgtcttaaagtgactatctttcattaaacttatttgatttcctttsagatttctgggtgtgggtttctatttctttcccagttgttgaaagttttctgtcattatttttttgaatatattttctgtatcgttgtgtttctttctgt

SEQ ID NO: 36034 - DNA, 201 bp, Homo sapiens
actatgccaaaaatatttacagtggggaatatcacacaaattctggggagcctgtaaaaaaagatccctagttcaattccatttgtctatattccccatgaaaaaatccatcaataaatgcacccttgagggctttacctgtgtgcccccttggtacatgtttatttgtggcataggatcagaccctcctctgttagggca

SEQ ID NO: 36035 - DNA, 201 bp, Homo sapiens
cttcctgctttccaatgtctgaaaatgttattttcatctattttgttccatttccttatttgtggcaagaactctgttttacttgattattcttgcctggycttttacctttttaaattgtctgtactgattgttttctatttggtttcttctcatatttggatttgtttcaaaatttatactcatgctggattttgtctg

SEQ ID NO: 36036 - DNA, 201 bp, Homo sapiens
tttcatattgtgcttacttttactagtaagttttatactttaacatcttcatgttactaattagcatcctcttctttcaccttcaagaactccctttaacrtttcttgtaaggcaggaaagtgtccttatgctctctcagctttttttcaatctcagaaagcctttatcactcctttgtttttaagacagaatagtggaat

SEQ ID NO: 36037 - DNA, 201 bp, Homo sapiens
gtctgtagtaccagctgctcaggagatctgaggtgggaggaccacttgagcctgggaggcagaagttgcagtgagctgtgatcacgctactgaaatccagwtgggcaacagagcaagatcatcttgctcaaaaacaaaacacacacacacacacaaacatacacacacagacacacaaagacacaaacatcagctggtcta

SEQ ID NO: 36038 - DNA, 201 bp, Homo sapiens
caaaggctatgaaaattattttggcagattttctaagatcatcacaggatctcagatactccaattggctaaatgagatttggaattgccagaagatctamaataggcaagattaaaaagtcctaagaaataatactcattgtctattgagttctgacatgctgtagaattccaaatccattagacaaacagatttccaat

SEQ ID NO: 36039 - DNA, 201 bp, Homo sapiens
tgtgatcacgctactgaaatccagatgggcaacagagcaagatcatcttgctcaaaaacaaaacacacacacacacacaaacatacacacacagacacacaaagacacaaacatcagctggtctaaagagcccagcaaaaagctgactcaggaaataatgcaggttccacatcctggtgacttcatcccccttaccctgac

SEQ ID NO: 36040 - DNA, 201 bp, Homo sapiens
tgatctttttaatgtgctgtaggatttgttttcctagtatagtgttgaggggttttgtacctatgttcatcaggggattttgcctgtagttttctttttgygttgtgtccttgtctggttttggttccagagtaatgttgggccactagaatgagttagaaaaatgatctcctcatcaaatttttggagtcgttttagaag

SEQ ID NO: 36041 - DNA, 201 bp, Homo sapiens
tcacttgaatagtgtaggttttattccagtcttctcatattttatatctgtattttgctatccaattgtgggtttccttgcctcactagcttcaatatttytaccaatgtctgccagtctaggatatacagaaagcattgacaaccaatacaaaaactaatctgctatcaacatttcaatatgtttagagtccttaaagaa

SEQ ID NO: 36042 - DNA, 201 bp, Homo sapiens
gtgatcacgctactgaaatccagatgggcaacagagcaagatcatcttgctcaaaaacaaaacacacacacacacacaaacatacacacacagacacacaaagacacaaacatcagctggtctaaagagcccagcaaaaagctgactcaggaaataatgcaggttccacatcctggtgacttcatcccccttaccctgacc

SEQ ID NO: 36043 - DNA, 201 bp, Homo sapiens
acaaaatacctacttactactctcccataggattcttttctctcttaaagcttccaaaagtgataatttttcagtttgttccatatcagccaaaataagtkaatgtgctgcagggttggtgggccacaggccctctacatcagtggtatagctgagtggcatgaggtagtcagggactgagtcaggacgtaaatctcattg

SEQ ID NO: 36044 - DNA, 201 bp, Homo sapiens
acatacacacacagacacacaaagacacaaacatcagctggtctaaagagcccagcaaaaagctgactcaggaaataatgcaggttccacatcctggtgayttcatcccccttaccctgaccaattgacaacccaaattttctagcccgtcaccctccatgatccccttaaggtctcttgcacatagccccttctcagaac

SEQ ID NO: 36045 - DNA, 201 bp, Homo sapiens
aaatgtgggcatcttcagtatatggattatatttaaaggtgtgtgactgactgtatttataaaaagaagtccgagcacatagtcctgggtcattctaatawaaagagatgaaataagggaaaccaaaaaaggaaattgtatcttactcacctttatgttttaaaattaatgtttttctgtattttttttttcactatttta

SEQ ID NO: 36046 - DNA, 201 bp, Homo sapiens
tgttacagaaacaagttagggagctttatgtgtattctggtttaaactgattttgctttagctgagacctttatgactgttaatatatatctgttttatawgattagacttttacatcaaattctttactcctagatacaaaagcaatgtttttattgaagatatggatgcctagtgcataacatcaaaataatttaaact

SEQ ID NO: 36047 - DNA, 201 bp, Homo sapiens
ctacaaaggacatgaactcctcattttttatggctgcatagtattccatggtgtatatgtgccacattttcttaatccagtctatcattgttgaacatttrggttggttccaagtctttgctattgtgaataatgccgcaataaacatacatgtgcatgtaaccgacagtaatttctatcatcagttaacagaaacagtaa

SEQ ID NO: 36048 - DNA, 201 bp, Homo sapiens
ggttttgcaggcctgggccccactgctgtatgcagtctcaggagttggtggcttgcatcctagctgcaccagctgcagccatgtctaaaaggggccaacawacagcttgggccattgcttcagataatgaaagccctaagccttggcagcttccacatggtgttggtcctgtgggtacacagaatacaaaacctccaccta

SEQ ID NO: 36049 - DNA, 201 bp, Homo sapiens
gtgtgtgtgtgtgtgtgtatacgtatatatgtatatatatatatatatatatatatatatatatatatagagagagagagagagagagagagagagagagrgagagagagagagagagatggagtcttgctctgtcgtcggccaggctggagtgcagtggcatgatcttggctcactgcaacctccattttccgttttcaa

SEQ ID NO: 36050 - DNA, 201 bp, Homo sapiens
tgcatagtattccatggtgtatatgtgccacattttcttaatccagtctatcattgttgaacatttgggttggttccaagtctttgctattgtgaataatsccgcaataaacatacatgtgcatgtaaccgacagtaatttctatcatcagttaacagaaacagtaacttccactctttcaagttaagttctacataattt

SEQ ID NO: 36051 - DNA, 201 bp, Homo sapiens
atttctgaatctcagtatacatatgccttaaaagaaaaagcgaaatatcaatgcaaactaggatatgtaacagcagatggtgaaacatcaggatcaattasatgtgggaaagatggatggtcagctcaacccacgtgcattagtaagtaatttattatgtttgtattgattatccagatgatacacaaaagtttactaact

SEQ ID NO: 36052 - DNA, 201 bp, Homo sapiens
tataccttatggtcaaaatgggaagttttcaggcatcattttatttattcatttttccagcccaatatcctttctcttctttttctgcatcggcattattwgttgttgtatttttctgaatgtctcagttcagttttttgttttcagtttattttcagagtgggtaatttatattgctgtatgttcaagttcatggattta

SEQ ID NO: 36053 - DNA, 201 bp, Homo sapiens
gaatgtctgtattgatccccttacttgtaaaagatcgtgtcactggatatcaaatttggagttgacagttctttgaacacttgaaaaccgtgccacatggwtatagatgaaaaactcagcatcatttgaattgttgatcccctcgaggaaaagcatagtttttgtctagttgctttcaaggtatttttttctttttttaaa

SEQ ID NO: 36054 - DNA, 201 bp, Homo sapiens
gagcacataagtgattacacctgtcttatgtaacagaaatagggccaagaaaagagttgttcaagcaaagtgaccaaaatagatcttttctattatgaggrtttcttcttgaaaatcacaggagaaataaatatagggactttatgagaatatctatataatttatacatctattaattataaaaactaaagataagtaat

SEQ ID NO: 36055 - DNA, 201 bp, Homo sapiens
gagggatagcattaggagatatacctaatgttaaatgaagagttaatgggtgcagcacaccaccatggcacatgtatacatatgtaactaacctgcacgtwgtgcacatgtaccctaaaacttaaagtataataataataaaaaaagaattagagaagcaagagcaaacaaattcaaaagctagcagaagacaagaaataa

SEQ ID NO: 36056 - DNA, 201 bp, Homo sapiens
tttcttcccctccttattactatggagattcagtggaattcaattgctcagaatcatttacaatgattggacacagatcaattacgtgtattcatggagtmtggacccaacttccccagtgtgtgggtgagaatacccttcttaaatcaacatttaacaaagtttaatatttttattgtaacaacaataattgcaactata

SEQ ID NO: 36057 - DNA, 201 bp, Homo sapiens
atggaggactacgcagaaaactaaccttgttctgcatcatgccctagtgtcagcattttgcactgggctgtgcagttcaacattcaggacagtaggtggcrcggacaggtaagagccagctgcagcagaggcagatgagcctatgcttgtcactgtttatgggagactctctgttgccccaaggaatggactgatctgtga

SEQ ID NO: 36058 - DNA, 201 bp, Homo sapiens
ttttttttcccctttgagaatatgactacgatgtatgttgtatagggctatttggtttaggttctgggttctttcagtggtaaagactctgtttgagtacmttggttagagataacttttgtatgatggctttcttaattgctggttgtagtagttatgtactgggtgtatgacgaggcttactgcctcctgaagggctgg

SEQ ID NO: 36059 - DNA, 201 bp, Homo sapiens
tcaaaatatctgtctccatacctttaccatgagtttgtataggtttctctaagttaggtgggtttcttttgagcagcatgtggttggtttctgttttccawatttggtccacaaatctatatcttttaagtggaacatttaatctatttatgttaaaagttaatattgtcatgtgaggttttgttcttgtcattatgttag

SEQ ID NO: 36060 - DNA, 201 bp, Homo sapiens
tgatggatggaatcctaccaaacatttaaagaatcaacactaatccttctcaaattctgtcaaaaatttaagagtgaactctcagttttattatatgaggkcaaaaatcatactgacaccaaagccacacatggacactacaaaaaacaattataggtcaatattcttcatgaatatagaggcaaaaatgctcaacaaaat

SEQ ID NO: 36061 - DNA, 201 bp, Homo sapiens
catatgagtctgggtatcattttgatatgataattgatttcctttgggtagatacacagtagtgggattgctgggtgaaatggtagttctgtttttagttmtttgggaaatgtccattctgttttccatagaggttgtactaatttacattcccaccaacagcgtataagcattcttctttctcctcactgtcaccaacat

SEQ ID NO: 36062 - DNA, 201 bp, Homo sapiens
ttatgaagatttccctaccacactatctagatatttatgaaaattttctgggaacaattggttcaatttgtcttattttttgcaaaaccactcagtaatakgtgtgtgtgtgtgtgtgtgtgtgtatacgtatatatgtatatatatatatatatatatatatatatatatatatagagagagagagagagagagagagag

SEQ ID NO: 36063 - DNA, 201 bp, Homo sapiens
ctgatggcttggatccacacggtgagctgcagggagcccagaagactcctacctacactttctatgaggtcccacagggtcctagtcaacctttgtcaggytcttgcttctgtctttttccatgctttggcttctctccatggtttctctatgacgctcctgcaccctctcttaaatatttttcaagttatgatcatttac

SEQ ID NO: 36064 - DNA, 201 bp, Homo sapiens
actctgcaatgacagatattataccatcattattctcgggatcctccccagttctattataaatttaacttcttaagatatttccatggtgttttatgatrtgttcttttatttttaaaattttaatttctatgttttatatgtttagatggtccaaatgcagttttgttgcatggatatattgcatagtggtgaagtctg

SEQ ID NO: 36065 - DNA, 201 bp, Homo sapiens
tcaatttgtcttattttttgcaaaaccactcagtaatatgtgtgtgtgtgtgtgtgtgtgtgtatacgtatatatgtatatatatatatatatatatatakatatatatatatagagagagagagagagagagagagagagagagagagagagagagagagagatggagtcttgctctgtcgtcggccaggctggagtgca

SEQ ID NO: 36066 - DNA, 201 bp, Homo sapiens
tcatcaagaattataaacatgatgagaccagaaatcatttgaggttgtttagtttcagttaaataaagttatcattgactctgcaatgacagatattataycatcattattctcgggatcctccccagttctattataaatttaacttcttaagatatttccatggtgttttatgatgtgttcttttatttttaaaatttt

SEQ ID NO: 36067 - DNA, 201 bp, Homo sapiens
aatttgtcttattttttgcaaaaccactcagtaatatgtgtgtgtgtgtgtgtgtgtgtgtatacgtatatatgtatatatatatatatatatatatatakatatatatatagagagagagagagagagagagagagagagagagagagagagagagagagatggagtcttgctctgtcgtcggccaggctggagtgcagt

SEQ ID NO: 36068 - DNA, 201 bp, Homo sapiens
ttcttcaaaaaagaacacaaaattgtgaatatattgcttcagtagtctttccaatcaccagacatgaaatgaaaacctaaaggagagaaagttggagtggyggacatagcagtagaagctgatgtagaaaatgtctttctattgcaaattgtacaaagacttaggatcatttgaacacataactaggaatttgctagtata

SEQ ID NO: 36069 - DNA, 201 bp, Homo sapiens
tgtcttattttttgcaaaaccactcagtaatatgtgtgtgtgtgtgtgtgtgtgtgtatacgtatatatgtatatatatatatatatatatatatatatakatatatagagagagagagagagagagagagagagagagagagagagagagagagagatggagtcttgctctgtcgtcggccaggctggagtgcagtggca

SEQ ID NO: 36070 - DNA, 201 bp, Homo sapiens
atctcaaatgatcctcctgcctctcagtaatatatttgaagtaatatttaatatactcatgttaagtgaagtgaataaggtattcatgtatactgttttcrttttttaatgtctgtgcttaatatgaggtctagtttacaaaaaatgttagtcctcataaaaaagctaattttatactaaatttttattaattattctttt

SEQ ID NO: 36071 - DNA, 201 bp, Homo sapiens
ctgagtcattctatagtacaataaagtttgaccacaactttagagaaattggaaaatattaagtagaatcaaaagaactactcaaattattttaaacactkaggtcgaagaggatggaaaattaacgatgatttctctattgaagttaatgtcataaagtttgcttttacatcttttaggaacacggtgttatattattct

SEQ ID NO: 36072 - DNA, 201 bp, Homo sapiens
tcatacttatttatccaatgaaatatccaatgatattttgtatttcccaaagaataaaatgtcttctgataggtatctctaacatttcagcgacagaatayagggcttatattttgacataatagcattttgatgcaatgtgatcaggaataacttggttggtgaaatttataatgattaagtcataattttaccatgcta

SEQ ID NO: 36073 - DNA, 201 bp, Homo sapiens
actcagtaatatgtgtgtgtgtgtgtgtgtgtgtgtatacgtatatatgtatatatatatatatatatatatatatatatatatatagagagagagagagrgagagagagagagagagagagagagagagagagagatggagtcttgctctgtcgtcggccaggctggagtgcagtggcatgatcttggctcactgcaacc

SEQ ID NO: 36074 - DNA, 201 bp, Homo sapiens
gtaatatgtgtgtgtgtgtgtgtgtgtgtgtatacgtatatatgtatatatatatatatatatatatatatatatatatatagagagagagagagagagaragagagagagagagagagagagagagagagatggagtcttgctctgtcgtcggccaggctggagtgcagtggcatgatcttggctcactgcaacctccat

SEQ ID NO: 36075 - DNA, 201 bp, Homo sapiens
tttcatttatgaatctgagtgctgaggttttgagtgcatatatatttagaattgttatatcttcttgcttcctttatcattgtgtaatgaacttcttgtctttttttttcttgttgatttgaaatctttttttatatataaatataactataccaaatgctttttgtttctgttgttcaaaatatctgtctccataccttt

SEQ ID NO: 36076 - DNA, 201 bp, Homo sapiens
aatgaattcaaaataagactctgggaatttagttttatttgaatatgtgactctgtagcattactacctcattgtagtcatctgattttttcgtctctttwacttcttcactttgatacctacttaaaactcttccttagcacatatttgttttcacaatgagagatccatctgtttttcccaaatgtattactgcatttc

SEQ ID NO: 36077 - DNA, 201 bp, Homo sapiens
tctatgccaataactactatgtatctgtttgtatatgtctgtatgcatgtatgtatgtatctatatctatttctgttgattcatttatttaatctatctctctgtctattcatctacctgttcatctacctaatcatctatttatctattaatttattgttcatctatcttgaaaagttagtcatattgacacatacagtt

SEQ ID NO: 36078 - DNA, 201 bp, Homo sapiens
ctatgccaataactactatgtatctgtttgtatatgtctgtatgcatgtatgtatgtatctatatctatttctgttgattcatttatttaatctatctctctgtctattcatctacctgttcatctacctaatcatctatttatctattaatttattgttcatctatcttgaaaagttagtcatattgacacatacagttt

SEQ ID NO: 36079 - DNA, 201 bp, Homo sapiens
acacgctcccaacactaaagcagaagaaagaagtcaaaaccctgaataggccaaacacaagttctgaaattgtggtagtaattaatagcctgccaaccaawaatagcccaggaccagatggatttacagccaaattctaccagaggtactaagaggagttggtaccattcctttggaaactatttcaaacaatagaaaaag

SEQ ID NO: 36080 - DNA, 201 bp, Homo sapiens
gggaacaattggttcaatttgtcttattttttgcaaaaccactcagtaatatgtgtgtgtgtgtgtgtgtgtgtgtatacgtatatatgtatatatatatrtatatatatatatatatatatatatagagagagagagagagagagagagagagagagagagagagagagagagagatggagtcttgctctgtcgtcggcc

SEQ ID NO: 36081 - DNA, 201 bp, Homo sapiens
acaaactgttttcctgagcgatcatacattgtaccttcacatactcagtgtatgtgagatccagttgtttcgcaaccttgccagcctttgagataatgtgtttttttttccattaaattatccattctaatatgtgtgtgatggtattgcattccctagtgactaatgctgcttagcatcttctttgtacttatttaccat

SEQ ID NO: 36082 - DNA, 201 bp, Homo sapiens
tgaggctggagaatcacttgaacctgggaggcagaggttgcagtgagccaagatcgtgccactgcactccatcctgggagacagattgagattccgtctcaaaaaaaaaaaaaaagaaaagaaaaaaaaattcatggcaagccactctccttgcagtcatttacctacagtccagtgcccccatgccactggggctgaccc

SEQ ID NO: 36083 - DNA, 201 bp, Homo sapiens
ccataagttctatttgttttttaaaaaatatttttagtacatttttcattcatatcctgagttttttttctaatttctttgtgttgcttttcaactttctyttggactccatttagctactttaaaataaatattttaaattctttggtatttcaaagattttattttggttaggacttattgctgaagagttagtgtgat

SEQ ID NO: 36084 - DNA, 201 bp, Homo sapiens
tggtggctttgagattattaaactctttctctgctgcaaaccccactgtctcagtgtattgttctgttgctgtgcagcaggcatacaaatctgacaatctygtaactatttgtggcaagccaggtcgaggtcactctctttgagggcatttactcactgcctagtgccccctttccactgggacagacccagagacaaacc

SEQ ID NO: 36085 - DNA, 201 bp, Homo sapiens
gaaccctgaaaataggacaccaatatcttctggcttgtacagtttctgctgagaagtccactgttagtcttacgagatttccgttatagttgattagatgmttttctcttgctgattttataatttttcccgttcacattgactttagatagcctgatgactatatgtttgtagaagttcatctcgcaatgcatcttcctg

SEQ ID NO: 36086 - DNA, 201 bp, Homo sapiens
atacaaatctgacaatctcgtaactatttgtggcaagccaggtcgaggtcactctctttgagggcatttactcactgcctagtgccccctttccactgggrcagacccagagacaaaccctagcagcttacttagctctcatgaactaagggctgtcccttagttctcccaaagtaacccacaatgcaaccctgatgggct

SEQ ID NO: 36087 - DNA, 201 bp, Homo sapiens
tttttaatagatttagaagaatttaatgtaattaagacaaaatggctaatatattttctcaagttataagaaaaatgttgtacagtattcattgattctayatatcgctattttagaatccattacatgtattgtatgtaacctatttttaaagatttgcggaacaaatacatatttttcctatttcagaaacagattgtc

SEQ ID NO: 36088 - DNA, 201 bp, Homo sapiens
atttcagaaacagattgtctcagtttacctagctttgaaaatgccatacccatgggagagaagaaggatgtgtataaggcgggtgagcaagtgacttacayttgtgcaacatattacaaaatggatggagccagtaatgtaacatgcattaatagcagatggacaggaaggccaacatgcagaggtactttggtgaatttt

SEQ ID NO: 36089 - DNA, 201 bp, Homo sapiens
ggtgaattcctaaagtggatttctagtggtgatgaacttccttagtattagcttgtttgggaaagactttatatattcttcatttatgaagtttagtttakcaaaatacaaaatatatctctaatatatgttttttcaataaatatgaactaatctttctttaagaaccctgaaaataggacaccaatatcttctggcttg

SEQ ID NO: 36090 - DNA, 201 bp, Homo sapiens
ctgatcttattcacactgactctcccagtaatccagtaagggcagctgctcagattgcagttcccacctctgacctgggatggaatataaacactggagayagatctaaccttgaacactatcaaaactgcattttgatcagcctctgcaagggagtgcccaagcaaaggagcctcaataaggtccaggatggtcaagcag

SEQ ID NO: 36091 - DNA, 201 bp, Homo sapiens
attaattcttttaataaatccacttattttaatcaaaagtagagtgctaatttatgtaaataaactattataaaaaacatatagcattttctgtgttcaakgttcattttgagtacacttcgtacgatacacacactctgaaaacagacataaacagggccagaaaagttcagtagcttattaagtcattggtctatcatc

SEQ ID NO: 36092 - DNA, 201 bp, Homo sapiens
catctatggtagaaccacctgggcccccaaaagccaataaaaacggacatcccattgcaggtcccaaccagtgtgcttactgcaacaggggggacactgartggaaaatttctcatgccctacaaagcctgatgttaaacagtcagccttctgcccaccaaatgcctgggatagctggggagcttgagagagatactaaag

SEQ ID NO: 36093 - DNA, 201 bp, Homo sapiens
atggtgactactcacctttaaggattaaacacagaactggagatgaaatcacgtaccagtgtagaaatggtttttatcctgcaacccggggaaatacagcmaaatgcacaagtactggctggatacctgctccgagatgtacctgtaagttccattcatatcttgacccatttcttaattctgaaatttcttttaaacaca

SEQ ID NO: 36094 - DNA, 201 bp, Homo sapiens
actgatattgagtttttatttcatatttcttggtcattttcatgtcttcttttgcaaaatatctcttcatatcctttgtccactttttcatgggattattatttttttttcttgttgtgttgtttcagttctttgcagattctggatattagccctttttcagattcatagtttgcaaatattttcttccattctgaggtt

SEQ ID NO: 36095 - DNA, 201 bp, Homo sapiens
gatccaaaaaatgagacttctagcaaagattatttgccttatgttatgggctatttgtgtagcagaaggtaagattaaaagagactcttttctgaaaactrtattatgaaacatttgctaatgatgcttttcacaggagtaataaaaatttgatttagaaaatgtgcttaagtattctgtaacttgacaattgagtggctt

SEQ ID NO: 36096 - DNA, 201 bp, Homo sapiens
aaaataatggcctttagttttatacatgttgcttctgaaggcatgattttattctttttttttctttttattttttgttttggctgagtagtattctatgrcatatatctataccacatattctttatccaatcatctgttggtggacaattagtttgattccatattattgctactgtgagtagtgaggctataaacata

SEQ ID NO: 36097 - DNA, 201 bp, Homo sapiens
caggatacctagaatttgcctttccatgtgaacttgaaaatttatcttggtttgttttctttatttgtaatatattaattatgtgttttttatattttttytaacttaaaatatattagaaatgctattttgggttctttttccttgattacattaaacaaaaataccaattttaattaatttcttagtgcatatatcttc

SEQ ID NO: 36098 - DNA, 201 bp, Homo sapiens
tccagttaaatttgactcattcctgctgttgtaaacacctatcataggacaggagaaaatggtgaaaacacaagcacaggtctacttatccagagattttwttctaatataagacagtggaaaactaaaaagagataagccaaatatccaagtaataaaaatatttaaaatatattttatgtatcactgtgtacagagaaa

SEQ ID NO: 36099 - DNA, 201 bp, Homo sapiens
attagtaagtaatttattatgtttgtattgattatccagatgatacacaaaagtttactaactttagtctttttgtgggggctgatataatttcatttgaraagataagaaaaaaaaacctgcaggaacaaagcagacatcaattttttttccttttcacattaattactcagatattagtctgtctttccattcaggctt

SEQ ID NO: 36100 - DNA, 201 bp, Homo sapiens
gtgacaggagatgggaaggaaaatgagcagtaacgttggaaaatggtagaagctgatggattctgttttgaagtatgagacatggtcatctgagattgaayagtgtgtgggcgaaggaggaggaagagtactaggtagaatagaaaagttttgaaatagtcacagctgagaaagagaatgagtacattgtagatgaaaggc

SEQ ID NO: 36101 - DNA, 201 bp, Homo sapiens
agcccagcaaaaagctgactcaggaaataatgcaggttccacatcctggtgacttcatcccccttaccctgaccaattgacaacccaaattttctagcccstcaccctccatgatccccttaaggtctcttgcacatagccccttctcagaacagatctggggcttgagaatcctcccaattccttgtttggtgcccttgt

SEQ ID NO: 36102 - DNA, 201 bp, Homo sapiens
ttaaaagaaaaaagatggaagacaccagagcagatacagcaaaaggggagctgcaaaggctgaacacatgacttacatagttgccctgagaaaatgcgagrggaaaggactcacagctactgtggaggtattgtgctttggtggcaacaggactgcttacaaccttgtgacaggtggcaacaggactgcttacaactttgt

SEQ ID NO: 36103 - DNA, 201 bp, Homo sapiens
agccgggcattatggcacaggtctgtagtaccagctgctcaggagatctgaggtgggaggaccacttgagcctgggaggcagaagttgcagtgagctgtgrtcacgctactgaaatccagatgggcaacagagcaagatcatcttgctcaaaaacaaaacacacacacacacacaaacatacacacacagacacacaaaga

SEQ ID NO: 36104 - DNA, 201 bp, Homo sapiens
ttagccgggcattatggcacaggtctgtagtaccagctgctcaggagatctgaggtgggaggaccacttgagcctgggaggcagaagttgcagtgagctgwgatcacgctactgaaatccagatgggcaacagagcaagatcatcttgctcaaaaacaaaacacacacacacacacaaacatacacacacagacacacaaa

SEQ ID NO: 36105 - DNA, 201 bp, Homo sapiens
tatgccaataactactatgtatctgtttgtatatgtctgtatgcatgtatgtatgtatctatatctatttctgttgattcatttatttaatctatctctctgtctattcatctacctgttcatctacctaatcatctatttatctattaatttattgttcatctatcttgaaaagttagtcatattgacacatacagtttc

SEQ ID NO: 36106 - DNA, 201 bp, Homo sapiens
catcctaatgacaaaatattctgcccattttcccacagactccaaaagggactgccaggcatatatcaatatatctggtggcagagccttctaggcatcaygagtcctagctatggagtatacactcactgggacatgatcagaaacttattggcaaccacagaaataattgcaaaagaggctgctaagaacattgaggct

SEQ ID NO: 36107 - DNA, 201 bp, Homo sapiens
atagataaacttaagaagtgcaaatcatcaaatttaattatacttgaggaacatttaaaaaacaagaaggaattcgatcataattctaacataaggtacakatgtagaggaaaagaaggatggatacacacagtctgcataaatggaagatgggatccagaagtgaactgctcaagtaagctcttattttgttttcagaaa

SEQ ID NO: 36108 - DNA, 201 bp, Homo sapiens
atgccaataactactatgtatctgtttgtatatgtctgtatgcatgtatgtatgtatctatatctatttctgttgattcatttatttaatctatctctctgtctattcatctacctgttcatctacctaatcatctatttatctattaatttattgttcatctatcttgaaaagttagtcatattgacacatacagtttca

SEQ ID NO: 36109 - DNA, 201 bp, Homo sapiens
aagccctttaaaaattttacatgggagatcattcttccgttaccttctcagactaaggaatgccaataacatacacataaataaattagatattatcaaayatacacaatctttaggttgtactttaactactattcacgagtttgtggttccagcagattgtggtatccaactgacattctctttcatcccatccaaccc

SEQ ID NO: 36110 - DNA, 201 bp, Homo sapiens
gatttgttttcctagtatagtgttgaggggttttgtacctatgttcatcaggggattttgcctgtagttttctttttgcgttgtgtccttgtctggttttkgttccagagtaatgttgggccactagaatgagttagaaaaatgatctcctcatcaaatttttggagtcgttttagaagaattggtattagtcctttctaa

SEQ ID NO: 36111 - DNA, 201 bp, Homo sapiens
gggttggacttcttatctctgagccactggcaccacttgtgatcttctccaggaggcagaagagttcactttgggttaacctagcactgtacacaccccayactgtgtatgctatttgttggaacagaagtggagctactgacttacctctagaagactgaataggtatcaggtcatcctcctggataatcctagtgttac

SEQ ID NO: 36112 - DNA, 201 bp, Homo sapiens
acaaggaatgtcaaaaggcctttctaaccattaagtaaaaattactaatggatctggctactgagaccccctgaactaagaaagccatttgatttgttcawacatgagagagaagggatgggtttaggagtagtaacccaagacttggggaatatcatgaggcctgtagcctacttttcaaaacagctggacattgttatg

SEQ ID NO: 36113 - DNA, 201 bp, Homo sapiens
catcaaggcttcaaaaactcactaaccgtccgggggaaatacatgctaaggagttttgggacctccaattgaaaaatgagactttgcttatatatgttgayggcatattagaagccagcacaactatggcaaattgaccagaatattatactggctttacatttttttttttgtctggatggggatccaaagtatccaaga

SEQ ID NO: 36114 - DNA, 201 bp, Homo sapiens
cacaatgggggtacagggattgggtaaatgcttccattccaaaagggaggaaatggctgaaacaaagtggctatatgcttgatggaagtctgaaatttaayagggcagtcattaaaccttaaatttccaagattatctcctttgactccatgtctcacattcaggtcatgctgatgcaagagatgggctcccacagccttg

SEQ ID NO: 36115 - DNA, 201 bp, Homo sapiens
tcctctgcaacctagttgtaggttcccaaacctcaattcttgacttgtgtgcacccacaggcccaagactacatgtaatccaccaaggcttggggtttcamcctttgaggcaatggaccaagctgtttgttggccccttttagccacagctggagctgaagcagctgggatacagtcctgaggctgcatagagcagcaggg

SEQ ID NO: 36116 - DNA, 201 bp, Homo sapiens
aaacaagttcctcacctcatcttcatctgtgaccaccccatcctggacttcattgtccatatcactgtgagtattttggtcaaagccattcaacaagcctytaggaagtgccaaactttcccacatcttgtcttctgagccgtccaactccctaggaagttccaaacattttaacattctcctgtcttcttctgacccctc

SEQ ID NO: 36117 - DNA, 201 bp, Homo sapiens
taacattctcctgtcttcttctgacccctccaaatggttctaacccctgcctgttatccagttccaaagctgcttccacatttttggttatctttacagcagcaccctactctctgcagtaccaatttactgtattagtctgttatcatgctgctataaagaactacccaagactgcataatttataaaggaaagaggtgt

SEQ ID NO: 36118 - DNA, 201 bp, Homo sapiens
tgtggaaggggcaagggagttccatgactcttctttgtaaaaagactaatccaatgtattagggtggaatcctcatgacctaatcacctaaaaagtccttwcttcctgatactatcaccatagtgatgaggacgtaacacacatattttgaaagggtactactatgcacaccatagcacagcatagggataaacaaatatg

SEQ ID NO: 36119 - DNA, 201 bp, Homo sapiens
gagcaaatttatgtttctcatttactttatttatttatcattgttatggtccttaggaaaatgttattttccttatttggaaaatggatataatcaaaatyatggaagaaagtttgtacagggtaaatctatagacgttgcctgccatcctggctacgctcttccaaaagcgcagaccacagttacatgtatggagaatgg

SEQ ID NO: 36120 - DNA, 201 bp, Homo sapiens
acaggaaggagaagtgcaaagcaaagacagaaaagctccttataaaaccatcagatctcaggagaactcacgcagtatcatgagaacagcagcagaggaawaatcgccctcatgattcaattttctcccaccaggtcccatccacaacacgtgaggattatggcaattgcaattcacgatgagatttgggtggggacacag

SEQ ID NO: 36121 - DNA, 201 bp, Homo sapiens
ggccaacatgcagaggtactttggtgaattttcaaaatttatttatataatgtgtgggcccagcccagtggctggcgcctgtaatcccagcactttgggasgccgaggtgggcggatcacttgaggtcaggagttcgagaccagcctggccaacatggtgaaaacccgtctctactaaaaatacaaaaaaatagtggggca

SEQ ID NO: 36122 - DNA, 201 bp, Homo sapiens
gttttattttaatttgaagaattcctttagttaatctttaggcataggtctactggagacaaattcccttggtatccctttctctgagaatgtctgtattkatccccttacttgtaaaagatcgtgtcactggatatcaaatttggagttgacagttctttgaacacttgaaaaccgtgccacatggttatagatgaaaaa

SEQ ID NO: 36123 - DNA, 201 bp, Homo sapiens
ccaacatgcagaggtactttggtgaattttcaaaatttatttatataatgtgtgggcccagcccagtggctggcgcctgtaatcccagcactttgggaggycgaggtgggcggatcacttgaggtcaggagttcgagaccagcctggccaacatggtgaaaacccgtctctactaaaaatacaaaaaaatagtggggcatg

SEQ ID NO: 36124 - DNA, 201 bp, Homo sapiens
tttattttaatttgaagaattcctttagttaatctttaggcataggtctactggagacaaattcccttggtatccctttctctgagaatgtctgtattgayccccttacttgtaaaagatcgtgtcactggatatcaaatttggagttgacagttctttgaacacttgaaaaccgtgccacatggttatagatgaaaaact

SEQ ID NO: 36125 - DNA, 201 bp, Homo sapiens
tttgcatactacttaatgttttatgtttactgttttttattttcagatccgtgtgtaatatcccgagaaattatggaaaattataacatagcattaaggtkgacagccaaacagaagctttattcgagaacaggtgaatcagttgaatttgtgtgtaaacggggatatcgtctttcatcacgttctcacacattgcgaaca

SEQ ID NO: 36126 - DNA, 201 bp, Homo sapiens
tgggcccccaaaagccaataaaaacggacatcccattgcaggtcccaaccagtgtgcttactgcaacaggggggacactgagtggaaaatttctcatgccytacaaagcctgatgttaaacagtcagccttctgcccaccaaatgcctgggatagctggggagcttgagagagatactaaagaaaaagaccagaaatggta

SEQ ID NO: 36127 - DNA, 201 bp, Homo sapiens; identical to SEQ ID NO: 8425

SEQ ID NO: 36128 - DNA, 201 bp, Homo sapiens
ctgataggcggagcatctagtttcaacttccttttgcagcaagttctttcctgcactaatcacaattcttggaagaggagaactggacgttgtgaacagasttagctggtaaatgtcctcttaaaagatccaaaaaatgagacttctagcaaagattatttgccttatgttatgggctatttgtgtagcagaaggtaagat

SEQ ID NO: 36129 - DNA, 201 bp, Homo sapiens
cttgtgacagatatcatcaaacacatacatgataccacacagtatggcaggcatgccacccttcaattgatccaggactatgtctttgggacacacttaargaagactatccaaaaaataatttaaaaatacctacttggtgcccagaacaatcttaagactggtcctccacccccagtaccaaggattcaagcaagaggt

SEQ ID NO: 36130 - DNA, 201 bp, Homo sapiens
tggaattcaattgctcagaatcatttacaatgattggacacagatcaattacgtgtattcatggagtatggacccaacttccccagtgtgtgggtgagaawacccttcttaaatcaacatttaacaaagtttaatatttttattgtaacaacaataattgcaactatatttttgaaatttacagatatgcctcaacatttc

SEQ ID NO: 36131 - DNA, 201 bp, Homo sapiens
attcatggagtatggacccaacttccccagtgtgtgggtgagaatacccttcttaaatcaacatttaacaaagtttaatatttttattgtaacaacaatarttgcaactatatttttgaaatttacagatatgcctcaacatttccagtcttcaatatgagaccaatcttttgcatattgcttataattcaatatgtgtct

SEQ ID NO: 36132 - DNA, 201 bp, Homo sapiens
tgaaatatccaatgatattttgtatttcccaaagaataaaatgtcttctgataggtatctctaacatttcagcgacagaatacagggcttatattttgacrtaatagcattttgatgcaatgtgatcaggaataacttggttggtgaaatttataatgattaagtcataattttaccatgctaatactatttactttataa

SEQ ID NO: 36133 - DNA, 201 bp, Homo sapiens
atcaaagtgataaatatttctaatttagttattatattctgttcagaaattgtgatggattaggtaaggtacaggccaatgacaagtgtaacaaaaatggwttttaatagagtagaagagacagaccctacatagaatctgccaataaaaataatgagctagacattcaatacagactgtagacataactctttcaagatt

SEQ ID NO: 36134 - DNA, 201 bp, Homo sapiens
ttaattatatttttaatattttttagtggcacaaatacaattatgcccacctccacctcagattcccaattctcacaatatgacaaccacactgaattatygggatggagaaaaagtatctgttctttgccaagaaaattatctaattcaggaaggagaagaaattacatgcaaagatggaagatggcagtcaataccact

SEQ ID NO: 36135 - DNA, 201 bp, Homo sapiens
gggttaaaatatgttgatttaaacaaaatgaagtcatttttattaatagatttttcaaatgcaaataaaatgactgatggtgcttaaaattcaattcttcytgtgaacagaacacaagtaatagggtatattattttccagaaagattcgaccaaattgagagttggaacctgaaaaacaatactttttaagcattacaac

SEQ ID NO: 36136 - DNA, 201 bp, Homo sapiens
tgttgtgtagaaagatatactttcacttttgacaactattttacgacaacaaattctcaccagtcatagattatttttgtacggtacctatttattagtakatctaatcaataaagctttttcttcttagaatgggaaatactcagattgtttattagatgacattagaaatgacattctaaattttttatgcactagaat

SEQ ID NO: 36137 - DNA, 201 bp, Homo sapiens
ggaaccacttcttttttttctattcagacacctcctgtgtgaatccgcccacagtacaaaatgcttatatagtgtcgagacagatgagtaaatatccatcyggtgagagagtacgttatcaatgtaggagcccttatgaaatgtttggggatgaagaagtgatgtgtttaaatggaaactggacggaaccacctcaatgca

SEQ ID NO: 36138 - DNA, 201 bp, Homo sapiens
aagaaaaatgtttttaaaatatattttggggcttaagcaatgaaaaaaaatgttgtgtagaaagatatactttcacttttgacaactattttacgacaacraattctcaccagtcatagattatttttgtacggtacctatttattagtatatctaatcaataaagctttttcttcttagaatgggaaatactcagattgt

SEQ ID NO: 36139 - DNA, 201 bp, Homo sapiens
acaggtctgtgcatttttctttctggagagccttcatacaaatttacgcatcatgtgatccacaagacataatttcatcttcattaacaaagaccttcttkttacatatctcagtcatctgagttctatcatttgttttgacctagaaaccctaatggaatgtgtaattatactaagaagagaatataattcagtgataaa

SEQ ID NO: 36140 - DNA, 201 bp, Homo sapiens
taagaaaaatgtttttaaaatatattttggggcttaagcaatgaaaaaaaatgttgtgtagaaagatatactttcacttttgacaactattttacgacaayaaattctcaccagtcatagattatttttgtacggtacctatttattagtatatctaatcaataaagctttttcttcttagaatgggaaatactcagattg

SEQ ID NO: 36141 - DNA, 201 bp, Homo sapiens
tttggatgtttatgcaatcttatttaaatattgtaaaaataattgtaatatactattttgagcaaatttatgtttctcatttactttatttatttatcatygttatggtccttaggaaaatgttattttccttatttggaaaatggatataatcaaaatcatggaagaaagtttgtacagggtaaatctatagacgttgcc

SEQ ID NO: 36142 - DNA, 201 bp, Homo sapiens
ctcaaaaacaaaacacacacacacacacaaacatacacacacagacacacaaagacacaaacatcagctggtctaaagagcccagcaaaaagctgactcakgaaataatgcaggttccacatcctggtgacttcatcccccttaccctgaccaattgacaacccaaattttctagcccgtcaccctccatgatccccttaa

SEQ ID NO: 36143 - DNA, 201 bp, Homo sapiens
ttttctattatgagggtttcttcttgaaaatcacaggagaaataaatatagggactttatgagaatatctatataatttatacatctattaattataaaarctaaagataagtaatattgaatattgatatttctttttgtgcaaacctttgttagtaactttagttcgtcttcagttatacattatttttggatgtttat

SEQ ID NO: 36144 - DNA, 201 bp, Homo sapiens
ctgatatgtaatagtattaaatttttcaatccatgaatattatatatcctttgatttagtaagatcatacagtcttaccctagttttttttattttaagcmtacagatcctgtattttactagatttataactaaatattttgtatttcatccatcaacgaaaaattcaatttgtttaatagacagaatttattaatgcta

SEQ ID NO: 36145 - DNA, 201 bp, Homo sapiens
tgagttctatcatttgttttgacctagaaaccctaatggaatgtgtaattatactaagaagagaatataattcagtgataaaaatttatctctaatatgaktgtttattacagtaaaatttctttatactttttttaaaatttttattgcaagtgaaaccttgtgattatccagacattaaacatggaggtctatatcatg

SEQ ID NO: 36146 - DNA, 201 bp, Homo sapiens
ggaatcaatttgtaaaagggataaaaacagatgtaaatgtgaccaaattagagaatagctaaatagctcgagcctgtggtaatgttatatgtttttaattrtgcctcctttttattccttttggaaagaaatctcggtggacaattttattttatgaccttctgggaaataccataataagatggatactcatacttgctt

SEQ ID NO: 36147 - DNA, 201 bp, Homo sapiens
attcttccacgtgtttgtcctttaaccagtatcatgagatcctttactcactgtagctttttttaagtcttaaaatttggtaatgtgagtttttcaacttytcttatcttttgaagaattgtttagctgttttagcccctttacctttccatatgactttagaatcagcatgttcgtatgtgcaaaacattgtgcttggtt

SEQ ID NO: 36148 - DNA, 201 bp, Homo sapiens
cctagtgttggaggtaatttccaaaaatcatcacatgtagcaaaataccactcaagtcaatagagtattttatttctgggatgctcctttacccctttttwatgttttttctatctctacaatcaaatttcttttctttctatctataagtacatagacaagaagtactacacttaaactatatattccatgaaagaaaaa

SEQ ID NO: 36149 - DNA, 201 bp, Homo sapiens
attattttaaacactgaggtcgaagaggatggaaaattaacgatgatttctctattgaagttaatgtcataaagtttgcttttacatcttttaggaacacrgtgttatattattctagggcataaatgaaaatgtatttaattatctcaagctttatatttcttaattatttaaaaatactagtttgttactacaaaaata

SEQ ID NO: 36150 - DNA, 201 bp, Homo sapiens
ttaaatgaagtataacttctctgatagagtataattatgggagagtgggaaaacagtatgcacatatataagtattcacccaacaagtcttcacgacattytattttgtgcagagtatcatgggagttcaatgtgtcaggaacaataggaattgtaaccaatttatattgtatggtaactgttttgacaggttttataaaa

SEQ ID NO: 36151 - DNA, 201 bp, Homo sapiens
aacatgcagaggtactttggtgaattttcaaaatttatttatataatgtgtgggcccagcccagtggctggcgcctgtaatcccagcactttgggaggccraggtgggcggatcacttgaggtcaggagttcgagaccagcctggccaacatggtgaaaacccgtctctactaaaaatacaaaaaaatagtggggcatggt

SEQ ID NO: 36152 - DNA, 201 bp, Homo sapiens
aaaccatctgacaagttgttatttctgatttttgatccaattttaagatagcacatgatttatgagtcaattttattttgaatatcttttttaaattttcrtttctatattttctatagttcctttaatgttcctaaaatagctgttataaagacctaacactaattctaacatctgaatctgagtgtctagttctactga

SEQ ID NO: 36153 - DNA, 201 bp, Homo sapiens
gaggtactttggtgaattttcaaaatttatttatataatgtgtgggcccagcccagtggctggcgcctgtaatcccagcactttgggaggccgaggtgggmggatcacttgaggtcaggagttcgagaccagcctggccaacatggtgaaaacccgtctctactaaaaatacaaaaaaatagtggggcatggtgacatgca

SEQ ID NO: 36154 - DNA, 201 bp, Homo sapiens
ggaatataggcgtgagccaccgcacccggccccagtggattttaattgcaagcctgccagagtgagtttcaatttgaggtagtccaagtttacacagtacratagacttacccattgccaaggttacttggcttgaaggaaaatacagaataaggataaaggcagtatgcacaagaacagcttgatggagatttcaggcac

SEQ ID NO: 36155 - DNA, 201 bp, Homo sapiens
aaatataattatagatagatggcactaagataatagtaagttaaaatgacatatcatcatatatagcagataattaaaaaattataaaagaatgaaacatrtatgtatttattttaaatttgtttaaacctaactctttagtctacctggcatttgtgtgcatgtgtctgtgcaaataaagtaaggattcaaatttatccc

SEQ ID NO: 36156 - DNA, 201 bp, Homo sapiens
aggtactttggtgaattttcaaaatttatttatataatgtgtgggcccagcccagtggctggcgcctgtaatcccagcactttgggaggccgaggtgggcrgatcacttgaggtcaggagttcgagaccagcctggccaacatggtgaaaacccgtctctactaaaaatacaaaaaaatagtggggcatggtgacatgcat

SEQ ID NO: 36157 - DNA, 201 bp, Homo sapiens
tgaaggtgtcctaagtgataagattaatctgaaataatgaatcccaaggcactcaaattttttgtgaaatagccagacaataaatattttagacttcgtgwgccataatgtctcgctactcagctcttctattgtaacataaaaggagtcatagacaatatataactatatgagcatagctgtgttctactaaaattttat

SEQ ID NO: 36158 - DNA, 201 bp, Homo sapiens
tttggtgaattttcaaaatttatttatataatgtgtgggcccagcccagtggctggcgcctgtaatcccagcactttgggaggccgaggtgggcggatcamttgaggtcaggagttcgagaccagcctggccaacatggtgaaaacccgtctctactaaaaatacaaaaaaatagtggggcatggtgacatgcatctgaag

SEQ ID NO: 36159 - DNA, 201 bp, Homo sapiens
catgccactcattatgtggacattctaaaatttagaaatggtcactcttgttttaaaacttctaattatacctctcctgttactacagtgcctagacaggsatagcaacactgtagttcaactgtttcaaggtattgccactggaagaaacttaccagaatgatggatctgtcagtaactcccccaaactattcaaaataa

SEQ ID NO: 36160 - DNA, 201 bp, Homo sapiens
taactgcctagcttataaacaacaggaatgtatttcttacacttctgaatgctagaaagtctaacagcaagatagtaccagcagattcagtgtttggtgakgtctgctctctggttcatagacagtgccttttggctgtgtcctccaatgatgaaagggacaaggcagctctgtggtgcctcttctataaaggcacacatc

SEQ ID NO: 36161 - DNA, 201 bp, Homo sapiens
aatttatttatataatgtgtgggcccagcccagtggctggcgcctgtaatcccagcactttgggaggccgaggtgggcggatcacttgaggtcaggagtthgagaccagcctggccaacatggtgaaaacccgtctctactaaaaatacaaaaaaatagtggggcatggtgacatgcatctgaagtcccagctacttggga

SEQ ID NO: 36162 - DNA, 201 bp, Homo sapiens
ccactcattatgtggacattctaaaatttagaaatggtcactcttgttttaaaacttctaattatacctctcctgttactacagtgcctagacaggcatarcaacactgtagttcaactgtttcaaggtattgccactggaagaaacttaccagaatgatggatctgtcagtaactcccccaaactattcaaaataagcat

SEQ ID NO: 36163 - DNA, 201 bp, Homo sapiens
atataatgtgtgggcccagcccagtggctggcgcctgtaatcccagcactttgggaggccgaggtgggcggatcacttgaggtcaggagttcgagaccagyctggccaacatggtgaaaacccgtctctactaaaaatacaaaaaaatagtggggcatggtgacatgcatctgaagtcccagctacttgggagactgaggc

SEQ ID NO: 36164 - DNA, 201 bp, Homo sapiens
gggcccagcccagtggctggcgcctgtaatcccagcactttgggaggccgaggtgggcggatcacttgaggtcaggagttcgagaccagcctggccaacayggtgaaaacccgtctctactaaaaatacaaaaaaatagtggggcatggtgacatgcatctgaagtcccagctacttgggagactgaggcaggagaatcgc

SEQ ID NO: 36165 - DNA, 201 bp, Homo sapiens
cccagtggctggcgcctgtaatcccagcactttgggaggccgaggtgggcggatcacttgaggtcaggagttcgagaccagcctggccaacatggtgaaavcccgtctctactaaaaatacaaaaaaatagtggggcatggtgacatgcatctgaagtcccagctacttgggagactgaggcaggagaatcgcttgaacca

SEQ ID NO: 36166 - DNA, 201 bp, Homo sapiens
tacattaaaatatcttaaagtctctattaaatatttttatttaatgtttttttttctcatacaatgtagagtgggaatctagtctttttattactacattmttggtgtttcaaaagccaaaaacgaatgcagcctgatctgatataataattgaagtattagacattaaggaatctaaaactgatttttatttccttttgg

SEQ ID NO: 36167 - DNA, 201 bp, Homo sapiens
gtggctggcgcctgtaatcccagcactttgggaggccgaggtgggcggatcacttgaggtcaggagttcgagaccagcctggccaacatggtgaaaacccrtctctactaaaaatacaaaaaaatagtggggcatggtgacatgcatctgaagtcccagctacttgggagactgaggcaggagaatcgcttgaaccaggga

SEQ ID NO: 36168 - DNA, 201 bp, Homo sapiens
gttctgctccattggcctatatatctgttttggtacaagtaccatgttgttttggttactgtagtcttgtagtatagtttgaaatcaggtagcgtgatgcmtcagctttgtgctttttgattaggattgtcttggctagatgggacctttttttggtttcatatgaaatttaaagcagttttcttagttctgtgaagaaag

SEQ ID NO: 36169 - DNA, 201 bp, Homo sapiens
aatgtataagcaggatgattgcaaacaaaaatctggtatcacataatctatttatgctgactttttgcattttataaattaatgttaaataaatagaactrgtaatatttgtttactcaaactcaaagagagatatccaggaaaactttcgtttacactggcttccagaagggaaaaataaaggtctatcagtgttctagc

SEQ ID NO: 36170 - DNA, 201 bp, Homo sapiens
acctgggatggaatataaacactggagatagatctaaccttgaacactatcaaaactgcattttgatcagcctctgcaagggagtgcccaagcaaaggagyctcaataaggtccaggatggtcaagcagaagcctaatgagggttgctttggaattcttagaacaagtctttgaagctttcagagaataaatggatattga

SEQ ID NO: 36171 - DNA, 201 bp, Homo sapiens
ggatggaatataaacactggagatagatctaaccttgaacactatcaaaactgcattttgatcagcctctgcaagggagtgcccaagcaaaggagcctcartaaggtccaggatggtcaagcagaagcctaatgagggttgctttggaattcttagaacaagtctttgaagctttcagagaataaatggatattgacccag

SEQ ID NO: 36172 - DNA, 201 bp, Homo sapiens
ccttctcagaacagatctggggcttgagaatcctcccaattccttgtttggtgcccttgtgttgattaaagcctttctttgctgcaaaccctactgtctcmgcgtattggtctattgctaaacagtgggcatgtgaacctgatagtcttataacaaaatagaatagaagctatttataggatcgatccatgcatgtgagtc

SEQ ID NO: 36173 - DNA, 201 bp, Homo sapiens
taacagcttgcaggttgttacaagacggtttcattcctctaatcctgactctctctctgtgccccgtgtcagcaaaaagaagctagaatggccattgcccrattcataccatattagcttttacacctcagaattgagaagggatcaagcccggaaggaactgaaactgtccctaggaaagttatataaaattgattaagg

SEQ ID NO: 36174 - DNA, 201 bp, Homo sapiens
ttgagctttccgcctgcatactccatgttttccagtccatttttcaaggactcttgaagttcaagctcacaattctgtttatagggattataatttacatsattcaattaaatattacaataaaaccatagactgaagtactaacatgttcatccagcaccctaagctgggtataacagcttgcaggttgttacaagacgg

SEQ ID NO: 36175 - DNA, 201 bp, Homo sapiens
gtttactgttttttattttcagatccgtgtgtaatatcccgagaaattatggaaaattataacatagcattaaggtggacagccaaacagaagctttattygagaacaggtgaatcagttgaatttgtgtgtaaacggggatatcgtctttcatcacgttctcacacattgcgaacaacatgttgggatgggaaactggag

SEQ ID NO: 36176 - DNA, 201 bp, Homo sapiens
agcccactggtgtctcaataacctgtatattaagggctctcacttactgagatacttctcagtccatcctaatgacaaaatattctgcccattttcccacmgactccaaaagggactgccaggcatatatcaatatatctggtggcagagccttctaggcatcacgagtcctagctatggagtatacactcactgggacat

SEQ ID NO: 36177 - DNA, 201 bp, Homo sapiens
tacatgtttatttgtggcataggatcagaccctcctctgttagggcaagcccactggtgtctcaataacctgtatattaagggctctcacttactgagatwcttctcagtccatcctaatgacaaaatattctgcccattttcccacagactccaaaagggactgccaggcatatatcaatatatctggtggcagagcctt

SEQ ID NO: 36178 - DNA, 201 bp, Homo sapiens
aataaatcagcgtgactttgcacagtaaatacatgggagatttaacatgatgagatccgagaaagtggcaagagccagataaggggttcccaaaccaaggraaggagttagcaatgctggataagtaaaaagtgaagtcatagaagaattttaatcacaggaatgacatgaccagatttgcaagaatcacttgtcactctg

SEQ ID NO: 36179 - DNA, 201 bp, Homo sapiens
attcttttttttttaggccttccttgtaaatctccacctgagatttctcatggtgttgtagctcacatgtcagacagttatcagtatggagaagaagttaygtacaaatgttttgaaggttttggaattgatgggcctgcaattgcaaaatgcttaggagaaaaatggtctcaccctccatcatgcataagtatggtgcat

SEQ ID NO: 36180 - DNA, 201 bp, Homo sapiens
ctaaaatttagaaatggtcactcttgttttaaaacttctaattatacctctcctgttactacagtgcctagacaggcatagcaacactgtagttcaactgyttcaaggtattgccactggaagaaacttaccagaatgatggatctgtcagtaactcccccaaactattcaaaataagcattttctgttagtcatacttgt

SEQ ID NO: 36181 - DNA, 201 bp, Homo sapiens
tgaaaaaatccatcaataaatgcacccttgagggctttacctgtgtgcccccttggtacatgtttatttgtggcataggatcagaccctcctctgttaggrcaagcccactggtgtctcaataacctgtatattaagggctctcacttactgagatacttctcagtccatcctaatgacaaaatattctgcccattttccc

SEQ ID NO: 36182 - DNA, 201 bp, Homo sapiens
ggaggaaataacccgtgtaaaggatctaaggaaaaaataagtttgaaatgctcaacaaaatataaacaaataaatcagcgtgactttgcacagtaaatacrtgggagatttaacatgatgagatccgagaaagtggcaagagccagataaggggttcccaaaccaaggaaaggagttagcaatgctggataagtaaaaagt

SEQ ID NO: 36183 - DNA, 201 bp, Homo sapiens
tttaaattcgtcttgaaatatatttgtaactgttatcagttgatttgctactcaaaatgaacactaggtggaaccacttcttttttttctattcagacacytcctgtgtgaatccgcccacagtacaaaatgcttatatagtgtcgagacagatgagtaaatatccatctggtgagagagtacgttatcaatgtaggagcc

SEQ ID NO: 36184 - DNA, 201 bp, Homo sapiens
cttgagggtaacaagcgaataacatgtagaaatggacaatggtcagaaccaccaaaatgcttacgtaagtactttaatattcacgtggctggaaaaatctstgtgatgagtctgatatttcactgtttgtaacaaaatactcacagattattgaacaaccattctgctgaatgcttgcctaccaaatatttctgtcagaaa

SEQ ID NO: 36185 - DNA, 201 bp, Homo sapiens
gtcactactgtctactacgctttttccacaggctgtccataatctacagatataatggaaaggcttccagatagtttcattgttactcatctgttctttcrctcattcatttttccatcactttaacttccacaagtactacttagtaatacttggtacaatgtgtgttgcgtttttttttttttttctctattttcaggg

SEQ ID NO: 36186 - DNA, 201 bp, Homo sapiens
tctacttattttaaattcgtcttgaaatatatttgtaactgttatcagttgatttgctactcaaaatgaacactaggtggaaccacttcttttttttctaytcagacacctcctgtgtgaatccgcccacagtacaaaatgcttatatagtgtcgagacagatgagtaaatatccatctggtgagagagtacgttatcaat

SEQ ID NO: 36187 - DNA, 201 bp, Homo sapiens
agagactgcagcggcggcggcgggagcgggcggacgcgcaggcaagaccaggactcgggctggaggggcgctgggctcggacctgccaaggccacgggggwgcaagggacagaggcgggggtcctagctgacggcttttactgcctaggatgacgctgcggcttctggtggccgcgctctgcgccgggatcctggcagagg

SEQ ID NO: 36188 - DNA, 201 bp, Homo sapiens
ggggtcaggagcacataggatggaatcagcactgccaagtggggattggggtccggggtctaggtcagggtacaccgtgtgggcaggaactcacgaggtcrggtcacaggcacgccaccagcagtcgtgcacactctccgggaaacgaggggcagtagtgtcctcaagatgctgaagtcattgacgaagaagaagaagtca

SEQ ID NO: 36189 - DNA, 201 bp, Homo sapiens
caagggacagaggcgggggtcctagctgacggcttttactgcctaggatgacgctgcggcttctggtggccgcgctctgcgccgggatcctggcagaggcsccccgagtgcgagcccagcacagggagagaggtgggcaccgcaagggaggacccggcccggggcactgcaccgtgccaccctccgctccactcggccttc

SEQ ID NO: 36190 - DNA, 201 bp, Homo sapiens
caccactgggactggttacacaggatgctgtccctctggtacaggtctgtcttagccccacctggttctaggatactgagttcatgggctggtaggggatrtaagctcctggccttgttccttgtggccttgcccttgggagagccagccattagttgtgtgttgatgcatgcctgataacaaaccaagaagtgccttgaa

SEQ ID NO: 36191 - DNA, 201 bp, Homo sapiens
acaaggcccctcgaatggtgctggcagcagctggaggtgagtgatggaatcactgaagtcctgggtagtggggtcccagccttggttatcaaagccgaggkcctggttcccaccataggggacctttcaccccaggggactctgctcccaccctaaccttgaggggaatgaccttcctcctgtgctctctgaggtgggata

SEQ ID NO: 36192 - DNA, 201 bp, Homo sapiens
aaagccgaggtcctggttcccaccataggggacctttcaccccaggggactctgctcccaccctaaccttgaggggaatgaccttcctcctgtgctctctraggtgggataggattctaccctgccgccaccactgggactggttacacaggatgctgtccctctggtacaggtctgtcttagccccacctggttctagga

SEQ ID NO: 36193 - DNA, 201 bp, Homo sapiens
ggaagaggcggggacagagggcagggaagcagaggacagctacctaggagcccctggctgaccacagaatcatattacccttagcgtatggctttgcagcygggcaactaggggtgggcagcaggagatgccaggcctggggattttgtgctgtcgttggtctgcagtggtccacctggcacctaaacatgtcctccttgc

SEQ ID NO: 36194 - DNA, 201 bp, Homo sapiens
tccagagatacctcagcagttgggaaggggttctgtggctgctgcatcacaggcacacatgttcacacacatacaccctctacccacacctgccaccttttctgttcccctggcagtctggctgttcctcagccttgtcatgtactgtttcagatccgccaccgtgatgatgctctaccttttgcccacgtggccattgca

SEQ ID NO: 36195 - DNA, 201 bp, Homo sapiens
tatgagcctgtcctgaagtcaggcatgaggcaagggcagacaagggttgccctctgggccctggaggggtgggtggcagagacaggggaagggggttgggsagtgtgctagggcccactcttcggagaaaccatgcctctcctagtctgcctcctcagtcccattcatgcatgtaccccaactcactccagtgtggtagag

SEQ ID NO: 36196 - DNA, 201 bp, Homo sapiens
acagtctaaaccaatagtcccttccttaatgatgaaaggataaaatcattgccagaacaaaggcagcgtgtaatttttagaaaggaaaaaataagttgttrtttgcaaatgatatgttgtatgcttagacaaaaacaaataattaactgaaaattgagagtgaatttaaggatttgtatgctggtgagaccaggtaaatgt

SEQ ID NO: 36197 - DNA, 201 bp, Homo sapiens
acgccaccagcagtcgtgcacactctccgggaaacgaggggcagtagtgtcctcaagatgctgaagtcattgacgaagaagaagaagtcactggtgggctrtgaggcaactcgcttcagctcctcagggtcagcattcttgatccctgaagtgacgacccatcaggactcagtcacccacatgctctctgactgcccccac

SEQ ID NO: 36198 - DNA, 201 bp, Homo sapiens
ggcgtggacccgggaggtggagcttgcagttagctgagattgcaccactgtgctccagcctgggcaacagagcgagactccgtctcaaaaaaaaaaaaaaaggccaatgcaactggtggcaccacagagccctcctcttgtggaggtgaggaggcaagatccaaggagtcctagggtatacgtttgtaacattatttgcaa

SEQ ID NO: 36199 - DNA, 201 bp, Homo sapiens
gccaggctggtctcgaactgctgacctcgtaatccacctgccttggcctcccaaagtgctgggattacaggtataagccaccgcgcccagcctgtggtgcrtgtttcacagcaaccaggaggctgtcaagaaaattaatattaccttattgggtgccaaggcaacactgtttggtgttcagagctgattaaaaacaacaac

SEQ ID NO: 36200 - DNA, 201 bp, Homo sapiens
aaagtacttaggaaagtagatgtgaaaaacttaaatcagctgtgaacaaatagtaaattaaaagactagaccgtgtgaccaagtggggtgagtggtacgtrtttcttttacattttttttttttttttgagatggagtctctctgtcacccaggctggagtgcagtggcacgatcttggctcactacatcctctgcctctt

SEQ ID NO: 36201 - DNA, 201 bp, Homo sapiens
ctctactaaaaatacaaaaattaggctagacgcggtggctcacgcctgtaatcccagcactttgggaggccgaggcgggcgaatcacaaggtcaggagatygagaccatcctggctaacacggtgaaaccccgtctctactaaaaatacaaaaaattagccgggcgtggtggcgggcgcctgtagttccagctactcggga

SEQ ID NO: 36202 - DNA, 201 bp, Homo sapiens
gaatgggaaagccggattgcggtaacatggacccctgggagaggttctggagtcttggcctggcagacacctgggaggtgtagggttggggcctggcatarcgcagcctgctcctataggcatccctggtgtcctaggcagctgtcacctgcaggggtagcatagtgggagggcagggcataggtgctgatggctgtggag

SEQ ID NO: 36203 - DNA, 201 bp, Homo sapiens
cctgcaacttccttgttatatgtcacttgttatagtaaagaatgctatattacatgaactctaaaatgtgctagattgtaaggagctgtctgtgctccagygccagagaaagaatctcaagaatcttgccaattttaatcaaaggatactatagattgtaaaatgcctcttgcattccaagatgttagatgtgaaatacat

SEQ ID NO: 36204 - DNA, 201 bp, Homo sapiens
cccagactacaaccggatccgtagcggcatgttctggctgcgcttctaggcgggaagcctatgtaagcaagagggcagggccggggtttgtggtccccccyccaccacaaacacagcacttcggctcctctaacctgtgccacaggtgaccaccaataaaatcctctgctgagaagtgtgtcatccctcttttggcattgg

SEQ ID NO: 36205 - DNA, 201 bp, Homo sapiens
ccctgacgctccaccctatccccacaggccccattgagcagctcccagactacaaccggatccgtagcggcatgttctggctgcgcttctaggcgggaagyctatgtaagcaagagggcagggccggggtttgtggtcccccccccaccacaaacacagcacttcggctcctctaacctgtgccacaggtgaccaccaata

SEQ ID NO: 36206 - DNA, 201 bp, Homo sapiens
cagactacaaccggatccgtagcggcatgttctggctgcgcttctaggcgggaagcctatgtaagcaagagggcagggccggggtttgtggtccccccccmaccacaaacacagcacttcggctcctctaacctgtgccacaggtgaccaccaataaaatcctctgctgagaagtgtgtcatccctcttttggcattggca

SEQ ID NO: 36207 - DNA, 201 bp, Homo sapiens
ggagtggagcaccagcaactgttagacctcgcccagaagcacctcggtggcatcccatggacatatgcagaggacgctgtgcccactcttactccatgccrcttcactggcagtgaggtatgctgccttttgggcaggagtagtgctcagctgggggcctgtgggaggacccccatgtgcatggttatcctggtgactcca

SEQ ID NO: 36208 - DNA, 201 bp, Homo sapiens
ccaggtaccccaccctgacgctccaccctatccccacaggccccattgagcagctcccagactacaaccggatccgtagcggcatgttctggctgcgcttytaggcgggaagcctatgtaagcaagagggcagggccggggtttgtggtcccccccccaccacaaacacagcacttcggctcctctaacctgtgccacagg

SEQ ID NO: 36209 - DNA, 201 bp, Homo sapiens
aagtgtttttctttttttttcttttttttttttttttttttttttttgagacagagtcttgcttgtcccccaggctggagtgcagtggcatgatctcggcycactgcaacctccgcctcccggtttcacgccattctcctgccccagcctcccaagtagctgggactacaggctccggccaccgcatccggctaatttttt

SEQ ID NO: 36210 - DNA, 201 bp, Homo sapiens
gactgacacatggtaggtgctccgttaatgttaccttttaaaaagattgctggggagagaccaggaccaaaagtgtttttctttttttttctttttttttyttttttttttttttttgagacagagtcttgcttgtcccccaggctggagtgcagtggcatgatctcggctcactgcaacctccgcctcccggtttcacgc

SEQ ID NO: 36211 - DNA, 201 bp, Homo sapiens
tagcataatgactgacacatggtaggtgctccgttaatgttaccttttaaaaagattgctggggagagaccaggaccaaaagtgtttttctttttttttcytttttttttttttttttttttttttgagacagagtcttgcttgtcccccaggctggagtgcagtggcatgatctcggctcactgcaacctccgcctcccg

SEQ ID NO: 36212 - DNA, 201 bp, Homo sapiens
gcataactgtgggagcgtgagcttagccctctgtgtttgtagaagcagaaacaaacctggaagattttggattattaacattatactttcttgcttcaatstcagagtcaggaggtcaggtgttgaccttccccctgccctccaagaggtgtgtgacactggggaagtcacttcccctctctgagcctcagggtttttcac

SEQ ID NO: 36213 - DNA, 201 bp, Homo sapiens
gggtctcagtatatgaatttggagggcacacaactcagtctatagcactgatgcctccatcaaaaataccccatgtgacagctggttgaggaggattaacmtcgaaccaccttattctcaatgccatttaggctgtagcacactttcttccaatcttatgctttttgtttccaagtagaaaagaaacgctttactgaagag

SEQ ID NO: 36214 - DNA, 201 bp, Homo sapiens
agacaccagtcctgtaggattagggccctacccttacgactctctttaaattaatgacttccttaaaggctcaatctccaaatatagttactggggtttarggtctcagtatatgaatttggagggcacacaactcagtctatagcactgatgcctccatcaaaaataccccatgtgacagctggttgaggaggattaaca

SEQ ID NO: 36215 - DNA, 201 bp, Homo sapiens
caactgatgtattttctcacagttctggaggcaaaaagtccaaggtgaaggtgccagcagggttgatgtctggggagggctctgctcctggcttacagagkctgcctcagggctgtgtcctcacatggccttcccagtgtggggggtgtatgtgtgtgtgtgtgtgtgtgtgtgtgtgagtgtgagagagagagagagaga

SEQ ID NO: 36216 - DNA, 201 bp, Homo sapiens
ttccctggtgaatcactcttctcaggatgccttagtaaaacgccacaggctgggtggctccaacaactgatgtattttctcacagttctggaggcaaaaaktccaaggtgaaggtgccagcagggttgatgtctggggagggctctgctcctggcttacagaggctgcctcagggctgtgtcctcacatggccttcccagt

SEQ ID NO: 36217 - DNA, 201 bp, Homo sapiens
tgtgactttcactttcccttttgggttccagggtatatctcagagactggagaacgtgtctggttattatgcagatgcacggctggaggtgggatccacayagctcagaacagctggatcttgctcacactctttcaagagaagcttccttggtaagttaggggtggtctgaccttccccatctccccatcctcacagcag

SEQ ID NO: 36218 - DNA, 201 bp, Homo sapiens
tcaggaggtcaggtgttgaccttccccctgccctccaagaggtgtgtgacactggggaagtcacttcccctctctgagcctcagggtttttcacctgccakagggggttaggatgccctaccctgctgacccccagcaggctgctgaccccatctggggtgaggtgggaggcggggcagtgcgagtcaggggaaagttgac

SEQ ID NO: 36219 - DNA, 201 bp, Homo sapiens
tctctccaatgctaatagtagttcaatcagatgggcatgtggttaaagcctgagaatgaacagcaggtcaaaggtggggaaccaagtagcatgatgccatscaaagacccagagagacgtttcaggggcagagccaggggtcaggatggggcaggggtgggcctgggttggaggagcagcaggaaggctcgggcaccaagg

SEQ ID NO: 36220 - DNA, 201 bp, Homo sapiens
gtcgctgaacatctgtttcagttttcttatctgaaaatggaaatacaaatggtacccacttaataggctcttggaagaggactgtgagttattatttatamcatcttagagcaattagtggtgcaaagtcgagtccacaaatgttcacccctatttctcattgactgttattatacctataagtgccttgactaacactgt

SEQ ID NO: 36221 - DNA, 201 bp, Homo sapiens
ggctgctggcaccatggactcaggtaggcttgcttcttcctcttccctggctggttcctactcgcacctagaatggagggtggcgtttccacaactcagtsagccccagaggaacccggatggtcaagcaggccgatgagtcttccctgagccccaaaagaggccacatggagtcccccgacccaagggtctgtgggggca

SEQ ID NO: 36222 - DNA, 201 bp, Homo sapiens
agacacttgggcatagagtgcaagacacagatttggaatgaggagtcatttacagtaagcatgtatgcatgagtcaatatttttatatatttaagggagtrgagcccagtcatggaagacatgggatttgaatcagaagtcctggctctacccctattgtgaaaacatggcaaggttgcttaacatttgaggtttcttctg

SEQ ID NO: 36223 - DNA, 201 bp, Homo sapiens
ggtataaaccaaaagtaagattctaagcctccccctcatttaaaggacttcctcctcagccagggctcttaaaatttaacctgaaagactggttcaggccrtgaagggaaatgggggtcagacatgcttcattatgcctctctggcattaatatcaacacaggctttcagtctaataagaaacattttacagcctgtttct

SEQ ID NO: 36224 - DNA, 201 bp, Homo sapiens
cagtctaataagaaacattttacagcctgtttctctgtgaagcctgctagctgaaagcttcatctgcaggataaaactttggtctccacaacctcttatcrcaactcaaacattccttcctattgatctccggtctttagacaaactcaaccaattgtcaaccagaaaacgtttcaatttacctgtagcctggaaacgccc

SEQ ID NO: 36225 - DNA, 201 bp, Homo sapiens
gccaacccctacctttgaggggcctgacagggccacctcacagctgcctgggcttgttgttgcctcctcactacagaaaccatggaagtctctagagtcartgtttccaggctggggctgccagatcactcctgtaggtggttgaaccagttgagttcattcttctcagtgagggggacacaggtggaggtccatcggcac

SEQ ID NO: 36226 - DNA, 201 bp, Homo sapiens
cccagttaaggggttgaacttgaccctggcaggtcattaaagattcctcaggagacctaggtattgtggctcagggctgtaattcccgtgctaatgcacgraggctaatgcaggaggatccctcgaacccaggagttcaggacaagcctgggcagcatagcacgaccccatctctgcaaaaatgaaaataaaaagattgac

SEQ ID NO: 36227 - DNA, 201 bp, Homo sapiens
ctctgtgtcgtggcctcgaagggtctttgattctgtgcagcttcttttcctcctcatttctttaagggaggcatcgcattcattagtcttttttttctgayggagtcttgctctgtcgcccaggctggagtgcaagtagcaccatcggctcactgcaccctccgcctcctgggttcaagtgattctccagctcaccctcct

SEQ ID NO: 36228 - DNA, 201 bp, Homo sapiens
ccctccaagaggtgtgtgacactggggaagtcacttcccctctctgagcctcagggtttttcacctgccagagggggttaggatgccctaccctgctgacycccagcaggctgctgaccccatctggggtgaggtgggaggcggggcagtgcgagtcaggggaaagttgacattgcagcccagatgcctgcaggggctgca

SEQ ID NO: 36229 - DNA, 201 bp, Homo sapiens
gtcaggaggtcaggtgttgaccttccccctgccctccaagaggtgtgtgacactggggaagtcacttcccctctctgagcctcagggtttttcacctgccwgagggggttaggatgccctaccctgctgacccccagcaggctgctgaccccatctggggtgaggtgggaggcggggcagtgcgagtcaggggaaagttga

SEQ ID NO: 36230 - DNA, 201 bp, Homo sapiens
tccacaaagcaccatggcacttccctggtgaatcactcttctcaggatgccttagtaaaacgccacaggctgggtggctccaacaactgatgtattttctyacagttctggaggcaaaaagtccaaggtgaaggtgccagcagggttgatgtctggggagggctctgctcctggcttacagaggctgcctcagggctgtgt

SEQ ID NO: 36231 - DNA, 201 bp, Homo sapiens; identical to SEQ ID NO: 8572

SEQ ID NO: 36232 - DNA, 201 bp, Homo sapiens
gatcactggaatatttcccgtacatggggagaaagcatggtggaaagctcactttctggtgattctcagctgaaatagatcggttcctccacaaagcaccrtggcacttccctggtgaatcactcttctcaggatgccttagtaaaacgccacaggctgggtggctccaacaactgatgtattttctcacagttctggagg

SEQ ID NO: 36233 - DNA, 201 bp, Homo sapiens
ccaaccaccttgggcacatgtcatcaggacttcctgaggctgtgtcacaggcatacgtcctcaaccttggcaaaataaactttctaaattaactgacaccwgtctcagattttccgggttcacagcggttgggactgaccagtgggcatccctttgaacactgctctgaacatctttggaagcgtccttgctttctggggt

SEQ ID NO: 36234 - DNA, 201 bp, Homo sapiens
ggcacatggcagaaggaagcgatcactggaatatttcccgtacatggggagaaagcatggtggaaagctcactttctggtgattctcagctgaaatagatyggttcctccacaaagcaccatggcacttccctggtgaatcactcttctcaggatgccttagtaaaacgccacaggctgggtggctccaacaactgatgta

SEQ ID NO: 36235 - DNA, 201 bp, Homo sapiens
taattgatgtctcatgctccctaagtgtataaaatcaagctacaccccaaccaccttgggcacatgtcatcaggacttcctgaggctgtgtcacaggcatrcgtcctcaaccttggcaaaataaactttctaaattaactgacaccagtctcagattttccgggttcacagcggttgggactgaccagtgggcatcccttt

SEQ ID NO: 36236 - DNA, 201 bp, Homo sapiens
tcgaaactcagattttgaagacactggtgtaaagcgtttgacaataggcacatggcagaaggaagcgatcactggaatatttcccgtacatggggagaaarcatggtggaaagctcactttctggtgattctcagctgaaatagatcggttcctccacaaagcaccatggcacttccctggtgaatcactcttctcaggat

SEQ ID NO: 36237 - DNA, 201 bp, Homo sapiens
gtcaaccagaaaacgtttcaatttacctgtagcctggaaacgcccactttgagttgtcccgcctttctagaccaaaccgatgtatttctcaagtgtacttrattgatgtctcatgctccctaagtgtataaaatcaagctacaccccaaccaccttgggcacatgtcatcaggacttcctgaggctgtgtcacaggcatac

SEQ ID NO: 36238 - DNA, 201 bp, Homo sapiens
gaagcctgctagctgaaagcttcatctgcaggataaaactttggtctccacaacctcttatcgcaactcaaacattccttcctattgatctccggtctttrgacaaactcaaccaattgtcaaccagaaaacgtttcaatttacctgtagcctggaaacgcccactttgagttgtcccgcctttctagaccaaaccgatgt

SEQ ID NO: 36239 - DNA, 201 bp, Homo sapiens
tgctcttgacaaaatgaactattttcataacccactgatgggtcgaaactcagattttgaagacactggtgtaaagcgtttgacaataggcacatggcagraggaagcgatcactggaatatttcccgtacatggggagaaagcatggtggaaagctcactttctggtgattctcagctgaaatagatcggttcctccaca

SEQ ID NO: 36240 - DNA, 201 bp, Homo sapiens
agaaacgctttactgaagaggccaccaaatacttccgggagagagtcagcccagtgcatctgcaaatcctgctgactaacaatgaagcctggaagagattygtgactgcggctgaattgcccaggtaacctccgtggggttacctccatggggcgccccggctatgccatcctgatctcccctgggctagttttctctggc

SEQ ID NO: 36241 - DNA, 201 bp, Homo sapiens
cctaaacacatctagatcccaggaatttacataagggtatatatatatacacccttatgtatatatatattatatatatttcaaatatcttacaaaagaawactcactcttgctgtgttcaatacactctgatattttcaatgctcttttctttttaaaatgctgctcttgacaaaatgaactattttcataacccactga

SEQ ID NO: 36242 - DNA, 201 bp, Homo sapiens; identical to SEQ ID NO: 8576

SEQ ID NO: 36243 - DNA, 201 bp, Homo sapiens
tttgtagcgttgaccagtgtgggagtggtcagtgatacagcatatgcaccctgtgtcatattgacacagattgaaaatgctgccatcctaaacacatctakatcccaggaatttacataagggtatatatatatacacccttatgtatatatatattatatatatttcaaatatcttacaaaagaatactcactcttgctg

SEQ ID NO: 36244 - DNA, 201 bp, Homo sapiens
ttgtggctcagggctgtaattcccgtgctaatgcacggaggctaatgcaggaggatccctcgaacccaggagttcaggacaagcctgggcagcatagcacraccccatctctgcaaaaatgaaaataaaaagattgactgacatagtgatgcacttgtagttcccactactcagaaggatgaggcaggaggatcgattgat

SEQ ID NO: 36245 - DNA, 201 bp, Homo sapiens
atgtcccagtgcatacataaatccatactgcttcccagtcccttctctgcagttccataattcccaaatccctgcaaaccacacatttttggggcaactcmtctgggcagtaatcctgctgtgtactaagatgctttgtactgataatattatgtatcccatttaaggtgaatattcattggtttctctgttgaaacattt

SEQ ID NO: 36246 - DNA, 201 bp, Homo sapiens
gcaccacagccttggggaagtggaaacagcagggtcggggagtagggggagagcagggtccaggaggtgcggagggctgagagaggaggttgaccagcagycccgacctctgacctcccgctctgctcccagctgaccctggggtgtttccagcacaggccagtcccctccctccagctcttgccctgcaccagcccctct

SEQ ID NO: 36247 - DNA, 201 bp, Homo sapiens
gggagccacggttgcacccatctcctggcctgtgtgtgatcatcgaatgaggcacatatgaggagccctgcagatcacagacacccagtacacactggctrttatcaattagttatcacacatgttgccaggcccaggtcattgtcagaacgttccttcccatctctatttcggtgtatagactctgtagtttctgtgatt

SEQ ID NO: 36248 - DNA, 201 bp, Homo sapiens
tcaccatgttagccaggatgttctcgatctcctgaccttgtgatccacccacctccgccacccaaagtgctgggattacaggcatgagccaccgtgccagrcgcattccttagtcttaatgggcatagtgttagggacccgcctactccctatggcaggagatttagtgatttctccctttttggtgatagaaacaacgct

SEQ ID NO: 36249 - DNA, 201 bp, Homo sapiens; identical to SEQ ID NO: 8573

SEQ ID NO: 36250 - DNA, 201 bp, Homo sapiens; identical to SEQ ID NO: 8574

SEQ ID NO: 36251 - DNA, 201 bp, Homo sapiens
gagaacatgccaggcaaggtgatctcttccagtctgaggttttatttgatagcttaaggactcagagttagtcaaaatgcaatgtctgaaggcacccttcyttctgacaccagttgcagatttgaaggtgtttcttaagcccccactcaggtttgataattcactacaaagacttacgtaactcactgataactgttattg

SEQ ID NO: 36252 - DNA, 201 bp, Homo sapiens
gataacaggcatgcaccaccatgcccggctaattttttcatttttttagtagagacagagttgctccatgttggtcaggctgctctcgaactcccaacctsaggtgatccacccacctcagcttcctaaagtgctgggattacagatgtgaaccagtgtgcctagccagcttttctttagggagtaaatcattttctttac

SEQ ID NO: 36253 - DNA, 201 bp, Homo sapiens
catgggatttgaatcagaagtcctggctctacccctattgtgaaaacatggcaaggttgcttaacatttgaggtttcttctgtttcaaaatgggagccacrgttgcacccatctcctggcctgtgtgtgatcatcgaatgaggcacatatgaggagccctgcagatcacagacacccagtacacactggctgttatcaatt

SEQ ID NO: 36254 - DNA, 201 bp, Homo sapiens
attatactgactggtaacaagtagatttagttctcatatgtaaatgttctgttttgttctaaaagttaaaagttaaccaagtgtttacattttggtgacgytttaaatcttgcttactgttgagctgagttgtacaatatggttgcacatgttttgctgcacggctttagtttttcctgatgtttctaattgcctttgttt

SEQ ID NO: 36255 - DNA, 201 bp, Homo sapiens
agtgtatacggttcagacaaatcatttaataaagagggctccactcactcccttcccaattaaaagcagctaattttgatgttcagattttcctttttttwttttctgagacagaatttcactcttgttgcccaggctggagtgcaatgtagctatcttggctcaccacaaactccacctcctgggttcaagcgattctcc

SEQ ID NO: 36256 - DNA, 201 bp, Homo sapiens
ggtgcaattacatttgacatgctggcaaccaaataaaaggcaaaccttgcatatgccacacacacactcacaaattcacacacacacacacacacacacacgcacactcacacctgctattcagatttcacttcatggagccctgtgtttctcacctctgtgtcgtggcctcgaagggtctttgattctgtgcagcttctt

SEQ ID NO: 36257 - DNA, 201 bp, Homo sapiens
aggtgcaattacatttgacatgctggcaaccaaataaaaggcaaaccttgcatatgccacacacacactcacaaattcacacacacacacacacacacacacgcacactcacacctgctattcagatttcacttcatggagccctgtgtttctcacctctgtgtcgtggcctcgaagggtctttgattctgtgcagcttct

SEQ ID NO: 36258 - DNA, 201 bp, Homo sapiens
acttcttcagtgatccagccagcatttgccctgacacttagagttgaaatgccatcaggctacctgcatttgatgcaattccactgtactgctagtattgyttaaaaatttttcaattgcaagcaacagaaacagaaactatctgtcttaaacaaaatagaagattcattggatgaaaactagagcaggtcagaggatgga

SEQ ID NO: 36259 - DNA, 201 bp, Homo sapiens
agaggttgtttcacccaccctgactctgagcacctacttgagccaggccctgtgggtaaactgaggccatgggagatgagtgactcgctgagggtcccatrtcaggaagttgagcaggtagatcacaggactccatgtccctgacactcacctggttccttttcaggcctctgggtgatagagaagaaagaagctgtgctg

SEQ ID NO: 36260 - DNA, 201 bp, Homo sapiens; identical to SEQ ID NO: 8579

SEQ ID NO: 36261 - DNA, 201 bp, Homo sapiens
cataataatcacaatcaattattactgttgaatataagcggtataaaccaaaagtaagattctaagcctccccctcatttaaaggacttcctcctcagccrgggctcttaaaatttaacctgaaagactggttcaggccatgaagggaaatgggggtcagacatgcttcattatgcctctctggcattaatatcaacacag

SEQ ID NO: 36262 - DNA, 201 bp, Homo sapiens
ttggaccaagtaaacatgatcataataatcacaatcaattattactgttgaatataagcggtataaaccaaaagtaagattctaagcctccccctcatttmaaggacttcctcctcagccagggctcttaaaatttaacctgaaagactggttcaggccatgaagggaaatgggggtcagacatgcttcattatgcctctc

SEQ ID NO: 36263 - DNA, 201 bp, Homo sapiens
caaatgttctcacttgaatgttagtatcaacccaaggcctttcacagattcatcttggaccaagtaaacatgatcataataatcacaatcaattattactrttgaatataagcggtataaaccaaaagtaagattctaagcctccccctcatttaaaggacttcctcctcagccagggctcttaaaatttaacctgaaaga

SEQ ID NO: 36264 - DNA, 201 bp, Homo sapiens; identical to SEQ ID NO: 8581

SEQ ID NO: 36265 - DNA, 201 bp, Homo sapiens
caatagacacctggatgcaagatccctaagacagaggcaggaaataggaagagggaggtgagaggctttcgatgaggatgcttctacacatgaccttgagratgaaaacgcatcagggggtcccgggaaccactgcgttgttaacataaagtctgggagcaaagaccagcggctggaatggatgtgcctgggagccagctg

SEQ ID NO: 36266 - DNA, 201 bp, Homo sapiens
aagatgaggagagggcagggaagattagaagccgggacctaccagccaaccccggaatccttcagaagggcttggctgggaggctcaaggaagaaactctstctccgaaacaagatgatctgtggtttaataacgcggccagctgggttcagaggtgatagtggggagccatgtcccctgagaccagcctgcagaggacag

SEQ ID NO: 36267 - DNA, 201 bp, Homo sapiens
gtttttctttttttttcttttttttttttttttttttttttttgagacagagtcttgcttgtcccccaggctggagtgcagtggcatgatctcggctcacygcaacctccgcctcccggtttcacgccattctcctgccccagcctcccaagtagctgggactacaggctccggccaccgcatccggctaattttttttgt

SEQ ID NO: 36268 - DNA, 201 bp, Homo sapiens
acaggtggctcacattcagtcccacaatttgctttctcctcctcaagggttaagaaaaaaaacgaacccttccagtcaggtcagtgactggagagctccawggaaagtctctcagtgacctggctgctggcaccatggactcaggtaggcttgcttcttcctcttccctggctggttcctactcgcacctagaatggaggg

SEQ ID NO: 36269 - DNA, 201 bp, Homo sapiens
gggggacaaagggtgtccagcacagcaccagtgaattcaccaagacagacacttgggcatagagtgcaagacacagatttggaatgaggagtcatttacartaagcatgtatgcatgagtcaatatttttatatatttaagggagtggagcccagtcatggaagacatgggatttgaatcagaagtcctggctctacccct

SEQ ID NO: 36270 - DNA, 201 bp, Homo sapiens
ggacaaaacacatggggtgttgccaaccagagaagctcacccagttaaggaaaaattcctgtgaatcacattagatcaggaagcctttattcaggattgttgttacaggggagggagactgagcccagctcccaatatagtaaagacagagggggagtcacagccaacaccagggtgaggagtgggagatggaccagttct

SEQ ID NO: 36271 - DNA, 201 bp, Homo sapiens
cttggctctgtccctgcacagctctggggctgttgttttatgtcttggagactgggacctgccatctctccaatgctaatagtagttcaatcagatgggcrtgtggttaaagcctgagaatgaacagcaggtcaaaggtggggaaccaagtagcatgatgccatccaaagacccagagagacgtttcaggggcagagccag

SEQ ID NO: 36272 - DNA, 201 bp, Homo sapiens
ggtatgcacacaggtgaagctgtcacctgctaaggcattagtttggctggcgacatgtgacagtgagaccctgaagcttggaggtgccaggtcaggaggcmgtcaagtggcttgagagttcatgtgcagccaggactaatagccaggcctttcacttttcagtcaaagggggcagtggctggacccagtggccttcagtca

SEQ ID NO: 36273 - DNA, 201 bp, Homo sapiens
tcaaagtctcatgagtccataagaggttccatgaaattgcacatggcattggtatgcacacaggtgaagctgtcacctgctaaggcattagtttggctggygacatgtgacagtgagaccctgaagcttggaggtgccaggtcaggaggcagtcaagtggcttgagagttcatgtgcagccaggactaatagccaggcctt

SEQ ID NO: 36274 - DNA, 201 bp, Homo sapiens
tgtccaaatgcaggtcttttcagcattagtgatttatagagatgattttcaaagtctcatgagtccataagaggttccatgaaattgcacatggcattggyatgcacacaggtgaagctgtcacctgctaaggcattagtttggctggcgacatgtgacagtgagaccctgaagcttggaggtgccaggtcaggaggcagt

SEQ ID NO: 36275 - DNA, 201 bp, Homo sapiens
gagagggatatttcttccctccctgatttgatcccatcactgatgggcatagtgggccatgggtgactgtttccctgacagcatgcctgggaactggggcrttctgaactgccatttgggaccctcttctgttctacatagagtagaggaagtgtttcttcgggccagcttggagagttggaacaagtgtctgccaactgg

SEQ ID NO: 36276 - DNA, 201 bp, Homo sapiens
ggatggggcaggggtgggcctgggttggaggagcagcaggaaggctcgggcaccaaggctgggagtagggtgagaagagggaggcactgagggcatgaaakgtaacgtggccatggacttgcagaggaccagtgagtgggagagggatatttcttccctccctgatttgatcccatcactgatgggcatagtgggccatgg

SEQ ID NO: 36277 - DNA, 201 bp, Homo sapiens
gttttatgtcttggagactgggacctgccatctctccaatgctaatagtagttcaatcagatgggcatgtggttaaagcctgagaatgaacagcaggtcaraggtggggaaccaagtagcatgatgccatccaaagacccagagagacgtttcaggggcagagccaggggtcaggatggggcaggggtgggcctgggttgg

SEQ ID NO: 36278 - DNA, 201 bp, Homo sapiens
atcttgacctgatcaatgtgtgttcctggagatgctgtccggggcccttttcttccacctctgaggaactgcacaaacacagcaggatcctcctgctgacmcagaacacagagaggctggaatggagttggacagagctgggggtggatcttggctctgtccctgcacagctctggggctgttgttttatgtcttggagac

SEQ ID NO: 36279 - DNA, 201 bp, Homo sapiens
gaaaaaaaattgcaaaacgatcttcagaagctgtgctgctgcctatggcagtgtggcagggagggggcctcgggtggggtgagtgcccaaaagggtgggcraggacgatttggggagttctccaaaggttatgacccactatgggcctacccttcgttcccggctgtaaacctctaaacttagcatttatccaagctatcc

SEQ ID NO: 36280 - DNA, 201 bp, Homo sapiens
ttggctcagagctgaggcaggagggagggctccctgtctgggcctcctccaggaactaaagtccctttccgggaattgaccaaactgcaggcttgcccagrgaggacatgctgtgtcctagttcagctcgaggggcagtatccagcttcaaccctcagcggatgccccagacaagattccgagccaggccaacaacgccta

SEQ ID NO: 36281 - DNA, 201 bp, Homo sapiens; identical to SEQ ID NO: 8577

SEQ ID NO: 36282 - DNA, 201 bp, Homo sapiens
ggcctgggccattgccgtgggggaggggaggcttggaaaccatggctatgattcagaggttagctggctcgcgtgtttttagaaatttcttttttctttcycctcgtacaaaagtaataagactggggaggacacgggagaaaataaatggaaactcagaaacctgatagagccaccaaaagtacatgaaatcagagtcat

SEQ ID NO: 36283 - DNA, 201 bp, Homo sapiens
agcaataaatacacagatctagtgctggaggttccctccatccaaccctggtttccttcatcctttcagtgaaggaggaaaaaataaaagcaaaatacccstcacccaagtcagcactgtgttcatttccctaaggcctgttttctcccctcactgagttgccttggcaaccaagtcacatctgctcaggagccgccctgg

SEQ ID NO: 36284 - DNA, 201 bp, Homo sapiens
ctggccgaagttaagttttgtttgtgcctaacgtaagcacccatctgaaacgactccagttaagttccccatagttggcagtttaaggggggttacagccwttctgaaggcctgtttgcttttgtttgcccaggtgttcattttaagtttgctttaacaccctggtactcccaccccagcaataaatacacagatctagtg

SEQ ID NO: 36285 - DNA, 201 bp, Homo sapiens
cctccctccagctcttgccctgcaccagcccctctgctctgagtggccctgtgaaaagagtgactcagcgtcccactgaactgagccccattctggccttygccacgtcttctctgtgtcacctggagcttcttacctcccctcacctggaatgcgagtataatatttccccatgtggtcatgaggatcaaatagtacatg

SEQ ID NO: 36286 - DNA, 201 bp, Homo sapiens
cccccgacccaagggtctgtgggggcatctatgtcctgacctctcctcaggggagcatggcccaggtgcccacttcctccctgccctggcacctagcaaaygactcaagtggggcaccacagccttggggaagtggaaacagcagggtcggggagtagggggagagcagggtccaggaggtgcggagggctgagagaggag

SEQ ID NO: 36287 - DNA, 201 bp, Homo sapiens
gggtttcatcgtgttagccaggatggtcttgatctcctgacctcgtgatcctcccgcctcggcctcccaaggtgctgggattacaggcatgagccgctgcrcccgaccaagtgtttttcttagagttggatgcccagcaggactttctttgaaaaaagccagaaaaatcttgacctgatcaatgtgtgttcctggagatgc

SEQ ID NO: 36288 - DNA, 201 bp, Homo sapiens
ctcggctcactgcaacctccgcctcccggtttcacgccattctcctgccccagcctcccaagtagctgggactacaggctccggccaccgcatccggctawttttttttgtatttttagtacagacggggtttcatcgtgttagccaggatggtcttgatctcctgacctcgtgatcctcccgcctcggcctcccaaggtg

SEQ ID NO: 36289 - DNA, 201 bp, Homo sapiens
ccctctcatttcacccagactcctgcaaaagcttccagaatggtcttccctgttatacagcccttgccactatccctgcccatcctccacactgggccaakttgccccgtaagaacatagatttcttcaagcccatgcttccatgtcttcaatggcttcctattactcttagcacaaaagcccagagccttcatgctgtct

SEQ ID NO: 36290 - DNA, 201 bp, Homo sapiens
tgtttttctttttttttcttttttttttttttttttttttttttgagacagagtcttgcttgtcccccaggctggagtgcagtggcatgatctcggctcaytgcaacctccgcctcccggtttcacgccattctcctgccccagcctcccaagtagctgggactacaggctccggccaccgcatccggctaattttttttg

SEQ ID NO: 36291 - DNA, 201 bp, Homo sapiens
tgcagggaggagggagacgctgggaacctgagctggtgcgcctcctgctgcctcggtgggcggtggctgtgatgaatatttgatgccacacctggccacgyggcgttgggggctgtctgggcccatggcggggctgatacatgctggtggcggcaggtgaacgggcagaatgtggagggactgcgccatgctgaggtggtg

SEQ ID NO: 36292 - DNA, 201 bp, Homo sapiens
gctcgtcccgaagtgacctgcctggttccgacaaggacactgaggtatggatgttctccactcctgagctcacacgtggggttgctagaggccttggggtrggcgtctgtggagatgtcagcccgggcagtggggtctctgttcaggaagtcctcgtgagccccagccccagcaggcagcctctgttggttgctccctagg

SEQ ID NO: 36293 - DNA, 201 bp, Homo sapiens
cagtggggtctctgttcaggaagtcctcgtgagccccagccccagcaggcagcctctgttggttgctccctaggaggggccaccgtctggggtgtgggacyagggctcactccagacaccccacccaccgtgctcaccccaggatggcagtgcctggaagcaagatcccttccaggagagcggcctccacctgagccccac

SEQ ID NO: 36294 - DNA, 201 bp, Homo sapiens
caccctcccctcttctccctctcaaccctcccctcttctccccgcagcacctccctctccaccctccccccatcctcccagcgcctccctccccaccctcytcccccattcccccagcgcctccctccctaccattcccctcctgtccccgcagagcctccctccccaccctccccctttctccccccagcacctccctcc

SEQ ID NO: 36295 - DNA, 201 bp, Homo sapiens
cgcctggctagtgtactcatcactgtctgcaggccggtgagtctttgtgtctgtactctagtgtgtcccagctggtgtgtctgggaccgggctgagttggycattgctggcaaccacattccttagctacaaaggcactactcctcctcagaggctgcctagcctggctggggttactggccgaagcctcctgcctcctgg

SEQ ID NO: 36296 - DNA, 201 bp, Homo sapiens
tgactttgcacttccctcccgggccccgcacccccgaaccgaccaccgatcgaccggcaccgctgttgcctcgtaagccatagcgcatgcgcgctctcagrataaacaggccctgcctgggacccacacgcctctgtcttttctgagcctcctccccgtggggtgagaggggtggagggatgaggctgtttcagggagccc

SEQ ID NO: 36297 - DNA, 201 bp, Homo sapiens
gctggtcctggaacctagagattagcaggttggttcagctggacctggagctggtctcctgtttacctggtgccttgtctgtcactctgtcggccggcccyatgccttccacccagagtgtctgctgtgtaaggttgtttgctgaagaatgtggggatcaggccaggggcctggacctgagggattgagggtagggctgcc

SEQ ID NO: 36298 - DNA, 201 bp, Homo sapiens
gcccagcccagggctggtgggggggctggccttgcaggggggctggctggtcctaagcccctgtctccaggctgagggttggggcctccctctttcccagscaccttccctcccccaggaggaagctccccctctgcctcaggcgtttgtccattgatttggacacaaacgcatggttcaccttcctgtggaaaaatccgg

SEQ ID NO: 36299 - DNA, 201 bp, Homo sapiens
tcccacccgcccacgacccctgggagccgaagccagactgggcacacaccggcagccacagctccgaagctggcaagaaggtatggcgggcttggcccacrgggaccaccctagcctctcccagaggctctctcagcttttgacgacgatctttgcctttggtcacctccagaagtcttggtctcttctgccttttggggc

SEQ ID NO: 36300 - DNA, 201 bp, Homo sapiens
tggaccccaaaccaccaaggtcacatgccctgatgcagcccacccttggagccctcctgtggccatgtggcagggtccccccttggggccacccagcaagsattgggggagaggtggtcctgggcctggctccaggatgcctctgtggaaccagctccccacccccacttctagaagcccccctcccctcactggtaggtc

SEQ ID NO: 36301 - DNA, 201 bp, Homo sapiens
gggtccctaggccacaccctgctccccacccagctaccctgtgcgcctgtgccctgctgggggcctgggctctccgaggggcctgaggatggaggccccamgtccccgaggagggcggcctctggacaggcccctcattccgcgcggcagctcccaggcctggggaacgtaggtgtgtgagagcggcacccgggaaggacg

SEQ ID NO: 36302 - DNA, 201 bp, Homo sapiens
tggtgccactgcccatgtgctgcccggaatgtgggccactgacccgctcctatcgcccattcgccccaggtggtgcaaaggatcaaggctgtggaggggcwgactcggctgctggtggtggaccaggagacagatgaggagctccgccggcggcagctgacctgtaccgaggagatggcccagcgagggctcccacccgcc

SEQ ID NO: 36303 - DNA, 201 bp, Homo sapiens
gggcttggttgaggcaggcgtggcagcgagggtgcacaggcagacaggtctgctggccgaagcccaccaagagtccattgatctcgtgccacagctccctrtgggggtgggggctgggtcagtgctgacagagggcgggcggggtgagctcttctccctaggaagccccccacatactcatacctaggcagccactcctcc

SEQ ID NO: 36304 - DNA, 201 bp, Homo sapiens
ctaagctcctgccccagcccctgcttgctgggcccacgggggtggggcggctcattttcctggaatgtgaaagcaaacagagccgccaccgcagccagccycacggaggcctctggagagaaaacaaaactgctggcctaggagcgcctgccccacgctctggaggagagcccggggcagggggacgcacaggcagagccc

SEQ ID NO: 36305 - DNA, 201 bp, Homo sapiens
ttgggcctgcaggatgtcagtgggcccctgagggagctgcgccctcggctctgccacctgcgaaagggacctcagggctatgggttcaacctgcatagtgwcaagtcccggcccggccagtacatccgctctgtggacccgggctcacctgccgcccgctctggcctccgcgcccaggaccggctcattgaggtaccggcc

SEQ ID NO: 36306 - DNA, 201 bp, Homo sapiens
ctgcctgtcactgccaggcgcccggtgcctgccccgccgcatctggagtccaccagaggcccgaggccccctgccgagtggaggagcacacactggggggkggtgtgcctctgtgcacatgtgtgcgtgtgcaggtgttgtgtgtgtctgtgaaaccacaatctgcccttggtttcccagctcaatggtggctctgcgtgc

SEQ ID NO: 36307 - DNA, 201 bp, Homo sapiens
cagaatgaccctgagaacactgaggggtccttggcctggcctcagggccccagacacccaccagatcctgcttcctgtctggtgccctgagaaaccctgcyccgcaggccgctgtgcaggcgtgggaagggctgccgggccagcactgtggggctggccgcatgtgtgggctgctgtgcgtgtttgcaggtgtgtgtggac

SEQ ID NO: 36308 - DNA, 201 bp, Homo sapiens
cccacagctaaagctctgtcacaggcagcctgggtgcccggagtgtttgccactgagacctgggcctgcccgtggggggcacggtaccgagtttgggcagyggcggcaccaccggggagtggcctctggaggcgggaggctggagcaagagactgaccctgtccgttgggcctgcaggatgtcagtgggcccctgagggag

SEQ ID NO: 36309 - DNA, 201 bp, Homo sapiens
ggcctggctcagtccctcctatctgttcaccacccctgctgagcccggcagctggtggggagccttgtccaccctcccccaggccgcaggtgggagtaggsctgcccctcttcctgcccacttcccagtgggcactgctttctctccgcgggtgtgcgctggccccccgcgtggtccagacacttcacaggcacctgcacg

SEQ ID NO: 36310 - DNA, 201 bp, Homo sapiens
cctgcccgtggggggcacggtaccgagtttgggcagtggcggcaccaccggggagtggcctctggaggcgggaggctggagcaagagactgaccctgtccsttgggcctgcaggatgtcagtgggcccctgagggagctgcgccctcggctctgccacctgcgaaagggacctcagggctatgggttcaacctgcatagtg

SEQ ID NO: 36311 - DNA, 201 bp, Homo sapiens
gggggctgggtcagtgctgacagagggcgggcggggtgagctcttctccctaggaagccccccacatactcatacctaggcagccactcctccagggcggygcgggtctcctctggggacttggttgccttcttggtccacctcagcctgttggcgattctgtgcacatgcgtgtccactgctgctgggaggccaagcggg

SEQ ID NO: 36312 - DNA, 201 bp, Homo sapiens; identical to SEQ ID NO: 8613

SEQ ID NO: 36313 - DNA, 201 bp, Homo sapiens
tgcttggcgggctcccccgtggacaccctgttgactttgcacttccctcccgggccccgcacccccgaaccgaccaccgatcgaccggcaccgctgttgcytcgtaagccatagcgcatgcgcgctctcaggataaacaggccctgcctgggacccacacgcctctgtcttttctgagcctcctccccgtggggtgagagg

SEQ ID NO: 36314 - DNA, 201 bp, Homo sapiens
acaccaaagctttattcaacaggcgtggcttcctgaagcgtaaagccacttcacagacggtggccacagcggcacctcggccagagccatgcggccatcaragaccctgggcggccgggcagagggcttggttgaggcaggcgtggcagcgagggtgcacaggcagacaggtctgctggccgaagcccaccaagagtccat

SEQ ID NO: 36315 - DNA, 201 bp, Homo sapiens
ttggggtccagcgtccacacaccccttttcctccaggtcccctgtccctcacagcaccgatgaatccataacctgtctacatggctggtcctggaacctaragattagcaggttggttcagctggacctggagctggtctcctgtttacctggtgccttgtctgtcactctgtcggccggccccatgccttccacccagag

SEQ ID NO: 36316 - DNA, 201 bp, Homo sapiens
agggctgccagggctggggccaggctgctgttggatagtcactgccaccctcgccctgggaacacctgcttttccaaggccctgtggggctggtctctgargactggacacacagaccatggtggactctccccactgccccaggagggcaagaggggcagttactgccccatttgacagttgaggaaactgatgccagag

SEQ ID NO: 36317 - DNA, 201 bp, Homo sapiens
ccaggctgagggttggggcctccctctttcccagccaccttccctcccccaggaggaagctccccctctgcctcaggcgtttgtccattgatttggacacraacgcatggttcaccttcctgtggaaaaatccggccctcggactttatctggagggtgcagtggcccaggcaccttgccttgggtgggaccttccccctc

SEQ ID NO: 36318 - DNA, 201 bp, Homo sapiens
tccccctctgcctcaggcgtttgtccattgatttggacacaaacgcatggttcaccttcctgtggaaaaatccggccctcggactttatctggagggtgcrgtggcccaggcaccttgccttgggtgggaccttccccctctgctatttcaggctctgggggctgcaggaagccctaggaggggcttcctctgggtgtatt

SEQ ID NO: 36319 - DNA, 201 bp, Homo sapiens
tttttagtagagacggggtttcaccatgttgctcaagctggtctcgaactcctgatctcaggtgatctgccctcctcgacctcccaaagttctgggattayaggtgtgagccactgtacccggcccctgaggtctgaggtttcatttctttctttctttttttttttttttgagacggagtttcactctgtcgcccaggct

SEQ ID NO: 36320 - DNA, 201 bp, Homo sapiens
ctaggcagccactcctccagggcggcgcgggtctcctctggggacttggttgccttcttggtccacctcagcctgttggcgattctgtgcacatgcgtgtmcactgctgctgggaggccaagcggggtgaacaggggcacactccaccagcctagcccgtgcccctccccgcccagaggcgagtctgccaccacccccgtg

SEQ ID NO: 36321 - DNA, 201 bp, Homo sapiens
agccgctggccaccgccgccgcaccctggcccaccccctggctgggaggtggtcattgggcctggccttgcctgcatggtcccctggcccagagccctacygcaggatgccagaggtaacatggggcagggcctgggatggtagcggggggtccttccgggcaccaggaggccctctgtgccctgtccacactaagctcct

SEQ ID NO: 36322 - DNA, 201 bp, Homo sapiens
ccagaggtaacatggggcagggcctgggatggtagcggggggtccttccgggcaccaggaggccctctgtgccctgtccacactaagctcctgccccagcscctgcttgctgggcccacgggggtggggcggctcattttcctggaatgtgaaagcaaacagagccgccaccgcagccagccccacggaggcctctggaga

SEQ ID NO: 36323 - DNA, 201 bp, Homo sapiens
aaactgctggcctaggagcgcctgccccacgctctggaggagagcccggggcagggggacgcacaggcagagccctcagggacaaccgccccaggaggccracggcgacagttcatcccacctggtgcttcctcccaccctgcctgtgcgccacgctggcctcgagccaaaggaattctcccagcaacccgggaaggcggc

SEQ ID NO: 36324 - DNA, 201 bp, Homo sapiens
cccacccgcccacgacccctgggagccgaagccagactgggcacacaccggcagccacagctccgaagctggcaagaaggtatggcgggcttggcccacasggaccaccctagcctctcccagaggctctctcagcttttgacgacgatctttgcctttggtcacctccagaagtcttggtctcttctgccttttggggct

SEQ ID NO: 36325 - DNA, 201 bp, Homo sapiens
gccagactgggcacacaccggcagccacagctccgaagctggcaagaaggtatggcgggcttggcccacagggaccaccctagcctctcccagaggctctmtcagcttttgacgacgatctttgcctttggtcacctccagaagtcttggtctcttctgccttttggggctccttttctgccccagggaccatcttgttgg

SEQ ID NO: 36326 - DNA, 201 bp, Homo sapiens
cagactgggcacacaccggcagccacagctccgaagctggcaagaaggtatggcgggcttggcccacagggaccaccctagcctctcccagaggctctctsagcttttgacgacgatctttgcctttggtcacctccagaagtcttggtctcttctgccttttggggctccttttctgccccagggaccatcttgttggcc

SEQ ID NO: 36327 - DNA, 201 bp, Homo sapiens
catccgctctgtggacccgggctcacctgccgcccgctctggcctccgcgcccaggaccggctcattgaggtaccggcccaccagggctgcggggtgccgrgtgccccgcacctgtccacactggggccctgggtccttgcagggaggagggagacgctgggaacctgagctggtgcgcctcctgctgcctcggtgggcgg

SEQ ID NO: 36328 - DNA, 201 bp, Homo sapiens
ctccctgtgggggtgggggctgggtcagtgctgacagagggcgggcggggtgagctcttctccctaggaagccccccacatactcatacctaggcagccaytcctccagggcggcgcgggtctcctctggggacttggttgccttcttggtccacctcagcctgttggcgattctgtgcacatgcgtgtccactgctgctg

SEQ ID NO: 36329 - DNA, 201 bp, Homo sapiens
gcgccctcggctctgccacctgcgaaagggacctcagggctatgggttcaacctgcatagtgacaagtcccggcccggccagtacatccgctctgtggacscgggctcacctgccgcccgctctggcctccgcgcccaggaccggctcattgaggtaccggcccaccagggctgcggggtgccgagtgccccgcacctgtc

SEQ ID NO: 36330 - DNA, 201 bp, Homo sapiens
aaaggcactactcctcctcagaggctgcctagcctggctggggttactggccgaagcctcctgcctcctggctaaggagaacagagccttttctctgtggkttctgacccctgaggtgtgtctgtctcccacaggccagggactccctccagaccctggttggggtccagcgtccacacaccccttttcctccaggtcccc

SEQ ID NO: 36331 - DNA, 201 bp, Homo sapiens
ctggggcttccccaccagctgccaggcctgccgggtggttcccatcctgtgcctgagtggagagggctatttaaaacccatctgagaaactgcggcccacrcgggtgccaaggggaagcggccccacccaccaagctgctttcaacagatccgcccaccaccatccagtgctcggcggggttggggagcagcctccccagg

SEQ ID NO: 36332 - DNA, 201 bp, Homo sapiens
tgcctgtcactgccaggcgcccggtgcctgccccgccgcatctggagtccaccagaggcccgaggccccctgccgagtggaggagcacacactgggggggkgtgtgcctctgtgcacatgtgtgcgtgtgcaggtgttgtgtgtgtctgtgaaaccacaatctgcccttggtttcccagctcaatggtggctctgcgtgct

SEQ ID NO: 36333 - DNA, 201 bp, Homo sapiens
ccctcccgaactgggctcctgtccccacgccttccctccgtcccaggccagcctgggggctgtgctccacttcccctcccgaactggactcctgtccccasgccttccctgcgtcccaggccagcctgggggccgtgctgtgactgcatccctgaggggcactttggtgggcaggtgtcagggtcagccttgaagccccac

SEQ ID NO: 36334 - DNA, 201 bp, Homo sapiens
ggagggcggcctctggacaggcccctcattccgcgcggcagctcccaggcctggggaacgtaggtgtgtgagagcggcacccgggaaggacgcctggcctytggctcagccctgcttggcgggctcccccgtggacaccctgttgactttgcacttccctcccgggccccgcacccccgaaccgaccaccgatcgaccggc

SEQ ID NO: 36335 - DNA, 201 bp, Homo sapiens
cccgcaggccgctgtgcaggcgtgggaagggctgccgggccagcactgtggggctggccgcatgtgtgggctgctgtgcgtgtttgcaggtgtgtgtggaygtcttgtgtctgtggctgtgtgatgtgtctttgcggactgggcccatatcacgctcccacctcctccactgaattgggctcctgtccccacgccttccct

SEQ ID NO: 36336 - DNA, 201 bp, Homo sapiens
ctgaagctgtctgtcttatcttcctggaggccctgatggcattatctccatgttctctcctacctttttttttttttttttttcattttcaaagagaaccytggccgggtgcggtggctcacgcctgtaatcccaacacttcgggaggctgagatgggtggatcacctgaggtcaggaattttgagaccagcttgactaat

SEQ ID NO: 36337 - DNA, 201 bp, Homo sapiens
agccccttcccagccccgcctggagaagaccctgggctaagggcaaggctctgggagcaccctgaagccctcacagcctgggcctcagtgtccggagcctragtgcagagggagggagccgctggagtccgggggtggggggcggggccggcaggcctcttggtgcagccacccgcccatgcagaccagccgcctgtccgc

SEQ ID NO: 36338 - DNA, 201 bp, Homo sapiens
ggcaaagagagaagcctgtactcagccaagggtgcagagatgttatatatgattgctcttcagggaaccgggcctccagctcacaccccagctgctcaacyacctcctctctgaattgactgtcccttctttggaactctaggcctgaccccactccctggccctcccagcccacgattcccctgacccgactccctttcc

SEQ ID NO: 36339 - DNA, 201 bp, Homo sapiens
aggatcatcttctcgaaccccgagtgacaagcctgtagcccatgttgtaggtaagagctctgaggatgtgtcttggaacttggagggctaggatttggggrttgaagcccggctgatggtaggcagaacttggagacaatgtgagaaggactcgctgagctcaagggaagggtggaggaacagcacaggccttagtgggat

SEQ ID NO: 36340 - DNA, 201 bp, Homo sapiens
ccaatcacctctgctcacctccctctttctctctctctctctctctccctccccctctctcccctgcaacacacacacacacacacacacacacacgcacrcatgcacgcaccacacactctgacgacctttaaaggcttcctgtggctggatgaaatctagaggctttacccttcttgcatggccctgcatgacctggcc

SEQ ID NO: 36341 - DNA, 201 bp, Homo sapiens
ggctctgaggaatgggttacaggagacctctggggagatgtgaccacagcaatgggtaggagaatgtccagggctatggaagtcgagtatggggacccccmcttaacgaagacagggccatgtagagggccccagggagtgaaagagcctccaggacctccaggtatggaatacaggggacgtttaagaagatatggccac

SEQ ID NO: 36342 - DNA, 201 bp, Homo sapiens
caagaagacaggggggccccagggctccaggcggtgcttgttcctcagcctcttctccttcctgatcgtggcaggcgccaccacgctcttctgcctgctgmactttggagtgatcggcccccagagggaagaggtgagtgcctggccagccttcatccactctcccacccaaggggaaatggagacgcaagagagggagag

SEQ ID NO: 36343 - DNA, 201 bp, Homo sapiens
agccaaaccttgagccctagagcccccctcaactctgttctcccctaggggctccctggtgttggcctcacaccttcagctgcccagactgcccgtcagcmccccaagatgcatcttgcccacagcaccctcaaacctgctgctcacctcattggtaaacatccacctgacctcccagacatgtccccaccagctctcctc

SEQ ID NO: 36344 - DNA, 201 bp, Homo sapiens
cctgggccttggtgggtttggttttggtttccttctctgtctctgactctccatctgtcagtctcattgtctctgtcacacattctctgtttctgccatgrttcctctctgttcccttcctgtctctctctgtctccctctgctcaccttggggtttctctgactgcatcttgtccccttctctgtcgatctctctctcgg

SEQ ID NO: 36345 - DNA, 201 bp, Homo sapiens
gggacctgagcgtccgggcccaggggctccgcacagcaggtgaggctctcctgccccatctccttgggctgcccgtgcttcgtgctttggactaccgcccmgcagtgtcctgccctctgcctgggcctcggtccctcctgcacctgctgcctggatccccggcctgcctgggcctgggccttggtgggtttggttttggtt

SEQ ID NO: 36346 - DNA, 201 bp, Homo sapiens
gcaaagagagaagcctgtactcagccaagggtgcagagatgttatatatgattgctcttcagggaaccgggcctccagctcacaccccagctgctcaaccrcctcctctctgaattgactgtcccttctttggaactctaggcctgaccccactccctggccctcccagcccacgattcccctgacccgactccctttccc

SEQ ID NO: 36347 - DNA, 201 bp, Homo sapiens
ctggaaaggacaccatgagcactgaaagcatgatccgggacgtggagctggccgaggaggcgctccccaagaagacaggggggccccagggctccaggcgktgcttgttcctcagcctcttctccttcctgatcgtggcaggcgccaccacgctcttctgcctgctgcactttggagtgatcggcccccagagggaagagg

SEQ ID NO: 36348 - DNA, 201 bp, Homo sapiens
cgccgcgtgccccgccccgctcactgtctctctctctctctctctttctctgcaggttctccccatgacaccacctgaacgtctcttcctcccaagggtgygtggcaccaccctacacctcctccttctggggctgctgctggttctgctgcctggggcccaggtgaggcagcaggagaatgggggctgctggggtggctc

SEQ ID NO: 36349 - DNA, 201 bp, Homo sapiens
ctcaactctgttctcccctaggggctccctggtgttggcctcacaccttcagctgcccagactgcccgtcagcaccccaagatgcatcttgcccacagcamcctcaaacctgctgctcacctcattggtaaacatccacctgacctcccagacatgtccccaccagctctcctcctacccctgcctcaggaacccaagcat

SEQ ID NO: 36350 - DNA, 201 bp, Homo sapiens
tgctggttctgctgcctggggcccaggtgaggcagcaggagaatgggggctgctggggtggctcagccaaaccttgagccctagagcccccctcaactctsttctcccctaggggctccctggtgttggcctcacaccttcagctgcccagactgcccgtcagcaccccaagatgcatcttgcccacagcaccctcaaacc

SEQ ID NO: 36351 - DNA, 201 bp, Homo sapiens
cccgggccccagccccgacctagaacccgcccgctgcctgccacgctgccactgccgcttcctctataaagggacctgagcgtccgggcccaggggctccrcacagcaggtgaggctctcctgccccatctccttgggctgcccgtgcttcgtgctttggactaccgcccagcagtgtcctgccctctgcctgggcctcgg

SEQ ID NO: 36352 - DNA, 201 bp, Homo sapiens
atcacctctgctcacctccctctttctctctctctctctctctccctccccctctctcccctgcaacacacacacacacacacacacacacacgcacgcaygcacgcaccacacactctgacgacctttaaaggcttcctgtggctggatgaaatctagaggctttacccttcttgcatggccctgcatgacctggcccct

SEQ ID NO: 36353 - DNA, 201 bp, Homo sapiens
tgagttcggaaattaggctttacctccagccctggggtgccaggcaggagaaaaccatgtggtaggctgagggggtagggtgacccattggggtgacctakatagggccttgggtcaccctctgcctcctccagcctgtggctgaaagtcagccatgaagtaatgggggacactgttactcatcccagaagcacccacact

SEQ ID NO: 36354 - DNA, 201 bp, Homo sapiens
attttctaggaagtttaagggtctcagctttttcttttctctctcctcttcaggatcatcttctcgaaccccgagtgacaagcctgtagcccatgttgtargtaagagctctgaggatgtgtcttggaacttggagggctaggatttggggattgaagcccggctgatggtaggcagaacttggagacaatgtgagaagga

SEQ ID NO: 36355 - DNA, 201 bp, Homo sapiens
aaaccttgagccctagagcccccctcaactctgttctcccctaggggctccctggtgttggcctcacaccttcagctgcccagactgcccgtcagcacccyaagatgcatcttgcccacagcaccctcaaacctgctgctcacctcattggtaaacatccacctgacctcccagacatgtccccaccagctctcctcctac

SEQ ID NO: 36356 - DNA, 201 bp, Homo sapiens
gctcgagggccaggatgtggagagtgaaccgacatggccacactgactctcctctccctctctccctccctccagcaaaccctcaagctgaggggcagctycagtggctgaaccgccgggccaatgccctcctggccaatggcgtggagctgagagataaccagctggtggtgccatcagagggcctgtacctcatctact

SEQ ID NO: 36357 - DNA, 201 bp, Homo sapiens
gaagcaactacagaccccccctgaaaacaaccctcagacgccacatcccctgacaagctgccaggcaggttctcttcctctcacatactgacccacggctycaccctctctcccctggaaaggacaccatgagcactgaaagcatgatccgggacgtggagctggccgaggaggcgctccccaagaagacaggggggcccc

SEQ ID NO: 36358 - DNA, 201 bp, Homo sapiens
ttcctgtctctctctgtctccctctgctcaccttggggtttctctgactgcatcttgtccccttctctgtcgatctctctctcgggggtcggggggtgctstctcccagggcgggaggtctgtcttccgccgcgtgccccgccccgctcactgtctctctctctctctctctttctctgcaggttctccccatgacaccac

SEQ ID NO: 36359 - DNA, 201 bp, Homo sapiens
tgtcctggttggggctgagccatggtctcaatatagagcccgagtcgatggtgaacctggcgtttgtcaagaatgactcgtatgagaagggcccggattcmgtggtggtgcacgtgtacgtgaaggagatctgcagggacacctcaagagtacttttccgtgagcaggacttcacgctcatcttccagaccaggtgggtgg

SEQ ID NO: 36360 - DNA, 201 bp, Homo sapiens
tctatgagctggttgtacgtggcaactgcttctgctacggacacgcctcagagtgtgcacccgccccaggggcaccagcccatgctgagggcatggtaagrggcttcagacggttgggatagggctaggggcaggggcggacatggctgagcagtgctgacaacctacctgccaacctctataggtgcacggagcttgcat

SEQ ID NO: 36361 - DNA, 201 bp, Homo sapiens
cacagcttcctcttaaccgtgggcagggctgcgatgtgaagcttgtgcccctgggcactttggggacccatcaaggccaggtggccggtgccaactgtgtragtgcagtgggaacattgacccaatggatcctgatgcctgtgacccccacacggggcaatgcctgcgctgtttacaccacacagagggtccacactgtgc

SEQ ID NO: 36362 - DNA, 201 bp, Homo sapiens
ccaacggcactttgctacttcttgccaccaggatgaatattcccagcagattgtgtgccactgccgggcaggctatacgggtgagtggatgggggcaggcrtgggatcagggtgagttggctgggctgagcactcacagcttcctcttaaccgtgggcagggctgcgatgtgaagcttgtgcccctgggcactttggggac

SEQ ID NO: 36363 - DNA, 201 bp, Homo sapiens
ggccattcaggccacaagtggatgaggcagtcagtctgtcagctcggcccaccagcaggtcgcccgtggcggggtagcagcttcccctggaacagccaggsacatccggggcaggggcctgtgccagtgtggcagccagcactggggacagtagctcagtcagttccgctgagttcctatccagtggctccacctcatgtg

SEQ ID NO: 36364 - DNA, 201 bp, Homo sapiens
ccgggccagaggccccacctgcaacgaggtatgggaccctcctgcagatccctggttagatggggccaggtgtctgtcttatctccagggcttagcctctkatagaggctctgaccctgccttgttcccaccccagttcacagggcagtgccactgccgtgccggctttggagggcggacttgttctgagtgccaagagct

SEQ ID NO: 36365 - DNA, 201 bp, Homo sapiens
cctcttatagaggctctgaccctgccttgttcccaccccagttcacagggcagtgccactgccgtgccggctttggagggcggacttgttctgagtgccargagctccactggggagaccctgggttgcagtgccatggtgagggagccagcggggccagggtagatggaggacttcccagaatgccccacagtgacccta

SEQ ID NO: 36366 - DNA, 201 bp, Homo sapiens
gctgaagcctctctaaacacccccctctccatcattgcaggcgtgaaattggggaggccactgagcacctgactcagctcgaggcagacctgacagatgtkcaagatgagaacttcaatgccaaccatgcactaagtggtctggagcgagataggcttgcacttaatctcacactgcggcagctcgaccagcatcttgact

SEQ ID NO: 36367 - DNA, 201 bp, Homo sapiens
tcagaccctggagttcctggtggcctctgtgccgaaggctatggactatgacctgctgctgcgcttagagccccaggttagaccctgttatctaatctggrgctgaacctctgggtgtgggagcatctcctccatcatcccgttttcccaggtccctgagcaatgggcagagttggaactgattgtgcagcgtccagggcc

SEQ ID NO: 36368 - DNA, 201 bp, Homo sapiens
gctatgcccccctacccagacatttcgccctgctgccatgctggtggaacgctcagcagactttggccgcacctggcatgtgtaccgatatttctcctatsactgtggggctgacttcccaggagtcccactagcacccccacggcactgggatgatgtagtctgtgagtcccgctactcagagattgagccatccactga

SEQ ID NO: 36369 - DNA, 201 bp, Homo sapiens; identical to SEQ ID NO: 8669

SEQ ID NO: 36370 - DNA, 201 bp, Homo sapiens
ccacctggcagacccagggctgattctttccacaatcttgccattaataggttgaggctgatgaacagctttgcataccaccgctgaactcccaaacctgyctcctgggctcagaggagaatttagcccctttggcaggagagaaagcagtgcctcccgggaatgacccagtctctccagccatggtccggagcagaaacc

SEQ ID NO: 36371 - DNA, 201 bp, Homo sapiens
cctccatccctggctgcattatctcccaggtgctcgatgtggtggagcgcctggtgacccccggggaaactccatcctggactggctcaggcttcgtgcgrctacaggaaggtcagaccctggagttcctggtggcctctgtgccgaaggctatggactatgacctgctgctgcgcttagagccccaggttagaccctgtt

SEQ ID NO: 36372 - DNA, 201 bp, Homo sapiens
gcctggtgacccccggggaaactccatcctggactggctcaggcttcgtgcggctacaggaaggtcagaccctggagttcctggtggcctctgtgccgaasgctatggactatgacctgctgctgcgcttagagccccaggttagaccctgttatctaatctggagctgaacctctgggtgtgggagcatctcctccatca

SEQ ID NO: 36373 - DNA, 201 bp, Homo sapiens
gaggccatgggtggggcaaaagtgagcagggctgcccaccagtagctttgagtccttgacttccgattcctgtcccaggtatccctgcggtcaccatccasctggacctggaggctgagtttcatttcacacacctcattatgaccttcaaggtgcctgcatatctgggagcctgcccgaatcaccctgcttggctctcca

SEQ ID NO: 36374 - DNA, 201 bp, Homo sapiens
aggctgggattgggcacggggagagaaagctgagcctggggcaggaactagagagctggactgctgtctaaattgcaggaaattggggttaggggcttggratagaacttgaccagggatccagggtgggatcccttaggcttaggagaggactggcagtgagctagttgagatagggtgagtgaccctgtatctcttttt

SEQ ID NO: 36375 - DNA, 201 bp, Homo sapiens; identical to SEQ ID NO: 8677

SEQ ID NO: 36376 - DNA, 201 bp, Homo sapiens
gcttgggaggctgaggtgggaggatatcttgaacccaggaggtcaaggctgcagtgagccaaggtcacgcactgtactccatccatcctgggcaacagagmccgcatctcaaataaacaaataaataaataaatcagaaaataaaaagaaaaaagatgagggattgaagaacaatttttgggatgggataaaagaacccaa

SEQ ID NO: 36377 - DNA, 201 bp, Homo sapiens
tgctgggtggtgatggggtctggaggtctgtttctggcccccagcaactcctttcgtgcagcctggccactggggcctgagccacgacctgctcggctgcygcccctgtgactgcgacgtgggtggtgctttggatccccagtaagtgttgtaaagggggcctgggaagggatggggaaagatcctgagcagaagagaagg

SEQ ID NO: 36378 - DNA, 201 bp, Homo sapiens
cactgccgccagcacatggttgggcgacgctgtgagcaggtgcaacctggctacttccggcccttcctggaccacctaatttgggaggctgaggacacccragggcaggtgtggggcctccccctaagcagagggctggatgtgggtggacacgtctatgactggagaggtggggttatgggcagtaccttgttgagggga

SEQ ID NO: 36379 - DNA, 201 bp, Homo sapiens
gagactggagcagctatgagtgggttggttggtgggcaggcttcccagggatgacacatttcttcttcctcctccctgcaggtgcattgctggtttccacrgggacccacggctgccatatgggggccagtgccggccctgtccctgtcctgaaggccctgggagccaacggcactttgctacttcttgccaccaggatga

SEQ ID NO: 36380 - DNA, 201 bp, Homo sapiens
tggcggggccagtgccacaggcccaaggagagggcccccaggactggaggacaccactagtaagaagaagcagaaggatcgagcaaaccaggagagcaagsatggagatcctaggaaaggtgggagtggcattcccagagtaattgtggccttctctgcctcccatcttattggtatacagattggggtttgggagatgac

SEQ ID NO: 36381 - DNA, 201 bp, Homo sapiens
gggtgatcagtaccagacggtgaaggccctagctgagcgcaaggcccaaggtgtgctggctgcacaggcaagggcagaacaactgcgggatgaggctcggracctgttgcaagccgctcaggacaagctgcagcggctacagggtaagaaatggggcaccagagacacaagactgcgggaaaccccccctaaactgacacc

SEQ ID NO: 36382 - DNA, 201 bp, Homo sapiens
gattgcagagcgagtccggagcctggcagatgtggatgcgatcctggcacgtactgtaggagatgtgcgtcgtgccgagcagctactgcaggatgcacggygggcaaggtctgaccccatccctggcccctatccctgacacctggttttgatacctccaggttctgattcccccttctccccaggagctgggctgaggat

SEQ ID NO: 36383 - DNA, 201 bp, Homo sapiens
tcacggattcagagtgagtgctccaccctttgagtctggcacagtccgtgtccggctagggactatttggggcctcagtaactattttgggtgcttcctarggcaggtgccaagcccagtttagctcgggtggcagtgtataggaggtctttcaaggtgaccttggcagctgagcccctgggtggacatggggcagcaagg

SEQ ID NO: 36384 - DNA, 201 bp, Homo sapiens; identical to SEQ ID NO: 8639

SEQ ID NO: 36385 - DNA, 201 bp, Homo sapiens
tgggtgtagctaaagagcaagttgttgggtcttggcagtgatcactggcttctttccattaggctgtccgttccttgctggagaatttggccacaaagagytgccaagatagctgggccaggaagaaagcgccgcagccctgacccagacgctgttgccgaccccggggcactctggctgtcgaccaagcggctcaagatg

SEQ ID NO: 36386 - DNA, 201 bp, Homo sapiens
gctcacttttgccccacccatggcctcaccattctctgactgccaccaggctgcccgccgctgtggtgcaaagctggtgactacattctggatgcgatggstgtgtgggttgtctctagcagagaaggggcgccgggagtcacaaaggaagcacttcttttcgtcctgggttggatggggattagaatcagtgcctcaggc

SEQ ID NO: 36387 - DNA, 201 bp, Homo sapiens
aggccaaccaggaacttcaagaacttatccagagtgtgaaggacttcctcaaccgtgagcctcccacgtgtcccaggccatgtggttgtcccctttggcawctcccggtgtctgtatctcccttggttcatacttgagcctcagggactacactggattagtgtttatgatcccttgactggctcctgagttattgcccat

SEQ ID NO: 36388 - DNA, 201 bp, Homo sapiens
agagggtccacactgtgcccactgcaagcctggcttccatgggcaggctgcccgacagagctgtcaccgtgagtatgagtgtgggagggcatggctgaattggggttctgcttcttggcctcctcttgactactgtgctcatcttggttggcacaggctgcacatgcaacctgctgggcacaaatccgcagcagtgcccat

SEQ ID NO: 36389 - DNA, 201 bp, Homo sapiens
gcatgtcagtgcaaccctcaaggttcactgagttctgagtgcaaccctcatggtggtcagtgcctgtgcaagcctggagtggttgggcgccgctgtgacckctgtgcccctggctactatggctttggccccacaggctgtcaaggtactcttctgccccttgttccctcctatgcttctctctccttcccattactgttc

SEQ ID NO: 36390 - DNA, 201 bp, Homo sapiens
gtgattgtgaccccatgggttctcaagacggtggtcgctgtgattcccatgatgaccctgcactgggactggtctccggccagtgtcgctgcaaagaacaygtggtgggcactcgctgccagcaatgccgtgatggcttctttgggctcagcatcagtgaccgtctgggctgccggcgtatgtgtctcctgccctaacttc

SEQ ID NO: 36391 - DNA, 201 bp, Homo sapiens
ccgttttcccaggtccctgagcaatgggcagagttggaactgattgtgcagcgtccagggcctgtgcctgcccacagcctgtgtgggcatttggtgcccarggatgatcgcatccaagggactctgcaaccacatgccaggtgagggcactggtggtagcactcacaatggcagggggttgtggggccagccctaagctcc

SEQ ID NO: 36392 - DNA, 201 bp, Homo sapiens
tagaggagggggctgatcctgatagcattgaaatggtggccacacgggtgctagagctctccatcccagcttcagctgagcagatccagcacctggcgggygcgattgcagagcgagtccggagcctggcagatgtggatgcgatcctggcacgtactgtaggagatgtgcgtcgtgccgagcagctactgcaggatgcac

SEQ ID NO: 36393 - DNA, 201 bp, Homo sapiens; identical to SEQ ID NO: 8653

SEQ ID NO: 36394 - DNA, 201 bp, Homo sapiens
cggctcgggtctctaaacagccccttacccgcctcgacgtccctggggcatgggggagggacgcgaccttcggctggggcctgggtgcaagaaggaggcgycggtggcaggtgtcattaaagatccagcccaccagtaccacatctgacctgtagaagggtatcctgccatccctccttcctcctttacacacttagggga

SEQ ID NO: 36395 - DNA, 201 bp, Homo sapiens
ggggctggctgtggcagaagaggcaaagcctcacctgagcctccatccctggctgcattatctcccaggtgctcgatgtggtggagcgcctggtgaccccyggggaaactccatcctggactggctcaggcttcgtgcggctacaggaaggtcagaccctggagttcctggtggcctctgtgccgaaggctatggactatg

SEQ ID NO: 36396 - DNA, 201 bp, Homo sapiens
cagtttccacaagaagaaaattgtgactgatgtgtcagaggtctgcagcatctataccactgccacttctctctctggatccctcctatcagaatgttcaraccggcctgtcatgaacagaacaagtggtgctccgtcctcttggcactcctcctctatgtatttgctaagccccttaaacactctaagtatttcaaacaa

SEQ ID NO: 36397 - DNA, 201 bp, Homo sapiens
tccaaatggaaactgaaatatttgttgaaatgtttaaatttgctgataacaaatgttctgaaagaagtaaactagccgggcgcagtggcgtgcgcctgtartcccagctactcgggaggctgaggcaggaggatcgcttgagcccaagagttcatatctagcctggtcaacatagcaagacccctgtctctatttttttaa

SEQ ID NO: 36398 - DNA, 201 bp, Homo sapiens
ccccaaagcgctggaagctgcgagctcgcccaagcctaaccgtgaccccaagacgcctggggctgcgagctcggcccccgcagaagtgcagcacaccctgyggcccgctccgacttccgcccttccccagccgcgactccggccgcctcagcccggacctcagcgtgtgcggccagcccagggacggcgacgagctgggca

SEQ ID NO: 36399 - DNA, 201 bp, Homo sapiens
ttcttcaacagcagcggcagcagcgacgccagcatcggcgacccctcgcagtccgacgatcctgacgatcccgacgaccccgacttccccggcagcccggwgaggcggcggcggaggtgtcccggcggccgagtgcccaaggaccggcccagcctgaccgtgaccccaaagcgctggaagctgcgagctcgcccaagccta

SEQ ID NO: 36400 - DNA, 201 bp, Homo sapiens
acaggccaggactcttgtcaagagagagggcttcaagaggccgtccggagagagcatcaggaggccagtgttcccaagggccgcattgtgccaaggggaayagacaggctggagagaactagatcaagccggaagagcaaacatcaggaggcaacggaaacctctctcctccattcccaccgctttaaaaagggccaaaag

SEQ ID NO: 36401 - DNA, 201 bp, Homo sapiens
gcaacggaaacctctctcctccattcccaccgctttaaaaagggccaaaagctgggaaaagattcgttccccacccaggacctgactcctttacagaatgyctgcttttggaccaaaaccagggcttccttcagtttccacaagaagaaaattgtgactgatgtgtcagaggtctgcagcatctataccactgccacttct

SEQ ID NO: 36402 - DNA, 201 bp, Homo sapiens
tgctctgccagcacagtctgtttaagtaagctaaatgtatcttactgccccgaaatgagaggagactggtcttgaagcctctggtgctgtttcaacctccrtccccacaggagggtggaactcccattctcacaggtttccagtcagcttttcaaacaagaattttgtttccaaatggaaactgaaatatttgttgaaatg

SEQ ID NO: 36403 - DNA, 201 bp, Homo sapiens
ttcaaacaagaattttgtttccaaatggaaactgaaatatttgttgaaatgtttaaatttgctgataacaaatgttctgaaagaagtaaactagccgggcrcagtggcgtgcgcctgtagtcccagctactcgggaggctgaggcaggaggatcgcttgagcccaagagttcatatctagcctggtcaacatagcaagacc

SEQ ID NO: 36404 - DNA, 201 bp, Homo sapiens
tcaaacaaaaaggcatctgatgctgaaaaggtttatggggaatgcagtcagaagggtcctgtcccctttagccattgccttcccacagaaaaactgcaackctgtgagaagattggggaaggggtgtttggcgaagtgtttcaaacaattgctgatcacacacccgtagccataaaaatcattgctattgaaggaccagat

SEQ ID NO: 36405 - DNA, 201 bp, Homo sapiens
aaccagggcttccttcagtttccacaagaagaaaattgtgactgatgtgtcagaggtctgcagcatctataccactgccacttctctctctggatccctcytatcagaatgttcaaaccggcctgtcatgaacagaacaagtggtgctccgtcctcttggcactcctcctctatgtatttgctaagccccttaaacactct

SEQ ID NO: 36406 - DNA, 201 bp, Homo sapiens
tctctggcctcgccctgccccgggtccccaacgccaagggacagtgtcatctcgatcggcacctccgcctgtctggttgcagcctcagccgtcccgagcgrcctccacctcccagaagtctccctggaccgagcatctctcccctgctcccaggaggaagcgacaggaggagccaaggacaccaggatggtccaccaaacc

SEQ ID NO: 36407 - DNA, 201 bp, Homo sapiens; identical to SEQ ID NO: 15305

SEQ ID NO: 36408 - DNA, 201 bp, Homo sapiens; identical to SEQ ID NO: 15306

SEQ ID NO: 36409 - DNA, 201 bp, Homo sapiens
gttgtttttttcgcccccgcccagcggccggatcgcatctcagctggttggctttggttagagctcccgtcagactttcgttcggccctaggatttggtakccccgaagtgtgggctctctccagtaccagactcatttcagtaccagcctttgggaagtcgtgtgaatacctcggtctcttagccacagggatagaatgg

SEQ ID NO: 36410 - DNA, 201 bp, Homo sapiens
aggctgaggtgggaggatagcttgagcctgggagggaggtagacgttgcaatgagccgagattatgctattgcactctaacctgggcgacagagccagaayctgtctcaaaaaaaaaattaaaattaaaaaacccaataaatgttcagtgctgttctggcatttggaaattagttaataattagtccctcttgcttttttt

SEQ ID NO: 36411 - DNA, 201 bp, Homo sapiens
aatttctgaatactaacatcctagcattctaaaagtatttaaaactattgttttttaaaataggaaaacggacgatgtattactaagctggaaaacatggsgtttcgagtgggacaaggattgatagaaaggtgagcaggttggatttgaaaattttcttgcaggtaggttataaacaaaggtgatctatttcaaaagatt

SEQ ID NO: 36412 - DNA, 201 bp, Homo sapiens
caatttctgaatactaacatcctagcattctaaaagtatttaaaactattgttttttaaaataggaaaacggacgatgtattactaagctggaaaacatgsggtttcgagtgggacaaggattgatagaaaggtgagcaggttggatttgaaaattttcttgcaggtaggttataaacaaaggtgatctatttcaaaagat

SEQ ID NO: 36413 - DNA, 201 bp, Homo sapiens
accttataattcactttttcttaaactgtttcagggaaaaaagtataaatgtttacattaatatttttaaccaatcttgtaaaacaatttctgaatactawcatcctagcattctaaaagtatttaaaactattgttttttaaaataggaaaacggacgatgtattactaagctggaaaacatggggtttcgagtgggaca

SEQ ID NO: 36414 - DNA, 201 bp, Homo sapiens
aaaaattaaccaggcatggtggtgggtgcttataattccagctacttaggaacctgaggcaggagaatcacttgaaccctgtagatggaggttgcagtgarccgagatggccccactgtactgcagcctggatgacagagcgagactccatctcaaaataaatttaaaaaatgtatccttctattgaagtttttaggttaa

SEQ ID NO: 36415 - DNA, 201 bp, Homo sapiens
gagccgagattatgctattgcactctaacctgggcgacagagccagaacctgtctcaaaaaaaaaattaaaattaaaaaacccaataaatgttcagtgctrttctggcatttggaaattagttaataattagtccctcttgctttttttggaggagaaatactgtattacttctagttgatctttttaggtttacaaaaga

SEQ ID NO: 36416 - DNA, 201 bp, Homo sapiens
aatgtactgggatttacaggcatgagtcactacatcaggcctggactttattttgaagaaaggggagcaggtgctgaaattccagtagagaataacatgattttttttttagacagagtttcactgttattgcccaggctggaatgcaatggggtgaccttggctcactgcaacctccgcctcctgggttcaagcaattct

SEQ ID NO: 36417 - DNA, 201 bp, Homo sapiens
aaaatgttatgtgtattacaccttgcataagtcctcattctactacgtgttaactaaccctctagatgataatgcagatgctaactgtgggattttatttrtaagaactctagaataaataccagttattcctaccaacatcggctgttactaatattctgaagtagttagtgcaacttttcattgtgttgtggttggtct

SEQ ID NO: 36418 - DNA, 201 bp, Homo sapiens
atgagtcactacatcaggcctggactttattttgaagaaaggggagcaggtgctgaaattccagtagagaataacatgattttttttttagacagagtttyactgttattgcccaggctggaatgcaatggggtgaccttggctcactgcaacctccgcctcctgggttcaagcaattctcctgcctcagcctcccgagta

SEQ ID NO: 36419 - DNA, 201 bp, Homo sapiens
aatacgcagaagggatgggtgacattttttcattctcatgacgcatgtttctgtaagttaatgacttgttaggtagctattaaggaactagagttgataartaaatgtgtataggttccttttgcaatataactggttattacttgatccaagtgtttaacatttggagctaagtctgaccatacattactgtgatagaat

SEQ ID NO: 36420 - DNA, 201 bp, Homo sapiens
tgcccaggctggaatgcaatggggtgaccttggctcactgcaacctccgcctcctgggttcaagcaattctcctgcctcagcctcccgagtagctgggatwacaggcatgcgccaccatgcccagctaatgttttatgtttttagtagagatggggtttttccgtgtcggtaaagctggtctcgaactcctgacctcaggt

SEQ ID NO: 36421 - DNA, 201 bp, Homo sapiens
aagctgattagcggccccatacccagagtttctgattaagtaaattgggagtgggactagagaatttgcaagttcccatgtgatgctgatgttgctggtcttttttttttttttttttctggtgacgaagtctcgccctgtcacccagactggagtgcagtggcatgatctcggctcgctgcaatctctgcctcctgggtt

SEQ ID NO: 36422 - DNA, 201 bp, Homo sapiens
ttaataaaatgaatatcatttgaatatgcatacttcgaaggtcctgtgggaccactagatgtctatgcccaataaagtctgtactagaaacgcagatttartagtcacagcaccataagcagagtgcatggttccttagaagaaagtttagcaaataataagccctatggtttccttagtgggagacaaacagccttcaga

SEQ ID NO: 36423 - DNA, 201 bp, Homo sapiens
atagcggggccatttcacaaagtgagtgaggtccatattgggtggatgtcctgtccaatgccagaattcttaggccttttctcaaacaggggattcaccactttctttctttctttttttttttttttttttgagatggagtcttgctgtgttgcccaggctagagtgcaatggtgcgatctcggctcaccacaacctccg

SEQ ID NO: 36424 - DNA, 201 bp, Homo sapiens
tagcggggccatttcacaaagtgagtgaggtccatattgggtggatgtcctgtccaatgccagaattcttaggccttttctcaaacaggggattcaccactttctttctttctttttttttttttttttttgagatggagtcttgctgtgttgcccaggctagagtgcaatggtgcgatctcggctcaccacaacctccgc

SEQ ID NO: 36425 - DNA, 201 bp, Homo sapiens
aactcctaagctcaagcaatccttggcctcccaatgtactgggatttacaggcatgagtcactacatcaggcctggactttattttgaagaaaggggagcrggtgctgaaattccagtagagaataacatgattttttttttagacagagtttcactgttattgcccaggctggaatgcaatggggtgaccttggctcact

SEQ ID NO: 36426 - DNA, 201 bp, Homo sapiens
gcggggccatttcacaaagtgagtgaggtccatattgggtggatgtcctgtccaatgccagaattcttaggccttttctcaaacaggggattcaccactttctttctttctttttttttttttttttttgagatggagtcttgctgtgttgcccaggctagagtgcaatggtgcgatctcggctcaccacaacctccgcct

SEQ ID NO: 36427 - DNA, 201 bp, Homo sapiens
gctgccctcgaactcctaagctcaagcaatccttggcctcccaatgtactgggatttacaggcatgagtcactacatcaggcctggactttattttgaagraaggggagcaggtgctgaaattccagtagagaataacatgattttttttttagacagagtttcactgttattgcccaggctggaatgcaatggggtgacc

SEQ ID NO: 36428 - DNA, 201 bp, Homo sapiens
agcctagatcacaccactgcactccagcctgggcgacagagcaagactctgtctcaaataaacaaataaatccgggtgcggtggctcacgcctataatccsagcacttcaggaggccaaggcgggtggatcacctgaggttgggagttcaagaccagccctgccaacatggagaaaccccgtctctactaaaaatacaaaa

SEQ ID NO: 36429 - DNA, 201 bp, Homo sapiens
aaaaagaaaacttggccaatgggaaggagacttttaataactttaaaaaacacttaaattgtttcataagaataaaataattttaaggactgctaggtacrttgactttggattttttttctatttttggaacagggcatctatgtacttcaggacaacaaatttcgcctgcttactcagatgtctgcaggaaaacagtat

SEQ ID NO: 36430 - DNA, 201 bp, Homo sapiens
cccactgcccaggtagagctgatctatcaagacaggagaattgcaataaggagtttatgtagagctgctaaatgggagagcagagttttattattgctcawatcagcctccccaaacatgcagagtctagggtttatcaaggatagtttggtaggctgggggctggggaatgggtgctcctggttggttggggatgcagtt

SEQ ID NO: 36431 - DNA, 201 bp, Homo sapiens
gagtttctgattaagtaaattgggagtgggactagagaatttgcaagttcccatgtgatgctgatgttgctggtcttttttttttttttttttctggtgaygaagtctcgccctgtcacccagactggagtgcagtggcatgatctcggctcgctgcaatctctgcctcctgggttcaagcgtttctcctgcctcagcctc

SEQ ID NO: 36432 - DNA, 201 bp, Homo sapiens
tttttgtattttctctactaaaaatacaaaaattaaccaggcatggtggtgggtgcttataattccagctacttaggaacctgaggcaggagaatcacttraaccctgtagatggaggttgcagtgagccgagatggccccactgtactgcagcctggatgacagagcgagactccatctcaaaataaatttaaaaaatgt

SEQ ID NO: 36433 - DNA, 201 bp, Homo sapiens
aggggtcacaaattccccgattaagaactcttgggatgaacaatctctaaggcctcttccagcttaaaatttcatgactcagatctagttacttattagtrcccatttatgtatattatttataagataatattttatattattcgtagataatgtagtatgttgaacatcatgcagtatagatgtgggtaatcaaaaatt

SEQ ID NO: 36434 - DNA, 201 bp, Homo sapiens
ttgctttgggtatatgtatattgttacttgtagccaaaaagaaacctctcttagtagaaacaaagggagagttaggttattcaaaaattagtatgggacarttgaatatgcctttttctgcgggagtaggtggggagaaacttaaaggttcacttgtaaaacaataaagtactaaagaaaatgtgataatactttcgtgat

SEQ ID NO: 36435 - DNA, 201 bp, Homo sapiens
acatctggttactatcctgggaaaatcacttctatagagatggccttccaagtggttttaaaatgtatctttctgtctgggcgcggtggctcacgcctgtwatccctgcactttgggaggccaaggcaggtggattgcttgaggtcaggagtttgagaccagcatggccaacattttgtatttttgtattttctctactaa

SEQ ID NO: 36436 - DNA, 201 bp, Homo sapiens
ttagaagcataccattttcctttcatggaagggtacagtattacaaagataatttgtttaacttgatttattaaattctagttatgtgccctataatgatktttcagtcagtgacagacctcatatatggcagtggttccataagattacaatactgtatttttactgtaccttctttatgtttagatatgcaagtactta

SEQ ID NO: 36437 - DNA, 201 bp, Homo sapiens
ccctcccctcccctcccctcttcttttcttttctttctcttctcttctcttttctttctttcatggggtcccttgctcaacctgttgcccaggctggagtkcaatgacatgatcatggctcagtgcagcctcaacttcctggactcaagcaatccacctgcatcagcctccaaaatggcacatgctaccatgcccagctat

SEQ ID NO: 36438 - DNA, 201 bp, Homo sapiens
tcccaagtagctgggactataggtgcatgccaccatgttcacctaatttttgtaatttttttaaagatgaggtttcactatgttgcccaggctgccctcgwactcctaagctcaagcaatccttggcctcccaatgtactgggatttacaggcatgagtcactacatcaggcctggactttattttgaagaaaggggagca

SEQ ID NO: 36439 - DNA, 201 bp, Homo sapiens
agctaattaaaaaaatttttttttgtagaaacagagtcttgctatgttgctcaggctggtctcagactcctagtctcaagtgaccctcctgcctcagcctmctacggtgctgggattataggcatgagcactgcgcctggcctcatcctaagcatgtttgagaagtgtggagaatagcagaaaaactgaagatagtgatac

SEQ ID NO: 36440 - DNA, 201 bp, Homo sapiens
gccagggatatagtagtgaatgaaacaatggccccatccttgtagagatttttttttaatctaatttaatccgaaatgtgatagtatgtagcggttacttmtaatatgtgggagtccttattcaatcattgtgggcctgtcactgctgacactgctagataaattaaataaaataatactcctgcctcacagtatttaggg

SEQ ID NO: 36441 - DNA, 201 bp, Homo sapiens
gatttctaggtgccagggatatagtagtgaatgaaacaatggccccatccttgtagagatttttttttaatctaatttaatccgaaatgtgatagtatgtrgcggttacttctaatatgtgggagtccttattcaatcattgtgggcctgtcactgctgacactgctagataaattaaataaaataatactcctgcctcac

SEQ ID NO: 36442 - DNA, 201 bp, Homo sapiens
atgagagaaaattatgtaccaacagaattatttgtgagaagaatgaacaaattttgataaagtatgaatttgttttattttaaaaagcaaacatactaaattttttttattttattgcttataatttattaagaatgtttacacctgtataaggatttcatatatacattgtatgtgtgtatatataaatacatatatgac

SEQ ID NO: 36443 - DNA, 201 bp, Homo sapiens
aaatttggtgcctactcaaaagtgcatgaacaagtagcaaaattaagtagtagggcttaattcaaaagctcatgtgatcataggatttgaaagtgtctgcrtataagcatattgtaactgcccagtgggttcttcttccccactgcccaggtagagctgatctatcaagacaggagaattgcaataaggagtttatgtaga

SEQ ID NO: 36444 - DNA, 201 bp, Homo sapiens
ggatttttctcctcttctaagagaaaacaatagtgaaattattttctttctcttttctctctgtttctgtctctttctctctctctttctcccttcccttyccttccctcccctcccctcccctcttcttttcttttctttctcttctcttctcttttctttctttcatggggtcccttgctcaacctgttgcccaggctg

SEQ ID NO: 36445 - DNA, 201 bp, Homo sapiens
gggtgactgacacaccaaacaagatgtttcactgggtactctgccatagaaatggcagattaagaagattgactataccaaacattatattaaaaacacaraataaaaactataaaaatgtactttaggacattaaagaaaactcaagttagaagcataccattttcctttcatggaagggtacagtattacaaagataat

SEQ ID NO: 36446 - DNA, 201 bp, Homo sapiens
ggctaatggataaaatgttctcaagttgaatttttcttaaaaatttggtgcctactcaaaagtgcatgaacaagtagcaaaattaagtagtagggcttaaktcaaaagctcatgtgatcataggatttgaaagtgtctgcatataagcatattgtaactgcccagtgggttcttcttccccactgcccaggtagagctgat

SEQ ID NO: 36447 - DNA, 201 bp, Homo sapiens
tagaaagtggaattctgtaggccttgtttaaggatgggagtgggagttgaaaattatcgtcaggttttcagcttgagcagctgggttggatggtggtactrttaatcagaaaaggaaataaaggagaagaaaaaaataaggaggtaagataatgagttatttcggggcaggttgaacttttgaggtgcctgtatgacatcc

SEQ ID NO: 36448 - DNA, 201 bp, Homo sapiens
ttgtagagatttttttttaatctaatttaatccgaaatgtgatagtatgtagcggttacttctaatatgtgggagtccttattcaatcattgtgggcctgycactgctgacactgctagataaattaaataaaataatactcctgcctcacagtatttagggaatagtgatttaatgaatagttaacactgagtattggct

SEQ ID NO: 36449 - DNA, 201 bp, Homo sapiens
aggataattagggaacataatttaaattaattatttcagaaagtatttatttagtgcccttatgtcagagcgatttctaggtgccagggatatagtagtgmatgaaacaatggccccatccttgtagagatttttttttaatctaatttaatccgaaatgtgatagtatgtagcggttacttctaatatgtgggagtcctt

SEQ ID NO: 36450 - DNA, 201 bp, Homo sapiens
actgagtctagattcacagtcctggactggagtacttaattggctgagcttaagtcttaagtcctacgtccatgctttagtttccagggagctgggaaatmtatcaatatttttcagtaatttgaacagttcttcaaaatcctttttttaaacaggaatgacttactgatgataaatcatgtaatgttgtatttatcaata

SEQ ID NO: 36451 - DNA, 201 bp, Homo sapiens
atagagctggccgaatgccggggtagaggggaccggaagttgtttttttcgcccccgcccagcggccggatcgcatctcagctggttggctttggttagasctcccgtcagactttcgttcggccctaggatttggtagccccgaagtgtgggctctctccagtaccagactcatttcagtaccagcctttgggaagtcgt

SEQ ID NO: 36452 - DNA, 201 bp, Homo sapiens
gccggggtagaggggaccggaagttgtttttttcgcccccgcccagcggccggatcgcatctcagctggttggctttggttagagctcccgtcagactttmgttcggccctaggatttggtagccccgaagtgtgggctctctccagtaccagactcatttcagtaccagcctttgggaagtcgtgtgaatacctcggtct

SEQ ID NO: 36453 - DNA, 201 bp, Homo sapiens
gctgagatcgtgctatcattgcactccagcctggggtataagagcaaaactccatctcaaaaaaaaaaaaaaagaaaaaaaagaaacactataactaaatracagtgaaatgtagatgtatggtagatcactttttttttttttttaagacaaggtcttgctctgtcatctaggctggagtgtagtggtacaatcatggcc

SEQ ID NO: 36454 - DNA, 201 bp, Homo sapiens
agacacaaactacctttactgcctccagaactaattctgatcagtttctggcttgtttttgtcactgagtctagattcacagtcctggactggagtacttmattggctgagcttaagtcttaagtcctacgtccatgctttagtttccagggagctgggaaatctatcaatatttttcagtaatttgaacagttcttcaaa

SEQ ID NO: 36455 - DNA, 201 bp, Homo sapiens
tagccacagggatagaatggcggcctgacggagccgcggcgccggcgaagtcgctgaggcgcgagctggaacccccagaccagctcaaacgggagccaaamctcgaagcttggaagaattagcaggaaatggcggatgaggcgttgtttttgcttctccataacgagatggtgtctggagtgtacaagtccgcggagcagg

SEQ ID NO: 36456 - DNA, 201 bp, Homo sapiens
catcaggtaattaaattaattaaggcctatattttaaagtcctttaacttgatataaatatcgtattttagtgacttatttaaaacctaaaataatttctrgttaactttggaatatgtttatgttattaatgagttattagtttttttcttctaatagtgtgaactgagtaaagacaaagggacagttatcagtaatgat

SEQ ID NO: 36457 - DNA, 201 bp, Homo sapiens
ctaattctgatcagtttctggcttgtttttgtcactgagtctagattcacagtcctggactggagtacttaattggctgagcttaagtcttaagtcctacrtccatgctttagtttccagggagctgggaaatctatcaatatttttcagtaatttgaacagttcttcaaaatcctttttttaaacaggaatgacttactg

SEQ ID NO: 36458 - DNA, 201 bp, Homo sapiens
atcctttttttaaacaggaatgacttactgatgataaatcatgtaatgttgtatttatcaatagctttactattttagtaaatccttactatttttaatgrttttttttccttttagtatttagcatttacgtgtggcttaatcagaggtggcttatcaaacttgggaataaaaagtattgtaacagctgaagtgtcttca

SEQ ID NO: 36459 - DNA, 201 bp, Homo sapiens
ttcctcttccagctgagcagagttggataattgaattagtcattctgacattctttggaccatatcatcttagtggtttggggtcagtgctcatctgatawatctttcttaccacctcttctacttactttctcttacttaaattatctggcataagcagttatctccagcttttgttagaatcttgcatgttgattacta

SEQ ID NO: 36460 - DNA, 201 bp, Homo sapiens
aggcgggagctttaggtcttattttatcttgctctgcccccgacatcgtggtgagaggggaaccttcctcatatctgggcgctggcctctccgggcttggragagaggaactcagtgatcatagagctggccgaatgccggggtagaggggaccggaagttgtttttttcgcccccgcccagcggccggatcgcatctcag

SEQ ID NO: 36461 - DNA, 201 bp, Homo sapiens
tttacttttttgtcataacccccgatccccccaaaccacttgcgtattcagttctcttcattctcccctcccttcttacctttcctcttctctctctctctttttttttttttttagatggagttttgttcttgtctcccaggctggagtgcagtggtgtgatctcagctcactgcagcctccgcctcttgggttcaagcg

SEQ ID NO: 36462 - DNA, 201 bp, Homo sapiens
cctggtgggttggtttgaagatgctaatttgtgtgccatctacggtaagagagttggctctcatgcccaaagacatccagttggctcgccagacacggagwgagcgagcttaagtgaaggcagattttaaggcattttatatgaattctgtaaaatactttggtttaatttgtgactttttggggagaaattatttataat

SEQ ID NO: 36463 - DNA, 201 bp, Homo sapiens
ttacttttttgtcataacccccgatccccccaaaccacttgcgtattcagttctcttcattctcccctcccttcttacctttcctcttctctctctctctttttttttttttttagatggagttttgttcttgtctcccaggctggagtgcagtggtgtgatctcagctcactgcagcctccgcctcttgggttcaagcga

SEQ ID NO: 36464 - DNA, 201 bp, Homo sapiens
ttgtctttggtctgtacttgtgggccagcttaagcagctaagtagctatttggcggtgcagggcctgggtgaactggttaattgtaggaggcactttcagytgcttacagaggatggctttgtgccactgcaacctgatatagcggggccatttcacaaagtgagtgaggtccatattgggtggatgtcctgtccaatgcc

SEQ ID NO: 36465 - DNA, 201 bp, Homo sapiens
acccccgatccccccaaaccacttgcgtattcagttctcttcattctcccctcccttcttacctttcctcttctctctctctctttttttttttttttagwtggagttttgttcttgtctcccaggctggagtgcagtggtgtgatctcagctcactgcagcctccgcctcttgggttcaagcgattctcctgcttcagcc

SEQ ID NO: 36466 - DNA, 201 bp, Homo sapiens
aatgtatcccctttgctaagcaatgcatgactgcaatcctaattctcacatgttttggggaaaaaattttaattttgaaaaaatttaggaaagttcctacyaaatatacatgtataaagtttattaaaagtcataatgacccaggaatagctaatgacacagaagtagatcaaaatagaacacaatagagaacttcaaaat

SEQ ID NO: 36467 - DNA, 201 bp, Homo sapiens
gttattaatgagttattagtttttttcttctaatagtgtgaactgagtaaagacaaagggacagttatcagtaatgatagctgttcctttcacccaattawatgctatgttaagttttttaaagtagcataagtcaggatgagaatagcttttactatttggttccttagttactgttaattagtggtaataatatgcaga

SEQ ID NO: 36468 - DNA, 201 bp, Homo sapiens
ttttattattgctcaaatcagcctccccaaacatgcagagtctagggtttatcaaggatagtttggtaggctgggggctggggaatgggtgctcctggttggttggggatgcagttacagaggtgggggccagaggaccagttggagtcatccgaaatgcaaaagtctgaaaagacatctcaaaaggccttttttaggttc

SEQ ID NO: 36469 - DNA, 201 bp, Homo sapiens
agtgacttatttaaaacctaaaataatttctggttaactttggaatatgtttatgttattaatgagttattagtttttttcttctaatagtgtgaactgaktaaagacaaagggacagttatcagtaatgatagctgttcctttcacccaattatatgctatgttaagttttttaaagtagcataagtcaggatgagaata

SEQ ID NO: 36470 - DNA, 201 bp, Homo sapiens
ctgtcatgcaggctgaaatgcagtgttgggactttggctcactgcagccttgacctcctgggcttaagtgatcctcccacatcagcctctcgaatagctaggctatgggcatgctaccatgtccagctaattaaaaaaatttttttttgtagaaacagagtcttgctatgttgctcaggctggtctcagactcctagtctc

SEQ ID NO: 36471 - DNA, 201 bp, Homo sapiens
acggtattcaagaaacaaatcgacaatctaaggacaaatcatcaggtaattaaattaattaaggcctatattttaaagtcctttaacttgatataaatatygtattttagtgacttatttaaaacctaaaataatttctggttaactttggaatatgtttatgttattaatgagttattagtttttttcttctaatagtgt

SEQ ID NO: 36472 - DNA, 201 bp, Homo sapiens
ttttaatttaactgagaggaaatttaaaatgctgaaactttcattttagttttatcaatgtaacactttagtgtagtaatatgtagcatactacattcatwttcagtaatttttgaataatggactaaaatccaaatttataagacaatttaagggatgatttttaacttttctaaagttattcaaactgtaactttttta

SEQ ID NO: 36473 - DNA, 201 bp, Homo sapiens
acctgaggtcaggagttcgagaccagcctggccaacgtggtgaaaccctgtctctactaaaaatacaaaaattagccaggcatagtggcgcacgcttatartcccagccactcaggaggctgaggaaggagaattgcttgaacccgggaggcagaggttgcagtgagcctagatcacaccactgcactccagcctgggcga

SEQ ID NO: 36474 - DNA, 201 bp, Homo sapiens
taaagctgggcgcggtggctcacccctgtaatcccagcactttgggaggccgaggtgggcagatcacctgaggtcaggagttcgagaccagcctggccaaygtggtgaaaccctgtctctactaaaaatacaaaaattagccaggcatagtggcgcacgcttatagtcccagccactcaggaggctgaggaaggagaattg

SEQ ID NO: 36475 - DNA, 201 bp, Homo sapiens
gaacacaatagagaacttcaaaataaaacaggtgtgagaattgtgtgtgtgaaaaagctgggttcaaataagttggtttgttagacattcatatgcctacycatcagccatttcgttctcccttccttgctgacaaagccccattttttttttctttttttttggcctaaaactctgtatggctgccttgtgctatagaat

SEQ ID NO: 36476 - DNA, 201 bp, Homo sapiens
acaaagtgagtgaggtccatattgggtggatgtcctgtccaatgccagaattcttaggccttttctcaaacaggggattcaccactttctttctttctttytttttttttttttttgagatggagtcttgctgtgttgcccaggctagagtgcaatggtgcgatctcggctcaccacaacctccgcctcctgggttcaagc

SEQ ID NO: 36477 - DNA, 201 bp, Homo sapiens; identical to SEQ ID NO: 12900

SEQ ID NO: 36478 - DNA, 201 bp, Homo sapiens; identical to SEQ ID NO: 12902

SEQ ID NO: 36479 - DNA, 201 bp, Homo sapiens; identical to SEQ ID NO: 12904

SEQ ID NO: 36480 - DNA, 201 bp, Homo sapiens
atctagtagtcggggagatcaagagaggtatgggacctgaagaggatggcagactgtgcagtgcggtgcacaccggtctccaggttgttttcaccctcctrtctcctcccaggagctaacgtgtaagcaaacatgtttggatagagggctggtgccacgccccaggctcaccccgcccgcacagccgtcgtccacccctcc

SEQ ID NO: 36481 - DNA, 201 bp, Homo sapiens
ccagggatctgtggttcaggaccccctgcaaccccctcccagacccctgtactggtgggaggagaggacctagaggaaaggtgctgggcagataagcagcygagggaggccctgggtttagcttatcagtcttctgggccctcctgccccaggaagggcagcgaggaccatggtgttgcccctgtcatcgttatcgtcctg

SEQ ID NO: 36482 - DNA, 201 bp, Homo sapiens
ttacccttgaaagaaggcagtagggaggttgggacggagccagaggtcagacgcctaggctcaggtcggggctggggactcagagggcagggtcagggccyaagctcgattgcctgtgggttgggggtccccaccaattctggaatgagcccaaactgagacgcaggggacctgagttctaggcctggctctgccgtggct

SEQ ID NO: 36483 - DNA, 201 bp, Homo sapiens
tgtttctaagggaaacatggctgcagcccgtcctgcccctccacccacccaccaggtgcccagtgttcccaagggccccgaatcccaaccttattcaggcrtcagcatctctgcaccccaaatgcctgttagggaggatagtgaaggctgagccctcctgggctcatcaaaagccagcagtgagagaacacccccatctct

SEQ ID NO: 36484 - DNA, 201 bp, Homo sapiens
cttacccttgaaagaaggcagtagggaggttgggacggagccagaggtcagacgcctaggctcaggtcggggctggggactcagagggcagggtcagggcytaagctcgattgcctgtgggttgggggtccccaccaattctggaatgagcccaaactgagacgcaggggacctgagttctaggcctggctctgccgtggc

SEQ ID NO: 36485 - DNA, 201 bp, Homo sapiens
gggcagcctgggccattagctcctgatgtcatcgatttgggtgaggggacagggaagtcagaggaagctggccagtggctctcacgcagacttacagcagyggagtggtgcctgattcctggtacagctgctcccactgagtctccagggatctgtggttcaggaccccctgcaaccccctcccagacccctgtactggtg

SEQ ID NO: 36486 - DNA, 201 bp, Homo sapiens
ggcccaacccccttattcacgagccgcggccgtgactctgcccggtgacgtggggaggccgaactttacgtaacccgcccggcgccccacgcgtgccggcwcagggcatatctggggcccggaggcccaggcttggggaaggggctccagtcacggtgttgcccacgggccacagcctacccgcaccgcgccgctctcttt

SEQ ID NO: 36487 - DNA, 201 bp, Homo sapiens
ggcgcggcgctgccttcaatggcccaacccccttattcacgagccgcggccgtgactctgcccggtgacgtggggaggccgaactttacgtaacccgcccrgcgccccacgcgtgccggcacagggcatatctggggcccggaggcccaggcttggggaaggggctccagtcacggtgttgcccacgggccacagcctacc

SEQ ID NO: 36488 - DNA, 201 bp, Homo sapiens
gcactgcagcaggagggcagcctgggccattagctcctgatgtcatcgatttgggtgaggggacagggaagtcagaggaagctggccagtggctctcacgmagacttacagcagcggagtggtgcctgattcctggtacagctgctcccactgagtctccagggatctgtggttcaggaccccctgcaaccccctcccaga

SEQ ID NO: 36489 - DNA, 201 bp, Homo sapiens
tcctgatgtcatcgatttgggtgaggggacagggaagtcagaggaagctggccagtggctctcacgcagacttacagcagcggagtggtgcctgattcctrgtacagctgctcccactgagtctccagggatctgtggttcaggaccccctgcaaccccctcccagacccctgtactggtgggaggagaggacctagagga

SEQ ID NO: 36490 - DNA, 201 bp, Homo sapiens
ggaattctgctgggccgtcaaattcaacccgcaccaacgtgggcaggagggccacagtgtcctgccaggagcagagggctgaaggtctgcaggaggaagarccactatcctggtggggggcacctgctgcccaccctgcccccagcgtgcctggggggagcacacctgggcatggaggagtccagggtgctgggccacaca

SEQ ID NO: 36491 - DNA, 201 bp, Homo sapiens
cagaacaaaactcacttttttggggggtgaagcaccttggttcatttgtttagttcgttaattccagcagtctgtttctaagggaaacatggctgcagccsgtcctgcccctccacccacccaccaggtgcccagtgttcccaagggccccgaatcccaaccttattcaggcgtcagcatctctgcaccccaaatgcctgt

SEQ ID NO: 36492 - DNA, 201 bp, Homo sapiens
ggcctgggtgaggtgggcagggaccaaggcctggcgcctgggcctcgctggccttgctctgcgtgctgacttcatcctgatagtaccttgattttcctacygtgacttccccttctgtcgacttcctcaccaactttaaaattccgtattgagagcagtttcctaagttacctcaaatcctattcagaagaaggttcttcc

SEQ ID NO: 36493 - DNA, 201 bp, Homo sapiens
ctaacgtgtaagcaaacatgtttggatagagggctggtgccacgccccaggctcaccccgcccgcacagccgtcgtccacccctcccctttcttacagatraagctgaggctcggccagggactgtgatatacccacatccccggaactaggtgatcgcggtgcaggaaccaggtaggtctgagtctggatcatgcctctg

SEQ ID NO: 36494 - DNA, 201 bp, Homo sapiens
cgctcggccccgcgaccctccgccgcccgacgtctggccgtgcaggccgggaggggacgggtaggaggtggcgggtggccccgggcgcggcgctgccttcratggcccaacccccttattcacgagccgcggccgtgactctgcccggtgacgtggggaggccgaactttacgtaacccgcccggcgccccacgcgtgccg

SEQ ID NO: 36495 - DNA, 201 bp, Homo sapiens
gagaatggtacacactggcatttagaaaagttataccctccctccccggcctttttgtgtgtgtgtgtgtgtgtgtgtgtgtgtgtgtgtgtgtgtgtcgygcgcgcgcgcgcgctgtggggggagacagtctatcacccaggctggaactcagtggtgcaatgatacctcactgtagcctccaactcctgggcttaagtg

SEQ ID NO: 36496 - DNA, 201 bp, Homo sapiens
tcggtcctctcggggtaaataggatcacacagaagtaaaccaggtgtgtgtgcagcagctttccctagaaaggccctgcttagctaagacagtcatccctwtagccaatgaaaacaaacaggcttgggggaggggaggaatggaggttccaggatggctcacaagcccagcagcttaattcagccaggctccttggctagg

SEQ ID NO: 36497 - DNA, 201 bp, Homo sapiens
tgggatactactcggcaataaagaggaggaactgacaagcgcagcaacgtgggtgactctcgaggcgcttcactgagggaaggaagctggtctctgaaggytacttactacatgagtccatctgttttggtgtctcaaaaaggcaagacttgggctgggtgtggtggctcacacctgtaatcccatcactttgggaggcca

SEQ ID NO: 36498 - DNA, 201 bp, Homo sapiens
agaaataaggctgagtttcggtggtggttctgcagtttataaatgccacctgagaactttgagcagtgtcagaaagtgtccccttgtgctgctttggagcygctgcctgacgctgtggcctgcagttctccgcgggtgccccagcttctctgcttggttatgcatgtatgggaatgtgaatacagcaaaatgaaccatatt

SEQ ID NO: 36499 - DNA, 201 bp, Homo sapiens
tttttaaatatgtactcttgagttcagggcaatgggagggagactggactcctgtgtcccagcaattactgttctaggttagatggtagaagttctttctrcctaaaaacctgcctagagtcaaaaacaatattgactcatggggcccctgaacactcctaataccaaatttttcatttttgctgattacgttaataggcc

SEQ ID NO: 36500 - DNA, 201 bp, Homo sapiens
gcggggtgggcttagaagggcccccaaccgcttttcttccgggaaccacgcagcgggacgcgggctccggactccctgggggcagccttgctgtgggtgarcaagcgcggaggccgagcttcttgcaaacggactccaaggggcaacgaccttcgcgcgtcaccaaagtgactgcgtgggtgcccacgagcccggctcccg

SEQ ID NO: 36501 - DNA, 201 bp, Homo sapiens
gtcgcagggccacaaatgagagaatggtacacactggcatttagaaaagttataccctccctccccggcctttttgtgtgtgtgtgtgtgtgtgtgtgtgygtgtgtgtgtgtgtgtcgcgcgcgcgcgcgcgctgtggggggagacagtctatcacccaggctggaactcagtggtgcaatgatacctcactgtagcctc

SEQ ID NO: 36502 - DNA, 201 bp, Homo sapiens
tcaatatttaatggcattttgaaactgtctagatgagtggagcagaacttacacaagggccagcacttgggtttaccaactgccacctctatttcttctcktcaataggttgcaaactaaatcgcctgaactctgttgttggtgaatatgccaatgcgtgtttacaagtggcccaagactgtgggactgacgtacttgacc

SEQ ID NO: 36503 - DNA, 201 bp, Homo sapiens
tgaattaagtctgctgggagatggagaccattagccaatcacaggagacccaaatctgcttgttatctacagaactcaaagttgtcaatacgtagaggtamgcttttttcctcaggcttaaacctttgccactgatattaataataaaagtattagatgatttttcagggaagttttatacttaggtccattgtgtttcga

SEQ ID NO: 36504 - DNA, 201 bp, Homo sapiens
aaaccacagccaatctcggcaaatctggataggaatgctgagggaggaactctgataggacagtggtttcctgcctggggcttctgtttcttaggggctcrgtatgtccatttcagtctgttttcaatccaaaattattaaattatagcttccattatgttatacctgagaccttttttgacctagaaaagggattctggc

SEQ ID NO: 36505 - DNA, 201 bp, Homo sapiens
ccccctctgctaaagtgctgccaggtgtacttacctgtaatccccaaaatgacctcctggagtgaagcaatcaaagccaagaagggagcgccgagaaaacrgaagttgccaatcagaactgccctcgctgagatgcccggttacagtcattagtagtaataatgggcttttcttcctccagttttccttccagcagggtgg

SEQ ID NO: 36506 - DNA, 201 bp, Homo sapiens
ggtcttcccctcagcgccctcctgggcagcggcctttcccctccgggtccgggttagcggccgcgggcgaccgcgcgctgtgtcccaggaggccccgcggycagctccgggcagaggcgccaggagctctctcgccccattccctgcgggcacaggtggggccgttaggggttgaccttggaagtaaaacgccttcaggaa

SEQ ID NO: 36507 - DNA, 201 bp, Homo sapiens
cttttttttttttttctttttttctttttttgagacggagtctcgctctgtcgcccagactggagtgcagtagcgcgatctcggctcactgcaagctccgyctcccggattcaagcgtttctcctgcctcagcctcccgagtagctgggattatagacgtgcgccaccacaccgggctaatttttgtaattttagtagaga

SEQ ID NO: 36508 - DNA, 201 bp, Homo sapiens
caccacaccgggctaatttttgtaattttagtagagacggggtttcgccatgttgaccaggctggtctcgaactcgagacctcatgtgatccgcccgcctyggcctcccaaagtgctgggaatacaggctgtttagcttttgatagagaaaaatccccctctgctaaagtgctgccaggtgtacttacctgtaatccccaa

SEQ ID NO: 36509 - DNA, 201 bp, Homo sapiens
tgccctcgctgagatgcccggttacagtcattagtagtaataatgggcttttcttcctccagttttccttccagcagggtggatggggagcatcgctggcygacaggctggtcaggtgagaatggtttccgatacttgagttcttatggatggaaaatgtcttagggatccgtcttatggatgaaggatagttctgaacag

SEQ ID NO: 36510 - DNA, 201 bp, Homo sapiens
atttcttctcttcaataggttgcaaactaaatcgcctgaactctgttgttggtgaatatgccaatgcgtgtttacaagtggcccaagactgtgggactgaygtacttgacctgtggaccctgatgcaggacagccaggtacggtggcttgctcggtcctctcggggtaaataggatcacacagaagtaaaccaggtgtgtg

SEQ ID NO: 36511 - DNA, 201 bp, Homo sapiens
aaaatgccaattaaaacaaggtattttgattttttgactcagaaaagcaatatgaagcagtaatacttacagctgacacgcatgaaataagattggaactsttacattcctggtgagagaatagcttgtgatcctctggaaagctgtgtggcaatatgcgccaagggacggcccacgtgtagaaattcaacctaaggaaat

SEQ ID NO: 36512 - DNA, 201 bp, Homo sapiens
cactggcatttagaaaagttataccctccctccccggcctttttgtgtgtgtgtgtgtgtgtgtgtgtgtgtgtgtgtgtgtgtgtcgcgcgcgcgcgcgygctgtggggggagacagtctatcacccaggctggaactcagtggtgcaatgatacctcactgtagcctccaactcctgggcttaagtgatcctcccatct

SEQ ID NO: 36513 - DNA, 201 bp, Homo sapiens
cttgttcagtagggcacattaaaggctacttcattgctatgctgggatccagagagaaagcttggacgggactgatgatatttgaagtactcaagggaaggaaggatccagtgtgcgggaagctctttggacaaacgggaagactcacagcctcaccggtttcctctattcctagctgttaggtttaggctacttggacaa

SEQ ID NO: 36514 - DNA, 201 bp, Homo sapiens
gaatggtacacactggcatttagaaaagttataccctccctccccggcctttttgtgtgtgtgtgtgtgtgtgtgtgtgtgtgtgtgtgtgtgtgtcgcgygcgcgcgcgcgctgtggggggagacagtctatcacccaggctggaactcagtggtgcaatgatacctcactgtagcctccaactcctgggcttaagtgat

SEQ ID NO: 36515 - DNA, 201 bp, Homo sapiens
ataagtggaccttcacggttcaaacctgtgttgttcaagggtcagctgtatgttaatgttgaaaatgtgcattatggaagttctcttttttttttttttttggagatagagtctggctctgtcagccaggctggagtgcagtggcacgatctcggctcactgcaacctttgcctcctgggctcaagcaattctgcctcagc

SEQ ID NO: 36516 - DNA, 201 bp, Homo sapiens
ttcctgaacttagatttctgtttagcttttttttttttttctttttttctttttttgagacggagtctcgctctgtcgcccagactggagtgcagtagcgygatctcggctcactgcaagctccgcctcccggattcaagcgtttctcctgcctcagcctcccgagtagctgggattatagacgtgcgccaccacaccggg

SEQ ID NO: 36517 - DNA, 201 bp, Homo sapiens
aaggaaacaaaaagtattaaccggtttaagttgaaacacaacgaatgtatttactaaaactatttaatcaaaaccagaaatctcaaatattctatagactrtttaaatataaaccaaactaaactatttaagttccaggatattagtgactttttacctgagatacttgctcagattatctatctgttgtgaactccattt

SEQ ID NO: 36518 - DNA, 201 bp, Homo sapiens
cactttacatgtgaggaaggagcacagcgtgcccagggtcacgcctagtcacacagggagccgagaaacaaatccaggcaacccggcttttttttttttttcccccattacacctacagtactgtgaatccaactgtttttaagaaggaaacaaaaagtattaaccggtttaagttgaaacacaacgaatgtatttactaa

SEQ ID NO: 36519 - DNA, 201 bp, Homo sapiens
cgtgaagagaccaccaaacaggctttgtgtgagcaacaaggctgtttattcacttgggtgcaagtgggctgagtctgaaaagagcaaagggagatgggtakggcagtactataggatttgggtaggtagtggaaaattacagttaaaggtggttatctattgttagcaggggaagggggtcacaaggtgctctgtggggag

SEQ ID NO: 36520 - DNA, 201 bp, Homo sapiens
aaaatgtcttagggatccgtcttatggatgaaggatagttctgaacagaacattcctcctttattaattttgcttgcctcccctaatcagtatataggagaaggaacagaaaacatttactcttcactcagtctgaccaattagatattttagggttgagcactgatggctgggtagactcagacaaatcaaggaaatggc

SEQ ID NO: 36521 - DNA, 201 bp, Homo sapiens
gaaaatgtcttagggatccgtcttatggatgaaggatagttctgaacagaacattcctcctttattaattttgcttgcctcccctaatcagtatataggagaaggaacagaaaacatttactcttcactcagtctgaccaattagatattttagggttgagcactgatggctgggtagactcagacaaatcaaggaaatgg

SEQ ID NO: 36522 - DNA, 201 bp, Homo sapiens
tggaaaatgtcttagggatccgtcttatggatgaaggatagttctgaacagaacattcctcctttattaattttgcttgcctcccctaatcagtatataggagaaggaacagaaaacatttactcttcactcagtctgaccaattagatattttagggttgagcactgatggctgggtagactcagacaaatcaaggaaat

SEQ ID NO: 36523 - DNA, 201 bp, Homo sapiens
cgggtcgagatgcgcggtcttcccctcagcgccctcctgggcagcggcctttcccctccgggtccgggttagcggccgcgggcgaccgcgcgctgtgtccyaggaggccccgcggccagctccgggcagaggcgccaggagctctctcgccccattccctgcgggcacaggtggggccgttaggggttgaccttggaagta

SEQ ID NO: 36524 - DNA, 201 bp, Homo sapiens
accagcctgggcaacataatgagagacccatctctacaaaaagcacaaaaattagccaggtagccaggtatggtggcacgtgcctgtagtcccagctgctyagggggctgaggttagaaagatcgcttgagcccaggaggttgaggctgcagtgagccatgatcatgtcactgcactccagcctgggcagcaaagcaagac

SEQ ID NO: 36525 - DNA, 201 bp, Homo sapiens
ggtgaagaggggcagacaggcactggtcttttttaatttttctgtgaccttgtgctactcttttgtaaagagcttgttcagtagggcacattaaaggctayttcattgctatgctgggatccagagagaaagcttggacgggactgatgatatttgaagtactcaagggaaggaaggatccagtgtgcgggaagctctttg

SEQ ID NO: 36526 - DNA, 201 bp, Homo sapiens
cctcccaagtagctggaaccacaggcatgtgcaaccatgctcagctaattttttaaatttttttgtagggatggggtagctagttataatctaggtgaatwttataaacaattgatcccaagtatgaatcaaagctggtgaatagtttcttcgctgtgatgtagagcctgggccagcataggtcctcctgtggcccgcatc

SEQ ID NO: 36527 - DNA, 201 bp, Homo sapiens
caaccaggaatcaaatccagcaagtgtgacttcacagctcaagtccttactgttgtatgagtttactgttgagtggggttgtagctatgtcccttgctctmaaagggcctgtcatccttagagaaggatccaatgcgttctcaagtcacaaacagcatatgccaaggggtgccacacaccggaggcacagacaaacgggga

SEQ ID NO: 36528 - DNA, 201 bp, Homo sapiens
gagaaaagcaaaatatgaagtcttcagtgtgaatataatcttcagtgcaaactcatttttttaaaagtgtatgtatcttcatgaaaagaccggaaagatayacatccaaatgccaacagtggttttctgggtggtaggaacattggtgacttttttcctttatactgtacttacatgtggttagcaaatggtaaacaatga

SEQ ID NO: 36529 - DNA, 201 bp, Homo sapiens
gctgagatgcccggttacagtcattagtagtaataatgggcttttcttcctccagttttccttccagcagggtggatggggagcatcgctggctgacaggstggtcaggtgagaatggtttccgatacttgagttcttatggatggaaaatgtcttagggatccgtcttatggatgaaggatagttctgaacagaacattc

SEQ ID NO: 36530 - DNA, 201 bp, Homo sapiens
gaaaatgatgtgttaaggaaaatatctgcaaaatgtggcagacaagagagtaatgtctttagtgtagaaatcaataagaaaaataccaactccaatagaaratgtaggcaaaggacaggaatagataaaaggcgaaatttaacagcaaatacatatttgaaaatgtgtgaaaacttatcaaaaaatgccaattaaaacaag

SEQ ID NO: 36531 - DNA, 201 bp, Homo sapiens
cagagatttcttttgttaccctacttgtgtcacagaagtgctgtggtctgctattcacgggcacaccgtaggagacctctgagttgaggctggacatgaargaacaccaactgcagtaagaggaattcttgctctctaggagaaagattacgtagatgacaggtatcggtggagactgcacactaaccattatatttggga

SEQ ID NO: 36532 - DNA, 201 bp, Homo sapiens
ttagggagggatatgtcagggcagcagccaccctgacctcagttaggcttgaatcctgggcaatggtgaacgtgggtttggaaaaggagatggtctctccytgactgctgaagaattgctgctgtgactagaggaaagctagccatgtaagaggcctttcttccccttctactcttgaaaaaagccttctgcgtgctatcg

SEQ ID NO: 36533 - DNA, 201 bp, Homo sapiens
aatgagcccatccatccctcctatggattattctgaagcaaatcccaaatcatatcattttaccaagactaagaaaaaaagagtccctcttatgtgactgrtattctctgaggggtttcaaacctactgcctgatgcgaatccttaactgggattctcctcactttacatgtgaggaaggagcacagcgtgcccagggtca

SEQ ID NO: 36534 - DNA, 201 bp, Homo sapiens
tgtttaggcatatggggcagtcagagctgccgaattccatgggaatgtgtatgaaaaagtgttcaccctcagctcggtaaccagcaaagcagtgaggcggygtggccttcatttcctcactgacctttgactttatttcctgaacttagatttctgtttagcttttttttttttttctttttttctttttttgagacggag

SEQ ID NO: 36535 - DNA, 201 bp, Homo sapiens
caaatgagagaatggtacacactggcatttagaaaagttataccctccctccccggcctttttgtgtgtgtgtgtgtgtgtgtgtgtgtgtgtgtgtgtgygtgtcgcgcgcgcgcgcgcgctgtggggggagacagtctatcacccaggctggaactcagtggtgcaatgatacctcactgtagcctccaactcctgggc

SEQ ID NO: 36536 - DNA, 201 bp, Homo sapiens
ctgacctttgactttatttcctgaacttagatttctgtttagcttttttttttttttctttttttctttttttgagacggagtctcgctctgtcgcccagrctggagtgcagtagcgcgatctcggctcactgcaagctccgcctcccggattcaagcgtttctcctgcctcagcctcccgagtagctgggattatagacg

SEQ ID NO: 36537 - DNA, 201 bp, Homo sapiens
aatgagagaatggtacacactggcatttagaaaagttataccctccctccccggcctttttgtgtgtgtgtgtgtgtgtgtgtgtgtgtgtgtgtgtgtgygtcgcgcgcgcgcgcgcgctgtggggggagacagtctatcacccaggctggaactcagtggtgcaatgatacctcactgtagcctccaactcctgggctt

SEQ ID NO: 36538 - DNA, 201 bp, Homo sapiens
gagagaatggtacacactggcatttagaaaagttataccctccctccccggcctttttgtgtgtgtgtgtgtgtgtgtgtgtgtgtgtgtgtgtgtgtgtygcgcgcgcgcgcgcgctgtggggggagacagtctatcacccaggctggaactcagtggtgcaatgatacctcactgtagcctccaactcctgggcttaag

SEQ ID NO: 36539 - DNA, 201 bp, Homo sapiens
gtacttacctgtaatccccaaaatgacctcctggagtgaagcaatcaaagccaagaagggagcgccgagaaaacagaagttgccaatcagaactgccctcrctgagatgcccggttacagtcattagtagtaataatgggcttttcttcctccagttttccttccagcagggtggatggggagcatcgctggctgacaggc

SEQ ID NO: 36540 - DNA, 201 bp, Homo sapiens
tctcatgtctactcagtccatttctggtgtgggccagctcccaagagcaggtgggggttgggggctggttgcttcctatggcactgggagcagacctggawttggggtccctaatgccaggctgtgtgcgggactgatctctgttctccctctgcaggcccaggctttggtgcagtacctggaggagcccctcacccaagt

SEQ ID NO: 36541 - DNA, 201 bp, Homo sapiens
agactaagtttcccagagtaacatggttagtaggtggctgtgctgaggctggaacctgggctcagaaccccatgttcagggctgtggccaaaagcttttcygctgaacttcctgctgtgcccagggcatgggaggaagatatagtctctctggggccagagaagcctttggggaaggagggtgctaagggtgccaagcaga

SEQ ID NO: 36542 - DNA, 201 bp, Homo sapiens
gttggcagatatgaaatttcatggtattagcaccctcaccaactgggatgaggtagggattacagaaagaaaaactgaatttctgagagactaagtttccyagagtaacatggttagtaggtggctgtgctgaggctggaacctgggctcagaaccccatgttcagggctgtggccaaaagcttttccgctgaacttcctg

SEQ ID NO: 36543 - DNA, 201 bp, Homo sapiens
cccagacgttttactccccgctctgagcacatcgctatccctccccgcccctcaccaggctgctgaataacgagggatcactgctggcctactctggttayggggacactgacgcccgggtcaccgctgccatagccagtaacatctgggccgcctacgaccggaacgggaaccaagcgtttaatgaagacaatctcaaat

SEQ ID NO: 36544 - DNA, 201 bp, Homo sapiens
ggcaccttaactgggtccccaccaggcacatcacgatgcctttctcgtcgcccatggaagcggagctggtccgcaggatcctgtcccgggatgccgcacckctcccccgaccaggggcggttctgaaggacttcaccgtgtccggcaacctactgtttatgtcagttcgggaccaggacagggaaggcgctgggcggatga

SEQ ID NO: 36545 - DNA, 201 bp, Homo sapiens
caaatcctaggagatggcaccttaactgggtccccaccaggcacatcacgatgcctttctcgtcgcccatggaagcggagctggtccgcaggatcctgtcycgggatgccgcacctctcccccgaccaggggcggttctgaaggacttcaccgtgtccggcaacctactgtttatgtcagttcgggaccaggacagggaag

SEQ ID NO: 36546 - DNA, 201 bp, Homo sapiens
gaacacccaaacacaaggtctcagaacagagacctggtacaccaggcccgccgccacccgagggagcccagggagatgggtgcagaggtgtcgcctttaaygtgatgttctctgcccctcacatttagccgactgactgctgcagaccaccgccaactgcagctctccatcagctcctgtctccagcagctttccctgttg

SEQ ID NO: 36547 - DNA, 201 bp, Homo sapiens
gggagacagcctgaggggatgagatgggcaccggccaaatcctaggagatggcaccttaactgggtccccaccaggcacatcacgatgcctttctcgtcgsccatggaagcggagctggtccgcaggatcctgtcccgggatgccgcacctctcccccgaccaggggcggttctgaaggacttcaccgtgtccggcaacct

SEQ ID NO: 36548 - DNA, 201 bp, Homo sapiens
gcggaacttcctgcagcctctctgcctccgcatcctcgtgggccctgaccttctctctgagagccgggcagaggctccggagccatgcaggccgaaggccrgggcacagggggttcgacgggcgatgctgatggcccaggaggccctggcattcctgatggcccagggggcaatgctggcggcccaggagaggcgggtgcc

SEQ ID NO: 36549 - DNA, 201 bp, Homo sapiens
gggcgcaggggcagcaagggcctcggggccgagaggaggcgccccgcggggtccgcatggcggtgccgcttctgcgcaggatggaaggtgcccctgcgggrccaggaggccggacagccgcctgcttcagttgtatcctgttctgttctgttctaggaggttctggtggcgaggtgggggccgtgagacggagacaacagg

SEQ ID NO: 36550 - DNA, 201 bp, Homo sapiens; identical to SEQ ID NO: 17469

SEQ ID NO: 36551 - DNA, 201 bp, Homo sapiens
aggggcagcaagggcctcggggccgagaggaggcgccccgcggggtccgcatggcggtgccgcttctgcgcaggatggaaggtgcccctgcggggccaggrggccggacagccgcctgcttcagttgtatcctgttctgttctgttctaggaggttctggtggcgaggtgggggccgtgagacggagacaacagggtcaag

SEQ ID NO: 36552 - DNA, 201 bp, Homo sapiens
gccgagaggaggcgccccgcggggtccgcatggcggtgccgcttctgcgcaggatggaaggtgcccctgcggggccaggaggccggacagccgcctgcttsagttgtatcctgttctgttctgttctaggaggttctggtggcgaggtgggggccgtgagacggagacaacagggtcaagaggtggggggcagggccagga

SEQ ID NO: 36553 - DNA, 201 bp, Homo sapiens; identical to SEQ ID NO: 11754

SEQ ID NO: 36554 - DNA, 201 bp, Homo sapiens
ttctaaagttcgatgactttaccaaagtggtttcctaattccaatgttcttgtggtaatattaattcttttgttcactttttatgtctcatatttgaaccyccatgttaccaacatcttcctctccaatttcagcctgaaatctttcatcttatagggtcctggactctactacgtggatgaacatgggactcggctctca

SEQ ID NO: 36555 - DNA, 201 bp, Homo sapiens
agcactgacacatccaccctggcgggacagtatcatttactaggctgcctttgtatgtttcagatactttaaattccaaatctttctctgatctttagatmctacaaaataattcctttccaatgcttatctctttaatcatttcctgccccatcaagttggaaagagctaacctctctttcctcactccaccttgtcctc

SEQ ID NO: 36556 - DNA, 201 bp, Homo sapiens; identical to SEQ ID NO: 11718

SEQ ID NO: 36557 - DNA, 201 bp, Homo sapiens
ttttcctttttcatttctaaagttcgatgactttaccaaagtggtttcctaattccaatgttcttgtggtaatattaattcttttgttcactttttatgtmtcatatttgaacccccatgttaccaacatcttcctctccaatttcagcctgaaatctttcatcttatagggtcctggactctactacgtggatgaacatg

SEQ ID NO: 36558 - DNA, 201 bp, Homo sapiens
gggacagtatcatttactaggctgcctttgtatgtttcagatactttaaattccaaatctttctctgatctttagatcctacaaaataattcctttccaaygcttatctctttaatcatttcctgccccatcaagttggaaagagctaacctctctttcctcactccaccttgtcctcacccaggctgtactatctgcgaa

SEQ ID NO: 36559 - DNA, 201 bp, Homo sapiens
tgctgtccaacatgatgtgccagtaccggggcatgggcctctctatgggcagtatgatctgtggctgggataagaaggtgggtgctctccattcttcatgytcccccaccatgttccctatggatgacagatctgtttcccatcatatactcctactccctccctgacaagatgcatggcatatagagtgcttggttatag

SEQ ID NO: 36560 - DNA, 201 bp, Homo sapiens
agcctagtggttaatccctggatctctcagatcattgctccttactcttgtcctatgtggtccatcttagtgctaatagtatatttcacaaaacagctttytggtgataagacccttctcccaaatctcagcctgtgctccactcataagccagatagtacgtcaggtatttagcactgacacatccaccctggcgggaca

SEQ ID NO: 36561 - DNA, 201 bp, Homo sapiens
tctctatgggcagtatgatctgtggctgggataagaaggtgggtgctctccattcttcatgttcccccaccatgttccctatggatgacagatctgtttcycatcatatactcctactccctccctgacaagatgcatggcatatagagtgcttggttatagaactgtttcagtatatccatggactatttattggcccag

SEQ ID NO: 36562 - DNA, 201 bp, Homo sapiens
aaggtgattgagattaacccttacctgcttggcaccatgtctggctgtgcagcagactgtcagtactgggagcgcctgctggccaaggaatgcaggtaagygaggcctctcatcttcctttcttagcctagtggttaatccctggatctctcagatcattgctccttactcttgtcctatgtggtccatcttagtgctaat

SEQ ID NO: 36563 - DNA, 201 bp, Homo sapiens
gaagaggccacatggggatggggcctgagaggaggaagtgcaagttaggacaaagagttacaggtgaggtgggggctcccaaaggaagacaagagaacttycctgcccttgtccacacacaaatggtggagcctttttcatggggttatcacatgatataggaggtgtgtggtgtcttgggaaacctatgaaatttgcctg

SEQ ID NO: 36564 - DNA, 201 bp, Homo sapiens; identical to SEQ ID NO: 11746

SEQ ID NO: 36565 - DNA, 201 bp, Homo sapiens
ggaggcgttgtcaatagtaagagaccaatgctcccaccaccatgcctgggaggagtcggcgggtggtggggggggtgatttaagattgagaaaccagcctkgccaacatggcgaaaccccgtctctactaaaactacaaaaattagccggacgtggtgacgggtgcctgtagtcccagctacttgggaggctgaggcagga

SEQ ID NO: 36566 - DNA, 201 bp, Homo sapiens; identical to SEQ ID NO: 11747

SEQ ID NO: 36567 - DNA, 201 bp, Homo sapiens
gcaggtcggggcagtagggaagcccctagggatgcagggaggcgggcgctgaggagtggagggtcgcctgagaggaggaggcgagagcgggagcgcggggkacagggtcgggggtagccttcagtcccggagagcgccagacccaaagaagaggccacatggggatggggcctgagaggaggaagtgcaagttaggacaaa

SEQ ID NO: 36568 - DNA, 201 bp, Homo sapiens
gaaagtagaaagtacagatgtcagtgacctgctgcaccagtaccgggaagccaatcaataatggtggtggtggcagctgggcaggtctcctctgggaggtyttggccgactcagggacctaagccacgttaagtccaaggagaagaagaggcctagcctgagccaaagagagagtacgggctcagcagccagaggaggccg

SEQ ID NO: 36569 - DNA, 201 bp, Homo sapiens; identical to SEQ ID NO: 11734

SEQ ID NO: 36570 - DNA, 201 bp, Homo sapiens
actcagaggagcgtcctttggggccagagtaacttacggcctggtaagaaagacacagtgaaaccacttataatttgggaaatctcccctcactgccaaawgagcagtggcaagtaggaagtagaagtggaaacaagggataagagttagacctgaattttagtcccaggtctactattaactctgtgtgactttgcataa

SEQ ID NO: 36571 - DNA, 201 bp, Homo sapiens
cctctaacttgaagttaaccctgttctttgaccctctattcatgataagtcggtccgtcggaaagcatactcagaggagcgtcctttggggccagagtaayttacggcctggtaagaaagacacagtgaaaccacttataatttgggaaatctcccctcactgccaaatgagcagtggcaagtaggaagtagaagtggaaa

SEQ ID NO: 36572 - DNA, 201 bp, Homo sapiens
aaaaaaaaacctgagttttaacttggtgactgttgactccctcctgacagcgaggcggtggtgaaccgagtgtttgacaagctgtccccgctgcacgagcrcatctactgtgcactctctggttcagctgctgatgcccaagccgtggccgacatggccgcctaccagctggagctccatgggtatgaagctctggagttc

SEQ ID NO: 36573 - DNA, 201 bp, Homo sapiens
cactctagcgtgggtgacagagaaagaccctatcttaagaaaaaaaaaagaaaagaaaaagaaaaaacaaacaaaaaaaacacccaaccctatataggtaktattattacttctataggacacatagaggtttggaaagattaaatcacttgaccaaggtcacaaaataagttctgaggctgggatctgggattcagtctt

SEQ ID NO: 36574 - DNA, 201 bp, Homo sapiens
cctgggaggctgagtgggaggatcgcttaggcctgggagtttgaggctacagtgagctgtgattgcgccactgcactctagcgtgggtgacagagaaagamcctatcttaagaaaaaaaaaagaaaagaaaaagaaaaaacaaacaaaaaaaacacccaaccctatataggtattattattacttctataggacacataga

SEQ ID NO: 36575 - DNA, 201 bp, Homo sapiens
atgcctgtagtcccagctgcctgggaggctgagtgggaggatcgcttaggcctgggagtttgaggctacagtgagctgtgattgcgccactgcactctagygtgggtgacagagaaagaccctatcttaagaaaaaaaaaagaaaagaaaaagaaaaaacaaacaaaaaaaacacccaaccctatataggtattattatta

SEQ ID NO: 36576 - DNA, 201 bp, Homo sapiens
tcggctgcgcgttgtgcgctgtcccaggttggaaaccagtgccccaggcggcgaggagagcggtgccttgcagggatgctgcgggcgggagcaccaaccgrggacttaccccgggcgggagaagtccacaccggggtaatgggtctgggcttgagggttggcagaggggtggaggagatgcagcggccaggggaccctgga

SEQ ID NO: 36577 - DNA, 201 bp, Homo sapiens
gggttggcagaggggtggaggagatgcagcggccaggggaccctggaagcgcgcgcggagaagtgaatgcagagaccaacgggagcgcagggaggtcgcckgtagcagccagcgcttgcaacccgcaatgagcatagagtatttcttttctgaggggggtcgtctagagtgtccgtgaagggaacaggcacgcgaggctgg

SEQ ID NO: 36578 - DNA, 201 bp, Homo sapiens
agaagtgaatgcagagaccaacgggagcgcagggaggtcgcctgtagcagccagcgcttgcaacccgcaatgagcatagagtatttcttttctgagggggktcgtctagagtgtccgtgaagggaacaggcacgcgaggctggtggaaaaagcgggtgctttgactcttagctggaagcgtcaacgggaagctactctaaa

SEQ ID NO: 36579 - DNA, 201 bp, Homo sapiens
ttgggcaatacggataaaccagggctgttctgagtaaatcaaatgaggatacacagtcactgtgagaaccagtggtgtgctaagcacagtggctcacacckgtaatgccaacaatttgggaggctgaggcaggaggattacttgagcccaggagtttgaggccagcctaggcaagatggtgaaaccctgtctccacaaaaa

SEQ ID NO: 36580 - DNA, 201 bp, Homo sapiens
tctccctgcctcctgcctttccacttgcaccagttttcccaccccagcctcagggcggggctgcctcgtcacttgtctcggggcagatctgccctacacamgttagcgccgcgcgcaaagcagccccgcagcacccaggcgcctcctggcggcgccgcgaaggggcggggctgtcggctgcgcgttgtgcgctgtcccagg

SEQ ID NO: 36581 - DNA, 201 bp, Homo sapiens
aacaggaagagaaatacaggggtggccatttaagttaatgccgggcctggtacacttttaagagtgaaaaggggcaggacaaatgcaaagctcaatggggytcttgggcaatacggataaaccagggctgttctgagtaaatcaaatgaggatacacagtcactgtgagaaccagtggtgtgctaagcacagtggctcaca

SEQ ID NO: 36582 - DNA, 201 bp, Homo sapiens; identical to SEQ ID NO: 11731

SEQ ID NO: 36583 - DNA, 201 bp, Homo sapiens; identical to SEQ ID NO: 11732

SEQ ID NO: 36584 - DNA, 201 bp, Homo sapiens
tgggaggctgaggcaggaggattacttgagcccaggagtttgaggccagcctaggcaagatggtgaaaccctgtctccacaaaaaacaataaaaaaaagtaaaaaaaaaaatgaactgggcatagtggtgcacacctgtagtcccagctactcaggaggctgaggtggaaagatcatctgagccggggagatcaaggctgt

SEQ ID NO: 36585 - DNA, 201 bp, Homo sapiens
atgtagctttatcttccctcacttcttcttgattcttttcttgacctggaaaagtcagcttaaacttctcagtcaaattatctcttggtacaaatttaccyccctggctgctgagatatgtatttacctcttgatcggaaattccataactgaaacttttattttcaaccatctgtatgtgttccttgctgcttctctcct

SEQ ID NO: 36586 - DNA, 201 bp, Homo sapiens
tcccaggtctaaaacatctttcctagagaaaacaaaagggactaaactagaaatataaagagccctatacatgacaggtgatcacgtactgaatgattttgaagtagtacaaacaataaaaattctcattccgcatcatcatgcggtccatgatgatgaggccgcaagtgaggtgatgggactctttcctttaaggctaag

SEQ ID NO: 36587 - DNA, 201 bp, Homo sapiens
gtggaccatcgagtcatcttgggcaatgaactgccaaaattctatgatgagtgaaccttccccagacttctctttcttattttgtaataaactctctaggrccaaaacctggtatggtcattgggaaatgagtgctcagggagatggagcttaggggaggtgggtgcttccctcctagatgtcagcatacactctttcttc

SEQ ID NO: 36588 - DNA, 201 bp, Homo sapiens; identical to SEQ ID NO: 11735

SEQ ID NO: 36589 - DNA, 201 bp, Homo sapiens
tgtaaatcactatcctgatataaataatcaggaagaaggtgatattgtgacccaccataatatcaggcagttaccatacgagaaatcaaggtcgttgggayggaagtaaccttatctgcttttccccataagagcagggtccttgcagccaaaagaaagttatgtgggtggggctgagcaaaagagtgagcaattgaaagc

SEQ ID NO: 36590 - DNA, 201 bp, Homo sapiens
ggaaattccataactgaaacttttattttcaaccatctgtatgtgttccttgctgcttctctcctgccttgcccctggccatgctaaccactgccctcctygattttttccaatgttcagtaaattggaagagctcacttctgatgaaatggggggtgagagtggaggattgtggaccaaaaaaaaaaaaatagactgacc

SEQ ID NO: 36591 - DNA, 201 bp, Homo sapiens
gtcttgtttcggctcttgctggcacttgaatctgtcagtttctgcatctgtaaagtggagataatatagtacctcatgagacggttattttgagaaccacrttctatatgtgaacacagtttaaaagctgtaaatcactatcctgatataaataatcaggaagaaggtgatattgtgacccaccataatatcaggcagtta

SEQ ID NO: 36592 - DNA, 201 bp, Homo sapiens
ttccaggagctggacactgggaaatggaaaagtcttgtttcggctcttgctggcacttgaatctgtcagtttctgcatctgtaaagtggagataatatagyacctcatgagacggttattttgagaaccacattctatatgtgaacacagtttaaaagctgtaaatcactatcctgatataaataatcaggaagaaggtga

SEQ ID NO: 36593 - DNA, 201 bp, Homo sapiens
acctctgaaagcatagtactttggggatatgagataccagggcttcattgcagggtgcagagaccacttaatgtctcagtgggaaggaagggcttgatgawtctttaacctgaggatccctttcccaggtatatggaaccctgggaggaatgctgactcgacagccttttgccattggtggctccggcagcacctttatct

SEQ ID NO: 36594 - DNA, 201 bp, Homo sapiens
ctcctgcctttccacttgcaccagttttcccaccccagcctcagggcggggctgcctcgtcacttgtctcggggcagatctgccctacacacgttagcgcmgcgcgcaaagcagccccgcagcacccaggcgcctcctggcggcgccgcgaaggggcggggctgtcggctgcgcgttgtgcgctgtcccaggttggaaacc

SEQ ID NO: 36595 - DNA, 201 bp, Homo sapiens
cccaggtctaaaacatctttcctagagaaaacaaaagggactaaactagaaatataaagagccctatacatgacaggtgatcacgtactgaatgattttgaagtagtacaaacaataaaaattctcattccgcatcatcatgcggtccatgatgatgaggccgcaagtgaggtgatgggactctttcctttaaggctaaga

SEQ ID NO: 36596 - DNA, 201 bp, Homo sapiens
aggccaaggcgggtggttcacctgaggtcaggagttcgtgaccagtctggccaacatggtgaaacctcatctctacttaaaatacaaaaattagctgggcrtggtgcctgtaatcccagctactcgggaggctgaggcagggagaatcgcttgaacccgggaggcaaaggtggcagtgagccaagattgcgccattgcact

SEQ ID NO: 36597 - DNA, 201 bp, Homo sapiens
ccaggtctaaaacatctttcctagagaaaacaaaagggactaaactagaaatataaagagccctatacatgacaggtgatcacgtactgaatgattttgaagtagtacaaacaataaaaattctcattccgcatcatcatgcggtccatgatgatgaggccgcaagtgaggtgatgggactctttcctttaaggctaagac

SEQ ID NO: 36598 - DNA, 201 bp, Homo sapiens
catgcgtgtgacatgccttaagggcacagcaaagactttgagaactgaatgaagattagatcttttaaaattggaagacttcggccaggcgcggtggctcrtgcctgtaattccagcactttgggaggccaaggcgggtggttcacctgaggtcaggagttcgtgaccagtctggccaacatggtgaaacctcatctctac

SEQ ID NO: 36599 - DNA, 201 bp, Homo sapiens
aaagaataatgacaataaccaaaagaagctacatttgtggcattggctaaatgttttataaattttatctcttaaaattcaaaccaaaaaaccccctgtaytcacacctgtaatcccagcactttgggaggtcaaggcgggaggattgcttgagcccaggagttagtgaccagcctgggcaacatagtgagaaccccatct

SEQ ID NO: 36600 - DNA, 201 bp, Homo sapiens
aggagtaccaggttacccctgagctgcacatgcgtgtgacatgccttaagggcacagcaaagactttgagaactgaatgaagattagatcttttaaaattrgaagacttcggccaggcgcggtggctcgtgcctgtaattccagcactttgggaggccaaggcgggtggttcacctgaggtcaggagttcgtgaccagtct

SEQ ID NO: 36601 - DNA, 201 bp, Homo sapiens
gaatggagttgaccttccccaaaagccactatgataagctatttggtgggtgcttgggtctctgaatttgtggaggaggatctggggtctgaatgtgtatrtgacctgtcccagtagtgtacagggatgagtaaaggaatagggtctgagagggggacaggagatagatttttgagggtcttctttccatctgtgcttagg

SEQ ID NO: 36602 - DNA, 201 bp, Homo sapiens
gcctcaggtgcagagctgcactgcgtggtagcacaagccctgagttaacaagagaaataccggctttctggccagaggaatgaagaaaaagggcccctgcrggcaggaatgtgtaggggaatctccaaactgagagtacaggcggaaattccctaattctgagtctgaaccctcaggagtaccaggttacccctgagctgc

SEQ ID NO: 36603 - DNA, 201 bp, Homo sapiens
taaaggaatagggtctgagagggggacaggagatagatttttgagggtcttctttccatctgtgcttagggatcaaaaagatgattctgtcaagcagatayctggtttctcatttaccatatattgaactattttgtctcttctcccactcctaaccaatttcctcacatgcaaaatgagtatatggggttaggtcaatat

SEQ ID NO: 36604 - DNA, 201 bp, Homo sapiens
agcgcagggaggtcgcctgtagcagccagcgcttgcaacccgcaatgagcatagagtatttcttttctgaggggggtcgtctagagtgtccgtgaagggamcaggcacgcgaggctggtggaaaaagcgggtgctttgactcttagctggaagcgtcaacgggaagctactctaaagcgctttcgctttcactctggtccc

SEQ ID NO: 36605 - DNA, 201 bp, Homo sapiens
ggtagtttacagttccaacattcaatgccattttgctaacaagtgggcagtcaacaggcatattcaacagaaatactagtaggatctcaggctaaacataygaattcaaaactctaaaacaatcacatccccctggagtgtaaagaaaaaaatctaaaattacaaatgcctggagttgtttctagccatgatatttaactt

SEQ ID NO: 36606 - DNA, 201 bp, Homo sapiens
agcgcttgcaacccgcaatgagcatagagtatttcttttctgaggggggtcgtctagagtgtccgtgaagggaacaggcacgcgaggctggtggaaaaagsgggtgctttgactcttagctggaagcgtcaacgggaagctactctaaagcgctttcgctttcactctggtcccggacagtgggggctggttaaatcaaga

SEQ ID NO: 36607 - DNA, 201 bp, Homo sapiens
ctactgccaccactcgtggcttgggggcggctttgttagagaggaatagcctctaacttgaagttaaccctgttctttgaccctctattcatgataagtckgtccgtcggaaagcatactcagaggagcgtcctttggggccagagtaacttacggcctggtaagaaagacacagtgaaaccacttataatttgggaaatc

SEQ ID NO: 36608 - DNA, 201 bp, Homo sapiens
atccggaagaagatgatggaaatcatgacccgagaggtgcagacaaatgccttgaaagaagtggtcaataaattgattccagacagcattggaaaagacayagaaaaggcttgccaatctatcctctccatgatgtcttcgttagaaaagtaaaaatgctgaagaagcccaagtttgaattgggaaagctcatggagcttc

SEQ ID NO: 36609 - DNA, 201 bp, Homo sapiens
ccaccagtccaagaatctgtttaaagttcagacttcaaatagtggcaaataaaaagtgctatttgtgaaaaaaaataaaaataaaataaaaaaataaaaaaaagaaagaaagtaatttgtaccttgctgttggattaatatctttaccttcaaaatgtgtttatagctacaaatacaaagaatacaaacacgctttttgca

SEQ ID NO: 36610 - DNA, 201 bp, Homo sapiens
caccagtccaagaatctgtttaaagttcagacttcaaatagtggcaaataaaaagtgctatttgtgaaaaaaaataaaaataaaataaaaaaataaaaaaaagaaagaaagtaatttgtaccttgctgttggattaatatctttaccttcaaaatgtgtttatagctacaaatacaaagaatacaaacacgctttttgcac

SEQ ID NO: 36611 - DNA, 201 bp, Homo sapiens
accagtccaagaatctgtttaaagttcagacttcaaatagtggcaaataaaaagtgctatttgtgaaaaaaaataaaaataaaataaaaaaataaaaaaaagaaagaaagtaatttgtaccttgctgttggattaatatctttaccttcaaaatgtgtttatagctacaaatacaaagaatacaaacacgctttttgcact

SEQ ID NO: 36612 - DNA, 201 bp, Homo sapiens
gatttgctgggggcaaggtgtctctgcgggattgtttcaaccttttcactaaggaagaagagctagagtcggagaatgccccagtatgtggaggttcacargggatacagtaagggtgggagacctggggggactccatgtggataaaagggattgcatgatgtcttcatatggggaataatatttatgtatctgggtttg

SEQ ID NO: 36613 - DNA, 201 bp, Homo sapiens; identical to SEQ ID NO: 12018

SEQ ID NO: 36614 - DNA, 201 bp, Homo sapiens; identical to SEQ ID NO: 12020

SEQ ID NO: 36615 - DNA, 201 bp, Homo sapiens; identical to SEQ ID NO: 11988

SEQ ID NO: 36616 - DNA, 201 bp, Homo sapiens; identical to SEQ ID NO: 12019

SEQ ID NO: 36617 - DNA, 201 bp, Homo sapiens; identical to SEQ ID NO: 11989

SEQ ID NO: 36618 - DNA, 201 bp, Homo sapiens; identical to SEQ ID NO: 11985

SEQ ID NO: 36619 - DNA, 201 bp, Homo sapiens
cggtctcggcctttctgccctcgaggggggcggacccggctaaagccctgctgtggtgggagaagtgcagagattaagggtcaaggagttgttcgtcctcyatccccgactactgctttctgaacctcgacaccatgtcggaggtcggaggtgggggagggaatggatcgtaagtcacccatatagtctgcttcatttgca

SEQ ID NO: 36620 - DNA, 201 bp, Homo sapiens; identical to SEQ ID NO: 12008

SEQ ID NO: 36621 - DNA, 201 bp, Homo sapiens; identical to SEQ ID NO: 12016

SEQ ID NO: 36622 - DNA, 201 bp, Homo sapiens; identical to SEQ ID NO: 12017

SEQ ID NO: 36623 - DNA, 201 bp, Homo sapiens; identical to SEQ ID NO: 11968

SEQ ID NO: 36624 - DNA, 201 bp, Homo sapiens
ctagggggtaggggcctctccctcactgctggactggagctgggctcctgtagacctgaggggtccctctctctagggtctcctgtagggcttatgactgygaatccttgatgtcatgattttatgtgacgattcctaggagtccctgcccctagagtaggagcagggctggaccccaagcccctccctcttccatggaga

SEQ ID NO: 36625 - DNA, 201 bp, Homo sapiens
gtgtaccaccatgcccagctaattttttgtatttttagtagagatggggttttaccgtgttagccagggtggtctcaatctcctgaccttgtgatctgccygccttggcctcccaaagtactgggattacaggcgtaagccaccgcgcccggccttcacttttattctttagcccccttttctccgtgccacctacagaca

SEQ ID NO: 36626 - DNA, 201 bp, Homo sapiens
actataagatggtgaagcaccgaggagataagggcaatgaggaaaatccccacaggtaggaagaaggaaggactgcctgggaattgttactggatcctcasggttctgtacccctagccaggaaaatcctaaaggtccctagatttctggctgttcctttctgggtcttagtctccaacctctaaccctcagatttgacct

SEQ ID NO: 36627 - DNA, 201 bp, Homo sapiens
ttagcccccttttctccgtgccacctacagacatagtctggttcccctccattatcttccaggctggaaatggaacatttaacagggcaaaactgttgaaygttggggtgcgagaggccctgcgtgatgaagagtgggactgcctgttcttgcacgatgtggacctcttgccagaaaatgaccacaatctgtatgtgtgtg

SEQ ID NO: 36628 - DNA, 201 bp, Homo sapiens
gagaaggctaggtaaggatcctgcaccttccagcctttgtagagctgtcccagtgataggtaatccaaggcatgcgagatttctgagtgagccctgagaaytaagccccagaaccagactgccagtgtcagaggtattcccaaaccctagtttgattcttttctctttgcccctctgatccctctacttgccattccttcc

SEQ ID NO: 36629 - DNA, 201 bp, Homo sapiens
tccattttactctaatatctggggaaacatcatttgactttaaagaagacgctgtctttccctccaccttcaatgtttcattgttttattaactaatcgcyttttatttccaggcctgcgggatacaacgggaatacaaaaatgcgctagagcggtccgcaacgctgtagcctgcgtaaggaacaattgatactaagtggc

SEQ ID NO: 36630 - DNA, 201 bp, Homo sapiens
ctgttctcagagggatgtgagggaactgaactctggtgccgtgctagggggtaggggcctctccctcactgctggactggagctgggctcctgtagacctsaggggtccctctctctagggtctcctgtagggcttatgactgtgaatccttgatgtcatgattttatgtgacgattcctaggagtccctgcccctagagt

SEQ ID NO: 36631 - DNA, 201 bp, Homo sapiens
aatctgtatgtgtgtgacccccggggaccccgccatgttgccgttgctatgaacaagtttggatacaggtagagggcatggaagggtactgggaaacaggraagcctactatcctgtggaaggaggagagccaagcggattgtggttggggatgtgtccccagaagactcggggtatgcaaggatctttctctccctagcc

SEQ ID NO: 36632 - DNA, 201 bp, Homo sapiens
gccagtgtcagaggtattcccaaaccctagtttgattcttttctctttgcccctctgatccctctacttgccattccttcccaacagtgggtcctgtgtcrgtgtcctttagcccagtgccatcactggcagagattgtggagcggaatccccgggtagaaccagggggccggtaccgccctgcaggttgtgagccccgct

SEQ ID NO: 36633 - DNA, 201 bp, Homo sapiens
caaaagtgctaggattgcaggtgtgagccactgcacctggcctacctttttcttaacatgggggatgtgggagagaagctggggtagctcagtcactatthtaagattctcagcaactcccagtcttctcttattcttttgacagaatggcctctctctgcgtccttcctagactgcaagggcagctcctaggagcccttt

SEQ ID NO: 36634 - DNA, 201 bp, Homo sapiens
tgacgacattgctaccaggtcagacttcctgccacttcctccctcctgaccccagtctggatccctgtcctctaagaccacctttgaccatagcccttcarcactaacctttagctccctggtcctgcactgagcccattcctttcccttagtctttttaggatacccaggtcaggcttgcatgctactgcccattgtgtc

SEQ ID NO: 36635 - DNA, 201 bp, Homo sapiens
ccctagggtgactggcactgggccctgaggatttggatacatccagcttttatattctcttcagccatttccttctttctgtttgacttctgtcctgggctttttttttcttttgcctactaagtaatagttgtttttttgtgtgtacagaaacatttaatcccttccttgcttttctctactctggatcccccatgatac

SEQ ID NO: 36636 - DNA, 201 bp, Homo sapiens
cctgtcctctaagaccacctttgaccatagcccttcaacactaacctttagctccctggtcctgcactgagcccattcctttcccttagtctttttaggayacccaggtcaggcttgcatgctactgcccattgtgtcatccttcagtctcctggttagtttgttcttgggagaggacataagatcaataggaaatagtat

SEQ ID NO: 36637 - DNA, 201 bp, Homo sapiens
acaaaagcctctcatcccccattaaccagggcaccaagcccacaggtgtccccagcccactggatcagaaagagttcagtaagaccggaagctcctggtaygggtttctcccagttctctagggaaggccacctgcaggtcactgaaacttcaagcaccagggaagatctaacatttgagtcccttccaggccatcagagg

SEQ ID NO: 36638 - DNA, 201 bp, Homo sapiens; identical to SEQ ID NO: 19062

SEQ ID NO: 36639 - DNA, 201 bp, Homo sapiens
atcaaaatcacagatactccactcctctttgtgtcttccagccccataatgtcaccccattatagtccaagacccttcctgtaccaggaggcccccccatwggcctgcaaggtgtgtattaaactgatggtgacgttgtgactgcttgtccagatgggcccctgagtgaaatggggcactactgatagttccctggtggtc

SEQ ID NO: 36640 - DNA, 201 bp, Homo sapiens
ggatgctgaccctggccaagaacatggaggtcagggccatcttcacggggtactacgggaaaggcaaacctgtgcccacgcaaggtagccggaaggggggygccttgcagtcctgcaccatcatatgagtgttctcaccaccacttatgcccctagaagggaaggggagagggaaacgtgccctctgtttgatccttgttt

SEQ ID NO: 36641 - DNA, 201 bp, Homo sapiens
gcagggaggcaccattcaggaacctggaccaaagctgacgaggctgggccaagccagggatggggccacagccagaaccccgagccctacttccaggttcyggttagctcagccccagcccagcccagctgctctgcccagagctgggtgagtggggagacacctcagagccccgcaaaacccactgaccggaggcaaaag

SEQ ID NO: 36642 - DNA, 201 bp, Homo sapiens
gtgacacccaagacgactggggcccgggtggagttaagcgagcagcaactgcagttgtggccgagtgatgtggacaagctgtcacccactgacaacctgcygcgggggagccgcgcccacatcaccctcggctgtgcagctgacgtagaggccgtgcagacgggccttgacctcttagagattctgcggcaggagaagggg

SEQ ID NO: 36643 - DNA, 201 bp, Homo sapiens
tttttattgctctaaagttgccattagtttgaccaactaaccaatgaatgagctgtagtgggttgctggagaggtgatgcttagtgtccgagtgttttgcrctgggcctcggtggtcctggtggcggatgttggtatgcccctgctcccctgccctgactgcacccgttttctcccggcagtcgtccctggggatgagccc

SEQ ID NO: 36644 - DNA, 201 bp, Homo sapiens
acccctggctggtaagggccaagtcccaccggttgcttctgggaaggggtttctaacactagtctgtgtgctgtggttcctggggtgccctccactgcccyctgttcagtaacagggccttgctaatcgggttgtcactcaacaaaagtgctttggatttaagttactatcctggctttgcccaacctcagcaacctgtaa

SEQ ID NO: 36645 - DNA, 201 bp, Homo sapiens
ccctcggctgtgcagctgacgtagaggccgtgcagacgggccttgacctcttagagattctgcggcaggagaaggggggcagccgaggcgaggaggtgggygagctaagccggggcaagctctattccttgggcaatgggcgctggatgctgaccctggccaagaacatggaggtcagggccatcttcacggggtactacg

SEQ ID NO: 36646 - DNA, 201 bp, Homo sapiens
tctctgtgactgatgttaggctgggcccagaggcacagccggggcctgcctagcactcacatgctggacaggtctgggagaggcagagtgccccacctgcmactaggctgggtgcccacagcccgcatgcagcagcttgctgcaccccaagtccaggtcgggctcagctctggctcacagactggagacaatgcagatgcc

SEQ ID NO: 36647 - DNA, 201 bp, Homo sapiens
acgggaaaggcaaacctgtgcccacgcaaggtagccggaaggggggcgccttgcagtcctgcaccatcatatgagtgttctcaccaccacttatgcccctrgaagggaaggggagagggaaacgtgccctctgtttgatccttgttttgtgacattttttttttttttttttttactcaaagttaacctacctgtaacttt

SEQ ID NO: 36648 - DNA, 201 bp, Homo sapiens
aggtgggcgagctaagccggggcaagctctattccttgggcaatgggcgctggatgctgaccctggccaagaacatggaggtcagggccatcttcacgggrtactacgggaaaggcaaacctgtgcccacgcaaggtagccggaaggggggcgccttgcagtcctgcaccatcatatgagtgttctcaccaccacttatgc

SEQ ID NO: 36649 - DNA, 201 bp, Homo sapiens
aagagctctgagaccctccgcaaagccggccaggtcttcctggaagagctggggaaccacaaggccttcaagaaggagctgcgacaatgtaggtggcaggktggggccttataagcccaccttgctgggcacagggtgctgcgggcaaaggaccatcattgtactcaaaggatggagcacgaagcagcaggaggcagagag

SEQ ID NO: 36650 - DNA, 201 bp, Homo sapiens
tacgggtgatgaagccaaggcaccgagaggtcagccagcccgctgaggccggaagccagtgtgcagggagctgggctccctcaggaagtccggctgtcccygtgtggccctgtctgagcgccttcgtgtttctcacttgagcctggagcgcctatggaaggtgcgtgccgcagttgttagtggatgctgggcctataccga

SEQ ID NO: 36651 - DNA, 201 bp, Homo sapiens
gtgccgcagttgttagtggatgctgggcctataccgacccctgctcagctgtgctcacttctgttagacttccccttctctcctccaggagggaccctccytgggtcagctgttcctcaagagcctgccatctctagcttgggcccctctttctcactctccccaggtgttaaagaaatcttactccaaggccttcacgct

SEQ ID NO: 36652 - DNA, 201 bp, Homo sapiens
ttttttttttactcaaagttaacctacctgtaactttttaaaaacttgtaaaataactgaccctcccttcctgtccgccctcttcccctctaatgctcacrctcccaacacaaggtgggcagggaggcaccattcaggaacctggaccaaagctgacgaggctgggccaagccagggatggggccacagccagaaccccga

SEQ ID NO: 36653 - DNA, 201 bp, Homo sapiens
ccccagggacacatgggggaggtgggaggttgggggagaaggggctgcagcatcttctgaagataggtaccggtgccaggcagggaccaaaaaccagatgrcagctcaagaaaaatggcatctcctcctcctagctcccctgtccccaggcgtagctgcatagacctcagccgcaggttctaaggagcctgccctggcagt

SEQ ID NO: 36654 - DNA, 201 bp, Homo sapiens
aactgaccctcccttcctgtccgccctcttcccctctaatgctcacgctcccaacacaaggtgggcagggaggcaccattcaggaacctggaccaaagctracgaggctgggccaagccagggatggggccacagccagaaccccgagccctacttccaggttctggttagctcagccccagcccagcccagctgctctgc

SEQ ID NO: 36655 - DNA, 201 bp, Homo sapiens; identical to SEQ ID NO: 19078

SEQ ID NO: 36656 - DNA, 201 bp, Homo sapiens
caaaaaataataataataatcacatgaaattgtaagctgcaaaaaaattaaaactaggactattgtggcttcactggggatggttctcaggcctcggactrctcaatttactcatgggtttgtggcatctgcagctccagaggacacaagtctcacacttaggccaaaacccgttttcagatggaaaaacatggacccagg

SEQ ID NO: 36657 - DNA, 201 bp, Homo sapiens
tttggttcgcagcgcctgcgcgcagaggagacggcccgcccccagcccgcccgggtgcccgctccgccccccgggctatgtaaagcggccgggctcgggtygtgccaccgctggactcccgtgtccctccgcgcaggcgggcggccccggagcgctggtgccggcagaggcggcgacggtggcgcccctcctcatcatggt

SEQ ID NO: 36658 - DNA, 201 bp, Homo sapiens
tcaagcaattctcccgcctcagccacccaagtagctgggattacaggcacccgccaccatacctggctaatttataaatttttagtagagacagggtttcrccatgttggccaggctggtctcaaacgccccgcctcaatttcccaaattgccgggattacaggtgcgagccactatgcccagcctattttatttgtaaag

SEQ ID NO: 36659 - DNA, 201 bp, Homo sapiens
tacccaggaaagaattcaagggtgagccagtggtaaggtggaagaaaacaacttcattaaagaggcagtgtgacagctccgtgacttttcctgcagagtasggctgctccgcaggcagtgtgctgaaagcagctcagggcagttgtgcagtcagatctatacctacttttaattgcacgcagattaaaggacagtttctga

SEQ ID NO: 36660 - DNA, 201 bp, Homo sapiens
ggcaggagccaccgaggccggacacgtgggcgacttattgaccaagtggggaggaagcagccccgcactgctctcccgactgcggaccaccgttgggctcmtgcgcatcctaagccccaccgcctcacctccagtccccacagcgttcgcgctcccagccggggtaagcggaagaaaacaaaggcccggctccatcagggc

SEQ ID NO: 36661 - DNA, 201 bp, Homo sapiens
aatgccagccagttgtgtatgaactccaaaaggaagggggtacaatgagggctatctgatctcctgtcccgttatttgaaatgctttttccctggtgctgkaaagaaatagcacttgtaggctgggcgccgtggctcacgcctgtaatcccagtacctggggaggctgaggcgggcggatcacgaggtcaagagattgaga

SEQ ID NO: 36662 - DNA, 201 bp, Homo sapiens
taaaaaaatacctgaacctttaattaggggaaataaattggaaaaatacatttcccttcacttaacattatcttagtttctcttttttttttttttttttwttgagatggagtcttgctctgttacccaggctggagtgcagtggtggcgggacctcagctagatgcagcctccgcctcctgggttcaagcaattctcctg

SEQ ID NO: 36663 - DNA, 201 bp, Homo sapiens
gaataattgagtttgcagaaacctactgtgtgccttcaggtaaatggagagtggggtttggtctagcaacgaagcatctagaaggtccctttggccttacyggctctgttttaggtaagtccacgtctgagtaccagtgactgcagctcttccagttgtgctgtcatgcttatatgttagaaatgatcatcaaaggactca

SEQ ID NO: 36664 - DNA, 201 bp, Homo sapiens
ttaaaagtatagccttaatagtgagagaaactctatagcttcataatataaattgggtaactaatgagataaaatggttggcagatctgctcactagaatytaagctcttcaagggtctgagtttttttttttctttttcttttattatactttaagttctagggtacatgtgcacaacgtgcaggtttgttacataggta

SEQ ID NO: 36665 - DNA, 201 bp, Homo sapiens
tccagcatttccctttcgtcatgttagtctgtgcctgtctacgtgaactatggtgacgtttattgggcctggcactgtgaggtgctggggatgtgaagatyattgtggctcagccgctgctctcgagggcctctgggtgcagtatgcacacctgtgcctcctgtttgctcaggaagacaggctttgagatgagctggggct

SEQ ID NO: 36666 - DNA, 201 bp, Homo sapiens
tcccactcccactcccactcctgctcctcgacgtctcccaccgccgtgtgtgttgtctgcccgcaggactcgctcagcagcagcctgaaaacttgctacargtatctcaatcagaccagtcgcagtttcgcagctgttatccaggcgctggatggggaaatgcggtgagtgatggaggcagcgcctctggcttggaggaaa

SEQ ID NO: 36667 - DNA, 201 bp, Homo sapiens
gaaaaattcacatttaaactactctgggggctgggcaaggtggctcacgcctgtaatctcaacactgggagaccaaggcaggaagatcactgaagccaggrtatcgagaccagcctggacaacgtagtgagaccttatctcttaaaacaaaacaaaacaaaacaaaacaaaaaaaacagtaaaaattggccgggcacagtg

SEQ ID NO: 36668 - DNA, 201 bp, Homo sapiens
tgaggcaggagaatcgcatgaacctgggaagtggaggctgcagtgagccaagattgcaccactgcactctagcctgggtgacagagcgagacaccatcttaaaaaaaaaaaaaaatctacaatataccaaaaccattacttacctgagaaactattctcagggtcattgtagtgaatgcctattttatggcttttgatggc

SEQ ID NO: 36669 - DNA, 201 bp, Homo sapiens
ttcgtcatgttagtctgtgcctgtctacgtgaactatggtgacgtttattgggcctggcactgtgaggtgctggggatgtgaagatcattgtggctcagcygctgctctcgagggcctctgggtgcagtatgcacacctgtgcctcctgtttgctcaggaagacaggctttgagatgagctggggctgacatccccacctt

SEQ ID NO: 36670 - DNA, 201 bp, Homo sapiens
agatgctgagtcttactcctaagaaaaattcacatttaaactactctgggggctgggcaaggtggctcacgcctgtaatctcaacactgggagaccaaggyaggaagatcactgaagccagggtatcgagaccagcctggacaacgtagtgagaccttatctcttaaaacaaaacaaaacaaaacaaaacaaaaaaaacag

SEQ ID NO: 36671 - DNA, 201 bp, Homo sapiens
tcagatagtgttctaggtgctggaggtacaacagtgaacaagctaggtgaagaccttgattttataaaacttactttttagtggaagagagacaatttaaraaagcgaatgtacagtttttcacgtggagaaaagcactgcagaggaagatactagcagggcaagggatctgagtgcagtcagacctcatttgggtccaga

SEQ ID NO: 36672 - DNA, 201 bp, Homo sapiens
gatacagggttcatattcctaatattaaaaaaaacttctaaaagttaagaaaaaggccaactgccccacagaaaaatgggcaaggagataagaacaagatwgttcacaggaagagacacacagatgattattaaaaatctgaaaagatgctgagtcttactcctaagaaaaattcacatttaaactactctgggggctggg

SEQ ID NO: 36673 - DNA, 201 bp, Homo sapiens
cgctcccagccggggtaagcggaagaaaacaaaggcccggctccatcagggcaccaatcccgctcgtcggcctctttctcggcctccaatgagcttctagrgtgttatcacgccagtctccttccgcgactgattggccggggtcttcctagtgtgagcggccctggccaatcagcgcccgtcagcccaccccacgaggcc

SEQ ID NO: 36674 - DNA, 201 bp, Homo sapiens
ccacaggtccagccggccggtgagcgcctggggaccgcagaggtgagagtcgcgcccgggagtccgccgcctgcgccaggatggagttcgtgaaatgcctyggccaccccgaagagttctacaacctggtgcgcttccggatcgggggcaagcggaaggtgatgcccaagatggaccaggtgggccgagcctccctgcttg

SEQ ID NO: 36675 - DNA, 201 bp, Homo sapiens
gggaggctgaggcaggagaagcacttgaacccagaaggcagaggtggcagtgagccgagactgtgccactgcactccagcctggcaacaagagtgaaattytgtctcaaaaaaaaaaaaaaaaaaaaaaaaaaaaggcgcttgaacattaatttactaagcaggccatttttacttcctgcagaaagggtacactcgccag

SEQ ID NO: 36676 - DNA, 201 bp, Homo sapiens
gctggtcggaattggcctttcccgtcttttctcagcctcagagtttgaagaccccttagttggtgaagatacagaacgtgccaactctatgggcctgtttytgcagaaaacaaacatcatccgtgactatctggaagaccagcaaggaggaagagagttctggcctcaagaggtaacagattcagggtattttgggggaaa

SEQ ID NO: 36677 - DNA, 201 bp, Homo sapiens
ggcccggatctggggcaaggggcgcggcgagcagggccgacgcctgggtgttcccgtccccctttcctcgagccttccccctgtagggcccgggtggacgyggccgtcctggctgacctgtccctgcccccgcaagccgccctgggcatgagcgacttttgcgtggttcccggtggttgcgctccccgtttcgtcccctcc

SEQ ID NO: 36678 - DNA, 201 bp, Homo sapiens
agtagccttttattatagtagcagtacatgtgtattgtagaaatttggaaaatacaagtgaaaaataaaaacatcaaattcccgtcagccagagactgctrtgaaatgttttgagcacatccttcttgaatgttttttaaatcctggtatgtatatttgtattttaaaatcaaaatgcattcttacccattctcttttgaa

SEQ ID NO: 36679 - DNA, 201 bp, Homo sapiens
ttattgggaagaggatttcagcggagcccgagtagagtttggtctagggagactctgtcactgggaggacgagcgagccgctcggaagtgcgctgggttcycttagcggccagtgggttctggtgagaagggcaacagcgggaggaggcgccggtgcggagcgggaggccgggggcggggctgcggggctgcggggcgggc

SEQ ID NO: 36680 - DNA, 201 bp, Homo sapiens
cagaacatagcccggccctacgtgtttactttagaaagcccttccaggctctttgccatctagtagagtccctgcgggcccagcctttcagagaagagggsggagggggtgatgtttattaactttttttagtcttggcagctgaacctgcctgtgagcaggtcgtgtatttctcggcttcccttatccaactttgcattt

SEQ ID NO: 36681 - DNA, 201 bp, Homo sapiens
agtgggttatagttaaaatcctaagatttttaaagtccctcaagttcatgtggacatctgcctaggtcctactatcctagaattcgcatgtcttatcacayaaataactgattcttccatatcttataaataaaggtttgatttagcaaagtcacatgttgtgtaatagctcgaagaagccctttttgtccacagttgcca

SEQ ID NO: 36682 - DNA, 201 bp, Homo sapiens
aacagtccttatgttattgaaacaaacctaatctgtagctgagttgggagggagctaagtggacagagagtcctccacccaaacaaaagaatctttgattyttgggcataatgggagcaatatttaaaaaaaaaaaaaaaaaaaaaaaaaggaatgtttggggaagactcttgcggtgcaaaggctgtttcagattgctga

SEQ ID NO: 36683 - DNA, 201 bp, Homo sapiens
catatataattttaagctacttgagttgtaggtccctccagtctgtgattcagtttgagatgggactgtatgggaattaacagtgccttgtcttcttaagsagtgatttgtgtatgtgctgatatagctcagtatgtctttgaaaccagttgtctggggctaggcctgcaatcagcttttggctaagaggtcccaggatgg

SEQ ID NO: 36684 - DNA, 201 bp, Homo sapiens
acagggaaattacctagtacataatgtactgttatctacattttatctagatgaggaaactgaggcacagagaaattaagtactttgcctaggattacccrtgaagttaagtgacagaatcaatgaatctggaaggtctggcttcagatctcttgtgctgagtcactcgcatactttactacctctaaggtttctaatcag

SEQ ID NO: 36685 - DNA, 201 bp, Homo sapiens
aatgatacttgttacataggaagtgcttgatccatgtttgcacaaatgaatctttctcataatgaggtttctctaaacaagctgttctcccaaaaacttamacccagctttatgttgaagcatctcattatacattggaaagatgaaatgtgtagtgagactttgaatcttcttttgaatctagaaacattagcattttta

SEQ ID NO: 36686 - DNA, 201 bp, Homo sapiens
acaggagtgggacaaggttagtctcataaaacagtgtctgtgtgtgatgtattagacagagctggcagtcctcatagtgaagctcagaacaagaaaagttrtccagtattttcagcccctctggttttacaattcatctgtttaggttgaatgtctcatcataaacagtttattccagagttaattccaaaccagcagcta

SEQ ID NO: 36687 - DNA, 201 bp, Homo sapiens
ggttaggagtcttgcctatttttcataggaatggtgtttgtgagacttactcatcacttctgtggaagtaaagacattttatttatttattttaaagccartcagatttagcaggcagagacatttcagacatctaaagtgttgatgtatttcatacctttaactgtgcttaaattaggatctccgaaaagatgctgctac

SEQ ID NO: 36688 - DNA, 201 bp, Homo sapiens
tgaatagaagttttgatcagataaaattgaattaaaaaaaattttttttgagacagggtcttgctgttatccaggctggtgtgtagtggtgtgatcacggytccccgcagcctcaacctcctgggctcaggtgatcctcccacctcagcctaccgagtagctgtaactacagtgcatgacaccataccaggctcatttttg

SEQ ID NO: 36689 - DNA, 201 bp, Homo sapiens
cagacaaggcagccttgaccttctgggctcaagcaatcttccttgccctcagcctcctgagtaactgggaccacaggcacgttgccaccatgcctggctartttattttaatttttattatttttgagacagggtattgctctgtcacccaggctggagtgtagtggcatgatcaaggctcactgcagccttcacctcctg

SEQ ID NO: 36690 - DNA, 201 bp, Homo sapiens
tgtcacccaggctggagtgtagtggcatgatcaaggctcactgcagccttcacctcctgtgctcaagcagtcctctcacctcagcctccccattagctggractataggtccacaccactacaccaggctaatttttgtaattttttggtagagacagggtttcatcgtgttgcctaggctggtcttgagctcctgggctc

SEQ ID NO: 36691 - DNA, 201 bp, Homo sapiens
ccaagtggtggatatggtaacaacccatgtgcactagcttaacaaaaagttcttaggaatggctttgttcggcctggcgcagtggctcatgcctgtaatcmcaacagtttgagaggccaaggtgggcggatcacctgaggccaggagttcgagaccagcctggccaacatagtgaaaccccgtgtttactaaaaaatacaa

SEQ ID NO: 36692 - DNA, 201 bp, Homo sapiens
gacagagtgagactccctctcaaaagaagaggaagggcttggttcttctgctcagccctgaatcagttactgttgctacacagctgagttctctggcctcrcctggattacgtctacacagtacacacagaatggatttcccccaaagaaagaattctgcggcaggaaggggaaagggatggcaggtagacaaaaactcca

SEQ ID NO: 36693 - DNA, 201 bp, Homo sapiens
aatcagttactgttgctacacagctgagttctctggcctcacctggattacgtctacacagtacacacagaatggatttcccccaaagaaagaattctgcrgcaggaaggggaaagggatggcaggtagacaaaaactccaggtgtctgtaataagggacagggtcgatctttaattaaaacatggacagggaacagaaag

SEQ ID NO: 36694 - DNA, 201 bp, Homo sapiens
caggacttgatgaatgattttgaaggggtggatataaggagagaaagggcgttatcaatgacacctggattttgtgattacaaaactgagaggctgttaaygctatccacaggagaagcagatttaatggaagagagatttaaagaatgggcacgttaactaactttgcattgtttaggcaccatcgtgtcctatacgcag

SEQ ID NO: 36695 - DNA, 201 bp, Homo sapiens
agcgacttttgcgtggttcccggtggttgcgctccccgtttcgtcccctccgtgagcatcggcgcttaccggtattttaacccgagggttacacatctgasgcaatgtgggtgggttacgcgggagaggacgagtgagttttttggtaagcggaatgaactatgcagataacatcacatgaaggccgtttctggaatgaag

SEQ ID NO: 36696 - DNA, 201 bp, Homo sapiens
ctgtctctcacacacactcaaaaaaaaaaaaaaaaaaaaaagaaacaaacaaaaaaaacggtgggggaggggaacagataaaggagaggccaggaaacacyagaaaaggattcctgaagcagattccacctgagctgtaatggaggcgtggcaggtggctaggcaaggagcaggaagcctattccaggcaggtgaattgct

SEQ ID NO: 36697 - DNA, 201 bp, Homo sapiens
acatatagtatgtgggcctccatttgtcctcttatcccaggccttgcagaatttaggaataagcctcaatacagtgttctaacccagtgacttccgcctcratgtacagtagattgaacctgatcctttatactttagtgatcattagttgataccagttcaagtcaggctttctagaaatctcattgtatgttaggggtt

SEQ ID NO: 36698 - DNA, 201 bp, Homo sapiens
ccaaggtcttgggcctcttaatttttcaaacctcaaaacttgacagcagttatctttggaactgctgatttgtgcttcctaagttaacagcatacaatgaytgctagaaatcaatttctgcatttaaggtgaagttagccgggtactatggtttacctgtaatctcagcactttgggaggctgaggtgggaggatcatttg

SEQ ID NO: 36699 - DNA, 201 bp, Homo sapiens
aaaattacccaggcgtggtggttgggcgcctgtaatcccagctactcgggaggctgaggcaggagaagcacttgaacccagaaggcagaggtggcagtgarccgagactgtgccactgcactccagcctggcaacaagagtgaaattctgtctcaaaaaaaaaaaaaaaaaaaaaaaaaaaaggcgcttgaacattaattt

SEQ ID NO: 36700 - DNA, 201 bp, Homo sapiens
gtggctttagacatttcataaatatttcttaaatgcctcctaaatgctaggatttggcaatacaaggctaaacaaaatacaaagccaaatcctactgtaaygggagtatgtaaagtgtttctgttaatggaaaaagtgctgtgtgaggatgggggttaagtgactggactgtttgtgttctgagctttctaggactgatct

SEQ ID NO: 36701 - DNA, 201 bp, Homo sapiens
ctaggtattcgggaggctaaggcacaaggatcccttgagcgcaggagctcaaggttggattgagttgtaatcacaccactgcactccagcctcggtggcasaatgaaactgtctcaagaaaaaaaaaaagtgacagagggaaacaatatttgcaattcatagagcagatacagggttcatattcctaatattaaaaaaaac

SEQ ID NO: 36702 - DNA, 201 bp, Homo sapiens
ggagaccaaggcaggaagatcactgaagccagggtatcgagaccagcctggacaacgtagtgagaccttatctcttaaaacaaaacaaaacaaaacaaaamaaaaaaaacagtaaaaattggccgggcacagtgactcctgcctataatcccagcactttgggaagcccaggtgagtggatcacttgaggtcaggtgtttg

SEQ ID NO: 36703 - DNA, 201 bp, Homo sapiens
cacagtgactcctgcctataatcccagcactttgggaagcccaggtgagtggatcacttgaggtcaggtgtttgagaacagcctggccaacatggcaaaaytccgtctctactaaaattacaaaaattagccaagtgtggtggcatacgctggtagggccagctacttgggaggctgatgtgagactccatttaaaaaaaa

SEQ ID NO: 36704 - DNA, 201 bp, Homo sapiens
tcactcctgaagccagtaagacaacgaacccactgggagaaacaaacaactccagacgcgccgacttaagagctgtaatactcgctgtgacggtctgcagsttcactcctgagccagcgagaccacgaacccaccagaaggaagaaactccgaacacatctgaacatcagaaggaacagactccggacacgccgcctttaa

SEQ ID NO: 36705 - DNA, 201 bp, Homo sapiens
aaaattagctgggtatagtggcacacccctatagttctcgctccttgggaggttgaggcaggaggattgcctgagcccaggagttcaaggctgcagtgaaycatgatcacaccactgcattctagcagcctgggagacagagcaaaacccttgtctcaaaacaaacaaacaacaacaaaaaaacaaaaaacacttccctca

SEQ ID NO: 36706 - DNA, 201 bp, Homo sapiens
gtgtgcagccagggttgagaaaccactcttgtcttacccctcttttgcagacacagggctcagagaagggaaggggattgtctggggatgtatagtgaggsagtggctgccttggaagtggagtctcagtctcccggctcctaggccagcccctgaccactgttccattgtctcccagacagaacatcagccacgggcatg

SEQ ID NO: 36707 - DNA, 201 bp, Homo sapiens
gctcctccatgctggggcattgcatcactgctttattcctttttatcgcctagtattattccactgtgtggatagaccacatttatccattcatcagttgraggatatttgggttcttcccattttttttggctatggtgaatagtactgtgtacatttgcatataaggttttgtgtagatgtgtgttttcctttttcttg

SEQ ID NO: 36708 - DNA, 201 bp, Homo sapiens
tcccagatgtcatcacctacctttcgagactcagaaaccagagtgtgtttaacttctgtgctattccacaggtagggaacggggctcctctgggtggatayggggctaaagggagtggggtaggagtaagggtggattttgctgtgctatattcaaggatatgattccttaaaaagacgatgactccagtttattacgctg

SEQ ID NO: 36709 - DNA, 201 bp, Homo sapiens
tttattacgctgggagtttcatagcacccgcctttgcttccagccaccaaactcagctcagccttgaggttaagcctgctccttttcagaaccttctttcyggatttactattttctacagctatcctaaactagttaggttcttttcctcacagttaagtcaaggtctttggcttagatttatggggagtgctgggtaaa

SEQ ID NO: 36710 - DNA, 201 bp, Homo sapiens
agcctggacaacgtagtgagaccttatctcttaaaacaaaacaaaacaaaacaaaacaaaaaaaacagtaaaaattggccgggcacagtgactcctgcctrtaatcccagcactttgggaagcccaggtgagtggatcacttgaggtcaggtgtttgagaacagcctggccaacatggcaaaactccgtctctactaaaat

SEQ ID NO: 36711 - DNA, 201 bp, Homo sapiens
acacctaagtcagactgagggagctggattaggggctctctaacaaatagcaccatcacataacatgtctgtttcttcctctgcattgtaagctccttggstgtggaaccttatcttactcatctttgttttttcccatgtctcctgccacattgtagatgttcagccaatgtttgttgcatttaaagaacagataaagaa

SEQ ID NO: 36712 - DNA, 201 bp, Homo sapiens
atttggtcggctgtctgaaccccacctctggagtcgaatctcgccttctatctcattttgagttccttggactgcctgcagcagcggttgtttaagccatrgttctgttatatagtgtctggctgttatccattcgtatgttcagcttccaagtggacacctaagtcagactgagggagctggattaggggctctctaaca

SEQ ID NO: 36713 - DNA, 201 bp, Homo sapiens
gaggcagtgtgacagctccgtgacttttcctgcagagtagggctgctccgcaggcagtgtgctgaaagcagctcagggcagttgtgcagtcagatctatayctacttttaattgcacgcagattaaaggacagtttctgaagacatctgtaggaaaagggtagtaacttctgggttgttgggtcattgccatggaaagggg

SEQ ID NO: 36714 - DNA, 201 bp, Homo sapiens
tcaagaggtaacagattcagggtattttgggggaaaataactttagacattctctgaaaaatcctttaactcttgtggttgcgggtgacagaaaaacaagycaggcctcccccaggcagcataaggggatgtggaaaataggatagattgacatgagtttgcttcaggtagactggctgactcccaggattcacaccacgt

SEQ ID NO: 36715 - DNA, 201 bp, Homo sapiens
aacactcacggggtaggtttgcagcttcactcctgaagccagtaagacaacgaacccactgggagaaacaaacaactccagacgcgccgacttaagagctrtaatactcgctgtgacggtctgcagcttcactcctgagccagcgagaccacgaacccaccagaaggaagaaactccgaacacatctgaacatcagaagga

SEQ ID NO: 36716 - DNA, 201 bp, Homo sapiens
atatttgtattttaaaatcaaaatgcattcttacccattctcttttgaacctgcttttttgtagctaatgatctctagtgtgtccatttcagtaaaaattscattattaaagtgctttaaaaatcgtctcttacagtactgccactatgttgctgggctggtcggaattggcctttcccgtcttttctcagcctcagagtt

SEQ ID NO: 36717 - DNA, 201 bp, Homo sapiens
tatatttgtattttaaaatcaaaatgcattcttacccattctcttttgaacctgcttttttgtagctaatgatctctagtgtgtccatttcagtaaaaatkccattattaaagtgctttaaaaatcgtctcttacagtactgccactatgttgctgggctggtcggaattggcctttcccgtcttttctcagcctcagagt

SEQ ID NO: 36718 - DNA, 201 bp, Homo sapiens
tgccaccaatatgccagctgtcaaagccatcatatatcagtatatggaagaggtgggtttttatttaactacttggataatttgtagctacttttatgatktagtaatgtcactgtttaaccaggtttggatattagatgatcctaacaattcactatcctgtggcctaaagagacaggaattgatatcctttataaggaa

SEQ ID NO: 36719 - DNA, 201 bp, Homo sapiens
taagagcataaaagcgggctgccttaaaaaaaacggtggcaacacgctgggtttgctttacaacgcctgggaagctttgttgtttgcaataaattttaatwcttgtctgtttcggtctgcactgcctttatgagctgtaacactcacggggtaggtttgcagcttcactcctgaagccagtaagacaacgaacccactggg

SEQ ID NO: 36720 - DNA, 201 bp, Homo sapiens
atttcctaaattttctttggaaaatttcatttcaaataccaaaaccatcctataaaaagaaaacttaccttcttaggtcaaatctctaatatttgactagrttcaaaaagtttatttctggccaggcacagtagcttactcctgaaatcccagcactttgggagaccaaggtgggaggatcacttgaggccaggaattcaa

SEQ ID NO: 36721 - DNA, 201 bp, Homo sapiens
agggtgtgggtggggccagataagagcataaaagcgggctgccttaaaaaaaacggtggcaacacgctgggtttgctttacaacgcctgggaagctttgtygtttgcaataaattttaatacttgtctgtttcggtctgcactgcctttatgagctgtaacactcacggggtaggtttgcagcttcactcctgaagccagt

SEQ ID NO: 36722 - DNA, 201 bp, Homo sapiens
ttatgaaaacatacaagaccctcatcatttttcctttgcctgagctccctccccagaggttacctctgttcatggttttgtgcatccgtctagtccccctrttacgcgtttacaggaatatggtttgcaacagtgttttcatctaaatagaattatacaaaatagcgatttctgatttctcttgcatattgcacattcttc

SEQ ID NO: 36723 - DNA, 201 bp, Homo sapiens
cataatttgaacccaggtctgtctgacatcagaatccatgatgttaaccccaattctaaggggttcaactaccctttctaaatggaatcctgctatattargcactatttattcattttatataaactagaaacattttatgtagtaagtagttgagagtgttttggttttgcagtttgatcactagttttagaaaccagt

SEQ ID NO: 36724 - DNA, 201 bp, Homo sapiens
ctaaaaatacaacatttagccaggtgtggtggtgcacacttgtcatcccagctattccggagcctgagacatgagcatcgcttgaactcgggaggtggagkttgtagtgagctgagatggcaccactgcactccagcctgggcaacagggtgaaggccctttctcaaacccctcaagtatttggcttcaactttatgccgg

SEQ ID NO: 36725 - DNA, 201 bp, Homo sapiens
catgagcatcgcttgaactcgggaggtggaggttgtagtgagctgagatggcaccactgcactccagcctgggcaacagggtgaaggccctttctcaaacycctcaagtatttggcttcaactttatgccgggcatgtagatgaaaagtcggctatgacctgtccttgacaagcagatgtaactccttgattgaggctagt

SEQ ID NO: 36726 - DNA, 201 bp, Homo sapiens
gtttttaagacctgaataattgagtttgcagaaacctactgtgtgccttcaggtaaatggagagtggggtttggtctagcaacgaagcatctagaaggtcyctttggccttaccggctctgttttaggtaagtccacgtctgagtaccagtgactgcagctcttccagttgtgctgtcatgcttatatgttagaaatgatc

SEQ ID NO: 36727 - DNA, 201 bp, Homo sapiens
acgaagcatctagaaggtccctttggccttaccggctctgttttaggtaagtccacgtctgagtaccagtgactgcagctcttccagttgtgctgtcatgyttatatgttagaaatgatcatcaaaggactcaaaagttttgccactaattgtattaccggggactgtcacaaccaagatttctcttaatttattcacctt

SEQ ID NO: 36728 - DNA, 201 bp, Homo sapiens
aaaaaaaaaaaaaaaaaaaaaaaaaaaatacaaaagttagttgggcatggtggcaggtgcctgtaatcccagctacttgggaggctgaggcaggagaatcrcatgaacctgggaagtggaggctgcagtgagccaagattgcaccactgcactctagcctgggtgacagagcgagacaccatcttaaaaaaaaaaaaaaat

SEQ ID NO: 36729 - DNA, 201 bp, Homo sapiens
ttgcttgtacagttgctctgagaaggtaagtcttaaattttcaaaagtgaaatgtcaccgagcatggtggcttatgcctctaatctcagcactttgggagrctgaggcaggcggatcacttgaggtcaggagttcgaaaccagcctgacttatgtgatgaaaccctgtctctactaaaaaaaaaaaaaaaaaaaaaaaaaa

SEQ ID NO: 36730 - DNA, 201 bp, Homo sapiens
ctgagaggtcgaggctacagtaagctgtgtgatttcatcattgcactctagcctgggtgatagagtgagactttgtctcaaaaaaaaaaaaaaaaaaaaargtcttagagaccagaagtctctgtaatctctaataatctctaggccctagagcagtggtttgtaaatggaggtgatttgctcccctccccccagaggaca

SEQ ID NO: 36731 - DNA, 201 bp, Homo sapiens
taaattttcaaaagtgaaatgtcaccgagcatggtggcttatgcctctaatctcagcactttgggaggctgaggcaggcggatcacttgaggtcaggagtkcgaaaccagcctgacttatgtgatgaaaccctgtctctactaaaaaaaaaaaaaaaaaaaaaaaaaaaaaaatacaaaagttagttgggcatggtggcag

SEQ ID NO: 36732 - DNA, 201 bp, Homo sapiens
gtgaaaaacgggggatttaacatagattttcacagtggctttagacatttcataaatatttcttaaatgcctcctaaatgctaggatttggcaatacaagrctaaacaaaatacaaagccaaatcctactgtaacgggagtatgtaaagtgtttctgttaatggaaaaagtgctgtgtgaggatgggggttaagtgactgg

SEQ ID NO: 36733 - DNA, 201 bp, Homo sapiens
tctcggcttcccttatccaactttgcatttctatttctagcatattgggttgattcttttgaagctgcctctgtgcacattacacccatgaacttagaccmgttgcctttatgtatgatcgtatttatactgagaagttactgtgttttttgactttcttttctatttgctacatattagttcggtctaaacgtttggtct

SEQ ID NO: 36734 - DNA, 201 bp, Homo sapiens
aagtggatttactttttttctttaaggatggatgttgtgttctctttatttttttcctactactttaatccctaaaagaacgctgtgtggctgggaccttwaggaaagtgaaatgcaggtgagaagaacctaaacatgaaaggaaagggtgcctcatcccagcaacctgtccttgtgggtgatgatcactgtgctgcttgt

SEQ ID NO: 36735 - DNA, 201 bp, Homo sapiens
acaaggcagatcatctccaccatccggacgcagaatcttcccaactgtcagctgatttcccgaagccactactcccccatctacctgtcgtttgtcatgcytttggctgccctgagctggcagtacctgaccactctctcccaggtaacagaagactatgttcagactggagaacactgatcccaaatttgtccatagctg

SEQ ID NO: 36736 - DNA, 201 bp, Homo sapiens
aggagtggtatgagactggaacagaggtgtgcagcagcatcgcatgggcgaaacaacagtagacagttgttcttttgtttttgtttgttttttgagacagsgtcttgttctgtcatccaggctggagtgcagtggcatgatctcggatcactgcaacctccacctcccaggctcaagtgatcttcccaccccagtccccaa

SEQ ID NO: 36737 - DNA, 201 bp, Homo sapiens
ctggctgaacctggagctgcagacaggttttctagaaggcataatcctgaagttgagacttgggggcctaggtaggagccagttgaagggacgtgggaggygcattccagagagaaggagtggtatgagactggaacagaggtgtgcagcagcatcgcatgggcgaaacaacagtagacagttgttcttttgtttttgttt

SEQ ID NO: 36738 - DNA, 201 bp, Homo sapiens
acctccacctcccaggctcaagtgatcttcccaccccagtccccaagtagctgggggaccacaggtgcatgccacgatgcccggctaatttttgtacattytgtagaaacagggttttactgtgttgtccaggctggtcttaaacgcctgagcttaagcagtctacatgcctcagcctcctgaagtgctgggattccaaac

SEQ ID NO: 36739 - DNA, 201 bp, Homo sapiens
gcatgccacgatgcccggctaatttttgtacattttgtagaaacagggttttactgtgttgtccaggctggtcttaaacgcctgagcttaagcagtctacrtgcctcagcctcctgaagtgctgggattccaaacatgagccactgtgcctggcccggcaactgttactagactatagagagggaggtgggcaagggctgg

SEQ ID NO: 36740 - DNA, 201 bp, Homo sapiens
taaacgcctgagcttaagcagtctacatgcctcagcctcctgaagtgctgggattccaaacatgagccactgtgcctggcccggcaactgttactagactrtagagagggaggtgggcaagggctggtgacactagacaggtgcagtaggtctggaccatgggtggccttgcgctacacattacagagctcaggctttttt

SEQ ID NO: 36741 - DNA, 201 bp, Homo sapiens
tctgagcctccctttcctcattggtaaaatgggtataaaatacctgccagtggagggttgttgtaagtagccatggaaaatgtaaagcacatagcacttaycattttttcctgtgtctttaacagatttatcatagaatccccgactcagacccatcttctagcaaaacaaggcagatcatctccaccatccggacgcaga

SEQ ID NO: 36742 - DNA, 201 bp, Homo sapiens
taggaaagtgaaatgcaggtgagaagaacctaaacatgaaaggaaagggtgcctcatcccagcaacctgtccttgtgggtgatgatcactgtgctgcttgyggctcatggcagagcattcagtgccacggtttaggtgaagtcgctgcatatgtgactgtcatgagatcctacttagtatgatcctggctagaatgataat

SEQ ID NO: 36743 - DNA, 201 bp, Homo sapiens
gtcgctgcatatgtgactgtcatgagatcctacttagtatgatcctggctagaatgataattaaaagtatttaatttgaagcaccatttgaatgttcgtamtagtagaaaatgatgtgaattttctttctgttcggctcctatttttctcatcattttgttttctttaattgggttgaatggagtagatagaaatatttat

SEQ ID NO: 36744 - DNA, 201 bp, Homo sapiens
ggactcaaaagttttgccactaattgtattaccggggactgtcacaaccaagatttctcttaatttattcaccttacttatctcctggaagggcatattgragtgctcttggagttctctaaaagggtttttgttggttgtgtatattcacttgggtgccagcgattgattccaaataagtaaatcttttttcccaaaagg

SEQ ID NO: 36745 - DNA, 201 bp, Homo sapiens
atcccatttgtctagtttggcttttgttgccattgcttttggtgttttagtcatgaagtctttgcccatgcctatgtcctgaatggtattgactgcatttycttctagggtttttacggttttaggccttatatttaagccttcagtccatcttgagttaatttttgtataagatgtaaggaagggatccagtttcagctt

SEQ ID NO: 36746 - DNA, 201 bp, Homo sapiens
ttaaagtagttttttccaattctgtgaagaaagtcattggtagcttgatggggatagcattgaatctgtaaattaccttgggcagtatagccattttcacsatactgattcttcctatccatgagcatggaatgttcttccatttgtttatggcctcttttatttcattgagcagtggtttgtagttctctttgaagaggt

SEQ ID NO: 36747 - DNA, 201 bp, Homo sapiens
tcatgatttggctccttgtttgtctgttattggtgtataggaatgcttgagattttttgcacattgattttgtatcctgagactttgctgaagttgcttakcagcttaaggagatttagggctgagacgatggggttttctaaatatacaatcatgtcatttgcaaacaggcaattttacttcctcttttcctaattgaat

SEQ ID NO: 36748 - DNA, 201 bp, Homo sapiens
attttttattacgtctttttgattcttctgtcttttcttcttgctagcggtctatcaattttgttgatcttttcaaaaaaccagctcctggattcattaatttttttttttgaagggttttttgtgtgtctatctctttcagttctgctctgatcttagttatttcttgccttttactagcttttcaatttgtttgctctt

SEQ ID NO: 36749 - DNA, 201 bp, Homo sapiens
tgtttagtctgcagtacaattataactgtttttgtatattgggttatttttttcagaagtaggccagtagctctaacaggagcctctttagcctgaattcrtccaagtagtgcagtgttgcactagttgtccctcgggacatgctccccaatacgtaactcacttccaggttgcaactggacacttactggtagtcagaaa

SEQ ID NO: 36750 - DNA, 201 bp, Homo sapiens
cttttcttcttgctagcggtctatcaattttgttgatcttttcaaaaaaccagctcctggattcattaatttttttttttgaagggttttttgtgtgtctrtctctttcagttctgctctgatcttagttatttcttgccttttactagcttttcaatttgtttgctcttgcttttctagttcttttaattgtgatgttaa

SEQ ID NO: 36751 - DNA, 201 bp, Homo sapiens
gtacatttgcatataaggttttgtgtagatgtgtgttttcctttttcttgggtctatgctgagaagtggaattgctggttcatacagcagctcgaaccttktgaggagctgccagacgcttttccaaggtcgctccaccattttacattcccgtcagcagtgtgagagtcccagtttcaccagcacttgttgttatctctt

SEQ ID NO: 36752 - DNA, 201 bp, Homo sapiens
ttgcttttctagttcttttaattgtgatgttaaggtgttgtttttagatctttcctgctttctcttgtgagcatttagtgctataaatttccctctacacwctgctttaaatgtgtcccagagattctggtatgttgtgtctttgttctcattggtttcaaagaacatctttatttctgctttcatttcgttatgtaccca

SEQ ID NO: 36753 - DNA, 201 bp, Homo sapiens
ggcctggcgcagtggctcatgcctgtaatcccaacagtttgagaggccaaggtgggcggatcacctgaggccaggagttcgagaccagcctggccaacatmgtgaaaccccgtgtttactaaaaaatacaaaaattagccgggcgtggtggcaagggcttgtaatcccagctacctgggaggctgaggcaggagaatcgct

SEQ ID NO: 36754 - DNA, 201 bp, Homo sapiens
caaaaggaagggggtacaatgagggctatctgatctcctgtcccgttatttgaaatgctttttccctggtgctgtaaagaaatagcacttgtaggctgggmgccgtggctcacgcctgtaatcccagtacctggggaggctgaggcgggcggatcacgaggtcaagagattgagaccatcctaaccaacatggtgaaaccc

SEQ ID NO: 36755 - DNA, 201 bp, Homo sapiens
aacaaaggcccggctccatcagggcaccaatcccgctcgtcggcctctttctcggcctccaatgagcttctagggtgttatcacgccagtctccttccgckactgattggccggggtcttcctagtgtgagcggccctggccaatcagcgcccgtcagcccaccccacgaggccgcagctagccccgctggcggccgaggc

SEQ ID NO: 36756 - DNA, 201 bp, Homo sapiens
ctccttccgcgactgattggccggggtcttcctagtgtgagcggccctggccaatcagcgcccgtcagcccaccccacgaggccgcagctagccccgctgscggccgaggccggttgaagtgggcggagcggcgggcggggcgtcgccgtactaggcctgccccctgtccggccagcccctcgaagcacctactccacagg

SEQ ID NO: 36757 - DNA, 201 bp, Homo sapiens
ttatgtgatgaaaccctgtctctactaaaaaaaaaaaaaaaaaaaaaaaaaaaaaaatacaaaagttagttgggcatggtggcaggtgcctgtaatcccasctacttgggaggctgaggcaggagaatcgcatgaacctgggaagtggaggctgcagtgagccaagattgcaccactgcactctagcctgggtgacagagc

SEQ ID NO: 36758 - DNA, 201 bp, Homo sapiens
ctcccaggattcacaccacgtaatcagtatattcaagccttgctgtccttgatttctttcagacggtctttctccaagtggtggatatggtaacaacccaygtgcactagcttaacaaaaagttcttaggaatggctttgttcggcctggcgcagtggctcatgcctgtaatcccaacagtttgagaggccaaggtgggcg

SEQ ID NO: 36759 - DNA, 201 bp, Homo sapiens
caggcggatcacttgaggtcaggagttcgaaaccagcctgacttatgtgatgaaaccctgtctctactaaaaaaaaaaaaaaaaaaaaaaaaaaaaaaatmcaaaagttagttgggcatggtggcaggtgcctgtaatcccagctacttgggaggctgaggcaggagaatcgcatgaacctgggaagtggaggctgcagtg

SEQ ID NO: 36760 - DNA, 201 bp, Homo sapiens
acattctctgaaaaatcctttaactcttgtggttgcgggtgacagaaaaacaagtcaggcctcccccaggcagcataaggggatgtggaaaataggataghttgacatgagtttgcttcaggtagactggctgactcccaggattcacaccacgtaatcagtatattcaagccttgctgtccttgatttctttcagacggt

SEQ ID NO: 36761 - DNA, 201 bp, Homo sapiens
taaagtcataggagccacagaattaacccaggaatgaataagtgtgtagtttggtgctgatgttatcatcctttatttgtacattgcttgtacagttgctytgagaaggtaagtcttaaattttcaaaagtgaaatgtcaccgagcatggtggcttatgcctctaatctcagcactttgggaggctgaggcaggcggatca

SEQ ID NO: 36762 - DNA, 201 bp, Homo sapiens
tcccaaaaggatgtaagatggcttatggttataagtacaacaggctaacaaagtacaagtagatgagaaagtaaaatgaagaaataaagtcataggagccmcagaattaacccaggaatgaataagtgtgtagtttggtgctgatgttatcatcctttatttgtacattgcttgtacagttgctctgagaaggtaagtctt

SEQ ID NO: 36763 - DNA, 201 bp, Homo sapiens
cccacctcagccttcaaagtgctgggattacaggtgtgagccactgcacccaaccagtttctctctgcaaactagggaaaaaatttacgcttagcagataytgagggctgattatttctatcacagaagcatttggctatagaatttcagggtttagtaaacttgatttacactgaatttttaggtgcatatcagtaaatc

SEQ ID NO: 36764 - DNA, 201 bp, Homo sapiens
attcacttgggtgccagcgattgattccaaataagtaaatcttttttcccaaaaggatgtaagatggcttatggttataagtacaacaggctaacaaagtmcaagtagatgagaaagtaaaatgaagaaataaagtcataggagccacagaattaacccaggaatgaataagtgtgtagtttggtgctgatgttatcatcc

SEQ ID NO: 36765 - DNA, 201 bp, Homo sapiens
ctttgagccccaggtgcctagctgctcaaggatggtccccagccagcagctgccaggaatcacctgggagcccattaagacatccagcccccacccaaacstatcgaatcagaatctgcctttttttcccaaatgatgtttttgctttaatggaagtttagatgttcatagacaagagttttaaatgatgatcaagctgat

SEQ ID NO: 36766 - DNA, 201 bp, Homo sapiens
aagatcaacctgctattttgggatagaaataaatgctcagccaaacggccagaaacccccattcccctctctgccaaagtgaattccttggcagggagaakcttgttcgtgtctctgcacacttcctgtgccctcctgtggttaagtcagagaatcatccggctctttgagccccaggtgcctagctgctcaaggatggtc

SEQ ID NO: 36767 - DNA, 201 bp, Homo sapiens
tgtgacggccgagttgaggagctgcaacaggcgatgacttgtaaagctgaaaatattttttggcccttgaataagaggttggctgacttctgacttagggyatcagttgttctgttatcccagtaaaactcaaggcattaggggagaaatgttaatattaatacttaagttgatttgatttagggaaatctttgaagattt

SEQ ID NO: 36768 - DNA, 201 bp, Homo sapiens
acaggaattgatatcctttataaggaaaaaagtctattcacaggagccgagcagattgctcactgctgtgtagtaccctggtgagaggagataaatggagsaaggctgtaggttggagcccctcagtagaatcatagattttgagctgcaagatgatgcaggaggccaaccaagcttcttgttgctggtgaggaatgtgag

SEQ ID NO: 36769 - DNA, 201 bp, Homo sapiens
ttctgtggctgcttttgcaatgtgacggccgagttgaggagctgcaacaggcgatgacttgtaaagctgaaaatattttttggcccttgaataagaggttkgctgacttctgacttagggcatcagttgttctgttatcccagtaaaactcaaggcattaggggagaaatgttaatattaatacttaagttgatttgattt

SEQ ID NO: 36770 - DNA, 201 bp, Homo sapiens
ctgttaatggaaaaagtgctgtgtgaggatgggggttaagtgactggactgtttgtgttctgagctttctaggactgatctgattacgctgtaaacactcygccagatactgtgtaggcccagcccttgtgcttgagggggccactgtgaggtggcgaaacagacaagagattattagaatacagaaagttcaggttggga

SEQ ID NO: 36771 - DNA, 201 bp, Homo sapiens
gaggatgggggttaagtgactggactgtttgtgttctgagctttctaggactgatctgattacgctgtaaacactccgccagatactgtgtaggcccagcycttgtgcttgagggggccactgtgaggtggcgaaacagacaagagattattagaatacagaaagttcaggttgggaggaaccactgaacatggtagaagt

SEQ ID NO: 36772 - DNA, 201 bp, Homo sapiens
agatagaaatatttatggtttaggtaacagttagatgtttcctaagaatgcaaactgccttttccacacaaaggctgggaataaaattctgggtattctcstattctcatttaaaggagtttagctttcagagagaaacagcaggattgcttttgaccttttagaagattggtctccagtaaaggtggacatttttgagat

SEQ ID NO: 36773 - DNA, 201 bp, Homo sapiens
tgttcataattgctaacgtggttgtccggtagcctccatacatgtggagaaaggttaaataagcattctgagggcagcataatgtgagggttaaaaactcyggtagccaagactctgaagccaggctgcctgggttggaatctcaaatctcccacttactaaactgttggttacttacaaagactctctgtgcctcagttt

SEQ ID NO: 36774 - DNA, 201 bp, Homo sapiens
gcaagccccaaattgggccttagcccatgagggttcctggctttacccaggaaagaattcaagggtgagccagtggtaaggtggaagaaaacaacttcatkaaagaggcagtgtgacagctccgtgacttttcctgcagagtagggctgctccgcaggcagtgtgctgaaagcagctcagggcagttgtgcagtcagatct

SEQ ID NO: 36775 - DNA, 201 bp, Homo sapiens
ggacctttaggaaagtgaaatgcaggtgagaagaacctaaacatgaaaggaaagggtgcctcatcccagcaacctgtccttgtgggtgatgatcactgtgmtgcttgtggctcatggcagagcattcagtgccacggtttaggtgaagtcgctgcatatgtgactgtcatgagatcctacttagtatgatcctggctagaa

SEQ ID NO: 36776 - DNA, 201 bp, Homo sapiens
ctcagctaattttggtatttttagtagagacggggtttcaccatgttagccaggctggtctcaaagtcctgacctcaagtgatccgcctgcatcggtcttyccaagtgctgggattacaggtgtgagccactgcacccagcccagtgtgtgttttagacgaataactctacctgccatatgggaaaggacaggggaagtca

SEQ ID NO: 36777 - DNA, 201 bp, Homo sapiens
gagatgggtttagaaagtggccaggcacaagttattttaaaataaaaaatctttggctgtttgttccaatatattaatagttttcccttttttacagcaaygcagtgtgcatattttatctggttctccgagctctggacacactggaagatgacatgaccatcagtgtggaaaagaaggtcccgctgttacacaactttc

SEQ ID NO: 36778 - DNA, 201 bp, Homo sapiens
tgcctgtgagcaggtcgtgtatttctcggcttcccttatccaactttgcatttctatttctagcatattgggttgattcttttgaagctgcctctgtgcasattacacccatgaacttagaccagttgcctttatgtatgatcgtatttatactgagaagttactgtgttttttgactttcttttctatttgctacatatt

SEQ ID NO: 36779 - DNA, 201 bp, Homo sapiens
aatttgccagtctgcgtcttttaactggggcatttagcccacttatatttaaggttaatattgttatgtttgaatttgatctgtcattatgatgtttgctggttattttgcccattaattgatgcagtttcttcctagcctcgatggtctttacaatttggcatgtttttgcagtggctggtaccagttgttcctttccat

SEQ ID NO: 36780 - DNA, 201 bp, Homo sapiens
tatccagaacatagcccggccctacgtgtttactttagaaagcccttccaggctctttgccatctagtagagtccctgcgggcccagcctttcagagaagrggggggagggggtgatgtttattaactttttttagtcttggcagctgaacctgcctgtgagcaggtcgtgtatttctcggcttcccttatccaactttgc

SEQ ID NO: 36781 - DNA, 201 bp, Homo sapiens
taactttgcattgtttaggcaccatcgtgtcctatacgcagctcaattcaataaatactcattgagcacccaataaatattcattgagccagtatgtgctrggcactattccagatggttgaggggacattagtgagcaaaacaaaggtgtgtcgtcactgagcttagatttctagtgttgacttaaaaaatatgatttat

SEQ ID NO: 36782 - DNA, 201 bp, Homo sapiens
ttctgtaagtattagctatttggtctattttgttggagtaaagtgggttatagttaaaatcctaagatttttaaagtccctcaagttcatgtggacatctrcctaggtcctactatcctagaattcgcatgtcttatcacacaaataactgattcttccatatcttataaataaaggtttgatttagcaaagtcacatgtt

SEQ ID NO: 36783 - DNA, 201 bp, Homo sapiens
tttgccagtctgcgtcttttaactggggcatttagcccacttatatttaaggttaatattgttatgtttgaatttgatctgtcattatgatgtttgctggwtattttgcccattaattgatgcagtttcttcctagcctcgatggtctttacaatttggcatgtttttgcagtggctggtaccagttgttcctttccattt

SEQ ID NO: 36784 - DNA, 201 bp, Homo sapiens
accagtcgcagtttcgcagctgttatccaggcgctggatggggaaatgcggtgagtgatggaggcagcgcctctggcttggaggaaagcttgtccgggacytttgagtgtgttggaagctaccttttgatatagcgctcagcgttgcagcctcgttgctgtggcttatccagaacatagcccggccctacgtgtttacttt

SEQ ID NO: 36785 - DNA, 201 bp, Homo sapiens
gctaaggcaggagactcacttgaacctgggagccagaggttgcagtgaaccaagatcgcgccactgcactccagcctcacgacagagtgagactccatttaaaaaaaaaaaaaaaatgaagaagaaatagcactcgaaggctgggcgcagtggcttgcctgtaatcctagcactttgggaggccgaggagggtggatcatg

SEQ ID NO: 36786 - DNA, 201 bp, Homo sapiens
tcaatttagaaagggagaagagcctttatttcttctaaagggttacagcatgcttccagcttagaccacagacgggcactttgaaggaaaaggcgtttgasgtaggagctttatgctgactgggttggctaaacgtacatatttaacagattacaagaggagctacgaatatttatgatggcggacctgacacattgaaca

SEQ ID NO: 36787 - DNA, 201 bp, Homo sapiens
tgccgactgtatgatgcagcctacctgtaacactgctggcctcttgactacccggagcctggtagcatgggactgctgctcacgatgggcagcagcctggyatgggggcggtgtctgttggcagctagggcgagcctctgccacttcacctgtgatcctgggcaagttccttatctgctttgtgtctccgtctcctcgttt

SEQ ID NO: 36788 - DNA, 201 bp, Homo sapiens
attgaagcttgtttatgctttgtgaaattcttgtactttggttttcagctccatcaggtcatttaagctcttctctacactggttattctagttagccatwtgtccaaccttttctcaaggttttaagtttccttgcgatgggtcagaacgtgctgctttagcttggagaagtttgttattaccaaccttctgaagcctac

SEQ ID NO: 36789 - DNA, 201 bp, Homo sapiens
cagatactgaagttgggggattctggtcaaatcaatttagcaggattcttggtaaaactgggcgatgcaaagacagatgcgttgagtacaaagtccaggcyttattgggaagaggatttcagcggagcccgagtagagtttggtctagggagactctgtcactgggaggacgagcgagccgctcggaagtgcgctgggttc

SEQ ID NO: 36790 - DNA, 201 bp, Homo sapiens
agactccatttaaaaaaaaaaaaaaaatgaagaagaaatagcactcgaaggctgggcgcagtggcttgcctgtaatcctagcactttgggaggccgaggakggtggatcatgaggtcaggagttcaagaccagtctggccaacatggtgaaaccctgtctctactaaaaatcgaaaaattacccaggcgtggtggttgggc

SEQ ID NO: 36791 - DNA, 201 bp, Homo sapiens
ttcttcaagtgtaggggtgcctgacttcaccattgcctgcatggccttaggtcctgtttataattgggtatcttattgccacagagtctgttccgttagtsttatgatctctgttttaatgttaatgccagccagttgtgtatgaactccaaaaggaagggggtacaatgagggctatctgatctcctgtcccgttatttg

SEQ ID NO: 36792 - DNA, 201 bp, Homo sapiens
gttttcagctccatcaggtcatttaagctcttctctacactggttattctagttagccatttgtccaaccttttctcaaggttttaagtttccttgcgatsggtcagaacgtgctgctttagcttggagaagtttgttattaccaaccttctgaagcctacttctgtcaactcgttaaactcattgtccatccagttttgt

SEQ ID NO: 36793 - DNA, 201 bp, Homo sapiens
ggatggagggggatgtggaacctaatcggctgtctagggtgatcagatactgaagttgggggattctggtcaaatcaatttagcaggattcttggtaaaaytgggcgatgcaaagacagatgcgttgagtacaaagtccaggccttattgggaagaggatttcagcggagcccgagtagagtttggtctagggagactctg

SEQ ID NO: 36794 - DNA, 201 bp, Homo sapiens
actaagcaggccatttttacttcctgcagaaagggtacactcgccagcagttttgccatgggagtataccaaacaaaggagacagggtcatttataacctsactcgtccaccccactgcttgtgtctagtttccattggctggaacggtgcctcacgttctgtatttgtcccgattggctagcaacttagaagtttttaaa

SEQ ID NO: 36795 - DNA, 201 bp, Homo sapiens
aggtcatttaagctcttctctacactggttattctagttagccatttgtccaaccttttctcaaggttttaagtttccttgcgatgggtcagaacgtgctsctttagcttggagaagtttgttattaccaaccttctgaagcctacttctgtcaactcgttaaactcattgtccatccagttttgttcctttgctggtgag

SEQ ID NO: 36796 - DNA, 201 bp, Homo sapiens
agtagagacgcagtttcagcatgttggccaggctggtcttgaactccagacctcaggtgatccgcccgccttggcctcccaaagtgctgggattacaggcrtgagccaccgcgctcggctagacctgacaggttttaaaaggattactggttgctgtgttaaaacagactgcaggatggcttaggtagccagtaggttttt

SEQ ID NO: 36797 - DNA, 201 bp, Homo sapiens
aactcgttaaactcattgtccatccagttttgttcctttgctggtgaggagttacgttcctttggaggagaagaggcgttctgtttttggaattttcagcytttctgctgtggtgtctccccatctttgtggttttatctacctttggtctttgattttggtgacgtacagatgggttttggtgtgggtgtcctttttgtt

SEQ ID NO: 36798 - DNA, 201 bp, Homo sapiens
attgtccatccagttttgttcctttgctggtgaggagttacgttcctttggaggagaagaggcgttctgtttttggaattttcagcttttctgctgtggtktctccccatctttgtggttttatctacctttggtctttgattttggtgacgtacagatgggttttggtgtgggtgtcctttttgttgatattgatcctat

SEQ ID NO: 36799 - DNA, 201 bp, Homo sapiens
aaaaaatacctgaacctttaattaggggaaataaattggaaaaatacatttcccttcacttaacattatcttagtttctcttttttttttttttttttttwgagatggagtcttgctctgttacccaggctggagtgcagtggtggcgggacctcagctagatgcagcctccgcctcctgggttcaagcaattctcctgcc

SEQ ID NO: 36800 - DNA, 201 bp, Homo sapiens
gaactgctccactgcgaatacaaagaaaagtaggaattgatggcgggggagccggatgtcagtggatggaaaattattacgaggaaacacaggggtgtgcrttcttgctgaaggcaggccagagttatcagacatcacctgagggatggagggggatgtggaacctaatcggctgtctagggtgatcagatactgaagttg

SEQ ID NO: 36801 - DNA, 201 bp, Homo sapiens
ggagaagaggcgttctgtttttggaattttcagcttttctgctgtggtgtctccccatctttgtggttttatctacctttggtctttgattttggtgacgyacagatgggttttggtgtgggtgtcctttttgttgatattgatcctattcctttgtttgttagttttccttctaacagaggcccgtcagctgcaggtctg

SEQ ID NO: 36802 - DNA, 201 bp, Homo sapiens
tgaactcttgacctcaagtgatctgctcgccttggtctcccaaagtgctaggattacaggcgtgagccactgcacccggcctttttttttttttttttgaggggggggtctcactccatcgtccaggctagaatgctgtggcctgaacatgactcactccagttttgacttccttggctgaagccatcctcccacctcggc

SEQ ID NO: 36803 - DNA, 201 bp, Homo sapiens
tacatagtacaaacagcaactctttctgatatgcttgcatttaaaatcaggctttttctcccttttggaaaaacacagtccttgtttgctttagggaagartaaaggtcagtgcgctgcattgcattaatttcgaagggaaagatgagaagacatcttgaaaggaatggctggctttctagagaatagtagaggcttaata

SEQ ID NO: 36804 - DNA, 201 bp, Homo sapiens
tggggctcagggacccacttgaggaggcagtctgtccgttactggagttcaaatgccgagctgggagaaccactgctctcttcagagctgtcaggcagggmtgtttaaatctgcagaagccgtctgctgccttttgtttagatatgccctgcccccagagatgcaatctagagaggcagtaggccttgctgagctgcggtg

SEQ ID NO: 36805 - DNA, 201 bp, Homo sapiens
aatattttttatggcaataaaatgactttttcaggattatgtgatttaaaagattgacccttttggcaaaatacgtattcatgataggaaatatatacaawatagttcacttaaacctcccaccagagcccagggttcactgttaccattctgaagtgactggaatttcctagaagtggatatgccatatttttttaacca

SEQ ID NO: 36806 - DNA, 201 bp, Homo sapiens
cccaccttggccttccgaagtgcagggattataggcgtgcgccactgcacccggccctgttggataaatgattccagtctctcccaaaaagaactgttgtragactgtggggtgaggggagggaagggacaaataggaacccgccgtattttccactccctgtgggcctaaaactgctctaaaaaatagtccatgaaaaaa

SEQ ID NO: 36807 - DNA, 201 bp, Homo sapiens
tgtggtggtgggtgctttaattccagctactcaggaagctgaggcaggagaatcacttgaacccaagaggcagaggttgcagtgagttgagattgtgccastgcactccagcccaggggacaaagtgagacttgatctcaaaaaaaaaaaaaaaaaaaagttattgtaaagctagacacggtggtatttgcctacaatccc

SEQ ID NO: 36808 - DNA, 201 bp, Homo sapiens
cttcagtagctagactataggtgggcgccaccacagctggctttttaaaaaattttttatgaacacgaggtctcactatgttgcccaggctgccctcaaaytcctgggctcaagtgattctcccaccttggccttccgaagtgcagggattataggcgtgcgccactgcacccggccctgttggataaatgattccagtct

SEQ ID NO: 36809 - DNA, 201 bp, Homo sapiens
caggctgcctgggttggaatctcaaatctcccacttactaaactgttggttacttacaaagactctctgtgcctcagtttcttcatctgtaaaataggggtaataataacacctacctcatggtattctgaggattcaaagaattaacgtaggtaatgctcttagaatgttagctactgctgttattatcagtattggaag

SEQ ID NO: 36810 - DNA, 201 bp, Homo sapiens
taattcatagtttgagggcgagggtgggcagtctacagttggctgagccctgtttttgtgaataaatgttatcagaacacagccacacccatttgcttctwtgtcttctgtggctgcttttgcaatgtgacggccgagttgaggagctgcaacaggcgatgacttgtaaagctgaaaatattttttggcccttgaataaga

SEQ ID NO: 36811 - DNA, 201 bp, Homo sapiens
aagctgtgtgatttcatcattgcactctagcctgggtgatagagtgagactttgtctcaaaaaaaaaaaaaaaaaaaaaagtcttagagaccagaagtctytgtaatctctaataatctctaggccctagagcagtggtttgtaaatggaggtgatttgctcccctccccccagaggacattggacaatgtctggagacat

SEQ ID NO: 36812 - DNA, 201 bp, Homo sapiens
ccgctggcggccgaggccggttgaagtgggcggagcggcgggcggggcgtcgccgtactaggcctgccccctgtccggccagcccctcgaagcacctactscacaggtccagccggccggtgagcgcctggggaccgcagaggtgagagtcgcgcccgggagtccgccgcctgcgccaggatggagttcgtgaaatgcctt

SEQ ID NO: 36813 - DNA, 201 bp, Homo sapiens
gtctctaggtgatggccattgccactttggctgcctgttataataaccagcaggtgttcaaaggggcagtgaagattcggaaagggcaagcagtgaccctbatgatggatgccaccaatatgccagctgtcaaagccatcatatatcagtatatggaagaggtgggtttttatttaactacttggataatttgtagctact

SEQ ID NO: 36814 - DNA, 201 bp, Homo sapiens
ttttatctggttctccgagctctggacacactggaagatgacatgaccatcagtgtggaaaagaaggtcccgctgttacacaactttcactctttcctttmccaaccagactggcggttcatggagagcaaggagaaggatcgccaggtgctggaggacttcccaacggtgagtggggttacgcatcttgtctacggactg

SEQ ID NO: 36815 - DNA, 201 bp, Homo sapiens
aatgttggatttacttgtgtttgctttttccaaataaaatggaacttttgtggctacattatagaattgttttagactgcttaattctgtgtgttgttgaraaagggaggagtggggaaggtaaaaatcttgacatactttcttcgtgggtattttttcttgagcgattccatcttagttgattagcagttagcaattgcc

SEQ ID NO: 36816 - DNA, 201 bp, Homo sapiens
catattttatctggttctccgagctctggacacactggaagatgacatgaccatcagtgtggaaaagaaggtcccgctgttacacaactttcactctttcytttaccaaccagactggcggttcatggagagcaaggagaaggatcgccaggtgctggaggacttcccaacggtgagtggggttacgcatcttgtctacgg

SEQ ID NO: 36817 - DNA, 201 bp, Homo sapiens
aaaaattagctggccgtggtggtacatgcctgtagttccagctactcgggaggctaaggcaggagactcacttgaacctgggagccagaggttgcagtgarccaagatcgcgccactgcactccagcctcacgacagagtgagactccatttaaaaaaaaaaaaaaaatgaagaagaaatagcactcgaaggctgggcgca

SEQ ID NO: 36818 - DNA, 201 bp, Homo sapiens
gaggctaaggcaggagactcacttgaacctgggagccagaggttgcagtgaaccaagatcgcgccactgcactccagcctcacgacagagtgagactccayttaaaaaaaaaaaaaaaatgaagaagaaatagcactcgaaggctgggcgcagtggcttgcctgtaatcctagcactttgggaggccgaggagggtggatc

SEQ ID NO: 36819 - DNA, 201 bp, Homo sapiens
ggctaaggcaggagactcacttgaacctgggagccagaggttgcagtgaaccaagatcgcgccactgcactccagcctcacgacagagtgagactccattwaaaaaaaaaaaaaaaatgaagaagaaatagcactcgaaggctgggcgcagtggcttgcctgtaatcctagcactttgggaggccgaggagggtggatcat

SEQ ID NO: 36820 - DNA, 201 bp, Homo sapiens
cactccagcctggcaacaagagtgaaattctgtctcaaaaaaaaaaaaaaaaaaaaaaaaaaaaggcgcttgaacattaatttactaagcaggccattttyacttcctgcagaaagggtacactcgccagcagttttgccatgggagtataccaaacaaaggagacagggtcatttataacctgactcgtccaccccactg

SEQ ID NO: 36821 - DNA, 201 bp, Homo sapiens
tagggttgtatatgcattttattgcctattttctaaaacactaaaaatgctaaattctgccccaggtcttgccacagatgtttcagtggactatgggcctktgagaccttaaagggttgattgagtaaggatcacaggtgatgtccgcattgtgcttggcatggagttaagtgcttgataaatggtggttatcaatctgat

SEQ ID NO: 36822 - DNA, 201 bp, Homo sapiens
accacagttacttcatctgtaaaatagggatgtatgtatggtaacgattttttaaccacaacttcccaactctaagatggtctgaaaagaattttttgagwgtttggctcagaatcacttggcagcaaaacctgacttgaagttgaggcttcattcatcccacttagtatattcaaatgttttgctaaagaaataattatg

SEQ ID NO: 36823 - DNA, 201 bp, Homo sapiens
gaaccacagttacttcatctgtaaaatagggatgtatgtatggtaacgattttttaaccacaacttcccaactctaagatggtctgaaaagaattttttgwgtgtttggctcagaatcacttggcagcaaaacctgacttgaagttgaggcttcattcatcccacttagtatattcaaatgttttgctaaagaaataatta

SEQ ID NO: 36824 - DNA, 201 bp, Homo sapiens
aacctaaacatgaaaggaaagggtgcctcatcccagcaacctgtccttgtgggtgatgatcactgtgctgcttgtggctcatggcagagcattcagtgccmcggtttaggtgaagtcgctgcatatgtgactgtcatgagatcctacttagtatgatcctggctagaatgataattaaaagtatttaatttgaagcaccat

SEQ ID NO: 36825 - DNA, 201 bp, Homo sapiens
tgaaccacagttacttcatctgtaaaatagggatgtatgtatggtaacgattttttaaccacaacttcccaactctaagatggtctgaaaagaattttttsagtgtttggctcagaatcacttggcagcaaaacctgacttgaagttgaggcttcattcatcccacttagtatattcaaatgttttgctaaagaaataatt

SEQ ID NO: 36826 - DNA, 201 bp, Homo sapiens
tgcggagcgggaggccgggggcggggctgcggggctgcggggcgggcccgttgtgggtcggcccagcgcgtattcgagtagagggcgagcccgtcccgccyctcgtcgggcgcttcccagatctgcttgagtctatggaggaaaaactccgcggggtccgcgattcccatggccgcagccgcctgcggcaccaaggccatg

SEQ ID NO: 36827 - DNA, 201 bp, Homo sapiens
tagttggtattgtcctagttcctgttaccagaatattccatctttcatcgttgccttctctcatagttttatgtatcaaaaagtttattgtaaagctaggscgggcacggtgtcttgggctggtaatcccagcactttgggaggccaaggctggcagatcagttgaggtcaggagttcgagaccagcgtggccaacatggt

SEQ ID NO: 36828 - DNA, 201 bp, Homo sapiens
taaatcctgttatttagactaatatcttaagtctgttattaagtccgatttctgacgctattaagttaggtgaacaaccttggtaacttaacctctgaacyacagttacttcatctgtaaaatagggatgtatgtatggtaacgattttttaaccacaacttcccaactctaagatggtctgaaaagaattttttgagtgt

SEQ ID NO: 36829 - DNA, 201 bp, Homo sapiens
aggctgcctgggttggaatctcaaatctcccacttactaaactgttggttacttacaaagactctctgtgcctcagtttcttcatctgtaaaataggggtaataataacacctacctcatggtattctgaggattcaaagaattaacgtaggtaatgctcttagaatgttagctactgctgttattatcagtattggaagt

SEQ ID NO: 36830 - DNA, 201 bp, Homo sapiens
cagggtaagtattctgtaagtattagctatttggtctattttgttggagtaaagtgggttatagttaaaatcctaagatttttaaagtccctcaagttcaygtggacatctgcctaggtcctactatcctagaattcgcatgtcttatcacacaaataactgattcttccatatcttataaataaaggtttgatttagcaa

SEQ ID NO: 36831 - DNA, 201 bp, Homo sapiens
cactccatcgtccaggctagaatgctgtggcctgaacatgactcactccagttttgacttccttggctgaagccatcctcccacctcggcttcctgatccygagtagctgggactccaggcacgtgtcaccaatgcatggctaatttttaaatttttttgtagacacaatgtctcgctgcattgcccaggctggtcttgaa

SEQ ID NO: 36832 - DNA, 201 bp, Homo sapiens
ggctgcctgggttggaatctcaaatctcccacttactaaactgttggttacttacaaagactctctgtgcctcagtttcttcatctgtaaaataggggtaataataacacctacctcatggtattctgaggattcaaagaattaacgtaggtaatgctcttagaatgttagctactgctgttattatcagtattggaagtc

SEQ ID NO: 36833 - DNA, 201 bp, Homo sapiens
tttttggtatttttagtagagacggggtttcaccatgttggtgaggctggttttgaactcttgacctcaagtgatctgctcgccttggtctcccaaagtgytaggattacaggcgtgagccactgcacccggcctttttttttttttttttgaggggggggtctcactccatcgtccaggctagaatgctgtggcctgaac

SEQ ID NO: 36834 - DNA, 201 bp, Homo sapiens
cggctgattttttggtatttttagtagagacggggtttcaccatgttggtgaggctggttttgaactcttgacctcaagtgatctgctcgccttggtctcycaaagtgctaggattacaggcgtgagccactgcacccggcctttttttttttttttttgaggggggggtctcactccatcgtccaggctagaatgctgtg

SEQ ID NO: 36835 - DNA, 201 bp, Homo sapiens
cctgcctcagcctgctgagtagctgggattacaggcacctgccactacgcccggctgattttttggtatttttagtagagacggggtttcaccatgttggygaggctggttttgaactcttgacctcaagtgatctgctcgccttggtctcccaaagtgctaggattacaggcgtgagccactgcacccggcctttttttt

SEQ ID NO: 36836 - DNA, 201 bp, Homo sapiens
caggctggagtgcagtggtggcgggacctcagctagatgcagcctccgcctcctgggttcaagcaattctcctgcctcagcctgctgagtagctgggattrcaggcacctgccactacgcccggctgattttttggtatttttagtagagacggggtttcaccatgttggtgaggctggttttgaactcttgacctcaagt

SEQ ID NO: 36837 - DNA, 201 bp, Homo sapiens
gagatcttgactcactgcaacctccgccccctaggttcaagcaattcttctgtctcaccctcctgagtagctgggattacaggcgcctgccaccgtacccrgctagtttttgtatttttagtagacacagggtttcaccaccttggccaggctggtcttgaactcctgacctcgtgatccaccctcctcggcctcccaaag

SEQ ID NO: 36838 - DNA, 201 bp, Homo sapiens
ggggatcagctgtctgtgccctgctgcattctggaataaaactctgagggactaagaattctaaattcaaacctgaatcaaccaggttgttacaaagatawgtttgtcagtgcaggaggatacaatatattttacttaagttactagctcgattgatcatttttaaatttttagctacatatagtatgtgggcctccattt

SEQ ID NO: 36839 - DNA, 201 bp, Homo sapiens
acctagaaatactttacctttgagcacaggaaattaatccccttctggttgttctccccctggcattggttttaaatatataatgattatgtttgttgtakgaaaaatagaaaaacaactacaatagaaaattcttcccatatattattttgaaatacatatttccgatccgataatccattgctctagcatggaaaatgt

SEQ ID NO: 36840 - DNA, 201 bp, Homo sapiens
gttgcctttaccaagtattgcagatactactgcaaataagtgaagaaagtaacagcatttaactgatttgggaacttggtttgatcttgttctaatgaccmacttcgaatggtggttgaaagtaaaatctgtatcgccgtcttatgtttccatttacctagaaatactttacctttgagcacaggaaattaatccccttct

SEQ ID NO: 36841 - DNA, 201 bp, Homo sapiens
caggaggattgcctgagcccaggagttcaaggctgcagtgaaccatgatcacaccactgcattctagcagcctgggagacagagcaaaacccttgtctcaaaacaaacaaacaacaacaaaaaaacaaaaaacacttccctcagctcagacatggccttttaagtttcctaggtgactcgtgtgcagccagggttgagaaa

SEQ ID NO: 36842 - DNA, 201 bp, Homo sapiens
tttttagctacatatagtatgtgggcctccatttgtcctcttatcccaggccttgcagaatttaggaataagcctcaatacagtgttctaacccagtgacytccgcctcgatgtacagtagattgaacctgatcctttatactttagtgatcattagttgataccagttcaagtcaggctttctagaaatctcattgtatg

SEQ ID NO: 36843 - DNA, 201 bp, Homo sapiens
aggaggattgcctgagcccaggagttcaaggctgcagtgaaccatgatcacaccactgcattctagcagcctgggagacagagcaaaacccttgtctcaaaacaaacaaacaacaacaaaaaaacaaaaaacacttccctcagctcagacatggccttttaagtttcctaggtgactcgtgtgcagccagggttgagaaac

SEQ ID NO: 36844 - DNA, 201 bp, Homo sapiens
tcaagtcaggctttctagaaatctcattgtatgttaggggttcgattagagtacagtcatgcatcacttaatgaatggccacaggatacattctgagaaaygcattgatagatgatttcatcattctgtgaacatcatagagtgtacttacacataccaagatggcatagctactacagacgtaggctctgtggtacaggc

SEQ ID NO: 36845 - DNA, 201 bp, Homo sapiens
ggaggattgcctgagcccaggagttcaaggctgcagtgaaccatgatcacaccactgcattctagcagcctgggagacagagcaaaacccttgtctcaaaacaaacaaacaacaacaaaaaaacaaaaaacacttccctcagctcagacatggccttttaagtttcctaggtgactcgtgtgcagccagggttgagaaacc

SEQ ID NO: 36846 - DNA, 201 bp, Homo sapiens
taatagcaataatagtgttcacttattgagcattttactatgagttacttactaaatatatttcatcgttaatttactctttgtgttatttgatctataayatcgtttaacagggaaattacctagtacataatgtactgttatctacattttatctagatgaggaaactgaggcacagagaaattaagtactttgcctag

SEQ ID NO: 36847 - DNA, 201 bp, Homo sapiens
gaggattgcctgagcccaggagttcaaggctgcagtgaaccatgatcacaccactgcattctagcagcctgggagacagagcaaaacccttgtctcaaaacaaacaaacaacaacaaaaaaacaaaaaacacttccctcagctcagacatggccttttaagtttcctaggtgactcgtgtgcagccagggttgagaaacca

SEQ ID NO: 36848 - DNA, 201 bp, Homo sapiens
gtatgttgaacagccttgcatcccagggatgaagccgacttgatcgtggtggataagctttttgatgtgctgctggattcaatttgccattattttatagmggattttcgcatcaacgttcatcagggatattggcctaaaattctctttttttattgtttgtctgccaggctttggtatcaggatgatgctggcctcata

SEQ ID NO: 36849 - DNA, 201 bp, Homo sapiens
taaccaatgcactgcaccacatcccagatgtcatcacctacctttcgagactcagaaaccagagtgtgtttaacttctgtgctattccacaggtagggaasggggctcctctgggtggatacggggctaaagggagtggggtaggagtaagggtggattttgctgtgctatattcaaggatatgattccttaaaaagacga

SEQ ID NO: 36850 - DNA, 201 bp, Homo sapiens
attgcctgagcccaggagttcaaggctgcagtgaaccatgatcacaccactgcattctagcagcctgggagacagagcaaaacccttgtctcaaaacaaasaaacaacaacaaaaaaacaaaaaacacttccctcagctcagacatggccttttaagtttcctaggtgactcgtgtgcagccagggttgagaaaccactct

SEQ ID NO: 36851 - DNA, 201 bp, Homo sapiens
tagcttatttgcatagaggtgttgatagtattctccagtggtagtttgtatttctgtgggattggtggtgatatcccctttatcattttttattacgtctwtttgattcttctgtcttttcttcttgctagcggtctatcaattttgttgatcttttcaaaaaaccagctcctggattcattaatttttttttttgaaggg

SEQ ID NO: 36852 - DNA, 201 bp, Homo sapiens
cattttaactatttttaagtctattattcagtggcattaagtacattaatgatgttatataaccatcaacactatgtttccagaactttcgctagcttcasagaatcctctaaataatatcattaaaaatcatcaagccgaatcccactgttagaattaaaggttttatttcactttcaagttatcaggatccagggaggt

SEQ ID NO: 36853 - DNA, 201 bp, Homo sapiens
tggatagaccacatttatccattcatcagttggaggatatttgggttcttcccattttttttggctatggtgaatagtactgtgtacatttgcatataagkttttgtgtagatgtgtgttttcctttttcttgggtctatgctgagaagtggaattgctggttcatacagcagctcgaaccttgtgaggagctgccagacg

SEQ ID NO: 36854 - DNA, 201 bp, Homo sapiens
cttttcacatagtcgcatatttattgaagcctttgttcatttcttttcattcttttttctctaatcttgtcttcttgctttatttcattaatttgatcttygatcactgatatcctttcttctgcttgatcgaatcggctattgaagcttgtttatgctttgtgaaattcttgtactttggttttcagctccatcaggtca

SEQ ID NO: 36855 - DNA, 201 bp, Homo sapiens
gcagctcgaaccttgtgaggagctgccagacgcttttccaaggtcgctccaccattttacattcccgtcagcagtgtgagagtcccagtttcaccagcacttgttgttatctctttttaactgtatgtatatatacttaacattttatttataataaatgtacataatagagaatttgccattttaactatttttaagtct

SEQ ID NO: 36856 - DNA, 201 bp, Homo sapiens
ctgggtatagtggcacacccctatagttctcgctccttgggaggttgaggcaggaggattgcctgagcccaggagttcaaggctgcagtgaaccatgatcrcaccactgcattctagcagcctgggagacagagcaaaacccttgtctcaaaacaaacaaacaacaacaaaaaaacaaaaaacacttccctcagctcagac

SEQ ID NO: 36857 - DNA, 201 bp, Homo sapiens
cccatggccgcagccgcctgcggcaccaaggccatggccctcttcaagcgcaccttggtgctgagtcccgccgcggcgcccaggggcccgggcgcaggcascgccccgcggggctgctgcttgcctcctgccgcctggccctgcaaggactggcctcggggagagggcggcaggctgtggagccgcctgccccagtcccac

SEQ ID NO: 36858 - DNA, 201 bp, Homo sapiens
gcctagtattattccactgtgtggatagaccacatttatccattcatcagttggaggatatttgggttcttcccattttttttggctatggtgaatagtastgtgtacatttgcatataaggttttgtgtagatgtgtgttttcctttttcttgggtctatgctgagaagtggaattgctggttcatacagcagctcgaac

SEQ ID NO: 36859 - DNA, 201 bp, Homo sapiens
cagctcgaaccttgtgaggagctgccagacgcttttccaaggtcgctccaccattttacattcccgtcagcagtgtgagagtcccagtttcaccagcacttgttgttatctctttttaactgtatgtatatatacttaacattttatttataataaatgtacataatagagaatttgccattttaactatttttaagtcta

SEQ ID NO: 36860 - DNA, 201 bp, Homo sapiens
ccaaaactttgggaggctgaggcaggcagatcacttgaggtaaggagttcgagaccagcctggccaatatggcaaaaccctgtctctactaaaaatacaayatttagccaggtgtggtggtgcacacttgtcatcccagctattccggagcctgagacatgagcatcgcttgaactcgggaggtggaggttgtagtgagct

SEQ ID NO: 36861 - DNA, 201 bp, Homo sapiens
agctcgaaccttgtgaggagctgccagacgcttttccaaggtcgctccaccattttacattcccgtcagcagtgtgagagtcccagtttcaccagcacttgttgttatctctttttaactgtatgtatatatacttaacattttatttataataaatgtacataatagagaatttgccattttaactatttttaagtctat

SEQ ID NO: 36862 - DNA, 201 bp, Homo sapiens
aagtgtgtagtttggtgctgatgttatcatcctttatttgtacattgcttgtacagttgctctgagaaggtaagtcttaaattttcaaaagtgaaatgtcmccgagcatggtggcttatgcctctaatctcagcactttgggaggctgaggcaggcggatcacttgaggtcaggagttcgaaaccagcctgacttatgtga

SEQ ID NO: 36863 - DNA, 201 bp, Homo sapiens
ttaaaggttttatttcactttcaagttatcaggatccagggaggtgtaatacacttagaggatagactcagctcatttcccagctatgcctttcagcagcwttcttaccagagtaggaatataatgttagtcattatttagaggcctggccatcttgagaaggtttactgtttagtctgcagtacaattataactgttttt

SEQ ID NO: 36864 - DNA, 201 bp, Homo sapiens
gctggtaccagttgttcctttccatttttactgcttccttcaggagctcttttagggcaggcctggtggtgacaaaatctctgagcatttgcttgtctgtraaggattttatttctccttcacttgtgaaacttagtttggctggttatgagattctgggttgaaaattctttaagaatgctgaatattggcccccactct

SEQ ID NO: 36865 - DNA, 201 bp, Homo sapiens
aaccctgggaaggtcctggtgatttgactctcacaggacacctgatgaccagaggatgggtttcctttgatgggaaatctgtggcgattcattgatgggcytctgaattctgctgaagcagaggaagtagtaataccccatttataatggaagtgcattctcacttaaaaacaactaatattattctagctggacctagcc

SEQ ID NO: 36866 - DNA, 201 bp, Homo sapiens
tttttcttttattatactttaagttctagggtacatgtgcacaacgtgcaggtttgttacataggtatacatgtgccatgttggtttgctacacccatcarctcgtcatttacattaggtatttctcgtaatgctatccctcccttggccccccaccccacaacaggccccggtatgtgatgttcccctccttgtgtccat

SEQ ID NO: 36867 - DNA, 201 bp, Homo sapiens
gatctgagaacatagaaatctactgtgttgtgaaacagaattacctggaagcggaaaaagccctcctggctcaattcacatgtcacggcttatggtcgtayccggggaacatatgaaactgggcactgagtgcggagtcaggaaagccctgtccatcctctgggtttctggggaaaacgtggaccccttcattgtcacttt

SEQ ID NO: 36868 - DNA, 201 bp, Homo sapiens
cacccatcaactcgtcatttacattaggtatttctcgtaatgctatccctcccttggccccccaccccacaacaggccccggtatgtgatgttcccctccytgtgtccatgtgttctcattgttcaactcccacttaggagtgagaacatgtagtgtttggttttctgtcgttgtgatactttgctcagaatgatgatttc

SEQ ID NO: 36869 - DNA, 201 bp, Homo sapiens
ttgagaaaccactcttgtcttacccctcttttgcagacacagggctcagagaagggaaggggattgtctggggatgtatagtgaggcagtggctgccttgraagtggagtctcagtctcccggctcctaggccagcccctgaccactgttccattgtctcccagacagaacatcagccacgggcatgtgatgcatgagcgt

SEQ ID NO: 36870 - DNA, 201 bp, Homo sapiens
gatctcctgatctcgtgatccgcccgtctcagcttcccaaagtgctgggattacaggcatgagccatcgtgcccggctgaatgtgcagagttcttaaaacmgtgtcaagaacataaaatagttatttgttctttcatataatgatgattttgagggcctgcggatcttgacatgttatcagattggtcaaaaaaagattaa

SEQ ID NO: 36871 - DNA, 201 bp, Homo sapiens
tctctttttttttttttttttttttgagatggagtcttgctctgttacccaggctggagtgcagtggtggcgggacctcagctagatgcagcctccgcctsctgggttcaagcaattctcctgcctcagcctgctgagtagctgggattacaggcacctgccactacgcccggctgattttttggtatttttagtagagac

SEQ ID NO: 36872 - DNA, 201 bp, Homo sapiens
agaaaatggtagcattggtttcctgttgggagggaaagtgggtggtcatggtaagtgggtagagaaagacttcacagtatactgtttttgtacattttgartttttttaaaagcgagacttgagctattctagctctgataatatggtgcagtatttgttatgttagttgtagtctttctgggcagtttttacatccccat

SEQ ID NO: 36873 - DNA, 201 bp, Homo sapiens
gaatgaactatgcagataacatcacatgaaggccgtttctggaatgaagtctgactcctccagtttcaccacctcttccggagctctccccgccttgctgycttccatcgcttcatcctcggtgcttcctgagttttaaaatcgcctatctacgcttccaagttccaatgagttatctaacgtctatggattagctaggtg

SEQ ID NO: 36874 - DNA, 201 bp, Homo sapiens
agggaaatcccctgaccccttgcacttcctggatgaggtgacgtcctgccctgctttggctcaccctccatgggctgcacccactgtccaaccagtgccartgagatgaaccaggtacctcagttggaaatgcagaaatcacccatcttctgcatcgatcttgctgggagctgtagaccagagctgttcctactgggacat

SEQ ID NO: 36875 - DNA, 201 bp, Homo sapiens
ccagtgagatgaaccaggtacctcagttggaaatgcagaaatcacccatcttctgcatcgatcttgctgggagctgtagaccagagctgttcctactgggrcatcttggaagcaactctgggtctgagtttctgtttgttgccctgatgtatatccccagtgcctagaatgatacttgttacataggaagtgcttgatcca

SEQ ID NO: 36876 - DNA, 201 bp, Homo sapiens
cgtttttattctatgccagaaggcttgatttcctttaaatcaatccattgattcgaagacatttcattggaggaatttaaaatggaaggattataatcaastgtgtgtttttattttttatttttttgagacggagtctcactttgttgcccaggctgcagtgtggtgtggtgatctcggctcgtgggttcaagcgattct

SEQ ID NO: 36877 - DNA, 201 bp, Homo sapiens
taatggaggcgtggcaggtggctaggcaaggagcaggaagcctattccaggcaggtgaattgcttgggccaaggccggatgtgaagtactgtagcctgttygggggacaataagtgctgctaggactggatcagggtgtgaaagtagtacaagaatgggtggacaggaggctgaaatcccaacaaaggatgtagatgccaa

SEQ ID NO: 36878 - DNA, 201 bp, Homo sapiens
tctttcctcactaacaggtcaaaatatgtattctgaatttttctggaagcttcacagttcaacctaaaatctttcctttaggtcattaatccacctggggytgagttgtgtgtatagtgtgaagtgctgtcccctctccttgttctcagatgagggccagctaccctgcaccctgcatgaagagcccggcccccctgttca

SEQ ID NO: 36879 - DNA, 201 bp, Homo sapiens
gctcagagaggcccccagcctggcagagcctccccgcttcctgccttatgtgggtggctctggacctagctttgcagcctgggctgccaccggtgacctgygagcttgagcatcttttcacgtcgttgctgggtcatcctccagcgaggtgcctgttcaggtctggtgaccatttccactgtgccttttctggctgacatg

SEQ ID NO: 36880 - DNA, 201 bp, Homo sapiens
attgcttgaacccagggagggccaaggctacagtgagctgtgatcataacactgtactccagcctgggtgacagagtgagaacctgtctcaaaaaaaaaaagaaaaaaattagtcacccaatattactgaaaataatagtgcatgtttgtattttacacgtacccctgagctatttggggtcacaaggaagctgttagtat

SEQ ID NO: 36881 - DNA, 201 bp, Homo sapiens
ctaattcttatatttttagtacagatgatgtttcaccatgttggctacagttgtgagccaccacaccaggccttctctcggaattttttttttttttttttgagacggagttttgctcttgttgcccaggctggagtgcaatggtgcaatcttggctcaccgcaacctccacctcccgggttcaagcaattctcttgcctc

SEQ ID NO: 36882 - DNA, 201 bp, Homo sapiens
gaccgagaagaagaggggggctggaggccatggccgcacccggagaaaagatgccagcaaggccacagggggtgtgaggggacactcgagtgccgccaccrgcagaggagctgcaggttggtcaccgtcctcgagtggaaacccgatggccaagccagagtcccgcaggttgaagcaagctgctctgcaaggtgaagccac

SEQ ID NO: 36883 - DNA, 201 bp, Homo sapiens
cgcccagaacacaggtgaggcccagcttgcggggcgggagggctggccatgggaggctgctgcctgcattcgaagcaggggtgcagggatgcccatgtgcraccctgctgaggcatgtgctggtggggaccgtggggatggccctgagtgttgagagtggtcctgggagcctgcggggccgactgtgtagctgtaggggcc

SEQ ID NO: 36884 - DNA, 201 bp, Homo sapiens
tcaagcaattctcctgcctcagactcctgagtagctgggattataggcccgcgccaccacgccaggctaatttttgtatttttagtggagacggggtttcmccatgttggtcaggctggtctcaaactcctgacttcatgatccgcccacctcagcctctcaaagtgctgggattacaggcatgagccatcacgcctggcc

SEQ ID NO: 36885 - DNA, 201 bp, Homo sapiens
ggattcaccacgttggccagactggtctcgaactcctgacctcaggcgatccacccgccttggcctcccaaagtgttgggattacaggcgtgagccaccgygcccgcgtaaataagtctttatattgagtttctttttcagagatttagaaaaaaatgggaaaaaagtaagttctttacttctcctttgcacccgaagaat

SEQ ID NO: 36886 - DNA, 201 bp, Homo sapiens
gcgacaggtggacctttttatcttttttgttttttccgcaaatgttttgaaggcaacaatttagatttttttttctttctttcttttttttttttttttttgagacagagtcttgctgtgtcacccaggctggagtgcagtggcacaatctcagctcactgcaacctccgcctctggggttcaagcaattctcctgcctca

SEQ ID NO: 36887 - DNA, 201 bp, Homo sapiens
gatatttaaagtctttgcctgtttttctgtggattgttcttttttgaggcggagtttcgctctgttgcccaggctggaatgcaaaggtgggatctcggctyatcgcaaccaccgcctctcaggttcaagcgattctcctgcctcggcctcctgggtagctgggattacaggcatgcgccaccacgcctggctaattttgta

SEQ ID NO: 36888 - DNA, 201 bp, Homo sapiens
ccccggaggttgaagctgcagtgagccgtaattatgccactgcactccagcctgggaaacagaacaaaaccctatctcaaaaaaagaaaactttttttttktttgttttctgttaggtcaattaagaataagaaaagattttattttaccttcacttacttctctctgatgctctccctttttttacatacattttagttt

SEQ ID NO: 36889 - DNA, 201 bp, Homo sapiens
gctcactgcaagctctgtctcctgggttcactccattctcctgcctcagcctcctgagtagctgggactacaggtgcgcgccaccacgccaggctaatttmttatatttttagtagagttggggtttcaccgtgttagccaggatggtctccatctcctgacctcgtgatctgcgcacctctgcctcccgaagtgctggga

SEQ ID NO: 36890 - DNA, 201 bp, Homo sapiens
aagcgattctcctgcctcggcctcctgggtagctgggattacaggcatgcgccaccacgcctggctaattttgtattattagtagagacagggtttctccrtgttggtcaggctggtcttgaattcctgacttcaggtgatccacccgcctcagcctcccaaagtgctgggattacaggtatgaacaaccgtgcccggcca

SEQ ID NO: 36891 - DNA, 201 bp, Homo sapiens
acatctgtgttgtttccactttggggctgttgggaatggtgctgctgtaaacattcatgggcagcgtcctgtggggacaggtgtgtcatttctgctgggtrtgcatgtctccaggagtggcagtcctgggccactgctccacacttaacctctcaggcacatgccagatggtcttcactaggctgtgccagttcacgtccc

SEQ ID NO: 36892 - DNA, 201 bp, Homo sapiens
attaagcttttaatggccatgggattaacagtgattgaccccctcccttcttttttttttaaatgatatcaataatttgtaccttctctctttttttttttccttttttctttcttgagacagggtcttgctctgacacccaggctgaagggcactggtatgattttggctcaccgcaacctccgcctcctgagctgaggt

SEQ ID NO: 36893 - DNA, 201 bp, Homo sapiens
catgaaaatttaaatttcttgcaggaaatttaaatttttgtttttgtgttttggttgagatttcaataaaagaaaaatgaaatcagaaaagaaatgcctasaaaagcctgtctggtttatttaaagaggtggaaagtgacaaatagactaggtcctttatagtattttttgtttcatgtttaaatttatttttttctaatg

SEQ ID NO: 36894 - DNA, 201 bp, Homo sapiens
ttcttaccgtacaagaaagcaaaagccccttgaggtccctcagtatcccttcccaccacctgcaccccacaggtggagaaattgcctgcttttagggagayagcagtgtaggcctctgaagtagaggagagccaccagggatggggagtggttgaagtatctttattttttaattatagaagtaatacacagtttttttaa

SEQ ID NO: 36895 - DNA, 201 bp, Homo sapiens
cactcatggtgcctgccccagacaggtggactttttgttgttgttgttgtttttgagacggagtctcgctttgtggcccaggctggagtgcagtggtgcartctcggctcactgcaagctctgtctcctgggttcactccattctcctgcctcagcctcctgagtagctgggactacaggtgcgcgccaccacgccaggct

SEQ ID NO: 36896 - DNA, 201 bp, Homo sapiens
atgatactgctctattaagcttttaatggccatgggattaacagtgattgaccccctcccttcttttttttttaaatgatatcaataatttgtaccttctytctttttttttttccttttttctttcttgagacagggtcttgctctgacacccaggctgaagggcactggtatgattttggctcaccgcaacctccgcct

SEQ ID NO: 36897 - DNA, 201 bp, Homo sapiens
gttacagccgagtccccacgctcacagccagatcacgggctccacgatggctgttccttttccgtgtaccttttttgagttaaaaatgttatttttttttkgtttgcttaatgtttacatgcttatccctgagtcagcaccatgcgttctgccggtatctaaaactcagcttgggtactcagatgtgatacctgaattcca

SEQ ID NO: 36898 - DNA, 201 bp, Homo sapiens
tttcctttttacattaccacctagacctttaatctctctcacatttgttttttgagtgacgcagcgtataattctaactcttccagatgagtgacccagtrgtcccaacaccattcatcgaattccatcctgactccacagatttggaatgtcatacatacattaaaccacatccacataaatataggggtctgtttcttt

SEQ ID NO: 36899 - DNA, 201 bp, Homo sapiens
actgggggtcagtcctgatcccgtccccatcagtctgtctgctgcttttgcgggcctggaggagacgccgggggtcagtcctgatcctgtccccgtcagcygtcttctgcttgtgcgggcctggaggagacactgggggtcagtccaatcctgtccccatcagtccgtcttctgcttgcgcgggcctggaggagacactgg

SEQ ID NO: 36900 - DNA, 201 bp, Homo sapiens
gagccccgtggcagtcgctgtggggtgtgctccgcacaggccagagagccggcccaaaaacctgaggtttgcaaagcctctttctttctttttttttttttgagaaaacgtctctgtcgcccaggctggagagcagtgacacgacctcggctcactgcaacctccgcctcccgggttcaagcaattcttgtacctcagcct

SEQ ID NO: 36901 - DNA, 201 bp, Homo sapiens
gccagcagcgattccttgagggtacattgttagcacgtctatgaaccacgtgttcgcggtcttgcttgcccactgagttataaacgttcttgatacagtarggataccaacgcctgttaaatattattcacctgtttcctaagttcagcaatttaacacttgcttcaaaatctgttttctttttattcctttatggattca

SEQ ID NO: 36902 - DNA, 201 bp, Homo sapiens
ctcggccactgggccaggccacatgtgcggccctccttggttccaagctgttcttggacgtggtctcctccacccccagagcctttgctttcctttccccmgatcttcttttcccagacttcctggaatttataatccaaaggttgtgtaatttcagaagctgcgatggttccaagaactcctgtccccgtcagtccgtct

SEQ ID NO: 36903 - DNA, 201 bp, Homo sapiens
ggcgcctgaggcggggctgcgcttccggggcggggccggcggaggctggagggggccgcccgggagcagaggcaggacttgcggcgcgtgcccctcacccyagcccggggctgtcctgcctcgtggggagtgtgaaggccatgcccggcgccgcggccctggtgcccctgttccactgggaccctggggggcgccgccagg

SEQ ID NO: 36904 - DNA, 201 bp, Homo sapiens
atacattttactggttactttatttaccattgtttgctgtatccaagtttcccctcctttttggcagtatttaatgactttttttttttttttttttttttgagacaatctcagactggagtgcagtggcatgatctcgtcttactgcggccacgaccccctgggctccagcgatcctctcacctgagcctcctgagtagc

SEQ ID NO: 36905 - DNA, 201 bp, Homo sapiens
gcgcggtggcgtgaccctggcgctggggggcgagcgcggccctcccggtcccgcaggcgcaagagagggcggagatgcggcgcctgaggcggggctgcgcwtccggggcggggccggcggaggctggagggggccgcccgggagcagaggcaggacttgcggcgcgtgcccctcaccctagcccggggctgtcctgcctcg

SEQ ID NO: 36906 - DNA, 201 bp, Homo sapiens
gcccgcctcggcctcccaaagtgctgggattacaggcgtgaaccaccgtgcccaacctcagggtgctttttttctttctttttctttttcttttttttttytttttttttttttttttgagaaggagtcttgctctgtcacccaggctgaagtgcagtggcatgatctcggctcactgcaacctccacctcttgggttcaa

SEQ ID NO: 36907 - DNA, 201 bp, Homo sapiens
gatgaggggccgggagaagaccccgtggctggggaagcaggagtggggagggcggggcctccgggccgaggggcgcggtcgctgtggtctgtggaggggcyggcgaggctcccgcctctgctcttgctggagctcttgagtgagccctgtgacgcctgctaggtgaggtggcagccagtgagcgcgccccaccgcccagcg

SEQ ID NO: 36908 - DNA, 201 bp, Homo sapiens
ttgcttgatgttttccgagcttcctggatctgtggtttggtgtcatcgataattttggaaaactctgaactatggttaattcaaatacttctgctcctttyatctctttctggcattcccattatgctcatgtaacacttttgccccacaattctccaatattctgattttttttttccgtttttttctctttgcatttca

SEQ ID NO: 36909 - DNA, 201 bp, Homo sapiens
ccgccccaggcctctgagccaggccagaccctgaggcttctcaggggccacccccccagctcccagaggcccctcctgtcctccagcgaggcactgacccmccacttctcacagcatccgtatgtgtgttttggtggctgtgggttgtatctgtgacctattttccctcaaaatcaagttcagggaaaaggttttttcgtt

SEQ ID NO: 36910 - DNA, 201 bp, Homo sapiens
gcaaggccacagggggtgtgaggggacactcgagtgccgccaccggcagaggagctgcaggttggtcaccgtcctcgagtggaaacccgatggccaagccrgagtcccgcaggttgaagcaagctgctctgcaaggtgaagccacacccagggcggcccaggaggccgccagccaggagcaggcccagcaagctctggaac

SEQ ID NO: 36911 - DNA, 201 bp, Homo sapiens
gctgaagggcactggtatgattttggctcaccgcaacctccgcctcctgagctgaggtgatcctcccacttagcctcctaagtaggtgggactacagatgsgtgccaccatgccctgctaatttttgtatgttttgtagagacagggttttgccatgttgcccaagctggtctggaactcctgagctcaagctatctgcct

SEQ ID NO: 36912 - DNA, 201 bp, Homo sapiens
ggagtacagtggcgcgatctcggctcattgcaacctctgccccctgggttcaagcgattctcctgcctcagcctcctgagtagctgggagtacaggcacgygccaccacacccagctaattttttgtatttttagtagagactgtgtttcaccttgttagccaggatggtctcgatctcctgacctcgtgatctgcccgcc

SEQ ID NO: 36913 - DNA, 201 bp, Homo sapiens
agcacaggctgtgccatacagcctaggtgcgtggtacgcggtaagtgcactctgtgacgtttgtacaatgatgaacttgcctcatgacgtgtttgtcaacrcatcccccatcagtaagtgctgcttgactgaaaggtgaagtaagtgtgccttgtttggagggcatccatccccttaacctggctggcactcgggctgtgt

SEQ ID NO: 36914 - DNA, 201 bp, Homo sapiens
gcttctggcttttctcgaaatattagatctgcagtaggtgctgcagcttggatggcagcagaccctggggccaggagccaaggccctgagctgtgaggccracctcactccccaccacatcccctgctctgaggccacccagaaccctgtgctgcagtaacatagtaaacactcttgggataaaatgcttttagttttttt

SEQ ID NO: 36915 - DNA, 201 bp, Homo sapiens
ggggtcacaaggaagctgttagtatgtggttctcatattcttaccgtacaagaaagcaaaagccccttgaggtccctcagtatcccttcccaccacctgcwccccacaggtggagaaattgcctgcttttagggagatagcagtgtaggcctctgaagtagaggagagccaccagggatggggagtggttgaagtatcttt

SEQ ID NO: 36916 - DNA, 201 bp, Homo sapiens
cgttcttgatacagtaaggataccaacgcctgttaaatattattcacctgtttcctaagttcagcaatttaacacttgcttcaaaatctgttttctttttrttcctttatggattcattatctacatataattcttgaaatctggattgtcaaaatccaagtacaaaacaagtgaaccttaatgtaaactatggaccctat

SEQ ID NO: 36917 - DNA, 201 bp, Homo sapiens
gaagaggagaggtgggaggtgagaggcaccgggcagggcgctgtgtgtggctccagccctctctggccctctgcacctgccccaaggtatgcgactcacamcacagtggtgtcatttgttttaatttgaacagatgtttagaaattgggatattttagcctaaaatcagcttctggcttttctcgaaatattagatctgca

SEQ ID NO: 36918 - DNA, 201 bp, Homo sapiens
tgagctgtgaggccaacctcactccccaccacatcccctgctctgaggccacccagaaccctgtgctgcagtaacatagtaaacactcttgggataaaatkcttttagtttttttaagttttctgctttttgaaatattaatttgtttggggaggtttttctttataacatttttattgaggtgtaattcgcataagtgaa

SEQ ID NO: 36919 - DNA, 201 bp, Homo sapiens
aattttcttactcattcttaagcatttcctcttctagatgaacttttgaataaacatctcaaggcttataaaatgtacatcaagactgcattgaatacatkaatgaatttgggtagaattgacatattttcatgggtagcaatatgcagcgtgacagtgtattacggtgactttaggtcatgttttgtgtattttagtata

SEQ ID NO: 36920 - DNA, 201 bp, Homo sapiens
agggacagtggctaggctgctgccacgttccacgcggcccgaagtggtggagggtgcagggggagcggccccaggagcaggttaacctggtgaggtgcagygtagacagaaggaggcgccgccgctgcttgtttactgcctgacctgttgtccctgtccaaattaaactccattaagattcagagcaaataacagcaagcc

SEQ ID NO: 36921 - DNA, 201 bp, Homo sapiens
agcctcgtttgtctttcttcgtctgcttgtccacttccttaccagtaacacatttttagctctcacagctgtatattacatgttaatgtctaagggaacgkttcccacattttttctccaaattttcttactcattcttaagcatttcctcttctagatgaacttttgaataaacatctcaaggcttataaaatgtacatc

SEQ ID NO: 36922 - DNA, 201 bp, Homo sapiens
gcaagaggctgaagaaagatgtggaaccaagctgcagtgggagcagcctgggacccgacaagggcctggcccagagccctcccagctcatcacttaccgcracaccgcagaagccttcccagagcccctctgcccctcctgccgacgtcaccccaaagccagccacggaagccgtgcagagcgagcacagcgacgccagcc

SEQ ID NO: 36923 - DNA, 201 bp, Homo sapiens
actcgtcactccgcccagacctctggccagtccctctttcataaaattcacctaacctccaaagctccttccagctctgaaattctgtgatctgggctgtyattgtcttttactttcttctgagacgtgatctttcatagtggaactacaattcccagaatgcaccatttaaagttagcattcacttcctgcagagccatt

SEQ ID NO: 36924 - DNA, 201 bp, Homo sapiens
acttgttttgcttttacagttgattattttaaggggagacatttaattatttctaattactttttgtcatttgtcctgtaggttccccctaaaggactcamaacgtctaatccaatggttaaaagctgttcagagggataactggactcccactaagtattcatttctctgtagtgagcatttcaccaaagacagcttctc

SEQ ID NO: 36925 - DNA, 201 bp, Homo sapiens
agaagccgcactcgtcactccgcccagacctctggccagtccctctttcataaaattcacctaacctccaaagctccttccagctctgaaattctgtgatstgggctgtcattgtcttttactttcttctgagacgtgatctttcatagtggaactacaattcccagaatgcaccatttaaagttagcattcacttcctgc

SEQ ID NO: 36926 - DNA, 201 bp, Homo sapiens
aagatgagtctccagccaccctctaggagacagaaaaggacatgccaggggtggccagagggactgctctggagagagaaagcatttaggatgtgcctgtytctgtggtgttgccttcctctgctgtagctggtggaggaggctgagggtagaagccgcactcgtcactccgcccagacctctggccagtccctctttcat

SEQ ID NO: 36927 - DNA, 201 bp, Homo sapiens
gaagatgagtctccagccaccctctaggagacagaaaaggacatgccaggggtggccagagggactgctctggagagagaaagcatttaggatgtgcctgkctctgtggtgttgccttcctctgctgtagctggtggaggaggctgagggtagaagccgcactcgtcactccgcccagacctctggccagtccctctttca

SEQ ID NO: 36928 - DNA, 201 bp, Homo sapiens
ggatgggtaagcctgctttcagtgtcttgggccaaaacatgaaaatttaaatttcttgcaggaaatttaaatttttgtttttgtgttttggttgagatttyaataaaagaaaaatgaaatcagaaaagaaatgcctagaaaagcctgtctggtttatttaaagaggtggaaagtgacaaatagactaggtcctttatagta

SEQ ID NO: 36929 - DNA, 201 bp, Homo sapiens
tcagcctcccaagtagctcggattacaggctcccaccaccatggccggctaattttttgtatttttagtaaagacggggtttcaccatgttggccaggcckgtctcgacctgacgtcaggtgatccaccctcgttggtctcccaaagcgctgagatgacaggcgtgagccaccatgcgcagtctagaaccaaatgttttaa

SEQ ID NO: 36930 - DNA, 201 bp, Homo sapiens
ttcattttctccctgatgctctttgtctccttcacacactcttcacaccagggcaccgtgcctcccgtgtgagctgctttcagccttgctgtaggacatgkaggacccctgagctatttggggtcacaaggaagctgttagtatgtggttctcatattcttaactgtacaagaaagcaaaagccccttgaggtccctcagt

SEQ ID NO: 36931 - DNA, 201 bp, Homo sapiens
cccgcctgcccctgggccctcacactctggctgctccgagaccctgcatcccctttcattttctccctgatgctctttgtctccttcacacactcttcacrccagggcaccgtgcctcccgtgtgagctgctttcagccttgctgtaggacatgtaggacccctgagctatttggggtcacaaggaagctgttagtatgtg

SEQ ID NO: 36932 - DNA, 201 bp, Homo sapiens
cctgggggctttggggacctctaccgagcgacttaatggacagaagctggaagcacaacctgaggggctgggcctccccattgggttgacatcagcaggaytgaggaagccaggaagcacacacagaaggcagggaccttgaggctagaaggagagcaggaggcaagaagagctgggtcttggagggccagtcctactagg

SEQ ID NO: 36933 - DNA, 201 bp, Homo sapiens
acttacaggctttctttgaccatttagaaggccagtttgcatgactgttccagaggaacttgaagaaggcattccttagttttgtttttgtttttgtttttgtttttgttttgagatggagtttcgctcttgtcacccaggctggagtgcaatggtgcaatctcggctcaccgcaacctctgcctcccagtttcaagcgat

SEQ ID NO: 36934 - DNA, 201 bp, Homo sapiens
gttggagacttattttacgccccagtatatggcctaacttcatgaatatttcatgtacacttaacgaatgtagcattcaatagttataaaagtcccctccrcaagctggaaaccctgggatgccagtgtcatggctcagtccaagtccaaaggcttcagaaccagggaagtcagtggtgtcactcttggtcctgggccaaa

SEQ ID NO: 36935 - DNA, 201 bp, Homo sapiens
actctcagaaaaagcaaatatcagaaactgttaaaatcatgaggaggttctttctgttcacgttttaaggaatatccttgaagttaaatcatcatgaacaktaataattattttaacatctattcaattaaaacatctgttgaggctggactcggtggctcacacctgtaatcccagtactttgggaggctaaggtgggca

SEQ ID NO: 36936 - DNA, 201 bp, Homo sapiens
cctctgaaacacattttcaagcaaacctgctgttttcagccttcatccacggccactggtagagacactcaggccacgccacggagcttttgtggggtgttaaggcaggctgttcgcctgtccccagtgctgcattcagcctcggccttcctgggtcggctgtgtcgggtccccgtgtgcgtctcatttccagcccctcac

SEQ ID NO: 36937 - DNA, 201 bp, Homo sapiens
gtgaggctttcctttagctgctccgtggcatctgggggatcaggctgggatgggacgtgtgagtgtctttactgtttgtgtgggtgttggtgggcatggcscagactgcaggccccacagagggtagcaatgcctcaatgagctgtgtactgagcctggtggagcctgtgagctgccgagggtccctggccagcttgcccc

SEQ ID NO: 36938 - DNA, 201 bp, Homo sapiens
tgttttttgttttgttttgtttgagacagagccttgctctgtcgccaggctggggtgcagtggcgtgatcatctcagctcattgcaacctccacctcccakgctcaagcaattctcctgcctcagccttctaagtagctgggatcacaggcgcccgccaccagccccagtgtcgtatttttagtagagacagggattcacc

SEQ ID NO: 36939 - DNA, 201 bp, Homo sapiens
ataactggactcccactaagtattcatttctctgtagtgagcatttcaccaaagacagcttctccaagaggctggaggaccagcatcgcctgctgaagccyacggccgtgccatccatcttccacctgaccgagaagaagaggggggctggaggccatggccgcacccggagaaaagatgccagcaaggccacagggggtg

SEQ ID NO: 36940 - DNA, 201 bp, Homo sapiens
ctcctctccctaggctctgggaacccgcattctcctgtctctatgaatttgattactctgagtacctcatgtgagtggtatcatgcagtgtttgttttttkgcacctgccctatttcattcagtataatgtcctcaaggatcatctgagttggttgattttttttgaggggagaagaccgggtttcactctgttccccagg

SEQ ID NO: 36941 - DNA, 201 bp, Homo sapiens
agctgccataggcttggattcttgttggaaacagctgctataatttattctgatgaattactgttccaaagatggtatttctgagctttccaagaacacaytggacatcagttctagttacagtgaaagtgggaggcagtggagaagggaagcactggaagctcagcgcttgtctgatcaggtatatgatttgtagagacc

SEQ ID NO: 36942 - DNA, 201 bp, Homo sapiens
cactgtactccagcctaggtgacagtgagaccctgtctcaaaaaacaaaatttcctgtgtaatctttgtatgtatattagctctatttctgttttttcccrtattttactgttaagtatttcttaaaattggtttctagatgtttacatatggcggatggtttcctttgcctgtcgtgtacataggaaaaccatattccta

SEQ ID NO: 36943 - DNA, 201 bp, Homo sapiens
tcagttagcatttttggtttgcagcaatttcctttttgttcttttgtccatcactcctcttacattgcccatgttttcttgcctatcacccactttttccrttagagcccttagcatattaattgtactgattttattattattactattattttgagatggagtcttgctctgttgcccaggctggagtgcagtggcaca

SEQ ID NO: 36944 - DNA, 201 bp, Homo sapiens
tcatccacctcccaagttctattccttgttgttattaaaaatttggtgtgtaagccaggcacagtagctcttgcctgtaatctcagcacttcgggaggccraagagggaaggttacttgagtccagaagttcaaaccagcctgggcaacatagggagaccccatctctataaataatttaaaaattagccgagtaccatgg

SEQ ID NO: 36945 - DNA, 201 bp, Homo sapiens
tcagaaactgttaaaatcatgaggaggttctttctgttcacgttttaaggaatatccttgaagttaaatcatcatgaacattaataattattttaacatcyattcaattaaaacatctgttgaggctggactcggtggctcacacctgtaatcccagtactttgggaggctaaggtgggcagatcacttgaggtcaggagt

SEQ ID NO: 36946 - DNA, 201 bp, Homo sapiens
ggtctcgaactcccgacctcaggtgatccacccgcctcggcctcccagcttctcttggaattttaaagctgtttgtagttatcagagctaatgctgctttwgacagcttctctctgttcctcttggttaaacttcctgaagtttgtctccattacaggtttttgcaaacagccagcccttcgtgtctctgagttgttgttt

SEQ ID NO: 36947 - DNA, 201 bp, Homo sapiens
aactcctgacctgaggtgatctgcccgtctcggcatcccaaagtgctgggattacaggttcagtgagccattgcgcccggcccaaagcctctttcttttcrgtgctgagctggataaagtctaccaaactgaaaggtctccaaggctatagctggctgtctgagaaattatggtgtttgtttagcccatcttaggacttgg

SEQ ID NO: 36948 - DNA, 201 bp, Homo sapiens
cgtgcaaaaatacttgttttgcttttacagttgattattttaaggggagacatttaattatttctaattactttttgtcatttgtcctgtaggttcccccyaaaggactcaaaacgtctaatccaatggttaaaagctgttcagagggataactggactcccactaagtattcatttctctgtagtgagcatttcaccaaa

SEQ ID NO: 36949 - DNA, 201 bp, Homo sapiens
tttctgagacagggtctcgctctgtcacccaggttggagtgtagtgatgtgctctcggctcattgcgatctctgcctcccaggcccaagcgatcctcccasctcagcctcctgagtagctgggacgacaggcacgtgccaccacgcccagccaattttttgtagttctggtagagacagtgttttgctatgttgcctgggc

SEQ ID NO: 36950 - DNA, 201 bp, Homo sapiens
gacatctgtgttgtttccactttggggctgttgggaatggtgctgctgtaaacattcatgggcagcgtcctgtggggacaggtgtgtcatttctgctgggwatgcatgtctccaggagtggcagtcctgggccactgctccacacttaacctctcaggcacatgccagatggtcttcactaggctgtgccagttcacgtcc

SEQ ID NO: 36951 - DNA, 201 bp, Homo sapiens
tatccaagtagcctgctgtcgcccagccgcggtcagtaccggagcctcgcgtacccatgttcccttcccgttaggaggggtttctctgcaaggtggccagygtcccctgagcatttctgggaggtgtcacaagctccctgcgctctcaggaggaagctctggtcgtaaccataccttgtggatgagggaatccaggttaga

SEQ ID NO: 36952 - DNA, 201 bp, Homo sapiens
attcctatcctgtgccttgcctttctgtttcctagacagtaccatttgaagaaccaaatgttgttttttttggtgggggtggggggtttcttttctttttyttttttttttttgagacattgtttgctctcgttgcccaggctggaatgcaatggcctgatctcagctcactgcaacctctacctcccagattcaagcgat

SEQ ID NO: 36953 - DNA, 201 bp, Homo sapiens
caagatgaacccagtggtggagccactgtcctggatgctgggcacctggctgtcggacccacctggagccgggacctaccccacactgcagcccttccagwacctggaggaggttcacatctcccacgtgggccagcccatgctgaacttctcgtaagttgtctccctccaccccaccctgcttgactcatgggccgccta

SEQ ID NO: 36954 - DNA, 201 bp, Homo sapiens
cctgatcccgtccccatcagtctgtctgctgcttttgcgggcctggaggagacgccgggggtcagtcctgatcctgtccccgtcagccgtcttctgcttgygcgggcctggaggagacactgggggtcagtccaatcctgtccccatcagtccgtcttctgcttgcgcgggcctggaggagacactgggcatcagtccgat

SEQ ID NO: 36955 - DNA, 201 bp, Homo sapiens
ggttccaagaactcctgtccccgtcagtccgtcttctgcttgcgcgggcctggaggagacactgggggtcagtcctgatcccgtccccatcagtctgtctkctgcttttgcgggcctggaggagacgccgggggtcagtcctgatcctgtccccgtcagccgtcttctgcttgtgcgggcctggaggagacactgggggtc

SEQ ID NO: 36956 - DNA, 201 bp, Homo sapiens
cgagcgagactctgttatcagaaaagaaaaaaaaagatcttcacatactattcagattgctcacagtgtgcaattctgtggtttttagtatgttcacagcyctgtgtacccatcactacagttaatttcagaacatttatcttctgtggcacaatcataactcactgcagcctcaacccccctggactcaggtgatcctcc

SEQ ID NO: 36957 - DNA, 201 bp, Homo sapiens
attttagtatatagaaaagctttatttctttatagttttaattatacaggtcttgtacatttcatgttagggtaaactcaagtgttttatcatttttgttrcttgtaaatagattttttcccatttaatcttcagattgattattgataattgtgtggacacttctgatttctctgtgttgaactgggccactggtgtaac

SEQ ID NO: 36958 - DNA, 201 bp, Homo sapiens
aacatttatcttctgtggcacaatcataactcactgcagcctcaacccccctggactcaggtgatcctcccacctcagcctcctcagtagctgggactgcraatgcgcaccaccacacctggctcatttttttgtttgtttttgatttggggtttttctttaagagagggtctcattccatcacctaggctggaatacagt

SEQ ID NO: 36959 - DNA, 201 bp, Homo sapiens
tgtgctgtattttgtttatccattcctcattgatgggcaagttgttcgttactgaatcttggctgttaagaagaatactgtgcctcgcgtggtggctcacrcgtgtaatcccaacactttgtggggctgaggcaggagatcacttgagcccaggagttcaagaccagcctggacaacatagcaaaacctggtttcacaaaa

SEQ ID NO: 36960 - DNA, 201 bp, Homo sapiens
gcgtgacagataagagtggcatttctatggatgactttacgcccccaggatctggggcgtgcaaatttatcggctcacttcattcgtacagtttctcctcyaagcacacccgagaaaggccatctgtcccccgagagcccattgaccgcaagaggctgaagaaagatgtggaaccaagctgcagtgggagcagcctgggac

SEQ ID NO: 36961 - DNA, 201 bp, Homo sapiens
cccttttgccagtgagagcctggacgtctccacctcggtgcagcacctcatctgtgagtcctgggtggggccacctccccatcctttccaaatattcaggsaaggcagatcccagccatccccatccccatcccgcagcactgcttccactgcccctgcgtttccaagaggacgtttccacgcagacctgtcccagtgctg

SEQ ID NO: 36962 - DNA, 201 bp, Homo sapiens
atcctttccaaatattcaggcaaggcagatcccagccatccccatccccatcccgcagcactgcttccactgcccctgcgtttccaagaggacgtttccaygcagacctgtcccagtgctgtgctgctgtccctaaccacaggtgcccagctcccagcctatcctgttttcccctgtctcagtttccctctcagtggtgat

SEQ ID NO: 36963 - DNA, 201 bp, Homo sapiens
gagtcctgggtggggccacctccccatcctttccaaatattcaggcaaggcagatcccagccatccccatccccatcccgcagcactgcttccactgcccytgcgtttccaagaggacgtttccacgcagacctgtcccagtgctgtgctgctgtccctaaccacaggtgcccagctcccagcctatcctgttttcccctg

SEQ ID NO: 36964 - DNA, 201 bp, Homo sapiens
agagcagacaccgagcagctgccctccccatctctcccccaggtgtcctgacactggcgggggtcagcatctacatcagctactcgcacctggcctttgcrgagacggtgcagcagtatggcccgcagcacatgcagggcgtccgcgtcagcttcggctggtccatggccctggcctggggctcctgtgccttggaggcat

SEQ ID NO: 36965 - DNA, 201 bp, Homo sapiens
tggcgggggtcagcatctacatcagctactcgcacctggcctttgcggagacggtgcagcagtatggcccgcagcacatgcagggcgtccgcgtcagcttyggctggtccatggccctggcctggggctcctgtgccttggaggcattcagcggaaccctcctgctctcagctgcctggaccctcagcctgagccccccaa

SEQ ID NO: 36966 - DNA, 201 bp, Homo sapiens
tctccacctcggtgcagcacctcatctgtgagtcctgggtggggccacctccccatcctttccaaatattcaggcaaggcagatcccagccatccccatcyccatcccgcagcactgcttccactgcccctgcgtttccaagaggacgtttccacgcagacctgtcccagtgctgtgctgctgtccctaaccacaggtgcc

SEQ ID NO: 36967 - DNA, 201 bp, Homo sapiens
accaggaccccagggccagcccgtgccaggctcctatgcttccaggagcacgggtgggtggtcctgctgcctggccggccatcctcctggggtcggtctcyggccgatcctccctcctcctctcaagccctgcacagcccggccaggcaggtgcatcttgtttggctgctgaggagccgggggttcagggaaattaaggaa

SEQ ID NO: 36968 - DNA, 201 bp, Homo sapiens
gaaggcaggtgagacagggcaccagaggcctcagctctgaccccagcacaggctgagactgtaaccggtaaccacccatccactgacgcggctccagctcygactacatgccgagtgctggccaagtgctcctccgaaggctcctccgagggccccccagtcccagctgcaggtgagaaatctgaggcctggagagggccg

SEQ ID NO: 36969 - DNA, 201 bp, Homo sapiens
ggtgtctgggagaggcggccaggttgacagccaggcagggctaaccatgacaggaagggcggtgtgctgcctgcagctctgcctgaatgctagcggggccrgggatgctgaggccatgtctgcaggaccacctgggcctgggcccgctagagcagacaccgagcagctgccctccccatctctcccccaggtgtcctgaca

SEQ ID NO: 36970 - DNA, 201 bp, Homo sapiens
cagggaccgcttcattcaatttggcttcacattcttccccaaaataaatccataatttctgttgctacgctgcccagccgggcaggcatccgtgtgtcctycctccctcagcctccccatgccttcttctccccactctctgtcccactcttcttcccaagtttggttcccaggaggaatcacagaagaccaggctgtgtt

SEQ ID NO: 36971 - DNA, 201 bp, Homo sapiens
ctgcctctcctgttgccctcgtcccctgctcccttctgggcgggtgctgagtctggcgatggagccgtggcaggcagctccctgtggttccagaaggtacscatgtatatttgttctcacgttgctataaagaaatgcctgagactgcgtaatttataaagaaaagaggtttaggccgggagcagtggctcatgcctgtga

SEQ ID NO: 36972 - DNA, 201 bp, Homo sapiens
gccctgtggtgccagggggtcccctgggctcgggtaggctgctgggtgcaccacagcgtccaggccccaggcttcgaggcctatgtttcccagggcagaayggctgcatcccgctggtcgacccttttgccagtgagagcctggacgtctccacctcggtgcagcacctcatctgtgagtcctgggtggggccacctcccc

SEQ ID NO: 36973 - DNA, 201 bp, Homo sapiens
cttttggctgggcagtgcccagaggggaccctgtgcacccaggaagtgcctgtggggaaatcagggccacctgcccccctggctaacattccctacagtcrgcgccaaggacaggctttctcatcagcctgaagctgtgggaagggggtggcactccgggctggttcctccaagctcagtggacaggaaaatgccctggag

SEQ ID NO: 36974 - DNA, 201 bp, Homo sapiens
ctgggacaggaggaagagagtagggaggtgttacacacttttttttttttttgagatggagtttcgctcttgttgcccaggctggagtgcaatcgcatgawctcgactcactgcaacctccgcatcctgggttcgagcaattctcctgcctcagcctcctgagtagctgggattacaggcatgcgccaccacacccagcta

SEQ ID NO: 36975 - DNA, 201 bp, Homo sapiens
tgggtgcaccacagcgtccaggccccaggcttcgaggcctatgtttcccagggcagaacggctgcatcccgctggtcgacccttttgccagtgagagcctrgacgtctccacctcggtgcagcacctcatctgtgagtcctgggtggggccacctccccatcctttccaaatattcaggcaaggcagatcccagccatccc

SEQ ID NO: 36976 - DNA, 201 bp, Homo sapiens
cgcaatcttcgctcactgcaagctctgcctcccaggttcatgccattctcttgcctcagcctcctgagcagctgggactacaggcacctgccaccacgccyggctaatttttttgtatttttagtagagatggggtttcaccatgttagccaggatggtctcaatcttctgaccttgtgatcctcctgcctcggcctccca

SEQ ID NO: 36977 - DNA, 201 bp, Homo sapiens
ggtgtgaggaagaggaggcgggggtgcagggcagggactcactctgatcagagcactgggcaacgctgctgccagcagaggccatggctctgtgtgtgtgkgtgtgtgtgtgtgtgtgtgtgtgtgaatgtgtgcaaatgtgttcgtgtaggtgtgcatgtgcatgtgtgtgctgggggccatggagggtacagagtgtgt

SEQ ID NO: 36978 - DNA, 201 bp, Homo sapiens
gccctggcctggggctcctgtgccttggaggcattcagcggaaccctcctgctctcagctgcctggaccctcagcctgagccccccaatctgtggtcatcwgagtccccagcaggtgggagggaggtaagagggggctgggtttccctttgcacctcccgggattgggcggtcagggccagggccccttgagagtctggga

SEQ ID NO: 36979 - DNA, 201 bp, Homo sapiens
gcaccctggcatggacgctgctgttgccgctgctgctgcgggagtcagacagcctagaaccgtcgtgcaccgtgtcctccgcggatgtggactggaacgcrgagttcagtgccacgtgcctgaatttcagtggcctcagcctgagcctgcctcacaaccagtctctgcgggccagcaacgtgattctccttgacctgtctg

SEQ ID NO: 36980 - DNA, 201 bp, Homo sapiens
ccaggaagctctgccgccccctccctgtccctcatgccgctcctcagctccctcagctcctagagggggaagaggagagacccccaacaaggggacaggasggtcactgtgccaatcctgtcatcaccctcctgtggatgtacaggcagtgctcaataaatgcttcgaggctgatgaggctgctggctcagggtgcgtggg

SEQ ID NO: 36981 - DNA, 201 bp, Homo sapiens
tacccctggtctgtctgtccccccagggctcacccttcagaggacaatgacttttacatcaactacaaggacatcgacctggcttcccagcctgtctactrtaacctgcagtcactgggccaggccccaatggatgaagaggagtacgtgatccccgggcactgagcctaagatgtcctaacctccacccagaaccccttc

SEQ ID NO: 36982 - DNA, 201 bp, Homo sapiens
atcggggcagtggtggtcagcgggtgcctgcttcttggacttgccatcgctggccctgtgctggcctggagactctggcgatgccgagtggccagaagccsggagctgaacaaaccctgggctgctcaggatgggcccaagcccggtttaggcttgcagccacggtacggcagccggagcgcccccaagccccaagtggcc

SEQ ID NO: 36983 - DNA, 201 bp, Homo sapiens
gctgaacaaaccctgggctgctcaggatgggcccaagcccggtttaggcttgcagccacggtacggcagccggagcgcccccaagccccaagtggccgtgmcatcctgcccctccactcccgactatgagaacatgtttgtgggccagccagcagccgagcaccagtgggatgaacaagggtaagtaagccactgagacac

SEQ ID NO: 36984 - DNA, 201 bp, Homo sapiens
ccccctacaaccacttaggggttggtgggcaattcgtactagagtataattgactgatagatgctgttaacacaaagtagcccttttgcctttttttttttcccgctctgtcgcccaggctagagtgcaatggcatgatctcggctcactgcaaccttcacctcccgggttcaagtgattctcctgcctcctgcctcagcc

SEQ ID NO: 36985 - DNA, 201 bp, Homo sapiens
atgaagaggagtacgtgatccccgggcactgagcctaagatgtcctaacctccacccagaaccccttcagtccctgctgggtgactcagggcgtcctaackcctccatggcctcagtttccccatctgaagaatggggacaggaaaggattgtccttgaggccccaggaagctctgccgccccctccctgtccctcatgcc

SEQ ID NO: 36986 - DNA, 201 bp, Homo sapiens
ggctcacccttcagaggacaatgacttttacatcaactacaaggacatcgacctggcttcccagcctgtctactgtaacctgcagtcactgggccaggccycaatggatgaagaggagtacgtgatccccgggcactgagcctaagatgtcctaacctccacccagaaccccttcagtccctgctgggtgactcagggcgt

SEQ ID NO: 36987 - DNA, 201 bp, Homo sapiens
agatgtcctaacctccacccagaaccccttcagtccctgctgggtgactcagggcgtcctaactcctccatggcctcagtttccccatctgaagaatgggkacaggaaaggattgtccttgaggccccaggaagctctgccgccccctccctgtccctcatgccgctcctcagctccctcagctcctagagggggaagagg

SEQ ID NO: 36988 - DNA, 201 bp, Homo sapiens
atgttgtccaggctggtcttgaactcatgatctcaggtgatccacccacctcagcctcccaaagtgctggattacaggcgtgagtcagagcacctggcccrctctggactttctcaaagctcatgtgcctgtcccctgagtcctccccctcccacacttacccctggtctgtctgtccccccagggctcacccttcagagg

SEQ ID NO: 36989 - DNA, 201 bp, Homo sapiens
cctcagcctcccaaagtgctggattacaggcgtgagtcagagcacctggcccactctggactttctcaaagctcatgtgcctgtcccctgagtcctccccstcccacacttacccctggtctgtctgtccccccagggctcacccttcagaggacaatgacttttacatcaactacaaggacatcgacctggcttcccagc

SEQ ID NO: 36990 - DNA, 201 bp, Homo sapiens
agtagctgggactacaggcctgtgccaccatgcctggataatttttgtatttttagtagagacgaggtttcatcatgttgtccaggctggtcttgaactcmtgatctcaggtgatccacccacctcagcctcccaaagtgctggattacaggcgtgagtcagagcacctggcccactctggactttctcaaagctcatgtg

SEQ ID NO: 36991 - DNA, 201 bp, Homo sapiens
tactaaaaatacaaaaattaacctttctgcctgtaaatgccattgaagaagcaccgttagattctctcttctcactgccgtcctgtctaagtcagagtctyctaaaaagcctgaacagctgaggaagctcttcattggagtgttgacctttgaaacaactgatgagagcctgaggagccattttgagcaatggggaacgct

SEQ ID NO: 36992 - DNA, 201 bp, Homo sapiens; identical to SEQ ID NO: 18268

SEQ ID NO: 36993 - DNA, 201 bp, Homo sapiens
cgaggggtgcaccccactcacggcggggacgggtggccgttgaggggtgcacctcactcacggcggggacgggtggccgttgaggggtgcacctcactcacagcagggacgggtggccgtcgaggggtgcacctcacttagggcggggacaggtggccgttgaggggtgcacctcactcacggtggggacggatagccgtc

SEQ ID NO: 36994 - DNA, 201 bp, Homo sapiens
tcgaggggtgcaccccactcacggcggggacgggtggccgttgaggggtgcacctcactcacggcggggacgggtggccgttgaggggtgcacctcactcacagcagggacgggtggccgtcgaggggtgcacctcacttagggcggggacaggtggccgttgaggggtgcacctcactcacggtggggacggatagccgt

SEQ ID NO: 36995 - DNA, 201 bp, Homo sapiens
gtcgaggggtgcaccccactcacggcggggacgggtggccgttgaggggtgcacctcactcacggcggggacgggtggccgttgaggggtgcacctcactcacagcagggacgggtggccgtcgaggggtgcacctcacttagggcggggacaggtggccgttgaggggtgcacctcactcacggtggggacggatagccg

SEQ ID NO: 36996 - DNA, 201 bp, Homo sapiens
cgtcgaggggtgcaccccactcacggcggggacgggtggccgttgaggggtgcacctcactcacggcggggacgggtggccgttgaggggtgcacctcactcacagcagggacgggtggccgtcgaggggtgcacctcacttagggcggggacaggtggccgttgaggggtgcacctcactcacggtggggacggatagcc

SEQ ID NO: 36997 - DNA, 201 bp, Homo sapiens
aggccgaggcaggagaatcgcttgaacctgggaggcagaggttgcagtgagccgagatcacaccactgtactccagcctgggtgacgacagagcgagactktatccaaaaaaacccaaaaaccaaaaaacaaaaacaaaaaccaaaaaaaaaaaaaaacagagaaaagaaaatggattgtctttcctcacctgagattctg

SEQ ID NO: 36998 - DNA, 201 bp, Homo sapiens
acgctgtccccaccccaaggctgcagcacttcccgtaaaccacctgcagtgcccgccgccttcccgaggctctgtgccagctagtctgggaagttcctctyccgctctaaccacagcccgaggggggctcccctcccccgacctgcaccggagatctcaggcacccggctcaactcagacctcccgctcccgaccctacac

SEQ ID NO: 36999 - DNA, 201 bp, Homo sapiens
cacaagcactatggcccccggctcaagtgctgctctggcaaagctccggtgaggcccaggatggagaacagggcaggcgaccaggcaggaagtgggggacrggggacaggagaggggagggcagagggacagatgtggagacggaggggtgtccagcgtggaatgagggtgtgcagggccaaggctgcagagacccaggga

SEQ ID NO: 37000 - DNA, 201 bp, Homo sapiens
ccagagcctgtatcgtggcaccgtggcgcgtggcgctggagcgggcgttgtggtcaaggatgcagctgccccttctcagcctctgaggatccaggctcagracccggagttctcggtagagagtgcatccaaggcctcccctctgtgggtgggtcagggctgtacgtgggaggcagcctggccggggactcaatgagaccc

SEQ ID NO: 37001 - DNA, 201 bp, Homo sapiens
ggtgggggcacagcacagaccccagagccaggaacctctcagccgatgcccctcagcaagagcaccccatcttcaggtagcacccactctgttgccttccytccctgactccggtcattggctggtatgggaaacgctgtaggaagggtccaccccaggctgacctggcctgaccatgaaatcccaaagaggagtctgttt

SEQ ID NO: 37002 - DNA, 201 bp, Homo sapiens
ccaggggggctcaggcgggcaggaagaggggagggtggaggtgtcacctggggtgccaggaatccactctggcgtgaggactccggaccctctgtctcgtrtggcctcggaccagtggcttgacccctcagagcctgtggagcacggagcgtgcagggcttgaaggcgaccatgagggcaccgtgcagggttaggacactg

SEQ ID NO: 37003 - DNA, 201 bp, Homo sapiens
gcctcccctgctgttcaccgggctgctcgtccgacccccggggaccatggcccaggcccagtgtatgtgcgggcaggggtaggtggggcacgggcggcggkgagccaggggctgggaggcactgatccctcctctgcaaccttacagactgctctgtgaacaaggacatctttgaagtagaggagaacacaaatgtcaccg

SEQ ID NO: 37004 - DNA, 201 bp, Homo sapiens
gacctcccgctcccgaccctacacagagattgcctggggaggctgaggagccgatgcaaacccccaaggcgacgcacttgggagccggtggtctcaaacayctgccgggggtcctagtccccttctgaaatctacatgcttgggttggagcgcagcagtaaacaccctgcccagtgacctggactgaggcgcgctgggggt

SEQ ID NO: 37005 - DNA, 201 bp, Homo sapiens; identical to SEQ ID NO: 18278

SEQ ID NO: 37006 - DNA, 201 bp, Homo sapiens
tgctgctctggcaaagctccggtgaggcccaggatggagaacagggcaggcgaccaggcaggaagtgggggacgggggacaggagaggggagggcagaggracagatgtggagacggaggggtgtccagcgtggaatgagggtgtgcagggccaaggctgcagagacccagggaccccgctgacgcctcgactcccgcctg

SEQ ID NO: 37007 - DNA, 201 bp, Homo sapiens; identical to SEQ ID NO: 18279

SEQ ID NO: 37008 - DNA, 201 bp, Homo sapiens; identical to SEQ ID NO: 18280

SEQ ID NO: 37009 - DNA, 201 bp, Homo sapiens
gggccctgctgtggcctcccctgctgttcaccgggctgctcgtccgacccccggggaccatggcccaggcccagtgtatgtgcgggcaggggtaggtgggrcacgggcggcggggagccaggggctgggaggcactgatccctcctctgcaaccttacagactgctctgtgaacaaggacatctttgaagtagaggagaac

SEQ ID NO: 37010 - DNA, 201 bp, Homo sapiens
tgcagggttaggacactgagcccagccccagccatgagaggccagaagcttcggcgcacaggcctggaggaggagaactccacctacccctcacgacagcyacttcctcgccccgaccctacccagtggcctctccctagagctgggggcttctggggggccaatgaaaagagcagggcaagtgtcgagtctcacctcacc

SEQ ID NO: 37011 - DNA, 201 bp, Homo sapiens
ccatgagccgctctccagtcccttctgccctgtgcctcggtgcctgtgacctgagccccctggttgacccctgcactcagtccaacttgggccaaacgacygcccctccttctggcagtgggctggaccagccggccagcgggagcccccttggcagaagccggtcgtaaaggatcataaactgggcggcgtctggctggg

SEQ ID NO: 37012 - DNA, 201 bp, Homo sapiens
ctgttggctgtgccccagctcgacccagaaatccagagtctgtccacctccagtcccatcagggccgggacaccagcactcattttgggaaacttccagcyggcccaccggcttccctgttgccctttgctggccccagtccactccacgtggcagaacagcccctgtggatgttgtaaaccaaggctgcccagcccaccc

SEQ ID NO: 37013 - DNA, 201 bp, Homo sapiens
gtaaaccacctgcagtgcccgccgccttcccgaggctctgtgccagctagtctgggaagttcctctcccgctctaaccacagcccgaggggggctcccctyccccgacctgcaccggagatctcaggcacccggctcaactcagacctcccgctcccgaccctacacagagattgcctggggaggctgaggagccgatgca

SEQ ID NO: 37014 - DNA, 201 bp, Homo sapiens; identical to SEQ ID NO: 18293

SEQ ID NO: 37015 - DNA, 201 bp, Homo sapiens; identical to SEQ ID NO: 18294

SEQ ID NO: 37016 - DNA, 201 bp, Homo sapiens; identical to SEQ ID NO: 18295

SEQ ID NO: 37017 - DNA, 201 bp, Homo sapiens
ggccgaggcaggagaatcgcttgaacctgggaggcagaggttgcagtgagccgagatcacaccactgtactccagcctgggtgacgacagagcgagactgkatccaaaaaaacccaaaaaccaaaaaacaaaaacaaaaaccaaaaaaaaaaaaaaacagagaaaagaaaatggattgtctttcctcacctgagattctgc

SEQ ID NO: 37018 - DNA, 201 bp, Homo sapiens; identical to SEQ ID NO: 18297

SEQ ID NO: 37019 - DNA, 201 bp, Homo sapiens
ggcgcgtggcgctggagcgggcgttgtggtcaaggatgcagctgccccttctcagcctctgaggatccaggctcaggacccggagttctcggtagagagtrcatccaaggcctcccctctgtgggtgggtcagggctgtacgtgggaggcagcctggccggggactcaatgagaccctgtccaggacctcaactcggccat

SEQ ID NO: 37020 - DNA, 201 bp, Homo sapiens
ggcggggacgggtggccgttgaggggtgcacctcactcacggcggggacgggtggccgttgaggggtgcacctcactcacagcagggacgggtggccgtcraggggtgcacctcacttagggcggggacaggtggccgttgaggggtgcacctcactcacggtggggacggatagccgtcgaggggtgcacctcacaacgg

SEQ ID NO: 37021 - DNA, 201 bp, Homo sapiens
agtgaggtaacctgtgatgtgtgtaggacagaggccagatgtggggtccagcgaatcccacgattcccacggctgccgctcaccctgcaagtccctgcacytcttgtgagctcctgtgagcagcttggcctcccgggggggagggggtgggcagggtctcgatgggacacacaggccccttgagccagggtcagcagagcc

SEQ ID NO: 37022 - DNA, 201 bp, Homo sapiens
gcccctcagcaagagcaccccatcttcaggtagcacccactctgttgccttccctccctgactccggtcattggctggtatgggaaacgctgtaggaaggktccaccccaggctgacctggcctgaccatgaaatcccaaagaggagtctgtttgggactgacagacacagacaggcccaaggcccccagtgaggtaacct

SEQ ID NO: 37023 - DNA, 201 bp, Homo sapiens
ggccgtcgaggggtgcacctcacttagggcggggacaggtggccgttgaggggtgcacctcactcacggtggggacggatagccgtcgaggggtgcacctyacaacggggaggggctgtgggagaggctgacggccacatcctgcaggtgacccagctaagggtgttcgtgtcagtgctggacgtcaatgacaatgccccc

SEQ ID NO: 37024 - DNA, 201 bp, Homo sapiens; identical to SEQ ID NO: 18300

SEQ ID NO: 37025 - DNA, 201 bp, Homo sapiens
atgggaggcagaaatgcagaccccgggagcccccacttcctaaatgtttgcttacccgtcaagacaagccttgtgcaaatgggactcagtatctttgggcmactggactcattcattagtaagggacccacaggggtgttactgattgtgatgctgggacaagggactgtcctaggcaggcagggacgcccggccaccagc

SEQ ID NO: 37026 - DNA, 201 bp, Homo sapiens; identical to SEQ ID NO: 18301

SEQ ID NO: 37027 - DNA, 201 bp, Homo sapiens; identical to SEQ ID NO: 18302

SEQ ID NO: 37028 - DNA, 201 bp, Homo sapiens; identical to SEQ ID NO: 18303

SEQ ID NO: 37029 - DNA, 201 bp, Homo sapiens
gcctccagggccaacaggccgaccttgcccgctactcagtgacccaggtcaccgtggaggctgtggctgcggccgggagcccgccccgcttcccccagagmctgtatcgtggcaccgtggcgcgtggcgctggagcgggcgttgtggtcaaggatgcagctgccccttctcagcctctgaggatccaggctcaggacccgg

SEQ ID NO: 37030 - DNA, 201 bp, Homo sapiens
cagagggacagatgtggagacggaggggtgtccagcgtggaatgagggtgtgcagggccaaggctgcagagacccagggaccccgctgacgcctcgactcycgcctgcaggagccccagccccaaggctttgacaaccaggcgttcctccctgaccacaaggccaactgggcgcccgtccccagccccacgcacgacccca

SEQ ID NO: 37031 - DNA, 201 bp, Homo sapiens
tgcccgccgccttcccgaggctctgtgccagctagtctgggaagttcctctcccgctctaaccacagcccgaggggggctcccctcccccgacctgcaccrgagatctcaggcacccggctcaactcagacctcccgctcccgaccctacacagagattgcctggggaggctgaggagccgatgcaaacccccaaggcgac

SEQ ID NO: 37032 - DNA, 201 bp, Homo sapiens
tccaggacctcaactcggccatcacatatcgaattaccaaccactcacacttccggatggagggagaggttgtgctgaccaccaccacactggcacaggcrggagccttctacgcagaggtgcggggcagggcaggcgggcatctccaagggtgtggggcttaaagatgtgtctaggagggacaagccccttcctgcccca

SEQ ID NO: 37033 - DNA, 201 bp, Homo sapiens; identical to SEQ ID NO: 18305

SEQ ID NO: 37034 - DNA, 201 bp, Homo sapiens; identical to SEQ ID NO: 18306

SEQ ID NO: 37035 - DNA, 201 bp, Homo sapiens
tgtgccagctagtctgggaagttcctctcccgctctaaccacagcccgaggggggctcccctcccccgacctgcaccggagatctcaggcacccggctcawctcagacctcccgctcccgaccctacacagagattgcctggggaggctgaggagccgatgcaaacccccaaggcgacgcacttgggagccggtggtctca

SEQ ID NO: 37036 - DNA, 201 bp, Homo sapiens
accctagccctgcccctgccctgcccctacccccacggcacccatgagccgctctccagtcccttctgccctgtgcctcggtgcctgtgacctgagccccytggttgacccctgcactcagtccaacttgggccaaacgactgcccctccttctggcagtgggctggaccagccggccagcgggagcccccttggcagaag

SEQ ID NO: 37037 - DNA, 201 bp, Homo sapiens; identical to SEQ ID NO: 18308

SEQ ID NO: 37038 - DNA, 201 bp, Homo sapiens; identical to SEQ ID NO: 18309

SEQ ID NO: 37039 - DNA, 201 bp, Homo sapiens
ggacaccctctcagctcctgcccgggggcccatgtggtcagtgtttctgtaaggggtagtggggagggtgtgaaggggccaggggggctcaggcgggcagraagaggggagggtggaggtgtcacctggggtgccaggaatccactctggcgtgaggactccggaccctctgtctcgtgtggcctcggaccagtggcttga

SEQ ID NO: 37040 - DNA, 201 bp, Homo sapiens
cacacaggccccttgagccagggtcagcagagcctgagatttgggagacagcccaggcctgggtggaacccaagtgtcccaagcctggcacaggttggcaygggaaatgcctggggcactcaacagtgcggggatgatgacgttttccactgcgatgccaggtggcggcccctcggaggacaagcgcttctcggtggtgga

SEQ ID NO: 37041 - DNA, 201 bp, Homo sapiens; identical to SEQ ID NO: 36359

SEQ ID NO: 37042 - DNA, 201 bp, Homo sapiens
tgtggagacctctcaggttgggacttcttgtcagcttggacccctgaccagtgggctttggcttctccagccgcctccagtgctgcgtgatttgattctgwtgtaccttcaattcttctgacccgcattataaacattataattttattctaaaaattgtaattttttttgcattttggaagtgactgctgctgtttaaat

SEQ ID NO: 37043 - DNA, 201 bp, Homo sapiens
agaacaagccctacacagagaccgtggattcagatgggcggcccgatgaggtcagggttagggacagagggtgggcatgtctcatgagcatcccagccccyggtactctttggttctcaccactctgcctctcaggtggtagctgaggaagcatggcagcggcacaagatgaggaatgactctttcatcgtggacctattt

SEQ ID NO: 37044 - DNA, 201 bp, Homo sapiens; identical to SEQ ID NO: 36385

SEQ ID NO: 37045 - DNA, 201 bp, Homo sapiens
cattcagccacctgagctccagctggtgacccctatggctgagggggacacagggcttccccgggtgtgggcagcccctgaccggggtcctgtgcccagcrccagtggaatttcttctgagatgctggccagtgggcccattgaggttggctccttgccagctggcgagagggtgtcccgacccgaaggtaagatccagtg

SEQ ID NO: 37046 - DNA, 201 bp, Homo sapiens
agtgggcccattgaggttggctccttgccagctggcgagagggtgtcccgacccgaaggtaagatccagtgaaaggctctagaagctggggaggaggatargggaggatggagggggctgttgtttagggcctggtgggcctggtgaggccctgatgggcagggaagctttgattatcatgttctcacacagctgctgtgc

SEQ ID NO: 37047 - DNA, 201 bp, Homo sapiens
tttcttctgagatgctggccagtgggcccattgaggttggctccttgccagctggcgagagggtgtcccgacccgaaggtaagatccagtgaaaggctctrgaagctggggaggaggataggggaggatggagggggctgttgtttagggcctggtgggcctggtgaggccctgatgggcagggaagctttgattatcatg

SEQ ID NO: 37048 - DNA, 201 bp, Homo sapiens
tatctgcctcacacctggtctttcaggccctctgatgcaccaggctccttatggcattgggcactgagacaggtgccagcagaggcataagcctatttggrcctacagacctcaccactgcccacatagacccaaggcagggccaagccttcttaaactctggggcagggctagggaaagggcttatcctcacgtgggatc

SEQ ID NO: 37049 - DNA, 201 bp, Homo sapiens; identical to SEQ ID NO: 36370

SEQ ID NO: 37050 - DNA, 201 bp, Homo sapiens
agttcctggtgagcgtcagcaaggagaactccactgcgagcgaagtattggactccctctctcagagtgttcatgtgaagcctgagaacctgcgtttggcrgaggtatctttgtccttccttgggctatcacatgtgtggatgtgtgtgtgtactcaccacagacgtgtgtacagtcattggcatctacagacatacacat

SEQ ID NO: 37051 - DNA, 201 bp, Homo sapiens
ccaaccgagagcagcggctagaggacaaaggtgtctgaggctgtgggtgggagccatggggtgggttgagctggctgttctccacagctgcatgacctctytccctgcgaatctccaggagacaccccactggagctgggtgacgactgtagcctggctctcgtctggcggaacaatgagcgcttgcaggagtttgtgttg

SEQ ID NO: 37052 - DNA, 201 bp, Homo sapiens
gggcctggtgggcctggtgaggccctgatgggcagggaagctttgattatcatgttctcacacagctgctgtgcctgggtaccagcatccaagtgaagctwtgaatgcccacacaccccagttcttcatctataaaattgattcatccaaccgagagcagcggctagaggacaaaggtgtctgaggctgtgggtgggagcc

SEQ ID NO: 37053 - DNA, 201 bp, Homo sapiens
ggtaattaagaatcgttttcatcgtgtgttcctaccctcccactcactggacactgtgtccccatctgatacgctcctctgctttgagctgctatcctcaragttggctaaggagcgggtagtggtgctagaggtgcaacaggtgagtgggggccaacctgatggcacagcgccctggtgggtggggcacttcttcctggt

SEQ ID NO: 37054 - DNA, 201 bp, Homo sapiens
tgctagaggtgcaacaggtgagtgggggccaacctgatggcacagcgccctggtgggtggggcacttcttcctggtcttgctgagccagacgacccacccwagcgcccccaggtgcccagcgtccccatctccaagtgtgcagcctgccagcggaagcaacagtcggaggatgaaaagctgaagcgctgtacccggtgcta

SEQ ID NO: 37055 - DNA, 201 bp, Homo sapiens
cctctgatgcaccaggctccttatggcattgggcactgagacaggtgccagcagaggcataagcctatttgggcctacagacctcaccactgcccacataracccaaggcagggccaagccttcttaaactctggggcagggctagggaaagggcttatcctcacgtgggatctgtgtgttctctgtccccaggtaattaa

SEQ ID NO: 37056 - DNA, 201 bp, Homo sapiens
cagagattgcaccacagcactccagcctgggtgacagagtgagactctgtctcaaaaataaataaataaatagataaaaaaataaaaatagggccaggcgyggtggctcatgcctgtaatcccagctctttgggaggccaaggctgatggatcacaaggtcaggagatccagaccaccctggcttacatggtgaaacccca

SEQ ID NO: 37057 - DNA, 201 bp, Homo sapiens
gagtccctcagtgtggagagctggtgtggttgatatctgcctcacacctggtctttcaggccctctgatgcaccaggctccttatggcattgggcactgaracaggtgccagcagaggcataagcctatttgggcctacagacctcaccactgcccacatagacccaaggcagggccaagccttcttaaactctggggcag

SEQ ID NO: 37058 - DNA, 201 bp, Homo sapiens
gtggctcctctccagattggtggagtagcctggtcccaggccatgacttccttgacctggtgccccctcagtgaggctttcacctgtgtgggactgttatkgtgggtatctatgaggcttggccagaagtggttgctgctacttgcattatttattacctcttcagaatatcctgagagtgtccaggggtacttaagagat

SEQ ID NO: 37059 - DNA, 201 bp, Homo sapiens
agatggggctaagggcctatccttgtcttcctcttcccgtcaggctctgccagaaaacccactggcctgaccacaagggcctctgccgacctgagaacatyggctaccccttcctggtcagtgtacctgcctcacgcctcacttatgcccgcctcgctcagttgctagagggctatgcccggtaagtgcccagtggttgga

SEQ ID NO: 37060 - DNA, 201 bp, Homo sapiens
gtccctggctgatgggggggactgggtttgggacacccacacagagggccagctccttgccgcttctccttctctaacccagaggacactggctctgtcartgggaagctgaggggtatgatttgggtgtggagacctctcaggttgggacttcttgtcagcttggacccctgaccagtgggctttggcttctccagccgc

SEQ ID NO: 37061 - DNA, 201 bp, Homo sapiens; identical to SEQ ID NO: 36394

SEQ ID NO: 37062 - DNA, 201 bp, Homo sapiens
agtagctgggattacaggtgcatgccaccacgcaaggctaattttttttttttttttgagacaatgtctcactctgtcatccaggctagagtgtagtggcrtcttggctcactgcgggctctgcctcccgggttcaagtgattctgctgcctcagcctcccaagtagcctcagcctcccaagtagctgggattacaggtat

SEQ ID NO: 37063 - DNA, 201 bp, Homo sapiens
acagactggggccgggttgggggatatagcttcctctcctccagccacaggcccattgagccttgggattcatgagaattgcagagttctcttaacatcaragctttagccagaggcatccccatgccttggggacactaacaaacatacaagtacactaacatgctgccactggcaagcacattggcacctacttggcac

SEQ ID NO: 37064 - DNA, 201 bp, Homo sapiens; identical to SEQ ID NO: 36380

SEQ ID NO: 37065 - DNA, 201 bp, Homo sapiens; identical to SEQ ID NO: 11391

SEQ ID NO: 37066 - DNA, 201 bp, Homo sapiens; identical to SEQ ID NO: 10739

SEQ ID NO: 37067 - DNA, 201 bp, Homo sapiens; identical to SEQ ID NO: 10740

SEQ ID NO: 37068 - DNA, 201 bp, Homo sapiens
acctcatgtatcacagcctgtacctgaaggttaaggggaacgtgttcaaaaacaagcgattctcatggaacacatccacaagctgaaggcagataaggctygcatgaagctcctggctaaccaggttgaggcccagaggtctaagaccaaggaagcatgcaagcgccataaagagtgcctccaggtcaagaaggaggaaat

SEQ ID NO: 37069 - DNA, 201 bp, Homo sapiens
acctcgtctctactaaaaatacaaaaaattagctgggcatggtggcgggcacctgtagtcccagctactcgggaggctgaggcaggagaatggcgtgaacmcaggaggcagagtttgcagtgagccgagatcacgccactgcactccagcctgggcgacagagcaagactccgtctcaaaaataaataaataaaaaataat

SEQ ID NO: 37070 - DNA, 201 bp, Homo sapiens
aaaaaaaaaaaaaaaaaagtataaaaattaggtaggcatggtggttcacacctgtatcccagctacttggaggctgaggcatgagaatcccttgaaccctsgaggcagaggctgcagtgagccaagatcacgacactgcactccagcctgggtggcagagtaagactgtctcaaaaaaaaaagaacaatctgtcttgtaag

SEQ ID NO: 37071 - DNA, 201 bp, Homo sapiens
ttgaaacagggaggcagaggttgcagtgagccaagatcacattactgcactccagcctggatgatagagcgagactctgtctccaaaaaaaaaaaaaaaaagaactagaggccaggcgtggtggttcacgcctgtaatcccaacactttgggaggtcaaggtgggtggatcatctgaggtcaagagtttgagaccagcctg

SEQ ID NO: 37072 - DNA, 201 bp, Homo sapiens
aggagtagatgtattggtttcttcagagaagccaacagtggatcacatgaaaatggaaccttttttcctatccttttgaatacatttctgtgtttaaaatrtaatttttttggctgggtgtggtgacccacacctgtaatcccagcactttgggaagccaaggcaggtggatcacttgaggttaggggttcgagaccagcc

SEQ ID NO: 37073 - DNA, 201 bp, Homo sapiens
tctcagctcacacggattaccagcaaaccagtgaatttattcgtgctttgaaaccgcctcatgtggttagtctatgaatttcatttattgtattaaagggraaaaaagtgcatacccaggaaactgtgcagcaggcagttcacaaagcaggcatcatcacctactaatgcgacaccccctgagcagagcctttcacatgca

SEQ ID NO: 37074 - DNA, 201 bp, Homo sapiens
gagcacagaggtgaaggctacagtgagccgtgatcataccactacagtccatcctgggcaacagtgcaagaccctgtctctaaataaataaataaataaawgcacacctccgaaaaggaaccccatatcccttacgtatgatgccccaatctctatattctcaccaactcaaagcaaccactaatctacttcctgcctccc

SEQ ID NO: 37075 - DNA, 201 bp, Homo sapiens
acagacgcatgcacacgcacactgacgcacgcacacagacgcacgcacacacgcgcgcgcgcgcacacacacacgcacacacccacgcactcgcacacacrcgcacgcgcacacacgcacacgcgcacacacgcgcacacacacaaaattagctgggcatggtgatgcatgcatgtagtcccagctacctgggaggctgag

SEQ ID NO: 37076 - DNA, 201 bp, Homo sapiens
ggagaaaaaaaaagttttgcagtcagacagtttagaagatgaattgaactgagttcaggaaaagttgggtttcttatcggagtgttctgtttctcacccataattttaatgatttaaaatcattacctttagttatttttctctctcaagtacatcactgtattaaaattagtctcctaggagcaaaggttcttttctgaa

SEQ ID NO: 37077 - DNA, 201 bp, Homo sapiens
cacacacgcacacaaagacgcacacacacgtgcgcacacagacgcatgcacacgcacactgacgcacgcacacagacgcacgcacacacgcgcgcgcgcgcacacacacacgcacacacccacgcactcgcacacacacgcacgcgcacacacgcacacgcgcacacacgcgcacacacacaaaattagctgggcatggtg

SEQ ID NO: 37078 - DNA, 201 bp, Homo sapiens
gcacacacgcacacaaagacgcacacacacgtgcgcacacagacgcatgcacacgcacactgacgcacgcacacagacgcacgcacacacgcgcgcgcgcgcacacacacacgcacacacccacgcactcgcacacacacgcacgcgcacacacgcacacgcgcacacacgcgcacacacacaaaattagctgggcatggt

SEQ ID NO: 37079 - DNA, 201 bp, Homo sapiens
cgcacacacgcacacaaagacgcacacacacgtgcgcacacagacgcatgcacacgcacactgacgcacgcacacagacgcacgcacacacgcgcgcgcgcgcacacacacacgcacacacccacgcactcgcacacacacgcacgcgcacacacgcacacgcgcacacacgcgcacacacacaaaattagctgggcatgg

SEQ ID NO: 37080 - DNA, 201 bp, Homo sapiens
ctgtctcagaaaaataaataaatgaaacttttttttttttttttttgagaaaaagtctcgctctgtctccaggctggagtgcagtggcgcgatctcagctyactgcaagctccgcctcccaggttcacgccattctcctgcctcagcctcccgagtagctgggactacaggcgcccgccaccacggccagctagttttttg

SEQ ID NO: 37081 - DNA, 201 bp, Homo sapiens
tccaaatgtattggaaagcaggagaaatggccttttgttagttttgtttgtttgcttgttgtttggggtgttttttggtttgtttgtttgtttgtttgtttggatgaagtcttgctctgttgcctaggctggagtgcagtggcgccaatctcagctcactgcagcttctgcctcctgggttaaagcaattctcctgcctca

SEQ ID NO: 37082 - DNA, 201 bp, Homo sapiens
gcgcacacacgcacacaaagacgcacacacacgtgcgcacacagacgcatgcacacgcacactgacgcacgcacacagacgcacgcacacacgcgcgcgcgcgcacacacacacgcacacacccacgcactcgcacacacacgcacgcgcacacacgcacacgcgcacacacgcgcacacacacaaaattagctgggcatg

SEQ ID NO: 37083 - DNA, 201 bp, Homo sapiens
aagccgaggcaggtggatcacgaggtcaagagatcgagaccatcctgaccaacatggtgaatccccgtctctactaaaaatacaaaaattagctgtatgtkgtggcacgtgcctgtggtcccagctactcaggaggctgaggcaggagaattgcttgaaagtgggaggtggaggttgcagtgagctgagataatgccactg

SEQ ID NO: 37084 - DNA, 201 bp, Homo sapiens
atgagtttgcagccagcctgagggagtgcatgtgtgcgtttcacggggacttcccggccttccctactgcagtgcagctagtgagagctttcttaagcccyggcacctagtaagttacttgcttgttgaactgattagaactgaactgtgccagatctgccactgtgactcttccctttgacattggtagcaatgcaactg

SEQ ID NO: 37085 - DNA, 201 bp, Homo sapiens
cgcacgcacgcgcacacacgcacacaaagacgcacacacacgtgcgcacacagacgcatgcacacgcacactgacgcacgcacacagacgcacgcacacacgcgcgcgcgcgcacacacacacgcacacacccacgcactcgcacacacacgcacgcgcacacacgcacacgcgcacacacgcgcacacacacaaaattag

SEQ ID NO: 37086 - DNA, 201 bp, Homo sapiens
aaattagctgtatgtggtggcacgtgcctgtggtcccagctactcaggaggctgaggcaggagaattgcttgaaagtgggaggtggaggttgcagtgagcygagataatgccactgcattccagcctagtgacacagcaagactccatctcaaaaaaaaggaaaaattgcacaaaactaataagattacatttaagtttgt

SEQ ID NO: 37087 - DNA, 201 bp, Homo sapiens
ttccaaatgtattggaaagcaggagaaatggccttttgttagttttgtttgtttgcttgttgtttggggtgttttttggtttgtttgtttgtttgtttgtttggatgaagtcttgctctgttgcctaggctggagtgcagtggcgccaatctcagctcactgcagcttctgcctcctgggttaaagcaattctcctgcctc

SEQ ID NO: 37088 - DNA, 201 bp, Homo sapiens
tactctttttttttttttttttttttgagatggagtctcactctgtctcccaggctggagtgcagtggcgtgccgtctctgcttactgcaagctccacctyccgggttcatgccattctcctgcctcagcctcccaagtagctgggactacaggcgcctgccaccatgcccggctaattttttgtatttttagtagagacg

SEQ ID NO: 37089 - DNA, 201 bp, Homo sapiens
tttccaaatgtattggaaagcaggagaaatggccttttgttagttttgtttgtttgcttgttgtttggggtgttttttggtttgtttgtttgtttgtttgtttggatgaagtcttgctctgttgcctaggctggagtgcagtggcgccaatctcagctcactgcagcttctgcctcctgggttaaagcaattctcctgcct

SEQ ID NO: 37090 - DNA, 201 bp, Homo sapiens
aaagaacatatctaaagcacttaatatggtgcctggcacatagtaaatgcttaatatatatattatatatatatatatatatatatatattttttttttttgaggcggagtcttgctctgtcacccaggctgactgcaactccgcctcccgggttcaagcagctctctgcttcagcctcctgagtaactgggattacaggt

SEQ ID NO: 37091 - DNA, 201 bp, Homo sapiens
gaaagaacatatctaaagcacttaatatggtgcctggcacatagtaaatgcttaatatatatattatatatatatatatatatatatatattttttttttttgaggcggagtcttgctctgtcacccaggctgactgcaactccgcctcccgggttcaagcagctctctgcttcagcctcctgagtaactgggattacagg

SEQ ID NO: 37092 - DNA, 201 bp, Homo sapiens
aaggatgaagtgaaagaacatatctaaagcacttaatatggtgcctggcacatagtaaatgcttaatatatatattatatatatatatatatatatatatattttttttttttgaggcggagtcttgctctgtcacccaggctgactgcaactccgcctcccgggttcaagcagctctctgcttcagcctcctgagtaact

SEQ ID NO: 37093 - DNA, 201 bp, Homo sapiens
aatcccagctactagggaggctgaggcaggagaatcacttgaatccgggaggcggaggttgtagtgagccaagattgtgccactgcgctccagcctgggcmacagagcaagactccatctcaaaaaaaaaaagaaaaaaagtaaatacagtattctgctttagaactaggacctatcttcagttttattttttcctcaaat

SEQ ID NO: 37094 - DNA, 201 bp, Homo sapiens
gtaaggatgaagtgaaagaacatatctaaagcacttaatatggtgcctggcacatagtaaatgcttaatatatatattatatatatatatatatatatatatattttttttttttgaggcggagtcttgctctgtcacccaggctgactgcaactccgcctcccgggttcaagcagctctctgcttcagcctcctgagtaa

SEQ ID NO: 37095 - DNA, 201 bp, Homo sapiens
ttgtaaggatgaagtgaaagaacatatctaaagcacttaatatggtgcctggcacatagtaaatgcttaatatatatattatatatatatatatatatatatatattttttttttttgaggcggagtcttgctctgtcacccaggctgactgcaactccgcctcccgggttcaagcagctctctgcttcagcctcctgagt

SEQ ID NO: 37096 - DNA, 201 bp, Homo sapiens
tattgtaaggatgaagtgaaagaacatatctaaagcacttaatatggtgcctggcacatagtaaatgcttaatatatatattatatatatatatatatatatatatattttttttttttgaggcggagtcttgctctgtcacccaggctgactgcaactccgcctcccgggttcaagcagctctctgcttcagcctcctga

SEQ ID NO: 37097 - DNA, 201 bp, Homo sapiens
ttctcagctcacacggattaccagcaaaccagtgaatttattcgtgctttgaaaccgcctcatgtggttagtctatgaatttcatttattgtattaaagggaaaaaaagtgcatacccaggaaactgtgcagcaggcagttcacaaagcaggcatcatcacctactaatgcgacaccccctgagcagagcctttcacatgc

SEQ ID NO: 37098 - DNA, 201 bp, Homo sapiens
aatatatttcatatatttaattcaacttaaggaccatgattaagctgaatgatgtttccatatattcttttaacatttattctatgtagattttagtccayggagaacagaatgaaatggccagattgaaagcagcactgattcgagaatatgaagataacgatgaagttcacatagaggttcataatcctcggaatacag

SEQ ID NO: 37099 - DNA, 201 bp, Homo sapiens
gcatgaacccgggaggcggaacttgcagtgagcggagatcgcgccactgcactgcagcctgggcgacagagtgagactccatctcaaaaaaaaaaaaaaaagaaattacagatgtaaattatataataggcatataatacattttcaaactgcagaggcacctattagaataaagggtgtctttcagccatactaccctga

SEQ ID NO: 37100 - DNA, 201 bp, Homo sapiens
agggaaaaaaagtgcatacccaggaaactgtgcagcaggcagttcacaaagcaggcatcatcacctactaatgcgacaccccctgagcagagcctttcacrtgcactcggatttggcctttacaactcccctttgatttcagcaagctgccccctttctccagaactgactgactcagacctaccaaccccaatcctaatg

SEQ ID NO: 37101 - DNA, 201 bp, Homo sapiens
ataaaaagaacatgaaattaaatgatgaaaatatccatttcctttagcaggcaaataatacaaatccctgcttgtcactttaaggattccatagttattcmctttaacttatcagtaaccagattctgattattgatttggaaattattctgaataggaatttagaaactgaactctctgtcgcttttttttttcccaggt

SEQ ID NO: 37102 - DNA, 201 bp, Homo sapiens
tgcactccaatctgggtgacggagcaagactccatctccaaaaaaaaaagaaaaaaaaaatttccaggcctggcacagtgcctcacatctgtaatcctagyacttcaggaggccacagcaggtggatcacttgagctcaggagttggggaccagcttgggcaacatggagaaatcccatctctacaaaaaatacaaaaatt

SEQ ID NO: 37103 - DNA, 201 bp, Homo sapiens
ggccaaggcgggcggatcacctgaggtcaggagttcgagaccagcctggccaacatggcgaaaccccgtctctactaaaaatacaaaaaattagctgggcrtggtggcgtatgcctgtaatcccagctactcgggaggctgaggcagggagaattgcttgaaactggaggcggaggttgcagtcagccgagattggcgcca

SEQ ID NO: 37104 - DNA, 201 bp, Homo sapiens
gcgcacgcacgcgcacacacgcacacaaagacgcacacacacgtgcgcacacagacgcatgcacacgcacactgacgcacgcacacagacgcacgcacacacgcgcgcgcgcgcacacacacacgcacacacccacgcactcgcacacacacgcacgcgcacacacgcacacgcgcacacacgcgcacacacacaaaatta

SEQ ID NO: 37105 - DNA, 201 bp, Homo sapiens
tgtaggaaaaaattgtgttacagatgagtaattacatactttgcacataatatattaagtcaaccaaaaaagtagagttcaaaactatatttactctgggytggacgtggtggctcacgcctgtaatcctagcacttagggaggctgaggtgggcagatcacttgaggccaggagttcaagaccagcctggccatcatggt

SEQ ID NO: 37106 - DNA, 201 bp, Homo sapiens
acgtgcgcgcacgcacgcgcacacacgcacacaaagacgcacacacacgtgcgcacacagacgcatgcacacgcacactgacgcacgcacacagacgcacgcacacacgcgcgcgcgcgcacacacacacgcacacacccacgcactcgcacacacacgcacgcgcacacacgcacacgcgcacacacgcgcacacacaca

SEQ ID NO: 37107 - DNA, 201 bp, Homo sapiens
cacacgtgcgcgcacgcacgcgcacacacgcacacaaagacgcacacacacgtgcgcacacagacgcatgcacacgcacactgacgcacgcacacagacgcacgcacacacgcgcgcgcgcgcacacacacacgcacacacccacgcactcgcacacacacgcacgcgcacacacgcacacgcgcacacacgcgcacacac

SEQ ID NO: 37108 - DNA, 201 bp, Homo sapiens
cacacacacgtgcgcgcacgcacgcgcacacacgcacacaaagacgcacacacacgtgcgcacacagacgcatgcacacgcacactgacgcacgcacacasacgcacgcacacacgcgcgcgcgcgcacacacacacgcacacacccacgcactcgcacacacacgcacgcgcacacacgcacacgcgcacacacgcgcac

SEQ ID NO: 37109 - DNA, 201 bp, Homo sapiens
agctaatcccagtattgctcagtggcatatagaagctcatgatacatatgtgaagagaaactgtgcacctcaggagctggaaaaagctttgtaaattaggyagcccttgtgccaggtggtgaaagattgttgggagttaccaaggaaagaaggcagatgacagctggcataccagctctgtggcatccaagaacctggtat

SEQ ID NO: 37110 - DNA, 201 bp, Homo sapiens
acgcacacacacacgtgcgcgcacgcacgcgcacacacgcacacaaagacgcacacacacgtgcgcacacagacgcatgcacacgcacactgacgcacgcrcacagacgcacgcacacacgcgcgcgcgcgcacacacacacgcacacacccacgcactcgcacacacacgcacgcgcacacacgcacacgcgcacacacg

SEQ ID NO: 37111 - DNA, 201 bp, Homo sapiens
aaagccagcagtatttcctgttggattagctgtaagtggtgacagaaagagaacagacaggatgaactttaagataatgatccagggtatgtatgtgataygtcagcatggacagttgtcactcgtggggctaagtgacaggttttaataagtagcacttgctcctttcaaaggtgacaagtattgcaagaactggtacat

SEQ ID NO: 37112 - DNA, 201 bp, Homo sapiens
cacacgcacgcacacacacacgtgcgcgcacgcacgcgcacacacgcacacaaagacgcacacacacgtgcgcacacagacgcatgcacacgcacactgacgcacgcacacagacgcacgcacacacgcgcgcgcgcgcacacacacacgcacacacccacgcactcgcacacacacgcacgcgcacacacgcacacgcgc

SEQ ID NO: 37113 - DNA, 201 bp, Homo sapiens
acacacgcacgcacacacacacgtgcgcgcacgcacgcgcacacacgcacacaaagacgcacacacacgtgcgcacacagacgcatgcacacgcacactgacgcacgcacacagacgcacgcacacacgcgcgcgcgcgcacacacacacgcacacacccacgcactcgcacacacacgcacgcgcacacacgcacacgcg

SEQ ID NO: 37114 - DNA, 201 bp, Homo sapiens
agccaaacctgcagacgctaatgaatatcctttcttgaaggtgaattggaggaaaaaaagaaattagcaaaacttagggtatgaggtttttgttgtaaatrgtcgtagttactcctgagtcttactgtccacaaaacttttcaggggccgatttaatagtatttttcttatacctgtagaaaaatatactcagttgagaat

SEQ ID NO: 37115 - DNA, 201 bp, Homo sapiens
cacacacacacgcgcacacacgcacgcacacacacacgtgcgcgcacgcacgcgcacacacgcacacaaagacgcacacacacgtgcgcacacagacgcaygcacacgcacactgacgcacgcacacagacgcacgcacacacgcgcgcgcgcgcacacacacacgcacacacccacgcactcgcacacacacgcacgcgc

SEQ ID NO: 37116 - DNA, 201 bp, Homo sapiens
cctgtctctacacgcacacacacacgcgctcacacacacacgcgcacacacgcacgcacacacacacgtgcgcgcacgcacgcgcacacacgcacacaaagacgcacacacacgtgcgcacacagacgcatgcacacgcacactgacgcacgcacacagacgcacgcacacacgcgcgcgcgcgcacacacacacgcacac

SEQ ID NO: 37117 - DNA, 201 bp, Homo sapiens
aattgcttgaaactggaggcggaggttgcagtcagccgagattggcgccactgcactccaatctgggtgacggagcaagactccatctccaaaaaaaaaaraaaaaaaaaatttccaggcctggcacagtgcctcacatctgtaatcctagcacttcaggaggccacagcaggtggatcacttgagctcaggagttgggga

SEQ ID NO: 37118 - DNA, 201 bp, Homo sapiens
tgttttcaaacacattagtaacctcaaggtgagtgcttgtggaagaaagacaaggatggataaaaccaaatcagtcattagtagtaggaggtacgaggccrtgagtgatggctcacagctgtaatttagcactttgggagtctaaggcaggaggatcactagaactcaggagtttgagaccggcctgggcaagatagtgag

SEQ ID NO: 37119 - DNA, 201 bp, Homo sapiens
ccctgtctctacacgcacacacacacgcgctcacacacacacgcgcacacacgcacgcacacacacacgtgcgcgcacgcacgcgcacacacgcacacaaagacgcacacacacgtgcgcacacagacgcatgcacacgcacactgacgcacgcacacagacgcacgcacacacgcgcgcgcgcgcacacacacacgcaca

SEQ ID NO: 37120 - DNA, 201 bp, Homo sapiens
ctggaggctggggcatgagaattgcttgagcctgggaggcagaggttgcagtgagccgagattgcaccactgcactccagcctcggtgacagagggagacygtctcaaaacaaacaaacaaacaacaacaaaaaaaaaactatatgtactctgatcctagttaggtaaaaaatgcacacacaaatgactgaaaagctacta

SEQ ID NO: 37121 - DNA, 201 bp, Homo sapiens
tgctgaaaataactgttgaatcaaaatctggaggcgcagcttggccttttccttttcgagtttgctaggtgattctaacgtcagccagagaaccaatgctmtagtgtcacgtcctaaatttttcacagctgcttatacatttggaacttttagacattgaattgtaaagtatatcactaaatcacttattcttgcagtttg

SEQ ID NO: 37122 - DNA, 201 bp, Homo sapiens
atgttcatgattgagatcgcaggcgtgaaggtaccctctggctgtggcgcttttctccccagagaaatcagtacagagctttgtgccaccaagtactattwaaaaaaaaaattccctaagacttgcaaagtgtcagaacacggaaacataagataaaaatacagttaacgcttgttccttttaaatattgcagttcctacc

SEQ ID NO: 37123 - DNA, 201 bp, Homo sapiens
aatgcttaccacatactaggcccaatcctaaattcctaatgtatattaacttcacacaaagataaataaatatacatattttttttttctttttttttttyttttttttttgagacggagtcttgtgctgttgaccaggctggagtgcagtggcgctatcttagctcactgcaacctctgctcccgggttcaggcaattct

SEQ ID NO: 37124 - DNA, 201 bp, Homo sapiens
gtggtaacactcgttaacacttcaataatgcttaccacatactaggcccaatcctaaattcctaatgtatattaacttcacacaaagataaataaatatayatattttttttttctttttttttttcttttttttttgagacggagtcttgtgctgttgaccaggctggagtgcagtggcgctatcttagctcactgcaac

SEQ ID NO: 37125 - DNA, 201 bp, Homo sapiens
taaacttcagaggagaaaaactagccaaggtaaaaggttatggttcctgtctgtccaatccatgttttttcttcaggaaagactgtacttcttaagaaaayagatctttagtcaaaagaatatgcttatttctgtctacttgttacactacaggaattttatccttatcctttttggcttcttttggttctgtgcattcat

SEQ ID NO: 37126 - DNA, 201 bp, Homo sapiens
tcatagactagttatctttttagctcccagaaaaatgttatagtacatgtaatctatgctgtatagtgttaatgagaaaaactaatacacacttctacttrgtaatttagttgattaagaagatatattctatgactgtaaaattgtcagctagatctgttgaactgttacctcttcaaagtccctcttccactcctgaag

SEQ ID NO: 37127 - DNA, 201 bp, Homo sapiens
ccatctctactaaaaatacaaaaattagccgggcacagtgacagatgcctgtaatcccagctactcaggaggctgaggcagagaattgcttgaacctgggrggtggaggttgtagtgagccgagattgcgccactgcactccagcctgggcgacagagcgagactccatctcaaaaaataataataataataataataggg

SEQ ID NO: 37128 - DNA, 201 bp, Homo sapiens
aggcatgcgccaccatgcccagctaatttttgtatttttagtagagacggggtttcatcctgttggtcagactggactcctgacctcaggtgatccacccrcctcggccttccaaaatgctgggattacaggcatgagccaccatgcccggcctctttttgttgttgttgttaaattttatttttttgagatggagtcttg

SEQ ID NO: 37129 - DNA, 201 bp, Homo sapiens
gagccaagatcacgctgctgcactcgagcctgggctacaaagcaagactcagtctcaaaaaaaaaaaaaattggggcaggtgcttctttttgtagtgcagyttcactttcttgctgttaaatgcattaactctagtctaatatcagagatgccaggctgcctctgggcaggatcagcaggctgtctctgggcaggatcatt

SEQ ID NO: 37130 - DNA, 201 bp, Homo sapiens
atcaaactgtgggctttgatgtaaatgtagtttactagactttccccagtctttcaccccagcctcaagtcatcactaattaggaccgtgctgctgtcagraagcactgcacgcccacaagtgtgtagggcggccgttctgtttcatggtaatcagtcccaccatgacctctgcacacacagatgattgttctttttttta

SEQ ID NO: 37131 - DNA, 201 bp, Homo sapiens
tcacactcaacagtctactgttgcatattggcatttgcttccagtgtttccaacatttttttcacattgttctttttatattattatggttgaagttttcygtgtttttccgggttactgcatagtacaaggttcgcgtgtatgccactccattgctgtcctcttccataatacagcttagttcacctcatcccttctcta

SEQ ID NO: 37132 - DNA, 201 bp, Homo sapiens
ttgggaggctgaggtgggcagatcacttaaggccaggagttagagaccaccttggccaacacagtgaaaacccatctctactaaaaaaatacaaaaattakctgggtgtggtggtgcagttacctgggaggctgaggcacaagaatcacttgaacccagaaggtggaggttgcagtgagccaagatcacgctgctgcactc

SEQ ID NO: 37133 - DNA, 201 bp, Homo sapiens
tttgctccagggcacaaaaaataagtagcacaaatgcagatgtgaattctcttggaatttgatgcagaccctcttatgattttatctccggttttagaccrtgtacctcagtgcactcctttccttgtctgcatgccctttttctctaagaagttcagagcacttctcaagtggattaatgttatataggttatcattgtg

SEQ ID NO: 37134 - DNA, 201 bp, Homo sapiens
tggcagtcaggtaaggctgtggggcgggggcaggggacacacatatatgcagttttacctttgatttcaaggaggttagacaaccccctccccacaggctrtcctgggacccccggttaaacagccctattgtagaaggtgggtgttgctgaccagggacttgactacaatagttctgttggcggccctgttccctggggc

SEQ ID NO: 37135 - DNA, 201 bp, Homo sapiens
actcatgccacaaaagctatttatagatggcttctttctgattatgtcaaagttaggtaaattactttattagattatacacgactttggctctatatggyatgtatggttcaagatatggaccattttgtgttttaaaatgaggtgctcccttttcatgtataaggatatcagtaatttcatcattcattaacaaggtca

SEQ ID NO: 37136 - DNA, 201 bp, Homo sapiens
ggatcacttgaggctaggagttcaagaccagcctggccaacatggtgaaaccctgactctactaaaaatacaaaaattagctggctgtggtggtgcacacytgtaatcccagctactagggaggctgaggcaggagaatcacttgaatccgggaggcggaggttgtagtgagccaagattgtgccactgcgctccagcctg

SEQ ID NO: 37137 - DNA, 201 bp, Homo sapiens
gatcatgagtaagtagtggtacagaagttaggaacggtgacgtggggaagagggttaggtgcggagagcagaatcacgcccagggctttgggccacgcagytttcagctgtaaggcccccatccttctaagagcacagctggccttcacttcctatcttagtctgttcagttcaaatcaaatgccaccagggttgctttct

SEQ ID NO: 37138 - DNA, 201 bp, Homo sapiens
ctgcatgccctttttctctaagaagttcagagcacttctcaagtggattaatgttatataggttatcattgtgagatgatactgggaatagattattcccrtttactagaggaaataattgaagcactgaaccgtttactgactgaactacacattttgaattggacacaagcactgcatgtaaatttcatcagttttaga

SEQ ID NO: 37139 - DNA, 201 bp, Homo sapiens
tggatggtaaagagcagacagtgaggaaaatgtcaatgacacagcagtgttgagttcctcagaaggagggagggagtacgtagagtagaatggtggaaagwttcattgtggaaagagaggtctattctatctatagaggagaaatagaaggagacagatgtgggcaggttggtaccctgttggtacatgtattcttaatta

SEQ ID NO: 37140 - DNA, 201 bp, Homo sapiens
accctgtctctacacgcacacacacacgcgctcacacacacacgcgcacacacgcacgcacacacacacgtgcgcgcacgcacgcgcacacacgcacacaaagacgcacacacacgtgcgcacacagacgcatgcacacgcacactgacgcacgcacacagacgcacgcacacacgcgcgcgcgcgcacacacacacgcac

SEQ ID NO: 37141 - DNA, 201 bp, Homo sapiens
ctccagccctaagcaaccactaatctacttctttatagatttgcctgttctggacatttcatgtaagtgtgatcatacaatacatactcttttgtctctgrcatctttcatttagcataatctttccaaggttcaaaattgaggagttttgttcattcaataagtattttttgtgatgtgctacatgccaggtactgtagc

SEQ ID NO: 37142 - DNA, 201 bp, Homo sapiens
aaccctgtctctacacgcacacacacacgcgctcacacacacacgcgcacacacgcacgcacacacacacgtgcgcgcacgcacgcgcacacacgcacacaaagacgcacacacacgtgcgcacacagacgcatgcacacgcacactgacgcacgcacacagacgcacgcacacacgcgcgcgcgcgcacacacacacgca

SEQ ID NO: 37143 - DNA, 201 bp, Homo sapiens
aaaaccctgtctctacacgcacacacacacgcgctcacacacacacgcgcacacacgcacgcacacacacacgtgcgcgcacgcacgcgcacacacgcacacaaagacgcacacacacgtgcgcacacagacgcatgcacacgcacactgacgcacgcacacagacgcacgcacacacgcgcgcgcgcgcacacacacacg

SEQ ID NO: 37144 - DNA, 201 bp, Homo sapiens
ttttcgtggttaaatccatatgttgttttcatagttcaaaggtgttatggtcttcattatgatgaactgcattttattacctgaaaaactgcattttaccrggttctattttcttcaagtattttttttttacaggttatgggatttttagcagacaaaaaaccagaacaaggccagcgggtctcaggaatacttgttaaa

SEQ ID NO: 37145 - DNA, 201 bp, Homo sapiens
taaaaccctgtctctacacgcacacacacacgcgctcacacacacacgcgcacacacgcacgcacacacacacgtgcgcgcacgcacgcgcacacacgcacacaaagacgcacacacacgtgcgcacacagacgcatgcacacgcacactgacgcacgcacacagacgcacgcacacacgcgcgcgcgcgcacacacacac

SEQ ID NO: 37146 - DNA, 201 bp, Homo sapiens
ctaaaaccctgtctctacacgcacacacacacgcgctcacacacacacgcgcacacacgcacgcacacacacacgtgcgcgcacgcacgcgcacacacgcacacaaagacgcacacacacgtgcgcacacagacgcatgcacacgcacactgacgcacgcacacagacgcacgcacacacgcgcgcgcgcgcacacacaca

SEQ ID NO: 37147 - DNA, 201 bp, Homo sapiens
gctaaaaccctgtctctacacgcacacacacacgcgctcacacacacacgcgcacacacgcacgcacacacacacgtgcgcgcacgcacgcgcacacacgcacacaaagacgcacacacacgtgcgcacacagacgcatgcacacgcacactgacgcacgcacacagacgcacgcacacacgcgcgcgcgcgcacacacac

SEQ ID NO: 37148 - DNA, 201 bp, Homo sapiens
gctgtggcgcttttctccccagagaaatcagtacagagctttgtgccaccaagtactattaaaaaaaaaaattccctaagacttgcaaagtgtcagaacayggaaacataagataaaaatacagttaacgcttgttccttttaaatattgcagttcctacctccattacaatactttctttatcaagactgaggaaaaaaa

SEQ ID NO: 37149 - DNA, 201 bp, Homo sapiens
atgctaaaaccctgtctctacacgcacacacacacgcgctcacacacacacgcgcacacacgcacgcacacacacacgtgcgcgcacgcacgcgcacacacgcacacaaagacgcacacacacgtgcgcacacagacgcatgcacacgcacactgacgcacgcacacagacgcacgcacacacgcgcgcgcgcgcacacac

SEQ ID NO: 37150 - DNA, 201 bp, Homo sapiens
catgctaaaaccctgtctctacacgcacacacacacgcgctcacacacacacgcgcacacacgcacgcacacacacacgtgcgcgcacgcacgcgcacacacgcacacaaagacgcacacacacgtgcgcacacagacgcatgcacacgcacactgacgcacgcacacagacgcacgcacacacgcgcgcgcgcgcacaca

SEQ ID NO: 37151 - DNA, 201 bp, Homo sapiens
acatgctaaaaccctgtctctacacgcacacacacacgcgctcacacacacacgcgcacacacgcacgcacacacacacgtgcgcgcacgcacgcgcacacacgcacacaaagacgcacacacacgtgcgcacacagacgcatgcacacgcacactgacgcacgcacacagacgcacgcacacacgcgcgcgcgcgcacac

SEQ ID NO: 37152 - DNA, 201 bp, Homo sapiens
ataatgccactgcattccagcctagtgacacagcaagactccatctcaaaaaaaaggaaaaattgcacaaaactaataagattacatttaagtttgtaaaytgcttttttcccatagttgatacacatttccatatgcattctttgtctttataaatttactgagccatcaataagtcattttccaatgaatatggtatta

SEQ ID NO: 37153 - DNA, 201 bp, Homo sapiens
aacatgctaaaaccctgtctctacacgcacacacacacgcgctcacacacacacgcgcacacacgcacgcacacacacacgtgcgcgcacgcacgcgcacacacgcacacaaagacgcacacacacgtgcgcacacagacgcatgcacacgcacactgacgcacgcacacagacgcacgcacacacgcgcgcgcgcgcaca

SEQ ID NO: 37154 - DNA, 201 bp, Homo sapiens
ttccagcctagtgacacagcaagactccatctcaaaaaaaaggaaaaattgcacaaaactaataagattacatttaagtttgtaaattgcttttttcccawagttgatacacatttccatatgcattctttgtctttataaatttactgagccatcaataagtcattttccaatgaatatggtattattttcgagtaaata

SEQ ID NO: 37155 - DNA, 201 bp, Homo sapiens
tggtgcacacctgtaatcccagctactagggaggctgaggcaggagaatcacttgaatccgggaggcggaggttgtagtgagccaagattgtgccactgcrctccagcctgggccacagagcaagactccatctcaaaaaaaaaaagaaaaaaagtaaatacagtattctgctttagaactaggacctatcttcagtttta

SEQ ID NO: 37156 - DNA, 201 bp, Homo sapiens
tgggaagttagaattgttaatggcatatttgccacatttaataagaatcatgttccaagtgctagtgcctggagtccatcttgagtatatgggtgatggawctagaattattgcctatttgccgaatgaattttaataaaatgtgcaggagattgtgatctcttttcctgtttctttcagctcgactgtgggatccaccct

SEQ ID NO: 37157 - DNA, 201 bp, Homo sapiens
gggaggcggaggttgtagtgagccaagattgtgccactgcgctccagcctgggccacagagcaagactccatctcaaaaaaaaaaagaaaaaaagtaaatmcagtattctgctttagaactaggacctatcttcagttttattttttcctcaaatatataaagccgggcattttcactaatcctgcatttctgcttatttt

SEQ ID NO: 37158 - DNA, 201 bp, Homo sapiens
aagtaaatacaggctgggcatggtgactcctgcctgtaatcccaacactttgggaggccaaggcaggtggatcacttgaggctaggagttcaagaccagcytggccaacatggtgaaaccctgactctactaaaaatacaaaaattagctggctgtggtggtgcacacctgtaatcccagctactagggaggctgaggcag

SEQ ID NO: 37159 - DNA, 201 bp, Homo sapiens
tctgctggtggtggatatgtggggagaaaaaaaaagttttgcagtcagacagtttagaagatgaattgaactgagttcaggaaaagttgggtttcttatcrgagtgttctgtttctcacccataattttaatgatttaaaatcattacctttagttatttttctctctcaagtacatcactgtattaaaattagtctccta

SEQ ID NO: 37160 - DNA, 201 bp, Homo sapiens
agctattgtgagtctttgggaatattttttcagagttgtgtcttgggtagatcaagacccatttgactcttccttttacttttctgcctgcctgctaggcrctgaagatggtcctgatggttctgatggccctctagctaccaacagaaggttttgaagatcggggtgaacttaccgctttttattacttggtttttctac

SEQ ID NO: 37161 - DNA, 201 bp, Homo sapiens
tccccactacctctccagccctaagcaaccactaatctacttctttatagatttgcctgttctggacatttcatgtaagtgtgatcatacaatacatactsttttgtctctggcatctttcatttagcataatctttccaaggttcaaaattgaggagttttgttcattcaataagtattttttgtgatgtgctacatgcc

SEQ ID NO: 37162 - DNA, 201 bp, Homo sapiens
gtatctcctttacacaatcattcagtaaggcttcattgagcacctgcttgggacatagtccgtttccttctgcttagttcacacctgtcatgtcttcctgygatgagcaaacactgagcaagtgtcaagcaccacacatggggatatagacgcaacagagggcccagttaattgctctcgctcttttggagagaattacag

SEQ ID NO: 37163 - DNA, 201 bp, Homo sapiens
accatacaactcatttaaagagtataattcagtcgttcttaacatagagttatacaaccatcacctctctctaattccagcacattttcatcactcccaaragataccttgtattcattagcagtcatagacaatccccactacctctccagccctaagcaaccactaatctacttctttatagatttgcctgttctggac

SEQ ID NO: 37164 - DNA, 201 bp, Homo sapiens
tgccgtgagtttcgatcttctcagctcaggccctagtagaataaggaaggtgtaaagctggagaagagaaagtgcagaggtgttagggacaaaaactcagycctcgactgtccataaggagagtggcctttcagtggacacgatcctcatcagtcgggaatgctgctgaaggggagatgcaaatgtagagaacttgaattc

SEQ ID NO: 37165 - DNA, 201 bp, Homo sapiens
agtggcgcgatctcagctcactgcaagctccgcctcccaggttcacgccattctcctgcctcagcctcccgagtagctgggactacaggcgcccgccaccwcggccagctagttttttgtatttttagtagagacggggtttcattatattggccaggatggtctcaatctcgtgacctcatgatccgcctgccttggcct

SEQ ID NO: 37166 - DNA, 201 bp, Homo sapiens
tgctcttggaagggctcaggagctgctcttgattctaggtatgccatttcctttgtatttaggcgatgatcaaaatcttgtcattttatcaagataataaygtggtcttggatgagtcattccaccgttctggacttcagttttcttcatttaaaaatagagatttggggccgggcgcggtggctcacgcctgtaatccca

SEQ ID NO: 37167 - DNA, 201 bp, Homo sapiens
agcactttgggaggcacaggggagcagattgcttgaacccaggagtttgagaccaacttgggcaacatgctaaaaccctgtctctacacgcacacacacacgcgctcacacacacacgcgcacacacgcacgcacacacacacgtgcgcgcacgcacgcgcacacacgcacacaaagacgcacacacacgtgcgcacacag

SEQ ID NO: 37168 - DNA, 201 bp, Homo sapiens
cagcactttgggaggcacaggggagcagattgcttgaacccaggagtttgagaccaacttgggcaacatgctaaaaccctgtctctacacgcacacacacacgcgctcacacacacacgcgcacacacgcacgcacacacacacgtgcgcgcacgcacgcgcacacacgcacacaaagacgcacacacacgtgcgcacaca

SEQ ID NO: 37169 - DNA, 201 bp, Homo sapiens
acaacaatctcactgaacccgttttctcatatggaaataagataaaacttgaagagtgaacatcgcggtaggtgctttgtaaataatagctaatctaagarcgcaggcaggcattgcactgagcactgtgaaagtatggaaaagggatttctgacagattgaggaaaaaaggatacctcgtggatcctgaaaaatgtgatg

SEQ ID NO: 37170 - DNA, 201 bp, Homo sapiens
gtcttatattatattttcctgtttataggtgaggccataagattatttctggtattttcccccatatcatacacacacacacacacacacacacgcgcgcgtttatatataaaaaatatataaaagaggaaattggttatgtatatttattatttatcaaactgacttcttcccatccaaacttgagattttcacatttgg

SEQ ID NO: 37171 - DNA, 201 bp, Homo sapiens
agtcttatattatattttcctgtttataggtgaggccataagattatttctggtattttcccccatatcatacacacacacacacacacacacacgcgcgcgtttatatataaaaaatatataaaagaggaaattggttatgtatatttattatttatcaaactgacttcttcccatccaaacttgagattttcacatttg

SEQ ID NO: 37172 - DNA, 201 bp, Homo sapiens
gcccggcacggtggctcacgcctgtaatcccagcactttgggaggtcgaggtgggcagatcacaaggtcaggagttcgagaccatcctggccaacgtggtraaaccccatctctactaaaaatacaaaaattagctgggtgtggtggcatgtgcctgtagtcccagctacttgggaggctgtggcaagagagttgcttgaa

SEQ ID NO: 37173 - DNA, 201 bp, Homo sapiens
gtctcgctctgtctccaggctggagtgcagtggcgcgatctcagctcactgcaagctccgcctcccaggttcacgccattctcctgcctcagcctcccgaktagctgggactacaggcgcccgccaccacggccagctagttttttgtatttttagtagagacggggtttcattatattggccaggatggtctcaatctcg

SEQ ID NO: 37174 - DNA, 201 bp, Homo sapiens
gaacctgggaggcggagcttgcagtgagccgagatcacgccactagactctagcctgggcgacggagcgagactcggtctcaaaaaaaaaaaaaaaaaaaagtataaaaattaggtaggcatggtggttcacacctgtatcccagctacttggaggctgaggcatgagaatcccttgaaccctggaggcagaggctgcagt

SEQ ID NO: 37175 - DNA, 201 bp, Homo sapiens
tttgggaggccaaggcgagcagatcacgaggtcaggagatggagaccatcctggctaacacggtgaaaccccgtctctactaaaaatacaaaaaaattagmcgggtgtggtggcaggtgcctgtagtcccagctactcgggaggccgaggcaggagaatggcgtgaacctgggaggcggagcttgcagtgagccgagatca

SEQ ID NO: 37176 - DNA, 201 bp, Homo sapiens
gtcttgctctgttgcctaggctggagtgcagtggcgccaatctcagctcactgcagcttctgcctcctgggttaaagcaattctcctgcctcagccttccrggtagctgggattacaggcacgtgccaccacgcccagctaatttttgtatttgtagtagagacaggttttcaccatgttggccaggctgttctcaaactc

SEQ ID NO: 37177 - DNA, 201 bp, Homo sapiens
ccaaatgtattggaaagcaggagaaatggccttttgttagttttgtttgtttgcttgttgtttggggtgttttttggtttgtttgtttgtttgtttgtttggatgaagtcttgctctgttgcctaggctggagtgcagtggcgccaatctcagctcactgcagcttctgcctcctgggttaaagcaattctcctgcctcag

SEQ ID NO: 37178 - DNA, 201 bp, Homo sapiens
aatctggaaaggatagaaattattaaattaagtgatatggttcctattagaattttaaactccaccttgtggagtttggaagacagataccaaaggaattrcatggttgattttgatagattggcacctattaagtttaaagaaggactttcaaagtgagtcctatcattgaatagtccagggaggtaccttgtctactgc

SEQ ID NO: 37179 - DNA, 201 bp, Homo sapiens
ttacttttctgcctgcctgctaggcgctgaagatggtcctgatggttctgatggccctctagctaccaacagaaggttttgaagatcggggtgaacttacygctttttattacttggtttttctaccattcctagcctaaactgtttaggaatttggcaactgaacttaaaatgtttacagatcttgtgaaggctctttca

SEQ ID NO: 37180 - DNA, 201 bp, Homo sapiens
ttgttagctttctgaaaaacatgttcacatttacttgcttttatttcttttttctttgctcctggtatgtgttttgtaggactagtatttcttcaagtctmttctcattttctcttcagattatactgacctggccatgagcacggtgaagcagacccaagccattccatatactggtccctttaatttgctctgttacca

SEQ ID NO: 37181 - DNA, 201 bp, Homo sapiens
gagacccggtctcgcagtgccgcccaggctggagtgcagtggtgcagtcacagctcactgcagcctcaaccttcccggctcagtgatcctcccacctcagmctcttatctgggaccacaggcacacgccaccacagctggctaattttttatgagatgatggtttttttaaagagtattcatttatcttctatataatcat

SEQ ID NO: 37182 - DNA, 201 bp, Homo sapiens
atgcaaagctattgtgagtctttgggaatattttttcagagttgtgtcttgggtagatcaagacccatttgactcttccttttacttttctgcctgcctgytaggcgctgaagatggtcctgatggttctgatggccctctagctaccaacagaaggttttgaagatcggggtgaacttaccgctttttattacttggttt

SEQ ID NO: 37183 - DNA, 201 bp, Homo sapiens
gggattttcacatttagagcagagtcagcgactgtggcccacaagccacacctagcccgcctgctttggtaagtatagtgttaccgaaacacagccgtgcrcactggttcatcatctctgatgcctctttcctgctacagcagcagaactgagtcattgcaacagcgaccctgtggtttacaaagcctagaatgccatctg

SEQ ID NO: 37184 - DNA, 201 bp, Homo sapiens
aaaagcctccacatctttggactatgatcatagcattctttttaggtcatgcactatttagaaataagttttggttttgtaaatttaagttagttacaacsaggataattttgcttaaactctttaaaatatagttgtgtgctttatttcttggttgtatgtgtatcatttcttgttctgtgtgtatcatttgttatttga

SEQ ID NO: 37185 - DNA, 201 bp, Homo sapiens
tactgagcacctgctccccagcaggcatgcctcaaagtgcttaggaaacatcagtgaacaaagcaaacagatctgccccctccaaggatctgacattctgscatgtcccagggcttcctgatagggtttggagttgggcagatcccatagggtcttgttggctattgtaaggacctcagactttcagtgtgagtaaaatga

SEQ ID NO: 37186 - DNA, 201 bp, Homo sapiens
tgttgttttttaaatacgttttactgtggtaaaatatctaacataaaatttgcagttttaaccatttttaagtgtacaaaccagtggcattaattatattsacagtgttgtacaaccatcaccactgtctattttcacagcttttcatcactccaagcagaaactctgtaccgttacacagtaactccccattcccttccg

SEQ ID NO: 37187 - DNA, 201 bp, Homo sapiens
acagtaactccccattcccttccgccaaccctggtaatctcaaatctactttctgtttctatgaatttgactattctaggtatttcatataagaggaatcrtaatgcctatgatgttttcaaggttcatcatgttgtggcatgtatcagcacttcatgccgaagtcatggtccgttatatgtagaccacatgttgtttatc

SEQ ID NO: 37188 - DNA, 201 bp, Homo sapiens
agtcatggtccgttatatgtagaccacatgttgtttatccattcacctgtgggtggacactcgggttgtgtcactttacagcaaatgtgaagtggtatctygttgtggtttttattttcatttctctaatgactaatgatgttgagcaccttttcatgcagtcttttgttcgtttttgagttttttctagcatgataggcc

SEQ ID NO: 37189 - DNA, 201 bp, Homo sapiens
gtgctggctatgcccagccacaagccatctaccacatgtgagaggctaagaacaatctatcttggccgggctgcagtcccagcactttgggaggccgatgygggtggatcacttgaggccaggagttcgagaccagcctggccaacatagtgaaaccccatctctactaaaagtataaaaattaggcagggcacggtggct

SEQ ID NO: 37190 - DNA, 201 bp, Homo sapiens
tgattcctctttcttctcaactcctcccaatctgaaaagaacatgtataggtcagacatagtcatccttttagtcatctgttttgttaatttggtagtaaygccataaaaataagtaactttaatgactgagtcttaagaatttgttccctaatgccttaaaatatttaaattaccctgatcaggtaagtttcccatttct

SEQ ID NO: 37191 - DNA, 201 bp, Homo sapiens
ctcgatatcctgatctcgtgatctgcctgcctcggcctcccaaagtgctgggattacaggcgtgagccaccgcacccggccatttaaatttaagccatttrgcaaatacacattatgatcttaaagaagatgacagtgttgaaatgcttatggctttctacttaagtgctaattctagaagtattattatataatctgcgt

SEQ ID NO: 37192 - DNA, 201 bp, Homo sapiens
agagttttgtgaacagaagtatttagaggaagcctgtggggcttgtgggtagggctggtctggtctccagaggacccaaaatcgaggttggagttgagatkggggcaggcctggtgtcctggctgctcatgggccccactggggttacatgtgtgtctcccttaggctgcccatgggccccgggggctgaagggagagaag

SEQ ID NO: 37193 - DNA, 201 bp, Homo sapiens
agagatattggtctgtagttttcttttttattatgtcctttcctggttttggtattagggcgatcctggcttcatagaataatttagggaggattctctcyttctctgttttggaatagtttcagtaggattggtaccaattctcttctttgaatgtctgattgaattcagctgtgagtccatgtgaatctgtgatttttt

SEQ ID NO: 37194 - DNA, 201 bp, Homo sapiens
ggttggagttgagatgggggcaggcctggtgtcctggctgctcatgggccccactggggttacatgtgtgtctcccttaggctgcccatgggccccggggkctgaagggagagaagagagagcctgcagtgctggaacctgtaagtcatgctggtcacagggctgaggtggtggaaagaggagaagcaagtggggtttagt

SEQ ID NO: 37195 - DNA, 201 bp, Homo sapiens
accctgctgctgcatcccacacctcctgctcttggcacccgtgagcttctgctgcctttcctttatgctgctgtctgggtctttggggttgatgtgggatmtgggagaattttgaaacggatcattgctgtcaggatgaaggtggagaggggcattctgaagatctttgttttggggagttggggtggtggtgaatgtttc

SEQ ID NO: 37196 - DNA, 201 bp, Homo sapiens
tgttttgtgcctttcttttcactctgggtcatggtagccatattgttgaaggttcacttcccagatcctcttttcttggctgcttcctgtctgtacagccrcttcctgtttgtccagtttgttttgtggccatcttggccatgtttaattttccttggccctggcatcactcttgcatccaagtgtttgtcattttatttt

SEQ ID NO: 37197 - DNA, 201 bp, Homo sapiens
tcacagggctgaggtggtggaaagaggagaagcaagtggggtttagtgtgctggccctgtcacctgtgagttttaacctttgactccacagggtatgctcktggaggggccccctggtttagaaggccctgtggtgagtctagcagtgacctggtggccattgttttcttagagatccctcctatgtgttcatctgtgcct

SEQ ID NO: 37198 - DNA, 201 bp, Homo sapiens
tgttttgtggccatcttggccatgtttaattttccttggccctggcatcactcttgcatccaagtgtttgtcattttattttgtgtcccttagttgttctmatatcttccagtattctctgtcagttggactgcttcctgtctactctgctacatcttctgcctgccttgcagttatggctgccttttctaccctgctgct

SEQ ID NO: 37199 - DNA, 201 bp, Homo sapiens
tgaggtggtggaaagaggagaagcaagtggggtttagtgtgctggccctgtcacctgtgagttttaacctttgactccacagggtatgctcgtggaggggmcccctggtttagaaggccctgtggtgagtctagcagtgacctggtggccattgttttcttagagatccctcctatgtgttcatctgtgccttccccacat

SEQ ID NO: 37200 - DNA, 201 bp, Homo sapiens
ctgttttgtgcctttcttttcactctgggtcatggtagccatattgttgaaggttcacttcccagatcctcttttcttggctgcttcctgtctgtacagcyacttcctgtttgtccagtttgttttgtggccatcttggccatgtttaattttccttggccctggcatcactcttgcatccaagtgtttgtcattttattt

SEQ ID NO: 37201 - DNA, 201 bp, Homo sapiens
gtggcaggactgtccacagccacttattctatccttcagtcttcatctctccatctatccatcccttgaacctatctctctcctcatccaccccatccatycactcattcaccagtccacctacgcacacatccaccacccactcccgcaaccatttacccacctatgcatcacaaacttacccatctactcatgcatgaa

SEQ ID NO: 37202 - DNA, 201 bp, Homo sapiens
atgagggccagaagaagggcaaagcatcctgctgggagaggaactgtggggtgcattgtagggggctgctctggggcttggataactgagcccaagaactrtatgttttgcaaaaggcagttatgaggcctgagtttggaatatctctgggaaatgctctccaaatttacttggagtatggatacttaacctgtgcagggt

SEQ ID NO: 37203 - DNA, 201 bp, Homo sapiens
ccctcctatgtgttcatctgtgccttccccacatatgctcaggcctcctcctcagaactccggagggtccttccaataaaagttttttaaaaaatcatttygaaaaattaattcaatagtttttggggagcaggtggtgtttggttatatggataagttctttagtggtgatttctgaggttttggtgcacccatcacctg

SEQ ID NO: 37204 - DNA, 201 bp, Homo sapiens
cattgtacctgttttgtgcctttcttttcactctgggtcatggtagccatattgttgaaggttcacttcccagatcctcttttcttggctgcttcctgtckgtacagccacttcctgtttgtccagtttgttttgtggccatcttggccatgtttaattttccttggccctggcatcactcttgcatccaagtgtttgtca

SEQ ID NO: 37205 - DNA, 201 bp, Homo sapiens
cacccattaactgatgggcatttggggtggttccatatttttgcaattgtgaatcatggtgctgtaaacatgtgtgtgcaagtgtctttttcatacaatgrcttttttcctccagtagtgggattgctggatcaaatggtagatctatttctagttctttaaggcatcgctgtactgttttccataggttgtactagttta

SEQ ID NO: 37206 - DNA, 201 bp, Homo sapiens
atccattatccttcctggaactcaaccactctctccttcaatacactcatgcacccatctcctcacccactcacttcacatccaaccgttcactcaaccaygtattcaattccacccatctatctattcactcatctgattccatctactctgtacctcccgctcatctacccactaagccttgcatgcataattccctct

SEQ ID NO: 37207 - DNA, 201 bp, Homo sapiens
ctagttttgccctctgccttgtgatcttttactgccctctgaagcatgtgatccctgtgacccattccctattcatagacccccaccccttttgaaatccrtaataaaaacttgctggttttgcggctcaggtgggcatcatggaacctgctgacatgtgatatcacccccggagacccagctgtaaatttctctcttttg

SEQ ID NO: 37208 - DNA, 201 bp, Homo sapiens
catgtgtgtgcaagtgtctttttcatacaatggcttttttcctccagtagtgggattgctggatcaaatggtagatctatttctagttctttaaggcatckctgtactgttttccataggttgtactagtttaatttcccaccagtagcatagaagtgttctcttttcatcacacctaccccaacgtctattttttttttt

SEQ ID NO: 37209 - DNA, 201 bp, Homo sapiens
acccatctatccattatccttcctggaactcaaccactctctccttcaatacactcatgcacccatctcctcacccactcacttcacatccaaccgttcaytcaaccatgtattcaattccacccatctatctattcactcatctgattccatctactctgtacctcccgctcatctacccactaagccttgcatgcataa

SEQ ID NO: 37210 - DNA, 201 bp, Homo sapiens
ttgctgtcaggatgaaggtggagaggggcattctgaagatctttgttttggggagttggggtggtggtgaatgtttcaccttctccccacccttatcttgsctatggcctggatttgggaacaggcatctgaatggaggtgtgcaagggagggaactggttggcttggagtgtacatgagggccagaagaagggcaaagca

SEQ ID NO: 37211 - DNA, 201 bp, Homo sapiens
ctttcggcagtgtttttaattttcctcgtacaggtgtttaacctctattgcgggaagtcagggaccctgaatggagggaccggctgaagccacagtggaakaacataaattgtgaagatttcatggacatttatcacttccccaatcaatactcttataacttcctatgcctgtctttactttaatctcttaatcctgtca

SEQ ID NO: 37212 - DNA, 201 bp, Homo sapiens
tgcttcctgtctactctgctacatcttctgcctgccttgcagttatggctgccttttctaccctgctgctgcatcccacacctcctgctcttggcacccgygagcttctgctgcctttcctttatgctgctgtctgggtctttggggttgatgtgggatctgggagaattttgaaacggatcattgctgtcaggatgaagg

SEQ ID NO: 37213 - DNA, 201 bp, Homo sapiens
gttctttaaggcatcgctgtactgttttccataggttgtactagtttaatttcccaccagtagcatagaagtgttctcttttcatcacacctaccccaacrtctatttttttttttatttttaaattatgaccattgttacaggagtaagttggtatcacatagtggttttgatttgcatttccctgataattagtgatgt

SEQ ID NO: 37214 - DNA, 201 bp, Homo sapiens
aggatttttgcatctattttcatcagagatattggtctgtagttttcttttttattatgtcctttcctggttttggtattagggcgatcctggcttcataraataatttagggaggattctctccttctctgttttggaatagtttcagtaggattggtaccaattctcttctttgaatgtctgattgaattcagctgtga

SEQ ID NO: 37215 - DNA, 201 bp, Homo sapiens
ttacaggagtaagttggtatcacatagtggttttgatttgcatttccctgataattagtgatgtagagcattttttcatatgtttgtcaaccatttgtatrttttcttttgagaattgtctgttcctctgcttagcccactttttgatgggagtatttgtttatttcttgctgatttgtttgagttttttgtagattctgg

SEQ ID NO: 37216 - DNA, 201 bp, Homo sapiens
taccttttcttttttggagaaagactgaaagactcaaagtcctctttctgaaagaggctcttcaggatttggagaggttgtgtttgctgaggtgggactgrgaactggggtgcagggaaccctgagatctccttggcaggcatgagagttttgtgaacagaagtatttagaggaagcctgtggggcttgtgggtagggctg

SEQ ID NO: 37217 - DNA, 201 bp, Homo sapiens
ttttataccattcccatgctgttttggtgactatagccttgcagtatattttgaagtcaggtaatgtgatgctccagatttattcgttttgcttaatcttrctttggctatgtgggctcttttgtagttccatatgaattttaggattgtttttttctagctctgtaaagaatgatgatggcattttgatggggattgcat

SEQ ID NO: 37218 - DNA, 201 bp, Homo sapiens
aaaaatcattttgaaaaattaattcaatagtttttggggagcaggtggtgtttggttatatggataagttctttagtggtgatttctgaggttttggtgcrcccatcacctgaggaatgtacactgtatccagtgtgtagtcttttatcccttacccagctcctactcatacctggaagtcctcaaagtccattatataat

SEQ ID NO: 37219 - DNA, 201 bp, Homo sapiens
ttccagcctggcaaattctagtcatactggttctctgctctcgaaccctgtttcctgttaagatgtttatcaatgacaatgtgtgcccagcgggatgtggmacctcatcagtgattctagttttgccctctgccttgtgatcttttactgccctctgaagcatgtgatccctgtgacccattccctattcatagaccccca

SEQ ID NO: 37220 - DNA, 201 bp, Homo sapiens
aaaaattaattcaatagtttttggggagcaggtggtgtttggttatatggataagttctttagtggtgatttctgaggttttggtgcacccatcacctgasgaatgtacactgtatccagtgtgtagtcttttatcccttacccagctcctactcatacctggaagtcctcaaagtccattatataattcttatgcctttg

SEQ ID NO: 37221 - DNA, 201 bp, Homo sapiens
aacctcatcagtgattctagttttgccctctgccttgtgatcttttactgccctctgaagcatgtgatccctgtgacccattccctattcatagacccccrccccttttgaaatccataataaaaacttgctggttttgcggctcaggtgggcatcatggaacctgctgacatgtgatatcacccccggagacccagctgt

SEQ ID NO: 37222 - DNA, 201 bp, Homo sapiens
gtaatgtgatgctccagatttattcgttttgcttaatcttactttggctatgtgggctcttttgtagttccatatgaattttaggattgtttttttctagytctgtaaagaatgatgatggcattttgatggggattgcattgaatttgtagattgcttttggcagtatggtcattttcacaatgttgattctacccttcc

SEQ ID NO: 37223 - DNA, 201 bp, Homo sapiens
gaacctcatcagtgattctagttttgccctctgccttgtgatcttttactgccctctgaagcatgtgatccctgtgacccattccctattcatagaccccyaccccttttgaaatccataataaaaacttgctggttttgcggctcaggtgggcatcatggaacctgctgacatgtgatatcacccccggagacccagctg

SEQ ID NO: 37224 - DNA, 201 bp, Homo sapiens
agtgccctcaggcttgctaggattaggaaattccagcctggcaaattctagtcatactggttctctgctctcgaaccctgtttcctgttaagatgtttatyaatgacaatgtgtgcccagcgggatgtggaacctcatcagtgattctagttttgccctctgccttgtgatcttttactgccctctgaagcatgtgatccc

SEQ ID NO: 37225 - DNA, 201 bp, Homo sapiens
agcttgtattttgttgaggatttttgcatctattttcatcagagatattggtctgtagttttcttttttattatgtcctttcctggttttggtattagggygatcctggcttcatagaataatttagggaggattctctccttctctgttttggaatagtttcagtaggattggtaccaattctcttctttgaatgtctga

SEQ ID NO: 37226 - DNA, 201 bp, Homo sapiens
tcctatgcctgtctttactttaatctcttaatcctgtcatctttgtaagctgaagatgtatgtcacctcaggaccctgtgatgattgcgttaactgcatarattgtttgtaaagcatgtgtgtttgaacaatatgaaaactgggcaccttgaaaagaacaggataacagcaattttcagggaacaagggagataaccataa

SEQ ID NO: 37227 - DNA, 201 bp, Homo sapiens
cctgcagtgccctcaggcttgctaggattaggaaattccagcctggcaaattctagtcatactggttctctgctctcgaaccctgtttcctgttaagatgyttatcaatgacaatgtgtgcccagcgggatgtggaacctcatcagtgattctagttttgccctctgccttgtgatcttttactgccctctgaagcatgtg

SEQ ID NO: 37228 - DNA, 201 bp, Homo sapiens
gtctccagaggacccaaaatcgaggttggagttgagatgggggcaggcctggtgtcctggctgctcatgggccccactggggttacatgtgtgtctccctyaggctgcccatgggccccgggggctgaagggagagaagagagagcctgcagtgctggaacctgtaagtcatgctggtcacagggctgaggtggtggaaag

SEQ ID NO: 37229 - DNA, 201 bp, Homo sapiens
gtgcataagggcatataccttttcttttttggagaaagactgaaagactcaaagtcctctttctgaaagaggctcttcaggatttggagaggttgtgtttsctgaggtgggactgagaactggggtgcagggaaccctgagatctccttggcaggcatgagagttttgtgaacagaagtatttagaggaagcctgtggggc

SEQ ID NO: 37230 - DNA, 201 bp, Homo sapiens
cacacctcctgctcttggcacccgtgagcttctgctgcctttcctttatgctgctgtctgggtctttggggttgatgtgggatctgggagaattttgaaayggatcattgctgtcaggatgaaggtggagaggggcattctgaagatctttgttttggggagttggggtggtggtgaatgtttcaccttctccccaccctt

SEQ ID NO: 37231 - DNA, 201 bp, Homo sapiens
cagggctgaggtggtggaaagaggagaagcaagtggggtttagtgtgctggccctgtcacctgtgagttttaacctttgactccacagggtatgctcgtgraggggccccctggtttagaaggccctgtggtgagtctagcagtgacctggtggccattgttttcttagagatccctcctatgtgttcatctgtgccttcc

SEQ ID NO: 37232 - DNA, 201 bp, Homo sapiens
actcccgcaaccatttacccacctatgcatcacaaacttacccatctactcatgcatgaaggcttatatccactcacctgtccatcctccccctgcttaaygactctccccttctttacacacatctattcgactatgcttttgttcatctgtcctcttcaacttatccatccatctattcactcacccacccactcacac

SEQ ID NO: 37233 - DNA, 201 bp, Homo sapiens
gagatgggggcaggcctggtgtcctggctgctcatgggccccactggggttacatgtgtgtctcccttaggctgcccatgggccccgggggctgaagggaragaagagagagcctgcagtgctggaacctgtaagtcatgctggtcacagggctgaggtggtggaaagaggagaagcaagtggggtttagtgtgctggccc

SEQ ID NO: 37234 - DNA, 201 bp, Homo sapiens
ctctggggcttggataactgagcccaagaactgtatgttttgcaaaaggcagttatgaggcctgagtttggaatatctctgggaaatgctctccaaatttmcttggagtatggatacttaacctgtgcagggtttttacatttttgaactccttcaaattctaaataaaattttgtgcataagggcatataccttttcttt

SEQ ID NO: 37235 - DNA, 201 bp, Homo sapiens
tttactgatttgtctgattgctctggctaggatttccagtactatgttgaatagaagtggtgagagtgggcatccttatcttgttccagttctcagggggwatgctttgaacttttccccgttcagtataaggtcggctgtgggtttgtcatagatggtttttattaccttaagttatgatctttgtatgtcaagtttgct

SEQ ID NO: 37236 - DNA, 201 bp, Homo sapiens
ttcctatcttcaggactgctgatctctgcagaataactagatgtccacttatgtggcaggactgtccacagccacttattctatccttcagtcttcatctytccatctatccatcccttgaacctatctctctcctcatccaccccatccatccactcattcaccagtccacctacgcacacatccaccacccactcccgc

SEQ ID NO: 37237 - DNA, 201 bp, Homo sapiens
ttattctatccttcagtcttcatctctccatctatccatcccttgaacctatctctctcctcatccaccccatccatccactcattcaccagtccacctaygcacacatccaccacccactcccgcaaccatttacccacctatgcatcacaaacttacccatctactcatgcatgaaggcttatatccactcacctgtcc

SEQ ID NO: 37238 - DNA, 201 bp, Homo sapiens
ctgtttcctgttaagatgtttatcaatgacaatgtgtgcccagcgggatgtggaacctcatcagtgattctagttttgccctctgccttgtgatcttttaytgccctctgaagcatgtgatccctgtgacccattccctattcatagacccccaccccttttgaaatccataataaaaacttgctggttttgcggctcagg

SEQ ID NO: 37239 - DNA, 201 bp, Homo sapiens
ctgaatggaggtgtgcaagggagggaactggttggcttggagtgtacatgagggccagaagaagggcaaagcatcctgctgggagaggaactgtggggtgyattgtagggggctgctctggggcttggataactgagcccaagaactgtatgttttgcaaaaggcagttatgaggcctgagtttggaatatctctgggaaa

SEQ ID NO: 37240 - DNA, 201 bp, Homo sapiens
atctttgtaagctgaagatgtatgtcacctcaggaccctgtgatgattgcgttaactgcataaattgtttgtaaagcatgtgtgtttgaacaatatgaaawctgggcaccttgaaaagaacaggataacagcaattttcagggaacaagggagataaccataaggtctgactgcctgcagggccaggcagaacagagtcat

SEQ ID NO: 37241 - DNA, 201 bp, Homo sapiens
agggaactggttggcttggagtgtacatgagggccagaagaagggcaaagcatcctgctgggagaggaactgtggggtgcattgtagggggctgctctggrgcttggataactgagcccaagaactgtatgttttgcaaaaggcagttatgaggcctgagtttggaatatctctgggaaatgctctccaaatttacttgga

SEQ ID NO: 37242 - DNA, 201 bp, Homo sapiens
ggccccactggggttacatgtgtgtctcccttaggctgcccatgggccccgggggctgaagggagagaagagagagcctgcagtgctggaacctgtaagtyatgctggtcacagggctgaggtggtggaaagaggagaagcaagtggggtttagtgtgctggccctgtcacctgtgagttttaacctttgactccacaggg

SEQ ID NO: 37243 - DNA, 201 bp, Homo sapiens
tggtgggcgatgtgagccagaccatcgacgacccctacaccacctttgtcaggatgctgccagataaggactgccactacaccctctgtgacacaacctaygagaccaaggagagcaaggaggaggacctggtgtttatcttctgggtccctgagtctgctccccttaaaagcaaaatgatctatgccagctccaaggacg

SEQ ID NO: 37244 - DNA, 201 bp, Homo sapiens
gtcttctgcggctctccatgccctctccttttcacttctggaaacatggcctctggtgtggctgtctgatggtgtcatgaacatgttcaacgacatgaagktgcataagtcttcaatgccagaggaggtgaagaagctcaagaaggtggtgctcttctgccttagtgaggacaagaagaacatcatcctggaggagaccaa

SEQ ID NO: 37245 - DNA, 201 bp, Homo sapiens
ctggaaacatggcctctggtgtggctgtctgatggtgtcatgaacatgttcaacgacatgaagttgcataagtcttcaatgccagaggaggtgaagaagckcaagaaggtggtgctcttctgccttagtgaggacaagaagaacatcatcctggaggagaccaagaagatcctggtgggcgatgtgagccagaccatcgac

SEQ ID NO: 37246 - DNA, 201 bp, Homo sapiens
tctgactccttaccttaggctcctccctaaacaccgaggcgtaaagtaccacgactacacacccaccttccaccaagggacctgagatttctgttaacctytgctgcctctacccccctcagttaggctcccaggaggagtggtcagcgcctggcacttgcaggagcccacaaagcagcgacttcgcctttccagcccccc

SEQ ID NO: 37247 - DNA, 201 bp, Homo sapiens
cccagcccctccgccgggcgtagggccagcacaacgcgtcagggcacagggcctggccagctacaagcgcgcccctcgctgaacggtcccccggtccccamgcggcggtcgcccctgggctctggacagcgaacgggacctcctcctcagcaggggtgccgcgcggcctcaggacggacgcacgcggatcttcgcttcccc

SEQ ID NO: 37248 - DNA, 201 bp, Homo sapiens
gaatggtgggctctctgtggacccgggcaatgtcttgaaagacattggtgaacaagacggctctgcaaacgccttgccatgccgttctccccctcctcccmgggctggctggaagcagagaggtgcctgagagccattggaagacccaagtcaggggaatgcacctggctctgtgtcccatgggccctgtgaggatatgac

SEQ ID NO: 37249 - DNA, 201 bp, Homo sapiens
ccctccaaacagaatctagattttccatctttccatctccaccccagccaaccttatgcatcatctctggaggtctgcaaaagtcttttcacttcttccctttttttttttttaaacctgccagggttggggaggggatctcccccgctccaccgccccccccgcctccccccccccccgcctgcctccaccccacccctt

SEQ ID NO: 37250 - DNA, 201 bp, Homo sapiens
gaaatagaatcatctgaaacctttaaaatatacagatgttggccgaacatggtggcttacacctataatcctagcactttgggaggctgagatgggaggtytacttgaacccaggagtttgagaccagcctgggcaacatagtgagaccctatgtctattttttaaaaagattttttaaaattaaagacagatgcccagtc

SEQ ID NO: 37251 - DNA, 201 bp, Homo sapiens
tgcccactggctgggtgaagtggctcacgcctgtaatctcagcacttgtggggctgaggcaggcagatcagttgaagccaggagtttgagaccagtttcaygtggccaacatggtgaaaccccgtctactaaaaatacaaaaataagccagatgtggtgtcatgtgcctgtagtcccagctactcaggagagtgagacagg

SEQ ID NO: 37252 - DNA, 201 bp, Homo sapiens
acaccggtcatattattgaggtatgtgttattattattatttaatattttacttaatttgtgaacatctttacatttagttttgaattggtgctacattcrcatggttcagaatcaaaacataaaaggtgtaaattgagaagtcttgcttccagctgtctcctgttcacctgttctccttgacttcctcactatggggaac

SEQ ID NO: 37253 - DNA, 201 bp, Homo sapiens
tttattaagtagtgagtattccgtcattggaagtattaagcccaagctaaatggtcaactgtcagggaaggatggtgagaggattccagtgggttagagghcaaagagcgtctaccaggtgcaaaagtcttaattaacaaagtactatcaaaaccaaattcatgtttgggaaactgtatatccacatgcaaaagaatgaaa

SEQ ID NO: 37254 - DNA, 201 bp, Homo sapiens
agaaacatcattttcccagtgagccaaggcaatggtgttagaactatctctacctggctccagagcttgtgtttatgcccctgcaccgatacggccttccrtgaagcccggcccagaaagctttggagtctggttacatctctgccatgcaggcctggccttcccaggacaagaggtgaggaggggggctgtcggggtcct

SEQ ID NO: 37255 - DNA, 201 bp, Homo sapiens
ccaaaaactttaaaaatggacaaagaggccaggtgtagtggctcaagtctgtaatctcaccactttgtgaggcagaggcaggaggattgcttgagctcagragtttaagaccagcctgggcaacatagtgaaactttgtctctacagaaaaatttaaaaattagccaggcatgctgcacacctgtagtcccagcttacttg

SEQ ID NO: 37256 - DNA, 201 bp, Homo sapiens
tctggaatcctcccccttggttctgtgtctctctcctaccatcccatccttccttccaggcagatgtggagtcaggaccatacctggtgggtcctgggggragccctggccccagtccgacatcctcctcctgctgctatggggtcccgcacagtgcacaacctcttcatccttgagggagctcctgctggcccctctcag

SEQ ID NO: 37257 - DNA, 201 bp, Homo sapiens
taaagggcacggtggaggctgctaaacttgagagaaggactctgaggagggcaaggggcgcacctgagggagtggggctgctaagtctcacttgatagackccacagttttgcaacttggatctgggccttcacaaaccttcgcgaacccgcagccccacccctcgggtcagccaatgtcttctgtggggctgggagccag

SEQ ID NO: 37258 - DNA, 201 bp, Homo sapiens
tcatctgaaacctttaaaatatacagatgttggccgaacatggtggcttacacctataatcctagcactttgggaggctgagatgggaggtttacttgaayccaggagtttgagaccagcctgggcaacatagtgagaccctatgtctattttttaaaaagattttttaaaattaaagacagatgcccagtccctatcaca

SEQ ID NO: 37259 - DNA, 201 bp, Homo sapiens
ttgtccaggcttgtcttgaaccccagcctcaagcaaatcagcctcccaaagtgctgggattaaaggcaggagccatggagcacctggcccaagtgtttaaygagcttctgggcacttctgataccaggtgccctcagaccgcactttgaaaactcctcaaggaggcctctcaatcacctgatcaccaaaccctgtgtgagg

SEQ ID NO: 37260 - DNA, 201 bp, Homo sapiens
gatcagagggggaagtgacttgtccaaggacagaaggtcacctcgggtattcaggggctccagccagcatgggaatgaatggtgggctctctgtggacccrggcaatgtcttgaaagacattggtgaacaagacggctctgcaaacgccttgccatgccgttctccccctcctcccagggctggctggaagcagagaggtg

SEQ ID NO: 37261 - DNA, 201 bp, Homo sapiens
ggagttcaagaccaccctagccaacatggtgatatcctgtctctacttaaaatgcaaaaattagctgggcatgatggcatgtgcctgtaatatcccagccwcttgggaggctgaggcaggagaatcacttgaacccaggaggcggaggttgcagtgagctgagattgtaccactgcactccagcctgggggagagagttga

SEQ ID NO: 37262 - DNA, 201 bp, Homo sapiens
gcacctgtagtcccagctacttgggaggctgaggcaggagaattgcttgaacctgggaggcggagggtgcagtgagccgagatctcgccaccgcactctakcccggcagcagagcgagagttcgtctcaaaaaaaaaaaaagaaagaaagaaagaaagaaagctatgccccttgaagaataatcaaagatccaaaagagtt

SEQ ID NO: 37263 - DNA, 201 bp, Homo sapiens
ccactggactgtgtcccatctaccattgtattcccaggacccacttgatataaataggctggatgaataactgagtgaataaaggatggaaatcgtccatygaaacagtcaacatttattcagcaccttctgcgtgcatcgttgtgggtggtggagatgcagcagggaagaccatgggcaaaatatccccctcagaggggt

SEQ ID NO: 37264 - DNA, 201 bp, Homo sapiens
gacaagctctgggtgaggggatggaggggaccccatgcctggagctcaggaaggaggatttggagttcaaggcagaagtggcaatgagattttaaccgatygttttctgctcagggaacttcagggttccctctggattcttgacctgcttcagtttgctgactcactggctttgggcaagtcattttccctctccgtgcc

SEQ ID NO: 37265 - DNA, 201 bp, Homo sapiens
ctctacctggctccagagcttgtgtttatgcccctgcaccgatacggccttccatgaagcccggcccagaaagctttggagtctggttacatctctgccaygcaggcctggccttcccaggacaagaggtgaggaggggggctgtcggggtcctcactgtgtctggactcagaaatcccaaagagaggatgaagtgtagaa

SEQ ID NO: 37266 - DNA, 201 bp, Homo sapiens
ggacggaaacactgaggccgtcaggggagtggcagctggccacagactgaaccatagacttggggcccagacctggggcccctcacggagcctcagagggygaaagggacttgctcaagtccacgcagcggtggtgggtgagctttgtcttaacaacgagcactttctacttcatcacagaccatgagtggcattgtgttt

SEQ ID NO: 37267 - DNA, 201 bp, Homo sapiens
aaaggccactgtggcttaatcaaatcaggcacccacaaagcttcaagactggaaaagatgccttggctaacccacccatttagtggacggaaacactgagsccgtcaggggagtggcagctggccacagactgaaccatagacttggggcccagacctggggcccctcacggagcctcagagggtgaaagggacttgctca

SEQ ID NO: 37268 - DNA, 201 bp, Homo sapiens
ggaaacccagcccttgttccacttgccaagcgaagtgcccatggagctctgcctgcccagagtggggtgcctttttcttatttgccctagggcttcatgtragctgctgggtgtcctgccccagctctggttccagccactgtgtgtccttgggcaaggtcatttccctccctggccttggtttcccattggagaagtttt

SEQ ID NO: 37269 - DNA, 201 bp, Homo sapiens
caacggcagataccaggtaggtcccctccctttctcttccttgagctcctaaaatgccaatcataccaccctctgcactcggcaaaggccactgtggcttratcaaatcaggcacccacaaagcttcaagactggaaaagatgccttggctaacccacccatttagtggacggaaacactgaggccgtcaggggagtggca

SEQ ID NO: 37270 - DNA, 201 bp, Homo sapiens
cagccctcttcctggagctgggatctgacacttgctgataccaacggcagataccaggtaggtcccctccctttctcttccttgagctcctaaaatgccamtcataccaccctctgcactcggcaaaggccactgtggcttaatcaaatcaggcacccacaaagcttcaagactggaaaagatgccttggctaacccaccc

SEQ ID NO: 37271 - DNA, 201 bp, Homo sapiens
gggacaaataagaagaacaaaggcagacgtggagatgatagtaggggttgccaagctttctggaaaggagcagagagtattttaggctttatgggccatayagtctccatcccaactactcaactttgctggcatagtgcaaaagtagccacagatagcttataaatgaaggtgtgtagggctgtgttccaataaaactac

SEQ ID NO: 37272 - DNA, 201 bp, Homo sapiens
gggcagcacgagcacagtcaaaccagaatggctgctgcaggagccatcagcatgactgtgtggcagctgctcacagagcagggactaacatgggaaccagrctagcttttgcgtccctttctgagtctccagtctatccgggtttgcagaacattaatcaaggttaattaggcccacctgtgacataaaaatttctaccta

SEQ ID NO: 37273 - DNA, 201 bp, Homo sapiens
ctttttctatgaaccaatcaagcagatttatgtatttttttcagtgccgtaaaaaaaatttgatgattttgaggcttaacatcaaataccagtgagatcamaagttagatatgacatcatacacatcatttctgctgaaaaagtacctttagttaaaaacagaaaccaatttgtaaatgtgaattaaatgcatactccaca

SEQ ID NO: 37274 - DNA, 201 bp, Homo sapiens
tgtgaagggtctacacgttcaacctcttccttgtaagttaatgagttagctaccaagttttgaggaagctagcagaaaacaggagacccaggatcagatayagaggacttcgttactcatggcagagcaaacagcatgagctttatttctgcactgattcccattgccctggcccctagtcccacagggaggatgtggaac

SEQ ID NO: 37275 - DNA, 201 bp, Homo sapiens
gtaaactacttgaaggcaattcctgtgcttaaaatggccacgtgaaaggtgtccctgacatggaaaggacaaaccatgaaatgacccttgaagctcttaakgtgtctgtcaaaaaagcaaagccaactgtcaaactgaaaagccaaaatcatcacaaaaacacctattcttcagaggcctcaaatctcaaactatctccca

SEQ ID NO: 37276 - DNA, 201 bp, Homo sapiens
tcccatctcggcctcccaaagtgctgggattacaggtgtgagccaccgggcccagccgtaggaacacagatattatcatcatgggacaagtcatccattcycagattccatgaccctctctggtgtccactgtggatttcagcacatgtttaactatgaaactctagtcacgctttttgatatacaggttcatggttacta

SEQ ID NO: 37277 - DNA, 201 bp, Homo sapiens
cctgggttcaagtgattctcctgcctcagcctcctgagtagctgggattacaggcatgcaccaccacaccggctaacttttgtatttttagtagagatagsgtttcaccatattgatcaaggtggtcttcaactcctgacctcgtgatcctcccatctcggcctcccaaagtgctgggattacaggtgtgagccaccgggc

SEQ ID NO: 37278 - DNA, 201 bp, Homo sapiens
ttgattcatttgtggtttcctgttttccataaggagatagttacaggattaaatttctcctcccttttccctatgcactcacacctgggtcccaggacagmaggaccaatcgtcaggaaaatacatccatactgcatcccctgatacttcatctcaggttgggcaggagggttagcagaagagttatttccctttgcgaag

SEQ ID NO: 37279 - DNA, 201 bp, Homo sapiens
ctcggctcactgcaacctccgcctcctgggttcaagtgattctcctgcctcagcctcctgagtagctgggattacaggcatgcaccaccacaccggctaayttttgtatttttagtagagatagggtttcaccatattgatcaaggtggtcttcaactcctgacctcgtgatcctcccatctcggcctcccaaagtgctgg

SEQ ID NO: 37280 - DNA, 201 bp, Homo sapiens
tgggaccaagtgaaagcacttggctggatcagagggataggagcctggctgctcctaaaacaagacactacttgcctttgatgttcaagtcatttaagaaygcaattgcttcctactcaatttttcaaaaccaaaataacaaatacgatatgagccataacttagcaaaattacgtgttttaaacagtctctttcaaaaaa

SEQ ID NO: 37281 - DNA, 201 bp, Homo sapiens
tttatgacactgaaatcagaattccatatcattttcctccttcaagaaataatattctcctctttattcttttttgcagatgattgaaaatgtaagaactrttctgagcctgcaggccatagccaaagaggtaccggctgtattttgtccatgggcaggagcttgtgactgctggtctaggtcattccaggtcaaccaggg

SEQ ID NO: 37282 - DNA, 201 bp, Homo sapiens
tcatgcctcagcctcccaagtagctggaattacaggcgcacaccaccatacccagctaattttgttatttttagtagagatagggtttcaccatgttggcyaggctggtctcgaactcctgacctcaagtgatctgcctgcctcggcctcccaaagtgctaggattacaggcgtgagccactgtgcccggctggctttcat

SEQ ID NO: 37283 - DNA, 201 bp, Homo sapiens
aaacgtgactcaagatggcacagaacagcgtccacagatgtattcttggttacttaaaaacacaatttaaagtaattagcttaatgttgatgtaattctaragatcgataaataaacctaaaaatcttaatttgatattgaatcgccccaaattaaacaacatattttcaaaccactaaatattgattcatttgtaagatg

SEQ ID NO: 37284 - DNA, 201 bp, Homo sapiens
ctgaagtgccagtccaattcatcctccagcatagcaccactgactgaccccagtcaacaccacaaggggcagaagagtcactccactgagccctaacttasagaaatcacaagataaaacaaaatggttgttgttttaagcctctaagttttggggtaatgtattatgcggctatacataaattggaacatccacgtttta

SEQ ID NO: 37285 - DNA, 201 bp, Homo sapiens
ggaccagctgaagtgccagtccaattcatcctccagcatagcaccactgactgaccccagtcaacaccacaaggggcagaagagtcactccactgagcccyaacttagagaaatcacaagataaaacaaaatggttgttgttttaagcctctaagttttggggtaatgtattatgcggctatacataaattggaacatcca

SEQ ID NO: 37286 - DNA, 201 bp, Homo sapiens
tactttcttttggaatcctctgggagccctgagccaccatgtaagaaatctgatggccctatatctgccatgcaggaaaggccatgtgtagggctctgggyaagagtccctcagctgagccaagcatcccagtcatcctcgtgaaagtgccagacccatgggtgaccatcctggaccagctgaagtgccagtccaattcat

SEQ ID NO: 37287 - DNA, 201 bp, Homo sapiens
caataaaaaaagtgatctattctgagttccataccaccccaaaacactgatcagcttggggaaacttagaaagttcaaccacctggggataaagtttggamaactaggctagggccaattcagggtacaggtggaggctaggaagtttggcataggatatcattaaaggtcttctaaggatgaaggcaattggagctacac

SEQ ID NO: 37288 - DNA, 201 bp, Homo sapiens
gggacaggtcaaggaaggtattacctctgcatagttctaggtgtcctgcttaactcattcaggaatttcgggccagagggatatccaacaggaattctaamctgaagagtttagaaaccagtaggagaatcaggatgaattcagaaattactataatatgcattttcaagtgataaatcccatcaaaaacagaaaaagtgc

SEQ ID NO: 37289 - DNA, 201 bp, Homo sapiens
aaactgacccagaaaagggacaggtcaaggaaggtattacctctgcatagttctaggtgtcctgcttaactcattcaggaatttcgggccagagggatatycaacaggaattctaacctgaagagtttagaaaccagtaggagaatcaggatgaattcagaaattactataatatgcattttcaagtgataaatcccatca

SEQ ID NO: 37290 - DNA, 201 bp, Homo sapiens
gaaatcatgaagggcaaactgacccagaaaagggacaggtcaaggaaggtattacctctgcatagttctaggtgtcctgcttaactcattcaggaatttcrggccagagggatatccaacaggaattctaacctgaagagtttagaaaccagtaggagaatcaggatgaattcagaaattactataatatgcattttcaag

SEQ ID NO: 37291 - DNA, 201 bp, Homo sapiens
aactttcagacattaaatatcctagcccccgtccctcaccaaattgccaggtgtgggtggaaagcaacagattttatttttaatgggctaaaattttacartcttaaagcacaattcatgcaagcaactgagagatcacagctacaaacactggactttctattttctccatgcgatcccaatttcagctgcagagccaga

SEQ ID NO: 37292 - DNA, 201 bp, Homo sapiens
gagcacaggtcagaaggatgaatacacagagggagaaaactgcaacttccctcaaggagagaatgctagaaatggcaatgggcaggaaagaaaggatcctkacatcattttatagagagtcgttcatcccttacacaaacctggccaaaaatctacagaatgctgaggaaacacggctattcaacaagaaaatcggagctt

SEQ ID NO: 37293 - DNA, 201 bp, Homo sapiens
atatttattaaatatcccatcacagagaaactttgctgactcttgcacaaaacttcgcattttgtcagccagtaatgaccctttcctcttaagctagtttraatttggagctttttgtgtgtaagaggaaactcctgatctactaaaagaaaaagctattcttagtccttcccagatatccctgaacctccacccacccag

SEQ ID NO: 37294 - DNA, 201 bp, Homo sapiens
ctctgagctgtgaacacactactgcactccagcctgggtgatgaagtgagaccttgcctcaaaaaaacaaacaaaacaaaatgaacattcacactagaaasgagaaacagggacgctaaagctgaagtcaaatttcaccaccaaataaatttgctataaatatacaataaatttgtttttgcttttcagatctctttgggt

SEQ ID NO: 37295 - DNA, 201 bp, Homo sapiens
gtggggaatgaggagagtaaacagcagtgcctcccacggagctccctgcaggttctccttgtaggagtgagattttgctggtgatttatattgtttgagasatacccaaagagtcttgtgtcactcaatccccagctccatccctggctcggaggagcctgcaccgcctcacgggagcctgtaactgtcaaatggcattcc

SEQ ID NO: 37296 - DNA, 201 bp, Homo sapiens
tacaaaattagccgggtgtggtggcacatgtctgtaatcccagctactcgggaggctgcggcaggagaatcgcttgaacctgggaggtagagatcacggcragccaagatcacaccactgcactccagcctgggcaacaagagcgaaactccatctcaacaacaacaaaaaaagtaatttagcacatatactgcatattac

SEQ ID NO: 37297 - DNA, 201 bp, Homo sapiens
cattgccctggcccctagtcccacagggaggatgtggaacagcccggtagatgccgtgctcatagtacgtttcagtcatggctgaggagccccaagcttasaaaccccaacctttatcaagcaaatctgccaaaccgttgtcctggaaggaggcactgtctttattatactggaaagaaagccatcctgtcctctgctcct

SEQ ID NO: 37298 - DNA, 201 bp, Homo sapiens
tcttccttgtaagttaatgagttagctaccaagttttgaggaagctagcagaaaacaggagacccaggatcagatacagaggacttcgttactcatggcasagcaaacagcatgagctttatttctgcactgattcccattgccctggcccctagtcccacagggaggatgtggaacagcccggtagatgccgtgctcata

SEQ ID NO: 37299 - DNA, 201 bp, Homo sapiens
ggaggtcaggacgttgagagatccccaaattgcaagttgtcatcctgagacaagcgataccttgctggacactaattcattcttggagtctctccctctcrgccctttggcttcatgttctggagagaatgaccagagagacccatttactcaacgcttctcaatgagacagggatcttctaaagggcactgtcttatata

SEQ ID NO: 37300 - DNA, 201 bp, Homo sapiens
agccgagatggcgccactgcactccagcctgggtgacaagagtaaaactccctctcaaaacaaacaaacaaaccaaaaaaacaaatagcaacagcaaccayaatcatcatcaccatcaaggctggaacaaggatgaggcaggcaggctctgatagcaacaggaggaagcagaccaaggagggagagaaaggaaggcagaga

SEQ ID NO: 37301 - DNA, 201 bp, Homo sapiens
tgaatctgagcaatgatgtcataataatcatcaatagcaacagtggctgcgcgtgaggggcgtggtggttcacgcctgtaatcccaacactttgggaagcygaggtgggcagatcatttgagctgaggagttcaagaccagcctggacaacatgctgaaaccccatctctactaaaactacaaagaattagccaggcatgg

SEQ ID NO: 37302 - DNA, 201 bp, Homo sapiens
gacagataataaatacccctcatcagctgatcaattgctcgcacttccaggcaagcacccatcactccccaccaaacacaccgccccacgccacctgaacraggttaaaagaacggactcatgactgatggtcggggggaactggcttcagaagaggaagttgaaaatattaagaaatcaacacgggcatttaaaagcaaa

SEQ ID NO: 37303 - DNA, 201 bp, Homo sapiens
cctcaaaccctggttccacgtctccctcactcaaggatttatgtctcattttcaatggaatgttacatttggtcagaccacgaagaaaactcctcattatraactaggaaatgtgtggagagagaattatttacccaaggcagtgctcaatcagtgttgcccgaatatttatttagcccacacacggagaagttgtgttaa

SEQ ID NO: 37304 - DNA, 201 bp, Homo sapiens
acccagtctgctgggatcctgatatagtttggatatttgtccccgctcaaatctcatgttgaaacatgtccgtaatgggaggtatttgaatcactggggcrgagccctcatggcttggcgctgtcttcaccatagtgagtgagatctctggagatctggtcattttaacccttttcccatttgccccaagaatacttactg

SEQ ID NO: 37305 - DNA, 201 bp, Homo sapiens
ctggggtccaaggatttatttcctctctcgggagtcagggacagataataaatacccctcatcagctgatcaattgctcgcacttccaggcaagcacccakcactccccaccaaacacaccgccccacgccacctgaacaaggttaaaagaacggactcatgactgatggtcggggggaactggcttcagaagaggaagtt

SEQ ID NO: 37306 - DNA, 201 bp, Homo sapiens
aacccccatcgggaagagactattatcatctccttatcacccacagggatgctgaggttacgaggtatcaagggacctacccaccattgcacaggcagaamacaggagagccaagactgacacccccagcaggaggtgttccagccaccttggacaccttccaccacaggctgagccgcagtgaagggctttcagaggggc

SEQ ID NO: 37307 - DNA, 201 bp, Homo sapiens
tggagttagcctttgggccataattggttcattcctaccttttcataatctcagttattgatcaggtgatttttcaaactgtgaagggtctacacgttcamcctcttccttgtaagttaatgagttagctaccaagttttgaggaagctagcagaaaacaggagacccaggatcagatacagaggacttcgttactcatgg

SEQ ID NO: 37308 - DNA, 201 bp, Homo sapiens
aatcagtcagactttgaatcattcctgcagcctctgaacatttaccatggagctcaataagccaggcaagaacacagatttttttttttttttttttttttgagacggagtctcactctgtcacccaggctggagtgcaatggcgtgatctcggctcactgcaacctccgcctcctgggttcaagtgattctcctgcctca

SEQ ID NO: 37309 - DNA, 201 bp, Homo sapiens
gagcaaacagcatgagctttatttctgcactgattcccattgccctggcccctagtcccacagggaggatgtggaacagcccggtagatgccgtgctcatrgtacgtttcagtcatggctgaggagccccaagcttacaaaccccaacctttatcaagcaaatctgccaaaccgttgtcctggaaggaggcactgtcttta

SEQ ID NO: 37310 - DNA, 201 bp, Homo sapiens
actaaaagaaaaagctattcttagtccttcccagatatccctgaacctccacccacccagtctgctgggatcctgatatagtttggatatttgtccccgcycaaatctcatgttgaaacatgtccgtaatgggaggtatttgaatcactggggcggagccctcatggcttggcgctgtcttcaccatagtgagtgagatct

SEQ ID NO: 37311 - DNA, 201 bp, Homo sapiens
aacctccacctcccgggttcgagtgattctcctgcctcagcctccccaatagctgggattacaggcacgccaccacacccagctaatttttgtatgtttgstacagacggggtttcaccatgttgcccaggctaggttcaaactcctgacctcaagtgatccacctgcctcagcctcccaaagggcagagataactaattt

SEQ ID NO: 37312 - DNA, 201 bp, Homo sapiens
tctactaaaagaaaaagctattcttagtccttcccagatatccctgaacctccacccacccagtctgctgggatcctgatatagtttggatatttgtcccygctcaaatctcatgttgaaacatgtccgtaatgggaggtatttgaatcactggggcggagccctcatggcttggcgctgtcttcaccatagtgagtgaga

SEQ ID NO: 37313 - DNA, 201 bp, Homo sapiens
aatttatatttaaattttaatcaataacttttttttttttttttttttgagatggagtcttactctgtttcccaagctggagtgcagtggtgtgatctcgrctcactgcaacctccacctcccgggttcgagtgattctcctgcctcagcctccccaatagctgggattacaggcacgccaccacacccagctaatttttg

SEQ ID NO: 37314 - DNA, 201 bp, Homo sapiens
gtgacacatgaaaatgtatatgaaattcaaattccagtatccataaataaagtttctcgcagccatgcctgctcctttacatatcgtttatgcctgttttygcactatgagggcagagttgagtagttggcaacaaacactacaaggccccaaaatatttattaaatatcccatcacagagaaactttgctgactcttgca

SEQ ID NO: 37315 - DNA, 201 bp, Homo sapiens
ttctgcactgattcccattgccctggcccctagtcccacagggaggatgtggaacagcccggtagatgccgtgctcatagtacgtttcagtcatggctgargagccccaagcttacaaaccccaacctttatcaagcaaatctgccaaaccgttgtcctggaaggaggcactgtctttattatactggaaagaaagccatc

SEQ ID NO: 37316 - DNA, 201 bp, Homo sapiens
ctccttctctcttaaaaaagaaggaacatgatatgccacttgcaagattaggatattctgtttaaaaagaggggataatttaagcagggctggcggtgggrgcggggagacaatggaaaaggctgacatctcctgagcatggctcaagaaggcataattcttccgcatgtataagaataaaacctcttaactcatctccca

SEQ ID NO: 37317 - DNA, 201 bp, Homo sapiens
gggaaagaataatattttgtgacacatgaaaatgtatatgaaattcaaattccagtatccataaataaagtttctcgcagccatgcctgctcctttacatrtcgtttatgcctgtttttgcactatgagggcagagttgagtagttggcaacaaacactacaaggccccaaaatatttattaaatatcccatcacagagaa

SEQ ID NO: 37318 - DNA, 201 bp, Homo sapiens
aaagtttcagttagcctcagtccctgatgatctgcaggaatttctccttctctcttaaaaaagaaggaacatgatatgccacttgcaagattaggatattytgtttaaaaagaggggataatttaagcagggctggcggtgggggcggggagacaatggaaaaggctgacatctcctgagcatggctcaagaaggcataat

SEQ ID NO: 37319 - DNA, 201 bp, Homo sapiens
tatctgtagtctcctggctgatgaggtgtgcagcctggattagaacctccatctgcctgacctggctgcacacaatgcttgttaagttatcccggaaaacrtaaggccatacaggtgtggcagactaattaaattcaccatgctctttgggctgtgtgactgctaccaaaatgtcctaccctacctcacatattcccttgt

SEQ ID NO: 37320 - DNA, 201 bp, Homo sapiens
gccaagatgggacagtgctcgtctgccagtggcagccccattcggagagaattttccctttgaagaatataacccataaaagatcatcaaaactaagggawtaaataaagaggggacctcgatgacatatttaagctctgaataaagctagactctaagcaggggttggcaaactataaccgctgggccaaacacggctgt

SEQ ID NO: 37321 - DNA, 201 bp, Homo sapiens
ctgtggcttttgggccaagggtagtggggaaaacagcttcttgtcactgggggaacaagccaagatgggacagtgctcgtctgccagtggcagccccattyggagagaattttccctttgaagaatataacccataaaagatcatcaaaactaagggaataaataaagaggggacctcgatgacatatttaagctctgaat

SEQ ID NO: 37322 - DNA, 201 bp, Homo sapiens
caagggctgcgcccgggaaatgtgggagcaaaggtgccagaccttccagttttttaagagaaaccaagaatccaggtttttatgcgaactttaaaaaaagrggatgtgggggtgggggcagcaaacacatgcctgcaggctgaattcaccacccccctccacgttttagatcttataattacatcttctctttaggatcct

SEQ ID NO: 37323 - DNA, 201 bp, Homo sapiens
ctaggccaatcctggttctccctgtggcttttgggccaagggtagtggggaaaacagcttcttgtcactgggggaacaagccaagatgggacagtgctcgyctgccagtggcagccccattcggagagaattttccctttgaagaatataacccataaaagatcatcaaaactaagggaataaataaagaggggacctcga

SEQ ID NO: 37324 - DNA, 201 bp, Homo sapiens
tagaagctatagatttgtgtgtccagaatgtttccccaggtgcctccttttgcaaaattggacctcatttttccattagggaacggggcctctcagactcygtggagaagcagagaattatctccagccttgactgcccaggctgcagagaaccgcatcatccggggacatgactgattcagggataggtgtctgcctaaa

SEQ ID NO: 37325 - DNA, 201 bp, Homo sapiens
accataaaaggatcatagcagattgacggtagaagctatagatttgtgtgtccagaatgtttccccaggtgcctccttttgcaaaattggacctcattttwccattagggaacggggcctctcagactctgtggagaagcagagaattatctccagccttgactgcccaggctgcagagaaccgcatcatccggggacatg

SEQ ID NO: 37326 - DNA, 201 bp, Homo sapiens
ttgctgaccactagtaagagaccatccaacaggctcctttctgaagccacatcccgaaaagatcccctcctgatgtctctagaaacatgcaaaaataaaaytgcaacgtcagaaccataaaaggatcatagcagattgacggtagaagctatagatttgtgtgtccagaatgtttccccaggtgcctccttttgcaaaatt

SEQ ID NO: 37327 - DNA, 201 bp, Homo sapiens
tccctccaggtgaaggtaatgattaagaacacaggtctggagtgggtttgaatcactgtgtgttcagccgctcactggggacctggcctcagccctctgaytactgcagggctttattactttctgagttctctttgctatctcactcgccctttcctcccatttctccttctggtgccccttctccccttccaggccccc

SEQ ID NO: 37328 - DNA, 201 bp, Homo sapiens
atgtacccaataagcagtccttacaataccaatagtttctatctgttgggcactgccaattagccaggcatgtcaaatggaagatctcacttaatcttgcmaaaaaaaaaatgttgttcgttgttgttccttctattacagaggaaaaaacaaaggcagatggaggttacattatttgcctaaagttacacagctagaaag

SEQ ID NO: 37329 - DNA, 201 bp, Homo sapiens
tgttcccaaagcatcggggttcagcggtaatgtttttgaatcttctcgggtgtaagtaaatatatttcagacagcttttagaatgaagttagctagaagarttttgcagcaatagaagctgatttgatgtagaccttcaggtttcttatctatttattggtgctgctcagttggatgggaaagagaggagaagctgagaga

SEQ ID NO: 37330 - DNA, 201 bp, Homo sapiens
tctgcttaagcaacaaagagagaagtaaccgcaaacgctaatttatccagcggaatttacatttctctttctcggcaatatagtttcttagtgtcttccamgtttttaaatcctttaggtttattcattatgttcctttttcctgcttctaaaaggtagctgttcttgcccactgttttggaagtaagaaaacctaggagc

SEQ ID NO: 37331 - DNA, 201 bp, Homo sapiens
cttttttttttttttttttttttttgagatggagtcttgctctgtcgcccaggatggagtacaatggtgcagtctaggctcactgcaacctctgcctcccrggttcgagtgattctcctgcctcagcctcctgagcagctgggactacaggcacatgccaccatgcccgactaatttatgtatttttaatagagatggggt

SEQ ID NO: 37332 - DNA, 201 bp, Homo sapiens
ttctcaagagaagctggaaggtagggtcagagagattacagtgagaagtgaagcggtagaggccagtaggtttagaaaccagtgctgtgggctgacagggrgtgacaatttccagctttggttctcctcatttaggagagacatgaagtctcatggtgtggtagacaggccacacaagactggaagtctgaagtgtgctca

SEQ ID NO: 37333 - DNA, 201 bp, Homo sapiens
gtttgctgccaaataaataccctgctgctctacaggttgcaaatatttcaatcattgtgcagatctgcacaaacttggaaagaaaactcatgcaatctcawggccttatttccccttcctacataagagaaacatacatgcctaaaccttcactttccaaatgtttactagaagattagaaaaacaacagatgacaggcaa

SEQ ID NO: 37334 - DNA, 201 bp, Homo sapiens
ctcagccctctgattactgcagggctttattactttctgagttctctttgctatctcactcgccctttcctcccatttctccttctggtgccccttctccycttccaggcccccagcccccagcccccaccccacagccatctctgtattaaatgtttgtggaatgttcaccgttcaaaagccacgttctagtttgaggct

SEQ ID NO: 37335 - DNA, 201 bp, Homo sapiens
agtgaatgagttctctgcatacatgttgttctctgcctggtaccgtggaggtcaggctcgcacagaagcatacttatggtcagagttagtcaataaaaaaagtgatctattctgagttccataccaccccaaaacactgatcagcttggggaaacttagaaagttcaaccacctggggataaagtttggaaaactaggcta

SEQ ID NO: 37336 - DNA, 201 bp, Homo sapiens
tatttttaccccctcttaaattggaatcatggtatagcaggcaggatacaaacttctcatttccattacacattttcagtgccatcattaatctgaatgayatcaacaaaatgcccaatgcacataaatcagtcagactttgaatcattcctgcagcctctgaacatttaccatggagctcaataagccaggcaagaacac

SEQ ID NO: 37337 - DNA, 201 bp, Homo sapiens
agtctctttcaaaaaacaatagattaaaaagtgcaatatttttaccccctcttaaattggaatcatggtatagcaggcaggatacaaacttctcatttccrttacacattttcagtgccatcattaatctgaatgacatcaacaaaatgcccaatgcacataaatcagtcagactttgaatcattcctgcagcctctgaac

SEQ ID NO: 37338 - DNA, 201 bp, Homo sapiens
aaaactttatgacactgaaatcagaattccatatcattttcctccttcaagaaataatattctcctctttattcttttttgcagatgattgaaaatgtaaraactattctgagcctgcaggccatagccaaagaggtaccggctgtattttgtccatgggcaggagcttgtgactgctggtctaggtcattccaggtcaac

SEQ ID NO: 37339 - DNA, 201 bp, Homo sapiens
ggagacccaggatcagatacagaggacttcgttactcatggcagagcaaacagcatgagctttatttctgcactgattcccattgccctggcccctagtcmcacagggaggatgtggaacagcccggtagatgccgtgctcatagtacgtttcagtcatggctgaggagccccaagcttacaaaccccaacctttatcaag

SEQ ID NO: 37340 - DNA, 201 bp, Homo sapiens
taaaataaaggagaaactcattggagaggctaatgcggcgtgcactggaggtagctactatcactaagcattaagataaacaatacgagtggcattctggyccacgcctggcaaagtgcaggagtccctggaggaaaaggaatgagagtgcatcagcgacctcgtgaggcagtgcagctttgcattaatgcctgcagctct

SEQ ID NO: 37341 - DNA, 201 bp, Homo sapiens
atagcttaccatacattaaaagtatcctcttacctaattttatatgtatgtatgtatgtatgtatgtatgtatgtatgtatctatctatctaccttaccayacattaaaatcttacatttctacacgtgcaggactagaatgaacacacataaagcatgataccaatctgcttttttggccaccatataaacattctatgc

SEQ ID NO: 37342 - DNA, 201 bp, Homo sapiens
ggctagaatgcagtggtgcaatcatagcttaccatacattaaaagtatcctcttacctaattttatatgtatgtatgtatgtatgtatgtatgtatgtatstatctatctatctaccttaccatacattaaaatcttacatttctacacgtgcaggactagaatgaacacacataaagcatgataccaatctgcttttttg

SEQ ID NO: 37343 - DNA, 201 bp, Homo sapiens
ctcaactttgctggcatagtgcaaaagtagccacagatagcttataaatgaaggtgtgtagggctgtgttccaataaaactacttcagatctctctggaayttcaataaaagtttttaaaatttagttatgaacactgaaatttgaatttcatacaatttttacatgtaataaaacattattctattggttttttccccca

SEQ ID NO: 37344 - DNA, 201 bp, Homo sapiens
ggttaattaaaacaaaaggtaacatcctcagatcaccttaatctactctagatggtgccacaaggtgccaagtggtctctatttatttatttatttatttatttattttgagacagagtctattttgcccaggctggagtgcagtggcacgatttcagctcactgcaacctctgcctcccaggttcaagcaactctcgtgt

SEQ ID NO: 37345 - DNA, 201 bp, Homo sapiens
tggcagggagaggctctggaacccatcccttgagggccctggctctgcagatagtgttatcaaagcccttccagagccctgtctatcgctgggccttgcaktgagtcagcctccaagaaaacttgtttttttttttatatctcctgcttcaaaacaattactttggaacatagattattcaaccaaatctcaaaggagtgg

SEQ ID NO: 37346 - DNA, 201 bp, Homo sapiens
gtactcttactgaggatgtggcttcccttcaatttttcatttaaatataaattattcaacctgagtattcatgtagataattcttatttaggccttatttrtactgaaagaacctctaaactccagttaccctagactctttgtttatttatttatttatctatctatttatttatttattttttgagacatggtctcatt

SEQ ID NO: 37347 - DNA, 201 bp, Homo sapiens
tttaagtagtagactcaggatccttatattcagaggccccgctctcccctaagcctgagtcctggttggatcctctgaaatcagatagctgacaagaaacragagagaggggggtgtttaggggaagagaaatgcatttatgaaggatctcatgaatttaggcctagaagtagcatgtatcacttctgcccacatttcaat

SEQ ID NO: 37348 - DNA, 201 bp, Homo sapiens
cctcaaagagaacacttgtgaatgtctcttattagacgttaaaaggtatcacactctctggaaatacatagtaaagatgaagaaggaattaatgaaatcarctataacctaatagtagtggtaacagaaatttttaaatcctcttaaagttgctgcaactttaacttgagttatacttaagttaaaagagaatattaacag

SEQ ID NO: 37349 - DNA, 201 bp, Homo sapiens
ggaggagcaagactggcccaaaacactttccttgattggtggagacattctggaggaggagccaagctctgggctaaagtttacaggactcccagcggttmctcttacaggtaatgatttacagaaacagcaagcttttgaggggcggagaaagcaaattattaacaagaaggaaagtgtccaaggagttgccgaagtggt

SEQ ID NO: 37350 - DNA, 201 bp, Homo sapiens
agaaataaacaaatctaaagctcagaggcttaagtctgatgcagaattttttgcttaatggattttcctaggtggctgtcactttaagtagtagactcagratccttatattcagaggccccgctctcccctaagcctgagtcctggttggatcctctgaaatcagatagctgacaagaaacgagagagaggggggtgttt

SEQ ID NO: 37351 - DNA, 201 bp, Homo sapiens
tcatttgaggcgtttttcccttaccagtcaagtgttcctagaggaaggttgtataccagttaaaatctgccattttgcctcttagtacgcatgcttgagcmcacttgcccagttcctgagatcttattggaaagctgctgatcaccagctttaggtgttttctatctcttaggagactgcctttccctggcacctactgca

SEQ ID NO: 37352 - DNA, 201 bp, Homo sapiens
attctatagttatgtctcttgacaaatttgagaacttttcagctattatttcttggagtaaatttttagcccccatgttagatcttttatgatagtttcayaggtccctgaggctctgttcttttttttcttttttttcccattctagtttctttcttttgttcaggttgagtaaattctggcttccagttctttgatttt

SEQ ID NO: 37353 - DNA, 201 bp, Homo sapiens
ttctgcattccttccaatgaccatggaaaaattgtccaaggtcctagcgtgggtcaccttttccactgtggacttgacaccattccctctcccttactccrggatattactccctcagttattcttcctctctcttgcatcatcaatttctttctttctctgtcttttttttctttctttcattcttttctttctttcttt

SEQ ID NO: 37354 - DNA, 201 bp, Homo sapiens
taaactcaatggttacacttgttacaagatagactaaggcacattaaaattttaaagcatacatgtgagcaaactgatccatgaatcaggcagctccaaakgggaagtaattcagggctctattgcagggcacaaagggagggtgtttatagggtgaatgtggaagctgagcaaagaaattacttgattggtaaaggtttg

SEQ ID NO: 37355 - DNA, 201 bp, Homo sapiens
atgttgactgtgggccaacaggttggacaagcttgatttaggccaaacttaaatttagcctaaagctgcctcctcacatattttaacaaaactgagttttkgtttttcaagtttgcctccatatagtactcaaatatgcttgggacttgaaatatatatattttaacttgttatctgtatgctaatatttgatatcgtaag

SEQ ID NO: 37356 - DNA, 201 bp, Homo sapiens
ctgtcctgggccacatgttgactgtgggccaacaggttggacaagcttgatttaggccaaacttaaatttagcctaaagctgcctcctcacatattttaamaaaactgagttttggtttttcaagtttgcctccatatagtactcaaatatgcttgggacttgaaatatatatattttaacttgttatctgtatgctaata

SEQ ID NO: 37357 - DNA, 201 bp, Homo sapiens
gcagtgagctgagatcatgccactgcactccagcctgggcactccagcctgggcgacagagtgagactccgtctcaaaaaaaaaaaaatgtgtatacattrgttcagcctggaaagttgggacatctcaaaggaggaagaggctgggctttcaggtaataggtggatttaaagatctcctgattggcaattggttgaaagg

SEQ ID NO: 37358 - DNA, 201 bp, Homo sapiens
ttcttagaagagcagccctgaaccttgagttctcacatctgctttttcctcgtggcagtctaaagaagagggaggagcagtctgacaatccggaggagcargactggcccaaaacactttccttgattggtggagacattctggaggaggagccaagctctgggctaaagtttacaggactcccagcggttcctcttacag

SEQ ID NO: 37359 - DNA, 201 bp, Homo sapiens
gattaaaatataacacacatatatatacatatgtgtatatctatgtgcacatagatatatagatattcccctttaaaacataagttagttcatattacacrtatctcactttgaaaatcttttcttttttctttttttgtggagacggagtttcgctcttgtcacccaggctagagtgcaatggctcatagagtgcgatta

SEQ ID NO: 37360 - DNA, 201 bp, Homo sapiens
cactcagcagggctgagtaggtacaaaggccaggccaaatttgactcctctaggggcagactcaagttcacattggtttaaaattgggttccagcctgggygatcaggctgttgggtgagtttctcacacagcgtctgggtgtaatgaaagcacaaatgtgacaagtgctgccagtgaggctacaaagctagtgaaaggtg

SEQ ID NO: 37361 - DNA, 201 bp, Homo sapiens
ataggttaattaaaacaaaaggtaacatcctcagatcaccttaatctactctagatggtgccacaaggtgccaagtggtctctatttatttatttatttayttatttattttgagacagagtctattttgcccaggctggagtgcagtggcacgatttcagctcactgcaacctctgcctcccaggttcaagcaactctcg

SEQ ID NO: 37362 - DNA, 201 bp, Homo sapiens
ccaaatgggaagtaattcagggctctattgcagggcacaaagggagggtgtttatagggtgaatgtggaagctgagcaaagaaattacttgattggtaaargtttgaacaattgccttatttgcactgttctggtgggaagttcaagacaatatactaaagcccagttggctgcctgtgactggctgagcttatatttcat

SEQ ID NO: 37363 - DNA, 201 bp, Homo sapiens
agttaatgggtgcaacacaccagcatggcacatgtatacatatgtaactaacctgcacattgtgcacatgtaccctaaaacttaaagtataataataatamtaataataataaaaagcacttaccacttcagaaattccaagggttttagcggctatgtaccaggaaactggaatgaagatgaaatatatattttatagta

SEQ ID NO: 37364 - DNA, 201 bp, Homo sapiens
catgtcctttgtagggacacggatgaaattggaagtcatcattctcagtaaactatcgcaaggacaaaaaaccaaacaccgcatgttctcactcataggtrggaattgaacaatgagaacacatggacacaggaaggggaacatcacactctggggactgctgtggggtgggggggggggagggatagcattaggagatat

SEQ ID NO: 37365 - DNA, 201 bp, Homo sapiens
tacaatgaactcaaacagatttacaagaaaaaaacaaacaaccccatcaaaaagtgggcaaaggatatgaacagacacttctcaaaagaagacatttatgyagccaaaagacacatgaaaaaatgctcatcatcactggccatcagagaaatgcaaatcaaaaccacaatgagataccatctcacaccagttagaatggca

SEQ ID NO: 37366 - DNA, 201 bp, Homo sapiens
agcttccatgtcctcaccagatgttctaccctcctagaacttcctcatgctcatctacccagaagctccctgaacccagccctttttttttttttttttttgagatggagtcttgctgtgtcacccaggctggagtgcagtggcgtgatctcggctcactgcaagctccacctcccaggtttacaccattctcctgcctca

SEQ ID NO: 37367 - DNA, 201 bp, Homo sapiens
cccacaagagacagctttgcagggccatttcaaaatgtgtcaaagaaatatattttggggtaaaagactttgattttcttcagggcctgctatctgttatrtgatgctgtactagagtcattttagaatttggatcttattgctacaaagagtctgttttgtcagttttaagatcactgtttcaatgttaatgttggtcag

SEQ ID NO: 37368 - DNA, 201 bp, Homo sapiens
atgacttttgcccttaagaacataggccctcaaagtgccaagtttgccatagagaaacatatctgtcaaaactgggacccaggcactggtggaatgaaatkaattagaggtgatggggatcagtataggacactcagcagggctgagtaggtacaaaggccaggccaaatttgactcctctaggggcagactcaagttcac

SEQ ID NO: 37369 - DNA, 201 bp, Homo sapiens
tccagttagcaacagctacaacaaaacagcagcagtgaacacttattgaatatttgtatgtgcaactgacatgaatattttattcaatactcacaatgacytttaagatagatgctgtggctattctcattttactgatgaggaacatgaggattagaacaattaacttccccaaggtcacagaactagcaatgtggtgga

SEQ ID NO: 37370 - DNA, 201 bp, Homo sapiens
tgaattttttttaattgcagaaaaacctcagagtgttttaagaaagtttattaatttgtgttgggccggttgaatttcaaagctgtcctgggccacatgtygactgtgggccaacaggttggacaagcttgatttaggccaaacttaaatttagcctaaagctgcctcctcacatattttaacaaaactgagttttggttt

SEQ ID NO: 37371 - DNA, 201 bp, Homo sapiens
cttttacttctttattctctgtctgtatatctgtacctcttctcttggtctctctttttcttccttattgtggaaaatccttatgtatctctaaaagatarggactcttttaaaacctaatcacaataccatttaatacctgaaaaagccataataatcctctattaatataatttttcaaatttcatgtttccagattca

SEQ ID NO: 37372 - DNA, 201 bp, Homo sapiens
ctgtttttaagcacatgttgactgaacagtggctgagagctaagcacttgtcatgactgatcttactggattttcctaataacccatgatgtgagtattaytatttccattattattatttttaaatctaacagggaatctaaaccttggcttgggtaacttactcagagtttcacagccaggtcatggccaaagcagaat

SEQ ID NO: 37373 - DNA, 201 bp, Homo sapiens
tatgtaactaacctgcacattgtgcacatgtaccctaaaacttaaagtataataataataataataataataaaaagcacttaccacttcagaaattccargggttttagcggctatgtaccaggaaactggaatgaagatgaaatatatattttatagtatcataccatccaccaagcttttgatttctcattgaatttt

SEQ ID NO: 37374 - DNA, 201 bp, Homo sapiens
ttggctaatttttttgtatttttagtagagacggggtttcaccgtgtgttagccaagatggtctcgatctcctgacctcatgatccgcccacctcagcctyccaaagtgctgggattacaggcgtgagccaccacacccagccccttttgggtttcttagaggcttcattacacaggcctgactgattaaatcattggtca

SEQ ID NO: 37375 - DNA, 201 bp, Homo sapiens
ttctcctgcctcagcctcctgagtagctgggactacaggtgcccaccaccacacttggctaatttttttgtatttttagtagagacggggtttcaccgtgygttagccaagatggtctcgatctcctgacctcatgatccgcccacctcagcctcccaaagtgctgggattacaggcgtgagccaccacacccagcccctt

SEQ ID NO: 37376 - DNA, 201 bp, Homo sapiens
ttttggtttttcaagtttgcctccatatagtactcaaatatgcttgggacttgaaatatatatattttaacttgttatctgtatgctaatatttgatatcstaaggacaggtggcagagtgtgggcaactgaaacccagccagcagaagagagagagatttgggggaaggccaatgccagtgtcatgacactgctcttcac

SEQ ID NO: 37377 - DNA, 201 bp, Homo sapiens
cccgcaacaaaggaaggagattttcctacagaatgcagcttttccccacaagagacagctttgcagggccatttcaaaatgtgtcaaagaaatatattttsgggtaaaagactttgattttcttcagggcctgctatctgttatgtgatgctgtactagagtcattttagaatttggatcttattgctacaaagagtctgt

SEQ ID NO: 37378 - DNA, 201 bp, Homo sapiens
ggaagacatgtttttctcaagatgtaagaaatgttgtaatgcttgattaactgcctttgtttctctcttccgtaacttacttcctgcctcacatggttccygccttaagatgtttaaaagtaggaaagcctttagtttggggctcagactttctggatgtatgtctggctgagcctgtgatcaccttaataaactctcctg

SEQ ID NO: 37379 - DNA, 201 bp, Homo sapiens
aacctaaggaggtgaaagttcacacagccatgaaataatagatgtagtctaaagaataagcaaaaaagaacaaagaagaataataaggaataaatgaaggmtgagttatttagagctggacgagggcctgtttcagaagaggaagtaagtggacgcagccccggcagctgccacaggatgagtgtgtgatttagataacta

SEQ ID NO: 37380 - DNA, 201 bp, Homo sapiens
aaatgtaaaagaacagaaattataacaaactgtctctcagaccacagtgcaatcaaactagaactcaggattaagaaactcactcaaaaccgctcaactacatggaaactgaacaacctgctcctgaatgactactgggtacataatgaaatgaaggcagaaataaagatgttctttgaaaccaacgagaacaaaaacaca

SEQ ID NO: 37381 - DNA, 201 bp, Homo sapiens
tgtgcgacagcaagactccgtctcaaaaaacataaaaataaaaaacatggtttgaacaatcagccacctgtgagtggttgagcatggcttctgtgcttggytgagatttggctacttgttacaacagccattacagtctgtttacacatccaattaggttatagttcactatgtatggagaaacctgtaggccagggatgt

SEQ ID NO: 37382 - DNA, 201 bp, Homo sapiens
accattaaattagagaataatagacaaataatgaggttaggtgatcagactgagggatggatacttacatcaaaaagaaaaaaacaggcttccatgattcrcgactgagtctgaaagcagctgtttttaagcacatgttgactgaacagtggctgagagctaagcacttgtcatgactgatcttactggattttcctaata

SEQ ID NO: 37383 - DNA, 201 bp, Homo sapiens
ttgttgagggcgaggaaacaagattggagttagagggcttactatgctgggtgtgactttcatcctctgtctgttgggtctacctggtcaagcccaggcamcttctgaagatccatttgatgtaccagatatgcacatatacttgcaacaccctatcttatgcttcaggcttctcctctgctgtcctccacccctgctcta

SEQ ID NO: 37384 - DNA, 201 bp, Homo sapiens
ttggcagggggatgatgagcagtgttttatagaattggcataagtcagtcaaaatggggaaaaaaggcacctggaatattttcccagtttctcctgggttwctatctctcatcagccaagtttgactacatcttttcttaaatgtaaaatagcttgaagttatgaattttttttcaaatactttaaacaacaataaaaaat

SEQ ID NO: 37385 - DNA, 201 bp, Homo sapiens
tggggctgaaatgtttcatcctggttgccttacagagagaaataggccaccctttggccagttcctccaagtggctgatgtgtgagaatttttttttttttaagttttaattttgtgtagtttctcttaagccatttcctcatgagtgtatcggtccagctttattcagttccgttttgcctgtatttcacattttaaact

SEQ ID NO: 37386 - DNA, 201 bp, Homo sapiens
ctcaaatttaataagaacggtgatgataatagtaacatttattgagtatgttttgttctgggcactgtactaagtgctccacatgccttatttaaatgatytctccagccctgtgaggacaatatagtcctgttgtataaagggatgaatatggcctaagtactattattcatattataagcttgagataacggaggctca

SEQ ID NO: 37387 - DNA, 201 bp, Homo sapiens
ctgcctttttactttgttcagaagattgagcgagtacagaacctggccctctgggaagtctaccagtggtgcgttggggctcgctcttggtgggctggtgrctctgtcccttcacaccactggctggttgccacatgtggcccgggtttccaggaaaagcagagcggcagttagggctgccatgtgctgggagctgtgtgt

SEQ ID NO: 37388 - DNA, 201 bp, Homo sapiens
gtttgttgttttacttaaaattgcagtttccaagaacctatcaatgacatttcatgaggaccgattgtctcctgtgcctggagaaaccacaggagaatgtkgtcactgctctctgggcttttgtgcttctgcggttctagtgtttacaagaagctttgggaagggactgatttatattctgcacgttgatggtaatgcatt

SEQ ID NO: 37389 - DNA, 201 bp, Homo sapiens
ctgatgattaatgatgtttaacttttatttacatgtacttttggggcatctgtatattttctgtgaagtatctactcaaatcttttgcctattttttatawaacagctttacacacacacacacacacacacacacacacacacacacacaaaaggggtcttcagaaagtttgtggaaaatgcatattatgaaaaaattat

SEQ ID NO: 37390 - DNA, 201 bp, Homo sapiens
cagtgagttttgacaaatacatacacttgtgtagccagcattctgattgagatacggatcattttcctcaccccatctccttccagtcagtgcctactccyatcgttcaccaccgttctgacctctgtcaccatagatctctgtcttgcctgttcttgaacctcatataaatagaaccgtgtggtatgtactgttgtgtct

SEQ ID NO: 37391 - DNA, 201 bp, Homo sapiens
agcttgacaaccgaacacaacctgagtgtgctgagaactcatggcgttgaccacctgagctataatgagctatgccaactcttgtttcagaacgacccctkgcttttgccagaagtgagtgccaggggaagtctgggttccacagctccctggggacattcctgtgtcttgggaaatgtaatgactgggagtggaatgggt

SEQ ID NO: 37392 - DNA, 201 bp, Homo sapiens
agcagccgacagtgagcgcacaggagtgttccaggcctttcacctgctctgccttgaaatggctatttgggcctttccttttctttttaaacagaaacttytaatgaactgttctcttaacattgacctctcaatgaagttatgttcttaatctcttgctaataatgatttttacttttaagtcacttttgggttcactag

SEQ ID NO: 37393 - DNA, 201 bp, Homo sapiens
ttgagaggccgaggcaggtggatcacttgaggtcaggagtttgagacccgcctggccaacatggtgaaaccctgtctctactaaaaatacaaaaattagcygggtgtggtggcacatacctgtaatcacagctacttgggaggatgaggcaggaaagtcacttgaacccgggaggtggaggttgcggtgagccgagaccgt

SEQ ID NO: 37394 - DNA, 201 bp, Homo sapiens
acaagattggaaggaacaatttaaaagcactcatgtataattgatatgtcaattactaatcattcctctattcattaaacccagtctcctaaggatacctrttttctttatgaatatttgaaatgtgtaaaatggccctatttttaacagactgattctgggttttacacatttggataagctttcaaatctatctaattt

SEQ ID NO: 37395 - DNA, 201 bp, Homo sapiens
tctctatagatttgcttgaatatttcatataaatggaatcatacagtattggtctttagtgacagttatacccatttttattgggttatttgatctcttawtgagttgtgttttgtatatgatttatactgaagatatatccttccagtctttcatgtttatttcctttatagtgtacaggtattttaatagtggtgtcca

SEQ ID NO: 37396 - DNA, 201 bp, Homo sapiens
ttgtgtggtagttgggacacaggcgagaaatagatctctcaggactgtttggagtttggctacataggcaaagataaaagtgctctcatgttgtgaatatygtgctaacattcttccttgccttctacctgctcttgaaatatgatgtgctgagacgcaagactggtgatattggctagcagagaccacctatggtatatt

SEQ ID NO: 37397 - DNA, 201 bp, Homo sapiens
aggaagcatcagcctggagggccctaaggagtgcaccttccccaggatgtgcctgtttgcagggagatcctgtctcaggctgtccatagtacacctgtgcytggggtttgtaggtatagcatttgactactgggatgccctggggtggccttctgctctcatccctgatcatttcctctaatgcctttcagggagggaaca

SEQ ID NO: 37398 - DNA, 201 bp, Homo sapiens
agctatgattgtgtcactacactccagtctgggtgacagagctagatcttgtctctattaaaaaaaaaaaaaagaaaaagatgcactgtatgtattgctgmtataatatttttaatcctagaggttagaaattcgtattgttttaggcagtcagtatttgtttaagcttacacaattaccattttgtttcttactcaccat

SEQ ID NO: 37399 - DNA, 201 bp, Homo sapiens
ctccagctgtctccccagcacttagcgtccatgttctgtgcatagcatgtggccagtgggatgtgtggaagggattgctgaggtttatgctaaagaatttrggcctcaccctggaggtgatggggcgggtaaaatggcaggagagagcaaccatcaggtttgcgttttaggaagtctaaggtagtggtgtgggtgccaatt

SEQ ID NO: 37400 - DNA, 201 bp, Homo sapiens
ttcaaaggtatcctgtgccctgccctcgcccagcagagcctgcctgtgttggctctgtccctacaccttaaccctggaggagccgtgtgcacatactgagrgcctgggtgggtacaggaaagaaaagcaaggtaccaggtccaaggtagacctggagacagatgacactggccctgtgcagtggaggaagaactgcatcaa

SEQ ID NO: 37401 - DNA, 201 bp, Homo sapiens
aggagccgtgtgcacatactgagggcctgggtgggtacaggaaagaaaagcaaggtaccaggtccaaggtagacctggagacagatgacactggccctgtrcagtggaggaagaactgcatcaaggatgtgaggagaatggaccccaggaggggcaggagccccaagtgtggaggacaagcagggtcagcatgcatgtagc

SEQ ID NO: 37402 - DNA, 201 bp, Homo sapiens
agaaatttggaatgtggagcagaaggagcagtgaagttcaagggccagctttgccaacaacccagttccacaaacatcacacagatgccatggatagctgkgcgactagggctgattctttaacttctctgagcctctcagtgtgctccattgagaaatgaaagggtggtatttggccttctctaagatgctttaagccct

SEQ ID NO: 37403 - DNA, 201 bp, Homo sapiens
ttcaaggtccacttgagcaacaaagcaaaagaccccatctcttaaaaaaaatgtaagacttgagagggttttcctggcaggcaaggacagaacaaacactkctaggtatttgtcatttttcaacttgaggggccagttcccccaaccccaaatcctcaggatgagtatgggattcttgagggtggggaagcaagaaatttg

SEQ ID NO: 37404 - DNA, 201 bp, Homo sapiens
aaaccacaagaaaatctcataatgttttaagaaagtttacagatttgtgttgggtcacattcaaagctgtcctgggttacatgcagcctgcgggctgcagsttggacaaggctgccttcgatgaagatttgttggaaaactgtttttggtttgtctgaatatgtatgtacgtatgtatgtatgcatgtatgtatgtatgta

SEQ ID NO: 37405 - DNA, 201 bp, Homo sapiens
tcatgttggccaggctagtctcgaactcccgacctcaagtgatccatccaccctggcctcctagagtcctgggattataggcgtgagccaccatacccagsctacatgctggtttttctctggtgcttgtaaatactgtcaggaagtgtttctgaaaaattgtcatgaagactgattttatcagctttcagtttgccagcg

SEQ ID NO: 37406 - DNA, 201 bp, Homo sapiens
caggaagtgtttctgaaaaattgtcatgaagactgattttatcagctttcagtttgccagcgctgccataacaaagtaccatagactaggaggcttaaacracagaaatcgattttgtcacagttctggaggctagaagtctgagatcaaggtggcagggttgatttcttctgaggcccctctccttggcttgtagatggc

SEQ ID NO: 37407 - DNA, 201 bp, Homo sapiens
agtgcatccacctggcaggtgacctggaggagtagcttccccgaggacccccaggcttggcctgtgattgcgcaaacccacatttcctaagcacactggamacccttcgagtgtgggttttaacatccctgtgagattgaatacttgtgccacacatgtcacaaaagagtatggaaataaaagaaaatttatccgaagtgg

SEQ ID NO: 37408 - DNA, 201 bp, Homo sapiens
cgggttcatgccattcttctgcctcagcctccagagtagctgggactacatgcgctcaccaccacgccccgctaattttttatatttttagtagagacggrgtttcactgtgttagccaggatggtctcaatctcctgacctcgtgatcctcctgcctcggcctcccaaagtgctgggattacaggcatgagccaccgtgc

SEQ ID NO: 37409 - DNA, 201 bp, Homo sapiens
gaactgttctcttaacattgacctctcaatgaagttatgttcttaatctcttgctaataatgatttttacttttaagtcacttttgggttcactagtggaytaaccagaagtgattgtagttgagtccagttttgctttttaataatgtgttgaagttttagtttttactctttgttgactttgctgcttattggcaccag

SEQ ID NO: 37410 - DNA, 201 bp, Homo sapiens
ctcggcctcccaaagtgctgggattacaggcatgagccaccgtgcttagccaaatctcttcttataaggacagtagtcttgtgggtttggggcccaccctrtggacctctttttaacttaattacctctttagagaccttctttccaaatagagccatatcctgaggtcgtgggagttaggactccaacatagaaattttg

SEQ ID NO: 37411 - DNA, 201 bp, Homo sapiens
ttcccccagtaacactttcacacataacttatttactgttccttttacttctggaagattccgagaggaaagattgctgggtcaaaggtcacacgtgtttycaattttaatagctattcctggattacctcctcaaagggctctaacaactcgcattgctctcagcgtgtgagagggtcctttgctctgaagggtcttcta

SEQ ID NO: 37412 - DNA, 201 bp, Homo sapiens
acagtagtcttgtgggtttggggcccaccctatggacctctttttaacttaattacctctttagagaccttctttccaaatagagccatatcctgaggtcstgggagttaggactccaacatagaaattttgaggagactcaattcgacatataacaccagctctgcttctttgcaggaagaactgtaggaatagtcacag

SEQ ID NO: 37413 - DNA, 201 bp, Homo sapiens
attgtctcatgtgaaaggagcagctctagtcactttgaagttcttggattttcccagtggaggggctgattctgtgcagtctcctttccatttcgttcccmttttagccaagggcatttgttagcagccgtcatctagagtgagggatgtaatagctgtgttctgtgtggatgatggaatcacagcttgtgaagccccttt

SEQ ID NO: 37414 - DNA, 201 bp, Homo sapiens
gcacagctctggggagcattccttgtgttgtattctgattttacaaaatgagtgaaagaagcataccttaattatggcattggctgtattcctgacatcartaagtagagtttttgagccattgtaaatttgctttgttccctgctcatctccagcacctagacagtgcctggcccacagtaggtactctgacatttgttg

SEQ ID NO: 37415 - DNA, 201 bp, Homo sapiens
gagccctcgtgtgtcatttcagggagctactttgcccgagatgctgcatattcccaccactacagcaaatccgacacgcagacccacacgatgttcctggyccgggtgctggtgggcgagttcgtcaggggcaatgcctcctttgtccgtccgccggccaaggagggctggagcaacgccttctatgatagctgcgtgaac

SEQ ID NO: 37416 - DNA, 201 bp, Homo sapiens
tgttccaggcctttcacctgctctgccttgaaatggctatttgggcctttccttttctttttaaacagaaacttttaatgaactgttctcttaacattgayctctcaatgaagttatgttcttaatctcttgctaataatgatttttacttttaagtcacttttgggttcactagtggactaaccagaagtgattgtagtt

SEQ ID NO: 37417 - DNA, 201 bp, Homo sapiens
gtcccacccctggaggttctgattcagtcagtctggagtgaagtcagtctagggcagaatcaggcacttgtgtttttaaatgggtctcctagtgaattgartggacagcgagagttgagaaaggagtccccttcatggagtcctggatctggcaagcagccatgtggcgtcaggctgccagcctgtcactaaaaagtagag

SEQ ID NO: 37418 - DNA, 201 bp, Homo sapiens
cccaccactacagcaaatccgacacgcagacccacacgatgttcctggcccgggtgctggtgggcgagttcgtcaggggcaatgcctcctttgtccgtccvccggccaaggagggctggagcaacgccttctatgatagctgcgtgaacagtgtgtccgacccctccatctttgtgatctttgagaaacaccaggtctacc

SEQ ID NO: 37419 - DNA, 201 bp, Homo sapiens
atgttccattgagcattgaagtacatatatgtgagtatttccatagatagattctggggaatggaatgataggtcaaggaatatgagctatatatatatayacacacatatatatgtgtattctgaaagcaatattactgagctatagtttacacaagctaaagtgtaccattttaaatgtatactgagttttgataagta

SEQ ID NO: 37420 - DNA, 201 bp, Homo sapiens
acttcccgtgtggttgtgatatttgttttatatgtttttaaacagataggagcatgtgataatgttattattcaatctgcatcttaacattgtatcttggrgattttttttccatgtcagtatgtgaaagtccacctcattttaaaaacaagtgtgtagtagttgattataatgatgttccattgagcattgaagtacata

SEQ ID NO: 37421 - DNA, 201 bp, Homo sapiens
agtggacagcgagagttgagaaaggagtccccttcatggagtcctggatctggcaagcagccatgtggcgtcaggctgccagcctgtcactaaaaagtagwggatccacctgtgtaggagcactttcaccccaaacacgatagggctttgtgagcttgcgttgcccacttttgtgcagagaactgaatgaatcctctttaa

SEQ ID NO: 37422 - DNA, 201 bp, Homo sapiens
tggctacttttaagagcttctgtttgtcttggaggtaggcatcctcactaaagtgtatctaagtatgtgcttttatttatcatggttgagattctttgggsttcttaagctgcggataggtgcatctcatcagttctctttgaaaatcgcctccactgtcttgtctctcctctcctagagcttcacttaggttctgatcat

SEQ ID NO: 37423 - DNA, 201 bp, Homo sapiens
atttcagaattgtggataaaggtttatggctgtgtgtgtgctcctttaaccatgtactccatcccttttatcccttttgtgtggtagttgggacacaggcragaaatagatctctcaggactgtttggagtttggctacataggcaaagataaaagtgctctcatgttgtgaatatcgtgctaacattcttccttgccttc

SEQ ID NO: 37424 - DNA, 201 bp, Homo sapiens
gggcagaaatgagtttatgggctgggcttaaccaataaataccaattttattaagcgagaaaaggagaagcagcctggggaggacctgagtccgatggacrtttggaatggggttactgtcaggagggaaggcattcacgactagcagacaggagaatggacagtcaatttggcagcttgttgaggggctctgaccagtgg

SEQ ID NO: 37425 - DNA, 201 bp, Homo sapiens
tggctggagccttacaggcctagtcagggtagcctgtgacctgcgtctcttggtcccaggacacttttggaattttggaaaaatgtgttgttttgcatcargccggctgtatttggtggccggcacactctgcccccagcacacattcttctgtgattctaggcaaaaaggacagatgcagaagcagaacggagggaaggc

SEQ ID NO: 37426 - DNA, 201 bp, Homo sapiens
gaaaattttaatttttttcaagtatcaaattagctagtttcattattattttgaaatacaaattaaaaatgtacaaaggacactcagtaagaaataagtcsccctcacaccagttttctccagaactcaagtcccctccaagaaacagccataattatccattctttgaatatcctttcatcgagactgtatacgtgtaca

SEQ ID NO: 37427 - DNA, 201 bp, Homo sapiens
ctggagccttacaggcctagtcagggtagcctgtgacctgcgtctcttggtcccaggacacttttggaattttggaaaaatgtgttgttttgcatcaggcyggctgtatttggtggccggcacactctgcccccagcacacattcttctgtgattctaggcaaaaaggacagatgcagaagcagaacggagggaaggccgt

SEQ ID NO: 37428 - DNA, 201 bp, Homo sapiens
agggagagtggagacatggcacagagggagggagggagatgcggggtggaagagtagaggccctggcgttgcacatcaccaggacgctattcgcagtgtgstgacccttcctggctgcaggcccctccaccagctgagccctcgtgtgtcatttcagggagctactttgcccgagatgctgcatattcccaccactacagc

SEQ ID NO: 37429 - DNA, 201 bp, Homo sapiens
tatatgtatattttttcactggttatgttttttttcagccttcgttcagaaaaacctggtctatggcacaactaaaaaggtttgccgcagacccaaatacrtgtctccccaggatgtgacgaccatgcaaacctggtaggttgcagtggggggcttggtacttaggatgtaatcagctggggtgtgctctgcagtggtgac

SEQ ID NO: 37430 - DNA, 201 bp, Homo sapiens
tacccagagtatgtcatccagtacaccacctcctccaagccctcggtcacaccctccatcctgctggccttgggctccctgttcagcagccgacagtgagygcacaggagtgttccaggcctttcacctgctctgccttgaaatggctatttgggcctttccttttctttttaaacagaaacttttaatgaactgttctct

SEQ ID NO: 37431 - DNA, 201 bp, Homo sapiens
aggctgggctgaggcttttttatatccaagctgggaaaaattgccaagcaaaataatggtttaaacaagattggaaggaacaatttaaaagcactcatgtrtaattgatatgtcaattactaatcattcctctattcattaaacccagtctcctaaggatacctattttctttatgaatatttgaaatgtgtaaaatggcc

SEQ ID NO: 37432 - DNA, 201 bp, Homo sapiens
aacagtgcaggcaagaagtgctaaggacctaaaggggttcaacatgtttgtctagacgactctgtggtccttggaccatgtagtccaacctgtgtctttgrcctgtgtgggacaagaaaaaaaaaaggcagggacatccaggggataccctcgatggtggcttaagcatcacgtgtctgtcctttagattggtttcacagt

SEQ ID NO: 37433 - DNA, 201 bp, Homo sapiens
ctactcaggaggcattgagcctggtggtctagggcacagtcccaagatccagcccaccttgtttcaacctgggctctgctccttgctagctgatggcttcrggcaagtgactttacctccaggtctcagttccctcatctgcaaagtggagttaatgatattactaccctcacaggctggttgaggactgaatgattaact

SEQ ID NO: 37434 - DNA, 201 bp, Homo sapiens
tttactgttccttttacttctggaagattccgagaggaaagattgctgggtcaaaggtcacacgtgtttccaattttaatagctattcctggattacctcytcaaagggctctaacaactcgcattgctctcagcgtgtgagagggtcctttgctctgaagggtcttctaaaatatttgttcaatcgttacttagcagggg

SEQ ID NO: 37435 - DNA, 201 bp, Homo sapiens
tcctggattacctcctcaaagggctctaacaactcgcattgctctcagcgtgtgagagggtcctttgctctgaagggtcttctaaaatatttgttcaatcrttacttagcaggggctgggagtaacggattttattttattttattttattttttgagacggagtctcgctctgtcgcccaggctggagtgcagtcgcgca

SEQ ID NO: 37436 - DNA, 201 bp, Homo sapiens
taggttatcaagttcgagggggctgatcgaaaagagggatgcatgggaggtttttgtgggccaggtctagaagtggtggatttcctttcacccacatcccmttgaccagaagctgtctcgtgaccctgtctagatgcagggtgactgggaaatgcctctaggaagcagctgtctggaagtatctagattagagctttccaa

SEQ ID NO: 37437 - DNA, 201 bp, Homo sapiens
ggttggccctcgttttgttatataaatggcaaatattttctcttagtttgttgtttgccttttgactttgcctgtgaagtattttaccataaatatatatytcttattattttagttaaatgtatcagtgtcttactgattctggatttagagttttggttgattatgaccctcctatttctggaagtcattttttattct

SEQ ID NO: 37438 - DNA, 201 bp, Homo sapiens
gtctgtgtcacattgtcagaacaggtggctgctgtgtggtgccatcgagtccctgctggttccccttgtcctgggagggtcacccattgcccaaggaagtrcatccacctggcaggtgacctggaggagtagcttccccgaggacccccaggcttggcctgtgattgcgcaaacccacatttcctaagcacactggacacc

SEQ ID NO: 37439 - DNA, 201 bp, Homo sapiens
tggctacataggcaaagataaaagtgctctcatgttgtgaatatcgtgctaacattcttccttgccttctacctgctcttgaaatatgatgtgctgagackcaagactggtgatattggctagcagagaccacctatggtatatttgctttgtgtaagaataaaatgtctacgtgtttttgtttacatttttgtagcaata

SEQ ID NO: 37440 - DNA, 201 bp, Homo sapiens
gtcacattgtcagaacaggtggctgctgtgtggtgccatcgagtccctgctggttccccttgtcctgggagggtcacccattgcccaaggaagtgcatccmcctggcaggtgacctggaggagtagcttccccgaggacccccaggcttggcctgtgattgcgcaaacccacatttcctaagcacactggacacccttcga

SEQ ID NO: 37441 - DNA, 201 bp, Homo sapiens
ggcagcaccacacctgttgacaaccacaaggctagggcatgctgtgtattgcccagctatcttactcctttatgtttttatttcagataagtgccatagarttcatttccatttgccgtatcgatggcaattcttggatagaggcaaatgggaggatttggacaacatggaacttattgaagaggcatattgcaatcccaa

SEQ ID NO: 37442 - DNA, 201 bp, Homo sapiens
ttagtcctctactcaggaggcattgagcctggtggtctagggcacagtcccaagatccagcccaccttgtttcaacctgggctctgctccttgctagctgrtggcttcgggcaagtgactttacctccaggtctcagttccctcatctgcaaagtggagttaatgatattactaccctcacaggctggttgaggactgaat

SEQ ID NO: 37443 - DNA, 201 bp, Homo sapiens
aatgcattaaaaacatttgccccttgcagaagatcacccttagttcttcctcggaagagtatcagaaggtctggaacctctttaaccgcacgctgcctttytactttgttcagaagattgagcgagtacagaacctggccctctgggaagtctaccagtggtgcgttggggctcgctcttggtgggctggtgactctgtcc

SEQ ID NO: 37444 - DNA, 201 bp, Homo sapiens
tcctcctccttgtcctcctccttgtcctcctcctcgtcctcctcctcttcctcttcctcctcctcttcctcttccccctcctcctcctcttcctcctcctycttttggtagataccagtatccataaaagaagcttgagatgaattggcttcttcccccacaacttcacttctaagtataaagcaagtctcaaagcaaact

SEQ ID NO: 37445 - DNA, 201 bp, Homo sapiens
atttttagtagagacggggtttcactgtgttagccaggatggtctcaatctcctgacctcgtgatcctcctgcctcggcctcccaaagtgctgggattacrggcatgagccaccgtgcttagccaaatctcttcttataaggacagtagtcttgtgggtttggggcccaccctatggacctctttttaacttaattacctc

SEQ ID NO: 37446 - DNA, 201 bp, Homo sapiens
tgcttatcagacgcttgtggatggaaagaatggaggaagagagcaaaaaaaaaaaaaagagctaggttcagggctctgtgtgtgtgtgtgtgtgtgtgtgtatacacgcctgcacgcatgcacatatgtaacctataatgataagatgccatgctcattgattcagcctgtggctaactgcttaccgactgactgctgtgc

SEQ ID NO: 37447 - DNA, 201 bp, Homo sapiens
gtgcttatcagacgcttgtggatggaaagaatggaggaagagagcaaaaaaaaaaaaaagagctaggttcagggctctgtgtgtgtgtgtgtgtgtgtgtgtatacacgcctgcacgcatgcacatatgtaacctataatgataagatgccatgctcattgattcagcctgtggctaactgcttaccgactgactgctgtg

SEQ ID NO: 37448 - DNA, 201 bp, Homo sapiens
tgggttctcagggcatggtgccaatgtctggctcaccctggtgcttatcagacgcttgtggatggaaagaatggaggaagagagcaaaaaaaaaaaaaagagctaggttcagggctctgtgtgtgtgtgtgtgtgtgtgtgtatacacgcctgcacgcatgcacatatgtaacctataatgataagatgccatgctcattg

SEQ ID NO: 37449 - DNA, 201 bp, Homo sapiens
ccttcggggtcccatagacctagattttgagtgaagtatctcaggggcttataaaaagaaaagggaagatgaataacgacaggtgacactaaatagggatkgcaaattaattttatgtgctcattggggttagctgggtgagggtaaatgtcataggtaaagactcattggcatggtgctagtaaaggtaaaatagaaagg

SEQ ID NO: 37450 - DNA, 201 bp, Homo sapiens
caggagtggatcagatctgaggtagcgtctgaggcctgaaaagaggctgagggtggaactctggggaaatcagccttcagggatgaggcagtccaggggasagcagggaacaacagcccacgaggaggaaggcacacagcaaatggtggctggatagagccactcatgggggtaactggtagatctgtttcatgttcatat

SEQ ID NO: 37451 - DNA, 201 bp, Homo sapiens
cccaggagtggatcagatctgaggtagcgtctgaggcctgaaaagaggctgagggtggaactctggggaaatcagccttcagggatgaggcagtccagggragagcagggaacaacagcccacgaggaggaaggcacacagcaaatggtggctggatagagccactcatgggggtaactggtagatctgtttcatgttcat

SEQ ID NO: 37452 - DNA, 201 bp, Homo sapiens
tccacctctgcaggttcatggtctacggcgcctgcaagttcctgagagccgggtaaggcgccgcgccgggagcgacggcgggcggaggtcctgcgcgcccycacgcacttccagcccgcttgggggtcctacttgaagtttgagcagacaattcggtggctctgccctgacctcgcaccgtcattcactaaagcgagcgtt

SEQ ID NO: 37453 - DNA, 201 bp, Homo sapiens
tttcccaggaaagttatttgtgggagttctttgaggcttaggatgaaggtatatgtttcatgccagcagaaacagaaggtagatctatttagaaagaacastgtattctgaaacttaataggaatgatttgtaattatagtttcacagtccttgttcctgaacccttgatccatatgtcttttgaactgcttttatttaat

SEQ ID NO: 37454 - DNA, 201 bp, Homo sapiens
tgagtagttgtttaaattggggttttttttctgtattgatccagtgaacaatccagtgatctcttttttatcagaagcagcaattctggtgtgcatgtgcstgtctgtattttcactaaacctttgttttcttcttaaatgctgtcctgggctttgactgaagaaaggtttgttctcaaatttggtgactccccttgacaa

SEQ ID NO: 37455 - DNA, 201 bp, Homo sapiens
cccaggcttggcctgtgattgcgcaaacccacatttcctaagcacactggacacccttcgagtgtgggttttaacatccctgtgagattgaatacttgtgycacacatgtcacaaaagagtatggaaataaaagaaaatttatccgaagtggatgaagactgaagctcatttttctgcgtctattgattgagcacctactg

SEQ ID NO: 37456 - DNA, 201 bp, Homo sapiens
gttcaggttctgtgtccccaaacactcttagccaggaggagggtgatcagatctgtttgtaccatatccggaaaagttgtagctttcaaggtaagttggargaggctccttcattccacttgtgggaggggtaactgcttgtcattcccagagctgtgctctgaagtcaccccctaccaaacctctaccccatccggagag

SEQ ID NO: 37457 - DNA, 201 bp, Homo sapiens
ttgggttctcagggcatggtgccaatgtctggctcaccctggtgcttatcagacgcttgtggatggaaagaatggaggaagagagcaaaaaaaaaaaaaagagctaggttcagggctctgtgtgtgtgtgtgtgtgtgtgtgtatacacgcctgcacgcatgcacatatgtaacctataatgataagatgccatgctcatt

SEQ ID NO: 37458 - DNA, 201 bp, Homo sapiens
tttgggttctcagggcatggtgccaatgtctggctcaccctggtgcttatcagacgcttgtggatggaaagaatggaggaagagagcaaaaaaaaaaaaaagagctaggttcagggctctgtgtgtgtgtgtgtgtgtgtgtgtatacacgcctgcacgcatgcacatatgtaacctataatgataagatgccatgctcat

SEQ ID NO: 37459 - DNA, 201 bp, Homo sapiens
tcttgctaataatgatttttacttttaagtcacttttgggttcactagtggactaaccagaagtgattgtagttgagtccagttttgctttttaataatgygttgaagttttagtttttactctttgttgactttgctgcttattggcaccagggacagagtttctagatacaattttatggattggttttaatttttatg

SEQ ID NO: 37460 - DNA, 201 bp, Homo sapiens
ctttgggttctcagggcatggtgccaatgtctggctcaccctggtgcttatcagacgcttgtggatggaaagaatggaggaagagagcaaaaaaaaaaaaaagagctaggttcagggctctgtgtgtgtgtgtgtgtgtgtgtgtatacacgcctgcacgcatgcacatatgtaacctataatgataagatgccatgctca

SEQ ID NO: 37461 - DNA, 201 bp, Homo sapiens
gcgcgcagctccacctctgcaggttcatggtctacggcgcctgcaagttcctgagagccgggtaaggcgccgcgccgggagcgacggcgggcggaggtccygcgcgccctcacgcacttccagcccgcttgggggtcctacttgaagtttgagcagacaattcggtggctctgccctgacctcgcaccgtcattcactaaa

SEQ ID NO: 37462 - DNA, 201 bp, Homo sapiens
tgctcatctccagcacctagacagtgcctggcccacagtaggtactctgacatttgttgaatgaatgagtgtgctaggatacttattttttaaaaaagacygtcaggtttagtgacaggcagattttgaacagagatttttatttaataagcatttcttgagtacctcttgtggggcagatgaataatgtggtctgtcagg

SEQ ID NO: 37463 - DNA, 201 bp, Homo sapiens
gtgcacagtgatgaagtctgggaatgggagaggggagaaggatgggcacccactgaccagcagcctgaaaattcctacagcatcccagggctcagctccaygcaggagcaaggtgggggtggggttgggggaaatggtacccattttccaagggctgctctgcttttggagtccagggaaccgctgctgtctggagctgtg

SEQ ID NO: 37464 - DNA, 201 bp, Homo sapiens
gaatcgtgattccatgtgggaaacagtcctgcagtcgggggacaggaggagccaggctggaatccaacacaaacagtccaggggcagagggaacattcccrggtacctgtgtccctgagtgacttgaaaatgctgaacttatgctgaattctgtttaatgattatttgcgggaggggaacaggcattcttaagagatcggt

SEQ ID NO: 37465 - DNA, 201 bp, Homo sapiens
tcctttctcttttccctttttcttttttctcttttttgttaacttctttccctacaaaaattgtcattttcatttttctcaaagccagcagagccattagyataccatatgtatagtgacaggaaaagccctgacctcattcttatcttttcttgcagattcggtatatttcacaaacacagggtttgcctgctgaatatt

SEQ ID NO: 37466 - DNA, 201 bp, Homo sapiens
ccaaagaatggaaggattgttgtagcacagcgcctctcctgagagccacaggcccttcagaggaggagtcagtaatggcaccccaggtttgaaagatagtrttcatatagaaacagcttcctgcatttccaacttgctaatggtttcttccattcttccttttcagggcccctgagatcatccttggtttaccattttgtg

SEQ ID NO: 37467 - DNA, 201 bp, Homo sapiens
ttcctggggcacagcccctctctgcctttcctgcagagagaaaagccacatcctgtgggcaatgacaacatgtgggtggtgcctcccataggggcagagtycctgggaactgagaaagggggcttgagagatcaggaggaagttacagggcaaaaaataaggggagccaggagaggggaggcacgctggggtcttccttgg

SEQ ID NO: 37468 - DNA, 201 bp, Homo sapiens
cctgaccatgacctttaacaaccagctgaccactgtccacaaccaggtaagtgggaaacagaagggaaggagaggcggggctgcacagtgtgagcctcagracttgtattttccatcatacctagtcaggaggcaaaattcctgctgtcatgttcaacaactaaacaaagtatttgcatccaaggttatttcctttgaggg

SEQ ID NO: 37469 - DNA, 201 bp, Homo sapiens
gcaagcgtcgggtgaatatgtatgacacggtgaaccagagcaaaacccctttcatcacgcacgtggcccccagcacgtccaccaacctgaccatgaccttyaacaaccagctgaccactgtccacaaccaggtaagtgggaaacagaagggaaggagaggcggggctgcacagtgtgagcctcaggacttgtattttccat

SEQ ID NO: 37470 - DNA, 201 bp, Homo sapiens
catgtttccagaacatggagatctgcaagcgtcgggtgaatatgtatgacacggtgaaccagagcaaaacccctttcatcacgcacgtggcccccagcacrtccaccaacctgaccatgacctttaacaaccagctgaccactgtccacaaccaggtaagtgggaaacagaagggaaggagaggcggggctgcacagtgtg

SEQ ID NO: 37471 - DNA, 201 bp, Homo sapiens
ggaaggagaggcggggctgcacagtgtgagcctcaggacttgtattttccatcatacctagtcaggaggcaaaattcctgctgtcatgttcaacaactaawcaaagtatttgcatccaaggttatttcctttgagggacccaggcacattttgtgttgacttctggccccattgacaggtcccagaaaggactggtgaggg

SEQ ID NO: 37472 - DNA, 201 bp, Homo sapiens
tgggaaacagaagggaaggagaggcggggctgcacagtgtgagcctcaggacttgtattttccatcatacctagtcaggaggcaaaattcctgctgtcatrttcaacaactaaacaaagtatttgcatccaaggttatttcctttgagggacccaggcacattttgtgttgacttctggccccattgacaggtcccagaaa

SEQ ID NO: 37473 - DNA, 201 bp, Homo sapiens
gccttccatgttgggagtttgtgtgtgcacgcacatgaaggcagaagaaaaagatgaggtgaccgattcatttggacagccatattaagttcctactaaawacttggatccaattaagtacagggagaaatggaaagctacaagagaaagaacagtggtggaagcaggttcaagagaaaatgggacaaatatggatcatga

SEQ ID NO: 37474 - DNA, 201 bp, Homo sapiens
cagccagtgatgatttccacaattttatgacccttggctgtcatcccaataacaaataagtcataagccaccctcttcccctctgtaaaattccacttctrcaccgtggacggcctttccaccaagatctttttgaaacagtgaaaacagagactagcacctcaccttctttatgtatgaacagcgtatttctgctgtcgc

SEQ ID NO: 37475 - DNA, 201 bp, Homo sapiens
caggcattctctgaagattagtttcccagactttcagctacaaaagataacttcagaatatctctaaaatggttgttagctcatctgattggcgtgtgaargtaatgaagtcagtagacgtggttctctgtaggtgtgttctaaacacacagacttatccttcatctcagccaaccttccaagtgggccctccactaatgg

SEQ ID NO: 37476 - DNA, 201 bp, Homo sapiens
agtgtgatgtaaattcttaagaaaggataattggcataaacagatattggacttaatcccgttattttgggaaggggacagcttgttttacatcttcctgragatagaatacctcgagttaggtgtggttgtgcattcctatagacccagctactcaggaggctgaggcagaaggattgtttgagttcagaagttcaagac

SEQ ID NO: 37477 - DNA, 201 bp, Homo sapiens
cctcgttgaccaggctgatggtgtgtgccagtgcctaagtcaagtcattgacaacaggaagaagatgagccctggctgagttaaactgaccaggatgtgcwtcccccccatgctggaagtgaggccgtcttccctgagagtcagtatccgaacagaaagatcacccaatgcatgttgtttttaaagtacttatggagatct

SEQ ID NO: 37478 - DNA, 201 bp, Homo sapiens
aaattattataaaataatgtataaaatgacctcaggctatgtgtataaggtgtatatgaaacaaaagaattttgtgtttagacttgggtttcatccccaakatatctcattatgtatatgcaaatattccaaaatctgaaaacaaaaatccgaaacacttctggaccaagcatttcaggtaaaagatgttcaccctgtgcc

SEQ ID NO: 37479 - DNA, 201 bp, Homo sapiens
gctgatggtgtgtgccagtgcctaagtcaagtcattgacaacaggaagaagatgagccctggctgagttaaactgaccaggatgtgcatcccccccatgcyggaagtgaggccgtcttccctgagagtcagtatccgaacagaaagatcacccaatgcatgttgtttttaaagtacttatggagatctctgtgccgtggtg

SEQ ID NO: 37480 - DNA, 201 bp, Homo sapiens
ttgtggcccttgttccgggacagattgagatggtgctgttacagaagcaactgtctcgaatttccccaagagcaagggcttgggtgcagatcgcctgtttrggagatgatcacaggcctaagggaatcgggagagtgatgctgagaggagtaagccccatgattctgggctgctgtacactcagggctccgtcccacctct

SEQ ID NO: 37481 - DNA, 201 bp, Homo sapiens
gtgagagagggcacacgaggaagaaccaagccggggctcctcctcgatgctgaggggcatgaagaggggtggcctgaacttggccgcccactgccagccaytcttgaggtggcttttggggcctacttaggttctgcctcagacacacacagaatcaaaactggaaacctagtttttgtgttattaataagccactcccaa

SEQ ID NO: 37482 - DNA, 201 bp, Homo sapiens
gtattgggcttgtggcccttgttccgggacagattgagatggtgctgttacagaagcaactgtctcgaatttccccaagagcaagggcttgggtgcagatygcctgtttaggagatgatcacaggcctaagggaatcgggagagtgatgctgagaggagtaagccccatgattctgggctgctgtacactcagggctccgt

SEQ ID NO: 37483 - DNA, 201 bp, Homo sapiens
aattaatgtgttagtgtggaagagaccagccttttccccagcctcacatctcatgatcactataagtgggtaacatcaccaggctgaataaagtgaagacrccacatctgcagttgatccacaggaattgaaattccaaatcccttgccagtgcagagaaaagaagagtggtcccagaaagctgaaaagtgacagcaggtg

SEQ ID NO: 37484 - DNA, 201 bp, Homo sapiens
agagttggagcaggactaagaacgaaggatcagtgtgaaaatgtgtgtgtgtgtgtgtgtgtgtgtgtgtatttagtacatattcagagccaagatgttcwctgccaatatgaatagaaaaaaccgccaatctgattctaacattatacagggaatggccagttgaatcaaggaagcctgcatcctttaagagactgtcca

SEQ ID NO: 37485 - DNA, 201 bp, Homo sapiens
tacgtgacagcagagcctcctgagtttcagtagaaagcaacccagggagaactgaggaagaatccatttctgtcacaagtaatgtttacaaaaaaaaatgrtgacctatgtcctgatattggaattctgtttctgagtctcagctgtgttgctggcacctaatggtggcaagtggcaccctggaaccacttggttccacaa

SEQ ID NO: 37486 - DNA, 201 bp, Homo sapiens
catgtagaagacaacctgtgatgattaaataaactatgattctggttcagtgattctaattaatcaccagaagtgaataaaaatgttacttgtggccaggmgcggtggctcatgcctgtaatcccagcactttgggaggctgaagcgggtggatcacctgaggtcaggagttcgagaccagcctggccaacatggcgaaac

SEQ ID NO: 37487 - DNA, 201 bp, Homo sapiens
caacagtggttctacgtgtattacatcaagctgcaaccacccagaagtttgggtgtcgtgtctgtccccccagctctccttttggagttggaaccctgttsccttgcagcagctctccaccttaatttcttcagcttataaccaggcaaaagtaccctgctgcagagtgcacagagatcttggggtccacggtgtttggct

SEQ ID NO: 37488 - DNA, 201 bp, Homo sapiens
gttcgagtacaccttataataccagtgattataaaataccatggactaatagagtgtcttgcttccaaggagtttaaactgttttataattctgccaaccrtaatttatcttcataagctgccgtagagacaagagaaaaagtgagattaataatcacattttatagatggtgaaataaaaactcagagaaattgagtaac

SEQ ID NO: 37489 - DNA, 201 bp, Homo sapiens
tggagtgcagcagtacgatctttgctcactgcgtcactgcagcttccacctcccaggttcaagcgattctcctgcctcagcctcccgagtagctggaactrcaggcacacgcaccacacccgactaatttttgtatttttaatagagacagggtttccccatgttggccaggctggtctcgagctcctgacctcaggtgat

SEQ ID NO: 37490 - DNA, 201 bp, Homo sapiens
gtggaaaatcttcactaatgcaacataaaacttggcgattttcatcacaccaggtcaggtaatcccaggctgtgcttcttgaggcagtggaagctgatttyctttgctcacttatcacctgtgcctctcaatggcatgtctctaacaggaggcagaggcctccttcccgaggtccatgggtcagagttttaccatacgaga

SEQ ID NO: 37491 - DNA, 201 bp, Homo sapiens
tcaagcgattctcctgcctcagcctcccgagtagctggaactgcaggcacacgcaccacacccgactaatttttgtatttttaatagagacagggtttccycatgttggccaggctggtctcgagctcctgacctcaggtgatctgcccgcctcggcctcccaaagtgctgggattacaggcgtgagccaccgtgcctggc

SEQ ID NO: 37492 - DNA, 201 bp, Homo sapiens
gtgcagtggcgccatctcggctcacttcttcaagctccacctcccaggttcatgccattctcctgccttagcctcccaagtagctgggactacaggtgccygctaccacgcccagctaattttttgtatttttagtagagatggggtttcactgtgttagccaggatggtctggatctcctgacctcgtgatccgctctcc

SEQ ID NO: 37493 - DNA, 201 bp, Homo sapiens
tgtcattgatctttgtatgcttgtcacctggtagagccagcacagagacagtgggcagtgtctgtttgaataaggaagaatggaagcgggcagggaggggrgcaggctgtatctgaaacatgtctcatgagtgcagagaaaaggctgcacccttaggggtgggagagggatccagagtggattggaaaaggttaaaaccaa

SEQ ID NO: 37494 - DNA, 201 bp, Homo sapiens
gatcttttttatgtttgcacacttaaccctagtaagccaggagccatctctgaaagaaataataattagcatttcttattagccaaaatagggattcttcrttgttcagtttggtggaaccagtagactcagcagtcagaatttgtttcagtcctttaatcgtagcaggggagaactttaccttttgcttccttgaaagag

SEQ ID NO: 37495 - DNA, 201 bp, Homo sapiens
atggtttgtgtgcatggttggcccagcagaaatatgtttgtccatccatccatccatccatccatccatccatccatccatctatccatccaaccatccawccatccatccctccctccctccctccctccctccctccaaatcattcatcaaataagggaaccttccccaaaggtcccagctgttctctctccccttctt

SEQ ID NO: 37496 - DNA, 201 bp, Homo sapiens
tacttagttatcattctgatttcagaaagaaacaaatggttcaccaagtcttataatatctctaaccccgagacaagcgaggggtgtgaggcagagacacrctatgtcaggctacagcctgcctctcccctggcccacgtcaccttggccgactggactctgaacagtgaagggatagcctagaaggaaggagctgagcca

SEQ ID NO: 37497 - DNA, 201 bp, Homo sapiens
tatttggtgcagtttcacaccgaaaaggggtccctgtgactgatttggccagccctggacaaatgagtgttgtcattgtatcaccagcggctttggctcartgcgtggtataatttaaaaattgcctctttttctagctctacttagttatcattctgatttcagaaagaaacaaatggttcaccaagtcttataatatct

SEQ ID NO: 37498 - DNA, 201 bp, Homo sapiens
gcccttgtgtgtggtcttgtcctcagccacaggggcctaggtgggagtaaaagtgaagtaacacaggcagaattttctggatgctttactaaagagatgcktaatgtgaggctttgtctgccgttccttctctgatcccaaagtatcttcgactggtttagtgctcgatagagatggggtagattaagatacttgaagaaa

SEQ ID NO: 37499 - DNA, 201 bp, Homo sapiens
cgctgggcgttggggagcagggccagcgcctcctggggactgcaccccccagatcccccagccttctgtagctcagcagacaggctctgcttctgtccctsctgcctggctgctgtgggctctggaatttgcccacttccctgctgcctctagggtggtggagatccatcatgggaagagcctggcctggctgtgtggcct

SEQ ID NO: 37500 - DNA, 201 bp, Homo sapiens
aacttaatgaagaaaaataactgagtacaagatacaacacatgaagtgctcaaatcaacaaaggatggcggaaaggaggttactcattacctttctctctwaaaatgcgctccctttttcctgggcaaagtcttcctcagtctggttcttagactaagaatcagtaccatggctgggcacagtggctcacgcctgtaatcc

SEQ ID NO: 37501 - DNA, 201 bp, Homo sapiens
cctggctgctgtgggctctggaatttgcccacttccctgctgcctctagggtggtggagatccatcatgggaagagcctggcctggctgtgtggcctcaarcaagatacccgggaggtggctgtgactctatgaggctctgtaaataccagctgcttctctcatccaattagctggaaactgaccagttgcctaggcaatt

SEQ ID NO: 37502 - DNA, 201 bp, Homo sapiens
ctgcctctagggtggtggagatccatcatgggaagagcctggcctggctgtgtggcctcaaacaagatacccgggaggtggctgtgactctatgaggctcygtaaataccagctgcttctctcatccaattagctggaaactgaccagttgcctaggcaatttttatttcttaaaaataaatgatcaatatataaaaatag

SEQ ID NO: 37503 - DNA, 201 bp, Homo sapiens
cctgggggaaagggttatctgcatctcacatccccggcatcactgtgtctgcaaaacatctttcacaaagttttctttgcagttagagaacagcctgtgaragaaatgctcaaagaaatacataaacatgagtacaaggggtgtgcaaacaggtgttgcactgagcgcagaacccatttggcggccctttgtcctggttcc

SEQ ID NO: 37504 - DNA, 201 bp, Homo sapiens
ctacagggaaggggtcacaggttatatctgatcttctgccagtgctttctcctttagggatttctttactttttagctccttatttattttcatcattttraaatgatgaaaattatctattgccatgacaacataatgcaattgtgaactctgacagctttgttctttattcagaagtgatgttcttccaaggccatttc

SEQ ID NO: 37505 - DNA, 201 bp, Homo sapiens
aacatttttccagaaatgcacagctccgcctgtgcgctccgattagcgctgcagatttattacccaagttcggagtggcagtgaaccctgcccttgttttrtcagtgaactatgtaaatgagcaagacattgactctggtctcagacttgaccaaagtgtttggggtgagcaagggactataccctgaaccctgcgtccca

SEQ ID NO: 37506 - DNA, 201 bp, Homo sapiens
agaaatgcacagctccgcctgtgcgctccgattagcgctgcagatttattacccaagttcggagtggcagtgaaccctgcccttgttttgtcagtgaactrtgtaaatgagcaagacattgactctggtctcagacttgaccaaagtgtttggggtgagcaagggactataccctgaaccctgcgtcccagcccttgttgc

SEQ ID NO: 37507 - DNA, 201 bp, Homo sapiens
ctaggcaacatagtgagttcccatctctagatagacagaagaaaatagaagacctgcgtttcagaactcctttgtaaaaaccaggcattctctgaagattrgtttcccagactttcagctacaaaagataacttcagaatatctctaaaatggttgttagctcatctgattggcgtgtgaaggtaatgaagtcagtagacg

SEQ ID NO: 37508 - DNA, 201 bp, Homo sapiens
ttttatgtgtgtttctgtttaaacatatatcttagcatatagttttgattaacatcaaactcatgcccaacagcactataactcatgcctgaacgagcttwtctaacacatgcgtttctcataaggcacatcacagtcttcttgtgcttaggagcactaagcagcactttagcactgtgcttggggaccatttaaacagca

SEQ ID NO: 37509 - DNA, 201 bp, Homo sapiens
aggcagagtgtcaccattgtggagctcagctgggaatgtgtgtgttgaccagcgcaacttttttgctgctctgcgcatgcgcaggcatgaccaaaagtgcyctgagtattgactttggggttacaaacaccttttagtgagtaggtgaatttgcaaatgtggaatccaggaataatgacgacagactgtttatcgtgaagc

SEQ ID NO: 37510 - DNA, 201 bp, Homo sapiens
tcacattagaacggagccaggtaagatccgtggcacaggtgttcagcgttggaagggctccctgggacctggggtgcagagcagaagagttccgtcctccyggatgggtaggatccagacaggtggtggagagagagggatgtgccatccacagtccgcagtcacactagtgggaatttacaggagacaagaaggacaccc

SEQ ID NO: 37511 - DNA, 201 bp, Homo sapiens
ttatccacgctgacctcaaaccagaaaacatcatgctggtggatccatctagacaaccatacagagtcaaggtcatcgactttggttcagccagccacgtstccaaggctgtgtgctccacctacttgcagtccagatattacaggtaagaccgtccacaaggagacaggagctgctgaatgcccagtggcactcacagag

SEQ ID NO: 37512 - DNA, 201 bp, Homo sapiens
acgaatgcttccagcacaagaaccacacgtgcttggtcttcgagatgttggagcagaacctctatgactttctgaagcaaaacaagtttagccccttgccyctcaaatacattcgcccagttctccagcaggtagccacagccctgatgaaactcaaaagcctaggtcttatccacgctgacctcaaaccagaaaacatca

SEQ ID NO: 37513 - DNA, 201 bp, Homo sapiens
cacacctggctaattttttttgttttttgtagagacaggatttcaccatgttgcccaggttggtcttgaacttctgggctcaagcagtccacccatcgcggcctcccaaagcattggaattacaggtgtgagccactgaacctggctccaattctcttttataccaaagtgactacagttgctcctcagtagattgagaga

SEQ ID NO: 37514 - DNA, 201 bp, Homo sapiens
acccccgaaccatcatcgtgccacccctgaaaacccaggccagcgaagtattggtggagtgtgatagcctggtgccaggtaatttggggccaggacagggmaggaacctctccctggagagtggttttcctgcttttctgctgctagaaatgttgctgtatgggagctagtacaatagaaagtgcccagtgactgcaggcg

SEQ ID NO: 37515 - DNA, 201 bp, Homo sapiens
actttttgtatttcggtagagatggggtttcaccgcgttagccaggctggtctcgaactcctgagttcaggcaatccacccgcctcagcctcccaaagtgmtgggattacaggcataagccaccatgcccggccaagacacctttttttgagcctcagctttaaccaggagacagagttcaataatgacaccaacaatagc

SEQ ID NO: 37516 - DNA, 201 bp, Homo sapiens
aaacattttacctgattcgtcctttgaacacccctactttgggcaccttcctcaaatgtggactgctttagagttggggctctgtggaacaatagcaccgyattttggcgaatgactggattccctggccaaagctctttcccatactcagttatttcatctttcctctcctagggcttccttacgcttttcagtgtcacc

SEQ ID NO: 37517 - DNA, 201 bp, Homo sapiens
attgtcaaagggtgattctgagacagacactctgcgaacaggtatatctggtgtgaagttttctccctgggacttgagtgctgcattcaatcctgctggtmtcacttttcccctagagctttggaactttgctggtaacattttcacatgaggaagtggaggtaaagtttgcttgaggaggcatttcagcacccctcttaa

SEQ ID NO: 37518 - DNA, 201 bp, Homo sapiens
caagtaatcctccaccttagcctcccgagtagctgagactacaggcatgagccaccacacccagctaattttcaaaattttttgtagagatgttgtgagakccaataattttgagaacaagattttacagtgagtaagaaagcaactgctgctcaaagagagtgtcctggccgggtgcggtggctcacgcctgtagtccca

SEQ ID NO: 37519 - DNA, 201 bp, Homo sapiens
cagctaattttcaaaattttttgtagagatgttgtgagagccaataattttgagaacaagattttacagtgagtaagaaagcaactgctgctcaaagagaktgtcctggccgggtgcggtggctcacgcctgtagtcccagcttctcgggagcccaaggcggggggatcattctaggccaggagttcaaggctacagtgag

SEQ ID NO: 37520 - DNA, 201 bp, Homo sapiens
tcatagggtgactgtaacaaattaacacaaactattaataggtggcctaaaacaacagaaatgtcttctctcacagttttggaggagttggcagggccacrttccctcgaagactccaggtaaatccccttcttgccttctctcggcttctgatggctcccaacaatgctgggcatcccttgggttacagctgcattgctc

SEQ ID NO: 37521 - DNA, 201 bp, Homo sapiens
gccatctggtctctgccgccgttactgaagttgtagagtgaaagctgcacagacaatacatacacgagtcacgtggtgggaggggcgtgtgggggggggggcgtgttccggcaaaatcttactcctaaaagcagacttgggtttgaatttggtgtccagtctgtagtttggatccctgtagctagcctaagccaccataat

SEQ ID NO: 37522 - DNA, 201 bp, Homo sapiens
ttattttttaaacagaaaaaaaaaaacctttaggctaagtaggaatgggatgagatttttaccaggaactgagattcaggccctttttggtttatttgtaygtgggacctagcattgttagagatgccaggtagaatgagagtatctttgagagctgtgtttgtgtcgtcgccataggagctgattttataaatcctgaca

SEQ ID NO: 37523 - DNA, 201 bp, Homo sapiens
agtagtcgtgcagttccggtgaggcctaaccctccgttctgagccgcccactgtgatggtcactttgatgacgaggaccacggctccctgggaatcggccygcaagcagcctgctcctctaatgatggaacacttatggctgctggcagtgggagacagtatgaatattaataaactatatttcacttttagtactttttc

SEQ ID NO: 37524 - DNA, 201 bp, Homo sapiens
aggctttgcaggccatctggtctctgccgccgttactgaagttgtagagtgaaagctgcacagacaatacatacacgagtcacgtggtgggaggggcgtgkgggggggggggcgtgttccggcaaaatcttactcctaaaagcagacttgggtttgaatttggtgtccagtctgtagtttggatccctgtagctagcctaa

SEQ ID NO: 37525 - DNA, 201 bp, Homo sapiens
gaatcggcctgcaagcagcctgctcctctaatgatggaacacttatggctgctggcagtgggagacagtatgaatattaataaactatatttcacttttaktactttttcatggagatggtgtttgtgagtgaagtccgtgcactgagctacagacaggcgttttgttttcttgacaaaatggcgaacctcgcagccagag

SEQ ID NO: 37526 - DNA, 201 bp, Homo sapiens
gcagacccttcagacttaacctttcttgatgatttattgaataggaaaaaaagtatatttctgcttttgcagttccaagtttcttctcggtttagaatcartcacttcaaggaaagactgcactctttatgcatgtggaagtggcttgtttttagagttggattatcactcctttcatgtgttcagtttgcagcaagcatt

SEQ ID NO: 37527 - DNA, 201 bp, Homo sapiens
actgtagtgtagtctttgtgtgcaatcatttgtacttacctcatttgtatgctatatcatgtctaaaaaattgcacatacttaattttaaaatactagagytaattttaaaatgctagagctaggcttgcacctttaatcccagctacttgggaggctgaagcagaagaattgcttgtagtgatgagttgagaccagtctg

SEQ ID NO: 37528 - DNA, 201 bp, Homo sapiens
gaagaattgcttgtagtgatgagttgagaccagtctggccaacatagcaagacatcatttttaaataaataaatgaatgaatgaatgaataaaatacttcrttgctaaaaatgctagtgatcttctgggccttcagtgagtcataatctttttgctggttggagggtcttacctcgatgtcaatcgttgctgactgatcag

SEQ ID NO: 37529 - DNA, 201 bp, Homo sapiens
ctaacccccagtacttcagcatgtgaccttatttggaaatagggtcattgcagatgtggctagttaagatgaggtcccactaaagtagggtgggcccctartctagtatgactagtgtcctcataggaaggggaaattcagacacagacacgcccacagggaccatggctcatgagcacgaaagcagagactgggttaata

SEQ ID NO: 37530 - DNA, 201 bp, Homo sapiens
taagttgagaaaagcagcaaaggcatgccaggtaaaggaatagtgtaagagtgtgaagataggaagtataagagacattctagaaacagcgaatagaccarcttcattcaagttaaggacccaggaaggttagtagagctggagctaacaaggtagttggaatcaacatgtaaatgtatcgagttctcagctttatctcct

SEQ ID NO: 37531 - DNA, 201 bp, Homo sapiens
tggtctggaaagagaaggaatctaagctggctggtctttggataagttgagaaaagcagcaaaggcatgccaggtaaaggaatagtgtaagagtgtgaagrtaggaagtataagagacattctagaaacagcgaatagaccagcttcattcaagttaaggacccaggaaggttagtagagctggagctaacaaggtagttg

SEQ ID NO: 37532 - DNA, 201 bp, Homo sapiens
ggcatttatgtggtctcatgctcatctctatttgccagataccatccgtgtaagaaccatgctcaacagatacattttggagaaccagatgtctcattttstcattcaccaatgagtcttgaaaggctgaattcaagaagacaactttttaagatctttctctctcagtctacaaaagaaaaaacgggcttattactgtca

SEQ ID NO: 37533 - DNA, 201 bp, Homo sapiens
cagtgggaagaaacgggtgaagtacggattctgaataagcaagccagaatagtcttgtcaggcacgaggattcctacagacgtgcagtcacagtgcgtagrtggaggtcggagctcaggattgaagcaagaagggaacaccctccagcagatccatgggcccagggtggaggtggggctccaatcaggtgctggatgttag

SEQ ID NO: 37534 - DNA, 201 bp, Homo sapiens
cccaagtccagtagtccccctggtctctcacctagaaggagtaaaatccgccttctctttcaagagccaactaggaagtgcagagataacttaaaaagcasttgagattttgccattggatcaaactgacaatgtgcattaagcctctgtttttcctgaaaaggatattgacaaatgaggcgggaagtagccttgactagt

SEQ ID NO: 37535 - DNA, 201 bp, Homo sapiens
cgtgatctcagctcactgcaacctctacctcccaggttcaagtgattcttgtgcctcagcccaccgaatagctgggactacagacaaggcacgtgccaccrtgcccggctaatttttttgtattttagtagagacggggtttcaccatattggccaggctggtctcgaactctagacctcaggtgatccgcccacctctgc

SEQ ID NO: 37536 - DNA, 201 bp, Homo sapiens
ggttatggcagatttatcctaccgtgacctcctgggttcctcttactgctccccatgggctcgaaacttgccctcccaagtccagtagtccccctggtctstcacctagaaggagtaaaatccgccttctctttcaagagccaactaggaagtgcagagataacttaaaaagcagttgagattttgccattggatcaaact

SEQ ID NO: 37537 - DNA, 201 bp, Homo sapiens
aaatacgtatactgcaataaaccatatgatacataaaagaatttaggacaggatcaggataaatacaaataaatatagaagttcaaagttaggaagaaaargaattacagatatgcagacaataagtcccttacattgctacttagctgagcttcataacatcaaagagaaaaggcaaatgtggtcgctgcggtcattctt

SEQ ID NO: 37538 - DNA, 201 bp, Homo sapiens
ctgggtccactgtgctggtggatagctttctgttcatgacaatcacgtctgatgagcttggcagtgatttgtatgatgacagtgaccgtccagcagtatgytaaggagtctgggtcaggagggactttcttcatttgtttttgccacatcacccagagaacatccctgtaaaagaaggcggtttgatgaacttggaggaac

SEQ ID NO: 37539 - DNA, 201 bp, Homo sapiens
acagacatcttcctgctgctcgtttcagccctgatgtggtggaatgtgtctgaagcatgcgtttctaggtcttttccttatggcctccacaaagtggtctygatggccctcagttctgttcagcagtaatgcaaagtgaagatgtttctctgactcaaaagtgagatgacattaattgagcgcctaccatttgtgctcctt

SEQ ID NO: 37540 - DNA, 201 bp, Homo sapiens
cttctaaatgtatttataaatcatgaaaacattctctgctcatgggatacttctcttaaagaacctgcatgggatatctagaatcaaatattcccttcccmcctcgacagtgaaaaacctatgacttacttctagacttcactaagattagtgtcaattatctttgtaacatcatctctctttatttaggtatgacatatc

SEQ ID NO: 37541 - DNA, 201 bp, Homo sapiens
tgtctctccagaagagaaagagggaatggctattaggaaggcaacttacagtgtctgcttcaacatgttcatttttttttaaatgtttcactctgattgtwgtgttttttaactatactattctctaaatttggctgtgtttactatggtaattattttaattaagttctatttgattatttgtaattcaccttgttttac

SEQ ID NO: 37542 - DNA, 201 bp, Homo sapiens
tgttacatctcttaggtctttttgtatgcatagatgtgtgcacatttttttaaccaaaatgatgtattactgttttattatctgatttttttggatgacastctccaactttgtatttcaataaagttcatctcgtttaataccttgtttctattccgatttccataactggccctcaaatacccttcaaggctggtttgt

SEQ ID NO: 37543 - DNA, 201 bp, Homo sapiens
atagagctaaaagcagtgatttcatgtaagtgtttcatttgtccccctccagctcgcctctctcctaggagtcacgaactcaagtgcctccagggccaggyaggtggtcagtgagctggtaatgactaaggtctgcatctggtgacacacacgtgcagagggcagccttatccagccccaggtcattgtgaccacgaactg

SEQ ID NO: 37544 - DNA, 201 bp, Homo sapiens
tcaaggcctaacatgaaaatgcaactcagcaaatgttattccctggaaggccaaaataacaggtctgagtacttcttcttatccttctactggtttgatgsaacacaaagacccaaaacactcagcagaactgccagtctacgtgcctatcagacaaccttcaagactattacttttttttaactggcgtgttcacgcatg

SEQ ID NO: 37545 - DNA, 201 bp, Homo sapiens
aaatgtcctgtggtatacatgataggcgaattcagctgtggtcatgcaaattgtatttgagtttggttgaggctctaattaaaaacaacaacaacaacaamaaaaaattggttgtttttacttttcttagttgcctactgtgttctatttgaaaccctataggctttgccattttccccaagggtgcctacttcctactct

SEQ ID NO: 37546 - DNA, 201 bp, Homo sapiens
tgtggtatacatgataggcgaattcagctgtggtcatgcaaattgtatttgagtttggttgaggctctaattaaaaacaacaacaacaacaacaaaaaatkggttgtttttacttttcttagttgcctactgtgttctatttgaaaccctataggctttgccattttccccaagggtgcctacttcctactctttccttta

SEQ ID NO: 37547 - DNA, 201 bp, Homo sapiens
gagaggcaaggctgaggatgagaaccaagggaaggcccctgagtcccaaaagcagcttggtggtgatgtgtgagtgcagcctttccagcttccctggcacragtctcctcatccatggttaaatgatcatccaattatcatataggcctcctgacttgcctccccaccctgagccttcttgaccctaattcattctccagt

SEQ ID NO: 37548 - DNA, 201 bp, Homo sapiens
tggttcctaccaggctgtcagagccacttcctttttccccagaggcatacggaagctcctgagttctggttctcgtggtccccttgcagcccacagtgctrcactgagcccctcctgcagggagtgtttccctctgtcccaaggaaagcaaggccacagtgccctcagtggttccttgtgtttccctgagaaagttcacag

SEQ ID NO: 37549 - DNA, 201 bp, Homo sapiens
tcatcacaccaggtcaggtaatcccaggctgtgcttcttgaggcagtggaagctgatttcctttgctcacttatcacctgtgcctctcaatggcatgtctstaacaggaggcagaggcctccttcccgaggtccatgggtcagagttttaccatacgagatggcggtgtgggaggtgtgatttgtcccataagatctctaa

SEQ ID NO: 37550 - DNA, 201 bp, Homo sapiens
aatttttaacttaactgtttaatctgttctttaactctgtgtttctaaataatatgcttagactgctttttatggatttttttttccattttaggtattayccattgacttcctattatggaagatgaagatttagctttctaacccactgccatccccataacacacacaatttctctcctgttcctcctttcactcact

SEQ ID NO: 37551 - DNA, 201 bp, Homo sapiens
tagcacgtttgtgggtaacaccctttggaagaataaagaagatctcagtagaggtcagaagccaagctaaacatataacagttggtgagaataatgtagtyttagcaagtgtattttaataatcaattaatgtgaaaaacctgaaataatattaaaagactctgggaggagggaaaggctttgggggagatagttatgtaa

SEQ ID NO: 37552 - DNA, 201 bp, Homo sapiens
attgtcattcccgacactcccagccccacggtcagcgtcatcaccatcagcagtgacacggacgaggaggaggaacagaaacacgcccccaccaggtgagrcagtgccaccttagccttccaggaaggagccgggagggtttgcattgtgtgcagatctgaccatcttccatcatcaaacataaggatccctctcttctga

SEQ ID NO: 37553 - DNA, 201 bp, Homo sapiens
gaaaattttcttctgattcccacactgtttttgtttcctctttcttttgtttgcttattttattctctttcaggttagaggcttcctttactgtctggtgwtcattagctattcattcctatttaagactaaagcactaaaaaactaattggaaacctggagggtaggggagagactattgaatgtgggcttctctataga

SEQ ID NO: 37554 - DNA, 201 bp, Homo sapiens
ctgcatctgtttccagaactctaccctgcccaactcatgatttcctcacagatgcgctcctctgttatttttatggctagatacccttgtaccttcccccraacaccaccacaatggccccttcaccagtgcagagccagatggcaaccctccaagttgtccccaactcctcatggccctattgggctatctctcattctg

SEQ ID NO: 37555 - DNA, 201 bp, Homo sapiens
gttgtccccaactcctcatggccctattgggctatctctcattctgcacgaatatcaggacaggtcactcccctcaaccccctgacagcctccatatcacmcagggaacctcccacagttcttattctgacctacaaggctattgtgaattaagatctctccgagaaaagaagaaaggtggtgatataagcccccagtcag

SEQ ID NO: 37556 - DNA, 201 bp, Homo sapiens
ccagttgcctaggcaatttttatttcttaaaaataaatgatcaatatataaaaatagatgcacattcattttaaagtcttaaataagcacacaataaacaataaatttcacatccatcatgccagcagcctctcactgagtttgaagacaaacagaagtagttcccaaagtaaccacactaacttaaatatctctgaacaa

SEQ ID NO: 37557 - DNA, 201 bp, Homo sapiens
gtaagaacccttagcctcccaacctgtttagcaagtccctcctttttgtttactcaccacccagctgacttcatgaagcctcattgccagtacatttcaaratcgatataattatagtgaaaggtatgtatttgcttatttttaagaccaatgccttagcaaaacagtctgaaagaccagaagtctctcccttgttggtga

SEQ ID NO: 37558 - DNA, 201 bp, Homo sapiens
aacccaggaggcagaggttgcagtgagccgagatcgcaccactgcactccagcctgggcaacagactgagactccatctcaaaaaaaaaaaaaaaaaaaaagaagccataatatgagtttctaaagtccatgtaaatgcccaaaaggcgctatcaaaatccctacaaaagtgttcatctacttcttttttcctgttcatcc

SEQ ID NO: 37559 - DNA, 201 bp, Homo sapiens
tcagtctgaatcatctaatgaccaaagacaagcagaatagtgatcatggattaaaagagcttaaaacacaacatacacacacacacacacacacacacacmccagtgaatctatcaaggaagaatcacaaacgttcattttagatttcttagaaaaattaggttcaagcagtgacttccgcctctctctcatttttgcttt

SEQ ID NO: 37560 - DNA, 201 bp, Homo sapiens
caatcctgctggtctcacttttcccctagagctttggaactttgctggtaacattttcacatgaggaagtggaggtaaagtttgcttgaggaggcatttcrgcacccctcttaaaaattgactttgctcttgtttcttctctcaaaccatcacctcatctctcttagactttgtcggtgctagttgttgttctttctacag

SEQ ID NO: 37561 - DNA, 201 bp, Homo sapiens
gttgtctctgtgttctctaccccgttaccatcacgcacattatagacacttctgaaaacttggcaaatcagtgaatgattgtacaacatgcttttgttcayacagatttttgtatgaaactgcaatcgaggaaattgccacccttttagagtgtatagtatatcttcaaaaattgacagtgatgattaaaagcaaaagaca

SEQ ID NO: 37562 - DNA, 201 bp, Homo sapiens
aaaagcaatgggaactcattaaatgattcttcagcaagggaatagctggttagatctgtgttgagcaaagatctgtctgctgccacacaagtcaaatgagtctggaaaaaaatgtccattcggtttaacaactcacaagttgtcagtaacgcagtggcagccattcagtggagtggtaaaagcagaaaccagtttaccagg

SEQ ID NO: 37563 - DNA, 201 bp, Homo sapiens
tctcttttgctgaatgttgctccgttccaaaggcactgtaggagagtccctgttcttggactacaaagaggccccattgttaggataagaaaactggttawtgagaagatggagcagtggtatcctcatctgaaaactttcttttctttctttccttttttttttttttttttttaagacaaggtcttactctgtcaccca

SEQ ID NO: 37564 - DNA, 201 bp, Homo sapiens
aaaaagcaatgggaactcattaaatgattcttcagcaagggaatagctggttagatctgtgttgagcaaagatctgtctgctgccacacaagtcaaatgagtctggaaaaaaatgtccattcggtttaacaactcacaagttgtcagtaacgcagtggcagccattcagtggagtggtaaaagcagaaaccagtttaccag

SEQ ID NO: 37565 - DNA, 201 bp, Homo sapiens
tccaaaaagcaatgggaactcattaaatgattcttcagcaagggaatagctggttagatctgtgttgagcaaagatctgtctgctgccacacaagtcaaatgagtctggaaaaaaatgtccattcggtttaacaactcacaagttgtcagtaacgcagtggcagccattcagtggagtggtaaaagcagaaaccagtttac

SEQ ID NO: 37566 - DNA, 201 bp, Homo sapiens
aagaaaacctaggcaataccattcaggacataggcatggcaaagacttcatgactaaaacaccaaaagcaatggcaacaaaagccaaaattgacaaatggratctaattaaactaaagagcttctgcacagcaaaagaaactatcatcacagtgagcaggcaacctacagaatgggagaaaaattttgcaatctatccatc

SEQ ID NO: 37567 - DNA, 201 bp, Homo sapiens
taaagttgtatctttacctagacttcttttttcagctccagagtcataaagccatcaagctactggacctctctctttggatatctcatccttaacacatycaaaggaaacatcttggtcaaccccctgaaatatactgctgttctggaattctttatttccataaatggcaccttctgtcacccagtagttcacatcaga

SEQ ID NO: 37568 - DNA, 201 bp, Homo sapiens
tatgggggttagggagggcaaaagccctgttcctgccctctcccctctgcctccctcccctgccccagggcatgaagtgctagttgggtgtctcacctcayggccttctcccacctctgacttctccctttgcattttcagcactgtctccaagcaaagaaaaaacgtcatcagctgtgtcacagtccacgactcccccta

SEQ ID NO: 37569 - DNA, 201 bp, Homo sapiens
gcctctcctgagagccacaggcccttcagaggaggagtcagtaatggcaccccaggtttgaaagatagtattcatatagaaacagcttcctgcatttccarcttgctaatggtttcttccattcttccttttcagggcccctgagatcatccttggtttaccattttgtgaggcaattgacatgtggtccctgggctgtgt

SEQ ID NO: 37570 - DNA, 201 bp, Homo sapiens
gttaggtaaagggattaatccagagaaagagattttaaggctgcatcattgattttattgttttggataagaacgtggaattggcttttctgtaaattgastacattatataaggcacaggttaaagtgatccttccacgtgaattctttcatggttatttgattattttcagaatatcttgacatttgaaaggcatacag

SEQ ID NO: 37571 - DNA, 201 bp, Homo sapiens
ctcctgagagccacaggcccttcagaggaggagtcagtaatggcaccccaggtttgaaagatagtattcatatagaaacagcttcctgcatttccaacttrctaatggtttcttccattcttccttttcagggcccctgagatcatccttggtttaccattttgtgaggcaattgacatgtggtccctgggctgtgttatt

SEQ ID NO: 37572 - DNA, 201 bp, Homo sapiens
ggtcagagttttaccatacgagatggcggtgtgggaggtgtgatttgtcccataagatctctaaatcccaccacccattctgtaacagttgatagtcctcrgcactgcattttccagttactcatgtttacagacaaatgtctctttgtctgtagttgctctctgaagaaatcaaagagcagctgttgtcctgcctcagca

SEQ ID NO: 37573 - DNA, 201 bp, Homo sapiens
aaagtgagactccagcattgcagttcctctccacggaggtcttatataacgaagacctccataaacaaacattgcagaaacataacatcggatctctcctmttaaagttcacactgtgtaatgtaaagtggaataatcattttacattccttgtaagttctaagaagtcccttctggggcagctgtttgctaaaccttttt

SEQ ID NO: 37574 - DNA, 201 bp, Homo sapiens
ctgatgagaagggtggggggcgttgctcggtaggaagtgatggaacctaagctctggcttgcagaatagaatcgttttaaccggacgtgaaggtgcaagcmggaatgatgctcactcccatgtaagctattgatgctatcccggggggataaagtaacaaggctggggactgtgtgccgtattcccttcatcagcctttcc

SEQ ID NO: 37575 - DNA, 201 bp, Homo sapiens
gtaggtaaatagtatctcctttatcacctgcttttcacccactattcctcagcatatatatagatatctagatagatagatatagatagatgatagatagwtacaaactccctatgtcaagcttctcctattaaaaagtggagctttataggtttctattcacatttcaccattgaaatccttattatcagagaagaacta

SEQ ID NO: 37576 - DNA, 201 bp, Homo sapiens
ctccacagtaactctcaggcttcttgaggtcagaaccatgcattcttgttttgctgccacctccccacctgcctgcccctcatgctgtgtcgagtccgcaygtgagaaataagatgagagtcactggcagcaaagtgagtgctgacatttaaatatggaagcaagtctggggccccagactccaagcgcctagtacctgtg

SEQ ID NO: 37577 - DNA, 201 bp, Homo sapiens
cacagtgcttggcggtaggaaagaagataatgaaaccacagcttcttccagctcatgagtgtgaacaatgacacccaatgtctgcagacaccgaccctctyaccccagtagacaaggctgtacgctgggtgctgtgaggtgtacagagatcagtcatgcacaggccatggcctcgggatgcttccagtctaggagctgatt

SEQ ID NO: 37578 - DNA, 201 bp, Homo sapiens
ttcttgttttgctgccacctccccacctgcctgcccctcatgctgtgtcgagtccgcacgtgagaaataagatgagagtcactggcagcaaagtgagtgcygacatttaaatatggaagcaagtctggggccccagactccaagcgcctagtacctgtggccttgctcactgtttttcatatgctgtcctctggtcttgtt

SEQ ID NO: 37579 - DNA, 201 bp, Homo sapiens
ttcatatgctgtcctctggtcttgtttgtaaagtgacctgttgcacaacctgtcagtaccctgaaggtcagtgactgtgtccacacctctttgtgttctcrgtggttagcataatatttttaacataacggactctttttaaatgtttggtgatgacacagtcactgagcaggatgtgctgtaagaagaaaacatactctc

SEQ ID NO: 37580 - DNA, 201 bp, Homo sapiens
cagtcatgcacaggccatggcctcgggatgcttccagtctaggagctgattatagatgattcttatttaaaaaaaaaaaaaaaaactatcagtgcaaggaygagtgaaagagctgaattggcagtagagacatagttagcgttgtaggaatagagcacaggagggagcctcagtcagcagggagtgctagagcaggtaagg

SEQ ID NO: 37581 - DNA, 201 bp, Homo sapiens
agtgacctgttgcacaacctgtcagtaccctgaaggtcagtgactgtgtccacacctctttgtgttctcagtggttagcataatatttttaacataacggrctctttttaaatgtttggtgatgacacagtcactgagcaggatgtgctgtaagaagaaaacatactctccctcattctgtgaattagtcagaatatatca

SEQ ID NO: 37582 - DNA, 201 bp, Homo sapiens
gagcagtgatgctgcaggtggacctgatgtgagaatgcagtgtgagcagtcagttttgttgtgatatatagaacctatatggagaaagggtagtagggcaytggagaaaattcatctgaataaccgtgcctgttgcaaatgcacaggctttgcacaagcaatccaagaaacttagacctaaagtttagtttccctgcttgt

SEQ ID NO: 37583 - DNA, 201 bp, Homo sapiens
ggctctggggccctgtaacatttgcgcgtgtacctgggggaaggggtgctgcatcggcccgccccccgcagccacccgccgcagcagtggtcaccgagtcrgggtgtggggaggtggaaatgaaatgcataattcataggccgctgtggtgtccagtctgtgggaggggtggtaattacagaactgagaaatgaggctgca

SEQ ID NO: 37584 - DNA, 201 bp, Homo sapiens
ttagggtgaaagagctgttgggagtccgaaaactaaccttgcccagccctaaggctaaagcatccatagccagacctgtgagcttcttgacaaaaatcagsatggttttgttcattacctccttgaagacatttgtttctcccaccagccctcatgaggcacctggtcttaactccctaaccccaaactacctgtccccat

SEQ ID NO: 37585 - DNA, 201 bp, Homo sapiens
atccaaaaagcaatgggaactcattaaatgattcttcagcaagggaatagctggttagatctgtgttgagcaaagatctgtctgctgccacacaagtcaaatgagtctggaaaaaaatgtccattcggtttaacaactcacaagttgtcagtaacgcagtggcagccattcagtggagtggtaaaagcagaaaccagttta

SEQ ID NO: 37586 - DNA, 201 bp, Homo sapiens
tccctgattccataagctggttagctcagttggctggagtagtgtttggggctcacgagaacaaaatgagcattctcatctcttttgctgaatgttgctcygttccaaaggcactgtaggagagtccctgttcttggactacaaagaggccccattgttaggataagaaaactggttaatgagaagatggagcagtggtat

SEQ ID NO: 37587 - DNA, 201 bp, Homo sapiens
gaccagacgcggggtggggggccaccgccatcttgctggtgatatgacagccagcatatccactccaaagggtgtcgcaaagactctgcaaaactaaaagkgttgctcatcaaaaggcagttgtcaaataagaacacccgtcttctccacggcactgagaccatccagatctggcttgggactggggtgaagtaggagtag

SEQ ID NO: 37588 - DNA, 201 bp, Homo sapiens
gatccaaaaagcaatgggaactcattaaatgattcttcagcaagggaatagctggttagatctgtgttgagcaaagatctgtctgctgccacacaagtcaaatgagtctggaaaaaaatgtccattcggtttaacaactcacaagttgtcagtaacgcagtggcagccattcagtggagtggtaaaagcagaaaccagttt

SEQ ID NO: 37589 - DNA, 201 bp, Homo sapiens
aagtaggagtagctggtaacttagtgtgatgcttgggccagagtcgtgggtaagggaaaatgacatcccacaaaagcaaagggtccaagaacaggatttcygttctcttgcattggattctactactccctacttttgaatacatcaggaaaaaaaaattactcaggacacacctagccttaagcactaaggcatgctttc

SEQ ID NO: 37590 - DNA, 201 bp, Homo sapiens
ctgtaggtggaggacgggcacactcaggcccttccacttccctctaaaggttaaatacatgcatacatacatacatacatacatacatacatacatacathgacttttttgtatcttatttgtactgcttggccgtgactcttttttaaaaattgtggcaaacacacacatagcataaaatttatcatcttagcctttgtt

SEQ ID NO: 37591 - DNA, 201 bp, Homo sapiens
ctggtaacttagtgtgatgcttgggccagagtcgtgggtaagggaaaatgacatcccacaaaagcaaagggtccaagaacaggatttctgttctcttgcaytggattctactactccctacttttgaatacatcaggaaaaaaaaattactcaggacacacctagccttaagcactaaggcatgctttccctccactgata

SEQ ID NO: 37592 - DNA, 201 bp, Homo sapiens
cctagcaattaaaatcaaagtattttcctggtaaaaagaaaataataaagtcttaaatatgtttcattttaggtatttctttttttgcagcagggtgggtrggtgtttgttttgttgttgttttggatttgtttttttaatggaatctgcagccaaatcctaatatggtttaaagataatatatatccagtagtcacaaaa

SEQ ID NO: 37593 - DNA, 201 bp, Homo sapiens
aattccaaatgggttcatacatctccccaacacccctcattttgacatacacaggtacatcttgatggtcagaagcccttgttttcctgttgtaatctgcsagcatatctgtcctacttttggccttacagcctccttaatctgaccttctagcctttgaagacattcaagatttcaggaggagttttgttttttaatttg

SEQ ID NO: 37594 - DNA, 201 bp, Homo sapiens
catgtgatttcgcatgctgcagtgggactgcgcaggataaagtcttcaacataagagctaaggtggaggctctagagggcgtaatgacaatggccataaaataagaggtttgggctaaatccctgaggtcccaagtcctaaccctgcatgagccaggtgccacttctagccctcctgttcctcctccctgtcatttttgct

SEQ ID NO: 37595 - DNA, 201 bp, Homo sapiens
gatgtgaacttgaaaggcccaaactcgcaagagttccatttcatatagctattctcttttgggggaaaaaagaaaagaaaaacctacagtataggcagatstttatttttcctataaaagaaacccagatgcttgagggtcacggtgatcactgtgacttaggccatattgactttgtgctgtgcaccgccctgcgccctt

SEQ ID NO: 37596 - DNA, 201 bp, Homo sapiens
agagcatgtgatttcgcatgctgcagtgggactgcgcaggataaagtcttcaacataagagctaaggtggaggctctagagggcgtaatgacaatggccataaaataagaggtttgggctaaatccctgaggtcccaagtcctaaccctgcatgagccaggtgccacttctagccctcctgttcctcctccctgtcatttt

SEQ ID NO: 37597 - DNA, 201 bp, Homo sapiens
tacgatcatgatgagtttcacagaacctcaaagcacttttaagtcattaagcagctttaaaaaaaaaactgatttcccaaggtacagtttaaagtcatttkatctctttgacatcaccaaaacttgagccctgcctcttgtctccaggcatgacagtctgacctcagatagggtcctgttgtagtctctgtctggggctac

SEQ ID NO: 37598 - DNA, 201 bp, Homo sapiens
ccagtgggtgctcagttagtatttattggaccaatctggtctgagtatgtcattgatctttgtatgcttgtcacctggtagagccagcacagagacagtgrgcagtgtctgtttgaataaggaagaatggaagcgggcagggaggggagcaggctgtatctgaaacatgtctcatgagtgcagagaaaaggctgcaccctt

SEQ ID NO: 37599 - DNA, 201 bp, Homo sapiens
taggccttgtggtgcggtggaaggcactgcggccgtggagatggaggtgggccatgctgggaggccttgtggtgcggtggaaggcactgcggccgtggagwtggggcagggctgctgttggggtggtgcaggagaacacgcatcgagcacttgtcggcttgcctggtccagaggttcaataaatgttggtttctttttgct

SEQ ID NO: 37600 - DNA, 201 bp, Homo sapiens
acatgtatcccagaacttaaagtataatttaaaaaaaataatagaaaagtggcttcatgtagctgttagcttagcttgctctcttgaccttctgccttccrctgtgtgagggctcagcaagaaggccctccccagacaccaaatgccggcaccttgatcttgaacttcccagccaccagaactgtgagaaataaactttat

SEQ ID NO: 37601 - DNA, 201 bp, Homo sapiens
tcatccttggtttaccattttgtgaggcaattgacatgtggtccctgggctgtgttattgcagaattgttcctgggttggccgttatatccaggagcttcrgagtatgatcaggtgggtccagatgacacagatattcacaagacctcattcttcatctggaaaatagcctggattagcatttcattgattacatgacaaa

SEQ ID NO: 37602 - DNA, 201 bp, Homo sapiens
ctaaacacttgcactggggactaagtttctaacacaagaactttggggaacacattcaaattatagcagatctctcctacccattttccagatgctgaaartaacacctcccagaggaacggcactgggcctggccttaggccaccagcccaccttgcctctcctgattcttttccgctttcccttgcttcattccctcat

SEQ ID NO: 37603 - DNA, 201 bp, Homo sapiens
tgtgggttcatgcaaatcaattatgtgattagcaaacatggtcattgcacatgtcctgtgttctacagcaggcttggccaagtgggacccagcagatcctrcttcccccagcatggcagcaactgactggagtggccacccacacatcagtgcagcatgccaccgtgattcccgagaccatggcaggcacccagcagctgg

SEQ ID NO: 37604 - DNA, 201 bp, Homo sapiens
acttggcattcttcccacttgaaagtcctctttctcactcacagccagttatgtttcacctactccttatgagtagaagaaacccacccgttgagcacacrtggccaggctcatcccttcagcagctgcacagctagtgagataaccaactgcagtcagcgtttaattggggaggaagcttgatcttatagaggagctcta

SEQ ID NO: 37605 - DNA, 201 bp, Homo sapiens
gtcttgcctgcatttgggtgcttggaagtcctcctcaggctgtgttttccttgtgcctcctacctttttagaaagtgcttcattggttcccatcagggcarggcaggggctggatggaggacctagtgatgtgttgggtatcagggggtgctgacctaaggcttgttggaaacacaaatccagagcttctctgcgtgctcc

SEQ ID NO: 37606 - DNA, 201 bp, Homo sapiens
tcttcccacttgaaagtcctctttctcactcacagccagttatgtttcacctactccttatgagtagaagaaacccacccgttgagcacacatggccaggytcatcccttcagcagctgcacagctagtgagataaccaactgcagtcagcgtttaattggggaggaagcttgatcttatagaggagctctacttttagaa

SEQ ID NO: 37607 - DNA, 201 bp, Homo sapiens
gagacatgaagtgagcacatgcttttggaaaaatggtactgatagaccggctcgatgcacggttgccacaaaccttcaatttgtgtaaaaaaaaaaaaaccatggtatctgcaaagctcagtcaagctaggggcaatataatgaggtatgtctctctatatatatgcccctccccaaattccaagcccattcagtatttaa

SEQ ID NO: 37608 - DNA, 201 bp, Homo sapiens
agataaccaactgcagtcagcgtttaattggggaggaagcttgatcttatagaggagctctacttttagaacacctctaaggcaccttgttgtcccggttscctttcagaaatacgcatgctcacggaagccattataatcccatcatgcagcagcctgcactattgaccggtcatgtgacccttccagcagcacagccct

SEQ ID NO: 37609 - DNA, 201 bp, Homo sapiens
cagagacatgaagtgagcacatgcttttggaaaaatggtactgatagaccggctcgatgcacggttgccacaaaccttcaatttgtgtaaaaaaaaaaaawccatggtatctgcaaagctcagtcaagctaggggcaatataatgaggtatgtctctctatatatatgcccctccccaaattccaagcccattcagtattt

SEQ ID NO: 37610 - DNA, 201 bp, Homo sapiens
aacacctctaaggcaccttgttgtcccggttgcctttcagaaatacgcatgctcacggaagccattataatcccatcatgcagcagcctgcactattgacsggtcatgtgacccttccagcagcacagcccttaaatgtgggtgtggcccacgtgatgcggcagcagccaaccagcaccacctcctcccggaagagtaagc

SEQ ID NO: 37611 - DNA, 201 bp, Homo sapiens
attaatcttgtacatctccatcagagatcctgggtgactaggtacattgtcaatgagcagtcatatcttgaaagaaatgtttttgttctgagaagtaggtytcaacaatgggcttaaaatattcagtaaaccaggctttaaacagatgtcctgtcatctaggctttgcagttccatttataaagcacaggcaaagtagatt

SEQ ID NO: 37612 - DNA, 201 bp, Homo sapiens
gcccttaaatgtgggtgtggcccacgtgatgcggcagcagccaaccagcaccacctcctcccggaagagtaagcagcaccagtcatctgtgaggtaggtgrtgagagccaccctagggaagagaaatcccaggggatgtgagtgctaaagaaatgtagtttagggagtatcagcacccactctgaacatgggacagttgca

SEQ ID NO: 37613 - DNA, 201 bp, Homo sapiens
gtgttagcaggcatgaaatcacattaatcttgtacatctccatcagagatcctgggtgactaggtacattgtcaatgagcagtcatatcttgaaagaaatstttttgttctgagaagtaggtctcaacaatgggcttaaaatattcagtaaaccaggctttaaacagatgtcctgtcatctaggctttgcagttccattta

SEQ ID NO: 37614 - DNA, 201 bp, Homo sapiens
ttttcatgagctctgaaatgagttccaattggctaagtcagtagaaaccttactgcaaacgaaattgttatttatttaatatttggaatttgcaactgttktaatcaattaaattatgtttccgctttctgtgagttaagtaaacctgaaatacaattaactgtagttaatagcgttggtagagttgcttctttcatttta

SEQ ID NO: 37615 - DNA, 201 bp, Homo sapiens
ggcacatgtttcttcctggaagaccactgttctctggtggggtagcatcttctgggcagctgggaccctgccactgatctgacctctttctcctcccgccrcagtcaacaccagtcaccactcgtcctcctacaagtccaagtcctccagcaacgtgacctccaccagcggtcactcttcagggagctcatctggagccat

SEQ ID NO: 37616 - DNA, 201 bp, Homo sapiens
cgaggacaacactaagccgttcatgagggatctgtccccatgacccaaatacctcccattagttcccacctccaacactggagatcacatttcaacataagattggagggggacaaacatcaaaactgtagcatagggaagccagcatctgtccacagcctgctgtatgtccctactcttcttggccctctgccctcccct

SEQ ID NO: 37617 - DNA, 201 bp, Homo sapiens
ctgcgaggacaacactaagccgttcatgagggatctgtccccatgacccaaatacctcccattagttcccacctccaacactggagatcacatttcaacataagattggagggggacaaacatcaaaactgtagcatagggaagccagcatctgtccacagcctgctgtatgtccctactcttcttggccctctgccctcc

SEQ ID NO: 37618 - DNA, 201 bp, Homo sapiens
agaggactctgtgattcttcccaaaaggtcactccctatccagaatgataagtcctcagtttttagaatgtagttgttaggtaaagggattaatccagagraagagattttaaggctgcatcattgattttattgttttggataagaacgtggaattggcttttctgtaaattgactacattatataaggcacaggttaaa

SEQ ID NO: 37619 - DNA, 201 bp, Homo sapiens
gggccattctttctgagatggttccccttactgctttcctctgtcctgatgtgggaatagggggaagggggtgctatgatccttttatgcctgatatgtgmctggtaaagaattctagaactggccaggcacagtggctcatgcctataaccccagcactttgggagttcagggtgggaggatcacttaaagccaggaagt

SEQ ID NO: 37620 - DNA, 201 bp, Homo sapiens
cacacattattggagaataaagatatcatgtgtgtatacatttcccaagtgactaaaacttacccatttcaacaccatacttaaaatgtttttttttttttctggacaaaaatttaacaggaagacatcatagcatcccataccttctgatatagagtagaggacgaaggggaatgaatggcactggcattttaataagca

SEQ ID NO: 37621 - DNA, 201 bp, Homo sapiens
ttaatcctcccagcaacgttgtgagataggttttattattatcatttccattttagaggaggaaactgaggcaccgagtgattaattctcttacccaaggyccttgctcgttcatgagaggtgggcttaggctttgcagccagcaatctggcttcagagtctggactcttaaaatatacatacacagcagcataagtaagt

SEQ ID NO: 37622 - DNA, 201 bp, Homo sapiens
agcagggacacccacaggggctaagggctggggggagtctagatatgagcagaccatggggaatgtggagggttgagggggaagaagcctccggaagagawcgcgatatggagaaaacaggaaatacaagtcatgtcatctgacaaaacacagacactgatgcccacatatgtacacacgtgtcccaagcagactatgcga

SEQ ID NO: 37623 - DNA, 201 bp, Homo sapiens
atgaatctacaatcttttaggtctcaaggaagctgggtcaataattcataacccgttaagtctcaaggcagctgacttcctctactttctaaaactttcargttacccagttggtaacatgttgaataataagtcttctctcagctattccttgtttatcatgtggatcagcaacttctctaacatttccgtggaattcta

SEQ ID NO: 37624 - DNA, 201 bp, Homo sapiens
ccaggaagtcacaactgaaaagagtcagtggattccagggacatcaggaaggaagcagcagcaggagcagtggctggcaagaaagtggaaccaccgagcasaagtttgggaacctagaggatacaggtgccaggacccccagcagggacacccacaggggctaagggctggggggagtctagatatgagcagaccatgggg

SEQ ID NO: 37625 - DNA, 201 bp, Homo sapiens
ttcagttatctggacacaccagcatcttttctatctgccaggctttgtcactgcataccaacatgaatgcatgggatgcagacacaaagccccaggctcarcatgtccctctccctctctgcatacatctcctgtacttctctaagctttgcagccatctaaggacatctgtaaacagtactgcccatagtcctgagcccc

SEQ ID NO: 37626 - DNA, 201 bp, Homo sapiens
tgaggcacctggtcttaactccctaaccccaaactacctgtccccatctaacatctgccccatcaggtatcaaaggcatctgtgaaacaggaggaaggagyacccctccaatgcaggcgtcatgtcaagtggagtctccccagcaggctgtccttcccatggatgtctttctgccaggctggagaactgtggtccctgacc

SEQ ID NO: 37627 - DNA, 201 bp, Homo sapiens
agtaggcctgatccctaaagttctctagaacttgctgggaaaaccttgaagaactccagggcaaggataaatctccaggcccatgcagctgtagcgccccygccctgggagctgagccacagctactggattactaggtgaaacagaccccactcctttctccataccaggattccagtgcacaatttttaaaaaaccaat

SEQ ID NO: 37628 - DNA, 201 bp, Homo sapiens
gtttaaagtatttttgatgtcccaaaatagtaatgaggcgattctttaagatggttccatggggtggagctgtagcagtgaaggtgaggaagagcaaatgrgagatcagttatgacagaacctggaaatgctcactcacagtattcaggaaccagcagccctacctgcctgaaaccgaaccgagaacaggaacagcccctg

SEQ ID NO: 37629 - DNA, 201 bp, Homo sapiens
aaaataccatggactaatagagtgtcttgcttccaaggagtttaaactgttttataattctgccaaccataatttatcttcataagctgccgtagagacaagagaaaaagtgagattaataatcacattttatagatggtgaaataaaaactcagagaaattgagtaacatttttccagaaatgcacagctccgcctgtgc

SEQ ID NO: 37630 - DNA, 201 bp, Homo sapiens
aaggtgccccagtgtgttttcccctaggaaaatccctactggtaactagtcttatttgctcaataaacaaaatcttaggctgggaactgaaggtcagcacragcagcatctgcgggtgtgcaccggggctctggggccctgtaacatttgcgcgtgtacctgggggaaggggtgctgcatcggcccgccccccgcagccac

SEQ ID NO: 37631 - DNA, 201 bp, Homo sapiens
taaaataccatggactaatagagtgtcttgcttccaaggagtttaaactgttttataattctgccaaccataatttatcttcataagctgccgtagagacaagagaaaaagtgagattaataatcacattttatagatggtgaaataaaaactcagagaaattgagtaacatttttccagaaatgcacagctccgcctgtg

SEQ ID NO: 37632 - DNA, 201 bp, Homo sapiens
agctagttgaaaaaatttaatatctatgcaggccaaagagtgtctgtctctgtgccgggttcatcctgtggaatagcagcttgcaaacttcatgccatccrttcagtcttgcctgcatttgggtgcttggaagtcctcctcaggctgtgttttccttgtgcctcctacctttttagaaagtgcttcattggttcccatcag

SEQ ID NO: 37633 - DNA, 201 bp, Homo sapiens
cctgggtgtgctcagggagagtctgggaccaccaagagtctcaggtgctgcctcaccgcccctcactctttcttctctgacttccctcaagagtccctccctcccttcctcctgccttcctttcttcccttctccacccaaagccccagctgatgtgtgacagctccctgattccataagctggttagctcagttggctgg

SEQ ID NO: 37634 - DNA, 201 bp, Homo sapiens
gatccttgtcatcaactctgcaccttatgggcactgagaattcagtaactggctcatcaatactcagctccaggctggggaccctaattcctagggacacyttcttatccaagcgaattccccccacagtcagagcagcccttcatgtgaattagctattttctattgctctttgtcgcctgtgaatatgtaattgcatgg

SEQ ID NO: 37635 - DNA, 201 bp, Homo sapiens
tgaggtgtacagagatcagtcatgcacaggccatggcctcgggatgcttccagtctaggagctgattatagatgattcttatttaaaaaaaaaaaaaaaaactatcagtgcaaggatgagtgaaagagctgaattggcagtagagacatagttagcgttgtaggaatagagcacaggagggagcctcagtcagcagggagt

SEQ ID NO: 37636 - DNA, 201 bp, Homo sapiens
cacggagggtcagcgtgcaaggtggacacagtgcagtccaaggctcttgactacagcagaagcctgggtgagctgtcgggggactgctaatagaagtggasgtagaactggcaagccaggcatgggggctcatgcctgtaatcccagcattttgggaggccaaggctggaggatcatttgaggtcaggagttcgagaccag

SEQ ID NO: 37637 - DNA, 201 bp, Homo sapiens
gtgaggtgtacagagatcagtcatgcacaggccatggcctcgggatgcttccagtctaggagctgattatagatgattcttatttaaaaaaaaaaaaaaaaactatcagtgcaaggatgagtgaaagagctgaattggcagtagagacatagttagcgttgtaggaatagagcacaggagggagcctcagtcagcagggag

SEQ ID NO: 37638 - DNA, 201 bp, Homo sapiens
cgctgtttctgctctggtatcacttgccccttgctcctactgccctagcccttgtgtcacttccttgttctcctgaacagtttttttttttttttttttttgagacagagtcttgctctgtcacccaggctggagtgcagtggcgtgatctcggctcactgcaacctcagcctcccaggtgcaagccattcttgtgcctca

SEQ ID NO: 37639 - DNA, 201 bp, Homo sapiens
gaacccaggaggtggaggttgcagtgagccgagatcacgccactgtgctccagcctgggtgacagagcgagactccgtctcaaaaaaaaaaaaaaaaaaaagtggtgttttaggaaacttcgcctggcagtcgtacacaggagagacagctagggacaggcttgtacacccctggtatatggcccgagtggtaaactcaac

SEQ ID NO: 37640 - DNA, 201 bp, Homo sapiens
tgaacccaggaggtggaggttgcagtgagccgagatcacgccactgtgctccagcctgggtgacagagcgagactccgtctcaaaaaaaaaaaaaaaaaaaagtggtgttttaggaaacttcgcctggcagtcgtacacaggagagacagctagggacaggcttgtacacccctggtatatggcccgagtggtaaactcaa

SEQ ID NO: 37641 - DNA, 201 bp, Homo sapiens
ttgaacccaggaggtggaggttgcagtgagccgagatcacgccactgtgctccagcctgggtgacagagcgagactccgtctcaaaaaaaaaaaaaaaaaaaagtggtgttttaggaaacttcgcctggcagtcgtacacaggagagacagctagggacaggcttgtacacccctggtatatggcccgagtggtaaactca

SEQ ID NO: 37642 - DNA, 201 bp, Homo sapiens
ccagtttgggcaccagcaacaataaaccccctatagccatagaagaaagaaccttctttttactccctctgtgacctttccagattctttatttgcattgrgcttctgctggtttcaggtagagaatttctcttctatagtggcactttctgtgctacttgaaaaatgtggaaataaactgctggggcagagtttcagggg

SEQ ID NO: 37643 - DNA, 201 bp, Homo sapiens
cttgaacccaggaggtggaggttgcagtgagccgagatcacgccactgtgctccagcctgggtgacagagcgagactccgtctcaaaaaaaaaaaaaaaaaaaagtggtgttttaggaaacttcgcctggcagtcgtacacaggagagacagctagggacaggcttgtacacccctggtatatggcccgagtggtaaactc

SEQ ID NO: 37644 - DNA, 201 bp, Homo sapiens
gcaacatttcaattattaatctcctgcgattccctttccagtttgggcaccagcaacaataaaccccctatagccatagaagaaagaaccttctttttacyccctctgtgacctttccagattctttatttgcattgagcttctgctggtttcaggtagagaatttctcttctatagtggcactttctgtgctacttgaaa

SEQ ID NO: 37645 - DNA, 201 bp, Homo sapiens
gcttacagacatgatgactccagggaaagaataacccacaaatagtttcgaaaaccaataatagcaacatttcaattattaatctcctgcgattccctttscagtttgggcaccagcaacaataaaccccctatagccatagaagaaagaaccttctttttactccctctgtgacctttccagattctttatttgcattga

SEQ ID NO: 37646 - DNA, 201 bp, Homo sapiens
tctatcttctgagatgcttacagacatgatgactccagggaaagaataacccacaaatagtttcgaaaaccaataatagcaacatttcaattattaatctyctgcgattccctttccagtttgggcaccagcaacaataaaccccctatagccatagaagaaagaaccttctttttactccctctgtgacctttccagatt

SEQ ID NO: 37647 - DNA, 201 bp, Homo sapiens
tctcgccacatttgagtagtgagtaaggtgccttaattttatccttgatttcagacaatgtgctatgatacttgaatcagagaaacctgagtttgaatctrgtgatacgactttgggctttattggactgtgcaggaactccattagaaactagtgcacgtaaagtccctggctgtagtaggcatcttctcagagtgtgtt

SEQ ID NO: 37648 - DNA, 201 bp, Homo sapiens
tattcacagcatcttcaccagaaatagattccatctcaagaaactactttttttgctcgttcataagaagcaactcctcatccatttaagtttgatcatgrgagtgcagcaattcagtcacatcttcagctccacttctctttctggttctcttcctatttctacctcatttacagtgacttacaccactgaagtcttgaa

SEQ ID NO: 37649 - DNA, 201 bp, Homo sapiens
caacaattaatcagcattctttcttgctggctccagcctcaggcgtctcctctttgactttgatttcatcgccctgggatttgtaatagaattgatccaaycgaattcaatcaagggcctggtcgtttccatgcatggctcattaatatttagcacctctgccccaagaatgaccagattctctccttttacactaaccac

SEQ ID NO: 37650 - DNA, 201 bp, Homo sapiens
ctgatttttcccctgtctcaatcagagcacatggactccctgtgtgcatgctaaacgagcagagcttttcctgtagatttctataagaagagggattcctygtgggttttgagctcctaaagagtgtgcatgattcttctcaggaaaagtataacgacacgagagggaattgtttcaatggggtgctgctgcaccaagttg

SEQ ID NO: 37651 - DNA, 201 bp, Homo sapiens
aaaaaaccacactcacacatttgtaatgtttgtaatctttttattccatgataattgatgtagcctagcgtaattgtagtttttgtgtgtgtgtgaagtakctgacattctgtgctttagtacgttttatttcatcacttaatgtgtcccccccacccgcccactggctgtgacagtgtttttgcgaatgaaacagttcag

SEQ ID NO: 37652 - DNA, 201 bp, Homo sapiens
attacaggtgtgagccactgcactcggccagtaaatcatacctttttaaaatagcatttcacattaattatacttacttagttaacactgaggttatctaytattgcataagataccgttgattttagttgcatatcatatgcaggtaactgcttgcttgcttgcttttttttttttttttttgagatggagttttgcgct

SEQ ID NO: 37653 - DNA, 201 bp, Homo sapiens
aaatgcacggttggatttgcggcctctgaatagcacccactgcccccatccccactgcggcagctcacccttcacttagggcagggggctctgagttttgrggtcaggaaggcccccttccacctgtagtgagcaccagaaacttctgtccccaggtttccggttttcctttgaccttcttgagaggctgagacctctaga

SEQ ID NO: 37654 - DNA, 201 bp, Homo sapiens
ctaaaaaaaccacactcacacatttgtaatgtttgtaatctttttattccatgataattgatgtagcctagcgtaattgtagtttttgtgtgtgtgtgaartatctgacattctgtgctttagtacgttttatttcatcacttaatgtgtcccccccacccgcccactggctgtgacagtgtttttgcgaatgaaacagtt

SEQ ID NO: 37655 - DNA, 201 bp, Homo sapiens
catggctcactgcaacctcagtctcctaggctcaagcaatcctcctggagtagctgggactacaggtgtgtgccatcatgcccagctaattttttttttttaactgattttttgtagagataggctctcgttatgatgccctggctggtcttgaactcttggcctcaaatgatcctccctcttcagcctcccacaatgctg

SEQ ID NO: 37656 - DNA, 201 bp, Homo sapiens
ctccacgggccccagagcagatgggtcacttcttttggtttcaaatacaatttagtggccatcttccctcccatctttttcattaaaaaaaaaaaaaaaaagttctaaccactgcttttctaatcaccactgttctagccactaggactttctgtcctccacaaatctattgctgttaaaatatttgttttgattgttcca

SEQ ID NO: 37657 - DNA, 201 bp, Homo sapiens
tctccacgggccccagagcagatgggtcacttcttttggtttcaaatacaatttagtggccatcttccctcccatctttttcattaaaaaaaaaaaaaaaaagttctaaccactgcttttctaatcaccactgttctagccactaggactttctgtcctccacaaatctattgctgttaaaatatttgttttgattgttcc

SEQ ID NO: 37658 - DNA, 201 bp, Homo sapiens
ggatttgcgctcttctgacactaccgagctctcctttaagtcaccgttttacctaatcaataccatacggcttagcatttaatttttcttattgctttatrtgtggaataatggaaaagaattaaaagattgaaaaaccaaacacccacctcactccacattaggtgtgtcaaatctgagctgatgagaggccttccccac

SEQ ID NO: 37659 - DNA, 201 bp, Homo sapiens
gttttacttagtaatattcattaatgacctaaaccaagagagaatctcctacttaatgaagtgattaattagctctgggaattgaagtcgaaaacagaagrctaattgattaatagattactgtgttcatttttcttcctttcgtggaaaggagccagaatttggtccatgccaggtttgctgctttgggctagcaccatg

SEQ ID NO: 37660 - DNA, 201 bp, Homo sapiens
gggatggaacctccagtccatgtgtggcacctcttttacatcttcatcgtaagccctaccaggagtttgaaatgcaaaagttttagaaatataaaccaggytttacttagtaatattcattaatgacctaaaccaagagagaatctcctacttaatgaagtgattaattagctctgggaattgaagtcgaaaacagaaggc

SEQ ID NO: 37661 - DNA, 201 bp, Homo sapiens
ggctgttccagagaagagctagggtggatggcaggaagcggcagctgggatggaacctccagtccatgtgtggcacctcttttacatcttcatcgtaagcsctaccaggagtttgaaatgcaaaagttttagaaatataaaccaggttttacttagtaatattcattaatgacctaaaccaagagagaatctcctacttaa

SEQ ID NO: 37662 - DNA, 201 bp, Homo sapiens
aagtgtgcgaacttccaggacaggtccggagatggctgttccagagaagagctagggtggatggcaggaagcggcagctgggatggaacctccagtccatrtgtggcacctcttttacatcttcatcgtaagccctaccaggagtttgaaatgcaaaagttttagaaatataaaccaggttttacttagtaatattcatta

SEQ ID NO: 37663 - DNA, 201 bp, Homo sapiens
tcctacaagtccaagtcctccagcaacgtgacctccaccagcggtcactcttcagggagctcatctggagccatcacctaccggcagcagcggccgggccyccacttccagcagcagcagccactcaatctcagccaggtaagccccacagctggcgccccaggccaggcagggcccccatcccctcatccttccgcttca

SEQ ID NO: 37664 - DNA, 201 bp, Homo sapiens
aaaatttaagagttcaggtggacatgtccagtttagttttaaaatccttatgctttcactttccttagtaattattttaactccctttttctggtatggamaaatctttattttttctttaacctataaatgtaaagaatgtagtttcgaaataccaatatttatattattaccaatatggaactacagaggaaagtttaa

SEQ ID NO: 37665 - DNA, 201 bp, Homo sapiens
catgtcatttaatacttttgtaggtgcatctgtgaaatgaaatcctagaaatgggattatatagtcaagggacagatacatctgtcatttttaaaagttaytgacaaattcttcctgtagggtttataccgtattctactcatgcaagcagtatgtgaaagtgcctgtttccctagaacatcacccatggaatctgttgtc

SEQ ID NO: 37666 - DNA, 201 bp, Homo sapiens
atgtggggaccaaaggagacaaaggccaaagggggtgaagtgccaagcagaacactggcagctgaagacgcccagcagcaggcgatggggacaacggaagkttcattaaatagcaacaaggcaactcactccagcccccagcggtcactccttctgctgcccagaccggcaagtgtgactggtactctagaagcacgtagt

SEQ ID NO: 37667 - DNA, 201 bp, Homo sapiens
ttgattacatgacaaatgggcgggactgtggaatgtcacgttgtctcccaaaccttgcttcccttaaccttgctattttttctttattcctttctcttttycctttttcttttttctcttttttgttaacttctttccctacaaaaattgtcattttcatttttctcaaagccagcagagccattagtataccatatgtat

SEQ ID NO: 37668 - DNA, 201 bp, Homo sapiens
gcccagcgcttagggaagagggccgtagacccattagtggggagcttttgattcagtcagcaaaatgagggcactgggggtgctgttgttaatacatggtrtggctgaatctgaatgctcagaagcccctctttcccttggcctatcgccgcctgtgagagtccaaccttatgattgctgaactcccaggatttaatccga

SEQ ID NO: 37669 - DNA, 201 bp, Homo sapiens
ggcccagcgcttagggaagagggccgtagacccattagtggggagcttttgattcagtcagcaaaatgagggcactgggggtgctgttgttaatacatggyatggctgaatctgaatgctcagaagcccctctttcccttggcctatcgccgcctgtgagagtccaaccttatgattgctgaactcccaggatttaatccg

SEQ ID NO: 37670 - DNA, 201 bp, Homo sapiens
cattgaagaatcaaaatctcttccgaaatgtgggaaagagaccctctgtgagacacaggagttccaaggcttgagtcccagtgatgaggagctaagtcacrctaccaattggcttttgcctctcttgacagacaccagatgaccatgaagcagagacagggattaagtcaaaagaagcaagaaagtacattttcaactgtt

SEQ ID NO: 37671 - DNA, 201 bp, Homo sapiens
ggctttcctctttgattctgaagaacacaaggtccatttaaccattcgacaaaacaaaacgaaatttctgatcactccaccacgcagaatagaacatgccrgtggacatgtgaacatgcgggagaacccatgtcgggcgttcattgttcatctgcgtctacaggagggggctacagtcaatgctcccactgtctagagtgt

SEQ ID NO: 37672 - DNA, 201 bp, Homo sapiens
agcactttggaaggctgaggcgggtggatcaggagttcgagaccaacctggctaacatggcgaaaccccatctctactaaaaatacaaaaaaaaaaaaaaatagctgggcgtggtggtggtgcctgtaatcccagctacttgggaggctgaggcaggagaattgcttgaacccaggaggcggaggttgcagtcagctgaga

SEQ ID NO: 37673 - DNA, 201 bp, Homo sapiens
gagtgcagtggcgcaatctcggctcactgcaacctctgccccccaacaaggttcaagcgattcttctgcctcagcctcctgagtagctgggattacaggakcctgccactacacccagctaatttttgtatagcagcagagacgggtttcgccattttggccaggctggtctagaactcctgacctcaggccgtctacctg

SEQ ID NO: 37674 - DNA, 201 bp, Homo sapiens
ataacctttgccgttaaccaagatccattcctaaacaaggcagcaggctgggcaagggagcacccagaggtggttcaccaagagcctcctccaaggggagkctcctcgcccaccacaagccagggtctgcctcaccatgcattaaacatcattttcctacaaaagacaatttggtgctttctgtaagttacaggggctcag

SEQ ID NO: 37675 - DNA, 201 bp, Homo sapiens
cagaatctgagcggatagcagggacttctggaggatagtaagtgtcaggggaactcgtgacagggagaaggagcaccaagagagaatgcacacgtgctttyggccttttcccctgaaccactcacctctgcagctccagcacagtgtcattactattattcattaagtgtgacctgtaccatcaggaaaagattcatcagt

SEQ ID NO: 37676 - DNA, 201 bp, Homo sapiens
tgagcacgtttcccagcattagccttacaatgacaaaggcaaatgcagaagtgtgcgaacttccaggacaggtccggagatggctgttccagagaagagcyagggtggatggcaggaagcggcagctgggatggaacctccagtccatgtgtggcacctcttttacatcttcatcgtaagccctaccaggagtttgaaatg

SEQ ID NO: 37677 - DNA, 201 bp, Homo sapiens
gtgttctggggactctcctaggtgccaagtgtacagcattgagcaaaacagataaaattcctgccctgaagcagcttgcgttttagcagataaagacaaaygttccacttttttacaaagctttttacaaaagcttgaaggaaatggaagtggatatttattaaacctctggaggagttgaaatttctaagattagaagct

SEQ ID NO: 37678 - DNA, 201 bp, Homo sapiens
tgttctggggactctcctaggtgccaagtgtacagcattgagcaaaacagataaaattcctgccctgaagcagcttgcgttttagcagataaagacaaacrttccacttttttacaaagctttttacaaaagcttgaaggaaatggaagtggatatttattaaacctctggaggagttgaaatttctaagattagaagctg

SEQ ID NO: 37679 - DNA, 201 bp, Homo sapiens
aaaatatgggtcagtgagaaataggatttgctttatagaagttaactttggagaatcgtgtcctcaaaaagaaaagaagtctaaagataggaggactgagrgaatcctgggtgtggtgatcctaaccccataagttagcttggggtgctttcaggaagattttggtttccagcagttcagaagggaggtgggcatgatttg

SEQ ID NO: 37680 - DNA, 201 bp, Homo sapiens
ggcatccaacagaacatggatgtgggaccagagcatctttaaggcttcttctcagagaggctggtagttctgagcgtgtttacagttccattgagggagaraaaaggaagaagcagggaaaaagagttaggtggggattttccccgtcagctcaggagaccttgtttctcttcagagagagtaggatggtagaaaacaaat

SEQ ID NO: 37681 - DNA, 201 bp, Homo sapiens
tcccttcacacctcgttgaccaggctgatggtgtgtgccagtgcctaagtcaagtcattgacaacaggaagaagatgagccctggctgagttaaactgacsaggatgtgcatcccccccatgctggaagtgaggccgtcttccctgagagtcagtatccgaacagaaagatcacccaatgcatgttgtttttaaagtactt

SEQ ID NO: 37682 - DNA, 201 bp, Homo sapiens
cagagctgtccatctgtaccacaagaagaagaaaagcagacttggcaatttactggatagggctcccatgatttcagtcttttgatatcacgggtaaaatkggatgactgagaaacagctacggataggagactgaggataggggtgccctctacagaggtcctcttagccgtctgcaccaaaacagtcagatagtcaccc

SEQ ID NO: 37683 - DNA, 201 bp, Homo sapiens
gaaaatgcatgggaaagccctttgcttttccacaatggaatcttgccttattccttagactcagagaaggctgtaagctgatcgaggatgtggcatacctygatcagcctgtggtatggagcaagactgctccatacctgacccggagccagcccctgacacgtgtgcataggaaggaggagggatgggttggtgtggatg

SEQ ID NO: 37684 - DNA, 201 bp, Homo sapiens
ggaatggagtgttcactctctaggagaagttgggctaaatgatgaaatggagtgtccgtgtatgtgatctgtggtgctgttttgctgtagttaattcctakttttaacttgaaatgtgttctgactgcgttagtgccaatttttttgagaccggtgtacctatcctatcaggtacattcgatttacacaagtacattctct

SEQ ID NO: 37685 - DNA, 201 bp, Homo sapiens
gaagcctggggatgccagtgccatacctcttgtatattctgcagaatatgagccaaataagccttctttctttataaactacccagcctcaggtattcctrtatagcaacacaaaacagactaagacaatgcttatatgaaaatgtctagattgttaccaagacaaatgtaagcaatgaaacatacatgttgtagagcctc

SEQ ID NO: 37686 - DNA, 201 bp, Homo sapiens
gctgaaatgaaacagaggcaggagaaatggagaggaggacatggccttgaggaatttccaggacataaatttggcatcacttcttggaccatgagaggaasagggagcaggaagaatcaaagatgaatccaagaatgaacaaatctaatttttgaaataatgcaatgaaaagtagaactggtctgttttcctaggtaagga

SEQ ID NO: 37687 - DNA, 201 bp, Homo sapiens
gtctgcgtcatgtgggtggatcccttgtgaaagccttggtcctgttctcctggtagtcagtgaggtacaattagctctcatggaatggattaattcctccragagtgggttgttataaagtaaggtttctccccatgtttggtccctcttcgcatgtgcctgcatcccctttgacctttccctcattgaacctgcaggttc

SEQ ID NO: 37688 - DNA, 201 bp, Homo sapiens
ttgcaaacaaactacatcagagatttgaagagaagagaattaatacaaagaattattaagtaatagattttttaaaaatactgtaatggcagcagatgtasaaggtacaaaagagaaattgtcacttcatgtcttggggtaagtggaaaaaaaaagaactaaggacttaggaaaagacataggtcatagactgtattatgt

SEQ ID NO: 37689 - DNA, 201 bp, Homo sapiens
cttggtcctgttctcctggtagtcagtgaggtacaattagctctcatggaatggattaattcctccaagagtgggttgttataaagtaaggtttctccccrtgtttggtccctcttcgcatgtgcctgcatcccctttgacctttccctcattgaacctgcaggttcaatgaaggttcactgcaacctccgcctcctgagg

SEQ ID NO: 37690 - DNA, 201 bp, Homo sapiens
ataatggctgtggtttgggtgtggatttttgtctccacgaaaacccacactgcgattcagtccctgctgtgccagtgttccacttagggagaggtgtctgygtcatgtgggtggatcccttgtgaaagccttggtcctgttctcctggtagtcagtgaggtacaattagctctcatggaatggattaattcctccaagagt

SEQ ID NO: 37691 - DNA, 201 bp, Homo sapiens
atcctaaattcaaaagattactgagttataaagtggatgtctggacaatccaaaacataatggctgtggtttgggtgtggatttttgtctccacgaaaacmcacactgcgattcagtccctgctgtgccagtgttccacttagggagaggtgtctgcgtcatgtgggtggatcccttgtgaaagccttggtcctgttctcc

SEQ ID NO: 37692 - DNA, 201 bp, Homo sapiens
agcacaatcctaaattcaaaagattactgagttataaagtggatgtctggacaatccaaaacataatggctgtggtttgggtgtggatttttgtctccacsaaaacccacactgcgattcagtccctgctgtgccagtgttccacttagggagaggtgtctgcgtcatgtgggtggatcccttgtgaaagccttggtcctg

SEQ ID NO: 37693 - DNA, 201 bp, Homo sapiens
tcctgacctccggtgatctgcccaccttggcttcccaaagtgctgggattataggcatgagccaccacacccagcctatggtattttattatacccacctragcaaactaacatgactgaatgtcccaaggctgatattcagagctctttgaaggtgtggctgccacaggaacatgcagtctgcagtggctatgaaacttg

SEQ ID NO: 37694 - DNA, 201 bp, Homo sapiens
gtcatttttcattaacattccccagacaaatttgtactgcttactaacagcacaatcctaaattcaaaagattactgagttataaagtggatgtctggacmatccaaaacataatggctgtggtttgggtgtggatttttgtctccacgaaaacccacactgcgattcagtccctgctgtgccagtgttccacttagggag

SEQ ID NO: 37695 - DNA, 201 bp, Homo sapiens
gtgcctacactgaataatcctaagaagatcagaatccagaaagtgcatttctacttctatcttcttacagtgtctctccagctccctctattggcaaagcygaacactgggccagtcagtcaagttcttgttacaggatccaggtttactatcacaaagtccacaaaggtagatttagagctgatagacaataaattgata

SEQ ID NO: 37696 - DNA, 201 bp, Homo sapiens
gagtatattgtaggagggtaccattgcctgcagtgaggcgttaaggacgcagcatggatgagagatgaggaaagctgaaatgaaacagaggcaggagaaawggagaggaggacatggccttgaggaatttccaggacataaatttggcatcacttcttggaccatgagaggaagagggagcaggaagaatcaaagatgaat

SEQ ID NO: 37697 - DNA, 201 bp, Homo sapiens
actgaatgtcccaaggctgatattcagagctctttgaaggtgtggctgccacaggaacatgcagtctgcagtggctatgaaacttgtcagatggccaaagstggcttacgagaagccatatgtccttgctggagggtgtgggcaggctggggctggaccatagaagcaaatgcctggtagggatatagttgccagaggttg

SEQ ID NO: 37698 - DNA, 201 bp, Homo sapiens
aggaagaatcaaagatgaatccaagaatgaacaaatctaatttttgaaataatgcaatgaaaagtagaactggtctgttttcctaggtaaggaatttgtcygcaagtcgatattcacgaggattaattgtatttattttctgagtatggacaatttaaatgctgggccctgaagggaaacccatctctcagaataactaaa

SEQ ID NO: 37699 - DNA, 201 bp, Homo sapiens; identical to SEQ ID NO: 28694

SEQ ID NO: 37700 - DNA, 201 bp, Homo sapiens
aagtggaaatggcttaagatgctcatagcccagccccggctgtgtctactccaggccaagcctgggctgcagtccttgctatgttccccccagggccctgrggggagggatcagggtgctgggggtttcctaggacaggggtcttcccccttgagacaccaagctctggctctagaagagctctctcctggagtggggagt

SEQ ID NO: 37701 - DNA, 201 bp, Homo sapiens
ttttaatctagggtaggcagttgtggtagcccagcattttcctgtggacgagacatggtgcatgttgttgctggattgaatggaacccattcctgtccccyggcctcgtcttctgtcctcacttttggtcatccacacccatgagcagcttcagcagagtgtaggtcccacttcaccccattctcctctcctctgacccct

SEQ ID NO: 37702 - DNA, 201 bp, Homo sapiens
gataggctctgattaattagttactctgactctggtctgccgagatccatttccaacccagttgcgttgggagagggttgggaggcagcagagcatgggtracagtgggagcacacgacttccttggagcctgggcctttgcgggtcccaggtggtcaggcagctggagcagaagtggaaatggcttaagatgctcatagc

SEQ ID NO: 37703 - DNA, 201 bp, Homo sapiens; identical to SEQ ID NO: 28716

SEQ ID NO: 37704 - DNA, 201 bp, Homo sapiens; identical to SEQ ID NO: 28703

SEQ ID NO: 37705 - DNA, 201 bp, Homo sapiens; identical to SEQ ID NO: 28742

SEQ ID NO: 37706 - DNA, 201 bp, Homo sapiens
aagctctggctctagaagagctctctcctggagtggggagtctggaggggactgggtgggtgcaggtaaagccagattctctctggaagggaattttctakgaatggatgatttccaggctcagggtgggctgtgtgttagttctgagcaaatccctcaccaagacccttccctcccaagccctcaaagaaatgaggcaaa

SEQ ID NO: 37707 - DNA, 201 bp, Homo sapiens
agacttggagtttggaagccagatggaccaagcaaggagcctgactctgagctcaccagctgtgcaattcgggtgagttccttcacccttctgagccatcycttggctcgtctggaaaatgcaaaaaaaaaaaaaagaaaaacaccaggtttttgcatcctcctggatgagggatataaagtgcctgacacagcatatgac

SEQ ID NO: 37708 - DNA, 201 bp, Homo sapiens
aaaaaaaaaaaaagaaaaacaccaggtttttgcatcctcctggatgagggatataaagtgcctgacacagcatatgacagggatttgataaatgggggctrttagctgtcccattgtggatgtgagaatagcattctgctggctaaaaggcagacatgaatgttctagaacatggcgatcccggaatgtgcagtgaaggca

SEQ ID NO: 37709 - DNA, 201 bp, Homo sapiens
gggtggagcagacagacttggagtttggaagccagatggaccaagcaaggagcctgactctgagctcaccagctgtgcaattcgggtgagttccttcaccyttctgagccatcccttggctcgtctggaaaatgcaaaaaaaaaaaaaagaaaaacaccaggtttttgcatcctcctggatgagggatataaagtgcctga

SEQ ID NO: 37710 - DNA, 201 bp, Homo sapiens
gcacatgacagcctccgctgagccaaatggcccaaagacttctgaatgagcttttgctgcaacaaaaaactttggatcattttgagagcctcccgtgaggygccaatatgttgcagtaccttcccggccccgacactgatgtgattcatcgtaggtaacatatgaatacgctcaagctggccagcagcttgaaaaattgga

SEQ ID NO: 37711 - DNA, 201 bp, Homo sapiens
tgagacaggagaattgcttgaacctgggaggcagaggttgcagtggtgtgagatcacgccactgcattccagactgggcaacatagcaagactctgtcacaaaaaaaaaaaaaaaaaagaattccctgctctgcttttctgctcgttgctggcatagaaacatctagaacagaaagtatccactctggggcagatgggaga

SEQ ID NO: 37712 - DNA, 201 bp, Homo sapiens
cccaggcggagaaggatatgccggattctgcctggggctgggctctaggagaccccaaatttgacaccacagaaagcaaataaaacacttgaaatacgcawacatttcctgtgtgtccttttgtggggctggagttcagctgggtgcccggggatagaggggaccccgtgtcactgggtttctattctcggtggtgctggg

SEQ ID NO: 37713 - DNA, 201 bp, Homo sapiens
gagacaggagaattgcttgaacctgggaggcagaggttgcagtggtgtgagatcacgccactgcattccagactgggcaacatagcaagactctgtcacaaaaaaaaaaaaaaaaaagaattccctgctctgcttttctgctcgttgctggcatagaaacatctagaacagaaagtatccactctggggcagatgggagag

SEQ ID NO: 37714 - DNA, 201 bp, Homo sapiens
agacaggagaattgcttgaacctgggaggcagaggttgcagtggtgtgagatcacgccactgcattccagactgggcaacatagcaagactctgtcacaaaaaaaaaaaaaaaaaagaattccctgctctgcttttctgctcgttgctggcatagaaacatctagaacagaaagtatccactctggggcagatgggagagc

SEQ ID NO: 37715 - DNA, 201 bp, Homo sapiens
aatccggattaaatttcccttccctgggcacaagtgcctcatgagggcccggggctgctggttgggagggaaagcatccccgtttttgcagtgaggaggcyggccgagggctggggttccacttagacccttggcagaatggctgttgaggggcaggcgctgcccagtgcccacgtctggaaagctaattcccgggtggac

SEQ ID NO: 37716 - DNA, 201 bp, Homo sapiens
accccaaactgctccccctcccccaaattccctttctcctcctgctctttctccccgctgtgcctcccccagttacccacagaagtgcctgcctctccagygctcacagaacacacaaaaagggacaggaattggtcactgggtagtggccgtggctcctgacgatccagaccagcgtctggcccaagccattcagaggtg

SEQ ID NO: 37717 - DNA, 201 bp, Homo sapiens
aggtgactgtgttttctgccgccgaaggagggcccggtccctccaggctcagtgtggcttctccctgacccccgccctagaacttttgccagtgccttttytgaaactcctgtgtcccgggccccccaggcggagaaggatatgccggattctgcctggggctgggctctaggagaccccaaatttgacaccacagaaagc

SEQ ID NO: 37718 - DNA, 201 bp, Homo sapiens
cccccgccctagaacttttgccagtgccttttctgaaactcctgtgtcccgggccccccaggcggagaaggatatgccggattctgcctggggctgggctytaggagaccccaaatttgacaccacagaaagcaaataaaacacttgaaatacgcatacatttcctgtgtgtccttttgtggggctggagttcagctgggt

SEQ ID NO: 37719 - DNA, 201 bp, Homo sapiens
aggtctagccaagacagggacaaaatggggaagggggtgtgccaggcctgaactgagctaagcacctgccccgggctccacacttccatctttcttttgtyttcatttcacctctgtgtttaaagcactgtgtgacatagctccttagagatataacctattgtctgctcattgtcacgtgtgtgtgtgtcatctttgtat

SEQ ID NO: 37720 - DNA, 201 bp, Homo sapiens
ttaagaaaaaaaaaaggggggccaggcgcagtggcttatgcctgttatcccagcactttgggaggccaaggcagactgatcgcttgaggccaggagtttgsgaccagcctggccaacatagcaaaaccccatctctactaaaaatacaaaaattagtcaagagtggatggtgcgtgcctgtaatcccagctacctgggagg

SEQ ID NO: 37721 - DNA, 201 bp, Homo sapiens
agaaaacaggtctagccaagacagggacaaaatggggaagggggtgtgccaggcctgaactgagctaagcacctgccccgggctccacacttccatctttyttttgtcttcatttcacctctgtgtttaaagcactgtgtgacatagctccttagagatataacctattgtctgctcattgtcacgtgtgtgtgtgtcatc

SEQ ID NO: 37722 - DNA, 201 bp, Homo sapiens
tgcctcttgtggcgtctgaacctagacgtcccttttggagacagctggacaaagccctattctccgcagccccagcctctatcctgaggcctctgggagcygcgtgacggccagcatggggtgctgatcatggtcaaggaggcaggtctttgccaggttgccccatgcagccacccatcctcagcatcctaacttgagggg

SEQ ID NO: 37723 - DNA, 201 bp, Homo sapiens
tttctaggaaaaaacccttccctgccaaaggtgactgtgttttctgccgccgaaggagggcccggtccctccaggctcagtgtggcttctccctgaccccygccctagaacttttgccagtgccttttctgaaactcctgtgtcccgggccccccaggcggagaaggatatgccggattctgcctggggctgggctctagg

SEQ ID NO: 37724 - DNA, 201 bp, Homo sapiens
gagatcaggagttcaagatcagcctggccaacatggtgaaaccctgcctctactaaaaatacaaaaattagccgggcatggtgatgagtgcctgtagtccyagctactcgggaggctgaggctggagaatcgcttgaacttgggaggcagaggttgcagtgagctgagattgcacagctgcactccagcctgggtgacaga

SEQ ID NO: 37725 - DNA, 201 bp, Homo sapiens
aacttcaggtttcatcttgctctattcctcaaaggtctggtctgtgggcctctgaggagaaaacaggtctagccaagacagggacaaaatggggaaggggrtgtgccaggcctgaactgagctaagcacctgccccgggctccacacttccatctttcttttgtcttcatttcacctctgtgtttaaagcactgtgtgaca

SEQ ID NO: 37726 - DNA, 201 bp, Homo sapiens
agcactttgggaggttgaggcaggagaatcccttgagccaggagttcaagaccagcctgggcaacatagcaagagatcccatatctaccaaaacatacaaraattagccagatgtggtggtgcatgcctgtggtcccagatactcaggaggctgaggcaggaggatcacctatgcctgggaggttgaagccccagtgagcc

SEQ ID NO: 37727 - DNA, 201 bp, Homo sapiens
cctgtggtcccagatactcaggaggctgaggcaggaggatcacctatgcctgggaggttgaagccccagtgagccatgatcacaccactgtagtccagccygggtgacacagcaagactctgtctcaaaaaaaaaaaaaaaaaaaatcctcatgcaagaagggaaggaccaagtcccattccctcttgcctcattttcaga

SEQ ID NO: 37728 - DNA, 201 bp, Homo sapiens
caacttgatgatggcatctcttttaagatgcccaagtctgcgcacttttattcctttattcggcccctagcaccccctccccaccccaaagaaggtcagtwgcatgcgtgtggggatgtagctcaaaaaagaaataagatggagtggaaaggaaagaaaggaagaagcaggaattcaaggtgggtgggctgagcttggggc

SEQ ID NO: 37729 - DNA, 201 bp, Homo sapiens
tttacagcttaattaaaattttttattataaattacatttacaaacttgatatattgattttctttctacctacactacttgaattacttggcagataaaacaacgcaagtacataaaaaccctggtggatctaaaacattaaaactgatcaatataacgattctcatacttctaaacatttccatactgttacaatttgc

SEQ ID NO: 37730 - DNA, 201 bp, Homo sapiens
ttacagcttaattaaaattttttattataaattacatttacaaacttgatatattgattttctttctacctacactacttgaattacttggcagataaaacaacgcaagtacataaaaaccctggtggatctaaaacattaaaactgatcaatataacgattctcatacttctaaacatttccatactgttacaatttgca

SEQ ID NO: 37731 - DNA, 201 bp, Homo sapiens
caagtacaggcacatgcgcaggcacaagaaaccagaggccggggaggagccgcccacgcagggggccgagggctgaggccaggcaatcacgggctatgccsggggagctgtcgggagtggcgggaatcggggccatgcccggggagctgtcgggagtggcgggaatcggggccatgcccggggagctgtcgggagtggcgg

SEQ ID NO: 37732 - DNA, 201 bp, Homo sapiens
ctctgctgaaaacactacacagaagccgcgccgggcccgggaggtgtgggtctgatgtgccgatctgcgaccacgctgcctctggcattgtgtcagggtgmtgccggccttcccgcattgttcccctctgctttctggaaggattgcatcctgaagtttatggaagcagtcttgttatttttgctgtaaacatttgtcaga

SEQ ID NO: 37733 - DNA, 201 bp, Homo sapiens
tgcacctagggcctgctcctgagcagggcaggcgagggagcccagctttggccctgggctctggcccggaacatctggatgtgaaagggcatttggtgatygcacctctttctccagatctgccacagcaagagtggagagatcaaccccgtgaaggtggccaacctggtgaaggcgtacgtggacaagtacaggcacatg

SEQ ID NO: 37734 - DNA, 201 bp, Homo sapiens
ctgcgccacccccgccacagtgactggtgccctctcgtgtgcccctgggatgctgtctgtcccccacccgccttgcccccgtgggagtgcttggcagcctstggcaggggagaggaaggccgggccgtggctgctgcagtggcgggtggggaggctgtcctgcttctctggctgccattgtgggctgtgttctgggctcca

SEQ ID NO: 37735 - DNA, 201 bp, Homo sapiens
tccctgcagcctccgtcctgacagcagcctttccctgggcattggacaagcaggagggtctgggctgtgggcatgtggtgtgtgcccttggcaagcctaaygctgaatttggagtggactgagaaggctgggtggggagggggctgtccctgtccagtgccctgcccagtacctgcgccacccccgccacagtgactggtg

SEQ ID NO: 37736 - DNA, 201 bp, Homo sapiens
tttgaaagaaggtactgctcatccttgcctttgtccccagagaacttgtataagaacagatgttaggggacctagttaggctcttggagtgcccccacccrccgcccccctctgctggcctggcagggcgtgtcgtgtgcccggggcagtcggcttctcttcctgcatgcctgtctcctgtctttcttgtatggccctagc

SEQ ID NO: 37737 - DNA, 201 bp, Homo sapiens
aggtgagccgcagcctcctccaaggctgctggagctcagtggtgggaaagtgggttggacgttttcagactttggaattctttgaaagaaggtactgctcrtccttgcctttgtccccagagaacttgtataagaacagatgttaggggacctagttaggctcttggagtgcccccacccgccgcccccctctgctggcct

SEQ ID NO: 37738 - DNA, 201 bp, Homo sapiens
ggccttctcttgggtgggaagtagctgggtcagggtttggactacggaacagccggagccaggaggccttgacgtgccgcggctggagccgcaccgaggaygggctcctggtgaaggcctttgctctgtggcgggtggtcccggtcgtcccagctttgactcgtccttgagcacagccgcttgtgcccccacctgtcacct

SEQ ID NO: 37739 - DNA, 201 bp, Homo sapiens
agtagagacggggtttcatcatgctggccaggctggtctcaaactcccgacctcaggtgatccgcctgcctcggcctctcaaagtgctggggttacaggcrtgagcagctatgcctggcctaattttatatttttagtagagatggggtttctccatgttggtcaggctggtctcaaactcccgacctcaggtgatccgcc

SEQ ID NO: 37740 - DNA, 201 bp, Homo sapiens
atgagcccctgctcccggcctatgaaaagaaattctaaaaatttactagtgaatgtccaacaatcttttggaaaagttagcagaagacttgaacaggctcrccgcagaggggcctgtgcacaatgccgcccccacgcctgtccttcctccctttattgttcttacttgtcactgagatgctacgcgttcatggagctgctc

SEQ ID NO: 37741 - DNA, 201 bp, Homo sapiens
acctgatggtctctgggacctgtgctaggccccagggctgccctgcctctcgaggtctgcctcagccccaggctcagcttagaggagctggtctggcactyaggacgctcagcttcccgcccctcggtgcagggcacccgaggcttcaggttaggtgcagggcagggctcccagggttgtggatgtgctgagcgtggacgt

SEQ ID NO: 37742 - DNA, 201 bp, Homo sapiens
aagccgctggctctttcaattctgatgatgatgcagagagctgcccaatctgtctcaacgcattcagagaccaggccgtggggacgccggagaactgtgcmcattacttctgcctggactgcattgtcgaatggtccaaggtgagttcacctctggttgggtgcttcctcccttcaggatggcctccctgtttataggtga

SEQ ID NO: 37743 - DNA, 201 bp, Homo sapiens
cttcttatgaattttggagggatgtgggtcagcccataacagaatgcatcgcagacttgggtgccatcggaggcctgctttgtggtcccctcacttgaggmggtttgggaaagctgtgagcagcacccggatgctttggccctgctctctcctgtaggtaccacatggaatgcttggacccccctctccaggaggtgccgg

SEQ ID NO: 37744 - DNA, 201 bp, Homo sapiens
ggggaggtgggctgtgcattgccgacctggtgtcctgagcgcagcctgggcccgcttgcctccagtgccgcggttcacgctgcccatcctgcttgcaccakctggcatgtttcctctccaggttccgaggattctgaagacgacggggagacattgctggaggtagcgggtactcaggggaaactggaagccgctggctct

SEQ ID NO: 37745 - DNA, 201 bp, Homo sapiens
tctcagctacgcaggaggctgaggtgggaggacccttgagcccaggaagttgaggctgcattccagcctgggtgttggagcgagacgttatctcaaacaaaacaaaggggagacaagtccgtggggtgcgctggtggtacctccttccttgtcccctgttgccatcaccctcggtggtgcacagcctgtgaggccaccaag

SEQ ID NO: 37746 - DNA, 201 bp, Homo sapiens
gtacacgtggagggagaccctctgggcctgtggagcccaaatatgaatctaaggcaatgggtggattctggattaactgcgtttcacgctgggaagtgacygcggggagtttgggtcctgtgtggtggtgaccgacgattctgtcctagatcccagtggagaacaccaaagcgagcgaggaggaggaggacccgaccttct

SEQ ID NO: 37747 - DNA, 201 bp, Homo sapiens
gtctcagctacgcaggaggctgaggtgggaggacccttgagcccaggaagttgaggctgcattccagcctgggtgttggagcgagacgttatctcaaacaaaacaaaggggagacaagtccgtggggtgcgctggtggtacctccttccttgtcccctgttgccatcaccctcggtggtgcacagcctgtgaggccaccaa

SEQ ID NO: 37748 - DNA, 201 bp, Homo sapiens
ggtctcagctacgcaggaggctgaggtgggaggacccttgagcccaggaagttgaggctgcattccagcctgggtgttggagcgagacgttatctcaaacaaaacaaaggggagacaagtccgtggggtgcgctggtggtacctccttccttgtcccctgttgccatcaccctcggtggtgcacagcctgtgaggccacca

SEQ ID NO: 37749 - DNA, 201 bp, Homo sapiens
tggtctcagctacgcaggaggctgaggtgggaggacccttgagcccaggaagttgaggctgcattccagcctgggtgttggagcgagacgttatctcaaacaaaacaaaggggagacaagtccgtggggtgcgctggtggtacctccttccttgtcccctgttgccatcaccctcggtggtgcacagcctgtgaggccacc

SEQ ID NO: 37750 - DNA, 201 bp, Homo sapiens
gtgatggtgacactgcaatgcccgagagcctctggtagcctgcaggagcttcacggccgatgtgtgcggcattgttcctgcttgtcggtcatcatgcctgmgaagcccattgactttggcttagtattttccggctctagtgttcactgttgctgatgaaggcttcacgtggcatttacagagccctcgtagatgccatcc

SEQ ID NO: 37751 - DNA, 201 bp, Homo sapiens
ggtcctcttttgtcctctttacctgtggctgcggccactctgggcatgtgaaggaagggcctgggctggcctggaatcgctggacacggcctgagagaccrtggcatgatagacctggtcctggtcgccacaggcaccgtcttgggcaaggccctcatcgcaggccagggccgtgagccttctagtggctcgagggcagct

SEQ ID NO: 37752 - DNA, 201 bp, Homo sapiens
ccaggcaatcacgggctatgcccggggagctgtcgggagtggcgggaatcggggccatgcccggggagctgtcgggagtggcgggaatcggggccatgccyggggagctgtcgggagtggcgggaaatggggggcatcaccatgcctgccgtcgggttcctgcgctgacacctggtctgtgcacctgtgttgctcacagtt

SEQ ID NO: 37753 - DNA, 201 bp, Homo sapiens
ctctgtgtcagtcaggctggtctcgaactcccgacctcaggtaatctgcctgcctcggcctcccaaagtgctgggattacaggtatgagcccctgctcccrgcctatgaaaagaaattctaaaaatttactagtgaatgtccaacaatcttttggaaaagttagcagaagacttgaacaggctcaccgcagaggggcctgt

SEQ ID NO: 37754 - DNA, 201 bp, Homo sapiens
gagaaggatttcctaaacagtctgagagagtgtctgcaaacgggcacggagcatgtcaggctcagcctgagagggtgtctgcaaacgggcacagagcgtgyggggctcagcctgagagagagtctgcaaacgggcacggagcgtgcggggctcagcctgagaatgtctgcaaacgggcatggagcgtgcagggttcagcct

SEQ ID NO: 37755 - DNA, 201 bp, Homo sapiens
ctactggatattatgatttataaaactacagggattgaactggaaccggtccaggaatggaaaccagtcccaggggttttgcaggggcttagaagaggccyggacacactcgggggggcaggaggcgcctgtggggcaggtcagctgggggctgctcacagcacacacacgatgccggacggagtcaagatctcggactag

SEQ ID NO: 37756 - DNA, 201 bp, Homo sapiens
ttcggggcccgaatcacacgtgccgccacatggccagtgctcggccatcctcctccgtgccgtctccctgggctggggtttctgggagctgggagtcactkgttccctttggcctgtgtcctcccctctagcagtgaagagctttctgcaaaccctctttcccctctgagtgccaagagacgggctctgtcccggtcagcc

SEQ ID NO: 37757 - DNA, 201 bp, Homo sapiens
ggtgaccgacgattctgtcctagatcccagtggagaacaccaaagcgagcgaggaggaggaggacccgaccttctgtgaggtgtgcggcaggagcgaccgwgaggacaggcttttgctctgcgacggctgcgatgcggggtaagggacggttgggactggcacacgtgccctgctgcgtgcaaggcgggccaggcgcagga

SEQ ID NO: 37758 - DNA, 201 bp, Homo sapiens
ttcagagctgagctcaatgtgcagcaatggatgacgacagcctggatgagcttgtggcccggagcccagggccggatggacacccacaggtcggccctgcrgacccggcaggtgactttggtgagctgcctagcgccgggtaggggcgtccccaggaggagcagggtgcctggtgtttccctttggaggtcgtctgtgtgt

SEQ ID NO: 37759 - DNA, 201 bp, Homo sapiens
atgatgcagagagctgcccaatctgtctcaacgcattcagagaccaggccgtggggacgccggagaactgtgcccattacttctgcctggactgcattgtygaatggtccaaggtgagttcacctctggttgggtgcttcctcccttcaggatggcctccctgtttataggtgacccagcctgtgttcagcctcttgtgag

SEQ ID NO: 37760 - DNA, 201 bp, Homo sapiens
ccaggcgcaggagggatgcagagcctcttcgctctgtgaagtctgagtcccagcacctggagctgtgctcaccaccctcagcagcgcggttcagtcctgcrggccttcctgttacactcatttacacttcagtctttccccaaaaaacattctgaggctgcccacagaagtgcaggtaatacatcaagacaaaaaagaaaa

SEQ ID NO: 37761 - DNA, 201 bp, Homo sapiens
agaaggaggaggtgagtcctgcctcctcccactttccccatgttcccatcttactttgaaactaaagttgttggggctgagtttatgggcggaagctggtygctgtgcctctggaactgcaagggtgtccagaaccacagtgcctctggccagagggactcccggctcccttcctggccgcatcacacacatgtcccctct

SEQ ID NO: 37762 - DNA, 201 bp, Homo sapiens
gtattgaagcatgcatactttttctttttttttttcttttctttttttttttttttttttgagacagagtctcgctctcccaggctggagtgcagtggcaygatcttggctcactgcatcctccaccttccgggttcaagtgtttctcctgcctcagcctcccaagtagctggaattacaggcacccgccaccacacccac

SEQ ID NO: 37763 - DNA, 201 bp, Homo sapiens
tactggtgagggttgttctgtgggtgatatcttagggctcacccttcacgtgctgtggcggtggatgtgacactgggacactggggtgtggcctgtggggrtactgctgagagttgttctgtgggtgatatctcagggctcactcttcacgtgctgtggcggtggatgtgacacggggatgtggcctgtggggagaggtca

SEQ ID NO: 37764 - DNA, 201 bp, Homo sapiens
acaaagtgttgtttgtttgtttgttttaggttggggcgggaacaaagtctggttctgttacccgggctggagtgcagtgacatgatcctggctcactgcamccgccttgacctcccaggctaaggtgatcctcccacgtcagcctctcaagtagctgggaccacaggctcacgccacctcacctagctaattttctttttt

SEQ ID NO: 37765 - DNA, 201 bp, Homo sapiens
cgagggctgaggccaggcaatcacgggctatgcccggggagctgtcgggagtggcgggaatcggggccatgcccggggagctgtcgggagtggcgggaatyggggccatgcccggggagctgtcgggagtggcgggaaatggggggcatcaccatgcctgccgtcgggttcctgcgctgacacctggtctgtgcacctgtg

SEQ ID NO: 37766 - DNA, 201 bp, Homo sapiens
ccctcagtggccttgtgagcggcatagcgaacaggacgggggtctcacataggtggggcggcctctgccgccgtctgtctgcgtgctgcacctagggcctrctcctgagcagggcaggcgagggagcccagctttggccctgggctctggcccggaacatctggatgtgaaagggcatttggtgattgcacctctttctcc

SEQ ID NO: 37767 - DNA, 201 bp, Homo sapiens
gctccccccgcccaccgacaccgtgggaccctcagtggccttgtgagcggcatagcgaacaggacgggggtctcacataggtggggcggcctctgccgccrtctgtctgcgtgctgcacctagggcctgctcctgagcagggcaggcgagggagcccagctttggccctgggctctggcccggaacatctggatgtgaaag

SEQ ID NO: 37768 - DNA, 201 bp, Homo sapiens
gcagcacagaccctggccccagtgcccgctgccctgaccccagcctcagagccagccagtcaagccactgcagccagcaactcggaggagaagaccccggyccccaggctagctgcggagaaaaccaagaaggaggaggtgagtcctgcctcctcccactttccccatgttcccatcttactttgaaactaaagttgttgg

SEQ ID NO: 37769 - DNA, 201 bp, Homo sapiens
gacagagccccccgtgagtaaggccccggcctccaccgaggacagagccccccgtgagtagggccctggcctccgctgagaacagagccccctgtgaatcygactcctgtcaaggacagggcccctgagtgagtagggccccggccaccacagggagcttctggagccagggaacactgggatagtgggtgtgggggtctc

SEQ ID NO: 37770 - DNA, 201 bp, Homo sapiens
aggccggacacgtctttgatgatttctcaagcgacgccgttttcatccagctcgatgacatgagctcgccaccttctcccgaaagcacagactcttccccrgagcgagacttcccactgaagcctgcgttgcccccagccagcctggccgtggccgccatccagagggaggtgtcattgatgcacgatgaagacccttcgc

SEQ ID NO: 37771 - DNA, 201 bp, Homo sapiens
gggcacgggagcacaggcggcctcggtcccgtgagaagtggccgcagacccggtcccattccccagagaggaagggggctgtgagggaggcttccccagcrccccttgcacagggggagccagggcgggaagacctccccaccaggttgccagccttgggggaagcacatgtctcgccggaggtggctacggccgacaagg

SEQ ID NO: 37772 - DNA, 201 bp, Homo sapiens
tggcctggcagggcgtgtcgtgtgcccggggcagtcggcttctcttcctgcatgcctgtctcctgtctttcttgtatggccctagcaagggccacacagcrgacaccttctcataggtgcaggactcttgggagaatgggtttactcttgtttaactcgtatcttagatcctagaacagttcagcccgtggtaagtggtag

SEQ ID NO: 37773 - DNA, 201 bp, Homo sapiens
cttttcagcgaaactcaggcagtctgtccagaggggaagaaggattcaagggctgcctgcagccccgagcactgccctccgggagcccggcccaaggcccrtcaggaaacaggccacagagcacagggctcagctgtcaaggcaggtcccgcacccccgcccgcaccgcgggggcgcctgtgaggctggacttgccagcag

SEQ ID NO: 37774 - DNA, 201 bp, Homo sapiens
atgaagtttcaaggatctttgcatagactcccgagcctcggctgcttggaggggcacatatacctcataccagtggcagcacttcccaaactaccttcccrgaaggctcgatagaaacaattaaaacatagtttcctttcagcaaagaaaccttcgccttcttcagtggcttggtgtgaggtgcaatgtttgaaaacccgg

SEQ ID NO: 37775 - DNA, 201 bp, Homo sapiens
agacaggagtttaaagcgcacgacctcacagaaaaccagttgtgataaaaattaaaccactgacatttaagaagagtgggtgggaaatgattgccattgamttttttgttttttagctccagtttcttttcagcgaaactcaggcagtctgtccagaggggaagaaggattcaagggctgcctgcagccccgagcactgcc

SEQ ID NO: 37776 - DNA, 201 bp, Homo sapiens
ggctggggggttccggtcctcagtgttaggagcaccaggctccatgagcagccctgggtcctgtgcacaggtcagcccgagccagggctgctacttggccrgcagccacagggggagccgttgggggaggcgtgtggcctgtgagtgtggcacatcagccctggtggttcttcccagatgcgggtcccgtgagtgaggagg

SEQ ID NO: 37777 - DNA, 201 bp, Homo sapiens
gggcagcagttgggcatcggatgggagttctagggtggggccgtgatagcctggctctctgtggccctgggtggcgtcagcacctcccctcagctgtcacrctcatcagtcggcccttggcgtgaggcagtgctgcagcccatcctgtgtcagaggccacggcctgcctgtgagcgtggactgggagttgctgcagctcca

SEQ ID NO: 37778 - DNA, 201 bp, Homo sapiens
cagaggtcaccttttggccagttcttttgtttcgccacaagaacaaaaaattaaccaaaaccaacaaaacaggtaaaggtgcttgtctgccccctcccacytgttggtggagttgggggtggcaaaggcaccagaggtgacttctcccaaaaacgcctggtttccctggggccagagctgcgaggtggggctccctccctc

SEQ ID NO: 37779 - DNA, 201 bp, Homo sapiens
gagggaagaaggtaaaggtgagcattgggtggcagggcctgagtctcctgctggccacagcaccctcgcgtggttacggagcagggcctaagcctcccgcyggccttggcaccctcgcgcggttatggagcagggatcatcatcgtctttgcttttctgtatttactcagtgatttgctgatggaaatgaacatttctgta

SEQ ID NO: 37780 - DNA, 201 bp, Homo sapiens
acaggtaaaggtgcttgtctgccccctcccacctgttggtggagttgggggtggcaaaggcaccagaggtgacttctcccaaaaacgcctggtttccctgsggccagagctgcgaggtggggctccctccctccctccctctgggaggccccggtgagcacctcttagaacagcagccggagccagggctgtgggggaggc

SEQ ID NO: 37781 - DNA, 201 bp, Homo sapiens
ctagtaaatataaactcatataatacatatttatctaaaaccatatttaagtttgtttttttttttttttttttttgagatggagtttcgctcttgttgcygaggctggagtgcagtagtatgatctcagctcactgcaacctcggcctcccaaatagctgggatcataggtgtgtgctaccacgcccggctaagttttgt

SEQ ID NO: 37782 - DNA, 201 bp, Homo sapiens
gccggagccagggctgtgggggaggcgcaggcccggcccagccccactctccctggctcccgcctgctgcggggctctgcctgggtgcgggccctcaggcygtgggaggcagtgacggcagggccttgggtctgtgcccacaggaggcgcctccctgccgcggtgccagagccagacttggaggaggagccagtgcctgac

SEQ ID NO: 37783 - DNA, 201 bp, Homo sapiens
ggtagctctgtaaatgtgaatcatgtgtaaggcttactggtgagggttgttctgtgggtgatatcttagggctcacccttcacgtgctgtggcggtggatktgacactgggacactggggtgtggcctgtggggatactgctgagagttgttctgtgggtgatatctcagggctcactcttcacgtgctgtggcggtggat

SEQ ID NO: 37784 - DNA, 201 bp, Homo sapiens
acagcagctgcatcccgtcagtgttgaagccagtggagccctctttggggctgctgagagcggatattggagctgcctctctgtctctgtttggagatccytatgagctggatcccttcgacaggtgagtgaactggtgatggtcctgcctgggcacccgctcctctccctgggggctgtgggcacggggccccgaggtgc

SEQ ID NO: 37785 - DNA, 201 bp, Homo sapiens
gtggcatgtagtggcgcgatctcagctcactgcaacctccgcctgccaggttcaagcaattctcctccggagtagctgggactacaggtgcacgccgccaygcccggctcattttttctattttagtagagatggggtttcactgtgttgcctaggctggtcttgaactacggagctcaggccgtctgcccaccttggtct

SEQ ID NO: 37786 - DNA, 201 bp, Homo sapiens
gctgggattacaggcgtgaccaattttttttttttttttagttaaaaacaaatttttattttctggccgggtacagtggccagctaggatctggctttatrggtagctctgtaaatgtgaatcatgtgtaaggcttactggtgagggttgttctgtgggtgatatcttagggctcacccttcacgtgctgtggcggtggat

SEQ ID NO: 37787 - DNA, 201 bp, Homo sapiens
ggtaagtggtagttaagttcagttgaattcaggctcaattttcagggaaatcatcagcttgactcccttcccttgattgtttttgccttactcagggctgwctggggtctttgggatgaagtttcaaggatctttgcatagactcccgagcctcggctgcttggaggggcacatatacctcataccagtggcagcacttcc

SEQ ID NO: 37788 - DNA, 201 bp, Homo sapiens
ggtcttccttttcttggttttggaaactagacatctgagataccagcaggcctggttcctggggaggcccccttcctgacttacagacggccgcctcccckctgtgacctcacctggccttccctcatctaaggacaccaatcctataaccttaaaggttccatgtctatctgctgtcacattgggggttagggcttctta

SEQ ID NO: 37789 - DNA, 201 bp, Homo sapiens
cggcagccggggatccgcgccagccccgactcctaccatgctccttttgacggggcttgtgttgccccttcttcggagtttatgtgctttacttgtttcgrcaacagcagaacagcagtcagctgggtgaaccacgttctggccagtggtcaatggacaggctctgaggccgagctgaggtttgacttcgggtttggcata

SEQ ID NO: 37790 - DNA, 201 bp, Homo sapiens
ctgagttgaggtgttggacttggctgcaggcttgttcagtgcctgggatgggcactcaggtgccgagactggcgtggaacggggttgcaggcaccccggayaccagaggcccttttcattccttagtaacagttgggactgccaatgcattggttcccctgaatttgaaaagagagagaaatagcctttccagttttttgt

SEQ ID NO: 37791 - DNA, 201 bp, Homo sapiens
cccggacaccagaggcccttttcattccttagtaacagttgggactgccaatgcattggttcccctgaatttgaaaagagagagaaatagcctttccagtkttttgttttcctctttaatcccccaaatctggaggctaagcaggagagtcacagtggttcctccaccccagagctctgctagcccagccaaaggtggcca

SEQ ID NO: 37792 - DNA, 201 bp, Homo sapiens
acaccagaggcccttttcattccttagtaacagttgggactgccaatgcattggttcccctgaatttgaaaagagagagaaatagcctttccagttttttsttttcctctttaatcccccaaatctggaggctaagcaggagagtcacagtggttcctccaccccagagctctgctagcccagccaaaggtggccagcagc

SEQ ID NO: 37793 - DNA, 201 bp, Homo sapiens
aggcccttttcattccttagtaacagttgggactgccaatgcattggttcccctgaatttgaaaagagagagaaatagcctttccagttttttgttttccyctttaatcccccaaatctggaggctaagcaggagagtcacagtggttcctccaccccagagctctgctagcccagccaaaggtggccagcagctgggaag

SEQ ID NO: 37794 - DNA, 201 bp, Homo sapiens; identical to SEQ ID NO: 18282

SEQ ID NO: 37795 - DNA, 201 bp, Homo sapiens
tctgctagcccagccaaaggtggccagcagctgggaagggctgtggtcttttctgcagaaatggcttcctggcctgtggcctgggacatggcagaggtggktatggggaagggaagatttgttggagttggggctgctggtgcaaccaggaggtcctaagctaggggctcccattaacccagcatcctaactacaggtcct

SEQ ID NO: 37796 - DNA, 201 bp, Homo sapiens; identical to SEQ ID NO: 18284

SEQ ID NO: 37797 - DNA, 201 bp, Homo sapiens
aggggtggctatgcctgcgtccatcattctggctgccttggtccctcacctttcaccctgctcctccttcaccctctggtgcatgtccagttatgctgcayctgctgctctccctggcacagctgagagcgcctgctctggccctgcgtggccctggcttcccgggagcctgtgacacttgtctcctcatccctgctttgt

SEQ ID NO: 37798 - DNA, 201 bp, Homo sapiens
gtactttgtcatccacagagtggctgttgaagcagctctccgggtgtggaaaggcgaggtgtccacctcaacaggcagacaggagtttaaagcgcacgacstcacagaaaaccagttgtgataaaaattaaaccactgacatttaagaagagtgggtgggaaatgattgccattgacttttttgttttttagctccagttt

SEQ ID NO: 37799 - DNA, 201 bp, Homo sapiens
gctgttcccaagcactcagcccatgtctcagtcacggaagatgtagctgaagttggggggaccattcctcagccatttttctgcattgatttcccttcttragcagtttctcagttagctccgagttcttacccagccccacagcttcatgttcataagaacatgtcctgatggggtactgcccccgcccctggttaatat

SEQ ID NO: 37800 - DNA, 201 bp, Homo sapiens
ggggcagcagttgggcatcggatgggagttctagggtggggccgtgatagcctggctctctgtggccctgggtggcgtcagcacctcccctcagctgtcaygctcatcagtcggcccttggcgtgaggcagtgctgcagcccatcctgtgtcagaggccacggcctgcctgtgagcgtggactgggagttgctgcagctcc

SEQ ID NO: 37801 - DNA, 201 bp, Homo sapiens
ttgttcccgttttacagaggaggggattggagcccagaaaggctaagtaactggccagcgccggcagccggggatccgcgccagccccgactcctaccatsctccttttgacggggcttgtgttgccccttcttcggagtttatgtgctttacttgtttcgacaacagcagaacagcagtcagctgggtgaaccacgttct

SEQ ID NO: 37802 - DNA, 201 bp, Homo sapiens
aggacccttgagcccaggaagttgaggctgcattccagcctgggtgttggagcgagacgttatctcaaacaaaacaaaggggagacaagtccgtggggtgygctggtggtacctccttccttgtcccctgttgccatcaccctcggtggtgcacagcctgtgaggccaccaaggaggtggccctgccccggccctgctgtg

SEQ ID NO: 37803 - DNA, 201 bp, Homo sapiens
gttgaggctgcattccagcctgggtgttggagcgagacgttatctcaaacaaaacaaaggggagacaagtccgtggggtgcgctggtggtacctccttccytgtcccctgttgccatcaccctcggtggtgcacagcctgtgaggccaccaaggaggtggccctgccccggccctgctgtggttgcttcctcagagggagg

SEQ ID NO: 37804 - DNA, 201 bp, Homo sapiens
tgtggttatcagggttagaatgttccagaaaggtaacactcctgtttgagactgttggtaagggaatggcactcatggcctgagccaatgtgtgttggccrtgtccttccagagttcgatgtttagctctgcacgtgctctgcgggtctgcttgggtctgcaggtcctgaggggcttccctgctccctcccagcatcaggt

SEQ ID NO: 37805 - DNA, 201 bp, Homo sapiens
tctgcctcagctcaggatgaggccgttttgttcgtatatggtgttgcgattcctcaggagcattgcagttttttgagatggagttttgctcttattgcgcrggctggagtgcagtggcgcgatctcggctcactgcaacctccgcctctcaggtgcaagcgattctcctgcctcagcttcccgagtagctgggattacagg

SEQ ID NO: 37806 - DNA, 201 bp, Homo sapiens
cacgtgctctgcgggtctgcttgggtctgcaggtcctgaggggcttccctgctccctcccagcatcaggttagggctctggttcatctgtagtaggtctcygcaccagttctggcgttgccagggctgaaagtgtgggccgtcagggccgccaggtgactctgtccttgagatcctgagggcacattggatgccagagact

SEQ ID NO: 37807 - DNA, 201 bp, Homo sapiens
tggtgttgcgattcctcaggagcattgcagttttttgagatggagttttgctcttattgcgcaggctggagtgcagtggcgcgatctcggctcactgcaayctccgcctctcaggtgcaagcgattctcctgcctcagcttcccgagtagctgggattacaggcgcccgccaccacgcctggctaatttttgtatttttag

SEQ ID NO: 37808 - DNA, 201 bp, Homo sapiens
ggcaggctccatggacctggggtggggagaggcttctggagaatccaagctgccacctgaggggcaggaggaggtggctgggcagaggcggcaggccaggrcgggggagctgtgaagagacaggtttatggagacctggagcccctgagggctgagcgccccgaaggaaggggatgggaaggcactggagaggtgttggta

SEQ ID NO: 37809 - DNA, 201 bp, Homo sapiens
caacagcccgaaggcccagacggtgcaggctgtgcgctgcgtcacctcctacacggtggagagcatctttggtacagagcccgaaccccctctcggaccgkcctccgccatgtccaagctccggggtgcagtggctgccgagggggcctctgacacggagcgagaggagcccacagagagccagggcctggctgcccggct

SEQ ID NO: 37810 - DNA, 201 bp, Homo sapiens
gtgagggaggcttccccagcgccccttgcacagggggagccagggcgggaagacctccccaccaggttgccagccttgggggaagcacatgtctcgccggmggtggctacggccgacaaggcccccctgcaggctccccctgtcctggaggtggcagctgagtgtgagccggacgacctggacctggattatggcgactcc

SEQ ID NO: 37811 - DNA, 201 bp, Homo sapiens
acccaggagccacatttgctcaggccggacgcggctgagaaggctgaggcacccagttccccggatgtggcgcctgcggggaaggaagacagcccctctgygagtgggagggtacaggaggcagcccggcctgaggaggtggtttcgcagacccccctgctgcggtccagagccctggtgaagcgggtcacctggaacctg

SEQ ID NO: 37812 - DNA, 201 bp, Homo sapiens
ctacagggattgaactggaaccggtccaggaatggaaaccagtcccaggggttttgcaggggcttagaagaggcctggacacactcgggggggcaggaggygcctgtggggcaggtcagctgggggctgctcacagcacacacacgatgccggacggagtcaagatctcggactagaaagcaaagctgaacctttgaaaag

SEQ ID NO: 37813 - DNA, 201 bp, Homo sapiens
ggattgaactggaaccggtccaggaatggaaaccagtcccaggggttttgcaggggcttagaagaggcctggacacactcgggggggcaggaggcgcctgwggggcaggtcagctgggggctgctcacagcacacacacgatgccggacggagtcaagatctcggactagaaagcaaagctgaacctttgaaaagaaagca

SEQ ID NO: 37814 - DNA, 201 bp, Homo sapiens
attgaactggaaccggtccaggaatggaaaccagtcccaggggttttgcaggggcttagaagaggcctggacacactcgggggggcaggaggcgcctgtgrggcaggtcagctgggggctgctcacagcacacacacgatgccggacggagtcaagatctcggactagaaagcaaagctgaacctttgaaaagaaagcatg

SEQ ID NO: 37815 - DNA, 201 bp, Homo sapiens
ggggcttagaagaggcctggacacactcgggggggcaggaggcgcctgtggggcaggtcagctgggggctgctcacagcacacacacgatgccggacggaktcaagatctcggactagaaagcaaagctgaacctttgaaaagaaagcatgggtagctctgtgataagaaaagagaaggatttcctaaacagtctgagaga

SEQ ID NO: 37816 - DNA, 201 bp, Homo sapiens
acaccgagtctgctcctcttcccatgtgaacttgtgttctgtttactttagcgttgtttcattggagtttggtacaaagaagatagcagtgcacgtatggsctctgccgtgttgaactcggagcatctccctgctccctgctggtcaaggtgtagcctcagaaccactccgaattggccagaacggttgtggttagtggcc

SEQ ID NO: 37817 - DNA, 201 bp, Homo sapiens
aggtttgacttcgggtttggcatagttgatctctctcctggaccatccggttttctttcttattggaagaatgttaagtcagagtgctagtggatggatgrcacctcagcatcatggccatgacaagcctggccttggccctcagcagggctgtgtttatctcaggcccgcggagacctttgtgcgtgcctgactttttga

SEQ ID NO: 37818 - DNA, 201 bp, Homo sapiens
gagctgaagtgatctttgcacctcagactcccgagcagctgggactacaggcggtttccaccacacctacctggtttttaacggttttgccatgttgcccrggctggtctcataacttgcaggctcaagtgatctgcctgcctcagcctcccaaagtgctgggattacaagcatgagccaccacgcccggctgattcacat

SEQ ID NO: 37819 - DNA, 201 bp, Homo sapiens
tttgccatgttgcccgggctggtctcataacttgcaggctcaagtgatctgcctgcctcagcctcccaaagtgctgggattacaagcatgagccaccacgsccggctgattcacatttttttttttgagactgagtctcactctgtcgcccagtggcatgtagtggcgcgatctcagctcactgcaacctccgcctgccag

SEQ ID NO: 37820 - DNA, 201 bp, Homo sapiens; identical to SEQ ID NO: 23457

SEQ ID NO: 37821 - DNA, 201 bp, Homo sapiens
gggtacccattctgactcctaccaccgcagctccctacctcccgcctgccatgggttccacgtgcatggctctgggcagtctgtgtctttgcgtgcgtctstgtatgtctgcgtgtatctgcttacattcgctcagcatctgagattcacccaggcttttgcgtggatcagcggcagactcctgattgccgcgtggcggcc

SEQ ID NO: 37822 - DNA, 201 bp, Homo sapiens
gtgtccacgcgttgactgccgtgtgtgactccagtcggcgtctcagcagtctccggtgtccacgcgttgactgccgtgtgtgactccagtcggcgtctcarcagtctccggtgtccacgcgttgactgccgtgtgtgactccagtcggcgtctcaacagtctccggtgtccatgcgttgactgccatgtatgactccaggt

SEQ ID NO: 37823 - DNA, 201 bp, Homo sapiens
ggggcggggggtggattctggttcttttttttcccattatcctgagagccttaaggtactcagtgtgttggtgagactcagccctgtcatctagcagaagygtgttccttttcattgctgtatagtattccattgcatgactgtcctgtgctctgattttaatgcactttattgtgggtggatatttgagttgcttccttt

SEQ ID NO: 37824 - DNA, 201 bp, Homo sapiens
cgttgactgccgtgtgtgactccagtcggcgtctcagcagtctccagtgtccacgcgttgactgccgtgtgtgactccagtcggcgtctcagcagtctccrgtgtccacgcgttgactgccgtgtgtgactccagtcggcgtctcagcagtctccggtgtccacgcgttgactgccgtgtgtgactccagtcggcgtctca

SEQ ID NO: 37825 - DNA, 201 bp, Homo sapiens
gttttgtggtgtctaattgcggagtagcgtgtcttactgtataatggcctcttttgtatgtgggagaccatggtgttgaggggaggcagttacacaaaaarcccagataccgagtgttagttccatgggtgtggctggtcatggtgcgcactcacgaaggatgtaggtgatgccctccactccgcagagccagtcccacag

SEQ ID NO: 37826 - DNA, 201 bp, Homo sapiens
tgtccacgcgttgactgccgtgtgtgactccagtcggcgtctcaacagtctccggtgtccacgcgttgactgccgtgtgtgactccagtcggcgtctcaayagtctccggtgtccatgcgttgactgccatgtatgactccaggtattgagttcatcttcaacttctcccaacaatgaactggagttttctgtgcatgtgt

SEQ ID NO: 37827 - DNA, 201 bp, Homo sapiens
gtgtccacgcgttgactgccgtgtgtgactccagtcggcgtctcagcagtctccggtgtccacgcgttgactgccgtgtgtgactccagtcggcgtctcarcagtctccggtgtccacgcgttgactgccgtgtgtgactccagtcggcgtctcaacagtctccggtgtccacgcgttgactgccgtgtgtgactccagtc

SEQ ID NO: 37828 - DNA, 201 bp, Homo sapiens
gtgtccacgcgttgactgccgtgtgtgactccagtcggcgtctcagcagtctccggtgtccacgcgttgactgccgtgtgtgactccagtcggcgtctcarcagtctccggtgtccacgcgttgactgccgtgtgtgactccagtcggcgtctcagcagtctccggtgtccacgcgttgactgccgtgtgtgactccagtc

SEQ ID NO: 37829 - DNA, 201 bp, Homo sapiens
ggtgtggctggtcatggtgcgcactcacgaaggatgtaggtgatgccctccactccgcagagccagtcccacaggggtacccattctgactcctaccaccrcagctccctacctcccgcctgccatgggttccacgtgcatggctctgggcagtctgtgtctttgcgtgcgtctgtgtatgtctgcgtgtatctgcttaca

SEQ ID NO: 37830 - DNA, 201 bp, Homo sapiens
gtgtccacgcgttgactgccgtgtgtgactccagtcggcgtctcaacagtctccggtgtccacgcgttgactgccgtgtgtgactccagtcggcgtctcarcagtctccggtgtccacgcgttgactgccgtgtgtgactccagtcggcgtctcaacagtctccggtgtccacgcgttgactgccgtgtgtgactccagtc

SEQ ID NO: 37831 - DNA, 201 bp, Homo sapiens
gatccttgcatcacgtgacggggccgcatgggccgccgggatgtgtagtccgcaggagtccggcatgaccgccttgagcgcgaggatgctgacccggagcyggagcctgggacccggggctgggccgcgggggtgtagggaggagcccgggcctctccggagaagagaggctgcagcaggtagcgccgcgccgtggctgga

SEQ ID NO: 37832 - DNA, 201 bp, Homo sapiens
ggagggaggtgctggggggagaaagggggagggtggggagggaggctctgcggggacaggaggggaatggtagggagggaggcgctgggggaatgggggargagggtggggagggaggcgctgggaggatggggggagggtggagagggaggtgctgcggggagaagaggggagggttgagagggagaagaggggagggtg

SEQ ID NO: 37833 - DNA, 201 bp, Homo sapiens
gcagagcaccccaagtgtattagatgatggacagttgtggcatgaacgagtgaggggtgagctagcaggcgggatggcacccctaccctaccttcacctgyggccccaccagagggactgcgtggtgctttttgcagaagcgaggaaaagccacagccccgtgaagcgtccgcggaaagcacagagactgcgtgtggccta

SEQ ID NO: 37834 - DNA, 201 bp, Homo sapiens
ccggaggcggaggttgcagtgagccaagatggcaccaccacacttcagcctgggtgaaagagtgatactgcatctcaaaaaaaaaaatttgttttaaaggrtagtgtgatgattcacgaagcaatcataatagtagtggccaatggctgttcagtagtgatgggccagatacgatcgtgttgggtttttttttgagaccaa

SEQ ID NO: 37835 - DNA, 201 bp, Homo sapiens
tgagcactgctatgactccagtgcccccccaaaggtaggcaggggccccatctgcccagatgaccccccatcttagcaaggtccttgttttctttctaccyggtggcttttggctggcaccctcccctgcagacagcaccttgggaggatggacacccggtgccccagagcatcgcctgcatcactgtagccactcagcag

SEQ ID NO: 37836 - DNA, 201 bp, Homo sapiens
ggaggtggggcttgcagtgagctgagatcgcgccagtgtactccagcctgggcgacaaagcgtgactccgtctcaccaaaaaaaaaaaaattagccgggcrtggtggcaggagcctgtaattccagctcctcgggaggctgaggcaggagaatcgcttgaaacccagaggcgaaagttgcagtgagtggagatcgcaccat

SEQ ID NO: 37837 - DNA, 201 bp, Homo sapiens
tagatgatggacagttgtggcatgaacgagtgaggggtgagctagcaggcgggatggcacccctaccctaccttcacctgtggccccaccagagggactgygtggtgctttttgcagaagcgaggaaaagccacagccccgtgaagcgtccgcggaaagcacagagactgcgtgtggcctatgagggctcggacagtgaga

SEQ ID NO: 37838 - DNA, 201 bp, Homo sapiens
ggacagggcctctgcgctagtcccgctgggacttctgcagaattggccagagttggattcccataggcacccagggaccccaggggtagtccagactatgkcaggaggaactggtgcagctgggagcaggcaggtggtgatgccagccagggtggcaggagctttgatgccaggatagagtttggagtttattatgacagt

SEQ ID NO: 37839 - DNA, 201 bp, Homo sapiens
ggaggagtggctgcctaggtatgagtatgtggggggcttcctagggagaagagctcaccccgcccgccctctgtcagcactgacccagcccccacccccayagggagctgtggcacgagatcaatggactcttggtgggcttcggccagcagacctgtctgcctgtgcaccctcgctgccacgcctgcctcaaccaagccc

SEQ ID NO: 37840 - DNA, 201 bp, Homo sapiens
ttgaggacctgctgggggccaagcactgcagtgagcagtgagggacacggacagggcctctgcgctagtcccgctgggacttctgcagaattggccagagytggattcccataggcacccagggaccccaggggtagtccagactatggcaggaggaactggtgcagctgggagcaggcaggtggtgatgccagccagggt

SEQ ID NO: 37841 - DNA, 201 bp, Homo sapiens
gtggcagtggcctgagagagacctcagaaggctgaggggggtggcgacggtgcaggaagtgagggtcaagcatctcaggctcggggggtccccctgaagcyccccccaggccgtggggccctgaggcctgacgcccagtcccagcagctccttggccttcctgttcgcatcctcccttccttcctctgcttccccgcctcg

SEQ ID NO: 37842 - DNA, 201 bp, Homo sapiens
cctcctggggggcgggggctgagcttgcacacgtcctcagcaggtgcaggtagctctggccacctgtgggtctcctgggggctgcatcctcccaggttggsctgtgcccttgcctccaaggctgaacccacccctgtctttcagagcaaggtgaaatacatcaagcagaccagcgccatcctgcagcagcactacggtggg

SEQ ID NO: 37843 - DNA, 201 bp, Homo sapiens
cccgcttggcctcccagcagcagtggacacgcatgtgcacagaatcgccaacaggctgaggtggaccaagaaggcaaccaagtccccagaggagacccgcrccgccctggaggagtggctgcctaggtatgagtatgtggggggcttcctagggagaagagctcaccccgcccgccctctgtcagcactgacccagccccc

SEQ ID NO: 37844 - DNA, 201 bp, Homo sapiens
ccgttgaggacctgctgggggccaagcactgcagtgagcagtgagggacacggacagggcctctgcgctagtcccgctgggacttctgcagaattggccaragttggattcccataggcacccagggaccccaggggtagtccagactatggcaggaggaactggtgcagctgggagcaggcaggtggtgatgccagccag

SEQ ID NO: 37845 - DNA, 201 bp, Homo sapiens
gggacacggacagggcctctgcgctagtcccgctgggacttctgcagaattggccagagttggattcccataggcacccagggaccccaggggtagtccaractatggcaggaggaactggtgcagctgggagcaggcaggtggtgatgccagccagggtggcaggagctttgatgccaggatagagtttggagtttatta

SEQ ID NO: 37846 - DNA, 201 bp, Homo sapiens
catgaggaacaaaaaggatgcacctgtggaccatctggggactgagcactgctatgactccagtgcccccccaaaggtaggcaggggccccatctgcccaratgaccccccatcttagcaaggtccttgttttctttctacccggtggcttttggctggcaccctcccctgcagacagcaccttgggaggatggacacccg

SEQ ID NO: 37847 - DNA, 201 bp, Homo sapiens
atggactcttggtgggcttcggccagcagacctgtctgcctgtgcaccctcgctgccacgcctgcctcaaccaagccctctgcccggccgcccagggtctytgatggccgcatggctctggccgaggtgccgctgtggccaccgtctgtgaagtggctttacgcttcaggaagccacgcctgttgaataaagctttggtgt

SEQ ID NO: 37848 - DNA, 201 bp, Homo sapiens
ctggaatgagatgagggcagagtggggaggtaaggactgaggagggaggaggaagagtatcccctcagcaggtggggtggggagggaggtgctggggggakaaagggggagggtggggagggaggctctgcggggacaggaggggaatggtagggagggaggcgctgggggaatgggggaggagggtggggagggaggcgc

SEQ ID NO: 37849 - DNA, 201 bp, Homo sapiens
gtggggagggaggcgctgggaggatggggggagggtggagagggaggtgctgcggggagaagaggggagggttgagagggagaagaggggagggtggggakggaggcactggggggagggccctccttgaatccttttcccaggtcctggtgtctcttcctagcaccggaggcttcttggcagttgggtgcagacagaccc

SEQ ID NO: 37850 - DNA, 201 bp, Homo sapiens
ctggtgcccagagccagtgcttatgccgagaggagcctcaggccacaggagacagacagagggaagcctggatggacccttccggggacagggccacgttyctggggaggctgagggctgagaggtgcttcggagtcgggatcctgccgggcctcggtttcagcatccgtaggacctcatgaggactcactgagctggcca

SEQ ID NO: 37851 - DNA, 201 bp, Homo sapiens
gggtttcaccacgttgatcaggctggtctcaaactcctgacttcaggtgatccgcctgccttggcctcccgaagtgctgggatgacgggtgcgagccaccrcgcccggccacatacgattctaagcactgagataattcatttaagcttcacattactccagtgagtcaggtactattattgtcctggtgttgtagatgac

SEQ ID NO: 37852 - DNA, 201 bp, Homo sapiens
tatgccgagaggagcctcaggccacaggagacagacagagggaagcctggatggacccttccggggacagggccacgttcctggggaggctgagggctgaraggtgcttcggagtcgggatcctgccgggcctcggtttcagcatccgtaggacctcatgaggactcactgagctggccaatctctctggcagggtctggc

SEQ ID NO: 37853 - DNA, 201 bp, Homo sapiens
gggatgtgtagtccgcaggagtccggcatgaccgccttgagcgcgaggatgctgacccggagccggagcctgggacccggggctgggccgcgggggtgtarggaggagcccgggcctctccggagaagagaggctgcagcaggtagcgccgcgccgtggctggagcgtgggaggaggcgggataggggctgcaggctggag

SEQ ID NO: 37854 - DNA, 201 bp, Homo sapiens
caagtgtggcccagggcaacaaaccagggtgtgtcgagggcggggggcggagcctggccagggaatcacccaggacccgccgccaccccggtccctgtcastgcacaagcaggtacgcaggtaccaggtgctgctgtcactgatgctctccagccaaaccaaagaccaggtgacggcgggcgccatgcagcgactgcgggc

SEQ ID NO: 37855 - DNA, 201 bp, Homo sapiens
accccacagggggaggctgatgcctcaagtgtggcccagggcaacaaaccagggtgtgtcgagggcggggggcggagcctggccagggaatcacccaggayccgccgccaccccggtccctgtcactgcacaagcaggtacgcaggtaccaggtgctgctgtcactgatgctctccagccaaaccaaagaccaggtgacgg

SEQ ID NO: 37856 - DNA, 201 bp, Homo sapiens
cacgggggtggtggcagactcgcctctgggcggggaggggcacgggctaggctggtggagtgtgcccctgttcaccccgcttggcctcccagcagcagtgkacacgcatgtgcacagaatcgccaacaggctgaggtggaccaagaaggcaaccaagtccccagaggagacccgcgccgccctggaggagtggctgcctag

SEQ ID NO: 37857 - DNA, 201 bp, Homo sapiens
aaagaccaggtgacggcgggcgccatgcagcgactgcgggcgcggggcctgacggtggacagcatcctgcagacagatgatgccacgctgggcaagctcayctaccccgtcggtttctggagggtgagccctgcctgtggcaacgggggccgggtggcagtggcctgagagagacctcagaaggctgaggggggtggcgac

SEQ ID NO: 37858 - DNA, 201 bp, Homo sapiens
cagcagcagtggacacgcatgtgcacagaatcgccaacaggctgaggtggaccaagaaggcaaccaagtccccagaggagacccgcgccgccctggaggartggctgcctaggtatgagtatgtggggggcttcctagggagaagagctcaccccgcccgccctctgtcagcactgacccagcccccacccccacagggag

SEQ ID NO: 37859 - DNA, 201 bp, Homo sapiens
aaaaaaaaattagccgggcgtggtggcaggagcctgtaattccagctcctcgggaggctgaggcaggagaatcgcttgaaacccagaggcgaaagttgcastgagtggagatcgcaccattgtctgtatccagcctgggtgacagagcaagactccgtttaaaaaaaaaaaaaaatgccacagccatagattgctggctcc

SEQ ID NO: 37860 - DNA, 201 bp, Homo sapiens
gctaggtctgcaggcagtgacctcatgccggcctgccaggcagagctgttgccacccagcctggtgcccagagccagtgcttatgccgagaggagcctcakgccacaggagacagacagagggaagcctggatggacccttccggggacagggccacgttcctggggaggctgagggctgagaggtgcttcggagtcggga

SEQ ID NO: 37861 - DNA, 201 bp, Homo sapiens
gcgaaagttgcagtgagtggagatcgcaccattgtctgtatccagcctgggtgacagagcaagactccgtttaaaaaaaaaaaaaaatgccacagccatarattgctggctccggtcccagctctgcacctcctggctgggtgactctgggccaggcccttggcttctctaagctctggccacaaagtgggtgaggcagtc

SEQ ID NO: 37862 - DNA, 201 bp, Homo sapiens
tcaggccacaggagacagacagagggaagcctggatggacccttccggggacagggccacgttcctggggaggctgagggctgagaggtgcttcggagtcrggatcctgccgggcctcggtttcagcatccgtaggacctcatgaggactcactgagctggccaatctctctggcagggtctggcccccagcaagcgtttg

SEQ ID NO: 37863 - DNA, 201 bp, Homo sapiens
atggacccttccggggacagggccacgttcctggggaggctgagggctgagaggtgcttcggagtcgggatcctgccgggcctcggtttcagcatccgtargacctcatgaggactcactgagctggccaatctctctggcagggtctggcccccagcaagcgtttgtccaagcgagctgtcgctgttattgtggggaata

SEQ ID NO: 37864 - DNA, 201 bp, Homo sapiens
cctggggaggctgctccccaaccccgccgagcactggatggtggtgggcggatctgttgaaagcagcttggtgggtggggccgcttccccttggcacccgygtgggccgcagtttctcagatgggttttaaatagccctctccactcaggcacaggatgggaaccacccggcaggcctggcagctggtggggaagccccag

SEQ ID NO: 37865 - DNA, 201 bp, Homo sapiens
ccttccggggacagggccacgttcctggggaggctgagggctgagaggtgcttcggagtcgggatcctgccgggcctcggtttcagcatccgtaggacctyatgaggactcactgagctggccaatctctctggcagggtctggcccccagcaagcgtttgtccaagcgagctgtcgctgttattgtggggaatagagctc

SEQ ID NO: 37866 - DNA, 201 bp, Homo sapiens
gctgtgtccctgaccgctgcagtggcaggtgctaggtctgcaggcagtgacctcatgccggcctgccaggcagagctgttgccacccagcctggtgcccakagccagtgcttatgccgagaggagcctcaggccacaggagacagacagagggaagcctggatggacccttccggggacagggccacgttcctggggaggc

SEQ ID NO: 37867 - DNA, 201 bp, Homo sapiens
gggagtgggcagcccagaacagagccccccaggctggctcaggtgatgggagagaggcctgcaccccaacagagggctcagcccctgccccagcacctcakgggcagccaagatggtcacatgtaggcttgcagccagggctttgcggttccaatgtctaactggagggccacgggggtggtggcagactcgcctctgggc

SEQ ID NO: 37868 - DNA, 201 bp, Homo sapiens
agttctagcagccacaaaggtatctacacatgtccacatgtcccctagggtctggctggactaaaggcaaaactaaagcccagaagacagaccagtgcacyggatgcccgtaccgcgtgatggccaggaaggcccggctgtgcagctcctgcttgatggcgctttgcagacggtaggcgtgcccatggcatgaggcatccc

SEQ ID NO: 37869 - DNA, 201 bp, Homo sapiens
gtggtgagggggcgcaaccctctgccctgtcagccccacttctgcctgcaggccccgtcccctcggccatgggacccatccccagcccgcccacaccccgytcaacactcacccctcgcttggagccgctgctgcaattgaggcagcggccctccaagtacacgtaggagctgcggctcacttcgtacacggcctgtgcct

SEQ ID NO: 37870 - DNA, 201 bp, Homo sapiens
ctgcaggcagaaggggtggtgagggggcgcaaccctctgccctgtcagccccacttctgcctgcaggccccgtcccctcggccatgggacccatccccagyccgcccacaccccgctcaacactcacccctcgcttggagccgctgctgcaattgaggcagcggccctccaagtacacgtaggagctgcggctcacttcgt

SEQ ID NO: 37871 - DNA, 201 bp, Homo sapiens
tccagcaccagcgtcttgttgctgaacgtacgtgcagcccaccgctgcaggcagaaggggtggtgagggggcgcaaccctctgccctgtcagccccacttytgcctgcaggccccgtcccctcggccatgggacccatccccagcccgcccacaccccgctcaacactcacccctcgcttggagccgctgctgcaattgag

SEQ ID NO: 37872 - DNA, 201 bp, Homo sapiens
gaccctgcatcctgttcatccgctccacggttacgttgtagttcacggtgacgttgctcacgtggttggaggccgtcagctgcagggacaggcgtcagtgrgcccaggtggcaggtgagaggcctggccctgattggcgtccctccctccactcacccacagccatggcagcgtcctcgggcagcatgaagcagagcagaa

SEQ ID NO: 37873 - DNA, 201 bp, Homo sapiens
ccgcagcaccagtcgcatgcctgcactgcccgtggatgtggtggtctcatccagcaccagcgtcttgttgctgaacgtacgtgcagcccaccgctgcaggyagaaggggtggtgagggggcgcaaccctctgccctgtcagccccacttctgcctgcaggccccgtcccctcggccatgggacccatccccagcccgccca

SEQ ID NO: 37874 - DNA, 201 bp, Homo sapiens
acctgcagaccctgcatcctgttcatccgctccacggttacgttgtagttcacggtgacgttgctcacgtggttggaggccgtcagctgcagggacaggcrtcagtgagcccaggtggcaggtgagaggcctggccctgattggcgtccctccctccactcacccacagccatggcagcgtcctcgggcagcatgaagcag

SEQ ID NO: 37875 - DNA, 201 bp, Homo sapiens
agcacgcccgccgtcagtgctagcgtggcattgggggacagcacggccggcactgtggagacctgcagaccctgcatcctgttcatccgctccacggttaygttgtagttcacggtgacgttgctcacgtggttggaggccgtcagctgcagggacaggcgtcagtgagcccaggtggcaggtgagaggcctggccctgat

SEQ ID NO: 37876 - DNA, 201 bp, Homo sapiens
cccgccgcagcaccagtcgcatgcctgcactgcccgtggatgtggtggtctcatccagcaccagcgtcttgttgctgaacgtacgtgcagcccaccgctgyaggcagaaggggtggtgagggggcgcaaccctctgccctgtcagccccacttctgcctgcaggccccgtcccctcggccatgggacccatccccagcccg

SEQ ID NO: 37877 - DNA, 201 bp, Homo sapiens
ccagcacgcccgccgtcagtgctagcgtggcattgggggacagcacggccggcactgtggagacctgcagaccctgcatcctgttcatccgctccacggtkacgttgtagttcacggtgacgttgctcacgtggttggaggccgtcagctgcagggacaggcgtcagtgagcccaggtggcaggtgagaggcctggccctg

SEQ ID NO: 37878 - DNA, 201 bp, Homo sapiens
ccagtgggaagaggcggcaagagccccccagcggcgggcggttgggggacaggcggatggaggcgcagccctcctcctcgccagagcggcccagcaccgtsagcgtgaaggtgtatccctcgccgtcccgcagcacgccccgccgcagcaccagtcgcatgcctgcactgcccgtggatgtggtggtctcatccagcacca

SEQ ID NO: 37879 - DNA, 201 bp, Homo sapiens
tctcctgttctgaacccaacagggtggtcccactgtgggaccacaaccaggtatgactgtgtgagaagcaggctcactaccaggctaccagggagcacagsggagcaggcgccaccttgaggcataaacccagagaaacaagacctccaagacggccaggcactggggcacacgccggtaacacagcaccgtgggagctga

SEQ ID NO: 37880 - DNA, 201 bp, Homo sapiens
acaggaaggccacctccacggccgagtccaccagcacgcccgccgtcagtgctagcgtggcattgggggacagcacggccggcactgtggagacctgcagrccctgcatcctgttcatccgctccacggttacgttgtagttcacggtgacgttgctcacgtggttggaggccgtcagctgcagggacaggcgtcagtgag

SEQ ID NO: 37881 - DNA, 201 bp, Homo sapiens
actgtccccctttccagatggggaaactgaggctcagagcccggagaccagggcccaccagcccaggctcacagcagcacccacccacggggcctgtgggyaccggcagggatccccgtgcaggccacctcccgtatggcgtgcccaggagtgtccggaggctgcccccagctcatgtccacctctgcatctgcagagctg

SEQ ID NO: 37882 - DNA, 201 bp, Homo sapiens
acccgtgcattcgaagtgcaccttggtggtgagggcgtgcacagcgcccagtgggaagaggcggcaagagccccccagcggcgggcggttgggggacaggsggatggaggcgcagccctcctcctcgccagagcggcccagcaccgtgagcgtgaaggtgtatccctcgccgtcccgcagcacgccccgccgcagcaccag

SEQ ID NO: 37883 - DNA, 201 bp, Homo sapiens
cactcacaggaaggccacctccacggccgagtccaccagcacgcccgccgtcagtgctagcgtggcattgggggacagcacggccggcactgtggagaccygcagaccctgcatcctgttcatccgctccacggttacgttgtagttcacggtgacgttgctcacgtggttggaggccgtcagctgcagggacaggcgtca

SEQ ID NO: 37884 - DNA, 201 bp, Homo sapiens
cccccacgcaggcctgcactcacccgtgcattcgaagtgcaccttggtggtgagggcgtgcacagcgcccagtgggaagaggcggcaagagccccccagcrgcgggcggttgggggacaggcggatggaggcgcagccctcctcctcgccagagcggcccagcaccgtgagcgtgaaggtgtatccctcgccgtcccgcag

SEQ ID NO: 37885 - DNA, 201 bp, Homo sapiens
cccgagtcactcacaggaaggccacctccacggccgagtccaccagcacgcccgccgtcagtgctagcgtggcattgggggacagcacggccggcactgtrgagacctgcagaccctgcatcctgttcatccgctccacggttacgttgtagttcacggtgacgttgctcacgtggttggaggccgtcagctgcagggaca

SEQ ID NO: 37886 - DNA, 201 bp, Homo sapiens
cagcatcctccgcgtcatgccagcctgagggacggtccccacggcatcacgggagggctccgtgacgtcacagagtcgggggatcccgctgctccccccamgcaggcctgcactcacccgtgcattcgaagtgcaccttggtggtgagggcgtgcacagcgcccagtgggaagaggcggcaagagccccccagcggcgggc

SEQ ID NO: 37887 - DNA, 201 bp, Homo sapiens
aaaccggcccccgagtcactcacaggaaggccacctccacggccgagtccaccagcacgcccgccgtcagtgctagcgtggcattgggggacagcacggcyggcactgtggagacctgcagaccctgcatcctgttcatccgctccacggttacgttgtagttcacggtgacgttgctcacgtggttggaggccgtcagct

SEQ ID NO: 37888 - DNA, 201 bp, Homo sapiens
gactgggggacactcacagctctgccagcgccgagaggttcgccaggagcccaacgtccagcgcccggagcaggttgtgggagacgtctctgaggagtgartggccgtgggtcagggccagagcccttagtaggccagaggccatccctgggcccatcccacacattgccagcatccccaagctatggcctcccacccttg

SEQ ID NO: 37889 - DNA, 201 bp, Homo sapiens
ctgggacaagagcctggtgcccaccccaaaccggcccccgagtcactcacaggaaggccacctccacggccgagtccaccagcacgcccgccgtcagtgcyagcgtggcattgggggacagcacggccggcactgtggagacctgcagaccctgcatcctgttcatccgctccacggttacgttgtagttcacggtgacgt

SEQ ID NO: 37890 - DNA, 201 bp, Homo sapiens
caaagaaccacaacttacatttcacttaaattaaataaattagcaaatattccttcttctaacgtagaaatcttgttgttgcttatatccctggaagagasgggggattcggcaaagctgacggaagcccccacagctgagcagcaagaggcggtgccgccagcccacccggagtgagccccgcatgctggcacgactggg

SEQ ID NO: 37891 - DNA, 201 bp, Homo sapiens
agggaaaccgaggctcagaaaagcaaccccgtgatgtgggggtccctcggctgaggctggggctgggacaagagcctggtgcccaccccaaaccggccccygagtcactcacaggaaggccacctccacggccgagtccaccagcacgcccgccgtcagtgctagcgtggcattgggggacagcacggccggcactgtgga

SEQ ID NO: 37892 - DNA, 201 bp, Homo sapiens
acagcaccgcctcccctgccccaaccaagccggcactggggggctccaagcaggtagtgaactgcccccaggatctggtctcaagcctggaaggggacacrgaccaactgggagggcagaagggatactgggggcctggggtccagccaggaccccacccaaagaaccacaacttacatttcacttaaattaaataaatta

SEQ ID NO: 37893 - DNA, 201 bp, Homo sapiens
ttctgcggggcaggggcaggtgttggggaccaggtctggtgggaagggtctatgccagccccccactggcaaccaggccctggagccaccctgacagcacygcctcccctgccccaaccaagccggcactggggggctccaagcaggtagtgaactgcccccaggatctggtctcaagcctggaaggggacacggaccaac

SEQ ID NO: 37894 - DNA, 201 bp, Homo sapiens
caaggggatgccaagcagaggctggccagccagggagccaggcccagcacacgtggctgcctcgggctgcaccacccgcacctgctgctcctccgcccatygcggcagccacgccaggccacagtcacactcaaacgggttcccactcaggtttctgcggggcaggggcaggtgttggggaccaggtctggtgggaagggt

SEQ ID NO: 37895 - DNA, 201 bp, Homo sapiens
gcccgcagtcgctgcatggcgcccgccgtcacctggtctttggtttggctggagagcatcagtgacagcagcacctggtacctgcgtacctgcttgtgcastgacagggaccggggtggcggcgggtcctgggtgattccctggccaggctccgccccccgccctcgacacaccctggtttgttgccctgggccacacttg

SEQ ID NO: 37896 - DNA, 201 bp, Homo sapiens
caggagcccaacgtccagcgcccggagcaggttgtgggagacgtctctgaggagtgagtggccgtgggtcagggccagagcccttagtaggccagaggccwtccctgggcccatcccacacattgccagcatccccaagctatggcctcccacccttgagctccccactcccagaggtcaggaggggcctttctgatggaa

SEQ ID NO: 37897 - DNA, 201 bp, Homo sapiens
ccactgggcgctcccacgaggaggttctcggcatcctgcactgggcctggggtggcgagtgcacagtgaggcgccgggccagggcccaggacaccaggacraacagactggggaccgagccgcccgaaaacccccccaccagcccctcctcctcagcccaggctccaccgcgggcgctcggcaggcccctaaccacagcca

SEQ ID NO: 37898 - DNA, 201 bp, Homo sapiens
gtggccctggcgacagcgccgcagcagcagggcgtacaccagcggggcgccagcatcctccgcgtcatgccagcctgagggacggtccccacggcatcacrggagggctccgtgacgtcacagagtcgggggatcccgctgctccccccacgcaggcctgcactcacccgtgcattcgaagtgcaccttggtggtgagggc

SEQ ID NO: 37899 - DNA, 201 bp, Homo sapiens
aaacccccccaccagcccctcctcctcagcccaggctccaccgcgggcgctcggcaggcccctaaccacagccagcgtctcaggcccctgcctggcccccsgcacacctccgggctgcagctcgcagacgtagctgtgcggcgctgagcacaggtcggtgttacaccacccggtgggcccgagccggacgcagtgctcggc

SEQ ID NO: 37900 - DNA, 201 bp, Homo sapiens
tgaaacccgggggcagcacggctccgtagctggagaggctgcccttgtagacacagaactcctcgcagtggccctggcgacagcgccgcagcagcagggcrtacaccagcggggcgccagcatcctccgcgtcatgccagcctgagggacggtccccacggcatcacgggagggctccgtgacgtcacagagtcgggggat

SEQ ID NO: 37901 - DNA, 201 bp, Homo sapiens
accgcgggcgctcggcaggcccctaaccacagccagcgtctcaggcccctgcctggccccccgcacacctccgggctgcagctcgcagacgtagctgtgcrgcgctgagcacaggtcggtgttacaccacccggtgggcccgagccggacgcagtgctcggctgtggctgggtgtggctccccgggcagccagttctggca

SEQ ID NO: 37902 - DNA, 201 bp, Homo sapiens
ggtcggtgttacaccacccggtgggcccgagccggacgcagtgctcggctgtggctgggtgtggctccccgggcagccagttctggcagctctccaggctraaggcctcgccctgcggcgctgggcccacctccaccccctgcacagtcgagaagccgatccacacgtctaggctcctgggggcgggtgtgggatggcagg

SEQ ID NO: 37903 - DNA, 201 bp, Homo sapiens
aggcccacctcgaagtgtggcctgaaacccgggggcagcacggctccgtagctggagaggctgcccttgtagacacagaactcctcgcagtggccctggcracagcgccgcagcagcagggcgtacaccagcggggcgccagcatcctccgcgtcatgccagcctgagggacggtccccacggcatcacgggagggctccg

SEQ ID NO: 37904 - DNA, 201 bp, Homo sapiens
gcctcagggctcctgtgcacccagttacctcccaacagacagggaaaccgaggctcagaaaagcaaccccgtgatgtgggggtccctcggctgaggctggrgctgggacaagagcctggtgcccaccccaaaccggcccccgagtcactcacaggaaggccacctccacggccgagtccaccagcacgcccgccgtcagtg

SEQ ID NO: 37905 - DNA, 201 bp, Homo sapiens
ggccaggcccacctcgaagtgtggcctgaaacccgggggcagcacggctccgtagctggagaggctgcccttgtagacacagaactcctcgcagtggcccwggcgacagcgccgcagcagcagggcgtacaccagcggggcgccagcatcctccgcgtcatgccagcctgagggacggtccccacggcatcacgggagggc

SEQ ID NO: 37906 - DNA, 201 bp, Homo sapiens
tgtgctgaggcctctcccggctcccgtgcagcctcagggctcctgtgcacccagttacctcccaacagacagggaaaccgaggctcagaaaagcaaccccstgatgtgggggtccctcggctgaggctggggctgggacaagagcctggtgcccaccccaaaccggcccccgagtcactcacaggaaggccacctccacgg

SEQ ID NO: 37907 - DNA, 201 bp, Homo sapiens
cgggatgttttcattccagggtgcttggcgggctgggctgccgtggccactgcagagctccagaaaagaacatgtgtgtctccctccaaagtatattcctygctggaaagcagatcccaggcagggtctcccccacgagcagggggagaggcaccccaaggtgggggagcgagggcagtggcagaaccaccccatacccta

SEQ ID NO: 37908 - DNA, 201 bp, Homo sapiens
gccccgggcctccattcagggcccacccggctgtgctgaggcctctcccggctcccgtgcagcctcagggctcctgtgcacccagttacctcccaacagayagggaaaccgaggctcagaaaagcaaccccgtgatgtgggggtccctcggctgaggctggggctgggacaagagcctggtgcccaccccaaaccggcccc

SEQ ID NO: 37909 - DNA, 201 bp, Homo sapiens
ttgagggcgaccacagcggctcccagctggtcctgcaccaccacggccaggcccacctcgaagtgtggcctgaaacccgggggcagcacggctccgtagcyggagaggctgcccttgtagacacagaactcctcgcagtggccctggcgacagcgccgcagcagcagggcgtacaccagcggggcgccagcatcctccgcg

SEQ ID NO: 37910 - DNA, 201 bp, Homo sapiens
ccgaggggtctggaaccgggaaggactcgttgtacggaggctggaactggtggagggcctgctccccatccccaaaggtccacctgccggggcggtgggasgcagtgagtgaaccgggacaggggtgggcggtggcggggcagggggtgcttgggacccagccgaggctccactctgcagtcacgccccgggcctccattc

SEQ ID NO: 37911 - DNA, 201 bp, Homo sapiens
ggagccccatcactgtccccctttccagatggggaaactgaggctcagagcccggagaccagggcccaccagcccaggctcacagcagcacccacccacgrggcctgtgggtaccggcagggatccccgtgcaggccacctcccgtatggcgtgcccaggagtgtccggaggctgcccccagctcatgtccacctctgcat

SEQ ID NO: 37912 - DNA, 201 bp, Homo sapiens
aggtgggggcaggaggtggcggggggccggagcagagggacaggcaggcaaaggaggcactggagggctgggccgccccacacaggcaccagccctgctcsgagagggctgcgaggccctggccggtggagaagcagaaggcgctgcaggcctctggctgaagcaggccttcgtgggcagctgaaaaggacactgctgcca

SEQ ID NO: 37913 - DNA, 201 bp, Homo sapiens
tgcaccaccacggccaggcccacctcgaagtgtggcctgaaacccgggggcagcacggctccgtagctggagaggctgcccttgtagacacagaactcctygcagtggccctggcgacagcgccgcagcagcagggcgtacaccagcggggcgccagcatcctccgcgtcatgccagcctgagggacggtccccacggcat

SEQ ID NO: 37914 - DNA, 201 bp, Homo sapiens
gtccccctttccagatggggaaactgaggctcagagcccggagaccagggcccaccagcccaggctcacagcagcacccacccacggggcctgtgggtacyggcagggatccccgtgcaggccacctcccgtatggcgtgcccaggagtgtccggaggctgcccccagctcatgtccacctctgcatctgcagagctgaca

SEQ ID NO: 37915 - DNA, 201 bp, Homo sapiens
tgctggaggagggtggggcccctacaggtgggggcaggaggtggcggggggccggagcagagggacaggcaggcaaaggaggcactggagggctgggccgmcccacacaggcaccagccctgctccgagagggctgcgaggccctggccggtggagaagcagaaggcgctgcaggcctctggctgaagcaggccttcgtgg

SEQ ID NO: 37916 - DNA, 201 bp, Homo sapiens
tggcgcgggtcagcaaggtaccaggggatgtgtcacacacacagcccacccccgtccagtcacgcacggacaccctgggcttccgagcaaacctgctcccrggtggtgtgaccacatggagccacagacacccagcaaggacacgcagcccgcacacccccggcaccccagacacagtgacctgcaccagggctcgaggtt

SEQ ID NO: 37917 - DNA, 201 bp, Homo sapiens
cctgcaccaccacggccaggcccacctcgaagtgtggcctgaaacccgggggcagcacggctccgtagctggagaggctgcccttgtagacacagaactcytcgcagtggccctggcgacagcgccgcagcagcagggcgtacaccagcggggcgccagcatcctccgcgtcatgccagcctgagggacggtccccacggc

SEQ ID NO: 37918 - DNA, 201 bp, Homo sapiens
ctcgaagtgtggcctgaaacccgggggcagcacggctccgtagctggagaggctgcccttgtagacacagaactcctcgcagtggccctggcgacagcgcygcagcagcagggcgtacaccagcggggcgccagcatcctccgcgtcatgccagcctgagggacggtccccacggcatcacgggagggctccgtgacgtca

SEQ ID NO: 37919 - DNA, 201 bp, Homo sapiens
gtgctccaccagcacctgggccaccgaggggtctggaaccgggaaggactcgttgtacggaggctggaactggtggagggcctgctccccatccccaaagktccacctgccggggcggtgggacgcagtgagtgaaccgggacaggggtgggcggtggcggggcagggggtgcttgggacccagccgaggctccactctgc

SEQ ID NO: 37920 - DNA, 201 bp, Homo sapiens
cggacaccctgggcttccgagcaaacctgctcccgggtggtgtgaccacatggagccacagacacccagcaaggacacgcagcccgcacacccccggcacyccagacacagtgacctgcaccagggctcgaggtttctctagggaacccacctcttagaatcatccagaaacaagtcactcttcatctgtccaacaaaggc

SEQ ID NO: 37921 - DNA, 201 bp, Homo sapiens
gcctgccgcagcagccctgggagcacactagcggtgagcccgtgcagccagactgtgagccccgttgcgctgccgttgggctctgggagggtgatggccaragacctacgagcagaggggggtggtgagcaggtggcagtctcgggggcgccctcccacggcctggctcacctgttgagggcgaccacagcggctcccagc

SEQ ID NO: 37922 - DNA, 201 bp, Homo sapiens
cccctcatccctcacctggggcagcgtaggtgtgcatgacattgtgctccaccagcacctgggccaccgaggggtctggaaccgggaaggactcgttgtayggaggctggaactggtggagggcctgctccccatccccaaaggtccacctgccggggcggtgggacgcagtgagtgaaccgggacaggggtgggcggtgg

SEQ ID NO: 37923 - DNA, 201 bp, Homo sapiens
cgtgctggaggagggtggggcccctacaggtgggggcaggaggtggcggggggccggagcagagggacaggcaggcaaaggaggcactggagggctgggcygccccacacaggcaccagccctgctccgagagggctgcgaggccctggccggtggagaagcagaaggcgctgcaggcctctggctgaagcaggccttcgt

SEQ ID NO: 37924 - DNA, 201 bp, Homo sapiens
ccggcaccccagacacagtgacctgcaccagggctcgaggtttctctagggaacccacctcttagaatcatccagaaacaagtcactcttcatctgtccarcaaaggcctgctgagaggtgcacagtgtcttgagtccaagctgcgccaaggcggcaggacccccagcccagcccaggacccccagtagagtcctcacctc

SEQ ID NO: 37925 - DNA, 201 bp, Homo sapiens
cagggccaacgagtactcgatgacgtgctggggatcggcctgccgcagcagccctgggagcacactagcggtgagcccgtgcagccagactgtgagccccrttgcgctgccgttgggctctgggagggtgatggccaaagacctacgagcagaggggggtggtgagcaggtggcagtctcgggggcgccctcccacggcct

SEQ ID NO: 37926 - DNA, 201 bp, Homo sapiens
aggcagtggccccctcaccccctcatccctcacctggggcagcgtaggtgtgcatgacattgtgctccaccagcacctgggccaccgaggggtctggaacygggaaggactcgttgtacggaggctggaactggtggagggcctgctccccatccccaaaggtccacctgccggggcggtgggacgcagtgagtgaaccgg

SEQ ID NO: 37927 - DNA, 201 bp, Homo sapiens
aggcagggaagacgtgctggaggagggtggggcccctacaggtgggggcaggaggtggcggggggccggagcagagggacaggcaggcaaaggaggcactrgagggctgggccgccccacacaggcaccagccctgctccgagagggctgcgaggccctggccggtggagaagcagaaggcgctgcaggcctctggctgaa

SEQ ID NO: 37928 - DNA, 201 bp, Homo sapiens
gggatttatctctggggcccgggatgagccctctgcaaagctccaggcaggggtacaggtcttggtcccaagcacgcatgcagcagatgtgacgtcccctsccaggctgcactcacctcgttcagcacggtgaccagggccaacgagtactcgatgacgtgctggggatcggcctgccgcagcagccctgggagcacacta

SEQ ID NO: 37929 - DNA, 201 bp, Homo sapiens
gcctggcccctccctcaccccagtaggggcctaagccatcagcccaggtgaggtcacagtgagggctgttggggaggaaggggggcagcttgactggggarctggggggaccccgtgctcagagcctgaaaggcagtggccccctcaccccctcatccctcacctggggcagcgtaggtgtgcatgacattgtgctccacc

SEQ ID NO: 37930 - DNA, 201 bp, Homo sapiens
gaggtccgtggggccccaccagggtggcccctggggaggcagggaagacgtgctggaggagggtggggcccctacaggtgggggcaggaggtggcgggggsccggagcagagggacaggcaggcaaaggaggcactggagggctgggccgccccacacaggcaccagccctgctccgagagggctgcgaggccctggccgg

SEQ ID NO: 37931 - DNA, 201 bp, Homo sapiens
cgcctggcccctccctcaccccagtaggggcctaagccatcagcccaggtgaggtcacagtgagggctgttggggaggaaggggggcagcttgactggggrgctggggggaccccgtgctcagagcctgaaaggcagtggccccctcaccccctcatccctcacctggggcagcgtaggtgtgcatgacattgtgctccac

SEQ ID NO: 37932 - DNA, 201 bp, Homo sapiens
gaggccagaggtccgtggggccccaccagggtggcccctggggaggcagggaagacgtgctggaggagggtggggcccctacaggtgggggcaggaggtgscggggggccggagcagagggacaggcaggcaaaggaggcactggagggctgggccgccccacacaggcaccagccctgctccgagagggctgcgaggccc

SEQ ID NO: 37933 - DNA, 201 bp, Homo sapiens
tccctgtccactccccccacgcctggcccctccctcaccccagtaggggcctaagccatcagcccaggtgaggtcacagtgagggctgttggggaggaagsggggcagcttgactggggagctggggggaccccgtgctcagagcctgaaaggcagtggccccctcaccccctcatccctcacctggggcagcgtaggtgt

SEQ ID NO: 37934 - DNA, 201 bp, Homo sapiens
tctccgaagtcccagcgtgtggcagtgacagggagcggggcagcgatgtggaaggctgctagctggccagaggccagaggtccgtggggccccaccagggkggcccctggggaggcagggaagacgtgctggaggagggtggggcccctacaggtgggggcaggaggtggcggggggccggagcagagggacaggcaggca

SEQ ID NO: 37935 - DNA, 201 bp, Homo sapiens
agggctgagccggcccccagggccagcacggccgtcacgtgatagcgcccaggcagcacatagcgatgcgaggcagccggcccagcggcatccacctcggsggagccgtctccgaagtcccagcgtgtggcagtgacagggagcggggcagcgatgtggaaggctgctagctggccagaggccagaggtccgtggggcccc

SEQ ID NO: 37936 - DNA, 201 bp, Homo sapiens
tccccgggcagccagttctggcagctctccaggctgaaggcctcgccctgcggcgctgggcccacctccaccccctgcacagtcgagaagccgatccacaygtctaggctcctgggggcgggtgtgggatggcagggggctcagggcactcctccatcctcccaccctcacagcagcccgctgggagccccatcactgtcc

SEQ ID NO: 37937 - DNA, 201 bp, Homo sapiens
aggacactggagtgtgcgttctggtgtactggacccagctggaccctagcaggaggcaggcaatgctcactgagggcccctggggggatgcgtgtgagaasagacgtatgtgtgggtgtgaggaccgcagctgccacgtaggcctgactcacagactcctgcagcccttagccagggcctgggtcaggaggctgagctggg

SEQ ID NO: 37938 - DNA, 201 bp, Homo sapiens
gatctcccaacctatggcccctcggggggtgggggcaggcacctggtgacccgggagaccaggaagcgctgcacggcgggactgtccaccattgccagggyggccccggcccaggcctgacactgctcctgcgcctgcagccaggccgccttctccaccaccaggcggtagcagtgcccgttgccagggaagatctccgtg

SEQ ID NO: 37939 - DNA, 201 bp, Homo sapiens
agggggacgaagatgggatggggcaaaggcgacgcggttggggggaggagggaggcagaggaaagggccgcacggggcgggcgggtggcatggggcacggrccgcggcacctgtgatgttgaggatgctgtctccgatggcggtgggcgtcacggtgcccgcggtggtctctgcctgcaggatgagcatcatggcctccag

SEQ ID NO: 37940 - DNA, 201 bp, Homo sapiens
gaaggtcggggtgctgcttcagggtcactgggatttatctctggggcccgggatgagccctctgcaaagctccaggcaggggtacaggtcttggtcccaascacgcatgcagcagatgtgacgtcccctcccaggctgcactcacctcgttcagcacggtgaccagggccaacgagtactcgatgacgtgctggggatcgg

SEQ ID NO: 37941 - DNA, 201 bp, Homo sapiens
cggaaggtcggggtgctgcttcagggtcactgggatttatctctggggcccgggatgagccctctgcaaagctccaggcaggggtacaggtcttggtcccmagcacgcatgcagcagatgtgacgtcccctcccaggctgcactcacctcgttcagcacggtgaccagggccaacgagtactcgatgacgtgctggggatc

SEQ ID NO: 37942 - DNA, 201 bp, Homo sapiens
gtgtggctgctgggagcggaaggtcggggtgctgcttcagggtcactgggatttatctctggggcccgggatgagccctctgcaaagctccaggcaggggwacaggtcttggtcccaagcacgcatgcagcagatgtgacgtcccctcccaggctgcactcacctcgttcagcacggtgaccagggccaacgagtactcga

SEQ ID NO: 37943 - DNA, 201 bp, Homo sapiens
aaagcagacgccggagagggcccggtgggtgtggctgctgggagcggaaggtcggggtgctgcttcagggtcactgggatttatctctggggcccgggatragccctctgcaaagctccaggcaggggtacaggtcttggtcccaagcacgcatgcagcagatgtgacgtcccctcccaggctgcactcacctcgttcagc

SEQ ID NO: 37944 - DNA, 201 bp, Homo sapiens
gcctccaagtgcagctgcactcggggcagcagagcagcaagagccaggcccggggagggcggggggcgcagttcaggggcccagcttccctgtccactccycccacgcctggcccctccctcaccccagtaggggcctaagccatcagcccaggtgaggtcacagtgagggctgttggggaggaaggggggcagcttgact

SEQ ID NO: 37945 - DNA, 201 bp, Homo sapiens
aggtgtagcagcactgagggctgcctggcgaggacggcaccgcctccaagtgcagctgcactcggggcagcagagcagcaagagccaggcccggggagggyggggggcgcagttcaggggcccagcttccctgtccactccccccacgcctggcccctccctcaccccagtaggggcctaagccatcagcccaggtgaggt

SEQ ID NO: 37946 - DNA, 201 bp, Homo sapiens
gggggatgaggatgggaattggggggaggggagggggacgaagatgggatggggcaaaggcgacgcggttggggggaggagggaggcagaggaaagggccscacggggcgggcgggtggcatggggcacgggccgcggcacctgtgatgttgaggatgctgtctccgatggcggtgggcgtcacggtgcccgcggtggtct

SEQ ID NO: 37947 - DNA, 201 bp, Homo sapiens
ggagcacaggtgtagcagcactgagggctgcctggcgaggacggcaccgcctccaagtgcagctgcactcggggcagcagagcagcaagagccaggcccgsggagggcggggggcgcagttcaggggcccagcttccctgtccactccccccacgcctggcccctccctcaccccagtaggggcctaagccatcagcccag

SEQ ID NO: 37948 - DNA, 201 bp, Homo sapiens
ggaagggggagggggaggagaatgggaattgggggagggggatgaggatgggaattggggggaggggagggggacgaagatgggatggggcaaaggcgacrcggttggggggaggagggaggcagaggaaagggccgcacggggcgggcgggtggcatggggcacgggccgcggcacctgtgatgttgaggatgctgtctc

SEQ ID NO: 37949 - DNA, 201 bp, Homo sapiens
caccgaggacgggcacacgagctccagggcggcaggtgccgcttccacctgcacgtctgtccccagcagggctgagccggcccccagggccagcacggccrtcacgtgatagcgcccaggcagcacatagcgatgcgaggcagccggcccagcggcatccacctcggcggagccgtctccgaagtcccagcgtgtggcagt

SEQ ID NO: 37950 - DNA, 201 bp, Homo sapiens
accagggctcgaggtttctctagggaacccacctcttagaatcatccagaaacaagtcactcttcatctgtccaacaaaggcctgctgagaggtgcacagkgtcttgagtccaagctgcgccaaggcggcaggacccccagcccagcccaggacccccagtagagtcctcacctcagcgtggaggcctgagaacgtgagga

SEQ ID NO: 37951 - DNA, 201 bp, Homo sapiens
aatagggaagggggagggggaggagaatgggaattgggggagggggatgaggatgggaattggggggaggggagggggacgaagatgggatggggcaaagrcgacgcggttggggggaggagggaggcagaggaaagggccgcacggggcgggcgggtggcatggggcacgggccgcggcacctgtgatgttgaggatgct

SEQ ID NO: 37952 - DNA, 201 bp, Homo sapiens
cacagcaagctgtcagcagcgcaggaggccggcaggaggccagcagatgcccacgactcccggggtgcagttacgtgctagacgctgtgtgatgcgggcaytgacccacaacactgagctgtttcttcatgggcaaaacagggtaagcacatgggccctcctgggcgggggctgcattgtggaaagcagacgccggagagg

SEQ ID NO: 37953 - DNA, 201 bp, Homo sapiens
ggttctcgaaggcattagatgccagcacggtcaggaggtactcacctgtggggacaggcccgagtggggcagccgcggcacccccacctgctccccacccrctcggcagaagccccccgcctgaggagcccggggtgaacggctgcacctgcggcccagccttaagggtcccaggctcccaagccacgtgcgggacggagc

SEQ ID NO: 37954 - DNA, 201 bp, Homo sapiens
atctgtccaacaaaggcctgctgagaggtgcacagtgtcttgagtccaagctgcgccaaggcggcaggacccccagcccagcccaggacccccagtagagycctcacctcagcgtggaggcctgagaacgtgaggaaggagctgtccagcacggacgagtccaggcagctgtcgatgtccagcacctgctgcccggcaggt

SEQ ID NO: 37955 - DNA, 201 bp, Homo sapiens
gccagcatcctccgcgtcatgccagcctgagggacggtccccacggcatcacgggagggctccgtgacgtcacagagtcgggggatcccgctgctcccccyacgcaggcctgcactcacccgtgcattcgaagtgcaccttggtggtgagggcgtgcacagcgcccagtgggaagaggcggcaagagccccccagcggcgg

SEQ ID NO: 37956 - DNA, 201 bp, Homo sapiens
tcgaggctctcgtcactctgcaccgaggacgggcacacgagctccagggcggcaggtgccgcttccacctgcacgtctgtccccagcagggctgagccggyccccagggccagcacggccgtcacgtgatagcgcccaggcagcacatagcgatgcgaggcagccggcccagcggcatccacctcggcggagccgtctccg

SEQ ID NO: 37957 - DNA, 201 bp, Homo sapiens
agagtctccgtgatgttcttgcgtatctgggctcggtgctgccgctcgtgcttgggctctgccgccacgtccagggcccgctcgtactggggcaggcaggsggcacagcaagctgtcagcagcgcaggaggccggcaggaggccagcagatgcccacgactcccggggtgcagttacgtgctagacgctgtgtgatgcggg

SEQ ID NO: 37958 - DNA, 201 bp, Homo sapiens
ggccctggggaggaaggggagtgggcagcagacactcacctcgggccggctcctcgcccagggccacgatgctgtaggcggcctccaggcctgaaccaccrcggttctggatgctgaggtcgaggctctcgtcactctgcaccgaggacgggcacacgagctccagggcggcaggtgccgcttccacctgcacgtctgtcc

SEQ ID NO: 37959 - DNA, 201 bp, Homo sapiens
gggcagggtgagcaggtggggccatcctaccatgcactgggccagcgcagcagcgatctgctggatgtcatccacagtgtggaccctcagggacaccagartctccgtgatgttcttgcgtatctgggctcggtgctgccgctcgtgcttgggctctgccgccacgtccagggcccgctcgtactggggcaggcagggggc

SEQ ID NO: 37960 - DNA, 201 bp, Homo sapiens
atggccctggggaggaaggggagtgggcagcagacactcacctcgggccggctcctcgcccagggccacgatgctgtaggcggcctccaggcctgaaccamcgcggttctggatgctgaggtcgaggctctcgtcactctgcaccgaggacgggcacacgagctccagggcggcaggtgccgcttccacctgcacgtctgt

SEQ ID NO: 37961 - DNA, 201 bp, Homo sapiens
gagtcattggcagcagagatgttgttggacgcggtgactgtcacaagataggagcctgggtctcggtagatgaacgtcacctcagggcccctggcacgggygggggcggcttcctcggtgccaaagtcccaggtgtagcggtaggggaacgggggccaggcacatgccaccagccaggcctcgtccccgagctgcacaaac

SEQ ID NO: 37962 - DNA, 201 bp, Homo sapiens
caggctctgccccatctggatggccctggggaggaaggggagtgggcagcagacactcacctcgggccggctcctcgcccagggccacgatgctgtaggcrgcctccaggcctgaaccaccgcggttctggatgctgaggtcgaggctctcgtcactctgcaccgaggacgggcacacgagctccagggcggcaggtgccg

SEQ ID NO: 37963 - DNA, 201 bp, Homo sapiens
cattcaggggcaccaccgtgcggcttgcattgacgacgagcccccgcacgcgccgcttcaccgtcacattgagccaggcctcgctgcggctcacctcattscagccggccaccctaacggtgaagtcacctgtgctgttgtaagcgtgggtgacctccggaccctcgagccacccaccgtcccccagatcccacaggtagc

SEQ ID NO: 37964 - DNA, 201 bp, Homo sapiens
ccggtgggaacgagggtgtcaacggtcagtgtgggcccaagacgggggtaccaggctctgccccatctggatggccctggggaggaaggggagtgggcagmagacactcacctcgggccggctcctcgcccagggccacgatgctgtaggcggcctccaggcctgaaccaccgcggttctggatgctgaggtcgaggctct

SEQ ID NO: 37965 - DNA, 201 bp, Homo sapiens
ggcgtgcagcggtcacagagcacccaggaatagcgcacatcactgccggcctccagcgacgtgctgaagctcacgctcccattcaggggcaccaccgtgcrgcttgcattgacgacgagcccccgcacgcgccgcttcaccgtcacattgagccaggcctcgctgcggctcacctcattccagccggccaccctaacggtg

SEQ ID NO: 37966 - DNA, 201 bp, Homo sapiens
tgactggcacctacttccagctaggagctgtcctagtcctcagggacagtgagtgctcacgaggtcattcccaggatgaacacacgagcccttcacacagyactgcaaaaactgccttgttctgacgcctgcgacgagactcactcccagagggtgcaaccagcacagccagtgagagcaggggaggccctgccaccccgc

SEQ ID NO: 37967 - DNA, 201 bp, Homo sapiens
ggccgccttctccaccaccaggcggtagcagtgcccgttgccagggaagatctccgtgtccgaggggcagagcgggtgcaccgctggagaccggtgggaaygagggtgtcaacggtcagtgtgggcccaagacgggggtaccaggctctgccccatctggatggccctggggaggaaggggagtgggcagcagacactcac

SEQ ID NO: 37968 - DNA, 201 bp, Homo sapiens
cagggctttggcaacggctggagccatggctgcggcaggtgtggctgcaggaaggtgagctggcagggggcgccccaagactctacctggccagggtaatkgcagcacacaccctgcccggaaccccacctgggggcagacacacaggccactgcagtggtgcttaggggccttcagggccaggcaggagtgggcattgga

SEQ ID NO: 37969 - DNA, 201 bp, Homo sapiens
gggccctgtggtcagcctggccccagcccacagtgacagcagggctttggcaacggctggagccatggctgcggcaggtgtggctgcaggaaggtgagctkgcagggggcgccccaagactctacctggccagggtaatggcagcacacaccctgcccggaaccccacctgggggcagacacacaggccactgcagtggtg

SEQ ID NO: 37970 - DNA, 201 bp, Homo sapiens
gtctctagggtccagaaggccctgtcctgacgcctcctctcctcgcaggagtctgactggaaggtgctgaagctggttctgggcaggctgcctgagtccckgcgctataaagtgctcatctttacttccccttgcagtgtggaccagctgtgctctgctctctgctccatggtaccatggccggcctggggttggggtggg

SEQ ID NO: 37971 - DNA, 201 bp, Homo sapiens
gcagaggacactggagtgtgcgttctggtgtactggacccagctggaccctagcaggaggcaggcaatgctcactgagggcccctggggggatgcgtgtgrgaagagacgtatgtgtgggtgtgaggaccgcagctgccacgtaggcctgactcacagactcctgcagcccttagccagggcctgggtcaggaggctgagc

SEQ ID NO: 37972 - DNA, 201 bp, Homo sapiens
ggctactgaagcaggtcagagaccgaggaacgccatggcaggaaggagcccaggctggaggctcagctcctcggccaagctgcccgtctgccctggggggstgaacccagtgccctggcaggcatgcggggcagggtgagcaggtggggccatcctaccatgcactgggccagcgcagcagcgatctgctggatgtcatcc

SEQ ID NO: 37973 - DNA, 201 bp, Homo sapiens
ctctttacaccctgggtcccccgagaggcaccctgcgttcacacaggacagaacggctgaggctactgaagcaggtcagagaccgaggaacgccatggcakgaaggagcccaggctggaggctcagctcctcggccaagctgcccgtctgccctggggggctgaacccagtgccctggcaggcatgcggggcagggtgagc

SEQ ID NO: 37974 - DNA, 201 bp, Homo sapiens
taagagatggtaggacccccagggatgggcgtgcagcggtcacagagcacccaggaatagcgcacatcactgccggcctccagcgacgtgctgaagctcaygctcccattcaggggcaccaccgtgcggcttgcattgacgacgagcccccgcacgcgccgcttcaccgtcacattgagccaggcctcgctgcggctcacc

SEQ ID NO: 37975 - DNA, 201 bp, Homo sapiens
gagggcacagagcagcatcttcttagtccctccccacatctgggcccctctttacaccctgggtcccccgagaggcaccctgcgttcacacaggacagaawggctgaggctactgaagcaggtcagagaccgaggaacgccatggcaggaaggagcccaggctggaggctcagctcctcggccaagctgcccgtctgccct

SEQ ID NO: 37976 - DNA, 201 bp, Homo sapiens
aagatgctgtcctgggcggagcccacctcgttctcagccgtgacgatgatattgaaggtgcccacggagcggaaggtgtaagagatggtaggacccccagrgatgggcgtgcagcggtcacagagcacccaggaatagcgcacatcactgccggcctccagcgacgtgctgaagctcacgctcccattcaggggcaccacc

SEQ ID NO: 37977 - DNA, 201 bp, Homo sapiens
ccctcctccaaggaccaagtgtatacgacaccactgccaccagccagctcggcactgagggtgacgcttgtgttgacggcagctgggttcggggaggcggycaccatcagccaccccacaggctccacgaagtccatggtgcagtcggcccaggcgctgcccagcatgttggtggcccgcagctgcacatggtaggtgccg

SEQ ID NO: 37978 - DNA, 201 bp, Homo sapiens
gcccctcctccaaggaccaagtgtatacgacaccactgccaccagccagctcggcactgagggtgacgcttgtgttgacggcagctgggttcggggaggcrgccaccatcagccaccccacaggctccacgaagtccatggtgcagtcggcccaggcgctgcccagcatgttggtggcccgcagctgcacatggtaggtgc

SEQ ID NO: 37979 - DNA, 201 bp, Homo sapiens
ggtttttgccccgcacgctcaccacgtggtctccgacgcgggggaagctgtgggagaaacggggcccggggagcacctcggggttggccccgccgacctgyaggcggaaggtgacagctgagccggcagccagcaggatctgaaaatggaccagctgcccgggcgccaccaccttgctgctggcccacagcaccaggccca

SEQ ID NO: 37980 - DNA, 201 bp, Homo sapiens
gcgggtcggttcctgaggaattggaagtgtcacgagatgtggccctcgttgggctggcgctcattggcctcccttgtgcctgtgcaggaggagctgattawctcagtggtcatctcgcagctctcccacatccccgaggataaagaccaccaggtccgaaagctggccacccagttgctggtggacctggcagagggctgc

SEQ ID NO: 37981 - DNA, 201 bp, Homo sapiens
ctaaccaccctggggtcctctgacatgcctagtcctgctacttgcccagacctgatgccagcaggcctgggcgctgctctcttgctacctggcctggggcmagggaggatgacaaggcctctggggtgatgagagtgcctggcagacagctgtgcccccagcaccggcccaaggccaagctcgcatccaagcagcagccgg

SEQ ID NO: 37982 - DNA, 201 bp, Homo sapiens
ctgcctgcaagccacgccacgcgtgtgtatgagatgctggtcagccacattcagctccactacaagcacagctacaccctgccaatcgcgagcagcatccrgctgcaggtatggtggctggggttgcgcagccagttcctgggggcccagccaggtatccccgtctcggcaggtgtggttcctggaagctgcagagacggc

SEQ ID NO: 37983 - DNA, 201 bp, Homo sapiens
ctttctcctcccacagggcctcctggcccggcgcctgcaggccccgccgtgcggctggggtccgtgccctactccctgctcttccgcgtcctgctgcagtrcttgaagcaggtgagtggggccgggcagggaccatccgtcccacgttgggccaggaggacagggagctgccacctgcctgctgggcctccctccctgtct

SEQ ID NO: 37984 - DNA, 201 bp, Homo sapiens
gtggatggatgttggcttgtcctcggaattccttctggtgctggtgaacttggtcaaattcaatagctgttacctcgacgagtacatcgcaaggatggttyagtaagaaaagaattgagatcctgttctgataatggtcctaagttcagctccgcagtgaataaagttgaaaccaccaaaaaaatagaggttgggctgggc

SEQ ID NO: 37985 - DNA, 201 bp, Homo sapiens
ggtgtcaacggtcagtgtgggcccaagacgggggtaccaggctctgccccatctggatggccctggggaggaaggggagtgggcagcagacactcacctcrggccggctcctcgcccagggccacgatgctgtaggcggcctccaggcctgaaccaccgcggttctggatgctgaggtcgaggctctcgtcactctgcacc

SEQ ID NO: 37986 - DNA, 201 bp, Homo sapiens
ctgctgagtggctacagtgatgcaggcgatgctctggggcaccgggtgtccatcctcccaaggtgctgtctgcaggggagggtgccagccaaaagccaccrggtagaaagaaaacaaggaccttgctaagatggggggtcatctgggcagatggggcccctgcctacctttgggggggcactggagtcatagcagtgctca

SEQ ID NO: 37987 - DNA, 201 bp, Homo sapiens
ctctggtggacgggggggccctgtggtcagcctggccccagcccacagtgacagcagggctttggcaacggctggagccatggctgcggcaggtgtggctkcaggaaggtgagctggcagggggcgccccaagactctacctggccagggtaatggcagcacacaccctgcccggaaccccacctgggggcagacacacag

SEQ ID NO: 37988 - DNA, 201 bp, Homo sapiens
ctggggtgtgcgcccagccccgcgcccaccggcccagccctcaccttgaccaaaagcaggaagagcagcgaggccgccaggccacgggctgcggagctcasctgcgccacctggtcgaagctagtgaagcggcgcgggcggccgcgcacgaaacgggtccactggcggtcagcggcacccagctgggcgaggcgtaccagt

SEQ ID NO: 37989 - DNA, 201 bp, Homo sapiens
tctccgtggcccccagctcctctctggccaggcccccagcagcccatgaaacagaaagcaaatttcaccagagacacccatggaagccctacgagaaacgscttccccccaagaacaaggccagggggccgcgtgtgccccacccgctgcacgcaccgtccagcagcgtatagttgagctgcagatgcagcccggccgcag

SEQ ID NO: 37990 - DNA, 201 bp, Homo sapiens
ccaggagctctggcagagctcggcataatgtcttgccaaagacggaccactggcgcacgaagcgtagctgctgggcagcctgcggacgagaaatctgtctkcttgcagccctggggtgtgcgcccagccccgcgcccaccggcccagccctcaccttgaccaaaagcaggaagagcagcgaggccgccaggccacgggctg

SEQ ID NO: 37991 - DNA, 201 bp, Homo sapiens
caaaaactgccttgttctgacgcctgcgacgagactcactcccagagggtgcaaccagcacagccagtgagagcaggggaggccctgccaccccgctgcgsccctcacctgagccccggccccagcctgtcttgacgaggatctcgtacttgaagcggccccgctgcccacagaaggggatggcgcggccccggctggcat

SEQ ID NO: 37992 - DNA, 201 bp, Homo sapiens
cgaggcggggaagcagaggaaggaagggaggatgcgaacaggaaggccaaggagctgctgggactgggcgtcaggcctcagggccccacggcctggggggrgcttcagggggaccccccgagcctgagatgcttgaccctcacttcctgcaccgtcgccacccccctcagccttctgaggtctctctcaggccactgccac

SEQ ID NO: 37993 - DNA, 201 bp, Homo sapiens
cccaccgtagtgctgctgcaggatggcgctggtctgcttgatgtatttcaccttgctctgaaagacaggggtgggttcagccttggaggcaagggcacagsccaacctgggaggatgcagcccccaggagacccacaggtggccagagctacctgcacctgctgaggacgtgtgcaagctcagcccccgccccccaggagg

SEQ ID NO: 37994 - DNA, 201 bp, Homo sapiens
cgtcacagagtcgggggatcccgctgctccccccacgcaggcctgcactcacccgtgcattcgaagtgcaccttggtggtgagggcgtgcacagcgcccartgggaagaggcggcaagagccccccagcggcgggcggttgggggacaggcggatggaggcgcagccctcctcctcgccagagcggcccagcaccgtgagc

SEQ ID NO: 37995 - DNA, 201 bp, Homo sapiens
gtcgggggatcccgctgctccccccacgcaggcctgcactcacccgtgcattcgaagtgcaccttggtggtgagggcgtgcacagcgcccagtgggaagasgcggcaagagccccccagcggcgggcggttgggggacaggcggatggaggcgcagccctcctcctcgccagagcggcccagcaccgtgagcgtgaaggtg

SEQ ID NO: 37996 - DNA, 201 bp, Homo sapiens
gcagcgccagccgcggcagcaccagccgaggccggctcacgtccacgccgggcagggccacacgcgctgggcgccccggccgctggcagctggcggtgcgrtacacctcccagcggtactcagtctggtaggtgacgcagtcgcgcaggtcaacgtgggcctccaagtagttgcgctgtgatcgccgcatcagcacctgca

SEQ ID NO: 37997 - DNA, 201 bp, Homo sapiens
gaagcgtgcacagccgcgtgcttgcttcttctgagttatctggcgtgctgctgtgcagtcgtccgtggcgtctgcttagcaaagtgccctcgttctttcaycattctggcttctgagtcttctctctttctccctggtcagtctagctaaggctgctcaagtgtgttgacccttcccgagcagcctttggtggacgccttt

SEQ ID NO: 37998 - DNA, 201 bp, Homo sapiens
cgcgggagcgcatgaggatgcgcatgagggcagaggtcaggttgtaggcctgggacgccaccatccgagatggtgactcggctcccagctctgagggctgyggtgcccgcacgtccgagctggccaggtggatgaggtctcctgcagacatgcgtgaggtcagtgcagagacagggaggtagagggagggtgggggcaggc

SEQ ID NO: 37999 - DNA, 201 bp, Homo sapiens
acaaacacaaagcagtagtgccccacaggcagcgccagccgcggcagcaccagccgaggccggctcacgtccacgccgggcagggccacacgcgctgggcrccccggccgctggcagctggcggtgcgatacacctcccagcggtactcagtctggtaggtgacgcagtcgcgcaggtcaacgtgggcctccaagtagttg

SEQ ID NO: 38000 - DNA, 201 bp, Homo sapiens
gcccgccagcgtcaggggctcctcgttgagcacgcgggagcgcatgaggatgcgcatgagggcagaggtcaggttgtaggcctgggacgccaccatccgaratggtgactcggctcccagctctgagggctgtggtgcccgcacgtccgagctggccaggtggatgaggtctcctgcagacatgcgtgaggtcagtgcaga

SEQ ID NO: 38001 - DNA, 201 bp, Homo sapiens
acacgacaaacacaaagcagtagtgccccacaggcagcgccagccgcggcagcaccagccgaggccggctcacgtccacgccgggcagggccacacgcgcygggcgccccggccgctggcagctggcggtgcgatacacctcccagcggtactcagtctggtaggtgacgcagtcgcgcaggtcaacgtgggcctccaagt

SEQ ID NO: 38002 - DNA, 201 bp, Homo sapiens
attggcctggatgctctgtgtcagtggcgtgtccccaaatgacacgacaaacacaaagcagtagtgccccacaggcagcgccagccgcggcagcaccagcygaggccggctcacgtccacgccgggcagggccacacgcgctgggcgccccggccgctggcagctggcggtgcgatacacctcccagcggtactcagtctg

SEQ ID NO: 38003 - DNA, 201 bp, Homo sapiens
ccaggttggggtcgtaggactcgctcccatccagcaccaggtcccgtgtgtctgaccacacgcggtatgagccaccctcaatgatgggcaccaggcgctcrggggccaccgtcacattggcctggatgctctgtgtcagtggcgtgtccccaaatgacacgacaaacacaaagcagtagtgccccacaggcagcgccagcc

SEQ ID NO: 38004 - DNA, 201 bp, Homo sapiens
agtggaaactgagcggcgtctggtcgccgtcctccaggttggggtcgtaggactcgctcccatccagcaccaggtcccgtgtgtctgaccacacgcggtakgagccaccctcaatgatgggcaccaggcgctcgggggccaccgtcacattggcctggatgctctgtgtcagtggcgtgtccccaaatgacacgacaaaca

SEQ ID NO: 38005 - DNA, 201 bp, Homo sapiens
gggtgtggacgggtgaggggcatggaggacggccctgccacgcactgacctgtgtcgaagccacacaggcccagtggaaactgagcggcgtctggtcgccrtcctccaggttggggtcgtaggactcgctcccatccagcaccaggtcccgtgtgtctgaccacacgcggtatgagccaccctcaatgatgggcaccaggc

SEQ ID NO: 38006 - DNA, 201 bp, Homo sapiens
ccccatgctgggacggggcccaccaggcactgaggacgggccagccctggtggcaagctgggtgttctctgggctcatgggtgtggacgggtgaggggcakggaggacggccctgccacgcactgacctgtgtcgaagccacacaggcccagtggaaactgagcggcgtctggtcgccgtcctccaggttggggtcgtagg

SEQ ID NO: 38007 - DNA, 201 bp, Homo sapiens
ccctctgccctgtcagccccacttctgcctgcaggccccgtcccctcggccatgggacccatccccagcccgcccacaccccgctcaacactcacccctcrcttggagccgctgctgcaattgaggcagcggccctccaagtacacgtaggagctgcggctcacttcgtacacggcctgtgccttgcaggacacacactcc

SEQ ID NO: 38008 - DNA, 201 bp, Homo sapiens
ccgtcccgcagcacgccccgccgcagcaccagtcgcatgcctgcactgcccgtggatgtggtggtctcatccagcaccagcgtcttgttgctgaacgtacrtgcagcccaccgctgcaggcagaaggggtggtgagggggcgcaaccctctgccctgtcagccccacttctgcctgcaggccccgtcccctcggccatggg

SEQ ID NO: 38009 - DNA, 201 bp, Homo sapiens
aagtactggcacagggacgtgtacaggcccacggacacctgcagcgccgaccagcggaagtggctggagaggttcagatggtaactccccgctgggtctcygctcctgggcagggaaggggtagcggacgtgagcccaggctccgccaggttggatgtcgcagtctcagagcccatacccggtccagtcccctcgctgcct

SEQ ID NO: 38010 - DNA, 201 bp, Homo sapiens
gcacagtgtcttgagtccaagctgcgccaaggcggcaggacccccagcccagcccaggacccccagtagagtcctcacctcagcgtggaggcctgagaacrtgaggaaggagctgtccagcacggacgagtccaggcagctgtcgatgtccagcacctgctgcccggcaggtgtggggctcgggctcccagccacctgcag

SEQ ID NO: 38011 - DNA, 201 bp, Homo sapiens
ctcccccgagagccggacactcacaggctgctgagcaggtccgtttccatgtgggtgtcttgggtaggggctgggctgctgaccccctcggcaaggacctrctggatcaggtcttcatctagaggtacaggaggcatagggtgggcccagctgcaagggtgagcttcagagccccctcctctcaccccagctcacctgatg

SEQ ID NO: 38012 - DNA, 201 bp, Homo sapiens
gctgtgcagctcctgcttgatggcgctttgcagacggtaggcgtgcccatggcatgaggcatccccatagctggccagcagggtcaccagcagaaaaagcrtgtacaccaggaggctctggtggacgggggggccctgtggtcagcctggccccagcccacagtgacagcagggctttggcaacggctggagccatggctg

SEQ ID NO: 38013 - DNA, 201 bp, Homo sapiens
acaaaggtatctacacatgtccacatgtcccctagggtctggctggactaaaggcaaaactaaagcccagaagacagaccagtgcaccggatgcccgtacygcgtgatggccaggaaggcccggctgtgcagctcctgcttgatggcgctttgcagacggtaggcgtgcccatggcatgaggcatccccatagctggccag

SEQ ID NO: 38014 - DNA, 201 bp, Homo sapiens
gagcagggctgatgccagagctccgctaaaggctgctctctcaacaagaggaacgatttaagtcttggggcacgccctgccagctcaccttcctgcagccrcacctgccgcagccgtgggggccccagctctgggctggactggttcccgtggacgtagggcagcagcacgtgggccatccatggccagagctcctcagac

SEQ ID NO: 38015 - DNA, 201 bp, Homo sapiens
gacgctgagggcggccagggcgcggccggccgccgggaactcgaggcgcagcgtgacggcggcgtgcagccccacggccgggctgtagcgcgtgagctccrggaacacagcgcggctcctgcgcagagggtgcgggtcagtaggagcgggtggcagggcgggagctgcggggaccgcgcagtgcaggcgtggctgaggggc

SEQ ID NO: 38016 - DNA, 201 bp, Homo sapiens
tgcggggaaggcgacaccagtgagggcgtacagctgagctgagctgagctaagacgccctccccggccgcgcagtcacctaccaggatggccagctgggcktaggctaccccgagcaccaccaggcccaaggtgacccccaggagctctggcagagctcggcataatgtcttgccaaagacggaccactggcgcacgaagc

SEQ ID NO: 38017 - DNA, 201 bp, Homo sapiens
gctaccccgagcaccaccaggcccaaggtgacccccaggagctctggcagagctcggcataatgtcttgccaaagacggaccactggcgcacgaagcgtasctgctgggcagcctgcggacgagaaatctgtctgcttgcagccctggggtgtgcgcccagccccgcgcccaccggcccagccctcaccttgaccaaaagc

SEQ ID NO: 38018 - DNA, 201 bp, Homo sapiens
ctcgcccgccagcgtcaggggctcctcgttgagcacgcgggagcgcatgaggatgcgcatgagggcagaggtcaggttgtaggcctgggacgccaccatcsgagatggtgactcggctcccagctctgagggctgtggtgcccgcacgtccgagctggccaggtggatgaggtctcctgcagacatgcgtgaggtcagtgc

SEQ ID NO: 38019 - DNA, 201 bp, Homo sapiens
cttcccaagggagctggggaggggaccctgggtcctggttggccacacagcctctttaaagtgctgaagcccacagacagacagatgcccctgcctgctcyctggggaacctacgtgcagccattctgcctggccctcggccttgacagcggcagaaagtaatactgagcggtgtccactccgactccacggcccaccccc

SEQ ID NO: 38020 - DNA, 201 bp, Homo sapiens
gccctgggccacgatctcctcgcccgccagcgtcaggggctcctcgttgagcacgcgggagcgcatgaggatgcgcatgagggcagaggtcaggttgtagkcctgggacgccaccatccgagatggtgactcggctcccagctctgagggctgtggtgcccgcacgtccgagctggccaggtggatgaggtctcctgcaga

SEQ ID NO: 38021 - DNA, 201 bp, Homo sapiens
gtggaggagaggaggccacacaggtgaggctgaggggcaggaagggctgggcaggaagaggctgccccgacccctacggcacccacctgtaggcagagtcrccaacagccccgtaccacacggcgttggcgcccaggaagaggcagatgaggagaacgcagcaggtggccctctggatgcgagtgaaacggctacgaggcg

SEQ ID NO: 38022 - DNA, 201 bp, Homo sapiens
caggctccgcgggtccgagcgcttgccctgggccacgatctcctcgcccgccagcgtcaggggctcctcgttgagcacgcgggagcgcatgaggatgcgcrtgagggcagaggtcaggttgtaggcctgggacgccaccatccgagatggtgactcggctcccagctctgagggctgtggtgcccgcacgtccgagctggc

SEQ ID NO: 38023 - DNA, 201 bp, Homo sapiens
caccacacccggcccggccactgggacgtttctaagggactaactcagcctcttcacttcctatagatgtactgagattttcttctggagtgcatttcggragcgtgcacagccgcgtgcttgcttcttctgagttatctggcgtgctgctgtgcagtcgtccgtggcgtctgcttagcaaagtgccctcgttctttcacc

SEQ ID NO: 38024 - DNA, 201 bp, Homo sapiens
cagcaggctccgcgggtccgagcgcttgccctgggccacgatctcctcgcccgccagcgtcaggggctcctcgttgagcacgcgggagcgcatgaggatgsgcatgagggcagaggtcaggttgtaggcctgggacgccaccatccgagatggtgactcggctcccagctctgagggctgtggtgcccgcacgtccgagct

SEQ ID NO: 38025 - DNA, 201 bp, Homo sapiens
tagcacagcaggctccgcgggtccgagcgcttgccctgggccacgatctcctcgcccgccagcgtcaggggctcctcgttgagcacgcgggagcgcatgasgatgcgcatgagggcagaggtcaggttgtaggcctgggacgccaccatccgagatggtgactcggctcccagctctgagggctgtggtgcccgcacgtcc

SEQ ID NO: 38026 - DNA, 201 bp, Homo sapiens
cctggggcgccgccatagcacagcaggctccgcgggtccgagcgcttgccctgggccacgatctcctcgcccgccagcgtcaggggctcctcgttgagcaygcgggagcgcatgaggatgcgcatgagggcagaggtcaggttgtaggcctgggacgccaccatccgagatggtgactcggctcccagctctgagggctgt

SEQ ID NO: 38027 - DNA, 201 bp, Homo sapiens
aagtggccgaggggcgggcggcacccaccgtctggttggtggcctcctccttgcggccggccttccacacggtcaggctgaaggtgtactccacgccagcygccagccgctcccgtggaatggtgaccgtgctgctcccgcggggcccaaagttcagcgcacacccgccagcctccctctgcaggccgagaacaaggggcg

SEQ ID NO: 38028 - DNA, 201 bp, Homo sapiens
cagccaggccctggggcgccgccatagcacagcaggctccgcgggtccgagcgcttgccctgggccacgatctcctcgcccgccagcgtcaggggctcctygttgagcacgcgggagcgcatgaggatgcgcatgagggcagaggtcaggttgtaggcctgggacgccaccatccgagatggtgactcggctcccagctct

SEQ ID NO: 38029 - DNA, 201 bp, Homo sapiens
ggctgtccaaggcaagtggccgaggggcgggcggcacccaccgtctggttggtggcctcctccttgcggccggccttccacacggtcaggctgaaggtgtmctccacgccagccgccagccgctcccgtggaatggtgaccgtgctgctcccgcggggcccaaagttcagcgcacacccgccagcctccctctgcaggccg

SEQ ID NO: 38030 - DNA, 201 bp, Homo sapiens
gagcccacttgactggacccccacagcctcctcactaagcattttctgtggctctgcatgacccagggcctccacctggggaccacgtgatgcagcccacygaccacacaaggcacctcttcacatgagagcggaggaggaggggagagaggagaggggagtggagaaaaggggggagaggagaggggaggggagagaagg

SEQ ID NO: 38031 - DNA, 201 bp, Homo sapiens
ggatggagaagtggcagccaggccctggggcgccgccatagcacagcaggctccgcgggtccgagcgcttgccctgggccacgatctcctcgcccgccagygtcaggggctcctcgttgagcacgcgggagcgcatgaggatgcgcatgagggcagaggtcaggttgtaggcctgggacgccaccatccgagatggtgact

SEQ ID NO: 38032 - DNA, 201 bp, Homo sapiens
tggcttgaagactgtacgtggaactgtggcaggtttggaaggaagcaaagctgaagcaggctgtcgtgttacatagaatttgcatcagaaacagagagggragagcgtgcggcctccaccagcactaaaacacggaaaacagtagatgaccagggaggctgggctgtccaaggcaagtggccgaggggcgggcggcaccca

SEQ ID NO: 38033 - DNA, 201 bp, Homo sapiens
tcctcacctggctcccacccccagccctgcagctggagagcccacttgactggacccccacagcctcctcactaagcattttctgtggctctgcatgaccsagggcctccacctggggaccacgtgatgcagcccaccgaccacacaaggcacctcttcacatgagagcggaggaggaggggagagaggagaggggagtgg

SEQ ID NO: 38034 - DNA, 201 bp, Homo sapiens
aagcctcggggatggagaagtggcagccaggccctggggcgccgccatagcacagcaggctccgcgggtccgagcgcttgccctgggccacgatctcctcrcccgccagcgtcaggggctcctcgttgagcacgcgggagcgcatgaggatgcgcatgagggcagaggtcaggttgtaggcctgggacgccaccatccgag

SEQ ID NO: 38035 - DNA, 201 bp, Homo sapiens
tgtgtagcttttgccactagagcatatgtggcttgaagactgtacgtggaactgtggcaggtttggaaggaagcaaagctgaagcaggctgtcgtgttacrtagaatttgcatcagaaacagagaggggagagcgtgcggcctccaccagcactaaaacacggaaaacagtagatgaccagggaggctgggctgtccaagg

SEQ ID NO: 38036 - DNA, 201 bp, Homo sapiens
ccctcctctctacacgggtcctcacctggctcccacccccagccctgcagctggagagcccacttgactggacccccacagcctcctcactaagcattttytgtggctctgcatgacccagggcctccacctggggaccacgtgatgcagcccaccgaccacacaaggcacctcttcacatgagagcggaggaggagggga

SEQ ID NO: 38037 - DNA, 201 bp, Homo sapiens
ccactctggggcaccagcaggccccgcctgacagcagcaggagcagccaccacgggctcagggtcaccaagcctcctggccggtccagagaggggagcgtragggtgagaaccggcccaccacatccagcaacagggacatgggctggggacagtggctacctctggggtgggaaggggctcttcctcactgttggtattg

SEQ ID NO: 38038 - DNA, 201 bp, Homo sapiens
gccccactccttgcacacgccctcctctctacacgggtcctcacctggctcccacccccagccctgcagctggagagcccacttgactggacccccacagyctcctcactaagcattttctgtggctctgcatgacccagggcctccacctggggaccacgtgatgcagcccaccgaccacacaaggcacctcttcacatg

SEQ ID NO: 38039 - DNA, 201 bp, Homo sapiens
gcccactctggggcaccagcaggccccgcctgacagcagcaggagcagccaccacgggctcagggtcaccaagcctcctggccggtccagagaggggagcrtgagggtgagaaccggcccaccacatccagcaacagggacatgggctggggacagtggctacctctggggtgggaaggggctcttcctcactgttggtat

SEQ ID NO: 38040 - DNA, 201 bp, Homo sapiens
cctggccccactccttgcacacgccctcctctctacacgggtcctcacctggctcccacccccagccctgcagctggagagcccacttgactggacccccmcagcctcctcactaagcattttctgtggctctgcatgacccagggcctccacctggggaccacgtgatgcagcccaccgaccacacaaggcacctcttca

SEQ ID NO: 38041 - DNA, 201 bp, Homo sapiens
ccagggcctgggtcaggaggctgagctgggatggaacctgctcccacaccctcccctcagacgacccctctgggaagacccccaatcaggccagctgaggraagcagggactggggaacagacgcccactctggggcaccagcaggccccgcctgacagcagcaggagcagccaccacgggctcagggtcaccaagcctcc

SEQ ID NO: 38042 - DNA, 201 bp, Homo sapiens
gagctgcggggaaggcgacaccagtgagggcgtacagctgagctgagctgagctaagacgccctccccggccgcgcagtcacctaccaggatggccagctrggcgtaggctaccccgagcaccaccaggcccaaggtgacccccaggagctctggcagagctcggcataatgtcttgccaaagacggaccactggcgcacg

SEQ ID NO: 38043 - DNA, 201 bp, Homo sapiens
gggtgcgaggcatcggagccagcgctgggtgggggcacatccggggataccttggagcccctggaggagcgagagggcagcggctccatcccttcaaagcrgactttgtggcggaactgggggcggcacaggggctcagtcagtccggctgcaccctgggcagagcccagggcgtgtccctctcccccccactgggccgta

SEQ ID NO: 38044 - DNA, 201 bp, Homo sapiens
gcagtggtcagcgggcggcagctcagacctgctcaggacagggatgagaagccacctcctcagcagacaggacagagcccggtgccatctgacagaatgtyctagaatgctggatatatgggacatctgcaccgtccgtgatggcagcccctcgcgacgtgtgccactgaacacttgacagcagactggtgcagctaagga

SEQ ID NO: 38045 - DNA, 201 bp, Homo sapiens
gtgcctggcagacagctgtgcccccagcaccggcccaaggccaagctcgcatccaagcagcagccgggctgccataacgccaccacacctaccaagcgcascaggtgttgggggaggccagctctgggcgcaggcccctcagccctagtgaaaatagtgacatacaaaaatatacacattttaacaccatataaattactg

SEQ ID NO: 38046 - DNA, 201 bp, Homo sapiens
gcggccatgcccacagaagtggtacacagaagcaggcacagccagctccgagggccttgaggctgcctgggccatacagcacactcgcgcgtgcgcgcgcrcacacacacacacacacagtcaccttcctccaccctgggagccagcccccaggaggagtcttttcctctaaccaccctggggtcctctgacatgcctagt

SEQ ID NO: 38047 - DNA, 201 bp, Homo sapiens
ctgcaccacgtcactgaggttggccagggccccgctgaaagcctcggggatggagaagtggcagccaggccctggggcgccgccatagcacagcaggctcygcgggtccgagcgcttgccctgggccacgatctcctcgcccgccagcgtcaggggctcctcgttgagcacgcgggagcgcatgaggatgcgcatgagggc

SEQ ID NO: 38048 - DNA, 201 bp, Homo sapiens
acttcaggaggctgaggcaggaggatcacttgagctcaggagttggagacagtgagaccctgtctttacaaaaaattaaaaaatgacctagcctcaacttkgtcaggcgtggtggctcacgcctgtaatctcagcattttgggaggctgagatgggtggatcacgaggtcaggagttcaagaccagcctggctaagatggt

SEQ ID NO: 38049 - DNA, 201 bp, Homo sapiens
aggagcaggctgagcccgtgggccagggaggcacaccaggccggcagcaggcgcttccgcagaccctccaccagtcctggggaagcagagacagacctgtkagaggcagctcacagggaggggctaggggcatcccggggctacgcaagcacacctgtcctggacagcctcgctgcctggggctgttcccagttcaggcct

SEQ ID NO: 38050 - DNA, 201 bp, Homo sapiens
cctcccaggatactcatccggtttgccaccttccaacttggacggcggaagggcatacacagggcagaggacactggagtgtgcgttctggtgtactggasccagctggaccctagcaggaggcaggcaatgctcactgagggcccctggggggatgcgtgtgagaagagacgtatgtgtgggtgtgaggaccgcagctgc

SEQ ID NO: 38051 - DNA, 201 bp, Homo sapiens
ggtaaatggctcggaggtctcccagctcagcccctcctccaaggaccaagtgtatacgacaccactgccaccagccagctcggcactgagggtgacgcttktgttgacggcagctgggttcggggaggcggccaccatcagccaccccacaggctccacgaagtccatggtgcagtcggcccaggcgctgcccagcatgtt

SEQ ID NO: 38052 - DNA, 201 bp, Homo sapiens
tgaggccagccgctcgatggggatctgggcgccggcctgtgtctggaatgccatcgaggccaccttggtggagacggtgtagttgctgatatagccaaagrgaaagggattggagtccaccagaaagatgagctgcaccacgtcactgaggttggccagggccccgctgaaagcctcggggatggagaagtggcagccagg

SEQ ID NO: 38053 - DNA, 201 bp, Homo sapiens
cgagaaacgccttccccccaagaacaaggccagggggccgcgtgtgccccacccgctgcacgcaccgtccagcagcgtatagttgagctgcagatgcagcmcggccgcagggttgctgctgtccagggtgaccacagcaccgacggaggcctggggctggaccacaacggagttggcggagttggcggagctgcggtggcc

SEQ ID NO: 38054 - DNA, 201 bp, Homo sapiens
gatggccctcctgagcccaccctctgccacgggcctgaaaggccataggagcctctgcaccagagctggcacctgcttctccgtggcccccagctcctctytggccaggcccccagcagcccatgaaacagaaagcaaatttcaccagagacacccatggaagccctacgagaaacgccttccccccaagaacaaggccag

SEQ ID NO: 38055 - DNA, 201 bp, Homo sapiens
gtggcatggggcacgggccgcggcacctgtgatgttgaggatgctgtctccgatggcggtgggcgtcacggtgcccgcggtggtctctgcctgcaggatgmgcatcatggcctccagcttgtgcagcgtctgcttcaggcacgagcggcatacgagctccctgctgggcccctgtgtggagccagcagtgtccagccccgc

SEQ ID NO: 38056 - DNA, 201 bp, Homo sapiens
acgatggccctcctgagcccaccctctgccacgggcctgaaaggccataggagcctctgcaccagagctggcacctgcttctccgtggcccccagctcctytctggccaggcccccagcagcccatgaaacagaaagcaaatttcaccagagacacccatggaagccctacgagaaacgccttccccccaagaacaaggcc

SEQ ID NO: 38057 - DNA, 201 bp, Homo sapiens
tgaagaaggtgtagggccggtggtcagcaccctggagtgactctgggcggatcctcctgctagccgagcagttgtgctcattgggccggggctccgagtgyaggtagactgccaggtagggctcaggttcctcagacaggtagtggcctggggcagaacgcgcaggtcacacgcctgccgggaagctcaaccacccggggg

SEQ ID NO: 38058 - DNA, 201 bp, Homo sapiens
accacgttctggaaggtcagggactgcttgtcgttgatggtccaccggaagaccatgtccgagccggcctccaccacggggctgtacctctgcggggggamtggtgtcagcctgggctctgtggaggactctgcccttagcctgtcgcctcctggacacacctcccgtcgggctggagagtcccacgcggggcacagagga

SEQ ID NO: 38059 - DNA, 201 bp, Homo sapiens
cacacctcccgtcgggctggagagtcccacgcggggcacagaggagaggaggtgcccggggctctgcatgccatgggagccaagcccgggctgggacactsactgtccggctctccagccagccatgtagtactactaatgcctcaacctctctgtgcctcagtttccccatctgtaaagcaaacctagtaccagctacaa

SEQ ID NO: 38060 - DNA, 201 bp, Homo sapiens
tggccctggggaggaaggggagtgggcagcagacactcacctcgggccggctcctcgcccagggccacgatgctgtaggcggcctccaggcctgaaccacmgcggttctggatgctgaggtcgaggctctcgtcactctgcaccgaggacgggcacacgagctccagggcggcaggtgccgcttccacctgcacgtctgtc

SEQ ID NO: 38061 - DNA, 201 bp, Homo sapiens
tcccggcagagcctgctgggcacccccaccctctgcggggcagggcccggcccgggagtgatgccaccctgcctctcccctctccccacagagcaacagcragctcgccatcctgtccaatgagcatggctcctacaggtacacggagttcctgacgggcctgggccggctcatcgagctgaaggactgccagccggacaa

SEQ ID NO: 38062 - DNA, 201 bp, Homo sapiens
agcccctggagtaatcaggaggtgccccagtgcaaggcacagagggcctcagcactggccccacaaacccatccggccctgctcaccctcagccgtcttcyacatcgccaccctgatgcccaccaaggacgtggacaagcaccgctgcgacaagaagcgccacctgggcaacgactttgtgtccattgtctacaatgactc

SEQ ID NO: 38063 - DNA, 201 bp, Homo sapiens
cgcaaatgtgagtgggggtgggtccaggcgtgagctggtgggacaggcccaggtgccacctgatagtgagctcaccccctgcctacgtccccagatggccycacaggtgcatcatagccgctccaaccccaccgatatctacccctccaagtggattgcccggctccgccacatcaagcggctccgccagcgggtagggaa

SEQ ID NO: 38064 - DNA, 201 bp, Homo sapiens
caggaccaaaacctggctggttgggaacaagcttgtcactgtgacgacaagcgtgggaaccgggacccggtcgttactaggcctggactcgggggagctgyagtccggcccggagtcgaggtgactgcaccttcctttcctccgcgcctgccagcctcgacaccggctgtcccgagcccaggcccacgtggcaccctcgta

SEQ ID NO: 38065 - DNA, 201 bp, Homo sapiens
gtcaggctgcgtggggatgcaggcggcgggttcaacgcgcagcacctccaggacgaagaccagcacgtgcaggctccgggccaggtggccggcggggctgsccgcacccacggtcactgtgcagttctgtgcccgcaggtacacatgctccactgttgcctccgggcccgacagcacggtgccgtcccccatgtcgaaggt

SEQ ID NO: 38066 - DNA, 201 bp, Homo sapiens
caggggcccctccgtggcctggccagccccccaaggaagctgtgtctctggcagttgcgctctaaggcatcaggcctaggggtcgctccagaatgcctgtyttccccgacgccaatcccaggcaggggccccggggtctgcgcctgctgtccctacactctcccacactctcctgtcattcagggatgcaggtgggaaagg

SEQ ID NO: 38067 - DNA, 201 bp, Homo sapiens
cagaaatgggagccaggggcccctccgtggcctggccagccccccaaggaagctgtgtctctggcagttgcgctctaaggcatcaggcctaggggtcgctscagaatgcctgtcttccccgacgccaatcccaggcaggggccccggggtctgcgcctgctgtccctacactctcccacactctcctgtcattcagggatg

SEQ ID NO: 38068 - DNA, 201 bp, Homo sapiens
accagaaatgggagccaggggcccctccgtggcctggccagccccccaaggaagctgtgtctctggcagttgcgctctaaggcatcaggcctaggggtcgstccagaatgcctgtcttccccgacgccaatcccaggcaggggccccggggtctgcgcctgctgtccctacactctcccacactctcctgtcattcaggga

SEQ ID NO: 38069 - DNA, 201 bp, Homo sapiens
cctgcccggaaccccacctgggggcagacacacaggccactgcagtggtgcttaggggccttcagggccaggcaggagtgggcattggagctgggccctgkcagggactggggcagcaagtggggggcgtggggtaggagggagaccgggcaaaggctgcagagcattgaacccctaagggccttctgaggtgaggaaagg

SEQ ID NO: 38070 - DNA, 201 bp, Homo sapiens
cagatgtgcttgtcaaagaagccacgctgcagctcagccaccagcaggcgccggaagcgcaaaagggctgcgtcgcctagaaggcagggagggccgcactkcaggaggccacggggcaggaccaccctgcccaacctcccacggagtgggaacatggaacgaggccttactcgcggccagcacctccttctccaccaggcc

SEQ ID NO: 38071 - DNA, 201 bp, Homo sapiens
taaacccatcgcccacagcctgaccagctgcccttacagcagtgcacagtctctcagggtgcaatgagccccccttcaaccctgcaaactatgattgggtytcaaccatccaacaagcatctctacaatctagagacgccagtgtgtctgtcccatgcaggtttatggcctaaaattaacttctggacaaggaaacatatg

SEQ ID NO: 38072 - DNA, 201 bp, Homo sapiens
actgtgttggccaggctggtcttggaactcctgacctcaagtgatctgcccgcctcggcctcccaaagtgctgggattacaggtgtgagccaccgcgcccrgccatcgttccattttaattaacttaaatacgagcagccacatgtggcctctggttcctgccacggactcgggagcaacccctcctggtcgcggcttatg

SEQ ID NO: 38073 - DNA, 201 bp, Homo sapiens
cctctcccgcccgcttgctgctgataaacccatcgcccacagcctgaccagctgcccttacagcagtgcacagtctctcagggtgcaatgagccccccttyaaccctgcaaactatgattgggtctcaaccatccaacaagcatctctacaatctagagacgccagtgtgtctgtcccatgcaggtttatggcctaaaatt

SEQ ID NO: 38074 - DNA, 201 bp, Homo sapiens
aagaggcaggtacccgcaagatggagacagccctgtcccccatgtacccagcatggtggcaccgcgggcagcccgcagtttcccatcaggggttcagactycacctcaaaagccactcgctttagccaggcgagaacacagcagagggcgtgagagactcacgggggctcgtgtgaggtcagggagcagagttttaaattc

SEQ ID NO: 38075 - DNA, 201 bp, Homo sapiens
gcccccagctcatgtccacctctgcatctgcagagctgacaggaacggccccaccggccggcgccacctgctcaccagggccggcccagctcccacctccytcctcctgagactccccagccgcaggctctgccccagtgcttcagagatctcccaacctatggcccctcggggggtgggggcaggcacctggtgacccgg

SEQ ID NO: 38076 - DNA, 201 bp, Homo sapiens
ggcccgcagagctcaccccggggaaatgaagaaggtgtagggccggtggtcagcaccctggagtgactctgggcggatcctcctgctagccgagcagttgygctcattgggccggggctccgagtgtaggtagactgccaggtagggctcaggttcctcagacaggtagtggcctggggcagaacgcgcaggtcacacgcc

SEQ ID NO: 38077 - DNA, 201 bp, Homo sapiens
agcacccacccacggggcctgtgggtaccggcagggatccccgtgcaggccacctcccgtatggcgtgcccaggagtgtccggaggctgcccccagctcaygtccacctctgcatctgcagagctgacaggaacggccccaccggccggcgccacctgctcaccagggccggcccagctcccacctccttcctcctgagac

SEQ ID NO: 38078 - DNA, 201 bp, Homo sapiens
tgctgacccatgatgccctgccctgccctgccaggctggcccgcagagctcaccccggggaaatgaagaaggtgtagggccggtggtcagcaccctggagkgactctgggcggatcctcctgctagccgagcagttgtgctcattgggccggggctccgagtgtaggtagactgccaggtagggctcaggttcctcagaca

SEQ ID NO: 38079 - DNA, 201 bp, Homo sapiens
ttcactgggcacaagcaacattaaggcccccaagttttttggcgagacccacagtgggcagggcaggcaaggcctccaggggcaggcaggagggcaggttwtagaacgtggggggccgactacctccacgggctcgtgcggggctgagaggccgtcctgctgtgccagaggcgtcaggggtccctgcaggtccccactggg

SEQ ID NO: 38080 - DNA, 201 bp, Homo sapiens
tcgctcgagaggaagactccggtggaaactgtccatggggggcaggacccctgacctgcctttcaggaataactcacacacgctcagagaaaaggcctggrggtaatgtgagtaaacgctttcctctctgcactctggattttcccaaccatcttcactgggcacaagcaacattaaggcccccaagttttttggcgagac

SEQ ID NO: 38081 - DNA, 201 bp, Homo sapiens
gggtagcggacgtgagcccaggctccgccaggttggatgtcgcagtctcagagcccatacccggtccagtcccctcgctgcctgccgtccccatggggccygtaacccaggcaatgctgacccatgatgccctgccctgccctgccaggctggcccgcagagctcaccccggggaaatgaagaaggtgtagggccggtggt

SEQ ID NO: 38082 - DNA, 201 bp, Homo sapiens
gacccccacaggcctggctcctgtcgctcgagaggaagactccggtggaaactgtccatggggggcaggacccctgacctgcctttcaggaataactcacmcacgctcagagaaaaggcctggaggtaatgtgagtaaacgctttcctctctgcactctggattttcccaaccatcttcactgggcacaagcaacattaag

SEQ ID NO: 38083 - DNA, 201 bp, Homo sapiens
ggttcagatggtaactccccgctgggtctctgctcctgggcagggaaggggtagcggacgtgagcccaggctccgccaggttggatgtcgcagtctcagarcccatacccggtccagtcccctcgctgcctgccgtccccatggggccagtaacccaggcaatgctgacccatgatgccctgccctgccctgccaggctgg

SEQ ID NO: 38084 - DNA, 201 bp, Homo sapiens
gactccccctacccgaacttcccaggaagaggggagggaaggagagcgagccatcagacccccacaggcctggctcctgtcgctcgagaggaagactccgrtggaaactgtccatggggggcaggacccctgacctgcctttcaggaataactcacacacgctcagagaaaaggcctggaggtaatgtgagtaaacgcttt

SEQ ID NO: 38085 - DNA, 201 bp, Homo sapiens
tacaggcccacggacacctgcagcgccgaccagcggaagtggctggagaggttcagatggtaactccccgctgggtctctgctcctgggcagggaaggggyagcggacgtgagcccaggctccgccaggttggatgtcgcagtctcagagcccatacccggtccagtcccctcgctgcctgccgtccccatggggccagta

SEQ ID NO: 38086 - DNA, 201 bp, Homo sapiens
cggggcagcggcctagagaggcggaccccgcagtgtccgggtcccgggccctcacccgcgcccactgcaacccgactccggagctccgagcatcccttagktttaagtcatggcgggtgcgaacgggtctctgctgcaggcggctccgtgacagctcctgcttcacatgggtagaggagagacggcaaacgtcggggctcc

SEQ ID NO: 38087 - DNA, 201 bp, Homo sapiens
gcgctgttttccaccaccacgtccaccacgtgctccccctcactgagccacggcagtgctaccactgagaacagggtatcgttggtctcccaggggcagcygggcacgaaggtggccaccagggcagggcagacattctcaaagcgggcgctgacactgcccccaggccagcgagccgtggccgtggcgttggcaccagag

SEQ ID NO: 38088 - DNA, 201 bp, Homo sapiens
ctccaggggcagcagcccctctgtccgccacaccatgtcctcctcgctgaagtactggcacagggacgtgtacaggcccacggacacctgcagcgccgacyagcggaagtggctggagaggttcagatggtaactccccgctgggtctctgctcctgggcagggaaggggtagcggacgtgagcccaggctccgccaggtt

SEQ ID NO: 38089 - DNA, 201 bp, Homo sapiens
ttcacggctcagacgcaggcccgggaataccatgacctggtgggcagggggccgcctcagctccacagaccccatcccagcctgaagcccagactcccccyacccgaacttcccaggaagaggggagggaaggagagcgagccatcagacccccacaggcctggctcctgtcgctcgagaggaagactccggtggaaactg

SEQ ID NO: 38090 - DNA, 201 bp, Homo sapiens
acagggtcactcacaggaaacacaaagcggacatggcttgggggcacgaagaggctggcgccgaaggcggtgaggtggcgggtgaggcagacggcctggcrgggcgaggtctcctccaggggcagcagcccctctgtccgccacaccatgtcctcctcgctgaagtactggcacagggacgtgtacaggcccacggacacc

SEQ ID NO: 38091 - DNA, 201 bp, Homo sapiens
ggaacggagaagaggaactctctccatagcgcatagggggccccgggtagccctggccctgacgtgcagccattggcgcaggcctgggggtggcaggaggygtccagcggcaagcagatgttggctccagggcaccagcgtccccctggcatgcacgcgggggccagctgggtcctgttgtccggggacctgctctcaggc

SEQ ID NO: 38092 - DNA, 201 bp, Homo sapiens
gtcacgtgcaagctgtgccttctcaggatagagccgagcccacccaggccctcctcgactctgcagaggctcccaggagcacagggtcactcacaggaaasacaaagcggacatggcttgggggcacgaagaggctggcgccgaaggcggtgaggtggcgggtgaggcagacggcctggcggggcgaggtctcctccaggg

SEQ ID NO: 38093 - DNA, 201 bp, Homo sapiens
ggtcaccagggagcatgaggacatcctggccgtggagggtgacctgtggagagggaggcagggctgcatcacgtcctcacggtcatggcccgtggaccccygcacgacggatgagggtggacacgcagggctccccgcttcgtcagccacacctcaaggagcctccccacagtgctcgtgacaaggacaggcaggacagtt

SEQ ID NO: 38094 - DNA, 201 bp, Homo sapiens
ggtcacgtgcaagctgtgccttctcaggatagagccgagcccacccaggccctcctcgactctgcagaggctcccaggagcacagggtcactcacaggaarcacaaagcggacatggcttgggggcacgaagaggctggcgccgaaggcggtgaggtggcgggtgaggcagacggcctggcggggcgaggtctcctccagg

SEQ ID NO: 38095 - DNA, 201 bp, Homo sapiens
ggggaggccctgccaccccgctgcgcccctcacctgagccccggccccagcctgtcttgacgaggatctcgtacttgaagcggccccgctgcccacagaargggatggcgcggccccggctggcatccaactggtccagcttgtgcaggatggcggccatgaccatgtaggtcaccaggcacacagcacatgtcagcatga

SEQ ID NO: 38096 - DNA, 201 bp, Homo sapiens
cctggaggtaatgtgagtaaacgctttcctctctgcactctggattttcccaaccatcttcactgggcacaagcaacattaaggcccccaagttttttggsgagacccacagtgggcagggcaggcaaggcctccaggggcaggcaggagggcaggttgtagaacgtggggggccgactacctccacgggctcgtgcgggg

SEQ ID NO: 38097 - DNA, 201 bp, Homo sapiens
ggaggagctgattaactcagtggtcatctcgcagctctcccacatccccgaggataaagaccaccaggtccgaaagctggccacccagttgctggtggacytggcagagggctgccacacacaccacttcaacagcctgctggacatcatcgagaaggtgagagccgttgtacccggggccgggtgctagcgtgccagagc

SEQ ID NO: 38098 - DNA, 201 bp, Homo sapiens
tggccaggctctgtgttcctccctgtgggctgtggctgccctggccaggccctcacctgggtgcccaccatcccctccctgtgcagtttcgtgttcctgcmgctctaccattcccccttctttggcgacgagtcaaacaagccaatcctgctgcccaatgaggtaggcgtggcctccctctcctgcatccgctggagctgt

SEQ ID NO: 38099 - DNA, 201 bp, Homo sapiens
aaaacccccccaccagcccctcctcctcagcccaggctccaccgcgggcgctcggcaggcccctaaccacagccagcgtctcaggcccctgcctggccccycgcacacctccgggctgcagctcgcagacgtagctgtgcggcgctgagcacaggtcggtgttacaccacccggtgggcccgagccggacgcagtgctcgg

SEQ ID NO: 38100 - DNA, 201 bp, Homo sapiens
tctcccacatccccgaggataaagaccaccaggtccgaaagctggccacccagttgctggtggacctggcagagggctgccacacacaccacttcaacagyctgctggacatcatcgagaaggtgagagccgttgtacccggggccgggtgctagcgtgccagagctccgtgggcagcaatggcctctgggccctctgtcc

SEQ ID NO: 38101 - DNA, 201 bp, Homo sapiens
aggtgctggacgccgtggtctgctacaactgcctgccggctgagagcctcccgctgttcatcgttaccctctgtcgcaccatcaacgtcaaggagctctgmgagccttgctggaaggtggggtttctgaaactgctctggaaggttcctgagagcacatggatgggacaagggccatcctgtctcccatgaatggttgtct

SEQ ID NO: 38102 - DNA, 201 bp, Homo sapiens
tgacctgttgaccacggtggaggagctgtgtgaccagaacgagttccacgggtctcaggagagatactttgaactggtggagagatgtgcggaccagaggyctgtgagaccccctcctgggtggggcctttgggctttggctggtggggaggggccgggtgctgggtgaagtgcagctttctgagcctcagaagccaaggg

SEQ ID NO: 38103 - DNA, 201 bp, Homo sapiens
gagtcgggctggcctgcgccaggcagacgggctggtgtggggctgtggccgggcactccccacccgccccagcaggctgccgtcccgcaggagcgagtccygaggcgccgtgcgcatcaaggtgctggacgtgctgtcctttgtgctgctcatcaacaggcagttctatgaggtgcgtgtccaggcggccgcagctggggg

SEQ ID NO: 38104 - DNA, 201 bp, Homo sapiens
ggacccagagtcgggctggcctgcgccaggcagacgggctggtgtggggctgtggccgggcactccccacccgccccagcaggctgccgtcccgcaggagygagtcccgaggcgccgtgcgcatcaaggtgctggacgtgctgtcctttgtgctgctcatcaacaggcagttctatgaggtgcgtgtccaggcggccgcag

SEQ ID NO: 38105 - DNA, 201 bp, Homo sapiens
gtgcctgtggtgctggacgtgggtctgagcaggtgggacgccgcctgtcctgggcctgcacgagcttggctctggctttcaccatcctcttcctgacaggmctttgacttcctgttgctgctgcgggccgactcactgcaccgcctgggcctgcccaacaaggatggagtcgtgcggttcagcccctactgcgtctgcgac

SEQ ID NO: 38106 - DNA, 201 bp, Homo sapiens
ggcaggaaggagcccaggctggaggctcagctcctcggccaagctgcccgtctgccctggggggctgaacccagtgccctggcaggcatgcggggcagggwgagcaggtggggccatcctaccatgcactgggccagcgcagcagcgatctgctggatgtcatccacagtgtggaccctcagggacaccagagtctccgtg

SEQ ID NO: 38107 - DNA, 201 bp, Homo sapiens
tcttctttaaggtcatcaaggattacccttccaacgaagaccttcacgaaaggctggaggttttcaaggccctcacagacaatgggagacacatcacctasttggaggaagagctgggtgggtgccaccttgggttggaggtttctctggccttgacgatcaagtgtaacctggatgggaaggacctggggctggggaggg

SEQ ID NO: 38108 - DNA, 201 bp, Homo sapiens
agccctcctcctcgccagagcggcccagcaccgtgagcgtgaaggtgtatccctcgccgtcccgcagcacgccccgccgcagcaccagtcgcatgcctgcrctgcccgtggatgtggtggtctcatccagcaccagcgtcttgttgctgaacgtacgtgcagcccaccgctgcaggcagaaggggtggtgagggggcgcaa

SEQ ID NO: 38109 - DNA, 201 bp, Homo sapiens
ccaccccgcccctcgggcttcctctgcacccgccaggtgacatcatcgccgctgtctgatgccctgcccccacgttctggttccctgcaaggatgggggamacagcagggcccaggcatctggcagcaggaccaccgagcggccctaagcccaggcaagagcacagagcagagtgcagggtcctctggggtcccaggccct

SEQ ID NO: 38110 - DNA, 201 bp, Homo sapiens
agccaggcctcgctgcggctcacctcattccagccggccaccctaacggtgaagtcacctgtgctgttgtaagcgtgggtgacctccggaccctcgagccrcccaccgtcccccagatcccacaggtagctggcggggcgcccacggcccacagcagagaacaggtacggctgctgcagctccagcccaagggagccattg

SEQ ID NO: 38111 - DNA, 201 bp, Homo sapiens
gagcccttctctgctccagcgagccgtggtctgactgcaggacaggttctgggtccctccctgtggccctgggttcactgaggccagcactgtggtgggcygtgccccaagggcagagctgccaccgtctctggctgcctgtggcactagcttgccaggctcggggggagcattcagcttgaggctggtggttttgcatca

SEQ ID NO: 38112 - DNA, 201 bp, Homo sapiens
gcagctgctgctccagctggtagacgtcctctgtggcctggttgagtcggtcaaactgggtgagcagggcctcgaacacggcttggaggcgggagggctcrggctcacaccttgtccccagccggcccaggctcacgctcagcccatccagctggctggaggaggtggaggggtgcgaggcatcggagccagcgctgggtg

SEQ ID NO: 38113 - DNA, 201 bp, Homo sapiens
ggctgtcgtgttacatagaatttgcatcagaaacagagaggggagagcgtgcggcctccaccagcactaaaacacggaaaacagtagatgaccagggaggytgggctgtccaaggcaagtggccgaggggcgggcggcacccaccgtctggttggtggcctcctccttgcggccggccttccacacggtcaggctgaaggt

SEQ ID NO: 38114 - DNA, 201 bp, Homo sapiens
aaatgtgagtgggggtgggtccaggcgtgagctggtgggacaggcccaggtgccacctgatagtgagctcaccccctgcctacgtccccagatggcctcayaggtgcatcatagccgctccaaccccaccgatatctacccctccaagtggattgcccggctccgccacatcaagcggctccgccagcgggtagggaatat

SEQ ID NO: 38115 - DNA, 201 bp, Homo sapiens
ggggagcattcagcttgaggctggtggttttgcatcaggtaagtggtggtcaccagtcctctgccctcttcttcagggggccatggtcttcgagttggcgycctggacgtgccggcctcccagttcctgggcagtgccacttctccaggaccacggactgcaccagccgcgaaacctgagaaggcctcagctggcacccgg

SEQ ID NO: 38116 - DNA, 201 bp, Homo sapiens
acctgcttctccgtggcccccagctcctctctggccaggcccccagcagcccatgaaacagaaagcaaatttcaccagagacacccatggaagccctacgrgaaacgccttccccccaagaacaaggccagggggccgcgtgtgccccacccgctgcacgcaccgtccagcagcgtatagttgagctgcagatgcagcccg

SEQ ID NO: 38117 - DNA, 201 bp, Homo sapiens
cctacgtccccagatggcctcacaggtgcatcatagccgctccaaccccaccgatatctacccctccaagtggattgcccggctccgccacatcaagcggytccgccagcgggtagggaatatggggctccctcagcggggtgtgctggctgcccaagctgtggggcgggtgtgtgggcagagcggttgccacgcctccca

SEQ ID NO: 38118 - DNA, 201 bp, Homo sapiens
ctgcagtccggcccggagtcgaggtgactgcaccttcctttcctccgcgcctgccagcctcgacaccggctgtcccgagcccaggcccacgtggcaccctygtaccagcctggggactaagtccaccctgtgcgtgggattctcttctcagctccagccccggggtgcatgtgagacagaccaaggaggcgccggccaagc

SEQ ID NO: 38119 - DNA, 201 bp, Homo sapiens
aattcatcccggcctccaggaggcagttgcagccaagcccatgttaacctgggcgggcagtttcttgagcctcttgggtcacagggtccccccgacaaaawgccggaagaccctaccccaaacgagagtgggagtggtgctgggagccagggaaccaagagccactccaggcaccgaagtcaggcgtccgcctgcgtccct

SEQ ID NO: 38120 - DNA, 201 bp, Homo sapiens
gagaggttcagatggtaactccccgctgggtctctgctcctgggcagggaaggggtagcggacgtgagcccaggctccgccaggttggatgtcgcagtctyagagcccatacccggtccagtcccctcgctgcctgccgtccccatggggccagtaacccaggcaatgctgacccatgatgccctgccctgccctgccagg

SEQ ID NO: 38121 - DNA, 201 bp, Homo sapiens
gtgaattcatcccggcctccaggaggcagttgcagccaagcccatgttaacctgggcgggcagtttcttgagcctcttgggtcacagggtccccccgacawaaagccggaagaccctaccccaaacgagagtgggagtggtgctgggagccagggaaccaagagccactccaggcaccgaagtcaggcgtccgcctgcgtc

SEQ ID NO: 38122 - DNA, 201 bp, Homo sapiens
gggtggcttcagaggggtcccccgtgatggaggcctgtagcctacccctggcagccccctcaccttcagtggctcccagccgaggaatgaggccaggaagstggcgctgctggacaggagccacgcaacactcacgcccggggggaagctcgcacccacccaccctgagacagccacagccacagccaccaggagcaggct

SEQ ID NO: 38123 - DNA, 201 bp, Homo sapiens
ccgaccagcggaagtggctggagaggttcagatggtaactccccgctgggtctctgctcctgggcagggaaggggtagcggacgtgagcccaggctccgcmaggttggatgtcgcagtctcagagcccatacccggtccagtcccctcgctgcctgccgtccccatggggccagtaacccaggcaatgctgacccatgatg

SEQ ID NO: 38124 - DNA, 201 bp, Homo sapiens
gggaagctcgcacccacccaccctgagacagccacagccacagccaccaggagcaggctgagcccgtgggccagggaggcacaccaggccggcagcaggcscttccgcagaccctccaccagtcctggggaagcagagacagacctgtgagaggcagctcacagggaggggctaggggcatcccggggctacgcaagcaca

SEQ ID NO: 38125 - DNA, 201 bp, Homo sapiens
gggctttggcaacggctggagccatggctgcggcaggtgtggctgcaggaaggtgagctggcagggggcgccccaagactctacctggccagggtaatggsagcacacaccctgcccggaaccccacctgggggcagacacacaggccactgcagtggtgcttaggggccttcagggccaggcaggagtgggcattggagc

SEQ ID NO: 38126 - DNA, 201 bp, Homo sapiens
tgcgccaaggcggcaggacccccagcccagcccaggacccccagtagagtcctcacctcagcgtggaggcctgagaacgtgaggaaggagctgtccagcayggacgagtccaggcagctgtcgatgtccagcacctgctgcccggcaggtgtggggctcgggctcccagccacctgcaggacgagggcagtggtcagcggg

SEQ ID NO: 38127 - DNA, 201 bp, Homo sapiens
agagctcctcagacctgccacagcatcagtcacacgctccagcccctactgccccatgcccgcctcgagtgagcggccaccagagacccagggaacatggytcccactgccctgctggccacggctagacctgggcttctcagccttatcctggggatgttctggggcagacagttgtctgtcatgggcccgtcctgtgca

SEQ ID NO: 38128 - DNA, 201 bp, Homo sapiens
cagatgcccctgcctgctctctggggaacctacgtgcagccattctgcctggccctcggccttgacagcggcagaaagtaatactgagcggtgtccactcygactccacggcccacccccgccaggaaggaggactaagtgctgctggggtggaccttgttcttggcccgaaggggtgtcctgctggggccagtggccagg

SEQ ID NO: 38129 - DNA, 201 bp, Homo sapiens
ggtgagctggcagggggcgccccaagactctacctggccagggtaatggcagcacacaccctgcccggaaccccacctgggggcagacacacaggccactkcagtggtgcttaggggccttcagggccaggcaggagtgggcattggagctgggccctggcagggactggggcagcaagtggggggcgtggggtaggaggg

SEQ ID NO: 38130 - DNA, 201 bp, Homo sapiens
cagagggatgccagtgtggcttccgcatgactttggaggaccgcattagtcgagtctgttaaccacagctttaaggaggactccacggccacacgggctcrtcagcataggggccctggggaggcgaggctagtatccagcagcctcagggctgtgccttttcctggagcctggggcgggtgatgtacaggaggccaggca

SEQ ID NO: 38131 - DNA, 201 bp, Homo sapiens
tcacgtccacgccgggcagggccacacgcgctgggcgccccggccgctggcagctggcggtgcgatacacctcccagcggtactcagtctggtaggtgacrcagtcgcgcaggtcaacgtgggcctccaagtagttgcgctgtgatcgccgcatcagcacctgcaggggcaggaccacgtccacctccggctcccggcagg

SEQ ID NO: 38132 - DNA, 201 bp, Homo sapiens
ggggccaccgtcacattggcctggatgctctgtgtcagtggcgtgtccccaaatgacacgacaaacacaaagcagtagtgccccacaggcagcgccagccrcggcagcaccagccgaggccggctcacgtccacgccgggcagggccacacgcgctgggcgccccggccgctggcagctggcggtgcgatacacctcccag

SEQ ID NO: 38133 - DNA, 201 bp, Homo sapiens
ccagttgtgcagctgcaggaagcgcagccggtcgcggctctcctccaggctcaggcccagctcctgcacgtagcccccgctgtcatacacggcacaggagscccaggaccatgccctgccggagaggggtggcgtgggtgccgcaccccagcccttccggcaccccggagccaggctggtcaggaggccgcggcactcctg

SEQ ID NO: 38134 - DNA, 201 bp, Homo sapiens
ccgtctgagagacgagctatgcagtcaggatcgcgggtggatgcacagtctcccacagtggtagcgatgctcacgtcacttgtggggccacgctactgtgyagaacgtgggctgcccaccctgactgactggcacctacttccagctaggagctgtcctagtcctcagggacagtgagtgctcacgaggtcattcccagga

SEQ ID NO: 38135 - DNA, 201 bp, Homo sapiens
aaagcccaccaggtagcccgaggagccagccagcaggacctgcccggggccgacgtccccagtaactgggctgctgccctcactgggaagccaggcctcamgccctgtgtgagcaccctgtctgcaggcacctgcctgggggctggtggtggagcctcggccatactcaccactaggactccctgcagtacacgggcctcg

SEQ ID NO: 38136 - DNA, 201 bp, Homo sapiens
cccgggcagcccagtccgagttgttgggcaccttcacggtgatggcgcgctctgaggccagccgctcgatggggatctgggcgccggcctgtgtctggaaygccatcgaggccaccttggtggagacggtgtagttgctgatatagccaaagggaaagggattggagtccaccagaaagatgagctgcaccacgtcactga

SEQ ID NO: 38137 - DNA, 201 bp, Homo sapiens
tcagagccgtgactttccaggaatttaaagcccaccaggtagcccgaggagccagccagcaggacctgcccggggccgacgtccccagtaactgggctgcygccctcactgggaagccaggcctcacgccctgtgtgagcaccctgtctgcaggcacctgcctgggggctggtggtggagcctcggccatactcaccacta

SEQ ID NO: 38138 - DNA, 201 bp, Homo sapiens
gccacggggagggtgctggcgcctccgtctgagagacgagctatgcagtcaggatcgcgggtggatgcacagtctcccacagtggtagcgatgctcacgtmacttgtggggccacgctactgtgcagaacgtgggctgcccaccctgactgactggcacctacttccagctaggagctgtcctagtcctcagggacagtga

SEQ ID NO: 38139 - DNA, 201 bp, Homo sapiens
ttgtagttcacggtgacgttgctcacgtggttggaggccgtcagctgcagggacaggcgtcagtgagcccaggtggcaggtgagaggcctggccctgattrgcgtccctccctccactcacccacagccatggcagcgtcctcgggcagcatgaagcagagcagaaggcagaggtgaaggtggagcccgcccccgccctgc

SEQ ID NO: 38140 - DNA, 201 bp, Homo sapiens
acagccacggggagggtgctggcgcctccgtctgagagacgagctatgcagtcaggatcgcgggtggatgcacagtctcccacagtggtagcgatgctcaygtcacttgtggggccacgctactgtgcagaacgtgggctgcccaccctgactgactggcacctacttccagctaggagctgtcctagtcctcagggacag

SEQ ID NO: 38141 - DNA, 201 bp, Homo sapiens
ggcagcttgactggggagctggggggaccccgtgctcagagcctgaaaggcagtggccccctcaccccctcatccctcacctggggcagcgtaggtgtgcrtgacattgtgctccaccagcacctgggccaccgaggggtctggaaccgggaaggactcgttgtacggaggctggaactggtggagggcctgctccccatc

SEQ ID NO: 38142 - DNA, 201 bp, Homo sapiens
actgaagaaacagccacggggagggtgctggcgcctccgtctgagagacgagctatgcagtcaggatcgcgggtggatgcacagtctcccacagtggtagygatgctcacgtcacttgtggggccacgctactgtgcagaacgtgggctgcccaccctgactgactggcacctacttccagctaggagctgtcctagtcct

SEQ ID NO: 38143 - DNA, 201 bp, Homo sapiens
agccatcagcccaggtgaggtcacagtgagggctgttggggaggaaggggggcagcttgactggggagctggggggaccccgtgctcagagcctgaaaggmagtggccccctcaccccctcatccctcacctggggcagcgtaggtgtgcatgacattgtgctccaccagcacctgggccaccgaggggtctggaaccggg

SEQ ID NO: 38144 - DNA, 201 bp, Homo sapiens
cgcgtcatgccagcctgagggacggtccccacggcatcacgggagggctccgtgacgtcacagagtcgggggatcccgctgctccccccacgcaggcctgyactcacccgtgcattcgaagtgcaccttggtggtgagggcgtgcacagcgcccagtgggaagaggcggcaagagccccccagcggcgggcggttggggga

SEQ ID NO: 38145 - DNA, 201 bp, Homo sapiens
aaaaaaagaaaaacgaaaacaaaaagggaatgccagaagggcaattccaatgaaaggaaaatggaggtactgaagaaacagccacggggagggtgctggcrcctccgtctgagagacgagctatgcagtcaggatcgcgggtggatgcacagtctcccacagtggtagcgatgctcacgtcacttgtggggccacgctact

SEQ ID NO: 38146 - DNA, 201 bp, Homo sapiens
agactccgtctctaaaaaaagaaaaacgaaaacaaaaagggaatgccagaagggcaattccaatgaaaggaaaatggaggtactgaagaaacagccacggkgagggtgctggcgcctccgtctgagagacgagctatgcagtcaggatcgcgggtggatgcacagtctcccacagtggtagcgatgctcacgtcacttgtg

SEQ ID NO: 38147 - DNA, 201 bp, Homo sapiens
caagctccgcctcccgggttcacgccattctcctgcctcagtctcccaaggagctgggactacaggcgcctgccactacgccgggctaatttttttgtacyttttattagagacagggtttcaccgttagccaggatggtctcgatctcctgaccccgtgatttgcctgcctggcctcccaaagtgctcggattacaggtg

SEQ ID NO: 38148 - DNA, 201 bp, Homo sapiens
tgccggtgagctcactccctcccaggatactcatccggtttgccaccttccaacttggacggcggaagggcatacacagggcagaggacactggagtgtgygttctggtgtactggacccagctggaccctagcaggaggcaggcaatgctcactgagggcccctggggggatgcgtgtgagaagagacgtatgtgtgggt

SEQ ID NO: 38149 - DNA, 201 bp, Homo sapiens
gtgacagacccaggtgacagtattttttttcttttttttttgagatggagtcttgctgtgtcacccaggctggagtgcagtggcgcaatctcagctcactscaagctccgcctcccgggttcacgccattctcctgcctcagtctcccaaggagctgggactacaggcgcctgccactacgccgggctaatttttttgtac

SEQ ID NO: 38150 - DNA, 201 bp, Homo sapiens
agccagtcattgaccaggaagaaggcgctgcgtgccgtctgcaggtccctgacgatgacgtgctgcaggaaccaggcagggctgagccctgcagaggcgcrggagggaggtcaggctcgcagggcgccccaatgcgggggcagaggggcagagcttggcagggtccgcacaaacctttgttgtcgtgccacactcggatct

SEQ ID NO: 38151 - DNA, 201 bp, Homo sapiens
gagaacacagcagagggcgtgagagactcacgggggctcgtgtgaggtcagggagcagagttttaaattcattttgtgaaatgagacagtggaatgagttrgcggagccactgtcagagccgtgactttccaggaatttaaagcccaccaggtagcccgaggagccagccagcaggacctgcccggggccgacgtccccag

SEQ ID NO: 38152 - DNA, 201 bp, Homo sapiens
ctcacctcgttcagcacggtgaccagggccaacgagtactcgatgacgtgctggggatcggcctgccgcagcagccctgggagcacactagcggtgagccsgtgcagccagactgtgagccccgttgcgctgccgttgggctctgggagggtgatggccaaagacctacgagcagaggggggtggtgagcaggtggcagtc

SEQ ID NO: 38153 - DNA, 201 bp, Homo sapiens
agaggctgccccgacccctacggcacccacctgtaggcagagtcgccaacagccccgtaccacacggcgttggcgcccaggaagaggcagatgaggagaaygcagcaggtggccctctggatgcgagtgaaacggctacgaggcggccggtcccatatggagagccagatgtgcttgtcaaagaagccacgctgcagctca

SEQ ID NO: 38154 - DNA, 201 bp, Homo sapiens
gcactgggccagcgcagcagcgatctgctggatgtcatccacagtgtggaccctcagggacaccagagtctccgtgatgttcttgcgtatctgggctcggygctgccgctcgtgcttgggctctgccgccacgtccagggcccgctcgtactggggcaggcagggggcacagcaagctgtcagcagcgcaggaggccggca

SEQ ID NO: 38155 - DNA, 201 bp, Homo sapiens
gcgtgcggttctcactgcccagggcgttgaaggcgcgcacctggatctccaacagccccgcggccacgggcgtgtaggtgacgtcgcggcccgacaggatraccagcgagtcgccctggaccttctgcagcgagaagtaccaggcgtaggcgacccgagagccgcgctgcacgcgggctgtgaagttcctctcagtgcccg

SEQ ID NO: 38156 - DNA, 201 bp, Homo sapiens
ccatggcaggaaggagcccaggctggaggctcagctcctcggccaagctgcccgtctgccctggggggctgaacccagtgccctggcaggcatgcggggcrgggtgagcaggtggggccatcctaccatgcactgggccagcgcagcagcgatctgctggatgtcatccacagtgtggaccctcagggacaccagagtctc

SEQ ID NO: 38157 - DNA, 201 bp, Homo sapiens
ctctgttgtgcacgtgctcccgcagagccgggctctgcctgggacttcggtcctgccggaccctctgcagcccccagcgtggtctgtttacccctgttcaytcactggcttgctcgtcctgggtgcctctgccaggccttgacacgtggccaagtagcaaggaaggcacagtgcctgccctcagggagctccggccggttt

SEQ ID NO: 38158 - DNA, 201 bp, Homo sapiens
agccgtgcatgcgttgagctttggcccttggtgataggtggctcggcccgccctacctggcaccctgaccctggtcacggcctctccctccagcaggatayagacgtccctcaccagtgccagcttggggtctgcagatgagaactccgtggcccaggctgacgatagcctgaaaaacctccacctggagctcacggaaac

SEQ ID NO: 38159 - DNA, 201 bp, Homo sapiens
ctgctgtttctgcggcccctgataaacgtgtggtgggcactgcgcgctcaggcgtgctactctcggtcccaagggtgactgggagggcgtcccacagcaarcaagcagctctgaccctgtgtgctggccgggctcgtgttccaggccatggcatgtccgaacgaggtggtgtcctatgagatcgtcctgtccatcaccagg

SEQ ID NO: 38160 - DNA, 201 bp, Homo sapiens
ccaggctcggggggagcattcagcttgaggctggtggttttgcatcaggtaagtggtggtcaccagtcctctgccctcttcttcagggggccatggtcttygagttggcgccctggacgtgccggcctcccagttcctgggcagtgccacttctccaggaccacggactgcaccagccgcgaaacctgagaaggcctcagc

SEQ ID NO: 38161 - DNA, 201 bp, Homo sapiens
agtagccgagatcagccttcagcacacgctgtgtgcggggatgaccctttctcttgtccgggcagggccagttcaactttgtccacgtgatcgtcaccccrctggactacgagtgcaacctggtgtccctgcagtgcaggaaaggtagggccgggtggggccctgcagtgcaggaaaggtagggccgggtggggccctgca

SEQ ID NO: 38162 - DNA, 201 bp, Homo sapiens
atggccaggctctgtgttcctccctgtgggctgtggctgccctggccaggccctcacctgggtgcccaccatcccctccctgtgcagtttcgtgttcctgyagctctaccattcccccttctttggcgacgagtcaaacaagccaatcctgctgcccaatgaggtaggcgtggcctccctctcctgcatccgctggagctg

SEQ ID NO: 38163 - DNA, 201 bp, Homo sapiens
acgccgtggtctgctacaactgcctgccggctgagagcctcccgctgttcatcgttaccctctgtcgcaccatcaacgtcaaggagctctgcgagccttgmtggaaggtggggtttctgaaactgctctggaaggttcctgagagcacatggatgggacaagggccatcctgtctcccatgaatggttgtctgattcttgg

SEQ ID NO: 38164 - DNA, 201 bp, Homo sapiens
gcagcgccgaccagcggaagtggctggagaggttcagatggtaactccccgctgggtctctgctcctgggcagggaaggggtagcggacgtgagcccaggytccgccaggttggatgtcgcagtctcagagcccatacccggtccagtcccctcgctgcctgccgtccccatggggccagtaacccaggcaatgctgaccc

SEQ ID NO: 38165 - DNA, 201 bp, Homo sapiens
cacccgccccagcaggctgccgtcccgcaggagcgagtcccgaggcgccgtgcgcatcaaggtgctggacgtgctgtcctttgtgctgctcatcaacaggyagttctatgaggtgcgtgtccaggcggccgcagctgggggctcagggctatttctccgtgggcgggctgtctctgttgtgcacgtgctcccgcagagccg

SEQ ID NO: 38166 - DNA, 201 bp, Homo sapiens
acacctgcagcgccgaccagcggaagtggctggagaggttcagatggtaactccccgctgggtctctgctcctgggcagggaaggggtagcggacgtgagyccaggctccgccaggttggatgtcgcagtctcagagcccatacccggtccagtcccctcgctgcctgccgtccccatggggccagtaacccaggcaatgc

SEQ ID NO: 38167 - DNA, 201 bp, Homo sapiens
ggcctttgacttcctgttgctgctgcgggccgactcactgcaccgcctgggcctgcccaacaaggatggagtcgtgcggttcagcccctactgcgtctgcractacatgtacgcgggacctcgcccacggcccatgaggctcagggcgtcagaggcgctggggctgtggtggcgctgtttgcatgtctgagggatgtccca

SEQ ID NO: 38168 - DNA, 201 bp, Homo sapiens
ggacacactgtcctgcggcgggagggggaggtgagtgggagatgtagattcggcgtcctcgcaaactgccgccgcttctcccccagctgactttgtcctgyagtggatggatgttggcttgtcctcggaattccttctggtgctggtgaacttggtcaaattcaatagctgttacctcgacgagtacatcgcaaggatggt

SEQ ID NO: 38169 - DNA, 201 bp, Homo sapiens
cccaggctgacgatagcctgaaaaacctccacctggagctcacggaaacctgtctggacatgatggctcgatacgtcttctccaacttcacggctgtcccsaagaggtccaggcggcactacagggctgggcgggcctgcgggagctccacgggcaagctgggtttcacgctccctgtcttctaggtctcctgtgggcgag

SEQ ID NO: 38170 - DNA, 201 bp, Homo sapiens
tggggtgtgcgcccagccccgcgcccaccggcccagccctcaccttgaccaaaagcaggaagagcagcgaggccgccaggccacgggctgcggagctcagstgcgccacctggtcgaagctagtgaagcggcgcgggcggccgcgcacgaaacgggtccactggcggtcagcggcacccagctgggcgaggcgtaccagtg

SEQ ID NO: 38171 - DNA, 201 bp, Homo sapiens
ccgggagctggaagttgctgtgagccaagatcatgccattgcactccagcctgggcaacagagtgagactccgtctctaaaaaaagaaaaacgaaaacaamaagggaatgccagaagggcaattccaatgaaaggaaaatggaggtactgaagaaacagccacggggagggtgctggcgcctccgtctgagagacgagcta

SEQ ID NO: 38172 - DNA, 201 bp, Homo sapiens
ctaccccgagcaccaccaggcccaaggtgacccccaggagctctggcagagctcggcataatgtcttgccaaagacggaccactggcgcacgaagcgtagstgctgggcagcctgcggacgagaaatctgtctgcttgcagccctggggtgtgcgcccagccccgcgcccaccggcccagccctcaccttgaccaaaagca

SEQ ID NO: 38173 - DNA, 201 bp, Homo sapiens
gccgtctgcaggtccctgacgatgacgtgctgcaggaaccaggcagggctgagccctgcagaggcgcaggagggaggtcaggctcgcagggcgccccaatscgggggcagaggggcagagcttggcagggtccgcacaaacctttgttgtcgtgccacactcggatcttccacacgctacccaggctgtgcggggtggcga

SEQ ID NO: 38174 - DNA, 201 bp, Homo sapiens
cggcagaaagtaatactgagcggtgtccactccgactccacggcccacccccgccaggaaggaggactaagtgctgctggggtggaccttgttcttggccygaaggggtgtcctgctggggccagtggccaggtccacaccccgactggcccgggcaaggcggctgggcagtgctggccgcaggcccggggatgggccacg

SEQ ID NO: 38175 - DNA, 201 bp, Homo sapiens
ccaccagcaggcgccggaagcgcaaaagggctgcgtcgcctagaaggcagggagggccgcactgcaggaggccacggggcaggaccaccctgcccaacctyccacggagtgggaacatggaacgaggccttactcgcggccagcacctccttctccaccaggcccccgttggcctccgtctccaccgaaagccagtcattg

SEQ ID NO: 38176 - DNA, 201 bp, Homo sapiens
tgcctggcagacagctgtgcccccagcaccggcccaaggccaagctcgcatccaagcagcagccgggctgccataacgccaccacacctaccaagcgcagsaggtgttgggggaggccagctctgggcgcaggcccctcagccctagtgaaaatagtgacatacaaaaatatacacattttaacaccatataaattactga

SEQ ID NO: 38177 - DNA, 201 bp, Homo sapiens
tcagcgggctcagcctggacacatgccccgtgctgtgtggaggagaggaggccacacaggtgaggctgaggggcaggaagggctgggcaggaagaggctgycccgacccctacggcacccacctgtaggcagagtcgccaacagccccgtaccacacggcgttggcgcccaggaagaggcagatgaggagaacgcagcagg

SEQ ID NO: 38178 - DNA, 201 bp, Homo sapiens
gtggcggccctaggcatggtgccgaggcccaggctccattcccagtactcccgggtccccagccccagcccaccttgctccgggacatccggaagagaaaraggatggccaggtagacgggatagacaaccacgctggacaccaggccaacagcgactgtgtcgacgctcagcgggctcagcctggacacatgccccgtgc

SEQ ID NO: 38179 - DNA, 201 bp, Homo sapiens
ttgcccaggctggtctcaaactcctggactcagatccgcccacctcggccacctgaagtgttgggattacaggcgtgagccaccacacccggcccggccaytgggacgtttctaagggactaactcagcctcttcacttcctatagatgtactgagattttcttctggagtgcatttcggaagcgtgcacagccgcgtgct

SEQ ID NO: 38180 - DNA, 201 bp, Homo sapiens
ctcctgacctcaagtgatctgcccgcctcggcctcccaaagtgctgggattacaggcgtgagccaccgcgcctggccctttttaatgttttatatagatgkggtcttgctatgttgcccaggctggtctcaaactcctggactcagatccgcccacctcggccacctgaagtgttgggattacaggcgtgagccaccacac

SEQ ID NO: 38181 - DNA, 201 bp, Homo sapiens
acgggagggctccgtgacgtcacagagtcgggggatcccgctgctccccccacgcaggcctgcactcacccgtgcattcgaagtgcaccttggtggtgagrgcgtgcacagcgcccagtgggaagaggcggcaagagccccccagcggcgggcggttgggggacaggcggatggaggcgcagccctcctcctcgccagagc

SEQ ID NO: 38182 - DNA, 201 bp, Homo sapiens
gtgtgcattcctaaggggtgcggcctcccgtttccgtatgaatgggaagcgttcccacctgctgtattcttggaaagagtctgtgaaggattggtgttaawtcttccttaactgcttagaaaaattctatcgtgaaggctctgagcctgggcttttctttgtgggattttttttttttttttttggagacggagtcttgct

SEQ ID NO: 38183 - DNA, 201 bp, Homo sapiens
ggttagtttgcatgtaacctcttgaggaccccacgtgtgcattcctaaggggtgcggcctcccgtttccgtatgaatgggaagcgttcccacctgctgtawtcttggaaagagtctgtgaaggattggtgttaattcttccttaactgcttagaaaaattctatcgtgaaggctctgagcctgggcttttctttgtgggat

SEQ ID NO: 38184 - DNA, 201 bp, Homo sapiens
cctgacctcaagtgatctgcccgcctcggcctcccaaagtgctgggattacaggtgtgagccaccgcgcccggccatcgttccattttaattaacttaaayacgagcagccacatgtggcctctggttcctgccacggactcgggagcaacccctcctggtcgcggcttatgcgccttctctgtgtgctgctggggttagt

SEQ ID NO: 38185 - DNA, 201 bp, Homo sapiens
tgggagcacactagcggtgagcccgtgcagccagactgtgagccccgttgcgctgccgttgggctctgggagggtgatggccaaagacctacgagcagagsggggtggtgagcaggtggcagtctcgggggcgccctcccacggcctggctcacctgttgagggcgaccacagcggctcccagctggtcctgcaccaccac

SEQ ID NO: 38186 - DNA, 201 bp, Homo sapiens
gtgacgtcccctcccaggctgcactcacctcgttcagcacggtgaccagggccaacgagtactcgatgacgtgctggggatcggcctgccgcagcagcccygggagcacactagcggtgagcccgtgcagccagactgtgagccccgttgcgctgccgttgggctctgggagggtgatggccaaagacctacgagcagagg

SEQ ID NO: 38187 - DNA, 201 bp, Homo sapiens
gtgctggcgcctccgtctgagagacgagctatgcagtcaggatcgcgggtggatgcacagtctcccacagtggtagcgatgctcacgtcacttgtggggcyacgctactgtgcagaacgtgggctgcccaccctgactgactggcacctacttccagctaggagctgtcctagtcctcagggacagtgagtgctcacgagg

SEQ ID NO: 38188 - DNA, 201 bp, Homo sapiens
cgtgaaagaattcaaggagagctctgcagccgaggccttccggtgccgcagcatcagtgtgtctgaacatgtggtccgcaggtagcgggactgtcgggtgsggggcacggaccctggagcttggccccgtgagcacctgggtggcagtgcatggggctgcttgcatgacctcatcgtctgcccgtgtcctccctggccagc

SEQ ID NO: 38189 - DNA, 201 bp, Homo sapiens
ggggcacggaccctggagcttggccccgtgagcacctgggtggcagtgcatggggctgcttgcatgacctcatcgtctgcccgtgtcctccctggccagcscagggggagccggtgacgaggggtggaaaggttgcattctgtccccaggccccgtatgagcacgggctggttgcacgcatccccaggccccctcggggtg

SEQ ID NO: 38190 - DNA, 201 bp, Homo sapiens
gggcgtgcagcggtcacagagcacccaggaatagcgcacatcactgccggcctccagcgacgtgctgaagctcacgctcccattcaggggcaccaccgtgsggcttgcattgacgacgagcccccgcacgcgccgcttcaccgtcacattgagccaggcctcgctgcggctcacctcattccagccggccaccctaacggt

SEQ ID NO: 38191 - DNA, 201 bp, Homo sapiens
gctgcccatggagctgacaggtgtctagcagtgcaaccaggcagtagccgagatcagccttcagcacacgctgtgtgcggggatgaccctttctcttgtcygggcagggccagttcaactttgtccacgtgatcgtcaccccgctggactacgagtgcaacctggtgtccctgcagtgcaggaaaggtagggccgggtggg

SEQ ID NO: 38192 - DNA, 201 bp, Homo sapiens
ggtcagtctagctaaggctgctcaagtgtgttgacccttcccgagcagcctttggtggacgcctttccctctggctgcagcactggaaagtggcggccctrggcatggtgccgaggcccaggctccattcccagtactcccgggtccccagccccagcccaccttgctccgggacatccggaagagaaaaaggatggccag

SEQ ID NO: 38193 - DNA, 201 bp, Homo sapiens
tgggggttgagccctgtgtgccacctgctggctgtgtagccctgggcaagctgctcggtctctctgagcctcaggagtcccccatgtaagtcaggatagcygggcgcctccatgtggagatgtagctcagggtggatgacagcatcaatgacccacagtgacagggacgtcaggtgcttcccacatgcccgcttgccctgt

SEQ ID NO: 38194 - DNA, 201 bp, Homo sapiens
ctgcagctcagccaccagcaggcgccggaagcgcaaaagggctgcgtcgcctagaaggcagggagggccgcactgcaggaggccacggggcaggaccaccytgcccaacctcccacggagtgggaacatggaacgaggccttactcgcggccagcacctccttctccaccaggcccccgttggcctccgtctccaccgaaa

SEQ ID NO: 38195 - DNA, 201 bp, Homo sapiens
cctgggcaagctgctcggtctctctgagcctcaggagtcccccatgtaagtcaggatagccgggcgcctccatgtggagatgtagctcagggtggatgacrgcatcaatgacccacagtgacagggacgtcaggtgcttcccacatgcccgcttgccctgtggcttggagagagggtgccatggcagcggggagaggtggc

SEQ ID NO: 38196 - DNA, 201 bp, Homo sapiens
tcaggcagggctctgtgtgccacagtcacagtcctttgagcggtcggtgcagctcctcgaccagatcccatcatacgacacccacaagatcgccgtcctgwatgttggagaaggccaggtgaggctgcggggccggcctaggtgcctggacagggccagctgggcctcagcctgcagtgggtagggagtctgggcccccaa

SEQ ID NO: 38197 - DNA, 201 bp, Homo sapiens
ctggcagtgacgggtttggacacactgtcctgcggcgggagggggaggtgagtgggagatgtagattcggcgtcctcgcaaactgccgccgcttctccccyagctgactttgtcctgcagtggatggatgttggcttgtcctcggaattccttctggtgctggtgaacttggtcaaattcaatagctgttacctcgacgag

SEQ ID NO: 38198 - DNA, 201 bp, Homo sapiens
accctttctcttgtccgggcagggccagttcaactttgtccacgtgatcgtcaccccgctggactacgagtgcaacctggtgtccctgcagtgcaggaaakgtagggccgggtggggccctgcagtgcaggaaaggtagggccgggtggggccctgcagtgtggcgccaagagccctgggcctggcgtgaccaccaagtct

SEQ ID NO: 38199 - DNA, 201 bp, Homo sapiens
gcctcggttttttgcacttcatgccctggggatgtttccctgctgccaggatggagtgccagcccccttctcatctcaggtttaatcagtacatcgtgtgwctggcccatcacgtcatagccatgtggttcatcaggtgccgcctgcccttccggaaggattttgtccctttcatcactaaggtgggctcagggccggtga

SEQ ID NO: 38200 - DNA, 201 bp, Homo sapiens
tgagaaggcctcagctggcacccgggttcctgtgcaggagaagacgaacctggcggcctatgtgcccctgctgacccagggctgggcggagatcctggtcyggaggcccacaggtactgggcggggctggcctgagcgccatctttctgccagtcacccacagagctgtggacactcaggggcgattgcagacttggccct

SEQ ID NO: 38201 - DNA, 201 bp, Homo sapiens
gctgtccctctggtcaggagaaggctggttctcggaggccacgtcagggccagggcctggcccagccccacatccagcagccccgtctgtgtcctcccagwctccgccgtggtcatggaggagggaagtccgggcgaggttcctgtgctggtggagcccccagggttggaggacgttgaggcagcgctaggcatggacagg

SEQ ID NO: 38202 - DNA, 201 bp, Homo sapiens
tccgactcggccccatcacgcaggggcaagagagtagagagggacgccttaaagagcagagccacagcctccaatgcagagaaagtgccaggcatcaaccscaggtgggcctcttgcttccgggcggggctcctgacacctctcctgcgggaacctggtgcctcacttgccccaggccgagcgggctggggtggggtcctc

SEQ ID NO: 38203 - DNA, 201 bp, Homo sapiens
tggtctgctacaactgcctgccggctgagagcctcccgctgttcatcgttaccctctgtcgcaccatcaacgtcaaggagctctgcgagccttgctggaasgtggggtttctgaaactgctctggaaggttcctgagagcacatggatgggacaagggccatcctgtctcccatgaatggttgtctgattcttggggtggc

SEQ ID NO: 38204 - DNA, 201 bp, Homo sapiens
ggtggtgtcctatgagatcgtcctgtccatcaccaggctcatcaagaagtataggaaggagctccaggtggtggcgtgggacattctgctgaacatcatckaacggctccttcagcagctccaggtggggtgggggcaggagctccggggagcaccgggaacccagacaggcaggctcggcccactcagaagatggtacct

SEQ ID NO: 38205 - DNA, 201 bp, Homo sapiens
ggggacacagcagggcccaggcatctggcagcaggaccaccgagcggccctaagcccaggcaagagcacagagcagagtgcagggtcctctggggtcccargcccttgctgccccacgcactcctcaccccagttcctgctatgagctggaagggtgggagccaggtgcacagggacagcctgatgggtgcccgagggcca

SEQ ID NO: 38206 - DNA, 201 bp, Homo sapiens
tcttttgacaggagtcctccctcctgaacctgatctcctatagagcgcagtccatccacccggccaaggacggctggattcagaacctgcaggcgctgatsgagagattcttcaggtagggggtcctctgtagccttgcctggcacctggagcctggccctgtctctgtctggggcccacccgggctgggtctcaggatgc

SEQ ID NO: 38207 - DNA, 201 bp, Homo sapiens
tccgtgacagctcctgcttcacatgggtagaggagagacggcaaacgtcggggctcccaggacttcgcggcggcagtcctaacccgtgcactgagtcgggyggggcgggcggcagcgtctgagtagagagctctctagaccaggcctggtgtctcccgggctttcctaggtgcctgtttgcgagctggtcagctgggctgt

SEQ ID NO: 38208 - DNA, 201 bp, Homo sapiens
catgagggccacgcttgctgctgccgccgggcacagcccagcaccagctcacattggtgcccgtggccagctgcccccaaaagggcacagaggacccggcygccacgaagctgcctccgggctcgctggccctgatgctgaggccactcacaggcacctgcacatccacttccacggtggcgttggctgagcccagcgggt

SEQ ID NO: 38209 - DNA, 201 bp, Homo sapiens
gcggtggcgcggcgcggggtaagtggcggtccccacggggcaagtggcggtccccacggggcagcggcctagagaggcggaccccgcagtgtccgggtccygggccctcacccgcgcccactgcaacccgactccggagctccgagcatcccttagttttaagtcatggcgggtgcgaacgggtctctgctgcaggcggct

SEQ ID NO: 38210 - DNA, 201 bp, Homo sapiens
gccggcctcccagttcctgggcagtgccacttctccaggaccacggactgcaccagccgcgaaacctgagaaggcctcagctggcacccgggttcctgtgyaggagaagacgaacctggcggcctatgtgcccctgctgacccagggctgggcggagatcctggtccggaggcccacaggtactgggcggggctggcctga

SEQ ID NO: 38211 - DNA, 201 bp, Homo sapiens
ctggtggttttgcatcaggtaagtggtggtcaccagtcctctgccctcttcttcagggggccatggtcttcgagttggcgccctggacgtgccggcctccyagttcctgggcagtgccacttctccaggaccacggactgcaccagccgcgaaacctgagaaggcctcagctggcacccgggttcctgtgcaggagaagac

SEQ ID NO: 38212 - DNA, 201 bp, Homo sapiens
aagcagccgcagggcacaggcagggcaggcccaagtgccctccagctgggctggcaagtggggcagccatgacgaggcgttggcggagaggtacggggccyggggaccagggtggccgggagccggcgagcagtgcaggagggcgccagggccagcgtcgtgctgcaagccaacgaggtcaccagggagcatgaggacatc

SEQ ID NO: 38213 - DNA, 201 bp, Homo sapiens
cctgagcctcttcgggcccagtgcgtggtctgtctgttgctgccgggggactgatgatggggtttctggcagtgacgggtttggacacactgtcctgcggsgggagggggaggtgagtgggagatgtagattcggcgtcctcgcaaactgccgccgcttctcccccagctgactttgtcctgcagtggatggatgttggct

SEQ ID NO: 38214 - DNA, 201 bp, Homo sapiens
ctgctcagaagggccgtccactctcacaggctctcctgggtttcccccactcaggccttgtcctcagtctctgagcacaaggctgtctgccctgcaccgaktgcaggggtcgggcaggagctgtgtcatcccctgctctgcgccacccgctgtgccaggtcccgacacacagcagttgctccccatacgccgctctgcggt

SEQ ID NO: 38215 - DNA, 201 bp, Homo sapiens
acctggcaccctgaccctggtcacggcctctccctccagcaggatacagacgtccctcaccagtgccagcttggggtctgcagatgagaactccgtggccyaggctgacgatagcctgaaaaacctccacctggagctcacggaaacctgtctggacatgatggctcgatacgtcttctccaacttcacggctgtcccgaa

SEQ ID NO: 38216 - DNA, 201 bp, Homo sapiens
cctgtggagggcagccctccctcagagctgagccttcccccttccccgagcagctgcagggacagaggcctgcgctgggcaggctcccccggctgagaacrgggctccatagcccttgacgctgtgcagccacaaagcagagcctcagatgctagcttccgcctctgtctctagggtccagaaggccctgtcctgacgcct

SEQ ID NO: 38217 - DNA, 201 bp, Homo sapiens
tctactccttcatgtcccagctgctcagaagggccgtccactctcacaggctctcctgggtttcccccactcaggccttgtcctcagtctctgagcacaasgctgtctgccctgcaccgagtgcaggggtcgggcaggagctgtgtcatcccctgctctgcgccacccgctgtgccaggtcccgacacacagcagttgctc

SEQ ID NO: 38218 - DNA, 201 bp, Homo sapiens
gtgctgggcctccggtgtcaccaggacagagcctgtgtctgtgttgggatgtgggtgtgtgcacatcagcaggtggccttttctgagtgcctgtggtgctrgacgtgggtctgagcaggtgggacgccgcctgtcctgggcctgcacgagcttggctctggctttcaccatcctcttcctgacaggcctttgacttcctgt

SEQ ID NO: 38219 - DNA, 201 bp, Homo sapiens
gccacttctactccttcatgtcccagctgctcagaagggccgtccactctcacaggctctcctgggtttcccccactcaggccttgtcctcagtctctgakcacaaggctgtctgccctgcaccgagtgcaggggtcgggcaggagctgtgtcatcccctgctctgcgccacccgctgtgccaggtcccgacacacagcag

SEQ ID NO: 38220 - DNA, 201 bp, Homo sapiens
ggggacaccaggctctgtgagctccgaggcaagggagggaggaggctgtgggtgctgggcctccggtgtcaccaggacagagcctgtgtctgtgttgggaygtgggtgtgtgcacatcagcaggtggccttttctgagtgcctgtggtgctggacgtgggtctgagcaggtgggacgccgcctgtcctgggcctgcacgag

SEQ ID NO: 38221 - DNA, 201 bp, Homo sapiens
cctggtcggccacttctactccttcatgtcccagctgctcagaagggccgtccactctcacaggctctcctgggtttcccccactcaggccttgtcctcastctctgagcacaaggctgtctgccctgcaccgagtgcaggggtcgggcaggagctgtgtcatcccctgctctgcgccacccgctgtgccaggtcccgaca

SEQ ID NO: 38222 - DNA, 201 bp, Homo sapiens
gctctggtcccttgctagccgtaattagctttctgaaacccagtctccagagacagtcccgttctgagttcctggggttgggactaaagcataccaacatkggggcacagctcagcctgttcccaggggcagagggagcccccgcagaggcccagagcccagggacagagggaggcctttgcagaggcccagagcccaggg

SEQ ID NO: 38223 - DNA, 201 bp, Homo sapiens
gtgttcactagaggagagccacaagcagggattctgggtcaggtgcaggcctagggcttagtgtgcacttgtggttctgagactgtcccatgacttcctgycagcattccggcagctctagtgggactccctcctggtccaggtgaggccaccattgctgccctggcttgctgctgtcctctcagcccccagtctgtcacc

SEQ ID NO: 38224 - DNA, 201 bp, Homo sapiens
tccgccacatcaagcggctccgccagcgggtagggaatatggggctccctcagcggggtgtgctggctgcccaagctgtggggcgggtgtgtgggcagagyggttgccacgcctcccagacttactgcccaagccgcctctgccttcagatctgcgaggaagccgcctactccaaccccagcctacctctggtgcaccctc

SEQ ID NO: 38225 - DNA, 201 bp, Homo sapiens
gtgggagagcagtgagacctggacctctcatgctcagatctgctaagaggagagtgattgctacctctgcagcagctcatctgaaacgtgctggccgtacrctaccaaagataggtgtaaagaacaggtgtccttagccgggcgcagtggttcacgcctgtaatcccagcactttgggaggccaaggtggatggatcacct

SEQ ID NO: 38226 - DNA, 201 bp, Homo sapiens
tcaagcggctccgccagcgggtagggaatatggggctccctcagcggggtgtgctggctgcccaagctgtggggcgggtgtgtgggcagagcggttgccaygcctcccagacttactgcccaagccgcctctgccttcagatctgcgaggaagccgcctactccaaccccagcctacctctggtgcaccctccgtcccata

SEQ ID NO: 38227 - DNA, 201 bp, Homo sapiens
agcgggtagggaatatggggctccctcagcggggtgtgctggctgcccaagctgtggggcgggtgtgtgggcagagcggttgccacgcctcccagacttastgcccaagccgcctctgccttcagatctgcgaggaagccgcctactccaaccccagcctacctctggtgcaccctccgtcccatagcaaagcccctgcac

SEQ ID NO: 38228 - DNA, 201 bp, Homo sapiens
gatgggggacacagcagggcccaggcatctggcagcaggaccaccgagcggccctaagcccaggcaagagcacagagcagagtgcagggtcctctggggtyccaggcccttgctgccccacgcactcctcaccccagttcctgctatgagctggaagggtgggagccaggtgcacagggacagcctgatgggtgcccgagg

SEQ ID NO: 38229 - DNA, 201 bp, Homo sapiens
cccacacctggctatgaggtgggccagcggaagcgcctcatctcctcggtggaggacttcaccgagtttgtgtgaggccggggccctccctcctgcactgrccttggacggtattgcctgtcagtgaaataaataaagtcctgaccccagtgcacagacatagaggcacagattgcagtcagacagctcttttattgactt

SEQ ID NO: 38230 - DNA, 201 bp, Homo sapiens
tgcccagagccccacacacagcaggggtgacaggtgccaggactcggcaggacacagggtagagagcccagtcccagggcacagcaccaacagggcctggrccacgctccagagggagtccacacaggaagacacgagctgcggggaaggcgacaccagtgagggcgtacagctgagctgagctgagctaagacgccctcc

SEQ ID NO: 38231 - DNA, 201 bp, Homo sapiens; identical to SEQ ID NO: 36331

SEQ ID NO: 38232 - DNA, 201 bp, Homo sapiens
cgttcccacctgctgtattcttggaaagagtctgtgaaggattggtgttaattcttccttaactgcttagaaaaattctatcgtgaaggctctgagcctgrgcttttctttgtgggattttttttttttttttttggagacggagtcttgctccgttgcccaggatggagtgcagtggcgcaatctcggctcactgcaagc

SEQ ID NO: 38233 - DNA, 201 bp, Homo sapiens
gccctggggatgtttccctgctgccaggatggagtgccagcccccttctcatctcaggtttaatcagtacatcgtgtgtctggcccatcacgtcatagccrtgtggttcatcaggtgccgcctgcccttccggaaggattttgtccctttcatcactaaggtgggctcagggccggtgaaggctgtgtctctcggtaggcc

SEQ ID NO: 38234 - DNA, 201 bp, Homo sapiens
ccaggaagagtgcaaagccgtggggtggccgtacgcggggcacacgtgcgctcacaggcgtcacagccgggctctctaccagggtgtcatcttcatccggstgcagccgcttggccaccagtgagaagtacagggcttccagcaagacctggggagggggtggcttcagaggggtcccccgtgatggaggcctgtagccta

SEQ ID NO: 38235 - DNA, 201 bp, Homo sapiens
ggcccaagtgccctccagctgggctggcaagtggggcagccatgacgaggcgttggcggagaggtacggggcctggggaccagggtggccgggagccggcragcagtgcaggagggcgccagggccagcgtcgtgctgcaagccaacgaggtcaccagggagcatgaggacatcctggccgtggagggtgacctgtggaga

SEQ ID NO: 38236 - DNA, 201 bp, Homo sapiens; identical to SEQ ID NO: 36294

SEQ ID NO: 38237 - DNA, 201 bp, Homo sapiens
gcccggtgccatctgacagaatgtcctagaatgctggatatatgggacatctgcaccgtccgtgatggcagcccctcgcgacgtgtgccactgaacacttracagcagactggtgcagctaaggaacagagttttaaatttcatattttcttttttagatggagtctcgctgtcacccaggctggagtgcaatggcgcaat

SEQ ID NO: 38238 - DNA, 201 bp, Homo sapiens
cagagcccggtgccatctgacagaatgtcctagaatgctggatatatgggacatctgcaccgtccgtgatggcagcccctcgcgacgtgtgccactgaacrcttgacagcagactggtgcagctaaggaacagagttttaaatttcatattttcttttttagatggagtctcgctgtcacccaggctggagtgcaatggcg

SEQ ID NO: 38239 - DNA, 201 bp, Homo sapiens
agcctcttcgggcccagtgcgtggtctgtctgttgctgccgggggactgatgatggggtttctggcagtgacgggtttggacacactgtcctgcggcgggrgggggaggtgagtgggagatgtagattcggcgtcctcgcaaactgccgccgcttctcccccagctgactttgtcctgcagtggatggatgttggcttgtc

SEQ ID NO: 38240 - DNA, 201 bp, Homo sapiens
cggcactgctccagttgccggggccagggttcttggagagcacatcctcaccgctgtcccctctgctggtgacagcacgcagtggaagcactctggaaggyggtcgcggatctgttgcagccggagcggccgctggaggcccggcacgcggtgctggctctgctgaaggccatcgtgcaggggcaggtaaggcccagggcg

SEQ ID NO: 38241 - DNA, 201 bp, Homo sapiens
agctctgagccgttccctgtacgaagcctgtggtcatctcaggctgcaggagacacaggagatacgagctttggaggtggggctctcagtcacaagccccygttgttcctccctgtcctccgctcacggcactgctccagttgccggggccagggttcttggagagcacatcctcaccgctgtcccctctgctggtgacag

SEQ ID NO: 38242 - DNA, 201 bp, Homo sapiens
agagagagtcctggtggtcctgggtttgaaggtcgtgtgttttgaagcacgcactctagagcagccgccccggcccctgctccgggacaagggtgctgtcytaggactgcgttttcacctcctgcgccgtggtgagctgcgtcctctctctgcagaccaagctgtacaccctgcctgcaagccacgccacgcgtgtgtatg

SEQ ID NO: 38243 - DNA, 201 bp, Homo sapiens
ctgagctgagctaagacgccctccccggccgcgcagtcacctaccaggatggccagctgggcgtaggctaccccgagcaccaccaggcccaaggtgacccycaggagctctggcagagctcggcataatgtcttgccaaagacggaccactggcgcacgaagcgtagctgctgggcagcctgcggacgagaaatctgtctg

SEQ ID NO: 38244 - DNA, 201 bp, Homo sapiens
gtgggaaggaagcctgggtgtcctctcctgtggggaggagctggggtaggacgggcgtgagccgtctccctctccaccaggtctccctgcaggtgctggaygccgtggtctgctacaactgcctgccggctgagagcctcccgctgttcatcgttaccctctgtcgcaccatcaacgtcaaggagctctgcgagccttgct

SEQ ID NO: 38245 - DNA, 201 bp, Homo sapiens
acatggatgggacaagggccatcctgtctcccatgaatggttgtctgattcttggggtggccagacaatggcctgttgagggacggccagtgtcattttcscaggcagttgagctgaggtcagggttttggtggcattttgagaaccctgctgcctctgtctttgggaggagatggtggcgagctggccggaccttgggtg

SEQ ID NO: 38246 - DNA, 201 bp, Homo sapiens
caggcagggctctgtgtgccacagtcacagtcctttgagcggtcggtgcagctcctcgaccagatcccatcatacgacacccacaagatcgccgtcctgtrtgttggagaaggccaggtgaggctgcggggccggcctaggtgcctggacagggccagctgggcctcagcctgcagtgggtagggagtctgggcccccaac

SEQ ID NO: 38247 - DNA, 201 bp, Homo sapiens
gagctgacaggtgtctagcagtgcaaccaggcagtagccgagatcagccttcagcacacgctgtgtgcggggatgaccctttctcttgtccgggcagggcyagttcaactttgtccacgtgatcgtcaccccgctggactacgagtgcaacctggtgtccctgcagtgcaggaaaggtagggccgggtggggccctgcagt

SEQ ID NO: 38248 - DNA, 201 bp, Homo sapiens
gactcggccccatcacgcaggggcaagagagtagagagggacgccttaaagagcagagccacagcctccaatgcagagaaagtgccaggcatcaaccccargtgggcctcttgcttccgggcggggctcctgacacctctcctgcgggaacctggtgcctcacttgccccaggccgagcgggctggggtggggtcctcgcc

SEQ ID NO: 38249 - DNA, 201 bp, Homo sapiens
gcttctggtcatccttcaggtgggtgttctgcacgaggcctctgctcccggggcgcgcatggctagcgtccaccagctgcatctgcgttgtgttggagtcygttccccagcgggacccacaccctccctggatttgctgagggtgcggtggtctcagcaggcagcagaaccttcctcctgctcttgtggagggatggatgc

SEQ ID NO: 38250 - DNA, 201 bp, Homo sapiens
ggagccaggggcccctccgtggcctggccagccccccaaggaagctgtgtctctggcagttgcgctctaaggcatcaggcctaggggtcgctccagaatgmctgtcttccccgacgccaatcccaggcaggggccccggggtctgcgcctgctgtccctacactctcccacactctcctgtcattcagggatgcaggtggg

SEQ ID NO: 38251 - DNA, 201 bp, Homo sapiens
gttccccagcgggacccacaccctccctggatttgctgagggtgcggtggtctcagcaggcagcagaaccttcctcctgctcttgtggagggatggatgcragaggccccgttgtacgccctgaccagagcttgtctctgtgctcctgagtcagggccggaaccatgtaccatcctcagcgtggcgcttgccctcgtcacc

SEQ ID NO: 38252 - DNA, 201 bp, Homo sapiens
agcacgcatgcagcagatgtgacgtcccctcccaggctgcactcacctcgttcagcacggtgaccagggccaacgagtactcgatgacgtgctggggatcrgcctgccgcagcagccctgggagcacactagcggtgagcccgtgcagccagactgtgagccccgttgcgctgccgttgggctctgggagggtgatggcca

SEQ ID NO: 38253 - DNA, 201 bp, Homo sapiens
tccagcctgggcgacagagcaagactcgatctcaaaaaaaaaaaaaaaaaaaaaaaaggtgtttgtggtagaaagtgttctcacggctgctgactcagaaycatgagcctgtgtgtaagtcctggccttctcttcaaaggtgatggcccgctccctctccccacccccggagctggaagaaagggatgtggccgcatactc

SEQ ID NO: 38254 - DNA, 201 bp, Homo sapiens
ccctgtgggctgtggctgccctggccaggccctcacctgggtgcccaccatcccctccctgtgcagtttcgtgttcctgcagctctaccattcccccttctttggcgacgagtcaaacaagccaatcctgctgcccaatgaggtaggcgtggcctccctctcctgcatccgctggagctgtgtggctcgggtgaatggtgg

SEQ ID NO: 38255 - DNA, 201 bp, Homo sapiens
tccctgtgggctgtggctgccctggccaggccctcacctgggtgcccaccatcccctccctgtgcagtttcgtgttcctgcagctctaccattcccccttctttggcgacgagtcaaacaagccaatcctgctgcccaatgaggtaggcgtggcctccctctcctgcatccgctggagctgtgtggctcgggtgaatggtg

SEQ ID NO: 38256 - DNA, 201 bp, Homo sapiens
gccattctcctgcctcagcctcccgagtagctgggaccacaggcgcccgccaccacgcctggccaatttttttgtatttctagtagagatggggtttcacygtgttagccaggatggtctcaatctcctgacctcgtgatctgcccgccttggcctcccaaagtgctgggattacaggcgtgagccaccgcgcccagccat

SEQ ID NO: 38257 - DNA, 201 bp, Homo sapiens
ctcctgcagcgcgagatggtctactgcctggagcagggcctcatccaccgctgtgccagccagtgcgtcgtggccttgtccatctgcagcgtggagatgcytgacatcatcatcaaggcgctgcctgttctggtggtgaagctcacgcacatctcagccacagccagcatggccgtcccactgctggagttcctgtccagt

SEQ ID NO: 38258 - DNA, 201 bp, Homo sapiens
gtagggcgccccacagccgcagtgcccagagccccacacacagcaggggtgacaggtgccaggactcggcaggacacagggtagagagcccagtcccaggrcacagcaccaacagggcctgggccacgctccagagggagtccacacaggaagacacgagctgcggggaaggcgacaccagtgagggcgtacagctgagct

SEQ ID NO: 38259 - DNA, 201 bp, Homo sapiens
ggggctgcggtggcatttctaggcctttccaggcagttgctttgcagctgggggtgaggtttggggccctttgtaggctttagtcttttttttttttttttgagaaggagttctgctctttctgcttggctgactgcaatctccgcctcccggattcaagtgattctattgcctcagactcctgagtagctgggattacag

SEQ ID NO: 38260 - DNA, 201 bp, Homo sapiens
gggggctgcggtggcatttctaggcctttccaggcagttgctttgcagctgggggtgaggtttggggccctttgtaggctttagtcttttttttttttttttgagaaggagttctgctctttctgcttggctgactgcaatctccgcctcccggattcaagtgattctattgcctcagactcctgagtagctgggattaca

SEQ ID NO: 38261 - DNA, 201 bp, Homo sapiens
catcctcccaccctcacagcagcccgctgggagccccatcactgtccccctttccagatggggaaactgaggctcagagcccggagaccagggcccaccascccaggctcacagcagcacccacccacggggcctgtgggtaccggcagggatccccgtgcaggccacctcccgtatggcgtgcccaggagtgtccggagg

SEQ ID NO: 38262 - DNA, 201 bp, Homo sapiens
ctacagcctcaacctgccaggctcacgtgatcctcctactttagcctctcaagtagctgggactacaggcatgcagcaccacgcctggctaagttttgtawtttttgtcgtgacagggtctcactgtgttgcccaggctagtctgaaactcctgggctgacgtgaccctctcccctctgccacccgaagtgctgagattac

SEQ ID NO: 38263 - DNA, 201 bp, Homo sapiens
gtcatctacaacaccaggacaataatagtacctgactcactggagtaatgtgaagcttaaatgaattatctcagtgcttagaatcgtatgtggccgggcgyggtggctcgcacccgtcatcccagcacttcgggaggccaaggcaggcggatcacctgaagtcaggagtttgagaccagcctgatcaacgtggtgaaaccc

SEQ ID NO: 38264 - DNA, 201 bp, Homo sapiens
  misc_feature (1)...(201): n = A,T,C or G, or insertion/deletion polymorphism (see Tables 1-2)
cacggacgagtccaggcagctgtcgatgtccagcacctgctgcccggcaggtgtggggctcgggctcccagccacctgcaggacgagggcagtggtcagcnggcggcagctcagacctgctcaggacagggatgagaagccacctcctcagcagacaggacagagcccggtgccatctgacagaatgtcctagaatgctgg

SEQ ID NO: 38265 - DNA, 201 bp, Homo sapiens
ccatgagcctgtgtgtaagtcctggccttctcttcaaaggtgatggcccgctccctctccccacccccggagctggaagaaagggatgtggccgcatactmggcctccttggaggatgtgaagacagccgtcctggggcttctggtcatccttcaggtgggtgttctgcacgaggcctctgctcccggggcgcgcatggct

SEQ ID NO: 38266 - DNA, 201 bp, Homo sapiens
tatagggcagcagccaggcggggccagcagcgggactggggctgggggcagggcttatgcctgccagcccctgacacgcattgtgtctcgcagctgatgcsgaacctccttggcacccacctgggccacagcgccatctacaacatgtgccacctcatggaggacaggtgagtgtggtgggtggggcgcagggcagtggag

SEQ ID NO: 38267 - DNA, 201 bp, Homo sapiens
acgggtcttcaccccttcccagcacccttgccaatcctggagcaggagcagcaacagcagagggtgtggccaggcctggaggctgcccctccacacccgtmacaggtggggccacgtcccagggctgtgggcagcagggccagcctgccggcccgaggtagctgacacgtgtctcatgctgcagcgggtctgcccgccacc

SEQ ID NO: 38268 - DNA, 201 bp, Homo sapiens
tgctgagaggagccgtgttttttgtgggcatggctctctggggagcccaccggctctattctctcaggaactcgccgacatctgtgttgccatcattttascaggtaaggcggtttctgtgtgcagtgagctggcaggaacgggagagctcccctcacgcctgcccacccatcccactgggggtcctgctgcgggggctgc

SEQ ID NO: 38269 - DNA, 201 bp, Homo sapiens
gcaggggagggagctcccacctgttgtccagccagttgtgcagctgcaggaagcgcagccggtcgcggctctcctccaggctcaggcccagctcctgcacktagcccccgctgtcatacacggcacaggagccccaggaccatgccctgccggagaggggtggcgtgggtgccgcaccccagcccttccggcaccccggag

SEQ ID NO: 38270 - DNA, 201 bp, Homo sapiens
gaccttggacagcccggagctcaggaccatcgtccatgacctgttgaccacggtggaggagctgtgtgaccagaacgagttccacgggtctcaggagagakactttgaactggtggagagatgtgcggaccagaggcctgtgagaccccctcctgggtggggcctttgggctttggctggtggggaggggccgggtgctgg

SEQ ID NO: 38271 - DNA, 201 bp, Homo sapiens
ctgctgtcctctcagcccccagtctgtcacctggtgggagttaaagggacctgctggggtttgaggaagctctgagccgttccctgtacgaagcctgtggycatctcaggctgcaggagacacaggagatacgagctttggaggtggggctctcagtcacaagcccccgttgttcctccctgtcctccgctcacggcactg

SEQ ID NO: 38272 - DNA, 201 bp, Homo sapiens
cttttgacaggagtcctccctcctgaacctgatctcctatagagcgcagtccatccacccggccaaggacggctggattcagaacctgcaggcgctgatgkagagattcttcaggtagggggtcctctgtagccttgcctggcacctggagcctggccctgtctctgtctggggcccacccgggctgggtctcaggatgcc

SEQ ID NO: 38273 - DNA, 201 bp, Homo sapiens
agccggagcggccgctggaggcccggcacgcggtgctggctctgctgaaggccatcgtgcaggggcaggtaaggcccagggcgacgctgggatgggtgacktcaggctgcccactgactgtcctgtccctgctgggccgtgtttggactcctgcctcggtgagttgctgggcacagggtctaggggctgatgggctctgga

SEQ ID NO: 38274 - DNA, 201 bp, Homo sapiens
cctgcctgcaagccacgccacgcgtgtgtatgagatgctggtcagccacattcagctccactacaagcacagctacaccctgccaatcgcgagcagcatcyggctgcaggtatggtggctggggttgcgcagccagttcctgggggcccagccaggtatccccgtctcggcaggtgtggttcctggaagctgcagagacgg

SEQ ID NO: 38275 - DNA, 201 bp, Homo sapiens
cagccggagcggccgctggaggcccggcacgcggtgctggctctgctgaaggccatcgtgcaggggcaggtaaggcccagggcgacgctgggatgggtgaygtcaggctgcccactgactgtcctgtccctgctgggccgtgtttggactcctgcctcggtgagttgctgggcacagggtctaggggctgatgggctctgg

SEQ ID NO: 38276 - DNA, 201 bp, Homo sapiens
gcagccacaaagcagagcctcagatgctagcttccgcctctgtctctagggtccagaaggccctgtcctgacgcctcctctcctcgcaggagtctgactgraaggtgctgaagctggttctgggcaggctgcctgagtccctgcgctataaagtgctcatctttacttccccttgcagtgtggaccagctgtgctctgctc

SEQ ID NO: 38277 - DNA, 201 bp, Homo sapiens
tccccggccgcgcagtcacctaccaggatggccagctgggcgtaggctaccccgagcaccaccaggcccaaggtgacccccaggagctctggcagagctcrgcataatgtcttgccaaagacggaccactggcgcacgaagcgtagctgctgggcagcctgcggacgagaaatctgtctgcttgcagccctggggtgtgcg

SEQ ID NO: 38278 - DNA, 201 bp, Homo sapiens
gctgtggctgccctggccaggccctcacctgggtgcccaccatcccctccctgtgcagtttcgtgttcctgcagctctaccattcccccttctttggcgaygagtcaaacaagccaatcctgctgcccaatgaggtaggcgtggcctccctctcctgcatccgctggagctgtgtggctcgggtgaatggtggggggccca

SEQ ID NO: 38279 - DNA, 201 bp, Homo sapiens
ttcctgggcctgcgttcccagggcctccccagcccctctggctaccccgtgacctggccgctggggagaggtttcatgcctggatttggtcatcagctttsaggcccaaagacactggagcggctccgaggcgccccagaaggcttctccagaactgacttgcacctggccgtggttccagtgctgacagcattaatctct

SEQ ID NO: 38280 - DNA, 201 bp, Homo sapiens
acgtacgtgcagcccaccgctgcaggcagaaggggtggtgagggggcgcaaccctctgccctgtcagccccacttctgcctgcaggccccgtcccctcggscatgggacccatccccagcccgcccacaccccgctcaacactcacccctcgcttggagccgctgctgcaattgaggcagcggccctccaagtacacgtag

SEQ ID NO: 38281 - DNA, 201 bp, Homo sapiens
cggtggagcactcgaggttggcgaggggtaggcgaggctgcctctgctgcaagcgggtggggcctgaggtgtcctgtctcctgcagcgcgagatggtctastgcctggagcagggcctcatccaccgctgtgccagccagtgcgtcgtggccttgtccatctgcagcgtggagatgcctgacatcatcatcaaggcgctgc

SEQ ID NO: 38282 - DNA, 201 bp, Homo sapiens
ccggggccagggttcttggagagcacatcctcaccgctgtcccctctgctggtgacagcacgcagtggaagcactctggaaggcggtcgcggatctgttgyagccggagcggccgctggaggcccggcacgcggtgctggctctgctgaaggccatcgtgcaggggcaggtaaggcccagggcgacgctgggatgggtgac

SEQ ID NO: 38283 - DNA, 201 bp, Homo sapiens
tgcccttagcctgtcgcctcctggacacacctcccgtcgggctggagagtcccacgcggggcacagaggagaggaggtgcccggggctctgcatgccatgrgagccaagcccgggctgggacactcactgtccggctctccagccagccatgtagtactactaatgcctcaacctctctgtgcctcagtttccccatctgt

SEQ ID NO: 38284 - DNA, 201 bp, Homo sapiens
agggtgcggtggtctcagcaggcagcagaaccttcctcctgctcttgtggagggatggatgcaagaggccccgttgtacgccctgaccagagcttgtctcygtgctcctgagtcagggccggaaccatgtaccatcctcagcgtggcgcttgccctcgtcacccagcacagcacctgggaagtaagggtggccctccattc

SEQ ID NO: 38285 - DNA, 201 bp, Homo sapiens
tgcccggccactgtcaccagatggtggccagcgcatcacccactcatgggccaggatggcagaggagatccacagagacggctccagcaggaggccctcayagagatgccctggcctcagaagagccaacagaaagccgggaagggggacgtcgaggctcaggcttggcacaacctccccaaagctcccaaagactctcgg

SEQ ID NO: 38286 - DNA, 201 bp, Homo sapiens
atacccggtccagtcccctcgctgcctgccgtccccatggggccagtaacccaggcaatgctgacccatgatgccctgccctgccctgccaggctggcccrcagagctcaccccggggaaatgaagaaggtgtagggccggtggtcagcaccctggagtgactctgggcggatcctcctgctagccgagcagttgtgctca

SEQ ID NO: 38287 - DNA, 201 bp, Homo sapiens
cgagggggcgggacgctgccggggcggggccctacgagggggcgggacgctgccggggcggggccctgcgagggggcgggacgctgcgagggggcggggcsctgcgaggggtgagacgctgccggggcggggccccgcgagggggcgggacgctgccggtgggaggcgcggggtctggccggggacgggcgtaccgaggtg

SEQ ID NO: 38288 - DNA, 201 bp, Homo sapiens
cccacccaggccctcctcgactctgcagaggctcccaggagcacagggtcactcacaggaaacacaaagcggacatggcttgggggcacgaagaggctggygccgaaggcggtgaggtggcgggtgaggcagacggcctggcggggcgaggtctcctccaggggcagcagcccctctgtccgccacaccatgtcctcctcg

SEQ ID NO: 38289 - DNA, 201 bp, Homo sapiens
ggaagacacgagctgcggggaaggcgacaccagtgagggcgtacagctgagctgagctgagctaagacgccctccccggccgcgcagtcacctaccaggayggccagctgggcgtaggctaccccgagcaccaccaggcccaaggtgacccccaggagctctggcagagctcggcataatgtcttgccaaagacggaccac

SEQ ID NO: 38290 - DNA, 201 bp, Homo sapiens
ggctgaaggcctcgccctgcggcgctgggcccacctccaccccctgcacagtcgagaagccgatccacacgtctaggctcctgggggcgggtgtgggatgscagggggctcagggcactcctccatcctcccaccctcacagcagcccgctgggagccccatcactgtccccctttccagatggggaaactgaggctcaga

SEQ ID NO: 38291 - DNA, 201 bp, Homo sapiens
gcctcccagacttactgcccaagccgcctctgccttcagatctgcgaggaagccgcctactccaaccccagcctacctctggtgcaccctccgtcccatascaaagcccctgcacagactccagccgagcccacacctggctatgaggtgggccagcggaagcgcctcatctcctcggtggaggacttcaccgagtttgtg

SEQ ID NO: 38292 - DNA, 201 bp, Homo sapiens
taccattcccccttctttggcgacgagtcaaacaagccaatcctgctgcccaatgaggtaggcgtggcctccctctcctgcatccgctggagctgtgtggytcgggtgaatggtggggggcccagctctgctgctgggagctcaggcttgcagagggctctggcctaagctccctgtggcagcctgccgtgaccggcctgg

SEQ ID NO: 38293 - DNA, 201 bp, Homo sapiens
gctcggtgctgccgctcgtgcttgggctctgccgccacgtccagggcccgctcgtactggggcaggcagggggcacagcaagctgtcagcagcgcaggagrccggcaggaggccagcagatgcccacgactcccggggtgcagttacgtgctagacgctgtgtgatgcgggcactgacccacaacactgagctgtttcttc

SEQ ID NO: 38294 - DNA, 201 bp, Homo sapiens
cattcccccttctttggcgacgagtcaaacaagccaatcctgctgcccaatgaggtaggcgtggcctccctctcctgcatccgctggagctgtgtggctcrggtgaatggtggggggcccagctctgctgctgggagctcaggcttgcagagggctctggcctaagctccctgtggcagcctgccgtgaccggcctgggtg

SEQ ID NO: 38295 - DNA, 201 bp, Homo sapiens
cccctcggggggtgggggcaggcacctggtgacccgggagaccaggaagcgctgcacggcgggactgtccaccattgccagggcggccccggcccaggccygacactgctcctgcgcctgcagccaggccgccttctccaccaccaggcggtagcagtgcccgttgccagggaagatctccgtgtccgaggggcagagcgg

SEQ ID NO: 38296 - DNA, 201 bp, Homo sapiens
cctgggctctgtggaggactctgcccttagcctgtcgcctcctggacacacctcccgtcgggctggagagtcccacgcggggcacagaggagaggaggtgsccggggctctgcatgccatgggagccaagcccgggctgggacactcactgtccggctctccagccagccatgtagtactactaatgcctcaacctctctg

SEQ ID NO: 38297 - DNA, 201 bp, Homo sapiens
ctcacctggctcccacccccagccctgcagctggagagcccacttgactggacccccacagcctcctcactaagcattttctgtggctctgcatgacccasggcctccacctggggaccacgtgatgcagcccaccgaccacacaaggcacctcttcacatgagagcggaggaggaggggagagaggagaggggagtggag

SEQ ID NO: 38298 - DNA, 201 bp, Homo sapiens
ccggccggtacagctctccacgcaaggcgtggtagcgccagcggagaataacagcccccagccgtagggcgccccacagccgcagtgcccagagccccacwcacagcaggggtgacaggtgccaggactcggcaggacacagggtagagagcccagtcccagggcacagcaccaacagggcctgggccacgctccagaggg

SEQ ID NO: 38299 - DNA, 201 bp, Homo sapiens
gacaggaacggccccaccggccggcgccacctgctcaccagggccggcccagctcccacctccttcctcctgagactccccagccgcaggctctgccccastgcttcagagatctcccaacctatggcccctcggggggtgggggcaggcacctggtgacccgggagaccaggaagcgctgcacggcgggactgtccacca

SEQ ID NO: 38300 - DNA, 201 bp, Homo sapiens
tccaccacggggctgtacctctgcggggggaatggtgtcagcctgggctctgtggaggactctgcccttagcctgtcgcctcctggacacacctcccgtcrggctggagagtcccacgcggggcacagaggagaggaggtgcccggggctctgcatgccatgggagccaagcccgggctgggacactcactgtccggctct

SEQ ID NO: 38301 - DNA, 201 bp, Homo sapiens
tctgcagagctgacaggaacggccccaccggccggcgccacctgctcaccagggccggcccagctcccacctccttcctcctgagactccccagccgcagkctctgccccagtgcttcagagatctcccaacctatggcccctcggggggtgggggcaggcacctggtgacccgggagaccaggaagcgctgcacggcggg

SEQ ID NO: 38302 - DNA, 201 bp, Homo sapiens
tggggaaactgaggctcagagcccggagaccagggcccaccagcccaggctcacagcagcacccacccacggggcctgtgggtaccggcagggatccccgygcaggccacctcccgtatggcgtgcccaggagtgtccggaggctgcccccagctcatgtccacctctgcatctgcagagctgacaggaacggccccaccg

SEQ ID NO: 38303 - DNA, 201 bp, Homo sapiens
gggcgtgtccctctcccccccactgggccgtacccacctccttgaccttgctgaggcccatccagaggcgcagcctgcgcaggaacaactccaccatctcstagtcctggggctcccaggccggccggtacagctctccacgcaaggcgtggtagcgccagcggagaataacagcccccagccgtagggcgccccacagcc

SEQ ID NO: 38304 - DNA, 201 bp, Homo sapiens
tcgatctcaaaaaaaaaaaaaaaaaaaaaaaaggtgtttgtggtagaaagtgttctcacggctgctgactcagaaccatgagcctgtgtgtaagtcctggycttctcttcaaaggtgatggcccgctccctctccccacccccggagctggaagaaagggatgtggccgcatactcggcctccttggaggatgtgaagaca

SEQ ID NO: 38305 - DNA, 201 bp, Homo sapiens
agctgcccgggcgccaccaccttgctgctggcccacagcaccaggcccacgatgggctcctccgccgtgaggttgtacgtggctgagacccagctgactgygttggaggcattgagccggatggagaaggtgccagcatccgggaagaccatggtgacatgagggccacgcttgctgctgccgccgggcacagcccagcac

SEQ ID NO: 38306 - DNA, 201 bp, Homo sapiens
aggagctggacaggatccctggaaggggccccggggtctctgagtcgcgctcagcgggtgcttgtgctctctgcccagctgtgctgaagtcccgagggacrtgtccgctgcttgcgggtcggttcctgaggaattggaagtgtcacgagatgtggccctcgttgggctggcgctcattggcctcccttgtgcctgtgcagg

SEQ ID NO: 38307 - DNA, 201 bp, Homo sapiens
gaaaggttatgcccaccagagacccagggtcctgacggctggaggtccgcagtggggaaggtgggcagaggtgttgctcagatgtccccattcctgtttcstttgcacagaggggttttctggtgcgtcctggtccaccatggccaaaccaacaagcaaagattcaggcttgaaggagaagtttaagattctgttgggact

SEQ ID NO: 38308 - DNA, 201 bp, Homo sapiens
actggccccacaaacccatccggccctgctcaccctcagccgtcttccacatcgccaccctgatgcccaccaaggacgtggacaagcaccgctgcgacaaraagcgccacctgggcaacgactttgtgtccattgtctacaatgactccggtgaggacttcaagcttggcaccatcaaggtgagtgaggggccgtcagtga

SEQ ID NO: 38309 - DNA, 201 bp, Homo sapiens
aggacgtggacaagcaccgctgcgacaagaagcgccacctgggcaacgactttgtgtccattgtctacaatgactccggtgaggacttcaagcttggcacyatcaaggtgagtgaggggccgtcagtgaggctgggccccaggcaggtgcccactgctgtgtcccgggttggtggcaggtcctcctccctgagcttcggtc

SEQ ID NO: 38310 - DNA, 201 bp, Homo sapiens
ggagcagggcctcatccaccgctgtgccagccagtgcgtcgtggccttgtccatctgcagcgtggagatgcctgacatcatcatcaaggcgctgcctgttmtggtggtgaagctcacgcacatctcagccacagccagcatggccgtcccactgctggagttcctgtccagtgagtccccgccctgcctgcgcatgcaccc

SEQ ID NO: 38311 - DNA, 201 bp, Homo sapiens
gttggccagggccccgctgaaagcctcggggatggagaagtggcagccaggccctggggcgccgccatagcacagcaggctccgcgggtccgagcgcttgycctgggccacgatctcctcgcccgccagcgtcaggggctcctcgttgagcacgcgggagcgcatgaggatgcgcatgagggcagaggtcaggttgtaggc

SEQ ID NO: 38312 - DNA, 201 bp, Homo sapiens
gcgctcattggcctcccttgtgcctgtgcaggaggagctgattaactcagtggtcatctcgcagctctcccacatccccgaggataaagaccaccaggtcygaaagctggccacccagttgctggtggacctggcagagggctgccacacacaccacttcaacagcctgctggacatcatcgagaaggtgagagccgttgt

SEQ ID NO: 38313 - DNA, 201 bp, Homo sapiens
gacacagaactcctcgcagtggccctggcgacagcgccgcagcagcagggcgtacaccagcggggcgccagcatcctccgcgtcatgccagcctgagggayggtccccacggcatcacgggagggctccgtgacgtcacagagtcgggggatcccgctgctccccccacgcaggcctgcactcacccgtgcattcgaagtg

SEQ ID NO: 38314 - DNA, 201 bp, Homo sapiens
aggggcgggcggcacccaccgtctggttggtggcctcctccttgcggccggccttccacacggtcaggctgaaggtgtactccacgccagccgccagccgytcccgtggaatggtgaccgtgctgctcccgcggggcccaaagttcagcgcacacccgccagcctccctctgcaggccgagaacaaggggcgacgtggcct

SEQ ID NO: 38315 - DNA, 201 bp, Homo sapiens
tgagctgcgtcctctctctgcagaccaagctgtacaccctgcctgcaagccacgccacgcgtgtgtatgagatgctggtcagccacattcagctccactasaagcacagctacaccctgccaatcgcgagcagcatccggctgcaggtatggtggctggggttgcgcagccagttcctgggggcccagccaggtatccccg

SEQ ID NO: 38316 - DNA, 201 bp, Homo sapiens
agctgcgtcctctctctgcagaccaagctgtacaccctgcctgcaagccacgccacgcgtgtgtatgagatgctggtcagccacattcagctccactacawgcacagctacaccctgccaatcgcgagcagcatccggctgcaggtatggtggctggggttgcgcagccagttcctgggggcccagccaggtatccccgtc

SEQ ID NO: 38317 - DNA, 201 bp, Homo sapiens
ggcccacctcgaagtgtggcctgaaacccgggggcagcacggctccgtagctggagaggctgcccttgtagacacagaactcctcgcagtggccctggcgrcagcgccgcagcagcagggcgtacaccagcggggcgccagcatcctccgcgtcatgccagcctgagggacggtccccacggcatcacgggagggctccgt

SEQ ID NO: 38318 - DNA, 201 bp, Homo sapiens
gtgtcctatgagatcgtcctgtccatcaccaggctcatcaagaagtataggaaggagctccaggtggtggcgtgggacattctgctgaacatcatcgaacrgctccttcagcagctccaggtggggtgggggcaggagctccggggagcaccgggaacccagacaggcaggctcggcccactcagaagatggtaccttggg

SEQ ID NO: 38319 - DNA, 201 bp, Homo sapiens
cattgggccggggctccgagtgtaggtagactgccaggtagggctcaggttcctcagacaggtagtggcctggggcagaacgcgcaggtcacacgcctgcygggaagctcaaccacccgggggacacccacgatggccctcctgagcccaccctctgccacgggcctgaaaggccataggagcctctgcaccagagctggc

SEQ ID NO: 38320 - DNA, 201 bp, Homo sapiens
agatccggcgggcgcccggctgctcctgcggccttgcaggctgtgcagctgctgctccagctggtagacgtcctctgtggcctggttgagtcggtcaaackgggtgagcagggcctcgaacacggcttggaggcgggagggctcaggctcacaccttgtccccagccggcccaggctcacgctcagcccatccagctggct

SEQ ID NO: 38321 - DNA, 201 bp, Homo sapiens
tgggcggatcctcctgctagccgagcagttgtgctcattgggccggggctccgagtgtaggtagactgccaggtagggctcaggttcctcagacaggtagyggcctggggcagaacgcgcaggtcacacgcctgccgggaagctcaaccacccgggggacacccacgatggccctcctgagcccaccctctgccacgggcc

SEQ ID NO: 38322 - DNA, 201 bp, Homo sapiens
gtcgccacccccctcagccttctgaggtctctctcaggccactgccacccggcccccgttgccacaggcagggctcaccctccagaaaccgacggggtagrtgagcttgcccagcgtggcatcatctgtctgcaggatgctgtccaccgtcaggccccgcgcccgcagtcgctgcatggcgcccgccgtcacctggtcttt

SEQ ID NO: 38323 - DNA, 201 bp, Homo sapiens
ccacgggaagatccggcgggcgcccggctgctcctgcggccttgcaggctgtgcagctgctgctccagctggtagacgtcctctgtggcctggttgagtcrgtcaaactgggtgagcagggcctcgaacacggcttggaggcgggagggctcaggctcacaccttgtccccagccggcccaggctcacgctcagcccatcc

SEQ ID NO: 38324 - DNA, 201 bp, Homo sapiens
ccaatgaggtaggcgtggcctccctctcctgcatccgctggagctgtgtggctcgggtgaatggtggggggcccagctctgctgctgggagctcaggcttrcagagggctctggcctaagctccctgtggcagcctgccgtgaccggcctgggtggggcggcctcctgtggacgggcgtctggggctcaggcagggctctg

SEQ ID NO: 38325 - DNA, 201 bp, Homo sapiens
gccaggaaggaggactaagtgctgctggggtggaccttgttcttggcccgaaggggtgtcctgctggggccagtggccaggtccacaccccgactggcccrggcaaggcggctgggcagtgctggccgcaggcccggggatgggccacgggaagatccggcgggcgcccggctgctcctgcggccttgcaggctgtgcagc

SEQ ID NO: 38326 - DNA, 201 bp, Homo sapiens
caggtctatttggcctgctggaaggactgggggacccatggaggatgctgctcccaaactccaggtttcccaggggcctggccactgccggtgagctcacyccctcccaggatactcatccggtttgccaccttccaacttggacggcggaagggcatacacagggcagaggacactggagtgtgcgttctggtgtactgg

SEQ ID NO: 38327 - DNA, 201 bp, Homo sapiens
aggccacgtcagggccagggcctggcccagccccacatccagcagccccgtctgtgtcctcccagactccgccgtggtcatggaggagggaagtccgggcraggttcctgtgctggtggagcccccagggttggaggacgttgaggcagcgctaggcatggacaggcgcacggatgcctacagcagggtgagtgtggctca

SEQ ID NO: 38328 - DNA, 201 bp, Homo sapiens
gtcccctcggccatgggacccatccccagcccgcccacaccccgctcaacactcacccctcgcttggagccgctgctgcaattgaggcagcggccctccargtacacgtaggagctgcggctcacttcgtacacggcctgtgccttgcaggacacacactccaaggacacaatgggcacccggccactccggatcagcacc

SEQ ID NO: 38329 - DNA, 201 bp, Homo sapiens
ccagcgtcctccctgcccgctcggtggatggcagcagtaagcagagccctggggaggctcgcagggctgctgtccctctggtcaggagaaggctggttctyggaggccacgtcagggccagggcctggcccagccccacatccagcagccccgtctgtgtcctcccagactccgccgtggtcatggaggagggaagtccgg

SEQ ID NO: 38330 - DNA, 201 bp, Homo sapiens
gagactgtggcgcccccgctgctgtgcccgcagacgtgcccggcctcagccagctggagcgcaggcagcagagtgcaggccaggcccagacagcagcgggmtgttttcattccagggtgcttggcgggctgggctgccgtggccactgcagagctccagaaaagaacatgtgtgtctccctccaaagtatattccttgctg

SEQ ID NO: 38331 - DNA, 201 bp, Homo sapiens
aacagggtggtcccactgtgggaccacaaccaggtatgactgtgtgagaagcaggctcactaccaggctaccagggagcacaggggagcaggcgccacctygaggcataaacccagagaaacaagacctccaagacggccaggcactggggcacacgccggtaacacagcaccgtgggagctgagacggaaggatcgcctg

SEQ ID NO: 38332 - DNA, 201 bp, Homo sapiens
gggccctgcagtgtggcgccaagagccctgggcctggcgtgaccaccaagtctccccagacatggagggccttgtggacaccagcgtggccaagatcgtgwctgaccgcaacctgcccttcgtggcccgccagatggccctgcacgcaaatgtgagtgggggtgggtccaggcgtgagctggtgggacaggcccaggtgcc

SEQ ID NO: 38333 - DNA, 201 bp, Homo sapiens
ggctgctggaatggatggtcttgtctgcctcagggatcagagtggggctcccggcagagcctgctgggcacccccaccctctgcggggcagggcccggccygggagtgatgccaccctgcctctcccctctccccacagagcaacagcgagctcgccatcctgtccaatgagcatggctcctacaggtacacggagttcct

SEQ ID NO: 38334 - DNA, 201 bp, Homo sapiens
accctgtccacagcccccacacagactcgaggggcccccatctcctgttctgaacccaacagggtggtcccactgtgggaccacaaccaggtatgactgtrtgagaagcaggctcactaccaggctaccagggagcacaggggagcaggcgccaccttgaggcataaacccagagaaacaagacctccaagacggccaggc

SEQ ID NO: 38335 - DNA, 201 bp, Homo sapiens
ctgctggcacgatgacatcatgcaaggtacggcctggcgcctacccgctcctgctgccccaggcctcagggcacggctcccatccagtcctgctaccccaygccctggggcatggccctggcacccccacctgctccagctccccacgcctcaggttccgagcctaacagcgtgggcatggaggcagtgatggggctggtg

SEQ ID NO: 38336 - DNA, 201 bp, Homo sapiens
tgctggcacgatgacatcatgcaaggtacggcctggcgcctacccgctcctgctgccccaggcctcagggcacggctcccatccagtcctgctaccccacrccctggggcatggccctggcacccccacctgctccagctccccacgcctcaggttccgagcctaacagcgtgggcatggaggcagtgatggggctggtgg

SEQ ID NO: 38337 - DNA, 201 bp, Homo sapiens
cccaccctctgccacgggcctgaaaggccataggagcctctgcaccagagctggcacctgcttctccgtggcccccagctcctctctggccaggcccccarcagcccatgaaacagaaagcaaatttcaccagagacacccatggaagccctacgagaaacgccttccccccaagaacaaggccagggggccgcgtgtgcc

SEQ ID NO: 38338 - DNA, 201 bp, Homo sapiens
cagcagccctgggagcacactagcggtgagcccgtgcagccagactgtgagccccgttgcgctgccgttgggctctgggagggtgatggccaaagacctaygagcagaggggggtggtgagcaggtggcagtctcgggggcgccctcccacggcctggctcacctgttgagggcgaccacagcggctcccagctggtcctg

SEQ ID NO: 38339 - DNA, 201 bp, Homo sapiens
ttactcgcggccagcacctccttctccaccaggcccccgttggcctccgtctccaccgaaagccagtcattgaccaggaagaaggcgctgcgtgccgtctrcaggtccctgacgatgacgtgctgcaggaaccaggcagggctgagccctgcagaggcgcaggagggaggtcaggctcgcagggcgccccaatgcgggggc

SEQ ID NO: 38340 - DNA, 201 bp, Homo sapiens
gagaagtaccaggcgtaggcgacccgagagccgcgctgcacgcgggctgtgaagttcctctcagtgcccgtggcgatgccaggctcgcagcagttgggcayctgcagcccactcacggcctccagcaccacgatgcgcacctgcgcctgggcccagctcacgtggtttttgccccgcacgctcaccacgtggtctccgacg

SEQ ID NO: 38341 - DNA, 201 bp, Homo sapiens
gcaggggaggccctgccaccccgctgcgcccctcacctgagccccggccccagcctgtcttgacgaggatctcgtacttgaagcggccccgctgcccacasaaggggatggcgcggccccggctggcatccaactggtccagcttgtgcaggatggcggccatgaccatgtaggtcaccaggcacacagcacatgtcagca

SEQ ID NO: 38342 - DNA, 201 bp, Homo sapiens
ggcgtgagccaccacacccggcccggccactgggacgtttctaagggactaactcagcctcttcacttcctatagatgtactgagattttcttctggagtrcatttcggaagcgtgcacagccgcgtgcttgcttcttctgagttatctggcgtgctgctgtgcagtcgtccgtggcgtctgcttagcaaagtgccctcgt

SEQ ID NO: 38343 - DNA, 201 bp, Homo sapiens
actcctgacctcaagtgatctgcccgcctcggcctcccaaagtgctgggattacaggtgtgagccaccgcgcccggccatcgttccattttaattaacttwaatacgagcagccacatgtggcctctggttcctgccacggactcgggagcaacccctcctggtcgcggcttatgcgccttctctgtgtgctgctggggtt

SEQ ID NO: 38344 - DNA, 201 bp, Homo sapiens
ctgcctgcaggccccgtcccctcggccatgggacccatccccagcccgcccacaccccgctcaacactcacccctcgcttggagccgctgctgcaattgargcagcggccctccaagtacacgtaggagctgcggctcacttcgtacacggcctgtgccttgcaggacacacactccaaggacacaatgggcacccggcca

SEQ ID NO: 38345 - DNA, 201 bp, Homo sapiens
cgcgcccggccatcgttccattttaattaacttaaatacgagcagccacatgtggcctctggttcctgccacggactcgggagcaacccctcctggtcgcrgcttatgcgccttctctgtgtgctgctggggttagtttgcatgtaacctcttgaggaccccacgtgtgcattcctaaggggtgcggcctcccgtttccgt

SEQ ID NO: 38346 - DNA, 201 bp, Homo sapiens
gccccgtgtctgtgcccggccgccctgcggtgctcaccagccttctgaacgaggagctggacaggatccctggaaggggccccggggtctctgagtcgcgytcagcgggtgcttgtgctctctgcccagctgtgctgaagtcccgagggacatgtccgctgcttgcgggtcggttcctgaggaattggaagtgtcacgaga

SEQ ID NO: 38347 - DNA, 201 bp, Homo sapiens
gccaggaagggcacggacccccaacccatcccacgcagggccaaggccccccatcccctgtccacagtcccccacagagccaaggtctcccaaccctgtcyacagcccccacacagactcgaggggcccccatctcctgttctgaacccaacagggtggtcccactgtgggaccacaaccaggtatgactgtgtgagaagc

SEQ ID NO: 38348 - DNA, 201 bp, Homo sapiens
gccgcacacggccttcccttgcagtggcctctttctcctccctgtaccagtccagctgccaaggacagctgcacaggagcgtttcctgggcaggtatcgcstctcagagggaagcggttggctgcagagcgccactctgcctcataggtgctgtgctcgtcgcctcatccgcccacccccatggtccgtctgcctccattg

SEQ ID NO: 38349 - DNA, 201 bp, Homo sapiens
cccaagcagcttgtagctagcactgggccccgtgcgcgcccctgccggccgctggccctgccctctctcctctgcaggcacggggcctgtgctctctgctygacctgtgtgtagcccctcctcctgctgacgtggccgcacacggccttcccttgcagtggcctctttctcctccctgtaccagtccagctgccaaggaca

SEQ ID NO: 38350 - DNA, 201 bp, Homo sapiens
ccaaggacagctgcacaggagcgtttcctgggcaggtatcgcctctcagagggaagcggttggctgcagagcgccactctgcctcataggtgctgtgctcrtcgcctcatccgcccacccccatggtccgtctgcctccattgccctggggagcaggtcccgactcgcatgaggacgtctgtgcagaatgtctttggcttg

SEQ ID NO: 38351 - DNA, 201 bp, Homo sapiens
gccgtcttccacatcgccaccctgatgcccaccaaggacgtggacaagcaccgctgcgacaagaagcgccacctgggcaacgactttgtgtccattgtctrcaatgactccggtgaggacttcaagcttggcaccatcaaggtgagtgaggggccgtcagtgaggctgggccccaggcaggtgcccactgctgtgtcccgg

SEQ ID NO: 38352 - DNA, 201 bp, Homo sapiens
tcagccctctgcacccatctcagccctatgccgagtgccacctggacctgtccacccagggccaggaagggcacggacccccaacccatcccacgcagggmcaaggccccccatcccctgtccacagtcccccacagagccaaggtctcccaaccctgtccacagcccccacacagactcgaggggcccccatctcctgtt

SEQ ID NO: 38353 - DNA, 201 bp, Homo sapiens
atccggccctgctcaccctcagccgtcttccacatcgccaccctgatgcccaccaaggacgtggacaagcaccgctgcgacaagaagcgccacctgggcawcgactttgtgtccattgtctacaatgactccggtgaggacttcaagcttggcaccatcaaggtgagtgaggggccgtcagtgaggctgggccccaggcag

SEQ ID NO: 38354 - DNA, 201 bp, Homo sapiens
atggaagacccaaatgaacactcatctggggaaaccaagccaggagaggcctgggggcctcagccctctgcacccatctcagccctatgccgagtgccacmtggacctgtccacccagggccaggaagggcacggacccccaacccatcccacgcagggccaaggccccccatcccctgtccacagtcccccacagagcca

SEQ ID NO: 38355 - DNA, 201 bp, Homo sapiens
aagctatggcctcccacccttgagctccccactcccagaggtcaggaggggcctttctgatggaagacccaaatgaacactcatctggggaaaccaagccrggagaggcctgggggcctcagccctctgcacccatctcagccctatgccgagtgccacctggacctgtccacccagggccaggaagggcacggaccccca

SEQ ID NO: 38356 - DNA, 201 bp, Homo sapiens
acagcggctcccagctggtcctgcaccaccacggccaggcccacctcgaagtgtggcctgaaacccgggggcagcacggctccgtagctggagaggctgcycttgtagacacagaactcctcgcagtggccctggcgacagcgccgcagcagcagggcgtacaccagcggggcgccagcatcctccgcgtcatgccagcct

SEQ ID NO: 38357 - DNA, 201 bp, Homo sapiens
catcctgtccaatgagcatggctcctacaggtacacggagttcctgacgggcctgggccggctcatcgagctgaaggactgccagccggacaaggtgtacmtgggaggcctggacgtgtgtggtgaggacggccagttcacctactgctggcacgatgacatcatgcaaggtacggcctggcgcctacccgctcctgctgc

SEQ ID NO: 38358 - DNA, 201 bp, Homo sapiens
agctgggatggaacctgctcccacaccctcccctcagacgacccctctgggaagacccccaatcaggccagctgaggaaagcagggactggggaacagacrcccactctggggcaccagcaggccccgcctgacagcagcaggagcagccaccacgggctcagggtcaccaagcctcctggccggtccagagaggggagcg

SEQ ID NO: 38359 - DNA, 201 bp, Homo sapiens
accaggtcccgtgtgtctgaccacacgcggtatgagccaccctcaatgatgggcaccaggcgctcgggggccaccgtcacattggcctggatgctctgtgycagtggcgtgtccccaaatgacacgacaaacacaaagcagtagtgccccacaggcagcgccagccgcggcagcaccagccgaggccggctcacgtccacg

SEQ ID NO: 38360 - DNA, 201 bp, Homo sapiens
ccttctctcctctgcagcaccccatcgctgccgtgggcagagcagccgtgttggccttcagaggcgctgcacgggaccccggctcccctgaccaccctctycattaccgcagctctggccaggctgccgcacctctacaggaactttgccgcggagcagtatgccagtgtgttcgccatctccctgccgtacaccaacccc

SEQ ID NO: 38361 - DNA, 201 bp, Homo sapiens
ttcagaggcgctgcacgggaccccggctcccctgaccaccctctccattaccgcagctctggccaggctgccgcacctctacaggaactttgccgcggagyagtatgccagtgtgttcgccatctccctgccgtacaccaacccctccaagtgagtggtcgccccaggccctgtgcctcccagccgtggcccccgctaggc

SEQ ID NO: 38362 - DNA, 201 bp, Homo sapiens
ggcgcgggtcagcaaggtaccaggggatgtgtcacacacacagcccacccccgtccagtcacgcacggacaccctgggcttccgagcaaacctgctcccgsgtggtgtgaccacatggagccacagacacccagcaaggacacgcagcccgcacacccccggcaccccagacacagtgacctgcaccagggctcgaggttt

SEQ ID NO: 38363 - DNA, 201 bp, Homo sapiens
gacgtcacagagtcgggggatcccgctgctccccccacgcaggcctgcactcacccgtgcattcgaagtgcaccttggtggtgagggcgtgcacagcgccyagtgggaagaggcggcaagagccccccagcggcgggcggttgggggacaggcggatggaggcgcagccctcctcctcgccagagcggcccagcaccgtga

SEQ ID NO: 38364 - DNA, 201 bp, Homo sapiens
atccagcaacagggacatgggctggggacagtggctacctctggggtgggaaggggctcttcctcactgttggtattgctaggggactgtgtagcttttgycactagagcatatgtggcttgaagactgtacgtggaactgtggcaggtttggaaggaagcaaagctgaagcaggctgtcgtgttacatagaatttgcatc

SEQ ID NO: 38365 - DNA, 201 bp, Homo sapiens
tcttggtcccaagcacgcatgcagcagatgtgacgtcccctcccaggctgcactcacctcgttcagcacggtgaccagggccaacgagtactcgatgacgwgctggggatcggcctgccgcagcagccctgggagcacactagcggtgagcccgtgcagccagactgtgagccccgttgcgctgccgttgggctctgggag

SEQ ID NO: 38366 - DNA, 201 bp, Homo sapiens
ccagggtggccgggagccggcgagcagtgcaggagggcgccagggccagcgtcgtgctgcaagccaacgaggtcaccagggagcatgaggacatcctggcygtggagggtgacctgtggagagggaggcagggctgcatcacgtcctcacggtcatggcccgtggacccccgcacgacggatgagggtggacacgcagggc

SEQ ID NO: 38367 - DNA, 201 bp, Homo sapiens
cagggcactcctccatcctcccaccctcacagcagcccgctgggagccccatcactgtccccctttccagatggggaaactgaggctcagagcccggagascagggcccaccagcccaggctcacagcagcacccacccacggggcctgtgggtaccggcagggatccccgtgcaggccacctcccgtatggcgtgcccag

SEQ ID NO: 38368 - DNA, 201 bp, Homo sapiens
cctggggctcccaggccggccggtacagctctccacgcaaggcgtggtagcgccagcggagaataacagcccccagccgtagggcgccccacagccgcagygcccagagccccacacacagcaggggtgacaggtgccaggactcggcaggacacagggtagagagcccagtcccagggcacagcaccaacagggcctggg

SEQ ID NO: 38369 - DNA, 201 bp, Homo sapiens
agggcccggcccgggagtgatgccaccctgcctctcccctctccccacagagcaacagcgagctcgccatcctgtccaatgagcatggctcctacaggtasacggagttcctgacgggcctgggccggctcatcgagctgaaggactgccagccggacaaggtgtacctgggaggcctggacgtgtgtggtgaggacggcc

SEQ ID NO: 38370 - DNA, 201 bp, Homo sapiens
ctcccgtggaatggtgaccgtgctgctcccgcggggcccaaagttcagcgcacacccgccagcctccctctgcaggccgagaacaaggggcgacgtggccygagagccccatccagttttaaagcagagcccggcccaggagacagcgcgggagaccccctccccatgctgggacggggcccaccaggcactgaggacggg

SEQ ID NO: 38371 - DNA, 201 bp, Homo sapiens
cgtgtgtctggcccatcacgtcatagccatgtggttcatcaggtgccgcctgcccttccggaaggattttgtccctttcatcactaaggtgggctcagggycggtgaaggctgtgtctctcggtaggccagggcttgctttgcccttggctgtccatggtcgggcagagtgacaggcaggtggagggcagtgggagggtgt

SEQ ID NO: 38372 - DNA, 201 bp, Homo sapiens
taggccagaggccatccctgggcccatcccacacattgccagcatccccaagctatggcctcccacccttgagctccccactcccagaggtcaggaggggmctttctgatggaagacccaaatgaacactcatctggggaaaccaagccaggagaggcctgggggcctcagccctctgcacccatctcagccctatgccga

SEQ ID NO: 38373 - DNA, 201 bp, Homo sapiens
cgtgttggccttcagaggcgctgcacgggaccccggctcccctgaccaccctctccattaccgcagctctggccaggctgccgcacctctacaggaacttygccgcggagcagtatgccagtgtgttcgccatctccctgccgtacaccaacccctccaagtgagtggtcgccccaggccctgtgcctcccagccgtggcc

SEQ ID NO: 38374 - DNA, 201 bp, Homo sapiens
gtctctgaggagtgagtggccgtgggtcagggccagagcccttagtaggccagaggccatccctgggcccatcccacacattgccagcatccccaagctawggcctcccacccttgagctccccactcccagaggtcaggaggggcctttctgatggaagacccaaatgaacactcatctggggaaaccaagccaggagag

SEQ ID NO: 38375 - DNA, 201 bp, Homo sapiens
cacgtccgtgtggccgtggccttctctcctctgcagcaccccatcgctgccgtgggcagagcagccgtgttggccttcagaggcgctgcacgggaccccgrctcccctgaccaccctctccattaccgcagctctggccaggctgccgcacctctacaggaactttgccgcggagcagtatgccagtgtgttcgccatctc

SEQ ID NO: 38376 - DNA, 201 bp, Homo sapiens
ggaaagtgctgcctggtcggcctcgggcgaagacagtcggggccagcccgagggtcccttgccttccagctccccccgctcgcccagtggcctccggcccygaggttacaccatctccgactcggccccatcacgcaggggcaagagagtagagagggacgccttaaagagcagagccacagcctccaatgcagagaaagt

SEQ ID NO: 38377 - DNA, 201 bp, Homo sapiens
gagcaggttgtgggagacgtctctgaggagtgagtggccgtgggtcagggccagagcccttagtaggccagaggccatccctgggcccatcccacacattkccagcatccccaagctatggcctcccacccttgagctccccactcccagaggtcaggaggggcctttctgatggaagacccaaatgaacactcatctggg

SEQ ID NO: 38378 - DNA, 201 bp, Homo sapiens
gaccctggggacaaggccgacgtgggccggctgagccctgaggttaaggcccggtcacagtcagggaccctggacggggaaagtgctgcctggtcggcctmgggcgaagacagtcggggccagcccgagggtcccttgccttccagctccccccgctcgcccagtggcctccggccccgaggttacaccatctccgactcg

SEQ ID NO: 38379 - DNA, 201 bp, Homo sapiens
cagctcctctcccgagctgcagactctgcaggacatcctcggggaccctggggacaaggccgacgtgggccggctgagccctgaggttaaggcccggtcayagtcagggaccctggacggggaaagtgctgcctggtcggcctcgggcgaagacagtcggggccagcccgagggtcccttgccttccagctccccccgctc

SEQ ID NO: 38380 - DNA, 201 bp, Homo sapiens
ccaaggcggcaggacccccagcccagcccaggacccccagtagagtcctcacctcagcgtggaggcctgagaacgtgaggaaggagctgtccagcacggaygagtccaggcagctgtcgatgtccagcacctgctgcccggcaggtgtggggctcgggctcccagccacctgcaggacgagggcagtggtcagcgggcggc

SEQ ID NO: 38381 - DNA, 201 bp, Homo sapiens
gggtggggcccctacaggtgggggcaggaggtggcggggggccggagcagagggacaggcaggcaaaggaggcactggagggctgggccgccccacacagkcaccagccctgctccgagagggctgcgaggccctggccggtggagaagcagaaggcgctgcaggcctctggctgaagcaggccttcgtgggcagctgaaa

SEQ ID NO: 38382 - DNA, 201 bp, Homo sapiens
ggtaaggggaggtactggcctcaggccaaaggtgctgccgcctccgcagggaacaccagctggctgatgagcctggagaacccgctcagccctttctcctmggacatcaacaacatgcccctgcaggagctgtctaacgccctcatggcggctgagcgcttcaaggagcaccgggacacagccctgtacaagtcactgtcg

SEQ ID NO: 38383 - DNA, 201 bp, Homo sapiens
gggagcggggcagcgatgtggaaggctgctagctggccagaggccagaggtccgtggggccccaccagggtggcccctggggaggcagggaagacgtgctrgaggagggtggggcccctacaggtgggggcaggaggtggcggggggccggagcagagggacaggcaggcaaaggaggcactggagggctgggccgcccca

SEQ ID NO: 38384 - DNA, 201 bp, Homo sapiens
agcgccgagaggttcgccaggagcccaacgtccagcgcccggagcaggttgtgggagacgtctctgaggagtgagtggccgtgggtcagggccagagcccytagtaggccagaggccatccctgggcccatcccacacattgccagcatccccaagctatggcctcccacccttgagctccccactcccagaggtcaggag

SEQ ID NO: 38385 - DNA, 201 bp, Homo sapiens
cggtgggcccgagccggacgcagtgctcggctgtggctgggtgtggctccccgggcagccagttctggcagctctccaggctgaaggcctcgccctgcggsgctgggcccacctccaccccctgcacagtcgagaagccgatccacacgtctaggctcctgggggcgggtgtgggatggcagggggctcagggcactcctc

SEQ ID NO: 38386 - DNA, 201 bp, Homo sapiens
ctggtgaagtaatgcgccctgttcacgcggctggacagcaccagcgccagggggaacgtgccgctccgcgtgaagttgtgtgtcaccgtcgggcacccccrcacggtcgtgttggaggagccatccccgaaggtccagtcgaagaggtagtgggccgggttcccggtgacgtaggccgtgagccgcgcgtcaggctgcgtg

SEQ ID NO: 38387 - DNA, 201 bp, Homo sapiens
ccccacagctgagcagcaagaggcggtgccgccagcccacccggagtgagccccgcatgctggcacgactgggggacactcacagctctgccagcgccgaraggttcgccaggagcccaacgtccagcgcccggagcaggttgtgggagacgtctctgaggagtgagtggccgtgggtcagggccagagcccttagtaggc

SEQ ID NO: 38388 - DNA, 201 bp, Homo sapiens
caggcagtccagctgtaggagacgttggtgccatccctaaccacggcctgcagctgtaccgtgtggttggtggggaagtagcggccaccgcccaccacctrcagcccctctatgagctgcaggacatagacgaagatgctgtcctgggcggagcccacctcgttctcagccgtgacgatgatattgaaggtgcccacggag

SEQ ID NO: 38389 - DNA, 201 bp, Homo sapiens
ggggttcagactccacctcaaaagccactcgctttagccaggcgagaacacagcagagggcgtgagagactcacgggggctcgtgtgaggtcagggagcakagttttaaattcattttgtgaaatgagacagtggaatgagttagcggagccactgtcagagccgtgactttccaggaatttaaagcccaccaggtagccc

SEQ ID NO: 38390 - DNA, 201 bp, Homo sapiens
ccgccgggcacagcccagcaccagctcacattggtgcccgtggccagctgcccccaaaagggcacagaggacccggccgccacgaagctgcctccgggctygctggccctgatgctgaggccactcacaggcacctgcacatccacttccacggtggcgttggctgagcccagcgggttccctgccgtcatggtgaccaag

SEQ ID NO: 38391 - DNA, 201 bp, Homo sapiens
gagggacggtccccacggcatcacgggagggctccgtgacgtcacagagtcgggggatcccgctgctccccccacgcaggcctgcactcacccgtgcattygaagtgcaccttggtggtgagggcgtgcacagcgcccagtgggaagaggcggcaagagccccccagcggcgggcggttgggggacaggcggatggaggcg

SEQ ID NO: 38392 - DNA, 201 bp, Homo sapiens
cgttggaggcattgagccggatggagaaggtgccagcatccgggaagaccatggtgacatgagggccacgcttgctgctgccgccgggcacagcccagcaycagctcacattggtgcccgtggccagctgcccccaaaagggcacagaggacccggccgccacgaagctgcctccgggctcgctggccctgatgctgaggc

SEQ ID NO: 38393 - DNA, 201 bp, Homo sapiens
cccagggcgttgaaggcgcgcacctggatctccaacagccccgcggccacgggcgtgtaggtgacgtcgcggcccgacaggatgaccagcgagtcgccctrgaccttctgcagcgagaagtaccaggcgtaggcgacccgagagccgcgctgcacgcgggctgtgaagttcctctcagtgcccgtggcgatgccaggctcg

SEQ ID NO: 38394 - DNA, 201 bp, Homo sapiens
cagcaccaggtcccgtgtgtctgaccacacgcggtatgagccaccctcaatgatgggcaccaggcgctcgggggccaccgtcacattggcctggatgctcygtgtcagtggcgtgtccccaaatgacacgacaaacacaaagcagtagtgccccacaggcagcgccagccgcggcagcaccagccgaggccggctcacgtc

SEQ ID NO: 38395 - DNA, 201 bp, Homo sapiens
cctcaggtaggagtgctcggccctgggctcatctgtgtcctgccctggcgacccatccccaaagtcccagtggtaggccacacgccgggggctggggctgrtggcggcctcaaactgcgccgagcggttggtgaagcaggggccgctctgcagggccacatactggacggcgtcctgaacctccagcaccagcgtgcggtt

SEQ ID NO: 38396 - DNA, 201 bp, Homo sapiens
cggcgtctggtcgccgtcctccaggttggggtcgtaggactcgctcccatccagcaccaggtcccgtgtgtctgaccacacgcggtatgagccaccctcartgatgggcaccaggcgctcgggggccaccgtcacattggcctggatgctctgtgtcagtggcgtgtccccaaatgacacgacaaacacaaagcagtagtg

SEQ ID NO: 38397 - DNA, 201 bp, Homo sapiens
gttcacctgcacgcggtagtccccaggcctcaggtaggagtgctcggccctgggctcatctgtgtcctgccctggcgacccatccccaaagtcccagtggyaggccacacgccgggggctggggctggtggcggcctcaaactgcgccgagcggttggtgaagcaggggccgctctgcagggccacatactggacggcgtc

SEQ ID NO: 38398 - DNA, 201 bp, Homo sapiens
ccagcaaggggatgccaagcagaggctggccagccagggagccaggcccagcacacgtggctgcctcgggctgcaccacccgcacctgctgctcctccgcmcatcgcggcagccacgccaggccacagtcacactcaaacgggttcccactcaggtttctgcggggcaggggcaggtgttggggaccaggtctggtgggaa

SEQ ID NO: 38399 - DNA, 201 bp, Homo sapiens
tacgaagcctgtggtcatctcaggctgcaggagacacaggagatacgagctttggaggtggggctctcagtcacaagcccccgttgttcctccctgtcctycgctcacggcactgctccagttgccggggccagggttcttggagagcacatcctcaccgctgtcccctctgctggtgacagcacgcagtggaagcactct

SEQ ID NO: 38400 - DNA, 201 bp, Homo sapiens
ggtgggggcaggaggtggcggggggccggagcagagggacaggcaggcaaaggaggcactggagggctgggccgccccacacaggcaccagccctgctcckagagggctgcgaggccctggccggtggagaagcagaaggcgctgcaggcctctggctgaagcaggccttcgtgggcagctgaaaaggacactgctgccac

SEQ ID NO: 38401 - DNA, 201 bp, Homo sapiens
gttggccaggctggtcttggaactcctgacctcaagtgatctgcccgcctcggcctcccaaagtgctgggattacaggtgtgagccaccgcgcccggccawcgttccattttaattaacttaaatacgagcagccacatgtggcctctggttcctgccacggactcgggagcaacccctcctggtcgcggcttatgcgcct

SEQ ID NO: 38402 - DNA, 201 bp, Homo sapiens
ttggtctcaaaaaaaaacccaacacgatcgtatctggcccatcactactgaacagccattggccactactattatgattgcttcgtgaatcatcacactaycctttaaaacaaatttttttttttgagatgcagtatcactctttcacccaggctgaagtgtggtggtgccatcttggctcactgcaacctccgcctccgg

SEQ ID NO: 38403 - DNA, 201 bp, Homo sapiens
ggtttcactgtgttggccaggctggtcttggaactcctgacctcaagtgatctgcccgcctcggcctcccaaagtgctgggattacaggtgtgagccaccrcgcccggccatcgttccattttaattaacttaaatacgagcagccacatgtggcctctggttcctgccacggactcgggagcaacccctcctggtcgcgg

SEQ ID NO: 38404 - DNA, 201 bp, Homo sapiens
atgcgggcactgacccacaacactgagctgtttcttcatgggcaaaacagggtaagcacatgggccctcctgggcgggggctgcattgtggaaagcagacrccggagagggcccggtgggtgtggctgctgggagcggaaggtcggggtgctgcttcagggtcactgggatttatctctggggcccgggatgagccctctg

SEQ ID NO: 38405 - DNA, 201 bp, Homo sapiens
catgcccagctaattttttgtatttttagtagagacggggtttcactgtgttggccaggctggtcttggaactcctgacctcaagtgatctgcccgcctcsgcctcccaaagtgctgggattacaggtgtgagccaccgcgcccggccatcgttccattttaattaacttaaatacgagcagccacatgtggcctctggtt

SEQ ID NO: 38406 - DNA, 201 bp, Homo sapiens
ctacaggtgggggcaggaggtggcggggggccggagcagagggacaggcaggcaaaggaggcactggagggctgggccgccccacacaggcaccagccctrctccgagagggctgcgaggccctggccggtggagaagcagaaggcgctgcaggcctctggctgaagcaggccttcgtgggcagctgaaaaggacactgct

SEQ ID NO: 38407 - DNA, 201 bp, Homo sapiens
tctcagctcactgcaacctccacctcccgcgttcaggcgattgtcctggctcagcctcctgagtagctgggattacaggtgcctgccaccatgcccagctrattttttgtatttttagtagagacggggtttcactgtgttggccaggctggtcttggaactcctgacctcaagtgatctgcccgcctcggcctcccaaag

SEQ ID NO: 38408 - DNA, 201 bp, Homo sapiens
caggacgagggcagtggtcagcgggcggcagctcagacctgctcaggacagggatgagaagccacctcctcagcagacaggacagagcccggtgccatctkacagaatgtcctagaatgctggatatatgggacatctgcaccgtccgtgatggcagcccctcgcgacgtgtgccactgaacacttgacagcagactggtg

SEQ ID NO: 38409 - DNA, 201 bp, Homo sapiens
tgctggccagctcgcctgagctctggttcggcgccaccccagggaaccctcccagcagccatcaattagacaacgttaccatctctcatatacagagaagraaacggcggtgttaagagggcaaaggtcacacagctagggagcagggctgatgccagagctccgctaaaggctgctctctcaacaagaggaacgatttaa

SEQ ID NO: 38410 - DNA, 201 bp, Homo sapiens
tgggcagcagacactcacctcgggccggctcctcgcccagggccacgatgctgtaggcggcctccaggcctgaaccaccgcggttctggatgctgaggtcraggctctcgtcactctgcaccgaggacgggcacacgagctccagggcggcaggtgccgcttccacctgcacgtctgtccccagcagggctgagccggccc

SEQ ID NO: 38411 - DNA, 201 bp, Homo sapiens
gactgtccaccattgccagggcggccccggcccaggcctgacactgctcctgcgcctgcagccaggccgccttctccaccaccaggcggtagcagtgcccrttgccagggaagatctccgtgtccgaggggcagagcgggtgcaccgctggagaccggtgggaacgagggtgtcaacggtcagtgtgggcccaagacgggg

SEQ ID NO: 38412 - DNA, 201 bp, Homo sapiens
cggaagcgcaaaagggctgcgtcgcctagaaggcagggagggccgcactgcaggaggccacggggcaggaccaccctgcccaacctcccacggagtgggamcatggaacgaggccttactcgcggccagcacctccttctccaccaggcccccgttggcctccgtctccaccgaaagccagtcattgaccaggaagaaggc

SEQ ID NO: 38413 - DNA, 201 bp, Homo sapiens
cgatacacctcccagcggtactcagtctggtaggtgacgcagtcgcgcaggtcaacgtgggcctccaagtagttgcgctgtgatcgccgcatcagcacctrcaggggcaggaccacgtccacctccggctcccggcaggccagcacctggacggtcaccgtggcctgcgccacgaagaagctcaccaggttggaggcgttc

SEQ ID NO: 38414 - DNA, 201 bp, Homo sapiens
tgtgcgttctggtgtactggacccagctggaccctagcaggaggcaggcaatgctcactgagggcccctggggggatgcgtgtgagaagagacgtatgtgkgggtgtgaggaccgcagctgccacgtaggcctgactcacagactcctgcagcccttagccagggcctgggtcaggaggctgagctgggatggaacctgct

SEQ ID NO: 38415 - DNA, 201 bp, Homo sapiens
ccgctggcagctggcggtgcgatacacctcccagcggtactcagtctggtaggtgacgcagtcgcgcaggtcaacgtgggcctccaagtagttgcgctgtsatcgccgcatcagcacctgcaggggcaggaccacgtccacctccggctcccggcaggccagcacctggacggtcaccgtggcctgcgccacgaagaagct

SEQ ID NO: 38416 - DNA, 201 bp, Homo sapiens
ccccgctcaacactcacccctcgcttggagccgctgctgcaattgaggcagcggccctccaagtacacgtaggagctgcggctcacttcgtacacggcctrtgccttgcaggacacacactccaaggacacaatgggcacccggccactccggatcagcacctggcgtgggagtggggttacctccaacacaggtctattt

SEQ ID NO: 38417 - DNA, 201 bp, Homo sapiens
gcaatgctgacccatgatgccctgccctgccctgccaggctggcccgcagagctcaccccggggaaatgaagaaggtgtagggccggtggtcagcaccctrgagtgactctgggcggatcctcctgctagccgagcagttgtgctcattgggccggggctccgagtgtaggtagactgccaggtagggctcaggttcctca

SEQ ID NO: 38418 - DNA, 201 bp, Homo sapiens
aggggcagagcttggcagggtccgcacaaacctttgttgtcgtgccacactcggatcttccacacgctacccaggctgtgcggggtggcgatccggaagawgtccaggctgttgcggtggaaggctctgtcgccgtccaggtgccggtggccgctccggctgtccaccccatacagcatgatgcccacgtgggccgtggta

SEQ ID NO: 38419 - DNA, 201 bp, Homo sapiens
ccccgagagccggacactcacaggctgctgagcaggtccgtttccatgtgggtgtcttgggtaggggctgggctgctgaccccctcggcaaggacctgctrgatcaggtcttcatctagaggtacaggaggcatagggtgggcccagctgcaagggtgagcttcagagccccctcctctcaccccagctcacctgatgctg

SEQ ID NO: 38420 - DNA, 201 bp, Homo sapiens
ctgctggacaggagccacgcaacactcacgcccggggggaagctcgcacccacccaccctgagacagccacagccacagccaccaggagcaggctgagccygtgggccagggaggcacaccaggccggcagcaggcgcttccgcagaccctccaccagtcctggggaagcagagacagacctgtgagaggcagctcacagg

SEQ ID NO: 38421 - DNA, 201 bp, Homo sapiens
tccagcaagacctggggagggggtggcttcagaggggtcccccgtgatggaggcctgtagcctacccctggcagccccctcaccttcagtggctcccagcygaggaatgaggccaggaagctggcgctgctggacaggagccacgcaacactcacgcccggggggaagctcgcacccacccaccctgagacagccacagcc

SEQ ID NO: 38422 - DNA, 201 bp, Homo sapiens
ggcaggggcacaggccgcacccaggctcacccgcagcatgccatgtagcctcttgaccttgcgggcttcttccttggccaggaagagtgcaaagccgtggrgtggccgtacgcggggcacacgtgcgctcacaggcgtcacagccgggctctctaccagggtgtcatcttcatccgggtgcagccgcttggccaccagtga

SEQ ID NO: 38423 - DNA, 201 bp, Homo sapiens
ggcaggtgccgcttccacctgcacgtctgtccccagcagggctgagccggcccccagggccagcacggccgtcacgtgatagcgcccaggcagcacatagmgatgcgaggcagccggcccagcggcatccacctcggcggagccgtctccgaagtcccagcgtgtggcagtgacagggagcggggcagcgatgtggaaggc

SEQ ID NO: 38424 - DNA, 201 bp, Homo sapiens
ggcaaaactaaagcccagaagacagaccagtgcaccggatgcccgtaccgcgtgatggccaggaaggcccggctgtgcagctcctgcttgatggcgctttrcagacggtaggcgtgcccatggcatgaggcatccccatagctggccagcagggtcaccagcagaaaaagcatgtacaccaggaggctctggtggacgggg

SEQ ID NO: 38425 - DNA, 201 bp, Homo sapiens
gccatgtgcgtgactatgtgcgtgactacatacaaggtaacctctatatgaccatttgttgataagttacaaaacaaccaagaaattgaggaatttttttktttttgagacggagtttcgctcttgttgcccaggctggagtgcagtggcgcgatctcggctcactacaaccttcacctaccaggttcaatcgattctcct

SEQ ID NO: 38426 - DNA, 201 bp, Homo sapiens
cagcagcacggtgagctgttccgtggctgcaagcagccgcagggcacaggcagggcaggcccaagtgccctccagctgggctggcaagtggggcagccatsacgaggcgttggcggagaggtacggggcctggggaccagggtggccgggagccggcgagcagtgcaggagggcgccagggccagcgtcgtgctgcaagcc

SEQ ID NO: 38427 - DNA, 201 bp, Homo sapiens
cccgcggaagcactgaatctggatttcacagagctttgggccggagatacctggggctggtcagcatgtagtgactacccctggatttccccatactctgtatttttaaaaccaaccagcaatttattcataaagatgccctcatgtgatggttatctgccttttgtaaatcaggaagttttcctttttgtttgagtccag

SEQ ID NO: 38428 - DNA, 201 bp, Homo sapiens
ccccgcggaagcactgaatctggatttcacagagctttgggccggagatacctggggctggtcagcatgtagtgactacccctggatttccccatactctgtatttttaaaaccaaccagcaatttattcataaagatgccctcatgtgatggttatctgccttttgtaaatcaggaagttttcctttttgtttgagtcca

SEQ ID NO: 38429 - DNA, 201 bp, Homo sapiens
caccagggcagggcagacattctcaaagcgggcgctgacactgcccccaggccagcgagccgtggccgtggcgttggcaccagagtccacctggagcaccraggctgagccgttggtgggcacgtagaggcggccgtcgcggggggcagggtagatgacccgcagcccagccactggggagaccacgtcaaagctgcagga

SEQ ID NO: 38430 - DNA, 201 bp, Homo sapiens
cagaccagtgcaccggatgcccgtaccgcgtgatggccaggaaggcccggctgtgcagctcctgcttgatggcgctttgcagacggtaggcgtgcccatgkcatgaggcatccccatagctggccagcagggtcaccagcagaaaaagcatgtacaccaggaggctctggtggacgggggggccctgtggtcagcctggcc

SEQ ID NO: 38431 - DNA, 201 bp, Homo sapiens
gcacgcgggggccagctgggtcctgttgtccggggacctgctctcaggctcgctgccgttctccggggtccctgtgaggaggggagggtgttggggccctsatttgcccacaggccaccgtcagagatgcccaactgcctgcaccagcaatcctggccttgctgtgaggacaggtctccccacctgggcagcactcccagc

SEQ ID NO: 38432 - DNA, 201 bp, Homo sapiens
gcagtgctggccgcaggcccggggatgggccacgggaagatccggcgggcgcccggctgctcctgcggccttgcaggctgtgcagctgctgctccagctgstagacgtcctctgtggcctggttgagtcggtcaaactgggtgagcagggcctcgaacacggcttggaggcgggagggctcaggctcacaccttgtcccca

SEQ ID NO: 38433 - DNA, 201 bp, Homo sapiens
ctcatctcctcggtggaggacttcaccgagtttgtgtgaggccggggccctccctcctgcactggccttggacggtattgcctgtcagtgaaataaataaagtcctgaccccagtgcacagacatagaggcacagattgcagtcagacagctcttttattgactttgtctgcttggtgcgggggttgggggggtgtcgagg

SEQ ID NO: 38434 - DNA, 201 bp, Homo sapiens
cctcatctcctcggtggaggacttcaccgagtttgtgtgaggccggggccctccctcctgcactggccttggacggtattgcctgtcagtgaaataaataaagtcctgaccccagtgcacagacatagaggcacagattgcagtcagacagctcttttattgactttgtctgcttggtgcgggggttgggggggtgtcgag

SEQ ID NO: 38435 - DNA, 201 bp, Homo sapiens
cgaggaagccgcctactccaaccccagcctacctctggtgcaccctccgtcccatagcaaagcccctgcacagactccagccgagcccacacctggctatsaggtgggccagcggaagcgcctcatctcctcggtggaggacttcaccgagtttgtgtgaggccggggccctccctcctgcactggccttggacggtattg

SEQ ID NO: 38436 - DNA, 201 bp, Homo sapiens
cacgcctcccagacttactgcccaagccgcctctgccttcagatctgcgaggaagccgcctactccaaccccagcctacctctggtgcaccctccgtcccmtagcaaagcccctgcacagactccagccgagcccacacctggctatgaggtgggccagcggaagcgcctcatctcctcggtggaggacttcaccgagttt

SEQ ID NO: 38437 - DNA, 201 bp, Homo sapiens
cctgtgggctgtggctgccctggccaggccctcacctgggtgcccaccatcccctccctgtgcagtttcgtgttcctgcagctctaccattcccccttctttggcgacgagtcaaacaagccaatcctgctgcccaatgaggtaggcgtggcctccctctcctgcatccgctggagctgtgtggctcgggtgaatggtggg

SEQ ID NO: 38438 - DNA, 201 bp, Homo sapiens
cgccgcagcagcagggcgtacaccagcggggcgccagcatcctccgcgtcatgccagcctgagggacggtccccacggcatcacgggagggctccgtgacstcacagagtcgggggatcccgctgctccccccacgcaggcctgcactcacccgtgcattcgaagtgcaccttggtggtgagggcgtgcacagcgcccagt

SEQ ID NO: 38439 - DNA, 201 bp, Homo sapiens
gctgcaggcagaaggggtggtgagggggcgcaaccctctgccctgtcagccccacttctgcctgcaggccccgtcccctcggccatgggacccatccccarcccgcccacaccccgctcaacactcacccctcgcttggagccgctgctgcaattgaggcagcggccctccaagtacacgtaggagctgcggctcacttcg

SEQ ID NO: 38440 - DNA, 201 bp, Homo sapiens
gaacgaggccttactcgcggccagcacctccttctccaccaggcccccgttggcctccgtctccaccgaaagccagtcattgaccaggaagaaggcgctgygtgccgtctgcaggtccctgacgatgacgtgctgcaggaaccaggcagggctgagccctgcagaggcgcaggagggaggtcaggctcgcagggcgcccca

SEQ ID NO: 38441 - DNA, 201 bp, Homo sapiens
ccagtcgcatgcctgcactgcccgtggatgtggtggtctcatccagcaccagcgtcttgttgctgaacgtacgtgcagcccaccgctgcaggcagaagggrtggtgagggggcgcaaccctctgccctgtcagccccacttctgcctgcaggccccgtcccctcggccatgggacccatccccagcccgcccacaccccgc

SEQ ID NO: 38442 - DNA, 201 bp, Homo sapiens
gtgttgcccaggctagtctgaaactcctgggctgacgtgaccctctcccctctgccacccgaagtgctgagattacaggtgtgagccaccgcacttggccrgaacacggccattttagttcccctccttagaggagtaaggccaggaatgagcctgtggtctgaaagccgtggctgttggttaatgtggagaagggaaggt

SEQ ID NO: 38443 - DNA, 201 bp, Homo sapiens
tgttgtcgtgccacactcggatcttccacacgctacccaggctgtgcggggtggcgatccggaagatgtccaggctgttgcggtggaaggctctgtcgccrtccaggtgccggtggccgctccggctgtccaccccatacagcatgatgcccacgtgggccgtggtacctgggaggcaagagggaggggtgggaggctcgg

SEQ ID NO: 38444 - DNA, 201 bp, Homo sapiens
gcgtagacgcccggggccctcgctctgctcaccccagcagatccggcgctgaataggcccacgtccccgagccattgtgaggactctcccagccaacgtcstaatcgctggtgctgaagcctcctgcggccgagcacgtgtggaccctggggccgggagggtctgggtagagtgctgaaacacacagagccccaggccggg

SEQ ID NO: 38445 - DNA, 201 bp, Homo sapiens
gcgtgaaggtgtatccctcgccgtcccgcagcacgccccgccgcagcaccagtcgcatgcctgcactgcccgtggatgtggtggtctcatccagcaccagygtcttgttgctgaacgtacgtgcagcccaccgctgcaggcagaaggggtggtgagggggcgcaaccctctgccctgtcagccccacttctgcctgcaggc

SEQ ID NO: 38446 - DNA, 201 bp, Homo sapiens
aagaggctggcgccgaaggcggtgaggtggcgggtgaggcagacggcctggcggggcgaggtctcctccaggggcagcagcccctctgtccgccacaccaygtcctcctcgctgaagtactggcacagggacgtgtacaggcccacggacacctgcagcgccgaccagcggaagtggctggagaggttcagatggtaactc

SEQ ID NO: 38447 - DNA, 201 bp, Homo sapiens
ctggggccagtggccaggtccacaccccgactggcccgggcaaggcggctgggcagtgctggccgcaggcccggggatgggccacgggaagatccggcggrcgcccggctgctcctgcggccttgcaggctgtgcagctgctgctccagctggtagacgtcctctgtggcctggttgagtcggtcaaactgggtgagcagg

SEQ ID NO: 38448 - DNA, 201 bp, Homo sapiens
tcggggctgggcgtggcgcggaggccacagatgggctcctccgccgtcacccgcaggctgaggttggcccggctggcgctgttttccaccaccacgtccaycacgtgctccccctcactgagccacggcagtgctaccactgagaacagggtatcgttggtctcccaggggcagccgggcacgaaggtggccaccagggca

SEQ ID NO: 38449 - DNA, 201 bp, Homo sapiens
gaagagacgtatgtgtgggtgtgaggaccgcagctgccacgtaggcctgactcacagactcctgcagcccttagccagggcctgggtcaggaggctgagcygggatggaacctgctcccacaccctcccctcagacgacccctctgggaagacccccaatcaggccagctgaggaaagcagggactggggaacagacgccc

SEQ ID NO: 38450 - DNA, 201 bp, Homo sapiens
ggcgaggtctcctccaggggcagcagcccctctgtccgccacaccatgtcctcctcgctgaagtactggcacagggacgtgtacaggcccacggacacctscagcgccgaccagcggaagtggctggagaggttcagatggtaactccccgctgggtctctgctcctgggcagggaaggggtagcggacgtgagcccaggc

SEQ ID NO: 38451 - DNA, 201 bp, Homo sapiens
tcccggggctacgcaagcacacctgtcctggacagcctcgctgcctggggctgttcccagttcaggcctgggctgggtggccccagctcccccagcctctrcagcgccagcgtctctgtcttctccccaggagtgctggacctgagggacatggtaggctgtgaattcatcccggcctccaggaggcagttgcagccaagc

SEQ ID NO: 38452 - DNA, 201 bp, Homo sapiens
gttgctcagatgtccccattcctgtttcgtttgcacagaggggttttctggtgcgtcctggtccaccatggccaaaccaacaagcaaagattcaggcttgwaggagaagtttaagattctgttgggactgggaacaccgaggccaaatcccaggtctgcagagggtaaacagacggagtttatcatcaccgcggaaatact

SEQ ID NO: 38453 - DNA, 201 bp, Homo sapiens
tcttgaccttgcgggcttcttccttggccaggaagagtgcaaagccgtggggtggccgtacgcggggcacacgtgcgctcacaggcgtcacagccgggctstctaccagggtgtcatcttcatccgggtgcagccgcttggccaccagtgagaagtacagggcttccagcaagacctggggagggggtggcttcagagggg

SEQ ID NO: 38454 - DNA, 201 bp, Homo sapiens
gtgctgaagctcacgctcccattcaggggcaccaccgtgcggcttgcattgacgacgagcccccgcacgcgccgcttcaccgtcacattgagccaggcctmgctgcggctcacctcattccagccggccaccctaacggtgaagtcacctgtgctgttgtaagcgtgggtgacctccggaccctcgagccacccaccgtcc

SEQ ID NO: 38455 - DNA, 201 bp, Homo sapiens
gtgagcgagaagcctttgccgctgccggccagggccgggcccctgtccctccaggcagtccagctgtaggagacgttggtgccatccctaaccacggcctrcagctgtaccgtgtggttggtggggaagtagcggccaccgcccaccacctgcagcccctctatgagctgcaggacatagacgaagatgctgtcctgggcg

SEQ ID NO: 38456 - DNA, 201 bp, Homo sapiens
gaaaatggaccagctgcccgggcgccaccaccttgctgctggcccacagcaccaggcccacgatgggctcctccgccgtgaggttgtacgtggctgagacycagctgactgcgttggaggcattgagccggatggagaaggtgccagcatccgggaagaccatggtgacatgagggccacgcttgctgctgccgccgggca

SEQ ID NO: 38457 - DNA, 201 bp, Homo sapiens
cagtctcgggggcgccctcccacggcctggctcacctgttgagggcgaccacagcggctcccagctggtcctgcaccaccacggccaggcccacctcgaaktgtggcctgaaacccgggggcagcacggctccgtagctggagaggctgcccttgtagacacagaactcctcgcagtggccctggcgacagcgccgcagca

SEQ ID NO: 38458 - DNA, 201 bp, Homo sapiens
tggtgagggcgtgcacagcgcccagtgggaagaggcggcaagagccccccagcggcgggcggttgggggacaggcggatggaggcgcagccctcctcctcrccagagcggcccagcaccgtgagcgtgaaggtgtatccctcgccgtcccgcagcacgccccgccgcagcaccagtcgcatgcctgcactgcccgtggatg

SEQ ID NO: 38459 - DNA, 201 bp, Homo sapiens
gggggatcccgctgctccccccacgcaggcctgcactcacccgtgcattcgaagtgcaccttggtggtgagggcgtgcacagcgcccagtgggaagaggcrgcaagagccccccagcggcgggcggttgggggacaggcggatggaggcgcagccctcctcctcgccagagcggcccagcaccgtgagcgtgaaggtgtat

SEQ ID NO: 38460 - DNA, 201 bp, Homo sapiens
agggtatcgttggtctcccaggggcagccgggcacgaaggtggccaccagggcagggcagacattctcaaagcgggcgctgacactgcccccaggccagcragccgtggccgtggcgttggcaccagagtccacctggagcaccaaggctgagccgttggtgggcacgtagaggcggccgtcgcggggggcagggtagatg

SEQ ID NO: 38461 - DNA, 201 bp, Homo sapiens
ctggcgacccatccccaaagtcccagtggtaggccacacgccgggggctggggctggtggcggcctcaaactgcgccgagcggttggtgaagcaggggccrctctgcagggccacatactggacggcgtcctgaacctccagcaccagcgtgcggttctcactgcccagggcgttgaaggcgcgcacctggatctccaaca

SEQ ID NO: 38462 - DNA, 201 bp, Homo sapiens
ggcagctggcggtgcgatacacctcccagcggtactcagtctggtaggtgacgcagtcgcgcaggtcaacgtgggcctccaagtagttgcgctgtgatcgycgcatcagcacctgcaggggcaggaccacgtccacctccggctcccggcaggccagcacctggacggtcaccgtggcctgcgccacgaagaagctcacca

SEQ ID NO: 38463 - DNA, 201 bp, Homo sapiens
gaggggcgggcggcacccaccgtctggttggtggcctcctccttgcggccggccttccacacggtcaggctgaaggtgtactccacgccagccgccagccrctcccgtggaatggtgaccgtgctgctcccgcggggcccaaagttcagcgcacacccgccagcctccctctgcaggccgagaacaaggggcgacgtggcc

SEQ ID NO: 38464 - DNA, 201 bp, Homo sapiens
tgggctgtccaaggcaagtggccgaggggcgggcggcacccaccgtctggttggtggcctcctccttgcggccggccttccacacggtcaggctgaaggtktactccacgccagccgccagccgctcccgtggaatggtgaccgtgctgctcccgcggggcccaaagttcagcgcacacccgccagcctccctctgcaggc

SEQ ID NO: 38465 - DNA, 201 bp, Homo sapiens
atgcactgggccagcgcagcagcgatctgctggatgtcatccacagtgtggaccctcagggacaccagagtctccgtgatgttcttgcgtatctgggctcrgtgctgccgctcgtgcttgggctctgccgccacgtccagggcccgctcgtactggggcaggcagggggcacagcaagctgtcagcagcgcaggaggccgg

SEQ ID NO: 38466 - DNA, 201 bp, Homo sapiens
tggtttttgccccgcacgctcaccacgtggtctccgacgcgggggaagctgtgggagaaacggggcccggggagcacctcggggttggccccgccgacctrcaggcggaaggtgacagctgagccggcagccagcaggatctgaaaatggaccagctgcccgggcgccaccaccttgctgctggcccacagcaccaggccc

SEQ ID NO: 38467 - DNA, 201 bp, Homo sapiens
acgccttccccccaagaacaaggccagggggccgcgtgtgccccacccgctgcacgcaccgtccagcagcgtatagttgagctgcagatgcagcccggccrcagggttgctgctgtccagggtgaccacagcaccgacggaggcctggggctggaccacaacggagttggcggagttggcggagctgcggtggccccgggc

SEQ ID NO: 38468 - DNA, 201 bp, Homo sapiens
ctcagtgcccgtggcgatgccaggctcgcagcagttgggcacctgcagcccactcacggcctccagcaccacgatgcgcacctgcgcctgggcccagctcwcgtggtttttgccccgcacgctcaccacgtggtctccgacgcgggggaagctgtgggagaaacggggcccggggagcacctcggggttggccccgccgac

SEQ ID NO: 38469 - DNA, 201 bp, Homo sapiens
agaaagcaaatttcaccagagacacccatggaagccctacgagaaacgccttccccccaagaacaaggccagggggccgcgtgtgccccacccgctgcacrcaccgtccagcagcgtatagttgagctgcagatgcagcccggccgcagggttgctgctgtccagggtgaccacagcaccgacggaggcctggggctggac

SEQ ID NO: 38470 - DNA, 201 bp, Homo sapiens
gtgaagttcctctcagtgcccgtggcgatgccaggctcgcagcagttgggcacctgcagcccactcacggcctccagcaccacgatgcgcacctgcgcctrggcccagctcacgtggtttttgccccgcacgctcaccacgtggtctccgacgcgggggaagctgtgggagaaacggggcccggggagcacctcggggttg

SEQ ID NO: 38471 - DNA, 201 bp, Homo sapiens
aagcaggggccgctctgcagggccacatactggacggcgtcctgaacctccagcaccagcgtgcggttctcactgcccagggcgttgaaggcgcgcacctrgatctccaacagccccgcggccacgggcgtgtaggtgacgtcgcggcccgacaggatgaccagcgagtcgccctggaccttctgcagcgagaagtaccag

SEQ ID NO: 38472 - DNA, 201 bp, Homo sapiens
tggcagctggcggtgcgatacacctcccagcggtactcagtctggtaggtgacgcagtcgcgcaggtcaacgtgggcctccaagtagttgcgctgtgatcrccgcatcagcacctgcaggggcaggaccacgtccacctccggctcccggcaggccagcacctggacggtcaccgtggcctgcgccacgaagaagctcacc

SEQ ID NO: 38473 - DNA, 201 bp, Homo sapiens
caccctcaatgatgggcaccaggcgctcgggggccaccgtcacattggcctggatgctctgtgtcagtggcgtgtccccaaatgacacgacaaacacaaakcagtagtgccccacaggcagcgccagccgcggcagcaccagccgaggccggctcacgtccacgccgggcagggccacacgcgctgggcgccccggccgct

SEQ ID NO: 38474 - DNA, 201 bp, Homo sapiens
gtagaaggtgacgggccggccggccaccaggacgccgtcactcacacccacagccacggagggcagggaggcgcgcacgctcacaggcacctgctgcgtcmggttctcgaaggcattagatgccagcacggtcaggaggtactcacctgtggggacaggcccgagtggggcagccgcggcacccccacctgctccccaccc

SEQ ID NO: 38475 - DNA, 201 bp, Homo sapiens
ccgctcaccgtgttgttgacctccaggcgcacgtggtaggtgcccctcgaggcataggtgtggttggcagccggctggctctgggtcaggacaggggagcygtccccgaagtcccacgtgtaaagaacacccccaggcgagggcagcgggtgcgggtagaaggtgacgggccggccggccaccaggacgccgtcactcaca

SEQ ID NO: 38476 - DNA, 201 bp, Homo sapiens
ccagcctgagggacggtccccacggcatcacgggagggctccgtgacgtcacagagtcgggggatcccgctgctccccccacgcaggcctgcactcacccrtgcattcgaagtgcaccttggtggtgagggcgtgcacagcgcccagtgggaagaggcggcaagagccccccagcggcgggcggttgggggacaggcggat

SEQ ID NO: 38477 - DNA, 201 bp, Homo sapiens
gctaagacgccctccccggccgcgcagtcacctaccaggatggccagctgggcgtaggctaccccgagcaccaccaggcccaaggtgacccccaggagctmtggcagagctcggcataatgtcttgccaaagacggaccactggcgcacgaagcgtagctgctgggcagcctgcggacgagaaatctgtctgcttgcagcc

SEQ ID NO: 38478 - DNA, 201 bp, Homo sapiens
taggccacacgcagtctctgtgctttccgcggacgcttcacggggctgtggcttttcctcgcttctgcaaaaagcaccacgcagtccctctggtggggccrcaggtgaaggtagggtaggggtgccatcccgcctgctagctcacccctcactcgttcatgccacaactgtccatcatctaatacacttggggtgctctgc

SEQ ID NO: 38479 - DNA, 201 bp, Homo sapiens
gcgtacagctgagctgagctgagctaagacgccctccccggccgcgcagtcacctaccaggatggccagctgggcgtaggctaccccgagcaccaccaggyccaaggtgacccccaggagctctggcagagctcggcataatgtcttgccaaagacggaccactggcgcacgaagcgtagctgctgggcagcctgcggacg

SEQ ID NO: 38480 - DNA, 201 bp, Homo sapiens
agcaccaggtcccgtgtgtctgaccacacgcggtatgagccaccctcaatgatgggcaccaggcgctcgggggccaccgtcacattggcctggatgctctrtgtcagtggcgtgtccccaaatgacacgacaaacacaaagcagtagtgccccacaggcagcgccagccgcggcagcaccagccgaggccggctcacgtcc

SEQ ID NO: 38481 - DNA, 201 bp, Homo sapiens
tccaagtgcagctgcactcggggcagcagagcagcaagagccaggcccggggagggcggggggcgcagttcaggggcccagcttccctgtccactcccccmacgcctggcccctccctcaccccagtaggggcctaagccatcagcccaggtgaggtcacagtgagggctgttggggaggaaggggggcagcttgactggg

SEQ ID NO: 38482 - DNA, 201 bp, Homo sapiens
agaggctggcgccgaaggcggtgaggtggcgggtgaggcagacggcctggcggggcgaggtctcctccaggggcagcagcccctctgtccgccacaccatrtcctcctcgctgaagtactggcacagggacgtgtacaggcccacggacacctgcagcgccgaccagcggaagtggctggagaggttcagatggtaactcc

SEQ ID NO: 38483 - DNA, 201 bp, Homo sapiens
tccgccgtggtcatggaggagggaagtccgggcgaggttcctgtgctggtggagcccccagggttggaggacgttgaggcagcgctaggcatggacaggcrcacggatgcctacagcagggtgagtgtggctcagagcctggaccctgctgacctcggggggctccttaggggaggcagggctctgcgtgggtgtgcctgc

SEQ ID NO: 38484 - DNA, 201 bp, Homo sapiens
atggaggcgcagccctcctcctcgccagagcggcccagcaccgtgagcgtgaaggtgtatccctcgccgtcccgcagcacgccccgccgcagcaccagtcrcatgcctgcactgcccgtggatgtggtggtctcatccagcaccagcgtcttgttgctgaacgtacgtgcagcccaccgctgcaggcagaaggggtggtga

SEQ ID NO: 38485 - DNA, 201 bp, Homo sapiens
gagcctcttgggtcacagggtccccccgacaaaaagccggaagaccctaccccaaacgagagtgggagtggtgctgggagccagggaaccaagagccactscaggcaccgaagtcaggcgtccgcctgcgtccctctcccgcccgcttgctgctgataaacccatcgcccacagcctgaccagctgcccttacagcagtgc

SEQ ID NO: 38486 - DNA, 201 bp, Homo sapiens
ccccaggctcagcggcattctgtccttacagatccctcccacggctgaactgtccccaggatgagatgccgggggtgacatgggcagcctcaggtcctccmgggacccacaggcaggcacagggatggagactccggcctcggaggctgaacgagggagatgagaaaggggagtctgcgatgtccttgcctacacagatgg

SEQ ID NO: 38487 - DNA, 201 bp, Homo sapiens
tcccagccaggcgctggctctcctgccctccccctgggctctgcccacagttggcgcgagggtgggtgaagcctgaggctggcagggccgggaagtcttgkggctgggccttctgccccacaggcgctcctgggccgggggagccggggtcggggaatgcaacagtgggactgaggagaacttccctgggtgtggggcagc

SEQ ID NO: 38488 - DNA, 201 bp, Homo sapiens
gagcaccctgtctgcaggcacctgcctgggggctggtggtggagcctcggccatactcaccactaggactccctgcagtacacgggcctcggggctgggcrtggcgcggaggccacagatgggctcctccgccgtcacccgcaggctgaggttggcccggctggcgctgttttccaccaccacgtccaccacgtgctcccc

SEQ ID NO: 38489 - DNA, 201 bp, Homo sapiens
ggggggaggggagggggacgaagatgggatggggcaaaggcgacgcggttggggggaggagggaggcagaggaaagggccgcacggggcgggcgggtggcrtggggcacgggccgcggcacctgtgatgttgaggatgctgtctccgatggcggtgggcgtcacggtgcccgcggtggtctctgcctgcaggatgagcatc

SEQ ID NO: 38490 - DNA, 201 bp, Homo sapiens
ggggatgtttccctgctgccaggatggagtgccagcccccttctcatctcaggtttaatcagtacatcgtgtgtctggcccatcacgtcatagccatgtgrttcatcaggtgccgcctgcccttccggaaggattttgtccctttcatcactaaggtgggctcagggccggtgaaggctgtgtctctcggtaggccagggc

SEQ ID NO: 38491 - DNA, 201 bp, Homo sapiens
gtcctgtctcctgcagcgcgagatggtctactgcctggagcagggcctcatccaccgctgtgccagccagtgcgtcgtggccttgtccatctgcagcgtgragatgcctgacatcatcatcaaggcgctgcctgttctggtggtgaagctcacgcacatctcagccacagccagcatggccgtcccactgctggagttcct

SEQ ID NO: 38492 - DNA, 201 bp, Homo sapiens
ggatttggtcatcagctttcaggcccaaagacactggagcggctccgaggcgccccagaaggcttctccagaactgacttgcacctggccgtggttccagwgctgacagcattaatctcttaccataactacctggacaaaaccaaacaggtaggaggtcagagcaggacaggcgagcttgatggggcctgggattcgagg

SEQ ID NO: 38493 - DNA, 201 bp, Homo sapiens
gaacgcgcaggtcacacgcctgccgggaagctcaaccacccgggggacacccacgatggccctcctgagcccaccctctgccacgggcctgaaaggccatmggagcctctgcaccagagctggcacctgcttctccgtggcccccagctcctctctggccaggcccccagcagcccatgaaacagaaagcaaatttcacca

SEQ ID NO: 38494 - DNA, 201 bp, Homo sapiens
ggtgagaaccggcccaccacatccagcaacagggacatgggctggggacagtggctacctctggggtgggaaggggctcttcctcactgttggtattgctrggggactgtgtagcttttgccactagagcatatgtggcttgaagactgtacgtggaactgtggcaggtttggaaggaagcaaagctgaagcaggctgtcg

SEQ ID NO: 38495 - DNA, 201 bp, Homo sapiens
gccctccagctgggctggcaagtggggcagccatgacgaggcgttggcggagaggtacggggcctggggaccagggtggccgggagccggcgagcagtgcrggagggcgccagggccagcgtcgtgctgcaagccaacgaggtcaccagggagcatgaggacatcctggccgtggagggtgacctgtggagagggaggcag

SEQ ID NO: 38496 - DNA, 201 bp, Homo sapiens
tccagccacggcgcggcgctacctgctgcagcctctcttctccggagaggcccgggctcctccctacacccccgcggcccagccccgggtcccaggctccrgctccgggtcagcatcctcgcgctcaaggcggtcatgccggactcctgcggactacacatcccggcggcccatgcggccccgtcacgtgatgcaaggatc

SEQ ID NO: 38497 - DNA, 201 bp, Homo sapiens
gcctggccccgtgccagctgccgcagattgctacccacaatggacgggtcactgagcaggtccggccaactgagcgttccctcgccggagggccagcacascagactgcaggtggcgcgggtcagcaaggtaccaggggatgtgtcacacacacagcccacccccgtccagtcacgcacggacaccctgggcttccgagca

SEQ ID NO: 38498 - DNA, 201 bp, Homo sapiens
ggtactcagtctggtaggtgacgcagtcgcgcaggtcaacgtgggcctccaagtagttgcgctgtgatcgccgcatcagcacctgcaggggcaggaccacrtccacctccggctcccggcaggccagcacctggacggtcaccgtggcctgcgccacgaagaagctcaccaggttggaggcgttcacctgcacgcggtagt

SEQ ID NO: 38499 - DNA, 201 bp, Homo sapiens
ggccaccttggtggagacggtgtagttgctgatatagccaaagggaaagggattggagtccaccagaaagatgagctgcaccacgtcactgaggttggccrgggccccgctgaaagcctcggggatggagaagtggcagccaggccctggggcgccgccatagcacagcaggctccgcgggtccgagcgcttgccctgggc

SEQ ID NO: 38500 - DNA, 201 bp, Homo sapiens
cctctgcctgggcacaaagccctttctgaggtggcctcacagaagccagcctgtcttcagatcatggcgctgctaaggtcaggaatgccaggctgggccakggctgggcctcgggagctgcagggagaaaaggacccagcccgcctcagccccagatgtagcccttctcctgccaccagtgcctgggcaccctggccccta

SEQ ID NO: 38501 - DNA, 201 bp, Homo sapiens
ctgcgccgtggtgagctgcgtcctctctctgcagaccaagctgtacaccctgcctgcaagccacgccacgcgtgtgtatgagatgctggtcagccacattyagctccactacaagcacagctacaccctgccaatcgcgagcagcatccggctgcaggtatggtggctggggttgcgcagccagttcctgggggcccagcc

SEQ ID NO: 38502 - DNA, 201 bp, Homo sapiens
gaagtggctggagaggttcagatggtaactccccgctgggtctctgctcctgggcagggaaggggtagcggacgtgagcccaggctccgccaggttggatrtcgcagtctcagagcccatacccggtccagtcccctcgctgcctgccgtccccatggggccagtaacccaggcaatgctgacccatgatgccctgccctg

SEQ ID NO: 38503 - DNA, 201 bp, Homo sapiens
ggcgccggcctgtgtctggaatgccatcgaggccaccttggtggagacggtgtagttgctgatatagccaaagggaaagggattggagtccaccagaaagrtgagctgcaccacgtcactgaggttggccagggccccgctgaaagcctcggggatggagaagtggcagccaggccctggggcgccgccatagcacagcag

SEQ ID NO: 38504 - DNA, 201 bp, Homo sapiens
acagggacgtgtacaggcccacggacacctgcagcgccgaccagcggaagtggctggagaggttcagatggtaactccccgctgggtctctgctcctgggmagggaaggggtagcggacgtgagcccaggctccgccaggttggatgtcgcagtctcagagcccatacccggtccagtcccctcgctgcctgccgtcccca

SEQ ID NO: 38505 - DNA, 201 bp, Homo sapiens
gcggagctgcggtggccccgggcagcccagtccgagttgttgggcaccttcacggtgatggcgcgctctgaggccagccgctcgatggggatctgggcgcyggcctgtgtctggaatgccatcgaggccaccttggtggagacggtgtagttgctgatatagccaaagggaaagggattggagtccaccagaaagatgagc

SEQ ID NO: 38506 - DNA, 201 bp, Homo sapiens
agtccggctgcaccctgggcagagcccagggcgtgtccctctcccccccactgggccgtacccacctccttgaccttgctgaggcccatccagaggcgcarcctgcgcaggaacaactccaccatctcgtagtcctggggctcccaggccggccggtacagctctccacgcaaggcgtggtagcgccagcggagaataaca

SEQ ID NO: 38507 - DNA, 201 bp, Homo sapiens
cacgcaccgtccagcagcgtatagttgagctgcagatgcagcccggccgcagggttgctgctgtccagggtgaccacagcaccgacggaggcctggggctrgaccacaacggagttggcggagttggcggagctgcggtggccccgggcagcccagtccgagttgttgggcaccttcacggtgatggcgcgctctgaggcc

SEQ ID NO: 38508 - DNA, 201 bp, Homo sapiens
cacagccgggctctctaccagggtgtcatcttcatccgggtgcagccgcttggccaccagtgagaagtacagggcttccagcaagacctggggagggggtrgcttcagaggggtcccccgtgatggaggcctgtagcctacccctggcagccccctcaccttcagtggctcccagccgaggaatgaggccaggaagctggc

SEQ ID NO: 38509 - DNA, 201 bp, Homo sapiens
ctggcctggtgctcccggtgacggcaatgtggctcctctctgctgagggcgcccacacggctgggagtggtccctggcctgcctcagcaccattgttctcyggtgtttgggaggaggctgacccgtgggaggtgtctgccctgctcaggaagctggggctggcagcttcagaagcagtaggggccctgtggagcctctgcc

SEQ ID NO: 38510 - DNA, 201 bp, Homo sapiens
gcgcccgccaccacgcctggccaatttttttgtatttctagtagagatggggtttcactgtgttagccaggatggtctcaatctcctgacctcgtgatctrcccgccttggcctcccaaagtgctgggattacaggcgtgagccaccgcgcccagccatttgggggtaacttgtaagtctccagaggtgagctgtgagggg

SEQ ID NO: 38511 - DNA, 201 bp, Homo sapiens
gcctaggggctatgaaatttgtatcagaatgaactcccataagcctcttccctgtcactgggtgtggagctcaggcagccgctcgcctgcctgagggtgasggtggaaggccacatggggatcccagacctctgtgtgcttgccggaggcagcctgcgggcagaatgcaatctgggcctgtctgtgtggcctccgcctctc

SEQ ID NO: 38512 - DNA, 201 bp, Homo sapiens
gcctcttcccccccgagcagtggccctcccctggttttgggcctcctctctgtccaacagagcacacgccgcttcaggggggctttgttcgcttcccccasactgtgacttcaggagctcaggtgcctgtcccttcccctcaccgcctgtgcgcatctgggcaggccctcaatgttgagatggcagaagggcactgctggg

SEQ ID NO: 38513 - DNA, 201 bp, Homo sapiens
ggaacctgggtgtctcgccttctgctgcctcagggcctgggcgtctctgcccggctgccatgagtgctctccttcctggctttgaggggcggctcctctcrcccctctagtgtccatgtgaacgctcctccttgaagaagcctcttcccccccgagcagtggccctcccctggttttgggcctcctctctgtccaacagag

SEQ ID NO: 38514 - DNA, 201 bp, Homo sapiens
ttggtctcgctatgttgcccaggctggcctcaaactcctggcctcaagccatctgctctcctaaagtgctgggattacaggcgtgaggcaccgcgcccggstggacagtggttttgatttacgtttccctcatgactaatgaggccgaccatcttctcacacgctgttggccatctgtgcgtcttctttggagaaatctct

SEQ ID NO: 38515 - DNA, 201 bp, Homo sapiens
ctatttattggtctcgctatgttgcccaggctggcctcaaactcctggcctcaagccatctgctctcctaaagtgctgggattacaggcgtgaggcaccgsgcccggctggacagtggttttgatttacgtttccctcatgactaatgaggccgaccatcttctcacacgctgttggccatctgtgcgtcttctttggaga

SEQ ID NO: 38516 - DNA, 201 bp, Homo sapiens
ggggaagctcgcacccacccaccctgagacagccacagccacagccaccaggagcaggctgagcccgtgggccagggaggcacaccaggccggcagcaggygcttccgcagaccctccaccagtcctggggaagcagagacagacctgtgagaggcagctcacagggaggggctaggggcatcccggggctacgcaagcac

SEQ ID NO: 38517 - DNA, 201 bp, Homo sapiens
acaggcgccaccactaatatctatttattggtctcgctatgttgcccaggctggcctcaaactcctggcctcaagccatctgctctcctaaagtgctgggrttacaggcgtgaggcaccgcgcccggctggacagtggttttgatttacgtttccctcatgactaatgaggccgaccatcttctcacacgctgttggccat

SEQ ID NO: 38518 - DNA, 201 bp, Homo sapiens
ctccagcctgcagcccctatcccgcctcctcccacgctccagccacggcgcggcgctacctgctgcagcctctcttctccggagaggcccgggctcctccytacacccccgcggcccagccccgggtcccaggctccggctccgggtcagcatcctcgcgctcaaggcggtcatgccggactcctgcggactacacatccc

SEQ ID NO: 38519 - DNA, 201 bp, Homo sapiens
ccgtcacctggtctttggtttggctggagagcatcagtgacagcagcacctggtacctgcgtacctgcttgtgcagtgacagggaccggggtggcggcggrtcctgggtgattccctggccaggctccgccccccgccctcgacacaccctggtttgttgccctgggccacacttgaggcatcagcctccccctgtggggt

SEQ ID NO: 38520 - DNA, 201 bp, Homo sapiens
ctcatctggggaaaccaagccaggagaggcctgggggcctcagccctctgcacccatctcagccctatgccgagtgccacctggacctgtccacccagggycaggaagggcacggacccccaacccatcccacgcagggccaaggccccccatcccctgtccacagtcccccacagagccaaggtctcccaaccctgtcca

SEQ ID NO: 38521 - DNA, 201 bp, Homo sapiens
agcaccagccgaggccggctcacgtccacgccgggcagggccacacgcgctgggcgccccggccgctggcagctggcggtgcgatacacctcccagcggtmctcagtctggtaggtgacgcagtcgcgcaggtcaacgtgggcctccaagtagttgcgctgtgatcgccgcatcagcacctgcaggggcaggaccacgtcc

SEQ ID NO: 38522 - DNA, 201 bp, Homo sapiens
tggggccctgcagtgtggcgccaagagccctgggcctggcgtgaccaccaagtctccccagacatggagggccttgtggacaccagcgtggccaagatcgkgtctgaccgcaacctgcccttcgtggcccgccagatggccctgcacgcaaatgtgagtgggggtgggtccaggcgtgagctggtgggacaggcccaggtg

SEQ ID NO: 38523 - DNA, 201 bp, Homo sapiens
agccacacaggcccagtggaaactgagcggcgtctggtcgccgtcctccaggttggggtcgtaggactcgctcccatccagcaccaggtcccgtgtgtctsaccacacgcggtatgagccaccctcaatgatgggcaccaggcgctcgggggccaccgtcacattggcctggatgctctgtgtcagtggcgtgtccccaaa

SEQ ID NO: 38524 - DNA, 201 bp, Homo sapiens
tgacccatgatgccctgccctgccctgccaggctggcccgcagagctcaccccggggaaatgaagaaggtgtagggccggtggtcagcaccctggagtgastctgggcggatcctcctgctagccgagcagttgtgctcattgggccggggctccgagtgtaggtagactgccaggtagggctcaggttcctcagacaggt

SEQ ID NO: 38525 - DNA, 201 bp, Homo sapiens
ccctcagccgtcttccacatcgccaccctgatgcccaccaaggacgtggacaagcaccgctgcgacaagaagcgccacctgggcaacgactttgtgtccaytgtctacaatgactccggtgaggacttcaagcttggcaccatcaaggtgagtgaggggccgtcagtgaggctgggccccaggcaggtgcccactgctgtg

SEQ ID NO: 38526 - DNA, 201 bp, Homo sapiens
ctgtcctagtcctcagggacagtgagtgctcacgaggtcattcccaggatgaacacacgagcccttcacacagcactgcaaaaactgccttgttctgacgyctgcgacgagactcactcccagagggtgcaaccagcacagccagtgagagcaggggaggccctgccaccccgctgcgcccctcacctgagccccggcccc

SEQ ID NO: 38527 - DNA, 201 bp, Homo sapiens
tccggccctgctcaccctcagccgtcttccacatcgccaccctgatgcccaccaaggacgtggacaagcaccgctgcgacaagaagcgccacctgggcaasgactttgtgtccattgtctacaatgactccggtgaggacttcaagcttggcaccatcaaggtgagtgaggggccgtcagtgaggctgggccccaggcagg

SEQ ID NO: 38528 - DNA, 201 bp, Homo sapiens
gcctggcggggcgaggtctcctccaggggcagcagcccctctgtccgccacaccatgtcctcctcgctgaagtactggcacagggacgtgtacaggcccasggacacctgcagcgccgaccagcggaagtggctggagaggttcagatggtaactccccgctgggtctctgctcctgggcagggaaggggtagcggacgtg

SEQ ID NO: 38529 - DNA, 201 bp, Homo sapiens
ggatcttccacacgctacccaggctgtgcggggtggcgatccggaagatgtccaggctgttgcggtggaaggctctgtcgccgtccaggtgccggtggccrctccggctgtccaccccatacagcatgatgcccacgtgggccgtggtacctgggaggcaagagggaggggtgggaggctcggtctgctgcccaacacgtg

SEQ ID NO: 38530 - DNA, 201 bp, Homo sapiens
ggtgaggtggcgggtgaggcagacggcctggcggggcgaggtctcctccaggggcagcagcccctctgtccgccacaccatgtcctcctcgctgaagtacyggcacagggacgtgtacaggcccacggacacctgcagcgccgaccagcggaagtggctggagaggttcagatggtaactccccgctgggtctctgctcct

SEQ ID NO: 38531 - DNA, 201 bp, Homo sapiens
ggggcagaggggcagagcttggcagggtccgcacaaacctttgttgtcgtgccacactcggatcttccacacgctacccaggctgtgcggggtggcgatcyggaagatgtccaggctgttgcggtggaaggctctgtcgccgtccaggtgccggtggccgctccggctgtccaccccatacagcatgatgcccacgtgggc

SEQ ID NO: 38532 - DNA, 201 bp, Homo sapiens
catccggccctgctcaccctcagccgtcttccacatcgccaccctgatgcccaccaaggacgtggacaagcaccgctgcgacaagaagcgccacctgggcmacgactttgtgtccattgtctacaatgactccggtgaggacttcaagcttggcaccatcaaggtgagtgaggggccgtcagtgaggctgggccccaggca

SEQ ID NO: 38533 - DNA, 201 bp, Homo sapiens
gcgccgaaggcggtgaggtggcgggtgaggcagacggcctggcggggcgaggtctcctccaggggcagcagcccctctgtccgccacaccatgtcctcctmgctgaagtactggcacagggacgtgtacaggcccacggacacctgcagcgccgaccagcggaagtggctggagaggttcagatggtaactccccgctggg

SEQ ID NO: 38534 - DNA, 201 bp, Homo sapiens
gggaaggggtagcggacgtgagcccaggctccgccaggttggatgtcgcagtctcagagcccatacccggtccagtcccctcgctgcctgccgtccccatrgggccagtaacccaggcaatgctgacccatgatgccctgccctgccctgccaggctggcccgcagagctcaccccggggaaatgaagaaggtgtagggcc

SEQ ID NO: 38535 - DNA, 201 bp, Homo sapiens
tcgaggccaccttggtggagacggtgtagttgctgatatagccaaagggaaagggattggagtccaccagaaagatgagctgcaccacgtcactgaggttrgccagggccccgctgaaagcctcggggatggagaagtggcagccaggccctggggcgccgccatagcacagcaggctccgcgggtccgagcgcttgccct

SEQ ID NO: 38536 - DNA, 201 bp, Homo sapiens
cagcagcgggatgttttcattccagggtgcttggcgggctgggctgccgtggccactgcagagctccagaaaagaacatgtgtgtctccctccaaagtatrttccttgctggaaagcagatcccaggcagggtctcccccacgagcagggggagaggcaccccaaggtgggggagcgagggcagtggcagaaccaccccat

SEQ ID NO: 38537 - DNA, 201 bp, Homo sapiens
ccagctcagtgcctgccccatgctcggacgtcctccagcggtgctccccaactacttagcctgttacaaggcgaggctcggggtcttggcttgacgttgcycttgccctcacccccacagccaggctgtggccacttttgttgctttagccattagagatggctcagctctgcccacaccctggcctcccacccatgctgc

SEQ ID NO: 38538 - DNA, 201 bp, Homo sapiens
ggagaggcaccccaaggtgggggagcgagggcagtggcagaaccaccccataccctaggggacccagggaggggcttgcagatgcgggacccacatttggsagcggtgcccggccactgtcaccagatggtggccagcgcatcacccactcatgggccaggatggcagaggagatccacagagacggctccagcaggaggc

SEQ ID NO: 38539 - DNA, 201 bp, Homo sapiens
aatgagcatggctcctacaggtacacggagttcctgacgggcctgggccggctcatcgagctgaaggactgccagccggacaaggtgtacctgggaggccyggacgtgtgtggtgaggacggccagttcacctactgctggcacgatgacatcatgcaaggtacggcctggcgcctacccgctcctgctgccccaggcctc

SEQ ID NO: 38540 - DNA, 201 bp, Homo sapiens
tgggccaggatggcagaggagatccacagagacggctccagcaggaggccctcatagagatgccctggcctcagaagagccaacagaaagccgggaagggkgacgtcgaggctcaggcttggcacaacctccccaaagctcccaaagactctcggtgcccaccagcgacagcgcacaccgccaccacctaacagcaagaat

SEQ ID NO: 38541 - DNA, 201 bp, Homo sapiens
gccatagcacagcaggctccgcgggtccgagcgcttgccctgggccacgatctcctcgcccgccagcgtcaggggctcctcgttgagcacgcgggagcgcrtgaggatgcgcatgagggcagaggtcaggttgtaggcctgggacgccaccatccgagatggtgactcggctcccagctctgagggctgtggtgcccgcac

SEQ ID NO: 38542 - DNA, 201 bp, Homo sapiens
cagaaagcaaatttcaccagagacacccatggaagccctacgagaaacgccttccccccaagaacaaggccagggggccgcgtgtgccccacccgctgcaygcaccgtccagcagcgtatagttgagctgcagatgcagcccggccgcagggttgctgctgtccagggtgaccacagcaccgacggaggcctggggctgga

SEQ ID NO: 38543 - DNA, 201 bp, Homo sapiens
gaacccggagcccctgtactcccacagctgtgacgttccctgggcatgggcttgccccagcgctggcctcattcctgcctcaaccagaaggaagagctggsttccgcctctgcctgggcacaaagccctttctgaggtggcctcacagaagccagcctgtcttcagatcatggcgctgctaaggtcaggaatgccaggctg

SEQ ID NO: 38544 - DNA, 201 bp, Homo sapiens
catccctctccactcccacccttcacagcctgtgtgggcaggtgctgcactgaccttacgctcctgatgggcacactgaggctcaaggggccctcctcctyccccaacaccatcccccaaacacctccccgggcagccagcagggtccagtgtgtcaatggaggaagccaaggtaggaagagggatggtgggggggggggc

SEQ ID NO: 38545 - DNA, 201 bp, Homo sapiens
cctgctcacattccgtctctctggggaacacttttagagcctacatggaggacgcgcccctgctgagaggagccgtgttttttgtgggcatggctctctgrggagcccaccggctctattctctcaggaactcgccgacatctgtgttgccatcattttaccaggtaaggcggtttctgtgtgcagtgagctggcaggaac

SEQ ID NO: 38546 - DNA, 201 bp, Homo sapiens
cgtctccctctccaccaggtctccctgcaggtgctggacgccgtggtctgctacaactgcctgccggctgagagcctcccgctgttcatcgttaccctctrtcgcaccatcaacgtcaaggagctctgcgagccttgctggaaggtggggtttctgaaactgctctggaaggttcctgagagcacatggatgggacaaggg

SEQ ID NO: 38547 - DNA, 201 bp, Homo sapiens
tccagctccccccgctcgcccagtggcctccggccccgaggttacaccatctccgactcggccccatcacgcaggggcaagagagtagagagggacgcctwaaagagcagagccacagcctccaatgcagagaaagtgccaggcatcaaccccaggtgggcctcttgcttccgggcggggctcctgacacctctcctgcgg

SEQ ID NO: 38548 - DNA, 201 bp, Homo sapiens
ttcttggagagcacatcctcaccgctgtcccctctgctggtgacagcacgcagtggaagcactctggaaggcggtcgcggatctgttgcagccggagcggmcgctggaggcccggcacgcggtgctggctctgctgaaggccatcgtgcaggggcaggtaaggcccagggcgacgctgggatgggtgacgtcaggctgccc

SEQ ID NO: 38549 - DNA, 201 bp, Homo sapiens
gctgctgcaggagcctcggcaacctcacacatccatggcggaccctgggacagggccctgctcacattccgtctctctggggaacacttttagagcctacrtggaggacgcgcccctgctgagaggagccgtgttttttgtgggcatggctctctggggagcccaccggctctattctctcaggaactcgccgacatctgt

SEQ ID NO: 38550 - DNA, 201 bp, Homo sapiens
ggcagcccgcagtttcccatcaggggttcagactccacctcaaaagccactcgctttagccaggcgagaacacagcagagggcgtgagagactcacggggrctcgtgtgaggtcagggagcagagttttaaattcattttgtgaaatgagacagtggaatgagttagcggagccactgtcagagccgtgactttccaggaa

SEQ ID NO: 38551 - DNA, 201 bp, Homo sapiens
tgcatctgcagagctgacaggaacggccccaccggccggcgccacctgctcaccagggccggcccagctcccacctccttcctcctgagactccccagccscaggctctgccccagtgcttcagagatctcccaacctatggcccctcggggggtgggggcaggcacctggtgacccgggagaccaggaagcgctgcacgg

SEQ ID NO: 38552 - DNA, 201 bp, Homo sapiens
ctctgcatctgcagagctgacaggaacggccccaccggccggcgccacctgctcaccagggccggcccagctcccacctccttcctcctgagactccccasccgcaggctctgccccagtgcttcagagatctcccaacctatggcccctcggggggtgggggcaggcacctggtgacccgggagaccaggaagcgctgca

SEQ ID NO: 38553 - DNA, 201 bp, Homo sapiens
atggcagggggctcagggcactcctccatcctcccaccctcacagcagcccgctgggagccccatcactgtccccctttccagatggggaaactgaggctyagagcccggagaccagggcccaccagcccaggctcacagcagcacccacccacggggcctgtgggtaccggcagggatccccgtgcaggccacctcccgt

SEQ ID NO: 38554 - DNA, 201 bp, Homo sapiens
cccatgaaacagaaagcaaatttcaccagagacacccatggaagccctacgagaaacgccttccccccaagaacaaggccagggggccgcgtgtgccccamccgctgcacgcaccgtccagcagcgtatagttgagctgcagatgcagcccggccgcagggttgctgctgtccagggtgaccacagcaccgacggaggcct

SEQ ID NO: 38555 - DNA, 201 bp, Homo sapiens
cagtcgagaagccgatccacacgtctaggctcctgggggcgggtgtgggatggcagggggctcagggcactcctccatcctcccaccctcacagcagcccrctgggagccccatcactgtccccctttccagatggggaaactgaggctcagagcccggagaccagggcccaccagcccaggctcacagcagcacccaccc

SEQ ID NO: 38556 - DNA, 201 bp, Homo sapiens
cctgcacagtcgagaagccgatccacacgtctaggctcctgggggcgggtgtgggatggcagggggctcagggcactcctccatcctcccaccctcacagsagcccgctgggagccccatcactgtccccctttccagatggggaaactgaggctcagagcccggagaccagggcccaccagcccaggctcacagcagcac

SEQ ID NO: 38557 - DNA, 201 bp, Homo sapiens
tctcactgtccgagccctcataggccacacgcagtctctgtgctttccgcggacgcttcacggggctgtggcttttcctcgcttctgcaaaaagcaccacrcagtccctctggtggggccacaggtgaaggtagggtaggggtgccatcccgcctgctagctcacccctcactcgttcatgccacaactgtccatcatcta

SEQ ID NO: 38558 - DNA, 201 bp, Homo sapiens
caccccctgcacagtcgagaagccgatccacacgtctaggctcctgggggcgggtgtgggatggcagggggctcagggcactcctccatcctcccaccctyacagcagcccgctgggagccccatcactgtccccctttccagatggggaaactgaggctcagagcccggagaccagggcccaccagcccaggctcacagc

SEQ ID NO: 38559 - DNA, 201 bp, Homo sapiens
actgtcataataaactccaaactctatcctggcatcaaagctcctgccaccctggctggcatcaccacctgcctgctcccagctgcaccagttcctcctgmcatagtctggactacccctggggtccctgggtgcctatgggaatccaactctggccaattctgcagaagtcccagcgggactagcgcagaggccctgtcc

SEQ ID NO: 38560 - DNA, 201 bp, Homo sapiens
accctggctggcatcaccacctgcctgctcccagctgcaccagttcctcctgccatagtctggactacccctggggtccctgggtgcctatgggaatccarctctggccaattctgcagaagtcccagcgggactagcgcagaggccctgtccgtgtccctcactgctcactgcagtgcttggcccccagcaggtcctcaa

SEQ ID NO: 38561 - DNA, 201 bp, Homo sapiens
cccctcctcctcagcccaggctccaccgcgggcgctcggcaggcccctaaccacagccagcgtctcaggcccctgcctggccccccgcacacctccgggcygcagctcgcagacgtagctgtgcggcgctgagcacaggtcggtgttacaccacccggtgggcccgagccggacgcagtgctcggctgtggctgggtgtgg

SEQ ID NO: 38562 - DNA, 201 bp, Homo sapiens
gctggagtgcagtggcacaatctctgctcgctgctacctctgcctcccagtttcaagtggttctcctgcctcagcctcctgagtagctgggactacagacrcgtgccaccacacccatttaatttttgtatttttagtagagatggagtttcactatcttggccaggctggtcttgaactgctgacctcaggtgatctgcc

SEQ ID NO: 38563 - DNA, 201 bp, Homo sapiens
ccagcccctcctcctcagcccaggctccaccgcgggcgctcggcaggcccctaaccacagccagcgtctcaggcccctgcctggccccccgcacacctccrggctgcagctcgcagacgtagctgtgcggcgctgagcacaggtcggtgttacaccacccggtgggcccgagccggacgcagtgctcggctgtggctgggt

SEQ ID NO: 38564 - DNA, 201 bp, Homo sapiens
agttggcgcgagggtgggtgaagcctgaggctggcagggccgggaagtcttggggctgggccttctgccccacaggcgctcctgggccgggggagccgggstcggggaatgcaacagtgggactgaggagaacttccctgggtgtggggcagctcccggggccctcccaatccacagcagagggaatggccccagacaaac

SEQ ID NO: 38565 - DNA, 201 bp, Homo sapiens
tcctcgcagtggccctggcgacagcgccgcagcagcagggcgtacaccagcggggcgccagcatcctccgcgtcatgccagcctgagggacggtccccacrgcatcacgggagggctccgtgacgtcacagagtcgggggatcccgctgctccccccacgcaggcctgcactcacccgtgcattcgaagtgcaccttggtg

SEQ ID NO: 38566 - DNA, 201 bp, Homo sapiens
tcctttctagtcgtcctcagtctccagccaggaggagaagtcgctccacgcggaggagctggttggcaggggcatccccatcgagcgagtcgtctcctcgkagggtggccggccctctgtggacctctccttccagccctcgcagcccctgagcaagtccagctcctctcccgagctgcagactctgcaggacatcctcgg

SEQ ID NO: 38567 - DNA, 201 bp, Homo sapiens
gccctttctcctcggacatcaacaacatgcccctgcaggagctgtctaacgccctcatggcggctgagcgcttcaaggagcaccgggacacagccctgtasaagtcactgtcggtgccggcagccagcacggccaaaccccctcctctgcctcgctccaacacaggtgagtggcatggcgggccttggcacgggctctgct

SEQ ID NO: 38568 - DNA, 201 bp, Homo sapiens
caaatgtcacagggcgtagttacccaaacccagacaccgcagcccctgtgcatgcaggccctgtggtgtggcctgtggctccggggcaccgcacctgcacygcatgccactgcactgaatcctgcaggcagctgcagtgcaacggcagggccgtgtggacctcagcacacctgagcataggagggcatggcagagcccggg

SEQ ID NO: 38569 - DNA, 201 bp, Homo sapiens
aacccaagcctccgacctggtcagcccgaagcactgtccgagcaagggacggccaagggttgaggaagccgggagggtgagggccacgcgctctgtgtggmtgcggagtctgagctgccgtcagaaatccccgcggaagcactgaatctggatttcacagagctttgggccggagatacctggggctggtcagcatgtagt

SEQ ID NO: 38570 - DNA, 201 bp, Homo sapiens
tgctgatcctgtggcttttgtctttagggcgagcgtttgggggtcctcagagccctcttctttaaggtcatcaaggattacccttccaacgaagaccttcrcgaaaggctggaggttttcaaggccctcacagacaatgggagacacatcacctacttggaggaagagctgggtgggtgccaccttgggttggaggtttct

SEQ ID NO: 38571 - DNA, 201 bp, Homo sapiens
atgggtggatcacgaggtcaggagttcaagaccagcctggctaagatggtgaaacctcctctctactaaaacacacacacaaaaaattagccggctgtggyggcgggcgcctgtaatcttagctacttgggaggctgaggcagataactgcttgaacgtgggaggcagactttgcagtgagccgagatcatgcgactgcac

SEQ ID NO: 38572 - DNA, 201 bp, Homo sapiens
ggacccagctggaccctagcaggaggcaggcaatgctcactgagggcccctggggggatgcgtgtgagaagagacgtatgtgtgggtgtgaggaccgcagytgccacgtaggcctgactcacagactcctgcagcccttagccagggcctgggtcaggaggctgagctgggatggaacctgctcccacaccctcccctcag

SEQ ID NO: 38573 - DNA, 201 bp, Homo sapiens
gagaagaggtacagaggcagcgaagacacgttgagggggaggacgagaccaactgcgagacgccgagtcccgggctctcaggacgctctcccgtacctgcrccctcgtcagcccatcaccgaaagaacggcctgacccagggtcacactgcactgaatgcttcctgttttgctgtctctcggaggataaaagacactcttg

SEQ ID NO: 38574 - DNA, 201 bp, Homo sapiens
ggccaaaggtgctgccgcctccgcagggaacaccagctggctgatgagcctggagaacccgctcagccctttctcctcggacatcaacaacatgcccctgyaggagctgtctaacgccctcatggcggctgagcgcttcaaggagcaccgggacacagccctgtacaagtcactgtcggtgccggcagccagcacggccaa

SEQ ID NO: 38575 - DNA, 201 bp, Homo sapiens
aggagtgctggacctgagggacatggtaggctgtgaattcatcccggcctccaggaggcagttgcagccaagcccatgttaacctgggcgggcagtttctkgagcctcttgggtcacagggtccccccgacaaaaagccggaagaccctaccccaaacgagagtgggagtggtgctgggagccagggaaccaagagccact

SEQ ID NO: 38576 - DNA, 201 bp, Homo sapiens
gggctacgcaagcacacctgtcctggacagcctcgctgcctggggctgttcccagttcaggcctgggctgggtggccccagctcccccagcctctgcagcrccagcgtctctgtcttctccccaggagtgctggacctgagggacatggtaggctgtgaattcatcccggcctccaggaggcagttgcagccaagcccatg

SEQ ID NO: 38577 - DNA, 201 bp, Homo sapiens
agatcgtcctgtccatcaccaggctcatcaagaagtataggaaggagctccaggtggtggcgtgggacattctgctgaacatcatcgaacggctccttcarcagctccaggtggggtgggggcaggagctccggggagcaccgggaacccagacaggcaggctcggcccactcagaagatggtaccttgggccccatctct

SEQ ID NO: 38578 - DNA, 201 bp, Homo sapiens
tctcttgctacctggcctggggcaagggaggatgacaaggcctctggggtgatgagagtgcctggcagacagctgtgcccccagcaccggcccaaggccawgctcgcatccaagcagcagccgggctgccataacgccaccacacctaccaagcgcagcaggtgttgggggaggccagctctgggcgcaggcccctcagcc

SEQ ID NO: 38579 - DNA, 201 bp, Homo sapiens
ccttggacggtattgcctgtcagtgaaataaataaagtcctgaccccagtgcacagacatagaggcacagattgcagtcagacagctcttttattgacttygtctgcttggtgcgggggttgggggggtgtcgaggctctagaagcggccatgcccacagaagtggtacacagaagcaggcacagccagctccgagggcct

SEQ ID NO: 38580 - DNA, 201 bp, Homo sapiens
ccagcctgggcgacagagcaagactcgatctcaaaaaaaaaaaaaaaaaaaaaaaaggtgtttgtggtagaaagtgttctcacggctgctgactcagaacyatgagcctgtgtgtaagtcctggccttctcttcaaaggtgatggcccgctccctctccccacccccggagctggaagaaagggatgtggccgcatactcg

SEQ ID NO: 38581 - DNA, 201 bp, Homo sapiens
gacaagggtgctgtcttaggactgcgttttcacctcctgcgccgtggtgagctgcgtcctctctctgcagaccaagctgtacaccctgcctgcaagccacrccacgcgtgtgtatgagatgctggtcagccacattcagctccactacaagcacagctacaccctgccaatcgcgagcagcatccggctgcaggtatggtg

SEQ ID NO: 38582 - DNA, 201 bp, Homo sapiens
agcgagggcagtggcagaaccaccccataccctaggggacccagggaggggcttgcagatgcgggacccacatttggcagcggtgcccggccactgtcacsagatggtggccagcgcatcacccactcatgggccaggatggcagaggagatccacagagacggctccagcaggaggccctcatagagatgccctggcctc

SEQ ID NO: 38583 - DNA, 201 bp, Homo sapiens
agtgcccagagccccacacacagcaggggtgacaggtgccaggactcggcaggacacagggtagagagcccagtcccagggcacagcaccaacagggcctrggccacgctccagagggagtccacacaggaagacacgagctgcggggaaggcgacaccagtgagggcgtacagctgagctgagctgagctaagacgccct

SEQ ID NO: 38584 - DNA, 201 bp, Homo sapiens
gtgacagtgaagggcagggcctcacctcggctgctccttgtgagttgtgggccccgtgtctgtgcccggccgccctgcggtgctcaccagccttctgaacraggagctggacaggatccctggaaggggccccggggtctctgagtcgcgctcagcgggtgcttgtgctctctgcccagctgtgctgaagtcccgagggac

SEQ ID NO: 38585 - DNA, 201 bp, Homo sapiens
atctgcccgctttggcctcccaaagtgctgggattacaggcatgagccatcgcacatgggctaggtcgttatcttttatgtgtgtttgtgtctttgtcacrcatgcctggcattgtgttttgcccatgagtaaatgctgaatttttgcacttgtaaagttttctacttagaaacaactaaaacgttcatcaactgatgaat

SEQ ID NO: 38586 - DNA, 201 bp, Homo sapiens
cagagtgcaggccaggcccagacagcagcgggatgttttcattccagggtgcttggcgggctgggctgccgtggccactgcagagctccagaaaagaacaygtgtgtctccctccaaagtatattccttgctggaaagcagatcccaggcagggtctcccccacgagcagggggagaggcaccccaaggtgggggagcgag

SEQ ID NO: 38587 - DNA, 201 bp, Homo sapiens
attgggcgacctcacggacatagaaatatttattttgggcaaacattgccagactttcctgatgacttgtggacaggacaggaagtggtcattttgggagygcaggttgctggtagagcacctgagggctctgcccttgccttgcccagcatttgtgtgtgggagagcagtgagacctggacctctcatgctcagatctgc

SEQ ID NO: 38588 - DNA, 201 bp, Homo sapiens
ccctctcccccccactgggccgtacccacctccttgaccttgctgaggcccatccagaggcgcagcctgcgcaggaacaactccaccatctcgtagtcctrgggctcccaggccggccggtacagctctccacgcaaggcgtggtagcgccagcggagaataacagcccccagccgtagggcgccccacagccgcagtgcc

SEQ ID NO: 38589 - DNA, 201 bp, Homo sapiens
tcggcatcctgcactgggcctggggtggcgagtgcacagtgaggcgccgggccagggcccaggacaccaggacgaacagactggggaccgagccgcccgaraacccccccaccagcccctcctcctcagcccaggctccaccgcgggcgctcggcaggcccctaaccacagccagcgtctcaggcccctgcctggcccccc

SEQ ID NO: 38590 - DNA, 201 bp, Homo sapiens
acgcaggcccgggaataccatgacctggtgggcagggggccgcctcagctccacagaccccatcccagcctgaagcccagactccccctacccgaacttcscaggaagaggggagggaaggagagcgagccatcagacccccacaggcctggctcctgtcgctcgagaggaagactccggtggaaactgtccatggggggc

SEQ ID NO: 38591 - DNA, 201 bp, Homo sapiens
ggctgcctgcaggacaggtgccggccaggtgcctaccgtcaggtttcctgtctgaggtgacgtggccggcagccaagtgtgcacacgtctcctccgagccrctctctgctgggggtggggaacgcccaggagtctggtgatgtcggcgtctcccagcctcgggttgggccctgagtgtacggcatacacacttctgctgcc

SEQ ID NO: 38592 - DNA, 201 bp, Homo sapiens
aacacccagcaccgagagcagtggctggcgcacagcaggcacctgagtgcttgttgggtgggtgggacccccagggaggatgagccatgcgtgttattgaygtcatagagtgactagaccacagcccgtggtggctcggccatccaggcagtgctgccgggactgagctcggtgctccctgcaggatgatctgtctgctgt

SEQ ID NO: 38593 - DNA, 201 bp, Homo sapiens
tgcccaactgcctgcaccagcaatcctggccttgctgtgaggacaggtctccccacctgggcagcactcccagcccagtgctgcgtccgtctccggccagscgactgacccaggccggcccccaggcaggccccacccaatccacccccaggacacctggaatgagctggtgtctctggaacccctgctctgtccacctaa

SEQ ID NO: 38594 - DNA, 201 bp, Homo sapiens
cgttctccggggtccctgtgaggaggggagggtgttggggccctgatttgcccacaggccaccgtcagagatgcccaactgcctgcaccagcaatcctggycttgctgtgaggacaggtctccccacctgggcagcactcccagcccagtgctgcgtccgtctccggccagccgactgacccaggccggcccccaggcagg

SEQ ID NO: 38595 - DNA, 201 bp, Homo sapiens
cccgtctgggtcctgactgtgctggagcatgtagaaacccctcctgggcgccccacctgctgtttctgcggcccctgataaacgtgtggtgggcactgcgsgctcaggcgtgctactctcggtcccaagggtgactgggagggcgtcccacagcaagcaagcagctctgaccctgtgtgctggccgggctcgtgttccagg

SEQ ID NO: 38596 - DNA, 201 bp, Homo sapiens
gtggccaggcctggaggctgcccctccacacccgtcacaggtggggccacgtcccagggctgtgggcagcagggccagcctgccggcccgaggtagctgasacgtgtctcatgctgcagcgggtctgcccgccacccgggcgtgtgaaccccaggtcgggccccctcgccctggagcctcggcccctcaggggtgttccca

SEQ ID NO: 38597 - DNA, 201 bp, Homo sapiens
ctgctctcaggctcgctgccgttctccggggtccctgtgaggaggggagggtgttggggccctgatttgcccacaggccaccgtcagagatgcccaactgyctgcaccagcaatcctggccttgctgtgaggacaggtctccccacctgggcagcactcccagcccagtgctgcgtccgtctccggccagccgactgaccc

SEQ ID NO: 38598 - DNA, 201 bp, Homo sapiens
cgggcggcagctcagacctgctcaggacagggatgagaagccacctcctcagcagacaggacagagcccggtgccatctgacagaatgtcctagaatgctrgatatatgggacatctgcaccgtccgtgatggcagcccctcgcgacgtgtgccactgaacacttgacagcagactggtgcagctaaggaacagagtttta

SEQ ID NO: 38599 - DNA, 201 bp, Homo sapiens
cccctcctgggcgccccacctgctgtttctgcggcccctgataaacgtgtggtgggcactgcgcgctcaggcgtgctactctcggtcccaagggtgactgrgagggcgtcccacagcaagcaagcagctctgaccctgtgtgctggccgggctcgtgttccaggccatggcatgtccgaacgaggtggtgtcctatgagat

SEQ ID NO: 38600 - DNA, 201 bp, Homo sapiens
agggtgtggccaggcctggaggctgcccctccacacccgtcacaggtggggccacgtcccagggctgtgggcagcagggccagcctgccggcccgaggtakctgacacgtgtctcatgctgcagcgggtctgcccgccacccgggcgtgtgaaccccaggtcgggccccctcgccctggagcctcggcccctcaggggtgt

SEQ ID NO: 38601 - DNA, 201 bp, Homo sapiens
ccgcgggaacggagaagaggaactctctccatagcgcatagggggccccgggtagccctggccctgacgtgcagccattggcgcaggcctgggggtggcargaggcgtccagcggcaagcagatgttggctccagggcaccagcgtccccctggcatgcacgcgggggccagctgggtcctgttgtccggggacctgctct

SEQ ID NO: 38602 - DNA, 201 bp, Homo sapiens
tcctgtctctactaaaaatataaaaattagctgcacgtggtggcgggcacctgcaatcccagctgctcaggaggctgaggcaggagaatcgcttgaacctrggaggtgaaggttgcagtgagccaagattctgccactgcactccagcctggacgacagagcaagactctgtctcaaaaagaaaaaaaaaaagggccgggc

SEQ ID NO: 38603 - DNA, 201 bp, Homo sapiens
cccagaccctgggcagcagacaggaaggtggcctgaggagatgcagggaacagacccaggtcagggccacacaccgagtactgcgcggggggccccgcggsaacggagaagaggaactctctccatagcgcatagggggccccgggtagccctggccctgacgtgcagccattggcgcaggcctgggggtggcaggaggcg

SEQ ID NO: 38604 - DNA, 201 bp, Homo sapiens
ccaagcttgtcgggaggagtacacccccatggggggcaggacggtgccccagccccgggacacaaggggtccccagcgccgagcgtccgatctggaaggcrggaggagttaggaccatcctagcgtgggacccagcgggctccttagcggctgctggggcaccactgggtggagaaggaagtcccaggtgtgtggccacag

SEQ ID NO: 38605 - DNA, 201 bp, Homo sapiens
gggccaggatgtgctcccagggaagctgaagccaagcttgtcgggaggagtacacccccatggggggcaggacggtgccccagccccgggacacaaggggyccccagcgccgagcgtccgatctggaaggcgggaggagttaggaccatcctagcgtgggacccagcgggctccttagcggctgctggggcaccactgggt

SEQ ID NO: 38606 - DNA, 201 bp, Homo sapiens
tgagctggaagggtgggagccaggtgcacagggacagcctgatgggtgcccgagggccaggatgtgctcccagggaagctgaagccaagcttgtcgggagragtacacccccatggggggcaggacggtgccccagccccgggacacaaggggtccccagcgccgagcgtccgatctggaaggcgggaggagttaggacca

SEQ ID NO: 38607 - DNA, 201 bp, Homo sapiens
ctgctatgagctggaagggtgggagccaggtgcacagggacagcctgatgggtgcccgagggccaggatgtgctcccagggaagctgaagccaagcttgtygggaggagtacacccccatggggggcaggacggtgccccagccccgggacacaaggggtccccagcgccgagcgtccgatctggaaggcgggaggagtta

SEQ ID NO: 38608 - DNA, 201 bp, Homo sapiens
cctgggggtggcaggaggcgtccagcggcaagcagatgttggctccagggcaccagcgtccccctggcatgcacgcgggggccagctgggtcctgttgtcyggggacctgctctcaggctcgctgccgttctccggggtccctgtgaggaggggagggtgttggggccctgatttgcccacaggccaccgtcagagatgcc

SEQ ID NO: 38609 - DNA, 201 bp, Homo sapiens
tcacgctccctgtcttctaggtctcctgtgggcgagttcctcctagcgggtggcaggaccaaaacctggctggttgggaacaagcttgtcactgtgacgasaagcgtgggaaccgggacccggtcgttactaggcctggactcgggggagctgcagtccggcccggagtcgaggtgactgcaccttcctttcctccgcgcc

SEQ ID NO: 38610 - DNA, 201 bp, Homo sapiens
cgtgcagccattggcgcaggcctgggggtggcaggaggcgtccagcggcaagcagatgttggctccagggcaccagcgtccccctggcatgcacgcggggrccagctgggtcctgttgtccggggacctgctctcaggctcgctgccgttctccggggtccctgtgaggaggggagggtgttggggccctgatttgcccac

SEQ ID NO: 38611 - DNA, 201 bp, Homo sapiens
cgggcctgcgggagctccacgggcaagctgggtttcacgctccctgtcttctaggtctcctgtgggcgagttcctcctagcgggtggcaggaccaaaaccyggctggttgggaacaagcttgtcactgtgacgacaagcgtgggaaccgggacccggtcgttactaggcctggactcgggggagctgcagtccggcccgga

SEQ ID NO: 38612 - DNA, 201 bp, Homo sapiens
ctctggtgcaccctccgtcccatagcaaagcccctgcacagactccagccgagcccacacctggctatgaggtgggccagcggaagcgcctcatctcctcsgtggaggacttcaccgagtttgtgtgaggccggggccctccctcctgcactggccttggacggtattgcctgtcagtgaaataaataaagtcctgacccc

SEQ ID NO: 38613 - DNA, 201 bp, Homo sapiens
tggtgggacaggcccaggtgccacctgatagtgagctcaccccctgcctacgtccccagatggcctcacaggtgcatcatagccgctccaaccccaccgayatctacccctccaagtggattgcccggctccgccacatcaagcggctccgccagcgggtagggaatatggggctccctcagcggggtgtgctggctgccc

SEQ ID NO: 38614 - DNA, 201 bp, Homo sapiens
gccagatggccctgcacgcaaatgtgagtgggggtgggtccaggcgtgagctggtgggacaggcccaggtgccacctgatagtgagctcaccccctgcctmcgtccccagatggcctcacaggtgcatcatagccgctccaaccccaccgatatctacccctccaagtggattgcccggctccgccacatcaagcggctcc

SEQ ID NO: 38615 - DNA, 201 bp, Homo sapiens
cagcttggggtctgcagatgagaactccgtggcccaggctgacgatagcctgaaaaacctccacctggagctcacggaaacctgtctggacatgatggctygatacgtcttctccaacttcacggctgtcccgaagaggtccaggcggcactacagggctgggcgggcctgcgggagctccacgggcaagctgggtttcac

SEQ ID NO: 38616 - DNA, 201 bp, Homo sapiens
gcgtgggcatggaggcagtgatggggctggtggctttgcgtcccaaagccctgcccctggggagagccgaggaccactggccaggcaccagaggacgtggyccccgcaggcccccagagcccctggagtaatcaggaggtgccccagtgcaaggcacagagggcctcagcactggccccacaaacccatccggccctgctc

SEQ ID NO: 38617 - DNA, 201 bp, Homo sapiens
ggcatagggtgggcccagctgcaagggtgagcttcagagccccctcctctcaccccagctcacctgatgctgagaaggatttggcaggcgagtaggggctrgccagggagaagccgtcctcctctgggcccagcccatggcccgcctggccccgtgccagctgccgcagattgctacccacaatggacgggtcactgagca

SEQ ID NO: 38618 - DNA, 201 bp, Homo sapiens
gagcccatacccggtccagtcccctcgctgcctgccgtccccatggggccagtaacccaggcaatgctgacccatgatgccctgccctgccctgccaggcyggcccgcagagctcaccccggggaaatgaagaaggtgtagggccggtggtcagcaccctggagtgactctgggcggatcctcctgctagccgagcagttg

SEQ ID NO: 38619 - DNA, 201 bp, Homo sapiens
cggatgcctacagcagggtgagtgtggctcagagcctggaccctgctgacctcggggggctccttaggggaggcagggctctgcgtgggtgtgcctgcacyctgggaactggctctgaacttgggggagatgttcttccacatccctcgtgcacagacggtctgcactttgcagccatccacctgggccggccctggctgc

SEQ ID NO: 38620 - DNA, 201 bp, Homo sapiens
cgactcgcatgaggacgtctgtgcagaatgtctttggcttggccagcgggatccccttgacttggtccctttgtggctgagccctgttcccacgctgtgcragcactcccggcccagcttcaggcctgaggggtgggggtggcctgagtctccatggtgacatcagctgagctgcagactctgatgggtggcagctgttta

SEQ ID NO: 38621 - DNA, 201 bp, Homo sapiens
tcccgggagctgggctctctggggcgttggggctccttcctcacccgatagtctgaggatagccagaccccccaaacaaggcttgaataactctccacccrtgaaagaattcaaggagagctctgcagccgaggccttccggtgccgcagcatcagtgtgtctgaacatgtggtccgcaggtagcgggactgtcgggtggg

SEQ ID NO: 38622 - DNA, 201 bp, Homo sapiens
ggcgcccgccaccacgcctggccaatttttttgtatttctagtagagatggggtttcactgtgttagccaggatggtctcaatctcctgacctcgtgatcygcccgccttggcctcccaaagtgctgggattacaggcgtgagccaccgcgcccagccatttgggggtaacttgtaagtctccagaggtgagctgtgaggg

SEQ ID NO: 38623 - DNA, 201 bp, Homo sapiens
gctgcctctgctgcaagcgggtggggcctgaggtgtcctgtctcctgcagcgcgagatggtctactgcctggagcagggcctcatccaccgctgtgccagmcagtgcgtcgtggccttgtccatctgcagcgtggagatgcctgacatcatcatcaaggcgctgcctgttctggtggtgaagctcacgcacatctcagcca

SEQ ID NO: 38624 - DNA, 201 bp, Homo sapiens
tgagggcctccagcccccattgccacccctcactgtctgggtgtgctcactctgccagggcctgcggtccaatgtcctcttgtcttttgatgacaccccckagaaggacagcttcagggcccggagtactagtctcaacgagagacccaagaggtacggcctgcgggggtgtgcctggagtcggtgtggggtggggaagga

SEQ ID NO: 38625 - DNA, 201 bp, Homo sapiens
ccattctcctgcctcagcctcccgagtagctgggaccacaggcgcccgccaccacgcctggccaatttttttgtatttctagtagagatggggtttcactrtgttagccaggatggtctcaatctcctgacctcgtgatctgcccgccttggcctcccaaagtgctgggattacaggcgtgagccaccgcgcccagccatt

SEQ ID NO: 38626 - DNA, 201 bp, Homo sapiens
gcacaggagcgtttcctgggcaggtatcgcctctcagagggaagcggttggctgcagagcgccactctgcctcataggtgctgtgctcgtcgcctcatccrcccacccccatggtccgtctgcctccattgccctggggagcaggtcccgactcgcatgaggacgtctgtgcagaatgtctttggcttggccagcgggatc

SEQ ID NO: 38627 - DNA, 201 bp, Homo sapiens
ggacagtgagtgctcacgaggtcattcccaggatgaacacacgagcccttcacacagcactgcaaaaactgccttgttctgacgcctgcgacgagactcaytcccagagggtgcaaccagcacagccagtgagagcaggggaggccctgccaccccgctgcgcccctcacctgagccccggccccagcctgtcttgacgag

SEQ ID NO: 38628 - DNA, 201 bp, Homo sapiens
gtgtgggcagagcggttgccacgcctcccagacttactgcccaagccgcctctgccttcagatctgcgaggaagccgcctactccaaccccagcctacctytggtgcaccctccgtcccatagcaaagcccctgcacagactccagccgagcccacacctggctatgaggtgggccagcggaagcgcctcatctcctcggt

SEQ ID NO: 38629 - DNA, 201 bp, Homo sapiens
agcagcatgtaagggttctgatttatctttttttttttttttttttttttttgatacagtctcactctgtcgcccaggctggagtggagtgcagtggcgcratcttggctcactgcaaccttcgcctcttgggttcaggcgattctcctacctcagcctcctgagcatctcgtattacaggcacctgccaacatactcggc

SEQ ID NO: 38630 - DNA, 201 bp, Homo sapiens
cagagtcgccaacagccccgtaccacacggcgttggcgcccaggaagaggcagatgaggagaacgcagcaggtggccctctggatgcgagtgaaacggctmcgaggcggccggtcccatatggagagccagatgtgcttgtcaaagaagccacgctgcagctcagccaccagcaggcgccggaagcgcaaaagggctgcgt

SEQ ID NO: 38631 - DNA, 201 bp, Homo sapiens
gtggcgcgatcttggctcactgcaaccttcgcctcttgggttcaggcgattctcctacctcagcctcctgagcatctcgtattacaggcacctgccaacayactcggctaattttttgtattattagtagaaactgggtttcaccatgttggccaggctggtcttgaactcctgacctcaggtgatcctcccgccttggcc

SEQ ID NO: 38632 - DNA, 201 bp, Homo sapiens
ggaagcgttcccacctgctgtattcttggaaagagtctgtgaaggattggtgttaattcttccttaactgcttagaaaaattctatcgtgaaggctctgascctgggcttttctttgtgggattttttttttttttttttggagacggagtcttgctccgttgcccaggatggagtgcagtggcgcaatctcggctcactg

SEQ ID NO: 38633 - DNA, 201 bp, Homo sapiens
gctgggagagaggaagaggaggcacagctcgtgccaagggcccaggcgagagcttctcccactgggagagggccgagggcactgcagaggtcggaggtcakaggtggcaaggacgtgggaggggcctgcaggctgggtgtgtctggtgcacagacccagaccctgggcagcagacaggaaggtggcctgaggagatgcagg

SEQ ID NO: 38634 - DNA, 201 bp, Homo sapiens
gagggaaggaaagaggttctgttgcccttacttggaactccagccctggaggcctgagggtctgggctgcagaactgagatatttcctagttgaggcagastcctggttctggctgctttcatttctttatttttttgagatagagtctcaccactatgtcacccaggctggagtgcagcggcacgatctcacctcactgc

SEQ ID NO: 38635 - DNA, 201 bp, Homo sapiens
agacctggcagacaggaaggagcagctgtgctgggagagaggaagaggaggcacagctcgtgccaagggcccaggcgagagcttctcccactgggagaggsccgagggcactgcagaggtcggaggtcagaggtggcaaggacgtgggaggggcctgcaggctgggtgtgtctggtgcacagacccagaccctgggcagca

SEQ ID NO: 38636 - DNA, 201 bp, Homo sapiens
ggcaagaaggctccccagcccctttgccccctttcctgggcctgcgttcccagggcctccccagcccctctggctaccccgtgacctggccgctggggagrggtttcatgcctggatttggtcatcagctttcaggcccaaagacactggagcggctccgaggcgccccagaaggcttctccagaactgacttgcacctgg

SEQ ID NO: 38637 - DNA, 201 bp, Homo sapiens
tgcaggagggcgccagggccagcgtcgtgctgcaagccaacgaggtcaccagggagcatgaggacatcctggccgtggagggtgacctgtggagagggagscagggctgcatcacgtcctcacggtcatggcccgtggacccccgcacgacggatgagggtggacacgcagggctccccgcttcgtcagccacacctcaag

SEQ ID NO: 38638 - DNA, 201 bp, Homo sapiens
tggtggcgggcgcctgtagtcccagctacttgggaggctgaggcaggagaatggcgtgaacccagggggtggagcttgcagtgagccgggatcgcgccacygcactccagcctgggcgacagagccagactcatctcaaaaaaaaaaaaaaaaaaaaaaaaagaggtgcggaagcctttcctcacggatcacacaaatggt

SEQ ID NO: 38639 - DNA, 201 bp, Homo sapiens
atagcgcccaggcagccgcagtccagggttgggcctcaagcccagcagcacggtgagctgttccgtggctgcaagcagccgcagggcacaggcagggcagscccaagtgccctccagctgggctggcaagtggggcagccatgacgaggcgttggcggagaggtacggggcctggggaccagggtggccgggagccggcga

SEQ ID NO: 38640 - DNA, 201 bp, Homo sapiens
cgcggagcagtatgccagtgtgttcgccatctccctgccgtacaccaacccctccaagtgagtggtcgccccaggccctgtgcctcccagccgtggccccsgctaggccttgcggcagaaagccccggcagcctttgtccccaaggcctgagcgcctcggttttttgcacttcatgccctggggatgtttccctgctgcca

SEQ ID NO: 38641 - DNA, 201 bp, Homo sapiens
gcggccctaagcccaggcaagagcacagagcagagtgcagggtcctctggggtcccaggcccttgctgccccacgcactcctcaccccagttcctgctatragctggaagggtgggagccaggtgcacagggacagcctgatgggtgcccgagggccaggatgtgctcccagggaagctgaagccaagcttgtcgggagga

SEQ ID NO: 38642 - DNA, 201 bp, Homo sapiens
acgtcaaagctgcaggagaggttgtgcctggacacgccattgcccacctctgcccggacctcatagcgcccaggcagccgcagtccagggttgggcctcargcccagcagcacggtgagctgttccgtggctgcaagcagccgcagggcacaggcagggcaggcccaagtgccctccagctgggctggcaagtggggcagc

SEQ ID NO: 38643 - DNA, 201 bp, Homo sapiens
cgctgtctgatgccctgcccccacgttctggttccctgcaaggatgggggacacagcagggcccaggcatctggcagcaggaccaccgagcggccctaagsccaggcaagagcacagagcagagtgcagggtcctctggggtcccaggcccttgctgccccacgcactcctcaccccagttcctgctatgagctggaaggg

SEQ ID NO: 38644 - DNA, 201 bp, Homo sapiens
cagccactggggagaccacgtcaaagctgcaggagaggttgtgcctggacacgccattgcccacctctgcccggacctcatagcgcccaggcagccgcagyccagggttgggcctcaagcccagcagcacggtgagctgttccgtggctgcaagcagccgcagggcacaggcagggcaggcccaagtgccctccagctggg

SEQ ID NO: 38645 - DNA, 201 bp, Homo sapiens
cgcagcccagccactggggagaccacgtcaaagctgcaggagaggttgtgcctggacacgccattgcccacctctgcccggacctcatagcgcccaggcakccgcagtccagggttgggcctcaagcccagcagcacggtgagctgttccgtggctgcaagcagccgcagggcacaggcagggcaggcccaagtgccctcc

SEQ ID NO: 38646 - DNA, 201 bp, Homo sapiens
aggccagtgccagccaggacaacctctgggacaatgggatgtcggctccaacgaccaatttacaagaaacacaaagcacacactcacagcaccacggaggwgacaccatggaggtggcacccccaagacacagcgagaaatccaggctgcaggagccagtttcttcaacaaattgcacaaggaaaaagagaggaagggaag

SEQ ID NO: 38647 - DNA, 201 bp, Homo sapiens
tgctgtgcagagtctgctcgggtagctcagcactgctggctctgccccacaggcattcagggacttgctaagcctcggctgttctcccggtggagcactcraggttggcgaggggtaggcgaggctgcctctgctgcaagcgggtggggcctgaggtgtcctgtctcctgcagcgcgagatggtctactgcctggagcagg

SEQ ID NO: 38648 - DNA, 201 bp, Homo sapiens
cctgagctgatgacatctacacctaggccagtgccagccaggacaacctctgggacaatgggatgtcggctccaacgaccaatttacaagaaacacaaagsacacactcacagcaccacggaggtgacaccatggaggtggcacccccaagacacagcgagaaatccaggctgcaggagccagtttcttcaacaaattgca

SEQ ID NO: 38649 - DNA, 201 bp, Homo sapiens
agtgctaccactgagaacagggtatcgttggtctcccaggggcagccgggcacgaaggtggccaccagggcagggcagacattctcaaagcgggcgctgasactgcccccaggccagcgagccgtggccgtggcgttggcaccagagtccacctggagcaccaaggctgagccgttggtgggcacgtagaggcggccgtcg

SEQ ID NO: 38650 - DNA, 201 bp, Homo sapiens
gcagacccaggtgacccccagccagggtgagtggcaaccagcaccagaagtggcctttagagcagggggccctgagctgatgacatctacacctaggccastgccagccaggacaacctctgggacaatgggatgtcggctccaacgaccaatttacaagaaacacaaagcacacactcacagcaccacggaggtgacacc

SEQ ID NO: 38651 - DNA, 201 bp, Homo sapiens
ggcgctgttttccaccaccacgtccaccacgtgctccccctcactgagccacggcagtgctaccactgagaacagggtatcgttggtctcccaggggcagscgggcacgaaggtggccaccagggcagggcagacattctcaaagcgggcgctgacactgcccccaggccagcgagccgtggccgtggcgttggcaccaga

SEQ ID NO: 38652 - DNA, 201 bp, Homo sapiens
gaacagacgcccactctggggcaccagcaggccccgcctgacagcagcaggagcagccaccacgggctcagggtcaccaagcctcctggccggtccagagwggggagcgtgagggtgagaaccggcccaccacatccagcaacagggacatgggctggggacagtggctacctctggggtgggaaggggctcttcctcact

SEQ ID NO: 38653 - DNA, 201 bp, Homo sapiens
cacagatgggctcctccgccgtcacccgcaggctgaggttggcccggctggcgctgttttccaccaccacgtccaccacgtgctccccctcactgagccayggcagtgctaccactgagaacagggtatcgttggtctcccaggggcagccgggcacgaaggtggccaccagggcagggcagacattctcaaagcgggcgc

SEQ ID NO: 38654 - DNA, 201 bp, Homo sapiens
gcagcagacccaggtgacccccagccagggtgagtggcaaccagcaccagaagtggcctttagagcagggggccctgagctgatgacatctacacctaggycagtgccagccaggacaacctctgggacaatgggatgtcggctccaacgaccaatttacaagaaacacaaagcacacactcacagcaccacggaggtgac

SEQ ID NO: 38655 - DNA, 201 bp, Homo sapiens
gcaggggtgggggcaggtcagccgaggaccccagagccccccggctccccgcccatcccactgtgaaccaggcctgggggtgccatggacacttcttccaygccagcaggcagccctgcctgtcaccggttctggccatgcactccctgcgtgccaggctccaggctggctccttctcccggccctcaccccagcccaagg

SEQ ID NO: 38656 - DNA, 201 bp, Homo sapiens
ctgtgtcgaagccacacaggcccagtggaaactgagcggcgtctggtcgccgtcctccaggttggggtcgtaggactcgctcccatccagcaccaggtccygtgtgtctgaccacacgcggtatgagccaccctcaatgatgggcaccaggcgctcgggggccaccgtcacattggcctggatgctctgtgtcagtggcgt

SEQ ID NO: 38657 - DNA, 201 bp, Homo sapiens
atgaggtctgtgtgaccgtaggcactgcctcctcgcctgtaaacagatggtcactgcaccttcctcttatgggatgttctggggatcatatgaggcagttstcgcagagtgctgagatcgtacctggcagctggtgtggggctacggtgttgttttgcccttgcaccctttcggggccactcccctgctcactgcattcca

SEQ ID NO: 38658 - DNA, 201 bp, Homo sapiens
ctggctggcatcaccacctgcctgctcccagctgcaccagttcctcctgccatagtctggactacccctggggtccctgggtgcctatgggaatccaactytggccaattctgcagaagtcccagcgggactagcgcagaggccctgtccgtgtccctcactgctcactgcagtgcttggcccccagcaggtcctcaacgg

SEQ ID NO: 38659 - DNA, 201 bp, Homo sapiens
taataaactccaaactctatcctggcatcaaagctcctgccaccctggctggcatcaccacctgcctgctcccagctgcaccagttcctcctgccatagtytggactacccctggggtccctgggtgcctatgggaatccaactctggccaattctgcagaagtcccagcgggactagcgcagaggccctgtccgtgtccc

SEQ ID NO: 38660 - DNA, 201 bp, Homo sapiens
ccgtggcctggccagccccccaaggaagctgtgtctctggcagttgcgctctaaggcatcaggcctaggggtcgctccagaatgcctgtcttccccgacgscaatcccaggcaggggccccggggtctgcgcctgctgtccctacactctcccacactctcctgtcattcagggatgcaggtgggaaagggcaaggccccg

SEQ ID NO: 38661 - DNA, 201 bp, Homo sapiens
tggtgacaatccctagtcctcgctctcaggatccagggaccagaaatgggagccaggggcccctccgtggcctggccagccccccaaggaagctgtgtctstggcagttgcgctctaaggcatcaggcctaggggtcgctccagaatgcctgtcttccccgacgccaatcccaggcaggggccccggggtctgcgcctgct

SEQ ID NO: 38662 - DNA, 201 bp, Homo sapiens
cgggtgtccatcctcccaaggtgctgtctgcaggggagggtgccagccaaaagccaccgggtagaaagaaaacaaggaccttgctaagatggggggtcatytgggcagatggggcccctgcctacctttgggggggcactggagtcatagcagtgctcagtccccagatggtccacaggtgcatcctttttgttcctcatg

SEQ ID NO: 38663 - DNA, 201 bp, Homo sapiens
gcgcctccctccccaccctcctcccccattcccccagcgcctccctccctaccattcccctcctgtccccgcagagcctccctccccaccctccccctttmtccccccagcacctccctccccaccccacctgctgaggggatactcttcctcctccctcctcagtccttacctccccactctgccctcatctcattccag

SEQ ID NO: 38664 - DNA, 201 bp, Homo sapiens
gggtctgtctgcacccaactgccaagaagcctccggtgctaggaagagacaccaggacctgggaaaaggattcaaggagggccctccccccagtgcctccmtccccaccctcccctcttctccctctcaaccctcccctcttctccccgcagcacctccctctccaccctccccccatcctcccagcgcctccctccccac

SEQ ID NO: 38665 - DNA, 201 bp, Homo sapiens
gggcgggagggacgctgccggggcggggccctgcgagggggcgggacgctgccggggcggggccctacgagggggcgggacgctgccggggcggggccctrcgagggggcgggacgctgcgagggggcggggcgctgcgaggggtgagacgctgccggggcggggccccgcgagggggcgggacgctgccggtgggaggcg

SEQ ID NO: 38666 - DNA, 201 bp, Homo sapiens
gtcgtaggactcgctcccatccagcaccaggtcccgtgtgtctgaccacacgcggtatgagccaccctcaatgatgggcaccaggcgctcgggggccaccrtcacattggcctggatgctctgtgtcagtggcgtgtccccaaatgacacgacaaacacaaagcagtagtgccccacaggcagcgccagccgcggcagcac

SEQ ID NO: 38667 - DNA, 201 bp, Homo sapiens
gagggcaggggagggagctcccacctgttgtccagccagttgtgcagctgcaggaagcgcagccggtcgcggctctcctccaggctcaggcccagctcctrcacgtagcccccgctgtcatacacggcacaggagccccaggaccatgccctgccggagaggggtggcgtgggtgccgcaccccagcccttccggcacccc

SEQ ID NO: 38668 - DNA, 201 bp, Homo sapiens
atccggtttgccaccttccaacttggacggcggaagggcatacacagggcagaggacactggagtgtgcgttctggtgtactggacccagctggaccctarcaggaggcaggcaatgctcactgagggcccctggggggatgcgtgtgagaagagacgtatgtgtgggtgtgaggaccgcagctgccacgtaggcctgact

SEQ ID NO: 38669 - DNA, 201 bp, Homo sapiens
catccggtttgccaccttccaacttggacggcggaagggcatacacagggcagaggacactggagtgtgcgttctggtgtactggacccagctggaccctrgcaggaggcaggcaatgctcactgagggcccctggggggatgcgtgtgagaagagacgtatgtgtgggtgtgaggaccgcagctgccacgtaggcctgac

SEQ ID NO: 38670 - DNA, 201 bp, Homo sapiens
gatgctgctcccaaactccaggtttcccaggggcctggccactgccggtgagctcactccctcccaggatactcatccggtttgccaccttccaacttggrcggcggaagggcatacacagggcagaggacactggagtgtgcgttctggtgtactggacccagctggaccctagcaggaggcaggcaatgctcactgagg

SEQ ID NO: 38671 - DNA, 201 bp, Homo sapiens
ggaggatgctgctcccaaactccaggtttcccaggggcctggccactgccggtgagctcactccctcccaggatactcatccggtttgccaccttccaacytggacggcggaagggcatacacagggcagaggacactggagtgtgcgttctggtgtactggacccagctggaccctagcaggaggcaggcaatgctcact

SEQ ID NO: 38672 - DNA, 201 bp, Homo sapiens
gggcctcggggctgggcgtggcgcggaggccacagatgggctcctccgccgtcacccgcaggctgaggttggcccggctggcgctgttttccaccaccacrtccaccacgtgctccccctcactgagccacggcagtgctaccactgagaacagggtatcgttggtctcccaggggcagccgggcacgaaggtggccacca

SEQ ID NO: 38673 - DNA, 201 bp, Homo sapiens
acacaatgggcacccggccactccggatcagcacctggcgtgggagtggggttacctccaacacaggtctatttggcctgctggaaggactgggggacccrtggaggatgctgctcccaaactccaggtttcccaggggcctggccactgccggtgagctcactccctcccaggatactcatccggtttgccaccttccaa

SEQ ID NO: 38674 - DNA, 201 bp, Homo sapiens
tgccctcactgggaagccaggcctcacgccctgtgtgagcaccctgtctgcaggcacctgcctgggggctggtggtggagcctcggccatactcaccactrggactccctgcagtacacgggcctcggggctgggcgtggcgcggaggccacagatgggctcctccgccgtcacccgcaggctgaggttggcccggctggc

SEQ ID NO: 38675 - DNA, 201 bp, Homo sapiens
ggcaagctgggtgttctctgggctcatgggtgtggacgggtgaggggcatggaggacggccctgccacgcactgacctgtgtcgaagccacacaggcccastggaaactgagcggcgtctggtcgccgtcctccaggttggggtcgtaggactcgctcccatccagcaccaggtcccgtgtgtctgaccacacgcggtatg

SEQ ID NO: 38676 - DNA, 201 bp, Homo sapiens
cacactccaaggacacaatgggcacccggccactccggatcagcacctggcgtgggagtggggttacctccaacacaggtctatttggcctgctggaaggwctgggggacccatggaggatgctgctcccaaactccaggtttcccaggggcctggccactgccggtgagctcactccctcccaggatactcatccggttt

SEQ ID NO: 38677 - DNA, 201 bp, Homo sapiens
gcagagggcgtgagagactcacgggggctcgtgtgaggtcagggagcagagttttaaattcattttgtgaaatgagacagtggaatgagttagcggagccrctgtcagagccgtgactttccaggaatttaaagcccaccaggtagcccgaggagccagccagcaggacctgcccggggccgacgtccccagtaactgggc

SEQ ID NO: 38678 - DNA, 201 bp, Homo sapiens
cagacggcctggcggggcgaggtctcctccaggggcagcagcccctctgtccgccacaccatgtcctcctcgctgaagtactggcacagggacgtgtacargcccacggacacctgcagcgccgaccagcggaagtggctggagaggttcagatggtaactccccgctgggtctctgctcctgggcagggaaggggtagcg

SEQ ID NO: 38679 - DNA, 201 bp, Homo sapiens
gtggaatggtgaccgtgctgctcccgcggggcccaaagttcagcgcacacccgccagcctccctctgcaggccgagaacaaggggcgacgtggcctgagarccccatccagttttaaagcagagcccggcccaggagacagcgcgggagaccccctccccatgctgggacggggcccaccaggcactgaggacgggccagc

SEQ ID NO: 38680 - DNA, 201 bp, Homo sapiens
agcggccctccaagtacacgtaggagctgcggctcacttcgtacacggcctgtgccttgcaggacacacactccaaggacacaatgggcacccggccactscggatcagcacctggcgtgggagtggggttacctccaacacaggtctatttggcctgctggaaggactgggggacccatggaggatgctgctcccaaact

SEQ ID NO: 38681 - DNA, 201 bp, Homo sapiens
gctttagccaggcgagaacacagcagagggcgtgagagactcacgggggctcgtgtgaggtcagggagcagagttttaaattcattttgtgaaatgagacrgtggaatgagttagcggagccactgtcagagccgtgactttccaggaatttaaagcccaccaggtagcccgaggagccagccagcaggacctgcccgggg

SEQ ID NO: 38682 - DNA, 201 bp, Homo sapiens
aagccggggcggcctccatccctgaacacccgcccagcccctgccagcctccagccctgctcctcccaccggagctccgctcccacaggagcctacccggsgcaggagagacgcacacacaggctgcccggtggggcccggggccagggcaagagcttgagaagggaaccaacaaagaaggggaccagaggccaccccagc

SEQ ID NO: 38683 - DNA, 201 bp, Homo sapiens
cccctcgcttggagccgctgctgcaattgaggcagcggccctccaagtacacgtaggagctgcggctcacttcgtacacggcctgtgccttgcaggacacwcactccaaggacacaatgggcacccggccactccggatcagcacctggcgtgggagtggggttacctccaacacaggtctatttggcctgctggaaggac

SEQ ID NO: 38684 - DNA, 201 bp, Homo sapiens
aggggttcagactccacctcaaaagccactcgctttagccaggcgagaacacagcagagggcgtgagagactcacgggggctcgtgtgaggtcagggagcrgagttttaaattcattttgtgaaatgagacagtggaatgagttagcggagccactgtcagagccgtgactttccaggaatttaaagcccaccaggtagcc

SEQ ID NO: 38685 - DNA, 201 bp, Homo sapiens
caggtgcctccgcctagacttgctcttcccagcaatgaccacccggcagccagccccaagccggggcggcctccatccctgaacacccgcccagcccctgycagcctccagccctgctcctcccaccggagctccgctcccacaggagcctacccggcgcaggagagacgcacacacaggctgcccggtggggcccggggc

SEQ ID NO: 38686 - DNA, 201 bp, Homo sapiens
agggtcaccaagcctcctggccggtccagagaggggagcgtgagggtgagaaccggcccaccacatccagcaacagggacatgggctggggacagtggctrcctctggggtgggaaggggctcttcctcactgttggtattgctaggggactgtgtagcttttgccactagagcatatgtggcttgaagactgtacgtgga

SEQ ID NO: 38687 - DNA, 201 bp, Homo sapiens
aacctctctgtgcctcagtttccccatctgtaaagcaaacctagtaccagctacaaagagtccacctctctctgagtcttctcagaccctcccggcgctcytgccccagctcctcacccagagagctcggagcagtgaggggaggcacctacactggcttacagaacccaggacaggctgcacaggtcacgccatttctga

SEQ ID NO: 38688 - DNA, 201 bp, Homo sapiens
tccccaggtgtcaccctccccacgagtgacccagcaggtgcctccgcctagacttgctcttcccagcaatgaccacccggcagccagccccaagccggggsggcctccatccctgaacacccgcccagcccctgccagcctccagccctgctcctcccaccggagctccgctcccacaggagcctacccggcgcaggagag

SEQ ID NO: 38689 - DNA, 201 bp, Homo sapiens
cgtgttggttgaacgcgggctccagtgataacggagccctcgagggtggccctccttctgctgagggctcatggaggccttggtgacaatccctagtcctygctctcaggatccagggaccagaaatgggagccaggggcccctccgtggcctggccagccccccaaggaagctgtgtctctggcagttgcgctctaaggc

SEQ ID NO: 38690 - DNA, 201 bp, Homo sapiens
cacccctcctggtcccacgcactcccagtagtgctcctggcacagggactatggctccgcaggtctgcacaccacccccctgctccccaggaccccgaggyctcacctcctgccacgggcctctacttccccaggtgtcaccctccccacgagtgacccagcaggtgcctccgcctagacttgctcttcccagcaatgacc

SEQ ID NO: 38691 - DNA, 201 bp, Homo sapiens
gagccggcctccaccacggggctgtacctctgcggggggaatggtgtcagcctgggctctgtggaggactctgcccttagcctgtcgcctcctggacacamctcccgtcgggctggagagtcccacgcggggcacagaggagaggaggtgcccggggctctgcatgccatgggagccaagcccgggctgggacactcactg

SEQ ID NO: 38692 - DNA, 201 bp, Homo sapiens
gggctcttcctagaagacacaggcctctcctaggctctcctgacagaggccctacccctgcccccgagtcaccttgccccttggggactctctctgggcarctccctgtgggagctttgaaacctggcttcaatgtcacctgcactgggggtccttccaggccagccccctccccatcatccatctctgtccttggagaat

SEQ ID NO: 38693 - DNA, 201 bp, Homo sapiens
ccccgcccacctactgagagcttgaagaccgccgcgctctgataaatgacattgaagaccacgttctggaaggtcagggactgcttgtcgttgatggtccrccggaagaccatgtccgagccggcctccaccacggggctgtacctctgcggggggaatggtgtcagcctgggctctgtggaggactctgcccttagcctg

SEQ ID NO: 38694 - DNA, 201 bp, Homo sapiens
ccatggcagcgtcctcgggcagcatgaagcagagcagaaggcagaggtgaaggtggagcccgcccccgccctgccccgccccatcccctcccctccccacycccgcccacctactgagagcttgaagaccgccgcgctctgataaatgacattgaagaccacgttctggaaggtcagggactgcttgtcgttgatggtcca

SEQ ID NO: 38695 - DNA, 201 bp, Homo sapiens
ctaataaagaaactaccgtttctcacgcaggcacgttctgaacgcccgagtgcgggagccacgtaagacccggctcagggaccccgggtgaggccagctgsacatgcaggatgcaggtcctcaccactgcctccgctcggctgccagggctcttcctagaagacacaggcctctcctaggctctcctgacagaggccctac

SEQ ID NO: 38696 - DNA, 201 bp, Homo sapiens
aaaaagaagaaaaggaaactgggtgtggtggcttatgcctgtaaacccagtgctttgggaaggccaggagtttgagaccaggatggacagcatagcaagaycccatctctacaaggaaaaaaagaatcagccaggcatggtagtgtgtaactgtagttccagctactcggggggctgaggaggaaggatcgcttgagccag

SEQ ID NO: 38697 - DNA, 201 bp, Homo sapiens
acgttgtagttcacggtgacgttgctcacgtggttggaggccgtcagctgcagggacaggcgtcagtgagcccaggtggcaggtgagaggcctggccctgmttggcgtccctccctccactcacccacagccatggcagcgtcctcgggcagcatgaagcagagcagaaggcagaggtgaaggtggagcccgcccccgccc

SEQ ID NO: 38698 - DNA, 201 bp, Homo sapiens
ccacatttttgtccacaagtttggcgagtttgcatccgcgtctaataaagaaactaccgtttctcacgcaggcacgttctgaacgcccgagtgcgggagcmacgtaagacccggctcagggaccccgggtgaggccagctggacatgcaggatgcaggtcctcaccactgcctccgctcggctgccagggctcttcctaga

SEQ ID NO: 38699 - DNA, 201 bp, Homo sapiens
aaaattagaaaacaaactacaatctcagaaaagcactagcaacttacacgacatactaaaggccaaaaataccctcctgacacacagctaataaagaaaamgtcaactattccagttaaaaagaagaaaaggaaactgggtgtggtggcttatgcctgtaaacccagtgctttgggaaggccaggagtttgagaccaggat

SEQ ID NO: 38700 - DNA, 201 bp, Homo sapiens
cccctgccggcaatcgcgtacaggagtgagcgtgtgacttcttgtccacatttttgtccacaagtttggcgagtttgcatccgcgtctaataaagaaactrccgtttctcacgcaggcacgttctgaacgcccgagtgcgggagccacgtaagacccggctcagggaccccgggtgaggccagctggacatgcaggatgca

SEQ ID NO: 38701 - DNA, 201 bp, Homo sapiens
gaccagccgacctaactccatctaaaatacacaacttctacgcaaaatataaataaaattagaaaacaaactacaatctcagaaaagcactagcaacttasacgacatactaaaggccaaaaataccctcctgacacacagctaataaagaaaacgtcaactattccagttaaaaagaagaaaaggaaactgggtgtggtg

SEQ ID NO: 38702 - DNA, 201 bp, Homo sapiens
ccttcccccacccctgccggcaatcgcgtacaggagtgagcgtgtgacttcttgtccacatttttgtccacaagtttggcgagtttgcatccgcgtctaakaaagaaactaccgtttctcacgcaggcacgttctgaacgcccgagtgcgggagccacgtaagacccggctcagggaccccgggtgaggccagctggacat

SEQ ID NO: 38703 - DNA, 201 bp, Homo sapiens
gaggcataaacccagagaaacaagacctccaagacggccaggcactggggcacacgccggtaacacagcaccgtgggagctgagacggaaggatcgcctgrgcccaggattttgaaaccaccctgggcaacacagtgagaccccgtatctacaaaaaaatacacattagccaggcatggcggcatgcgcctggggtcccaa

SEQ ID NO: 38704 - DNA, 201 bp, Homo sapiens
ccccatcccttcccccacccctgccggcaatcgcgtacaggagtgagcgtgtgacttcttgtccacatttttgtccacaagtttggcgagtttgcatccgygtctaataaagaaactaccgtttctcacgcaggcacgttctgaacgcccgagtgcgggagccacgtaagacccggctcagggaccccgggtgaggccagc

SEQ ID NO: 38705 - DNA, 201 bp, Homo sapiens
ttgttgaatcatagtgttccctgtatgatctggatgcaagccgatactgcatggatgacctgcaggtgctctctgtctccacagtcgcctctgcagtgggmgctcgggtgccccacattcccaactgctgcagacacaaccaaagcctccccatcccttcccccacccctgccggcaatcgcgtacaggagtgagcgtgtg

SEQ ID NO: 38706 - DNA, 201 bp, Homo sapiens
ctctcctaaagtgctgggattacaggcgtgaggcaccgcgcccggctggacagtggttttgatttacgtttccctcatgactaatgaggccgaccatcttytcacacgctgttggccatctgtgcgtcttctttggagaaatctctgttcagatcctgtgatttttttttttttttttttttttttttgagacagggtctt

SEQ ID NO: 38707 - DNA, 201 bp, Homo sapiens
catccaactggtccagcttgtgcaggatggcggccatgaccatgtaggtcaccaggcacacagcacatgtcagcatgacgatgtagtttacatccgctgtyggctcctgtgaggacacagccgccgggcccaggaggtcacgtgcaagctgtgccttctcaggatagagccgagcccacccaggccctcctcgactctgca

SEQ ID NO: 38708 - DNA, 201 bp, Homo sapiens
tcccccctcccccgagagccggacactcacaggctgctgagcaggtccgtttccatgtgggtgtcttgggtaggggctgggctgctgaccccctcggcaakgacctgctggatcaggtcttcatctagaggtacaggaggcatagggtgggcccagctgcaagggtgagcttcagagccccctcctctcaccccagctcac

SEQ ID NO: 38709 - DNA, 201 bp, Homo sapiens
ctcaggcaattcacccacctcagcctcccaaagtgttgggattacaggcatgagacaccgcacctggcccaagagagataaatttctttctttctctttctttttttttttttgaaacagggtctcactctgttacccagcaggccagagtgcggcttcctgcagcccttgcctcctgggctcaggtgatcctcccatatc

SEQ ID NO: 38710 - DNA, 201 bp, Homo sapiens
agaagctggaagggacctagagcaaggggcccaggaagatcaagttgctgaggagaaatgggaagttgtacagaaacaagaggctgagggagtcagagagsatgaggacaaaggacagagggagaaggggtaccatgaagcaagaaaagaccaaggagatggtgaagacagcagaagcccagaagcagcaactgaaggagg

SEQ ID NO: 38711 - DNA, 201 bp, Homo sapiens
ctgctcagtccacaccggctaggttggggtgggggacagctttcctggacacactgaaataactctgtggtccctggggcacccacagggtggcgccactraagtatcccagtaccagagctctacggatggaggatggtaaggcagcgagttgccaagttcacaaaagctattaagtggcataaccaaaattcagctgcc

SEQ ID NO: 38712 - DNA, 201 bp, Homo sapiens
aacacatgaaaaatatgctattttgaattgagtaacactttaaaaataagttgcactttattgagcataagagcactgagagaccctaaatcctagcagcmccctgctcagtccacaccggctaggttggggtgggggacagctttcctggacacactgaaataactctgtggtccctggggcacccacagggtggcgcca

SEQ ID NO: 38713 - DNA, 201 bp, Homo sapiens
tgaacatcttttaaatgcgaaaacacatgaaaaatatgctattttgaattgagtaacactttaaaaataagttgcactttattgagcataagagcactgaragaccctaaatcctagcagcaccctgctcagtccacaccggctaggttggggtgggggacagctttcctggacacactgaaataactctgtggtccctgg

SEQ ID NO: 38714 - DNA, 201 bp, Homo sapiens
aggaccacagccctgggcaaaggggaccagcaagttgtcttgaatctccagggttcctgactagctgtctcctctgcagcatgagcagctgtagtgcccarctctataggctttggccctccagcttctctctttgactgtgggaggcactgccttggttggtttacctgaacttgtctccgacacaaagcacttatctct

SEQ ID NO: 38715 - DNA, 201 bp, Homo sapiens
attataaactagacaccctggtgtgcaaaggaaatagagattaatcctgaggcgggtgtccaagaaggcttccttcctagaagtcttcaagtggcatttgrgaattggaagaattatgcatacaatttaagaggtagagaaggggttaaggtcattcgagagagagagagagagagagagagagagagagagagaataagg

SEQ ID NO: 38716 - DNA, 201 bp, Homo sapiens
gttcaataatttcaaaaaatatttaatgagtgcctattatataccagccacattgtaaatgtagctgaatgctacggtgagttgattgtctaatctatgastttgttgatgagtgttcgtatgggatgggacagcatgggtatgtggtggtggtggtggtggtggtggtggtggtggtggtggtggtggtggtggtggtgg

SEQ ID NO: 38717 - DNA, 201 bp, Homo sapiens
tctaaggacatagaggcctcaggcttcaatgggacagcggccttcatggaggtgcgggtacaatccatcgtcgtggagttcatcctcacacacgtggaccrgctctttgggggtgctgccctctctggtcagtgtccttcctgccctccacatatcccactgttggggagtcaagttagttacagagagccttgaagatca

SEQ ID NO: 38718 - DNA, 201 bp, Homo sapiens
gtccaagacagactatgagaagtcctgtaattcattataaaattcattataaactagacaccctggtgtgcaaaggaaatagagattaatcctgaggcggrtgtccaagaaggcttccttcctagaagtcttcaagtggcatttgggaattggaagaattatgcatacaatttaagaggtagagaaggggttaaggtcatt

SEQ ID NO: 38719 - DNA, 201 bp, Homo sapiens
agatgcccagtgcaatgtgtagcaagattcatgtggcacctgcaaatccatgcccgaggcctggccggcttgatgggactcctggagaaagggcttggggrtcccgagcttctcgatcctcttggaggaatgggggtagtctttcctttgatgctgctgtggccctagcccgggaccgccaaaggactgaggctcaaggag

SEQ ID NO: 38720 - DNA, 201 bp, Homo sapiens
aatctggattgggaagtttggtggggctgagggggagaataattccacatctccacaggtctaaggacatagaggcctcaggcttcaatgggacagcggcyttcatggaggtgcgggtacaatccatcgtcgtggagttcatcctcacacacgtggaccagctctttgggggtgctgccctctctggtcagtgtccttcct

SEQ ID NO: 38721 - DNA, 201 bp, Homo sapiens
taatagtttggaggaaaaaatgccaatgcattgtaaaatacatagcacagtgcttggcacctggtagggtctcaattaaggtagcaagccaataactaggracattggtctgaaaggatcagtcatgcagagtagcaatgctgggagtgctgggcccctgctatatcaatgctaggaggactcacactgaaaagggtcagg

SEQ ID NO: 38722 - DNA, 201 bp, Homo sapiens
tcccatctgaaggtgcagaagggtctggatcccggagtcgtcttagtctgccccccagagaaccccaggttcctgaccccctgttgtcctctcagcgcagrtcatatgcatttgaaacacaggctaaccctgggaaaggtgaaggactgtgattaggaccacagccctgggcaaaggggaccagcaagttgtcttgaatct

SEQ ID NO: 38723 - DNA, 201 bp, Homo sapiens
caggctggcgatggacccccacagatgcggccctaccatactatcatcgagattgcagagcacaagtaaggcctccttcctgggccttcctcccctgcacygaccttcatgttccaacctccaattatgcccctccattctttgtaggaggaaggggtctttgaaggtcaggaagtggaggtctatcttcaatttaggtcg

SEQ ID NO: 38724 - DNA, 201 bp, Homo sapiens
tcttttgaggtgatggacatggaggcactgtcttcaggggcttctgaatatatccctaacctggtagttggcgaggggtgatgaaggattgggtgcctgasgtccctctcttggctctgttcctggctggccaattccttttcttttcccaggtggtgaggtggagagtgggtggcgatcgcttccagggacccgggcatc

SEQ ID NO: 38725 - DNA, 201 bp, Homo sapiens
acccattgattgaccaagactaggaaaggggactggaactctaggctgaagctctgatgctggaagatccaccctaggaagggcagaggcctcagcccttrggctttggggtggttacctttagctgcctccctagattcaggattagggaaatccagtaatattatcaggctatgtgaaatctatggagaggagatctct

SEQ ID NO: 38726 - DNA, 201 bp, Homo sapiens
aatgctgtgcctacaggtggaggagttctctgtggagccacccctggatgacctgtctctggatgaggcacagtttgtcttggcccccagctgctgttccstggactccgctggccccaggcctgaagttgaggaggaaaatggggaggaagttttcctgagtgcctatgatgacctaagtccccttctgggacctaaacc

SEQ ID NO: 38727 - DNA, 201 bp, Homo sapiens
cactgagctcagggactggaacataacagttccatatcaattttttgtttgtttttgagacagagtcttgctctgttgcccaggctggagagcagcggtgygatctcaactcactgcaaactccgcttcctgggttcaagggattctcgtgcctcagcctcctgagtagctgggattacaggcatgagccaccatgcctgg

SEQ ID NO: 38728 - DNA, 201 bp, Homo sapiens
gggtggtttcctggctggagaacacccaaggacaaggtcatgggctctgttcccactgcagccttgctgggccgcaggggatgatgtcgggctggaaacarcctctgcccctagtctttgtgattctcttgttgtccctgtgcaaaagagaaacaggttcaaagtggggggcaaggggagaagctgctgaaatggggaaga

SEQ ID NO: 38729 - DNA, 201 bp, Homo sapiens
tgaggcaggagaattggttcaacccaggaggtggaggttgcagtgagctgagattgcgccactgcactccagcctgggagacatagcaagactccgtctcaaaaaaaaaaaaaaaaaaaaaggtccaagtgctgtgattgcaggattggtttgtttcattttctcataatcttatgacataggtattgttagccttatgtt

SEQ ID NO: 38730 - DNA, 201 bp, Homo sapiens
ctgtaattcattataaaattcattataaactagacaccctggtgtgcaaaggaaatagagattaatcctgaggcgggtgtccaagaaggcttccttcctaraagtcttcaagtggcatttgggaattggaagaattatgcatacaatttaagaggtagagaaggggttaaggtcattcgagagagagagagagagagagag

SEQ ID NO: 38731 - DNA, 201 bp, Homo sapiens
ggcagaaaggaaagaagaagggcagcgcaaaggagcgggtttttgggtgcgacttgcaggagcacctgcagcactcaggccaggagggtaaggaggccggytcagcttctgcagggtgggtggggaggcactgggcatctgcagcccgatccagcctgaagggcagaagcagtttccggtgctcctggggaaggggcagtg

SEQ ID NO: 38732 - DNA, 201 bp, Homo sapiens
ggaaagaagaagggcagcgcaaaggagcgggtttttgggtgcgacttgcaggagcacctgcagcactcaggccaggagggtaaggaggccggctcagcttytgcagggtgggtggggaggcactgggcatctgcagcccgatccagcctgaagggcagaagcagtttccggtgctcctggggaaggggcagtggcctgggg

SEQ ID NO: 38733 - DNA, 201 bp, Homo sapiens
acatatctacagctacatccctaacatatccctgttcacgcatagatccacttacctgtacatgtacccatcctcacattcacatctacatgtcaacataygcaatatcttatacttactggcttacatgtgtacgtgtcccaacattctccttccaagtccaacacatgttgacccacgaccatgccgggacccatctct

SEQ ID NO: 38734 - DNA, 201 bp, Homo sapiens
ttaggcgagagtttcctcttcctaataagcctgggagtgctatgggagactggagtttatttcacctctgcaatctggaccataagagacaggtacgcccyggtggggggggcgttcagagacctacccctaggtgcgcattctctttctcagggatatcccatgctgagaaaaagaattcagcgatatttctcccatttg

SEQ ID NO: 38735 - DNA, 201 bp, Homo sapiens
ggaggaagttttcctgagtgcctatgatgacctaagtccccttctgggacctaaacccccaatctggaagggttcagggagtctggagggagaggcagcargatgtggaaggcaggctctgggacagggtggggaagagcaggcatgctgggaagttggggaggacaagcaggctgagcctggaggcaggctagacatcag

SEQ ID NO: 38736 - DNA, 201 bp, Homo sapiens; identical to SEQ ID NO: 20530

SEQ ID NO: 38737 - DNA, 201 bp, Homo sapiens; identical to SEQ ID NO: 20531

SEQ ID NO: 38738 - DNA, 201 bp, Homo sapiens; identical to SEQ ID NO: 20532

SEQ ID NO: 38739 - DNA, 201 bp, Homo sapiens; identical to SEQ ID NO: 20533

SEQ ID NO: 38740 - DNA, 201 bp, Homo sapiens; identical to SEQ ID NO: 20515

SEQ ID NO: 38741 - DNA, 201 bp, Homo sapiens; identical to SEQ ID NO: 20544

SEQ ID NO: 38742 - DNA, 201 bp, Homo sapiens; identical to SEQ ID NO: 20507

SEQ ID NO: 38743 - DNA, 201 bp, Homo sapiens; identical to SEQ ID NO: 20518

SEQ ID NO: 38744 - DNA, 201 bp, Homo sapiens; identical to SEQ ID NO: 20549

SEQ ID NO: 38745 - DNA, 201 bp, Homo sapiens; identical to SEQ ID NO: 20551

SEQ ID NO: 38746 - DNA, 201 bp, Homo sapiens; identical to SEQ ID NO: 20553

SEQ ID NO: 38747 - DNA, 201 bp, Homo sapiens; identical to SEQ ID NO: 20554

SEQ ID NO: 38748 - DNA, 201 bp, Homo sapiens; identical to SEQ ID NO: 20556

SEQ ID NO: 38749 - DNA, 201 bp, Homo sapiens
gagggcagaagccctttattcagccccagatctccctccgttcaggcctcaccagattccctccgggatctccctagataacctccccaacctcgattccsctcgctgtctctcgccccaccgctgagggctgggctgggctccgatcgggtcacctgtcccttctctctccagctagatggccccccggccgtggctgtg

SEQ ID NO: 38750 - DNA, 201 bp, Homo sapiens
gatccaccttcccatgtaagacccctctctttcccctgcctcagacctgctgcccattctgcagatcccctccctggctcctggtctccccgtccagatayagggctcaccctacgtctttgcgactttagagggcagaagccctttattcagccccagatctccctccgttcaggcctcaccagattccctccgggatct

SEQ ID NO: 38751 - DNA, 201 bp, Homo sapiens
tgtcacgggggtccccagtccccgggccacggatccaccttcccatgtaagacccctctctttcccctgcctcagacctgctgcccattctgcagatcccytccctggctcctggtctccccgtccagatatagggctcaccctacgtctttgcgactttagagggcagaagccctttattcagccccagatctccctccg

SEQ ID NO: 38752 - DNA, 201 bp, Homo sapiens
aaaaacaaaattagccaggcgtggtggcatatacctgtaatcccagctactcaggaggctgaggcaggagaatcagaacccaggagggggaggttgtggtkagctgagatcgtgccattgcattccagcctgggcaacaagagtgaaacttcatctcaaaaaaaaaaaaaaaaaagtactaatttacaggctgggcatggt

SEQ ID NO: 38753 - DNA, 201 bp, Homo sapiens
ttcgggaaggtgcgccgctaggggtccacctgccttttgtgggctactcctactcctgcatggccctcaggtaagcactgccctggacggcctccaggggmcacgaggctgcttgagcttcctgggtcctgctccttggcagccaatggagttgcaggatcagtcttggaaccttactgttttgggcccaaagactcctaa

SEQ ID NO: 38754 - DNA, 201 bp, Homo sapiens
gcactgccctggacggcctccaggggccacgaggctgcttgagcttcctgggtcctgctccttggcagccaatggagttgcaggatcagtcttggaacctyactgttttgggcccaaagactcctaagaggccagagttggaggaccttaaattttcagatctatgtacttcaaaatgttagattgaattttaaaacctca

SEQ ID NO: 38755 - DNA, 201 bp, Homo sapiens
gtaggggtcagaactgtagaagccctacaggggcggaacccgaggaagtggggtcccaggtggcactgcccggaggggcggagcctggtgggaccacagaagggaggttcatttatcccacccttctcttttcctccgtgcagggacatcaaacccgacaacatcctgctggaccgctgtggccacatccgcctggccgac

SEQ ID NO: 38756 - DNA, 201 bp, Homo sapiens
ctggacggcctccaggggccacgaggctgcttgagcttcctgggtcctgctccttggcagccaatggagttgcaggatcagtcttggaaccttactgtttkgggcccaaagactcctaagaggccagagttggaggaccttaaattttcagatctatgtacttcaaaatgttagattgaattttaaaacctcagagtcaca

SEQ ID NO: 38757 - DNA, 201 bp, Homo sapiens
cctccaggggccacgaggctgcttgagcttcctgggtcctgctccttggcagccaatggagttgcaggatcagtcttggaaccttactgttttgggcccamagactcctaagaggccagagttggaggaccttaaattttcagatctatgtacttcaaaatgttagattgaattttaaaacctcagagtcacagactgggc

SEQ ID NO: 38758 - DNA, 201 bp, Homo sapiens
ctgtttctccgccttcccctgcttcctcttgtgtccatctctttctgacccaggcctggttcctttccctcctcctcccatttcacagatgggaaggtggmggccaagaagggccaggccattcagcctctggaaaaaccttctcccaacctcccacagcccctaatgactctcctggcctccctttagtagaggatgaag

SEQ ID NO: 38759 - DNA, 201 bp, Homo sapiens
aattttaaaacctcagagtcacagactgggcttcccagaatcttgtaaccattaacttttacgtctgtagtacacagagccacaggacttcagaacttggmaaatatgaagtttagacttttacaatcagttgtaaaagaatgcaaattctttgaatcagccatataacaataaggccatttaaaagtattaatttaggcg

SEQ ID NO: 38760 - DNA, 201 bp, Homo sapiens
gcgcctccgaactggcccaggacaagtacgtggccgacttcttgcagtggggtgagtgcctaccctcggggctcctgcagatggggtgggggtggggcagsagacagctctgggcacagaggcctggctgttgggggggcaggatggcaggatgggcatggggagatcctcccatcctggggctcagagtgtggacctggg

SEQ ID NO: 38761 - DNA, 201 bp, Homo sapiens
atagtggagaacaggtgtttttttggtttgtttttttccccttcctcatgctactttgtctaagagaacagttggttttctagtcagcttttattactggrcaacattacacatactataccttatcattaatgaactccagcttgattctgaaccgctgcggggcctgaacggtgggtcaggattgaacccatcctctat

SEQ ID NO: 38762 - DNA, 201 bp, Homo sapiens
cgaactggcccaggacaagtacgtggccgacttcttgcagtggggtgagtgcctaccctcggggctcctgcagatggggtgggggtggggcagcagacagstctgggcacagaggcctggctgttgggggggcaggatggcaggatgggcatggggagatcctcccatcctggggctcagagtgtggacctgggccctggg

SEQ ID NO: 38763 - DNA, 201 bp, Homo sapiens
cactgtagagccctctagggacttcctgaacagaagcagacagaaaccacggagagacgaggttacttcagacatgggacggtctctgtagttacagtggsgcattaagtaagggtgtgtgtgttgctggggatctgagaagtcgatctttgagctgagcgctggtgaaggagaaacaagccatggaaggaaaggtgccaa

SEQ ID NO: 38764 - DNA, 201 bp, Homo sapiens
cagaagcagacagaaaccacggagagacgaggttacttcagacatgggacggtctctgtagttacagtggggcattaagtaagggtgtgtgtgttgctggsgatctgagaagtcgatctttgagctgagcgctggtgaaggagaaacaagccatggaaggaaaggtgccaagtggtcaggcgagagcctccagggcaaagg

SEQ ID NO: 38765 - DNA, 201 bp, Homo sapiens
ggagggggcttggatcattgcaggagctatggggattccagaaatgttgaggggacggaggagtaggggataaacaaggattcctagcctggaaccagtgyccaagtcctgagtcttccaggagccacaggcagccttaagcctggtccccatacacaggctgaagtggcagttccagcggctgtccctgcggcagaggct

SEQ ID NO: 38766 - DNA, 201 bp, Homo sapiens
ggacggaggagtaggggataaacaaggattcctagcctggaaccagtgcccaagtcctgagtcttccaggagccacaggcagccttaagcctggtccccayacacaggctgaagtggcagttccagcggctgtccctgcggcagaggctgaggccgaggtgacgctgcgggagctccaggaagccctggaggaggaggtgc

SEQ ID NO: 38767 - DNA, 201 bp, Homo sapiens; identical to SEQ ID NO: 21906

SEQ ID NO: 38768 - DNA, 201 bp, Homo sapiens
caccgcagtctggcgccgcccaggagccgcccgcgctccctgaaccctagaactgtcttcgactccggggccccgttggaagactgagtgcccggggcacrgcacagaagccgcgcccaccgcctgccagttcacaaccgctccgagcgtgggtctccgcccagctccagtcctgtgatccgggcccgccccctagcggcc

SEQ ID NO: 38769 - DNA, 201 bp, Homo sapiens
atttagaggaccagactcagggatggggctgagggaggtagggaagggagggggcttggatcattgcaggagctatggggattccagaaatgttgaggggrcggaggagtaggggataaacaaggattcctagcctggaaccagtgcccaagtcctgagtcttccaggagccacaggcagccttaagcctggtccccatac

SEQ ID NO: 38770 - DNA, 201 bp, Homo sapiens
ggacattcgggaaggtgcgccgctaggggtccacctgccttttgtgggctactcctactcctgcatggccctcaggtaagcactgccctggacggcctccmggggccacgaggctgcttgagcttcctgggtcctgctccttggcagccaatggagttgcaggatcagtcttggaaccttactgttttgggcccaaagact

SEQ ID NO: 38771 - DNA, 201 bp, Homo sapiens
ttggcagggtaaactgagaccgggtggggtaggggtctggcgctcccgggaggagcactccttttgtggcccgagctgcatctcgcggcccctcccctgcmaggcctggggcgggggagggggccagggttcctgctgccttaaaagggctcaatgtcttggctctctcctccctcccccgtcctcagccctggctggttc

SEQ ID NO: 38772 - DNA, 201 bp, Homo sapiens
actctgttctcttcgctctgctgctccccttcctcaaatcaggaggtcttggaagcagctgcccctacccacaggccagaagttctggttctccaccagakaatcagcattctgtctccctccccactccctcctcctctccccagggacagtgaggtcccaggccccacacccatggaactggaggccgagcagctgctt

SEQ ID NO: 38773 - DNA, 201 bp, Homo sapiens
agttctggttctccaccagagaatcagcattctgtctccctccccactccctcctcctctccccagggacagtgaggtcccaggccccacacccatggaastggaggccgagcagctgcttgagccacacgtgcaagcgcccagcctggagccctcggtgtccccacaggatgaaacagtaagttggtggaggggaggggg

SEQ ID NO: 38774 - DNA, 201 bp, Homo sapiens
cgggagatggaggccatccgcacggacaaccagaacttcgccaggtcgggatcggggccggggccggggccgggatgcgggccggtggcaacccttggcakcccctctcgtccggcccggacggactcaccgtccttacctccccacagtcaactacgcgaggcagaggctcggaaccgggacctagaggcacacgtccgg

SEQ ID NO: 38775 - DNA, 201 bp, Homo sapiens
ccaaccacccatgacgaaccccttctcagtacctggtcatggagtattacgtgggcggggacctgctgacactgctgagcaagtttggggagcggattccrgccgagatggcgcgcttctacctggcggagattgtcatggccatagactcggtgcaccggcttggctacgtgcacaggtgggtgcagcatggccgagggg

SEQ ID NO: 38776 - DNA, 201 bp, Homo sapiens
cacccctgttcaggctctgagggtgccccctcctggtcctgtcctcaccaccccttccccacctcctgggaaaaaaaaaaaaaaaaaaaaaaaagctggtwtaaagcagagagcctgagggctaaatttaactgtccgagtcggaatccatctctgagtcacccaagaagctgccctggcctcccgtccccttcccaggcc

SEQ ID NO: 38777 - DNA, 201 bp, Homo sapiens
caagccatggaaggaaaggtgccaagtggtcaggcgagagcctccagggcaaaggccttgggcaggtgggaatcctgatttgttcctgaaaggtagtttgkctgaatcattcctgagaaggctggagaggccagcaggaaacaaaacccagcaaggccttttgtcgtgagggcattagggagctggagggattttgagcag

SEQ ID NO: 38778 - DNA, 201 bp, Homo sapiens
gaggggttgtcccagccatccgtgatggatcagggcctcaggggactaccaaccacccatgacgaaccccttctcagtacctggtcatggagtattacgtrggcggggacctgctgacactgctgagcaagtttggggagcggattccggccgagatggcgcgcttctacctggcggagattgtcatggccatagactcgg

SEQ ID NO: 38779 - DNA, 201 bp, Homo sapiens
caggtagcggtagtgaagatgaagcagacgggccaggtgtatgccatgaagatcatgaacaagtgggacatgctgaagaggggcgaggtgaggggctgggyggacgtggggggctttgaggatccgcgccccgtctccggctgcagctcctccgggtgccctgcaggtgtcgtgcttccgtgaggagagggacgtgttggt

SEQ ID NO: 38780 - DNA, 201 bp, Homo sapiens
ccgtgcagggacatcaaacccgacaacatcctgctggaccgctgtggccacatccgcctggccgacttcggctcttgcctcaagctgcgggcagatggaayggtgagccagtgccctggccacagagcaactggggctgctgatgagggatggaaggcacagagtgtgggagcgggactggatttggaggggaaaagaggt

SEQ ID NO: 38781 - DNA, 201 bp, Homo sapiens
tgcagtggggtgagtgcctaccctcggggctcctgcagatggggtgggggtggggcagcagacagctctgggcacagaggcctggctgttgggggggcagsatggcaggatgggcatggggagatcctcccatcctggggctcagagtgtggacctgggccctggggcaacatttctctgtcctatgccaccactctggag

SEQ ID NO: 38782 - DNA, 201 bp, Homo sapiens
ggcaagccaggagggccagcatggggcagctgccaggggcgcagccgacaggcaggtgttcggcgccagcctctccagctgccccaacaggtgcccaggcrctgggagggcggtgactcacgcgggccctgtgggagaaccagctttgcagacaggcgccaccagtgccccctcctctgcgatccaggagggacaactttg

SEQ ID NO: 38783 - DNA, 201 bp, Homo sapiens
gtcccccggagacacggctgggccggggtggagcaggcgacttccggacacatcccttcttctttggcctcgactgggatggtctccgggacagcgtgccyccctttacaccggatttcgaaggtgccaccgacacatgcaacttcgacttggtggaggacgggctcactgccatggtgagcgggggcggggtaggtacct

SEQ ID NO: 38784 - DNA, 201 bp, Homo sapiens
gcggggcgcagggaagagtgcgggcccacctatgggcgtaggcggggcgagtcccaggagccaatcagaggcccatgccgggtgttgacctcgccctctcyccgcaggtccctaggcctggcctatcggaggcgctttccctgctcctgttcgccgttgttctgtctcgtgccgccgccctgggctgcattgggttggtgg

SEQ ID NO: 38785 - DNA, 201 bp, Homo sapiens
ctgtgggagaaccagctttgcagacaggcgccaccagtgccccctcctctgcgatccaggagggacaactttgggttcttctgggtgtgtctccttctttwgtaggttctgcacccacccccacccccagccccaaagtctcggttcctatgagccgtgtgggtcagccaccattcccgccaccccgggtccctgcgtcct

SEQ ID NO: 38786 - DNA, 201 bp, Homo sapiens
atgaacccgggaggcggagcttgcagtgagccgagatcatgccactgcactccagcctgggcgacagagcaagactccgtctcaaaaaaaaaaaaaaaaaagtatttatttaggccgggtgtggtggctcacgcctgtaattccagtgctttgggaggatgaggtgggtggatcacctgaggtcaggagttcgagaccagc

SEQ ID NO: 38787 - DNA, 201 bp, Homo sapiens
actttgggttcttctgggtgtgtctccttcttttgtaggttctgcacccacccccacccccagccccaaagtctcggttcctatgagccgtgtgggtcagmcaccattcccgccaccccgggtccctgcgtcctttagttctcctggcccagggcctccaaccttccagctgtcccacaaaaccccttcttgcaagggctt

SEQ ID NO: 38788 - DNA, 201 bp, Homo sapiens
tccgtatcaaagaaaaagaaaaaagaaaaaatgctggaggggccactttagataagccctgagttggggctggtttggggggaacatgtaagccaagatcmaaaagcagtgaggggcccgccctgacgactgctgctcacatctgtgtgtcttgcgcaggagacactgtcggacattcgggaaggtgcgccgctaggggtc

SEQ ID NO: 38789 - DNA, 201 bp, Homo sapiens
aggactcgggctcactggtcactggtttctttcattcccagcaccctgcccctctggccctcatatgtctggccctcagtgactggtgtttggtttttggsctgtgtgtaacaaactgtgtgtgacacttgtttcctgtttctccgccttcccctgcttcctcttgtgtccatctctttctgacccaggcctggttccttt

SEQ ID NO: 38790 - DNA, 201 bp, Homo sapiens
cctagcccccagttctggagcttgtcgggagcaagggggtggttgctactgggtcactcagcctcaattggccctgtttcagcaatgggcaggttcttcttgaaattcatcacacctgtggcttcctctgtgctctacctttttattggggtgacagtgtgacagctgagattctccatgcattccccctactctagcact

SEQ ID NO: 38791 - DNA, 201 bp, Homo sapiens
tggttcgtccctgctggcccactctcccggaaccccccggaacccctctctttcctccagaacccactgtctcctctccttccctcccctcccatacccawccctctctccatcctgcctccacttcttccacccccgggagtccaggcctccctgtccccacagtccctgagccacaagcctccaccccagctggtcccc

SEQ ID NO: 38792 - DNA, 201 bp, Homo sapiens
ccctagcccccagttctggagcttgtcgggagcaagggggtggttgctactgggtcactcagcctcaattggccctgtttcagcaatgggcaggttcttcttgaaattcatcacacctgtggcttcctctgtgctctacctttttattggggtgacagtgtgacagctgagattctccatgcattccccctactctagcac

SEQ ID NO: 38793 - DNA, 201 bp, Homo sapiens
cccctagcccccagttctggagcttgtcgggagcaagggggtggttgctactgggtcactcagcctcaattggccctgtttcagcaatgggcaggttcttcttgaaattcatcacacctgtggcttcctctgtgctctacctttttattggggtgacagtgtgacagctgagattctccatgcattccccctactctagca

SEQ ID NO: 38794 - DNA, 201 bp, Homo sapiens
ttctgaaggtgatcggacgcggggcgttcagcgaggtaagccgaaccgggcgggagcctgacttgactcgtggtgggcggggcataggggttggggcgggsccttagaaattgatgaatgaccgagccttagaacctagggctgggctggaggcggggcttgggaccaatgggcgtggtgtggcaggtggggcggggccac

SEQ ID NO: 38795 - DNA, 201 bp, Homo sapiens
cagcagagggacataggttgtgttagtgtttgagcaccagccctctggtccctgtgtagatttagaggaccagactcagggatggggctgagggaggtagrgaagggagggggcttggatcattgcaggagctatggggattccagaaatgttgaggggacggaggagtaggggataaacaaggattcctagcctggaacc

SEQ ID NO: 38796 - DNA, 201 bp, Homo sapiens
ggagggattttgagcagcagagggacataggttgtgttagtgtttgagcaccagccctctggtccctgtgtagatttagaggaccagactcagggatgggkctgagggaggtagggaagggagggggcttggatcattgcaggagctatggggattccagaaatgttgaggggacggaggagtaggggataaacaaggatt

SEQ ID NO: 38797 - DNA, 201 bp, Homo sapiens
atgcttccgcttctgccagctgccttgtctgcccacctcctccccaagcccaggactcgggctcactggtcactggtttctttcattcccagcaccctgcycctctggccctcatatgtctggccctcagtgactggtgtttggtttttggcctgtgtgtaacaaactgtgtgtgacacttgtttcctgtttctccgcctt

SEQ ID NO: 38798 - DNA, 201 bp, Homo sapiens
gccaggccccatgcaccgccgccacctgctgctccctgccagggtacgtccggctgcccacgcccccctccgccgtcgcgccccgcgctccacccgccccktgccacccgcttagctgcgcatttgcggggctgggcccacggcaggagggcggatcttcgggcagccaatcaacacaggccgctaggaagcagccaatga

SEQ ID NO: 38799 - DNA, 201 bp, Homo sapiens
ggaagactgagtgcccggggcacggcacagaagccgcgcccaccgcctgccagttcacaaccgctccgagcgtgggtctccgcccagctccagtcctgtgwtccgggcccgccccctagcggccggggagggaggggccgggtccgcggccggcgaacggggctcgaagggtccttgtagccgggaatgctgctgctgctg

SEQ ID NO: 38800 - DNA, 201 bp, Homo sapiens
gaagactgagtgcccggggcacggcacagaagccgcgcccaccgcctgccagttcacaaccgctccgagcgtgggtctccgcccagctccagtcctgtgawccgggcccgccccctagcggccggggagggaggggccgggtccgcggccggcgaacggggctcgaagggtccttgtagccgggaatgctgctgctgctgc

SEQ ID NO: 38801 - DNA, 201 bp, Homo sapiens
ggcataggggttggggcggggccttagaaattgatgaatgaccgagccttagaacctagggctgggctggaggcggggcttgggaccaatgggcgtggtgwggcaggtggggcggggccacggctgggtgcagaagcgggtggagttgggtctgggcgagcccttttgttttcccgccgtctccactctgtctcactatct

SEQ ID NO: 38802 - DNA, 201 bp, Homo sapiens
tgaggagagggacgtgttggtgaatggggaccggcggtggatcacgcagctgcacttcgccttccaggatgagaactacctggtgagctccgggccggggkgactaggaagagggacaagagcccgtgctgtcactggacgaggaggtggggagaggaagctctaggattgggggtgctgcccggaaacgtctgtgggaaa

SEQ ID NO: 38803 - DNA, 201 bp, Homo sapiens
tttggggagcggattccggccgagatggcgcgcttctacctggcggagattgtcatggccatagactcggtgcaccggcttggctacgtgcacaggtgggygcagcatggccgaggggatagcaagcttgttccctggccgggttcttggaaggtcagagcccagagaggccagggcctggagagggaccttcttggttgg

SEQ ID NO: 38804 - DNA, 201 bp, Homo sapiens
gctggaggcggggcttgggaccaatgggcgtggtgtggcaggtggggcggggccacggctgggtgcagaagcgggtggagttgggtctgggcgagcccttytgttttcccgccgtctccactctgtctcactatctcgacctcaggtagcggtagtgaagatgaagcagacgggccaggtgtatgccatgaagatcatgaa

SEQ ID NO: 38805 - DNA, 201 bp, Homo sapiens; identical to SEQ ID NO: 35094

SEQ ID NO: 38806 - DNA, 201 bp, Homo sapiens; identical to SEQ ID NO: 35067

SEQ ID NO: 38807 - DNA, 201 bp, Homo sapiens; identical to SEQ ID NO: 35069

SEQ ID NO: 38808 - DNA, 201 bp, Homo sapiens; identical to SEQ ID NO: 35098

SEQ ID NO: 38809 - DNA, 201 bp, Homo sapiens; identical to SEQ ID NO: 35126

SEQ ID NO: 38810 - DNA, 201 bp, Homo sapiens
gattctccaaaagcccagctacgccggacaatagaatgttgtcggaccaatttatgtaaccagtatttgcaacccacatgccccctgttgtcataggtccrttttttgatggcagcattcgatggctggttttgctcatttctatggctgtctgcataattgctatgatcatcttctccagctgcttttgttacaaacatt

SEQ ID NO: 38811 - DNA, 201 bp, Homo sapiens
cagaaacgtatggcacccaaggaaagcccgcaattgctcatcgagacctaaagagcaaaaacatcctcatcaagaaaaatgggagttgctgcattgctgayctgggccttgctgttaaattcaacagtgacacaaatgaagttgatgtgcccttgaataccagggtgggcaccaaacgctacctggctccagaagtgctgg

SEQ ID NO: 38812 - DNA, 201 bp, Homo sapiens
ctctctatgacttcctgaaatgtgctacgctggacaccagagccctgcttaaattggcttattcagctgcctgtggtctgtgccacctgcacacagaaacktatggcacccaaggaaagcccgcaattgctcatcgagacctaaagagcaaaaacatcctcatcaagaaaaatgggagttgctgcattgctgacctgggcc

SEQ ID NO: 38813 - DNA, 201 bp, Homo sapiens
tctctctatgacttcctgaaatgtgctacgctggacaccagagccctgcttaaattggcttattcagctgcctgtggtctgtgccacctgcacacagaaaygtatggcacccaaggaaagcccgcaattgctcatcgagacctaaagagcaaaaacatcctcatcaagaaaaatgggagttgctgcattgctgacctgggc

SEQ ID NO: 38814 - DNA, 201 bp, Homo sapiens
aaagtgctgggattacaggcttgagccatcgtgcccggccagcttttttcttttttttttaagttacagagtcttgctctgtcacccagactggagtgcartggtgcaatccagtgagttaaagctcactgtaaccttgaactcctgggctcaaacagttctcccacctcagcctcctgagtagctagcagtactagctcc

SEQ ID NO: 38815 - DNA, 201 bp, Homo sapiens
ggtgatccacctgcctcggcctcccaaagtgctgggattacaggtgtgagccactgtgctgggaccttttttgctttcttatcttcttagtctttcttcaktaacctgataccagaccccatcttctttgccattttttaatcttggaaatcacaggagagtctggtaaataaactggtatcatcttgtgtttggaaaggg

SEQ ID NO: 38816 - DNA, 201 bp, Homo sapiens
ggtaaataaactggtatcatcttgtgtttggaaaggggtcactgatgtctctagacacatactcccttggatgccagacagataatataatgtccatgtgktttttttttgtttttcatccgtgttatttttcctggatctataacctgagcttcattaagtttatttatttaattttttgagatggagtccctctctgtc

SEQ ID NO: 38817 - DNA, 201 bp, Homo sapiens
aagggacaggcatggctctggcctttgggaagggaaacagcacaggaaccctaagcaagtgtgtcttactgatagacattggtcaggtctatgctgtgttyttaaagggtagaaatcagaacccataatggagataggtccttgatagactgttgagtgaaattactaatttttatggcatagcttgagtctcttgagctt

SEQ ID NO: 38818 - DNA, 201 bp, Homo sapiens
cctcaggtgatgtgccctcctcggcctcccaaagtgctggtattacaggcatgagccaccgcacctggcctcagattttctttttattgatccctttgttygtattccagtagaacgttttctgatgttttgtgagtgaggctgattttgttctgtcctccacatggatagaacttaatgcagagggaaatacagaggaag

SEQ ID NO: 38819 - DNA, 201 bp, Homo sapiens
tccctaagccgtcgatctcctgccctttgtgtttctctccctgtgccccggaatcagaagggggatggggacaggtgtgaatgtgtgtgtgtgcaggagawactttttaggtattggggcagggattaatgctagggagtctttcgggtacactctggtctgggcaacagcgggccttccttccttcgttcttctttagag

SEQ ID NO: 38820 - DNA, 201 bp, Homo sapiens
cttgaacctgggaggcggaggttacagtgagctgagatcatgccactgcactccagcctgggcaacagagcgagactctgtctcaaaaaaaaaaaaaaaaattacagatgcttattatgcatctaatttgtgtcagtcttatgctagttgctagcgagtcggagataaaattgcagagccatgccttcagggagtctagtt

SEQ ID NO: 38821 - DNA, 201 bp, Homo sapiens
aatactatcggggaaacggaagtggccgtcggtggcaggtttgggggagaccggaagtgacggtccgtggggaagtcgggggcggagccgcggggtggtgkgtgtgtgtgtgtgtgtgtgtgtgtgtgtgtgtgtgtgtgtgtttggctgtgggttagttgtgccgttctgctggaacaccgtgggaaggcagtagacgcg

SEQ ID NO: 38822 - DNA, 201 bp, Homo sapiens
atcatccggacaaacctggaatttctccaagagcagtttaatagcattgctgcgcatgtgctgcattgcacaggtcaggggctggccaggcgggggcaagkggggcctgttgcatgtgcagggctgccacgtgccagcattccctccttgtattttgcccacagatagtggatttggggcccggttgctggagttgtgtaa

SEQ ID NO: 38823 - DNA, 201 bp, Homo sapiens
tgtgtgtgtgtgtgtgtgtgtgtttggctgtgggttagttgtgccgttctgctggaacaccgtgggaaggcagtagacgcgggcagtcagctagcaggtcygtcgccccgtgagtgccgtttcgggtctatagtgagttaggagggttcgatgggcgtggcgcgcgtgcgcgaaaccactttctccgcagagtgtggggcg

SEQ ID NO: 38824 - DNA, 201 bp, Homo sapiens
cgtttctccaacctgcttactttttctctttagctccggtctgatatacaaaaacgactgcaggaagaccccaactacagtccccagcgcttccccaatgsccagcgggcctttgctgatgatccttagctctttgctctatggcccttcctcatcaggggaccgtttcccccctcttccttcacagtatttaagaaataa

SEQ ID NO: 38825 - DNA, 201 bp, Homo sapiens
ggcaggcctcatccgtggctccgtcttctaccaatgtcgagtcctcagctgagggggctcccccgccaggtccagctcccccgccagccaccagccacccragggtcatccggatttcccaccagagtgtggaacccgtggtcatgatgcacatgaacattcaaggtgagaatagttgctggcgagaagagcaggatcagc

SEQ ID NO: 38826 - DNA, 201 bp, Homo sapiens
atcccccccaggtaagggacctgttgggcgatggggtcagggtacttgagagaactggagagatctgagaggaagtatggtgttctttaatttcacagccrcttcctgaggagccaatggaagttcagggagcagaaagagcttcccctgagcctcaggtactctagagagggggaggttgaggggccagataatgtggag

SEQ ID NO: 38827 - DNA, 201 bp, Homo sapiens
cagatggcaacccacacattgatcacggggctagaagagtatgtgcgggagagttttgtgagtaacccttctctattcctttcctctcctgggtctggtcraggcagctgcctcctccactcccagtcttatgattcttgattttgggatctttgtgttatcttgtctctcagtccttggtgcaggttcagccaggtgtgg

SEQ ID NO: 38828 - DNA, 201 bp, Homo sapiens
gccctgggaattcattgactctgaacctttcattttaaagatgaagaaaatgaggtttagaaaaagaaagtatagtaattagtgtcactgctttctgacarcctgttcagaggaagaggtaggtaagttgtgctgcctgactctgttaaatacctaccatacttctgctttaagcagtgaagatcagaatgtaactcccca

SEQ ID NO: 38829 - DNA, 201 bp, Homo sapiens
gagcctggagctgatggggcccttggtgagcaaaaaggatgctttggcttgctccaggaaggggcagccagaggaatgtagatggccttggtttaggggtrttgccaaggtgggatgaggttgatgatctggttgtgggtgggcaggccaggtggtaaaggccattgctaacatctgcccttgtcccccaggattctttgg

SEQ ID NO: 38830 - DNA, 201 bp, Homo sapiens
ggatcccttcagcgatgaactggtcagcctggtgctaccatttgttttcccctttggcatctgggaaggcttgacagtgccaccccgggctatttgacagygtgcttggggggggaaatgttagcttctgagggatggccttgtgtgcttgctgggatcatagggacttggccagcgtttctccaacctgcttactttttc

SEQ ID NO: 38831 - DNA, 201 bp, Homo sapiens
tgggaaggcttgacagtgccaccccgggctatttgacagtgtgcttggggggggaaatgttagcttctgagggatggccttgtgtgcttgctgggatcatrgggacttggccagcgtttctccaacctgcttactttttctctttagctccggtctgatatacaaaaacgactgcaggaagaccccaactacagtccccag

SEQ ID NO: 38832 - DNA, 201 bp, Homo sapiens
tgcccagcctccacccacccctcaaccctccatggctgatcttcagttctctcagcttctggggaacctgctagggcctgcagggccaggggctggagggyctggtgtggcttctcccaccatcactgtggcgatgcctggtgtccctgcctttctccaaggcatgactgacttcttgcaggtgagtggctggcttgccat

SEQ ID NO: 38833 - DNA, 201 bp, Homo sapiens
gaaggtgaaaccgcagccccctctgagtgatgcctacctcagtggtatgcctgccaagagacgcaaggttggttttcctcttccctaagcctctctctctrtccaggtttccccgtcatgcctggaatcaaactatgtagagatggtgggagctcttgttattcagtctcccctcccctcgtttaatgaggaaactttttc

SEQ ID NO: 38834 - DNA, 201 bp, Homo sapiens
catcttcctgtcccccggcccagccaggcagtggtaccttcttgccattacataaccactgggtaagagcccctagtgacatgttaggggaaggggccctrggaattcattgactctgaacctttcattttaaagatgaagaaaatgaggtttagaaaaagaaagtatagtaattagtgtcactgctttctgacagcctgt

SEQ ID NO: 38835 - DNA, 201 bp, Homo sapiens
caaacatcagaaccagttgaaagtgaagcacctccccgggagcccatggaggcagaagaagtggaggagcgtgccccagcccagaacccggagctcactcmtggcccagccccagcgggcccaacacctgccccggaaacaaatgcacccaagtgagagatggagggaatctttagtgggtggggaatcctaagtgaagta

SEQ ID NO: 38836 - DNA, 201 bp, Homo sapiens
gttctggaagacacctttagcttttcctcgtttaggccccttagcctgagagatgagcttgattttctggtcaccagattttctttttttttcttttttttgagatggagtcacgccctgtcttccaggctggagtgcagtggcgcgatctcgactcactgaaacttccacctcttgggttcaagcgattttcctatctca

SEQ ID NO: 38837 - DNA, 201 bp, Homo sapiens
tcggggaaacggaagtggccgtcggtggcaggtttgggggagaccggaagtgacggtccgtggggaagtcgggggcggagccgcggggtggtgggtgtgtgtgtgtgtgtgtgtgtgtgtgtgtgtgtgtgtgtgtttggctgtgggttagttgtgccgttctgctggaacaccgtgggaaggcagtagacgcgggcagtc

SEQ ID NO: 38838 - DNA, 201 bp, Homo sapiens
atcggggaaacggaagtggccgtcggtggcaggtttgggggagaccggaagtgacggtccgtggggaagtcgggggcggagccgcggggtggtgggtgtgtgtgtgtgtgtgtgtgtgtgtgtgtgtgtgtgtgtgtttggctgtgggttagttgtgccgttctgctggaacaccgtgggaaggcagtagacgcgggcagt

SEQ ID NO: 38839 - DNA, 201 bp, Homo sapiens
cttaagtgtccacgcatccgtagtgcgacgcacgcaggcgtagtacggtcccccgggcgacagcggtggcggctcctcggggtgctcggctccctcccacmtaggccggccccggcccgactcgccctcagaaactcactgtttggggctgcggactttctcgtcgtgccccacaaaagtaaagcttggggacctgggggg

SEQ ID NO: 38840 - DNA, 201 bp, Homo sapiens
tagagtcccagctggtgactgtttttcaggcatttacggtagccacctcaatcttctagcgctcaagcgcgcgcacagacgtgaacgccgccagaggggggagggggtggggcgatgcttaagtgtccacgcatccgtagtgcgacgcacgcaggcgtagtacggtcccccgggcgacagcggtggcggctcctcggggtg

SEQ ID NO: 38841 - DNA, 201 bp, Homo sapiens
caaggcatgactgacttcttgcaggtgagtggctggcttgccattcacctcatcttcctgtcccccggcccagccaggcagtggtaccttcttgccattayataaccactgggtaagagcccctagtgacatgttaggggaaggggccctgggaattcattgactctgaacctttcattttaaagatgaagaaaatgaggt

SEQ ID NO: 38842 - DNA, 201 bp, Homo sapiens
ctcgaactcttgaccttgtgatccacccaccttggcctcccaaagtgctgggattacaggcttgagccatcgtgcccggccagcttttttcttttttttttaagttacagagtcttgctctgtcacccagactggagtgcagtggtgcaatccagtgagttaaagctcactgtaaccttgaactcctgggctcaaacagtt

SEQ ID NO: 38843 - DNA, 201 bp, Homo sapiens
atcccggatggaggtaagtgggcaaggctggctagggtctctctccaccctccctctcccttttctctcagcctgggagttagggcttcactggccacatycacagggtttggccttcataatctagtcttctctgcagtattcattcttttgggcagaaaaagtatctttgtgaggctctctcatttctgccaatcctct

SEQ ID NO: 38844 - DNA, 201 bp, Homo sapiens
tgagcttaaagccttggacatagctatctgtgtctttactcctgtaatacttggagacaaattgcatgtggggtggtccatggttttctaaaatgtgataytacctggatataagaaagccatatatagacttgtgattagatgtatataaatactctggtacttcccaagagtcagtttgtagttaggaaaaatatttct

SEQ ID NO: 38845 - DNA, 201 bp, Homo sapiens
cccagtctctgggacactggtgagcaagggtcggggagttctagtgcgtaacagtctagggagagactcctgtggtggtgcatggaagggcaggtctgaarttctcccttgctctctatccagcagggcgccggtctgggtaccaatgcctcgttggcccagatggtgagcggccttgtggggcagcttcttatgcagcca

SEQ ID NO: 38846 - DNA, 201 bp, Homo sapiens
gtgaatgtgtgtgtgtgcaggagaaactttttaggtattggggcagggattaatgctagggagtctttcgggtacactctggtctgggcaacagcgggccytccttccttcgttcttctttagagacctgtcggccatggagcctaatgatagtaccagtaccgctgtggaggagcctgacagcttggaggtgttggtgaa

SEQ ID NO: 38847 - DNA, 201 bp, Homo sapiens
cctaccttcagtgtcgaggagggccccaaccgcagcacagtcagccgcccccgcagccaccggctgtgaccccggagccagtagccttgagctctcaaacrtcagaaccagttgaaagtgaagcacctccccgggagcccatggaggcagaagaagtggaggagcgtgccccagcccagaacccggagctcactcctggcc

SEQ ID NO: 38848 - DNA, 201 bp, Homo sapiens
gaaggggatctgggagaaggaggctgggaggtggggtggacctggctgagagatggctgggacctgatttagtaggtggtagaactcatggcttcatctgyaacctaccctgataaaccttctctcattgtagagtgagccccgggtacggctggtgatggctcagcacatgatcagggatatacagaccttactatcccg

SEQ ID NO: 38849 - DNA, 201 bp, Homo sapiens
tcttagttgaagggttagcattgaggggcgaggaggggctctctcggtataggtaaatgacgctaggacaggcagctgagaagaactgctgctctccctayggcaaggaaatccaaatggtatctcctgagcctgatcggaattctcctctgagttcacgaaggcctgctctctttcttagaattagtctttcaccattgt

SEQ ID NO: 38850 - DNA, 201 bp, Homo sapiens
atggccttgtgtgcttgctgggatcatagggacttggccagcgtttctccaacctgcttactttttctctttagctccggtctgatatacaaaaacgactrcaggaagaccccaactacagtccccagcgcttccccaatgcccagcgggcctttgctgatgatccttagctctttgctctatggcccttcctcatcaggg

SEQ ID NO: 38851 - DNA, 201 bp, Homo sapiens
gtgctgctgccaccacggactacaataacaatgtgagccctttgatggccctgccctttctcctcagccccagtactcccaaaacagaacaggctgaaatrcagataactctttccctccctggaaaaacattgcaacagggccaggtgcagtggctcacgcctgtaatcccagcactttgggaggccaaggtgggcggat

SEQ ID NO: 38852 - DNA, 201 bp, Homo sapiens
ttgacagtgtgcttggggggggaaatgttagcttctgagggatggccttgtgtgcttgctgggatcatagggacttggccagcgtttctccaacctgcttrctttttctctttagctccggtctgatatacaaaaacgactgcaggaagaccccaactacagtccccagcgcttccccaatgcccagcgggcctttgctga

SEQ ID NO: 38853 - DNA, 201 bp, Homo sapiens
agtgagccgagattgcactactgcactctagcctgggtgacagagcgagactgtctcaaaaaacaaaacaaaacaaaaaaacacacattgcaacaaaacartttctctctaaacctgtaagtgattttgtcctcccttacagagaaggtgataatctttgctgtaagcactgtcctcgtatcgtaccccttgtgcccctga

SEQ ID NO: 38854 - DNA, 201 bp, Homo sapiens
tcccactggccccctgggaccccctggtcatggccaaaccctgggtaagagtgagggcatcagggcaggctgagctctgggtagagaaagggaagggctgwgtgggtgggttgaaggggtccaggttcaaggttacatcagacccgccccccaggctccaccctcatccagctgccctccctgccccctgagttcatgcac

SEQ ID NO: 38855 - DNA, 201 bp, Homo sapiens
gtgccaccccgggctatttgacagtgtgcttggggggggaaatgttagcttctgagggatggccttgtgtgcttgctgggatcatagggacttggccagcstttctccaacctgcttactttttctctttagctccggtctgatatacaaaaacgactgcaggaagaccccaactacagtccccagcgcttccccaatgcc

SEQ ID NO: 38856 - DNA, 201 bp, Homo sapiens
aacccgggtggtgattgcccggcccactcctccacaggctcggccttcccatcctggagggcccccagtctctgggacactggtgagcaagggtcggggakttctagtgcgtaacagtctagggagagactcctgtggtggtgcatggaagggcaggtctgaagttctcccttgctctctatccagcagggcgccggtctg

SEQ ID NO: 38857 - DNA, 201 bp, Homo sapiens
aggctggtctcgaactccttacctcaggtgatgtgccctcctcggcctcccaaagtgctggtattacaggcatgagccaccgcacctggcctcagattttmtttttattgatccctttgttcgtattccagtagaacgttttctgatgttttgtgagtgaggctgattttgttctgtcctccacatggatagaacttaatg

SEQ ID NO: 38858 - DNA, 201 bp, Homo sapiens
cggggagttctagtgcgtaacagtctagggagagactcctgtggtggtgcatggaagggcaggtctgaagttctcccttgctctctatccagcagggcgcyggtctgggtaccaatgcctcgttggcccagatggtgagcggccttgtggggcagcttcttatgcagccagtccttgtgggtgagttttcattcttcccca

SEQ ID NO: 38859 - DNA, 201 bp, Homo sapiens
gctaattttttatgtttttagtagagaagggggtttcaccatgttggccaggatggtctcgaactcttgaccttgtgatccacccaccttggcctcccaargtgctgggattacaggcttgagccatcgtgcccggccagcttttttcttttttttttaagttacagagtcttgctctgtcacccagactggagtgcagtg

SEQ ID NO: 38860 - DNA, 201 bp, Homo sapiens
atgtcagaaccagataaagatgccctggtcttgggatggctcctcaagtgccacccacctctctctgcctctcagaatccacggtccaaagagtgccaacwtgtggtgacttagccctgccaagacctttggccctggcaggaaaaccagataaagggggcaaacaagctgtcaggatgagcattggtttgtgagagcagt

SEQ ID NO: 38861 - DNA, 201 bp, Homo sapiens
tataatttaataactgagagttacagaagtacgttagacatgatctcatgcaaagtcttcatttaagggagaaagaaatcagctcttagaaaaagtaaacrtgtcattggtgattgcagcagttaagagagtgggccccgggtatcctgattccggcacttgcctgctagtcacctgtgtccccgatacccaacaagcccc

SEQ ID NO: 38862 - DNA, 201 bp, Homo sapiens
cattggtgattgcagcagttaagagagtgggccccgggtatcctgattccggcacttgcctgctagtcacctgtgtccccgatacccaacaagccccctgyggtctggcttaagttgaaactcatgctatggacagttgagagttgtggataccagaggcttacccagggagtaagcatatacaggccttaccttaatctt

SEQ ID NO: 38863 - DNA, 201 bp, Homo sapiens
gtggaggctgaaagacagcccataataagggggttgccaggcccagatggggctgttctttgtaagaggtgggttagattttgaagtaaggcttagaaacyttcggttcttctcacaaatatacagataattggtatgtatgaagtttgcttttatttatttcaaaatatcatatgaaattgacttgtagatttaccttcc

SEQ ID NO: 38864 - DNA, 201 bp, Homo sapiens
gatggagggattgagccagagtaaaaatagtagaatagaggaagtaggaaggacccaggcaaagcttgcctgggagctgagatcagtgacctggcgacgghgtgcacatgtagggggcctgggagcctagctccactactaccactctgcttggctgagatggagagcggcaccatcagggagaggactttaagatgctga

SEQ ID NO: 38865 - DNA, 201 bp, Homo sapiens
agaactgaagtttgctggaggctatagccttctcttggaggaaatccttgaatatatccctcctccttttctttctcctcttccttctttcctctcctccycctcctttcttcttctttgtcttttttgtcatcttcatcttcttcatctttgtctttgtccaattcgtcgtcttcgtcttctttatcgtcgtcttcgtct

SEQ ID NO: 38866 - DNA, 201 bp, Homo sapiens
tttgtttaaagggctcactttactgcgaagactgtctaaacaaggttcgtatctttttatttcttaagttgggtgcagctgaggattgaggaatgacttttgaagtggatttatcttgaaaagtattatacatggggttgaagattctcccatggtataggggaatctccccatcagcataatttttgctggttctgaaag

SEQ ID NO: 38867 - DNA, 201 bp, Homo sapiens
ctactgttttatctttctgaatgagatggtttatgtggtggcttgaagagagagatgagtaaggtgagggcagaaaggaaggttggccagccagtcccccwggcagcctttcaagaatggcgctccaagattgagagaatcttaagagaatactgcatgcaattctcgggcgacagatataaaaacctagagtaaataaat

SEQ ID NO: 38868 - DNA, 201 bp, Homo sapiens
acgccgagacctcaggcagtgaagcagccctgcctaaatgggtggcagaagccagtgaaagcctggtctcctcatcctggcactggggtgtgtttgtcccrttctaggatgaaagcctggtctcctgatcctggctctggggtgtgtttgtcccattccaggatggatttcgctactgttttatctttctgaatgagatgg

SEQ ID NO: 38869 - DNA, 201 bp, Homo sapiens
cagggttcggtcatgaggtgcagctgcctcagcactgctggcctgagcttgactccttccagtgtgagttttgcctgtgacgttcttgggagcccgtaatyacacagtgtcctctccctccacattctcacccacttaggagtaggcttaggagcaagcgagggtgcagagtggcctttgtcactggcagagctgtagtag

SEQ ID NO: 38870 - DNA, 201 bp, Homo sapiens
atctaattttttttttctctgtaatgcagtggcggggagaaattagccacattttgcataggaggaaacagaaacttgaaaacaaaaatttttttagagatggaatctcactctgttgcccacgctgaagggccagtggcacaatatagttcactgtagcctcaaattcttgggctcaagagatcctcctacctcagtctc

SEQ ID NO: 38871 - DNA, 201 bp, Homo sapiens
aggcattttgaattgatcctttcaaaacatactgttggtctaaagtaaatgattttagcatttctccttgattctttctgtaaacctttattaaatccctrtatgccaggtgagtaagtttcaggctgtaactctagaaaggtgttggttaatgggagagtcaagacccccaagcaggcaactagtcagggcggtcagggc

SEQ ID NO: 38872 - DNA, 201 bp, Homo sapiens
tgttgacttggaaaataggagatggggaagtaactgcctgcggatagaaccagcctgtgcagtcagacctagaccatgccctgctcctgtgcagtgccccsctagggttggtggcacattgatgttagctcgtttgtggggttgtggcctttgtgccttcagtctgggcaagttcaactgcatgcaccggacaagagagga

SEQ ID NO: 38873 - DNA, 201 bp, Homo sapiens
agtttccaagatatggctacctctctcaaacatggttacatgtggaaaggaaacaagactcatggagagttcattttttatttgaagagctatgaaacatraagaatggcagattatagattttttaagaaatcaggttgttgcagttagattttaagcataaacagtcaaccaagtttaccaaattttattaacccgtaa

SEQ ID NO: 38874 - DNA, 201 bp, Homo sapiens
acatctgcgacttgagatttttctatcagttagatttttggtggtatatcagattgcactttcatcattagtaaactaagaaattggttcaatttgttctrtagcaaatcaaattcaaagtccacagaggccacttagtttggacttttcatgctcagatcaagaaaccagtgcaagaagttgctcttaagtcaattttaa

SEQ ID NO: 38875 - DNA, 201 bp, Homo sapiens
catctttgtctccttcttcatcttcatcttctcatcttcgttgccttctttttcttctttgtcttcgtcttcaactctgggccttttccctcagtgggagrccttcactttccacggggcagggccagtcactaatatttctaatgctgcgttttctttttaaccaggttttcactaatgataagatggaagaatgtgtga

SEQ ID NO: 38876 - DNA, 201 bp, Homo sapiens
agcacgtgacaaggaggggagagagcattctgggcaaaggggatgatgacatgagcagatgcagggttgtgacaagtggcatggagtgtcgagaggctaasagggagctgagagctcggttagggagggcgtggctcctccaggtaaggagggaggactgtgttggagagagctggagcccaggtttgcatttgaaaagca

SEQ ID NO: 38877 - DNA, 201 bp, Homo sapiens
ttgttgctctggcgtagatataacacatctgcgacttgagatttttctatcagttagatttttggtggtatatcagattgcactttcatcattagtaaacyaagaaattggttcaatttgttctgtagcaaatcaaattcaaagtccacagaggccacttagtttggacttttcatgctcagatcaagaaaccagtgcaag

SEQ ID NO: 38878 - DNA, 201 bp, Homo sapiens
atcttgtgtcaggctcgctacaaaacttcattaagtttctttttctctctctgcaaaaatgtagctaatttctcccctgtctatttcacaggattattgcraaaattatataagaggatcccaccgtctgggtttttttcatcattatattccttgtgccaagcacaggcctgctgcatagtagatactaagtaaatattt

SEQ ID NO: 38879 - DNA, 201 bp, Homo sapiens
tatttttagtagagatggggtttcaccatgttggtcaggctggtcgccaactcttgacctcaggtgatccacctgccttggcctcccagagtgttgcgatkacaggcgtgagccactgtgccaggccaagttctacttcttaatacataaatttcaacttatctggaagaattatgactacccactgccaaataaaacttc

SEQ ID NO: 38880 - DNA, 201 bp, Homo sapiens
gccactgtgccaggccaagttctacttcttaatacataaatttcaacttatctggaagaattatgactacccactgccaaataaaacttccagcctaactrctggcaatctgctgttgaagctgaacaggctctaaattgttgggttttaaaaaaatttttgtttacttaagcctatagctcctagtattcccaggcattc

SEQ ID NO: 38881 - DNA, 201 bp, Homo sapiens
ctatgcaaaaaccaaccaggactgaccctgctcaccttctggctctataagttattattcagcagacctgcagaataaatagacttttaaaaaacaacttygttgagatatgatttacatattacaaaattcagctcttttaagtgtacaataatttttagtaaattgagttgtacaattttagaatatttttgtcacctc

SEQ ID NO: 38882 - DNA, 201 bp, Homo sapiens
ttatcaactcaaggctgttgtgcaaatggaaaacttacaagatgcgatcggtgcagtgaatagcctccacagatacaaaattggcagcaaaaagatcctgstctcacttgccaccggggctgccagcaaatcactctctttactgaggtaagaaacaagcaagctgtttatttcaggaaataacatttgacccagaaacaa

SEQ ID NO: 38883 - DNA, 201 bp, Homo sapiens
atggactctgatttcatagcattttgataaaatgccacaaaataagggctatagagagatttttacaagtcagattttttgttccccaaatcttttaaatkaagccagtgactcccagttctcaacacatggccccagtcaagacagaacaccatggaaaaaaccctgtaagtattatggcactctccgaatcctcctgaa

SEQ ID NO: 38884 - DNA, 201 bp, Homo sapiens
gctcgtttgtggggttgtggcctttgtgccttcagtctgggcaagttcaactgcatgcaccggacaagagaggaaaataattaaaacactgtgggcagttstgtcagccgctcttctcttgagggtcagcctaggcagggagctggctctgctgtcccctctgccactctcaccttccatgggcctttgggagcaggagcc

SEQ ID NO: 38885 - DNA, 201 bp, Homo sapiens
atcatgctgcaggaagactcttctcgtagcagtggtgtctgagagggcaggaacaggggagagaaggaggcagagagggaaagtagctacatcagtccaawttcagagcagatactgttgggacagaactcgatgttacagaaatgtcaaaatgtcaaatgtcattgaaactagagtgggtaactaattttttttattaaa

SEQ ID NO: 38886 - DNA, 201 bp, Homo sapiens
tggggttgtggcctttgtgccttcagtctgggcaagttcaactgcatgcaccggacaagagaggaaaataattaaaacactgtgggcagttctgtcagccrctcttctcttgagggtcagcctaggcagggagctggctctgctgtcccctctgccactctcaccttccatgggcctttgggagcaggagccctgtgccct

SEQ ID NO: 38887 - DNA, 201 bp, Homo sapiens
tgggaccacaggcatccgccatcctgcccagttaatattttttaatttttgtaatgagggggttttgctatgttgcccagggtggtcttgaactcctggcytcaagtgattctccctcctaggcctcccaaagtgctggaattacaggcacgggccaccacgtccagccagagtaactagttttatgtagcaagcaaggta

SEQ ID NO: 38888 - DNA, 201 bp, Homo sapiens
ggatccaaggccatgaggaaatgcatgaggtgtggggatgaggcagaggccgctgataacttttgagtcatcactacagagtcctgtggctaaaatccagkagggaaggggctgagagactcgggggtaacacagcagaagcagctcctgagcagctggatgtttccattacagggacagggtagagtacgagactgagaa

SEQ ID NO: 38889 - DNA, 201 bp, Homo sapiens
tcgcgatctcttgacctcgtgatccgtccacctcggcctcccaaagtgctgggattacaggcgtgagccccagcgcccggccggaaaacttgtagttcttytaccgatgatactactcattccgtatccacttccgttgttaaaacctaggtgtttctcaaaggactgggatgtcactgaatatggtgtttgtgagttgat

SEQ ID NO: 38890 - DNA, 201 bp, Homo sapiens
tttatttttgttcaacttttgaagcctgattctctcttctgctagcaagttttaactgaagatcagatgaataaacaaaaaaagtggggatattcagaagygtgatttcatgggaataatttctagagtacttgcttaagtacagggacctgggtgtgtgtcatgttaatagatatggggcaggggctagaaaattgtttc

SEQ ID NO: 38891 - DNA, 201 bp, Homo sapiens
ctaagccatgagcccacaagcctccactttttattttattttattttattttatttatttatttatttatttatttattgagacggaatctcgctctgtgkcccaggctggagtgcagtggtgcaatctaggctcactgcaagctccacctcctgggttcatgccattctccttcctcagcctcctgagtagctgggacta

SEQ ID NO: 38892 - DNA, 201 bp, Homo sapiens
tacgggacacctcctttcttttccctctgtcttagacttctcaggggccatagattatgccactcctcctttctcctaagccatgagcccacaagcctccrctttttattttattttattttattttatttatttatttatttatttatttattgagacggaatctcgctctgtgtcccaggctggagtgcagtggtgcaa

SEQ ID NO: 38893 - DNA, 201 bp, Homo sapiens
ttttttgttgttgttctcagaataaaaatgatgcttattgaagaaaatttggaaagtttagaaacataaaagaagcaggggaaaaaaaaccatccacaggyctatggcccaaagccaattgcacttaacagtttggcatcttcttttagttttgtttggattttttccctttgagcgttttttggtgcctctggtttttta

SEQ ID NO: 38894 - DNA, 201 bp, Homo sapiens
ttttagcaagttagttgcatccaggcaagtcagtcctctgctcgcatctcagtcttggtcttctaggtgagtccagcttcttgacccatgggggtggttayatgtaataggaaggattatgaaatagtatgtttgttgaaaagaattcagatagtactgaaatgcacaaagtaagtctcccatcactcttctgccagtccc

SEQ ID NO: 38895 - DNA, 201 bp, Homo sapiens
gtttatggtaggtttggtttgtttctgtgttttacgtgcccgcttgcttttggcgtgtccctttttgatttcagtgtttgatgatactcaaagtcaatcgytttctgtaaaggatctaacacatcttgggtacttaaaatttaaaccccactgtgcttgtgtctttgaaggagctgtgccgcatggagtcaaaaactggtc

SEQ ID NO: 38896 - DNA, 201 bp, Homo sapiens
cgttcgttcgtttgttcgttctttctctctctctctctcttttctttctttttctccagttctacttccttctttctttctttcttttttttttttttttycacagaatctcgctctgtcgcccaggctggagtacagtggtgccatctcagctcactgcaacctccgcctcctgggttcaggcaaattattctgcctcag

SEQ ID NO: 38897 - DNA, 201 bp, Homo sapiens
gttttttcctgggaggtgaaggttgcagtgagctgagatcgcgccactgcactccagcctggtcgacagagcgagactctgtttcaaaaaaaaaaaaaaaagtaaatgtagtgttttaggtaagaacttgcccactttggagattcttattccttatggttaaaaaaaccaaaacaatgttttgataattcaaaccattta

SEQ ID NO: 38898 - DNA, 201 bp, Homo sapiens
gatatgggttaggttaaggaaaaggagatggtctcgatgtcatggatttaaagtcagcatttggattacaacacacattattgtgtgtcgagaggcagcaytggaaagagcctgattttctaaaatatgcatcaagtgcataaattacaaatcagagctgagtggggaggtgcttcagcagcagcgggatcaatacgattt

SEQ ID NO: 38899 - DNA, 201 bp, Homo sapiens
ctgaccacgtgaatatctttcttgatcatgtcaagtcacttctggaaatgaatttatgaactgatagctaatggttcttggaaagattatttgaaagtccyttttattagaggctagcaagtggaaaggtaaaacacttagagtgtattttcagttgttgtatataactccagcttctgaaatgatgtatctgacacctcc

SEQ ID NO: 38900 - DNA, 201 bp, Homo sapiens
ggagtgcagtgacgcattcatggctccctgcagcctcgaaccctgggaccccagtgatcctcccacctcagcctcccaactagccaggatcacagatgcaygccatcatgctcggctcattttttattttttgtagagacgaggtctccctatgttccaaccagaaacagaaactaagaacccatgactgtattctgtccc

SEQ ID NO: 38901 - DNA, 201 bp, Homo sapiens
atttcgctactgttttatctttctgaatgagatggtttatgtggtggcttgaagagagagatgagtaaggtgagggcagaaaggaaggttggccagccagtcccccaggcagcctttcaagaatggcgctccaagattgagagaatcttaagagaatactgcatgcaattctcgggcgacagatataaaaacctagagtaa

SEQ ID NO: 38902 - DNA, 201 bp, Homo sapiens
tagctgtgattccattttgttcagttatgatttagtgatgtaacagaattgaacactatttctgtttgtgcatgcagtaagatatgagtaaccaaaaaacyacggacctcataaaattaatttatgttctgattttcttttctcagaaagagtacatggagaacaagaaagttgctgtggaactaaaggatgtaccatcac

SEQ ID NO: 38903 - DNA, 201 bp, Homo sapiens
gtttatgaaatgtcatcagcaacacggatgggccatctgggtagatggctgatctcatctgtgtttgaaactttactcttttcctttgggggatcttactraaaccccttatggcctgaccacagaactattaagtattgtcctcaaaccactgtgtgtgttagccatctttattgaatgctgtttgtgaggggttgtttt

SEQ ID NO: 38904 - DNA, 201 bp, Homo sapiens
agtcacacaattcagaattacacggtcaactttacagatcttgaaactcaattttgtcagtggcatgcagaatggagtaggttcaggggatcaactcatartaagcctgcctgtatgagcctgatctgtataaatcagaataccagtgtgttaatttcagtctgaactataattaccaagagggcagttcattggctggtc

SEQ ID NO: 38905 - DNA, 201 bp, Homo sapiens
taaaatgctgccagaataatggaacggcaggcattttgaattgatcctttcaaaacatactgttggtctaaagtaaatgattttagcatttctccttgatyctttctgtaaacctttattaaatccctatatgccaggtgagtaagtttcaggctgtaactctagaaaggtgttggttaatgggagagtcaagacccccaa

SEQ ID NO: 38906 - DNA, 201 bp, Homo sapiens
gggattacaggcgtgagccaccgcgtccagccaattttgacatttcctgacttcatgcactcatgttaccacctttctatttcttattttctattgtatgygggattcaagtgagactgtaatataattttatataagggtattaacaacttttatttgattttattttttgagacagagtctcggctcagccccctaggc

SEQ ID NO: 38907 - DNA, 201 bp, Homo sapiens
gctggggtgtgagcagcaagaatggggagagctgagagaggctccgtggtgcctccctggctgcccactgggtctcctgggagcttctccaaccttacctytcagattcttatagaattagtcccagcacactctgagcattggtgtttttaaaagctccccaggcaattctaatgcatagccgggattgagaatcaaggg

SEQ ID NO: 38908 - DNA, 201 bp, Homo sapiens
tctactaaaaatataaaaattagccaggcatagtgacaggctcctgtagtcccagctactctggaggctgaggcagaaaaatcgcttgaacccgggagacrgaggttgcagtgagctgagatcgtaccactgcatgccagcctgggcgacagagcgagacttcctcttgaaacaaagatttgaattgttgagagccatagg

SEQ ID NO: 38909 - DNA, 201 bp, Homo sapiens
attctacataaagggagtcatgctctgaggctagtaacgagagggtgagccagcagcaaggaagtcgctgtctgctgaggtcttatgtgtataaataaacyatttgctttgcagattcttggaatgggctccaaacgtctgctgacccttacccacagggcccaggtgaagcgctttactcaggatttactaaaacttctc

SEQ ID NO: 38910 - DNA, 201 bp, Homo sapiens
agtagagagggcagctcgtgctgtttgctgtcctggactgcacttgacccttcctgtcctaggcagagcagctgccagttttcggcctcctcccccacagraccagaagaagtcactgccaggaggaaggaatggaaagggaagcatgaaggacggcaccctcagttacaggcccattactagctgcacacatttctgtgt

SEQ ID NO: 38911 - DNA, 201 bp, Homo sapiens
atcttccagtgccaaagccacgcctggaaaagggtcacaggcaaattctggatctgctacaaaaaatacaaatgttaaaagtttacaggtaattttgatayctcttgctttctgaagtttatggtaggtttggtttgtttctgtgttttacgtgcccgcttgcttttggcgtgtccctttttgatttcagtgtttgatgat

SEQ ID NO: 38912 - DNA, 201 bp, Homo sapiens
gctgggattacaggcatgagccactgcacccagcccccactgttttttaatgtattggactgcagctaagaagacgttcttaccttggcagaggtaggaasgctcagagctctccttaggtactgattggttggaggaggaggtgagagagcaggaagcacaaccaggagagccgaacatccctgagccaaggcagaggaa

SEQ ID NO: 38913 - DNA, 201 bp, Homo sapiens
aaaaggcagattgcacaagcttgcatgggtagcatggacagttgacataaaacacagccttaaatcttattttagtcatttgtctgatctttaccacctcyaaattgttggcagaagctattagagcaaatttaactgagttcaaatttcacttcctatattctacttattttctgaaaggaggatgaaagaaatgcaaaa

SEQ ID NO: 38914 - DNA, 201 bp, Homo sapiens
ctccacgaattgcagcccaattatatttgaagagttagaatatcacgagcctgtctgcagacagcattgttccaataaggatttcaggtgtgccgttcgtyttcctttagaagtaattcttttctataagattgtggaacatgttaggatgaccttgtgaacatcttagacccctgcggaatgtcagcttccaattgtgtt

SEQ ID NO: 38915 - DNA, 201 bp, Homo sapiens
atgacaggtttgcactgtgaccctggagatgggtgtctgcagtgaaattgaacacaggaggatgtcgtcggagatgacagaggcaaggcattgaaaggctrtacggctgtggtgtgggacaggtccctgggtgttcagttgcccaggatgatgaaaggggtggactcaggtggataggaagaccccacgccatgacctagg

SEQ ID NO: 38916 - DNA, 201 bp, Homo sapiens
tcctttttaatactgaaagtaacatatgtgtcttggaattcttttggtaagattgtcttacattcttctgatgtgaaacgtgtttctttcctaagaaacgrgggaagcaattttgaatatagtccagcctttcctttcttctcagtgggtgtcaatagagttgtctgtctttgtcaagtgtttctaatgtttggggatggg

SEQ ID NO: 38917 - DNA, 201 bp, Homo sapiens
tgggtgagtgtgatgggtgggcagctggggtgtgagcagcaagaatggggagagctgagagaggctccgtggtgcctccctggctgcccactgggtctccygggagcttctccaaccttacctctcagattcttatagaattagtcccagcacactctgagcattggtgtttttaaaagctccccaggcaattctaatgca

SEQ ID NO: 38918 - DNA, 201 bp, Homo sapiens
ccccaggttaccactaaaaatgccagtaagtgggtttgcgttatttttgccattttccaatattacattgtggaggctgaaagacagcccataataagggrgttgccaggcccagatggggctgttctttgtaagaggtgggttagattttgaagtaaggcttagaaaccttcggttcttctcacaaatatacagataatt

SEQ ID NO: 38919 - DNA, 201 bp, Homo sapiens
atcagagaaatcatacagtagagaagtcatatctatgtagtgaatgtggaaaaggttttactgtgaaaagcatgctcatcatacatcagcgaactcatacmggagagaagccctacacatgcagtgaatgtgggaaaggcttccccttgaagagtcggctgattgtacatcagcgaactcatactggagagaaaccttaca

SEQ ID NO: 38920 - DNA, 201 bp, Homo sapiens
gtggcagggttttcagtaaaatgttttgcctcatcgtgtgctaggaaataatgcagaaaaaacttatgaaaacattcaatgtagaagacttttaggaaaayatcagagaatttaatgaaggaaagaagccttggcaaaatgatggatgagagctttctgtcacaattctaaccttaacagataatatgcctcatgtgcatt

SEQ ID NO: 38921 - DNA, 201 bp, Homo sapiens
caggagacagatgccttcctcttatctcaactgcaaaaaggccttcctctttttctaatcctcctcagcacagaccctttacgggtatcccccggtgtcaygctgggggacggtcaggtctttcccttcccacgaggccatatctcaggctatcacttgggaagaaaccttggacaatacctggctttcctaggcagaggc

SEQ ID NO: 38922 - DNA, 201 bp, Homo sapiens
tagatagtgtcaggatgagactggtccccagaaagaccaagcaattagaggattggaactgaaaggaggaatggactggagagtaagttctataaaaactyttgaacaggctgggcatgggggctcgcgcctgtaatcccgagcggatcatgaggtcaagagatcgagaccatcctggcctacatggtgaaagcccgtctc

SEQ ID NO: 38923 - DNA, 201 bp, Homo sapiens
attgtctccagcaatgaatcagacaaaagtgctccaccaaccaggcccttgaatcaccttccttgtcccgtgaatcagcacagcctgccacggcaaagttktatcagcccactcctggaaatgatcagtgaaggtcccatcatgggctgctcatagtcctgtggaccaggtgctaaacttacctaccagagattaacattc

SEQ ID NO: 38924 - DNA, 201 bp, Homo sapiens
attcacctagttgtgtaaccataccacaatcaattttggaacatatactatgtataaatatatattatcaaatagtcttgatgattatggttctatagtargttttgaaattgggaagtgtgagtcctccatctttgttctttgctttgaaggttgttttgactattctgagtcctttgaatttccatttgaagtttagaa

SEQ ID NO: 38925 - DNA, 201 bp, Homo sapiens
cgtgaagagcaatctcattgtacatcagcgctcccacacaggagaaaaatcttacatatgcagcgaatgtggaaaaggcttcactgtcaaacgcactctcrttatacatcagcgaactcatacaggagagaaatcttacatatgcaatgaatgtggtaaaggcttcaccacaaagcgcactcttattatacatcagcgaac

SEQ ID NO: 38926 - DNA, 201 bp, Homo sapiens
cccactttttttccttgagatttcatctttgtttattttatgcacatcttgtttttgtctacataattatcttcttaggattttcaaatctgccttttctygtccactgtcacagtgtctctgcttgtgtattacctctcttgctatgaaattccattttccaggcctctccggaaagagagacctttgaactcattactt

SEQ ID NO: 38927 - DNA, 201 bp, Homo sapiens
aagcaatgaaggaagaagaaggaggttgctggccttggatatcataatttctggggacaactttaagtggacactaatatttctgactaggaaaacttcaraaacttcatggcaaatgcagaagagacaaagacgtatagtccatgttatccactattttctgagcacagaagaaaatgatcaagacccaggtgatatttt

SEQ ID NO: 38928 - DNA, 201 bp, Homo sapiens
aatgggggcatagacgttgggtaaacattcccattccaaaagggagaaagccacaagaaagggctataggttccatgcaagttcaaaacccagcagggtartcattaaatctagtgcaaggcgtgggttcccaaggccttgggcatcctctgctcatggggctccctcaggcagacatcatggtttgcagacagctgtatc

SEQ ID NO: 38929 - DNA, 201 bp, Homo sapiens
ccccctaggtccttgtgggttacgtagtggcgccccaaacagtgacaggatcgggcgctctacagttggcgcctgtaatcccaattacttgtgaggctgargcaggaatcacttgaacctgggaggcagaggttgcagtgagctgagatcctgccactgcactccaggcctgggcaacggaataggctctgtctgaaaaac

SEQ ID NO: 38930 - DNA, 201 bp, Homo sapiens
cagcctgaccaacatggtgaagcccccctctctactaaaaatacaaaattagccgagcatggtggctcacgcttgtaatcccagctactctggaggctaarctggagaatcacttgaacctgggaggcagaggtttcagtgagccaagattgcgccattgcattccagcctgggcaacaagagcgaaactctgcctcaaaa

SEQ ID NO: 38931 - DNA, 201 bp, Homo sapiens
tcagcattgccatgactttgcacatactattcgcggttggcacacgtagtataacgtgatctccttcttaacctttctttcttttgttttttttttgagayggagttttgctcctgttgcccaggctggagtgcaatgacgccatcttggcccacagcaacctccgcctcccgggttcaagcgattctcctgcctcagcct

SEQ ID NO: 38932 - DNA, 201 bp, Homo sapiens
ggtggatcacttgaggtcgggagttcgagaccagcctgaccaacatggtgaagcccccctctctactaaaaatacaaaattagccgagcatggtggctcaygcttgtaatcccagctactctggaggctaagctggagaatcacttgaacctgggaggcagaggtttcagtgagccaagattgcgccattgcattccagcc

SEQ ID NO: 38933 - DNA, 201 bp, Homo sapiens
agctccttgaggttatctactgggacatctagagaatgccatcttgcaaaccctactctggactgagtagctgaccccttcttccacccgccttctcactrtctcttttgcctaataaatatggagggctgtgtaaagctcagggcccttgtccactagaggcaaggtgtcccctgatcccttcttccaaatatactcttt

SEQ ID NO: 38934 - DNA, 201 bp, Homo sapiens
ggccttgggcatcctctgctcatggggctccctcaggcagacatcatggtttgcagacagctgtatccttcccaggtggccctacagaggaaggcacaccygacttttccaatgtcctgcagacccagctgtctcaactcttatggtgatccaagagtgagggcccctccctacttggacaccacccaagctggcaagtcc

SEQ ID NO: 38935 - DNA, 201 bp, Homo sapiens
catgatacatttgacttgtacagaaaaaatttgaaatcaagtttaagtttaatcaaccagaagagaagacatggaataaataaccctgttgagtttattgraggtgagaaaacacttctacatggtaagcatgaacgtacgcatactaaaactagattttctgaaaatgcaaaatgtatccatactaaattccaagtcttc

SEQ ID NO: 38936 - DNA, 201 bp, Homo sapiens
atgtggaaaaggcttcactgggaagagcatgcttattatacatcagcgaactcatacaggagagaagccctacatctgtagtgaatgtgggaaaggcttcmccacaaaacactatgtcatcatacatcaacgaaatcatacaggagagaaaccatatatatgcaatgaatgtgggaaaggcttcaccatgaagagccgtat

SEQ ID NO: 38937 - DNA, 201 bp, Homo sapiens
catgacagatccttatattggttgtgaagtcattggtaatgtagggatgttttatttgtcctgatgtcatttgcctacgtttaatatttagaaataggcgytaaaatgtatagatagaggattttgctcctaccaaagtatatttgagaaaggaatatagatgcaggctgtattgtgaaaatttttaaaaaattatcttat

SEQ ID NO: 38938 - DNA, 201 bp, Homo sapiens
aaacgtcgcggccatcttagccttctattcagctgctgaaagggatttacctccacgccatttttgtcttgtgtaaactggagcctctgtatatggacccstatttatgaagggttgaggtgccaggaaatgggacagtttcagtgctctttcatcttcccggccatccccggtcacccccggtcacccccggtcaccagc

SEQ ID NO: 38939 - DNA, 201 bp, Homo sapiens
tactctgaagtggtagattctcacatcattctcttgccccacacaagagagtataatctaccttcttgttacagatctgatacctatgtagtccttaaaaygtaactctcctttttcaatattgccagccccgtttgatttgtctaaatcttctgtcatttcccatgaacagggtatcaagccagcaaaccagatgcactc

SEQ ID NO: 38940 - DNA, 201 bp, Homo sapiens
ttccaagtcttcaagcatcagaggactcagaaaattgagaaaccccatgcatgcattgaatgtgagcaaaccttccttaggaagtctcagctcatttaccrtgagaacatttgtatacaagagaatcctggaagtggtcaatgtgagaaattatccagaagtgtcctgttcactaagcatctgaaaactaatacaacagac

SEQ ID NO: 38941 - DNA, 201 bp, Homo sapiens
ttgactatgtgtgtattgtataaagacctatttagaaagcagccaaatctatatacattgtgaattatctagccttgtttgtacagttgcttttacttttmggtgtgtttatattattgtgttttatttgtaagaaatgaaggatatttatacatggaatttcctttatgtgtaagagataaaaggaatcttacacatctc

SEQ ID NO: 38942 - DNA, 201 bp, Homo sapiens
aatatgaaagaatccatgctttgttggtagttcaacttttgaccattacaatgatacatgaatcacccaccactcaagaaggaactatggttgtcattttratgtacatactccagaccatttttggaatattggcattctttgcatgctggtgcctgccaaccaacttttttaaaattactaatttatttatttatttat

SEQ ID NO: 38943 - DNA, 201 bp, Homo sapiens
ataaaaggaatcttacacatctctcccaatgtgtaagagatgagggatatttatacatggagtttcctttatactaaaatagggttttcaaccccctttarctgtaattttccactacctacccaaatgctataaaactgccctccccttatcacccttttctgactcctttttcggactcagtccgcctgcacccaggtg

SEQ ID NO: 38944 - DNA, 201 bp, Homo sapiens
acaaagttcagtctcactacacatcagaaaactcatacaggagaaaaaccttatatatgtagtgaatgtggaaaaggcttcattgagaagaggcgtcttaytgcacatcatcgaactcatactggtgagaaaccctttatatgcaataaatgtgggaaaggcttcaccttgaagaacagtcttatcacacatcagcaaact

SEQ ID NO: 38945 - DNA, 201 bp, Homo sapiens
caggtgttatgaaattaatataaataagatgtttttgtaagtttttattttgaaataagtttagattcacaaaatcttaccaaaatattccagagttcttdcccttaacccagcttcttccaaagataacaacttacataagcatagttcattaccaaatacaggaaagtgaaattgttacaatactgttaactacagaat

SEQ ID NO: 38946 - DNA, 201 bp, Homo sapiens
tattttgaaataagtttagattcacaaaatcttaccaaaatattccagagttcttgcccttaacccagcttcttccaaagataacaacttacataagcatrgttcattaccaaatacaggaaagtgaaattgttacaatactgttaactacagaatttatttggaaatcaccagttttaacatgcatgcatttttgtttgt

SEQ ID NO: 38947 - DNA, 201 bp, Homo sapiens
tgaaataagtttagattcacaaaatcttaccaaaatattccagagttcttgcccttaacccagcttcttccaaagataacaacttacataagcatagttcrttaccaaatacaggaaagtgaaattgttacaatactgttaactacagaatttatttggaaatcaccagttttaacatgcatgcatttttgtttgtttttt

SEQ ID NO: 38948 - DNA, 201 bp, Homo sapiens
gtagaaggtagacgttaatggggaggagagggaactgctacactcatgattacagtttgtgacagtgaaataatacaaattaaaatcatcaaagataaaaagtatagaaagaagaatccaggagaaactgggtgcaagctttcagttctcctgttctagtggagttgcacaaagtgctgaattttccctgcaacagtgttt

SEQ ID NO: 38949 - DNA, 201 bp, Homo sapiens
tcttattcctcttatactgaatcctgagtttctccatactttttttttttggaaagaaggtctcatctgtcacccaggctcactgtagccttgacctcctyggctcaagcgatcctcccacctcagcctcttaagtggctgggactacaggcacacatcaccatgctcagctgatttttgtatttcttatagaggtggggt

SEQ ID NO: 38950 - DNA, 201 bp, Homo sapiens
tctgaggacacagcaacagcccctccatcactccttcttcccaaggaagagctcttttttgttatagtatggaaaatatgccccactttcttttctttttytttttttttttttgagatggagtcttgctctgtcaccaggctggagagcagtagcgcaatcttggctcactgcaacctccgcctcccgggttcaagggat

SEQ ID NO: 38951 - DNA, 201 bp, Homo sapiens
ttcctggtgctgagctccttgaggttatctactgggacatctagagaatgccatcttgcaaaccctactctggactgagtagctgaccccttcttccaccygccttctcactatctcttttgcctaataaatatggagggctgtgtaaagctcagggcccttgtccactagaggcaaggtgtcccctgatcccttcttcca

SEQ ID NO: 38952 - DNA, 201 bp, Homo sapiens
atctgaggacacagcaacagcccctccatcactccttcttcccaaggaagagctcttttttgttatagtatggaaaatatgccccactttcttttcttttyttttttttttttttgagatggagtcttgctctgtcaccaggctggagagcagtagcgcaatcttggctcactgcaacctccgcctcccgggttcaaggga

SEQ ID NO: 38953 - DNA, 201 bp, Homo sapiens
cagaagttcaagaccagcctggccaacgtggcgaaaccctgtgtctactaaaaatacacacaaaaaattagctgggtatggtgctgggctgttgggagccraaggcccatgggatgtgaccaactcagcattccactggaggctatatgatcaaacagcaaactttatcatgaatgcacgatgtgggcaaactcatgactg

SEQ ID NO: 38954 - DNA, 201 bp, Homo sapiens
ttttatgtatgtgtctgcatatataaacacatttattatgacttcttttgcttcagtggaatcacattccacctgttggtcaccttagatcaagcttgtayaacctgtggcctgtgggctgcatgcagctcaggatggctttgaatgtggcccaacacaaatttgtaaattttcttataatgagaattttttgcatttttt

SEQ ID NO: 38955 - DNA, 201 bp, Homo sapiens
atctggtgttatttattagttcttacatattataggccccaaatttatttttttcaatttactgataaatgtaattcagtatatttggatgtgtttatccmagttactaggtaccattatgtagtttacaaaaatgccttaaatgttatttttctaaaatttgttttgaaataattctagattcacaagagattacaaaat

SEQ ID NO: 38956 - DNA, 201 bp, Homo sapiens
atttctttgacttttcaacattgttgaatgaatggatgaccgcacagttacagaatattttactggaattcttattctgtcaaaatgtactaagaaaaaaaccccaccagcttcctatgtggtgaaaatgagcggaatgacttccttgacattcttttcctatcaccaaaagaatatgacttcattaaacagaagtgtgtt

SEQ ID NO: 38957 - DNA, 201 bp, Homo sapiens
cccaggcactccagactgggcaacagagtggaccttgcctcaaaaagagacaaaaaaaaaacaaaaaaaaagaaaaactctcatataccaagggtgagaakagcaaatggaacacgaacttgactctgaaaaatagtttgacaatttctctgtatatttatatactgatacctatatcacacacatagattcacacaggca

SEQ ID NO: 38958 - DNA, 201 bp, Homo sapiens
acttagaatactttgcaagtatcaagatgtggatggcggccgggtgcagtggctcatgcctgtagtcccagcactttgggaggctgagatgggtggatcasttgagctcaggagttcaagaccagcctggccaacatggtgaaaccccgtttctactaaaagtacaaaaattagcagcgcatgtggcgttcacctgtaatc

SEQ ID NO: 38959 - DNA, 201 bp, Homo sapiens
agcaggagaatcgcttgaacccaggagatggaggttgcagtgaacagagatcacgccactggagtcttactcactccagcctgggcaacagagtgagtgaractcagtctcaaaaaaaaaagaaaaaaagtcaaagatgtggatggtaatgaataatttaaataagatagtgcttattatttgcttaggacagtgttctca

SEQ ID NO: 38960 - DNA, 201 bp, Homo sapiens
aacagatttgtttaatcatctaataatctttgtgctttatacatgttttatatagtctcttttatttcattcagaataaaataataatatggttaactatrttaaccatagttatttagaatgcattgtcttgtgatactagcatctgccatgtcttcattacagagtttgatattggcctgaaagctcatagtgaattta

SEQ ID NO: 38961 - DNA, 201 bp, Homo sapiens
ccaggagatggaggttgcagtgaacagagatcacgccactggagtcttactcactccagcctgggcaacagagtgagtgaaactcagtctcaaaaaaaaaagaaaaaaagtcaaagatgtggatggtaatgaataatttaaataagatagtgcttattatttgcttaggacagtgttctcagattgcagtatcctagaatg

SEQ ID NO: 38962 - DNA, 201 bp, Homo sapiens
acctccgcctcccgggttcaagcgattctcctgcctcagcctcccgagtagctgggattacaggcatgcgccaccatgcctggctaattttgtatttttastagagacagggtttctccatgttggtcaggctggtctcgaactcccgctctcaggtgatccgcccacctcggcctcccaaagtgctgggattacaggcgt

SEQ ID NO: 38963 - DNA, 201 bp, Homo sapiens
tctgaggcttagtgattgatgaatcattaagggaatccagtgtacgtgtgtgtctattccaggttttcctattttatctggcggggtggtggtcttttgtstagagacaagtgaaagccgaagtcttttcacaagagccctggctggttttgtgtgtgtgtgtgtgtgtgtgtgtgtgtgtgtgtgtgtgtgtgtgtgtgt

SEQ ID NO: 38964 - DNA, 201 bp, Homo sapiens
cccacagcaacctccgcctcccgggttcaagcgattctcctgcctcagcctcccgagtagctgggattacaggcatgcgccaccatgcctggctaattttrtatttttagtagagacagggtttctccatgttggtcaggctggtctcgaactcccgctctcaggtgatccgcccacctcggcctcccaaagtgctgggat

SEQ ID NO: 38965 - DNA, 201 bp, Homo sapiens
ttcttaacctttctttcttttgttttttttttgagatggagttttgctcctgttgcccaggctggagtgcaatgacgccatcttggcccacagcaacctcygcctcccgggttcaagcgattctcctgcctcagcctcccgagtagctgggattacaggcatgcgccaccatgcctggctaattttgtatttttagtagag

SEQ ID NO: 38966 - DNA, 201 bp, Homo sapiens
tagtcccagctattcaggagcccaggagttccaagttacagtgagctgtgatctccccaggcactccagactgggcaacagagtggaccttgcctcaaaaagagacaaaaaaaaaacaaaaaaaaagaaaaactctcatataccaagggtgagaagagcaaatggaacacgaacttgactctgaaaaatagtttgacaatt

SEQ ID NO: 38967 - DNA, 201 bp, Homo sapiens
aagtggacactaatatttctgactaggaaaacttcaaaaacttcatggcaaatgcagaagagacaaagacgtatagtccatgttatccactattttctgakcacagaagaaaatgatcaagacccaggtgatattttccctttgattttttgatagatttatggtggcctgaagaagtcagttgaacttaaggaagtatat

SEQ ID NO: 38968 - DNA, 201 bp, Homo sapiens
ccatattatgattagctcttttcctttctttggctctgagcttaattgtacattaagcaaacttaagtagaaaagaaactgaatatgttaaatatattaahaacatatttggacttgcttaactaagattatagagatgatcagtttataaaaccaccttcaacttaaataaatttgaactcgaaattgcaaaagcagtct

SEQ ID NO: 38969 - DNA, 201 bp, Homo sapiens
cataagttcttcttaagtttacatcttatattcattgtctattaatacctaagaaattactccaaaaggtagtgacttgaaacaacacttaaaaaaaaaaatctcacactttctgtggctcaggaataagggcatggcttacctggctactttgattcacagtctctcatgggggttgtcgtcaaggtgttagctgggttg

SEQ ID NO: 38970 - DNA, 201 bp, Homo sapiens
ataaaacaattgtagcatattcttttaaattgatatatactcttacagttcagcagatgttccataatttaccaaagtattcatctctcattgtaattccytttttttgtaaattacaaaagttgtggttaatattaagacagatttgcctagatagcttttagaattgctgtgtcaaagaaaacgaaaaaattaaattgg

SEQ ID NO: 38971 - DNA, 201 bp, Homo sapiens
aagttgaaaaatgaccctggagtgtgtttgaggaacttctaggaagcttgaatggatagagtagagtgagcaaaagcaaaactgtctggaaataagaacartgggggcatagttggaagttttggtacagaggtcacatactgcctgtcaagggcattcatgaccttgattttattccaaatgagttgagaacacagtagg

SEQ ID NO: 38972 - DNA, 201 bp, Homo sapiens
accgggacgtgatgttggagaactacagcaacctggtggcagtgggtgaggacagctgccctgtgtcactcagagggtgcccagtcagtggccttcctttstcagctgcttacctgcagtactctgaagtggtagattctcacatcattctcttgccccacacaagagagtataatctaccttcttgttacagatctgata

SEQ ID NO: 38973 - DNA, 201 bp, Homo sapiens
ggatagctgtgtattacagacatttctttgacttttcaacattgttgaatgaatggatgaccgcacagttacagaatattttactggaattcttattctgycaaaatgtactaagaaaaaaaccccaccagcttcctatgtggtgaaaatgagcggaatgacttccttgacattcttttcctatcaccaaaagaatatgac

SEQ ID NO: 38974 - DNA, 201 bp, Homo sapiens
tggaatattttaacactatatatattaaaacttcctgatatattattatcagtattatttttccagtcaatactgatttaggctttattaattacttaccrttttgttcctcttcagaccttgctcctctgcttacactggagtcatctttcttttgcttgaagaatatccgttaggatttgctgtaatatgtaattcctc

SEQ ID NO: 38975 - DNA, 201 bp, Homo sapiens
atttttagtagagacggggtttcaccatgttggtcaggctgatctcgaactcctgacctcgtgatctgcccacctcggcctcccaaagtgttgggattacmggcgtgagccaccgcacccggcctatatgttcttatggaatattttaacactatatatattaaaacttcctgatatattattatcagtattatttttcca

SEQ ID NO: 38976 - DNA, 201 bp, Homo sapiens
aacagtagagttgagtagctgccacggaaaccatagacctctcttttaacatggaaataattttttaaaaattagttttattgctgacactattgattacraacaacatataaacttatttgttaatgttatggtaattagtattttatactcttctgctatgcagatatcttaaaatacgttttcatttgccatcctcct

SEQ ID NO: 38977 - DNA, 201 bp, Homo sapiens
tttatggttcaggttttgtttgggactaaatgattgaggaactgtcttgggggttaaggtacggaggtttctgatccaggttttggaattaatcccggtgscggtggtggtagcgccacagattccgatgtgggctgcagctctggaggcctgggaaccatggcaggtgatgggttagccccagccctggctgctggaaca

SEQ ID NO: 38978 - DNA, 201 bp, Homo sapiens
aaaaaagtcaaagatgtggatggtaatgaataatttaaataagatagtgcttattatttgcttaggacagtgttctcagattgcagtatcctagaatgtaraaagacctctgaaaaggtagatgggtacacatggttttaaagaaaaaatgtgtgcatcttaactgtctatgtgacctctttcctaaaactggtctgcctg

SEQ ID NO: 38979 - DNA, 201 bp, Homo sapiens
agggtttgttttgtcagcgaatcggtttatggttcaggttttgtttgggactaaatgattgaggaactgtcttgggggttaaggtacggaggtttctgatycaggttttggaattaatcccggtggcggtggtggtagcgccacagattccgatgtgggctgcagctctggaggcctgggaaccatggcaggtgatgggtt

SEQ ID NO: 38980 - DNA, 201 bp, Homo sapiens
tgctggccatttcccacaacagaagaaaatgatcaatgcccaggtgactttttctctattttattctctcctttattccatagtggatttgtagagacccrtaagaaatcatttcagaatctagagagaaataaactttaaatctaactccaacatcatggcaaagtaagatcaggaatatagtgtttatgtgattcctac

SEQ ID NO: 38981 - DNA, 201 bp, Homo sapiens
aaactttgaaatcaaatttaagtttagtcaaccagaacaaaagctgtgaaattaacaactctactaaatttagtggagatgggaaatcatttcttcatggyaactatgaagaactttattctgcagctaaattctctgtaagtacaaaagccaatagcactaaatcccaagtcagtaagcatcagagaactcatgaaatag

SEQ ID NO: 38982 - DNA, 201 bp, Homo sapiens
agttgcttttacttttcggtgtgtttatattattgtgttttatttgtaagaaatgaaggatatttatacatggaatttcctttatgtgtaagagataaaargaatcttacacatctctcccaatgtgtaagagatgagggatatttatacatggagtttcctttatactaaaatagggttttcaaccccctttagctgtaa

SEQ ID NO: 38983 - DNA, 201 bp, Homo sapiens
attctactgagtgacattctagacccaaattctcaactctgccattgtaatgtgataatagcctgagatgaaatgtcatggaatgcatgtagctgtgttcytataagactttatttacaaaacaggtggtccaggtcctggatactatattactgactcttgatttaggtgaccatatggcttttctgcacaaattcacag

SEQ ID NO: 38984 - DNA, 201 bp, Homo sapiens
tattgttagtatattctccagaatttttcaaatgcatgagcatatttattttctgaaagaaaacagcctattttgcatttatcatgccatgaacttattatacatcatcatacctattttctaagatcaacatgttttataatatattcatgattatggtacaaagatagtaaaattaagtataaattgggaatatttttc

SEQ ID NO: 38985 - DNA, 201 bp, Homo sapiens
agttatacagtgactgtggggagaaagcagacaggttcctcaggagattattatttcatggcacttagatctcaagaaaaatttgctattcttcccagagktgatatggtgaacagtgttttgaactagctttctaataaaggcagaagatttcttactgctgtttattacacggttcctcagagactcctatggaaatag

SEQ ID NO: 38986 - DNA, 201 bp, Homo sapiens
atattgttagtatattctccagaatttttcaaatgcatgagcatatttattttctgaaagaaaacagcctattttgcatttatcatgccatgaacttattatacatcatcatacctattttctaagatcaacatgttttataatatattcatgattatggtacaaagatagtaaaattaagtataaattgggaatattttt

SEQ ID NO: 38987 - DNA, 201 bp, Homo sapiens
aatattgttagtatattctccagaatttttcaaatgcatgagcatatttattttctgaaagaaaacagcctattttgcatttatcatgccatgaacttattatacatcatcatacctattttctaagatcaacatgttttataatatattcatgattatggtacaaagatagtaaaattaagtataaattgggaatatttt

SEQ ID NO: 38988 - DNA, 201 bp, Homo sapiens
tgaacctgggaggcagaggtttcagtgagccaagattgcgccattgcattccagcctgggcaacaagagcgaaactctgcctcaaaaaaaaaaaaaaaaaaccatatttgaggactgtcacaaatctaaactcatgatacacttgatatctattctgtgacagcataccttgcatcatattatcaatgattccataattgt

SEQ ID NO: 38989 - DNA, 201 bp, Homo sapiens
tctcccactcctggcttcaaatgttggtttcatgtcagcctcccatagtgctcggattataggcaagagccactgcactttgtatttttttttattattgkattttttattgttttttaaaaaatattttcaatccatggttggttgaatccctggatgtgaaattttcagatattaaggtctgactgtaatctgcccttt

SEQ ID NO: 38990 - DNA, 201 bp, Homo sapiens
acacctcctcctgaatactttaaatcatctccaaattatgcctgatacttaatacaatgtaaatgctatgtacatagttgttatactatatgttttaattwatttatttatttattttttctttagagacagtgtctcggtctttcactcaggctggaatgtagtggtgccttcatggctcgctgcagccttgaactgggt

SEQ ID NO: 38991 - DNA, 201 bp, Homo sapiens
attataagtcatgttgagacaggagagtggcagtttagttgacaagagggtctcaatttattttccagtggcattcagggctaggccataccatacaatttgccaattgccacagaatcaggacattgaagacattattctgcacttttcttgcttcttttgtttctgtggaagtcagttgttaggacattttatttttct

SEQ ID NO: 38992 - DNA, 201 bp, Homo sapiens
gcagtgtttgtgtccctgggtacttgagattagggagtggtgatgactcttaaggagcatgctgcctttaagcatctgtttaacaaagcacatcttgcacygcccttaatccatttaaccctgagtttgacacagcacatgtttccgagagcacggggttgggggtaaggtcatagattaacagaatctcaaggcagaaga

SEQ ID NO: 38993 - DNA, 201 bp, Homo sapiens
gttttctaaatttgtatttataactcgtattccttttctctgtctccctctttttttctatgtgtttcttgttcttcatattgaagtgtgtatataaacaytttttttttttttttgagatggagtcttgcttttgtcgcccaggcttgagtgcaatggctgggctcactgcaaacttcgcctcctgcgttcaagccattc

SEQ ID NO: 38994 - DNA, 201 bp, Homo sapiens
ttatatcatgaacatgttttcatttattccttttttttttttctttatttgagacagggactcgccctcttccccaggatggagtgcagtagcacaattayggctcactgcagcctcaaccaccatctgcctgccttagcctcctgaatagctgagaccacaggcatccactaccacacccagctaattttttgttctttg

SEQ ID NO: 38995 - DNA, 201 bp, Homo sapiens
aagaaggaggttgctggccttggatatcataatttctggggacaactttaagtggacactaatatttctgactaggaaaacttcaaaaacttcatggcaartgcagaagagacaaagacgtatagtccatgttatccactattttctgagcacagaagaaaatgatcaagacccaggtgatattttccctttgattttttg

SEQ ID NO: 38996 - DNA, 201 bp, Homo sapiens
ggtctttgcatcatagacaaggtaaaggattaagtgctgtgcttttagatacgcatacacataaacatctcagtgctttacaaagcagtattgctgcccgmatgtcccacctccagccctaaggcggttttcccctatctcagtagatggagcatacaatcgggttttataccgagacattccattgcccagggacgggca

SEQ ID NO: 38997 - DNA, 201 bp, Homo sapiens
agggtcagcagacaaacacgtgaacaaaggtctttgcatcatagacaaggtaaaggattaagtgctgtgcttttagatacgcatacacataaacatctcartgctttacaaagcagtattgctgcccgaatgtcccacctccagccctaaggcggttttcccctatctcagtagatggagcatacaatcgggttttatacc

SEQ ID NO: 38998 - DNA, 201 bp, Homo sapiens
aatttgtcccttttttttcctttatggcttttaacatgaatatatttcgtatttgcttctgcttccacaggttcttttgctttctggtaaggactttaaamaggaaaaacttatttttgagtatgaaattaggtagaaacctacattttttttcaaacagatttatttctcgtgtgaaataattcccgaatgtgatgagat

SEQ ID NO: 38999 - DNA, 201 bp, Homo sapiens
tttcaaccccctttagctgtaattttccactacctacccaaatgctataaaactgccctccccttatcacccttttctgactcctttttcggactcagtcygcctgcacccaggtgattaaaaagctttattgctcacaaaaaaataaataaataaaatagggttttcactaaagagtcacctcacaccaaggcagtttta

SEQ ID NO: 39000 - DNA, 201 bp, Homo sapiens
ttagaaagcagccaaatctatatacattgtgaattatctagccttgtttgtacagttgcttttacttttcggtgtgtttatattattgtgttttatttgtragaaatgaaggatatttatacatggaatttcctttatgtgtaagagataaaaggaatcttacacatctctcccaatgtgtaagagatgagggatatttat

SEQ ID NO: 39001 - DNA, 201 bp, Homo sapiens
ggtgttcctccaagccctgttgtttgcttgtaataatgacttgcttgtattttactgtgtccgcatgttttgcaaggtcctgtttagaaagctgtcaaatygatatagattgtcaactgcctcaccttatttgcacacagactgcttttactttttggtttgtttatattattatgtttttaccaaagtgtatacatgaag

SEQ ID NO: 39002 - DNA, 201 bp, Homo sapiens
caaaccacacttaacatcaccaactcccttctttttttgttccttcgtattgtttttcctaattagaattcagcatgagtgaaaagaaggcatattttgtrtatcccaaatgccagcagagtgccttgtccataggagtcatttgacaaataactagtggagtgaataaatacaaccctcagaattgtgaatcagttgcct

SEQ ID NO: 39003 - DNA, 201 bp, Homo sapiens
agatgctaaaattcagaataaaaattgtccaggtaagtgagaaccagcaaggacagtggctataggagtcttattgtagtcattaaggaaaggtgtcacakatatgaagtatctgagggtacctaagcagctccactatatattcatctccccatctgataacttttttaatgctgttatagctttaaagactttttgtct

SEQ ID NO: 39004 - DNA, 201 bp, Homo sapiens
agtcatctttgattatttttttatactgcattctactgagtgacattctagacccaaattctcaactctgccattgtaatgtgataatagcctgagatgaratgtcatggaatgcatgtagctgtgttcttataagactttatttacaaaacaggtggtccaggtcctggatactatattactgactcttgatttaggtga

SEQ ID NO: 39005 - DNA, 201 bp, Homo sapiens
gcacacttttgccaatattaccttttaagaaagttttaggaatggggttttgggttaccaggtatacctttattggcaattttcaatagaatgttaaattrttcccaagaaaggttctgctcttaatactgactcgatctgtatatgctttaggaggatataggatttttctatttaaattttgtatccagccacctgact

SEQ ID NO: 39006 - DNA, 201 bp, Homo sapiens
ctgtgttttccctatgaaaaatcaagtgaagaaagtaaaaatgacctgtcagatagcacacttttgccaatattaccttttaagaaagttttaggaatggrgttttgggttaccaggtatacctttattggcaattttcaatagaatgttaaattgttcccaagaaaggttctgctcttaatactgactcgatctgtatat

SEQ ID NO: 39007 - DNA, 201 bp, Homo sapiens
agtgattcccacagccattatggccgctcctgtcagaaacgctgcgatgggcgcagccctgtgacctcatagagcggcgcccgcagtctgaactcgcgatyccgggcaggctccgtggtcctcgcctcgcttcacggtctttaccgctcagcttcccggagtccgcgcaggagcgcgtctgaataggaagcgttttcggac

SEQ ID NO: 39008 - DNA, 201 bp, Homo sapiens
aatatgttaaatatattaacaacatatttggacttgcttaactaagattatagagatgatcagtttataaaaccaccttcaacttaaataaatttgaactygaaattgcaaaagcagtctagaggctttgctagtatccttcaaccaatttctagtaaaaatatcctatataaccataattatcaaaaccagaaaaacaac

SEQ ID NO: 39009 - DNA, 201 bp, Homo sapiens
ccaattcaggatgtttgtgtttgtctttcctcatgaacagggtatcaaactagcaaaccagatgtactctccaagttggcacatggacaagaaccatggayaacagatgctaaaattcagaataaaaattgtccaggtaagtgagaaccagcaaggacagtggctataggagtcttattgtagtcattaaggaaaggtgtc

SEQ ID NO: 39010 - DNA, 201 bp, Homo sapiens
tacaggtgtgagccaccgtgcctggccttgatacgacttttctactgcatgcagaatgtgattgaagaaaatgacagttttcatatcccatgcagcagcamattttcttctgaaggcaactacatggtacactggccagttgcaaaattccctatcattgttttcctgtttcataattaatgaaacatatgataacgcaac

SEQ ID NO: 39011 - DNA, 201 bp, Homo sapiens
gattacaggtgtgagccaccgtgcctggccttgatacgacttttctactgcatgcagaatgtgattgaagaaaatgacagttttcatatcccatgcagcarcacattttcttctgaaggcaactacatggtacactggccagttgcaaaattccctatcattgttttcctgtttcataattaatgaaacatatgataacgc

SEQ ID NO: 39012 - DNA, 201 bp, Homo sapiens
aggcagaggttgtggtgagccaagattgtgccattgcactccagcctgggcaacaagagcacaactccatctcaaaaaaaagaatgaaggcatgaaatagraattgtgcaaggccatgggcctgactatcaaaagattggcttcaagttggccaaatacaggtcagtgatagaagctgcttgttggagaaatcgtggagca

SEQ ID NO: 39013 - DNA, 201 bp, Homo sapiens
ttctcccacctcctggaaggggaggggtgctggagattagattagacaatgagattaagagaactccaaatagcccaagagggtggtgcacccccaacttyataggggtagaggctcctgagattaggagaaccctttttaggctttactctatgtacctcttcatttgagtgttcatttgcgtcctttataaccagtaaa

SEQ ID NO: 39014 - DNA, 201 bp, Homo sapiens
gaattcaagatgtgaagtctattcatgacagatccttatattggttgtgaagtcattggtaatgtagggatgttttatttgtcctgatgtcatttgcctaygtttaatatttagaaataggcgctaaaatgtatagatagaggattttgctcctaccaaagtatatttgagaaaggaatatagatgcaggctgtattgtga

SEQ ID NO: 39015 - DNA, 201 bp, Homo sapiens
gaactcatgaaatagaaaaaaaccacgtatgcagtgaatgtgggaaagcgtttgtcaagaagtctcagctcactgatcatgagagagttcatacaggagaraaaccttatggatgtactttgtgtgcaaaagtgttctccagaaagtccaggctaaatgaacatcaaagaattcataaaagagagaaatcttttatatgca

SEQ ID NO: 39016 - DNA, 201 bp, Homo sapiens
tacagattaacagcatctcaaggcagaagaatttctcttagtacagaacaaaatgaagtctcttacgtctacttctttctacatagacacagtaacagtckgatctctctttcttttccccacatctgacaccagatatgtggggtttttcccacacatcaattcaattctccatacctattaggtattctaaaatttact

SEQ ID NO: 39017 - DNA, 201 bp, Homo sapiens
taatttagactgcactaactaacttgcactgcactaacttggactgcactaacttgtggagtctgcactaacttggagaagttagtgtcagaattgaattrtagaacacccagttgttcagaattgaattgtagaacacccaattggtgtgggagaattagagaatttatttgtgtcagaaaatactccagaacaaccacc

SEQ ID NO: 39018 - DNA, 201 bp, Homo sapiens
agtattcagaagagtgtgaaacagtgccatgaacagaatatgtttggaaatattgttaatcagaacaaaggtcatttcctgctgaagcaagattgtgataygtttgacttacatgaaaaacctttaaaatcaaatttaagttttgaaaaccagaaaaggagctctggcctaaagaactctgctgagtttaatagagatggg

SEQ ID NO: 39019 - DNA, 201 bp, Homo sapiens
gagtgtcccttgcaacgaagagagaaaggcactgaggtgactaagagtgattcccacagccattatggccgctcctgtcagaaacgctgcgatgggcgcarccctgtgacctcatagagcggcgcccgcagtctgaactcgcgatcccgggcaggctccgtggtcctcgcctcgcttcacggtctttaccgctcagcttcc

SEQ ID NO: 39020 - DNA, 201 bp, Homo sapiens
agaaatacgaacatgaaattcttattctctagaaattacaaaacgtaagtaaaatgaagaaattttaagtcaccataattgtacggaacagtcaaatattrttagtatattctccagaatttttcaaatgcatgagcatatttattttctgaaagaaaacagcctattttgcatttatcatgccatgaacttattatacat

SEQ ID NO: 39021 - DNA, 201 bp, Homo sapiens
ctgcccacacagagcaggcgtcaaagcagtgagggcatctgaggacacagcaacagcccctccatcactccttcttcccaaggaagagctcttttttgttrtagtatggaaaatatgccccactttcttttctttttttttttttttttttgagatggagtcttgctctgtcaccaggctggagagcagtagcgcaatctt

SEQ ID NO: 39022 - DNA, 201 bp, Homo sapiens
attctggattaatctgaggcttagtgattgatgaatcattaagggaatccagtgtacgtgtgtgtctattccaggttttcctattttatctggcggggtgrtggtcttttgtctagagacaagtgaaagccgaagtcttttcacaagagccctggctggttttgtgtgtgtgtgtgtgtgtgtgtgtgtgtgtgtgtgtgt

SEQ ID NO: 39023 - DNA, 201 bp, Homo sapiens
attagccgggtgtggtggtatgtgcctataatcccagctactcaggaggctgaggtgggagaatcgcctgaaccctggaggcagacattgcaatgagccargttcatgccactgcactccaggctggatgacaaacccccctgcctccaccacacacccaaaacttgtgttttgatagcctactatattccaacgctatca

SEQ ID NO: 39024 - DNA, 201 bp, Homo sapiens
tgtagaaattaaattttttttctcataaaatttgtcccttttttttcctttatggcttttaacatgaatatatttcgtatttgcttctgcttccacaggtkcttttgctttctggtaaggactttaaacaggaaaaacttatttttgagtatgaaattaggtagaaacctacattttttttcaaacagatttatttctcgt

SEQ ID NO: 39025 - DNA, 201 bp, Homo sapiens
aattaggtagaaacctacattttttttcaaacagatttatttctcgtgtgaaataattcccgaatgtgatgagatcagcagcattaagaatttgcagactycagcaagtctgttcttttctctgtgtattaatctctgtgattatatggggatagattatcccatcaatttgtgaaggggtgggttgcccctccacacttg

SEQ ID NO: 39026 - DNA, 201 bp, Homo sapiens
gacttcagcaagtctgttcttttctctgtgtattaatctctgtgattatatggggatagattatcccatcaatttgtgaaggggtgggttgcccctccacrcttgtgggtgtttctcgtaaggtggaacgagagacttggaaaagaaaaagacacagagacaaagtatagagaaagaaataaggggacccggggaaccagc

SEQ ID NO: 39027 - DNA, 201 bp, Homo sapiens
agacgtatagtccatgttatccactattttctgagcacagaagaaaatgatcaagacccaggtgatattttccctttgattttttgatagatttatggtgrcctgaagaagtcagttgaacttaaggaagtatatactgggataattgtgttctagggagaaattaacttacattgcttttgggagtagaggtgggggttc

SEQ ID NO: 39028 - DNA, 201 bp, Homo sapiens
taaaatgtttaggtattatttttaggaacattttatgattatccatttatccatgaattttgtttttcctgcctttaatcttcaatctagactattacttwtattgcagtgtattgctttctgactcccctttccttataatctataacaaaagataaattaattttaaatatttattttatatttggtcatcttaattct

SEQ ID NO: 39029 - DNA, 201 bp, Homo sapiens
actatgcctacaggtgcaaaccaccatgcttggctaatttttttttttttttgtagagatggagtctatgttgcccaggctggtctcccactcctggcttyaaatgttggtttcatgtcagcctcccatagtgctcggattataggcaagagccactgcactttgtatttttttttattattgtattttttattgtttttt

SEQ ID NO: 39030 - DNA, 201 bp, Homo sapiens
ccaatagcactaaatcccaagtcagtaagcatcagagaactcatgaaatagaaaaaaaccacgtatgcagtgaatgtgggaaagcgtttgtcaagaagtckcagctcactgatcatgagagagttcatacaggagaaaaaccttatggatgtactttgtgtgcaaaagtgttctccagaaagtccaggctaaatgaacatc

SEQ ID NO: 39031 - DNA, 201 bp, Homo sapiens
acacatctctcccaatgtgtaagagatgagggatatttatacatggagtttcctttatactaaaatagggttttcaaccccctttagctgtaattttccaytacctacccaaatgctataaaactgccctccccttatcacccttttctgactcctttttcggactcagtccgcctgcacccaggtgattaaaaagcttta

SEQ ID NO: 39032 - DNA, 201 bp, Homo sapiens
attaaaatcatcaaagataaaaagtatagaaagaagaatccaggagaaactgggtgcaagctttcagttctcctgttctagtggagttgcacaaagtgctraattttccctgcaacagtgtttgtcaacacatgtgaagttattgccaactagggaagctcatctaagcccagtgtctgtagccacccagagtcaaaacaa

SEQ ID NO: 39033 - DNA, 201 bp, Homo sapiens
aaaaatctggaaacattgcaaagtaggatgatcgcattctaataatttcatattcttaagtgccccactgtcatcttcctttacttctggaaggaaacatrtagatattaacacagttgcaccttcacctcctcatccccttccccactggcagtggttttaatagcaagccccatgtgggtattagcatttaatggagca

SEQ ID NO: 39034 - DNA, 201 bp, Homo sapiens
tggctaccctgggaagagacaagaagtaaatgaagaaagaggaagattccaggacctagatatgatttctgtggacacccttcactggtgactgaagtttstaaatagaaatttaaggcagatccagaggagacaaagacagagtatcccaggtgctggccatttcccacaacagaagaaaatgatcaatgcccaggtgac

SEQ ID NO: 39035 - DNA, 201 bp, Homo sapiens
ttttattatatgattagctcctgcatttctttggttctaagtttgtgttatttcagaataactaaagtacttcagaatgaaactggatacagtatattcarttcataagtgtaattgaccatacttgaatatgtttaagtttataagtaacatcaggtgttatgaaattaatataaataagatgtttttgtaagtttttat

SEQ ID NO: 39036 - DNA, 201 bp, Homo sapiens
gggaagataaaccccctcagaagtgatcatagatcatgaataaactactaattcgtggaaatgtaataattataggaacgtctttgcccaaaaataaaacytcaacagattgagagagttcacactggagaaatactttcctctggcaaacccctgtggcagggttttcagtaaaatgttttgcctcatcgtgtgctagga

SEQ ID NO: 39037 - DNA, 201 bp, Homo sapiens
atcatttctggggacatccttgattggagattgaagtttttgaaccgaaatttagagctgattcagaagagacaaatacagaacgtccaagttagcagtcrtttcccaaatttaggagacaatgatgcaggcccaggtgacttttggtttgttttattctttcctttattctccaatgtatttttaaagtcctgtaaaaat

SEQ ID NO: 39038 - DNA, 201 bp, Homo sapiens
gcttctgctggaatggatgaggcctttatttacacagtcaacaagaggctagtctgggctttcttacaatgtgttggaagatctctaagagacaagcaagscttgatgagcaagcttatttctcacctccatttgtgttacacttgctactgtcctattggacacattagtcagtcactatggagaatactatccaaagat

SEQ ID NO: 39039 - DNA, 201 bp, Homo sapiens
ccaaaaagcgcactaagtgattagagagttgtggctttgagccatgtaataccagtcaggaaggggagggaactggagactgaactcagctacatgggcartgcttcaataaactgtgcctacatcatgaagtctcaataaaatctctggacatcaaagtttaggtgcgcctcgctggctggcaagtactcttgaatattg

SEQ ID NO: 39040 - DNA, 201 bp, Homo sapiens
cgtctcctcctgaggaaaagccggaaggccgcattccgctctccatggaaacgcggctgaccgtctctggaggtttagagggggagggagttgggcgaggrgcccagaagtggaagaagtttagggaagtaagttcagcttttaagaggtcgcggcgattccaaggagagtcaggtcagtgtgtgggtcagggcgtggaaa

SEQ ID NO: 39041 - DNA, 201 bp, Homo sapiens
gtctctggaggtttagagggggagggagttgggcgaggggcccagaagtggaagaagtttagggaagtaagttcagcttttaagaggtcgcggcgattccmaggagagtcaggtcagtgtgtgggtcagggcgtggaaacgtggtgggagggagctttctgagggcgtctgcgttgttggtggcgctatatggtggaggta

SEQ ID NO: 39042 - DNA, 201 bp, Homo sapiens
gacagtgaaataatacaaattaaaatcatcaaagataaaaagtatagaaagaagaatccaggagaaactgggtgcaagctttcagttctcctgttctagtrgagttgcacaaagtgctgaattttccctgcaacagtgtttgtcaacacatgtgaagttattgccaactagggaagctcatctaagcccagtgtctgtagc

SEQ ID NO: 39043 - DNA, 201 bp, Homo sapiens
acctggagggtgcccagtctgtggcctttgctttctcagttgcttacccttggaagttactgcagtgctctgaatattagatttttggcacatcctctggyttctgataaaaggatataccgtcacccctcagtgtccaagagggattggtttcacaactttccatggatatgaaatccacagatgctcaagtctcatata

SEQ ID NO: 39044 - DNA, 201 bp, Homo sapiens
agtctcactctgtctctcaggctggggtgcagtggcatgatcttggctcactgcaacctctgcctcctgggttcaagcgattctcgtgcctcagccttccragtaaatgggactacaggcctgagacaccatgcccagctaattttttttgtattttagtagctatggggtttcgccatgttggccaggctgatctcaaac

SEQ ID NO: 39045 - DNA, 201 bp, Homo sapiens
cttgattttattccaaatgagttgagaacacagtagggagttttgagtagagaagtgacatgatataactaatttatttgatagattactttgcctgctaygtagaaggtagacgttaatggggaggagagggaactgctacactcatgattacagtttgtgacagtgaaataatacaaattaaaatcatcaaagataaaa

SEQ ID NO: 39046 - DNA, 201 bp, Homo sapiens; identical to SEQ ID NO: 12072

SEQ ID NO: 39047 - DNA, 201 bp, Homo sapiens
aagcagctggtggaacagtaagtgttaggagttggcactgtgcttgtagggtgggaacagctctttgttaaggtgcctttgagcagatagatgatgaacaygtgtaggctccctggatgaagagtgttccaggtgtgagacaatgagaagttgaaaaatgaccctggagtgtgtttgaggaacttctaggaagcttgaatg

SEQ ID NO: 39048 - DNA, 201 bp, Homo sapiens
gatagcctactatattccaacgctatcagcagtacaaataagaaagaaaaaacataccatgtccttattcttcacaatgcttttgttctcttagaagtaaycatataaccagtaataagcagatatataaataacatatcttggagtaaaaattgctataaggaaagttaaagcagctggtggaacagtaagtgttaggag

SEQ ID NO: 39049 - DNA, 201 bp, Homo sapiens; identical to SEQ ID NO: 9420

SEQ ID NO: 39050 - DNA, 201 bp, Homo sapiens; identical to SEQ ID NO: 9438

SEQ ID NO: 39051 - DNA, 201 bp, Homo sapiens; identical to SEQ ID NO: 9442

SEQ ID NO: 39052 - DNA, 201 bp, Homo sapiens; identical to SEQ ID NO: 9273

SEQ ID NO: 39053 - DNA, 201 bp, Homo sapiens; identical to SEQ ID NO: 9418

SEQ ID NO: 39054 - DNA, 201 bp, Homo sapiens
aaatattgagaaggaagccaagcatgatagtgtgaacctatagtctggctgctcgagaggctgaggcaggaggatcacttgagcccaggagtttgaggttkcagtgagctatgattataccacttgcgctccagccagggcaaaagtgagaccttgtctcttaaaaaaaaaaaaaagttgcttcctcctgtggtgcagggg

SEQ ID NO: 39055 - DNA, 201 bp, Homo sapiens
tgagaggatggtggtcaagttctttgggggaagggagtcttggatccatgggttttaatttactcttttgtttctttgtctttcagggtgctgccccacgwcccccaccaaagcccatgtaaggagctgagttcttaaagactgaagacaggctattctctggagaaaaataaaatggaaattgtacttaatattgcatgt

SEQ ID NO: 39056 - DNA, 201 bp, Homo sapiens
gttactggtagaagagaattctcttgtttgccgttttgattcttttctgggcagagggtgactttgtgatagagtgcacagcctttactctgaggtaaagstttgcctgtttcggttatgagattgcaaaaactagaaacttggtaaatttgacaattcttgtgctattgattatttgaatatttgtgaaaatatacaggt

SEQ ID NO: 39057 - DNA, 201 bp, Homo sapiens
cgagcgtcttcgatggtaagtgggtcaccggcgcgaactgtgtgaggatcccagtatcttaaagccttcgcccaacttcgcccttttggaggctctgttckttggagcctctcaggcaatttccacgtatttaaggttgttactggtagaagagaattctcttgtttgccgttttgattcttttctgggcagagggtgact

SEQ ID NO: 39058 - DNA, 201 bp, Homo sapiens
acagcaaagtagtcaggaatcgatctcgtgaagcccgcaaggaccgaacacccccaccccgatttagacctgcggtgagtattttaaaaggagaatggaakccaggggagtgatggttaaaatttcatcctggagggtcagggtgtcctatacctgtaacctcaacactttgggaggctgggacaagaagattgctagaaa

SEQ ID NO: 39059 - DNA, 201 bp, Homo sapiens
agtgagttgccgttcttgaagcccgtctcctaaggattctcccggtgtccgcgtagggatctcatgctatataggagggccctgccaggcaccgtctcctstctccggtccgtgcctccaagatggtgagtcttcttgcgtggtgagggtgggggttcgggtgcagactctgggattgtggggaagtgagagcctggagca

SEQ ID NO: 39060 - DNA, 201 bp, Homo sapiens
cagcaaagtagtcaggaatcgatctcgtgaagcccgcaaggaccgaacacccccaccccgatttagacctgcggtgagtattttaaaaggagaatggaagycaggggagtgatggttaaaatttcatcctggagggtcagggtgtcctatacctgtaacctcaacactttgggaggctgggacaagaagattgctagaaac

SEQ ID NO: 39061 - DNA, 201 bp, Homo sapiens
gaagtgagagcctggagcacggctgaggggtggaccgagtgtacatttcatttgctctgggggtcggcgggatttgcggagaaacaggagatccgagcggsgccttcctggaggctgccggtgcggcttgtggccggaaagggactgaggctgggtgagttgcgccgttttcctaacagttttcccatcctgtcgcagaca

SEQ ID NO: 39062 - DNA, 201 bp, Homo sapiens
caatctgtgttcatgtgttctcaatattcaactcccacttacaagtgagaacacacagtgtttggttttcttttcctgtgttagtttgctgaggatgatgkctttcagcttcatccatgtccctgcaaaggacacaatctcattcctttttatggctgcatagtattccatgatgtgtatgtaccacattttctttatcca

SEQ ID NO: 39063 - DNA, 201 bp, Homo sapiens
ccacttacaagtgagaacacacagtgtttggttttcttttcctgtgttagtttgctgaggatgatggctttcagcttcatccatgtccctgcaaaggacayaatctcattcctttttatggctgcatagtattccatgatgtgtatgtaccacattttctttatccagtctatcactgacaggcatttgggttggttccat

SEQ ID NO: 39064 - DNA, 201 bp, Homo sapiens
agcatctattgtttcctgactttttaataattgccattctgactggcgtgagatggtatgtcattgtggttttgatttgcatttctcagatgattagtgaygttaagctttttttcatatgtttgttggctatgtaaatgtcttcttttaagaagtgtctgttcatatccttcacccactttttgatggggtggtttgttt

SEQ ID NO: 39065 - DNA, 201 bp, Homo sapiens
aataccaggttaaataggagtggtgagagagggcatccttgtcttgtgccagttttcaaagggaatgcttccagcttttgcccattcagtatgatattggytgtgggtttgccataaatagctcttattattttgagatatgttccatcaatacctgtttattgagagtttttagcatgaagtggtgttgaattttatcaa

SEQ ID NO: 39066 - DNA, 201 bp, Homo sapiens
gagtgttttacttccaattatgtggtcaattttcgaataagtgcgacgtggtgctgagaagaatgtatattctgttgatttggggtggagagttctgtagrtgtctattaggtccgcttggtccaaagctgagttcaactcctgaatatccttgttaattttctgtcttgttgatctgtctaatgttgacagtggggtgtt

SEQ ID NO: 39067 - DNA, 201 bp, Homo sapiens
gaaaatgcaccctaagcatcaacctttaccagagagtccaggctatacttatcagcacatctcgagagacttaagtgcaacagtgccaagccctccacctrtgactgtatctatgaaaccagaaggacagtggcctgaacattttaaatcaactgctacattgacactaagagttactgaatttccaggttttgtttcctt

SEQ ID NO: 39068 - DNA, 201 bp, Homo sapiens
agagagtgttgaagaaaaaaaaaaacaaaaaacctctcaactgagactactatacccattaaagtgtctcttcaaacacaaaggagagataaagactttcyccaaataacaaaagatgaaggaattcataaacaccaaacctgtccaaaaaaatgctacagggagtccttccatctggaagaaatggaccctaaggtgtaa

SEQ ID NO: 39069 - DNA, 201 bp, Homo sapiens
aaaaacagaccttacctgttcccttcattagttacccactgggatagtgattgtaatcaatcaatcatataagtaaatgcaaaattaccctgtgataagtrctatgaagtaaagatgagccacttttataactataactttatctaatgcttaatcctctatttctgtgtatggtttctattccctccttattataagcaa

SEQ ID NO: 39070 - DNA, 201 bp, Homo sapiens
atttccaggttttgtttccttgccaacaccagttttaccaagaaaacctcacaggcagtctgtgataggtaaatacaatctgaacacggtataattatagrgtcaagtagagcaaaggggagagaaggcatgcaagctaatggtacccctcccgctttgggtttgcagaatgggaggatggaatcaccttttatatataca

SEQ ID NO: 39071 - DNA, 201 bp, Homo sapiens
aagggaagctctgcctttaccttggctcatgcctgagggtgtttgtggtgtgggagaatggattacaagtagaatgtggtggttttagtggattgaggagmtagtagtcagacttcagagcagccaatatacttgggacttgagggagaaaatcttggcgaggagagaattgaaggaaggtgaatcaaaaaatctgcatac

SEQ ID NO: 39072 - DNA, 201 bp, Homo sapiens
gcaagagagagagtggtgtgcggtacaggtgccacaaactttaaaacagccagatcttataagaactcactatcatgagggcagcacaaagccatgagggwtctactcccatgaaccagacacctcccaccaggccccatgtccaacactgggagttacatttcaatatgagatttagaggggacaacatccaaactatat

SEQ ID NO: 39073 - DNA, 201 bp, Homo sapiens
tgtccaacactgggagttacatttcaatatgagatttagaggggacaacatccaaactatatcactccacctctggcccctcaaatatcatgttcttctcrcattgcaaaatacaatcatcccctgccaatagttccccaaaagtctcaactgatttcagcatcattcaaaagtgcaaagtctcacgtgagacaaggcatg

SEQ ID NO: 39074 - DNA, 201 bp, Homo sapiens
cagtgagctgagattgtgccactgcactccagcctgggcaacagagcaagaccttgtctcaaaaacaaaaacaaaacaacaacaacaaaaaacaaaaaaamcccacagaaatccaaatccactgttagtctgatggggtttctttattggtgaccagatgcttttctcttgctttttaaagggtatgctttttatctttga

SEQ ID NO: 39075 - DNA, 201 bp, Homo sapiens
tataagtaaatgcaaaattaccctgtgataagtgctatgaagtaaagatgagccacttttataactataactttatctaatgcttaatcctctatttctgtgtatggtttctattccctccttattataagcaatacaattagcatattttctcattttccccttctcagtttcctcttccatctgattttagttgattgc

SEQ ID NO: 39076 - DNA, 201 bp, Homo sapiens
tgcccctcccggcgcccgcctcgcctcgcctgtcccgcgcccgcctcgcctgtcccgcccccgcgcctgcgcgtcaagtggctgggctggcttagcggacyccggttgctagggtgtgtctccttggcctcctagagggtggggatccgtggtgcttcttcgggaacagcctcctgcaggaagaccctcgctggaccttta

SEQ ID NO: 39077 - DNA, 201 bp, Homo sapiens
tggtgacatgtacatgtagttctagctactcaggaggctgaggaagatcataagagcccaggaatttgaggttttagtgagctatgattgtgccactggaytccaggcagggtgacagagcgagaccttgtctctaaaaaaagggggaatagagaatagaagaacagaaacagatcagacaaacagaaaacaagtaccaaa

SEQ ID NO: 39078 - DNA, 201 bp, Homo sapiens
gtatatttaggatggttagctcttcttgttgcattggtccctttacccattatgtaatgccctcctttgtctcttttgacctttgttggtttaaagtctgytttatcagagactgggattgcaacccctgctttttttttttgctttccatttgcttggtaaatattcctccatccctttattttgagcctatgtgtgtct

SEQ ID NO: 39079 - DNA, 201 bp, Homo sapiens
attcctccatccctttattttgagcctatgtgtgtctttgcacgtgagatgggtctcctgaatacagcacattgatgggttttaactctttatccagtttsccagtctgtctgttttaataggggcatttagcctatttccatttaaggttaatatcgttatatgtgaatttgatcctgttattatgatgctagctggtta

SEQ ID NO: 39080 - DNA, 201 bp, Homo sapiens
aaagggagaaaaagggaggtggggtgaaggacagagacatgttttagactcatgccctgaggttatgcagaaacaactgtcacaaaggttaaaacaaaaartctttatctttttctcagtggatagcaggagaaaaatgacacaggaaatagctacttcaactgagggagtcaaatctttgccttacttgtttgactcaat

SEQ ID NO: 39081 - DNA, 201 bp, Homo sapiens
gcacgtgagatgggtctcctgaatacagcacattgatgggttttaactctttatccagtttgccagtctgtctgttttaataggggcatttagcctatttmcatttaaggttaatatcgttatatgtgaatttgatcctgttattatgatgctagctggttattttgccctttagttgatgcagtttcttcatagtgttga

SEQ ID NO: 39082 - DNA, 201 bp, Homo sapiens
ccttacttgtttgactcaatttactttaattggcaggtaggttcttcgggaaagagaaactatttggaacaaaaagaaccgaacagcctatttgaaagccstgtcttaacagcagatctgaaattgtacacatttattttcccatattgttatttattaaagaaggggattaaattaccttgcctccacatatctgatgaa

SEQ ID NO: 39083 - DNA, 201 bp, Homo sapiens
aatcatgtcttcatgctttatttcattaagttgatcttcagtctctgatatcctttcttctgctgatcgatttggcttttgatacttgtgtatgcttcacraagttcttgtgctgtgattttcagctccatcagttcatttagcttctctaaactggttattctagttagcaattcatctaacctttttttcaaagttctt

SEQ ID NO: 39084 - DNA, 201 bp, Homo sapiens
tattattatccaccttctgaagcctacttctgtcaatttgtcaaactcattctccatccagttttgtttccttgctggcatggagttgtgatcctttggasgagaagaggcattctggtttttggaattttcagcctttttgtgctagtttttcctcatcttcgtggatttatctacctttggtctttgatgttggtcacc

SEQ ID NO: 39085 - DNA, 201 bp, Homo sapiens
atgctattcctttctgtttgttattttttccttccatcagtctggcccctctgctgcaggtctgctggagtttgctgaagggccactccagaccctgtttkcctgggtatcaccagcggagcctgcagaacagcaaagattgttgcctgcttcttccactggaagcttcatcccagaggggcacccaccagatgccagctg

SEQ ID NO: 39086 - DNA, 201 bp, Homo sapiens
tgcagacttctgacctatataactataattaataaatctgagttgttgtacgccactgtttgtgttgcaatttgttaatggcagtaacagcaaactaaaayaaaaccagtcaaagatttcaactcttgtgggatcacattcccccaggaggagacagtcaatatatgtaataaataaattatatagtatgtgagaaggtaa

SEQ ID NO: 39087 - DNA, 201 bp, Homo sapiens
tatacaccatagaatactatacagccttaaaaaaggatgagttcgtgtcctttgtagggacatggatgaaattggaaatcatcattctcagtaaactatcrcaaggacaaaaaaccaaacacggcatgttctcactcataggtggtaattgaacaatgagaacacatggacacaggaaggggaacatcacactctggggac

SEQ ID NO: 39088 - DNA, 201 bp, Homo sapiens
cagccttaaaaaaggatgagttcgtgtcctttgtagggacatggatgaaattggaaatcatcattctcagtaaactatcacaaggacaaaaaaccaaacayggcatgttctcactcataggtggtaattgaacaatgagaacacatggacacaggaaggggaacatcacactctggggactgttgtggggtggggggaggg

SEQ ID NO: 39089 - DNA, 201 bp, Homo sapiens
agccttaaaaaaggatgagttcgtgtcctttgtagggacatggatgaaattggaaatcatcattctcagtaaactatcacaaggacaaaaaaccaaacacsgcatgttctcactcataggtggtaattgaacaatgagaacacatggacacaggaaggggaacatcacactctggggactgttgtggggtggggggagggg

SEQ ID NO: 39090 - DNA, 201 bp, Homo sapiens
taaactatcacaaggacaaaaaaccaaacacggcatgttctcactcataggtggtaattgaacaatgagaacacatggacacaggaaggggaacatcacaytctggggactgttgtggggtggggggaggggggaaggatagcattaggagatatacctaatgctaaatgacgagttaatgggtgcagcacaccagcatgg

SEQ ID NO: 39091 - DNA, 201 bp, Homo sapiens
tcatgacagactaaaaaaaaatgaatggacgaggagtataggcttgttagtatattgtgtaaaacattctcattcaaattatgtgctgattttgttttacycttgtataaactattttgtgccttgttagtgattaacaccttatctcttgtcactttcttttagggcttttttatcctaaattgtccagacttaacacct

SEQ ID NO: 39092 - DNA, 201 bp, Homo sapiens
tttttattttcaattggagaagttatttcttttctaatacataacaccagttttattaatttgactaggagaaattgacaagaattcccaaggaatatagygatctgagttcttcacactaatttaacctttcttctaagtagatacagataatatttgtgtatctgccaaagaaaactccatccactaaaaaataaatgt

SEQ ID NO: 39093 - DNA, 201 bp, Homo sapiens
cctttcttctaagtagatacagataatatttgtgtatctgccaaagaaaactccatccactaaaaaataaatgtgtgaagacaggagagctagtcacttgkaagatataaagtgctcattgttaaagtgacagagatcaacttgtcattaaaatgcaggtctgtgttatatagctatagataaaatattccaatgaagatg

SEQ ID NO: 39094 - DNA, 201 bp, Homo sapiens
ttagcatggcataaaggcaatgaataaaaggctggggactgaggtaagtggggtgattcaaattattaccgatttcatggaaaattcaaaatggttgaatyaggcaaattgcagtgtccactaaaatagtttcagatgggagaaggtagaagcagaaatgttaaataaagaagattaatatagcaaactctatatacatat

SEQ ID NO: 39095 - DNA, 201 bp, Homo sapiens
taacaattgattgtttcaatatagggcaaattagaagttaataaagaaaaaagttctatttgagtaaagcacacatttcctgaggcctacatttttgttcstaaggttttgctttgagcaacttagggcatactgtgtgaggcagcatggaggcaggaaagctcagcttctgtgggagaaagaacaggggcctcctattag

SEQ ID NO: 39096 - DNA, 201 bp, Homo sapiens
gatgttcatgaagcatctattaatactgtgtgctcctaggagctcaccacctaaaaggaaggcagacaattcaatacaattgagtaaagtaaaataatggwgatgtacacagtaaaatgtatgagttacatgtaacccattctgaagggtgagagttggttccctggaagatgtagtatttgatccaaaggtgactgagtg

SEQ ID NO: 39097 - DNA, 201 bp, Homo sapiens
gaatgctgatatttggacataaaagagatgggtttcttcccacgtatggactagtaattatttaactcctaatgaaaattttaaaccaaaaccttaaccamatgtcaaaacaagatacttattccaatcagagtttaacaaattgaatctctcagtacaaagagaaagggactcataaatagttgaataatactttgcaaa

SEQ ID NO: 39098 - DNA, 201 bp, Homo sapiens
cagttcaggtgagagccttgcacctatctcttgacagcctttttggatatggaaagagcactgaatttgggatgaggaaatctagtcctttgactttaaarttgatgataattatatatttgatctggagaaagtaatttaaccattcttggcctcaatttcctaatctgtaaactaaggagattggcttatatgatatct

SEQ ID NO: 39099 - DNA, 201 bp, Homo sapiens
ttaaatatttattcttctaactctgaatgtaatctaaaataaaccttatttatgtgccaatcagaagctttaaaaacaaagtaaacatgcagtgttgtaayaagttttaattaccaaacgataaaatataatattctgcttaataaaatgtatgaaggataatcagatatgagatgagctaatttaatgtcatttcaagtg

SEQ ID NO: 39100 - DNA, 201 bp, Homo sapiens
caagatagaacatttgttgggccataaaacctgtctcaagaaattttaaaagattgaaatattgtagttctcgtaccacaacagaaataaaatagtcacartaagatatctagaaaagtaccaaatatttgtgctaaatattaatttaaatattaaaaagcactaagtgtttggaaatcaaacaacacactaattaaaaaa

SEQ ID NO: 39101 - DNA, 201 bp, Homo sapiens
cataaaccaaaatttgacagaactaaagtgagaagtagaacaattcaccatcataactagagattagacttaatatatcttgatcaagaattgatatgtgyagtcaaaaacaattcaataaagatatagaagatctgaaataactccagcgactaacttgacctaattaacatttatagaatgatacatccaacaactgca

SEQ ID NO: 39102 - DNA, 201 bp, Homo sapiens
taatactaaagataaagaatattaccaagtatagagaaaagtttgaaaatgtttaaagggtcaattcatcaagaacacagaacaatctaaatgtgtatagwtataattagaatgcctcaaaattcataaaccaaaatttgacagaactaaagtgagaagtagaacaattcaccatcataactagagattagacttaatata

SEQ ID NO: 39103 - DNA, 201 bp, Homo sapiens
aaaccaagaggacgggctggtctcaaactcctgacctcaggtgatccgcctacctcggcctcccaaagtgctgggataacaggcatgagccactgcacccrgcccttggttataagctttaaagaatttgtttgctattttgcacatttctgccttaagactgtgtttctagcaactatttaaacttataaactcttcatt

SEQ ID NO: 39104 - DNA, 201 bp, Homo sapiens
tcacctcattctcttttagcctgtgaaatttctgctaagaaatccactgttaaggccaggcacagtggctcacgcctgtaatcccagtactttgggaggcygaggtgggtggatcacaaggtcaggagttcgagaccacctgggccaacatggtgaaaccccgtctctactaaaaaaatacaaaaattagctgggcatggt

SEQ ID NO: 39105 - DNA, 201 bp, Homo sapiens
ttgaacatgggaggtggaggttgcagtgagctgagattgtgccactgcactccagcctgggcaacagagcaagaccttgtctcaaaaacaaaaacaaaacaacaacaacaaaaaacaaaaaaaacccacagaaatccaaatccactgttagtctgatggggtttctttattggtgaccagatgcttttctcttgcttttta

SEQ ID NO: 39106 - DNA, 201 bp, Homo sapiens
ctgctaattcttacacaagccaagggaaggaggggcctgatcagttcttcaaccctatttttttactctctttttctattcttttcatttttcctttttcttttttttttgacagggtctcactccgtcacccaagttgaagtgcagtggtacaatcatggctcactgcagcctcaatctcctgggctcatggtaccctcc

SEQ ID NO: 39107 - DNA, 201 bp, Homo sapiens
tttcaccgtgttagctaggatggtcttgatctcctgacctcgtgatccgccggcctcggcctcccaaagtgctgggattacaggcgtgagccactgcgccyggcctgccacacacttttaaacaacatcggaattccactcactaccacaaggacagcaccaagccataggagatctgcccccatgacccaaacacctccc

SEQ ID NO: 39108 - DNA, 201 bp, Homo sapiens
ggggctcctccctaactgattcagtgatggcagcatcatcctgataccaaaacctggcagagacacaacagcagcaacaacaacaacaacaaaactttagrccaatattcttgatgaacactgatgcaaaaatcttcaacaaaatactggcaaactgaatccagcagcacatcaaaaagtttatctaccatgatcaagtag

SEQ ID NO: 39109 - DNA, 201 bp, Homo sapiens
caagtcaaggataccctctatctctctctctttttctttttttttttttttttttgacggagtctcgctctgttgcccaggctggagtgcagtggcacgaycttggctcactgcaagctctgtctcccaggttcacgtcattctcctgcctcagcctcctgagtagctgggactacaggcgcctgccaccacgcttggcta

SEQ ID NO: 39110 - DNA, 201 bp, Homo sapiens
ttggctcactgcaagctctgtctcccaggttcacgtcattctcctgcctcagcctcctgagtagctgggactacaggcgcctgccaccacgcttggctaatttttttgtatttttagtagagacagggtttcactgtgttagccaggatggtctctatctcctaacctcatgatccgcccacctcggcctcccaaagtgct

SEQ ID NO: 39111 - DNA, 201 bp, Homo sapiens
aaactatgcatctgacaaaggcctaatatccggcatttataaggaacttaaacaaatttacaaaagaaaaacaaacaaccccattaaaaagtgggcaaagrccatgaaaagacactccaaaagaagacatacatgtgatcaacaagcatgaaaaaagctcaatgtcactgatcattagagaaatgcaaatcaaaatcacaa

SEQ ID NO: 39112 - DNA, 201 bp, Homo sapiens
tttgtaagcctcatggtaacctcaaagcataaacctgtaatagcacagaatcaaaacacattactagagaaaattacttaaacacaaaggtagtaagggargtaaaaaggaagaaagtattcacacaataagcagaaaatgaataacaaaatgacaataggaaacccttacctatcaataaaaaccttgaatataagtaaa

SEQ ID NO: 39113 - DNA, 201 bp, Homo sapiens
tatggaaggatgtaagttgaaacatcaagaagtcaaaatatgtagaaggtgctattaaagtgtggagtttgtttttgatgcttttccttgtgagcaaagtyaagttgtcatcagtttaaaattgcctattataacatgttttttgtaagcctcatggtaacctcaaagcataaacctgtaatagcacagaatcaaaacaca

SEQ ID NO: 39114 - DNA, 201 bp, Homo sapiens
cttccatctggaagaaatggaccctaaggtgtaacaagaaaacatttcaaaatataaaactcactgcttcaagtaagaaaattgaaaactagacaaattcrgaatatattaatactgtaattgtggtaagtaaaccacttacatcttaaatatgaagactaaaagacaaaactattaaaaacaacaattgcaacagctggt

SEQ ID NO: 39115 - DNA, 201 bp, Homo sapiens
aaaataatggagatgtacacagtaaaatgtatgagttacatgtaacccattctgaagggtgagagttggttccctggaagatgtagtatttgatccaaagktgactgagtgtgaattaggtggattaaacaggagagacaacaaaggatagttgggccaatgatagggtggatatttcttcaatgaaaagttacaacgtat

SEQ ID NO: 39116 - DNA, 201 bp, Homo sapiens
actcaagtacaggaaattcaaaggtcaccaattagattaaatgcaggaggaatttcccaaggtacatcataatcaaattagcaaaaatcaaagagaaagamtatttgaagcacaaagaataaagaaacatgtgacgttcaacagagccccagtacagctttcagcagattattcagcagaaaccctgcaggctaggagaga

SEQ ID NO: 39117 - DNA, 201 bp, Homo sapiens
aaatgaagataataaatcacttcaaaaatccaaatgtttttttttcctgttcccaaagcttttgtagaaaagataaaaaagggagaaaaagggaggtgggrtgaaggacagagacatgttttagactcatgccctgaggttatgcagaaacaactgtcacaaaggttaaaacaaaaagtctttatctttttctcagtggat

SEQ ID NO: 39118 - DNA, 201 bp, Homo sapiens
ggacaaaaatggatctggacctttacagaactctacccctaaaacaacagcattcttcccatttccacatgacacatactctaaaatcaaccatgtaatcraacacaaaacaagtctcagcaaatgcaaagtaattgtattagtacattgtcatactgctatgaagaaatacctgagactgggtaatttataaaaaaaaaa

SEQ ID NO: 39119 - DNA, 201 bp, Homo sapiens
agaaaacaataatgataagagcagagataaatgaaatagagaatagaaaaacagtagagaaaattaatggaaacaaagataggttatttgtaaagatcaayaaaataaacaaatcattagctagactaagtaaaagagagagaatgtacaaataactaacattagtcatgaaaattgaaatattacaactggccttacaaa

SEQ ID NO: 39120 - DNA, 201 bp, Homo sapiens
cacaaagaataaagaaacatgtgacgttcaacagagccccagtacagctttcagcagattattcagcagaaaccctgcaggctaggagagagtgttgaagaaaaaaaaaaacaaaaaacctctcaactgagactactatacccattaaagtgtctcttcaaacacaaaggagagataaagactttccccaaataacaaaag

SEQ ID NO: 39121 - DNA, 201 bp, Homo sapiens
aagaaacatgtgacgttcaacagagccccagtacagctttcagcagattattcagcagaaaccctgcaggctaggagagagtgttgaagaaaaaaaaaaamaaaaaacctctcaactgagactactatacccattaaagtgtctcttcaaacacaaaggagagataaagactttccccaaataacaaaagatgaaggaatt

SEQ ID NO: 39122 - DNA, 201 bp, Homo sapiens
aatcaaatcacatgagctcttaaaaatggaagggggatgcagaagcatttgtcagagagataccacctgaggacttgacttgcttttgttggttttgaagwtggaggaagggagccatgagtcaaggaatgaggcagcttgaaaacctgggaatggccttcagcatacagccaacaagaaaacaagggcctcagttctaca

SEQ ID NO: 39123 - DNA, 201 bp, Homo sapiens
ttttttgtaagcctcatggtaacctcaaagcataaacctgtaatagcacagaatcaaaacacattactagagaaaattacttaaacacaaaggtagtaagrgaggtaaaaaggaagaaagtattcacacaataagcagaaaatgaataacaaaatgacaataggaaacccttacctatcaataaaaaccttgaatataagt

SEQ ID NO: 39124 - DNA, 201 bp, Homo sapiens
aatatatgtaataaataaattatatagtatgtgagaaggtaataagtgatatgaaaaagaacaaacagtaaaagggagtgagagtgtgattttaagtgggrtagctaaggtaggccttattgagaaagggacactggaacaaagtgggggtttgtgatgtaaatttagcagttcaagtctaatttaacagtattttattaa

SEQ ID NO: 39125 - DNA, 201 bp, Homo sapiens
ctctgcctcctaggttcgagcaattctcctgcttcagcctcccaagtagctgggattacaggcatgcgccaccatgcctggctaattttttgtatttttaktagagacggggtttcaccatattggccaggctggtcttgaactcctgaccttgtgatctgcccacctcggcctcccaaagtgctgggattacaggcgtga

SEQ ID NO: 39126 - DNA, 201 bp, Homo sapiens
taggtaagaaaatcttgtaaattggctgggcatggtggctcacgcctgtaatcccagcactttgggaggccggggtgggcgaatcacgaggtcaggagatygagaccatcctggccaacatggtgaaaccccatctctactaaaaatacaaaaattagctgggcatggtggcgtgtgcctgtaatcccagctactcaggag

SEQ ID NO: 39127 - DNA, 201 bp, Homo sapiens
tggctgggcatggtggctcacgcctgtaatcccagcactttgggaggccggggtgggcgaatcacgaggtcaggagattgagaccatcctggccaacatgrtgaaaccccatctctactaaaaatacaaaaattagctgggcatggtggcgtgtgcctgtaatcccagctactcaggaggctgaggcaggagaatcgcttg

SEQ ID NO: 39128 - DNA, 201 bp, Homo sapiens
ctcgcattgcaaaatacaatcatcccctgccaatagttccccaaaagtctcaactgatttcagcatcattcaaaagtgcaaagtctcacgtgagacaaggmatgtccctttgtattagtttgggttctctagagggacagaactaataggatatatgtatatatgaaagggagtttattaaggagaattgactcaccatca

SEQ ID NO: 39129 - DNA, 201 bp, Homo sapiens
gcttgaacatcacatgatgagagcgggagcaagagagagagtggtgtgcggtacaggtgccacaaactttaaaacagccagatcttataagaactcactaycatgagggcagcacaaagccatgagggatctactcccatgaaccagacacctcccaccaggccccatgtccaacactgggagttacatttcaatatgaga

SEQ ID NO: 39130 - DNA, 201 bp, Homo sapiens
tgaggcaggagaatcgcttgaaccaggggagttgcaggttgcagtgagccaagatcacaccactgcactccagcctggtgacagagcaagactctgtctcaaaaaaaaaaaaaaaaaaaatcttgtaaattatttttaaaatcctttcaattattttcacagattagtctcttttccttgacctaaatttctaaaataaaa

SEQ ID NO: 39131 - DNA, 201 bp, Homo sapiens
atgaagataataaatcacttcaaaaatccaaatgtttttttttcctgttcccaaagcttttgtagaaaagataaaaaagggagaaaaagggaggtggggtraaggacagagacatgttttagactcatgccctgaggttatgcagaaacaactgtcacaaaggttaaaacaaaaagtctttatctttttctcagtggatag

SEQ ID NO: 39132 - DNA, 201 bp, Homo sapiens
tttagactcatgccctgaggttatgcagaaacaactgtcacaaaggttaaaacaaaaagtctttatctttttctcagtggatagcaggagaaaaatgacayaggaaatagctacttcaactgagggagtcaaatctttgccttacttgtttgactcaatttactttaattggcaggtaggttcttcgggaaagagaaacta

SEQ ID NO: 39133 - DNA, 201 bp, Homo sapiens
ttaataaacaccataataaatatatgaatatataaatataaaacattctaagggctttgactgaaaagaacaatatgatgtcaggagaaaaaaaaattgartcactaagaaaggtgtatctgaggaaatgacatttaagcagaagtttataaatccagtccaagaataagaaaaagaatattcatgcagtgggaataacat

SEQ ID NO: 39134 - DNA, 201 bp, Homo sapiens
atatttataatttatttaaagtgcactgagaagccattgcttgtttttaagcacaagagtgacaatgaaggctgaggaggtttgaatgaaggaaaataatkggttttgttttagattaacatgttgattttagatttctgtttttcatcacaattctggacctagacctattaacctcacaggagagttttgtgctggaga

SEQ ID NO: 39135 - DNA, 201 bp, Homo sapiens
tgtgatttccagagttaacacataataattattaagatgtccagttccactttttaacaaaaattatggaatatgcaaaaaaaaatgcttgttcacagaakaaactaacagaagctctattttttcacgtcagatgggtaatgtgccaatgtcataaaaaggcttgagggaggcatattttattcatgagcataaaaagcc

SEQ ID NO: 39136 - DNA, 201 bp, Homo sapiens
gctgacctctaaatgcagtacaagcaggaagtaaaggctaaggtggttgtaaatggcctggctaagcattgaaggagtgccttagcacagagtcgatctgwaaagatgaagttctctctgtcctcctccctctgtcttctgttgtgtaaggaaatcatgtcaaaacaataactgaacacaagttaaaggagcagagatttt

SEQ ID NO: 39137 - DNA, 201 bp, Homo sapiens
tggtgtatacttgcataggacatttttgatggaaggtgaaacccatagggtcataataaagtaaatttaaatttagatggtctttctttggcttactcctragatgtttgtttgtttcctatgggggatctacaaactaaaggaagagtttaattacacagggcatttgaattatacatcaaagtgatgctaaggaaaaag

SEQ ID NO: 39138 - DNA, 201 bp, Homo sapiens
gacaaaactaaaatagccaagccctaacaaagctcaaaccaatccttgataatggtgttttctgcctaatcaaggaaaacctaacacgttgagagaaagakagagagagaaagagagagggcgtattatccagacttcttaaaatagttcatcctcgaagtccaacattaaatttaaaaaattacaacacattctaaaaaa

SEQ ID NO: 39139 - DNA, 201 bp, Homo sapiens
tgttagtttgttctttcattactacaaagaaaaacccaagactgagtaatgtgtagagaaaagaggtttaattggtttacagttctgaaggctatacaagygtagttatggcattcccttggcttttggggaggcctcagtgagcttttactcatggcagaaggcaaaacaagagcaggtatatcacaccactgcaaaagc

SEQ ID NO: 39140 - DNA, 201 bp, Homo sapiens
tcccaaaacctcaaaagtagggaagccgactgtgtagctttcagtctatggctaaaggcccgagagcccctggcaaaccactgatgtaggtccaagagccyaaaagccgaagaacttggagtctgatattctatgggaggggctgccacaatggtctctgaaatgtctttgaggccttgttcctcttggctatttgtattt

SEQ ID NO: 39141 - DNA, 201 bp, Homo sapiens
aagaaatacctgagactggataatttatagggaagaaagacttaattggctcacagttctgcagaccttacaagaagtatggtgctggtatttgctgctgrtgagggcctcagggagcttttactcatggtatacagcaaagtgggagcttgaacatcacatgatgagagcgggagcaagagagagagtggtgtgcggtac

SEQ ID NO: 39142 - DNA, 201 bp, Homo sapiens
cttggctcatgcctgagggtgtttgtggtgtgggagaatggattacaagtagaatgtggtggttttagtggattgaggagctagtagtcagacttcagagmagccaatatacttgggacttgagggagaaaatcttggcgaggagagaattgaaggaaggtgaatcaaaaaatctgcatacaagctgggcacagtggagtg

SEQ ID NO: 39143 - DNA, 201 bp, Homo sapiens
agaaacaataagcagtagaaacatatccacaggattatttggtattagaattattgggcacattttttaataacctggtgacttctgggttttttccattrctaagtagtttgtaatggactaaccttaccaaaatcaactattaaagctgccaaaaatatataaagtagctattgaaggaactggacagtaaccaatgtg

SEQ ID NO: 39144 - DNA, 201 bp, Homo sapiens
catgttatgcttagaactttattactatgaaaagctctttgatttgtcttttcaactctcttataaaatgaagataataaatcacttcaaaaatccaaatgtttttttttcctgttcccaaagcttttgtagaaaagataaaaaagggagaaaaagggaggtggggtgaaggacagagacatgttttagactcatgccctg

SEQ ID NO: 39145 - DNA, 201 bp, Homo sapiens
agatggtggtagttggaaggagttctggagtctattgaagcgtttgctgtgttaatgtgttttgttttaatagagagaaaatgaacttaaatatattggtrtagctattttattgaatcagttagctttaattagttccacttaagtaggaagcaaacattattttcttactactgcccttcaatctcatgtggcatatgt

SEQ ID NO: 39146 - DNA, 201 bp, Homo sapiens
catgcataacacacatatgtcttacctcattttcagctccctaagtcatttatggagcagctatttttaatatattgactatgaaccaaatatattgataytgagaatataaaagctgatgcactcgtaatctgggtggggtggacaggcatacagaaatatgaattaactatttgccatgtgccaggcaaatcaaacaaa

SEQ ID NO: 39147 - DNA, 201 bp, Homo sapiens
tcatggtatacagcaaagtgggagcttgaacatcacatgatgagagcgggagcaagagagagagtggtgtgcggtacaggtgccacaaactttaaaacagycagatcttataagaactcactatcatgagggcagcacaaagccatgagggatctactcccatgaaccagacacctcccaccaggccccatgtccaacact

SEQ ID NO: 39148 - DNA, 201 bp, Homo sapiens
aatacacagtcattcaaaggtgatctagaagaactccagaagtagaatgccagtgctgatagatgccttcatgaatatattttcatggataattggaatcyattaaatgatgaacaattatattgaagtcataaaaccctcaagtgaatttttacaaatatccaaagtcatcccatttgtttttcatttttctagaaactc

SEQ ID NO: 39149 - DNA, 201 bp, Homo sapiens
caaaggatcggaaaagctaatataaagaagcagtgagaatacacagtcattcaaaggtgatctagaagaactccagaagtagaatgccagtgctgatagaygccttcatgaatatattttcatggataattggaatccattaaatgatgaacaattatattgaagtcataaaaccctcaagtgaatttttacaaatatcca

SEQ ID NO: 39150 - DNA, 201 bp, Homo sapiens
acaagggaattcaaaggatcggaaaagctaatataaagaagcagtgagaatacacagtcattcaaaggtgatctagaagaactccagaagtagaatgccartgctgatagatgccttcatgaatatattttcatggataattggaatccattaaatgatgaacaattatattgaagtcataaaaccctcaagtgaattttt

SEQ ID NO: 39151 - DNA, 201 bp, Homo sapiens
taaatacaatctgaacacggtataattatagagtcaagtagagcaaaggggagagaaggcatgcaagctaatggtacccctcccgctttgggtttgcagartgggaggatggaatcaccttttatatatacatgtaatacttgagccatagggcaataacagaagtcctgaccttgcagatctgccaaggccagactgggt

SEQ ID NO: 39152 - DNA, 201 bp, Homo sapiens
ttatgtaacaattgattgtttcaatatagggcaaattagaagttaataaagaaaaaagttctatttgagtaaagcacacatttcctgaggcctacattttygttcctaaggttttgctttgagcaacttagggcatactgtgtgaggcagcatggaggcaggaaagctcagcttctgtgggagaaagaacaggggcctcct

SEQ ID NO: 39153 - DNA, 201 bp, Homo sapiens
tgctactggttccatattttttccacattgtaattcagcttctactcgaatttttgggaaacaaacaaacaaaatggaaagttcaagaaagtttaaaactrtgaaagatgtttatactgaaaaaaggctagaaaacattttaattctttcttccaagttttccaaacctaaaagtactcctggctcagttatcgctcaaaa

SEQ ID NO: 39154 - DNA, 201 bp, Homo sapiens
tgagagaacagaaaaatgtcatttcacattctgttgcataggaaagaaaaggcatatatgattcctgcctaagaatgcaagctcagtggattttctggacrtaagatagaaaagaatacttattgttataacctaaatgagcttatggcacctgtaaccactatcagattgttatcatcttcaaaagacacattggtctga

SEQ ID NO: 39155 - DNA, 201 bp, Homo sapiens
tcagcatcccaaagtgctgggattacaggcatgagctactgtgcctggccctactctctttctcaactcatattatagtttttggttcctctataagtggrgcaaggtgtggggaagagttaagttgttaaaaagttaaaaattaaagtgagaatcagcatcagtcttgtaccccatggaaatgtcaggagatacaagtca

SEQ ID NO: 39156 - DNA, 201 bp, Homo sapiens
atgcaatatttttgaaattatgtaacaattgattgtttcaatatagggcaaattagaagttaataaagaaaaaagttctatttgagtaaagcacacatttmctgaggcctacatttttgttcctaaggttttgctttgagcaacttagggcatactgtgtgaggcagcatggaggcaggaaagctcagcttctgtgggaga

SEQ ID NO: 39157 - DNA, 201 bp, Homo sapiens
gttgtagtcactacttagagcctcagtcaagcaggtctctggatcacctgccccaggcttcagcagcagtagcagaagtgggtgtgtggaggaggaggagrtgtcctgttctctatgtgtgagcctgagaacagagactcttccgccggtgggagaggaaatcaaactaatgagtataaattactccagtttgccattaaa

SEQ ID NO: 39158 - DNA, 201 bp, Homo sapiens
gagaattcttgttttcctttggaagtttcatatttccttgtattttgatgttttctgtgtctttatattgatatctgtgtatctggtgtaacagttgcatmttcctattttttaattcacttccatagggtaggacttttttctgaagatgtatctgtggtgttggttgggtagggcactttggctttgattctgagtaca

SEQ ID NO: 39159 - DNA, 201 bp, Homo sapiens
cacaataaaaaaaatagagattgtcaaactggctaatgaagaaccactcaattatttgctatttactaggaagcgtacttaaataaagatactgatggttraaaagtaaaactggaaaaagataacagtaggcattataaagctcttatggctgtattagctgactaggtagaaaataatactaaagataaagaatattac

SEQ ID NO: 39160 - DNA, 201 bp, Homo sapiens
aataaaaccagtcaaagatttcaactcttgtgggatcacattcccccaggaggagacagtcaatatatgtaataaataaattatatagtatgtgagaaggyaataagtgatatgaaaaagaacaaacagtaaaagggagtgagagtgtgattttaagtgggatagctaaggtaggccttattgagaaagggacactggaac

SEQ ID NO: 39161 - DNA, 201 bp, Homo sapiens
ccttagcagagctcaagtgctgtgctgggagctccgctgctctcttcagagctggcagacaggaacatttaagtctgctgaagctgcacccatggccgccycttcccccaggtgctctgtaccagggagaaaggagttttctctataagcccctgactggggctgctgcctttctttcagagatgccctgcccagagagga

SEQ ID NO: 39162 - DNA, 201 bp, Homo sapiens
tactttcccacagaagtgagtcaacttttattgttatgtactgatataacttgtcgtgaataataattataataaaaatagacgtcttttaataccttgargttactataaagtactgtaaatgtattttggattgcatcttttgaatggcttattttcagaagcacaaaatgtacagtacatctttcttaggaaatccca

SEQ ID NO: 39163 - DNA, 201 bp, Homo sapiens
agaatgatacatccaacaactgcagaataaacattactttttaggtacacatagaacaatttcaagatagaacatttgttgggccataaaacctgtctcargaaattttaaaagattgaaatattgtagttctcgtaccacaacagaaataaaatagtcacagtaagatatctagaaaagtaccaaatatttgtgctaaat

SEQ ID NO: 39164 - DNA, 201 bp, Homo sapiens
atactgatggttaaaaagtaaaactggaaaaagataacagtaggcattataaagctcttatggctgtattagctgactaggtagaaaataatactaaagawaaagaatattaccaagtatagagaaaagtttgaaaatgtttaaagggtcaattcatcaagaacacagaacaatctaaatgtgtatagatataattagaat

SEQ ID NO: 39165 - DNA, 201 bp, Homo sapiens
ctcagccatttcagcaaagtcaaaaatagaaatgggattaactaggaacgaaatttgtggacaagtcttttgtcttatggaatgaatacccatgatatacwtgggaaacccactaggttcttgaagattttatactaatagaaatgttgccagagtgtattaagaaggacaaagacagtatgaaatgaaaaaaggctgtca

SEQ ID NO: 39166 - DNA, 201 bp, Homo sapiens
ccattgtattttgagagcagataacttgtttctttaatttcatagatccacaaatggagaaaagttgtgcttctggatgggttatatctggagcctcaccyatacctaatttagatgatgagatatgggacttttgagatttagatgagatgttgaactttgagttgatgctgtaaaggttaacctttcgggaaattgaga

SEQ ID NO: 39167 - DNA, 201 bp, Homo sapiens
gcatgtgggatagatgtgaatctttagggatgaactgtgatagggcgaataatggtccccaaagatgttcatattctaccagaacatgtgaatatgttatmttacatggcaaagggaaattaagtttggagatgaaattaagggttctaatcagctgatcttaaagtagggagattattctggattagttgagtggtccca

SEQ ID NO: 39168 - DNA, 201 bp, Homo sapiens
tctattatagggacacatgcgtatgcttattgcagcactatttgtgataacaaagtcatggaatcaacctaaatgcacatcgatgatagactggataaagraaatgtggtacatatacaccatagaatactatgccgccattaaaaagaacatgagcatgtcttttgtgggaacatggatggagctggaggccattatact

SEQ ID NO: 39169 - DNA, 201 bp, Homo sapiens
gcaacagagcaagaccttgtctcaaaaacaaaaacaaaacaacaacaacaaaaaacaaaaaaaacccacagaaatccaaatccactgttagtctgatgggrtttctttattggtgaccagatgcttttctcttgctttttaaagggtatgctttttatctttgactttaggcagtctcactataatgtgccatggggaaga

SEQ ID NO: 39170 - DNA, 201 bp, Homo sapiens
ctgttattttttatctttttaataacagccattctgactagggtaagataatatctcattgtggtttaatttgtatttctctaatgattagtgatattgarcatttttaaatataagtgttggccatttgtatgtcttcttttcagaaatgtctattcatgtcatgcctaaggggattttttgttttctaaggggattttt

SEQ ID NO: 39171 - DNA, 201 bp, Homo sapiens
catctgttattttttatctttttaataacagccattctgactagggtaagataatatctcattgtggtttaatttgtatttctctaatgattagtgatatwgagcatttttaaatataagtgttggccatttgtatgtcttcttttcagaaatgtctattcatgtcatgcctaaggggattttttgttttctaaggggatt

SEQ ID NO: 39172 - DNA, 201 bp, Homo sapiens
aagtgatgctaaggaaaaagtgaggctgatgtcttcatgaggtattcttacatgatgttgcttattaattttatgagccaagaagttctttatgtaattcrtagtaaattttaagagaacatttttacacatagtatacaaagactgatattgatggaatctaaattatctagacagaaatctatgagcatatggtttact

SEQ ID NO: 39173 - DNA, 201 bp, Homo sapiens
agggttgggagctcccggaccccttatgcttcccaggtgaggtgatgccgtaccctgctttggctcgccctccatattgggaagatttctttaagcatcgyttctctacccaatcagactgcctttttcttttctcccatagtattccatacttactcctacgcaccacttattataactgtttacctgcctagtttctat

SEQ ID NO: 39174 - DNA, 201 bp, Homo sapiens
ggagggccatcgtataaaaaccaagaggacgggctggtctcaaactcctgacctcaggtgatccgcctacctcggcctcccaaagtgctgggataacaggcatgagccactgcacccggcccttggttataagctttaaagaatttgtttgctattttgcacatttctgccttaagactgtgtttctagcaactatttaaa

SEQ ID NO: 39175 - DNA, 201 bp, Homo sapiens
aattatttttgctttaaatttcccaatatagattagtttccatggtattgaggggaattttcctattacaatagagatttcttaggaacacattcaaattrcatctctaaacctatattcctagtttgccttcagtttaaaaagattctgaggttcaagtcaatcacagtgctttttttattacttagcataagagaattt

SEQ ID NO: 39176 - DNA, 201 bp, Homo sapiens
ttggagtgcaccattcctcacggcacagtccctcaaggcttctcctggctagggttgggagctcccggaccccttatgcttcccaggtgaggtgatgccgyaccctgctttggctcgccctccatattgggaagatttctttaagcatcgtttctctacccaatcagactgcctttttcttttctcccatagtattccata

SEQ ID NO: 39177 - DNA, 201 bp, Homo sapiens
gagacatataatctaattgtcaaaagccaaagtcaaagaaagaatcttgacagcagcaatcaagaagtgttttgtcatgtacaagggctctacaatgaaawtcacagccagtttgttgccagaaactatggaggcaagaaaggaatgggatgacatctttatagtgctgaaagaaaagcaatctgtcaaccaaaagtctat

SEQ ID NO: 39178 - DNA, 201 bp, Homo sapiens
ttgggttggagtgcaccattcctcacggcacagtccctcaaggcttctcctggctagggttgggagctcccggaccccttatgcttcccaggtgaggtgaygccgtaccctgctttggctcgccctccatattgggaagatttctttaagcatcgtttctctacccaatcagactgcctttttcttttctcccatagtatt

SEQ ID NO: 39179 - DNA, 201 bp, Homo sapiens
gtaaaggcagtaaaagtatctgtggttttcagggttgtggcagaagggaagaaaggatgaataagagaagcacaggtgatttttagggcagtgattctgtrtgatactgtaatggtgaatctatttccttatgcattttgaaaacccatagaatatataacacaaggtgtgaactataatgtaaactatggacttgggttg

SEQ ID NO: 39180 - DNA, 201 bp, Homo sapiens
ttaagttccttgtaaattgtggatattaaacctttttcagatgggtagattgcagaagttttctcccattctgtaggctgcctgttcactctgatgacagyttcttttgctgtgcaaaagctctttagtttaactagatcccattttgtcagttttggctttggttgccactgcttttggcgtttttgtcatgaagtcttt

SEQ ID NO: 39181 - DNA, 201 bp, Homo sapiens
gcagagataaatgaaatagagaatagaaaaacagtagagaaaattaatggaaacaaagataggttatttgtaaagatcaacaaaataaacaaatcattagmtagactaagtaaaagagagagaatgtacaaataactaacattagtcatgaaaattgaaatattacaactggccttacaaaaatgaaggggattgtaagag

SEQ ID NO: 39182 - DNA, 201 bp, Homo sapiens
ttgcagttttagtgtcaacatttatactgttcaaatatacctagtctataacttgatttataatgttaaattatcatcttttgacctatggctattaacartaggtaactcaacttacctgtaatactgccacaatttcctctcctactttctctcccaacttttgttacatgatttttacatcatcatttctacatttct

SEQ ID NO: 39183 - DNA, 201 bp, Homo sapiens
aggagcagccagattcataaagcaaattattagattcctacaaaaagactgagactccctcacaatgaatagtgggagacatcaacactccactgacagcrttagacagatcatcaaggcagaaaattaacaaagatattcaacattggacaaaaatggatctggacctttacagaactctacccctaaaacaacagcatt

SEQ ID NO: 39184 - DNA, 201 bp, Homo sapiens
gcaaattattagattcctacaaaaagactgagactccctcacaatgaatagtgggagacatcaacactccactgacagcgttagacagatcatcaaggcakaaaattaacaaagatattcaacattggacaaaaatggatctggacctttacagaactctacccctaaaacaacagcattcttcccatttccacatgacac

SEQ ID NO: 39185 - DNA, 201 bp, Homo sapiens
tatttgaaaaaataatggccaaaatattccaatttgattaaaagcacaaatctatacatccaggaagctcaatcaactccaagaaggataattgccaagaratccacaatgagacatataatctaattgtcaaaagccaaagtcaaagaaagaatcttgacagcagcaatcaagaagtgttttgtcatgtacaagggctct

SEQ ID NO: 39186 - DNA, 201 bp, Homo sapiens
catgtaatcgaacacaaaacaagtctcagcaaatgcaaagtaattgtattagtacattgtcatactgctatgaagaaatacctgagactgggtaatttatwaaaaaaaaagaggtttaatggactgacagttccacatggctggggaggtctcacaatcatggcagaaggcaaaggagaagcaaagacatgtcttacatga

SEQ ID NO: 39187 - DNA, 201 bp, Homo sapiens
cactatttgtgataacaaagtcatggaatcaacctaaatgcacatcgatgatagactggataaagaaaatgtggtacatatacaccatagaatactatgcygccattaaaaagaacatgagcatgtcttttgtgggaacatggatggagctggaggccattatacttagcaaactaactcagggacagaaaaccaaatatt

SEQ ID NO: 39188 - DNA, 201 bp, Homo sapiens
ccccatggaaatgtcaggagatacaagtcaagtagttaaaatgattctcttatattactctgatcaggaaacagcactagtaaaccaatacattttgctgytctacaagtatcagtcagggaggtggataggggaagagtgagatgttactttctccttgtggcatatattcctcttctctataaaaagtctccctcactt

SEQ ID NO: 39189 - DNA, 201 bp, Homo sapiens
tcaacactcctattcaacaaagtattggaaatcctggccagggtaatcaggcatgagaaagaaagaaagaacatccaaataggaagagaggaagctaaacyatccctatttgcaaatggcatgatcccatgtctagaaaacctcgtagtctcagcccaaaagctccttaagctgataaacaacttcagcaaagtctcaggc

SEQ ID NO: 39190 - DNA, 201 bp, Homo sapiens
tctctctctttttctttttttttttttttttttgacggagtctcgctctgttgcccaggctggagtgcagtggcacgatcttggctcactgcaagctctgyctcccaggttcacgtcattctcctgcctcagcctcctgagtagctgggactacaggcgcctgccaccacgcttggctaatttttttgtatttttagtaga

SEQ ID NO: 39191 - DNA, 201 bp, Homo sapiens
cttttaataaaattcaacatcactacatgttaaacactctccataaactaggtattgaaggaacatacctcaaaataataagagccacctatgacagaccmacagccaacaacatactgaatgggcaaaaattggaagcattccccttaaaaactggaacaagtcaaggataccctctatctctctctctttttctttttt

SEQ ID NO: 39192 - DNA, 201 bp, Homo sapiens
aagcccagtgctacacagattcacagctgaattctgccagatgtacaaagaagagcttgtactatttctgctgaaactattccaaaaaaattgaggaggargggctcctccctaactgattcagtgatggcagcatcatcctgataccaaaacctggcagagacacaacagcagcaacaacaacaacaacaaaactttaga

SEQ ID NO: 39193 - DNA, 201 bp, Homo sapiens
tgtttgtagaacagaactactgcaaataacaaggaccgaatatatttagtgagcaaaaacagaccttacctgttcccttcattagttacccactgggatastgattgtaatcaatcaatcatataagtaaatgcaaaattaccctgtgataagtgctatgaagtaaagatgagccacttttataactataactttatctaa

SEQ ID NO: 39194 - DNA, 201 bp, Homo sapiens
ggctggtctcaaactcctgacctcaggtgatccgcctacctcggcctcccaaagtgctgggataacaggcatgagccactgcacccggcccttggttatamgctttaaagaatttgtttgctattttgcacatttctgccttaagactgtgtttctagcaactatttaaacttataaactcttcattgataaagaataaat

SEQ ID NO: 39195 - DNA, 201 bp, Homo sapiens
acctatgaaattctcagcattgctataagcatttgattttttttaaggaaacttcctgtttaatggaatctgaatccaagatttgctttaatttcactctrttcttcccattttcccttattcttcttgttgtctctctaattaaaaaaaaaaaaaacctaggcttttttttttctatccagaaagttgggttttcatgat

SEQ ID NO: 39196 - DNA, 201 bp, Homo sapiens
acatgtgtttggcatttcatggctgggacaatggagtagagggtaggaagacaagctgtagaacaaaagcaaagtgaggtagaaagtaacaggtcccagamgaggacagacttagagatgtgtaaccttggatcctctttttcacttagaatatgggtaaacttcttagcacaagactggattaagagaagttctttctgt

SEQ ID NO: 39197 - DNA, 201 bp, Homo sapiens
acataatttaaagcacttagtctccacaaagcaatttagaaaaatcttcacttgttagatcccatgaagtacctatgaaattctcagcattgctataagcrtttgattttttttaaggaaacttcctgtttaatggaatctgaatccaagatttgctttaatttcactctattcttcccattttcccttattcttcttgtt

SEQ ID NO: 39198 - DNA, 201 bp, Homo sapiens
ttgtcacccagacatattctccaacccagcattggaaatctgaacgaatcttttctctttttgtcctacaagtttgtcagagatgagaatggattgctgtstacattctacaaccagaccctagactttataccaggctgtgccacttcctcttcacttcactcagaggatggccccaaaactgaaaaggaaatgaaatca

SEQ ID NO: 39199 - DNA, 201 bp, Homo sapiens
tgtacattctacaaccagaccctagactttataccaggctgtgccacttcctcttcacttcactcagaggatggccccaaaactgaaaaggaaatgaaatmatcaaatataccaaatccgaatttgactttatttgatgactcaatattttccttccagtactctaatttttttttatggcaatggcctatatggcacaag

SEQ ID NO: 39200 - DNA, 201 bp, Homo sapiens
aaattacaacagtaaattttttataataaccccaaaagaaaatcaagtttctagaaatatatctcaaaaggacacgcaaggcctctgtgctggaaaccatraaaccccactgagggaaactaaataagatttaaataaactgaaaaaatggtacatgtttatgggctggaagacacaagattgtcatcatggcatgaacct

SEQ ID NO: 39201 - DNA, 201 bp, Homo sapiens
tacatactaacaacaattgaaaagtgaaattacaacagtaaattttttataataaccccaaaagaaaatcaagtttctagaaatatatctcaaaaggacaygcaaggcctctgtgctggaaaccataaaaccccactgagggaaactaaataagatttaaataaactgaaaaaatggtacatgtttatgggctggaagaca

SEQ ID NO: 39202 - DNA, 201 bp, Homo sapiens
agaataagtggtcttcagagtcacagcacacaaggtcaatatacaaaaataactgtatttctacatactaacaacaattgaaaagtgaaattacaacagtwaattttttataataaccccaaaagaaaatcaagtttctagaaatatatctcaaaaggacacgcaaggcctctgtgctggaaaccataaaaccccactgag

SEQ ID NO: 39203 - DNA, 201 bp, Homo sapiens
acaatgaccaagtggggtttatccaaggaatgcaaggttggattaacatttggaaccaattcatataatgcaccacattaacagaataaaagagaaaagaygatatgatcatcttagtggttgtggaaacagcatttgataaaattcaacatgcctttgtaataataattctcagaaaaaataggaatacaaaggaatgcc

SEQ ID NO: 39204 - DNA, 201 bp, Homo sapiens
ttataaagcattttgtgagagcagcacaccttaataacaaaaattgacaaagatgttaccaaagaaaaaaaaaagccatatctacatcccttaggaatttrgtaaccaaaatccccatgaaaatgttagcaaacaaaatccagtagtagataagaagtctactacacaatgaccaagtggggtttatccaaggaatgcaag

SEQ ID NO: 39205 - DNA, 201 bp, Homo sapiens
tctgattttggttatttcttgtcttgaaggcagatggtttcttatggaggtgaatatttgcttatgtaaggcccagccttctaaggaccccatttctacayatctgtcccagagaaatgaaaagcttatctttaactgaaaaacctggacatgcgtgtttatgtcaacattattcataattactcaaaactggaagcaaca

SEQ ID NO: 39206 - DNA, 201 bp, Homo sapiens
aacagctcctggatttattgatcttttgagtggtttttcttgtcccaatttccttcagttcacctctgattttggttatttcttgtcttgaaggcagatgrtttcttatggaggtgaatatttgcttatgtaaggcccagccttctaaggaccccatttctacatatctgtcccagagaaatgaaaagcttatctttaact

SEQ ID NO: 39207 - DNA, 201 bp, Homo sapiens
acttcttcattttgcctcttagtgcacatgcttgagcccactggcccaagtcctgagatcttttcgggaagctgctgatcactggcttcaggtattttctrctgggagacggccttaattggttatgaccaattattattttagagagacagttctcaatgacctgaccatcccctgatgctctcctaacattcctggtgt

SEQ ID NO: 39208 - DNA, 201 bp, Homo sapiens
agatcttttcgggaagctgctgatcactggcttcaggtattttctgctgggagacggccttaattggttatgaccaattattattttagagagacagttcwcaatgacctgaccatcccctgatgctctcctaacattcctggtgttggcaggggggctcttctgccctgctcctgcctgactagctacctactaaaacat

SEQ ID NO: 39209 - DNA, 201 bp, Homo sapiens
gagacacagtgacagaggcagctttccccgaatgtgccggccactttctctttagcactgtcgtggccccaggctggggcagctccagtgagcagctccartgcagccggaagacactatggatgtcacactcggcagaaatggcagctccctcaggtttttgtgactgaaaaatcccaggggtcttcaggtgttcatgtt

SEQ ID NO: 39210 - DNA, 201 bp, Homo sapiens
actgcagaagaaacagaaaatccagatagcttcatatctatttagaaaattaaaatattaattaaaaacttttccacataaaaaacctccagggccaaatkgctttactggtaaattttataaagcattttgtgagagcagcacaccttaataacaaaaattgacaaagatgttaccaaagaaaaaaaaaagccatatcta

SEQ ID NO: 39211 - DNA, 201 bp, Homo sapiens
tttttcaagaatactttggttattctggtttccttgcatattcatatgaattttacaatcagcttatgcattttttgaaagaacccgctgggatttttacrggaattgaattgatctttagatcaccttaggaagtactgccatcttaacaatattgtcttctaatccatgaacattaaatgtctttccatttatttaggt

SEQ ID NO: 39212 - DNA, 201 bp, Homo sapiens
ctgcaaatcagggcaatggacctgcctttctgcagcctggcagaatccagctcacccctctctgcagcaaacccagaccccattcacctgcaaattagggygatggacctgcccttctgcagcctggcagaatccagctcactcctctttgcaggaaagtatcatctacttcactcttaactattcctttctacaagaata

SEQ ID NO: 39213 - DNA, 201 bp, Homo sapiens
cgatggacctgcccttctgcagcctggcagaatccagctcacccctctctgcagcaaacccagatcctattcacctgcaaatcagggcaatggacctgccyttctgcagcctggcagaatccagctcacccctctctgcagcaaacccagaccccattcacctgcaaattagggcgatggacctgcccttctgcagcctgg

SEQ ID NO: 39214 - DNA, 201 bp, Homo sapiens
tgcaaatcagggcgatggacctgcccttctgcagcctggcagaatccagctcacccctctctgcagcaaacccagatcctattcacctgcaaatcagggcratggacctgcctttctgcagcctggcagaatccagctcacccctctctgcagcaaacccagaccccattcacctgcaaattagggcgatggacctgccct

SEQ ID NO: 39215 - DNA, 201 bp, Homo sapiens
acctgagccaagctacaactgcagcaaacccagacctgactcacctgtggatcagggcaatggacctgcccttctgcagcctggcagaatccatctcaccmctctctgcagcaaacccagatcctattcacctgcaaatcagggcgatggacctgcccttctgcagcctggcagaatccagctcacccctctctgcagcaa

SEQ ID NO: 39216 - DNA, 201 bp, Homo sapiens
tgctgatcgtccctcaaaatatttcagcacatggtgacctgagccaagctacaactgcagcaaacccagacctgactcacctgtggatcagggcaatggasctgcccttctgcagcctggcagaatccatctcaccactctctgcagcaaacccagatcctattcacctgcaaatcagggcgatggacctgcccttctgca

SEQ ID NO: 39217 - DNA, 201 bp, Homo sapiens
accatgcttgtgttaacacccttggctctgctgatcgtccctcaaaatatttcagcacatggtgacctgagccaagctacaactgcagcaaacccagaccygactcacctgtggatcagggcaatggacctgcccttctgcagcctggcagaatccatctcaccactctctgcagcaaacccagatcctattcacctgcaa

SEQ ID NO: 39218 - DNA, 201 bp, Homo sapiens
ggcctctgtggagcccttcactgagcgctgagggataaagctgggagcagggcctgagagacaggatgcattcccgggggccctgctgagtctcacccacktgcagagaaccagtctcagaaaacaggagacagagtggaagcctgagtggagcccctcccaggcctccagacaatgccaggcaacggttcggaaacacag

SEQ ID NO: 39219 - DNA, 201 bp, Homo sapiens
gaaaaagaacctcttttttaaactatagttggtgttgtttaacctcatgaactttaaaaaaagaataaaactatagttggaaaagctagatatccccaggraaaaagagataacaccagaccccatctccctccatagccagaaaataacacgtggcaggttgcaggcctgagcaaaaaactgagggcagcagaacttctg

SEQ ID NO: 39220 - DNA, 201 bp, Homo sapiens
gcaaggcaatgtgacccatgtaaaataggaaacaggcagccaataaataataccataccaaagaggtatgagtaaaaagtacatgtaacagataaaaaatkacgtactagaaagtatttgacttgttcaattgtttaaaaaagacagaaaaggaaagaaactgggagaaagaacaagagggataaataaaattatatccca

SEQ ID NO: 39221 - DNA, 201 bp, Homo sapiens
atatattctagttgcaaatctcttatgcagtaaatgatttgcaaatgtttctcccattttataggttatctttccgtgtttttgatgatgtctttggatgmctaatgttttaaattttaatgaagtacaatttatttatttattttgctgttgttacttgtgcttttggtgccatatctaagaaaacattgcccaaggcat

SEQ ID NO: 39222 - DNA, 201 bp, Homo sapiens
aacgaccaaacctaagaataatcagtgttcttgaggaaggaaagatttataaaagtttggaaaacgtatttgggggagtaatcgaggaaaaattccccagscttgctagagacctagacatccaaacacaagaagcacaaaaaacacctggaatattcatcgcaaaaaaagatcatcacctaggcacattgtcatcagttt

SEQ ID NO: 39223 - DNA, 201 bp, Homo sapiens
accctctaccactaccacccgcattgacctgtatgctatagatgtcatagattatgtctacacacattgaaaaccccaccaggcagtattataatttttgmttttaatagtcataagtatttgagagaagttcagaggaaaaaaatattatcctagctatttatcattgacttccctttattactgaaaagccaagtttct

SEQ ID NO: 39224 - DNA, 201 bp, Homo sapiens
attgaaaaccccaccaggcagtattataatttttgattttaatagtcataagtatttgagagaagttcagaggaaaaaaatattatcctagctatttatcrttgacttccctttattactgaaaagccaagtttctctcaagtgtcatttttctgcagcatgaagaacttcattttgcatttctcgtagagtgggtctgca

SEQ ID NO: 39225 - DNA, 201 bp, Homo sapiens
ctgaaaccttgtttttcagcaggcacattgcatgcatgatcaaacagattagtgtggttctaattggtaaaccattaataagccatagaatataatcaagrtcattcagaaagatacacaagcaaatccacaaaaggggattagaaacccagtgtgttcaggtattcttgcattgctgtaatgaaatacctgaggctgggt

SEQ ID NO: 39226 - DNA, 201 bp, Homo sapiens
gtactttttgctttaattgcatattttgaaaaaagaaatgcctcataatttttccttgactgttatttcattttctttattcctcaaacatactgtagacrttggaggaaacaccagagcctatacagggatggttgattgtgagaaaaggtaagacaagtaagtctctctatttgaaaccctgaaaccttgtttttcagc

SEQ ID NO: 39227 - DNA, 201 bp, Homo sapiens
gaaaagcaggctctgttttttgagggagaaactgaaaagttacatggtgaagggcatggatacaggaaagagcaaagaatgagggccaataatgccagccrtcacagtagtcactctcggaaacgattaattacagcattgggcttaaaatccaggatctcatgatctatatatcaggcctgggtgaagctccttttgatc

SEQ ID NO: 39228 - DNA, 201 bp, Homo sapiens
cttgcactgtggaaacacaaattaccttactgatctgaaaattgcattttgtactttttgctttaattgcatattttgaaaaaagaaatgcctcataattyttccttgactgttatttcattttctttattcctcaaacatactgtagacgttggaggaaacaccagagcctatacagggatggttgattgtgagaaaagg

SEQ ID NO: 39229 - DNA, 201 bp, Homo sapiens
atggtgggacttactggcctccataattgcatgagccaattctcatcataaacctctccatatgtagaaatataaacataagtacaaatatataatatctrtctcctatttgttctgtttttccgaagaaccctgactaacacagtcgtggatctctttaactttctattaacttctagttttaatgattaggctgtttta

SEQ ID NO: 39230 - DNA, 201 bp, Homo sapiens
aggagttcaagacaagcctgggcaatatagtgaaaccccgtctctacaaaaaaatacaagtcagctgggcgtggtggtgtgtgcctgtagtccaagctacwccggagtctgaggtgggaggatcgcttgagcctgggaagtggaggctgcagtgagccaagaccacgccactgccctccagcctaggtgactggagtaaga

SEQ ID NO: 39231 - DNA, 201 bp, Homo sapiens
gcaaaaacaaaaaactgaggtatacaggcaacaaatagcaggatgaatggaatggtacctcacatctcaatactaacattgaatgtaaatggcctaaatgmtccacttaaaagatacagaatttcagaatggatgagaattcaccaaccatctgctgccttcaagagactcacctaacacgtaaggactctcgcaaattta

SEQ ID NO: 39232 - DNA, 201 bp, Homo sapiens
agctgggcgtggtggtgtgtgcctgtagtccaagctacaccggagtctgaggtgggaggatcgcttgagcctgggaagtggaggctgcagtgagccaagaycacgccactgccctccagcctaggtgactggagtaagaccctgtctcaaaaaaaaaaaaaaaaaaaaaaaaagtctttctagaaagcataattcctatat

SEQ ID NO: 39233 - DNA, 201 bp, Homo sapiens
ggataattcagaggaatttcccaacagacatgagaaatgtgccttccaaattgcggcaggtggcctgagagcttgacatgagtttctcatgtgcagcagcrtcttgttatttgttataagggcttcataaacagagctgggtttacaaggagtcttatgggctcagaatcttaactgcgatgtctaactctctaagattat

SEQ ID NO: 39234 - DNA, 201 bp, Homo sapiens
tatctaaggctgtgtattaagcacatgcacatagttaattgctaaatcttcttgacgaattgtcactttatgattatgataatgaaatgtctctagtaacrctctgatactacatttgccactccagccttttatccatgtcatttgccaatggtatgtcttttctggtccatttctttcaacctacctttgtcttcatat

SEQ ID NO: 39235 - DNA, 201 bp, Homo sapiens
tattttccatttgttccctccactttggtttactggatccccgtttcctccttccttttggataatttaatttttttagtatttcattttaattcatctayggacttttcagctacatcctatacatggtttagggtttgctctataggttaaaatatgcataactaatttttcacatttgacttagagttaacttgtctc

SEQ ID NO: 39236 - DNA, 201 bp, Homo sapiens
atggacaccaaaagcaagcaggagtagctattcttatatcagacataacaaactttaatttaaagcaacagcagtttaaaaagacaaagagggacattatmtaatgataaaaggccttgtccagcaggaaaatttcaaaatcctaaacatatatgcaccaaacactggagctcccaaatttataaaacaattactaataga

SEQ ID NO: 39237 - DNA, 201 bp, Homo sapiens
tttaaaaagacaaagagggacattatctaatgataaaaggccttgtccagcaggaaaatttcaaaatcctaaacatatatgcaccaaacactggagctccmaaatttataaaacaattactaatagacctaagaaatgagatagacagcaacgcaataatagtgggggacttcaatactccaccgacagcactaaacaagt

SEQ ID NO: 39238 - DNA, 201 bp, Homo sapiens
gaacctgtctcaaaaaaaaaaaaaaaaaaaaaaaaaagcagaacttatatgagcacacttaatgtacttatccattatacagctaatgcaaaaatgaaacrtggtatatgaaacaactcactgagactcaggccatcatgctaataaatttcttgcaaaacttacatacacacagtggccatgttttcaaaccaaaaactg

SEQ ID NO: 39239 - DNA, 201 bp, Homo sapiens
ccagcctggtagacagagggagaacctgtctcaaaaaaaaaaaaaaaaaaaaaaaaaagcagaacttatatgagcacacttaatgtacttatccattatasagctaatgcaaaaatgaaacgtggtatatgaaacaactcactgagactcaggccatcatgctaataaatttcttgcaaaacttacatacacacagtggcc

SEQ ID NO: 39240 - DNA, 201 bp, Homo sapiens
gccgtgatctcaccacggcactccagcctggtagacagagggagaacctgtctcaaaaaaaaaaaaaaaaaaaaaaaaaagcagaacttatatgagcacayttaatgtacttatccattatacagctaatgcaaaaatgaaacgtggtatatgaaacaactcactgagactcaggccatcatgctaataaatttcttgcaa

SEQ ID NO: 39241 - DNA, 201 bp, Homo sapiens
cagtgcagtgacatggtttcagctcactgcaaccttcacctcccgggttcaggcaattctcctgcctcagcctcccaagtagctgggattactggcatgcrccaccacatccagctaatttttgtatttttagtggagacagggtttcgccatattggccaggctggtctcaaacccctgaccttaggtgatcagcccacc

SEQ ID NO: 39242 - DNA, 201 bp, Homo sapiens
gtattctatagttgtggcttggaggtcctttaaaaactacatttgccaaatccaatctcactcagattttctcctctgttttcttctggaagttttatagyttttctattacattttggcctattacctatttccagttgatgttttaaatggtgagaggtaagggtctatgttttgggtcagtctgtttgtttttcattt

SEQ ID NO: 39243 - DNA, 201 bp, Homo sapiens
atctcactcagattttctcctctgttttcttctggaagttttatagtttttctattacattttggcctattacctatttccagttgatgttttaaatggtragaggtaagggtctatgttttgggtcagtctgtttgtttttcatttggctacccaattgtcccaaaaccatttgttgatgagattattcttgagttgctt

SEQ ID NO: 39244 - DNA, 201 bp, Homo sapiens
gtgagagacatatattactaggtaaaatggaaaacccaaattacagcagattaaacagattgaattttgattttctctgatgtagaagtcttgaaggagamtgtccaaggcttgtatgaaagatccatgatggtgtcaggggcccaggtctttctgtatttcttgtctgtcaacctgactacatggcttccattcatgatc

SEQ ID NO: 39245 - DNA, 201 bp, Homo sapiens
tgagagacatatattactaggtaaaatggaaaacccaaattacagcagattaaacagattgaattttgattttctctgatgtagaagtcttgaaggagaawgtccaaggcttgtatgaaagatccatgatggtgtcaggggcccaggtctttctgtatttcttgtctgtcaacctgactacatggcttccattcatgatca

SEQ ID NO: 39246 - DNA, 201 bp, Homo sapiens
aaagaataatcatttaaagaaataaagaaaaaaaggatgcattcaactgacatgccaagaagatccaacagatgcagaacagatattcccaaagggagaaygaagatcacagaacagagcgtcaagctataaactgtaaagaaataagctacaagttataaataaactaaagaaataaaagcttgttctttagatagaaaa

SEQ ID NO: 39247 - DNA, 201 bp, Homo sapiens
aatctctaaattccctctcaatatttccacttccttcctgagctcatgtctatcttgtaggtctttgccttatgcagctgagcggagcctggttgcgctcrcaatgctctgcgtgggagcacctcagccaagtcggcaagtttatggtgtacatttcccctctcctcccagttactgcaggtaaacagctttcccagcgct

SEQ ID NO: 39248 - DNA, 201 bp, Homo sapiens
ggttgcctgggtgggcagtggggggatcatgtcctcacgatttttaggagacttttgtccagctggaagggttttcaataaaccaccataatacatcacargtcttggcaaaggttgtttccctctcaatctttattttgtctttatcctgaaaccgtatcattctggcggtactctagatttgatctttgtcccctgtct

SEQ ID NO: 39249 - DNA, 201 bp, Homo sapiens
gtgcccagctcctgaccagaacctggcatcatctctactaaatctgagtgaccaaggagtaaaaagccagtctgagacttggccagtaatacccacctggygctccctcttgcataacttgaactttgatctatgataggtaatggttctctctttgggggaaatgttgagattcaaagtaatttttgcattggggtgagg

SEQ ID NO: 39250 - DNA, 201 bp, Homo sapiens
cggatgaaacttcattcactcgcccgccactcaccttctgctgtgcagcctggttcctaacaggccatggaccagtaccggtctgtggcccaggggttgcrgaccccttctctaaaagccctataggaggtgcaggaaattattttgagagcagggtcattaaataaatctatttctacacttcaagtaattatctttcaa

SEQ ID NO: 39251 - DNA, 201 bp, Homo sapiens
aggaggaagggaatgaacccgtgatcaccctaatagcagtggcaggaaggtcctgatgcaggctagtgttaaagctgacatcccacagttcaggatgtacrgatgcaccttcttacgaaatagattttacagcatttttcatttggcctagcagtagccaatgagacagatcgctccactgaaaagtgcttcttctgagca

SEQ ID NO: 39252 - DNA, 201 bp, Homo sapiens
ccatgtaactttgatttagtcacactagtggtgagagaccacggtaggcagtaactagctgtgagtatcctgggcacgacgtacaggaacaaccatagacktttgaaacagatttgcctgggttttaatttccatattcctctggttatgtaagcgtgacaagcgtctgaaaccttcaagctccaggctgactatgaacgt

SEQ ID NO: 39253 - DNA, 201 bp, Homo sapiens
aaatctcaaaattactttacattgaaagagacacagaagacttgatgactcacaggtaacagaactggcccagggctggatcaagtatcttaactgtctcyacaggggccacttattggtgcatcttttggatttaaagaaagagacaatgtattcgtgtatgtcagtggaagatggagtgccctcatcactcacaccagg

SEQ ID NO: 39254 - DNA, 201 bp, Homo sapiens
atagataggaggggaggaacttggccaggggcggtggctcacactttcagcactttgggaggccagggagggaggatcacttgagctcaggagtttgagamtagcttgggcaacatggtgaaaacttgttgctacaaaatgaaaatttaaaaattatctgggcatggtaatgcatgcctgtagccccagctactcaggaac

SEQ ID NO: 39255 - DNA, 201 bp, Homo sapiens
ttgggaggccagggagggaggatcacttgagctcaggagtttgagactagcttgggcaacatggtgaaaacttgttgctacaaaatgaaaatttaaaaatkatctgggcatggtaatgcatgcctgtagccccagctactcaggaacatgaggtgagaggatcgcctgaacccaggaatcaaagctgcagtgagccgtgat

SEQ ID NO: 39256 - DNA, 201 bp, Homo sapiens
tagcttgggcaacatggtgaaaacttgttgctacaaaatgaaaatttaaaaattatctgggcatggtaatgcatgcctgtagccccagctactcaggaacrtgaggtgagaggatcgcctgaacccaggaatcaaagctgcagtgagccgtgatctcaccacggcactccagcctggtagacagagggagaacctgtctca

SEQ ID NO: 39257 - DNA, 201 bp, Homo sapiens
gaagtcattatacaaaaaagatacttgcacaggcatatttatagcagcacaattcacagttgcaaaaacgtggaaccaacccaaatgcccatcaagcaacragtgcataaagaaactgtggtttatatatatatgattcaatactattcagccataaagaggaatgagttaatggcattcacagctggatggaattggaga

SEQ ID NO: 39258 - DNA, 201 bp, Homo sapiens
agtgggctatgacagcacctatgaatggatgctgcactccagcctgggcaacatagggagaatccatctctaaacaaaataataatgacaataataaaacrtgtcttgaaatcatacaggacaggttttccaactttattctttttcaaagtcattttggctatattaggttgtttgcatttccacttaggttttagaatt

SEQ ID NO: 39259 - DNA, 201 bp, Homo sapiens
tcacactcggcagaaatggcagctccctcaggtttttgtgactgaaaaatcccaggggtcttcaggtgttcatgttctgtgtatcaccacaggctgtgccygcctacgtgtgcccagagggaacgggtgaggcctggagtccagcgcgcgcctcaccgcccatcctgcctgatgcgtccttccagagcacatcctccttct

SEQ ID NO: 39260 - DNA, 201 bp, Homo sapiens
gagacagggtttctctgtgttgctcaggctggtgtcaaactcctgagctcaggcaatccacctgcctcggcctcccaaagtgctggaattacaggtgtgarccaccacgcccggcctgaaggcattttataacctctttattctaaaatgttagtacttaggtctgtgcggaaattgcaacctttacaactataaaaactt

SEQ ID NO: 39261 - DNA, 201 bp, Homo sapiens
cctgagaatgagcatcggtggcctctgggtgatggctctgaggaaccccagaaagtcaggctgcgcagtcagcgaagcacaagaaagccaggctggcatgsgggccactgtgtgcaggtcacatactaaattatacatttcaggaagaagtgctaccgagtttcaggaaaaacagtgattatcagaactttaaaaatccag

SEQ ID NO: 39262 - DNA, 201 bp, Homo sapiens
tacaggctcatggctgtatttataccatgaggataataacctgtttgcctcgattgctggtgggatgaagtcagaggctgataggacttactgcactcacktgcttctcctgtacctatcttgctatccttgtgctctcgttagagctgatgtttctcgaggtgcacgtttggcttctgctttttctcattgtgaagtatt

SEQ ID NO: 39263 - DNA, 201 bp, Homo sapiens
aactttaaaaatccagatgtgctattagaaatgaggacatacacaagagaaccatcttggaaagaacaagtgtgcacagagacaggcgtggggatgacacwgcaccacgagccactgtccatctctccatctgcagaggagatgcacaggcgcagatgcacgtgcacagacagctggagagcaaggggacgtcctgccggt

SEQ ID NO: 39264 - DNA, 201 bp, Homo sapiens
tttaaacaactacatctcacaataactcactcattctcatgaggacagcaccaaaccattcatgagaaatccacccctaagacccaaacaccttccaccaratccaagactgaggattacatctcaacataagatttagggagaccatccaaactatatcattctgcccctggcctcccaaatctcaggtccttctcacat

SEQ ID NO: 39265 - DNA, 201 bp, Homo sapiens
acaagagaaccatcttggaaagaacaagtgtgcacagagacaggcgtggggatgacactgcaccacgagccactgtccatctctccatctgcagaggagaygcacaggcgcagatgcacgtgcacagacagctggagagcaaggggacgtcctgccggtgtgaagcatggccttggctccttacaatcactggtcaggaaa

SEQ ID NO: 39266 - DNA, 201 bp, Homo sapiens
tccaccctccatcctacaataggccccagtgtgtggtgttccccaccatttgtccatgtgttctcatcatttagctccctcttacaagtaagagcatgcastatttggttttctgttcctgcattagtttgctaaggatgatgccctgcagctccatccatgttcctgaaaaggacatgatctcattctttcgtatggctg

SEQ ID NO: 39267 - DNA, 201 bp, Homo sapiens
acctatgcaattagaagccacagtccagatgtctggaactagttctacttcccaacactacctggacagtgggtttaatcaatgtattctcccaaaatacwtcaatcaatctcctgatttgggggtattgccaaatgagtagtcgtaaaaccaagaaaaacttttaaatgataatttacgataagcatgtcctgcttggaa

SEQ ID NO: 39268 - DNA, 201 bp, Homo sapiens
atgtgactcagtctccccacagcccccacagtggggccacgttccccagttgtacgcttcagctgcccaagctcagtcgacaacgttttcctcttattccsacactattagtgttactgatgcccgcaaaggggccagcactggaacagaccctgaaaatacaaaacccaggcagtcagggttgtggagatggacaagggt

SEQ ID NO: 39269 - DNA, 201 bp, Homo sapiens
tcttggttctgtctccatgtgtccaacatgtcctctcatctttcatggagatgaatgccaacacccaacaggtctttccgtacttattactgtgtcttagscccttcagttatcctctttttctttcctgaaaactactcaatgatttcccaaatttcttatcatgacttttacaaccctgcatgtcttacaggtttttac

SEQ ID NO: 39270 - DNA, 201 bp, Homo sapiens
gtaattcctgtcccattgatgtagggctgggccatgtgactttctttggctaacagaacaagagtgaaaacaaaagtggaagcctgccaggtctaagaagytcggtgagttcctgccagctccacagtccccaccttccaccctgagagctgtgcccagattagtgtggtcgggagcctggggctccagtgaaaagaccca

SEQ ID NO: 39271 - DNA, 201 bp, Homo sapiens
tggtcttccccccaacctcagagcttaaggtcccaggggaggggcatgtgactcagtctccccacagcccccacagtggggccacgttccccagttgtackcttcagctgcccaagctcagtcgacaacgttttcctcttattcccacactattagtgttactgatgcccgcaaaggggccagcactggaacagaccctga

SEQ ID NO: 39272 - DNA, 201 bp, Homo sapiens
tgagtatctatattatacagcaccataattttcctgtttagtaatacacaagactttctaaaatataatagtatgctagaaaacagattggggttttacartggttacgtttatgtgtcaagttgactggcctaaaaaatgcccagagaattggtaagagagtatttctaggtgtctgtgagggcatttctggaagaggtt

SEQ ID NO: 39273 - DNA, 201 bp, Homo sapiens
tgcagccactccagcactagcattactgcctcagctccacctcaggtcatcaggcattagttagattctcataaggagcacacaacccagatccctcgcaygtgcagttcacaatagggtttgcgctcatatgagaatctaatgccaccgttgatctgacaggaggcggagctcaggcagtaatgtgagtaatgaagagtg

SEQ ID NO: 39274 - DNA, 201 bp, Homo sapiens
aacataaagatttatttgcatgatgtctccatgaaacagctccttggactgtctgtgggaggaagaatgttgcaggaagaggacatggcatgaaccggcamggttttccccaaaattccaagggacaccagggggcacagaactggaagtcaggcagctgagtcctggctaggaagcagtgggacgtgacacctgccaagt

SEQ ID NO: 39275 - DNA, 201 bp, Homo sapiens
ctgtcacccaggctgcagtgcagtggcatgatctcagctcactgcaacttccacctcacggtttcaagcaattctcctgtctcagcctcccgagtagctgsgactacaggcccatgccgccacacccggctaatttcttctgtattttagtagagacagggtttctctgtgttgctcaggctggtgtcaaactcctgagct

SEQ ID NO: 39276 - DNA, 201 bp, Homo sapiens
ctccacacctccagtttcttttccatagatataggataggtttctgaagaggttgaattcacatatgtaaggcacttagaacagtgacacacaaataatargtacccaaaatgataactgcttttgtgtcccaggaatttaacctggcattcagatcaaccagtttgtttctgcaggtgactagaaccagtgatacacgtt

SEQ ID NO: 39277 - DNA, 201 bp, Homo sapiens
acagacagctggagagcaaggggacgtcctgccggtgtgaagcatggccttggctccttacaatcactggtcaggaaaaaaaaaacaaaaaaaaaatgagyagtgaaaaagtaaccagctcaggatataatttgatagaggagtaacgcaatggattttttcttctggttttaataaaaaatcaagttgctcaaaactact

SEQ ID NO: 39278 - DNA, 201 bp, Homo sapiens
ctcaatagatgcagaaaaagcatttgacaaaattcagcatccctttatgattaaaactctcagcaaaatcggcatacaagggacatacctcaatataataraggctatctatgacaaacccacagccaacataatactgaatggggaaaagttgaaagcattccctctgagaactgaaacaagacaaggatgcccactcct

SEQ ID NO: 39279 - DNA, 201 bp, Homo sapiens
aaatcacatgatcatctcaatagatgcagaaaaagcatttgacaaaattcagcatccctttatgattaaaactctcagcaaaatcggcatacaagggacayacctcaatataataaaggctatctatgacaaacccacagccaacataatactgaatggggaaaagttgaaagcattccctctgagaactgaaacaagaca

SEQ ID NO: 39280 - DNA, 201 bp, Homo sapiens
ctgctgagggagccaggggcaattcctggggcaagtggggattccaggagccgtggacctgtgttgtccctgagctcagcacatccagtgctttgctcaargcagcaggcctccgagcccatgctgcagttgcttctctaattacttccatccactttccacctcctccccttaggtaggaagtcctgccagagtcacagc

SEQ ID NO: 39281 - DNA, 201 bp, Homo sapiens
tcaggcaatccgtctgccttggcctcccaaagtgctgggattacaggcatgaaccactgtatctggccagaaatttctctatttctaatggatgattcccwtcaagacaaagtcaatctccagtatatctctgtttaaaactctgtaccttgattttacaccccatttctgttttcttcatagacaaactatcttagtcca

SEQ ID NO: 39282 - DNA, 201 bp, Homo sapiens
cagagggcttcatgcccgagagctgctgagggagccaggggcaattcctggggcaagtggggattccaggagccgtggacctgtgttgtccctgagctcakcacatccagtgctttgctcaaggcagcaggcctccgagcccatgctgcagttgcttctctaattacttccatccactttccacctcctccccttaggtag

SEQ ID NO: 39283 - DNA, 201 bp, Homo sapiens
ggagagaaatgactgcccctgggctgcgggacatttgcacatttgcagtaggaagtgcagagggcttcatgcccgagagctgctgagggagccaggggcamttcctggggcaagtggggattccaggagccgtggacctgtgttgtccctgagctcagcacatccagtgctttgctcaaggcagcaggcctccgagcccat

SEQ ID NO: 39284 - DNA, 201 bp, Homo sapiens
gcagtctcattatatgtataattatttatgtctttggaattactttttttttttaagacgcgtgtcacccaggctggagttcagtggcacaatcgtggcamtgctgcctgggcctcctaggctcaagtggtcctctcacctcagtctcctgagtaactgggaccacagatgtcctatcacacctggctaattaaaaaatat

SEQ ID NO: 39285 - DNA, 201 bp, Homo sapiens
gacaaatgctctgaggatagggctatcaccactgagcaagctctgcatcagagcaattaaagataatgggtcttttccacggagctgcctgatgggccagrcgttgacaactctcttggttgcttccaaactttggcaattattttaaaaatggggctctaagcatttgggggcaggttgttgtgtggatgttttgtggag

SEQ ID NO: 39286 - DNA, 201 bp, Homo sapiens
ccctttaccgcactctgaaattatcccttttgacttcctttttttttcgataccccaaccccactcctgggaaggcaattgtcttgttcaaagtagtagcmcagtacctggcatgtagtagcagctcagtgagtattggttggacgtgtaagcggtttaataaattgatacattctgtgcacacacagaggagggtgcact

SEQ ID NO: 39287 - DNA, 201 bp, Homo sapiens
gcccttcaggagggggccttcgtgggtctccagggtctgccagcatgaggggctgtgccaggctgcactcctaggggctcaggaaccaagcccttgtgttrccagaacgctcagacacgctgctacatcaatatcttctgaaggggagctctagacttatagaagtgggagatcaggatggcagatattaatgatctgcca

SEQ ID NO: 39288 - DNA, 201 bp, Homo sapiens
ttttctcaaaccctttaccgcactctgaaattatcccttttgacttcctttttttttcgataccccaaccccactcctgggaaggcaattgtcttgttcakagtagtagcacagtacctggcatgtagtagcagctcagtgagtattggttggacgtgtaagcggtttaataaattgatacattctgtgcacacacagagg

SEQ ID NO: 39289 - DNA, 201 bp, Homo sapiens
gttgtgccatatcttggtccaggtctctgcttctccatctgtttttctcaaaccctttaccgcactctgaaattatcccttttgacttcctttttttttckataccccaaccccactcctgggaaggcaattgtcttgttcaaagtagtagcacagtacctggcatgtagtagcagctcagtgagtattggttggacgtgt

SEQ ID NO: 39290 - DNA, 201 bp, Homo sapiens
atgtgaggggcagtcacttcttgtcgtcctgaccacgtggttgtgccatatcttggtccaggtctctgcttctccatctgtttttctcaaaccctttaccrcactctgaaattatcccttttgacttcctttttttttcgataccccaaccccactcctgggaaggcaattgtcttgttcaaagtagtagcacagtacctg

SEQ ID NO: 39291 - DNA, 201 bp, Homo sapiens
cgtgggcgtggagtttgtcacactgcagttatgagtaagatgtgaggggcagtcacttcttgtcgtcctgaccacgtggttgtgccatatcttggtccagktctctgcttctccatctgtttttctcaaaccctttaccgcactctgaaattatcccttttgacttcctttttttttcgataccccaaccccactcctggg

SEQ ID NO: 39292 - DNA, 201 bp, Homo sapiens
ctgctaatgttaatctgtatttgcagccactccagcactagcattactgcctcagctccacctcaggtcatcaggcattagttagattctcataaggagcrcacaacccagatccctcgcatgtgcagttcacaatagggtttgcgctcatatgagaatctaatgccaccgttgatctgacaggaggcggagctcaggcag

SEQ ID NO: 39293 - DNA, 201 bp, Homo sapiens
taggtgctccacgtgggcgtggagtttgtcacactgcagttatgagtaagatgtgaggggcagtcacttcttgtcgtcctgaccacgtggttgtgccataycttggtccaggtctctgcttctccatctgtttttctcaaaccctttaccgcactctgaaattatcccttttgacttcctttttttttcgataccccaacc

SEQ ID NO: 39294 - DNA, 201 bp, Homo sapiens
ccatccatgaatatactgacacaaaacgaccagtttagttttcccgatatgtaatcattcaaagacttcagtagttctgcagctggggtgttgattagcarcaaaagaacacataacatatcctcctgaacatcctcttgaagagtatatcacacataaacaaggattgttgccttgctgtcaacatccgaactcatcaac

SEQ ID NO: 39295 - DNA, 201 bp, Homo sapiens
ttggctgtgtccccacccaaatcttagcttgaattgtaataatccccacatgtcaagggaggagccaggtggaggtaactgaatcgtaagggcagtttccyccatagtgttctcatggtagtggatcagtctcacaagatctgatagttttataaaggggagttcccttgcacaagctctcttgcctgcggccacgtaaga

SEQ ID NO: 39296 - DNA, 201 bp, Homo sapiens
tctctccagataacagcccagtttcttcacctgcaattcattaaatatgctttctttttctccattctcctgtcactgcacccattccaatttacccatcsgtaaactctgaattttgcttgcctcgaagaatctgcacacaatagagcagagtgctcaccactccagttctggagcagacacaggtggaggtaggtcctc

SEQ ID NO: 39297 - DNA, 201 bp, Homo sapiens
agataaacacatctccctgacaatctactctgctaagtacattgcttgcaaaatacttaaacaacaaacaaacaaatatgcagataaacacacctttgcamcttcctgccagctcatcatccaggtctatcttgttcctttgccgcatgcacaagttaacgaagagcaggcccctgtctaccccctgcaccatcctctctc

SEQ ID NO: 39298 - DNA, 201 bp, Homo sapiens
cccagtttccagtgtaccttttgtttgccagagaaagaaggaggaaagggaagcacggagggtgagaggaatcatgagtacagatatgtcttctaaagggyacccaaaaatgacacacacacaaccctaatcatgggtttatgtataaagtaccttagaattaagtcagagtcactgtaggcttggaaaagtattcaaggg

SEQ ID NO: 39299 - DNA, 201 bp, Homo sapiens
ccaacctgtagccactgccgtgccatgtgagggagacagaaatatttgtttcataagctctagagcaagcttgtccaacctgcaacctgcaggttgcatgyggcccaggacaactttgaatgcagcccaacacaagtttgtaaactttcttaaaacattatgagatttatgcatggacttttttttttttttagctcgtca

SEQ ID NO: 39300 - DNA, 201 bp, Homo sapiens
catagaattcattggcaaactcaattttcaggtacaggtgttgccatgcactctccaggtgagcttttatcaattgacccatgtaatggttaatattaagygtcaacttgattggattgaaggatgcaaagtattgttcctgggtgcgtctgtgagggtgttgccaaaggagattaacaatttgagtcagtgaactgggag

SEQ ID NO: 39301 - DNA, 201 bp, Homo sapiens
aaacaatgttagcaaaatcctgatctttaacaggaaagcagcatgaccaaatatttccagagaaatcttatgctcttgctgtaagggaaattgcctgatcraatgtcatatagtcaggaatactctagaacagtggtcctcaacctttttttggcatcagggactagtttcatggctgacaacttttccacagactgggga

SEQ ID NO: 39302 - DNA, 201 bp, Homo sapiens
tttgctctattctgggtttcctttcacctggatagttactcctcgtctgtcttcttggtgagattctcctccccttttgaaccctaaatattttgtgatcytaagctttctcatttttcctaggaatttaattatcatctttatgccatgaactctaatgttaatctctagcccagactttcttccaagcttcaaactttt

SEQ ID NO: 39303 - DNA, 201 bp, Homo sapiens
tggattgaaggatgcaaagtattgttcctgggtgcgtctgtgagggtgttgccaaaggagattaacaatttgagtcagtgaactgggagaggcagacccaycctcagtctgggtgggcaccatctaatcagctgccagcataaaaacaggaatggaaagagcagactggctgagtctcctggccttcatctttctcccata

SEQ ID NO: 39304 - DNA, 201 bp, Homo sapiens
aagaaagcacatggggctgaggcaggagaatggcgtgaacccaggaggcggagcttgcagtgagccgagatcgtgccactgccctccagcctgggcgacasagcaagactccgtctcaaaaaaaaaaaaaaaaaaaaaaaagcacatgggcaggctaatgatgattttgtctctgagtttgaaggaattcagccagtgggc

SEQ ID NO: 39305 - DNA, 201 bp, Homo sapiens
cacgatcttggttcactgcaacctctgcctcccagtttcaagtgattcttttgcctcagcctcccaagcagctgggactacaggtgcacaccaccacaccyggctaatttttgtatttttagtagagacagcatttcaccacgttggccaggatgatctcgatctcctgacctcgtgatccacccgccttggcctcccaaa

SEQ ID NO: 39306 - DNA, 201 bp, Homo sapiens
catttcaccacgttggccaggatgatctcgatctcctgacctcgtgatccacccgccttggcctcccaaagtgctgggattacaggcgtgagccaccgcaygcagcctacttctttagttttagataattctttgtagactcataacatgtctgtatatttctggctttccagcatggtggcatctttattagctattgaa

SEQ ID NO: 39307 - DNA, 201 bp, Homo sapiens
gatctcgatctcctgacctcgtgatccacccgccttggcctcccaaagtgctgggattacaggcgtgagccaccgcacgcagcctacttctttagttttarataattctttgtagactcataacatgtctgtatatttctggctttccagcatggtggcatctttattagctattgaatcttacattcaaaggccagcaca

SEQ ID NO: 39308 - DNA, 201 bp, Homo sapiens
cccaggctggagtgcagtggcgcgatctcggctcactgcaagctccgccttctgggttcacgccattctcctgcctcagcctcccgagtagctgggaccasaggctcccacaaccacgcccggctaattttttgtatttttagtagagacggggtttcaccgagttagccatgatggtctcaatctcctgaccttgtgatc

SEQ ID NO: 39309 - DNA, 201 bp, Homo sapiens
cgatagggaaactgtgaggctggaatccgacataaaccctgagaatgagcatcggtggcctctgggtgatggctctgaggaaccccagaaagtcaggctgygcagtcagcgaagcacaagaaagccaggctggcatgcgggccactgtgtgcaggtcacatactaaattatacatttcaggaagaagtgctaccgagtttc

SEQ ID NO: 39310 - DNA, 201 bp, Homo sapiens
ggcctcccaaagtgctgggattacaggcctgagccacggcgcctggcccaatcttctgtttctttgtccactgttgattaaaatttctggtgaattattgwaaagatgcgccttctttttttttaacaataaagtagctattttttattcactttgatttggatcattggaaatattcaacaataaataaaatagagaagg

SEQ ID NO: 39311 - DNA, 201 bp, Homo sapiens
ttctgccaggaacccagacttttccatacctccattgaaatctaaggggaggctgccaagcattcttcagtcttacattctgtgtgccttcaggcttaacrccacacagaaacacaaaggcttatggctcctgccctttataacagcagccagagcagccaggatgtggggaccagtgtcccaaggctgtgtagggtactg

SEQ ID NO: 39312 - DNA, 201 bp, Homo sapiens
agttcttttttttcagtaaatatgttgttttaacatcttctggtcttcacagttcctaatgtgacatctaatcattcaaattattatctccctggacgtgycatttttctctagctgctttaaagaatttttctttatatttggatttcaacaatttgattataattggtttctttgagtatatctttcaccaaattggga

SEQ ID NO: 39313 - DNA, 201 bp, Homo sapiens
atagtaccaagccattcatgaggaatccactcccatgacccaaacatctgccaccaggacctacctccaatactgaggattacatctcaacatgagatttrgaggggacatccaaactatatcacccagaaatggtccaacttcaaggtcttgcagtatttgagataatgtgtgcactgctcaggatcacaaaggcttcta

SEQ ID NO: 39314 - DNA, 201 bp, Homo sapiens
ttttctctagctgctttaaagaatttttctttatatttggatttcaacaatttgattataattggtttctttgagtatatctttcaccaaattgggaacayttttagccattatttcttcaaatgttttttctgcaccaatctctttttctgatcctcgggaacttcagtgacacatattttagaccttttgatatctgct

SEQ ID NO: 39315 - DNA, 201 bp, Homo sapiens
caacctctcatcctgcaagtgactgcagacgtgggttcttaactgaatattagtttgtattttacatacttttatataattataataatacactgtacttyttattgtctggcttcttatacttagcataattattgtgagattattcaatatggtgacatgtatcaatagtttgtttctttttattactgagcagtattc

SEQ ID NO: 39316 - DNA, 201 bp, Homo sapiens
cctccatctccccctttttactctccatgctctgtccatgttggccttctgactccttgagtacgacaagtgattcctcctttcgaagtccttccgtgtgmagttcatgccctggagatgcttgcacaggtcttcaggtttctggctctttctgaccttcaggttttggcttcaaggtccactccccaggaaagcatttcc

SEQ ID NO: 39317 - DNA, 201 bp, Homo sapiens
cctgcctcagcctcccaaagtgctgttaaaatcctttggccacttaaaaaaatgggctaccttttattgttgagttgttagagttcttcatatattctagwtgcaaatctcttatgcagtaaatgatttgcaaatgtttctcccattttataggttatctttccgtgtttttgatgatgtctttggatgcctaatgtttta

SEQ ID NO: 39318 - DNA, 201 bp, Homo sapiens
aagaatctcctaattaaaaaactgtggccagcaatctacctttagaaagcatctcacttctgtgtatgagaaggtgtatgtgctctgcatcgatctactcrcagagctgcatgaacagacatcagttaagagcgtgtactttaatgtggttgataattgtaatcacatcatgcaaaatgttgttaggttccggggacgttt

SEQ ID NO: 39319 - DNA, 201 bp, Homo sapiens
tggatcctaaaagaatctcctaattaaaaaactgtggccagcaatctacctttagaaagcatctcacttctgtgtatgagaaggtgtatgtgctctgcatygatctactcgcagagctgcatgaacagacatcagttaagagcgtgtactttaatgtggttgataattgtaatcacatcatgcaaaatgttgttaggttcc

SEQ ID NO: 39320 - DNA, 201 bp, Homo sapiens
agttgtctcaaacatatttttaaagccattgtcatttgccatctcaagcagttgatcctcttctagcacagacagtcagtttaccgggcttattcacaaaygggtcgcggatccattccttcccagttcggggttcttttgtggttggtagtattgggtaggtgatcacgtgtcagccgcgggaaagaaggccctggctcc

SEQ ID NO: 39321 - DNA, 201 bp, Homo sapiens
cccacagccaacataatactgaatggggaaaagttgaaagcattccctctgagaactgaaacaagacaaggatgcccactcctcttcaacatagaactggragtcctagccagagcaatcagacaagagaaagaaataaagggcatccaaatcggtaaagaggaagtcaaactgtggctgtttgctgatgatatgatcgtt

SEQ ID NO: 39322 - DNA, 201 bp, Homo sapiens
ggggagggtctcatgaaggccatagaagcaaggggcagggaggacagggaaggccttttaaacctagtctcagaactagcacattgtcaacttttgctaaygttctaatggccaaagcaggtcacatggcaaaccaggagaagtgaaggagtggaaaagcaggctctgttttttgagggagaaactgaaaagttacatggt

SEQ ID NO: 39323 - DNA, 201 bp, Homo sapiens
acaggaaagagcaaagaatgagggccaataatgccagccgtcacagtagtcactctcggaaacgattaattacagcattgggcttaaaatccaggatctcwtgatctatatatcaggcctgggtgaagctccttttgatccagaggcctgttctgcccctgacacccaacataaaaagtcaatgaatgctcccatctgaaa

SEQ ID NO: 39324 - DNA, 201 bp, Homo sapiens
accccaaccaatgactgcaaccattgcagccaaattcaacccgtaccaatggctgcaaacagaacacagcttaattgttaactcctaacaattaagctgtwtggcttctcccaaatatatcaagatatgggaactattgagggcaatacatctgtatcgtggtgtgtatttttaggacttcatatttaccattcatagttg

SEQ ID NO: 39325 - DNA, 201 bp, Homo sapiens
ttgtggttttgatttgcattcctctaatgatctgtgatttgagctttttctcatatgcttcttagctgcatatatgtcttcttttgaaaaatggctgttcrtgtcctttgcctactttttaatggtattgtttacttttttcttgtaaatttgtttaagatctttatagatgctggatattagacctttgtaagatgcata

SEQ ID NO: 39326 - DNA, 201 bp, Homo sapiens
gtttatgtatatatgtatataataaatactttttaataaatttttaataaaactttttaagaaatttttaataaaagctttattgtggtgtaagtaacagmacaaagtgaatatatttaaattgcacaattttagtttgatgtatgcgtactcctgtgaagttgtcatcacaaatccagaaaatgaacacacccatcacac

SEQ ID NO: 39327 - DNA, 201 bp, Homo sapiens
atggtgaggccccatgtctacaaaaaaataaaaaaaaaaaattaaccggatatggtggtgtgcacccatagtcccagctacttggaaagctgaggtgggargattgcttgaacccaggagctctcggatgcagtgagctatgatcaggccactgcactccagccttgggaacagagcgagacccggtcacaaaaacaatac

SEQ ID NO: 39328 - DNA, 201 bp, Homo sapiens
ttggaagtccaaggtggtaggataacttgagcgtaggagttcgagaccagcctgagcaacatggtgaggccccatgtctacaaaaaaataaaaaaaaaaaattaaccggatatggtggtgtgcacccatagtcccagctacttggaaagctgaggtgggaggattgcttgaacccaggagctctcggatgcagtgagctat

SEQ ID NO: 39329 - DNA, 201 bp, Homo sapiens
atcccaagcactttggaagtccaaggtggtaggataacttgagcgtaggagttcgagaccagcctgagcaacatggtgaggccccatgtctacaaaaaaataaaaaaaaaaaattaaccggatatggtggtgtgcacccatagtcccagctacttggaaagctgaggtgggaggattgcttgaacccaggagctctcggat

SEQ ID NO: 39330 - DNA, 201 bp, Homo sapiens
ctaggatcagtggctcacacctataatcccaagcactttggaagtccaaggtggtaggataacttgagcgtaggagttcgagaccagcctgagcaacatgrtgaggccccatgtctacaaaaaaataaaaaaaaaaaattaaccggatatggtggtgtgcacccatagtcccagctacttggaaagctgaggtgggaggat

SEQ ID NO: 39331 - DNA, 201 bp, Homo sapiens
ccagcacttttgcaggctgaggcaggtgcatcgcttgaactcaggagttcaagacaagcctgggcaatatagtgaaaccccgtctctacaaaaaaatacaagtcagctgggcgtggtggtgtgtgcctgtagtccaagctacaccggagtctgaggtgggaggatcgcttgagcctgggaagtggaggctgcagtgagcca

SEQ ID NO: 39332 - DNA, 201 bp, Homo sapiens
tttgttgtctttgttattttaattgttgctttagagattatagcagacatctttaacttatcacagtctaccttcaagtcacattataccacttgatgtadaatacatatagtataatgtagaatgtaataccttacaatattatagtttcatttctccccaaccctacagctatttctactatatatttgctttagcaca

SEQ ID NO: 39333 - DNA, 201 bp, Homo sapiens
tttgttgtttttttagacagagtcttgctctattgcccaggctggagtgcaggggtgcgatcttggctcaatgcaacctccacctccctggttcaagcaawtcccctgcctcacctcccaagtagctgggattacaggcacaggccaccacgcccagctaattcttttgtatttttagtagagatcgggtttcaccatgtt

SEQ ID NO: 39334 - DNA, 201 bp, Homo sapiens
attctccaaagagaatctttgtcacaaatatgttcctttagcaccaacttacatgacatgactttcgggtcaaatgcaggtgacaatgaccggtctgtgcstcacacagggttcccaccgtctgcttaggttttaaggtgaaactgattctaatgatgttttcagtctgtgtggttttgtgtgtgaaactaaaggcttgct

SEQ ID NO: 39335 - DNA, 201 bp, Homo sapiens
tgtgtgaaactaaaggcttgctctaagaaagcacatggggctgaggcaggagaatggcgtgaacccaggaggcggagcttgcagtgagccgagatcgtgcyactgccctccagcctgggcgacagagcaagactccgtctcaaaaaaaaaaaaaaaaaaaaaaaagcacatgggcaggctaatgatgattttgtctctgag

SEQ ID NO: 39336 - DNA, 201 bp, Homo sapiens
aaactaaaggcttgctctaagaaagcacatggggctgaggcaggagaatggcgtgaacccaggaggcggagcttgcagtgagccgagatcgtgccactgcmctccagcctgggcgacagagcaagactccgtctcaaaaaaaaaaaaaaaaaaaaaaaagcacatgggcaggctaatgatgattttgtctctgagtttgaa

SEQ ID NO: 39337 - DNA, 201 bp, Homo sapiens
aagcagtttgggaggaggaatcaggaattccattttaaacaggttacatttgagttgcctgtgaagcgtccagtaagaggtattcctaagatgatgtaatrgtcagacttcatttcaaaagaaatatctgagttagggatataattggagtcttctcaatttgcaaatgacatttatagccctgggaattaatgaagtcac

SEQ ID NO: 39338 - DNA, 201 bp, Homo sapiens
ataaacacacctttgcaccttcctgccagctcatcatccaggtctatcttgttcctttgccgcatgcacaagttaacgaagagcaggcccctgtctacccsctgcaccatcctctctctcttcagccctcgcagtctggctctaaccctcctttgtgtggaaacccagaggtccggtgaccattgctatagctgaggcatt

SEQ ID NO: 39339 - DNA, 201 bp, Homo sapiens
agcaagactccgtctcaaaaaaaaaaaaaaaaaaaaaaaagcacatgggcaggctaatgatgattttgtctctgagtttgaaggaattcagccagtgggcrgagggaaagtcctcattgtagaaattaaatttatatcccaaggaaagtcagcctctttttggaaaatctcaggtagcatccaaaatttagcaaatggttt

SEQ ID NO: 39340 - DNA, 201 bp, Homo sapiens
acaaaggggaaaatattcatttgatgaaaagaaactaaagtaaatagaagcagggcatagataggaggggaggaacttggccaggggcggtggctcacacyttcagcactttgggaggccagggagggaggatcacttgagctcaggagtttgagactagcttgggcaacatggtgaaaacttgttgctacaaaatgaaaa

SEQ ID NO: 39341 - DNA, 201 bp, Homo sapiens
acagaaatgctttggagctcctcttacagagtatgagacacagtgacagaggcagctttccccgaatgtgccggccactttctctttagcactgtcgtggycccaggctggggcagctccagtgagcagctccaatgcagccggaagacactatggatgtcacactcggcagaaatggcagctccctcaggtttttgtgac

SEQ ID NO: 39342 - DNA, 201 bp, Homo sapiens
ggccaacagaaatgctttggagctcctcttacagagtatgagacacagtgacagaggcagctttccccgaatgtgccggccactttctctttagcactgtsgtggccccaggctggggcagctccagtgagcagctccaatgcagccggaagacactatggatgtcacactcggcagaaatggcagctccctcaggttttt

SEQ ID NO: 39343 - DNA, 201 bp, Homo sapiens
aatgacctgaccatcccctgatgctctcctaacattcctggtgttggcaggggggctcttctgccctgctcctgcctgactagctacctactaaaacatarctgatgatcccatacaagctgacttctccaagggttgaagggccaggtagggtggacttgaccagggacaaggtgctaattgtcagaggaaagggtaatt

SEQ ID NO: 39344 - DNA, 201 bp, Homo sapiens
accatttacacttagtgtgatgattgatatgactaaatttttgtttgtttgttttgtttgttttttgttattttgtttgtttgtttttgagatggagtctygctctgtcgcccatgctggagtgcagtggcgcgatcttggctcactgcaagctccgcctcctgggttcatgccattctcctgcctcagcctcccaagtac

SEQ ID NO: 39345 - DNA, 201 bp, Homo sapiens
atatctgaccatctatgtcttttatttggaatgtttagaccatttacacttagtgtgatgattgatatgactaaatttttgtttgtttgttttgtttgttttttgttattttgtttgtttgtttttgagatggagtcttgctctgtcgcccatgctggagtgcagtggcgcgatcttggctcactgcaagctccgcctcct

SEQ ID NO: 39346 - DNA, 201 bp, Homo sapiens
tatatctgaccatctatgtcttttatttggaatgtttagaccatttacacttagtgtgatgattgatatgactaaatttttgtttgtttgttttgtttgttttttgttattttgtttgtttgtttttgagatggagtcttgctctgtcgcccatgctggagtgcagtggcgcgatcttggctcactgcaagctccgcctcc

SEQ ID NO: 39347 - DNA, 201 bp, Homo sapiens
ttatatctgaccatctatgtcttttatttggaatgtttagaccatttacacttagtgtgatgattgatatgactaaatttttgtttgtttgttttgtttgttttttgttattttgtttgtttgtttttgagatggagtcttgctctgtcgcccatgctggagtgcagtggcgcgatcttggctcactgcaagctccgcctc

SEQ ID NO: 39348 - DNA, 201 bp, Homo sapiens
agaacacagcttaattgttaactcctaacaattaagctgtatggcttctcccaaatatatcaagatatgggaactattgagggcaatacatctgtatcgtkgtgtgtatttttaggacttcatatttaccattcatagttgccatagaattcaggctggaggaaaggcttcagcccaggtgctggtcaggcatcctctctc

SEQ ID NO: 39349 - DNA, 201 bp, Homo sapiens
attatatctgaccatctatgtcttttatttggaatgtttagaccatttacacttagtgtgatgattgatatgactaaatttttgtttgtttgttttgtttgttttttgttattttgtttgtttgtttttgagatggagtcttgctctgtcgcccatgctggagtgcagtggcgcgatcttggctcactgcaagctccgcct

SEQ ID NO: 39350 - DNA, 201 bp, Homo sapiens
ggcaatcactgcctgctgcacccttgacctccttggttcaagcaatcctgccacctcagcctcctgagtagctgagaccacaggaatgctaatttttttttaattttttttattttttcacagagacggggtctccttatgttgcccaggctggttttgaactccagagctcaagtgatcctcctgtctcagcctcccaaa

SEQ ID NO: 39351 - DNA, 201 bp, Homo sapiens
tctggctttcttttgactgctgttagtatggcacatctttttccatcatcttattttttaatctatttgtggttctctctctctctctcactctctctctmtctatatatatagatgtatctgtatctctatctatatctctatctatatctatatctatgtctatatctatataattttttgagacagagtctcactctc

SEQ ID NO: 39352 - DNA, 201 bp, Homo sapiens
cctaacatgggtagctcagaaaacacccaacggctgatggggctctcaggccgcatggttgcctgggtgggcagtggggggatcatgtcctcacgatttttaggagacttttgtccagctggaagggttttcaataaaccaccataatacatcacaggtcttggcaaaggttgtttccctctcaatctttattttgtcttt

SEQ ID NO: 39353 - DNA, 201 bp, Homo sapiens
gatctcggctcactgcaagctccgccttctgggttcacgccattctcctgcctcagcctcccgagtagctgggaccagaggctcccacaaccacgcccggstaattttttgtatttttagtagagacggggtttcaccgagttagccatgatggtctcaatctcctgaccttgtgatccgcccgcctcggcctcccaaagt

SEQ ID NO: 39354 - DNA, 201 bp, Homo sapiens
cctctggtatgatacaatcttttcttttttttattttctttttttttttttttttgagacggagtctcactctgtcgcccaggctggagtgcagtggcgcratctcggctcactgcaagctccgccttctgggttcacgccattctcctgcctcagcctcccgagtagctgggaccagaggctcccacaaccacgcccggc

SEQ ID NO: 39355 - DNA, 201 bp, Homo sapiens
ataaccaagatcagagcagaactagatgaaattgaaacaaaaaaaatacaaaagattaatgaaataaaaagctggttctttgaaaagataaataaaattgrtagaccattagcaagattaaccaagaaaagaagagagaaaatccaaataaactcaataagaaatgaaatgggagatgttataactgacaccacagaaata

SEQ ID NO: 39356 - DNA, 201 bp, Homo sapiens
caggctgaggcaggtgcatcgcttgaactcaggagttcaagacaagcctgggcaatatagtgaaaccccgtctctacaaaaaaatacaagtcagctgggcrtggtggtgtgtgcctgtagtccaagctacaccggagtctgaggtgggaggatcgcttgagcctgggaagtggaggctgcagtgagccaagaccacgccac

SEQ ID NO: 39357 - DNA, 201 bp, Homo sapiens
tatacacagtaaagatttggtagatctttgtgtgttaatataaaatgatctttaagatattttgttgggctataaaaatttgaataaagtctatacaatartatcttattctaatttttgaataaggtctataatatttttccaatgttaatttccagattttgattgctatcgcatgattgtatgagttgttaacatgaa

SEQ ID NO: 39358 - DNA, 201 bp, Homo sapiens
taggaatatagtcttcaaaattcaccttttaaatgcacgattcaaatttttttttcttggctgggtgaggtggctcacacctgtaactccagcacttttgsaggctgaggcaggtgcatcgcttgaactcaggagttcaagacaagcctgggcaatatagtgaaaccccgtctctacaaaaaaatacaagtcagctgggcg

SEQ ID NO: 39359 - DNA, 201 bp, Homo sapiens
cttcttgcttcactctttctgtgacataagacagaaattttcacagctcttccacaccatgggtgtatatggactgaaccagcataacagcaaataaacgrtggtggacccaggtactggaaatagccagaccacttaccttaagggaaaatgtaccaggaagaaccttagtgtccagccagcttctaggaactgcttttt

SEQ ID NO: 39360 - DNA, 201 bp, Homo sapiens
gaaattttcacagctcttccacaccatgggtgtatatggactgaaccagcataacagcaaataaacggtggtggacccaggtactggaaatagccagaccrcttaccttaagggaaaatgtaccaggaagaaccttagtgtccagccagcttctaggaactgctttttggtctccaaaggatggggactggtggtgggcca

SEQ ID NO: 39361 - DNA, 201 bp, Homo sapiens
agattgtcatcatggcatgaacctaaaatggtttataaatttaatgcaaaccccagcaaaactgcagtaggatagcaggggtttttggtgtttttttttcytttttagaatcagacaaattgattctaaaatgtatgtggaaacgcaaaaacaaatctaaaacagccatataatttttgacaaagaaaaacaagtttagag

SEQ ID NO: 39362 - DNA, 201 bp, Homo sapiens
aatagccagaccacttaccttaagggaaaatgtaccaggaagaaccttagtgtccagccagcttctaggaactgctttttggtctccaaaggatggggacyggtggtgggccaagcagcctcgggtgagtgtggcctcctggttctcgatgctgatactgaacatgcagtaaaaccctgtgagggagcacgatggctagga

SEQ ID NO: 39363 - DNA, 201 bp, Homo sapiens
ctccaaaggatggggactggtggtgggccaagcagcctcgggtgagtgtggcctcctggttctcgatgctgatactgaacatgcagtaaaaccctgtgagrgagcacgatggctaggaacagccgattagcagatgaatgagaataaatgggagaaagtggagccttttccagccagtgttctttaacaatgatcctcact

SEQ ID NO: 39364 - DNA, 201 bp, Homo sapiens
tcctaacatttcacctacgaattgaccccttgcagggaatgagacaacacaacttctcccataggcctggtggtcagagaggctggatcaagaatctccayagcccagcgagaagccacgcgaacacacccctgtgtgggtatccgtgacctggcggcctgcagaactcctgggccagagacgtcctcatcctgttggaat

SEQ ID NO: 39365 - DNA, 201 bp, Homo sapiens
ggttgcatgtggcccaggacaactttgaatgcagcccaacacaagtttgtaaactttcttaaaacattatgagatttatgcatggacttttttttttttttagctcgtcagctatcattagtgttagtgtatttcatgtgtggcccaagacaattctgcttcttacaatgtggcccagggaagccagaagattggacaccc

SEQ ID NO: 39366 - DNA, 201 bp, Homo sapiens
cagtgaaaagacccatagcctgaacttagactgatatggtttggctgtgtccccacccaaatcttagcttgaattgtaataatccccacatgtcaagggakgagccaggtggaggtaactgaatcgtaagggcagtttcctccatagtgttctcatggtagtggatcagtctcacaagatctgatagttttataaagggga

SEQ ID NO: 39367 - DNA, 201 bp, Homo sapiens
tgtttaatgtctacatttcaatgagtttggacatatacctacatccatgataccgtcaccaaatcaaggtatcaaacatctccatctactcaaaattgttmttgtattgctttgtactttttaaattttatatagtatattttaattacatttgaaatcttttatcaaatacatgacttgcactaattagaacttaaacac

SEQ ID NO: 39368 - DNA, 201 bp, Homo sapiens
ttttaaatgtttcattgaggtgtaattgatatacaaataatggcacatgtttaatgtctacatttcaatgagtttggacatatacctacatccatgatacygtcaccaaatcaaggtatcaaacatctccatctactcaaaattgttcttgtattgctttgtactttttaaattttatatagtatattttaattacatttg

SEQ ID NO: 39369 - DNA, 201 bp, Homo sapiens
agagtactgataaagaatggagtgtggttaaagaaggcaaatgatttctttctgtttttaatttaacttttattttaagttcaggggtacatgtgttatayaggaaaatttgtgtcataggggatttgttgtacagattatttcctcacccaggtactaagcctagtatccaatagctatttttcctgatcatttccctcc

SEQ ID NO: 39370 - DNA, 201 bp, Homo sapiens
aacttctagttttaatgattaggctgttttaaacctgattataagtaaactgtcttaatctttgtacagatgccatatactgatttgcccatattcctaastaggaatatagtcttcaaaattcaccttttaaatgcacgattcaaatttttttttcttggctgggtgaggtggctcacacctgtaactccagcacttttg

SEQ ID NO: 39371 - DNA, 201 bp, Homo sapiens
acccaggaggcagagattgcagtgagccgagatcctgccactgcattccagcctgggcaggagggcgaggctccatctcaaaagaaaaaaaaaaaaaaaamaaaaaaaacaaaaaaagccattcaccagagaaagccaccctgcagagaaaaatgggtgtgtgtcccccattctagttcttctgtcagggataaaacataa

SEQ ID NO: 39372 - DNA, 201 bp, Homo sapiens
tattcctaagatgatgtaatagtcagacttcatttcaaaagaaatatctgagttagggatataattggagtcttctcaatttgcaaatgacatttatagcyctgggaattaatgaagtcacctaaggaaagagtactgataaagaatggagtgtggttaaagaaggcaaatgatttctttctgtttttaatttaactttta

SEQ ID NO: 39373 - DNA, 201 bp, Homo sapiens
ataaacataagtacaaatatataatatctatctcctatttgttctgtttttccgaagaaccctgactaacacagtcgtggatctctttaactttctattarcttctagttttaatgattaggctgttttaaacctgattataagtaaactgtcttaatctttgtacagatgccatatactgatttgcccatattcctaagt

SEQ ID NO: 39374 - DNA, 201 bp, Homo sapiens
gataccacgctcagagtgggctctttaggaggactccatgcctgcaacagctgccaacagggagcacgcaaaacaggtcatccaacagccacatttcaggkaatcaggggctcgctggcggtttccagactgttctgtactctcacaaaaagaaacacaaaccaacttactgtggattcgagccagtcgaagatatgcttc

SEQ ID NO: 39375 - DNA, 201 bp, Homo sapiens
cttgaacccaggaggcagagattgcagtgagccgagatcctgccactgcattccagcctgggcaggagggcgaggctccatctcaaaagaaaaaaaaaaamaaaaaaaaaaaaacaaaaaaagccattcaccagagaaagccaccctgcagagaaaaatgggtgtgtgtcccccattctagttcttctgtcagggataaaa

SEQ ID NO: 39376 - DNA, 201 bp, Homo sapiens
ccagagaattggtaagagagtatttctaggtgtctgtgagggcatttctggaagaggttagtattgaattggtagacagagtgaagatcaccttcaccaaygtgggtgagcagcttccaatctattgagggccatttagcacaaaaggacagaggatggctgagttcgctctctctgcctgagcggagccgtcatctttgc

SEQ ID NO: 39377 - DNA, 201 bp, Homo sapiens
caaattcaaagagaaaaacttaaaatccctgctgagaggactcacagaccccctgaaggaagtagattgctcctgtagaacccaggcgacaccccaaataytgtgctggtatccacagctgagaaacccacaggtggttcacatcacaggactctgtgcagacaacccccagtaccaacccagagcctggtagacttgctg

SEQ ID NO: 39378 - DNA, 201 bp, Homo sapiens
ccaggcgtggtggcacatgcctgtaatcctagctactcgggcggctgagacaggagaatcacttgaactcgggagggggaggttgcggtgaggcaagatcrcaccattgcactccagcctgggcaataagaatgaaactccatctcgaaaaaaaaaacgttttaatattcgttgcatattacattaggatatacttttgta

SEQ ID NO: 39379 - DNA, 201 bp, Homo sapiens
gcgaacacacccctgtgtgggtatccgtgacctggcggcctgcagaactcctgggccagagacgtcctcatcctgttggaatatccaggtatctccactcygaatatcctcatcttcctggaacccctctttttctcctaacattctcttaaatgaaattccatatctgctacaacacagaaagagaggcggaacaagaaa

SEQ ID NO: 39380 - DNA, 201 bp, Homo sapiens
gagaatgtgtctcgtacttctcagcatctgaaacgcagccttcgctaatgggtcagtttcactggacgtactcccaggatcatagatggcagccggggaargcagtgagggtggaaatgtctcactaggctgaattgaagtgaggcctacccgttgcctcctttgcatgtgtttaagtattagaagaatctagtaatttgc

SEQ ID NO: 39381 - DNA, 201 bp, Homo sapiens
aaggaccccatttctacatatctgtcccagagaaatgaaaagcttatctttaactgaaaaacctggacatgcgtgtttatgtcaacattattcataattaytcaaaactggaagcaacagaaatgaggccaaatctggaggctttatctgaccgttatgatccactaacctcccgtcgtgcagaagactgtgtgttactct

SEQ ID NO: 39382 - DNA, 201 bp, Homo sapiens
ctgtgctggcggctcctttcctctctctgatctgcaaacgtgagccctcttttctgcacagcctcagattccgcctaagagattcacccattctttgactwtatggcccatttatgcctcagtgattcccgaatgtgtatatccaactcaggcctctttaagtgattacttgacaaatccatctgaaaatcacacagctac

SEQ ID NO: 39383 - DNA, 201 bp, Homo sapiens
ggtttttaaataaatgtccattatcagatttttaagaatcaacaaaataaatatgtagaatattcacaaatatttagaaactagtgacagtcttctaaatmgtgcatgtgtaaaaggagaaatcacagaaaaattgtgaaatattgtggaccaaatgataaaacacataccaaaatttgttgtatgcagctaaaactgact

SEQ ID NO: 39384 - DNA, 201 bp, Homo sapiens
atttttaagaatcaacaaaataaatatgtagaatattcacaaatatttagaaactagtgacagtcttctaaatagtgcatgtgtaaaaggagaaatcacasaaaaattgtgaaatattgtggaccaaatgataaaacacataccaaaatttgttgtatgcagctaaaactgactttagaggaaaaatgtataatattaaat

SEQ ID NO: 39385 - DNA, 201 bp, Homo sapiens
tgcttctggtgagggactcaggaagctaacaatcatgacagaaggcaaaggggaagtagacatctcacatataatgagagcaggagcaagagagaaagtgsggtgggggcaggtgccacacacttttaaacaactacatctcacaataactcactcattctcatgaggacagcaccaaaccattcatgagaaatccacccc

SEQ ID NO: 39386 - DNA, 201 bp, Homo sapiens
agtaactgattttttaaagtcccttttatgaaatgtgttggagacacattttttatttctgtctgtctcttacaagcttctgctcttcctcttccactcayaacctggatactcagctgcgttttcagaggcagcaccatctgctcatagaattcattggcaaactcaattttcaggtacaggtgttgccatgcactctcc

SEQ ID NO: 39387 - DNA, 201 bp, Homo sapiens
attttttaaaaaatggtggaggctgaggtaagatttcaggttagcagtagtaaaattctcttttccactaagggcactttattcagagtctgcttaaaatrtgagagggcatcacacacattaataatgaataattccatttcattttttttaagtgatttacaagaaacttgttgcatagattttttaaaatcaaccaaa

SEQ ID NO: 39388 - DNA, 201 bp, Homo sapiens
catgatcccactataagaatgacaactttgaatatttgttatttcttaatttttgcaacaactgtgaaaggcaaataactaaggaggccctgaatcctagytgttagaggaacaggcatccatcagctttgtgaccttgggaaatcctttcaccagctccatagagttgttaatagaagaattcttgagctgatacataaa

SEQ ID NO: 39389 - DNA, 201 bp, Homo sapiens
tgagccagggctgaaatgcaggctcagctctgttttacattccaagtcccttcttcactcgcttctcagctgccttttccctcgatcttgccatggtaacrtcccagacagacctttgctttgccaagatctgatgttgacataataccccatgctatccccaggcttcttcttgagagattgaatgtttccacgttgctt

SEQ ID NO: 39390 - DNA, 201 bp, Homo sapiens
ctttgcaccttcctgccagctcatcatccaggtctatcttgttcctttgccgcatgcacaagttaacgaagagcaggcccctgtctaccccctgcaccatmctctctctcttcagccctcgcagtctggctctaaccctcctttgtgtggaaacccagaggtccggtgaccattgctatagctgaggcattgctctgtctt

SEQ ID NO: 39391 - DNA, 201 bp, Homo sapiens
ctgccagctcatcatccaggtctatcttgttcctttgccgcatgcacaagttaacgaagagcaggcccctgtctaccccctgcaccatcctctctctcttyagccctcgcagtctggctctaaccctcctttgtgtggaaacccagaggtccggtgaccattgctatagctgaggcattgctctgtcttctgtttgtcaac

SEQ ID NO: 39392 - DNA, 201 bp, Homo sapiens
tttgcctcttagtgcacatgcttgagcccactggcccaagtcctgagatcttttcgggaagctgctgatcactggcttcaggtattttctgctgggagacrgccttaattggttatgaccaattattattttagagagacagttctcaatgacctgaccatcccctgatgctctcctaacattcctggtgttggcaggggg

SEQ ID NO: 39393 - DNA, 201 bp, Homo sapiens
gaagggccaggtagggtggacttgaccagggacaaggtgctaattgtcagaggaaagggtaattttttatatgctgtagcagatgcctctctccatacccrcatcatccaatgtctgcacctgaaggacagaacagttataacagttttttaatgtagaaaaagccatatcactaaaaatgctattaatccaatggggcca

SEQ ID NO: 39394 - DNA, 201 bp, Homo sapiens
agggccaaatggctttactggtaaattttataaagcattttgtgagagcagcacaccttaataacaaaaattgacaaagatgttaccaaagaaaaaaaaaagccatatctacatcccttaggaatttggtaaccaaaatccccatgaaaatgttagcaaacaaaatccagtagtagataagaagtctactacacaatgacc

SEQ ID NO: 39395 - DNA, 201 bp, Homo sapiens
gcgcagatgcacgtgcacagacagctggagagcaaggggacgtcctgccggtgtgaagcatggccttggctccttacaatcactggtcaggaaaaaaaaaacaaaaaaaaaatgagtagtgaaaaagtaaccagctcaggatataatttgatagaggagtaacgcaatggattttttcttctggttttaataaaaaatcaa

SEQ ID NO: 39396 - DNA, 201 bp, Homo sapiens
aatctatttctacacttcaagtaattatctttcaaaccatttttgtctatttttcctttcagttctttccatccttgcttcatgttcattgaagctgtttttttttttttttttttttggtacatgcacatttaggattgctctatcttttggtggattgagcctttcattgttagtggtggtaagtctgtatgggtctgc

SEQ ID NO: 39397 - DNA, 201 bp, Homo sapiens
ttctgaccacaaacttagtctttagtcttgtttacttatgggcagagtttctaatctcagtttcattctcaaatattttgttatgcttctttggatctgtkctgcccattcacagctaagacctaacaacaagattgtctaagttcaaaagcaaagttagaaatccccttctttggcttttttgtccaaactggtattgcc

SEQ ID NO: 39398 - DNA, 201 bp, Homo sapiens
aaatctatttctacacttcaagtaattatctttcaaaccatttttgtctatttttcctttcagttctttccatccttgcttcatgttcattgaagctgtttttttttttttttttttttggtacatgcacatttaggattgctctatcttttggtggattgagcctttcattgttagtggtggtaagtctgtatgggtctg

SEQ ID NO: 39399 - DNA, 201 bp, Homo sapiens
tcaatccccaagttcacattccttatatcagcatttaaagtgacaaagctctctaaacattgcttcagctgcatcccacagattttaatatgttggatttktgttgtcatgcatatcaaaatatttgctagtttccccttgatttcatttttggcctatgaactatttagaagtgtgttctttaattgtcagatatttaaa

SEQ ID NO: 39400 - DNA, 201 bp, Homo sapiens
taaatctatttctacacttcaagtaattatctttcaaaccatttttgtctatttttcctttcagttctttccatccttgcttcatgttcattgaagctgtttttttttttttttttttttggtacatgcacatttaggattgctctatcttttggtggattgagcctttcattgttagtggtggtaagtctgtatgggtct

SEQ ID NO: 39401 - DNA, 201 bp, Homo sapiens
taataagccatagaatataatcaagatcattcagaaagatacacaagcaaatccacaaaaggggattagaaacccagtgtgttcaggtattcttgcattgytgtaatgaaatacctgaggctgggtaatttataaagaacagaggtttaattggctcatggttctgcaggctgtacagaaagtgtggggccagcatctgat

SEQ ID NO: 39402 - DNA, 201 bp, Homo sapiens
ataaatctatttctacacttcaagtaattatctttcaaaccatttttgtctatttttcctttcagttctttccatccttgcttcatgttcattgaagctgtttttttttttttttttttttggtacatgcacatttaggattgctctatcttttggtggattgagcctttcattgttagtggtggtaagtctgtatgggtc

SEQ ID NO: 39403 - DNA, 201 bp, Homo sapiens
cttatgtgacttgtccaagatcccacaattggaagaagttgagccagggctgaaatgcaggctcagctctgttttacattccaagtcccttcttcactcgyttctcagctgccttttccctcgatcttgccatggtaacatcccagacagacctttgctttgccaagatctgatgttgacataataccccatgctatcccc

SEQ ID NO: 39404 - DNA, 201 bp, Homo sapiens
tgaactacagcctttcctaaaagttcacaacaaatgtccttagcagcaggcaggatcagctcttcactagcagtaaagggcttcttagcttcagcaatgcrgttagccactaagagtgatgctctcagtgcagacacatttgatgaagtggtggccttcaataattgcttctgttctttgtgttcacattttcttcttttg

SEQ ID NO: 39405 - DNA, 201 bp, Homo sapiens
agcaaattctgagaaaggtgttttcctcattggcaaaatggtttaggaagcccttgacaaggttgtaataggagttaaaaatatgtgtgaacatatgtacktgaatatgtatagtatgtatgtgaatcgtgggtatatatatataaatatgtcaatgtatattgtgcatgtatacatatataaatgagtttatgtatatat

SEQ ID NO: 39406 - DNA, 201 bp, Homo sapiens
acacagtaaagatttggtagatctttgtgtgttaatataaaatgatctttaagatattttgttgggctataaaaatttgaataaagtctatacaatagtatcttattctaatttttgaataaggtctataatatttttccaatgttaatttccagattttgattgctatcgcatgattgtatgagttgttaacatgaaggt

SEQ ID NO: 39407 - DNA, 201 bp, Homo sapiens
atacacagtaaagatttggtagatctttgtgtgttaatataaaatgatctttaagatattttgttgggctataaaaatttgaataaagtctatacaatagyatcttattctaatttttgaataaggtctataatatttttccaatgttaatttccagattttgattgctatcgcatgattgtatgagttgttaacatgaag

SEQ ID NO: 39408 - DNA, 201 bp, Homo sapiens
atgctcatccatcagatttcagttccttcatcagttccttgagtggccaccacttctactgtgataagtcaccactgacctgggccactgctctgttctcrtcacagttacaaggtgagatttctttaagagattatttgactaacaattggcctcacccatttgattgtgagcttcgtgaacacatgcaacatttccttt

SEQ ID NO: 39409 - DNA, 201 bp, Homo sapiens
gcggaacgtgagctcaggacaggctctaagctgggccttgggacccatctcttgcccagggaaagggggtctttggagaactgttagctccctcagaccamatgcattcccaccacagccgaaaggcctcccaggaactagagcagtccacgagtgaggcccgggaagaggagtacaggacagtctgcagatacagggggt

SEQ ID NO: 39410 - DNA, 201 bp, Homo sapiens
gcccatttttttaagtggccaaaagattttaacaggcatttctccaaataaaatatagaaacagccaatgagcatatgcaaaattaatcagtaaggatatrcaaacaaaaccataatgatatactgcttcacatctgctaggatggctaaaaaaatttttaagacaataacaattgttggtgaggatatggataaattaaa

SEQ ID NO: 39411 - DNA, 201 bp, Homo sapiens
ctattatggtaggtgtttagtggtttctcattgtagtttcagtttgcattttcatattaattaattatgttgcacatattttcattttcttgttatctagyatatcttatcttgtgaagtgtgttaaaatcttttaccatattttgattttcttaaaatttagtagtgagaattctctacatattgtgtgtaggtacaagc

SEQ ID NO: 39412 - DNA, 201 bp, Homo sapiens
cttgttcaattgtttaaaaaagacagaaaaggaaagaaactgggagaaagaacaagagggataaataaaattatatcccagcacagaagacataaaatgtrccatgtcaataacaacctgaattataaatggactagacactccaggtaaatgacagtgattctcaggcaggtaaagtagcaagactcaacttcaaactct

SEQ ID NO: 39413 - DNA, 201 bp, Homo sapiens
atagggtgcagtgtacactgcttgggtgacaggtacaccaaaatctaacagatcaatgctaaagaacttgtgtaaccaaacaccacctgttccccaataayctatcgaaataaaaaataataataataataaaataaaatccctaattattttagctgtatgtatgctaacgaatgaatattaagtatgaatttttttgat

SEQ ID NO: 39414 - DNA, 201 bp, Homo sapiens
ggcacgatcttggttcactgcaacctctgcctcccagtttcaagtgattcttttgcctcagcctcccaagcagctgggactacaggtgcacaccaccacayccggctaatttttgtatttttagtagagacagcatttcaccacgttggccaggatgatctcgatctcctgacctcgtgatccacccgccttggcctccca

SEQ ID NO: 39415 - DNA, 201 bp, Homo sapiens
aacttgagagtcatcagaatcacgtttaatttctagatctctcatagctttgttgtttattctatgttttgttaatattctaacctttaacatcaggtggkttcaggctcaatggctcttctctattttgaggtcatcttctggagtctctaatataacatggagttgaaggtagggccatttccaacattttgaaatcct

SEQ ID NO: 39416 - DNA, 201 bp, Homo sapiens
tgagattctcctccccttttgaaccctaaatattttgtgatcctaagctttctcatttttcctaggaatttaattatcatctttatgccatgaactctaawgttaatctctagcccagactttcttccaagcttcaaacttttatatccaactgatgtgatatcactgccatctcaaactcagcatttctgaaaaaaaact

SEQ ID NO: 39417 - DNA, 201 bp, Homo sapiens
ccagactttcttccaagcttcaaacttttatatccaactgatgtgatatcactgccatctcaaactcagcatttctgaaaaaaaactctttgaaatgtacrgccagcacccagacccttcctcagtacacagggcaccattcattcagttaaacctagccattgcacacaaattccccctttgttttcaggttcacatcca

SEQ ID NO: 39418 - DNA, 201 bp, Homo sapiens
tgttttcaggttcacatccaattccaagcaaacctggtcaatcaacttcctgaatgatcccaatcctcctcttggttctgtctccatgtgtccaacatgtsctctcatctttcatggagatgaatgccaacacccaacaggtctttccgtacttattactgtgtcttagccccttcagttatcctctttttctttcctgaa

SEQ ID NO: 39419 - DNA, 201 bp, Homo sapiens
gtaagaaggtattctgcatgctgaaatgggttgtgcaaattggtacaacctctttcagggtcagttttgtagtttttattaaatgtaatatgcatataccytttggcccagaatttccaattctaggaaaatattctactagtaaaattcatatatatacacagtaaagatttggtagatctttgtgtgttaatataaaat

SEQ ID NO: 39420 - DNA, 201 bp, Homo sapiens
ggtggccaggctggtctcgaactcctagcctcaagtgatccacctgcctcagcctcccaaagtgctgttaaaatcctttggccacttaaaaaaatgggctrccttttattgttgagttgttagagttcttcatatattctagttgcaaatctcttatgcagtaaatgatttgcaaatgtttctcccattttataggttatc

SEQ ID NO: 39421 - DNA, 201 bp, Homo sapiens
tgcccggctgcccatttagcactaggtggattattaactctctaaacaatgaagaacacactggacttgaagagtgagtgccaacagggaagggaagggayggcagcggaacgtgagctcaggacaggctctaagctgggccttgggacccatctcttgcccagggaaagggggtctttggagaactgttagctccctcag

SEQ ID NO: 39422 - DNA, 201 bp, Homo sapiens
gagtgcaatggcgcgttcttggctcaccacaacctccgcctcccaggttcaagcgattctcctgcctcagcctcccaagtagctggggttacaggcatgcrccaccacacccagctaagtttgcatttttagtacagacagttttctccatgttggtcagactggtctcaaactcccaacctcaggtgatctgcctgcctt

SEQ ID NO: 39423 - DNA, 201 bp, Homo sapiens
cccaggctggagtgcagtggcacaatctcggctcactgcaacctctgcctcccaggttcaagtgattctcatgcctcagcctcccaagtagctgggattasaagtgtgcaccaacacacctggctcatttttgtatttttagtagagacggggttttgccatggtggccaggctggtctcgaactcctagcctcaagtgat

SEQ ID NO: 39424 - DNA, 201 bp, Homo sapiens
aggacagcaccaaaccattcatgagaaatccacccctaagacccaaacaccttccaccagatccaagactgaggattacatctcaacataagatttagggrgaccatccaaactatatcattctgcccctggcctcccaaatctcaggtccttctcacattgcaaaataatctcgtggccttctcacattgcaaaataatc

SEQ ID NO: 39425 - DNA, 201 bp, Homo sapiens
ccggctgcccatttagcactaggtggattattaactctctaaacaatgaagaacacactggacttgaagagtgagtgccaacagggaagggaagggacggyagcggaacgtgagctcaggacaggctctaagctgggccttgggacccatctcttgcccagggaaagggggtctttggagaactgttagctccctcagacc

SEQ ID NO: 39426 - DNA, 201 bp, Homo sapiens
aaaaaagagagttttaaagtcaatgacgtggatttccttcttaataacctagagaaagaatactacattaaacccaaagtagagaaaagaaacaataccastaaaagtggaatcattgaaatagaaaatataaaagggagaaaattaataaaagcaaattatggttccttgaaaaatcaattaaaactgataaacctctaa

SEQ ID NO: 39427 - DNA, 201 bp, Homo sapiens
caaactggtattgccatctcgtacaactatgatattaaacaactgtatttattgctttgacaaatgctctgaggatagggctatcaccactgagcaagctstgcatcagagcaattaaagataatgggtcttttccacggagctgcctgatgggccagacgttgacaactctcttggttgcttccaaactttggcaattat

SEQ ID NO: 39428 - DNA, 201 bp, Homo sapiens
ctgaaaaacctggacatgcgtgtttatgtcaacattattcataattactcaaaactggaagcaacagaaatgaggccaaatctggaggctttatctgacckttatgatccactaacctcccgtcgtgcagaagactgtgtgttactctcacgtctgcatccaagggatcgcaccatgcagtggagatcacaactgccccac

SEQ ID NO: 39429 - DNA, 201 bp, Homo sapiens
agatttctttaagagattatttgactaacaattggcctcacccatttgattgtgagcttcgtgaacacatgcaacatttcctttttttttttttttttttttttttttgagacagagtctcactctatcagccaggctgcagtgcagtggcacaatcttggctcactgcaacctccacctcccgggttcaggtgatccatc

SEQ ID NO: 39430 - DNA, 201 bp, Homo sapiens
gcttcatgcccgagagctgctgagggagccaggggcaattcctggggcaagtggggattccaggagccgtggacctgtgttgtccctgagctcagcacatmcagtgctttgctcaaggcagcaggcctccgagcccatgctgcagttgcttctctaattacttccatccactttccacctcctccccttaggtaggaagtc

SEQ ID NO: 39431 - DNA, 201 bp, Homo sapiens
tgccccacggaggcagagattaagaagataggcagaacacgcattgtcattcccagaagggtggttgtttataaatctgaaaccaaactattaaataacarcagctgtagcgctcctcttaaccaacaacataacaaaaatatctccagttattctgaccaaggtctgcacagagtcagccctagaattctgacgcaatcc

SEQ ID NO: 39432 - DNA, 201 bp, Homo sapiens
aaacaactgtatttattgctttgacaaatgctctgaggatagggctatcaccactgagcaagctctgcatcagagcaattaaagataatgggtcttttccrcggagctgcctgatgggccagacgttgacaactctcttggttgcttccaaactttggcaattattttaaaaatggggctctaagcatttgggggcaggtt

SEQ ID NO: 39433 - DNA, 201 bp, Homo sapiens
gttaggaaaaaagagagttttaaagtcaatgacgtggatttccttcttaataacctagagaaagaatactacattaaacccaaagtagagaaaagaaacamtaccagtaaaagtggaatcattgaaatagaaaatataaaagggagaaaattaataaaagcaaattatggttccttgaaaaatcaattaaaactgataaac

SEQ ID NO: 39434 - DNA, 201 bp, Homo sapiens
taatatccctcttgtttttgattatgtttatttaaatcttctctcttttcttctttattaacctagctagtgatctatctactttattaatttaaaaaaaacagctcctggatttattgatcttttgagtggtttttcttgtcccaatttccttcagttcacctctgattttggttatttcttgtcttgaaggcagatggt

SEQ ID NO: 39435 - DNA, 201 bp, Homo sapiens
aagacgatatgatcatcttagtggttgtggaaacagcatttgataaaattcaacatgcctttgtaataataattctcagaaaaaataggaatacaaaggartgccctcaatctagaagatctaaccacagacatcatatgaaatggtgatatattacattctattttcctaagattgagaaaaggcactgactgatgtcta

SEQ ID NO: 39436 - DNA, 201 bp, Homo sapiens
tgacaaatccatctgaaaatcacacagctacatccaacttcacacatctaaaattgtctcgttctagccccaaatatgttctcctctcgtgttctctctcktggcgactggtgcctccatgtcccttcttgctcccaacagacatggtgtcattcttcacgccccacatcgtccctctcctcatccccctcatatcttgtt

SEQ ID NO: 39437 - DNA, 201 bp, Homo sapiens
ttacttatgggcagagtttctaatctcagtttcattctcaaatattttgttatgcttctttggatctgttctgcccattcacagctaagacctaacaacamgattgtctaagttcaaaagcaaagttagaaatccccttctttggcttttttgtccaaactggtattgccatctcgtacaactatgatattaaacaactgt

SEQ ID NO: 39438 - DNA, 201 bp, Homo sapiens
gttgtcatgcatatcaaaatatttgctagtttccccttgatttcatttttggcctatgaactatttagaagtgtgttctttaattgtcagatatttaaagkgtttttctagatatcttgttactaatttctaaataaattccattgtgttcagaaaatatactttgcaggacttcagtgcttttaatgaggcttgttttat

SEQ ID NO: 39439 - DNA, 201 bp, Homo sapiens
ccgtgtgcagttcatgccctggagatgcttgcacaggtcttcaggtttctggctctttctgaccttcaggttttggcttcaaggtccactccccaggaaarcatttcctgacaacattcattcaagtgctcctcatccaagttgttctttttcccaagacactgcttattttgggggtaacatttatcataatctgaatgt

SEQ ID NO: 39440 - DNA, 201 bp, Homo sapiens
tagaaatgatgctaaaataatccagatgaacccaaccatgtaactttgatttagtcacactagtggtgagagaccacggtaggcagtaactagctgtgagyatcctgggcacgacgtacaggaacaaccatagacttttgaaacagatttgcctgggttttaatttccatattcctctggttatgtaagcgtgacaagcgt

SEQ ID NO: 39441 - DNA, 201 bp, Homo sapiens
tttcagtctctggtctctgaaatattgctgtctcttgattggattaatttctggcttaaataatttctcagttggttgcggcttcctctgcccagcactawctctttcttgcagcatgagccacagactagtaatcataagctcttattaaaataagtaactgattttttaaagtcccttttatgaaatgtgttggagaca

SEQ ID NO: 39442 - DNA, 201 bp, Homo sapiens
acctgtcttggcctcccatagtgctaagattacaggcatgagccaccatgcccagctatttttatttttatttagtttttgctaataatgtaatccttggkggctgacacatattaggggctcaaaacaagtttgagtaaatgaataaaagcactacagtgtgagcttaaaaaataattgtaacacttgcactgtggaaac

SEQ ID NO: 39443 - DNA, 201 bp, Homo sapiens
tgaggaatccactcccatgacccaaacatctgccaccaggacctacctccaatactgaggattacatctcaacatgagatttagaggggacatccaaactmtatcacccagaaatggtccaacttcaaggtcttgcagtatttgagataatgtgtgcactgctcaggatcacaaaggcttctaaaaacatgggtcaatgag

SEQ ID NO: 39444 - DNA, 201 bp, Homo sapiens
tctcttccaggttttggtatcaggataatgctggcccatagaatgatttagggatgaatcccttctgctcagttcttttagaatagtttctgcaggaatgkcaccagctcttctttgtacatctggtagaattcagttgtgaatccatctggtcctgggcttttcttggttggcagtctatttattaccaatcagtttcag

SEQ ID NO: 39445 - DNA, 201 bp, Homo sapiens
gaattataagcataaatataagaaaaataagcttttattctcaaaactagtgccttagaaattgcggaggagctttaatatcaaagcactcgtatttctcrgtaggttgtcgtaataagttgagtatctatattatacagcaccataattttcctgtttagtaatacacaagactttctaaaatataatagtatgctagaa

SEQ ID NO: 39446 - DNA, 201 bp, Homo sapiens
tcctccttctacgacgacaagggttccctccagggtaaaggcaggcccagagacgtctgtccatggtgaaaggacactgtccagagaacttgcaaaaataygatagggaaactgtgaggctggaatccgacataaaccctgagaatgagcatcggtggcctctgggtgatggctctgaggaaccccagaaagtcaggctgc

SEQ ID NO: 39447 - DNA, 201 bp, Homo sapiens
ctccaaacttttccatcctctgcctattaaccaattccaaagttgcttccacattttcaggtatctttatagcaacacctcactccttggtaccaattttstgtgttcgcccattctcacattgctataaagaagtacctgaagctgggtaatttatagagaaaagtttaattggctcatggttctgtagtctatacagga

SEQ ID NO: 39448 - DNA, 201 bp, Homo sapiens
tgccttcatgttaaactttggaaaaagccagggaagtggcttgctctggtgaataaattctgtagacccttaaggctgttcgcagcgtacaccaagacttycgaggcaagtgggggctccccctggcggctgcgccgggtggctgctccgggattgtgcggacctccgagctacaccgtctccaaccaacagaagccagca

SEQ ID NO: 39449 - DNA, 201 bp, Homo sapiens
tttgatgtgctactgggtttggtttaccagtattttgttgaagatttttgcatcaatgttcatcaaggatattagcctgaagttttcttttttttgttgtrtctcttccaggttttggtatcaggataatgctggcccatagaatgatttagggatgaatcccttctgctcagttcttttagaatagtttctgcaggaatg

SEQ ID NO: 39450 - DNA, 201 bp, Homo sapiens
agacttctgacaaattggcaatgatgaaacaattagacaatgaaaagacaaataacctaatttaaaaatatgcaaaaaacttggacaccacagataaaatrtatgaatgggcaaaaagaatatttaaaaggtgctcaacatcaggcaaatgcaagttaaaaccaccatgagatatcatttcacatgcactaaaattactag

SEQ ID NO: 39451 - DNA, 201 bp, Homo sapiens
actttgattcctctcctgataatgctttttctttctctgtcatgtggccaggctacaaattttccaaacttttacacactgcttccactttcaatataackttcaactttaagtcatttctttgctcccatatctgagcataggctgttagaagcagccaggttagaggcagccaagtcacatgtttaacactttattgct

SEQ ID NO: 39452 - DNA, 201 bp, Homo sapiens
tgatgaatcacatttcttgatttgcctgtgtcgaacattgcaatcttgcatcccagggataaagcttagttgatcatggtggataaactttttgatgtgcyactgggtttggtttaccagtattttgttgaagatttttgcatcaatgttcatcaaggatattagcctgaagttttcttttttttgttgtatctcttccag

SEQ ID NO: 39453 - DNA, 201 bp, Homo sapiens
gagacacattttttatttctgtctgtctcttacaagcttctgctcttcctcttccactcacaacctggatactcagctgcgttttcagaggcagcaccatstgctcatagaattcattggcaaactcaattttcaggtacaggtgttgccatgcactctccaggtgagcttttatcaattgacccatgtaatggttaatat

SEQ ID NO: 39454 - DNA, 201 bp, Homo sapiens
catgtgttttttgtctttggttgtgtttatgtgatgaatcacatttcttgatttgcctgtgtcgaacattgcaatcttgcatcccagggataaagcttagytgatcatggtggataaactttttgatgtgctactgggtttggtttaccagtattttgttgaagatttttgcatcaatgttcatcaaggatattagcctga

SEQ ID NO: 39455 - DNA, 201 bp, Homo sapiens
gcagtagtaaaattctcttttccactaagggcactttattcagagtctgcttaaaatgtgagagggcatcacacacattaataatgaataattccatttcmttttttttaagtgatttacaagaaacttgttgcatagattttttaaaatcaaccaaatgcccttgaagtgtaacagttgtttactagaaagcataattac

SEQ ID NO: 39456 - DNA, 201 bp, Homo sapiens
tttcttctcaagttgaatattcactaaccctatgattgagtaattttatctctaggtatatactcaggaaaaatgaaaatatgttcataaaaggatgtgaygagaatatgcatcacagctttatttttaatggataaaaactgaaaacaattctgtggcccaaaaagagatcagatagacaatagaatgtatttagtaatt

SEQ ID NO: 39457 - DNA, 201 bp, Homo sapiens
acaggaggtggagctcagcttcgctcacttgccccaccactcacctcctgctgtgcagcccagttcctaacaggccacagaccagtataccagtctgtcamctgggggttggggatccctgatttttgtaattggaagtaaagttgttcgcattactttaaaataaagacagtaccatcgttataaagtattctctaagtg

SEQ ID NO: 39458 - DNA, 201 bp, Homo sapiens
gttgatgtgtctgtacttgtgcaaagagagatttgggaaacgaagtttactgaagtgttaacaatgggttacaagttttgaagtgattttaatttcttttwttttaagtttctgttaggctgggattttccccatagatatgcatcatctatgtcagcaatccccaaccttttgggcaccaggacaggtttcgtgaaagac

SEQ ID NO: 39459 - DNA, 201 bp, Homo sapiens
gaactccatggcatgttgcatcatgaagaaagctgccccgcaaaatgagatgcgattgacgttgatgtgtctgtacttgtgcaaagagagatttgggaaasgaagtttactgaagtgttaacaatgggttacaagttttgaagtgattttaatttctttttttttaagtttctgttaggctgggattttccccatagatat

SEQ ID NO: 39460 - DNA, 201 bp, Homo sapiens
attgcattggcgtggcaagaactccatggcatgttgcatcatgaagaaagctgccccgcaaaatgagatgcgattgacgttgatgtgtctgtacttgtgcmaagagagatttgggaaacgaagtttactgaagtgttaacaatgggttacaagttttgaagtgattttaatttctttttttttaagtttctgttaggctgg

SEQ ID NO: 39461 - DNA, 201 bp, Homo sapiens
gggctgggattacaggcatgagccaccatgcccagcctgtttgtttgtttttcattcttttagtattttttagagacagccttgctttgttgcccaggctrgtctcaaactcttggcttcaagtgattctcctgcctcagcctcccaaagtgctgggatttcaggcacgacccacgatgcccagccatggctaagtttaaa

SEQ ID NO: 39462 - DNA, 201 bp, Homo sapiens
ctcaaactcttggcttcaagtgattctcctgcctcagcctcccaaagtgctgggatttcaggcacgacccacgatgcccagccatggctaagtttaaaatkaccatcttgctatttgttttccaattgtcccatctttttatttgcttttctctcttattctgccttctttgaactgaatatttttataattgtattttat

SEQ ID NO: 39463 - DNA, 201 bp, Homo sapiens
caattcaagagaatggtttcctgcgcatcatgagtggggcgaatagaatgagagaggtgtacagtagtgatttcaactatacttgcaatatttcacttttyaaacttcatcatatatagtcaggtgtttattacataattctttgaaattttcatataaaaggaaaatacacacacacaaaaggcaataaaaattgttgca

SEQ ID NO: 39464 - DNA, 201 bp, Homo sapiens
ccctgtatctttacagggcatagcccctacagcttctctcacaggctggagttgagtgcctgcagcttttcctggtgcagggtgcaagctgctgatggatmtaccatactggggtctggagtacagagcctctttcccacagctccaccaggcagtgctccagtggggactctttgtggggtctccaaccacacatttccc

SEQ ID NO: 39465 - DNA, 201 bp, Homo sapiens
caatacatagtttattgagagtttttaatatgaaggggtgttgaatttttttgaaagccttttctgcatgtattgaggtaatcatgtgttttttgtctttrgttgtgtttatgtgatgaatcacatttcttgatttgcctgtgtcgaacattgcaatcttgcatcccagggataaagcttagttgatcatggtggataaac

SEQ ID NO: 39466 - DNA, 201 bp, Homo sapiens
acacaggtgcaagggatggtctcccaacgctttgagtagctccatccctgtatctttacagggcatagcccctacagcttctctcacaggctggagttgartgcctgcagcttttcctggtgcagggtgcaagctgctgatggatataccatactggggtctggagtacagagcctctttcccacagctccaccaggcagt

SEQ ID NO: 39467 - DNA, 201 bp, Homo sapiens
aggcatgtttgccttgtgccagttttcaaggggaatgcttccagcttttgtccattcagtatgatgttggttgtgggtttgtcatagatggctcttattaytttgaggtatgttccttcaatacatagtttattgagagtttttaatatgaaggggtgttgaatttttttgaaagccttttctgcatgtattgaggtaatc

SEQ ID NO: 39468 - DNA, 201 bp, Homo sapiens
taggattgctctatcttttggtggattgagcctttcattgttagtggtggtaagtctgtatgggtctgcagcaacctagatttttgcctccttggaagaargaatttgaccaaggggcacagggcagagagggagaccactgaggcaagttttagaacagaaatgaacatttattacaacattttagagcaggaacaaaag

SEQ ID NO: 39469 - DNA, 201 bp, Homo sapiens
aaagggctatagaccccacacaagcctaaaagccagcaggagagtcattaaatcttaaagctccaaaataatctcattcgactccatgtcccacatccagrgcacacaggtgcaagggatggtctcccaacgctttgagtagctccatccctgtatctttacagggcatagcccctacagcttctctcacaggctggagtt

SEQ ID NO: 39470 - DNA, 201 bp, Homo sapiens
acacctggctaattaaaaaatatatatatagtagagctaaggtcttgctatgttgttcaatctggtctcaaactcctgggctcaagcaatcctcccacctyggcttcccaaagtgctgggattacaggtgtgtgcctccatgcccagcctagcctcttctttttaatgataagaaagatattagaattataagcataaata

SEQ ID NO: 39471 - DNA, 201 bp, Homo sapiens
tatcttttggtggattgagcctttcattgttagtggtggtaagtctgtatgggtctgcagcaacctagatttttgcctccttggaagaaggaatttgaccraggggcacagggcagagagggagaccactgaggcaagttttagaacagaaatgaacatttattacaacattttagagcaggaacaaaagtaaagtacact

SEQ ID NO: 39472 - DNA, 201 bp, Homo sapiens
aaggtagaaattggctgaaagaaaagggctatagaccccacacaagcctaaaagccagcaggagagtcattaaatcttaaagctccaaaataatctcattygactccatgtcccacatccagggcacacaggtgcaagggatggtctcccaacgctttgagtagctccatccctgtatctttacagggcatagcccctaca

SEQ ID NO: 39473 - DNA, 201 bp, Homo sapiens
tgtgtggcaattgtgaatgggagtttgctcctgatttggctctcagcttgactgttgttgttgtatagaaatgttagtgatttttgcacatgaattttgtrtcctgagactttgctgaagttgtttatcagctgtaggagcttttgggccaagactatgggggttttatagataaagatcatgtcgtctgcaaacagggat

SEQ ID NO: 39474 - DNA, 201 bp, Homo sapiens
gaagaggacatggcatgaaccggcaaggttttccccaaaattccaagggacaccagggggcacagaactggaagtcaggcagctgagtcctggctaggaakcagtgggacgtgacacctgccaagtctgaagggagagaaaggaggccacagggcagggcagccaaggagcaggccggactctcagcctcaggagcccttc

SEQ ID NO: 39475 - DNA, 201 bp, Homo sapiens
atcttttggtggattgagcctttcattgttagtggtggtaagtctgtatgggtctgcagcaacctagatttttgcctccttggaagaaggaatttgaccamggggcacagggcagagagggagaccactgaggcaagttttagaacagaaatgaacatttattacaacattttagagcaggaacaaaagtaaagtacactt

SEQ ID NO: 39476 - DNA, 201 bp, Homo sapiens
aaaccttgtttttcagcaggcacattgcatgcatgatcaaacagattagtgtggttctaattggtaaaccattaataagccatagaatataatcaagatcrttcagaaagatacacaagcaaatccacaaaaggggattagaaacccagtgtgttcaggtattcttgcattgctgtaatgaaatacctgaggctgggtaat

SEQ ID NO: 39477 - DNA, 201 bp, Homo sapiens
ttgagcagtgttttgtagttatccttgtagagatctttcaccttcctggttagttgtattcctaggtattttattttttgtgtgtgtggcaattgtgaatrggagtttgctcctgatttggctctcagcttgactgttgttgttgtatagaaatgttagtgatttttgcacatgaattttgtatcctgagactttgctgaa

SEQ ID NO: 39478 - DNA, 201 bp, Homo sapiens
aagaggacatggcatgaaccggcaaggttttccccaaaattccaagggacaccagggggcacagaactggaagtcaggcagctgagtcctggctaggaagsagtgggacgtgacacctgccaagtctgaagggagagaaaggaggccacagggcagggcagccaaggagcaggccggactctcagcctcaggagcccttca

SEQ ID NO: 39479 - DNA, 201 bp, Homo sapiens
gcctttcattgttagtggtggtaagtctgtatgggtctgcagcaacctagatttttgcctccttggaagaaggaatttgaccaaggggcacagggcagagrgggagaccactgaggcaagttttagaacagaaatgaacatttattacaacattttagagcaggaacaaaagtaaagtacacttggaagaggaccaggtgg

SEQ ID NO: 39480 - DNA, 201 bp, Homo sapiens
atatattcctgttccaaaaggtagaaattggctgaaagaaaagggctatagaccccacacaagcctaaaagccagcaggagagtcattaaatcttaaagcyccaaaataatctcattcgactccatgtcccacatccagggcacacaggtgcaagggatggtctcccaacgctttgagtagctccatccctgtatctttac

SEQ ID NO: 39481 - DNA, 201 bp, Homo sapiens
catttgcacatttgcagtaggaagtgcagagggcttcatgcccgagagctgctgagggagccaggggcaattcctggggcaagtggggattccaggagccrtggacctgtgttgtccctgagctcagcacatccagtgctttgctcaaggcagcaggcctccgagcccatgctgcagttgcttctctaattacttccatcc

SEQ ID NO: 39482 - DNA, 201 bp, Homo sapiens
cttgtgtcatctctgatttctttgagcagtgttttgtagttatccttgtagagatctttcaccttcctggttagttgtattcctaggtattttattttttktgtgtgtggcaattgtgaatgggagtttgctcctgatttggctctcagcttgactgttgttgttgtatagaaatgttagtgatttttgcacatgaatttt

SEQ ID NO: 39483 - DNA, 201 bp, Homo sapiens
ctttcattgttagtggtggtaagtctgtatgggtctgcagcaacctagatttttgcctccttggaagaaggaatttgaccaaggggcacagggcagagagrgagaccactgaggcaagttttagaacagaaatgaacatttattacaacattttagagcaggaacaaaagtaaagtacacttggaagaggaccaggtgggc

SEQ ID NO: 39484 - DNA, 201 bp, Homo sapiens
aactatatcacccagaaatggtccaacttcaaggtcttgcagtatttgagataatgtgtgcactgctcaggatcacaaaggcttctaaaaacatgggtcamtgagagagatatattgatcccagctttgagtaccaagaggaagaaaaggaggcagagtttaaatgttgtcagttctcaaacacagagatgaaggctcagg

SEQ ID NO: 39485 - DNA, 201 bp, Homo sapiens
agaagttatttacttctgagatacaatgggagtgctagaattgggtatatattcctgttccaaaaggtagaaattggctgaaagaaaagggctatagaccycacacaagcctaaaagccagcaggagagtcattaaatcttaaagctccaaaataatctcattcgactccatgtcccacatccagggcacacaggtgcaag

SEQ ID NO: 39486 - DNA, 201 bp, Homo sapiens
gactagtaatcataagctcttattaaaataagtaactgattttttaaagtcccttttatgaaatgtgttggagacacattttttatttctgtctgtctctyacaagcttctgctcttcctcttccactcacaacctggatactcagctgcgttttcagaggcagcaccatctgctcatagaattcattggcaaactcaatt

SEQ ID NO: 39487 - DNA, 201 bp, Homo sapiens
tagtttgcaaaaattttcttccattctatagattgtctgtgcactctgttgatagtttgttgtgcagaaactctttagtttaattagattccatatgccawtttttgcttttttgcaattgctttggtgtctttgccatgaaatctttgcccattcttatgtccagaatggtaatgcctaggctgtcttccaaagttttta

SEQ ID NO: 39488 - DNA, 201 bp, Homo sapiens
atttattacaacattttagagcaggaacaaaagtaaagtacacttggaagaggaccaggtgggcaacttgagagatcaagtgcccagtttgacctttgacrtggggattttataggccggcatgcttccggggtcttgcatcccttctccccgattcttcccttggggtgggctgtctgccgtgcagtggctgccagctct

SEQ ID NO: 39489 - DNA, 201 bp, Homo sapiens
tccagctttaactgaaaagtcccatgtccagatgagttccttccacctgtgagtctgtaaaatcacaagaagttatttacttctgagatacaatgggagtrctagaattgggtatatattcctgttccaaaaggtagaaattggctgaaagaaaagggctatagaccccacacaagcctaaaagccagcaggagagtcatt

SEQ ID NO: 39490 - DNA, 201 bp, Homo sapiens
gaattacaggcacctgccaccacgccgagctaatttttgtatttttagtagagatggggttttaccattttggtcaggctggtcttgaactcctgacctcmgttgatccaccagcctcggcctcccgaagtgctgggattacaggtgtgagccactgtgcccggcctaaagcatgtctcttgtagtcagcatatagtatgc

SEQ ID NO: 39491 - DNA, 201 bp, Homo sapiens
atgcttttgctattgtgagtagtgctgcagtgaatatacatgtgcaggtgtctttacaatagaatgatttatattgctttgggcagtatggccattttaaygatattgattcttcctattcatgagcatggaatgtttttccatttgtgtcatctctgatttctttgagcagtgttttgtagttgtccttgtagagatctt

SEQ ID NO: 39492 - DNA, 201 bp, Homo sapiens
gaacaaaagtaaagtacacttggaagaggaccaggtgggcaacttgagagatcaagtgcccagtttgacctttgacgtggggattttataggccggcatgyttccggggtcttgcatcccttctccccgattcttcccttggggtgggctgtctgccgtgcagtggctgccagctcttgggaaggggccacatgcacagtg

SEQ ID NO: 39493 - DNA, 201 bp, Homo sapiens
tgtgtgcactgctcaggatcacaaaggcttctaaaaacatgggtcaatgagagagatatattgatcccagctttgagtaccaagaggaagaaaaggaggcrgagtttaaatgttgtcagttctcaaacacagagatgaaggctcagggaataaccttagaagaaagatattgcattgtcagaagactgaaagaaaacaaaa

SEQ ID NO: 39494 - DNA, 201 bp, Homo sapiens
aagttctcttagagttgggctcagactgtctttttttttttttttttttttgaggcggagtttcgctctgtcgcccaggctggagtgcagtggcgcgatctcgactcactgcaagctccgcctcccgggttcacgccattctcctgcctcagcctcccgtgtagctgggactacaggcgcgcgccaccatgcccggctaat

SEQ ID NO: 39495 - DNA, 201 bp, Homo sapiens
tgcccagtttgacctttgacgtggggattttataggccggcatgcttccggggtcttgcatcccttctccccgattcttcccttggggtgggctgtctgcygtgcagtggctgccagctcttgggaaggggccacatgcacagtgtgtttcctggagttgtacacgtgctcgcttgaggcatttttctcttaccagtcaag

SEQ ID NO: 39496 - DNA, 201 bp, Homo sapiens
tagagcaagttctcttagagttgggctcagactgtctttttttttttttttttttttgaggcggagtttcgctctgtcgcccaggctggagtgcagtggcrcgatctcgactcactgcaagctccgcctcccgggttcacgccattctcctgcctcagcctcccgtgtagctgggactacaggcgcgcgccaccatgcccg

SEQ ID NO: 39497 - DNA, 201 bp, Homo sapiens
ccaaatgcccttgaagtgtaacagttgtttactagaaagcataattactgaaaatgttgggctacattaatagaggcatatttgtcagattatggaaggcyatgatcccactataagaatgacaactttgaatatttgttatttcttaatttttgcaacaactgtgaaaggcaaataactaaggaggccctgaatcctagt

SEQ ID NO: 39498 - DNA, 201 bp, Homo sapiens
cacaagaaagccaggctggcatgcgggccactgtgtgcaggtcacatactaaattatacatttcaggaagaagtgctaccgagtttcaggaaaaacagtgrttatcagaactttaaaaatccagatgtgctattagaaatgaggacatacacaagagaaccatcttggaaagaacaagtgtgcacagagacaggcgtgggg

SEQ ID NO: 39499 - DNA, 201 bp, Homo sapiens
ctaccctgagatatagctctcagatttgcatatttttgtttgacaaatatttggaattatccttttttaatttgaatgtctcttcataacaaagacaggcytagaaaaaaattgatgggtcaagagagtggtatagattaaaaagataaaaagtacccagtttccagtgtaccttttgtttgccagagaaagaaggaggaa

SEQ ID NO: 39500 - DNA, 201 bp, Homo sapiens
gaacaggcatccatcagctttgtgaccttgggaaatcctttcaccagctccatagagttgttaatagaagaattcttgagctgatacataaaaagcacttmcttcgtgtagggctgagacttaataaacaataaatagcagcaatcatttgattatctgacaaacaagaaacatagattcctttccttatgtgacttgtcc

SEQ ID NO: 39501 - DNA, 201 bp, Homo sapiens
aagggggtctttggagaactgttagctccctcagaccaaatgcattcccaccacagccgaaaggcctcccaggaactagagcagtccacgagtgaggcccrggaagaggagtacaggacagtctgcagatacagggggtctcaggtgcagctcagaccttaggaatctgaatattcccccaaggcccattccaccccatcc

SEQ ID NO: 39502 - DNA, 201 bp, Homo sapiens
aggattacatctcaacataagatttagggagaccatccaaactatatcattctgcccctggcctcccaaatctcaggtccttctcacattgcaaaataatmtcgtggccttctcacattgcaaaataatctcttttcaatagtcctccaaagtcttaactcattccagctttaactgaaaagtcccatgtccagatgagtt

SEQ ID NO: 39503 - DNA, 201 bp, Homo sapiens
atagaagaattcttgagctgatacataaaaagcacttacttcgtgtagggctgagacttaataaacaataaatagcagcaatcatttgattatctgacaarcaagaaacatagattcctttccttatgtgacttgtccaagatcccacaattggaagaagttgagccagggctgaaatgcaggctcagctctgttttacat

SEQ ID NO: 39504 - DNA, 201 bp, Homo sapiens
ttgagctgatacataaaaagcacttacttcgtgtagggctgagacttaataaacaataaatagcagcaatcatttgattatctgacaaacaagaaacatarattcctttccttatgtgacttgtccaagatcccacaattggaagaagttgagccagggctgaaatgcaggctcagctctgttttacattccaagtccctt

SEQ ID NO: 39505 - DNA, 201 bp, Homo sapiens
tttaatctgatatagcatccaaataaggtggcagaacaggagaaccaccatttgcttgtggatagttacctttgcaagccatggaaccatctgtttgcctkaggtgccctcaggacagacccatgaacttcatgaatagccaagcctgcaagaacacacacactgcctgtttgcctcatcaggagggaatgtgctcagagt

SEQ ID NO: 39506 - DNA, 201 bp, Homo sapiens
ggccacttaaaaaaatgggctaccttttattgttgagttgttagagttcttcatatattctagttgcaaatctcttatgcagtaaatgatttgcaaatgtwtctcccattttataggttatctttccgtgtttttgatgatgtctttggatgcctaatgttttaaattttaatgaagtacaatttatttatttattttgct

SEQ ID NO: 39507 - DNA, 201 bp, Homo sapiens
taaaaaaatgggctaccttttattgttgagttgttagagttcttcatatattctagttgcaaatctcttatgcagtaaatgatttgcaaatgtttctcccrttttataggttatctttccgtgtttttgatgatgtctttggatgcctaatgttttaaattttaatgaagtacaatttatttatttattttgctgttgtta

SEQ ID NO: 39508 - DNA, 201 bp, Homo sapiens
gatgcctaatgttttaaattttaatgaagtacaatttatttatttattttgctgttgttacttgtgcttttggtgccatatctaagaaaacattgcccaargcataagccaccatgcttgtccctgaaggatatttttgctcaatatagaattctggattgacagttcttttttttcagtaaatatgttgttttaacatct

SEQ ID NO: 39509 - DNA, 201 bp, Homo sapiens
attcttatgtccagaatggtaatgcctaggctgtcttccaaagtttttatagttttgggttttatgtttaagtctttaatccatcttgagttaatttttgyatatggtctaaggaagggatccagttttaatcttctgcatatggctagccatttatcccagcaccatttatttaatttttgtatatggtgtaaggaaggg

SEQ ID NO: 39510 - DNA, 201 bp, Homo sapiens
aacgtggtatatgaaacaactcactgagactcaggccatcatgctaataaatttcttgcaaaacttacatacacacagtggccatgttttcaaaccaaaarctgaagcatacaattaagcatacaatttgacttctgatcatacagtaaattaaaaattataataaatacttagttttcatgagtgcttacaatgttctta

SEQ ID NO: 39511 - DNA, 201 bp, Homo sapiens
atttcttgcaaaacttacatacacacagtggccatgttttcaaaccaaaaactgaagcatacaattaagcatacaatttgacttctgatcatacagtaaaytaaaaattataataaatacttagttttcatgagtgcttacaatgttcttaatgcaagactttttaatgcaacttcttgcttttaaatactttcaatatag

SEQ ID NO: 39512 - DNA, 201 bp, Homo sapiens
agcccttcaggagggggccttcgtgggtctccagggtctgccagcatgaggggctgtgccaggctgcactcctaggggctcaggaaccaagcccttgtgtyaccagaacgctcagacacgctgctacatcaatatcttctgaaggggagctctagacttatagaagtgggagatcaggatggcagatattaatgatctgcc

SEQ ID NO: 39513 - DNA, 201 bp, Homo sapiens
acacagcaaccagcatggaaggggactccgcctgcagtcagggagcaaagcaaaagcacccctcaaagaagtcagagccaaatgaggcccagtgtgtgctygctctagggcaactcctttgattcgtaccagagggtggtcttccctctgtgtttggggcagtgctttcttgtctctgtcatacaaacccgcaaaaacaat

SEQ ID NO: 39514 - DNA, 201 bp, Homo sapiens
cctggttcaagcaattcccctgcctcacctcccaagtagctgggattacaggcacaggccaccacgcccagctaattcttttgtatttttagtagagatcrggtttcaccatgttggtcagaccggtcttgaactcctgacctcaggcaatccgtctgccttggcctcccaaagtgctgggattacaggcatgaaccactg

SEQ ID NO: 39515 - DNA, 201 bp, Homo sapiens
ccaaatgaggcccagtgtgtgctcgctctagggcaactcctttgattcgtaccagagggtggtcttccctctgtgtttggggcagtgctttcttgtctctrtcatacaaacccgcaaaaacaatgttagcaaaatcctgatctttaacaggaaagcagcatgaccaaatatttccagagaaatcttatgctcttgctgtaa

SEQ ID NO: 39516 - DNA, 201 bp, Homo sapiens
ctagccatttatcccagcaccatttatttaatttttgtatatggtgtaaggaagggattcagtttcaatcttctgcatatggctagccagttatcccagcrctatttattgaatagggaatactttccccattgcttgtttttgtcacatttgttgaagatcagagggttgtaggtgtgcaggcttatttctcggttctct

SEQ ID NO: 39517 - DNA, 201 bp, Homo sapiens
tcttgtctctgtcatacaaacccgcaaaaacaatgttagcaaaatcctgatctttaacaggaaagcagcatgaccaaatatttccagagaaatcttatgckcttgctgtaagggaaattgcctgatcgaatgtcatatagtcaggaatactctagaacagtggtcctcaacctttttttggcatcagggactagtttcatg

SEQ ID NO: 39518 - DNA, 201 bp, Homo sapiens
gcttatgtaaggcccagccttctaaggaccccatttctacatatctgtcccagagaaatgaaaagcttatctttaactgaaaaacctggacatgcgtgttyatgtcaacattattcataattactcaaaactggaagcaacagaaatgaggccaaatctggaggctttatctgaccgttatgatccactaacctcccgtcg

SEQ ID NO: 39519 - DNA, 201 bp, Homo sapiens
atatttgcttatgtaaggcccagccttctaaggaccccatttctacatatctgtcccagagaaatgaaaagcttatctttaactgaaaaacctggacatgmgtgtttatgtcaacattattcataattactcaaaactggaagcaacagaaatgaggccaaatctggaggctttatctgaccgttatgatccactaacctc

SEQ ID NO: 39520 - DNA, 201 bp, Homo sapiens
aaagtaagaatgcattattagagacagtctctggcatagactgagcctttagatgctagctatggtcatcatgcttggttaaggtcctggcagattttttraagagtccatatgtataatagaaatagaatatgaagttgtggcagaaaaatttggaaagacacaggagataagttagtaagggagaaacaaaggggaaaa

SEQ ID NO: 39521 - DNA, 201 bp, Homo sapiens
gcagtcttagagtcttctgctctctcatcattgggtctttcttccttttcgaagaagccctctagtgacatttattttttactcattttggctggggttarcttgtgggcttaccaaaactgtgactgagacaagggtgcagtgtgggaaagaggcaggaacagaaatgctcaacaaagtaataggcaagccatgcacaga

SEQ ID NO: 39522 - DNA, 201 bp, Homo sapiens
tctttcttccttttcgaagaagccctctagtgacatttattttttactcattttggctggggttagcttgtgggcttaccaaaactgtgactgagacaagkgtgcagtgtgggaaagaggcaggaacagaaatgctcaacaaagtaataggcaagccatgcacagaataaaataagtgtcggattctgacttaaagctgcc

SEQ ID NO: 39523 - DNA, 201 bp, Homo sapiens
agcaaatgtattacgtgcattggaaaaaaaatgtgtattctgcagttgctgaatgtagtgttctataaatagcaatgagataaaagtggttggttgtgttsttcaggtcgtccctgtctttactgattttttgtcaatttgttctatcaattgcagaaagagatatattaaaaaattcttagttataattgtgaagttgtc

SEQ ID NO: 39524 - DNA, 201 bp, Homo sapiens
tgtattacgtgcattggaaaaaaaatgtgtattctgcagttgctgaatgtagtgttctataaatagcaatgagataaaagtggttggttgtgttgttcagrtcgtccctgtctttactgattttttgtcaatttgttctatcaattgcagaaagagatatattaaaaaattcttagttataattgtgaagttgtcagtatt

SEQ ID NO: 39525 - DNA, 201 bp, Homo sapiens
taatgtattgtatgcgaatattatctcaataaagcagttatttttcacctatcggaatggtaatgtctagtggtagtgctgacgagagtgtaggtaagaargtattctgcatgctgaaatgggttgtgcaaattggtacaacctctttcagggtcagttttgtagtttttattaaatgtaatatgcatataccctttggcc

SEQ ID NO: 39526 - DNA, 201 bp, Homo sapiens
agtggtagtgctgacgagagtgtaggtaagaaggtattctgcatgctgaaatgggttgtgcaaattggtacaacctctttcagggtcagttttgtagtttktattaaatgtaatatgcatataccctttggcccagaatttccaattctaggaaaatattctactagtaaaattcatatatatacacagtaaagatttggt

SEQ ID NO: 39527 - DNA, 201 bp, Homo sapiens
caagattgtctaagttcaaaagcaaagttagaaatccccttctttggcttttttgtccaaactggtattgccatctcgtacaactatgatattaaacaackgtatttattgctttgacaaatgctctgaggatagggctatcaccactgagcaagctctgcatcagagcaattaaagataatgggtcttttccacggagct

SEQ ID NO: 39528 - DNA, 201 bp, Homo sapiens
agggtcagttttgtagtttttattaaatgtaatatgcatataccctttggcccagaatttccaattctaggaaaatattctactagtaaaattcatatatrtacacagtaaagatttggtagatctttgtgtgttaatataaaatgatctttaagatattttgttgggctataaaaatttgaataaagtctatacaatagt

SEQ ID NO: 39529 - DNA, 201 bp, Homo sapiens
aatagcacatcacaatagcactcacccacaatggaacttagaacaattattgatatatgatcagctctcagtatgtgtaaactatgacatgcaggccaatycacctagaaaggcctattttcaaaagctcatgtcctctgaattgaggaaccacagatcagatcagcctcttcaaccccccgtgaggctcccattcatgta

SEQ ID NO: 39530 - DNA, 201 bp, Homo sapiens
attatccttagcaaaccaatgcaggaacagaaaagcagataccacatgttctcacttgtaagtaggagctaaatgatgagaacacatggacacatggaggrgaacaacacacagtggggcctattggagggtggagagtgggaggagggagaggatcaggaaaaataactaatgtatactaggcttaatatctggctgacg

SEQ ID NO: 39531 - DNA, 201 bp, Homo sapiens
gggatatagcaaaggcttcctagaggaagtgatgtctaaattgacagggttagctctggtctgagttgtgtctgttggtagggctaattaataagacattyggacatcagaagcccccaaaagacaacaaattcctgcccatcccaccctaccatataataaaaggaaggcaggagggcctgaatgaggtaactcacacct

SEQ ID NO: 39532 - DNA, 201 bp, Homo sapiens
gggaacaacacacagtggggcctattggagggtggagagtgggaggagggagaggatcaggaaaaataactaatgtatactaggcttaatatctggctgaygaaataatctgtacaacaaaccccatgacacacatttacctatgtaaaaaccctgcacatcctgcacaagtacccctgaaatttaaagtaaaaaattaaa

SEQ ID NO: 39533 - DNA, 201 bp, Homo sapiens
tgcccatcccaccctaccatataataaaaggaaggcaggagggcctgaatgaggtaactcacacctataatcccagcactttggaaggcagagcggaggaytgcttgagcccacgagtttgagaccagtctaggcaacaaagtgagaccctgttctctacaaaaaaatacaaaaattagctgggcatgctggtgtgtgtct

SEQ ID NO: 39534 - DNA, 201 bp, Homo sapiens
taagttttatgtctaatttctaataattcagatatttttggggtaagcttttacaattgaagtataatatacatacataattctgcacaaatgataactayagaattcaattaatttttgcaaagtgaacacagctctgtaactaccacctaaataaagatatcaaatgttatggcacccaggaacctcccctatgacttt

SEQ ID NO: 39535 - DNA, 201 bp, Homo sapiens
aatgaggtaactcacacctataatcccagcactttggaaggcagagcggaggactgcttgagcccacgagtttgagaccagtctaggcaacaaagtgagaycctgttctctacaaaaaaatacaaaaattagctgggcatgctggtgtgtgtctgtagtccaagctacttgggaggctgatgcacgaggattggttgaacc

SEQ ID NO: 39536 - DNA, 201 bp, Homo sapiens
gtcttaaacatcatcacatttgattggtttataagttgtggcaagtgaacccaggtctaacacttaggaacaagggagaaaaaaaggaagattttgttacytgtaatcagctttttactccacagattttctgtgagttgggttcaaaacatttaattccactttttccctctatgtggcacctcatttgttaccaggatt

SEQ ID NO: 39537 - DNA, 201 bp, Homo sapiens
tatgacatgcaggccaatccacctagaaaggcctattttcaaaagctcatgtcctctgaattgaggaaccacagatcagatcagcctcttcaaccccccgygaggctcccattcatgtaagacacccatggctttgtaatggcacccaacgctctgggctggcatgaaaattgtgtgactcacatcatgtgcctccccaag

SEQ ID NO: 39538 - DNA, 201 bp, Homo sapiens
cccaggctggactgcagtggtgtgatcttggctcactgcaacctccacctcctgggtttaagcaattctcctgcctcagcctcctgagtagctgggactayaggcatgcgccaccacgtccagctaatttttgtattttttagtagagatgggttttcaccatattggccagctggtcttggactcttgaccttgtgatcc

SEQ ID NO: 39539 - DNA, 201 bp, Homo sapiens
gggtaagcttttacaattgaagtataatatacatacataattctgcacaaatgataactatagaattcaattaatttttgcaaagtgaacacagctctgtwactaccacctaaataaagatatcaaatgttatggcacccaggaacctcccctatgactttcctggtcattcccttcaagaggtaactattattttgattt

SEQ ID NO: 39540 - DNA, 201 bp, Homo sapiens
attagatggcttgcgttttaatctcagctgtgatacttaccagctgcctgtcctcagggttcaatgttcaattgacctgaatgcaaaacccagctctatayctgataggctgtgtgaccttagaaaagttacttgctgcctcttaccttcagattcctcatcatcaaatggagaaggaagtacttgcctctagtggtcttc

SEQ ID NO: 39541 - DNA, 201 bp, Homo sapiens
gtggcacctcatttgttaccaggattttacagacggagacacagaaatgtgaaatgaatagcccaaggctatcttctcccactactcccagccctaccctscagtgtgtaattgtggagccacggacaatgtaccaaggcagcaaacatcactggcttgaagatgactagtagctgtggtcagcttgctggggacccatgc

SEQ ID NO: 39542 - DNA, 201 bp, Homo sapiens
ctggactgcagtggtgtgatcttggctcactgcaacctccacctcctgggtttaagcaattctcctgcctcagcctcctgagtagctgggactataggcaygcgccaccacgtccagctaatttttgtattttttagtagagatgggttttcaccatattggccagctggtcttggactcttgaccttgtgatccacctgc

SEQ ID NO: 39543 - DNA, 201 bp, Homo sapiens
gtcttgaactcctgacctcaggccatccacccaccttggtctcccaaagtgctgagattacaggcatgagccaccatgcccagcctaaacagtgatttaaacacacacacacacacacacacacacacacacacacaacaagaaaacaaaaaaatccagatgttaaaaatatgctgcccagatcaagaccaaaatttatac

SEQ ID NO: 39544 - DNA, 201 bp, Homo sapiens
ttgaacttagtatccctggcttatttattttgaacgttcctattttacattttctgtccagcagggagaagtctaagagacaaaatcaataaggctagagmagattggctttctctggatactgtaccttatccatgtgaacaggagattttatagtgacttgtttcagtataaacaaagaggactggaataactgattgc

SEQ ID NO: 39545 - DNA, 201 bp, Homo sapiens
aaacagggcaaaattccattatattattgataacattaaatttccttcagcaacttatttcacccatagccccgatatttatttttcatcattgttggggyaactatttatttagtactgagaaaattatttcaggctgatgaagtcctgaagtctaaaaggatctatttcagttctttatcaatatcacagagctgattc

SEQ ID NO: 39546 - DNA, 201 bp, Homo sapiens
caaacaggagaaatgtggaggtcagggttctgctacctacttctagtctacttagctattggtgcctctgtctctcattctctccagacctctccccagcmctatttgcacctcttgagagcaggaccttctttttctcatcacctgaatacaggaagtgttatagttattaatggggaccagctcttaatgtttgaccaa

SEQ ID NO: 39547 - DNA, 201 bp, Homo sapiens
caactgtgacaacatgggacaaattacacagactcataccaaagccaggtctgcacctagcaaagtgctttaagttctgggctgcactggagccctagttkgtgcttaagcttagtttgcctgagaattctggcatgtggaggggcagcagaggtgagccagtgagagtcttaagagagaccgcggaacctccaagaccag

SEQ ID NO: 39548 - DNA, 201 bp, Homo sapiens
gcatacacctaaaagcaggagtctgtaacaagttgaaaggagatgacaattgatcttaaagcattacccaagcaatttctaagatgcctttttattccttrattctgccaaacatgattctgtcacaaagcttttaggttagctgtcccgtttgcctggaattatctgcctctctctcagataaacgtatggctcactctc

SEQ ID NO: 39549 - DNA, 201 bp, Homo sapiens
gggtggggactcagtgcatctaaaagcacaaatacttgtgataagggtctttcaccctcacttctcactcacagcacaagcctccagatccagtaaatcasgggctttcactttatttcatcactgccctggagtctcctcaaattacctggaacgaatttgaaagggctgaagttcctgtcgagtggcagaaatattgat

SEQ ID NO: 39550 - DNA, 201 bp, Homo sapiens
gcttttaggttagctgtcccgtttgcctggaattatctgcctctctctcagataaacgtatggctcactctctcacttcattcaagcctttgcccaaatgycaccttatcggagaggcctcctctaatcaacccatgtaaagtagcaacctctaccacatcactctctttcttctcattgtgatgatttctgtctcttctt

SEQ ID NO: 39551 - DNA, 201 bp, Homo sapiens
tccagtaaatcaggggctttcactttatttcatcactgccctggagtctcctcaaattacctggaacgaatttgaaagggctgaagttcctgtcgagtggsagaaatattgatttgtgacaagcacatgatccaggctgagggttaaatataggggagtgtgaggcagatgctaagtcttacagatgagtagcaattgtgt

SEQ ID NO: 39552 - DNA, 201 bp, Homo sapiens
aattacctggaacgaatttgaaagggctgaagttcctgtcgagtggcagaaatattgatttgtgacaagcacatgatccaggctgagggttaaatataggrgagtgtgaggcagatgctaagtcttacagatgagtagcaattgtgtgtaaattgacggagaacgcagccttttgcataaatttgtccatggactagcact

SEQ ID NO: 39553 - DNA, 201 bp, Homo sapiens
ccagtcctggctctgccataaccagctccagaaatgtaggcaatttgcttcaccttattctttttttttcccttggtaaaatggaaataattatacctagracaaaataactttgttctaggtaaagaaagcattgtctcaaggccttatatatatatatatatactatatgaaatatgtatatatgtatgtatttcaaaa

SEQ ID NO: 39554 - DNA, 201 bp, Homo sapiens
aagcaagcagaagaaagatgaggatgggaattagatggcttgcgttttaatctcagctgtgatacttaccagctgcctgtcctcagggttcaatgttcaaytgacctgaatgcaaaacccagctctatacctgataggctgtgtgaccttagaaaagttacttgctgcctcttaccttcagattcctcatcatcaaatgga

SEQ ID NO: 39555 - DNA, 201 bp, Homo sapiens
tattgcagcactatttacaatagcaaagacatggaactaacccaaatgcccatcaatgatagactggataaagaaaatgtggtacatatacaccatggaayactatgcagccataaaaaggaatgagatcatgccctttgcagggtcatggatgaagctggaagccatcattctcagcaaactatcacaagaacagaaaac

SEQ ID NO: 39556 - DNA, 201 bp, Homo sapiens
tcttgaactcctgacctcaggccatccacccaccttggtctcccaaagtgctgagattacaggcatgagccaccatgcccagcctaaacagtgatttaaacacacacacacacacacacacacacacacacacacaacaagaaaacaaaaaaatccagatgttaaaaatatgctgcccagatcaagaccaaaatttataca

SEQ ID NO: 39557 - DNA, 201 bp, Homo sapiens
cttgaactcctgacctcaggccatccacccaccttggtctcccaaagtgctgagattacaggcatgagccaccatgcccagcctaaacagtgatttaaacacacacacacacacacacacacacacacacacacaacaagaaaacaaaaaaatccagatgttaaaaatatgctgcccagatcaagaccaaaatttatacat

SEQ ID NO: 39558 - DNA, 201 bp, Homo sapiens
cctcacttctcactcacagcacaagcctccagatccagtaaatcaggggctttcactttatttcatcactgccctggagtctcctcaaattacctggaacraatttgaaagggctgaagttcctgtcgagtggcagaaatattgatttgtgacaagcacatgatccaggctgagggttaaatataggggagtgtgaggcag

SEQ ID NO: 39559 - DNA, 201 bp, Homo sapiens
ttgaactcctgacctcaggccatccacccaccttggtctcccaaagtgctgagattacaggcatgagccaccatgcccagcctaaacagtgatttaaacacacacacacacacacacacacacacacacacacaacaagaaaacaaaaaaatccagatgttaaaaatatgctgcccagatcaagaccaaaatttatacatc

SEQ ID NO: 39560 - DNA, 201 bp, Homo sapiens
cccgtggcactattagcctctccacggcctcaggcatggagtcccttgatgtcccagtttaaggtttttactctactgtgggcataaaactcttccctgtktactttctgcacagagcagctcaacggcttttttagaaccattgtagaaggtaaaagtaaaaatttctacccataaaaccatgtaaaataccctcatgat

SEQ ID NO: 39561 - DNA, 201 bp, Homo sapiens
ttcaagcctttgcccaaatgtcaccttatcggagaggcctcctctaatcaacccatgtaaagtagcaacctctaccacatcactctctttcttctcattgtgatgatttctgtctcttcttaagcatccttgggttccccctcaagaatgtaagctccacaagcaatagagcagaatttgtgcctgtttcactgtcatatc

SEQ ID NO: 39562 - DNA, 201 bp, Homo sapiens
tcacttcattcaagcctttgcccaaatgtcaccttatcggagaggcctcctctaatcaacccatgtaaagtagcaacctctaccacatcactctctttctwctcattgtgatgatttctgtctcttcttaagcatccttgggttccccctcaagaatgtaagctccacaagcaatagagcagaatttgtgcctgtttcact

SEQ ID NO: 39563 - DNA, 201 bp, Homo sapiens
tcaagcctttgcccaaatgtcaccttatcggagaggcctcctctaatcaacccatgtaaagtagcaacctctaccacatcactctctttcttctcattgtgatgatttctgtctcttcttaagcatccttgggttccccctcaagaatgtaagctccacaagcaatagagcagaatttgtgcctgtttcactgtcatatcc

SEQ ID NO: 39564 - DNA, 201 bp, Homo sapiens
caagcctttgcccaaatgtcaccttatcggagaggcctcctctaatcaacccatgtaaagtagcaacctctaccacatcactctctttcttctcattgtgatgatttctgtctcttcttaagcatccttgggttccccctcaagaatgtaagctccacaagcaatagagcagaatttgtgcctgtttcactgtcatatcct

SEQ ID NO: 39565 - DNA, 201 bp, Homo sapiens
gatgcagtgttcagaaggattccactgtctgttgctgactgaatttggaagagggctgctagccaagaaatgcaagtcacctctaaagcctggaaatgacaaaaaaaaaatggattctccccttgagcctccaaaaggaaccttaattttaggccagtgaggcccattttggacttctgactttcaaaactgtaagacagt

SEQ ID NO: 39566 - DNA, 201 bp, Homo sapiens
acctcctccccaacccaccacgcatgatgggttatttagtgcattagttaatccctcctctcttaatcaattccacatgtccatatctggttattacttastgtttatcaaaacagcttaactatgggctcccaaagactccttaggaatgagacaggaccatggtgaacagagactcccctgttccctaccccgtggcac

SEQ ID NO: 39567 - DNA, 201 bp, Homo sapiens
taccacccataagactgtaccattgtcatcattgtttacattgtcagaatccttgacatcatcatcattatcatcatcaagactttatttcatggctattrttaaaaaaaaaaaaacagatgctggtgaggttgtggagaaaaaaaggaatgcgtatacactgttggtgggagtgtaaattagttcaaccactgtggaaga

SEQ ID NO: 39568 - DNA, 201 bp, Homo sapiens
gacagaaataccattagactcagcaattccattactaggtatatacccaaaggaatataaatcattctattataaagacatgtgcatgagtatgttcattrcagcactattcacaatagcaaagtcatggaatcaacccaaatacccatcaatgatagactggacaaagaaaatgtggcatgtataatatactccatggaa

SEQ ID NO: 39569 - DNA, 201 bp, Homo sapiens
acccataaaaccatgtaaaataccctcatgatttcatctgtgaccctgaacctttctttttctccaaatcccttttatttttgtaaaagaatgcactacgygccagcatctggcttgtaaaaataaatacagtgactggctttcccaagtaacttggcctaatcatccagtgctcctgaaaagacccgtctcctgagatgc

SEQ ID NO: 39570 - DNA, 201 bp, Homo sapiens
cacccataagactgtaccattgtcatcattgtttacattgtcagaatccttgacatcatcatcattatcatcatcaagactttatttcatggctattattaaaaaaaaaaaaacagatgctggtgaggttgtggagaaaaaaaggaatgcgtatacactgttggtgggagtgtaaattagttcaaccactgtggaagacag

SEQ ID NO: 39571 - DNA, 201 bp, Homo sapiens
tgaggactaactcttgactcctatagaattagatgttttcctgtggtgggtagattgctaatgcttgatattcccttaaaacacatttgttacgactcagytatgtgtaggcttgatcatttgagggcaggcactagtaggggtttgatatattcccagatgagttttacatcttttacttaaaaacaaaatgaaggcttg

SEQ ID NO: 39572 - DNA, 201 bp, Homo sapiens
acccataagactgtaccattgtcatcattgtttacattgtcagaatccttgacatcatcatcattatcatcatcaagactttatttcatggctattattaaaaaaaaaaaaacagatgctggtgaggttgtggagaaaaaaaggaatgcgtatacactgttggtgggagtgtaaattagttcaaccactgtggaagacagt

SEQ ID NO: 39573 - DNA, 201 bp, Homo sapiens
tatgcctagcttattttttattttttatttttagtagagatgaggtcttgccatgttgcccaggctggtctcaaactcctggtctcaagctatccttccarctcagctttccaaagtgctgggattacagacacgagccaccacacatggtcaacttttttttaaaaaaaataccaaatcaataaagtcaactgaattgaa

SEQ ID NO: 39574 - DNA, 201 bp, Homo sapiens
tgaggtaactcacacctataatcccagcactttggaaggcagagcggaggactgcttgagcccacgagtttgagaccagtctaggcaacaaagtgagaccstgttctctacaaaaaaatacaaaaattagctgggcatgctggtgtgtgtctgtagtccaagctacttgggaggctgatgcacgaggattggttgaacctg

SEQ ID NO: 39575 - DNA, 201 bp, Homo sapiens
gctggtctcaaactcctggtctcaagctatccttccagctcagctttccaaagtgctgggattacagacacgagccaccacacatggtcaacttttttttwaaaaaaataccaaatcaataaagtcaactgaattgaatttaactcaacatctattgtgtatgatttgtaatatttttaaatttttccaaaattttaaaat

SEQ ID NO: 39576 - DNA, 201 bp, Homo sapiens
tctcaagctatccttccagctcagctttccaaagtgctgggattacagacacgagccaccacacatggtcaacttttttttaaaaaaaataccaaatcaawaaagtcaactgaattgaatttaactcaacatctattgtgtatgatttgtaatatttttaaatttttccaaaattttaaaatagccagttagctgaaaaat

SEQ ID NO: 39577 - DNA, 201 bp, Homo sapiens
gtgcagaaaactgaaactggatcacccttccttataccttatacaaaaattaacttaggatggattaaagacttaaatgtaaagccccaaaccataaaaamcctagaagaaaacctaggcaataccattcaggacataggcatgggcaaagacttcataatgaaaacgccaaaagcaattgcagcaaaagccataattgac

SEQ ID NO: 39578 - DNA, 201 bp, Homo sapiens
tgacacacatttacctatgtaaaaaccctgcacatcctgcacaagtacccctgaaatttaaagtaaaaaattaaaaaaaaaagactttatttcaaatacakcctgggaatgagatttcaagcaatgtataattttgccaaaattttcagaaaccaaatcagatggtatctcatggagtgagtgacaaagggattttatctt

SEQ ID NO: 39579 - DNA, 201 bp, Homo sapiens
aaatccacaccaaaataaaaaggcctgaagctggattgtatgtattgaagaacagaaaaaaatgaatatatgtaggtgttgtgtacatatttatgtatgcktgtgtgtgtgtgtgtgtgtgatttttatttccttttgtaactaaatcaaataattagccagattacaattaggtcattgagatgcgaaaaaccaccactg

SEQ ID NO: 39580 - DNA, 201 bp, Homo sapiens
agtcagaaaaaaataaatgttgttttaagaaccaacaacacttttgttattaagaaaacataaaaagaactggtagtaaggagaaggtgggaaagaacagscttggtggaaaggggaaaatgtgaatgatagatagagataactgtgagctgcctaaggggtggactcctggactagtaatgcagaggtgaagagatacaa

SEQ ID NO: 39581 - DNA, 201 bp, Homo sapiens
agccgagatcatgccactgcactccagcgtgggcaaaaagagcgaaactccatctaaaaaaaaaaaaaaaaaaaccaaagaaagaaagaaagaaaaagaawatataaaattcatagatataaaactttcatgtctgcttctatgcttctaaccttactgtgccaaccctatttttccattagttttaaaaaatgtattttt

SEQ ID NO: 39582 - DNA, 201 bp, Homo sapiens
aaggccagacctagttgtcccctccccgtagccatagctatttggcctgtgacaagctccgtgtatctcttcatctctgcacagctagtccaggagtccaycctttaggcagctcacaattatctctatctatcattcgcattttcccctttccaccaagcctgttctttcccaccttctccttacagctatatgtctata

SEQ ID NO: 39583 - DNA, 201 bp, Homo sapiens
cccacatgccagaggtgcacaggaggctggcccacagaagtatctctgtaattgttccagctttgagttaatttcatggtgggtgcgggactagccagagrgatggtggggagggcagcagtggggtttatggtgctggaaactgagcaggaagtctttatcaagacagtgagagacagcttgagaaaagcctcaaggtca

SEQ ID NO: 39584 - DNA, 201 bp, Homo sapiens
agatgaggttagcactgtaattaggcataaatgggctagcaattataaagtgcctagcacatggtaaattctaaatttgtgcttgttaaatatcaataaartgcctgaggtccagcgctggtgaggagcacagggagatctgctctcatgcccacccacctggctgctggcactccttacactcccttgtgaccctctcta

SEQ ID NO: 39585 - DNA, 201 bp, Homo sapiens
gtcatcataaagatgtactctgagcagttactggctctcctccttagatgtctcggaagccttgataggctttcttgtccaaacggggagttggagagggstttgggaacacttcgtaggtctcttcttcccccaccctatctttagctgccaatagcactaccctgtgcagctgagccagttctgaccacagagctggtt

SEQ ID NO: 39586 - DNA, 201 bp, Homo sapiens
gcctttttctccttacccacccccgttcatcattctaggactggaaatgggatgtgagagggggcaggatttaagtagtttttggttttcagctaaatttkggctgggaaacacaaattacactgaacactgtcattttaaggatgagaaagctgaggcgtgggtaaaggaaatgactttctcaaagcctcaagctgggaa

SEQ ID NO: 39587 - DNA, 201 bp, Homo sapiens
gtcgccttgtctttgccctttgaaatgcatcttaagcagtgtctgagaaacacagctttgctcatctactctgctcttctaagaccctccttggctccacrttacctgtagaactgagcctgggtgagtctgatatttccacccaggtattcaaatagacaaggaggaattaaactacagtaagtggtgaattttctggaa

SEQ ID NO: 39588 - DNA, 201 bp, Homo sapiens
tttacaggtggattctgataatcccaccttagccatgcttatcccttagcctctcttcttcatccccgctagcactgcagaacaagcctcctaagaggtcrccttgtctttgccctttgaaatgcatcttaagcagtgtctgagaaacacagctttgctcatctactctgctcttctaagaccctccttggctccacgtta

SEQ ID NO: 39589 - DNA, 201 bp, Homo sapiens
agagctagattaaaaaaaaaaccaacaaaacaaagctacaaaggcttgttgaagggcataaagtaatagaacaaattgaaagagaaggtccaactctctcwaattaatttataacttactgcaacaagtatctcaattttataatatatcttcaatcatgtattcatattcaatcatattctaagtcatatctgaaagaga

SEQ ID NO: 39590 - DNA, 201 bp, Homo sapiens
tgcactctagcctgggtgacagagcgagactccgtctcaaaaaaaaaaaaaaaaaaaaaaaagaagtaagtaggagtttaccataaggtgatggtagtggrgggaagagcattagctagcagggccagtgcacatgatatgcctggagtggctgtaaaggaagacagaaaataatgctcatttaactgtcgaacaacagaa

SEQ ID NO: 39591 - DNA, 201 bp, Homo sapiens
gtgcagcctgcagaactatgagcctattaaatctcttttctttataaattacccagcctcaggtatttctttatggcaacacagaaacggactgatagaakcttctcaaagtaggagtgacatttgcgatggatcttgaaaagatgaacatgattttaccagatggagaatgaggaccccagtaaaaagtccacgtgacag

SEQ ID NO: 39592 - DNA, 201 bp, Homo sapiens
gagcactggagattgaagatttttttaagatgcatacatgactgtccctgcttcaagaagctcagattctagaggggaaaataggttaatagacaagtaamctgtagtagaattaatgctggaataaaggatgtgctaatactatgggagtggtgggagagtgctctatggaagtgttgatggttaaactgggctaacagt

SEQ ID NO: 39593 - DNA, 201 bp, Homo sapiens
tctggggcttcccccgatcactctcttgctcgcgctcttcccatgtgatattcctgcttcccttcgctttccaccatgactgcaagcttcctgaggccctyacaagaagcagatgccagccccatgcttcctgtgcagcctgcagaactatgagcctattaaatctcttttctttataaattacccagcctcaggtatttc

SEQ ID NO: 39594 - DNA, 201 bp, Homo sapiens
cccaggctggagtgcagtggtgtgatctttgttcattgcaacctctgcctcctaggcccaaacaatcctctcgcctcagccctccaaatagctgggactamagacacgcaccaccatgcctggctaatttttgtatttttttgtggagatagggtttcactgtgctgctcaagctggtctcagattccggagatcaagcga

SEQ ID NO: 39595 - DNA, 201 bp, Homo sapiens
aaactcagatgtgttccacaacagctatcaattaacagagccaaagatctcacccagaggctgtcacagttcccggggctggattccgggcctctttcctctattccatggtgcttctttctgacaggttttctgcgacgtcaaattgctcgtataccctctataaaatactttgagcccttctgtattcatttccctgtt

SEQ ID NO: 39596 - DNA, 201 bp, Homo sapiens
gcgtaccttacacagccaatgactttactaactcaggagacacacaaaactcagctctgaaaaacagaggcattttagagatcatggccatcagtgagttkgaggaggaagaaggcccagagatttctactcccaatcactcacaatctgcctttcttctcaaaattatagcaccatcattgccaacctcacctcacccat

SEQ ID NO: 39597 - DNA, 201 bp, Homo sapiens
gccagacctagttgtcccctccccgtagccatagctatttggcctgtgacaagctccgtgtatctcttcatctctgcacagctagtccaggagtccatccyttaggcagctcacaattatctctatctatcattcgcattttcccctttccaccaagcctgttctttcccaccttctccttacagctatatgtctatatat

SEQ ID NO: 39598 - DNA, 201 bp, Homo sapiens
aagctcaaaagtggtaaaacaccctctccagataaatggtacagccagatccctgtactcacagataccaaagttctggttcttttgctattccatgcttyctggagaacgtaagggagaagtgactgtcccctcattttcacctgcaatccacttggctttaggaagctcctgggccatgttctggtatcataccttgcc

SEQ ID NO: 39599 - DNA, 201 bp, Homo sapiens
tccccgtagccatagctatttggcctgtgacaagctccgtgtatctcttcatctctgcacagctagtccaggagtccatcctttaggcagctcacaattayctctatctatcattcgcattttcccctttccaccaagcctgttctttcccaccttctccttacagctatatgtctatatatatatatatatatgtctata

SEQ ID NO: 39600 - DNA, 201 bp, Homo sapiens
gtggtaaaacaccctctccagataaatggtacagccagatccctgtactcacagataccaaagttctggttcttttgctattccatgctttctggagaacrtaagggagaagtgactgtcccctcattttcacctgcaatccacttggctttaggaagctcctgggccatgttctggtatcataccttgcccagctctttt

SEQ ID NO: 39601 - DNA, 201 bp, Homo sapiens
ttatctctatctatcattcgcattttcccctttccaccaagcctgttctttcccaccttctccttacagctatatgtctatatatatatatatatatgtcwatatatatatatatatatgtctatatatatatatatatgtctatatatatatgtctatatatatatgtctatatatatatatgtctatatatatatgtct

SEQ ID NO: 39602 - DNA, 201 bp, Homo sapiens
ataaatggtacagccagatccctgtactcacagataccaaagttctggttcttttgctattccatgctttctggagaacgtaagggagaagtgactgtccyctcattttcacctgcaatccacttggctttaggaagctcctgggccatgttctggtatcataccttgcccagctcttttgagagttacctaaccagagga

SEQ ID NO: 39603 - DNA, 201 bp, Homo sapiens
gctcagttcacacaagatctggtttttgaaaagtctggggcttcccccgatcactctcttgctcgcgctcttcccatgtgatattcctgcttcccttcgcyttccaccatgactgcaagcttcctgaggccctcacaagaagcagatgccagccccatgcttcctgtgcagcctgcagaactatgagcctattaaatctct

SEQ ID NO: 39604 - DNA, 201 bp, Homo sapiens
aagctcctgggccatgttctggtatcataccttgcccagctcttttgagagttacctaaccagaggatgggaaatgcttggccaatatcagttatgttaayggctgagattcaacacaaataataatatgttatctcagtagaaacacctggcttatggatcatgaggaataagttttatcaaactccacatgagcttact

SEQ ID NO: 39605 - DNA, 201 bp, Homo sapiens
ccccatgcttcctgtgcagcctgcagaactatgagcctattaaatctcttttctttataaattacccagcctcaggtatttctttatggcaacacagaaayggactgatagaagcttctcaaagtaggagtgacatttgcgatggatcttgaaaagatgaacatgattttaccagatggagaatgaggaccccagtaaaaa

SEQ ID NO: 39606 - DNA, 201 bp, Homo sapiens
attttaccagatggagaatgaggaccccagtaaaaagtccacgtgacagagggaacaacatgtaccaaagttgcacaagtcagaaaatataaggatttatyagtggagatccaggatttaatctagaagggtatgcatttactcatgggaaaggatggaagaggagaggaggagaggggaagggaaagaaaaaaatgccat

SEQ ID NO: 39607 - DNA, 201 bp, Homo sapiens
ttgaaaagatgaacatgattttaccagatggagaatgaggaccccagtaaaaagtccacgtgacagagggaacaacatgtaccaaagttgcacaagtcagraaatataaggatttatcagtggagatccaggatttaatctagaagggtatgcatttactcatgggaaaggatggaagaggagaggaggagaggggaaggg

SEQ ID NO: 39608 - DNA, 201 bp, Homo sapiens
gtttggagatagctttgtcatctcgactcagaacaggtctcctcgtggaaccacagccttccttttggatcctggccatgagagcccattcttaggaaccrtgtttcaattccaataggtgatgtccactccgatgctacaggatgtcctccccagggtgccaatgggtcttcctgaggttctgacaagctttttggcagc

SEQ ID NO: 39609 - DNA, 201 bp, Homo sapiens
tgggtctaaaatgtcaagagaaagaattagataaacccaaaacagctgtcaaaatcagaatacaaagggatgtatccagggccaggacacgaggcagctcrgagcaaaagaggcagagtagagtccctgaaaggacgtgggctggagtccactctcaagagacggtcagggggtcagtgaatcagttaggcataaatcttc

SEQ ID NO: 39610 - DNA, 201 bp, Homo sapiens
tgctggaaactgagcaggaagtctttatcaagacagtgagagacagcttgagaaaagcctcaaggtcatgaaagagagcctgggtctaaaatgtcaagagraagaattagataaacccaaaacagctgtcaaaatcagaatacaaagggatgtatccagggccaggacacgaggcagctcagagcaaaagaggcagagtag

SEQ ID NO: 39611 - DNA, 201 bp, Homo sapiens
aacggggagttggagaggggtttgggaacacttcgtaggtctcttcttcccccaccctatctttagctgccaatagcactaccctgtgcagctgagccagytctgaccacagagctggttgttagcaatcttatcctccctagcaggtggggtttggagatagctttgtcatctcgactcagaacaggtctcctcgtggaa

SEQ ID NO: 39612 - DNA, 201 bp, Homo sapiens
ttgggtaaatgtacatactcacatataagcatagaaaaaaaactgtaaaaatccaggtagtaggattacatatgatttccattttattctgtgcactgaarttttttattttgttttcctgtttctctctttttaatttaatttagtttaattttaagttccgggatacatgtgcaatgttgtcctgtttctctatactga

SEQ ID NO: 39613 - DNA, 201 bp, Homo sapiens
atgaggatctcttgaactcgggaagcagaagttgcagtgagccaagatagcacgcctgcactccagcctgggtgacagagcgagaccctgtcaaaaaaaaraagtatacaatcatgtatacattacatttctaatttggttgggtaaatgtacatactcacatataagcatagaaaaaaaactgtaaaaatccaggtagta

SEQ ID NO: 39614 - DNA, 201 bp, Homo sapiens
gaaggaatgcacaggtggagggagaaggaaggacagatggccaaggaattacaacacagtgtcacaaataccagcaaatactatcctagagatagtgctamggggccaaaataagacatggtttcttttcttgggatagtcaggcaaagtttctgataaagttcaactgtttgtcccctccaaatctatgttgaaatgtga

SEQ ID NO: 39615 - DNA, 201 bp, Homo sapiens
ctgctgcctttttctccttacccacccccgttcatcattctaggactggaaatgggatgtgagagggggcaggatttaagtagtttttggttttcagctawattttggctgggaaacacaaattacactgaacactgtcattttaaggatgagaaagctgaggcgtgggtaaaggaaatgactttctcaaagcctcaagct

SEQ ID NO: 39616 - DNA, 201 bp, Homo sapiens
aaggaatgcacaggtggagggagaaggaaggacagatggccaaggaattacaacacagtgtcacaaataccagcaaatactatcctagagatagtgctacrgggccaaaataagacatggtttcttttcttgggatagtcaggcaaagtttctgataaagttcaactgtttgtcccctccaaatctatgttgaaatgtgat

SEQ ID NO: 39617 - DNA, 201 bp, Homo sapiens
acctaagattccatctgaccaagtgacagcctgtgtttccctggccctgagctaaaaagagcaagctttattggggagtaaggtcaatttgtcagccctcrgttgaattcaagtgcttgctatgcttggaaaagcagccccagacaggaaggaggatgttgtcagaaaaaaagcaaaccctgggtagatgtggtatttgga

SEQ ID NO: 39618 - DNA, 201 bp, Homo sapiens
tcgcagccttcctcctgtggagacaggctatcctcatggggcaaaggacagagtattgcctgaagtctgttgggtccctgccatccatgcctcctccctamttttacaggtggattctgataatcccaccttagccatgcttatcccttagcctctcttcttcatccccgctagcactgcagaacaagcctcctaagaggt

SEQ ID NO: 39619 - DNA, 201 bp, Homo sapiens
ttccagaaagctgaagccatggaatgtgagtcctcagaagaaatttagaagtcatctgagctcaaatttcctaatatgaacatttctttttccttttatayatccctgccctgctgcctttttctccttacccacccccgttcatcattctaggactggaaatgggatgtgagagggggcaggatttaagtagtttttggt

SEQ ID NO: 39620 - DNA, 201 bp, Homo sapiens
gtgaccctctctaagaagcagcagtgaccaccaatcccacctccatatgcagaagcagaggcccagtagaggagaagtggctggaaatttggttatgaaaygagtttctgtgaccctctccttttctcccttccaaggctctgtctgggccaatacacatggctgggttctcaaccttaccctttcttactaccccaaact

SEQ ID NO: 39621 - DNA, 201 bp, Homo sapiens
ttttaccagatggagaatgaggaccccagtaaaaagtccacgtgacagagggaacaacatgtaccaaagttgcacaagtcagaaaatataaggatttatcrgtggagatccaggatttaatctagaagggtatgcatttactcatgggaaaggatggaagaggagaggaggagaggggaagggaaagaaaaaaatgccatt

SEQ ID NO: 39622 - DNA, 201 bp, Homo sapiens
agtttattgtcattcactggggctttacaaattaaggaaagaaatgagagagagcaagcatgcatgcatgtgagagagaagattctaattgctctccaacmaagtgaacagagaactgaggtttgacataaagtcctggctcaaaccctgcccttctcaaatatttcatattattattattttgattataatagcttttgt

SEQ ID NO: 39623 - DNA, 201 bp, Homo sapiens
ctggccatgagagcccattcttaggaaccatgtttcaattccaataggtgatgtccactccgatgctacaggatgtcctccccagggtgccaatgggtctkcctgaggttctgacaagctttttggcagcaggcctcttctctgtgtggcactggatcatctccctgtcttatcaggctgcagttctgcttcaaatcagtc

SEQ ID NO: 39624 - DNA, 201 bp, Homo sapiens
cagatggctcttgtacttcacccccagcatcaacagagacttccaagtgttcgtctcaagagcccttagtttattgtcattcactggggctttacaaattraggaaagaaatgagagagagcaagcatgcatgcatgtgagagagaagattctaattgctctccaaccaagtgaacagagaactgaggtttgacataaagt

SEQ ID NO: 39625 - DNA, 201 bp, Homo sapiens
aacaggtctcctcgtggaaccacagccttccttttggatcctggccatgagagcccattcttaggaaccatgtttcaattccaataggtgatgtccactcygatgctacaggatgtcctccccagggtgccaatgggtcttcctgaggttctgacaagctttttggcagcaggcctcttctctgtgtggcactggatcatc

SEQ ID NO: 39626 - DNA, 201 bp, Homo sapiens
ttgtcatctcgactcagaacaggtctcctcgtggaaccacagccttccttttggatcctggccatgagagcccattcttaggaaccatgtttcaattccartaggtgatgtccactccgatgctacaggatgtcctccccagggtgccaatgggtcttcctgaggttctgacaagctttttggcagcaggcctcttctctg

SEQ ID NO: 39627 - DNA, 201 bp, Homo sapiens
tcaaggtcatgaaagagagcctgggtctaaaatgtcaagagaaagaattagataaacccaaaacagctgtcaaaatcagaatacaaagggatgtatccagrgccaggacacgaggcagctcagagcaaaagaggcagagtagagtccctgaaaggacgtgggctggagtccactctcaagagacggtcagggggtcagtga

SEQ ID NO: 39628 - DNA, 201 bp, Homo sapiens
tgggatagtcaggcaaagtttctgataaagttcaactgtttgtcccctccaaatctatgttgaaatgtgattcccaatatcggaggtggggcctactggarggtgattggatcatgggggcggatccctcatgaatggttttgcactaacctccttgttgatgagtgagttcttgctcagttcacacaagatctggttttt

SEQ ID NO: 39629 - DNA, 201 bp, Homo sapiens
gatgatacatgtaatgccctttacaatgttgtaaaatattctgagtctaggaataataaatgaatcagtgaataaatgaataaaagctatgttgacagggwtattaacattcccatcagcaagctaatatcataatagaaggacatccctacaagtgctagagatatcaaaatgaatgagaacatggtcctctccttgaag

SEQ ID NO: 39630 - DNA, 201 bp, Homo sapiens
ggagttaactaccaactctacttctgctaaggtgggtagcaccaggtaagttaactttacctctctgagcctcaatttctgaacaaatgaagaggctggawgatacatgtaatgccctttacaatgttgtaaaatattctgagtctaggaataataaatgaatcagtgaataaatgaataaaagctatgttgacagggtta

SEQ ID NO: 39631 - DNA, 201 bp, Homo sapiens
gttttgcactaacctccttgttgatgagtgagttcttgctcagttcacacaagatctggtttttgaaaagtctggggcttcccccgatcactctcttgctygcgctcttcccatgtgatattcctgcttcccttcgctttccaccatgactgcaagcttcctgaggccctcacaagaagcagatgccagccccatgcttcc

SEQ ID NO: 39632 - DNA, 201 bp, Homo sapiens
tgagtcatcttaaacccagctatgagggctcaaatatttgttgggtaagcatttgcttgatttctgatttaatgttgggtggatctttctatactttttttgtgtgctgccatagatatctgccattggttgccaaaaatgcttagttccctcttctgagcgagttccattgggcaatcatgaatttcttgtgggaagagg

SEQ ID NO: 39633 - DNA, 201 bp, Homo sapiens
cagtggtggtttttcgcatctcaatgacctaattgtaatctggctaattatttgatttagttacaaaaggaaataaaaatcacacacacacacacacacamgcatacataaatatgtacacaacacctacatatattcatttttttctgttcttcaatacatacaatccagcttcaggcctttttattttggtgtggattt

SEQ ID NO: 39634 - DNA, 201 bp, Homo sapiens
ttgtatctcttcacctctgcattactagtccaggagtccaccccttaggcagctcacagttatctctatctatcattcacattttcccctttccaccaagsctgttctttcccaccttctccttactaccagttctttttatgttttcttaataacaaaagtgttgttggttcttaaaacaacatttatttttttctgact

SEQ ID NO: 39635 - DNA, 201 bp, Homo sapiens
aaaaatacattttttaaaactaatggaaaaatagggttggcacagtaaggttagaagcatagaagcagacatgaaagttttatatctatgaattttatatwttctttttctttctttctttctttggtttttttttttttttttttagatggagtttcgctctttttgcccacgctggagtgcagtggcatgatctcggct

SEQ ID NO: 39636 - DNA, 201 bp, Homo sapiens
tatagacatatagctgtaaggagaaggtgggaaagaacaggcttggtggaaaggggaaaatgcgaatgatagatagagataattgtgagctgcctaaaggrtggactcctggactagctgtgcagagatgaagagatacacggagcttgtcacaggccaaatagctatggctacggggaggggacaactaggtctggcctt

SEQ ID NO: 39637 - DNA, 201 bp, Homo sapiens
tgaccttgaggcttttctcaagctgtctctcactgtcttgataaagacttcctgctcagtttccagcaccataaaccccactgctgccctccccaccatcyctctggctagtcccgcacccaccatgaaattaactcaaagctggaacaattacagagatacttctgtgggccagcctcctgtgcacctctggcatgtggg

SEQ ID NO: 39638 - DNA, 201 bp, Homo sapiens
gctccagcatctgctctgaccctctggtcccgttagcaccatctcctgttactcctaccatccatgagttctgttagttggctatcctttggtgggaggcygttccacctaacagtcatgacccagttgcagtacttgcctacggtttgggggtttgtatttttgagaggcagtgccaccaagtggatgctgtataggcac

SEQ ID NO: 39639 - DNA, 201 bp, Homo sapiens
tcagccacagtgataatgaccatcatagcataaggataacaatagcaggttttaaaaggaccgtatattgaccacaaataggtgtaatcacacactctccrtggtgctgcttaggctatcatttttcctatgcagctctgacccaattgcagaaagagaaattctgcagaacttggagagggtgaaaagtgcccatctcct

SEQ ID NO: 39640 - DNA, 201 bp, Homo sapiens
tagagagggtcacaagggagtgtaaggagtgccagcagccaggtgggtgggcatgagagcagatctccctgtgctcctcaccagcgctggacctcaggcaytttattgatatttaacaagcacaaatttagaatttaccatgtgctaggcactttataattgctagcccatttatgcctaattacagtgctaacctcatct

SEQ ID NO: 39641 - DNA, 201 bp, Homo sapiens
ttcccagcttgaggctttgagaaagtcatttcctttacccacgcctcagctttctcatccttaaaatgacagtgttcagtgtaatttgtgtttcccagccmaaatttagctgaaaaccaaaaactacttaaatcctgccccctctcacatcccatttccagtcctagaatgatgaacgggggtgggtaaggagaaaaaggc

SEQ ID NO: 39642 - DNA, 201 bp, Homo sapiens
gacttgggtaactttaagtagaaaaccatgtactttcttgactacactagtcgggtggctgtggaaggggagtctgggaaacttcccctgtgcttgtgaarccccaaaccgaagagcgaagtgattgactagtcaggcttttgaactatgatgcaatttctgatgttacacagtgtcagggtttctgttatctgatacagc

SEQ ID NO: 39643 - DNA, 201 bp, Homo sapiens
gaagccccaaaccgaagagcgaagtgattgactagtcaggcttttgaactatgatgcaatttctgatgttacacagtgtcagggtttctgttatctgatayagccataagaaactaccagaatgcttagtgtctgaaaacattaattatgttaccattactcacaattctgtagctcaagaattcaggctggcccggaagg

SEQ ID NO: 39644 - DNA, 201 bp, Homo sapiens
tattatggaatcttagactgtcagacttagaggggagctaaagaatcattggattcagaaatttccaacctggcctctgtcaaggtcataacggggtcttygagctattttcaaaattccaaaagcctaaatggaatcgcacattaacataacatgctgttgatgtttttgtttgtttgtttgttttcttttggcagattt

SEQ ID NO: 39645 - DNA, 201 bp, Homo sapiens
catgcacaggctctgcagccctgacgcatggtgcaaaagtggactaccacacttactagctgtacttcttaacttcatttttcctgtctggaaaatatggytaattgtgcccaccttatggggctcctgtgaagatcaaacaagtaaccatacataaaatgtttagaacaattctgggcacatgatgagtacattatacaa

SEQ ID NO: 39646 - DNA, 201 bp, Homo sapiens
atatatagacatatagctgtaaggagaaggtgggaaagaacaggcttggtggaaaggggaaaatgcgaatgatagatagagataattgtgagctgcctaarggatggactcctggactagctgtgcagagatgaagagatacacggagcttgtcacaggccaaatagctatggctacggggaggggacaactaggtctggc

SEQ ID NO: 39647 - DNA, 201 bp, Homo sapiens
tatagacatatatatatatatatatagacatatagctgtaaggagaaggtgggaaagaacaggcttggtggaaaggggaaaatgcgaatgatagatagagrtaattgtgagctgcctaaaggatggactcctggactagctgtgcagagatgaagagatacacggagcttgtcacaggccaaatagctatggctacgggga

SEQ ID NO: 39648 - DNA, 201 bp, Homo sapiens
agacatatatatatagacatatatatatatagacatatatatatagacatatatatatagacatatatatatatatatagacatatatatatatatatatwgacatatatatatatatatatagacatatagctgtaaggagaaggtgggaaagaacaggcttggtggaaaggggaaaatgcgaatgatagatagagataa

SEQ ID NO: 39649 - DNA, 201 bp, Homo sapiens
agagatttaataggctcatagttctgcaggctgcacaggaagcatggggctggcatctgcttcttgtgagggcctcaggaagcttgcagtcatggtggaargcgaagggaagcaggaatatcacatgggaagagcgcgagcaagagagtgatcgggggaagccccagacttttcaaaaaccagatcttgtgtgaactgagc

SEQ ID NO: 39650 - DNA, 201 bp, Homo sapiens
tttttactggggtcctcattctccatctggtaaaatcatgttcatcttttcaagatccatcgcaaatgtcactcctactttgagaagcttctatcagtccrtttctgtgttgccataaagaaatacctgaggctgggtaatttataaagaaaagagatttaataggctcatagttctgcaggctgcacaggaagcatgggg

SEQ ID NO: 39651 - DNA, 201 bp, Homo sapiens
gagggtgaaaagtgcccatctcctgggctccctcaccattcctgagctctcagaatgagtctctgttcaccaggagggcgctagtgtgcaggagacagtggccaagcctccaccacagctgccttgccaggttccttgtcaatacctgttgacatttccctgagtaatcattctgggcacctcggtatattttttcatatc

SEQ ID NO: 39652 - DNA, 201 bp, Homo sapiens
ttgcatcctgatagcttagctcccacttataagtgagaacataaagatatttggttttccattcctgagttacttcacttagaataatggcctccaacttyatccaagttgctgccaatgccattatgtggaagtttatcccagttctcaggtcacccctgtctggaccctgactctgaacctcaaggacttccttaaaca

SEQ ID NO: 39653 - DNA, 201 bp, Homo sapiens
ttatgtttgtattcttccagtgggaaggaacttctttccttggaggcaccctattatgcagtgtaacaaagtgccaacttgtccctccatgccttctgccygtagactttctactgcccttggaaatgtaaataagtacaatccttcgtccaaatgtctgatgacagaaaagtacggaagcccattcttccatgtcctact

SEQ ID NO: 39654 - DNA, 201 bp, Homo sapiens
atacaagcattagcttttataattattcagcttctacatcaaatggaagttttttactttatttcattagtttttggggaagaggtggtttttggttacamggataatttctttagtggtgatatctgagattttggtgcacctgtcacccaagcagtgtacactatatccaatgtgtagtcttttatccctcacgactct

SEQ ID NO: 39655 - DNA, 201 bp, Homo sapiens
cccataattctgcatgtcatgggagggatctggtgggaggtaattgaatcatggatgttggtctttcccatgcttttcttgtgatagtgaataagtctcaygagacctgatggttttataaaggggagatcccccacataagctcttttgcctgctgccatggaagacgtgcctttgcttctcctttgccttctgccatga

SEQ ID NO: 39656 - DNA, 201 bp, Homo sapiens
aaagtcaaggatgaatccaggacacctaaatcatactgactgatatggtttgactgtgggtccacccaagtcccatcttgaattgtagctcccataattcygcatgtcatgggagggatctggtgggaggtaattgaatcatggatgttggtctttcccatgcttttcttgtgatagtgaataagtctcatgagacctgat

SEQ ID NO: 39657 - DNA, 201 bp, Homo sapiens
ttggcccattcttgacacttgcataccacctgtgtgtgttctggggcaggtggagtctcccttctgaatctctggttctcacctgtgcaataaggtagcartccctgtgggaaggagcccccaggcacttcagatccaggcagacttgctgaggcagggcaagcctaagtgcccacacatccaagccagagtcacctggat

SEQ ID NO: 39658 - DNA, 201 bp, Homo sapiens
catatctctttgctcttaaactacactacatgtcctagcttcccttgcaattatacttaaccctgtgactgcagtctggtgaatgaaatatagggagaagkggtgtgtactgttttatgtctgacccatgataaacctccagtgtgaaatcctacactctcttttttcctcatatgccagctacatgtgggtacccatggt

SEQ ID NO: 39659 - DNA, 201 bp, Homo sapiens
gcctgagttcctgcatgactgcctggagcagaatcttctgcactctcttctgattagactatgcaagagtaaaaaagaaatttctattgtagtaggccackgagatgtcagtgtttttctgttatagtggctagcattacctaaacaaatacactctccttccccaaatcctcattctccacctcacaaaactggcaagca

SEQ ID NO: 39660 - DNA, 201 bp, Homo sapiens
aataaggtagcaatccctgtgggaaggagcccccaggcacttcagatccaggcagacttgctgaggcagggcaagcctaagtgcccacacatccaagccasagtcacctggattcccttaaggtctggaaagtagatgatgcccagaggccagctactagaaatggggcacaaggacccaaagaacctggcaaccaagctg

SEQ ID NO: 39661 - DNA, 201 bp, Homo sapiens
gaagatttatgcctaactgattcactgaccccctgaccgtctcttgagagtggactccagcccacgtcctttcagggactctactctgcctcttttgctcygagctgcctcgtgtcctggccctggatacatccctttgtattctgattttgacagctgttttgggtttatctaattctttctcttgacattttagaccca

SEQ ID NO: 39662 - DNA, 201 bp, Homo sapiens
ctactctgcctcttttgctctgagctgcctcgtgtcctggccctggatacatccctttgtattctgattttgacagctgttttgggtttatctaattcttyctcttgacattttagacccaggctctctttcatgaccttgaggcttttctcaagctgtctctcactgtcttgataaagacttcctgctcagtttccagca

SEQ ID NO: 39663 - DNA, 201 bp, Homo sapiens
acatctcagggctcccaagggtagaaatgcagaagttgccacatcttcttaaggctgtagcctggaactagcatagacttgcttccatcatattctactgkttaaaatgagtcacagggtcagcccagagtcaatttgggagacagcaacacaatacaggtggggtggtgcattggggacaatctctgaaaaccagttacc

SEQ ID NO: 39664 - DNA, 201 bp, Homo sapiens
atccaagccagagtcacctggattcccttaaggtctggaaagtagatgatgcccagaggccagctactagaaatggggcacaaggacccaaagaacctggmaaccaagctggcttatgttcagatgcttgcaaaataagtggctgaggactcttacaccctccaaatcttatgacttgtgtcctcagaggctgggagtagg

SEQ ID NO: 39665 - DNA, 201 bp, Homo sapiens
ttccacgaggagacctgttctgagtcgagatgacaaagctatctccaaaccccacctgctagggaggataagattgctaacaaccagctctgtggtcagarctggctcagctgcacagggtagtgctattggcagctaaagatagggtgggggaagaagagacctacgaagtgttcccaaacccctctccaactccccgtt

SEQ ID NO: 39666 - DNA, 201 bp, Homo sapiens
caaaaatagttaagtacaactactggggaaaaatatttccttttgcctgtgctgggcttcaagcacgcatattaatgtttcctggatagatgttctcagcycattcttctttttggatgccccaagaagtcaggctgccttgatctcaccctacaatttgctctattctaattttggaaactaatttatccaactgaaaat

SEQ ID NO: 39667 - DNA, 201 bp, Homo sapiens
gacccaattgcagaaagagaaattctgcagaacttggagagggtgaaaagtgcccatctcctgggctccctcaccattcctgagctctcagaatgagtctytgttcaccaggagggcgctagtgtgcaggagacagtggccaagcctccaccacagctgccttgccaggttccttgtcaatacctgttgacatttccctga

SEQ ID NO: 39668 - DNA, 201 bp, Homo sapiens
tcagtatagagaaacaggacaacattgcacatgtatcccggaacttaaaattaaactaaattaaattaaaaagagagaaacaggaaaacaaaataaaaaayttcagtgcacagaataaaatggaaatcatatgtaatcctactacctggatttttacagttttttttctatgcttatatgtgagtatgtacatttacccaa

SEQ ID NO: 39669 - DNA, 201 bp, Homo sapiens
ggtattttcaagtacattgtctttttatctcatcacaacagccttgtaaggcagatgctttatctcttttgcaagggtgaaattaagcacagagaagttarataatttgcccatggtcacacagctagtaagtctagagacatgagaactgaaaacagggtccaggggccagtgctttttctaatcttttacaacagtgac

SEQ ID NO: 39670 - DNA, 201 bp, Homo sapiens
gttgacatttccctgagtaatcattctgggcacctcggtatattttttcatatcgctggatagattacgggggctctattgattttgtggtttcatgtgtraaagatctaatcttaatcctcagttgttcattttccttaaccttttaataacatgatacggagggaagctgtcagaatggaaattgtttctgaggcatat

SEQ ID NO: 39671 - DNA, 201 bp, Homo sapiens
tactacctggatttttacagttttttttctatgcttatatgtgagtatgtacatttacccaaccaaattagaaatgtaatgtatacatgattgtatacttyttttttttgacagggtctcgctctgtcacccaggctggagtgcaggcgtgctatcttggctcactgcaacttctgcttcccgagttcaagagatcctcat

SEQ ID NO: 39672 - DNA, 201 bp, Homo sapiens
tttcaaacatgacaaaaaaaggaaaggggggaaaatggcagaccaggccccatggagtgacaaaaaacacatcatcctatgtgaaaaggcatatggatgaygatattgtggtcacagaagaccctttgcttttgcttaaagaagtcagttccaaccctgttgtaatcctctgatgcctgtcactccaaatttggtgtctca

SEQ ID NO: 39673 - DNA, 201 bp, Homo sapiens
tgacaggtaagagttattttatttcctttgatctatttattctcggagtctttccacaacatgaatttttattattattcgctgtgtcacagatgagaaamctgcattgcccaaggtcacacagcttttaaaaataaggttcagagttagagagatctgcactcaaatcctgacactgctaggttgttgctgtatcacttt

SEQ ID NO: 39674 - DNA, 201 bp, Homo sapiens
tcacatttcaacatagatttggaggggacaaacagttgaactttatcagaaactttgcctgactatcccaagaaaagaaaccatgtcttattttggccccktagcactatctctaggatagtatttgctggtatttgtgacactgtgttgtaattccttggccatctgtccttccttctccctccacctgtgcattccttc

SEQ ID NO: 39675 - DNA, 201 bp, Homo sapiens
aacatactgtaactgcataggaacatcaggaaaacacacttgacctgtataacaattctctgtagggcaaaaatatatagattctttatgaaaatcatgtsctaaacatacgaaccaaacactgcactttttgtctcataagtgtaaaaaaaggaagcttagcctcttctgtttcacgtacaaacagtccagtgatttata

SEQ ID NO: 39676 - DNA, 201 bp, Homo sapiens
agcttgaggctttgagaaagtcatttcctttacccacgcctcagctttctcatccttaaaatgacagtgttcagtgtaatttgtgtttcccagccaaaatwtagctgaaaaccaaaaactacttaaatcctgccccctctcacatcccatttccagtcctagaatgatgaacgggggtgggtaaggagaaaaaggcagcag

SEQ ID NO: 39677 - DNA, 201 bp, Homo sapiens
atcacatttcaacatagatttggaggggacaaacagttgaactttatcagaaactttgcctgactatcccaagaaaagaaaccatgtcttattttggcccygtagcactatctctaggatagtatttgctggtatttgtgacactgtgttgtaattccttggccatctgtccttccttctccctccacctgtgcattcctt

SEQ ID NO: 39678 - DNA, 201 bp, Homo sapiens
tccaaataccacatctacccagggtttgctttttttctgacaacatcctccttcctgtctggggctgcttttccaagcatagcaagcacttgaattcaacygagggctgacaaattgaccttactccccaataaagcttgctctttttagctcagggccagggaaacacaggctgtcacttggtcagatggaatcttaggt

SEQ ID NO: 39679 - DNA, 201 bp, Homo sapiens
accaaaaactacttaaatcctgccccctctcacatcccatttccagtcctagaatgatgaacgggggtgggtaaggagaaaaaggcagcagggcagggatrtataaaaggaaaaagaaatgttcatattaggaaatttgagctcagatgacttctaaatttcttctgaggactcacattccatggcttcagctttctggaa

SEQ ID NO: 39680 - DNA, 201 bp, Homo sapiens
atctccaagaaaccctttccagataagtgggaaaactaaaccctctgagcggaactccacagctttgtgactgcagccttggccctgcagccccacaggtmtccacaaagatagttggcatcttcaaaatacttaataattttcagccacagtgataatgaccatcatagcataaggataacaatagcaggttttaaaagg

SEQ ID NO: 39681 - DNA, 201 bp, Homo sapiens
aatggcatttttttctttcccttcccctctcctcctctcctcttccatcctttcccatgagtaaatgcatacccttctagattaaatcctggatctccacygataaatccttatattttctgacttgtgcaactttggtacatgttgttccctctgtcacgtggactttttactggggtcctcattctccatctggtaaaa

SEQ ID NO: 39682 - DNA, 201 bp, Homo sapiens
gactgatttgaagcagaactgcagcctgataagacagggagatgatccagtgccacacagagaagaggcctgctgccaaaaagcttgtcagaacctcaggmagacccattggcaccctggggaggacatcctgtagcatcggagtggacatcacctattggaattgaaacatggttcctaagaatgggctctcatggccag

SEQ ID NO: 39683 - DNA, 201 bp, Homo sapiens
gatgatccagtgccacacagagaagaggcctgctgccaaaaagcttgtcagaacctcaggaagacccattggcaccctggggaggacatcctgtagcatcrgagtggacatcacctattggaattgaaacatggttcctaagaatgggctctcatggccaggatccaaaaggaaggctgtggttccacgaggagacctgtt

SEQ ID NO: 39684 - DNA, 201 bp, Homo sapiens
cagagaagaggcctgctgccaaaaagcttgtcagaacctcaggaagacccattggcaccctggggaggacatcctgtagcatcggagtggacatcacctaytggaattgaaacatggttcctaagaatgggctctcatggccaggatccaaaaggaaggctgtggttccacgaggagacctgttctgagtcgagatgacaa

SEQ ID NO: 39685 - DNA, 201 bp, Homo sapiens
tcactgaccccctgaccgtctcttgagagtggactccagcccacgtcctttcagggactctactctgcctcttttgctctgagctgcctcgtgtcctggcyctggatacatccctttgtattctgattttgacagctgttttgggtttatctaattctttctcttgacattttagacccaggctctctttcatgaccttga

SEQ ID NO: 39686 - DNA, 201 bp, Homo sapiens
cttagactgtcagacttagaggggagctaaagaatcattggattcagaaatttccaacctggcctctgtcaaggtcataacggggtctttgagctattttyaaaattccaaaagcctaaatggaatcgcacattaacataacatgctgttgatgtttttgtttgtttgtttgttttcttttggcagatttgtccacgtctc

SEQ ID NO: 39687 - DNA, 201 bp, Homo sapiens
ggaagcatggggctggcatctgcttcttgtgagggcctcaggaagcttgcagtcatggtggaaagcgaagggaagcaggaatatcacatgggaagagcgcragcaagagagtgatcgggggaagccccagacttttcaaaaaccagatcttgtgtgaactgagcaagaactcactcatcaacaaggaggttagtgcaaaac

SEQ ID NO: 39688 - DNA, 201 bp, Homo sapiens
taaacctggctacctacacatggttcacaaacagcaggtcaaagtcaaggatgaatccaggacacctaaatcatactgactgatatggtttgactgtgggyccacccaagtcccatcttgaattgtagctcccataattctgcatgtcatgggagggatctggtgggaggtaattgaatcatggatgttggtctttcccat

SEQ ID NO: 39689 - DNA, 201 bp, Homo sapiens
ctcaagttctcacatgacatctcagggctcccaagggtagaaatgcagaagttgccacatcttcttaaggctgtagcctggaactagcatagacttgcttmcatcatattctactggttaaaatgagtcacagggtcagcccagagtcaatttgggagacagcaacacaatacaggtggggtggtgcattggggacaatct

SEQ ID NO: 39690 - DNA, 201 bp, Homo sapiens
tgactccaaatagactaactcaggcttgatctcagggtgatctaatggtttcaaaaagcagcaagaaaagacaagccccagtgcacaagtgctttccaaayttctgcttgcctgatgtttcttaatgtctccttggctgaagcaatggccaagcccacattcaagagctagagacagagcttatacctgttgatgggagga

SEQ ID NO: 39691 - DNA, 201 bp, Homo sapiens
cttgcttccatcatattctactggttaaaatgagtcacagggtcagcccagagtcaatttgggagacagcaacacaatacaggtggggtggtgcattgggracaatctctgaaaaccagttaccacattcaggaagtggcattgcttaatgaaggacttttttaaaaatacaagttttaatcaaaagagcccctttctccc

SEQ ID NO: 39692 - DNA, 201 bp, Homo sapiens
gaagaattgcttaaggccaggagtttgagagcagcctggacaaaattgcaagaccccatctggtgtggtggcacaaacttgtagtcctagctacttgggargctgaggtaaaaggattgctccagccccggagtttgaggctgcagtgagctaggattacgccactgctctctaccctgggagacagagtgagaccctttc

SEQ ID NO: 39693 - DNA, 201 bp, Homo sapiens
tgaacaagatctttcttcaaagggttttaagacccttgatgaatggaaatgatgtaatccaaagatggggcatgagagagaagagcaggggccctctaaakatgatcaccagatctcacaagcaaaccacagcaaggagaacccggtcctgcctgaccagaggccattccctttgccaaggaagacatcaaatctgacacc

SEQ ID NO: 39694 - DNA, 201 bp, Homo sapiens
gatgtcagtgtttttctgttatagtggctagcattacctaaacaaatacactctccttccccaaatcctcattctccacctcacaaaactggcaagcattsactagaaaggagtcacaggttgaaaaccgccttctaagtggtcaatgtctatgacatggatgtggtggtggcaggaaggcagtgtctatttagcagagga

SEQ ID NO: 39695 - DNA, 201 bp, Homo sapiens
tctgtgttgacagatatggaaattctgtgtcctttattatgtatatttctgtatataaagaatggatatctatttatctgtggacatgcacaggtgccctstttcttctatggtgcatggtcttataaattataggtaattatttctctctggctgtaaaagaggcttagatgtagaataccgtgtaagccatatagttca

SEQ ID NO: 39696 - DNA, 201 bp, Homo sapiens
tctcacaagatctgatggttttagctctcttctcttgtttgccagcatgtaagatatgcctttcacctttcgccatgagtgtgaggcctccccagccacayggaactgtaagttcattaaacttctttattttgtaaattgcccaatcttgggtatgtctttatcagcagcatgaaaatggactaatacagataggatgtg

SEQ ID NO: 39697 - DNA, 201 bp, Homo sapiens
aaccagctctgtggtcagaactggctcagctgcacagggtagtgctattggcagctaaagatagggtgggggaagaagagacctacgaagtgttcccaaasccctctccaactccccgtttggacaagaaagcctatcaaggcttccgagacatctaaggaggagagccagtaactgctcagagtacatctttatgatgac

SEQ ID NO: 39698 - DNA, 201 bp, Homo sapiens
ttccagaaaattcaccacttactgtagtttaattcctccttgtctatttgaatacctgggtggaaatatcagactcacccaggctcagttctacaggtaaygtggagccaaggagggtcttagaagagcagagtagatgagcaaagctgtgtttctcagacactgcttaagatgcatttcaaagggcaaagacaaggcgac

SEQ ID NO: 39699 - DNA, 201 bp, Homo sapiens
cttctgcccgtagactttctactgcccttggaaatgtaaataagtacaatccttcgtccaaatgtctgatgacagaaaagtacggaagcccattcttccawgtcctacttctaggttaccacttgccagttccttctgcctttttttttttttttttttttgagatggagtctcactctgtcgcccaggctagagtgcagt

SEQ ID NO: 39700 - DNA, 201 bp, Homo sapiens
taacgtggagccaaggagggtcttagaagagcagagtagatgagcaaagctgtgtttctcagacactgcttaagatgcatttcaaagggcaaagacaaggygacctcttaggaggcttgttctgcagtgctagcggggatgaagaagagaggctaagggataagcatggctaaggtgggattatcagaatccacctgtaaa

SEQ ID NO: 39701 - DNA, 201 bp, Homo sapiens
tggctcatttctttatctacaaaacggggataatgctatctttctgggattttggagggattaaagatgatgtgggcaaaccatctgcacagtacccaacrcttaggagaggatcaacaaaagctattataatcaaaataataataatatgaaatatttgagaagggcagggtttgagccaggactttatgtcaaacctca

SEQ ID NO: 39702 - DNA, 201 bp, Homo sapiens
tctctttcagatatgacttagaatatgattgaatatgaatacatgattgaagatatattataaaattgagatacttgttgcagtaagttataaattaattwgagagagttggaccttctctttcaatttgttctattactttatgcccttcaacaagcctttgtagctttgttttgttggttttttttttaatctagctct

SEQ ID NO: 39703 - DNA, 201 bp, Homo sapiens
tttggagggattaaagatgatgtgggcaaaccatctgcacagtacccaacacttaggagaggatcaacaaaagctattataatcaaaataataataatatsaaatatttgagaagggcagggtttgagccaggactttatgtcaaacctcagttctctgttcacttggttggagagcaattagaatcttctctctcacatg

SEQ ID NO: 39704 - DNA, 201 bp, Homo sapiens
ttctgttgttcgacagttaaatgagcattattttctgtcttcctttacagccactccaggcatatcatgtgcactggccctgctagctaatgctcttcccyccactaccatcaccttatggtaaactcctacttacttcttttttttttttttttttttttttgagacggagtctcgctctgtcacccaggctagagtgca

SEQ ID NO: 39705 - DNA, 201 bp, Homo sapiens
caaaccatctgcacagtacccaacacttaggagaggatcaacaaaagctattataatcaaaataataataatatgaaatatttgagaagggcagggtttgrgccaggactttatgtcaaacctcagttctctgttcacttggttggagagcaattagaatcttctctctcacatgcatgcatgcttgctctctctcatttc

SEQ ID NO: 39706 - DNA, 201 bp, Homo sapiens
ctgtcacgtggactttttactggggtcctcattctccatctggtaaaatcatgttcatcttttcaagatccatcgcaaatgtcactcctactttgagaagmttctatcagtccgtttctgtgttgccataaagaaatacctgaggctgggtaatttataaagaaaagagatttaataggctcatagttctgcaggctgcac

SEQ ID NO: 39707 - DNA, 201 bp, Homo sapiens
actgttagcccagtttaaccatcaacacttccatagagcactctcccaccactcccatagtattagcacatcctttattccagcattaattctactacagkttacttgtctattaacctattttcccctctagaatctgagcttcttgaagcagggacagtcatgtatgcatcttaaaaaaatcttcaatctccagtgctc

SEQ ID NO: 39708 - DNA, 201 bp, Homo sapiens
gaaatacctgaggctgggtaatttataaagaaaagagatttaataggctcatagttctgcaggctgcacaggaagcatggggctggcatctgcttcttgtragggcctcaggaagcttgcagtcatggtggaaagcgaagggaagcaggaatatcacatgggaagagcgcgagcaagagagtgatcgggggaagccccaga

SEQ ID NO: 39709 - DNA, 201 bp, Homo sapiens
tcgcttgatctccggaatctgagaccagcttgagcagcacagtgaaaccctatctccacaaaaaaatacaaaaattagccaggcatggtggtgcgtgtctktagtcccagctatttggagggctgaggcgagaggattgtttgggcctaggaggcagaggttgcaatgaacaaagatcacaccactgcactccagcctggg

SEQ ID NO: 39710 - DNA, 201 bp, Homo sapiens
aacagggaaatgaatacagaagggctcaaagtattttatagagggtatacgagcaatttgacgtcgcagaaaacctgtcagaaagaagcaccatggaatagaggaaagaggcccggaatccagccccgggaactgtgacagcctctgggtgagatctttggctctgttaattgatagctgttgtggaacacatctgagttt

SEQ ID NO: 39711 - DNA, 201 bp, Homo sapiens
atgggtgaggtgaggttggcaatgatggtgctataattttgagaagaaaggcagattgtgagtgattgggagtagaaatctctgggccttcttcctcctcmaactcactgatggccatgatctctaaaatgcctctgtttttcagagctgagttttgtgtgtctcctgagttagtaaagtcattggctgtgtaaggtacgc

SEQ ID NO: 39712 - DNA, 201 bp, Homo sapiens
ggcaaggtatgataccagaacatggcccaggagcttcctaaagccaagtggattgcaggtgaaaatgaggggacagtcacttctcccttacgttctccagraagcatggaatagcaaaagaaccagaactttggtatctgtgagtacagggatctggctgtaccatttatctggagagggtgttttaccacttttgagctt

SEQ ID NO: 39713 - DNA, 201 bp, Homo sapiens
aaaagagctgggcaaggtatgataccagaacatggcccaggagcttcctaaagccaagtggattgcaggtgaaaatgaggggacagtcacttctcccttaygttctccagaaagcatggaatagcaaaagaaccagaactttggtatctgtgagtacagggatctggctgtaccatttatctggagagggtgttttaccac

SEQ ID NO: 39714 - DNA, 201 bp, Homo sapiens
tcctctggttaggtaactctcaaaagagctgggcaaggtatgataccagaacatggcccaggagcttcctaaagccaagtggattgcaggtgaaaatgagrggacagtcacttctcccttacgttctccagaaagcatggaatagcaaaagaaccagaactttggtatctgtgagtacagggatctggctgtaccatttat

SEQ ID NO: 39715 - DNA, 201 bp, Homo sapiens
agtaagctcatgtggagtttgataaaacttattcctcatgatccataagccaggtgtttctactgagataacatattattatttgtgttgaatctcagccrttaacataactgatattggccaagcatttcccatcctctggttaggtaactctcaaaagagctgggcaaggtatgataccagaacatggcccaggagctt

SEQ ID NO: 39716 - DNA, 201 bp, Homo sapiens
ctgttatctgatacagccataagaaactaccagaatgcttagtgtctgaaaacattaattatgttaccattactcacaattctgtagctcaagaattcagrctggcccggaaggaaggggcatctctcttccatgtgatgtctgttggggctggaacagtcccagttgtttctccactcacaggtctgttgacttggctca

SEQ ID NO: 39717 - DNA, 201 bp, Homo sapiens
tgatacagccataagaaactaccagaatgcttagtgtctgaaaacattaattatgttaccattactcacaattctgtagctcaagaattcaggctggcccrgaaggaaggggcatctctcttccatgtgatgtctgttggggctggaacagtcccagttgtttctccactcacaggtctgttgacttggctcagaagcttg

SEQ ID NO: 39718 - DNA, 201 bp, Homo sapiens
atggcatttttttctttcccttcccctctcctcctctcctcttccatcctttcccatgagtaaatgcatacccttctagattaaatcctggatctccactrataaatccttatattttctgacttgtgcaactttggtacatgttgttccctctgtcacgtggactttttactggggtcctcattctccatctggtaaaat

SEQ ID NO: 39719 - DNA, 201 bp, Homo sapiens
cccttcccctctcctcctctcctcttccatcctttcccatgagtaaatgcatacccttctagattaaatcctggatctccactgataaatccttatatttyctgacttgtgcaactttggtacatgttgttccctctgtcacgtggactttttactggggtcctcattctccatctggtaaaatcatgttcatcttttcaa

SEQ ID NO: 39720 - DNA, 201 bp, Homo sapiens
taagaaactaccagaatgcttagtgtctgaaaacattaattatgttaccattactcacaattctgtagctcaagaattcaggctggcccggaaggaagggkcatctctcttccatgtgatgtctgttggggctggaacagtcccagttgtttctccactcacaggtctgttgacttggctcagaagcttgatggctgaagg

SEQ ID NO: 39721 - DNA, 201 bp, Homo sapiens
tggtagagcctgtctctacaacttactgaatgtgtggcatgggctatgttacttagcatttccgttcagggctgtgaaagtgcttagcacagtgccacacrtgacaggaaatggtaacgattaatatcatcattggttatgttctggctgttaatttcataatttccaacttaaacagccttccagctagacaattgactt

SEQ ID NO: 39722 - DNA, 201 bp, Homo sapiens
gctgccaaaaagcttgtcagaacctcaggaagacccattggcaccctggggaggacatcctgtagcatcggagtggacatcacctattggaattgaaacayggttcctaagaatgggctctcatggccaggatccaaaaggaaggctgtggttccacgaggagacctgttctgagtcgagatgacaaagctatctccaaac

SEQ ID NO: 39723 - DNA, 201 bp, Homo sapiens
aagggaagatttatttcagtctagatgcagtcagcatccaactttgcagaatttgctagagaggaaaagcctggcttcataaacctggctacctacacatsgttcacaaacagcaggtcaaagtcaaggatgaatccaggacacctaaatcatactgactgatatggtttgactgtgggtccacccaagtcccatcttgaa

SEQ ID NO: 39724 - DNA, 201 bp, Homo sapiens
taagttcattaaacttctttattttgtaaattgcccaatcttgggtatgtctttatcagcagcatgaaaatggactaatacagataggatgtgtactaatmacggttggtcagcactgatggtgacaatgagcactgtataaccaggtggatgcaaaaggtgctccaagtgtgctccaaggcgaggggttcaccagagtgc

SEQ ID NO: 39725 - DNA, 201 bp, Homo sapiens
tgagaggagagctgacctcgcagatgttgtttccatcatttgggatgtgctcgccaaatgcaagagggcggactgaagagatagctctttaggtacaattygatttggtactagttatttagggccaggtgtgggcacaatatgtttaatactggaggtacagtacatcatatgttctgttaagtcgtttttgtggttcct

SEQ ID NO: 39726 - DNA, 201 bp, Homo sapiens
tcacaaatgtttttaatataagtacagacaattgaaagattactcactttctactccagatagttccagaaatgctagaaatgtgtggggaggaaaaatgrgattctacttggcaatgggccttgaaactaattccctgggggacttgaaacaactgatggattatgtagttgcattgattttgtggattaagtgtggcaa

SEQ ID NO: 39727 - DNA, 201 bp, Homo sapiens
acctcttaggaggcttgttctgcagtgctagcggggatgaagaagagaggctaagggataagcatggctaaggtgggattatcagaatccacctgtaaaaktagggaggaggcatggatggcagggacccaacagacttcaggcaatactctgtcctttgccccatgaggatagcctgtctccacaggaggaaggctgcga

SEQ ID NO: 39728 - DNA, 201 bp, Homo sapiens
agtttggggtagtaagaaagggtaaggttgagaacccagccatgtgtattggcccagacagagccttggaagggagaaaaggagagggtcacagaaactcrtttcataaccaaatttccagccacttctcctctactgggcctctgcttctgcatatggaggtgggattggtggtcactgctgcttcttagagagggtcac

SEQ ID NO: 39729 - DNA, 201 bp, Homo sapiens
acaaaagctattataatcaaaataataataatatgaaatatttgagaagggcagggtttgagccaggactttatgtcaaacctcagttctctgttcacttkgttggagagcaattagaatcttctctctcacatgcatgcatgcttgctctctctcatttctttccttaatttgtaaagccccagtgaatgacaataaact

SEQ ID NO: 39730 - DNA, 201 bp, Homo sapiens
actttatgtcaaacctcagttctctgttcacttggttggagagcaattagaatcttctctctcacatgcatgcatgcttgctctctctcatttctttcctyaatttgtaaagccccagtgaatgacaataaactaagggctcttgagacgaacacttggaagtctctgttgatgctgggggtgaagtacaagagccatctg

SEQ ID NO: 39731 - DNA, 201 bp, Homo sapiens
aaaaaccagatcttgtgtgaactgagcaagaactcactcatcaacaaggaggttagtgcaaaaccattcatgagggatccgcccccatgatccaatcaccytccagtaggccccacctccgatattgggaatcacatttcaacatagatttggaggggacaaacagttgaactttatcagaaactttgcctgactatccca

SEQ ID NO: 39732 - DNA, 201 bp, Homo sapiens
cttcaaggagaggaccatgttctcattcattttgatatctctagcacttgtagggatgtccttctattatgatattagcttgctgatgggaatgttaatawccctgtcaacatagcttttattcatttattcactgattcatttattattcctagactcagaatattttacaacattgtaaagggcattacatgtatcatc

SEQ ID NO: 39733 - DNA, 201 bp, Homo sapiens
taaccctgtcaacatagcttttattcatttattcactgattcatttattattcctagactcagaatattttacaacattgtaaagggcattacatgtatcwtccagcctcttcatttgttcagaaattgaggctcagagaggtaaagttaacttacctggtgctacccaccttagcagaagtagagttggtagttaactcc

SEQ ID NO: 39734 - DNA, 201 bp, Homo sapiens
actgcaagcttggcctcccaggttcacaccattctcctgcctcagcctcccgtgtagctgggactacaggtgcccaccaccacgcccggctaattttttayattttttagtacagacagggtttcactgtgtcagccaggatggtctcaatttcctgaccttgtgatccgcccacctcggcctcccaaagtgctgagatta

SEQ ID NO: 39735 - DNA, 201 bp, Homo sapiens
aatgtctgatgacagaaaagtacggaagcccattcttccatgtcctacttctaggttaccacttgccagttccttctgcctttttttttttttttttttttgagatggagtctcactctgtcgcccaggctagagtgcagtggcgcgatgtcggctcactgcaagcttggcctcccaggttcacaccattctcctgcctca

SEQ ID NO: 39736 - DNA, 201 bp, Homo sapiens
tcggtcaattttgggaccatctgtggaaccaccatgtgtgatcagacacccaacacacccgaggcacagtggtgcagaggagcgtctaatctttccagggmaggggtggagggattaaaggtcagggtgaccgactcacacaggactcgcagctggacgctactgttcctgtgcaagaactcgccgtccacctcgagagtg

SEQ ID NO: 39737 - DNA, 201 bp, Homo sapiens
atattcaccagtttgtctcctcctgggtgaacactgtctaattccacgaagtcgtcaagccagtttaggccactttccttagagcttcaaatactttagcygtttactctgagctgcctgctgtgaaccttgtttcttgtttgtcatctctgtgaggatggatgccacgtcgaccattctcatcattcttgtgtatacttc

SEQ ID NO: 39738 - DNA, 201 bp, Homo sapiens
aaaattgcctggagagctgaactttagggtctcacaataaacatattcctattgtagagttttaaaataattttaaggcaagtaataatgtatgaacaccrtgtccttaactttttattcagcactgtaaatacgttttatgatccaaaatggttgaatagtttcagttttcaaaattgaacatgcccttaacaacacatt

SEQ ID NO: 39739 - DNA, 201 bp, Homo sapiens
tctgctgaaatgtgagctttttgaagtaggagggagattttgagtttcttttttatcttataaaatatcgagttcagtgatggacatatataaactagacrttaattataagttgattattaaaataatcacatccttctttgtgggctaagccgttgacacggtagtctaatttcagctatcatgccactgagttcttat

SEQ ID NO: 39740 - DNA, 201 bp, Homo sapiens
tttaatgttaaatagcaaacttgtaagtttctccaggttcttgtaaacctctgcagtggctgtgtcttgctccttttgcggttccttttgcaatcataggaaaaaaaaaaaacatgatttcttttttttttttttttgagacagaatctcgtgctgttgcccaggctggagtacaatggtgtgatctcagctcactgcaac

SEQ ID NO: 39741 - DNA, 201 bp, Homo sapiens
ggactgcaggcacccgccaccatgcccaggtaatttttgtgtttttagtagagatggagtttcagcatgttggccagactggtctcgaactcctgacctcaggtgatccgcccaccttggcctcccaaagtgctgggttataggagtgagccactgcacccagtcccccatgatttctatattaccaaatgcatttttctt

SEQ ID NO: 39742 - DNA, 201 bp, Homo sapiens
gtggtgacctaccactgcaatcttggaagcagagggagaaaggtgtttgagctcgtgggtgagccctccatatactgcaccagcaaagatgatcaagtggkcgtctggagcggcccagtccctcagtgcattatacctaacaaatgcacacctccaaatgtggaaaatggaatattggtgtctgacaacagaagcttattt

SEQ ID NO: 39743 - DNA, 201 bp, Homo sapiens
atatataacattttttaatgaaaaataacaattttccaaaacaaaataaaattagtgagaatagtggcattgttcacattttttgcacatctcttcaacayctaacttaaaggaagacttggatttgggctgttgtgtaatcacacaatatgtagactttggaaaatatcactatacacttctgcccggcgcagtggctca

SEQ ID NO: 39744 - DNA, 201 bp, Homo sapiens
ctgaaacagctcgctattcactcctattttcttctttagatttcaattaaaaggcagctctgctagttactgtgttttggctggaatggaaagcctttggratagcagtgttccagtgtgtgaacgtaagtaataggagtaacatttcaggccaatctctcctcttcatctgttcagtatttgacccatgacctcccctaa

SEQ ID NO: 39745 - DNA, 201 bp, Homo sapiens
tcagaccagtagtcctcaaagattttttgcctcagggcaccttttacattttaagattaacaaagatcccaaagaggtttcttttatgtgggttatatctrttggtatttatcatattggaattcaaactgagagattttttaaataagtattgattctttttgtttttgtttttgtttttcctaagagagggtaccagta

SEQ ID NO: 39746 - DNA, 201 bp, Homo sapiens
ctgttgaaagcattaagaatgtagtaatcatgagaattcatccttcacaactgagtgtcccctatttaaatctgcaaactcttagagttaaagtagggctsacagaaatgagaaatagaattgccaactaaaaatatgcttgtatccagatgactctgtaaagtgtgacctggttagcctttaccatcatgttgaacaaaa

SEQ ID NO: 39747 - DNA, 201 bp, Homo sapiens
ccctcttaatgccctaatcatttctgaaaggccccatcacctctcactgctgttacactggcaattaaatttcaataagagttttggtagagacaaaccasattcaaacaatagcaataatacactataatatataaacaaagtgagtcttggaggaaaagtgcactgtgaccatgtaaggcagtttcactaagagttttt

SEQ ID NO: 39748 - DNA, 201 bp, Homo sapiens
ttgaaaaaccttatttctgagactgctacaatgtgaagcatctcaagaacaggcactgagcactcggtaatagcctttgttctgcaggacttttaaagtcmtagatattggggatactggacatttaagtgaaatgtgcttttagagagtaaatgtaattttcatagattttctattgctataacacaatacgtgagacta

SEQ ID NO: 39749 - DNA, 201 bp, Homo sapiens
gtgaactaagtgtcctcttggctgaaacagctcgctattcactcctattttcttctttagatttcaattaaaaggcagctctgctagttactgtgttttgkctggaatggaaagcctttggaatagcagtgttccagtgtgtgaacgtaagtaataggagtaacatttcaggccaatctctcctcttcatctgttcagtat

SEQ ID NO: 39750 - DNA, 201 bp, Homo sapiens
gaaaaaccttatttctgagactgctacaatgtgaagcatctcaagaacaggcactgagcactcggtaatagcctttgttctgcaggacttttaaagtcatrgatattggggatactggacatttaagtgaaatgtgcttttagagagtaaatgtaattttcatagattttctattgctataacacaatacgtgagactaga

SEQ ID NO: 39751 - DNA, 201 bp, Homo sapiens
gtgtgccactacacctggctaattttttgtatttttagtagaaatggggtttcaccgtgttagccaggatggtctctatctcctgacctcgtgatccgccsgcctcggcctcccaaactgctgggattacaggcgtgagccactgcacccggcccagtgtagataattcactttactaaaactcacctggaactttgggga

SEQ ID NO: 39752 - DNA, 201 bp, Homo sapiens
gatagtgggagaaggagcaagatggtcaggtttcattgccatttcacttgtagtcaaataccatgaatttctggtaatactaatctgggcagggctgtggrtatgcgtgtacattagttaattttttgcaagcaggtgtgaatgtacagaagttgaacagttcagtggatgcagtgtagatttttttttttttgagacaga

SEQ ID NO: 39753 - DNA, 201 bp, Homo sapiens
tgtgcaactctgccacctgctggcctcaggtcctcaaaatcctgaaattggggctgggccttagattgtgaactaagtgtcctcttggctgaaacagctcrctattcactcctattttcttctttagatttcaattaaaaggcagctctgctagttactgtgttttggctggaatggaaagcctttggaatagcagtgttc

SEQ ID NO: 39754 - DNA, 201 bp, Homo sapiens
gtcctgcactccccagtgagatgaacccggtacctcagttggaaatgcagaaatcacccgtcttctgtgtcgctcacactgggagctgtagactggagctgttcctatttggccatcttggctcctccctcctattttattcttttcagagtgatctgttgacacctttactgagtttgttcctattgcaggactctttga

SEQ ID NO: 39755 - DNA, 201 bp, Homo sapiens
tggcactttgcattaccatataaaatttagaatcagcttgtcaatttccacaaaaagaatcctacttgaatttgtattgagtttctattgacttagtacawcaatttgtagacattaacaaatttagttttgaagtttaaatttatgaacatgatatatcctcccatttttgaagtcttctttaatttcttttaaaaatat

SEQ ID NO: 39756 - DNA, 201 bp, Homo sapiens
tccttcccctctgcagagggcaagccggaggctggtctcagcaggagctagggctctcctcaaaggctttctgaccttggggcaggcttgacatccccatrgccctgcatccctcatcccttttcatgtctactggaggacagtgagccatagctgcagcaatcttgtttaaatttaggtagttgaattttttagaattaa

SEQ ID NO: 39757 - DNA, 201 bp, Homo sapiens
gtggatgtcattccagggaggttctgttccactggtttatttgccatacattgtgtttttgtttggtttagttttttgccatactataatggcaaaaaaaactgtagcattacattaagattttaattactatagcatgacattaatatttgatatctggtggcatatatcttctaactatgtgcatcttcaagatttact

SEQ ID NO: 39758 - DNA, 201 bp, Homo sapiens
tggataggcaattgatctaatatcatttattaaatgttgcaccatggccataagtcaggtgacctatatgtggatgtcattccagggaggttctgttccaytggtttatttgccatacattgtgtttttgtttggtttagttttttgccatactataatggcaaaaaaaactgtagcattacattaagattttaattacta

SEQ ID NO: 39759 - DNA, 201 bp, Homo sapiens
tgcctctctttccccctcacatggaagtcttactcctgttgttttattttttcttctcgtgaaatcctgtgatgacttcctgggccaactccctcatggcygtgtgctgtttccacttaatctccagcttggggctaaggtatcctttgtttgtgatgaagggtgagtgtgacccagtgttgagaccaaggactcagtgtg

SEQ ID NO: 39760 - DNA, 201 bp, Homo sapiens
ccacatctcaaagggaaggattaaaacatttcaccattaacctggtgtttacagtaggctttttgtaggtaaccatttttgaattaaggacattctcatayactcttcattattaaaaattttttgtctttgaaacatgttgaagtttatcgagcactttagttatatgtatcgatgtaatcatatctgtttctctttttt

SEQ ID NO: 39761 - DNA, 201 bp, Homo sapiens
ttactaactatgaggccttcagcaggcataggatatagcaaaagaaattcccccataactaacaagtactctggaactgtcctttctacaatgtgtcagcygcctccagaaatcctgcatggtgagcataccctaagccatcaggacaactttttacctgggcaggaagtgttctacagctgtgagcccagctatgacctc

SEQ ID NO: 39762 - DNA, 201 bp, Homo sapiens
gaattttcttggaaatattaaaaaaaattagtaaaatagaaaaaacaaacaatataataatacacctatacctatatctatatttttatctctgtttctasttctgtaaactctctatacccaaatcctggtaaatggctgtaagtcttcttggagaagactaggggaagatttacaatacatgcttttgactgcgtagca

SEQ ID NO: 39763 - DNA, 201 bp, Homo sapiens
tagagtaacctaaatattttaaactatggtttggaaataatctactagtaggaaaaagatgtgttcaaatgaccattacaaagaattccctaagaaacatraaatagctatgcagaatgaaaataagtatatccatacactggcatggtattcagccataaaaaatgatagcataaagaagcacttaatgactagaaagag

SEQ ID NO: 39764 - DNA, 201 bp, Homo sapiens
aaaatgttattattaggggaaaattgagtaaagtgtacctgggatctttctgtgctattccctacaactgcatgggaatctgattatctcaaaataaaatwtttttttttttaagttactactaaatttccaaggggatgggcttcctaccaaagaattgtatattgtgaaattaaatcattcgaacttaaaacaattcaa

SEQ ID NO: 39765 - DNA, 201 bp, Homo sapiens
ttatttatattagttaaaatgttagagtaacctaaatattttaaactatggtttggaaataatctactagtaggaaaaagatgtgttcaaatgaccattayaaagaattccctaagaaacatgaaatagctatgcagaatgaaaataagtatatccatacactggcatggtattcagccataaaaaatgatagcataaaga

SEQ ID NO: 39766 - DNA, 201 bp, Homo sapiens
caaaatgttattattaggggaaaattgagtaaagtgtacctgggatctttctgtgctattccctacaactgcatgggaatctgattatctcaaaataaaawttttttttttttaagttactactaaatttccaaggggatgggcttcctaccaaagaattgtatattgtgaaattaaatcattcgaacttaaaacaattca

SEQ ID NO: 39767 - DNA, 201 bp, Homo sapiens
atcacttgaacctgggacgcggaggttgcagtgagctaagatcacacgactgtgctccagcctggatgacagagtgagatatcacctcaaaaaaaaaaaaacacaaaaaacaagaaacaaaaataatttacatgtaattgaagcgggcttacaggagtataaatacagttgcctgccaggagctcatatgttgctgactct

SEQ ID NO: 39768 - DNA, 201 bp, Homo sapiens
tcttgaaaggccccatgcactataaacctcagaagtgggcatgtattttaacctacttcttagaatttatacttaggaaataatcacacactttttaaagyagtttggtataaacttttcattgcagcattatttatattagttaaaatgttagagtaacctaaatattttaaactatggtttggaaataatctactagta

SEQ ID NO: 39769 - DNA, 201 bp, Homo sapiens
aatcacttgaacctgggacgcggaggttgcagtgagctaagatcacacgactgtgctccagcctggatgacagagtgagatatcacctcaaaaaaaaaaamacacaaaaaacaagaaacaaaaataatttacatgtaattgaagcgggcttacaggagtataaatacagttgcctgccaggagctcatatgttgctgactc

SEQ ID NO: 39770 - DNA, 201 bp, Homo sapiens
ggactctcatgtaccacgagatcaacacatcctcttgaaaggccccatgcactataaacctcagaagtgggcatgtattttaacctacttcttagaatttrtacttaggaaataatcacacactttttaaagcagtttggtataaacttttcattgcagcattatttatattagttaaaatgttagagtaacctaaatatt

SEQ ID NO: 39771 - DNA, 201 bp, Homo sapiens
aatctcatgaggctgaggcaggagaatcacttgaacctgggacgcggaggttgcagtgagctaagatcacacgactgtgctccagcctggatgacagagtragatatcacctcaaaaaaaaaaaaacacaaaaaacaagaaacaaaaataatttacatgtaattgaagcgggcttacaggagtataaatacagttgcctgc

SEQ ID NO: 39772 - DNA, 201 bp, Homo sapiens
gaacctggactctcatgtaccacgagatcaacacatcctcttgaaaggccccatgcactataaacctcagaagtgggcatgtattttaacctacttcttaraatttatacttaggaaataatcacacactttttaaagcagtttggtataaacttttcattgcagcattatttatattagttaaaatgttagagtaaccta

SEQ ID NO: 39773 - DNA, 201 bp, Homo sapiens
aagttctaaataacacgcccctcaatttgcattgatgtgccccttaacttacctgtaattggctgggcatggtggcccatgcctgtaatcccagcactttkggaggccaagatgggcagatcacctgaggtcaggagttcaagaccagcctggccaacatggtgaaaccctgtctttactaaaaatacaaaaattatctga

SEQ ID NO: 39774 - DNA, 201 bp, Homo sapiens
atgagtatttgtttagggggagggatgtatgttgaggagggtgggaaagtaagttttgggggaagaagcatgaaattaagaatctggggtgtgcatgcacycatgcatatgtgtcttcattttgaaaagcaagaccttaattagccaagaaaactggtattttggactcacctattaatcaattgtcagggcaaagtacca

SEQ ID NO: 39775 - DNA, 201 bp, Homo sapiens
aggagatgagtatttgtttagggggagggatgtatgttgaggagggtgggaaagtaagttttgggggaagaagcatgaaattaagaatctggggtgtgcawgcacccatgcatatgtgtcttcattttgaaaagcaagaccttaattagccaagaaaactggtattttggactcacctattaatcaattgtcagggcaaag

SEQ ID NO: 39776 - DNA, 201 bp, Homo sapiens
cttctccgagaagccgggagcctgttgggcagccggcgcccggtctccccttctgctgcggaggatccctgctggcggtcgtggtgctgctcgcgctgccrgtggcctggggtgaaacgctggggggcgtggggaggcgcccgggctgacgaggcacccagggccccgcagagaactcgcgtgccgcgctgggctgcgctg

SEQ ID NO: 39777 - DNA, 201 bp, Homo sapiens
gtaattcaaactattaaggaagagactgttaggaggagtttaacaaggaggaggccctttaatgactcagaaagtagttgaagtaattttcatagacctaraaatgagtgggaagtgagaaataaaattgaaatatgtagatgtcagagtttatgttttgtggaagcaaaaaaggttttaaatagattggatagtgggaga

SEQ ID NO: 39778 - DNA, 201 bp, Homo sapiens
ttctgtagaatgattattttcaatatgaaattgattacaatatattcttcacattgttttgtgtttgacagcagtggactttgagtaccaaatttttttcraatagctactatgagggacatattgtgctgggtgttgtggccacatggatgaatggagtcggccttgttaactattaaactcaaaaacacgtgataatta

SEQ ID NO: 39779 - DNA, 201 bp, Homo sapiens
tgggattacaggtgcgacaccatgccaggctaatttttgtatttttaatagagatggggtttcaccatgttggccaggctggtctcgaactcctgacctcrtgatccacctgcctcagcctccaaaaatgctgggattacaggcgtgagccaccatgcctggcaaagaatgacactgggtgtattaaaaagtatgataagt

SEQ ID NO: 39780 - DNA, 201 bp, Homo sapiens
tgttctgtagaatgattattttcaatatgaaattgattacaatatattcttcacattgttttgtgtttgacagcagtggactttgagtaccaaatttttttcgaatagctactatgagggacatattgtgctgggtgttgtggccacatggatgaatggagtcggccttgttaactattaaactcaaaaacacgtgataat

SEQ ID NO: 39781 - DNA, 201 bp, Homo sapiens
agctgcttttttggacaaaacccccgatctcctgttgtgtgtggtctcttctgcctatttcaggtgttttccttattttcaatgaaagaagccaagaccartaagttcttattgcttcttagtttcctcactcggcatactacaatgcaaaaagagcagtccatatctggtcacctgccaggataccagaagactgggaga

SEQ ID NO: 39782 - DNA, 201 bp, Homo sapiens
tctcacaaagataaggttttgtaagcaggtggtgctgtgcatgggagacctgccctctcaaaggtagttgccaaatggttccagatagcagaaggaaacatgtgtcaaatttcaggccagtctcattcattcctccagaagaggagctgcttttttggacaaaacccccgatctcctgttgtgtgtggtctcttctgccta

SEQ ID NO: 39783 - DNA, 201 bp, Homo sapiens
cggctggctttcggtttctctgctcacctccggataaatcacggggtctcccgcgccgctcatggcgcctcccgtccgtctcgagcgtccctttccttccyggcgctttcctgggttgcttctggcggccctggtgttgctgctgtcctccttctccggtaggaccccggggtggattcgcgcgtccgcggcgaggctaga

SEQ ID NO: 39784 - DNA, 201 bp, Homo sapiens
ttttccttaaatgaagttgtggagtttaggtgtcagcctggctttgtcatgaaaggaccccccgcaccgtgtgcaatgccaggccctgaacaaatgggagmcagagctaccaagctgctccaggggtgtgtttgcctgaggcctagaagggccctgcaagtgacatgcattgctgttggatcaggagatgagtatttgttt

SEQ ID NO: 39785 - DNA, 201 bp, Homo sapiens
aagtacatacagcctgggcatcataaggagagcccacctctacagaatattaaaaacaaaaaattagccaggtgtgatgttgcatgcctgtggtcccagcyacttgggaggctgaagggcgtgaagggggaggatcactggagcccccatggtcaaggctgcagtgagccctaatcataccactgcactccagcttgggtg

SEQ ID NO: 39786 - DNA, 201 bp, Homo sapiens
ttcaagtacctcttgtaatcacccttttaaagtgatcttttctgttctctgtctctccccatcagaatgcaggaatcttctgtcttcccccatttgtggtyccaaaagccccatttgtttgcttctgtatgaaccctaactcagtatccatatagacatctgttaaatatcagaaaattaaatatactatttggctggggc

SEQ ID NO: 39787 - DNA, 201 bp, Homo sapiens
cctagtgagaaattagtatcctaacaaaggaaggcagataatgttaatcttgttttcccctacagctcataaactgaagcttaaggcctatcccactgttytgtatttcattgaatggaatcaatatttttaaaaatgcatgctaggccaggcccagttgctcacacctgtgatcccagcactttgggaggcccaagttgg

SEQ ID NO: 39788 - DNA, 201 bp, Homo sapiens
cgagcgcggactctgcggctagggagggcatgttgagtgagagcaggctctcagtgcctggggttagagaggtggtaagggcgcaccatgcttttagtgcyttctgtgaacagtgtccgtgttgcctgagatcgtattggtcttgaattttaagtggctgcttttttggggggtgggtgggccatcgagtcatcttcctgt

SEQ ID NO: 39789 - DNA, 201 bp, Homo sapiens
aaatttcttattttagtaatgtttggttgtgaatcaatgtgtacatcacctgtctttggaactatctgatctgtctctgtcattttgtattctatgttctmttgcgataaatcctatggtcgtgtgcttctaggtcaggagagattagataatgtgaagcttttacaatttgctttctttctctacttcttttctttcttc

SEQ ID NO: 39790 - DNA, 201 bp, Homo sapiens
atgctgagcgtacccaaagggacaaggacaacttttcacccgggcaggaagtgttctacagctgtgagcccggctacgacctcagaggatctacgtatttrcactgcacaccccagggagactggagccctgcagcccccagatgtgaaggtgactagactcttatctggcttggtatttttagcttgcgtctttattctc

SEQ ID NO: 39791 - DNA, 201 bp, Homo sapiens
tgcacgcctccaaatgtggaaaatggaatattggtatctgacaacagaagcttattttccttaaatgaagttgtggagtttaggtgtcagcctggctttgkcatgaaagggccctcccatgtgaagtgccaggccctgaacaaatgggagccagagttaccaagctgctccaggggtgagtctgactgaggcctagaaggg

SEQ ID NO: 39792 - DNA, 201 bp, Homo sapiens
aatcttggaagcagagggaaaaaggtgtttgagcttgtgggtgagccctccatatactgcaccagcaaagatgatcaagtgggcatctggagtggcccagyccctcagtgcattatacctaacaaatgcacgcctccaaatgtggaaaatggaatattggtatctgacaacagaagcttattttccttaaatgaagttgtg

SEQ ID NO: 39793 - DNA, 201 bp, Homo sapiens
tcccaagaatgtgaaatttgggaaggtgatagacaattctttgacaagtggaaaatgtccctctgaattctataagagtgtaatctctggaagtagtaatytaattgggtagttgacctgtgtatttagaatgtaacattccttattttttgcctctagataccgactcattggttcctcgtctgccacatgcatcatctc

SEQ ID NO: 39794 - DNA, 201 bp, Homo sapiens
tgtggaagaacctggactctcatgtaccacgagatcaacacatcctcttgaaaggccccatgcactataaacctcagaagtgggcatgtattttaacctayttcttagaatttatacttaggaaataatcacacactttttaaagcagtttggtataaacttttcattgcagcattatttatattagttaaaatgttagag

SEQ ID NO: 39795 - DNA, 201 bp, Homo sapiens
tgtgacagtgagttgaaatatgcattcctatttcttttaccgatacattctaatttttctctggaataataaaaatcttaaccgaattccttctgtgcaawctgtacttcacatggctgaagacagccataatgttctcagatattcctatggggttcctggcaactctttctttaagttctttcttatcctgggatgtgt

SEQ ID NO: 39796 - DNA, 201 bp, Homo sapiens
cactgtgaatggcctactttgatgaatcttactgataaaagcccatccatgcatccatatattaatacttataaggcatagaaatacatacaacaggactrcatacacacatacatatgtatatatatgacagcttccctgcactcaagaagcttgtgttgtcttttaaaaaaatgaaatttataggaaaaactgtaactc

SEQ ID NO: 39797 - DNA, 201 bp, Homo sapiens
ggagtcttgccatattgcccaggctggtctcaaactcctgggctcaagctatcctcccaccttggcctccaaaagtgttaggattacaagtgtgagccacygtacccagccaaatttttatgttcttttatcccctcacttatcataaacaatttagtcagcttgttttttagcctgcagtattgaatgacatagggcttc

SEQ ID NO: 39798 - DNA, 201 bp, Homo sapiens
taatcccagcactttgggagtcctaggtgagcagatcgcttgagcccaggaggtcgagaccagcctgtacaacatggtgaaaccctgtctctacaaaaaakacaaaaattaaatgggcatactggcacacgcctgtagtcccaactattcgggagactgagaggtgggaggattgcttgagccagagaggtcaaggctgca

SEQ ID NO: 39799 - DNA, 201 bp, Homo sapiens
tgcagcctcaatctcccaggctcaagcgatcttcctgcctcagccttctgagtagctaggactacaggaatgtgccaccatgcgtggctttttaataaaawttttgttgagacagggtctcactatgttgcccaggcttctctcgaactcctgagctcaagcagtcctcctacctcagcctccaaacgtgctgggattaca

SEQ ID NO: 39800 - DNA, 201 bp, Homo sapiens
aatgagcaattgcaagctaataaggaatataaaatgtgtataatcctgggtttagtgatggtgtgaggaaatcagcaatttcaaacccatctggtgggagrataagtgggaacaaactttgtagaagggcaatatactggctgggcactgccctacagtagagtaggacacagtattcagttcttccaagatcagatgaaa

SEQ ID NO: 39801 - DNA, 201 bp, Homo sapiens
ggtcagcttggattgcctttggttctagttataaatcattttctttctttctttctttctttctttctttttttctttctttttctttctttctttctttytctttctttccttccttccttccttccctccttccttccttctttctttctttctctttctttctttctctctttctctttctctctctctctccctctg

SEQ ID NO: 39802 - DNA, 201 bp, Homo sapiens
ataaaataagtgttcagttctttttggtcagcttggattgcctttggttctagttataaatcattttctttctttctttctttctttctttctttttttctttctttttctttctttctttctttttctttctttccttccttccttccttccctccttccttccttctttctttctttctctttctttctttctctcttt

SEQ ID NO: 39803 - DNA, 201 bp, Homo sapiens
acaataggtaaagtttaggctaggccttagacttctcctatattgtaatccctctggtttgccacatatgcatgctgtcaggaagttgatgaggtatgtamagcacaattattttccattttttgcctttaggcaccgactcattggtcactcatctgctgaatgtatcctctcgggcaatactgcccattggagcatgaa

SEQ ID NO: 39804 - DNA, 201 bp, Homo sapiens
taacattttaagtataaaataagtgttcagttctttttggtcagcttggattgcctttggttctagttataaatcattttctttctttctttctttctttytttctttttttctttctttttctttctttctttctttttctttctttccttccttccttccttccctccttccttccttctttctttctttctctttctt

SEQ ID NO: 39805 - DNA, 201 bp, Homo sapiens
agcactttcattatatagtatgttgtttaagaaaccacccccctcaaattactgcagcgtagaaaataaaccatataaaaagttccttcattattatgtgkcttattaattgctatacaaaacagtaaccctttcttttcccatttagttattacttaattggtaaagaaattctatattgtgaacttaaaggatcagtag

SEQ ID NO: 39806 - DNA, 201 bp, Homo sapiens
gaaatctccaagaaatctttttcttggcaatagattgcctgggtgaacatgaaactgaaatttgcccttataataggtaaagaaagaaaataatatgcccwtgcattcaaaaccgcaatgcagaattttgaccttgattccaatctgtttagaaactggattgaaaaaatctcaaaattattttcttttaggaaaaacatg

SEQ ID NO: 39807 - DNA, 201 bp, Homo sapiens
gaacaataggtaaagtttaggctaggccttagacttctcctatattgtaatccctctggtttgccacatatgcatgctgtcaggaagttgatgaggtatgkacagcacaattattttccattttttgcctttaggcaccgactcattggtcactcatctgctgaatgtatcctctcgggcaatactgcccattggagcatg

SEQ ID NO: 39808 - DNA, 201 bp, Homo sapiens
ccagctacttgagaggctgaggcaggagaatcacttgaatctgggaggtggaggttgcagtgacattgcactccagcctgggcgacaagagtgaaactctmtctcaaaaataataataataataaataaccaaaatgatatcgaagtcactaataattacaacataatagctactataatgtaacaatgtgtcaagtgtct

SEQ ID NO: 39809 - DNA, 201 bp, Homo sapiens
gtgagagcagaaaaagaagtagaaaagctgggaacaataggtaaagtttaggctaggccttagacttctcctatattgtaatccctctggtttgccacatrtgcatgctgtcaggaagttgatgaggtatgtacagcacaattattttccattttttgcctttaggcaccgactcattggtcactcatctgctgaatgtat

SEQ ID NO: 39810 - DNA, 201 bp, Homo sapiens
catagtggcgtgcacctgtaatcccagctacttgagaggctgaggcaggagaatcacttgaatctgggaggtggaggttgcagtgacattgcactccagcytgggcgacaagagtgaaactctatctcaaaaataataataataataaataaccaaaatgatatcgaagtcactaataattacaacataatagctactata

SEQ ID NO: 39811 - DNA, 201 bp, Homo sapiens
ggatcaaaagcaacaaatcttgtatttataaaaaacatgcctcaagttaaatggcatagtattacacacacacacacacacacacacacacacacacacayattaagggaatacgcaaacaaaaaatggcagaaataatatgggaaaagacagaacttaagaaagaaattgtcaagcaggtctacaaaatgattgttttat

SEQ ID NO: 39812 - DNA, 201 bp, Homo sapiens
catcacactccggggcctgttggtgggtggggggctaggggcgggatagcactaggagaaatacctaatgtaggtgaccggttgacgggtgcagcaaaccrccatggcacatgtatacctatgtaacaaaactgcacattctgcacatgtaccccagaacttaaagtataataaaaattaattaattgattaattaatttt

SEQ ID NO: 39813 - DNA, 201 bp, Homo sapiens
caggatcaaaagcaacaaatcttgtatttataaaaaacatgcctcaagttaaatggcatagtattacacacacacacacacacacacacacacacacacayatattaagggaatacgcaaacaaaaaatggcagaaataatatgggaaaagacagaacttaagaaagaaattgtcaagcaggtctacaaaatgattgtttt

SEQ ID NO: 39814 - DNA, 201 bp, Homo sapiens
gcactccagcctgagcgacagagccagactccgtctaaaaaaacaaacaaacaaacaaagcaaatcaaatatataatttatttcaatccatttggtttaamcttcttgtcaaaaaaccaagtctactagacaggatcaaaagcaacaaatcttgtatttataaaaaacatgcctcaagttaaatggcatagtattacacac

SEQ ID NO: 39815 - DNA, 201 bp, Homo sapiens
acatagaataaacgggcatttcagttgtggaaacataacttgtttggggggcgtgtgtgtgtatgtgtatgtgtgtgtagagtcaaaagtggctcttgggyctccctttgttgtttgagctagagtgacacattccaagtagagctgtgtggggaggcaattgaatatgtagttttggcaccccagctagagatctgggat

SEQ ID NO: 39816 - DNA, 201 bp, Homo sapiens
tcttggaaaaaccttgattaccctgtcatataaatactgctctggtaatgtgaaaaatgaattgaatgaaaggtggcaagataggtatggagacctatttrgttatgtcgtggtaatccagataagaaatgatagtggcttgaatgaaaagtaaaggatacaactacatagaataaacgggcatttcagttgtggaaacat

SEQ ID NO: 39817 - DNA, 201 bp, Homo sapiens
ttccttaaatgaagttgtggagtttaggtgtcagcctggctttgtcatgaaaggaccccccgcaccgtgtgcaatgccaggccctgaacaaatgggagacrgagctaccaagctgctccaggggtgtgtttgcctgaggcctagaagggccctgcaagtgacatgcattgctgttggatcaggagatgagtatttgtttag

SEQ ID NO: 39818 - DNA, 201 bp, Homo sapiens
ggttattccggaagaccgttttctatcatctgcctaaaaaactcagtctggacaagtgctaaggacaagtgcaaacgtaagtaactctggagtgggaaccyctctgttagtcaaacatctgtaagatctgattcaatttgttcaaattttgtaactgagttgcatacaacaattagtttgctaaggtgcaatacatatgag

SEQ ID NO: 39819 - DNA, 201 bp, Homo sapiens
ttcccattgggacatatctgaactatgaatgccgccctggttattccggaagaccgttttctatcatctgcctaaaaaactcagtctggacaagtgctaasgacaagtgcaaacgtaagtaactctggagtgggaacccctctgttagtcaaacatctgtaagatctgattcaatttgttcaaattttgtaactgagttgc

SEQ ID NO: 39820 - DNA, 201 bp, Homo sapiens
gaattctataagagtgtaatctctggaagtagtaatctaattgggtagttgacctgtgtatttagaatgtaacattccttattttttgcctctagataccractcattggttcctcgtctgccacatgcatcatctcaggcaacactgtcatttgggataataaaacacctgtttgtgacagtgagttgaaatatgcattc

SEQ ID NO: 39821 - DNA, 201 bp, Homo sapiens
cgtggtgagagtttgccctgtgttcccttggtgccttggtgagtagggtgttcattagggcttggacagtacccgcggtaagggttgcagtgcgtctgctktgccccatgggctgggctggcctgggctgggctgggcgagcaggggcctggccaggtgttgctgggagcgtgctgtgcgcaagtggcctgtgtgcggagt

SEQ ID NO: 39822 - DNA, 201 bp, Homo sapiens
ctgtatgtggtttctggaaacgaaatgatcatggcatttcctgaaccatggcttaactttgtgaatccacaactctctcttccccaggagatccaaaaagrtagggtaggatgtaaaggcttcaatctgtttaaatggatatgagagtccctggctctccttaaaataagtagcatggattttgtctctctgccttacttc

SEQ ID NO: 39823 - DNA, 201 bp, Homo sapiens
tcaaagcacacaatcagccttaacacagattagacattgctcaaagaaagggaaggccattgagcagctgtgtgagagaaatcttaatggtcatagcacaratagtttgctagggctgctgtaacagagtactccaaaacaggcggcttaatacaaacaaagtttttggagttctgttccggaggctggaagtacaaaatc

SEQ ID NO: 39824 - DNA, 201 bp, Homo sapiens
gaaccaacatctcttggttcaagggttctaacacagccatactaccttctagtcacatctcagaaaggacaactaaactattaccatctgctctttaaagrcttcaacacaggtgcttagctcctgactgaaatggacaaaggtatgacaagatcagggggaaaatcatctgtatccttgctggaaaccaaggcagagcat

SEQ ID NO: 39825 - DNA, 201 bp, Homo sapiens
tcaggagaattgcttgaactcgggaggcagaggttgcagtgagcagatattgcaccattgcactccagcctgagcgacagagccagactccgtctaaaaamacaaacaaacaaacaaagcaaatcaaatatataatttatttcaatccatttggtttaaacttcttgtcaaaaaaccaagtctactagacaggatcaaaag

SEQ ID NO: 39826 - DNA, 201 bp, Homo sapiens
ctgggggtctcccactttcatgactaaaattaagtaatgaatgacttgggacaagaaagagaagtggattaaataactaaaagatgcgacaatcttgggcyttgagatctttggattatatcagttgaattgaattacagataataacgaagtttacatttttctgggaggcataatatggggatgaaacagatctgaaag

SEQ ID NO: 39827 - DNA, 201 bp, Homo sapiens
tgagtatgagcttgcctgacctgctggacattgaaattggggttaggaattagtccaaaaaggggagatttgatgtggcttaaaaaaagacagacagacasacacacacacacacacacacaatcagagagatgaacttttgaaagtatatataggaagaaaggaaagacacatatggaactaataacatgagatatgaag

SEQ ID NO: 39828 - DNA, 201 bp, Homo sapiens
tcacacatggctacctgtctcagatgagccctgttatagtaaataaactagcctttttttttttgttttctgcttgctctagagatttgcacacattttakggtacatattccactatggagatgatgatttttttttcttgtgaaatgaggtttaagatagcaatgcatttttgcagactttgagaaattgaaatctcca

SEQ ID NO: 39829 - DNA, 201 bp, Homo sapiens
tggcaatgtaatcataatttagtaataatctctgtgaagtcatagaatatatcaatagaagtagaaaatgtgagaaagcaggaaaaggtaggctagacttrcagaaaagatgagtagactgactgtacagaatttgactctgaaattgagaaaataggtttaaatatatgtatcaagtgtatatatctacaatatacatgc

SEQ ID NO: 39830 - DNA, 201 bp, Homo sapiens
gctttgagttcctggcaccttcattacaagtttatttcatgagaaaccgtcattgcaggacatgattgagggaaaacccccattcactgggggtctcccaytttcatgactaaaattaagtaatgaatgacttgggacaagaaagagaagtggattaaataactaaaagatgcgacaatcttgggctttgagatctttgga

SEQ ID NO: 39831 - DNA, 201 bp, Homo sapiens
aaaaaggagaatgatgaattcctaaagaaatctcaatgagatagaaaagtggtaaaaacaaacaacaacaacaaaaaaccataaacacaaaaactggcaawgtaatcataatttagtaataatctctgtgaagtcatagaatatatcaatagaagtagaaaatgtgagaaagcaggaaaaggtaggctagacttacagaaa

SEQ ID NO: 39832 - DNA, 201 bp, Homo sapiens
tcttgtagatcataccttgttactgctttgagttcctggcaccttcattacaagtttatttcatgagaaaccgtcattgcaggacatgattgagggaaaayccccattcactgggggtctcccactttcatgactaaaattaagtaatgaatgacttgggacaagaaagagaagtggattaaataactaaaagatgcgaca

SEQ ID NO: 39833 - DNA, 201 bp, Homo sapiens
atacacattaaagaataagcaaagacacaaaaattgtaccatttaagtatgtttcccaggcaattaataagcaaatttttaaaaaggagaatgatgaattsctaaagaaatctcaatgagatagaaaagtggtaaaaacaaacaacaacaacaaaaaaccataaacacaaaaactggcaatgtaatcataatttagtaata

SEQ ID NO: 39834 - DNA, 201 bp, Homo sapiens
gagggatctaggttgcatgttccctatgagaatctaatgcctgatgatctgagtggaacagttccatctcaaaaccatttccctgcaccctccattcacgkaaaaattgtcttccacaaaacgagtctcaggtgccaaaaagattggggaccaaagttctaaaggaatcaatctctttgctattattgttattattattgt

SEQ ID NO: 39835 - DNA, 201 bp, Homo sapiens
cttctgttgagccaagctaatattcacatctagaggctccagatacacattaaagaataagcaaagacacaaaaattgtaccatttaagtatgtttcccargcaattaataagcaaatttttaaaaaggagaatgatgaattcctaaagaaatctcaatgagatagaaaagtggtaaaaacaaacaacaacaacaaaaaac

SEQ ID NO: 39836 - DNA, 201 bp, Homo sapiens
agatacttctaaaagcacacaaaattaaaaagcacaaattgcaaccacaaacaattattgatatgaaaggaaaaggaaagggcctgactagaaattatcatagggtggggcagagggaagtagtttagattccaaatccctgagagggtcagggaaggcatcagactagattgggtgcgttcagggtggtatggccataga

SEQ ID NO: 39837 - DNA, 201 bp, Homo sapiens
aggccgaagcaagagaatcacttgaccccaggacctcgagaccagcctgggcaataaggcaaaaccccatctctacaaaaaagtataaaaattagctgggygtggtggcgtgtgcctgtagtcacagctacacaggagactgaggtgaaaggatcacctcagcccgagaggctgaggcttcagtgagccgtgatggcaccc

SEQ ID NO: 39838 - DNA, 201 bp, Homo sapiens
tagatacttctaaaagcacacaaaattaaaaagcacaaattgcaaccacaaacaattattgatatgaaaggaaaaggaaagggcctgactagaaattatcatagggtggggcagagggaagtagtttagattccaaatccctgagagggtcagggaaggcatcagactagattgggtgcgttcagggtggtatggccatag

SEQ ID NO: 39839 - DNA, 201 bp, Homo sapiens
tatatgtagtcagtgtgtttatatatttcatttcatatatgtgtcatatatatgtgtgtgtgtatgtatatatatatatatatatatatatatatataaaacactgaatattgcagaaaattaaagcaaagagtaagaagagttaaccaaattttccctcaatgcagtgggaaaagatgaaaaggagaagataggtgggca

SEQ ID NO: 39840 - DNA, 201 bp, Homo sapiens
atagatacttctaaaagcacacaaaattaaaaagcacaaattgcaaccacaaacaattattgatatgaaaggaaaaggaaagggcctgactagaaattatcatagggtggggcagagggaagtagtttagattccaaatccctgagagggtcagggaaggcatcagactagattgggtgcgttcagggtggtatggccata

SEQ ID NO: 39841 - DNA, 201 bp, Homo sapiens
atatatgtagtcagtgtgtttatatatttcatttcatatatgtgtcatatatatgtgtgtgtgtatgtatatatatatatatatatatatatatatataaaacactgaatattgcagaaaattaaagcaaagagtaagaagagttaaccaaattttccctcaatgcagtgggaaaagatgaaaaggagaagataggtgggc

SEQ ID NO: 39842 - DNA, 201 bp, Homo sapiens
tgaatatatgtagtcagtgtgtttatatatttcatttcatatatgtgtcatatatatgtgtgtgtgtatgtatatatatatatatatatatatatatatataaaacactgaatattgcagaaaattaaagcaaagagtaagaagagttaaccaaattttccctcaatgcagtgggaaaagatgaaaaggagaagataggtg

SEQ ID NO: 39843 - DNA, 201 bp, Homo sapiens
aatgaatatatgtagtcagtgtgtttatatatttcatttcatatatgtgtcatatatatgtgtgtgtgtatgtatatatatatatatatatatatatatatataaaacactgaatattgcagaaaattaaagcaaagagtaagaagagttaaccaaattttccctcaatgcagtgggaaaagatgaaaaggagaagatagg

SEQ ID NO: 39844 - DNA, 201 bp, Homo sapiens
gaaatctttttcttggcaatagattgcctgggtgaacatgaaactgaaatttgcccttataataggtaaagaaagaaaataatatgcccatgcattcaaarccgcaatgcagaattttgaccttgattccaatctgtttagaaactggattgaaaaaatctcaaaattattttcttttaggaaaaacatgtccatgtatag

SEQ ID NO: 39845 - DNA, 201 bp, Homo sapiens
aaatctttttcttggcaatagattgcctgggtgaacatgaaactgaaatttgcccttataataggtaaagaaagaaaataatatgcccatgcattcaaaaycgcaatgcagaattttgaccttgattccaatctgtttagaaactggattgaaaaaatctcaaaattattttcttttaggaaaaacatgtccatgtatagg

SEQ ID NO: 39846 - DNA, 201 bp, Homo sapiens
gatttaaaagtctctaagctatgttaggaagccttagacattatcctgaggtcattggagagccatcgaaaggtatctgtcttggaaaaaccttgattacyctgtcatataaatactgctctggtaatgtgaaaaatgaattgaatgaaaggtggcaagataggtatggagacctatttggttatgtcgtggtaatccaga

SEQ ID NO: 39847 - DNA, 201 bp, Homo sapiens
tgattacatactgtttgactctgtgatttttgttgctttaaattaaatctacaaggccttaaggggcctagctgagtctactatataatatgaaatatctrtgagaaaatacgtcttctttatggtaaagtatagctttagttgttgagctttgttcactctttgtgctcaagattgacgtggcgacagacttccaacatt

SEQ ID NO: 39848 - DNA, 201 bp, Homo sapiens
ggtggcctggggtgaaacgctggggggcgtggggaggcgcccgggctgacgaggcacccagggccccgcagagaactcgcgtgccgcgctgggctgcgctrctctgcgcgcccgggtccaaaggcagcgcgatgggtgggctgagcgcgctacctggcagggcggcgggtctgggatccttctgcgcactggagaccctcg

SEQ ID NO: 39849 - DNA, 201 bp, Homo sapiens
tctttgcactgcgcttttcctcttatcaaatctggtttgtagatgtgcttcgggaggatgggggtctcttctccgagaagccgggagcctgttgggcagcsggcgcccggtctccccttctgctgcggaggatccctgctggcggtcgtggtgctgctcgcgctgccggtggcctggggtgaaacgctggggggcgtgggg

SEQ ID NO: 39850 - DNA, 201 bp, Homo sapiens
aatttaggggcatgcctgtccccaaacagtatgactgtactttagtcattggtgtgcaatcagagaaatatggggaaatctgtaaaacagacttggtctcmggtgacagtctcattacctgaataatgatggtacaaatacctccctaggaaatatgtagatggagaatccaccaatactaataactccacactggatatc

SEQ ID NO: 39851 - DNA, 201 bp, Homo sapiens
acacatatcaaaattgtatttcatcccacatatcaactagaggaaaggtgaatgcataacactgaaagtcacggaactgttttattcgtttttttttttttatacagtggttctcaaagtgctgttatctatccaaatcagctgtgaaacttttaaaaaatatagactcctgggctctaacccagacccactaaatcagag

SEQ ID NO: 39852 - DNA, 201 bp, Homo sapiens
caatgcataagacacatatcaaaattgtatttcatcccacatatcaactagaggaaaggtgaatgcataacactgaaagtcacggaactgttttattcgtktttttttttttatacagtggttctcaaagtgctgttatctatccaaatcagctgtgaaacttttaaaaaatatagactcctgggctctaacccagaccca

SEQ ID NO: 39853 - DNA, 201 bp, Homo sapiens
cgaatgaatatatgtagtcagtgtgtttatatatttcatttcatatatgtgtcatatatatgtgtgtgtgtatgtatatatatatatatatatatatatatatataaaacactgaatattgcagaaaattaaagcaaagagtaagaagagttaaccaaattttccctcaatgcagtgggaaaagatgaaaaggagaagata

SEQ ID NO: 39854 - DNA, 201 bp, Homo sapiens
aacttctttctttccaagaatggttcattatatttgctttgttgctttgatctagttctaacctctcattgcaagctttgttgtgacgtttaccctctctyaatacagcttttggcgctaggagagctccacttggaatctcttcctttgtctagcatcaatgcataagacacatatcaaaattgtatttcatcccacata

SEQ ID NO: 39855 - DNA, 201 bp, Homo sapiens
cacgaatgaatatatgtagtcagtgtgtttatatatttcatttcatatatgtgtcatatatatgtgtgtgtgtatgtatatatatatatatatatatatayatatataaaacactgaatattgcagaaaattaaagcaaagagtaagaagagttaaccaaattttccctcaatgcagtgggaaaagatgaaaaggagaaga

SEQ ID NO: 39856 - DNA, 201 bp, Homo sapiens
aagagggaaaggaaactacatcaagcattctttgttgaaggctcatatgttccttttttgggctactatgcaaatttatattattacctatactatgcatwtactactataaaggtaagaatattaggtaattaaggggaaggaacttctttctttccaagaatggttcattatatttgctttgttgctttgatctagttc

SEQ ID NO: 39857 - DNA, 201 bp, Homo sapiens
tgcacacgaatgaatatatgtagtcagtgtgtttatatatttcatttcatatatgtgtcatatatatgtgtgtgtgtatgtatatatatatatatatatayatatatatataaaacactgaatattgcagaaaattaaagcaaagagtaagaagagttaaccaaattttccctcaatgcagtgggaaaagatgaaaaggag

SEQ ID NO: 39858 - DNA, 201 bp, Homo sapiens
agaaccagccacaaattgagggattggtaataaagagggaaaggaaactacatcaagcattctttgttgaaggctcatatgttccttttttgggctactaygcaaatttatattattacctatactatgcatatactactataaaggtaagaatattaggtaattaaggggaaggaacttctttctttccaagaatggttc

SEQ ID NO: 39859 - DNA, 201 bp, Homo sapiens
tttgcacacgaatgaatatatgtagtcagtgtgtttatatatttcatttcatatatgtgtcatatatatgtgtgtgtgtatgtatatatatatatatatayatatatatatataaaacactgaatattgcagaaaattaaagcaaagagtaagaagagttaaccaaattttccctcaatgcagtgggaaaagatgaaaagg

SEQ ID NO: 39860 - DNA, 201 bp, Homo sapiens
caattgaatattacccagcaacaaaaggaaacaatttgtatatgtgcagcaacctagatagaactctaattatgctgtgtgaaggctaaaacatttaaaamaatcggagtgatttcctttatatgataggatataaacgaagtgattcgggttatatgaaattttagaaagtcaaatcaatctgtagtaagagaaaacagg

SEQ ID NO: 39861 - DNA, 201 bp, Homo sapiens
agtttgcacacgaatgaatatatgtagtcagtgtgtttatatatttcatttcatatatgtgtcatatatatgtgtgtgtgtatgtatatatatatatatayatatatatatatataaaacactgaatattgcagaaaattaaagcaaagagtaagaagagttaaccaaattttccctcaatgcagtgggaaaagatgaaaa

SEQ ID NO: 39862 - DNA, 201 bp, Homo sapiens
agttcaaccgtttcttaaaaccttacacacacacctgtcatattactcagcattttactcttaggtttttacccaagagaaatgaaatcatatgtccacamaaagacttgtacatgaattttcataacagttttgtttgtaatagccaacgagtgggaacaatccaaatgtccctcaacaagtgaatggataaactaaatt

SEQ ID NO: 39863 - DNA, 201 bp, Homo sapiens
aacgctgcaacaagcatgtcagttggcatcatttatccaacagtgtgtgttgacttcgtgtctctgtgtagcattttggttattctcacaatatcccagakgttttcattattatcatgtctgtgatagtgatctgtcttcagtgatctttgatgttactattttcattgtttggagtccctacgaactgcacccatataa

SEQ ID NO: 39864 - DNA, 201 bp, Homo sapiens
tgaaactagccatgaagtttgcacacgaatgaatatatgtagtcagtgtgtttatatatttcatttcatatatgtgtcatatatatgtgtgtgtgtatgtrtatatatatatatatatatatatatatataaaacactgaatattgcagaaaattaaagcaaagagtaagaagagttaaccaaattttccctcaatgcagt

SEQ ID NO: 39865 - DNA, 201 bp, Homo sapiens
gtggagaagctggaattataatatactgctattcggcaggtaaaattacaacataactttagaaaatagttcaaccgtttcttaaaaccttacacacacayctgtcatattactcagcattttactcttaggtttttacccaagagaaatgaaatcatatgtccacaaaaagacttgtacatgaattttcataacagtttt

SEQ ID NO: 39866 - DNA, 201 bp, Homo sapiens
attgaaggtcagataatctttagcattttttaccaataaaccattttttaaagtatgacctttttttcacataattctatttcacacttaatagactatartatattacaaacacaacttttagactcactgaaaaatcaaaaaattcatatgacttggtttgttgtgatatttgttttattgtggtgttctggaactgaa

SEQ ID NO: 39867 - DNA, 201 bp, Homo sapiens
acagacatgcctaagcaaagcaagtgcaagtctgttccttaaagggtaagtatgcagaatggaaagcagagtgtacttcgggttgacagctcatatttgcrcagacatgaaagtgatgatgtgttaattgtgcgtatagcacagaataaatcagcttgctttgaatggaagatctgaaccaggagtgcatgaaattgggct

SEQ ID NO: 39868 - DNA, 201 bp, Homo sapiens
aaagaaaaggaaaaaaaaatacattttgtaaggctatagttcccacagacagtaattcctctgatggatctgaacaaagtaagttgaaaactgcaggaaakaattaatcattctacatactgttaagaacactcatgattcatgggaagaggttaaaatatcaacattaacaggagtttggtagaagttgattccgaccct

SEQ ID NO: 39869 - DNA, 201 bp, Homo sapiens
agctgcagcaagttgtcctgatgatctaactaagatcattgatgaaggtgttaaaataaatagcagattctccatgtagacaaaacagccatctattggamcttcatagctagagaggagaagccaatgcctgggttcaaagcttcaaaggataggctgcctttttaggagctaatctcgttggtgagtttgagttgaagc

SEQ ID NO: 39870 - DNA, 201 bp, Homo sapiens
acctgaacctaagacccaaatgatagtcaaggaggaaatggtagtgaggaagctgagcatctattagtgaagaaatcaagggagagatgggaattgctcayacatttgctaccacttttttttttctttaggttctgattaaaaggcaggtctgctagtcattgtgtcttggctggaatgaaagccctttggaatagcagt

SEQ ID NO: 39871 - DNA, 201 bp, Homo sapiens
gcattcagggtggtatggctgtagatcagtatccagttatttgtattacttctgaatctgtaagtatcatgtttattatatgtaatattgtatatttgtgyttgctttgtctttattagttctgccagagcttttgttcttattatttaataaagatgttatactgggccaggtgtggtggctcacacctgtaatcccagc

SEQ ID NO: 39872 - DNA, 201 bp, Homo sapiens
cagattcttgtcttaggagccatagaactccaaaggtttatggctataactgtgttttgacataattggctttctttatagtcctacgtgatttacttatrcattacaaaaaacagctctgagaagggattcataattctgaccagccaggcaaaggtgtatacatgatacataaagatattaagaacccctcatgactat

SEQ ID NO: 39873 - DNA, 201 bp, Homo sapiens
ggtagcagcctgtagtcccagctactctggaggctgaggcaggagaatggcgtgaacccgggaggcggagcttgcagcgagccgagatcgcgccactgcaytccagcctgggcgacagagcgagattccgtctcaaaatcaatcaatcaatcaatcaatcaatcactatacacttataaggatgagagtgaaaaaagacaa

SEQ ID NO: 39874 - DNA, 201 bp, Homo sapiens
ttcactgtccctcttcgggccctggggaggagactcccaaaagtctagacatgttcacccacatcctgtatgtggtttctggaaacgaaatgatcatggcwtttcctgaaccatggcttaactttgtgaatccacaactctctcttccccaggagatccaaaaagatagggtaggatgtaaaggcttcaatctgtttaaat

SEQ ID NO: 39875 - DNA, 201 bp, Homo sapiens
ttattctcattttttcctaacccaaccacctggttcaaggcacatagattaagaaggaaaatggaaatgggactaatatcccaggcttcactgtccctctycgggccctggggaggagactcccaaaagtctagacatgttcacccacatcctgtatgtggtttctggaaacgaaatgatcatggcatttcctgaaccatg

SEQ ID NO: 39876 - DNA, 201 bp, Homo sapiens
agcctgggcgacagagcgagattccgtctcaaaatcaatcaatcaatcaatcaatcaatcactatacacttataaggatgagagtgaaaaaagacaatatkttggtggtattgtgaatcaccaatttagaaaatggatatatttaaaaattgcaaaggatttctcagctagcgctcagttaagcatattttctcattaaat

SEQ ID NO: 39877 - DNA, 201 bp, Homo sapiens
atattttctgaatctcattatttaaggttaacaatgtgctaacctaaacaattcacaggatttgttttttattctcattttttcctaacccaaccacctgkttcaaggcacatagattaagaaggaaaatggaaatgggactaatatcccaggcttcactgtccctcttcgggccctggggaggagactcccaaaagtcta

SEQ ID NO: 39878 - DNA, 201 bp, Homo sapiens
gaacacaggtattaactcctgattgaaatgaacaaagataggagaagattaggggaaaaatctgtgtccttgctggaaaccagggcagtgcacacataaakagtatgccgttcactggatgggaaggaaaaaaaattaggagtatagtagtcaaagcacacaaacaaccctaacccagagtagacattgctggaagaaagg

SEQ ID NO: 39879 - DNA, 201 bp, Homo sapiens
cccattcatttggagttggtgtcttccaggtggctacccttaagctgtgtgctcaaataaactctatccttaaatatattttctgaatctcattatttaargttaacaatgtgctaacctaaacaattcacaggatttgttttttattctcattttttcctaacccaaccacctggttcaaggcacatagattaagaagga

SEQ ID NO: 39880 - DNA, 201 bp, Homo sapiens
ggcgctttcctgggttgcttctggcggccctggtgttgctgctgtcctccttctccggtaggaccccggggtggattcgcgcgtccgcggcgaggctagarctctgctcagtcagtcgggcaggaggcgcggggcgaagctcactgcacgtcgtgcctgcttgggatagagagcgaggccagggttctccgaggggtgccg

SEQ ID NO: 39881 - DNA, 201 bp, Homo sapiens
ccctgctctgcaaagggcaatgcctttctaaaagatcgctgtctagcaccactggctcatccgtgaattctgtcctgagtgaggcaagaacccttccagartaagccccaatttaggggcatgcctgtccccaaacagtatgactgtactttagtcattggtgtgcaatcagagaaatatggggaaatctgtaaaacagac

SEQ ID NO: 39882 - DNA, 201 bp, Homo sapiens
tatgcatgctgtcaggaagttgatgaggtatgtacagcacaattattttccattttttgcctttaggcaccgactcattggtcactcatctgctgaatgtrtcctctcgggcaatactgcccattggagcatgaagccaccaatttgtcaacgtgagttgaaatctctttccccattcaccccaccatttaaccctagagt

SEQ ID NO: 39883 - DNA, 201 bp, Homo sapiens
atgcaggttgagaccttacgtactgaagagagttcagattactctacctggctccaaaacattttctttcccacaggtaaatcatgtgaaactcctccagwtccagtgaatggcatggtgcatgtgatcacagacatccatgttggatccagaatcaactattcttgtactacagggtgagttggcagcaacatctcttgg

SEQ ID NO: 39884 - DNA, 201 bp, Homo sapiens
cctacacagaaatactgggtgaagatcacttaataagacgaactccagaaaacaagaaaatggcagagttgacaatccctctcaccctccctgcaaagacrcatgtatacaaatttcttttgtcagagacattaagagaaacaaatgctgtcaatctaatcacaactgatcacaacttgatgaaaccaaaaaatctagaaa

SEQ ID NO: 39885 - DNA, 201 bp, Homo sapiens
taattccaatttgctttctgtgctttgtgatgtattctggtttacatatgctcggatgagtagatgtatgatttatattatctactgttatctaaaataawcttcacattcggacaggcaacatcaaaactgtcctacacagaaatactgggtgaagatcacttaataagacgaactccagaaaacaagaaaatggcagag

SEQ ID NO: 39886 - DNA, 201 bp, Homo sapiens
tagctgaccttcccacacacattcttgcaaagaggaaaagtcaagcagggtgtttggaggtgagttgccatcatccaccgcctttgtctggaaggaagcgyagggcctcacacgcgggatccatcggaagcccaagcattgtcaagctctgctgctgcacctgggtcagcaaggtgggctctgccagcgaaactcgttaga

SEQ ID NO: 39887 - DNA, 201 bp, Homo sapiens
ctaactctcttcaattctgtgaaggctgacagaggtgaggaagctgcagaaaaaaagctggaagcagctgggcactgtggctcatgcctgtaattccagcwctttgggaggcagaggcaggtggatcacctgaggtcaggtgttcaagaccagcctgaccaatatggtgaaacctcatatctactgaaaatgcaaaaatta

SEQ ID NO: 39888 - DNA, 201 bp, Homo sapiens
ggcatttcattagctgaccttcccacacacattcttgcaaagaggaaaagtcaagcagggtgtttggaggtgagttgccatcatccaccgcctttgtctgkaaggaagcgcagggcctcacacgcgggatccatcggaagcccaagcattgtcaagctctgctgctgcacctgggtcagcaaggtgggctctgccagcgaa

SEQ ID NO: 39889 - DNA, 201 bp, Homo sapiens
aggcctcatgtgccaaacagctagcgagttgcaaaggcaaagcaaaagtacttgaaggaaacttaaagtgctattccagtgaacacatgaatgataagaargtgaaacagccttattgctgatatggaagaagttttagtggtctagatacaagatcaaactagacatatttccttaagctaaagcctaatcctgagcaag

SEQ ID NO: 39890 - DNA, 201 bp, Homo sapiens
taactcttgattgctttcttctcactactaaccttaagaaaggaagtaaccaaaatccaatacatgagcaactgttcattccatctccaatatctttgttmattgtccactttatccacccagtcagggccaccatcaaacctcacttggatgtcagcaaaagctccctggctggtctcccctctccattattgctttaat

SEQ ID NO: 39891 - DNA, 201 bp, Homo sapiens
aaatgaacaaagataggagaagattaggggaaaaatctgtgtccttgctggaaaccagggcagtgcacacataaagagtatgccgttcactggatgggaargaaaaaaaattaggagtatagtagtcaaagcacacaaacaaccctaacccagagtagacattgctggaagaaagggaagggcatgtagcagctgtgtgag

SEQ ID NO: 39892 - DNA, 201 bp, Homo sapiens
aaacctaaatacagtcactgatcttgggtacacagttggaacttgaaatgaatgggtacgtatttatttggaggcaaaagaacataattttataaaatgtrtgctagaaaaaaaagatgaatgagatggaaattgtttgcctcataataaggcaaaggttgttttaggaaacttaaaaccagtcaataatggaatctgtaa

SEQ ID NO: 39893 - DNA, 201 bp, Homo sapiens
agaatactggttaccagaggttggggtagggagagacaatgggagatggagagagattggttaaagggcacagggtcacagatacataagaataaattcayccttgaatacttaaccctctgccctacatctgtcactcctacatccatattcattgctaatcctggggctaactcttgattgctttcttctcactactaa

SEQ ID NO: 39894 - DNA, 201 bp, Homo sapiens
tctaaaaaagctcatctcatagaagtagagagtagaatactggttaccagaggttggggtagggagagacaatgggagatggagagagattggttaaaggrcacagggtcacagatacataagaataaattcatccttgaatacttaaccctctgccctacatctgtcactcctacatccatattcattgctaatcctggg

SEQ ID NO: 39895 - DNA, 201 bp, Homo sapiens
ctaaatctagatctagatagatctggagggaaggtctttttgaaagtggggcttagtaggtggctgatcctgaggctctctgatgagttttctcaaggtgscaaaatctgtggaactatcagaactgcgtgttttcttcaggaagctacatgcaggttgagaccttacgtactgaagagagttcagattactctacctggc

SEQ ID NO: 39896 - DNA, 201 bp, Homo sapiens
aatgtggtatatatacacaagggaatactattcagccataagaaagaatgaaatcctatcatttgcagcaacatggatgaatctaggggatattatattawatgaagtaaatcaggcacagaaagacaaatcctgtatgatatcagtcatgtgcaatctaaaaaagctcatctcatagaagtagagagtagaatactggtt

SEQ ID NO: 39897 - DNA, 201 bp, Homo sapiens
aatgctcacttcatgagaatgtttcaaggaatatttgtagagaaaatcttcattccttatgggaaaataaataataaatgactctatatcaggaaataaarattgtgtaggaagacaaattctgtttgaataactaggtgggaagaaatcctttgaaaactttattggtagtaaataatgccataaatgacctttacattt

SEQ ID NO: 39898 - DNA, 201 bp, Homo sapiens
agtgggcacaagacctgaacagacatcactcaaaagaagacatagaaatggccaacgaatataaaacaaaatgctcaacattcttagtcatcagagaaatmcaaaataaaaccagagagagatatcacctcaccctagttatcagagctcttatcaaaaagataaaagataacaaatgctgctgaggatgtggaaaataga

SEQ ID NO: 39899 - DNA, 201 bp, Homo sapiens
gtgggataagagaaaccttttttcaaaagcgttcagataggtggatgtaagagtttttcttgcaggtcgtctttgattattgcttgaaatgctcacttcaygagaatgtttcaaggaatatttgtagagaaaatcttcattccttatgggaaaataaataataaatgactctatatcaggaaataaagattgtgtaggaag

SEQ ID NO: 39900 - DNA, 201 bp, Homo sapiens
gctaacacgtgtactgaaatatctgctacattatctactcaaccctaattctactcacctttctacagcctttgatatttagagttactccgtcctcacasaactctttccaactccagcactggaaacaattgactcctgtctctaccaaactgtacgtcccagattcttgtcttaggagccatagaactccaaaggttt

SEQ ID NO: 39901 - DNA, 201 bp, Homo sapiens
atttgagaaatatttcccaagaacgtaggccccttcctcagcactgtgtccccaggatcctgatgagtggctgacacaggataagtgctaaattaagaaakattgactaaatgaatgagtaacccttcaaaacggttatttttcttcttcaaatgttttgctacttcattaaagttgtaaagtaagtaaacttgcattgga

SEQ ID NO: 39902 - DNA, 201 bp, Homo sapiens
ctcagactttgatattattccctgtccttttagggcagcttgagcccttttgtttgacttagcacaacgtgactccaaactagggttgttttaatttcccragacacagtagtaggcaatttcttgaggacctaattgcagatagagtttgtcggtctcagcatgtgggagctccagatgaatggcagtaatgggaagcag

SEQ ID NO: 39903 - DNA, 201 bp, Homo sapiens
atacatttgagaaatatttcccaagaacgtaggccccttcctcagcactgtgtccccaggatcctgatgagtggctgacacaggataagtgctaaattaakaaagattgactaaatgaatgagtaacccttcaaaacggttatttttcttcttcaaatgttttgctacttcattaaagttgtaaagtaagtaaacttgcat

SEQ ID NO: 39904 - DNA, 201 bp, Homo sapiens
gacaacaaagaagggagaggaataaatcacagggtgagcagttctaaaaagcaacagtcttgtcaggaataaacaatcaccatcgtaaactcagactttgrtattattccctgtccttttagggcagcttgagcccttttgtttgacttagcacaacgtgactccaaactagggttgttttaatttcccaagacacagtag

SEQ ID NO: 39905 - DNA, 201 bp, Homo sapiens
tgatgatcaatatcagtaagtaatcagtgaaagttttcacctatttaagatgattagcacacatatatacatttgagaaatatttcccaagaacgtaggcyccttcctcagcactgtgtccccaggatcctgatgagtggctgacacaggataagtgctaaattaagaaagattgactaaatgaatgagtaacccttcaaa

SEQ ID NO: 39906 - DNA, 201 bp, Homo sapiens
ttacatcagaggcctgattcatttcaaaaccttcctcagagcaaggggtaattgccaggtaccctttaaagccagaattaatacatataacccatatttaygctgtctcaagactaattagcatggtgttgcatgctagacaaataagttcaactccagaaaacatgtaaaaactaacagaagtttcaacttgaatatctt

SEQ ID NO: 39907 - DNA, 201 bp, Homo sapiens
atgccaccacacctggctaattttttatattttgtagagatggagtcttgccatattgcccaggctggtctcaaactcctgggctcaagctatcctcccaycttggcctccaaaagtgttaggattacaagtgtgagccaccgtacccagccaaatttttatgttcttttatcccctcacttatcataaacaatttagtca

SEQ ID NO: 39908 - DNA, 201 bp, Homo sapiens
cttaagctttcatataaactttatttaattttgctttctatgtgacaagttatacttctagccaaacaactcttggatgttttatggagacagcaaagacrtagagtaaatagaaattgatattgaaggaaagcataactacttgctatttctgacaataagtctgttgaaagcattaagaatgtagtaatcatgagaatt

SEQ ID NO: 39909 - DNA, 201 bp, Homo sapiens
ggtgcgacaccatgccaggctaatttttgtatttttaatagagatggggtttcaccatgttggccaggctggtctcgaactcctgacctcatgatccaccygcctcagcctccaaaaatgctgggattacaggcgtgagccaccatgcctggcaaagaatgacactgggtgtattaaaaagtatgataagtgacatgatca

SEQ ID NO: 39910 - DNA, 201 bp, Homo sapiens
cacacacacatattaagggaatacgcaaacaaaaaatggcagaaataatatgggaaaagacagaacttaagaaagaaattgtcaagcaggtctacaaaatrattgttttattttggtgccaggtacagtccacaatgaagtcaagatattaagaagtaaagtggaccaggagaagttagagcagaaatatctcttttcaat

SEQ ID NO: 39911 - DNA, 201 bp, Homo sapiens
gatttccattataaaatatgaaacgtagtgagcatttttttggtttttttttgagacggagtctcgctctgttgcccaggctggagtgcagtggcatgatytcggctcactgcaagctctgcctcccgggttcccgccattctcctgcctcagcctcccgagtagctggggctacaggcacccgccaccatgccaggctaa

SEQ ID NO: 39912 - DNA, 201 bp, Homo sapiens
accccaagcacattacttttatgatttattactggttatcttctaggatttccattataaaatatgaaacgtagtgagcatttttttggtttttttttgaracggagtctcgctctgttgcccaggctggagtgcagtggcatgatctcggctcactgcaagctctgcctcccgggttcccgccattctcctgcctcagcc

SEQ ID NO: 39913 - DNA, 201 bp, Homo sapiens
aaagaggaagatgtaaattatgtagtataataccacttaacagttttttaaaaagatacatatgtttaccccaagcacattacttttatgatttattactkgttatcttctaggatttccattataaaatatgaaacgtagtgagcatttttttggtttttttttgagacggagtctcgctctgttgcccaggctggagtg

SEQ ID NO: 39914 - DNA, 201 bp, Homo sapiens
gcagggctattgttatcactgagactgatgatcaatatcagtaagtaatcagtgaaagttttcacctatttaagatgattagcacacatatatacatttgwgaaatatttcccaagaacgtaggccccttcctcagcactgtgtccccaggatcctgatgagtggctgacacaggataagtgctaaattaagaaagattga

SEQ ID NO: 39915 - DNA, 201 bp, Homo sapiens
cggaagggattattgtcctgatttcagcactgctatctctggtttcactttccttgcagcagaagcaagagactaattgtaggaagagcattagcctgcgyagactatgcttaattaacatcatttctgtggtcttcagtttccatttagtttaatgagattgttgaactcaaatctcaatcactggattctaatttgttt

SEQ ID NO: 39916 - DNA, 201 bp, Homo sapiens
cactgtggcagggctattgttatcactgagactgatgatcaatatcagtaagtaatcagtgaaagttttcacctatttaagatgattagcacacatatatacatttgagaaatatttcccaagaacgtaggccccttcctcagcactgtgtccccaggatcctgatgagtggctgacacaggataagtgctaaattaagaa

SEQ ID NO: 39917 - DNA, 201 bp, Homo sapiens
tgtgctagggagaattgtgttctatttctctaccttttactaactatgaggccttcagcaggcataggatatagcaaaagaaattcccccataactaacargtactctggaactgtcctttctacaatgtgtcagccgcctccagaaatcctgcatggtgagcataccctaagccatcaggacaactttttacctgggcag

SEQ ID NO: 39918 - DNA, 201 bp, Homo sapiens
atcagcagctgtgcttatgactggagagattattttgatatgacggaagggattattgtcctgatttcagcactgctatctctggtttcactttccttgcrgcagaagcaagagactaattgtaggaagagcattagcctgcgcagactatgcttaattaacatcatttctgtggtcttcagtttccatttagtttaatga

SEQ ID NO: 39919 - DNA, 201 bp, Homo sapiens
tcactgtggcagggctattgttatcactgagactgatgatcaatatcagtaagtaatcagtgaaagttttcacctatttaagatgattagcacacatatatacatttgagaaatatttcccaagaacgtaggccccttcctcagcactgtgtccccaggatcctgatgagtggctgacacaggataagtgctaaattaaga

SEQ ID NO: 39920 - DNA, 201 bp, Homo sapiens
gcaggaaaagtccttatttactgagatgaaatagaggactttttgcagggactcctgatcagcagctgtgcttatgactggagagattattttgatatgayggaagggattattgtcctgatttcagcactgctatctctggtttcactttccttgcagcagaagcaagagactaattgtaggaagagcattagcctgcgc

SEQ ID NO: 39921 - DNA, 201 bp, Homo sapiens
aggaagagactattataaacaaatcagtagatgctagaaaggagtaacaacttgaaacctgacccagaaagtaaaaaaagaaaataaatcatcaacagacsttgacattttcaaaagcaaagcaatctgaatccatttggagttttttataatggcctgaatatgtttcaattcactgtggcagggctattgttatcactg

SEQ ID NO: 39922 - DNA, 201 bp, Homo sapiens
atctgttgacacctttactgagtttgttcctattgcaggactctttgattttctggagtgcaaccagtttgagtcttttgatgtaacacatttaaacagggaaatttctgctgtctgcagaacacgacctatatttctgtctcttccctgcctgcagtcttccacacctcataatgttattctttttttctctttactggg

SEQ ID NO: 39923 - DNA, 201 bp, Homo sapiens
attgatcacatactttgtgcctctgttcatctagatactggagttatagcaatgaacaagatgagtgaagtccctgtccccatgttgtttttactcaggtrgggagaaggacaaggaaaaaaataagcaaattaaatgctacggataatagatcaaagcaatgaagaatgagggaaaagtggggagtaacattagacaggg

SEQ ID NO: 39924 - DNA, 201 bp, Homo sapiens
tttttcaattcaagcaggactatcatgtgaccaagctactgcattttgccactctatattgctcccttctggaggctgtgatttttccagaataacgtagyctgtgcaactctgccacctgctggcctcaggtcctcaaaatcctgaaattggggctgggccttagattgtgaactaagtgtcctcttggctgaaacagct

SEQ ID NO: 39925 - DNA, 201 bp, Homo sapiens
aaaattagctgggcatgttggtgcatgcctgtaatcccagccactcaggaggatgagtcaggagaattgcttgaactcgggaggcagaggttgcagtgagyagatattgcaccattgcactccagcctgagcgacagagccagactccgtctaaaaaaacaaacaaacaaacaaagcaaatcaaatatataatttatttca

SEQ ID NO: 39926 - DNA, 201 bp, Homo sapiens
ctgtagactggagctgttcctatttggccatcttggctcctccctcctattttattcttttcagagtgatctgttgacacctttactgagtttgttcctaytgcaggactctttgattttctggagtgcaaccagtttgagtcttttgatgtaacacatttaaacagggaaatttctgctgtctgcagaacacgacctata

SEQ ID NO: 39927 - DNA, 201 bp, Homo sapiens
gagttacgaaggcattgcattagaagactgggtttctaataatgacaatgagtaatcagtgaaactccaagcctgggtcctgggtcaaggagatggtggcyattttgtgaccacctttttcaattcaagcaggactatcatgtgaccaagctactgcattttgccactctatattgctcccttctggaggctgtgattttt

SEQ ID NO: 39928 - DNA, 201 bp, Homo sapiens
caaggccgagcacagtggctcacgcctgtagtcccagcactttgggaggccgaggtgggagggtcacctcagatcaggagttcaagaccagtctggccaamgtggtgaaacaccatctctactaaaaatacaaaaattagctgggcatgttggtgcatgcctgtaatcccagccactcaggaggatgagtcaggagaattg

SEQ ID NO: 39929 - DNA, 201 bp, Homo sapiens
tccccagtgagatgaacccggtacctcagttggaaatgcagaaatcacccgtcttctgtgtcgctcacactgggagctgtagactggagctgttcctattyggccatcttggctcctccctcctattttattcttttcagagtgatctgttgacacctttactgagtttgttcctattgcaggactctttgattttctgga

SEQ ID NO: 39930 - DNA, 201 bp, Homo sapiens
ccaaaagccagcacccagtaagagttaggagggcatcggggcccaacagacattgagaattttcaacaattgcgtacaaaaattatgtcctctcttctttcctttttcccctagaatattcgtgcttactcttcagcagcccaaattgcccttttgagccttcttcacgccatcacagatgtggagatgaaaggacaatct

SEQ ID NO: 39931 - DNA, 201 bp, Homo sapiens
tccaaaagccagcacccagtaagagttaggagggcatcggggcccaacagacattgagaattttcaacaattgcgtacaaaaattatgtcctctcttctttcctttttcccctagaatattcgtgcttactcttcagcagcccaaattgcccttttgagccttcttcacgccatcacagatgtggagatgaaaggacaatc

SEQ ID NO: 39932 - DNA, 201 bp, Homo sapiens
ctccaaaagccagcacccagtaagagttaggagggcatcggggcccaacagacattgagaattttcaacaattgcgtacaaaaattatgtcctctcttctttcctttttcccctagaatattcgtgcttactcttcagcagcccaaattgcccttttgagccttcttcacgccatcacagatgtggagatgaaaggacaat

SEQ ID NO: 39933 - DNA, 201 bp, Homo sapiens
aaaattaaacccagtattttttccctaagacttgggatagattgcttaagataccagtcctaggccttcctaaaatggaagatgaggaactaacctggggyggtggtccaggcttggagtgacatgccatagagggttttgagacagaatagcaatccaaagagaaaaaggaacctttgagtactagcatcagagcaggaa

SEQ ID NO: 39934 - DNA, 201 bp, Homo sapiens
gacatcttactgctttgtagtgagaagagacaaagaaaatttcatgatcttagagactatcgaaacagaaaaaattaaacccagtattttttccctaagayttgggatagattgcttaagataccagtcctaggccttcctaaaatggaagatgaggaactaacctggggcggtggtccaggcttggagtgacatgccata

SEQ ID NO: 39935 - DNA, 201 bp, Homo sapiens
ttactctacctggctccaaaacattttctttcccacaggtaaatcatgtgaaactcctccagttccagtgaatggcatggtgcatgtgatcacagacatcyatgttggatccagaatcaactattcttgtactacagggtgagttggcagcaacatctcttggttccagagttccagcacagcaatactaccttctagcca

SEQ ID NO: 39936 - DNA, 201 bp, Homo sapiens
tagaaactgagacacagagggtttaggtaacttgcacaagaccacagaatggggtagcctgggttcagccaagcaatctacttatctgtagagactgtgcwctttaacaataaataaatggtcaacggacctaaatatataattcaacaagagagaatatttaagtactgtcataatgaaatggaaagctatcaggcaagg

SEQ ID NO: 39937 - DNA, 201 bp, Homo sapiens
gaaagcctttggaatagcagtgttccagtgtgtgaacgtaagtaataggagtaacatttcaggccaatctctcctcttcatctgttcagtatttgacccaygacctcccctaatgtggttcttcaattttctaatctgaattattgatttgaaaatttcttattttagtaatgtttggttgtgaatcaatgtgtacatcac

SEQ ID NO: 39938 - DNA, 201 bp, Homo sapiens
tgtaacgaatattgttgtatattgaaggtactattgtaaattggcaaaatctcttatgaaaaacaattatgcaatgtgtgtggacaataatacaaatattctgccagttagcctcctagaactgcaacctaagaaaatagtgtaaaatataaaatagtttatgcattttattaagggtttcatgagaaagaaaactagaaa

SEQ ID NO: 39939 - DNA, 201 bp, Homo sapiens
cttttgctgtgcagaagctctttagtttaattagatcccatttgtcaattttgtcttttgttgccgttgcttttggtgttttagacatgaagtccttgcchatgcctatgtcctgaatggtaatgcctaggttttcttctagggtttttatggttttaggtctaatgtttaagtctttaatccatcttgaattgatttttg

SEQ ID NO: 39940 - DNA, 201 bp, Homo sapiens
tttactgagaatgatgttttccaatttcatccatgtccctacaaaggacatgaactcatcattttttatggctgcatagtattccatggtgtatatgtgcmacattttcttaatccagtctatcattgttggacatttgggttggttccaagtctttgctattgtgaataatgccacaataaacatacgtgtgcatgtgtc

SEQ ID NO: 39941 - DNA, 201 bp, Homo sapiens
ttcacaagaagtctccatgccatttctaaggtaaatggagtttcttcagttctgcatagttcgatgcaacacagccttgaaagtttctgcagggaaatgcrgaaactatcttaggatgcaagatttagagaaagggtgtaaatatctttctactttggcacataaatatacagaaactgtttaacctcactagaactaaag

SEQ ID NO: 39942 - DNA, 201 bp, Homo sapiens
gtgaaactctaatagaacttaaaagctcttgttttctttctagaaatcttttgtccaaatcctccagctatccttaatgggagacacacaggaactccccytggagatattccctatggaaaagaagtatcttacacatgtgacccccacccagacagagggatgaccttcaacctcattggggagagcaccatccgccgc

SEQ ID NO: 39943 - DNA, 201 bp, Homo sapiens
ataagccccatcatgtttgggtcaggtcattttattcattgctttctcctcatcctcatcatgggacatcgtgaaatcatgaaaaaggtagtgaaagaatkatgacaaggccgagcacagtggctcacgcctgtagtcccagcactttgggaggccgaggtgggagggtcacctcagatcaggagttcaagaccagtctgg

SEQ ID NO: 39944 - DNA, 201 bp, Homo sapiens
tgtcctgcactccccagtgagatgaacccggtacctcagttggaaatgcagaaatcacccgtcttctgtgtcgctcacactgggagctgtagactggagctgttcctatttggccatcttggctcctccctcctattttattcttttcagagtgatctgttgacacctttactgagtttgttcctattgcaggactctttg

SEQ ID NO: 39945 - DNA, 201 bp, Homo sapiens
gaaagattgactaaatgaatgagtaacccttcaaaacggttatttttcttcttcaaatgttttgctacttcattaaagttgtaaagtaagtaaacttgcaytggatctttcccatgtctgcaaaagcttcttattgaattttttcaattgtgggataagagaaaccttttttcaaaagcgttcagataggtggatgtaaga

SEQ ID NO: 39946 - DNA, 201 bp, Homo sapiens
ctgtcctgcactccccagtgagatgaacccggtacctcagttggaaatgcagaaatcacccgtcttctgtgtcgctcacactgggagctgtagactggagctgttcctatttggccatcttggctcctccctcctattttattcttttcagagtgatctgttgacacctttactgagtttgttcctattgcaggactcttt

SEQ ID NO: 39947 - DNA, 201 bp, Homo sapiens
ggctagtcatgggctctgggctctgagctggggttctgatggctgctgttaatatttccagcaaggtcattaccttgtttatgtccacctagtgctcttcrcagggtgcacatctctacacgggagctgaccagcatgggcaacaaagcacctgatcccaaaatgtaacacagaatcttggcaggctccaaaagccagcac

SEQ ID NO: 39948 - DNA, 201 bp, Homo sapiens
ttggaaaagcacagtattagggtgggagtgacccaattttccaggtgccatctgtcacccctttctttgactaggaaagggaattccctgaccccttgtgmttcccaggtgaggcgatgcctcgccctgcttcggctcatgcacagtgcgctgcacccactgtcctgcactccccagtgagatgaacccggtacctcagtt

SEQ ID NO: 39949 - DNA, 201 bp, Homo sapiens
gaatagatgtatgtttgttgcaccagtgtgataggtgatggagggacctattagatgagacatgggcaggggcactcctttatggcctaaaatgcaagackaaattggtgatgcctttctagaaaggaagcatggagatataaaaatccatcatccctcccaattttgtactgggtgaacagtaattggaagcattctaga

SEQ ID NO: 39950 - DNA, 201 bp, Homo sapiens
ccccagaggtggagcctacagaggcaggcaggcctccttgagctgtgatgggctccacccagttcgagcttcccgcagctttgtttacctactcaagcctmggcaatggtgggcgcccctcccccagcctcactgctgccttgcagtttgatctcagactgctgtgctagcaatgagcgagactccgtgggcgtaggaccc

SEQ ID NO: 39951 - DNA, 201 bp, Homo sapiens
atactggtgaactgcaaatgctgctgcctgatcttcctttggaagttttgtctcagaggagtacccgctgtgtgaggtgtcagtccgcccctactgggggktgcctcccagttaggctatttgggggtcagggacccacttgaggaggtagtctgcccgttctcagatctcaagctgcgtgctgggagaaccactactctc

SEQ ID NO: 39952 - DNA, 201 bp, Homo sapiens
gtgggtaacccgacctttctctctggctgcccttaacatttttttccttcatttcaactttggtgaatctgacaattatgtgtcttggagttgctcttctygaggagtatctttgtggtgttctctgtatttcctgaatttgaatgttggcctgccttgctagactggggaagttctcctggataatatcctgcagagtgt

SEQ ID NO: 39953 - DNA, 201 bp, Homo sapiens
ctagttactgtgttttggctggaatggaaagcctttggaatagcagtgttccagtgtgtgaacgtaagtaataggagtaacatttcaggccaatctctccycttcatctgttcagtatttgacccatgacctcccctaatgtggttcttcaattttctaatctgaattattgatttgaaaatttcttattttagtaatgtt

SEQ ID NO: 39954 - DNA, 201 bp, Homo sapiens
aaaatctctcagcatttgcttgtctgtaaagtattttatttctccttcacttatgaagcttagtttggctggatatgaaattctgggttgaaaattctttyctttaagaatgttgaatattggccctcactctcttctggcttgtagagtttctgctgagagatccgctgttagtctgatgggcgtccctttgtgggtaac

SEQ ID NO: 39955 - DNA, 201 bp, Homo sapiens
gtgacaaaatctctcagcatttgcttgtctgtaaagtattttatttctccttcacttatgaagcttagtttggctggatatgaaattctgggttgaaaatyctttcctttaagaatgttgaatattggccctcactctcttctggcttgtagagtttctgctgagagatccgctgttagtctgatgggcgtccctttgtgg

SEQ ID NO: 39956 - DNA, 201 bp, Homo sapiens
gtgtcttttaattggagcatttagcccatttacatttaaggttaatattgttatgtgtgaatttgatcctgtcattatgatgttagctggttattttgctygttagttgatgcagtttcttcctagccttgatggtctttacaatttggcatgtttttgcagtggctggtaccgattgttcctttccatgtttagtgcttc

SEQ ID NO: 39957 - DNA, 201 bp, Homo sapiens
tgcactgtggtctgagagacagtttgttataatttctgttcttttacatttgctgtggagcgctttacttccaactatgtggtcaattttggaataagtgyggtgtggtgctgaaaagaatgtatattctgttgatttggggtggagagttctgtagatgtctattaggtctgcttggtgcagagctgggttcaattcctg

SEQ ID NO: 39958 - DNA, 201 bp, Homo sapiens
cttggcttcaaatttctgtttctttcctgtaggtaaatcatgtcgtaatcctccagatcctgtgaatggcatggcacatgtgatcaaagacatccagttcrgatcccaaattaaatattcttgtcctaaagggtgagttggcatctcttgaaccaacatctcttggttcaagggttctaacacagccatactaccttctag

SEQ ID NO: 39959 - DNA, 201 bp, Homo sapiens
gctccaaaagccagcacccagtaagagttaggagggcatcggggcccaacagacattgagaattttcaacaattgcgtacaaaaattatgtcctctcttctttcctttttcccctagaatattcgtgcttactcttcagcagcccaaattgcccttttgagccttcttcacgccatcacagatgtggagatgaaaggacaa

SEQ ID NO: 39960 - DNA, 201 bp, Homo sapiens
aggctccaaaagccagcacccagtaagagttaggagggcatcggggcccaacagacattgagaattttcaacaattgcgtacaaaaattatgtcctctcttctttcctttttcccctagaatattcgtgcttactcttcagcagcccaaattgcccttttgagccttcttcacgccatcacagatgtggagatgaaaggac

SEQ ID NO: 39961 - DNA, 201 bp, Homo sapiens
agacagacagacagacacacacacacacacacacaatcagagagatgaacttttgaaagtatatataggaagaaaggaaagacacatatggaactaataayatgagatatgaagaggacactgggccatatattaactggcaaattcaaagacaagtataattacttgttattaatatataggtaacacagtaagtttaaa

SEQ ID NO: 39962 - DNA, 201 bp, Homo sapiens
tgtcaactcaggaatcttactatgcctgatttaaagtagacaaccaaatgggtgtttgtaaaaaaattaaaaaaaattactttccaaattcattatgaacrtagctacctggatggtccaaaaacactgtctttgggcttttgcaatagactgtaatttaggtctcacaacagttagttgcctctcaacaaaagccttaca

SEQ ID NO: 39963 - DNA, 201 bp, Homo sapiens
atgagccactgtgcctggcctctatgttttgcagagaaaatgtgccttagagaaatcggataactttctaagatattaacttgcagactgaagactgaaaygcaagtccacccgactccagagacttggctttgctagtcagcatccagtcaggaaatcaaaacttactctagatactttcaaggagggagggatttcatg

SEQ ID NO: 39964 - DNA, 201 bp, Homo sapiens
atctcttcctaaattcatatcaaattagaagcatcaagtgcttttagggaaggaactgttctaaacagaagaaaagaaggaagaaatgatggctaataatytggaagaaagaaaaaaagcctctttggcaccatttaatctgtgtaaaaagagccttaccaatgtagtctgatgacaccactggaaatttggtattggtcc

SEQ ID NO: 39965 - DNA, 201 bp, Homo sapiens
gggctcaagctatcctcccaccttggcctccaaaagtgttaggattacaagtgtgagccaccgtacccagccaaatttttatgttcttttatcccctcacktatcataaacaatttagtcagcttgttttttagcctgcagtattgaatgacatagggcttcccatgtgctaggactttccatgtgtagaaaatgcaatga

SEQ ID NO: 39966 - DNA, 201 bp, Homo sapiens
aggtgagatcatggcttactgcaaccgccacctccctggctcaagcaattctcctgcctgagcctcccaagcagctgggactacaggtgcatgctaccacrcctggttaaattttttatattttttttatagagatcgaatctcaccatgtttcccaggcttgtctcgaacacctgagctgaagcaatccacccacctggg

SEQ ID NO: 39967 - DNA, 201 bp, Homo sapiens
agggtcttgatctgtcactcaagttggactgcagaggtgagatcatggcttactgcaaccgccacctccctggctcaagcaattctcctgcctgagcctcycaagcagctgggactacaggtgcatgctaccacacctggttaaattttttatattttttttatagagatcgaatctcaccatgtttcccaggcttgtctc

SEQ ID NO: 39968 - DNA, 201 bp, Homo sapiens
gcccaggctggtctcaaactcctgggctcaagctatcctcccaccttggcctccaaaagtgttaggattacaagtgtgagccaccgtacccagccaaattyttatgttcttttatcccctcacttatcataaacaatttagtcagcttgttttttagcctgcagtattgaatgacatagggcttcccatgtgctaggactt

SEQ ID NO: 39969 - DNA, 201 bp, Homo sapiens
ttatggagacagcaaagacgtagagtaaatagaaattgatattgaaggaaagcataactacttgctatttctgacaataagtctgttgaaagcattaagartgtagtaatcatgagaattcatccttcacaactgagtgtcccctatttaaatctgcaaactcttagagttaaagtagggctgacagaaatgagaaataga

SEQ ID NO: 39970 - DNA, 201 bp, Homo sapiens
ttgaaagttcaatagagcttatctttttttttttattcttacatgtttgttgggtaattctagctttctaaatctttttgaatgaatattggcaatttatrtttccatttatatcatttagattttcaaaatatttaacccccagtagtctacagttttataaatattctcatattcataaaaatgtttaaattccttttc

SEQ ID NO: 39971 - DNA, 201 bp, Homo sapiens
ctgattaaaaggcaggtctgctagtcattgtgtcttggctggaatgaaagccctttggaatagcagtgttccagtgtgtgaacgtgagtagaaagaactaygtagtttggatagctctccttatttttgttttccagtgttttactgcacggaatcacttgtctggatctttacttaactaaattactgattaaaatactt

SEQ ID NO: 39972 - DNA, 201 bp, Homo sapiens
tggatccccttctctctctctctctacgttcctcgcactgaccaacctctttgtgatcttcaggcgtgccatacccccagcccgtaataaaatctttactkccatcttgtgtttcttgtaatgactgaagaggttttctctatcataaagatcctaaatgaaaacatacccgcatatgagctctttctggtgtgtttcctt

SEQ ID NO: 39973 - DNA, 201 bp, Homo sapiens
agggagagatgggaattgctcacacatttgctaccacttttttttttctttaggttctgattaaaaggcaggtctgctagtcattgtgtcttggctggaaygaaagccctttggaatagcagtgttccagtgtgtgaacgtgagtagaaagaactatgtagtttggatagctctccttatttttgttttccagtgttttac

SEQ ID NO: 39974 - DNA, 201 bp, Homo sapiens
gtaatatattacattgattgatctttaaagggcaaacaaactctgaattcctagaatcaacctatgttgcttgtgatgtgttatagatgattatcctatcwatgaaatgtgtgtgagtgtgtgtgtggtgtgtgtgtgcaggattgctcatatttttattgtaacgttgtaacattgatttaatatttaaaatcagtcaag

SEQ ID NO: 39975 - DNA, 201 bp, Homo sapiens
tagaagggtgaggagggtggagaagagttttattgagtgacaaaacagcttctcagcagagaagagacacaagggtggaccccagatgaagtcagggggtyattctctcagtgtggctggttctggagcctttatggactcagaattggaagtgtgtgttaattggttggtgagtatgcaaaaaaggctaaaacaaagcca

SEQ ID NO: 39976 - DNA, 201 bp, Homo sapiens
taatctaattgggtagttgacctgtgtatttagaatgtaacattccttattttttgcctctagataccgactcattggttcctcgtctgccacatgcatcrtctcaggcaacactgtcatttgggataataaaacacctgtttgtgacagtgagttgaaatatgcattcctatttcttttaccgatacattctaatttttc

SEQ ID NO: 39977 - DNA, 201 bp, Homo sapiens
tttataaaatgtatgctagaaaaaaaagatgaatgagatggaaattgtttgcctcataataaggcaaaggttgttttaggaaacttaaaaccagtcaatartggaatctgtaatagtgtatgaataactatgttttaacccaattacatatcttcatgtcaagaatggccagtgtaattgttttgatgcaagatttttctc

SEQ ID NO: 39978 - DNA, 201 bp, Homo sapiens
cagagagattaatttatggaagggtagttttgaaataagggtagggactaagtggcaccgccttcagaaaacaatgaaaaaatggcacatacaactcaatrtcagatacaaacctaaatacagtcactgatcttgggtacacagttggaacttgaaatgaatgggtacgtatttatttggaggcaaaagaacataatttta

SEQ ID NO: 39979 - DNA, 201 bp, Homo sapiens
acctgggatctttctgtgctattccctacaactgcatgggaatctgattatctcaaaataaaatttttttttttttaagttactactaaatttccaagggsatgggcttcctaccaaagaattgtatattgtgaaattaaatcattcgaacttaaaacaattcaaacttatagctgggagaactttaaattattctgagcc

SEQ ID NO: 39980 - DNA, 201 bp, Homo sapiens
aaatgttattattaggggaaaattgagtaaagtgtacctgggatctttctgtgctattccctacaactgcatgggaatctgattatctcaaaataaaattwttttttttttaagttactactaaatttccaaggggatgggcttcctaccaaagaattgtatattgtgaaattaaatcattcgaacttaaaacaattcaaa

SEQ ID NO: 39981 - DNA, 201 bp, Homo sapiens
gttggtttcaaagaacatctttatttctgctttcatttcgttatgtacccagtagtcattcaggagcgggttgttcagtttccatgtagttgagctgtttygagtgagtttcttaatcctgagttctagtttgattgcactgtggtctgagagacagtttgttataatttctgttcttttacatttgctgtggagcgcttt

SEQ ID NO: 39982 - DNA, 201 bp, Homo sapiens
tgctcgctgctagtgcagcagtgtgagatccacctgggatgctggaacttggctgggggaggagcatccgacattgctaaggcttgactgggcggttctakgctcacagtgtaaacaaagcgccagggaagcctgaactgggtggagcccactgcagctcagcaaggcctactgcctctctagattccacctctgggtgca

SEQ ID NO: 39983 - DNA, 201 bp, Homo sapiens
tgcctggctggggaggtcccacgcccacggagccttgctcgctgctagtgcagcagtgtgagatccacctgggatgctggaacttggctgggggaggagcrtccgacattgctaaggcttgactgggcggttctaggctcacagtgtaaacaaagcgccagggaagcctgaactgggtggagcccactgcagctcagcaag

SEQ ID NO: 39984 - DNA, 201 bp, Homo sapiens
gtattgtgaatcaccaatttagaaaatggatatatttaaaaattgcaaaggatttctcagctagcgctcagttaagcatattttctcattaaattgtcagyatttcttgtgataactagaagaaaacttagcatggccttgcaaataaatataggcgtattaggccgttttcgtattgctataaagaaatgcctgagactg

SEQ ID NO: 39985 - DNA, 201 bp, Homo sapiens
actctacctggctccaaaacattttctttcccacaggtaaatcatgtgaaactcctccagttccagtgaatggcatggtgcatgtgatcacagacatccakgttggatccagaatcaactattcttgtactacagggtgagttggcagcaacatctcttggttccagagttccagcacagcaatactaccttctagccaca

SEQ ID NO: 39986 - DNA, 201 bp, Homo sapiens
acctaactgatgactttgagtttcccattgggacatatctgaactatgaatgccgccctggttattccggaagaccgttttctatcatctgcctaaaaaaytcagtctggacaagtgctaaggacaagtgcaaacgtaagtaactctggagtgggaacccctctgttagtcaaacatctgtaagatctgattcaatttgtt

SEQ ID NO: 39987 - DNA, 201 bp, Homo sapiens
gcggagcttgcagcgagccgagatcgcgccactgcactccagcctgggcgacagagcgagattccgtctcaaaatcaatcaatcaatcaatcaatcaatchctatacacttataaggatgagagtgaaaaaagacaatatgttggtggtattgtgaatcaccaatttagaaaatggatatatttaaaaattgcaaaggatt

SEQ ID NO: 39988 - DNA, 201 bp, Homo sapiens
cagctgcaggattccctatcagcaaagactgaatgatgtcaaacgttcagaaaaggagaaactaagtgggtgcagcacaatcaatcactttgcatttcaasgtgaacttgcagctcttatggggagggaattctctatgtcattttccacgtaaataaagtaatgagaccactttgttgtagcaaagaaattcagtttgtt

SEQ ID NO: 39989 - DNA, 201 bp, Homo sapiens
aggagcttatcagagccacagcaccacgttccaagggcaaagaaggagaaagagctccacatttacatcccagccttggatttaagcctagagatcttccytcctctaccctcccacccccatcacttccccttccagcacccatcattgctccccctggttgaacctcgtccttgtgaggtccaagtgaaaatttcccct

SEQ ID NO: 39990 - DNA, 201 bp, Homo sapiens
agtaagaaggtgtcaactcaatagggcctggcagcccattgtaatgactggggctttcacactgagtgaaagatggtaagcatccaagggagaaacaggasagcaattaaaagagtggcaaaaatctagacttggagagtaattaccaccgattataagaagtggtcaggttccagatgtcttcaaaggcagagccaacag

SEQ ID NO: 39991 - DNA, 201 bp, Homo sapiens
gggtaatatccttttaactctgattgaattatatgttaattccttgcggtggtcttagatttcagacgctattagcaaattatggaggaaaagcaagatcrtatgattcatgaactatcacagcagcaacagtttctaatttccacccatcctctgtgtcatgtgatatgtttcagaaactcacttaaaattgagaaaata

SEQ ID NO: 39992 - DNA, 201 bp, Homo sapiens
cccggtttgggtgggcaggactccaaagcctttaggatcgatggaccagaacagagaaatgaaaatgcaacaagaacagctgtggggaaaaggcagaaggkgggtaggaagcgaagagggtgtgtacttttcctttctgatctgagaaagggaaattttgtgctgggaagagttacgcgggaggaggaaggaaaggcgcca

SEQ ID NO: 39993 - DNA, 201 bp, Homo sapiens
tcgactcccagctcgacagggacctttcttctcctagccagctggaatgcaagctttaaaaaaaaaggaagtgtggggagggctattttttttaataagaygtctcagaaatgatcatgaacacagtaaagctggttttcaaaaaaggaaagtgagaaaagtagtgacaacttgaagctggtagttgaggaagaaggagaa

SEQ ID NO: 39994 - DNA, 201 bp, Homo sapiens
atagcatgctcggggagtgaggagagaagctagagaagactgagatgagtgaaatgcaggcttgattgagaaactaagcagaatttctactaacagtgagsattgagggagaagcgttcctgtaatggaggggaaatgaataaaacctcgactcccagctcgacagggacctttcttctcctagccagctggaatgcaagc

SEQ ID NO: 39995 - DNA, 201 bp, Homo sapiens
gcagacctctttcagcccctgtatttcttactcaggtcatgactggagatacgtgggttggggggctctaatcaccacactcactcttctgtctcacactkcatccctcgtgaatgggtttagttttagtaagaatgtttacaggagagtgttggctacatgtccccaacatcccgggtttgagtcccatctgagccacca

SEQ ID NO: 39996 - DNA, 201 bp, Homo sapiens
aagcacatatcaaaagtactcaggtcaatgaattttccaaagtgagcacacctatgtagccagcaccccaaatccctccttatagccccttttaccacccytaccactgaaatgtaaccactatcctgagaccagcaccataggtttgttttgcctttttctgaactttatatagatggaaatatacagttcatactcaat

SEQ ID NO: 39997 - DNA, 201 bp, Homo sapiens
gaacgcattcgtgagaaggagagttctgctcagttatgaacaaagcaactgcattcaataaatatttgttgagtacctactgtgttccagcagagagctcrcattctagctggggagacagaaaacaaataagtgcatttataattggatgtctgcttgtgatatgtgtgtatcccaggcagagggtccacagaacaaaca

SEQ ID NO: 39998 - DNA, 201 bp, Homo sapiens
attttcaatgtttgagattattcatgaacctgaactgcccttcaacctgtaaatctgaataagtgaggttttactatgatttacaaaaccataaaacaagrcagaaagaggtctgttcatctaatagtggctgtttgtttctcctttcctttttggagaggagggaaaaaaagagcaaatgtctatctagcaagatgacgt

SEQ ID NO: 39999 - DNA, 201 bp, Homo sapiens
gacagctacctgcccagatgatgtaccttagccccaggaaggaggaggaagaagaggcagacagaatgatgcccaaacccctgcggcccggagacgaggtrgtgcctgagtcaggaagctgggagagcccagctcagtggaagaggcatgtggatcctggttaggtgtgaagccaggagggcttcttagccacagcctgaa

SEQ ID NO: 40000 - DNA, 201 bp, Homo sapiens
aaccaacaagaaacacactaaatacaaatggcgtttctcaattcattagagcaagcctgcaagaaccttgacctgggagtagtgaggccactttctcagcsactagttcatgccattatatatacataccagttttaacaatacattatttttataattttcaatgtttgagattattcatgaacctgaactgcccttcaa

SEQ ID NO: 40001 - DNA, 201 bp, Homo sapiens
caccaccaggtgtctggctagaaagatgtcatcttcccaagacagctacctgcccagatgatgtaccttagccccaggaaggaggaggaagaagaggcagrcagaatgatgcccaaacccctgcggcccggagacgaggtggtgcctgagtcaggaagctgggagagcccagctcagtggaagaggcatgtggatcctggt

SEQ ID NO: 40002 - DNA, 201 bp, Homo sapiens
caggattatgcacacaaatgtttcaagcctttataatttttttaagtccaaatggcataggtccatttataaaatattttctgaatttatattatgatttmaactagcaatatcctattaattaacttatttaaaattcataaggagacaagttatttaaaaaaaaaaacactcttgaactgagtaaaaaatagcacgaag

SEQ ID NO: 40003 - DNA, 201 bp, Homo sapiens
cctcccaaagcactgggattacaggcccgagaaccacacacagcctgctgtgagtgattttaagagaagctgttagagattggggccctagcatctcattraatcactggttgacaccaccacagcctcccagctctcaagcaattcctaggaaaacaggaattcatcgggaaaatattcttgatcctgataccaaaatta

SEQ ID NO: 40004 - DNA, 201 bp, Homo sapiens
gaaagagaaaagcaaatgcaaatatcttcaaacgtcataagaaaaggcaaaagtgaatccgataaatatattttaaaacaataataaaagaggcattttgytgacagataaattcatgaaacaagactgacttttttgaatgccattcatagaactgccaggtcagctgtgtagtgtgaggtatatttcaatgcaaaatac

SEQ ID NO: 40005 - DNA, 201 bp, Homo sapiens
tctcattatcttctttctctgaccctctttggactaaataaactcccagtattcttgaccaacagaggtagggttggaacagaacctcaaaagtcatcatyagacttcctactaatagggcattggaagttcaagcgactaactaggaaacaggttagtatttgtacccctacactgtgcaacagattacataccatttgc

SEQ ID NO: 40006 - DNA, 201 bp, Homo sapiens
gtgccatgttggtgtgctgtacccattaactcgtcacttagcattaggtatatatcctaatgctatccctcccccctccccacaccccacaacagtccccsgtgtgtgatgttccccttcctgtgtccatgtgttctcattgttcaattcccacctatgagtgagaacatggggtgttcggttttctgtccttgcaatagt

SEQ ID NO: 40007 - DNA, 201 bp, Homo sapiens
gagtaccacagtcggagcactgtgtcctgctaaatgtgaggagcattctcctctctgatgttatcatcataaggccagggcctgtggcttaagctcctccrttcccttagagtctcccacaccacacaacaagtttggagacagagaaagtagctaatatttccccctaagtgccaggcactgttttctattttttacatt

SEQ ID NO: 40008 - DNA, 201 bp, Homo sapiens
attagttttgataggtgtgattaatggtattgtgtttatgtaagaaaacaccactatttttagcaatcaacacttagatacagaaagctaaaatgacacarttctgggattcggttatcatacatcagccaaaataaaggaggaaggaaggaaaaatgtacagaagtaaaagtaggaaaatactgataattctggaattta

SEQ ID NO: 40009 - DNA, 201 bp, Homo sapiens
tgcgatcttggctcactgaaatctccacctcccaggttcaagcaattctcctgcctcggcctcccatgtagctgggatttcaggcacacaccaacaccccygactaatttttttgaatttttagtagagacaggattttaccatgttagtcaggctggtctcaaactcctggcctcaagtaatccgcccaccttggcctcc

SEQ ID NO: 40010 - DNA, 201 bp, Homo sapiens
tcccagctctcccttactaaaggccagggaggaaattgtctcgaatgctctccagtccaaaatggaaagttagattcaatggtctgtactcttgggctgastaacctccgtttttccttttcccattgtgctgagtcagccacggggggtgggttgtgcattttaagggtttgaatgcagaaggaaggaaggcttcccagt

SEQ ID NO: 40011 - DNA, 201 bp, Homo sapiens
tttgaatttgacccatctttcactaggatctacagatggtgaaatattaatgaacaggtgggttgcacaatattccaagattgcgttagaattgatttttrtaggctaaattattaacaccagagttgctgacatatattctcatatgattagcaaacccagaagccttaatatcaacacagaatacattcagaaccatca

SEQ ID NO: 40012 - DNA, 201 bp, Homo sapiens
atagttacacaaccttgtgaatatactactgcacaccttaacatggtgaattttatggtacgtaaattacatctcaataacatttaaaaaaaaaaaaaaaagcagcagcagatggctgctggaggaggctgagcttaaatacccctggttacacttcctcctttccttgtatttactggaaggagaaggatttgtcctaag

SEQ ID NO: 40013 - DNA, 201 bp, Homo sapiens
gacgcaacgctatccagcttcccagaaaacaccgcctttttttcttacattacagctctgagtcaaagtgtactgtggcctcagacctggggcatacagcycatttgacagccacaatgagggaaacagcctacttctggagcctgtaccagaaggcagaacgggagactcccagctctcccttactaaaggccagggagg

SEQ ID NO: 40014 - DNA, 201 bp, Homo sapiens
ataccacgaagtagaggttaggtcagggaatctggcctaaatatatgggggggtcagggagatggaggttagtcattccattggaggacagaagaaaaagkaacaagaagttcttttatagtgactgaccataaagttttgaaaaaagaggtattcaaatagcactttaatccacactgcatgttatgagaggctatgggg

SEQ ID NO: 40015 - DNA, 201 bp, Homo sapiens
tatatggagattgttatgtgaattaactcatgcaattacagaagccaagaagtcccacaatatgccactgcaagctggagacccaggataggtgtcattcmgttagagtcctaaggcctgagaactgtcatgggaagactttggattcagccatgactcaagtgtaccagtggacttttcagttacatgagaaaatgcatt

SEQ ID NO: 40016 - DNA, 201 bp, Homo sapiens
ctacaaaaataacctggacatggtggtgggcacctgtaatcccagctactcaggaggtgaggcaggagaatcacttgaacccaggaggcggaggttgcagygagccgagatcgcgccactgcactccagcgtgggcgacaagagcaaaactctgtctcaaaaaaaaaaaaaaaaaaaaaaaaaaaaggagtagaaaacaga

SEQ ID NO: 40017 - DNA, 201 bp, Homo sapiens
atatgagagctgagtgaagacagagaatgtatgaggctttgggtacaggttcctgaggcgtgctcaaatgtacgttaagagaaaagactggaatagggaawgagagaaggaattgatggatgttaaaatgaacatattaattttgcctgtgggcatgtttccattaattggcttttggatctgaaccaagaatagcagaat

SEQ ID NO: 40018 - DNA, 201 bp, Homo sapiens
cttactcagtcttcacacaacccacagagggggacaagatatcaccatccgtacttaacagaggaagaaatgcgctgaagtttacacaattaggacgtgtraggatatgattcagggtgtgtctggattcagaactgcacactgcacctgctgtgctttattgcattagctgctgctgctgctctgacctgggctgacgtt

SEQ ID NO: 40019 - DNA, 201 bp, Homo sapiens
actacagatgctttttaagacacttatgagaattgttctttctacagtttaaagtgcctggcacatatttggtgcctaatactggctaaataaggagatgytggctgtgcgcagtggctcacgcctgtaattccaggactttgggaggccaaggcgggtggatcacgaggtcaggaggttgagaccatcctggctaacacg

SEQ ID NO: 40020 - DNA, 201 bp, Homo sapiens
aagccccttacatatgaaatcttactcagtcttcacacaacccacagagggggacaagatatcaccatccgtacttaacagaggaagaaatgcgctgaagwttacacaattaggacgtgtgaggatatgattcagggtgtgtctggattcagaactgcacactgcacctgctgtgctttattgcattagctgctgctgctg

SEQ ID NO: 40021 - DNA, 201 bp, Homo sapiens
tcagttctgcagatttaaatgagtcatttctgaactgttggcataaggcctatccttttcactcaaatattcccttgaggcatcattttttttttttttttcaaaattgggaaagcgaaggatacaagaagttggaaggaaagcccatgaaagaaaaacacatttactataattaagaaagaaaattaaacagatgatgat

SEQ ID NO: 40022 - DNA, 201 bp, Homo sapiens
attgccttggttttcctctagggcttttatggttttgggttttacatttaagactttaatccatcttgagttaatttttgtataaggagggggtccagttygttttctgcatatggctagccagttttcccagcaccgtttattaaatagggagtcctttccccactgcttgtttttgtcaagtttgttgaatagcagatg

SEQ ID NO: 40023 - DNA, 201 bp, Homo sapiens
ccccagtgtgtgatgttcccctccctgtgtccatgtgttctcattgttcaactccaacttataagtgagaacatgaagtgtttggttttctgttcctgtgktagtttgctgagaatgatggcttccggtttcatccatgtccctgcaaagaacacgaattcttttttatggctgcatagtattccatgatgtatatatggc

SEQ ID NO: 40024 - DNA, 201 bp, Homo sapiens
tgccagcagaggaatactacctgggactaggcatgttcaaaatggcggttccatcttctcttccttttttttttttttttttttttttttttggttagttwgtttgtttttgttgttgttgctgttgtttgagacggagtctcgctctgtcgcccaggctggagtgcaatggcatggtggaggctcattgcaacctccacc

SEQ ID NO: 40025 - DNA, 201 bp, Homo sapiens
cttctgacataaacagcctcctttcatcaaaggatcgtgccatcctttctattttctaagcattaaaaggcagtttaagcagatcagtgaattaggcaaaygtttatattctcccttgcccttttctttttgcatctggtagaatttctcctgttctattgttgatctctttgtaaaagcccgtacattcttagctgccag

SEQ ID NO: 40026 - DNA, 201 bp, Homo sapiens
gctatttttattgacctaaattaatctaagaaaagatagtcacttgctaagtagttgcagcttaaaacaagtttcctactcctgctccccttccaatctcrttgcccatgagctctgtctggtattagtgaaagtgacagaaatacatgtagtgaaagctacatgtattctagttcctcaccaaaatgcatatttagaggt

SEQ ID NO: 40027 - DNA, 201 bp, Homo sapiens
gaatggttgtgttgttcgttgaagtatggtttctacaaatacatattgcctttgtgccatcataaagtcaagaaattgttaagtcaaatcatgagtgaggkatcatctgtacattcatacacacacggtatgaatacatgggggtgtgtgtgtgcatgtgtctatgcatgtaaatgtgtgtttcaaagctctggggtcctt

SEQ ID NO: 40028 - DNA, 201 bp, Homo sapiens
tgatggcttagcttgggctcaggggcctaacaatacaggctgacaaggattctttctttgtattaagcactttctagatttcttggagtggttagcaccawgggtattggctaccaatcctcatttctattaatattatttcatgtagacaaatgtagacaattgatgttttctcaatcctatgtaaagttggtgagaagg

SEQ ID NO: 40029 - DNA, 201 bp, Homo sapiens
cctaaaggcagtgttacatggatatccaaatgtttagagaggacaatcttaaatatacaaaagaatgataaataaataaataaataaataaataaataaawaaataaaagatttcctaatttgtcaccacttgcatgctggaaaccgacagcgctaacttgggtaatatccttttaactctgattgaattatatgttaatt

SEQ ID NO: 40030 - DNA, 201 bp, Homo sapiens
ctgaggagagttcagaaaactccatgctgtgcagtgcaattgggaggaaactcaagggagtgctgtcgtgggacctcccggtggtgatttgtacaaatgamgcaacgctatccagcttcccagaaaacaccgcctttttttcttacattacagctctgagtcaaagtgtactgtggcctcagacctggggcatacagccca

SEQ ID NO: 40031 - DNA, 201 bp, Homo sapiens
agaataaaatgagaaaactcacactcccaccccttcccagagtaaccatgggtaccatgtgccttctatttatgtacatgcatacggttgtacatatagakagatagatagatctacttcatgattttaaactactgcatggtatgaccatgacattattattgtcattactattattattgagacagggtcttgctctgt

SEQ ID NO: 40032 - DNA, 201 bp, Homo sapiens
tcttagaacttaaaatgggaacgtcagagacattaatatctcattcctaccacctaccgcttaatcagtgtgttgctaagccccttacatatgaaatcttwctcagtcttcacacaacccacagagggggacaagatatcaccatccgtacttaacagaggaagaaatgcgctgaagtttacacaattaggacgtgtgagg

SEQ ID NO: 40033 - DNA, 201 bp, Homo sapiens
tgtgcttctctgaacttgtttccctaaccacaaacagaacaagttctctagaggttgagtcagaagaatttttgtggtaaagaggacattgaaagggggtwggtctactaaatgtcttgtgttagggttctccagagaaacagagaaatatatatatatttctatatatatgtatatatattttttatatgtgtgtgtata

SEQ ID NO: 40034 - DNA, 201 bp, Homo sapiens
acacacacatgttttatgtaaggtgcatcatttgcaatgggctggtggaccctgatatcgagttgggggtcaccagtacatgttccccttccctaatggtyagtagtcctgccctgccacatggccttagttaggaccagatttgaccatcagatagttaaataaatcagaactgcaaatccatcaagatcctttctcctt

SEQ ID NO: 40035 - DNA, 201 bp, Homo sapiens
ccccattttctcctccctgtgcttctctgaacttgtttccctaaccacaaacagaacaagttctctagaggttgagtcagaagaatttttgtggtaaagargacattgaaagggggtaggtctactaaatgtcttgtgttagggttctccagagaaacagagaaatatatatatatttctatatatatgtatatatatttt

SEQ ID NO: 40036 - DNA, 201 bp, Homo sapiens
aagaaatgttaaatctgaccccagttgctaaaggcagaagaataacacgagatttgagaccaagccagttcctgtttgactattttgaccccatttatagwcatgtcaaatgtcccccatttctgctggctccagccccatcttgttgctgcttccttgagatgtgaggaacaatcattctttcttctgttctaggccagg

SEQ ID NO: 40037 - DNA, 201 bp, Homo sapiens
cacagagggggacaagatatcaccatccgtacttaacagaggaagaaatgcgctgaagtttacacaattaggacgtgtgaggatatgattcagggtgtgtstggattcagaactgcacactgcacctgctgtgctttattgcattagctgctgctgctgctctgacctgggctgacgttgcagtgagtctggagaaaccct

SEQ ID NO: 40038 - DNA, 201 bp, Homo sapiens
ccaggaggcagaggttgcagtgagccaagatcgtgccgttgcactccagcctgggcaacagaacaagactccaactcaacaacaacaataaaaaagttcamtgtgacctttttaaaagaaatgttaaatctgaccccagttgctaaaggcagaagaataacacgagatttgagaccaagccagttcctgtttgactatttt

SEQ ID NO: 40039 - DNA, 201 bp, Homo sapiens
tgccagcgcagcactgggaaagttaattactgtcgacagtcctcgagcctgttttcataactggtaatgactgttaatatgtcaccactgaagttagagaytcagaaaagtcttttgtcctaggactattaaatgtcatggaagaataacccccaaatttgcctttgggtagataaagttcaatgggactggctgggtgcg

SEQ ID NO: 40040 - DNA, 201 bp, Homo sapiens
gtcctcggtaaggttttccttttaatgaaaaccagccccaaatacttttcctttctaacaaagagcagcctgtgaaatcaagctacagacatagatgccascagaggaatactacctgggactaggcatgttcaaaatggcggttccatcttctcttccttttttttttttttttttttttttttttggttagttagtttg

SEQ ID NO: 40041 - DNA, 201 bp, Homo sapiens
ataatataccgaaggctattctctacatagagtaagaatttctagactaaaataaagtcagaatgtcagaaataaaacaggtgttaaaaatcatccaactygagctactgattttataaatgaacactccaggtcctgcatgataaagtgactccccaaggtcacctagctaggagtgacagggcctggggccagtgaaaa

SEQ ID NO: 40042 - DNA, 201 bp, Homo sapiens
gctactcggcaggctgaggcaggagaatggcgtgaacccgggaggcagagcttgcagtgagccaagattgtgccactgcactctggcctgggcaacagagygagactccatctcaaaaaaataaaaaaataataaaataaaaataaaaaataaatctgtttaatcttcacaataattctacaacgaaaaaattgttatctc

SEQ ID NO: 40043 - DNA, 201 bp, Homo sapiens
gcttcatttggttaaccctactcatccgtgaaggctcggccaggggacttccctggctgattgctcccaaaatatgctgtgatggatagcaccatcagtgygcttccatgaggtatcgtaactaactgtgcaatggttctctcctcaccgaggactgtgagatcctagagaacagggaatgggtattagtcatcacatccc

SEQ ID NO: 40044 - DNA, 201 bp, Homo sapiens
gttagccaagaagagaaaagttttcagtcctagaagaaagaaggtctctgctatcacctcataatagctttggggctactccctccaagatcatagagctygtcagcataaatcatagaggagctgtttgcatgcagcagagggacccagagtgccacctggcatggtccaacctaagaacctaggtgagaagcatgggaa

SEQ ID NO: 40045 - DNA, 201 bp, Homo sapiens
tgggcatagtggcaggtgcctgtagtcccagctactcggcaggctgaggcaggagaatggcgtgaacccgggaggcagagcttgcagtgagccaagattgygccactgcactctggcctgggcaacagagtgagactccatctcaaaaaaataaaaaaataataaaataaaaataaaaaataaatctgtttaatcttcaca

SEQ ID NO: 40046 - DNA, 201 bp, Homo sapiens
aatgtaacttcatcacatatatataaatgatatatagtgtacttcatataaaaatgatttgttatatatacatacacacacatatatatatataatggttwgtgtaccttccctgagaatgtgggcaactggagaactctggccatgggtgcaaaagggcctcccttgctgttccatgatggtgctccctcaggcccctct

SEQ ID NO: 40047 - DNA, 201 bp, Homo sapiens
aattagctgggcatagtggcaggtgcctgtagtcccagctactcggcaggctgaggcaggagaatggcgtgaacccgggaggcagagcttgcagtgagccragattgtgccactgcactctggcctgggcaacagagtgagactccatctcaaaaaaataaaaaaataataaaataaaaataaaaaataaatctgtttaat

SEQ ID NO: 40048 - DNA, 201 bp, Homo sapiens
ggttaatcaccttctcattgaatgtaacttcatcacatatatataaatgatatatagtgtacttcatataaaaatgatttgttatatatacatacacacayatatatatatataatggttagtgtaccttccctgagaatgtgggcaactggagaactctggccatgggtgcaaaagggcctcccttgctgttccatgatg

SEQ ID NO: 40049 - DNA, 201 bp, Homo sapiens
ctagcggctgataaaggaaactctgggcagaagagcctgagatgaatgggatattagtgagaggagctgagccggtcacatagccaagttttgcaggaggraaaaagagaatgggaaattaattataatcaattcctactaaaaccctgagaattggagacaacacataggctattgagagggcgatttctcctaattctt

SEQ ID NO: 40050 - DNA, 201 bp, Homo sapiens
aatggagctgggggccactatccttagtaaattcacgcagaaacagaaaaccaaatacctcatgttctcacttataaggaggagctaaatgatgagaacayacggacacaaagaggggagcaacagacattgggacctatttgagggtggagtgtggcaggaaggcgaggatcagaagaaataacttttgggtactaggct

SEQ ID NO: 40051 - DNA, 201 bp, Homo sapiens
gtattttcaggagagaggaatacacttacttgctctaaggccacacatcttaaaccgagatacatctactctgggaggtttgcagctggagttttcagctraacttttaaaaactttgtttaaaataagttgctttacattggaacttaatatcctcagtggattgagatcgacattctgggaattgaaattgtgtctgga

SEQ ID NO: 40052 - DNA, 201 bp, Homo sapiens
ctggacaatttttcagttcatttttgagaagtaggcatggccttgggagaacattttttaccctctccgcactctcattccatctcacatacaaatacatyaagaaaatgaagccaactgaagcagaggtcaggagtgaaagaaaagttgatataagagcttcagcaacagcagctggccccaggcactagcggctgataa

SEQ ID NO: 40053 - DNA, 201 bp, Homo sapiens
agtgatttttgtacattcattttatatcatgaaactttgctgaagttgtttatcagctgggatctaatgaaacttaagagcttctgcacagcaaaagaaaytaccaacagagtaaacaacaatgatctacagtatgggagaaaatatttgcaaactatacatctgataaagatctaatattcagcatctataaggaattta

SEQ ID NO: 40054 - DNA, 201 bp, Homo sapiens
tttattcttttgtggcaattgtgaatgaaattgcattcctgatttggctctcagcttggctgttgctgatgtatagaaatgccagtgatttttgtacattsattttatatcatgaaactttgctgaagttgtttatcagctgggatctaatgaaacttaagagcttctgcacagcaaaagaaattaccaacagagtaaaca

SEQ ID NO: 40055 - DNA, 201 bp, Homo sapiens
ttctgcaatgggttctcttatttgatgggtagctgagaaaaagagaggcaagggggctttagatcttctggaaatcttgattcgtcagagttgattgactygtctcttccctggagtcagtgacaggcaaattcacaatttcactcaatgctcgcactgaatagctaaaaaatggccagtattctgggctagaacctgatg

SEQ ID NO: 40056 - DNA, 201 bp, Homo sapiens
ttttgtcgaagatcagatggttataggcgtgcaggcttatttctgggctctttatcctgtttcattggtctgtgtgtctctttgtaccagtaccaggtggytgtggttactgtagccctgtagtatagtttgacgtgatgcttccagctttgttctttttgcatacaattgccttggctatgtaggctcttttttgattcc

SEQ ID NO: 40057 - DNA, 201 bp, Homo sapiens
ggggctttagatcttctggaaatcttgattcgtcagagttgattgactcgtctcttccctggagtcagtgacaggcaaattcacaatttcactcaatgctygcactgaatagctaaaaaatggccagtattctgggctagaacctgatgacagaaagagatatggaaggaaaacagtgtcctaccacaaagtagcaaagac

SEQ ID NO: 40058 - DNA, 201 bp, Homo sapiens
cttttgttattgttgtttttggtgtctttgtcatgaaatctttgctagttcctatgtacagaatggtattgcctaggttgtcttccagggtttttataatyttgggttttacatttaagtttttaattcatcttgagttgatttttgtatatggtgtatatgtagtcttctacatatggctagcgagttatcccagcacca

SEQ ID NO: 40059 - DNA, 201 bp, Homo sapiens
aaatcatcttatgtaatttattgactaccataccgaaagtgaaaatcgaatggttgtgttgttcgttgaagtatggtttctacaaatacatattgcctttrtgccatcataaagtcaagaaattgttaagtcaaatcatgagtgagggatcatctgtacattcatacacacacggtatgaatacatgggggtgtgtgtgtg

SEQ ID NO: 40060 - DNA, 201 bp, Homo sapiens
gattggataaattctgaaacatacaatgggatattttgcagctattaaagactgtctgtctatattcattgatatgatgaataggtatgatgagttattgagtgaaaaaaatgcagttttcaaactagcacatagtgtaaaacccttttttaaaagtcgtttacactcatgtattttagcataaagaaagacatggaagga

SEQ ID NO: 40061 - DNA, 201 bp, Homo sapiens
gacctactgaacatcatagcttagcctcgcctaccttaaacatgctcagaacacttagattagcctacagttgagcaaaatcatcttatgtaatttattgrctaccataccgaaagtgaaaatcgaatggttgtgttgttcgttgaagtatggtttctacaaatacatattgcctttgtgccatcataaagtcaagaaatt

SEQ ID NO: 40062 - DNA, 201 bp, Homo sapiens
tgcagtctttctcctcagcactatggattataacctgtactttctgtgccgtccttgttctttgaatggcttgagtgtatcttgtctcttttatcttaggstttcttcaattccttttgaaagcagaagaaatatgatataaggcagtgtcatgcccttagttctactgtgcccctgtgttaaggggcataatctactcag

SEQ ID NO: 40063 - DNA, 201 bp, Homo sapiens
ggctcagctaagatcacaacatctagccatggacatgttgactggtacagcctccaggtttttggatggttagcatccagattctagtctttctttctctstctgtctgtctgtctgtctgtctgtctgtctgtctgtctgtctctctctctctctctctctctctctctccctctctccctctctctctctctccctctc

SEQ ID NO: 40064 - DNA, 201 bp, Homo sapiens
aaataaagatctcctaatatttatagtacttgaggttagaatagtcttctaggtagagtactaatatcttgctgataaagcttttgatgctgaatccttgrttattctcttaatataatatcttctgtgcgaataaggctaaaatgcttgcatacactcttgtactcacttaggaatgtaatagagcagtttgggagagtg

SEQ ID NO: 40065 - DNA, 201 bp, Homo sapiens
ttcttatactcatgcttagctctcactctacctttctaacaaatggcctaagcagaggaagatgctaaaggggctgctaaggcagcaagaaaatcaagtarcacagaaacagagtcagttggttctttgcacttaggattctcagaagaattttttgcttctgccttcaaaattaaactggaatattaaaactgatctttt

SEQ ID NO: 40066 - DNA, 201 bp, Homo sapiens
tcctgagcattctctttgatacggaaaataaaacggactaggggagaaggtatagaatgtaacgcactaggggttttttggagggaggataatctctgggmagttccctactcttgaaacctagcctggaatgggctttcacctctgtgctatttatactaaaactgaattggccttagggatgggatggaaagtaattag

SEQ ID NO: 40067 - DNA, 201 bp, Homo sapiens
ctacaggcaggaagaaaatggcaaatggagacaattatttgctgaatttggtctccgtagactcatactttttgcttagttttcattatttgaggataaarattgcttttaggcctaagagactcagctaactggacaatttttcagttcatttttgagaagtaggcatggccttgggagaacattttttaccctctccgc

SEQ ID NO: 40068 - DNA, 201 bp, Homo sapiens
ccaaccccttttattggcagtgaagcaagtcaaatacttactaggaacactagccctttcttagaagcgactcttgttgaaaaaaacatcctgtgctttgygaagtgatttgtccctgaagaactctatgagtaaaagagactctagctgtgactttggccaagtcaggtggtcttgctactgatgagggggctgaatcct

SEQ ID NO: 40069 - DNA, 201 bp, Homo sapiens
tacttgatggccggaagcaaatatcatctcaaggctcccttcctcacaggtctggttcctatgctaataggactcaaagacgaggataggtgactcattamctacccatggcctctatacatgggttggtgttttcacaacatggtggcctaggtattcagactcaaggctccaagaactagtgttctagaaaactaagag

SEQ ID NO: 40070 - DNA, 201 bp, Homo sapiens
taatcaattcctactaaaaccctgagaattggagacaacacataggctattgagagggcgatttctcctaattctttctgcaaggtcttagagtgcttctwacccacaacagaaggtacgagaacctctgccaagcatatggaattgccaacttcaagtcaggagaacttacttgtgagcctcctggagatggttatgtgg

SEQ ID NO: 40071 - DNA, 201 bp, Homo sapiens
gtattcaataaggacacagtagaaatggcttgtctctgttccacaatgtcttggaccttagctggaaagaagcaaaggccaatggttacttgatggccggragcaaatatcatctcaaggctcccttcctcacaggtctggttcctatgctaataggactcaaagacgaggataggtgactcattacctacccatggcctc

SEQ ID NO: 40072 - DNA, 201 bp, Homo sapiens
ggaaattaattataatcaattcctactaaaaccctgagaattggagacaacacataggctattgagagggcgatttctcctaattctttctgcaaggtctwagagtgcttcttacccacaacagaaggtacgagaacctctgccaagcatatggaattgccaacttcaagtcaggagaacttacttgtgagcctcctggag

SEQ ID NO: 40073 - DNA, 201 bp, Homo sapiens
caggtattcaataaggacacagtagaaatggcttgtctctgttccacaatgtcttggaccttagctggaaagaagcaaaggccaatggttacttgatggcyggaagcaaatatcatctcaaggctcccttcctcacaggtctggttcctatgctaataggactcaaagacgaggataggtgactcattacctacccatggc

SEQ ID NO: 40074 - DNA, 201 bp, Homo sapiens
tcttggtggtgcctagttctgtttttacatggaggcatcagataaaatgcaatgattccaataggattcagctatcatcacccattaacaggtcagttctragggaagcagctctctggggatttattgtggaatgagagaggagagaaaactttatagccaaagcaaaacgcaaagagatagatctatttgagaatcctg

SEQ ID NO: 40075 - DNA, 201 bp, Homo sapiens
tctgctttgaatgtgggatttttgcactctatgatatatacctttggagtggttttgttttctttgtggttttttttttgtttgttttttgttttttgttytttttgtgtgagacagtggatttttttatccatcattgcattattggagttttatgtgatttaatgtataaaaagtgaggctattctccaactagttgtt

SEQ ID NO: 40076 - DNA, 201 bp, Homo sapiens
ggactgaggagccaaatccaatgactggcatctttagaagagaagggaaaacagacccagagacccagagggagggccatgtgaagatgaaggcagacgtkggagttctgcacccccaagcccaaaacaccaaagactgccagcaccccgcagaagtctggagaagggcgtggaatgaattctccttcaagccttcagaat

SEQ ID NO: 40077 - DNA, 201 bp, Homo sapiens
ggatcctgacaagtaattcacctctgctttgaatgtgggatttttgcactctatgatatatacctttggagtggttttgttttctttgtggttttttttttgtttgttttttgttttttgttttttttgtgtgagacagtggatttttttatccatcattgcattattggagttttatgtgatttaatgtataaaaagtga

SEQ ID NO: 40078 - DNA, 201 bp, Homo sapiens
ggcggggagccaagctggggcgactgggggggcctgggggagctagcggggcgggacccgagcggggcggagagtggcaggaggaggcgaatctccgcgcyccggcgaactttatcgggttgaagtttctgctgtcgcctcccctttgcgtgcggagctgggctttgcgtgcgccgcttctggaaagtcggctccagtcat

SEQ ID NO: 40079 - DNA, 201 bp, Homo sapiens
ttgagctaggaacatttcaaattttctcttctggctattttgagatactcaatatgtttttgttaactatagtcaccctactttgaggctgaatactagcrcttattccgtctaactatatgtctgtacctattaaccaacctctcttcatcccacacacccttcatagcctctagtagctaccattcttttctctacctc

SEQ ID NO: 40080 - DNA, 201 bp, Homo sapiens
aaggcagtgttacatggatatccaaatgtttagagaggacaatcttaaatatacaaaagaatgataaataaataaataaataaataaataaataaataaawaaaagatttcctaatttgtcaccacttgcatgctggaaaccgacagcgctaacttgggtaatatccttttaactctgattgaattatatgttaattcctt

SEQ ID NO: 40081 - DNA, 201 bp, Homo sapiens
ggccttttttgttgttgttactattgttttctgtttctttaccaaaaaaaatggccagggtggacctcaataacaatcagataacagttgagacagctggkgaaagagatgaggaagaacactaagcgatttcccggaagacagcagaaagaacaaccagtacacaggctgaggatgtaaacaaacccgccatgttgtgga

SEQ ID NO: 40082 - DNA, 201 bp, Homo sapiens
agaggttgtgcaagaccagcctctgtgatctgcgaaggccctgagtcccagacatcgtctccaacactgacctagatccagtgccagcaggacaagaaagwcccctctgctttaacctttacatgaaaagaaactttgaaatgaccaatccacattttttttgtttgtttttttctgctttccacagcccttttctgtctg

SEQ ID NO: 40083 - DNA, 201 bp, Homo sapiens
agcctgagccagtaagacatggttccctctaagatgccaggaaaggacctagggcttccctgggctgagctcttaggtaagccatggcctggcctggcctyttagaggttgtgcaagaccagcctctgtgatctgcgaaggccctgagtcccagacatcgtctccaacactgacctagatccagtgccagcaggacaagaa

SEQ ID NO: 40084 - DNA, 201 bp, Homo sapiens
tcttgttttatactcaagtcatcattaaaatttatagaaaaagagagaatttaaaaaaaaaaacactaaaaaatcaccttgtacgcatatacctcagaagrtctttggcctaatggtaatctgtgacattaaggcaaataaccaaaaatatgtaatttttctatttatttctttgagtgggctcagttgcagatatatgaa

SEQ ID NO: 40085 - DNA, 201 bp, Homo sapiens
ccaacacctttaggaagataggtcttccctgaccctcagtctgaggtctagaagcccttctgccttgcctcacaggcatcttccctcctcccccgtccccyagaccagtccaacagcagcccgtgcagcctctgaagtccactcccagtgctagctgatgggaaccccatgggctcctgtctgctatacaaatggaacaga

SEQ ID NO: 40086 - DNA, 201 bp, Homo sapiens
aaatcaaagactgtctatgaggcaaaacatatactgcagccatttgggggaaagaacaaagcactgaactagagggcaaagaccaacattttggttctagstctgccaagtgtaggacattggactaggcacttaacttcagtaagcctcagtctgcttgtgtacaaaacagagtaaaagatttcttgcatttcctacttt

SEQ ID NO: 40087 - DNA, 201 bp, Homo sapiens
ggcgtgaaccccggaggcggagcttgcagtgagccgagagagcgccactgcagtccggcctgggcgaaagagcgagactccgtctcaaaaaaaaaaaaaaagtgtgttttttgtttttgtgtgtgtgtgtgtgtgtgtgtgtgaatgtctcttcatccaagaaaaatctaaatgggctattgtcttggcgtaggaagtagg

SEQ ID NO: 40088 - DNA, 201 bp, Homo sapiens
ctactcaggaggctgaggcaggagaatggcgtgaaccccggaggcggagcttgcagtgagccgagagagcgccactgcagtccggcctgggcgaaagagcsagactccgtctcaaaaaaaaaaaaaaagtgtgttttttgtttttgtgtgtgtgtgtgtgtgtgtgtgtgaatgtctcttcatccaagaaaaatctaaatg

SEQ ID NO: 40089 - DNA, 201 bp, Homo sapiens
tgggccgggcgcggtggctcacgcctgtaatcccagcactttgggaggccgaggcgggtggatcacgaggtcaggagatcgagaccatcttggctaacacrgtgaaaccccgtctctactaaaaaatacaaaaaattagcctggtgttgtggcgggcgcctgtaatcccagctactcaggaggctgaggcaggagaatggc

SEQ ID NO: 40090 - DNA, 201 bp, Homo sapiens
aatgaattttccaaagtgagcacacctatgtagccagcaccccaaatccctccttatagccccttttaccacccctaccactgaaatgtaaccactatccygagaccagcaccataggtttgttttgcctttttctgaactttatatagatggaaatatacagttcatactcaatacatgctgcatagattctttgattca

SEQ ID NO: 40091 - DNA, 201 bp, Homo sapiens
aaagcttcagccatgcaagaggagttagttctggagacctaatatacagcatagtaacgacagttaacaataccgtattgtagacttgaaatttgctacargggtagatcttaagtgttctcaccacaaaagaaaagaggcagctatgtgaggtgatgggtaagtcaactagtttgattgtggtgatcattttccaatgta

SEQ ID NO: 40092 - DNA, 201 bp, Homo sapiens
ggaggaaaagtgtggcatctttatatagaccagggctcaccggcatatactttgccatttcctgggaaaggaagcttctggctcctggaaaaatggcagamacttgaacagaggattggtgaagtcttttggtttatgtggccagatagtacaaggttcctatcaggaagaaaagcacatagtgtctttcttcactccttt

SEQ ID NO: 40093 - DNA, 201 bp, Homo sapiens
ctccctttattctctctccccttccccaaacccacaatagcctctaccatagtgcttattcttttgacctgttctgatctgctagcctaactattccccarcacctttaggaagataggtcttccctgaccctcagtctgaggtctagaagcccttctgccttgcctcacaggcatcttccctcctcccccgtcccctaga

SEQ ID NO: 40094 - DNA, 201 bp, Homo sapiens
agtggggcctaaacgttgaagacacatgatcacgaagatgggaacaataggcactggggatcactagatggggaaggaagggagcagggggcatgggctgragtgccacctgttgcgtcctatacttattccctgggtgatgggatcattgggatcccaagcctcagggtgatgcaatttacccatgtaataaacctgcat

SEQ ID NO: 40095 - DNA, 201 bp, Homo sapiens
cactctcccagtgccaggagccaggacaattatggggctttccctattgtgtgttcttgctgctaaccagctcccaggcctaggcttctgagaaacagtgyaggcacacaagctgcagatctctcctccctttattctctctccccttccccaaacccacaatagcctctaccatagtgcttattcttttgacctgttctg

SEQ ID NO: 40096 - DNA, 201 bp, Homo sapiens
aagtctcgcctgactagaatataagacccatgggagaagagactttctgctctacccttggcacataccgggtgctcaaaaaatattcaagtgctcgcttyggcagtacatgtactaaaactggaacaatacagagaacattagcacggccccttcacaaggatgacacacaaatttatgcagcattccataatttcgaga

SEQ ID NO: 40097 - DNA, 201 bp, Homo sapiens
ccaggtgtgctccttacatttctgcccgggtgatactctcagagagctcctcgccatgagaactaagtcactctcccagtgccaggagccaggacaattayggggctttccctattgtgtgttcttgctgctaaccagctcccaggcctaggcttctgagaaacagtgcaggcacacaagctgcagatctctcctcccttt

SEQ ID NO: 40098 - DNA, 201 bp, Homo sapiens
tattgcaaacatggcaatgactggccaaaaccaggtgtgctccttacatttctgcccgggtgatactctcagagagctcctcgccatgagaactaagtcastctcccagtgccaggagccaggacaattatggggctttccctattgtgtgttcttgctgctaaccagctcccaggcctaggcttctgagaaacagtgcag

SEQ ID NO: 40099 - DNA, 201 bp, Homo sapiens
aaactctaacataatgttattatacagtaagttctcacttaatgtcatcgacagtttcttggaaactatagctttaagcaaaatgacatgtaacaaaagcrtttttttctcatcaacgttataacaaaacgttaaaggaagtgacattatttatgaacctgctgcatgttgttttgcttaaagttacagattccaagaacc

SEQ ID NO: 40100 - DNA, 201 bp, Homo sapiens
gtaaagatatgtcttggtttcatctgtgttaaataaacctgcacgatgttacaagctggcattgcttcataagcttgaccttagctttcaaataggacctygatcattgctcaatgaccaagtcacaaagttgcctaatgatattggcccacagccatgttattgcaaacatggcaatgactggccaaaaccaggtgtgct

SEQ ID NO: 40101 - DNA, 201 bp, Homo sapiens
atctaagactgctccctcatggaaattaaggagaaggggaaagcctaggctacagatggagaaggatgagtcattccagcagccatggccaagggaactcytggagacgtagggactgtttatgtggccactcaccatcatgcaggcccccaatgggggtgaggcaaggaaggacatagaaagactgctcaagtgcatttc

SEQ ID NO: 40102 - DNA, 201 bp, Homo sapiens
ccacatgaccttaaatgactgtctaactcagtccttgagcccacagaatcttgtgagtctagcactcacagataaaaaaacaccctcaggctttctgtgtyccaactccaagttctagataaagatgtctgattggttaaagtgggtcatgtttaaagtgggtctactcccaattcagttattggtggccagggccatgag

SEQ ID NO: 40103 - DNA, 201 bp, Homo sapiens
agcatccagattctagtctttctttctctctctgtctgtctgtctgtctgtctgtctgtctgtctgtctgtctctctctctctctctctctctctctctcyctctctccctctctctctctctccctctctctctctccattcacctcttagtttttagcattagatctgcattccctcacaggtttttttctctttccac

SEQ ID NO: 40104 - DNA, 201 bp, Homo sapiens
ttagcatccagattctagtctttctttctctctctgtctgtctgtctgtctgtctgtctgtctgtctgtctgtctctctctctctctctctctctctctcyccctctctccctctctctctctctccctctctctctctccattcacctcttagtttttagcattagatctgcattccctcacaggtttttttctctttcc

SEQ ID NO: 40105 - DNA, 201 bp, Homo sapiens
gtgtagcatctcctttgcccctctcctgctgctaatggcctgtttccccttcaccttgtgccacgattgtaagtttcctgaggcctcccccagaagcagamgcctgtacagcccacaggaaccatgagctgactaaccatcttttctttataaattacccagttctttatggcaacgtaagaatggaccaatagagcacat

SEQ ID NO: 40106 - DNA, 201 bp, Homo sapiens
tcagtcaagaatttggtcctttaaaaaagaaagaggaagaaaagaaagcatgagctctatccctcttttgactaaatactaccactgactttcctgtttakaactaaaggctgtctcttgttccacaggtcaaatgcatactttttaaaatgccacttgaccccttgggttccccattctcagtagaaaaacaaaatggtc

SEQ ID NO: 40107 - DNA, 201 bp, Homo sapiens
actggtacagcctccaggtttttggatggttagcatccagattctagtctttctttctctctctgtctgtctgtctgtctgtctgtctgtctgtctgtctstctctctctctctctctctctctctctctccctctctccctctctctctctctccctctctctctctccattcacctcttagtttttagcattagatctg

SEQ ID NO: 40108 - DNA, 201 bp, Homo sapiens
cccccaatttcttaggaaatctgcttgtttgaaagtgtgtagcatctcctttgcccctctcctgctgctaatggcctgtttccccttcaccttgtgccacrattgtaagtttcctgaggcctcccccagaagcagacgcctgtacagcccacaggaaccatgagctgactaaccatcttttctttataaattacccagttc

SEQ ID NO: 40109 - DNA, 201 bp, Homo sapiens
tcctaggagtattttatttttctaagctaaacacttggtgcataggagcttaccacttgcatgtaattttcttgttttgtataaaataaactgaaaaaccrgttctttttttggctgaatttaatcatcaaacctatttttaaaatgctctttgtgtactttctttcctttttagaaaattccttttggtatttaggaaaa

SEQ ID NO: 40110 - DNA, 201 bp, Homo sapiens
taataaaaagtttgtgctcaattgcagtctttctcctcagcactatggattataacctgtactttctgtgccgtccttgttctttgaatggcttgagtgtrtcttgtctcttttatcttagggtttcttcaattccttttgaaagcagaagaaatatgatataaggcagtgtcatgcccttagttctactgtgcccctgtg

SEQ ID NO: 40111 - DNA, 201 bp, Homo sapiens
tttccattgtgcggtaaccgcgcttcatcacagccacctccaatcgaggccgcacggtgtccccagaaccacgctcggtacaacctgccccggccgctgckctcgacttgggagcgcgccccgccccgagcgcacgacctcccttccctctccgcgacttgagcttgcttcccggaaagccagtgtagtggcagcggtttg

SEQ ID NO: 40112 - DNA, 201 bp, Homo sapiens
tgcaattaaattgcttatgagggaggccaggggagtgtgcctcatagctgaccctggaatgactgattacattgtaaagaaacacaaaggagtgtctgaaragaatctgacttcttgagagattgaaaccagcaatcaatttgctgacctgataaagaaatgtcttttcgtgatggctttttttatttttatttttattta

SEQ ID NO: 40113 - DNA, 201 bp, Homo sapiens
acaggccattttcacttgttttgtggtggaatgtcatcagttaaggcaggaaccggcgatctggatgtgtgcgtgcaggtcacaggggatatgatggcttwgcttgggctcaggggcctaacaatacaggctgacaaggattctttctttgtattaagcactttctagatttcttggagtggttagcaccaagggtattgg

SEQ ID NO: 40114 - DNA, 201 bp, Homo sapiens
ttcaggaaaccacatctggaaagggacattgaccaattcaagaaaccccagaaagtgggaagagcacaaccatggtggaccatagacttctttagggcagsgtctgtgccatgcctttgctcacccccactgccctggcacagtgctttatacatagaccatgccgtaagatatttgttgaataaatgagtaaataattca

SEQ ID NO: 40115 - DNA, 201 bp, Homo sapiens
cttcagatccctcagctttcagattgacacagcaacagatcatagtctcctaaattctctggcttaaagcatggagccacacttatcctgccaggctgggkccccagttcttagatgaggctagcagtagccatgaggagtgggcatgtggctagtacaagagaaggaatgctaggtggcacttggtcagcaactttccaa

SEQ ID NO: 40116 - DNA, 201 bp, Homo sapiens
cacaagacaatgtcatcagttaaggcaggaacaggccattttcacttgttttgtggtggaatgtcatcagttaaggcaggaaccggcgatctggatgtgtrcgtgcaggtcacaggggatatgatggcttagcttgggctcaggggcctaacaatacaggctgacaaggattctttctttgtattaagcactttctagatt

SEQ ID NO: 40117 - DNA, 201 bp, Homo sapiens
aaggtactcagtgggggagcttttgagccaggatgagccaggagaaggaatttcacaagacaatgtcatcagttaaggcaggaacaggccattttcacttsttttgtggtggaatgtcatcagttaaggcaggaaccggcgatctggatgtgtgcgtgcaggtcacaggggatatgatggcttagcttgggctcaggggcc

SEQ ID NO: 40118 - DNA, 201 bp, Homo sapiens
gaaggggtttgggggttcttaccttccagaaaagcgggaaaggggttggggcacggagaagaggttggggcacggaaataagggatgggggcacagagatwagaggttggggtgtggaaataagggattggggcacagagatataagaggttggggcgcggaaataagagattgggcgcagagataagaggtcggggcacg

SEQ ID NO: 40119 - DNA, 201 bp, Homo sapiens
aatcctgggctgcaggcattccttggcctggtggccagatttctagcacttgtagcaagctcctaggggaggaggttctggaggaacgcctggccgctgcrgttcaggcgtttggaagttcttgtgtgctggagatgtggctggggtttgtctcacagtggaggcaaggaattgcaacttttttctattattgtacacctt

SEQ ID NO: 40120 - DNA, 201 bp, Homo sapiens
atttataatcctttgggtatatacccattaatgggattgctgggtcaaatggtatttctgattttagatccttaaggaattgccacactgtcttccacaayagaactaatttacactcccaccaacagtgtaaaagcgttcctatttctccacagcctcgccagcatctgttgtttcctgactttttaataatcaccattc

SEQ ID NO: 40121 - DNA, 201 bp, Homo sapiens
gctagaaagggaaaagaacatgaataagtggcaatccagggacagccagaaggaacctggacaatggctcaccggctgagcagagatagagttgcactggktggggggggcgggggtggggggcagttgacagcagcctggattgtgagcaaggagtacgaagaaataataattgaagtagcagaaggtagcaaggggtgc

SEQ ID NO: 40122 - DNA, 201 bp, Homo sapiens
ctagaaagggaaaagaacatgaataagtggcaatccagggacagccagaaggaacctggacaatggctcaccggctgagcagagatagagttgcactgggkggggggggcgggggtggggggcagttgacagcagcctggattgtgagcaaggagtacgaagaaataataattgaagtagcagaaggtagcaaggggtgca

SEQ ID NO: 40123 - DNA, 201 bp, Homo sapiens
agtggtaaccaggttaatagcactgacaaccatgttctttttacaggaaacacaaacgtgaatcacttgttcttacttttcttttacagtggtctcaaatrgtcaagaccccctgctgggaggagcttctatcctgctctgtggaagaaatgggcatgccagatgcctggaagatcagaggctcacattccaggtgggtca

SEQ ID NO: 40124 - DNA, 201 bp, Homo sapiens
ttttctatagaaattactttagagagaaaccctcttccaattgtatttaaatccaccccccaaatataatttattctcttatgaagctttgaaatggaaamttttccccagaagtaaccaggcattgtgcaaagtcgcatccattttgaacaccaaagcagctgtaacaaataagagatgacaaatgccattgtgtaattt

SEQ ID NO: 40125 - DNA, 201 bp, Homo sapiens
gagattggagattacctgtgatggtttggatttagattttgcctccaggtttaggcaatggtaaataggcaggagtttaataggaactaaggttatttgakaattcctgggccactgcaaatagaaagtgttggcaattttgtcttttgggctgcctctgattgaaggcacaggcctgtttcatgaagttctgaaacatga

SEQ ID NO: 40126 - DNA, 201 bp, Homo sapiens
agagcacagaaactccggatcttaattcttgatttcctggcagtgataccttcccattccattacataaggtataagtggcagaagatcagggagaaccayagggctgtaagatattttataagttgttaaataaggggacactgctttatttggggcatgtcactcaatctcttcaacattgtgttaggtaggtatcatg

SEQ ID NO: 40127 - DNA, 201 bp, Homo sapiens
tcaagattattttggagctttaagatttaatgaccgtcctgctgggtttcggacttgcatggggcctgtagcccctgtgttgtggctgagttctcctttcyggaaatggagtatttacccaatgcctgtactcccattgtatcttggaagtagctaacttgtttttgattttacaggctcataggtggaagggacttgcct

SEQ ID NO: 40128 - DNA, 201 bp, Homo sapiens
tttgtgagcactggcaacaatttagcagaacagaatgagttagattcccaattgtggtagatcacgtgtagtagcgaacagagcacagaaactccggatcytaattcttgatttcctggcagtgataccttcccattccattacataaggtataagtggcagaagatcagggagaaccatagggctgtaagatattttata

SEQ ID NO: 40129 - DNA, 201 bp, Homo sapiens
taaaaccatagcaatcattctatttgtttggtcacagtttaaaaaaggaaatttgctataagaaaaataaatacaaacaaacacaaaaagagttgaatgcyacctgcagaagaagcaccaatccaactattttaccctgcccacattcaccatgtttctcacaattgcctataaaaagtagtcaccatttattgtaccagg

SEQ ID NO: 40130 - DNA, 201 bp, Homo sapiens
gcatctagtgtctctatagtaactatttacactcctagggaaaattatctcacagaagcatagagagcctgaccttgtctataaagacagtaaggtataawgattaaaagaataggctctaaagtcaggcagacctgggtaaatctgccacctactagagagcttgggcaagcaagttcaccatgcctggtacctagtgag

SEQ ID NO: 40131 - DNA, 201 bp, Homo sapiens
gatctcatgtacacctagggtcgaagttggaacagagagtatgtggagagcctgggctaagactgaagccgccatgatgaaaaccaaactcaagcagtctygttttttaaaaccaatgggagtagtaaagtataaatgtaaatctcagttatcttatcatgccaccctataggtgtttccagtagttactttagagctatc

SEQ ID NO: 40132 - DNA, 201 bp, Homo sapiens
gtggcatctagtgtctctatagtaactatttacactcctagggaaaattatctcacagaagcatagagagcctgaccttgtctataaagacagtaaggtayaaagattaaaagaataggctctaaagtcaggcagacctgggtaaatctgccacctactagagagcttgggcaagcaagttcaccatgcctggtacctagt

SEQ ID NO: 40133 - DNA, 201 bp, Homo sapiens
cagtcagagagccttgggccagagttccaggggctctgggagtggctgccaggtgagttggacagtccgatttccagtggggtcccacacagatgggacayggcttaggaggaatcctgggctgcaggcattccttggcctggtggccagatttctagcacttgtagcaagctcctaggggaggaggttctggaggaacgc

SEQ ID NO: 40134 - DNA, 201 bp, Homo sapiens
gtagggaatcagacctttagtagacacggagctcttcaaatacagagtgaacttggggcatctgatcatgtgggtcaagatgaacactacagaatacaacygagagccacatgtgagtgaagctgtactcgagctgacaatactgacattcaaaaagcaacaggatgatgagaatgttctggaattagagggtagtgatag

SEQ ID NO: 40135 - DNA, 201 bp, Homo sapiens
ggcaagggaaacaggcccttgaaaagaaggtaatgtagagtgggtagcctccgtattgattaagaaggggacggacttactttccactgtgagagttacgygaagctcggcgtctgtgatggtctagggggcttccaaggcagtcgggcagcatcagtcttcagccgctaagccaagaagatctgggaagcagtcagagag

SEQ ID NO: 40136 - DNA, 201 bp, Homo sapiens
ctttttgccctgaaaattagccttggtggctgagttttgcttttcaggttctcattgctagtgcttattttgacgcttagtgaccatctcattcctactaytggcccgcagtagggaatcagacctttagtagacacggagctcttcaaatacagagtgaacttggggcatctgatcatgtgggtcaagatgaacactaca

SEQ ID NO: 40137 - DNA, 201 bp, Homo sapiens
attgaggataggagagtatatgggtttggcaccatggggtggataggcaaaacaatttggttgataaggcatagatcctgaactaacttgtaaggcttgcytggttttaggacaggtaaaatgggggaatggtaaggagagtttataggctttaaaaggccatgctgtagcaggcaagtgataacaggctttaaccctttc

SEQ ID NO: 40138 - DNA, 201 bp, Homo sapiens
caccctcggctgcgcacgcacagtcgcgcctgccaggccagcgaggcggacgcttgggccaccacccgcaggccgagcccgggcgcgtatcgccacctcgstgcgcaccggcggctctgtggtcttcctgggcgcgcttgcggtcgcgaagggggccctccctttataagggaagccggaggcgcttgggcgggggtggct

SEQ ID NO: 40139 - DNA, 201 bp, Homo sapiens
acccaagtctgactgagttctcccacatttatcccagctgtcacggatgagaggcactttctcttctgctgaccttctggctcctggtgatactgtctacwgcacagatggaaagtacccaggaaacagcataacaacaacaacaaaaaatcacattttttagcttcaaagcaaacaccaaagttaaaagcccaacgcctg

SEQ ID NO: 40140 - DNA, 201 bp, Homo sapiens
tgctgagcctaatgggtgtcagggtcagtccaagtgaaagcaaagagaggctgggatgaagggtgcaaaggaatagtaaagaaagcatgtttgagatccaraacagaataatggattgtggagggaggtattgaggataggagagtatatgggtttggcaccatggggtggataggcaaaacaatttggttgataaggcat

SEQ ID NO: 40141 - DNA, 201 bp, Homo sapiens
gttgttcctgggtctcctgaccacccaagtctgactgagttctcccacatttatcccagctgtcacggatgagaggcactttctcttctgctgaccttctrgctcctggtgatactgtctacagcacagatggaaagtacccaggaaacagcataacaacaacaacaaaaaatcacattttttagcttcaaagcaaacacc

SEQ ID NO: 40142 - DNA, 201 bp, Homo sapiens
taagaattctgaccgcactaaccatgcctaggaaggaaaggcgttgttgttttgtaagggattgaggtttgggagattaatcggacacgatcagcagggaragcacgtgtgtttttatgagaattatgctgagataggtaacagatgaggatgaaatttgggcttgactgaagtaatgggggctgtctgtgaagccttgcg

SEQ ID NO: 40143 - DNA, 201 bp, Homo sapiens
ctgctgcttcccagctgcaccagctaggcaaactcctgccagaggaaatctcacagttggagtgcagtaggcatagatttctcctacttaactggggggasgctgtagtcacagcgaagggaatattattgtgtcccatgggaagaaacatgaagacggagtggacgcttcattcctactccaatcagccatctggagggt

SEQ ID NO: 40144 - DNA, 201 bp, Homo sapiens
atagattttggaagttatgagaaatgtagagagtgagttgagcatagtttgtgatttttagggcctctaaaagtattagggcggcagcagccgctgcatgsagacatgagggctaggctaaaacagtaaggtcaagttgtttgcataggaaggctacagggtgcggtcctggctcttgtgtaagaattctgaccgcactaa

SEQ ID NO: 40145 - DNA, 201 bp, Homo sapiens
gggtctttcctgatgccgtgctgccgggcacaatctcaggagactccagcaccactgtttacaccacccttgtgtgtgtgtgtgtgtgtgtgtgtgtgtgtaagtggacctccaatggactatgtgctcctacagaacaggagctgtattttgaagttgttttgtttgtctacttgttttggttttgttgttagtgttctt

SEQ ID NO: 40146 - DNA, 201 bp, Homo sapiens
ccggattgaagtccgggccaggaacaatagtaattgtgggacttaacaaagactgagtacagctgaaggagctggggagcagaaagtatatgcgtcaggtrtgaggaagaaaatagattttggaagttatgagaaatgtagagagtgagttgagcatagtttgtgatttttagggcctctaaaagtattagggcggcagca

SEQ ID NO: 40147 - DNA, 201 bp, Homo sapiens
ggggtctttcctgatgccgtgctgccgggcacaatctcaggagactccagcaccactgtttacaccacccttgtgtgtgtgtgtgtgtgtgtgtgtgtgtgtaagtggacctccaatggactatgtgctcctacagaacaggagctgtattttgaagttgttttgtttgtctacttgttttggttttgttgttagtgttct

SEQ ID NO: 40148 - DNA, 201 bp, Homo sapiens
ggtgtggtatcaggaataatgtgggaggccggattgaagtccgggccaggaacaatagtaattgtgggacttaacaaagactgagtacagctgaaggagcyggggagcagaaagtatatgcgtcaggtatgaggaagaaaatagattttggaagttatgagaaatgtagagagtgagttgagcatagtttgtgatttttag

SEQ ID NO: 40149 - DNA, 201 bp, Homo sapiens
acaacacctagatacacaataccaggtatgttacaactgcatggaaaagccactttataggccaaatggcagcaattttcaatggctttttttttttttttataacttttgacctacaaaatgtcagtttcctgtgatgccaccctacctgctactagactggccatctgatccccactggagaagccacaatcataggga

SEQ ID NO: 40150 - DNA, 201 bp, Homo sapiens
tagaaaggaaatgagaggttctaagaggcgggctagtggcttgtactatagcatagcctgcctttgctggtgtgtggcgattaggcctggtggaactgccrtcaataaatcaagcgtgatcagggtgaggaacaggaaagaaggaaatatggggaaatggggtgaatgtcaggtggatcagagagatacagtcatgggggt

SEQ ID NO: 40151 - DNA, 201 bp, Homo sapiens
agagtacttttcagagagggacagtcaataaaaagccttcgtgtataactagtccattttcatgctgccgataaagacatacctgaaactgggtaatttayaaagaaaaagaggtttaatggactcacagttccacatggcaggggaagcctcacaatcatggtggaaggtgaatggcacgtcttacatggcggctgagaa

SEQ ID NO: 40152 - DNA, 201 bp, Homo sapiens
gaggtgtgtttttaaaagacctttagtccgttctacttttcctgaagacggaggaccataagggatataaaggtttcactgaatactaagagcctgaaaawctgcttggctgatttgactaataaaggctggtctgttatcagactgtatagaggtgggaaggctaaactgaggaattatgtctgacagaagggaagaaat

SEQ ID NO: 40153 - DNA, 201 bp, Homo sapiens
tgggctcaagtgaccctcccacctcagcctcccaagtagctggggctccaggtgcacaaccacatgttgctgatttttaaattttttgtagggatggggggtctcactgtgttccccaggttggtcttgaactcctggcctcaaacggtcctcccaacttgacctcccaaagcactgggattacaggcccgagaaccacac

SEQ ID NO: 40154 - DNA, 201 bp, Homo sapiens
ttcaggtaaagtagaattctatcaaaattgtcacaaaattgtctttgatgagagccatcatagtgcaaagttgatgactaaaaggagatggttaagttgtytaaagagcaaggccataggagagaagaaactaatattcaaagcttcctcccacagttcaaagttagagaaacctgagaggggtgtactggtatgaccacc

SEQ ID NO: 40155 - DNA, 201 bp, Homo sapiens
agaaacagagaaatatatatatatttctatatatatgtatatatattttttatatgtgtgtgtatatatatatgtgtgtgtgtgtatatatatatatatatggagattgttatgtgaattaactcatgcaattacagaagccaagaagtcccacaatatgccactgcaagctggagacccaggataggtgtcattcagtta

SEQ ID NO: 40156 - DNA, 201 bp, Homo sapiens
ccggccggcctcggagctctaccagcaggctttcatgggagcggaggtgcccacgtttccattgtgcggtaaccgcgcttcatcacagccacctccaatcraggccgcacggtgtccccagaaccacgctcggtacaacctgccccggccgctgcgctcgacttgggagcgcgccccgccccgagcgcacgacctcccttc

SEQ ID NO: 40157 - DNA, 201 bp, Homo sapiens
gggaggtcccccgatccgactcatggcaccaaatttcatgcatgtccgtgtgaagagaccatcaaacaggctttgtgtgagcaataaagcttttaatcacstgggtgcaggcgggctgagtccaaaaagagagtcagccaagggagacaggtggggccgttttatatgatttgggtaggtaaaggaaaaaggggggttgtt

SEQ ID NO: 40158 - DNA, 201 bp, Homo sapiens
aaaagaaggactggggtggtggatcatgcctgtaatcccaacactttgggaggccaaggcaggcagatcacttgaggccaggagttcgagaccagcctggmcaacatggtgaaaccccatctctattaaaaatgcaaaaattatccaggcaagtttccacacacctgaagtcccagagaatctcttgaacccaggagccgg

SEQ ID NO: 40159 - DNA, 201 bp, Homo sapiens
ctaaatgagattttagaaagtagcatagtttctgaaaggagcagccactggaaaccaaaaactttctcagggtactcaaacggtttgaagagaactgatayttgaaaacggaaatccttccatttgtgacaacatggacaaacctggagaacattatgctaagtgagataaaccagtcacagcaagacaaatactgcctga

SEQ ID NO: 40160 - DNA, 201 bp, Homo sapiens
ggagcacaaggaggtaaccagccactccactgaagctgtgtttaggtggtggatatgatctgccagcggcccctcagccaaaaccaccaatacaaatccaygtagacagtttcttaaacaaacttagtaaaatcaaatctagaatatctccccctttcaaacaatgcattttcccagtgccaaagtacagcactttcttag

SEQ ID NO: 40161 - DNA, 201 bp, Homo sapiens
catggacaaacctggagaacattatgctaagtgagataaaccagtcacagcaagacaaatactgcctgatcttttgtatatgtggaatctaaaatagttamtctcctagaagcagagagtagaatggtggttgtcagggctggggtatacaggaaatgaggagatgttggtcaaagggtacaaagcttcagccatgcaaga

SEQ ID NO: 40162 - DNA, 201 bp, Homo sapiens
agggcaatgttagtgagccacagtatgtgcgttgggaaccatgtagagaacaggaaactacagatgctttttaagacacttatgagaattgttctttctamagtttaaagtgcctggcacatatttggtgcctaatactggctaaataaggagatgctggctgtgcgcagtggctcacgcctgtaattccaggactttggg

SEQ ID NO: 40163 - DNA, 201 bp, Homo sapiens
cctggttaggtgtgaagccaggagggcttcttagccacagcctgaaatcgaagcccaggatcgagccacagtctgaaatttttggatcgcagctctgccarttaaaccaatggtaacaataataatgtactgtcatatatgtaagaactgccatatatggagcattttgagccaggcaatgtgccaagcacttgacagaaa

SEQ ID NO: 40164 - DNA, 201 bp, Homo sapiens
gaaatgactgcttgaacgtttcagccttaatgctgacatgtggtgacttgaagccaggtgaatgaaggttcctccagctagagaggtaagatgaacatgcmggaccaggaagaaagcaggtcatcatgttagacaggtgcaattatgtgcagagactataaaagaagagaaaaagacatttagtcatcagagagcagccat

SEQ ID NO: 40165 - DNA, 201 bp, Homo sapiens
ttcttttttccagatttctttggttgaggatatgtaacaaagaatatctttggtgagaacattgcaatcagaaaaaaatgtccgtgtaaccattttttaarattaattctattttcactaagaacactgattttcagacatagctataggtatcacagggttctatatggaatttctagaaatacagtggggagttcatgg

SEQ ID NO: 40166 - DNA, 201 bp, Homo sapiens
actttctcttgccccagaataagacaagaatgccgaggcctggtcagtatcccagggtaccaccgccagtgctggccagagcaggctctgagaggctaacrcaggccacagagcctagggccttgttttggagggtgaggtgaggcttaaagctggtaggataggcgccctctgagattcgccatctgagaagtcagtcag

SEQ ID NO: 40167 - DNA, 201 bp, Homo sapiens
agagttagaaacaataatttttaacccagtatatttttgtgaaaaaaaaatgggaataatgtgaaagtctaatagtatgcagttagtgaaatcaataatgrtacatacatacaatggaatactatgcagccattacaattataccacagaagaaaaggcaatggcctggaaaaatatattgttcataatatattgttacat

SEQ ID NO: 40168 - DNA, 201 bp, Homo sapiens
gtgacttccatgctagaaatcgcttctctgggtccagcttacacttaagtgaatggagatgtaaaatggagacgataccagtaccgattatgcagagttgyggtgaggactgaatgaactaatacatgtaaagcttttagaagggtgcctggcatgtggtgggtgctcaggcatcattagctgttatcattattctgtggg

SEQ ID NO: 40169 - DNA, 201 bp, Homo sapiens
catgggtcacagaagcaatggaaagttggaaaccattgccttctaattagcagatgtctcagtggctaacattatttgccagtagcagtgccagcgcagcrctgggaaagttaattactgtcgacagtcctcgagcctgttttcataactggtaatgactgttaatatgtcaccactgaagttagagactcagaaaagtct

SEQ ID NO: 40170 - DNA, 201 bp, Homo sapiens
tcactcaaatattcccttgaggcatcattttttttttttttttcaaaattgggaaagcgaaggatacaagaagttggaaggaaagcccatgaaagaaaaamacatttactataattaagaaagaaaattaaacagatgatgatcagaactgcggttataaattaaagttaactgattccaagagtgtacgccatcagaatt

SEQ ID NO: 40171 - DNA, 201 bp, Homo sapiens
agtccttacttctgtccagtaaaatccaagacatggcaaggacttgaacctcgcaggaataaaaacatggcccacttggttcagcgtgacagctctcaggrtggcgtgccgttacccacctgcaaattcctaacagcccaaagtggcaccagtcacttcctccttgcgtttctcaggcagcacattgagtggctgctagca

SEQ ID NO: 40172 - DNA, 201 bp, Homo sapiens
ctgaggtttctaaatattgttccagcataggaatttcagcttttattcttttccaacttttcatttatatggcatgcatgggtcacagaagcaatggaaakttggaaaccattgccttctaattagcagatgtctcagtggctaacattatttgccagtagcagtgccagcgcagcactgggaaagttaattactgtcgac

SEQ ID NO: 40173 - DNA, 201 bp, Homo sapiens
ccgacttgaaaaatcttctgattctatgaccaaactggaaggcctgggttgggctctctcagttctgcagatttaaatgagtcatttctgaactgttggcwtaaggcctatccttttcactcaaatattcccttgaggcatcattttttttttttttttcaaaattgggaaagcgaaggatacaagaagttggaaggaaag

SEQ ID NO: 40174 - DNA, 201 bp, Homo sapiens
aaacccccatgacacaagtttacctaggtaacaaacttatacatatactcctgaaccgaaaataaaagttaaaagaaaaaagaaagacccatctgtatagkgctctctctctctttctcttacttggtttattctcttccttatccattgcatgcattaaccctttagaacttccggtgttctggggaccctgaaagatca

SEQ ID NO: 40175 - DNA, 201 bp, Homo sapiens
gagcacccaataacagttagccattatcattattactactacttactaagtccttacttctgtccagtaaaatccaagacatggcaaggacttgaacctcrcaggaataaaaacatggcccacttggttcagcgtgacagctctcagggtggcgtgccgttacccacctgcaaattcctaacagcccaaagtggcaccagt

SEQ ID NO: 40176 - DNA, 201 bp, Homo sapiens
cctttttaagttggtagctgagcttggtgaggtgtgtttttaaaagacctttagtccgttctacttttcctgaagacggaggaccataagggatataaagrtttcactgaatactaagagcctgaaaatctgcttggctgatttgactaataaaggctggtctgttatcagactgtatagaggtgggaaggctaaactgag

SEQ ID NO: 40177 - DNA, 201 bp, Homo sapiens
tgaggttgtgggggtcagggcaagaataataaagggagaaaggacaagattcaatccaatccagttcttttctccacttaatccctggctaccactgactyggcactctgggagtaaagagcagtggagaaagctctagacctattggtgtatatttccaagaggaagatccttggaccagcatcaagttggctttttatc

SEQ ID NO: 40178 - DNA, 201 bp, Homo sapiens
accacggttaaaaatcactactattcacttcttaccatttgatctgttgacagtttcagccatcagtcactgccggctcccacttcatttagttaccatgyccctcactaacacaagatcgccgtctaggggccaatcgtagaactacaggctacacagaggagaagggagccaggccacctttcccatgcatcccactcc

SEQ ID NO: 40179 - DNA, 201 bp, Homo sapiens
cgcaggcccaaatgccttctgggcttgtctaatcctccagaggatatcaaaggcaatacagccagcatacccaatcattaggagtttggcttctgggaccrggcactcttgggtgtgagcaccagctctcttatttataagctgtaaccttggccatgttatttaacccttctgagcctgactttcctcacttgtacaaga

SEQ ID NO: 40180 - DNA, 201 bp, Homo sapiens
aggagctcaaatgggctgtaccttgtagcattctgaggacaggtctgacttctgagaaaggaaagtcgtaaaagtattgtccagtcctttttaagttggtrgctgagcttggtgaggtgtgtttttaaaagacctttagtccgttctacttttcctgaagacggaggaccataagggatataaaggtttcactgaatacta

SEQ ID NO: 40181 - DNA, 201 bp, Homo sapiens
ttaaatgtaagcacctgcagcagggtattggtgaactgtccaggggaagcacaaattagaaaaaatacaaaatacgcttccctgagcccatgaatttaccrtatcaggaatatgtaagatacattaattagttcatcagtaggctccaagacagacattgcagatggtggggaaggtgggggtgggggcaggtgggtgggc

SEQ ID NO: 40182 - DNA, 201 bp, Homo sapiens
gtaatgaaaattggcaggtcccacttgagaatattatactaagtgaaataagccagtgacaaaaagacaaatacttttttccacttctctgaggcactcawattcatagacatgggaagtagaatactgtttgccaggggctgggagaggaggtaacggaaagttgccgtttaatggatgcagagttccacctttgcaaga

SEQ ID NO: 40183 - DNA, 201 bp, Homo sapiens
ttctcttaaagaatacatatgcctgtgttcagattatctcctcttcctgacaaatgagggaaatccccagatgaaagctgataaaacattagacgggggtrattccggacctccacatccctatggaacacatcacagaagccaggattggagagccaactccacacacctccatatcccctcttagatgaatggcaattc

SEQ ID NO: 40184 - DNA, 201 bp, Homo sapiens
agagtggcagtttggggatagcaccaggagatatcagctgtgatggcttggagaaacagcgtaaaccggcagtgtaaataagagcagggcgtgtatgagtrgttgagaacggtgaataggagtatgactagacagaagataatagggatgataagtttttttggggcacagtctaagttggtctggtgtctggaatgagac

SEQ ID NO: 40185 - DNA, 201 bp, Homo sapiens
tgcttgtgcagaacccaaggacagctgcgcatttattgcacatttatattcactgcttcctgatgacattaaatgtaagcacctgcagcagggtattggtraactgtccaggggaagcacaaattagaaaaaatacaaaatacgcttccctgagcccatgaatttaccgtatcaggaatatgtaagatacattaattagtt

SEQ ID NO: 40186 - DNA, 201 bp, Homo sapiens
tattgcttcaccaagagtatactccaggtgatttttttgtgtgtccttaattttgtcattttgtggtcattaataacatcagttaacaataatattattawactgtccactacaatgtgcgtttgtgagcactggcaacaatttagcagaacagaatgagttagattcccaattgtggtagatcacgtgtagtagcgaaca

SEQ ID NO: 40187 - DNA, 201 bp, Homo sapiens
ttcttctcttaaagaatacatatgcctgtgttcagattatctcctcttcctgacaaatgagggaaatccccagatgaaagctgataaaacattagacgggsgtgattccggacctccacatccctatggaacacatcacagaagccaggattggagagccaactccacacacctccatatcccctcttagatgaatggcaa

SEQ ID NO: 40188 - DNA, 201 bp, Homo sapiens
taagagtggcagtttggggatagcaccaggagatatcagctgtgatggcttggagaaacagcgtaaaccggcagtgtaaataagagcagggcgtgtatgastagttgagaacggtgaataggagtatgactagacagaagataatagggatgataagtttttttggggcacagtctaagttggtctggtgtctggaatgag

SEQ ID NO: 40189 - DNA, 201 bp, Homo sapiens
caaaggtcctgtgcttttctgcctaaaatatgtacaatcctcagttggcactgtcaggaatggggaccgccctcatggagaagtggcacttccactcctarccagcctctgtgtgagctggactctaaggtcaggagaatgaggaggccgtgaaggtcttggccgtctctttttcccctcatctctactgagacatagatc

SEQ ID NO: 40190 - DNA, 201 bp, Homo sapiens
aaaggtttgccaattcccatctctatgaaccttggctttgtaccaagtagaatgtacctaaatacttttccttctataaaggatggttactttgacttagstttgccaacatggaacaaaacaaacaaaacaaaaattttacttgtctttcagacctatttcttctcttaaagaatacatatgcctgtgttcagattatct

SEQ ID NO: 40191 - DNA, 201 bp, Homo sapiens
taagtcagtttaatgggtagccactgtgcttttccagtcatctccaaacacacatacccacatgcactgaggagagtggaggagaataagccatctctggyaggctcttgacatttgggtgggcaggattcagtcatcaggcacatgctggtaggcaagaggagcagaaataaggagacacaccaagtggctgagggtgcg

SEQ ID NO: 40192 - DNA, 201 bp, Homo sapiens
tcccacctcagcctccaaagtgctgggattataggcgtgagccactgcgcctggccaacattattttttcaaccatcaacggcgacttagatggtcatttrtgttgttctcaactctattattagagactccactgcagtgatttcacttttctgtgcaattctgaatccatttgcaaatgttcccccagtatcgattctc

SEQ ID NO: 40193 - DNA, 201 bp, Homo sapiens
gcctgggggagctagcggggcgggacccgagcggggcggagagtggcaggaggaggcgaatctccgcgctccggcgaactttatcgggttgaagtttctgstgtcgcctcccctttgcgtgcggagctgggctttgcgtgcgccgcttctggaaagtcggctccagtcatatccctgggcgctgcctgcggccgctcctcc

SEQ ID NO: 40194 - DNA, 201 bp, Homo sapiens
cacaacactcctctgaaaatagggacagctaattttgtaatggattgccagcaaaagctgtgacaatgcctactctggaagtctctaaatttcttttcaayctgagaagggtgttccatgatatttactggagtaagaagtgatggaggaggtagaatagttctggaagtcaggtctctaaatagaacaaatcttgggatc

SEQ ID NO: 40195 - DNA, 201 bp, Homo sapiens
gtgtccccagaaccacgctcggtacaacctgccccggccgctgcgctcgacttgggagcgcgccccgccccgagcgcacgacctcccttccctctccgcgrcttgagcttgcttcccggaaagccagtgtagtggcagcggtttgcctcacagcgcccctggttggttgtttaaattttatcttaggttctcgcaaacaaa

SEQ ID NO: 40196 - DNA, 201 bp, Homo sapiens
ggcctgggggagctagcggggcgggacccgagcggggcggagagtggcaggaggaggcgaatctccgcgctccggcgaactttatcgggttgaagtttctsctgtcgcctcccctttgcgtgcggagctgggctttgcgtgcgccgcttctggaaagtcggctccagtcatatccctgggcgctgcctgcggccgctcctc

SEQ ID NO: 40197 - DNA, 201 bp, Homo sapiens
agaccctgaccagcagggaagagcagtagcaaggagataggagagaagggtggtataaagagtttaccttctttatttttctctgtccacagttcctttaygcggaaagctatttacagcagccacagtctctgtttggtttggcatgacactgactttctatggataagtcaggatctcatgtcctcatctaaaaatggt

SEQ ID NO: 40198 - DNA, 201 bp, Homo sapiens
tcaccctactttgaggctgaatactagcacttattccgtctaactatatgtctgtacctattaaccaacctctcttcatcccacacacccttcatagcctytagtagctaccattcttttctctacctccatgagatccatctttttagctcccacatatgagtaagaatatgcaatatttgtctttcggtgcctggctga

SEQ ID NO: 40199 - DNA, 201 bp, Homo sapiens
ccctatgtaaatcagacaccgcctcttcaaacctgcctaaaaatttggagaattccgccccagcaagtctttccctttcagaagccccgctctctcgctakagagaaagctgttctcctttctctttcttctgcctattaaacctgcgctcctaaaggcctcctttgtgtccctgtcctaaattttcttggcgccaggtaa

SEQ ID NO: 40200 - DNA, 201 bp, Homo sapiens
gaatgactgattacattgtaaagaaacacaaaggagtgtctgaagagaatctgacttcttgagagattgaaaccagcaatcaatttgctgacctgataaaraaatgtcttttcgtgatggctttttttatttttatttttatttatttattttttttgagatggagtctcactctgtcacctgggctgcagtgcaatggcg

SEQ ID NO: 40201 - DNA, 201 bp, Homo sapiens
ccaagctgtagttccttgggctcagctctttttctaggacatgactcaaaaatcagaggaactaggttggtaagtgctgtcagaaagataagcccttatcrgttatggcaaaccaaaatgactggctatggtaacactttttgcagagaatcttcaagcctggagttcttagggctttatggtgcaaacttcattgaatgc

SEQ ID NO: 40202 - DNA, 201 bp, Homo sapiens
tcctgaggcctcccccagaagcagacgcctgtacagcccacaggaaccatgagctgactaaccatcttttctttataaattacccagttctttatggcaaygtaagaatggaccaatagagcacatcactagggtagcacaaaggagagggcccagaagcagaggagagataaacagctcatttttttcatctttctcaat

SEQ ID NO: 40203 - DNA, 201 bp, Homo sapiens
tgtccctacccaaatctcatgttgaactgtgatcccgagtgctggagggagggtttggtgggaggtgattggatcacaggggtggtttttaatggtttagygccattcccccaatttcttaggaaatctgcttgtttgaaagtgtgtagcatctcctttgcccctctcctgctgctaatggcctgtttccccttcaccttg

SEQ ID NO: 40204 - DNA, 201 bp, Homo sapiens
tggtaacttggcaccagttgccagtggcttcatatgaacctatcagctgctgtgggatggcagagcagttaagagtccaagactagtccacgcaggcctgyagctcccacattctgatgcatcaaagccacagcaagttcctaaaacataggctctggatccagatgcttttggttcaaattttcacttcattatttctca

SEQ ID NO: 40205 - DNA, 201 bp, Homo sapiens
gggaacgctggctcacgcctgtaataccagcactttgggagcctgacgtgggtgaatcacgaggtatggagttcaagaccagcctggtcaagatgtgaaamcccgtctctactaaaactacaaaaatgagccaggtatggtggcgggcacccgtaatctcagctactcgggaggctgaggcagggaattgcttgaacccgg

SEQ ID NO: 40206 - DNA, 201 bp, Homo sapiens
gtcccatatcagtttaatacctattttccaatgtaatgccctgaaatcccagaagaggaaaaaagaatttttttctaacaattagaaacatgataaaaaawactatcaaaggtatattcattcagccatgcaaattgtaaaaccatagcaatcattctatttgtttggtcacagtttaaaaaaggaaatttgctataagaa

SEQ ID NO: 40207 - DNA, 201 bp, Homo sapiens
aaataaagtaatgagaccactttgttgtagcaaagaaattcagtttgtttctagaagcagatgtgtgtgcatgggtgagtgggcatgtgcatatttgcttwaaaacattttccaataactgctgacaacagcaacctgaagcctccaggcacccagtttctccccatcctgagatgatctttttgctcctggagcagcatt

SEQ ID NO: 40208 - DNA, 201 bp, Homo sapiens
actttcagcagaattgtacaatatgacattatattgctcaaaatgactcaattttctaatctttgagacttcttaaaaagaaatgaaccccaagtagagtraaggtggactgcaaaaaacagcttagtctgaatgaaaaaaattcatccttggctctgcatctaagaaactggctgtgtgtcctcagacaattcacttaat

SEQ ID NO: 40209 - DNA, 201 bp, Homo sapiens
atgtgtgcgtgcaggtcacaggggatatgatggcttagcttgggctcaggggcctaacaatacaggctgacaaggattctttctttgtattaagcactttytagatttcttggagtggttagcaccaagggtattggctaccaatcctcatttctattaatattatttcatgtagacaaatgtagacaattgatgttttct

SEQ ID NO: 40210 - DNA, 201 bp, Homo sapiens
ggaaaagagtgagggaaataagaagggggagcagagagatacagcaactaagaaaaagaaaaagaaaaaaatacccagccctggggctaaaagatagtcayggtggtcagtcactttgtctgggctctcaactggtgtacttacctctcctgctcaacgtttgagcatgtgcctctgctgcttaatatttgtggggtgaag

SEQ ID NO: 40211 - DNA, 201 bp, Homo sapiens
aacagtgaaagagggagcctactgtccacaactttggtcaatagggaaacactttacttccctaattctttgaccaaccatagaaaacctttaggcagatraaggatactagttttcctttttattttcattttctaaaaataaatatttaccaggttaccaagaaaatacataaagcaacaagtaaaacaccccaccacc

SEQ ID NO: 40212 - DNA, 201 bp, Homo sapiens
gctagttatgaaggggatggaagtgatctctatccaagggaagaacatttgaattgatgtttaaaggagttgtttagattcttatgaaggaatagaggaakagtagaggcaaagacagagaaggggatggatgagaataaagaacaagaaaagaagcagtaggagacaaatgagaaggttaaagctgataatttttacttt

SEQ ID NO: 40213 - DNA, 201 bp, Homo sapiens
ccaccctcggctgcgcacgcacagtcgcgcctgccaggccagcgaggcggacgcttgggccaccacccgcaggccgagcccgggcgcgtatcgccacctcsctgcgcaccggcggctctgtggtcttcctgggcgcgcttgcggtcgcgaagggggccctccctttataagggaagccggaggcgcttgggcgggggtggc

SEQ ID NO: 40214 - DNA, 201 bp, Homo sapiens
gtatcgccacctcgctgcgcaccggcggctctgtggtcttcctgggcgcgcttgcggtcgcgaagggggccctccctttataagggaagccggaggcgctygggcgggggtggcttcccccgcctggcgcgccctttcctacatgctgatgcataggattttcaagacagctaagagaacaaggacttcacgaggcggggg

SEQ ID NO: 40215 - DNA, 201 bp, Homo sapiens
ccagcctctgtgtgagctggactctaaggtcaggagaatgaggaggccgtgaaggtcttggccgtctctttttcccctcatctctactgagacatagatcragacagggacccataaatcaccttggagttaaatcaggggaaaaaagaaaagccctctcaggcaacagcatttcacagcagcaacaggaagttgtaggga

SEQ ID NO: 40216 - DNA, 201 bp, Homo sapiens
ggaattctaaaaaacaaaggtcctgtgcttttctgcctaaaatatgtacaatcctcagttggcactgtcaggaatggggaccgccctcatggagaagtggyacttccactcctagccagcctctgtgtgagctggactctaaggtcaggagaatgaggaggccgtgaaggtcttggccgtctctttttcccctcatctcta

SEQ ID NO: 40217 - DNA, 201 bp, Homo sapiens
ctattgtacccttcctgcctttttcatgcactgctctccacccaccctggcttcccggctttgcctccaacgtcagagtgatttctgggcttgcttttttkttttttttttgcctggaaacttcttctctgaagaactttcaaatggctgccttcttcatgtatctcctctcggagcatcattccctgaccttcctttcta

SEQ ID NO: 40218 - DNA, 201 bp, Homo sapiens
tacccttcctgcctttttcatgcactgctctccacccaccctggcttcccggctttgcctccaacgtcagagtgatttctgggcttgcttttttttttttyttttgcctggaaacttcttctctgaagaactttcaaatggctgccttcttcatgtatctcctctcggagcatcattccctgaccttcctttctagggctc

SEQ ID NO: 40219 - DNA, 201 bp, Homo sapiens
tgacaacctcttgtgaggtgtgtgcgctcttcctccaagttctttgttctaaggtcagagggctgatcacctcactgctgccctacatagtcccctcagcrccagaaaatgctcacttaccaccaaatttacttccaaactgtagtttatcagaatataattttattttctgaaagaagtgcttcaactttgtgtattggc

SEQ ID NO: 40220 - DNA, 201 bp, Homo sapiens
tatctcacggtctcttagaaacagacacgaattgtggtttgtaacccaatgtggaaatagttacggagaaagtgacaacctcttgtgaggtgtgtgcgctyttcctccaagttctttgttctaaggtcagagggctgatcacctcactgctgccctacatagtcccctcagcaccagaaaatgctcacttaccaccaaatt

SEQ ID NO: 40221 - DNA, 201 bp, Homo sapiens
tgatcgttccttataaaaaggccttcattcctcacaaaaatacaactttcagtcaagaatttggtcctttaaaaaagaaagaggaagaaaagaaagcatgwgctctatccctcttttgactaaatactaccactgactttcctgtttagaactaaaggctgtctcttgttccacaggtcaaatgcatactttttaaaatgc

SEQ ID NO: 40222 - DNA, 201 bp, Homo sapiens
acaggcaaagctaaaagaggttgtggtaaacatatagctgtgaacaatcgtcttattaacaaagtcctggtctagctgtaaagcctggttttccttccctrtctcagagagctctgtggaaggtagttggtagatctgaaagtccacaagcagattctccaggtgcaaggagaagtgtacagaggaaagcctttgtaaatc

SEQ ID NO: 40223 - DNA, 201 bp, Homo sapiens
tgatattctcgaacactcctttttttcagtccacaacaaaaagatgttccaagccatcctcgctttttttttccctaagactgcaattaactaacttccamgaaaatttgattgctttgagaaaagaatagcatcagaaatcacaattcaagcttctcacctgtgcatcagcagtgaagagaaatgctggtcctttcacta

SEQ ID NO: 40224 - DNA, 201 bp, Homo sapiens
cgcttcatcacagccacctccaatcgaggccgcacggtgtccccagaaccacgctcggtacaacctgccccggccgctgcgctcgacttgggagcgcgccycgccccgagcgcacgacctcccttccctctccgcgacttgagcttgcttcccggaaagccagtgtagtggcagcggtttgcctcacagcgcccctggttg

SEQ ID NO: 40225 - DNA, 201 bp, Homo sapiens
ctcttgagccccattcctttctaattattaaatggcacaatgccgaggaatccctcctgctcctgaaacagacttctccaggggcgtcatggctgactctyaggtccctcagtttattctctcctgcttgtgcagaacgaaacaaatacaaatcaatattttaaaacagacatatacttaatattttttaaaagccagaat

SEQ ID NO: 40226 - DNA, 201 bp, Homo sapiens
tctaccctcccacccccatcacttccccttccagcacccatcattgctccccctggttgaacctcgtccttgtgaggtccaagtgaaaatttcccctttgycctctgaaggtttactgaaaatcacagacaagaggtagattaataggagaaaaggcatgcaatttattgttaatgtgtacacgagagccttcagaatgaa

SEQ ID NO: 40227 - DNA, 201 bp, Homo sapiens
cctctcacctggatatattacaacactgtgcataggagagattcaccagatagctgatagagaactttacattcagtacttaaagctttcctattgtgagrgagaactccatccagcataggaaatagctccacagagtttttatctgagccacatactgcctcagagatcagaacccaagcaaaaactctgcttctttaa

SEQ ID NO: 40228 - DNA, 201 bp, Homo sapiens
gggaagttccctactcttgaaacctagcctggaatgggctttcacctctgtgctatttatactaaaactgaattggccttagggatgggatggaaagtaaktaggattccctattacctgatgattttgaacccaaactattcccttgtggacacaaatgggtatggtggagtcaaatgcattccgtgaattcttccccta

SEQ ID NO: 40229 - DNA, 201 bp, Homo sapiens
ccttttaaaagtttctgctttctgctccaaaagcaaagtggtacccataaggcaggcagcctgtacttccctaagctagctttggaatacaaaatcacatyccttataccagactccgctcttgttcattggactaagcaggtggcaagtgactaaacctgtattttggttacatttctactgagaggaatccagggacac

SEQ ID NO: 40230 - DNA, 201 bp, Homo sapiens
taatgttgagaactccatgaagttctgtaaccaagtaccccccattgtttctgagatagagaatgaattattttttattttctcttctctctttccccctrctcccctgttccccacttcctatttagctctttagaaatgcaatgatgataatattttaccttccctccaccagacatccctacagggcaagcttatctg

SEQ ID NO: 40231 - DNA, 201 bp, Homo sapiens
ctcaatagggcctggcagcccattgtaatgactggggctttcacactgagtgaaagatggtaagcatccaagggagaaacaggagagcaattaaaagagtkgcaaaaatctagacttggagagtaattaccaccgattataagaagtggtcaggttccagatgtcttcaaaggcagagccaacaggatttgccggtggatt

SEQ ID NO: 40232 - DNA, 201 bp, Homo sapiens
gttaaagtgctgttggctgtgagctcagtgctgatgaatcaacaatatatattaagtaaggcatctttaatcagaaacacacataaagtaaggttatctaytgatcagttggcaaaaatgtaactagaggctcactggaacctaaacctgcatttcccttaggagcagtggttcaatatttgctaattcattgtttgcagt

SEQ ID NO: 40233 - DNA, 201 bp, Homo sapiens
accaggtgtcaacaactgtagagttccatcaagagtcatcattttacagttacaagtcggaggggccttcacagatccgtcaggctcaacactgcctcctyagtgagcctgtgaaccacccaagacggctggtcatcagtgtcatcctcttccttttccggacaactatctttaaaagaaaaaaaaagagtgtctttgaat

SEQ ID NO: 40234 - DNA, 201 bp, Homo sapiens
taccctggtaaagtcacctgccttctttgagcttcagttttctcatctggcagttgttcaatgggtttagtcatttgcaatcatttttattaccttctaargtcccctttaggtactgtgatggagaggtagacagacagaaagatgatagatagatagatagatagatagatagatagatagatagatagatgatagata

SEQ ID NO: 40235 - DNA, 201 bp, Homo sapiens
cacatcccgaagtgtcctgcattcctctttctgccccttataggttctttacctgcaaactctctccctcttgtccaaaacattttacctgctctgtcacytttgcatgatcacaggtccttcgcgttccacaatcagttatttccgtaccaggtttgttttatcactttgaaccttaaaacacagggaacaaaattttac

SEQ ID NO: 40236 - DNA, 201 bp, Homo sapiens
cagctaaagcagaagaggcagtgttttaatctagacacaggtacctgcccttaatcactatgcttgacagcttcttaagctagaatgggtggtaggtgacyggggtctgaattaggaatttggaggtagtaatggaaaagagggatcaaattcttagaggtaggataggcaagacttcaccaacaggagcctacggaggtc

SEQ ID NO: 40237 - DNA, 201 bp, Homo sapiens
tcccggaagacagcagaaagaacaaccagtacacaggctgaggatgtaaacaaacccgccatgttgtggaaaccaggaggaggctcatgtgcccaaaatgsagtcagtaggagataaggtcagagaagtaagaaggtgtcaactcaatagggcctggcagcccattgtaatgactggggctttcacactgagtgaaagatg

SEQ ID NO: 40238 - DNA, 201 bp, Homo sapiens
cactacggtaaatagactaggtcatttgaggcagagattgctggcctgggccaccccaggtccacctaggctccccaaagactgaggaatacctattttgyatacaagtgagctgcatccactagttaagaagccaaatcaaagactgtctatgaggcaaaacatatactgcagccatttgggggaaagaacaaagcactg

SEQ ID NO: 40239 - DNA, 201 bp, Homo sapiens
accttttaccatatcttttggctattacttatagtgtaaattcaatgatcttattctacgttcttacccacttctcccattttaaaaattgtactgtttckattctgttagaaaatgcaatgtttaactaccattcttatacccatatctccaaccttgtgttagtcctagatctatatatgaaatatgtagaagcccacc

SEQ ID NO: 40240 - DNA, 201 bp, Homo sapiens
cttaatgttttcaaccttggctgcacccttagtgagatttctaaaatcgcagtgccacaccccatgccattgatatcagaatcttctgaactaggacccagcttcagtgttttttaaagctcccagttgactctaatgtgcagccaagcttgagaaccatggattcagaatattttcctaaattctcccataaacctctgc

SEQ ID NO: 40241 - DNA, 201 bp, Homo sapiens
gcacaaaaggcacaaccggatatacctgttatttcccaatgacctgagagcccgaagtttatgttaagccttgggttatggcacagcttgcacgcaaggcyctgcagctcctgcaggcaattgagaggtggtggtgtacaggacagaggaacaactctgaagtgacagcacataatttaattccccctaagctttccaagc

SEQ ID NO: 40242 - DNA, 201 bp, Homo sapiens
ctttttaaaatgccacttgaccccttgggttccccattctcagtagaaaaacaaaatggtcattaatttattttgacatgcaaactcagctgaacattttktggtgattcaaccccacagatgtaaagtgaaagagtgccagaaaagcaagtgagagccatgagattaccacaagtctgtgagcacatttttttcaaggct

SEQ ID NO: 40243 - DNA, 201 bp, Homo sapiens
tggtctattcagagattcaacttcttcctggtttagtcttgggaggatggatgtgtttgaggaatttatccatttcttctagattttctagtttatttgcrtagaggtgtttatagtattctctgatggtagtttgtatttctgtgggatcggtggtgatatctcctttatcattttttattgcatctatgcagttcttct

SEQ ID NO: 40244 - DNA, 201 bp, Homo sapiens
gaccactttgttgtagcaaagaaattcagtttgtttctagaagcagatgtgtgtgcatgggtgagtgggcatgtgcatatttgcttaaaaacattttccartaactgctgacaacagcaacctgaagcctccaggcacccagtttctccccatcctgagatgatctttttgctcctggagcagcattgacgtgttccatag

SEQ ID NO: 40245 - DNA, 201 bp, Homo sapiens
gttgtttcctactcttggttatctggagtcacactgagctcaaaacagatggccctgaaactgctctctgaagcagtgagcacacaccgtctaaacacacmaatatgcgcatgcacgtgcacacacacacacacacacacacacttgtatgtcaccactgaactagtaaccccaagcaagctgaccaagtgctcttctcct

SEQ ID NO: 40246 - DNA, 201 bp, Homo sapiens
agtatgtaaatgaatgagcatggccccatctggccctccacccacaggccatagtttgctgactcctgcaagagtaaaaccctttatgaactagagagttscaggcttgaacatgggtccagaaaatatgggaaggcaaacctcacacatttgtggttgtgtgcctcctaagtgctttgtgtcactgttggcttccaattc

SEQ ID NO: 40247 - DNA, 201 bp, Homo sapiens
tacctcgccagtgtggattgtctacactgcctgcctgctcctggaaaactgatcttcctaccaaccaaacagctggcttcagcttctcgccatgcaagtgyctgccacatgccacttctctacctaggaagttctccctcctttcacctgaacctgtccaaatgttactcttccttcaaaatagggctccaatctcaaaat

SEQ ID NO: 40248 - DNA, 201 bp, Homo sapiens
gcaaactgtttatgtggatgtccggatagtacattttttgcctgtgtgggccttccagtctgtcttagttactcaactctgtgatttttgagcaaccattrgacagtatgtaaatgaatgagcatggccccatctggccctccacccacaggccatagtttgctgactcctgcaagagtaaaaccctttatgaactagaga

SEQ ID NO: 40249 - DNA, 201 bp, Homo sapiens
ctacctcgccagtgtggattgtctacactgcctgcctgctcctggaaaactgatcttcctaccaaccaaacagctggcttcagcttctcgccatgcaagtktctgccacatgccacttctctacctaggaagttctccctcctttcacctgaacctgtccaaatgttactcttccttcaaaatagggctccaatctcaaaa

SEQ ID NO: 40250 - DNA, 201 bp, Homo sapiens
ggcattggtcaggctgaaagcaaagaaagacaatccattgcccccaggagaactggtcttactctaaatcagtggcctgcaaactgtttatgtggatgtcyggatagtacattttttgcctgtgtgggccttccagtctgtcttagttactcaactctgtgatttttgagcaaccattagacagtatgtaaatgaatgagc

SEQ ID NO: 40251 - DNA, 201 bp, Homo sapiens
aatcctgcattagggtgggccccagatccaatgagactgtccttaaagtcctccacagcctaactccaggctacctcgccagtgtggattgtctacactgmctgcctgctcctggaaaactgatcttcctaccaaccaaacagctggcttcagcttctcgccatgcaagtgtctgccacatgccacttctctacctaggaa

SEQ ID NO: 40252 - DNA, 201 bp, Homo sapiens
aaagggccccagatacttctcagactgctgctccagagagtgcaagccacaagccttggtggcttccatgtggtgttaagcctgcaagtacaaagaggatragagttgaggcttgggaacctccacctagatttcagaggatgtatggaaaggcctggatgtccaggcgggagtctcctgcaggggcagagccttcatgga

SEQ ID NO: 40253 - DNA, 201 bp, Homo sapiens
tggcattgtgctcctgctctagggatctgttgaactttgaccttgagagatgatttagggtatctggcagaagaaatttctaagcatcaaagtgctcaagrtgtggcctggctgcttccaaaagcctaactcatctgcataaacaaagaaatgacctgaaaagggaggcaaagcataaaagatagataggaaaatttgcag

SEQ ID NO: 40254 - DNA, 201 bp, Homo sapiens
aaaaaaagctgtcattctttctaaacactaaacttattgtcatcttaaggtcttgactgttggtgttccttctgcttatttacattcacatggcttcttcyttgtccttggtcaagtctcaactcaaatatgattccctccaaaaagcctttccttgttaccccaattatagcagtttataatcagccccaatcttaactc

SEQ ID NO: 40255 - DNA, 201 bp, Homo sapiens
gagaaacagagaaatatatatatatttctatatatatgtatatatattttttatatgtgtgtgtatatatatatgtgtgtgtgtgtatatatatatatatatggagattgttatgtgaattaactcatgcaattacagaagccaagaagtcccacaatatgccactgcaagctggagacccaggataggtgtcattcagtt

SEQ ID NO: 40256 - DNA, 201 bp, Homo sapiens
cgtggggcttggtgagaggtgatttgatcatgagggtgatttctaatggtttagcaccatccccacagtgctgccttatgatagagttctcaggcgatctrgttgtttgaaagcatgtagcacttccactgcccttctcctgctggccatgtgaaggtgtgcctgtttctcctttaccttctgccatgattgtaagtttcc

SEQ ID NO: 40257 - DNA, 201 bp, Homo sapiens
ctgcgaaggccagacaattcctggggcattctgtgaagctaggaagccagagttggaagggtcccactctgcctcagccctcacatgacctggtccaacaytgccttacagatgaggaaaactgaggcctagagaggtaaagagacttacctaaaaggcatggttggccactgttaaagttgggatttaaaacccaaattt

SEQ ID NO: 40258 - DNA, 201 bp, Homo sapiens
agactcagaaaagtcttttgtcctaggactattaaatgtcatggaagaataacccccaaatttgcctttgggtagataaagttcaatgggactggctgggygcggtggctcacgtctgtaatctcagcactttgggaggccaaggtgggtgggtcacgaggtcaggagttcaagaccagcatggtgaaaccccagctctac

SEQ ID NO: 40259 - DNA, 201 bp, Homo sapiens
ctcacttaatgtttcttcctaccactcccattctacagtgagcccatgattaagataacaacagcttaaatgagttagtgcatagtatggtttggctctgkgtccccacccaaatcccgtgttaaattgtaatcttgagtgttggacgtggggcttggtgagaggtgatttgatcatgagggtgatttctaatggtttagc

SEQ ID NO: 40260 - DNA, 201 bp, Homo sapiens
tgcttttgaggccacatgaggagatacacagctgcaggattccctatcagcaaagactgaatgatgtcaaacgttcagaaaaggagaaactaagtgggtgyagcacaatcaatcactttgcatttcaaggtgaacttgcagctcttatggggagggaattctctatgtcattttccacgtaaataaagtaatgagaccact

SEQ ID NO: 40261 - DNA, 201 bp, Homo sapiens
attggcagtgaagcaagtcaaatacttactaggaacactagccctttcttagaagcgactcttgttgaaaaaaacatcctgtgctttgtgaagtgatttgtccctgaagaactctatgagtaaaagagactctagctgtgactttggccaagtcaggtggtcttgctactgatgagggggctgaatcctgagcattctctt

SEQ ID NO: 40262 - DNA, 201 bp, Homo sapiens
cactcttggcttaggaaattttctcctctttttgccctgaaaattagccttggtggctgagttttgcttttcaggttctcattgctagtgcttattttgaygcttagtgaccatctcattcctactactggcccgcagtagggaatcagacctttagtagacacggagctcttcaaatacagagtgaacttggggcatctg

SEQ ID NO: 40263 - DNA, 201 bp, Homo sapiens
ccatccagcataggaaatagctccacagagtttttatctgagccacatactgcctcagagatcagaacccaagcaaaaactctgcttctttaattcatacsctcccttatttcctcaccttgggctcttcaaatgcccccagcttgactgtggagctggcttcctctccaaccatcattaatttcccagaggggcctgtgg

SEQ ID NO: 40264 - DNA, 201 bp, Homo sapiens
ttttgagctgtctggctggttgagacagatgatctgatggcaagaatgatttgcaaaaaattcaacactgaccaatcagagcagacagtctaaataaacaycgattcttacaaggctaccttccttaccagttaaatatcagtcctgcctcagagaaacataagatctaaagaggaaaatctacacaagattgtgtgtggg

SEQ ID NO: 40265 - DNA, 201 bp, Homo sapiens
aacccaacccaatttgacttgaataagtaaaggaatttattggctcttacaagtgtaaagtccagaggtttcagttgaggcatggtccaacagctcaacaktttcactgagcacctagtttccttttgtctaatctctgcccaatattgttcatagttccaagatgttcaccaagaggtccctgagctgtgtgctttctca

SEQ ID NO: 40266 - DNA, 201 bp, Homo sapiens
attccatacatgttcctgcaaatgatagaatttcattcttttttacggcttaatagtattccattgtgtgtgtgtgtgtgtgtgtgtgtgtgtgtgtgtgkatcacatttgctttatccattcatctgttgatggacacttagattgatactgtatcttggctattgtgaatagtgctgcaataaacatgggagtgcaggt

SEQ ID NO: 40267 - DNA, 201 bp, Homo sapiens
tcttttctctacctccatgagatccatctttttagctcccacatatgagtaagaatatgcaatatttgtctttcggtgcctggctgattttacttaacaaratgcccttcaattccatacatgttcctgcaaatgatagaatttcattcttttttacggcttaatagtattccattgtgtgtgtgtgtgtgtgtgtgtgtg

SEQ ID NO: 40268 - DNA, 201 bp, Homo sapiens
tcttctcttgcccacctttggtgctgcagagtggatcatcttgttttatactcaagtcatcattaaaatttatagaaaaagagagaatttaaaaaaaaaaacactaaaaaatcaccttgtacgcatatacctcagaaggtctttggcctaatggtaatctgtgacattaaggcaaataaccaaaaatatgtaatttttcta

SEQ ID NO: 40269 - DNA, 201 bp, Homo sapiens
gaaatacaaatcaaaaccacaatgagataacatctcacaccagtcagaatggctattattaaaaagacagaaaataagagttgctggtgaggctgcagagraaaggggaaagcttatatgctcttaatggaaacacaaactagttgagccactgtggaagacagtttggagatttctcaaggaactcaaaatagaacaacc

SEQ ID NO: 40270 - DNA, 201 bp, Homo sapiens
tcatgagggtgatttctaatggtttagcaccatccccacagtgctgccttatgatagagttctcaggcgatctggttgtttgaaagcatgtagcacttccrctgcccttctcctgctggccatgtgaaggtgtgcctgtttctcctttaccttctgccatgattgtaagtttcctgaggcctccccaaaagcagaagcctt

SEQ ID NO: 40271 - DNA, 201 bp, Homo sapiens
gactggtgactcactttgtccttccctcctgtaagccatgagaaggaatcagaatgattctgtcatcaagagcatcacaaatcctggatcttcacctgattaatgcttcacgtctagcacaagcactttcattttcaagggattccatactgtattgtctagcccctggctgggttgggatatagttatcttggtggcata

SEQ ID NO: 40272 - DNA, 201 bp, Homo sapiens
cattctagctggggagacagaaaacaaataagtgcatttataattggatgtctgcttgtgatatgtgtgtatcccaggcagagggtccacagaacaaacarcagcatctagtgtggctcggagatgtgctcactcaagttctatgccagatttgagaagcctgcttgactctaacatcccaaatctgcatttccagcactt

SEQ ID NO: 40273 - DNA, 201 bp, Homo sapiens
gtgagagtaatgacgtgagctaatccaatttgaagtataaacaaagaaatttcttcacgcaaagagactgacttattttgtttcagaactaaataccacgmagtagaggttaggtcagggaatctggcctaaatatatgggggggtcagggagatggaggttagtcattccattggaggacagaagaaaaaggaacaagaa

SEQ ID NO: 40274 - DNA, 201 bp, Homo sapiens
tggttactgtagccctgtagtatagtttgacgtgatgcttccagctttgttctttttgcatacaattgccttggctatgtaggctcttttttgattccatwtaaattttaaaatagtttttctttccagttctgtgaagaatatcattgatagtttgataggaatagcactgactctgtaaattgctttggacagtatggc

SEQ ID NO: 40275 - DNA, 201 bp, Homo sapiens
atgtgttaggttgatactgggtgggggcactgaggatttttaaaacgtgatcagggctgccttgttgaaggtaaacctagcggtggtaagtcaaatgaaawggagtcatgagagaacaggtggtactaatcactaccagtactgagtgctttgcagatgctacttcatatacataatctgatttaattctgatagcaagaa

SEQ ID NO: 40276 - DNA, 201 bp, Homo sapiens
taactctgattgaattatatgttaattccttgcggtggtcttagatttcagacgctattagcaaattatggaggaaaagcaagatcgtatgattcatgaaytatcacagcagcaacagtttctaatttccacccatcctctgtgtcatgtgatatgtttcagaaactcacttaaaattgagaaaataagccattcctaatt

SEQ ID NO: 40277 - DNA, 201 bp, Homo sapiens
gccatttgggggaaagaacaaagcactgaactagagggcaaagaccaacattttggttctagctctgccaagtgtaggacattggactaggcacttaactkcagtaagcctcagtctgcttgtgtacaaaacagagtaaaagatttcttgcatttcctactttacaaggtcaacatgaggatcaagaataccatgttcata

SEQ ID NO: 40278 - DNA, 201 bp, Homo sapiens
tctcctttgctgtcacatgtttgaagatggaattgtgctgcttctgagccatccttccaccaattaaaaatgccccagttccttatctctgccttctggamaatgtgctttttcagtatgtccatctgagtatgggcctgaaactgaacatagtatcccaaatatgacattctgtctagcccaggggggtgtggttacttc

SEQ ID NO: 40279 - DNA, 201 bp, Homo sapiens
ctcagtggaagaggcatgtggatcctggttaggtgtgaagccaggagggcttcttagccacagcctgaaatcgaagcccaggatcgagccacagtctgaawtttttggatcgcagctctgccagttaaaccaatggtaacaataataatgtactgtcatatatgtaagaactgccatatatggagcattttgagccaggca

SEQ ID NO: 40280 - DNA, 201 bp, Homo sapiens
gcacattgagtggctgctagcatcactccagagccagactgaatctgaatctggctctcctacttacaccggagtgacttccatgctagaaatcgcttctstgggtccagcttacacttaagtgaatggagatgtaaaatggagacgataccagtaccgattatgcagagttgtggtgaggactgaatgaactaatacatg

SEQ ID NO: 40281 - DNA, 201 bp, Homo sapiens
actgacaagccttggtaacggagcagatataggagataatgaggagagaggagttggagttggagttggtgaggagagatggagttggagttggatacagygacaacttcgaagtttctatccagaggctgggagtgtgatgggccattgacagaaatggcaaacggagagctggtttgcaatggatcaagatgagggttg

SEQ ID NO: 40282 - DNA, 201 bp, Homo sapiens
tctaatcctccagaggatatcaaaggcaatacagccagcatacccaatcattaggagtttggcttctgggaccgggcactcttgggtgtgagcaccagctstcttatttataagctgtaaccttggccatgttatttaacccttctgagcctgactttcctcacttgtacaagacaggtaatataccaaccacagagggtg

SEQ ID NO: 40283 - DNA, 201 bp, Homo sapiens
tttttcatggctacctactacagagtgtcctagtaaaatatatacttgatacattaatatacgctttaaaaagaacagcagttagacattaaccaatatcygttttggttatgttaaagtcacaaatgtttaaaatgcccatcgtttcacagtcaaccacatataagatatatcttgctttattaagtgtatttaacacct

SEQ ID NO: 40284 - DNA, 201 bp, Homo sapiens
cacgaaacgaaactgtaaggcagaccaggtgtgaggaggggaggtgataaaaggattatagggtggaggagcggaggctgaggaagaattgggacctagckgggcctggcgaggagcagcctggggaggtggggagaggtcagatgggtccgtagaaaaggaagattagaaagcctcagcgacgcttggggttgggactga

SEQ ID NO: 40285 - DNA, 201 bp, Homo sapiens
agaagataataagtcaacagtcacttttttcatggctacctactacagagtgtcctagtaaaatatatacttgatacattaatatacgctttaaaaagaayagcagttagacattaaccaatatccgttttggttatgttaaagtcacaaatgtttaaaatgcccatcgtttcacagtcaaccacatataagatatatctt

SEQ ID NO: 40286 - DNA, 201 bp, Homo sapiens
ctccatgtatacatgtctgcccactggtttctttgggttggaggataacctaaggaaacccaaagccattattgttattattattttaaatcagcagatayatgcattgcccttagagccagtagcccagaaagctctgcccttctgctgtcaggctggaactcagttttcttcatggtcttcctctctagtgtgacccct

SEQ ID NO: 40287 - DNA, 201 bp, Homo sapiens
aggaggaaggtagagaaaatgggttccagtgtgtgtgtatgtgggggtgggaggggtgtgttgatttaggggtgtacagaaaatggtggtgtgcttcatgmcttttttttttaaagaatgaaaccaggacatcaactgagcatataagaggggaaagtggtgcagtagggttaaggcataatgaaaagatttagaattatc

SEQ ID NO: 40288 - DNA, 201 bp, Homo sapiens
ccaaatctcaaacttgaattgtttgttgcaaataactttcaaaaagaacagctaagctagagggatagtttaaagtagagagaggtttaaaatatcttatmttgtattgactcgaaggaacaacttaagcttgtttaagcagaacaggaatgcactggcccatgtgcagagaaggataaccgtgatgcttcacaggataca

SEQ ID NO: 40289 - DNA, 201 bp, Homo sapiens
gagttttggtattgattttatgtgtcagtacctgagaaggagagaagtccttgagttgtttcgtaaatgtggctcaagtgagatgctgaacagtgccagcyatgtggactctgccacagtgaaggaggaaggtagagaaaatgggttccagtgtgtgtgtatgtgggggtgggaggggtgtgttgatttaggggtgtacag

SEQ ID NO: 40290 - DNA, 201 bp, Homo sapiens
atctcccaatctctcttcccaagtcattcttttttttttttttaattatactttaagttttagggtcattcttatcttcttctcatctcttacctgttttytcctgaccctaattcctcaaagaagcttaattcacttctagatcccctccttcccccatgaatataaagaaaataactatatctagttcttttagatgtt

SEQ ID NO: 40291 - DNA, 201 bp, Homo sapiens
catgctttcctgccatcgcagatagatcagatatatcctccaagctgtagttccttgggctcagctctttttctaggacatgactcaaaaatcagaggaastaggttggtaagtgctgtcagaaagataagcccttatcagttatggcaaaccaaaatgactggctatggtaacactttttgcagagaatcttcaagcctg

SEQ ID NO: 40292 - DNA, 201 bp, Homo sapiens
tagcaatgagcaagactctgtgggcgtaggaccctctgagccatgcgcgggatataatctccttgtgtgccgtttgttaagcccattggaaaagtgcagtmttagggtgggagtgacccgattttccaggtgctgtctgtcactgctttctttgactaggaaagggaattccctgaccccttgcgcttcccaggtgaggcg

SEQ ID NO: 40293 - DNA, 201 bp, Homo sapiens
attcaagctctgctacctataaataagctaatgtctttcctctgggctgttgtcccttagccttcaacatcttctagtctgaagcaaaaatcatgcttcaytttgttttgctatctttctaatacagtaagagcttcaggtcaaagaactgaagagaatgtgagagcttgaccctctgttatgtttttcgttatttgtaga

SEQ ID NO: 40294 - DNA, 201 bp, Homo sapiens
cttcagagtcacacacacacaaaaagataagcttttttctcaattgaaaactggaaagttgaaagaggaagtaaagagaaaaagaaagacatatactatawtccaggagtcccacatgttcagaaactcttcacctgtgaatctacattttactgagttcacatctgccttctgaagggtaaccactctttaccccccaaa

SEQ ID NO: 40295 - DNA, 201 bp, Homo sapiens
tttgccattggttcgaatttcctcctgtagctcggagtagtttgatcatctgaagccttcttctctcaactcgtcaaagtcattctctgtccagctttgtkccattgctggtgaggagctgcgttcctttggaggaggagaggcactctgagttttagagtttccagtttttctgctctgttttttccccatctttgtggt

SEQ ID NO: 40296 - DNA, 201 bp, Homo sapiens
agttctccctcctttcacctgaacctgtccaaatgttactcttccttcaaaatagggctccaatctcaaaatttctgctcccatggggtctttcctgatgycgtgctgccgggcacaatctcaggagactccagcaccactgtttacaccacccttgtgtgtgtgtgtgtgtgtgtgtgtgtgtgtaagtggacctccaat

SEQ ID NO: 40297 - DNA, 201 bp, Homo sapiens
tccatgccaggcatgccccatcacctaggaagaaactcaacccatcagcaggcatccaaaaaggcgtcagccaggtagggtcccaaagagccccacacctygggttatctgggaaaatcccaagttatttagaagacagtgtacctcttgcctctacccttggtggtaaacattgcttcagagtcacacacacacaaaaag

SEQ ID NO: 40298 - DNA, 201 bp, Homo sapiens
caaaagatccatctcctgtggctacctaagagcagtgactctctgggggtggaataatttatacatgtgtaaaaacatttatttttctacatatttacttsaagcatgtgttaaaatatctgcaaacaactccagaccccctccccatcttatttttatcctaaaggcagtgttacatggatatccaaatgtttagagagg

SEQ ID NO: 40299 - DNA, 201 bp, Homo sapiens
gtgtttgaggaatttatccatttcttctagattttctagtttatttgcgtagaggtgtttatagtattctctgatggtagtttgtatttctgtgggatcgstggtgatatctcctttatcattttttattgcatctatgcagttcttctctcttttcttctttattagtcttgctagcggtctatcaattttgttgatctt

SEQ ID NO: 40300 - DNA, 201 bp, Homo sapiens
atcaatgaggaaatatacaaaagagccctagcacagaacctgattcatcactgatgctcggtgagtgttcattatacacccccaacacctctactaaccaygttgactgtgactaaagtaaatgtagattggcaagtcacactctggaataaagcttcccaaccctgacgcctgacacaatcacctgggagctttaaaaag

SEQ ID NO: 40301 - DNA, 201 bp, Homo sapiens
tgagtattcctccgtggagttttagcaacttcccataggaaatccaggctaaggtctgattcatccagtcctgaataatgtgttaatcatgaattggatamaaatcatgaattggatactactcaagaggataagctgttttcaaacatcttagcagtaaatatttgcaaaccaacaagaaacacactaaatacaaatggc

SEQ ID NO: 40302 - DNA, 201 bp, Homo sapiens
tagttttagaaggaatggtaccagctcctctttgtaactctggtagaattcgactgtgaatccatctggtcctggactttttttggttggtaagctattgmttattgcctcaatttcagagcctgttattggtctattcagagattcaacttcttcctggtttagtcttgggaggatggatgtgtttgaggaatttatcca

SEQ ID NO: 40303 - DNA, 201 bp, Homo sapiens
gcttcctctccaaccatcattaatttcccagaggggcctgtggtacttgggaatagcttcggtgatgagaggcaacaaggtctagccaagcacagctctcyaggtcttgaaacatccttaaggcctaagcctagtatcatagacacgggcttgttctaaccccaaactcagacctctaacaatgacctcacttccacttgc

SEQ ID NO: 40304 - DNA, 201 bp, Homo sapiens
cctgtggtctgctttagaattcacccaaaagccaattgtttctgtggttattcaaattttgtttctcttctcactccctcctcttgtctatcctctgatcsccagcatttggacagaataagagagaggaagtaaaactcaaatcattttactttactttttcttggccatttggctaagagatgtgtggggtgaagaggt

SEQ ID NO: 40305 - DNA, 201 bp, Homo sapiens
tgttgaattttgtcaaaggtcttttctgcatctattgagataatcatgtggtttttgtctttggttctgtttatatgttgaattacatttattgatttgcrtatgttgaaccagccttgcatcccagggatgaagcccacttgatcatggtagataagctttttgatgtgctgctggattaggtttgccagtattttattg

SEQ ID NO: 40306 - DNA, 201 bp, Homo sapiens
cactgcgtgagcctgggcaagcctcacaaccttgctggccttgactttcttatttatgagctatagacaattacacccagcctgctgcctggagggctggkgagagtggtgaattgagtgttcaagttgaaagtaagaggtggtcttcagcggttgactccaagcattacttatgatcaaggtctaatttctaagagtcca

SEQ ID NO: 40307 - DNA, 201 bp, Homo sapiens
ccactggagaagccacaatcatagggaaggaatattccatttggggacagataaagtcaatgaaaagatagatgttctcagtacagcccaggccagcatgrgcaaaggtggatacttaatgtctagtcagcttgcatgccatgacaaaataccacagactggggacttaaacaacagaagctgattttttcatagttctgg

SEQ ID NO: 40308 - DNA, 201 bp, Homo sapiens
ggggttttctagatatacaatcatgtcatctgcaaacagggacaatttgacttcctcttttcctaattgaataccctttatttccttctcctgcctaattkccctggccagaacttccaacactatgttgaataggagtggtgagagagggcatccctgtcttgtgccccttttcaaagggaatgcttccagtttttgccc

SEQ ID NO: 40309 - DNA, 201 bp, Homo sapiens
acagtccccctaatgttgtatctttggagtcttctcacattttatttctataaacaattttcaatgaatgtctgcatgcctatatagatgttttatttttstttttaaagtagagaagctgatttttgctgttgtttttgttgctgtataaaagatcactgagtgattgccttagttatgcaacaatagagaaataagtgt

SEQ ID NO: 40310 - DNA, 201 bp, Homo sapiens
gcttaggattgacttggcgatgcgggctcttttttggttccatatgaactttaaagtagttttttccagttctgtgaagaaagtcattggtagcttgatgrggatggcattgaatctgtaaattactttgggcagtatggccattttcacgatattgattcttcctacccatgagcatggaatgttcttccatttgtttgt

SEQ ID NO: 40311 - DNA, 201 bp, Homo sapiens
agtaccatgctgttttggtgactgtagccttgtagtatagtttgaagtcaggtagcgtgatgcctccagctttgttcttttggcttaggattgacttggcratgcgggctcttttttggttccatatgaactttaaagtagttttttccagttctgtgaagaaagtcattggtagcttgatggggatggcattgaatctgt

SEQ ID NO: 40312 - DNA, 201 bp, Homo sapiens
atgacttataatctttggctatatacccagtaatgggtcaaatggctgggtcaaatggtatttctagttctagatccctgaggaatcgccacactgacttscacaatggttgaactagtttacagtcccaccaacagtgtaaaagtgttcctatttctccacatcctctccagcacctgttgtttcctgactttttaatga

SEQ ID NO: 40313 - DNA, 201 bp, Homo sapiens
tgcatgtgtctttaaagcagcatgacttataatctttggctatatacccagtaatgggtcaaatggctgggtcaaatggtatttctagttctagatccctkaggaatcgccacactgacttccacaatggttgaactagtttacagtcccaccaacagtgtaaaagtgttcctatttctccacatcctctccagcacctgt

SEQ ID NO: 40314 - DNA, 201 bp, Homo sapiens; identical to SEQ ID NO: 22620

SEQ ID NO: 40315 - DNA, 201 bp, Homo sapiens; identical to SEQ ID NO: 21577

SEQ ID NO: 40316 - DNA, 201 bp, Homo sapiens; identical to SEQ ID NO: 21640

SEQ ID NO: 40317 - DNA, 201 bp, Homo sapiens; identical to SEQ ID NO: 22680

SEQ ID NO: 40318 - DNA, 201 bp, Homo sapiens; identical to SEQ ID NO: 22593

SEQ ID NO: 40319 - DNA, 201 bp, Homo sapiens; identical to SEQ ID NO: 22594

SEQ ID NO: 40320 - DNA, 201 bp, Homo sapiens; identical to SEQ ID NO: 22681

SEQ ID NO: 40321 - DNA, 201 bp, Homo sapiens; identical to SEQ ID NO: 22684

SEQ ID NO: 40322 - DNA, 201 bp, Homo sapiens; identical to SEQ ID NO: 22682

SEQ ID NO: 40323 - DNA, 201 bp, Homo sapiens; identical to SEQ ID NO: 22635

SEQ ID NO: 40324 - DNA, 201 bp, Homo sapiens; identical to SEQ ID NO: 22687

SEQ ID NO: 40325 - DNA, 201 bp, Homo sapiens; identical to SEQ ID NO: 22636

SEQ ID NO: 40326 - DNA, 201 bp, Homo sapiens; identical to SEQ ID NO: 22637

SEQ ID NO: 40327 - DNA, 201 bp, Homo sapiens; identical to SEQ ID NO: 22689

SEQ ID NO: 40328 - DNA, 201 bp, Homo sapiens; identical to SEQ ID NO: 21645

SEQ ID NO: 40329 - DNA, 201 bp, Homo sapiens; identical to SEQ ID NO: 22695

SEQ ID NO: 40330 - DNA, 201 bp, Homo sapiens; identical to SEQ ID NO: 22696

SEQ ID NO: 40331 - DNA, 201 bp, Homo sapiens; identical to SEQ ID NO: 4754

SEQ ID NO: 40332 - DNA, 201 bp, Homo sapiens; identical to SEQ ID NO: 4755

SEQ ID NO: 40333 - DNA, 201 bp, Homo sapiens
gagctttcacatccaacatcacctttgatattggtgaattacaaaacaaaattattgatttaaataggcaaactcaagaatttcagccttctttagaagaytggaccgaattccaggaaggcctggagagcctcaacccttggacctatctaaggcaccacattaacatcttatatgtagttcttggaataatgttgtttt

SEQ ID NO: 40334 - DNA, 201 bp, Homo sapiens
ttaacatcttatatgtagttcttggaataatgttgttttgtctctgtcttcggtttatagtctgtaaaatcggatggaccaccaattggagaatgagagcytcccagcccagccttacattctttcaattaatacataaacagaaagggggatatgcagggagccaaaggcctgtgggacgtgaccaactcagcattctgc

SEQ ID NO: 40335 - DNA, 201 bp, Homo sapiens
taacatcttatatgtagttcttggaataatgttgttttgtctctgtcttcggtttatagtctgtaaaatcggatggaccaccaattggagaatgagagcckcccagcccagccttacattctttcaattaatacataaacagaaagggggatatgcagggagccaaaggcctgtgggacgtgaccaactcagcattctgct

SEQ ID NO: 40336 - DNA, 201 bp, Homo sapiens
aatgttgggttgcatccctgggctatggattcttgttaatctgtctgagccttgggctgccacacctgctttgcatttttgtaacacttcttctaactcascttactcactgtgtccatagagccttaggcataatttttgctattgtttccttggtcaaactaataacttctgttgtgatatcttctgtaactctgcata

SEQ ID NO: 40337 - DNA, 201 bp, Homo sapiens; identical to SEQ ID NO: 17113

SEQ ID NO: 40338 - DNA, 201 bp, Homo sapiens; identical to SEQ ID NO: 17134

SEQ ID NO: 40339 - DNA, 201 bp, Homo sapiens; identical to SEQ ID NO: 16748

SEQ ID NO: 40340 - DNA, 201 bp, Homo sapiens
cccattcccgggtgtgatccggctcccctggcaagagttgtgtcagggactggggctcaagccagcctcttcacgtccccgaatcacagcagaaagttggraaggaaactctggagtcctggcctttgccctagtcacccagggtcatggtgagcgtcagggggttgtgcttcacagatgccatgtgagcagcggacagga

SEQ ID NO: 40341 - DNA, 201 bp, Homo sapiens
gtcatggtgagcgtcagggggttgtgcttcacagatgccatgtgagcagcggacaggatgctgagctgaggaacacaagccctgccccactctgctgtgartttccttggacaagctgcttcagtattgtgggtctctatggcctatcacctcctctacccacaaacagggactggagagggtgacatgcaggacacttct

SEQ ID NO: 40342 - DNA, 201 bp, Homo sapiens
atgtggtcttactatgttgcccaggctggtctaaaactcctgggctcaagcgatccgcccatctcagcctccccaagggctgggattataggcaggaggcrgtattacaaggcaactgagagcaatgtcattggagtaaacaaagcaaaaacaggccaggcatggtggctgaggcctgttatcccagcactttgggaggct

SEQ ID NO: 40343 - DNA, 201 bp, Homo sapiens
tcttactatattaaatttttttgatagagatgtggtcttactatgttgcccaggctggtctaaaactcctgggctcaagcgatccgcccatctcagcctcsccaagggctgggattataggcaggaggcggtattacaaggcaactgagagcaatgtcattggagtaaacaaagcaaaaacaggccaggcatggtggctga

SEQ ID NO: 40344 - DNA, 201 bp, Homo sapiens
tgcaggacacttctactggaaggtctagaacaaataaatcatgccttctcactgcctttgtaaaagtggaatcttaggaggtcatattcttactatattamatttttttgatagagatgtggtcttactatgttgcccaggctggtctaaaactcctgggctcaagcgatccgcccatctcagcctccccaagggctggga

SEQ ID NO: 40345 - DNA, 201 bp, Homo sapiens
gaaggcagtcttgtcccattctgacaaattgttatagaagagtggtgggggtgaagaggtgacggggtaaggggcagccttagctccaggactatttctgycacctgtaggctgaagatacaaggccagtgcctttgggagctcagtttcccatctataaagcagatatcagattttgcacccataagtgcatgtgggaaa

SEQ ID NO: 40346 - DNA, 201 bp, Homo sapiens
tttctgtgaacaggtattaatcctggagccaggaaaggctctgagaagtgaaagaacaccacgaacaaagtcttaagatggggcctgtaagctcagccagygtgaggtcaccctcaccgagacgctcggtggcagctccagccaccgcacagccctctgcagtgatgggaacagggtgagggcagccagagccttcccacc

SEQ ID NO: 40347 - DNA, 201 bp, Homo sapiens
ccagggcaaaggcatttgcctcagacctttgcccggctactctagttctgagaacctgccctaaataaaggaggtaattctgaactgggagacatgccctytgtgctccaggatattcactgcagtgtcatttacagtggctaaggaggaaaggggagggcagaggggaggcagcagggagaggaaggaggtgggggagag

SEQ ID NO: 40348 - DNA, 201 bp, Homo sapiens
gagtggacctgcagagccacgtctgtccctctgtctgtcgaccacagccggtgccagcaattcaggaggcctagtgggcgagggaggctggggaaaggackggagggtgggaggaggagctcggccacaggaaataaggggcctgcaggtggctggggcgccccagggcaaaggcatttgcctcagacctttgcccggcta

SEQ ID NO: 40349 - DNA, 201 bp, Homo sapiens
ccgagtggacctgcagagccacgtctgtccctctgtctgtcgaccacagccggtgccagcaattcaggaggcctagtgggcgagggaggctggggaaaggmctggagggtgggaggaggagctcggccacaggaaataaggggcctgcaggtggctggggcgccccagggcaaaggcatttgcctcagacctttgcccggc

SEQ ID NO: 40350 - DNA, 201 bp, Homo sapiens
atgtgagaggatgtggacgcagatgtggacgtggaagaggtcaagttagacaaggatttaagagctgaccaaggctagagagggatcaatgtgagagatgyaaaaaaaaaaaaaaaaaaaaaaaaaagggggcactggaaggatgaatgtccagaaggcaatgagggaaatggccaaggccgtgagacaaagaggccattg

SEQ ID NO: 40351 - DNA, 201 bp, Homo sapiens
tgaatgctctaaaacccccctgggctccattgattcattccttcctcactcaaatcccttgaagcggctacattgtctggtctacatacccggggtttgtygtcatgcaccaggaaaatttaggacagggacaaacacgaggactttaggagcggaggtttaatagatagaagagaagaaaaagagaaacatctctctctt

SEQ ID NO: 40352 - DNA, 201 bp, Homo sapiens
cagggtgagggcagccagagccttcccacccaacagtcccccaggagacactggggcctgtgcttcccacaccaaccacactcccgttctgccacccctgmggccggtgccagggaccgagtggacctgcagagccacgtctgtccctctgtctgtcgaccacagccggtgccagcaattcaggaggcctagtgggcgagg

SEQ ID NO: 40353 - DNA, 201 bp, Homo sapiens
tcggtggcagctccagccaccgcacagccctctgcagtgatgggaacagggtgagggcagccagagccttcccacccaacagtcccccaggagacactggrgcctgtgcttcccacaccaaccacactcccgttctgccacccctgcggccggtgccagggaccgagtggacctgcagagccacgtctgtccctctgtctg

SEQ ID NO: 40354 - DNA, 201 bp, Homo sapiens
gggcaggggagagggaaaggaaggccccactttttatatatatacatttttagagcagatttaggttcacagcaaaattagaagaaggttacagagatttyccgtatgtcctcgccccaacccagtctcccccattatcaacatcccccaccagggggtacagctgttatactttatgaacctacattgacatgtcataat

SEQ ID NO: 40355 - DNA, 201 bp, Homo sapiens
cacttacctgggagcagaggcaggtggcaaggtggcgggtggtaagggggatggtggggccgggcagggtgcacagtgccctgccttctggtttgttcacrgggcttggtgtcactgtcagagaaaagggcatactttgtctccatgccctgcctgtcccctaggtccccagaggggcttcacaggggaccaagcacgtga

SEQ ID NO: 40356 - DNA, 201 bp, Homo sapiens
agagaaacatctctctcttctccaagcataaaggactggtgggcagcagacacactgaattttatattcaggtttgtccttgcccagccctgccagccgactgcaggagcaggagaactaaggaagggaaaaggaagcagatgaaaggcttaagaaaaaggcggatctgttggcagcagcccttatagaaagagaaattag

SEQ ID NO: 40357 - DNA, 201 bp, Homo sapiens
ctggggcaggggagagggaaaggaaggccccactttttatatatatacatttttagagcagatttaggttcacagcaaaattagaagaaggttacagagakttcccgtatgtcctcgccccaacccagtctcccccattatcaacatcccccaccagggggtacagctgttatactttatgaacctacattgacatgtcat

SEQ ID NO: 40358 - DNA, 201 bp, Homo sapiens
gccctaaataaaggaggtaattctgaactgggagacatgccctttgtgctccaggatattcactgcagtgtcatttacagtggctaaggaggaaaggggarggcagaggggaggcagcagggagaggaaggaggtgggggagagggctggggcaggggagagggaaaggaaggccccactttttatatatatacattttta

SEQ ID NO: 40359 - DNA, 201 bp, Homo sapiens
cggacccgggtgtggagtagctcggctttcagcttcctgcacaggaataggaggcagcagctgtgccatgctgggcaaactgcctgcctgcttctctccasccgtctgcctgctctccacactccctgcccctgggcccgtttccccttctgtaaaatgggaacaacagagaggttggtaggtggaatcaccaggattagc

SEQ ID NO: 40360 - DNA, 201 bp, Homo sapiens
cttccctgaggaaagaaaggacacagccaaggccctggggcatgcccaggcagagtgacaggagagaaaaggaggccagcgggagggaagggagaaggtcstgtgaggttgtggaggaagaggaggccactcgtattttctgtgaacaggtattaatcctggagccaggaaaggctctgagaagtgaaagaacaccacgaa

SEQ ID NO: 40361 - DNA, 201 bp, Homo sapiens
gaggccactcgtattttctgtgaacaggtattaatcctggagccaggaaaggctctgagaagtgaaagaacaccacgaacaaagtcttaagatggggcctktaagctcagccagtgtgaggtcaccctcaccgagacgctcggtggcagctccagccaccgcacagccctctgcagtgatgggaacagggtgagggcagcc

SEQ ID NO: 40362 - DNA, 201 bp, Homo sapiens
ctggtctacatacccggggtttgttgtcatgcaccaggaaaatttaggacagggacaaacacgaggactttaggagcggaggtttaatagatagaagagargaaaaagagaaacatctctctcttctccaagcataaaggactggtgggcagcagacacactgaattttatattcaggtttgtccttgcccagccctgcca

SEQ ID NO: 40363 - DNA, 201 bp, Homo sapiens
tcctgagggcctcagggtggggaaatggggaggggtcgtgatgacctgccgaaggcctctcagcaccccaagaagagctcgcccaagaagaaggtgacctstcctttgagtcaggagcccaggaccactgcccaaacctcccggtcccagggccagggagtgtggagagcaggcagcagaggtggagacaggagtccccag

SEQ ID NO: 40364 - DNA, 201 bp, Homo sapiens
gctgtgggccccccacccaagtggctgaccttatctgtacgagcttttcctggggccatggagcaagcagtccaagctgggtgcgggtcccagagcagcayaaagccgtctcattcaagggtggggagatgtcaccatccagcctgatgcatcctgggagggaggactagaggctcagggggtgtgggtgggggggtgcgg

SEQ ID NO: 40365 - DNA, 201 bp, Homo sapiens
aggtctgcattgtactccagacccctggacgggcccctagaggacccagtggctgctgaggcaggcggggcctggctgtcactgggcccagcacagcaggytttgcttctagcggggccgtgggggttgctttgtttgggcttgtccatcctgagggcctcagggtggggaaatggggaggggtcgtgatgacctgccgaa

SEQ ID NO: 40366 - DNA, 201 bp, Homo sapiens
gtggaggaagaggaggccactcgtattttctgtgaacaggtattaatcctggagccaggaaaggctctgagaagtgaaagaacaccacgaacaaagtcttkagatggggcctgtaagctcagccagtgtgaggtcaccctcaccgagacgctcggtggcagctccagccaccgcacagccctctgcagtgatgggaacagg

SEQ ID NO: 40367 - DNA, 201 bp, Homo sapiens
gaagccactgagggaactgatggagaaggagctccctctctcagggctgggttccagtccatcagccaaaaatggtgggaggtctgcattgtactccagasccctggacgggcccctagaggacccagtggctgctgaggcaggcggggcctggctgtcactgggcccagcacagcaggctttgcttctagcggggccgtg

SEQ ID NO: 40368 - DNA, 201 bp, Homo sapiens
caaggccctggggcatgcccaggcagagtgacaggagagaaaaggaggccagcgggagggaagggagaaggtcgtgtgaggttgtggaggaagaggaggcsactcgtattttctgtgaacaggtattaatcctggagccaggaaaggctctgagaagtgaaagaacaccacgaacaaagtcttaagatggggcctgtaagc

SEQ ID NO: 40369 - DNA, 201 bp, Homo sapiens
tgaagcaggaaggaggaaacttagaagccactgagggaactgatggagaaggagctccctctctcagggctgggttccagtccatcagccaaaaatggtgsgaggtctgcattgtactccagacccctggacgggcccctagaggacccagtggctgctgaggcaggcggggcctggctgtcactgggcccagcacagcag

SEQ ID NO: 40370 - DNA, 201 bp, Homo sapiens
gcctgtcccctaggtccccagaggggcttcacaggggaccaagcacgtgacttctgggacagagagggtgacatgctgtgggccccccacccaagtggctkaccttatctgtacgagcttttcctggggccatggagcaagcagtccaagctgggtgcgggtcccagagcagcataaagccgtctcattcaagggtgggga

SEQ ID NO: 40371 - DNA, 201 bp, Homo sapiens
catttttagagcagatttaggttcacagcaaaattagaagaaggttacagagatttcccgtatgtcctcgccccaacccagtctcccccattatcaacatsccccaccagggggtacagctgttatactttatgaacctacattgacatgtcataatcacccagagtccacagatttaggggtttttttgtttgttttgag

SEQ ID NO: 40372 - DNA, 201 bp, Homo sapiens
tgcctgtcccctaggtccccagaggggcttcacaggggaccaagcacgtgacttctgggacagagagggtgacatgctgtgggccccccacccaagtggckgaccttatctgtacgagcttttcctggggccatggagcaagcagtccaagctgggtgcgggtcccagagcagcataaagccgtctcattcaagggtgggg

SEQ ID NO: 40373 - DNA, 201 bp, Homo sapiens
cacagtgccctgccttctggtttgttcacagggcttggtgtcactgtcagagaaaagggcatactttgtctccatgccctgcctgtcccctaggtccccaraggggcttcacaggggaccaagcacgtgacttctgggacagagagggtgacatgctgtgggccccccacccaagtggctgaccttatctgtacgagcttt

SEQ ID NO: 40374 - DNA, 201 bp, Homo sapiens
ggtatttatggagctggatccaaggtcacatgcttgttcatgagctctcaggcactccctcccctctacaccctcaggtgcagggagatccagttttcccmaaacccacagtgcacctgtgcaggttaccacttacctgggagcagaggcaggtggcaaggtggcgggtggtaagggggatggtggggccgggcagggtgc

SEQ ID NO: 40375 - DNA, 201 bp, Homo sapiens
acactctagacagtgggagcattgactgtagccccctcctgtagacgcagatgaacaatgaacgcccgacatgggttctcccgcatgttcacatgtccacyggcatgttctattctgcgtggtggagtgatcagaaatttcgttttgttttgtcgaatggttaaatggaccttgtgttcttcagaatcaaagaggaaagcc

SEQ ID NO: 40376 - DNA, 201 bp, Homo sapiens; identical to SEQ ID NO: 27990

SEQ ID NO: 40377 - DNA, 201 bp, Homo sapiens; identical to SEQ ID NO: 27991

SEQ ID NO: 40378 - DNA, 201 bp, Homo sapiens; identical to SEQ ID NO: 27935

SEQ ID NO: 40379 - DNA, 201 bp, Homo sapiens; identical to SEQ ID NO: 27999

SEQ ID NO: 40380 - DNA, 201 bp, Homo sapiens; identical to SEQ ID NO: 28000

SEQ ID NO: 40381 - DNA, 201 bp, Homo sapiens; identical to SEQ ID NO: 27918

SEQ ID NO: 40382 - DNA, 201 bp, Homo sapiens; identical to SEQ ID NO: 27963

SEQ ID NO: 40383 - DNA, 201 bp, Homo sapiens; identical to SEQ ID NO: 28002

SEQ ID NO: 40384 - DNA, 201 bp, Homo sapiens; identical to SEQ ID NO: 28004

SEQ ID NO: 40385 - DNA, 201 bp, Homo sapiens; identical to SEQ ID NO: 27975

SEQ ID NO: 40386 - DNA, 201 bp, Homo sapiens; identical to SEQ ID NO: 27965

SEQ ID NO: 40387 - DNA, 201 bp, Homo sapiens; identical to SEQ ID NO: 28030

SEQ ID NO: 40388 - DNA, 201 bp, Homo sapiens; identical to SEQ ID NO: 27922

SEQ ID NO: 40389 - DNA, 201 bp, Homo sapiens; identical to SEQ ID NO: 28020

SEQ ID NO: 40390 - DNA, 201 bp, Homo sapiens; identical to SEQ ID NO: 28022

SEQ ID NO: 40391 - DNA, 201 bp, Homo sapiens
aattttatttctaaattttttctttttgtagatttgtagagatggggtctcgctatgttgcccatgatggtctcgaactcctgggctcaagtgatcctccyacctcagcctcccaaagtattggtattacaggtgtgggcccagttagcaacacagtatgaattccatgcataccctaagactctttaggatgtcaagaga

SEQ ID NO: 40392 - DNA, 201 bp, Homo sapiens
ggactgaacccctaatttgagatcttcctggaaaaacttgagacaaattggtcataattttatttctaaattttttctttttgtagatttgtagagatggkgtctcgctatgttgcccatgatggtctcgaactcctgggctcaagtgatcctcccacctcagcctcccaaagtattggtattacaggtgtgggcccagtt

SEQ ID NO: 40393 - DNA, 201 bp, Homo sapiens
ctgtcttccatttcttctgtgttccccacagcacctagcatggtgctgggtacccactaggtgcttaacaaatattttttgatgaattgagagaggaatayggacaattgtaaggtaatgcactggggggataaatgcacattacatatgtataggctaatggtctttaagctcttggttacaaccaagataaaagacaat

SEQ ID NO: 40394 - DNA, 201 bp, Homo sapiens
tgaaaggtgtgggtaaagtgaccacagttgtcttcactacattgctggcaccatacaacaaggtctacaagccttgaaatgaaggcctgaaataaaagagkcactaaatggaatcattctcccaaatatatgcagactacagctaaaacagctgcagaaatgctttaacttatttcagggataagagatgtataccaggta

SEQ ID NO: 40395 - DNA, 201 bp, Homo sapiens
cagtaaaaggtcagcagggccccatgactccctccccagggcctttcatggggtcagtcacacagaacctgagacaatgaagttccttcatctgtctcctygccccctccttccttcccccaaccatggctttgcagatccccaaggctgggtgggtctgggagggggtgaatgtctggggtgccactgacatgtagcaaa

SEQ ID NO: 40396 - DNA, 201 bp, Homo sapiens
ggcgagtcacctgaaaatggggaaagaggaaataccaagacccacgttgacgtcagtcaaaactctcctctatacaaaggagttcccacagacagtaaaargtcagcagggccccatgactccctccccagggcctttcatggggtcagtcacacagaacctgagacaatgaagttccttcatctgtctcctcgccccctc

SEQ ID NO: 40397 - DNA, 201 bp, Homo sapiens
gaagggccataggtctgggccaagaagcagttctgttgttcttggatgtggggaggagagggagggggctgggtggaacttgggcaagcctccataccatytcagcaaagatgcagcccaggctccagatgtccacagctgtggaataatatttgcagcccaggaggatttcaggagctcggtaccacagggtcaccacct

SEQ ID NO: 40398 - DNA, 201 bp, Homo sapiens
ccccacagcacctagcatggtgctgggtacccactaggtgcttaacaaatattttttgatgaattgagagaggaatacggacaattgtaaggtaatgcacyggggggataaatgcacattacatatgtataggctaatggtctttaagctcttggttacaaccaagataaaagacaataaaacatattgctgatttgaaga

SEQ ID NO: 40399 - DNA, 201 bp, Homo sapiens
acccctaatttgagatcttcctggaaaaacttgagacaaattggtcataattttatttctaaattttttctttttgtagatttgtagagatggggtctcgytatgttgcccatgatggtctcgaactcctgggctcaagtgatcctcccacctcagcctcccaaagtattggtattacaggtgtgggcccagttagcaaca

SEQ ID NO: 40400 - DNA, 201 bp, Homo sapiens
ctgtgtgtgtcatcagtatccccactgccaatgctggctggggcaggagccctggtagaaggtacggttcctcttcctccccctggttccaggagcccacrgggacaacccacggcacactctcccacctcttctttttcctcctcactcagggagcacctactatcctgcaggctccaggggacaagagcccaagtgagg

SEQ ID NO: 40401 - DNA, 201 bp, Homo sapiens
gcacacagctactgcctaaagctcagctccagacactcgaagtttgaggcctctatgagacacccaaggggagccctggtctggggagtctgtagagtgcrttgtcttgaactccttttagtccaaataggcactggaatataccaattcccccccccctttttttttttgacactgagtctcgctctgtcgcccaggctg

SEQ ID NO: 40402 - DNA, 201 bp, Homo sapiens
attacaggcatcctccatcacgcccggctaatttttgtatttttagtagagacagggtttcactgtgttggccaggctgttctcaaactcctgacctcagrtggtctgcctgtctcggcctcccaaagtgctgggattacaggcgtcagccaccgcacccagccccaattcctgaaattggccagaaggctctatatcacg

SEQ ID NO: 40403 - DNA, 201 bp, Homo sapiens
tttgggaggccaaggtgggtggatcacttgaggtcaggagtttgagaccagcctggccaacctggtgaaaccctgtctctactaaaaatacaaaagttatycgggtgtggtggcgggtgcttgtagtcccagctactcggcaggctgaggcacaagaatcgcttgaacccagatggcggaggttgcagtgagccgagatag

SEQ ID NO: 40404 - DNA, 201 bp, Homo sapiens
tttcattggaatgccctctccacatcactcctcagggaggaaatgaacgcccaggcaggcagagctgtggggtatgataggggtgtctgggaatcccccgyatgctgctgggataggggtgtctgggaatcccccacgcgctgctgggataggggtgtctgggaatcccccacatgctgctgggataggggtgtctgggaa

SEQ ID NO: 40405 - DNA, 201 bp, Homo sapiens
gtcacaggcctcaggagccccatcctgtgctggggggaaggggtgctgataaaggagacgccttgctctgcagaacaaaaataattccaccactgccaccrctcacagcatctacagcaggccctgtgctgctgtcacaacctcaccctggtcccctgaggcggatatcaccatcccatttcagagacaaggaaaatgagg

SEQ ID NO: 40406 - DNA, 201 bp, Homo sapiens
ttcatggaggcaaagaagaagccaacacccaacagtgtggctcctggcactatgctggggacacattttggagacagcagcacttctgcggcctccttgtrctatgaagatcttttggcagcctagggccacacaacagagctccacactgcctgggtacttccttctaggggccccgagttccagaagcttcctcagtcc

SEQ ID NO: 40407 - DNA, 201 bp, Homo sapiens
tgagacacccaaggggagccctggtctggggagtctgtagagtgcattgtcttgaactccttttagtccaaataggcactggaatataccaattccccccsccctttttttttttgacactgagtctcgctctgtcgcccaggctggagtgcagtggcacgaacttggctcactgcaacctccgtctcctgggttcaagtg

SEQ ID NO: 40408 - DNA, 201 bp, Homo sapiens
tcaccctggtcccctgaggcggatatcaccatcccatttcagagacaaggaaaatgaggcccaggtgcgtgaagaaactggcctatcaaggcagagctagygggtagcatgctggacttctaagccttcctgagaaagtgaactgcttcctctgagatgggcataggcatggctgtgtgtgcatcttgtcctgaccattcc

SEQ ID NO: 40409 - DNA, 201 bp, Homo sapiens
agacacccaaggggagccctggtctggggagtctgtagagtgcattgtcttgaactccttttagtccaaataggcactggaatataccaattccccccccsctttttttttttgacactgagtctcgctctgtcgcccaggctggagtgcagtggcacgaacttggctcactgcaacctccgtctcctgggttcaagtgat

SEQ ID NO: 40410 - DNA, 201 bp, Homo sapiens
atcctgcaggctccaggggacaagagcccaagtgaggctgccaggcgggaggctgctgcaggggaccaggtgagcaaaggtgggcgcttggccaggatggyggcagagaagggggcgagaagtatttggaacatgagagaaaggagagtcaagaatggagtcaagtttctttggcctgagtgagaagctgctgacactggg

SEQ ID NO: 40411 - DNA, 201 bp, Homo sapiens
tctgagatgggcataggcatggctgtgtgtgcatcttgtcctgaccattccacagtggctgttatcacactccatttacaagtaagaggttgggtaactcrtcctaggtcgcaaaagtggctgtggccaggactggagcctaagccttttctgcttccctgtcctttcctgcaggttggctcagaaaaccggaggtgaagc

SEQ ID NO: 40412 - DNA, 201 bp, Homo sapiens
caaggggagccctggtctggggagtctgtagagtgcattgtcttgaactccttttagtccaaataggcactggaatataccaattcccccccccctttttktttttgacactgagtctcgctctgtcgcccaggctggagtgcagtggcacgaacttggctcactgcaacctccgtctcctgggttcaagtgattctcctg

SEQ ID NO: 40413 - DNA, 201 bp, Homo sapiens
caggggacaagagcccaagtgaggctgccaggcgggaggctgctgcaggggaccaggtgagcaaaggtgggcgcttggccaggatggcggcagagaagggkgcgagaagtatttggaacatgagagaaaggagagtcaagaatggagtcaagtttctttggcctgagtgagaagctgctgacactggggaaccgcagcctg

SEQ ID NO: 40414 - DNA, 201 bp, Homo sapiens
ttagtccaaataggcactggaatataccaattcccccccccctttttttttttgacactgagtctcgctctgtcgcccaggctggagtgcagtggcacgawcttggctcactgcaacctccgtctcctgggttcaagtgattctcctgcctcagcctcccgagtagctgggattacaggcatcctccatcacgcccggcta

SEQ ID NO: 40415 - DNA, 201 bp, Homo sapiens
tggccaacctggtgaaaccctgtctctactaaaaatacaaaagttatccgggtgtggtggcgggtgcttgtagtcccagctactcggcaggctgaggcacragaatcgcttgaacccagatggcggaggttgcagtgagccgagatagcgccactgtactccagcctgggcgacagatcgagacttggtttcaaacaaaac

SEQ ID NO: 40416 - DNA, 201 bp, Homo sapiens
gacaaagcatctcacgctttttactctgtgtatacagactaagaatagcaacagacatccagagtacctgtggcattaacatttcatggaggcgtaatgayaactgcaggctgagaaatgccaccctgggtgacggggtctgcgctcccacctgtctccagctcctgccccacactcttccccatggctggctggtctctt

SEQ ID NO: 40417 - DNA, 201 bp, Homo sapiens
tccgggtgtggtggcgggtgcttgtagtcccagctactcggcaggctgaggcacaagaatcgcttgaacccagatggcggaggttgcagtgagccgagatmgcgccactgtactccagcctgggcgacagatcgagacttggtttcaaacaaaacaaaacaaagtgaaatcaggcacagacctttttctgaataagaaaaa

SEQ ID NO: 40418 - DNA, 201 bp, Homo sapiens
gtctcttctctccttaactcaagcatctgctcagacatcccttctgagaaagcccatcccttcctgatcgctgcagctacaatcgcctcttccctctctgsccccatgccctacttgatgtttttgagcccttctctttacaatcctatcatgtatttagtcatttatttgtttactgtctgtcttccctgctggaatgta

SEQ ID NO: 40419 - DNA, 201 bp, Homo sapiens
cctctctggccccatgccctacttgatgtttttgagcccttctctttacaatcctatcatgtatttagtcatttatttgtttactgtctgtcttccctgcyggaatgtaacttccacaagaaaagactgtcttattcctacataatccccagccccaagcaatgcctggcacacagaaagtgtctgatgcataattggtga

SEQ ID NO: 40420 - DNA, 201 bp, Homo sapiens
ttgagtcccgcctcctccagcccatccttcctacaggtgccccatccaaacacaaatctgaccgtgttactctcctgcttaagatacttcacaacttcctrtgtcctgtgggataaaatgcaaacacttgccatcagcacacaaggcaggttacagtgctgcctggcccacatctcccctggcttcagtcacactgaagaa

SEQ ID NO: 40421 - DNA, 201 bp, Homo sapiens
gcattctgtgtagcatcctacgtattcacccattctccatcttctccttcatgcagcagaccatgtgtcaacatatgcggagtttgtgcagacgcacagamcctctggggagtatatgtttgaatttgatgaggaggagcagttctacgtgaacctggatgagaaggagatggtctggcctctaccagagtttattcacac

SEQ ID NO: 40422 - DNA, 201 bp, Homo sapiens
tcttcccaccagtgctgaacatcacgtggctgcgcaatggggagccagtcattgagggtattgcagagaccatcttcctgcccagcaagaaactcagattmcacaggttccactatctgaccctcgttcccatggccgaggacacctgtgacctccagggggagcactggggcctgcaccagcctctcctcaggcactggg

SEQ ID NO: 40423 - DNA, 201 bp, Homo sapiens
ccatccttcctacaggtgccccatccaaacacaaatctgaccgtgttactctcctgcttaagatacttcacaacttcctatgtcctgtgggataaaatgcraacacttgccatcagcacacaaggcaggttacagtgctgcctggcccacatctcccctggcttcagtcacactgaagaactgcagttctccttgcaactt

SEQ ID NO: 40424 - DNA, 201 bp, Homo sapiens
cttcaaatcaactgtatgttttcccctagaagtttaaattcagtatgtctcaaacagaaaattttaccttctctcaatcacttaattatcacctttgcagkcacggatgccacaattctccacgttgcgtggttattctcgacttcttcatatccctacttctggcatgtgatttagtgattcctgtggcctctcatgtca

SEQ ID NO: 40425 - DNA, 201 bp, Homo sapiens
cttctctcaatcacttaattatcacctttgcaggcacggatgccacaattctccacgttgcgtggttattctcgacttcttcatatccctacttctggcaygtgatttagtgattcctgtggcctctcatgtcattactgccatcaaatccatctgctgtcctcctcaccccatgttcctgccctggcctacgccttcatt

SEQ ID NO: 40426 - DNA, 201 bp, Homo sapiens
tcatggtttcgaatacccaacacctcccacatccaaggccagcccctgctctctgtaccttataactctgtcttcccttggtgccccagaggtccatgaamtaatccaggtgcctgagaccatggagatgctggtctgtgccctcggcctgctggtgggcctggcgggggtccttaatggcaccattgtctcaaagaccaa

SEQ ID NO: 40427 - DNA, 201 bp, Homo sapiens
cctgctctctgtaccttataactctgtcttcccttggtgccccagaggtccatgaactaatccaggtgcctgagaccatggagatgctggtctgtgccctsggcctgctggtgggcctggcgggggtccttaatggcaccattgtctcaaagaccaagcgatctgacagcatccccgggtccaggggctcctatgagtcat

SEQ ID NO: 40428 - DNA, 201 bp, Homo sapiens
gctcctctcagggtggcaactaatgacttttatacaactcaagccagtggtcactgttctgtttctgtcttatgtgtgtcattagtgtgtttgagatgccycctctcctctttcctggaagttttctcctgtctcttgtcttttatgaacccacttcctctctgttttcctaccaatttctagtcctctgcttttcagcct

SEQ ID NO: 40429 - DNA, 201 bp, Homo sapiens
gaaccctaaactctctgtaattcactgtaataataattcactttttgttatcaaccagttgctgcttcttatgtatcaggtaaagctaagatactatcccrtaggtctttcaaatgccaacaacttgtatttccaggtgaaactacacttgaaaactacactccacaagacaattttgtgaatgttatgtgaatgataata

SEQ ID NO: 40430 - DNA, 201 bp, Homo sapiens
actgttctgtttctgtcttatgtgtgtcattagtgtgtttgagatgccccctctcctctttcctggaagttttctcctgtctcttgtcttttatgaacccrcttcctctctgttttcctaccaatttctagtcctctgcttttcagcctctttcttcatgtctgtgtttgtctggatgcaggagcacacactcagatccct

SEQ ID NO: 40431 - DNA, 201 bp, Homo sapiens
cttcttatgtatcaggtaaagctaagatactatcccataggtctttcaaatgccaacaacttgtatttccaggtgaaactacacttgaaaactacactccwcaagacaattttgtgaatgttatgtgaatgataatacttttaaatttactctgcctaaaatgtaagtgttgtggataaaattatagaaggtatcattttt

SEQ ID NO: 40432 - DNA, 201 bp, Homo sapiens
tgctcctctcagggtggcaactaatgacttttatacaactcaagccagtggtcactgttctgtttctgtcttatgtgtgtcattagtgtgtttgagatgcmccctctcctctttcctggaagttttctcctgtctcttgtcttttatgaacccacttcctctctgttttcctaccaatttctagtcctctgcttttcagcc

SEQ ID NO: 40433 - DNA, 201 bp, Homo sapiens
tccttttcctgtaatctggattttcgagttccccagtggggacatgggtccggaggcaggtttttcccctctcacgctttgggaacgcacagtttttcacytgtctggtggagtttgcagtggcccctcccttctttaaaaggatctgtgaattctttcgattttctgggtattctcctgcagtggttcctttcttgaggg

SEQ ID NO: 40434 - DNA, 201 bp, Homo sapiens
tttctttcatttgcatttctcattttctgtgttattccttcatgttcccaataaccttcctgttacctgtttgcttcctgcattctgtgtagcatcctacrtattcacccattctccatcttctccttcatgcagcagaccatgtgtcaacatatgcggagtttgtgcagacgcacagaccctctggggagtatatgtttg

SEQ ID NO: 40435 - DNA, 201 bp, Homo sapiens
gtgtcattagtgtgtttgagatgccccctctcctctttcctggaagttttctcctgtctcttgtcttttatgaacccacttcctctctgttttcctaccamtttctagtcctctgcttttcagcctctttcttcatgtctgtgtttgtctggatgcaggagcacacactcagatccctgctatcctgactttgtgtacttt

SEQ ID NO: 40436 - DNA, 201 bp, Homo sapiens
tttattaactgaatgaaaattaacatttgaagtgtggaatttgcttcaaaatgtgccaacctttagttttcagattttgtaaatataataaatacaaagtracctaagctgaaccaattacatctgtgtagcccagtctatacaccatgtatttttctttttcctttgggattcatttctgtaggtgagtaatcctctaga

SEQ ID NO: 40437 - DNA, 201 bp, Homo sapiens
tcctgttacctgtttgcttcctgcattctgtgtagcatcctacgtattcacccattctccatcttctccttcatgcagcagaccatgtgtcaacatatgcrgagtttgtgcagacgcacagaccctctggggagtatatgtttgaatttgatgaggaggagcagttctacgtgaacctggatgagaaggagatggtctggc

SEQ ID NO: 40438 - DNA, 201 bp, Homo sapiens
cctctggggagtatatgtttgaatttgatgaggaggagcagttctacgtgaacctggatgagaaggagatggtctggcctctaccagagtttattcacacytttgactttggtgctcagaggggtattgctggcatcgtcatggcaaggaagcacttgaacacccggatcaatggtccaaacagacttgggccacaaatgg

SEQ ID NO: 40439 - DNA, 201 bp, Homo sapiens
caaaatgtgccaacctttagttttcagattttgtaaatataataaatacaaagtaacctaagctgaaccaattacatctgtgtagcccagtctatacaccrtgtatttttctttttcctttgggattcatttctgtaggtgagtaatcctctagaccctaaactcagtgggggaccctcaccatccgtgtgcggcactgaa

SEQ ID NO: 40440 - DNA, 201 bp, Homo sapiens
tcctgtctcggcctctcaaatcactgagattacaggtatgggccactgtgcccagcctattatcgattttctcccatttcattcagtcctcaacccaatgyactctctctttttctttccctcatctctgatgctcctctcagggtggcaactaatgacttttatacaactcaagccagtggtcactgttctgtttctgtc

SEQ ID NO: 40441 - DNA, 201 bp, Homo sapiens
ggtatggagcgccctccctctgccctcacggccttggcaccacctttatttcctgggcccatcgcccctcagcacctgccttcctcaatcccatgttttayggtcactttatccaaatttcaccatctcatggtttcgaatacccaacacctcccacatccaaggccagcccctgctctctgtaccttataactctgtctt

SEQ ID NO: 40442 - DNA, 201 bp, Homo sapiens
caactcaagccagtggtcactgttctgtttctgtcttatgtgtgtcattagtgtgtttgagatgccccctctcctctttcctggaagttttctcctgtctsttgtcttttatgaacccacttcctctctgttttcctaccaatttctagtcctctgcttttcagcctctttcttcatgtctgtgtttgtctggatgcagga

SEQ ID NO: 40443 - DNA, 201 bp, Homo sapiens
atcctctagaccctaaactcagtgggggaccctcaccatccgtgtgcggcactgaacctgctgtcacactatgcatctaagtagaggactggttctccccrtgctgggctgggaggggaaatcctcacttagggaccaccaaccatgcagtgtcatttggcttcacttcctcttccaggccgaaccctaaactctctgtaa

SEQ ID NO: 40444 - DNA, 201 bp, Homo sapiens
gtccagctggagggatgggagggcctctctgccacacatagaactagaggccatgatgcccactcatgaatgagccccttccctgagagcgagaaatcttrggtccacacagctgggttcttaggacagcagaggaggaggcattttcttcttactcaagagaaaggctgggctgagggggccaggtcaggagcacgagaa

SEQ ID NO: 40445 - DNA, 201 bp, Homo sapiens
ccatctgctgtcctcctcaccccatgttcctgccctggcctacgccttcattacttcccaccagagggcttaaaagtgctactggtcttgccttgagtccmgcctcctccagcccatccttcctacaggtgccccatccaaacacaaatctgaccgtgttactctcctgcttaagatacttcacaacttcctatgtcctgt

SEQ ID NO: 40446 - DNA, 201 bp, Homo sapiens
aagcgtctttcccaaggagcctgtggatctgggccagcccaacaccctcgtctgccatgttgacaagttcttcccaccagtgctgaacatcacgtggctgygcaatggggagccagtcattgagggtattgcagagaccatcttcctgcccagcaagaaactcagattacacaggttccactatctgaccctcgttcccat

SEQ ID NO: 40447 - DNA, 201 bp, Homo sapiens
taatctggtgtctgaggcctggcagcaccacactctcttcagtgagtcaggctcaagtctgagcacatctgcagagcttatgtttgctgtgttgctcatgkaaggcagggaatccaaaattgttttcttagagatggactctcactatgtttcctaggctgctttcaaactcctggcctcaagtgatcctcctgtctcggc

SEQ ID NO: 40448 - DNA, 201 bp, Homo sapiens
acatttgaagtgtggaatttgcttcaaaatgtgccaacctttagttttcagattttgtaaatataataaatacaaagtaacctaagctgaaccaattacakctgtgtagcccagtctatacaccatgtatttttctttttcctttgggattcatttctgtaggtgagtaatcctctagaccctaaactcagtgggggaccc

SEQ ID NO: 40449 - DNA, 201 bp, Homo sapiens
gagatggtctggcctctaccagagtttattcacacctttgactttggtgctcagaggggtattgctggcatcgtcatggcaaggaagcacttgaacacccrgatcaatggtccaaacagacttgggccacaaatggcactgcctatagctgcctgttcctctcagaggggtattgctggcatcgtcatggcaaggaagcac

SEQ ID NO: 40450 - DNA, 201 bp, Homo sapiens
tagtgattcctgtggcctctcatgtcattactgccatcaaatccatctgctgtcctcctcaccccatgttcctgccctggcctacgccttcattacttccyaccagagggcttaaaagtgctactggtcttgccttgagtcccgcctcctccagcccatccttcctacaggtgccccatccaaacacaaatctgaccgtgt

SEQ ID NO: 40451 - DNA, 201 bp, Homo sapiens
ccaatggcagtaggctccttgggttctatccccttttggagcccccaccgaggtaagcgtctttcccaaggagcctgtggatctgggccagcccaacaccytcgtctgccatgttgacaagttcttcccaccagtgctgaacatcacgtggctgcgcaatggggagccagtcattgagggtattgcagagaccatcttcct

SEQ ID NO: 40452 - DNA, 201 bp, Homo sapiens
aattacatctgtgtagcccagtctatacaccatgtatttttctttttcctttgggattcatttctgtaggtgagtaatcctctagaccctaaactcagtgrgggaccctcaccatccgtgtgcggcactgaacctgctgtcacactatgcatctaagtagaggactggttctccccatgctgggctgggaggggaaatcct

SEQ ID NO: 40453 - DNA, 201 bp, Homo sapiens
gcacgcccctcacgcccagtgcctcccctccctgttccccaccaggcactgcaacatggtgctggagaacgtgaaggagatgtggactgaggtacccaagrgtggcaagggcaagaagaagtccaagccagtcaacaaagaccgctacatctccaagatgttcctgcgcggggactcagtcatcgtggtcctgcggaaccc

SEQ ID NO: 40454 - DNA, 201 bp, Homo sapiens
agcctctctcacttattggttccatgtttgtccatgcaggagcctcctcaacaagcccaagagtgagatgaccccagaggagctgcagaagcgagaggagkaggaatttaacaccggtccactctctgtgctcacacagtcagtcaagaacaatacccaagtgctcatcaactgccgcaacaataagaaactcctgggccg

SEQ ID NO: 40455 - DNA, 201 bp, Homo sapiens
aagccagtcaacaaagaccgctacatctccaagatgttcctgcgcggggactcagtcatcgtggtcctgcggaacccgctcatcgccggcaagtaggggcmgcctgtctgttgacagaactcactcctctgtcctatgaagaccgctgccattggtgttgagaataataaagctctgtgtttttttctagtggtatctgtt

SEQ ID NO: 40456 - DNA, 201 bp, Homo sapiens
agcttggtcatcccggcctagcacctgcacccttccccaagccatgctgctggagggggcgagcagcaggcagtagggggcactgtcagaggcacgccccycacgcccagtgcctcccctccctgttccccaccaggcactgcaacatggtgctggagaacgtgaaggagatgtggactgaggtacccaagagtggcaagg

SEQ ID NO: 40457 - DNA, 201 bp, Homo sapiens
agctgcagaagcgagaggaggaggaatttaacaccggtccactctctgtgctcacacagtcagtcaagaacaatacccaagtgctcatcaactgccgcaayaataagaaactcctgggccgcgtgaaggccttcgataggtgagtgctgggtcctgggaggtgttctccgcaggcctggagaggccactccagctccagtc

SEQ ID NO: 40458 - DNA, 201 bp, Homo sapiens
ctgaaatcgcaccactgcattgcagcctgggcaacagagtgagattctgtctcaaaaaagaaaatgataattttcaatggccctgtgaggaaggtaacgtsattatcttccctcttaaaaaggagcaaactggcacagagaggtgcagtcctttgcctcagcctcaacctaaggactggcagagttgctttggcagcttgg

SEQ ID NO: 40459 - DNA, 201 bp, Homo sapiens
ggttggggagacactgaagccaaggccctgatcacccatcctcacagctccagcctctcaactccagcctctctcacttattggttccatgtttgtccatrcaggagcctcctcaacaagcccaagagtgagatgaccccagaggagctgcagaagcgagaggaggaggaatttaacaccggtccactctctgtgctcaca

SEQ ID NO: 40460 - DNA, 201 bp, Homo sapiens
gtggaggtggtgcatgcctgtagtcccagctcctcaggaggctgaggcaggagaatcgcttgaacccaggaggcagaggttgcagtgagccgagatcacaycactgcgctccagcctgggcaacagatcaagactccgtctcaaaaaaaaaaaaaatgtctgttaggcatctagctgatgatactcagaaggctgaacagg

SEQ ID NO: 40461 - DNA, 201 bp, Homo sapiens
tgacctcagtccattgtatttagcacaacagcatttaatgttaattggagcagagacctgaatcagtcattaaaatcatctccatatatacaacaaagaaracataccagcaatatatggcccatagtcatttattatccaatgtaggtgataatctgagggcgtgagttcaattaatgcataccaatgtacagcactgtg

SEQ ID NO: 40462 - DNA, 201 bp, Homo sapiens
aaataggtgaaattactcaaaatttttggaaaaaaagaataagatacattatccagtattaaattttactgtaattaaatatgatttggtttctattaagscataagaaaaaagattaatgaagcaaatagaaaattcccagacaaaataaataaaatacttgcatatatgatgatgacattttttaaaaataaatcttga

SEQ ID NO: 40463 - DNA, 201 bp, Homo sapiens
ctctcctcaggtccctcctcttacttctgactctcctcatcaagaaataacctctatccccacaggctggaatccctcatttgttacctagggcaccaggmaatcaccttttacccactaagtgaaccaaccagaccaaaatagcaatgcaaaggctttgaaaactatattgtcagctgagcacggtggctcatgcctgta

SEQ ID NO: 40464 - DNA, 201 bp, Homo sapiens
tgaatggtttagccacatgtcatcactactgacaggtaatcggcccagatctcatgagctactggcgctggcctccttttatatatttgaattttcctgawacataaaaggagaccaaaaaaaaaagtcattggtatgtcagaaatacagcaattggtatgtcattggtatgtcagaagtacagcaattaaaaatatacaa

SEQ ID NO: 40465 - DNA, 201 bp, Homo sapiens
acagtgctgagaaaagtgcctggcacataagaaaggttcagtaaacattaaacatttgtattattcaatactcagtgataattatttatcctttcacctawatttaggaattttcttaaacaaattaagcaaattttggagctcaaaataatatttgagaaaaagtaatttggtttcatttgtttatgcctggctgctggt

SEQ ID NO: 40466 - DNA, 201 bp, Homo sapiens
agcccacatgagcaggcatgaatggtttagccacatgtcatcactactgacaggtaatcggcccagatctcatgagctactggcgctggcctccttttatrtatttgaattttcctgatacataaaaggagaccaaaaaaaaaagtcattggtatgtcagaaatacagcaattggtatgtcattggtatgtcagaagtaca

SEQ ID NO: 40467 - DNA, 201 bp, Homo sapiens
tctgaacctcttacttgctccctgaccttgggacacagacttccatgagagttggttgattgggccaactgtgcaccaacctccgaagactaaggagagtrcagatctgacggcaatacccaaggatttcactctcatgatgaaggcactattgtacaatggctcacagctacggtgctgatgtcagaccctccaggttca

SEQ ID NO: 40468 - DNA, 201 bp, Homo sapiens
tagctagcaggctagcactttggagctttcagagataaatgagaggacttaggacacaataaactactcttaaggaagtcacattctaagtggaaggagcrgagagccaaaactaccatagctccatgccatcatgtgtcactttcaaaatggaaagatacagtcaagagggattactattctgtttaactgtgcagcatt

SEQ ID NO: 40469 - DNA, 201 bp, Homo sapiens
ctcttaagattgtggcttggactgaaaagatgatggataagtatcctgaaatggtctctcgtattaaaattggatctactgttgaagataatccactatawgttctgaaggtaaaaataactcaagaaccactaattcttattactgttgaaaaacatgaatttaaaagttactttgtaacacaactaagctaattctgag

SEQ ID NO: 40470 - DNA, 201 bp, Homo sapiens
gagattgagaaacagtttgatgttaaagaagatatcccaggcaggcacagctacgcaaaatacaataattgggaaaaggtacagtaaaaaatgcctgtacwtttttttaagttacccttaatatttattgtcattttgttttcttttattctaatttctcaaaattgattttgctcttaagattgtggcttggactgaaaa

SEQ ID NO: 40471 - DNA, 201 bp, Homo sapiens
tgggcatcaggagaatccagtcccatttataagtcaccctgacagtgactctgccttcctgaaacatctttccccagtgcatgcacgcgcgcacacgcgcrcacacacacacacacacacacaccccagagcctacgatagtcacatatattggcccatagttctccagtcctttgttgctttctaaaagcagcaaaggat

SEQ ID NO: 40472 - DNA, 201 bp, Homo sapiens
atgtgggcatcaggagaatccagtcccatttataagtcaccctgacagtgactctgccttcctgaaacatctttccccagtgcatgcacgcgcgcacacgygcacacacacacacacacacacacaccccagagcctacgatagtcacatatattggcccatagttctccagtcctttgttgctttctaaaagcagcaaag

SEQ ID NO: 40473 - DNA, 201 bp, Homo sapiens
ggagagagagagaaagaagagtagaaacacaaaatgagatatggcattactgtatataatcgactgcatatttaagtctttttttttttttttttttttttagacggagtctcgctctgtcaccaggctggagtgcagtggcgcaatcttggctcactacaacctccgactccctggttcaagcgattctcctgcctcagc

SEQ ID NO: 40474 - DNA, 201 bp, Homo sapiens
acttgggtatgttgaaagaatttcacattttaatgtcaaagaaaagaactaatgaaatttgccttgaagttaaaatcatgatctttagattgatttttcaytgataaaagtatatagataataaattcctttaatgtgattctcaggaggaaaaaaaaatcaggaagaaatgtctaggaaaggcataatagaagtctatta

SEQ ID NO: 40475 - DNA, 201 bp, Homo sapiens
ttgaatcaaaaattgtaagtctgtttgatgtgatgttcaatgtatgtagagaagtactcaagacaattgtactttaaaagtgggaagggaaaaaggatctraaaggaagtaaagtttctacacctcacttgacatagtaaaatgtcaataccattagactgtggtaagttatgtatgtgtattatagtacctggagcaacc

SEQ ID NO: 40476 - DNA, 201 bp, Homo sapiens
ggtcaacaagggatcaatgtgtgagtttgttcaaaacaatatctcaagtttacttttaaatagattggggaaaagaatgaaagaagaaaggctatttttayggattgtggcattcacgcacgagaatgggtctccccagcattctgccagtggtttgtctatcaggtaagtgaatcagaagactcccaattctcctttgac

SEQ ID NO: 40477 - DNA, 201 bp, Homo sapiens
tactttaactcaaaaggtctgcttctggctgagataaagaaagagcctgttgatgtcagtgatgttatattgcagagcaggatttactactgctcaccatwaacttgattttatttatgatattgccacaatatctcaaataaactccattgaaatttaaaaatcacgtacataagtgagcaaaaaacattcttattcacg

SEQ ID NO: 40478 - DNA, 201 bp, Homo sapiens
taggaactggccaagtttattaaaatgtctaacatatcctaaattacaagacataattcctatttactttacctcctttgctaccaagcttgcatcttagygtgatttctttctcatgaacttaaatccaactagctaaaagtggcaatctgtttgatcactgaagccagtctctatatttcagctcacgtgctccataaa

SEQ ID NO: 40479 - DNA, 201 bp, Homo sapiens
aacatggatatactaacaaacccaaacagactggcaaacaaatatcaaagggaaggcacgtccatcggactgagcctctggggcagacactatacttggaytcagcagttaaaaatcctagtgtttttaacattgttcacattttagacagtcaatttttaacattgtcttttctttgatcaaaggttaaaattagaaaat

SEQ ID NO: 40480 - DNA, 201 bp, Homo sapiens
actgtattttataaatgcatacacatgttttagtaggtacacatggagataaagaaaaggctaagtatcatgttaaacaaattaagttctggccaggcacrgtgatgcacacctgtagtcccagctactcaggaggctgaggtggaagtatcacttcagcctgggacgtcgaggatacagtgagccatgatcatgccaccg

SEQ ID NO: 40481 - DNA, 201 bp, Homo sapiens
atcaccttttacccactaagtgaaccaaccagaccaaaatagcaatgcaaaggctttgaaaactatattgtcagctgagcacggtggctcatgcctgtaaycttagcactttgggaggccaaggtgggaggatcacctgagaacaggagtccgagaccagcctggccaacatggtgaaacccggtctctactaaaaataca

SEQ ID NO: 40482 - DNA, 201 bp, Homo sapiens
gattatgaattatgtatagacatttaaggatatgtcccatggtcccttctgagaacaatatgtgcatacatggttctcattcaacaatagacaggggaaakaattgctttgagaatatgaatgagttattggtcaacaagggatcaatgtgtgagtttgttcaaaacaatatctcaagtttacttttaaatagattgggga

SEQ ID NO: 40483 - DNA, 201 bp, Homo sapiens
cttacatttgggataggaattaattaaatgagttaacatgcataaagcacatagaagggtacttggtatttagcaagtgattattactgtattttataaaygcatacacatgttttagtaggtacacatggagataaagaaaaggctaagtatcatgttaaacaaattaagttctggccaggcacagtgatgcacacctgt

SEQ ID NO: 40484 - DNA, 201 bp, Homo sapiens
aggagtccgagaccagcctggccaacatggtgaaacccggtctctactaaaaatacaaaaattagctaggtgtggtggtacgcacctgtagtcccagctaytcaagaggccgaggcaggagaattgcttgaacctggaaggcagaggttgcagtgagctgaaatcgtaccactccacttcagtctgggcaacaaagtgaga

SEQ ID NO: 40485 - DNA, 201 bp, Homo sapiens
tatggtgtacctagctagcaggctagcactttggagctttcagagataaatgagaggacttaggacacaataaactactcttaaggaagtcacattctaastggaaggagcggagagccaaaactaccatagctccatgccatcatgtgtcactttcaaaatggaaagatacagtcaagagggattactattctgtttaac

SEQ ID NO: 40486 - DNA, 201 bp, Homo sapiens
cagagggtctcaaggcaggcaaagaagaaccatgaggctcatcctgcctgtgggtttgattgctaccactcttgcaattgctcctgtccgctttgacaggkaaatcttacttcctgtgttccagtctctgtgtagaagagaattaaaggttgtttccttacagttcactttttttttttcatttgcctccacaaagggaga

SEQ ID NO: 40487 - DNA, 201 bp, Homo sapiens
tctgaaacaaccttcacataacctacaaatgtaacttttcttcaatgagctcaaaacatagatatttaattttaattcctctttagataatacattggccrcacatgtacttggaattttaatatttaagtttcctttctgagtgaaaaataactcacttttttcttttttttttttttgagatggagtctcactctgtca

SEQ ID NO: 40488 - DNA, 201 bp, Homo sapiens
gaccaaactcttggaccgaatgaatttttacattcttcctgtgttcaatgttgatggatatatttggtcatggacaaaggtactgctctctactctcttgyttgcatttagatattatttgctggctttaatacacaatgttatgcattcagcttagggtttaggtaactagttaattctaattcagaaaagtatattttt

SEQ ID NO: 40489 - DNA, 201 bp, Homo sapiens
gcagcttgacttctggtatccaggtgccacccaccacgtagctgctaatatgatggtggatttccgagttagtgagaaggaatcccaagccatccagtctkccttggatcaaaataaaatgcactatgagtaagtccttggcaaatattgaaatttgttggatattcaaagttttgggagccttgaagtagaggaaagtat

SEQ ID NO: 40490 - DNA, 201 bp, Homo sapiens
attcatctgtgagtcacatcatgaattaaaaagttaatttcaaagtacatttcttgtagcttcctttgtgtaccaaaattgctagatctaccactgattcycaacccagtgctctttttccatattctacatattctactttttcaaaatttacattctgaaaaagaaaagttaagacttgtagttcataacaccagatct

SEQ ID NO: 40491 - DNA, 201 bp, Homo sapiens
ataataatggaatctatttcataggggtttcatgaagattgactgggatcgtaaagttgctgtctgcctggtcctttacttctatgaatacacacacacacacacacacacacacacacacacactcacacagaaacagggaataactagaggctatcaccagatgttccattttcctcccagtgaataaatgagtagtat

SEQ ID NO: 40492 - DNA, 201 bp, Homo sapiens
aacaatagacaggggaaataattgctttgagaatatgaatgagttattggtcaacaagggatcaatgtgtgagtttgttcaaaacaatatctcaagtttayttttaaatagattggggaaaagaatgaaagaagaaaggctatttttatggattgtggcattcacgcacgagaatgggtctccccagcattctgccagtgg

SEQ ID NO: 40493 - DNA, 201 bp, Homo sapiens
gacacagtgataatcaacacctaatattaatgtctaactgcctaataataatgttcagtcagatacaaattcatattccagggatatacacagtcctatcmagtgtttcaatcaaatcattctaatgtgtcattccattcatttttttcttctgcttcacatttttacgtattacttacctaagagtataacatgcatgtt

SEQ ID NO: 40494 - DNA, 201 bp, Homo sapiens
tttctcacagattttcaccatgtggcttcatcaatttatgtgctaatacaataaaataaaatgcacttaatgctttaaaattcatctttttatgataaacwatattctctgtatttctctatagcattaataatcaatattaatgccattcattcagtctgttaataagaaataatatcttcaattttcaaaaacataatt

SEQ ID NO: 40495 - DNA, 201 bp, Homo sapiens
gagaaatgtcagtggctaaaagcaacatacagacagtttttcagatatttagtgaaaagagtcatctggagcaaagaaagtgaaaaagtttaacagaaatmcgatgataagcagaggcctgctacatcagacgatgctttagttgctatacaactatgacttcatcactgcacactttcaaggagaaattaccattgcccc

SEQ ID NO: 40496 - DNA, 201 bp, Homo sapiens
ttgttcacattttagacagtcaatttttaacattgtcttttctttgatcaaaggttaaaattagaaaataaagagttgttaatgaaaggtaactcagaaamcaactattaatataataagaaaactcaaatggtacaattaagtaaaatcttacgaggatccatataagattatgtgagaaatgcaaaagagatctatgcc

SEQ ID NO: 40497 - DNA, 201 bp, Homo sapiens
atattccttggtatttacacagtatcctattatttcactctaactttcctttctctccaggccaaagttgcaaagattggcactgatgttctatcaactcratatgaaacccgctacatctatggcccaatagaatcaacaatttgtaagtcattcctcttatttactgagcccttttccctaattattttttacaaatat

SEQ ID NO: 40498 - DNA, 201 bp, Homo sapiens
aaatgactttgctgggggtctatgccaactgtttgatacaatatcttgtatcaggatttccagagtttatagggacatcaggttttgaggactaactaacyagatatttaacttaaatttccaattagaggcagattctgtggctagatgaattgtgatcccattcaatcccaaaattgtggaagaaaaaaattaaccaaa

SEQ ID NO: 40499 - DNA, 201 bp, Homo sapiens
tattgacttataccttgacttctgcctcctaaattgtaagttactgaagacaccagtggcatcttctgcatttttgtaccctgcaacaattactctccccrgtgccaagaaatgtgtcttgtaaatattaaaggtttaataaatatttggtgaccaatttaagagccaacactatctcttcatcaaaatatcccttctctc

SEQ ID NO: 40500 - DNA, 201 bp, Homo sapiens
tcctaaatgtgtgcacaccaatttcacctatgatgtctatgccaataatttaaacattcatttttccaagctctttcttgaatgtctgattgatgttaaaygtatcactttgtcttcctttgccttttctttttcccatcccaatgctctctgagttcccatttaacagtatgttttttccagctacccagattgaaacat

SEQ ID NO: 40501 - DNA, 201 bp, Homo sapiens
tagaggaaagtattacaatggacctatttttaattgggccccccagaacgaaagctctttctgtaagatacagatcacagttacttccaaacacattatcraagcctgtttacagaggtgatagaatcaaacttggcagttcaacatctaccttacatttgctcttagctataagaataacaattacctatatctaccatc

SEQ ID NO: 40502 - DNA, 201 bp, Homo sapiens
catttgtcagagattgcacagtggacaaacccaaacaaatatttcatcccacagctttattacaagagtccatgatgtctctggtataaaaaaaccctcaycccttaaaatgcagtgaaactgatgaatgaatgtcatgaagggaatttaaatatcatagcatcataggactgtagaacagtgtgttaggcatttcaacca

SEQ ID NO: 40503 - DNA, 201 bp, Homo sapiens
tgaaggtaaaaataactcaagaaccactaattcttattactgttgaaaaacatgaatttaaaagttactttgtaacacaactaagctaattctgagctaawacatattatctctgaaagaatatttaagctctagacatccattaaagaatagaaatgacaagcggttttggtggaaccaagaaagtgtctggataaacat

SEQ ID NO: 40504 - DNA, 201 bp, Homo sapiens
actccatctcaaaaaaaaaaaaaaaaaagaatcatcaggaagcttttaaaatacatgaatgattatacccccagcccccagagattctgatttcatcagtytgaggaggagctcggcactcaatttttttttaagtaccttaagtgattctaagatgaaactagggttgagaatcgctgatctaagcaaaacttctcattt

SEQ ID NO: 40505 - DNA, 201 bp, Homo sapiens
gtttaaccatttattttattttgatcttcaaatgccaaatacctggtaaatttgacttttttcatccctagtaatttacatatttacatatatatatgtakgggctttggttttgttaaaaccaggaactgaattccggcttcaccagttgcaactaaccaggaaatagtactgtccatctcatagggttgttatgagtct

SEQ ID NO: 40506 - DNA, 201 bp, Homo sapiens
atgacctgggcatcaaacacacatttgcctttgagctccgagataaaggcaaatttggttttctccttccagaatcccggataaagccaacgtgcagagakaccatgctagctgtcaaatttattgccaagtatatcctcaagcatacttcctaaagaactgccctctgtttggaataagccaattaatccttttttgtgc

SEQ ID NO: 40507 - DNA, 201 bp, Homo sapiens
gggcatcaaacacacatttgcctttgagctccgagataaaggcaaatttggttttctccttccagaatcccggataaagccaacgtgcagagagaccatgytagctgtcaaatttattgccaagtatatcctcaagcatacttcctaaagaactgccctctgtttggaataagccaattaatccttttttgtgcctttcat

SEQ ID NO: 40508 - DNA, 201 bp, Homo sapiens
aaaatgccggaatcaacatatacagtttctaggacttacttattagatgcttctttggcagaactggaaaatgactaaaaaatggacaagtccctttcctygagcacattcattaacaatcacctatcaaccagtcactgttaaggtgctgaagaaaaagtgtagtgatacagatgatccccagcatccacatagatcttg

SEQ ID NO: 40509 - DNA, 201 bp, Homo sapiens
cttatgacaaaggagtttcttgctttctacatcaagtaccaaagtgttaaattacctataaaaattggttttatcaaattaaaacatgaattctacaaagyggcccaaatcagccacagttatgggaaagccaaataattagatagttacctccctcagaaatataaatatgtaaagtgataagtgcagacaagaactact

SEQ ID NO: 40510 - DNA, 201 bp, Homo sapiens
ctctttagataatacattggccacacatgtacttggaattttaatatttaagtttcctttctgagtgaaaaataactcacttttttcttttttttttttttgagatggagtctcactctgtcacccaggctggaatgcagtggtgcaatctcgtctcactgcaacctccgcctcctgggttcaagcaattctactacctca

SEQ ID NO: 40511 - DNA, 201 bp, Homo sapiens
gtctaaatccagatcctcaaattagtgtgtttttcactgtgtcttatgacaaaggagtttcttgctttctacatcaagtaccaaagtgttaaattacctayaaaaattggttttatcaaattaaaacatgaattctacaaagcggcccaaatcagccacagttatgggaaagccaaataattagatagttacctccctcag

SEQ ID NO: 40512 - DNA, 201 bp, Homo sapiens
tcctgaaatgattctgattcaactagatgtctaaatccagatcctcaaattagtgtgtttttcactgtgtcttatgacaaaggagtttcttgctttctacrtcaagtaccaaagtgttaaattacctataaaaattggttttatcaaattaaaacatgaattctacaaagcggcccaaatcagccacagttatgggaaagc

SEQ ID NO: 40513 - DNA, 201 bp, Homo sapiens
tttaaaataactaaattacattttcttggtcttttgactatgaaatagtttaccctagcaacatgaaaaacaagagacctaagctattagaagaaatgcarttctatgtatcttgtgtgtatagtttttccctggtggttttcaacgaccagtgactccttagctggtttcctcagctgctagcacttgctctgggtactt

SEQ ID NO: 40514 - DNA, 201 bp, Homo sapiens
cactgttaaggtgctgaagaaaaagtgtagtgatacagatgatccccagcatccacatagatcttgctacaacctagccatgctggggactcattacacayacaggtggatgaccacaagatttcaaaatacatgttatgtacccagctatgtgagtggacaaaaagtaagcaaagtaaagaacaagaagacagactagaa

SEQ ID NO: 40515 - DNA, 201 bp, Homo sapiens
cttttttctcctttggtcctctaggcctcttctatcctgaaatgattctgattcaactagatgtctaaatccagatcctcaaattagtgtgtttttcactstgtcttatgacaaaggagtttcttgctttctacatcaagtaccaaagtgttaaattacctataaaaattggttttatcaaattaaaacatgaattctaca

SEQ ID NO: 40516 - DNA, 201 bp, Homo sapiens
tgtatcttgtgtgtatagtttttccctggtggttttcaacgaccagtgactccttagctggtttcctcagctgctagcacttgctctgggtacttgtcctsaacacgtccatctgcaacaatgtgtgcctaggaaataaactcaacttactactcacccaaccaaaatgtaattttttaaacgcagcacacactgggtgga

SEQ ID NO: 40517 - DNA, 201 bp, Homo sapiens
ttttaactacctttctttgctccaagtgaagtttggacccagcagaaagcattattttgaaaggtgatatacagtggggcacagaaaacaaatgaaaaccytcagtttctcacagattttcaccatgtggcttcatcaatttatgtgctaatacaataaaataaaatgcacttaatgctttaaaattcatctttttatgat

SEQ ID NO: 40518 - DNA, 201 bp, Homo sapiens
ggataagcacagtgcctaacctgtaagactccattaaaaaattgcatacatacataattacatattccttggtatttacacagtatcctattatttcactmtaactttcctttctctccaggccaaagttgcaaagattggcactgatgttctatcaactcgatatgaaacccgctacatctatggcccaatagaatcaac

SEQ ID NO: 40519 - DNA, 201 bp, Homo sapiens
aattcacgctgtgcacatgtaccctagaacttaaagtataaaaatatatatttataaaaaaaactaattgataccagcttttaacccttttaacttaatayactaagtttttctgtttttataaatcacatcattaaaattagacacttcaaaaatgtaactacaagactgcagaaatttgtattacattatctgtttaca

SEQ ID NO: 40520 - DNA, 201 bp, Homo sapiens
caaaaaacattcttattcacggctttaaagataacattctattatttgtgatggttattgatgactttttcggttttgttactgtttcaagaaggttgtgrcagaaatgtaaaagttaacaaattgaaaatatataattcacgctgtgcacatgtaccctagaacttaaagtataaaaatatatatttataaaaaaaacta

SEQ ID NO: 40521 - DNA, 201 bp, Homo sapiens
catgttggtcaggctggtctcgaactcccgacctcaggtgatccgcacctcagccttccaaagtgctgggattacagtcgtgagccacaacacccagcctsgaaattattttgatctgaatgctatacttctgagctcatataccaaatttttgaaattgtcagctagaggaagagaaaggaaaaaaaaaatctgcacctg

SEQ ID NO: 40522 - DNA, 201 bp, Homo sapiens
aaaaaaatcaggaagaaatgtctaggaaaggcataatagaagtctattacaacacagctcattgtggggtttaacatttaccatgggttgtacggtaaaaycatgcacggaaaaagcccaatagaatagcaaagacatttactagtcctgccccccagatatcagatttaagaagatacattgtatttttatcctgatcaa

SEQ ID NO: 40523 - DNA, 201 bp, Homo sapiens
ttgaaaccagaaggcggaggttgcagtgagccaagatcacgccactgcacttcagcctgggtgaaagagcaaaactccatctcaaaaaaaaaaaaaaaaaagaatcatcaggaagcttttaaaatacatgaatgattatacccccagcccccagagattctgatttcatcagtctgaggaggagctcggcactcaattttt

SEQ ID NO: 40524 - DNA, 201 bp, Homo sapiens
ctgtcaatgcccatgggactacaaaagactattgaacataaggggaaagcaggagctatctggataattcagccaatggccaatacttcacctgttctggktttggtcttggtttccaagactaccacttctgtttttcctcccaaaagcttttcaaacaccagctttttcaaggtaaaactatgaaatcaggagctgttc

SEQ ID NO: 40525 - DNA, 201 bp, Homo sapiens
ctttgacaggtaaatcttacttcctgtgttccagtctctgtgtagaagagaattaaaggttgtttccttacagttcactttttttttttcatttgcctccrcaaagggagaaggtgttccgcgtgaagccccaggatgaaaaacaagcagacatcataaaggacttggccaaaaccaatgaggtaagcatttagagggata

SEQ ID NO: 40526 - DNA, 201 bp, Homo sapiens
aagtaggaaatattttcttaatgttgaacatactcagaatatgctgtcaacaaaaacaaaattatcttatagaactgagtaaagacttggtattggctagwatatagagtggcacataggtagcacagtacaatgattaacaacatgaactctgaagacaccacctgggcttgaatcctgattcgaccatctactagctat

SEQ ID NO: 40527 - DNA, 201 bp, Homo sapiens
gatacaatttttcagaaaacactgtatcaagtaagcaataaatgcagcacacattaagtcaccaacgtcactttatatggatccctttgggctgaaatcasatttctagtttggtacggtttcattttgatttgttctcattgaatttgttgcaaccaatattgtgccttgaaataagtaggaaatattttcttaatgttg

SEQ ID NO: 40528 - DNA, 201 bp, Homo sapiens
ctgtcaaacagaatcttgattcatgatctacaagaagagattgagaaacagtttgatgttaaagaagatatcccaggcaggcacagctacgcaaaatacartaattgggaaaaggtacagtaaaaaatgcctgtacttttttttaagttacccttaatatttattgtcattttgttttcttttattctaatttctcaaaat

SEQ ID NO: 40529 - DNA, 201 bp, Homo sapiens
ttacagagaaaatatttcagtgtatgcccatgtatctctggcttcagctcttgcttctaatataattttcacttagtattaatataaaagtacaggttatyatattgaatacatttaaataatattttttaaaacgatacaatttttcagaaaacactgtatcaagtaagcaataaatgcagcacacattaagtcaccaac

SEQ ID NO: 40530 - DNA, 201 bp, Homo sapiens
caatcaaatggaatcctaaaaatgtcatgtaaccaagaggaaggtgtaaagcaagaaaaaaaagataaagggataaaaacagaaagaacaaaaaaaaaaaaagaaataatggcatgtttaagtcatatcaataatttacctacacgcactaattaaagacacatgggcagaatgaattttttaaattataattcaacaata

SEQ ID NO: 40531 - DNA, 201 bp, Homo sapiens
cctgtctctactaaaaatacaaaagttagccaggtgtggtggcaggcgcctgtagagaggagaagcacttggacctgggaggcagaggttgcagtgagccragattgtgtcattgcattctcgcctgggtgacagagtgagactccatctcaaaagaaaaaaaaaaatactatattgtcatcagtatcacaagacacaaaa

SEQ ID NO: 40532 - DNA, 201 bp, Homo sapiens
cctgaccaatatggtgaaaccctgtctctactaaaaatacaaaagttagccaggtgtggtggcaggcgcctgtagagaggagaagcacttggacctgggakgcagaggttgcagtgagccaagattgtgtcattgcattctcgcctgggtgacagagtgagactccatctcaaaagaaaaaaaaaaatactatattgtcat

SEQ ID NO: 40533 - DNA, 201 bp, Homo sapiens
cataaaatattttaaaatttttaagaggttacaattttcattctgacctcagtccattgtatttagcacaacagcatttaatgttaattggagcagagacytgaatcagtcattaaaatcatctccatatatacaacaaagaagacataccagcaatatatggcccatagtcatttattatccaatgtaggtgataatctg

SEQ ID NO: 40534 - DNA, 201 bp, Homo sapiens
ctggatgagcgggtcaccctcgctgatgacacagcagtgggcgggacagataggggagacgtggggtcctgggggtggcctgaaaatcacactctggagcrtgggcagggcttcacggcacacccagcgagggccaggttgccccaaagcgggacctctagtgaaggtctccgcagagggcgtgtcggggcagagccctga

SEQ ID NO: 40535 - DNA, 201 bp, Homo sapiens
cggcggggcgggctaggggcgctgtgttcgttgcaggggcagcggggagccctggatggttgtgaatggagagagggtctagtctgatgtgcatttgggcrgcccaggctggctgtcgacaggatttggtgggggaggttggggcgggtgcccccgatgctgcttcagagccacgggtctctttgtggacatcagcatctt

SEQ ID NO: 40536 - DNA, 201 bp, Homo sapiens
gggcccagtgaggcccagtatgttgcattttttgcccttgagggacgtgatgtggctgctccagcctgggaccccccagctcctggacacagaggggtgaccccctccccgttcagtccatgcagttaacgcccgcctgagcccgggggtggtggaggatgcagagctccaaggcctgagttggtggcaccctcctcattg

SEQ ID NO: 40537 - DNA, 201 bp, Homo sapiens
atggttgtgaatggagagagggtctagtctgatgtgcatttgggcggcccaggctggctgtcgacaggatttggtgggggaggttggggcgggtgcccccratgctgcttcagagccacgggtctctttgtggacatcagcatctttccggggagtgggggcctcgggttggggcctctgaagctgtgtccttcctgcctc

SEQ ID NO: 40538 - DNA, 201 bp, Homo sapiens
ctgtttgaaacggcgagaagaggaaaaggtgtcaggtgtggttggagacccccagatggtgctttcagctccccacccaggcctgagcgaagcccacaacyccgccgggcacatgtgaaaggtatgcctccgtgggacgagccacccgctttcagccctgtgctctggccccagaacggccactcgagaccccgggcttca

SEQ ID NO: 40539 - DNA, 201 bp, Homo sapiens
gcctgcacccctcagccgagctctggagtcccccgggccaggcgggcttcgggcccatgctgggtgggggctcatccccgctgcccctcccgcccggtagyggcccggtgggcagcagtggaagcagcagcacgtttggtggcctgcaccagcacgagcgtatggtaggacccagggcagggggcagggggtgggcggagg

SEQ ID NO: 40540 - DNA, 201 bp, Homo sapiens
tgcccagagcccagccatgtcccacctgccacccccacgggtggggcccaggccatagccaggcagcttggagagggcaggcgggggtcccggggaggcayggggggcttttgccataacctcagtctcctatggcctcagttttctcacccgaggagccgggcgagtgactgctgtggccgggtgtggcctgtggggtgg

SEQ ID NO: 40541 - DNA, 201 bp, Homo sapiens
  misc_feature (1)...(201): n = A,T,C or G, or insertion/deletion polymorphism (see Tables 1-2)
ggacgaggccatccacgtgctccgcagccacgccgtgggcacagccggcgacatgcacacgctgctgcctggccacggggcgctggcctcaggtttcaccngccccatgtcgctgggcgggcggcacgcaggcctggtgagcgctgggcgagggtggagctgggcagtgggcggggacccggctccccctgatgcacccgt

SEQ ID NO: 40542 - DNA, 201 bp, Homo sapiens
  misc_feature (1)...(201): n = A,T,C or G, or insertion/deletion polymorphism (see Tables 1-2)
acgaggccatccacgtgctccgcagccacgccgtgggcacagccggcgacatgcacacgctgctgcctggccacggggcgctggcctcaggtttcaccggncccatgtcgctgggcgggcggcacgcaggcctggtgagcgctgggcgagggtggagctgggcagtgggcggggacccggctccccctgatgcacccgtct

SEQ ID NO: 40543 - DNA, 201 bp, Homo sapiens
gcccagacgaggacgaggacgaccttctccccccagagcagaaggccgagcgggagaaggagcgccgggtggccaataacgcccgggagcggctgcgggtscgtgacatcaacgaggcctttaaggagctggggcgcatgtgccaactgcacctcaacagcgagaagccccagaccaaactgctcatcctgcaccaggctg

SEQ ID NO: 40544 - DNA, 201 bp, Homo sapiens
cagtggttcatgcctataatcccagcactttgggggaccaaggcggaaggatcgcttgagcgcaggagttagagaccagcctgggtaacacagcaaaaccycatctctactaaaaatacaaaaattagctgggcgtggtggcgcacacttggggtcccagctactcgggaggctgaggcaggaggattgctggagcctggg

SEQ ID NO: 40545 - DNA, 201 bp, Homo sapiens
caggaacctgccaatgtttgcagatgtattttctgtggttcccacagagtctcgccctgtgctccggccctgccccaatgctgcaggttgggagggtctcrccttgtcccctcacacgttagggcggaggctttggagggcccagtgaggcccagtatgttgcattttttgcccttgagggacgtgatgtggctgctccag

SEQ ID NO: 40546 - DNA, 201 bp, Homo sapiens
ctctgctgtccccttcccgcctcaccccgtgagctctgctgtccccttcccgcctcaccccgtgagctctgctgtccccttcccgcctcacccccgtgagytctgctgtccccttcccgcctcaccccctgtgagctctgctgtcccctttccgcctcaccccgtgagctctgctgtccccttcccgcctcaccccgtgag

SEQ ID NO: 40547 - DNA, 201 bp, Homo sapiens
ctgttcctccctttcccgggggtagggggcctcagaggaagcccggggttggttggaaatgagagagttggagaaaggagaggttctggctgccctgcgtrcagtttaaacttggcaacttgatgccctggtgttccctgggggagttagggagtttatatttgcacaccctccccccatttttcagactccctgtggtct

SEQ ID NO: 40548 - DNA, 201 bp, Homo sapiens
agaggatggcgcctgtgggcacagacaaggagctcagtgacctcctggacttcagcatggtgagccaggacccccgcccagcccccgacacccctttgccyccacagttcacgggaaggttttcaggggagagtgtttgctgaatacttcagcgatggagcctcagctgtttggatgggaggccccggtggggctggggga

SEQ ID NO: 40549 - DNA, 201 bp, Homo sapiens
tggtacagtggggccatgtgttatgggttcctggagaagcccagggaccttggtttgtttcttctggcctgtctacagatgtccttaaattctgctccccaccccccccatgcccagtggcagcgtttggggttgaaacaggttgggggagggcactttcagtctgaatttaaccctcccgcctatgaggcacaggccact

SEQ ID NO: 40550 - DNA, 201 bp, Homo sapiens
ctattggaattgattcaactctactgttgcagcaaaagcagccgttgatagtacatggacaaacgggcatagtgtgtgccaataaaactttatttaaaaarcagcttaggggccagacttggtccttgtgtactgtttgcagatccctgctgcagaccaatctcagtcctacccggtatttactaagcgccttttgaagcc

SEQ ID NO: 40551 - DNA, 201 bp, Homo sapiens
ctcccatttgccaacgagccaccaggcaaagaccagtccccggtccctctcaggaggggacccaacagggaccgggactgggaaaccaccagcctggagcrttccttggctacggatggcctctctgaagcagcatctttcattgttatcctcacggcagcccaggcaggtgggcggcttccacaccccgtgactggaatt

SEQ ID NO: 40552 - DNA, 201 bp, Homo sapiens
gcagcgtcacttgagggcacgcgagtcctcagagtcttctggtctgtgatggggcggagcaggacgggccgggcctagatggagcgcagtctcaggttccygggtgtccccagctctgctcccagcttgggtttgaacccgggactgtagggtttggtttgccacccgccccgctcacgtctcccctcccctccctgcaga

SEQ ID NO: 40553 - DNA, 201 bp, Homo sapiens
ctccccccagagcaaaggcagggggaacagcgagttttcagcggcagggactctgcctggcggtacagcggggtcatcgtctggagttttctcactctggkcgtgggtgtccagggtgcagcgtcacttgagggcacgcgagtcctcagagtcttctggtctgtgatggggcggagcaggacgggccgggcctagatggag

SEQ ID NO: 40554 - DNA, 201 bp, Homo sapiens
attcacccagcgcgaggaggaagaaacagcagttcctgggaaccacaattatggggggtggggggtgtgatctgagtgcctcaagatggttttcaaaaaawtttttttaaagaaaataattgtatacgtgtcaacacagctggctggatgattgggactttaaaacgaccctctttcaggtggattcagagacctgtcctg

SEQ ID NO: 40555 - DNA, 201 bp, Homo sapiens
gctgggtgaggctgggttaggaagggttccacaagccccccgggtccactgaggtttgcccctgagatgatgaaccgaagcttttagagctgggcaggcgygagggtgacccataactctctctgtcctgcctgcaggtcttgaggaccggcccagctcaggctcctggggcagcggcgaccagagcagctcctcctttga

SEQ ID NO: 40556 - DNA, 201 bp, Homo sapiens
catctaacccaccctcctcctgcctgaccccccagggctaccagctgcatggagcagaggtgaacggtgggctcccatctgcatcctccttctcctcagcscccggagccacgtacggcggcgtctccagccacacgccgcctgtcagcggggccgacagcctcctgggtatggcccctccctgggatgcggcctctccga

SEQ ID NO: 40557 - DNA, 201 bp, Homo sapiens
aacctcaaggccagctcaatgcctggtatctgcccccagtccaggccaggcggaggggaggggctgtccggctgcctctcccttctcggtggcttcccctrcgccctgggagtttgatctcttaagggaacttgcctctccctcttgttttgctcctggccctgcccctaggtctgggtgggcagtggccccatagcctct

SEQ ID NO: 40558 - DNA, 201 bp, Homo sapiens
tccaggaacgtcacagtggcctcgagcaggagcccccggtgccttatcgcccagctacgacgggggtctccacggcctggtgagtgcctgccccgccccascccacccttccccgacagaatttgcaggacagacgctccttgagaaggagaaacctttttgttagtttcttgtaaataagccccaagctgttattgaggc

SEQ ID NO: 40559 - DNA, 201 bp, Homo sapiens
tcctggaacagtgggtgcagcttccttccaggcggggcctagttggcttcggggacgccacccttcgccaggagtccccaacgctgatggctgatggggtmccccagccgcattctccaccttggccccttcttcatgtgccctgttctagctcccttttaagtcacctcgcttttcttaagttcatttgaaaggaaactt

SEQ ID NO: 40560 - DNA, 201 bp, Homo sapiens
gtaggaagccagggaacagagcgaggtcacccatgcagggccatgcagcacagaggcctgggccgggacccgcacccctgcggcagcagcaacagtgcccrctcgccagctgcatgctgctcggctggagagggggctcagccttgggcctggcacagaacaggctcttggaacctcagagctcctactgcgaccattcac

SEQ ID NO: 40561 - DNA, 201 bp, Homo sapiens
cccactcccttccaggaacgtcacagtggcctcgagcaggagcccccggtgccttatcgcccagctacgacgggggtctccacggcctggtgagtgcctgmcccgccccaccccacccttccccgacagaatttgcaggacagacgctccttgagaaggagaaacctttttgttagtttcttgtaaataagccccaagctg

SEQ ID NO: 40562 - DNA, 201 bp, Homo sapiens
gaggcaaggagaatcacttgagccctggaggttgaggctgcagtgagctgtgattgcgccactgcactccttcctgggcgatagagtaagatccttcctcagaagtaaaggagggggtgcccagtgctgagcggaccaccctccgtgaacagggcagacacaacctgccccatacgggactcccctggtgggcagaggatg

SEQ ID NO: 40563 - DNA, 201 bp, Homo sapiens
tgctccgcagccacgccgtgggcacagccggcgacatgcacacgctgctgcctggccacggggcgctggcctcaggtttcaccggccccatgtcgctgggygggcggcacgcaggcctggtgagcgctgggcgagggtggagctgggcagtgggcggggacccggctccccctgatgcacccgtctccccacgcctgcagg

SEQ ID NO: 40564 - DNA, 201 bp, Homo sapiens
gatctcttgacctcgtgatctgcctgccttggcctcccaaagtcctggtattacaggcatgaggcaccgcacccagccgacccgaggtttttaatatatgraacgggaattgtgagggtctctcctccagggtgtagggcaggggttgttctcatggccggtggccggttctcaccccttttgcttctaacagacacgcag

SEQ ID NO: 40565 - DNA, 201 bp, Homo sapiens
tgggctgatcgtggtccctccgtcctgactgcaccccccaccgcccacccgcccgcaggtgtacccacccagctcaggtgaggactacggcagggatgccrccgcctacccgtccgccaagacccccagcagcacctatcccgcccccttctacgtggcaggtacatggcagggcgggggctcgccagggacggtagggca

SEQ ID NO: 40566 - DNA, 201 bp, Homo sapiens
ctggtacagtggggccatgtgttatgggttcctggagaagcccagggaccttggtttgtttcttctggcctgtctacagatgtccttaaattctgctccccaccccccccatgcccagtggcagcgtttggggttgaaacaggttgggggagggcactttcagtctgaatttaaccctcccgcctatgaggcacaggccac

SEQ ID NO: 40567 - DNA, 201 bp, Homo sapiens
gtgaaaacagcagtgtgggatgcggtcagtctcaagtcagaaaaacacagcaggtgtcacagagaaacaccgtgacaggcagaaggggcatcacccactgmagggcgggtctgagtggcttcggcctttgcagttttttcttgaatggaacagcctggggtctggatgccagctgggcgctttctgaccatccgctcccca

SEQ ID NO: 40568 - DNA, 201 bp, Homo sapiens
ctaccaggaggggacaggaggccggcaaggtgcatgggctgatcgtggtccctccgtcctgactgcaccccccaccgcccacccgcccgcaggtgtacccrcccagctcaggtgaggactacggcagggatgccaccgcctacccgtccgccaagacccccagcagcacctatcccgcccccttctacgtggcaggtacat

SEQ ID NO: 40569 - DNA, 201 bp, Homo sapiens
aaggtcagaagttcagggaggcgggaggtgggggctggaaaaggagtaggagagagagaccaggacatcataagaacctcaaacttggccaggggctgggwtttacctaaaggggggtggctttacagggaagggaaacggggtggtagatgtgctaccaggaggggacaggaggccggcaaggtgcatgggctgatcgtg

SEQ ID NO: 40570 - DNA, 201 bp, Homo sapiens
caccagagtgcaggggcatgatcacagctcacggtagccatgaccccctggcctcaagtgacccttccacctcagcctcccaaagtgctgggatcacaggygtgagtcagccactgtgcccggcctgtgttctttcaaaagcagcgctttgagcacttgcttggacagctcttggactaaaatgagaatgataaagattag

SEQ ID NO: 40571 - DNA, 201 bp, Homo sapiens
gaggcacgtcacagcctcgggctcaggagcactggacggcgccttgaactacccggggcccattccaggcagcacagtcgccaggcatggcggcactcacmtggggtcccagcttctctggaggccgagacaggaggatcacttgaggccaaaagttgcaaaccattctgggcaacatagggagatcccatctttgcgaaa

SEQ ID NO: 40572 - DNA, 201 bp, Homo sapiens
gctccgcagccacgccgtgggcacagccggcgacatgcacacgctgctgcctggccacggggcgctggcctcaggtttcaccggccccatgtcgctgggcrggcggcacgcaggcctggtgagcgctgggcgagggtggagctgggcagtgggcggggacccggctccccctgatgcacccgtctccccacgcctgcaggt

SEQ ID NO: 40573 - DNA, 201 bp, Homo sapiens
tccacgtgctccgcagccacgccgtgggcacagccggcgacatgcacacgctgctgcctggccacggggcgctggcctcaggtttcaccggccccatgtcrctgggcgggcggcacgcaggcctggtgagcgctgggcgagggtggagctgggcagtgggcggggacccggctccccctgatgcacccgtctccccacgcc

SEQ ID NO: 40574 - DNA, 201 bp, Homo sapiens
tggggtcattgtgggcgctgtcctggccctgtgccttccaccagcccaggaatcctgcctgctttccaggcagactttccaagtaccttgattctatcacycctaggccagggcatctcaccgcagcggctctgcccccaggggacactgggtgatgtctggggacatctacagttgtcagggctgaggggagctcctggc

SEQ ID NO: 40575 - DNA, 201 bp, Homo sapiens
catccccccagccttctcaaggaaggaggtgagagccggaaatacaggaggccacacgtgatggggctctgcccccacccccccccccgacatcctacccmccactcccacctcacatctttctcctccctgggaccgtctcccacagagctctcccccctccctccagagcggaacctgaatcccaaagcagcctgtttg

SEQ ID NO: 40576 - DNA, 201 bp, Homo sapiens
tgaaaacagcagtgtgggatgcggtcagtctcaagtcagaaaaacacagcaggtgtcacagagaaacaccgtgacaggcagaaggggcatcacccactgcrgggcgggtctgagtggcttcggcctttgcagttttttcttgaatggaacagcctggggtctggatgccagctgggcgctttctgaccatccgctccccac

SEQ ID NO: 40577 - DNA, 201 bp, Homo sapiens
ccccttcgggcatgaaggggacctcccagtactacccctcctactccggcagctcccggcggagagcggcagacggcagcctaggtgagcggggtctggcyggggcatcgggggcttctgggagggagcctgcaaagggaggtaggaggcttcccgttagctgagggcaccagagggagcagaccccgcaccttccaggtc

SEQ ID NO: 40578 - DNA, 201 bp, Homo sapiens
acctcactgtctccctctggccccctcccggcgccctccccatagcccagacgaggacgaggacgaccttctccccccagagcagaaggccgagcgggagmaggagcgccgggtggccaataacgcccgggagcggctgcgggtccgtgacatcaacgaggcctttaaggagctggggcgcatgtgccaactgcacctcaa

SEQ ID NO: 40579 - DNA, 201 bp, Homo sapiens
tttttttttccagtaaacaaaacctgaaagcaagcaacaaaacatacactttgtcagagaagaaaaaaatgccttaactataaaaagcggagaaatggaarcatatcactcaagggggatgctgtggaaacctggcttattcttctaaagccaccagcaaattgtgcctaagcgaaatattttttttaaggaaaataaaaa

SEQ ID NO: 40580 - DNA, 201 bp, Homo sapiens; identical to SEQ ID NO: 25702

SEQ ID NO: 40581 - DNA, 201 bp, Homo sapiens
tggcacggaccactgtgagattggtccctgggtaaccagagctgtggtgtgtaggccgtgtggacctgagaatgctccctctgggttgcctctccctggaygcccagcccggtcccagcaggaacctgccaatgtttgcagatgtattttctgtggttcccacagagtctcgccctgtgctccggccctgccccaatgctg

SEQ ID NO: 40582 - DNA, 201 bp, Homo sapiens
gtgtgcgcacgtgtgtgtgcgtctgcgcgtgcgtgtctgtgcgtctgcgcgtgtgtgcgtgtctgcgtctgtgtctgcgtgcgtgtgtgtacgcgtgcgtktgtgtgtgtgtgtgtgtgtgtgtgtgtgtgtagttctgtgcagttttgagacatgcaccttctttaagcccaggaatcaccaatctgttcttcatctgta

SEQ ID NO: 40583 - DNA, 201 bp, Homo sapiens
acaaagcagatagaaatgcagttggctgtcccccacagcaggcctttgtttcccaaatgagaggttggcccttggaggtctgggtccaggggaggctgggygcaccggagcctgcgggagggggtgtggtccagggcgaacactgccttcagcgcgggtgccacccctacccgcaagaccgttcttcctctccagggccag

SEQ ID NO: 40584 - DNA, 201 bp, Homo sapiens
ctgcccccaggggacactgggtgatgtctggggacatctacagttgtcagggctgaggggagctcctggcatggagtgggtgggggccagggatgctgctyagcaccctgcagtgcccaggacggccccaccccagagaagggtccggacccacaggtcagcagtttccaggggcagccccaagcttagtctttcacccat

SEQ ID NO: 40585 - DNA, 201 bp, Homo sapiens
ctgcactccttcctgggcgatagagtaagatccttcctcagaagtaaaggagggggtgcccagtgctgagcggaccaccctccgtgaacagggcagacacracctgccccatacgggactcccctggtgggcagaggatgcgggcatgaaactgactgtgtggttaattagtcacacgtgggtgctgaagttaagctgcca

SEQ ID NO: 40586 - DNA, 201 bp, Homo sapiens
gcccccaggggacactgggtgatgtctggggacatctacagttgtcagggctgaggggagctcctggcatggagtgggtgggggccagggatgctgctcascaccctgcagtgcccaggacggccccaccccagagaagggtccggacccacaggtcagcagtttccaggggcagccccaagcttagtctttcacccatag

SEQ ID NO: 40587 - DNA, 201 bp, Homo sapiens
cgctcttcccccaacctcactgtctccctctggccccctcccggcgccctccccatagcccagacgaggacgaggacgaccttctccccccagagcagaargccgagcgggagaaggagcgccgggtggccaataacgcccgggagcggctgcgggtccgtgacatcaacgaggcctttaaggagctggggcgcatgtgcc

SEQ ID NO: 40588 - DNA, 201 bp, Homo sapiens
agccgggtaggagtccccgtgaggcctgagaccctgagtttcctgtccccagagttgggggcgaggggtgtggggaaactgaggctgagagaaggggccasccttccaggggtttggactgggggacatgggtttgagtcctgcctctccagctgtaatgcggggtggagggggggcctgtgaagccccagcacctctcat

SEQ ID NO: 40589 - DNA, 201 bp, Homo sapiens
gtggccaataacgcccgggagcggctgcgggtccgtgacatcaacgaggcctttaaggagctggggcgcatgtgccaactgcacctcaacagcgagaagcsccagaccaaactgctcatcctgcaccaggctgtctcggtcatcctgaacttggagcagcaagtgcgaggtcagtgggggcgcgggccaccagcgtccctg

SEQ ID NO: 40590 - DNA, 201 bp, Homo sapiens
ccccctgtgagctctgctgtccccttcccgcctcaccccctgtgagctctgctgtccccttcccgcctcaccccgtgagctctgctgtccccttcccgccycaccccctgtgagctctgctgtccccttcccacctcaccccgtgagctctgctgtcccctttccgccccaccccctgggcagggcttctgtgggctgcag

SEQ ID NO: 40591 - DNA, 201 bp, Homo sapiens
acgcccgggagcggctgcgggtccgtgacatcaacgaggcctttaaggagctggggcgcatgtgccaactgcacctcaacagcgagaagccccagaccaarctgctcatcctgcaccaggctgtctcggtcatcctgaacttggagcagcaagtgcgaggtcagtgggggcgcgggccaccagcgtccctgcagcgccacc

SEQ ID NO: 40592 - DNA, 201 bp, Homo sapiens
aacgagattcacccagcgcgaggaggaagaaacagcagttcctgggaaccacaattatggggggtggggggtgtgatctgagtgcctcaagatggttttcraaaaaatttttttaaagaaaataattgtatacgtgtcaacacagctggctggatgattgggactttaaaacgaccctctttcaggtggattcagagacct

SEQ ID NO: 40593 - DNA, 201 bp, Homo sapiens
tccctcggcttgggcccctcaccacccatccccccaccctgcagcagagtaagatagaagaccacctggacgaggccatccacgtgctccgcagccacgcygtgggcacagccggcgacatgcacacgctgctgcctggccacggggcgctggcctcaggtttcaccggccccatgtcgctgggcgggcggcacgcaggcc

SEQ ID NO: 40594 - DNA, 201 bp, Homo sapiens
gcgctggcctcaggtttcaccggccccatgtcgctgggcgggcggcacgcaggcctggtgagcgctgggcgagggtggagctgggcagtgggcggggaccyggctccccctgatgcacccgtctccccacgcctgcaggttggaggcagccaccccgaggacggcctcgcaggcagcaccagcctcatgcacaaccacgcg

SEQ ID NO: 40595 - DNA, 201 bp, Homo sapiens
tcacattccgtgcccagtgtcagccagaaggggatttaagtggctcaggtcctgagtaatcggggtgcctgcttcaggcaaggctggatccaggtgtcacygcatcagccccaggccctccacactgggggctcgccccggcaggctgtcctcctccgtagcccaggccctccatgctgggggctcgccttggccagctgt

SEQ ID NO: 40596 - DNA, 201 bp, Homo sapiens
gcggggcagggacggtcctgtctcgctttgcccggcctcgaacttggagtacagtagagtcagttggtgtcctgagtaggaagcgaatagcgtgaaggtckggcgggtgtgtctgagggcccaccacgtgccacgggcgatttctgcccgttccccttacggggtaggtgaggcctggccccgcccccctgccgggggtgg

SEQ ID NO: 40597 - DNA, 201 bp, Homo sapiens
gaaggggccgtgggagcatgaggggaggaatttgccaggcagagagagcagcccgtacggacgccctgcggtgggaccggccggcggggcgggctaggggygctgtgttcgttgcaggggcagcggggagccctggatggttgtgaatggagagagggtctagtctgatgtgcatttgggcggcccaggctggctgtcgac

SEQ ID NO: 40598 - DNA, 201 bp, Homo sapiens
aagaggaaaccccgggagaacctggcgcatgggtcatttcctccgggtgcgtgtctgggagtggaattgctgggtccctggatgctttttcacattgaaarcgtcccttgtgaccgggcgcggtggctcaggcctgtaatcccagcacttgggaggccaaggcaagaggagtacctgggactaggtgttcgagaccagcct

SEQ ID NO: 40599 - DNA, 201 bp, Homo sapiens
gatcaagggtctgttgaagacagtgtgcgggcgagggaggctggggcagcaaaggagggagacaatggggaaagggccacacaggccgggtcgggggcagygagcctgaagacccctgaaatcagctgccgttgcccgtgtgacctgccttgggagcccgagcccctgagcccctcgtcccctcgtccctcccgcgcctgg

SEQ ID NO: 40600 - DNA, 201 bp, Homo sapiens
ccttcccgcctcaccccgtgagctctgctgtccccttcccgcctcaccccgtgagctctgctgtccccttcccgcctcaccccgtgagctctgctgtcccyttcccgcctcacccccgtgagctctgctgtccccttcccgcctcaccccctgtgagctctgctgtcccctttccgcctcaccccgtgagctctgctgtcc

SEQ ID NO: 40601 - DNA, 201 bp, Homo sapiens
agtgaggagatcaagggtctgttgaagacagtgtgcgggcgagggaggctggggcagcaaaggagggagacaatggggaaagggccacacaggccgggtcrggggcagcgagcctgaagacccctgaaatcagctgccgttgcccgtgtgacctgccttgggagcccgagcccctgagcccctcgtcccctcgtccctccc

SEQ ID NO: 40602 - DNA, 201 bp, Homo sapiens
tggatgattgggactttaaaacgaccctctttcaggtggattcagagacctgtcctgtatataacagcactgtagcaataaacgtgacattttataacgawgccctgcagtccccgggttctttctggtgtcacatgtttaggaagggaagtgggggggggccctgacgttcacctcgggtgcagcaaggaccgtggtcca

SEQ ID NO: 40603 - DNA, 201 bp, Homo sapiens
caccacaggagcacaaagagatatgtcagttggccctggaggccgacgcaggcccctgaccctaggcctgttgcagggctagggcgagcaggtgccacggyggccgccagcgagatcaagcgggaggagaaggaggacgaggagaacacgtcagcggctgaccactcggaggaggagaagaaggagctgaaggccccccgg

SEQ ID NO: 40604 - DNA, 201 bp, Homo sapiens
ctgtctccctctggccccctcccggcgccctccccatagcccagacgaggacgaggacgaccttctccccccagagcagaaggccgagcgggagaaggagmgccgggtggccaataacgcccgggagcggctgcgggtccgtgacatcaacgaggcctttaaggagctggggcgcatgtgccaactgcacctcaacagcga

SEQ ID NO: 40605 - DNA, 201 bp, Homo sapiens
gtctccctctggccccctcccggcgccctccccatagcccagacgaggacgaggacgaccttctccccccagagcagaaggccgagcgggagaaggagcgscgggtggccaataacgcccgggagcggctgcgggtccgtgacatcaacgaggcctttaaggagctggggcgcatgtgccaactgcacctcaacagcgaga

SEQ ID NO: 40606 - DNA, 201 bp, Homo sapiens
gcctgctcccagggctccccgtgcccccagggctctgctggaactcagaccccagggcggttgagggttttttaggtggcttttagcactctgtgctttgrccactcacaactcttctcccctccctgtttctccctgtccatctgtccccacatccaccaagcagggtttccaggcctgaggtgcccgccctggccccag

SEQ ID NO: 40607 - DNA, 201 bp, Homo sapiens
tccctctggccccctcccggcgccctccccatagcccagacgaggacgaggacgaccttctccccccagagcagaaggccgagcgggagaaggagcgccgsgtggccaataacgcccgggagcggctgcgggtccgtgacatcaacgaggcctttaaggagctggggcgcatgtgccaactgcacctcaacagcgagaagc

SEQ ID NO: 40608 - DNA, 201 bp, Homo sapiens
ccctctggccccctcccggcgccctccccatagcccagacgaggacgaggacgaccttctccccccagagcagaaggccgagcgggagaaggagcgccggrtggccaataacgcccgggagcggctgcgggtccgtgacatcaacgaggcctttaaggagctggggcgcatgtgccaactgcacctcaacagcgagaagcc

SEQ ID NO: 40609 - DNA, 201 bp, Homo sapiens
cccggcgccctccccatagcccagacgaggacgaggacgaccttctccccccagagcagaaggccgagcgggagaaggagcgccgggtggccaataacgcscgggagcggctgcgggtccgtgacatcaacgaggcctttaaggagctggggcgcatgtgccaactgcacctcaacagcgagaagccccagaccaaactgc

SEQ ID NO: 40610 - DNA, 201 bp, Homo sapiens
tccccatagcccagacgaggacgaggacgaccttctccccccagagcagaaggccgagcgggagaaggagcgccgggtggccaataacgcccgggagcggstgcgggtccgtgacatcaacgaggcctttaaggagctggggcgcatgtgccaactgcacctcaacagcgagaagccccagaccaaactgctcatcctgca

SEQ ID NO: 40611 - DNA, 201 bp, Homo sapiens
gagtgcagtgacacgatctcggctcactgcagcctctgcctcccgggttcaagtgattctcctgcctcggcctcccgagtagctggaattataggcacccrccaccacgcccggctactttttgtattttcagtagagacggggtttcactgtgttggccaggatggtcttgatctcttgacctcgtgatctgcctgcctt

SEQ ID NO: 40612 - DNA, 201 bp, Homo sapiens
ttccttggggtcgcctcccactaaccttccttctccccttgcaggcaagagcggtgagcggggcgcctatgcctccttcgggagagacgcaggcgtgggcrgcctgactcaggtgaggggctcgggccgggctggggtgtattttgattttaaacaaatctgtcacccaccctctctgatctgcagaagctctcctggctt

SEQ ID NO: 40613 - DNA, 201 bp, Homo sapiens
ggtgagtcgcacgagggagaagggaccccacagctcgtcagtggcagtgccaggccctgtgtcctggcgaagcttgggaacacacatggcggggtgggccstgagtggacaggccccctgtgatttctgagccaagatctgagctctgacccgaggccgcctccaagggaaggcggggaagtccttccctaggtccagcct

SEQ ID NO: 40614 - DNA, 201 bp, Homo sapiens
ttggggtcgcctcccactaaccttccttctccccttgcaggcaagagcggtgagcggggcgcctatgcctccttcgggagagacgcaggcgtgggcggccygactcaggtgaggggctcgggccgggctggggtgtattttgattttaaacaaatctgtcacccaccctctctgatctgcagaagctctcctggcttagct

SEQ ID NO: 40615 - DNA, 201 bp, Homo sapiens
ctggcgctactcacagacccctcttcctgttactttagtgaaggacgaatgttgctctgggaccaagggaagctcagcactggaagattgattccagctgrggaacaagggagaaggatgggatggggtgttggagctggggttttgatgggtcgataggagttttctggattaaggaggaaaaaggtttagtaggcagag

SEQ ID NO: 40616 - DNA, 201 bp, Homo sapiens
tgctgctcaggagccagcacaggacaccccccaccccaccccaccatgtccccattacaccagagggccatcgtgacgtagacaggatgccaggggcctgrccagcctcccccaatgctggggagcatccctgggcctggggccacacctgctgccctccctctgtgtggtccaagggcaagagtggctggagccggggga

SEQ ID NO: 40617 - DNA, 201 bp, Homo sapiens
tgaggcaggagaattgcttgaacccaggaggtggaggctgcagtgagccgagatcacgccattgccctccagcctgggtgatggagcgagattccatcttaaaaaaaaaaaaagaatgaagactcaggcctggtgtctggtcccaccccaccacggaacctgggcaagcgccatcctcttctgagcctcagtttccccact

SEQ ID NO: 40618 - DNA, 201 bp, Homo sapiens
cgtttgctcagttgggggtctctgcacctcctggggtactggctatggccggaggggaccagacaacatgcaggtggtatagaggcaaactgagacccagrgggtgccggcgctgtgcccacccctacacagccagcccaccctggcctcagcagctgccctgttcaccagggcccacgtgcaggaccaggatcttggggt

SEQ ID NO: 40619 - DNA, 201 bp, Homo sapiens
tctcttccctgctggtatttgctaccaataaattgctacttttaaaaaacattgtccgaggccagcggatcatgaggtcaggagatcgagaccatcctggytaacacggtgaaatgccgtatctgttaaaaatacaaaaaaattagccgggcgcggtggtgggcgcctgtagtccagcctgggcgacagagccagactcag

SEQ ID NO: 40620 - DNA, 201 bp, Homo sapiens
gttgcaacccttcctttttgttggtgtggcttggcagatctttgtgctcctggttgtatctcctgagtcgcttgtttcaaaactgtctttggtcggcaccrtgttttcagattaaagacgttaagcacccgtccatcttcgttctcagcttttccttccatcgtcttattttgtttttccatctgtgtgctcccaactccg

SEQ ID NO: 40621 - DNA, 201 bp, Homo sapiens
ccgaaatcatcggggaccccttcttgtccccaagcctgtcattgggcaggagatgggcacactgagggcagggctctgcgggagatgggcatactggggcyagggctccccgagatgggcacactggggtcaggctctgccagcatcctgccgtggcgctctcagtcgtgtgcacttactgagagcctattgtaggcacat

SEQ ID NO: 40622 - DNA, 201 bp, Homo sapiens
aaacgtaaagacaactttgtatcactgtcaagagctgataagttgtatccttcgcctaatgggatacccctccccccagagcaaaggcagggggaacagcragttttcagcggcagggactctgcctggcggtacagcggggtcatcgtctggagttttctcactctgggcgtgggtgtccagggtgcagcgtcacttgag

SEQ ID NO: 40623 - DNA, 201 bp, Homo sapiens
atagcccagacgaggacgaggacgaccttctccccccagagcagaaggccgagcgggagaaggagcgccgggtggccaataacgcccgggagcggctgcgsgtccgtgacatcaacgaggcctttaaggagctggggcgcatgtgccaactgcacctcaacagcgagaagccccagaccaaactgctcatcctgcaccagg

SEQ ID NO: 40624 - DNA, 201 bp, Homo sapiens
gggtgtgaccacatccacagcctcccctagagctgagtctgagggcacttgcacctgggcagccagtcgcgtacacacacaggcgccccaccatggggctytgctgcattccagggagcacattcgccgcgtgcacagagaagcacattttcacgcatgtgacaacacacacatcagcatgtggacccgtactgctgccca

SEQ ID NO: 40625 - DNA, 201 bp, Homo sapiens
cagacgaggacgaggacgaccttctccccccagagcagaaggccgagcgggagaaggagcgccgggtggccaataacgcccgggagcggctgcgggtccgkgacatcaacgaggcctttaaggagctggggcgcatgtgccaactgcacctcaacagcgagaagccccagaccaaactgctcatcctgcaccaggctgtct

SEQ ID NO: 40626 - DNA, 201 bp, Homo sapiens
ggccttccaggggatgagggctggggtgccaggagcctcccgtttgctcagttgggggtctctgcacctcctggggtactggctatggccggaggggaccmgacaacatgcaggtggtatagaggcaaactgagacccagagggtgccggcgctgtgcccacccctacacagccagcccaccctggcctcagcagctgccc

SEQ ID NO: 40627 - DNA, 201 bp, Homo sapiens
acgaggacgaggacgaccttctccccccagagcagaaggccgagcgggagaaggagcgccgggtggccaataacgcccgggagcggctgcgggtccgtgayatcaacgaggcctttaaggagctggggcgcatgtgccaactgcacctcaacagcgagaagccccagaccaaactgctcatcctgcaccaggctgtctcgg

SEQ ID NO: 40628 - DNA, 201 bp, Homo sapiens
aggacgaggacgaccttctccccccagagcagaaggccgagcgggagaaggagcgccgggtggccaataacgcccgggagcggctgcgggtccgtgacatyaacgaggcctttaaggagctggggcgcatgtgccaactgcacctcaacagcgagaagccccagaccaaactgctcatcctgcaccaggctgtctcggtca

SEQ ID NO: 40629 - DNA, 201 bp, Homo sapiens
gggttttttaggtggcttttagcactctgtgctttgaccactcacaactcttctcccctccctgtttctccctgtccatctgtccccacatccaccaagcrgggtttccaggcctgaggtgcccgccctggccccaggagaatgaaccagccgcagaggatggcgcctgtgggcacagacaaggagctcagtgacctcctg

SEQ ID NO: 40630 - DNA, 201 bp, Homo sapiens
ccttctccccccagagcagaaggccgagcgggagaaggagcgccgggtggccaataacgcccgggagcggctgcgggtccgtgacatcaacgaggcctttmaggagctggggcgcatgtgccaactgcacctcaacagcgagaagccccagaccaaactgctcatcctgcaccaggctgtctcggtcatcctgaacttgga

SEQ ID NO: 40631 - DNA, 201 bp, Homo sapiens
ggagaatgaaccagccgcagaggatggcgcctgtgggcacagacaaggagctcagtgacctcctggacttcagcatggtgagccaggacccccgcccagcycccgacacccctttgcctccacagttcacgggaaggttttcaggggagagtgtttgctgaatacttcagcgatggagcctcagctgtttggatgggaggc

SEQ ID NO: 40632 - DNA, 201 bp, Homo sapiens; identical to SEQ ID NO: 25696

SEQ ID NO: 40633 - DNA, 201 bp, Homo sapiens
ctcccctccctgcagatgttcccgctgcctgtcaccaacgggaagggccggcccgcctccctggccggggcgcagttcggaggttcaggtaggaccccgcyttcctgccagcgctcgtggagtgaggagatcaagggtctgttgaagacagtgtgcgggcgagggaggctggggcagcaaaggagggagacaatggggaaa

SEQ ID NO: 40634 - DNA, 201 bp, Homo sapiens
ccttctccccttgcaggcaagagcggtgagcggggcgcctatgcctccttcgggagagacgcaggcgtgggcggcctgactcaggtgaggggctcgggccrggctggggtgtattttgattttaaacaaatctgtcacccaccctctctgatctgcagaagctctcctggcttagctaggttatgtttgcttcctgatagc

SEQ ID NO: 40635 - DNA, 201 bp, Homo sapiens
aacatgtacagaatccaaccgagggctttacaaaacaaaaccaaaaagataggaagcagccgggtgcacagacgcttagccacgcagctttgtactttgcrtctcagaatcgggggagcagccccttgggttggccacactggtatctgtttctcagtctttcgttcttcgtgaaaacagcagtgtgggatgcggtcagtc

SEQ ID NO: 40636 - DNA, 201 bp, Homo sapiens
ccgcacccagccgacccgaggtttttaatatatgaaacgggaattgtgagggtctctcctccagggtgtagggcaggggttgttctcatggccggtggccrgttctcaccccttttgcttctaacagacacgcagcccaagaaggtccggaaggtcccgccgggtcttccatcctcggtgagtcgcacgagggagaaggga

SEQ ID NO: 40637 - DNA, 201 bp, Homo sapiens
ggtttttaatatatgaaacgggaattgtgagggtctctcctccagggtgtagggcaggggttgttctcatggccggtggccggttctcaccccttttgctyctaacagacacgcagcccaagaaggtccggaaggtcccgccgggtcttccatcctcggtgagtcgcacgagggagaagggaccccacagctcgtcagtgg

SEQ ID NO: 40638 - DNA, 201 bp, Homo sapiens
gcatgaggcaccgcacccagccgacccgaggtttttaatatatgaaacgggaattgtgagggtctctcctccagggtgtagggcaggggttgttctcatgkccggtggccggttctcaccccttttgcttctaacagacacgcagcccaagaaggtccggaaggtcccgccgggtcttccatcctcggtgagtcgcacgag

SEQ ID NO: 40639 - DNA, 201 bp, Homo sapiens
agtggaattgctgggtccctggatgctttttcacattgaaagcgtcccttgtgaccgggcgcggtggctcaggcctgtaatcccagcacttgggaggccarggcaagaggagtacctgggactaggtgttcgagaccagcctggccaacgtggtgacagcacggcctgtctcatttaataggtgacaaagatcgtgtcctt

SEQ ID NO: 40640 - DNA, 201 bp, Homo sapiens
aaaggtaagtggctaggtgaaaagccggacataaaaggccacataatgtatgactgaaatgtccagaataagcaaatccagagaaaaaacacattaatggktgccaggggctgagagagggtaatgggaaatgttgaaaatgtcttagaattagttttaacagttgtacaattttgtgaatatactaaaaatcactaaact

SEQ ID NO: 40641 - DNA, 201 bp, Homo sapiens
tgagcccagatggggccacagtggcatccgcagcagcagatgagaccctgaggctatggcgctgttttgagttggaccctgcgcggcggcgggagcgggaraaggccagtgcagccaaaagcagcctcatccaccaaggcatccgctgaagaccaacccatcacctcagttgttttttatttttctaataaagtcatgtct

SEQ ID NO: 40642 - DNA, 201 bp, Homo sapiens
ggcaccaccaccttgatctgtcccaaattaaccttgtcacttccccttgcctccctgaaatgtgttccttcctgtctcacattgctttggaatggcagaamctgctcagaaatctgagaaacctcctagaatttttcatcctcctcaccaggatctatcagttttacctcaaaatatcattgacatctgtcccctcccctc

SEQ ID NO: 40643 - DNA, 201 bp, Homo sapiens; identical to SEQ ID NO: 26163

SEQ ID NO: 40644 - DNA, 201 bp, Homo sapiens; identical to SEQ ID NO: 26148

SEQ ID NO: 40645 - DNA, 201 bp, Homo sapiens; identical to SEQ ID NO: 26150

SEQ ID NO: 40646 - DNA, 201 bp, Homo sapiens
tcgaaatatgaccagtcactctgcccgagtgggctccctaagctggaacagctatatcctgtccaggtcagtggtttttgttggtctatggtagtctgatrtttgcccaccctacccttgactgtacacccctgaactgaaccagctctggcttgcttgcatttggtgctgccacagaacctgattcccttctttcctcct

SEQ ID NO: 40647 - DNA, 201 bp, Homo sapiens; identical to SEQ ID NO: 26151

SEQ ID NO: 40648 - DNA, 201 bp, Homo sapiens
ctgtggcctggatcaaagagggcaactacttggctgtgggcaccagcagtgctgaggtgcaggtgagacgtgtccagtgctgtcattctcaccagtcccartgggcttgcacagctggaggatattaatgccaagtcccaatctctgatcctagtgggcttctctctctagctatgggatgtgcagcagcagaaacggctt

SEQ ID NO: 40649 - DNA, 201 bp, Homo sapiens; identical to SEQ ID NO: 26161

SEQ ID NO: 40650 - DNA, 201 bp, Homo sapiens
agtcactctgcccgagtgggctccctaagctggaacagctatatcctgtccaggtcagtggtttttgttggtctatggtagtctgatatttgcccaccctmcccttgactgtacacccctgaactgaaccagctctggcttgcttgcatttggtgctgccacagaacctgattcccttctttcctcctccagtggttcacg

SEQ ID NO: 40651 - DNA, 201 bp, Homo sapiens
tgtcctcatcatcagagctgcccacagaggagagtcacccggtcacattcagctcactgtggtgaagcaccccacaggggcgaggagtttactttttaaatttttttttttgtgtgtgtgtgtgtgtgtgtgtgtgtgtgtgtgtgtgtgtttcactctgccctgttctgaagtttgctttttataactaatggttatata

SEQ ID NO: 40652 - DNA, 201 bp, Homo sapiens
tacaagaaaaaattagccaggtgtggtggtgcacgcctgtggccccagctattcaggtggcttaggtgggagaattgctggagcctgggaggttgaggctrcagtgagcggaaattgtgccactggactccagcctgggtgacagagctgagactctgtctcaaaaaaaaaaaaaaatcataatcctcattcatcaagcat

SEQ ID NO: 40653 - DNA, 201 bp, Homo sapiens
aaattgtttgcacttaaaaatagttgaatgctggtggaaagttactttgcagatgggtgtaaggactcatggccctctgaggtgcggcgtgaagatgcccyttttacccgttgacgtttattttacgtaaaataaactgttgtttccaatgcaatcaactctgtattatatgtataaatattgtaattctgcaattgggga

SEQ ID NO: 40654 - DNA, 201 bp, Homo sapiens
agctgagactctgtctcaaaaaaaaaaaaaaatcataatcctcattcatcaagcatttattgatgactggtatatacaaggcactgctgtctattgtggckgatgtgaagtgtatttaacactcctgtctttaaagagtttggctttgtgtgtgtgtgtgtgtgtgtgtgtgtgtgtgtgtgtgtttggaacagggtctca

SEQ ID NO: 40655 - DNA, 201 bp, Homo sapiens
tggagtgcagtggctcgatctcagcacactgcaacctctgcctcctgggttcaagcagttctctgcctcagactccagagtggctgggactgcaggcacaygccaccacgcccggctaatttttgtattttttagtagagatggggtttcactgtattggccaggctggtctcttaactcctcacctcgtgatccacccgc

SEQ ID NO: 40656 - DNA, 201 bp, Homo sapiens
cttttgtaatagtttcagtaggattggtgccaattttttttttttgaaacggagtcttgctctgtctcccaggctggagtgcagtggcgccatctcggctyattgcaagctccgcctcccgggttcattctcctgcctcagcctcctgagtagctgggactagaggcgcctgccatcacgcccggctaattatttgtatta

SEQ ID NO: 40657 - DNA, 201 bp, Homo sapiens
ctgaagtccaggagtctttgttacatatatttgaaggagaataagttgtgaaagtaacagttgtaaacatattatagatagtctaataatatctaattggstaaggtatgtgaaagtgcttttataaaatgttagatgatgttaagtcacaactgaaaaaacattttaaatcactttgtttttaagatgaaacatcataat

SEQ ID NO: 40658 - DNA, 201 bp, Homo sapiens
gtaacttttttttttgaggtgaagtctcactcttgtctcccaggctggagtgcaatggcgtaatgctcactgcaagctctgcctcccgggttcaagtggtyctcctgcctcagcctcccgagtagctgggattacaggcgcctgccactacacccggcttatttttgtatttttagtagagacagggtttcaccatgttgg

SEQ ID NO: 40659 - DNA, 201 bp, Homo sapiens
attattttttttagtagagattgggtcaggctggtcctgcactcccaacctcaggtgatccgcctgccttggcctcccaaagtgctgggattacaggcgtragccaccgtgccccaccttgcagttaccatttctaccatgtggctaacttgcccgagatttgtaatggttcactttactgatgacatcaaatccaagcta

SEQ ID NO: 40660 - DNA, 201 bp, Homo sapiens
gacgtctcataggcctattttattttttaataggtaatacgttcacatggttcaaaattcaaagagcatgcaatgaagtctctcacactttgccctccagygccaccctgtccccctcctctgaagtaaccagtattaagttcttgtatgtatttccagagatagccaatgttttaatacacaaaattacagatatagttt

SEQ ID NO: 40661 - DNA, 201 bp, Homo sapiens
ttctatctcatcacagctcccatttactgaatagctacactgggctaggcactgaactaggtgctgtcacatgcattgtcccttatgatctcacagatackttgcagaagagggagtggcgcgtcccactttatattatatagagatgagagaggggaatctctgagggatgtagtaacttgccaaggctacacagctggt

SEQ ID NO: 40662 - DNA, 201 bp, Homo sapiens
agggtaatcacatgaacccaggaggtggaggttgcagggagccgagattgcgctactgcactccagcctgggcaacagagctctccgtctcagagagagaraaaaaaaaagaaagttgtgccatgaacattttttttaggttatgtgaggatattcgacatatatgacaaatgactaacagcacaagtgccaagtgagtag

SEQ ID NO: 40663 - DNA, 201 bp, Homo sapiens
gtcactgtgaaatttttacttaacgcatgttacgcactttgtgactgtgtgtctcttctcattttgggatgacatgaaggtgatgttccacacgtcttacrtcttgctatttgctgacgtttgacttattgtcttgcctgcctcccctctgtctaattctctgtgccgcctctcaaagccttgctgcggctaaacgcagcc

SEQ ID NO: 40664 - DNA, 201 bp, Homo sapiens
cagaagctgccttcctcagacagcctgtccgtggccatcgtcccaggccccgctgctcactcgcagcactcggctgagctgccttcagcctgccttgctgyacagcggccgctcccctccactggccgcttttctcctcgctccagtcaggactcccttttgttttgtatcatgctttgtattacacttttcaaggctctt

SEQ ID NO: 40665 - DNA, 201 bp, Homo sapiens
gaactacttgttaccgctcaggtccagacttctacatgtgcaaggttttgagtttgctcaaagacgcctgtaattttgaggtcctcttttctactcattayttatatttgttattggaaagtccaacattagaatacttggttcgatgtcacaggcctctttggaagaaagaaatcttcagaacctgagggggcggtcagt

SEQ ID NO: 40666 - DNA, 201 bp, Homo sapiens
aagttggttcacatcaccagaacatttcatgcagatcaaagaacttgatgacatttccttaggctgcttaaattgtagccaaagcttttgtatgtatgttkgacagtcatttggctaaggagtacttcacttgctcttgaaaatagttactgtaaactcatctttgacatagttggaaatcctggcgcttaaagtttggtc

SEQ ID NO: 40667 - DNA, 201 bp, Homo sapiens
atttggagctttaccctttgtcataaccatgtgaggggctggcctgcatttcttagctttccatatctttgtaccctagtttaaaattgctgcctgtttcygccatccttgtatttgcatacagaattttgcatacatccttgctgactagagtttttttggtgagtatttggctgcatggcaaagggatgattttcctga

SEQ ID NO: 40668 - DNA, 201 bp, Homo sapiens
agatcagatcttgctgtgtcactttagagattctcttttggtttgtagtcacagctgctgtctatgagacctgctgctatttggagctttaccctttgtcrtaaccatgtgaggggctggcctgcatttcttagctttccatatctttgtaccctagtttaaaattgctgcctgtttctgccatccttgtatttgcataca

SEQ ID NO: 40669 - DNA, 201 bp, Homo sapiens
cccagctataactgaggtcccaagccaaactgcacggcaagtctggggcagagatgggtcccgacgtccctgggctgggcccagggttcccggctctgtgrctcacgtgccgcttgtgtgatgtagagactggcttcgggtgccgtgaataaaccatggctgctttctccaggtttgctttggttcctttctgttgtggtc

SEQ ID NO: 40670 - DNA, 201 bp, Homo sapiens
agattgcgctactgcactccagcctgggcaacagagctctccgtctcagagagagaaaaaaaaaaagaaagttgtgccatgaacattttttttaggttatktgaggatattcgacatatatgacaaatgactaacagcacaagtgccaagtgagtagttgcagtgatgaactaatgctgttgaacttccgatgaaggcgag

SEQ ID NO: 40671 - DNA, 201 bp, Homo sapiens
ttcacactgggaaatgagttgcttctgtagtctacttctttgggaatagctttatatttaacttttaagctagtagttgcaaaattttaattctatatatyacgtcatatgagactgcagtgcattatacgagatcatgagtggtaagcttagcatagagcatagccatagcatatgtggaattgttgacaagcgttaagt

SEQ ID NO: 40672 - DNA, 201 bp, Homo sapiens
acttagtggcccctctgcaaatatctgttggctgcctgactccctccgtgaaagccagcagcctaacaccgattttagaaagtaattctaaattaccccaraagggccaaaacgctccttgctggcttggctgactgcaggataaaatgtggagggcctggatagacttgccccttcccatcgagaagcacacaagttttc

SEQ ID NO: 40673 - DNA, 201 bp, Homo sapiens
tcagagctgcccacagaggagagtcacccggtcacattcagctcactgtggtgaagcaccccacaggggcgaggagtttactttttaaatttttttttttgtgtgtgtgtgtgtgtgtgtgtgtgtgtgtgtgtgtgtgtttcactctgccctgttctgaagtttgctttttataactaatggttatatatttggggagga

SEQ ID NO: 40674 - DNA, 201 bp, Homo sapiens
accagcgccatattcttggagtacccagccatcagaaccgtgagccaaataaacttgtttataaattactcagtctggccaggtgcagtggctcacgcctrtaatcccagcactttgggaggccgaggcgggcggatcacctgaggtcaggagttggagaccagcctggccaacatggcgaaaccgtgtctctaccaaaaa

SEQ ID NO: 40675 - DNA, 201 bp, Homo sapiens
tagtgtagtaatgtgatcaaagctcaccgcaacctttaactcctggcctcaagcgatcctcccacctcacactcccaagtagctgggactaaaagggtgcwccaccacacccctggctaatttttacattttttgtagagatggagtctcactatgttacccaggctggtcttgaactcctgggctccagtggtcctgctt

SEQ ID NO: 40676 - DNA, 201 bp, Homo sapiens
acagggtttcaccatattggccaggatggtctcgatctcctgacctcgtgatccgcccgccttggcctcccaaagtactgggattacaggtgtgagccacygcgccgggcctgtacggaggtttttttcagagtttcacacactcttcctccgctgcacctgcttccttggagatatttatttatttatttcagagacagg

SEQ ID NO: 40677 - DNA, 201 bp, Homo sapiens
agaaagacagcaagatttaagagatcacataataatagtaatagctgacattattaataacatattaatcatgttaataatagtgtggattatggataatkatggatattgtgctaacagattatgcagggtctctcttttttttttttttgagacagagtcttgctctgtcaccaggctggagtacagtggggtgatctc

SEQ ID NO: 40678 - DNA, 201 bp, Homo sapiens
ttgggaggccgaggcgggtggatcacctgagcccaggagtttgagaccagcccagccatcatggcaaacccccatctgtactaaaaatacaaaaattagcygggcgtggtggcgggcgcctgtagtcccagctactcggaaggctgaggcaccatgaaaatcacttgaacccaggaggtggaggttgcaatgagtcgagat

SEQ ID NO: 40679 - DNA, 201 bp, Homo sapiens
cctcagccttccaagtagctgagtctataggagcatgctaccacccacacccacctggctaatttttactttttttgtttttggacacagggtcggtctcrctctgttgcccaggctggagtgcactggcacgatctcaactcactgcaacctccgcttcctgggatcaaggggtcttcccacttcagcctcctgagtatc

SEQ ID NO: 40680 - DNA, 201 bp, Homo sapiens
aacaaacaggtacaggcatgaaagaaagacctgagaaatctgcctagtttaggagcttttttagaaggcaagcctgttaatcattcaaatcactaaatcartttgctgtgtgggaattttttcttaattggcagcagtaaaaaggaaaaatttttccccccaaagataaaaatagagtagtttattgtagaaaattggaaa

SEQ ID NO: 40681 - DNA, 201 bp, Homo sapiens
cttccagtcctttcagtagagcctgttgactctgcctctaaatatatccagaatctgaacacttctgcttctaccactaccaccctagtttaaggaagcascgtctctcacttggattattacagaggtctccaactggctgcccacctctatccttgcctcttacagtctgttctcctgatgtcagccagagtgatcgtt

SEQ ID NO: 40682 - DNA, 201 bp, Homo sapiens
ttgtgacctcaagctctttggctcaagggattctcccacctcagtctggtgagtagctgggactacaggcatgagccacactgttggcctcttcttgtacytctgaggtttcatttcttacatatgatttctttttgatactgctgagatttattctggtataaattgtgaggtgagatttcaccccatgttttaaaaaac

SEQ ID NO: 40683 - DNA, 201 bp, Homo sapiens
tctagggctcagcttcctcaagtctcagaggcctgtcctctgaggctctggcctcctgtggcagctccttcctcttctgcctgctctcctcatggcacttytgggttgtttgcttggatattccttctgctttccttgtttttgtcctgtgccctgtatggaggttttttttttttttttttttttttgagacggagtctc

SEQ ID NO: 40684 - DNA, 201 bp, Homo sapiens
aagacagatgccacacatggcctggatccccacccccctggcctgctgtgttggctgggcttttccttggagcatggcccctggtgcttctgccactcctrcctccctgcccacccccgaaaccccatccctcagagggaccgggtatttttcaacatcctcatccagatcaaggccccattgacattggagagaattcaa

SEQ ID NO: 40685 - DNA, 201 bp, Homo sapiens
tccgagcacttcagaatttaccccggcattttgccatatattattttattaaattcttgaggtagattaaaacatcttttcacaatcgaggaagtttagartggggtttcttgtgtgaggagatgtagttttgcaaatttatttaactaaagacagtattaacattgatttaatactgacactaatcattttaccagattt

SEQ ID NO: 40686 - DNA, 201 bp, Homo sapiens
agtaaggaaaatgaagcacagctgagtctaaaccagcttagaagagactgatccacctttttgatcacagggatattatatactccgagcacttcagaatytaccccggcattttgccatatattattttattaaattcttgaggtagattaaaacatcttttcacaatcgaggaagtttagaatggggtttcttgtgtga

SEQ ID NO: 40687 - DNA, 201 bp, Homo sapiens
ttcatgaggaaggaatttataaggattttatatttacaaagtaagaatcaggcctggcataggattacatcacgcctgtaatcctagcacgttgggaggcygaggtgggaggatttcttgaggctaggagttggaaacaagcctggacaacatagtgagaccccatctctacaaaaattaaaaattagctgagtgtggtgg

SEQ ID NO: 40688 - DNA, 201 bp, Homo sapiens
ttataaaactaataagccattgtcctggggtttgaatccagttctgttcaaccctagaaccagagtgcttaacaataagctagggacttatattgtcagtwagcacaggactaggagtctcattgggagctctggtccctgcccaaatctcatgttgattagtaatccctagtattggaggtggggcctggtgggaggtga

SEQ ID NO: 40689 - DNA, 201 bp, Homo sapiens
tggccgtcttgtctgcttcgattgcctcgcctccctggagggttggaagtctcgccctgggttagagaacagggacgcaagacggcttaacaagatctctktaaggcggaaccggggccgggaagcggagcattgagactaggtcagaaagaacctgctcggcacgcagggctactccacctgctgccgcactgacacttc

SEQ ID NO: 40690 - DNA, 201 bp, Homo sapiens
ttcaaccctagaaccagagtgcttaacaataagctagggacttatattgtcagtaagcacaggactaggagtctcattgggagctctggtccctgcccaawtctcatgttgattagtaatccctagtattggaggtggggcctggtgggaggtgattagatcaaggggtggatttctcaggaatggtttagcaccatctac

SEQ ID NO: 40691 - DNA, 201 bp, Homo sapiens
actgactcattctactatctctcacatgtgacttgctaattgactgctgttttctttcatctggagccctgcaaggataagggggaactgggtaagaatgrggaaaggagagcagccttagagagaccagagagagattactgggagagcagtgtgggaattttcaaaggttgaagagactctggggagaagggaaagcag

SEQ ID NO: 40692 - DNA, 201 bp, Homo sapiens
aaggagagcagccttagagagaccagagagagattactgggagagcagtgtgggaattttcaaaggttgaagagactctggggagaagggaaagcagatayaggagctcagcattttccatccctttgtagatgtgcagactatgtctgctctattagacagcattgactcattagggctccttagcctgactagaattta

SEQ ID NO: 40693 - DNA, 201 bp, Homo sapiens
aagactccagtgcctgactcacagccttcctttccactccagttcccgccatcatcttgggtggtttcatcttcatcacatgacccaggaagtaccttggctgctagctttcttggcttccatgtccaccctactaatctcctctagtccacctctggcactctctcccacagtgacatgcgggatcttgtcatcagctga

SEQ ID NO: 40694 - DNA, 201 bp, Homo sapiens
cgagttaccggtaattctgtgaaacatgtaagcatcctttaaaagtatctctttaaaagcagccatttattagagtttttctttcattggctatgtaactrtgttttcactgagaattgcttatttttgagattgtagtctttgacttgatgtcatggaagagtgaggaaattaatgcatcccacagcacctccaaatagg

SEQ ID NO: 40695 - DNA, 201 bp, Homo sapiens
ttttattaaattcttgaggtagattaaaacatcttttcacaatcgaggaagtttagaatggggtttcttgtgtgaggagatgtagttttgcaaatttatttaactaaagacagtattaacattgatttaatactgacactaatcattttaccagatttgagtgactactgtgatagtaataataccaggcaaggtgatgtg

SEQ ID NO: 40696 - DNA, 201 bp, Homo sapiens
cgggcggatcacgaggtcaggagtttgagaccgtcctggctaacacagcgacaccccctctctactaaaaatacaaaaaaatttagctgggtgtggtggcrggtgcctgtagtcgcagctactcggaaggctgaggcaggagaatacttgaacccgggaggtggcgcttgcagtgagctgagatcgtgccactgcactcca

SEQ ID NO: 40697 - DNA, 201 bp, Homo sapiens
tttattaaattcttgaggtagattaaaacatcttttcacaatcgaggaagtttagaatggggtttcttgtgtgaggagatgtagttttgcaaatttatttaactaaagacagtattaacattgatttaatactgacactaatcattttaccagatttgagtgactactgtgatagtaataataccaggcaaggtgatgtga

SEQ ID NO: 40698 - DNA, 201 bp, Homo sapiens
ttattaaattcttgaggtagattaaaacatcttttcacaatcgaggaagtttagaatggggtttcttgtgtgaggagatgtagttttgcaaatttatttaactaaagacagtattaacattgatttaatactgacactaatcattttaccagatttgagtgactactgtgatagtaataataccaggcaaggtgatgtgag

SEQ ID NO: 40699 - DNA, 201 bp, Homo sapiens
tattaaattcttgaggtagattaaaacatcttttcacaatcgaggaagtttagaatggggtttcttgtgtgaggagatgtagttttgcaaatttatttaactaaagacagtattaacattgatttaatactgacactaatcattttaccagatttgagtgactactgtgatagtaataataccaggcaaggtgatgtgagg

SEQ ID NO: 40700 - DNA, 201 bp, Homo sapiens
gggtgtaagcctctaccagtggccagcacccacagtagacactctgattggaagtgagggccagcacgctgctgttgctgcccacagacactgctgcctgyctgccactcaccctgatattgctgagacacagggcgcccccagagaagcacgtgttttccctgctgtcaagcacatgattgacagagaaaaacaatgggt

SEQ ID NO: 40701 - DNA, 201 bp, Homo sapiens
aaaaaaaaaattagctggccatggtggtatgtgcctgtagtcacagctacttgggaagcgaggagggctcttgagccgaagagttaaggttacagtgagcyatgattgtgccactgtaccccaacctgggcaacagaatgagaccctttctttaaaacaacaaaaaaggggagtggggctatgcgccatggctcacacctg

SEQ ID NO: 40702 - DNA, 201 bp, Homo sapiens
gacactgttactggggcgatggtgcagtggagagcacttggcagtaggagcttctaggtagaacttgggagtcttgggacttctggatgtgttctggtgaygcgattttgcgctcagacggtccagaaagggaccgcccctgtggaaggtgttgcgctggcatccccatcacaggattgattggcaagcagggaaagagac

SEQ ID NO: 40703 - DNA, 201 bp, Homo sapiens
tgtatcatttaaagcaggagatactttcatactatacctgggttctcttggctttgaagaggagggtggtcatgagatattgaaagattgcatgggtggcytgtaatcccagcactttgggaggctgaggcgggtggatcatctggggttaggagttcaagaccagcctggccaacacggggaaaccacatctctactaaa

SEQ ID NO: 40704 - DNA, 201 bp, Homo sapiens
actttgactcagtggagctgcacggtacgatgaaaagctactttgggggcttgctgtgtgtgtgctggagcccggatggcaagtacatcgtgacaggtggsgaggacgacttggtgacagtctggtcctttgtagactgccgagtaatagccagaggccacgggcacaagtcctgggtcagtgttgtagcgtttgaccctt

SEQ ID NO: 40705 - DNA, 201 bp, Homo sapiens
ttttttttttttttttttttttgtcattggagagattgtagtgtgtccacggataatgaagggctacagtagagcctgatgttaaacccaaggcctgtgcmtaggcctcttacacgagcttttctgtcaaaaaacgaactatgactgatactgatgtgattcctgagagtgggaaatagtaggctaaaaagtaattaggag

SEQ ID NO: 40706 - DNA, 201 bp, Homo sapiens
tgctggaagcaatgggaacagtgttacaacacccgggaactctgtgccgcctcctctgccacggtccaacagccttccacattcagcagtctcaaatgctkgcagcaaaagcagtgtcatggacggggccattgcttctggggtcagcaaatttgcaacactttcactacatgaccggaaggagaggcaccacgagaaaga

SEQ ID NO: 40707 - DNA, 201 bp, Homo sapiens
ccacctcagcctgctaaagtgctgagattataggtgtgacccaccatgcccagcgcacagttggctgttttgacttttttttttttttttttttttttggkcctttgaggcgtgtaaaattttacaataattatttggattattcagaagatctaatttagatgagtaaattcaacttaagtctgtgtgtaaaatgagtag

SEQ ID NO: 40708 - DNA, 201 bp, Homo sapiens
ttgagcataggagtttgaggttgcagtgagctgtgctcatgctactgcattccagcctgtgttacagagcaagaccctgtctcaaaaaaagaaaaaatctktcatatactacttactactggttgtcttagtctctcagactactgtaacacaataccatagattaggtagcctgtaaagaacagaagtgtatttctcaca

SEQ ID NO: 40709 - DNA, 201 bp, Homo sapiens
gaattttaagttataaaaatttatatttatataaaaatacgatgtgcttaaaaactaaattcactaactagcaattattaatgtaggaattacttaaaaawttttttttctttgaaatgttatgacttctgaagcatcctaatggcagaccttatctggatctggtagccctgttttacatcataaagacaggtttcttgc

SEQ ID NO: 40710 - DNA, 201 bp, Homo sapiens
cttgttaatgtttatagaacagccagccaccggaattgctccctcttactaaagctgactgtttctcatagttggcagcgtactcgatgaaatgttctgcrtctcagatactgttttatgtggtcctcctctgtgccaactccagtccgggagaaggactgttgattggcgtttcggctgagctgtgtagaggcttctgtt

SEQ ID NO: 40711 - DNA, 201 bp, Homo sapiens
taatataataatcataatgaactttaaggccctgaaacactcagtagatgtaaaatatagttaaatactgactgtcaaataagaagctgccgtcttgacaktgataatcagagtgaaaggaccaattttgtctcaggaaattaagtttagaattttaagttataaaaatttatatttatataaaaatacgatgtgcttaaa

SEQ ID NO: 40712 - DNA, 201 bp, Homo sapiens
cccagggtgagattctgccaggagcacctgccacagaggccagcattggagcctcaggggctacgtgcagggccaaggctggccttctccctctgggggaygccagtggaggtgacctccacagcacgccggccagctggcaccaagctcccggatgttgtggctgtgtagaaccagattctgtcttgtggtactttgtcc

SEQ ID NO: 40713 - DNA, 201 bp, Homo sapiens
ttgtaattaataatataataatcataatgaactttaaggccctgaaacactcagtagatgtaaaatatagttaaatactgactgtcaaataagaagctgcygtcttgacagtgataatcagagtgaaaggaccaattttgtctcaggaaattaagtttagaattttaagttataaaaatttatatttatataaaaatacga

SEQ ID NO: 40714 - DNA, 201 bp, Homo sapiens
gatgcattctaaaagaactgttaaccagggctgccatcaaaagggcgaagcctgctaacgggaacccccagttccgttatgccagtatggactacagaagrcgagaggaggacaggtttgagggcggttgattcaagatctctctggaagctgggcccagtggagagtgggacagtggagggcatgaaggtggttctagtt

SEQ ID NO: 40715 - DNA, 201 bp, Homo sapiens
tccagactgtctgcggcagaagtggggtcaggaacctgctgcccagctttcctccacaggcttgatgtgtttgagccagaagtatggggcgtttgcggggycctccacaagtacaaacagggttctgtcccttttcaggggtcccagaggaaaagcactcctatagactctgagcaggggcagctgccacattccgtttgc

SEQ ID NO: 40716 - DNA, 201 bp, Homo sapiens
catcagagctgcccacagaggagagtcacccggtcacattcagctcactgtggtgaagcaccccacaggggcgaggagtttactttttaaatttttttttktgtgtgtgtgtgtgtgtgtgtgtgtgtgtgtgtgtgtgtgtttcactctgccctgttctgaagtttgctttttataactaatggttatatatttggggag

SEQ ID NO: 40717 - DNA, 201 bp, Homo sapiens
agtcgaatgcccagtcctttctagcccctctcaggaaatcatccccagctccctggagtctctgctttccccaatcttccagagtagattttgggtttctrtttgtagcgttctgtacatatgatgcccttgaaaatgtctaatgggccattattgaaagtatcttggcgcacggttcatctgacaagctcccagatcgtg

SEQ ID NO: 40718 - DNA, 201 bp, Homo sapiens
ttctgctctggcctcccagagtcctgggattataggtctgagccaccatgcctggccatagatttcttttatagatttatgcatttaaaaactattggggscaggtgcggtggctcatgcctgtaatcctagcactttggaaggctgaggtgggcggattatctgaggcaggaattcgagaccagcctgaccaacatggtg

SEQ ID NO: 40719 - DNA, 201 bp, Homo sapiens
tatgtctgctctattagacagcattgactcattagggctccttagcctgactagaatttagagggtagcctgaatgggaaaaatatttcactttaaaaaawttatttatttattttactaacttctgacatttaacatgttcctcagttatgaatatagacatcacaataataatgggacctgtggcaattatcaatgaaa

SEQ ID NO: 40720 - DNA, 201 bp, Homo sapiens
ggagtacccagccatcagaaccgtgagccaaataaacttgtttataaattactcagtctggccaggtgcagtggctcacgcctataatcccagcactttgkgaggccgaggcgggcggatcacctgaggtcaggagttggagaccagcctggccaacatggcgaaaccgtgtctctaccaaaaatacaaaaattagccagg

SEQ ID NO: 40721 - DNA, 201 bp, Homo sapiens
ttttttttttgagagggtctccctgtcacccaggctggagtgcagtggtgtgatgtgggctcactgcaacctccatccccgggctcaaatgatcttcccayctgactttctcaggtagatgggtctacatgaagcttggctaatttttaattttttttttttttttttgtggagacaaagtctcactatattatagcctag

SEQ ID NO: 40722 - DNA, 201 bp, Homo sapiens
cttcttgtatgttagctgtgtgggtataatcattgtggtattaaataatagtcttcagcatgtcaagacctaattttttgtttctttttcttttcttttctttttttttttttttttggagacagggtctcactgtgttgctcaggctggagtgcagtggttcgatcacaactgtctgcagccttgacctcccaggctcag

SEQ ID NO: 40723 - DNA, 201 bp, Homo sapiens
gtggtattaaataatagtcttcagcatgtcaagacctaattttttgtttctttttcttttcttttctttttttttttttttttggagacagggtctcactstgttgctcaggctggagtgcagtggttcgatcacaactgtctgcagccttgacctcccaggctcaggtgatcctcccacctcagcctcccaagtagctgg

SEQ ID NO: 40724 - DNA, 201 bp, Homo sapiens
tttttttttttttttggagacagggtctcactgtgttgctcaggctggagtgcagtggttcgatcacaactgtctgcagccttgacctcccaggctcaggygatcctcccacctcagcctcccaagtagctgggactacaggcacgtgccaccatgcctagctaattttttatttttttttagtagagacagggtttcatc

SEQ ID NO: 40725 - DNA, 201 bp, Homo sapiens
gctatgaattaagcattgttttgtatatttaagagccatctgtattttctatgagttgttcatgtcctgaacccgcttttctactaggattctggtctttaaaaaaaaaaaaattaagttggtaggagatctcttttatgattatttatttttaatttttaaatttttttagagatgggatctcactgtgttgcccaggct

SEQ ID NO: 40726 - DNA, 201 bp, Homo sapiens
gtcaggctggtctcaaactcctgaccttgtgatctgcctgccttggcctcccaaagtgctggaattacaggtgcaagccattgcgcctggcctctctctcttttttttttttttttttttttttaggagacagggtcttgctctgttacccaagctggagtacagtagtataatcatagctcattgtgacctcaagctctt

SEQ ID NO: 40727 - DNA, 201 bp, Homo sapiens
tcaggctggtctcaaactcctgaccttgtgatctgcctgccttggcctcccaaagtgctggaattacaggtgcaagccattgcgcctggcctctctctctyttttttttttttttttttttttaggagacagggtcttgctctgttacccaagctggagtacagtagtataatcatagctcattgtgacctcaagctcttt

SEQ ID NO: 40728 - DNA, 201 bp, Homo sapiens
tgtattgtcctcctttagggctgaagtcatcagattgtatcagtgctgtctcggggtgctatcgcttcccttcctttctcaatgttttcagcccctgcctmactgccactgtctcaagcattacccctgttccagtgcagtgagcaatcattataacgcccctcgtatacacactcgatcccagtcttggctaaagtgaat

SEQ ID NO: 40729 - DNA, 201 bp, Homo sapiens
ttatttcacttagaacaattaaacagtcaaaagagaatttctccagatttctaccctcacatctcagcttctgtctgtaccggatgccttcccttctattkttaaggaagagctctgcccctgtctaaagtcacctccccgactcgttcgctaaatcccacctcattttggctaatcggtattctctgtttcctacaaacg

SEQ ID NO: 40730 - DNA, 201 bp, Homo sapiens
ttcttagcgtgcgtgagccaggacgggtttctgcgggtgttcaactttgactcagtggagctgcacggtacgatgaaaagctactttgggggcttgctgtstgtgtgctggagcccggatggcaagtacatcgtgacaggtggggaggacgacttggtgacagtctggtcctttgtagactgccgagtaatagccagaggc

SEQ ID NO: 40731 - DNA, 201 bp, Homo sapiens
tttacgcatccatggcatgggatgtgttttcatttgtgtcatctgtgatttcttttagcagtgtcttgtagttttccttgtagaggtctttcatgtcaatkgttagatatattcctaagtattttattttatttttttgcagttattgtaaaaggggttaagttcttgatttgattctcagcttggtcgctgttggtatat

SEQ ID NO: 40732 - DNA, 201 bp, Homo sapiens
ctgtatttacaaaaaatataaatttttaatcagctgggtgtggcgacactcacctgaagcaccagctatactcaggaggctgaggtgggaggattgcttcrgcctgggaggtcaaggctgcagtgagccgtgattgcaccactgcactccaacctgagtgatggagcgagaccctgtctcaaaaaaaaaaaaaagatatgg

SEQ ID NO: 40733 - DNA, 201 bp, Homo sapiens
ctactctacctagaatttaactatcggatttctttaattgctcagtcctcttcccttttcttttccattataagtttctgctatatcagaagtcatatttmctttttgttcctaaaattgtttcttgtgccttttctccatcaccaaaggaaaaactatttattgcaataaattaatacagcaggtattcctgtgaaagcg

SEQ ID NO: 40734 - DNA, 201 bp, Homo sapiens
aatttaactttaggaacaaaacgtttagcagggttgattgatattatttttacattgttctggcaatccacagaaagagaagagccttaatttttaaaacmcattttagtcattttatgacaattaaagttgtttaataaacatcttttttcaaagaagcagtttgtagcactttgattgaggttctgtgtactaagatac

SEQ ID NO: 40735 - DNA, 201 bp, Homo sapiens
ggaagcaccgtctctcacttggattattacagaggtctccaactggctgcccacctctatccttgcctcttacagtctgttctcctgatgtcagccagagygatcgtttaaacagtataggtcagatcatattcttcgctgcttaaaactttctaatgtgtttctatagcgcttagaataagatctgaattgcttttgata

SEQ ID NO: 40736 - DNA, 201 bp, Homo sapiens
ttgggttggcctttttcaccagaattcaagaagccagatttgtgctgtgactgcgatggggcaggcttctaaacactactggtggccctggagcctttctytgaggcttttttcttattcagaaggagaattaaaaattcccccagcggcctggagaagggaacctttggaaaagcttgccttcttttaaaagcaaatgca

SEQ ID NO: 40737 - DNA, 201 bp, Homo sapiens
ctgatgttcattttgttgcctgcttactgactagtcccacctaaaatctacaagaggagggctttatctgtctttgttggtgagataccaggatctaaaayggtgcctgaagcatatagaattcaataaatattggatgaatggatagtggatattctcaagtaacttttttttttgaggtgaagtctcactcttgtctcc

SEQ ID NO: 40738 - DNA, 201 bp, Homo sapiens
tgtggtcgggtgcagtggctcatacctgtaatcccagcactttgggagactgaggtgggaggatcgcttgagcccaggagtttgagaccagcctggataayatatcaataccctgtgtccacaaaaaaataataaaaaaaaaattagctggccatggtggtatgtgcctgtagtcacagctacttgggaagcgaggagggc

SEQ ID NO: 40739 - DNA, 201 bp, Homo sapiens
gacatccgacattctgtccagccacccagccagcagctgggagagtggagaaggtagcggctggtaggctgcttgcttttttttattttgctgtaagttcygggatatatgtgctgaacgtgcaggtttgttacatagggatgcatgtgccacggtggtttgttgcgcccatcaacccgtcatctatgttttaagccccgc

SEQ ID NO: 40740 - DNA, 201 bp, Homo sapiens
tttcagtagtattgttccagaaaaaaattccagccaggcatggtgacttacatctgtaatcccagcactttgggaggctgagatgtgagggttcttggagsctaggagtttgataccagcctgggcaacatggcaagacactgtctctacagaaaattaaaaaaaaaaaattagttgggcatggtggcacgcatctgtgtc

SEQ ID NO: 40741 - DNA, 201 bp, Homo sapiens
tagaaaagaatgaggatgctgtctttgtgcccatacagactgatgtacaaatacacttggaggctgggcatggtggctcacgcctttaatcccagcacttygagaggccaaggcaggaggattgctttgctcctgaagccaggagtttgagaccagcctggacaacatagcgacaccctgtatttacaaaaaatataaatt

SEQ ID NO: 40742 - DNA, 201 bp, Homo sapiens
tctccccatccccttaatggtcaaacagacctgggttccaaatccagccctgccacttacttaggtaggtatggtgacgttggtcaagttatttaacttcsctaaacttgttttctcatctgtaaaatgggtaaaatattgtccactttggagcattattgttaggattaaggacaatgcatgtaaagtcctttgattatg

SEQ ID NO: 40743 - DNA, 201 bp, Homo sapiens
ccagacggggtggtggccgggcagaggggctcctcacttcccagtaggggcggccgggcagaggcgcccctcacctcccggacggggcggctggccgggcsgggggctgaccccccacctccctcccggacggggcggctggccgggcagaggggctcctcacttcccagtaggggcggcctggcagaggcgcccctcacc

SEQ ID NO: 40744 - DNA, 201 bp, Homo sapiens
cggggtggtggccgggcagaggggctcctcacttcccagtaggggcggccgggcagaggcgcccctcacctcccggacggggcggctggccgggcgggggsctgaccccccacctccctcccggacggggcggctggccgggcagaggggctcctcacttcccagtaggggcggcctggcagaggcgcccctcacctcccg

SEQ ID NO: 40745 - DNA, 201 bp, Homo sapiens
tcatactcactttacattttatttgagaaattgctatttagaatgctaagactgtgtgtggtttaatgccagctttgcatttacagcttgaggctgaaatygattgcccttcatagtaaggagatcctctggccatgtggatacatttttatcagattttggtcagaatgtctaagagcaagggtcaccggaggtttgttc

SEQ ID NO: 40746 - DNA, 201 bp, Homo sapiens
tcctctttactgatttggatgccctttatttcttttctcttgtctgattgctctagctaggacttccagaactatgttgaataaaagtgaaagtcagggcyggaaacggtggctcacgcctgtaatctcagcactttgggaggccgaggtgggcagatcacgaggtcaggagatcgagaacatcctggctgacatggtgaa

SEQ ID NO: 40747 - DNA, 201 bp, Homo sapiens
gacggtgtttcaccatgttggtcaggctggtctcaaactcctgaccttgtgatctgcctgccttggcctcccaaagtgctggaattacaggtgcaagccaytgcgcctggcctctctctcttttttttttttttttttttttttaggagacagggtcttgctctgttacccaagctggagtacagtagtataatcatagct

SEQ ID NO: 40748 - DNA, 201 bp, Homo sapiens
ggccattgtttcattcattcaggaccttgactacctaccacatgcccagcactgggtctgcagcagtgggcaaaacctgccctcctgtgacccctctcagkagggaagagaggtataatagcaccacccccgaaacactggtgaccacagatggtgacactttgtgatgtaagaggcaagagagcaggcccaagaaaggga

SEQ ID NO: 40749 - DNA, 201 bp, Homo sapiens
tcctggctgacatggtgaagccccatctctactaaaaatacaaaaaaattagccgggcgtggtggcatgcacctgtagtcccagctacctgggaggctgargcaggagaatcgcttgaacccaggaggcagaggttgcagtgagccaagatcgcgccactgtactccagcctgggcgacagagcgagactccatctcaaaa

SEQ ID NO: 40750 - DNA, 201 bp, Homo sapiens
atagaattcaataaatattggatgaatggatagtggatattctcaagtaacttttttttttgaggtgaagtctcactcttgtctcccaggctggagtgcartggcgtaatgctcactgcaagctctgcctcccgggttcaagtggtcctcctgcctcagcctcccgagtagctgggattacaggcgcctgccactacaccc

SEQ ID NO: 40751 - DNA, 201 bp, Homo sapiens
gttatagttatttagtataatacaactgtactttaatgtagaattttttttttttggaaaccgggtctcactgcagccttgacttcctgggctcaagtgamccttctgctctggcctcccagagtcctgggattataggtctgagccaccatgcctggccatagatttcttttatagatttatgcatttaaaaactattgg

SEQ ID NO: 40752 - DNA, 201 bp, Homo sapiens
taatgaatgatgagaattttcaaagcccatatgataagtagcaagtccttatgtattcagaaggaaactaatgtttcccgagtgccttttaagtgccaggrattctgctgggacttatattattccattttaataaaataattctgtgaggcaaatgattgaaaagaagaggtagatctggaatctgggccacactgagaa

SEQ ID NO: 40753 - DNA, 201 bp, Homo sapiens
ggcaaacttcaccaaacttcatctccaagtctggccctgatcaggtcagcccagtgagcatgggcaggccctgccctcttcccgctccctgggactgtccycagtcacactggaggtccttgctggtgcatctgttcaagacccaaagaaagtcgaatgcccagtcctttctagcccctctcaggaaatcatccccagctc

SEQ ID NO: 40754 - DNA, 201 bp, Homo sapiens
gctgtgagactgcaggaactgtgaaaaacatcggtatttgtcccagtgttactaggcaaaaggggcttgctgtccaatgtgccagaagcctgtactgtgamactgggtttttgagaaagttttctcaaaacccagtgaagggagtctactagctatgagaaatatagccagatgagaatcgagccactgggtttttgagta

SEQ ID NO: 40755 - DNA, 201 bp, Homo sapiens
ccctagtaccgagtattatgcctggcacggtgtaggtgctcagtagttagagaatgaacccaagtatgtgttttttcaattttaaaatggctgcagcttcmcagtttggtatgtagatgagcattgcttttttttgatggtgttcataacctgttttagagtagttgaactttatatgaaggtgtgacttttaaaaaatga

SEQ ID NO: 40756 - DNA, 201 bp, Homo sapiens
agggaagatgctgccacagaatgtccgccctctgcttgttcctgctttcccctggtggccaccctctccccacccgatgcagagctccaaaggaggggctyttgctggcccctgggagaagccatctgatgagcagcaagcaattccagagattgtcactgtgaaatttttacttaacgcatgttacgcactttgtgactg

SEQ ID NO: 40757 - DNA, 201 bp, Homo sapiens
cgccccccagaagaggaggaaataggatggtcacttatcagtggaaattgagttagaactcagtgattaatggaaagaggacaggcgagtgggagacggtygtgcttggacatgaaggcaggcactgggtgacctggcctttctctatctggggtggggctccaaaaagctctggcccaagagtggagtccatagattttt

SEQ ID NO: 40758 - DNA, 201 bp, Homo sapiens
aaggcagtaactttattagaaaagctttagggagtggattctgggagtagcaggtgattgatataaggaaaggggtggtctggaaagtcttcaggcttcckcagttatctattcatgcctcctcatgggtcccatgtgcaaatttgggggaagttagtatgaaccatgtggtagaaatttaagcttgttctacacaaactc

SEQ ID NO: 40759 - DNA, 201 bp, Homo sapiens
caagctctcgccatgttgcccaggctggtctctaattcctggcctcaagctgtcctcctgccttggcctccagagcactgggataatagttgtgagccacygtgcccagcctagattcttcttaatatactgtttcctttgcctggaatgtgcttctattcctcactctctgccccttcatctgtttaactcctactcctt

SEQ ID NO: 40760 - DNA, 201 bp, Homo sapiens
ataaggaagcttattttatagaagcctttaccaaacctccttctttgacttgttgttccaaattggattaaccagcccattcctgcggccaaggaaatacrcactggttaacccagtctttactaacccatacctttagcaaagagattggattacccaacaacttgattgctctggagactactttggagttggggtatg

SEQ ID NO: 40761 - DNA, 201 bp, Homo sapiens
agtttgagatctgtatatatggggttgaattgttatgtggctaggtgcagtggctcatgcctgtaatcccagcactttgggaggctgaggtgggtggatcrcttgaggtcaggagttcgagactagtctggctaacatggtgaaaccccgtctctaccaaaaatataaaaatcagccaggtgtggtggcatgagcctgtag

SEQ ID NO: 40762 - DNA, 201 bp, Homo sapiens
cctcaggggctacgtgcagggccaaggctggccttctccctctgggggacgccagtggaggtgacctccacagcacgccggccagctggcaccaagctccyggatgttgtggctgtgtagaaccagattctgtcttgtggtactttgtccacgatctcaggagagaagcgctagtctgcccgcccgcgtgcctgccatgaa

SEQ ID NO: 40763 - DNA, 201 bp, Homo sapiens
cgtctccttgtggcatttagatccagtcttactgaagggcatgctgaagaggagatggccctgactcctggggtatggagggacactgctgccagcccagrctgcgtggcacatcctgccagctgcaggtgcctcccaggcatggggtaaagcttagcagtgttctgtctattctgatacaaaggaatggtctgcacattt

SEQ ID NO: 40764 - DNA, 201 bp, Homo sapiens
tgaggcaggagaattgcttgaaccccagaggcagaggttgcagtgagccaagatcgtgccattgcactccagcctgggctacagagtgcgactctgtctcaaaaaaaaaaaaaaaattgtttggcgtgtgtgtattccagatcctcagtgagttccttgtaggaatggaccatgtttgtgcacctcttctccctctcttcc

SEQ ID NO: 40765 - DNA, 201 bp, Homo sapiens
tccacctctggcactctctcccacagtgacatgcgggatcttgtcatcagctgaaatggtttagctccaaaatcgctaattcagatagaaacagccttctrctgcaatatggccttgcttctcactgctctaatttctccaggatactgatgactcaacttcatgttgccagatccattggacaccgcttggcccacaact

SEQ ID NO: 40766 - DNA, 201 bp, Homo sapiens
cgagctgcgcctgagccgtgccagccggcggacctcaggcggtggacgtcggcgatagccgtgtggacggtgaccggctcactctgcggcgccgtgctccygctgctcacccaaagaagttgtttccattttaaaccggtcttttggggctgcagtaaaaaataagaaatggagttttcttgctttttactctaaaattca

SEQ ID NO: 40767 - DNA, 201 bp, Homo sapiens
tggggtcttctggccagagcttgtcaccagccccatggcctctccaggcgtgctcatgcccacaacccgcggccagccccacgtggtgccgctcagccttytctgcccctcctgggaatctgtcattcgtgggtgcttcagagtaaaatcaatgagtttctgagcagaatgagtgagtgatctagtttctataaattaggc

SEQ ID NO: 40768 - DNA, 201 bp, Homo sapiens
accaggcagacagtctgcctaggacccagtgccgcaggcctggatcagaccccaggatcagaccttggggtcttctggccagagcttgtcaccagccccayggcctctccaggcgtgctcatgcccacaacccgcggccagccccacgtggtgccgctcagccttctctgcccctcctgggaatctgtcattcgtgggtgc

SEQ ID NO: 40769 - DNA, 201 bp, Homo sapiens
tctgcctaggacccagtgccgcaggcctggatcagaccccaggatcagaccttggggtcttctggccagagcttgtcaccagccccatggcctctccaggsgtgctcatgcccacaacccgcggccagccccacgtggtgccgctcagccttctctgcccctcctgggaatctgtcattcgtgggtgcttcagagtaaaat

SEQ ID NO: 40770 - DNA, 201 bp, Homo sapiens
agcgcacggtggccaaggagcttgcccacaccggggatcccgacctcaccctgagctacctgtccatgtggctgcaccagccctatgtggagagcgacagyaggctgcatctggagagcatgctgctggagacaggccaccgagctctctgacgtcctgagacggctgcggacactggctccttccacgtctcaccaggca

SEQ ID NO: 40771 - DNA, 201 bp, Homo sapiens
gggtcttctggccagagcttgtcaccagccccatggcctctccaggcgtgctcatgcccacaacccgcggccagccccacgtggtgccgctcagccttctytgcccctcctgggaatctgtcattcgtgggtgcttcagagtaaaatcaatgagtttctgagcagaatgagtgagtgatctagtttctataaattaggcat

SEQ ID NO: 40772 - DNA, 201 bp, Homo sapiens
tggcctcctgaagtgctgggattacaggcgtgagccactgccctcggtccaacttcttatcttggcctattaggttctagttgtctgatcacctactcacrcactagtccttttctgtctatttcattccagcacactggtttttttgtttgcttgtttgttttgttttgttttctgttttttgaactcaccaacctcatt

SEQ ID NO: 40773 - DNA, 201 bp, Homo sapiens
tttgtacagacggggttctcatgttggccaggctggtctcgaactcctgacatgaagtgatcttcccaccttggcctcccaaagtgctgggatcacaggtktgagccctggcgccctgccttagcttttccgtcatgtcttgttttggcttcaggatcctgtatgacatcgagtccccttgtttcctcaggctccttttgg

SEQ ID NO: 40774 - DNA, 201 bp, Homo sapiens
ggttgagaccagcctgggcaacatctacaaaaaatacaaaaaactaaccaggtgtcatggtgcatgcctgtggtcccaactactcaggaggctgaggtagratcacctgagcctgggacattgaggctgcagtgagccacgactgcaccactgcactgcagcctgggtgacagagcaaagccctgtggaaaaaaaaaaaaa

SEQ ID NO: 40775 - DNA, 201 bp, Homo sapiens
cttgctctaggactggaaatctggggtttattaccaaagtcattcaaattaatgaaatcatagcaactgtccaccttcatctccctgggaatttgctgtaygtagagttaacagtgtttagttattggaatttttatcataatagacttacacttcttagctttgaaatcttagagttattaaatctgagactggagattt

SEQ ID NO: 40776 - DNA, 201 bp, Homo sapiens
tctgtgctgcctggtgtgtgcagtggggttggtttagtgtctcccacaagtagccatacacatcatgcagttacagggcttaggacagagcctggtccacrctgagggaccgtcaatggcagcttgccacgtttccttcctttctgcgtgaagtgtgtagggctccctttctgtgttgccattttataaacaaggaagtca

SEQ ID NO: 40777 - DNA, 201 bp, Homo sapiens
gatcctcccacctgagcctcctaagtagctgggaccacatacgtgtcccaccatgcccagctaatttttacttttaatttttgtggagatgaggtctcacygtgttgcccaggctggactcagactcctggactcaagcagtcctcccgcgtccatccctcaaagtgttgggattacaggcatgagccaccaaaaccggct

SEQ ID NO: 40778 - DNA, 201 bp, Homo sapiens
tagcagacagtcacaactttaccttatttccaatctttggaaaacaaagggcttaaggtaaaaactttgtggagccattaagctggaagaggattcagctmtatctggtgaattttaaaatgttaaaaatattctatattgtcttcttccaggaactttcacattcattcagactttgtagtttccacatttatttgtcca

SEQ ID NO: 40779 - DNA, 201 bp, Homo sapiens
ggatcagaccttggggtcttctggccagagcttgtcaccagccccatggcctctccaggcgtgctcatgcccacaacccgcggccagccccacgtggtgcygctcagccttctctgcccctcctgggaatctgtcattcgtgggtgcttcagagtaaaatcaatgagtttctgagcagaatgagtgagtgatctagtttct

SEQ ID NO: 40780 - DNA, 201 bp, Homo sapiens
gagggttcggggagaacaaacaacctgagttggctcttggtggtctgggggttgcttcctacaggcagtgggatccgggtgcatcttggaggatgggcatygtgagcctgaggaaggaaggagctttcctgcagagagaacacgtgtaaaggcctgcaggcacctcagcttttcaagagctgccagtagttcattttcgct

SEQ ID NO: 40781 - DNA, 201 bp, Homo sapiens
tgacgctgatgactggtctgtctttaccagcccttgagtttcttgaagtcagttatgtttttggttcctaaatatgtgccccgtatgagtcaggctgaccrtgaatcagatgtgatcctgccctcagaatctcctgttggggggaaaacccttagacaattatagaacaggtggtaagagctattcctccatttacctcat

SEQ ID NO: 40782 - DNA, 201 bp, Homo sapiens
acccgcggccagccccacgtggtgccgctcagccttctctgcccctcctgggaatctgtcattcgtgggtgcttcagagtaaaatcaatgagtttctgagmagaatgagtgagtgatctagtttctataaattaggcatgctttatacattatgtttgtgtagaaaatccctggtttaatatttttactttatgcctatct

SEQ ID NO: 40783 - DNA, 201 bp, Homo sapiens
atgttcttgaatcactgccattaagggagattcacgtttctttcagatgaggtttcgcataagctcttggagatgtacaggaaggagctgctcctgaagcrcacggtggccaaggagcttgcccacaccggggatcccgacctcaccctgagctacctgtccatgtggctgcaccagccctatgtggagagcgacagcagg

SEQ ID NO: 40784 - DNA, 201 bp, Homo sapiens
gagacggctgcggacactggctccttccacgtctcaccaggcagacagtctgcctaggacccagtgccgcaggcctggatcagaccccaggatcagacctyggggtcttctggccagagcttgtcaccagccccatggcctctccaggcgtgctcatgcccacaacccgcggccagccccacgtggtgccgctcagccttc

SEQ ID NO: 40785 - DNA, 201 bp, Homo sapiens
tcctggcctcaagtgatccacccacctcagcctcccaaagtgttgggattacaggcgtgagccaccatgttcgtccaggaaatctttatctttggacaccraaattagaattttgtataatttttatgagtcacaatcactattgtccttttggttattttcaaccatttaaaaatgtaaaaaccatcttagcttatgggc

SEQ ID NO: 40786 - DNA, 201 bp, Homo sapiens
gcggacactggctccttccacgtctcaccaggcagacagtctgcctaggacccagtgccgcaggcctggatcagaccccaggatcagaccttggggtcttytggccagagcttgtcaccagccccatggcctctccaggcgtgctcatgcccacaacccgcggccagccccacgtggtgccgctcagccttctctgcccct

SEQ ID NO: 40787 - DNA, 201 bp, Homo sapiens
ccacaacccgcggccagccccacgtggtgccgctcagccttctctgcccctcctgggaatctgtcattcgtgggtgcttcagagtaaaatcaatgagtttytgagcagaatgagtgagtgatctagtttctataaattaggcatgctttatacattatgtttgtgtagaaaatccctggtttaatatttttactttatgcc

SEQ ID NO: 40788 - DNA, 201 bp, Homo sapiens
ctactgggggtcgtagaacatatccccagtggataagggggtactactgtacttgttggctcttcatgttagctctgctaggcagatgtcatttcagagawgaggaagcaagttcagaacggcttggaatcttgctcaggaaatcgggctggttaatgaataacaagagatccagtttcacaaacccaaggcattttgccc

SEQ ID NO: 40789 - DNA, 201 bp, Homo sapiens
cactggcaacggcgggattacaaaggcttctctccatctgtggactgggagactgtagattttgactctgctccatccattcaggaacttcctgtccagtmcgccatcacagagccccgggatggagagactgtagaatcaggggaggtgaccatcaagggctatgcatggagtggtggtggcagggctgtgatccgggtg

SEQ ID NO: 40790 - DNA, 201 bp, Homo sapiens
ccagccctgaaggtcaacagccagcggccctttaatgcagagcctccccctgagctgctgacagaaaactacatcacacccaaccctatcttcttcacccrgaaccatctgcctgtacctaacctggatccagacacctatcgcttacacgtagtaggagcacctgggggtcagtcactgtctctttccctggatgacttg

SEQ ID NO: 40791 - DNA, 201 bp, Homo sapiens
tcaccttctctggtgataactccagcacccagggatggagagtcatggggaccctattaggtctcggtgcagtgttggcctatcaggaccatcggtgtagkgtaagtagggaaagtgcttcattgtcagaacagactgggtgcagtggctcacgcctgttatcccagcactataggaggccaaggtgggtgggtcacttga

SEQ ID NO: 40792 - DNA, 201 bp, Homo sapiens
agaccctactgggactgcctatggagcatccatccctctggctcgggccatggaccctgaagctgaggtcctgctggcatatgagatgaatgggcagcctytgccacgtgaccacggcttccctgtgcgtgtggtggttcctggagtggtgggtgcccgccatgtcaaatggctgggcagagtgagtgtgcagccagagga

SEQ ID NO: 40793 - DNA, 201 bp, Homo sapiens
ttctgtattacagcaaaaggctgtccctcccaaacctgggattctgggctcactgagttcacctgcgagtcagccctacctgcactgctctggtctagtayaaacaggctgctggcattgaggtaggtggcagagagagtaatggtcccatggcccaggggcaaggtgaagactgctcctattcccatctctaggtttcct

SEQ ID NO: 40794 - DNA, 201 bp, Homo sapiens
ttccctgtgcgtgtggtggttcctggagtggtgggtgcccgccatgtcaaatggctgggcagagtgagtgtgcagccagaggaaagttacagccactggcracggcgggattacaaaggcttctctccatctgtggactgggagactgtagattttgactctgctccatccattcaggaacttcctgtccagtccgccatc

SEQ ID NO: 40795 - DNA, 201 bp, Homo sapiens
ttacaaaggcttctctccatctgtggactgggagactgtagattttgactctgctccatccattcaggaacttcctgtccagtccgccatcacagagcccygggatggagagactgtagaatcaggggaggtgaccatcaagggctatgcatggagtggtggtggcagggctgtgatccgggtggatgtgtctctggatgg

SEQ ID NO: 40796 - DNA, 201 bp, Homo sapiens
tggtggttcctggagtggtgggtgcccgccatgtcaaatggctgggcagagtgagtgtgcagccagaggaaagttacagccactggcaacggcgggattasaaaggcttctctccatctgtggactgggagactgtagattttgactctgctccatccattcaggaacttcctgtccagtccgccatcacagagccccggg

SEQ ID NO: 40797 - DNA, 201 bp, Homo sapiens
ccactgcgccgggctaatttttctattttgttattgttgttaatctctcttttttttttttttttttttttttgagatggagtctctctctgttgcccagrctggagagcagtggcgtgatctcagctcactgcaacctccacctcccaggttcaggtgattctcctgcctcagcctcccgagtagctggggttacaggca

SEQ ID NO: 40798 - DNA, 201 bp, Homo sapiens
agtcagtctgacccacagttgtcctctgctgacttcagaaataataatctggccagtagacatttggtttcggtcctttaggcccttcgccccaggcatcrttctctatggtggacaaagttcagaatggaagatgggagaaaggtgattctgattctagaagcacccatccctcctaccccattccccacccgcattacc

SEQ ID NO: 40799 - DNA, 201 bp, Homo sapiens
actggcaacggcgggattacaaaggcttctctccatctgtggactgggagactgtagattttgactctgctccatccattcaggaacttcctgtccagtcvgccatcacagagccccgggatggagagactgtagaatcaggggaggtgaccatcaagggctatgcatggagtggtggtggcagggctgtgatccgggtgg

SEQ ID NO: 40800 - DNA, 201 bp, Homo sapiens
gtgccagctggacaaaaggaactgaacattgtttgtaaggctgtggatgatggttacaatgtgcagccagacaccgtggccccaatctggaacctgcgagrtgttctcagcaatgcctggcatcgtgtccatgtctatgtctccccatgagcatggaaaggagccacctccacccctttccccacccattagcctcactgc

SEQ ID NO: 40801 - DNA, 201 bp, Homo sapiens
cctggatccagacacctatcgcttacacgtagtaggagcacctgggggtcagtcactgtctctttccctggatgacttgcacaactttcccaggtacgagmtcacagtcactctgcagtgtgccggcaaccgacgctctgagatgactcaggtcaaagaagtaaaaggtctggagtggagaacaggagccatcagcactgc

SEQ ID NO: 40802 - DNA, 201 bp, Homo sapiens
gccagaggaaagttacagccactggcaacggcgggattacaaaggcttctctccatctgtggactgggagactgtagattttgactctgctccatccattyaggaacttcctgtccagtccgccatcacagagccccgggatggagagactgtagaatcaggggaggtgaccatcaagggctatgcatggagtggtggtgg

SEQ ID NO: 40803 - DNA, 201 bp, Homo sapiens
tcgtgatctgcccgtctcagcctcccaaagtgctgggattacaggcgtaagccactgcgccgggctaatttttctattttgttattgttgttaatctctcytttttttttttttttttttttttgagatggagtctctctctgttgcccagactggagagcagtggcgtgatctcagctcactgcaacctccacctcccag

SEQ ID NO: 40804 - DNA, 201 bp, Homo sapiens
aggtgtggtggtacatacctgtaatctcagctacttgagaggctgagacacaagaatcacttaaacccaggaggctaagtctgcagtgagccaagatcaasatcgggccactgctctccagcctgggtgacagagtgagactccatctcaaaaaaaaaaaaaaaattgtcagaataaaggaatcagtcctagtaaactcca

SEQ ID NO: 40805 - DNA, 201 bp, Homo sapiens
gtggtggtacatacctgtaatctcagctacttgagaggctgagacacaagaatcacttaaacccaggaggctaagtctgcagtgagccaagatcaagatcrggccactgctctccagcctgggtgacagagtgagactccatctcaaaaaaaaaaaaaaaattgtcagaataaaggaatcagtcctagtaaactccacagg

SEQ ID NO: 40806 - DNA, 201 bp, Homo sapiens
gtaggagcacctgggggtcagtcactgtctctttccctggatgacttgcacaactttcccaggtacgagatcacagtcactctgcagtgtgccggcaaccracgctctgagatgactcaggtcaaagaagtaaaaggtctggagtggagaacaggagccatcagcactgcacgctgggctggggcacggctctgtgatgtg

SEQ ID NO: 40807 - DNA, 201 bp, Homo sapiens
ttacacgtagtaggagcacctgggggtcagtcactgtctctttccctggatgacttgcacaactttcccaggtacgagatcacagtcactctgcagtgtgmcggcaaccgacgctctgagatgactcaggtcaaagaagtaaaaggtctggagtggagaacaggagccatcagcactgcacgctgggctggggcacggctc

SEQ ID NO: 40808 - DNA, 201 bp, Homo sapiens
tgctccatccattcaggaacttcctgtccagtccgccatcacagagccccgggatggagagactgtagaatcaggggaggtgaccatcaagggctatgcayggagtggtggtggcagggctgtgatccgggtggatgtgtctctggatgggggcctaacctggcaggtggctaagctggatggagaggaacagcgccccag

SEQ ID NO: 40809 - DNA, 201 bp, Homo sapiens
tgcctatggagcatccatccctctggctcgggccatggaccctgaagctgaggtcctgctggcatatgagatgaatgggcagcctctgccacgtgaccacrgcttccctgtgcgtgtggtggttcctggagtggtgggtgcccgccatgtcaaatggctgggcagagtgagtgtgcagccagaggaaagttacagccactg

SEQ ID NO: 40810 - DNA, 201 bp, Homo sapiens
ctcgcagtgagtgttacagttcttaaaggcagcgtgtccggagtttgttccttctgatgttcagatgtgtttggagtttcttccttctggtgggttcgtgstcttgctggctcaggagtgaagctgcagaccttcacagtgagtgttacagctcataaaggcagtgtggacccgaagagtgagcagcagcaagattcattg

SEQ ID NO: 40811 - DNA, 201 bp, Homo sapiens
tccatccctctggctcgggccatggaccctgaagctgaggtcctgctggcatatgagatgaatgggcagcctctgccacgtgaccacggcttccctgtgcrtgtggtggttcctggagtggtgggtgcccgccatgtcaaatggctgggcagagtgagtgtgcagccagaggaaagttacagccactggcaacggcgggat

SEQ ID NO: 40812 - DNA, 201 bp, Homo sapiens
gtttgttccttctgatgttcagatgtgtttggagtttcttccttctggtgggttcgtggtcttgctggctcaggagtgaagctgcagaccttcacagtgartgttacagctcataaaggcagtgtggacccgaagagtgagcagcagcaagattcattgtaaagagggaaagaacaaagcttccaccgtgtggaaagggac

SEQ ID NO: 40813 - DNA, 201 bp, Homo sapiens
tgaagctgaggtcctgctggcatatgagatgaatgggcagcctctgccacgtgaccacggcttccctgtgcgtgtggtggttcctggagtggtgggtgccygccatgtcaaatggctgggcagagtgagtgtgcagccagaggaaagttacagccactggcaacggcgggattacaaaggcttctctccatctgtggactg

SEQ ID NO: 40814 - DNA, 201 bp, Homo sapiens
gtcctgctggcatatgagatgaatgggcagcctctgccacgtgaccacggcttccctgtgcgtgtggtggttcctggagtggtgggtgcccgccatgtcaratggctgggcagagtgagtgtgcagccagaggaaagttacagccactggcaacggcgggattacaaaggcttctctccatctgtggactgggagactgta

SEQ ID NO: 40815 - DNA, 201 bp, Homo sapiens
aacagtaatatagggtttggtgcaatctgtggtttcaaacatctactgggggtcgtagaacatatccccagtggataagggggtactactgtacttgttgrctcttcatgttagctctgctaggcagatgtcatttcagagatgaggaagcaagttcagaacggcttggaatcttgctcaggaaatcgggctggttaatga

SEQ ID NO: 40816 - DNA, 201 bp, Homo sapiens
gacagggattgtgcttcattccaatctattgcttcaccatggccttatgaggcaggtgagagatgtttgaatttttctcttccttttagtattcttagttsttcagttgccaaggatccctgatcccattttcctctgacgtccacctcctaccccataggagttagaagttagggtttaggcatcattttgagaatgctg

SEQ ID NO: 40817 - DNA, 201 bp, Homo sapiens
ctgcgttccatcccgacccggggccacggtactgggccctgtttccccctcctcggcccccgagagccagggtccgccttctgcagggttcccaggccccmgctccagggccgggctgacccgactcgctggcgcttcatggagaacttccaaaaggtggaaaagatcggagagggcacgtacggagttgtgtacaaagcc

SEQ ID NO: 40818 - DNA, 201 bp, Homo sapiens
tttcccctccattacagtctccctgcttcaccttcaccaggcggctttacttacctacccctgggaaaagaggagataatggccttaatatatccaaaaaycacaccctgactacccaagaattagctcttaccatcaccctttctcttctctcactttcctagggggtgctgggtggtgtctccttgggggaaagaaatg

SEQ ID NO: 40819 - DNA, 201 bp, Homo sapiens
gtcaacatgcatctctccctctagcaaatgctgcactacgaccctaacaagcggatttcggccaaggcagccctggctcaccctttcttccaggatgtgascaagccagtaccccatcttcgactctgatagccttcttgaagcccccagccctaatctcaccctctcctccagtgtgggcttgaccaggcttggccttgg

SEQ ID NO: 40820 - DNA, 201 bp, Homo sapiens
cttcactgccccaccctcaccttagaattctctcctctttccaaagaatggcagttgaacctcactggcccctctggggaggctgggggctactcctgcaytttttcccctccattacagtctccctgcttcaccttcaccaggcggctttacttacctacccctgggaaaagaggagataatggccttaatatatccaaa

SEQ ID NO: 40821 - DNA, 201 bp, Homo sapiens
tgttgctaactgggcccacacctgtaataccaatactttgggaggctgaggtgggaggatcacttgagcccaggagttcgagaccatcatgggcaacatarcgagaccccatctctacaaatctacaaaaagaaaaaatttagaaataaaattatgaccaatttgtctcaagtttttccaggaagatctcaaattaggggt

SEQ ID NO: 40822 - DNA, 201 bp, Homo sapiens
ccatttggtggaagacctagctagtgagtccctattgtctattttagggctggattcttcactcccagagctactttcaatctattaacaaacattttttyaatgcacaggatgtagaaaagggatggaaaattgagtaagacttggtccttatcctctctgggctgacagtccattgggagaaatagcttgtaaatatgt

SEQ ID NO: 40823 - DNA, 201 bp, Homo sapiens
agaatggcagttgaacctcactggcccctctggggaggctgggggctactcctgcattttttcccctccattacagtctccctgcttcaccttcaccaggmggctttacttacctacccctgggaaaagaggagataatggccttaatatatccaaaaaccacaccctgactacccaagaattagctcttaccatcaccct

SEQ ID NO: 40824 - DNA, 201 bp, Homo sapiens
tctcttgacatcctaaagagtcttagggtatgcatggaattcatactgtgttgctaactgggcccacacctgtaataccaatactttgggaggctgaggtrggaggatcacttgagcccaggagttcgagaccatcatgggcaacatagcgagaccccatctctacaaatctacaaaaagaaaaaatttagaaataaaatt

SEQ ID NO: 40825 - DNA, 201 bp, Homo sapiens
aactgggcccacacctgtaataccaatactttgggaggctgaggtgggaggatcacttgagcccaggagttcgagaccatcatgggcaacatagcgagacmccatctctacaaatctacaaaaagaaaaaatttagaaataaaattatgaccaatttgtctcaagtttttccaggaagatctcaaattaggggttcagtcc

SEQ ID NO: 40826 - DNA, 201 bp, Homo sapiens
attgtcttttatcttggttgtaaccaagagcttaaagaccattagcctatacatatgtaatgtgcatttatccccccagtgcattaccttacaattgtccrtattcctctctcaattcatcaaaaaatatttgttaagcacctagtgggtacccagcaccatgctaggtgctgtggggaacacagaagaaatggaagacag

SEQ ID NO: 40827 - DNA, 201 bp, Homo sapiens
ctattttaaagaattcggttgaaaaaatagatccaatcagtttataccctagttagtgttttgcctcacctaataggctgggagactgaagactcagcccrggtggggctgcagaaaaatgattggccccagtccccttgtttgtcccttctacaggcatgaggaatctgggaggccctgagacagggattgtgcttcatt

SEQ ID NO: 40828 - DNA, 201 bp, Homo sapiens
tacctggtatacatctcttatccctgaaataagttaaagcatttctgcagctgttttagctgtagtctgcatatatttgggagaatgattccatttagtgmctcttttatttcaggccttcatttcaaggcttgtagaccttgttgtatggtgccagcaatgtagtgaagacaactgtggtcactttacccacacctttca

SEQ ID NO: 40829 - DNA, 201 bp, Homo sapiens
tttgctacatgtcagtggcaccccagacattcaccccctcccagacccacccagccttggggatctgcaaagccatggttgggggaaggaaggagggggcraggagacagatgaaggaacttcattgtctcaggttctgtgtgactgaccccatgaaaggccctggggagggagtcatggggccctgctgaccttttactg

SEQ ID NO: 40830 - DNA, 201 bp, Homo sapiens
gagggggcgaggagacagatgaaggaacttcattgtctcaggttctgtgtgactgaccccatgaaaggccctggggagggagtcatggggccctgctgacyttttactgtctgtgggaactcctttgtatagaggagagttttgactgacgtcaacgtgggtcttggtatttcctctttccccattttcaggtgactcgcc

SEQ ID NO: 40831 - DNA, 201 bp, Homo sapiens
tgcagggttcccaggcccccgctccagggccgggctgacccgactcgctggcgcttcatggagaacttccaaaaggtggaaaagatcggagagggcacgtmcggagttgtgtacaaagccagaaacaagttgacgggagaggtggtggcgcttaagaaaatccgcctggacacgtgagtggcctctgtacccgggactcct

SEQ ID NO: 40832 - DNA, 201 bp, Homo sapiens
cgactcgctggcgcttcatggagaacttccaaaaggtggaaaagatcggagagggcacgtacggagttgtgtacaaagccagaaacaagttgacgggagargtggtggcgcttaagaaaatccgcctggacacgtgagtggcctctgtacccgggactcctaactggggacctccttgattgtcccccccaaccccccacg

SEQ ID NO: 40833 - DNA, 201 bp, Homo sapiens
aggtggtgaccctgtggtaccgagctcctgaaatcctcctgggctgcaaatattattccacagctgtggacatctggagcctgggctgcatctttgctgaratggtatggaggcttgcccaagttccacccagccccctccctctcctccccacatccaagaacaacagaactgcttcttggcccagacctatggcccttc

SEQ ID NO: 40834 - DNA, 201 bp, Homo sapiens
gccctgagacagggattgtgcttcattccaatctattgcttcaccatggccttatgaggcaggtgagagatgtttgaatttttctcttccttttagtattyttagttgttcagttgccaaggatccctgatcccattttcctctgacgtccacctcctaccccataggagttagaagttagggtttaggcatcattttgag

SEQ ID NO: 40835 - DNA, 201 bp, Homo sapiens
atggaagtgagaattctgccttgggtagaaggagttctggtttcctgatttctgggaacacctgctgcccatttagtccactatcacatcattgaagtcarcatgcatctctccctctagcaaatgctgcactacgaccctaacaagcggatttcggccaaggcagccctggctcaccctttcttccaggatgtgaccaag

SEQ ID NO: 40836 - DNA, 201 bp, Homo sapiens
gtttcagtattagatgcacttaagttagcctccaccaccctttcccccttctcttagttattgctgaagagggttggtataaaaataattttaaaaaagcmttcctacacgttagatttgccgtaccaatctctgaatgccccataattattatttccagtgtttgggatgaccaggatcccaagcctcctgctgccacaa

SEQ ID NO: 40837 - DNA, 201 bp, Homo sapiens
tcttcaaatcagcaatatgttttattgtcttttatcttggttgtaaccaagagcttaaagaccattagcctatacatatgtaatgtgcatttatccccccrgtgcattaccttacaattgtccgtattcctctctcaattcatcaaaaaatatttgttaagcacctagtgggtacccagcaccatgctaggtgctgtgggg

SEQ ID NO: 40838 - DNA, 201 bp, Homo sapiens
gtcaggcagtgatgctcttgccctcaggcctagataaaggtagggtaggcaaggcccagccactgagctcacagaaggcagcaccaggcatccagactggygggggcacaaggtatggtgcccagcatacaacactgctttgtacatggctatgaaggaaatgtttgtgaaatttaactgaatttttttaaaagattaggc

SEQ ID NO: 40839 - DNA, 201 bp, Homo sapiens
tccacccacctcgccctctcaaagagctgagattacaggcctgagccaccaaacccagcctgagctttccattcattttgaaaaacaccaaagggcaattrtgaatctaatgatttggaaatgaaagggcccctcaataccagactgccctcctttatcttttgatctctatctcaagttttgtggctagttccagagagt

SEQ ID NO: 40840 - DNA, 201 bp, Homo sapiens
tactcagaaggctgagccaggagaactgcttgaacccgggagccaaactcatgccactgcactccagcctgggcaacacagcgagactccgtctcaaaaamaaaaacaaaaacaaaaacaaaaaaaacagggaaaagcaagaaaacccatgaaggccttgagtagcctggcttttgaaaggtttaatagaaagaggacacc

SEQ ID NO: 40841 - DNA, 201 bp, Homo sapiens
cccactatatacacatatacattctctccagccccctccccaagcacatccaagcgtgctctcccctctccttctctccctctctctctctctctctctcwcacacacacacacacacacacacactcaacacacatacaccctgggctgagctgctcttgctggctgcagccgtgggcctctgctcaccgtgccgctgct

SEQ ID NO: 40842 - DNA, 201 bp, Homo sapiens
ttatcagacaaaggcatctaagaaagggtagtgctgatatgaatgacctggtccagctgcggggaggatccacattgtaggctctgatgcaatacctatgmtggggtagtcctcaagctaagaggccgtttctactttagagacttaatgaccatctagtttggtgttttcctcaggtccattatctctgaaaagagacat

SEQ ID NO: 40843 - DNA, 201 bp, Homo sapiens
cagccctgcttcctgtggacgtcaggcagtgatgctcttgccctcaggcctagataaaggtagggtaggcaaggcccagccactgagctcacagaaggcarcaccaggcatccagactggcgggggcacaaggtatggtgcccagcatacaacactgctttgtacatggctatgaaggaaatgtttgtgaaatttaactga

SEQ ID NO: 40844 - DNA, 201 bp, Homo sapiens
agccctgcttcctgtggacgtcaggcagtgatgctcttgccctcaggcctagataaaggtagggtaggcaaggcccagccactgagctcacagaaggcagmaccaggcatccagactggcgggggcacaaggtatggtgcccagcatacaacactgctttgtacatggctatgaaggaaatgtttgtgaaatttaactgaa

SEQ ID NO: 40845 - DNA, 201 bp, Homo sapiens
tgggacaacagcaggtatggggctggaggaggtcatgcagggagtgggtagcctcagaaagggaagggtctcacccagcacattttccagctgacaaaacraggcagggtgggggtgggtacagaatttgaattcccctcaatacctttagtttcctggcactctcctcaaccgctgttataaagaaaaggtgatattttt

SEQ ID NO: 40846 - DNA, 201 bp, Homo sapiens
aacattttcagcccttttaaccctagtaaaccctacacttagttgaaaggatatatttaaaactggctctgagtctacaagtctcaacccacaatcctgakatgctcacttcatgatatgtgtgtggttctgatttcgggcaacatttttaggtaaccatggctcacctaaaaagccccagctgggaaaactcagattcaa

SEQ ID NO: 40847 - DNA, 201 bp, Homo sapiens
aacctccgcctcctgggttcaagcgattctcctgcctcagcctcctgagtagctgggattacaggcatgaaccaccacccctggctaattttgtattcttmgtagagatggggtttctccatttggtcaggctggtctcgaactcctgacctcaggtgatccacccaccttggcctcccaaagtgctgggattacaggcgt

SEQ ID NO: 40848 - DNA, 201 bp, Homo sapiens
tgtagtcccaactactcattaggctgaggaaggaggattgcttgaggccaagagtttgaggctgtagtgtgctgtgattgtgcccatgaacagccactgcwctccagcccagacaacatagtgagatctcatctctagtaaatataataaataaataagaacagggaagaaaatttgtgtctccagagattacaatgacca

SEQ ID NO: 40849 - DNA, 201 bp, Homo sapiens
tctaatggtaacttggactctacatgtcctaattctgttgttaatgagattgatgactctgggcttagtttcttctgttaaaaactaggaaattgtagatmatctctcaactccatttcagctccaggatttctcagttcctggagtacccctgccctagaccctccacatgaagaagagagtcttaccaaattggattat

SEQ ID NO: 40850 - DNA, 201 bp, Homo sapiens
atggggtttcgccacgttggccaagctgatcttgaactcctgacttcaagtgatctgcttgcctcagcctcccagagtgctgggattacaggtgtgagccrccgcccccagccgacagttatgttgctttaaagctaatctccttccaagatctttgatacaaaactgtctcatgtaactaacttccctctccttatacct

SEQ ID NO: 40851 - DNA, 201 bp, Homo sapiens
ctccccggttcaagcaattctgcctcagcctcccgagtagatgggattataggtgtgtaccaccacacccagctaatttttttgtatttttagtagagatsgggtttcaccacgttggctaggctggtctcgaactcctgacctcaggtgatccacccacctcgccctctcaaagagctgagattacaggcctgagccacc

SEQ ID NO: 40852 - DNA, 201 bp, Homo sapiens
cactttgggaggccaagatgggcggatcacgaggtcaggagatcgagaccatcctggccaaaatggtgaaaccctgtctctactaaaaatacaaaaaaaamaaaaattagccgggcatggtggcaggcacctgtagtcccagctacttgggaggctgaggctggagaatggcgtgaacccgggaggcggagcttgcagtga

SEQ ID NO: 40853 - DNA, 201 bp, Homo sapiens
ctacttgggaggctgaggctggagaatggcgtgaacccgggaggcggagcttgcagtgagctgagatcgcgccattgcactctagcctgggcgactgagcracactcagtctcaaaaaaaaaaaaaaaaaaaaaaaaagtcacccttccctgacttttgtttgttttttgttttttcaagacggtgtctcacactgttgcc

SEQ ID NO: 40854 - DNA, 201 bp, Homo sapiens
ctcacctccccatggacctgccagtaggtccgtgaatcttgctttatggtttgcaggaggacttcagctttccctactaacagcctaaagccagagaatcyagacagacccttgggtcatgagaacagtcagatgagtagctcctgagataaaaataaaatcttaaaagaagaaaatagctttaccattgggaagcaagag

SEQ ID NO: 40855 - DNA, 201 bp, Homo sapiens
tgaggctggagaatggcgtgaacccgggaggcggagcttgcagtgagctgagatcgcgccattgcactctagcctgggcgactgagcaacactcagtctcaaaaaaaaaaaaaaaaaaaaaaaaagtcacccttccctgacttttgtttgttttttgttttttcaagacggtgtctcacactgttgcccaggctggagtgt

SEQ ID NO: 40856 - DNA, 201 bp, Homo sapiens
gagtcccagacttttgagattccctcactggggtttctggggctgagagaggaactgttaaacttcctaaatcttactctagtcccctcacccctgagctrgaattcaaaatccttggtgcccaagaaagcctttctgactcctgaaacagattcattatacatatattttagccccatgaaagtagacttgatcctgttt

SEQ ID NO: 40857 - DNA, 201 bp, Homo sapiens
acaccaaagaaaaagaaagataggtatttctagcctcgttttactctgtaggaacaaataagagtgtgggaccctgtgagtgtggacaatgccacaggcaragggactccctttctttattggtctgttgactctgctgaagaaagctttgaattccaggctttgatttgcttcctcttcttagaagagttatggactctg

SEQ ID NO: 40858 - DNA, 201 bp, Homo sapiens
ctggagaatggcgtgaacccgggaggcggagcttgcagtgagctgagatcgcgccattgcactctagcctgggcgactgagcaacactcagtctcaaaaawaaaaaaaaaaaaaaaaaaagtcacccttccctgacttttgtttgttttttgttttttcaagacggtgtctcacactgttgcccaggctggagtgtagtgg

SEQ ID NO: 40859 - DNA, 201 bp, Homo sapiens
aatggcgtgaacccgggaggcggagcttgcagtgagctgagatcgcgccattgcactctagcctgggcgactgagcaacactcagtctcaaaaaaaaaaawaaaaaaaaaaaaagtcacccttccctgacttttgtttgttttttgttttttcaagacggtgtctcacactgttgcccaggctggagtgtagtggtgcaat

SEQ ID NO: 40860 - DNA, 201 bp, Homo sapiens
agagggtggggataaccatttacaggtttaacttgtttattacaccttcagtagaggacttatcactgaaccctgagtgggctgctctcctccatcttctmcttttcctgtcaccctccctcacaccacatactccaagacagaatcccttgaatgactgaacccagcttcttaatactacccccatctttaactgaggta

SEQ ID NO: 40861 - DNA, 201 bp, Homo sapiens
tgtttgctgggcatggtggctcacgcctgtcatcctagcctttgggaggctgaggcagacagatcatgaggtcaggagattgagaccatcctggctaacayggtgaaacccgtctctactaaaaatacaaaaaattagctgggcatggtggtgggcgcctgtagtcccagctactgggaggctgaggcaggagaatcgctt

SEQ ID NO: 40862 - DNA, 201 bp, Homo sapiens
ccacagtgcctggctaaggtttttcttctttaggatagtatcagaccatgcttaagtgctcctttaggtttcttgctaactcaagaatattaaagaaaagsctcctcccttcccagagctatcttctaatagcagctattttctttttcagcagaatctctttaaaatggacatagaagactgcaatggccgctcctatgt

SEQ ID NO: 40863 - DNA, 201 bp, Homo sapiens
gcgatctcggctcactgcaagctccgcctcccaggttcacgccattctcctgcctcagcctcccgagtagctgggactacaggcgcccgctaccatgcccrgataattttttgtatttttagtagagacggggtttcaccgtgttagccaggatggtctcgatctcctgacctcgtgatccgcccgcctcggcctcccaaa

SEQ ID NO: 40864 - DNA, 201 bp, Homo sapiens
tatcatctcctatgtatcatatctagtgatttaaagtgtttagtttggcccttttccttagttccttatgtcctgaaatgagacatgggagggataggatygtttcttctcccactcataaaccttagccttctctctcttctgcagtctacatggggaggacagagaagcgcaaagaacaagagaaaagatgcatccatc

SEQ ID NO: 40865 - DNA, 201 bp, Homo sapiens
ccgcctcggcctcccaaagtgctgggattacaggcgtgagccaccgcgcccggccgccctcagtgtttctaagtgtacttttaaatatattttcctccacmtagcaagtcgctggcctcaagaggcagcctcagccgaataagctgggaccagtgatggatttccaacaagttcactcatccttttagggtcaaggcctca

SEQ ID NO: 40866 - DNA, 201 bp, Homo sapiens
aatacgttgtttctctccacttttttctctcctctcacaaatatctcttaagagttatctttaaatgaagtaccactctgttttccaattttctttcttckgtagaaacaagacctttataacctgttccttattacaagcacataaacaaacaaacccaaatttggtgttctcttttttttactcttctttattttcttc

SEQ ID NO: 40867 - DNA, 201 bp, Homo sapiens
tgccctagtcaatagaagttgatgtctcaaacacaaaatataatgtctttgttgcccactgagtgcagttagttagttgaattgtagcttctgggcaatcyccttcctctgagtaggttaagggtaaggcatatttcaggacttggctcagaaataagtcctgacttttttccagtgaaaatgcaactgaaagtctcttta

SEQ ID NO: 40868 - DNA, 201 bp, Homo sapiens
gtagtaaataatgttacacccagccccacaggtaaaaaaacaaagaagtaatcctgaggagagtgtaggaattctccaaacccagccctgctgagttcctsttctccacaggcgaaaagcagatgcgcttcagcctctcagacctcccctatgatgtgaactcgggtggctatgaaaaggatgtggagttggtggcacacc

SEQ ID NO: 40869 - DNA, 201 bp, Homo sapiens
  misc_feature (1)...(201): n = A,T,C or G, or insertion/deletion polymorphism (see Tables 1-2)
ctttggctggccaaccaggtagggctattgatgtactactggggagttaaaaggggatggtgagagggagtgctagacaagggtgactccagtatctcccncactgagggatgaagtctgtggaacaggggatgattaccccagtaaatctgccaaacaccccattctaggtaacccagttggtggagagccttgtctgtg

SEQ ID NO: 40870 - DNA, 201 bp, Homo sapiens
gttatgttgctttatttatttatttagtgacagagtctcactctgtcacccaggctggagtgcaatggcgtgatctcggctcactccaacctctgcctccdgggttcaaacgattcttatgcctcagcctcccaagcagctaggactacaggcatgtaccaccaagcccagctaatttttgtatttttagtagagatgggg

SEQ ID NO: 40871 - DNA, 201 bp, Homo sapiens
tcctgacctcaggtgatccacccaccttggcctcccaaagtgctgggattacaggcgtgagccaccacacctggcctaaattacttttttttttttttagkgtctcagtgtgttgcccaggctggcctagaactcctggcctcaagcagtcctcttgccttggcctcccaaactgctgggattggccctcactgctgcctg

SEQ ID NO: 40872 - DNA, 201 bp, Homo sapiens
ttgagagccctaagaaagaaatgcaacagaggaatccccagggcagacatccagacgggagctgcaaacttgggaagcaggctgcctgctcctgtgtaccraaacagccctccctgtacctcctcacacaaaccccatcccgttattttcttacctcatggctgctagagttgtaggttctcactttttaaattttctata

SEQ ID NO: 40873 - DNA, 201 bp, Homo sapiens
atcccagcagtttgggaagccaaggcgggtggatcgcttgagcccaggagtttgagaccagccagagcaacatagtgagacttcgtctctactacaaaaamaaaaacaaaaacaaaaacaaaaactaggtgtggtggcacacacctgtagtcccagctactcaggaggctgagacagggaggatcacttgaacctgggagg

SEQ ID NO: 40874 - DNA, 201 bp, Homo sapiens
ggataataagcagaaaagaatggtgggggctgtcatgaagtggagaacatatgtcccacttaaagggacagcagctttcagtgtccactagaacttgtcakgcaggaatgtgtatctagtgtggccaaaacttctaaatttttaagagataccagaaatccaaatttttatatgaaatgtctccattttaaaataatgact

SEQ ID NO: 40875 - DNA, 201 bp, Homo sapiens
caggtgtgagccaccatgccagccgcaattttggaggtatgtaaatttccaccagatagattttttttttctctcctcccacaggctcctaaagagataaytcattgcaacaaattatcacttttaagtgttctcagttcccgattgtttaatactctactgccaattactgcttgccttccctcaaatagacattaacct

SEQ ID NO: 40876 - DNA, 201 bp, Homo sapiens
gggtctcacccagcacattttccagctgacaaaacgaggcagggtgggggtgggtacagaatttgaattcccctcaatacctttagtttcctggcactctyctcaaccgctgttataaagaaaaggtgatatttttctcagtatatgagggaggggaaagtgtagactcaagaatgagccaatggtccaataggggtaaga

SEQ ID NO: 40877 - DNA, 201 bp, Homo sapiens
aggcagaaggcggctagtggagggaggaaggggggtgctggggctagggagccaattcagtaactactcccaagcctgaggagatggagaggatgggggckgtgtgtgtgtgtgtgtgtgtgtgtgtgtgtgtgtgtgtgtgtgtagcgggggagggggcgttcctccttatacttgcggaggatgggaaagggtgtttgg

SEQ ID NO: 40878 - DNA, 201 bp, Homo sapiens
ctgacctcaggtgatccacccgcctcagcctcccaaagtgctgggattacaggcatgagccaccgtgcctggccagaaaattttttgcataccttatttcrccccattcccttctctcatgaacaaaactgtctattgttgttactcttgtcaaccctcgcttatatgtctaatagttcctactgtgcctgtctccccagc

SEQ ID NO: 40879 - DNA, 201 bp, Homo sapiens
atacctttccctggcccctttgcgtcttctccctcctcaattatgcaaagctttgatagagagcagagccagctatgtgatttcaacatatttttgctcasatttcactcagttcaggaaggcatagacagtagaggatgatgctgtgggtttgctctacttgtagcacctgaatggctcatacccaaggcacatgggaag

SEQ ID NO: 40880 - DNA, 201 bp, Homo sapiens
ttttttctccatgccctggcttcctagggaaatagggttgatactaggaatctctctgacaaaatgtaagagagaattgctttgtgaagtgaaggtaagcscatgtttcaggttttctcatgagccttcaaaaggagtctcaactccagacaagaattgggtgggggtgggggggcaggaaaacagatactttactctgtg

SEQ ID NO: 40881 - DNA, 201 bp, Homo sapiens
gtagcggggactcatctctggagaaggagttcctcggggccccagtggggccctcggtgagcacccccaacagccagcactcttctcctagccgctcactsagtggtaagtgtaacctcctaccacctcctggcagtaggcaccccctgttgcatttggccttcaattcaccttccactggcaaccatttccccatcgtca

SEQ ID NO: 40882 - DNA, 201 bp, Homo sapiens
agattcaagccataaggctttttctatagatagtgaacatttttcctcaggctttgacgggatagaatggggaaaatgggactttaggagaggatatgaaygggaaatggtcccaaagtcctgagtggttgttttcttcccactgaccaaagctggagagggatccctcaggagggtgtgttccggatttcttgcctcagg

SEQ ID NO: 40883 - DNA, 201 bp, Homo sapiens
ttgtttaacaaattagacatttctggcagaggttatgtatatgatacactttttttgatagcagctgcaatgttggacagaagatgaaatgctttgctttsagtcagattcttatgaatatctgcttttccctgactttgagttaggtagctttggaagtagcattaattcagataaactgccatcatgctgcgttatgcc

SEQ ID NO: 40884 - DNA, 201 bp, Homo sapiens
tacaatataaatgttcagattgcttagagaaggaaattgggaaagtaaaaatctcgaaattacttgaaaagtggacaatattaagggactgtatcaataamaattttgatccttgtaaattacgttttaaaaagatgtttcttttaaaaactaagctctaatttaaaattacatcaattagaactgtaagaaatctcttga

SEQ ID NO: 40885 - DNA, 201 bp, Homo sapiens
ctcgtctcaaaaaaaagaaagaaaattagtaattgtaagtacccctgataagcaaattagtaattgtcaatacccctgttaagcaattcctttttgcagtrtatttctgaaatgacagaatgctgttttaaaaacaaagaaataaaatcctgctcctgactcggtcaaaatattttttaaagtctattgtttgttgtgctt

SEQ ID NO: 40886 - DNA, 201 bp, Homo sapiens
cattttaaatatgtgcagtttattgaattttgataatccctaaatgaaggtgtaaaacgacaccaatataaaaataaataaatgggccaataaggatcatyagatatttaaagaaagctccaataagaaatataaacatcagagggtggcaccaagatggccgaataggaacagctccagtctgcagctcccagtgtgaag

SEQ ID NO: 40887 - DNA, 201 bp, Homo sapiens
ttttgcagtatatttctgaaatgacagaatgctgttttaaaaacaaagaaataaaatcctgctcctgactcggtcaaaatattttttaaagtctattgttygttgtgcttgctggtactaagaggctatttaaaagtataaaactgctttgtatccatgagggtttcattgtgtgttagcagcagtgagcttctattaaat

SEQ ID NO: 40888 - DNA, 201 bp, Homo sapiens
ggtgcagcccacagagctgggcagggcattgcctcaccaaggaagcacaaggggtgggggaattccctttcctagcaaagggaagccatgacagacagcasctggaaaatcgggacactcccaccctaatactgctcttttccaacagccttagcaaatggcacaccaggagattatatcccgcggctggcttggaggctc

SEQ ID NO: 40889 - DNA, 201 bp, Homo sapiens
agtataaaactgctttgtatccatgagggtttcattgtgtgttagcagcagtgagcttctattaaatgtatatgtcatttattttgtttaagtggctttcmgcaaacctcagtcatattcttatgcagggtattgcgaaacaacttgtgttctattaatcgtgtcttcaattaaaagaccacagacttctggaaactcttt

SEQ ID NO: 40890 - DNA, 201 bp, Homo sapiens
ggtaataacaaacttctccgagctaaaggaggatgtttgaacctatcacaaagaagctaaaaaccttgaaaaaagagtagacgaatggcagtgtagagaawagacaatgtagagaagtccttaaatgacctgatggagctgaaaatcatggcacaaggactacgtgacgcatgtacaagcttcagtagccgatttgatcaa

SEQ ID NO: 40891 - DNA, 201 bp, Homo sapiens
gggacacagggtggggaacatcacacacacgggcctgccggggggtgggcgggggagggatagcattaggagatatacctaatgtaaatgacgagttgacrggtgcagcacaacaacatggcgcacgtattcctatgtaacaaacctgcacattgtgcacatgtaccctagaaccttaagtaaaataataaaataaaaata

SEQ ID NO: 40892 - DNA, 201 bp, Homo sapiens
ggggaacatcacacacacgggcctgccggggggtgggcgggggagggatagcattaggagatatacctaatgtaaatgacgagttgacaggtgcagcacamcaacatggcgcacgtattcctatgtaacaaacctgcacattgtgcacatgtaccctagaaccttaagtaaaataataaaataaaaataaaaaagaaatat

SEQ ID NO: 40893 - DNA, 201 bp, Homo sapiens
gacaaaatttaacagctcttcatgctgaaaactctcaataaactaggtattgatgggatgtatctcaaaataatatgatctatttatgacaaacccacagscaatatcatactgaatgggcaaaaactggaagcattccctttgaaaatgggcacaagatagggatgccctctctcaccactcctattcaacagagtgttg

SEQ ID NO: 40894 - DNA, 201 bp, Homo sapiens
cccacaggcaatatcatactgaatgggcaaaaactggaagcattccctttgaaaatgggcacaagatagggatgccctctctcaccactcctattcaacakagtgttggaagttctggccagggcaatcagggaagagaaagaaataaagggtattcaattaggaaaagaggaagtcaaattgtccctgttgcagaggaca

SEQ ID NO: 40895 - DNA, 201 bp, Homo sapiens
ccactcctattcaacagagtgttggaagttctggccagggcaatcagggaagagaaagaaataaagggtattcaattaggaaaagaggaagtcaaattgtycctgttgcagaggacatgattgtatatttagaaaaccccaacatctcagcccaaaatctccttaagctgataagcaacttcagcaaaatctcaggataca

SEQ ID NO: 40896 - DNA, 201 bp, Homo sapiens
ataacagacaaacggagagacaaatcatgagtgaactccattcacagttgcttcaaagagaataaaatacctaggaatccaacttacaagggatgtgaagkacctcttcaaggagaactacaaaccactgctcagcaaaataaaacaggacacaaagaaatggaagaacatttcatgctcgtggataggaagaatcaatgt

SEQ ID NO: 40897 - DNA, 201 bp, Homo sapiens
agagaataaaatacctaggaatccaacttacaagggatgtgaaggacctcttcaaggagaactacaaaccactgctcagcaaaataaaacaggacacaaasaaatggaagaacatttcatgctcgtggataggaagaatcaatgttgtgaaaatggccatactgcctgaggtaatttatagattcaatgccatccccatca

SEQ ID NO: 40898 - DNA, 201 bp, Homo sapiens
ggaatccaacttacaagggatgtgaaggacctcttcaaggagaactacaaaccactgctcagcaaaataaaacaggacacaaagaaatggaagaacatttyatgctcgtggataggaagaatcaatgttgtgaaaatggccatactgcctgaggtaatttatagattcaatgccatccccatcaagctaccaatgactttc

SEQ ID NO: 40899 - DNA, 201 bp, Homo sapiens
gggtgaaggatatgaacagacacttctcaaaagaagacatttatgcagccaacagacacatgaaaaaatgctcatcatcactggccatcagagaaatgcamatcaaaaccacaatgagataccatctcatgccagttagactggcaatcattaaaaagtcaggaaacaacaggtgctggagaggatgtggagaaataggaa

SEQ ID NO: 40900 - DNA, 201 bp, Homo sapiens
aatagagccctcagaaataataccacacatctacaaccatctgatctttgacaaacctgacaaaaacaagaaatggggaaaggattccctatttaataaayggtgctgggaaaactggctagccatatgtagaaagctgaaactggatcccttccttacaccttatacaaaaatcagttcaagtgggattaaagacttaaa

SEQ ID NO: 40901 - DNA, 201 bp, Homo sapiens
gatctgagaaaggaaagactgcctcctcaagtgggtccctgacccctgagtagcctaactgggaggcacctcccagtaggggccgacagacacctcatacagggggatgcccctctaagacaaagcttccagaggaaggatcagacagcaacatctgctgttctgcaatattagctgttcttcagcctctgctggtgatac

SEQ ID NO: 40902 - DNA, 201 bp, Homo sapiens
aaaaaatgctcatcatcactggccatcagagaaatgcacatcaaaaccacaatgagataccatctcatgccagttagactggcaatcattaaaaagtcagkaaacaacaggtgctggagaggatgtggagaaataggaacacttttacactgttggtgggactgtaaagtagttcaaccattgtggaagacagtggggcaa

SEQ ID NO: 40903 - DNA, 201 bp, Homo sapiens
ttaggagatatacctaatgtaaatgacgagttgacaggtgcagcacaacaacatggcgcacgtattcctatgtaacaaacctgcacattgtgcacatgtamcctagaaccttaagtaaaataataaaataaaaataaaaaagaaatataaacattaaaagatattttttaacaaaagggatctgaaggaaatgaagaccac

SEQ ID NO: 40904 - DNA, 201 bp, Homo sapiens
atcccagcactttgggaggccgaggcaggcagatcacaaggtcaggagttcgagaccagcctgaccaacatggtgaaaccctgtctctactaaaaatacaraaattagccgggggtggtgacatgtgcctgtaatcccagctactcaggaggctaaggcaggagaatcgcttaaacccaggaggcggaggttgcagtgagc

SEQ ID NO: 40905 - DNA, 201 bp, Homo sapiens
ttaacaaaagggatctgaaggaaatgaagaccacaacagaaggagaattttgaaaagaaaccagaaaagagaaagctgtaaatagcatcctcagagataasgatggatattacatcaatgaaacaaaagcaggatgctataaaagaagattcagaaagcaagatctcttgaaaattaaaaatatgattgtagaagttgttt

SEQ ID NO: 40906 - DNA, 201 bp, Homo sapiens
ccagaaaagagaaagctgtaaatagcatcctcagagataacgatggatattacatcaatgaaacaaaagcaggatgctataaaagaagattcagaaagcamgatctcttgaaaattaaaaatatgattgtagaagttgtttttttatggaaaagttggtagattaggaaatttcatagaagttaaataattaaagagatta

SEQ ID NO: 40907 - DNA, 201 bp, Homo sapiens
aggatgctataaaagaagattcagaaagcaagatctcttgaaaattaaaaatatgattgtagaagttgtttttttatggaaaagttggtagattaggaaayttcatagaagttaaataattaaagagattaaaaatagtgaaaatatatataaacacaagattaataaaagcgttttgggagaggaaagcagagaaaatgg

SEQ ID NO: 40908 - DNA, 201 bp, Homo sapiens
tagccacattagcggttagaatacaatgaaataatgcctttataattctgaataaaaataatgtgtttagaactatgctcagaaacaaaaggtctcagtckttcatgtgtccattctcaggaagctactgcagtatatgttccatcaaaataaggacgtaaatcaagaaaactagaacagtatttttaaaatggaagaatg

SEQ ID NO: 40909 - DNA, 201 bp, Homo sapiens
gaaaactagaacagtatttttaaaatggaagaatgatgggagtatttctcaatatgaaagcaaaaggataaaaacaactacgtagcaatcctagaaagcartcagtttggagaaaagcagaaggtcagaggctataggagaaagatttccatgagaatgggcagtgagaggggaagttggaaataagaaggaaatattatc

SEQ ID NO: 40910 - DNA, 201 bp, Homo sapiens
ttgcctgtaatcccagcactttgggaggccgaggcaggcagatcacaaggtcaggagttcgagaccagcctgaccaacatggtgaaaccctgtctctactraaaatacaaaaattagccgggggtggtgacatgtgcctgtaatcccagctactcaggaggctaaggcaggagaatcgcttaaacccaggaggcggaggtt

SEQ ID NO: 40911 - DNA, 201 bp, Homo sapiens
atcagcaaaatccaggatgtgggaaattctacacaacaaatgcccccattttttaaatatcagtaatgtgaaaaataacggacagaaaattgtaaattaamgagtcacacagagcaaccaaatgcaatcttgtttagatcctgaatccaacaaaccagttaaattttttttttgtagacaactggaaaacgtgaatgctga

SEQ ID NO: 40912 - DNA, 201 bp, Homo sapiens
actatctataaattagagcagatgataaccaccgtagaggtgtgaagatgaagtgagatatcacatattattccacatccagactgatgttttaaagttgygggacagtttttctccaactgtagtgtgtatgcaattgctaaggaaagatcatttttgaaatgcagattttgatagagtggatccaaggtggggcctgag

SEQ ID NO: 40913 - DNA, 201 bp, Homo sapiens
gaccccacaacaggccctggtgtgtgatgttccccttcctgtgtccatgtgttctcattgttcaattcccacctatgagtgagaacgtgcagtgtttcgayagaagattttccttataacattagggtaagagaggatccattttgaatgttatgtttggcacccttaacatcttagagaaacaaaaaaggttatgaaaat

SEQ ID NO: 40914 - DNA, 201 bp, Homo sapiens
agcagcttacggcggttttgcagtcatatttatacccacttttaactacatgcagattaagggatggtttatgcggaaatttcaagggaagtggtagtaayttttgggtcatctggtcattgccctggaaagaggcagtaactcctgggtgttgttatagcaatggtaaactgacatggcacactagggggcgtgtcttat

SEQ ID NO: 40915 - DNA, 201 bp, Homo sapiens
taatttcccgtgttggcaattttaagaagaccagagccactaaatcatttctagaggagtatggattattacgacctttatagagtagaatttgtctatayagctcagaagtctttaaaatgtgcatacacatcactatttcctgaagtatgactttatcctgaagagtcctcccactaaaagacaactagaacttagata

SEQ ID NO: 40916 - DNA, 201 bp, Homo sapiens
ggacaatattaagggactgtatcaataaaaattttgatccttgtaaattacgttttaaaaagatgtttcttttaaaaactaagctctaatttaaaattacrtcaattagaactgtaagaaatctcttgatttcagtgctggattattctttgcagaaaatttgagaagcaatgggcatcctgaagctgcaagtatttctca

SEQ ID NO: 40917 - DNA, 201 bp, Homo sapiens
agaggagtatggattattacgacctttatagagtagaatttgtctatatagctcagaagtctttaaaatgtgcatacacatcactatttcctgaagtatgrctttatcctgaagagtcctcccactaaaagacaactagaacttagataagttaagacaaacatatttttatggctaagctcacagaaaggaaaagaaatc

SEQ ID NO: 40918 - DNA, 201 bp, Homo sapiens
tgaggcaggagaatggcgtgaacccaggaggcagagcttgcagtgagccgagatcgtgccactgcactccagcctgggcgacagagcgagactccgtcttaaaaaaaaaaaaaaaatcaatggacttcttacctctccttacatacttaaacaagagaaaagaagaagcatgtgtcaacacaaagacttgtacatgaatat

SEQ ID NO: 40919 - DNA, 201 bp, Homo sapiens
taatgtgaaaaataacggacagaaaattgtaaattaaagagtcacacagagcaaccaaatgcaatcttgtttagatcctgaatccaacaaaccagttaaattttttttttgtagacaactggaaaacgtgaatgctgaatgaatatttatattaaggaattcccataaattgtatgtttagatgggataatggtttcagag

SEQ ID NO: 40920 - DNA, 201 bp, Homo sapiens
accattccttctgaaactattccaatcaatagaaaaagagggaatcctccctcagtcattttatgaggccagcatcatcctgataccaaagcctggcagaracacaacaaaaaaagagaattttagaccaatatccctgatgaacatcgatgcaaaaatcctcaataaaatactggcaaaccgaatccagcaacacatcaa

SEQ ID NO: 40921 - DNA, 201 bp, Homo sapiens
agtaaaatttaaaaaaaaaacagtttcacatgagattattaaatatttactcttaggctatctctacttagagatagagataatgaaatactccccacacmaggtaaacacaatgagataaatccattgcatttgagtcccagattatgcatatccactggctcctggacattgagtttttagccctataactatttcatt

SEQ ID NO: 40922 - DNA, 201 bp, Homo sapiens
ggtttcaggagtgtgtgcattggccaaaaccagtcaaattatacattttaaatatgtgcagtttattgaattttgataatccctaaatgaaggtgtaaaaygacaccaatataaaaataaataaatgggccaataaggatcatcagatatttaaagaaagctccaataagaaatataaacatcagagggtggcaccaagat

SEQ ID NO: 40923 - DNA, 201 bp, Homo sapiens
ctaaagataacaatagaagaacgggcacagtgggatacaaaagaaaaaaagggagagagaaaaaggaaggagagaggtaagaaaaaaatgagtcatgatcwtatttgaaaaggtaacattcagagcttttgaaaaagcattaaatgtgacatagaaaagtagtttaaatatactaaagggaacaattcacagtaaagatat

SEQ ID NO: 40924 - DNA, 201 bp, Homo sapiens
agacaaacaggcagaaacatttaaataatagtagcttaattctcatgcagtccaagttctagtaaggtaaaaagtataaagaaggatttgtaagacttaarttacatttttaataaagtagattgtatggagatctatagagtagtgagaacttttgtatcttaaacagaaaatatgccttttccagtgctcgtggaaact

SEQ ID NO: 40925 - DNA, 201 bp, Homo sapiens
ttcacatttgttccatgttaccagtcatcaggtggaaaagcggaaatgcaacactgccacatgtgcaacgcagcgcctggcaaattttttagttcattccrgcaacaactttggtgccattctctcatctaccaacgtgggatccaatacatatggcaagaggaatgcagtagaggttttaaagagagagccactgaatta

SEQ ID NO: 40926 - DNA, 201 bp, Homo sapiens
gtgatttctgcatttccaactgaggtaccaggttcatctcactggggcttgccagacaagtgggtgcagcccacagagctgggcagggcattgcctcaccmaggaagcacaaggggtgggggaattccctttcctagcaaagggaagccatgacagacagcacctggaaaatcgggacactcccaccctaatactgctctt

SEQ ID NO: 40927 - DNA, 201 bp, Homo sapiens
cacatttgttgttatccttacccttttctatcagttccttaccataacatacacttaattcttggaaattcactcatgtcttacaaagatggcaaattcamacttctgctgtgtatgacacaccattaactgcacaaggacactgtgtatttgctacgttaatatttactgatgagttaatgtaataatgacccatccgct

SEQ ID NO: 40928 - DNA, 201 bp, Homo sapiens
caaacttctgctgtgtatgacacaccattaactgcacaaggacactgtgtatttgctacgttaatatttactgatgagttaatgtaataatgacccatccrcttctgctgcctgtgaggtactttctatctatagggatggaaattaatgacagaggctctctgagctgcctgatgtcagagctgagaaaggtgtgagggg

SEQ ID NO: 40929 - DNA, 201 bp, Homo sapiens
tatatcaggaatacagaaaagatcctaaggacttctacagagaggttttaaacaatgaaatataaaaaatcaaaaactgcttttcttttagccacattagyggttagaatacaatgaaataatgcctttataattctgaataaaaataatgtgtttagaactatgctcagaaacaaaaggtctcagtctttcatgtgtcca

SEQ ID NO: 40930 - DNA, 201 bp, Homo sapiens
atatctttgatggaacttctgacagacaggaatggataattccagttttgtcaagaaatatactcttggaacttagaggggcaaagccagaacatgaagcrggaaaaaaatcaaaaggtagtaatttcttctatattaacctgatactgaaacaaaccagagaaacttaactaaagcatatatttttataccaagtggatt

SEQ ID NO: 40931 - DNA, 201 bp, Homo sapiens
tcctcagatgtctctggaaatgttaaaaacttttacatcttgtggaaatggaaatgtatagaaataatcaggagcaaattaatgtttttaagaaatgaaayctaaaagaagtagttaaaaagccatttgctgttgggggatttattctatattgctagctagctattctgtgagtgaaacagatttataaaaagttattct

SEQ ID NO: 40932 - DNA, 201 bp, Homo sapiens
ataatgtgtttagaactatgctcagaaacaaaaggtctcagtctttcatgtgtccattctcaggaagctactgcagtatatgttccatcaaaataaggacrtaaatcaagaaaactagaacagtatttttaaaatggaagaatgatgggagtatttctcaatatgaaagcaaaaggataaaaacaactacgtagcaatcct

SEQ ID NO: 40933 - DNA, 201 bp, Homo sapiens
tttgagtctgtctcaaggttagggagctgatgtgagtttcctatattacccttaatcccccatggagctaaagtgatcctagatgttagggaattctgtayagtggcaatgcaaccaaatcttttctcagggaatatttccaacataaacacttaggattcttacagattaagttaaaaaacagatgatcttataaacaaa

SEQ ID NO: 40934 - DNA, 201 bp, Homo sapiens
gattttccttataacattagggtaagagaggatccattttgaatgttatgtttggcacccttaacatcttagagaaacaaaaaaggttatgaaaatagaayaaataacaatgtaggtaataagcaagtatttttgtctaaatgaacactagaccatgagtcataaagctaagctttggtccaggattcagcattaactaga

SEQ ID NO: 40935 - DNA, 201 bp, Homo sapiens
aactttaaaatcctgtttctttgtaacttttgtaaagtgtgagaaaattagaattaaatactgtcaaataactacagccttagatttctgactatatcatrcttaagaacagtaccttcagctattccattgttccttgaattctgtgttctttaaagaataacaccagtggcaaataaatatctttgatggaacttctga

SEQ ID NO: 40936 - DNA, 201 bp, Homo sapiens
ctcccacctcagcctcccaagtagctgggaccacaggcacctgccaccatacccagctaattgttttatctttattttatagggaaagggtctccctatgwtgcccaggctggtgtcaaactcctgggctcaagccttcctcctgcctcagtcttccaaaattctgggattataagagtgagccactgaacccagaccatt

SEQ ID NO: 40937 - DNA, 201 bp, Homo sapiens
ctttctttctatcagaagcatttgctgatattgctgacattgaaacattaaaaggtaaagaatttcctatttctgggaaagttttatttatttagagaaaygcacacttggtgttaaattcatggtttatttcaaagaaaggctaaagggagaatgtattacaatataaatgttcagattgcttagagaaggaaattggga

SEQ ID NO: 40938 - DNA, 201 bp, Homo sapiens
gggagctgatgtgagtttcctatattacccttaatcccccatggagctaaagtgatcctagatgttagggaattctgtatagtggcaatgcaaccaaatcytttctcagggaatatttccaacataaacacttaggattcttacagattaagttaaaaaacagatgatcttataaacaaaaatcaaactactgtaactgag

SEQ ID NO: 40939 - DNA, 201 bp, Homo sapiens
ctaactcaaataaggtaacattttatttagaacaattttaaattatattattgaccttccaaccaattatcaaaataccactcagcatttagcatataaaktatttcacactgtgcttcagtcatatgctaaacatatcttggaacagatattacctttgaatcttctcaatttgacccataattttcctttattactttt

SEQ ID NO: 40940 - DNA, 201 bp, Homo sapiens
ttttaaaactgattatttctaattaaccaaaaaaggctacttaaaatggccaagaagtatttagaactaaactaacttaatctttgatattaaaatagtaytgaatgagtaacagcatatcagatacagatgaaagggatgatttgtgaacttgaaaatagattttaagaaattatacaggattatcacaaaaggcatcaa

SEQ ID NO: 40941 - DNA, 201 bp, Homo sapiens
ccaattatcaaaataccactcagcatttagcatataaagtatttcacactgtgcttcagtcatatgctaaacatatcttggaacagatattacctttgaaycttctcaatttgacccataattttcctttattactttttttgagatgtttggaccaaattccaatttttactgtttttcaagaaaagtaagtattttaga

SEQ ID NO: 40942 - DNA, 201 bp, Homo sapiens
ttcattttccatttaccctaagtttcaccaatattttgatttctatggagctgaaaactaaaacatttctctaactttcctaataatcagcaaagaggaascaatgttattattctgcatccatttccgatatcgttttaaaagcacattgaaacaaaaggctgtcaaaaaaatagagttggtatacaaataaatgtctta

SEQ ID NO: 40943 - DNA, 201 bp, Homo sapiens
ggacgtataaaaaggggaagtttggtcacagagacacacacacagggataatgcctcatgggaatgaagacaaaaatcaggtgatgctgcttctccaaacmaacaagattgccagcaaactaccagaagctagaaagaggcatggaacagccctcagatagaaccaaccctgctgacacctaatcttagacttcttgcctc

SEQ ID NO: 40944 - DNA, 201 bp, Homo sapiens
ataggcatttttcacttaataaacttaaaaatgtctgtgctacattttaaaggatggtagaaagaataattttttaaaagacaactctagattgttctctrgcaaagtgaatctgtgatacaaagagatgaaagtatgctggaaaaaatcattaagcttgctaatttgcagctttttacatagaaaatagtgttctttaag

SEQ ID NO: 40945 - DNA, 201 bp, Homo sapiens
ccactgaattacttgcccctttagaggacaatgtaactctatagttattgttttatgttctagtgatttcctgtataatttaacagtgcccttttcatctycagtgtgaatatatggtctgtgtgtctgatgtttgttgctaggacatataccttctcaaaagattgttttatatgtagtactaactaaggtcccataata

SEQ ID NO: 40946 - DNA, 201 bp, Homo sapiens
gtacccctgataagcaaattagtaattgtcaatacccctgttaagcaattcctttttgcagtatatttctgaaatgacagaatgctgttttaaaaacaaakaaataaaatcctgctcctgactcggtcaaaatattttttaaagtctattgtttgttgtgcttgctggtactaagaggctatttaaaagtataaaactgct

SEQ ID NO: 40947 - DNA, 201 bp, Homo sapiens
ttaaaaattaactttgaaacatgaaaagaagtctacaaacaataaatgaacaatattgaaaaaattaaaagaaaaataaaaagcggtttgttggagatacttttaaaatataaagatgcaaaccattaaatactgaattctaatacataagtctaaatacctaccaaagccacaaagagattcctgaaggaataaacatgt

SEQ ID NO: 40948 - DNA, 201 bp, Homo sapiens
tggactttaagaaagaccatccccgcatacttccttccaagcatccaggtaacaaccttctctaaccctaacaacagtttaatttctggataaattaaacktgatagactctaggtctgtggaaaccaatcaccataaagggaagaagaaaaacactagtttaaaaacagggaaaatcaactaaattataaaccctcttcc

SEQ ID NO: 40949 - DNA, 201 bp, Homo sapiens
agtgtctcactaataaatgtcaatggacttctaattagccaggcatggtggtgggcacctgtggtcccagctactcgggaggctgaggcaggagaatggcrtgaacccaggaggcagagcttgcagtgagccgagatcgtgccactgcactccagcctgggcgacagagcgagactccgtcttaaaaaaaaaaaaaaaatc

SEQ ID NO: 40950 - DNA, 201 bp, Homo sapiens
gcgacagagcgagactccgtcttaaaaaaaaaaaaaaaatcaatggacttcttacctctccttacatacttaaacaagagaaaagaagaagcatgtgtcarcacaaagacttgtacatgaatatttgttgcagctttatttgtaatagcctcaaactagaaacaacccgaagtccattaacaaaatggctaaacattttgt

SEQ ID NO: 40951 - DNA, 201 bp, Homo sapiens
aagtgggtccctgacccctgagtagcctaactgggaggcacctcccagtaggggccgacagacacctcatacagggggatgcccctctaagacaaagcttycagaggaaggatcagacagcaacatctgctgttctgcaatattagctgttcttcagcctctgctggtgatacccaggcaaacagggtctggagtggacct

SEQ ID NO: 40952 - DNA, 201 bp, Homo sapiens
acacctcatacagggggatgcccctctaagacaaagcttccagaggaaggatcagacagcaacatctgctgttctgcaatattagctgttcttcagcctcygctggtgatacccaggcaaacagggtctggagtggacctccagcaaactccaacagacctgcagttgagggtcctgactgttagaaggaaaactaacaaa

SEQ ID NO: 40953 - DNA, 201 bp, Homo sapiens
aacaaacttctccgagctaaaggaggatgtttgaacctatcacaaagaagctaaaaaccttgaaaaaagagtagacgaatggcagtgtagagaatagacartgtagagaagtccttaaatgacctgatggagctgaaaatcatggcacaaggactacgtgacgcatgtacaagcttcagtagccgatttgatcaaatagaa

SEQ ID NO: 40954 - DNA, 201 bp, Homo sapiens
agtgtagagaatagacaatgtagagaagtccttaaatgacctgatggagctgaaaatcatggcacaaggactacgtgacgcatgtacaagcttcagtagcygatttgatcaaatagaagaaagggtatcagtgattgaagatcaaatgaatgaaatgcagggagaagagaagtttagagaaaaaagagtaaaaagaaatga

SEQ ID NO: 40955 - DNA, 201 bp, Homo sapiens
aacactcttcaggatatcatgccggagaacttccccaacctagcggggaaggccaacattcaaattcagaaaatacagagaatgccacaaagatactcctygagaagagaaactccaagacacataattgtcagattcaccaaagttgaaatgaaggaaaaaatgttaagggcagccagagagaaaggtcaggttacccac

SEQ ID NO: 40956 - DNA, 201 bp, Homo sapiens
gattcaccaaagttgaaatgaaggaaaaaatgttaagggcagccagagagaaaggtcaggttacccacaaagggaagcccattagactaacagtgagcggstctctcggcagaaactctacaagccagtagagagtgggggccaatattcaacattcttaaagaaaagaattttcaacccagaatttcatacccagtcaaa

SEQ ID NO: 40957 - DNA, 201 bp, Homo sapiens
acttagactcccacacaataataatgggagacattaacaccccactgtgaacattagacagatcaacaagacagaaagttaacaaggatatccaggaattwaactcagctctgcaccaagcggacctaatagacatctacagaaccctccaccccaaaacaacagaatatacattcttctcagcaacacatcacacttatt

SEQ ID NO: 40958 - DNA, 201 bp, Homo sapiens
tgtgaacattagacagatcaacaagacagaaagttaacaaggatatccaggaatttaactcagctctgcaccaagcggacctaatagacatctacagaacyctccaccccaaaacaacagaatatacattcttctcagcaacacatcacacttattccaaaatggaccacatagttggaagtaaagcactcctcagcaaat

SEQ ID NO: 40959 - DNA, 201 bp, Homo sapiens
acaaaaaccacatgattatctcaatagatgaagaaaaggcctttgacaaaatttaacagctcttcatgctgaaaactctcaataaactaggtattgatggkatgtatctcaaaataatatgatctatttatgacaaacccacaggcaatatcatactgaatgggcaaaaactggaagcattccctttgaaaatgggcacaa

SEQ ID NO: 40960 - DNA, 201 bp, Homo sapiens
gaatgctgttttaaaaacaaagaaataaaatcctgctcctgactcggtcaaaatattttttaaagtctattgtttgttgtgcttgctggtactaagaggcwatttaaaagtataaaactgctttgtatccatgagggtttcattgtgtgttagcagcagtgagcttctattaaatgtatatgtcatttattttgtttaagt

SEQ ID NO: 40961 - DNA, 201 bp, Homo sapiens
ccactcaggtgtcttgatgtgtcgggggtgtggctgcctgccccctgatgctccctgccccaccctgtgcagtaggaacccagccatggtgaacgaagccwgaggaaacagcagcctcaacccctgcttggagggcagtgccagcagtggcagtgagagctccaaagatagttcgagatgttccaccccgggcctggaccc

SEQ ID NO: 40962 - DNA, 201 bp, Homo sapiens
accatcctgcacatgacctgctgccgtcagcgcctggaggagatcacgggccatctgcacaaagctaagcagctgggcctgaagaacatcatggcgctgcrgggaggtgtggagccagcactcccctacactctgggttctggctttcccggaggccacttggtagcctgaacttggttcctgaaatggtcctttacttct

SEQ ID NO: 40963 - DNA, 201 bp, Homo sapiens
gaggagctgaccagtgaagaaagtgtctttgaagtctttgttctttacctctcgggagaaccaaaccggaatggtcacaaagtgagtgatgctggagtggrgaccctggttcatcccctgcccctggcctgaccccagctgcaggccaggctgcggggctgtgacttccccatcctgtgccctcccctccatgctgtggac

SEQ ID NO: 40964 - DNA, 201 bp, Homo sapiens
aggaagcactccctgaaaggcagctgctgttactatcctgagttgacacctttctcccagggctgctggagttaacattatgttctgatctaaggcccacrggccctggagcagaaagacctgagtttaaggaccagctctactgtttactgtcagagtagccaacgtgctcaacttccctgaacccactttcctcacgtg

SEQ ID NO: 40965 - DNA, 201 bp, Homo sapiens
acgtgattgagccaatcaaagacaacgatgctgccatccgcaactatggcatcgagctggccgtgagcctgtgccaggagcttctggccagtggcttggtrccaggcctccacttctacaccctcaaccgcgagatggctaccacagaggtgctgaagcgcctggggatgtggactgaggaccccaggtgagggcagtggc

SEQ ID NO: 40966 - DNA, 201 bp, Homo sapiens
cctcccaaagtgctgggattacaggtgtgttttttgtttttttaagagatggagtctcgctatgttgcccaggctggccttgaactcctgggctcaggcawtccttctgcctcagccttcccagtagctgggtcactgtgatgatttgaattgaattctgtgatgtgtaagaagagcagcctgcaaggcaagcacagatgg

SEQ ID NO: 40967 - DNA, 201 bp, Homo sapiens
gccagcagtggcagtgagagctccaaagatagttcgagatgttccaccccgggcctggaccccgagcggcatgagagactccgggagaagatgaggcggcrattggaatctggtgacaagtggttctccctggaattcttccctcctcgaactgctgagggagctgtcaatctcatctcaaggtaaactcatgcaaggtta

SEQ ID NO: 40968 - DNA, 201 bp, Homo sapiens
cagagcaaagcagcttggccttccgcctggctcagagtcctgccctgggcttgggctgatgaaaccagcactccatgtagtttcatgaaggcctatggtcrtcctgcttgcctgaccgagcaaggcggctagtaagtttagtcattgaggaaaggggtcagagagttcacagagccagtaaggagcctatgggacatctga

SEQ ID NO: 40969 - DNA, 201 bp, Homo sapiens
actactacctcttctacctgaagagcaagtcccccaaggaggagctgctgaagatgtggggggaggagctgaccagtgaagaaagtgtctttgaagtcttygttctttacctctcgggagaaccaaaccggaatggtcacaaagtgagtgatgctggagtggggaccctggttcatcccctgcccctggcctgaccccagc

SEQ ID NO: 40970 - DNA, 201 bp, Homo sapiens
gcctttggggagctgaaggactactacctcttctacctgaagagcaagtcccccaaggaggagctgctgaagatgtggggggaggagctgaccagtgaagmaagtgtctttgaagtctttgttctttacctctcgggagaaccaaaccggaatggtcacaaagtgagtgatgctggagtggggaccctggttcatcccctg

SEQ ID NO: 40971 - DNA, 201 bp, Homo sapiens
gcaattcctcttcccctgcctttggggagctgaaggactactacctcttctacctgaagagcaagtcccccaaggaggagctgctgaagatgtggggggakgagctgaccagtgaagaaagtgtctttgaagtctttgttctttacctctcgggagaaccaaaccggaatggtcacaaagtgagtgatgctggagtgggga

SEQ ID NO: 40972 - DNA, 201 bp, Homo sapiens
gatggcagcaggtggccccctctacatagacgtgacctggcacccagcaggtgaccctggctcagacaaggagacctcctccatgatgatcgccagcaccrccgtgaactactgtggcctggagaccatcctgcacatgacctgctgccgtcagcgcctggaggagatcacgggccatctgcacaaagctaagcagctggg

SEQ ID NO: 40973 - DNA, 201 bp, Homo sapiens
ccagagaggagcacctgaaccccatgggcttggacttcctggggccccgctgggatttcttcgctgctctagctggcaggacacatcccggcctcttcttccacccattcccccatgtggctgaagacattccaacaatggggtgggcccataatagttagccctcagtcagttcccggagcacagccctgggagggggct

SEQ ID NO: 40974 - DNA, 201 bp, Homo sapiens
gccagagaggagcacctgaaccccatgggcttggacttcctggggccccgctgggatttcttcgctgctctagctggcaggacacatcccggcctcttcttccacccattcccccatgtggctgaagacattccaacaatggggtgggcccataatagttagccctcagtcagttcccggagcacagccctgggagggggc

SEQ ID NO: 40975 - DNA, 201 bp, Homo sapiens
agccagagaggagcacctgaaccccatgggcttggacttcctggggccccgctgggatttcttcgctgctctagctggcaggacacatcccggcctcttcttccacccattcccccatgtggctgaagacattccaacaatggggtgggcccataatagttagccctcagtcagttcccggagcacagccctgggaggggg

SEQ ID NO: 40976 - DNA, 201 bp, Homo sapiens
ctattggcaggttaccccaaaggccaccccgaagcagggagctttgaggctgacctgaagcacttgaaggagaaggtgtctgcgggagccgatttcatcaycacgcagcttttctttgaggctgacacattcttccgctttgtgaaggcatgcaccgacatgggcatcacttgccccatcgtccccgggatctttcccatc

SEQ ID NO: 40977 - DNA, 201 bp, Homo sapiens
tctgggcctccagaccaaagagttacatctaccgtacccaggagtgggacgagttccctaacggccgctggtgagggcctgcagaccttccttgcaaatayatctttgttcttgggagcgggagggcagaagaagtttgcatgcttgtggttgacctgggaggagtcaggggcagaatttacaggaatggcctcctgggca

SEQ ID NO: 40978 - DNA, 201 bp, Homo sapiens
ctcaggggtgctcccctgcttccggctccctctagccaatcccttgtctcaattctctgtccccatcctcacccaggcgtcccctaccctgggctctcagygcccaccccaagcgccgagaggaagatgtacgtcccatcttctgggcctccagaccaaagagttacatctaccgtacccaggagtgggacgagttcccta

SEQ ID NO: 40979 - DNA, 201 bp, Homo sapiens
ctcagagggcatcagatggaagaactcagcctcaggggtgctcccctgcttccggctccctctagccaatcccttgtctcaattctctgtccccatcctcrcccaggcgtcccctaccctgggctctcagcgcccaccccaagcgccgagaggaagatgtacgtcccatcttctgggcctccagaccaaagagttacatct

SEQ ID NO: 40980 - DNA, 201 bp, Homo sapiens
ggccaaggtgggaggattgcttgagcccagaagttccagacaaacctggacaagatagcaagaccccatctctaaaaaataaataattaattaaaaaaaawttttttaattagccagatgtggtggcttgcatctgtagtccaagctactcaggagactgaagtgggagatcacttgtgcccgggagttcaaggctacagt

SEQ ID NO: 40981 - DNA, 201 bp, Homo sapiens
agagatccccagaggagggtccaagagcagccccggctgcagtgctggctccccacggtggtacagatggatgtctgtgccatggctagctgggcacatcraaggctccagtctcagagggcatcagatggaagaactcagcctcaggggtgctcccctgcttccggctccctctagccaatcccttgtctcaattctctg

SEQ ID NO: 40982 - DNA, 201 bp, Homo sapiens
ctgctgaccctctttctaactgttcctacagcgaggctgtgcttgccacagttaggattcccctaactctcaatcatgatgtcttaactcacctgagatartaaacaggcaagcgctgtgaaaagtctgaagtgctgctctcacacaaaatgatagcgctgttgttgtgtcttacctctgtaatagtgattataacggcac

SEQ ID NO: 40983 - DNA, 201 bp, Homo sapiens
tgactgtcatccctattggcaggttaccccaaaggccaccccgaagcagggagctttgaggctgacctgaagcacttgaaggagaaggtgtctgcgggagycgatttcatcatcacgcagcttttctttgaggctgacacattcttccgctttgtgaaggcatgcaccgacatgggcatcacttgccccatcgtccccggg

SEQ ID NO: 40984 - DNA, 201 bp, Homo sapiens
tggagagccctgttaatcttgcctctgtgtgtgtgtgcatgtgtgcgtgtgtgcgggggtatgtgtgtgtaggacgaggcctttgccctgtggattgagcrgtggggaaagctgtatgaggaggagtccccgtcccgcaccatcatccagtacatccacgacaactacttcctggtcaacctggtggacaatgacttccca

SEQ ID NO: 40985 - DNA, 201 bp, Homo sapiens
cgagagatcatccagcccaccgtagtggatcccgtcagcttcatgttctggaaggtaaaggagccgggggcaagcttgccccgcccacctggaaaaccgtsgggagggattgggaccaagtcccaagcgtgtgctgaaggccacactggacccagccttcagggcacacccagctctgactcacccatgtcactgctgacg

SEQ ID NO: 40986 - DNA, 201 bp, Homo sapiens
tggcccaggtcttacccccaccccacatcccctcagggtgaaaacatcaccaatgcccctgaactgcagccgaatgctgtcacttggggcatcttccctgrgcgagagatcatccagcccaccgtagtggatcccgtcagcttcatgttctggaaggtaaaggagccgggggcaagcttgccccgcccacctggaaaaccg

SEQ ID NO: 40987 - DNA, 201 bp, Homo sapiens
tggccagcatcaagttctaacccacaacacggtctttttggagtagcatgaattcaggagaaatctggctgcatagtcaagccctcaccccttccatcctrtgcacgaactgtttcaagtaacagatgttccaggcagagccagccagagtgagctgttccttctctggagggtgatctggtatccctgaacgcctgttgg

SEQ ID NO: 40988 - DNA, 201 bp, Homo sapiens
tgctcttaaggagctcccagcctagagtgagggaggcagatcaatgtgtgaccaccagccagtgtaagtgggaaaatcaagttcaggagaggatgctgtcrggtccagaggagggatatctcacctgggaggccagggaaggcttctcagagggtcatctgtgggaatcactgaggacaaagaggagttggccaacaggag

SEQ ID NO: 40989 - DNA, 201 bp, Homo sapiens
ttaaccagactgccagatgaccctatgccctctgttggcctgtctgtgccctggtggctctgattacttgtttctgttttttgtttttgttttttttttttgagatggagttttgcttttgtcgcccaggctggagtgctatggcacaatcttggttcactgcaacctctgccttccgggttcaagcgattctcctgcctc

SEQ ID NO: 40990 - DNA, 201 bp, Homo sapiens
aggtggctgtcatcagaaccacttgataagctttttcaaaaagtggatctccaggtcccacccctggaggttctcactcagtaaatctgagggaggtcctyggaatgtgtgttttacttcttgagcttggcaggtgattcggatgatcagtgcagcatgggaacagctgggttagatgacaccatgttaccaacagacaca

SEQ ID NO: 40991 - DNA, 201 bp, Homo sapiens
ctgagcccaggccgttccccttggcttcctccgtccacccaggctgcactgcagtgatggcgcgggaggcaccagctctgtggcctgtgtccagcagctgygggtctgaaggaatagccagagaggagcacctgaaccccatgggcttggacttcctggggccccgctgggatttcttcgctgctctagctggcaggacac

SEQ ID NO: 40992 - DNA, 201 bp, Homo sapiens
tagccctcagacctgtccagactgagaaactcacgtccccactcccctcaccctttgcttatggacgtgccaacgccacagttcattattccgcccacatkgctgccagtagtcctgataccttaggtgtctgcgaaagggcgtctggcagggctggggttggtgacaggcacctgtctctcccacaggcctacttagagt

SEQ ID NO: 40993 - DNA, 201 bp, Homo sapiens
accacacacccattcactactgtgtgtttgcccattgctgtgcaagtgttttgtttgtttttaagtgtttgtcttattttcttaaccagactgccagatgrccctatgccctctgttggcctgtctgtgccctggtggctctgattacttgtttctgttttttgtttttgttttttttttttgagatggagttttgctttt

SEQ ID NO: 40994 - DNA, 201 bp, Homo sapiens
gatgctgccatccgcaactatggcatcgagctggccgtgagcctgtgccaggagcttctggccagtggcttggtgccaggcctccacttctacaccctcarccgcgagatggctaccacagaggtgctgaagcgcctggggatgtggactgaggaccccaggtgagggcagtggcccagagatccccagaggagggtccaa

SEQ ID NO: 40995 - DNA, 201 bp, Homo sapiens
aggagttgagtacagtgaggagggtggaggaaggtgctgagcttagccttgtgccctgcccccatctccccaggcctccagcctctcccggctgcctgccrcccaaagagaaatcacaggggcggggcaggaatgcaaagtgttttctcagaacagctgaaacattccgaagagggaatggatggggagaatggtcaatac

SEQ ID NO: 40996 - DNA, 201 bp, Homo sapiens
tgcccctgaactgcagccgaatgctgtcacttggggcatcttccctgggcgagagatcatccagcccaccgtagtggatcccgtcagcttcatgttctggwaggtaaaggagccgggggcaagcttgccccgcccacctggaaaaccgtggggagggattgggaccaagtcccaagcgtgtgctgaaggccacactggacc

SEQ ID NO: 40997 - DNA, 201 bp, Homo sapiens
aaggctagttcctttcaattccatttaaaaaacaaaaaccagcaggtgtggtggctcatggcgtaatgggcctgcccaatgctttgggaggccaaggcagrtagatcgcttgagcccaggagtttgagacaagccctggcaacatagtgagatcccatttctacaaaaaaaaaaaaaaaattagccgggtgtggtggcaca

SEQ ID NO: 40998 - DNA, 201 bp, Homo sapiens
cctcacccaggcgtcccctaccctgggctctcagcgcccaccccaagcgccgagaggaagatgtacgtcccatcttctgggcctccagaccaaagagttasatctaccgtacccaggagtgggacgagttccctaacggccgctggtgagggcctgcagaccttccttgcaaatatatctttgttcttgggagcgggaggg

SEQ ID NO: 40999 - DNA, 201 bp, Homo sapiens
agtgccagcagtggcagtgagagctccaaagatagttcgagatgttccaccccgggcctggaccccgagcggcatgagagactccgggagaagatgaggcsgcgattggaatctggtgacaagtggttctccctggaattcttccctcctcgaactgctgagggagctgtcaatctcatctcaaggtaaactcatgcaagg

SEQ ID NO: 41000 - DNA, 201 bp, Homo sapiens
aacgatgctgccatccgcaactatggcatcgagctggccgtgagcctgtgccaggagcttctggccagtggcttggtgccaggcctccacttctacacccycaaccgcgagatggctaccacagaggtgctgaagcgcctggggatgtggactgaggaccccaggtgagggcagtggcccagagatccccagaggagggtc

SEQ ID NO: 41001 - DNA, 201 bp, Homo sapiens
tgtgaaggtaggccaggccccagggttcccacagagtaccaggcccttcgttgagcaaacacccagcacctagcctgggctaggcattgtgcaagacagasagatacaggcagaactggggccctgctcttaaggagctcccagcctagagtgagggaggcagatcaatgtgtgaccaccagccagtgtaagtgggaaaat

SEQ ID NO: 41002 - DNA, 201 bp, Homo sapiens
gtggactgaggaccccaggtgagggcagtggcccagagatccccagaggagggtccaagagcagccccggctgcagtgctggctccccacggtggtacagrtggatgtctgtgccatggctagctgggcacatcgaaggctccagtctcagagggcatcagatggaagaactcagcctcaggggtgctcccctgcttccgg

SEQ ID NO: 41003 - DNA, 201 bp, Homo sapiens
gtgtgctcctagaatatgatcggactttcgtgggtccctctgcctgacactgtggttggcatggatgatggaagggggagaagtatttagggtgggagacrggctggccagcagccgccacagcccctcatgtcttggacagggctaccactcccttcggcagcttgtgaagctgtccaagctggaggtgccacaggagat

SEQ ID NO: 41004 - DNA, 201 bp, Homo sapiens
ccctggcggctgagaccagcctgctgaaggaggagctgctgcgggtgaaccgccagggcatcctcaccatcaactcacagcccaacatcaacgggaagccrtcctccgaccccatcgtgggctggggccccagcgggggctatgtcttccagaaggtgtggtagggaggcacggggtgcccccctctcttgaccggcaccc

SEQ ID NO: 41005 - DNA, 201 bp, Homo sapiens
tgctgccatccgcaactatggcatcgagctggccgtgagcctgtgccaggagcttctggccagtggcttggtgccaggcctccacttctacaccctcaacygcgagatggctaccacagaggtgctgaagcgcctggggatgtggactgaggaccccaggtgagggcagtggcccagagatccccagaggagggtccaaga

SEQ ID NO: 41006 - DNA, 201 bp, Homo sapiens
tttccctcctgctgtcttaccaagtgctagaaagagacgaaccaaacctaaataatatgaagtttctgccttccagggactcgcagtcctgggtgtcgggrctaggtagagggaacagaaagggtctctggaggttgggtgagacccagtgactatgacctccaccaaccctgcagacccaataggtgaccagtgggaaga

SEQ ID NO: 41007 - DNA, 201 bp, Homo sapiens
ggtggcacctcctgagaaggcgaggagagtggttgttgccaactaagccctcgaaccaaggcagcctccagagccagcctgggactcccagtgaacttacmcttggagcccgtgcagtacaggcaaaacacgcaagggcatcaggcactggtggcatcgtagaagagatgtggcaaagtgctgtacccttccacctcctag

SEQ ID NO: 41008 - DNA, 201 bp, Homo sapiens
ccctgcttccggctccctctagccaatcccttgtctcaattctctgtccccatcctcacccaggcgtcccctaccctgggctctcagcgcccaccccaagygccgagaggaagatgtacgtcccatcttctgggcctccagaccaaagagttacatctaccgtacccaggagtgggacgagttccctaacggccgctggtg

SEQ ID NO: 41009 - DNA, 201 bp, Homo sapiens
ttttttccctcctgctgtcttaccaagtgctagaaagagacgaaccaaacctaaataatatgaagtttctgccttccagggactcgcagtcctgggtgtcrgggctaggtagagggaacagaaagggtctctggaggttgggtgagacccagtgactatgacctccaccaaccctgcagacccaataggtgaccagtggga

SEQ ID NO: 41010 - DNA, 201 bp, Homo sapiens
actggtgggctgcttttttccctcctgctgtcttaccaagtgctagaaagagacgaaccaaacctaaataatatgaagtttctgccttccagggactcgcrgtcctgggtgtcggggctaggtagagggaacagaaagggtctctggaggttgggtgagacccagtgactatgacctccaccaaccctgcagacccaatag

SEQ ID NO: 41011 - DNA, 201 bp, Homo sapiens
caagttcaggagaggatgctgtcgggtccagaggagggatatctcacctgggaggccagggaaggcttctcagagggtcatctgtgggaatcactgaggasaaagaggagttggccaacaggagagaagggtattcctgggacagggcagaggacaggcagaggcagtgagctgcaccatctggggaaaccgggaacatga

SEQ ID NO: 41012 - DNA, 201 bp, Homo sapiens
agacctcctccatgatgatcgccagcaccgccgtgaactactgtggcctggagaccatcctgcacatgacctgctgccgtcagcgcctggaggagatcacrggccatctgcacaaagctaagcagctgggcctgaagaacatcatggcgctgcggggaggtgtggagccagcactcccctacactctgggttctggctttc

SEQ ID NO: 41013 - DNA, 201 bp, Homo sapiens
tttgagtgaggcggcccggacagccatagctgaggagcatggagccactgggagggggcagtgtcaccttttttggccttcttcctgtgtggaaatacagygcctccggcttgaacctgccactcaggtgtcttgatgtgtcgggggtgtggctgcctgccccctgatgctccctgccccaccctgtgcagtaggaaccca

SEQ ID NO: 41014 - DNA, 201 bp, Homo sapiens
ggatggcagcaggtggccccctctacatagacgtgacctggcacccagcaggtgaccctggctcagacaaggagacctcctccatgatgatcgccagcacmgccgtgaactactgtggcctggagaccatcctgcacatgacctgctgccgtcagcgcctggaggagatcacgggccatctgcacaaagctaagcagctgg

SEQ ID NO: 41015 - DNA, 201 bp, Homo sapiens
ccgggcctggaccccgagcggcatgagagactccgggagaagatgaggcggcgattggaatctggtgacaagtggttctccctggaattcttccctcctcraactgctgagggagctgtcaatctcatctcaaggtaaactcatgcaaggttaaggtgggaggcgggagtggtggtgcctggggagcaaactgtcagccct

SEQ ID NO: 41016 - DNA, 201 bp, Homo sapiens
cgcagggagagtggaggccgggagtggaggcgcaggcagagggtattgagcccagacagcctcattgagtcaaggctgtccaggcagtgggactccagttrttcttggcccaggtcttacccccaccccacatcccctcagggtgaaaacatcaccaatgcccctgaactgcagccgaatgctgtcacttggggcatcttc

SEQ ID NO: 41017 - DNA, 201 bp, Homo sapiens
cgtcagcttcatgttctggaaggtaaaggagccgggggcaagcttgccccgcccacctggaaaaccgtggggagggattgggaccaagtcccaagcgtgtrctgaaggccacactggacccagccttcagggcacacccagctctgactcacccatgtcactgctgacgcagggtgtttatttctgggcaggggtgggaag

SEQ ID NO: 41018 - DNA, 201 bp, Homo sapiens
tggggagggattgggaccaagtcccaagcgtgtgctgaaggccacactggacccagccttcagggcacacccagctctgactcacccatgtcactgctgaygcagggtgtttatttctgggcaggggtgggaagtgatactggcagtgggccttgttctattccgggaaatgtcctgttgagcagagcccttggagagccc

SEQ ID NO: 41019 - DNA, 201 bp, Homo sapiens
agtgactatgacctccaccaaccctgcagacccaataggtgaccagtgggaagaggaggagggaggcttcaactacgcagtggacctggtgaagcacatcygaagtgagtttggtgactactttgacatctgtgtggcaggtgagtggctggatcatcctggtggcggggatggagctagggaggctgagatgcccagaga

SEQ ID NO: 41020 - DNA, 201 bp, Homo sapiens
ttagtgcccgcctaggagttgagtacagtgaggagggtggaggaaggtgctgagcttagccttgtgccctgcccccatctccccaggcctccagcctctcmcggctgcctgccacccaaagagaaatcacaggggcggggcaggaatgcaaagtgttttctcagaacagctgaaacattccgaagagggaatggatgggga

SEQ ID NO: 41021 - DNA, 201 bp, Homo sapiens
gaaatgtcctgttgagcagagcccttggagagccctgttaatcttgcctctgtgtgtgtgtgcatgtgtgcgtgtgtgcgggggtatgtgtgtgtaggacraggcctttgccctgtggattgagcggtggggaaagctgtatgaggaggagtccccgtcccgcaccatcatccagtacatccacgacaactacttcctggt

SEQ ID NO: 41022 - DNA, 201 bp, Homo sapiens
tgcttccggctccctctagccaatcccttgtctcaattctctgtccccatcctcacccaggcgtcccctaccctgggctctcagcgcccaccccaagcgcygagaggaagatgtacgtcccatcttctgggcctccagaccaaagagttacatctaccgtacccaggagtgggacgagttccctaacggccgctggtgagg

SEQ ID NO: 41023 - DNA, 201 bp, Homo sapiens
tcactgaggacaaagaggagttggccaacaggagagaagggtattcctgggacagggcagaggacaggcagaggcagtgagctgcaccatctggggaaacsgggaacatgagcaggaggaggcgggagtgttaagcaggggccaggcccgcagagatcatggttgtcctgctggaatttgagttttccctcaatgcaaggg

SEQ ID NO: 41024 - DNA, 201 bp, Homo sapiens
gaggaaacagcagcctcaacccctgcttggagggcagtgccagcagtggcagtgagagctccaaagatagttcgagatgttccaccccgggcctggacccygagcggcatgagagactccgggagaagatgaggcggcgattggaatctggtgacaagtggttctccctggaattcttccctcctcgaactgctgagggag

SEQ ID NO: 41025 - DNA, 201 bp, Homo sapiens
cagatggggcagcttttgttctgagaaattcgtgcccttactgaacttgggtctggctatttttggaacatggccagcatcaagttctaacccacaacackgtctttttggagtagcatgaattcaggagaaatctggctgcatagtcaagccctcaccccttccatcctgtgcacgaactgtttcaagtaacagatgttc

SEQ ID NO: 41026 - DNA, 201 bp, Homo sapiens
caccccaagcgccgagaggaagatgtacgtcccatcttctgggcctccagaccaaagagttacatctaccgtacccaggagtgggacgagttccctaacgrccgctggtgagggcctgcagaccttccttgcaaatatatctttgttcttgggagcgggagggcagaagaagtttgcatgcttgtggttgacctgggagga

SEQ ID NO: 41027 - DNA, 201 bp, Homo sapiens
ttggcaggttaccccaaaggccaccccgaagcagggagctttgaggctgacctgaagcacttgaaggagaaggtgtctgcgggagccgatttcatcatcaygcagcttttctttgaggctgacacattcttccgctttgtgaaggcatgcaccgacatgggcatcacttgccccatcgtccccgggatctttcccatccag

SEQ ID NO: 41028 - DNA, 201 bp, Homo sapiens
aagcagggagctttgaggctgacctgaagcacttgaaggagaaggtgtctgcgggagccgatttcatcatcacgcagcttttctttgaggctgacacattyttccgctttgtgaaggcatgcaccgacatgggcatcacttgccccatcgtccccgggatctttcccatccaggtgaggggcccaggagagcccataagct

SEQ ID NO: 41029 - DNA, 201 bp, Homo sapiens
tagcgctgttgttgtgtcttacctctgtaatagtgattataacggcacctcacatatactgagtattcggtttgtacaccaggcactgttctaagttctgtggaaccagctgccgtcatattctcctagtgttatggttttttgttgttgttgttgctttttttttttgagacagagtctcattctgtggcccaggctgga

SEQ ID NO: 41030 - DNA, 201 bp, Homo sapiens
atagcgctgttgttgtgtcttacctctgtaatagtgattataacggcacctcacatatactgagtattcggtttgtacaccaggcactgttctaagttctgtggaaccagctgccgtcatattctcctagtgttatggttttttgttgttgttgttgctttttttttttgagacagagtctcattctgtggcccaggctgg

SEQ ID NO: 41031 - DNA, 201 bp, Homo sapiens
gatagcgctgttgttgtgtcttacctctgtaatagtgattataacggcacctcacatatactgagtattcggtttgtacaccaggcactgttctaagttctgtggaaccagctgccgtcatattctcctagtgttatggttttttgttgttgttgttgctttttttttttgagacagagtctcattctgtggcccaggctg

SEQ ID NO: 41032 - DNA, 201 bp, Homo sapiens
tgatagcgctgttgttgtgtcttacctctgtaatagtgattataacggcacctcacatatactgagtattcggtttgtacaccaggcactgttctaagttctgtggaaccagctgccgtcatattctcctagtgttatggttttttgttgttgttgttgctttttttttttgagacagagtctcattctgtggcccaggct

SEQ ID NO: 41033 - DNA, 201 bp, Homo sapiens
gcccaggtcttacccccaccccacatcccctcagggtgaaaacatcaccaatgcccctgaactgcagccgaatgctgtcacttggggcatcttccctgggygagagatcatccagcccaccgtagtggatcccgtcagcttcatgttctggaaggtaaaggagccgggggcaagcttgccccgcccacctggaaaaccgtg

SEQ ID NO: 41034 - DNA, 201 bp, Homo sapiens
atgatagcgctgttgttgtgtcttacctctgtaatagtgattataacggcacctcacatatactgagtattcggtttgtacaccaggcactgttctaagttctgtggaaccagctgccgtcatattctcctagtgttatggttttttgttgttgttgttgctttttttttttgagacagagtctcattctgtggcccaggc

SEQ ID NO: 41035 - DNA, 201 bp, Homo sapiens
gcccccatcggtgactcagtgacctggtgactggattctcggccacctgggcgccgagacggcttccggctcctgccttttaaacctgcctccccggcgakcacctggagaagagcgctgggcccggggcactgcggtccctggcgcccactgcgtcccgctgcgcacgggggtccgccgggacctttctgggagtcgtag

SEQ ID NO: 41036 - DNA, 201 bp, Homo sapiens
aaggagctcccagcctagagtgagggaggcagatcaatgtgtgaccaccagccagtgtaagtgggaaaatcaagttcaggagaggatgctgtcgggtccaraggagggatatctcacctgggaggccagggaaggcttctcagagggtcatctgtgggaatcactgaggacaaagaggagttggccaacaggagagaaggg

SEQ ID NO: 41037 - DNA, 201 bp, Homo sapiens
gttccccttggcttcctccgtccacccaggctgcactgcagtgatggcgcgggaggcaccagctctgtggcctgtgtccagcagctgcgggtctgaaggartagccagagaggagcacctgaaccccatgggcttggacttcctggggccccgctgggatttcttcgctgctctagctggcaggacacatcccggcctctt

SEQ ID NO: 41038 - DNA, 201 bp, Homo sapiens
gagaagatgaggcggcgattggaatctggtgacaagtggttctccctggaattcttccctcctcgaactgctgagggagctgtcaatctcatctcaaggtraactcatgcaaggttaaggtgggaggcgggagtggtggtgcctggggagcaaactgtcagccctgaggctgggctgccctttaacccggcagaaaaaagc

SEQ ID NO: 41039 - DNA, 201 bp, Homo sapiens
ggggaggtgtggagccagcactcccctacactctgggttctggctttcccggaggccacttggtagcctgaacttggttcctgaaatggtcctttacttcytcctgggccccacgctgaggatccgcaggatcccatccccgccagtagtgtcagtaggcattgtgggtagtgagtcatcctgggcaccacacacaggcag

SEQ ID NO: 41040 - DNA, 201 bp, Homo sapiens
tccactgcccctgtgttttcagactccaggagctcattgttttgtgagtggcttatagtactctagccagctctctgaaccggatgctggttctgccattrgaaacaacacagaatatgactaataaagaacttcactagggggctgggtacagtggctcatgcctgtaatctcagcactttgggaggccaaggtgggagg

SEQ ID NO: 41041 - DNA, 201 bp, Homo sapiens
gggctgcttttttccctcctgctgtcttaccaagtgctagaaagagacgaaccaaacctaaataatatgaagtttctgccttccagggactcgcagtcctsggtgtcggggctaggtagagggaacagaaagggtctctggaggttgggtgagacccagtgactatgacctccaccaaccctgcagacccaataggtgacc

SEQ ID NO: 41042 - DNA, 201 bp, Homo sapiens
gaagcacttctgcaagtgctgaagaagtacgagctccgggttaattaccaccttgtcaatgtgaaggtaggccaggccccagggttcccacagagtaccargcccttcgttgagcaaacacccagcacctagcctgggctaggcattgtgcaagacagagagatacaggcagaactggggccctgctcttaaggagctccc

SEQ ID NO: 41043 - DNA, 201 bp, Homo sapiens
tgtggggcatggttccttccctgggaaggctaagttcagttctgttttttattctatgagaacaagtcacagctgcagctgggccccatgctctgccccargcccccaaccccgcggtgctccggcggcttcctgtccactctcggggcccttggggcctggcttgctccagggtcttgggctactggcagctcctctcct

SEQ ID NO: 41044 - DNA, 201 bp, Homo sapiens
gggaaggctaagttcagttctgttttttattctatgagaacaagtcacagctgcagctgggccccatgctctgccccaagcccccaaccccgcggtgctcyggcggcttcctgtccactctcggggcccttggggcctggcttgctccagggtcttgggctactggcagctcctctccttgggctcctggctgccaggcgt

SEQ ID NO: 41045 - DNA, 201 bp, Homo sapiens
gcggaagcacttctgcaagtgctgaagaagtacgagctccgggttaattaccaccttgtcaatgtgaaggtaggccaggccccagggttcccacagagtaycaggcccttcgttgagcaaacacccagcacctagcctgggctaggcattgtgcaagacagagagatacaggcagaactggggccctgctcttaaggagct

SEQ ID NO: 41046 - DNA, 201 bp, Homo sapiens
caagcccctcagcccttgcccccatccctcggacccaccaaactgcacacacagctcctcttaccgtagcctccgtttatgggccttgctttgggctttgsaggctctgggctcagggctggagtgcgctcttggtccctggtccctcgtccacaggggcaggcctgggacccagctactctgtccaggccactgtggcca

SEQ ID NO: 41047 - DNA, 201 bp, Homo sapiens
gggacccagctactctgtccaggccactgtggccagagctggaaggcagggcagagggaatgttccctgcaccctggaaaggggagttgagtcacaagagkttaaggtgggtccaggaaggcagctgctcttagtgcccgcctaggagttgagtacagtgaggagggtggaggaaggtgctgagcttagccttgtgccctg

SEQ ID NO: 41048 - DNA, 201 bp, Homo sapiens
gaaggcagggcagagggaatgttccctgcaccctggaaaggggagttgagtcacaagaggttaaggtgggtccaggaaggcagctgctcttagtgcccgcytaggagttgagtacagtgaggagggtggaggaaggtgctgagcttagccttgtgccctgcccccatctccccaggcctccagcctctcccggctgcctgc

SEQ ID NO: 41049 - DNA, 201 bp, Homo sapiens
gctccagcatccagcctgtgtgttctgtaatggaactgaccccctcccctgaaaacgaaggggccccggggctggcaagcagggaaagctccacggtgcgyggctgtggcacagacttctggaaggctggctgagtggaatgcagggaagagggcagtacctgggaaaggacccacccatcttcctgctgctgtaactgct

SEQ ID NO: 41050 - DNA, 201 bp, Homo sapiens
ccaatgctttgggaggccaaggcaggtagatcgcttgagcccaggagtttgagacaagccctggcaacatagtgagatcccatttctacaaaaaaaaaaaaaaaattagccgggtgtggtggcacacgcctgtagtctcagctactcaggtggctgaggtgggaggatcgtttgagccctggaggttgaggctgcagtgag

SEQ ID NO: 41051 - DNA, 201 bp, Homo sapiens
aacctggtggacaatgacttcccactggacaactgcctctggcaggtggtggaagacacattggagcttctcaacaggcccacccagaatgcgagagaaayggaggctccatgaccctgcgtcctgacgccctgcgttggagccactcctgtcccgccttcctcctccacagtgctgcttctcttgggaactccactctcc

SEQ ID NO: 41052 - DNA, 201 bp, Homo sapiens
cccaatgctttgggaggccaaggcaggtagatcgcttgagcccaggagtttgagacaagccctggcaacatagtgagatcccatttctacaaaaaaaaaaaaaaaattagccgggtgtggtggcacacgcctgtagtctcagctactcaggtggctgaggtgggaggatcgtttgagccctggaggttgaggctgcagtga

SEQ ID NO: 41053 - DNA, 201 bp, Homo sapiens
ctccgaccccatcgtgggctggggccccagcgggggctatgtcttccagaaggtgtggtagggaggcacggggtgcccccctctcttgaccggcacccgtkggttccccagagcttagggcagagcagcctgcctctcctgggctcttaaattttgaatgagcatggattggagcggatgggagctcatgctttaagtcag

SEQ ID NO: 41054 - DNA, 201 bp, Homo sapiens
tcagtgaatgttggctatcaccgtgtgccaaactctggggataccccaggcaggacaccggtcctgtctcagggaactggggaaagagaaaggagacaggycttttcacccacagttacaacccagggtgctatgggagtccagctgataacggataaatcgtgggagttggcttacaaatatggcacatgcgtggcatat

SEQ ID NO: 41055 - DNA, 201 bp, Homo sapiens
tctgggcaggggtgggaagtgatactggcagtgggccttgttctattccgggaaatgtcctgttgagcagagcccttggagagccctgttaatcttgcctstgtgtgtgtgtgcatgtgtgcgtgtgtgcgggggtatgtgtgtgtaggacgaggcctttgccctgtggattgagcggtggggaaagctgtatgaggagga

SEQ ID NO: 41056 - DNA, 201 bp, Homo sapiens
ggctggagtgctatggcacaatcttggttcactgcaacctctgccttccgggttcaagcgattctcctgcctcagcctccagagtagctgggattacaggygcccgccaccaaacctggctaatttttatatttttagtagagtcgggatttcaccatgttggccaggctggtctcaaactcctggcctcaggtgatccac

SEQ ID NO: 41057 - DNA, 201 bp, Homo sapiens
agacctgtccagactgagaaactcacgtccccactcccctcaccctttgcttatggacgtgccaacgccacagttcattattccgcccacatggctgccartagtcctgataccttaggtgtctgcgaaagggcgtctggcagggctggggttggtgacaggcacctgtctctcccacaggcctacttagagtttttcact

SEQ ID NO: 41058 - DNA, 201 bp, Homo sapiens
cttgacatctcccaggctttgaattcaaatctcatttccagcatgtattggtctagaaggccactgaatccctctgagcctctgtttcctcacctgcaaawtgggaacgatagttatgcttacctcataggattgttttgagggtggaattgttttgagggcgttgcattttgctgcatgcttagtggctggtccagtgcc

SEQ ID NO: 41059 - DNA, 201 bp, Homo sapiens
gttgctgcaggaactggagtaagggcccaggaccctgcttttccttggctccctgggcaactgggagcctgtggtagagaatgccagagagcgttctctcyaacacgtcacacatggctctttagaggggcacaaaagccttttctacatctgcacacttgatccagaaacccaatctgggtatcccagagggatacctgg

SEQ ID NO: 41060 - DNA, 201 bp, Homo sapiens
aattgttttgagggcgttgcattttgctgcatgcttagtggctggtccagtgcccagcacctaatgggtgcttggggagtgtcttgatggggaggaaaaarctgtaggaaacagaaacattcggcattctagcctatttctgctacatgctagctgtgtggctttagacagttgagttatcctttctgagccaccatttct

SEQ ID NO: 41061 - DNA, 201 bp, Homo sapiens
aggggcacaaaagccttttctacatctgcacacttgatccagaaacccaatctgggtatcccagagggatacctggacacatatgcaaatgtgagggtacraaggtgttcacagtcttgtttagattgcaaggactctgcgctgacagtggaggacccatcaaaccagtggccctgcagccacctgctgtgtcacctgctc

SEQ ID NO: 41062 - DNA, 201 bp, Homo sapiens
tgaggaagaacagtatttatagcggagtcttcctgcacccaacggaggcaatcttttgactaatgaggaaactaaggcacaaaacattgttgctgcaggarctggagtaagggcccaggaccctgcttttccttggctccctgggcaactgggagcctgtggtagagaatgccagagagcgttctctctaacacgtcacac

SEQ ID NO: 41063 - DNA, 201 bp, Homo sapiens
gctagctgtgtggctttagacagttgagttatcctttctgagccaccatttcttcatctgtaaaataggtataataccaacctttccaaattgcagagaaratgatattatattgaacatctcactcaaactagaggctcaagaaatagctgttaaatgaatgaggaaaattgcaagattggacttggaggaaaatatctt

SEQ ID NO: 41064 - DNA, 201 bp, Homo sapiens
gcttcagacttctcatttatgaatgacctggacttccccgtctgatgtcctaggatcctgtgttctgtgctttttttttttttttgccccacctgcagccwgtttgtgtttgcacatcctcattgaatccaggtggggtcattctcacccattttacaggtgaggagactgagccctagagaagtgacttggcttaaggcc

SEQ ID NO: 41065 - DNA, 201 bp, Homo sapiens
ccagtgactattagcacacctatgtgccagatgccttacatatctaacctcatgcaagtcccaccaccaccctgccctttgttgattcaatagatacttgscaaaggcctgctctgtgcaagacggtggggccagtaagtatagcccctgccctcaaggagcttaagccccattttctgctgaaatggggagcagaggtgg

SEQ ID NO: 41066 - DNA, 201 bp, Homo sapiens
gctctgtaaaatgggggtgtggtttcttacgagttctgcttcccagggttgaggtaaaagtcaattaaaacagtgcagtaggaaaacattttgcaaaaggrtttgaaaataaatcaatatggcttaatgcttccgtttattgagcacctactttgtgctaggtgcagtgatgacttctttaaatatgtgataattatggga

SEQ ID NO: 41067 - DNA, 201 bp, Homo sapiens
acctgcacgagtacatggagatgtgcagcatgaagcgaggcctggacgtgcagatggagacctgccgccggctcatcaaaggctccgcagacaggtacccrcccatcctcccaggggattcagctatggcatccttggaggggaattcccaaggctgcaactcggccatgtgtcatgctcccaacctgtctctctgtccgt

SEQ ID NO: 41068 - DNA, 201 bp, Homo sapiens
cagcctaggcgacagaatgagactccatctcaaaaaaaaaaaaaaaagaaataatataaaataaaacatcaggacttatctgacttggagactgatggccygaactcagcaagctactgctggcagagccagaattaacctgatgccaagttgagggacctccaacttgtaggttattccttttctgagccctaagacata

SEQ ID NO: 41069 - DNA, 201 bp, Homo sapiens
gtctgagtagagatgcattaatctgccgcttaacctatcccgccctcccccgggctcccctgatggtctgtgtgtgtttgctcccactccttcccagctcrccttgatgagggcaggcctcggtgtctgggcgtagcagggcgtctggcaggttgggccaggtgccgtctggtctgtgcgggcctgagagactcgcaggcc

SEQ ID NO: 41070 - DNA, 201 bp, Homo sapiens
ttctgtcctgggggaagaagatgaaatgtaagccggcagccagcctgagttgggctgtgggagatattctgggctgccgggcctgggtgtctccagaaacmcccaacgctcgctcatgaaggctctcttggtgccaggtcttgtgccaggcactgggatatggtgccgaattggatacaagggagatgggacgtcctcctg

SEQ ID NO: 41071 - DNA, 201 bp, Homo sapiens
gatgttcgcttggagggggcttcacaaatgtcactttgctcactccagacgcccatcctaggagatggggtatcactccccttttgtagacagggaaactgagactctgagaggagaagggacttgggtaacaccactcagctagtatgtggctgagctgggattcagagccaggctgcctcccacgctagtacgctgtca

SEQ ID NO: 41072 - DNA, 201 bp, Homo sapiens
tgatgttcgcttggagggggcttcacaaatgtcactttgctcactccagacgcccatcctaggagatggggtatcactccccttttgtagacagggaaactgagactctgagaggagaagggacttgggtaacaccactcagctagtatgtggctgagctgggattcagagccaggctgcctcccacgctagtacgctgtc

SEQ ID NO: 41073 - DNA, 201 bp, Homo sapiens
aaggctgctgcctcgttgcctgaaggggtgtgtggctggggggccggagcccagttaggggcttgccgttctttcccactcacctctcaagtcctgttggstcaccacagagagcccagagaccagctagctgccctgcaaagggccccttggtcaccaggaaacaagtggggggaatgtcaggtgaggggaatgtcaggt

SEQ ID NO: 41074 - DNA, 201 bp, Homo sapiens
tggattaggcccttaggttccctccctgccccctcttagctttctctgtgccctccagccctggaaggaatcccagccccttgccctccaggtccgggccygggagcccacgcagatctcagcctagcagctaatgctggggctgggaaaggctggagaaaagggggagagggagagagtgtgtgtcctccaggagccctg

SEQ ID NO: 41075 - DNA, 201 bp, Homo sapiens
caaggctgctgcctcgttgcctgaaggggtgtgtggctggggggccggagcccagttaggggcttgccgttctttcccactcacctctcaagtcctgttgrctcaccacagagagcccagagaccagctagctgccctgcaaagggccccttggtcaccaggaaacaagtggggggaatgtcaggtgaggggaatgtcagg

SEQ ID NO: 41076 - DNA, 201 bp, Homo sapiens
cgtttccccggattgcttgcacaggggcggtgaatgggaggcttgggctgagagtagcctgcagcactggaagaatttgaattcatttcctttttttttttgagacagggtctcactttgtcacccaggctggaggctggagtgcggcggcatggtcacagctcactgcagcctcaacctcttgggtttagggatcctttc

SEQ ID NO: 41077 - DNA, 201 bp, Homo sapiens
tcgtagaagagtggagtctgatgagagagacagggaagtgaaaattcacagcccctggatgccagtgctgaaggagtgggttcaggactgggaacatcagwatgggcatagtgacttattctggggaagtcatgaaaagctccctggaggaggtgatgaaggggtacccaagcctggaagaggctggcagtggtactccag

SEQ ID NO: 41078 - DNA, 201 bp, Homo sapiens
aggagcggccgagtgccctctctcgcctcggcgcccgcatccggggccatccgtcctgccgtctctgcggaggccgcatctggcgcgcatctggaaccgcycggccggccgcgctggagcccgcgcccaccctggcccggccgcgccgggagccctgcccggagctggagccgcacctggagccgcgggcccggggccctg

SEQ ID NO: 41079 - DNA, 201 bp, Homo sapiens
ggaggagctcgccaagcgcatgaaccttcagaccatggtggacacgctgcaggaggtaagagccctccgatatcccgaccaggagaggcacgccagagagycatgtggccaaggggcacagtcttcatgcggcaaagccaggaaattcttgcacagcccctactctgttacctcctaccacctcagtctctcctttatgga

SEQ ID NO: 41080 - DNA, 201 bp, Homo sapiens
cctgctaacgccgcctgcttcttagaggacctgcacctttcctggcactggccggccccagtcacgctcatcatcctgtgagatgccggctcccttcccarttcacccctaccttccatcctagccgagccccccagttaccttgattgcttcctttccggttcaggtggtccccaaaaagaaagagcgtaaggtggcttc

SEQ ID NO: 41081 - DNA, 201 bp, Homo sapiens
tccatccccttgagctgtatttagtcactaattcttttggtgcgcgtgtttgcagtctaattacctgcctcagctgcgctggaacctgccccttcccagcyagtgaggaccatgacggctctgcacagacaggtgaccgttgccctgttacccatccttggttgcacaagccccacgtgtcttttgttagctgggtccttg

SEQ ID NO: 41082 - DNA, 201 bp, Homo sapiens
gggccctggacgctgtagcagccctcccagtagcctccctcccagccttcccagcagctggaggtggggcttgctcactaggaggagcaaaataatgttasgcactggtgtttatgatcttatggggtcttcaccatccagggaggtgtaggtactattgttattcccattttacagatgaggaaactgaggctcagagag

SEQ ID NO: 41083 - DNA, 201 bp, Homo sapiens
cctgggggaagaagatgaaatgtaagccggcagccagcctgagttgggctgtgggagatattctgggctgccgggcctgggtgtctccagaaacccccaaygctcgctcatgaaggctctcttggtgccaggtcttgtgccaggcactgggatatggtgccgaattggatacaagggagatgggacgtcctcctgtgtgtc

SEQ ID NO: 41084 - DNA, 201 bp, Homo sapiens; identical to SEQ ID NO: 28699

SEQ ID NO: 41085 - DNA, 201 bp, Homo sapiens
gaacccagagacagagcctctaaggggaagcatggtgcagctcagccaagcccggggccctggacgctgtagcagccctcccagtagcctccctcccagcyttcccagcagctggaggtggggcttgctcactaggaggagcaaaataatgttaggcactggtgtttatgatcttatggggtcttcaccatccagggaggt

SEQ ID NO: 41086 - DNA, 201 bp, Homo sapiens
ttgggaggcagaggcaggagaatggcttgaacccgcaaggtggaggttgcagtgagccaagatcttgccactgcactccagcctaggcgacagaatgagamtccatctcaaaaaaaaaaaaaaaagaaataatataaaataaaacatcaggacttatctgacttggagactgatggcctgaactcagcaagctactgctgg

SEQ ID NO: 41087 - DNA, 201 bp, Homo sapiens
gccagatgggagactgctgaaggtttgtgatgttgccgccgcctgcccacgaggggagtgtcctcccacccacactgggcaccgggtgcttggcttcctgrgcaggatgtggtttctcattctagacctggtacaagagagggtagttttcacccaacagtaaacctggcaaatggcaatgcctggttctctggagggtcc

SEQ ID NO: 41088 - DNA, 201 bp, Homo sapiens
agaagagcagacgctcaggcaggttaaacggtttgcccaagttcccccacccccagctcatccgagatagaatcagaactgcaccccagtgatgttaaccrtatcccgcatggcctccttttgagctctgagtcattcaggttttacttagcacctactatatgcccagacatgggttaggtgcttggagagtaacagcca

SEQ ID NO: 41089 - DNA, 201 bp, Homo sapiens
gcatctgtgggttgcacagccctttgagcattgccagactgtgaggtgtttagaaaattccaggccagatgggagactgctgaaggtttgtgatgttgcckccgcctgcccacgaggggagtgtcctcccacccacactgggcaccgggtgcttggcttcctgagcaggatgtggtttctcattctagacctggtacaaga

SEQ ID NO: 41090 - DNA, 201 bp, Homo sapiens
tggaagaagtagacaggctcgcctagctacagcacagggcgtgtaaacagtcaagttcagaatgatttcacagggcagagagtgggtgccctacagaggcrgatctgtgctggccctgtggggtgggcagaggttgagaaccaagctggaaactgggagagggtgtcccgtgccctttgctggcagcatctgtgggttgca

SEQ ID NO: 41091 - DNA, 201 bp, Homo sapiens
ccagggattcggctgtttgtggaggggagggcctgcacttggaatcagaaggcctgggccaaagttcaaagtttgaatgaacccccaagcctggcagtgcrgggtgctggggccccagggcaggagttaaaagccgagtgagcttgggctagtcactgcctctcgagcctcagtttcttcatctgtaaaacagggatgcta

SEQ ID NO: 41092 - DNA, 201 bp, Homo sapiens
cgagatgcgttgccttccaggagaattgatttaaactgtgccatgtgtcagtgacaccggaggctgtgggctttgcatttgcagtcctggcttttgatcgyattgagaggtgaaggccggctggcattccatttatttcctatgtcgcggatggctgaaggcccgggacgggaaggaggcagccctgtcatgtccctgtgc

SEQ ID NO: 41093 - DNA, 201 bp, Homo sapiens
cagagcctcaagctagagggaggggaatgaggtcccagaaaagaaaaggaagcagggagacagctgacgctgaagattccttctcagaggaatgcgaggcrgggctttgccttggcaaacgagaccggatgcgggtccctgggtcccccttccccccacgtgtatgcacactcacactcacacacatgtacgtgcacacac

SEQ ID NO: 41094 - DNA, 201 bp, Homo sapiens
atgcattaatctgccgcttaacctatcccgccctcccccgggctcccctgatggtctgtgtgtgtttgctcccactccttcccagctcgccttgatgaggrcaggcctcggtgtctgggcgtagcagggcgtctggcaggttgggccaggtgccgtctggtctgtgcgggcctgagagactcgcaggcccagcggcctttg

SEQ ID NO: 41095 - DNA, 201 bp, Homo sapiens
ccccgggctcccctgatggtctgtgtgtgtttgctcccactccttcccagctcgccttgatgagggcaggcctcggtgtctgggcgtagcagggcgtctgkcaggttgggccaggtgccgtctggtctgtgcgggcctgagagactcgcaggcccagcggcctttggcagggttgctccatgaggtcaggaaaggccagtg

SEQ ID NO: 41096 - DNA, 201 bp, Homo sapiens
ggccccgcgcagataccgcggcctccaccgcgtcccgaggagcggccgagtgccctctctcgcctcggcgcccgcatccggggccatccgtcctgccgtckctgcggaggccgcatctggcgcgcatctggaaccgcccggccggccgcgctggagcccgcgcccaccctggcccggccgcgccgggagccctgcccggag

SEQ ID NO: 41097 - DNA, 201 bp, Homo sapiens
cccctgatggtctgtgtgtgtttgctcccactccttcccagctcgccttgatgagggcaggcctcggtgtctgggcgtagcagggcgtctggcaggttggsccaggtgccgtctggtctgtgcgggcctgagagactcgcaggcccagcggcctttggcagggttgctccatgaggtcaggaaaggccagtgcgcgtgtct

SEQ ID NO: 41098 - DNA, 201 bp, Homo sapiens
acaaggctgctgcctcgttgcctgaaggggtgtgtggctggggggccggagcccagttaggggcttgccgttctttcccactcacctctcaagtcctgttrgctcaccacagagagcccagagaccagctagctgccctgcaaagggccccttggtcaccaggaaacaagtggggggaatgtcaggtgaggggaatgtcag

SEQ ID NO: 41099 - DNA, 201 bp, Homo sapiens
catccctgttatttttctacagcccccaccacacagctaaactgtcccctttgggccaggcgcagtggctcatgcctgtaatcccagcactttgggaggcygaggtgggcggatcacctgaggttgggagttcgagaccagcctggccaatatggcgaaatctcatctctactaaaaatataaaaattagccaggcctggt

SEQ ID NO: 41100 - DNA, 201 bp, Homo sapiens
cacaaggctgctgcctcgttgcctgaaggggtgtgtggctggggggccggagcccagttaggggcttgccgttctttcccactcacctctcaagtcctgtyggctcaccacagagagcccagagaccagctagctgccctgcaaagggccccttggtcaccaggaaacaagtggggggaatgtcaggtgaggggaatgtca

SEQ ID NO: 41101 - DNA, 201 bp, Homo sapiens
aagtgacttgcccaaggccttgcggccaggaagcagcattgaagtataattctctctggctccagaggctgtgcatgtgatcacttctataaacgatagtyattgctattatgcaggagaaagggaagcccagctccttccctagaggaagtatcacttgatagaggacaagagtcagaaacatgaaaaagccttcaggat

SEQ ID NO: 41102 - DNA, 201 bp, Homo sapiens
agcacaaggctgctgcctcgttgcctgaaggggtgtgtggctggggggccggagcccagttaggggcttgccgttctttcccactcacctctcaagtcctsttggctcaccacagagagcccagagaccagctagctgccctgcaaagggccccttggtcaccaggaaacaagtggggggaatgtcaggtgaggggaatgt

SEQ ID NO: 41103 - DNA, 201 bp, Homo sapiens
ttccagcacaaggctgctgcctcgttgcctgaaggggtgtgtggctggggggccggagcccagttaggggcttgccgttctttcccactcacctctcaagtcctgttggctcaccacagagagcccagagaccagctagctgccctgcaaagggccccttggtcaccaggaaacaagtggggggaatgtcaggtgagggga

SEQ ID NO: 41104 - DNA, 201 bp, Homo sapiens
tgtgtgtgcaaacagtatccgttttctcttgtttccaaaagccggtgacgtaaccggctctccacccctccctcccctctggcctatttttagctggcccygacagcatcctaaaagggttccagactgccctgctccgaggccatgtagggagggtagcagtggggtgaggaaggagagaaactcctctgtctgtcccag

SEQ ID NO: 41105 - DNA, 201 bp, Homo sapiens
acccgtttgcctccacatcccactcactccctccccttccccgagaggtagcactacctgaccctgtggcctccccaggaaaacgtagaatcaggcacccrtggactcataggctcgtctgactgcttcatcctatggctggggagaccgaggcccagagggtgatgtgctgtgctcacggaaggaagtggcagaaatcag

SEQ ID NO: 41106 - DNA, 201 bp, Homo sapiens
cttccagcacaaggctgctgcctcgttgcctgaaggggtgtgtggctggggggccggagcccagttaggggcttgccgttctttcccactcacctctcaagtcctgttggctcaccacagagagcccagagaccagctagctgccctgcaaagggccccttggtcaccaggaaacaagtggggggaatgtcaggtgagggg

SEQ ID NO: 41107 - DNA, 201 bp, Homo sapiens
ggctccggggctcggcttctagttagaatcctggctggctgtgtttgaccatgaggatgacggatgcattggatgcatcggagaccaggcaccctcctccygccccctccccacttctgcttccctcggtctgagtagagatgcattaatctgccgcttaacctatcccgccctcccccgggctcccctgatggtctgtgt

SEQ ID NO: 41108 - DNA, 201 bp, Homo sapiens
atttgtgaagtggaggcctcttccgagtcccttctcttgcccgtctttctgtcctttccagcttcctgtccctcggctggggtttccttcagatcccagaygctgggaaggaagtgaagtcaggaattgagtgtgtgatgcagtgaccactggaccctggcggctccgggccacacggccctctccagcacccacccccta

SEQ ID NO: 41109 - DNA, 201 bp, Homo sapiens
acttccagcacaaggctgctgcctcgttgcctgaaggggtgtgtggctggggggccggagcccagttaggggcttgccgttctttcccactcacctctcaagtcctgttggctcaccacagagagcccagagaccagctagctgccctgcaaagggccccttggtcaccaggaaacaagtggggggaatgtcaggtgaggg

SEQ ID NO: 41110 - DNA, 201 bp, Homo sapiens
tgcaggagaaagggaagcccagctccttccctagaggaagtatcacttgatagaggacaagagtcagaaacatgaaaaagccttcaggatttttgtaatcrggtctggataaaggaacccaaagatgttgagttctcagaaccgggtggggtgcatcagagccaggctgctgctggggttgctaagcaaccattccccttt

SEQ ID NO: 41111 - DNA, 201 bp, Homo sapiens
gctgctggggttgctaagcaaccattcccctttggccagaaggagttctaggggaagtggacccatgtgcagagagcagagggtgagggaggttgatgtcyggaggcagggtcctgatggcatggtgtccaatggtggccttgatggcaccatccctgaggaatccaggaggagaggttgccgaggcttctgtcacgagga

SEQ ID NO: 41112 - DNA, 201 bp, Homo sapiens
ctattatgcaggagaaagggaagcccagctccttccctagaggaagtatcacttgatagaggacaagagtcagaaacatgaaaaagccttcaggatttttrtaatcaggtctggataaaggaacccaaagatgttgagttctcagaaccgggtggggtgcatcagagccaggctgctgctggggttgctaagcaaccattc

SEQ ID NO: 41113 - DNA, 201 bp, Homo sapiens
cacctcccacctctgagcttcagacttctcatttatgaatgacctggacttccccgtctgatgtcctaggatcctgtgttctgtgctttttttttttttttgccccacctgcagccagtttgtgtttgcacatcctcattgaatccaggtggggtcattctcacccattttacaggtgaggagactgagccctagagaagt

SEQ ID NO: 41114 - DNA, 201 bp, Homo sapiens
tcacctcccacctctgagcttcagacttctcatttatgaatgacctggacttccccgtctgatgtcctaggatcctgtgttctgtgctttttttttttttttgccccacctgcagccagtttgtgtttgcacatcctcattgaatccaggtggggtcattctcacccattttacaggtgaggagactgagccctagagaag

SEQ ID NO: 41115 - DNA, 201 bp, Homo sapiens
tgtgtgaacatgggcaagtggcttggcctctctgagctgcccgtggagctccccgcttcgtcctctgtaaaagagggatcatcttgttgctctcccagggwttgagaaggaacaaatgaggtctggtgttaaggtacctggggcttggcagattttgggcatacctacctccaccccagcccagcccccttcccctggcaa

SEQ ID NO: 41116 - DNA, 201 bp, Homo sapiens
actcccattgacactttcgttatttctgaagctggcaccgatacggattctttatttctgattttccagtgaggcagccttcgatggtggaaaagggtttygcatcctggctctgccactgtctgtgtgaacatgggcaagtggcttggcctctctgagctgcccgtggagctccccgcttcgtcctctgtaaaagaggga

SEQ ID NO: 41117 - DNA, 201 bp, Homo sapiens
tattgagccctaacaaactcagccttaaaagcccccaggagaagataatgttgggctggagactggacattgaatggactgagaccacaatctctggctakaactggggtccagactctgcaagactggccagtgcattcctgcctagcccagattccccagctgggaaactgtcattgcttcctgtctgcagtctggccg

SEQ ID NO: 41118 - DNA, 201 bp, Homo sapiens
gtggggcaaacaatggaagtggatgtgaggcttggggaagagatgacatttgagacaagcctgggagaatggctagggtttcaggaggctgaggaggagasaggaagaggggaaatgagttacctgacctctgagcctcatctgcaacatggggatgatccccaggggagggctcagcgggattttatagagggaagtatg

SEQ ID NO: 41119 - DNA, 201 bp, Homo sapiens
ccggttcaggtggtccccaaaaagaaagagcgtaaggtggcttccgatgatgacatctctgagcaggacggggaggtgaaccggttctcggacgatgaggrcggctccatgaacatcaccgatgagatgaagcgcatgtttaaccagctgtgagtatccccgtggcccgcacactctccgtttccccggattgcttgcaca

SEQ ID NO: 41120 - DNA, 201 bp, Homo sapiens
ccagtcccagggaactgctcccaccccttcctgcagttaagggcgggggtccactgaaccctcctttgccttctcccctcccgcccgcgtttcctattcarcttcgggcagtactcgtgtcaaagtagtggtgtggaagcccttggaacaacagggcttggcacatagtaaacgctaaatcagtgggaactgtatttattg

SEQ ID NO: 41121 - DNA, 201 bp, Homo sapiens
ttgatgtccggaggcagggtcctgatggcatggtgtccaatggtggccttgatggcaccatccctgaggaatccaggaggagaggttgccgaggcttctgycacgaggatgacttgccctcacccttattcctcattggttcctcccagctcgagctggccacagccaaaagtgacatgaaccgacacctgcacgagtaca

SEQ ID NO: 41122 - DNA, 201 bp, Homo sapiens
agccgagatcatacctctgcactccagcctgggtgacagagcgagactccgtctcaagaataaataaataaataaataaataaataaataaataaataaawaaaataaactgtcccgtttgttctatttccccagcaagaggaaaacttgggcaacttgatccatgagaccgaatccttcttcaagacgagagacaaggag

SEQ ID NO: 41123 - DNA, 201 bp, Homo sapiens
tggtctgtgtgtgtttgctcccactccttcccagctcgccttgatgagggcaggcctcggtgtctgggcgtagcagggcgtctggcaggttgggccaggtsccgtctggtctgtgcgggcctgagagactcgcaggcccagcggcctttggcagggttgctccatgaggtcaggaaaggccagtgcgcgtgtctttttgac

SEQ ID NO: 41124 - DNA, 201 bp, Homo sapiens
gcttgaacccgcaaggtggaggttgcagtgagccaagatcttgccactgcactccagcctaggcgacagaatgagactccatctcaaaaaaaaaaaaaaaagaaataatataaaataaaacatcaggacttatctgacttggagactgatggcctgaactcagcaagctactgctggcagagccagaattaacctgatgcc

SEQ ID NO: 41125 - DNA, 201 bp, Homo sapiens
gtgacatgaaccgacacctgcacgagtacatggagatgtgcagcatgaagcgaggcctggacgtgcagatggagacctgccgccggctcatcaaaggctcygcagacaggtacccgcccatcctcccaggggattcagctatggcatccttggaggggaattcccaaggctgcaactcggccatgtgtcatgctcccaacc

SEQ ID NO: 41126 - DNA, 201 bp, Homo sapiens
caaggagtaccaggaaacgataggtcagatcgaggtgagggctcgggacgtggagcccactcgtgaggctctcctgaggtccacatggttgagatcctggygatcaaacacccatgtgtcatgggcaggggctggtagagtggggcaggcgcaggatcgggagtcaggaggcctcggggcgagtaatgtctttcttagggc

SEQ ID NO: 41127 - DNA, 201 bp, Homo sapiens
agaggtaaagtcgctttagcagatcaccagctgcggagcggctgagttggacgcccatcccagctctgcctgacgtcaaagtgttttgggataagggacagggggtggctgcaagtggcctcccactttgccccaagccggcttcttctcgccatgctggcctggaccatctcctttttggctttttgctgagtccgggct

SEQ ID NO: 41128 - DNA, 201 bp, Homo sapiens
gaagggagaggtgaggtggaggggctgggttgtgtggtcttcagagcctggccactcagtgccatctgtagcccagcatcactggggagctgtctgccccmgccctcgcctgcggaaccagcttctgcatgttaataagatgcccaggtgattggtatgcacattctaggctgagacacgctgctttagagactggactag

SEQ ID NO: 41129 - DNA, 201 bp, Homo sapiens
gagaggtaaagtcgctttagcagatcaccagctgcggagcggctgagttggacgcccatcccagctctgcctgacgtcaaagtgttttgggataagggacagggggtggctgcaagtggcctcccactttgccccaagccggcttcttctcgccatgctggcctggaccatctcctttttggctttttgctgagtccgggc

SEQ ID NO: 41130 - DNA, 201 bp, Homo sapiens
tcactggggagctgtctgccccagccctcgcctgcggaaccagcttctgcatgttaataagatgcccaggtgattggtatgcacattctaggctgagacaygctgctttagagactggactagctttgagtcccagctccctgcttgctagctctgtgaccttagacaagttactttacctctttgaacctcagctccctc

SEQ ID NO: 41131 - DNA, 201 bp, Homo sapiens
attggtaatatcatccagtcccagggaactgctcccaccccttcctgcagttaagggcgggggtccactgaaccctcctttgccttctcccctcccgcccrcgtttcctattcagcttcgggcagtactcgtgtcaaagtagtggtgtggaagcccttggaacaacagggcttggcacatagtaaacgctaaatcagtggg

SEQ ID NO: 41132 - DNA, 201 bp, Homo sapiens
gagcaggacggggaggtgaaccggttctcggacgatgaggtcggctccatgaacatcaccgatgagatgaagcgcatgtttaaccagctgtgagtatcccsgtggcccgcacactctccgtttccccggattgcttgcacaggggcggtgaatgggaggcttgggctgagagtagcctgcagcactggaagaatttgaatt

SEQ ID NO: 41133 - DNA, 201 bp, Homo sapiens
ccagatctcggctcactgcaacctctgcctcccgggttccagtgtttctcctgcctcagcctcccaagtagctggaatcacaggcatgcaccatgatgccyggctaatttttgcatgtttagtagaggcagggttttaccacgttggccaggctggtctcgaactcctgacctccagtgatctgcctacctctgcctccca

SEQ ID NO: 41134 - DNA, 201 bp, Homo sapiens
caggctgcctcccacgctagtacgctgtcagtaggaaacactgcttggggtggtggcagggtctgggctgggtatgatcagtggtgggcgagcctgctggygccagctcttagaagctgctatacccactccaggctcagtgatgtcatattagtaccttaaaatttgccattgcaggaaatcagcaaatgctaccaatca

SEQ ID NO: 41135 - DNA, 201 bp, Homo sapiens
gctctccacccctccctcccctctggcctatttttagctggccctgacagcatcctaaaagggttccagactgccctgctccgaggccatgtagggagggwagcagtggggtgaggaaggagagaaactcctctgtctgtcccaggatggacagacatccgaggagggaaagaacctgcccccagcttcctccagggaggg

SEQ ID NO: 41136 - DNA, 201 bp, Homo sapiens
tacccactccaggctcagtgatgtcatattagtaccttaaaatttgccattgcaggaaatcagcaaatgctaccaatcagagctctgggaggctctgccayctcccggaagccccccagagagggcatgctccttctagcagatgcctttgacatcatttgtttcaaaagcccagggcacgggctctcctaacctccctgc

SEQ ID NO: 41137 - DNA, 201 bp, Homo sapiens
tctggcctatttttagctggccctgacagcatcctaaaagggttccagactgccctgctccgaggccatgtagggagggtagcagtggggtgaggaaggaragaaactcctctgtctgtcccaggatggacagacatccgaggagggaaagaacctgcccccagcttcctccagggagggaggaactctgttggaggagct

SEQ ID NO: 41138 - DNA, 201 bp, Homo sapiens
aggctcagtgatgtcatattagtaccttaaaatttgccattgcaggaaatcagcaaatgctaccaatcagagctctgggaggctctgccacctcccggaasccccccagagagggcatgctccttctagcagatgcctttgacatcatttgtttcaaaagcccagggcacgggctctcctaacctccctgcagagctctga

SEQ ID NO: 41139 - DNA, 201 bp, Homo sapiens
cccctccctcccccaggtgggtagagccagggtgacaccggtgaagagcatgggcatcatctgtcaagggcatctgtgtgcctcacttgagcctgctctcytgatccatccatgagccctacaaggtgggattgctatccccgttttacagaagtggagactgaggctcctagcttgaggtaggcaggccctcaggggatc

SEQ ID NO: 41140 - DNA, 201 bp, Homo sapiens
gtgctaggtgcagtgatgacttctttaaatatgtgataattatgggagcagtcccaagcagtgggaagtgattatgctcattttacaaatgagaggttcaragaggtgaagacttctgtcccagatctcgccacgagtccgtctgggtctctggaccccaaggtcagtgctcctcccaggaggtggccttgtcccatgccc

SEQ ID NO: 41141 - DNA, 201 bp, Homo sapiens; identical to SEQ ID NO: 28766

SEQ ID NO: 41142 - DNA, 201 bp, Homo sapiens
tttccagagttgacgtcagggcagctggtttagggtttcatctgtgagacaaaggctgctttgtagcttctgcccggtttaagtccaagcacatcaccccscaaggtgggaaacgaggtggaagggattgcagggcccaaacagagaagccttgggaggcttggcttgcgctcagcccctccaagaagggagccaagatct

SEQ ID NO: 41143 - DNA, 201 bp, Homo sapiens
aggatccaggaaggagttgagggagggcaggcaatggggagagccctgggatggcagcctggagacagggtccacattgtcctgtgctaccgatgcactgrgtcaagtgatttcactcctacagactcagccttccccttggaaataggggtatgttggatgagctgatctttaggtctcctccagttggggtaaccaagg

SEQ ID NO: 41144 - DNA, 201 bp, Homo sapiens
tattttttgtgcccttctttgctactcctgctcttgctgcaagatgtgttagcaggttcgctctagactccaggctgcagccagaggcttgccggggctcrcccttgcacctgccctgctcagcggctttggaattgagtcgccttccccgctctgagccgtgtggccaggagagatgattcagctcgggacctgtgctcc

SEQ ID NO: 41145 - DNA, 201 bp, Homo sapiens
agcaggttcgctctagactccaggctgcagccagaggcttgccggggctcgcccttgcacctgccctgctcagcggctttggaattgagtcgccttccccrctctgagccgtgtggccaggagagatgattcagctcgggacctgtgctccagcctttaccccccagagaagccccagatgccctgtgctcctgggcaggg

SEQ ID NO: 41146 - DNA, 201 bp, Homo sapiens
cagggggcggagcctgcagtgagccgagatcgcaccactgcactccagcctgggcgacagcgagactccgtctcaaacaaacaaacaaacaaacaaaaaaacaacaacaacaacaaacaacgaaacctctgatcactttgatcaccccccacccccattctgcagttctgtgtgggccgccctgaccccaccccaggcggg

SEQ ID NO: 41147 - DNA, 201 bp, Homo sapiens
tcttccactgagggctccagcccagcctcacctgagctcatttcccttcacctgagtgagtcggcctaggcgtgccggccgctcgccttcccgcaaggtgkgggccatttccacacctccctcccaactctggaggtgggaggcagccatgcgctgtgccgttgacgtggagctgctgaacacccatggtctgctggatgc

SEQ ID NO: 41148 - DNA, 201 bp, Homo sapiens
ggcttgcccagcaaccctgtgaagactacgttctctctgtaatgtagcacaactctgtgcatgccatttaatctcttgcacctcagtttgtcgctctgtamaatgggggtgtggtttcttacgagttctgcttcccagggttgaggtaaaagtcaattaaaacagtgcagtaggaaaacattttgcaaaagggtttgaaaa

SEQ ID NO: 41149 - DNA, 201 bp, Homo sapiens
cccccattgtgattcctgtccccaacatggggcctgctcttctcggtgagaggtggcctgggaccggactcctagccttgctcctgatatactgggtgatstgggcaaatggcttgaccactcggcttcagttgccccatctgtacaatgaggggaggttcagtgagatggtcctggctggattaggcccttaggttccct

SEQ ID NO: 41150 - DNA, 201 bp, Homo sapiens
tgccccctcttagctttctctgtgccctccagccctggaaggaatcccagccccttgccctccaggtccgggcccgggagcccacgcagatctcagcctarcagctaatgctggggctgggaaaggctggagaaaagggggagagggagagagtgtgtgtcctccaggagccctggctgggctgtctcctgtgggagagag

SEQ ID NO: 41151 - DNA, 201 bp, Homo sapiens
catggggcctgctcttctcggtgagaggtggcctgggaccggactcctagccttgctcctgatatactgggtgatctgggcaaatggcttgaccactcggsttcagttgccccatctgtacaatgaggggaggttcagtgagatggtcctggctggattaggcccttaggttccctccctgccccctcttagctttctctg

SEQ ID NO: 41152 - DNA, 201 bp, Homo sapiens
ggctggattaggcccttaggttccctccctgccccctcttagctttctctgtgccctccagccctggaaggaatcccagccccttgccctccaggtccggrcccgggagcccacgcagatctcagcctagcagctaatgctggggctgggaaaggctggagaaaagggggagagggagagagtgtgtgtcctccaggagcc

SEQ ID NO: 41153 - DNA, 201 bp, Homo sapiens
aagtcaattaaaacagtgcagtaggaaaacattttgcaaaagggtttgaaaataaatcaatatggcttaatgcttccgtttattgagcacctactttgtgctaggtgcagtgatgacttctttaaatatgtgataattatgggagcagtcccaagcagtgggaagtgattatgctcattttacaaatgagaggttcagaga

SEQ ID NO: 41154 - DNA, 201 bp, Homo sapiens
cctgcttcttagaggacctgcacctttcctggcactggccggccccagtcacgctcatcatcctgtgagatgccggctcccttcccagttcacccctaccytccatcctagccgagccccccagttaccttgattgcttcctttccggttcaggtggtccccaaaaagaaagagcgtaaggtggcttccgatgatgacatc

SEQ ID NO: 41155 - DNA, 201 bp, Homo sapiens
cctggacccacctgctgccacagtggcccttgttaggacagacctcaaagggctgggcatgcccattagttcctggggtatgtctatggggtgtggacggygaaagcagggttttcagtgggttttgctgacgggggttctgtggcattagcatctggcttctttccttctgccaccctgtccccttgtactgccagccac

SEQ ID NO: 41156 - DNA, 201 bp, Homo sapiens
tacagccgtgagccaccatgttcagcctctccaaagttgtgttcaataagcaataccaagtggcagtgatgctgggaacctgggcaaatatagacaggagrgaattggacaggtggctcagaaaacaactgaaacctcagattggcattggggcaggtgacccgggggttccctgggccccatgttgcccaaaagagccag

SEQ ID NO: 41157 - DNA, 201 bp, Homo sapiens
tgcttgcctggcacaaggcagccagtgcccagaacttcccacacttcttgggttgaagggattgaggatctgaggctggaggagccagaggtcctgccccrgcgagagctccggaactcgcctcccctctctcagcaggaagagaatactcttaatccacttctgtgtccccagcacttggctcctgggtgagcacttggg

SEQ ID NO: 41158 - DNA, 201 bp, Homo sapiens
acctgctgggcagctgcccctttctgtcccctgtatgggtccctggagcctgccttctgttcagtcatgccctctggtgtcacccccacaggcgggagacstttgactttgacgacgactgtgacagcctgacgtgggaagagaatgaagacacgctgctgctctgggaggatttcaccaactgcaatccgaccatcgacc

SEQ ID NO: 41159 - DNA, 201 bp, Homo sapiens
gacatcatttgtttcaaaagcccagggcacgggctctcctaacctccctgcagagctctgaggctggctcagaattccatagtccagagctcactctgccyagccacttcattgtacaaatgagagaatggactcagaggggcacacagagccaggcccccaactcttggtccagtgctttgtcccccacgccatgcctgg

SEQ ID NO: 41160 - DNA, 201 bp, Homo sapiens
ggcaacttggatggggccccttcactcatggacggaggaagatgccccctgtcccagggtgagcattcccttccatccctgcttgcctggcacaaggcagycagtgcccagaacttcccacacttcttgggttgaagggattgaggatctgaggctggaggagccagaggtcctgccccagcgagagctccggaactcgcc

SEQ ID NO: 41161 - DNA, 201 bp, Homo sapiens
tccctggagcctgccttctgttcagtcatgccctctggtgtcacccccacaggcgggagacctttgactttgacgacgactgtgacagcctgacgtgggargagaatgaagacacgctgctgctctgggaggatttcaccaactgcaatccgaccatcgacctgcagggcgaggtaagcccagcgcctggcttcccaaagg

SEQ ID NO: 41162 - DNA, 201 bp, Homo sapiens
gaatggactcagaggggcacacagagccaggcccccaactcttggtccagtgctttgtcccccacgccatgcctggaagagaattctctcttctgtccctmttctaggctgacttttaaggtagacaggaggcagaggcagggttggaactgggtggggacaggaactcttttgcctgatacttcctggacctgccattcc

SEQ ID NO: 41163 - DNA, 201 bp, Homo sapiens
atacaaagtacccagaagtcgaatccacagagacagaaagtagaagggtggttgccaggggctgcggggagaggggtacggggtactactgcttaacaggyacagttgcagttttgcaagatgaaagagttctggagatggatggaggtgatggttgcacagcagtgtgaatgcacttaatgccactttaaaaatggttaa

SEQ ID NO: 41164 - DNA, 201 bp, Homo sapiens
taagttaaaacaaacaggccgggcgcggtggctcacgcctgtaatcccagcactttgggaggccgaggcaggcggatcacgaggtcaggagatcgagaccrtcctggctaacacagtgaaacgctgtctctactaaaaatacaaaaaattagccgggcgtggtggcgggcgcctgtagtcccagctacgcaggaggctgag

SEQ ID NO: 41165 - DNA, 201 bp, Homo sapiens
gtccctcccacctctgtcttcacgaagtgctgggctcataccttaacgtggcacttgtcaccaccacctgatactctggttatatgtcagcctggctgtcytctcacaccacctcccctaggctgggagctcccagagggcaggcagggatggatgccccaatgcaccttccttgcccagctcaagatagtccctgggtgg

SEQ ID NO: 41166 - DNA, 201 bp, Homo sapiens
aggatattatgctaaatgaaatcagccaggctgggcgcggtggctcacacctgtcatctcaatactttgggaggccaaggtgggagaattgcttgagcccrggagttcgagacctgctggacagcatggtgaaaccccgtctctacaaaaaataatttttaaaaattaactgggcatggtggctcatgcctatagtcccag

SEQ ID NO: 41167 - DNA, 201 bp, Homo sapiens
aacctctgatcactttgatcaccccccacccccattctgcagttctgtgtgggccgccctgaccccaccccaggcggggccctgggcctttcccatggacrtctccaccagctgtgggcaggaccctagccaggctgcccctggccagatctgatgaagtgtttgaataatgcagccgtgttacagttgtgttttgttttg

SEQ ID NO: 41168 - DNA, 201 bp, Homo sapiens
gtggccctgcagccacctgctgtgtcacctgctcgggaggatgctgccgtatattgttaggtggaaaaaatgcatttgaaaaccacatatggtcgcatccygttgtcgttaaaaaccaatctcataagaagagaaaatctcataagaaaaagttgggaaggatatagagccgatgttaaccgtaattctctcagggagggg

SEQ ID NO: 41169 - DNA, 201 bp, Homo sapiens
gagtcaagtgatttcactcctacagactcagccttccccttggaaataggggtatgttggatgagctgatctttaggtctcctccagttggggtaaccaakgcatcttgggaaccccttagtcccaggcaaacctgcctggttggtcaacctacttctagttctagccaatagggaggtcttgacatctcccaggctttga

SEQ ID NO: 41170 - DNA, 201 bp, Homo sapiens
atgtgcgagagcatgtccctggctgagctgagcacagtcccactcgtctgtcccaggggaccggaacacggagcaggaggagggcggtgaggcggtgcacraggtggaggtggtcatcaagcacaaccggttcacaaaggagacctatgacttcgacatcgccgtgctccggctcaagacccccatcaccttccgcatgaa

SEQ ID NO: 41171 - DNA, 201 bp, Homo sapiens
gcattcctttccccagataccttcctgcatctgggtcacgcccagaggcagatgggagcctgtgcaggccccgtggcgtcgggaggggcccacacgttggsgcagcctccccaagaccccccacttggcctggtctctcttgttcctcttgggaattggacacctccccggtgactgcctatgacccgcagactccctggg

SEQ ID NO: 41172 - DNA, 201 bp, Homo sapiens
atatgcccgggctccaaacttgcaagtccagctccctagggacagcatgtggcacccctgtcagtgcttgctcccctgggaccgtgttccaagtcctggcrggtaggagacccttcacaggagctgccacagggacccccaggaagtcacctgggatggaggtgtccgtgcaccatgggggacaggctcacactgctgaac

SEQ ID NO: 41173 - DNA, 201 bp, Homo sapiens
caagtgtgggccgggtgcagtagctcatgcctgtaatcccagcattttgggaggccaaggcgggcggatcatgaggtcaggagatcgagaccatcctggcyaacacagtgaaaccccgtctctagtaaaaataccaaaaaaaaaaaaattagctgggcgtggtggtgcacgcctgtagtcccagctgctcaggaggctgag

SEQ ID NO: 41174 - DNA, 201 bp, Homo sapiens
aggggaccggaacacggagcaggaggagggcggtgaggcggtgcacgaggtggaggtggtcatcaagcacaaccggttcacaaaggagacctatgacttcracatcgccgtgctccggctcaagacccccatcaccttccgcatgaacgtggcgcctgcctgcctccccgagcgtgactgggccgagtccacgctgatgac

SEQ ID NO: 41175 - DNA, 201 bp, Homo sapiens
ttaaaaaacaataagcctgtggacattttttagcgtaatctaggctcttgatgacctgttttaaactaatcagcaatgaatatttttcagctaacgtaatsactattgacaagcacgtgacccttgtctgaatgttaactcaggcatagcaactaaaaaccatccattgaccagctcgggagtagcaaacagagcaagcca

SEQ ID NO: 41176 - DNA, 201 bp, Homo sapiens
ttcgcatggccttctctctctgtgcctctgtgtgactttttctgtctcttataaggactttctcctttatttagggcccacactgacccagcatgatctcwtctacagccttggcttagttaacatctgcaaagacccgatttccaattaaggttctattctgaggctgcaggtggacctgaattagcagggagggcacta

SEQ ID NO: 41177 - DNA, 201 bp, Homo sapiens
catcaatgaggaaaacgagggtttctgtggtggaactattctgagcgagttctacatcctaacggcagcccactgtctctaccaagccaagagattcaagrtgagggtaggtaagtgaccaacagcccccagggccgtggtggggggcaccgtcactgtctgcttttcagaaaccactaaagctgatggaatttgttggga

SEQ ID NO: 41178 - DNA, 201 bp, Homo sapiens
ggaaaacgagggtttctgtggtggaactattctgagcgagttctacatcctaacggcagcccactgtctctaccaagccaagagattcaaggtgagggtasgtaagtgaccaacagcccccagggccgtggtggggggcaccgtcactgtctgcttttcagaaaccactaaagctgatggaatttgttgggaacactggtt

SEQ ID NO: 41179 - DNA, 201 bp, Homo sapiens
tgctcatcaatgaggaaaacgagggtttctgtggtggaactattctgagcgagttctacatcctaacggcagcccactgtctctaccaagccaagagattyaaggtgagggtaggtaagtgaccaacagcccccagggccgtggtggggggcaccgtcactgtctgcttttcagaaaccactaaagctgatggaatttgtt

SEQ ID NO: 41180 - DNA, 201 bp, Homo sapiens
attataattcccttctgccaataataaataataagtgactaaggtgtttttgaagctcaagattgcttgattctgcagtcttgttttaaattttggacatrgagagtttggagttctgagatgagggaaggcatctgtcatagtgagagagctgaaaacatggagctcaggacaaaagtcagtgctagagagatcagttgg

SEQ ID NO: 41181 - DNA, 201 bp, Homo sapiens
actggaggtaggaatgaacccaagatttactaagcaccttctgtataccaaactcaacactaggagtttatacaatctttaaaacagctctaagagtagayattataattcccttctgccaataataaataataagtgactaaggtgtttttgaagctcaagattgcttgattctgcagtcttgttttaaattttggacat

SEQ ID NO: 41182 - DNA, 201 bp, Homo sapiens
gagcgagttctacatcctaacggcagcccactgtctctaccaagccaagagattcaaggtgagggtaggtaagtgaccaacagcccccagggccgtggtgrggggcaccgtcactgtctgcttttcagaaaccactaaagctgatggaatttgttgggaacactggttgaaatcctgaaatcctatttgtaggggttaggg

SEQ ID NO: 41183 - DNA, 201 bp, Homo sapiens
cgagtccacgctgatgacgcagaagacggggattgtgagcggcttcgggcgcacccacgagaagggccggcagtccaccaggctcaagatgctggaggtgycctacgtggaccgcaacagctgcaagctgtccagcagcttcatcatcacccagaacatgttctgtgccggctacgacaccaagcaggaggatgcctgcca

SEQ ID NO: 41184 - DNA, 201 bp, Homo sapiens
gcaggaggatgcctgccagggggacagcgggggcccgcacgtcacccgcttcaaggacacctacttcgtgacaggcatcgtcagctggggagagggctgtrcccgtaaggggaagtacgggatctacaccaaggtcaccgccttcctcaagtggatcgacaggtccatgaaaaccaggggcttgcccaaggccaagagcca

SEQ ID NO: 41185 - DNA, 201 bp, Homo sapiens
atggcagtcagggagcataggtgagggggagcctgggtgagggtgaccagagcttttaaccctgtcctccctgccttccagtgttcatccgcagggagcasgccaacaacatcctggcgagggtcacgagggccaattcctttcttgaagagatgaagaaaggacacctcgaaagagagtgcatggaagagacctgctcat

SEQ ID NO: 41186 - DNA, 201 bp, Homo sapiens
agagaatggcgtgaacctggaaggcggagcttgcactgagcactgagccgagattgcgccactgcgctccagcctgggcaacagaatgagactctgtctcaaaaaaaaaaaaaaaaaaaaaatcaaaaggcaaatgtgatgtgtgaaaataaaattacataatctactttgtagtgcaaaaagttcaggctgggcaaggtg

SEQ ID NO: 41187 - DNA, 201 bp, Homo sapiens
gtttagaaggattcgaaggcaaaaactgtgaattatgtaggttcctctgcttggtataccttcagatcagatgcccctgaagagtggcaggtgggcggggraagaagtgaaaacgcctaatgaaacaatcttaagtcatttctgatttacaaagtctgggctctattatacctattatactgtgccactatagcaatagaa

SEQ ID NO: 41188 - DNA, 201 bp, Homo sapiens
ggcccaggtggttcaaacatgaagaccatgaggtttggaaacagacccattatttctgtaagccagatctgctgtttaacctcagcttccccatctgacaratgggaccaacactattgcctgactgcttgggtgatccctggagcactttgcacgatgcctggcccaccgcaggccctcagtctgcattgggactgtggg

SEQ ID NO: 41189 - DNA, 201 bp, Homo sapiens
caccttccgcatgaacgtggcgcctgcctgcctccccgagcgtgactgggccgagtccacgctgatgacgcagaagacggggattgtgagcggcttcgggygcacccacgagaagggccggcagtccaccaggctcaagatgctggaggtgccctacgtggaccgcaacagctgcaagctgtccagcagcttcatcatcac

SEQ ID NO: 41190 - DNA, 201 bp, Homo sapiens
acgtgcctctcctttgcagtcacacggaagctctgcagcctggacaacggggactgtgaccagttctgccacgaggaacagaactctgtggtgtgctcctrcgcccgcgggtacaccctggctgacaacggcaaggcctgcattcccacaggtaggaggcacgttgggccacagccacccgctgccgctgggccgggccag

SEQ ID NO: 41191 - DNA, 201 bp, Homo sapiens
gcacaaccggttcacaaaggagacctatgacttcgacatcgccgtgctccggctcaagacccccatcaccttccgcatgaacgtggcgcctgcctgcctcyccgagcgtgactgggccgagtccacgctgatgacgcagaagacggggattgtgagcggcttcgggcgcacccacgagaagggccggcagtccaccaggct

SEQ ID NO: 41192 - DNA, 201 bp, Homo sapiens
ttcccagcgtggtcactcccctgcctcgccagcaggtctcggctccaatcaggaggcctaagccaagtgataagcagccagacaacagccatcccagctgrggcgtggactttgctccagcagcctgtcccagtgaggacagggacacagtactcggccacaccatggggcgcccactgcacctcgtcctgctcagtgcct

SEQ ID NO: 41193 - DNA, 201 bp, Homo sapiens
acaaaaatgaatatgtaacataaaatctgtgggatgcagctaaaaaagcagtgtttcaagggaaatttatagcattaaatgctcacatgggaaaagaaagrcggtctcaaattgtttatgtaagcttccactttaataaactagaaaaaaagaaaaaaataaaccaaaaggaaattgaaaaagcagaaatcaaagaaattt

SEQ ID NO: 41194 - DNA, 201 bp, Homo sapiens
cggacgacgaacccagcatcgcgcctgcgcagtaggaggagagcaatgccaccaggccgcgattgcgcagccgcagcagccccgcgcggaagacgctaccytcctctcccccgaagaggcggggcttcgaacgaacctggaaatggccgaggggtctcgacttcctcaccccaggcatcaggaaaggtgcctgcaggacag

SEQ ID NO: 41195 - DNA, 201 bp, Homo sapiens
gagccaacgtgcctctcctttgcagtcacacggaagctctgcagcctggacaacggggactgtgaccagttctgccacgaggaacagaactctgtggtgtrctcctgcgcccgcgggtacaccctggctgacaacggcaaggcctgcattcccacaggtaggaggcacgttgggccacagccacccgctgccgctgggccg

SEQ ID NO: 41196 - DNA, 201 bp, Homo sapiens
cagccccgcgcggaagacgctaccctcctctcccccgaagaggcggggcttcgaacgaacctggaaatggccgaggggtctcgacttcctcaccccaggcrtcaggaaaggtgcctgcaggacagggctctgaagtggaagtgggcggtggtgatgccgaactgacaagaatgagctgaagagaagaaagtagccgagaag

SEQ ID NO: 41197 - DNA, 201 bp, Homo sapiens
ggccgcgaacccggcactgcgcctgcgcagcaaaaggacacgcactgaggccaggccgcgaacccagcacggtgcctgcgcagcaggaagaccggcatccmcaccggacgacgaacccagcatcgcgcctgcgcagtaggaggagagcaatgccaccaggccgcgattgcgcagccgcagcagccccgcgcggaagacgct

SEQ ID NO: 41198 - DNA, 201 bp, Homo sapiens
agaggcccgcgaggtctttgaggacagcgacaagacggtaagggctggggatagcctggctgttggtaaggagctcaggccacagcgccctcgctggcccygctgctccgtccatccaggggggcggcctggaggaaggggcagcgtgcgcgaaggctttcaggggcggggcccagcaaatcgaggcctcggcggagtcct

SEQ ID NO: 41199 - DNA, 201 bp, Homo sapiens
tcagaccccaactggagcccaggaggcccgcgagtcccagtttgggaaacactaagccaggcttggataacttgtctgaggctgtggtcatcccaacatgwgagccagaggccccaagggagatgggcattccccacccctcagcttcctcagtgccttttgtggagtggaggtgacatgaggctgcaggttgcagggagc

SEQ ID NO: 41200 - DNA, 201 bp, Homo sapiens
tcatcatcacccagaacatgttctgtgccggctacgacaccaagcaggaggatgcctgccagggggacagcgggggcccgcacgtcacccgcttcaaggayacctacttcgtgacaggcatcgtcagctggggagagggctgtgcccgtaaggggaagtacgggatctacaccaaggtcaccgccttcctcaagtggatcg

SEQ ID NO: 41201 - DNA, 201 bp, Homo sapiens
gttccaattccagataagatgaagaaatcacattccacactgcctctcccactgagtgtagctccaaaacatggatagaatgcatgtagcagctatttgasgaccctaaaaagtaaatcgcagtgtattgcagaataagactacaattagatgtatgatatgatacaactggctgtgagtttatcattttttcctccagtc

SEQ ID NO: 41202 - DNA, 201 bp, Homo sapiens
gccacagcctagagcgccagcgcgcaggcgcacaactgacgccaggccacgaacccagtactgcgcctgcacagcagaagcactagcactgaggccgggcsgcgaacccggcactgcgcctgcgcagcaaaaggacacgcactgaggccaggccgcgaacccagcacggtgcctgcgcagcaggaagaccggcatccccac

SEQ ID NO: 41203 - DNA, 201 bp, Homo sapiens
gcccgcgtcctgccttggcctccgtagtcgctgagagccacagcctagagcgccagcgcgcaggcgcacaactgacgccaggccacgaacccagtactgckcctgcacagcagaagcactagcactgaggccgggccgcgaacccggcactgcgcctgcgcagcaaaaggacacgcactgaggccaggccgcgaacccagc

SEQ ID NO: 41204 - DNA, 201 bp, Homo sapiens
ctgactccttcccggcgaggactcagcggggagggatgcgcccaagtcccttgagggtcacagggcttctgccagagttaagttctatttaaaaataaaakgttaacctaaaaaccaatagtcatggtctcggccagcgcctcgccgagttgcagtgagctgagatcgtgccctcccacgcccgcagcccgcgtcctgcct

SEQ ID NO: 41205 - DNA, 201 bp, Homo sapiens
aagaacctcgatgcaggagaccccaccgaggatgagcaggaaaagcctcttgtggggctgaggagctggacttggagctgcaggcggggttttggaggggktcctgggctgggggaccagggtggggcgccctggagggctcactggaggggccctcgcccagcctgttgaggtttgcgattcttgtttcctggttcgagt

SEQ ID NO: 41206 - DNA, 201 bp, Homo sapiens
cgacgacgtggggcctcgccctgcaagcccgctgcccctccgggtgcccctgcgctctgcctcccggctctctgactcttctccctcagggtgagctgtgyaggctatggggagcctctctctgtgctgaaggccccggccgtcctctttctttcagggccctacccctgtgggaaacagaccctggaacgcaggaagagg

SEQ ID NO: 41207 - DNA, 201 bp, Homo sapiens
ggatatgaaaccatgaagcctctctgtgaccaatacacagaaatctcaacctagttagggagctgagaccgaaatcctcccagtcccaggcactgtgtggytggggcaagaacctcgatgcaggagaccccaccgaggatgagcaggaaaagcctcttgtggggctgaggagctggacttggagctgcaggcggggttttg

SEQ ID NO: 41208 - DNA, 201 bp, Homo sapiens
attaggaaaagttttccaacacacagcacactggaaagaattttgcagggagtcgcacacgcccagcacttgggttctcctgttggcatcctccggccagrtgcattcatcccatttcgcccggcccgtttgtctctgtccatccgtcaagctttcttgacttcttggtgcattttcaggcaaaccgcagacgccaacact

SEQ ID NO: 41209 - DNA, 201 bp, Homo sapiens
agcgacaagacggtaagggctggggatagcctggctgttggtaaggagctcaggccacagcgccctcgctggccccgctgctccgtccatccaggggggcrgcctggaggaaggggcagcgtgcgcgaaggctttcaggggcggggcccagcaaatcgaggcctcggcggagtcctgcccacagggacatcagtgccgccc

SEQ ID NO: 41210 - DNA, 201 bp, Homo sapiens
caaaaaaaaaaaaaagttcagttccaaataatggatgaactcagaacttggaagggtggtgactgcacacatggacagagctgaggcacggcggggtggargcccctgcggctggcagattcaccggagcctcctcagactgcgcaggagcacagcaagtaaacagctaagctgtgcccatctgaccccagacacgtgtgg

SEQ ID NO: 41211 - DNA, 201 bp, Homo sapiens
gaggtctttgaggacagcgacaagacggtaagggctggggatagcctggctgttggtaaggagctcaggccacagcgccctcgctggccccgctgctccgyccatccaggggggcggcctggaggaaggggcagcgtgcgcgaaggctttcaggggcggggcccagcaaatcgaggcctcggcggagtcctgcccacaggg

SEQ ID NO: 41212 - DNA, 201 bp, Homo sapiens
aacagctgcaagctgtccagcagcttcatcatcacccagaacatgttctgtgccggctacgacaccaagcaggaggatgcctgccagggggacagcggggrcccgcacgtcacccgcttcaaggacacctacttcgtgacaggcatcgtcagctggggagagggctgtgcccgtaaggggaagtacgggatctacaccaag

SEQ ID NO: 41213 - DNA, 201 bp, Homo sapiens
agagagatgtggacagcacagcccacagacacacactctacaagggacacagactctcggatccagggcattttaaccagcagatcaagactcatttgccmgtcatgaaatcaactcagtatttttttttaaaagagtagaatcaaatagaaaactttgtactaagtactgtattttaggaaatactaataaatactattt

SEQ ID NO: 41214 - DNA, 201 bp, Homo sapiens
gaaggccccggccgtcctctttctttcagggccctacccctgtgggaaacagaccctggaacgcaggaagaggtcagtggcccaggccaccagcagcagcrgggaggcccctgacagcatcacatggaagccatatgatgcagccgacctggaccccaccgagaaccccttcgacctgcttgacttcaaccagacgcagcc

SEQ ID NO: 41215 - DNA, 201 bp, Homo sapiens
ctgccttccagtgttcatccgcagggagcaggccaacaacatcctggcgagggtcacgagggccaattcctttcttgaagagatgaagaaaggacacctcraaagagagtgcatggaagagacctgctcatacgaagaggcccgcgaggtctttgaggacagcgacaagacggtaagggctggggatagcctggctgttgg

SEQ ID NO: 41216 - DNA, 201 bp, Homo sapiens; identical to SEQ ID NO: 29819

SEQ ID NO: 41217 - DNA, 201 bp, Homo sapiens
ggcgcaagggatcgaccagagacagtgagggcgtcaggctccagttgagtggggaccaatccttgtggcaagtctgtgaaccatcactgtggctctagggyagcagagaaaaaagcaggcatatgtccatctggccacaaggaaggagaccaaggggaagagagaaggtaccaagagaggtgttcacatggaggtgcgtca

SEQ ID NO: 41218 - DNA, 201 bp, Homo sapiens
tggccacgtggcccagacccggcctgctcagtctgactgaagcgttgatgcgactcagccataacagatagcagaagcgcccagattcagtccagagggcygagccaggcacgccatctttccttcattccctcaacacatattggttaagttccggccgtgctaggcacgggcatacagctgtgaccaaacacgtcaagt

SEQ ID NO: 41219 - DNA, 201 bp, Homo sapiens
aaggtcagtattttttctgttttaaccttcagtgagaggggttcatcaggatatttgaattttgaaaatagttcctgaatttcctttctgcttttgttctmattttactcatttaagactttttccctcagggtgtttccataatagttattgtaaaagagtttttagagtaattttatactaatcctagttttgttattg

SEQ ID NO: 41220 - DNA, 201 bp, Homo sapiens
caaaatcaaggcgtcagcggggctggttcctccagaggctgggagagagtctgctctaggcctgtttcctggcctcggggtgccagcggcctcacagcccrtggcttgtgggagcattgctcccatcgctgcctccatcatcgcatggggttctcaccatggctgtttttctgtcttcttttctctcagaaggacaccagt

SEQ ID NO: 41221 - DNA, 201 bp, Homo sapiens
ttgctcaacccaatggccgctttgtggctgacaggcaagtggatgtagctggcacccttgggccagcccagcctccatttctccagctgtccccagagccracgtgcctctcctttgcagtcacacggaagctctgcagcctggacaacggggactgtgaccagttctgccacgaggaacagaactctgtggtgtgctcct

SEQ ID NO: 41222 - DNA, 201 bp, Homo sapiens
ggaacaaggccctggaaggacccatgccatcatcatcgacagcaaagctactctgcaaacagacagatgcttccgcgaattggtagaaaattctgcagccrgaatgctctaggatcctgaggccctaagcccggcccggggctcccgaggccctaagcccggcccgggactctggaagctgctctggcttattgggaatgg

SEQ ID NO: 41223 - DNA, 201 bp, Homo sapiens
ctggcacccttgggccagcccagcctccatttctccagctgtccccagagccaacgtgcctctcctttgcagtcacacggaagctctgcagcctggacaayggggactgtgaccagttctgccacgaggaacagaactctgtggtgtgctcctgcgcccgcgggtacaccctggctgacaacggcaaggcctgcattccca

SEQ ID NO: 41224 - DNA, 201 bp, Homo sapiens
gtgctccggctcaagacccccatcaccttccgcatgaacgtggcgcctgcctgcctccccgagcgtgactgggccgagtccacgctgatgacgcagaagayggggattgtgagcggcttcgggcgcacccacgagaagggccggcagtccaccaggctcaagatgctggaggtgccctacgtggaccgcaacagctgcaag

SEQ ID NO: 41225 - DNA, 201 bp, Homo sapiens
tgcctgcctccccgagcgtgactgggccgagtccacgctgatgacgcagaagacggggattgtgagcggcttcgggcgcacccacgagaagggccggcagyccaccaggctcaagatgctggaggtgccctacgtggaccgcaacagctgcaagctgtccagcagcttcatcatcacccagaacatgttctgtgccggcta

SEQ ID NO: 41226 - DNA, 201 bp, Homo sapiens
ggaggatgcctgccagggggacagcgggggcccgcacgtcacccgcttcaaggacacctacttcgtgacaggcatcgtcagctggggagagggctgtgccsgtaaggggaagtacgggatctacaccaaggtcaccgccttcctcaagtggatcgacaggtccatgaaaaccaggggcttgcccaaggccaagagccatgc

SEQ ID NO: 41227 - DNA, 201 bp, Homo sapiens
tggcaagggacatggcagtcagggagcataggtgagggggagcctgggtgagggtgaccagagcttttaaccctgtcctccctgccttccagtgttcatcygcagggagcaggccaacaacatcctggcgagggtcacgagggccaattcctttcttgaagagatgaagaaaggacacctcgaaagagagtgcatggaaga

SEQ ID NO: 41228 - DNA, 201 bp, Homo sapiens
tcaggcaacacctgtccacctggccagccacactgagcctgtcacgtctgtcacaggccctgctcatcaatgaggaaaacgagggtttctgtggtggaacyattctgagcgagttctacatcctaacggcagcccactgtctctaccaagccaagagattcaaggtgagggtaggtaagtgaccaacagcccccagggccg

SEQ ID NO: 41229 - DNA, 201 bp, Homo sapiens
cccaaatggaaactttgaggccccttacaggtcccccagcgcaggccaccgccgaaggttactggggaagacccctgcagcttccatgtggacattactckcttgcttcatcccggagtgcagtcacctgcagcctgggaccacctgactgatgtcaccctggagatccatgccaaaagagctggggaaagttcaccttct

SEQ ID NO: 41230 - DNA, 201 bp, Homo sapiens
gggccggcagtccaccaggctcaagatgctggaggtgccctacgtggaccgcaacagctgcaagctgtccagcagcttcatcatcacccagaacatgttcygtgccggctacgacaccaagcaggaggatgcctgccagggggacagcgggggcccgcacgtcacccgcttcaaggacacctacttcgtgacaggcatcgt

SEQ ID NO: 41231 - DNA, 201 bp, Homo sapiens
agcttttaaccctgtcctccctgccttccagtgttcatccgcagggagcaggccaacaacatcctggcgagggtcacgagggccaattcctttcttgaagrgatgaagaaaggacacctcgaaagagagtgcatggaagagacctgctcatacgaagaggcccgcgaggtctttgaggacagcgacaagacggtaagggct

SEQ ID NO: 41232 - DNA, 201 bp, Homo sapiens
ccagacgcagcctgagaggggcgacaacaacctcaccaggatcgtgggaggccaggaatgcaaggacggggagtgtccctggcaggtaacagtaggatgtyccctcgggcctgctggagagaccacctgtcccgctgtgcacctcggggaggccagcctgacacttggaatagcaatccgggaaggaactgttccgaacta

SEQ ID NO: 41233 - DNA, 201 bp, Homo sapiens
ctcctttgcagtcacacggaagctctgcagcctggacaacggggactgtgaccagttctgccacgaggaacagaactctgtggtgtgctcctgcgcccgcrggtacaccctggctgacaacggcaaggcctgcattcccacaggtaggaggcacgttgggccacagccacccgctgccgctgggccgggccagggaggaca

SEQ ID NO: 41234 - DNA, 201 bp, Homo sapiens
cagtgagtgtgtggcacaggcagagaaaagagacagacaaggaactgtccttgggtggatggcaggagaccgaagaggacagcttggcatggggagggccrggcagtgccacctgaagagctggcttctcagtcaggcaacacctgtccacctggccagccacactgagcctgtcacgtctgtcacaggccctgctcatca

SEQ ID NO: 41235 - DNA, 201 bp, Homo sapiens
ggtgagggtaggtaagtgaccaacagcccccagggccgtggtggggggcaccgtcactgtctgcttttcagaaaccactaaagctgatggaatttgttggsaacactggttgaaatcctgaaatcctatttgtaggggttaggggcatttcacagaggaagaagatgaggaagcagaggaaggggaagagtggggaggagg

SEQ ID NO: 41236 - DNA, 201 bp, Homo sapiens
gacccccatcaccttccgcatgaacgtggcgcctgcctgcctccccgagcgtgactgggccgagtccacgctgatgacgcagaagacggggattgtgagcrgcttcgggcgcacccacgagaagggccggcagtccaccaggctcaagatgctggaggtgccctacgtggaccgcaacagctgcaagctgtccagcagctt

SEQ ID NO: 41237 - DNA, 201 bp, Homo sapiens
ggccaggccgcgaacccagcacggtgcctgcgcagcaggaagaccggcatccccaccggacgacgaacccagcatcgcgcctgcgcagtaggaggagagcratgccaccaggccgcgattgcgcagccgcagcagccccgcgcggaagacgctaccctcctctcccccgaagaggcggggcttcgaacgaacctggaaatg

SEQ ID NO: 41238 - DNA, 201 bp, Homo sapiens
ggagacctatgacttcgacatcgccgtgctccggctcaagacccccatcaccttccgcatgaacgtggcgcctgcctgcctccccgagcgtgactgggccragtccacgctgatgacgcagaagacggggattgtgagcggcttcgggcgcacccacgagaagggccggcagtccaccaggctcaagatgctggaggtgcc

SEQ ID NO: 41239 - DNA, 201 bp, Homo sapiens
tgccttccagtgttcatccgcagggagcaggccaacaacatcctggcgagggtcacgagggccaattcctttcttgaagagatgaagaaaggacacctcgraagagagtgcatggaagagacctgctcatacgaagaggcccgcgaggtctttgaggacagcgacaagacggtaagggctggggatagcctggctgttggt

SEQ ID NO: 41240 - DNA, 201 bp, Homo sapiens
caaactaagagaaaatatttgcaaatcacatatccaacaaaggaatcatattcggaatatataaagaaatcttaacagatcagaagaagaaaataaacacycagttaaacaaaagaccttaacagccaactcgccaaagaggatatatggatagaaaataaacatgtgagaagatactcaacattattagctcttacagaa

SEQ ID NO: 41241 - DNA, 201 bp, Homo sapiens
ggccagctgtggctccctggggctgagagtcagacgggcggatcagaggtcacagagacaaaaacacaaggacagagtcagagagagaaagggagagggarggagaaacggagacacagtgagatgggaggccaagaggcagagacagaggtagaaagacggagacagagagagagggaggggttggggcaggcagagaca

SEQ ID NO: 41242 - DNA, 201 bp, Homo sapiens
gcttgcagactccagtttcgaaatcctctctttgcagatggcgaccagtgtgagaccagtccttgccagaaccagggcaaatgtaaagacggcctcggggmatacacctgcacctgtttagaaggattcgaaggcaaaaactgtgaattatgtaggttcctctgcttggtataccttcagatcagatgcccctgaagagtg

SEQ ID NO: 41243 - DNA, 201 bp, Homo sapiens
gcagatggcgaccagtgtgagaccagtccttgccagaaccagggcaaatgtaaagacggcctcggggaatacacctgcacctgtttagaaggattcgaagrcaaaaactgtgaattatgtaggttcctctgcttggtataccttcagatcagatgcccctgaagagtggcaggtgggcgggggaagaagtgaaaacgccta

SEQ ID NO: 41244 - DNA, 201 bp, Homo sapiens
gaccagtgtgagaccagtccttgccagaaccagggcaaatgtaaagacggcctcggggaatacacctgcacctgtttagaaggattcgaaggcaaaaactrtgaattatgtaggttcctctgcttggtataccttcagatcagatgcccctgaagagtggcaggtgggcgggggaagaagtgaaaacgcctaatgaaacaa

SEQ ID NO: 41245 - DNA, 201 bp, Homo sapiens
ccggttcacaaaggagacctatgacttcgacatcgccgtgctccggctcaagacccccatcaccttccgcatgaacgtggcgcctgcctgcctccccgagygtgactgggccgagtccacgctgatgacgcagaagacggggattgtgagcggcttcgggcgcacccacgagaagggccggcagtccaccaggctcaagat

SEQ ID NO: 41246 - DNA, 201 bp, Homo sapiens
agcctgggtgagggtgaccagagcttttaaccctgtcctccctgccttccagtgttcatccgcagggagcaggccaacaacatcctggcgagggtcacgasggccaattcctttcttgaagagatgaagaaaggacacctcgaaagagagtgcatggaagagacctgctcatacgaagaggcccgcgaggtctttgaggac

SEQ ID NO: 41247 - DNA, 201 bp, Homo sapiens
caccgagaaccccttcgacctgcttgacttcaaccagacgcagcctgagaggggcgacaacaacctcaccaggatcgtgggaggccaggaatgcaaggacrgggagtgtccctggcaggtaacagtaggatgtcccctcgggcctgctggagagaccacctgtcccgctgtgcacctcggggaggccagcctgacacttgg

SEQ ID NO: 41248 - DNA, 201 bp, Homo sapiens
gggagcctgggtgagggtgaccagagcttttaaccctgtcctccctgccttccagtgttcatccgcagggagcaggccaacaacatcctggcgagggtcaygagggccaattcctttcttgaagagatgaagaaaggacacctcgaaagagagtgcatggaagagacctgctcatacgaagaggcccgcgaggtctttgag

SEQ ID NO: 41249 - DNA, 201 bp, Homo sapiens
atactttgaacaactctgcatatataaatttgcatgagatttgaacttggatgaaatgagcctattcttcaataccacaagccaccaaaacatacacaagrtgaaagagatacctgccaattcaattcttaatttaaaaccttctgaaaaagtaatgttcaggtacagatggtttcactggtagaattttaccaaacattt

SEQ ID NO: 41250 - DNA, 201 bp, Homo sapiens
gggcatttcacagaggaagaagatgaggaagcagaggaaggggaagagtggggaggaggacggggaggggaggcgaaccagcccagcccttctcccactgrgtgtccaggtctcgggtctccgagtctctgggtcccgggtctctgggtctgcatgtccagctaatgttctgtgtctcagtgtcttttattgggagccttc

SEQ ID NO: 41251 - DNA, 201 bp, Homo sapiens
gcagtccaccaggctcaagatgctggaggtgccctacgtggaccgcaacagctgcaagctgtccagcagcttcatcatcacccagaacatgttctgtgccrgctacgacaccaagcaggaggatgcctgccagggggacagcgggggcccgcacgtcacccgcttcaaggacacctacttcgtgacaggcatcgtcagctg

SEQ ID NO: 41252 - DNA, 201 bp, Homo sapiens
ccaaaagaatgattaataaaagaaaaaagtcataaattggactttatcaaaattaaaaccttttgcacttcagaaataaacactgttaagaggatgaaaayacaagctacaaactaagagaaaatatttgcaaatcacatatccaacaaaggaatcatattcggaatatataaagaaatcttaacagatcagaagaagaaa

SEQ ID NO: 41253 - DNA, 201 bp, Homo sapiens
gtgacttccattggggaaaatatcctattcagcttgagtcacttaattatggttgttattggtataaaatgtctctgttttccctaatatatttttaaatytcttttttccttttagaatgaattctggaataaatacaaaggtcagtattttttctgttttaaccttcagtgagaggggttcatcaggatatttgaattt

SEQ ID NO: 41254 - DNA, 201 bp, Homo sapiens
cgcctgtaatcccagcactttgggaagccaaggtgggtggatcacctgaggtcaggagttcaagaccagcctggccaacatggtgaaaccctgtctctataaaaaaaaaatacaaaaacttagctgggcgtggtggcgcacgcctgtaatcccagctactcgggaggctgaggcaggagaatcgcctgaacccaggaggtg

SEQ ID NO: 41255 - DNA, 201 bp, Homo sapiens
caggttcatgtcattctcctgcttcagcctcccgagtagctgggactacaggcgcctgccaccacgcccagctaattttttttgtatttttagtagagacrgggtttcaccgtgttagccaggatggtctccatctcctgacctggtgatctgcccacctcagcctcccaaagtgctgggattacaggcgtgagccaatgt

SEQ ID NO: 41256 - DNA, 201 bp, Homo sapiens
agagacggggtttcaccgtgttagccaggatggtctccatctcctgacctggtgatctgcccacctcagcctcccaaagtgctgggattacaggcgtgagmcaatgtgcccggccatgcctggctaatttttttatttttaatagagacaggaatttcaccatgttggccaggctggtctcaaactccaggcctcatgtga

SEQ ID NO: 41257 - DNA, 201 bp, Homo sapiens
accgagaaccccttcgacctgcttgacttcaaccagacgcagcctgagaggggcgacaacaacctcaccaggatcgtgggaggccaggaatgcaaggacgrggagtgtccctggcaggtaacagtaggatgtcccctcgggcctgctggagagaccacctgtcccgctgtgcacctcggggaggccagcctgacacttgga

SEQ ID NO: 41258 - DNA, 201 bp, Homo sapiens
tatctgattcaagtcaaactaggtgtattagtcagttttcacactgctgacacatacatacccgagactgggtaatttataaagaaaaagaggttgaatgractcacagttccacgtggctggggaggcctcaccgtcacggtggaaggcgcaaggcacgtcttacatggcggcagcaagacagagaatgagagaacaagc

SEQ ID NO: 41259 - DNA, 201 bp, Homo sapiens
cacttgaacccgggaggtggaggttgcagtgagctgagattgtgccattgcactccagcccgggcaacagagcaaaactctgtctcaaaaaaaaaaaaaawatatatatatatatatatgtatatatatatgtgtatatatatatacatatatatacacacacacacacacaatttccataatatatcttatttaactcaa

SEQ ID NO: 41260 - DNA, 201 bp, Homo sapiens
aggaaccaccctcacgattcagttacctcccacttggtccctctcactacacatggggattatgggaactacaattcaagatgagatttgggtggggacaragccaaaccatatcaatgctcctaaaatttgcaaatgagtgtaacaaggtcacagaatacaaggtcagcacatgtgttaatcacatttttatgtaatagc

SEQ ID NO: 41261 - DNA, 201 bp, Homo sapiens
gacgatgctgtcctgtgaaacagaagagagggagaaggcgcagccacacgctcaagtgtcctcaaacctcccctacaccaggagacaaggctaaagccagrgagccacccacactgcaggggcatcagcgggcaggaggacggtgccgggtgggcaaggcctccatctgctcttctgtttgacgggaggcagaaagagttg

SEQ ID NO: 41262 - DNA, 201 bp, Homo sapiens
agctggcccgaggaactggagctaaggtgcggggctgggataggagtcaggggacgctcaggctctgagctccttttaccaggaccagtgttcattgaacrtagtttttcttttccttgatgaatgtggacaacaggcggccagagggcagtgagcacaggacaggcaggggactgggcagggtggggacgagcctccctg

SEQ ID NO: 41263 - DNA, 201 bp, Homo sapiens
ctgcctgcctgtcccctccctccgggcagccaaggaggctgtgagctccacagggaagtggccggggctgagggagaggctgggcccaggcaacgcccccytcagccccttcccactgggcatttccatggctgcccgtggcatgcccaggacgatgctgtcctgtgaaacagaagagagggagaaggcgcagccacacgc

SEQ ID NO: 41264 - DNA, 201 bp, Homo sapiens
gagcaggaaaagcctcttgtggggctgaggagctggacttggagctgcaggcggggttttggagggggtcctgggctgggggaccagggtggggcgccctrgagggctcactggaggggccctcgcccagcctgttgaggtttgcgattcttgtttcctggttcgagtcttggcaagtgggcctcatctgcatctttagga

SEQ ID NO: 41265 - DNA, 201 bp, Homo sapiens; identical to SEQ ID NO: 29879

SEQ ID NO: 41266 - DNA, 201 bp, Homo sapiens
tctgtaagccagatctgctgtttaacctcagcttccccatctgacaaatgggaccaacactattgcctgactgcttgggtgatccctggagcactttgcaygatgcctggcccaccgcaggccctcagtctgcattgggactgtggggggatccagtgcaagggctcaaagcaccagggcaggcaaagggcagagctggcc

SEQ ID NO: 41267 - DNA, 201 bp, Homo sapiens; identical to SEQ ID NO: 29881

SEQ ID NO: 41268 - DNA, 201 bp, Homo sapiens
caaggacacctacttcgtgacaggcatcgtcagctggggagagggctgtgcccgtaaggggaagtacgggatctacaccaaggtcaccgccttcctcaagyggatcgacaggtccatgaaaaccaggggcttgcccaaggccaagagccatgccccggaggtcataacgtcctctccattaaagtgagatcccactcaagg

SEQ ID NO: 41269 - DNA, 201 bp, Homo sapiens
tccatttctccagctgtccccagagccaacgtgcctctcctttgcagtcacacggaagctctgcagcctggacaacggggactgtgaccagttctgccacraggaacagaactctgtggtgtgctcctgcgcccgcgggtacaccctggctgacaacggcaaggcctgcattcccacaggtaggaggcacgttgggccaca

SEQ ID NO: 41270 - DNA, 201 bp, Homo sapiens
cagtctgcattgggactgtggggggatccagtgcaagggctcaaagcaccagggcaggcaaagggcagagctggcccgaggaactggagctaaggtgcggrgctgggataggagtcaggggacgctcaggctctgagctccttttaccaggaccagtgttcattgaacgtagtttttcttttccttgatgaatgtggacaa

SEQ ID NO: 41271 - DNA, 201 bp, Homo sapiens
ccgcaacagctgcaagctgtccagcagcttcatcatcacccagaacatgttctgtgccggctacgacaccaagcaggaggatgcctgccagggggacagcrggggcccgcacgtcacccgcttcaaggacacctacttcgtgacaggcatcgtcagctggggagagggctgtgcccgtaaggggaagtacgggatctacac

SEQ ID NO: 41272 - DNA, 201 bp, Homo sapiens
gccagggggacagcgggggcccgcacgtcacccgcttcaaggacacctacttcgtgacaggcatcgtcagctggggagagggctgtgcccgtaaggggaastacgggatctacaccaaggtcaccgccttcctcaagtggatcgacaggtccatgaaaaccaggggcttgcccaaggccaagagccatgccccggaggtca

SEQ ID NO: 41273 - DNA, 201 bp, Homo sapiens
gcaagctgtccagcagcttcatcatcacccagaacatgttctgtgccggctacgacaccaagcaggaggatgcctgccagggggacagcgggggcccgcasgtcacccgcttcaaggacacctacttcgtgacaggcatcgtcagctggggagagggctgtgcccgtaaggggaagtacgggatctacaccaaggtcaccg

SEQ ID NO: 41274 - DNA, 201 bp, Homo sapiens
ggtggaggtggtcatcaagcacaaccggttcacaaaggagacctatgacttcgacatcgccgtgctccggctcaagacccccatcaccttccgcatgaacrtggcgcctgcctgcctccccgagcgtgactgggccgagtccacgctgatgacgcagaagacggggattgtgagcggcttcgggcgcacccacgagaaggg

SEQ ID NO: 41275 - DNA, 201 bp, Homo sapiens
ggagcaggaggagggcggtgaggcggtgcacgaggtggaggtggtcatcaagcacaaccggttcacaaaggagacctatgacttcgacatcgccgtgctcyggctcaagacccccatcaccttccgcatgaacgtggcgcctgcctgcctccccgagcgtgactgggccgagtccacgctgatgacgcagaagacggggat

SEQ ID NO: 41276 - DNA, 201 bp, Homo sapiens
agatgcattcatcccatttcgcccggcccgtttgtctctgtccatccgtcaagctttcttgacttcttggtgcattttcaggcaaaccgcagacgccaacrctcccctcgctgcctgggttgctgcctggcgtccattgttcacaggcggtcacctgaggggaggccaacgctcggacagctgcgctcacctgcagatccg

SEQ ID NO: 41277 - DNA, 201 bp, Homo sapiens
gggacacagtcaatgtaaaggaggggtctggagtgtaggagactgtcacttcatctctccatttccctaaagtaaactcatatgggcagccacagacacaygcgaacacatgcatacacacctatgcctcagtgacacatgttagtgagtgctggccatgtgctaggcatcgtgctggattttagtgatacagtgaagagc

SEQ ID NO: 41278 - DNA, 201 bp, Homo sapiens
tatatggctgaaagttctgagaattggttactatattaaggattataaaaatcttctaggttgtttttttaaaaatctgtgtgccagaagatttttaaacyttcataagataggcacacttttgtttgaaagctttggctgaatctgttttattctgttttccagagaagccatttgaagcagaatccaaaccatgaattg

SEQ ID NO: 41279 - DNA, 201 bp, Homo sapiens
caaccattccccgctcaacccctgcccaccctggtccatggaaaagttgtcattcatgaaatcagtctctgtgtcaaaacggttggggacagctgatgtastttatatggaataacaaatctgaataatatgactctgtcgtggaaactttaaagacctataagagagtggtctgaacagaacttgggaaatctgaagcga

SEQ ID NO: 41280 - DNA, 201 bp, Homo sapiens
cacactatcaaacttgtctccagggagctctgccaattttaccccacacttgaaaaaagaatcccaattttttgtcacctccacaacacagggaaataatrgtcccagaatgtttaaaatttgatatgaaaaatttctaaaactcctagtggttttttcacttttcttagtaataaattaaacttttgtatatatttattg

SEQ ID NO: 41281 - DNA, 201 bp, Homo sapiens
cctccgcctcctgcctcagcttcccgagtagctgggattaccgtacccagctaatttttgtagttttagtagagacggagtttcaccacattggccaggcyggtctcaaactcctgacctcaggtgatccacctgccttggcctcccaaagtgctgggattacaggtgtgagccactgcacctggcctagtgatagtcctg

SEQ ID NO: 41282 - DNA, 201 bp, Homo sapiens
ataacttaaaaacacgcatctgctgtatttagcaaataaatctatacatcacaggtgcagtggaagcaaacatgaaatttgaaacattttctctttaaaawcttcatttaaaaaatactgtattgttttccaattccagatcaccttttttttgttgttgttgttgttgtttttttgagatggaatttcgctcttgttacc

SEQ ID NO: 41283 - DNA, 201 bp, Homo sapiens
ctcagtaagtgttagtcttttcttccttctatcctattgtagacctaaaggggaactggaagagcctaaggtgggcacaaatgtgtcaggcatagaggatracttaaaaacacgcatctgctgtatttagcaaataaatctatacatcacaggtgcagtggaagcaaacatgaaatttgaaacattttctctttaaaatct

SEQ ID NO: 41284 - DNA, 201 bp, Homo sapiens
aaatagatgtgcatttgtatcctggccccatcttgtagcaagtgtgtggcctgagtgagttgtttaacctgtctgagatttagcattctcatctgagcctraggaaaatagtcatctcccttgcatgtacatagtctaatacctggaactcagtaagtgttagtcttttcttccttctatcctattgtagacctaaagggg

SEQ ID NO: 41285 - DNA, 201 bp, Homo sapiens
cactgaggactgataatttaatcctgcagtgaaaatcactttatcccaccaaattttaagaacgaaatcaactaagaaggaaggggatacaaaagggatarttttcaatgatagagatgaagaaatgaaggtagagggaaatgtacacacagaaatctaataaaccaatcctaggctgacaggcagcaagttcagcttggt

SEQ ID NO: 41286 - DNA, 201 bp, Homo sapiens
tgtgtgtgtatacacatatgtgttctaacttaggtgtgtaaccctttgtagtttgatgtgggatctatcagtgaacagactttacacctgaaaatttcccrttagaacagtaattctttaatttttaggagtacattgctaataatcaaatgccactgaggactgataatttaatcctgcagtgaaaatcactttatccca

SEQ ID NO: 41287 - DNA, 201 bp, Homo sapiens
acgtttattgtagtccatgctttaagagtactggccagaaagggaagaaataatgcaggcaacatcacagctgccttcaagcattttaaacatgtgaattmccctctcaagggtaacgaacagagcctactgctaaattattttgccctcttacaggactccagaaggcaaatggcatgcttcaaaagtattgagaattga

SEQ ID NO: 41288 - DNA, 201 bp, Homo sapiens
aaatggaaattaaatgtcatcagaagaaataaacacagctgtttcactgaaagacaagtaactagtaaaattgtggaagttaaaaaattttttcagataayctgtgaaaacagttactatcaaacactggtcaacagcacatcattgtataaggtaatgcttttataatattttaactttaagacttgatggaaaagataa

SEQ ID NO: 41289 - DNA, 201 bp, Homo sapiens
atgaagtgagtaaccctttcttttcaaaatgtatttcacagccctcttgtcctttgttcagcaactcaaatatgcagtaatctgaaaggtcagataatcascacatccttttctttcctactcttcctatgacatgaaatacattctatgttatggaacaaaataagtttatctctctctgcttattttcttagtgacctt

SEQ ID NO: 41290 - DNA, 201 bp, Homo sapiens
gcaactcaaatatgcagtaatctgaaaggtcagataatcaccacatccttttctttcctactcttcctatgacatgaaatacattctatgttatggaacaraataagtttatctctctctgcttattttcttagtgaccttaatgaaaggagattactttgataggatttccttttaggggatccttaccaatgacaagtg

SEQ ID NO: 41291 - DNA, 201 bp, Homo sapiens
ctgtggacaaaaatgagtggttttcataaccaggatgggctgggcctgcagcaggaaagtgtggtcacagctttgggtcagttggcctcagtgttaacccyagccttggagctcctggatggcaggtgcagtgtgttgttgattgtttcagtgttcccagagcagtgtcctgcacatggagtgtcatcagtcctctagcat

SEQ ID NO: 41292 - DNA, 201 bp, Homo sapiens
tgtcctttgttcagcaactcaaatatgcagtaatctgaaaggtcagataatcaccacatccttttctttcctactcttcctatgacatgaaatacattctwtgttatggaacaaaataagtttatctctctctgcttattttcttagtgaccttaatgaaaggagattactttgataggatttccttttaggggatcctta

SEQ ID NO: 41293 - DNA, 201 bp, Homo sapiens
taacaatcatatatattatatataacatcatattaaaaacactgggtggctgatgtgtattttgggctagtttaaattataattataatggacatattttrtaattatagtggccataccctaggtggacgcattatgcagaaatgtattgccaagatctaagctggaaaagaaggtccatgagaaggccattgagggtat

SEQ ID NO: 41294 - DNA, 201 bp, Homo sapiens
tttcttttagaagcacttctagagtgagtcctgatcattatcaaccatgctgttgagagcagagtgagctaccactgtgaaaccttggtagcacttctgtrgttttgcaccaaatcaggtcatttttgtttgtttttatacataggaactcccaggcatcagaaaaaaattaaataactcttttgataaaaatcagtacat

SEQ ID NO: 41295 - DNA, 201 bp, Homo sapiens
ttacatcataagaaaattatgccctttaaaaaagtgtgctcatttaattgtcttacatgttgatgcctgttttgtcactgacacagtgacaaccctagtgraagcactagctcttacttaactagtagatagttatatttgatagcagtttaagaaaagtttgagggggaacctacttactgattgataactggttttatt

SEQ ID NO: 41296 - DNA, 201 bp, Homo sapiens
gcccctctgtctcatgatgccaagcagagaatgaaaacagaactcattcacctgctctcacagtcatattccatcccatgtggaaatcggggggcctgagrcttggagatacagatgctgagagtgaggctcatggggaggccatcaggacaacccctgcacccagcactgcacccagagcagccagaggggagtttgcag

SEQ ID NO: 41297 - DNA, 201 bp, Homo sapiens
gatacagacatattcaaatatagcataattagtaagcagtatttactgcagatgtgtgtgtatacacatatgtgttctaacttaggtgtgtaaccctttgyagtttgatgtgggatctatcagtgaacagactttacacctgaaaatttcccgttagaacagtaattctttaatttttaggagtacattgctaataatcaa

SEQ ID NO: 41298 - DNA, 201 bp, Homo sapiens
tcaaaaatcagaactttagttgccaacttttaccaggaaaaaacgtaaggctcaactgctctgctttgctgaatgaagaggatgtaatttattggatgttyggggaagaaaatggatcggatcctaatatacatgaagagaaagaaatgagaattatgtatgtatgtgtaatatatatgtcatgatatataccatataaca

SEQ ID NO: 41299 - DNA, 201 bp, Homo sapiens
ataatgcaggcaacatcacagctgccttcaagcattttaaacatgtgaattcccctctcaagggtaacgaacagagcctactgctaaattattttgccctyttacaggactccagaaggcaaatggcatgcttcaaaagtattgagaattgaaaatattggtgaaagcaatctaaatgttttatataattgcactgtggcc

SEQ ID NO: 41300 - DNA, 201 bp, Homo sapiens
gagacagcattgtgcccacctagataatccagggtgatccccctatctcaagatccttaatttaatcacacctagaggttccttttgccatgtaacatatygtattcacaggaactcaggagtaggatgtgggaaacttcagggtctattattctgcctgccacagcccagaacctgggaaacccataactgaattttaaa

SEQ ID NO: 41301 - DNA, 201 bp, Homo sapiens
cttggagggggagcctcatgaaacagtgacctgctgggggaagggatctccactgggagagtgtaaggaacactgatgtgctggtgggaggggagggatgmtggacccaggctgtgtgtgatggaggaacagaatcctgggacattaaaggtatttaattaaacctcacccagtgaagatattcatcataaggcacagcca

SEQ ID NO: 41302 - DNA, 201 bp, Homo sapiens
tctttttggcaggaaatgaaaatctgtatgaataaacctcacatgagtcagctctctcttatatatgaaatttgagtaaattgtggaatcttttgttgttkaatttacattttcactttacaagtatttagtgaagatatctatactcaataaactgtacttagcacaaggaggcagggaagcaaggaagtatgagatgaa

SEQ ID NO: 41303 - DNA, 201 bp, Homo sapiens
caattttgtgggttgcctgtttatttttttctgttttcttcagttggtataccttttacctgttgaattttaaaagctcttatacaccatggaatactatycagccataaaaaagcatgagttcatgtcttttgtagggacatggatgaagctggaaaccatcattctcagaaaactaacacaggaatagaaaaccaaaca

SEQ ID NO: 41304 - DNA, 201 bp, Homo sapiens
gatagttttcaatgatagagatgaagaaatgaaggtagagggaaatgtacacacagaaatctaataaaccaatcctaggctgacaggcagcaagttcagcytggtgagcagcctcagaagtgggggctggtgtttatcccctggtgtctgtggacaaaaatgagtggttttcataaccaggatgggctgggcctgcagcag

SEQ ID NO: 41305 - DNA, 201 bp, Homo sapiens
gagagaggtgtggagagacagggtagcagataggagatgctaagaaaaatgaggtgtcccagagtggatattggagactgatcactatgagagtaaagtgwtgaggagagaagcagctttgacaatggccttgaaaataaatgggattctacatggaagcaggttgttttagacacccaggagcatagaagatacagacat

SEQ ID NO: 41306 - DNA, 201 bp, Homo sapiens
tcattaaaccttaaagttccaaaatagtctccttcaactccatgtctcatatccaggtcacgctgctgcaagaggtaggatcccatggccttgggcagctrtgctcctgtggctttgcagggtacatctttcttcctggtttctttcatgggctggtgttgagtttctgggctttttcaagtgcatggtgcaagctgtcag

SEQ ID NO: 41307 - DNA, 201 bp, Homo sapiens
atttgcagaatggtgtgcaaataccagctaatttttgtatactgagatcttaatatgtttcatattgaaactcagagttaacttgtcagtttgctgagccrtctcctgataactttgtctcttggtagatattgaatattttttttaaagtggtgctttttataaggttacatcagtcttaatcagagtgacataaaggaa

SEQ ID NO: 41308 - DNA, 201 bp, Homo sapiens
tattttcttctttcagtcttcattttgtaaatctcctacattgagtgtaaattgctttggaaatcagaaaaactttaaaaagaaagaaacttaagagttayggaaaagcaaaaatattgatgttaaacataacaattaaaaacccttaaaattcttacatgtgagacatttaatatttatattcttctatgcctattttat

SEQ ID NO: 41309 - DNA, 201 bp, Homo sapiens
ttctgagaattggttactatattaaggattataaaaatcttctaggttgtttttttaaaaatctgtgtgccagaagatttttaaaccttcataagataggmacacttttgtttgaaagctttggctgaatctgttttattctgttttccagagaagccatttgaagcagaatccaaaccatgaattgtagagaattaccct

SEQ ID NO: 41310 - DNA, 201 bp, Homo sapiens
tatattagacagcttaaaaaaattagagtgagacagaatatacaaaaaagagactggctagaccaaggagctcaagtaggcttcatagtagatgtcaaatrccaattttaatttattagcagtgattgcctagagttttttttttttatttgagaaggattctgagacttcattctttagcgttccatgattgaatagcaa

SEQ ID NO: 41311 - DNA, 201 bp, Homo sapiens
tagcagtaattctgcaagcctgtgcagctgccgagagcttcactggattttcttgtttctatgagactctttctgttaattacaaaccaaagcaaattctkccatggaatgaaatggccacctatcttagctcaccctagaaaggatccttcttaagtacgcttgtagttcaaaaatttctctttattttctctgtacttt

SEQ ID NO: 41312 - DNA, 201 bp, Homo sapiens
ttcagaggctgcagggcctcagcctcaggatgcatttaatgtatcctggccacagttgcagccaacggttcttgaaagctcggtaaggccctgcaacgcasagcctgcttatgtggatctatttatgggaacttcttaaaaggaccccagaatagctctttatctttcacaagagacacaaattctaattgagttaattat

SEQ ID NO: 41313 - DNA, 201 bp, Homo sapiens
tttaatgagtaacatttttagattttctctgaagtctttagaacaaacatttaaaatctggtgtcaaattattctggatactgatgcttaaaaaaaaaaaacaaatgtttgattattaccatcattcatgtattaatctaatatttattggatactattcctgtgccaagttgtgaactgggcatcaaagatataacagtg

SEQ ID NO: 41314 - DNA, 201 bp, Homo sapiens
aacatactttccaagatatcatgcgttaaaaagcatttcaaaagtagattgtgcagatgtgccaatggatcagatgatcacctagattcaaaattatgtakattttatggatgtaattcattcaataattcagcaaataacaaagaaacaagcagacataaagtgaaaatatgacagttagtgataagtgctatgaataga

SEQ ID NO: 41315 - DNA, 201 bp, Homo sapiens
cttcagaggctgcagggcctcagcctcaggatgcatttaatgtatcctggccacagttgcagccaacggttcttgaaagctcggtaaggccctgcaacgcmgagcctgcttatgtggatctatttatgggaacttcttaaaaggaccccagaatagctctttatctttcacaagagacacaaattctaattgagttaatta

SEQ ID NO: 41316 - DNA, 201 bp, Homo sapiens
gggatcactctttattctctggccaggttattttgtctgtgagttttgttattctttttttgttatgctatttttcttctgctaatgtgttgtctgtaacyttttccaagttgttgcatgcatctgctttgcttttaaaaatagattggatgaagctagaagagagagtggtatcatgttttaattacccaattaggagca

SEQ ID NO: 41317 - DNA, 201 bp, Homo sapiens
tctttccctgtacattatgtgtttctgtgaattacttttagagaaaggtcagtttctcagggtgggacccataaacaagggcaactgggcagagccagggrttcaggtgactgtttggaccctctggaagggctttttactgtgctgccttgggagacagagtggtcagcttggaactgaccttaagcctaggtcacccaa

SEQ ID NO: 41318 - DNA, 201 bp, Homo sapiens
ccttatacttaaaggtgaccagaagtcctcaagtttccagataattactaatttaaaggaagtcagtctaattcattgcacttgattttgttttgcatgtrtgtgtttgcaggaaaaaaaccttcacagagttcaaaacccaaaatgtctatgaaattatacttcagtagccccccttccagcctggtcctggatctatga

SEQ ID NO: 41319 - DNA, 201 bp, Homo sapiens
tgtgaactcgggaggcggagcttgcagtgagtcgggatcgcgccgctgcgctccagcctgggcgacaaagcaagactccgtctcaaaaaaaaaaaaaaaaragagagaaaaagaaccccgagctggaagccaaatgatctggaatcatgtctcctagacctgccagtttttatctgctactatgtcgacccgctggctcta

SEQ ID NO: 41320 - DNA, 201 bp, Homo sapiens
ctttccgagtcttaatcttcagaaacagtgaacgccaaaaagaactcaagatattctggggactgagcatatgaacctgttcataacaaaggctgtgactmgaaataattaactttgtcaaaatcctgctcacaatttgaagatgaaacttgtcattaggttggcgggaatgagactaaagattgcgctgtgggctgtggt

SEQ ID NO: 41321 - DNA, 201 bp, Homo sapiens
attgattttcttggccttacagatgagaagccagattccacacaaattattttgtttgttagagtttaagcgtgtgtgtgtgtgtgtatgttatgccccamgatcattttctcctctttgcatttggttgttttatcatctcacaggctgagtaaaacgactatgcatggaacactgtagaagaaaaattatattaaaaaa

SEQ ID NO: 41322 - DNA, 201 bp, Homo sapiens
agtgatggaaacacctgcagagtgatggagacgggcttggacataggcatgtgccatttggggctgttgcagttggagagcttccttgagaaggcaaataytgagccaagttgaaaggactctagggacctggcatctgggataagtggggagggtggcccaggtagcacaggcataggcagatttggggggaagcataag

SEQ ID NO: 41323 - DNA, 201 bp, Homo sapiens
aaattagccaggcatggtggcatgcatctgtaatcccagctactcgggaggctgaggcaggagaatcccttgaacctgggaggcagaggttgcagtgagcrgagattgtgccactgcactccagcctgggcgacagagtgagactctatctcaaaaaaaaaaaagaaaaaaaagaaaaggcagggtccctgccttcaggga

SEQ ID NO: 41324 - DNA, 201 bp, Homo sapiens
aacatgtatgaaatagagttgtgactcaagcaagggtttttgaagtagtgttctctctctctctctgtctctcgctgtttctctctctctgcatgtgtgtraaagagagagatgaaagaatattgatgaaagcagctacagtgctcatattgccccatgctctacttcccagcatatattaataatgataatcatgccaac

SEQ ID NO: 41325 - DNA, 201 bp, Homo sapiens
aattttttcattcttcaaaactgtgtaggaattgagagtccacttagttggggttgtgaccacaccactagttcaaatatgatggtcaaaatcttcattcyggtgctcctctacttggctaaataaacctttctttttggcaggaaatgaaaatctgtatgaataaacctcacatgagtcagctctctcttatatatgaaa

SEQ ID NO: 41326 - DNA, 201 bp, Homo sapiens
tggagaggagcacacctttgctgtggagattttgcccagggtgttggagaaacattttgggtataagttatgcatatttgaaagggatgtagtgcctggargaggtaagagggaatgccagatagaaaaatattcaagatagtttctttttaaaaaatgaatgagctagcccccagagagctatcccattttccttaaaaa

SEQ ID NO: 41327 - DNA, 201 bp, Homo sapiens
gcacacttttgtttgaaagctttggctgaatctgttttattctgttttccagagaagccatttgaagcagaatccaaaccatgaattgtagagaattaccsttgaccctttgggtgcttatatctgtaagcactgcaggtaagtgattatacatactctcaaacatatttcatgagtaattgaggaagaatgtcaaagttt

SEQ ID NO: 41328 - DNA, 201 bp, Homo sapiens
acgtgatgcaaaataaccgatgccctacaaaaagggcgcatctttaagagttttaatgccagtgcttaattcgaatgaggggattttaagtgtctgaagasgcattttctagggaccagtgggtgactgagtaactgaaatgctgctttcactccctaacaccatggatctggttgtgcataggatgtgggaggaggggct

SEQ ID NO: 41329 - DNA, 201 bp, Homo sapiens
taggggacataatagagccttccaagcgtaaatatgattcattattgaatgacactggatacacatttcatatttactgaataacattacaaaactaagaraagagtgccattttttgaatgttgccacttttaacctgacttaaaagtggcaacattttaaagttcaagagacagtggaactgcctgtggtctgtagact

SEQ ID NO: 41330 - DNA, 201 bp, Homo sapiens
ccctagcaaagattctacatgagggttccacccctgcagcaaacttttgcctggacatccagcatttccatacatcctctgaaacctaggcgtaggttccyaaacctcaattcttgacttttgtgcacctgcagcctcaacaccatgtggaaggtgccaaggtttggggcttgcaccctctgaagccacagcctgacctgg

SEQ ID NO: 41331 - DNA, 201 bp, Homo sapiens
ggagcatggtctttgttatttaggagacattttcaccttcttgggggtctttctgagcatagaaattgtgatggtggtagaattaaatgatatgagtaaamcagggtgagattttctttccactcctggaatgaggacacctttgggctcttggccttctaaggaacttaaagacttaagttcctttagtgcccagatcta

SEQ ID NO: 41332 - DNA, 201 bp, Homo sapiens
aaaatagattggatgaagctagaagagagagtggtatcatgttttaattacccaattaggagcatggtctttgttatttaggagacattttcaccttcttrggggtctttctgagcatagaaattgtgatggtggtagaattaaatgatatgagtaaaccagggtgagattttctttccactcctggaatgaggacacctt

SEQ ID NO: 41333 - DNA, 201 bp, Homo sapiens
gtaataaaattagcatatttatattaaaagaattgcttaaaataaggaatttgaaagcaattaatagttgaaaagctaatttttcataggtaagagcaaasctatattgtatgtaatataaacccatatttgatgaaatcgtcttcccagtttgttgcaatccattacatcataagaaaattatgccctttaaaaaagtgt

SEQ ID NO: 41334 - DNA, 201 bp, Homo sapiens
agttttcaaattcctttttttgaatactttactctgtcaattctcaagtcccctaaaccttttaaaacctgaatttaaaatatattgtaataaaattagcrtatttatattaaaagaattgcttaaaataaggaatttgaaagcaattaatagttgaaaagctaatttttcataggtaagagcaaagctatattgtatgta

SEQ ID NO: 41335 - DNA, 201 bp, Homo sapiens
ctccagactaaaggcaggaatgtggagtcactcagtggaatgtgtcagcacgtgggttggcaactactgcattagtgttagcagtaaaaatggacaagcaygtgatgatggacaacactggtaagatttcttgattattttcttttcctttttccctttcttttctagcagacatggctgatatcccaggccacgtcttca

SEQ ID NO: 41336 - DNA, 201 bp, Homo sapiens
tgcctcagcagggtaccaggctcagggtccttgtgtgtgctcattcattcattgcctcctgaacttggcaagcaggccattgatagccctgatctgtgggmtcttaaagtttttcagtgctcacctgatggagggccccagggtcgccatccctttcctccaccaaagtagcacagcccagggccttcagcccagtagctg

SEQ ID NO: 41337 - DNA, 201 bp, Homo sapiens
gcggtggctcacgcctgtaatcccagcactttgagagtccgagacgggcagatcacgaggtcaggagatcgagaccatcctggctaacagagtgaaacccygtctctactaaaaatacaaaaaattagccgggcgtggtggtaggcgcctgtagtcccagctactcgggaggctgaggcaggagaatggcgtgtgaactcg

SEQ ID NO: 41338 - DNA, 201 bp, Homo sapiens
atatataatttgttttttcaatgattctatactcattacttacgacattcacttaagtttgtacttaaataaaattttatttacacatgaattaaaagagycaatcttacctcctagatggaaaaacatatgatgcttttgtgtcttacctaaaagaatgccgacctgaaaatggagaggagcacacctttgctgtggaga
